United States Patent Application Publication US 2021/0199660 A1 - sequence listing, part 8

SEQ ID NO: 101031 - DNA, 120 bp, Artificial Sequence
  ENSG00000092148_75 (sequence is synthesized)
ctcaagctttttcttttcctttttaatgatgcctgcactatcaagagtattctagtgttctctctttgtttggcatataatcatgcaccaaactttttatttctttaaggtgggagtata

SEQ ID NO: 101032 - DNA, 120 bp, Artificial Sequence
  ENSG00000092148_76 (sequence is synthesized)
tttttatttcctaaatgccatactatgaagatcaaagtcttaagtgtgtttgcagctcaaaaataaagatgtattaaggggggaaaacctggtctaagtgcaaggcacacttacagcgag

SEQ ID NO: 101033 - DNA, 120 bp, Artificial Sequence
  ENSG00000092148_77 (sequence is synthesized)
ttttactttcggttgtattttctttgtatattataaacatttatttaacttgttgccgtttgaagtaaaaaatttccaaaatgtatgctcaacaataatcattaaaatgtttgcagcgta

SEQ ID NO: 101034 - DNA, 120 bp, Artificial Sequence
  ENSG00000092148_78 (sequence is synthesized)
agaaatccagataacaaagtggcaccccttcgatattctcccctatccctgtgcataattatgtaattatcagcttggttcttggtgaaacctgaataaatgcttgttgaatgggtaaaa

SEQ ID NO: 101035 - DNA, 120 bp, Artificial Sequence
  ENSG00000092148_79 (sequence is synthesized)
tttggtatgatatctgtacgttaaacctggcggataaggaaagttgaaaaactgcattaagcactcttacgtccaaacgtacttaggagtcttttttaattgctaggaggacactatgaa

SEQ ID NO: 101036 - DNA, 120 bp, Artificial Sequence
  ENSG00000092148_80 (sequence is synthesized)
aatttggttctagcagatgtaaaggaagaaaaatttaagcccaagctgttcagtcccggaatttaaaggacttttctccctttacttttcaaatttaagcaaagagacttttaaaaaacc

SEQ ID NO: 101037 - DNA, 120 bp, Artificial Sequence
  ENSG00000092148_81 (sequence is synthesized)
gaatgacacttagggaaccagcccaatgtgtatcttcactgcattaaaaactgtggtaggtaaacatgaagaggggttttcctgttctgtaggcagaagccttctcctctggcagagcat

SEQ ID NO: 101038 - DNA, 120 bp, Artificial Sequence
  ENSG00000092148_82 (sequence is synthesized)
ctttttcataagaggatgtcagtccacctccttaggggttaggtcttgtgccattaatgagcaacaaagaagatctccactcttgaggtggcaaagtgcttgttctgcttgagggcttct

SEQ ID NO: 101039 - DNA, 120 bp, Artificial Sequence
  ENSG00000092148_83 (sequence is synthesized)
ttggaaataatcacaaattatatatgaattaacttgaatatcttcatgtttagaatcatgtacagagaaatgaaggattctgataaagaaaaggaaaatggaaaaatggtaagttatttt

SEQ ID NO: 101040 - DNA, 120 bp, Artificial Sequence
  ENSG00000092148_84 (sequence is synthesized)
agaacattggtttactcttggctatttagttaaaagaagaaagatagtaaaactaacacagtattgcagttgaacgttgaagggaataatgactaacatggaattctttagattagacca

SEQ ID NO: 101041 - DNA, 120 bp, Artificial Sequence
  ENSG00000092148_85 (sequence is synthesized)
gaaaaaaagaaaaaaaaaaagaatctttgatagaaaacagacatttgttcatagttctattatgtttatagttaataaatccaaatctcagttgttttagggtatatcattttttacaat

SEQ ID NO: 101042 - DNA, 120 bp, Artificial Sequence
  ENSG00000092148_86 (sequence is synthesized)
tttagatactttcataatgatgcttttattatgttttctcctgatattttaaacttttgtttaaagagaattattctctcttcttataaatatgaaatcttcgggccaggcacagtagct

SEQ ID NO: 101043 - DNA, 120 bp, Artificial Sequence
  ENSG00000092148_87 (sequence is synthesized)
ttttctgaagttggctaatgaaaaagttttcagtgacacttttgttaataggggttaatatattcaggtcatggctgaaagggggcatatatgggtcaaataattagacatgtatctctt

SEQ ID NO: 101044 - DNA, 120 bp, Artificial Sequence
  ENSG00000092148_88 (sequence is synthesized)
ccagtaaaaacttctgttataatccctttagtcctctttttttcagtttttatgaagaacagtttgtcagcatcttcatttatgcaggacaatgtaatttgacccagtctccatcgaagg

SEQ ID NO: 101045 - DNA, 120 bp, Artificial Sequence
  ENSG00000092148_89 (sequence is synthesized)
caagagattataagaaggaaggagataaaaatgatgcaagttgttttgaacttccttatgtgctagataatatggataacatgaaagatgccacatacattattccgtagtaaataggca

SEQ ID NO: 101046 - DNA, 120 bp, Artificial Sequence
  ENSG00000092148_90 (sequence is synthesized)
ttatcttaagtagtcattgtttttaagtaacctaccaggtcacatatctaagccccgtttttcactgattgacttaattctgtttttcctcgtaagatcttttacatgttgtaaaggttt

SEQ ID NO: 101047 - DNA, 120 bp, Artificial Sequence
  ENSG00000092148_91 (sequence is synthesized)
gtttttttggttattgttttttaaatagccccacatggttatccatttatattatgattttgtaattcaggtttagtttatggttgtcctttatcacttgtttttgtcatgcttgtgtct

SEQ ID NO: 101048 - DNA, 120 bp, Artificial Sequence
  ENSG00000092148_92 (sequence is synthesized)
gtgctcatcttgtatgtggtggcagaacgcaacagttgtcccttttgaattttacttttgttttgtaaaaacctaaaatgcaaagttcctttgttatgctttcttaattgtgttgacata

SEQ ID NO: 101049 - DNA, 120 bp, Artificial Sequence
  ENSG00000092148_93 (sequence is synthesized)
agcgattctcctgcctcggcctcttcagtagctgggactataggctgtgccaccacacctggctttataatgtaattttaaggaaatgaacctaaagttaagtcagatatgatttactat

SEQ ID NO: 101050 - DNA, 120 bp, Artificial Sequence
  ENSG00000092148_94 (sequence is synthesized)
atgaagatacaagagtatttcaagttgaaggggttagccgtgtttggggtagtgtaccagtaacctccaaaaactagacatttggtttaattttgtgactgttttgtttttaaacattag

SEQ ID NO: 101051 - DNA, 120 bp, Artificial Sequence
  ENSG00000092148_95 (sequence is synthesized)
tttgcttttcattctatagccagattttcttgttgttacaagggaaaattgtcctggttccttcttgaaactagtgagggaggcatagtgagatggaaagaatgggctgtggcatcagag

SEQ ID NO: 101052 - DNA, 120 bp, Artificial Sequence
  ENSG00000092148_96 (sequence is synthesized)
acttgggttcagattcttggtctgttgtgttcattagcctctgagagccttactttcttcccctgtaaaatggcagtagtctttttttcttttctgttttttcatatgaagtcttgctct

SEQ ID NO: 101053 - DNA, 120 bp, Artificial Sequence
  ENSG00000092148_97 (sequence is synthesized)
ttacagctgtggatctcaagccaagtggtgaagatgaggtaaaaagtttgcttttaatatagttgtaagttctgacatatcctcttagcaaggccagttgtactagacactcctgaaata

SEQ ID NO: 101054 - DNA, 120 bp, Artificial Sequence
  ENSG00000092148_98 (sequence is synthesized)
tactattttccaagatcaacaaaattatttatattccccaaatcaaatgacagattctctaaagaactttaattcagtgagtatcataaagtaagtgagaaagcagtggtgtctcacagt

SEQ ID NO: 101055 - DNA, 120 bp, Artificial Sequence
  ENSG00000092199_0 (sequence is synthesized)
ttgtgaagagacgaagactgagcggttgtggccgcgttgccgacctccagcagcagtcggcttctctacgcagaacccgggagtaggagactcagaatcgaatctcttctccctcccctt

SEQ ID NO: 101056 - DNA, 120 bp, Artificial Sequence
  ENSG00000092199_1 (sequence is synthesized)
cttgtgagatttttttgatcttcagctacattttcggctttgtgagaaaccttaccatcaaacacgatggccagcaacgttaccaacaagacagatcctcgctccatgaactcccgtgta

SEQ ID NO: 101057 - DNA, 120 bp, Artificial Sequence
  ENSG00000092199_2 (sequence is synthesized)
ttcattgggaatctcaacactcttgtggtcaagaaatctgatgtggaggcaatcttttcgaagtatggcaaaattgtgggctgctctgttcataagggctttgccttcgttcagtatgtt

SEQ ID NO: 101058 - DNA, 120 bp, Artificial Sequence
  ENSG00000092199_3 (sequence is synthesized)
aatgagagaaatgcccgggctgctgtagcaggagaggatggcagaatgattgctggccaggttttagatattaacctggctgcagagccaaaagtgaaccgaggaaaagcaggtgtgaaa

SEQ ID NO: 101059 - DNA, 120 bp, Artificial Sequence
  ENSG00000092199_4 (sequence is synthesized)
cgatctgcagcggagatgtacgggtcagtaacagaacacccttctccgtcccctctactcagctcctcttttgacttggactatgactttcaacgggactattatgataggatgtacagt

SEQ ID NO: 101060 - DNA, 120 bp, Artificial Sequence
  ENSG00000092199_5 (sequence is synthesized)
tacccagcacgtgtacctcctcctcctcctattgctcgggctgtagtgccctcgaaacgtcagcgtgtatcaggaaacacttcacgaaggggcaaaagtggcttcaattctaagagtgga

SEQ ID NO: 101061 - DNA, 120 bp, Artificial Sequence
  ENSG00000092199_6 (sequence is synthesized)
cagcggggatcttccaagtctggaaagttgaaaggagatgaccttcaggccattaagaaggagctgacccagataaaacaaaaagtggattctctcctggaaaacctggaaaaaattgaa

SEQ ID NO: 101062 - DNA, 120 bp, Artificial Sequence
  ENSG00000092199_7 (sequence is synthesized)
ataagtcagaagaggagcagagcagcagctccgtgaagaaagatgagactaatgtgaagatggagtctgaggggggtgcagatgactctgctgaggagggggacctactggatgatgatg

SEQ ID NO: 101063 - DNA, 120 bp, Artificial Sequence
  ENSG00000092199_8 (sequence is synthesized)
ataatgaagatcggggggatgaccagctggagttgatcaaggatgatgaaaaagaggctgaggaaggagaggatgacagagacagcgccaatggcgaggatgactcttaagcacatagtg

SEQ ID NO: 101064 - DNA, 120 bp, Artificial Sequence
  ENSG00000092199_9 (sequence is synthesized)
gggtttagaaatcttatcccattatttctttacctaggcgcttgtctaagatcaaatttttcaccagatcctctcccctagtatcttcagcacatgctcactgttctccccatccttgtc

SEQ ID NO: 101065 - DNA, 120 bp, Artificial Sequence
  ENSG00000092199_10 (sequence is synthesized)
cttcccatgttcattaattcatattgccccgcgcctagtcccattttcacttcctttgacgctcctagtagttttgttaagtcttaccctgtaatttttgcttttaattttgatacctct

SEQ ID NO: 101066 - DNA, 120 bp, Artificial Sequence
  ENSG00000092199_11 (sequence is synthesized)
ttatgacttaacaataaaaaggatgtatggtttttatcaactgtctccaaaataatctcttgttatgcagggagtacagttcttttcattcatacataagttcagtagttgcttccctaa

SEQ ID NO: 101067 - DNA, 120 bp, Artificial Sequence
  ENSG00000092199_12 (sequence is synthesized)
ctgcaaaggcaatctcatttagttgagtagctcttgaaagcagctttgagttagaagtatgtgtgttacaccctcacattagtgtgctgtgtggggcagttcaacacaaatgtaacaatg

SEQ ID NO: 101068 - DNA, 120 bp, Artificial Sequence
  ENSG00000092199_13 (sequence is synthesized)
tatttttgtgaatgagagttggcatgtcaaatgcatcctctagaaaaataattagtgttatagtcttaagatttgttttctaaagttgatactgtgggttatttttgtgaacagcctgat

SEQ ID NO: 101069 - DNA, 120 bp, Artificial Sequence
  ENSG00000092199_14 (sequence is synthesized)
actggagctcagctttgatttttaacctcccttccccacccttccagaacacacacattccattccaaaactgattttataaagacattttaaacataatgatgcaacttggtgtgcact

SEQ ID NO: 101070 - DNA, 120 bp, Artificial Sequence
  ENSG00000092199_15 (sequence is synthesized)
acagcaaatgtacaggtgttttttttttaattgtttccaaaaccgggacctggatttaagatgtaatttttaaaatttctatttctattttttctgcagcagttgggttagaggaggagg

SEQ ID NO: 101071 - DNA, 120 bp, Artificial Sequence
  ENSG00000092199_16 (sequence is synthesized)
ctactgaaaactttatccttgcggtttttgtggaaactgcttttggaaagagaaaagaaatgaactttactgacttgacatttttgcacctcccgtttttctaatctgggctatttttat

SEQ ID NO: 101072 - DNA, 120 bp, Artificial Sequence
  ENSG00000092199_17 (sequence is synthesized)
ttttgtttttttacagtgagatttttttgatcttcagctacagtaagttattccaatttttttttaacatttttcctgactttccgctgatttcctttttattgttgttactagttacta

SEQ ID NO: 101073 - DNA, 120 bp, Artificial Sequence
  ENSG00000092199_18 (sequence is synthesized)
ttacttattattattatattaatacttatgatggtgatgatgatgatgataatgacactgatgatttttaaccggattaaaatcgagtttttctgaatgtttctaagaatttctccggcc

SEQ ID NO: 101074 - DNA, 120 bp, Artificial Sequence
  ENSG00000092199_19 (sequence is synthesized)
tcctgattgactttggagttttgcatcttgggagagaaagcgaaggcattagtatttttaagtggtttgatcacgtaaaccttttctctcccaaccccacccttgccctcatccccttcc

SEQ ID NO: 101075 - DNA, 120 bp, Artificial Sequence
  ENSG00000092199_20 (sequence is synthesized)
ttcttgattgaaaatggtgctaaagttggtctttttatgagtggtagctcttcagtttaacataaataacatcttgggagatactgagctttttgatattgaaagatagaattggtttct

SEQ ID NO: 101076 - DNA, 120 bp, Artificial Sequence
  ENSG00000092199_21 (sequence is synthesized)
tttcacatttttctttatttttaagcttatgtcttgtggcacctgtacaaaggacttggttgtggttgagctataaagttatgtatcttgaaaattgattaccaggtttgggctgtggct

SEQ ID NO: 101077 - DNA, 120 bp, Artificial Sequence
  ENSG00000092199_22 (sequence is synthesized)
ccaaataagaaaatgaaatgtttcaccataactgtatttcataaacaggaaaagaacattcagatgtatatttcttacaattcttcacaaactttttccgcaatttgtacattcatacag

SEQ ID NO: 101078 - DNA, 120 bp, Artificial Sequence
  ENSG00000092199_23 (sequence is synthesized)
ttttcacacatcaaatgtaaaaattaactgtcattcctacactgttctttttaaaaatgtatggtacttgttgctgctgtagtcattcatgtatagttggctcaaggaacacttctaaaa

SEQ ID NO: 101079 - DNA, 120 bp, Artificial Sequence
  ENSG00000092199_24 (sequence is synthesized)
ttggctcaaggaacacttctaaaagctcaattaaaaattttttttttgagacagggtctctctctggcctggctgaagtgcagtggcgtgatcagagctcactgcagcctcgaactcctg

SEQ ID NO: 101080 - DNA, 120 bp, Artificial Sequence
  ENSG00000092199_25 (sequence is synthesized)
gactgctaagtagctgggatttcaggctaccacaccctgctaatgttttttgtttttaataaagtctcgtcatgtttcccaggctggtctcaaactactgagctcaagccgtgctctacc

SEQ ID NO: 101081 - DNA, 120 bp, Artificial Sequence
  ENSG00000092199_26 (sequence is synthesized)
acaggtgtgagccaccacacttggccttaaaatattttaatttcctcaaatttacaaaggagaataagacctcatggctaaattgaacagtgagtgcagctagttcattgtttgcacaag

SEQ ID NO: 101082 - DNA, 120 bp, Artificial Sequence
  ENSG00000092199_27 (sequence is synthesized)
cagctagttcattgtttgcacaaggaactacagtctaattgcagttcctattttagctgatgaaacaaccagtttgtcatggaaattattttagtgtggtattatgtaccagatttttag

SEQ ID NO: 101083 - DNA, 120 bp, Artificial Sequence
  ENSG00000092199_28 (sequence is synthesized)
aatccataacttgaaattagctttacacgctacatagtaaatagtggactacagaaacaaaagtattaacataaggaccttaatttttttcacctattttatgaccttaaatattcagta

SEQ ID NO: 101084 - DNA, 120 bp, Artificial Sequence
  ENSG00000092199_29 (sequence is synthesized)
tttttttaattccatctgtattttcgttttgtcagtgagtggaataatgtgctccttatttaaaacatcttttcccctaacagtagaacctattaggtcttgtggtttgatcactcactg

SEQ ID NO: 101085 - DNA, 120 bp, Artificial Sequence
  ENSG00000092199_30 (sequence is synthesized)
gttttgagaatagatgagtcatctctagtatagatcttcatggtaggccattcaccttcagtctattactcatagcaaaaactccacggacttttttaagtttaaaacccatgaatctgc

SEQ ID NO: 101086 - DNA, 120 bp, Artificial Sequence
  ENSG00000092199_31 (sequence is synthesized)
ttaggttttataatctcagtatttgacatttgctcactatttcatctctatttgttggcccggtttttctgtattttctttgcccaaactgctcattatcaagatgaacatttgggatat

SEQ ID NO: 101087 - DNA, 120 bp, Artificial Sequence
  ENSG00000092199_32 (sequence is synthesized)
actctttttgagaccctcaagggcatattgacatgaatttagttaattttagtcatctattgatgttgaagaattgtgaagacagtcactggtagaggtgattctatggaggctatccca

SEQ ID NO: 101088 - DNA, 120 bp, Artificial Sequence
  ENSG00000092199_33 (sequence is synthesized)
tcccagtggaatgttaatgctttaccaaaatgtgttagctgcagtagacagatgtttctgtcttgggggtttagggcacaacatttctgaggaactctgactcaatctgtcccttctcct

SEQ ID NO: 101089 - DNA, 84 bp, Artificial Sequence
  ENSG00000092199_34 (sequence is synthesized)
ctttcatttgttaaatttttaaactgtgctgcaataaaatgtgtgtggtactacttaacacttatgatcgtgatggcattttcc

SEQ ID NO: 101090 - DNA, 120 bp, Artificial Sequence
  ENSG00000092199_35 (sequence is synthesized)
gtggtactacttaacacttatgatcgtgatggcattttccctgaaagccatcttcctcctgtttcccttgaaatcccatcctgcttttcctgtacactacccctcacaaaccacaagctg

SEQ ID NO: 101091 - DNA, 120 bp, Artificial Sequence
  ENSG00000092199_36 (sequence is synthesized)
cagcaacatggatgcccagcctggagcagcagcagccaggatgacctggagccaggggggccttcggaacagatgcacacccttcctgggtgatgttttcggctttgtgagaaaccttac

SEQ ID NO: 101092 - DNA, 120 bp, Artificial Sequence
  ENSG00000092199_37 (sequence is synthesized)
attaaaccaggaatttggagaaaaaaaaaaccctggttttttatttttgtattttattattgtttacttcaaactttgttttacagcgtcctccacaaaacctctagaatgcactagata

SEQ ID NO: 101093 - DNA, 120 bp, Artificial Sequence
  ENSG00000092199_38 (sequence is synthesized)
tatttttcttggagtcataatcatgatgcataccaacacaacactactcaaattatatttcattgagatgcatgttgcattgaggagtcaacttgacatagagtggagactttttcaaaa

SEQ ID NO: 101094 - DNA, 120 bp, Artificial Sequence
  ENSG00000092199_39 (sequence is synthesized)
tggcttttacatcctaatgaaagtttgggaagtatatcctctctgccttttcatcagtgctttgtggtccagctggcaccctttctgaggtttgtgttttgtgctaaatggttttgtcct

SEQ ID NO: 101095 - DNA, 120 bp, Artificial Sequence
  ENSG00000092199_40 (sequence is synthesized)
taaataggagaggctcaaaaacatcaagatttcaggaaaatggcgacagctgcataatggaacccccctgcttctattttgttcttttaattactatttatagccccagttaccttctga

SEQ ID NO: 101096 - DNA, 120 bp, Artificial Sequence
  ENSG00000092199_41 (sequence is synthesized)
attctgaagtgtatatacctccatgttcctgaaaacaagaaaactcttacttcctgatattccatagactgccttcccaggtgattgagaacatagagaatgttacacatttattttact

SEQ ID NO: 101097 - DNA, 120 bp, Artificial Sequence
  ENSG00000092199_42 (sequence is synthesized)
ctaaatgatcttttacccctgttagctaatctttgtgttttcctcaactttattaattacagtgattgcatttttagcatccagttgtaagatgaatatattaaacagctaccagtgttg

SEQ ID NO: 101098 - DNA, 120 bp, Artificial Sequence
  ENSG00000092199_43 (sequence is synthesized)
gtgatacctcatccttgaaaggcttagttcatttgtgttttatacttcagtttttccagcatagcagaaaatgccgcttataatttttgtgcacacaaaccttggattcccctgtaaagt

SEQ ID NO: 101099 - DNA, 120 bp, Artificial Sequence
  ENSG00000092199_44 (sequence is synthesized)
tgctattgtttcatagcatgcggcactggccttttttcatcctactcattacaggcaaaactcatgtcttatttatgaggattttatagatcattttctgtaacaggtgacaaaagcaga

SEQ ID NO: 101100 - DNA, 120 bp, Artificial Sequence
  ENSG00000092199_45 (sequence is synthesized)
aaagaatgaagaggctgaagtatgaactacccttggagcccatatacatgatataggcaatttcttttgtatgttaattcagtcaaaaatactacccacttgatgttttctaatctgatg

SEQ ID NO: 101101 - DNA, 120 bp, Artificial Sequence
  ENSG00000092199_46 (sequence is synthesized)
tgagctcatgttacacagacttttagtaagtaacccgtgactagaaaataaactggatgcttaggagagagtgtcagatgtataagatgctaataaaacctgtttaatattattgttagc

SEQ ID NO: 101102 - DNA, 120 bp, Artificial Sequence
  ENSG00000092199_47 (sequence is synthesized)
tgtaagtttttgggaaatactgaacaaattagtccacaatcaagtgtctacttttcccttcactgtagggcctctccctgcacagagcagtctgtttagctgtgaacaccacaatctgca

SEQ ID NO: 101103 - DNA, 120 bp, Artificial Sequence
  ENSG00000092199_48 (sequence is synthesized)
gatgttcaagtcccttacataaaatggcatagtatttatatgtaacctatgcatattctcctgtatattttaaatcatctctacattaaaatacctgataaaatgtaaatggtatgtaaa

SEQ ID NO: 101104 - DNA, 120 bp, Artificial Sequence
  ENSG00000092199_49 (sequence is synthesized)
agtacagaggaatcatttatatccagtgccaaaggccagccaaccatataatttgatatatgttttattttcctgaggaaaagttgctacagtattacaactattttatgtgcctaggta

SEQ ID NO: 101105 - DNA, 120 bp, Artificial Sequence
  ENSG00000092199_50 (sequence is synthesized)
aagaaataatgggataagatttctaaaccccactgtggaggtttttgctggccttcttaatgaaatttaataaaaggaaacgactagagacaatattcacttactatttatcataaggtc

SEQ ID NO: 101106 - DNA, 120 bp, Artificial Sequence
  ENSG00000092199_51 (sequence is synthesized)
attgcatcactgcactccagcttgtatgacagtgagacagtgtcttaaggaaagatgaatattaacctggctgcagagccaaaagtgaaccgaggaaaagcaggtgtgaaacgatctgca

SEQ ID NO: 101107 - DNA, 120 bp, Artificial Sequence
  ENSG00000092199_52 (sequence is synthesized)
agatttttttgatcttcagctacactgcagcaacatggatgcccagcctggagcagcagcagccaggatgacctggagccaggggggccttcggaacagatgcacacccttcctgggtga

SEQ ID NO: 101108 - DNA, 120 bp, Artificial Sequence
  ENSG00000092199_53 (sequence is synthesized)
ttttttgatcttcagctacagaggacacgttactaagagtggaattaatccgtattgtgagtacgtctgtctttactgttgcctccatcttgaatttaagtcctcatattttcggctttg

SEQ ID NO: 101109 - DNA, 120 bp, Artificial Sequence
  ENSG00000092199_54 (sequence is synthesized)
gttagtggaactttgcttgagtgagatttttttgatcttcagctacagtgtttccagtgtaaatgaattgattctatttattgccttttgaagaaaattatacttaatggttttcggctt

SEQ ID NO: 101110 - DNA, 120 bp, Artificial Sequence
  ENSG00000092199_55 (sequence is synthesized)
tcggggggatgaccaggtgaaaaccacgggaaaggaaagaaaaaggtggtggaggggggctcagggacacatggagtgcctctaactccatcctgtttgtgtctgtttctcacagctgga

SEQ ID NO: 101111 - DNA, 120 bp, Artificial Sequence
  ENSG00000092199_56 (sequence is synthesized)
gtgtggtataagaatgcttagtttaccattctgtttttcagtgtttagtttagctatgtcgtatgtggaaatcttagcgaattttaacctgaatttccaatttgaccgctacatttccag

SEQ ID NO: 101112 - DNA, 120 bp, Artificial Sequence
  ENSG00000092199_57 (sequence is synthesized)
tggtctaaggtgattggaattgagtgatttattgtatgaatgattggggatcattcagtgctaatcttgttgatctatttgttgtggtttatttggcatggttctcccctcacctgacat

SEQ ID NO: 101113 - DNA, 120 bp, Artificial Sequence
  ENSG00000092200_0 (sequence is synthesized)
atgtcacatctggtggaccctacatcaggagacttgccagttagagacatagatgctatacctctggtgctaccagcctcaaaaggtaagaatatgaaaactcaaccacccttgagcagg

SEQ ID NO: 101114 - DNA, 120 bp, Artificial Sequence
  ENSG00000092200_1 (sequence is synthesized)
atgaaccgggaggaattggaggacagtttctttcgacttcgcgaagatcacatgttggtgaaggagctttcttggaagcaacaggatgagatcaaaaggctgaggaccaccttgctgcgg

SEQ ID NO: 101115 - DNA, 120 bp, Artificial Sequence
  ENSG00000092200_2 (sequence is synthesized)
ttgaccgctgctggccgggacctgcgggtcgcggaggaggcggcgccgctctcggagaccgcaaggcgcgggcagaaggcgggatggcggcagcgcctctccatgcaccagcgcccccag

SEQ ID NO: 101116 - DNA, 120 bp, Artificial Sequence
  ENSG00000092200_3 (sequence is synthesized)
atgcaccgactgcaagggcatttccactgcgtcggccctgccagcccccgccgcgcccagcctcgcgtccaagtgggacacagacagctccacacagccggtgcaccggtgccggagaaa

SEQ ID NO: 101117 - DNA, 120 bp, Artificial Sequence
  ENSG00000092200_4 (sequence is synthesized)
cccaagagggggccaagggacaggctgagctacacagcccctccatcgtttaaggagcatgcgacaaatgaaaacagaggtgaagtagccagtaaacccagtgaacttgtttctggttct

SEQ ID NO: 101118 - DNA, 120 bp, Artificial Sequence
  ENSG00000092200_5 (sequence is synthesized)
aacagcataatttctttcagcagtgtcataagtatggctaaacccattggtctatgcatgcctaacagtgcccacatcatggccagcaataccatgcaagtggaagagccacccaagtct

SEQ ID NO: 101119 - DNA, 120 bp, Artificial Sequence
  ENSG00000092200_6 (sequence is synthesized)
cctgagaaaatgtggcctaaagatgaaaattttgaacagagaagctcattggagtgtgctcagaaggctgcagagcttcgagcttccattaaagagaaggtagagctgattcgacttaag

SEQ ID NO: 101120 - DNA, 120 bp, Artificial Sequence
  ENSG00000092200_7 (sequence is synthesized)
aagctcttacatgaaagaaatgcttcattggttatgacaaaagcacaattaacagaagttcaagaggcatacgaaaccttgctccagaagaatcagggaatcctgagtgcagcccatgag

SEQ ID NO: 101121 - DNA, 120 bp, Artificial Sequence
  ENSG00000092200_8 (sequence is synthesized)
gccctcctcaagcaagtgaatgagctcagggcagagctgaaggaagaaagcaagaaggctgtgagcttgaagagccaactggaagatgtgtctatcttgcagatgactctgaaggagttt

SEQ ID NO: 101122 - DNA, 120 bp, Artificial Sequence
  ENSG00000092200_9 (sequence is synthesized)
caggagagagttgaagatttggaaaaagaacgaaaattgctgaatgacaattatgacaaactcttagaaagcatgctggacagcagtgacagctccagtcagccccactggagcaacgag

SEQ ID NO: 101123 - DNA, 120 bp, Artificial Sequence
  ENSG00000092200_10 (sequence is synthesized)
ctcatagcggaacagctacagcagcaagtctctcagctgcaggatcagctggatgctgagctggaggacaagagaaaagttttacttgagctgtccagggagaaagcccaaaatgaggat

SEQ ID NO: 101124 - DNA, 120 bp, Artificial Sequence
  ENSG00000092200_11 (sequence is synthesized)
ctgaagcttgaagtcaccaacatacttcagaagcataaacaggaagtagagctcctccaaaatgcagccacaatttcccaacctcctgacaggcaatctgaaccagccactcacccagct

SEQ ID NO: 101125 - DNA, 120 bp, Artificial Sequence
  ENSG00000092200_12 (sequence is synthesized)
gtattgcaagagaacactcagatcgagccaagtgaacccaaaaaccaagaagaaaagaaactgtcccaggtgctaaatgagttgcaagtatcacacgcagagaccacattggaactagaa

SEQ ID NO: 101126 - DNA, 120 bp, Artificial Sequence
  ENSG00000092200_13 (sequence is synthesized)
aagaccagggacatgcttattctgcagcgcaaaatcaacgtgtgttatcaggaggaactggaggcaatgatgacaaaagctgacaatgataatagagatcacaaagaaaagctggagagg

SEQ ID NO: 101127 - DNA, 120 bp, Artificial Sequence
  ENSG00000092200_14 (sequence is synthesized)
ttgactcgactactagacctcaagaataaccgtatcaagcagctggaaggtattttaagaagccatgaccttccaacatctgaacagctcaaagatgttgcttatggcacccgaccgttg

SEQ ID NO: 101128 - DNA, 120 bp, Artificial Sequence
  ENSG00000092200_15 (sequence is synthesized)
tcgttatgtttggaaacactgccagcccatggagatgaggataaagtggatatttctctgctgcatcagggtgagaatctttttgaactgcacatccaccaggccttcctgacatctgcc

SEQ ID NO: 101129 - DNA, 120 bp, Artificial Sequence
  ENSG00000092200_16 (sequence is synthesized)
ccctctatgacttcacctcccagtatgtgatggagacagattcgcttttcttacactaccttcaagaggcttcagcccggcttgacatacaccaggccatggccagtgaacacagcactc

SEQ ID NO: 101130 - DNA, 120 bp, Artificial Sequence
  ENSG00000092200_17 (sequence is synthesized)
ttgctgcaggatggatttgctttgacagggtgctagagactgtggagaaagtccatggcttggccacactgattggagctggtggagaagagttcggggttctagagtactggatgaggc

SEQ ID NO: 101131 - DNA, 120 bp, Artificial Sequence
  ENSG00000092200_18 (sequence is synthesized)
tgcgtttccccataaaacccagcctacaggcgtgcaataaacgaaagaaagcccaggtctacctgtcaaccgatgtgcttggaggccggaaggcccaggaagaggagttcagatcggagt

SEQ ID NO: 101132 - DNA, 120 bp, Artificial Sequence
  ENSG00000092200_19 (sequence is synthesized)
cttgggaacctcagaacgagctgtggattgaaatcaccaagtgctgtggcctccggagtcgatggctgggaactcaacccagtccatatgctgtgtaccgcttcttcaccttttctgacc

SEQ ID NO: 101133 - DNA, 120 bp, Artificial Sequence
  ENSG00000092200_20 (sequence is synthesized)
atgacactgccatcattccagccagtaacaacccctactttagagaccaggctcgattcccagtgcttgtgacctctgacctggaccattatctgagacgggaggccttgtctatacatg

SEQ ID NO: 101134 - DNA, 120 bp, Artificial Sequence
  ENSG00000092200_21 (sequence is synthesized)
tttttgatgatgaagacttagagcctggctcgtatcttggccgagcccgagtgcctttactgcctcttgcaaaaaatgaatctatcaaaggtgattttaacctcactgaccctgcagaga

SEQ ID NO: 101135 - DNA, 120 bp, Artificial Sequence
  ENSG00000092200_22 (sequence is synthesized)
aacccaacggatctattcaagtgcaactggattggaagtttccctacataccccctgagagcttcctgaaaccagaagctcagactaaggggaaggataccaaggacagttcaaagatct

SEQ ID NO: 101136 - DNA, 120 bp, Artificial Sequence
  ENSG00000092200_23 (sequence is synthesized)
catctgaagaggaaaaggcttcatttccttcccaggatcagatggcatctcctgaggttcccattgaagctggccagtatcgatctaagagaaaacctcctcatgggggagaaagaaagg

SEQ ID NO: 101137 - DNA, 120 bp, Artificial Sequence
  ENSG00000092200_24 (sequence is synthesized)
agaaggagcaccaggttgtgagctactcaagaagaaaacatggcaaaagaataggtgttcaaggaaagaatagaatggagtatcttagccttaacatcttaaatggaaatacaccagagc

SEQ ID NO: 101138 - DNA, 120 bp, Artificial Sequence
  ENSG00000092200_25 (sequence is synthesized)
aggtgaattacactgagtggaagttctcagagactaacagcttcataggtgatggctttaaaaatcagcacgaggaagaggaaatgacattatcccattcagcactgaaacagaaggaac

SEQ ID NO: 101139 - DNA, 120 bp, Artificial Sequence
  ENSG00000092200_26 (sequence is synthesized)
ctctacatcctgtaaatgacaaagaatcctctgaacaaggttctgaagtcagtgaagcacaaactaccgacagtgatgatgtcatagtgccacccatgtctcagaaatatcctaaggcag

SEQ ID NO: 101140 - DNA, 120 bp, Artificial Sequence
  ENSG00000092200_27 (sequence is synthesized)
attcagagaagatgtgcattgaaattgtctccctggccttctacccagaggcagaagtgatgtctgatgagaacataaaacaggtgtatgtggagtacaaattctacgacctacccttgt

SEQ ID NO: 101141 - DNA, 120 bp, Artificial Sequence
  ENSG00000092200_28 (sequence is synthesized)
cggagacagagactccagtgtccctaaggaagcctagggcaggagaagaaatccactttcactttagcaaggtaatagacctggacccacaggagcagcaaggccgaaggcggtttctgt

SEQ ID NO: 101142 - DNA, 120 bp, Artificial Sequence
  ENSG00000092200_29 (sequence is synthesized)
tcgacatgctgaatggacaagatcctgatcaaggacatttaaagtttacagtggtaagtgatcctctggatgaagaaaagaaagaatgtgaagaagtgggatatgcatatcttcaactgt

SEQ ID NO: 101143 - DNA, 120 bp, Artificial Sequence
  ENSG00000092200_30 (sequence is synthesized)
ggcagatcctggagtcaggaagagatattctagagcaagagctagacattgttagccctgaagatctggctaccccaataggaaggctgaaggtttcccttcaagcagctgctgtcctcc

SEQ ID NO: 101144 - DNA, 120 bp, Artificial Sequence
  ENSG00000092200_31 (sequence is synthesized)
atgctatttacaaggagatgactgaagatttgttttcatgaaggaacaagtgctattccaatctaaaagtctctgagggaaccatagtaaaaagtctcttataaagttagcttgctataa

SEQ ID NO: 101145 - DNA, 120 bp, Artificial Sequence
  ENSG00000092200_32 (sequence is synthesized)
ttcattgcttaaaagtggaaaacaagcgtctctctgttctctgaggaaatgaaaataaaggtccatttctcagttgaaggtattccctctatttacatttatatttttttccttaggtca

SEQ ID NO: 101146 - DNA, 120 bp, Artificial Sequence
  ENSG00000092200_33 (sequence is synthesized)
gggacatgcttattctgcagcgcaaaatcaacgtgtgttatcaggtgcaaggaaagatggtacaggaaggggatggataacaggaacgtgggaaccactcacaggactgggaatgaagca

SEQ ID NO: 101147 - DNA, 120 bp, Artificial Sequence
  ENSG00000092200_34 (sequence is synthesized)
agttatgaataaagcaagggcagaaaaaaacatgtaggggagagaatgaggaactaggtccaggagatgctgaaactggataataaagacgtcatatcacaccccttggggtatccatct

SEQ ID NO: 101148 - DNA, 120 bp, Artificial Sequence
  ENSG00000092200_35 (sequence is synthesized)
gagaggttgactcgactactagacctcaagaataaccgtatcaagcagctggaagaaagagctccctaccctttaacggataggcagctttctttcccctctagaacagctcaaagatgt

SEQ ID NO: 101149 - DNA, 120 bp, Artificial Sequence
  ENSG00000092200_36 (sequence is synthesized)
atatcaaagtttctgattggttggacttgggagataatacccagatttgctagactgtctacctatctttgcgtcccactgccaatatttcctacctctttccagtaagtctcttttccc

SEQ ID NO: 101150 - DNA, 120 bp, Artificial Sequence
  ENSG00000092200_37 (sequence is synthesized)
actttttactccattactctttaacttataatgtactttttgccttcttatgttgaaaccaaattctgaacagaatgaaagatctcctgactgacctggctagagaaggagaagcatttc

SEQ ID NO: 101151 - DNA, 120 bp, Artificial Sequence
  ENSG00000092200_38 (sequence is synthesized)
ttggtgggactcaatgtaatgtcatagacactatgtctgcaacttgctattatctccacggccaatataccaaacttgtagaaatattcatgtttttgtgtttctagtacttctcttatg

SEQ ID NO: 101152 - DNA, 120 bp, Artificial Sequence
  ENSG00000092200_39 (sequence is synthesized)
gaattaccagttaatcatagggccacgatgtacaccaaaacaatgtcatatataagataaaatgtgcccccagtgttttcctaagtttagcatctactttccagtcactccttttgtacc

SEQ ID NO: 101153 - DNA, 120 bp, Artificial Sequence
  ENSG00000092200_40 (sequence is synthesized)
ttctccctaaagctggcattggattatttggctatcggaattcaatgctcctggttgtccttctgttgcttttccttttgaatcacgtggtttcttgaaataatcacaacttggacttcc

SEQ ID NO: 101154 - DNA, 120 bp, Artificial Sequence
  ENSG00000092201_0 (sequence is synthesized)
gggagagtgcgggattcctgggccgagagcgggtggctgagccgggacctcgcgtgattctcggaacccgaggagaagcggcgtccggggctatggctgtgactctggacaaagacgctt

SEQ ID NO: 101155 - DNA, 120 bp, Artificial Sequence
  ENSG00000092201_1 (sequence is synthesized)
attatcggcgagtgaagagactgtacagcaattggcggaaaggagaagatgagtatgccaacgttgatgccattgttgtatcagtgggtgttgatgaagaaattgtttatgccaaatcaa

SEQ ID NO: 101156 - DNA, 120 bp, Artificial Sequence
  ENSG00000092201_2 (sequence is synthesized)
ctgccttacagacatggctctttggttatgaactaactgatactatcatggtcttttgtgatgacaaaatcatctttatggccagcaagaaaaaagtggagttcttgaaacagattgcca

SEQ ID NO: 101157 - DNA, 120 bp, Artificial Sequence
  ENSG00000092201_3 (sequence is synthesized)
acactaagggcaatgagaatgctaatggagcccctgccatcacactgctaatacgagaaaagaatgaaagtaataagagtagctttgacaaaatgattgaagccattaaagaaagcaaga

SEQ ID NO: 101158 - DNA, 120 bp, Artificial Sequence
  ENSG00000092201_4 (sequence is synthesized)
atggcaagaagattggagtgttcagcaaagacaaattccctggagagttcatgaagagctggaatgactgcctcaacaaagaaggctttgacaaaatagatatcagtgcagttgtggcat

SEQ ID NO: 101159 - DNA, 120 bp, Artificial Sequence
  ENSG00000092201_5 (sequence is synthesized)
ataccatcgctgtaaaggaggatggggagctcaacctaatgaagaaagcagccagcatcacttctgaagtcttcaacaaattcttcaaggaaagagtcatggaaatagttgatgcagatg

SEQ ID NO: 101160 - DNA, 120 bp, Artificial Sequence
  ENSG00000092201_6 (sequence is synthesized)
agaaagttcgacacagcaaactggctgagtctgtggaaaaggccattgaagagaaaaaataccttgctggggcagacccttctactgtggaaatgtgttaccctcctatcattcagagtg

SEQ ID NO: 101161 - DNA, 120 bp, Artificial Sequence
  ENSG00000092201_7 (sequence is synthesized)
gtggcaactataatctcaagttcagtgtggtgagtgacaagaatcatatgcactttggggctatcacttgtgccatgggtattcgcttcaagtcttactgctccaaccttgttcgcactt

SEQ ID NO: 101162 - DNA, 120 bp, Artificial Sequence
  ENSG00000092201_8 (sequence is synthesized)
tgatggttgatccttctcaagaagttcaagaaaattataactttttgctccagcttcaagaggagctgctgaaggaattaagacatggtgtgaagatatgtgacgtgtataacgctgtca

SEQ ID NO: 101163 - DNA, 120 bp, Artificial Sequence
  ENSG00000092201_9 (sequence is synthesized)
tggacgtggttaaaaagcagaagccagaactgctgaacaaaattaccaaaaacctagggtttgggatgggaattgaattccgtgaaggctccctagtaatcaatagcaaaaatcaataca

SEQ ID NO: 101164 - DNA, 120 bp, Artificial Sequence
  ENSG00000092201_10 (sequence is synthesized)
aactgaagaaaggaatggttttcagcatcaatttaggattctcagacctgactaacaaggaggggaaaaagccagaagagaaaacctatgccctgttcattggtgacacagtgcttgtgg

SEQ ID NO: 101165 - DNA, 120 bp, Artificial Sequence
  ENSG00000092201_11 (sequence is synthesized)
atgaggatggcccagctactgttctcacttctgtgaagaagaaagtgaagaatgtggggattttcctaaagaatgaagatgaggaagaagaggaggaggagaaagatgaggcagaggacc

SEQ ID NO: 101166 - DNA, 120 bp, Artificial Sequence
  ENSG00000092201_12 (sequence is synthesized)
ttttgggaagaggttctcgggcagcattacttacagaaagaacaagaaatgaaatgactgcagaagagaagcgaagagcacatcagaaagaactagcggctcaactcaatgaagaagcaa

SEQ ID NO: 101167 - DNA, 120 bp, Artificial Sequence
  ENSG00000092201_13 (sequence is synthesized)
agaggcgattgactgaacaaaagggagaacagcagattcagaaagctcgcaagtctaatgtgtcctataaaaacccatctctgatgcctaaggaaccacatattcgggaaatgaagatct

SEQ ID NO: 101168 - DNA, 120 bp, Artificial Sequence
  ENSG00000092201_14 (sequence is synthesized)
acatcgataagaaatatgagactgtaataatgcccgtgtttggcattgcaacaccgtttcacattgccacaatcaagaatataagtatgtccgtggaaggagattatacttacttgcgaa

SEQ ID NO: 101169 - DNA, 120 bp, Artificial Sequence
  ENSG00000092201_15 (sequence is synthesized)
tcaacttttattgcccaggcagtgctctgggcaggaatgaaggcaacatctttcctaaccctgaagcgacttttgtcaaggaaattacataccgagcatcaaatattaaggcacccggag

SEQ ID NO: 101170 - DNA, 120 bp, Artificial Sequence
  ENSG00000092201_16 (sequence is synthesized)
aacagacagtaccagccttgaaccttcagaatgctttccgaattattaaagaagtacagaaacgttataaaactcgagaagctgaagagaaagagaaggaggggattgtaaaacaagact

SEQ ID NO: 101171 - DNA, 120 bp, Artificial Sequence
  ENSG00000092201_17 (sequence is synthesized)
cactggtgatcaatctaaaccggagtaatccgaaactgaaagatctatacattcgcccaaatattgcccaaaagaggatgcaaggctcactggaggcccatgtcaatggcttccgcttca

SEQ ID NO: 101172 - DNA, 120 bp, Artificial Sequence
  ENSG00000092201_18 (sequence is synthesized)
atcatgtttgggaagaagcggcacacggatgtgcagttctacacagaagtgggagagataaccacggacttggggaaacatcagcatatgcatgaccgagatgacctctatgctgagcag

SEQ ID NO: 101173 - DNA, 120 bp, Artificial Sequence
  ENSG00000092201_19 (sequence is synthesized)
atggaacgagaaatgaggcacaaactgaaaacagcctttaaaaatttcattgagaaagtagaggctctaactaaggaggaactggaatttgaagtgccttttagggacttgggatttaac

SEQ ID NO: 101174 - DNA, 120 bp, Artificial Sequence
  ENSG00000092201_20 (sequence is synthesized)
ggagctccctataggagtacctgcctccttcagcccactagtagtgcgctggtaaatgctacggaatggccaccttttgtggtgacattggatgaggtagagctgatccactttgagcgg

SEQ ID NO: 101175 - DNA, 120 bp, Artificial Sequence
  ENSG00000092201_21 (sequence is synthesized)
gtccagtttcacctgaagaactttgatatggtaatcgtctacaaggactacagcaagaaagtgaccatgatcaacgccattcctgtagcctctcttgaccccatcaaggaatggttgaat

SEQ ID NO: 101176 - DNA, 120 bp, Artificial Sequence
  ENSG00000092201_22 (sequence is synthesized)
tcctgcgacctgaaatacacagaaggagtacagtccctcaactggactaaaatcatgaagaccattgttgatgaccctgagggcttcttcgaacaaggtggctggtctttcctggagcct

SEQ ID NO: 101177 - DNA, 120 bp, Artificial Sequence
  ENSG00000092201_23 (sequence is synthesized)
gagggtgaggggagtgatgctgaagaaggggattcagagtctgaaattgaagatgagacttttaatccttcagaagatgactatgaagaggaagaggaggacagtgatgaagattattca

SEQ ID NO: 101178 - DNA, 120 bp, Artificial Sequence
  ENSG00000092201_24 (sequence is synthesized)
tcagaagcagaagagtcagactattctaaggagtcattgggtagtgaagaagagagtggaaaggattgggatgaactggaggaagaagcccgaaaagcggaccgagaaagtcgttacgag

SEQ ID NO: 101179 - DNA, 120 bp, Artificial Sequence
  ENSG00000092201_25 (sequence is synthesized)
gaagaagaagaacaaagtcgaagtatgagccggaagaggaaggcatctgtgcacagttcgggccgtggctctaaccgtggttccagacacagctctgcaccccccaagaaaaagaggaag

SEQ ID NO: 101180 - DNA, 120 bp, Artificial Sequence
  ENSG00000092201_26 (sequence is synthesized)
taacttctgaactttggccctgagctccattcttcctccagccaacccctgaaaattttacatgacatagaaactgtatttttcctttcgttttcatttgaagttttgccatttgtgttt

SEQ ID NO: 101181 - DNA, 120 bp, Artificial Sequence
  ENSG00000092201_27 (sequence is synthesized)
atgggtttagggggccatttgtgtggaccaatctactcggggaattccaggcccaccaggacacgtgccaatggccccattcagatggcaagggaggaggtgttcttgaagacaggagga

SEQ ID NO: 101182 - DNA, 120 bp, Artificial Sequence
  ENSG00000092201_28 (sequence is synthesized)
ggctcccgctgttaataaatattgtttcattcttctctcttcctgtcaccttctgccaagacattgatggcttctgacatcttatttggtgtctcaaagctgtatttccaagacagtggt

SEQ ID NO: 101183 - DNA, 120 bp, Artificial Sequence
  ENSG00000092201_29 (sequence is synthesized)
acaaggtgacccttaattacccgtatcatggttcttgaccagcacattcaatcctccaacctaccctactgccatgaccttccgcacatctctaagttttatctttgcaatactcaaggt

SEQ ID NO: 101184 - DNA, 120 bp, Artificial Sequence
  ENSG00000092201_30 (sequence is synthesized)
tctcggaaatttgctaatggttgtgataaaccatacagcttgagccagtgaggcagattgggctggtgccttcgtctgagttttcctgctttcctgcctcgtgcagattctgaggtatat

SEQ ID NO: 101185 - DNA, 120 bp, Artificial Sequence
  ENSG00000092201_31 (sequence is synthesized)
ctgctgccttggaagacataagaagcagtgatactccctggctcggttattttctccatacaatgcacacatggtacaatgatagaaggcaaaattgccactgtcttcttttttttctca

SEQ ID NO: 101186 - DNA, 120 bp, Artificial Sequence
  ENSG00000092201_32 (sequence is synthesized)
tatatctaaggaagatatatcaggttgtgcctcatgtaccgcttctagtgaaatgtagaggaaggctcaaaggagtcaacatttatatctggaagggacaagtcatgccttgggcctaga

SEQ ID NO: 101187 - DNA, 120 bp, Artificial Sequence
  ENSG00000092201_33 (sequence is synthesized)
ataccctgatgagaaaagagaagaggaagggaggccatatctacaacacagcctctcggcactgctgctccttattttaactttgtcttgcattgtcctgtatttatcacagtttctgtt

SEQ ID NO: 101188 - DNA, 120 bp, Artificial Sequence
  ENSG00000092201_34 (sequence is synthesized)
gaacagcttttcaagtatttggggagtttatcttgccatcctccccttctggttctctgcacccacctgtcccactgcagttccttccgtgctctgtgactttaagagaagaagggggga

SEQ ID NO: 101189 - DNA, 120 bp, Artificial Sequence
  ENSG00000092201_35 (sequence is synthesized)
ggggtcccggattttatgtttgtttgttttttctccttagcagtaggacttgatattttcaattttggaagaactaaaagatgaataaactgggttttttttgttgtttgtttttgtaaa

SEQ ID NO: 101190 - DNA, 61 bp, Artificial Sequence
  ENSG00000092201_36 (sequence is synthesized)
gcagccattgggacatgatctggtggcatagtgcaaagaatatctgctcccattcacctga

SEQ ID NO: 101191 - DNA, 120 bp, Artificial Sequence
  ENSG00000092201_37 (sequence is synthesized)
tgttcttcagcttcctttgaaattaagactgacacttaagttggtggtaattacatcatctccctttcaaaataatggtaagcctgcgttatgttttcttgaggtaacccattattttac

SEQ ID NO: 101192 - DNA, 120 bp, Artificial Sequence
  ENSG00000092201_38 (sequence is synthesized)
ttgagaatcataggaatagctgtaagtcctacatattgttctccaaatgtgttttgcctgcataccaatatattacctggcgcataaatcatttcctaagacttatacaaggatacattt

SEQ ID NO: 101193 - DNA, 120 bp, Artificial Sequence
  ENSG00000092201_39 (sequence is synthesized)
tgaaaacagcctttaaaaatttcattgagaaagtagaggctctaactaaggaggaactggaatttgaagtgccttttagggacttggggtaacctatcttatttttggcttgaagtttga

SEQ ID NO: 101194 - DNA, 120 bp, Artificial Sequence
  ENSG00000092201_40 (sequence is synthesized)
ctggtctgtcttttggtacaataaattattcttcctttaataataatttaacatatcatatccttttttcctatgactaataatctttgagacatccattttttcttgaaaatgtttaag

SEQ ID NO: 101195 - DNA, 120 bp, Artificial Sequence
  ENSG00000092201_41 (sequence is synthesized)
ggtttaggtgagtggctaactcttaagaggcttcctctggatgagtctccagtgagtatgctggagctgtttggaatggggagagggaagaagtttgtctgttgtggtaggagcagtctc

SEQ ID NO: 101196 - DNA, 120 bp, Artificial Sequence
  ENSG00000092201_42 (sequence is synthesized)
tacagtcttcagggacccaggctttttccagttctctgttctgccacccaaagaacatagccctcttgcacgtggtacagaatggcttctagaactccaggtgtttcatctacattccaa

SEQ ID NO: 101197 - DNA, 120 bp, Artificial Sequence
  ENSG00000092201_43 (sequence is synthesized)
aagacttgcttgaagctccacacactaccattttttacctattggccaaaatttgatcctaatgaccatacttacctgaaaggaaggtaaaatatcagttctttgagaaggagaaatgaa

SEQ ID NO: 101198 - DNA, 120 bp, Artificial Sequence
  ENSG00000092201_44 (sequence is synthesized)
taattggtagggaactggtaattgaggaggtaataacgcagggttctgtatcactctgtcccttgttttatgcatttctgtatcactaaacattgatatacttcctataaacacaaatcg

SEQ ID NO: 101199 - DNA, 120 bp, Artificial Sequence
  ENSG00000092201_45 (sequence is synthesized)
tttaactgatttgatggttttaattatagaaagttcaagcatataaacgtagagaaaataatacattgaaccccattgtcctgttctaataaattgtcgactcttggccgatcttgctta

SEQ ID NO: 101200 - DNA, 120 bp, Artificial Sequence
  ENSG00000092201_46 (sequence is synthesized)
atttgtatccactccagactccccagcctgattaccttggagttaatttcagacatgttatttttgtctataagtatttctgtatatctatatgagtccattaatttttgtatctgtaaa

SEQ ID NO: 101201 - DNA, 120 bp, Artificial Sequence
  ENSG00000092201_47 (sequence is synthesized)
gaattcccgggttctgtgcctcacccttttcgttgctcccgaatcattcaccggaggcggccacgaacgctgccccttaacagggaatcccccgcattcaccctgtcctgcggccatcac

SEQ ID NO: 101202 - DNA, 120 bp, Artificial Sequence
  ENSG00000092201_48 (sequence is synthesized)
catcttccccgcgtgccagccttggtcatgcatagcagcacctctcgcagtctcttcccgccctagaagaggcaacatccttccctcctactccgtggtcacgtcttgctgccctcccct

SEQ ID NO: 101203 - DNA, 120 bp, Artificial Sequence
  ENSG00000092201_49 (sequence is synthesized)
gtcttcgtaaaggagagatggaagggcaaggaggatgtcaatcgggcttttagcgtttatcgtttgcggggcttttgctggagttaaaaaaagaaatactgctcacgcgcaaccgcctca

SEQ ID NO: 101204 - DNA, 120 bp, Artificial Sequence
  ENSG00000092201_50 (sequence is synthesized)
tgttctaggccctgctgtgggttacagagagggacctaacgctgaaagcctgcaggcattagtaataacaaaacaaaacaaaacgatgcctaaaaccttattagttccttggtagcgtat

SEQ ID NO: 101205 - DNA, 120 bp, Artificial Sequence
  ENSG00000092201_51 (sequence is synthesized)
ccggggcacgtgttcattaaaagagctgtggcagttcccagttttttaaagattcggcagttttgctgctctaaaaacgtccacagttaaaacttatttttatgatgttaacttactaat

SEQ ID NO: 101206 - DNA, 120 bp, Artificial Sequence
  ENSG00000092201_52 (sequence is synthesized)
tgagcaaacatttggttgcattctgtgatgcagtctgagttggctagcttaagtcttgcccctgaaccctgtcatcaagggaagatacagctaataaagatttttttttaacctgaaaaa

SEQ ID NO: 101207 - DNA, 120 bp, Artificial Sequence
  ENSG00000092203_0 (sequence is synthesized)
cttgcggaagtgacggcagttccgagtccagtgggggcggtgggagcgatgagggtctgagacggtgggagcggttgtgtgaagatggagtttcccggaggaaatgacaattacctgacg

SEQ ID NO: 101208 - DNA, 120 bp, Artificial Sequence
  ENSG00000092203_1 (sequence is synthesized)
atcacagggccttcgcaccccttcctgtcaggggccgagacattccatacaccaagcttgggtgatgaggaatttgaaatcccacctatctccttggattctgatccctcattggctgtc

SEQ ID NO: 101209 - DNA, 120 bp, Artificial Sequence
  ENSG00000092203_2 (sequence is synthesized)
tcagatgtggttggccactttgatgacctggcagacccttcctcttcacaggatggcagtttttcagcccagtatggggtccagacattggacatgcctgtgggcatgacccatggcttg

SEQ ID NO: 101210 - DNA, 120 bp, Artificial Sequence
  ENSG00000092203_3 (sequence is synthesized)
atggagcagggcggggggctcctgagtgggggcttgaccatggacttggaccactctataggaactcagtatagtgccaacccacctgttacaattgatgtaccaatgacagacatgaca

SEQ ID NO: 101211 - DNA, 120 bp, Artificial Sequence
  ENSG00000092203_4 (sequence is synthesized)
tctggcttgatggggcatagccagttgaccaccattgatcagtcagaactgagttcccagctgggtttgagcctagggggtggcaccatcctgccacctgcccagtcacctgaagatcgt

SEQ ID NO: 101212 - DNA, 120 bp, Artificial Sequence
  ENSG00000092203_5 (sequence is synthesized)
ctttcaaccaccccttcacctactagttcacttcacgaggatggtgttgaggatttccggaggcaacttcccagccagaagacagtcgtggtggaagcagggaaaaagcagaaggcccca

SEQ ID NO: 101213 - DNA, 120 bp, Artificial Sequence
  ENSG00000092203_6 (sequence is synthesized)
aagaagagaaaaaagaaagatcctaatgaacctcagaaaccagtttcagcatatgctttattctttcgtgatacacaggctgccatcaagggacagaatcctaatgccacttttggtgag

SEQ ID NO: 101214 - DNA, 120 bp, Artificial Sequence
  ENSG00000092203_7 (sequence is synthesized)
gtttcaaaaattgtggcctccatgtgggatagtcttggagaggagcaaaaacaggtatataagaggaaaactgaggctgccaagaaagagtatctgaaggcactggctgcttacaaagac

SEQ ID NO: 101215 - DNA, 120 bp, Artificial Sequence
  ENSG00000092203_8 (sequence is synthesized)
aaccaggagtgtcaggccactgtggaaacagtggaattggatccagcaccaccatcacaaactccttctccacctcctatggctactgttgacccagcatctccagcaccagcttcaata

SEQ ID NO: 101216 - DNA, 120 bp, Artificial Sequence
  ENSG00000092203_9 (sequence is synthesized)
gagccccctgccctgtccccatccattgttgttaactccaccctttcatcctatgtggcaaaccaggcatcttctggagctgggggtcagcccaatatcaccaagttgattattaccaaa

SEQ ID NO: 101217 - DNA, 120 bp, Artificial Sequence
  ENSG00000092203_10 (sequence is synthesized)
caaatgttgccctcttctattactatgtctcaaggagggatggttactgttatcccagccacagtggtgacctcccgggggctccaactaggccaaaccagtacagctactatccagccc

SEQ ID NO: 101218 - DNA, 120 bp, Artificial Sequence
  ENSG00000092203_11 (sequence is synthesized)
agtcaacaagcccagattgtcactcggtcagtgttgcaggcagcagcagctgctgctgctgctgcttctatgcaactgcctccaccccgactacagccccctccattacaacagatgcca

SEQ ID NO: 101219 - DNA, 120 bp, Artificial Sequence
  ENSG00000092203_12 (sequence is synthesized)
cagcccccgactcagcagcaagttaccattctgcagcagcctcctccactccaggccatgcaacagcctccacctcagaaagttcgaatcaatttacagcaacagcctcctcctctgcag

SEQ ID NO: 101220 - DNA, 120 bp, Artificial Sequence
  ENSG00000092203_13 (sequence is synthesized)
atcaagagtgtgcctctacccactttgaaaatgcagactaccttagtcccaccaactgtggaaagtagtcctgagcggcctatgaacaacagccctgaggcccatacagtggaggcacct

SEQ ID NO: 101221 - DNA, 120 bp, Artificial Sequence
  ENSG00000092203_14 (sequence is synthesized)
tctcctgagactatctgtgagatgatcacagatgtagttcctgaggttgagtctccttctcagatggatgttgaattggtgagtgggtctcctgtggcactctcaccccagcctcgatgt

SEQ ID NO: 101222 - DNA, 120 bp, Artificial Sequence
  ENSG00000092203_15 (sequence is synthesized)
gtgaggtctggttgtgagaaccctcccattgtgagtaaggactgggacaatgaatactgcagcaatgagtgtgtggtgaagcactgcagggatgtattcttggcctgggtagcctctaga

SEQ ID NO: 101223 - DNA, 120 bp, Artificial Sequence
  ENSG00000092203_16 (sequence is synthesized)
aattcaaacacagtggtgtttgtgaaatagtccttcctgttctccaagccagtgaagagttatctgctgggaaagtgtccaagagcctgtttttgaaacacaagctgggcttctggtagt

SEQ ID NO: 101224 - DNA, 120 bp, Artificial Sequence
  ENSG00000092203_17 (sequence is synthesized)
gcctcatcacaacccatgatggctgttcatgtttcaccccttttcttccttcagcagaggccaggctatggagcagggccactgaatttgctgtaatctggagatgctttttactttcaa

SEQ ID NO: 101225 - DNA, 120 bp, Artificial Sequence
  ENSG00000092203_18 (sequence is synthesized)
tggggttgaagaaacttgttggtataattgtcataggacttgcctaaaatattattaaaattacgggagtgtactcagctttgagcctaggagaaaatgccactgtgtgcatccatttta

SEQ ID NO: 101226 - DNA, 120 bp, Artificial Sequence
  ENSG00000092203_19 (sequence is synthesized)
aagggttccctcataaaaaaatgttattccccattatcacatcagtacactgctttgaaaacaaaacttttcaacatgggcatactgggctacatggaaaatgacatcacccaggagtga

SEQ ID NO: 101227 - DNA, 120 bp, Artificial Sequence
  ENSG00000092203_20 (sequence is synthesized)
tttctctttatatatattatttctgcagttaccatccttatctgagttatcacagttcatgaatctaagaggcggaactctacatcattagtaagaggttccaccaaagtctaaagttgt

SEQ ID NO: 101228 - DNA, 120 bp, Artificial Sequence
  ENSG00000092203_21 (sequence is synthesized)
attcacttgtgtttgatgaactatctttaaaagaccataggtctatcattatttcttagacataatctaaagaaaaacagactagagaagccacctggttgtaacagaataagcagaagt

SEQ ID NO: 101229 - DNA, 120 bp, Artificial Sequence
  ENSG00000092203_22 (sequence is synthesized)
ttacagcatgatagtccaagtggtgataactttaaataaaactcaaatttttactgtttgtagacaggaatgctgtcctagagaacctcctcctcaaccagctacgtacatagttttatc

SEQ ID NO: 101230 - DNA, 61 bp, Artificial Sequence
  ENSG00000092203_23 (sequence is synthesized)
attcctgtttttttaatggttttggagggtagcagtagagatggggtctcactatgttgcc

SEQ ID NO: 101231 - DNA, 89 bp, Artificial Sequence
  ENSG00000092203_24 (sequence is synthesized)
ggttttggagggtagctctagtcttgaactcctgggctacagttaccctcctacctcggcttcccaaagtgctcggattacaggtgtga

SEQ ID NO: 101232 - DNA, 120 bp, Artificial Sequence
  ENSG00000092203_25 (sequence is synthesized)
ctgtgcctagcctataatgatcattttaatgtttcccatgcactcatttagtttgaaccttcacagcaacccaatgaggtaatactcccatttcacatataatactgagagatgagttgc

SEQ ID NO: 101233 - DNA, 120 bp, Artificial Sequence
  ENSG00000092203_26 (sequence is synthesized)
acaagattatacactgttaagtagcagagccagaatggacttcagaatcccaactacaatacaaatgtttatttaaataaagaagaaagctattgtacaaatatcactcttcaggtttag

SEQ ID NO: 101234 - DNA, 120 bp, Artificial Sequence
  ENSG00000092203_27 (sequence is synthesized)
cttacagagccatggctatggattcttagctctgtaaggaagtgcttctataaattcttaggtttagagatgataccatctgggtacctttgcttgaaccgtgcaaccacatctgggtct

SEQ ID NO: 101235 - DNA, 120 bp, Artificial Sequence
  ENSG00000092203_28 (sequence is synthesized)
agtaggtggatcccatccagttggtttccaagggtgatcctgaaacagtgtaaaaggaggggcaaaccagaaatcctggaattagagggtttaatattgttaaaaaatgcataccaaatg

SEQ ID NO: 101236 - DNA, 120 bp, Artificial Sequence
  ENSG00000092203_29 (sequence is synthesized)
aagactgcctatcatcatatcaaatatgccaattctaaaaagagcttaacattagaatagtatatggtagaattactagttcagaattggcatagattctggtgttaaaatagactggat

SEQ ID NO: 101237 - DNA, 120 bp, Artificial Sequence
  ENSG00000092203_30 (sequence is synthesized)
ctgtattatctgagggttagtaactaatgcttagccaggcctgcttcacagagttgctaccagggagtattctttggataagcaaaatgctagcagcatgtgttttaagctctgttaagg

SEQ ID NO: 101238 - DNA, 120 bp, Artificial Sequence
  ENSG00000092203_31 (sequence is synthesized)
ggtgaaagatgtaattattgacagattaaatagataacttcgtaaccaccagggggcagattcaatacatcacagaatggctgaggaagatccttgggttgtgaagagagtagaaaccct

SEQ ID NO: 101239 - DNA, 120 bp, Artificial Sequence
  ENSG00000092203_32 (sequence is synthesized)
agggagcagtgcttttgggtcctagaacctgttgagtttctaatgaatatttgtagaatctcataaaacagtttaaatacaagcttaagtggcttatgaatcctgtgaagctcatttatg

SEQ ID NO: 101240 - DNA, 120 bp, Artificial Sequence
  ENSG00000092203_33 (sequence is synthesized)
gactagtgtaaaacaatgtgaagctctactaagttctgtccttaatcataaataatagccccttgaggactagcctgttctctggtcaccttaccagttgggttgcacattgtgtggtcg

SEQ ID NO: 101241 - DNA, 120 bp, Artificial Sequence
  ENSG00000092203_34 (sequence is synthesized)
tccaaataactcaatcttgcgagtgccaggagatagtctttcaatcatgccatagatttcatctggtttatgactggtggaacgaacctaggaaataaaaactagctgctttttaagtta

SEQ ID NO: 101242 - DNA, 120 bp, Artificial Sequence
  ENSG00000092203_35 (sequence is synthesized)
ccgcccccgccacccaatttgggagcttcgaatgcccgcccgagccttgaaggcgaaccacctgagggttacctgtgtctccgatgatgatatacttgaagagataagcataagtcatgg

SEQ ID NO: 101243 - DNA, 120 bp, Artificial Sequence
  ENSG00000092203_36 (sequence is synthesized)
agcggttgtgtgaagatggaggtaggaacctgatagctaagaaggctggcgagagaacgcggccgaccgggttgaagcagggacgggaagccgggcggagaggcgactgacgggagagga

SEQ ID NO: 101244 - DNA, 120 bp, Artificial Sequence
  ENSG00000092203_37 (sequence is synthesized)
gagagagcggggtttggggagtgttgtcagaatgtcagggtcaaaagccatcgctccaagctgactccctgctccccctaacttatccccgcgactttcttttggtttccagtttcccgg

SEQ ID NO: 101245 - DNA, 120 bp, Artificial Sequence
  ENSG00000092203_38 (sequence is synthesized)
actctattccctgctacacttgggtattacttgtttctcttcttgtggctaaaggctcaccaacaaagacttaatttcacctgaataaatgaaatttaccatgtaggtagattttacttg

SEQ ID NO: 101246 - DNA, 120 bp, Artificial Sequence
  ENSG00000092203_39 (sequence is synthesized)
aaaaataatttaaaattgtacaatgtctggtttgaaaattatttattgtggtttttgggaaaaagtgttttctgcttttattatggccttcacatcctaggattcaaatttgaatgtgat

SEQ ID NO: 101247 - DNA, 120 bp, Artificial Sequence
  ENSG00000092203_40 (sequence is synthesized)
agctggcacacggagggatttattcaaaaatggcctgaatcacgttgagcagccagcagaacagagcttaaaaaaaaaaaaaaagtctgagccaaatatagtattgtggattagtatgta

SEQ ID NO: 101248 - DNA, 120 bp, Artificial Sequence
  ENSG00000092203_41 (sequence is synthesized)
atataaatcagtatattgggcttccagcacatcgaaccagtaagcacatcttcatactctatatttgatgccagactttaatattggccttatttatgctgattgcctatgtattacaat

SEQ ID NO: 101249 - DNA, 120 bp, Artificial Sequence
  ENSG00000092203_42 (sequence is synthesized)
tttaaaagctattattttgggagagtacagataggaagtttttctttactcaatgtgttgtcactacctatatattactgaataagttgatagctctttgacttgtccaacagtgcgact

SEQ ID NO: 101250 - DNA, 120 bp, Artificial Sequence
  ENSG00000092203_43 (sequence is synthesized)
tctctgattatttttagttcttcttttgagtgcaaagaagtaaattcattaatttctgtacttttttaaaaagcttatttttttattttcatttttgaagactattttatgttttgtatt

SEQ ID NO: 101251 - DNA, 120 bp, Artificial Sequence
  ENSG00000092203_44 (sequence is synthesized)
ttaaatgatacaatttgggtaggcagggaatttataagctgtcttaaatttaggggggaaaagtggttttttttatatttagtgtttaattagtccttctgcttctctcaggacttggac

SEQ ID NO: 101252 - DNA, 120 bp, Artificial Sequence
  ENSG00000092203_45 (sequence is synthesized)
tgcaggtgagcttacagttctcccttttataattcagctactggtcaattctactgggaaacataggaatcttgagcataaaatcagcatctcagtgtcaccttaccttaggtagagtag

SEQ ID NO: 101253 - DNA, 120 bp, Artificial Sequence
  ENSG00000092203_46 (sequence is synthesized)
gttgctgtatctggtctactagaaaagctcccctgcttaagagcttacatttgccacataagccaaagatgatgtaatcagcagttcacatttttcagttaccacatacctctcttatgt

SEQ ID NO: 101254 - DNA, 120 bp, Artificial Sequence
  ENSG00000092203_47 (sequence is synthesized)
atgctctttaaaaatataatacattaagctgttagtgtttgcaaatattagcttttcaattcttggtgcaaatcagactacttagggaactagaatttggggagaaatggtaagtggaaa

SEQ ID NO: 101255 - DNA, 120 bp, Artificial Sequence
  ENSG00000092203_48 (sequence is synthesized)
gtaacacataataatttgcaatttgtgaaggaaatggggagatggttggaatattttacccctctccccaaattttcctgggaatttcctatagctgtaggacaaggcatttctatttcc

SEQ ID NO: 101256 - DNA, 120 bp, Artificial Sequence
  ENSG00000092203_49 (sequence is synthesized)
tatttcaaaaactctgcagtaaattagcattgcctctacttctgacttttaagcccactgttcttatattttcaaggtgatactatctcaccataatgctgtaggaaattatctgggaac

SEQ ID NO: 101257 - DNA, 76 bp, Artificial Sequence
  ENSG00000092203_50 (sequence is synthesized)
tactatctcaccataatgctgtaggaaattatctgggaacctatttgtttaagacagataaaaaatccagctgggc

SEQ ID NO: 101258 - DNA, 120 bp, Artificial Sequence
  ENSG00000092203_51 (sequence is synthesized)
ttcagaggtatgctcagtggagtgagtctgccatggaggttgtcttgactgttagctttcagaattgaattcactgatagaggttgtcagtgattagactaagatgaattgtcattcatt

SEQ ID NO: 101259 - DNA, 120 bp, Artificial Sequence
  ENSG00000092203_52 (sequence is synthesized)
gataaataatacagaactatcagtctttcctaagagtatggggagttttgtttttttttttaaagtctcttttttgcaggtatataagaggaaaactgaggctgccaagaaagagtatct

SEQ ID NO: 101260 - DNA, 120 bp, Artificial Sequence
  ENSG00000092203_53 (sequence is synthesized)
gagcgatgagggtctgagacggtgggagcggttgtgtgaagatggagtttcccggaggaaatgacaattacctgacgatcacagggccttcgcaccccttcctgtcaggggccgaggtga

SEQ ID NO: 101261 - DNA, 120 bp, Artificial Sequence
  ENSG00000092203_54 (sequence is synthesized)
tgacttggaccactctataggaactcagtatagtgccaacccacctgttacaattgatgtaccaatgacagacatgacatctggcttgatggggcatagccagttgaccaccattgatca

SEQ ID NO: 101262 - DNA, 120 bp, Artificial Sequence
  ENSG00000092203_55 (sequence is synthesized)
cacctgaaagagaaagcacactcccggaatcacgcagccctggaacaccttccagagtatggacttcccggaccagagaaggggggctcccgagccccgcccccggccgccccgaaccgc

SEQ ID NO: 101263 - DNA, 120 bp, Artificial Sequence
  ENSG00000092208_0 (sequence is synthesized)
taacgctccctaaactgccacttgctcagctccgcgcctaaggtgtctattagtacgcctgcgctgtgacctagaatgggcgcatgcgccgagcggaactggctggtttgaaaaccatgg

SEQ ID NO: 101264 - DNA, 120 bp, Artificial Sequence
  ENSG00000092208_1 (sequence is synthesized)
cgtgggtaccagcggagtccgcagtggaagagttgatgcctcggctattgccggtagagccttgcgacttgacggaaggtttcgatccctcggtacccccgaggacgcctcaggaatacc

SEQ ID NO: 101265 - DNA, 120 bp, Artificial Sequence
  ENSG00000092208_2 (sequence is synthesized)
tgaggcgggtccagatcgaagcagctcaatgtccagatgttgtggtagctcaaattgacccaaagaagttgaaaaggaagcaaagtgtgaatatttctctttcaggatgccaacccgccc

SEQ ID NO: 101266 - DNA, 120 bp, Artificial Sequence
  ENSG00000092208_3 (sequence is synthesized)
ctgaaggttattccccaacacttcaatggcaacagcaacaagtggcacagttttcaactgttcgacagaatgtgaacaaacatagaagtcactggaaatcacaacagttggatagtaatg

SEQ ID NO: 101267 - DNA, 120 bp, Artificial Sequence
  ENSG00000092208_4 (sequence is synthesized)
tgacaatgccaaaatctgaagatgaagaaggctggaagaaattttgtctgggtgaaaagttatgtgctgacggggctgttggaccagccacaaatgaaagtcctggaatagattatgtac

SEQ ID NO: 101268 - DNA, 120 bp, Artificial Sequence
  ENSG00000092208_5 (sequence is synthesized)
ctttactccagaattgggaagatggctttatgctttattggcttgtcttgaaaagcctttgttacctgaggctcattcactgattcggcagcttgcaagaaggtgctctgaagtgaggct

SEQ ID NO: 101269 - DNA, 120 bp, Artificial Sequence
  ENSG00000092208_6 (sequence is synthesized)
cttagtggatagcaaagatgatgagagggttcctgctttgaatttattaatctgcttggttagcaggtattttgaccaacgtgatttagctgatgagccatcttgatgtagctgatctct

SEQ ID NO: 101270 - DNA, 120 bp, Artificial Sequence
  ENSG00000092208_7 (sequence is synthesized)
cagggatagaagatatttctcatgaaggcagcctaactctgaggaaaacaatgccaattcaagtacagatttcaacacatcttcaacactatgtgaagggttcacatcttaacctgtgca

SEQ ID NO: 101271 - DNA, 120 bp, Artificial Sequence
  ENSG00000092208_8 (sequence is synthesized)
attcagattgatactcagaatatgggttgatttgaatatctgaaatatcaatggaaaatcccactcagtttttgatgaacagtttgaacagttttctgtaatcaagcagcttgcatagaa

SEQ ID NO: 101272 - DNA, 120 bp, Artificial Sequence
  ENSG00000092208_9 (sequence is synthesized)
tgttctttttttgttttttgttgttttgttatttacttatatacatataaaattttattgaaaatatgttttggttactaaaattttgtttgactcctaacaaaagacaatggatggcct

SEQ ID NO: 101273 - DNA, 120 bp, Artificial Sequence
  ENSG00000092208_10 (sequence is synthesized)
aaattttgtttgactcctaacaaaagacaatggatggccttagcatcagaattaaaataatctggattaaatggcaatgtgttcatagtcagcaataaaattaaacatttttccctttaa

SEQ ID NO: 101274 - DNA, 120 bp, Artificial Sequence
  ENSG00000092208_11 (sequence is synthesized)
gatagcaaagatgatgagagggttcctgctttgaatttattaatctgcttggttagcaggtatagttaatccttggcttctttattatttatcagtgagtctcactctgttgctatagtt

SEQ ID NO: 101275 - DNA, 85 bp, Artificial Sequence
  ENSG00000092208_12 (sequence is synthesized)
tttattatttatcagtgagtctcactctgttgctatagttagggtgcagtggcgcaatcacagctcactagagctttaacttcct

SEQ ID NO: 101276 - DNA, 120 bp, Artificial Sequence
  ENSG00000092208_13 (sequence is synthesized)
actcctgggctcaagcgatcctcccacctaagcctccgaaagtgcagggattacaggtgtaaagccactgcattcagcctgcatttttgtttaattgcctgtgtcctgcgttcattttca

SEQ ID NO: 101277 - DNA, 120 bp, Artificial Sequence
  ENSG00000092208_14 (sequence is synthesized)
cattttcagttgtggcatatttttatttagtatctgttttatttcatttcttacatagaaattcttcttggaatttatttgaaaactttttttgttgttttgttttgagacagagtctcg

SEQ ID NO: 101278 - DNA, 90 bp, Artificial Sequence
  ENSG00000092208_15 (sequence is synthesized)
ccgcatgtggtggctcaagcctgtaattccagcacttcgagagactgaggctggagaattgtaaatgagccatgatcatgccactgcact

SEQ ID NO: 101279 - DNA, 120 bp, Artificial Sequence
  ENSG00000092208_16 (sequence is synthesized)
ataacacctggctctccaaatgaggctttcttgtctatacccaaacataatatagttaaatgttctatgaatttattcatagcagataatcaggcataacattggacatttaaaaaataa

SEQ ID NO: 101280 - DNA, 120 bp, Artificial Sequence
  ENSG00000092208_17 (sequence is synthesized)
atagttaatccttggcttctttattatttatcagtgaggtcagtgaggttagatcgtatttattacatttggtttttgtttggttggtttttttttgagtctcactctgttgctatagtt

SEQ ID NO: 101281 - DNA, 120 bp, Artificial Sequence
  ENSG00000092208_18 (sequence is synthesized)
atgaatcagggaagatggctttatgctttattggcttgtcttgaaaagcctttgttacctgaggctcattcactgattcggcagcttgcaagaaggtgctctgaagtgaggctcttagtg

SEQ ID NO: 101282 - DNA, 120 bp, Artificial Sequence
  ENSG00000092208_19 (sequence is synthesized)
aattttggtgcaccacttaatataaggggtcagcaaactctaccctgggccaagtccagttcatggccttttttatatccatgagctaaggattgtttttaggttttgaaagagtaaaaa

SEQ ID NO: 101283 - DNA, 120 bp, Artificial Sequence
  ENSG00000092295_0 (sequence is synthesized)
atccagtctgtgggtcctgtcccatccatcctgacctgttccatctcagccccaggactcagtactgcggttgccaacactgctgccaggcatgatggatgggccacgttccgatgtggg

SEQ ID NO: 101284 - DNA, 120 bp, Artificial Sequence
  ENSG00000092295_1 (sequence is synthesized)
ccgttggggtggcaaccccttgcagccccctaccacgccatctccagagccagagccagagccagacggacgctctcgcagaggaggaggccgttccttctgggctcgctgctgtggctg

SEQ ID NO: 101285 - DNA, 120 bp, Artificial Sequence
  ENSG00000092295_2 (sequence is synthesized)
ctgttcatgccgaaatgcggcagatgacgactggggacctgaaccctctgactccaggggtcgagggtccagctctggcactcgaagacctggctcccggggctcagactcccgccggcc

SEQ ID NO: 101286 - DNA, 120 bp, Artificial Sequence
  ENSG00000092295_3 (sequence is synthesized)
tgtatcccggggcagcggtgtcaatgcagctggagatggcaccatccgagagggcatgctagtagtgaacggtgtggacttgctgagctcgcgctcggaccagaaccgccgagagcacca

SEQ ID NO: 101287 - DNA, 120 bp, Artificial Sequence
  ENSG00000092295_4 (sequence is synthesized)
cacagacgagtatgagtacgacgagctgatagtgcgccgcgggcagcctttccatatgctcctcctcctgtcccggacctatgaatcctctgatcgcatcacccttgagttactcatcgg

SEQ ID NO: 101288 - DNA, 120 bp, Artificial Sequence
  ENSG00000092295_5 (sequence is synthesized)
aaacaaccccgaggtgggcaagggcacgcacgtgatcatcccagtgggcaaggggggcagtggaggctggaaagcccaggtggtcaaggccagtgggcagaatctgaacctgcgggtcca

SEQ ID NO: 101289 - DNA, 120 bp, Artificial Sequence
  ENSG00000092295_6 (sequence is synthesized)
cacttcccccaacgccatcatcggcaagtttcagttcacagtccgcacacaatcagacgctggggagttccagttgccctttgacccccgcaatgagatctacatcctcttcaacccctg

SEQ ID NO: 101290 - DNA, 120 bp, Artificial Sequence
  ENSG00000092295_7 (sequence is synthesized)
gtgcccagaggacattgtgtacgtggaccatgaggattggcggcaggagtatgttcttaatgagtctgggagaatttactacgggaccgaagcacagattggtgagcggacctggaacta

SEQ ID NO: 101291 - DNA, 120 bp, Artificial Sequence
  ENSG00000092295_8 (sequence is synthesized)
cggccagtttgaccacggggtgctggatgcctgcttatacatcctggaccggcgggggatgccatatggaggccgtggagacccagtcaatgtctcccgggtcatctctgccatggtgaa

SEQ ID NO: 101292 - DNA, 120 bp, Artificial Sequence
  ENSG00000092295_9 (sequence is synthesized)
ctccctggatgacaatggagtcctgattgggaactggtctggtgattactcccgaggcaccaacccatcagcgtgggtgggcagcgtggagatcctgcttagctacctacgcacgggata

SEQ ID NO: 101293 - DNA, 120 bp, Artificial Sequence
  ENSG00000092295_10 (sequence is synthesized)
ttccgtcccctatggccagtgctgggtctttgctggcgtgaccaccacagtgctgcgctgcctgggtctggccacccgtactgtcaccaacttcaactccgcccacgacacagacacatc

SEQ ID NO: 101294 - DNA, 120 bp, Artificial Sequence
  ENSG00000092295_11 (sequence is synthesized)
ggccggatctgccctcgggctttgatgggtggcaggtggtggatgccacaccccaagagactagcagtggcatcttctgctgcggcccctgctctgtggagtccatcaagaatggcctgg

SEQ ID NO: 101295 - DNA, 120 bp, Artificial Sequence
  ENSG00000092295_12 (sequence is synthesized)
tctacatgaagtacgacacgcctttcatttttgctgaggtgaatagtgacaaggtgtactggcagcggcaggatgatggcagcttcaagattgtttatgtggaggagaaggccatcggca

SEQ ID NO: 101296 - DNA, 120 bp, Artificial Sequence
  ENSG00000092295_13 (sequence is synthesized)
cactcattgtcacaaaggccatcagctccaacatgcgggaggacatcacctacctctataagcacccagaaggctcagacgcagagcggaaggcagtagagacagcagcagcccacggca

SEQ ID NO: 101297 - DNA, 120 bp, Artificial Sequence
  ENSG00000092295_14 (sequence is synthesized)
gcaaacccaatgtgtatgccaaccggggctcagcggaggatgtggccatgcaggtggaggcacaggacgcggtgatggggcaggatctgatggtctctgtgatgctgatcaatcacagca

SEQ ID NO: 101298 - DNA, 120 bp, Artificial Sequence
  ENSG00000092295_15 (sequence is synthesized)
gcagccgccgcacagtgaaactgcacctctacctctcagtcactttctatactggtgtcagtggtaccatcttcaaggagaccaagaaggaagtggagctggcaccaggggcctcggacc

SEQ ID NO: 101299 - DNA, 120 bp, Artificial Sequence
  ENSG00000092295_16 (sequence is synthesized)
gtgtgaccatgccagtggcctacaaggaataccggccccatcttgtggaccagggggccatgctgctcaatgtctcaggccacgtcaaggagagcgggcaggtgctggccaagcagcaca

SEQ ID NO: 101300 - DNA, 120 bp, Artificial Sequence
  ENSG00000092295_17 (sequence is synthesized)
ccttccgtctgcgcaccccagacctctccctcacgttactgggagcagcagtggttggccaggagtgtgaagtacagattgtcttcaagaacccccttcccgtcaccctcaccaatgtcg

SEQ ID NO: 101301 - DNA, 120 bp, Artificial Sequence
  ENSG00000092295_18 (sequence is synthesized)
tcttccggctcgaaggctctgggttacagaggcccaagatcctcaacgttggggacattggaggcaatgaaacagtgacactgcgccagtcgtttgtgcctgtgcgaccaggcccccgcc

SEQ ID NO: 101302 - DNA, 120 bp, Artificial Sequence
  ENSG00000092295_19 (sequence is synthesized)
agctcattgccagcttggacagcccacagctctcccaggtgcacggtgtcatccaggtggatgtggccccagcccctggggatgggggcttcttctcagacgctggaggtgacagtcact

SEQ ID NO: 101303 - DNA, 120 bp, Artificial Sequence
  ENSG00000092295_20 (sequence is synthesized)
taggagagaccatccctatggcatctcgaggtggagcttagccccgtgccaggagcaatgggactggagtcagatgagcaaggacattgccccaagataggggcacactacagagcagct

SEQ ID NO: 101304 - DNA, 120 bp, Artificial Sequence
  ENSG00000092295_21 (sequence is synthesized)
ccccaggagctcaggtggggagtccagggctcccggagggggagtccagggctcccggagagggagtcagtcttcacttgcactgggggaacagatgctaataaactgttttttaatgaa

SEQ ID NO: 101305 - DNA, 120 bp, Artificial Sequence
  ENSG00000092295_22 (sequence is synthesized)
gtcggcctgtttttactgtcttctgctaggcggcccatgggcagagctgggacactagtgggaaggaaggaaagaaggaagaaggccctggctgacgggcctgaggacaagacccaagga

SEQ ID NO: 101306 - DNA, 120 bp, Artificial Sequence
  ENSG00000092295_23 (sequence is synthesized)
gagcctccctgaagatgcctagcctcctcctctctaccttgggatcgccttggtgccatcctcagtgtttccccagtgacggggtggagtaaggatgcacacagcacaggtgcctgagcc

SEQ ID NO: 101307 - DNA, 120 bp, Artificial Sequence
  ENSG00000092295_24 (sequence is synthesized)
acccccgggcaggttctggtgcttggagctggacaagaaaaggcagtgtgggtgtggagggctccctgccagttcctggggcctctctgtccccactccccacggcacctccctgcctga

SEQ ID NO: 101308 - DNA, 120 bp, Artificial Sequence
  ENSG00000092295_25 (sequence is synthesized)
acagaactcggcagcaggagcctgtgagagcagaggtaggcagcctaagcttgggaccagaaggtcggccagacagggctgtgggtggaagggcctgcctgccccactgcccttgcagct

SEQ ID NO: 101309 - DNA, 120 bp, Artificial Sequence
  ENSG00000092295_26 (sequence is synthesized)
tcttcatccgggagaaggggctcctcacatgcccagtctggtaggaatcagcctggtgccaggggccatcacagcggtggctcccaccaaagcccagcctaagcccccagacctcacccc

SEQ ID NO: 101310 - DNA, 120 bp, Artificial Sequence
  ENSG00000092330_0 (sequence is synthesized)
gaggcaccctcgggctcgagacagcggcgacgtttaaagctgagcgacccagtgccactggagacggtcagcttctccactcaggctcctccagcccgagccagaagaccccctccccca

SEQ ID NO: 101311 - DNA, 120 bp, Artificial Sequence
  ENSG00000092330_1 (sequence is synthesized)
gaattctgggggccgatggaagggagccgagtcagatcgcgaggtacccagagccgacagaccggagcgacagggagttgccagaagccccgcccctaggagtgatcggaaagcctcacc

SEQ ID NO: 101312 - DNA, 120 bp, Artificial Sequence
  ENSG00000092330_2 (sequence is synthesized)
catccgggtgaggaacccggagggaccgcctccgggcggagcccgccgaccatggctacgcccctggtggcgggtcccgcagctctacgcttcgccgccgcggctagctggcaggttgtg

SEQ ID NO: 101313 - DNA, 120 bp, Artificial Sequence
  ENSG00000092330_3 (sequence is synthesized)
cgcggacgctgcgtggaacattttccgcgagtactggagtttctgcgatctctgcgcgctgttgcccctggcttggttcgctaccggcaccacgaacgcctttgtatgggcctaaaggcc

SEQ ID NO: 101314 - DNA, 120 bp, Artificial Sequence
  ENSG00000092330_4 (sequence is synthesized)
aaggtggtggtggagctgatcctgcagggccggccttgggcccaagtcctgaaagccctgaatcaccactttccagaatctggacctatagtgcgggatcccaaggctacaaagcaggat

SEQ ID NO: 101315 - DNA, 120 bp, Artificial Sequence
  ENSG00000092330_5 (sequence is synthesized)
ctgaggaagattttggaggcacaggaaactttttaccagcaggtgaagcagctgtcagaggctcctgtggatttggcctcgaagctgcaggaacttgaacaagagtatggggaacccttt

SEQ ID NO: 101316 - DNA, 120 bp, Artificial Sequence
  ENSG00000092330_6 (sequence is synthesized)
ctggctgccatggaaaagctgctttttgagtacttgtgtcagctggagaaagcactgcctacaccgcaggcacagcagcttcaggatgtgctgagttggatgcagcctggagtctctatc

SEQ ID NO: 101317 - DNA, 120 bp, Artificial Sequence
  ENSG00000092330_7 (sequence is synthesized)
cctcttctcttgcctggagacaatatggtgtggacatggggtggctgcttccagagtgctctgttactgactcagtgaacctggctgagcccatggaacagaatcctcctcagcaacaaa

SEQ ID NO: 101318 - DNA, 120 bp, Artificial Sequence
  ENSG00000092330_8 (sequence is synthesized)
gactagcactccacaatcccctgccaaaagccaagcctggcacacatcttcctcagggaccatcttcaaggacgcacccagaacctctagctggccgacacttcaatctggcccctctag

SEQ ID NO: 101319 - DNA, 120 bp, Artificial Sequence
  ENSG00000092330_9 (sequence is synthesized)
gccgacgaagagttcagtcccaatgggcctccactaggggaggccataaggagcgccccacagtcatgctgtttccctttaggaatctcggctcaccaacccaggtcatatctaagcctg

SEQ ID NO: 101320 - DNA, 120 bp, Artificial Sequence
  ENSG00000092330_10 (sequence is synthesized)
agagcaaggaagaacatgcgatatacacagcagacctagccatgggcacaagagcagcctccactgggaagtctaagagtccatgccagaccctggggggaagggctctgaaggagaacc

SEQ ID NO: 101321 - DNA, 120 bp, Artificial Sequence
  ENSG00000092330_11 (sequence is synthesized)
cagttgacttgcctgccacagagcaaaaggagaattgcttggattgctacatggaccccctgagactatcattattacctcctagggccaggaagccagtgtgtcctccgtctctgtgca

SEQ ID NO: 101322 - DNA, 120 bp, Artificial Sequence
  ENSG00000092330_12 (sequence is synthesized)
gctccgtcattaccataggggacttggttttagactctgatgaggaagaaaatggccagggggaaggaaaggaatctctggaaaactatcagaagacaaagtttgacaccttgataccca

SEQ ID NO: 101323 - DNA, 120 bp, Artificial Sequence
  ENSG00000092330_13 (sequence is synthesized)
ctctctgtgaatacctacccccttctggccacggtgccatacctgtttcttcctgtgactgtagagacagttctagacctttgtgatagaactaaaatgctctctgtactctagtctcct

SEQ ID NO: 101324 - DNA, 120 bp, Artificial Sequence
  ENSG00000092330_14 (sequence is synthesized)
gcctcctcagctctgcaagtagtttagtaggaatgaagtggaagtccaggcttggattgcctaactacactgctaaaaatatttgtaatccttaataattaaactttggatttgttaaaa

SEQ ID NO: 101325 - DNA, 120 bp, Artificial Sequence
  ENSG00000092330_15 (sequence is synthesized)
catgcttcagaattcagagggttcagggaatggtttcggatagtaggctctccctgctcccttctctacaggaatctctggaaaactatcagaagacaaagtttgacaccttgataccca

SEQ ID NO: 101326 - DNA, 120 bp, Artificial Sequence
  ENSG00000092330_16 (sequence is synthesized)
cctagggccaggaagccaggtaggtagtctgagtcaggattggatcaacagcctcctctcttggggactctcaagagcctgtgttcatctagaagtagtagtttgattctggtttccctc

SEQ ID NO: 101327 - DNA, 120 bp, Artificial Sequence
  ENSG00000092330_17 (sequence is synthesized)
aaagcactgcctacaccgcaggcacagcaggtttcgctggggcaaaacatgtaagggcagagtgtggggtggctgtttcaaggattgtggtcttcatacctctgtccctgcccacagctt

SEQ ID NO: 101328 - DNA, 85 bp, Artificial Sequence
  ENSG00000092330_18 (sequence is synthesized)
cggcctcccaaatggccaacccacttttgacctaatctcccctgctgtaggaacttgaacaagagtatggggaaccctttctggc

SEQ ID NO: 101329 - DNA, 120 bp, Artificial Sequence
  ENSG00000092345_0 (sequence is synthesized)
attggctgaggccgataccacgcgccccgatacccggcgcaggagccacctccctgagccccgcggaccacgcctcagtccgcctgcgctcctcagcctgacggtccgcctttcggggct

SEQ ID NO: 101330 - DNA, 120 bp, Artificial Sequence
  ENSG00000092345_1 (sequence is synthesized)
cctcagccttgtcacccgctcttggttttccttttctcttcatctttggctcctttgaccactcgaagccgcgcagcgggttccagcggacctcacagcagccccagaagtggtgcgcca

SEQ ID NO: 101331 - DNA, 120 bp, Artificial Sequence
  ENSG00000092345_2 (sequence is synthesized)
agcacagcctctgctcctcctggagccggtcgggaactgctgcctgccgccatcatgtctactgcaaatcctgaaactccaaactcaaccatctccagagaggccagcacccagtcctca

SEQ ID NO: 101332 - DNA, 120 bp, Artificial Sequence
  ENSG00000092345_3 (sequence is synthesized)
tcagctgcaaccagccaaggctatattttaccagaaggcaaaatcatgccaaacactgtttttgttggaggaattgatgttaggatggatgaaactgagattagaagcttctttgctaga

SEQ ID NO: 101333 - DNA, 120 bp, Artificial Sequence
  ENSG00000092345_4 (sequence is synthesized)
tatggttcagtgaaagaagtgaagataatcactgatcgaactggtgtgtccaaaggctatggatttgtttcattttttaatgacgtggatgtgcagaagatagtagaatcacagataaat

SEQ ID NO: 101334 - DNA, 120 bp, Artificial Sequence
  ENSG00000092345_5 (sequence is synthesized)
gctgggccctgcaatcaggaaacaaaatttatgtgcttatcatgtgcagccacgtcctttggtttttaatcatcctcctccaccacagtttcagaatgtctggactaatccaaacactga

SEQ ID NO: 101335 - DNA, 120 bp, Artificial Sequence
  ENSG00000092345_6 (sequence is synthesized)
tggactaatccaaacactgaaacttatatgcagcccacaaccacgatgaatcctataactcagtatgttcaggcatatcctacttacccaaattcaccagttcaggtcatcactggatat

SEQ ID NO: 101336 - DNA, 120 bp, Artificial Sequence
  ENSG00000092345_7 (sequence is synthesized)
cagttgcctgtatataattatcagatgccaccacagtggcctgttggggagcaaaggagctatgttgtacctccggcttattcagctgttaactaccactgtaatgaagttgatccagga

SEQ ID NO: 101337 - DNA, 120 bp, Artificial Sequence
  ENSG00000092345_8 (sequence is synthesized)
gctgaagttgtgccaaatgaatgttcagttcatgaagctactccaccctctggaaatggcccacaaaagaaatctgtggaccgaagcatacaaacggtggtatcttgtctgtttaatcca

SEQ ID NO: 101338 - DNA, 120 bp, Artificial Sequence
  ENSG00000092345_9 (sequence is synthesized)
gagaacagactgagaaactctgttgttactcaagatgactacttcaaggataaaagagtgcatcactttagaagaagtcgggcaatgcttaaatctgtttgatcctcctggcttatctag

SEQ ID NO: 101339 - DNA, 120 bp, Artificial Sequence
  ENSG00000092345_10 (sequence is synthesized)
ttacatgggaagttgctggttttgaatattaagctaaaaggtttccactattatagaaattctgaattttggtaaatcacactcaaactttgtgtataagttgtattattagactctcta

SEQ ID NO: 101340 - DNA, 120 bp, Artificial Sequence
  ENSG00000092345_11 (sequence is synthesized)
gttttatcttaaactgttcttcattagatgtttatttagaaactggttctgtgttgaaatatagttgaaagtaaaaaaataattgagactgaaagaaactaagatttatctgcaaggatt

SEQ ID NO: 101341 - DNA, 120 bp, Artificial Sequence
  ENSG00000092345_12 (sequence is synthesized)
aaaatgtttttaaaaacctattttgaaaggtcagaattttgttggtctgaatacaaacatttcacttctccaacaagtacctgtgaacagtacagtatttacagtattgagctttgcatt

SEQ ID NO: 101342 - DNA, 120 bp, Artificial Sequence
  ENSG00000092345_13 (sequence is synthesized)
tatgatttctccagaaatttaccacaaaagcaaaatttttaaaactgcatttttaatcagtggaactcaatatatagttagctttattgaagtcttcttatctaaacccagcaaaacaga

SEQ ID NO: 101343 - DNA, 120 bp, Artificial Sequence
  ENSG00000092345_14 (sequence is synthesized)
ttcaaagcgaacagtccaatcagtgggtcatatgtttattcaaaatattttatcttttagctagaatccacacatatatatcctatttgattagggtagtaattaggataactaaaattc

SEQ ID NO: 101344 - DNA, 120 bp, Artificial Sequence
  ENSG00000092345_15 (sequence is synthesized)
tgggcctaattttttaaagaatccaagacaaactaaactttactaggtacataagcttctcaatgagtcaccattcttcttttttgtaaaaacttttttctttgaaatgctaaacttggc

SEQ ID NO: 101345 - DNA, 120 bp, Artificial Sequence
  ENSG00000092345_16 (sequence is synthesized)
tgtatgtcaaattgtgcaaaatattggtattaaagaatgctgcaacttttttatgtctcttagaggttaatcagagtatctgaagggaattgtttttataaaaacattgaaatattagtt

SEQ ID NO: 101346 - DNA, 120 bp, Artificial Sequence
  ENSG00000092345_17 (sequence is synthesized)
acttgctataaatagatttagtctgttatatttccttttgtaaagtaaaatatgtccagaagagtcaaagtagttagttttggttatttctaaaccacaaaagttgtttaataagtatat

SEQ ID NO: 101347 - DNA, 120 bp, Artificial Sequence
  ENSG00000092345_18 (sequence is synthesized)
cttaagaatgtgctagagttaaaagttagcattgtttctagattagctggtgtcttcattttacattgtgacaaacagctagagcatcagagcccttttgctataccacagtctttcgtt

SEQ ID NO: 101348 - DNA, 120 bp, Artificial Sequence
  ENSG00000092345_19 (sequence is synthesized)
tccagcctttgtcactagtctttgaggaggtttgctcctagaactggtgatataaagaatgaaagtagctgtatgagcagagcagttcaagggccaaaccctggaacggtagcaatggga

SEQ ID NO: 101349 - DNA, 120 bp, Artificial Sequence
  ENSG00000092345_20 (sequence is synthesized)
tataatacctttctaagggaaaaagttgtatcagtaccatttgatctgccatggacatgagtttaaagcggctttctggcccttctttcagtgacttcttccctaaaatgtagaaattct

SEQ ID NO: 101350 - DNA, 120 bp, Artificial Sequence
  ENSG00000092345_21 (sequence is synthesized)
aacttaatgtagttactgtgagccatattactagtgccccctagggtctataattccttaaaattttcattctgaatctgaaggagagagtcttttaactttagaattcccaagagggct

SEQ ID NO: 101351 - DNA, 120 bp, Artificial Sequence
  ENSG00000092345_22 (sequence is synthesized)
ttattacacctcagaaattgaaagcactatgaatttgtccatttaaaaatgatctgtagtttttttggtgctataacattctgacacatatcattctgtgattaaatctccagcttacta

SEQ ID NO: 101352 - DNA, 120 bp, Artificial Sequence
  ENSG00000092345_23 (sequence is synthesized)
taaatgatatctatattctaaagagctacttctaattattccaatatgaccttaaggaaaagtaagggaataaatttttgtctttgttggagtgaagcatttaaaagagtaagggtaaaa

SEQ ID NO: 101353 - DNA, 120 bp, Artificial Sequence
  ENSG00000092345_24 (sequence is synthesized)
aagataaagtcctgaacctttcaaaatggaaaattaattctaaacttagaaatatgcttctgcctattgctgatactgtctttgcatacatgaataaaaataaagtttttttcttcaaaa

SEQ ID NO: 101354 - DNA, 120 bp, Artificial Sequence
  ENSG00000092345_25 (sequence is synthesized)
actcccacgcgcctccgccccgccagcctcatttctggcgcgctctccccgtggctccgcaagatggcggcgggcctgctgagggacttgccttcttaaacttcgagggccggagcttcc

SEQ ID NO: 101355 - DNA, 120 bp, Artificial Sequence
  ENSG00000092345_26 (sequence is synthesized)
ttaggaagtggttccctcctggtccctgtacttggtggggtgggcggggttcgtgggggcctcagcgtggggtgtggggcgtcctgaaggcatggccctgtagctgagggggctgggccg

SEQ ID NO: 101356 - DNA, 120 bp, Artificial Sequence
  ENSG00000092345_27 (sequence is synthesized)
gaagtgcctctggtcccctcgcgcctgtcagctgcgggggacttgctgatggcggctccctcgtgtggcggcgacagaaaagctcgcctgacgccatctttgccgcacgagtctactgca

SEQ ID NO: 101357 - DNA, 120 bp, Artificial Sequence
  ENSG00000092345_28 (sequence is synthesized)
cctgagacaaaggccaggcctctcctcagggtacgttgcgctggttcatagctcatttatcaagcccatccacttctgcctgatcatcaaggccgccttcaacctgtccacccatgggag

SEQ ID NO: 101358 - DNA, 120 bp, Artificial Sequence
  ENSG00000092345_29 (sequence is synthesized)
cagacccttaccactcatcagcacagtgcctcagcattctcttctccttgtctttgcactctccaggtctcccagtgctgatgtcttcctctctgctacttctgccaaagtctactgcaa

SEQ ID NO: 101359 - DNA, 120 bp, Artificial Sequence
  ENSG00000092377_0 (sequence is synthesized)
ccagtgcccccaattcgcgctcgggagtgaggagccgccaacaccccagctccgctgctgccgccaccgcagtgctctctagtcgccattggttacctaaactttccagtacccgcgacc

SEQ ID NO: 101360 - DNA, 120 bp, Artificial Sequence
  ENSG00000092377_1 (sequence is synthesized)
gcggcggggcagaggcggcccaggggcggcacgcggctgctccggtgcgccgggctcttttcggccgccgcacggccgggcctcacaggctgccctcctgagagaggctcagaacacggc

SEQ ID NO: 101361 - DNA, 120 bp, Artificial Sequence
  ENSG00000092377_2 (sequence is synthesized)
aggctcagaacacggccaggtacgcgccgccgccacagttgcgctgctagcgacgaggtgttttcctctgctggcacgccagaatccctggttcagcctggaaggcgaggggcaggactc

SEQ ID NO: 101362 - DNA, 120 bp, Artificial Sequence
  ENSG00000092377_3 (sequence is synthesized)
cccagacagtggcctcagtgtggcattgatgtcctaggttgtaaggtgctaaggctggtccccacagacggcttgccatttctatgactggatgctgagaagcctgctggttcagaggtc

SEQ ID NO: 101363 - DNA, 120 bp, Artificial Sequence
  ENSG00000092377_4 (sequence is synthesized)
cacacatgaagttaccataaagagggtggttccaacttcatcaatacctcatcgccatgaggtgaggctaagatgagcataaccagtgacgaggtgaactttctggtttatcggtatctc

SEQ ID NO: 101364 - DNA, 120 bp, Artificial Sequence
  ENSG00000092377_5 (sequence is synthesized)
caggagtcaggtttttctcactcggctttcacgtttgggatcgagagccacatcagccagtccaacatcaatgggacactagtgccaccgtctgccctcatctccattctccagaaggga

SEQ ID NO: 101365 - DNA, 120 bp, Artificial Sequence
  ENSG00000092377_6 (sequence is synthesized)
ctgcagtatgtagaggctgagataagcatcaacaaggatggcacagtgttcgacagccgccctatagagtccctgtccctgatagttgctgtgattcctgatgtggtgcagatgcggcag

SEQ ID NO: 101366 - DNA, 120 bp, Artificial Sequence
  ENSG00000092377_7 (sequence is synthesized)
caggcatttggagagaagctcactcagcagcaagccagtgcagcagccacagaggcatcagcaatggcaaaggcggcaaccatgaccccagctgctatttcccagcaaaatcctccaaag

SEQ ID NO: 101367 - DNA, 120 bp, Artificial Sequence
  ENSG00000092377_8 (sequence is synthesized)
aaccgagaggccacagtgaacggggaagagaatggagcacatgaaatcaataatcactcaaagccaatggaaatagatggggatgttgagattccacccaacaaagccacagtccttcgg

SEQ ID NO: 101368 - DNA, 120 bp, Artificial Sequence
  ENSG00000092377_9 (sequence is synthesized)
gaaccctgtcagtgatttgctagcctctggatctggagactcaactgcaaggatatggaacctgaatgagaatagcaacgggggctccacccagctcgtgttgagacattgtatacgaga

SEQ ID NO: 101369 - DNA, 120 bp, Artificial Sequence
  ENSG00000092377_10 (sequence is synthesized)
aggggggcacgacgtcccaagtaataaagatgtcacctcactggactggaacagtgatggaacactattggctatgggttcatatgatggtttcgcaagaatatggacagaaaatggtaa

SEQ ID NO: 101370 - DNA, 120 bp, Artificial Sequence
  ENSG00000092377_11 (sequence is synthesized)
cctggccagcaccttaggccaacataaaggccccatcttcgctctgaaatggaacaaaaaggggaattatgttttgagtgctggtgtagacaaaacaacaataatttgggatgctcacac

SEQ ID NO: 101371 - DNA, 120 bp, Artificial Sequence
  ENSG00000092377_12 (sequence is synthesized)
aggagaagccaaacagcagtttccttttcattcagcccccgcccttgatgtggactggcagaacaacatgacctttgcctcctgtagcacagacatgtgtatccatgtgtgcaggctcgg

SEQ ID NO: 101372 - DNA, 120 bp, Artificial Sequence
  ENSG00000092377_13 (sequence is synthesized)
ctgtgaccacccagtcaaaaccttccagggacacacaaacgaggtcaatgccatcaaatgggatccttctggaatgttgctggcgtcctgctcggatgacatgacattgaagatctggag

SEQ ID NO: 101373 - DNA, 120 bp, Artificial Sequence
  ENSG00000092377_14 (sequence is synthesized)
tatgaagcaggatgcatgcgtccacgatcttcaggctcacagcaaagagatctacaccatcaagtggagccccaccgggcctgccaccagcaacccaaactccagcatcatgttggcaag

SEQ ID NO: 101374 - DNA, 120 bp, Artificial Sequence
  ENSG00000092377_15 (sequence is synthesized)
tgcttcatttgattctacagtgcgactgtgggatgtggagcaaggtgtctgcacccacacactcatgaagcatcaagagcctgtctacagtgtagctttcagccccgatggaaagtactt

SEQ ID NO: 101375 - DNA, 120 bp, Artificial Sequence
  ENSG00000092377_16 (sequence is synthesized)
ggctagtggatcctttgacaagtatgttcatatctggaatactcagagtggaagtctcgtccacagctaccaaggcactggcggtatcttcgaggtgtgctggaacgcccgaggagataa

SEQ ID NO: 101376 - DNA, 120 bp, Artificial Sequence
  ENSG00000092377_17 (sequence is synthesized)
agtgggcgccagcgcgtctgatggctctgtgtgtgttctggatctgtgaaagtaaacacaaaatatagaaaaaaagaaaagaattctaatgacctgccttgaatgcatggggttgcagct

SEQ ID NO: 101377 - DNA, 120 bp, Artificial Sequence
  ENSG00000092377_18 (sequence is synthesized)
ctgttcaaacacaattctatcagctccaaaatgtgtgaacttgacttgtgttagagtatattctgaaaccaacttgtcccaggccacaggagtgtatatgtttcataatctttatcaaga

SEQ ID NO: 101378 - DNA, 120 bp, Artificial Sequence
  ENSG00000092377_19 (sequence is synthesized)
cccagacagtggcctcagtgtggggaatgccagctgttctcttaacagaagggcagtttttgaagaaatgaagcaggacttgatgtggattgtcataaactgtttctccctaaagaggct

SEQ ID NO: 101379 - DNA, 120 bp, Artificial Sequence
  ENSG00000092377_20 (sequence is synthesized)
cgccagcgcgtctgatggctctgattcacttgcagtatggatttcaaatgtgctggcatcagaacctgaagaggaaaaaacaaaaattaatatgacatggtttaaaaggatacagaacaa

SEQ ID NO: 101380 - DNA, 120 bp, Artificial Sequence
  ENSG00000092377_21 (sequence is synthesized)
aaggaaaaaaatgtgagcatcagtcagcagtgtgagagctaatgtgaatcccatcaaaagaataatcttgggcactggtcatcattccagcaatacaccttctttctgttagaccctttg

SEQ ID NO: 101381 - DNA, 120 bp, Artificial Sequence
  ENSG00000092421_0 (sequence is synthesized)
gggtcggaggagacgccagccaaagtaggcggagttgcggaaggagagtccgatctgcgcaatccagtccgggacttggctccgcccgggagcggcggcctctccggtgacagaggagta

SEQ ID NO: 101382 - DNA, 120 bp, Artificial Sequence
  ENSG00000092421_1 (sequence is synthesized)
gtgagcggcacggggtgaggctgcagccaactccgctccccgcgcactcggctgcccaggcgctcggaacccagcagcggcgctcctccgcggtgccggtcgcccgcgatgcccgcttag

SEQ ID NO: 101383 - DNA, 120 bp, Artificial Sequence
  ENSG00000092421_2 (sequence is synthesized)
cagcgtgtagcagcggccagcatcaccacacccgcggcaccgcgctgccggccgcagagccgggccagagccttgcacccctgccccagcccccaccccgccccccgccctgaaatgact

SEQ ID NO: 101384 - DNA, 120 bp, Artificial Sequence
  ENSG00000092421_3 (sequence is synthesized)
tgttaatcggcgcagacaccaccaaggggactcaccgaagtggaatccaagtggaatttggatttggagaagagtttcttgaacatttaccctcttccttgttggttttctttttctttt

SEQ ID NO: 101385 - DNA, 120 bp, Artificial Sequence
  ENSG00000092421_4 (sequence is synthesized)
tcttctttttttttttggcttcttttttcctctccccttctccgctcgtcattggagatgaacacatcgcgtttgcatcccagaaagtagtcgccgcgactatttcccccaaagagacaa

SEQ ID NO: 101386 - DNA, 120 bp, Artificial Sequence
  ENSG00000092421_5 (sequence is synthesized)
gcacacatgtaggaatgacaaaggcttgcgaaggagagagcgcagcccgcggcccggagagatcccctcgataatggattactaaatgggatacacgctgtaccagttcgctccgagccc

SEQ ID NO: 101387 - DNA, 120 bp, Artificial Sequence
  ENSG00000092421_6 (sequence is synthesized)
cggccgcctgtccgtcgatgcaccgaaaagggtgaagtagagaaataaagtctccccgctgaactactatgaggtcagaagccttgctgctatatttcacactgctacactttgctgggg

SEQ ID NO: 101388 - DNA, 120 bp, Artificial Sequence
  ENSG00000092421_7 (sequence is synthesized)
ctggtttcccagaagattctgagccaatcagtatttcgcatggcaactatacaaaacagtatccggtgtttgtgggccacaagccaggacggaacaccacacagaggcacaggctggaca

SEQ ID NO: 101389 - DNA, 120 bp, Artificial Sequence
  ENSG00000092421_8 (sequence is synthesized)
tccagatgattatgatcatgaacggaaccctctacattgctgctagggaccatatttatactgttgatatagacacatcacacacggaagaaatttattgtagcaaaaaactgacatgga

SEQ ID NO: 101390 - DNA, 120 bp, Artificial Sequence
  ENSG00000092421_9 (sequence is synthesized)
aatctagacaggccgatgtagacacatgcagaatgaagggaaaacataaggatgagtgccacaactttattaaagttcttctaaagaaaaacgatgatgcattgtttgtctgtggaacta

SEQ ID NO: 101391 - DNA, 120 bp, Artificial Sequence
  ENSG00000092421_10 (sequence is synthesized)
atgccttcaacccttcctgcagaaactataagatggatacattggaaccattcggggatgaattcagcggaatggccagatgcccatatgatgccaaacatgccaacgttgcactgtttg

SEQ ID NO: 101392 - DNA, 120 bp, Artificial Sequence
  ENSG00000092421_11 (sequence is synthesized)
cagatggaaaactatactcagccacagtgactgacttccttgccattgacgcagtcatttaccggagtcttggagaaagccctaccctgcggaccgtcaagcacgattcaaaatggttga

SEQ ID NO: 101393 - DNA, 120 bp, Artificial Sequence
  ENSG00000092421_12 (sequence is synthesized)
aagaaccatactttgttcaagccgtggattacggagattatatctacttcttcttcagggaaatagcagtggagtataacaccatgggaaaggtagttttcccaagagtggctcaggttt

SEQ ID NO: 101394 - DNA, 120 bp, Artificial Sequence
  ENSG00000092421_13 (sequence is synthesized)
gtaagaatgatatgggaggatctcaaagagtcctggagaaacagtggacgtcgttcctgaaggcgcgcttgaactgctcagttcctggagactctcatttttatttcaacattctccagg

SEQ ID NO: 101395 - DNA, 120 bp, Artificial Sequence
  ENSG00000092421_14 (sequence is synthesized)
cagttacagatgtgattcgtatcaacgggcgtgatgttgtcctggcaacgttttctacaccttataacagcatccctgggtctgcagtctgtgcctatgacatgcttgacattgccagtg

SEQ ID NO: 101396 - DNA, 120 bp, Artificial Sequence
  ENSG00000092421_15 (sequence is synthesized)
tttttactgggagattcaaggaacagaagtctcctgattccacctggacaccagttcctgatgaacgagttcctaagcccaggccaggttgctgtgctggctcatcctccttagaaagat

SEQ ID NO: 101397 - DNA, 120 bp, Artificial Sequence
  ENSG00000092421_16 (sequence is synthesized)
atgcaacctccaatgagttccctgatgataccctgaacttcatcaagacgcacccgctcatggatgaggcagtgccctccatcttcaacaggccatggttcctgagaacaatggtcagat

SEQ ID NO: 101398 - DNA, 120 bp, Artificial Sequence
  ENSG00000092421_17 (sequence is synthesized)
accgccttaccaaaattgcagtggacacagctgctgggccatatcagaatcacactgtggtttttctgggatcagagaagggaatcatcttgaagtttttggccagaataggaaatagtg

SEQ ID NO: 101399 - DNA, 120 bp, Artificial Sequence
  ENSG00000092421_18 (sequence is synthesized)
gttttctaaatgacagccttttcctggaggagatgagtgtttacaactctgaaaaatgcagctatgatggagtcgaagacaaaaggatcatgggcatgcagctggacagagcaagcagct

SEQ ID NO: 101400 - DNA, 120 bp, Artificial Sequence
  ENSG00000092421_19 (sequence is synthesized)
ctctgtatgttgcgttctctacctgtgtgataaaggttccccttggccggtgtgaacgacatgggaagtgtaaaaaaacctgtattgcctccagagacccatattgtggatggataaagg

SEQ ID NO: 101401 - DNA, 120 bp, Artificial Sequence
  ENSG00000092421_20 (sequence is synthesized)
aaggtggtgcctgcagccatttatcacccaacagcagactgacttttgagcaggacatagagcgtggcaatacagatggtctgggggactgtcacaattcctttgtggcactgaatgggc

SEQ ID NO: 101402 - DNA, 120 bp, Artificial Sequence
  ENSG00000092421_21 (sequence is synthesized)
attccagttccctcttgcccagcacaaccacatcagattcgacggctcaagaggggtatgagtctaggggaggaatgctggactggaagcatctgcttgactcacctgacagcacagacc

SEQ ID NO: 101403 - DNA, 120 bp, Artificial Sequence
  ENSG00000092421_22 (sequence is synthesized)
ctttgggggcagtgtcttcccataatcaccaagacaagaagggagtgattcgggaaagttacctcaaaggccacgaccagctggttcccgtcaccctcttggccattgcagtcatcctgg

SEQ ID NO: 101404 - DNA, 120 bp, Artificial Sequence
  ENSG00000092421_23 (sequence is synthesized)
ctttcgtcatgggggccgtcttctcgggcatcaccgtctactgcgtctgtgatcatcggcgcaaagacgtggctgtggtgcagcgcaaggagaaggagctcacccactcgcgccggggct

SEQ ID NO: 101405 - DNA, 120 bp, Artificial Sequence
  ENSG00000092421_24 (sequence is synthesized)
ccatgagcagcgtcaccaagctcagcggcctctttggggacactcaatccaaagacccaaagccggaggccatcctcacgccactcatgcacaacggcaagctcgccactcccggcaaca

SEQ ID NO: 101406 - DNA, 120 bp, Artificial Sequence
  ENSG00000092421_25 (sequence is synthesized)
cggccaagatgctcattaaagcagaccagcaccacctggacctgacggccctccccaccccagagtcaaccccaacgctgcagcagaagcggaagcccagccgcggcagccgcgagtggg

SEQ ID NO: 101407 - DNA, 120 bp, Artificial Sequence
  ENSG00000092421_26 (sequence is synthesized)
agaggaaccagaacctcatcaatgcctgcacaaaggacatgccccccatgggctcccctgtgattcccacggacctgcccctgcgggcctcccccagccacatccccagcgtggtggtcc

SEQ ID NO: 101408 - DNA, 120 bp, Artificial Sequence
  ENSG00000092421_27 (sequence is synthesized)
tgcccatcacgcagcagggctaccagcatgagtacgtggaccagcccaaaatgagcgaggtggcccagatggcgctggaggaccaggccgccacactggagtataagaccatcaaggaac

SEQ ID NO: 101409 - DNA, 120 bp, Artificial Sequence
  ENSG00000092421_28 (sequence is synthesized)
gtggagaacctggacagcctgccccccaaagttccacagcgggaggcctccctgggtcccccgggagcctccctgtctcagaccggtctaagcaagcggctggaaatgcaccactcctct

SEQ ID NO: 101410 - DNA, 120 bp, Artificial Sequence
  ENSG00000092421_29 (sequence is synthesized)
tcctacggggttgactataagaggagctaccccacgaactcgctcacgagaagccaccaggccaccactctcaaaagaaacaacactaactcctccaattcctctcacctctccagaaac

SEQ ID NO: 101411 - DNA, 120 bp, Artificial Sequence
  ENSG00000092421_30 (sequence is synthesized)
cagagctttggcaggggagacaacccgccgcccgccccgcagagggtggactccatccaggtgcacagctcccagccatctggccaggccgtgactgtctcgaggcagcccagcctcaac

SEQ ID NO: 101412 - DNA, 120 bp, Artificial Sequence
  ENSG00000092421_31 (sequence is synthesized)
gcctacaactcactgacaaggtcggggctgaagcgtacgccctcgctaaagccggacgtaccccccaaaccatcctttgctcccctttccacatccatgaagcccaatgatgcgtgtaca

SEQ ID NO: 101413 - DNA, 120 bp, Artificial Sequence
  ENSG00000092421_32 (sequence is synthesized)
taatcccagggggagggggtcaggtgtcgaaccagcaggcaaggcgaggtgcccgctcagctcagcaaggttctcaactgcctcgagtacccaccagaccaagaaggcctgcggcagagc

SEQ ID NO: 101414 - DNA, 120 bp, Artificial Sequence
  ENSG00000092421_33 (sequence is synthesized)
cgaggacgctgggtcctcctctctgggacacaggggtactcacgaaaactgggccgcgtggtttggtgaaggtttgcaacggcggggactcaccttcattctcttccttcactttccccc

SEQ ID NO: 101415 - DNA, 120 bp, Artificial Sequence
  ENSG00000092421_34 (sequence is synthesized)
ccccacaccctacaacaggtcggacccacaaaagacttcagttatcatcacaaacatgagccaaaagcacatacctaccccatcccccacccccacacacacacacacacacacatgcac

SEQ ID NO: 101416 - DNA, 120 bp, Artificial Sequence
  ENSG00000092421_35 (sequence is synthesized)
cacatacacacacacgcacagaggtgaacagaaactgaaacattttgtccacaacttcacgggacgtggccagactgggtttgcgttccaacctgcaaaacacaaatacattttttaaaa

SEQ ID NO: 101417 - DNA, 120 bp, Artificial Sequence
  ENSG00000092421_36 (sequence is synthesized)
tcaagaaaatttaaaaagacaaaaaaaaaagaattcattgataattctaactcagactttaacaatggcagaagtttactatgcgcaaatactgtgaaatgcccgccagtgttacagctt

SEQ ID NO: 101418 - DNA, 120 bp, Artificial Sequence
  ENSG00000092421_37 (sequence is synthesized)
tctgttgcagcagataaatgccatgttgggcaactatgtcatagatttctgctcctcctctcttttaatgaaataacgtgaccgttaacgcaagtaactctttatttattgttcaccctt

SEQ ID NO: 101419 - DNA, 120 bp, Artificial Sequence
  ENSG00000092421_38 (sequence is synthesized)
tttttccttaaggaaaggactcttccaaatatcatcctatgaacagctcttcagaaagcccattgaaagttaaactatttaacgtgaaatccattaactggaataattgagtttctttat

SEQ ID NO: 101420 - DNA, 120 bp, Artificial Sequence
  ENSG00000092421_39 (sequence is synthesized)
ttttacaataaattcactgagtaaataagttggagctggaattctgagctttgtgtttggactgtctggtctgtagctaaaggaaaaagttaggaggggaatatttatttaaatctatca

SEQ ID NO: 101421 - DNA, 120 bp, Artificial Sequence
  ENSG00000092421_40 (sequence is synthesized)
gttcattgcctggtcaggtctctggcctataaacatgcaaaaaaactaattcatgttaaagtccttccagatcctaatttctaaagcaatcaggagagaaagcttttagaatggcacatc

SEQ ID NO: 101422 - DNA, 120 bp, Artificial Sequence
  ENSG00000092421_41 (sequence is synthesized)
atatctcattgatgccaacatggttttgtccatggttctgactttctgtgaaggcaccagcttgcaatatgccatcccatttcaccttgcatgtgagacagcaaacaaaatccacaaatg

SEQ ID NO: 101423 - DNA, 120 bp, Artificial Sequence
  ENSG00000092421_42 (sequence is synthesized)
gtgtgaactaatatgctggctgctaccttgcataaattaatgatttgatcacacgggttcttcgtggggttacatctgtgaatagcctgttttccacatgtaaatttgtgccttacacct

SEQ ID NO: 101424 - DNA, 120 bp, Artificial Sequence
  ENSG00000092421_43 (sequence is synthesized)
tgagttgtgtacacttgtaaactctttatgatcaactgttcccccttttgaaataagtgcagatatttatttaaccctcccttccccaccctctgccccacttccagccctctgaaagat

SEQ ID NO: 101425 - DNA, 120 bp, Artificial Sequence
  ENSG00000092421_44 (sequence is synthesized)
tggagtcaagcagatggaagaatgcagtggtgatagttgtcatgcgacagcctgagaacgctgggcagcaccacaccctccaattcacactgccttctagttgtgccaactggaaccacc

SEQ ID NO: 101426 - DNA, 120 bp, Artificial Sequence
  ENSG00000092421_45 (sequence is synthesized)
ctttggctgtgctgcgaagcatggaccccagtgttgttgtgggtgtgtcaaatcccctttcatcctcaagagctccctgcttcccttagattatttcaatacggtgatatccttatttgc

SEQ ID NO: 101427 - DNA, 120 bp, Artificial Sequence
  ENSG00000092421_46 (sequence is synthesized)
tagcagaaaagggactaacgtcccattcctcttttctgctgcgtccactggctagagagcaggcggtgcgcggttgggcagacacctgggaggagtctccaagccatgtgcacagcacac

SEQ ID NO: 101428 - DNA, 120 bp, Artificial Sequence
  ENSG00000092421_47 (sequence is synthesized)
acgtgcagtgcacacaaagaaatgacatggaaatagatgcaggcaggctggtccctgctgtgattaacgagtaactccaagtacaaggccgaccacaatggatgctgcaaaaacgttgac

SEQ ID NO: 101429 - DNA, 120 bp, Artificial Sequence
  ENSG00000092421_48 (sequence is synthesized)
tggggcaaaggattttttattttattttttattttgttaattatgtttttaggggatgggaggtggtgtgtgtttttctcctcttggttttcatttgctcaagcacacaaaagggacttt

SEQ ID NO: 101430 - DNA, 120 bp, Artificial Sequence
  ENSG00000092421_49 (sequence is synthesized)
tgtttactctatcatgaacaaaggaactgtccacatactgtaaaccatgagcagtgttgttgttgtttttttaaacagtatatttggtggtctctttgtctgcttttatttccagttcga

SEQ ID NO: 101431 - DNA, 120 bp, Artificial Sequence
  ENSG00000092421_50 (sequence is synthesized)
tcttctgggtttagttttgtctttaaaaagaattcaaaaaaagactgacaatgacagttttgagttggatagtgaaaaagtggagcctccataatcagtgtggttgccttcagacctgag

SEQ ID NO: 101432 - DNA, 120 bp, Artificial Sequence
  ENSG00000092421_51 (sequence is synthesized)
tacttagctgagggtgggtgagagccctttgttccaaaagtccattagttttgctgttgtttaggagtaggtggttgttgttgtttttactttttttttttttggcttttgtaatggaat

SEQ ID NO: 101433 - DNA, 120 bp, Artificial Sequence
  ENSG00000092421_52 (sequence is synthesized)
ccatgttcacatcctgtgaactctgtctcctgaaaccctgaagtatttcctagaacctgaaatattgttttcttccttgaattttctctagaaatgcagaaattaggaaggtgatgggtc

SEQ ID NO: 101434 - DNA, 120 bp, Artificial Sequence
  ENSG00000092421_53 (sequence is synthesized)
tgtatccccctgcccccttctttcccatgcttgactcccgagagtactggcagtgcagcacccatcattgacgtaagcggctgtcttgtccagtgtttgtaggcatcactgcctcagctg

SEQ ID NO: 101435 - DNA, 120 bp, Artificial Sequence
  ENSG00000092421_54 (sequence is synthesized)
ttaaggagacctgtgtcaaaacttacatccacattcctacacccccacaacccatcacttctggtgttaaccctaaaatacccacatgtattgagctggtcttctgcatttaagtatttc

SEQ ID NO: 101436 - DNA, 120 bp, Artificial Sequence
  ENSG00000092421_55 (sequence is synthesized)
tccccagtttttttccccactgtgtgtggggggagggtccataaacccgagtgtgcctttgctttccacccttgctagacactggtagatgcaacaaactcagatttatatttgttgtaa

SEQ ID NO: 101437 - DNA, 120 bp, Artificial Sequence
  ENSG00000092421_56 (sequence is synthesized)
agttgtaaaaatattgtgatgtcaccaattttccttccatctccacatcccctaacatctgattcacgacttaatgtatgttgtaagaaaagaaaaaagaaaagaaaaaaagggaaaaaa

SEQ ID NO: 101438 - DNA, 120 bp, Artificial Sequence
  ENSG00000092421_57 (sequence is synthesized)
aatgcgttactgtgtggactgagttcccatgactcgggctccccaggacaatgtctctttcttcaccaagctgatggtaaatatctggttagcttcatctatttaaaaccagccaagcag

SEQ ID NO: 101439 - DNA, 120 bp, Artificial Sequence
  ENSG00000092421_58 (sequence is synthesized)
tatttctaattatttgcttatgctgggcactgaattttctcttaggctgaccatatattttattaaagtagtcttgaattcaggagtggaaaaaaaaaagttatgttttagacctcaatg

SEQ ID NO: 101440 - DNA, 120 bp, Artificial Sequence
  ENSG00000092421_59 (sequence is synthesized)
taagctgaaaggaaataaaggaacttctatatttccatttctcaggctgattttccttcccctgttctcttatctgtatcatgacatgagatgtgaacctcagaaatgtaaaaacaaaaa

SEQ ID NO: 101441 - DNA, 120 bp, Artificial Sequence
  ENSG00000092421_60 (sequence is synthesized)
gtctagaataaagcattccttgaattttaaatgaacatgcttttagcagctggatacgaagcagactattttcaacaaattgaatgtttcccacttgtgtgagagccaaacaagtgccat

SEQ ID NO: 101442 - DNA, 120 bp, Artificial Sequence
  ENSG00000092421_61 (sequence is synthesized)
acagaaagggacctcttcaatgttaccaaagctttgtggcagcatttaagtgtggtggctccatagaagtcactatagcatggacgagccacttggcttgctttttcctgctaatcaaag

SEQ ID NO: 101443 - DNA, 120 bp, Artificial Sequence
  ENSG00000092421_62 (sequence is synthesized)
ttttaagaagataaaaagctatctttgttatatatgttttgtctaatttgcaatattacagtctcctggggggaaatccaacttccaataataattgtaaaaaaaaaaaaagaatgcact

SEQ ID NO: 101444 - DNA, 120 bp, Artificial Sequence
  ENSG00000092421_63 (sequence is synthesized)
gtacttattcttttaatctgtctttctagaggccaatattttatttatcatgtgcatggtgatcatacttcaaggctggagcttttggagttgttgtgagtctgccctactttccaccaa

SEQ ID NO: 101445 - DNA, 120 bp, Artificial Sequence
  ENSG00000092421_64 (sequence is synthesized)
aggcaccaattatacatgcacagtagttgcccttgtatcttttaaaaattgttcaagaggttgttctgtgtaagccaataactccacttgaaaatcacgaggaggtcatattttatttct

SEQ ID NO: 101446 - DNA, 120 bp, Artificial Sequence
  ENSG00000092421_65 (sequence is synthesized)
gccagagagaacaggtatcattgtgccagcttggatcaaagcacctgatacaatctgtatttaaccttgtggaatgatggagggagagcttacaaacgaattcacaggaaatggctagag

SEQ ID NO: 101447 - DNA, 120 bp, Artificial Sequence
  ENSG00000092421_66 (sequence is synthesized)
tttctgctgtaactctcaacctagccattcttctcatattatcctatggtagcttatctgaacctcagaaatctatccttttctaatttgaatcattttagtcaacgcagcctcagaaac

SEQ ID NO: 101448 - DNA, 120 bp, Artificial Sequence
  ENSG00000092421_67 (sequence is synthesized)
ggaaaccatctattgaaataatacacaaaagggacagccgtaatagcgtgtagccgttgaagcctccattccaatgaaaagacagtgggaatagatccctttggaaaccactaactaatc

SEQ ID NO: 101449 - DNA, 120 bp, Artificial Sequence
  ENSG00000092421_68 (sequence is synthesized)
ccagaaagaggaatgcctgtgaagttgagttgaacctgaagactagacacactgtagaacctccataggaagggtgcagagtaactgagttacttgtgatagggacaagacttacccact

SEQ ID NO: 101450 - DNA, 120 bp, Artificial Sequence
  ENSG00000092421_69 (sequence is synthesized)
accagaaacctgccccatcggtcacaaatgggattcccagagtggacactttctgtgtttagtgctgccatgggaatatcaaagaaggacactggcctttcttgagcacctatgtgtcag

SEQ ID NO: 101451 - DNA, 120 bp, Artificial Sequence
  ENSG00000092421_70 (sequence is synthesized)
acactgtgcaagatgctttcaccattatgtcactatcctcccaacaccgagaggtatctttatccccactgggtgcacaggaagaggttaagtgattccctgaggcccacccagcaagta

SEQ ID NO: 101452 - DNA, 120 bp, Artificial Sequence
  ENSG00000092421_71 (sequence is synthesized)
tccctgaggcccacccagcaagtatgagagataggatctggcccttcattttctaactacaagttcaatgggctttctgctgaacacaccccacaccaccaccaccaccaccaccaccac

SEQ ID NO: 101453 - DNA, 120 bp, Artificial Sequence
  ENSG00000092421_72 (sequence is synthesized)
gggccatctcctctcagtcttacagccagcttgggtgtcccacctccaggcctctgcgcaaagggaatgtgggtctctctggtgatgttttcctaactgtatttgtgatgaaaacagggc

SEQ ID NO: 101454 - DNA, 120 bp, Artificial Sequence
  ENSG00000092421_73 (sequence is synthesized)
aacaaataaggcaggaatgggctgtatctgctgttgaccatctcaacgcccaagcctgcctttcctggcttagggaggaggccctgttggggaactgagctttctccatagccagagatt

SEQ ID NO: 101455 - DNA, 120 bp, Artificial Sequence
  ENSG00000092421_74 (sequence is synthesized)
aatgccttcaacccttcctgcagaaactataaggagctgctgctgtgaagtctaagatttgatgactgcttcaagggttagttttcacttcttggaaagaggaagtcaccatggcttttg

SEQ ID NO: 101456 - DNA, 120 bp, Artificial Sequence
  ENSG00000092421_75 (sequence is synthesized)
accttataacaggtaatcatgccctagctgtgttgacctcatcaattcttcctggcttccttctcccagggggttctcttctaataaaccatatttgcaactgactgaaaattgcattca

SEQ ID NO: 101457 - DNA, 120 bp, Artificial Sequence
  ENSG00000092421_76 (sequence is synthesized)
tgttatgctattatggcccctttcattcagagaaaatcatgaccgactgaggttttatgcatttttagatgactttttagtgctgtttgtaaaaatttaacacctaaaaagcattatttt

SEQ ID NO: 101458 - DNA, 120 bp, Artificial Sequence
  ENSG00000092421_77 (sequence is synthesized)
ctccttgccaatgtgtgtgtgtgtgtttatatagatacatatatgtgtgtgtgtttatatagatacatatacatgtgtgtgtttacgtgtgtgcaagagcagaagggtttgtttgtttca

SEQ ID NO: 101459 - DNA, 120 bp, Artificial Sequence
  ENSG00000092421_78 (sequence is synthesized)
agctctacagaagatgaaaagaaaactgtggaagaaaagagcaccttcatgcaaagggttcactagcgagttgagccctgagaaagagagacaaatcaaaaattgtgacacttagaaata

SEQ ID NO: 101460 - DNA, 120 bp, Artificial Sequence
  ENSG00000092421_79 (sequence is synthesized)
taaatccaggcttataattatctagaaatgaaagtgtaacttgatgaaccttaaggagcactcttctatcatatttcctaaaataacagactcatatggaaatggaaaatggtggcatga

SEQ ID NO: 101461 - DNA, 120 bp, Artificial Sequence
  ENSG00000092421_80 (sequence is synthesized)
aattgaagggaggaggacccttaggaaggaaagaaaaagagaatgtacttttcaggctaaggtttctgggttttaaaaccatcacttcagaaatcaaaatattttagcagaaaaaccccc

SEQ ID NO: 101462 - DNA, 120 bp, Artificial Sequence
  ENSG00000092421_81 (sequence is synthesized)
atgagaaagcttcaaggtctcggctgtgacaaagacaacatttcagtagaagtttaaggttgcgtgttgtgggcttgggaaggggtagagatctttatttcctttcattctaattctgtg

SEQ ID NO: 101463 - DNA, 120 bp, Artificial Sequence
  ENSG00000092421_82 (sequence is synthesized)
ccactgatacctgccagtaaaatacatgaaacatattccagaaagagttgatttagtagatgaaaaatgcgtctcccgagaccagagaaggagtgattcgggaaagttacctcaaaggcc

SEQ ID NO: 101464 - DNA, 120 bp, Artificial Sequence
  ENSG00000092421_83 (sequence is synthesized)
gactttatgtggctcggagctgattccctgaaggatttatgactctgtattaaatgccacagccttatcttttaaaacatgctactctaatgctgagttttcctctttttttcttttctt

SEQ ID NO: 101465 - DNA, 120 bp, Artificial Sequence
  ENSG00000092421_84 (sequence is synthesized)
tcttttttttttttgttactgattttagaaacagtattaagcaccttgttgttttgtttctgttttcaaggaatgcagattctactaagatctccttgcaaaatgaatgcatttaatttt

SEQ ID NO: 101466 - DNA, 120 bp, Artificial Sequence
  ENSG00000092421_85 (sequence is synthesized)
taccagttcgctccgagccccggccgcctgtccgtcgatgcaccgaaaagagaacctgtgtgctgtggaaggtccccaggctacagggtgcagagatgtccactgggcacatgctgacag

SEQ ID NO: 101467 - DNA, 120 bp, Artificial Sequence
  ENSG00000092421_86 (sequence is synthesized)
atccttcaaaaaatggtacttaaagaagattagatcaacatttctgagaaaagcatctcttttgccttctcattggttcagtaaacccagttaaaggcaaagtttccagccctcagagcc

SEQ ID NO: 101468 - DNA, 120 bp, Artificial Sequence
  ENSG00000092421_87 (sequence is synthesized)
tggtgtcagataaccttagagaggatcattttcttggtaatctctcctttcttaaaataaactagatattgctgacaatgtgaaatttgtgactaaccttcagtagatatgttgattttg

SEQ ID NO: 101469 - DNA, 120 bp, Artificial Sequence
  ENSG00000092421_88 (sequence is synthesized)
cttttaaaataaaaaccaaggatgcttagaagtagccataagaggaaatattttgaaaatgaatgacctaaagtaatcaatggatatgtataacatttatattttaaaatgacaatgact

SEQ ID NO: 101470 - DNA, 120 bp, Artificial Sequence
  ENSG00000092439_0 (sequence is synthesized)
gtccccagccccgtcgccggcggaggcgggcgcgggcgcgtccctgtggccagtcacccggaggagttggtcgcacaattatgaaagactcggcttctgctgctagcgccggagctgagt

SEQ ID NO: 101471 - DNA, 120 bp, Artificial Sequence
  ENSG00000092439_1 (sequence is synthesized)
tagttctgagaaggtttccctgggcgttccttgtccggcggcctctgctgccgcctccggagacgcttcccgatagatggctacaggccgcggaggaggaggaggtggagttgctgccct

SEQ ID NO: 101472 - DNA, 120 bp, Artificial Sequence
  ENSG00000092439_2 (sequence is synthesized)
tccggagtccgccccgtgaggagaatgtcccagaaatcctggatagaaagcactttgaccaagagggaatgtgtatatattataccaagttccaaggaccctcacagatgccttccagga

SEQ ID NO: 101473 - DNA, 120 bp, Artificial Sequence
  ENSG00000092439_3 (sequence is synthesized)
tgtcaaatttgtcagcaactcgtcaggtgtttttgtggtcgcttggtcaagcaacatgcttgttttactgcaagtcttgccatgaaatactcagatgtgaaattgggtgaccattttaat

SEQ ID NO: 101474 - DNA, 120 bp, Artificial Sequence
  ENSG00000092439_4 (sequence is synthesized)
caggcaatagaagaatggtctgtggaaaagcatacagaacagagcccaacggatgcttatggagtcataaattttcaagggggttctcattcctacagagctaagtatgtgaggctatca

SEQ ID NO: 101475 - DNA, 120 bp, Artificial Sequence
  ENSG00000092439_5 (sequence is synthesized)
tatgacaccaaacctgaagtcattctgcaacttctgcttaaagaatggcaaatggagttacccaaacttgttatctctgtacatgggggcatgcagaaatttgagcttcacccacgaatc

SEQ ID NO: 101476 - DNA, 120 bp, Artificial Sequence
  ENSG00000092439_6 (sequence is synthesized)
aagcagttgcttggaaaaggtcttattaaagctgcagttacaactggagcctggattttaactggaggagtaaacacaggtgtggcaaaacatgttggagatgccctcaaagaacatgct

SEQ ID NO: 101477 - DNA, 120 bp, Artificial Sequence
  ENSG00000092439_7 (sequence is synthesized)
tccagatcatctcgaaagatttgcactatcggaatagctccatggggagtgattgaaaacagaaatgatcttgttgggagagatgtggttgctccttatcaaaccttattgaaccccctg

SEQ ID NO: 101478 - DNA, 120 bp, Artificial Sequence
  ENSG00000092439_8 (sequence is synthesized)
agcaaattgaatgttttgaataatctgcattcccatttcatattggtggatgatggcactgttggaaagtatggggcggaagtcagactgagaagagaacttgaaaaaactattaatcag

SEQ ID NO: 101479 - DNA, 120 bp, Artificial Sequence
  ENSG00000092439_9 (sequence is synthesized)
caaagaattcatgctaggattggccagggtgtccctgtggtggcacttatatttgagggtgggccaaatgttatcctcacagttcttgaataccttcaggaaagcccccctgttccagta

SEQ ID NO: 101480 - DNA, 120 bp, Artificial Sequence
  ENSG00000092439_10 (sequence is synthesized)
gttgtgtgtgaaggaacaggcagagctgcagatctgctagcgtatattcataaacaaacagaagaaggagggaatcttcctgatgcagcagagcccgatattatttccactatcaaaaaa

SEQ ID NO: 101481 - DNA, 120 bp, Artificial Sequence
  ENSG00000092439_11 (sequence is synthesized)
acatttaactttggccagaatgaagcacttcatttatttcaaacactgatggagtgcatgaaaagaaaggagcttatcactgttttccatattgggtcagatgaacatcaagatatagat

SEQ ID NO: 101482 - DNA, 120 bp, Artificial Sequence
  ENSG00000092439_12 (sequence is synthesized)
gtagcaatacttactgcactgctaaaaggtactaatgcatctgcatttgaccagcttatccttacattggcatgggatagagttgacattgccaaaaatcatgtatttgtttatggacag

SEQ ID NO: 101483 - DNA, 120 bp, Artificial Sequence
  ENSG00000092439_13 (sequence is synthesized)
cagtggctggttggatccttggaacaagctatgcttgatgctcttgtaatggatagagttgcatttgtaaaacttcttattgaaaatggagtaagcatgcataaattccttaccattccg

SEQ ID NO: 101484 - DNA, 120 bp, Artificial Sequence
  ENSG00000092439_14 (sequence is synthesized)
agactggaagaactttacaacactaaacaaggtccaactaatccaatgctgtttcatcttgttcgagacgtcaaacagggaaatcttcctccaggatataagatcactctgattgatata

SEQ ID NO: 101485 - DNA, 120 bp, Artificial Sequence
  ENSG00000092439_15 (sequence is synthesized)
ggacttgttattgaatatctcatgggaggaacctacagatgcacctatactaggaaacgttttcgattaatatataatagtcttggtggaaataatcggaggtctggccgaaatacctcc

SEQ ID NO: 101486 - DNA, 120 bp, Artificial Sequence
  ENSG00000092439_16 (sequence is synthesized)
agcagcactcctcagttgcgaaagagtcatgaatcttttggcaatagggcagataaaaaggaaaaaatgaggcataaccatttcattaagacagcacagccctaccgaccaaagattgat

SEQ ID NO: 101487 - DNA, 120 bp, Artificial Sequence
  ENSG00000092439_17 (sequence is synthesized)
acagttatggaagaaggaaagaagaaaagaaccaaagatgaaattgtagacattgatgatccagaaaccaagcgctttccttatccacttaatgaacttttaatttgggcttgccttatg

SEQ ID NO: 101488 - DNA, 120 bp, Artificial Sequence
  ENSG00000092439_18 (sequence is synthesized)
aagaggcaggtcatggcccgttttttatggcaacatggtgaagaatcaatggctaaagcattagttgcctgtaagatctatcgttcaatggcatatgaagcaaagcagagtgacctggta

SEQ ID NO: 101489 - DNA, 120 bp, Artificial Sequence
  ENSG00000092439_19 (sequence is synthesized)
gatgatacttcagaagaactaaaacagtattccaatgattttggtcagttggccgttgaattattagaacagtccttcagacaagatgaaaccatggctatgaaattgctcacttatgaa

SEQ ID NO: 101490 - DNA, 120 bp, Artificial Sequence
  ENSG00000092439_20 (sequence is synthesized)
ctgaagaactggagtaattcaacctgccttaagttagcagtttcttcaagacttagaccttttgtagctcacacctgtacacaaatgttgttatctgatatgtggatgggaaggctgaat

SEQ ID NO: 101491 - DNA, 120 bp, Artificial Sequence
  ENSG00000092439_21 (sequence is synthesized)
atgaggaaaaattcctggtacaaggtcatactaagcattttagttccacctgccatattgctgttagagtataaaactaaggctgaaatgtcccatatcccacaatctcaagatgctcat

SEQ ID NO: 101492 - DNA, 120 bp, Artificial Sequence
  ENSG00000092439_22 (sequence is synthesized)
cagatgacaatggatgacagcgaaaacaactttcagaacataacagaagagatccccatggaagtgtttaaagaagtacggattttggatagtaatgaaggaaagaatgagatggagata

SEQ ID NO: 101493 - DNA, 120 bp, Artificial Sequence
  ENSG00000092439_23 (sequence is synthesized)
caaatgaaatcaaaaaagcttccaattacgcgaaagttttatgccttttatcatgcaccaattgtaaaattctggtttaacacgttggcatatttaggatttctgatgctttatacattt

SEQ ID NO: 101494 - DNA, 120 bp, Artificial Sequence
  ENSG00000092439_24 (sequence is synthesized)
gtggttcttgtacaaatggaacagttaccttcagttcaagaatggattgttattgcttatatttttacttatgccattgagaaagtccgtgagatctttatgtctgaagctgggaaagta

SEQ ID NO: 101495 - DNA, 120 bp, Artificial Sequence
  ENSG00000092439_25 (sequence is synthesized)
aaccagaagattaaagtatggtttagtgattacttcaacatcagtgatacaattgccataatttctttcttcattggatttggactaagatttggagcaaaatggaactttgcaaatgca

SEQ ID NO: 101496 - DNA, 120 bp, Artificial Sequence
  ENSG00000092439_26 (sequence is synthesized)
tatgataatcatgtttttgtggctggaagattaatttactgtcttaacataatattttggtatgtgcgtttgctagattttctagctgtaaatcaacaggcaggaccttatgtaatgatg

SEQ ID NO: 101497 - DNA, 120 bp, Artificial Sequence
  ENSG00000092439_27 (sequence is synthesized)
attggaaaaatggtggccaatatgttctacattgtagtgattatggctcttgtattacttagttttggtgttcccagaaaggcaatactttatcctcatgaagcaccatcttggactctt

SEQ ID NO: 101498 - DNA, 120 bp, Artificial Sequence
  ENSG00000092439_28 (sequence is synthesized)
gctaaagatatagtttttcacccatactggatgatttttggtgaagtttatgcatacgaaattgatgtgtgtgcaaatgattctgttatccctcaaatctgtggtcctgggacgtggttg

SEQ ID NO: 101499 - DNA, 120 bp, Artificial Sequence
  ENSG00000092439_29 (sequence is synthesized)
actccatttcttcaagcagtctacctctttgtacagtatatcattatggttaatcttcttattgcatttttcaacaatgtgtatttacaagtgaaggcaatttccaatattgtatggaag

SEQ ID NO: 101500 - DNA, 120 bp, Artificial Sequence
  ENSG00000092439_30 (sequence is synthesized)
taccagcgttatcattttattatggcttatcatgagaaaccagttctgcctcctccacttatcattcttagccatatagtttctctgttttgctgcatatgtaagagaagaaagaaagat

SEQ ID NO: 101501 - DNA, 120 bp, Artificial Sequence
  ENSG00000092439_31 (sequence is synthesized)
aagacttccgatggaccaaaacttttcttaacagaagaagatcaaaagaaacttcatgattttgaagagcagtgtgttgaaatgtatttcaatgaaaaagatgacaaatttcattctggg

SEQ ID NO: 101502 - DNA, 120 bp, Artificial Sequence
  ENSG00000092439_32 (sequence is synthesized)
agtgaagagagaattcgtgtcacttttgaaagagtggaacagatgtgcattcagattaaagaagttggagatcgtgtcaactacataaaaagatcattacaatcattagattctcaaatt

SEQ ID NO: 101503 - DNA, 120 bp, Artificial Sequence
  ENSG00000092439_33 (sequence is synthesized)
ggccatttgcaagatctttcagccctgacggtagatacattaaaaacactcactgcccagaaagcgtcggaagctagcaaagttcataatgaaatcacacgagaactgagcatttccaaa

SEQ ID NO: 101504 - DNA, 120 bp, Artificial Sequence
  ENSG00000092439_34 (sequence is synthesized)
cacttggctcaaaaccttattgatgatggtcctgtaagaccttctgtatggaaaaagcatggtgttgtaaatacacttagctcctctcttcctcaaggtgatcttgaaagtaataatcct

SEQ ID NO: 101505 - DNA, 120 bp, Artificial Sequence
  ENSG00000092439_35 (sequence is synthesized)
tttcattgtaatattttaatgaaagatgacaaagatccccagtgtaatatatttggtcaagacttacctgcagtaccccagagaaaagaatttaattttccagaggctggttcctcttct

SEQ ID NO: 101506 - DNA, 120 bp, Artificial Sequence
  ENSG00000092439_36 (sequence is synthesized)
ggtgccttattcccaagtgctgtttcccctccagaactgcgacagagactacatggggtagaactcttaaaaatatttaataaaaatcaaaaattaggcagttcatctactagcatacca

SEQ ID NO: 101507 - DNA, 120 bp, Artificial Sequence
  ENSG00000092439_37 (sequence is synthesized)
catctgtcatccccaccaaccaaattttttgttagtacaccatctcagccaagttgcaaaagccacttggaaactggaaccaaagatcaagaaactgtttgctctaaagctacagaagga

SEQ ID NO: 101508 - DNA, 120 bp, Artificial Sequence
  ENSG00000092439_38 (sequence is synthesized)
gataatacagaatttggagcatttgtaggacacagagatagcatggatttacagaggtttaaagaaacatcaaacaagataaaaatactatccaataacaatacttctgaaaacactttg

SEQ ID NO: 101509 - DNA, 120 bp, Artificial Sequence
  ENSG00000092439_39 (sequence is synthesized)
aaacgagtgagttctcttgctggatttactgactgtcacagaacttccattcctgttcattcaaaacaagcagaaaaaatcagtagaaggccatctaccgaagacactcatgaagtagat

SEQ ID NO: 101510 - DNA, 120 bp, Artificial Sequence
  ENSG00000092439_40 (sequence is synthesized)
tccaaagcagctttaataccggattggttacaagatagaccatcaaacagagaaatgccatctgaagaaggaacattaaatggtctcacttctccatttaagccagctatggatacaaat

SEQ ID NO: 101511 - DNA, 120 bp, Artificial Sequence
  ENSG00000092439_41 (sequence is synthesized)
tactattattcagctgtggaaagaaataacttgatgaggttatcacagagcattccatttacacctgtgcctccaagaggggagcctgtcacagtgtatcgtttggaagagagttcaccc

SEQ ID NO: 101512 - DNA, 120 bp, Artificial Sequence
  ENSG00000092439_42 (sequence is synthesized)
aacatactaaataacagcatgtcttcttggtcacaactaggcctctgtgccaaaatagagtttttaagcaaagaggagatgggaggaggtttacgaagagctgtcaaagtacagtgtacc

SEQ ID NO: 101513 - DNA, 120 bp, Artificial Sequence
  ENSG00000092439_43 (sequence is synthesized)
ggtggttaatacatggtcaagtatttacaaagaagatacagttctgcatctctgtctgagagaaattcaacaacagagagcagcacaaaagcttacgtttgcctttaatcaaatgaaacc

SEQ ID NO: 101514 - DNA, 120 bp, Artificial Sequence
  ENSG00000092439_44 (sequence is synthesized)
caaatccataccatattctccaaggttccttgaagttttcctgctgtattgccattcagcaggacagtggtttgctgtggaagaatgtatgactggagaatttagaaaatacaacaataa

SEQ ID NO: 101515 - DNA, 120 bp, Artificial Sequence
  ENSG00000092439_45 (sequence is synthesized)
taatggagatgagattattccaactaatactctggaagagatcatgctagcctttagccactggacttacgaatatacaagaggggagttactggtacttgatttgcaaggtgttggtga

SEQ ID NO: 101516 - DNA, 120 bp, Artificial Sequence
  ENSG00000092439_46 (sequence is synthesized)
aaatttgactgacccatctgtgataaaagcagaagaaaagagatcctgtgatatggtttttggcccagcaaatctaggagaagatgcaattaaaaacttcagagcaaaacatcactgtaa

SEQ ID NO: 101517 - DNA, 120 bp, Artificial Sequence
  ENSG00000092439_47 (sequence is synthesized)
ttcttgctgtagaaagcttaaacttccagatctgaagaggaatgattatacgcctgataaaattatatttcctcaggatgagccttcagatttgaatcttcagcctggaaattccaccaa

SEQ ID NO: 101518 - DNA, 120 bp, Artificial Sequence
  ENSG00000092439_48 (sequence is synthesized)
agaatcagaatcaactaattctgttcgtctgatgttataatattaatattactgaatcattggttttgcctgcacctcacagaaatgttactgtgtcacttttccctcgggaggaaattg

SEQ ID NO: 101519 - DNA, 120 bp, Artificial Sequence
  ENSG00000092439_49 (sequence is synthesized)
tttggtaatatagaaaggtgtatgcaagttgaatttgctgactccagcacagttaaaaggtcaatattcttttgacctgattaatcagtcagaaagtccctataggatagagctggcagc

SEQ ID NO: 101520 - DNA, 120 bp, Artificial Sequence
  ENSG00000092439_50 (sequence is synthesized)
tgagaaattttaaaggtaattgataattagtatttataactttttaaagggctctttgtatagcagaggatctcatttgactttgttttgatgagggtgatgctctctcttatgtggtac

SEQ ID NO: 101521 - DNA, 120 bp, Artificial Sequence
  ENSG00000092439_51 (sequence is synthesized)
aataccattaaccaaaggtaggtgtccatgcagattttattggcagctgttttattgccattcaactagggaaatgaagaaatcacgcagccttttggttaaatggcagtcaaaattttc

SEQ ID NO: 101522 - DNA, 120 bp, Artificial Sequence
  ENSG00000092439_52 (sequence is synthesized)
ctcagtgtatttagtgtgttcagtgatgatatcactggttcccaactagatgcttgttggccacgggaagggaaatgacttgttctaattctaggttcacagaggtatgagaagcctgaa

SEQ ID NO: 101523 - DNA, 120 bp, Artificial Sequence
  ENSG00000092439_53 (sequence is synthesized)
ctgaagaccattttcaagagggacggtatttatgaatcagggttaggctccatatttaaagatagagccagtttttttttttaaatagaacccaaattgtgtaaaaatgttaattgggtt

SEQ ID NO: 101524 - DNA, 120 bp, Artificial Sequence
  ENSG00000092439_54 (sequence is synthesized)
ttttaaacattgttttatcaagtcactgttaagtagaagaaagccatggtaaactgatacataacctaaattataaaagcagaaacctaactcactcgtcaagggaagttaccttttgag

SEQ ID NO: 101525 - DNA, 120 bp, Artificial Sequence
  ENSG00000092439_55 (sequence is synthesized)
gaaagttaaagtacttttttccctatctgtatctatagcaacaacccagaacttacaaacttctccaaagattttattgattgttatatcaaatcagaatgtaaacatgaactcttgcat

SEQ ID NO: 101526 - DNA, 120 bp, Artificial Sequence
  ENSG00000092439_56 (sequence is synthesized)
atatttaaaattgtgttggaacatttgaacatgaatgctgtttgtggtacttaagaaattaattcagttggattatcattatgtgatactggcagattgcagtgcaaccttatgccaata

SEQ ID NO: 101527 - DNA, 120 bp, Artificial Sequence
  ENSG00000092439_57 (sequence is synthesized)
caaccttatgccaataaaatgtaatttaacagccccagatattgttgaatattcaacaataacaagaaaagcttttcatctaagttttatgctttaattttttttctttttttttctttt

SEQ ID NO: 101528 - DNA, 120 bp, Artificial Sequence
  ENSG00000092439_58 (sequence is synthesized)
tactaattttaatttttatttggaagggagcagtataaagcttatttgtatttagtagtgtatctcatagatacagacaaggcaagagatgataagctgtttaaatagtgtttaatattg

SEQ ID NO: 101529 - DNA, 120 bp, Artificial Sequence
  ENSG00000092439_59 (sequence is synthesized)
attgggggtggggagaaagaaaaagtgtattacttaaagatactatatacgttttgtatatcattaaatctttaaaagaaatgaaataaatttattgtttacagatgtttagtgagttta

SEQ ID NO: 101530 - DNA, 120 bp, Artificial Sequence
  ENSG00000092439_60 (sequence is synthesized)
atcattctgaaaaattatctgacattttcagggtgtcaatttgagtatcagtttttttaaatgaaccatttgtatacctgtgcttttgatctcctgtcctgtacaatgtttaaattaata

SEQ ID NO: 101531 - DNA, 120 bp, Artificial Sequence
  ENSG00000092439_61 (sequence is synthesized)
ctgatttcttactgtcttcttagaaatctgttttttgttaggccaaaaaagggcaatatgggctgtctgttgatttttaattttatattgattattttcacaggattataatagtagcta

SEQ ID NO: 101532 - DNA, 61 bp, Artificial Sequence
  ENSG00000092439_62 (sequence is synthesized)
gtggtcacaaactcctgaccttgtgagccaccgcacctggctgctaacacttatttagtgc

SEQ ID NO: 101533 - DNA, 120 bp, Artificial Sequence
  ENSG00000092439_63 (sequence is synthesized)
tgtgagccaccgcacctggctgctaacacttatttagtgcctactgtgtaccagacattactctaagtatttcacatatattaacctacttaatccttataacaatgttataaagaaata

SEQ ID NO: 101534 - DNA, 120 bp, Artificial Sequence
  ENSG00000092439_64 (sequence is synthesized)
ggtgttattatcctgttttgcagatttgaaagtcaaggtgctagagaggtaaagtaacgtccataagattcttacgtttatttaataataagtagcaacggtaggatttgaacccaggct

SEQ ID NO: 101535 - DNA, 76 bp, Artificial Sequence
  ENSG00000092439_65 (sequence is synthesized)
tttaataataagtagcaacggtaggatttgaacccaggctggctgcctttcatctatacttggtggggcatggtgg

SEQ ID NO: 101536 - DNA, 71 bp, Artificial Sequence
  ENSG00000092439_66 (sequence is synthesized)
aggccaaggcaggtggatcatctctgctaaaaaaaaaaatacaaaaattaggccaggtgcagtggctcatg

SEQ ID NO: 101537 - DNA, 70 bp, Artificial Sequence
  ENSG00000092439_67 (sequence is synthesized)
cctgggcaacagtgcgagactccgtcaaaaaaaaaaaaataactggatgtgatggtgtgcacctgtagtt

SEQ ID NO: 101538 - DNA, 120 bp, Artificial Sequence
  ENSG00000092439_68 (sequence is synthesized)
gaggcagcagtgagctgagatcatgccactgctttccaacctgggcaacagagtgagatcctgtctcagaaagaaaaaaaaaaaaaagacaacctcttgctctgttgcccaggctggagt

SEQ ID NO: 101539 - DNA, 120 bp, Artificial Sequence
  ENSG00000092439_69 (sequence is synthesized)
tcctgggctcaagcaatcctcctgccactgcctcttgattaggtggaaccacaggcatgcaccaccacacgtacctaattttatatatatatttttttatttttcatttttatttatttt

SEQ ID NO: 101540 - DNA, 82 bp, Artificial Sequence
  ENSG00000092439_70 (sequence is synthesized)
ccacacgtacctaattttatatatatagagttgaagtctcactctgttgcccaggccggagtacagtggcacaatcttggct

SEQ ID NO: 101541 - DNA, 120 bp, Artificial Sequence
  ENSG00000092439_71 (sequence is synthesized)
cgtgcttcagcctccaaagtagctgagattacaggtacccaccataatgcctggctgatttttgtatttttcgtagagacaaggtttcaccttgttggccaggctgatctcaaactcctg

SEQ ID NO: 101542 - DNA, 120 bp, Artificial Sequence
  ENSG00000092439_72 (sequence is synthesized)
ggattataggtgtgagccaccatgcctgggtaacacccaactaattttaaatatatattttgtagagatggggtctagccttgttgcccacgctggtctcaaattcctgggctcaagtga

SEQ ID NO: 101543 - DNA, 120 bp, Artificial Sequence
  ENSG00000092439_73 (sequence is synthesized)
tctcaaattcctgggctcaagtgatcctctcgcctgagcttcccaaagtggtagaattgcaggcatgaattgctgcacccagcctcatctgtgctgtgaattatgtgctgtattgactct

SEQ ID NO: 101544 - DNA, 120 bp, Artificial Sequence
  ENSG00000092439_74 (sequence is synthesized)
tgtattgactctcaagcatgatgaccattggtggtttctgtaccatttcctgttactttactgaaacacacctactccattaacttcttgggttaagtctagaaagtaacagtttacttg

SEQ ID NO: 101545 - DNA, 120 bp, Artificial Sequence
  ENSG00000092439_75 (sequence is synthesized)
taaaccacatttcttatccccaataagtatttttttaagattattaaagttcattattactaccctatgatgtgaaagtgtcatttgcttaatctttttaattttttattctcaacctca

SEQ ID NO: 101546 - DNA, 120 bp, Artificial Sequence
  ENSG00000092439_76 (sequence is synthesized)
tcatttgcttaatctttttaattttttattctcaacctcatcttactgaagagaataaaactcttttaccatattcttaaaatgtggaattctcggccaggtgcagtggctcacgcctgt

SEQ ID NO: 101547 - DNA, 90 bp, Artificial Sequence
  ENSG00000092439_77 (sequence is synthesized)
gagcctagattgcgaactctgtctcaaaaaaaagatgtggaattcttttctgcaaatgttctctaatagtataccttcttcagtctgtcg

SEQ ID NO: 101548 - DNA, 120 bp, Artificial Sequence
  ENSG00000092439_78 (sequence is synthesized)
tgcaaatgttctctaatagtataccttcttcagtctgtcgatatatgtatgctattattttacaagtaatacatgttgattgtattggaaattatagaaaagattatattggattgttta

SEQ ID NO: 101549 - DNA, 120 bp, Artificial Sequence
  ENSG00000092439_79 (sequence is synthesized)
gaaaatatttttaaatgtgaagaaaaatataaaaattactcccttgttccactttccccactctcaagtcagactatgttgttttcatagttagtagctagcagtctaccccactagatt

SEQ ID NO: 101550 - DNA, 120 bp, Artificial Sequence
  ENSG00000092439_80 (sequence is synthesized)
atatgcttcacagagggaagggaccctcaagacttcactggattgagtagcacccaataccttgcttgctgcctggtttgtgatgggcatactgtaagaaaaaaaaatctgaatgacaaa

SEQ ID NO: 101551 - DNA, 120 bp, Artificial Sequence
  ENSG00000092439_81 (sequence is synthesized)
atgtttttccataataccagacttcctcttgaagagatgggtcgtaatgttgtagtcttacatgcttacgtagacaatcaaagcaagaatactcaataaatggctatttaccacttgaaa

SEQ ID NO: 101552 - DNA, 120 bp, Artificial Sequence
  ENSG00000092439_82 (sequence is synthesized)
agcttaaacttccagagatgaggtctcactgtgttacccaggctggtcttgaactgacttcaagcaatcctcagtgcctcagcctcacaaagtgctgggattaccagtgctagccactgc

SEQ ID NO: 101553 - DNA, 120 bp, Artificial Sequence
  ENSG00000092439_83 (sequence is synthesized)
atctggtcacaaatgttttttgaaaaatgtaaactagaatgagattttttaaaatattgaaagtgattcaggggaagatagtaaaagcacattaaaggtttcgtttctatttgggaaaaa

SEQ ID NO: 101554 - DNA, 120 bp, Artificial Sequence
  ENSG00000092439_84 (sequence is synthesized)
aaggccatctaccgaagacactcatgaagtagattccaaagcagctttaataccggtttgtagatttcaactaaacagatatatattattaaatacattaaacttttttagataagatct

SEQ ID NO: 101555 - DNA, 120 bp, Artificial Sequence
  ENSG00000092439_85 (sequence is synthesized)
tatttgagccagtgaatgtcttttattttgtgtttgtttgcctcatacttcacatctgccattccttaagagtttctcatgctcaatcccaatcccctatacccatttagtgctttgcaa

SEQ ID NO: 101556 - DNA, 120 bp, Artificial Sequence
  ENSG00000092439_86 (sequence is synthesized)
acccatttagtgctttgcaagataatgttagctataccatctatggtttatgtctgtaggtaactcctttttcctgtcttcactgatccaggctttttttttttttttttctttttgaga

SEQ ID NO: 101557 - DNA, 120 bp, Artificial Sequence
  ENSG00000092439_87 (sequence is synthesized)
gccaccacaccctgcttgatccaggctattttttaaaagttaaacccaaaatacctaatcttttcctaatacagtatgcccagtattttgctcttttccttagtcttatctgagtggcag

SEQ ID NO: 101558 - DNA, 120 bp, Artificial Sequence
  ENSG00000092439_88 (sequence is synthesized)
gttttattttttaaaatctagatgtcaagttgaatgtgtaatttttttatacactgaatctgaaatatattgggtctactccttgccgtaattccttttagttttcagtggtgaaaaagg

SEQ ID NO: 101559 - DNA, 120 bp, Artificial Sequence
  ENSG00000092439_89 (sequence is synthesized)
caaaatttgtaatatagctattgctattccttattctgaaattcctgttcatcctaggaaatttcagcaaatgcagacaaatcactattcagagacattcactattaacagtttaacgta

SEQ ID NO: 101560 - DNA, 120 bp, Artificial Sequence
  ENSG00000092439_90 (sequence is synthesized)
gtcagtgaatatttaatagtggaacataatttaagctttatattttaacttctgaaatatcaataagccaaatataatcttagtttaaatattaaacaagggttctccccaccctccctt

SEQ ID NO: 101561 - DNA, 120 bp, Artificial Sequence
  ENSG00000092439_91 (sequence is synthesized)
gctttaggaaagggcagttgtggaaattgattccctaaatctgtctgtgtctctgtacttcttgaaaatcttcacgtaccacagagataggtacacttcagtttgaaccagtgatacaat

SEQ ID NO: 101562 - DNA, 120 bp, Artificial Sequence
  ENSG00000092439_92 (sequence is synthesized)
tcattatgtagataaagatgcccatgacttgcttagcttaatagatttttttttacgtaatctcctagatgttaagatttatatagtgatgaaattcttctgaaagctatcactaggaac

SEQ ID NO: 101563 - DNA, 120 bp, Artificial Sequence
  ENSG00000092439_93 (sequence is synthesized)
aaaaagaatctcaaagattttttgtgtttaatggatttttttggtctattagaacattagaagcttttagaaagatttgtcatagtgtttaaacttccttgtattttaacagtgttcatt

SEQ ID NO: 101564 - DNA, 120 bp, Artificial Sequence
  ENSG00000092439_94 (sequence is synthesized)
agaactcatgggagtcaacttacataaacggattggttacaagatagaccatcaaacagagaaatgccatctgaagaaggaacattaaatggtgagtctgtgtggtagattgaacgtgaa

SEQ ID NO: 101565 - DNA, 120 bp, Artificial Sequence
  ENSG00000092439_95 (sequence is synthesized)
ctaaatagatcaagggactctaatactacttagagtaatgggttgaaatttagttcaattattttcaaattatatgtctgcacaatatttgcagaataacaatacttctgaaaacacttt

SEQ ID NO: 101566 - DNA, 80 bp, Artificial Sequence
  ENSG00000092445_0 (sequence is synthesized)
ggcggccggggctcccgccgctgccgctgccgccgccaccgcggctcgggctgctgctggcggctctggcttctctgctg

SEQ ID NO: 101567 - DNA, 120 bp, Artificial Sequence
  ENSG00000092445_1 (sequence is synthesized)
gctgctggcggctctggcttctctgctgctcccggagtccgccgccgcaggtctgaagctcatgggagccccggtgaagctgacagtgtctcaggggcagccggtgaagctcaactgcag

SEQ ID NO: 101568 - DNA, 120 bp, Artificial Sequence
  ENSG00000092445_2 (sequence is synthesized)
tgtggaggggatggaggagcctgacatccagtgggtgaaggatggggctgtggtccagaacttggaccagttgtacatcccagtcagcgagcagcactggatcggcttcctcagcctgaa

SEQ ID NO: 101569 - DNA, 120 bp, Artificial Sequence
  ENSG00000092445_3 (sequence is synthesized)
gtcagtggagcgctctgacgccggccggtactggtgccaggtggaggatgggggtgaaaccgagatctcccagccagtgtggctcacggtagaaggtgtgccatttttcacagtggagcc

SEQ ID NO: 101570 - DNA, 120 bp, Artificial Sequence
  ENSG00000092445_4 (sequence is synthesized)
aaaagatctggcagtgccacccaatgcccctttccaactgtcttgtgaggctgtgggtccccctgaacctgttaccattgtctggtggagaggaactacgaagatcgggggacccgctcc

SEQ ID NO: 101571 - DNA, 120 bp, Artificial Sequence
  ENSG00000092445_5 (sequence is synthesized)
ctctccatctgttttaaatgtaacaggggtgacccagagcaccatgttttcctgtgaagctcacaacctaaaaggcctggcctcttctcgcacagccactgttcaccttcaagcactgcc

SEQ ID NO: 101572 - DNA, 120 bp, Artificial Sequence
  ENSG00000092445_6 (sequence is synthesized)
tgcagcccccttcaacatcaccgtgacaaagctttccagcagcaacgctagtgtggcctggatgccaggtgctgatggccgagctctgctacagtcctgtacagttcaggtgacacaggc

SEQ ID NO: 101573 - DNA, 120 bp, Artificial Sequence
  ENSG00000092445_7 (sequence is synthesized)
cccaggaggctgggaagtcctggctgttgtggtccctgtgcccccctttacctgcctgctccgggacctggtgcctgccaccaactacagcctcagggtgcgctgtgccaatgccttggg

SEQ ID NO: 101574 - DNA, 120 bp, Artificial Sequence
  ENSG00000092445_8 (sequence is synthesized)
gccctctccctatgctgactgggtgccctttcagaccaagggtctagccccagccagcgctccccaaaacctccatgccatccgcacagattcaggcctcatcttggagtgggaagaagt

SEQ ID NO: 101575 - DNA, 120 bp, Artificial Sequence
  ENSG00000092445_9 (sequence is synthesized)
gatccccgaggcccctttggaaggccccctgggaccctacaaactgtcctgggttcaagacaatggaacccaggatgagctgacagtggaggggaccagggccaatttgacaggctggga

SEQ ID NO: 101576 - DNA, 120 bp, Artificial Sequence
  ENSG00000092445_10 (sequence is synthesized)
tccccaaaaggacctgatcgtacgtgtgtgcgtctccaatgcagttggctgtggaccctggagtcagccactggtggtctcttctcatgaccgtgcaggccagcagggccctcctcacag

SEQ ID NO: 101577 - DNA, 120 bp, Artificial Sequence
  ENSG00000092445_11 (sequence is synthesized)
ccgcacatcctgggtacctgtggtccttggtgtgctaacggccctggtgacggctgctgccctggccctcatcctgcttcgaaagagacggaaagagacgcggtttgggcaagcctttga

SEQ ID NO: 101578 - DNA, 120 bp, Artificial Sequence
  ENSG00000092445_12 (sequence is synthesized)
cagtgtcatggcccggggagagccagccgttcacttccgggcagcccggtccttcaatcgagaaaggcccgagcgcatcgaggccacattggacagcttgggcatcagcgatgaactaaa

SEQ ID NO: 101579 - DNA, 120 bp, Artificial Sequence
  ENSG00000092445_13 (sequence is synthesized)
ggaaaaactggaggatgtgctcatcccagagcagcagttcaccctgggccggatgttgggcaaaggagagtttggttcagtgcgggaggcccagctgaagcaagaggatggctcctttgt

SEQ ID NO: 101580 - DNA, 120 bp, Artificial Sequence
  ENSG00000092445_14 (sequence is synthesized)
gaaagtggctgtgaagatgctgaaagctgacatcattgcctcaagcgacattgaagagttcctcagggaagcagcttgcatgaaggagtttgaccatccacacgtggccaaacttgttgg

SEQ ID NO: 101581 - DNA, 120 bp, Artificial Sequence
  ENSG00000092445_15 (sequence is synthesized)
ggtaagcctccggagcagggctaaaggccgtctccccatccccatggtcatcttgcccttcatgaagcatggggacctgcatgccttcctgctcgcctcccggattggggagaacccctt

SEQ ID NO: 101582 - DNA, 120 bp, Artificial Sequence
  ENSG00000092445_16 (sequence is synthesized)
taacctacccctccagaccctgatccggttcatggtggacattgcctgcggcatggagtacctgagctctcggaacttcatccaccgagacctggctgctcggaattgcatgctggcaga

SEQ ID NO: 101583 - DNA, 120 bp, Artificial Sequence
  ENSG00000092445_17 (sequence is synthesized)
ggacatgacagtgtgtgtggctgacttcggactctcccggaagatctacagtggggactactatcgtcaaggctgtgcctccaaactgcctgtcaagtggctggccctggagagcctggc

SEQ ID NO: 101584 - DNA, 120 bp, Artificial Sequence
  ENSG00000092445_18 (sequence is synthesized)
cgacaacctgtatactgtgcagagtgacgtgtgggcgttcggggtgaccatgtgggagatcatgacacgtgggcagacgccatatgctggcatcgaaaacgctgagatttacaactacct

SEQ ID NO: 101585 - DNA, 120 bp, Artificial Sequence
  ENSG00000092445_19 (sequence is synthesized)
cattggcgggaaccgcctgaaacagcctccggagtgtatggaggacgtgtatgatctcatgtaccagtgctggagtgctgaccccaagcagcgcccgagctttacttgtctgcgaatgga

SEQ ID NO: 101586 - DNA, 120 bp, Artificial Sequence
  ENSG00000092445_20 (sequence is synthesized)
actggagaacatcttgggccagctgtctgtgctatctgccagccaggaccccttatacatcaacatcgagagagctgaggagcccactgcgggaggcagcctggagctacctggcaggga

SEQ ID NO: 101587 - DNA, 120 bp, Artificial Sequence
  ENSG00000092445_21 (sequence is synthesized)
tcagccctacagtggggctggggatggcagtggcatgggggcagtgggtggcactcccagtgactgtcggtacatactcacccccggagggctggctgagcagccagggcaggcagagca

SEQ ID NO: 101588 - DNA, 120 bp, Artificial Sequence
  ENSG00000092445_22 (sequence is synthesized)
ccagccagagagtcccctcaatgagacacagaggcttttgctgctgcagcaagggctactgccacacagtagctgttagcccacaggcagagggcatcggggccatttggccggctctgg

SEQ ID NO: 101589 - DNA, 120 bp, Artificial Sequence
  ENSG00000092445_23 (sequence is synthesized)
tggccactgagctggctgactaagccccgtctgaccccagcccagacagcaaggtgtggaggctcctgtggtagtcctcccaagctgtgctgggaagcccggactgaccaaatcacccaa

SEQ ID NO: 101590 - DNA, 120 bp, Artificial Sequence
  ENSG00000092445_24 (sequence is synthesized)
tcccagttcttcctgcaaccactctgtggccagcctggcatcagtttaggccttggcttgatggaagtgggccagtcctggttgtctgaacccaggcagctggcaggagtggggtggtta

SEQ ID NO: 101591 - DNA, 120 bp, Artificial Sequence
  ENSG00000092445_25 (sequence is synthesized)
tgtttccatggttaccatgggtgtggatggcagtgtggggagggcaggtccagctctgtgggccctaccctcctgctgagctgcccctgctgcttaagtgcatgcattgagctgcctcca

SEQ ID NO: 101592 - DNA, 120 bp, Artificial Sequence
  ENSG00000092445_26 (sequence is synthesized)
gcctggtggcccagctattaccacacttggggtttaaatatccaggtgtgcccctccaagtcacaaagagatgtccttgtaatattcccttttaggtgagggttggtaaggggttggtat

SEQ ID NO: 101593 - DNA, 120 bp, Artificial Sequence
  ENSG00000092445_27 (sequence is synthesized)
ctcaggtctgaatcttcaccatctttctgattccgcaccctgcctacgccaggagaagttgaggggagcatgcttccctgcagctgaccgggtcacacaaaggcatgctggagtacccag

SEQ ID NO: 101594 - DNA, 120 bp, Artificial Sequence
  ENSG00000092445_28 (sequence is synthesized)
cctatcaggtgcccctcttccaaaggcagcgtgccgagccagcaagaggaaggggtgctgtgaggcttgcccaggagcaagtgaggccggagaggagttcaggaacccttctccataccc

SEQ ID NO: 101595 - DNA, 120 bp, Artificial Sequence
  ENSG00000092445_29 (sequence is synthesized)
acaatctgagcacgctaccaaatctcaaaatatcctaagactaacaaaggcagctgtgtctgagcccaacccttctaaacggtgacctttagtgccaacttcccctctaactggacagcc

SEQ ID NO: 101596 - DNA, 120 bp, Artificial Sequence
  ENSG00000092445_30 (sequence is synthesized)
tcttctgtcccaagtctccagagagaaatcaggcctgatgagggggaattcctggaacctggaccccagccttggtgggggagcctctggaatgcatggggcgggtcctagctgttaggg

SEQ ID NO: 101597 - DNA, 120 bp, Artificial Sequence
  ENSG00000092445_31 (sequence is synthesized)
ggaatgcatggggcgggtcctagctgttagggacatttccaagctgttagttgctgtttaaaatagaaataaaattgaagactaaagacctaaggttttgtctctttttttttttctttt

SEQ ID NO: 101598 - DNA, 60 bp, Artificial Sequence
  ENSG00000092445_32 (sequence is synthesized)
caccagagtagctgggattacaggggctcactaccatgcccaggtaatttttgtattttt

SEQ ID NO: 101599 - DNA, 120 bp, Artificial Sequence
  ENSG00000092445_33 (sequence is synthesized)
ctgagccaccacacctggccccagctttgtctcttaaatgtttactttttttgagatcacaaagatgaaagatttttatagagagaaaagtctggaaagacatatgccaaaatgttaaca

SEQ ID NO: 101600 - DNA, 62 bp, Artificial Sequence
  ENSG00000092445_34 (sequence is synthesized)
gagagaaaagtctggaaagacatatgccaaaatgttaacagctgttattgcgcgatctgagc

SEQ ID NO: 101601 - DNA, 120 bp, Artificial Sequence
  ENSG00000092445_35 (sequence is synthesized)
tacaggcgtgagccaccgcacctggcaacagctgttacctttaaatgatggggttaaggggacgttcttctttgtgctttccaagttttctgcattgagcacaaaatgcttttgtaatta

SEQ ID NO: 101602 - DNA, 120 bp, Artificial Sequence
  ENSG00000092445_36 (sequence is synthesized)
ccaagttttctgcattgagcacaaaatgcttttgtaattagatacaggatcccaatgaatcttattatactgaagataatacagagtcaccgtgggcagttagaaaaatgcaaaaaatcg

SEQ ID NO: 101603 - DNA, 82 bp, Artificial Sequence
  ENSG00000092445_37 (sequence is synthesized)
cctgtaatcccagcactttgggagacctgggtgtgtggatcacgaggtcagaagttcaagactagtctgaccaacatggtga

SEQ ID NO: 101604 - DNA, 120 bp, Artificial Sequence
  ENSG00000092445_38 (sequence is synthesized)
gcctaggtgacaggcgagactccatctcaaaaataaaataaaaataaaaatgcaaaaaataataaaaggtgccagttacctatactcccaccacctagagataatcaccattgatctttt

SEQ ID NO: 101605 - DNA, 89 bp, Artificial Sequence
  ENSG00000092445_39 (sequence is synthesized)
tatactcccaccacctagagataatcaccattgatcttttgaaaatgcaaatattcagctgggcacagtggcgtgagtctctctctgtc

SEQ ID NO: 101606 - DNA, 120 bp, Artificial Sequence
  ENSG00000092445_40 (sequence is synthesized)
ctcactgtaacctctgtctcccaggtttaatcaagtctcttgtcttggcttcccgagtagttgggactacaggcacgagccactgtgtccggctattttttgtatttttttgtagagaca

SEQ ID NO: 101607 - DNA, 120 bp, Artificial Sequence
  ENSG00000092445_41 (sequence is synthesized)
ggaggctgaggcgggtggatcacttcaggccgggagttcgagaccagcctgggcaacatgaaaccccatctcaactaaaaattcaaaaaagtttagccaggcttggtggcgcaggtttgt

SEQ ID NO: 101608 - DNA, 120 bp, Artificial Sequence
  ENSG00000092445_42 (sequence is synthesized)
catctcagctactgggtgactgaggcatgagaatcacttaaacctgggaggaggaggttgcagtaagctgagatcttgccactaaacttcggcctgggtgacagattaagactgtctcag

SEQ ID NO: 101609 - DNA, 120 bp, Artificial Sequence
  ENSG00000092445_43 (sequence is synthesized)
aaacaaaacaaaacaacaaaaaagcttttagagcaagttcatgggagatgcagcaggaggcgcaggaaccacacatgtgctagtgaggagtgtggggagactgggagggcccacaggtat

SEQ ID NO: 101610 - DNA, 120 bp, Artificial Sequence
  ENSG00000092445_44 (sequence is synthesized)
tgtgctgcttctggctgagggcaggggaatagggtggctgcttctgaaagcaaatatcctgaaaaacctgttgctggtactccaaattctggttcccatgtagatcatgaaacctgaaaa

SEQ ID NO: 101611 - DNA, 120 bp, Artificial Sequence
  ENSG00000092445_45 (sequence is synthesized)
acttccaggcaagtagctttcagaatctttcctgctgtgattagctttcactgcaggtagtgattacctgtgagataacatctgggaattattgattgaaaagaccttcactatcggttg

SEQ ID NO: 101612 - DNA, 76 bp, Artificial Sequence
  ENSG00000092445_46 (sequence is synthesized)
aaaaaaaaaaaaaaaaaagattttctgtctcaaaaaaaaaaagagagagactctggatcaaaaaggattttcacaa

SEQ ID NO: 101613 - DNA, 120 bp, Artificial Sequence
  ENSG00000092445_47 (sequence is synthesized)
aaaaaagagagagactctggatcaaaaaggattttcacaaacagatccaaagaaccagcatccagattaagaaacagcattaacagcaacccagaagcaacccttgggacctgcctcaat

SEQ ID NO: 101614 - DNA, 120 bp, Artificial Sequence
  ENSG00000092445_48 (sequence is synthesized)
ctctgcctcctccctactccccataggtaacctctatcctgacctcttaacaccatggatcagtgaagctccttttaaaagtatataaatggagtcatgtagatttgattactttgcgtt

SEQ ID NO: 101615 - DNA, 120 bp, Artificial Sequence
  ENSG00000092445_49 (sequence is synthesized)
cgtttggcttctttccctcagcaacatgtttataaggatcatctaacaacagcagttttgaaaagtgagtctcaaagaggcaagaatggccgggcatggtggctcacacccgtaatccca

SEQ ID NO: 101616 - DNA, 120 bp, Artificial Sequence
  ENSG00000092445_50 (sequence is synthesized)
caggagtttgagaccagcctggctaacagggtgaaaccctgtctttactaaaccctgtctttactaaaaatacacaaaattagccaggtatggtggcaggcacgtgtaatcctagctact

SEQ ID NO: 101617 - DNA, 70 bp, Artificial Sequence
  ENSG00000092445_51 (sequence is synthesized)
ctacattccagcttgggtgagagagtgagactccatctcggaaaaaaaaaaaattagctgggcgtgctgg

SEQ ID NO: 101618 - DNA, 74 bp, Artificial Sequence
  ENSG00000092445_52 (sequence is synthesized)
cagtgagccactacattccagcttgggtgagagagtgagactccatctcggaaaaaaaaaaaattagctgggcg

SEQ ID NO: 101619 - DNA, 120 bp, Artificial Sequence
  ENSG00000092445_53 (sequence is synthesized)
cgagattgtgccatggcactccagcctggacaagagtgagactccatctcaaaaaagaaaataataataatatagtttatttttcagtatttcatgttgatttatctcaaatttattgtt

SEQ ID NO: 101620 - DNA, 120 bp, Artificial Sequence
  ENSG00000092445_54 (sequence is synthesized)
gaataagaagtgatacagagattcaaagttatttttcccagatactttttattgtcccaataccaccatttattgaacaatctatattttatgcacatttcttttttttttctttttttt

SEQ ID NO: 101621 - DNA, 120 bp, Artificial Sequence
  ENSG00000092445_55 (sequence is synthesized)
gatacagggtcttgctctgtttctgcctgggctggagtaaagtgatagtaaactgattctcccacctcagcgtcctgaatagctgggaccacaggcacacgccactgcacctggcaaatt

SEQ ID NO: 101622 - DNA, 65 bp, Artificial Sequence
  ENSG00000092445_56 (sequence is synthesized)
agctgggaccacaggcacacgccactgcacctggcaaatttttaagtgtttttttttttttttaa

SEQ ID NO: 101623 - DNA, 78 bp, Artificial Sequence
  ENSG00000092445_57 (sequence is synthesized)
gattacaggcttcagccaccgcgcccggcccagtttttaagtgttgtatgggctgaagcgatctgcccaccttggcct

SEQ ID NO: 101624 - DNA, 84 bp, Artificial Sequence
  ENSG00000092445_58 (sequence is synthesized)
aagtgcgtttcttgaataatctgtctccatttctctatatagcctcattgatctatctaaactcccatatctattttggttgct

SEQ ID NO: 101625 - DNA, 120 bp, Artificial Sequence
  ENSG00000092445_59 (sequence is synthesized)
tcattgatctatctaaactcccatatctattttggttgctagactgttcatcccaattacatgtgccagtgtcactgctacactaattgaattactataaatgtataatgttttcctata

SEQ ID NO: 101626 - DNA, 120 bp, Artificial Sequence
  ENSG00000092445_60 (sequence is synthesized)
aagaaagaaacagagacagagatatctggcccctgccatccatgtcttgacagtgcctcatgagtctctcctcctgctgccgcctgggggcgcccccagctgggtctcaggctgctgcca

SEQ ID NO: 101627 - DNA, 120 bp, Artificial Sequence
  ENSG00000092445_61 (sequence is synthesized)
gcactgctgttgttatcattagggtaattaataaacaagcactgctggggccaagtggaagaagaggcaggcccctgctgctcaggagaatccctgaaaagatccagtgagcctgcggca

SEQ ID NO: 101628 - DNA, 120 bp, Artificial Sequence
  ENSG00000092445_62 (sequence is synthesized)
accggagctgagtggctggtccctcctctctacccaggacctctggaaggggtgtggggtgggcttccccctggagggaagggcaaggggaggagcacacttggtaggcttggtttggaa

SEQ ID NO: 101629 - DNA, 120 bp, Artificial Sequence
  ENSG00000092445_63 (sequence is synthesized)
ccagctctgcatgtgcctaacaggatgtctgtgggcaaggccaccctcgtgattactggttgtggggcaggctctgaagcaattattcattcatttaacaggcatctgcctatttattta

SEQ ID NO: 101630 - DNA, 120 bp, Artificial Sequence
  ENSG00000092445_64 (sequence is synthesized)
tggaaagcctactgtgtgcaaggtggtctactaataatagctaatgtttgactggacagtgtgacgacacagccaactttcacaccaggtcctgggaaaaggggtagaagcaggggaagc

SEQ ID NO: 101631 - DNA, 120 bp, Artificial Sequence
  ENSG00000092445_65 (sequence is synthesized)
aaccaggaaaaatgacagcccaaaaagatacgggcaattaggctttggcctgtgtagtgtagtggtggggatatatattaggtaaaacctggggattaccaagatcttgggaaactcagg

SEQ ID NO: 101632 - DNA, 120 bp, Artificial Sequence
  ENSG00000092445_66 (sequence is synthesized)
acccaagttggaaaacatacggcaattggggctggagaaaatgggcatttttcaggtgggagggacttggagataaaggtctgaagctcatgggagccccggtgaagctgacagtgtctc

SEQ ID NO: 101633 - DNA, 120 bp, Artificial Sequence
  ENSG00000092445_67 (sequence is synthesized)
caagggctccctaggccttcagacaaccttttgtatgatctcatgtaccagtgctggagtgctgaccccaagcagcgcccgagctttacttgtctgcgaatggaactggagaacatcttg

SEQ ID NO: 101634 - DNA, 86 bp, Artificial Sequence
  ENSG00000092445_68 (sequence is synthesized)
gcctcccaaggtgatcccagtctaccaagcctggctaatttttgtattattatagagacagggttttgccatattgcccaggctgg

SEQ ID NO: 101635 - DNA, 120 bp, Artificial Sequence
  ENSG00000092445_69 (sequence is synthesized)
caggctggtctcgaactcctgggctcaaataataccccccttcggcctcccaaagtgttgagattacagatgcgagccgctgtgccccaccagggaataaaattttttaaaaccctagtg

SEQ ID NO: 101636 - DNA, 120 bp, Artificial Sequence
  ENSG00000092445_70 (sequence is synthesized)
tgtgggctgccagccagggggcaggctatgctctttccttggggattgggagctggggccctctcctgatgcccagaggtctgtggtttttttatttggctacctgtgggaccttccaga

SEQ ID NO: 101637 - DNA, 120 bp, Artificial Sequence
  ENSG00000092445_71 (sequence is synthesized)
agtgggggcaggctgaactcatcaagtttgcccagcagagctgccgcccttgccctcggaagcaagcctcgtatcctgtttccacagcctgaagtcagtggagcgctctgacgccggccg

SEQ ID NO: 101638 - DNA, 120 bp, Artificial Sequence
  ENSG00000092445_72 (sequence is synthesized)
gaaggtgaggaggcagagccatatgggcgtgttggcctggagcacgtgctgtctgctggtgactatacctctgcagcggagaactcagtagaagctgggctgccccactgctctgtgggg

SEQ ID NO: 101639 - DNA, 120 bp, Artificial Sequence
  ENSG00000092445_73 (sequence is synthesized)
cctggttgtccaggctgtaggcccactccagatgtcggaagaccctaccagttggagttgggtatctgagaaccaagggaccaactgggatccacaacctgtggggtgcagtctgtttcc

SEQ ID NO: 101640 - DNA, 120 bp, Artificial Sequence
  ENSG00000092445_74 (sequence is synthesized)
gttgcttgagcaacaagcttcaagcatccatctgggactggaccctgttctgccaagtggcctggccagcagggggaggggaggaaggctctgcagctgcgggagctcagagctgttcag

SEQ ID NO: 101641 - DNA, 120 bp, Artificial Sequence
  ENSG00000092445_75 (sequence is synthesized)
cccaggaaaacaaagtgactaagaaagtaacaaagggccctgaatgggagctggggcctggcagcagaactctgctaaagctctcacccactcccctgagttttatgcccctctcccagc

SEQ ID NO: 101642 - DNA, 120 bp, Artificial Sequence
  ENSG00000092445_76 (sequence is synthesized)
cagctctccacccccagtctcctctcttactgcaagaagagctgtccaaatctgccatgcctaagggggcagcatggaagatgtgtctaaggtgccaggcatggtggcgtgtgcctgtag

SEQ ID NO: 101643 - DNA, 120 bp, Artificial Sequence
  ENSG00000092445_77 (sequence is synthesized)
tcccagctactccggaggctaaggccagaggatcacttgagcccccaggagttccaggccagcctgggcaacatagagagacctccccgcgaccaatctcaaaaaaaaaaaaaaaaaaaa

SEQ ID NO: 101644 - DNA, 120 bp, Artificial Sequence
  ENSG00000092445_78 (sequence is synthesized)
cagggccttcgtggcagggagaggcaacctctctccacagcccaggcactctcccaggtgtgagcagctgtgccctactggttgcttatttgtgtactactgtgatcctgggagtgctga

SEQ ID NO: 101645 - DNA, 120 bp, Artificial Sequence
  ENSG00000092445_79 (sequence is synthesized)
gtagccgtctttaggttggggatgccctggaccctcagagagactcaaggcttgactcccatgcctcctgctgcctctgctcatatccctactgggcactgattctgagtccccgtccac

SEQ ID NO: 101646 - DNA, 120 bp, Artificial Sequence
  ENSG00000092445_80 (sequence is synthesized)
agagtctgctgactgtgttcccatggagggtcacttgggaggaaggttggcagggagcagagagccaaggagactctcccttacttggattggttcctaggagagtttggttcagtgcgg

SEQ ID NO: 101647 - DNA, 120 bp, Artificial Sequence
  ENSG00000092470_0 (sequence is synthesized)
gggaaggcgccggccgctaagaagccgaaagatgtccaggtcgggcgcggcggctgagaaggcggactccagacagcgaccccagatgaaggtaaatgaatataaagaaaatcaaaacat

SEQ ID NO: 101648 - DNA, 120 bp, Artificial Sequence
  ENSG00000092470_1 (sequence is synthesized)
cgcttatgtgtctctgagaccagcacagactacagttttaataaaaacagctaaggtctatcttgcccccttttcactcagtaattaccagctagaccagcttatgtgccccaaatccct

SEQ ID NO: 101649 - DNA, 120 bp, Artificial Sequence
  ENSG00000092470_2 (sequence is synthesized)
atcagaaaagaattctaacaatgaagtggcgtgtaagaagactaaaataaagaaaacttgcagaaggattatacctccaaagatgaaaaacacatcttccaaggcagaatccacgctgca

SEQ ID NO: 101650 - DNA, 120 bp, Artificial Sequence
  ENSG00000092470_3 (sequence is synthesized)
aaattcatcctcagctgttcatactgaaagtaacaagctacaacccaagagaacggcagatgcgatgaatctcagtgttgatgtggaaagtagtcaggatggagacagtgatgaagatac

SEQ ID NO: 101651 - DNA, 120 bp, Artificial Sequence
  ENSG00000092470_4 (sequence is synthesized)
cacaccatccctggatttttcgggattgtcaccctacgaaaggaagagactgaagaacatatcagaaaacgcagacttttttgcttctcttcagttgtctgagtctgctgcaagactccg

SEQ ID NO: 101652 - DNA, 120 bp, Artificial Sequence
  ENSG00000092470_5 (sequence is synthesized)
tgaaatgatagagaagagacagcctcctaaatccaaaagaaagaagcctaagagagaaaatgggattggatgtagaaggtcaatgcgattactaaaagttgatccttcgggagtttcatt

SEQ ID NO: 101653 - DNA, 120 bp, Artificial Sequence
  ENSG00000092470_6 (sequence is synthesized)
accagcagctccaacaccgccgacattagtagcagatgaaactcctttgttacctcctgggcctttagaaatgacttctgaaaatcaagaagacaacaatgaacgatttaaaggatttct

SEQ ID NO: 101654 - DNA, 120 bp, Artificial Sequence
  ENSG00000092470_7 (sequence is synthesized)
gcacacatgggcaggaatgagcaagccaagtagtaagaacactgagaagggattatctagcattaaaagctacaaagccaatttaaatggcatggtcattagtgaagataccgtttacaa

SEQ ID NO: 101655 - DNA, 120 bp, Artificial Sequence
  ENSG00000092470_8 (sequence is synthesized)
agttaccacaggcccaatattctctatggctctccatccatcagaaactagaactttggtagcagttggggccaaatttgggcaagttggactttgtgatttgacccagcaacctaaaga

SEQ ID NO: 101656 - DNA, 120 bp, Artificial Sequence
  ENSG00000092470_9 (sequence is synthesized)
agatggagtttatgtttttcatccccatagtcagccagttagctgtctttacttctcacccgccaatccggcccacatactgtcactgagctatgatggcacgttacgctgtggggattt

SEQ ID NO: 101657 - DNA, 120 bp, Artificial Sequence
  ENSG00000092470_10 (sequence is synthesized)
ttccagggctatttttgaagaggtgtatagaaatgaaagaagtagcttttcctccttcgacttcttggcagaagatgcctccactttaatagtaggacactgggatggaaatatgtcact

SEQ ID NO: 101658 - DNA, 120 bp, Artificial Sequence
  ENSG00000092470_11 (sequence is synthesized)
ggtggatagacggacacctggaacttcttatgagaaacttaccagttcttctatgggaaaaataagaactgttcatgtccacccagtgcatagacagtattttatcactgccggattgag

SEQ ID NO: 101659 - DNA, 120 bp, Artificial Sequence
  ENSG00000092470_12 (sequence is synthesized)
ggatactcatatttatgatgcaaggcgattgaattccaggagaagtcagcctttgatttctttgactgaacatacaaagagcattgcttccgcctatttttcacctcttactggtaacag

SEQ ID NO: 101660 - DNA, 120 bp, Artificial Sequence
  ENSG00000092470_13 (sequence is synthesized)
agtggtgaccacatgtgctgattgtaatctgagaatttttgacagcagctgtatatcttctaagattccgctcctcaccaccatcaggcacaacactttcactgggcgatggctgaccag

SEQ ID NO: 101661 - DNA, 120 bp, Artificial Sequence
  ENSG00000092470_14 (sequence is synthesized)
gttccaagccatgtgggatcctaaacaagaagactgtgtcatagttggcagcatggcccatccacgacgggtagaaatcttccatgagacaggaaagagggtgcattcgtttggtggaga

SEQ ID NO: 101662 - DNA, 120 bp, Artificial Sequence
  ENSG00000092470_15 (sequence is synthesized)
ataccttgtctctgtgtgttccatcaatgccatgcacccaactcggtatattttggctggaggtaattccagcgggaagatacatgtttttatgaatgaaaaaagctgctgagtttttgg

SEQ ID NO: 101663 - DNA, 120 bp, Artificial Sequence
  ENSG00000092470_16 (sequence is synthesized)
tagcaattataacattgttttattaataagactataagaagagtgtacttttagtaagggagaagtcttggagggttgcttctgcaggacggggagggaatttgaggggaggctgaggtg

SEQ ID NO: 101664 - DNA, 83 bp, Artificial Sequence
  ENSG00000092470_17 (sequence is synthesized)
cagaacttgtaatcaagacagtatgttgagaaattctaacattataaattacaaagctttgactattaaagtttttgtgatct

SEQ ID NO: 101665 - DNA, 120 bp, Artificial Sequence
  ENSG00000092470_18 (sequence is synthesized)
ataaattacaaagctttgactattaaagtttttgtgatctaatgatacagttttgattctatagtaatttgtggcttattttatagtttataatgaatacttatttctagactcatacac

SEQ ID NO: 101666 - DNA, 120 bp, Artificial Sequence
  ENSG00000092470_19 (sequence is synthesized)
tggaaggggacccggaaaggtaatgtaactcagtgattttaaaacttgatttttttaactgagaactttttttgccccctgcctgtaggttaagtcttacgtgaaatgccaagataattg

SEQ ID NO: 101667 - DNA, 120 bp, Artificial Sequence
  ENSG00000092470_20 (sequence is synthesized)
ctgagcagctttggttacccagggcggggtctgggtctgtctgtactttgcctttactctagatggctcctgagacacaggcaggactcccaagcaccgggttgggatctgccctggtcc

SEQ ID NO: 101668 - DNA, 120 bp, Artificial Sequence
  ENSG00000092470_21 (sequence is synthesized)
cggcattccagtataagattgcctcagacctgtgtttttcagactgggtttttgctcttcacatgaaatcaagttagatgacaatgactggtgttgaaaaaaatgaaaaggaaagaattt

SEQ ID NO: 101669 - DNA, 120 bp, Artificial Sequence
  ENSG00000092470_22 (sequence is synthesized)
aggaaagaatttgtaaagaacagaaaatatatttgagtaagtattgtttggtaaaacttagttacatatgcatatatatttgttaggtatatatgtttatgtgtattctgatgtaaaata

SEQ ID NO: 101670 - DNA, 120 bp, Artificial Sequence
  ENSG00000092470_23 (sequence is synthesized)
tattttattactatagtaccatgggtaatggataaagaagttaaagctactgcttagaatgaagaaggccccaggcttacctgtcccgatctttaaactgtccgaaggaaattcaatagc

SEQ ID NO: 101671 - DNA, 120 bp, Artificial Sequence
  ENSG00000092470_24 (sequence is synthesized)
ctgttaagtgaataccttcattcttacttgtatttgggggaatattatgaaatactcaccacttttggtattttatgaaaatgttttcttttcagaagttatggtaatttcaatgtgttt

SEQ ID NO: 101672 - DNA, 120 bp, Artificial Sequence
  ENSG00000092470_25 (sequence is synthesized)
gttgttgggaggggagctgccaaatcagttactaatattactgtgtgacatctatccaacttttttcattattcttcattgccaaatactgaaagacttgtaaatggctttggcaatatg

SEQ ID NO: 101673 - DNA, 120 bp, Artificial Sequence
  ENSG00000092470_26 (sequence is synthesized)
tttgaattctaagaggaaatattttcccataattgtatatcagagaaatatagtgatatacaatttccttgaaaaccaatttctaaataattttcttctctgtaatctaagtgtaaaaag

SEQ ID NO: 101674 - DNA, 120 bp, Artificial Sequence
  ENSG00000092470_27 (sequence is synthesized)
gtttagttttttaataggtttaggtgtttataagcaatagttctctattttctagttgatataagtagaagaattgacaagtgagatggaaatgttaatttataaagggaaagaaaagct

SEQ ID NO: 101675 - DNA, 120 bp, Artificial Sequence
  ENSG00000092470_28 (sequence is synthesized)
aggtgaggttgagttataattaaactgttcaggaaacatcgtaaaggctttaggctccctttttcatttctataccaattaatctcatgggttctagagtggttagttctacgggaattg

SEQ ID NO: 101676 - DNA, 120 bp, Artificial Sequence
  ENSG00000092470_29 (sequence is synthesized)
tttttgtttttgtttttaaagatgctgaaaactactctcaatcaaattagtaccatcatttaagctttgaatacttggcagtaattgcctgggctcgtcaataaatgttagcaaattctt

SEQ ID NO: 101677 - DNA, 120 bp, Artificial Sequence
  ENSG00000092470_30 (sequence is synthesized)
ggcctcccgccgcaatcttggcgggaaggcgccggccgctaagaagccgaaagatgtccaggtcgggcgcggcggctgagaaggcggactccagacagcgaccccagatgaaggtgagaa

SEQ ID NO: 101678 - DNA, 120 bp, Artificial Sequence
  ENSG00000092470_31 (sequence is synthesized)
gccgcaatcttggcgggaaggcgccggccgctaagaagccgaaagatgtccaggtcgggcgcggcggctgagaaggcggactccagacagcgaccccagatgaagtaattaccagctaga

SEQ ID NO: 101679 - DNA, 120 bp, Artificial Sequence
  ENSG00000092529_0 (sequence is synthesized)
actctctttctctctccctctggcatgcatgctgctggtaggagacccccaagtcaacattgcttcagaaatcctttagcactcatttctcaggagaacttatggcttcagaatcacagc

SEQ ID NO: 101680 - DNA, 120 bp, Artificial Sequence
  ENSG00000092529_1 (sequence is synthesized)
tcggtttttaagatggacataacctgtacgaccttctgatgggctttcaactttgaactggatgtggacacttttctctcagatgacagaattactccaacttcccctttgcagttgctt

SEQ ID NO: 101681 - DNA, 120 bp, Artificial Sequence
  ENSG00000092529_2 (sequence is synthesized)
cctttccttgaaggtagctgtatcttattttctttaaaaagctttttcttccaaagccacttgccatgccgaccgtcattagcgcatctgtggctccaaggacagcggctgagccccggt

SEQ ID NO: 101682 - DNA, 120 bp, Artificial Sequence
  ENSG00000092529_3 (sequence is synthesized)
ccccagggccagttcctcacccggcccagagcaaggccactgaggctgggggtggaaacccaagtggcatctattcagccatcatcagccgcaattttcctattatcggagtgaaagaga

SEQ ID NO: 101683 - DNA, 120 bp, Artificial Sequence
  ENSG00000092529_4 (sequence is synthesized)
agacattcgagcaacttcacaagaaatgtctagaaaagaaagttctttatgtggaccctgagttcccaccggatgagacctctctcttttatagccagaagttccccatccagttcgtct

SEQ ID NO: 101684 - DNA, 120 bp, Artificial Sequence
  ENSG00000092529_5 (sequence is synthesized)
ggaagagacctccggaaatttgcgagaatccccgatttatcattgatggagccaacagaactgacatctgtcaaggagagctaggggactgctggtttctcgcagccattgcctgcctga

SEQ ID NO: 101685 - DNA, 120 bp, Artificial Sequence
  ENSG00000092529_6 (sequence is synthesized)
ccctgaaccagcaccttcttttccgagtcataccccatgatcaaagtttcatcgaaaactacgcagggatcttccacttccagttctggcgctatggagagtgggtggacgtggttatag

SEQ ID NO: 101686 - DNA, 120 bp, Artificial Sequence
  ENSG00000092529_7 (sequence is synthesized)
atgactgcctgccaacgtacaacaatcaactggttttcaccaagtccaaccaccgcaatgagttctggagtgctctgctggagaaggcttatgctaagctccatggttcctacgaagctc

SEQ ID NO: 101687 - DNA, 120 bp, Artificial Sequence
  ENSG00000092529_8 (sequence is synthesized)
tgaaaggtgggaacaccacagaggccatggaggacttcacaggaggggtggcagagttttttgagatcagggatgctcctagtgacatgtacaagatcatgaagaaagccatcgagagag

SEQ ID NO: 101688 - DNA, 120 bp, Artificial Sequence
  ENSG00000092529_9 (sequence is synthesized)
gctccctcatgggctgctccattgatgatggcacgaacatgacctatggaacctctccttctggtctgaacatgggggagttgattgcacggatggtaaggaatatggataactcactgc

SEQ ID NO: 101689 - DNA, 120 bp, Artificial Sequence
  ENSG00000092529_10 (sequence is synthesized)
tccaggactcagacctcgaccccagaggctcagatgaaagaccgacccggacaatcattccggttcagtatgagacaagaatggcctgcgggctggtcagaggtcacgcctactctgtca

SEQ ID NO: 101690 - DNA, 120 bp, Artificial Sequence
  ENSG00000092529_11 (sequence is synthesized)
cggggctggatgaggtcccgttcaaaggtgagaaagtgaagctggtgcggctgcggaatccgtggggccaggtggagtggaacggttcttggagtgatagatggaaggactggagctttg

SEQ ID NO: 101691 - DNA, 120 bp, Artificial Sequence
  ENSG00000092529_12 (sequence is synthesized)
tggacaaagatgagaaggcccgtctgcagcaccaggtcactgaggatggagagttctggatgtcctatgaggatttcatctaccatttcacaaagttggagatctgcaacctcacggccg

SEQ ID NO: 101692 - DNA, 120 bp, Artificial Sequence
  ENSG00000092529_13 (sequence is synthesized)
ccggaggctgccgcaacttcccagatactttctggaccaaccctcagtaccgtctgaagctcctggaggaggacgatgaccctgatgactcggaggtgatttgcagcttcctggtggccc

SEQ ID NO: 101693 - DNA, 120 bp, Artificial Sequence
  ENSG00000092529_14 (sequence is synthesized)
tgatgcagaagaaccggcggaaggaccggaagctaggggccagtctcttcaccattggcttcgccatctacgaggttcccaaagagatgcacgggaacaagcagcacctgcagaaggact

SEQ ID NO: 101694 - DNA, 120 bp, Artificial Sequence
  ENSG00000092529_15 (sequence is synthesized)
tcttcctgtacaacgcctccaaggccaggagcaaaacctacatcaacatgcgggaggtgtcccagcgcttccgcctgcctcccagcgagtacgtcatcgtgccctccacctacgagcccc

SEQ ID NO: 101695 - DNA, 120 bp, Artificial Sequence
  ENSG00000092529_16 (sequence is synthesized)
accaggagggggaattcatcctccgggtcttctctgaaaagaggaacctctctgaggaagttgaaaataccatctccgtggatcggccagtgaaaaagaaaaaaaccaagcccatcatct

SEQ ID NO: 101696 - DNA, 120 bp, Artificial Sequence
  ENSG00000092529_17 (sequence is synthesized)
tcgtttcggacagagcaaacagcaacaaggagctgggtgtggaccaggagtcagaggagggcaaaggcaaaacaagccctgataagcaaaagcagtccccacagccacagcctggcagct

SEQ ID NO: 101697 - DNA, 120 bp, Artificial Sequence
  ENSG00000092529_18 (sequence is synthesized)
ctgatcaggaaagtgaggaacagcaacaattccggaacattttcaagcagatagcaggagatgacatggagatctgtgcagatgagctcaagaaggtccttaacacagtcgtgaacaaac

SEQ ID NO: 101698 - DNA, 120 bp, Artificial Sequence
  ENSG00000092529_19 (sequence is synthesized)
acaaggacctgaagacacacgggttcacactggagtcctgccgtagcatgattgcgctcatggatacagatggctctggaaagctcaacctgcaggagttccaccacctctggaacaaga

SEQ ID NO: 101699 - DNA, 120 bp, Artificial Sequence
  ENSG00000092529_20 (sequence is synthesized)
ttaaggcctggcagaaaattttcaaacactatgacacagaccagtccggcaccatcaacagctacgagatgcgaaatgcagtcaacgacgcaggattccacctcaacaaccagctctatg

SEQ ID NO: 101700 - DNA, 120 bp, Artificial Sequence
  ENSG00000092529_21 (sequence is synthesized)
acatcattaccatgcggtacgcagacaaacacatgaacatcgactttgacagtttcatctgctgcttcgttaggctggagggcatgttcagagcttttcatgcatttgacaaggatggag

SEQ ID NO: 101701 - DNA, 120 bp, Artificial Sequence
  ENSG00000092529_22 (sequence is synthesized)
atggtatcatcaagctcaacgttctggagtggctgcagctcaccatgtatgcctgaaccaggctggcctcatccaaagccatgcaggatcactcaggatttcagtttcaccctctatttc

SEQ ID NO: 101702 - DNA, 120 bp, Artificial Sequence
  ENSG00000092529_23 (sequence is synthesized)
caaagccatttacctcaaaggacccagcagctacacccctacaggcttccaggcacctcatcagtcatgctcctcctccattttaccccctacccatccttgatcggtcatgcctagcct

SEQ ID NO: 101703 - DNA, 120 bp, Artificial Sequence
  ENSG00000092529_24 (sequence is synthesized)
gaccctttagtaaagcaatgaggtaggaagaacaaacccttgtccctttgccatgtggaggaaagtgcctgcctctggtccgagccgcctcggttctgaagcgagtgctcctgcttacct

SEQ ID NO: 101704 - DNA, 120 bp, Artificial Sequence
  ENSG00000092529_25 (sequence is synthesized)
tgctctaggctgtctgcagaagcacctgccggtggcactcagcacctccttgtgctagagccctccatcaccttcacgctgtcccaccatgggccaggaaccaaaccagcactgggttct

SEQ ID NO: 101705 - DNA, 120 bp, Artificial Sequence
  ENSG00000092529_26 (sequence is synthesized)
actgctgtggggtaaactaactcagtggaatagggctggttactttgggctgtccaactcataagtttggctgcattttgaaaaaagctgatctaaataaaggcatgtgtatggctggtc

SEQ ID NO: 101706 - DNA, 120 bp, Artificial Sequence
  ENSG00000092529_27 (sequence is synthesized)
ttcagcaagttcccctgaaatttgggctgctgcttgggtgaatatcccaggatgggggttccattctaggagtggactggcaggctgagcctcccatggagctgatccagccaggataca

SEQ ID NO: 101707 - DNA, 120 bp, Artificial Sequence
  ENSG00000092529_28 (sequence is synthesized)
gagaaggggaggcaaaggctgagacagaaccagcttgagagcggaggcgcaactcttgtctcctggtggccttgagcatttcacaatagggggataaaggataggagcagaaaagtgggg

SEQ ID NO: 101708 - DNA, 120 bp, Artificial Sequence
  ENSG00000092529_29 (sequence is synthesized)
ctgacttcagaaatggggtcctctagagctcacgggagggtgttagattggagtgggagcttagtggaggtgagccttagaggcaaaagtctccagaccaatccagggcccctcttctat

SEQ ID NO: 101709 - DNA, 120 bp, Artificial Sequence
  ENSG00000092529_30 (sequence is synthesized)
ccgggggcccctcttctatccagggcccctcttctgtctgggagcccctcttctatctggggcctcatgcagtggggcctaggggaggttctctgaggacttggccttgatgacagggtg

SEQ ID NO: 101710 - DNA, 120 bp, Artificial Sequence
  ENSG00000092529_31 (sequence is synthesized)
gctggaggaatcagaacggtcagaccttctttgacctgcgggcacctttagttggaatggtcaggcctgggatggtggagggggctcttgcaggtggggactggggtggcggggaggagg

SEQ ID NO: 101711 - DNA, 120 bp, Artificial Sequence
  ENSG00000092529_32 (sequence is synthesized)
ctgtatggccgccatatctcctttggctgggggcgtcagggctggagaggtgtgaagagtccctgaggcctcgatgcatctcactccagctcaccaggtctgcatttgcccgtccccagc

SEQ ID NO: 101712 - DNA, 120 bp, Artificial Sequence
  ENSG00000092529_33 (sequence is synthesized)
tcctgctgccacctccggccgttttaggcacttggctcccttggcccagaggagcttgcctcacaggcctgtgcacctctgacccctgtgaaccagttttcctttgtgcctccacagcca

SEQ ID NO: 101713 - DNA, 120 bp, Artificial Sequence
  ENSG00000092529_34 (sequence is synthesized)
cacaggcgattggttttagtggtaggtgtgtggggatctgttctggtcatctggatgctggtcatcggtgtgcagtattgatcaggacctgcaaacccaaaagcttatgggagctggcac

SEQ ID NO: 101714 - DNA, 120 bp, Artificial Sequence
  ENSG00000092529_35 (sequence is synthesized)
ccctcctccacgcttacagccacacacacagtcacacagacgcgttctgagggtggctgcccgcttgggatggaggaatcacttccctcagaacccagccaagtcctctaggcctccttg

SEQ ID NO: 101715 - DNA, 120 bp, Artificial Sequence
  ENSG00000092529_36 (sequence is synthesized)
agaggattaggcgtggactgagggtgcagtgggaaagaggcagcagggaaggcccagctctactcccagagcattcgccatgccctacctgctgtcaggattcttctgtgactgtgtgat

SEQ ID NO: 101716 - DNA, 120 bp, Artificial Sequence
  ENSG00000092529_37 (sequence is synthesized)
ccaagagagggacaggagaaatggagagggcaccatcgcacagcccctcaagtttgaggggcaggattttgtcgttctcaaagatgtctggcccagaagtgcctctttgaagattgtgtg

SEQ ID NO: 101717 - DNA, 120 bp, Artificial Sequence
  ENSG00000092531_0 (sequence is synthesized)
aggcgcgactagggtgcagcgccaggtccggtgttggggtgtccgagttgccgccggagaggagtggcctcgcccgcttgagttttgattcatcatggataatctgtcatcagaagaaat

SEQ ID NO: 101718 - DNA, 120 bp, Artificial Sequence
  ENSG00000092531_1 (sequence is synthesized)
tcaacagagagctcaccagattactgatgagtctctggaaagtacgaggagaatcctgggtttagccattgagtctcaggatgcaggaatcaagaccatcactatgctggatgaacaaaa

SEQ ID NO: 101719 - DNA, 120 bp, Artificial Sequence
  ENSG00000092531_2 (sequence is synthesized)
ggaacaactaaaccgcatagaagaaggcttggaccaaataaataaggacatgagagagacagagaagactttaacagaactcaacaaatgctgtggcctttgtgtctgcccatgtaatag

SEQ ID NO: 101720 - DNA, 120 bp, Artificial Sequence
  ENSG00000092531_3 (sequence is synthesized)
aacaaagaactttgagtctggcaaggcttataagacaacatggggagatggtggagaaaactcaccttgcaatgtagtatctaaacagccaggcccggtgacaaatggtcagcttcagca

SEQ ID NO: 101721 - DNA, 120 bp, Artificial Sequence
  ENSG00000092531_4 (sequence is synthesized)
accaacaacgggagcagccagtggtggatacattaaacgcataactaatgatgccagagaagatgaaatggaagagaacctgactcaagtgggcagtatcctgggaaatctaaaagacat

SEQ ID NO: 101722 - DNA, 120 bp, Artificial Sequence
  ENSG00000092531_5 (sequence is synthesized)
ggccctgaacataggcaatgagattgatgctcaaaatccacaaataaaacgaatcacagacaaggctgacaccaacagagatcgtattgatattgccaatgccagagcaaagaaactcat

SEQ ID NO: 101723 - DNA, 120 bp, Artificial Sequence
  ENSG00000092531_6 (sequence is synthesized)
tgacagctaaagctactgctgttcttctttatcatttattcacttccgtagctcctccttgaaagttattaccttttcagagtttaagttttcggttccacgctcttctaattgggagat

SEQ ID NO: 101724 - DNA, 120 bp, Artificial Sequence
  ENSG00000092531_7 (sequence is synthesized)
aatatggaagaagggccagagcagttacagccctccttcttttttgttttctgttgagggccgactgctgctctgccttccttctagtattttctttctcaattcatacgcttagattgg

SEQ ID NO: 101725 - DNA, 120 bp, Artificial Sequence
  ENSG00000092531_8 (sequence is synthesized)
ttttcatatgtcatgtttagtgttttcatcctcctcatatacttcagcaggttcttttgctttcaagatttggaagcattgccaaagacagccatgaagaaggaagctgtagaggtgttt

SEQ ID NO: 101726 - DNA, 120 bp, Artificial Sequence
  ENSG00000092531_9 (sequence is synthesized)
tgagggaaggacaagagataagaggttgttacctcagtaaaaaccttcaggccacaaagcaaaaagttgcatagccacaacgaagatctagttggatatagtttttgatttaagttgcag

SEQ ID NO: 101727 - DNA, 120 bp, Artificial Sequence
  ENSG00000092531_10 (sequence is synthesized)
ttatagccaatttaggctaatgcttggttttggagcttttatacacaacgtttttgttaggcatcacagttttgcaacctctgctccaaagagaaaaatagaatgagttttctttctttt

SEQ ID NO: 101728 - DNA, 120 bp, Artificial Sequence
  ENSG00000092531_11 (sequence is synthesized)
ctgctccaaagagaaaaatagaatgagttttctttcttttttttttttttggagtcagagtctcgctctcttgtccaggctggagtgcaatagcgcgatctgggctcactgcaacctccg

SEQ ID NO: 101729 - DNA, 64 bp, Artificial Sequence
  ENSG00000092531_12 (sequence is synthesized)
attacaggcgtgtgagctggtcttggactcctgacgtcgtgatccacccgccttggcctcccaa

SEQ ID NO: 101730 - DNA, 120 bp, Artificial Sequence
  ENSG00000092531_13 (sequence is synthesized)
gcgtgagccactgtgcctggctgagttttcttaaagtgagcttaatttctgaactcttagtgattcatatatgtacataaatctgtgatcccatttcttattgcaccattcaggaacact

SEQ ID NO: 101731 - DNA, 120 bp, Artificial Sequence
  ENSG00000092531_14 (sequence is synthesized)
cttattgcaccattcaggaacactttatataaatgagtggctttttatttcatattattagtagtatcatggttccattacaggcctattaacatcatacattgtcattagtctttgaag

SEQ ID NO: 101732 - DNA, 120 bp, Artificial Sequence
  ENSG00000092531_15 (sequence is synthesized)
aaaaaatatgtaaatatatatgtgtaacatgagaatttctctctaaagcagggcttaaaattttttggaaaagtttgacaaagcataccacatgaattcagatttacctcaatgctaaga

SEQ ID NO: 101733 - DNA, 120 bp, Artificial Sequence
  ENSG00000092531_16 (sequence is synthesized)
attatgtttagttaggaaaaaggaaagtcattttgacctcaggtagaaaaatagattgctttgagttttatgtagctttagactttaaaaagttagaatttattctgtaactaaaaatta

SEQ ID NO: 101734 - DNA, 120 bp, Artificial Sequence
  ENSG00000092531_17 (sequence is synthesized)
tttgaaaaaattatgcctctggtttaattattggtgattacacactctttctcttacccttgtgtattgaactatgtccataatcaagttgatgtggatcctgaaaagtgttatgaacat

SEQ ID NO: 101735 - DNA, 120 bp, Artificial Sequence
  ENSG00000092531_18 (sequence is synthesized)
ctgattggtatttgtcacatttattttaaaattagcatctgaacacttcaaagctgtcagtgtgtattggtttcaccaataaccactgcttgatccttacaattaaattttttaactaac

SEQ ID NO: 101736 - DNA, 120 bp, Artificial Sequence
  ENSG00000092531_19 (sequence is synthesized)
aatgttagtcatcaacttaagtatagaaatttataggagcgatcctaatacttctggctggaattagtattaaagggtaatgtatcaatatgctttattatttgaaattaacagttgctg

SEQ ID NO: 101737 - DNA, 120 bp, Artificial Sequence
  ENSG00000092531_20 (sequence is synthesized)
aaatgtcaaaccatgcactaatgggaattttctgtttttccctttaacagtattggaatatgacagggaagatgaattcactatgagtttgtgacttaattattttgggggctgctatgt

SEQ ID NO: 101738 - DNA, 120 bp, Artificial Sequence
  ENSG00000092531_21 (sequence is synthesized)
taaagtgtgttagtttaagaatactagttctgtctgtagctctaatcctctgagagcttgggtttctaaattattctgtgttgctcttgtaggttttgtttctgttgtttttggtttgtt

SEQ ID NO: 101739 - DNA, 120 bp, Artificial Sequence
  ENSG00000092531_22 (sequence is synthesized)
gatatcttcactgagatctgagatatctattgaaaaaccacaaaagaataacaggaaaaagcataagcactatactggttacttttagtacattaaaacaaaacaaaaatctttacttga

SEQ ID NO: 101740 - DNA, 120 bp, Artificial Sequence
  ENSG00000092531_23 (sequence is synthesized)
aatccacaaataaaacgaatcacagacaagcaagcagacagatctgggaatcactgaggatgctctggggaagcatgctgagctcaagacaattctcttccaggcgaagaattttaaggc

SEQ ID NO: 101741 - DNA, 120 bp, Artificial Sequence
  ENSG00000092531_24 (sequence is synthesized)
agattactgatgaggtaaatgttttacctaaaataagtaaataattctatttcagttttcatattggaggagtgagagagccttcttagggacattttggcctcttcctagtccattaat

SEQ ID NO: 101742 - DNA, 120 bp, Artificial Sequence
  ENSG00000092531_25 (sequence is synthesized)
tacttaagtgtaacaaagatactctactatgtatttgagaaatgctagacttctatttaacaatttcctaatatctgtaatttacttagatttctacctacattaaatttttattcccat

SEQ ID NO: 101743 - DNA, 120 bp, Artificial Sequence
  ENSG00000092531_26 (sequence is synthesized)
ccatgaacttcaccatccaaatattctcttttttaaaaaaactttttctttcaacatcacactggaagtccttacacattttctcttaaggagcgcctgaaaataactaaaaatgtagtg

SEQ ID NO: 101744 - DNA, 120 bp, Artificial Sequence
  ENSG00000092531_27 (sequence is synthesized)
tttttctcaaaaagaatggaggaagaacaaaggcaggcccgcttgcgggagagtcagtacgcagcgttggacgctatgaacagcctccctggcatgcaatggaggaactattttacccta

SEQ ID NO: 101745 - DNA, 120 bp, Artificial Sequence
  ENSG00000092531_28 (sequence is synthesized)
atctaaagaacaaagaactttgagtctggcaaggcttataagacaacatggggagatggtggagaaaactcaccttgcaatgtagtatctaaacagccaggcccggtgacaaatggtcag

SEQ ID NO: 101746 - DNA, 120 bp, Artificial Sequence
  ENSG00000092531_29 (sequence is synthesized)
gcttggtgagtctccaggagtgggacggagggagctggccgggatgaagtctgagactatgtcctgagaagaaagagtgtatcgtattggttgaaaagttggtggggtcgggcttaagcg

SEQ ID NO: 101747 - DNA, 120 bp, Artificial Sequence
  ENSG00000092531_30 (sequence is synthesized)
gaggagggggctctctggcccttactcggcagatgggcccggagagaggacgggaggtgccgggagaacatcgagggaccagtggaggaagggtagctggatgagttttgattcatcatg

SEQ ID NO: 101748 - DNA, 120 bp, Artificial Sequence
  ENSG00000092531_31 (sequence is synthesized)
acaggaagaggtttttctcaaaaagaatggaggaagaacaaaggcaggcccgcttgcgggagaatttgttctagaggtttaggaaacttccaattccgtgtttgtgacatcacaagtcct

SEQ ID NO: 101749 - DNA, 120 bp, Artificial Sequence
  ENSG00000092531_32 (sequence is synthesized)
tgaaacactcaagggttgtggtacgctgctcattctattctccttcaaaggcatgcaatggaggaactattttaccctataaactctgggccatcattcagggaaaagcctgtagaagac

SEQ ID NO: 101750 - DNA, 120 bp, Artificial Sequence
  ENSG00000092531_33 (sequence is synthesized)
ataatttgtttacatatctatatcttagtctagacatattgaaaggcgatgaagagcagggaaagcactgtattcgctttcttttcttcagcgttcatccagcacagtgcctggcatacg

SEQ ID NO: 101751 - DNA, 120 bp, Artificial Sequence
  ENSG00000092531_34 (sequence is synthesized)
gtttgccctcagtaaatgtttattgcatgaacacctcccagcttcgggcaggactgaaatctatccggttaactagtgaattcccagactctccgtctgcgtggcagggacatttaaacc

SEQ ID NO: 101752 - DNA, 120 bp, Artificial Sequence
  ENSG00000092531_35 (sequence is synthesized)
aaaacgatagtgccagaggctaagggaacctgaaaaatcaaatagttgccttttgctacttgctaacagcctagtgaagatttggtagaagtagtatttggacctttttaaaattttttt

SEQ ID NO: 101753 - DNA, 120 bp, Artificial Sequence
  ENSG00000092531_36 (sequence is synthesized)
tagtgtcaatgggtttacataattcatctatttcctattccatattgccatggagcatagtgtagatcatctagacttagctgtatgcagcttttctactagagttattagtgtcatcct

SEQ ID NO: 101754 - DNA, 79 bp, Artificial Sequence
  ENSG00000092531_37 (sequence is synthesized)
aggcgcgactagggtgcagcgccaggtccggtgttggggtgtccgagttgccgccggagaggagtggcctcgcccgctc

SEQ ID NO: 101755 - DNA, 120 bp, Artificial Sequence
  ENSG00000092531_38 (sequence is synthesized)
ctgcagcctctgcctcccaggctcaagccacagacgtgcactactgcactcggctaatttttgtgttttctttttagtagagctggggtttcaccgtattgggcagtctggtcttgaact

SEQ ID NO: 101756 - DNA, 120 bp, Artificial Sequence
  ENSG00000092531_39 (sequence is synthesized)
aggcatgagccaccacgcctggcctgatggtgatttaaagtgctctttcttcattacttcttgagtagctcaccagttttacaaatgaagccacatggatcttccaaggccttatttaaa

SEQ ID NO: 101757 - DNA, 120 bp, Artificial Sequence
  ENSG00000092531_40 (sequence is synthesized)
gccttatttaaattccagggccttttttctgtgtatttctttccaagaagctcatttacttttcctttcttcttttcttctcttttcttttacttcctttctgcttgcattttttttttt

SEQ ID NO: 101758 - DNA, 84 bp, Artificial Sequence
  ENSG00000092531_41 (sequence is synthesized)
aagtacagtggcatgatctcggctcactgcgacctttgcctctcgggttcaatcaactctcctgtctcagcctcctgagtagct

SEQ ID NO: 101759 - DNA, 120 bp, Artificial Sequence
  ENSG00000092531_42 (sequence is synthesized)
agtacgcagcgttggacgctatgaacagcctccctggtccctttttcattctccttgtttctccttgttctttcccggcctccctgtagctcctactctcttccttggtgtcccgccatt

SEQ ID NO: 101760 - DNA, 120 bp, Artificial Sequence
  ENSG00000092531_43 (sequence is synthesized)
tcctttagtcagtggcaactgttcgggctacattttgaaaacactccttccttgtaaaactttctgaagttgaatggaaggtgcaagagctttagaacagccagacctgagtttcagatc

SEQ ID NO: 101761 - DNA, 120 bp, Artificial Sequence
  ENSG00000092531_44 (sequence is synthesized)
atgtgcatggattttgtgaatggtgaaaactgtctctaaactgtgtggtggtgtgtagtgtaaagtgaatttgttcttgatgggtgctatctcacaaaagatggacttgacaaaaggacc

SEQ ID NO: 101762 - DNA, 120 bp, Artificial Sequence
  ENSG00000092531_45 (sequence is synthesized)
ttaatttataataccatcctttgacaaatgtctctgataactaagtttttgctaaataacatttaagattaccaaaataacaatactcctggagtttcttaagaaatttaaaataggttg

SEQ ID NO: 101763 - DNA, 120 bp, Artificial Sequence
  ENSG00000092531_46 (sequence is synthesized)
atctttgagacagctgctgcagtctagttctgataaaaggtaagggaagtcatgctaaatgcttctctgtcttcatagactttgattttagcatcctgtcttccattaagtttccctact

SEQ ID NO: 101764 - DNA, 120 bp, Artificial Sequence
  ENSG00000092531_47 (sequence is synthesized)
attctattctccttcaaaggcatgcaatggaggaactattttaccctataaactctgggccatcattcagggaaaagcctgtagaagaccacagtcagatattggtgagtgccaagagtt

SEQ ID NO: 101765 - DNA, 120 bp, Artificial Sequence
  ENSG00000092607_0 (sequence is synthesized)
tctttccggcttctttgcaaaaggatagaaccgtctcgaccagggcactaggactggaagatcgggctgtgtctaggccgctgtccgcgaaatccgagacgttttttcagcttggctagg

SEQ ID NO: 101766 - DNA, 120 bp, Artificial Sequence
  ENSG00000092607_1 (sequence is synthesized)
accgacttcgctgccggtttgagctttctctgcactcgggggtctcctgccgtcctcgaccggtggcgtaacttgggaagagattctgagcagagcactggttcagattctgaggtcctc

SEQ ID NO: 101767 - DNA, 120 bp, Artificial Sequence
  ENSG00000092607_2 (sequence is synthesized)
actgagcggacttcctgctccttcagtactcacactgacctggcctctggtgctgcaggccctgtgcctgctgccatgtcttccatggaggagattcaggtggagctgcaatgtgctgac

SEQ ID NO: 101768 - DNA, 120 bp, Artificial Sequence
  ENSG00000092607_3 (sequence is synthesized)
ctctggaagcggttccatgatattggaactgaaatgatcatcaccaaagcaggcaggaggatgtttcctgccatgagagtgaaaatcactggcctagatccacatcagcagtactacata

SEQ ID NO: 101769 - DNA, 120 bp, Artificial Sequence
  ENSG00000092607_4 (sequence is synthesized)
gcaatggacattgtgcctgtggacaataaaagatacagatatgtgtatcatagctccaagtggatggtggctggcaatgctgattcccctgtgcccccaagagtttatatacaccctgat

SEQ ID NO: 101770 - DNA, 120 bp, Artificial Sequence
  ENSG00000092607_5 (sequence is synthesized)
tctctagcttctggagacacctggatgagacaggtggtcagttttgacaaactcaagcttaccaacaatgagttggatgatcaaggacatatcattctgcactctatgcacaaataccag

SEQ ID NO: 101771 - DNA, 120 bp, Artificial Sequence
  ENSG00000092607_6 (sequence is synthesized)
cctcgagttcatgtgattcgcaaagacttcagcagtgacctttcacccactaagcctgttcctgttggggatggggtgaaaacgttcaactttcctgagactgtgttcaccacagttacg

SEQ ID NO: 101772 - DNA, 120 bp, Artificial Sequence
  ENSG00000092607_7 (sequence is synthesized)
gcctatcagaatcagcagattaccagattaaaaattgaccgaaacccttttgctaaaggattcagagattctgggagaaacagaactggacttgaagccatcatggagacatatgcattc

SEQ ID NO: 101773 - DNA, 120 bp, Artificial Sequence
  ENSG00000092607_8 (sequence is synthesized)
tggagacctcctgtgcgcacactcaccttcgaagacttcaccaccatgcagaagcagcaaggaggcagcacaggcacttccccaaccacctccagcactgggacaccatccccttcggct

SEQ ID NO: 101774 - DNA, 120 bp, Artificial Sequence
  ENSG00000092607_9 (sequence is synthesized)
tcttctcatcttttatctccatcctgttctcctccaacttttcatctggcccccaacactttcaatgtgggctgccgagaaagccagctgtgtaatctaaacctctctgattatccacca

SEQ ID NO: 101775 - DNA, 120 bp, Artificial Sequence
  ENSG00000092607_10 (sequence is synthesized)
tgtgcccgaagcaacatggctgccttgcagagctacccagggctgagtgacagtggctacaacaggcttcagagtggcaccacttcagccactcagccctctgaaaccttcatgcctcag

SEQ ID NO: 101776 - DNA, 120 bp, Artificial Sequence
  ENSG00000092607_11 (sequence is synthesized)
aggactccatccctgatctcaggaataccaactcctccctcgttgcctggcaacagcaagatggaagcctacggtggccagctggggtcctttcccacttcccagtttcagtatgtcatg

SEQ ID NO: 101777 - DNA, 120 bp, Artificial Sequence
  ENSG00000092607_12 (sequence is synthesized)
caggcaggcaatgctgcctccagctcctcatcaccacacatgttcgggggcagccacatgcagcagagctcctacaatgccttctcccttcacaacccttacaacctgtatggatacaat

SEQ ID NO: 101778 - DNA, 120 bp, Artificial Sequence
  ENSG00000092607_13 (sequence is synthesized)
ttccccacttcccctaggctagctgcaagcccggaaaaactgagcgcctctcaaagcactttactctgttcttctccttccaacggggcctttggagagaggcagtacctgccgtcaggg

SEQ ID NO: 101779 - DNA, 120 bp, Artificial Sequence
  ENSG00000092607_14 (sequence is synthesized)
atgcacatgattagcccttcacccaataaccaacaggcaaccaacacttgtgatggccggcagtatggggcagttccaggctcctcctcccagatgtccgtgcacatggtttaaaggcca

SEQ ID NO: 101780 - DNA, 120 bp, Artificial Sequence
  ENSG00000092607_15 (sequence is synthesized)
gtccaaacaccacggagcatttggcaatcaaggccccagagtctccgtggtcagatcctcctctttgggagtccagtgtctttgaaaaacaggaaccgtgtttttttttttttttttttt

SEQ ID NO: 101781 - DNA, 120 bp, Artificial Sequence
  ENSG00000092607_16 (sequence is synthesized)
ctggccgaagacatatacccaagaacaagagatacctttaagccagtgaaggatacttgcgatagaatcatccgcaactcagtggccattcttctgccttcccagaccttagttttataa

SEQ ID NO: 101782 - DNA, 120 bp, Artificial Sequence
  ENSG00000092607_17 (sequence is synthesized)
agcattgtctgttccagagtggcctttgaagagactgaataatcacttcgtcataatgttaagggagatgctagtgtgtggcagccatgaaaagttacacatacacacccacatacagac

SEQ ID NO: 101783 - DNA, 120 bp, Artificial Sequence
  ENSG00000092607_18 (sequence is synthesized)
agacctacctatacatacgtgcacacacacatacatattcatacacaattcatacacatgcaatcatacatgcacactgactctgaactgggtgaactctgtggagggaggcccagaatg

SEQ ID NO: 101784 - DNA, 120 bp, Artificial Sequence
  ENSG00000092607_19 (sequence is synthesized)
ggtgctttcaccaagaatttgtctgtgtacaactctagatggagtgggccagcagtagctgccagtctttctcccctgcagcttcctctgcttctggaatgaaccatgtatcctggagac

SEQ ID NO: 101785 - DNA, 120 bp, Artificial Sequence
  ENSG00000092607_20 (sequence is synthesized)
cctcccaatggatgagagtggaaagacatcagtacaactggacttggcttccggaaaaagattgcttttgaactttggctctcttcacttgtatgctatcattgatattcccagtggtgc

SEQ ID NO: 101786 - DNA, 120 bp, Artificial Sequence
  ENSG00000092607_21 (sequence is synthesized)
ccgtggaaagagggagaaagagaagctgaacaggagaaagacaaacagaaagaatagagaacaggaacgaggtggagagcaagactgacagagaaagtgtgagcaatgatgagaatttta

SEQ ID NO: 101787 - DNA, 120 bp, Artificial Sequence
  ENSG00000092607_22 (sequence is synthesized)
attcaccaaggagacgtgtttttggtttgtccccccaaaccccgcccgccccactacaggttatggaaagaatcatggcattactgaggagtaaacctctctggcacactgagcatggtc

SEQ ID NO: 101788 - DNA, 120 bp, Artificial Sequence
  ENSG00000092607_23 (sequence is synthesized)
agggcattggtcagagggacagagcaaggaatgcatcctgagcccacagctttgaccactgtgatccagaagagaggtgcactacgtgggaagtgctgattccacagcatgcagcctggt

SEQ ID NO: 101789 - DNA, 120 bp, Artificial Sequence
  ENSG00000092607_24 (sequence is synthesized)
aggggaaggaaaataaaagggtgtgaagaaggaatagttttataatctcggaagatgataccaagagcagaggcaacaaatagaggcctggcctccaggtgccggatccagacacctgac

SEQ ID NO: 101790 - DNA, 120 bp, Artificial Sequence
  ENSG00000092607_25 (sequence is synthesized)
ctagaatgcctgcccgctatccctgtggcaggaaatatcccctcatgtcccagggaattgcagatgggtcttctatacccttctacctgcccttagatctccatttttatcaaatagtac

SEQ ID NO: 101791 - DNA, 120 bp, Artificial Sequence
  ENSG00000092607_26 (sequence is synthesized)
attgcattttgaagttttgggttttgtccttcatctttccctttcccttcaaatcttttaatggtaagaaagcaagtgaagcttggtgcaagctaaaatttttaaatggtgtggaaatgc

SEQ ID NO: 101792 - DNA, 120 bp, Artificial Sequence
  ENSG00000092607_27 (sequence is synthesized)
aaataataccaagtaaaataatacagatattattaaagtttctggttttgaggtgttgtagataaatgtatttatgtgcctagtggggaatccaatattatgaatatgaaaaagggggca

SEQ ID NO: 101793 - DNA, 120 bp, Artificial Sequence
  ENSG00000092607_28 (sequence is synthesized)
ataaaagggtatgtaaaatatgtatgaagaaaaggtgtacaaaaatttgcccttatgcacggaactctgtttctaagtgccaagcacagaaagccgctaaataaaatctttgcaattgtt

SEQ ID NO: 101794 - DNA, 120 bp, Artificial Sequence
  ENSG00000092607_29 (sequence is synthesized)
ccccctccctctccctcacccctcggacaggagcgcaccgcctgccccctgttcctcgggaagggaggaatttagcggaaaaaaaagtttcccagaagtttggatcacagggaggacggg

SEQ ID NO: 101795 - DNA, 120 bp, Artificial Sequence
  ENSG00000092607_30 (sequence is synthesized)
aaggcagagaggaagagagagagagggggaggagagaaaaagagagggaggggagagagagagagagagagagaggagagagaataataataataacaaaaacaagatgaagttcagtgg

SEQ ID NO: 101796 - DNA, 120 bp, Artificial Sequence
  ENSG00000092607_31 (sequence is synthesized)
acacagtctgtgagcgcctgccccggtgggtgggaagcaggactcgggcgctcatgcagcgagcgggcggcgctcggggcgctagttcctagcagctgggccagcgtaggggcgcaggtc

SEQ ID NO: 101797 - DNA, 120 bp, Artificial Sequence
  ENSG00000092607_32 (sequence is synthesized)
ggatccggcagaggagggcggaggaggacgcagggggagggtggagagacccgcgagccgcagtctcagcctcgtccgacgcgcctccgcctctcccgggccgggcccggtgggcgctca

SEQ ID NO: 101798 - DNA, 120 bp, Artificial Sequence
  ENSG00000092607_33 (sequence is synthesized)
gagcttgagggcgccggctgctccctcggtagcgggggcaagcggaggcaggggtgtgggcggctaaaatgagtgaaaggagaagatctgcagtcgccctgagctcgcgagcacatgcct

SEQ ID NO: 101799 - DNA, 120 bp, Artificial Sequence
  ENSG00000092607_34 (sequence is synthesized)
tctccgttgaagccttgatcggctcaaataaaaaacggaaactgcgagactgggaggagaaggggctggacctgtctatggaggcgctgagccccgcgggcccactcggagacacggagg

SEQ ID NO: 101800 - DNA, 120 bp, Artificial Sequence
  ENSG00000092607_35 (sequence is synthesized)
gggagaaacagaactggacttgaagccatcatggagacatatgcattctggagacctcctgtgcgcacactcaccttcgaagacttcaccaccatgcagaagcagcaagcctcaaagaag

SEQ ID NO: 101801 - DNA, 120 bp, Artificial Sequence
  ENSG00000092607_36 (sequence is synthesized)
acttctcaaggatacacagtgaatcagcactcctcagagacagatgccattgaattatacgagagaagagtctggctcatggaacgaagaggcagcacaggcacttccccaaccacctcc

SEQ ID NO: 101802 - DNA, 120 bp, Artificial Sequence
  ENSG00000092621_0 (sequence is synthesized)
gtgctttttatatgctcaccaggtgtaggtaagagctttggctgagatggagaaattcatcgcgggaggataataaagcgggcagggatttggcaacctcagagccgcgaggaggaggcg

SEQ ID NO: 101803 - DNA, 120 bp, Artificial Sequence
  ENSG00000092621_1 (sequence is synthesized)
gagtcgcggagagtttgagtatttccgtccaatcaaaaggagactgtaagaggaggaggaggaggagatgactggggagcgggagctggagaatactgcccagttactctagcgcgccag

SEQ ID NO: 101804 - DNA, 120 bp, Artificial Sequence
  ENSG00000092621_2 (sequence is synthesized)
gccgaaccgcagcttcttggcttaggtacttctactcacagcggccgattccgaggccaactccagcaatggcttttgcaaatctgcggaaagtgctcatcagtgacagcctggaccctt

SEQ ID NO: 101805 - DNA, 120 bp, Artificial Sequence
  ENSG00000092621_3 (sequence is synthesized)
gctgccggaagatcttgcaagatggagggctgcaggtggtggaaaagcagaaccttagcaaagaggagctgatagcggagctgcaggactgtgaaggccttattgttcgctctgccacca

SEQ ID NO: 101806 - DNA, 120 bp, Artificial Sequence
  ENSG00000092621_4 (sequence is synthesized)
aggtgaccgctgatgtcatcaacgcagctgagaaactccaggtggtgggcagggctggcacaggtgtggacaatgtggatctggaggccgcaacaaggaagggcatcttggttatgaaca

SEQ ID NO: 101807 - DNA, 120 bp, Artificial Sequence
  ENSG00000092621_5 (sequence is synthesized)
cccccaatgggaacagcctcagtgccgcagaactcacttgtggaatgatcatgtgcctggccaggcagattccccaggcgacggcttcgatgaaggacggcaaatgggagcggaagaagt

SEQ ID NO: 101808 - DNA, 120 bp, Artificial Sequence
  ENSG00000092621_6 (sequence is synthesized)
tcatgggaacagagctgaatggaaagaccctgggaattcttggcctgggcaggattgggagagaggtagctacccggatgcagtcctttgggatgaagactatagggtatgaccccatca

SEQ ID NO: 101809 - DNA, 120 bp, Artificial Sequence
  ENSG00000092621_7 (sequence is synthesized)
tttccccagaggtctcggcctcctttggtgttcagcagctgcccctggaggagatctggcctctctgtgatttcatcactgtgcacactcctctcctgccctccacgacaggcttgctga

SEQ ID NO: 101810 - DNA, 120 bp, Artificial Sequence
  ENSG00000092621_8 (sequence is synthesized)
ggagggatcgtggacgaaggcgccctgctccgggccctgcagtctggccagtgtgccggggctgcactggacgtgtttacggaagagccgccacgggaccgggccttggtggaccatgag

SEQ ID NO: 101811 - DNA, 120 bp, Artificial Sequence
  ENSG00000092621_9 (sequence is synthesized)
aatgtcatcagctgtccccacctgggtgccagcaccaaggaggctcagagccgctgtggggaggaaattgctgttcagttcgtggacatggtgaaggggaaatctctcacgggggttgtg

SEQ ID NO: 101812 - DNA, 120 bp, Artificial Sequence
  ENSG00000092621_10 (sequence is synthesized)
aatgcccaggcccttaccagtgccttctctccacacaccaagccttggattggtctggcagaagctctggggacactgatgcgagcctgggctgggtcccccaaagggaccatccaggtg

SEQ ID NO: 101813 - DNA, 120 bp, Artificial Sequence
  ENSG00000092621_11 (sequence is synthesized)
ataacacagggaacatccctgaagaatgctgggaactgcctaagccccgcagtcattgtcggcctcctgaaagaggcttccaagcaggcggatgtgaacttggtgaacgctaagctgctg

SEQ ID NO: 101814 - DNA, 120 bp, Artificial Sequence
  ENSG00000092621_12 (sequence is synthesized)
gtgaaagaggctggcctcaatgtcaccacctcccacagccctgctgcaccaggggagcaaggcttcggggaatgcctcctggccgtggccctggcaggcgccccttaccaggctgtgggc

SEQ ID NO: 101815 - DNA, 120 bp, Artificial Sequence
  ENSG00000092621_13 (sequence is synthesized)
ttggtccaaggcactacgcctgtactgcaggggctcaatggagctgtcttcaggccagaagtgcctctccgcagggacctgcccctgctcctattccggactcagacctctgaccctgca

SEQ ID NO: 101816 - DNA, 120 bp, Artificial Sequence
  ENSG00000092621_14 (sequence is synthesized)
atgctgcctaccatgattggcctcctggcagaggcaggcgtgcggctgctgtcctaccagacttcactggtgtcagatggggagacctggcacgtcatgggcatctcctccttgctgccc

SEQ ID NO: 101817 - DNA, 120 bp, Artificial Sequence
  ENSG00000092621_15 (sequence is synthesized)
agcctggaagcgtggaagcagcatgtgactgaagccttccagttccacttctaaccttggagctcactggtccctgcctctggggcttttctgaagaaacccacccactgtgatcaatag

SEQ ID NO: 101818 - DNA, 120 bp, Artificial Sequence
  ENSG00000092621_16 (sequence is synthesized)
ggagagaaaatccacattcttgggctgaacgcgggcctctgacactgcttacactgcactctgaccctgtagtacagcaataaccgtctaataaagagcctacccccaactccttctgca

SEQ ID NO: 101819 - DNA, 120 bp, Artificial Sequence
  ENSG00000092621_17 (sequence is synthesized)
ccgggacaggaggaaaggcgctcgctgcttctctaagcgctgtggggaagggagcggccggcgggtcttgccccacgccccgccccgcggcgctcaaggagcccgctgtcccggagcacg

SEQ ID NO: 101820 - DNA, 120 bp, Artificial Sequence
  ENSG00000092621_18 (sequence is synthesized)
cgagatcccagcgctgcactccgagctcgcggcaccggttgcgggcagccggtgggacgctgccgctgagctgtcccatggttcgggagggctctgcgagacggggtttcaccatgttgg

SEQ ID NO: 101821 - DNA, 120 bp, Artificial Sequence
  ENSG00000092621_19 (sequence is synthesized)
accctcctcggcctcccaaagtgctggaatcacaggcgtgagccaccgtgcccaaccagtgaggccacgtttcgaaaagaagaaagaaacgacaaactaaaatacatgactgtgtagatg

SEQ ID NO: 101822 - DNA, 120 bp, Artificial Sequence
  ENSG00000092621_20 (sequence is synthesized)
gaggccacgtttcgaaaagaagaaagaaacgacaaactaaaatacatgactgtgtagatgaggaaggacatgaaatgaaacaggaaaaagacgggtctcactctgttgcccaggctggag

SEQ ID NO: 101823 - DNA, 120 bp, Artificial Sequence
  ENSG00000092621_21 (sequence is synthesized)
aattgttctggcagcctcgcgccgcctctcccccaacccccaaccgcctccgcgcggggcgatcgggagaggggccccaaagtggcttctttgcggggaacccagggactggcgattctt

SEQ ID NO: 101824 - DNA, 120 bp, Artificial Sequence
  ENSG00000092621_22 (sequence is synthesized)
cccaaccaagcctgctgggcctggtggccttgtccggaatatttattttgtgaactcttcactccagtgcctgcactttcgacctctgtagtcgacccagctgcccagtctctacctcac

SEQ ID NO: 101825 - DNA, 120 bp, Artificial Sequence
  ENSG00000092621_23 (sequence is synthesized)
gggaccaagaaattacttttcccatggcgagacctgctttccctcctgctggaggaggatctgggggaatttacctctgctctaactcctccctgcagtttccatctgagctctctggta

SEQ ID NO: 101826 - DNA, 120 bp, Artificial Sequence
  ENSG00000092621_24 (sequence is synthesized)
ttcactgatattcactggaccagctttgtttaaaggaatcggtgaaatgctgtggtttaaaagaagctccccattgtcaactgctcaccatgacctcactcatcaaaggcagattcccca

SEQ ID NO: 101827 - DNA, 120 bp, Artificial Sequence
  ENSG00000092621_25 (sequence is synthesized)
attctatgctgcagcctaagcatcattcctcttctcttcttagtggagataaaattacccactgctctccttacatttactttgtccatatttgctcctatgctctaggctcgtgcacaa

SEQ ID NO: 101828 - DNA, 120 bp, Artificial Sequence
  ENSG00000092621_26 (sequence is synthesized)
caaacacagtgtgggcccttaccctagaagccaacttctcatgacctttctctatctccagaatccatgcagtgggaatgaaggtaaaagaaggttttcatgggatccagctgagagctc

SEQ ID NO: 101829 - DNA, 120 bp, Artificial Sequence
  ENSG00000092621_27 (sequence is synthesized)
tacggggaaaatggatctgaggagccatgtgctccatctcttttattttacaggtagagactaggggtatagagtgaggtgaattaccgcagtgacccacacattgttggcagacctagg

SEQ ID NO: 101830 - DNA, 120 bp, Artificial Sequence
  ENSG00000092621_28 (sequence is synthesized)
attagaactctgtcttcctggttcccagcttggtgcttttgaaagcatacttgctgctttcttaccggcctggtgtctgccactttgggacagagtgtggacttgctcacctgccccatt

SEQ ID NO: 101831 - DNA, 120 bp, Artificial Sequence
  ENSG00000092621_29 (sequence is synthesized)
tcttagggattctcattctgtgtttgagcaagaatattcttattctggaaagaaccacataccacaggattctgggtgagcataaggaagattgtcttggggatctgacttagctcacgt

SEQ ID NO: 101832 - DNA, 120 bp, Artificial Sequence
  ENSG00000092621_30 (sequence is synthesized)
atagtggctatgatgaattcagtgtcttattttttgcatatgtatatttttagtctaatattgcctgggtgtctgagcaagtctagatgaatttaattgctctcatttttcccctgcccc

SEQ ID NO: 101833 - DNA, 120 bp, Artificial Sequence
  ENSG00000092621_31 (sequence is synthesized)
tcttcctttggtctctcttttaggaaatgtttttctttcaacattcgtttcattcattatttactcattcggccaaccaacatttattgagtgccttccctgtatcagggacaggggctt

SEQ ID NO: 101834 - DNA, 120 bp, Artificial Sequence
  ENSG00000092621_32 (sequence is synthesized)
acaaagtagaatttgatcccacctctgccctcagtagctcagtgtctaatggaggtagtgatgttcattaagcgtcgccagatactgtgctaggtgctgtgcctgttctctctcgcttgt

SEQ ID NO: 101835 - DNA, 120 bp, Artificial Sequence
  ENSG00000092621_33 (sequence is synthesized)
tcctcacacacttgagaaggccgaagctgattcatagcttggaaggcaggggccttggatttgaacccaggcctgaccaatggcagaacctatcagatgtgtggacagatgacattgcct

SEQ ID NO: 101836 - DNA, 120 bp, Artificial Sequence
  ENSG00000092621_34 (sequence is synthesized)
ttctttctttggatatatcaaaatcagccagcaggcaggaactcccattttgagcaagcaatgtgcaggaatgatagggtatacagagaggaacaggagatggcccctgacttccagcat

SEQ ID NO: 101837 - DNA, 120 bp, Artificial Sequence
  ENSG00000092621_35 (sequence is synthesized)
gtgtctgatggacatccaggctgcaggcatcatggtgctgtctagagagatgagccaggtgcccagagcccatgggccaatgctgccctttcttgagcatgccaaacaaagcggttggtg

SEQ ID NO: 101838 - DNA, 120 bp, Artificial Sequence
  ENSG00000092621_36 (sequence is synthesized)
tgttagaggcacagtctcctccactctaagtaaaaatcagcatgagtcctagcccacatttccctagtgagtataccaaagatatctatgaactggcagtcatcagtgacttcctaaggt

SEQ ID NO: 101839 - DNA, 120 bp, Artificial Sequence
  ENSG00000092621_37 (sequence is synthesized)
tccggaaatgcatctcttactcaggagtaagcaatgatgtgcctgcggctttacgagttctcacagaatgactttctggacccaaatgttttttctgcttcaggactgtgaaggccttat

SEQ ID NO: 101840 - DNA, 120 bp, Artificial Sequence
  ENSG00000092621_38 (sequence is synthesized)
agaaatcccaggctttctaagtcagatcttgccaagggtttctctcttctgttttccctttatcccccatcagtgttcctaaacctgaacccccagacccagttcttggggaagtggctg

SEQ ID NO: 101841 - DNA, 120 bp, Artificial Sequence
  ENSG00000092621_39 (sequence is synthesized)
tcatgggcagtgactgtgcaaacctgatgttgcatctccttcctgggctggcgggagtccgaatggaccctctgaacctgtgtctatccttgcaggcagattccccaggcgacggcttcg

SEQ ID NO: 101842 - DNA, 120 bp, Artificial Sequence
  ENSG00000092621_40 (sequence is synthesized)
ctttgttctaggagggtctgaccctctcttggagcccccatctaaataagtgttaaagtcaaggagggagagaacactggcctgctgatctggactcaaaagctggaaatacttggtggg

SEQ ID NO: 101843 - DNA, 120 bp, Artificial Sequence
  ENSG00000092621_41 (sequence is synthesized)
ggtcctttagctctctggtgagtgaatagccctgagtcccagtgaaccaggtgttgatggctcttttgagactttggttcctgtcttcttagtttaaaagaatttaaacaagagacacgg

SEQ ID NO: 101844 - DNA, 120 bp, Artificial Sequence
  ENSG00000092621_42 (sequence is synthesized)
catggagacttcggcagcgacttcaaccagatgaaaagccccacctcattcctgaatgattgaggtgctagactatagggtatgaccccatcatttccccagaggtctcggcctcctttg

SEQ ID NO: 101845 - DNA, 120 bp, Artificial Sequence
  ENSG00000092621_43 (sequence is synthesized)
gggcagtgaacatcagaatttggtgctgtgtagagagagacttgcttcctcacccaaggaatgacaaagagaggggaggatctctggacactggagaagttttaatcgcaaactgcagag

SEQ ID NO: 101846 - DNA, 120 bp, Artificial Sequence
  ENSG00000092621_44 (sequence is synthesized)
cttctacaaaactcagagggactcttcaggagccacatgctctcatcaagcagaaactttttaagaggtagacaacaacccagagtggacacagagctggtgctcttccagtagagtaga

SEQ ID NO: 101847 - DNA, 120 bp, Artificial Sequence
  ENSG00000092621_45 (sequence is synthesized)
ggcagacgcaccttcttttgagctctggctgtgcccctcctcattgtggaagccctgcttccctcagctctcaagcagacaagaacagtcccagcatcattgtgtggtcatgagaattaa

SEQ ID NO: 101848 - DNA, 120 bp, Artificial Sequence
  ENSG00000092621_46 (sequence is synthesized)
ttaagctgatcatggtacttagtatatggtaaatagtacttagtatgtggaacatggtacttagtgtatggtaaattaactggagaattaattaagctgagcatggtagttagtatatgg

SEQ ID NO: 101849 - DNA, 120 bp, Artificial Sequence
  ENSG00000092621_47 (sequence is synthesized)
gtgaactcttcactccagtgcctgcactttcgacctctgtagtcgacccagctgcccagtctctacctcacctgatccagtatattctcccccaccctccaaatcgcacaaccgccttct

SEQ ID NO: 101850 - DNA, 120 bp, Artificial Sequence
  ENSG00000092621_48 (sequence is synthesized)
gcccgcctcagccctgtccaccaccttcagccgtctcctcctccgaggaccccttagaccgcagaggctgctgttgttgctttagttgtgccacaaccacgtggtcctggaaactgcctc

SEQ ID NO: 101851 - DNA, 120 bp, Artificial Sequence
  ENSG00000092621_49 (sequence is synthesized)
cctccccatccctgtcagcactagtcttctcccccacatttccagagcccgttctctgagcggaggcctaggtcccagccttgcatcggcctgtctacctgtgaggggtagctgcagttt

SEQ ID NO: 101852 - DNA, 120 bp, Artificial Sequence
  ENSG00000092621_50 (sequence is synthesized)
cttcaactgcaaaatgaagatactgcctggccccgagtgttgctaatggcactgctttgtgtatgagtgctgtgggaatggaggcagtagaagtgtccccatttcacagccaaagaaaat

SEQ ID NO: 101853 - DNA, 120 bp, Artificial Sequence
  ENSG00000092621_51 (sequence is synthesized)
gacgagctagtgtgtttgactctgcccgacatggctgccaggccatgtttgactctgcctaactcccctcagggctcctcatgccgtagcacccgggttcttgattcacttgcaagctct

SEQ ID NO: 101854 - DNA, 120 bp, Artificial Sequence
  ENSG00000092621_52 (sequence is synthesized)
aggagccctgctgccttgcacggcttcccgttggcgccttcccctctggttccctgtttagatcaaagtctgtttcaaagcctgttgctcagccagtgggagctggcagaagggataggc

SEQ ID NO: 101855 - DNA, 120 bp, Artificial Sequence
  ENSG00000092621_53 (sequence is synthesized)
agtagagctgccatgtcctcacccctctgctcccctccactcctgcatgccagtcatgccactgatgccgtgcaggaggctgtgtcagagcaggaggggccagagtggagtctcctcaca

SEQ ID NO: 101856 - DNA, 120 bp, Artificial Sequence
  ENSG00000092621_54 (sequence is synthesized)
gccctgcctccctgcttttctttcctccctgttttcctccaagccttcgcctgtgcctggcagatctctttgccctccctttaaggagatcattggctgttccaggaagctgatgccgaa

SEQ ID NO: 101857 - DNA, 120 bp, Artificial Sequence
  ENSG00000092621_55 (sequence is synthesized)
gggcacacagcttggcccatttgccctctcccttctggtcctgaattactgagcacattatccaggctggagccctacatcctaccaatgggtgatttggccaagagaggagggtggacg

SEQ ID NO: 101858 - DNA, 120 bp, Artificial Sequence
  ENSG00000092621_56 (sequence is synthesized)
actggagaggctcccgtgaagcccggcctcagcagtcatttcccataccatgattctttctctgtttaaaaaaaaaaaaattcttccaatgatatctttatgaaaacagaaagagaagca

SEQ ID NO: 101859 - DNA, 120 bp, Artificial Sequence
  ENSG00000092621_57 (sequence is synthesized)
tctgtgtttccttctaattacatcttgtagctgcctgtttgatttgcatctttctaagatggttgactttacaagttatctcaataaaagtggccagatgcctaactcagaaccagagca

SEQ ID NO: 101860 - DNA, 120 bp, Artificial Sequence
  ENSG00000092621_58 (sequence is synthesized)
ttttgaaccacaaaatggaattgaaattttggcccagaacaagctggttctgttatcaggcccctgggtggggcagggggcagccagccaggtcctagacataacttttgggggatatgg

SEQ ID NO: 101861 - DNA, 120 bp, Artificial Sequence
  ENSG00000092621_59 (sequence is synthesized)
ggcttgtgtcccctcagtgtcacaacatgcctcacagtggacttcgcatgcgttgatatttgaagcacgatcatcaaaactttgtgataattgatcgtagtgtttagtaacaatgtaaac

SEQ ID NO: 101862 - DNA, 120 bp, Artificial Sequence
  ENSG00000092621_60 (sequence is synthesized)
acttaaaaaaattcaagatagaaaataaaaatgaaggcaagttgggactgccagagaagacccgtcactcctcatccaagttatctgcgactcccatatgttttgtgtcaaagactcacc

SEQ ID NO: 101863 - DNA, 120 bp, Artificial Sequence
  ENSG00000092621_61 (sequence is synthesized)
tttattgtgctgtccaatcccttccccagtgcagaaacaagtctcccatggagggggctggggcagacacagtttgctgaaaggagcaattttgagtggttgtggcattctgtgtccatt

SEQ ID NO: 101864 - DNA, 120 bp, Artificial Sequence
  ENSG00000092621_62 (sequence is synthesized)
tctggctccacagctttcttcatttgtaggaacaagtccttgtcctgttgttagtggctgatggaagttgtcacccaccaggcaccaaggcaggagtgaccctatactgtctttcttgtg

SEQ ID NO: 101865 - DNA, 120 bp, Artificial Sequence
  ENSG00000092621_63 (sequence is synthesized)
gtaaacccctgaaacatggcttggatcattccgtctcccacctcagcccctccggagctgcctggacctcatcattccggagagtctaagtggcctcttctcgtgctcagctgcttacct

SEQ ID NO: 101866 - DNA, 120 bp, Artificial Sequence
  ENSG00000092621_64 (sequence is synthesized)
ttgcaaaggaaaaagaatattttgaaagttaagtgcagagtagacagtacacctcgggagagagagaattcagggtgggctgctcataagagtgaggcagtgttggccgggcgcggtggc

SEQ ID NO: 101867 - DNA, 120 bp, Artificial Sequence
  ENSG00000092621_65 (sequence is synthesized)
agctgtggggagaggtccacctgggtcctgcagaggctggtgttttgttagacacccctacgttggataggggagggtgagccagctagaagtgcttggggtctaggtaagctgggcaca

SEQ ID NO: 101868 - DNA, 120 bp, Artificial Sequence
  ENSG00000092621_66 (sequence is synthesized)
ggggggtgagtgcggagactgaccacacctagggagaaaaaactcacttgagagaaagctgagtccattggaagggcttccaggaggatgcctggtctagggcctgcatggtcaacacac

SEQ ID NO: 101869 - DNA, 120 bp, Artificial Sequence
  ENSG00000092621_67 (sequence is synthesized)
acagcatagtggtttcaaggtttttggaaggcagctatgctcaccactatatcaccaatgccatcagggtgttacacagtttttgaaattgagagtccctgcataatctcaaaatgtttc

SEQ ID NO: 101870 - DNA, 80 bp, Artificial Sequence
  ENSG00000092758_0 (sequence is synthesized)
agactccgctcagccatggccgggccgcgcgcgtgcgccccgctcctgctcctgctcctgctcggggagcttctggcggc

SEQ ID NO: 101871 - DNA, 120 bp, Artificial Sequence
  ENSG00000092758_1 (sequence is synthesized)
cccccagggccgcccgggaagcccggccaggacggcattgacggagaagctggtcctccaggtctgcctgggcccccgggaccaaagggggccccaggaaagccggggaaaccaggagag

SEQ ID NO: 101872 - DNA, 120 bp, Artificial Sequence
  ENSG00000092758_2 (sequence is synthesized)
gctgggctgccgggactgccgggtgtggatggtctgactggacgagatggaccccctggacccaagggtgcccctggggaacggggaagtctgggacccccggggccgcccgggctgggg

SEQ ID NO: 101873 - DNA, 120 bp, Artificial Sequence
  ENSG00000092758_3 (sequence is synthesized)
ggcaaaggcctccctggaccccccggagaggcaggagtgagcggccccccaggtgggatcggcctccgcggccccccgggaccttctggactccccggcctccctggtcccccaggacct

SEQ ID NO: 101874 - DNA, 120 bp, Artificial Sequence
  ENSG00000092758_4 (sequence is synthesized)
cccggaccccctggacacccaggagtcctccctgaaggcgctactgaccttcagtgcccaagtatctgcccgccaggtcccccagggccccctggaatgccagggttcaagggacccact

SEQ ID NO: 101875 - DNA, 120 bp, Artificial Sequence
  ENSG00000092758_5 (sequence is synthesized)
ggctacaaaggcgagcagggggaagtcggcaaggacggcgagaagggtgaccctggcccccctgggcccgccggcctcccgggcagcgtggggctgcagggcccccggggattacgagga

SEQ ID NO: 101876 - DNA, 120 bp, Artificial Sequence
  ENSG00000092758_6 (sequence is synthesized)
ctgccagggccactcgggccccctggggaccggggtcccattgggttccgagggccgcctgggatcccaggagcgcctgggaaagcgggtgaccgaggcgagaggggcccagaagggttc

SEQ ID NO: 101877 - DNA, 120 bp, Artificial Sequence
  ENSG00000092758_7 (sequence is synthesized)
cgcggccccaagggtgacctcggcagacctggtcccaagggaacccccggagtggccgggccaagcggagagccgggcatgccgggcaaggacggccagaatggcgtgccaggactcgat

SEQ ID NO: 101878 - DNA, 120 bp, Artificial Sequence
  ENSG00000092758_8 (sequence is synthesized)
ggccagaagggagaggctggtcgcaacggtgctccgggagagaagggccccaacgggctgccgggcctccctggacgagcggggtccaaaggcgagaagggagaacggggcagagctggg

SEQ ID NO: 101879 - DNA, 120 bp, Artificial Sequence
  ENSG00000092758_9 (sequence is synthesized)
gagctgggtgaggccggcccctctggagagccaggcgtccctggagatgctggcatgcctggggagcgcggtgaggctggccaccggggctcagcgggggccctcggcccacaaggccct

SEQ ID NO: 101880 - DNA, 120 bp, Artificial Sequence
  ENSG00000092758_10 (sequence is synthesized)
accggggtccgggaggtgccgcaggccctaagggagaccagggtattgcaggttccgacggtcttcctggggataaaggagaactgggtcccagcggcctggtcggacccaaaggagagt

SEQ ID NO: 101881 - DNA, 120 bp, Artificial Sequence
  ENSG00000092758_11 (sequence is synthesized)
ctggcagtcgaggggagctgggccccaaaggcacccagggtcccaacggcaccagcggtgttcagggtgtccccgggccccccggtcctctgggcctgcagggcgtcccgggtgttcctg

SEQ ID NO: 101882 - DNA, 120 bp, Artificial Sequence
  ENSG00000092758_12 (sequence is synthesized)
gcatcacggggaagccgggagttccggggaaggaggccagcgagcagcgcatcagggagctgtgtggggggatgatcagcgaacaaattgcacagttagccgcgcacctaaggaagcctt

SEQ ID NO: 101883 - DNA, 120 bp, Artificial Sequence
  ENSG00000092758_13 (sequence is synthesized)
tggcacccgggtccattggtcggcccggtccagctggcccccctgggcccccaggacccccaggctccattggtcaccctggcgctcgaggaccccctggataccgcggtcccactgggg

SEQ ID NO: 101884 - DNA, 120 bp, Artificial Sequence
  ENSG00000092758_14 (sequence is synthesized)
agctgggagaccccgggcccagaggaaaccagggtgacagaggagacaaaggcgcggcaggagcagggctggacgggcctgaaggagaccaggggccccaaggaccccaaggcgtgcccg

SEQ ID NO: 101885 - DNA, 120 bp, Artificial Sequence
  ENSG00000092758_15 (sequence is synthesized)
gcaccagcaaggacggccaggacggtgctcccggcgagcctgggcctcccggagatcctgggcttccaggtgccattggggcccaggggacaccggggatctgcgacacctcagcctgcc

SEQ ID NO: 101886 - DNA, 120 bp, Artificial Sequence
  ENSG00000092758_16 (sequence is synthesized)
aaggagccgtgttaggaggggtcggggagaaatcaggctctcgaagctcataaaattcaacgtgaggaagcaagtgacaaggacgcccgaagcacagtggacggtcatgaaggagcgggg

SEQ ID NO: 101887 - DNA, 120 bp, Artificial Sequence
  ENSG00000092758_17 (sequence is synthesized)
gtgtggcaggcgggtgacgtccaggagagggagcgcccctggctgcccctcggccgccgactggacgcgcgggccttgccagcgagcaccctcatcgggctgtcgcctgacagcatacct

SEQ ID NO: 101888 - DNA, 120 bp, Artificial Sequence
  ENSG00000092758_18 (sequence is synthesized)
caaaaggccctagctaataaacctgtaagcccagcatttgagagaaggtagggtgtgtatatataaaaggttgtgtacaactccacgaggtgaaaaatattcagtaacttgtttacatag

SEQ ID NO: 101889 - DNA, 120 bp, Artificial Sequence
  ENSG00000092758_19 (sequence is synthesized)
catttgtgtaaagactatgatctcatcccaataaaatgatatattaaaccttcagattaatgactggctacagagtaacaaaaaataaagaatttaatgtacagtaaattctctcccata

SEQ ID NO: 101890 - DNA, 120 bp, Artificial Sequence
  ENSG00000092758_20 (sequence is synthesized)
acttatgtggccatgtgagcaaatggacattttttaaagggattcatagcaactcccagacatgtcctcatttcacaatgccgggggaaggtgattagatgagcttttgcatctttgact

SEQ ID NO: 101891 - DNA, 120 bp, Artificial Sequence
  ENSG00000092758_21 (sequence is synthesized)
ctactgtgacggaattatcctgcaattgtgcagaaacacccgcacgaattcacgggtgttacaaacagtgcaaacctaacgggacttcactacccacaaggggaggctggacagagccat

SEQ ID NO: 101892 - DNA, 120 bp, Artificial Sequence
  ENSG00000092758_22 (sequence is synthesized)
ctgcccacctctgggcaaccaggcagccctgcagggcactgcccagatccgagatgtaaaaaagcttgctctggtcaaggctgggcaagacggctccgtgccggctgggaaagagcacgt

SEQ ID NO: 101893 - DNA, 120 bp, Artificial Sequence
  ENSG00000092758_23 (sequence is synthesized)
ctccagcattcatcaccccaaagcagttaaaccattttccatcaatcagaaggaaaacttgcttctggaagacagcaccgtgtagatattttatgctttacgtaacaatacttctgatga

SEQ ID NO: 101894 - DNA, 120 bp, Artificial Sequence
  ENSG00000092758_24 (sequence is synthesized)
aaataggtttgaacaccatgtcccaagtgactgtaacggtcacagcttctacctcgtcaagactttttcctgctggtcttgcagcagctgcagcattagctccttgggggtccgggcaga

SEQ ID NO: 101895 - DNA, 120 bp, Artificial Sequence
  ENSG00000092758_25 (sequence is synthesized)
agcggggcacggcctacccagggccccagctcactggaaggagcctgtgggtctggtctgggccccagccatgctccaccaggtccttggggacctcgtgtgcctgctgtggccacctct

SEQ ID NO: 101896 - DNA, 120 bp, Artificial Sequence
  ENSG00000092758_26 (sequence is synthesized)
gctgggcagacagacccctttttagatgtcaatcccgagaagcctccaggacacggctgcagatgccccgtcattccagggtgatggtcattccagggtgatggccggggctgtggacac

SEQ ID NO: 101897 - DNA, 120 bp, Artificial Sequence
  ENSG00000092758_27 (sequence is synthesized)
caccaccccatgggggatagcgggctgtttattggcctccaggcaggacattccagaggtgggggccatgccagcaacctcagggcctccgagagatggcagggctggcacccgccctgc

SEQ ID NO: 101898 - DNA, 120 bp, Artificial Sequence
  ENSG00000092758_28 (sequence is synthesized)
ctgtgaacgtgagcttggcctttgggcctgtgtctgggagccggtgttcacagaagccctttgtgcagcacagatggagatgtggggaggtgtttaccattcctgggcccagggcaggct

SEQ ID NO: 101899 - DNA, 120 bp, Artificial Sequence
  ENSG00000092758_29 (sequence is synthesized)
caagggctgtgtttggagcgggttaaaaggcagccctggggcctgggcttttggcctcgaccttaagatgaacattacacctacggaggcttgagagcagggactttaaggcatgaagtc

SEQ ID NO: 101900 - DNA, 120 bp, Artificial Sequence
  ENSG00000092758_30 (sequence is synthesized)
gtgttttttccggaaggaagttactttgcggggtgacggtgggaatgcctcaccgaggctgccgcccccatgctgacgaatgtgtggggtgaattccaggggaaggaggccagcgagcag

SEQ ID NO: 101901 - DNA, 120 bp, Artificial Sequence
  ENSG00000092758_31 (sequence is synthesized)
gggtctcaccgaggagagcggcggtcgtcgcaggccccggagccgctcgggacccgggaggaggggacgccgggtcaggcccacgggggcacctgcgctccttaatgagttttctccgtt

SEQ ID NO: 101902 - DNA, 120 bp, Artificial Sequence
  ENSG00000092758_32 (sequence is synthesized)
agccacgtgcaccggctgcagcggggcccatccccgcctgggggtcccgtgcctggggctacacagaaagccttcgtgccactgctttccagccaaagtgagcccctagcactcaccccg

SEQ ID NO: 101903 - DNA, 120 bp, Artificial Sequence
  ENSG00000092758_33 (sequence is synthesized)
ggtggccctgcggggactgctggtgggtaggggtggagggtgtcatgtggtggtcctccacccagaatgccggcactgagggagaagctggtcctccaggtctgcctgggcccccgggac

SEQ ID NO: 101904 - DNA, 120 bp, Artificial Sequence
  ENSG00000092758_34 (sequence is synthesized)
aaggacggcgagaaggccgggggaccaggtctgggatgccctttagcgtggctggagtgatcagatgaggagaccccaggtgcacatcagaggggtccctgcttggccacgaggaggggc

SEQ ID NO: 101905 - DNA, 120 bp, Artificial Sequence
  ENSG00000092820_0 (sequence is synthesized)
ggcgcggcaggaggacgaggcagggcgggcgggcgctctaagggttctgctctgactccaggttgggacagcgtcttcgctgctgctggatagtcgtgttttcggggatcgaggatactc

SEQ ID NO: 101906 - DNA, 120 bp, Artificial Sequence
  ENSG00000092820_1 (sequence is synthesized)
accagaaaccgaaaatgccgaaaccaatcaatgtccgagttaccaccatggatgcagagctggagtttgcaatccagccaaatacaactggaaaacagctttttgatcaggtggtaaaga

SEQ ID NO: 101907 - DNA, 120 bp, Artificial Sequence
  ENSG00000092820_2 (sequence is synthesized)
ctatcggcctccgggaagtgtggtactttggcctccactatgtggataataaaggatttcctacctggctgaagctggataagaaggtgtctgcccaggaggtcaggaaggagaatcccc

SEQ ID NO: 101908 - DNA, 120 bp, Artificial Sequence
  ENSG00000092820_3 (sequence is synthesized)
tccagttcaagttccgggccaagttctaccctgaagatgtggctgaggagctcatccaggacatcacccagaaacttttcttcctccaagtgaaggaaggaatccttagcgatgagatct

SEQ ID NO: 101909 - DNA, 120 bp, Artificial Sequence
  ENSG00000092820_4 (sequence is synthesized)
actgcccccctgagactgccgtgctcttggggtcctacgctgtgcaggccaagtttggggactacaacaaagaagtgcacaagtctgggtacctcagctctgagcggctgatccctcaaa

SEQ ID NO: 101910 - DNA, 120 bp, Artificial Sequence
  ENSG00000092820_5 (sequence is synthesized)
gagtgatggaccagcacaaacttaccagggaccagtgggaggaccggatccaggtgtggcatgcggaacaccgtgggatgctcaaagataatgctatgttggaatacctgaagattgctc

SEQ ID NO: 101911 - DNA, 120 bp, Artificial Sequence
  ENSG00000092820_6 (sequence is synthesized)
aggacctggaaatgtatggaatcaactatttcgagataaaaaacaagaaaggaacagacctttggcttggagttgatgcccttggactgaatatttatgagaaagatgataagttaaccc

SEQ ID NO: 101912 - DNA, 120 bp, Artificial Sequence
  ENSG00000092820_7 (sequence is synthesized)
caaagattggctttccttggagtgaaatcaggaacatctctttcaatgacaaaaagtttgtcattaaacccatcgacaagaaggcacctgactttgtgttttatgccccacgtctgagaa

SEQ ID NO: 101913 - DNA, 120 bp, Artificial Sequence
  ENSG00000092820_8 (sequence is synthesized)
tcaacaagcggatcctgcagctctgcatgggcaaccatgagttgtatatgcgccgcaggaagcctgacaccatcgaggtgcagcagatgaaggcccaggcccgggaggagaagcatcaga

SEQ ID NO: 101914 - DNA, 120 bp, Artificial Sequence
  ENSG00000092820_9 (sequence is synthesized)
agcagctggagcggcaacagctggaaacagagaagaaaaggagagaaaccgtggagagagagaaagagcagatgatgcgcgagaaggaggagttgatgctgcggctgcaggactatgagg

SEQ ID NO: 101915 - DNA, 120 bp, Artificial Sequence
  ENSG00000092820_10 (sequence is synthesized)
agaagacaaagaaggcagagagagagctctcggagcagattcagagggccctgcagctggaggaggagaggaagcgggcacaggaggaggccgagcgcctagaggctgaccgtatggctg

SEQ ID NO: 101916 - DNA, 120 bp, Artificial Sequence
  ENSG00000092820_11 (sequence is synthesized)
cactgcgggctaaggaggagctggagagacaggcggtggatcagataaagagccaggagcagctggctgcggagcttgcagaatacactgccaagattgccctcctggaagaggcgcgga

SEQ ID NO: 101917 - DNA, 120 bp, Artificial Sequence
  ENSG00000092820_12 (sequence is synthesized)
accaaggaggagctgcacctggtgatgacagcacccccgcccccaccaccccccgtgtacgagccggtgagctaccatgtccaggagagcttgcaggatgagggcgcagagcccacgggc

SEQ ID NO: 101918 - DNA, 120 bp, Artificial Sequence
  ENSG00000092820_13 (sequence is synthesized)
tacagcgcggagctgtctagtgagggcatccgggatgaccgcaatgaggagaagcgcatcactgaggcagagaagaacgagcgtgtgcagcggcagctgctgacgctgagcagcgagctg

SEQ ID NO: 101919 - DNA, 120 bp, Artificial Sequence
  ENSG00000092820_14 (sequence is synthesized)
tcccaggcccgagatgagaataagaggacccacaatgacatcatccacaacgagaacatgaggcaaggccgggacaagtacaagacgctgcggcagatccggcagggcaacaccaagcag

SEQ ID NO: 101920 - DNA, 120 bp, Artificial Sequence
  ENSG00000092820_15 (sequence is synthesized)
cgcatcgacgagttcgaggccctgtaacagccaggccaggaccaagggcagaggggtgctcatagcgggcgctgccagccccgccacgcttgtgtctttagtgctccaagtctaggaact

SEQ ID NO: 101921 - DNA, 120 bp, Artificial Sequence
  ENSG00000092820_16 (sequence is synthesized)
ccctcagatcccagttcctttagaaagcagttacccaacagaaacattctgggctgggaaccagggaggcgccctggtttgttttccccagttgtaatagtgccaagcaggcctgattct

SEQ ID NO: 101922 - DNA, 120 bp, Artificial Sequence
  ENSG00000092820_17 (sequence is synthesized)
cgcgattattctcgaatcacctcctgtgttgtgctgggagcaggactgattgaattacggaaaatgcctgtaaagtctgagtaagaaacttcatgctggcctgtgtgatacaagagtcag

SEQ ID NO: 101923 - DNA, 120 bp, Artificial Sequence
  ENSG00000092820_18 (sequence is synthesized)
catcattaaaggaaacgtggcaggacttccatctgtgccatacttgttctgtattcgaaatgagctcaaattgattttttaatttctatgaaggatccatctttgtatatttacatgctt

SEQ ID NO: 101924 - DNA, 120 bp, Artificial Sequence
  ENSG00000092820_19 (sequence is synthesized)
agaggggtgaaaattattttggaaattgagtctgaagcactctcgcacacacagtgattccctcctcccgtcactccacgcagctggcagagagcacagtgatcaccagcgtgagtggtg

SEQ ID NO: 101925 - DNA, 120 bp, Artificial Sequence
  ENSG00000092820_20 (sequence is synthesized)
ttttttttttgcttaacagttttagaatacattgtacttatacaccttattaatgatcagctatatactatttatatacaagtgataatacagatttgtaacattagttttaaaaaggga

SEQ ID NO: 101926 - DNA, 120 bp, Artificial Sequence
  ENSG00000092820_21 (sequence is synthesized)
tacagatttgtaacattagttttaaaaagggaaagttttgttctgtatattttgttaccttttacagaataaaagaattacatatgaaaaaccctctaaaccatggcacttgatgtgatg

SEQ ID NO: 101927 - DNA, 120 bp, Artificial Sequence
  ENSG00000092820_22 (sequence is synthesized)
tggcaggagggcagtggtggagctggacctgcctgctgcagtcacgtgtaaacaggattattattagtgttttatgcatgtaatggactatgcacacttttaattttgtcagattcacac

SEQ ID NO: 101928 - DNA, 120 bp, Artificial Sequence
  ENSG00000092820_23 (sequence is synthesized)
atgccactatgagctttcagactccagctgtgaagagactctgtttgcttgtgtttgtttgtttgcagtctctctctgccatggccttggcaggctgctggaaggcagcttgtggaggcc

SEQ ID NO: 101929 - DNA, 120 bp, Artificial Sequence
  ENSG00000092820_24 (sequence is synthesized)
gttggttccgcccactcattccttctcgtgcactgctttctccttcacagctaagatgccatgtgcaggtggattccatgccgcagacatgaaataaaagctttgcaaaggcacgaagca

SEQ ID NO: 101930 - DNA, 89 bp, Artificial Sequence
  ENSG00000092820_25 (sequence is synthesized)
tcagcttgcagccttcccccatcccttttgggtgagtgggaagagggggaagaacaggtggtaaagactatcggcctccgggaagtgtg

SEQ ID NO: 101931 - DNA, 120 bp, Artificial Sequence
  ENSG00000092841_0 (sequence is synthesized)
gtcaagatgtgtgacttcaccgaagaccagaccgcagagttcaaggaggccttccagctgtttgaccgaacaggtgatggcaagatcctgtacagccagtgtggggatgtgatgagggcc

SEQ ID NO: 101932 - DNA, 120 bp, Artificial Sequence
  ENSG00000092841_1 (sequence is synthesized)
ctgggccagaaccctaccaacgccgaggtgctcaaggtcctggggaaccccaagagtgatgagatgaatgtgaaggtgctggactttgagcactttctgcccatgctgcagacagtggcc

SEQ ID NO: 101933 - DNA, 120 bp, Artificial Sequence
  ENSG00000092841_2 (sequence is synthesized)
aagaacaaggaccagggcacctatgaggattatgtcgaaggacttcgggtgtttgacaaggaaggaaatggcaccgtcatgggtgctgaaatccggcatgttcttgtcacactgggtgag

SEQ ID NO: 101934 - DNA, 120 bp, Artificial Sequence
  ENSG00000092841_3 (sequence is synthesized)
gcagggcatgaggacagcaatggttgtatcaactatgaagcgtttgtgaggcatatcctgtcggggtgacgggcccatggggcgggtacggctcctcccagcctctcctctagttgatct

SEQ ID NO: 101935 - DNA, 120 bp, Artificial Sequence
  ENSG00000092841_4 (sequence is synthesized)
ccccagtgtttcttttttccccaacctgtgctctttatcccctgcccttaccctactaccatctgacttcctcctggcatgtttctgcatggagctgactagggaggggagggattcctc

SEQ ID NO: 101936 - DNA, 120 bp, Artificial Sequence
  ENSG00000092841_5 (sequence is synthesized)
aaagaggaagacaacctgggggtacagtacctccttacctctagaatgggccctgaggttttacttatgcggccctgggtgctggtgtctgggaactctcaccagcctgtataccagtct

SEQ ID NO: 101937 - DNA, 120 bp, Artificial Sequence
  ENSG00000092841_6 (sequence is synthesized)
ctccccccacgaccccccccacctccgagcgggttctgtgcccaggtggcgctggagaaaggaacagcggaccccgcccaagtcattactaatgtagcaatcgtctgcataaacccaggc

SEQ ID NO: 101938 - DNA, 120 bp, Artificial Sequence
  ENSG00000092841_7 (sequence is synthesized)
tgtgaattttgtatctagcctaaagtttccctaggctttcttgtctcagcaactttcccatcttgtctctcttggatgatgtttgccgtcagcattcaccaaataaacttgctctctggg

SEQ ID NO: 101939 - DNA, 120 bp, Artificial Sequence
  ENSG00000092841_8 (sequence is synthesized)
gagatgctggtggcagggcatgaggacagcaatggttgtatcaactatgaagagctcgtccgcatggtgctgaatggctgaggaccttcccagtctccccagagtccgtgcctttccctg

SEQ ID NO: 101940 - DNA, 120 bp, Artificial Sequence
  ENSG00000092841_9 (sequence is synthesized)
tctcagagaaagcagccatatggggcaggtcaagtatagtgtctggggctttccctatccctggacttgggctccaaaaagagccaggaggcaaggtgcagggccctgcccagcccagcc

SEQ ID NO: 101941 - DNA, 120 bp, Artificial Sequence
  ENSG00000092841_10 (sequence is synthesized)
ggcagcttggaggtaccctaacccaaaactctgtcctctcctcccgccagtggctgacagtagctgtaggtgtagtggagaacttttctgcctctgctgtgttcttgctgcttaggtttg

SEQ ID NO: 101942 - DNA, 120 bp, Artificial Sequence
  ENSG00000092841_11 (sequence is synthesized)
ggtgggggactaacagctgctgggaggggagctaggggcatggagaactggtcagactcaaggtggctcctctgcaaactgaccccagggttggttgctgtgggcatgttcccgcttatg

SEQ ID NO: 101943 - DNA, 120 bp, Artificial Sequence
  ENSG00000092841_12 (sequence is synthesized)
tccaggaaagctgctcccatcacaatccccctgcctgacagccacaggggagaagctgggacacgtggagcaggaatgcgggaagcagagttgagctgcgagccaagggttggtccaacc

SEQ ID NO: 101944 - DNA, 120 bp, Artificial Sequence
  ENSG00000092841_13 (sequence is synthesized)
caaggagtccatggatacagcccagggaaggaaggagaacagcccccagtgccctttcttctcctattacctaccacagaaatccccgaaattaggttttccccaccaaatacacatacg

SEQ ID NO: 101945 - DNA, 120 bp, Artificial Sequence
  ENSG00000092841_14 (sequence is synthesized)
ttaggaaagccatagatcccagtaggactaaggctggccatccctgttccattccatatcaggctgtcttctcctacccttccagctccttaaatctggcccccgccctcccaagctccc

SEQ ID NO: 101946 - DNA, 120 bp, Artificial Sequence
  ENSG00000092841_15 (sequence is synthesized)
aataaggccttttgtggggaagcctgtggagtgtttattggagctaaagccaggccattattagcactgcctaagcctgtccgtcacctcagcagggtgaagggccaattataacaaaag

SEQ ID NO: 101947 - DNA, 120 bp, Artificial Sequence
  ENSG00000092841_16 (sequence is synthesized)
taggtaaggggcttgcctcctctctaataagggaaggagtgaaaccactacttctgaagggacagagatacaaaattccatgttgtgggaatgtccttccaagtcttaaacagcttttag

SEQ ID NO: 101948 - DNA, 120 bp, Artificial Sequence
  ENSG00000092841_17 (sequence is synthesized)
ggcaggtgagagcctctgctcctataccagcacatagtctcgacagttgtgctgccgttcgtgttttgtggggaggcgcagtgtctgtaggccgtgtggcttgcagagtgtctttcggcc

SEQ ID NO: 101949 - DNA, 120 bp, Artificial Sequence
  ENSG00000092841_18 (sequence is synthesized)
cagtgccctttcttctcctattacctaccacagaaatccccgaaattaggttttccccaccaaatacacatacgctgacatcaactaagcaagtgacttttaaaaacaaaactgacattc

SEQ ID NO: 101950 - DNA, 120 bp, Artificial Sequence
  ENSG00000092841_19 (sequence is synthesized)
agagggaaaggaatcattggctgagctggggtggcctaaaacagcaacaatgaggaagccgcaggagggattattagtacgaatgaactcgaataagctcagcgtagggtgggggagggg

SEQ ID NO: 101951 - DNA, 120 bp, Artificial Sequence
  ENSG00000092841_20 (sequence is synthesized)
agttggggccttgacttagtcactaaaaaggggcttggggagagatggaatctgcgccctgttctatccccagagctctccctggaatcttaattcccctttcctaaaactcactccccc

SEQ ID NO: 101952 - DNA, 120 bp, Artificial Sequence
  ENSG00000092841_21 (sequence is synthesized)
tcaaaaaatgtaaaaattggttattttttagtgggtagaagggagctccaatgtggctttttaaaatctactttttttttttttttttaatccatagaaaatgcagtagtttggagggag

SEQ ID NO: 101953 - DNA, 120 bp, Artificial Sequence
  ENSG00000092841_22 (sequence is synthesized)
gtgtacccttagaagtggttaatagaaccttgtataaacacctttcaccagcccttcctttagggcagcattcccatcctatcctctctcccagacattataaacatcttttaaacagaa

SEQ ID NO: 101954 - DNA, 120 bp, Artificial Sequence
  ENSG00000092841_23 (sequence is synthesized)
aaaaggtcccggagagctgagcagtcaagatggtggggcccaggtcttgggagacgggcaggattggggacgagaggcaggaagagacgggtggggggcgaggagaaggcaggggtagga

SEQ ID NO: 101955 - DNA, 120 bp, Artificial Sequence
  ENSG00000092841_24 (sequence is synthesized)
ggcaaagggaatctgaggacccgaaaggttggaggtggggttggaaagactggggccctgcggggaagcgagtctgcagcctgaaacaggagtttgtgggtcagagtttgtgggtcagag

SEQ ID NO: 101956 - DNA, 120 bp, Artificial Sequence
  ENSG00000092841_25 (sequence is synthesized)
gggccagaaccctaccaacgccgaggtgctcaaggtcctggggaaccccaagagtgatggtgaggggcctaaagaacaactcctcagtgtggtcatgggcccacagttcttcagctaaga

SEQ ID NO: 101957 - DNA, 120 bp, Artificial Sequence
  ENSG00000092841_26 (sequence is synthesized)
ggagccattactgcaggaaaaggtcccggagagctgagcagtcaagatgtgtgacttcaccgaagaccagaccgcagcatgatcaaagttgaatgggcagcagagctctgaggtagggtt

SEQ ID NO: 101958 - DNA, 120 bp, Artificial Sequence
  ENSG00000092841_27 (sequence is synthesized)
gctttctttccccctgcaggtgagaagatgacagaggaagaagtagagatgctggtggcagggcatgaggacagcaatggttgtatcaactatgaaggtaagaggtgaactgcgctttct

SEQ ID NO: 101959 - DNA, 120 bp, Artificial Sequence
  ENSG00000092841_28 (sequence is synthesized)
ggaaaaggtcccggagagctgagcagtcaagatgtgtgacttcaccgaagaccagaccgcagatctgatcccaagcactgggtgagttttaggtggtgtggagttcaaggaggccttcca

SEQ ID NO: 101960 - DNA, 120 bp, Artificial Sequence
  ENSG00000092841_29 (sequence is synthesized)
gccgagagtcggagccattactgcaggaaaaggtcccggagagctgagcagtcaagatgtgtgacttcaccgaagaccagaccgcagagatgaatgtgaaggtgctggactttgagcact

SEQ ID NO: 101961 - DNA, 120 bp, Artificial Sequence
  ENSG00000092841_30 (sequence is synthesized)
cggagagctgagcagtcaagatgtgtgacttcaccgaagaccagaccgcagagttcaaggaggccttccagctgtttgaccgaacagagatgaatgtgaaggtgctggactttgagcact

SEQ ID NO: 101962 - DNA, 120 bp, Artificial Sequence
  ENSG00000092841_31 (sequence is synthesized)
gagccattactgcaggaaaaggtcccggagagctgagcagtcaagatgtgtgacttcaccgaagaccagaccgcagagttcaaggaggccttccagctgtttgaccgaacagacagtggc

SEQ ID NO: 101963 - DNA, 120 bp, Artificial Sequence
  ENSG00000092841_32 (sequence is synthesized)
gagagtcggagccattactgcaggaaaaggtcccggagagctgagcagtcaagatgtgtgacttcaccgaagaccagaccgcaggtaggttatctctgatccctaccgaggtcaccctta

SEQ ID NO: 101964 - DNA, 120 bp, Artificial Sequence
  ENSG00000092841_33 (sequence is synthesized)
gggagagggacaccctccccccagcacctatcctctaatcttaatctgtcatctctttagcacccccatgagattaccccctggattattttctcttcttctggatcctccattttcttt

SEQ ID NO: 101965 - DNA, 120 bp, Artificial Sequence
  ENSG00000092841_34 (sequence is synthesized)
tctcactttcttcctccctccccttccactctagatctgatcccaagcactgggtgagttttaggtggtgtgggtatgtgaaaaaacttggtcacttaatgcctgctgtgtgtggggtct

SEQ ID NO: 101966 - DNA, 120 bp, Artificial Sequence
  ENSG00000092841_35 (sequence is synthesized)
cgggagggtgtataaagctgcctgctttcctttgtcctttaatcagctacttctgcctcttttctcctcttgtgataactgtccccgccctcccagcttgcagttgtgaagattgtagag

SEQ ID NO: 101967 - DNA, 120 bp, Artificial Sequence
  ENSG00000092841_36 (sequence is synthesized)
cagtgacctgatattctgtgcagatggggacaagacaggggagtttgctaaggatatgactgtagctataccctctggaagttctctttatactggaggggtgcgaagtggcaggttggg

SEQ ID NO: 101968 - DNA, 120 bp, Artificial Sequence
  ENSG00000092841_37 (sequence is synthesized)
atgaccctagtcccaggctgctgctcccacttccttataaggacaggactgagactgggcggtggcgaattcctgccctgagaagtgtagtagcagcagtggagattggcaggcctgccg

SEQ ID NO: 101969 - DNA, 120 bp, Artificial Sequence
  ENSG00000092841_38 (sequence is synthesized)
cagaggggttgtgtaaatggatgttaccaggctgccagaaggggaggaagcctctatatagaacacttgagttgggaggaagagaaatagagccctcttaagtagactttggtgtacagt

SEQ ID NO: 101970 - DNA, 120 bp, Artificial Sequence
  ENSG00000092841_39 (sequence is synthesized)
aagtctggattagcaaatcccatggatttccttgcttttagtggggagtcatctgtcatctctctgttcagttgaggtctctataatcccctgtcctgagaacttgtgttacttctctgg

SEQ ID NO: 101971 - DNA, 80 bp, Artificial Sequence
  ENSG00000092847_0 (sequence is synthesized)
actggcagctggccgggcgctcgcagtgggagctgctgcaggctccgcggcggcggcaacggaggctgcgggggcggcgg

SEQ ID NO: 101972 - DNA, 120 bp, Artificial Sequence
  ENSG00000092847_1 (sequence is synthesized)
gggatcccgagcagcgagagtgtggggtacctaggcccctcacgctggacttcacagtctccgggccgcctgacctccgcacgggtatatgggatggaagcgggaccctcgggagcagct

SEQ ID NO: 101973 - DNA, 120 bp, Artificial Sequence
  ENSG00000092847_2 (sequence is synthesized)
gcgggcgcttacctgccccccctgcagcaggtgttccaggcacctcgccggcctggcattggcactgtggggaaaccaatcaagctcctggccaattactttgaggtggacatccctaag

SEQ ID NO: 101974 - DNA, 120 bp, Artificial Sequence
  ENSG00000092847_3 (sequence is synthesized)
atcgacgtgtaccactacgaggtggacatcaagccggataagtgtccccgtagagtcaaccgggaagtggtggaatacatggtccagcatttcaagcctcagatctttggtgatcgcaag

SEQ ID NO: 101975 - DNA, 120 bp, Artificial Sequence
  ENSG00000092847_4 (sequence is synthesized)
cctgtgtatgatggaaagaagaacatttacactgtcacagcactgcccattggcaacgaacgggtcgactttgaggtgacaatccctggggaagggaaggatcgaatctttaaggtctcc

SEQ ID NO: 101976 - DNA, 120 bp, Artificial Sequence
  ENSG00000092847_5 (sequence is synthesized)
atcaagtggctagccattgtgagctggcgaatgctgcatgaggccctggtcagcggccagatccctgttcccttggagtctgtgcaagccctggatgtggccatgaggcacctggcatcc

SEQ ID NO: 101977 - DNA, 120 bp, Artificial Sequence
  ENSG00000092847_6 (sequence is synthesized)
atgaggtacacccctgtgggccgctccttcttctcaccgcctgagggctactaccacccgctggggggtgggcgcgaggtctggttcggctttcaccagtctgtgcgccctgccatgtgg

SEQ ID NO: 101978 - DNA, 120 bp, Artificial Sequence
  ENSG00000092847_7 (sequence is synthesized)
aagatgatgctcaacattgatgtctcagccactgccttttataaggcacagccagtgattgagttcatgtgtgaggtgctggacatcaggaacatagatgagcagcccaagcccctcacg

SEQ ID NO: 101979 - DNA, 120 bp, Artificial Sequence
  ENSG00000092847_8 (sequence is synthesized)
gactctcagcgcgttcgcttcaccaaggagatcaagggcctgaaggtggaagtcacccactgtggacagatgaagaggaagtaccgcgtgtgtaatgttacccgtcgccctgctagccat

SEQ ID NO: 101980 - DNA, 120 bp, Artificial Sequence
  ENSG00000092847_9 (sequence is synthesized)
cagacattccccttacagctggagagtggacagactgtggagtgcacagtggcacagtatttcaagcagaaatataaccttcagctcaagtatccccatctgccctgcctacaagttggc

SEQ ID NO: 101981 - DNA, 120 bp, Artificial Sequence
  ENSG00000092847_10 (sequence is synthesized)
caggaacaaaagcatacctaccttcccctagaggtctgtaacattgtggctgggcagcgctgtattaaaaagctgaccgacaaccagacctcgaccatgataaaggccacagctagatcc

SEQ ID NO: 101982 - DNA, 120 bp, Artificial Sequence
  ENSG00000092847_11 (sequence is synthesized)
gctccagacagacaggaggagatcagtcgcctgatgaagaatgccagctacaacttagatccctacatccaggaatttgggatcaaagtgaaggatgacatgacggaggtgacagggcga

SEQ ID NO: 101983 - DNA, 120 bp, Artificial Sequence
  ENSG00000092847_12 (sequence is synthesized)
gtgctgccggcgcccatcttgcagtacggcggccggaaccgggccattgccacacccaatcagggtgtctgggacatgcgggggaaacagttctacaatgggattgagatcaaagtctgg

SEQ ID NO: 101984 - DNA, 120 bp, Artificial Sequence
  ENSG00000092847_13 (sequence is synthesized)
gccatcgcctgcttcgcaccccaaaaacagtgtcgagaagaggtgctcaagaacttcacagaccagctgcggaagatttccaaggatgcggggatgcctatccagggtcaaccttgtttc

SEQ ID NO: 101985 - DNA, 120 bp, Artificial Sequence
  ENSG00000092847_14 (sequence is synthesized)
tgcaaatatgcacagggggcagacagcgtggagcctatgttccggcatctcaagaacacctactcagggctgcagctcattattgtcatcctgccagggaagacgccggtgtatgctgag

SEQ ID NO: 101986 - DNA, 120 bp, Artificial Sequence
  ENSG00000092847_15 (sequence is synthesized)
gtgaaacgtgtcggagatacactcttgggaatggctacgcagtgtgtgcaggtgaagaacgtggtcaagacctcacctcagactctgtccaacctctgcctcaagatcaatgtcaaactt

SEQ ID NO: 101987 - DNA, 120 bp, Artificial Sequence
  ENSG00000092847_16 (sequence is synthesized)
ggtggcattaacaacatcctagtcccacaccagcgctctgccgtttttcaacagccagtgatattcctgggagcagatgttacacaccccccagcaggggatgggaaaaaaccttctatc

SEQ ID NO: 101988 - DNA, 120 bp, Artificial Sequence
  ENSG00000092847_17 (sequence is synthesized)
acagcagtggtaggcagtatggatgcccaccccagccgatactgtgctactgtgcgggtacagcgaccacggcaagagatcattgaagacttgtcctacatggtgcgtgagctcctcatc

SEQ ID NO: 101989 - DNA, 120 bp, Artificial Sequence
  ENSG00000092847_18 (sequence is synthesized)
caattctacaagtccacccgtttcaagcctacccgcatcatcttctaccgagatggggtgcctgaaggccagctaccccagatactccactatgagctactggccattcgtgatgcctgc

SEQ ID NO: 101990 - DNA, 120 bp, Artificial Sequence
  ENSG00000092847_19 (sequence is synthesized)
atcaaactggaaaaggactaccagcctgggatcacttatattgtggtgcagaaacgccatcacacccgccttttctgtgctgacaagaatgagcgaattgggaagagtggtaacatccca

SEQ ID NO: 101991 - DNA, 120 bp, Artificial Sequence
  ENSG00000092847_20 (sequence is synthesized)
gctgggaccacagtggacaccaacatcacccacccatttgagtttgacttctatctgtgcagccacgcaggcatccagggcaccagccgaccatcccattactatgttctttgggatgac

SEQ ID NO: 101992 - DNA, 120 bp, Artificial Sequence
  ENSG00000092847_21 (sequence is synthesized)
aaccgtttcacagcagatgagctccagatcctgacgtaccagctgtgccacacttacgtacgatgcacacgctctgtctctatcccagcacctgcctactatgcccgcctggtggctttc

SEQ ID NO: 101993 - DNA, 120 bp, Artificial Sequence
  ENSG00000092847_22 (sequence is synthesized)
cgggcacgataccacctggtggacaaggagcatgacagtggagaggggagccacatatcggggcagagcaatgggcgggacccccaggccctggccaaagccgtgcaggttcaccaggat

SEQ ID NO: 101994 - DNA, 120 bp, Artificial Sequence
  ENSG00000092847_23 (sequence is synthesized)
actctgcgcaccatgtacttcgcttgaaggcagaacgctgttacctcactggatagaagaaagctttccaagccccaggagctgtgccacccaaatccagaggaagcaaggaggagggag

SEQ ID NO: 101995 - DNA, 120 bp, Artificial Sequence
  ENSG00000092847_24 (sequence is synthesized)
gtggggtagggaggagtgtaggatgccttgtttccttctatagaggtggtgtaagagtggggaacagggccagcaagacagaccaccagccagaaatctctgatatcaacctcatgtccc

SEQ ID NO: 101996 - DNA, 120 bp, Artificial Sequence
  ENSG00000092847_25 (sequence is synthesized)
ccacccctcaccccatcttgtcacatctggccctgaccccactggaccaaaaggggcagcactggtgcccaccatacacacaggtgtctcatgtgactcacagtgctaaagactcatgct

SEQ ID NO: 101997 - DNA, 120 bp, Artificial Sequence
  ENSG00000092847_26 (sequence is synthesized)
tgacagcttggtaaggtcaactctgtagccctgcagacaaaagctggttaggtttgggtttgatactttagatgggaaagtgaggggcttgagaaagtgggtgggaggagggaaggattt

SEQ ID NO: 101998 - DNA, 120 bp, Artificial Sequence
  ENSG00000092847_27 (sequence is synthesized)
tttaggagccttaatcagaaaaggactagatttgtttaagaagaaaaatgaaaccagacccagatcaatattttaggatactagatgttttaatgggttcagaatccagtttgtaggaag

SEQ ID NO: 101999 - DNA, 120 bp, Artificial Sequence
  ENSG00000092847_28 (sequence is synthesized)
attttttaatggttttggttgctcctcccccagctgccaccccccaccttacccttattcctctctgtccacattttctgccccaccttacttctcctccctgacagacatccagcccct

SEQ ID NO: 102000 - DNA, 120 bp, Artificial Sequence
  ENSG00000092847_29 (sequence is synthesized)
agtaatacttaaggcactatggcacttagctttgaagtgacacgaccctgtcttccttccgcccgctggtgggtaaccagtgccttccctgtaacggtaatgctgcagaactgcaacctt

SEQ ID NO: 102001 - DNA, 120 bp, Artificial Sequence
  ENSG00000092847_30 (sequence is synthesized)
ttgtacctttctttggggaatggggtgggggtgggagaggaggtagatggggaagaaataccccagacccaacaaacctccagccagaaagccagctattttgcatttgaaggaattgac

SEQ ID NO: 102002 - DNA, 120 bp, Artificial Sequence
  ENSG00000092847_31 (sequence is synthesized)
ttcctcattcattgagctttttaaaagatcacaacctcaagatggttaaaatccattgacatttgcactttcaaacatgacaagtctcggagctgctgagatgacaggcccctggccttt

SEQ ID NO: 102003 - DNA, 120 bp, Artificial Sequence
  ENSG00000092847_32 (sequence is synthesized)
ccacttatgcctccttttctccttattcctcctacctcccgccccgcccaggtctggagttactttcatagcatttttcactcttggcttcttttctcccttgatggtcaagtctcttat

SEQ ID NO: 102004 - DNA, 120 bp, Artificial Sequence
  ENSG00000092847_33 (sequence is synthesized)
gtttcaatatttcttaactggggtgtcttataacaaaaaactcttaggtctaaaatgagaaaaaagagagaaaacaaaatgttatttttataccataacttgagtgtattgccaaaattt

SEQ ID NO: 102005 - DNA, 120 bp, Artificial Sequence
  ENSG00000092847_34 (sequence is synthesized)
ggaaatccttcccatgcctgatgagtttatatcccagaaacattgagccatcagaatgaactgtgtacctgatttgttctctgacctggctaggtagggagggggtggttatcgccccaa

SEQ ID NO: 102006 - DNA, 120 bp, Artificial Sequence
  ENSG00000092847_35 (sequence is synthesized)
gatggggtccaggctccatccttcctctgtgcagataatacctttttcttgctatagcctccctcctctgcactgtcctgcactctttcttgcaagtgcatctttttccttcccctggac

SEQ ID NO: 102007 - DNA, 120 bp, Artificial Sequence
  ENSG00000092847_36 (sequence is synthesized)
tgtcctctgaccctttggctcatcctagattgcagtgtgtcctgtggacaggctggggaattttgctgctccctattgcttctgtttacaaaaatgaatttttcctggtttcccactagg

SEQ ID NO: 102008 - DNA, 120 bp, Artificial Sequence
  ENSG00000092847_37 (sequence is synthesized)
gcatgtgggtgggtggcatggacttttttttttttttttttttgtcttgagacatggggtttggctgtcttgcaggactggagaaggtggtggttctagcttggtctctgttggccttga

SEQ ID NO: 102009 - DNA, 120 bp, Artificial Sequence
  ENSG00000092847_38 (sequence is synthesized)
agcaagcatcccccctgccctttttccttgactgttcatttttttcctgccccactgcttgggatggggagttgcaacttcagtgtggaatttcctctttgaggagcctgggcttggatc

SEQ ID NO: 102010 - DNA, 120 bp, Artificial Sequence
  ENSG00000092847_39 (sequence is synthesized)
tatcctgatctggtgatgaagccatgattactttagacctagcccaggcttggaggccagctggaggaagaagggtctaaatcctggcctgtagagttagaactaccatttcctcccctt

SEQ ID NO: 102011 - DNA, 120 bp, Artificial Sequence
  ENSG00000092847_40 (sequence is synthesized)
agctgcccttgtatgacccggatttgctatgcaaaacaatctatcccaggttctgttctggttggctacattgttcagcaactcacaaaacgtagcacaaacattcattatggagaaagc

SEQ ID NO: 102012 - DNA, 120 bp, Artificial Sequence
  ENSG00000092847_41 (sequence is synthesized)
atcaggactgttgagtaactcctcctttacttttttcctgctggctacagcatggggtgccctataggcacaagcccagctgaagaacagaatggagggctctgggaggaggcagctcac

SEQ ID NO: 102013 - DNA, 120 bp, Artificial Sequence
  ENSG00000092847_42 (sequence is synthesized)
tggagagcctacattccttacacaagtgcctaaagagagtgatgctaacactccatctgccctgtccattgccttcatatacagtctacttcgtgttctgtcaccctttggggaggggag

SEQ ID NO: 102014 - DNA, 120 bp, Artificial Sequence
  ENSG00000092847_43 (sequence is synthesized)
ttctcctgggacagtgggctctgcatgttctccacttggatacattttggggctaggatcagggcactattcctggagggtccagtcattcaccagcatttgcaaatgtccatagggagc

SEQ ID NO: 102015 - DNA, 120 bp, Artificial Sequence
  ENSG00000092847_44 (sequence is synthesized)
aggtggcagcctctactcccagcaacaagtttgtgttctctccttttctctctttgcctcactctctccagttggttttcagctggggcttgaaatgcatttttagccctttgacgtggc

SEQ ID NO: 102016 - DNA, 120 bp, Artificial Sequence
  ENSG00000092847_45 (sequence is synthesized)
ttatgccattcaagaaataaaaagcaagagaatcagctttgggcaatgacaagaaatgagttcttactctgatttttttgtaaaaagataatttttgagacttgaaaaataccccgacct

SEQ ID NO: 102017 - DNA, 120 bp, Artificial Sequence
  ENSG00000092847_46 (sequence is synthesized)
tgagattattcctgtttgaaaggtggtgcatgcagatggagaagtggtgttggcagcaagctttggctcatgtggatttggtttaagtggtgcttcttacccaagcttcaaggaagtgct

SEQ ID NO: 102018 - DNA, 120 bp, Artificial Sequence
  ENSG00000092847_47 (sequence is synthesized)
tgggggacccccagcctcatcctcttagttgggtctcttgttccctttgtaccactgttttgccttccttttcctcttctctctttgcctggcttcctttcccttttcttctattcactc

SEQ ID NO: 102019 - DNA, 120 bp, Artificial Sequence
  ENSG00000092847_48 (sequence is synthesized)
tgcttgcttgctggccggcctgcctgcctgcctgcctgcctgcctgcctgtctgcctatgtgatgatgaaatctctgcatggctgcaatgatcccactgttagctggcagggtcaggctt

SEQ ID NO: 102020 - DNA, 120 bp, Artificial Sequence
  ENSG00000092847_49 (sequence is synthesized)
agctccttgactgcagaagaccaagaacctgttccccaagcccagagatgtccacctgggctggactgccctcaagcttatactagagaagagcaactgacctgcccaacttgtgtgaag

SEQ ID NO: 102021 - DNA, 120 bp, Artificial Sequence
  ENSG00000092847_50 (sequence is synthesized)
tcaggagggtttctggcattttccacacctgtccactccttggagctggtttctctcattgctttttctaaatctggttctttttctctttacctggggcctggcttttctgagattgtc

SEQ ID NO: 102022 - DNA, 120 bp, Artificial Sequence
  ENSG00000092847_51 (sequence is synthesized)
ttagggttgagctatttgggtatcctgggtttgagtgttaggggatggacataaaggaaaaagagtgatgagaagagaatggagagaatttgaataaaaggtgggaaaggagagcactgt

SEQ ID NO: 102023 - DNA, 120 bp, Artificial Sequence
  ENSG00000092847_52 (sequence is synthesized)
tctttgattgtttatccagtccaacctgatccattagggatcgaggtgctacactggcctccagggataagcctggggctactgttgctgggaacttaggcttaacataaagccgaagaa

SEQ ID NO: 102024 - DNA, 120 bp, Artificial Sequence
  ENSG00000092847_53 (sequence is synthesized)
ggtacctagaaatttgaaacttccctaaaaagctcctaatgcccacctgctagatagcttctctgtggcctcctatttagctaagcagcagtgtttttggatactttttttttctgtttg

SEQ ID NO: 102025 - DNA, 120 bp, Artificial Sequence
  ENSG00000092847_54 (sequence is synthesized)
tgaataaggccagcactcaagatgggcagccaagggtgcactgactattagctggcccataggatatctgtaaggctggtgggacagttttggacctggaatcatgtgtaactaacaagg

SEQ ID NO: 102026 - DNA, 120 bp, Artificial Sequence
  ENSG00000092847_55 (sequence is synthesized)
ttggacgtttcttccccatcagggtagaaaaatcatctcaaactagccaaaaggcagttttggaaactacattgggggacgttatttttatttatatatggggcctaggccaatccagga

SEQ ID NO: 102027 - DNA, 120 bp, Artificial Sequence
  ENSG00000092847_56 (sequence is synthesized)
tggtagctggaataccttccttcttaaaatctgatcatggcagggatatgcagggcactttttactatttggccttctaagcagattgggaaggaggtattttctggttttcgctttcct

SEQ ID NO: 102028 - DNA, 120 bp, Artificial Sequence
  ENSG00000092847_57 (sequence is synthesized)
agggagagaggctgggttggtgctctcccttactctactcatactgacttagagcctctggctgctgtttgggcatccaagaaagggaggggaaggaatgagctaaaaacaaaacagaat

SEQ ID NO: 102029 - DNA, 120 bp, Artificial Sequence
  ENSG00000092847_58 (sequence is synthesized)
gaggtgggaaagggagattttcttctttacagaggaaaataggaaaccctccaagaattgtgcaagtaaagacatttgttgaatgcactgagtcccttggtgtagtagcaataaggaaaa

SEQ ID NO: 102030 - DNA, 120 bp, Artificial Sequence
  ENSG00000092847_59 (sequence is synthesized)
atgaaattactttcctgtgcacacagtccagcctaattggtatgtgatgttgcacttagcagccatgtggtgggcatgtgtgactactctggttttcactttagtttctaaactttttat

SEQ ID NO: 102031 - DNA, 120 bp, Artificial Sequence
  ENSG00000092847_60 (sequence is synthesized)
ccctctcaagtccagcatggatggggaaatgtctctggatccccacagctgtgtacttgtttgcatttgtttccctttgagatttgtgtttgtgtcctgctttgagctgtaccttgtcca

SEQ ID NO: 102032 - DNA, 120 bp, Artificial Sequence
  ENSG00000092847_61 (sequence is synthesized)
gtccattgtgaaattatcccagcagctgtaatgtacagttccttctgaagcaagcaacatcagcagcagcagcagcagcagcacaattctgtgttttataaagacaacagtggcttctat

SEQ ID NO: 102033 - DNA, 120 bp, Artificial Sequence
  ENSG00000092847_62 (sequence is synthesized)
ttctaaagtgcggtctttctctttttttttcctaccagcaaaacaaacttttgggactgattacatctctaatagattttaggtgagaataatactgtagattgttatgcaggaatactt

SEQ ID NO: 102034 - DNA, 120 bp, Artificial Sequence
  ENSG00000092847_63 (sequence is synthesized)
cacagagccttcatttattcttcattcaacaaacatgcaaagcactgtgccagcagtattgtggggaggggaggcacaattcaaaatgaggaaaatagtgtccgtctcattaagggaatt

SEQ ID NO: 102035 - DNA, 120 bp, Artificial Sequence
  ENSG00000092847_64 (sequence is synthesized)
aagtttggtgggggatatgattagccaaatagtcccctggcataggaggaagataatgagggagtggaataaggctacaacaacgaatatagggaggaagggacagatttgagagacgag

SEQ ID NO: 102036 - DNA, 120 bp, Artificial Sequence
  ENSG00000092847_65 (sequence is synthesized)
gtagaattaataggactcgatggctggtgggaggagaagacaggagtagaggttagctcccaggtttctccttgaccataggagtgtgttgggacattctgccagtcaagatgggggtga

SEQ ID NO: 102037 - DNA, 120 bp, Artificial Sequence
  ENSG00000092847_66 (sequence is synthesized)
cggggagactgtagaaggaaggtggggagtttttgaagaaacagaatgttgtatagactgagttttgaggtgtttgtggggcagtaagggtaaggtgtccagtaaacacaggttggtgct

SEQ ID NO: 102038 - DNA, 120 bp, Artificial Sequence
  ENSG00000092847_67 (sequence is synthesized)
caggtaagactgtaaaactgcatttatagatacaggagtcttatagatggtagttaaagccataggcatgaatgagatagcttagaaaaagagaagagaaactagtatacagccccctaa

SEQ ID NO: 102039 - DNA, 120 bp, Artificial Sequence
  ENSG00000092847_68 (sequence is synthesized)
gaaactcaatttaaaggttcgggggaggaagcagatcttaaggtgacagatcactggtagacagtttgtgggttttttgtttctttgtttagccagtttggtgaggtaggagaagaaatc

SEQ ID NO: 102040 - DNA, 120 bp, Artificial Sequence
  ENSG00000092847_69 (sequence is synthesized)
agagtagaagaaggttcatgaagggagtgattaacaacatgaactgctgcagagagggagttctttttttttctgtgtgttttacctttctactccccatcttttggggatcttgtaact

SEQ ID NO: 102041 - DNA, 120 bp, Artificial Sequence
  ENSG00000092847_70 (sequence is synthesized)
ctatgacttacttacgttattctccagtatttcttgaaaatgagcattggaaaaaccaattctaaaatggctaaaactaggactttcaagttcaccacaactaccaccaattaggagata

SEQ ID NO: 102042 - DNA, 120 bp, Artificial Sequence
  ENSG00000092847_71 (sequence is synthesized)
attgtaaaagaataaacaaaacctaattttgttcctagccaatattataaaccatgttccagcatactagataatagtagcatactatatttatttccataatttgtcttctttagagcc

SEQ ID NO: 102043 - DNA, 120 bp, Artificial Sequence
  ENSG00000092847_72 (sequence is synthesized)
tatgaactcctaggagcagaagctatattctcttcatttttgtcatctcagggtcatggcatataccaacagatcagtatgtgcaaatataattgaaataggctagtagtctgtggttta

SEQ ID NO: 102044 - DNA, 120 bp, Artificial Sequence
  ENSG00000092847_73 (sequence is synthesized)
tgagtatgggctgggtgggcagtggatcaagaagtgataggagtacacaggatgaactcagaattcctgaatcttcaggtaagcagatacttaactacattatcattgtcttttcccact

SEQ ID NO: 102045 - DNA, 120 bp, Artificial Sequence
  ENSG00000092847_74 (sequence is synthesized)
caccccaagttggaggttctatggttttgtactttaagctggtggtataattgtcaagcatgtaaattctggcattcttcctggtactgctagagcattgttatttctatgcatgggggt

SEQ ID NO: 102046 - DNA, 120 bp, Artificial Sequence
  ENSG00000092847_75 (sequence is synthesized)
aagaaggctcagagaaggatcctggcggataccccagtgagaaatcgtcagtggcagccagtgtgtacatacgtggacctagcattcctctggaggccaagtgttgtaaattggcctgtg

SEQ ID NO: 102047 - DNA, 120 bp, Artificial Sequence
  ENSG00000092847_76 (sequence is synthesized)
gctatcatctggcagactcccttgggaaagagccagccagccccatgcttcttttcagcagcaagggttagggaggttggttgaacttgaagagcagattggacatggagcagattttga

SEQ ID NO: 102048 - DNA, 120 bp, Artificial Sequence
  ENSG00000092847_77 (sequence is synthesized)
ccagttgaaataagacataaatttatgactccgagtgaggcagaaataaagaacttagcagggggaataggaggaggatgattatggcaaattttgctataaactttagttttagaaaag

SEQ ID NO: 102049 - DNA, 120 bp, Artificial Sequence
  ENSG00000092847_78 (sequence is synthesized)
attgatattgaaaagccttcaggatttgcctgtggttgctactcaagttaaaaagactgggagcctgcattgtttggtcctggagctcaaggttttcagtgaaggcttgtcctggcacct

SEQ ID NO: 102050 - DNA, 120 bp, Artificial Sequence
  ENSG00000092847_79 (sequence is synthesized)
ctgggcattccttttcattactggttgagcatccttccttctgctctgtcaattggcaaaatatgctggagcacattctggactagcagttgccttggggtagtcaggctgggtatttgt

SEQ ID NO: 102051 - DNA, 120 bp, Artificial Sequence
  ENSG00000092847_80 (sequence is synthesized)
ttggtatctcttggtgtagcagaccccagaatctcatggcaattaggatttggtggctaaacgaaagagttagtgcaaggaaaagcctagttggaatttctgagtctgggccatccttaa

SEQ ID NO: 102052 - DNA, 120 bp, Artificial Sequence
  ENSG00000092847_81 (sequence is synthesized)
gctgctgtctactgcctgaatgggaagtaatgtcgaattggaaaattagctcaccatttttgttctagctttgcagacatttattcctctgatgataggctgagaaatgcctaggccggc

SEQ ID NO: 102053 - DNA, 120 bp, Artificial Sequence
  ENSG00000092847_82 (sequence is synthesized)
ttagaaggcacacagcatgacagaagtactccttcaaagcagctgtgtcaagaaggaagagctggaaaagtggatttgctggggaattagatgcatttagttttccacttacgcacaact

SEQ ID NO: 102054 - DNA, 120 bp, Artificial Sequence
  ENSG00000092847_83 (sequence is synthesized)
gccttctccagtatatcataccaaggttttttaggcctttgtggcttaccctgcaggaacatactgtgtcctgttgttctggactgtagcatcttcaccaccatcctcttggcaatggtt

SEQ ID NO: 102055 - DNA, 120 bp, Artificial Sequence
  ENSG00000092847_84 (sequence is synthesized)
gtttggggtttttttttttttttttttggacaaagtataataatattgagggacctttctagggagcctttggtcctttgtccccattttccaaagggagggaactttcctcttaaaaga

SEQ ID NO: 102056 - DNA, 120 bp, Artificial Sequence
  ENSG00000092847_85 (sequence is synthesized)
aagagacagtgggaacttttagccaggtttttggaaaaggcctgtgggctattaatgagagtgagctgcaaaaggaggaagggtttgtttgggtactttgaagtacttagctaggtgttt

SEQ ID NO: 102057 - DNA, 120 bp, Artificial Sequence
  ENSG00000092847_86 (sequence is synthesized)
tctacagtatcttatataattgcatcttacagcatctttacatgcgaaatagtttatcagttatcttcaattgcatattacaaaattctgattaaatttttcttaaataagaaaactatc

SEQ ID NO: 102058 - DNA, 120 bp, Artificial Sequence
  ENSG00000092847_87 (sequence is synthesized)
atttcatatgacaagaaatcctaatttaatgttactccaaggttggttaattcagtggctcagtgataacaccaaagactcagtttcttgaaatttttttgctctgccatcctccatgtt

SEQ ID NO: 102059 - DNA, 120 bp, Artificial Sequence
  ENSG00000092847_88 (sequence is synthesized)
tatcctcacgccagttcgcctcatggtcccaatatggctactgtaattctgggaaggaaatgctgacagaaccgtgtctggcaaaagagagacagatttttctgtgtccttctaaagcaa

SEQ ID NO: 102060 - DNA, 120 bp, Artificial Sequence
  ENSG00000092847_89 (sequence is synthesized)
ggaagtcttcccctggaagctccaacagatacggcctcatggctttgctagaaatgggtcatctcactcctgtcattggcaaagcaagtaagatcatccatcaggagtggcttagattaa

SEQ ID NO: 102061 - DNA, 120 bp, Artificial Sequence
  ENSG00000092847_90 (sequence is synthesized)
tgaattatcctttgagtcgtgtagactagaaagttcagtcatgtctactagcaagaaaggagataagggctgttggataagcagcatctggtctcaaaggtacttcaacttttacagatg

SEQ ID NO: 102062 - DNA, 120 bp, Artificial Sequence
  ENSG00000092847_91 (sequence is synthesized)
agaaacatgaatcagagtgactttcccaggctcacagcaagtaagagagggccttcagtgttagctgtgtctgtccctaaagcccatgttttatattgtatcttgctagagtataaagta

SEQ ID NO: 102063 - DNA, 120 bp, Artificial Sequence
  ENSG00000092847_92 (sequence is synthesized)
acttactttctaccttgtagaaactgatggtctaggagaagagatttgaactcaggtgcccagttgactctaatcttggcccatgtgagaggattgtactcagttgctctcctcatccag

SEQ ID NO: 102064 - DNA, 120 bp, Artificial Sequence
  ENSG00000092847_93 (sequence is synthesized)
tgatgtttcttgtctaacacaagaagcctaggagtagaaagtcctaagcagagtagaataatagcggcagcagggagggaagtgtgaactgtgtgtccctgagcctgacttactgggcag

SEQ ID NO: 102065 - DNA, 120 bp, Artificial Sequence
  ENSG00000092847_94 (sequence is synthesized)
ggacatgacacttaaagcggcagctggccactctgtctttcctgcatgcactgagtatttggtagctcattagtgaccagtgatattgatcatcttttcatgtgctcacttactatcccc

SEQ ID NO: 102066 - DNA, 80 bp, Artificial Sequence
  ENSG00000092847_95 (sequence is synthesized)
tgatattgatcatcttttcatgtgctcacttactatccccatatctttgttgtttgcatcttttacccattgtatttgtt

SEQ ID NO: 102067 - DNA, 90 bp, Artificial Sequence
  ENSG00000092847_96 (sequence is synthesized)
tgggcttaaaaaaaaaattttttttgtagcagttcggtctcattagtattgcccaggctggcctctcttagcttcaagctatcctcccgc

SEQ ID NO: 102068 - DNA, 80 bp, Artificial Sequence
  ENSG00000092847_97 (sequence is synthesized)
aagccactgggcccagcctcttttacctgtttcaaaattgagttttattgagttgtaagagttctttattcattttaaac

SEQ ID NO: 102069 - DNA, 120 bp, Artificial Sequence
  ENSG00000092847_98 (sequence is synthesized)
agttttattgagttgtaagagttctttattcattttaaacacaagtcctttgttggatatatcttttacatctatttttcccagtctgtggcttgccttttcattttgaagagcaaaagt

SEQ ID NO: 102070 - DNA, 120 bp, Artificial Sequence
  ENSG00000092847_99 (sequence is synthesized)
ttaaaattttgtgaatttattaaagctccgtttgttgcttttttctgttctagtttatacttttgtatcatattttaggaaattttgcactgggtatttgatggctcctgaggaggttca

SEQ ID NO: 102071 - DNA, 120 bp, Artificial Sequence
  ENSG00000092847_100 (sequence is synthesized)
actttcagagcgcactgatttctctgcacctgagattttgtactatttctgtatttctttcttctcagaacaaccagtgtcaccaggtatgagggcagagttttagcttgtttgctgagc

SEQ ID NO: 102072 - DNA, 120 bp, Artificial Sequence
  ENSG00000092847_101 (sequence is synthesized)
cccattcttgaagctcatttatttattcacctatctgtccatcaatccaacaaatatactgaatgctgctatgtgccaggtactggcactgttctaggtactggggcaatgacagttaag

SEQ ID NO: 102073 - DNA, 120 bp, Artificial Sequence
  ENSG00000092847_102 (sequence is synthesized)
ataatacccaatgaccctgctctgtacccttaagagcagactcagttgggaatgagttatccaaatatagggtgtacatgtagtcaggagagagcctcatacagctttgcctttggcaga

SEQ ID NO: 102074 - DNA, 120 bp, Artificial Sequence
  ENSG00000092847_103 (sequence is synthesized)
atccttcaaacctctttgtcttcctacttcttgatattacaaatcatgagcctttcacatgcattgactctaaagaggtgggttcctggatagcagaagtagataggaaggcatcattga

SEQ ID NO: 102075 - DNA, 120 bp, Artificial Sequence
  ENSG00000092847_104 (sequence is synthesized)
catttactgagatggattgaatcagagggtgtaaattctgctccatcaatgttgaaaaagactagcccaccccaaaggtttatcactgtcaccatgtctaatgtctattctggaagaagc

SEQ ID NO: 102076 - DNA, 120 bp, Artificial Sequence
  ENSG00000092847_105 (sequence is synthesized)
tgaagaagtctgcctttgtttagggaaccggttccagaatcagaggggttgaggatataaaagacccttgcacaagagttggtatttaccctgtcagatgctgctaccaagatttggatt

SEQ ID NO: 102077 - DNA, 120 bp, Artificial Sequence
  ENSG00000092847_106 (sequence is synthesized)
gtgtacagtcgaggattaaaaatgacttttaagatgcagtgtttcatctggtgacatttaatttgatattttaaaattggggagggtattttcagccatgggggtagggatgtgaaagaa

SEQ ID NO: 102078 - DNA, 120 bp, Artificial Sequence
  ENSG00000092847_107 (sequence is synthesized)
gaagaaagtaagaattggagtcagatgtggttttgagtcccatacatttattgtttaatattatatggtaagtactttaaaatggtaaatagtaaatacttgtgttattcactaacattt

SEQ ID NO: 102079 - DNA, 120 bp, Artificial Sequence
  ENSG00000092847_108 (sequence is synthesized)
ggggaggattttctctgtgctttatgtatattacctaaccttacaaactgtgtaaggtacatgctgttctctcaatttttcagataagaaaattgaagcccagagagatcaagtgactga

SEQ ID NO: 102080 - DNA, 120 bp, Artificial Sequence
  ENSG00000092847_109 (sequence is synthesized)
tccaaagtcccacagtgaggggaactgaagataggatattctttctccttttcctctttaaaaaattattttgattaaaaaaaaccgtattactgaagcatagggacatggggagaaatt

SEQ ID NO: 102081 - DNA, 120 bp, Artificial Sequence
  ENSG00000092847_110 (sequence is synthesized)
atgaatgattcctcagcctgaataaaatagtatgtttcattaaggcaacaaatatttattaaggacctaatatttgcctgacattcaagtgaggtggggggcacacaagtagtaaataaa

SEQ ID NO: 102082 - DNA, 120 bp, Artificial Sequence
  ENSG00000092847_111 (sequence is synthesized)
taacagactgggcaaagggctaccaaggcaatactgtagtagactaacaggtgccccaccatagatgggtggtccggaaaaggcgtctcagatgtctttcgttgagacgcaaaaaaaagc

SEQ ID NO: 102083 - DNA, 120 bp, Artificial Sequence
  ENSG00000092847_112 (sequence is synthesized)
tgtggggtagggcgtaaggggagggtggagaagagagagagggttcctggccaagggaaccaaaagcagagaagctccaagtcagaaaaaagcagcggttggcccgttgggagaattgga

SEQ ID NO: 102084 - DNA, 120 bp, Artificial Sequence
  ENSG00000092847_113 (sequence is synthesized)
agccaaccagtatagctgtagcacaggcggggcccatttacgccgtgcgttttcaccctggaaaggagtttgggttttcaagtgtgacgaggcgctattaaagagttttaaacatggaaa

SEQ ID NO: 102085 - DNA, 120 bp, Artificial Sequence
  ENSG00000092850_0 (sequence is synthesized)
ggtgccaaacactggagctcagagcggggggcgcggagagcgaagcgggaaaggaggtggtgtctgtgaacaggcctaggggtttctgacccttctggtttctgtgccatggccacgctg

SEQ ID NO: 102086 - DNA, 120 bp, Artificial Sequence
  ENSG00000092850_1 (sequence is synthesized)
agcgtcaagccaagtcggcgcttccagctgcccgactggcacactaacagctacctgctatccaccaatgcccagctgcagcgagatgcttcccatcagatccgccaggaggcccgggtg

SEQ ID NO: 102087 - DNA, 120 bp, Artificial Sequence
  ENSG00000092850_2 (sequence is synthesized)
ctccgcaacgagaccaacaaccagaccatttgggatgaacatgacaacaggactcgactggtggagaggattgatactgtcaaccggtggaaggagatgctggacaagtgtctgacagat

SEQ ID NO: 102088 - DNA, 120 bp, Artificial Sequence
  ENSG00000092850_3 (sequence is synthesized)
ttagatgccgagatcgatgccctgacacagatgaaggagtcagcagagcaaaacctgcaggccaagaacctgcctctggatgtggccattgagtgcctgaccctgcgggaaagccggcga

SEQ ID NO: 102089 - DNA, 120 bp, Artificial Sequence
  ENSG00000092850_4 (sequence is synthesized)
gacattgatgtggtgaaggaccctgtggaggatgagctgcataaagaggtggaggtcatcgaggccaccaagaaggccttgcaacagaaggtcagccaggccttcgagcagctctgcctc

SEQ ID NO: 102090 - DNA, 120 bp, Artificial Sequence
  ENSG00000092850_5 (sequence is synthesized)
ttgcaggaagtccaacagcagctcaactccgaccatcggggcaaaatggagacactagagatcgacagaggctgtctctctctcaacctcagatccccaaacatctcgctgaaggttgac

SEQ ID NO: 102091 - DNA, 120 bp, Artificial Sequence
  ENSG00000092850_6 (sequence is synthesized)
cagtcggttcaacaaggaccgagcggaggctgagatgaaggcagccacagagctgagggaggccactgctctaactattgctgagaccaacaacgagcttgaagcccagagagttgcaac

SEQ ID NO: 102092 - DNA, 120 bp, Artificial Sequence
  ENSG00000092850_7 (sequence is synthesized)
ggaatttgccttcaggaagcggctgcgggagatggagaaagtgtacagtgagctcaagtggcaagagaagaataccttggaggagatcgctgagctgcaggaggacatccggcacctgga

SEQ ID NO: 102093 - DNA, 120 bp, Artificial Sequence
  ENSG00000092850_8 (sequence is synthesized)
ggaggatctgcgcacaaagctcctgagcctgaagctgtcccatacccggctagaggccagaacctaccggcccaacgtggaactctgccgggaccaggcacagtacggcctcaccgacga

SEQ ID NO: 102094 - DNA, 120 bp, Artificial Sequence
  ENSG00000092850_9 (sequence is synthesized)
ggttcaccagctagaggcaaccatcgctgccctgaagcagaagctggcgcaagcacaggacgcactggacgccctgtgcaagcacctggcccggctgcaggctgacattgcctgcaaggc

SEQ ID NO: 102095 - DNA, 120 bp, Artificial Sequence
  ENSG00000092850_10 (sequence is synthesized)
caactccatgctgctggacaccaagtgcatggacacacggcgcaagctgaccgtgcctgctgagaggttcgtgcctgaggtggacaccttcacacgtaccacaaatagcaccctgagtcc

SEQ ID NO: 102096 - DNA, 120 bp, Artificial Sequence
  ENSG00000092850_11 (sequence is synthesized)
actcaaaagctgccagctggagctggcctagccttggaggactgcaggaggagggcagggttgggtgggcaatggaaggagggaggagagaaatgaatggaataaatgcagaggatctca

SEQ ID NO: 102097 - DNA, 120 bp, Artificial Sequence
  ENSG00000092850_12 (sequence is synthesized)
gcgggagggcgtggcggctaccagacggggagggggccgccccgggggccgccccccagctccccagtgccaacaggcacgcgtccctggagacagaacagggctcctgcccttagatcc

SEQ ID NO: 102098 - DNA, 65 bp, Artificial Sequence
  ENSG00000092850_13 (sequence is synthesized)
ccggtggaaggagatgctggacaagtgtctgacagatttagatgccgagatcgatgccctgacac

SEQ ID NO: 102099 - DNA, 120 bp, Artificial Sequence
  ENSG00000092850_14 (sequence is synthesized)
agaggcaaccatcgctgccctgaagcagaagctggcgcaagcacagtaggtctcgggagtgggcggaaggagcagtgagacgctgcccacaaatggggcctcttgctggctgctggctcc

SEQ ID NO: 102100 - DNA, 120 bp, Artificial Sequence
  ENSG00000092853_0 (sequence is synthesized)
aaagcaagaacagcactgctgggctggagacggcgggagccgctgctctccggctgagggaatcagagacagctccgtccctagtggagcgcaggggaggcagaagtcatgacaggcgag

SEQ ID NO: 102101 - DNA, 120 bp, Artificial Sequence
  ENSG00000092853_1 (sequence is synthesized)
gtgggttctgaggttcacctagaaatcaatgacccaaacgtcatttcacaagaggaagcagatagtccttcagatagtggacagggcagctatgaaacaattggacccttgagtgaagga

SEQ ID NO: 102102 - DNA, 120 bp, Artificial Sequence
  ENSG00000092853_2 (sequence is synthesized)
gattcagatgaagagatatttgtaagtaagaagttgaaaaacaggaaggttctacaagacagtgattccgaaacagaggacacaaatgcctctccagagaaaactacctatgacagtgcc

SEQ ID NO: 102103 - DNA, 120 bp, Artificial Sequence
  ENSG00000092853_3 (sequence is synthesized)
gaggaggaaaataaagagaatttatatgctgggaaaaatacaaaaatcaaaaggatttacaaaactgtggcagacagtgatgaaagttacatggaaaagtctttgtatcaggaaaatctt

SEQ ID NO: 102104 - DNA, 120 bp, Artificial Sequence
  ENSG00000092853_4 (sequence is synthesized)
gaagcgcaagtgaaaccttgcttagagctgagtcttcagtctggaaactctacagactttaccactgacagaaagagttccaaaaagcacatacatgataaagaaggaactgcaggaaaa

SEQ ID NO: 102105 - DNA, 120 bp, Artificial Sequence
  ENSG00000092853_5 (sequence is synthesized)
gcaaaagtaaaatcaaaaagaagacttgagaaagaggagagaaaaatggaaaaaattagacagctaaaaaagaaggaaacaaaaaaccaggaagatgatgtagaacagccatttaatgac

SEQ ID NO: 102106 - DNA, 120 bp, Artificial Sequence
  ENSG00000092853_6 (sequence is synthesized)
agtggctgtcttcttgtggataaagacctttttgaaactgggttggaggatgaaaataactctccattggaagatgaagagtcattagaatcaataagagcagctgtaaaaaacaaagta

SEQ ID NO: 102107 - DNA, 120 bp, Artificial Sequence
  ENSG00000092853_7 (sequence is synthesized)
aaaaagcacaagaaaaaagaaccatctttggagagtggggtccattcatttgaggaaggaagtgagttatcaaaaggaaccacgaggaaggaaagaaaggcagccagattaagtaaagaa

SEQ ID NO: 102108 - DNA, 120 bp, Artificial Sequence
  ENSG00000092853_8 (sequence is synthesized)
gcattaaaacaactgcatagtgagactcagcgccttattcgagagtctgcactgaaccttccatatcatatgcctgagaataaaaccattcatgatttcttcaaacgtaaaccccggccc

SEQ ID NO: 102109 - DNA, 120 bp, Artificial Sequence
  ENSG00000092853_9 (sequence is synthesized)
acttgccacggaaatgccatggcactattgaagtcatctaaatatcagtcaagccatcacaaagaaatcatagacactgcaaatactactgaaatgaacagtgatcaccatagtaaaggt

SEQ ID NO: 102110 - DNA, 120 bp, Artificial Sequence
  ENSG00000092853_10 (sequence is synthesized)
tctgagcagacaacaggtgcagaaaatgaagtggaaactaatgcactccctgtagtttcaaaggaaacccagatcattactggatcagatgagtcttgcaggaaggatttggtaaaaaat

SEQ ID NO: 102111 - DNA, 120 bp, Artificial Sequence
  ENSG00000092853_11 (sequence is synthesized)
gaagagctagaaattcaggagaaacagaagcagagtgacattagaccttcacctggggacagctcagtgttgcaacaggaatccaacttcctcgggaacaatcacagtgaggaatgtcag

SEQ ID NO: 102112 - DNA, 120 bp, Artificial Sequence
  ENSG00000092853_12 (sequence is synthesized)
gttggagggcttgtagcatttgaacctcatgccctggagggtgaaggcccccaaaatccagaagaaacagatgagaaagtggaagagcctgagcagcaaaataaatcatcagcagttggg

SEQ ID NO: 102113 - DNA, 120 bp, Artificial Sequence
  ENSG00000092853_13 (sequence is synthesized)
ccacctgaaaaagtgagacggtttactctggatagacttaagcaactgggagtagatgtttccattaaaccacggctaggtgctgatgaagattcctttgtgatacttgaacctgaaacc

SEQ ID NO: 102114 - DNA, 120 bp, Artificial Sequence
  ENSG00000092853_14 (sequence is synthesized)
aacagagaactggaagccttgaagcagcgtttctggaagcatgctaatccagcagccaaacccagggctggtcagacagtgaatgtgaacgtcatagtgaaagacatgggcactgatgga

SEQ ID NO: 102115 - DNA, 120 bp, Artificial Sequence
  ENSG00000092853_15 (sequence is synthesized)
aaggaagagctaaaagcagatgtggtacctgtgactttagcacctaagaagttggatggagcaagccacacaaaaccaggtgaaaagcttcaggtgttaaaagctaaactgcaagaagca

SEQ ID NO: 102116 - DNA, 120 bp, Artificial Sequence
  ENSG00000092853_16 (sequence is synthesized)
atgaaactccgaaggtttgaggagcgccagaagcgccaagcactgtttaaattagataatgaagatgggtttgaggaagaggaggaggaagaggaagaaatgacagatgagtctgaggaa

SEQ ID NO: 102117 - DNA, 120 bp, Artificial Sequence
  ENSG00000092853_17 (sequence is synthesized)
gatggagaagagaaggtagagaaagaagagaaagaggaagaactagaggaagaggaggagaaagaagaggaggaggaagaagaaggaaatcaggagactgcagaattccttcttagtagt

SEQ ID NO: 102118 - DNA, 120 bp, Artificial Sequence
  ENSG00000092853_18 (sequence is synthesized)
gaagaaatagaaacaaaagatgaaaaagaaatggataaagaaaataatgatggcagtagtgaaattggcaaggcagttggcttcctctctgttcccaagtctctctcatcagattctact

SEQ ID NO: 102119 - DNA, 120 bp, Artificial Sequence
  ENSG00000092853_19 (sequence is synthesized)
ttacttctgtttaaggacagctcttccaagatgggttactttcctactgaagaaaaatcagaaacagatgaaaactcaggcaagcagcctagcaaactggatgaggatgattcatgttca

SEQ ID NO: 102120 - DNA, 120 bp, Artificial Sequence
  ENSG00000092853_20 (sequence is synthesized)
ttgctaacaaaggagagcagccacaatagcagctttgagctgattggctccacgattccatcctatcagccttgcaacagacaaacaggccgtgggaccagttttttccctacagcagga

SEQ ID NO: 102121 - DNA, 120 bp, Artificial Sequence
  ENSG00000092853_21 (sequence is synthesized)
ggattcagatctccttcccctgggctatttcgagccagtttggtcagctcagcttctaagagttcagggaaactgtctgagccttcacttcccatagaggattcccaggatctgtataac

SEQ ID NO: 102122 - DNA, 120 bp, Artificial Sequence
  ENSG00000092853_22 (sequence is synthesized)
gcctccccagagcctaagacacttttcctaggagcaggagacttccagttctgtttagaagatgacactcagagccaactgttggatgcagatgggttcttaaatgttagaaaccacagg

SEQ ID NO: 102123 - DNA, 120 bp, Artificial Sequence
  ENSG00000092853_23 (sequence is synthesized)
aatcagtaccaagctttgaagcctcgattgccattggccagtatggatgagaatgccatggatgccaacatggatgagctgttggatttgtgtactggaaagttcacatctcaggctgaa

SEQ ID NO: 102124 - DNA, 120 bp, Artificial Sequence
  ENSG00000092853_24 (sequence is synthesized)
aaacatctacccaggaagagtgacaagaaagagaacatggaggaacttctgaacctttgttcaggaaaattcacttctcaggatgcctccactccagcctcatcagagttaaataaacag

SEQ ID NO: 102125 - DNA, 120 bp, Artificial Sequence
  ENSG00000092853_25 (sequence is synthesized)
gagaaggagagcagcatgggtgatccaatggaagaagcacttgctctttgctcaggctcttttcccacagacaaggaagaggaagacgaggaggaggaatttggagactttcggcttgtt

SEQ ID NO: 102126 - DNA, 120 bp, Artificial Sequence
  ENSG00000092853_26 (sequence is synthesized)
tcaaatgataatgagtttgatagtgatgaggatgaacacagtgactctggtaatgatctggcactggaagaccatgaagatgatgatgaagaagaactcctgaagcgatctgagaagttg

SEQ ID NO: 102127 - DNA, 120 bp, Artificial Sequence
  ENSG00000092853_27 (sequence is synthesized)
aaaaggcaaatgaggttgaggaaatacctggaggatgaggcagaggtgtcaggaagtgatgtgggaagcgaagatgagtatgatggggaagaaattgatgaatatgaagaggacgtaatt

SEQ ID NO: 102128 - DNA, 120 bp, Artificial Sequence
  ENSG00000092853_28 (sequence is synthesized)
gatgaagtacttccttctgatgaggaactgcagagtcaaatcaagaaaatacacatgaaaactatgttggatgatgataagcgacagctacgtttataccaagagaggtaccttgctgat

SEQ ID NO: 102129 - DNA, 120 bp, Artificial Sequence
  ENSG00000092853_29 (sequence is synthesized)
ggggatctgcacagcgatggtcctgggcgaatgaggaagtttcgatggaaaaacatagatgatgcttcccagatggacttgttccacagagactctgatgatgatcagactgaagaacag

SEQ ID NO: 102130 - DNA, 120 bp, Artificial Sequence
  ENSG00000092853_30 (sequence is synthesized)
cttgatgagtcagaagccaggtggaggaaggagcgaattgaacgagagcagtggcttcgggacatggcacagcaggggaaaattacagctgaagaagaagaagaaattggggaggacagt

SEQ ID NO: 102131 - DNA, 120 bp, Artificial Sequence
  ENSG00000092853_31 (sequence is synthesized)
cagtttatgatactggccaagaaagttacagccaaagcactgcagaagaatgccagtcgccctatggttattcaggaatcaaagtctttgctcagaaatccttttgaagccatcagacca

SEQ ID NO: 102132 - DNA, 120 bp, Artificial Sequence
  ENSG00000092853_32 (sequence is synthesized)
ggaagtgctcaacaggtgaagacaggctcactgctaaaccagcccaaagctgtgcttcagaaactggctgctctctctgaccataaccccagtgctcctcgaaattcaagaaactttgtc

SEQ ID NO: 102133 - DNA, 120 bp, Artificial Sequence
  ENSG00000092853_33 (sequence is synthesized)
tttcatacactttctcctgtcaaggctgaggcggcaaaggaatcgtctaagtctcaggtaaagaaaaggggtccatctttcatgacttctccttcacctaagcacctcaaaacagatgat

SEQ ID NO: 102134 - DNA, 120 bp, Artificial Sequence
  ENSG00000092853_34 (sequence is synthesized)
agcacttcaggattgacgcgaagcatcttcaaatatttggagagctaacaccatcaaaggtgccaaaatctacattgagactgctttgagaagtttctagcactgaaagttggaattgac

SEQ ID NO: 102135 - DNA, 120 bp, Artificial Sequence
  ENSG00000092853_35 (sequence is synthesized)
cctgaattggccactgatttcaattctgcagtatttacaacatcaacaactcatggaatacttgggtgaggtttcctttttttttttttttttaagatgggagtctcactctgttgccca

SEQ ID NO: 102136 - DNA, 77 bp, Artificial Sequence
  ENSG00000092853_36 (sequence is synthesized)
acctcggccccacaaagtgctggtcacatgcatgagtcactgcacctggccttgggttaggtttcacttcctccatt

SEQ ID NO: 102137 - DNA, 120 bp, Artificial Sequence
  ENSG00000092853_37 (sequence is synthesized)
cactgcacctggccttgggttaggtttcacttcctccattagacatttgacattttattgtagcagctttctgggttaatatctctttgtgattgatagaagtggttggaagaggaagag

SEQ ID NO: 102138 - DNA, 120 bp, Artificial Sequence
  ENSG00000092853_38 (sequence is synthesized)
tagggaaaagtgtgacattacagattaaacagtgaaaatcagtaccataatgactcctttacacccatgagatacgtaccatgatgaccagggctcggtgaaagaaagatttcttttttt

SEQ ID NO: 102139 - DNA, 60 bp, Artificial Sequence
  ENSG00000092853_39 (sequence is synthesized)
atgatgaccagggctcggtgaaagaaagatttctttttttttttttgagatagtctcact

SEQ ID NO: 102140 - DNA, 120 bp, Artificial Sequence
  ENSG00000092853_40 (sequence is synthesized)
acaggcgtgagccactgtgcccagccaaaagaacgatttcttagatggaggacctaggaaccaacagatgggctgctgtattactcttacccctttcattttcctgtatgcttcttccca

SEQ ID NO: 102141 - DNA, 120 bp, Artificial Sequence
  ENSG00000092853_41 (sequence is synthesized)
ttcctgtatgcttcttcccaaggcagcatcaaattttgaattaatttttgctgcttaataaggacttaaactggtacccaagtcagaaagactctgcctctaattttctggggcttgggg

SEQ ID NO: 102142 - DNA, 120 bp, Artificial Sequence
  ENSG00000092853_42 (sequence is synthesized)
atgaagataaagtgttacacccagtgtttgtccaccacagtctgtggggcagagagacccttcctgggactgaattctcaatttgaagcactgttgttcaaagatctcccttctgggtct

SEQ ID NO: 102143 - DNA, 120 bp, Artificial Sequence
  ENSG00000092853_43 (sequence is synthesized)
gacaagaagaaacataacccttatttattgcattcttctggcttacatacattgccctcactaatcaatggacatttcagcatttcattactaattttgagagaaggccaccatggaatt

SEQ ID NO: 102144 - DNA, 120 bp, Artificial Sequence
  ENSG00000092853_44 (sequence is synthesized)
taataaaaatattattgaagagaattgccatcattctccattttccctgaactaccacaagcttctcagaattttagacaaatgtttttcccctcagaactgagcatcagtgctgctttg

SEQ ID NO: 102145 - DNA, 120 bp, Artificial Sequence
  ENSG00000092853_45 (sequence is synthesized)
gaaaaacattccatgtgaatactgtggtttcagtgtcaggacctgtacttgggcagttggaagagagtgtgccagttttttactgggagatgggaacaccaatttaattgatgcaattag

SEQ ID NO: 102146 - DNA, 65 bp, Artificial Sequence
  ENSG00000092853_46 (sequence is synthesized)
gtcacctaggctggaatagcctcggcctcccaaatagcagggattacaggcacctgccaccactc

SEQ ID NO: 102147 - DNA, 120 bp, Artificial Sequence
  ENSG00000092853_47 (sequence is synthesized)
ctacagttttctaatactcaagatgttgactttgacaatacttatgtttgtatacttgtaatcttataatggggaaaatgtgtataaagatgttttaatatgtatgtagtttttcaataa

SEQ ID NO: 102148 - DNA, 120 bp, Artificial Sequence
  ENSG00000092853_48 (sequence is synthesized)
atcttaatgccttgaagggaagatttgctgtccagcttgaatgctcattcttgggtcagtgcctgtctaaccttgaggagcatttcattttcaggttatctccatcccagggaaaccctc

SEQ ID NO: 102149 - DNA, 120 bp, Artificial Sequence
  ENSG00000092853_49 (sequence is synthesized)
tgggtctaaactgagaagctgctgcaattgtcccctcactggcttctcagtcctagtgaattgatcaagttaacttaccaagtggtttgggttcagctcaggtgaagaggataattgagt

SEQ ID NO: 102150 - DNA, 120 bp, Artificial Sequence
  ENSG00000092853_50 (sequence is synthesized)
ggataattgagtttacataaatggtaccttctattatagctctttgtttaaaaaacttattttttagagacagtctcattctgttgcccaggttagagtgcagtggcacaatcatagctc

SEQ ID NO: 102151 - DNA, 120 bp, Artificial Sequence
  ENSG00000092853_51 (sequence is synthesized)
aactcctgggcttcagcatcctccttcctcaacctttggaatagctgggccacattacaggcatatgccaccatgcccagctaattattttattttagtagagacagggtcttgctgtgt

SEQ ID NO: 102152 - DNA, 120 bp, Artificial Sequence
  ENSG00000092853_52 (sequence is synthesized)
cccaccttggcctcccaaaatgctggggtcacaggctcagccaccatgcccagcctgttacagctttgattggcctttctctttagctaagtttgtatgtacttcattttatccatgggt

SEQ ID NO: 102153 - DNA, 120 bp, Artificial Sequence
  ENSG00000092853_53 (sequence is synthesized)
ctttagctaagtttgtatgtacttcattttatccatgggttcaagatacatgtttttgcctctttctttgaactctctaaacagttcccaaggcaaagtagcccttgctgggcaaaagag

SEQ ID NO: 102154 - DNA, 120 bp, Artificial Sequence
  ENSG00000092853_54 (sequence is synthesized)
aactgagcaggaaggctagatatttcttccctcttgtttccctacatgtcttttgaggagagatagaaaagacaattggaattgacaactgaggataagaaaattcagccaggtccggtg

SEQ ID NO: 102155 - DNA, 81 bp, Artificial Sequence
  ENSG00000092853_55 (sequence is synthesized)
attgacaactgaggataagaaaattcagccaggtccggtggctcacgccagcactttaggagactgaggtgggtgcattgt

SEQ ID NO: 102156 - DNA, 63 bp, Artificial Sequence
  ENSG00000092853_56 (sequence is synthesized)
tcttggatcacctaaggtcaggagttggagaccagactgaccaacaaggtgaaaccccgtctc

SEQ ID NO: 102157 - DNA, 65 bp, Artificial Sequence
  ENSG00000092853_57 (sequence is synthesized)
ctttgggaggctgaggcagctggatcacctaaggtcaggagttggagaccagttggtggtggcag

SEQ ID NO: 102158 - DNA, 83 bp, Artificial Sequence
  ENSG00000092853_58 (sequence is synthesized)
gatcacgccactgctctccagcagaaagaaagaaaatggtttctgattgaggctcctgggagaaagcactctttggagaaaga

SEQ ID NO: 102159 - DNA, 120 bp, Artificial Sequence
  ENSG00000092853_59 (sequence is synthesized)
tgattgaggctcctgggagaaagcactctttggagaaagaaaacttgagtcaaactctgggttacttttccttatgccaggatggctgctataaagtaagctaagccttgatcttggtaa

SEQ ID NO: 102160 - DNA, 120 bp, Artificial Sequence
  ENSG00000092853_60 (sequence is synthesized)
caggattgacatggacagtttcaatctgacccatatgccctttgcccaaagcactgagccagcagcatcagttatgttttaatgaaattgaagccccaggacctgccactatggctctga

SEQ ID NO: 102161 - DNA, 120 bp, Artificial Sequence
  ENSG00000092853_61 (sequence is synthesized)
ggaggactcagcttcactagcttggaaattacatatttggagggatgagagcccatgagtgtgggagatagggtaggctcagtgtcagtgtttttgtttcttccttgttccatacacttg

SEQ ID NO: 102162 - DNA, 120 bp, Artificial Sequence
  ENSG00000092853_62 (sequence is synthesized)
agtagggatacatggtattaacctctttaaacaggtctctaatttcatctcattaattcacagttgcacagccatactagggtctcttccataaaccataagattttattcaccaaagct

SEQ ID NO: 102163 - DNA, 120 bp, Artificial Sequence
  ENSG00000092853_63 (sequence is synthesized)
ctagagacaaggtactcagatctctgtggcatccctcattttctcaactgcttctctacaaacttctcctcactttgagagtttctaatgctcaggctgggagactttttagggggtgtt

SEQ ID NO: 102164 - DNA, 120 bp, Artificial Sequence
  ENSG00000092853_64 (sequence is synthesized)
tttggtttttatctcctagggttatgtctaatcactcttgtggcatcctgtcctgggatttgtgctcctaaggatagaggagagtatttctgggaggagtgttcccatgatactatttga

SEQ ID NO: 102165 - DNA, 120 bp, Artificial Sequence
  ENSG00000092853_65 (sequence is synthesized)
ttatgtcatccttgagatggtattgtatcttctacccttatatcctactcatcgcctggcacacagcttggaatgtagtggtgcctaccacagtttgaataaataacactacacctttca

SEQ ID NO: 102166 - DNA, 120 bp, Artificial Sequence
  ENSG00000092853_66 (sequence is synthesized)
ctcctatccctggattcttcaggctttcatttgacccacatggttaagctgggagagacagagtccaaagagaggcggagaagggctattctgggcagaacaaacaattgatgactttat

SEQ ID NO: 102167 - DNA, 120 bp, Artificial Sequence
  ENSG00000092853_67 (sequence is synthesized)
agaacaaacaattgatgactttatggctctgtggtctgggcagaactgcataaccctagatcaccaaagctgagagcctttaggagtgaggatttgggccaggcatggtggctcacgcct

SEQ ID NO: 102168 - DNA, 120 bp, Artificial Sequence
  ENSG00000092853_68 (sequence is synthesized)
aaaaaaaaaaaaaaagtgaggatttgggtcaccccaggctgaaggccaggggaacctgaagtggataagggaagggagaagacttaggccacaggatctgatgtagaaatggggctgacg

SEQ ID NO: 102169 - DNA, 120 bp, Artificial Sequence
  ENSG00000092853_69 (sequence is synthesized)
tctccacctgtattttcttagctggaggagtgtgcaaagtttgaattacttctgccttctccttcttatttccttttcccttttaaaatagtcatcataatcataaaaatttcttttcca

SEQ ID NO: 102170 - DNA, 120 bp, Artificial Sequence
  ENSG00000092853_70 (sequence is synthesized)
taatgctatcttagtactgtaatttacctttaacttaatgttttggaacatataacttgaggggtttgcctatgaattttatctgacagtttcatcctcaactctttttcctaaacaaat

SEQ ID NO: 102171 - DNA, 120 bp, Artificial Sequence
  ENSG00000092853_71 (sequence is synthesized)
gacagtgtacttagatcttagactattgggcagtagagactgtattcatgagtatatgtggctggttttactttatgttctaaggctcagagtagttaattctggctttctctagttgcc

SEQ ID NO: 102172 - DNA, 120 bp, Artificial Sequence
  ENSG00000092871_0 (sequence is synthesized)
cgacttcctggggccgcccgtgaggatgtcgcgaccgcccccgggtgcccctcagccccagagacgccgccgcggcggagtccgcagcctccctgcctgaggcgtccgcggccgggatcc

SEQ ID NO: 102173 - DNA, 120 bp, Artificial Sequence
  ENSG00000092871_1 (sequence is synthesized)
tccgcagcctccctgcctgaggcgtccgcggccgggatccggcccctcccctcgcctcctctcctaggtgccggccgggagggcggccgcagcagattttatcatgtgggcaacctgctg

SEQ ID NO: 102174 - DNA, 120 bp, Artificial Sequence
  ENSG00000092871_2 (sequence is synthesized)
caactggttctgcctggatggacagcctgaggaggtcccaccaccccagggagccaggatgcaggcctattccaaccctgggtacagctccttcccttccccaacaggcttggaaccaag

SEQ ID NO: 102175 - DNA, 120 bp, Artificial Sequence
  ENSG00000092871_3 (sequence is synthesized)
ctgcaagtcctgtggggctcactttgcaaacacggccaggaagcagacctgcttggactgtaagaaaaatttttgcatgacctgttcgagccaagtagggaatgggccccgcctctgcct

SEQ ID NO: 102176 - DNA, 120 bp, Artificial Sequence
  ENSG00000092871_4 (sequence is synthesized)
tctctgccaacggtttcgagctacagcctttcagcgagaggagctcatgaagatgaaggtgaaggacttgagggactatctcagcctccatgacatctctaccgaaatgtgccgggagaa

SEQ ID NO: 102177 - DNA, 120 bp, Artificial Sequence
  ENSG00000092871_5 (sequence is synthesized)
agaagagctggtgctcttggtccttggccagcagcctgtaatctcccaggaggacaggactcgtgcctccaccttgtccccagactttcctgagcagcaggccttcctgacccagcctca

SEQ ID NO: 102178 - DNA, 120 bp, Artificial Sequence
  ENSG00000092871_6 (sequence is synthesized)
ctccagcatggttccacctacctcacccaacctcccctcttcatctgcacaagccacctctgttcccccagcccaggttcaggagaatcagcaggccaatggccatgtgtctcaggatca

SEQ ID NO: 102179 - DNA, 120 bp, Artificial Sequence
  ENSG00000092871_7 (sequence is synthesized)
agaggaacccgtctacctggagagcgtggccagagtacctgctgaggatgagacccagtctattgactcagaggacagctttgtcccaggccgaagggcctctctgtctgacctgactga

SEQ ID NO: 102180 - DNA, 120 bp, Artificial Sequence
  ENSG00000092871_8 (sequence is synthesized)
cctggaggacattgaaggcctgacagtgcggcagctgaaagagatcttggctcgcaactttgtcaactacaagggctgctgtgagaagtgggagctgatggagagagtgacccggctata

SEQ ID NO: 102181 - DNA, 120 bp, Artificial Sequence
  ENSG00000092871_9 (sequence is synthesized)
caaggatcagaaaggactccagcacctggtcagtggtgccgaagaccaaaacgggggagcagtaccatcaggcttggaggagaacctgtgtaagatctgcatggactcacccattgactg

SEQ ID NO: 102182 - DNA, 120 bp, Artificial Sequence
  ENSG00000092871_10 (sequence is synthesized)
tgttcttctggagtgtggccacatggtaacctgtaccaagtgtggcaagcgcatgaatgaatgtcccatctgccggcagtatgtaatccgagctgtgcatgtcttccggtcctgagagct

SEQ ID NO: 102183 - DNA, 120 bp, Artificial Sequence
  ENSG00000092871_11 (sequence is synthesized)
tgcatcggtttcttcagtgccttacagggaaatagcctggggtgtctgggctcagggttggccagcttgcagaggagcaagctagtagaaatattgcagggttcccaaaaccaggtcaag

SEQ ID NO: 102184 - DNA, 120 bp, Artificial Sequence
  ENSG00000092871_12 (sequence is synthesized)
caagatgccatgtcacccctgagcatgcctgtcttcccaggggtgtacctcttggctggcaaagcccaaggccagtgggaacttgtataaatcacatgggtatgttcttggttcagtgat

SEQ ID NO: 102185 - DNA, 120 bp, Artificial Sequence
  ENSG00000092871_13 (sequence is synthesized)
cttggagtgatgatggtaactgatgaacagagaactttccagaacttgggtcctgtcttcctccctgaacctagacagtttcacccctcctcctgtacccaacccatccccaccccatat

SEQ ID NO: 102186 - DNA, 120 bp, Artificial Sequence
  ENSG00000092871_14 (sequence is synthesized)
gggagatgcttgcccatgtgtttcatcaatcagaagtcctcctccccagcacattcggatttaaatttctggtctctccggctttctgtgctttaactatctttgctaaagtctcttgct

SEQ ID NO: 102187 - DNA, 120 bp, Artificial Sequence
  ENSG00000092871_15 (sequence is synthesized)
acattgcctaaatccatttgtttctttggaccaaaaatgttagtttaccagaccgatagtggtccttaggacagattttagaccagtaaacttatctttggtgagaaatgaaatacaaat

SEQ ID NO: 102188 - DNA, 120 bp, Artificial Sequence
  ENSG00000092871_16 (sequence is synthesized)
gctatagaaaaatttcaaagttgttaaaagccacttcattaaatgctgggattggaagctgttggtctcctgacctgactctgggagccaacaaaacatcaggctcccaaactgctggga

SEQ ID NO: 102189 - DNA, 120 bp, Artificial Sequence
  ENSG00000092871_17 (sequence is synthesized)
aatttgtttctgtctgcaagggatagtgcgtgcataatccctgctgctgcttctcttgggacctgatttgcaccatccttagtttatgcggaaaggggaagcaatgggtggaggcagtgg

SEQ ID NO: 102190 - DNA, 120 bp, Artificial Sequence
  ENSG00000092871_18 (sequence is synthesized)
ccttctccttaattttggcttggcttctgatccttttcccaactagaagtcttaagccacttttcgctgaaaatgaaatccctcccttatccatggtagttttaaatttggtttcattga

SEQ ID NO: 102191 - DNA, 120 bp, Artificial Sequence
  ENSG00000092871_19 (sequence is synthesized)
agaaatagatttaggcaaagagcctgtgctcttctctggccagactgctgttgaagttcctggagagcaaatgttaagacagagcacttaagagctttcaggaggtactgaatgagactg

SEQ ID NO: 102192 - DNA, 120 bp, Artificial Sequence
  ENSG00000092871_20 (sequence is synthesized)
gattctgttgtaagccgacagttcaagtctttatttcccaggttggtggggagtgaggagaccctactttcattccctttcctagcccactgatttttgggggcaggtcagggagaaagc

SEQ ID NO: 102193 - DNA, 120 bp, Artificial Sequence
  ENSG00000092871_21 (sequence is synthesized)
tacaggcgtgagccaccacacccagcaggagaaaccattttctaggctctttaggaaggaccatgcaatgagtaggtgatgtatttgagccctcacagtctttacacccctagaggagct

SEQ ID NO: 102194 - DNA, 120 bp, Artificial Sequence
  ENSG00000092871_22 (sequence is synthesized)
agtctttacacccctagaggagctggaggacttaagagtttgctgcagaagcgtggccaagcacaaaacacatgatcaggaaagcagagtgttttcccattaccaatggatgaactatgc

SEQ ID NO: 102195 - DNA, 120 bp, Artificial Sequence
  ENSG00000092871_23 (sequence is synthesized)
aaaccctaaacgccttggcagacacctcccaccccttacccctcccatgcagctgaaaaatctgagactagaaccaatcatgactctggatggcagagggaaacctctaaagggacttat

SEQ ID NO: 102196 - DNA, 120 bp, Artificial Sequence
  ENSG00000092871_24 (sequence is synthesized)
tacattggtacagacatatttatgctttcttccatcaccaaccactaaacccctttggaggaatgaaataactgcataaactagtcaactgaacactgggccacttacctcaatgttata

SEQ ID NO: 102197 - DNA, 120 bp, Artificial Sequence
  ENSG00000092871_25 (sequence is synthesized)
caaagtcctggatgatttgattctgaaccacagcctttgcaggagttgggggaatcagatttgctcatgaagacatccctttccacttttgtcatgggcagtaaatactatagtttacaa

SEQ ID NO: 102198 - DNA, 120 bp, Artificial Sequence
  ENSG00000092871_26 (sequence is synthesized)
tgcctaccaattagcaaaggatcattcattcagctactcagttcctctgtaaaacaggtctatgtatgtgcaattcagctaagatctagcagtaacttaagggcagaagctggctctcta

SEQ ID NO: 102199 - DNA, 120 bp, Artificial Sequence
  ENSG00000092871_27 (sequence is synthesized)
cttacaacctgctttctctgctgaagccttacctcctcttcagtttccctcctagacacaaatcgaaaataatatactgatagctggttagtaacctcagtaagaattaaaactgaggtt

SEQ ID NO: 102200 - DNA, 120 bp, Artificial Sequence
  ENSG00000092871_28 (sequence is synthesized)
tttgcatcatttttattacaccaaattaaagttgggagttccaagatcccattccagttaatatttaaccaaggtctaaaatttgattttttttaaatctttgaatcctcccttctgccc

SEQ ID NO: 102201 - DNA, 120 bp, Artificial Sequence
  ENSG00000092871_29 (sequence is synthesized)
ctcatggatccttggttttaatgatatggaaacatctaattcttagaattattccgtagcttttgctgattactctgagatttcagttaagacttgtttcaaaagacagatagctgactg

SEQ ID NO: 102202 - DNA, 120 bp, Artificial Sequence
  ENSG00000092871_30 (sequence is synthesized)
gttcataatacattggaatagttggatccaaactaataagaataagctgtacaggaactagtgctcaatatacattgtataaatttgtggaaatctcttggatgtgaattgttacttcaa

SEQ ID NO: 102203 - DNA, 120 bp, Artificial Sequence
  ENSG00000092871_31 (sequence is synthesized)
gtggcttttattaagattttctcagacttacttggaggttaaagcaaacccaaatgtgtattattttgttacagagctctgctttataattttgtaataaagtttcaatacagacacctg

SEQ ID NO: 102204 - DNA, 120 bp, Artificial Sequence
  ENSG00000092871_32 (sequence is synthesized)
tcctgtctggtgcgaggatgttagaggttgataggactgacaaaagagcctgacagtggttcatgctataatttccacactttaggaggccaaggtgggaagactgcttgagctcaggag

SEQ ID NO: 102205 - DNA, 80 bp, Artificial Sequence
  ENSG00000092871_33 (sequence is synthesized)
ggaggccaaggtgggatgtagtgagaccttgtctctacttaaaaaaacaaacaagggccgggtgcggtggctcacgcctg

SEQ ID NO: 102206 - DNA, 86 bp, Artificial Sequence
  ENSG00000092871_34 (sequence is synthesized)
tctccccaaaaaaaccaaaaaattagccgtgcatggtggtgcatgtgggtagtcccaactacttggaaggctgaggtgggaggatc

SEQ ID NO: 102207 - DNA, 120 bp, Artificial Sequence
  ENSG00000092871_35 (sequence is synthesized)
cagtgagctctgatcgccaccgcactccagccagggtgacagagtgagaccctgtattaaaaaaaaaaaaaaattgacaactgataaaccacaagctaatcctgggatgtgcacatggcc

SEQ ID NO: 102208 - DNA, 120 bp, Artificial Sequence
  ENSG00000092871_36 (sequence is synthesized)
tgggattagcctgtggttgggccaagtgaccttggtcaagatgctcagtgttgttgtaactaactaacttgctcaagaccacaaatgtaatatatggaagaggccatggaacaacctaga

SEQ ID NO: 102209 - DNA, 120 bp, Artificial Sequence
  ENSG00000092871_37 (sequence is synthesized)
agagaatgagagctgggtaggtaaaggatgaatcccaagaccaattgggttgaagcaccaagtgagttcagatatttacactgatctagaagagatgggccttaaagaactgaaatctga

SEQ ID NO: 102210 - DNA, 120 bp, Artificial Sequence
  ENSG00000092871_38 (sequence is synthesized)
ggacagttagtatgcccagttaggtcttcaggttaccctgggagatacatggtaccttttggatacagctgtagtacagctggactatggctcagaaaaggttggcccaggctgggcgcc

SEQ ID NO: 102211 - DNA, 90 bp, Artificial Sequence
  ENSG00000092871_39 (sequence is synthesized)
actttgggaggctgaggtgcgtggatgactcgaggccaggagtttgagaccagtctggacaacatggcgaaacgtgcgagtgatggtgtg

SEQ ID NO: 102212 - DNA, 89 bp, Artificial Sequence
  ENSG00000092871_40 (sequence is synthesized)
ctactaaaaatacaaaaacttagctgcgagtgatggtgtgtgcctgtttgttaagtcttagcctgaacccgggaagcagaggttgcagt

SEQ ID NO: 102213 - DNA, 120 bp, Artificial Sequence
  ENSG00000092871_41 (sequence is synthesized)
actgcactccagcctgaatgacagagcaagagtctgtttaaaaaaaaaaaaaaggttggcccagcctcgtgacagactgctgtgtgtgcgcaggcttgtacaaacctccctgaccaggcg

SEQ ID NO: 102214 - DNA, 120 bp, Artificial Sequence
  ENSG00000092871_42 (sequence is synthesized)
cccaaggagcagggaaaagactactgagaatgcagcccctgggagaacaagattatgtgtccatctgctgtgactgagaagagaaaggaatcttgccaaaagggcataaaggatcgagga

SEQ ID NO: 102215 - DNA, 120 bp, Artificial Sequence
  ENSG00000092871_43 (sequence is synthesized)
tgagccacaacactttgctcacattgccctagggagctgacctgttcagcacccagtgatgacctctgcttgatgccagccagcagcatgtagaggttcagaagagggaggcctccagca

SEQ ID NO: 102216 - DNA, 120 bp, Artificial Sequence
  ENSG00000092871_44 (sequence is synthesized)
ttctgctggagagatttatgatgatgatgttgagggctgcattgaaatacatgaaagaaatacatgaaaggatacaaaatagtatatacagtcagatctcagcagcaaagactggaagaa

SEQ ID NO: 102217 - DNA, 120 bp, Artificial Sequence
  ENSG00000092871_45 (sequence is synthesized)
aatacataaaaaaccactgacattgaaatggcaataacacacactaaggcagagaagggacaagatgatcacctgcagccagcagaggccctttcctgtgagtgtgcactctgggtgtaa

SEQ ID NO: 102218 - DNA, 120 bp, Artificial Sequence
  ENSG00000092871_46 (sequence is synthesized)
gcaaccaataagggcaagtggggctgggtccaggttggagaggacagtgcctttggcaggatcctgaggagacagccttgttctgctgccctgtccggttgtttgtttggcctgaggctg

SEQ ID NO: 102219 - DNA, 120 bp, Artificial Sequence
  ENSG00000092871_47 (sequence is synthesized)
aagagagaaatggaaatctatgtaggtcagtactcaaaggaggagcagctttttgtctccatagaggatggaataaaaagtatcttattcctaatactgaagcaaggctgaatggtgcct

SEQ ID NO: 102220 - DNA, 120 bp, Artificial Sequence
  ENSG00000092871_48 (sequence is synthesized)
attcaaaaacaccaaatgtcctgggctagagtcaggaaagtaaacccctcccccgtgctgtccctactcccccaacatacacattttaaacagtaggtggaagccaaagtcaatcagatc

SEQ ID NO: 102221 - DNA, 120 bp, Artificial Sequence
  ENSG00000092871_49 (sequence is synthesized)
aaagttgggggggggcggtggggtggccagggggcgcagtggtccttgatcttataggtccagagcctgttaatttgttcataaggtgagaactgaccctcaagagctggaaggattggg

SEQ ID NO: 102222 - DNA, 120 bp, Artificial Sequence
  ENSG00000092871_50 (sequence is synthesized)
acatggcagccagtttacaaccatatggtgtcctgatgagcctgcactcagagtggagtgttggctggaacatgcacacctgcaactgagggttctaaagtcataggttaggcccttctc

SEQ ID NO: 102223 - DNA, 120 bp, Artificial Sequence
  ENSG00000092871_51 (sequence is synthesized)
ccgggtagggtctggacatgcacaccaggagtgacgttcccaactctagataactatgtgctaggctctgggctaagtgctttacataatgttgctcaggacaacaggacaaccctatga

SEQ ID NO: 102224 - DNA, 120 bp, Artificial Sequence
  ENSG00000092871_52 (sequence is synthesized)
tttaggtgcacccattctacttggagggattgaggcttagatgttaacgtaacttgcctaaggttagagccattaagtttcaggagtctgatctgaactccgtctacacctgcactgtcc

SEQ ID NO: 102225 - DNA, 120 bp, Artificial Sequence
  ENSG00000092871_53 (sequence is synthesized)
agtgtggtagtcactagtgacatgtgaccatttgaagttgaattaaaataagaacttcagttccttagttgtgccagcttcatttcaattgctcagcagctgtctgtggctagtttggtt

SEQ ID NO: 102226 - DNA, 120 bp, Artificial Sequence
  ENSG00000092871_54 (sequence is synthesized)
ggatactgcagatttatggatatttccactgctgcaaaaagttctattgaatagcacttgtctacactaaattgtctctcttccttttgttcttcaaataaatcagcctcaggtagcaca

SEQ ID NO: 102227 - DNA, 120 bp, Artificial Sequence
  ENSG00000092871_55 (sequence is synthesized)
ggagctgttctttgtaagcaggttgtatggatctgttctcaggtgtggatttttatttttttccctgcagatatggagtatattttctttaagaaattaaaaactaagaagaaaatgcca

SEQ ID NO: 102228 - DNA, 120 bp, Artificial Sequence
  ENSG00000092871_56 (sequence is synthesized)
aggttgcagttgactgcggttggttcaggctgagttgtttgggaagtacaaattttgcccagcgtgagtcagcactgccctgggtaaactccctgctgtgttgcaatcttgcttaccaaa

SEQ ID NO: 102229 - DNA, 120 bp, Artificial Sequence
  ENSG00000092871_57 (sequence is synthesized)
gatacatccccaggcggcaccattcacttcacatgaaagccgctgctcttggttcctgagatgatctcatctgaacatggctccagcgacctcagccacaggaactagagacagcttgct

SEQ ID NO: 102230 - DNA, 120 bp, Artificial Sequence
  ENSG00000092871_58 (sequence is synthesized)
gtcagggtgggtacctcaggcaggtttgctggaaaattccagtaaacagtttcaaaggagttcaagttgcttgccagactaacttacttttaaaagtaagcagccttccaagttaagaga

SEQ ID NO: 102231 - DNA, 120 bp, Artificial Sequence
  ENSG00000092871_59 (sequence is synthesized)
tgattttaaatttcagggaaagtggaagaggagaccctagcaggcttcaagcaagctctgtaggacagcagttagacactgtttttgaggactaaattgccaagtctgtcttttaagaag

SEQ ID NO: 102232 - DNA, 120 bp, Artificial Sequence
  ENSG00000092871_60 (sequence is synthesized)
caataatcttcagagaatgcacagtcctttgggtatttgtctactcatcagctgcttagtcagatggagtgttttcctaagtactactgaagtacacagttcagtctttattttgaaatc

SEQ ID NO: 102233 - DNA, 120 bp, Artificial Sequence
  ENSG00000092871_61 (sequence is synthesized)
tctccttctgccttctctccctcttccattactttgattaccttgatgggacattcaagctgtgcagtcgtatccttttatttctatagcctgcagaaaccaggttgaagattaactgta

SEQ ID NO: 102234 - DNA, 120 bp, Artificial Sequence
  ENSG00000092871_62 (sequence is synthesized)
ggtgaacaggtaatcttatctacttggctagaaatcacccttcaagatgaaacacgtgttgacaaaggccccctagacttggggacatgaacaaagattttatcatgtgggcaacctgct

SEQ ID NO: 102235 - DNA, 120 bp, Artificial Sequence
  ENSG00000092871_63 (sequence is synthesized)
gtcctcgattatccccaagcgccctgcagaccggcaggtctagttggcttgtggggaaaagatacctctttgtacgtcagaagaaactgaggcagattttatcatgtgggcaacctgctg

SEQ ID NO: 102236 - DNA, 120 bp, Artificial Sequence
  ENSG00000092929_0 (sequence is synthesized)
gttcagcccagcctgggcacagcacatggatggggcaggatgctgcccgcctgttctgggcccccccgccccctgctgagagcgttgtccccttcccagggcctctgtaggagggtgggg

SEQ ID NO: 102237 - DNA, 120 bp, Artificial Sequence
  ENSG00000092929_1 (sequence is synthesized)
cggggccaggcctgcccacggggtccaccttctgctccagccagaggagggtcctgtagggatcccagctggggaaggtgcagggggcctgggagactgcctctccgaagcggtgaaacc

SEQ ID NO: 102238 - DNA, 120 bp, Artificial Sequence
  ENSG00000092929_2 (sequence is synthesized)
ctcacccttccgtccctcccagccaccctccctaaaacttcccctgacagagggtggcagccccaggctctttgcataatcctgtggcttcgctgtcttcacccagcaccagcggacagg

SEQ ID NO: 102239 - DNA, 120 bp, Artificial Sequence
  ENSG00000092929_3 (sequence is synthesized)
gaagggcagagaaggccaccatggcgacactcctctcccatccgcagcagcgccctcccttcttgcgccaggccatcaagataaggcgccgcagagtcagagatctacaggatcccccgc

SEQ ID NO: 102240 - DNA, 120 bp, Artificial Sequence
  ENSG00000092929_4 (sequence is synthesized)
cccaaatggccccggagatccagcctccatcccaccacttctcccccgagcagcgggccctgctctacgaggacgcactctacactgtcttgcaccgcctgggtcatcctgagcccaacc

SEQ ID NO: 102241 - DNA, 120 bp, Artificial Sequence
  ENSG00000092929_5 (sequence is synthesized)
atgtgacggaggcctctgagctgctgcgatacctgcaggaggccttccacgtggagcccgaggagcaccagcagacactgcagcgggtcagggagcttgagaagccaatattttgtctga

SEQ ID NO: 102242 - DNA, 120 bp, Artificial Sequence
  ENSG00000092929_6 (sequence is synthesized)
aggcaacagtgaaacaggccaagggcattctgggcaaagatgtcagtgggttcagcgacccctactgcctgctgggcattgagcagggggtaggtgtgccagggggcagccccgggtccc

SEQ ID NO: 102243 - DNA, 120 bp, Artificial Sequence
  ENSG00000092929_7 (sequence is synthesized)
ggcatcggcagaaggctgtggtgaggcacaccatccccgaggaggagacccaccgcacgcaggtcatcacccagacactcaaccccgtctgggacgagaccttcatcctggagtttgagg

SEQ ID NO: 102244 - DNA, 120 bp, Artificial Sequence
  ENSG00000092929_8 (sequence is synthesized)
acatcaccaatgcgagctttcatctggacatgtgggacctggacactgtggagtctgtccgacagaagcttggggagctcacggatctgcatgggcttcgcaggatctttaaagaggccc

SEQ ID NO: 102245 - DNA, 120 bp, Artificial Sequence
  ENSG00000092929_9 (sequence is synthesized)
ggaaggacaaaggccaggacgactttctggggaacgtggttctgaggctgcaggacctgcgctgccgagaggaccagtggtaccccctggaaccccgcactgagacctacccagaccgag

SEQ ID NO: 102246 - DNA, 120 bp, Artificial Sequence
  ENSG00000092929_10 (sequence is synthesized)
gccagtgccacctccagttccaactcatccataagcggagagccacttcggccagccgctcgcagccgagctacaccgtgcacctccacctcctgcagcagcttgtgtcccacgaggtca

SEQ ID NO: 102247 - DNA, 120 bp, Artificial Sequence
  ENSG00000092929_11 (sequence is synthesized)
cccagcacgaggcgggaagcacctcctgggacgggtcgctgagtccccaggctgccaccgtcctctttctgcacgccacacagaaggacctatccgacttccaccagtccatggcgcagt

SEQ ID NO: 102248 - DNA, 120 bp, Artificial Sequence
  ENSG00000092929_12 (sequence is synthesized)
ggctggcctacagccgcctctaccagagcctggagttccccagcagctgcctcctgcaccccatcaccagcatcgagtaccagtggatccagggtcggctcaaggcagaacagcaggagg

SEQ ID NO: 102249 - DNA, 120 bp, Artificial Sequence
  ENSG00000092929_13 (sequence is synthesized)
agctggccgcctcattcagctccctgctgacctacggcctctccctcatccggaggttccgctctgtcttccccctctctgtctcggactccccagcccggctgcagtctcttctcaggg

SEQ ID NO: 102250 - DNA, 120 bp, Artificial Sequence
  ENSG00000092929_14 (sequence is synthesized)
tcctggtacagatgtgcaagatgaaggcctttggagaactgtgccccaacaccgccccattgccccagctggtgactgaggccctgcagactggcaccactgaatggttccacctgaagc

SEQ ID NO: 102251 - DNA, 120 bp, Artificial Sequence
  ENSG00000092929_15 (sequence is synthesized)
agcagcaccatcaacccatggtgcagggcatcccggaggcaggcaaggccttgctgggcctggtacaggatgtcattggcgacctgcaccagtgccagcgcacatgggacaagatcttcc

SEQ ID NO: 102252 - DNA, 120 bp, Artificial Sequence
  ENSG00000092929_16 (sequence is synthesized)
acaataccctcaagatccacctcttctccatggctttccgggagctgcagtggctggtggccaagcgggtgcaggaccacacgacggttgtgggtgatgtagtgtccccagagatgggcg

SEQ ID NO: 102253 - DNA, 120 bp, Artificial Sequence
  ENSG00000092929_17 (sequence is synthesized)
agagtctgttccagctctacatcagcctcaaggagctctgccagctgcgcatgagctcctcagagagggatggagtcctggccctggataatttccaccgctggttccagccggccatcc

SEQ ID NO: 102254 - DNA, 120 bp, Artificial Sequence
  ENSG00000092929_18 (sequence is synthesized)
gcccctgggtgaactgaccaagcacagcacatcagcggtggatctatccacctgctttgcccagatcagccacactgcccggcagctggactggccagacccagaggaggccttcatgat

SEQ ID NO: 102255 - DNA, 120 bp, Artificial Sequence
  ENSG00000092929_19 (sequence is synthesized)
taccgtcaagtttgtggaggacacctgtcgcctggccctggtgtactgcagccttataaaggcccgggcccgcgagctctcttcaggccagaaggaccaaggccaggcagccaacatgct

SEQ ID NO: 102256 - DNA, 120 bp, Artificial Sequence
  ENSG00000092929_20 (sequence is synthesized)
gtgtgtggtggtgaatgacatggagcagctgcggctggtgatcggcaagttgcccgcccagctggcatgggaggccctggagcagcgggtaggggccgtgctggagcaggggcagctgca

SEQ ID NO: 102257 - DNA, 120 bp, Artificial Sequence
  ENSG00000092929_21 (sequence is synthesized)
gaacacgctgcatgcccagctgcagagcgcgctggccgggctgggccatgagatccgcactggcgtccgcaccctggccgagcagttggaggtgggcatcgccaagcacatccagaaact

SEQ ID NO: 102258 - DNA, 120 bp, Artificial Sequence
  ENSG00000092929_22 (sequence is synthesized)
ggtgggcgtcagggagtctgtcctgcctgaggatgccattctgcccctgatgaagttcctggaggtggagctttgctacatgaacaccaacttggtgcaggagaacttcagcagcctcct

SEQ ID NO: 102259 - DNA, 120 bp, Artificial Sequence
  ENSG00000092929_23 (sequence is synthesized)
gaccctgctctggacccacacactcacagtgctggtggaggcggccgcctcccagcgcagctcatccctggcttccaacaggctgaagattgccctgcagaacctggagatctgcttcca

SEQ ID NO: 102260 - DNA, 120 bp, Artificial Sequence
  ENSG00000092929_24 (sequence is synthesized)
cgctgagggctgtggcctgccacccaaggccctgcacactgccaccttccaggctctgcagagggacctggagctgcaggcggcctccagccgggaactcatccggaagtacttctgcag

SEQ ID NO: 102261 - DNA, 120 bp, Artificial Sequence
  ENSG00000092929_25 (sequence is synthesized)
ccgaatccagcagcaggcagaaaccacctctgaggagctgggggctgtgacagtcaaggcctcctaccgcgcctctgagcagaagctgcgtgtggagctgctcagcgcctccagcctgct

SEQ ID NO: 102262 - DNA, 120 bp, Artificial Sequence
  ENSG00000092929_26 (sequence is synthesized)
gcccctggactccaatggctccagcgacccctttgtccagctgaccttggagcccaggcatgagttccctgagctggccgcccgggagacccagaagcacaagaaggaccttcacccatt

SEQ ID NO: 102263 - DNA, 120 bp, Artificial Sequence
  ENSG00000092929_27 (sequence is synthesized)
gtttgatgagacctttgaattcctggtgcctgctgagccgtgccgcaaggctggggcatgcctcctgctcaccgtgctggactacgacacgctgggggccgacgacctggaaggcgaggc

SEQ ID NO: 102264 - DNA, 120 bp, Artificial Sequence
  ENSG00000092929_28 (sequence is synthesized)
cttcctgccgctgcgtgaggtgcccgggctgagtggctctgaggagcctggtgaggtgcctcagacccgcctgcccctcacgtaccccgcacccaacggggacccaatcctgcagctgct

SEQ ID NO: 102265 - DNA, 120 bp, Artificial Sequence
  ENSG00000092929_29 (sequence is synthesized)
ggagggccggaagggtgaccgagaagcccaggtctttgtgaggctgcggcggcaccgggccaagcaggcctcccagcatgccttgcggccggcaccgtagccgtagaggtttgcggtggg

SEQ ID NO: 102266 - DNA, 120 bp, Artificial Sequence
  ENSG00000092929_30 (sequence is synthesized)
gctgggtccccggtggggacttgcaagggctttcctgtagggtctggggcttccccgccacatcgcggccctccagcctggcctaacacttggggagccccagcatgcggagtgcccaga

SEQ ID NO: 102267 - DNA, 120 bp, Artificial Sequence
  ENSG00000092929_31 (sequence is synthesized)
gtgcagacctcccctgcctcccatggtgatgggggctcagcagcgacatctctactcccgcctccctgcctccagccctggctgcaatgtctctaccacatcccagcaccagggggagca

SEQ ID NO: 102268 - DNA, 120 bp, Artificial Sequence
  ENSG00000092929_32 (sequence is synthesized)
aaccctgcccctgcccgcctctcagaaaagctgctgtggtgggcaggggattgggccatctgtctcctggccctggcccatctgcctcctggccttcctgttccagccactggggtgggg

SEQ ID NO: 102269 - DNA, 120 bp, Artificial Sequence
  ENSG00000092929_33 (sequence is synthesized)
gccaggttcactgggaccagggctacaggcacagagtctcctggaaaagggagaggggaccctgccaaagatgaggctccagctgccctggggggagggtggtggccattactagagggg

SEQ ID NO: 102270 - DNA, 120 bp, Artificial Sequence
  ENSG00000092929_34 (sequence is synthesized)
gcctgggtcctctccccaggggctgccagcatccaggccaggaagcctggagccaagaaccttctggctctgagggagcaagagctggcaggcggcagggctggcacagacagacggaag

SEQ ID NO: 102271 - DNA, 120 bp, Artificial Sequence
  ENSG00000092929_35 (sequence is synthesized)
cagaaaggacagtttggctgctgtgtctgctgcgcacgccccctccccggacagcacctgccacctagaaactttcttagcaaaaaaattaataaaaacaaatccattgtcctcttaaaa

SEQ ID NO: 102272 - DNA, 120 bp, Artificial Sequence
  ENSG00000092929_36 (sequence is synthesized)
gggtcccgttcttctcccagtccctcccctcatctctccccactgggctccctcaggcctgctcctcctggctggggccaaggggctcccctgagatggccacatttgggcccaagggat

SEQ ID NO: 102273 - DNA, 120 bp, Artificial Sequence
  ENSG00000092929_37 (sequence is synthesized)
aggggctcccctgagatggccacatttgggcccaagggatggggcatctgggacaagagtttgcagctggatgtggtggctcacacctgtcatcacagcactttgggaggccgaggcagg

SEQ ID NO: 102274 - DNA, 120 bp, Artificial Sequence
  ENSG00000092929_38 (sequence is synthesized)
cagcagcgccctcccttcttgcgccaggccatcaagataaggcgccgcagagtcagagatctacaggatcccccgccccaaatggccccggaggtaggagtgacctcactggggagagag

SEQ ID NO: 102275 - DNA, 120 bp, Artificial Sequence
  ENSG00000092929_39 (sequence is synthesized)
ctggccttggggagcactgtggtctcgggtacgggtgccctgctgtctggccccacctctcgaaggctgggactggggaccagcgaccctcccctgcctactccaccctggggagagccc

SEQ ID NO: 102276 - DNA, 120 bp, Artificial Sequence
  ENSG00000092929_40 (sequence is synthesized)
cctgggccagcagagcaggggctgccagatggactctgggccactgtgggcctcaggccctgtggtctgaggctctcagaacccctccctcccggttggcctgaccccatcccctactcc

SEQ ID NO: 102277 - DNA, 120 bp, Artificial Sequence
  ENSG00000092929_41 (sequence is synthesized)
cctcacctccgctgccgagcctcacttccgctgctgggtgaggagcagccgccactgataagcagagctgtttcctctggggaagggagggaggtggggtgcgggtgcggagggctcgcg

SEQ ID NO: 102278 - DNA, 120 bp, Artificial Sequence
  ENSG00000092929_42 (sequence is synthesized)
ctgctgggcacccatggacctcagccacggcgggcccagggacggacctccaggaggcctgctgggggaacaggtgcggggcatcactggggctggaggccggggtgctggggcccccat

SEQ ID NO: 102279 - DNA, 120 bp, Artificial Sequence
  ENSG00000092929_43 (sequence is synthesized)
gtgcaaaacgctgcctctggatatccttggggctgtggcttcactttgcctgagatcctgcagcctgggggtctgggcggagccgtgcttgtctcttgtgaagctccctgcccagctctg

SEQ ID NO: 102280 - DNA, 120 bp, Artificial Sequence
  ENSG00000092929_44 (sequence is synthesized)
gagggaggtggggtgcgggtgcggagggctcgcgctgctgggcacccatggacctcagccacggcgggcccagggacggacctccaggaggcctgctgggggaacagatccagcctccat

SEQ ID NO: 102281 - DNA, 120 bp, Artificial Sequence
  ENSG00000092929_45 (sequence is synthesized)
tcatcctggccctcaaccacgcccttttctccatacagggagtttgaggacatcaccaatgcgagctttcatctggacatgtgggacctggacactgtggagtctgtccgacagaagctt

SEQ ID NO: 102282 - DNA, 120 bp, Artificial Sequence
  ENSG00000092929_46 (sequence is synthesized)
tggccatgcccagctcttgcggcggtctgctgggttgcggggctggctgcacccagtgtgaggccctgtctgctcacagaggcctcattgcagagagccacttcggccagccgctcgcag

SEQ ID NO: 102283 - DNA, 120 bp, Artificial Sequence
  ENSG00000092929_47 (sequence is synthesized)
ccgagctacaccgtgcacctccacctcctgcagcagcttgtgtcccacgaggtcacccagcacgaggtattgccctcctggggctgggcgcagccggggctgcccttcaggtcctgacac

SEQ ID NO: 102284 - DNA, 120 bp, Artificial Sequence
  ENSG00000092929_48 (sequence is synthesized)
tgccctgggcgcgctcgccacctccccctctcctcccacggcccctctttcctgggcctcagcatccgttctgaggggtggaggtgaatccctttggtgacctcccttatgggtgcaaca

SEQ ID NO: 102285 - DNA, 120 bp, Artificial Sequence
  ENSG00000092929_49 (sequence is synthesized)
ggctctgctaaggctcgctgcagggacggggagcttgccacttctcaggcctccccatttcctgctgcctagctctgagtgctttgagttcttccttaggctgagccaaaatctacctgt

SEQ ID NO: 102286 - DNA, 120 bp, Artificial Sequence
  ENSG00000092929_50 (sequence is synthesized)
cctttctcctttagtcccaggcctgtcttcagggcctccctgcctgctcctctgcccccattaggttacaggtggtccctgcccacggtgcagggagaacttctagctagggtgtcttat

SEQ ID NO: 102287 - DNA, 120 bp, Artificial Sequence
  ENSG00000092929_51 (sequence is synthesized)
agcagggacccagcatgccaggcaacaggcggtggagtccagcacatgggctctggaccacctgggttcagactccggcttcatcactgcttagcagccttgggcaagttcccggtgcag

SEQ ID NO: 102288 - DNA, 120 bp, Artificial Sequence
  ENSG00000092929_52 (sequence is synthesized)
atgagagtagttctggcttctgttgaggattaaatgggtcatgtgaggtgctgagcgtggtgtcagtacaaaggaagtggtcagtgactattagcggtagtgacgatgatgatgacagcg

SEQ ID NO: 102289 - DNA, 120 bp, Artificial Sequence
  ENSG00000092929_53 (sequence is synthesized)
ccccacctccctgtggaatctgggccctgaagaggccgcagccctcctagagttctgttccacccccagaggtataagccagggcccctcggagcccggccgtttttatttcttaaacca

SEQ ID NO: 102290 - DNA, 87 bp, Artificial Sequence
  ENSG00000092929_54 (sequence is synthesized)
caacctccgcctccgggttcaagtgattccctgcctcagcctgctgagtaactgggactacaggtgcatgccattatgcctggctaa

SEQ ID NO: 102291 - DNA, 120 bp, Artificial Sequence
  ENSG00000092929_55 (sequence is synthesized)
gttgtcactgggggcctggcctcctccctgtctccagccttgtttgtgcattccgttagtgtgctggggagggttcctcactgaggttgagaggtgtgttggataggactgatcccacct

SEQ ID NO: 102292 - DNA, 120 bp, Artificial Sequence
  ENSG00000092929_56 (sequence is synthesized)
gccccttgctggtcctgtacccaccctctccccagcctcacctggggtgggaggcggagggggaggttgggggtgggaggagctggggtggggctgggtcactgaggccgcccctttctc

SEQ ID NO: 102293 - DNA, 120 bp, Artificial Sequence
  ENSG00000092929_57 (sequence is synthesized)
aagagcgtctttgcttcctcctccgccaccgccctgccgtgctgtgtccgcatccctccggccccgccccagcctcctgaccctgctctggacccacacactcacagtgctggtggaggc

SEQ ID NO: 102294 - DNA, 120 bp, Artificial Sequence
  ENSG00000092929_58 (sequence is synthesized)
aaaaaaaaaaaaaaaaaaaaagggatgcggctgggaggagggaagtttggcagggataggctacaactccatggctctgggctgtggtcacttactgcttcgtctgggggcatccaccct

SEQ ID NO: 102295 - DNA, 120 bp, Artificial Sequence
  ENSG00000092929_59 (sequence is synthesized)
gagtttgaggacatcaccaatgcgagctttcatctggacatgtgggacctggacactgtggagtctgtccgacagaagcttggggagctcacggatctgcatgggcttcgcaggttcgtg

SEQ ID NO: 102296 - DNA, 120 bp, Artificial Sequence
  ENSG00000092931_0 (sequence is synthesized)
cccgtctccgtctgaagagtgcttctgccctcatttgcctctccctgtgaccccggccccctcagactccgctgcgtcgtctctcggccccgtccagccgttcctgactgctcttcgccg

SEQ ID NO: 102297 - DNA, 120 bp, Artificial Sequence
  ENSG00000092931_1 (sequence is synthesized)
gagtccgcttcccaaccccctttcgccagagcccgagagctccgtcggctctgcgtcctggcggattgtcagtggcttcgccccgaggagagctgactgccctgggctgctgcctccggc

SEQ ID NO: 102298 - DNA, 120 bp, Artificial Sequence
  ENSG00000092931_2 (sequence is synthesized)
agagctgagccaaaatgtccccggaatctaaaaagcttttcaacatcattattttaggagttgcctttatgtttatgttcactgcctttcaaacttgtggaaatgtggcgcaaactgtca

SEQ ID NO: 102299 - DNA, 120 bp, Artificial Sequence
  ENSG00000092931_3 (sequence is synthesized)
tcaggagcttaaataggacagattttcacggcagtggatataccagcatggctattatctatggagtgttctctgcttcaaatttgattacaccgtcagtggttgccattgtaggacctc

SEQ ID NO: 102300 - DNA, 120 bp, Artificial Sequence
  ENSG00000092931_4 (sequence is synthesized)
aactctctatgtttgccagtggtttattttacagcatgtacattgccgttttcatccagcctttcccgtggtccttctacacagcctctgttttcattggaattgctgctgctgtgcttt

SEQ ID NO: 102301 - DNA, 120 bp, Artificial Sequence
  ENSG00000092931_5 (sequence is synthesized)
ggacagcacaaggaaactgcctgacaatcaattcggatgagcacagcattgggagaaacagtgggattttctgggcacttctgcagtctagcttgttctttggaaatctctacatatatt

SEQ ID NO: 102302 - DNA, 120 bp, Artificial Sequence
  ENSG00000092931_6 (sequence is synthesized)
ttgcctggcaagggaaaactcagatatcagagagtgaccgaagaacagtgtttattgccctaacggtgattagccttgtggggacagttctattctttctcattcggaaaccagattctg

SEQ ID NO: 102303 - DNA, 120 bp, Artificial Sequence
  ENSG00000092931_7 (sequence is synthesized)
aaaatgtcctaggagaagatgagtcttctgatgaccaggacatggaagtcaacgagtctgcccagaacaatctgacaaaggcagtagatgcttttaaaaagtcttttaagttatgtgtca

SEQ ID NO: 102304 - DNA, 120 bp, Artificial Sequence
  ENSG00000092931_8 (sequence is synthesized)
ccaaggagatgctccttcttagtattacaactgcttatacaggtctggaattaactttcttctctggtgtatatggaacctgtattggtgctacaaataaatttggagcagaagagaaaa

SEQ ID NO: 102305 - DNA, 120 bp, Artificial Sequence
  ENSG00000092931_9 (sequence is synthesized)
gccttattggactttctggcattttcatcggcattggagaaattttaggtggaagcctcttcggcctgctgagcaagaacaatcgttttggtagaaatccagttgtgctgttgggcatcc

SEQ ID NO: 102306 - DNA, 120 bp, Artificial Sequence
  ENSG00000092931_10 (sequence is synthesized)
tttatctaatatttctcaacatgcctggagatgccccgattgctcctgttaaaggaactgacagcagtgcttacatcaaatccagcaaagaagttgccattctctgcagttttctgttgg

SEQ ID NO: 102307 - DNA, 120 bp, Artificial Sequence
  ENSG00000092931_11 (sequence is synthesized)
gccttggagacagctgctttaatacccagctgcttagtatcttgggctttctgtattctgaagacagcgccccagcatttgccatcttcaagtttgttcagtctatttgcgcagccgtgg

SEQ ID NO: 102308 - DNA, 120 bp, Artificial Sequence
  ENSG00000092931_12 (sequence is synthesized)
catttttctacagcaactaccttctccttcactggcaactcctggtcatggtgatatttgggttttttggaacaatttctttcttcactgtggaatgggaagctgccgcctttgtagccc

SEQ ID NO: 102309 - DNA, 120 bp, Artificial Sequence
  ENSG00000092931_13 (sequence is synthesized)
gcggctctgactaccgaagtatctgatctggtgtccgtgaggggacacgtatgacctcagaaacacagctggacacagagcttggtggaagaagtcgcctttgatcttcactatatattg

SEQ ID NO: 102310 - DNA, 120 bp, Artificial Sequence
  ENSG00000092931_14 (sequence is synthesized)
ggtgatgttcagtatggaaaatcaagggattaagactgttaaatcagccagagttggtgttcaagtttacagatatgagttatttaaagcaagtagaataagggaaagctgttctgtcaa

SEQ ID NO: 102311 - DNA, 120 bp, Artificial Sequence
  ENSG00000092931_15 (sequence is synthesized)
ctgtaattgttcaaagatgttgtttttcatttcatctatctcaattcttataatcatgttatagaatgtaaatgttttcttctctctcctgctcttgttggaagatcctgccttgattta

SEQ ID NO: 102312 - DNA, 120 bp, Artificial Sequence
  ENSG00000092931_16 (sequence is synthesized)
gaatactaggccatatgtcatataaatattttttctggatatggagtatgttttgccatgtaataatgggaagcatatgtcattccccatatgtgttggagaatgacatttaaataaata

SEQ ID NO: 102313 - DNA, 120 bp, Artificial Sequence
  ENSG00000092931_17 (sequence is synthesized)
gcaaagctgggtgtggtgttgcaccgctatactcccagctgttggggaggctgagacagaaggatcacttcagcccaggagattgaggctgcggtgagctatgatcacaccactgcactc

SEQ ID NO: 102314 - DNA, 120 bp, Artificial Sequence
  ENSG00000092931_18 (sequence is synthesized)
ggagaccgcagctttaaagggggaaaatgcagacgttggataaaaacagcaagaaatagtcattttcattaataggtctcaaacagtttacgaaacagccattattatctaagcttcata

SEQ ID NO: 102315 - DNA, 120 bp, Artificial Sequence
  ENSG00000092931_19 (sequence is synthesized)
cacatcctttctgcagacccctctcttcagtattactcccaaaggagacttggggggactcttcgatcgcgacctggatttggattccctcttggacactgggggaggactcctggaccg

SEQ ID NO: 102316 - DNA, 120 bp, Artificial Sequence
  ENSG00000092931_20 (sequence is synthesized)
agaccgggacctggaccgcgaacgagatctggagaccgacgaggacttggacttggaccttcgtgcggatctggacttggaggtcgaccgagatcgagaacgagtgcgggaccgagactt

SEQ ID NO: 102317 - DNA, 120 bp, Artificial Sequence
  ENSG00000092931_21 (sequence is synthesized)
cgagcggctgtagcgagatcggctgcgagacctggaacgactccgactccgggatcggctgcggcgacgccgcctagggctgcgggcgggacgagcaagcacagcggggttaattccagg

SEQ ID NO: 102318 - DNA, 120 bp, Artificial Sequence
  ENSG00000092931_22 (sequence is synthesized)
gttaattccaggcagcggggccggccccgcccgcgcgctcccgcccaggccgccattatctcgccgccagacgccatttccccagtcgcgaggcggggtcctccgccccgcgccgcccac

SEQ ID NO: 102319 - DNA, 120 bp, Artificial Sequence
  ENSG00000092931_23 (sequence is synthesized)
cccgggtcgcagacggcggaagctcgcggggtggccggagggtcgcgagacgcggcgtgcacccccgccccgtccgggcccgcaccacgtgcttcgccgcggacctttgtgaggtcgccc

SEQ ID NO: 102320 - DNA, 120 bp, Artificial Sequence
  ENSG00000092931_24 (sequence is synthesized)
ggacctttgtgaggtcgcccgggcctcccgcgcgccccgccccgcctcccgcggtcccctcagccccgtttacctgcggctccggcgtccgtagccaccgcccccgtacctgcggggtgg

SEQ ID NO: 102321 - DNA, 120 bp, Artificial Sequence
  ENSG00000092931_25 (sequence is synthesized)
gtgagtccggggggcggccgtagcgcgccatttgcacccgcagctcgcggccgtccagcacggccccgtccatggcatccatagcgtcctcagcgtcgcgcttgtcgtgaaagcgaacga

SEQ ID NO: 102322 - DNA, 120 bp, Artificial Sequence
  ENSG00000092931_26 (sequence is synthesized)
aggcgaagccgcgggactccttggtgtagcggtcccgcgggatgtacacgtcgccgacgcgcccgtacttctcgaagacgcgcctcagcgtgtcgggcgaggtgcggattgtcagtggct

SEQ ID NO: 102323 - DNA, 120 bp, Artificial Sequence
  ENSG00000092931_27 (sequence is synthesized)
cgtagctcatagctctgagtggcggcccggagccccgcgaactggcgccggcttcctcagctctgggcggtgcgacgccgcgcctctcaggcagttgccttccgcgtggggacactggga

SEQ ID NO: 102324 - DNA, 120 bp, Artificial Sequence
  ENSG00000092931_28 (sequence is synthesized)
aaggccttgccgcagaacagcacggacgggctccgcaggctagcgcacctgagtaacaactgggcgggcagccggcctctgcgcccgtttatatcgctcctcacaaaatggcgcccgcgc

SEQ ID NO: 102325 - DNA, 120 bp, Artificial Sequence
  ENSG00000092931_29 (sequence is synthesized)
cacccggaaatgaaaccttctgattggcccaccgcgccccgcttcgtaacgaccctgccgcgcgccccgcccctacccgaagcgcctgcgcacagcccggcgggcgggccaaaaagcgcg

SEQ ID NO: 102326 - DNA, 120 bp, Artificial Sequence
  ENSG00000092931_30 (sequence is synthesized)
gagtcacggctggagggagggggagcggaattagcgggcagttggaaagcccgcgaaacgctttttccgcctgggaggccggacgatcgcgattgggcaggaggaagaggaggtgctccc

SEQ ID NO: 102327 - DNA, 120 bp, Artificial Sequence
  ENSG00000092931_31 (sequence is synthesized)
ctgcgtcctggcggtggggactccccgcggagcgcttgcgcgtgccaggccacccgggactacgtttcccagcgggccgagcggccggcgccgcggctgcggtcaggtgacccggtcgcc

SEQ ID NO: 102328 - DNA, 120 bp, Artificial Sequence
  ENSG00000092931_32 (sequence is synthesized)
tggccgcagtgagtcaggctgggagggcggggccgcgccggctgctgcggctggcacttggccctttaatccccttcgtgggcccctcaacctggagcggataaattcttggcgcttctc

SEQ ID NO: 102329 - DNA, 120 bp, Artificial Sequence
  ENSG00000092931_33 (sequence is synthesized)
tcttccgtactcggatcgcttcttaggagtatcctaactgccggtggggagaacttcgccctaaacctggggttccgatccaggaactggaagttgacagcttggctgcctggctcctgc

SEQ ID NO: 102330 - DNA, 120 bp, Artificial Sequence
  ENSG00000092931_34 (sequence is synthesized)
actttatgtactgatcagtcctcagctgaagactcagggggactgtctgcagctctctggaattgtttttctgtgtagctttcctttctgataccgttgtctgtgaactctggtcaccct

SEQ ID NO: 102331 - DNA, 120 bp, Artificial Sequence
  ENSG00000092931_35 (sequence is synthesized)
gatatccctagagtcacatccccgtctcttcaatccatgggggctgctggcctccgcctgggttctttctccctctgctgcctactcttgagaggaactgccagatattttccagagtgg

SEQ ID NO: 102332 - DNA, 88 bp, Artificial Sequence
  ENSG00000092931_36 (sequence is synthesized)
cttgtggtatcttaattttagctgctataacaaatttccatagactgtgtggcttaaacaacagacactgagagcaggatgccaccat

SEQ ID NO: 102333 - DNA, 120 bp, Artificial Sequence
  ENSG00000092931_37 (sequence is synthesized)
gcgcagcttgtggtgtgggctgttcctggttgtagacagctgccttcttgctgtgtcctcccatggcagagagcagacaggaagcaagctttttgttgtctctatttataagggcactaa

SEQ ID NO: 102334 - DNA, 120 bp, Artificial Sequence
  ENSG00000092931_38 (sequence is synthesized)
tcacatcgagagggctccaccctcatggcctaattgcctccaaaaggccccatctccaaataccatcatgttttggggaatttgagtttcaatatgtgaatctggggaggacacaaacat

SEQ ID NO: 102335 - DNA, 120 bp, Artificial Sequence
  ENSG00000092931_39 (sequence is synthesized)
ccatagcatgaagctaattccatttcatcagttacatcacattatgctctgcttggggattaatatttcagtctctgtgagttttatgtgttttactacgcaagtattctttcgtcagat

SEQ ID NO: 102336 - DNA, 120 bp, Artificial Sequence
  ENSG00000092931_40 (sequence is synthesized)
agcacagacttgtggcagccctcttctatgcctgagggatataggcgtgaacaagacagataagtccttgttcttacgggacttaattttagagggggtggtagacaatgcacgtgtaag

SEQ ID NO: 102337 - DNA, 120 bp, Artificial Sequence
  ENSG00000092931_41 (sequence is synthesized)
aaaatagcaaagtctgcccagaacaatctgacaaaggcagtagatgcttttagtaagtattttctgtatctgaaatgcaagaactgttcaggaacaactcggcatttgcctttcccctat

SEQ ID NO: 102338 - DNA, 120 bp, Artificial Sequence
  ENSG00000092931_42 (sequence is synthesized)
gctccatgataattctttagggaagtcagtgctttgctgattgttgactctctcaagagcctaacggttaatcatgccttttgaagtactttgttgttttgtttgattctattttttttc

SEQ ID NO: 102339 - DNA, 120 bp, Artificial Sequence
  ENSG00000092931_43 (sequence is synthesized)
ttccttttcatgtttttgttataagagctggaaaatgtgctgaggaaatgcatctgtagaatgtatttaagcacttgaaataaacgttttatttatagggcaaatgtagttcatgcctta

SEQ ID NO: 102340 - DNA, 120 bp, Artificial Sequence
  ENSG00000092931_44 (sequence is synthesized)
agcattttaatctgaaagttatatcccaaagtgttcgtttactggcattattgacaaggggtgttttggttgaaggaagttttagaatgtttgttttattaactaaaatctaattaagta

SEQ ID NO: 102341 - DNA, 120 bp, Artificial Sequence
  ENSG00000092931_45 (sequence is synthesized)
tctccaggctgcagtccatgtctctgcaggctgcagtgaaggtgtgttccaggcttcactgggggagggcctgcttccctgctcactcgtatagttgttgcaggagtcagttcctcacag

SEQ ID NO: 102342 - DNA, 120 bp, Artificial Sequence
  ENSG00000092931_46 (sequence is synthesized)
actgtcaggctaagtaaggatcttggtttcttatggctattggctaaagatcgccctctgcccttcatcatgctacggagtagtcctcagggcagcctacgacatggcagctgtctccat

SEQ ID NO: 102343 - DNA, 120 bp, Artificial Sequence
  ENSG00000092931_47 (sequence is synthesized)
caaaggtcacaagcaaggacagctggagagaacgagagcaagacaaaagccgcagtctctcataacttcatcactgttgcactctgtctgttaggtgccagtcactagttccagcctatt

SEQ ID NO: 102344 - DNA, 120 bp, Artificial Sequence
  ENSG00000092964_0 (sequence is synthesized)
aatcgctgctcgtctctctcgaagcggatggcttttgcctgagaggaaagggagtggctggcggcgcatgcgccacggtggccgacttgaaccgaggcttttattgctgtagtttatttc

SEQ ID NO: 102345 - DNA, 120 bp, Artificial Sequence
  ENSG00000092964_1 (sequence is synthesized)
cacccccttccctcctgtttctctctctccttctctctctctctctctctctctcttttttttccgccctagctggggctgtgttggaggagaggaagaaagagagacagaggattgcat

SEQ ID NO: 102346 - DNA, 120 bp, Artificial Sequence
  ENSG00000092964_2 (sequence is synthesized)
agaaagagagacagaggattgcattcatccgttacgttcttgaaatttcctaatagcaagaccagcgaagcggttgcacccttttcaatcttgcaaaggaaaaaaacaaaacaaaacaaa

SEQ ID NO: 102347 - DNA, 120 bp, Artificial Sequence
  ENSG00000092964_3 (sequence is synthesized)
agtttttgccttaaagctgccctcttgaaattaattttttcccaggagagagatgtcttatcaggggaagaaaaatattccacgcatcacgagcgatcgtcttctgatcaaaggaggtaa

SEQ ID NO: 102348 - DNA, 120 bp, Artificial Sequence
  ENSG00000092964_4 (sequence is synthesized)
aattgttaatgatgaccagtcgttctatgcagacatatacatggaagatgggttgatcaagcaaataggagaaaatctgattgtgccaggaggagtgaagaccatcgaggcccactcccg

SEQ ID NO: 102349 - DNA, 120 bp, Artificial Sequence
  ENSG00000092964_5 (sequence is synthesized)
gatggtgatccccggaggaattgacgtccacactcgtttccagatgcctgatcagggaatgacgtctgctgatgatttcttccaaggaaccaaggcggccctggctgggggaaccactat

SEQ ID NO: 102350 - DNA, 120 bp, Artificial Sequence
  ENSG00000092964_6 (sequence is synthesized)
gatcattgaccacgttgttcctgagcctgggacaagcctgctcgctgcctttgaccagtggagggaatgggccgacagcaagtcctgctgtgactactctctgcatgtggacatcagtga

SEQ ID NO: 102351 - DNA, 120 bp, Artificial Sequence
  ENSG00000092964_7 (sequence is synthesized)
gtggcataagggcatccaggaggagatggaagcgcttgtgaaggatcacggggtaaattccttcctcgtgtacatggctttcaaagatcgcttccagctaacggattgccagatttatga

SEQ ID NO: 102352 - DNA, 120 bp, Artificial Sequence
  ENSG00000092964_8 (sequence is synthesized)
agtactgagtgtgatccgggatattggcgccatagcccaagtccacgcagaaaatggcgacatcattgcagaggagcagcagaggatcctggatctgggcatcacgggccccgagggaca

SEQ ID NO: 102353 - DNA, 120 bp, Artificial Sequence
  ENSG00000092964_9 (sequence is synthesized)
tgtgctgagccgacctgaggaggtcgaggccgaagccgtgaatcgtgccatcaccatcgccaaccagaccaactgcccgctgtatatcaccaaggtgatgagcaaaagctctgctgaggt

SEQ ID NO: 102354 - DNA, 120 bp, Artificial Sequence
  ENSG00000092964_10 (sequence is synthesized)
catcgcccaggcacggaagaagggaactgtggtgtatggcgagcccatcactgccagcttgggaacggacggctcccattactggagcaagaactgggccaaggctgctgcctttgtcac

SEQ ID NO: 102355 - DNA, 120 bp, Artificial Sequence
  ENSG00000092964_11 (sequence is synthesized)
ctccccacccttgagccctgatccaaccactccagactttctcaactccttgctgtcctgtggagacctccaggtcacgggcagtgcccattgcacgtttaacactgcccagaaggctgt

SEQ ID NO: 102356 - DNA, 120 bp, Artificial Sequence
  ENSG00000092964_12 (sequence is synthesized)
aggaaaggacaacttcaccctgattccggagggcaccaatggcactgaggagcggatgtccgtcatctgggacaaggctgtggtcactgggaagatggatgagaaccagtttgtggctgt

SEQ ID NO: 102357 - DNA, 120 bp, Artificial Sequence
  ENSG00000092964_13 (sequence is synthesized)
gaccagcaccaatgcagccaaagtcttcaacctttacccccggaaaggccgcattgctgtgggatccgatgccgacctggtcatctgggaccccgacagcgttaaaaccatctctgccaa

SEQ ID NO: 102358 - DNA, 120 bp, Artificial Sequence
  ENSG00000092964_14 (sequence is synthesized)
gacacacaacagctctctcgagtacaacatctttgaaggcatggagtgccgcggctccccactggtggtcatcagccaggggaagattgtcctggaggacggcaccctgcatgtcaccga

SEQ ID NO: 102359 - DNA, 120 bp, Artificial Sequence
  ENSG00000092964_15 (sequence is synthesized)
aggctctggacgctacattccccggaagcccttccctgattttgtttacaagcgtatcaaggcaaggagcaggctggctgagctgagaggggttcctcgtggcctgtatgacggacctgt

SEQ ID NO: 102360 - DNA, 120 bp, Artificial Sequence
  ENSG00000092964_16 (sequence is synthesized)
gtgtgaagtgtctgtgacgcccaagacagtcactccagcctcctcggccaagacgtctcctgccaagcagcaggccccacctgtccggaacctgcaccagtctggattcagtttgtctgg

SEQ ID NO: 102361 - DNA, 120 bp, Artificial Sequence
  ENSG00000092964_17 (sequence is synthesized)
tgctcagattgatgacaacattccccgccgcaccacccagcgtatcgtggcgccccccggtggccgtgccaacatcaccagcctgggctagagctcctgggctgtgccgtccactgggga

SEQ ID NO: 102362 - DNA, 85 bp, Artificial Sequence
  ENSG00000092964_18 (sequence is synthesized)
gagcctgtgatagttactgtggagcagccagttcatggggtcccccttggggccccacaccccgtctctcaccaagagttactga

SEQ ID NO: 102363 - DNA, 120 bp, Artificial Sequence
  ENSG00000092964_19 (sequence is synthesized)
tgctcatccacttccctacacatctatgggtatcacacccaagactacccaccaagctcatacagggaaccacacccaacacttagacatgcgaacaagcagcccccagcgagggtctcc

SEQ ID NO: 102364 - DNA, 120 bp, Artificial Sequence
  ENSG00000092964_20 (sequence is synthesized)
ttcgccttcaacctcctagtgtctgttagcatcttccttttcatggggggagggaagataaagtgaattgcccagagctgcctttttcttttctttttaaaaattttaagaagttttctt

SEQ ID NO: 102365 - DNA, 120 bp, Artificial Sequence
  ENSG00000092964_21 (sequence is synthesized)
tgtggggctggggaggggccggggtcagggagagtcttttttttttttttttttaaatactaaattggaacatttaattccatattaatacaaggggtttgaactggacatcctaatgat

SEQ ID NO: 102366 - DNA, 120 bp, Artificial Sequence
  ENSG00000092964_22 (sequence is synthesized)
gcaattacgtcatcacccagctgattccgggtggttggcaaactcatcgtgtctgtcctgagaggctccacaatgcccacccgcatcgccattctgtagtcttcagggtcagctgttgat

SEQ ID NO: 102367 - DNA, 120 bp, Artificial Sequence
  ENSG00000092964_23 (sequence is synthesized)
aaaggggcaggcttgcgttattggcctagattttgctgcagattaaatcctttgaggattctcttctcttttaccatttttctgcgtgctctcactctctctttctctctctagcttttt

SEQ ID NO: 102368 - DNA, 120 bp, Artificial Sequence
  ENSG00000092964_24 (sequence is synthesized)
aattcatgaatattttcgtgtctgtctctctctctctctgtgtttcctccagcccttgtctcggagacggtgttttcctcccttgccccattatcttttcacctcccaggtctaccattt

SEQ ID NO: 102369 - DNA, 120 bp, Artificial Sequence
  ENSG00000092964_25 (sequence is synthesized)
catggtggtcgttgggtccgcctaaaggatttgagcgtttgccattgcaagcatagtgctgtgtcatcctggtccatgtaggactggtgctaaccacctgccatcatgaggatgtgtgct

SEQ ID NO: 102370 - DNA, 120 bp, Artificial Sequence
  ENSG00000092964_26 (sequence is synthesized)
agagtgtgggaccctggccaagtgcaggaatgggccatgccgtctcacccacagtatcacacgtggaaccgcagacagggcccagaagctttagaggtatgaggctgcagaaccggagag

SEQ ID NO: 102371 - DNA, 120 bp, Artificial Sequence
  ENSG00000092964_27 (sequence is synthesized)
attttcctctgtgcagtgctctctggctaaagtcacggtcaaacctaaacaccgagcctcattaacccaagtgaaccaaccaaagtcaccagttcagaagtgctaagctaataggagtct

SEQ ID NO: 102372 - DNA, 120 bp, Artificial Sequence
  ENSG00000092964_28 (sequence is synthesized)
gacccgagggcctgctgcttcctggttaagtatcttttgagattctagaacacatgggagctttttattttcggggaaaaaccgtatttttttcttgtccaattatttctaaagacacac

SEQ ID NO: 102373 - DNA, 120 bp, Artificial Sequence
  ENSG00000092964_29 (sequence is synthesized)
tacatagaaagaggccctataaactcaaaaagtcattgggaaacttaaagtctattctactttgcaagaggagaaatgtgttttatgaacgatagatcacatcagaactcctgtggggag

SEQ ID NO: 102374 - DNA, 120 bp, Artificial Sequence
  ENSG00000092964_30 (sequence is synthesized)
gaaaccttataaattaaacacatggcccccttagagaccacaggtgatgtctgtctccatccttccctctccttttctgtcacctttccccctagctggctcctttggacctacccctgt

SEQ ID NO: 102375 - DNA, 120 bp, Artificial Sequence
  ENSG00000092964_31 (sequence is synthesized)
ccttgctgacttgtgttgcattgtattccaaacgtgtttacaggttctcttaagcaatgttgtatttgcaggcttttctgaataccaaatctgctttttgtaaagcgtaaaaacatcaca

SEQ ID NO: 102376 - DNA, 120 bp, Artificial Sequence
  ENSG00000092964_32 (sequence is synthesized)
aagtaggtcattccatcaccacccttgtctctctacacattttgcctttggggatctggttggggttttgggttttttgttgttgttgtttatttgttattttaaaggtaaattgcactt

SEQ ID NO: 102377 - DNA, 120 bp, Artificial Sequence
  ENSG00000092964_33 (sequence is synthesized)
ttaaaaaaataattggttgacttaatatatttgctttttttctcacctgcacttagaggaaatttgaacaagttggaaaaaaacaatttttgtttcaattctaagaaacacttgcagctc

SEQ ID NO: 102378 - DNA, 120 bp, Artificial Sequence
  ENSG00000092964_34 (sequence is synthesized)
tagtattcacttgagtcttcctgtttttcctgtaccgggtcatggtaatttttggttgttttggttgttttcttaaaaaacaagttaaaacctgacgatttctgcaggctgtgtaagcat

SEQ ID NO: 102379 - DNA, 120 bp, Artificial Sequence
  ENSG00000092964_35 (sequence is synthesized)
gtttacctgttggcttgctttgtgtgtctgttaaatgaatgtcatatgtaaatgctaaaataaatcgacagtgtctcagaactgaataactgcagtgacttgatgctctaaaacagtgta

SEQ ID NO: 102380 - DNA, 120 bp, Artificial Sequence
  ENSG00000092964_36 (sequence is synthesized)
ggatttaagaatagatggtttttaatcctggaaattgtgattgtgacccatgagtggaggaactttcagttctaaagctgataaagtgtgtagccagaagagtacttttttttttgtaac

SEQ ID NO: 102381 - DNA, 120 bp, Artificial Sequence
  ENSG00000092964_37 (sequence is synthesized)
cactgtcttgatggcaaaataattatggtaaaaaacaagtctcgtgtttattattccttaagaactctgtgttatattaccatggaacgcctaataaagcaaaatgtggttgtttcaggg

SEQ ID NO: 102382 - DNA, 120 bp, Artificial Sequence
  ENSG00000092964_38 (sequence is synthesized)
aatacggtgatgcttgtgacctgtgtctgttggggcttagttccttaagaatcctgattgaaacagtggcctgacacccagcagagatatgggtaatgtacacacaaggattcccaaatg

SEQ ID NO: 102383 - DNA, 120 bp, Artificial Sequence
  ENSG00000092964_39 (sequence is synthesized)
accaagaaggaaagctctgtaagggagtattaattgtttgcctccaggatcagtattcattcttggatcaaaccccagctccactgtacaccagccacgtgatgctgggtgcttcctcat

SEQ ID NO: 102384 - DNA, 120 bp, Artificial Sequence
  ENSG00000092964_40 (sequence is synthesized)
tattgcaggtaaagatggagatgagaagcgtgaccagttattgtgactacaggatgaaggggctggtctaaccttgagcttgcgaggaaagcagagtaaagatgcctgctgaccctggac

SEQ ID NO: 102385 - DNA, 120 bp, Artificial Sequence
  ENSG00000092964_41 (sequence is synthesized)
aagggttttctgctcagaattgtttgtccacttcaggaactgtggtgtatggcgagcccatcactgccagcttgggaacggacggctcccattactggagcaagaactgggccaaggctg

SEQ ID NO: 102386 - DNA, 120 bp, Artificial Sequence
  ENSG00000092964_42 (sequence is synthesized)
gttgtccgtgaaatgcacccaaagcttgagctttcaggggttttgggaaatcagatctgggcagtgcatgtgtggtttcgctggagacatcatccaatgccaagtttctgctttctgctt

SEQ ID NO: 102387 - DNA, 120 bp, Artificial Sequence
  ENSG00000092964_43 (sequence is synthesized)
tctccctcttggataatcagctgggttacatggattcttagaagctggttgtagagatcaccatctcgattttgaacccaagaagccttattcagggttcaagtgggaaaatacctgctg

SEQ ID NO: 102388 - DNA, 120 bp, Artificial Sequence
  ENSG00000092964_44 (sequence is synthesized)
agtaaacaggcccctcgtggtaaatggagagcagtgaatggaggtggagggagaagttttgggaaaagatttgcactcagttaatgatgctcaaggtagttcaaggcagactcagtagct

SEQ ID NO: 102389 - DNA, 120 bp, Artificial Sequence
  ENSG00000092964_45 (sequence is synthesized)
cccgggttgcttagtagaaatgcagattactgggtcccagtctggacctgcagcgtcagaaactctggggtaaggtctgggaacctgtgttttatttttatgttatttttttgagacagg

SEQ ID NO: 102390 - DNA, 120 bp, Artificial Sequence
  ENSG00000092964_46 (sequence is synthesized)
ttccaaagtgctgggattataggcatgcgccactgcacctggccagaacctgtgttttaaggaacactggagatcattactgtgcaccctgaagtctgaggagtctagcaccagatgatc

SEQ ID NO: 102391 - DNA, 120 bp, Artificial Sequence
  ENSG00000092964_47 (sequence is synthesized)
tgacgacacatcattgggatgtggagtcatggttccagtcaccagcctgaagttgtccttgtctgtcaccctccccactttgtctaaggttgaccacgttgttcctgagcctgggacaag

SEQ ID NO: 102392 - DNA, 120 bp, Artificial Sequence
  ENSG00000092964_48 (sequence is synthesized)
atctggggggttatgtatttgccctgaaatacttcgccctggtgatgtcatgtgtgatttcctcccgcagacctttagtcagagctagacactgtgaagggctaggaattgtgaaaagat

SEQ ID NO: 102393 - DNA, 120 bp, Artificial Sequence
  ENSG00000092964_49 (sequence is synthesized)
tgtgtgaatgaacaggaaggttaaatttgaggtgccataggccatgcataaagaacagtccagatggcacctgggaccggatgcctggacaccatccgagcaggagattaatggaattga

SEQ ID NO: 102394 - DNA, 120 bp, Artificial Sequence
  ENSG00000092964_50 (sequence is synthesized)
ctttcggctcccgcagccgcagcggacgccctcccagatccaactttgccgcttccccgagctcgcgctgtagccgcggggggcgtgggcagggaggggagaagcggggtcagggggagg

SEQ ID NO: 102395 - DNA, 120 bp, Artificial Sequence
  ENSG00000092964_51 (sequence is synthesized)
gaccgggagggtgggtcgccggctcgccagccctccttcctttctgtgcaccttgcggtgggcggcgaacggcagccgcggcagcagctagggggcttgtgcacacagcgagggagactt

SEQ ID NO: 102396 - DNA, 120 bp, Artificial Sequence
  ENSG00000092964_52 (sequence is synthesized)
agggactggcagacggacggacggacggcgaggaccctacccgagcccccgagccatggccgagagaaagcaatccgggaaggcggcagaggacgaagaggtccctgctttttttaaaaa

SEQ ID NO: 102397 - DNA, 120 bp, Artificial Sequence
  ENSG00000092964_53 (sequence is synthesized)
cctgggctccggcagccccaagccccggcagaaattctgtggcatgttctgcccggtggaagggtcctcggagaacaagaccatcgacttcgactcgctgtcggtgggccggggctcggg

SEQ ID NO: 102398 - DNA, 120 bp, Artificial Sequence
  ENSG00000092964_54 (sequence is synthesized)
gcaggtggtggctcagcagcgggacgtcgcccacttgggcccggacccgcagccgccgtactcgcggcagggccggcgcgccggcggagagccatctgttgaatcgggccggaaggtgga

SEQ ID NO: 102399 - DNA, 120 bp, Artificial Sequence
  ENSG00000092964_55 (sequence is synthesized)
acaaaaggatgtttcagggcggggtttcccataccccgcagccttccccggatgcctccttcccggctcggagttggaagggtttcctcagggctctcatttcctgcagcccggcgcctc

SEQ ID NO: 102400 - DNA, 120 bp, Artificial Sequence
  ENSG00000092964_56 (sequence is synthesized)
gctctcatttcctgcagcccggcgcctccacgcgggccagatcccgtctctgcagcctccccccggcccgcgcccattccccgcccccaggagccgggcccggacgctcccgggaagcag

SEQ ID NO: 102401 - DNA, 120 bp, Artificial Sequence
  ENSG00000092964_57 (sequence is synthesized)
cctttctgttgctaacggaggcgatggtgatggtggtggtggttgtgggagatgcagtgatccaggattagaagtcgcatcgtttgcaaggcattaaacaggagcgcgagtgcacgaagg

SEQ ID NO: 102402 - DNA, 120 bp, Artificial Sequence
  ENSG00000092969_0 (sequence is synthesized)
gatgttatctgctggcagcagaaggttcgctccgagcggagctccagaagctcctgacaagagaaagacagattgagatagagatagaaagagaaagagagaaagagacagcagagcgag

SEQ ID NO: 102403 - DNA, 120 bp, Artificial Sequence
  ENSG00000092969_1 (sequence is synthesized)
agcgcaagtgaaagaggcaggggagggggatggagaatattagcctgacggtctagggagtcatccaggaacaaactgaggggctgcccggctgcagacaggaggagacagagaggatct

SEQ ID NO: 102404 - DNA, 120 bp, Artificial Sequence
  ENSG00000092969_2 (sequence is synthesized)
attttagggtggcaagtgcctacctaccctaagcgagcaattccacgttggggagaagccagcagaggttgggaaagggtgggagtccaagggagcccctgcgcaaccccctcaggaata

SEQ ID NO: 102405 - DNA, 120 bp, Artificial Sequence
  ENSG00000092969_3 (sequence is synthesized)
aaactccccagccagggtgtcgcaagggctgccgttgtgatccgcagggggtgaacgcaaccgcgacggctgatcgtctgtggctgggttggcgtttggagcaagagaaggaggagcagg

SEQ ID NO: 102406 - DNA, 120 bp, Artificial Sequence
  ENSG00000092969_4 (sequence is synthesized)
agaaggagggagctggaggctggaagcgtttgcaagcggcggcggcagcaacgtggagtaaccaagcgggtcagcgcgcgcccgccagggtgtaggccacggagcgcagctcccagagca

SEQ ID NO: 102407 - DNA, 120 bp, Artificial Sequence
  ENSG00000092969_5 (sequence is synthesized)
ggatccgcgccgcctcagcagcctctgcggcccctgcggcacccgaccgagtaccgagcgccctgcgaagcgcaccctcctccccgcggtgcgctgggctcgcccccagcgcgcgcacac

SEQ ID NO: 102408 - DNA, 120 bp, Artificial Sequence
  ENSG00000092969_6 (sequence is synthesized)
acacacacacacacgcacgcacacacgtgtgcgcttctctgctccggagctgctgctgctcctgctctcagcgccgcagtggaaggcaggaccgaaccgctccttctttaaatatataaa

SEQ ID NO: 102409 - DNA, 120 bp, Artificial Sequence
  ENSG00000092969_7 (sequence is synthesized)
taaatatataaatttcagcccaggtcagcctcggcggcccccctcaccgcgctcccggcgcccctcccgtcagttcgccagctgccagccccgggaccttttcatctcttcccttttggc

SEQ ID NO: 102410 - DNA, 120 bp, Artificial Sequence
  ENSG00000092969_8 (sequence is synthesized)
cggaggagccgagttcagatccgccactccgcacccgagactgacacactgaactccacttcctcctcttaaatttatttctacttaatagccactcgtctctttttttccccatctcat

SEQ ID NO: 102411 - DNA, 120 bp, Artificial Sequence
  ENSG00000092969_9 (sequence is synthesized)
tgctccaagaatttttttcttcttactcgccaaagtcagggttccctctgcccgtcccgtattaatatttccacttttggaactactggccttttctttttaaaggaattcaagcaggat

SEQ ID NO: 102412 - DNA, 120 bp, Artificial Sequence
  ENSG00000092969_10 (sequence is synthesized)
acgtttttctgttgggcattgactagattgtttgcaaaagtttcgcatcaaaaacaacaacaacaaaaaaccaaacaactctccttgatctatactttgagaattgttgatttctttttt

SEQ ID NO: 102413 - DNA, 120 bp, Artificial Sequence
  ENSG00000092969_11 (sequence is synthesized)
ttattctgacttttaaaaacaacttttttttccacttttttaaaaaatgcactactgtgtgctgagcgcttttctgatcctgcatctggtcacggtcgcgctcagcctgtctacctgcag

SEQ ID NO: 102414 - DNA, 120 bp, Artificial Sequence
  ENSG00000092969_12 (sequence is synthesized)
cacactcgatatggaccagttcatgcgcaagaggatcgaggcgatccgcgggcagatcctgagcaagctgaagctcaccagtcccccagaagactatcctgagcccgaggaagtcccccc

SEQ ID NO: 102415 - DNA, 120 bp, Artificial Sequence
  ENSG00000092969_13 (sequence is synthesized)
ggaggtgatttccatctacaacagcaccagggacttgctccaggagaaggcgagccggagggcggccgcctgcgagcgcgagaggagcgacgaagagtactacgccaaggaggtttacaa

SEQ ID NO: 102416 - DNA, 120 bp, Artificial Sequence
  ENSG00000092969_14 (sequence is synthesized)
aatagacatgccgcccttcttcccctccgaaaatgccatcccgcccactttctacagaccctacttcagaattgttcgatttgacgtctcagcaatggagaagaatgcttccaatttggt

SEQ ID NO: 102417 - DNA, 120 bp, Artificial Sequence
  ENSG00000092969_15 (sequence is synthesized)
gaaagcagagttcagagtctttcgtttgcagaacccaaaagccagagtgcctgaacaacggattgagctatatcagattctcaagtccaaagatttaacatctccaacccagcgctacat

SEQ ID NO: 102418 - DNA, 120 bp, Artificial Sequence
  ENSG00000092969_16 (sequence is synthesized)
cgacagcaaagttgtgaaaacaagagcagaaggcgaatggctctccttcgatgtaactgatgctgttcatgaatggcttcaccataaagacaggaacctgggatttaaaataagcttaca

SEQ ID NO: 102419 - DNA, 120 bp, Artificial Sequence
  ENSG00000092969_17 (sequence is synthesized)
ctgtccctgctgcacttttgtaccatctaataattacatcatcccaaataaaagtgaagaactagaagcaagatttgcaggtattgatggcacctccacatataccagtggtgatcagaa

SEQ ID NO: 102420 - DNA, 120 bp, Artificial Sequence
  ENSG00000092969_18 (sequence is synthesized)
aactataaagtccactaggaaaaaaaacagtgggaagaccccacatctcctgctaatgttattgccctcctacagacttgagtcacaacagaccaaccggcggaagaagcgtgctttgga

SEQ ID NO: 102421 - DNA, 120 bp, Artificial Sequence
  ENSG00000092969_19 (sequence is synthesized)
tgcggcctattgctttagaaatgtgcaggataattgctgcctacgtccactttacattgatttcaagagggatctagggtggaaatggatacacgaacccaaagggtacaatgccaactt

SEQ ID NO: 102422 - DNA, 120 bp, Artificial Sequence
  ENSG00000092969_20 (sequence is synthesized)
ctgtgctggagcatgcccgtatttatggagttcagacactcagcacagcagggtcctgagcttatataataccataaatccagaagcatctgcttctccttgctgcgtgtcccaagattt

SEQ ID NO: 102423 - DNA, 120 bp, Artificial Sequence
  ENSG00000092969_21 (sequence is synthesized)
agaacctctaaccattctctactacattggcaaaacacccaagattgaacagctttctaatatgattgtaaagtcttgcaaatgcagctaaaattcttggaaaagtggcaagaccaaaat

SEQ ID NO: 102424 - DNA, 120 bp, Artificial Sequence
  ENSG00000092969_22 (sequence is synthesized)
gacaatgatgatgataatgatgatgacgacgacaacgatgatgcttgtaacaagaaaacataagagagccttggttcatcagtgttaaaaaatttttgaaaaggcggtactagttcagac

SEQ ID NO: 102425 - DNA, 120 bp, Artificial Sequence
  ENSG00000092969_23 (sequence is synthesized)
actttggaagtttgtgttctgtttgttaaaactggcatctgacacaaaaaaagttgaaggccttattctacatttcacctactttgtaagtgagagagacaagaagcaaattttttttaa

SEQ ID NO: 102426 - DNA, 120 bp, Artificial Sequence
  ENSG00000092969_24 (sequence is synthesized)
taccgttcctatcccgcgcctcacttgatttttctgtattgctatgcaataggcacccttcccattcttactcttagagttaacagtgagttatttattgtgtgttactatataatgaac

SEQ ID NO: 102427 - DNA, 120 bp, Artificial Sequence
  ENSG00000092969_25 (sequence is synthesized)
gtttcattgcccttggaaaataaaacaggtgtataaagtggagaccaaatactttgccagaaactcatggatggcttaaggaacttgaactcaaacgagccagaaaaaaagaggtcatat

SEQ ID NO: 102428 - DNA, 120 bp, Artificial Sequence
  ENSG00000092969_26 (sequence is synthesized)
taatgggatgaaaacccaagtgagttattatatgaccgagaaagtctgcattaagataaagaccctgaaaacacatgttatgtatcagctgcctaaggaagcttcttgtaaggtccaaaa

SEQ ID NO: 102429 - DNA, 120 bp, Artificial Sequence
  ENSG00000092969_27 (sequence is synthesized)
actaaaaagactgttaataaaagaaactttcagtcagaataagtctgtaagtttttttttttctttttaattgtaaatggttctttgtcagtttagtaaaccagtgaaatgttgaaatgt

SEQ ID NO: 102430 - DNA, 120 bp, Artificial Sequence
  ENSG00000092969_28 (sequence is synthesized)
tttgacatgtactggtcaaacttcagaccttaaaatattgctgtatagctatgctataggttttttcctttgttttggtatatgtaaccatacctatattattaaaatagatggatatag

SEQ ID NO: 102431 - DNA, 120 bp, Artificial Sequence
  ENSG00000092969_29 (sequence is synthesized)
aagccagcataattgaaaacacatctgcagatctcttttgcaaactattaaatcaaaacattaactactttatgtgtaatgtgtaaatttttaccatattttttatattctgtaataatg

SEQ ID NO: 102432 - DNA, 120 bp, Artificial Sequence
  ENSG00000092969_30 (sequence is synthesized)
tcaactatgatttagattgacttaaatttgggctctttttaatgatcactcacaaatgtatgtttcttttagctggccagtacttttgagtaaagcccctatagtttgacttgcactaca

SEQ ID NO: 102433 - DNA, 120 bp, Artificial Sequence
  ENSG00000092969_31 (sequence is synthesized)
aatgcattttttttttaataacatttgccctacttgtgctttgtgtttctttcattattatgacataagctacctgggtccacttgtcttttcttttttttgtttcacagaaaagatggg

SEQ ID NO: 102434 - DNA, 120 bp, Artificial Sequence
  ENSG00000092969_32 (sequence is synthesized)
ttcgagttcagtggtcttcatcttccaagcatcattactaaccaagtcagacgttaacaaatttttatgttaggaaaaggaggaatgttatagatacatagaaaattgaagtaaaatgtt

SEQ ID NO: 102435 - DNA, 120 bp, Artificial Sequence
  ENSG00000092969_33 (sequence is synthesized)
ttcattttagcaaggatttagggttctaactaaaactcagaatctttattgagttaagaaaagtttctctaccttggtttaatcaatatttttgtaaaatcctattgttattacaaagag

SEQ ID NO: 102436 - DNA, 120 bp, Artificial Sequence
  ENSG00000092969_34 (sequence is synthesized)
gacacttcataggaaacatctttttctttagtcaggtttttaatattcagggggaaattgaaagatatatattttagtcgatttttcaaaaggggaaaaaagtccaggtcagcataagtc

SEQ ID NO: 102437 - DNA, 120 bp, Artificial Sequence
  ENSG00000092969_35 (sequence is synthesized)
attttgtgtatttcactgaagttataaggtttttataaatgttctttgaaggggaaaaggcacaagccaatttttcctatgatcaaaaaattctttctttcctctgagtgagagttatct

SEQ ID NO: 102438 - DNA, 120 bp, Artificial Sequence
  ENSG00000092969_36 (sequence is synthesized)
atatctgaggctaaagtttaccttgctttaataaataatttgccacatcattgcagaagaggtatcctcatgctggggttaatagaatatgtcagtttatcacttgtcgcttatttagct

SEQ ID NO: 102439 - DNA, 120 bp, Artificial Sequence
  ENSG00000092969_37 (sequence is synthesized)
ttaaaataaaaattaataggcaaagcaatggaatatttgcagtttcacctaaagagcagcataaggaggcgggaatccaaagtgaagttgtttgatatggtctacttcttttttggaatt

SEQ ID NO: 102440 - DNA, 120 bp, Artificial Sequence
  ENSG00000092969_38 (sequence is synthesized)
tcctgaccattaattaaagaattggatttgcaagtttgaaaactggaaaagcaagagatgggatgccataatagtaaacagcccttgtgttggatgtaacccaatcccagatttgagtgt

SEQ ID NO: 102441 - DNA, 120 bp, Artificial Sequence
  ENSG00000092969_39 (sequence is synthesized)
gtgttgattatttttttgtcttccacttttctattatgtgtaaatcacttttatttctgcagacattttcctctcagataggatgacattttgttttgtattattttgtctttcctcatg

SEQ ID NO: 102442 - DNA, 120 bp, Artificial Sequence
  ENSG00000092969_40 (sequence is synthesized)
aatgcactgataatattttaaatgctctattttaagatctcttgaatctgttttttttttttttaatttgggggttctgtaaggtctttatttcccataagtaaatattgccatgggagg

SEQ ID NO: 102443 - DNA, 120 bp, Artificial Sequence
  ENSG00000092969_41 (sequence is synthesized)
ggggtggaggtggcaaggaaggggtgaagtgctagtatgcaagtgggcagcaattatttttgtgttaatcagcagtacaatttgatcgttggcatggttaaaaaatggaatataagatta

SEQ ID NO: 102444 - DNA, 120 bp, Artificial Sequence
  ENSG00000092969_42 (sequence is synthesized)
gctgttttgtattttgatgaccaattacgctgtattttaacacgatgtatgtctgtttttgtggtgctctagtggtaaataaattatttcgatgatatgtggatgtctttttcctatcag

SEQ ID NO: 102445 - DNA, 120 bp, Artificial Sequence
  ENSG00000092969_43 (sequence is synthesized)
taccatcatcgagtctagaaaacacctgtgatgcaataagactatctcaagctggaaaagtcataccacctttccgattgccctctgtgctttctcccttaaggacagtcacttcagaag

SEQ ID NO: 102446 - DNA, 120 bp, Artificial Sequence
  ENSG00000092969_44 (sequence is synthesized)
tcatgctttaaagcacaagagtcaggccatatccatcaaggatagaagaaatccctgtgccgtctttttattcccttatttattgctatttggtaattgtttgagatttagtttccatcc

SEQ ID NO: 102447 - DNA, 120 bp, Artificial Sequence
  ENSG00000092969_45 (sequence is synthesized)
agcttgactgccgaccagaaaaaatgcagagagatgtttgcaccatgctttggctttctggttctatgttctgccaacgccagggccaaaagaactggtctagacagtatcccctgtagc

SEQ ID NO: 102448 - DNA, 120 bp, Artificial Sequence
  ENSG00000092969_46 (sequence is synthesized)
cccataacttggatagttgctgagccagccagatataacaagagccacgtgctttctggggttggttgtttgggatcagctacttgcctgtcagtttcactggtaccactgcaccacaaa

SEQ ID NO: 102449 - DNA, 120 bp, Artificial Sequence
  ENSG00000092969_47 (sequence is synthesized)
caaaaaaacccaccctatttcctccaatttttttggctgctacctacaagaccagactcctcaaacgagttgccaatctcttaataaataggattaataaaaaaagtaattgtgactcaa

SEQ ID NO: 102450 - DNA, 120 bp, Artificial Sequence
  ENSG00000092969_48 (sequence is synthesized)
catgaatggcttcaccataaaggttacaagccactctctcttttcctcccaagatgttcagtatccctaagttactttaaattgattgcagatttaagggtatagacacacatacaaatg

SEQ ID NO: 102451 - DNA, 120 bp, Artificial Sequence
  ENSG00000092978_0 (sequence is synthesized)
gtcggcttccggaagctcatctcaaaatgctgaactgctctttggaagtcgccggtgctgttgtagttggagtctgttcacgggcctgagcttcgaggccaggctcccgggtgtcgttaa

SEQ ID NO: 102452 - DNA, 120 bp, Artificial Sequence
  ENSG00000092978_1 (sequence is synthesized)
tgttcggggccgccgggcgccaaccgatcggagctccagcagccgggaacagctggcatttcagtagaaccatggaggagctggttcatgaccttgtctcagcattggaagagagctcag

SEQ ID NO: 102453 - DNA, 120 bp, Artificial Sequence
  ENSG00000092978_2 (sequence is synthesized)
agcaagctcgaggtggatttgctgaaacaggagaccattctcgaagtatatcttgccctctgaaacgccaggcaaggaaaaggagagggagaaaacggaggtcgtataatgtgcatcacc

SEQ ID NO: 102454 - DNA, 120 bp, Artificial Sequence
  ENSG00000092978_3 (sequence is synthesized)
cgtgggagactggtcactgcttaagtgaaggctctgattctagtttagaagaaccaagcaaggactatagagagaatcacaataataataaaaaagatcacagtgactctgatgaccaaa

SEQ ID NO: 102455 - DNA, 120 bp, Artificial Sequence
  ENSG00000092978_4 (sequence is synthesized)
tgttagtagcaaagcgcaggccgtcatcaaacttaaataataatgttcgagggaaaagacctctatggcatgagtctgattttgctgtggacaatgttgggaatagaactctgcgcagga

SEQ ID NO: 102456 - DNA, 120 bp, Artificial Sequence
  ENSG00000092978_5 (sequence is synthesized)
ggagaaaggtaaaacgcatggcagtagatctcccacaggacatctctaacaaacggacaatgacccagccacctgagggttgtagagatcaggacatggacagtgatagagcctaccagt

SEQ ID NO: 102457 - DNA, 120 bp, Artificial Sequence
  ENSG00000092978_6 (sequence is synthesized)
atcaagaatttaccaagaacaaagtcaaaaaaagaaagttgaaaataatcagacaaggaccaaaaatccaagatgaaggagtagttttagaaagtgaggaaacgaaccagaccaataagg

SEQ ID NO: 102458 - DNA, 120 bp, Artificial Sequence
  ENSG00000092978_7 (sequence is synthesized)
acaaaatggaatgtgaagagcaaaaagtctcagatgagctcatgagtgaaagtgattccagcagtctcagcagcactgatgctggattgtttaccaatgatgagggaagacaaggtgatg

SEQ ID NO: 102459 - DNA, 120 bp, Artificial Sequence
  ENSG00000092978_8 (sequence is synthesized)
atgaacagagtgactggttctacgaaaaggaatcaggtggagcatgtggtatcactggagttgtgccctggtgggaaaaggaagatcctactgagctagacaaaaatgtaccagatcctg

SEQ ID NO: 102460 - DNA, 120 bp, Artificial Sequence
  ENSG00000092978_9 (sequence is synthesized)
tctttgaaagtatcttaactggttcttttccccttatgtcacacccaagcagaagaggtttccaagctagactcagtcgccttcatggaatgtcttcaaagaatattaaaaaatctggag

SEQ ID NO: 102461 - DNA, 120 bp, Artificial Sequence
  ENSG00000092978_10 (sequence is synthesized)
ggactccaacttcaatggtacccattcctggcccagtgggtaacaagagaatggttcatttttccccggattctcatcaccatgaccattggtttagccctggggctaggacagagcatg

SEQ ID NO: 102462 - DNA, 120 bp, Artificial Sequence
  ENSG00000092978_11 (sequence is synthesized)
accagcatcagcttctgagagataatcgagctgaaagaggacacaagaaaaattgttctgtgagaacagccagcaggcaaacaagcatgcatttaggatccttatgcacgggagatatca

SEQ ID NO: 102463 - DNA, 120 bp, Artificial Sequence
  ENSG00000092978_12 (sequence is synthesized)
aacggagaagaaaagctgcacctttgcctggacctactactgcaggatttgtaggtgaaaatgcccagccaatcctagaaaataatattggaaaccgaatgcttcagaatatgggctgga

SEQ ID NO: 102464 - DNA, 120 bp, Artificial Sequence
  ENSG00000092978_13 (sequence is synthesized)
cgcctgggtcaggccttggacgagatggcaaggggatctctgagccaattcaagccatgcagaggccaaagggattaggacttggatttcctctaccaaaaagtacttccgcaactacta

SEQ ID NO: 102465 - DNA, 120 bp, Artificial Sequence
  ENSG00000092978_14 (sequence is synthesized)
cccccaatgcaggaaaatccgcctaagaaaagcaaagaagaaatgttttacagactttattcactatgtcccattgttctaaaatgataacatgacttctgtttttgaagcaaaaatcta

SEQ ID NO: 102466 - DNA, 120 bp, Artificial Sequence
  ENSG00000092978_15 (sequence is synthesized)
cattgcctcaaacacatcactctagcttccttactgcatacagtcctgccatagtgagagaaatgggatttcatcacaattcatggtgctaaaatgaaaacctctgcactttaatttttt

SEQ ID NO: 102467 - DNA, 120 bp, Artificial Sequence
  ENSG00000092978_16 (sequence is synthesized)
tcagtaatttccagctatttctaggtataaagagcagctcgtttctcttatttattttagtctcatgtgtcaatactttccgatgctttgcttaattcatgtatgtgtgcagtgctgcaa

SEQ ID NO: 102468 - DNA, 120 bp, Artificial Sequence
  ENSG00000092978_17 (sequence is synthesized)
tgcccagacaaacgtgagcacacccaccagtttctaaaatggaatagacaggaaaagattgtgttttatatcatccctatctattgtaacccaaaagacctaccatcgcatcagtgaagt

SEQ ID NO: 102469 - DNA, 120 bp, Artificial Sequence
  ENSG00000092978_18 (sequence is synthesized)
ccgaacacatctttgtttgaaaggcttgtcaatttcatattccttgaattggcttcttggtgaggattttctgacagagtgatacccatcaattttctatccttagacaatgtagtgtga

SEQ ID NO: 102470 - DNA, 120 bp, Artificial Sequence
  ENSG00000092978_19 (sequence is synthesized)
agttcacagttgacaaacaacaattaatgtttcccttggatgttttgacaaaaataaacctcatcgttgttatcaccagagtgccctctaccttactttaatgcagattttataaatttt

SEQ ID NO: 102471 - DNA, 120 bp, Artificial Sequence
  ENSG00000092978_20 (sequence is synthesized)
acctcatttagaacataaaataattattgaaagaaaaatgtattttttaaattcaccgtgattgaactgtaaattctattaatccagatgtacttctacctctgttttcccaaagattga

SEQ ID NO: 102472 - DNA, 120 bp, Artificial Sequence
  ENSG00000092978_21 (sequence is synthesized)
tattatttttaagatcaactcaagtgtagtaaacggatttaaaattttaatcattggagtaatttattacaatattgaatcaatttacatgaaaagttaaatggctctcccagaactcag

SEQ ID NO: 102473 - DNA, 120 bp, Artificial Sequence
  ENSG00000092978_22 (sequence is synthesized)
atttctggcaatgacccaacccatttagaaggtgaacaaaagaagtaaatggtactgatttgccctttctaggacccaagatgttactttaaaacctagcaaaagaggtcgtttgtatta

SEQ ID NO: 102474 - DNA, 120 bp, Artificial Sequence
  ENSG00000092978_23 (sequence is synthesized)
cgtgcctagtattgagctgtttctgagtcatttgcttcatagtatcagaaattctaaattgcttttagtttagaagatctttatttattatcttcattattaacaacttattatgatgat

SEQ ID NO: 102475 - DNA, 71 bp, Artificial Sequence
  ENSG00000092978_24 (sequence is synthesized)
ttttttgacagagtctggcctccccctcctgggttcaagtgattgttctgcctcagcctcccaaatagcag

SEQ ID NO: 102476 - DNA, 120 bp, Artificial Sequence
  ENSG00000092978_25 (sequence is synthesized)
ggttcaagtgattgttctgcctcagcctcccaaatagcagggattacaggcacccacgaccatacccggataatttttgtatttttagtatagacggagtttcaccatgttggccaggct

SEQ ID NO: 102477 - DNA, 79 bp, Artificial Sequence
  ENSG00000092978_26 (sequence is synthesized)
cagcccccagaagagtttttaaaaggtgttaaaggaggtttatgcacgtaacagacctttctcaggtggtcccctaaaa

SEQ ID NO: 102478 - DNA, 120 bp, Artificial Sequence
  ENSG00000092978_27 (sequence is synthesized)
ttatgcacgtaacagacctttctcaggtggtcccctaaaaaaaatcctgccaactagggaggggaagtccaacctgctatttgaaagccttcacggtttgccaaatgtacatttcttgag

SEQ ID NO: 102479 - DNA, 120 bp, Artificial Sequence
  ENSG00000092978_28 (sequence is synthesized)
aattatcttctttcccagggatattgtacctagaggacaggttggttagggaactatggacgaccagaagagatgttcttttgaagcattcttactggataaagtaaccccatggtatca

SEQ ID NO: 102480 - DNA, 120 bp, Artificial Sequence
  ENSG00000092978_29 (sequence is synthesized)
ttactttctacaagttttttacttacaaatttgccatttttttaactgatattttctaaatgctcattctgtctatgtagccggggggagattatatacaagttttaaaacttctttgtg

SEQ ID NO: 102481 - DNA, 120 bp, Artificial Sequence
  ENSG00000092978_30 (sequence is synthesized)
atagtgtattgtgctctggggtctattcaaaatttggtgtttgaggttttgttaatttgattgcctggagatctgctaaaatcctagaatctcaaaaagccaagtttgaagccactgaga

SEQ ID NO: 102482 - DNA, 120 bp, Artificial Sequence
  ENSG00000092978_31 (sequence is synthesized)
gcaaacaatgaggtcattgttagcctggttccacactcctgaggacttggctgttctttttcaccttattatgttctaatggaagtaaaaaccctcatagtgaagaagagcagtatatac

SEQ ID NO: 102483 - DNA, 120 bp, Artificial Sequence
  ENSG00000092978_32 (sequence is synthesized)
accagactagtgtataggaacttcttcattaaatattgcagtccttatgagtgctctttattgttgctgttctggacaggtacaaatcttctgaagcaacttctgtgggatgttaactta

SEQ ID NO: 102484 - DNA, 120 bp, Artificial Sequence
  ENSG00000092978_33 (sequence is synthesized)
gcttctctaacacctaaaaaaattcttctttgtattttcagctaatagaagacagttcttcttcatcttgacacctagagccctctatgtgattcacagaggacttaaaatacttcttac

SEQ ID NO: 102485 - DNA, 120 bp, Artificial Sequence
  ENSG00000092978_34 (sequence is synthesized)
tctgttgaagtgtttaattgtacagaatatatgtactctacagtatatgtgaatcagcactcaaagcagagaagtgataacatcccaagcttcccccatacttctactgacatgccctca

SEQ ID NO: 102486 - DNA, 120 bp, Artificial Sequence
  ENSG00000092978_35 (sequence is synthesized)
gtctttaagaaaactcagtacagacctgatgttctggttgtacctgaacttaattggagaaacaaacgcaattaaaatacgaattttttagtgcaaatcaaatgtctttcaccatctgaa

SEQ ID NO: 102487 - DNA, 120 bp, Artificial Sequence
  ENSG00000092978_36 (sequence is synthesized)
gcccactaatttgtcttttatatatagttaattttttgccagttacaacgtccatagaaccccaagatttagaatgtatcatttatatttcctctaaaaggtagtaagatatttcttctg

SEQ ID NO: 102488 - DNA, 120 bp, Artificial Sequence
  ENSG00000092978_37 (sequence is synthesized)
ctgttttgtgaagccactcttctacagtatctgtagccttatagcaaattaattggttgtactaaaaattttagagactgcataggtctcccttttctatcctaattacctgcaatagcc

SEQ ID NO: 102489 - DNA, 120 bp, Artificial Sequence
  ENSG00000092978_38 (sequence is synthesized)
tagagacgctgagcatgattacattagcaacttgactgtttaaaaaatttgttatacttgataatgaccagactgtgtgctggagtcatttgtttccttcttttctgctccccgaataca

SEQ ID NO: 102490 - DNA, 120 bp, Artificial Sequence
  ENSG00000092978_39 (sequence is synthesized)
ctatttaatttggttacttttatttttaaactatatggcacccttttaaataaacattcattgctaattaaaatctgccaataaattggtctcagcatttaaataccatatattttataa

SEQ ID NO: 102491 - DNA, 120 bp, Artificial Sequence
  ENSG00000092978_40 (sequence is synthesized)
ctcatactgtggctatcaaacagaagttaacacagtaggggtaaagatatacataatgtgtacctataggtgtatttataatgcctgtgtgcagtatacagacataattacaaaatactg

SEQ ID NO: 102492 - DNA, 120 bp, Artificial Sequence
  ENSG00000092978_41 (sequence is synthesized)
cattttattaatgtttattttaatattgagaattggcattcttgtaaattgaactgacaattgcttctattcagtacactttattttgagcagatatttccgaaaagagaaaaaatcact

SEQ ID NO: 102493 - DNA, 120 bp, Artificial Sequence
  ENSG00000092978_42 (sequence is synthesized)
gttgacatgctttttaaaactgttttcacctgtattttgtctttcaaaaagaaaagtgatctaagttggcattgtaaagaaattgttagcaaagaatatttttttttattttttcttttg

SEQ ID NO: 102494 - DNA, 120 bp, Artificial Sequence
  ENSG00000092978_43 (sequence is synthesized)
gtagaaagtcatgttaatagtacaacaaagaatcaaagaataaaacataatgtttaagaacattatttataagtagtcattgtctttgtgctttaaatgtttcccttttaccttagagtt

SEQ ID NO: 102495 - DNA, 120 bp, Artificial Sequence
  ENSG00000092978_44 (sequence is synthesized)
attttttaaaagttgaaagtactttaaaaattggtttaaatgagtacccattgacaattatcatttaatagtgcagttaagttcagcgaaaaatttcaatatctcaaaaaaattagagaa

SEQ ID NO: 102496 - DNA, 120 bp, Artificial Sequence
  ENSG00000092978_45 (sequence is synthesized)
aaatattggtaaatgtatttgattcacaaatgtattcatagccgattgtgagctgctctaccacattttcctgtttttattgtttctgtgaagcttgattagactaacttgcttaaggtc

SEQ ID NO: 102497 - DNA, 120 bp, Artificial Sequence
  ENSG00000092978_46 (sequence is synthesized)
tctttcccctcaaggattctgtgattctaatgtaacaaggtacacacgctctctctgaccacttaaagtatcagagttcaaatctgttacaatcactccatttccttttggaaagttgtg

SEQ ID NO: 102498 - DNA, 120 bp, Artificial Sequence
  ENSG00000092978_47 (sequence is synthesized)
cctctcataaagctgcttggacattttaagtgttttgtaatatgcattgaagtgttgagttttgtttgctgtaagaggcatttcactatgttgattaaacttatcttttctcccaaaaaa

SEQ ID NO: 102499 - DNA, 120 bp, Artificial Sequence
  ENSG00000092978_48 (sequence is synthesized)
gtctcccttcaggagagtagatcagctttatgagaaaaaatacaaatccccgctcattttaaaaggtgttaattatgtcaacgattaaatacactgaccaaataaatgcgtgatccttaa

SEQ ID NO: 102500 - DNA, 120 bp, Artificial Sequence
  ENSG00000092978_49 (sequence is synthesized)
gattgtatcttcgtttggcctaagtccagcaatctgaaagttggaaggtggagaccaaggcttagagaagttaagtactttgcctaaagttacacaggttgtaaatggtaaagctattat

SEQ ID NO: 102501 - DNA, 120 bp, Artificial Sequence
  ENSG00000092978_50 (sequence is synthesized)
tggaacctagtgactttttagttactggcccagctgggattagaacccagctctatcctgtattattatttccaagacttttatttttgttggggttaattgctaatattctgtacaact

SEQ ID NO: 102502 - DNA, 120 bp, Artificial Sequence
  ENSG00000092978_51 (sequence is synthesized)
caaagggtcataatgtgttgtaatgatgctataattaagttgtggtaaatgatagcatttgtaggttttataaccagaattgattcataaaatgaatacagtcccagcagtttatgttaa

SEQ ID NO: 102503 - DNA, 120 bp, Artificial Sequence
  ENSG00000092978_52 (sequence is synthesized)
cataattaaatggaaatgtaattctaactcagtttgcttattaaattgaaaattaccaggttatgagcacttttacagttctgtcaaaattggtctaagtctagaattacatgaaacatc

SEQ ID NO: 102504 - DNA, 120 bp, Artificial Sequence
  ENSG00000092978_53 (sequence is synthesized)
tctttcctctgcagccattggtttagccctggggctaggacagagcatgaccaggtcactaataaggggattgtatcttcgtttggcctaagtccagcaatctgaaagttggaagcatca

SEQ ID NO: 102505 - DNA, 120 bp, Artificial Sequence
  ENSG00000092978_54 (sequence is synthesized)
gcttctgagagataatcgagctgaaagaggacacaagaaaaattgttctgtgagaacagccagcaggtaagcaattcaaaatcgctttttattcattcattttctttttttctatgccta

SEQ ID NO: 102506 - DNA, 120 bp, Artificial Sequence
  ENSG00000092978_55 (sequence is synthesized)
taagaatgtaatgaattgttgttaggttgcctttggttctaaaaagtcaccttaaaatattttatgtattgtttattggaatctattttaggattacgagcaatgaataaaaagatattt

SEQ ID NO: 102507 - DNA, 120 bp, Artificial Sequence
  ENSG00000092978_56 (sequence is synthesized)
acttcaatggctacaaactggaccagtgagattcccctataaaccaaatcttctaatgctaataaattagttacgttttgaacatctggggaatgacattcgagggaacctggctcctgt

SEQ ID NO: 102508 - DNA, 120 bp, Artificial Sequence
  ENSG00000092978_57 (sequence is synthesized)
cctcttccctggaggaatatcattgaagtgagagcctctttgatgaaaagatggggctgtttttgctggaggactggtattcttccttttagtcagaagtgaacctgactggggaggctt

SEQ ID NO: 102509 - DNA, 120 bp, Artificial Sequence
  ENSG00000092978_58 (sequence is synthesized)
tctagggatttaggttggcccagggtggatagaaactactgtaaattatatatttttctcttttatggttttttttttacattgaatccatttatgtatacttgctttgccaaaatgcta

SEQ ID NO: 102510 - DNA, 120 bp, Artificial Sequence
  ENSG00000092978_59 (sequence is synthesized)
aaataaaaatcatgatgcattgacatttatggttcatttttagagaagtcttatataaccagcattatttaaaatatttgcattttactcagggtattttaacaagggctaagatgagta

SEQ ID NO: 102511 - DNA, 120 bp, Artificial Sequence
  ENSG00000092978_60 (sequence is synthesized)
gtaggtaaggttgataatctttgctggagtttgtattttgttcagcttcctttctacttgggtaatctgcttgtattgcaaactcattgtattttatagtatagctttcattgtactgca

SEQ ID NO: 102512 - DNA, 120 bp, Artificial Sequence
  ENSG00000092978_61 (sequence is synthesized)
aaaatcatcctcgttttaaattagccacagtgataactagtctgcactagtagaatcatttaccttttaaattatctgctttgtctgatacctgaaacacatcaaaattattattttggt

SEQ ID NO: 102513 - DNA, 120 bp, Artificial Sequence
  ENSG00000092978_62 (sequence is synthesized)
ttagagcttaatgaaacatgtgaaagctggtatttttaacaaatgctgtgtgattctgaatcatattgtcatgtttaaaagtgagagctgcttgtacatctttagaatggcagaccatat

SEQ ID NO: 102514 - DNA, 120 bp, Artificial Sequence
  ENSG00000092978_63 (sequence is synthesized)
gtgtcactgtgagtgtcagaaatacttgcatgagctcattttcaccaactggggggaaaatgtaatgtttctattgatggtataatttagacactataataagttcagccatttgagttc

SEQ ID NO: 102515 - DNA, 120 bp, Artificial Sequence
  ENSG00000092978_64 (sequence is synthesized)
ttaagcttcaataatgaaaaacaatgtgatttaatatgtgtatttttatattattgtatggattaattgttaattcagcatttaatggctaacttaaatatgattggaaaagaaacttca

SEQ ID NO: 102516 - DNA, 120 bp, Artificial Sequence
  ENSG00000092978_65 (sequence is synthesized)
ctaacttaaatatgattggaaaagaaacttcaagttgccattgcttttacctaaagtttttaaagtctgaaagatttcagcaaatgcattaaacaggaatgtgtgacatcttcttttaga

SEQ ID NO: 102517 - DNA, 120 bp, Artificial Sequence
  ENSG00000092978_66 (sequence is synthesized)
ttgcttgtctaatttggagagattaaaaatggtaaaatgcaactttgagtctctttacctttgcatatttaaaggtacaatagtgtggtgttggtaattgtaagtaagcttttctgtgct

SEQ ID NO: 102518 - DNA, 120 bp, Artificial Sequence
  ENSG00000092978_67 (sequence is synthesized)
atgtctttggagtgaaaattcatgttttttttctgaattacataaatgcttttgttttattttgtataatgactgtcttttagatctgaataagtcactttaaaaccttggcctatgaac

SEQ ID NO: 102519 - DNA, 120 bp, Artificial Sequence
  ENSG00000092978_68 (sequence is synthesized)
tttgccttatcaatcatgaatctagatgaatgctatctagttcttggttcagttttacctatttttatttttggttcactgcttgcttgagcatagctgggatttgtagcccattttcta

SEQ ID NO: 102520 - DNA, 120 bp, Artificial Sequence
  ENSG00000092978_69 (sequence is synthesized)
ggcttattgcaatctcactgtggtattttatagaagctattacaactgataggctagcttcatggtattgatgatacatggcttaaccatactaaaagctgctttccctctctaaattgt

SEQ ID NO: 102521 - DNA, 120 bp, Artificial Sequence
  ENSG00000092978_70 (sequence is synthesized)
aaaaaggtgatgaagtttcacttgatggagacatactatatatgtgtgtttatcatggaactagtgcattaggccataagctgtttttctggtctatgttttttgtatttaaaactttac

SEQ ID NO: 102522 - DNA, 120 bp, Artificial Sequence
  ENSG00000092978_71 (sequence is synthesized)
tgaagacaatggactccttcgggttttctttctttcaaccctgaattgtccttgtttgaatttttaagtactgtaatttttttttttcaataaaatctctgacttgggcaagaaaggtaa

SEQ ID NO: 102523 - DNA, 120 bp, Artificial Sequence
  ENSG00000093000_0 (sequence is synthesized)
gccggcgcgcttgcgcagtagctgaacgcgggcgtttctttcctccctttttttcgaattggttttgggggtagattcgagttacaaaatggccgcccggagcgtgttcggcgcggttcc

SEQ ID NO: 102524 - DNA, 120 bp, Artificial Sequence
  ENSG00000093000_1 (sequence is synthesized)
cccagctgtctctggctgaaccggcgctctcgcctccctgccgaacacagcgtgaggagcccccccagggatatggtgtttgagtctctgggcttgccgagcactaagtcctctgagttc

SEQ ID NO: 102525 - DNA, 120 bp, Artificial Sequence
  ENSG00000093000_2 (sequence is synthesized)
cgcagcgcagcaccggaagcggccgagcgcgctcagcccggcgacccctgcgggctccagacccctgcgccgctgcgccccgggtttcgccgcaaccaagacccagcgagtgcagcggcg

SEQ ID NO: 102526 - DNA, 120 bp, Artificial Sequence
  ENSG00000093000_3 (sequence is synthesized)
gccgccgaggaggttcgaaaacatggccaaaagaaatgccgagaaggaactgacagataggaattgggatcaagaagatgaagctgaagaggtgggaacattctccatggccagtgagga

SEQ ID NO: 102527 - DNA, 120 bp, Artificial Sequence
  ENSG00000093000_4 (sequence is synthesized)
agtcttgaagaatagagccataaagaaagcaaagcgcagaaatgttggatttgaatctgacactggaggagcctttaaaggttttaaaggtttggtggtaccttctggaggaggacgctt

SEQ ID NO: 102528 - DNA, 120 bp, Artificial Sequence
  ENSG00000093000_5 (sequence is synthesized)
ttctggatttggtagtggcgctggagggaagcctttggaaggactgtcgaatggaaacaacataaccagtgcccctcccttcgccagtgcaaaggcagcggcagatcccaaggtagcctt

SEQ ID NO: 102529 - DNA, 120 bp, Artificial Sequence
  ENSG00000093000_6 (sequence is synthesized)
tggttctcttgctgcaaatggccctaccaccttggttgataaagtttcaaatcccaaaactaatggggacagtcagcagccctcctcctctggccttgcttccagtaaagcttgtgtcgg

SEQ ID NO: 102530 - DNA, 120 bp, Artificial Sequence
  ENSG00000093000_7 (sequence is synthesized)
aaatgcctatcacaagcagttggccgccttgaactgctccgtgcgggattggatagtgaagcacgtgaatacaaaccccctctgtgatctgacacctatctttaaagactatgagaaata

SEQ ID NO: 102531 - DNA, 120 bp, Artificial Sequence
  ENSG00000093000_8 (sequence is synthesized)
tttagcaaacattgaacagcaacacgggaacagtggcaggaattctgaaagtgaatctaacaaagtggcagctgaaacacagtctccttccctttttggctcaacaaaattacagcaaga

SEQ ID NO: 102532 - DNA, 120 bp, Artificial Sequence
  ENSG00000093000_9 (sequence is synthesized)
gtcaacgtttttgtttcatggcaacaaaactgaagatacacctgacaagaagatggaggtggcatctgaaaagaaaacggacccatcatcactaggagcgacaagtgcctcatttaattt

SEQ ID NO: 102533 - DNA, 120 bp, Artificial Sequence
  ENSG00000093000_10 (sequence is synthesized)
cggcaagaaagttgatagctctgttttgggctcattaagctctgtccccctgactggattttctttctcccctggaaactccagtttatttggcaaagatactacccagagtaaaccagt

SEQ ID NO: 102534 - DNA, 120 bp, Artificial Sequence
  ENSG00000093000_11 (sequence is synthesized)
ctcttcaccatttcccactaaaccattggagggccaagcagaaggtgacagtggtgaatgcaaaggtggagatgaagaagagaatgatgagccacccaaagtagtagttaccgaagtaaa

SEQ ID NO: 102535 - DNA, 120 bp, Artificial Sequence
  ENSG00000093000_12 (sequence is synthesized)
agaagaagatgctttttactccaaaaagtgtaaactgttttacaagaaagacaatgagtttaaagagaaaggcataggtactctgcatttaaaacctacagcaaatcagaagacacagct

SEQ ID NO: 102536 - DNA, 120 bp, Artificial Sequence
  ENSG00000093000_13 (sequence is synthesized)
tttggtgcgggcagacaccaatttaggcaacatattgctgaacgttctgattccacccaatatgccatgtacgcgaacagggaagaataacgttcttatcgtctgtgttccaaatccacc

SEQ ID NO: 102537 - DNA, 120 bp, Artificial Sequence
  ENSG00000093000_14 (sequence is synthesized)
aattgacgagaagaatgccaccatgccagtcaccatgttgattcgggtaaaaaccagcgaggatgcagacgagttgcacaaaattttactggagaaaaaggatgcctgaacacgcaaagt

SEQ ID NO: 102538 - DNA, 120 bp, Artificial Sequence
  ENSG00000093000_15 (sequence is synthesized)
cggctgcagaattattgccaagttgctgctgcttccaccgccccttaaagttagtcagtttttcttctcttctttgacattctaagaacttatagataacttaaaacttttgtgaggaag

SEQ ID NO: 102539 - DNA, 120 bp, Artificial Sequence
  ENSG00000093000_16 (sequence is synthesized)
attaatgtggccaataaaacctttaaatgttaagtgtcaagaaactgcactctcccttcttaagaactgcctaaagtgtaaaatacatttgaatgcaatttttggaagattttttaatgt

SEQ ID NO: 102540 - DNA, 120 bp, Artificial Sequence
  ENSG00000093000_17 (sequence is synthesized)
tcgtttattaaactaaccctaagtgatttcttcaaggactgcaatcagggtatcaatttgctttcccaaaggctcttccaacccgtgggttttggggtccaccgccaccacgagagaggc

SEQ ID NO: 102541 - DNA, 120 bp, Artificial Sequence
  ENSG00000093000_18 (sequence is synthesized)
ttttgaacaggtgcctggctgtgttcagaaggaagctggcctgtgtgcttctctccggtgggctcagccgacgtgtgagacttgttctgttaccaaatgaaccgggctgccacgctgtga

SEQ ID NO: 102542 - DNA, 120 bp, Artificial Sequence
  ENSG00000093000_19 (sequence is synthesized)
caggcgtttgtcctctgctttatttttactttgaagctcaaatgcgagtactaagtgttcacctcagcgttcgaatcattggcctgtaaccctgtgggctgcttcacgagaattcaggac

SEQ ID NO: 102543 - DNA, 120 bp, Artificial Sequence
  ENSG00000093000_20 (sequence is synthesized)
ctgcattttcattctaaaaagaaatgaacagcttgtgaaggagttttttggcttcatagtttctattcatgaggtagtgttacttctttatccccctaaagacaaaatgaagataaaggg

SEQ ID NO: 102544 - DNA, 120 bp, Artificial Sequence
  ENSG00000093000_21 (sequence is synthesized)
cgcataggcatttgtaccatgatcaaccccacgcacatgaaaactgtgaccaagtgacgtgcctgggagctttgacacacgagccgtgtgaattcactaggaaacatgtaataaagtcat

SEQ ID NO: 102545 - DNA, 120 bp, Artificial Sequence
  ENSG00000093000_22 (sequence is synthesized)
ggaagagaaaatcgtgtgtaaactttgcctttaactttagaccgcagtatattataatacatttgatatctgaaatatctttacttttttaagagtaagattccatatgtctgtctggaa

SEQ ID NO: 102546 - DNA, 120 bp, Artificial Sequence
  ENSG00000093000_23 (sequence is synthesized)
gggagccatggttattcacacgaatatccctgtcacttctccagaggtgtcaggtaactaacacgagcattctttgaagactctgggcacatgaatgatacacagaattgaatgtttaaa

SEQ ID NO: 102547 - DNA, 120 bp, Artificial Sequence
  ENSG00000093000_24 (sequence is synthesized)
tttccactgagtcctcatgaatcatttgagactagtaccagctgatcttgtgtacaggctcagggtcagtgcccaagggctcccgcgtgtgtgttctgatcttcagtgcgtagcacattc

SEQ ID NO: 102548 - DNA, 120 bp, Artificial Sequence
  ENSG00000093000_25 (sequence is synthesized)
tccatttagaaaagagtggtcagaataattgtggacggtacagtggctttttaaaactacagtctttaggtgtaaggtttggcgccgggagcaattttatgatcaaatatgatgaactcc

SEQ ID NO: 102549 - DNA, 120 bp, Artificial Sequence
  ENSG00000093000_26 (sequence is synthesized)
taagtcactgaggtgtgattgggccaatgttggcatgaggttcttgctctacttccagtgttttgattccactgggagaatttggcctagtgtgtggctttggatgaatccgtgtagaga

SEQ ID NO: 102550 - DNA, 120 bp, Artificial Sequence
  ENSG00000093000_27 (sequence is synthesized)
gaggtgagcttgtcctgttacagatgctgtcagacatagcgatagtaggcacctagggaggaagtggccgttagttttacactgactttttaagaatggagaatgcacgtgggtttctgt

SEQ ID NO: 102551 - DNA, 120 bp, Artificial Sequence
  ENSG00000093000_28 (sequence is synthesized)
tgcggatgattcatagtaagcaagcggttgatgctgttaataccggccccacccgattgacattaagtttattcagcttttaaaaagatgaagaactaaggggaacaaatttaagtttgt

SEQ ID NO: 102552 - DNA, 120 bp, Artificial Sequence
  ENSG00000093000_29 (sequence is synthesized)
tgcaacttagccacacatgcttccctggtaccagctggaatcagcagctcacaggcatcttcaggacacttcagtgtatatgacacagtactttgttagcgtctgcgtgtgtatggaaag

SEQ ID NO: 102553 - DNA, 120 bp, Artificial Sequence
  ENSG00000093000_30 (sequence is synthesized)
ttgacaaaaaatggcatgaaaagatcatgattggattttcttttaaacctgcccttctgtaaaaaatagtttatatatttttaaattagtaggtatgtgtggcttccttttttcctaaca

SEQ ID NO: 102554 - DNA, 120 bp, Artificial Sequence
  ENSG00000093000_31 (sequence is synthesized)
ttcccagcaaatttttgctgctaagactatcactgttaaagtgaaaattacagggaaaaatgtgatgaatataccgtaactcaaaatgtgatattttcttaaaatcactcttttatgctt

SEQ ID NO: 102555 - DNA, 120 bp, Artificial Sequence
  ENSG00000093000_32 (sequence is synthesized)
taggaactggttggtctccactttgattattagtgtaaagagcctgagtatacgtggatttcattgtaaaatttaactccttgtcttttacttggggcacggggcccctggagggcttcc

SEQ ID NO: 102556 - DNA, 120 bp, Artificial Sequence
  ENSG00000093000_33 (sequence is synthesized)
ctactttccccactatgttaacaggtaattctgatttatgcgtttagtttgacttatttttaacaaaatattagaagttatgctttaaaatgtttaatgtggactgaaattttcatcttt

SEQ ID NO: 102557 - DNA, 120 bp, Artificial Sequence
  ENSG00000093000_34 (sequence is synthesized)
tgtttgagaatctatgaagtgtatcatatacgtggcctaaagcaaggtgtgtattttgttattctgaaattgttttgcatctggacaaatactaaatatcccagtggccttttttttttt

SEQ ID NO: 102558 - DNA, 120 bp, Artificial Sequence
  ENSG00000093000_35 (sequence is synthesized)
ttttttaaaacctgtgtatccatctcatccttttgcgcattcctagtaagcaaaaaaatttgttatgccatcttcattattcgaattacagactgaaaaaatatggccagtttttaaaga

SEQ ID NO: 102559 - DNA, 120 bp, Artificial Sequence
  ENSG00000093000_36 (sequence is synthesized)
agtttagattatgttttccatggaaggacaagtctgactgttcataggctgattttctttaagaggattattctgttttacaatttcaattctagatcacattttatatatgctgcatgc

SEQ ID NO: 102560 - DNA, 120 bp, Artificial Sequence
  ENSG00000093000_37 (sequence is synthesized)
caaaaaaaaaaaaaagagaaaactgccttttctggtgtggaggggaagaaaaactaatattctaccttactagtagagttcaaaacaagttttcactgagagccttttcagtaaaagtta

SEQ ID NO: 102561 - DNA, 120 bp, Artificial Sequence
  ENSG00000093000_38 (sequence is synthesized)
aacaagtttgttttttgagcatttgtcagttattctatttcagaagagtcaaaattcaagcacgatacattttgaaggctttgcaaactcctaaacccctgatgagtcctctcattctgg

SEQ ID NO: 102562 - DNA, 120 bp, Artificial Sequence
  ENSG00000093000_39 (sequence is synthesized)
aagtgggaatttgagtagatactgatttgtcccgtagtatggcagatgacagggaggtcttttccaagcaggcactcagaacacaggtcaccgtatgttctcagccagtaacaatcatac

SEQ ID NO: 102563 - DNA, 120 bp, Artificial Sequence
  ENSG00000093000_40 (sequence is synthesized)
tgaggacgaaggactctccgtttgatgcagacacaattgtaatggagatgtaaaacttcttagcaatcagatggataaattgtttgctttttactttaaataggaaattgttttctaaaa

SEQ ID NO: 102564 - DNA, 120 bp, Artificial Sequence
  ENSG00000093000_41 (sequence is synthesized)
ctaaaatacttgaattgtcagacaatataatctcagcttgtattagtttttgaatgctcccatcgaggaagtgtaacaatccatgaaatgtgaataaatgaaaagtaaacaaaatcccaa

SEQ ID NO: 102565 - DNA, 120 bp, Artificial Sequence
  ENSG00000093000_42 (sequence is synthesized)
atgctgttgtcactcacttgctttttggtaatagaaagtacacttacctaatgtgtgctcctccttcatacttcagtctgacactggaggagcctttaaaggttttaaaggtttggtggt

SEQ ID NO: 102566 - DNA, 71 bp, Artificial Sequence
  ENSG00000093000_43 (sequence is synthesized)
ttcgccgcaaccaagacccagcgagtgcagcggcggccgccgaggagatggagtcttgctctgtcacatag

SEQ ID NO: 102567 - DNA, 120 bp, Artificial Sequence
  ENSG00000093000_44 (sequence is synthesized)
gcagctttctgacgtggacatcagaagtgtggacatgagtgtgctttgagcgcactgtggaagagcagtggttgtccagcaaggtcctaggtgcctccgtggcctttcgtacagtgggca

SEQ ID NO: 102568 - DNA, 120 bp, Artificial Sequence
  ENSG00000093000_45 (sequence is synthesized)
tttctgggttgcacagcaatccctccgctgggagcaatgatatcaacaaatgctttcttaaaatacttattctttgatgtaggtcatgggagatagaaaaaaataagaaacgtcaggtct

SEQ ID NO: 102569 - DNA, 120 bp, Artificial Sequence
  ENSG00000093000_46 (sequence is synthesized)
ggaccttaaagagagcttatccagttgaggaaataagataaatatagacaaattcaagttgagtgacaatctggagaagaaaaatgagcaaagcaatacagaggtgggcgaagtggcatc

SEQ ID NO: 102570 - DNA, 120 bp, Artificial Sequence
  ENSG00000093000_47 (sequence is synthesized)
agattggaggaagaaaggaaaacgcaaggatcttctgagagtcttgtctgctccctgcgattgaggccttggtagggggagccctttcactatactagaggcattttaggtgtggatttt

SEQ ID NO: 102571 - DNA, 120 bp, Artificial Sequence
  ENSG00000093000_48 (sequence is synthesized)
ttgctagtatagtatattaaaatgattcattcctgtgctaagaaggatggaagatgagttgtaactcctaaattgaaataatgtgctgattattaagcagtcactccgcatctaagaact

SEQ ID NO: 102572 - DNA, 120 bp, Artificial Sequence
  ENSG00000093000_49 (sequence is synthesized)
gggtggagggtggggtgggatgacagcggcgacgcagccccggctgtttttgaagcggggcccgggccccaccgggctgcggcgtccgactcgagtgagactctcccctgcggccccgcc

SEQ ID NO: 102573 - DNA, 120 bp, Artificial Sequence
  ENSG00000093000_50 (sequence is synthesized)
ggggtgggatgacagcggcgacgcagccccggctgtttttgaagcggggcccgggccccaccgggctgcggcgtccgactcgagtgagactctcccctgcggccccgccggaggttcgaa

SEQ ID NO: 102574 - DNA, 120 bp, Artificial Sequence
  ENSG00000093000_51 (sequence is synthesized)
taaaatgtgtagagcaagcatatggtggttagtgttcttgtataaactttgacttgatctttattcatcggctttactgataactggttactaaattctactccttgaacacatactttt

SEQ ID NO: 102575 - DNA, 70 bp, Artificial Sequence
  ENSG00000093000_52 (sequence is synthesized)
taactggttactaaattctactccttgaacacatactttttgagcggtcacaaaaatagggcacagtagg

SEQ ID NO: 102576 - DNA, 120 bp, Artificial Sequence
  ENSG00000093000_53 (sequence is synthesized)
cagcctgggtgacagagcaagactgtcttggtgtggggggagatacagtaaaagcagaaagtatgaaggcagagtggcaaaaaaatctagatgatttaatcaaattaggctaaataaatg

SEQ ID NO: 102577 - DNA, 120 bp, Artificial Sequence
  ENSG00000093000_54 (sequence is synthesized)
acatagtatataaaagcgtttaccctgctgactcaaggttattaatatgtttttaaacagagcgcattcaggccaaattcatcctgtatttacttatttatagttttgagtcccaggata

SEQ ID NO: 102578 - DNA, 120 bp, Artificial Sequence
  ENSG00000093000_55 (sequence is synthesized)
atagtgtgtaaggaaacataaatgtgttagaagctgtaaacaaaatgatttttcattttcctttgtgttagaaatgtgactaagaagctagagattagaccatttaatgaacacccaagg

SEQ ID NO: 102579 - DNA, 120 bp, Artificial Sequence
  ENSG00000093000_56 (sequence is synthesized)
ttatatagcaagtaatgactaactgcttgctgtccatcctcagttttaacctgaaaagagtccactgcaaggatcctagtgcccggaggaggaggaagacggggcaggcctgcggtggag

SEQ ID NO: 102580 - DNA, 120 bp, Artificial Sequence
  ENSG00000093000_57 (sequence is synthesized)
cgggcagtagtggtagagaacagggggctgtgttgcagaaactccagggaggcatttttctttcccgtgggcttgactagggagtaataacatggtcgtgtcacttttgcccagggagct

SEQ ID NO: 102581 - DNA, 120 bp, Artificial Sequence
  ENSG00000093000_58 (sequence is synthesized)
gtgccggcctgtgacagaggtgtcctttgtccgtgtggcgcagtgaagacactgggttgtgccaccgtgttcttccttcagtgcaaagacggacagtgttgagagggctgacggttctga

SEQ ID NO: 102582 - DNA, 120 bp, Artificial Sequence
  ENSG00000093000_59 (sequence is synthesized)
gcgaggctgctggctctgagagaaacgctgtgtgggtgcagagacccgggctggagggaggacggaaggccactcctcacagtgagggcaagtgctccccgaggcctcccagttctcagg

SEQ ID NO: 102583 - DNA, 120 bp, Artificial Sequence
  ENSG00000093000_60 (sequence is synthesized)
gaaccagtcctgattttgtgctgtcctgttggctccctgtcttagatgtattaagttatttcagcatttaatgtttagcatattacagactcctttggtggagctatagcttctataatt

SEQ ID NO: 102584 - DNA, 120 bp, Artificial Sequence
  ENSG00000093000_61 (sequence is synthesized)
acgcagccccggctgtttttgaagcggggcccgggccccaccgggctgcggcgtccgactcgaatgaagaaactgaggcacaaaaattaaatataacttgcccaagttctcacagctaga

SEQ ID NO: 102585 - DNA, 120 bp, Artificial Sequence
  ENSG00000093000_62 (sequence is synthesized)
aaatggcaaaactgggatgccagcatcttttagtattttttgaaatactttatgctcactggggaaatacttccccagctcactgatctaatgacagacaggacacctgctgtttgagct

SEQ ID NO: 102586 - DNA, 120 bp, Artificial Sequence
  ENSG00000093000_63 (sequence is synthesized)
gtttttgaagcggggcccgggccccaccgggctgcggcgtccgactcgagtgagactctcccctgcggccccgccggaggtagggggctggcagggctgtcctggcgtggtcttctccgt

SEQ ID NO: 102587 - DNA, 120 bp, Artificial Sequence
  ENSG00000093000_64 (sequence is synthesized)
ttccttcctagcgattcctctcgagcttcctctccccctggccgcccctcgtctctcttctcttgggcgcattacctctctggcctgtcttactgcgttcccgggttattcatcacccat

SEQ ID NO: 102588 - DNA, 120 bp, Artificial Sequence
  ENSG00000093009_0 (sequence is synthesized)
gggctcttggtacctcagcgcgagcgccaggcgtccggccgccgtggctatgttcgtgtccgatttccgcaaagagttctacgaggtggtccagagccagagggtccttctcttcgtggc

SEQ ID NO: 102589 - DNA, 120 bp, Artificial Sequence
  ENSG00000093009_1 (sequence is synthesized)
ctcggacgtggatgctctgtgtgcgtgcaagatccttcaggccttgttccagtgtgaccacgtgcaatatacgctggttccagtttctgggtggcaagaacttgaaactgcatttcttga

SEQ ID NO: 102590 - DNA, 120 bp, Artificial Sequence
  ENSG00000093009_2 (sequence is synthesized)
gcataaagaacagtttcattattttattctcataaactgtggagctaatgtagacctattggatattcttcaacctgatgaagacactatattctttgtgtgtgacacccataggccagt

SEQ ID NO: 102591 - DNA, 120 bp, Artificial Sequence
  ENSG00000093009_3 (sequence is synthesized)
caatgtcgtcaatgtatacaacgatacccagatcaaattactcattaaacaagatgatgaccttgaagttcccgcctatgaagacatcttcagggatgaagaggaggatgaagagcattc

SEQ ID NO: 102592 - DNA, 120 bp, Artificial Sequence
  ENSG00000093009_4 (sequence is synthesized)
aggaaatgacagtgatgggtcagagccttctgagaagcgcacacggttagaagaggagatagtggagcaaaccatgcggaggaggcagcggcgagagtgggaggcccggagaagagacat

SEQ ID NO: 102593 - DNA, 120 bp, Artificial Sequence
  ENSG00000093009_5 (sequence is synthesized)
cctctttgactacgagcagtatgaatatcatgggacatcgtcagccatggtgatgtttgagctggcttggatgctgtccaaggacctgaatgacatgctgtggtgggccatcgttggact

SEQ ID NO: 102594 - DNA, 120 bp, Artificial Sequence
  ENSG00000093009_6 (sequence is synthesized)
aacagaccagtgggtgcaagacaagatcactcaaatgaaatacgtgactgatgttggtgtcctgcagcgccacgtttcccgccacaaccaccggaacgaggatgaggagaacacactctc

SEQ ID NO: 102595 - DNA, 120 bp, Artificial Sequence
  ENSG00000093009_7 (sequence is synthesized)
tgcaacaccagctataccgcagccaggttcaagctgtggtctgtgcatggacagaagcggctccaggagttccttgcagacatgggtcttcccctgaagcaggtgaagcagaagttccag

SEQ ID NO: 102596 - DNA, 120 bp, Artificial Sequence
  ENSG00000093009_8 (sequence is synthesized)
gccatggacatctccttgaaggagaatttgcgggaaatgattgaagagtctgcaaataaatttgggatgaaggacatgcgcgtgcagactttcagcattcattttgggttcaagcacaag

SEQ ID NO: 102597 - DNA, 120 bp, Artificial Sequence
  ENSG00000093009_9 (sequence is synthesized)
tttctggccagcgacgtggtctttgccaccatgtctttgatggagagccccgagaaggatggctcagggacagatcacttcatccaggctctggacagcctctccaggagtaacctggac

SEQ ID NO: 102598 - DNA, 120 bp, Artificial Sequence
  ENSG00000093009_10 (sequence is synthesized)
aagctgtaccatggcctggaactcgccaagaagcagctgcgagccacccagcagaccattgccagctgcctttgcaccaacctcgtcatctcccaggggcctttcctgtactgctctctc

SEQ ID NO: 102599 - DNA, 120 bp, Artificial Sequence
  ENSG00000093009_11 (sequence is synthesized)
atggagggcactccagatgtcatgctgttctctaggccggcatccctaagcctgctcagcaaacacctgctcaagtcctttgtgtgttcgacaaagaaccggcgctgcaaactgctgccc

SEQ ID NO: 102600 - DNA, 120 bp, Artificial Sequence
  ENSG00000093009_12 (sequence is synthesized)
ctggtgatggctgcccccctgagcatggagcatggcacagtgaccgtggtgggcatccccccagagaccgacagctcggacaggaagaacttttttgggagggcgtttgagaaggcagcg

SEQ ID NO: 102601 - DNA, 120 bp, Artificial Sequence
  ENSG00000093009_13 (sequence is synthesized)
gaaagcaccagctcccggatgctgcacaaccattttgacctctcagtaattgagctgaaagctgaggatcggagcaagtttctggacgcacttatttccctcctgtcctaggaatttgat

SEQ ID NO: 102602 - DNA, 120 bp, Artificial Sequence
  ENSG00000093009_14 (sequence is synthesized)
tcttccagaatgaccttcttatttatgtaactggctttcatttagattgtaagttatggacatgatttgagatgtagaagccattttttattaaataaaatgcttattttaggctccgtc

SEQ ID NO: 102603 - DNA, 120 bp, Artificial Sequence
  ENSG00000093009_15 (sequence is synthesized)
gcactacccagactgcctctgcttcagccatcgaggactcgggcggaactaagctacaaatccttcttcaaaccacaccaaaaacctattgcaaacgtaaatgctgccccattggagggt

SEQ ID NO: 102604 - DNA, 120 bp, Artificial Sequence
  ENSG00000093009_16 (sequence is synthesized)
agaggtgacgcttctttgggggcgggctggagttttctggccgtgaatggcagagcgctaatggccgcctccaatgtggcccaatcagaaagaaaggaaggctgggaactaagaagctat

SEQ ID NO: 102605 - DNA, 120 bp, Artificial Sequence
  ENSG00000093009_17 (sequence is synthesized)
acttacggagtctgtcatcttggctgtatgggctgtggcctctgcggtgcccattctcaggaggtgtgagacccatgaggaccggaggtggacaaggctagagaccacacccccccgctc

SEQ ID NO: 102606 - DNA, 120 bp, Artificial Sequence
  ENSG00000093009_18 (sequence is synthesized)
catccaatcatgttttcctgggtgcttggtttctatgcaggctgcatgtccttagtccctgcatgggaacagctcctgtggtgagcaggcccctgaggaaggccttgagcgggaatggag

SEQ ID NO: 102607 - DNA, 120 bp, Artificial Sequence
  ENSG00000093009_19 (sequence is synthesized)
gaggataatttattgagtttagaacctttgggccagtggctctgggagtgaacctgtggccgctgcattggagaagagctccaggttgttcgccggtcccatgagtgacaggacagcccc

SEQ ID NO: 102608 - DNA, 120 bp, Artificial Sequence
  ENSG00000093009_20 (sequence is synthesized)
actacccagactgcctctgcttcagccatcgaggactcgggcggaactaagctacaaatccttcttcaaaccacaccaaaaacctattgcaaacgtaaatgctgccccattggaaagaaa

SEQ ID NO: 102609 - DNA, 120 bp, Artificial Sequence
  ENSG00000093009_21 (sequence is synthesized)
gagtggagtgactgggcgctgttgggctctgggctctgagtgttgagctggggcccaccataccctgacggagggtgctctccgactccatagacaaagaaccggcgctgcaaactgctg

SEQ ID NO: 102610 - DNA, 80 bp, Artificial Sequence
  ENSG00000093010_0 (sequence is synthesized)
cggggacaccctggccaccgccgcgcggacaccctcacgaggacaccccggccgcgcggacacctaccgcggggacgccc

SEQ ID NO: 102611 - DNA, 120 bp, Artificial Sequence
  ENSG00000093010_1 (sequence is synthesized)
accccgcccgccacggcctgcgtccgccaccggaagcgccctcctaatccccgcagcgccaccgccattgccgccatcgtcgtggggcttctggggcagctagggctgcccgccgcgctg

SEQ ID NO: 102612 - DNA, 120 bp, Artificial Sequence
  ENSG00000093010_2 (sequence is synthesized)
cctgcgccggaccggggcgggtccagtcccgggcgggccgtcgcgggagagaaataacatctgctttgctgccgagctcagaggagaccccagacccctcccgcagccagagggctggag

SEQ ID NO: 102613 - DNA, 120 bp, Artificial Sequence
  ENSG00000093010_3 (sequence is synthesized)
cctgctcagaggtgctttgaagatgccggaggccccgcctctgctgttggcagctgtgttgctgggcctggtgctgctggtggtgctgctgctgcttctgaggcactggggctggggcct

SEQ ID NO: 102614 - DNA, 120 bp, Artificial Sequence
  ENSG00000093010_4 (sequence is synthesized)
gtgccttatcggctggaacgagttcatcctgcagcccatccacaacctgctcatgggtgacaccaaggagcagcgcatcctgaaccacgtgctgcagcatgcggagcccgggaacgcaca

SEQ ID NO: 102615 - DNA, 120 bp, Artificial Sequence
  ENSG00000093010_5 (sequence is synthesized)
gagcgtgctggaggccattgacacctactgcgagcagaaggagtgggccatgaacgtgggcgacaagaaaggcaagatcgtggacgccgtgattcaggagcaccagccctccgtgctgct

SEQ ID NO: 102616 - DNA, 120 bp, Artificial Sequence
  ENSG00000093010_6 (sequence is synthesized)
ggagctgggggcctactgtggctactcagctgtgcgcatggcccgcctgctgtcaccaggggcgaggctcatcaccatcgagatcaaccccgactgtgccgccatcacccagcggatggt

SEQ ID NO: 102617 - DNA, 120 bp, Artificial Sequence
  ENSG00000093010_7 (sequence is synthesized)
ggatttcgctggcgtgaaggacaaggtcacccttgtggttggagcgtcccaggacatcatcccccagctgaagaagaagtatgatgtggacacactggacatggtcttcctcgaccactg

SEQ ID NO: 102618 - DNA, 120 bp, Artificial Sequence
  ENSG00000093010_8 (sequence is synthesized)
gaaggaccggtacctgccggacacgcttctcttggaggaatgtggcctgctgcggaaggggacagtgctactggctgacaacgtgatctgcccaggtgcgccagacttcctagcacacgt

SEQ ID NO: 102619 - DNA, 120 bp, Artificial Sequence
  ENSG00000093010_9 (sequence is synthesized)
gcgcgggagcagctgctttgagtgcacacactaccaatcgttcctggaatacagggaggtggtggacggcctggagaaggccatctacaagggcccaggcagcgaagcagggccctgact

SEQ ID NO: 102620 - DNA, 120 bp, Artificial Sequence
  ENSG00000093010_10 (sequence is synthesized)
ctggtactgaaggtgccagacgtgctcctgctgaccttctgcggctccgggctgtgtcctaaatgcaaagcacacctcggccgaggcctgcgccctgacatgctaacctctctgaactgc

SEQ ID NO: 102621 - DNA, 120 bp, Artificial Sequence
  ENSG00000093010_11 (sequence is synthesized)
aacactggattgttcttttttaagactcaatcatgacttctttactaacactggctagctatattatcttatatactaatatcatgttttaaaaatataaaatagaaattaagaatctaa

SEQ ID NO: 102622 - DNA, 120 bp, Artificial Sequence
  ENSG00000093010_12 (sequence is synthesized)
atatttagatataactcgacttagtacatccttctcaactgccattcccctgctgcccttgacttgggcaccaaacattcaaagctccccttgacggacgctaacgctaagggcggggcc

SEQ ID NO: 102623 - DNA, 120 bp, Artificial Sequence
  ENSG00000093010_13 (sequence is synthesized)
cctagctggctgggttctgggtggcacgcctggcccactggcctcccagccacagtggtgcagaggtcagccctcctgcagctaggccaggggcacctgttagccccatggggacgactg

SEQ ID NO: 102624 - DNA, 120 bp, Artificial Sequence
  ENSG00000093010_14 (sequence is synthesized)
ccggcctgggaaacgaagaggagtcagccagcattcacacctttctgaccaagcaggcgctggggacaggtggaccccgcagcagcaccagcccctctgggccccatgtggcacagagtg

SEQ ID NO: 102625 - DNA, 120 bp, Artificial Sequence
  ENSG00000093010_15 (sequence is synthesized)
gaagcatctccttccctactccccactgggccttgcttacagaagaggcaatggctcagaccagctcccgcatccctgtagttgcctccctggcccatgagtgaggatgcagtgctggtt

SEQ ID NO: 102626 - DNA, 120 bp, Artificial Sequence
  ENSG00000093010_16 (sequence is synthesized)
tctgcccacctacacctagagctgtccccatctcctccaaggggtcagactgctagccacctcagaggctccaagggcccagttcccaggcccaggacaggaatcaaccctgtgctagct

SEQ ID NO: 102627 - DNA, 120 bp, Artificial Sequence
  ENSG00000093010_17 (sequence is synthesized)
gagttcacctgcaccgagaccagcccctagccaagattctactcctgggctcaaggcctggctagcccccagccagcccactcctatggatagacagaccagtgagcccaagtggacaag

SEQ ID NO: 102628 - DNA, 120 bp, Artificial Sequence
  ENSG00000093010_18 (sequence is synthesized)
tttggggccacccagggaccagaaacagagcctctgcaggacacagcagatgggcacctgggaccacctccacccagggccctgccccagacgcgcagaggcccgacacaagggagaagc

SEQ ID NO: 102629 - DNA, 120 bp, Artificial Sequence
  ENSG00000093010_19 (sequence is synthesized)
cagccacttgtgccagacctgagtggcagaaagcaaaaagttcctttgctgctttaatttttaaattttcttacaaaaatttaggtgtttaccaatagtcttattttggcttatttttaa

SEQ ID NO: 102630 - DNA, 120 bp, Artificial Sequence
  ENSG00000093010_20 (sequence is synthesized)
gcacccagggccagggagtgtgaccctgcaggctccacacaggactgccagaggcacacacctgctctgtctacccgagggcaccagagggcacgagaaggctggctccctggcgctgac

SEQ ID NO: 102631 - DNA, 120 bp, Artificial Sequence
  ENSG00000093010_21 (sequence is synthesized)
acgtcaggcaactgaggcacaaggctggcatttctgaaccttgcccctctgcaaacacaagggggcgatggtggcactccaagcaaaggggcgtgtgggtgctgcaggaggagcacagag

SEQ ID NO: 102632 - DNA, 120 bp, Artificial Sequence
  ENSG00000093010_22 (sequence is synthesized)
cccgcatgagcaggcagagtggagataacacggatcgctgtgtacactgtgtgctccggttgttgcatccgagggttgatcggatggtggttcccatccagatccaagtcctggcccctg

SEQ ID NO: 102633 - DNA, 120 bp, Artificial Sequence
  ENSG00000093010_23 (sequence is synthesized)
cctgtgctctgctctctgcctgctgggtcccctcaccaggcttctgtctggttcccaggctacctgcctggagggtcacaccaggaggatttcaaacaggtttcaagtggggtcacttgc

SEQ ID NO: 102634 - DNA, 120 bp, Artificial Sequence
  ENSG00000093010_24 (sequence is synthesized)
ccggtacctgccggacacgcttctcttggaggtgagccccaaccaggatggcatccgtgccagctgctgcccagagcccattcagtcagcctcagcctctccaaagagccaggcattcca

SEQ ID NO: 102635 - DNA, 120 bp, Artificial Sequence
  ENSG00000093010_25 (sequence is synthesized)
gtagagccctgtgtggacacagctcgctctggaggcaccacctgaggtctgggagtgtgggggactgaggaggccctgtggtgggtggagatgggtggggagctgggccaggggcctggc

SEQ ID NO: 102636 - DNA, 120 bp, Artificial Sequence
  ENSG00000093010_26 (sequence is synthesized)
cagaagtggggtgcacaccccagaccagacaccagggcagaaacggcacaggaccaaggagatggggtggggaagggccgctctgggcccagcctgctctcccccaagcaagccactgct

SEQ ID NO: 102637 - DNA, 120 bp, Artificial Sequence
  ENSG00000093010_27 (sequence is synthesized)
cgtgcaaagaaagcatgtgtctcctgcagatcttcctcctgaggccccatcttgtgcattcccccaacccagccccactggcgaggaccctgagtgccccgagtgaggctagacagcggg

SEQ ID NO: 102638 - DNA, 120 bp, Artificial Sequence
  ENSG00000093010_28 (sequence is synthesized)
tggggctgtcctcgcttccctggggggcgtggggcactggtggcccttcacagactgatgcttaaggagcctcacatcagtgacacactgccccatccctccctggtggtcagcgacact

SEQ ID NO: 102639 - DNA, 120 bp, Artificial Sequence
  ENSG00000093010_29 (sequence is synthesized)
gagtggctctgtgatcctccactgggcttgggacacccaccctcacggcctccccacctggtgctcgctcacctgcagctctcccagaaactggacactgctgttagcagccggactagg

SEQ ID NO: 102640 - DNA, 120 bp, Artificial Sequence
  ENSG00000093010_30 (sequence is synthesized)
agcacgaggggcacagcccccatgcctggctaggtagggccgctggaccctggacacggattggaaggaaccagcactagcagaagcctgaggtgtgaaagggcagagaatgttccagga

SEQ ID NO: 102641 - DNA, 120 bp, Artificial Sequence
  ENSG00000093010_31 (sequence is synthesized)
acaatgggagtcagggcacacaggactttgggcaggtgaggatgaggttagacctgtcttctggagctgggctcaggggctcatgcctgtaacccttgcactttgggaggctacggcagg

SEQ ID NO: 102642 - DNA, 87 bp, Artificial Sequence
  ENSG00000093010_32 (sequence is synthesized)
tcatgcctgtaacccttgcactttgggaggctacggcaggaggagcgcttgaggccaggagaaaaaatatatatatatattttagat

SEQ ID NO: 102643 - DNA, 79 bp, Artificial Sequence
  ENSG00000093010_33 (sequence is synthesized)
ccacctcttgggttcaagcgattagctgccacacccggctagttttttgtagtttagtagagatggggtttcaccacat

SEQ ID NO: 102644 - DNA, 120 bp, Artificial Sequence
  ENSG00000093010_34 (sequence is synthesized)
tgatgaccagattgggctcctgagtcccctggcgcaacccgagaagtccaggagcccaggcccctcactcatgcattccctggcccagactggaaggcagccgccctgctcaaggcctag

SEQ ID NO: 102645 - DNA, 120 bp, Artificial Sequence
  ENSG00000093010_35 (sequence is synthesized)
ttgtcctcctcccgggtggcgctttgttctacgtcttttcagctgacattgctaggacatttttttttttttctaaatgaaaacacatcatgattcatggtggtacttcctgctcaactc

SEQ ID NO: 102646 - DNA, 120 bp, Artificial Sequence
  ENSG00000093010_36 (sequence is synthesized)
cggaccttggggctgtcccctgacctcactgaccttgcagccgtgtggtgtccatactgtcacatgaaagccccctgctttctctgcagcatacaggctggaaacgaccgccacccacca

SEQ ID NO: 102647 - DNA, 120 bp, Artificial Sequence
  ENSG00000093010_37 (sequence is synthesized)
ccaggacagctgcaagccctgtgggactctccaggcccatcccagaggcatgtggggtcggataccagtgtttcaaggcacctgcctgcaaattgattttattatactttagatgtttga

SEQ ID NO: 102648 - DNA, 120 bp, Artificial Sequence
  ENSG00000093010_38 (sequence is synthesized)
acgggaggagcaagaacacagaacagagggggcaagacagctccaccaggagtcaggagtgaatcccctctgggaacgaggcactaggaagaagaacttccagcccaggagaaataacat

SEQ ID NO: 102649 - DNA, 120 bp, Artificial Sequence
  ENSG00000093072_0 (sequence is synthesized)
ttgggaaacccctacctgtctgtacctgtaggtcttttctctggggtctggaagaagaatccttcaatatcttgccttctggtaatctgagagcagggcgagaaaaggaagatcagagtt

SEQ ID NO: 102650 - DNA, 120 bp, Artificial Sequence
  ENSG00000093072_1 (sequence is synthesized)
ccacccttaaatctgtaggttttcactcccccactctcctttgcagtcccgtggagtctccatctgagccctttcctagtccaggcatcccgatgttggtggatggcccatctgagcggc

SEQ ID NO: 102651 - DNA, 120 bp, Artificial Sequence
  ENSG00000093072_2 (sequence is synthesized)
cagccctgtgcttcttgctgttggctgtggcaatgtctttcttcggctcagctctatccatagatgaaacacgggcgcatctgttgttgaaagaaaagatgatgcggctgggggggcggc

SEQ ID NO: 102652 - DNA, 120 bp, Artificial Sequence
  ENSG00000093072_3 (sequence is synthesized)
tggtgctgaacaccaaggaggagctggccaatgagaggctcatgacgctcaaaatcgctgagatgaaggaggccatgaggaccctgatattcccacccagcatgcactttttccaggcca

SEQ ID NO: 102653 - DNA, 120 bp, Artificial Sequence
  ENSG00000093072_4 (sequence is synthesized)
agcatctcattgagagaagtcaagtgtttaatattctaaggatgatgccaaaaggggctgccttgcacctccatgacattggcatcgtgactatggactggctggtgaggaatgtcacct

SEQ ID NO: 102654 - DNA, 120 bp, Artificial Sequence
  ENSG00000093072_5 (sequence is synthesized)
acaggcctcactgccacatctgtttcaccccaagggggatcatgcagttcagatttgctcacccaactccccgtccatcagaaaaatgttccaagtggattctgctggaggattatcgga

SEQ ID NO: 102655 - DNA, 120 bp, Artificial Sequence
  ENSG00000093072_6 (sequence is synthesized)
agcgggtgcagaacgtcactgagtttgatgacagcttgctgaggaatttcactctggtgacccagcacccggaggtgatttacacaaaccaaaatgttgtctggtcgaaatttgaaacca

SEQ ID NO: 102656 - DNA, 120 bp, Artificial Sequence
  ENSG00000093072_7 (sequence is synthesized)
tcttcttcaccatctctggtctcatccattacgcaccagtgttcagagactatgtcttccggagcatgcaggagttctacgaggacaacgtgctctacatggagatcagagccaggctgc

SEQ ID NO: 102657 - DNA, 120 bp, Artificial Sequence
  ENSG00000093072_8 (sequence is synthesized)
tgccggtgtatgagctcagtggagagcaccatgacgaagagtggtcagtgaagacttaccaggaagtagctcagaagtttgtggaaactcaccctgagtttattggaatcaaaatcattt

SEQ ID NO: 102658 - DNA, 120 bp, Artificial Sequence
  ENSG00000093072_9 (sequence is synthesized)
attcggatcacagatccaaagatgtggctgtcatcgcagaatccatccgaatggccatggggctccgaatcaagttccccacggtggtggcagggtttgacctggtggggcatgaggaca

SEQ ID NO: 102659 - DNA, 120 bp, Artificial Sequence
  ENSG00000093072_10 (sequence is synthesized)
ctggccactccttgcatgactacaaggaagctctgatgatccccgccaaggatggcgttaagctgccttacttcttccacgccggagaaacagactggcagggtacttccatagacagga

SEQ ID NO: 102660 - DNA, 120 bp, Artificial Sequence
  ENSG00000093072_11 (sequence is synthesized)
acattctggatgctctgatgctgaacactaccagaatcggccatggatttgctttgagcaaacaccccgcagtcaggacttactcctggaaaaaggacatccccatagaagtctgtccca

SEQ ID NO: 102661 - DNA, 120 bp, Artificial Sequence
  ENSG00000093072_12 (sequence is synthesized)
tctctaaccaggtgctgaaactggtgtctgacttgaggaaccaccctgtagccactctgatggccactgggcaccccatggtgatcagctctgatgacccagctatgtttggtgccaaag

SEQ ID NO: 102662 - DNA, 120 bp, Artificial Sequence
  ENSG00000093072_13 (sequence is synthesized)
gcttgtcctatgatttctatgaggtcttcatgggcattggggggatgaaggctgacctgaggaccctcaaacagctggccatgaactctatcaagtacagtaccctgttggagagtgaga

SEQ ID NO: 102663 - DNA, 120 bp, Artificial Sequence
  ENSG00000093072_14 (sequence is synthesized)
aaaatactttcatggaaatctggaagaagagatgggataagttcatagcagatgtggctacaaagtgaggagaagctagccagccctctacaagctgtcttcttgcacacgctgtcactt

SEQ ID NO: 102664 - DNA, 120 bp, Artificial Sequence
  ENSG00000093072_15 (sequence is synthesized)
cctctcactcgttcttgaatcagctccatgtgcccatgaaatcaatggcctctgtatggagcgaccctgtgagaagcacttggctggctgagcaaattcatcctctggaaatattctctc

SEQ ID NO: 102665 - DNA, 120 bp, Artificial Sequence
  ENSG00000093072_16 (sequence is synthesized)
gtcttctcctctctctgatctctgtgctgtttcctcaggactcagtcctgggctctcttctattctggtctctttatttttttatttttgtattttttcgagatggagttttgctcttgt

SEQ ID NO: 102666 - DNA, 120 bp, Artificial Sequence
  ENSG00000093072_17 (sequence is synthesized)
agtacaatggtgcgatctcagctcagtgcaacctccgccacccgggttcaggcaattctcttgcatcagcctcgcgagtagttggaattataggcatgtgccaccacacccagctgattt

SEQ ID NO: 102667 - DNA, 120 bp, Artificial Sequence
  ENSG00000093072_18 (sequence is synthesized)
tagagacaggttttcaccatgttggcgaggctggtatccaactcttgacctcaggtgatccactcgccccttggctcccaaagtgctggaattacaggcattagccaccatgcctggcct

SEQ ID NO: 102668 - DNA, 120 bp, Artificial Sequence
  ENSG00000093072_19 (sequence is synthesized)
catgcctggcctattctggtctctttaactctctcctctttatttctcttctctctctgtacacttttcctgggtggtctcatccattcctttgctttttcataccatttatttgttaat

SEQ ID NO: 102669 - DNA, 120 bp, Artificial Sequence
  ENSG00000093072_20 (sequence is synthesized)
gattcccacatttatttatgcacttggagagctcacaggaatctcagaaactgatgaggtacaattctgaaccctcagtctcttccctttaaacctttctttttctctactttaattttt

SEQ ID NO: 102670 - DNA, 120 bp, Artificial Sequence
  ENSG00000093072_21 (sequence is synthesized)
tatgttgcccaggctggtctccaactcaagtgatcctcctgccgcagtctcccgaagtgctgggattactgacatgagccaccacactcagccctttaaacctttccctggcctttccca

SEQ ID NO: 102671 - DNA, 120 bp, Artificial Sequence
  ENSG00000093072_22 (sequence is synthesized)
tccctggcctttcccatagctggtgaaggacacctccatccattccacgcagttgctcaaagcagaaattttcagtgcaagtcttgatgctgcgccgtcccccactccctacatcagaac

SEQ ID NO: 102672 - DNA, 120 bp, Artificial Sequence
  ENSG00000093072_23 (sequence is synthesized)
gcatccctcatctggactccagcggtggcttcttgatgctgcgcggtcccccactccctacatcagaatgcatcccgcatccagactccagcggtggtgctctacctgcacgctgttgcc

SEQ ID NO: 102673 - DNA, 120 bp, Artificial Sequence
  ENSG00000093072_24 (sequence is synthesized)
aagtccaagctaccatactcctgcctgagctatgacaacagcctcctcactgatctcccctttcttccctttgcctcctccagctcatttttcacagtgtagaatgacattttgtttgtt

SEQ ID NO: 102674 - DNA, 120 bp, Artificial Sequence
  ENSG00000093072_25 (sequence is synthesized)
cactgggattacaggcgtgagccacccggcctggcctagaatgacttttaaaagatcaaattaaatcaggtcactcctttgcttacaacgcagtgcgtttagaggtacaccccatgtctc

SEQ ID NO: 102675 - DNA, 120 bp, Artificial Sequence
  ENSG00000093072_26 (sequence is synthesized)
agaggtacaccccatgtctccacagggcatacagcatccgatttaatctggatccattccggcgccttcctctcccagtcacccagagggccccaaccccggcggccctttcttcctcaa

SEQ ID NO: 102676 - DNA, 120 bp, Artificial Sequence
  ENSG00000093072_27 (sequence is synthesized)
atgtcctcggctctataccgtgcctgggtcttttctctttctctctgcctggaagattccttctttccccttttgtcttgcccactcctgtttacccttcaagtttcaagttcatgtcac

SEQ ID NO: 102677 - DNA, 120 bp, Artificial Sequence
  ENSG00000093072_28 (sequence is synthesized)
tgtctcagagaggttttcctgtgctcgccctgtttctctcaggaagccttgctcttttccatcatgcctctaatcacagcttataatcggatatttatttctgtgtctacagtcttgccc

SEQ ID NO: 102678 - DNA, 120 bp, Artificial Sequence
  ENSG00000093072_29 (sequence is synthesized)
tgccagactgtatgccccatgtgggcaggcgctcatgattgtttctgattgtttcacgcatgctgctaacccagagcctgggcccaaagctagttagtactcaataaacaatgcattgaa

SEQ ID NO: 102679 - DNA, 120 bp, Artificial Sequence
  ENSG00000093072_30 (sequence is synthesized)
agttggtgagcttttccggtgctctgcacagatgctggggcgctgagcaaacagccctcagtttctggagctgttccgagtcccgtggagtctccatctgagccctttcctagtccaggc

SEQ ID NO: 102680 - DNA, 120 bp, Artificial Sequence
  ENSG00000093072_31 (sequence is synthesized)
aaggcagaggggagtagagcagagccgccccaaataaaagacctcatgtgatcagagtccagctcctcacctggccttggaagaaggatgcaagaagccacctctgtcctcacccaactc

SEQ ID NO: 102681 - DNA, 120 bp, Artificial Sequence
  ENSG00000093072_32 (sequence is synthesized)
aaggatggcagggaatcaaagaattcctcaaaagccccaggcgaatgtcctctcatccatcttccatgacctgtacctgagctctcagacagcagcaagccctctctccattcctagttt

SEQ ID NO: 102682 - DNA, 120 bp, Artificial Sequence
  ENSG00000093072_33 (sequence is synthesized)
atcaccatttggttcctggaactgggaaaaaacagcaaccataagctgtgcctggatggaagaagacaacctctagggtcctgtctaactctgcaggtgattcagtgccttacccaatcc

SEQ ID NO: 102683 - DNA, 120 bp, Artificial Sequence
  ENSG00000093072_34 (sequence is synthesized)
ctgaagatcttttaggtcccaactgcgcaggggacctccaacacaggcagacgcaaacagcctctggcctggacttgctgtgatctctgatttggcaaaatgaaccagcaatagtcttgc

SEQ ID NO: 102684 - DNA, 120 bp, Artificial Sequence
  ENSG00000093072_35 (sequence is synthesized)
attcttcccgaatggcctcacgtgtgctccctatcatcacgccttttcagctaggcaacgctcagagtcacacctgagtggaggccgacgcccctttggaggcgactccagccataaaaa

SEQ ID NO: 102685 - DNA, 120 bp, Artificial Sequence
  ENSG00000093072_36 (sequence is synthesized)
gtcctgcttggagctggttttagccacagagggccaataaatggccccttctgaatgaggtgcccctgcacctctgcagagcctgctgccagcctccaggatctaactgggctctgattc

SEQ ID NO: 102686 - DNA, 120 bp, Artificial Sequence
  ENSG00000093072_37 (sequence is synthesized)
gttggtgagcttttccggtgctctgcacagatgctggggcgctgagcaaacagccctcagtttctggagctgttccgagctctatccatagatgaaacacgggcgcatctgttgttgaaa

SEQ ID NO: 102687 - DNA, 120 bp, Artificial Sequence
  ENSG00000093072_38 (sequence is synthesized)
ctttttccggaggggagatggattccctggaatggaactgggctctggtggccattttctccttccagagccggaggtggagagacttgggggcctgcccagctccagtcctctgtcctc

SEQ ID NO: 102688 - DNA, 120 bp, Artificial Sequence
  ENSG00000093072_39 (sequence is synthesized)
gggtctgaccctggaacaaaggcttttgccacggagagtctaggtcttaatgccccccattagccagagttggggggccaccaacacattaacaactaaaaacagtcttcactagaatcc

SEQ ID NO: 102689 - DNA, 120 bp, Artificial Sequence
  ENSG00000093072_40 (sequence is synthesized)
ttttgctgagccccctcgcctccccctgcctggtcgcaggctaattccggcctgggctgctgtggacggactatcctggccgctgagcctcccattgtgttcctaatgctcagtaacaaa

SEQ ID NO: 102690 - DNA, 120 bp, Artificial Sequence
  ENSG00000093072_41 (sequence is synthesized)
acgcctggcctgctcctggtcattcttaaaaggctgtgtgacaaaggtcccggcagtggtggcagggtacaaggaagggtgtgcacaggctccagggcgcgccatcagcaagtgaggcat

SEQ ID NO: 102691 - DNA, 120 bp, Artificial Sequence
  ENSG00000093072_42 (sequence is synthesized)
aaactcagatgcacacagcaagcatgcatgtaagccacacacttgccactctggctgcctcagcactgcagagcccctctccccggcctctagttggatccctggtgcacactggaggga

SEQ ID NO: 102692 - DNA, 120 bp, Artificial Sequence
  ENSG00000093072_43 (sequence is synthesized)
aataaaacctaccccaacaggaagtgaaacagttggtgagcttttccggtgctctgcacagatgctggggcgctgagcaaacagccctcagtttctggagctgttccgaggggctgcctt

SEQ ID NO: 102693 - DNA, 120 bp, Artificial Sequence
  ENSG00000093072_44 (sequence is synthesized)
gatgtcgaaactaaagcctggaaaggtcaaagagcttgatgaaggtcaaataggtagtaaggggtggctggacccagaccagggctcctaagttcgtcgctttcctcaccgcgctgggct

SEQ ID NO: 102694 - DNA, 120 bp, Artificial Sequence
  ENSG00000093072_45 (sequence is synthesized)
ggcagagtctgaggcccagactgggtcccctgagtctttagcatggggctcttccaagaccccggagggttatccacaggggatggccctgctggcacttatggaggggagagcttatgg

SEQ ID NO: 102695 - DNA, 120 bp, Artificial Sequence
  ENSG00000093072_46 (sequence is synthesized)
gggcatgcgaggatgcctgtctgggtggagcggcaactccctgggaagggagcgcaatgtgcctgttggtaccctgacatcccagggcaggctcaggctgctgacacagcagggctgctc

SEQ ID NO: 102696 - DNA, 120 bp, Artificial Sequence
  ENSG00000093072_47 (sequence is synthesized)
ccctactggtccttctgccttagccacaggttctgaaaccaaagcaaaaccaccagagagtgattcatgtggagacaggataacccaataaaatcgccccttaggtggggtgtgttggct

SEQ ID NO: 102697 - DNA, 71 bp, Artificial Sequence
  ENSG00000093072_48 (sequence is synthesized)
agttgaagccccatgtctactaaaaatagaaaaattagcagggcgtggtggtaggtgcctgtagtcccagc

SEQ ID NO: 102698 - DNA, 120 bp, Artificial Sequence
  ENSG00000093072_49 (sequence is synthesized)
ccagcctggacgacagagcgagactctgtataaaacaaaaacaacaacaacgaaaaattaccccttaatggtggttggttggtcagacagccagcttgaattgctgtctttttcccaaac

SEQ ID NO: 102699 - DNA, 120 bp, Artificial Sequence
  ENSG00000093072_50 (sequence is synthesized)
ccagcataccatcttcttgagcatttccggttcagatttctatgggattaatggctcctgcaccttctacctcccagggaggctccctgagctctgctttatataagattttcaggttct

SEQ ID NO: 102700 - DNA, 120 bp, Artificial Sequence
  ENSG00000093072_51 (sequence is synthesized)
agttggtgagcttttccggtgctctgcacagatgctggggcgctgagcaaacagccctcagtttctggagctgttccgagtccaggcatcccgatgttggtggatggcccatctgagcgg

SEQ ID NO: 102701 - DNA, 120 bp, Artificial Sequence
  ENSG00000093072_52 (sequence is synthesized)
ggccgggagaggcccagcactggtgccaaggagctgtgctgtgcctgtgtgagagcacagtcctaggtaagtgcggtgacccaacaatgaattgctgcctgaagccacttctagttcagg

SEQ ID NO: 102702 - DNA, 120 bp, Artificial Sequence
  ENSG00000093072_53 (sequence is synthesized)
tcttcacccccaaactgaaatgaagaatgtgtgaatttcccagataattctcggctgtgaccccacattggcctggtgactcatttatgagcataatggttttgcctgaatgtttggata

SEQ ID NO: 102703 - DNA, 120 bp, Artificial Sequence
  ENSG00000093072_54 (sequence is synthesized)
attggcccgtttttggtttcaatttgcctctgggttctgtgtgtggttgtgtgtgagtccttgatcacggagacaccctgagtggcactggctcaagtctgcgtgtggggacctccagta

SEQ ID NO: 102704 - DNA, 120 bp, Artificial Sequence
  ENSG00000093072_55 (sequence is synthesized)
gtaccatgtgcgtggcctggcacgtgggtgaaagacccactctttttcccagggaagcacagaaagctttgcagcttaattgtccttctgactttaccagacaagacccctcccctcact

SEQ ID NO: 102705 - DNA, 120 bp, Artificial Sequence
  ENSG00000093072_56 (sequence is synthesized)
ttaaagagcagccagtctaaggctgggacctgtccatggtcgcagctgcaagggcagcagccagtggggtccctcggagtcaggcacggggcgggcaccgaagggatccggcagcggctc

SEQ ID NO: 102706 - DNA, 120 bp, Artificial Sequence
  ENSG00000093072_57 (sequence is synthesized)
cctctgctcagctcacccacgagcctgggctctggagggcactgactccccaggagcctcctcccatgcccagtcttcctgagtccccttcccttccatggggcctggggcctggaggag

SEQ ID NO: 102707 - DNA, 120 bp, Artificial Sequence
  ENSG00000093072_58 (sequence is synthesized)
aggagggagcttgcaggatgggcccacgttctgctcagaggctccctggtgccaggtgccccttcccagggccagtggcaggagggtgtgagggctgagctgagtgcatcagtgccccca

SEQ ID NO: 102708 - DNA, 120 bp, Artificial Sequence
  ENSG00000093072_59 (sequence is synthesized)
ggtttgcctaggctctggggagaggccatgggtggggcaggccaggaaggctttatccccacagagccgaggattggagcaggagagccagtggcagggcaaagaccttgagcctgtcgt

SEQ ID NO: 102709 - DNA, 120 bp, Artificial Sequence
  ENSG00000093072_60 (sequence is synthesized)
gggcttgcgccagaccctgtgttttggggcttttgttgtcatgctgcctgccttgcccctgtagggttctgcagtacccaggatcttgctgacttaatcagcaagaggccatatggttac

SEQ ID NO: 102710 - DNA, 120 bp, Artificial Sequence
  ENSG00000093072_61 (sequence is synthesized)
tgggtccagccgacccatcagggacttgggtgacctgtggccctttgcaggtgtgcagtggacagagagctgcccctgagctgcatccatgtctacacccccgacagagatgcagggaga

SEQ ID NO: 102711 - DNA, 120 bp, Artificial Sequence
  ENSG00000093072_62 (sequence is synthesized)
gctgggaacaaggccacctggcctcctctaaacgcagacaaataaaactgttcccgtgggtcctctgaccccatctacttttcagagactacaggtgcccccagagccagcaagggtctt

SEQ ID NO: 102712 - DNA, 120 bp, Artificial Sequence
  ENSG00000093072_63 (sequence is synthesized)
tgataagaatggatttgggctacatatctctcagggatcacaatggcctggtcagggtggggtcaggagggcaggggtgcctcaggtttgggaaacgggacctgcacacttggggctggc

SEQ ID NO: 102713 - DNA, 120 bp, Artificial Sequence
  ENSG00000093072_64 (sequence is synthesized)
attcccgtggagtctccatctgagccctttcctagtccaggcatcccgatgttggtggatggcccatctgagcggccagccctgtgcttcttgctgttggctgtggcaatgtctttcttc

SEQ ID NO: 102714 - DNA, 120 bp, Artificial Sequence
  ENSG00000093134_0 (sequence is synthesized)
aatgtaaagtttttccagtgaaacaaaacgtaagaatctgagtttgtttttcaaagatcactaaattttagttatgattatatcacattttccaaaatgtgtggcagtttttgccctcct

SEQ ID NO: 102715 - DNA, 120 bp, Artificial Sequence
  ENSG00000093134_1 (sequence is synthesized)
tgctctgagtgttggtgcactggacacttttattgctgcagtatatgagcatgcggtgatattaccaaacagaacagaaacacctgtttcaaaagaagaagctttgctcctgatgaacaa

SEQ ID NO: 102716 - DNA, 120 bp, Artificial Sequence
  ENSG00000093134_2 (sequence is synthesized)
gaacatagatgttttggagaaagcagttaagctggcagcgaagcagggtgcacatatcattgtgaccccagaagatggaatctatggttggatcttcaccagggagagcatttaccccta

SEQ ID NO: 102717 - DNA, 120 bp, Artificial Sequence
  ENSG00000093134_3 (sequence is synthesized)
tctagaggatataccagaccctggagtgaactggattccatgtagagacccctggagattcggcaacacaccagtgcaacaaagactcagctgcctggccaaggacaactctatctatgt

SEQ ID NO: 102718 - DNA, 120 bp, Artificial Sequence
  ENSG00000093134_4 (sequence is synthesized)
cgtggctaatattggggacaagaagccatgcaatgccagtgactctcagtgtccccctgatggccgttaccaatacaacactgatgtggtgtttgattctcagggaaaactgttggcacg

SEQ ID NO: 102719 - DNA, 120 bp, Artificial Sequence
  ENSG00000093134_5 (sequence is synthesized)
ctaccataagtacaatctttttgcacctgaaattcagtttgatttccccaaggattcagaacttgtgacttttgacactccctttgggaagtttggcatttttacttgctttgacatttt

SEQ ID NO: 102720 - DNA, 120 bp, Artificial Sequence
  ENSG00000093134_6 (sequence is synthesized)
ttctcatgacccagctgtggtggtggtggatgagtttcaattgacagcattctctaccccacagcatggtacaacacgctgcccctcctctcggctgttcccttccattcagcatgggcc

SEQ ID NO: 102721 - DNA, 120 bp, Artificial Sequence
  ENSG00000093134_7 (sequence is synthesized)
acaacaccagcatgcacatgacagggagtggaatctacgccccagaagcagtcaaggtgtaccactatgacatggaaacagagagtggtcagctgttgctatcagaactgaagtctcggc

SEQ ID NO: 102722 - DNA, 120 bp, Artificial Sequence
  ENSG00000093134_8 (sequence is synthesized)
cccgccgtgagcccacctaccctgcagctgttgactggcatgcgtatgccagcagtgtcaagccattttcctctgaacagtcagattttctggggatgatttattttgatgagtttacct

SEQ ID NO: 102723 - DNA, 120 bp, Artificial Sequence
  ENSG00000093134_9 (sequence is synthesized)
tcaccaagcttaagagaaatacaggaaattacacagcttgccagaaagatctgtgttgtcacttaacttacaagatgtctgagaagcgaacagacgagatctatgccctaggtgcttttg

SEQ ID NO: 102724 - DNA, 120 bp, Artificial Sequence
  ENSG00000093134_10 (sequence is synthesized)
atggactgcacacagtagaaggccaatattacttacagatatgtgcattactgaagtgtcaaaccactgacctggaaacgtgtggagaacctgtggggtcagcttttaccaagtttgaag

SEQ ID NO: 102725 - DNA, 120 bp, Artificial Sequence
  ENSG00000093134_11 (sequence is synthesized)
acttctccctcagtggcacatttggaacgcgttatgttttcccacagatcattctaagtgggagtcagcttgcccctgaaagacattatgagatttcaagagatggacgcttgaggagcc

SEQ ID NO: 102726 - DNA, 120 bp, Artificial Sequence
  ENSG00000093134_12 (sequence is synthesized)
gaagtggagcccctttgcctgtcttagttatggccctgtatggaagagtgtttgagaaggaccctccacgcttagggcagggatctgggaaattccagtgatctcctttagcagagccct

SEQ ID NO: 102727 - DNA, 120 bp, Artificial Sequence
  ENSG00000093134_13 (sequence is synthesized)
tttaggattagcctggctaagaaaggaagaaaaaaaagagatccgttagtgtctgtttagaaaagatgttataaacttacagaaacaaatataataaactgaagcagatttgaaaagcaa

SEQ ID NO: 102728 - DNA, 120 bp, Artificial Sequence
  ENSG00000093134_14 (sequence is synthesized)
tctagaggatataccagaccctggagtgaactggattccatgtagagacccctggaggaagagtaaaaagatgaatgagcctgtttccaaagagctttgctatcactgtcattcagaatg

SEQ ID NO: 102729 - DNA, 120 bp, Artificial Sequence
  ENSG00000093134_15 (sequence is synthesized)
caatcaatatggccaatggaaattgtataggacttgaaaaaggaagccctacttctgggaccacattttacgaccacctagctgagtgataaatcactaaaatatagtaagtttgaggaa

SEQ ID NO: 102730 - DNA, 120 bp, Artificial Sequence
  ENSG00000093134_16 (sequence is synthesized)
tctagaggatataccagaccctggagtgaactggattccatgtagagacccctggaggtaatatcatatcattaatttctaaacaaaaagttgtgatttggtaaaacaccaacagtaaac

SEQ ID NO: 102731 - DNA, 120 bp, Artificial Sequence
  ENSG00000093134_17 (sequence is synthesized)
taatttcaacttttagcttagattgagggagtacatgtgcaggtttgttacatgggcaaattgcatgacgctgaggattggggtacaatgattgcaccacccagcatagtatacaacagg

SEQ ID NO: 102732 - DNA, 120 bp, Artificial Sequence
  ENSG00000093134_18 (sequence is synthesized)
aaggttttcagcccttgccttcctctctctctctcccctctattagttcccagtgtctattgctgtcatctttatggccatgagttcccaatgcttagctcccacttataagtgagaaca

SEQ ID NO: 102733 - DNA, 120 bp, Artificial Sequence
  ENSG00000093134_19 (sequence is synthesized)
gtatttggttttctgttcctgtgttaacttgctgaggataatgtcctttggtgctgcaaaagacatgattttgttccttcttgtgggcacctaggttaattccatatctttgctgttgtg

SEQ ID NO: 102734 - DNA, 120 bp, Artificial Sequence
  ENSG00000093134_20 (sequence is synthesized)
gggcacctaggttaattccatatctttgctgttgtgaaaagtgctgcgatgaacatacaagtgcacgagtctttttggtagaatgatttcctttcctttgggtatatacctagtaatggg

SEQ ID NO: 102735 - DNA, 120 bp, Artificial Sequence
  ENSG00000093134_21 (sequence is synthesized)
tctagaggatataccagaccctggagtgaactggattccatgtagagacccctggagaaatcactaaaatatagtaagtttgaggaaatgtctattgaattagattcggcaacacaccag

SEQ ID NO: 102736 - DNA, 120 bp, Artificial Sequence
  ENSG00000093134_22 (sequence is synthesized)
gcaatatcgtggttcacattctacaagaaacaccttaaatatgtggaaactatgatatggaatataaattgtggttttagattgccattaggctgtgatggagaatttggggttcatttt

SEQ ID NO: 102737 - DNA, 120 bp, Artificial Sequence
  ENSG00000093134_23 (sequence is synthesized)
tttaacataaatgtgatgttgatattcaaggcaacaggaaattcacagagaagctaaaataaaaatgttgactgctgataatggcaataatgttgtcatttgcatggtgtagaaggtgca

SEQ ID NO: 102738 - DNA, 120 bp, Artificial Sequence
  ENSG00000093134_24 (sequence is synthesized)
tgcaaattaaatacattaaataatgcatctacaacttattttctgggtatactattttgagaagttgttataattatagtaataactaatattttgtatagtgtttcatgagtttgaaga

SEQ ID NO: 102739 - DNA, 120 bp, Artificial Sequence
  ENSG00000093134_25 (sequence is synthesized)
atttttatacatattatttgaccacctgtgcaacaaatttgttggctgcactttcgcacaaagtccctctactttcagacttgaaacatgaacctgggtcttccaacaccaaatcctgtg

SEQ ID NO: 102740 - DNA, 120 bp, Artificial Sequence
  ENSG00000093134_26 (sequence is synthesized)
tgatttttaccattctacactgctttaggagggagtgatcttgcctgagaagggctctaggttgtaacctaaactctgcactgaagttaaccctttgctttctttgaccagatttcaaga

SEQ ID NO: 102741 - DNA, 120 bp, Artificial Sequence
  ENSG00000093134_27 (sequence is synthesized)
atttgactgggctaatgaaactgacttttccagggaaaatatatccataaatttgataattagctatcgataaattattttaagttgggaaagtaggtgactgatgaaatgtcaacatta

SEQ ID NO: 102742 - DNA, 120 bp, Artificial Sequence
  ENSG00000093134_28 (sequence is synthesized)
tgaactcttacacctacttattcaaatgacaacgtttcagttttgtgttacagaaaggagaaatccagtatttaatataatgataatattggaaaagaaagtcagttttctccctggtga

SEQ ID NO: 102743 - DNA, 120 bp, Artificial Sequence
  ENSG00000093134_29 (sequence is synthesized)
aacagttccatgggcttttttcacgagtaactagtaggaaatattaaataactcaaattatttagtcaagaaaagaaaaattaaacaaagtacatgataaagttattaaaggtcttaatg

SEQ ID NO: 102744 - DNA, 120 bp, Artificial Sequence
  ENSG00000093134_30 (sequence is synthesized)
aatatgaatattaatagtacttctctgttttttttagaagaaaataaaaagaaaaggtctaaaccagtaggccattaatctgtcctttttattcaaagattcggcaacacaccagtgcaa

SEQ ID NO: 102745 - DNA, 120 bp, Artificial Sequence
  ENSG00000093144_0 (sequence is synthesized)
acgcaaaacggaaaagcgtgtgtaggggagcggaaaaggaagtcaccaccgtggcctgcgacggaccctttccagctttttgcctgaaagctttgcagaagaaatggcgaaaagtctttt

SEQ ID NO: 102746 - DNA, 120 bp, Artificial Sequence
  ENSG00000093144_1 (sequence is synthesized)
gaagacagcctctctgtctggaaggacaaaattgctacatcaaacaggattgtcactttatagtacatcccatggattttatgaggaagaagtgaaaaaaacacttcagcagtttcctgg

SEQ ID NO: 102747 - DNA, 120 bp, Artificial Sequence
  ENSG00000093144_2 (sequence is synthesized)
tggatccattgaccttcagaaggaagacaatggcattggcattcttactctgaacaatccaagtagaatgaatgccttttcaggtgttatgatgctacaacttctggaaaaagtaattga

SEQ ID NO: 102748 - DNA, 120 bp, Artificial Sequence
  ENSG00000093144_3 (sequence is synthesized)
attggaaaattggacagaggggaaaggcctcattgtccgtggggcaaaaaatactttctcttcaggatctgatctgaatgctgtgaaatcactaggaactccagaggatggaatggccgt

SEQ ID NO: 102749 - DNA, 120 bp, Artificial Sequence
  ENSG00000093144_4 (sequence is synthesized)
ataagtgttgcgctggttcaaggttgggcattgggtggaggagcagaatttactacagcatgtgatttcaggttaatgactccagagagtaagatcagattcgtccacaaagagatgggc

SEQ ID NO: 102750 - DNA, 120 bp, Artificial Sequence
  ENSG00000093144_5 (sequence is synthesized)
ataataccaagctggggtggcaccacccggctagttgaaataatcggaagtagacaagctctcaaagtgttgagtggggcccttaaactggattcaaaaaatgctctaaacataggaatg

SEQ ID NO: 102751 - DNA, 120 bp, Artificial Sequence
  ENSG00000093144_6 (sequence is synthesized)
gttgaagaggtcttgcagtcttcagatgaaactaaatctctagaagaggcacaagaatggctaaagcaattcatccaagggccaccggaagtaattagagctttgaaaaaatctgtttgt

SEQ ID NO: 102752 - DNA, 120 bp, Artificial Sequence
  ENSG00000093144_7 (sequence is synthesized)
tcaggcagagagctatatttggaggaagcattacagaacgaaagagatcttttaggaacagtttggggtgggcctgcaaatttagaggctattgctaagaaaggaaaatttaataaataa

SEQ ID NO: 102753 - DNA, 120 bp, Artificial Sequence
  ENSG00000093144_8 (sequence is synthesized)
gtgacacgagggagcgcgaagcggagggcgcctcgcggcaggagcgggatttccggggtcacgggaaccggcaggggaacgggataaagttcccggagaaaggaaaggagagcgtgggat

SEQ ID NO: 102754 - DNA, 120 bp, Artificial Sequence
  ENSG00000093144_9 (sequence is synthesized)
agtaaaagagaagacgcggagaagaggagaggacctacaagaacggaggacaggggcgcacgatggtcccggggggagcggaaacaaaggcacgcaaaacggaaaagcgtgtgtagggga

SEQ ID NO: 102755 - DNA, 120 bp, Artificial Sequence
  ENSG00000093144_10 (sequence is synthesized)
aacatcagaattactttgaaggctactattaatatgcagacttacttttaatcatttgaatatctgaactcatttacctcatttcttgccaattactcacttgggtatttactgcgtaat

SEQ ID NO: 102756 - DNA, 120 bp, Artificial Sequence
  ENSG00000093144_11 (sequence is synthesized)
ctggaacatttagctaaaatatacacttttggcttaaaaattattgctgtcaattccaataataattcttagcttataaccaaagagcagtgtttaaaaggagagcttctatacaaaacc

SEQ ID NO: 102757 - DNA, 120 bp, Artificial Sequence
  ENSG00000093144_12 (sequence is synthesized)
tattcctggcgttacttttcatacaatttttgttctgttttacctggaaataatttaccaaaataactgagtgttgctgctaaagaacaaaagtggggaggtatcagggaacaagaaaac

SEQ ID NO: 102758 - DNA, 120 bp, Artificial Sequence
  ENSG00000093144_13 (sequence is synthesized)
aagaaagggtatgatcaatcattttcttctgctccaaacagctggagtaaaattcatgggaaatggcccttcatttaaaaaaagatgtacctcactacccactacaaatttggaactttg

SEQ ID NO: 102759 - DNA, 120 bp, Artificial Sequence
  ENSG00000093144_14 (sequence is synthesized)
ttcttttcaataattagttttctattgtaaattacctactaaacagtggtagccatgacatggaaagtcaactgattctacaattggacattcatttgtgtgccctggaatttccaacta

SEQ ID NO: 102760 - DNA, 120 bp, Artificial Sequence
  ENSG00000093144_15 (sequence is synthesized)
gtaataaacaactactgttgatgtagttttaaaccacttgaagggactcatgaagcatcctgcaacataaatttgcatttttacatcagatttcttttttttcctgaaaaacaactaacc

SEQ ID NO: 102761 - DNA, 120 bp, Artificial Sequence
  ENSG00000093144_16 (sequence is synthesized)
ttctaacaactatctttcaaaagtaaatgtaataaaaatgcacaacataaaatgtttatgatcccagcaatacactttttaaaaaatgtgaaagtcaaagaattaagttctagttctgac

SEQ ID NO: 102762 - DNA, 120 bp, Artificial Sequence
  ENSG00000093144_17 (sequence is synthesized)
tcatcacaagaggtcaaaagtatttgctactgtaacattcaattcacatttgagaatcatggtaaaaataacttgcatttgccttaccatcatgatcctactgttgagttaggaaaatat

SEQ ID NO: 102763 - DNA, 120 bp, Artificial Sequence
  ENSG00000093144_18 (sequence is synthesized)
ggttagacagactcacattactttttttcagaggtaaactctagattactgtgtcaacccaatactatttggccatagatgtaaaaactaccaaataaaagtggattttgtggtctacaa

SEQ ID NO: 102764 - DNA, 120 bp, Artificial Sequence
  ENSG00000093144_19 (sequence is synthesized)
ggcctgcgacggtaagtggtcgtaagggttggtcttagcgcttcagtttagtgttgtcagtgggagaatcctaaaatgtcgccgtggaatggactgtaccgctcgcttctccaaacgtgt

SEQ ID NO: 102765 - DNA, 120 bp, Artificial Sequence
  ENSG00000093144_20 (sequence is synthesized)
aaacgtgtcccagacggcgagcctccccggctccgcggcttgtcccttgcaagcgccgcgcaggcctgccccgcgctggacgtggagacgcggtgccgagcgccacgggccggctgtgcg

SEQ ID NO: 102766 - DNA, 120 bp, Artificial Sequence
  ENSG00000093144_21 (sequence is synthesized)
ggaaagagggcgaggggaagagatgaatcggtcttcccagagcgcgccgcgaggtcgcgagattacactttaaaaagcatgaggaggcttgctttctacatgctgatttaatttcggaat

SEQ ID NO: 102767 - DNA, 120 bp, Artificial Sequence
  ENSG00000093144_22 (sequence is synthesized)
caagaacgaaagatgagcaactcctttctggtagaggttctttcattggagaatttttgagctacaataatccttttaacgctgcgcacacatacagggattacacgtgtaggggattaa

SEQ ID NO: 102768 - DNA, 120 bp, Artificial Sequence
  ENSG00000093144_23 (sequence is synthesized)
aaacacagttaagtttaggttgaaggtgctgttaaggacttcaggcaacattaaatcaacactcagttctttgctctgttccacatctgggctcctgtatagcagttgttgctctaggtg

SEQ ID NO: 102769 - DNA, 120 bp, Artificial Sequence
  ENSG00000093144_24 (sequence is synthesized)
ctagaggtatgcagaggaactggacaagggcaaggaaaacaaagggctccttctttagaagagctagcattctcttggaacagacaagcttgtggtgagaagtatatttgtgaaatctac

SEQ ID NO: 102770 - DNA, 120 bp, Artificial Sequence
  ENSG00000093144_25 (sequence is synthesized)
gaggggagggagcagcgcagtaatagaacgggcgatcctttcttgattttttattgggttctggcctgaaaggcgactgtataatcagctgggattcctgcaatgattaacattccagga

SEQ ID NO: 102771 - DNA, 120 bp, Artificial Sequence
  ENSG00000093144_26 (sequence is synthesized)
gatttatgagacttcctttaataagtgttgcgctggttcaaggttgggcattgggtggaggagcagaatttactacagcatgtgatttcagtttcagacactgaagagaaagtgattctg

SEQ ID NO: 102772 - DNA, 120 bp, Artificial Sequence
  ENSG00000093144_27 (sequence is synthesized)
cgctggcatgtagtgctctacatatttcaaaacatcatgttgtacatttaaaaacttttaagcctggcgtggtggctcatgcctgttatcccagcattttggggggctgaaataggcaga

SEQ ID NO: 102773 - DNA, 62 bp, Artificial Sequence
  ENSG00000093144_28 (sequence is synthesized)
gtgaaaccccaacttgggagtctgaggtggaaggattgcttgaacctgggaggtggaggtta

SEQ ID NO: 102774 - DNA, 120 bp, Artificial Sequence
  ENSG00000093144_29 (sequence is synthesized)
aaattatatacaataaaatgaatccattttaattgtatgctgtaaatggattttgatgaatatatacacccatgtaaccacctccacaatcaagattgagaacatttttatcacccctat

SEQ ID NO: 102775 - DNA, 120 bp, Artificial Sequence
  ENSG00000093144_30 (sequence is synthesized)
gttcttactttagagctgtgacatcaagaaaatttacctctgatcatgccaggattactaaatgttaaaatcagacttcagtatcacaaaacatttttatatctgctccccccctcacaa

SEQ ID NO: 102776 - DNA, 120 bp, Artificial Sequence
  ENSG00000093144_31 (sequence is synthesized)
caagtgttatatgaattatgcatttgattctacatgtttattagacatgtatggcagatacatttatattttactaatggttatgatgactttaataactttcaaaggattatggggatt

SEQ ID NO: 102777 - DNA, 120 bp, Artificial Sequence
  ENSG00000093144_32 (sequence is synthesized)
aacattccaggaagggaagccagcctgtgaagaagcatggcattgaaacaggtggcttggtagtgagcttgttcagctccactgaatcttctttgtggtggggctgcaagacatcctgca

SEQ ID NO: 102778 - DNA, 120 bp, Artificial Sequence
  ENSG00000093144_33 (sequence is synthesized)
attccattatttgtactagttaagaaataatagctaattttcaaattacatctattctaatgatgtactatttttttgtgccgtagaggataatcatttaattacatgttaatgaagtat

SEQ ID NO: 102779 - DNA, 120 bp, Artificial Sequence
  ENSG00000093144_34 (sequence is synthesized)
tttaaaattatgaaaagtaaggaaattcttatttaagcaaggttattaattggacattactgtatttttggtacctattgtatctgagagtctagagagagtaatagaatcataacatta

SEQ ID NO: 102780 - DNA, 120 bp, Artificial Sequence
  ENSG00000093144_35 (sequence is synthesized)
ctattctaaaatagtatcttcattgtttaaaccctattcacctccttttcctattgcatttgactttttcatagataaatctgaagttattatttttttaaataatcctttctacatggg

SEQ ID NO: 102781 - DNA, 120 bp, Artificial Sequence
  ENSG00000093144_36 (sequence is synthesized)
agcagtgtatattaggaaattttcaattactttagacctgcacctttgcattgtaggtcagaacctacaaaaattccatcttggaaaacattttagatttaccttgtattcacacacccc

SEQ ID NO: 102782 - DNA, 120 bp, Artificial Sequence
  ENSG00000093144_37 (sequence is synthesized)
tgcaaagtgggtctttgcaaacaggaaaggtaaaagatttatttttactgcaaaatcatgcctttatataggattagtctgtggattatttcaggcaacaatgagtagatttttgaagga

SEQ ID NO: 102783 - DNA, 120 bp, Artificial Sequence
  ENSG00000093144_38 (sequence is synthesized)
aacttcataacacagttttggagccctatcttctgtaacacatttccaacctttggaaatagccttgattttccaacttttaacctgataccaacaaaaatggacaaagataatatcaca

SEQ ID NO: 102784 - DNA, 120 bp, Artificial Sequence
  ENSG00000093144_39 (sequence is synthesized)
tggaattattctgaagagccagctgctgagaagttccaggagctgtaaattagacaaaagcatccatttatttgggagtaagttacaatatggctatagcttaaaaatatataatgattc

SEQ ID NO: 102785 - DNA, 120 bp, Artificial Sequence
  ENSG00000093144_40 (sequence is synthesized)
atcctttgatgtgtgtttgtttttatgaagacagtgcaataattttgtttccactgcattttaagattttttaaaaaataacatttgtaaatgaatattgaaattaaaaatagtaacatc

SEQ ID NO: 102786 - DNA, 120 bp, Artificial Sequence
  ENSG00000093144_41 (sequence is synthesized)
tttattaacatcttatattcctatggatggaatggccgtatgcatgttcatgcaaaacaccttaacaagatttatgagacttcctttaataagtgttgcgctggttcaaggttgggcatt

SEQ ID NO: 102787 - DNA, 120 bp, Artificial Sequence
  ENSG00000093144_42 (sequence is synthesized)
gtggcctgcgacgtggcttggtagtgagcttgttcagctccactgaatcttctttgtggtggggctgcaagacatcctgcatggaccctttccagctttttgcctgaaagctttgcagaa

SEQ ID NO: 102788 - DNA, 120 bp, Artificial Sequence
  ENSG00000093167_0 (sequence is synthesized)
gtcgtcgaccctgtggccccgcccatccttcgcctcctcagtcggccgctcaggctgcggctcctcccggggccggttcccgctgtctcagccgcggcgcagagggcacatcggcctgac

SEQ ID NO: 102789 - DNA, 120 bp, Artificial Sequence
  ENSG00000093167_1 (sequence is synthesized)
tgaccgactagccggctgccagtgccgggagccgccgcgtccatccccgcccgcctggccggggacccaggactgagtcgtccagctgcgcccctcgcccatagccccagcgggcgccgg

SEQ ID NO: 102790 - DNA, 120 bp, Artificial Sequence
  ENSG00000093167_2 (sequence is synthesized)
gcgagcagctcttcggcccttcccggacagcgacgcagtcgcagcgcgcgccctaacacagatgtgggaagataaatgaaggggtctagatgtaaatgtcagtggaaaggagagctacca

SEQ ID NO: 102791 - DNA, 120 bp, Artificial Sequence
  ENSG00000093167_3 (sequence is synthesized)
tcactaagggctgaaaacacagttaaatcactttcaaagttaaaagactattaagaacacaagatggggactcctgcttctggaaggaaaagaacacctgtgaaagaccgattttctgca

SEQ ID NO: 102792 - DNA, 120 bp, Artificial Sequence
  ENSG00000093167_4 (sequence is synthesized)
gaagatgaagctttgagtaacattgccagagaggcagaggcaaggctggcagcaaaacgggctgcccgggcagaagcaagagatatacgcatgagagaactggaacgacaacaaaaagag

SEQ ID NO: 102793 - DNA, 120 bp, Artificial Sequence
  ENSG00000093167_5 (sequence is synthesized)
ttggatgaaaaatctgacaaacagtatgctgaaaattatacaagaccttcatctcgaaattctgcctcagcaacaacccctctaagtggaaactcatccagacgaggaagtggggacacc

SEQ ID NO: 102794 - DNA, 120 bp, Artificial Sequence
  ENSG00000093167_6 (sequence is synthesized)
agcagcttaatagatccagacacttcattaagtgaattgcgggaatctttgtctgaagtggaagaaaaatacaagaaagccatggtttccaatgcacagttagacaatgagaagaacaat

SEQ ID NO: 102795 - DNA, 120 bp, Artificial Sequence
  ENSG00000093167_7 (sequence is synthesized)
ttgatctaccaagtagacacactcaaggatgttattgaagagcaggaggaacagatggcagaattttatagagaaaatgaagaaaaatcaaaggagttagaaaggcagaaacatatgtgt

SEQ ID NO: 102796 - DNA, 120 bp, Artificial Sequence
  ENSG00000093167_8 (sequence is synthesized)
agtgtgctgcagcataagatggaagaacttaaagaaggcctgcggcaaagagatgagcttattgagaaacatggcttagttataatccccgatggcactcccaatggtgatgtcagtcat

SEQ ID NO: 102797 - DNA, 120 bp, Artificial Sequence
  ENSG00000093167_9 (sequence is synthesized)
gaaccagtggctggagccatcactgttgtgtctcaggaagctgctcaggtcttggagtcagcaggagaagggccattagatgtaaggctacgaaaacttgctggagagaaggaagaacta

SEQ ID NO: 102798 - DNA, 120 bp, Artificial Sequence
  ENSG00000093167_10 (sequence is synthesized)
ctgtcacagattagaaaactgaagcttcagttagaggaggaacgacagaaatgctccaggaatgatggcacagtgggtgacctggcaggactgcagaatggctcagacttgcagttcatc

SEQ ID NO: 102799 - DNA, 120 bp, Artificial Sequence
  ENSG00000093167_11 (sequence is synthesized)
aacaggatataactaccttggagcaaagtattagccggcttgagggacaggttctgagatataaaactgctgctgagaatgctgagaaagttgaagatgaattgaaagcagaaaaacgga

SEQ ID NO: 102800 - DNA, 120 bp, Artificial Sequence
  ENSG00000093167_12 (sequence is synthesized)
agctacaacgagagttacgaacagcactggacaagattgaggagatggagatgaccaacagccacctggccaagcggctggagaagatgaaggccaataggacagcacttctggcccagc

SEQ ID NO: 102801 - DNA, 120 bp, Artificial Sequence
  ENSG00000093167_13 (sequence is synthesized)
agtaggaaaaccacccttcaacctgggtgatgctccttggggccctacctagagggactgacttttgtccattgacacaaaccccttttagtactgttttgagttttgtcattaaaacag

SEQ ID NO: 102802 - DNA, 120 bp, Artificial Sequence
  ENSG00000093167_14 (sequence is synthesized)
ccacctttgtattttataatttatgacagaatgaagtcattttgaatctacatgaatgaacactttggattttgttgtagtttgattctagggtagaaccagtccatgctgtttttattt

SEQ ID NO: 102803 - DNA, 120 bp, Artificial Sequence
  ENSG00000093167_15 (sequence is synthesized)
tttatctccgtaattgtagaatcatgtttactcaacgtttttccccagctgcctcagtaactgggcactcggaggccttggcacgggttctggaggacagacagcaattctatgagtgct

SEQ ID NO: 102804 - DNA, 120 bp, Artificial Sequence
  ENSG00000093167_16 (sequence is synthesized)
cactgagatacttgctggagacctcagaaaacacaagtgccttctccacggtgcaattcagacttcagtgatctccagtggtcaaaagacatttacccttaatatcagacaacatttata

SEQ ID NO: 102805 - DNA, 120 bp, Artificial Sequence
  ENSG00000093167_17 (sequence is synthesized)
ttttagtgaagaaacaagttctcgggtggggaatctatgtttcactcagatttatatgtttggaggaaaaaagcctttttttgtaaaatatttaaatttatataagaaaatgttagaaaa

SEQ ID NO: 102806 - DNA, 120 bp, Artificial Sequence
  ENSG00000093167_18 (sequence is synthesized)
aaatatggggagtgtatataaaacttgctttattgcatggggcaggggaagtccaggcctaatactcctaaagtaagagttgggtcctttttttcttcaatacaactgtgctgtaccttg

SEQ ID NO: 102807 - DNA, 120 bp, Artificial Sequence
  ENSG00000093167_19 (sequence is synthesized)
taaagtattttatctgctgcttatttgtggaatgaaacctcaaacaaacccaaagggggagggtagggcagggcaggcagattggaaatctgcctgcagattctattaaatacacccttt

SEQ ID NO: 102808 - DNA, 120 bp, Artificial Sequence
  ENSG00000093167_20 (sequence is synthesized)
tgccaaccacaattggctactgacatgttcattttgttataggagactttaaaacaaatcatggcaaccacatccctcttcttttgtctccttctcaaggaaaaacaatctggaatgtag

SEQ ID NO: 102809 - DNA, 120 bp, Artificial Sequence
  ENSG00000093167_21 (sequence is synthesized)
aacttttaaagacttgagtttcacctttagaggtaccctgtccaagaggtttttttaaaatcatggagtgcaactactttgcagaatttatgattctcttttgctcttagtacccaggtg

SEQ ID NO: 102810 - DNA, 120 bp, Artificial Sequence
  ENSG00000093167_22 (sequence is synthesized)
gttttatagaaatgattattgtatctttaaagtgcttacacagaaaatatattgggggaaaatctagtgactaaaggcacataagataataaaactagactttaaaaaggtaactcaaaa

SEQ ID NO: 102811 - DNA, 120 bp, Artificial Sequence
  ENSG00000093167_23 (sequence is synthesized)
ttcattaagtgaattgcgggatatctatgaccttaaggaccagatacaggatgtagaagggagatacatgcaggggcttaaagaactaaaggaatctttgtctgaagtggaagaaaaata

SEQ ID NO: 102812 - DNA, 120 bp, Artificial Sequence
  ENSG00000093167_24 (sequence is synthesized)
ctaacacaggtaagggccgctcctcccgccagcccggtgggagcagggagcggggagttgggaacctttttcccggcctccgcagtcccgtgggatccgcgccgcctccgacctcggcta

SEQ ID NO: 102813 - DNA, 120 bp, Artificial Sequence
  ENSG00000093167_25 (sequence is synthesized)
gggggccgggcttccctggggactggccggcccgcggcgggctcccgggctggggtcgccccctgcctgcggcgttctcagacatcccgtctgatttctaacgctcacccttccaccgcg

SEQ ID NO: 102814 - DNA, 120 bp, Artificial Sequence
  ENSG00000093167_26 (sequence is synthesized)
atcacccatttttgtgattctgtctttaaaaatgtagaatgaaactacatgagttattaagttctgttctagaagaaagtgtgtattgaagttgtgattggaatggattcactttaaact

SEQ ID NO: 102815 - DNA, 120 bp, Artificial Sequence
  ENSG00000093167_27 (sequence is synthesized)
agaaatagctttttattgctgaaatgtaatttgctcatttttgactttaaaaatgttaagtaaaataaggttgaaatcacagagttcttaatacccttacccttgtttttcttttccttc

SEQ ID NO: 102816 - DNA, 120 bp, Artificial Sequence
  ENSG00000093167_28 (sequence is synthesized)
tgttagagttcagctgatttttaccttgattttcatttataaagaactttagttaaaaaataatggcaagtctatcctgttggtctagcttactaaattcctttacttctttcactaaat

SEQ ID NO: 102817 - DNA, 120 bp, Artificial Sequence
  ENSG00000093167_29 (sequence is synthesized)
atgacttccagagcagggcttcccagactcttaaagtctaaacctcttaaatttaaccctttgagaatctgacacctctctccaggaaaccacaaagttgctgacacctctgtctgagaa

SEQ ID NO: 102818 - DNA, 120 bp, Artificial Sequence
  ENSG00000093167_30 (sequence is synthesized)
atcaaagtcacccatccattgaccccacaaagaaatctactctagaggaagaaaaatggcacagatagatactgtatcattagctcacttttattttaaaaaaaaacaatttttttgttt

SEQ ID NO: 102819 - DNA, 120 bp, Artificial Sequence
  ENSG00000093167_31 (sequence is synthesized)
ttcatcttgttttcatatatgtgtaagcttcttagaggagtgagagatacaagtgtgaagcaaactgaaaaacattttgaaagttagtaagcacattctctaatgtgcattccagaaatg

SEQ ID NO: 102820 - DNA, 120 bp, Artificial Sequence
  ENSG00000093167_32 (sequence is synthesized)
tgattgtagggcactttgaataaaacaggatgctgggtgagcaagagagatctggagaatggaacgagagtctggctataggcagcccagagtgtttccctgctgttttttccctcgtct

SEQ ID NO: 102821 - DNA, 120 bp, Artificial Sequence
  ENSG00000093167_33 (sequence is synthesized)
gcaggtccaagcaggcagatctgcttggaaggtgcagaagaaaccaaaatctttatttggctatgaccctgtttacagagggtagtggttggcgaggtatcagctgcttttttaagtgaa

SEQ ID NO: 102822 - DNA, 120 bp, Artificial Sequence
  ENSG00000093167_34 (sequence is synthesized)
ccatggtatctcctcagctgaaggggcctattttaatgcaggcttgggaagagtcaaacctccacaggctaggagtgagccctaatggtgctgccaccaagccgcagatctacccatgga

SEQ ID NO: 102823 - DNA, 120 bp, Artificial Sequence
  ENSG00000093167_35 (sequence is synthesized)
ttttttttttttgagacgaagtctcactcggtcgcccaggcaggattgtagtggcgcgatctcagttcactgcaacatacaacctctatctcccaggttcagacggcttcccgagtagct

SEQ ID NO: 102824 - DNA, 74 bp, Artificial Sequence
  ENSG00000093167_36 (sequence is synthesized)
tctcccaggttcagacttaatttttgtatttgtttagtagagacgtggtttcaccattttggccaggctggtct

SEQ ID NO: 102825 - DNA, 120 bp, Artificial Sequence
  ENSG00000093167_37 (sequence is synthesized)
caggcgtgagccaccacacctggcctggctgcccacatcttggagtgggtccccttccctccctactagcttttggggactttgcttcttccagcattatgctcctctcttttctcttct

SEQ ID NO: 102826 - DNA, 120 bp, Artificial Sequence
  ENSG00000093167_38 (sequence is synthesized)
tttgcttcttccagcattatgctcctctcttttctcttctctagcttcctttgcccagtcctgctcttaccccatcttctttcacatatttggatctctcccgctaagggctcagccttt

SEQ ID NO: 102827 - DNA, 120 bp, Artificial Sequence
  ENSG00000093167_39 (sequence is synthesized)
aggaacacacttgacatttgagttgtctgtctactagtgaaagcttgaaacaaggaaatgacctcctttgtacttctgtttgtctttaagtggcaaatcactgctgtggggaacaaatgt

SEQ ID NO: 102828 - DNA, 120 bp, Artificial Sequence
  ENSG00000093167_40 (sequence is synthesized)
gtaatttatcagataatattagctgtttatgagtttgaaaaatttttaattgtttatgtactatatcatcacatatttagtttatgatctttttcatttgttttagatgtaaggctacga

SEQ ID NO: 102829 - DNA, 65 bp, Artificial Sequence
  ENSG00000093167_41 (sequence is synthesized)
ggccaataaaactcaacttttaaaacttcagaaggaaggaattgaacaaaacttgccttgtgaac

SEQ ID NO: 102830 - DNA, 120 bp, Artificial Sequence
  ENSG00000093167_42 (sequence is synthesized)
cttcagaaggaaggaattgaacaaaacttgccttgtgaactttttggcttataataaattatgctggacttcaaaggagtcaaacaactaggctaaaaactgggttgatcatgtgttata

SEQ ID NO: 102831 - DNA, 120 bp, Artificial Sequence
  ENSG00000093167_43 (sequence is synthesized)
tgcccaaaagttcagcccattatacacatccttttggcttccgggtggtaggatttgaggttaggtcagggataaagagttattttgaactctacaagcgtgtactttttaccctaaaaa

SEQ ID NO: 102832 - DNA, 120 bp, Artificial Sequence
  ENSG00000093167_44 (sequence is synthesized)
aaatctactgtaggagctattgttgcacacaaacacaagggtagtggttatatggtcaggtaatacagagggttttagatccagcttgaatacatttgatccaattataaggtattttag

SEQ ID NO: 102833 - DNA, 120 bp, Artificial Sequence
  ENSG00000093167_45 (sequence is synthesized)
tagtcttcaaactttgtggtgaagtgggtgaatttacaggatgtattttattttctcatctgtaattatgggaagaggaaattaaaaagtccgaaggtaaaaataaaacccagtgcaata

SEQ ID NO: 102834 - DNA, 120 bp, Artificial Sequence
  ENSG00000093167_46 (sequence is synthesized)
cgatgtggaagaagagcaaatgtcatgtatatcatttgctagaattcctagtttcaaattggcctgttcctcagaggtcttttttattcagtgttgttgtttatgtagagcatgttgtga

SEQ ID NO: 102835 - DNA, 120 bp, Artificial Sequence
  ENSG00000093167_47 (sequence is synthesized)
cagtgatcatttacccacttatatgtggtgatacatgacataactatgcatgcagataccagtaaccaaaaatacctaatccataaagtgacactcaacacatgggaaagtattgttgtg

SEQ ID NO: 102836 - DNA, 120 bp, Artificial Sequence
  ENSG00000093167_48 (sequence is synthesized)
ctttgttttcccaatgtttcagttattattaattattaacataatggagtgttaacactagctagatggtgctagaaatgcacattgttaattcacaggcagacttgagacacatcatat

SEQ ID NO: 102837 - DNA, 120 bp, Artificial Sequence
  ENSG00000093167_49 (sequence is synthesized)
agtgtgaatgtaaattgttgaaaagaagtcagatattgacattgcagtttggataagtaaagagtaggatttgccgtatggactcctttcctagcatcatctgggctaacaataagggaa

SEQ ID NO: 102838 - DNA, 120 bp, Artificial Sequence
  ENSG00000093167_50 (sequence is synthesized)
tataatgtggccttcatagagctgtgatatttaaaaaactatttaagggctttggaaacaaaaacaaccagattcattttctggttttgccacttactgtgactttgggcgaaaaaatat

SEQ ID NO: 102839 - DNA, 120 bp, Artificial Sequence
  ENSG00000093167_51 (sequence is synthesized)
aaccactgtgagcctcaattttctgatctgttaaatggggataatacaagtacctcacaggatatgtagaggtttcaaatgtaaaataatgtataagagagaaattatataaaatagtgc

SEQ ID NO: 102840 - DNA, 120 bp, Artificial Sequence
  ENSG00000093167_52 (sequence is synthesized)
ctgccatataatttgtgctatacaaatcgtagttgctatcatcccttatttacttgctccctatttggttgcaaaacaggattataatgattttttgaattgcccagctattcagctatc

SEQ ID NO: 102841 - DNA, 120 bp, Artificial Sequence
  ENSG00000093167_53 (sequence is synthesized)
aatttctcagcaattcgctgtcccacttccaaacccagtgaactgagaggaaagttacctgatatagtttaacttcttggattaatgggaatgctaacagaagacattaaatatatgaac

SEQ ID NO: 102842 - DNA, 120 bp, Artificial Sequence
  ENSG00000093167_54 (sequence is synthesized)
aaaaatatttggggaaaggctttttcaaataggccagtaatcagattcctgcatagactacttaccttgggtgtatttttaattctgggttattttcttttacaatagattttatttttt

SEQ ID NO: 102843 - DNA, 120 bp, Artificial Sequence
  ENSG00000093167_55 (sequence is synthesized)
catagtagattttatttttcattgatgaccaaagtatgttcctgcttctgcattgtcctcagctgacagttgtgagattaaggaaatggcagggaatttacaaatgaaatcaccaacctg

SEQ ID NO: 102844 - DNA, 120 bp, Artificial Sequence
  ENSG00000093167_56 (sequence is synthesized)
attctcctgaactgtccctgctatctaggcattacaggcaatgctttaccttgatttatgcctctgcccttgggatgggtgctattatcccttctgtttttccagtgaggaaactgaggc

SEQ ID NO: 102845 - DNA, 120 bp, Artificial Sequence
  ENSG00000093167_57 (sequence is synthesized)
ttcacattttgggagtataacagaaagccaaatgagtctcagttatatttaattaagttgtcagaagttgatctttgaatccttttggaggttaactattttgaattaagtggtatttga

SEQ ID NO: 102846 - DNA, 120 bp, Artificial Sequence
  ENSG00000093167_58 (sequence is synthesized)
gtattttgccacactacttggagaaaaatctacagccaatattaaattaaaatacctatgtataatagttatttttattccagaactattttttaaaaaatcaactgtattcttgaataa

SEQ ID NO: 102847 - DNA, 120 bp, Artificial Sequence
  ENSG00000093167_59 (sequence is synthesized)
actagtttagttaaacatgaaatgtggggttttttttgttcaccaaataaaaatgcacttaggcagtcagtaaggaaagctttattttactctggcttctctctttatcttccttttcct

SEQ ID NO: 102848 - DNA, 120 bp, Artificial Sequence
  ENSG00000093167_60 (sequence is synthesized)
gttttatttttttcattgactggaaaagatttatttccctgcttgatgtgattaaacatgttttgccaaattgatgcatgagaaccagtttctatgagaagtctcttctggagatgtata

SEQ ID NO: 102849 - DNA, 120 bp, Artificial Sequence
  ENSG00000093167_61 (sequence is synthesized)
tccatgtaactctgtatttcctcccatatctgactgtttgtttccaatcttttgactgctttcttgctttttatgcctttatctttgcttatttgaattaggtacttctctgctaccttt

SEQ ID NO: 102850 - DNA, 120 bp, Artificial Sequence
  ENSG00000093167_62 (sequence is synthesized)
cacctgctctttttctgtgccattgtttcccttgctaccttacctaaaaccaggccctagagaaacagaaagaatacattgcctgccttaggaatgagcgagatatgctcagagaggagc

SEQ ID NO: 102851 - DNA, 120 bp, Artificial Sequence
  ENSG00000093167_63 (sequence is synthesized)
tggctgacctgcaggagacagtgaagacgggagaggtatgttagcattagcctggaattcaggtccctcactgttttactctctatcttccttcctttcatcctgccatctttcctagcc

SEQ ID NO: 102852 - DNA, 120 bp, Artificial Sequence
  ENSG00000093167_64 (sequence is synthesized)
taaatacaaactacagtgtttattctctaatccagatttggtaggttgaagctatttcttacacagagctatatttcatgtaactgattctaaccaggttttacctgtagcaaacatgta

SEQ ID NO: 102853 - DNA, 120 bp, Artificial Sequence
  ENSG00000093167_65 (sequence is synthesized)
ttgttgcagagtgacctcacagagcttacagcttccatacgggccttttgtgatggtgggtttttcccccctgcagaaacatggcttagttataatccccgatggcactcccaatggtga

SEQ ID NO: 102854 - DNA, 120 bp, Artificial Sequence
  ENSG00000093167_66 (sequence is synthesized)
ccagtcaccatcgtccttatctgggagttgaggatgcattgtccattcgaagtgttggcagtcacaggaatcattcttacagtcactctcatggaatgaagaagaggtcttctgattctc

SEQ ID NO: 102855 - DNA, 120 bp, Artificial Sequence
  ENSG00000093167_67 (sequence is synthesized)
gagatgagcttattgaggagaagcagcgcatgcagcagaaaatagacaccatgacaaaagaggtgtttgacctccaggagacacttctttggaaagataaaaaaattgggaaacatggct

SEQ ID NO: 102856 - DNA, 120 bp, Artificial Sequence
  ENSG00000093167_68 (sequence is synthesized)
tcagcctcccaagtagctgagactacatgcatacatcatcacacagggccaatttttgtattttttgtagaaacggggtgtccgcatgttgcccacgctggtctctaactcctgggctca

SEQ ID NO: 102857 - DNA, 120 bp, Artificial Sequence
  ENSG00000093167_69 (sequence is synthesized)
catgagccactgcgcccgtccaggaggaaagtttttagaaaaaggtgcacaagaaagagcataggattgtgccagcattgatgttatcttctggttatatgagagtgtttgccaagaatc

SEQ ID NO: 102858 - DNA, 120 bp, Artificial Sequence
  ENSG00000093167_70 (sequence is synthesized)
ggtcaaatgttttacattagggaaaaagcattattgttactggcatagggagggccccagttaaaatagcagtccaattcagagaccttcgtatttgtcgttaagatcaaaaggactctt

SEQ ID NO: 102859 - DNA, 120 bp, Artificial Sequence
  ENSG00000093167_71 (sequence is synthesized)
ggaataatggactatgctacaggattattttaagttcagatagataaattagcttcttcccaaattctcattctgcttttcctgtggtactatatagtatcatgaagttatatctttaaa

SEQ ID NO: 102860 - DNA, 120 bp, Artificial Sequence
  ENSG00000093167_72 (sequence is synthesized)
ctcttagtttgtactatgtggtgtcttatgaaaaccttgatttgtttatacttagtgaatgaaacacttgggtttaaagttctttaactgatgtcacttcttaggctagaaagctgttga

SEQ ID NO: 102861 - DNA, 120 bp, Artificial Sequence
  ENSG00000093167_73 (sequence is synthesized)
tggtacaagggaggagagaagggagaatgtaatggggaggaaattaacgagaggccctggaaggtagggtcttgggatctctggggagagagtggcctctactttgaccagagaaactat

SEQ ID NO: 102862 - DNA, 120 bp, Artificial Sequence
  ENSG00000093167_74 (sequence is synthesized)
gaaaagtgatgtactgaaatactgacccttccagctggttaactttcataatcatgcatttacttttcaatggcaactgaatatatgactgcctgatgattcaggggaaaaaatgcagta

SEQ ID NO: 102863 - DNA, 120 bp, Artificial Sequence
  ENSG00000093167_75 (sequence is synthesized)
tccagtcaccatcgtccttatctgggagttgaggatgcattgtccattcgaagtgttggcagtcacaggtatgatatgttcaaggatagatcatcaagactttcatcattaaatcattct

SEQ ID NO: 102864 - DNA, 120 bp, Artificial Sequence
  ENSG00000093167_76 (sequence is synthesized)
tacagtcactctcatggaatgaagaagaggtcttctgattctcataaagacctactgagtggcctctactttgaccagagaaactatagcagtcttagacatagcaaacccacctctgcc

SEQ ID NO: 102865 - DNA, 120 bp, Artificial Sequence
  ENSG00000093167_77 (sequence is synthesized)
tactacactcggcagtcttcttccctgtacagtgaccctctggcaacatataagagtgacagggcctctcctactgcaaattctggtctgctgagaagtgccagtctggcatcattgtac

SEQ ID NO: 102866 - DNA, 120 bp, Artificial Sequence
  ENSG00000093167_78 (sequence is synthesized)
aatggtggattatataacccttatggtcctcgaactccatctgaatgcagttattattcatcaagaataagttcagcccgaagcagtccagggtttaccaacgatgacactgcaagcatt

SEQ ID NO: 102867 - DNA, 120 bp, Artificial Sequence
  ENSG00000093167_79 (sequence is synthesized)
gtgtcttctgatcgtgccagtcgtggacgaagggagagtgtggtatctgccgctgattatttcagtcgctccaatcgtaggggaagtgttgtctctgaggtggatgatatcagtatccca

SEQ ID NO: 102868 - DNA, 120 bp, Artificial Sequence
  ENSG00000093167_80 (sequence is synthesized)
gtttaaaataatattttttcaagataacattttattttgaggataaatctatatgaaaaagtgcagttattggagaatgcagtgttgcaaatagaattagttggcagggactccacggtt

SEQ ID NO: 102869 - DNA, 120 bp, Artificial Sequence
  ENSG00000093167_81 (sequence is synthesized)
gttgtggtttgaatatcttgcagcactaaccctgtttaaccaacgtcatgctctgtttaacagatgcagagataatgacctagtattataatatgtagaataagaatttcagaaagtgtg

SEQ ID NO: 102870 - DNA, 120 bp, Artificial Sequence
  ENSG00000093167_82 (sequence is synthesized)
aggaagtgttgtattatgttttgttaggtctgttgctggatatttatcatcgtgaagaatgatgtgggaagataaatgaaggggtctagatgtaaatgtcagtggaaaggagagctacca

SEQ ID NO: 102871 - DNA, 120 bp, Artificial Sequence
  ENSG00000093167_83 (sequence is synthesized)
atggcggaacagggagccaggggcatcgccgcttggggaacctcacccgccggcccagggctcagctcgccgtgtgacagccccgggtactttgcccagcggggtgcaagcccggaccgc

SEQ ID NO: 102872 - DNA, 120 bp, Artificial Sequence
  ENSG00000093183_0 (sequence is synthesized)
acggcctacctgcgcctgggctgccggtgacctgggccgagccctcccggtcggctaagattgctgaggaggcggcgggtagctggcaggcgccgacttccgaaggccgccgtccgggcg

SEQ ID NO: 102873 - DNA, 120 bp, Artificial Sequence
  ENSG00000093183_1 (sequence is synthesized)
aggtgtcctcatgacttctcttgtggaccatgtccgtgatcttttttgcctgcgtggtacgggtaagggatggactgcccctctcagcctctactgatttttaccacacccaagattttt

SEQ ID NO: 102874 - DNA, 120 bp, Artificial Sequence
  ENSG00000093183_2 (sequence is synthesized)
tggaatggaggagacggctcaagagtttagccttgcgactggcccagtatccaggtcgaggttctgcagaaggttgtgactttagtatacatttttcttctttcggggacgtggcctgca

SEQ ID NO: 102875 - DNA, 120 bp, Artificial Sequence
  ENSG00000093183_3 (sequence is synthesized)
tggctatctgctcctgccagtgtccagcagccatggccttctgcttcctggagaccctgtggtgggaattcacagcttcctatgacactacctgcattggcctagcctccaggccatacg

SEQ ID NO: 102876 - DNA, 120 bp, Artificial Sequence
  ENSG00000093183_4 (sequence is synthesized)
cttttcttgagtttgacagcatcattcagaaagtgaagtggcattttaactatgtaagttcctctcagatggagtgcagcttggaaaaaattcaggaggagctcaagttgcagcctccag

SEQ ID NO: 102877 - DNA, 120 bp, Artificial Sequence
  ENSG00000093183_5 (sequence is synthesized)
cggttctcactctggaggacacagatgtggcaaatggggtgatgaatggtcacacaccgatgcacttggagcctgctcctaatttccgaatggaaccagtgacagccctgggtatcctct

SEQ ID NO: 102878 - DNA, 120 bp, Artificial Sequence
  ENSG00000093183_6 (sequence is synthesized)
ccctcattctcaacatcatgtgtgctgccctgaatctcattcgaggagttcaccttgcagaacattctttacaggttgcccatgaggaaattggaaacattctggcttttcttgttcctt

SEQ ID NO: 102879 - DNA, 120 bp, Artificial Sequence
  ENSG00000093183_7 (sequence is synthesized)
tcgtagcctgcattttccagtgttatttgtacctgttctacagtccagccaggactatgaaggtggtgcttatgctgctctttatttgcctgggcaacatgtacctgcacgggctgagga

SEQ ID NO: 102880 - DNA, 120 bp, Artificial Sequence
  ENSG00000093183_8 (sequence is synthesized)
acctctggcaaatccttttccacataggagtggcttttctgtcttcatatcagatactaacaaggcagcttcaggagaagcagtctgactgtggagtatgaggatgacactgtgatgaat

SEQ ID NO: 102881 - DNA, 120 bp, Artificial Sequence
  ENSG00000093183_9 (sequence is synthesized)
ggattctttgattttcttttgaggatcaatctatgtttctctttctgcttctctactttacactccagtttccatccttttcagccaactggactgaaaaaccaggaattggggatgtta

SEQ ID NO: 102882 - DNA, 120 bp, Artificial Sequence
  ENSG00000093183_10 (sequence is synthesized)
aacagttgcagtggaagtcatgaggttgcttgatacccagccttggttctgtgccaagcattactgcaggatctccagccagttcagcacgtttacctaggacagctggatctgggggct

SEQ ID NO: 102883 - DNA, 120 bp, Artificial Sequence
  ENSG00000093183_11 (sequence is synthesized)
catccagaaagagctttattggaagagagaaaggaaatattttggtcttttaagttgaatgatacagtaaaccacttgattcaataacactggttttagtcattgagagttgtctccaag

SEQ ID NO: 102884 - DNA, 120 bp, Artificial Sequence
  ENSG00000093183_12 (sequence is synthesized)
gaaccactttaaaatccaaatcagctttcagtctaaacataacttgattagttttttttttcagagggtcagtacaggatgaattaaaaacctaaaaatatggttcataaatgtaagcta

SEQ ID NO: 102885 - DNA, 120 bp, Artificial Sequence
  ENSG00000093183_13 (sequence is synthesized)
gataaattttgtttacattttttcaatatcttaggttcgatatacctttggaatatttaattatattttggatataaattggacttcatttagggtgagggcaaacttaagctgagaaaa

SEQ ID NO: 102886 - DNA, 120 bp, Artificial Sequence
  ENSG00000093183_14 (sequence is synthesized)
tggttaagaaatctgagtttatttaatttatatgtaaccttttatagtggtgggactgtttgggtacagagatgttttatatttatttgcagggtatatccgaatattttaaaaattaat

SEQ ID NO: 102887 - DNA, 120 bp, Artificial Sequence
  ENSG00000093183_15 (sequence is synthesized)
tgaataaccagtacttctagatgataagtttgtcagcatgagcagaaatgagaatttcaggattacttacaattgaccacaacctggagtaggtgaatgaacatggattcagtggcactt

SEQ ID NO: 102888 - DNA, 120 bp, Artificial Sequence
  ENSG00000093183_16 (sequence is synthesized)
tacagatccgcttgggaggggctgctgtcatcagccttttcagtagagctgagtgcctgttgttttaatgatgatgactactgtaccctgtgtacctgttcccagagcgcctccaaaatt

SEQ ID NO: 102889 - DNA, 120 bp, Artificial Sequence
  ENSG00000093183_17 (sequence is synthesized)
aattactcctctgcacctttcccagtcatcttaattagcttgagggcctcattttttatgaacaagagttaagtatctgttaactttttaaagcttgatagagatataattaacacatac

SEQ ID NO: 102890 - DNA, 120 bp, Artificial Sequence
  ENSG00000093183_18 (sequence is synthesized)
tctggaaagttactctctttcactgtcaaaaaattgattgatcacagttttccaaaatatggttctggataagatcccttaggtttcccgaaatttcagcctggcttgttttgtaccacg

SEQ ID NO: 102891 - DNA, 120 bp, Artificial Sequence
  ENSG00000093183_19 (sequence is synthesized)
caggaggtcattttgggagtttgctctttggattgttcttggtagaagtctggaatctgaatagttcaaccacagttgcatggaacactttgagtgttcaactgcattatgtggtcttga

SEQ ID NO: 102892 - DNA, 120 bp, Artificial Sequence
  ENSG00000093183_20 (sequence is synthesized)
taaatttttaaaaatcctattttgatagtttttaaaagtggaaaaccattacaagagttgagtggatagggaatgtaagaatgtagttttagaaaaattcaattatatttggttatcact

SEQ ID NO: 102893 - DNA, 120 bp, Artificial Sequence
  ENSG00000093183_21 (sequence is synthesized)
ggtattgtattgttattgagctaccttgttatcattttaagaaaaataagtttatatactgggaactatgttgggaaaatgttgccatagtaactttattttttataatagaattttcta

SEQ ID NO: 102894 - DNA, 90 bp, Artificial Sequence
  ENSG00000093183_22 (sequence is synthesized)
tgaaaggccaaagcaggagactcggttgaggccagtagtttgagaccagcctggacaacatagtaagattcatctctacaaaaaaaaaaa

SEQ ID NO: 102895 - DNA, 120 bp, Artificial Sequence
  ENSG00000093183_23 (sequence is synthesized)
aagcaggagactcggttgaggccagtagtttgagaccagcctggacaacatagtaagattcatctctacaaaaaaaaaaattagccggatgtgatggcacatgcctgtaatcccagcact

SEQ ID NO: 102896 - DNA, 120 bp, Artificial Sequence
  ENSG00000093183_24 (sequence is synthesized)
ttgaggcttccatgagctataatcacaccactgcaccccagcctgcatgacagagtgaaaccctgtctctaaaaagtctgaatatgaaaattatattggcagcatactcagacataaact

SEQ ID NO: 102897 - DNA, 120 bp, Artificial Sequence
  ENSG00000093183_25 (sequence is synthesized)
ccaaagttgtctctacactgatttcacatctgcataattttctgcatacccagcaggtgaattttcagtttttctgggagacaattttgaagagatggtgaaatagaatgggaagttaag

SEQ ID NO: 102898 - DNA, 120 bp, Artificial Sequence
  ENSG00000093183_26 (sequence is synthesized)
aatggactgttttcttttcctatgtggcattgggttgccatgtagacctgtaccccaggtgctttgggcatctgagcctatgatccatattcagcaggcagtaaagaaacggtccttgaa

SEQ ID NO: 102899 - DNA, 120 bp, Artificial Sequence
  ENSG00000093183_27 (sequence is synthesized)
gatgagtccttcctggtaatgcttcctgaccaccgaggcactaccagagatgttatccacaccaggtcgaatgtgtggatatcagttaacatctacatggggtgagattgacttttgcaa

SEQ ID NO: 102900 - DNA, 120 bp, Artificial Sequence
  ENSG00000093183_28 (sequence is synthesized)
acaaaagggaaaagatgcactagaaaaacagtacaagtaatgaccacaaaaacattgtttgactgaaatccagctagctaaaagaatcctcagctcactgaaggaagagactgaaaatag

SEQ ID NO: 102901 - DNA, 120 bp, Artificial Sequence
  ENSG00000093183_29 (sequence is synthesized)
gaaagaagttctggtgatttcatccgagggaaatccccaggcttaggtttgacttggttcagggttggaggtttatagcctcttgtgtgatccttgataccagcaaactggttccaaatc

SEQ ID NO: 102902 - DNA, 120 bp, Artificial Sequence
  ENSG00000093183_30 (sequence is synthesized)
ccaggagttatcctcactccaccatggactcactgttgttgtagcacttttgttttcccagtagttaaatgctacctgtgcagctgacatcactggactagatctgggaatagatgaaat

SEQ ID NO: 102903 - DNA, 120 bp, Artificial Sequence
  ENSG00000093183_31 (sequence is synthesized)
aatgttgaaaacaaaactttagaggtgccttctggtatcagatgctgcaaggccttgagcatcagagtgtgttaagtcccatctactgtatcaaggccagagtgtggctccatgctctta

SEQ ID NO: 102904 - DNA, 120 bp, Artificial Sequence
  ENSG00000093183_32 (sequence is synthesized)
ggaagggtttcccaaccacggggccagagcccaaaaggtttccccttccctaatatgctaatgaacgaaacatgtaaatctgttttcccctgttaggctagtcttactgtgatgagaagt

SEQ ID NO: 102905 - DNA, 120 bp, Artificial Sequence
  ENSG00000093183_33 (sequence is synthesized)
gtacctggctttccttttcctgggtggagacagctggggcatattcgggtggcattccctctcagtaccagaggccccactgcctgcagctggaggcatgtgaccataagctcctgcttt

SEQ ID NO: 102906 - DNA, 120 bp, Artificial Sequence
  ENSG00000093183_34 (sequence is synthesized)
tgctttttgggcttgcatccctcttttctgtgaactctggagaatgctggaattaaaacatttaagcattttgattaaatgagcttgagctcctctgttcttttctaggtgctcttgttc

SEQ ID NO: 102907 - DNA, 120 bp, Artificial Sequence
  ENSG00000093183_35 (sequence is synthesized)
tccaactctcctgcctctttctacctctgccctatacattccagctctggagacagagtctgaaactggagtctctggagggatgagaaaaccatctttaattgtaacaaatggggtggg

SEQ ID NO: 102908 - DNA, 120 bp, Artificial Sequence
  ENSG00000093183_36 (sequence is synthesized)
tagacgagcttcagagtgggagcagattgcattgaggttcaactctcccacccatgcctgggagtcaagtcttggagaggagtaacacttggtggtcagcacagctcagagtcagagaca

SEQ ID NO: 102909 - DNA, 120 bp, Artificial Sequence
  ENSG00000093183_37 (sequence is synthesized)
atagccagcaggccagcaaggctggctgtgtgaggcacaggaagcagggcataggtagggagcagagctgggggttctctctctgctggaagatagcagctgccccttggcatatggggg

SEQ ID NO: 102910 - DNA, 120 bp, Artificial Sequence
  ENSG00000093183_38 (sequence is synthesized)
ttgcacactgcaccttgtagccagggctgctatttgctgttctgtgaaggagttggccactcattgtgacatgcaggacagtggccttctgagaacctgctgcttgcttgcatagtgcag

SEQ ID NO: 102911 - DNA, 120 bp, Artificial Sequence
  ENSG00000093183_39 (sequence is synthesized)
cacaagtgaggacaggcaggggtgggagcatttatggtgatcagatgtgcctggcaagcccctgttcagacattgctcacattccaaatgttttcgtgtagaatattgcacaggtctggg

SEQ ID NO: 102912 - DNA, 120 bp, Artificial Sequence
  ENSG00000093183_40 (sequence is synthesized)
gacgctctacctgtgccctgtgagtgttaataatggtggagaaagagtgtagctgtgcccttgagagagaaggtgagggaaagagtgcaccagtcagctgaccgtcagctggctaggctc

SEQ ID NO: 102913 - DNA, 120 bp, Artificial Sequence
  ENSG00000093183_41 (sequence is synthesized)
ttcactgagtcctatgtcgcagtgcacaaatcactgcccatcaggcctcagtttcctcatctggtaaatggtgataacatcaatctgcccccccgccagggtgctgttatgagggtcaaa

SEQ ID NO: 102914 - DNA, 120 bp, Artificial Sequence
  ENSG00000093183_42 (sequence is synthesized)
agtggtagtggagggtaatactgggtgagtccattgtgtgtgggaggagaaaggctttacattcacctggtacatgaaggtttttctgcttcaggcagcacagcacagccatttcttctg

SEQ ID NO: 102915 - DNA, 120 bp, Artificial Sequence
  ENSG00000093183_43 (sequence is synthesized)
gcctttacaaaaaggcattttgttatactacagtgtaaacctcatttttttcactccaaaaggtagcagcccctcttcttcccaccctggacctgcctttcactccctgggcacagagcg

SEQ ID NO: 102916 - DNA, 120 bp, Artificial Sequence
  ENSG00000093183_44 (sequence is synthesized)
catggtaccattgatgtttggtttattccaggatccaaggagctggttctgctggttggaccaaacctcgtgagccagccacccctgacccaaatgaggagagctctgattctcccatcc

SEQ ID NO: 102917 - DNA, 120 bp, Artificial Sequence
  ENSG00000093183_45 (sequence is synthesized)
gggagcagtgatgtcaaacttctgctgctggggaaatctcatcagcagggagcctgtggaaaagggcatgtcagtgaaatctgggaatggctggattcggaaacatctgcccatgtgtat

SEQ ID NO: 102918 - DNA, 120 bp, Artificial Sequence
  ENSG00000093183_46 (sequence is synthesized)
tgatggcagagctgttgcccacaagcgccttttatttagggtaaaattaacaaatccattctattcctctgacccatgcttagtacatatgacctttaacccttacatttatatgattct

SEQ ID NO: 102919 - DNA, 120 bp, Artificial Sequence
  ENSG00000093183_47 (sequence is synthesized)
ggggttgcttcagaagtgttatttcatgaatcattcatatgatttgatcccccaggattctattttgtttaatgggcttttctactaaaagcataaaatactgaggctgatttagtcagg

SEQ ID NO: 102920 - DNA, 120 bp, Artificial Sequence
  ENSG00000093183_48 (sequence is synthesized)
gcaaaaccatttactttacatattcgttttcaatacttgctgttcatgttacacaagcttcttacggttttcttgtaacaataaatattttgagtaaataatgggtacattttaacaaac

SEQ ID NO: 102921 - DNA, 120 bp, Artificial Sequence
  ENSG00000093183_49 (sequence is synthesized)
tcagtagtacaacctaaacttgtataaaagtgtgtaaaaatgtatagccatttatatcctatgtataaattaaatgaggtggcttcagaaatggcagaataaatctaaagtgtttattaa

SEQ ID NO: 102922 - DNA, 120 bp, Artificial Sequence
  ENSG00000093183_50 (sequence is synthesized)
cggtgacctgggccgagccctcccggtcggctaagattgctgaggaggcggcgggtagctggcaggcgccgacttccgaaggccgccgtccgggcgagatttacacatgtacctccagag

SEQ ID NO: 102923 - DNA, 120 bp, Artificial Sequence
  ENSG00000093183_51 (sequence is synthesized)
acatgtacctccagagccagaaggataaagcactcggggaaaaattagttttgttttttgtttttttgtttttgacggagtctcgctctgtagcccaggatggagtgcagtggtgtgatc

SEQ ID NO: 102924 - DNA, 120 bp, Artificial Sequence
  ENSG00000093183_52 (sequence is synthesized)
actctgtcacgcggagcctccccgcctccagacgtcagtccggttgctaccccggcaggaatcgagcttagatcacgaaggctccttctcacctccggacgtgagaattacaggcttgga

SEQ ID NO: 102925 - DNA, 120 bp, Artificial Sequence
  ENSG00000093183_53 (sequence is synthesized)
acctgcgcctgggctgccggtgacctgggccgagccctcccggtcggctaagattgctgaggaggcggcgggtagctggcaggcgccgacttccgaaggccgccgtccgggcgagcaact

SEQ ID NO: 102926 - DNA, 120 bp, Artificial Sequence
  ENSG00000093183_54 (sequence is synthesized)
cagaaggttgtgactttagtatacaatgtggagaagtctgaggctaattcccccaatagaatatgcatccctcatgcatgaataaataagagtgatcacaggctgtcattgattaagact

SEQ ID NO: 102927 - DNA, 120 bp, Artificial Sequence
  ENSG00000093183_55 (sequence is synthesized)
gaggagcctccagccagcgctcctatacctgcgcgttccctgtttgcccccccctttgaagtcagtcgcccaatctgaaagccgtggatgcgcctgcgccctccatctcgtcagtagaga

SEQ ID NO: 102928 - DNA, 120 bp, Artificial Sequence
  ENSG00000093183_56 (sequence is synthesized)
aagaaagacagtctcaggaataggtcgaactgaagagacaatatacctgcagcaaacagctacaggactgtttaaagccaagcaagtgcagaattcagtttttcttctttcggggacgtg

SEQ ID NO: 102929 - DNA, 120 bp, Artificial Sequence
  ENSG00000093183_57 (sequence is synthesized)
aaaaaaagtcccatagggatgagttctcagcaaaaaggacaaaacacaagaggagacattccacagtgagtgggagtcagtagacacacagataggtgacctagaacccctgtaccctga

SEQ ID NO: 102930 - DNA, 120 bp, Artificial Sequence
  ENSG00000093183_58 (sequence is synthesized)
acttgaaatgattgcatgacagcccaaaagggagtagaaaaagaagaaaagccctgtatttattttatgagaccaaaataacctaaataccacaatcagatgaagacagtataagaaagg

SEQ ID NO: 102931 - DNA, 120 bp, Artificial Sequence
  ENSG00000093183_59 (sequence is synthesized)
aaaattataggccagtcttatttgcatagacacaaaagtcccaattaaaatgttagcaaactaaatccagcagttgtatgtttatgaatatgtaggaacttagatccaacaagggcttat

SEQ ID NO: 102932 - DNA, 120 bp, Artificial Sequence
  ENSG00000093183_60 (sequence is synthesized)
ccagtttccagctcacccggctcccggttgatctcgatgtcgaagtggcactgcggccggtcctgcgcccccatcgcgaccgaggtggcggcaagagctgggagagagggggagaaaagc

SEQ ID NO: 102933 - DNA, 71 bp, Artificial Sequence
  ENSG00000093183_61 (sequence is synthesized)
gaatgggaagttaaggaggggaggtaaaatgttttaaatgagaagaacaaaaaagctttaaaagtcaataa

SEQ ID NO: 102934 - DNA, 120 bp, Artificial Sequence
  ENSG00000093217_0 (sequence is synthesized)
gtctctgggcgctggagcgcggcgactatcacgccgcgtggcggacggacggactgacggacgcgcagccttacccgaaaggccatggcggagcacgcccctcgccgctgctgcctgggc

SEQ ID NO: 102935 - DNA, 120 bp, Artificial Sequence
  ENSG00000093217_1 (sequence is synthesized)
tgggacttcagcacgcagcaggtaaaggttgttgctgttgatgcagagttgaatgtcttctatgaggaaagtgtgcattttgacagagatcttccagaatttgggactcagggtggtgtt

SEQ ID NO: 102936 - DNA, 120 bp, Artificial Sequence
  ENSG00000093217_2 (sequence is synthesized)
catgtgcacaaggatgggctgacggtcacttctccagtactaatgtgggtccaggcactggatatcatcttggagaagatgaaggcttcgggcttcgacttctctcaagtcctagccttg

SEQ ID NO: 102937 - DNA, 120 bp, Artificial Sequence
  ENSG00000093217_3 (sequence is synthesized)
tccggggcgggccagcaacacggaagtatatactggaaggctggagcccagcaggcactgacaagcttatcaccagacctccggctacaccagcagctgcaggactgtttctccatcagc

SEQ ID NO: 102938 - DNA, 120 bp, Artificial Sequence
  ENSG00000093217_4 (sequence is synthesized)
gactgcccggtgtggatggactccagcaccacagcccagtgccgccagctggaggctgctgtgggtggtgctcaggctctcagctgcctcacggggtcccgtgcctatgagcgttttaca

SEQ ID NO: 102939 - DNA, 120 bp, Artificial Sequence
  ENSG00000093217_5 (sequence is synthesized)
gggaaccaaattgcaaaaatttaccagcagaaccccgaggcctactcacatacggagagaatttctttggtcagtagctttgctgcttccctgttccttggctcttactcccctattgac

SEQ ID NO: 102940 - DNA, 120 bp, Artificial Sequence
  ENSG00000093217_6 (sequence is synthesized)
tacagtgatggttctggaatgaatttgttgcagatacaggataaagtctggtcccaggcttgccttggtgcctgtgcacctcatttagaggagaagcttagcccaccagtaccatcatgc

SEQ ID NO: 102941 - DNA, 120 bp, Artificial Sequence
  ENSG00000093217_7 (sequence is synthesized)
tcagttgtgggagccatttcttcctactacgtccagcgctacggatttcctccaggatgcaaagtggtggccttcactggggacaacccagcgtcgctggcaggcatgagactggaggaa

SEQ ID NO: 102942 - DNA, 120 bp, Artificial Sequence
  ENSG00000093217_8 (sequence is synthesized)
ggtgacattgcggtcagcctgggcaccagtgacaccctgtttctctggctccaagagcccatgcctgccctggaaggccacatcttctgcaacccggttgactcccagcactacatggca

SEQ ID NO: 102943 - DNA, 120 bp, Artificial Sequence
  ENSG00000093217_9 (sequence is synthesized)
ctcctgtgctttaaaaatggctccctcatgagagagaagatccgcaacgagtctgtatcccgttcctggagcgatttctctaaggcactgcagtccacagagatgggcaacggtggaaac

SEQ ID NO: 102944 - DNA, 120 bp, Artificial Sequence
  ENSG00000093217_10 (sequence is synthesized)
ctgggtttttattttgatgtaatggagatcacccctgaaattattggacgtcataggtttaacacagaaaaccacaaggttgcagcattccctggggatgtggaggttcgagcactaatt

SEQ ID NO: 102945 - DNA, 120 bp, Artificial Sequence
  ENSG00000093217_11 (sequence is synthesized)
gaaggacaattcatggccaagaggattcacgcagaaggcctgggctatcgagtcatgtccaagacaaagattttggccacaggaggagcatctcacaatagagaaatcttacaggtgctt

SEQ ID NO: 102946 - DNA, 120 bp, Artificial Sequence
  ENSG00000093217_12 (sequence is synthesized)
gcagatgtgtttgatgccccggtgtatgttatagacactgccaactcggcctgtgtgggttctgcataccgagcttttcatggtcttgcaggtggaacagatgtgcccttttcagaggtt

SEQ ID NO: 102947 - DNA, 120 bp, Artificial Sequence
  ENSG00000093217_13 (sequence is synthesized)
gtgaagttagctccaaatcccagactagctgctaccccaagcccgggagcttctcaggtctacgaggcccttctcccccagtatgccaaactcgagcagagaatcttgtctcagacccgg

SEQ ID NO: 102948 - DNA, 120 bp, Artificial Sequence
  ENSG00000093217_14 (sequence is synthesized)
gggcctccggagtgaacaggcatccctgttgcccctgcctgcccagatttactgaccccatttgtcgacatggccccagacaggagggatccacttctctgttctgaacagctcttcctg

SEQ ID NO: 102949 - DNA, 120 bp, Artificial Sequence
  ENSG00000093217_15 (sequence is synthesized)
agataggcactcctgtccctgtgcccgtgtgccccagggcaggaaagcatctctcttttcctgtcttttatcccaggaggcaggacaacactgagactgggatatgtccaataaaaacta

SEQ ID NO: 102950 - DNA, 120 bp, Artificial Sequence
  ENSG00000093217_16 (sequence is synthesized)
tgacttttccccttgcagaggcagaattaaagctaatctagggactcaaatcagcagaatgggggagacaaagcccggtctcaccccctaacctcatcctatctctttctccaaccctga

SEQ ID NO: 102951 - DNA, 120 bp, Artificial Sequence
  ENSG00000093217_17 (sequence is synthesized)
ctgcccactcctccacaaaccgtgacccatagccgcccccaccccataccttgatctaccatccatcctcttccccaatccaaaccccacagtctcttctctcccacaccctgccctcct

SEQ ID NO: 102952 - DNA, 120 bp, Artificial Sequence
  ENSG00000093217_18 (sequence is synthesized)
tgtttcagctgtctgaggtgcctcgcagggcctctcttacttgccccatgctcaccctttccatgctgtccccattctctcctttcaccatctctcctctccccctccttcatctctcct

SEQ ID NO: 102953 - DNA, 120 bp, Artificial Sequence
  ENSG00000093217_19 (sequence is synthesized)
ccctccccaaactcacttggcataattcacaacctcccacccaaacaatgggcctggtggacgtgcttcctgtgccctccctttagctatgcccacagatcactgagagggaccatctcc

SEQ ID NO: 102954 - DNA, 120 bp, Artificial Sequence
  ENSG00000093217_20 (sequence is synthesized)
caagtggtgcagtttagaacttctctccctttttctccctcattccctctctcttcttgcagtccacttgctgaagaagttgtgtcatttctctggaagaatttccaaaattctggattt

SEQ ID NO: 102955 - DNA, 120 bp, Artificial Sequence
  ENSG00000093217_21 (sequence is synthesized)
cttttttattttggagtatttcatcagctgaaaagtgattctcactttgagttttcttcctatatttgtatagtgagttcctttttccttcctctttatccctcctgttttactttatac

SEQ ID NO: 102956 - DNA, 120 bp, Artificial Sequence
  ENSG00000093217_22 (sequence is synthesized)
ctctctattccttgctcaaattattgcaaaagcctctatagaaagtcctctgtgatctgactcctgcagactcttccagatttttctgcccaaggcctttactgagctcaggactccagc

SEQ ID NO: 102957 - DNA, 120 bp, Artificial Sequence
  ENSG00000093217_23 (sequence is synthesized)
taaatcaaaatacgcatgttctcacccagagtgacaaaatcctgcagataggtttaagacctagtggctcagagcagtagctactgggaagttaaaaggaaggggcttagaaaatgaatg

SEQ ID NO: 102958 - DNA, 120 bp, Artificial Sequence
  ENSG00000093217_24 (sequence is synthesized)
ggaccaaaggcatcacttctgatggagatgaagccatcttgaaagtgagtggtgtcctttggaggcatggtggatgaaaggcgcaaaggaagcaagaggttaaagataatggcccattag

SEQ ID NO: 102959 - DNA, 120 bp, Artificial Sequence
  ENSG00000093217_25 (sequence is synthesized)
atacaacagcaagcccaagattccgaagaagacagacaactccccctagtaccacctagacattactttttaaagacattttacattattgtccagcagaaaaaggctgtcttggaccat

SEQ ID NO: 102960 - DNA, 120 bp, Artificial Sequence
  ENSG00000093217_26 (sequence is synthesized)
gaaacagtaaactgtaactaaacacttcaacatgaatttgaaaataaataattgtggatataaaagaacaccagagatcagaaattcaaaaactcagaataaaaatgaaaaagctacaag

SEQ ID NO: 102961 - DNA, 120 bp, Artificial Sequence
  ENSG00000093217_27 (sequence is synthesized)
catatatgagaagagaactgactgaacttgggaaataatttgaacaaaaagataaatcttcacagatatgaatactaaattatatcttaatgaaaatagatatggtcacaagtacattaa

SEQ ID NO: 102962 - DNA, 120 bp, Artificial Sequence
  ENSG00000093217_28 (sequence is synthesized)
ggcacgtagaaggtaggagtaagaaaagctaagagaagcaaaacaaacaaagcaatattaaaggaagagccaaaaagacccagaaataaaatgacagataaagaagattgtcaaagaaaa

SEQ ID NO: 102963 - DNA, 120 bp, Artificial Sequence
  ENSG00000093217_29 (sequence is synthesized)
gatgatacaggtaagattggaactcatgaagacaaaagataagacagtggcatagagttaatatttaaaattcaaatattaaaactcaaataaaccccaaagaacttttggaaaacaaaa

SEQ ID NO: 102964 - DNA, 67 bp, Artificial Sequence
  ENSG00000093217_30 (sequence is synthesized)
cttttcagaggttgtgaagttagctccaaatcccagactagctgctaccccaagcccgggagcttct

SEQ ID NO: 102965 - DNA, 90 bp, Artificial Sequence
  ENSG00000093217_31 (sequence is synthesized)
agaatcaatttttgtttgattttgtgtcttgcaactttattaaattcacttactagttatggtagtattttgtattagtaggatatgtag

SEQ ID NO: 102966 - DNA, 120 bp, Artificial Sequence
  ENSG00000093217_32 (sequence is synthesized)
tactagttatggtagtattttgtattagtaggatatgtagggtttctatccatcatgtcatgtcatctataaaaacaaagacagttttcttctcttcaatctgtaagcattttatttcat

SEQ ID NO: 102967 - DNA, 120 bp, Artificial Sequence
  ENSG00000093217_33 (sequence is synthesized)
tttcttgcctttctgcaatggctagaatgtctagtatagtgttgaatagaagcagggagagcaataatccttgccttgttcctgatcttagcggacagcattttatcactaagagtgtgt

SEQ ID NO: 102968 - DNA, 120 bp, Artificial Sequence
  ENSG00000093217_34 (sequence is synthesized)
gtgtgaatacgccctccatcgggctaagaaatttccctttcatttcttgctggaggtggggaggaatatttaaaaagaatgtgtaggtttgtcttgaattttgttaaatgttttgcatgt

SEQ ID NO: 102969 - DNA, 120 bp, Artificial Sequence
  ENSG00000093217_35 (sequence is synthesized)
atgtgttatggttttggtattatgtgttccttaaatatttgattgaattcaccagtgaaaccatcttagttagatgttttctttgtggaacttttaagtgaaaactcaatttacataaaa

SEQ ID NO: 102970 - DNA, 120 bp, Artificial Sequence
  ENSG00000093217_36 (sequence is synthesized)
tctccacgaccgagctggtctcggcaagtggtgcccaacacgggggctcgaacctgggtcgaatagtcgccagagcgatggttagaaaatgtggaactacactggaggacacccgagtac

SEQ ID NO: 102971 - DNA, 120 bp, Artificial Sequence
  ENSG00000093217_37 (sequence is synthesized)
agaatttggagcaaccttggaagcacatgtggaacatgacagagccaccatcaacctggttcctgaatgactgcatggagcagaactccccactccccactcatgttcctaaccacctac

SEQ ID NO: 102972 - DNA, 120 bp, Artificial Sequence
  ENSG00000093217_38 (sequence is synthesized)
tgattgtgctttacatgaggagaaagaaacttcagctgtatcaagccatagaaatgtgtttttccttaactaatataattttttccctcatatcctttttttaaagaaaatactggggcc

SEQ ID NO: 102973 - DNA, 120 bp, Artificial Sequence
  ENSG00000093217_39 (sequence is synthesized)
accttttaaaatgtacaatttgatggttttagtatattcaaagaacaatatcactatcaccactatgtaatcttagaacattttcaccacctggaaaggaaaccctgtattaattagcat

SEQ ID NO: 102974 - DNA, 120 bp, Artificial Sequence
  ENSG00000093217_40 (sequence is synthesized)
ccactgtatagtccccctcctgccagtagtggcaaccacaatcaactctctatctctggatttgctgattctggacatttcgtagacatgaatatatataatatgtgacagccttctttt

SEQ ID NO: 102975 - DNA, 120 bp, Artificial Sequence
  ENSG00000093217_41 (sequence is synthesized)
acttagcataatgctttctttttaaaaaattttcatagctttttgtttatttcaaataccaacttgaaccagatacctggcataatgttttcaaagttcatccatgtcatagcgtgtgtc

SEQ ID NO: 102976 - DNA, 120 bp, Artificial Sequence
  ENSG00000093217_42 (sequence is synthesized)
agtacttcattcctttttgtggttcagtaatattccattgcattgatatatcagagtttgtttttccattcaacttttagacatttgagttgttctgcttttttgctattgtgagttatt

SEQ ID NO: 102977 - DNA, 120 bp, Artificial Sequence
  ENSG00000093217_43 (sequence is synthesized)
ctgctatgaacatccacatatgttatggattgaattgtggccccccagaattcatatgttggaagcctaccctcatcatgacagtatatttggaggtgaggcctttaggtagataattaa

SEQ ID NO: 102978 - DNA, 120 bp, Artificial Sequence
  ENSG00000093217_44 (sequence is synthesized)
ggttaaatgaggttgtaagggtggggctctaatttgataggacctgtttccttataagaaggagagacaccagtgctatcccacttcatgcgcagatgcacagaggaaaggccttgtgag

SEQ ID NO: 102979 - DNA, 120 bp, Artificial Sequence
  ENSG00000093217_45 (sequence is synthesized)
tgcacagaggaaaggccttgtgagaaggcggctgtctgcaagctggaaagagagccctaaccagaaactgaatttgctggcaccttaattgtggacttctagcctccagaactgtgagaa

SEQ ID NO: 102980 - DNA, 120 bp, Artificial Sequence
  ENSG00000094631_0 (sequence is synthesized)
ggttgaaggaacggggcagtcccctgaggagcggggctggttgaaacgctaggggcgggatctggcggagtggaagaaccgcggcaggggccaagcctcctcaactatgacctcaaccgg

SEQ ID NO: 102981 - DNA, 120 bp, Artificial Sequence
  ENSG00000094631_1 (sequence is synthesized)
ccaggattccaccacaaccaggcagcgaagaagtaggcagaacccccagtcgccccctcaggactccagtgtcacttcgaagcgaaatattaaaaagggagccgttccccgctctatccc

SEQ ID NO: 102982 - DNA, 120 bp, Artificial Sequence
  ENSG00000094631_2 (sequence is synthesized)
caatctagcggaggtaaagaagaaaggcaaaatgaagaagctcggccaagcaatggaagaagacctaatcgtgggactgcaagggatggatctgaaccttgaggctgaagcactggctgg

SEQ ID NO: 102983 - DNA, 120 bp, Artificial Sequence
  ENSG00000094631_3 (sequence is synthesized)
cactggcttggtgttggatgagcagttaaatgaattccattgcctctgggatgacagcttcccggaaggccctgagcggctccatgccatcaaggagcaactgatccaggagggcctcct

SEQ ID NO: 102984 - DNA, 120 bp, Artificial Sequence
  ENSG00000094631_4 (sequence is synthesized)
agatcgctgcgtgtcctttcaggcccggtttgctgaaaaggaagagctgatgttggttcacagcctagaatatattgatctgatggaaacaacccagtacatgaatgagggagaactccg

SEQ ID NO: 102985 - DNA, 120 bp, Artificial Sequence
  ENSG00000094631_5 (sequence is synthesized)
tgtcctagcagacacctacgactcagtttatctgcatccgaactcatactcctgtgcctgcctggcctcaggctctgtcctcaggctggtggatgcggtcctgggggctgagatccggaa

SEQ ID NO: 102986 - DNA, 120 bp, Artificial Sequence
  ENSG00000094631_6 (sequence is synthesized)
tggcatggccatcattaggcctcctggacatcacgcccagcacagtcttatggatggctattgcatgttcaaccacgtggctgtggcagcccgctatgctcaacagaaacaccgcatccg

SEQ ID NO: 102987 - DNA, 120 bp, Artificial Sequence
  ENSG00000094631_7 (sequence is synthesized)
gagggtccttatcgtagattgggatgtgcaccacggtcaaggaacacagttcaccttcgaccaggaccccagtgtcctctatttctccatccaccgctacgagcagggtaggttctggcc

SEQ ID NO: 102988 - DNA, 120 bp, Artificial Sequence
  ENSG00000094631_8 (sequence is synthesized)
ccacctgaaggcctctaactggtccaccacaggtttcggccaaggccaaggatataccatcaatgtgccttggaaccaggtggggatgcgggatgctgactacattgctgctttcctgca

SEQ ID NO: 102989 - DNA, 120 bp, Artificial Sequence
  ENSG00000094631_9 (sequence is synthesized)
cgtcctgctgccagtcgccctcgagttccagcctcagctggtcctggtggctgctggatttgatgccctgcaaggggaccccaagggtgagatggccgccactccggcagggttcgccca

SEQ ID NO: 102990 - DNA, 120 bp, Artificial Sequence
  ENSG00000094631_10 (sequence is synthesized)
gctaacccacctgctcatgggtctggcaggaggcaagctgatcctgtctctggagggtggctacaacctccgcgccctggctgaaggcgtcagtgcttcgctccacacccttctgggaga

SEQ ID NO: 102991 - DNA, 120 bp, Artificial Sequence
  ENSG00000094631_11 (sequence is synthesized)
cccttgccccatgctggagtcacctggtgccccctgccggagtgcccaggcttcagtttcctgtgctctggaagcccttgagcccttctgggaggttcttgtgagatcaactgagaccgt

SEQ ID NO: 102992 - DNA, 120 bp, Artificial Sequence
  ENSG00000094631_12 (sequence is synthesized)
ggagagggacaacatggaggaggacaatgtagaggagagcgaggaggaaggaccctgggagccccctgtgctcccaatcctgacatggccagtgctacagtctcgcacagggctggtcta

SEQ ID NO: 102993 - DNA, 120 bp, Artificial Sequence
  ENSG00000094631_13 (sequence is synthesized)
tgaccaaaatatgatgaatcactgcaacttgtgggacagccaccaccctgaggtaccccagcgcatcttgcggatcatgtgccgtctggaggagctgggccttgccgggcgctgcctcac

SEQ ID NO: 102994 - DNA, 120 bp, Artificial Sequence
  ENSG00000094631_14 (sequence is synthesized)
cctgacaccgcgccctgccacagaggctgagctgctcacctgtcacagtgctgagtacgtgggtcatctccgggccacagagaaaatgaaaacccgggagctgcaccgtgagagttccaa

SEQ ID NO: 102995 - DNA, 120 bp, Artificial Sequence
  ENSG00000094631_15 (sequence is synthesized)
ctttgactccatctatatctgccccagtaccttcgcctgtgcacagcttgccactggcgctgcctgccgcctggtggaggctgtgctctcaggagaggttctgaatggtgctgctgtggt

SEQ ID NO: 102996 - DNA, 120 bp, Artificial Sequence
  ENSG00000094631_16 (sequence is synthesized)
gcgtcccccaggacaccacgcagagcaggatgcagcttgcggtttttgctttttcaactctgtggctgtggctgctcgccatgcccagactatcagtgggcatgccctacggatcctgat

SEQ ID NO: 102997 - DNA, 120 bp, Artificial Sequence
  ENSG00000094631_17 (sequence is synthesized)
acatgtttgaggatgaccccagtgtgctatatgtgtccctgcaccgctatgatcatggcaccttcttccccatgggggatgagggtgccagcagccagatcggccgggctgcgggcacag

SEQ ID NO: 102998 - DNA, 120 bp, Artificial Sequence
  ENSG00000094631_18 (sequence is synthesized)
gcttcaccgtcaacgtggcatggaacgggccccgcatgggtgatgctgactacctagctgcctggcatcgcctggtgcttcccattgcctacgagtttaacccagaactggtgctggtct

SEQ ID NO: 102999 - DNA, 120 bp, Artificial Sequence
  ENSG00000094631_19 (sequence is synthesized)
cagctggctttgatgctgcacggggggatccgctggggggctgccaggtgtcacctgagggttatgcccacctcacccacctgctgatgggccttgccagtggccgcattatccttatcc

SEQ ID NO: 103000 - DNA, 120 bp, Artificial Sequence
  ENSG00000094631_20 (sequence is synthesized)
tagagggtggctataacctgacatccatctcagagtccatggctgcctgcactcgctccctccttggagacccaccacccctgctgaccctgccacggcccccactatcaggggccctgg

SEQ ID NO: 103001 - DNA, 120 bp, Artificial Sequence
  ENSG00000094631_21 (sequence is synthesized)
cctcaatcactgagaccatccaagtccatcgcagatactggcgcagcttacgggtcatgaaggtagaagacagagaaggaccctccagttctaagttggtcaccaagaaggcaccccaac

SEQ ID NO: 103002 - DNA, 120 bp, Artificial Sequence
  ENSG00000094631_22 (sequence is synthesized)
cagccaaacctaggttagctgagcggatgaccacacgagaaaagaaggttctggaagcaggcatggggaaagtcacctcggcatcatttggggaagagtccactccaggccagactaact

SEQ ID NO: 103003 - DNA, 120 bp, Artificial Sequence
  ENSG00000094631_23 (sequence is synthesized)
cagagacagctgtggtggccctcactcaggaccagccctcagaggcagccacagggggagccactctggcccagaccatttctgaggcagccattgggggagccatgctgggccagacca

SEQ ID NO: 103004 - DNA, 120 bp, Artificial Sequence
  ENSG00000094631_24 (sequence is synthesized)
cctcagaggaggctgtcgggggagccactccggaccagaccacctcagaggagactgtgggaggagccattctggaccagaccacctcagaggatgctgttgggggagccacgctgggcc

SEQ ID NO: 103005 - DNA, 120 bp, Artificial Sequence
  ENSG00000094631_25 (sequence is synthesized)
agactacctcagaggaggctgtaggaggagctacactggcccagaccacctcggaggcagccatggagggagccacactggaccagactacgtcagaggaggctccagggggcaccgagc

SEQ ID NO: 103006 - DNA, 120 bp, Artificial Sequence
  ENSG00000094631_26 (sequence is synthesized)
tgatccaaactcctctagcctcgagcacagaccaccagacccccccaacctcacctgtgcagggaactacaccccagatatctcccagtacactgattgggagtctcaggaccttggagc

SEQ ID NO: 103007 - DNA, 120 bp, Artificial Sequence
  ENSG00000094631_27 (sequence is synthesized)
taggcagcgaatctcagggggcctcagaatctcaggccccaggagaggagaacctactaggagaggcagctggaggtcaggacatggctgattcgatgctgatgcagggatctaggggcc

SEQ ID NO: 103008 - DNA, 120 bp, Artificial Sequence
  ENSG00000094631_28 (sequence is synthesized)
tcactgatcaggccatattttatgctgtgacaccactgccctggtgtccccatttggtggcagtatgccccatacctgcagcaggcctagacgtgacccaaccttgtggggactgtggaa

SEQ ID NO: 103009 - DNA, 120 bp, Artificial Sequence
  ENSG00000094631_29 (sequence is synthesized)
caatccaagagaattgggtgtgtctctcttgctatcaggtctactgtggtcgttacatcaatggccacatgctccaacaccatggaaattctggacacccgctggtcctcagctacatcg

SEQ ID NO: 103010 - DNA, 120 bp, Artificial Sequence
  ENSG00000094631_30 (sequence is synthesized)
acctgtcagcctggtgttactactgtcaggcctatgtccaccaccaggctctcctagatgtgaagaacatcgcccaccagaacaagtttggggaggatatgccccacccacactaagccc

SEQ ID NO: 103011 - DNA, 120 bp, Artificial Sequence
  ENSG00000094631_31 (sequence is synthesized)
cagaatacggtccctcttcaccttctgaggcccacgatagaccagctgtagctcattccagcctgtaccttggatgaggggtagcctcccactgcatcccatcctgaatatcctttgcaa

SEQ ID NO: 103012 - DNA, 120 bp, Artificial Sequence
  ENSG00000094631_32 (sequence is synthesized)
ctccccaagagtgcttatttaagtgttaatacttttaagagaactgcgacgattaattgtggatctccccctgcccattgcctgcttgaggggcaccactactccagcccagaaggaaag

SEQ ID NO: 103013 - DNA, 120 bp, Artificial Sequence
  ENSG00000094631_33 (sequence is synthesized)
gggggcagctcagtggccccaagagggagctgatatcatgaggataacattggcgggaggggagttaactggcaggcatggcaaggttgcatatgtaataaagtacaagctgttaaaaaa

SEQ ID NO: 103014 - DNA, 120 bp, Artificial Sequence
  ENSG00000094631_34 (sequence is synthesized)
gttagcggtcgggtctgggcagggggtggagctggttgaaggaacggggcagtcccctgaggagcggggctggttgaaacgctaggggcgggatctggcggagtggaaggtaccggtccg

SEQ ID NO: 103015 - DNA, 120 bp, Artificial Sequence
  ENSG00000094631_35 (sequence is synthesized)
ataaggggtggagttaagtgaatcgttaagggtggagtcgaaaccggggtcggggccggggccggctgagtgaaaggaaccgcggcaggggccaagcctcctcaactatgacctcaaccg

SEQ ID NO: 103016 - DNA, 120 bp, Artificial Sequence
  ENSG00000094631_36 (sequence is synthesized)
ggagttaagtgaatcgttaagggtggagtcgaaaccggggtcggggccggggccggctgagtgaaagggtgggtgattatcccgggagataggccgaaagggcagaaccgcggcaggggc

SEQ ID NO: 103017 - DNA, 120 bp, Artificial Sequence
  ENSG00000094631_37 (sequence is synthesized)
agggtggagtcgaaaccggggtcggggccggggccggctgagtgaaagggtgggtgattatcccgggagataggccgaaagggcagaagcgaaatattaaaaagggagccgttccccgct

SEQ ID NO: 103018 - DNA, 120 bp, Artificial Sequence
  ENSG00000094631_38 (sequence is synthesized)
tcaggcccggtttgctgaaaaggaagagctgatgttggttcacaggtgaaggcttgggagccttgtagggatggggaggagcctgccctggacaaaccagggcaagctaaacgctttggg

SEQ ID NO: 103019 - DNA, 120 bp, Artificial Sequence
  ENSG00000094631_39 (sequence is synthesized)
gtcatggtctctgcagccagccttgggcaagtcgctgagcctttctgaatctgtgtcatcgcctgtaacaaggggaccagtaaacataagttcctcaggagagtttgatgtgtgtcaggt

SEQ ID NO: 103020 - DNA, 120 bp, Artificial Sequence
  ENSG00000094631_40 (sequence is synthesized)
gcttagaacagggcctgatatataatcagcccatgatgagctattactgttatcatgatctgattgtgtgaatagatggtggatgtgtggacagagtgatcggggttcccccaggggctt

SEQ ID NO: 103021 - DNA, 120 bp, Artificial Sequence
  ENSG00000094631_41 (sequence is synthesized)
ccagatttagaggcctagtgctatgtggcttgaggaaagctagcttccagagcaggtatctgagctgaactttaagaggagaaaaagagtgagtcagatgaagagggtgactgagggaag

SEQ ID NO: 103022 - DNA, 120 bp, Artificial Sequence
  ENSG00000094631_42 (sequence is synthesized)
ggaagaacagacagctgaaccagtgtggccaaaggcctgaaagtaggatttggtgtggctactgcaggggagcagagaacattacctgaactgaggcgggctagggaagaaacagaatgt

SEQ ID NO: 103023 - DNA, 120 bp, Artificial Sequence
  ENSG00000094631_43 (sequence is synthesized)
atcacggcgcgtcgcgcgggaagtcgcggggaaaaggtaagatgccccttcctaattccctcgcttccttgcttgctctccagacaccgccgacccgaagggctcctaagtgactggaca

SEQ ID NO: 103024 - DNA, 120 bp, Artificial Sequence
  ENSG00000094631_44 (sequence is synthesized)
gggacggaggggcggcggctatggcatccgggacgacagcgacgatagccgaggcaagaaaaagcttgcaccgcagccctgtcgggaaccgccggcgcctgccttttacgtaggcgcagc

SEQ ID NO: 103025 - DNA, 120 bp, Artificial Sequence
  ENSG00000094631_45 (sequence is synthesized)
tagcacgccgacgcaccgccccgtcgcctgtgagctcgcggtgtggctcagcccagctggcgtagcacgccgacgcaccgccccgccgcttgtgagctcgcgagaggtcgccagaaactt

SEQ ID NO: 103026 - DNA, 120 bp, Artificial Sequence
  ENSG00000094631_46 (sequence is synthesized)
ttgaccctggggtatgtgtgtgtgaggacatgtctctgtctctctgtttttcatgtcactctcttgacgtgtcagtctgtctcatgtccccatctgtccctttttttttttttttgaaat

SEQ ID NO: 103027 - DNA, 120 bp, Artificial Sequence
  ENSG00000094631_47 (sequence is synthesized)
attacaggcctgagccaccatgcccggcccccatctgtccctttctgccatctccatgtctctaagtctgcatctatttcttctacctctgagtctgtatttcttttcttcccttcttca

SEQ ID NO: 103028 - DNA, 120 bp, Artificial Sequence
  ENSG00000094631_48 (sequence is synthesized)
ttcattttcagtctctgcttttgtgtctcctagtctccaggttctgtgtctccatctctctgacttgcatctccatgtcttcatttgtccttttctccatgtctctgggtcgccatcact

SEQ ID NO: 103029 - DNA, 120 bp, Artificial Sequence
  ENSG00000094631_49 (sequence is synthesized)
ttagataggacccccagatcatgttacctgggcacttacaaaacaggatccagggtcccaccccagcatttctggcctatagcagctgcctcgacagaacccaggtctaggctcctgatg

SEQ ID NO: 103030 - DNA, 120 bp, Artificial Sequence
  ENSG00000094631_50 (sequence is synthesized)
catactccagaagacccacgaaccagcccccagcattagctgcccaaggcccagggtccagttccctagcaatgacccagaagagcccagggcccagccccgagcacttgctcaggccta

SEQ ID NO: 103031 - DNA, 120 bp, Artificial Sequence
  ENSG00000094631_51 (sequence is synthesized)
cctgccactcagcactaaatgcccctgcagaccccaggggtctagcccagccctcttccagggcgtgagtatcgtcggttactgaggtgctgtctcctccccaggatcctgattgtggat

SEQ ID NO: 103032 - DNA, 120 bp, Artificial Sequence
  ENSG00000094631_52 (sequence is synthesized)
tggtgtatggacagctcagttggggaagagacagggccctgaatctcatctcccatctgtgtctagcctagaatatattgatctgatggaaacaacccagtacatgaatgagggagaact

SEQ ID NO: 103033 - DNA, 120 bp, Artificial Sequence
  ENSG00000094631_53 (sequence is synthesized)
gtctctggaggtgagtgactcaccttcgtccctcagcctgtggatcctggagggcttaagaacgaagctttcaagtccaacaggagttcctggcccaggaattcacttactagctggaca

SEQ ID NO: 103034 - DNA, 120 bp, Artificial Sequence
  ENSG00000094631_54 (sequence is synthesized)
accttgcataagtcacttcacttctttgtgcctccgctttccttctataaaacgagcataatgtaatcacctcatatcattgtccagtgaattcagtgaggcacccttctaagttccttg

SEQ ID NO: 103035 - DNA, 120 bp, Artificial Sequence
  ENSG00000094631_55 (sequence is synthesized)
ttgcttgacatgtggtatgcactctcttattatcatcattattattattccctggtcatgtctggtcctttcctgatcccccttcacaactccttgccccagggtggctacaacctccgc

SEQ ID NO: 103036 - DNA, 120 bp, Artificial Sequence
  ENSG00000094631_56 (sequence is synthesized)
atggatgagaactctgcgggcagggaatggtggcaatcttggggtccccatccctatgcccaccccaccctgggggaagcagctgagtggatagggctgttctctcccttactccctttc

SEQ ID NO: 103037 - DNA, 120 bp, Artificial Sequence
  ENSG00000094631_57 (sequence is synthesized)
gtaggactctacagcatttgactttttacattgttttaaagtccttccttcaagtgtaaaatgtattgatatgggtaatatattcatgtgattcaagaatccaaaggtaaaaaagagaat

SEQ ID NO: 103038 - DNA, 120 bp, Artificial Sequence
  ENSG00000094631_58 (sequence is synthesized)
ataattaaaaatctgtctcccatccttgtcacccagacacctgcctcctctcatgggaggtagtcattggaaccactgactcatgtgtcctcccacaaagtcttattcaagaaataaata

SEQ ID NO: 103039 - DNA, 120 bp, Artificial Sequence
  ENSG00000094631_59 (sequence is synthesized)
tagagggtctgggaatggggcttaggagagtagaaggggcggtgattggttggaaagggcaggccctaagacggactgtgtgagcccgggggctcattgctccgtgaaagggcaagacca

SEQ ID NO: 103040 - DNA, 120 bp, Artificial Sequence
  ENSG00000094631_60 (sequence is synthesized)
gggaaagagaatcgtgtaaaaggggtggagtctagcgggccgggcggggccgggtagaatggccacctgagtggagggagaaggcctgagagaggcggagtttggaaggctgtggagaat

SEQ ID NO: 103041 - DNA, 120 bp, Artificial Sequence
  ENSG00000094631_61 (sequence is synthesized)
gcgtaaggaatggaatctaatagagggggcggagcctggaaaagggcagagaggtggggtcctcagggcacactagccccctcacatacccacgctcctccccccacccccagaaccgcg

SEQ ID NO: 103042 - DNA, 120 bp, Artificial Sequence
  ENSG00000094631_62 (sequence is synthesized)
tttattccccaattccaagctcttttccctcaattttaagaatctttctatatcacttgcattaaatttcacaactacattatcaacccattaaaatgtgactcttaagtttgtctagat

SEQ ID NO: 103043 - DNA, 120 bp, Artificial Sequence
  ENSG00000094631_63 (sequence is synthesized)
tcaatgcataccactatttcttgcatttccctaaaaaagctgccttagatcctctctggaacaaagcagggggtaaatgaccagatagaaggatggatggatgatagattattcattttg

SEQ ID NO: 103044 - DNA, 120 bp, Artificial Sequence
  ENSG00000094631_64 (sequence is synthesized)
ctttccccagtcagaattaagccctcccatggccccttgctgggctttctgtcaaaacacgtgcatcgcatcttttcagtatctgttttgcgtgtcggtcatactcacccctctgagtgc

SEQ ID NO: 103045 - DNA, 120 bp, Artificial Sequence
  ENSG00000094631_65 (sequence is synthesized)
tcattctctcgcctataaaatagaagaagtagtagaggtggcctgtaaggcattggggaggaggaactgccctttcactggcctcatgacagccccagccagcacccccgctctagttcc

SEQ ID NO: 103046 - DNA, 120 bp, Artificial Sequence
  ENSG00000094631_66 (sequence is synthesized)
acccacagaagcaagtctcacccctaccccccaggtctctccacttcctgctagagaatcacccagctccccagcctggcttgaggctcttttcagccttagctggctccccgcagctaa

SEQ ID NO: 103047 - DNA, 120 bp, Artificial Sequence
  ENSG00000094631_67 (sequence is synthesized)
gagccccatgctccatttgggcctccagtgtcacagggtttgacctgctgttactactacctttgtcataggggcaggtagtgggcggacatgatctagagtaccccacagagtcaggag

SEQ ID NO: 103048 - DNA, 120 bp, Artificial Sequence
  ENSG00000094631_68 (sequence is synthesized)
cccccatgatctgagatagaccctagagctgagcctgaaattgggtgggcactgagggggcagcgatgtttgctgagggagaggttctggtgagagactaaatgaatgagcgagtgaggt

SEQ ID NO: 103049 - DNA, 120 bp, Artificial Sequence
  ENSG00000094631_69 (sequence is synthesized)
aatggataaataaagataagaatgaaaaaatggtaagatgattaaattggtgactgaatgtaagggtaaattaatggaagaatggattcatggattaaataattaatggggaaattaatg

SEQ ID NO: 103050 - DNA, 120 bp, Artificial Sequence
  ENSG00000094631_70 (sequence is synthesized)
aatgagagaatgaacgagtggttgaatggggaaatgagtggtagaggaaactggcaactgttgggttgggggtgtctatggggattgacttctccaactctcttacctctttttcttctg

SEQ ID NO: 103051 - DNA, 63 bp, Artificial Sequence
  ENSG00000094631_71 (sequence is synthesized)
atggtgaaaccccgtctctactaagaaacatacaaaaaattagccgggcgtggcagcacaggc

SEQ ID NO: 103052 - DNA, 120 bp, Artificial Sequence
  ENSG00000094631_72 (sequence is synthesized)
ctctggaggcgggatctgggcgggcagtcgagagacgaggcccaatggaaaagaaaagcctgagcgctcgcgtccccacaggtcgccagaaacttggtggagcgagccaagggcggagtt

SEQ ID NO: 103053 - DNA, 120 bp, Artificial Sequence
  ENSG00000094631_73 (sequence is synthesized)
tactgggctgccttggtgggagagggtcaggccctctctctctccctgggccctggtttcaggcctcccacccctttttctgtttgggtcacctgagttccagagtatgacggggattca

SEQ ID NO: 103054 - DNA, 120 bp, Artificial Sequence
  ENSG00000094631_74 (sequence is synthesized)
acttcggtgaggccctagacccgccctgatgagggggagagggagcaagttggtcatgccctggactctgacccttctctctgattcacagaagcgaaatattaaaaagggagccgttcc

SEQ ID NO: 103055 - DNA, 120 bp, Artificial Sequence
  ENSG00000094631_75 (sequence is synthesized)
agagagtcaagcagggcctgaggaaaggggccatggggaggggcacgggagggggtgggcctagaggctgggggaataatggaaggaactggagaaagggaagggtggccaagtgcagtg

SEQ ID NO: 103056 - DNA, 84 bp, Artificial Sequence
  ENSG00000094631_76 (sequence is synthesized)
ggaaggaactggagaaagggaagggtggccaagtgcagtggctcacgtctgtaatcctagcgctttgagaagctgaggtgagct

SEQ ID NO: 103057 - DNA, 120 bp, Artificial Sequence
  ENSG00000094631_77 (sequence is synthesized)
agcccgcccgcgctacgtcatcacggcgcgtcgcgcgggaagtcgcggggaaaaggtcgccagaaacttggtggagcgagccaagggcggagtttgagaaaggggctgcgtccaatgagt

SEQ ID NO: 103058 - DNA, 120 bp, Artificial Sequence
  ENSG00000094631_78 (sequence is synthesized)
tgcctctgggatgacaggtgaggctgggtcctccaggctgtctccaaaccacaaaaatacacacacttagagcccattagcaagaataaatcttttcttaccccagcctggatactggaa

SEQ ID NO: 103059 - DNA, 120 bp, Artificial Sequence
  ENSG00000094631_79 (sequence is synthesized)
gcagatgatttggggaggtagggctcacacttgaaagggttcttttatgtagctaacaaacatttattgagtgcctattgtgtgccaagagttggtgatacaaatgtaccaaacaacaga

SEQ ID NO: 103060 - DNA, 120 bp, Artificial Sequence
  ENSG00000094661_0 (sequence is synthesized)
gggaagctgggaccagaatggcatctctgacacctggctctgtgtggtttttctccctttttgttcccactagtcacagaccatacatggaaccagaaaagcaaaccgaaatctcagaat

SEQ ID NO: 103061 - DNA, 120 bp, Artificial Sequence
  ENSG00000094661_1 (sequence is synthesized)
tcttcctccagggactctcagaaaagccagagcatcagaccctcctcttcacaatgttcctctccacatacctggtcaccatcattggaaatgccctcattatcctggccatcatcacgg

SEQ ID NO: 103062 - DNA, 120 bp, Artificial Sequence
  ENSG00000094661_2 (sequence is synthesized)
actctcacctccacacacccatgtacttctttctcttcaacctctcactcgttgacaccctattatcctccaccaccgtccccaagatgctagcgaacatccaggctcagagcagagcca

SEQ ID NO: 103063 - DNA, 120 bp, Artificial Sequence
  ENSG00000094661_3 (sequence is synthesized)
tcccctttgtgggctgcctcacccagatgtatgccttccacctgttcgggaccatggacagctttctcctggcagtaatggccatcgaccgcttcgtggccattgtccacccacagcgtt

SEQ ID NO: 103064 - DNA, 120 bp, Artificial Sequence
  ENSG00000094661_4 (sequence is synthesized)
acttggttctcatgtgctcccctgtctgtgggctgctgctgggagcatcatggatgatcaccaacctccagtctctcatacacacctgcctcatggctcaactgaccttctgcgccggct

SEQ ID NO: 103065 - DNA, 120 bp, Artificial Sequence
  ENSG00000094661_5 (sequence is synthesized)
agctctccggctcagacacgcacaccaacgagctggtgatctttgcttttggcattgtcgtgggcaccagcccattctcctgcatccttctctcgtacatccgcattttctggacagtct

SEQ ID NO: 103066 - DNA, 120 bp, Artificial Sequence
  ENSG00000094661_6 (sequence is synthesized)
ttaagatcccttctactcggggcaagtggaaagccttctccacctgtggcttacacctcactgtggtgtcactgtcctatgggaccatctttgctgtgtacttacagcccacatccccca

SEQ ID NO: 103067 - DNA, 120 bp, Artificial Sequence
  ENSG00000094661_7 (sequence is synthesized)
gctcctcccagaaggacaaggcagccgccctaatgtgtggggtgttcatccccatgctcaacccctttatctacagcatacggaacaaggatatgaaggcagccctggggaagctcatcg

SEQ ID NO: 103068 - DNA, 120 bp, Artificial Sequence
  ENSG00000094661_8 (sequence is synthesized)
gcaaagtggccgtcccctgtcctaggccagaacagttattggatgtttatcatgttccaggatcactgttggctgctagggacacagagatgcatcccatcccctaccctggaggagttc

SEQ ID NO: 103069 - DNA, 120 bp, Artificial Sequence
  ENSG00000094661_9 (sequence is synthesized)
agagtctagctgggaacagagacatggaataaatccttccagtacaacgtgataaatgtgtcataaagagatgaacaaagtgtatgagcacccaaaggaaaggtgtgcattttccccagg

SEQ ID NO: 103070 - DNA, 120 bp, Artificial Sequence
  ENSG00000094661_10 (sequence is synthesized)
ctatgtgaataagagtagttgaaaacaagagacgtagctacactcattttagtattgacaaaggccaggtgtggaagctcaagcctgtgatcccagcattttgggaggccaaggtggaag

SEQ ID NO: 103071 - DNA, 120 bp, Artificial Sequence
  ENSG00000094661_11 (sequence is synthesized)
gagtttgagaccagcctgggcaacatacagagaccctatctccacacacacacacaaaatcactttagcaagacatggtggtatacgcctgtagtctcagctaatcaggaggctgaggca

SEQ ID NO: 103072 - DNA, 90 bp, Artificial Sequence
  ENSG00000094661_12 (sequence is synthesized)
ttagcaagacatggtggtatacgcctgtagtctcagctaatcaggaggctgaggcaggcagatcatttgagcccaggagttcaaggttca

SEQ ID NO: 103073 - DNA, 66 bp, Artificial Sequence
  ENSG00000094661_13 (sequence is synthesized)
gatagatagacagacagatagatagagaggataagataagataggtagatagggtggatagataag

SEQ ID NO: 103074 - DNA, 120 bp, Artificial Sequence
  ENSG00000094661_14 (sequence is synthesized)
agatagatagatagatagatagatatacagatagatacatagatagataggatagataggtaggtaggtaggtaggtcaaccgatcgatagatctatctattgacagacagatagatgat

SEQ ID NO: 103075 - DNA, 81 bp, Artificial Sequence
  ENSG00000094661_15 (sequence is synthesized)
ataggtaggtaggtcagtcgatcgattgatcaatcgatcaacagatagatgatagatagatggatggatagatagagatag

SEQ ID NO: 103076 - DNA, 90 bp, Artificial Sequence
  ENSG00000094661_16 (sequence is synthesized)
agggtagatacagacagcccatgtattagccagtgtttcctaagtgttgtggaagaactttgaaaatatttgcaagtgagattagctcac

SEQ ID NO: 103077 - DNA, 120 bp, Artificial Sequence
  ENSG00000094661_17 (sequence is synthesized)
ggaagaactttgaaaatatttgcaagtgagattagctcacgtgctgttcgcttagtcagccagcaagcctcagcctcctggggggtcttgagacctccacttgtaactatgactgtggtt

SEQ ID NO: 103078 - DNA, 120 bp, Artificial Sequence
  ENSG00000094661_18 (sequence is synthesized)
ggggcttactttctcaattcccaacaggcttcctgtctccccacaacccccagtcaaggggactctgatgcagacggtccatcaatcgtagtttgggaacacagaccctagcctagctcc

SEQ ID NO: 103079 - DNA, 120 bp, Artificial Sequence
  ENSG00000094661_19 (sequence is synthesized)
aaaatctatgtgtttcctgtgacattcatcgcctgactctgaacccagtatgattctacacgcagggtcagccacagcagatcaggtggcccggggcacttaaaaagttagtgttatggg

SEQ ID NO: 103080 - DNA, 120 bp, Artificial Sequence
  ENSG00000094661_20 (sequence is synthesized)
ccaggcgcagtggctcacacctgtaaactctggcactttgggaggttgagtagggagaatcatttgaagctaggagttcaggaccagcctgaacaacatagtgagatctcatccctacaa

SEQ ID NO: 103081 - DNA, 120 bp, Artificial Sequence
  ENSG00000094661_21 (sequence is synthesized)
cagcctgaacaacatagtgagatctcatccctacaaaaaataaaaatgaaaaaagaaaaaattacctgggtgtggtggtgtgcacctgtcatcttagttactcgggaggctgagacagga

SEQ ID NO: 103082 - DNA, 86 bp, Artificial Sequence
  ENSG00000094661_22 (sequence is synthesized)
tgcacctgtcatcttagttactcgggaggctgagacaggaggacctcttgagccaaggaggtcgaggctgcatgagctatgttccg

SEQ ID NO: 103083 - DNA, 120 bp, Artificial Sequence
  ENSG00000094661_23 (sequence is synthesized)
tctgatacgactggcgtccttatgaaaaggggagatttggacacaggcacccacacacatggagaccgccacatgaagatggaggcagagattggggtgatgctcctacaagccaaggaa

SEQ ID NO: 103084 - DNA, 120 bp, Artificial Sequence
  ENSG00000094661_24 (sequence is synthesized)
tgccagggactgcctgcagaccaccagaagccaggagaggcgtggaacaggctatccctctcagccctcagaaggaaccaaggaatcaaagctgctgacaactgatcttttttttttttt

SEQ ID NO: 103085 - DNA, 120 bp, Artificial Sequence
  ENSG00000094661_25 (sequence is synthesized)
ctcccaaagtgctgggattacaagcgtgggccactgcacctggcccaacaccttgatctcggactcttaacctccagaactgtaagacaacaaatttctattgtttaagtcacctagttc

SEQ ID NO: 103086 - DNA, 120 bp, Artificial Sequence
  ENSG00000094661_26 (sequence is synthesized)
gaactgtaagacaacaaatttctattgtttaagtcacctagttcatggtaatttttaaatttttttttcttttagagacagacaggatctactgtgtcacccaggctggagtacagtggt

SEQ ID NO: 103087 - DNA, 65 bp, Artificial Sequence
  ENSG00000094661_27 (sequence is synthesized)
cctcctgagtagttgggactacaggcctatgccactgcaatcagctatatcctcaagagatctgc

SEQ ID NO: 103088 - DNA, 120 bp, Artificial Sequence
  ENSG00000094661_28 (sequence is synthesized)
aactcccggcctcaagagatctgccctcctcggcttcacaaagtgctgggattgcaggtgtaaaccaccacactcggcctgatttgtggtactttgttgcaacattgctagaaaacaaat

SEQ ID NO: 103089 - DNA, 120 bp, Artificial Sequence
  ENSG00000094661_29 (sequence is synthesized)
gcagttagtttaagaaatgtcagcaacctacaaaacctacaaagtgtcccagtacatcctctcaagtttacaattgaccatgtgttctggccaagggaccctgggctagaactggagaaa

SEQ ID NO: 103090 - DNA, 120 bp, Artificial Sequence
  ENSG00000094661_30 (sequence is synthesized)
aggatgaaggatttagattgcatggattcacttactgggtatcagcatgatgacaataatgatgatgacaaccgagatttattatctgaacaatgctaactcctttatatgcacaatctc

SEQ ID NO: 103091 - DNA, 120 bp, Artificial Sequence
  ENSG00000094661_31 (sequence is synthesized)
ttatatgcacaatctcaataagtgttaagcaacacccctacaaggtaggtgcagaagtaattgtggttttgccactgaaagtaacagcaggctgcgcatggtggctcacacctgtattcc

SEQ ID NO: 103092 - DNA, 71 bp, Artificial Sequence
  ENSG00000094661_32 (sequence is synthesized)
taatttaaaagtttgagcatcactgggctagatgggggtcctgtagataaccgggacccaaataggcttta

SEQ ID NO: 103093 - DNA, 120 bp, Artificial Sequence
  ENSG00000094661_33 (sequence is synthesized)
atgggggtcctgtagataaccgggacccaaataggctttaggtacagagatacaggagaaccagatttggggtgccgctctagccactgtgtccaggagggaaccttcccaaccgcccta

SEQ ID NO: 103094 - DNA, 120 bp, Artificial Sequence
  ENSG00000094661_34 (sequence is synthesized)
gaaccttcccaaccgccctaaaagctctgaaaactacagttagagaagtggccactaggtggcaataatgtcatttcacaaattggatttaaaacgcttttttttttttttttttttttt

SEQ ID NO: 103095 - DNA, 120 bp, Artificial Sequence
  ENSG00000094661_35 (sequence is synthesized)
ttttccccggaaacttgtattctagctgtgaactggcccaggtccatggcccttaggtgtaatctccccctggaagggcacaacaggtgcaaagtttccatgatgagaaggagcctgtgt

SEQ ID NO: 103096 - DNA, 120 bp, Artificial Sequence
  ENSG00000094661_36 (sequence is synthesized)
tgtttaaagaaatcacggagactggtgtggcctgagcccagagtgacagggaagctgggtttgcagggggcccgtggagggcactgggagtaacacggtgtgtggaccacggggagtggg

SEQ ID NO: 103097 - DNA, 120 bp, Artificial Sequence
  ENSG00000094661_37 (sequence is synthesized)
accatgacaaggtttaaggaggatagggggtggggctgtgcttcagaacgaacctgccagttatccatgccatagatctggagtcagcaaactttttctgtcaaggtccaggtcgtcaat

SEQ ID NO: 103098 - DNA, 120 bp, Artificial Sequence
  ENSG00000094661_38 (sequence is synthesized)
attgtcagctttagggaccttaccatctccgttgcaatgactgaactctgctgctgtctggcgaaagcagccatagatgagacatcaacgaatgggcttggctgtgttccactaaaactt

SEQ ID NO: 103099 - DNA, 120 bp, Artificial Sequence
  ENSG00000094661_39 (sequence is synthesized)
tgtttataaacacagaagcttccatttcatatcatagtacatgtcataccttgtagcctttgggtttgttttcaaccacttttaaaatgttaaaactactctaggccaggtgcattcact

SEQ ID NO: 103100 - DNA, 120 bp, Artificial Sequence
  ENSG00000094661_40 (sequence is synthesized)
taatcccagcactttgagaggccaagggaggaggattgcttgaagccaggagttcgagactggagtgggcaacatagtgagacctcccccatctctacaaaaattttttaattagctggg

SEQ ID NO: 103101 - DNA, 120 bp, Artificial Sequence
  ENSG00000094755_0 (sequence is synthesized)
actccatctgagggtggctgcgtgtccacatacgaggggacagggctgaggatgaggagaaccctggggacccagaagaccgtgccttgcctggaagtcctgcctgtaggcctgaaggac

SEQ ID NO: 103102 - DNA, 120 bp, Artificial Sequence
  ENSG00000094755_1 (sequence is synthesized)
ttgccctaacagagcctcaacaactacctggtgattcctacttcagccccttggtgtgagcagcttctcaacatgaactacagcctccacttggccttcgtgtgtctgagtctcttcact

SEQ ID NO: 103103 - DNA, 120 bp, Artificial Sequence
  ENSG00000094755_2 (sequence is synthesized)
gagaggatgtgcatccaggggagtcagttcaacgtcgaggtcggcagaagtgacaagctttccctgcctggctttgagaacctcacagcaggatataacaaatttctcaggcccaatttt

SEQ ID NO: 103104 - DNA, 120 bp, Artificial Sequence
  ENSG00000094755_3 (sequence is synthesized)
ggtggagaacccgtacagatagcgctgactctggacattgcaagtatctctagcatttcagagagtaacatggactacacagccaccatatacctccgacagcgctggatggaccagcgg

SEQ ID NO: 103105 - DNA, 120 bp, Artificial Sequence
  ENSG00000094755_4 (sequence is synthesized)
ctggtgtttgaaggcaacaagagcttcactctggatgcccgcctcgtggagttcctctgggtgccagatacttacattgtggagtccaagaagtccttcctccatgaagtcactgtggga

SEQ ID NO: 103106 - DNA, 120 bp, Artificial Sequence
  ENSG00000094755_5 (sequence is synthesized)
aacaggctcatccgcctcttctccaatggcacggtcctgtatgccctcagaatcacgacaactgttgcatgtaacatggatctgtctaaataccccatggacacacagacatgcaagttg

SEQ ID NO: 103107 - DNA, 120 bp, Artificial Sequence
  ENSG00000094755_6 (sequence is synthesized)
cagctggaaagctggggctatgatggaaatgatgtggagttcacctggctgagagggaacgactctgtgcgtggactggaacacctgcggcttgctcagtacaccatagagcggtatttc

SEQ ID NO: 103108 - DNA, 120 bp, Artificial Sequence
  ENSG00000094755_7 (sequence is synthesized)
accttagtcaccagatcgcagcaggagacaggaaattacactagattggtcttacagtttgagcttcggaggaatgttctgtatttcattttggaaacctacgttccttccactttcctg

SEQ ID NO: 103109 - DNA, 120 bp, Artificial Sequence
  ENSG00000094755_8 (sequence is synthesized)
gtggtgttgtcctgggtttcattttggatctctctcgattcagtccctgcaagaacctgcattggagtgacgaccgtgttatcaatgaccacactgatgatcgggtcccgcacttctctt

SEQ ID NO: 103110 - DNA, 120 bp, Artificial Sequence
  ENSG00000094755_9 (sequence is synthesized)
cccaacaccaactgcttcatcaaggccatcgatgtgtacctggggatctgctttagctttgtgtttggggccttgctagaatatgcagttgctcactacagttccttacagcagatggca

SEQ ID NO: 103111 - DNA, 120 bp, Artificial Sequence
  ENSG00000094755_10 (sequence is synthesized)
gccaaagatagggggacaacaaaggaagtagaagaagtcagtattactaatatcatcaacagctccatctccagctttaaacggaagatcagctttgccagcattgaaatttccagcgac

SEQ ID NO: 103112 - DNA, 120 bp, Artificial Sequence
  ENSG00000094755_11 (sequence is synthesized)
aacgttgactacagtgacttgacaatgaaaaccagcgacaagttcaagtttgtcttccgagaaaagatgggcaggattgttgattatttcacaattcaaaaccccagtaatgttgatcac

SEQ ID NO: 103113 - DNA, 120 bp, Artificial Sequence
  ENSG00000094755_12 (sequence is synthesized)
tattccaaactactgtttcctttgatttttatgctagccaatgtattttactgggcatactacatgtatttttgagtcaatgttaaatttcttgcatgccataggtcttcaacaggacaa

SEQ ID NO: 103114 - DNA, 120 bp, Artificial Sequence
  ENSG00000094755_13 (sequence is synthesized)
tgaaataatatttgagtctttctgctcaaagaatgaagctccaaccattgttctaagctgtgtagaagtcctagcattataggatcttgtaatagaaacatcagtccattcctctttcat

SEQ ID NO: 103115 - DNA, 120 bp, Artificial Sequence
  ENSG00000094755_14 (sequence is synthesized)
cttaatcaaggacattcccatggagcccaagattacaaatgtactcagggctgtttattcggtggctccctggtttgcatttacctcatataaagaatgggaaggagaccattgggtaac

SEQ ID NO: 103116 - DNA, 120 bp, Artificial Sequence
  ENSG00000094755_15 (sequence is synthesized)
cctcaagtgtcagaagttgtttctaaagtaactatacatgttttttactaaatctctgcagtgcttataaaatacattgttgcctatttagggagtaacattttctagtttttgtttctg

SEQ ID NO: 103117 - DNA, 120 bp, Artificial Sequence
  ENSG00000094755_16 (sequence is synthesized)
gttaaaatgaaatatgggcttatgtcaattcattggaagtcaatgcactaactcaataccaagatgagtttttaaataatgaatattatttaataccacaacagaattatccccaatttc

SEQ ID NO: 103118 - DNA, 120 bp, Artificial Sequence
  ENSG00000094755_17 (sequence is synthesized)
caataagtcctatcattgaaaattcaaatataagtgaagaaaaaattagtagatcaacaatctaaacaaatccctcggttctaagatacaatggattccccatactggaaggactctgag

SEQ ID NO: 103119 - DNA, 120 bp, Artificial Sequence
  ENSG00000094755_18 (sequence is synthesized)
gctttattcccccactatgcatatcttatcattttattattatacacacatccatcctaaactatactaaagcccttttcccatgcatggatggaaatggaagatttttttttaacttgt

SEQ ID NO: 103120 - DNA, 120 bp, Artificial Sequence
  ENSG00000094755_19 (sequence is synthesized)
tctagaagtcttaatatgggctgttgccatgaaggcttgcagaattgagtccattttctagctgcctttattcacatagtgatggggtactaaaagtactgggttgactcagagagtcgc

SEQ ID NO: 103121 - DNA, 120 bp, Artificial Sequence
  ENSG00000094755_20 (sequence is synthesized)
tgtcattctgtcattgctgctactctaacactgagcaacactctcccagtggcagatcccctgtatcattccaagaggagcattcatccctttgctctaatgatcaggaatgatgcttat

SEQ ID NO: 103122 - DNA, 120 bp, Artificial Sequence
  ENSG00000094755_21 (sequence is synthesized)
tagaaaacaaactgcttgacccaggaacaagtggcttagcttaagtaaacttggctttgctcagatccctgatccttccagctggtctgctatgagtggcttatcccgcatgagcaggag

SEQ ID NO: 103123 - DNA, 120 bp, Artificial Sequence
  ENSG00000094755_22 (sequence is synthesized)
cgtgctggccctgagtactgaactttctgagtaacaatgagatacgttacagaacctatgttcaggttgcgggtgagctgccctctccaaatccagccagagatgcacattcctcggcca

SEQ ID NO: 103124 - DNA, 120 bp, Artificial Sequence
  ENSG00000094755_23 (sequence is synthesized)
gtctcagccaacagtaccaaaagtgatttttgagtgtgccagggtaaaggcttccagttcagcctcagttattttagacaatctcgccatctttaatttcttagcttcctgttctaataa

SEQ ID NO: 103125 - DNA, 120 bp, Artificial Sequence
  ENSG00000094755_24 (sequence is synthesized)
atgcacggctttacctttcctgtcagaaataaaccaaggctctaaaagatgatttcccttctgtaactccctagagccacaggttctcattccttttcccattatacttctcacaattca

SEQ ID NO: 103126 - DNA, 120 bp, Artificial Sequence
  ENSG00000094755_25 (sequence is synthesized)
gtttctatgagtttgatcacctgatttttttaacaaaatatttctaacgggaatgggtgggagtgctggtgaaaagaggtgaaatgtggttgtatgagccaatcatatttgtgatttttt

SEQ ID NO: 103127 - DNA, 120 bp, Artificial Sequence
  ENSG00000094755_26 (sequence is synthesized)
aaaaaaagtttaaaaggaaatatctgttctgaaaccccacttaagcattgtttttatataaaaacaatgataaagatgtgaaactgtgaaataaatataccatattagctacccaccaaa

SEQ ID NO: 103128 - DNA, 120 bp, Artificial Sequence
  ENSG00000094755_27 (sequence is synthesized)
ctgcccctccatttgctccccttcctttctctctctcccttcccggctcctagactgggtctaggcaggagcttcgccatgatgtcaggagggaaggagatgcctctgggcctcgtacca

SEQ ID NO: 103129 - DNA, 120 bp, Artificial Sequence
  ENSG00000094755_28 (sequence is synthesized)
cagcctcagctctctctctgcccctccatctgagtccctcctggctcccagctccctcagggtgcaaggccaagcctccaaggaatccctccccttacctgcatggctggagccaagaca

SEQ ID NO: 103130 - DNA, 120 bp, Artificial Sequence
  ENSG00000094755_29 (sequence is synthesized)
agtatctctagcatttcagagagtaacatggtaagcgctgttcctttgtactctacccaagtagtccctctctgtgtgtttaaaggggatatgctttctagccgctcaaaaaaaaaaaaa

SEQ ID NO: 103131 - DNA, 120 bp, Artificial Sequence
  ENSG00000094796_0 (sequence is synthesized)
acagctctgtggcttggagaatttagactctgtcttcagccaggcactccctccctccctcccagcactatgccctacaacttctgcctgcccagcctgagctgccgcaccagctgctcc

SEQ ID NO: 103132 - DNA, 120 bp, Artificial Sequence
  ENSG00000094796_1 (sequence is synthesized)
tcccggccctgcgtgccccccagctgccacagctgcaccctgcccggggcctgcaacatccccgccaatgtgagcaactgcaactggttctgcgagggctccttcaatggtagcgagaag

SEQ ID NO: 103133 - DNA, 120 bp, Artificial Sequence
  ENSG00000094796_2 (sequence is synthesized)
gagactatgcagttcctgaacgaccgcctggccagctacctggagaaagtgcgtcagctggagcgggacaacgcggagctggagaacctcatccgggagcggtctcagcagcaggagccc

SEQ ID NO: 103134 - DNA, 120 bp, Artificial Sequence
  ENSG00000094796_3 (sequence is synthesized)
ttgctgtgccccagttaccagtcctattttaagaccattgaggagctccagcagaagatcctgtgtaccaagtctgagaatgccaggcttgtggtgcagatcgacaacgccaagctggct

SEQ ID NO: 103135 - DNA, 120 bp, Artificial Sequence
  ENSG00000094796_4 (sequence is synthesized)
gcggatgatttcagaaccaagtaccagaccgagctgtccctgcggcagctggtggagtcggacatcaacggtctgcgcaggatcctggatgagctgaccctgtgcaagtccgacctggag

SEQ ID NO: 103136 - DNA, 120 bp, Artificial Sequence
  ENSG00000094796_5 (sequence is synthesized)
gcccaggtggagtccctgaaggaggagctgctctgcctcaagagcaaccatgagcaggaggtcaataccctgcgctgccagcttggagaccgcctcaatgtggaggtggatgctgctccc

SEQ ID NO: 103137 - DNA, 120 bp, Artificial Sequence
  ENSG00000094796_6 (sequence is synthesized)
tggaaaccaaccgcagggaagtggagcaatggttcaccacgcagaccgaggagctgaacaagcaggtggtatccagctcagagcagctgcagtcctaccaggcggagatcatcgagctga

SEQ ID NO: 103138 - DNA, 120 bp, Artificial Sequence
  ENSG00000094796_7 (sequence is synthesized)
gacgcacagtcaacgccctggagatcgagctgcaggcccagcacaacctgcgagactctctggaaaacacgctgacagagagtgaggcccgctacagctcccagctgtcccaggtgcaga

SEQ ID NO: 103139 - DNA, 120 bp, Artificial Sequence
  ENSG00000094796_8 (sequence is synthesized)
gcctgatcaccaacgtggagtcccagctggcggagatccgcagtgacctggagcggcagaaccaggagtaccaggtgctgctggatgtgcgtgcccggctggagtgtgagatcaacacat

SEQ ID NO: 103140 - DNA, 120 bp, Artificial Sequence
  ENSG00000094796_9 (sequence is synthesized)
accggagcctgctggagagcgaggactgcaatctgcccagcaatccctgtgccacgaccaacgcgtgcagcaagcccatcggaccctgtctctccaatccctgtacctcttgtgtccctc

SEQ ID NO: 103141 - DNA, 120 bp, Artificial Sequence
  ENSG00000094796_10 (sequence is synthesized)
ctgccccctgcacaccctgtgccccacgcccccgctgtgggccctgcaattccttcgtgcgctagaacctagggaatgccagaggagcaaggatgcagggcccaggactccagagctgtg

SEQ ID NO: 103142 - DNA, 120 bp, Artificial Sequence
  ENSG00000094796_11 (sequence is synthesized)
acctggctctggttcaacaaaaggggcctgaaaacatcatttgcatggctggagttgcccgcgtaaggcagccaagaaactcacccaaagcctgtagcctccccaactactccagactgt

SEQ ID NO: 103143 - DNA, 120 bp, Artificial Sequence
  ENSG00000094796_12 (sequence is synthesized)
cctgctcaccctttccttcctgggggtctgttccttcctatgctcacccagagaactctctgatgtgccagtgggcctcccttttaacctcctaataaatatcatttccttggcaaagca

SEQ ID NO: 103144 - DNA, 120 bp, Artificial Sequence
  ENSG00000094804_0 (sequence is synthesized)
attcggatttggcgcgagcgcggctggagtttgctgctgccgctgtgcagtttgttcaggggcttgtggtggtgagtccgagaggctgcgtgtgagagacgtgagaaggatcctgcactg

SEQ ID NO: 103145 - DNA, 120 bp, Artificial Sequence
  ENSG00000094804_1 (sequence is synthesized)
aggaggtggaaagaagaggattgctcgaggaggcctggggtctgtgaggcagcggagctgggtgaaggctgcgggttccggcgaggcctgagctgtgctgtcgtcatgcctcaaacccga

SEQ ID NO: 103146 - DNA, 120 bp, Artificial Sequence
  ENSG00000094804_2 (sequence is synthesized)
tcccaggcacaggctacaatcagttttccaaaaaggaagctgtctcgggcattgaacaaagctaaaaactccagtgatgccaaactagaaccaacaaatgtccaaaccgtaacctgttct

SEQ ID NO: 103147 - DNA, 120 bp, Artificial Sequence
  ENSG00000094804_3 (sequence is synthesized)
cctcgtgtaaaagccctgcctctcagccccaggaaacgtctgggcgatgacaacctatgcaacactccccatttacctccttgttctccaccaaagcaaggcaagaaagagaatggtccc

SEQ ID NO: 103148 - DNA, 120 bp, Artificial Sequence
  ENSG00000094804_4 (sequence is synthesized)
cctcactcacatacacttaagggacgaagattggtatttgacaatcagctgacaattaagtctcctagcaaaagagaactagccaaagttcaccaaaacaaaatactttcttcagttaga

SEQ ID NO: 103149 - DNA, 120 bp, Artificial Sequence
  ENSG00000094804_5 (sequence is synthesized)
aaaagtcaagagatcacaacaaattctgagcagagatgtccactgaagaaagaatctgcatgtgtgagactattcaagcaagaaggcacttgctaccagcaagcaaagctggtcctgaac

SEQ ID NO: 103150 - DNA, 120 bp, Artificial Sequence
  ENSG00000094804_6 (sequence is synthesized)
acagctgtcccagatcggctgcctgccagggaaagggagatggatgtcatcaggaatttcttgagggaacacatctgtgggaaaaaagctggaagcctttacctttctggtgctcctgga

SEQ ID NO: 103151 - DNA, 120 bp, Artificial Sequence
  ENSG00000094804_7 (sequence is synthesized)
actggaaaaactgcctgcttaagccggattctgcaagacctcaagaaggaactgaaaggctttaaaactatcatgctgaattgcatgtccttgaggactgcccaggctgtattcccagct

SEQ ID NO: 103152 - DNA, 120 bp, Artificial Sequence
  ENSG00000094804_8 (sequence is synthesized)
attgctcaggagatttgtcaggaagaggtatccaggccagctgggaaggacatgatgaggaaattggaaaaacatatgactgcagagaagggccccatgattgtgttggtattggacgag

SEQ ID NO: 103153 - DNA, 120 bp, Artificial Sequence
  ENSG00000094804_9 (sequence is synthesized)
atggatcaactggacagcaaaggccaggatgtattgtacacgctatttgaatggccatggctaagcaattctcacttggtgctgattggtattgctaataccctggatctcacagataga

SEQ ID NO: 103154 - DNA, 120 bp, Artificial Sequence
  ENSG00000094804_10 (sequence is synthesized)
attctacctaggcttcaagctagagaaaaatgtaagccacagctgttgaacttcccaccttataccagaaatcagatagtcactattttgcaagatcgacttaatcaggtatctagagat

SEQ ID NO: 103155 - DNA, 120 bp, Artificial Sequence
  ENSG00000094804_11 (sequence is synthesized)
caggttctggacaatgctgcagttcaattctgtgcccgcaaagtctctgctgtttcaggagatgttcgcaaagcactggatgtttgcaggagagctattgaaattgtagagtcagatgtc

SEQ ID NO: 103156 - DNA, 120 bp, Artificial Sequence
  ENSG00000094804_12 (sequence is synthesized)
aaaagccagactattctcaaaccactgtctgaatgtaaatcaccttctgagcctctgattcccaagagggttggtcttattcacatatcccaagtcatctcagaagttgatggtaacagg

SEQ ID NO: 103157 - DNA, 120 bp, Artificial Sequence
  ENSG00000094804_13 (sequence is synthesized)
atgaccttgagccaagaaggagcacaagattccttccctcttcagcagaagatcttggtttgctctttgatgctcttgatcaggcagttgaaaatcaaagaggtcactctggggaagtta

SEQ ID NO: 103158 - DNA, 120 bp, Artificial Sequence
  ENSG00000094804_14 (sequence is synthesized)
tatgaagcctacagtaaagtctgtcgcaaacagcaggtggcggctgtggaccagtcagagtgtttgtcactttcagggctcttggaagccaggggcattttaggattaaagagaaacaag

SEQ ID NO: 103159 - DNA, 120 bp, Artificial Sequence
  ENSG00000094804_15 (sequence is synthesized)
gaaacccgtttgacaaaggtgtttttcaagattgaagagaaagaaatagaacatgctctgaaagataaagctttaattggaaatatcttagctactggattgccttaaattcttctctta

SEQ ID NO: 103160 - DNA, 120 bp, Artificial Sequence
  ENSG00000094804_16 (sequence is synthesized)
caccccacccgaaagtattcagctggcatttagagagctacagtcttcattttagtgctttacacattcgggcctgaaaacaaatatgaccttttttacttgaagccaatgaattttaat

SEQ ID NO: 103161 - DNA, 120 bp, Artificial Sequence
  ENSG00000094804_17 (sequence is synthesized)
ctatagattctttaatattagcacagaataatatctttgggtcttactatttttacccataaaagtgaccaggtagaccctttttaattacattcactacttctaccacttgtgtatctc

SEQ ID NO: 103162 - DNA, 120 bp, Artificial Sequence
  ENSG00000094804_18 (sequence is synthesized)
tagccaatgtgcttgcaagtgtacagatctgtgtagaggaatgtgtgtatatttacctcttcgtttgctcaaacatgagtgggtatttttttgtttgttttttttgttgttgttgttttt

SEQ ID NO: 103163 - DNA, 82 bp, Artificial Sequence
  ENSG00000094804_19 (sequence is synthesized)
gttgttgtttttgaggcgcttctctgctcactacagcacccgcttcccaggttgaagtgattctcttgcctcagcctcccga

SEQ ID NO: 103164 - DNA, 120 bp, Artificial Sequence
  ENSG00000094804_20 (sequence is synthesized)
ctgggattataggcgtgagccaccatgctcagccattaaggtattttgttaagaactttaagtttagggtaagaagaatgaaaatgatccagaaaaatgcaagcaagtccacatggagat

SEQ ID NO: 103165 - DNA, 120 bp, Artificial Sequence
  ENSG00000094804_21 (sequence is synthesized)
agatttggaggacactggttaaagaatttatttctttgtatagtatactatgttcatggtgcagatactacaacattgtggcattttagactcgttgagtttcttgggcactcccaaggg

SEQ ID NO: 103166 - DNA, 120 bp, Artificial Sequence
  ENSG00000094804_22 (sequence is synthesized)
cgttggggtcataaggagactataactctacagattgtgaatatatttattttcaagttgcattctttgtctttttaagcaatcagatttcaagagagctcaagctttcagaagtcaatg

SEQ ID NO: 103167 - DNA, 120 bp, Artificial Sequence
  ENSG00000094804_23 (sequence is synthesized)
tgaaaattccttcctaggctgtcccacagtctttgctgcccttagatgaagccacttgtttcaagatgactactttggggttgggttttcatctaaacacatttttccagtcttattaga

SEQ ID NO: 103168 - DNA, 120 bp, Artificial Sequence
  ENSG00000094804_24 (sequence is synthesized)
taaattagtccatatggttggttaatcaagagccttctgggtttggtttggtggcattaaatggcaatttgtgactgagacaccagagggcacccttataacattgactactttgaaagg

SEQ ID NO: 103169 - DNA, 120 bp, Artificial Sequence
  ENSG00000094804_25 (sequence is synthesized)
ggatgcttgaggctgaggtagttttgagggaaagggggaagttctagtttgatttgtttgggagattgctgtcctttcataactgaagcaaatgcttgaaatgtaaaccatgtgtgatac

SEQ ID NO: 103170 - DNA, 120 bp, Artificial Sequence
  ENSG00000094804_26 (sequence is synthesized)
gaatgatctgagagccagtgaccaagtctgcttttccctgagctctcctgctgccgcctctacctttctgacatggccttccatttggaacttgatatgtgtacaagtgatctgttggcc

SEQ ID NO: 103171 - DNA, 120 bp, Artificial Sequence
  ENSG00000094804_27 (sequence is synthesized)
actgtttcattcatcctgaccactgtatccgtgtaatgtgatctgagctacaacaggtggtatgggatagaggcaaggaaagcagagagagccctctgaaatgaacactacccactggtg

SEQ ID NO: 103172 - DNA, 120 bp, Artificial Sequence
  ENSG00000094804_28 (sequence is synthesized)
tgtgtagcacatgatagtctgtaggcatgagtctgaatgttgttctcacactcctttactagagtattcgttccctctgaaggtagtttgaacatggaaacacagttctatacctagaag

SEQ ID NO: 103173 - DNA, 120 bp, Artificial Sequence
  ENSG00000094804_29 (sequence is synthesized)
gttggaaagtgtctgggactataagggttaacatgcataattgcaaagattgtccgaaggctgatggaaagcagagactgaatgggattgagaacagatgcgaagcttgatttaaattac

SEQ ID NO: 103174 - DNA, 120 bp, Artificial Sequence
  ENSG00000094804_30 (sequence is synthesized)
attttattggatgctgcagccttaagagacgtgactgctttacagtttgtttccacactgtgggcagctgctgtctgttctgtgtccacagtaggatcctgcccaataaggagcagcctc

SEQ ID NO: 103175 - DNA, 120 bp, Artificial Sequence
  ENSG00000094804_31 (sequence is synthesized)
cccacctcattgtgtttgaggcttggcgccttcctcttaactgtagggcttgagtcaggaacatggcttgactcgcagtggggctgctatgtatcctccctggcttccagccaaaatcac

SEQ ID NO: 103176 - DNA, 120 bp, Artificial Sequence
  ENSG00000094804_32 (sequence is synthesized)
attggtagattcaaaggggccaaatttctttcccctctatctttccctttcccctggttttggaaatagagttttctgtctactgatttgttagtttccttttcttctcccctcactgtc

SEQ ID NO: 103177 - DNA, 120 bp, Artificial Sequence
  ENSG00000094804_33 (sequence is synthesized)
aatttctaggtcattgctgctcttaagactttagcagttggaacagggttggttctgtcaatgatgcatgaagcagacttagtgtccctgcttggcttctgctgcccttgtgggagcaaa

SEQ ID NO: 103178 - DNA, 120 bp, Artificial Sequence
  ENSG00000094804_34 (sequence is synthesized)
agctgatatatgtttgtcagtaaagtcttaagtgtaattcagactgctgaggaagaaagccctttccttgctggcttttctccctgaagctgagagcttcaggaaggtggtaggagtttt

SEQ ID NO: 103179 - DNA, 120 bp, Artificial Sequence
  ENSG00000094804_35 (sequence is synthesized)
agtgggatgggatgggatgggcttgtggttagcagtttttgccaggatcataggctgcttcacttagagtagtggcaaagatgctgacctacattcttccttttgaaggtgatggagtgt

SEQ ID NO: 103180 - DNA, 120 bp, Artificial Sequence
  ENSG00000094804_36 (sequence is synthesized)
gtgtctatatcctggtttatctctctcccccaccccaaggaagctgattaagcttccatagagtgttgggtgttgccatggaaagagcatagacaaaataaattgtgtgtttcaacccca

SEQ ID NO: 103181 - DNA, 120 bp, Artificial Sequence
  ENSG00000094804_37 (sequence is synthesized)
aatttaaaatggattttaacagtaagaattaatactggtactatataaaaggcacctatttcccttggattgtggttgagagtttatcattaatcctttccctatcctccccttcatttc

SEQ ID NO: 103182 - DNA, 120 bp, Artificial Sequence
  ENSG00000094804_38 (sequence is synthesized)
tataaagcccctttcctacattactgtataggttttcgggaatatctacagaagcctgttcaaagattttattgaaaagaggaagaaatagggtattcagataagtttttgcaaacccag

SEQ ID NO: 103183 - DNA, 120 bp, Artificial Sequence
  ENSG00000094804_39 (sequence is synthesized)
gtgtttataacagcgcccttccacgtagtaggtagacaacaaatgtcagctgttcttgcatagatttggatgtgaagcaaaagtgaatgctaaaataagtgtgataacataattaggaaa

SEQ ID NO: 103184 - DNA, 120 bp, Artificial Sequence
  ENSG00000094804_40 (sequence is synthesized)
taagtgttaatcatcagtataaataaattccatgttagttattttctcttcactttcacatattgactagttgtcctcttattttttttaatctagctgtgctgtcgtcatgcctcaaac

SEQ ID NO: 103185 - DNA, 120 bp, Artificial Sequence
  ENSG00000094804_41 (sequence is synthesized)
cagttcaattctgtgcccgcaaagtctctgctgtttcaggagatgttcgcaaagcactggatgtttgcaggtgagttacggctctgttgcattcttttattaaaaaaaaaaaaaaagaaa

SEQ ID NO: 103186 - DNA, 120 bp, Artificial Sequence
  ENSG00000094841_0 (sequence is synthesized)
aaagtgtgctaaaggaaaccaacagcggcctaggggtgaaaggacagccagggttagatgttctgaggaggcgggagcaaccgagagagcacgtgagcatctgtcctttctacccgttcc

SEQ ID NO: 103187 - DNA, 120 bp, Artificial Sequence
  ENSG00000094841_1 (sequence is synthesized)
tctttatctttagtgttcagtagcagcggggatagcccggggcccggtgtatggccacggagttacagtgtccggactccatgccctgtcacaaccagcaagtaaactctgcctcaaccc

SEQ ID NO: 103188 - DNA, 120 bp, Artificial Sequence
  ENSG00000094841_2 (sequence is synthesized)
caagtcccgagcagctgcgacctggcgatctgatcctggaccacgcagggggaaacagagcctccagggccaaggtgattctcctcacggggtacgcccattctagcctgccggccgagc

SEQ ID NO: 103189 - DNA, 120 bp, Artificial Sequence
  ENSG00000094841_3 (sequence is synthesized)
tggactctggggcctgcggcggctccagcctcaactcagagggcaacagtggtagtggtgacagtagcagctatgacgcaccagctggcaactccttcctagaggactgcgaactctccc

SEQ ID NO: 103190 - DNA, 120 bp, Artificial Sequence
  ENSG00000094841_4 (sequence is synthesized)
ggcagatcggggcgcagcttaagctgctgcctatgaatgatcagatacgggagctacagaccatcatccgtgacaagacagccagtagaggtgacttcatgttttctgcggatcgtttga

SEQ ID NO: 103191 - DNA, 120 bp, Artificial Sequence
  ENSG00000094841_5 (sequence is synthesized)
tcagacttgttgtggaagagggattgaatcagctgccatataaagaatgcatggtgaccactccaacagggtacaagtatgaaggagtgaaatttgagaagggaaattgtggggtcagca

SEQ ID NO: 103192 - DNA, 120 bp, Artificial Sequence
  ENSG00000094841_6 (sequence is synthesized)
taatgagaagcggtgaggcaatggaacaaggtttacgagactgctgtcgatccatacgaattggaaagatcctgattcagagtgatgaggagacacaaagagccaaagtatattatgcca

SEQ ID NO: 103193 - DNA, 120 bp, Artificial Sequence
  ENSG00000094841_7 (sequence is synthesized)
aattccccccagacatttaccggagaaaagtccttctgatgtatccaattctcagcactggaaatactgtaattgaagctgtaaaggttcttatagaacatggagttcaacccagtgtta

SEQ ID NO: 103194 - DNA, 120 bp, Artificial Sequence
  ENSG00000094841_8 (sequence is synthesized)
tcatcctactcagtctgttctccactcctcatggtgccaaatcaatcattcaggagtttccagagatcacaattttaactactgaagttcatcctgttgcacctacacattttggacaga

SEQ ID NO: 103195 - DNA, 120 bp, Artificial Sequence
  ENSG00000094841_9 (sequence is synthesized)
aatactttggaacagactaagttatttaagtaaaataattatcttatgtaatattacaatcatgttttgattttctatttgttttactgattcacttgagggtggcagagaaaaatgtgt

SEQ ID NO: 103196 - DNA, 120 bp, Artificial Sequence
  ENSG00000094841_10 (sequence is synthesized)
ccgaattcaacaatgaagtatatgcaactcttacaaaacataaattttaataatattctaatgcaaattactgaaccctcagtgcattaaaattatttcctaatttatgagcctcttagt

SEQ ID NO: 103197 - DNA, 120 bp, Artificial Sequence
  ENSG00000094841_11 (sequence is synthesized)
ttggaggttgcttgaagccacaaataaaactcaaatgagagtcagttctttgtcccactgtagtttgcattttgtttagtttggttttagctctactaaggtttcacatatgtggctatt

SEQ ID NO: 103198 - DNA, 120 bp, Artificial Sequence
  ENSG00000094841_12 (sequence is synthesized)
gccacattcctctactgttttctttctgatactggacatgctagtaacttggagaggagaataaaagaatgtctcctggaattttacattcccattaatgtcctcattcagttggcagac

SEQ ID NO: 103199 - DNA, 120 bp, Artificial Sequence
  ENSG00000094841_13 (sequence is synthesized)
ctaggatgtatggttaactctcaggccattatgtttttcatggctcatttcccaaactgcattgttggtaggtgccttgctaagctgtaatgcagtgaagaagatggtggggcattttta

SEQ ID NO: 103200 - DNA, 120 bp, Artificial Sequence
  ENSG00000094841_14 (sequence is synthesized)
gtaattggaactgtaacattaatttacaagattgaaccggggatgtctggatgctgacaagggagagccaagtactgttaatgccatcaatcctctaggaaggaattggtggtttttctg

SEQ ID NO: 103201 - DNA, 120 bp, Artificial Sequence
  ENSG00000094841_15 (sequence is synthesized)
aagtgtgggggaaagggtggtttcttgctggatttcatggccagtaagtaaatttaaatgcttcatttttaatttggatgtttctgctagagacctttgatttggaaattagttattttg

SEQ ID NO: 103202 - DNA, 120 bp, Artificial Sequence
  ENSG00000094841_16 (sequence is synthesized)
catgtttgtcaactgtatatgtatgaaaatagaaaaaaaccatgctttttgtaaaaacccctaagatttgtatatgttcatctttaggcttctgaaagggagagaaatcatattggaaat

SEQ ID NO: 103203 - DNA, 120 bp, Artificial Sequence
  ENSG00000094841_17 (sequence is synthesized)
cagtgttggtgttctgaaatctgcttgtaaaactctcatctcattttacattgatattaaaacattttaacagtgttggctagctgattacttgattaattatactcccatggccccata

SEQ ID NO: 103204 - DNA, 120 bp, Artificial Sequence
  ENSG00000094841_18 (sequence is synthesized)
ggaagctgttgtgggcctctgttcaaaagcacagaaaagagcagaaggaaatgtcttagaaagaatcaaagctgatgaaatcagcaaagattgggggaaaggaaggaagcctggtgtaga

SEQ ID NO: 103205 - DNA, 120 bp, Artificial Sequence
  ENSG00000094841_19 (sequence is synthesized)
ttggattatatttttcctttggggactagaatactagaagaacttcagtatatttttccctttatttttgaatactgtcatataataaattgagattaataaattactcatattacagtt

SEQ ID NO: 103206 - DNA, 120 bp, Artificial Sequence
  ENSG00000094841_20 (sequence is synthesized)
ggattctgtttgaagattcggatgcattcgcacagcctcttttatttgtttttccttagggccgagctttgattgttttccttacacaaccgggaatattggagtaacactgtatttttc

SEQ ID NO: 103207 - DNA, 120 bp, Artificial Sequence
  ENSG00000094841_21 (sequence is synthesized)
tcttttcctggagttgccagatgaaatacaggatgcctacctaagacagagtctcgctcttgtcactcaggctggagtgcagtgttgcaatcacagcttactgcagcctcaagctcctgg

SEQ ID NO: 103208 - DNA, 120 bp, Artificial Sequence
  ENSG00000094841_22 (sequence is synthesized)
acaagggatcctcccgcttcagcctcccaagtagctgggactaaggactgaaatccttgttttcttgctggctgttggctgaggactactctgtttccagaaggatcctcagatccttgc

SEQ ID NO: 103209 - DNA, 120 bp, Artificial Sequence
  ENSG00000094841_23 (sequence is synthesized)
cacgtgaccccttttataggcaacattcacatatcctggactgtgacacatcagcatttgtttcccttagccagcccaaacaagtacaaattgtgtgaagataactttttaaaatgactg

SEQ ID NO: 103210 - DNA, 120 bp, Artificial Sequence
  ENSG00000094841_24 (sequence is synthesized)
cctttggcgtttgtcttatgctacagctttttttccagtaggagagattacggttatgatttaaaatgaagtgtgtggaatgaagaagatctggagtctggttcatattaaaacatccct

SEQ ID NO: 103211 - DNA, 120 bp, Artificial Sequence
  ENSG00000094841_25 (sequence is synthesized)
gttaacaaataattcagcctagcgttgtgtctaaaatagagcctcagagaatacatgcagcttcattgatacaaatatactttaatttctaaatggatttaaaatgaatagtatggatct

SEQ ID NO: 103212 - DNA, 120 bp, Artificial Sequence
  ENSG00000094841_26 (sequence is synthesized)
ctgcttggggacccagcaagcttccagggcctttctgctgctttctctacccctgtatttcactcggctctctaaattgactcagctccaggacagccagtagaggtgacttcatgtttt

SEQ ID NO: 103213 - DNA, 120 bp, Artificial Sequence
  ENSG00000094841_27 (sequence is synthesized)
cggtaggttcacgtgtgtgtgatttttgtctctttgtatgcatagaaatggttgctgttttccagaagagaggcaggcttgtctgtcataattgcagcctgcctttagttaaatctcact

SEQ ID NO: 103214 - DNA, 120 bp, Artificial Sequence
  ENSG00000094841_28 (sequence is synthesized)
acctgtgttatctagcctcatggtgctgtggagtcatggcctgtgtgaggctaggtttggctaattttaactacagagcgtattccctaatagagtgctcccatgggcaagccagctttc

SEQ ID NO: 103215 - DNA, 120 bp, Artificial Sequence
  ENSG00000094880_0 (sequence is synthesized)
gagtcgggaaaatggctgcgagtacctccatggtcccggtggctgtgacggcggcagtggcgcctgtcctgtccataaacagcgatttctcagatttgcgggaaattaaaaagcaactgc

SEQ ID NO: 103216 - DNA, 120 bp, Artificial Sequence
  ENSG00000094880_1 (sequence is synthesized)
tgcttattgcgggccttacccgggagcggggcctactacacagtagcaaatggtcggcggagttggctttctctctccctgcattgcctctggccgagctgcaaccgcctccgcctatta

SEQ ID NO: 103217 - DNA, 120 bp, Artificial Sequence
  ENSG00000094880_2 (sequence is synthesized)
cagaggaagatgcccaggatatggatgcctataccctggccaaggcctactttgacgttaaagagtatgatcgggcagcacatttcctgcatggctgcaatagcaagaaagcctattttc

SEQ ID NO: 103218 - DNA, 120 bp, Artificial Sequence
  ENSG00000094880_3 (sequence is synthesized)
tgtatatgtattccagatatctgtctggagaaaaaaagaaggacgatgaaacagttgatagcttaggccccctggaaaaaggacaagtgaaaaatgaggcgcttagagaattgagagtgg

SEQ ID NO: 103219 - DNA, 120 bp, Artificial Sequence
  ENSG00000094880_4 (sequence is synthesized)
agctcagcaaaaaacaccaagctcgagaacttgatggatttggactttatctgtatggtgtggtgcttcgaaaactggacttggttaaagaggccattgatgtgtttgtggaagctactc

SEQ ID NO: 103220 - DNA, 120 bp, Artificial Sequence
  ENSG00000094880_5 (sequence is synthesized)
atgttttgcccttgcattggggagcctggttagaactctgtaacctgatcacagacaaagagatgctgaagttcctgtctttgccagacacctggatgaaagagttttttctggctcata

SEQ ID NO: 103221 - DNA, 120 bp, Artificial Sequence
  ENSG00000094880_6 (sequence is synthesized)
tatacacagagttgcagttgatagaggaggccctgcaaaagtatcagaatctcattgatgtgggcttctctaagagctcgtatattgtttcccaaattgcagttgcctatcacaatatca

SEQ ID NO: 103222 - DNA, 120 bp, Artificial Sequence
  ENSG00000094880_7 (sequence is synthesized)
gagatattgacaaagccctctccatttttaatgagctaaggaaacaagacccttacaggattgaaaatatggacacattctccaaccttctttatgtcaggagcatgaaatcggagttga

SEQ ID NO: 103223 - DNA, 120 bp, Artificial Sequence
  ENSG00000094880_8 (sequence is synthesized)
gttatctggctcataacctctgtgagattgataaatatcgtgtagaaacgtgctgtgtaattggcaattattacagtttacgttctcagcatgagaaagcagccttatatttccagagag

SEQ ID NO: 103224 - DNA, 120 bp, Artificial Sequence
  ENSG00000094880_9 (sequence is synthesized)
ccctgaaattaaatcctcggtatcttggtgcctggacactaatgggacatgagtacatggagatgaagaacacgtctgctgctatccaggcttatagacatgccattgaggtcaacaaac

SEQ ID NO: 103225 - DNA, 120 bp, Artificial Sequence
  ENSG00000094880_10 (sequence is synthesized)
gggactacagagcttggtatggcctcgggcagacctatgaaatccttaagatgccattttactgcctttattattatagacgggcccaccagcttcgacccaatgattctcgcatgctgg

SEQ ID NO: 103226 - DNA, 120 bp, Artificial Sequence
  ENSG00000094880_11 (sequence is synthesized)
ttgctttaggagaatgttacgagaaactcaatcaactagtggaagccaaaaagtgttattggagagcttacgccgtgggagatgtggagaaaatggctctggtgaaactggcaaagcttc

SEQ ID NO: 103227 - DNA, 120 bp, Artificial Sequence
  ENSG00000094880_12 (sequence is synthesized)
atgaacagttgactgagtcagaacaggctgcccagtgttacatcaaatatatccaagatatctattcctgtggggaaatagtagaacacttggaggaaagcactgcctttcgctatctgg

SEQ ID NO: 103228 - DNA, 120 bp, Artificial Sequence
  ENSG00000094880_13 (sequence is synthesized)
taagtgcaaactgtgggatgaagcttcaacttgtgcacaaaagtgttgtgcatttaatgatacccgggaagaaggtaaggccttactccggcaaatcctacagcttcggaaccaaggcga

SEQ ID NO: 103229 - DNA, 120 bp, Artificial Sequence
  ENSG00000094880_14 (sequence is synthesized)
gactcctaccaccgaggtgcctgctccctttttcctacctgcttcactctctgctaacaatacccccacacgcagagtttctccactcaacttgtcttctgtcacgccatagttggctac

SEQ ID NO: 103230 - DNA, 120 bp, Artificial Sequence
  ENSG00000094880_15 (sequence is synthesized)
tctcaagccagcacattgttagacccatcttaattaagccttacctccatgtaaagaacagcacgtctgttccaaggacctcagctcttcttgtttctacagatggcaacagctccatag

SEQ ID NO: 103231 - DNA, 120 bp, Artificial Sequence
  ENSG00000094880_16 (sequence is synthesized)
ggacagcttgtataattaccttcagaggccaactgacagaatcctggcaggaacagacattatcttgccagttagaagtacttctgtctcacttatgtccaaagagtggctatagatctt

SEQ ID NO: 103232 - DNA, 120 bp, Artificial Sequence
  ENSG00000094880_17 (sequence is synthesized)
ggccttcttccctgaatgctttttttttttggcccccaagaaagtcccttttatagcactttagcacaggcaatgctacaggaacaaagtttcaatgctgctgagagtgaaagaaaggag

SEQ ID NO: 103233 - DNA, 120 bp, Artificial Sequence
  ENSG00000094880_18 (sequence is synthesized)
gaaagtctgccactctaccctgagctggcagtagggcactgagtaccctaggaagaagtcagagcaatggatacaaatgaccttgctcttggatttgctgagcatgatccctattctgat

SEQ ID NO: 103234 - DNA, 120 bp, Artificial Sequence
  ENSG00000094880_19 (sequence is synthesized)
gtcagagattaggtttaaatggaatagagctatccatttgttcttactctctagggagacaatcttccaaaacagttttgggggggtcttctaaagctttcaaattggaagtaactttat

SEQ ID NO: 103235 - DNA, 120 bp, Artificial Sequence
  ENSG00000094880_20 (sequence is synthesized)
tcaactagagttgaataaaagaagggcaaaaataatctcacagagcttggaactgctgatagcccttactgagggcaaaagatggctatattgttagctatactcctaccaaagcaagca

SEQ ID NO: 103236 - DNA, 120 bp, Artificial Sequence
  ENSG00000094880_21 (sequence is synthesized)
aggagataggattatagataatttcacggacatttggaaataacattggtgattatacagacaagaataaactcacttcaagctggtctgttttaataaattttcaacgtaattgtctat

SEQ ID NO: 103237 - DNA, 120 bp, Artificial Sequence
  ENSG00000094880_22 (sequence is synthesized)
ttttttccctcccatctgcaacagaatacatttttttcagcctttatctagatgaggtaaagggaatcattcttatggtgctcttggagagtttcaggcctgtgcatgtgtgtacagcag

SEQ ID NO: 103238 - DNA, 120 bp, Artificial Sequence
  ENSG00000094880_23 (sequence is synthesized)
gaggtaatatgctataatgtctgctgtaatatatttgcacagtagatgctatggatcattctgagctcagggtccagactttattcttattcccagaattttgtgttacgtttttacctc

SEQ ID NO: 103239 - DNA, 120 bp, Artificial Sequence
  ENSG00000094880_24 (sequence is synthesized)
ctaacatatgacacttcatcttatattaaggaaggtttagaatatctaatacgacttgaattcatttgttactaagccttctcaggcaagctgtatactagttactggtctccactgcca

SEQ ID NO: 103240 - DNA, 120 bp, Artificial Sequence
  ENSG00000094880_25 (sequence is synthesized)
tgccttttcaaggttcccatggtccagaatgatgtttgattcttaatttttctgtcccttttataatttgttttaatgattttgctacatttggaattcaataaaaaatgtgaacaataa

SEQ ID NO: 103241 - DNA, 120 bp, Artificial Sequence
  ENSG00000094880_26 (sequence is synthesized)
catcattagcagagtaatgattctaagctttgataacagtaactatcacatctaatactattctagttccaagagtgtcatttatgtcaaaattgatacttacctatgtattgttttttt

SEQ ID NO: 103242 - DNA, 120 bp, Artificial Sequence
  ENSG00000094880_27 (sequence is synthesized)
aatataggggtggggaaagttttggcagggctttggttatagttctccctttgctgcgcctctggtgtcttttcgctgttttggaagtaagtctttgtttgaaagactgatgactagctc

SEQ ID NO: 103243 - DNA, 120 bp, Artificial Sequence
  ENSG00000094880_28 (sequence is synthesized)
atgggaagggctaataacttttttttcctcttttgatagctattgacaaatcacagtggatggttttggctcttggggatctgaggttaaagttgctgaaggctgtttggttattttcat

SEQ ID NO: 103244 - DNA, 120 bp, Artificial Sequence
  ENSG00000094880_29 (sequence is synthesized)
ttagtatatttcactaatgggttaatagtataattatgaacacaaagtaatctattatatggagcatcaggttaaagaccagttgttgcatagatttgaaatagtggtgtactggttcct

SEQ ID NO: 103245 - DNA, 120 bp, Artificial Sequence
  ENSG00000094880_30 (sequence is synthesized)
ttcctgtggggtatgtatcataccatgagaattgtactgctgatattattactgtcacctcagtaattttgctttccctttctaggaaatagtagaacacttggaggaaagcactgcctt

SEQ ID NO: 103246 - DNA, 120 bp, Artificial Sequence
  ENSG00000094880_31 (sequence is synthesized)
taacaggataagtaacaacctgattatttatttactttaggttatataaggttcttcatgcctgtgaattaatattattgtgtaagaattaagttaaaaagcctgggctgacttttaaat

SEQ ID NO: 103247 - DNA, 120 bp, Artificial Sequence
  ENSG00000094880_32 (sequence is synthesized)
ttataaattcatttatcatgtttatagtatatttattgtttttctttcatggctattaaaaagtatgactgtaaaggacaatgcaagtaaaccaacttaatactgtattgaataataagt

SEQ ID NO: 103248 - DNA, 120 bp, Artificial Sequence
  ENSG00000094880_33 (sequence is synthesized)
ttattttactttgaaacattatgaatttactttcctactttttcttagttgttatctatataaattgattaaaaaaacattttatgtacttctcatttcctagtacaggttgagtatccc

SEQ ID NO: 103249 - DNA, 120 bp, Artificial Sequence
  ENSG00000094880_34 (sequence is synthesized)
agtatcccttatttgaagtgcttgggaccaaaagtgtttcagatttcagatttttttcagattttggtatatttgcattatacttactggttgaaataaaaaatgctgcagtgagtgtca

SEQ ID NO: 103250 - DNA, 120 bp, Artificial Sequence
  ENSG00000094914_0 (sequence is synthesized)
acttccgttgagttccgcctcgccgtttgtcccttgcggtacccgtccgcatacgaatctagcccgggaaccgagttgcgggagtgcggtctgtgccgttccggccaggagtttgccgac

SEQ ID NO: 103251 - DNA, 120 bp, Artificial Sequence
  ENSG00000094914_1 (sequence is synthesized)
tgcagacgtcctgcgaaccggcaagatgtgctctctggggttgttccctcctccaccgcctcggggtcaagtcaccctatatgagcacaataacgagctggtgacgggcagtagctatga

SEQ ID NO: 103252 - DNA, 120 bp, Artificial Sequence
  ENSG00000094914_2 (sequence is synthesized)
gagcccgccccccgacttccggggccagtggatcaatcttcctgtcctacaactgacaaaggatcccctaaagacccctggaaggctggaccatggcacaagaactgccttcatccatca

SEQ ID NO: 103253 - DNA, 120 bp, Artificial Sequence
  ENSG00000094914_3 (sequence is synthesized)
ccgggagcaagtgtggaagagatgcatcaacatttggcgtgatgtgggcctttttggggtgctaaatgaaattgcaaactcagaagaagaggtgtttgagtgggtgaagacggcatccgg

SEQ ID NO: 103254 - DNA, 120 bp, Artificial Sequence
  ENSG00000094914_4 (sequence is synthesized)
ctgggccctggcactctgtcgatgggcctcttccctccatgggtccctgttcccccatctgtctctcaggagcgaagatctgatcgctgaatttgcccaagtcacaaattggtccagctg

SEQ ID NO: 103255 - DNA, 120 bp, Artificial Sequence
  ENSG00000094914_5 (sequence is synthesized)
ctgcttgcgtgtctttgcatggcacccccacaccaacaagtttgcagtggccctgctagatgactcagtccgtgtgtataatgccagcagcaccatagtcccctccctgaagcaccggct

SEQ ID NO: 103256 - DNA, 120 bp, Artificial Sequence
  ENSG00000094914_6 (sequence is synthesized)
gcagcgaaatgtggcgtctctggcctggaagccccttagtgcctctgtcttggctgtggcctgccagagctgcattcttatctggaccctggaccctacctccttgtctacccgaccctc

SEQ ID NO: 103257 - DNA, 120 bp, Artificial Sequence
  ENSG00000094914_7 (sequence is synthesized)
agtgctgtctcaccctgggcatacacctgttaccagcttggcctgggcccccagtggggggcggctgctctcagcttcacccgtggatgctgctatccgggtatgggatgtctcaacaga

SEQ ID NO: 103258 - DNA, 120 bp, Artificial Sequence
  ENSG00000094914_8 (sequence is synthesized)
gacctgtgtcccccttccctggttccgaggaggtggggtgaccaacctgctctggtccccagacggcagcaaaatcctggctaccactccttcagctgtctttcgagtctgggaggccca

SEQ ID NO: 103259 - DNA, 120 bp, Artificial Sequence
  ENSG00000094914_9 (sequence is synthesized)
gatgtggacttgtgagaggtggcctactctatcagggcgctgtcagactggctgctggagcccagatggcagccgactgctgttcactgtattgggagagccactgatttactccctgtc

SEQ ID NO: 103260 - DNA, 120 bp, Artificial Sequence
  ENSG00000094914_10 (sequence is synthesized)
ttttccagaacgttgtggtgagggaaaggggtgcgttggaggtgcaaagtcagcaacgattgtggcagatctgtctgagacaacaatacagacaccagatggtgaggagaggcttggggg

SEQ ID NO: 103261 - DNA, 120 bp, Artificial Sequence
  ENSG00000094914_11 (sequence is synthesized)
agaggctcactccatggtctgggaccccagtggggaacgtctggctgtgcttatgaaaggaaagccaagggtacaggatggtaaaccagtcatcctcctttttcgcactcgaaacagccc

SEQ ID NO: 103262 - DNA, 120 bp, Artificial Sequence
  ENSG00000094914_12 (sequence is synthesized)
tgtgtttgagctccttccctgtggcattatccagggggagccaggagcccagccccagctcatcactttccatccttccttcaacaaaggggccctgctcagtgtgggctggtccacagg

SEQ ID NO: 103263 - DNA, 120 bp, Artificial Sequence
  ENSG00000094914_13 (sequence is synthesized)
ccgaattgcccacatcccgctgtactttgtcaatgcccagtttccacgttttagcccagtgcttgggcgggcccaggaaccccctgctgggggtggaggctctattcatgacctgcccct

SEQ ID NO: 103264 - DNA, 120 bp, Artificial Sequence
  ENSG00000094914_14 (sequence is synthesized)
ctttactgagacatccccaacctctgccccttgggaccctctcccagggccaccacctgttctgccccactccccacattcccacctctaagaataaataagttttccttttgttttcca

SEQ ID NO: 103265 - DNA, 120 bp, Artificial Sequence
  ENSG00000094914_15 (sequence is synthesized)
ggaggcagtgtgacaggggcagggtcacagagtctggcggagtggaaacagcttggccccggcaggaggctagaagggctggaatctgttttaggactgggattggagtataacggggga

SEQ ID NO: 103266 - DNA, 120 bp, Artificial Sequence
  ENSG00000094914_16 (sequence is synthesized)
acggttaaggagctgtggaggaggcctagagggaatggagagaatgagggagaatctagggagtgtgaggatgcgggagaactatctaaaagttggggacagtatctggggaggatcaga

SEQ ID NO: 103267 - DNA, 120 bp, Artificial Sequence
  ENSG00000094914_17 (sequence is synthesized)
aggatacaacatggaacttttttccatggtgttcctgggaaggacaaggaagggaaactgacatttattgagcgtttgctatgtaagaaagaggctgagtcaggtgttttctaaaaatgt

SEQ ID NO: 103268 - DNA, 120 bp, Artificial Sequence
  ENSG00000094914_18 (sequence is synthesized)
catatggtttcataatcacagcaaccctatgaaatattattctagttgcacagatacgggagctaagacttgtttcccattctcacaagtgttagctttgtggaaatgggaaacagacct

SEQ ID NO: 103269 - DNA, 120 bp, Artificial Sequence
  ENSG00000094914_19 (sequence is synthesized)
ctggaatctcttatacttagcccagcggtgggttggagatggcacggaattaaagatttgggaagagactgaatcaccgtcacactcctcacttttgtgctatagtggatcaatcttcct

SEQ ID NO: 103270 - DNA, 120 bp, Artificial Sequence
  ENSG00000094914_20 (sequence is synthesized)
gacacctgttggctcagcctcttttagccctatttttcctgtcctctcctctacctacccaaataacccagagtgggtgtccagagtgggtgtccagagtgtggtgttgagagcacttac

SEQ ID NO: 103271 - DNA, 120 bp, Artificial Sequence
  ENSG00000094914_21 (sequence is synthesized)
tgggcagaaggacctggggagtgcctgtccttccttgtctttcacctagaaggtacctggtaagaggcctgtgaatggtttaatcagagctgcttcctcaaccctacagtgtttgagtgg

SEQ ID NO: 103272 - DNA, 120 bp, Artificial Sequence
  ENSG00000094914_22 (sequence is synthesized)
tgggtgtgatgacttcagagggtaggagtggtccagctcccctgttggaatattgaggagatggactccttttgccccagtgtgtcctgtgtctatcttgttcttacagctcaggagcga

SEQ ID NO: 103273 - DNA, 120 bp, Artificial Sequence
  ENSG00000094914_23 (sequence is synthesized)
gtgccaggccagggcgggggcagcgggcggaacagcactgttccttctctccagttcaccttacagggtaagaagcaggcacctaaccgatcattataacctgatggtgaaaatcgaggt

SEQ ID NO: 103274 - DNA, 120 bp, Artificial Sequence
  ENSG00000094914_24 (sequence is synthesized)
ctgggtgagcgcgccgggcctggacttgggcctttctagaacccgcaaatggtgaaaagcgttccacaaacgttaaataagcagtatggaggaggggacagtacttgtgccaggccaggg

SEQ ID NO: 103275 - DNA, 120 bp, Artificial Sequence
  ENSG00000094914_25 (sequence is synthesized)
ccttattcctttttcacaacctggatttgagcccagagtgggccatcaggataggaggttttagcaggaggcaaagaaatagaattttggggatggcttcttgtcatcttctgactccac

SEQ ID NO: 103276 - DNA, 120 bp, Artificial Sequence
  ENSG00000094914_26 (sequence is synthesized)
ggtaggtccaacttttagaacttagaggtcctgagctgtaatttgcttttctctggctcagagtctgggaggcccagatgtggacttgtgagaggtggcctactctatcagggcgctgtc

SEQ ID NO: 103277 - DNA, 120 bp, Artificial Sequence
  ENSG00000094914_27 (sequence is synthesized)
aaaggaagtcctgaacctcaaaactccctttggggagaaggcaaagactcctactccttttctgattgctcaccatattctcattcctcctgttcccccaaaaaagaatacaagaaaaag

SEQ ID NO: 103278 - DNA, 120 bp, Artificial Sequence
  ENSG00000094914_28 (sequence is synthesized)
taggaaaaaaccatgtccttactggaaatgaatgtgagcttctgggctagggtagggataggtgcaggaactcttcatgttaaccccttccttaggtccagctgctgcttgcgtgtcttt

SEQ ID NO: 103279 - DNA, 120 bp, Artificial Sequence
  ENSG00000094914_29 (sequence is synthesized)
gcatggcacccccacaccaacaagtttgcagtggccctgctagatgactcagtccgtgtgtataatgccagcaggtgtgtgtggggacaccaggtgggctctgacttgtcaatatcacct

SEQ ID NO: 103280 - DNA, 120 bp, Artificial Sequence
  ENSG00000094914_30 (sequence is synthesized)
tcccttgccagccttggttccggggagtcctgtagttcttgaacctgattcatggggctccttccagaactggggtcagggaagctccataactggatgcgtgcttcttctagacctaac

SEQ ID NO: 103281 - DNA, 120 bp, Artificial Sequence
  ENSG00000094914_31 (sequence is synthesized)
gccatcttcccagttaatctaatgaggccgtgccctggcctggagttctcctctgcccatgtcctgggactctgccttcagagttcctcccctatccctggatccatttcttacaggaaa

SEQ ID NO: 103282 - DNA, 120 bp, Artificial Sequence
  ENSG00000094914_32 (sequence is synthesized)
taggtctggacttctcaccagccttcctgcacaaacaaacccacatcccactacattcagctcccttcttgcctccggttgcctgctcaccttttcttctagtggcattatccaggggga

SEQ ID NO: 103283 - DNA, 120 bp, Artificial Sequence
  ENSG00000094914_33 (sequence is synthesized)
cactgttcctcctctctgaggcttttccctcagctttccagccagctgcctgtgacatagcctgtattttcctctgggtgatccacaggcctgggaggattaatttgtggatcaatcttc

SEQ ID NO: 103284 - DNA, 120 bp, Artificial Sequence
  ENSG00000094914_34 (sequence is synthesized)
tggatggatcatccttcttctctgtggctttccctccttaactgcactctggtccctggagccttagtgttcctgccttgactcagtttcctgccccttcaccctagcaccatagtcccc

SEQ ID NO: 103285 - DNA, 120 bp, Artificial Sequence
  ENSG00000094914_35 (sequence is synthesized)
ccaggctgctggggcttccaggagttggatggagaagctgagggccttggctgctgtatggctctgccaggtggcccttctttgggcccagactctgatccttttctttcccttctctgc

SEQ ID NO: 103286 - DNA, 120 bp, Artificial Sequence
  ENSG00000094916_0 (sequence is synthesized)
gttttggcgggcggttggcgttgcgcagaaggcggcggcggtggtggcttgtggtgcggcctcaccatacaggaacagggcagacgttagcgtgagtgatcactctcaatcccggggacc

SEQ ID NO: 103287 - DNA, 120 bp, Artificial Sequence
  ENSG00000094916_1 (sequence is synthesized)
tggtggccttagtctttcaggtggaacggtgtgcgacatgggaaagaaaaccaagcggacagctgacagttcttcttcagaggatgaggaggagtatgttgtggagaaggtgctagacag

SEQ ID NO: 103288 - DNA, 120 bp, Artificial Sequence
  ENSG00000094916_2 (sequence is synthesized)
gcgcgtggttaagggacaagtggaatatctactgaagtggaaaggcttttctgaggagcacaatacttgggaacctgagaaaaacttggattgccctgagctaatttctgaatttatgaa

SEQ ID NO: 103289 - DNA, 120 bp, Artificial Sequence
  ENSG00000094916_3 (sequence is synthesized)
aaagtataagaagatgaaggagggtgaaaataataaacccagggagaagtcagaaagtaacaagaggaaatccaatttctcaaacagtgccgatgacatcaaatctaaaaaaaagagaga

SEQ ID NO: 103290 - DNA, 120 bp, Artificial Sequence
  ENSG00000094916_4 (sequence is synthesized)
gcagagcaatgatatcgctcggggctttgagagaggactggaaccagaaaagatcattggggcaacagattcctgtggtgatttaatgttcctaatgaaatggaaagacacagatgaagc

SEQ ID NO: 103291 - DNA, 120 bp, Artificial Sequence
  ENSG00000094916_5 (sequence is synthesized)
tgacctggttcttgcaaaagaagctaatgtgaaatgtccacaaattgtgatagcattttatgaagagagactgacatggcatgcatatcctgaggatgcggaaaacaaagagaaagaaac

SEQ ID NO: 103292 - DNA, 120 bp, Artificial Sequence
  ENSG00000094916_6 (sequence is synthesized)
agcaaagagctaaaggaggggatggtctctgtcatttctctttgtacataatacattcacctccctgcctcctctcctttctacccacccctttctatcctaaacacatccataaaaaat

SEQ ID NO: 103293 - DNA, 120 bp, Artificial Sequence
  ENSG00000094916_7 (sequence is synthesized)
gtgcttatcactgtgctccacaggagaaatgttggtattggttctcttgtaacataactgatggtctgattaatgataagtgtctctctgtgaagaccaggcatttacatactgagtgta

SEQ ID NO: 103294 - DNA, 120 bp, Artificial Sequence
  ENSG00000094916_8 (sequence is synthesized)
atacccacaatttttttttcctttgccctgatctcttccttctgcttccctgtgacctcaagatgagtttcaactttttaatcaccttagagtcttgatcttttcagggttggtcgcttt

SEQ ID NO: 103295 - DNA, 120 bp, Artificial Sequence
  ENSG00000094916_9 (sequence is synthesized)
ttaggttgggggattttgttacaatgatgttgaattttggtttcttgctttggttcttagaacatgttgctgactagctggcctttgttctgacatgttgagatggaaaggatgttgccc

SEQ ID NO: 103296 - DNA, 120 bp, Artificial Sequence
  ENSG00000094916_10 (sequence is synthesized)
atctgttaaaaagccaatagcaactgcctacctgttggggctttcccaaccttgttcagctctacccaggagaatacagggtttctggtgtggtcttctgggccaccctctgttgttcat

SEQ ID NO: 103297 - DNA, 120 bp, Artificial Sequence
  ENSG00000094916_11 (sequence is synthesized)
cctcactcatcctcccagaattactccatcctttggaagatttgaaattttacactgaaatctgtcaagacactctttttagccccaggactttcggtattgcttttagcactccccact

SEQ ID NO: 103298 - DNA, 120 bp, Artificial Sequence
  ENSG00000094916_12 (sequence is synthesized)
tctgcttctgtaaagtgatatcaatttgtgataaaatgacaagattattaactgtgcagatttgtagctatagtacatgaggatgatggggtagggtacaattgtctttattatcatata

SEQ ID NO: 103299 - DNA, 120 bp, Artificial Sequence
  ENSG00000094916_13 (sequence is synthesized)
tggtatgtatgtatgatttctttccattcctcatatttagactgtatatttatgtaggtgtgagtgattgcctggtgcttgcttgtgccaaggtgctaggcaccctccaaccctgccaac

SEQ ID NO: 103300 - DNA, 120 bp, Artificial Sequence
  ENSG00000094916_14 (sequence is synthesized)
ttttgtggcctcccaaagcattcctgttaccaaagaggcttcaaacctgaccctcacttctcagtggacccgagtttcccttccatgccattattttcagtggggaagttttagaggtga

SEQ ID NO: 103301 - DNA, 120 bp, Artificial Sequence
  ENSG00000094916_15 (sequence is synthesized)
gctgttggccacaatatcaattttaagtgttcatagcagttatgtctcctgcattcttggctcctggatttaccaccaagagtccccaaaatattaatgctcttccctttttctaccctc

SEQ ID NO: 103302 - DNA, 120 bp, Artificial Sequence
  ENSG00000094916_16 (sequence is synthesized)
aaatattaatgctcttccctttttctaccctcaaacttatagttgtatcttattttttaaaatgaattttcatggccaggcacagtggctaccgcctgtaatcccagcactttgggaggc

SEQ ID NO: 103303 - DNA, 120 bp, Artificial Sequence
  ENSG00000094916_17 (sequence is synthesized)
accagcctgggcaatgtagtgagaccccctgtctctaaaaaatataaataaaaataaaggcatgttcctgaaagactgtcaccttggaaagtgacaggccctggcattagcatgttgaca

SEQ ID NO: 103304 - DNA, 120 bp, Artificial Sequence
  ENSG00000094916_18 (sequence is synthesized)
gacacacccttttcttcttactcagcaaaatacttcgttttggtttcttcttgtgttgctattgagaaatttgtctgatcatatccttctgcctttgtcccccaagaaatgccctacttt

SEQ ID NO: 103305 - DNA, 120 bp, Artificial Sequence
  ENSG00000094916_19 (sequence is synthesized)
atccttttctttttgtagttgaggagggctagagaatcacaattaaaagtaaggaaatagcagggttttgaggatccttgtcccagccccaaagctgaggaaataagaataaatgcttaa

SEQ ID NO: 103306 - DNA, 120 bp, Artificial Sequence
  ENSG00000094916_20 (sequence is synthesized)
tatagccttaattctagagcgcaccagccatgaggctgcttttcttgttgtttttgatttttaaaacatacagctgtctggccaggagcatctaccatttctagattattcagagtaatg

SEQ ID NO: 103307 - DNA, 120 bp, Artificial Sequence
  ENSG00000094916_21 (sequence is synthesized)
aggggaatggatggattgctccagtccacagatgagccacataatatgcaaatcatatacccattcatagcatttgttaacattgcttccctgctcagctgctgattgaattctgtgtgc

SEQ ID NO: 103308 - DNA, 120 bp, Artificial Sequence
  ENSG00000094916_22 (sequence is synthesized)
ttatataaattatgtcaaaaattatactgcataattgaggtgacagctgttgctgcagtgacatgacagactggaacaatgaagcttttggtttaagtcagccaggaaaatccttctgaa

SEQ ID NO: 103309 - DNA, 120 bp, Artificial Sequence
  ENSG00000094916_23 (sequence is synthesized)
tggtaatgtgattgggcaagagctcataaaccatacctcaagtgggtgggagttttatctctatattccttctctctctgaaggaattaaaggcctagatcaagtgctggataattgaca

SEQ ID NO: 103310 - DNA, 120 bp, Artificial Sequence
  ENSG00000094916_24 (sequence is synthesized)
attgcttgtacttaatctgatcggtatctaaaagaaggaaaggatggtcaggaaacatttatcataaatgtagccaaggatatcaattagggtagacaagaataggacaaaaataggcca

SEQ ID NO: 103311 - DNA, 120 bp, Artificial Sequence
  ENSG00000094916_25 (sequence is synthesized)
gagctcctgaggaggtgatatgggtctcttgatttgcagaaaatgacagcctatccaagtggcccagtgtatgcctcccagtagcagtgggcatgtaaactgcagcgaccttatttttaa

SEQ ID NO: 103312 - DNA, 120 bp, Artificial Sequence
  ENSG00000094916_26 (sequence is synthesized)
aaccaaaaacctagtatgtggacaaagaacatgacaatatttggtactgagattggttctgagaaacctggggcatgtggctgctgtggttataggtaatatttaagacattcataaaaa

SEQ ID NO: 103313 - DNA, 120 bp, Artificial Sequence
  ENSG00000094916_27 (sequence is synthesized)
tctgatattcttttaccgaaataaccccagtatcatctactacttaccatctgttaatagactttactctgtcttttttgtcttcggtttattgtactgagtgccgccaaaacaactttt

SEQ ID NO: 103314 - DNA, 120 bp, Artificial Sequence
  ENSG00000094916_28 (sequence is synthesized)
gttctcttcctgcctacctgcagctggttctataggaatgtagggagccagaggccagtattgatttcagcccttagcacaaaggaaatcagatgcctgcttccagcatttgttagtgtt

SEQ ID NO: 103315 - DNA, 120 bp, Artificial Sequence
  ENSG00000094916_29 (sequence is synthesized)
gagtagatgttcttgccctagaagaattacagcctcaaacagaaacctgtttcatggagctttctcccctcagaagagttaatagttaagagctaagcactcttaaacacctaagtctca

SEQ ID NO: 103316 - DNA, 120 bp, Artificial Sequence
  ENSG00000094916_30 (sequence is synthesized)
aatgctaaaaatttatttttcttgtgtttagtcctctttcaagacatctttctaagcctttcagtaatcaacattaaaagatctccctttcttcagagttatagcacagctttgcccagt

SEQ ID NO: 103317 - DNA, 120 bp, Artificial Sequence
  ENSG00000094916_31 (sequence is synthesized)
agaggctaccaaggacagcttagcagccctttgattgctgggctgggcagatggccttcaagttaagatcaaatgccgggaaaatcagcctacatgggagcacccattttaaacctggag

SEQ ID NO: 103318 - DNA, 120 bp, Artificial Sequence
  ENSG00000094916_32 (sequence is synthesized)
agaaccatgatgttttcttcttcaaataacaatctagttttttttcccccagtactaaaattgtattgtctttcagacaatataatttttatttaaaattggaacatactatcttcatgc

SEQ ID NO: 103319 - DNA, 120 bp, Artificial Sequence
  ENSG00000094916_33 (sequence is synthesized)
tttctaagctaaatcttcatttagatttcactcctcagtagatcccagagaagaagctatataggatccagattcaaatttaacagtgtcttctacttttttagttatgttttctatcaa

SEQ ID NO: 103320 - DNA, 120 bp, Artificial Sequence
  ENSG00000094916_34 (sequence is synthesized)
ctcctgctgccttttcaaatacggatatttttcaggagactcttctacttgtccactgactgtattttttcctttttgatccgtagccctggttaaatggctgacatccttccgtggatg

SEQ ID NO: 103321 - DNA, 120 bp, Artificial Sequence
  ENSG00000094916_35 (sequence is synthesized)
attcttggaggtagtctcagaattccaaagtgattgtctgtcttcttcttgtcttgatcctaatgcagacattcacctctattatttatttattttttttagacagagtctcgctctgtc

SEQ ID NO: 103322 - DNA, 120 bp, Artificial Sequence
  ENSG00000094916_36 (sequence is synthesized)
gagccaccgtgcctggccacctctattaaatttttgtggacaaaaataaaattgtcattatttgtttgctctcatggagcactttcagtaatacaattttttttaaattccagttgccct

SEQ ID NO: 103323 - DNA, 120 bp, Artificial Sequence
  ENSG00000094916_37 (sequence is synthesized)
ctttgttgctctgtcctctgtaatacctgactttgctaaagacttgaggggtggtttcagaggagggtcaggtgatgggaaggcaggatgagaaaagccctggacttgcatgtttgagaa

SEQ ID NO: 103324 - DNA, 120 bp, Artificial Sequence
  ENSG00000094916_38 (sequence is synthesized)
ggcttccaaccacatcttcactcagactcttggaattcctgtccccaaaacaagcttctgttttttgctcacaatgctatatttctaaatttttcctgaattactgagaagcagtcatta

SEQ ID NO: 103325 - DNA, 120 bp, Artificial Sequence
  ENSG00000094916_39 (sequence is synthesized)
gctttgttaagtttggtttggggacattgttggtatcaaaaatcgaagtcttattcatttgatgtaggccatgaatcatcaataactggttgctggaaagcttgactaccatccactggg

SEQ ID NO: 103326 - DNA, 120 bp, Artificial Sequence
  ENSG00000094916_40 (sequence is synthesized)
gtgctattttgagaaggatttttgggtatctttatagtctgcaattagttgatgattgctttctagtttatcaactgcatttatatttgcttttctgttcatggaaaatcctttatttgc

SEQ ID NO: 103327 - DNA, 120 bp, Artificial Sequence
  ENSG00000094916_41 (sequence is synthesized)
tggggttttttgtttgtttgtttgtttttcccacttacagcaagtaaaagtggtctgaggttatccttgtttttcttcgcggtttgccatgtgtgaaagtagatttcctgctattgatat

SEQ ID NO: 103328 - DNA, 120 bp, Artificial Sequence
  ENSG00000094916_42 (sequence is synthesized)
attctcattatagacagaatagtggagaacagtgttgccatggacaaaatccagttttggtccactctggggagcatttggacctgtggtgcttctaacaattaaaagtctagatggtcc

SEQ ID NO: 103329 - DNA, 120 bp, Artificial Sequence
  ENSG00000094916_43 (sequence is synthesized)
ttgactgtcccccagccatactgcatactactttgtgcattctactttgtgtcattaatgaaagattggttctgtccctgtaacttaggcatttattattcttaactcttcattcctgtt

SEQ ID NO: 103330 - DNA, 120 bp, Artificial Sequence
  ENSG00000094916_44 (sequence is synthesized)
ctgtagccacccagcagtccattttccctatgttcaggccaaaccacagggcattggggaaggtttttgggattttcttattgagattttgttgaatctgtagtttaccccagctttcct

SEQ ID NO: 103331 - DNA, 120 bp, Artificial Sequence
  ENSG00000094916_45 (sequence is synthesized)
aaggtacagtgaggggttggagggatctgtgtttggcccggggagcaattgtctctaccttaaggttcagttttgagggcataaaatactactttgcaatgtcatgagaacaccgttaga

SEQ ID NO: 103332 - DNA, 120 bp, Artificial Sequence
  ENSG00000094916_46 (sequence is synthesized)
aatttaaaggaaaaacccactttgcacccatgatcccatcattttggttgagattttagaataaaaaatatagtgttgagatccgtacttttgtaatcagaccaccaagcatgcctgtgg

SEQ ID NO: 103333 - DNA, 120 bp, Artificial Sequence
  ENSG00000094916_47 (sequence is synthesized)
caaggcagagaggaaaggtctggagccagtgtattgcagtttcatgctacctttacctgctaatcataaaaattatgttttcaaaagtagatgatactagccttacacccaaaaacatgt

SEQ ID NO: 103334 - DNA, 120 bp, Artificial Sequence
  ENSG00000094916_48 (sequence is synthesized)
tctgaattagatgccccctcacccaatttttattaagctttctaaattccagccacattgctgtacatcaacattggtttcattcaacagacatttttttggcctgaagatacaaggttc

SEQ ID NO: 103335 - DNA, 120 bp, Artificial Sequence
  ENSG00000094916_49 (sequence is synthesized)
agaaagaggccatccctgccctcaaataactttcatactggtgtatgatgaactgaccattaatagtttaagtgcttacaagctatgtttctgttcaaaaaaaaaatagtttggtataat

SEQ ID NO: 103336 - DNA, 120 bp, Artificial Sequence
  ENSG00000094916_50 (sequence is synthesized)
aaatgctataaaccaatacacatttctgacttgggggcagagacagactggctgatgttgtatagtttgtagccctggagtaagaagttgacattaatttcggcctatatgtggaaaaga

SEQ ID NO: 103337 - DNA, 120 bp, Artificial Sequence
  ENSG00000094916_51 (sequence is synthesized)
cctataacattgggtgaactgagccagctggccatagaacacaagaacatattccaggaaataaatatagctggagggttggaaatgctgttattactgagagagaaaacaggtgagttg

SEQ ID NO: 103338 - DNA, 120 bp, Artificial Sequence
  ENSG00000094916_52 (sequence is synthesized)
ggattgagaactcctgattttcatccctggtttagattcttggccaaagtagtggtagagttaatctttgcttgtggaaagcattaactatgttgcagattcagttgtgttacattattg

SEQ ID NO: 103339 - DNA, 120 bp, Artificial Sequence
  ENSG00000094916_53 (sequence is synthesized)
tgggttctataacaacatattcctcatggacactttaccagagttgctcacacctttttcaatttctcatcccttttggaggaatgaacatgagacttaactgcctttaagcctaaaacg

SEQ ID NO: 103340 - DNA, 120 bp, Artificial Sequence
  ENSG00000094916_54 (sequence is synthesized)
gacatgctttccaatgacaagagattttctaaagagaagtcttggagcacatctgttaatacctgagcatctactctgagcagtgcagttttattcaatactggagagagggtgatttct

SEQ ID NO: 103341 - DNA, 120 bp, Artificial Sequence
  ENSG00000094916_55 (sequence is synthesized)
tgggattacaggcgtgagccaccgccgggccgagagggtgatttctaagcagagaattgtatcagttatgtggaaacctttgccagaaatacatataccttgtatattaaatctgagtct

SEQ ID NO: 103342 - DNA, 120 bp, Artificial Sequence
  ENSG00000094916_56 (sequence is synthesized)
tattaaatctgagtctcagatttaatcatcgaagcgtagctgggttaagaaacagtctgatcgtaaggatgttgtcgattctgacccatggatgaccacaagaaaaagatatttatttct

SEQ ID NO: 103343 - DNA, 120 bp, Artificial Sequence
  ENSG00000094916_57 (sequence is synthesized)
gcctggataattgagagttgactaactttggaagtcagaattcccaggaattagagtaactgctctggaaagttaaagtgtgaagttttttagatagtttcataaaaacaattctggttt

SEQ ID NO: 103344 - DNA, 120 bp, Artificial Sequence
  ENSG00000094916_58 (sequence is synthesized)
ctttttgcttgtgctgactttcttggattttaatctacctcatcttgtctttttagagttacttcaacttgtcactttaacattgtgcttgactttggttgttttctaagatggaatttt

SEQ ID NO: 103345 - DNA, 120 bp, Artificial Sequence
  ENSG00000094916_59 (sequence is synthesized)
tcctgttcattgacagcttgttctcttgccttttcattctgatcctcatttcatctaacatcatctcatattgctcctctgtcaagagaaatgttttaaaatagtttaaagtcttgtttt

SEQ ID NO: 103346 - DNA, 120 bp, Artificial Sequence
  ENSG00000094916_60 (sequence is synthesized)
atgggaagaaagtgatcctccaatgctatttgtttctgaggtcagtaagagaaggagttaaaacaaggcagtggggaagggaatgaatcctgcactggaggcaaaagctgacaaggaaag

SEQ ID NO: 103347 - DNA, 120 bp, Artificial Sequence
  ENSG00000094916_61 (sequence is synthesized)
agccattaattaagacaatttcaaagtcaactgattgtgatcattaatgtcacaatagatcaaaacctaattatcacagcctaggtaagagccatcagtattaatcggaaaatctaatag

SEQ ID NO: 103348 - DNA, 120 bp, Artificial Sequence
  ENSG00000094916_62 (sequence is synthesized)
gaaactattatcaagaaattaggccaaattgaatgcagtgaactttttatcttggcattctctatttttttgtgatgtcccctggcattggcaggtgtgaccctaacagtcgattcaagg

SEQ ID NO: 103349 - DNA, 120 bp, Artificial Sequence
  ENSG00000094916_63 (sequence is synthesized)
ccaagtggtcagtttgtcagccttttttaagggatttctttttatttttaggaattccaaacagagttaacctaaactgtcattgccaaaagatcagtcttaaactttcttagcacctgt

SEQ ID NO: 103350 - DNA, 120 bp, Artificial Sequence
  ENSG00000094916_64 (sequence is synthesized)
ctgtacctgtttaatgtgatcagctatcagtgaggaaaaaaaaaaaaatctatttaggtcttggaatggttcctgtacctagagtatccatattgaaccttttttttttttttttttttt

SEQ ID NO: 103351 - DNA, 76 bp, Artificial Sequence
  ENSG00000094916_65 (sequence is synthesized)
ttttagtagagacagggttcaccatcttggccgactcaaagtgctgggattgcaggcgtgagccagcacccggcca

SEQ ID NO: 103352 - DNA, 88 bp, Artificial Sequence
  ENSG00000094916_66 (sequence is synthesized)
cctgaccttgtgatccgcctgcctcggccactcaaagtgctgggattgcaggcgtgagccagcacccggccacagtatctttattaca

SEQ ID NO: 103353 - DNA, 120 bp, Artificial Sequence
  ENSG00000094916_67 (sequence is synthesized)
ggactacaggcgcacaccacggtgtctggctaattttattatttaaaaaatgttttgtagagacagtctccctgtgttgcccaggctggtctccaactcgtgagctcaagtgatccacgt

SEQ ID NO: 103354 - DNA, 120 bp, Artificial Sequence
  ENSG00000094916_68 (sequence is synthesized)
gtgctgggattacaagcataagccaccgcacccggcccctagtgaacattttactgtatgtgttgataaatcatcttttgagtttctgttgtatgtggggacttcctacactggctgctg

SEQ ID NO: 103355 - DNA, 120 bp, Artificial Sequence
  ENSG00000094916_69 (sequence is synthesized)
cctacactggctgctgtgaagaggtatggaagaaaggagaggctttctgcctagaaattctttgagaacacctgaaaagacagtttaatcatgtcacaacactcttaaggctcaagtcag

SEQ ID NO: 103356 - DNA, 120 bp, Artificial Sequence
  ENSG00000094916_70 (sequence is synthesized)
tgttctggtttccggtagctttaggattggattctaaacgagggctggtggtgagtttggtgtttgtctcgtgtcaccctcacccctcacctcctcagtttaggataagagacataatga

SEQ ID NO: 103357 - DNA, 120 bp, Artificial Sequence
  ENSG00000094916_71 (sequence is synthesized)
tttctaccagaatccaaagtaaatccaaagggggagaaaagacataactgttttttcttctaccttttttttgttaaagagttacatctctcacaggaggaaagaattcaagagtctata

SEQ ID NO: 103358 - DNA, 120 bp, Artificial Sequence
  ENSG00000094916_72 (sequence is synthesized)
tgattagttacagagaatattttcatcccctctccctgaatagaaaagcaggggtcaccatttgtatccttacccttgaggtgtttttgaagatgctgtaactcttgaagttgagctgag

SEQ ID NO: 103359 - DNA, 120 bp, Artificial Sequence
  ENSG00000094916_73 (sequence is synthesized)
gcagaaaggttggaaaaatgcagccctctgggtattgtggggagggatgtgatgtagtaagagggtgttttgtggtgctaggattcccacgccaccaacttgcagctttataagagcgct

SEQ ID NO: 103360 - DNA, 120 bp, Artificial Sequence
  ENSG00000094916_74 (sequence is synthesized)
accaagaaccaccactggggaaaaggttcttattcattgtttctgttggaatgtgatcttgctttctggattttaggaattcaggttactcagtataaaactctgagaaatcagtgtgac

SEQ ID NO: 103361 - DNA, 120 bp, Artificial Sequence
  ENSG00000094916_75 (sequence is synthesized)
ttagtccttcacctcctaagataaagtgaatatttctttacaaaataattcatgtccttaatgttaaagatgtaattttattttcaaaacatctataacatgactttcagaagcagttca

SEQ ID NO: 103362 - DNA, 120 bp, Artificial Sequence
  ENSG00000094916_76 (sequence is synthesized)
tttttccaagattcctcacattatactagataaataataggccctcagttaatacccttcagttattgaattaatctagtttgtggaatgaggtgtatcctgccaacttccctctgctcc

SEQ ID NO: 103363 - DNA, 120 bp, Artificial Sequence
  ENSG00000094916_77 (sequence is synthesized)
caagtacactctgagaggtaaaatgctctgggaaatggaacaagaatcgagtggatgctgactctgtgtgcccacctcctcaactgattgataatggttgaccttgggcaagtcacttct

SEQ ID NO: 103364 - DNA, 120 bp, Artificial Sequence
  ENSG00000094916_78 (sequence is synthesized)
ttcaatgcctcagttccccatctgtcaaatggggttaataatactgacctacctcacaggggtgttgttgtgaggcattgtaaatcaaagttaatagaatacttcagggtcctctgtgga

SEQ ID NO: 103365 - DNA, 120 bp, Artificial Sequence
  ENSG00000094916_79 (sequence is synthesized)
ggatgtcttgagccagagtttaagcctgacacacaggctttggtcctcactgagctgtctccaagactggaactacttagtgactcggcaaattttctgccccccacccctcatcaaagc

SEQ ID NO: 103366 - DNA, 120 bp, Artificial Sequence
  ENSG00000094916_80 (sequence is synthesized)
tgctagttcagatgttgacagtgttttcatgaatgttggaatcttactagtccagacttacttaggatgttgttggggaaggcacttgggattttctgtgtcttgcattcacagagggag

SEQ ID NO: 103367 - DNA, 120 bp, Artificial Sequence
  ENSG00000094916_81 (sequence is synthesized)
gccatttcagattcaagagcattggattagggaatcgtgaggcagggatgctactgcgtatttctctctgcaggttggggattaaagttcctttccccatgggtttgaagcagactcaga

SEQ ID NO: 103368 - DNA, 120 bp, Artificial Sequence
  ENSG00000094916_82 (sequence is synthesized)
ctgtctcaggatcaaagcaaccctcaatggttttgatttatgtcattgcttaccactccccaaccaatcccaggacagctgggtcactgtacccctttgtggtatctgtacctgggcctc

SEQ ID NO: 103369 - DNA, 120 bp, Artificial Sequence
  ENSG00000094916_83 (sequence is synthesized)
tccttcctcatagggaccagctgattgaataaatgtgaccaccttatttccaccccccacccccaaaagctacattggaattatttttcctagaaatgtgtataacactcagaattgggc

SEQ ID NO: 103370 - DNA, 120 bp, Artificial Sequence
  ENSG00000094916_84 (sequence is synthesized)
attgatccttaaagcttcatcccattcaccgtattcaacatctgtcatctcttagtgtctgcagtctgaacctaaccttgaccttttttccctctggtttgagaaaactttggacactat

SEQ ID NO: 103371 - DNA, 120 bp, Artificial Sequence
  ENSG00000094916_85 (sequence is synthesized)
ttctacttggccaggtgtgggctcaagagccttactctttccatctcagtttaggggcgcagccagctcctcttcccaatagggctctttctgctttccctctccttggccctagatttg

SEQ ID NO: 103372 - DNA, 120 bp, Artificial Sequence
  ENSG00000094916_86 (sequence is synthesized)
taatccatgaaaaagcacaaggtcctggctccttgcggtcacattctggttctctgtgttttgtggactctgctctcactgttcacccagcactagcagtaccagatggttctgtggagt

SEQ ID NO: 103373 - DNA, 120 bp, Artificial Sequence
  ENSG00000094916_87 (sequence is synthesized)
cctggggaatggagagagcacagtctgactccctgccaagtagccaggagttgacttgcccatggtccgctggctttcccaccacttcctacaggatgggatctaagagactcaagagct

SEQ ID NO: 103374 - DNA, 120 bp, Artificial Sequence
  ENSG00000094916_88 (sequence is synthesized)
gggtttctttcagcactctgtactgtcccaaatagcaaacaaatcactttgtagccagatttctgaatggaaatgagaaattgaattctccatggacttttaggtttatgggggagtttt

SEQ ID NO: 103375 - DNA, 120 bp, Artificial Sequence
  ENSG00000094916_89 (sequence is synthesized)
agctgtgtttcttggttttatttcagccaaacatgtctgcttttgattttttttttaaagtataagtggtctatatatatgttcaccttttaaatgtaaatgtttaaaaagtaagcattt

SEQ ID NO: 103376 - DNA, 120 bp, Artificial Sequence
  ENSG00000094916_90 (sequence is synthesized)
atgtgtttccataactgacatctgatgcagacctcattctctccccctcttctaccctcctcttttcccccttttcatactcttgtattggttctaataaatggttgcttttcaaatatg

SEQ ID NO: 103377 - DNA, 120 bp, Artificial Sequence
  ENSG00000094916_91 (sequence is synthesized)
gttagcccagagggaaagaaagaactggggcgatccggtaggtaaaggagggaacccccattcattttctacctttggggctcctcttctgcatgaaggtataaagggagattttccttg

SEQ ID NO: 103378 - DNA, 120 bp, Artificial Sequence
  ENSG00000094916_92 (sequence is synthesized)
tctctccctcaaaatgaagaacacatgtaaatccttgtttttcctggtgaggcaggggaggccatagccacaatgcttaactgcatgcatctaacatggggctggttttaaccccagcgc

SEQ ID NO: 103379 - DNA, 120 bp, Artificial Sequence
  ENSG00000094916_93 (sequence is synthesized)
atataccacattttgtttttccatgtcaccatccattgatgaacatttgaatttgttttctgtttttggctattaaaatgctgctgtaaacaattgtaaataagtctttgtgtgggcttt

SEQ ID NO: 103380 - DNA, 120 bp, Artificial Sequence
  ENSG00000094916_94 (sequence is synthesized)
tttttttttttcatttttcctgggtagaaatctaggatcaaatttgttatcttctttaaagcatagggtttctctgtcctttttgtccgaatgtcctctttgaaataaggcattggattt

SEQ ID NO: 103381 - DNA, 120 bp, Artificial Sequence
  ENSG00000094916_95 (sequence is synthesized)
gggaaggatccgttttggcgggcggttggcgttgcgcagaaggcggcggcggtggtggcttgtggtgcggcctcaccatacaggaacagggcagacgttagcgtgagtgatcactctcaa

SEQ ID NO: 103382 - DNA, 120 bp, Artificial Sequence
  ENSG00000094916_96 (sequence is synthesized)
tcccggagaatgattttaactgatcattgtactaataggaaggagtccaggtcatcctgagaagagttcgcttgtccagagtccaagatgcagatttgttggatttctgtaagccactcg

SEQ ID NO: 103383 - DNA, 120 bp, Artificial Sequence
  ENSG00000094916_97 (sequence is synthesized)
aagccacatattcatttctgatgacagctttacacttgtgctggaagaacacccactgtgacaactgctgcctatgtttagtctgtccaggagctctaccaactagcatgtttgcagaaa

SEQ ID NO: 103384 - DNA, 120 bp, Artificial Sequence
  ENSG00000094916_98 (sequence is synthesized)
aacctacactgttcttgttagcagctatgtaaatattagatctttctgagtttctcttctcagatctgccaatttctttggggcaaattgtatcctgcagtagcctcaatttaccctttg

SEQ ID NO: 103385 - DNA, 120 bp, Artificial Sequence
  ENSG00000094916_99 (sequence is synthesized)
aaatgagggattaaaggttttagacattctttgggttatctgaaacacaattctttttggatcagtaatgttttatatatgtccactttatgatgtttaaaattttattccccctatgta

SEQ ID NO: 103386 - DNA, 120 bp, Artificial Sequence
  ENSG00000094916_100 (sequence is synthesized)
ttagtttcctgtggctgctataacaaattaccacagacttggtggtttaaaacaagaggaatttattcttctcaaaattttggagcccagaagtctgcaatcaagatattgaggcccctc

SEQ ID NO: 103387 - DNA, 120 bp, Artificial Sequence
  ENSG00000094916_101 (sequence is synthesized)
tggaggctctaggagagagactgttctttgcctcttttagcttctgattatggtcagcattccttggcatatctctctgttctgttttcacattgtcttctcttttgagtacttgcatca

SEQ ID NO: 103388 - DNA, 120 bp, Artificial Sequence
  ENSG00000094916_102 (sequence is synthesized)
gaactctccctctacctgtgtattataaggatacatatgattgcaattaagaaaccacttggatgaaccaggataaatttctccaatcctatcttttaattcaacctgagagagcagatt

SEQ ID NO: 103389 - DNA, 120 bp, Artificial Sequence
  ENSG00000094916_103 (sequence is synthesized)
ctatcttttaattcaacctgagagagcagatttaaaatatattttattcctaaagtggcaggtccctgaaaaaaaaatgtagattcatgtttattttgagacagagtctcgctttgtcac

SEQ ID NO: 103390 - DNA, 63 bp, Artificial Sequence
  ENSG00000094916_104 (sequence is synthesized)
atgtatttttgatagagacaggatttcaccagtttgccaggctggtctagaacccttgacatc

SEQ ID NO: 103391 - DNA, 120 bp, Artificial Sequence
  ENSG00000094916_105 (sequence is synthesized)
gattcatcttttaatcacatcttttgctatataaaataacatttacaggttcaagggattaagataagaatctctttgggggagggccatcattcagaccactacacattggttccctaa

SEQ ID NO: 103392 - DNA, 120 bp, Artificial Sequence
  ENSG00000094916_106 (sequence is synthesized)
cctctacccaaatagatttgagctaattcagaaaagaaaatgttatttttaaagaaacagaggcaagtgaaaaaaggctcagaaacctgggttcttgtcctgcctctgccattatctaat

SEQ ID NO: 103393 - DNA, 120 bp, Artificial Sequence
  ENSG00000094916_107 (sequence is synthesized)
ggtgtaaccatgggtgagccatttgccctctttagtccttagtttctttatcttatagggaaggagttggataagtgatcgttaacaagccttctagacctaagactttatgaagtgatt

SEQ ID NO: 103394 - DNA, 120 bp, Artificial Sequence
  ENSG00000094916_108 (sequence is synthesized)
cctaagtcatcttggagtttgttttttaagtcaataatttaaaatgtgaatcaaaacattacaaattacaacattttgggtgagggtagtcctgttcttgcctaggacttgaaggatgga

SEQ ID NO: 103395 - DNA, 120 bp, Artificial Sequence
  ENSG00000094916_109 (sequence is synthesized)
agactgagctgttggctgactgtcaactccttggggtattaacacaggataactaacctgtatttgttagctgtgtgcttaaacctttctgaagaaaagattttctacaagggatgtaat

SEQ ID NO: 103396 - DNA, 120 bp, Artificial Sequence
  ENSG00000094916_110 (sequence is synthesized)
agactagctggaacattttcactacatttttagtgagactatagactgtgtagcctgaattttctttccagtagtagtagttcatcaaaattaaacactgacagatttttttctacctga

SEQ ID NO: 103397 - DNA, 120 bp, Artificial Sequence
  ENSG00000094916_111 (sequence is synthesized)
aactaggtcatagagtaaaaattttcacttgcagtcttactcttcagactcactgaatgcctgttccatcctgtttcattgctaggaaggacactagataaagccatgagcttgagatgg

SEQ ID NO: 103398 - DNA, 120 bp, Artificial Sequence
  ENSG00000094916_112 (sequence is synthesized)
tgtacttgaaaggaccgtttcaagatcaggttttataacacactcattatttatttcttctgtggagaggagaaaccaaattggattcaagtatttttctgatagtaatctatgtttctt

SEQ ID NO: 103399 - DNA, 120 bp, Artificial Sequence
  ENSG00000094916_113 (sequence is synthesized)
agaataaagcaagttcatatctgagccagagggcataattatgtcagaataaaatataattatgtcggaataaaatgccctgtactaaagaggtcaactaacaggctgggaaatcttaag

SEQ ID NO: 103400 - DNA, 120 bp, Artificial Sequence
  ENSG00000094916_114 (sequence is synthesized)
ttttgtttttaagacaaatccttgaactctctgtgcctcgtttctcatccctaaatctgtgcaactcacctcacagggagttgtggagggtaatatactgctaatttgttcagtgtttca

SEQ ID NO: 103401 - DNA, 120 bp, Artificial Sequence
  ENSG00000094916_115 (sequence is synthesized)
caacaataaattatgcctaagatctgataaaacatagcaaacctcatttatgtaagtagagacaagcatggataagacttacagataataaagaaaattcattaaaatttttttaacttc

SEQ ID NO: 103402 - DNA, 120 bp, Artificial Sequence
  ENSG00000094916_116 (sequence is synthesized)
agttgcatcttgggaattactgaataatctagtgactaattttgaattttaggactgaaaaattttttctcctttctgcctccctcccatccccaaattagctttctaaaaaggaagatt

SEQ ID NO: 103403 - DNA, 120 bp, Artificial Sequence
  ENSG00000094916_117 (sequence is synthesized)
agtgtgtttgagatgtcagccttgcttttgtgagctgatggatgctctgaagggacaagctcaatttgtttaagggaaatgtaccaagtcactgaaaatgtggtgaaaggtgcctaagca

SEQ ID NO: 103404 - DNA, 120 bp, Artificial Sequence
  ENSG00000094963_0 (sequence is synthesized)
acacaaccaagggagaaaactattctgtcaaagagacggtgccaaaaggcaaaaacaaaggagctgatggcaaagaaggtagctgtgattggagctggggtcagtggcctaatttctctg

SEQ ID NO: 103405 - DNA, 120 bp, Artificial Sequence
  ENSG00000094963_1 (sequence is synthesized)
aagtgctgtgtggatgagggacttgagcccacttgctttgagagaactgaagatattggaggagtgtggaggttcaaagagaatgtggaagatggccgagcaagtatctatcaatctgtc

SEQ ID NO: 103406 - DNA, 120 bp, Artificial Sequence
  ENSG00000094963_2 (sequence is synthesized)
gttaccaacaccagcaaagaaatgtcctgtttcagtgactttccaatgcctgaagattttccaaacttcctgcataattctaaacttctggaatatttcaggatttttgctaaaaaattt

SEQ ID NO: 103407 - DNA, 120 bp, Artificial Sequence
  ENSG00000094963_3 (sequence is synthesized)
gatctgctaaaatatattcagttccagacaactgtccttagtgtgagaaaatgtccagatttctcatcctctggccaatggaaggttgtcactcagagcaacggcaaggagcagagtgct

SEQ ID NO: 103408 - DNA, 120 bp, Artificial Sequence
  ENSG00000094963_4 (sequence is synthesized)
gtctttgacgcagttatggtttgcagtggccaccacattctacctcatatcccactgaagtcatttccaggtatggagaggttcaaaggccaatatttccatagccgccaatacaagcat

SEQ ID NO: 103409 - DNA, 120 bp, Artificial Sequence
  ENSG00000094963_5 (sequence is synthesized)
ccagatggatttgagggaaaacgcatcctggtgattggaatgggaaactcaggctcagatattgctgttgagctgagtaagaatgctgctcaggtttttatcagcaccaggcatggcacc

SEQ ID NO: 103410 - DNA, 120 bp, Artificial Sequence
  ENSG00000094963_6 (sequence is synthesized)
tgggtcatgagccgtatctctgaagatggctatccttgggactcagtgttccacacccggtttcgttctatgctccgcaatgtactgccacgaacagctgtaaaatggatgatagaacaa

SEQ ID NO: 103411 - DNA, 120 bp, Artificial Sequence
  ENSG00000094963_7 (sequence is synthesized)
cagatgaatcggtggttcaaccatgaaaattatggccttgagcctcaaaacaaatacattatgaaggaacctgtactaaatgatgatgtcccaagtcgtctactctgtggagccatcaag

SEQ ID NO: 103412 - DNA, 120 bp, Artificial Sequence
  ENSG00000094963_8 (sequence is synthesized)
gtgaaatctacagtgaaagagctcacagaaacttctgccatctttgaggatggaacagtggaggagaacattgatgtcatcatttttgcaacaggatatagtttctcttttcccttcctt

SEQ ID NO: 103413 - DNA, 120 bp, Artificial Sequence
  ENSG00000094963_9 (sequence is synthesized)
gaagattcactcgttaaagtagagaataatatggtctcactgtataaatacatattccccgctcacctggacaagtcaaccctcgcgtgcattggtctcatccagcccctaggttccatt

SEQ ID NO: 103414 - DNA, 120 bp, Artificial Sequence
  ENSG00000094963_10 (sequence is synthesized)
ttcccaactgctgaacttcaagctcgttgggtgacaagagttttcaaaggcttgtgtagcctgccctcagagagaactatgatgatggacattatcaaaaggaatgaaaaaagaattgac

SEQ ID NO: 103415 - DNA, 120 bp, Artificial Sequence
  ENSG00000094963_11 (sequence is synthesized)
ctgtttggagaaagccagagccagacgttgcagaccaattatgttgactacttggacgagctcgccttagagataggtgcgaagccagatttctgctctctcttgttcaaagatcctaaa

SEQ ID NO: 103416 - DNA, 120 bp, Artificial Sequence
  ENSG00000094963_12 (sequence is synthesized)
ctggctgtgagactctatttcggaccctgcaactcctatcagtatcgcctggttgggcctgggcaatgggaaggagccagaaatgccatcttcacccagaaacaaagaatactgaagcca

SEQ ID NO: 103417 - DNA, 120 bp, Artificial Sequence
  ENSG00000094963_13 (sequence is synthesized)
ctcaagactcgggccctgaaggattcatctaatttctcagtttcttttctgttgaaaatcctgggccttcttgctgttgttgtggcctttttttgccaacttcaatggtcctagtcagca

SEQ ID NO: 103418 - DNA, 120 bp, Artificial Sequence
  ENSG00000094963_14 (sequence is synthesized)
taatgctttgggctttattatcttgtcagtcactacctcctaaagaaaaaaaaaaaggctagaagaaaaaacattacattcatgttctaattatagattttagagttaggtagtacaggt

SEQ ID NO: 103419 - DNA, 120 bp, Artificial Sequence
  ENSG00000094963_15 (sequence is synthesized)
aagggggaaattgtaaagaattagcagaattaggcatatgtacaaaaccaaaattttgtcatgaaattttgcctttccacgcttccctcagttcaccaaagttaccaaaatgtaaaataa

SEQ ID NO: 103420 - DNA, 120 bp, Artificial Sequence
  ENSG00000094963_16 (sequence is synthesized)
aataagactggctcaggtaagtagtgctgccaaccctgatataggggagttgtatggaaaaatagtagaattacacagcatgaaaagcagcccatggtttaaattattggacaatttaaa

SEQ ID NO: 103421 - DNA, 120 bp, Artificial Sequence
  ENSG00000094963_17 (sequence is synthesized)
ttgtgggtaaatatttaaaactcctgaacaatgtttctgatggtcttctatccaccctacttggtaacaaagttctcagatgttaggtcatgtttcatttgctcagtcggggatcactca

SEQ ID NO: 103422 - DNA, 120 bp, Artificial Sequence
  ENSG00000094963_18 (sequence is synthesized)
aaactactagacaaaaaagtgagaggatagatttagaaaacatcagtgatgctcagataaacttttaggacctcatattaagagctaagcaaatggccacatttcctatattttgacaga

SEQ ID NO: 103423 - DNA, 120 bp, Artificial Sequence
  ENSG00000094963_19 (sequence is synthesized)
gatactgctggaaaaattaaaattaaaatgccataatagctacctaacaaatatatatgtttaatgtttatcataggccagacattgtgctatgtgcatatcatatgtattatttcattt

SEQ ID NO: 103424 - DNA, 120 bp, Artificial Sequence
  ENSG00000094963_20 (sequence is synthesized)
aattctcacaacaattctgtgaaatggttacagctattatagtcatttcacagatgatgaaactaagattcagagcagctgatcttgtgaggcagctggaattggaactcagatttgttg

SEQ ID NO: 103425 - DNA, 120 bp, Artificial Sequence
  ENSG00000094963_21 (sequence is synthesized)
cttcattatttataaagaatttactaacagtttatcttatttatacccatacatctgctactttgggaggccctttacatagaaaacagcattctttttgccaaatatgaccaaattact

SEQ ID NO: 103426 - DNA, 120 bp, Artificial Sequence
  ENSG00000094963_22 (sequence is synthesized)
tttatttataatttttgatttatatttcagctagatctaaaaagcatctgaaggaatttacaatgaaagatacctatgcaataacatttaggataatctttgacattttggaaaaataag

SEQ ID NO: 103427 - DNA, 120 bp, Artificial Sequence
  ENSG00000094963_23 (sequence is synthesized)
aattgaggaaaaaaagtgtatctttcaagtagatgcaaagcattataatgactgacacttgtatctaactccagtcttacagataactaaggcaaaaagctaaataaacaatatgtaacc

SEQ ID NO: 103428 - DNA, 120 bp, Artificial Sequence
  ENSG00000094963_24 (sequence is synthesized)
tctaacatttggtaaaaggaagtatactggtctgttagcagagacaaactttttttagaattgaagtctgaaacaaacaaaagcaattcaatgtcaatagacattaagcaacataataga

SEQ ID NO: 103429 - DNA, 120 bp, Artificial Sequence
  ENSG00000094963_25 (sequence is synthesized)
caaacatctcctaagggaacatttgttacagctgctccttccctgaactgtgctttggaagataagctctgtcctgagtccaaaccaagcccttccaagagagaacaaaggtcagagatg

SEQ ID NO: 103430 - DNA, 120 bp, Artificial Sequence
  ENSG00000094963_26 (sequence is synthesized)
ttgaagattccagcaaatttctcctcttatttctaccaagcctttgtgaacattgctcttcattttggcctgtacttctccctcagggacgtagaacaatggaatgtcagtcagtctctg

SEQ ID NO: 103431 - DNA, 120 bp, Artificial Sequence
  ENSG00000094963_27 (sequence is synthesized)
tagttaaaactttttctttaaaattcaattaaggtacttctccctcagggacgtagaacaatggaatgtcagtcagtctctgtagttaaaactttttctttaaaattcaattaaggtact

SEQ ID NO: 103432 - DNA, 120 bp, Artificial Sequence
  ENSG00000094963_28 (sequence is synthesized)
tctccctcagggacgtagaacaatggaatgtcagtcagtctctgtagttaaaactttttctttaaaattcaattaagttacaccagaatttacaggcaagattttttttttcattgctcc

SEQ ID NO: 103433 - DNA, 120 bp, Artificial Sequence
  ENSG00000094963_29 (sequence is synthesized)
attgctcccataagcaaatttgttttaaaataattgtaaatgaggtatatacttagttcttggttaaaaaatatattgctttgttaagtattaaagattatttgtaagtcattgtattaa

SEQ ID NO: 103434 - DNA, 120 bp, Artificial Sequence
  ENSG00000094963_30 (sequence is synthesized)
ataaaatttatcaagcctttatagcaagggtcagtgaattaccactgcctgtgggccaaatctagctcactatctgtttttgtaaataaaattttataatagtacacagccacactcatt

SEQ ID NO: 103435 - DNA, 120 bp, Artificial Sequence
  ENSG00000094963_31 (sequence is synthesized)
catttattttctgtggttgctttcaagctacaattgtagagttgggtagtcgcaacagaatctctgtggcccacaaggctaaaatatttacattctcacccattacagaaaaagtttgat

SEQ ID NO: 103436 - DNA, 120 bp, Artificial Sequence
  ENSG00000094963_32 (sequence is synthesized)
aattcctgctttataatatgtaaggcattgtcccattttgcataacttgccttatttcatcattatcactacccatttagtagctatggttgttatcttacttctacagtggaagagatt

SEQ ID NO: 103437 - DNA, 120 bp, Artificial Sequence
  ENSG00000094963_33 (sequence is synthesized)
gaaaagcatttgtcaggttaatgctaaatcagtgcggaaatatagctccactaggaaaatattattaaatttatatccctaaaatttttagaaatctctcaaaatctttccaaatgttct

SEQ ID NO: 103438 - DNA, 120 bp, Artificial Sequence
  ENSG00000094963_34 (sequence is synthesized)
ggtatctttgaaaaatgtaaatagtttatttatagagaaccctacctctgaggttgactcaaaggttaaagaaggctcatcagtctatccttctgcctccatatatcctgaacatcaaac

SEQ ID NO: 103439 - DNA, 120 bp, Artificial Sequence
  ENSG00000094963_35 (sequence is synthesized)
tatcccaggaaaaccatctagagtagtttgtttcaaaatattagccacagaccacctacatcacaataactcagggagcttatagaagtgaagattcctgaatataaacatagtaataat

SEQ ID NO: 103440 - DNA, 120 bp, Artificial Sequence
  ENSG00000094963_36 (sequence is synthesized)
tcaacctactgaatggaaatctctgctgaaatccacagttttcataagctccccagatgattcctgtgtacattaaatctagaaaccattagtttgagatctctcaaaaataaaaataaa

SEQ ID NO: 103441 - DNA, 120 bp, Artificial Sequence
  ENSG00000094963_37 (sequence is synthesized)
aattgctttcagagagtagcccatgaaatttcccattcttcaaggacaaattccttctgttcagccttggtcctccaactgcagtttacaatttttgttcttctcctgtaaagaatgtca

SEQ ID NO: 103442 - DNA, 120 bp, Artificial Sequence
  ENSG00000094963_38 (sequence is synthesized)
atggttatcaccttcaatagtttcaatatgtcccccaaagttatgtgtttgaaacttgcaatagtattgggagatggggcctaatgaggtgattaggtgaagtctctgccctcatgaaaa

SEQ ID NO: 103443 - DNA, 120 bp, Artificial Sequence
  ENSG00000094963_39 (sequence is synthesized)
gattaatcccattatctcaggagtgtgttggttataaaagcaagtttggctccctcttttcctcacacactctttttcccttctgccttcacctttgccgtgggtggacacagcaagaag

SEQ ID NO: 103444 - DNA, 120 bp, Artificial Sequence
  ENSG00000094963_40 (sequence is synthesized)
gccctcatcagatgctggccccttggtcttgaatttcctagcctctacaactaagccaaataaatttctgtttattataaataacccagtctcagatattctgttacagaaacacaaaat

SEQ ID NO: 103445 - DNA, 120 bp, Artificial Sequence
  ENSG00000094963_41 (sequence is synthesized)
ggactaagacaccacccttttccaaaatctctccttgtgatggctccctttactaacctttcttttagctattccctttatgatagtttcttaattttttctatcaaaagctaaatatgg

SEQ ID NO: 103446 - DNA, 120 bp, Artificial Sequence
  ENSG00000094963_42 (sequence is synthesized)
cacacttgttctttacagaaaaataaagatattttaaacaaaatactagggccatggtatgtaataaaatttgaaacaataatttcaaataataaagattgaaaatgcttaacccagaaa

SEQ ID NO: 103447 - DNA, 120 bp, Artificial Sequence
  ENSG00000094963_43 (sequence is synthesized)
ggacagtgtcacatagagtgctatgggggtggcaccccctgaagttcaacagcacggaagccctgactggtatgacatggttcaatgtccagagtttaattttaagaatcaacaactaga

SEQ ID NO: 103448 - DNA, 120 bp, Artificial Sequence
  ENSG00000094963_44 (sequence is synthesized)
tctctcccccagtcaatactaacccaacccaggtagctgacccaggcatgtaaaagatctcttcttttggattcagcaattgtcttacagcccatacttctgtcattctttaatacgcta

SEQ ID NO: 103449 - DNA, 120 bp, Artificial Sequence
  ENSG00000094963_45 (sequence is synthesized)
atattagagaacattttacaaaaatagaagtaacagggattcttctcaagatatcacttctgtttcaattattaaaccaaatgcttctttagagaccatgctcttatcattactattttt

SEQ ID NO: 103450 - DNA, 120 bp, Artificial Sequence
  ENSG00000094963_46 (sequence is synthesized)
ctctgacaaatgaagcatgtttgtttactgagctttatcaatgacattctagtataactgctgtgaaactctttgttaaatatgttttattaaatttattctattaatcaaaccaaaata

SEQ ID NO: 103451 - DNA, 120 bp, Artificial Sequence
  ENSG00000094963_47 (sequence is synthesized)
aagaaactcagcttttctcaaaggcaagaagagagcaggatttttgactggctctttattcaatagtgctgcttattaaattaccactgctacaatgtttaaagccaattacctgagcac

SEQ ID NO: 103452 - DNA, 120 bp, Artificial Sequence
  ENSG00000094963_48 (sequence is synthesized)
atcataaggattctcttaccggttgtcccagttaagtaatgttgattgatcaactccttgacaggagctgatggcaaagaaggtagctgtgattggagctggggtcagtggcctaatttc

SEQ ID NO: 103453 - DNA, 120 bp, Artificial Sequence
  ENSG00000094975_0 (sequence is synthesized)
atggggcggcagtggcggctgcaggaggcgggcgtggacgagccggtggctgcagcggcggcggtccccggagtcctgtgaagcgcccctgtccgcgcctctgtggggccctcagagagg

SEQ ID NO: 103454 - DNA, 120 bp, Artificial Sequence
  ENSG00000094975_1 (sequence is synthesized)
gctgccaggacgcgagccactgaggagccgctcagccagcgccatagcccttaggactatcggtcacattctcgcgctcctgctccggctcctccatcttggcctcggcagtggcggctg

SEQ ID NO: 103455 - DNA, 120 bp, Artificial Sequence
  ENSG00000094975_2 (sequence is synthesized)
ccgggaggatgtgccgccttctggcagggggaagaaggaggagaagatgaagaagcaccggcgggccttggccctggtctcctgcctctttctgtgctctctggtctggcttcccagctg

SEQ ID NO: 103456 - DNA, 120 bp, Artificial Sequence
  ENSG00000094975_3 (sequence is synthesized)
gcgtgtatgttgtaaagagagttcttcagcttcagcgtcatcatattactctcaagatgacaactgcgcactagaaaatgaagatgtacaattccagaaaaaggatgaaagagagggacc

SEQ ID NO: 103457 - DNA, 120 bp, Artificial Sequence
  ENSG00000094975_4 (sequence is synthesized)
tatcaatgccgaatcattgggaaaatcaggttcaaatttacctatttctccaaaagaacataaattaaaagatgattctattgtggatgtacaaaatacagagtcaaaaaagttaagtcc

SEQ ID NO: 103458 - DNA, 120 bp, Artificial Sequence
  ENSG00000094975_5 (sequence is synthesized)
accggtggtggagacactccctacagttgatttgcatgaagagtcttccaatgcagttgtggacagtgaaactgttgaaaatatttccagctcatctacctcagaaatcactccaatctc

SEQ ID NO: 103459 - DNA, 120 bp, Artificial Sequence
  ENSG00000094975_6 (sequence is synthesized)
aaagcttgatgaaatagaaaaatctggtactattccgatagccaaaccaagtgaaactgagcagtctgaaactgattgtgatgttggtgaggcccttgatgctagtgctccaattgaaca

SEQ ID NO: 103460 - DNA, 120 bp, Artificial Sequence
  ENSG00000094975_7 (sequence is synthesized)
accttcctttgtcagtccacctgacagccttgttggccagcatatagaaaatgtatcatcttcacatggtaaaggaaagataacaaaatcagaatttgaatcaaaagtttcagcaagtga

SEQ ID NO: 103461 - DNA, 120 bp, Artificial Sequence
  ENSG00000094975_8 (sequence is synthesized)
acagggcggtggtgatccaaaatctgcattgaatgcttcagataatttaaaaaatgagagctctgattatacaaaaccaggagacattgaccctacatcagtagcaagtcccaaagatcc

SEQ ID NO: 103462 - DNA, 120 bp, Artificial Sequence
  ENSG00000094975_9 (sequence is synthesized)
agaagatataccaacatttgatgaatggaagaagaaagttatggaagtagaaaaagaaaaaagtcagtcgatgcatgcatcttctaatggaggttcacatgccaccaaaaaggtccagaa

SEQ ID NO: 103463 - DNA, 120 bp, Artificial Sequence
  ENSG00000094975_10 (sequence is synthesized)
aaatcgaaataattatgcctcagtagaatgtggtgccaaaattctagcagctaatccagaagccaagagcacatctgctattcttatagaaaatatggatctttacatgttgaatccttg

SEQ ID NO: 103464 - DNA, 120 bp, Artificial Sequence
  ENSG00000094975_11 (sequence is synthesized)
cagcactaaaatttggtttgttattgaactttgtgaaccaattcaagtaaaacagcttgatattgcaaattatgaattattttcttctactcctaaagattttctggtttctatcagtga

SEQ ID NO: 103465 - DNA, 120 bp, Artificial Sequence
  ENSG00000094975_12 (sequence is synthesized)
cagatatccaacaaataagtggattaagctgggtacttttcatggtagagatgagcggaatgtacagagtttccctttagatgaacagatgtatgcaaaatatgtcaagatgttcatcaa

SEQ ID NO: 103466 - DNA, 120 bp, Artificial Sequence
  ENSG00000094975_13 (sequence is synthesized)
gtacataaaggttgagttgctatcacattttggatcagagcacttttgtccattaagccttataagggtatttggcactagcatggtggaagaatatgaagaaattgctgattcccagta

SEQ ID NO: 103467 - DNA, 120 bp, Artificial Sequence
  ENSG00000094975_14 (sequence is synthesized)
tcactcagaacgccaggaactatttgatgaggactatgattatccactggattataatactggagaggataaatcctcaaaaaatcttcttggttctgctacaaatgccattctaaatat

SEQ ID NO: 103468 - DNA, 120 bp, Artificial Sequence
  ENSG00000094975_15 (sequence is synthesized)
ggtgaatattgctgctaatattctgggagcaaaaactgaagacctgacagaaggaaataaaagtatatctgagaatgccactgccacagctgcacctaaaatgcctgaatcaactcctgt

SEQ ID NO: 103469 - DNA, 120 bp, Artificial Sequence
  ENSG00000094975_16 (sequence is synthesized)
ttcaactcctgttccatctcctgagtatgtaaccactgaagtacacacacatgacatggagccgtcaacaccagatactccaaaagagagtcccattgtacagttagttcaagaggagga

SEQ ID NO: 103470 - DNA, 120 bp, Artificial Sequence
  ENSG00000094975_17 (sequence is synthesized)
agaggaggcaagtccatctacagtgacccttctgggcagcggtgaacaggaagatgaatcatcaccctggtttgagtcagagacacaaatattttgcagtgaactgaccacaatttgttg

SEQ ID NO: 103471 - DNA, 120 bp, Artificial Sequence
  ENSG00000094975_18 (sequence is synthesized)
tatttctagtttttcagaatacatatataaatggtgttcagttagagttgctctttatcggcagcgcagccgaactgctttgagtaaaggaaaagattatcttgtgttagctcaaccacc

SEQ ID NO: 103472 - DNA, 120 bp, Artificial Sequence
  ENSG00000094975_19 (sequence is synthesized)
cttactacttcctgcggaatcagtagatgtttcagtattgcaacctctgagtggagaattggaaaatacgaatatagaaagggaagctgaaactgttgttctgggtgatttaagtagtag

SEQ ID NO: 103473 - DNA, 120 bp, Artificial Sequence
  ENSG00000094975_20 (sequence is synthesized)
tatgcaccaggatgacttggtgaatcacactgtagatgcagttgaacttgaaccaagccattctcaaactctttctcagtctcttcttttagatattaccccagaaatcaatcccttgcc

SEQ ID NO: 103474 - DNA, 120 bp, Artificial Sequence
  ENSG00000094975_21 (sequence is synthesized)
taaaatagaagtatctgagtctgttgaatatgaggcaggacatataccatcaccagtgattccccaagagagttctgttgagatcgataatgaaacagaacaaaagtctgagagctttag

SEQ ID NO: 103475 - DNA, 120 bp, Artificial Sequence
  ENSG00000094975_22 (sequence is synthesized)
ttctatagagaaaccatctattacctatgaaacaaataaagttaatgagttaatggataatattataaaagaagatgtgaactccatgcaaattttcacaaagctgtctgaaacaatagt

SEQ ID NO: 103476 - DNA, 120 bp, Artificial Sequence
  ENSG00000094975_23 (sequence is synthesized)
ttcattacctgaagtaaaagaagaagaacagtctccagaagatgcccttttgagagggttacagaggacagctacagatttttatgctgaattgcaaaattctacagatctaggatatgc

SEQ ID NO: 103477 - DNA, 120 bp, Artificial Sequence
  ENSG00000094975_24 (sequence is synthesized)
taatggaaatcttgtacatggatcaaaccaaaaggagtcagtatttatgagacttaataatcgtattaaagccttagaagttaacatgtctctcagtggtcgctatctggaggagcttag

SEQ ID NO: 103478 - DNA, 120 bp, Artificial Sequence
  ENSG00000094975_25 (sequence is synthesized)
ccaaaggtaccgaaaacaaatggaagaaatgcaaaaggctttcaataaaacaatcgtgaaacttcagaatacttcaagaatagcagaggagcaggatcagcggcaaactgaagccatcca

SEQ ID NO: 103479 - DNA, 120 bp, Artificial Sequence
  ENSG00000094975_26 (sequence is synthesized)
gttgctacaggcacagctgaccaacatgacacagcttgtttcaaatttatcagcaacagtagcagaattgaaacgggaggtttcagatcgacaaagctatcttgtcatatctttggttct

SEQ ID NO: 103480 - DNA, 120 bp, Artificial Sequence
  ENSG00000094975_27 (sequence is synthesized)
ttgtgttgtcttgggactgatgctttgtatgcagcgttgtcgaaatacttctcaatttgatggagattatatttcaaaacttcctaaaagtaatcagtatccaagccctaaaaggtgttt

SEQ ID NO: 103481 - DNA, 120 bp, Artificial Sequence
  ENSG00000094975_28 (sequence is synthesized)
ctcttcctatgatgatatgaatttgaaaagaagaacttcattcccactcatgagatccaagtctctacagttaactggcaaagaagtagacccaaatgatttgtacattgtagaacccct

SEQ ID NO: 103482 - DNA, 120 bp, Artificial Sequence
  ENSG00000094975_29 (sequence is synthesized)
caagttttctccagaaaagaagaagaagcgctgcaagtacaaaattgaaaaaattgagaccataaagcctgaagaaccattgcaccccatagccaatggcgacataaaaggaagaaagcc

SEQ ID NO: 103483 - DNA, 120 bp, Artificial Sequence
  ENSG00000094975_30 (sequence is synthesized)
ctttacgaaccagagagatttttctaatatgggagaagtttatcactcttcttataaaggtcctccatctgaaggaagctcagaaacttcatcacagtcagaagagtcctatttttgtgg

SEQ ID NO: 103484 - DNA, 120 bp, Artificial Sequence
  ENSG00000094975_31 (sequence is synthesized)
catttcagcttgcacaagtctgtgcaatggacagtctcaaaagacaaaaactgagaagagggctttaaaacgaagacgatctaaagtccaagaccaaggaaaattgataaaaactctaat

SEQ ID NO: 103485 - DNA, 120 bp, Artificial Sequence
  ENSG00000094975_32 (sequence is synthesized)
acagactaagtcgggatcattgccgagcctgcatgacataatcaaaggaaacaaagagatcaccgtgggaacatttggtgttacagcagtctcgggacatatctaaaattaattgaactt

SEQ ID NO: 103486 - DNA, 120 bp, Artificial Sequence
  ENSG00000094975_33 (sequence is synthesized)
ttcatacagaagacttttttgttgttgttctttgaagaacagtctgtagtatttgaagggtttgggggagggagaaaatattaatgggaaaggcattcagaaattatggtttctaccttt

SEQ ID NO: 103487 - DNA, 120 bp, Artificial Sequence
  ENSG00000094975_34 (sequence is synthesized)
ttaaaaagtagatgggattgtgtcaatcttggttaatgagctacagttttacaaagctgatcacttcctataaggacaatggtagacattttataaagatgttttttcacaagattaatt

SEQ ID NO: 103488 - DNA, 120 bp, Artificial Sequence
  ENSG00000094975_35 (sequence is synthesized)
actgggacaaaagtaatttggaagcccagttccttaggtgggataggaatgaaagcctaaacctcttcctttagctttgttcctatttcttgcaccttcccatatttatgtgccttttgt

SEQ ID NO: 103489 - DNA, 120 bp, Artificial Sequence
  ENSG00000094975_36 (sequence is synthesized)
ctatttataatgccactggaagaggagggataactttttctgttatttgatttcttttataactttgttaggtttttgaagctgcaaacactacaatgctttgagggggtctgtgcctga

SEQ ID NO: 103490 - DNA, 120 bp, Artificial Sequence
  ENSG00000094975_37 (sequence is synthesized)
agctcaggagtgtggatcagacagtctaaagatcctaaaaacttgccaactggatctttgtttagcaaactcactggaaatgaacacttaatggaatttttaagtctgttctgttaggta

SEQ ID NO: 103491 - DNA, 120 bp, Artificial Sequence
  ENSG00000094975_38 (sequence is synthesized)
gatggtgatgctcttgttattttcacttattcagactggattacttcttacttagttactaactcaatgaggaaaaatccctacaggatctttttttgcaaacaactgatatatgcagac

SEQ ID NO: 103492 - DNA, 120 bp, Artificial Sequence
  ENSG00000094975_39 (sequence is synthesized)
aaatttttgacaaattcaccttttaaacacacttaaccatttgtgaaggttttctttagcttacattttaaacatacacaataaacactaatcctccaaactttcactgtttttattagt

SEQ ID NO: 103493 - DNA, 120 bp, Artificial Sequence
  ENSG00000094975_40 (sequence is synthesized)
atgaatataaaatttgaaggtttggccaattagtacaagtctcatgatataatcactgcctgcatacatatgcacagatccagttagtgagtttgtcaagcttaatctaattggttaagt

SEQ ID NO: 103494 - DNA, 120 bp, Artificial Sequence
  ENSG00000094975_41 (sequence is synthesized)
ctaaagagattattattccttgatgtttgctttgtattggctacaaatgtgcagaggtaatacatatgtgatgtcgatgtctctgtctttttttttgtctttaaaaaataattggcagca

SEQ ID NO: 103495 - DNA, 120 bp, Artificial Sequence
  ENSG00000094975_42 (sequence is synthesized)
actgtatttgaataaaatgatttcttagtatgattgtacagtaatgaatgaaagtggaacatgtttctttttgaaagggagagaattgaccatttattgttgtgatgtttaagttataac

SEQ ID NO: 103496 - DNA, 120 bp, Artificial Sequence
  ENSG00000094975_43 (sequence is synthesized)
ttattgagcacttttagtagtgataactgtttttaaacttgcctaatacctttcttgggtattgtttgtaatgtgacttatttaacgccttttttgtttgtttaagttgctgctttaggt

SEQ ID NO: 103497 - DNA, 120 bp, Artificial Sequence
  ENSG00000094975_44 (sequence is synthesized)
taacagcgtgttttagaagatttaaatttctttcctgtctgcacaattagctattcagagcaagagggcctgattttatagaagccccttgaaaagaggtccagatgagagcagagatac

SEQ ID NO: 103498 - DNA, 120 bp, Artificial Sequence
  ENSG00000094975_45 (sequence is synthesized)
agtgagaaattatgtgatctgtgtgttgtgggaagagaattttcaatatgtaactacggagctgtagtgccattagaaactgtgaatttccaaataaatctgaacacttgtctttattaa

SEQ ID NO: 103499 - DNA, 120 bp, Artificial Sequence
  ENSG00000094975_46 (sequence is synthesized)
cccaaagttcgaaaccaacagaacgaaaagcaacgaagcacacttaaagtgaggaacccggcaagcggcgaaattcttgctgaagagaagaaaaagcgaaaggttttccgctgcaaccaa

SEQ ID NO: 103500 - DNA, 120 bp, Artificial Sequence
  ENSG00000094975_47 (sequence is synthesized)
tcagatgagaggattcttggcacgcccctttctatctaccaatcaacatctagctcaatggggcagtccattgccacagggaaagggcttggtgcagcttccctcacaacacacacgtca

SEQ ID NO: 103501 - DNA, 120 bp, Artificial Sequence
  ENSG00000094975_48 (sequence is synthesized)
ttctaggccattccacgaactgtgctcaaaagaggaaaacagtgcaacagttccaaagctgatcagtctcgtggtgagcagcgaaactatagacttctctaacaaaaccatggattctag

SEQ ID NO: 103502 - DNA, 120 bp, Artificial Sequence
  ENSG00000094975_49 (sequence is synthesized)
tccttattcactaataaaagcagaatatacttttcaaaacattatcttgtatgaattcttacttatattggctgatgtattttgccctgcattttttaacttttaaaacccgtatgaaat

SEQ ID NO: 103503 - DNA, 120 bp, Artificial Sequence
  ENSG00000094975_50 (sequence is synthesized)
tttaaaaaggaaataactaaaatattatttttttctttaaagtaacaggcattgaattttaaatgtatcattgtaacactaatttaatgctgttgccgtgaatggtgaatcttagccact

SEQ ID NO: 103504 - DNA, 120 bp, Artificial Sequence
  ENSG00000094975_51 (sequence is synthesized)
ctaaaagcccagagggtagggaggggggcttagtttaattagcagttggtagctttgtttgcacatgctcctgtttagaagtatttctttttagaaagggatgtttgagaaagttcaaca

SEQ ID NO: 103505 - DNA, 120 bp, Artificial Sequence
  ENSG00000094975_52 (sequence is synthesized)
gatatggaaaacctgaatgtgctcccatagcatcctgtgcttttctgcctcctcttcttatacaggtaggaccccttttgtctctagtttaggactatgaggcactttctgaacaaaaat

SEQ ID NO: 103506 - DNA, 120 bp, Artificial Sequence
  ENSG00000094975_53 (sequence is synthesized)
taaagttaacattataatttgtgtgtcagctttctgagagtgtctgaaaacattcagaataaaagtaatttcaaaaatgccatgccataatttttggtggagattcgtatttttctttgc

SEQ ID NO: 103507 - DNA, 120 bp, Artificial Sequence
  ENSG00000094975_54 (sequence is synthesized)
agatatttatatgtttattcttgttgcttgtatttggaattttgtaacatccttagtcctgtagtatagggtagtgcatgttcagagagctgaaaatgagtgatttgtttttaatgatct

SEQ ID NO: 103508 - DNA, 120 bp, Artificial Sequence
  ENSG00000094975_55 (sequence is synthesized)
ataatagagtttttaaagaaaccccaattttgcaaatgagaactattagaagtgagtattccagggagaatctacagtcagtggctttgtagtttgttttatgtaattaggtgcagtaaa

SEQ ID NO: 103509 - DNA, 120 bp, Artificial Sequence
  ENSG00000094975_56 (sequence is synthesized)
tataaagactccaaaaaacctcatggtcttaaaacatgtattattttaccattctaaatgataaatggagagtattgacttgatttggcttttgcctttaacttcagtgtatttatttaa

SEQ ID NO: 103510 - DNA, 120 bp, Artificial Sequence
  ENSG00000094975_57 (sequence is synthesized)
gcacattgttaatctacctttgtgacacagtttagaggctagtcttttagggaagtattcaaatgatctgtaggtttggtgtgagcttacccaggaatgtttcttttcttatcaggtaaa

SEQ ID NO: 103511 - DNA, 120 bp, Artificial Sequence
  ENSG00000094975_58 (sequence is synthesized)
agagtgaggctgggcccaaagaaagatcgttattgtattggttgataaccagctactagttaacaacttaaggaagtatagttatttgaagacgaccagtcaagcataggaatcatatca

SEQ ID NO: 103512 - DNA, 120 bp, Artificial Sequence
  ENSG00000094975_59 (sequence is synthesized)
tcttccaccttgcctctttttgcttactaatttaaaatgcataaatatatagttaacctgatacaaattcattggttctattactagaggataataaggaatgaatgatttgtcttattt

SEQ ID NO: 103513 - DNA, 120 bp, Artificial Sequence
  ENSG00000095002_0 (sequence is synthesized)
gcagtagctaaagtcaccagcgtgcgcgggaagctgggccgcgtctgcttatgattggttgccgcggcagactcccacccaccgaaacgcagccctggaagctgattgggtgtggtcgcc

SEQ ID NO: 103514 - DNA, 120 bp, Artificial Sequence
  ENSG00000095002_1 (sequence is synthesized)
gtggccggacgccgctcgggggacgtgggaggggaggcgggaaacagcttagtgggtgtggggtcgcgcattttcttcaaccaggaggtgaggaggtttcgacatggcggtgcagccgaa

SEQ ID NO: 103515 - DNA, 120 bp, Artificial Sequence
  ENSG00000095002_2 (sequence is synthesized)
ggagacgctgcagttggagagcgcggccgaggtcggcttcgtgcgcttctttcagggcatgccggagaagccgaccaccacagtgcgccttttcgaccggggcgacttctatacggcgca

SEQ ID NO: 103516 - DNA, 120 bp, Artificial Sequence
  ENSG00000095002_3 (sequence is synthesized)
cggcgaggacgcgctgctggccgcccgggaggtgttcaagacccagggggtgatcaagtacatggggccggcaggagcaaagaatctgcagagtgttgtgcttagtaaaatgaattttga

SEQ ID NO: 103517 - DNA, 120 bp, Artificial Sequence
  ENSG00000095002_4 (sequence is synthesized)
atcttttgtaaaagatcttcttctggttcgtcagtatagagttgaagtttataagaatagagctggaaataaggcatccaaggagaatgattggtatttggcatataaggcttctcctgg

SEQ ID NO: 103518 - DNA, 120 bp, Artificial Sequence
  ENSG00000095002_5 (sequence is synthesized)
caatctctctcagtttgaagacattctctttggtaacaatgatatgtcagcttccattggtgttgtgggtgttaaaatgtccgcagttgatggccagagacaggttggagttgggtatgt

SEQ ID NO: 103519 - DNA, 120 bp, Artificial Sequence
  ENSG00000095002_6 (sequence is synthesized)
ggattccatacagaggaaactaggactgtgtgaattccctgataatgatcagttctccaatcttgaggctctcctcatccagattggaccaaaggaatgtgttttacccggaggagagac

SEQ ID NO: 103520 - DNA, 120 bp, Artificial Sequence
  ENSG00000095002_7 (sequence is synthesized)
tgctggagacatggggaaactgagacagataattcaaagaggaggaattctgatcacagaaagaaaaaaagctgacttttccacaaaagacatttatcaggacctcaaccggttgttgaa

SEQ ID NO: 103521 - DNA, 120 bp, Artificial Sequence
  ENSG00000095002_8 (sequence is synthesized)
aggcaaaaagggagagcagatgaatagtgctgtattgccagaaatggagaatcaggttgcagtttcatcactgtctgcggtaatcaagtttttagaactcttatcagatgattccaactt

SEQ ID NO: 103522 - DNA, 120 bp, Artificial Sequence
  ENSG00000095002_9 (sequence is synthesized)
tggacagtttgaactgactacttttgacttcagccagtatatgaaattggatattgcagcagtcagagcccttaacctttttcagggttctgttgaagataccactggctctcagtctct

SEQ ID NO: 103523 - DNA, 120 bp, Artificial Sequence
  ENSG00000095002_10 (sequence is synthesized)
ggctgccttgctgaataagtgtaaaacccctcaaggacaaagacttgttaaccagtggattaagcagcctctcatggataagaacagaatagaggagagattgaatttagtggaagcttt

SEQ ID NO: 103524 - DNA, 120 bp, Artificial Sequence
  ENSG00000095002_11 (sequence is synthesized)
tgtagaagatgcagaattgaggcagactttacaagaagatttacttcgtcgattcccagatcttaaccgacttgccaagaagtttcaaagacaagcagcaaacttacaagattgttaccg

SEQ ID NO: 103525 - DNA, 120 bp, Artificial Sequence
  ENSG00000095002_12 (sequence is synthesized)
actctatcagggtataaatcaactacctaatgttatacaggctctggaaaaacatgaaggaaaacaccagaaattattgttggcagtttttgtgactcctcttactgatcttcgttctga

SEQ ID NO: 103526 - DNA, 120 bp, Artificial Sequence
  ENSG00000095002_13 (sequence is synthesized)
cttgtaaaaccttcatttgatcctaatctcagtgaattaagagaaataatgaatgacttggaaaagaagatgcagtcaacattaataagtgcagccagagatcttggcttggaccctggc

SEQ ID NO: 103527 - DNA, 120 bp, Artificial Sequence
  ENSG00000095002_14 (sequence is synthesized)
aaacagattaaactggattccagtgcacagtttggatattactttcgtgtaacctgtaaggaagaaaaagtccttcgtaacaataaaaactttagtactgtagatatccagaagaatggt

SEQ ID NO: 103528 - DNA, 120 bp, Artificial Sequence
  ENSG00000095002_15 (sequence is synthesized)
gttaaatttaccaacagcaaattgacttctttaaatgaagagtataccaaaaataaaacagaatatgaagaagcccaggatgccattgttaaagaaattgtcaatatttcttcaggctat

SEQ ID NO: 103529 - DNA, 120 bp, Artificial Sequence
  ENSG00000095002_16 (sequence is synthesized)
gtagaaccaatgcagacactcaatgatgtgttagctcagctagatgctgttgtcagctttgctcacgtgtcaaatggagcacctgttccatatgtacgaccagccattttggagaaagga

SEQ ID NO: 103530 - DNA, 120 bp, Artificial Sequence
  ENSG00000095002_17 (sequence is synthesized)
caaggaagaattatattaaaagcatccaggcatgcttgtgttgaagttcaagatgaaattgcatttattcctaatgacgtatactttgaaaaagataaacagatgttccacatcattact

SEQ ID NO: 103531 - DNA, 120 bp, Artificial Sequence
  ENSG00000095002_18 (sequence is synthesized)
ggccccaatatgggaggtaaatcaacatatattcgacaaactggggtgatagtactcatggcccaaattgggtgttttgtgccatgtgagtcagcagaagtgtccattgtggactgcatc

SEQ ID NO: 103532 - DNA, 120 bp, Artificial Sequence
  ENSG00000095002_19 (sequence is synthesized)
ttagcccgagtaggggctggtgacagtcaattgaaaggagtctccacgttcatggctgaaatgttggaaactgcttctatcctcaggtctgcaaccaaagattcattaataatcatagat

SEQ ID NO: 103533 - DNA, 120 bp, Artificial Sequence
  ENSG00000095002_20 (sequence is synthesized)
gaattgggaagaggaacttctacctacgatggatttgggttagcatgggctatatcagaatacattgcaacaaagattggtgctttttgcatgtttgcaacccattttcatgaacttact

SEQ ID NO: 103534 - DNA, 120 bp, Artificial Sequence
  ENSG00000095002_21 (sequence is synthesized)
gccttggccaatcagataccaactgttaataatctacatgtcacagcactcaccactgaagagaccttaactatgctttatcaggtgaagaaaggtgtctgtgatcaaagttttgggatt

SEQ ID NO: 103535 - DNA, 120 bp, Artificial Sequence
  ENSG00000095002_22 (sequence is synthesized)
catgttgcagagcttgctaatttccctaagcatgtaatagagtgtgctaaacagaaagccctggaacttgaggagtttcagtatattggagaatcgcaaggatatgatatcatggaacca

SEQ ID NO: 103536 - DNA, 120 bp, Artificial Sequence
  ENSG00000095002_23 (sequence is synthesized)
gcagcaaagaagtgctatctggaaagagagcaaggtgaaaaaattattcaggagttcctgtccaaggtgaaacaaatgccctttactgaaatgtcagaagaaaacatcacaataaagtta

SEQ ID NO: 103537 - DNA, 120 bp, Artificial Sequence
  ENSG00000095002_24 (sequence is synthesized)
aaacagctaaaagctgaagtaatagcaaagaataatagctttgtaaatgaaatcatttcacgaataaaagttactacgtgaaaaatcccagtaatggaatgaaggtaatattgataagct

SEQ ID NO: 103538 - DNA, 120 bp, Artificial Sequence
  ENSG00000095002_25 (sequence is synthesized)
attgtctgtaatagttttatattgttttatattaaccctttttccatagtgttaactgtcagtgcccatgggctatcaacttaataagatatttagtaatattttactttgaggacattt

SEQ ID NO: 103539 - DNA, 120 bp, Artificial Sequence
  ENSG00000095002_26 (sequence is synthesized)
tcaaagatttttattttgaaaaatgagagctgtaactgaggactgtttgcaattgacataggcaataataagtgatgtgctgaattttataaataaaatcatgtagtttgtggaatttga

SEQ ID NO: 103540 - DNA, 120 bp, Artificial Sequence
  ENSG00000095002_27 (sequence is synthesized)
catggaaaaggaaacttcgtgggggaaagagatctgcttgcagtcggccagagagacagaaccagggcagtgggtgagatgcagacatctttccatgacacctgtggatgctctacaatc

SEQ ID NO: 103541 - DNA, 90 bp, Artificial Sequence
  ENSG00000095002_28 (sequence is synthesized)
gcagacatctttccatgacacctgtggatgctctacaatctggcccaggctgaccatatcctgcctggagggccggatctcgcactccta

SEQ ID NO: 103542 - DNA, 84 bp, Artificial Sequence
  ENSG00000095002_29 (sequence is synthesized)
gcctcccaaagtgatgggattacaggctggagtgcaatgcctcaagcgatcctcctacctcaacctcccaagtagctgggacca

SEQ ID NO: 103543 - DNA, 120 bp, Artificial Sequence
  ENSG00000095002_30 (sequence is synthesized)
aagctgattgggtgtggtcgccgtggccggacgccgctcgggggacgtgggaggggaggcgggaaacagcttagtgggtgtggggtcgcgcattttcttcaaccaggaggtgttcaagac

SEQ ID NO: 103544 - DNA, 120 bp, Artificial Sequence
  ENSG00000095002_31 (sequence is synthesized)
cacagcccctgacacagagctgggcatgtgtgggctctcactagcgctggctgaactgcctgcaccggcagggcatctggcctccttcagcggagagggcccagcaagcaggactccgac

SEQ ID NO: 103545 - DNA, 89 bp, Artificial Sequence
  ENSG00000095002_32 (sequence is synthesized)
acctctgcctcctggactcaagcgatcctcctactcatgccaccatgcctggctaaggtaaattgtatgggaggaaattgtcaaatgat

SEQ ID NO: 103546 - DNA, 120 bp, Artificial Sequence
  ENSG00000095002_33 (sequence is synthesized)
tggctaaggtaaattgtatgggaggaaattgtcaaatgataattgatgctagatcttctttcagttacatttattgatataaatgttccccaaattatataatgttataaaaatctaaaa

SEQ ID NO: 103547 - DNA, 120 bp, Artificial Sequence
  ENSG00000095002_34 (sequence is synthesized)
tttgttatgttaaatcttttctaaagttatatttgtataggtatgttattaatgtgaatattctaatgattatattaaatttatcaaagtcttgacgatcctgatgtgatatggtcagtc

SEQ ID NO: 103548 - DNA, 120 bp, Artificial Sequence
  ENSG00000095002_35 (sequence is synthesized)
tgtgatatggtcagtcataattctggttgttatcttaaaatgctgcacataatagaaataattaaatttctttgtcagttgaacactttcatagatttaaccatggctattttaagttgt

SEQ ID NO: 103549 - DNA, 71 bp, Artificial Sequence
  ENSG00000095002_36 (sequence is synthesized)
aagagattcttgtgcctcagcctcccgcgtagctaggattagtggtttcaccatgtttgccaggccagtct

SEQ ID NO: 103550 - DNA, 120 bp, Artificial Sequence
  ENSG00000095002_37 (sequence is synthesized)
tggtagagacatggtttcaccatgtttgccaggccagtctcaaactagcctcaagtcatctacctgccttggcttcccaaagttctgggattacaggacaggtatgagccaccatgcctg

SEQ ID NO: 103551 - DNA, 120 bp, Artificial Sequence
  ENSG00000095002_38 (sequence is synthesized)
gcctgtcattcatgctattgttttaaattcttctctaaaagcatttgcagtgatctatagtcctaaattgattttcatgaagaatactctaatgggtattcctgaatacagatttctgat

SEQ ID NO: 103552 - DNA, 78 bp, Artificial Sequence
  ENSG00000095002_39 (sequence is synthesized)
agaatactctaatgggtattcctgaatacagatttctgataactttaacatcaatggactaaagaaaaactttcagaa

SEQ ID NO: 103553 - DNA, 120 bp, Artificial Sequence
  ENSG00000095002_40 (sequence is synthesized)
gatatttcctgtcatagttgaagtgtgcactggctttaagttccctgcctctagaccctattttcctgcctcacctcctccaactttccatccacccctgccaaactcttttctttccta

SEQ ID NO: 103554 - DNA, 120 bp, Artificial Sequence
  ENSG00000095002_41 (sequence is synthesized)
ttccagaccctcagtcacttgagcttttggctccactgatctcaagggactgagggtcccccaggtcaactctctgaagctgaaaaggaaaagggttaattagaaataactggatatttt

SEQ ID NO: 103555 - DNA, 120 bp, Artificial Sequence
  ENSG00000095002_42 (sequence is synthesized)
atccactcagatggtctttggagacattcagacagctgctagagtctcctcagtaattgcctaaaatttagtccacagcctccatatgacctctgataataagcaaataacaccaaaact

SEQ ID NO: 103556 - DNA, 120 bp, Artificial Sequence
  ENSG00000095002_43 (sequence is synthesized)
ccttctgggagaaaatatatcctttctccgtgcctttaatatgtaaattttctaccctgtcttctctaggacctaagcagcatctttttgagatgcaaattttggggagaagatgctcag

SEQ ID NO: 103557 - DNA, 120 bp, Artificial Sequence
  ENSG00000095002_44 (sequence is synthesized)
aagaaggtgggggaggggagaaagctatttagaaaccaactggcatttttaaaaatttcaagtctttaccacaagtagtaaaaagctttatccatctgagagagtaatcttaacttattc

SEQ ID NO: 103558 - DNA, 120 bp, Artificial Sequence
  ENSG00000095002_45 (sequence is synthesized)
catctgccagaaacataatttagatccaattactcttttataaactagggagttttatgttacggtacctggcacatggctaaaatttttaaataaaaacttgaagatttctgtttgcat

SEQ ID NO: 103559 - DNA, 120 bp, Artificial Sequence
  ENSG00000095002_46 (sequence is synthesized)
ctatctgtttatgtatatctgtgtatgtatagtatgcatatgtggtgttttctctacctctggatggtactgccaaataccaaactcgtattgagtgctcttatgttcatggcaataaag

SEQ ID NO: 103560 - DNA, 120 bp, Artificial Sequence
  ENSG00000095002_47 (sequence is synthesized)
gtcaggtcccaccccagacctactcaacagaaactacttggtaagcagattcccaggtggttccaggcaccttacagtttgaaaagcactgctgcatgctatcctaccttcctggtctgt

SEQ ID NO: 103561 - DNA, 120 bp, Artificial Sequence
  ENSG00000095002_48 (sequence is synthesized)
aacatctgttgctgttgagtataaagacactgtgaacattgtaaaatctgcaattacaagattctggatgcttcatcctgaggtcaccttggaatgagatcctctgggatctggaggaag

SEQ ID NO: 103562 - DNA, 120 bp, Artificial Sequence
  ENSG00000095002_49 (sequence is synthesized)
cagatggaggagaaaccccagggctcaatttttctaagggcccaggcacaccagttaccactgacctgctagtaagccaggaacttagccccatgttgggggttggccaagcgcagggag

SEQ ID NO: 103563 - DNA, 120 bp, Artificial Sequence
  ENSG00000095002_50 (sequence is synthesized)
gaggcagcactcacaagacagagtccggagcattctccaccacagccagtggccacttggagaggggacctagagtcccctggtaggtggctagggaatggcagggtttggggtagaact

SEQ ID NO: 103564 - DNA, 120 bp, Artificial Sequence
  ENSG00000095002_51 (sequence is synthesized)
tcctggggccagagtctcatagcagtggtagccaagagttggcttagggtgagagccaaggggcttcagtacccttcttcattctctaccagcacctccccaacctcctggaaactgctg

SEQ ID NO: 103565 - DNA, 120 bp, Artificial Sequence
  ENSG00000095002_52 (sequence is synthesized)
tgcttcctgcagtttcaagcccctccaccccctgttcctcaccaactctccccgtgtagaaactctgcagagagtatgaccgtgtctcttaaaaaaactttggtgaggatcagaggctgg

SEQ ID NO: 103566 - DNA, 120 bp, Artificial Sequence
  ENSG00000095002_53 (sequence is synthesized)
actctgcccaaagcacccaccttgggctccacacactttccggattgctggctggtggccccatgcagagcccccgaccccggaaagtcagtggaactggacggaaaaaatggaagggcc

SEQ ID NO: 103567 - DNA, 120 bp, Artificial Sequence
  ENSG00000095002_54 (sequence is synthesized)
agaaaacttggggaggactccagagctgggggtgacacaggaatagaccaacggccttttgttgtttccaagatcctctgaatctgaggcagccaaacaaggcatgggagtgctgctcca

SEQ ID NO: 103568 - DNA, 120 bp, Artificial Sequence
  ENSG00000095002_55 (sequence is synthesized)
caagtcactcagcctgccttctgctcctcagatacccacccttctctccagctcctcccctctgtgcgtagcgcaacactcaccccttctgggaagccttggtgccctctcagaactgta

SEQ ID NO: 103569 - DNA, 120 bp, Artificial Sequence
  ENSG00000095002_56 (sequence is synthesized)
ctggattctctacttgtctatgtgagcagtgtgtgtgtgtgtctgtgtgtgctgtttgtgtgagaattatgtgtgtaagaaagggtgtgggagagtgagagagatacacctacctttggc

SEQ ID NO: 103570 - DNA, 120 bp, Artificial Sequence
  ENSG00000095002_57 (sequence is synthesized)
aatattgatgtaactcttctagggaggatgagagcgcaagctctcagggaatccccctttgacttgctgggtaacttgggcaacctctcctcctctctgagccttgtgtaaaatgaggaa

SEQ ID NO: 103571 - DNA, 120 bp, Artificial Sequence
  ENSG00000095002_58 (sequence is synthesized)
caagggtaaattcacccgctttgggctggtcttggagatgctctagggctcttcagagaagacttcagggagcgggcggcaactgaggaaaggcccactggtccggactccagcccccac

SEQ ID NO: 103572 - DNA, 120 bp, Artificial Sequence
  ENSG00000095002_59 (sequence is synthesized)
ccctaattacagcagctctgctcctatttgctataatgggctgattgttggcttttgttgacaaaatggtctacatgcctggggaaagttatgaaggatctttgtggtgcttccagctag

SEQ ID NO: 103573 - DNA, 120 bp, Artificial Sequence
  ENSG00000095002_60 (sequence is synthesized)
aatactctaggagtgtacctttgctccattcggcacaattctgagctgttcgacgcggaggcccttgggcatagtcaagactgagtggaaatatgttctctctcagctggcttggcccag

SEQ ID NO: 103574 - DNA, 120 bp, Artificial Sequence
  ENSG00000095002_61 (sequence is synthesized)
gaatagcggcagaccattcctgggagtccaggggagagcagggggatccaggtacctttcttgtctcagtttttgatggcctggcagtgcccccacctgttttttcttcttacctttctc

SEQ ID NO: 103575 - DNA, 120 bp, Artificial Sequence
  ENSG00000095002_62 (sequence is synthesized)
cactctcccagaacttcccaaaggaagctgctctcattaaaacaagggaggttgaagatcctaacgccacaggcttgttcgggaggcagctcacctcctggaactgagtgcagtcctgga

SEQ ID NO: 103576 - DNA, 120 bp, Artificial Sequence
  ENSG00000095002_63 (sequence is synthesized)
gaaaaccaagtggatgtgcggcccctttccatggagcaattaggtggataactgtccagtcgctcctaggctttgtagaggcataggctcagatacaaagagaccagacagtctctcgct

SEQ ID NO: 103577 - DNA, 120 bp, Artificial Sequence
  ENSG00000095002_64 (sequence is synthesized)
ccaaaggggctggccacaagcaccatgaagacagcagtacccactgactcagcaatttcaccagctggaagtcatcccaaggagatatcacagaaagaaaaggccatcttgcgtaaagat

SEQ ID NO: 103578 - DNA, 120 bp, Artificial Sequence
  ENSG00000095002_65 (sequence is synthesized)
gatcactgtgtcattactcaaaatagccccaaactgggaaacacccagctatccagcaataggggtagtgaattacagaacatcaactagatggaatattatgcacccactaaaattaga

SEQ ID NO: 103579 - DNA, 120 bp, Artificial Sequence
  ENSG00000095002_66 (sequence is synthesized)
ctacgtgaaaacacagaaacaacatcagtaataaaatgttaataaaacagaagcagctcagtacacatcagttagtttcctttctttttcctacaaaaggcatgacaaggaactgcaggg

SEQ ID NO: 103580 - DNA, 120 bp, Artificial Sequence
  ENSG00000095002_67 (sequence is synthesized)
gaacgtgcagacatgaagagttgtgttagtgcagtggtatcatgaatgacttgttctcttattcatataataaatattgtttactatgggctaggtctgatgctgggtgctgaggatgga

SEQ ID NO: 103581 - DNA, 120 bp, Artificial Sequence
  ENSG00000095002_68 (sequence is synthesized)
gcagtgaatggtaatacatttcctgctctccacccagagtttcaaatttaaggagatattttcttcctaaatgtccttcaaagctgtcacagcatcatctttcaataaaaaatagttgat

SEQ ID NO: 103582 - DNA, 120 bp, Artificial Sequence
  ENSG00000095002_69 (sequence is synthesized)
gagactgggcatggtggctggtggctcccgggtgtaatcccagcacgctgaaaggctggggtagcaggattgcttgagcccgggagtttgacatcagcctgggcaatgtagcgaggccct

SEQ ID NO: 103583 - DNA, 120 bp, Artificial Sequence
  ENSG00000095002_70 (sequence is synthesized)
gtctcttaaaaaaaaaaaaaagtagccaggtgtggtgatgtgtgcctgtgatcccagcttcttgggaggctgcggtggaaagattgcttgtgcccaggaggttgaggctatggtaagctg

SEQ ID NO: 103584 - DNA, 120 bp, Artificial Sequence
  ENSG00000095002_71 (sequence is synthesized)
tgtttgcaccactgtactccagcctgggcaatggagtaagactgtgtctctttaaaaaaaaaagttgatgagagaaatacgcaaggaaggatgcgcctctccttctggataatgtgtttc

SEQ ID NO: 103585 - DNA, 120 bp, Artificial Sequence
  ENSG00000095002_72 (sequence is synthesized)
attccagatatcaaaactatctccagctggattacatacatgttagaagaaagttgaatgtaaatgtggtagtgacattttgggcttataatgtcttagtttcctttgtagcaaaaagag

SEQ ID NO: 103586 - DNA, 120 bp, Artificial Sequence
  ENSG00000095002_73 (sequence is synthesized)
ttttaaaaatccatgttgaaaaagagggaaaaagttaggacttgttactaatctcgtggctgaataattaagtgtgcctaattctgaaagtagcaagctaaattatgcagtgccaaaagt

SEQ ID NO: 103587 - DNA, 120 bp, Artificial Sequence
  ENSG00000095002_74 (sequence is synthesized)
gacaactcttatacctacaccatcccgtctacagcggcatgattttagctttatagctaaaaaacgctgccagaaaacctaataaaaggaagcaaaaatatttctgtttatatcaagctg

SEQ ID NO: 103588 - DNA, 120 bp, Artificial Sequence
  ENSG00000095002_75 (sequence is synthesized)
ccatttgagaaagattttaaaatatgttctttcctatgtgtaaatctgacagcagatgcataattaaaaccccagtggagagtttccatttaatcttttcaaagttaactgataaacatc

SEQ ID NO: 103589 - DNA, 120 bp, Artificial Sequence
  ENSG00000095002_76 (sequence is synthesized)
ctttaggatgtgaagtgatgggttaattctgtttggattgtttggaatatctctgagctggaatactgtcttcaagaatattgtttcgtgctaaaagaacacaagacagttatctttatc

SEQ ID NO: 103590 - DNA, 120 bp, Artificial Sequence
  ENSG00000095002_77 (sequence is synthesized)
tttaggagttcatacaatcacaggaagtgcagacaacatgccaaaggccacacatgcatctatgatgagtgatgcttgtcttagatgttttttaattggcagaatgaataaatggataca

SEQ ID NO: 103591 - DNA, 120 bp, Artificial Sequence
  ENSG00000095002_78 (sequence is synthesized)
ttcacattaaaacaaacttgatttcaacccccagggaatatgtcacatagcataaatgggagaaataataattacccaggatttcagttcagtgtaagcaatcggtatgaataatttaga

SEQ ID NO: 103592 - DNA, 120 bp, Artificial Sequence
  ENSG00000095002_79 (sequence is synthesized)
ccacaaagtggatttttatttcgcttgagctattcagattgactttctacacagcctgaacggctgctgaataatcacaggcaaaattttccactggtaccgcactgtgtagacacacgt

SEQ ID NO: 103593 - DNA, 120 bp, Artificial Sequence
  ENSG00000095002_80 (sequence is synthesized)
gtatctacacgattgcaaactgcccagctgtggatacggggccctgttcaaaccaaatatcaggacaaacattctacttcattgtggtgttccatgtaaccttgagtacacacagccata

SEQ ID NO: 103594 - DNA, 120 bp, Artificial Sequence
  ENSG00000095002_81 (sequence is synthesized)
cctgaacctttcattacgtcttccaccaggtgaaagcccattcctgctccttcttcccctcctctatacacatgtgctctcaagagtgtgtgtgtgcacgtgtgtacacacacacgtgca

SEQ ID NO: 103595 - DNA, 120 bp, Artificial Sequence
  ENSG00000095002_82 (sequence is synthesized)
cacacacatacacacactggtgcaaaaaagggcagaaagcaagtgacttctgtccttagaccacagtttgccagaagttctcctacttgctagtaccccatctctgccctttaggctggc

SEQ ID NO: 103596 - DNA, 120 bp, Artificial Sequence
  ENSG00000095002_83 (sequence is synthesized)
ttttgcctgtctagctaactaagacctgccagatgcttctaacttgtctggcctgtaaatctgtcttgtccttcaagttttctctggacttaatcagttgatgacgtgaccaatagacca

SEQ ID NO: 103597 - DNA, 120 bp, Artificial Sequence
  ENSG00000095002_84 (sequence is synthesized)
gcagaccagtccctgccctggttacacacacatacactctctctcacactcagacagacagacattattaaatattgcaatctcaaacaagaacgttcccaccaattatatgcatgaaat

SEQ ID NO: 103598 - DNA, 120 bp, Artificial Sequence
  ENSG00000095002_85 (sequence is synthesized)
tggtggatattgcacaacttggtttctggacctagctgaacccctcattaactgtgtgaccactgacaagtcccctaaccctgtgccacatgagattggaccaaaaaggtccccttcttg

SEQ ID NO: 103599 - DNA, 120 bp, Artificial Sequence
  ENSG00000095002_86 (sequence is synthesized)
ttctaatcatcttcagtgaggatggccaagatacgttgctcataaatgctgtgatccagctgcccatgttggaatatgccttaatctctgccatgcagagtaagctttaacctttcaaaa

SEQ ID NO: 103600 - DNA, 120 bp, Artificial Sequence
  ENSG00000095002_87 (sequence is synthesized)
tacagcctgatacatacaatcatgttacggaatgaatggaaggaaagatttccaatactaaagtctagatgaatcacatatctgggtctacacaacacacacacacatacgtatgtcctt

SEQ ID NO: 103601 - DNA, 120 bp, Artificial Sequence
  ENSG00000095002_88 (sequence is synthesized)
aagagaggtggtgacgatcatgtgactctcttctggtcaatgagatgcagcagaaagtcctagggaggtctaggaaaagtcctgttgggagagagcattttttaccttctccctgctact

SEQ ID NO: 103602 - DNA, 120 bp, Artificial Sequence
  ENSG00000095002_89 (sequence is synthesized)
tcttgctactagtaacatggatgtgagccttggaggggtagctaccatctggcacctggggtggcaagccaacatggaaaggatggcagagcgggaaggaggagccagccttaccgatgg

SEQ ID NO: 103603 - DNA, 120 bp, Artificial Sequence
  ENSG00000095002_90 (sequence is synthesized)
cacagagcagcctagtgcttggcatgggactcagatctgaagcagcctctccgggacttctctgagcctgcccctggtgaacctcagagtgacagagccaaaagaccagtgcctcatttt

SEQ ID NO: 103604 - DNA, 120 bp, Artificial Sequence
  ENSG00000095002_91 (sequence is synthesized)
tttcatttgtaattctacaaacatcccttctgtaaacatttccctcaaaatggagcaggaagctctcaaaaatggaccagaaaggggtcaggaatataactttctctgcccagattccag

SEQ ID NO: 103605 - DNA, 120 bp, Artificial Sequence
  ENSG00000095002_92 (sequence is synthesized)
gacttacagtgagaaagcgccttctgggaacttcacaatggctaaagtgtgctaatgggatgatgtgcccttgtacacccactgcctctgaactctgctctgcattgctgagcaaactac

SEQ ID NO: 103606 - DNA, 120 bp, Artificial Sequence
  ENSG00000095002_93 (sequence is synthesized)
atttcccagaactccttgttggattccttccaaacaggtttaccactgggagagcctgttggttggggagggcaggaagagggaggaaagaggaagggactcacttcctgtttccagctg

SEQ ID NO: 103607 - DNA, 120 bp, Artificial Sequence
  ENSG00000095002_94 (sequence is synthesized)
aagtctaaatcaatccactatcaacaggtagctatcatactaccctcattgtcacccctcagaggtcccactgcagctgcataatgtcccctcagtggcctgaacatgagatgaacaaca

SEQ ID NO: 103608 - DNA, 120 bp, Artificial Sequence
  ENSG00000095002_95 (sequence is synthesized)
ctcttcttgggagtaccagccttgcttggttcatggccacttttcctgattatcttgcagctatattaggtcatgtgacaaagttctggccagtggcaagggaacacaagtgataggtac

SEQ ID NO: 103609 - DNA, 120 bp, Artificial Sequence
  ENSG00000095002_96 (sequence is synthesized)
ctgcctggagggccgggtaagtggggcactcaggcttagaacagccacatgccttcccctccctgtgggacccacttccaagggagccagcctgaggcttgcatcactgtttggtctcct

SEQ ID NO: 103610 - DNA, 120 bp, Artificial Sequence
  ENSG00000095002_97 (sequence is synthesized)
cctacccttccagatcttcctggtgctggagttagtgcccccttttttctcagctgagtcatgaccctcacccagcccagcccagccccctaccctagatctgctcctacacctgattga

SEQ ID NO: 103611 - DNA, 120 bp, Artificial Sequence
  ENSG00000095002_98 (sequence is synthesized)
tgccctggcctcaggcagggctggagcttggggctggtgcctcgggccttcagccttgcccagggcagcctgggcagaagctgagattggatgtcatttgtcaaccttggcagagaagta

SEQ ID NO: 103612 - DNA, 120 bp, Artificial Sequence
  ENSG00000095002_99 (sequence is synthesized)
ctgaatgcgtcaaaataattgaaggttatttggtgcctgtgggagggatttttattcccaaggattctgctggaccatttggggcagccctgtttggctagctgagggttcctatgtttt

SEQ ID NO: 103613 - DNA, 120 bp, Artificial Sequence
  ENSG00000095002_100 (sequence is synthesized)
ccaacaattggatgtttacagtatctgtgctcttgctttttaaaaatgtcctcatttagaatagcttcctttttttatatgttttcctttttatcttttaagtgggaaatgggaggtgag

SEQ ID NO: 103614 - DNA, 120 bp, Artificial Sequence
  ENSG00000095002_101 (sequence is synthesized)
tatgaggggacaattgtgaagcttgcctgtgctccaagttagggacatgagaccccttcacccctggttttcccctgtaatccttccagagctatagagctgagcttgtattcaagccac

SEQ ID NO: 103615 - DNA, 120 bp, Artificial Sequence
  ENSG00000095002_102 (sequence is synthesized)
agacagggcccttgaccttgaaccagacaaggctgacagccccggagcaggagcgctgctgtgaaataactcggagatatcctcccagagcagtgaagaggctggaaggagtcaggaagc

SEQ ID NO: 103616 - DNA, 120 bp, Artificial Sequence
  ENSG00000095002_103 (sequence is synthesized)
ctcaaatccccagcctctgacttacaaagcacccagacctccctcaggactagacagagcagccatttcacccagagctgcctccattccagcactgggatgtggttggtaatgtgagat

SEQ ID NO: 103617 - DNA, 120 bp, Artificial Sequence
  ENSG00000095002_104 (sequence is synthesized)
tctcactatccaatgccgcaatcagagccatatgcggctatttaaacctcaatttaaatgaattaaaattaaataaagtttaaaaaccagttcctcatccacactagccacattttaagt

SEQ ID NO: 103618 - DNA, 120 bp, Artificial Sequence
  ENSG00000095002_105 (sequence is synthesized)
gctcatgagccacatgtgactggtggctgcctcactggacagcacaggttcagaacacctccgtcatcacagggctctcttggcaggatttatgggtcccctttacgctgagctgtctac

SEQ ID NO: 103619 - DNA, 120 bp, Artificial Sequence
  ENSG00000095002_106 (sequence is synthesized)
ccctgttgcctaaatgcctttcctacctaacagtagctgttcagtgggtgcattggccctacagactctcccaagcttctttctccaccagtagaagtagctatgtggccttgtgaggtc

SEQ ID NO: 103620 - DNA, 120 bp, Artificial Sequence
  ENSG00000095002_107 (sequence is synthesized)
tcccttctagaaagaacaggtagcatgcctctgacaaccacgttgaccaggtgacctgcaagcatccccaggatcaactagcaacctaagatttgctgcccaaactaatgcttctccctg

SEQ ID NO: 103621 - DNA, 120 bp, Artificial Sequence
  ENSG00000095002_108 (sequence is synthesized)
gacagcatgatgttctggaagccaagagaaaagaggagtttgaggataaatggtcagccatgtcaaatgttgctgagatgctgaggacagcgactccaagtgcatcagcataggcattgc

SEQ ID NO: 103622 - DNA, 120 bp, Artificial Sequence
  ENSG00000095002_109 (sequence is synthesized)
gagagacatgaacttttaccaacggaagccagtattattttgaacctctgttagagtggcttgaatctgtatcctaacttgtatccctaatgtgtgacccatgaaaattagccaggcagc

SEQ ID NO: 103623 - DNA, 120 bp, Artificial Sequence
  ENSG00000095015_0 (sequence is synthesized)
gagcgaatgtagcccgcgagagaaaatggcggcggcggcggggaatcgcgcctcgtcgtcgggattcccgggcgccagggctacgagccctgaggcaggcggcggcggaggagccctcaa

SEQ ID NO: 103624 - DNA, 120 bp, Artificial Sequence
  ENSG00000095015_1 (sequence is synthesized)
ctgccgcgggactgctgcgggaggcgggcagcgggggccgcgagcgggcggactggcggcggcggcagctgcgcaaagtgcggagtgtggagctggaccagctgcctgagcagccgctct

SEQ ID NO: 103625 - DNA, 120 bp, Artificial Sequence
  ENSG00000095015_2 (sequence is synthesized)
gctgcctgagcagccgctcttccttgccgcctcaccgccggcctcctcgacttccccgtcgccggagcccgcggacgcagcggggagtgggaccggcttccagcctgtggcggtgccgcc

SEQ ID NO: 103626 - DNA, 80 bp, Artificial Sequence
  ENSG00000095015_3 (sequence is synthesized)
gccccacggagccgcgagccgcggcggcgcccaccttaccgagtcggtggcggcgccggacagcggcgcctcgagtcccg

SEQ ID NO: 103627 - DNA, 120 bp, Artificial Sequence
  ENSG00000095015_4 (sequence is synthesized)
gccgtctcctgcagcggcccccgccggtcgtgagatggagaataaagaaactctcaaagggttgcacaagatggatgatcgtccagaggaacgaatgatcagggagaaactgaaggcaac

SEQ ID NO: 103628 - DNA, 120 bp, Artificial Sequence
  ENSG00000095015_5 (sequence is synthesized)
ctgtatgccagcctggaagcacgaatggttggaaaggagaaataggcgagggcctgtggtggtaaaaccaatcccagttaaaggagatggatctgaaatgaatcacttagcagctgagtc

SEQ ID NO: 103629 - DNA, 120 bp, Artificial Sequence
  ENSG00000095015_6 (sequence is synthesized)
tccaggagaggtccaggcaagtgcggcttcaccagcttccaaaggccgacgcagtccttctcctggcaactccccatcaggtcgcacagtgaaatcagaatctccaggagtaaggagaaa

SEQ ID NO: 103630 - DNA, 120 bp, Artificial Sequence
  ENSG00000095015_7 (sequence is synthesized)
aagagtttccccagtgccttttcagagtggcagaatcacaccaccccgaagagccccttcaccagatggcttctcaccatatagccctgaggaaacaaaccgccgtgttaacaaagtgat

SEQ ID NO: 103631 - DNA, 120 bp, Artificial Sequence
  ENSG00000095015_8 (sequence is synthesized)
gcgggccagactgtacttactgcagcagatagggcctaactctttcctgattggaggagacagcccagacaataaataccgggtgtttattgggcctcagaactgcagctgtgcacgtgg

SEQ ID NO: 103632 - DNA, 120 bp, Artificial Sequence
  ENSG00000095015_9 (sequence is synthesized)
aacattctgtattcatctgctatttgtgatgctccgggtgtttcaactagaaccttcagacccaatgttatggagaaaaactttaaagaattttgaggttgagagtttgttccagaaata

SEQ ID NO: 103633 - DNA, 120 bp, Artificial Sequence
  ENSG00000095015_10 (sequence is synthesized)
tcacagtaggcgtagctcaaggatcaaagctccatctcgtaacaccatccagaagtttgtttcacgcatgtcaaattctcatacattgtcatcatctagtacttctacgtctagttcaga

SEQ ID NO: 103634 - DNA, 120 bp, Artificial Sequence
  ENSG00000095015_11 (sequence is synthesized)
aaacagcataaaggatgaagaggaacagatgtgtcctatttgcttgttgggcatgcttgatgaagaaagtcttacagtgtgtgaagacggctgcaggaacaagctgcaccaccactgcat

SEQ ID NO: 103635 - DNA, 120 bp, Artificial Sequence
  ENSG00000095015_12 (sequence is synthesized)
gtcaatttgggcagaagagtgtagaagaaatagagaacctttaatatgtcccctttgtagatctaagtggagatctcatgatttctacagccacgagttgtcaagtcctgtggattcccc

SEQ ID NO: 103636 - DNA, 120 bp, Artificial Sequence
  ENSG00000095015_13 (sequence is synthesized)
ttcttccctcagagctgcacagcagcaaaccgtacagcagcagcctttggctggatcacgaaggaatcaagagagcaattttaaccttactcattatggaactcagcaaatccctcctgc

SEQ ID NO: 103637 - DNA, 120 bp, Artificial Sequence
  ENSG00000095015_14 (sequence is synthesized)
ttacaaagatttagctgagccatggattcaggtgtttggaatggaactcgttggctgcttattttctagaaactggaatgtgagagagatggccctcaggcgtctttcccatgatgtcag

SEQ ID NO: 103638 - DNA, 120 bp, Artificial Sequence
  ENSG00000095015_15 (sequence is synthesized)
tggggccctgctgttggcaaatggggagagcactggaaattctgggggcagcagtggaagcagcccgagtgggggagccaccagtgggtcttcccagaccagtatctcaggagatgtggt

SEQ ID NO: 103639 - DNA, 120 bp, Artificial Sequence
  ENSG00000095015_16 (sequence is synthesized)
ggaggcatgctgcagcgttctgtcaatggtctgtgctgaccctgtctacaaagtgtacgttgctgctttaaaaacattgagagccatgctggtatatactccttgccacagtttagcgga

SEQ ID NO: 103640 - DNA, 120 bp, Artificial Sequence
  ENSG00000095015_17 (sequence is synthesized)
aagaatcaaacttcagagacttctccagccagttgtagacaccatcctagtcaaatgtgcagatgccaatagccgcacaagtcagctgtccatatcaacactgttggaactgtgcaaagg

SEQ ID NO: 103641 - DNA, 120 bp, Artificial Sequence
  ENSG00000095015_18 (sequence is synthesized)
ccaagcaggagagttggcagttggcagagaaatactaaaagctggatccattggtattggtggtgttgattatgtcttaaattgtattcttggaaaccaaactgaatcaaacaattggca

SEQ ID NO: 103642 - DNA, 120 bp, Artificial Sequence
  ENSG00000095015_19 (sequence is synthesized)
agaacttcttggccgcctttgtcttatagatagactgttgttggaatttcctgctgaattttatcctcatattgtcagtactgatgtttcacaagctgagcctgttgaaatcaggtataa

SEQ ID NO: 103643 - DNA, 120 bp, Artificial Sequence
  ENSG00000095015_20 (sequence is synthesized)
gaagctgctgtccctcttaacctttgctttgcagtccattgataattcccactcaatggttggcaaactttccagaaggatctacttgagttctgcaagaatggttactacagtacccca

SEQ ID NO: 103644 - DNA, 120 bp, Artificial Sequence
  ENSG00000095015_21 (sequence is synthesized)
tgtgttttcaaaactgttagaaatgctgagtgtttccagttccactcacttcaccaggatgcgtcgccgtttgatggctattgcagatgaggtggaaattgccgaagccatccagttggg

SEQ ID NO: 103645 - DNA, 120 bp, Artificial Sequence
  ENSG00000095015_22 (sequence is synthesized)
cgtagaagacactttggatggtcaacaggacagcttcttgcaggcatctgttcccaacaactatctggaaaccacagagaacagttcccctgagtgcacagtccatttagagaaaactgg

SEQ ID NO: 103646 - DNA, 120 bp, Artificial Sequence
  ENSG00000095015_23 (sequence is synthesized)
aaaaggattatgtgctacaaaattgagtgccagttcagaggacatttctgagagactggccagcatttcagtaggaccttctagttcaacaacaacaacaacaacaacaacagagcaacc

SEQ ID NO: 103647 - DNA, 120 bp, Artificial Sequence
  ENSG00000095015_24 (sequence is synthesized)
aaagccaatggttcaaacaaaaggcagaccccacagtcagtgtttgaactcctctcctttatctcatcattcccaattaatgtttccagccttgtcaaccccttcttcttctaccccatc

SEQ ID NO: 103648 - DNA, 120 bp, Artificial Sequence
  ENSG00000095015_25 (sequence is synthesized)
tgtaccagctggcactgcaacagatgtctctaagcatagacttcagggattcattccctgcagaataccttctgcatctcctcaaacacagcgcaagttttctctacaattccacagaaa

SEQ ID NO: 103649 - DNA, 120 bp, Artificial Sequence
  ENSG00000095015_26 (sequence is synthesized)
ctgtcctgaaaacaaagactcagataaactttccccagtctttactcagtcaagacccttgccctccagtaacatacacaggccaaagccatctagacctaccccaggtaatacaagtaa

SEQ ID NO: 103650 - DNA, 120 bp, Artificial Sequence
  ENSG00000095015_27 (sequence is synthesized)
acagggagatccctcaaaaaatagcatgacacttgatctgaacagtagttccaaatgtgatgacagctttggctgtagcagcaatagtagtaatgctgttatacccagtgacgagacagt

SEQ ID NO: 103651 - DNA, 120 bp, Artificial Sequence
  ENSG00000095015_28 (sequence is synthesized)
gttcaccccagtagaggagaaatgcagattagatgtcaatacagagctcaactccagtattgaggaccttcttgaagcatctatgccttcaagtgatacaacagtaacttttaagtcaga

SEQ ID NO: 103652 - DNA, 120 bp, Artificial Sequence
  ENSG00000095015_29 (sequence is synthesized)
aaagagaagatggaagctgaagaagaagaagctttagcaattgccatggcaatgtcagcgtctcaggatgccctccccatagttcctcagctgcaggttgaaaatggagaagatatcatc

SEQ ID NO: 103653 - DNA, 120 bp, Artificial Sequence
  ENSG00000095015_30 (sequence is synthesized)
attattcaacaggatacaccagagactctaccaggacataccaaagcaaaacaaccgtatagagaagacactgaatggctgaaaggtcaacagataggccttggagcattttcttcttgt

SEQ ID NO: 103654 - DNA, 120 bp, Artificial Sequence
  ENSG00000095015_31 (sequence is synthesized)
tatcaggctcaagatgtgggaactggaactttaatggctgttaaacaggtgacttatgtcagaaacacatcttctgagcaagaagaagtagtagaagcactaagagaagagataagaatg

SEQ ID NO: 103655 - DNA, 120 bp, Artificial Sequence
  ENSG00000095015_32 (sequence is synthesized)
atgagccatctgaatcatccaaacatcattaggatgttgggagccacgtgtgagaagagcaattacaatctcttcattgaatggatggcagggggatcggtggctcatttgctgagtaaa

SEQ ID NO: 103656 - DNA, 120 bp, Artificial Sequence
  ENSG00000095015_33 (sequence is synthesized)
tatggagccttcaaagaatcagtagttattaactacactgaacagttactccgtggcctttcgtatctccatgaaaaccaaatcattcacagagatgtcaaaggtgccaatttgctaatt

SEQ ID NO: 103657 - DNA, 120 bp, Artificial Sequence
  ENSG00000095015_34 (sequence is synthesized)
gacagcactggtcagagactaagaattgcagattttggagctgcagccaggttggcatcaaaaggaactggtgcaggagagtttcagggacaattactggggacaattgcatttatggca

SEQ ID NO: 103658 - DNA, 120 bp, Artificial Sequence
  ENSG00000095015_35 (sequence is synthesized)
cctgaggtactaagaggtcaacagtatggaaggagctgtgatgtatggagtgttggctgtgctattatagaaatggcttgtgcaaaaccaccatggaatgcagaaaaacactccaatcat

SEQ ID NO: 103659 - DNA, 120 bp, Artificial Sequence
  ENSG00000095015_36 (sequence is synthesized)
cttgctttgatatttaagattgctagtgcaactactgctccatcgatcccttcacatttgtctcctggtttacgagatgtggctcttcgttgtttagaacttcaacctcaggacagacct

SEQ ID NO: 103660 - DNA, 120 bp, Artificial Sequence
  ENSG00000095015_37 (sequence is synthesized)
ccatcaagagagctactgaagcatccagtctttcgtactacatggtagccaattatgcagatcaactacagtagaaacaggatgctcaacaagagaaaaaaaacttgtggggaaccacat

SEQ ID NO: 103661 - DNA, 120 bp, Artificial Sequence
  ENSG00000095015_38 (sequence is synthesized)
tgatattctactggccatgatgccactgaacagctatgaacgaggccagtggggaacccttacctaagtatgtgattgacaaatcatgatctgtacctaagctcagtatgcaaaagccca

SEQ ID NO: 103662 - DNA, 120 bp, Artificial Sequence
  ENSG00000095015_39 (sequence is synthesized)
aactagtgcagaaactgtaaactgtgcctttcaaagaactggccctaggtgaacaggaaaacaatgaagtttgcatgactaaattgcagaagcataattttatttttttggagcactttt

SEQ ID NO: 103663 - DNA, 120 bp, Artificial Sequence
  ENSG00000095015_40 (sequence is synthesized)
tcagcaatattagcggctgaggggctcaggatctattttaatatttcaattattcttccatttcatatagtgatcacaagcagggggttctgcaattccgttcaaattttttgtcactgg

SEQ ID NO: 103664 - DNA, 120 bp, Artificial Sequence
  ENSG00000095015_41 (sequence is synthesized)
ctataaaatcagtatctgcctcttttaggtcagagtatgctatgagtagcaatacatacatatatttttaaaagttgatacttctttatgacccacagttgacctttattttcttaaata

SEQ ID NO: 103665 - DNA, 120 bp, Artificial Sequence
  ENSG00000095015_42 (sequence is synthesized)
ccagggcagttgtggctcattgtgcattttactgttggcccattcatttcgtttttggaaattatggttttgtattttcatgtttatttacattcatttttgtttattcagggaaagctg

SEQ ID NO: 103666 - DNA, 120 bp, Artificial Sequence
  ENSG00000095015_43 (sequence is synthesized)
atctttttttcaaaccagaaaaaaaaaatgaactagatatgaagtagagttcattaaatatcttgctattgtcagagtttttaaaatatagacttaattttgtttttttaaattggaata

SEQ ID NO: 103667 - DNA, 120 bp, Artificial Sequence
  ENSG00000095015_44 (sequence is synthesized)
caataaagtactacctacatttgagtcagtcaccactcttattgtgcaggttaagtacaagttaactaaaaataaactgtcctctctggtgcaactcacaaccaagatcaagattacctt

SEQ ID NO: 103668 - DNA, 120 bp, Artificial Sequence
  ENSG00000095015_45 (sequence is synthesized)
aaaatttatttgaattttttagatgttttggttgtcaaactgtaggaaacttcacaacatttaagtcttactctgtatgtaacaatccatcattcaccttcactactggtagtaacatag

SEQ ID NO: 103669 - DNA, 120 bp, Artificial Sequence
  ENSG00000095015_46 (sequence is synthesized)
agctgccattttccttttaccatgcatcatctctttacagtaggcctggcagatcattttttaaaaagattattcaactaccaatcagtaatgtttttaaacagtacatttgctttgaac

SEQ ID NO: 103670 - DNA, 120 bp, Artificial Sequence
  ENSG00000095015_47 (sequence is synthesized)
ttggaaaatgtgttcagaaagaaaaatggaattgaatttcatttatacactaattccttggattttgcacagttacctaacggttttagtctggagttaaattcagatgcatggaatcct

SEQ ID NO: 103671 - DNA, 120 bp, Artificial Sequence
  ENSG00000095015_48 (sequence is synthesized)
gaaggaaaatggtagctttttaatctttttgtgtgtgtgtgagtcttttaaatcaagtactgattaactattaagtacaactttgagattttagttttaactcttcagaagccagtgtga

SEQ ID NO: 103672 - DNA, 120 bp, Artificial Sequence
  ENSG00000095015_49 (sequence is synthesized)
aatagaattggttattctcaaagactcaggataaactaaataagctatatatagagtacatttaaaatgtacaacacaaattggaaataaaataagttacaagataagtttacagggata

SEQ ID NO: 103673 - DNA, 120 bp, Artificial Sequence
  ENSG00000095015_50 (sequence is synthesized)
tattgcttacaatttttaaaaggcagtttgttttttatgtgaatatgtttcttagtgaaattttacattcctttgttttggaagattggcgatatttgaagagttaaaaatagtacagaa

SEQ ID NO: 103674 - DNA, 87 bp, Artificial Sequence
  ENSG00000095015_51 (sequence is synthesized)
acttagaattttcacaattctaataagattgtttccaagtctctcatgtgcaagctttaaaggatgcactcttgccattttatgtac

SEQ ID NO: 103675 - DNA, 120 bp, Artificial Sequence
  ENSG00000095015_52 (sequence is synthesized)
gtgcaagctttaaaggatgcactcttgccattttatgtactggaagatcattggtcagatgaatactgtgtctgacaaaaatgtaaactgtataaactgaggaacctcagctaatcagta

SEQ ID NO: 103676 - DNA, 120 bp, Artificial Sequence
  ENSG00000095015_53 (sequence is synthesized)
ttactttgtagatcaccatgcccaccacatttcaaactcaaactatctgtagatttcaaaatccattgtgtttgagtttgtttgcagttccctcagcttgctggtaattgtggtgttttg

SEQ ID NO: 103677 - DNA, 120 bp, Artificial Sequence
  ENSG00000095015_54 (sequence is synthesized)
ttttttgttttgttttcaatgcaaatgtgatgtaatattcttattttctttggatcaaagctggactggaaattgtatcgtgtaattatttttgtgttcttaatgttatttggtactcaa

SEQ ID NO: 103678 - DNA, 120 bp, Artificial Sequence
  ENSG00000095015_55 (sequence is synthesized)
gttgtaaataacgtctactactgtttattccagtttctactacctcaggtgtcctatagatttttcttctaccaaagttcactttcacaatgaaattatatttgctgtgtgactatgatt

SEQ ID NO: 103679 - DNA, 120 bp, Artificial Sequence
  ENSG00000095015_56 (sequence is synthesized)
cctaagatttccagggcttaagggctaacttctattagcaccttactgtgtaagcaaatgttacaaaaaaaaaaaaaaaaaatctctgggttaagaaaatttggcttaaatgtatccttt

SEQ ID NO: 103680 - DNA, 120 bp, Artificial Sequence
  ENSG00000095015_57 (sequence is synthesized)
ttggcttaaatgtatcctttgttattttaaatatattgagatattttaattaaaatttttaccccattgaaccgattttatagtatttgtacctattttggtgtttttgtctttatagta

SEQ ID NO: 103681 - DNA, 120 bp, Artificial Sequence
  ENSG00000095015_58 (sequence is synthesized)
gaagtccgtggcccttaaaatacggttttaataatatctttcagacccttattctcgacctttctttgccttggcaatattcaaaaaacaggttttaatagatttacttaacggctgtta

SEQ ID NO: 103682 - DNA, 120 bp, Artificial Sequence
  ENSG00000095015_59 (sequence is synthesized)
ctaataaagaattctggggtaatttatagcagttgttttgtaataaactcaaagtgcacataagaaatttttaaaaatattctctctctattctaaaaggagatgagcatacagaggcag

SEQ ID NO: 103683 - DNA, 120 bp, Artificial Sequence
  ENSG00000095015_60 (sequence is synthesized)
ctcctgtctgtagtggaaggagtttaagcattgttcttctgactcagcttcttctgtcgtgttcataattcttcatgttcatatgtagtaatgatctgttgtcctcttgccacatagttt

SEQ ID NO: 103684 - DNA, 120 bp, Artificial Sequence
  ENSG00000095015_61 (sequence is synthesized)
gctaagagcaaaattctgtgatgggactctgcttcagaatctcacaattctccaaaatatttttgtgctacctggaaaattaagctcattaatgaaataaattagatattaggtagtcca

SEQ ID NO: 103685 - DNA, 120 bp, Artificial Sequence
  ENSG00000095015_62 (sequence is synthesized)
cagaattcctgtttgtaccagttttctccctaaagtaaggaagtagaatctataactacaaaatggccttctctttttcaaatgagtcctatttccaaattaactctgatttattttagg

SEQ ID NO: 103686 - DNA, 120 bp, Artificial Sequence
  ENSG00000095059_0 (sequence is synthesized)
gttccctacttcctgtgctcttgcggagacgcgcgcgtcggggtttaacgcgtttctgggccgccgtaagcccggcctaggggcagctttgactcgagagccggctataggcgcatggaa

SEQ ID NO: 103687 - DNA, 120 bp, Artificial Sequence
  ENSG00000095059_1 (sequence is synthesized)
ggttccctggaacgggaggcgccagcgggggcgctggccgccgtgctaaagcacagctcgacgttgccgcccgaaagcacccaggtccggggctacgacttcaaccgcggtgtgaattac

SEQ ID NO: 103688 - DNA, 120 bp, Artificial Sequence
  ENSG00000095059_2 (sequence is synthesized)
cgcgcactgctggaggccttcggcaccaccggcttccaagcaaccaacttcgggcgcgctgtacagcaagtcaatgccatgatcgagaagaagctggaaccactgtcacaggatgaagac

SEQ ID NO: 103689 - DNA, 120 bp, Artificial Sequence
  ENSG00000095059_3 (sequence is synthesized)
cagcacgcggacctgacccagagccgccgcccacttaccagctgcaccattttcctgggatatacatccaacctcatcagttcaggcatccgtgagaccattcgctaccttgtgcagcac

SEQ ID NO: 103690 - DNA, 120 bp, Artificial Sequence
  ENSG00000095059_4 (sequence is synthesized)
aacatggtggacgtattggtgaccacagctggcggcgtggaggaagacctcatcaagtgcctggcgcccacatacttgggcgagtttagcctcagggggaaggagctccgggagaacggg

SEQ ID NO: 103691 - DNA, 120 bp, Artificial Sequence
  ENSG00000095059_5 (sequence is synthesized)
tgcccaatgagaattactgcaagtttgaggactggctgatgcccattctggaccagatggtgatggagcagaacacagagggtgtaaagtggacgccttctaagatgatcgcccggctgg

SEQ ID NO: 103692 - DNA, 120 bp, Artificial Sequence
  ENSG00000095059_6 (sequence is synthesized)
gcaaggagatcaacaacccagagtccgtgtattactgggcccagaagaaccacatccctgtgtttagtcccgcacttacagacggctcgctgggcgacatgatcttcttccattcctaca

SEQ ID NO: 103693 - DNA, 120 bp, Artificial Sequence
  ENSG00000095059_7 (sequence is synthesized)
agaacccgggcctggtcctggacatcgttgaggacctgaggctcatcaacacacaggccatctttgccaagtgcactgggatgatcattctgggcgggggcgtggtcaagcaccacattg

SEQ ID NO: 103694 - DNA, 120 bp, Artificial Sequence
  ENSG00000095059_8 (sequence is synthesized)
ccaatgccaacctcatgcggaacggggccgactacgctgtttacatcaacacagcccaggagtttgatggctctgactcaggtgcccgaccagacgaggctgtctcctggggcaagatcc

SEQ ID NO: 103695 - DNA, 120 bp, Artificial Sequence
  ENSG00000095059_9 (sequence is synthesized)
gggtggatgcacagcccgtcaaggtctatgctgacgcctccctggtcttccccctgcttgtggctgaaacctttgcccagaagatggatgccttcatgcatgagaagaacgaggactgag

SEQ ID NO: 103696 - DNA, 120 bp, Artificial Sequence
  ENSG00000095059_10 (sequence is synthesized)
cggctgcggtcccaggaaggtcttaccccctcttctatttattaatttgcagacccagcccctcccctactttttggtcagctacgtctctagaataagatggtatctgaagtccttcca

SEQ ID NO: 103697 - DNA, 120 bp, Artificial Sequence
  ENSG00000095059_11 (sequence is synthesized)
actgggcccagaagtcccgcacttacagacggctcgctgggcgacatgatcttcttccattcctacaagaacccgggcctggtcctggacatcgttgagggtgaggcgctagggccacag

SEQ ID NO: 103698 - DNA, 120 bp, Artificial Sequence
  ENSG00000095059_12 (sequence is synthesized)
aatttagatttgcttttcccagcggggaagggaccggatctgaaaggagatgctctctgattcctaaaagggtgggggctggctgggcgcggtggcgcatgcctataatcccagcatttt

SEQ ID NO: 103699 - DNA, 120 bp, Artificial Sequence
  ENSG00000095059_13 (sequence is synthesized)
aggatccctgctccccgggactgatgttctagtaggggagatagcaaacaagtgacatccacgtcagggggcagtcattgctacggggaatactaaatgatggcatgagaagagaaaggg

SEQ ID NO: 103700 - DNA, 120 bp, Artificial Sequence
  ENSG00000095059_14 (sequence is synthesized)
gtgctgtccaacaagaggttttggaaggaggcttctggaagtgtgagctgggagcaggggtttggggaggcatctcccaggagctatgtggttgtctcccgtgccaggagtttgtgctgc

SEQ ID NO: 103701 - DNA, 120 bp, Artificial Sequence
  ENSG00000095059_15 (sequence is synthesized)
agcagaggaatagaatcaagttttgttttgtagcagagctccctcataagagtcactggacaaggatgaggttagaagttctgcccagaatgagggcaggggcttccttcttgggccaaa

SEQ ID NO: 103702 - DNA, 120 bp, Artificial Sequence
  ENSG00000095059_16 (sequence is synthesized)
ggtacctggtgaggggaaggtggagtggtgagggccaggaggtgatgcagggaggtgccacagggagcctgctgggccctgtgggctgaggcggggctttggcttttgcactgagagaag

SEQ ID NO: 103703 - DNA, 120 bp, Artificial Sequence
  ENSG00000095059_17 (sequence is synthesized)
tgggagaggacttgactcgggttcccatgctccccctggtggccatgtggtgaacagatggtggcaggtgagtgagaactccagtccaggacagtggtgaccatgcagggatcaggaggc

SEQ ID NO: 103704 - DNA, 120 bp, Artificial Sequence
  ENSG00000095059_18 (sequence is synthesized)
gtggttggatttggagggcttctgaagatagagttgctggcagctcctgccttgcagatggggcagggttgttgacacctggctgttgggtctggggaaacacagccatcgttgcccagc

SEQ ID NO: 103705 - DNA, 120 bp, Artificial Sequence
  ENSG00000095059_19 (sequence is synthesized)
agctctagtgaccccagacattgacatgggccctgtctgggagcgaatgtctgtgaagggcttccttcatctgggacacacctctcagcctgtttggctacggtgtcctccctctgtgtc

SEQ ID NO: 103706 - DNA, 120 bp, Artificial Sequence
  ENSG00000095066_0 (sequence is synthesized)
gctcgctggtggcggacccggaggctgctgcggcgccggggctccgtggcctggattgaatccgatcgggagccatgagcgtggacaaagctgagctatgcgggtctctgctcacctggt

SEQ ID NO: 103707 - DNA, 120 bp, Artificial Sequence
  ENSG00000095066_1 (sequence is synthesized)
tacagacgttccacgttccgtctccctgtgccagccctcaggacctgagcagcggccttgccgtagcctatgtgctgaaccagatagacccctcctggttcaacgaggcatggctccagg

SEQ ID NO: 103708 - DNA, 120 bp, Artificial Sequence
  ENSG00000095066_2 (sequence is synthesized)
gcatctcggaagatccaggtcccaactggaagctgaaggtcagcaatctgaagatggtcttacggagcctagtagagtactcccaggatgtcctggcgcatcctgtgtcagaagagcatc

SEQ ID NO: 103709 - DNA, 120 bp, Artificial Sequence
  ENSG00000095066_3 (sequence is synthesized)
tcccagatgtgagcctcattggagagttctcagacccggcagagctcggcaagctgcttcagctggtgctgggctgtgccatcagttgcgagaaaaagcaggaccacatccagagaatca

SEQ ID NO: 103710 - DNA, 120 bp, Artificial Sequence
  ENSG00000095066_4 (sequence is synthesized)
tgacgctggaagaatcggttcagcatgtggtgatggaagccatccaagagctcatgaccaaagacactcctgactccctgtcaccagagacgtatggcaactttgacagccagtcccgca

SEQ ID NO: 103711 - DNA, 120 bp, Artificial Sequence
  ENSG00000095066_5 (sequence is synthesized)
ggtactatttcctaagtgaggaggctgaggagggggacgaattacagcagcgctgtctggatctggagcggcagctgatgctcctgtcagaggagaagcagagcctggcgcaagagaatg

SEQ ID NO: 103712 - DNA, 120 bp, Artificial Sequence
  ENSG00000095066_6 (sequence is synthesized)
cagggctgcgggagcggatgggccggcctgaaggcgagggtaccccaggtctcactgccaagaagctgctgctgctgcaatcccagctggagcagttgcaggaggagaacttcaggctgg

SEQ ID NO: 103713 - DNA, 120 bp, Artificial Sequence
  ENSG00000095066_7 (sequence is synthesized)
agagtggcagggaggatgagcgcctgcgctgtgccgagctggagagggaggttgcggagctgcagcaccggaaccaggcgctgactagcctggcccaggaggcacaggccctgaaggatg

SEQ ID NO: 103714 - DNA, 120 bp, Artificial Sequence
  ENSG00000095066_8 (sequence is synthesized)
agatggatgaactacggcagtcttcggagcgtgctgggcagctggaggccacgctgaccagttgccggcgccgcttgggcgagctgagggagctgcggcggcaggtgcggcagctggagg

SEQ ID NO: 103715 - DNA, 120 bp, Artificial Sequence
  ENSG00000095066_9 (sequence is synthesized)
aacgcaacgccggccacgccgagcgcacgcgacaactggaggatgagctacgccgagcgggctccctgcgcgcccagctggaggcgcagcggcggcaggtgcaggaactgcagggccagc

SEQ ID NO: 103716 - DNA, 120 bp, Artificial Sequence
  ENSG00000095066_10 (sequence is synthesized)
ttgcgggaggccaatgaggagctgcgctgcgcccagctgcagccgcgggggttgacccaggccgatccctcactggatcccacctccacacccgtggataacttagccgcagagatcctg

SEQ ID NO: 103717 - DNA, 120 bp, Artificial Sequence
  ENSG00000095066_11 (sequence is synthesized)
cctgcggagctcagggagacgctcctgcggcttcagctggagaacaagcggctgtgcaggcaggaggcggccgaccgggagcggcaggaggagctgcagcgccacctggaggatgccaac

SEQ ID NO: 103718 - DNA, 120 bp, Artificial Sequence
  ENSG00000095066_12 (sequence is synthesized)
cgcgcgcgccacgggttggagacgcagcaccggctgaaccagcagcagctatccgagctgcgggcccaggtggaggacctgcagaaagccctgcaggagcaggggggcaagactgaagat

SEQ ID NO: 103719 - DNA, 120 bp, Artificial Sequence
  ENSG00000095066_13 (sequence is synthesized)
gccatttccattttgctgaaaaggaagctggaggaacatttgcagaagcttcatgaggcagatctggagttgcagaggaagcgggagtacattgaggagctggagccacccactgacagc

SEQ ID NO: 103720 - DNA, 120 bp, Artificial Sequence
  ENSG00000095066_14 (sequence is synthesized)
agcacagcccggcggatcgaggagctgcagcataacttgcagaagaaggacgcggacttgcgggccatggaggagcgataccgccgctacgtggacaaggcccgcatggtcatgcagacc

SEQ ID NO: 103721 - DNA, 120 bp, Artificial Sequence
  ENSG00000095066_15 (sequence is synthesized)
atggaacccaagcagcggccagctgcgggggcacctccagaactccattccctgaggacacagctccgagaacgggatgtccgcatccgacacctggagatggactttgagaaaagccga

SEQ ID NO: 103722 - DNA, 120 bp, Artificial Sequence
  ENSG00000095066_16 (sequence is synthesized)
agtcagcgggagcaggaagaaaagctgctcatcagtgcctggtataatatgggcatggccttgcagcagcgagctggggaggagcgggcgcctgcccatgcccagtcattcctggcacag

SEQ ID NO: 103723 - DNA, 120 bp, Artificial Sequence
  ENSG00000095066_17 (sequence is synthesized)
cagcggctggcaaccaattctcgccgtggacccttgggacgcctggcatctctgaaccttcgccccactgacaagcactgacagacctcacaatcaagccagcctgggctccacccaccc

SEQ ID NO: 103724 - DNA, 120 bp, Artificial Sequence
  ENSG00000095066_18 (sequence is synthesized)
tggcttcctccagctcacatggcgcccagcactgggcttcagccaggtgctcgagagctttgaggccatgatctctgctcttccctctcccagattggtggggagggagggcgggaggta

SEQ ID NO: 103725 - DNA, 120 bp, Artificial Sequence
  ENSG00000095066_19 (sequence is synthesized)
gatataggcctgttctttttagcaatgtgattcttgttgttgattctctctctggagttcatgtgctgcctcaggagactctgattttatatttgagaaaaataaaggcgttcaatctgc

SEQ ID NO: 103726 - DNA, 120 bp, Artificial Sequence
  ENSG00000095066_20 (sequence is synthesized)
agggacagatgtctggtgatcaaccatttgttcatccattcatctatggagtactcaccctgtgccaggcctgggcattcagcaaggaataacacagacaaaaacctgccccacacagcc

SEQ ID NO: 103727 - DNA, 86 bp, Artificial Sequence
  ENSG00000095066_21 (sequence is synthesized)
agcaaggaataacacagacaaaaacctgccccacacagccatcattctagtgacaagcaacacatacacaaccataaaaattaact

SEQ ID NO: 103728 - DNA, 120 bp, Artificial Sequence
  ENSG00000095066_22 (sequence is synthesized)
gctcccaggggctggagtctggaaaaccacgcgggaggaggttgtggggatatggacgagcatccgaggcccccgggtgcgtacggctgcgcatgagtgggctgtaatcgggtgtctggg

SEQ ID NO: 103729 - DNA, 120 bp, Artificial Sequence
  ENSG00000095066_23 (sequence is synthesized)
ccattccctgaggacacagctccgagaacgggatgtccgcatccgacacctggaggtgggtgtcctcgtccctttacgctgcctccaacgtatctaggcccctgacacttgcctccttga

SEQ ID NO: 103730 - DNA, 120 bp, Artificial Sequence
  ENSG00000095066_24 (sequence is synthesized)
aaaaaaaaaaaaaagaaacaaagatggtcaggcagacaaaaggggcagacagccagacaggtcacccctagaggaaggcgcacgcagacagaataggatgagatgagcagggaaggagaa

SEQ ID NO: 103731 - DNA, 120 bp, Artificial Sequence
  ENSG00000095066_25 (sequence is synthesized)
aaggagaagtgaggtggagagaggatgggacctacagattcagagtgggaggcctctgaacttgtccacagttccttgttcctccctaggtcagcaatctgaagatggtcttacggagcc

SEQ ID NO: 103732 - DNA, 120 bp, Artificial Sequence
  ENSG00000095066_26 (sequence is synthesized)
gagactccatctcaaacaaacaaaaagccaaaactaaccaaacaaacaaacaaaaaaaccccgaaaaactgtcccatcctagttcttcccatttctgcttcccgctttccagcagtccca

SEQ ID NO: 103733 - DNA, 120 bp, Artificial Sequence
  ENSG00000095066_27 (sequence is synthesized)
tcccagctgttcgaatccactcttgtagctccgcccctgcctagccccacccactatcccagcttagagctccgtccactttaaccctgggccgggaacctgaacccgtagtaggtcctc

SEQ ID NO: 103734 - DNA, 120 bp, Artificial Sequence
  ENSG00000095066_28 (sequence is synthesized)
ggtgctccaaccccatggtctggctgggctcttccccagggctctgtcccgcccctagctccactctccctgagccccagcgagcctgcgaggtgactcgaccctggccctgctctctcc

SEQ ID NO: 103735 - DNA, 120 bp, Artificial Sequence
  ENSG00000095066_29 (sequence is synthesized)
ccctcccttgtgccccgaagtaaccctcctctctctcccatgctgcccgatgccccatacaggccattgtaagtaccatgggcccaggatggcaccccctaccctcaccctgggaaggaa

SEQ ID NO: 103736 - DNA, 120 bp, Artificial Sequence
  ENSG00000095066_30 (sequence is synthesized)
gaattagggcctctctggatcccccactcaccttgcctcttctctctcccagtccattttgctgaaaaggaagctggaggaacatttgtaagtcgcagaaagagggaactcctcgtgggg

SEQ ID NO: 103737 - DNA, 120 bp, Artificial Sequence
  ENSG00000095066_31 (sequence is synthesized)
ggcatgagccaccgcgcctggcctgctttcttttcttttacctgtctgctattgaagagatttgtattctagaaagatccctggctgctggatggagtgcttgagagtagaagaagctag

SEQ ID NO: 103738 - DNA, 120 bp, Artificial Sequence
  ENSG00000095066_32 (sequence is synthesized)
ttgagagtagaagaagctagcaagggaagatggtggctgaaccagcttgggagctgtgggatgggaagaagtggacagcaggggctgttccggggcatacctgctaagggtgcggagggt

SEQ ID NO: 103739 - DNA, 120 bp, Artificial Sequence
  ENSG00000095066_33 (sequence is synthesized)
tgtggctctgacagctgtggagccggtgggaccagggcacacagccccaggcatgaggggcaggcagagagggctctgtggccatgtaggggcatttctggctggcggggaggtctgtgg

SEQ ID NO: 103740 - DNA, 120 bp, Artificial Sequence
  ENSG00000095066_34 (sequence is synthesized)
cctgtcataccccaccataagacagacttctgcatgattccccactgctactgattgtcacattaaaatactgcacagctggctgggtgccgtggctcatggctgtaatcccagcacttt

SEQ ID NO: 103741 - DNA, 120 bp, Artificial Sequence
  ENSG00000095066_35 (sequence is synthesized)
catctcggaagatccaggtcccaactggaagctgaaggtgacaagtggactcctgattagaggacagactggtgaagagatgaccagggacgggccagctaggcacatgtcctgggtgat

SEQ ID NO: 103742 - DNA, 120 bp, Artificial Sequence
  ENSG00000095066_36 (sequence is synthesized)
aaaagaaaaaacttttgatgccagtagttctgtgaagacaacaaaaaagcagggctttgagagagagcaatgagggcataggtggctgattacatcagatgggttaatctccaagtgaaa

SEQ ID NO: 103743 - DNA, 120 bp, Artificial Sequence
  ENSG00000095066_37 (sequence is synthesized)
ctttgatgcgctcttggtcttccatgttgatgggggacaccggcggcgtggcgtcccggctgcgcgcctccggcacggtctgcggttcctccttgaaggtggaggcgccgcggcccaagc

SEQ ID NO: 103744 - DNA, 120 bp, Artificial Sequence
  ENSG00000095066_38 (sequence is synthesized)
ccagctgcgccgggtggccaccggcgaagggcggcgcgtgtgggaggtagctgatggtggtcgtcgggtacgagctcccggtcccgacggcagccccggcgcctcccgaggacgcagagg

SEQ ID NO: 103745 - DNA, 120 bp, Artificial Sequence
  ENSG00000095110_0 (sequence is synthesized)
atgtcctcaaatacaatgcttcaaaaaacgctgctgatcttgatctctttttcagtagtaacctggatgatttttataatttctcagaacttcacaaagctttggtctgctctaaactta

SEQ ID NO: 103746 - DNA, 120 bp, Artificial Sequence
  ENSG00000095110_1 (sequence is synthesized)
tccatctctgtccattactggaacaactccgcaaagtccttattccctaaaacatcactgataccattaaagccactaacagagactgaactcagaataaaggaaatcatagagaaacta

SEQ ID NO: 103747 - DNA, 120 bp, Artificial Sequence
  ENSG00000095110_2 (sequence is synthesized)
gatcagcagatcccacccagacctttcacccatgtgaacaccaccaccagtgccacacacagcacagccaccatcctcaaccctcgagatacatactgcaggggagaccagctggacatc

SEQ ID NO: 103748 - DNA, 120 bp, Artificial Sequence
  ENSG00000095110_3 (sequence is synthesized)
ctactggaggtgagggaccacttgggacagaggaagcaatatggtggggatttcctgagggccaggatgtcctccccagcactgacggcaggtgcttcaggaaaggtgatggacttcaac

SEQ ID NO: 103749 - DNA, 120 bp, Artificial Sequence
  ENSG00000095110_4 (sequence is synthesized)
aatggcacctacctggtcagcttcactctgttctgggagggccaggtctccctgtctctgctgctcatccaccccagtgaaggggcgtcggctctctggagggcaaggaaccaaggctat

SEQ ID NO: 103750 - DNA, 120 bp, Artificial Sequence
  ENSG00000095110_5 (sequence is synthesized)
gataaaattattttcaaaggcaaatttgttaatggcacctctcatgtcttcactgaatgtggcctgaccctaaactcaaatgctgaactctgtgaatatctggatgacagagaccaagaa

SEQ ID NO: 103751 - DNA, 120 bp, Artificial Sequence
  ENSG00000095110_6 (sequence is synthesized)
gccttctattgtatgaagcctcaacacatgccctgtgaggctctgacctacatgaccacccggaatagagaggtatcttatcttacagacaaggaaaacagccttttccacaggtccaaa

SEQ ID NO: 103752 - DNA, 120 bp, Artificial Sequence
  ENSG00000095110_7 (sequence is synthesized)
cctcctgtccctggtggttatactttacaaggaaaatggataacaacattttgcaaccaggttcagttagacacaattaagataaatggctgtttgaaaggcaaactcatttacctcctg

SEQ ID NO: 103753 - DNA, 120 bp, Artificial Sequence
  ENSG00000095110_8 (sequence is synthesized)
ggagactctacactacgtcagtggatctactacttccccaaagttgtaaaaacactgaagttttttgatcttcatgaaactggaatctttaagaaacatttgcttctggatgcagaaaga

SEQ ID NO: 103754 - DNA, 120 bp, Artificial Sequence
  ENSG00000095110_9 (sequence is synthesized)
cacactcagattcaatggaaaaaacatagctatcccttcgtcactttccagctctactctctgatagatcatgattatatccctcgggaaattgaccggctatcaggtgacaaaaacaca

SEQ ID NO: 103755 - DNA, 120 bp, Artificial Sequence
  ENSG00000095110_10 (sequence is synthesized)
gccatcgtcatcacctttggccagcactttagaccatttcccattgacatttttattcgcagggccatcggtgttcaaaaggctattgaaagactgttcctaagaagcccagccactaaa

SEQ ID NO: 103756 - DNA, 120 bp, Artificial Sequence
  ENSG00000095110_11 (sequence is synthesized)
gtgattattaagacagaaaacatcagggagatgcacatagagacagagaggtttggagacttccatggttatattcactatcttatcatgaaggatattttcaaagacctcaacgtgggc

SEQ ID NO: 103757 - DNA, 120 bp, Artificial Sequence
  ENSG00000095110_12 (sequence is synthesized)
atcattgatgcctgggacatgaccattgcatatggcactgacactatccacccacctgatcatgtgattggaaatcagattaacatgttcttaaactacatttgctaagggataaatact

SEQ ID NO: 103758 - DNA, 120 bp, Artificial Sequence
  ENSG00000095110_13 (sequence is synthesized)
atacaaaatcactaggaaccaatctctgcacataatcccacatgtattgtaaagtaagttttactcattttaggaactaaggaaaataaatttaaaagaatctgtttggggaggaaggct

SEQ ID NO: 103759 - DNA, 120 bp, Artificial Sequence
  ENSG00000095110_14 (sequence is synthesized)
atgtaaggacaatgacaactgataagggatgcaaaaccaagagaatcattcatgaagaatgactataccatgcctggttctgatgctcgtttaaaatattaaaaaagttttttaaaagcc

SEQ ID NO: 103760 - DNA, 120 bp, Artificial Sequence
  ENSG00000095110_15 (sequence is synthesized)
cagacaaggaacaaaaacattttacacagccacaagagccagttaagaactcacaggtacttttccagccacccagataggagagatcattaaaacagtgcattctgtgctacctgacac

SEQ ID NO: 103761 - DNA, 120 bp, Artificial Sequence
  ENSG00000095110_16 (sequence is synthesized)
ctattggtatctaaattgctctgcgcatccagattcaaaacacagaactttttggattccacaaaacgaaaccactcacacaaaacctttcacacaattgagacttcactgaggatttgg

SEQ ID NO: 103762 - DNA, 120 bp, Artificial Sequence
  ENSG00000095110_17 (sequence is synthesized)
aggctgctgccccctctcatttacacaagtaggaagaggaaagagaacctggaggaggtatggcacacatggcctctgcttacatatcagagaactcagtgtcctggccacagtcaaata

SEQ ID NO: 103763 - DNA, 120 bp, Artificial Sequence
  ENSG00000095110_18 (sequence is synthesized)
caatagaggccaggaaaggttgtgtatctcggctaacacatgtccagctacaagtttctattacagctgatgaaagagacaactagcgggctctgtacattgattcaatcctgtctgagg

SEQ ID NO: 103764 - DNA, 120 bp, Artificial Sequence
  ENSG00000095110_19 (sequence is synthesized)
atgaccatatagaagcataaggagaggagacaagtgagtcagatagtggccaagtttctgatttgggataccattcacaaagatggggagaagaaaaagtagaagacatttggaagaaga

SEQ ID NO: 103765 - DNA, 120 bp, Artificial Sequence
  ENSG00000095110_20 (sequence is synthesized)
aaaaacattgcaattggacaagttgactttgagattcctatgagcaggggtatactgacaaacctgctctcccagaaaacaaaaacaaaaatcctgtttatagcctttgatgacttccac

SEQ ID NO: 103766 - DNA, 120 bp, Artificial Sequence
  ENSG00000095110_21 (sequence is synthesized)
gatctaaatgtacccatcatggcctatttcaagctaccaagatgatgtcactgaatgagcagttggaaagaaatgtgcatgaataggctttcataagccagcaaaggctgggttcagctc

SEQ ID NO: 103767 - DNA, 120 bp, Artificial Sequence
  ENSG00000095110_22 (sequence is synthesized)
caaagtgggagttgaaatgatgaaggatcgtaaacacattgatgtcactaattgtaacacaaagtcatcatggacttcttcaataggccaatggggtgagcatattgtggaatgcagcag

SEQ ID NO: 103768 - DNA, 120 bp, Artificial Sequence
  ENSG00000095110_23 (sequence is synthesized)
aggataagcctagaaagagaggaagaacctaatcatgaaggttctcaagtgtcatgctgaggatttcagtgattattcagtagacttgaaagccacagaaaccaactgaggaagagagtg

SEQ ID NO: 103769 - DNA, 120 bp, Artificial Sequence
  ENSG00000095110_24 (sequence is synthesized)
tcatcacctctgtggtctaagctaggctgctgccccctctcatttacacaagtaggaagaggaaagagaacctggaggagtgcattctgtgctacctgacacctattggggtcctggaag

SEQ ID NO: 103770 - DNA, 120 bp, Artificial Sequence
  ENSG00000095110_25 (sequence is synthesized)
aggccaaagtttgcattttcactatattgtcccattcagtcatgtgttttgctataaccgttcttctatgtgttcacagatgttccactgaaaaaaagattccttgataagtgtatgata

SEQ ID NO: 103771 - DNA, 120 bp, Artificial Sequence
  ENSG00000095110_26 (sequence is synthesized)
acatccatgctccttcacctcccatatcatattttgttaattttgccccttaaatatctttgcgttgatccatttccccccacgcacagtgctgctattcaagttcagaccatcatcatc

SEQ ID NO: 103772 - DNA, 120 bp, Artificial Sequence
  ENSG00000095110_27 (sequence is synthesized)
ttatctagattacccataccagcttcccaactggtctctctcccagcagtcataccctctctaatccattctctacactgagtgatctttctaaaaagccaattcctactggttttctcc

SEQ ID NO: 103773 - DNA, 120 bp, Artificial Sequence
  ENSG00000095110_28 (sequence is synthesized)
agttgatcccatgatcagatattcctcagtatatacctctcagggtggaggagtccttcttactcctcatgttgtgacctagtgattcctgcaaacccctggttcaacaggcctccacaa

SEQ ID NO: 103774 - DNA, 120 bp, Artificial Sequence
  ENSG00000095110_29 (sequence is synthesized)
actgggatggaagcatgtttcctctatcaatcatggctgtggcaatgccatgcttttctcccccgactcacagaggctcacttcctggtttccctgttatccactaacctgaaaaccact

SEQ ID NO: 103775 - DNA, 120 bp, Artificial Sequence
  ENSG00000095110_30 (sequence is synthesized)
ttgttgattagaatgaaacatcagggttccttcatgggctactttgaggatttgcaaaggataactatctgttatcacaaatcccagaactgtgagccaagccctaagacttctatcagt

SEQ ID NO: 103776 - DNA, 120 bp, Artificial Sequence
  ENSG00000095110_31 (sequence is synthesized)
tccagagacttttgctcatttgctaactttgcataagtctcagaggctcagtccatttccttttctctttcaattctgccagtacccttttattttcccccacgaagatttatttttcct

SEQ ID NO: 103777 - DNA, 120 bp, Artificial Sequence
  ENSG00000095110_32 (sequence is synthesized)
cagcttggtgacagagtagaatgctaggttcacagaaatccctttctagcagttttcaaagtcaagtttagagtcttttttccataagctttcaaaaaaaatatgctaagagtaggcacc

SEQ ID NO: 103778 - DNA, 120 bp, Artificial Sequence
  ENSG00000095110_33 (sequence is synthesized)
aaacatgacaaaataacatgcattccagaatcttacctcattatccaagttttggctcctgatctatagtccctggctcccttctgaaaagtaaaagcacagttaagtttctgttccctc

SEQ ID NO: 103779 - DNA, 120 bp, Artificial Sequence
  ENSG00000095110_34 (sequence is synthesized)
tctgatggtacatctcatcaaatctcttcctacccatcaaccatccttatgcctaaatcctagtaaggatgaaaacatgctgatcctttctcttctcaggatggcacctggagagacatc

SEQ ID NO: 103780 - DNA, 120 bp, Artificial Sequence
  ENSG00000095139_0 (sequence is synthesized)
atcttggcaagaggcgaagcggcagcggttcctgtcaagggggcagcaggtccagagctgctggtgctcccgttccccagaccctacccctatccccagtggagccggagtgcgggcgcg

SEQ ID NO: 103781 - DNA, 120 bp, Artificial Sequence
  ENSG00000095139_1 (sequence is synthesized)
ccccaccaccgccctcaccatggtgctgttggcagcagcggtctgcacaaaagcaggaaaggctattgtttctcgacagtttgtggaaatgacccgaactcggattgagggcttattagc

SEQ ID NO: 103782 - DNA, 120 bp, Artificial Sequence
  ENSG00000095139_2 (sequence is synthesized)
agcttttccaaagctcatgaacactggaaaacaacatacgtttgttgaaacagagagtgtaagatatgtctaccagcctatggagaaactgtatatggtactgatcactaccaaaaacag

SEQ ID NO: 103783 - DNA, 120 bp, Artificial Sequence
  ENSG00000095139_3 (sequence is synthesized)
caacattttagaagatttggagaccctaaggctcttctcaagagtgatccctgaatattgccgagccttagaagagaatgaaatatctgagcactgttttgatttgatttttgcttttga

SEQ ID NO: 103784 - DNA, 120 bp, Artificial Sequence
  ENSG00000095139_4 (sequence is synthesized)
tgaaattgtcgcactgggataccgggagaatgttaacttggcacagatcagaaccttcacagaaatggattctcatgaggagaaggtgttcagagccgtcagagagactcaagaacgtga

SEQ ID NO: 103785 - DNA, 120 bp, Artificial Sequence
  ENSG00000095139_5 (sequence is synthesized)
agctaaggctgagatgcgtcgtaaagcaaaggaattacaacaggcccgaagagatgcagagagacagggcaaaaaagcaccaggatttggcggatttggcagctctgcagtatctggagg

SEQ ID NO: 103786 - DNA, 120 bp, Artificial Sequence
  ENSG00000095139_6 (sequence is synthesized)
cagcacagctgccatgatcacagagaccatcattgaaactgataaaccaaaagtggcacctgcaccagccaggccttcaggccccagcaaggctttaaaacttggagccaaaggaaagga

SEQ ID NO: 103787 - DNA, 120 bp, Artificial Sequence
  ENSG00000095139_7 (sequence is synthesized)
agtagataactttgtggacaaattaaaatctgaaggtgaaaccatcatgtcctctagtatgggcaagcgtacttctgaagcaaccaaaatgcatgctccacccattaatatggaaagtgt

SEQ ID NO: 103788 - DNA, 120 bp, Artificial Sequence
  ENSG00000095139_8 (sequence is synthesized)
acatatgaagattgaagaaaagataacattaacctgtggacgagacggaggattacagaatatggagttgcatggcatgatcatgcttaggatctcagatgacaagtatggccgaattcg

SEQ ID NO: 103789 - DNA, 120 bp, Artificial Sequence
  ENSG00000095139_9 (sequence is synthesized)
tcttcatgtggaaaatgaagataagaaaggggtgcagctacagacccatccaaatgtggataaaaaacttttcactgcagagtctctaattggcctgaagaatccagagaagtcatttcc

SEQ ID NO: 103790 - DNA, 120 bp, Artificial Sequence
  ENSG00000095139_10 (sequence is synthesized)
agtcaacagtgacgtaggggtgctaaagtggagactacaaaccacagaggaatcttttattccactgacaattaattgctggccctcggagagtggaaatggctgtgatgtcaacataga

SEQ ID NO: 103791 - DNA, 120 bp, Artificial Sequence
  ENSG00000095139_11 (sequence is synthesized)
atatgagctacaagaagataatttagaactgaatgatgtggttatcaccatcccactcccgtctggtgtcggcgcgcctgttatcggtgagatcgatggggagtatcgacatgacagtcg

SEQ ID NO: 103792 - DNA, 120 bp, Artificial Sequence
  ENSG00000095139_12 (sequence is synthesized)
acgaaataccctggagtggtgcctgcctgtgattgatgccaaaaataagagtggcagcctggagtttagcattgctgggcagcccaatgacttcttccctgttcaagtttcctttgtctc

SEQ ID NO: 103793 - DNA, 120 bp, Artificial Sequence
  ENSG00000095139_13 (sequence is synthesized)
caagaaaaattactgtaacatacaggttaccaaagtgacccaggtagatggaaacagccccgtcaggttttccacagagaccactttcctagtggataagtatgaaattctgtaatacca

SEQ ID NO: 103794 - DNA, 120 bp, Artificial Sequence
  ENSG00000095139_14 (sequence is synthesized)
agaagagggagctgaaaaggaaaattttcagattaataaagaagacgccaatgatggctgaagagtttttcccagatttacaagccactggagaccccttttttctgatacaatgcacga

SEQ ID NO: 103795 - DNA, 120 bp, Artificial Sequence
  ENSG00000095139_15 (sequence is synthesized)
ttctctgcgcgcaaggaccctcgactcacccccatgtttcagtgtcacagagacattctttgataaggaaatggcacaaacataaagggaaaggctgctaattttctttggcagattgta

SEQ ID NO: 103796 - DNA, 88 bp, Artificial Sequence
  ENSG00000095139_16 (sequence is synthesized)
attgtattggccagcaggaaagcaagctctccagagaatgcccccagttaaatacctcctctacctttacctaagttgctcctttatt

SEQ ID NO: 103797 - DNA, 120 bp, Artificial Sequence
  ENSG00000095139_17 (sequence is synthesized)
gcccagctgctcctttattttaatccctaaatataatccctaaatatagttatatttcatacttagtttgtttttaaaaagttttctctgtagaaaattttaatcattcataccctttac

SEQ ID NO: 103798 - DNA, 120 bp, Artificial Sequence
  ENSG00000095139_18 (sequence is synthesized)
ctttaggtttttctttctatacattcagtcaggcactgggatcatctgtttacaggcattatatttatttggcactcctggaacaagtatatctaacccattcttgatttttggactatt

SEQ ID NO: 103799 - DNA, 120 bp, Artificial Sequence
  ENSG00000095139_19 (sequence is synthesized)
caggtgaactatttgaggggtatggggtctagaagttaaaagatacgcatgtcttctgttcttttcccgtatcaattcattccttcatctctttgccaagttgttttcctttcagggcct

SEQ ID NO: 103800 - DNA, 120 bp, Artificial Sequence
  ENSG00000095139_20 (sequence is synthesized)
gtccttccagtttagaacagtaccatgaatcccacttgtgtcaatattaaagatagctgagaagcacctttcaaatggcacagtccctcttcaagatgtctaaaagaatggttatgtctg

SEQ ID NO: 103801 - DNA, 120 bp, Artificial Sequence
  ENSG00000095139_21 (sequence is synthesized)
tccagttagggatttcacatccacatgtaatcatgtctgctgctgttgctacccaaattttcatttctccacattttgggtacttaagctaaaacgtaatggccacagtctgtaatccat

SEQ ID NO: 103802 - DNA, 120 bp, Artificial Sequence
  ENSG00000095139_22 (sequence is synthesized)
tcacattcctcagtttcaccacctccctcttccagactgcactctctgtcatcagtcccctcctttctaacagaaatggggttatgattttgaaggctgtgggttcagggagtctttgcc

SEQ ID NO: 103803 - DNA, 120 bp, Artificial Sequence
  ENSG00000095139_23 (sequence is synthesized)
aatcctgttggccctaaactatcaaggaggctccatttcaccatttgattttttgcatttcaggaggcaactgattgtttcgatatgtacatattactcacgtataccccatttccttcc

SEQ ID NO: 103804 - DNA, 120 bp, Artificial Sequence
  ENSG00000095139_24 (sequence is synthesized)
agtcagcccaacattttccaccagtctgtccccatctctgaaatccttccttctctttccccctaagtcttttgagtgtcatcatgtactggtggtttctcggttccatctcatccattt

SEQ ID NO: 103805 - DNA, 120 bp, Artificial Sequence
  ENSG00000095139_25 (sequence is synthesized)
ccttttcaatggagactacagcgtcagccagctcagccttggcttttaactcaatattccagtccataggggtggttaaaagttgctgcaaggctgcaggcactggcagtgggaagaggc

SEQ ID NO: 103806 - DNA, 120 bp, Artificial Sequence
  ENSG00000095139_26 (sequence is synthesized)
agacgactagatgacttctgcacttttagctggttgaaaagtaccactcccactctgaacatctggccgtccctgcaaagagtgtactgtgcttgaagcagagcactcacacataaatgg

SEQ ID NO: 103807 - DNA, 120 bp, Artificial Sequence
  ENSG00000095139_27 (sequence is synthesized)
ctgtgtgtggaattgcttgccaaagaagtttctagcctttccctttcccctaactgcatcagggaagaattcttatctctagcttggtttccacatgaggtttttctgagaagggcttgg

SEQ ID NO: 103808 - DNA, 120 bp, Artificial Sequence
  ENSG00000095139_28 (sequence is synthesized)
gacaagaagtctgtcatgttagttaagcaggcaagaaatcctactaatccagttttgtttgaaagttgtttgtccgtatgattttttaaaagtcaagtttaatttcaaaaaacctttttt

SEQ ID NO: 103809 - DNA, 120 bp, Artificial Sequence
  ENSG00000095139_29 (sequence is synthesized)
ttctgagattacttttggggtaatatttaaaatgagagacattttgtaaccctgtaaaatacatagggaatataacattccagtgtatacaaagaaggcaaattctttaatcaaataaag

SEQ ID NO: 103810 - DNA, 120 bp, Artificial Sequence
  ENSG00000095139_30 (sequence is synthesized)
cgcattataaaatgagatgtttattggattattgactcactttggtgtctgcttgttgattcaggatgctgtaatgggacctaacattaaaaattaatgacatgttttttttaagagaaa

SEQ ID NO: 103811 - DNA, 120 bp, Artificial Sequence
  ENSG00000095139_31 (sequence is synthesized)
caccatgataacttgatttaaaacatcgtccagtgtacctgagagatggcagaatgtaatttggtggcaatcctaataagttctattgacaaccctttagataagaacttggataatggg

SEQ ID NO: 103812 - DNA, 80 bp, Artificial Sequence
  ENSG00000095203_0 (sequence is synthesized)
agcgcagggggcggaggcagggggcgcccccagccaggatgctgcggttcctgcgccggacctttggccgccgctccatg

SEQ ID NO: 103813 - DNA, 120 bp, Artificial Sequence
  ENSG00000095203_1 (sequence is synthesized)
ccggcggcgcggccgtgcacatctccgccgccggcgccgccaaggccaccctctactgccgcgtcttcctgctcgacgggaccgaagtgagcgtggacctgccgaaacatgccaaaggcc

SEQ ID NO: 103814 - DNA, 120 bp, Artificial Sequence
  ENSG00000095203_2 (sequence is synthesized)
aggatttgtttgatcagattgtgtaccacttggaccttgtggaaacagattactttggcctccagttcctcgactctgcccaggttgcgcactggctggatcatgccaaacccataaaaa

SEQ ID NO: 103815 - DNA, 120 bp, Artificial Sequence
  ENSG00000095203_3 (sequence is synthesized)
agcagatgaaaattggacctgcttatgctttacactttcgagttaaatactattcttcagaaccaaacaaccttcgtgaggagtttacaaggtacctgtttgttttacaactcaggcatg

SEQ ID NO: 103816 - DNA, 120 bp, Artificial Sequence
  ENSG00000095203_4 (sequence is synthesized)
acattctttctggaaaattgaaatgcccttatgaaacagctgtggaattagctgctctctgtctacaagcggagcttggggagtgcgagcttccagaacacacaccagagcttgtgtctg

SEQ ID NO: 103817 - DNA, 120 bp, Artificial Sequence
  ENSG00000095203_5 (sequence is synthesized)
agtttcggttcattccaaatcagacagaagcaatggaatttgatatcttccagagatggaaagagtgcaggggaaagagccctgcccaggcggaactctcctatctgaataaagcgaagt

SEQ ID NO: 103818 - DNA, 120 bp, Artificial Sequence
  ENSG00000095203_6 (sequence is synthesized)
ggctggaaatgtatggggtagacatgcacgttgtcaggggaagagatggctgtgaatattctcttggactgaccccgacaggcatattaatctttgaaggagctaacaaaataggcttat

SEQ ID NO: 103819 - DNA, 120 bp, Artificial Sequence
  ENSG00000095203_7 (sequence is synthesized)
tcttttggcctaaaattaccaaaatggattttaaaaagagcaaattgacactcgtggtggtcgaggatgatgatcagggacgtgagcaagagcacacgtttgtgttccggttagacagtg

SEQ ID NO: 103820 - DNA, 120 bp, Artificial Sequence
  ENSG00000095203_8 (sequence is synthesized)
ccaggacctgcaaacacctttggaagtgtgcagttgagcaccacgcattcttccgactgcggacgccaggaaacagcaaatccaatagatccgactttatcaggctgggctctcgcttca

SEQ ID NO: 103821 - DNA, 120 bp, Artificial Sequence
  ENSG00000095203_9 (sequence is synthesized)
gattcagtgggcggacagaatatcaagctacacatggctccaggttacgaagaaccagcacctttgagaggaagcctagtaaacgttatccatcccggagacattcaacgttcaaagcaa

SEQ ID NO: 103822 - DNA, 120 bp, Artificial Sequence
  ENSG00000095203_10 (sequence is synthesized)
gcaacccagtgatagcagcccagctctgctctaaaacaaatccagaagtccataattaccagcctcaatatcatcctaatatccatcccagccagccccggtggcatcctcactctccaa

SEQ ID NO: 103823 - DNA, 120 bp, Artificial Sequence
  ENSG00000095203_11 (sequence is synthesized)
atgtcagctacccgctcccttccccagtgcttagcagctcggaccggttgccttttggcattgaggagaatgggggcacaccgttcctcaccgcagcttcaggaaggcatcaccaccagc

SEQ ID NO: 103824 - DNA, 120 bp, Artificial Sequence
  ENSG00000095203_12 (sequence is synthesized)
accagcatcagcatcagcaccagcaccactcaaactacagcctctcactgaccctggagaacaaagaggggcctctgaggtccccaaactccagcagcaagtcccttacaaaactgagtc

SEQ ID NO: 103825 - DNA, 120 bp, Artificial Sequence
  ENSG00000095203_13 (sequence is synthesized)
caggaacacctgccttgttcagtgaagccgctgcccatctaaagaagctggaactggaaactgtgaaggctgctggaccctggcctcctctgcacatcaacataaacaaggctgaagaaa

SEQ ID NO: 103826 - DNA, 120 bp, Artificial Sequence
  ENSG00000095203_14 (sequence is synthesized)
agaaagtctcggagaaaactcttcagactccacttttgccttcccctgttgcggatcatgtgaagtgtaacattctgaaagcccagttggaaaatgcttcccgagtgaacatccagggtg

SEQ ID NO: 103827 - DNA, 120 bp, Artificial Sequence
  ENSG00000095203_15 (sequence is synthesized)
gaaaggaggaatcaccgtttgtaaatatcaataagaaatccagtcttcaggacgctagtgtaagaagtcctattcctattcgtgtggaaactgcccagccagctgtggaaaagccggaaa

SEQ ID NO: 103828 - DNA, 120 bp, Artificial Sequence
  ENSG00000095203_16 (sequence is synthesized)
tcaagcctccccgagtgaggaagttaacaagacagtatagttttgatgaagacgacctccctccagacctggccgaggcagtgggagtgaccacatctacaaccacaaacaccacaacgg

SEQ ID NO: 103829 - DNA, 120 bp, Artificial Sequence
  ENSG00000095203_17 (sequence is synthesized)
ccgccacacaagtctccgtgccgctgccgtcccccaaggtccagaatgtcagctcgcctcacaagtcagaaggcaaaggcctgctgtcccctggggccaagagcccctctgaccgaggag

SEQ ID NO: 103830 - DNA, 120 bp, Artificial Sequence
  ENSG00000095203_18 (sequence is synthesized)
gtgcctttaccctggagccgggtgatcttctgatggatttcacagaagccactcctctggcagagcccgccagcaacccccactgtgcccactctcgctgttctcctccactctctctcc

SEQ ID NO: 103831 - DNA, 120 bp, Artificial Sequence
  ENSG00000095203_19 (sequence is synthesized)
aatcaaaacgaggctgataaaaacattcccggttgatacaatgaacccgtttcctgatactttcaccacagggccacagtttactgcagacttcagagacagtaaattacagtgctgtcc

SEQ ID NO: 103832 - DNA, 120 bp, Artificial Sequence
  ENSG00000095203_20 (sequence is synthesized)
tggcccgacttccccgctgatcccagcagcgaccctgaggcctttgacagagaccgtctccacagtgcagaccatttacaccacccggaaacctgtttctctggcagccagtgcagagac

SEQ ID NO: 103833 - DNA, 120 bp, Artificial Sequence
  ENSG00000095203_21 (sequence is synthesized)
actccggcaggaactggagagagagaagatgatgaaaagactgttgatgaccgaactgtgaaattctccccttgtcacctggaagatggcatggtgccttctgtccgtcttctttcttcg

SEQ ID NO: 103834 - DNA, 120 bp, Artificial Sequence
  ENSG00000095203_22 (sequence is synthesized)
ggctttgtgtgctcactctagcacagcatacaagtgtgtgctctgttcgcccaggtctccatggttagttgaagccaatttctggcttgacttttatgggaaaagttattttatgtctcc

SEQ ID NO: 103835 - DNA, 120 bp, Artificial Sequence
  ENSG00000095203_23 (sequence is synthesized)
taagcattagagtttttctattactctatgtagttgagacaggatttgataagtctaggaaaagaaagatgggaaaacgggattccttttcagaagtacctgtgtgtatctgttaataac

SEQ ID NO: 103836 - DNA, 120 bp, Artificial Sequence
  ENSG00000095203_24 (sequence is synthesized)
cacaggggttaatatgatgtaggatcttttactatcaatttcaaccatttgattttgtatgattgaaacttgcaccgagctttgactgtttgttaaagagtcatttttaatgaaagaata

SEQ ID NO: 103837 - DNA, 120 bp, Artificial Sequence
  ENSG00000095203_25 (sequence is synthesized)
attctttattgctggtttttcatttacactgataaatacacagatcttataaagtctttaacattcatttgtattcagatgtgagtagaagaactaaaaaaagaaagttacatatcacta

SEQ ID NO: 103838 - DNA, 120 bp, Artificial Sequence
  ENSG00000095203_26 (sequence is synthesized)
tgactgaaggtacttcagcttaatctgaaatataatttaacttgtgaactccttggatatgatattatttggaataaacagaatttatcattgaacccaaagtaggaaatgatagcttac

SEQ ID NO: 103839 - DNA, 120 bp, Artificial Sequence
  ENSG00000095203_27 (sequence is synthesized)
attgtctaaaaatccttacaaggttaagatgattcaatatcaagaagattcagaaaattatttctaaagttgatcgattcatgtcgtattgatagaatcttgaccagaagaaattttgct

SEQ ID NO: 103840 - DNA, 120 bp, Artificial Sequence
  ENSG00000095203_28 (sequence is synthesized)
ctttttatatagtttcaagaaatgtgtttttaaatttttattaatgcacttgaacaactttgcaggaataaagcaaccccctaaccacaaaatatccctctaaattagttccctagcttt

SEQ ID NO: 103841 - DNA, 120 bp, Artificial Sequence
  ENSG00000095203_29 (sequence is synthesized)
ctcaatgaatacacacatatttttacatagctatgatcgttgtgtacattctcctttgttttacttctcggcctaacacttgtctcctcttgtcaacacagattctactctcaccaattt

SEQ ID NO: 103842 - DNA, 120 bp, Artificial Sequence
  ENSG00000095203_30 (sequence is synthesized)
aaatgtctttatatccatgtaacatgggtaacctcacttcaccccattattagatatttgagttatatctaatttttcactcttataaatagtgctgctatgaatgtctgtaaaaaaaaa

SEQ ID NO: 103843 - DNA, 120 bp, Artificial Sequence
  ENSG00000095203_31 (sequence is synthesized)
aaactgctccttcttttggattattcccttaggaatatctccaaagagggattacaaggtcaaagagcatgaagtattttatagctcttgttttatattgccagattgctttctagaaag

SEQ ID NO: 103844 - DNA, 120 bp, Artificial Sequence
  ENSG00000095203_32 (sequence is synthesized)
atccaatctttgggttggaaggaccttaaaggtcatctagtttagcctccccaccccctctgaatgcttgaatcccctcgacaatttatgatgccaccagcaatgtataagcatttctgt

SEQ ID NO: 103845 - DNA, 120 bp, Artificial Sequence
  ENSG00000095203_33 (sequence is synthesized)
ttaccaatagctctgccagtattgggttttgccatttttatttatttttgctagtttaataggtatgtatagttgttcttgaagagttgttttatttcattaattgctagcaaggctgag

SEQ ID NO: 103846 - DNA, 120 bp, Artificial Sequence
  ENSG00000095203_34 (sequence is synthesized)
cacttttccatgtgatgatttactagttgtatttccttgtgtgtaaaatgttcattcatttcttatgaccacttgttaagaggaactgatctcatatatttgtatcagaactgtattttt

SEQ ID NO: 103847 - DNA, 120 bp, Artificial Sequence
  ENSG00000095203_35 (sequence is synthesized)
atgttatattgtatagtttgctctcctgcccctctccttaaaactgaatggtgccaataatttgatactaatgactacaaaaaaaggtaatgcctcatttactagtattgttgtaaaatg

SEQ ID NO: 103848 - DNA, 120 bp, Artificial Sequence
  ENSG00000095203_36 (sequence is synthesized)
aggaatgtatgtgaatattcagataaccgaggattaaccctttaagtgctgaatctttaaaattttaatatatttttttttgagggaaatctttctaaaatgtattacgcacttccctgc

SEQ ID NO: 103849 - DNA, 120 bp, Artificial Sequence
  ENSG00000095203_37 (sequence is synthesized)
cttagtaaacagagtatactggagagtatttaaccttttcttgatgagtcatggtcatgattataaacatcagccccttttataccttggtacggtgcagtgatatcattaagagctatc

SEQ ID NO: 103850 - DNA, 120 bp, Artificial Sequence
  ENSG00000095203_38 (sequence is synthesized)
aatatgtgtagggcttggcttggccttttataggatattatgctgttctcactgatggttttttactgctctctgctctgtcagtggagctatccggggcaattgtagcgtttgggtcct

SEQ ID NO: 103851 - DNA, 120 bp, Artificial Sequence
  ENSG00000095203_39 (sequence is synthesized)
tttacccctatgtcccccggctatacttttaaaacagctttagctgttctttatcttgtgcacatgatacaaaatatgttcccgtacaatatggggctgtcacttcttgccaacccagca

SEQ ID NO: 103852 - DNA, 120 bp, Artificial Sequence
  ENSG00000095203_40 (sequence is synthesized)
ccctcttcctcttctaacctgctttctgaggcttctgctcttcacctcctgctcgctgatggaaacctccagggcaaagctgaaggtttcttggggaagccaggaaagccagtatttcct

SEQ ID NO: 103853 - DNA, 120 bp, Artificial Sequence
  ENSG00000095203_41 (sequence is synthesized)
atgtgtcagatctgcttggcttccaagaagggatgcatgggctttttggccagtgtttccaggaggctctgggcttcctgcttcttccccgcttcccccagagttcacagatgttgaagt

SEQ ID NO: 103854 - DNA, 120 bp, Artificial Sequence
  ENSG00000095203_42 (sequence is synthesized)
ttctgaaggttgacgtcactggaagtctgaccacaaacaagttggctgttactgtatttgaaacccagtacctttggcagctcacctctaaccagtaaaataagaggattccatggtttc

SEQ ID NO: 103855 - DNA, 120 bp, Artificial Sequence
  ENSG00000095203_43 (sequence is synthesized)
ggccagtggagatgacagccattttgattatgtccacgaccagaaccagaagaacttaggagggatgcaaagtatgatgtatcgagataaactcatgactgcactttgagagactgaagc

SEQ ID NO: 103856 - DNA, 120 bp, Artificial Sequence
  ENSG00000095203_44 (sequence is synthesized)
atctctcttccattcaccttcatagtttcattgcattccatgaaaagtgtcttggcctcagatggatggatgtgtttggacgagtgtctttaaggagtagtcctgaaaggtgtttttggt

SEQ ID NO: 103857 - DNA, 120 bp, Artificial Sequence
  ENSG00000095203_45 (sequence is synthesized)
gtccatgtaaatatttgaagataaaaccactatagcttgtcataatttactgttgactgcattctcattaaaatgaaggtaaaggctcaggaatcatattgatgttctgattttaaaatt

SEQ ID NO: 103858 - DNA, 120 bp, Artificial Sequence
  ENSG00000095203_46 (sequence is synthesized)
ggagtcaaagtctatgtttatcattttactatgttcctgatgttctttgttatttaattaatgggagcaaataaaaccagaagagcttgggaagattgctcagcatatattcctgtcgta

SEQ ID NO: 103859 - DNA, 120 bp, Artificial Sequence
  ENSG00000095203_47 (sequence is synthesized)
gaagttgagattgctagggtccagtttccctagtgtggcctggacgagtcatttccccttcattgacctcattttccccatctgaaaagagagggttggactaagtgatctccaaggtcc

SEQ ID NO: 103860 - DNA, 120 bp, Artificial Sequence
  ENSG00000095203_48 (sequence is synthesized)
tttccaactctaaaattctgcaatttgttaacatttcattttgtttaggttgaggacatacattcaaactaattttatcacaaggaaaactgcaatacccacttccttgacagagttact

SEQ ID NO: 103861 - DNA, 120 bp, Artificial Sequence
  ENSG00000095203_49 (sequence is synthesized)
cctttcagaagctaaataaagtatataacttattagatgttatatagatacagggggactttgaatttcacatcttaaagcagttgagctactttgaatttaagcagtcgtactaatctt

SEQ ID NO: 103862 - DNA, 120 bp, Artificial Sequence
  ENSG00000095203_50 (sequence is synthesized)
aaattgcatagcatttgttttgatcgaatttgctgctcaagtatgggaataatttttaatgtcttaatgattggtgctgctaacttgcgtgatttcagaagacataattgtgaatacaca

SEQ ID NO: 103863 - DNA, 120 bp, Artificial Sequence
  ENSG00000095203_51 (sequence is synthesized)
ctgtcagaattgggggattggtttttaccctagacttcactcttaaaaagcaacgtgcaatcaagatcatttatggctcaaatgaaagcatataaggttttcttgaagttgtgccaaagc

SEQ ID NO: 103864 - DNA, 120 bp, Artificial Sequence
  ENSG00000095203_52 (sequence is synthesized)
attctgtagagtaggatgagatggttgttgccctagtctgttggtagaaccagaaatcaatatgttgtcttttaggttaaagcttgtaccaaaatatttatttcccccatttcaagccct

SEQ ID NO: 103865 - DNA, 120 bp, Artificial Sequence
  ENSG00000095203_53 (sequence is synthesized)
gagtcaaacatttttttctcttaataatagacctgaaatgttttattagtatttctgtgaaatcagttgattcttgtgccatttttgtatatgtaattgtaattttgcccatgttaggcc

SEQ ID NO: 103866 - DNA, 120 bp, Artificial Sequence
  ENSG00000095203_54 (sequence is synthesized)
ctctaaaaaatgtttgacatcctttgagatattttattactaaaatctgatcttttttggctactgcaaaaatctattcagcaagaaggtatcagctgcataccttgcacagtggagctg

SEQ ID NO: 103867 - DNA, 120 bp, Artificial Sequence
  ENSG00000095203_55 (sequence is synthesized)
actacctataaactctccctaaggcatttgtttacaggtgtattccattttagcagacgttctgatgctcagtgtatgtgctgcatacaaataaatgtgttctgaatcttttcatcttat

SEQ ID NO: 103868 - DNA, 120 bp, Artificial Sequence
  ENSG00000095203_56 (sequence is synthesized)
tgatagcatttttacaaatgtgtttccaaggaataaagattattcttgctttttttttgactccatcttcattttttttaaattgattcttgttgctatgcagaagtctcatttgtgaat

SEQ ID NO: 103869 - DNA, 120 bp, Artificial Sequence
  ENSG00000095203_57 (sequence is synthesized)
gaccttggtaacagaacagttggcttttggaagtctgaaggtgagcattcagttaggtgggtggagcaagatcatcctagaatgaggctgctcttggcaagagtggatcttataggcaca

SEQ ID NO: 103870 - DNA, 120 bp, Artificial Sequence
  ENSG00000095203_58 (sequence is synthesized)
gcagctgatgcctttcttcatctggggcaactctggtgaaggttgtcctgcctgtcacaggtgctgagtagagagaagtggtggcagtgggatttcctcagtaatagtcctgtaaaggta

SEQ ID NO: 103871 - DNA, 120 bp, Artificial Sequence
  ENSG00000095203_59 (sequence is synthesized)
cgtgtttgtcctggctacttgtgctcttcctggcaggaaggcatccaaacccttatctgtgggctcctggaaattgtgtatgccatataataccctctaataaatacctctctgcttaaa

SEQ ID NO: 103872 - DNA, 120 bp, Artificial Sequence
  ENSG00000095209_0 (sequence is synthesized)
ggagctggagccggcgcggaggagcgggcggccgcggctgtgccctctcctactcctcaccgcgcgagcgcggggaaccagtagccgcggctgcttcggttgccgcggtcggtggtcgtt

SEQ ID NO: 103873 - DNA, 120 bp, Artificial Sequence
  ENSG00000095209_1 (sequence is synthesized)
atggattctccatgggacgagttggctctggccttctcccgcacgtccatgtttcccttttttgacatcgcgcactatctagtgtcagtgatggcggtgaaacgtcagccgggagcagct

SEQ ID NO: 103874 - DNA, 120 bp, Artificial Sequence
  ENSG00000095209_2 (sequence is synthesized)
gcattggcatggaagaatcctatttcaagctggtttactgctatgctccactgttttggtggaggaattttatcctgtctactgcttgcagagcctccattgaagtttcttgcaaaccac

SEQ ID NO: 103875 - DNA, 120 bp, Artificial Sequence
  ENSG00000095209_3 (sequence is synthesized)
actaacatattactggcatcttcaatctggtatattacatttttttgcccgcatgacctagtttcccagggctattcatatctacctgttcaactactggcttcgggaatgaaggaagtg

SEQ ID NO: 103876 - DNA, 120 bp, Artificial Sequence
  ENSG00000095209_4 (sequence is synthesized)
accagaacttggaaaatagtaggtggagtcacacatgctaatagctattacaaaaatggctggatagtcatgatagctattggatgggcccgaggtgcaggtggtaccattataacgaat

SEQ ID NO: 103877 - DNA, 120 bp, Artificial Sequence
  ENSG00000095209_5 (sequence is synthesized)
tttgagaggttggtaaaaggagattggaaaccagaaggtgatgaatggctgaagatgtcataccctgccaaggtaaccctgctggggtcagttatcttcacattccagcacacccagcat

SEQ ID NO: 103878 - DNA, 120 bp, Artificial Sequence
  ENSG00000095209_6 (sequence is synthesized)
ctggcaatatcaaagcataatcttatgttcctttataccatctttattgtggccacaaagataaccatgatgactacacagacttctactatgacatttgctccttttgaggatacattg

SEQ ID NO: 103879 - DNA, 120 bp, Artificial Sequence
  ENSG00000095209_7 (sequence is synthesized)
agttggatgctatttggctggcagcagccgttttcatcatgtgagaagaaaagtgaagcaaagtcaccttccaatggcgttgggtcattggcctcaaagccggtagatgttgcctcagat

SEQ ID NO: 103880 - DNA, 120 bp, Artificial Sequence
  ENSG00000095209_8 (sequence is synthesized)
aatgttaaaaagaaacatactaagaagaatgaataaatttacgtgatgagctctacaaggccaaaaattttttttcttatctacctgttatattgtgctaatttttctatgtatgtgatg

SEQ ID NO: 103881 - DNA, 120 bp, Artificial Sequence
  ENSG00000095209_9 (sequence is synthesized)
tgaaatgaagactatatatatggaatggaggtgacagaaagaaagaaattctttgtttgagggagacttcccctttctggattgtatttgtagagtgttacgagtgtatcatgtgattat

SEQ ID NO: 103882 - DNA, 120 bp, Artificial Sequence
  ENSG00000095209_10 (sequence is synthesized)
gctttaccggtataagagattctgttgtgattatttgaatagttttatattaataaaagaagacaaaattttttaaatgttagaaaaagcagatctgtcattgcaaagtaacaaaaattt

SEQ ID NO: 103883 - DNA, 120 bp, Artificial Sequence
  ENSG00000095209_11 (sequence is synthesized)
taagcttttaaaaatgtagatttttcatatttttaaaatttgaatctatttgagctttagttcagcagaattaaatttttacttgacattatcattaaaattgctaggtatggagaacaa

SEQ ID NO: 103884 - DNA, 120 bp, Artificial Sequence
  ENSG00000095209_12 (sequence is synthesized)
taggtatggagaacaattcctattttattttgaacactgagaagagtaaacttttcctaaaacactttatattataaatgaaaataaattgctagtttatattttagatataaacatcat

SEQ ID NO: 103885 - DNA, 120 bp, Artificial Sequence
  ENSG00000095209_13 (sequence is synthesized)
tacatcaaatggaaaatatctgaaattttttttccatagcaggtattttctactagaagtagttttactacttttcatttagaacagagtatgagtcttaatctgaagtctttttcatgc

SEQ ID NO: 103886 - DNA, 120 bp, Artificial Sequence
  ENSG00000095209_14 (sequence is synthesized)
gttaatcctatgttttgtaattttcattttaggagcttgacttatttttttctctctcataaaaacacatttgttttaattgtaggagaaattttctcagcattttgcatgttctttcta

SEQ ID NO: 103887 - DNA, 120 bp, Artificial Sequence
  ENSG00000095209_15 (sequence is synthesized)
atctttgttggtctgaatatattggtagtaattactgtaattattcaacaaaaagcatatccgttcaaaaatttttccactatgtcttttttctagtggctactgttttagttttctagt

SEQ ID NO: 103888 - DNA, 120 bp, Artificial Sequence
  ENSG00000095209_16 (sequence is synthesized)
tgaatatctctgacaagctttcgtatggttttgttatattttcatctacatgtaatgtgttattaattttattaaatgaaaactaatcaccttcatgtggaaatgctctgagaattgtcc

SEQ ID NO: 103889 - DNA, 120 bp, Artificial Sequence
  ENSG00000095209_17 (sequence is synthesized)
ttaggcatttggtagtaaccagctaaccaagaagaaacagagaaaccagaacttcatatggcagtccatttagatgaagaatgatgatataaaatctggttccttcttagcaaaataaaa

SEQ ID NO: 103890 - DNA, 120 bp, Artificial Sequence
  ENSG00000095209_18 (sequence is synthesized)
aacaaacaagaaaagatactaaatgatgttaattttcttactttatgatttagaagtccagttataatattaaaactctgtgacatagtttcttttaccaaaaccatgaacctactcccc

SEQ ID NO: 103891 - DNA, 120 bp, Artificial Sequence
  ENSG00000095209_19 (sequence is synthesized)
gtatcaggtattttcgatggtttagaagtactcaagtcacatcacattcaagttagaagttttttttttgttgttgttattttaaatttttaacaaatataaacaccagcagatactatt

SEQ ID NO: 103892 - DNA, 120 bp, Artificial Sequence
  ENSG00000095209_20 (sequence is synthesized)
acttgcttaaaaaattgggagggggcacttttcatagtcttggaatgctaagaagttttatttttaatattgtgacagaaagctttaagtatttaagagctctgtattatatttgatact

SEQ ID NO: 103893 - DNA, 120 bp, Artificial Sequence
  ENSG00000095209_21 (sequence is synthesized)
cttacagttaaaaacttttcaaaattaatacattgttaattattgaccagttttgaagtttgggtttaactgtagttgaaatggaaggactcttgttttacacttgtattaaagataaat

SEQ ID NO: 103894 - DNA, 120 bp, Artificial Sequence
  ENSG00000095209_22 (sequence is synthesized)
taaaataagttatttagcaccaatggagtattacattatttttatgttttatatttttcttgaggtagagtttcagaactcatctagtattttgactaatatagtatatattcagtgatt

SEQ ID NO: 103895 - DNA, 120 bp, Artificial Sequence
  ENSG00000095209_23 (sequence is synthesized)
gattactgttcaaatgggacattggtagaaactttattaatctatgcaagtatcctataaccctcaattcaaggctcttttgtaaaaaatgtactggagaacatggcttaggcctgaaac

SEQ ID NO: 103896 - DNA, 120 bp, Artificial Sequence
  ENSG00000095209_24 (sequence is synthesized)
ccatcctgaatctattcaggtcacctgtagagtcttgacttggatttgcaaagcagattgttagactccttacccaatgtgaagtgtgaataaggcctataggcctgcctcacacagcta

SEQ ID NO: 103897 - DNA, 120 bp, Artificial Sequence
  ENSG00000095209_25 (sequence is synthesized)
atcagaggtggcactgagaaagtcaagtcctaataggtctccttaaaaaaaaaaaggagacaaaaagctggcaagaacatgagccagcttccctcagtgctgtcactctcaagtaaaaca

SEQ ID NO: 103898 - DNA, 120 bp, Artificial Sequence
  ENSG00000095209_26 (sequence is synthesized)
tggccaaatgaatatcaaactggtttatcagattagtcactcttccttactgagggagtatcaagtaagggctggagagagaccagatatgtggagttgttggctttcagtggaaatggt

SEQ ID NO: 103899 - DNA, 120 bp, Artificial Sequence
  ENSG00000095209_27 (sequence is synthesized)
agcctccctgtgggtagagaccaaaaggtagagagatgacagaagggagactctgattagtgtattttttttttgtctattccttaaagcccagacacctttccattaaaatctacttca

SEQ ID NO: 103900 - DNA, 120 bp, Artificial Sequence
  ENSG00000095209_28 (sequence is synthesized)
aatcacaagttgattacaattgagtggaacatcccatgttgtaaatggaataatgtgttcagaatgctctttctttcccccaataaagccctttatagtgtttgccccaggtgtaattca

SEQ ID NO: 103901 - DNA, 120 bp, Artificial Sequence
  ENSG00000095209_29 (sequence is synthesized)
ctttataccatctttattgtggccacaaagtagtctctgaattggagatgatctgtggctgtaattcaggtaacaaatattggaggcaaaatctcttcacatgtagtctcttccagtcct

SEQ ID NO: 103902 - DNA, 120 bp, Artificial Sequence
  ENSG00000095209_30 (sequence is synthesized)
ggcaaaatctcttcacatgtagtctcttccagtcctcaaatgttgagccgtgtatatttttttctaacagctttattgagatatattttccatactgtgttagtctgttctcatgctgct

SEQ ID NO: 103903 - DNA, 120 bp, Artificial Sequence
  ENSG00000095209_31 (sequence is synthesized)
gcagtgtttcctccacaggggtctcagtctgggctctaaagagctcctccaccaagtttctaaattttaataatttcagcctattgttcccccagagtagtaactgctttctggaactga

SEQ ID NO: 103904 - DNA, 120 bp, Artificial Sequence
  ENSG00000095209_32 (sequence is synthesized)
actctgtgataatgtagtatttactttttgccttttcaataacctagttaacaattttatacctactgagttctatttaaataatggtattttctatctcctgactggacagatacccag

SEQ ID NO: 103905 - DNA, 120 bp, Artificial Sequence
  ENSG00000095209_33 (sequence is synthesized)
gagtagggtttgaacttcctactttctggtttgcatatatcttattaagataactaaagtacttgctacttgccagtcttcagacccggtcagtgtaatgtcatcagtgcagcagatcag

SEQ ID NO: 103906 - DNA, 120 bp, Artificial Sequence
  ENSG00000095209_34 (sequence is synthesized)
tgtgatgtgtgatttctcaatgtgatcaaaatctctggactattttagagagcaagagtgttaacatagacctgaagcaagactgtaatggttgaacaaagcacaaagtgcttctgagat

SEQ ID NO: 103907 - DNA, 120 bp, Artificial Sequence
  ENSG00000095209_35 (sequence is synthesized)
tttttgcaaattaataggaagaaaaaagcatttgcttccaagttataagaattgtgttgatttgaccccgtaaaaatactacatcttgaatactagctgcaattacagtcacgacctttc

SEQ ID NO: 103908 - DNA, 120 bp, Artificial Sequence
  ENSG00000095261_0 (sequence is synthesized)
gtcggggggcaagatggcagcccaggctttggcgctgctgagagaggtagcgaggctggaagcgccgctggaggagctacgcgcgcttcactccgtgctgcaggcagtgccgctcaacga

SEQ ID NO: 103909 - DNA, 120 bp, Artificial Sequence
  ENSG00000095261_1 (sequence is synthesized)
gcttcgccagcaagcggcggagctgcgcctcggcccgctcttctccctgcttaacgagaaccatagggaaaagactactttgtgtgtatccattctggagagattgctccaagctatgga

SEQ ID NO: 103910 - DNA, 120 bp, Artificial Sequence
  ENSG00000095261_2 (sequence is synthesized)
accggttcacgtggcccggaacctcagggttgacctgcagaggggactaattcaccctgatgattctgtaaaaatcctcactctttcccagattggaagaattgttgaaaattctgatgc

SEQ ID NO: 103911 - DNA, 120 bp, Artificial Sequence
  ENSG00000095261_3 (sequence is synthesized)
tgttactgagattctaaataatgctgaattactaaaacaaattgtttattgcattggtggagagaatctatctgtagcaaaagcggctatcaaatccctgtcaagaatatcactaaccca

SEQ ID NO: 103912 - DNA, 120 bp, Artificial Sequence
  ENSG00000095261_4 (sequence is synthesized)
agctggactggaggctttatttgaaagcaatctgctggatgatttgaaaagtgtaatgaaaacaaatgacattgttcgatacagggtgtatgagctaattatagagatttcttccgtgtc

SEQ ID NO: 103913 - DNA, 120 bp, Artificial Sequence
  ENSG00000095261_5 (sequence is synthesized)
accagaatctttaaactactgtaccacaagtggattggtaacccagctcctgagagagctgactggtgaggatgtgttggtcagagccacctgtatagaaatggtgacatcactggcata

SEQ ID NO: 103914 - DNA, 120 bp, Artificial Sequence
  ENSG00000095261_6 (sequence is synthesized)
tactcatcatgggcgacaatatcttgctcaagaaggagtaattgaccaaatttctaatataattgttggggcagattcagaccctttctctagcttctatctgccaggattcgtgaagtt

SEQ ID NO: 103915 - DNA, 120 bp, Artificial Sequence
  ENSG00000095261_7 (sequence is synthesized)
ttttggaaacctggctgtcatggatagtcctcaacagatctgtgagcgttatcctatctttgtggaaaaagtctttgaaatgatagaaagtcaggaccccactatgattggtgtagctgt

SEQ ID NO: 103916 - DNA, 120 bp, Artificial Sequence
  ENSG00000095261_8 (sequence is synthesized)
agacacagttggaatcttgggatccaatgttgaaggaaaacaggttttacagaaaacaggaactcgctttgaacgcttgcttatgagaataggacatcaatcaaagaatgccccagtgga

SEQ ID NO: 103917 - DNA, 120 bp, Artificial Sequence
  ENSG00000095261_9 (sequence is synthesized)
gctaaaaattagatgtttggatgcaatttcatctcttctgtacttaccacctgagcagcagactgatgaccttctgaggatgacagaatcctggttttcttctttatctcgggatccact

SEQ ID NO: 103918 - DNA, 120 bp, Artificial Sequence
  ENSG00000095261_10 (sequence is synthesized)
ggagctcttccgtggcattagtagtcagcccttccctgaactacactgtgctgccttaaaagtgtttacggccattgcaaaccaaccctgggctcagaaacttatgtttaacagtccagg

SEQ ID NO: 103919 - DNA, 120 bp, Artificial Sequence
  ENSG00000095261_11 (sequence is synthesized)
ttttgtagaatatgtggtggaccggtctgtggagcatgacaaagcttcaaaggatgccaaatatgaactagtgaaagcacttgccaattccaagacaattgcagaaatctttgggaaccc

SEQ ID NO: 103920 - DNA, 120 bp, Artificial Sequence
  ENSG00000095261_12 (sequence is synthesized)
aaattatttgaggctcagaacttacctgagtgaagggccatactatgtgaaacctgtttccacgacagcagtagaaggagccgaatgatttcttctagagctcatgtagaggaccacgtt

SEQ ID NO: 103921 - DNA, 120 bp, Artificial Sequence
  ENSG00000095261_13 (sequence is synthesized)
ttgaccaaaacttctcctaaggcatttgactccatctatatttcacaaaagagacttcctttccccaagaattatcatggaatgtcagatgttactttgttaccaacactgttatatttc

SEQ ID NO: 103922 - DNA, 120 bp, Artificial Sequence
  ENSG00000095261_14 (sequence is synthesized)
actaggagtttggaatgcattaagagcagacaagcttggtcataatagatccagtgtttttcagattcctttcactgccttaatctttgcaacagggtggaagtttttttcttccctcaa

SEQ ID NO: 103923 - DNA, 120 bp, Artificial Sequence
  ENSG00000095261_15 (sequence is synthesized)
aagtttttttcttccctcaaaattttcatggacatgcaatcttatctaaaagcctgcttcagggctgggcgcggtggctaacacctataattcccagcactttgggaggccaagatgggc

SEQ ID NO: 103924 - DNA, 83 bp, Artificial Sequence
  ENSG00000095261_16 (sequence is synthesized)
tgccactgcacataaatgaataaaataaaaacctgccaccaaattatttctggattctcttcactatctttttttttcttttt

SEQ ID NO: 103925 - DNA, 120 bp, Artificial Sequence
  ENSG00000095261_17 (sequence is synthesized)
ttatttctggattctcttcactatctttttttttctttttggtcctttttccatttctgattccactttcaaagtcttggatatattctttgaaaaatgagtagtatggaatattaagat

SEQ ID NO: 103926 - DNA, 120 bp, Artificial Sequence
  ENSG00000095261_18 (sequence is synthesized)
tatgttccttatactcagaatactttttatgagctctcttgtttttttgttactattattcctttgaaaaaaagacaaaatatctaaaaaatgtttatagtgttcatgtaattttttttg

SEQ ID NO: 103927 - DNA, 120 bp, Artificial Sequence
  ENSG00000095261_19 (sequence is synthesized)
ctgtttaccaatgaactttgccctgttgtggttttgggggatcagaaggattcctaaactgtcatttcatttattggtaggtcatgattgctgagggttttgctttggatttttcatacc

SEQ ID NO: 103928 - DNA, 120 bp, Artificial Sequence
  ENSG00000095261_20 (sequence is synthesized)
tataaagtcaatcttgagttgatcagagaaagggaaacttactcctaataaacagactcagaacagaagggacatatgcataaatcaggataccatctcattaatttacaaaggataatc

SEQ ID NO: 103929 - DNA, 120 bp, Artificial Sequence
  ENSG00000095261_21 (sequence is synthesized)
tttcttttcattgacaacacctacacccacctgttttccagtgttcttctctctaaacagcaaagccaaagcactctgcacaccaaatcacctgttcagaggtttatgcatgagcatatt

SEQ ID NO: 103930 - DNA, 120 bp, Artificial Sequence
  ENSG00000095261_22 (sequence is synthesized)
tcttttaggccgtggtgaagttgataaaccacccctgctttgtaacaaaattattttaaagtgactggaattatctagtccccagattgatcatctcccctggcaacgtgactctgtttt

SEQ ID NO: 103931 - DNA, 120 bp, Artificial Sequence
  ENSG00000095261_23 (sequence is synthesized)
ttgtgtgtgtttccatgctgactagtcccctactgttaatatcactactaattaggctataaccaggtctttcctggcctgagaaatattctcttaaaatgacctttgttttaatctcat

SEQ ID NO: 103932 - DNA, 120 bp, Artificial Sequence
  ENSG00000095261_24 (sequence is synthesized)
tcatgatgttgattttttttcaatgtggtgcaatatatacaataaaatttgtcataactattttaagtgtacagttcagtatattacatatgttcataagttgtacaaccatcaccacca

SEQ ID NO: 103933 - DNA, 120 bp, Artificial Sequence
  ENSG00000095261_25 (sequence is synthesized)
tccatcttcagaattattttcatcttatacaattgaaactgtattcattaaacaataactgtctattccctcttttccccagcctctggcaaccaccattctgcttcatgacattgattt

SEQ ID NO: 103934 - DNA, 120 bp, Artificial Sequence
  ENSG00000095261_26 (sequence is synthesized)
tattcacttaacatcagattttggggggatgccctctctcctatgtatggtctacacattctgattttttttttagattgaataaaatttgtaaatcattattttcatttcataagtaaa

SEQ ID NO: 103935 - DNA, 120 bp, Artificial Sequence
  ENSG00000095261_27 (sequence is synthesized)
gttatctctgacatcagggggttggggtagggagtggacagggattgttttcctttagagctgatttccttaatgagctgatttcgtttagaagatatctagagcaaccaagttcaaatt

SEQ ID NO: 103936 - DNA, 120 bp, Artificial Sequence
  ENSG00000095261_28 (sequence is synthesized)
ggtgtcccaaaagataaagaaaggccttctgaattgagaggtgaaggtttagaatggatgatttgcgtaatggaatttacaacttcatatggattgtgtaaaataaatggttgtcaagta

SEQ ID NO: 103937 - DNA, 120 bp, Artificial Sequence
  ENSG00000095261_29 (sequence is synthesized)
gtatgacttggccctgttcagggatatcttaatctttgacaggggttcaatatgtaagttcatttgctggtgggttaactacattgtagaaactattttatgggtggcagtcttgttaac

SEQ ID NO: 103938 - DNA, 120 bp, Artificial Sequence
  ENSG00000095261_30 (sequence is synthesized)
catgaccttgtactcatgtctgaaaatctaataattattacggaaaacctttttttttttttttttgacttttcactggtttaggttttcattggtttaggtttctaccaatcgatttca

SEQ ID NO: 103939 - DNA, 120 bp, Artificial Sequence
  ENSG00000095261_31 (sequence is synthesized)
accaaacattgtttcctgtttcccctctatgatgtcttctttgactagatttcatggtacaaagaccacgggctagagtcagaaaggtctggattcatgtccttgggttttctattcttt

SEQ ID NO: 103940 - DNA, 120 bp, Artificial Sequence
  ENSG00000095261_32 (sequence is synthesized)
tacagtggagtagcaaagcaagacagcaggtacacatgaaaacaagagaacatgtttgagaaactacaagtaattcaatatgaccaacgcctaggatttaaagggaaatttttgcaaaat

SEQ ID NO: 103941 - DNA, 120 bp, Artificial Sequence
  ENSG00000095261_33 (sequence is synthesized)
tctttatcattattactaataatagctaccatttcttagcattgattttatgttaggcacttggcatgcatttcttactttatcatcataatagccataaaagttacgtatcatttcaca

SEQ ID NO: 103942 - DNA, 120 bp, Artificial Sequence
  ENSG00000095303_0 (sequence is synthesized)
agtgtgcgaggcgcacgcacaggagcctgcactctgcgtcccgcaccccagcagccgcgccatgagccggagtctcttgctctggttcttgctgttcctgctcctgctcccgccgctccc

SEQ ID NO: 103943 - DNA, 120 bp, Artificial Sequence
  ENSG00000095303_1 (sequence is synthesized)
cgtcctgctcgcggacccaggggcgcccacgccagtgaatccctgttgttactatccatgccagcaccagggcatctgtgtccgcttcggccttgaccgctaccagtgtgactgcacccg

SEQ ID NO: 103944 - DNA, 120 bp, Artificial Sequence
  ENSG00000095303_2 (sequence is synthesized)
cacgggctattccggccccaactgcaccatccctggcctgtggacctggctccggaattcactgcggcccagcccctctttcacccacttcctgctcactcacgggcgctggttctggga

SEQ ID NO: 103945 - DNA, 120 bp, Artificial Sequence
  ENSG00000095303_3 (sequence is synthesized)
gtttgtcaatgccaccttcatccgagagatgctcatgcgcctggtactcacagtgcgctccaaccttatccccagtccccccacctacaactcagcacatgactacatcagctgggagtc

SEQ ID NO: 103946 - DNA, 120 bp, Artificial Sequence
  ENSG00000095303_4 (sequence is synthesized)
tttctccaacgtgagctattacactcgtattctgccctctgtgcctaaagattgccccacacccatgggaaccaaagggaagaagcagttgccagatgcccagctcctggcccgccgctt

SEQ ID NO: 103947 - DNA, 120 bp, Artificial Sequence
  ENSG00000095303_5 (sequence is synthesized)
cctgctcaggaggaagttcatacctgacccccaaggcaccaacctcatgtttgccttctttgcacaacacttcacccaccagttcttcaaaacttctggcaagatgggtcctggcttcac

SEQ ID NO: 103948 - DNA, 120 bp, Artificial Sequence
  ENSG00000095303_6 (sequence is synthesized)
caaggccttgggccatggggtagacctcggccacatttatggagacaatctggagcgtcagtatcaactgcggctctttaaggatgggaaactcaagtaccaggtgctggatggagaaat

SEQ ID NO: 103949 - DNA, 120 bp, Artificial Sequence
  ENSG00000095303_7 (sequence is synthesized)
gtacccgccctcggtagaagaggcgcctgtgttgatgcactacccccgaggcatcccgccccagagccagatggctgtgggccaggaggtgtttgggctgcttcctgggctcatgctgta

SEQ ID NO: 103950 - DNA, 120 bp, Artificial Sequence
  ENSG00000095303_8 (sequence is synthesized)
tgccacgctctggctacgtgagcacaaccgtgtgtgtgacctgctgaaggctgagcaccccacctggggcgatgagcagcttttccagacgacccgcctcatcctcataggggagaccat

SEQ ID NO: 103951 - DNA, 120 bp, Artificial Sequence
  ENSG00000095303_9 (sequence is synthesized)
caagattgtcatcgaggagtacgtgcagcagctgagtggctatttcctgcagctgaaatttgacccagagctgctgttcggtgtccagttccaataccgcaaccgcattgccatggagtt

SEQ ID NO: 103952 - DNA, 120 bp, Artificial Sequence
  ENSG00000095303_10 (sequence is synthesized)
caaccatctctaccactggcaccccctcatgcctgactccttcaaggtgggctcccaggagtacagctacgagcagttcttgttcaacacctccatgttggtggactatggggttgaggc

SEQ ID NO: 103953 - DNA, 120 bp, Artificial Sequence
  ENSG00000095303_11 (sequence is synthesized)
cctggtggatgccttctctcgccagattgctggccggatcggtgggggcaggaacatggaccaccacatcctgcatgtggctgtggatgtcatcagggagtctcgggagatgcggctgca

SEQ ID NO: 103954 - DNA, 120 bp, Artificial Sequence
  ENSG00000095303_12 (sequence is synthesized)
gcccttcaatgagtaccgcaagaggtttggcatgaaaccctacacctccttccaggagctcgtaggagagaaggagatggcagcagagttggaggaattgtatggagacattgatgcgtt

SEQ ID NO: 103955 - DNA, 120 bp, Artificial Sequence
  ENSG00000095303_13 (sequence is synthesized)
ggagttctaccctggactgcttcttgaaaagtgccatccaaactctatctttggggagagtatgatagagattggggctcccttttccctcaagggtctcctagggaatcccatctgttc

SEQ ID NO: 103956 - DNA, 120 bp, Artificial Sequence
  ENSG00000095303_14 (sequence is synthesized)
tccggagtactggaagccgagcacatttggcggcgaggtgggctttaacattgtcaagacggccacactgaagaagctggtctgcctcaacaccaagacctgtccctacgtttccttccg

SEQ ID NO: 103957 - DNA, 120 bp, Artificial Sequence
  ENSG00000095303_15 (sequence is synthesized)
tgtgccggatgccagtcaggatgatgggcctgctgtggagcgaccatccacagagctctgaggggcaggaaagcagcattctggaggggagagctttgtgcttgtcattccagagtgctg

SEQ ID NO: 103958 - DNA, 120 bp, Artificial Sequence
  ENSG00000095303_16 (sequence is synthesized)
aggccagggctgatggtcttaaatgctcattttctggtttggcatggtgagtgttggggttgacatttagaactttaagtctcacccattatctggaatattgtgattctgtttattctt

SEQ ID NO: 103959 - DNA, 120 bp, Artificial Sequence
  ENSG00000095303_17 (sequence is synthesized)
ccagaatgctgaactccttgttagcccttcagattgttaggagtggttctcatttggtctgccagaatactgggttcttagttgacaacctagaatgtcagatttctggttgatttgtaa

SEQ ID NO: 103960 - DNA, 120 bp, Artificial Sequence
  ENSG00000095303_18 (sequence is synthesized)
cacagtcattctaggatgtggagctactgatgaaatctgctagaaagttagggggttcttattttgcattccagaatcttgactttctgattggtgattcaaagtgttgtgttcctggct

SEQ ID NO: 103961 - DNA, 120 bp, Artificial Sequence
  ENSG00000095303_19 (sequence is synthesized)
gatgatccagaacagtggctcgtatcccaaatctgtcagcatctggctgtctagaatgtggatttgattcattttcctgttcagtgagatatcatagagacggagatcctaaggtccaac

SEQ ID NO: 103962 - DNA, 120 bp, Artificial Sequence
  ENSG00000095303_20 (sequence is synthesized)
gaacaggtgggctgtattcacgccattggttggaagctaccagagctctatccccatccaggtcttgactcatggcagctgtttctcatgaagctaataaaattcgctttctaaagttac

SEQ ID NO: 103963 - DNA, 120 bp, Artificial Sequence
  ENSG00000095303_21 (sequence is synthesized)
ctgttatatatctcttttggtcccatcctctaaagcagaggcaacactggaacatggctagcctttcttgtagccatggctgggcgtgctagaggttgcagcatgagactttctgctggg

SEQ ID NO: 103964 - DNA, 120 bp, Artificial Sequence
  ENSG00000095303_22 (sequence is synthesized)
atccttgggcccatcactgtatagacatgctaccactggtacttcctttctccctgcgggccaggcactgcccttttcaggaagctctcttaaaatacccattgccccagacctggaaga

SEQ ID NO: 103965 - DNA, 120 bp, Artificial Sequence
  ENSG00000095303_23 (sequence is synthesized)
tataacattcagttcccaccatctgattaaaacaacttcctcccttacagagcatacaacagagggggcacccggggaggagagcacatactgtgttccaatttcacgcttttaattctc

SEQ ID NO: 103966 - DNA, 120 bp, Artificial Sequence
  ENSG00000095303_24 (sequence is synthesized)
atttgttctcacaccaacagtgtgaagtgcgtggtataatctccatttcaaaaccaaggaagcagcctcagagtggtcgagtgacacacctcacgcaggctgagtccagagcttgtgctc

SEQ ID NO: 103967 - DNA, 120 bp, Artificial Sequence
  ENSG00000095303_25 (sequence is synthesized)
ctcttgattcctggtttgactcagttccaggcctgatcttgcctgtctggctcagggtcaaagacagaatggtggagtgtagcctccacctgatattcaggctactcattcagtcccaaa

SEQ ID NO: 103968 - DNA, 120 bp, Artificial Sequence
  ENSG00000095303_26 (sequence is synthesized)
tatgtattttcctaagtgtttactatgtgccagttcctgtaacaggtgtggggacacagcagtgagtaatcaatacagacaaggttctgcccttatggagctcacactccagtggcagac

SEQ ID NO: 103969 - DNA, 120 bp, Artificial Sequence
  ENSG00000095303_27 (sequence is synthesized)
aaacagaccataaataaggaaacgatgaaataagatatatacaaggtgagtgtgacttcccttctaaccccctctgctctgtcctcccctattgcgctctcaagaccagagacccaacag

SEQ ID NO: 103970 - DNA, 120 bp, Artificial Sequence
  ENSG00000095303_28 (sequence is synthesized)
cagtgatctcagggcagacagccctccactccagctctgagacccttttctcaggacctctgtaggcagcagagagagaggacagaggggtaagatgaggggttgagggaaggttcttca

SEQ ID NO: 103971 - DNA, 120 bp, Artificial Sequence
  ENSG00000095303_29 (sequence is synthesized)
tgatccacactttgggcttagtatttctcaggaagagctatggcccagaaacaacaggggaaactagagttcggtctgacagtccttggggttaagtctcctgtcttatggtccagaaac

SEQ ID NO: 103972 - DNA, 120 bp, Artificial Sequence
  ENSG00000095303_30 (sequence is synthesized)
tcctgtttctccttagttggctggaaactgctcccatcattccttctggcctctgctgaatgcagggaatgcaatccttccctgctcttgcagttgctctgacgtagaaagatccttcgg

SEQ ID NO: 103973 - DNA, 120 bp, Artificial Sequence
  ENSG00000095303_31 (sequence is synthesized)
gtgctggaagtctccatgaagagcttgtgtcctgtcctttcttgcagattctatttcccctcttctgctaatacctcttactttgcttgagaatcctctcctttcttattaatttcagtc

SEQ ID NO: 103974 - DNA, 120 bp, Artificial Sequence
  ENSG00000095303_32 (sequence is synthesized)
ttggtggttctatcaggggtgcattctggccaaggggtgggcctgtgaatcaatcctgggcaatcagacaccctctccttaaaaactggcccgtggagactgagatcactgactctgact

SEQ ID NO: 103975 - DNA, 120 bp, Artificial Sequence
  ENSG00000095303_33 (sequence is synthesized)
catccccacagctggctctgacaagatggtccatttgttcctgcttccgagatccccagggcagcctggatccctgcccttctcaagactttagcttttccttccatccggtggcctatt

SEQ ID NO: 103976 - DNA, 120 bp, Artificial Sequence
  ENSG00000095303_34 (sequence is synthesized)
ccaggaattcctcttttgcttaaatcagttggagtttgtgtctgttgcttgtaatcaagcctttatggctgctgggctgagtgacacaagcactttaatggcctggagggacttttaatc

SEQ ID NO: 103977 - DNA, 120 bp, Artificial Sequence
  ENSG00000095303_35 (sequence is synthesized)
agtgaagatgcaatcagacaagtgttttggaaagagcaccctcgagaagggtggatgacagggcagagcaggaaggacaggaagctggcagaacggaggaggctgcagccgtggtccaac

SEQ ID NO: 103978 - DNA, 120 bp, Artificial Sequence
  ENSG00000095303_36 (sequence is synthesized)
caggagctgatggcagctggggctaggggaagggctttgagggtggaaggatgggatgggttccagaggtattcctctcttaaatgcaagtgcctagattaggtagactttgcttagtat

SEQ ID NO: 103979 - DNA, 120 bp, Artificial Sequence
  ENSG00000095303_37 (sequence is synthesized)
tgacaactgcacatgaaagttttgcaaagggaaacaggctaaatgcaccaagaaagcttcttcagagtgaagaatcttaatgcttgtaatttaaacatttgttcctggagttttgatttg

SEQ ID NO: 103980 - DNA, 120 bp, Artificial Sequence
  ENSG00000095303_38 (sequence is synthesized)
gtggatgtgatggttggttttatttgtcagtttggttgggctatagcacacagttatttaatcaaacagtaatctaggtgtggctgtgaaggtattttgtagatgtgattaacatctaca

SEQ ID NO: 103981 - DNA, 120 bp, Artificial Sequence
  ENSG00000095303_39 (sequence is synthesized)
atcagttgactttaagtgaaagagattacttaaataatttgggtgagctgcacctgattagttgaaaggcctcaagaacaaacactgcagtttcctggaaaagaagaaactttgcctcaa

SEQ ID NO: 103982 - DNA, 120 bp, Artificial Sequence
  ENSG00000095303_40 (sequence is synthesized)
gactatagccatcgactcctgcctgagtttccagcctgctagtctgccctatggatttgaagtttgccaaccccaacaattgtgtgaattaatttctaaaaataaagctatatacagcca

SEQ ID NO: 103983 - DNA, 120 bp, Artificial Sequence
  ENSG00000095303_41 (sequence is synthesized)
ctcatctaggaaaccatcagcaggccaggctggactgccccatttctagccccctttcttctctgcagactgccctgtttctagccccttttcttctctacccttttctgtagagtgcgt

SEQ ID NO: 103984 - DNA, 120 bp, Artificial Sequence
  ENSG00000095303_42 (sequence is synthesized)
tagacccattttacagaaggggactctgagaccctttcttctctgcggggcagggtatgtggttcagacgagccgcttccatccccagttctgtccctaagccctgggtgacctcagcat

SEQ ID NO: 103985 - DNA, 120 bp, Artificial Sequence
  ENSG00000095303_43 (sequence is synthesized)
ctcgcggacccaggggcgcccacgccaggggcctctttgggaggaagccgcaggcaccaagggaaatgagttccctttctccagcctctaaccgtctgggaacccatcctgattcccatt

SEQ ID NO: 103986 - DNA, 120 bp, Artificial Sequence
  ENSG00000095303_44 (sequence is synthesized)
gccagtggagaaggtctcccctggtgaagacttcgggagaacatgggagatggaaatacatttaggagccgggatgcttcatctggggtttaagagatccccattgagcaaatgaggaaa

SEQ ID NO: 103987 - DNA, 120 bp, Artificial Sequence
  ENSG00000095303_45 (sequence is synthesized)
ccagcagccgcgccatgagccggagtctcttgctctggttcttgctgttcctgctcctgctcccgccgctccccgtcctgctcgcggacccaggggcgcccacgccagctggcctgtgga

SEQ ID NO: 103988 - DNA, 120 bp, Artificial Sequence
  ENSG00000095303_46 (sequence is synthesized)
ggagctccgggcagtgtgcgaggcgcacgcacaggagcctgcactctgcgtcccgcaccccagcagccgcgccatgagccgtgagtgcgaccccggtgcccggtggggaattttcttggc

SEQ ID NO: 103989 - DNA, 120 bp, Artificial Sequence
  ENSG00000095303_47 (sequence is synthesized)
agcttgtggctcttctgcctgccgaggcagagctctagggccatggcgggaggccttccggctccacctcagacagctgttgagggcctggaagatgagggactccttttggtcaggctg

SEQ ID NO: 103990 - DNA, 120 bp, Artificial Sequence
  ENSG00000095319_0 (sequence is synthesized)
agggcgagcgggcgcgcgaagatggcggcggccgccggcgggccgtgtgtgaggagcagtagagaactgtggactattctgcttggaaggtcagctctgagagagctgagtcagattgag

SEQ ID NO: 103991 - DNA, 120 bp, Artificial Sequence
  ENSG00000095319_1 (sequence is synthesized)
gcagaactgaataaacattggcggcgattgttagaggggctttcttactacaaacctcccagtccaagttcagctgaaaaagtgaaagctaataaagatgtagcttcaccattgaaggaa

SEQ ID NO: 103992 - DNA, 120 bp, Artificial Sequence
  ENSG00000095319_2 (sequence is synthesized)
ctgggtttaagaatcagcaagtttttgggtcttgatgaagaacagagtgtgcagttactccagtgttacctgcaagaggactacaggggtactcgggactcagtaaagacagtactgcaa

SEQ ID NO: 103993 - DNA, 120 bp, Artificial Sequence
  ENSG00000095319_3 (sequence is synthesized)
gatgagaggcagagccaggccttaatcctgaagattgcagattattattatgaagaaagaacctgtattcttcgttgtgtcttacaccttctcacttacttccaagatgaaagacacccc

SEQ ID NO: 103994 - DNA, 120 bp, Artificial Sequence
  ENSG00000095319_4 (sequence is synthesized)
tatagggttgaatatgcagactgtgttgataaattggagaaggaactagtttcaaaatacagacagcagttcgaagagctttataaaactgaagcaccaacttgggagacacatggaaat

SEQ ID NO: 103995 - DNA, 120 bp, Artificial Sequence
  ENSG00000095319_5 (sequence is synthesized)
ctcatgacagagcgccaagtgtctcgctggtttgttcagtgccttcgggaacagtccatgctgctagaaattattttcctttattatgcatactttgagatggcacccagtgacttactt

SEQ ID NO: 103996 - DNA, 120 bp, Artificial Sequence
  ENSG00000095319_6 (sequence is synthesized)
gtattaaccaagatgtttaaagagcaaggatttggtagtaggcagaccaataggcacctggtggatgagactatggatccttttgtagatcggattggctacttcagtgccctcatcctg

SEQ ID NO: 103997 - DNA, 120 bp, Artificial Sequence
  ENSG00000095319_7 (sequence is synthesized)
gtggagggcatggatatcgagtccttgcataagtgtgctttggatgacagaagagaactgcatcagtttgcgcaggatgggcttatttgtcaggatatggactgtttaatgttgaccttt

SEQ ID NO: 103998 - DNA, 120 bp, Artificial Sequence
  ENSG00000095319_8 (sequence is synthesized)
ggggacattccacatcatgccccagtgcttttggcctgggctctcctccgtcacactctgaacccagaagagacaagcagtgtggtccggaagataggtggcacagccatccagctgaat

SEQ ID NO: 103999 - DNA, 120 bp, Artificial Sequence
  ENSG00000095319_9 (sequence is synthesized)
gtgtttcagtacttgacccgattgctccagtcccttgccagtgggggaaatgattgcaccaccagcactgcatgcatgtgtgtctatggactgctctctttcgttctgacctcgttggag

SEQ ID NO: 104000 - DNA, 120 bp, Artificial Sequence
  ENSG00000095319_10 (sequence is synthesized)
ctgcacaccctgggcaatcagcaggatataattgatacagcatgtgaagtattggccgacccttctcttccggaactgttctggggaacagagccaacttctggccttgggatcattctg

SEQ ID NO: 104001 - DNA, 120 bp, Artificial Sequence
  ENSG00000095319_11 (sequence is synthesized)
gacagtgtgtgtggaatgtttccccaccttctctccccactcctgcaactgctccgagccctggtatcagggaagtccacagccaaaaaggtgtatagcttcttggataagatgtctttc

SEQ ID NO: 104002 - DNA, 120 bp, Artificial Sequence
  ENSG00000095319_12 (sequence is synthesized)
tacaatgaactttataaacacaagcctcatgatgtgatctcccatgaagatggaactctttggcggagacaaacacccaaactcctttatccccttgggggtcaaaccaaccttcgcata

SEQ ID NO: 104003 - DNA, 120 bp, Artificial Sequence
  ENSG00000095319_13 (sequence is synthesized)
cctcaaggcactgtgggccaagtaatgttggatgatagggcatacctggtacgctgggaatactcctatagcagctggaccctctttacctgcgagattgaaatgttgcttcatgttgtt

SEQ ID NO: 104004 - DNA, 120 bp, Artificial Sequence
  ENSG00000095319_14 (sequence is synthesized)
tcaactgcagatgtgattcagcactgccagcgagtcaaacccatcattgatctcgtccataaggtcatcagtacagacctgtcgatagcagactgtctcctgcccatcacatctcgcatc

SEQ ID NO: 104005 - DNA, 120 bp, Artificial Sequence
  ENSG00000095319_15 (sequence is synthesized)
tacatgctgctgcagcggttaacgacagtgatctccccacctgtggatgtcattgcttcttgtgtcaactgcttaactgttttggctgcccgcaatccagcaaaggtctggactgatctt

SEQ ID NO: 104006 - DNA, 120 bp, Artificial Sequence
  ENSG00000095319_16 (sequence is synthesized)
cgtcacacaggttttttaccatttgtggcccatcctgtctccagcctgagtcagatgattagtgcggaagggatgaatgctggagggtacggaaacctcttgatgaacagtgaacagcct

SEQ ID NO: 104007 - DNA, 120 bp, Artificial Sequence
  ENSG00000095319_17 (sequence is synthesized)
cagggcgagtatggggttactattgcctttctgcgcttgatcaccacccttgtcaaggggcaacttggtagtacccagagccaaggacttgtaccctgtgtaatgtttgtgctgaaggag

SEQ ID NO: 104008 - DNA, 120 bp, Artificial Sequence
  ENSG00000095319_18 (sequence is synthesized)
atgcttcccagctaccataagtggcgctacaactctcatggagtgagggaacagattggttgcctgatcttggagctgattcatgcgatactgaacctgtgccacgagacagacctgcac

SEQ ID NO: 104009 - DNA, 120 bp, Artificial Sequence
  ENSG00000095319_19 (sequence is synthesized)
agcagtcatactcccagcctgcagtttctctgcatctgcagcctggcatacacagaagcaggacagacagttatcaatatcatgggcattggcgtggacaccattgacatggtgatggct

SEQ ID NO: 104010 - DNA, 120 bp, Artificial Sequence
  ENSG00000095319_20 (sequence is synthesized)
gctcagcctcgaagtgatggggcagagggccaggggcagggccagctgctgatcaagacagtgaaactggcattctccgtcaccaacaatgttattcggctgaaacctccttctaatgtg

SEQ ID NO: 104011 - DNA, 120 bp, Artificial Sequence
  ENSG00000095319_21 (sequence is synthesized)
gtgtcccccctggaacaggctctctcacaacatggtgctcatggaaacaacctcattgctgttctagccaaatacatctaccacaaacatgaccctgctttgccacgtcttgccattcag

SEQ ID NO: 104012 - DNA, 120 bp, Artificial Sequence
  ENSG00000095319_22 (sequence is synthesized)
ctgctgaaacgtctggccacggtggccccaatgtcagtgtatgcttgtctgggcaatgatgcggctgccattcgtgatgccttcctgacccgattgcagagcaaaattgaggacatgcgc

SEQ ID NO: 104013 - DNA, 120 bp, Artificial Sequence
  ENSG00000095319_23 (sequence is synthesized)
caggcctcatcgaactgtttctgaacctggaagttaaggatggcagtgatggctcaaaggaattcagccttgggatgtggagctgtctccatgcagtgctggagctgattgattcccaac

SEQ ID NO: 104014 - DNA, 120 bp, Artificial Sequence
  ENSG00000095319_24 (sequence is synthesized)
agcaagatcgatactggtgcccacccctgctgcatcgtgccgccattgcctttttgcatgctctgtggcaggatcggagggacagtgccatgctggtcctccgaaccaaacccaagtttt

SEQ ID NO: 104015 - DNA, 120 bp, Artificial Sequence
  ENSG00000095319_25 (sequence is synthesized)
gggaaaatttaaccagtccgctgtttggaaccctttctcctccctctgaaacatcagagcccagcatcctggaaacctgtgccctaatcatgaagataatttgcttggagatatactatg

SEQ ID NO: 104016 - DNA, 120 bp, Artificial Sequence
  ENSG00000095319_26 (sequence is synthesized)
tagtaaagggttcattagaccagtcattaaaggatacactgaagaaattttccatcgagaaacgctttgcctactggtcagggtatgtcaagtcattggcagttcacgtggccgaaacag

SEQ ID NO: 104017 - DNA, 120 bp, Artificial Sequence
  ENSG00000095319_27 (sequence is synthesized)
aaggcagcagctgcacctccttgttagagtaccagatgctggtgtccgcctggaggatgcttctcatcattgccaccactcatgcagatataatgcacctgactgactctgtggtgcgtc

SEQ ID NO: 104018 - DNA, 120 bp, Artificial Sequence
  ENSG00000095319_28 (sequence is synthesized)
gccagctctttcttgacgtgcttgatggaaccaaagcattactcctagttccagcctcagtgaactgccttcgccttggctccatgaagtgcactctgctgcttatcctcctccggcagt

SEQ ID NO: 104019 - DNA, 120 bp, Artificial Sequence
  ENSG00000095319_29 (sequence is synthesized)
ggaagagagagttaggttctgtggatgaaatccttggacccttgacggagatcctggagggagtgctgcaggccgaccagcaactcatggagaagaccaaggccaaggtgttctcagcat

SEQ ID NO: 104020 - DNA, 120 bp, Artificial Sequence
  ENSG00000095319_30 (sequence is synthesized)
tcatcacagtgttgcaaatgaaggagatgaaagtaagtgacatcccccagtactcccagctggtgctgaatgtctgtgagaccctccaagaggaagtgattgcactcttcgaccagaccc

SEQ ID NO: 104021 - DNA, 120 bp, Artificial Sequence
  ENSG00000095319_31 (sequence is synthesized)
gccacagtctggcattaggcagtgccacagaggacaaggacagcatggagactgacgactgttctcggtcccggcacagggaccagcgtgatggggtgtgtgtcctgggcctgcacctgg

SEQ ID NO: 104022 - DNA, 120 bp, Artificial Sequence
  ENSG00000095319_32 (sequence is synthesized)
ccaaggagctgtgtgaggtagacgaggatggtgactcctggctgcaggtaacccgcaggctccccatcctacccaccctcctcaccactctagaggtgagccttcgcatgaagcagaacc

SEQ ID NO: 104023 - DNA, 120 bp, Artificial Sequence
  ENSG00000095319_33 (sequence is synthesized)
tgcatttcactgaggccacattgcatctgctcctcaccctggctcgcactcagcagggagccacagcagtggctggagctggcatcacccagagcatttgtttgccccttctgagtgtgt

SEQ ID NO: 104024 - DNA, 120 bp, Artificial Sequence
  ENSG00000095319_34 (sequence is synthesized)
accagctgagcaccaacggcacagcacagacacctagtgcctctcggaagtccctggatgccccctcttggccaggagtctaccgcctgtccatgtccctgatggagcagctgctcaaaa

SEQ ID NO: 104025 - DNA, 120 bp, Artificial Sequence
  ENSG00000095319_35 (sequence is synthesized)
ctctgcgctacaacttcctgcctgaggccctggacttcgtgggtgtccaccaggagcggaccttacagtgcctcaacgcagtgaggacagtgcagagtctggcctgcctggaggaggcgg

SEQ ID NO: 104026 - DNA, 120 bp, Artificial Sequence
  ENSG00000095319_36 (sequence is synthesized)
accacaccgtgggttttattctgcagctctctaacttcatgaaggagtggcacttccacctgcctcagctcatgcgtgatatccaggtcaacctgggttacttgtgccaggcatgtacct

SEQ ID NO: 104027 - DNA, 120 bp, Artificial Sequence
  ENSG00000095319_37 (sequence is synthesized)
ctctcctgcacagtcgaaagatgctgcagcattacttacagaacaaaaatggggatggcctcccctcagctgttgcccagcgagtccagaggccaccgtctgctgcttctgctgccccct

SEQ ID NO: 104028 - DNA, 120 bp, Artificial Sequence
  ENSG00000095319_38 (sequence is synthesized)
cctcctcaaagcagcccgctgctgacacagaggcatcagagcagcaggccttgcacacagtccagtatggccttctcaagatcctcagcaagacgctggcagccctgcgccacttcaccc

SEQ ID NO: 104029 - DNA, 120 bp, Artificial Sequence
  ENSG00000095319_39 (sequence is synthesized)
cagatgtctgccagattctgctggatcagtccctggaccttgctgaatacaacttcctgtttgccctgagctttaccactcccacctttgactccgaagtggccccctccttcgggaccc

SEQ ID NO: 104030 - DNA, 120 bp, Artificial Sequence
  ENSG00000095319_40 (sequence is synthesized)
ttctggccacagtgaatgtggccctcaacatgcttggagagctggacaagaaaaaggagcccctcacccaggcagtggggctcagcacacaggcagaagggaccaggacgttaaagtccc

SEQ ID NO: 104031 - DNA, 120 bp, Artificial Sequence
  ENSG00000095319_41 (sequence is synthesized)
tcctgatgtttaccatggaaaactgcttctacctgctcatctctcaggcgatgcggtaccttagggacccggctgtgcacccccgggacaaacagcggatgaagcaggagctcagctctg

SEQ ID NO: 104032 - DNA, 120 bp, Artificial Sequence
  ENSG00000095319_42 (sequence is synthesized)
agttgagcacgctgctgtccagcctctcgcgctacttccgccggggagcccccagctcccctgccactggtgtcctcccctcgccgcagggcaagtccacctctctctccaaagccagcc

SEQ ID NO: 104033 - DNA, 120 bp, Artificial Sequence
  ENSG00000095319_43 (sequence is synthesized)
ctgagagtcaggagcctctgatccagttggtgcaggcgtttgtccggcatatgcaaagatagggcagtgctgttctgcccacctacccctctccaccagcctacactgcaccctggctgg

SEQ ID NO: 104034 - DNA, 120 bp, Artificial Sequence
  ENSG00000095319_44 (sequence is synthesized)
caggggtgctgctggctgctagggcctatacaatggagggcacctcctgtcacccccctcccggagtagccacgactccagccaccacccactgacgttatttttatactagatgaagag

SEQ ID NO: 104035 - DNA, 120 bp, Artificial Sequence
  ENSG00000095319_45 (sequence is synthesized)
gtcaacagcaggcatggggagccgagtcttctgtgctcaggtcctcacgctgcagacgccccctagaggaactttccttcctttccagcattccccacagcactgccggccaggggagag

SEQ ID NO: 104036 - DNA, 120 bp, Artificial Sequence
  ENSG00000095319_46 (sequence is synthesized)
gcggcagcccagcagagggctctatgcacgggtttcaaacctgttttccacactctgtctttgcagttttggtaattctgtggtctatttatacagatattaaaatcttgtttatagaca

SEQ ID NO: 104037 - DNA, 120 bp, Artificial Sequence
  ENSG00000095319_47 (sequence is synthesized)
tcctcctctctcacctccgacgcgtctcttggcgccccacccgcgcttccttctccggccgtgacgctccctcgagccacggggagctttgcggtctcctggggtaccccccacccacgt

SEQ ID NO: 104038 - DNA, 120 bp, Artificial Sequence
  ENSG00000095319_48 (sequence is synthesized)
ccctgctgcaggctcccagtgtcctgccccggcgtcgagtgcgccctgctggctccccgacctctcccgcgatctgttcttgttaggattttgtttcgcgttgagcggagccacgcttgc

SEQ ID NO: 104039 - DNA, 120 bp, Artificial Sequence
  ENSG00000095319_49 (sequence is synthesized)
ggcttctgtcctctccgcgcctcgtatcgttcttttcttgcactgaatcaagtcagccagcatgtccaaatcctccaagagatttcagggattgaactaggctttagggacaagaagatg

SEQ ID NO: 104040 - DNA, 120 bp, Artificial Sequence
  ENSG00000095319_50 (sequence is synthesized)
gtcagaccctggtggagcgcttcccaggagttatctcattcaattctcgcaactccgagaggcgccttctatttcacagatgactcagaagtccggctcagagctagccaagtgataaag

SEQ ID NO: 104041 - DNA, 120 bp, Artificial Sequence
  ENSG00000095319_51 (sequence is synthesized)
agagccttcaagctgaagtctgcgtacctccagtgctataaccagaccaccacgcctccttctgtcttccacattgcagctcgaaggagcagtagagaactgtggactattctgcttgga

SEQ ID NO: 104042 - DNA, 120 bp, Artificial Sequence
  ENSG00000095319_52 (sequence is synthesized)
ccagtccgctgtttggaaccctttctcctccctctgaaacatcagagcccagcatcctggaaacctgtgccctaatcatgaagataatttgcttggagatatactatgtagtaaagtgag

SEQ ID NO: 104043 - DNA, 120 bp, Artificial Sequence
  ENSG00000095319_53 (sequence is synthesized)
tgggggagtgggagttggtggcctaccactgggtgcatggctggaagagccaaggcagaggagagaactggtttggaaccattcatggaaggccagtgagctgtgttcctggccaatcca

SEQ ID NO: 104044 - DNA, 120 bp, Artificial Sequence
  ENSG00000095319_54 (sequence is synthesized)
ccgatggcatttatgattgtcagaaagagttattgtgaagcaaactccatgcaactgggattttatggaggaggaatcctggaaaggcctcagcctaacccacacgttggaggtgtcctg

SEQ ID NO: 104045 - DNA, 120 bp, Artificial Sequence
  ENSG00000095319_55 (sequence is synthesized)
tgggattttatggaggaggaatcctggaaaggcctcagcctaacccacacgttggaggtgtcctggagccgtctgcctttaagcccatgcaaggtcgttttctctgcctcaacaagggtc

SEQ ID NO: 104046 - DNA, 120 bp, Artificial Sequence
  ENSG00000095319_56 (sequence is synthesized)
ttctgccaattttctgggagctcttcagtgcccttctgtgggagcccattgaggtttttgtggaagcagagctctaagcctgtgtgttccggtctccaccaggtggccccaatgtcagtg

SEQ ID NO: 104047 - DNA, 120 bp, Artificial Sequence
  ENSG00000095319_57 (sequence is synthesized)
cctgggtgggttctgacaatcccagaagctgtgatctagcctgagagccctacctaccctaggcagggcaggggcaggctccatctcatttcctgtctttccctcctcccagggagccac

SEQ ID NO: 104048 - DNA, 120 bp, Artificial Sequence
  ENSG00000095319_58 (sequence is synthesized)
tgattttgttcacaaagggcagaaaaagaaaaggtccagtcttgtcagatgactctgaaatagtttccctggcccctggtgctgtaatcttcttgtctgtaggcagaatagtcatcttga

SEQ ID NO: 104049 - DNA, 120 bp, Artificial Sequence
  ENSG00000095319_59 (sequence is synthesized)
agttacagtgacaacagtttctatgtattgagtacctagtatgtgccagttatgtactctattaggtgcttaattatgtgaatttatttaatgattggaaggtttatgaagtagaatgga

SEQ ID NO: 104050 - DNA, 120 bp, Artificial Sequence
  ENSG00000095319_60 (sequence is synthesized)
gaggtctcactggggcactcctagtgaattgcaggatgttcctgaacgggggcttttcccttggggagcacagggtttgctgtcatgtgcttactctggctaaatgtttccttccatagt

SEQ ID NO: 104051 - DNA, 120 bp, Artificial Sequence
  ENSG00000095319_61 (sequence is synthesized)
tgtttccttccatagtcaagggcagccatgtaggttaagaatttggacttttatcagttagatcttggttcagatcccttaagaatacacttggggccgggcatggtggctcacgcctgt

SEQ ID NO: 104052 - DNA, 120 bp, Artificial Sequence
  ENSG00000095319_62 (sequence is synthesized)
tctcacaacatgccaaatacatctaccacaaacatgaccctgctttgccacgtcttgccattcagctgctgaaacgtctggccacggtggccccaatgtcagtgtatgcttgtctgggca

SEQ ID NO: 104053 - DNA, 80 bp, Artificial Sequence
  ENSG00000095321_0 (sequence is synthesized)
gtccccgccccacagccaacctcccgggcaccgttgcccgcccggggcccgctaccggcccaggccccgcctcgcgagtc

SEQ ID NO: 104054 - DNA, 120 bp, Artificial Sequence
  ENSG00000095321_1 (sequence is synthesized)
gggtgggcgcggggctgcctctaccggctggcggctgtaactcagcgaccttggcccgaaggctctagcaaggacccaccgaccccagccgcggcggcggcggcgcggactttgcccggt

SEQ ID NO: 104055 - DNA, 120 bp, Artificial Sequence
  ENSG00000095321_2 (sequence is synthesized)
gtgtggggcggagcggactgcgtgtccgcggacgggcagcgaagatgttagccttcgctgccaggaccgtggtgaagcctctgggcttcctgaagcccttctccttgatgaaggcttcca

SEQ ID NO: 104056 - DNA, 120 bp, Artificial Sequence
  ENSG00000095321_3 (sequence is synthesized)
gccgcttcaaggcacaccaggatgcactgccacggctgcccgtgccccctctccagcagtccctggaccactacctgaaggcgctgcagcccatcgtgagtgaggaggagtgggcccaca

SEQ ID NO: 104057 - DNA, 120 bp, Artificial Sequence
  ENSG00000095321_4 (sequence is synthesized)
ccaagcagctggtggatgagtttcaggcctcaggaggtgtaggggagcgcctgcagaaggggctggagcgtcgggccaggaagacggagaactggctgtctgagtggtggctcaagaccg

SEQ ID NO: 104058 - DNA, 120 bp, Artificial Sequence
  ENSG00000095321_5 (sequence is synthesized)
cctacctccagtaccgccagcctgtggtcatctactcgagcccaggcgtgatgctacccaagcaggacttcgtggacctgcagggtcagctccgatttgctgccaaactcattgagggtg

SEQ ID NO: 104059 - DNA, 120 bp, Artificial Sequence
  ENSG00000095321_6 (sequence is synthesized)
tgttggatttcaaggtcatgattgacaacgagaccctgcccgtggagtacctgggggggaagccactgtgcatgaaccagtactatcagatcttgtcctcctgccgagtgccgggcccca

SEQ ID NO: 104060 - DNA, 120 bp, Artificial Sequence
  ENSG00000095321_7 (sequence is synthesized)
agcaggacacagtcagcaacttcagcaagaccaagaagcctcccacgcacatcaccgtggtacacaactaccagttttttgagctggatgtgtaccacagtgacgggacacccctcactg

SEQ ID NO: 104061 - DNA, 120 bp, Artificial Sequence
  ENSG00000095321_8 (sequence is synthesized)
cggatcagatctttgtgcagctggagaagatctggaactcatccctacagaccaacaaggagcctgtgggcatcctcacctccaaccaccgcaactcctgggccaaggcatacaacaccc

SEQ ID NO: 104062 - DNA, 120 bp, Artificial Sequence
  ENSG00000095321_9 (sequence is synthesized)
tcatcaaagacaaggtgaaccgggattccgtgcgctccatccagaagagcatcttcaccgtgtgcctagatgcaaccatgcccagggtctcagaagacgtgtaccgcagccacgtggcag

SEQ ID NO: 104063 - DNA, 120 bp, Artificial Sequence
  ENSG00000095321_10 (sequence is synthesized)
gccagatgctgcatgggggcggcagcaggctcaacagcggcaaccgctggttcgacaagacgctgcagttcatcgtggcagaagatggctcctgtgggcttgtgtacgagcatgctgcag

SEQ ID NO: 104064 - DNA, 120 bp, Artificial Sequence
  ENSG00000095321_11 (sequence is synthesized)
ccccctattgtcacccttctggactatgtcatcgagtacacgaagaaacccgagcttgtgcggtctcccctggtgcccctgcccatgcccaagaagctgcggttcaacatcacccccgag

SEQ ID NO: 104065 - DNA, 120 bp, Artificial Sequence
  ENSG00000095321_12 (sequence is synthesized)
atcaagagcgacatcgagaaggccaagcagaacctcagcatcatgatccaggacctggatatcaccgtgatggtgttccaccattttggaaaagacttccccaagtcggagaagctaagc

SEQ ID NO: 104066 - DNA, 120 bp, Artificial Sequence
  ENSG00000095321_13 (sequence is synthesized)
ccagatgccttcatccagatggctttgcagctggcctactacaggatctacggacaggcatgtgccacctatgaaagtgcctccctgcgcatgtttcacctgggccgcaccgacaccatc

SEQ ID NO: 104067 - DNA, 120 bp, Artificial Sequence
  ENSG00000095321_14 (sequence is synthesized)
cgctcggcttccatggactcactcacctttgtcaaggccatggatgactccagcgtcacggagcaccagaaggtggagctgctgcggaaggccgtgcaggcccaccgaggctacaccgac

SEQ ID NO: 104068 - DNA, 120 bp, Artificial Sequence
  ENSG00000095321_15 (sequence is synthesized)
cgggccatccgcggggaggcctttgatcgacacctgctgggcctgaagctgcaggccatcgaggacctggtgagcatgcccgacatcttcatggacacctcctacgccatcgccatgcac

SEQ ID NO: 104069 - DNA, 120 bp, Artificial Sequence
  ENSG00000095321_16 (sequence is synthesized)
ttccacctctccaccagccaggtccctgccaagacagactgtgtcatgttcttcgggcccgtggtccccgacggctacggtgtctgctataaccccatggaggcccacatcaacttctcc

SEQ ID NO: 104070 - DNA, 120 bp, Artificial Sequence
  ENSG00000095321_17 (sequence is synthesized)
ctgtcggcctacaacagctgcgcggagaccaacgccgcccgcctggcgcattacctggagaaggcgctcctggacatgcgtgccctgctgcagagccacccccgggccaagctctgagcc

SEQ ID NO: 104071 - DNA, 120 bp, Artificial Sequence
  ENSG00000095321_18 (sequence is synthesized)
cctaggactcaggcctgccaatgccacagccaagcccaccctgggatgggccacccaccagggctcagctccttggttccctcttccttggttccctcttccctggtccccccaaatcta

SEQ ID NO: 104072 - DNA, 120 bp, Artificial Sequence
  ENSG00000095321_19 (sequence is synthesized)
ctgagccacggaccgcatcctccagggggcctgcaggccccagccaagtgccttccgtgggtcatcccagcacctgccagggcccgacctggggctgagtgcagaggctgagcaggacgt

SEQ ID NO: 104073 - DNA, 120 bp, Artificial Sequence
  ENSG00000095321_20 (sequence is synthesized)
taggcccgggcccctggcacgtcctccaccggtgcctcctctggggaagggaaccagccctccagagcaggagactggcaagagctctttgtctcaccagctcagccccggccactccct

SEQ ID NO: 104074 - DNA, 120 bp, Artificial Sequence
  ENSG00000095321_21 (sequence is synthesized)
gccaactccatgaccaggccaccatctgtaccctgcttcccaaactcccaggacctggagacaggattgtctggggccgaggggccagggtgtgaggtttcacctccgttgcggctgtgc

SEQ ID NO: 104075 - DNA, 120 bp, Artificial Sequence
  ENSG00000095321_22 (sequence is synthesized)
tcctgtggataacattgctagcgagccgcctctggttccactcagcttggttcctgcccccgccctgctgtatgatattaatgtggaaggtcatcaataaaggggaattgtgttggtgaa

SEQ ID NO: 104076 - DNA, 120 bp, Artificial Sequence
  ENSG00000095321_23 (sequence is synthesized)
tccgcggacgggcagcgaagatgttagccttcgctgccaggaccgtggaccgatcccagggctgtggtgtaacctcagcggccaggcagtctctgtcctccagccaagttttccctcatc

SEQ ID NO: 104077 - DNA, 120 bp, Artificial Sequence
  ENSG00000095321_24 (sequence is synthesized)
tgtcccggagtaccacctgtcatctttgtgggtggtactgaccctaacccaaggaatattagaggacattccccggtcaacatggttgtgttttcctatcactctaagagttaggctcaa

SEQ ID NO: 104078 - DNA, 120 bp, Artificial Sequence
  ENSG00000095321_25 (sequence is synthesized)
ggacaccagacggagttggaaaggtgcacaccactacctccaacagcttagaagacatgtggggacaggggagagacagctggacggtgacctcctccttcctcctccacaggtgaagcc

SEQ ID NO: 104079 - DNA, 120 bp, Artificial Sequence
  ENSG00000095321_26 (sequence is synthesized)
accgatcccagggctgtggtgtaacctcagcggccaggcagtctctgtcctccagccaagttttccctcatcaaaacgatcttcgcagattctgacagcccaggcaagtggctgcctctg

SEQ ID NO: 104080 - DNA, 120 bp, Artificial Sequence
  ENSG00000095321_27 (sequence is synthesized)
gctaggttctgctcactcactttgtagcacagttaggcttagagatccagccaaggcagacagacagggcccagaacctcagtcctgccatggaggaggacgggcagcagagagagaagg

SEQ ID NO: 104081 - DNA, 120 bp, Artificial Sequence
  ENSG00000095321_28 (sequence is synthesized)
gtgagtgagggcatcctcactgtgacctgctgctggctgcacatgcacagttctccagtgcccactgctctggcacggccgttcgtttgctgcccagagtttcgtgagcacatactctgt

SEQ ID NO: 104082 - DNA, 120 bp, Artificial Sequence
  ENSG00000095321_29 (sequence is synthesized)
gtctggcacttggcagggtgctgggtgatcaagaaggacacagtcaccagctccttggagctaacattcaagtagggaggagagaaaggtaatgaacaggatacaggttgtggacaaggt

SEQ ID NO: 104083 - DNA, 120 bp, Artificial Sequence
  ENSG00000095321_30 (sequence is synthesized)
ttcatgttccaggacagaggcaggagtggggtgcacggcaggtacaaccagatagaagatgcccttgtgcttggtgggacagcctcaggcaggggatatgtgtcactcagtgaccgatcg

SEQ ID NO: 104084 - DNA, 120 bp, Artificial Sequence
  ENSG00000095321_31 (sequence is synthesized)
cccaggttctgtatctgatctatgacacaggtgtacccagtttggcaaatatgtctacaccaatgtttggtgtgcttttctatttgcatctcatacttcaatacacagatttaaaaagtg

SEQ ID NO: 104085 - DNA, 120 bp, Artificial Sequence
  ENSG00000095370_0 (sequence is synthesized)
gaggcggagagcgtccttccctgccggtggagtaggcggtggagtggggccgggcaaggagcgcaggggcgtgtctgggggcgtggtctacaggtcagtctccgcccccggagtccggca

SEQ ID NO: 104086 - DNA, 120 bp, Artificial Sequence
  ENSG00000095370_1 (sequence is synthesized)
ctgagctctgcagctcagtggcccgagaaaggcaggagccgctgggtttaggaggtccccgggttgccggcggcgacagcgggggaagcatgactgctgtgggccgaaggtgccccgcgc

SEQ ID NO: 104087 - DNA, 120 bp, Artificial Sequence
  ENSG00000095370_2 (sequence is synthesized)
tggggtcccgaggggctgctggagagccagaggctggcagcgactatgtgaagttctccaaggagaagtacatcctggactcatcgccagagaaactccacaaggaattggaggaggagc

SEQ ID NO: 104088 - DNA, 120 bp, Artificial Sequence
  ENSG00000095370_3 (sequence is synthesized)
tcaaactcagcagcacggatctccgcagccatgcctggtaccatggccgcatcccccgagaggtctcggagaccttggtacaacgcaacggcgacttcctcatccgggactcactcacca

SEQ ID NO: 104089 - DNA, 120 bp, Artificial Sequence
  ENSG00000095370_4 (sequence is synthesized)
gcctgggcgactatgtgctcacgtgccgctggcgcaaccaggccttgcacttcaagatcaacaaggtggtggtgaaggcaggcgagagctacacacacatccagtacctgtttgagcagg

SEQ ID NO: 104090 - DNA, 120 bp, Artificial Sequence
  ENSG00000095370_5 (sequence is synthesized)
agagctttgaccacgtgcccgccctcgtgcgctatcatgtgggcagccgcaaggctgtgtcagagcagagtggtgccatcatctactgcccggtgaaccgcaccttcccactgcgctacc

SEQ ID NO: 104091 - DNA, 120 bp, Artificial Sequence
  ENSG00000095370_6 (sequence is synthesized)
tcgaggccagctatggcctgggacaggggagtagcaagcctgctagccccgtcagcccctcaggccccaagggcagccacatgaagcggcgcagcgtcaccatgaccgatgggctcactg

SEQ ID NO: 104092 - DNA, 120 bp, Artificial Sequence
  ENSG00000095370_7 (sequence is synthesized)
ctgacaaggtcacccgcagcgatggctgccccaccagtacgtcgctgccccgccctcgggactccatccgcagctgtgccctcagcatggaccagatcccagacctgcactcacccatgt

SEQ ID NO: 104093 - DNA, 120 bp, Artificial Sequence
  ENSG00000095370_8 (sequence is synthesized)
cgcccatctccgagagccctagctcccctgcctacagcactgtaacccgtgtccatgccgcccctgcagccccttctgccacagcattgcctgcctcccctgtcgcccgccgttccagtg

SEQ ID NO: 104094 - DNA, 120 bp, Artificial Sequence
  ENSG00000095370_9 (sequence is synthesized)
agccccagctgtgtcccggaagtgccccaaagacccatggggagtcagacaagggcccccacaccagcccctcccacacccttggcaaggcctccccgtcaccatcactcagcagctaca

SEQ ID NO: 104095 - DNA, 120 bp, Artificial Sequence
  ENSG00000095370_10 (sequence is synthesized)
gtgacccggactctggccactactgccagctccagcctcccgtgcgtggcagccgagagtgggcagcgactgagacctccagccagcaggccaggagctatggggagaggctaaaggaac

SEQ ID NO: 104096 - DNA, 120 bp, Artificial Sequence
  ENSG00000095370_11 (sequence is synthesized)
agggataaccggccactggaggtgggccttctgcgcaaggtcaaggagctgctggcagaagtggatgcccggacgctggcccggcatgtcaccaaggtggactgcctggttgctaggata

SEQ ID NO: 104097 - DNA, 120 bp, Artificial Sequence
  ENSG00000095370_12 (sequence is synthesized)
ctgggcgttaccaaggagatgcagaccctaatgggagtccgctggggcatggaactgctcaccctcccccatggccggcagctacgcctagacctgctggaaaggttccacaccatgtcc

SEQ ID NO: 104098 - DNA, 120 bp, Artificial Sequence
  ENSG00000095370_13 (sequence is synthesized)
atcatgctggccgtggacatcctgggctgcaccggctctgcggaggagcgggcagcgctgctgcacaagaccattcagctggcggccgagctgcgggggactatgggcaacatgttcagc

SEQ ID NO: 104099 - DNA, 120 bp, Artificial Sequence
  ENSG00000095370_14 (sequence is synthesized)
ttcgcggcggtcatgggtgccctggacatggcccagatttctcggctggagcagacatgggtgaccctgcggcagcgacacacagagggtgccatcctgtacgagaagaagctcaagcct

SEQ ID NO: 104100 - DNA, 120 bp, Artificial Sequence
  ENSG00000095370_15 (sequence is synthesized)
tttctcaagagcctcaacgagggcaaagaaggcccgccgctgagcaacaccacgtttcctcatgtgctgcccctcatcaccctgctggagtgtgactcggccccaccagagggccctgag

SEQ ID NO: 104101 - DNA, 120 bp, Artificial Sequence
  ENSG00000095370_16 (sequence is synthesized)
ccctggggcagcacggagcacggcgtggaggtggtgctggctcacctggaggccgcccgcacagtggcacaccacggaggcctgtaccacaccaatgctgaagtcaagctgcaggggttc

SEQ ID NO: 104102 - DNA, 120 bp, Artificial Sequence
  ENSG00000095370_17 (sequence is synthesized)
caggcccggccggagctcctggaggtgttcagcacggagttccagatgcgccttctctggggcagtcagggtgccagcagcagccaggcccggcgctatgagaagttcgacaaggtcctc

SEQ ID NO: 104103 - DNA, 120 bp, Artificial Sequence
  ENSG00000095370_18 (sequence is synthesized)
actgccctgtcccacaagctggaacctgctgtccgctccagcgagctgtgaccccagggacatttcccctctgcagctgcggacagcgtcaggggcagaggggcacacaactttccccag

SEQ ID NO: 104104 - DNA, 120 bp, Artificial Sequence
  ENSG00000095370_19 (sequence is synthesized)
agcaccccaaggacactgtgatcaacccgagaatgttctgggttcaactcaagcatctcccttgcacctccagggtcctgcgtggactctgggttccatcccacctgctacatgctcacc

SEQ ID NO: 104105 - DNA, 120 bp, Artificial Sequence
  ENSG00000095370_20 (sequence is synthesized)
aggtctccattgaggaagaacaggaacgccggttcccccaccagcttttgctgctccccttcctgctggggttccctgttttcgagccatgggaggcaggctgctcacgcctcctcactc

SEQ ID NO: 104106 - DNA, 120 bp, Artificial Sequence
  ENSG00000095370_21 (sequence is synthesized)
tctgtctgtccctcaccaacaccaaggcctccatctcactgtaaataagtctctgttctgtaaatagatgtacagaagccatgttatttctttcatataataaacttttatgactcttta

SEQ ID NO: 104107 - DNA, 120 bp, Artificial Sequence
  ENSG00000095370_22 (sequence is synthesized)
cccgctcctcccccgacaaggcgatgaggtaatcgcgccgctgagaggcacgcgcagccggtgcctagccggttggtccctgcgcccctgccccgccggccaccgcccccccacaccgtc

SEQ ID NO: 104108 - DNA, 120 bp, Artificial Sequence
  ENSG00000095370_23 (sequence is synthesized)
ccggccccggcagcctggccccaccatgaccgagcggtgcagcctgtggagtgccctgtcggccgccgcctgctgcttctaccgcggctccttcgtgcaggtgcagttctccaaggagaa

SEQ ID NO: 104109 - DNA, 80 bp, Artificial Sequence
  ENSG00000095370_24 (sequence is synthesized)
gccctagagccagccggggagctgcagctcagcggcgcccggcagggtcgggctgggctgggcccggccgacccggggag

SEQ ID NO: 104110 - DNA, 120 bp, Artificial Sequence
  ENSG00000095370_25 (sequence is synthesized)
ctctgggcgcccaggcgctccgcggggtgagggttcggcggccactcctgggactctgggctgcggtagatgccgttctccaaggagaagtacatcctggactcatcgccagagaaactc

SEQ ID NO: 104111 - DNA, 120 bp, Artificial Sequence
  ENSG00000095370_26 (sequence is synthesized)
aaagaggtgatggtgaaggccactggccctctagaggacaccccagcaatggaacccaacccttcagcagtggaggtagaccccatcagaaagcctgaggtccccacaggagacgtagaa

SEQ ID NO: 104112 - DNA, 120 bp, Artificial Sequence
  ENSG00000095370_27 (sequence is synthesized)
ctcaggaggaaggaaggaaaaacagccgtctctggcctctggcctctccaggctctccaccctgggggcagaatcaattctgtagccctctagcaccggcagtggctccgcagtcagctg

SEQ ID NO: 104113 - DNA, 120 bp, Artificial Sequence
  ENSG00000095370_28 (sequence is synthesized)
agatatccaaggggaggcgtccaggaggtagttgggtttccaagtctggggttggaggggcaggtccaggctgcctgagggtaggggtagcatttaaggccatgcggtggggggagtggt

SEQ ID NO: 104114 - DNA, 120 bp, Artificial Sequence
  ENSG00000095370_29 (sequence is synthesized)
tgggagaggcacctcaactttgatgtcccgagccttgagtggccactcgcaagctggccaagggcttcacacaatttgccaagatgacagaggggaccaagaagaccagcaaaaaagttc

SEQ ID NO: 104115 - DNA, 120 bp, Artificial Sequence
  ENSG00000095370_30 (sequence is synthesized)
ttcaagttcaagggctttgggagtctctccaacctccctcggtccttcactctgagacgatcctcagcttccatcagtaggcagtcccatttggagcctgacacctttgaagccaccagg

SEQ ID NO: 104116 - DNA, 120 bp, Artificial Sequence
  ENSG00000095370_31 (sequence is synthesized)
ggttggccaatcacagcctcagctcggctcccagggggctctggccacgcctcccatcccattgaccaatcgcaagccctgataacccgctctaaacaggctgatttcccaaagactgaa

SEQ ID NO: 104117 - DNA, 120 bp, Artificial Sequence
  ENSG00000095370_32 (sequence is synthesized)
gcccgctccagtgacatgtacagccacatgggcaccatgcctcgccccagcatcaagaaagcacagaactcacaggctgcccggcaggcccaggaggcgggtcccaagcccaacttggta

SEQ ID NO: 104118 - DNA, 120 bp, Artificial Sequence
  ENSG00000095370_33 (sequence is synthesized)
aagaatggcccctgctctgccttctcctcacaaggctgtcgcccgtcctgagctcctgctggacactgcagcccactcaggaaaactgagggctccagacggtggagagggagcagaatg

SEQ ID NO: 104119 - DNA, 120 bp, Artificial Sequence
  ENSG00000095370_34 (sequence is synthesized)
tgctgggcacaatggtggcccatcttggggagtggggcagggccaaagccaagagccttcccggcagggaatcccacaggccccatggctggtgtcctggcagagacggggctttccacc

SEQ ID NO: 104120 - DNA, 120 bp, Artificial Sequence
  ENSG00000095380_0 (sequence is synthesized)
acagaacagagtagaggcggcggcggcggcggccggacccagactggtagtgaggctttggaccccgagccgctgcaatgccgctggagctggagctgtgtcccgggcgctgggtgggcg

SEQ ID NO: 104121 - DNA, 120 bp, Artificial Sequence
  ENSG00000095380_1 (sequence is synthesized)
ggcaacacccgtgcttcatcattgccgagatcggccagaaccaccagggcgacctggacgtagccaagcgcatgatccgcatggccaaggagtgtggggctgattgtgctaagttccaga

SEQ ID NO: 104122 - DNA, 120 bp, Artificial Sequence
  ENSG00000095380_2 (sequence is synthesized)
agagtgagctagaattcaagtttaatcggaaagccttggagaggccatacacctcgaagcattcctgggggaagacgtacggggagcacaaacgacatctggagttcagccatgaccagt

SEQ ID NO: 104123 - DNA, 120 bp, Artificial Sequence
  ENSG00000095380_3 (sequence is synthesized)
acagggagctgcagaggtacgccgaggaggttgggatcttcttcactgcctctggcatggatgagatggcagttgaattcctgcatgaactgaatgttccatttttcaaagttggatctg

SEQ ID NO: 104124 - DNA, 120 bp, Artificial Sequence
  ENSG00000095380_4 (sequence is synthesized)
tttatcagatcgtgaagcccctcaaccccaacttctgcttcttgcagtgtaccagcgcatacccgctccagcctgaggacgtcaacctgcgggtcatctcggaatatcagaagctctttc

SEQ ID NO: 104125 - DNA, 120 bp, Artificial Sequence
  ENSG00000095380_5 (sequence is synthesized)
ctgacattcccatagggtattctgggcatgaaacaggcatagcgatatctgtggccgcagtggctctgggggccaaggtgttggaacgtcacataactttggacaagacctggaagggga

SEQ ID NO: 104126 - DNA, 120 bp, Artificial Sequence
  ENSG00000095380_6 (sequence is synthesized)
gtgaccactcggcctcgctggagcctggagaactggccgagctggtgcggtcagtgcgtcttgtggagcgtgccctgggctccccaaccaagcagctgctgccctgtgagatggcctgca

SEQ ID NO: 104127 - DNA, 120 bp, Artificial Sequence
  ENSG00000095380_7 (sequence is synthesized)
atgagaagctgggcaagtctgtggtggccaaagtgaaaattccggaaggcaccattctaacaatggacatgctcaccgtgaaggtgggtgagcccaaaggctatcctcctgaagacatct

SEQ ID NO: 104128 - DNA, 120 bp, Artificial Sequence
  ENSG00000095380_8 (sequence is synthesized)
ttaatctagtgggcaagaaggtcctggtcactgttgaagaggatgacaccatcatggaagaattggtagataatcatggcaaaaaaatcaagtcttaaaaataaagtgccattctctgaa

SEQ ID NO: 104129 - DNA, 120 bp, Artificial Sequence
  ENSG00000095380_9 (sequence is synthesized)
agggaaagatttgtgcccatgtgatcaagtgtgagcaactcactaagccctaacttatttctgagtcaccattcagagacattgattttttcgacttttgatttccaacttcaaaacaaa

SEQ ID NO: 104130 - DNA, 120 bp, Artificial Sequence
  ENSG00000095380_10 (sequence is synthesized)
cttgaaaattacagaattccatgcagattttacagcctctgtaggtaagctttcacaaggtgtttttctgcacttgtcccccctccttgccccgatcgctctgcccctctcttggggggg

SEQ ID NO: 104131 - DNA, 120 bp, Artificial Sequence
  ENSG00000095380_11 (sequence is synthesized)
tttctgcttctgtttatgccctggtgggccacaccacactcccacaagatgaacattatacaaaagaaaactcagtggaaggttccttctttaaacagaaagcactctcttcatctgcca

SEQ ID NO: 104132 - DNA, 120 bp, Artificial Sequence
  ENSG00000095380_12 (sequence is synthesized)
aatgaagtgagaagggtaggaaaattagattttattgaaaaaatatatttaaaactgatgttttttcagttctgtcttagggctagttagcagtgttatgagacacaaacaggaaggagt

SEQ ID NO: 104133 - DNA, 120 bp, Artificial Sequence
  ENSG00000095380_13 (sequence is synthesized)
gaggtggaaaggtatggaaggtactgggcatggcagctgaagcttgcaaccccagcactgtgggaggccagggtgggacaactgcttgaggtcaggagtttgagaacagcccgggcaaca

SEQ ID NO: 104134 - DNA, 120 bp, Artificial Sequence
  ENSG00000095380_14 (sequence is synthesized)
tgagaacagcccgggcaacatagcaagaccccatctccacagcaaattaaaaaaaaaaaaaaattagccacatgtggtggcacgtgcttgtggtcccagctacttgggagactgaggcag

SEQ ID NO: 104135 - DNA, 120 bp, Artificial Sequence
  ENSG00000095380_15 (sequence is synthesized)
gggcaacatagcaagaccccgtctctaccacaaaagaaaagaaaaagatggaaggggaaaagagaagagttaaaaataaagcagaggaagagcagtgagaaaggtgaaggaagggaggaa

SEQ ID NO: 104136 - DNA, 120 bp, Artificial Sequence
  ENSG00000095380_16 (sequence is synthesized)
tgaaggaagggaggaaaggaaggaaacggtgggagggagggaggaaggaaagggagagagggagggaaggaaagggaggaaggaaagggaggaaagggagggagggaggaaggaagggag

SEQ ID NO: 104137 - DNA, 120 bp, Artificial Sequence
  ENSG00000095380_17 (sequence is synthesized)
acttttgaaggtgatgtgtatgtttattactcttgtgctgatggtagcagtagtgtatacttaagtcccaactcaccaaattacattatgtgcagtttttagtatatcaattacacctta

SEQ ID NO: 104138 - DNA, 120 bp, Artificial Sequence
  ENSG00000095380_18 (sequence is synthesized)
ctgaagctggaaagaaatgataataaaaagtttttgagttcttataatttgacagcaaactgagattttactcttataacttgtgatccactgattccttcagcaagcatttgctgacat

SEQ ID NO: 104139 - DNA, 120 bp, Artificial Sequence
  ENSG00000095380_19 (sequence is synthesized)
ttaccaatttcctgagtcttgttgatgaatactagagaaggatgttgaagagcactaaataggtaacctcaagcagtgacgttatatctgaaaaaagtgactgaggttcacttttaagta

SEQ ID NO: 104140 - DNA, 120 bp, Artificial Sequence
  ENSG00000095380_20 (sequence is synthesized)
ctcgggttgaatgggccctgccagccatggatccttatgtagaggctgggcaaaaaaatgctccattttccccctttcgccaagaattgaaatagccccttttcctgctcgtttggccga

SEQ ID NO: 104141 - DNA, 120 bp, Artificial Sequence
  ENSG00000095380_21 (sequence is synthesized)
gtagaagggaaagcctttgaggctattcatgttttcactgcctggttttctgggtcaggattaggtcatgaccgtttcatgtttgttcatttggccttgggcccctggggcaggtagggt

SEQ ID NO: 104142 - DNA, 68 bp, Artificial Sequence
  ENSG00000095380_22 (sequence is synthesized)
gtttgttcatttggccttgggcccctggggcaggtagggtctggccaggggaaaggttcttttccaga

SEQ ID NO: 104143 - DNA, 120 bp, Artificial Sequence
  ENSG00000095380_23 (sequence is synthesized)
gcccgcctcggcctcccaaagtgcaggcatgagccaccacgcccagcccttttccagattcctgtagccagcaaagaccagcaccaaacgtttgttgggctaatggatgggtggatgcaa

SEQ ID NO: 104144 - DNA, 120 bp, Artificial Sequence
  ENSG00000095380_24 (sequence is synthesized)
tgttgggctaatggatgggtggatgcaaatgaatgtttgcatttgaatgaaatgactgagaacaaatctttgcctgctttcaagttgctgagcgtccctctactgcctaagatgaggggt

SEQ ID NO: 104145 - DNA, 120 bp, Artificial Sequence
  ENSG00000095380_25 (sequence is synthesized)
ttttctacttgtatgttattccttgcctgtcataacaacagtgtttttggacaatggtgaaaaggagctccctctttgatttttgtagatggcagttgaattcctgcatgaactgaatgt

SEQ ID NO: 104146 - DNA, 120 bp, Artificial Sequence
  ENSG00000095380_26 (sequence is synthesized)
gggatggtcaggaccagccctccctgagccaggctgatgaaatgatcagtgaatgtgctcccacccgtgtcagcttcttcaggcttctcttcagtaatgcatgtcactctggcctgtagc

SEQ ID NO: 104147 - DNA, 120 bp, Artificial Sequence
  ENSG00000095380_27 (sequence is synthesized)
agcagcaggagacacatgttatctaactttagcagtttctctggccacctagggtcacattagagtcttccactaattctctgaagcccatggccccagtactcctagactccagaatat

SEQ ID NO: 104148 - DNA, 120 bp, Artificial Sequence
  ENSG00000095380_28 (sequence is synthesized)
cctgagaaacatttaggcacggtgttccctgaggtaccagaagagcctgtggcatttcctaagccagggtggcactggtgggaagggcagtgagtcgttgcagaggtgggtgggtgatga

SEQ ID NO: 104149 - DNA, 120 bp, Artificial Sequence
  ENSG00000095380_29 (sequence is synthesized)
tgcagctattccttgtgcaacagtgaccttcagacagaggaactggtgggcctagaagcactgcctggcatgctgactatcagggcttcctggaagccgtggcctggaccttcttgcctt

SEQ ID NO: 104150 - DNA, 120 bp, Artificial Sequence
  ENSG00000095380_30 (sequence is synthesized)
ctgagtcatagagccaggcaggcatcctggggctgccaggcacacacacacctaacctgtaggctgtcggggtcaaggcaaagaccaaacaccaggcatgcctgggactgttgtcacctt

SEQ ID NO: 104151 - DNA, 120 bp, Artificial Sequence
  ENSG00000095380_31 (sequence is synthesized)
ttattctagtggggcctacctgcttccccaaatcaaagatgcatctataccaggaaattaaaataaagtaaaaagaaatagtttctttatagaggaaacaggagagaattagaccagaaa

SEQ ID NO: 104152 - DNA, 120 bp, Artificial Sequence
  ENSG00000095380_32 (sequence is synthesized)
ccagagtaagatttataacagctgagcacttaatttggctctctgagcagacagtaaaacataacaggatgcatgattatcacttgacattttttcctggcaccacattccaagcagaat

SEQ ID NO: 104153 - DNA, 120 bp, Artificial Sequence
  ENSG00000095380_33 (sequence is synthesized)
tgattccttgtactcttacgtggaggatatagagtaataaaacacgtaatttatttgaaagcatttatagagaagacaaacactggtcatgagcttcaggtacccttcattccctcatct

SEQ ID NO: 104154 - DNA, 120 bp, Artificial Sequence
  ENSG00000095380_34 (sequence is synthesized)
atttgtcactttagcagaccaagggtcagcaggcagcctggtgacttccggcttagggccacctccagcccttgctcatcctttctgttcccagctactggagaggctagcaggcgccaa

SEQ ID NO: 104155 - DNA, 120 bp, Artificial Sequence
  ENSG00000095380_35 (sequence is synthesized)
actggagaggctagcaggcgccaaagcccagtgagaatctgtgggaaggatgccattgttttaaaaacacattgtctctggccgggcttgatggctcacacctgtaatcccggcactttg

SEQ ID NO: 104156 - DNA, 120 bp, Artificial Sequence
  ENSG00000095383_0 (sequence is synthesized)
ctccctttgggaagctgcccgccgagtctccgagatttgtccctggtggtcccgcggacccctcgtccctccgcagtctccggctggcagcgatggagggcgctggggagaacgccccgg

SEQ ID NO: 104157 - DNA, 120 bp, Artificial Sequence
  ENSG00000095383_1 (sequence is synthesized)
agtccagctcctctgcccctgggtccgaagagtctgccagggatccacaggtgccgcctccggaggaagaatcgggggactgcgcccggtccctggaggcggtccccaagaaactctgtg

SEQ ID NO: 104158 - DNA, 120 bp, Artificial Sequence
  ENSG00000095383_2 (sequence is synthesized)
ggtatttaagtaagttcggcggcaaagggcccatccggggctggaaatcccgctggttcttctacgacgaaaggaaatgtcagctgtattactcgcggaccgctcaggatgccaatccct

SEQ ID NO: 104159 - DNA, 120 bp, Artificial Sequence
  ENSG00000095383_3 (sequence is synthesized)
tggacagcatcgacctctccagtgcagtgtttgactgtaaggcggacgctgaggaggggatcttcgaaatcaagactcccagccgggttattaccctgaaggccgccaccaagcaagcga

SEQ ID NO: 104160 - DNA, 120 bp, Artificial Sequence
  ENSG00000095383_4 (sequence is synthesized)
tgctgtactggctgcagcagctgcagatgaagcgctgggaattccacaacagcccgccggcacctcctgccacccctgatgccgccctggctgggaatgggcccgtcctgcacctcgagc

SEQ ID NO: 104161 - DNA, 120 bp, Artificial Sequence
  ENSG00000095383_5 (sequence is synthesized)
tagggcaagaagaggcagagctggaggagttcctgtgccctgtgaaaacaccccctgggctagtgggcgtggcagctgccttgcagcccttccctgcccttcagaatatttccctcaagc

SEQ ID NO: 104162 - DNA, 120 bp, Artificial Sequence
  ENSG00000095383_6 (sequence is synthesized)
acctggggactgaaatacagaacacaatgcacaacatccgtggcaacaagcaggcccagggaacaggccatgaacctccaggggaagattctccacagagtggggagcctcagagggagg

SEQ ID NO: 104163 - DNA, 120 bp, Artificial Sequence
  ENSG00000095383_7 (sequence is synthesized)
agcagcccttggcctctgacgccagcaccccagggagagagccagaggattctccaaagcctgcacccaagccttctctgaccatcagtttcgctcagaaagccaagcgccagaacaaca

SEQ ID NO: 104164 - DNA, 120 bp, Artificial Sequence
  ENSG00000095383_8 (sequence is synthesized)
ccttcccattcttttctgaaggaatcacacggaaccgaactgcccaggagaaagtggcagccttggagcaacaggttctgatgctcaccaaggagttaaagtctcagaaggagctagtga

SEQ ID NO: 104165 - DNA, 120 bp, Artificial Sequence
  ENSG00000095383_9 (sequence is synthesized)
agatcctgcacaaggcactggaggccgcccagcaggagaagcgggcgtccagcgcatacctggcggcggctgaggacaaggaccggctggagctggtgcggcacaaagtgcggcagatcg

SEQ ID NO: 104166 - DNA, 120 bp, Artificial Sequence
  ENSG00000095383_10 (sequence is synthesized)
cggagctgggccggcgggtggaggccctggagcaggagcgggagagcctggcgcacacagcgagcctgcgggagcagcaggtgcaggagctacagcagcacgtgcagctgcttatggaca

SEQ ID NO: 104167 - DNA, 120 bp, Artificial Sequence
  ENSG00000095383_11 (sequence is synthesized)
agaaccacgccaagcagcaggtcatctgcaagctctctgagaaggtcacccaggacttcacgcacccccctgaccagtctcctttgcgccccgacgctgccaacagggacttcctgagcc

SEQ ID NO: 104168 - DNA, 120 bp, Artificial Sequence
  ENSG00000095383_12 (sequence is synthesized)
agcaggggaagatagagcacctgaaggatgacatggaagcttaccggacccagaactgcttcctcaactccgagatccaccaggtcacaaagatctggagaaaggtggctgagaaggaga

SEQ ID NO: 104169 - DNA, 120 bp, Artificial Sequence
  ENSG00000095383_13 (sequence is synthesized)
ggctgcaggaggccctgggggacgaagccagcgagtgctcagagctgctgaggcagcttgtccaggaggcactgcagtgggaagctggggaggcctcatctgacagcatcgagctgagcc

SEQ ID NO: 104170 - DNA, 120 bp, Artificial Sequence
  ENSG00000095383_14 (sequence is synthesized)
ccatcagtaagtatgatgagtacggcttcctgacggtgcccgactatgaggtggaagacctgaagctgctggccaagatccaggcattggagtcacgatcccaccacctgctgggcctcg

SEQ ID NO: 104171 - DNA, 120 bp, Artificial Sequence
  ENSG00000095383_15 (sequence is synthesized)
aggctgtggatcggccgctgagggagcgctgggctgccctgggcgatcttgtgccctcagccgagctcaagcagctactgcgggcaggagtaccccgtgaacaccggcctcgtgtctgga

SEQ ID NO: 104172 - DNA, 120 bp, Artificial Sequence
  ENSG00000095383_16 (sequence is synthesized)
ggtggctggtccacctccgtgtccagcacctgcacactccaggctgctaccaggaactgctgagccggggccaggcccgcgagcaccctgctgcccgccagattgagctggacctgaacc

SEQ ID NO: 104173 - DNA, 120 bp, Artificial Sequence
  ENSG00000095383_17 (sequence is synthesized)
ggaccttccccaacaacaaacacttcacctgccccacctccagcttccccgacaagctccgccgggtgctgctggccttctcctggcagaaccccaccatcggctactgccagggcctga

SEQ ID NO: 104174 - DNA, 120 bp, Artificial Sequence
  ENSG00000095383_18 (sequence is synthesized)
acaggctggcggccattgccctgctggtcctagaggaggaggagagcgccttctggtgcctggtggccattgtggagaccatcatgcccgctgattactactgcaacacgctgacggcat

SEQ ID NO: 104175 - DNA, 120 bp, Artificial Sequence
  ENSG00000095383_19 (sequence is synthesized)
cccaggtggaccagcgggtgctccaggacctgctctcggagaagctgcccaggctgatggcccatctggggcagcaccacgtggatctctccctcgtcaccttcaactggttcctcgtgg

SEQ ID NO: 104176 - DNA, 120 bp, Artificial Sequence
  ENSG00000095383_20 (sequence is synthesized)
tctttgcggacagtctcattagcaacatcctccttcgggtctgggatgccttcctgtacgaggggacgaagtacaacgagaaggagatcttgaggctacagaatggcctggaaatctacc

SEQ ID NO: 104177 - DNA, 120 bp, Artificial Sequence
  ENSG00000095383_21 (sequence is synthesized)
agtacctgcgcttcttcaccaagaccatctccaacagccggaagctgatgaacatcgccttcaatgacatgaaccccttccgcatgaaacagctgcggcagctgcgcatggtccaccggg

SEQ ID NO: 104178 - DNA, 120 bp, Artificial Sequence
  ENSG00000095383_22 (sequence is synthesized)
agcggctggaggctgagctgcgggagctggagcagcttaaggcagagtacctggagaggcgggcatcccggcgcagagctgtgtccgagggctgtgccagcgaggacgaggtggaggggg

SEQ ID NO: 104179 - DNA, 120 bp, Artificial Sequence
  ENSG00000095383_23 (sequence is synthesized)
aagcctgacttggccacctcccctccccacagccttcctcacccttggctggcagacccactggaggtcaggcacggaccagtggcccagccctgggtgtcccatcaccatgtgaccttg

SEQ ID NO: 104180 - DNA, 120 bp, Artificial Sequence
  ENSG00000095383_24 (sequence is synthesized)
gacatgtcccttcccctctctggccctcagtttccccactgggacattgtgtgctgcaaagccattggttgggctacttcttcataggcacttacttacccagggatgccaccctttcgt

SEQ ID NO: 104181 - DNA, 120 bp, Artificial Sequence
  ENSG00000095383_25 (sequence is synthesized)
cacctcttccacagagcactttggcatgtaaacaagcaagagcactgcctctatagggtaacctggaacattctctaggttatatcaatataaaacaatgtaaatggtggaaatcattca

SEQ ID NO: 104182 - DNA, 120 bp, Artificial Sequence
  ENSG00000095383_26 (sequence is synthesized)
ctccttcgggtctgggatgccttcctgtacgaggggacgaaggtggtgtttcgctatgccttggccattttcaagtacaacgagaaggagatcttgaggctacagaatggcctggaaatc

SEQ ID NO: 104183 - DNA, 120 bp, Artificial Sequence
  ENSG00000095383_27 (sequence is synthesized)
aactgcccagtaggttagttggtatttgccccttttacagatgaggaaacagagggtcagagtggttcagtggcctgcctgaggccttccagccagaacatcagccaggacttaaattca

SEQ ID NO: 104184 - DNA, 120 bp, Artificial Sequence
  ENSG00000095383_28 (sequence is synthesized)
gacctactggtccctttaccacatcatgctgacatcaagaatagagaagggtgctatgagtattttatttttctttcagacttcctcttctgttgccattattggaaatttctaaggaaa

SEQ ID NO: 104185 - DNA, 120 bp, Artificial Sequence
  ENSG00000095397_0 (sequence is synthesized)
cccgggtggctcaacagttcgcaaagtccgggcttgcggccgggcggcgcagaggcgcggaggctccccgggcggctgcatcccggggctgccccggacatgccccgcaccccttgtcgg

SEQ ID NO: 104186 - DNA, 120 bp, Artificial Sequence
  ENSG00000095397_1 (sequence is synthesized)
cttgtcggacgcccgcgccgcttcaccggctgccactccccggagtgctctgggactagagcgccctccgccccaacttctgactttggggtcccccagccctagaggaacgggcgcccg

SEQ ID NO: 104187 - DNA, 120 bp, Artificial Sequence
  ENSG00000095397_2 (sequence is synthesized)
gctgggggagccccgggcatggtgtgacggggcagtcaggtcagctttgcggcgcccccaaactccagccacccgtcgtctccgtgccctccagaatgtagctgctgaccccgcgccccc

SEQ ID NO: 104188 - DNA, 120 bp, Artificial Sequence
  ENSG00000095397_3 (sequence is synthesized)
cggactccagcagcagtctccgccacctccgggctccagcagccaactcttgtgtctctcaggaacccgccgacgtctccgcgtcccccggattccaggttcgcgacccccgccgtcttc

SEQ ID NO: 104189 - DNA, 120 bp, Artificial Sequence
  ENSG00000095397_4 (sequence is synthesized)
gcgcctccgggactctagcagcggtctccgcgaccccctaggatccagccactgtacccgtgctccccaaacccaggctccagccgtcgtctccgcgctcccggggatccagctgtcgcg

SEQ ID NO: 104190 - DNA, 120 bp, Artificial Sequence
  ENSG00000095397_5 (sequence is synthesized)
ccagtacccgcgaggacagcggcaccgcccacaccccgcgcgctcagagcccggccgggcctcggcgtggagatgaacgcgccgctggacggcctgtcggtgagctcgtcctccaccggc

SEQ ID NO: 104191 - DNA, 120 bp, Artificial Sequence
  ENSG00000095397_6 (sequence is synthesized)
ctcggcggccggggcgggcggcggcgggggcgcggggctgcggttactgtctgccaacgtgcgccagctgcaccaagcgctgaccgcgctgctgagcgaggcggagcgggagcagttcac

SEQ ID NO: 104192 - DNA, 120 bp, Artificial Sequence
  ENSG00000095397_7 (sequence is synthesized)
cagttcacccactgcctgaacgcttaccacgcgcgccgcaacgtcttcgacctggtgcgcaccctgcgcgtgctgctggacagtccggtcaagcggcgcctgctgcccatgcttcgtctg

SEQ ID NO: 104193 - DNA, 120 bp, Artificial Sequence
  ENSG00000095397_8 (sequence is synthesized)
gtcatcccgcgctccgaccagctgctcttcgaccaatacacggccgagggcctctacctgcccgccaccaccccctacaggcagcccgcctggggcggccccgacagcgcggggccaggg

SEQ ID NO: 104194 - DNA, 120 bp, Artificial Sequence
  ENSG00000095397_9 (sequence is synthesized)
gaggtgcgcctggtgagtttgcggcgtgccaaggcccacgagggcttgggcttcagcatccgtgggggctcggagcacggcgtgggcatctacgtgtctctggtggaaccaggctctcta

SEQ ID NO: 104195 - DNA, 120 bp, Artificial Sequence
  ENSG00000095397_10 (sequence is synthesized)
gctgagaaggaaggactgcgggtcggggaccagattctgcgcgtcaacgacaaatccctggcccgggtgacccacgcggaggccgtcaaggctctgaagggctccaagaagctggtgctg

SEQ ID NO: 104196 - DNA, 120 bp, Artificial Sequence
  ENSG00000095397_11 (sequence is synthesized)
tctgtgtactcagcagggcgcatccctgggggctacgtcaccaaccacatctacacctgggtggacccgcagggccgcagcatctccccaccctcgggcctgccccagccccacggtggt

SEQ ID NO: 104197 - DNA, 120 bp, Artificial Sequence
  ENSG00000095397_12 (sequence is synthesized)
gccctgaggcagcaggagggtgaccggaggagcaccctgcacctcctgcaaggaggggatgagaaaaaggtgaacctggtgctgggggacggccggtccctgggcctcacgatccgtggg

SEQ ID NO: 104198 - DNA, 120 bp, Artificial Sequence
  ENSG00000095397_13 (sequence is synthesized)
ggagctgagtacggccttggcatttacatcactggcgtggacccaggctctgaagcagaaggcagcgggctcaaggttggggaccagattctagaagtgaatgggcggagctttctcaac

SEQ ID NO: 104199 - DNA, 120 bp, Artificial Sequence
  ENSG00000095397_14 (sequence is synthesized)
atcctacacgacgaggctgtcaggctgcttaagtcatctcggcacctcatcctgacagtgaaggacgtcgggaggctgccccatgcccgcaccactgtggacgagaccaagtggatcgcc

SEQ ID NO: 104200 - DNA, 120 bp, Artificial Sequence
  ENSG00000095397_15 (sequence is synthesized)
agttcccggatcagggagaccatggcgaactcggcagggtttcttggcgatctcacaacagaaggaataaacaagccaggattttacaagggcccagccggctcccaggtgaccctgagc

SEQ ID NO: 104201 - DNA, 120 bp, Artificial Sequence
  ENSG00000095397_16 (sequence is synthesized)
cgtctctgtggaggccctcgtcatggccctgttcaagctgctcaacacccacgccaagttctcactcctctctgaggtgagaggcaccatttccccgcaagacctagaacgcttcgacca

SEQ ID NO: 104202 - DNA, 120 bp, Artificial Sequence
  ENSG00000095397_17 (sequence is synthesized)
cctggtgctgaggcgtgagattgagtccatgaaggcgcggcagcccccaggccccggggctggggacacctactccatggtctcctacagtgacacgggttcatccacaggcagccacgg

SEQ ID NO: 104203 - DNA, 120 bp, Artificial Sequence
  ENSG00000095397_18 (sequence is synthesized)
cacctccaccaccgtcagctcggccaggaacactctggacctggaggaaactggcgaggctgtccagggcaatatcaacgccctcccagatgtgtccgtggatgatgtcagatccacctc

SEQ ID NO: 104204 - DNA, 120 bp, Artificial Sequence
  ENSG00000095397_19 (sequence is synthesized)
ccaggggctgtcaagcttcaagccactgcctcgcccaccacctctggcccaaggcaacgacctcccactaggccagccaaggaagctggggagagaggacctccagccaccttcctccat

SEQ ID NO: 104205 - DNA, 120 bp, Artificial Sequence
  ENSG00000095397_20 (sequence is synthesized)
gccttcctgctcgggcactgtcttctcggctccacagaaccgcagcccgccagcgggcaccgcacccaccccagggacctcctctgcacaggacttgccctcttcccccatctatgcctc

SEQ ID NO: 104206 - DNA, 120 bp, Artificial Sequence
  ENSG00000095397_21 (sequence is synthesized)
cgtctcccctgccaaccccagctccaagaggccgctggacgcccatctggccctggtcaaccaacaccccatcggccccttcccacgggtccagtcacccccgcacctgaaaagcccctc

SEQ ID NO: 104207 - DNA, 120 bp, Artificial Sequence
  ENSG00000095397_22 (sequence is synthesized)
tgcagaggccacagtggctgggggctgccttctgcccccatcaccctctggccacccagaccagacaggcacaaaccagcactttgtcatggtggaggtccaccgccccgacagcgagcc

SEQ ID NO: 104208 - DNA, 120 bp, Artificial Sequence
  ENSG00000095397_23 (sequence is synthesized)
agacgtcaatgaagtgagggcgctgccccagacgcgcacagcctctacgctctcccagctctcggacagcgggcagactctaagcgaggacagtggtgtggatgctggcgaggcagaggc

SEQ ID NO: 104209 - DNA, 120 bp, Artificial Sequence
  ENSG00000095397_24 (sequence is synthesized)
cagcgccccaggccgaggaaggcagtcggtgtccaccaagagcaggagtagcaaggagctgcctcggaacgagaggcccacagatggggccaacaaaccgcctggacttctggagcccac

SEQ ID NO: 104210 - DNA, 120 bp, Artificial Sequence
  ENSG00000095397_25 (sequence is synthesized)
gtccactctggtccgtgtgaagaaaagtgcggccaccctgggcatcgccatcgagggtggcgccaacacccgccagcccctgcctaggattgtcactattcagagaggcggctcagctca

SEQ ID NO: 104211 - DNA, 120 bp, Artificial Sequence
  ENSG00000095397_26 (sequence is synthesized)
caactgtgggcagctcaaggtgggccacgtgattctggaagtgaatgggctgacgcttcggggcaaggagcaccgggaggccgcccgcattatcgccgaggccttcaagactaaggaccg

SEQ ID NO: 104212 - DNA, 120 bp, Artificial Sequence
  ENSG00000095397_27 (sequence is synthesized)
tgactacattgactttctggtcactgagttcaatgtgatgctctagaggccaaggcctgagggcctcccaccactgcccagcccctggtcccagtccctttccaccgttggcttcatcaa

SEQ ID NO: 104213 - DNA, 120 bp, Artificial Sequence
  ENSG00000095397_28 (sequence is synthesized)
gctccttgcggggttggggctgcatggccagggtggcaggaagacatcccccctccatcccagcccactggaccagaactgggagaggaagagagcaggacaaggcagacagaaggtcag

SEQ ID NO: 104214 - DNA, 120 bp, Artificial Sequence
  ENSG00000095397_29 (sequence is synthesized)
gtcaggaactggtgctgtactgggtacacagtaggcgcccaggacaagtgggttgcaagacaggaagaaaggaaaaggaagggcagagtgctggtttctccaggttgggttgggggcact

SEQ ID NO: 104215 - DNA, 120 bp, Artificial Sequence
  ENSG00000095397_30 (sequence is synthesized)
gctgtcccccctccagctaggacccagcccatccccagatgcctgagcctttgtccaaagtgaggtcactcgagaattcatggacacggcccccagtcagggggcatcttgcaagacctt

SEQ ID NO: 104216 - DNA, 120 bp, Artificial Sequence
  ENSG00000095397_31 (sequence is synthesized)
tagtgccacaaataagcatcgagcacctccccattcacacccccattcctcctggctccttatcccccatggtgtttattatttatttccctccccatgcccctggggaccccaaggccc

SEQ ID NO: 104217 - DNA, 120 bp, Artificial Sequence
  ENSG00000095397_32 (sequence is synthesized)
cagcttccctctgcacccccagcctatcccagaggccttgcaggtgaccagcagtgtcattgtatttatatacagagcttatgactttaatttttcaataaagaaatctgaacaaggtta

SEQ ID NO: 104218 - DNA, 120 bp, Artificial Sequence
  ENSG00000095397_33 (sequence is synthesized)
catgacctgggcacatccctctcctctcttggcctcagtttccccatggaaagctgaaatacaccatccaactgtctcattctttatttgtccccaaattacttaactcattctatagac

SEQ ID NO: 104219 - DNA, 120 bp, Artificial Sequence
  ENSG00000095397_34 (sequence is synthesized)
cttagttgcttcatccaaaaagtggggaccataaccctgccctcatcccagatctgtgcagatgaaagagagggagggagagggaaagagagagatgctttggggtgtatttggccagag

SEQ ID NO: 104220 - DNA, 120 bp, Artificial Sequence
  ENSG00000095397_35 (sequence is synthesized)
gccaccaggctggatcccatgaagaaatctgggtgagagggtcttaaagtcataaactgagatccagttgccaggtggctgcatagttgccaacagtgtaatgtgtcaccttttgatctt

SEQ ID NO: 104221 - DNA, 120 bp, Artificial Sequence
  ENSG00000095397_36 (sequence is synthesized)
tgtaatgtgtcaccttttgatcttcatcagaaatctcaggctggtggccacctggccaaatacactgcagagcatgtctgtctgtctgtctgtctgtgtctctctgtgtgtgtgtgtgtg

SEQ ID NO: 104222 - DNA, 120 bp, Artificial Sequence
  ENSG00000095397_37 (sequence is synthesized)
tgtgtctcccccttcccttcctttcacctgcatagtattaaacattttcaaagttacttgccaacatctagaaagataccaggttttctataaaaaaaaaaactggatttctggatgctt

SEQ ID NO: 104223 - DNA, 120 bp, Artificial Sequence
  ENSG00000095397_38 (sequence is synthesized)
cttaaaaatcaggaagtctggcagcctgagcccacatcggctggagctgagccgcacctgcgagttgcatctgggatctccagttcaccggcccctaagctcctgagggttggcctgacc

SEQ ID NO: 104224 - DNA, 120 bp, Artificial Sequence
  ENSG00000095397_39 (sequence is synthesized)
ctgaggttgcctgtcaatcaccatttcttccctccactccttgtgttacctgcctggtcctgcggggttggcaacaactcaggagcccacctcgggtggttttggaggtgccgtgcacac

SEQ ID NO: 104225 - DNA, 120 bp, Artificial Sequence
  ENSG00000095397_40 (sequence is synthesized)
tgctgattgggaggctggacgctgccagtctgtccggagtttcctttacccctgagtagcccccagactgaactggcagcgagtggaggccacgatgcatggttctcttgaagctttgct

SEQ ID NO: 104226 - DNA, 120 bp, Artificial Sequence
  ENSG00000095397_41 (sequence is synthesized)
cttcctgccccaagtcaccctgtcccttgcccacgcccatttgatctgctcaaatgcacaactggagatgtgtgtctttccccacaggtttcttggcgatctcacaacagaaggaataaa

SEQ ID NO: 104227 - DNA, 120 bp, Artificial Sequence
  ENSG00000095397_42 (sequence is synthesized)
ctctcaggacctcttgttctccacttggaaaatggggccactggaccaaataagcggtccctaacctttttggaaatgagactcctgcctgaatgtaaaaaataaattccctagcccctg

SEQ ID NO: 104228 - DNA, 120 bp, Artificial Sequence
  ENSG00000095397_43 (sequence is synthesized)
agaaaaaggtgagtggggtggggaaaggaggccagcctctcagacaccgtattctccctccgaacccagaacagcagagctgcttggaggccgcaagaagaggctggttctgtccaggct

SEQ ID NO: 104229 - DNA, 120 bp, Artificial Sequence
  ENSG00000095397_44 (sequence is synthesized)
ctgtcttccctcaagtctgtactgaagggtggtgttttttctttgcttttctttttgacctgtgtagtgtatgttataatacaggctaagctgccacaataaaagagcttaaatactgtg

SEQ ID NO: 104230 - DNA, 120 bp, Artificial Sequence
  ENSG00000095464_0 (sequence is synthesized)
gtcacatcccaagagttacaggcagtttgaaagctctgctttctgcttgacctttggaagtcctatgagggaccatttacggtttcctcagtaatttccaccaggatgaatttccttctc

SEQ ID NO: 104231 - DNA, 120 bp, Artificial Sequence
  ENSG00000095464_1 (sequence is synthesized)
atcactctgcctcaggtagtgctctgaaggtcgtcctttctgaacaaacgcagcaaagcaagccacaccatgggtgagatcaaccaagttgccgtggagaaatacctggaggagaaccct

SEQ ID NO: 104232 - DNA, 120 bp, Artificial Sequence
  ENSG00000095464_2 (sequence is synthesized)
cagtttgccaaggagtactttgacaggaagttgcgggtggaggtgctgggagaaatcttcaagaacagccaggtgccagtccagtccagcatgtccttctctgagctgacccaggtggag

SEQ ID NO: 104233 - DNA, 120 bp, Artificial Sequence
  ENSG00000095464_3 (sequence is synthesized)
gagtcagccctgtgcttggagctgctgtggaccgtgcaggaggaggggggcaccccagagcagggggttcacagggccctgcagaggctggcccacctgctccaggctgaccgctgcagc

SEQ ID NO: 104234 - DNA, 120 bp, Artificial Sequence
  ENSG00000095464_4 (sequence is synthesized)
atgttcctgtgccggtcccggaacggcatacctgaggtggcctctaggttgctggatgtcacccccacctccaagtttgaggacaacctggtgggccctgacaaagaagttgtgtttcca

SEQ ID NO: 104235 - DNA, 120 bp, Artificial Sequence
  ENSG00000095464_5 (sequence is synthesized)
ttggacattgggatagtgggttgggctgctcacacgaagaaaactcataatgtcccagatgtgaaaaagaacagccatttttctgacttcatggacaagcaaactgggtatgtcactaag

SEQ ID NO: 104236 - DNA, 120 bp, Artificial Sequence
  ENSG00000095464_6 (sequence is synthesized)
aacctgctggcaaccccgatcgtggtgggcaaggaggttcttgctgtgatcatggcagttaacaaagtaaatgcatctgaattttccaaacaggatgaagaggtcttttccaaatacctc

SEQ ID NO: 104237 - DNA, 120 bp, Artificial Sequence
  ENSG00000095464_7 (sequence is synthesized)
aactttgtgtctatcatcctaaggcttcatcacaccagctacatgtacaatattgaatcccgaagaagccagatccttatgtggtcagccaataaagtatttgaagaactcacagatgtt

SEQ ID NO: 104238 - DNA, 120 bp, Artificial Sequence
  ENSG00000095464_8 (sequence is synthesized)
gagcgacagtttcacaaagcgctctacacggttagatcatatctgaactgtgaacgatactccattggactgctggacatgaccaaggagaaggaattctacgatgaatggccaatcaag

SEQ ID NO: 104239 - DNA, 120 bp, Artificial Sequence
  ENSG00000095464_9 (sequence is synthesized)
cttggagaagtagagccttataaaggtccaaagacacctgatggcagggaagtcaacttttataaaatcattgattacattttacatggaaaagaagagatcaaagtgattccgacgcct

SEQ ID NO: 104240 - DNA, 120 bp, Artificial Sequence
  ENSG00000095464_10 (sequence is synthesized)
cctgcagaccactggacactcattagtgggttgccaacatatgttgctgaaaatggatttatctgtaacatgatgaatgcccctgcggatgaatacttcacatttcagaaaggacctgta

SEQ ID NO: 104241 - DNA, 120 bp, Artificial Sequence
  ENSG00000095464_11 (sequence is synthesized)
gacgaaactggttgggtcattaagaatgttttgtccctgcctattgtcaacaagaaagaagatattgtgggagtggctacattttacaacaggaaggatggaaaacctttcgatgagcat

SEQ ID NO: 104242 - DNA, 120 bp, Artificial Sequence
  ENSG00000095464_12 (sequence is synthesized)
gatgaatacattaccgagactctcacacaatttcttggatggtctcttttaaatactgacacctacgataagatgaataagctagaaaacagaaaggacattgctcaggaaatgctcatg

SEQ ID NO: 104243 - DNA, 120 bp, Artificial Sequence
  ENSG00000095464_13 (sequence is synthesized)
acttgccagacccacgctcagcagaactgtacgaattccgcttcagtgacttcccccttacagagcacggattgattaaatgtggaatacgactgttttttgaaataaatgtggtggaga

SEQ ID NO: 104244 - DNA, 120 bp, Artificial Sequence
  ENSG00000095464_14 (sequence is synthesized)
aattcaaagtacctgtagaggttcttaccagatggatgtacactgtgaggaaagggtaccgagctgtcacttaccacaattggcggcatgggttcaacgtggggcagaccatgtttactt

SEQ ID NO: 104245 - DNA, 120 bp, Artificial Sequence
  ENSG00000095464_15 (sequence is synthesized)
tgctgatgacaggaagattaaagaagtactacacagatctcgaagcctttgccatgcttgctgctgctttctgccatgatattgaccacagaggcaccaataatttgtaccagatgaaat

SEQ ID NO: 104246 - DNA, 120 bp, Artificial Sequence
  ENSG00000095464_16 (sequence is synthesized)
ccacgtctccattagcaagacttcatggttcttctattttggagaggcaccacctggagtacagtaagactctgttgcaggatgagagtttaaacatcttccagaacctaaataagcggc

SEQ ID NO: 104247 - DNA, 120 bp, Artificial Sequence
  ENSG00000095464_17 (sequence is synthesized)
agtttgaaacagttattcatttgttcgaggtcgcaataatagcaactgacctggctttatatttcaagaagaggaccatgtttcaaaaaattgttgatgcctgtgaacaaatgcaaacgg

SEQ ID NO: 104248 - DNA, 120 bp, Artificial Sequence
  ENSG00000095464_18 (sequence is synthesized)
aagaagaagccatcaaatatgtaactgttgatccaaccaagaaagagattatcatggcaatgatgatgacggcatgtgacttgtctgctattaccaagccctgggaggtgcaaagtcagg

SEQ ID NO: 104249 - DNA, 120 bp, Artificial Sequence
  ENSG00000095464_19 (sequence is synthesized)
tagcacttatggttgcaaatgaattttgggaacaaggagatctggagagaacagtgttgcagcaacaacccattcctatgatggacagaaacaaaagagatgaattacctaaacttcaag

SEQ ID NO: 104250 - DNA, 120 bp, Artificial Sequence
  ENSG00000095464_20 (sequence is synthesized)
ttggatttattgattttgtttgtacttttgtatataaggagttctcacggtttcacaaagaaatcacacctatgctgagtggtcttcagaataacagagtagaatggaaatcactagctg

SEQ ID NO: 104251 - DNA, 120 bp, Artificial Sequence
  ENSG00000095464_21 (sequence is synthesized)
atgagtatgatgcaaagatgaaggtcattgaagaggaggcaaaaaagcaagaaggaggagccgaaaaagctgctgaagattcaggaggtggtgatgacaaaaagtccaaaacatgtttaa

SEQ ID NO: 104252 - DNA, 120 bp, Artificial Sequence
  ENSG00000095464_22 (sequence is synthesized)
tgttgtaatattatctaactggtctaaacttcaaatatcattttacctttgaagaaaaccagaaaacattcaaaagaacttcaacaaatcatcacgtaacaggatcttcagaaaaactac

SEQ ID NO: 104253 - DNA, 120 bp, Artificial Sequence
  ENSG00000095464_23 (sequence is synthesized)
cctgtgactatgaagaaaatatatattgctagcccaaaaatcccaggggcaaaataaagttcaacaaaagtgcaaaatatgacaaaaataggtacatttttggtgccaatttattttaaa

SEQ ID NO: 104254 - DNA, 120 bp, Artificial Sequence
  ENSG00000095464_24 (sequence is synthesized)
ttaaaaaatatgcaatcctgaaactagtcacaaattcttttttaaaacattaattgtatttatttgctaaggctgctataacaaagtaccacagactgggtgcttaaccaatagaaatgt

SEQ ID NO: 104255 - DNA, 120 bp, Artificial Sequence
  ENSG00000095464_25 (sequence is synthesized)
attttctcaaagtcctgggggctggaagttcaagatcaaggagttggcagggttggtttcttgggaggcctctcaacttggtttgcagatggccatcttctccctgtgtcttcacatggt

SEQ ID NO: 104256 - DNA, 120 bp, Artificial Sequence
  ENSG00000095464_26 (sequence is synthesized)
cttccctctgtgtgtctgtgtcctaatctccttttcttataaggactccagtaggactggattagggcctacccatgtgacctcattttagtcttaattacctcgttaatggccttatct

SEQ ID NO: 104257 - DNA, 120 bp, Artificial Sequence
  ENSG00000095485_0 (sequence is synthesized)
attcccaattttaggtggcagtcgcaacccatactattcggacagatggcacagaaaccgctgcgcctcttggcttgtggagatgttgaaggaaagtttgatattttattcaatagagtt

SEQ ID NO: 104258 - DNA, 120 bp, Artificial Sequence
  ENSG00000095485_1 (sequence is synthesized)
caagcaattcagaagaaaagtggaaactttgatctgctgttgtgtgtaggaaatttctttggctccacccaagatgctgaatgggaggagtataagactggcatcaagaaagctcctatt

SEQ ID NO: 104259 - DNA, 120 bp, Artificial Sequence
  ENSG00000095485_2 (sequence is synthesized)
cagacatatgtgcttggtgctaataaccaggaaacagtaaaatatttccaggatgctgatggatgtgaattagctgaaaacattacttatctgggtcgtaaaggtatcttcactggaagc

SEQ ID NO: 104260 - DNA, 120 bp, Artificial Sequence
  ENSG00000095485_3 (sequence is synthesized)
tcggggctgcagattgtgtacctcagtgggacagaatccttaaatgagccagtaccaggttatagttttagtcccaaggatgtgtcttctctgagaatgatgctgtgtacaacctcccag

SEQ ID NO: 104261 - DNA, 120 bp, Artificial Sequence
  ENSG00000095485_4 (sequence is synthesized)
tttaagggtgttgatatcttgctcacatccccatggcccaagtgtgtggggaactttgggaattcttctggagaagtggataccaaaaaatgtggttctgctttggtttccagtcttgcc

SEQ ID NO: 104262 - DNA, 120 bp, Artificial Sequence
  ENSG00000095485_5 (sequence is synthesized)
acgggcttgaaaccaagataccattttgctgctttggaaaagacctattatgagaggcttccatatcgaaaccatatcattctacaggaaaatgcacagcatgccacccggtttatagct

SEQ ID NO: 104263 - DNA, 120 bp, Artificial Sequence
  ENSG00000095485_6 (sequence is synthesized)
ctggcaaatgttggaaatccagaaaagaaaaagtatctttacgcgttcagtattgttcccatgaagctaatggatgcagcagaactggtaaaacagcctccggatgtcactgaaaaccct

SEQ ID NO: 104264 - DNA, 120 bp, Artificial Sequence
  ENSG00000095485_7 (sequence is synthesized)
tacagaaaatctgggcaggaagcatccataggaaagcaaattcttgcccctgtggaagaatcagcctgtcagtttttctttgatttaaatgaaaagcagggaaggaagcgttcatccaca

SEQ ID NO: 104265 - DNA, 120 bp, Artificial Sequence
  ENSG00000095485_8 (sequence is synthesized)
ggtagagatagcaaatcttctcctcatccaaagcagcctcgcaaacctcctcagcctccaggaccctgctggttttgccttgctagccctgaagtggaaaaacatttggtggtcaacatc

SEQ ID NO: 104266 - DNA, 120 bp, Artificial Sequence
  ENSG00000095485_9 (sequence is synthesized)
ggcacacattgctaccttgccctggccaaaggaggcttatctgatgaccatgtcctcatcctgcctattggacactaccagtcagtggtggagctttcagcagaggtggtagaagaggtg

SEQ ID NO: 104267 - DNA, 120 bp, Artificial Sequence
  ENSG00000095485_10 (sequence is synthesized)
ttataagagccatcacctccagctacaggtcattcctgtcccaatcagctgctctactactgatgacattaaagatgccttcattacccaggcacaggagcagcagatagagctgttgga

SEQ ID NO: 104268 - DNA, 120 bp, Artificial Sequence
  ENSG00000095485_11 (sequence is synthesized)
aatcccagagcactctgacatcaagcagattgcacagccaggagcagcatatttttatgttgaacttgacacaggagaaaagcttttccacagaattaaaaagaattttcctttgcagtt

SEQ ID NO: 104269 - DNA, 120 bp, Artificial Sequence
  ENSG00000095485_12 (sequence is synthesized)
tggaagggaggtcctggccagtgaagccatccttaatgttcctgataagtctgactggaggcagtgtcagatcagcaaggaagacgaggagaccctggctcgccgcttccggaaagactt

SEQ ID NO: 104270 - DNA, 120 bp, Artificial Sequence
  ENSG00000095485_13 (sequence is synthesized)
tgagccctatgactttactctggatgactaaaacaaagggaagaactttttatgaactccacaggaagtagtaaagcttttttttttttttaattaaaagaattttttttgagacaaagt

SEQ ID NO: 104271 - DNA, 89 bp, Artificial Sequence
  ENSG00000095485_14 (sequence is synthesized)
tagagttcctcccacctcagcctcatgagtagctgggaccacaggcgcatgctaccatgcctggcaaacttttttgattttttatagag

SEQ ID NO: 104272 - DNA, 90 bp, Artificial Sequence
  ENSG00000095485_15 (sequence is synthesized)
tcccacctcagcctcatgagtagctgggaccacaggcgcatgctaccatgcctggcaaacttttttgattttttatagagacagggtaat

SEQ ID NO: 104273 - DNA, 120 bp, Artificial Sequence
  ENSG00000095485_16 (sequence is synthesized)
gctgggattacaagcatgagacaccattcctggcctagaagcctatttttaaagaaactacaatctcccatggggactgtttccctgcctcttttgtgcagtcccatggaacttgcctac

SEQ ID NO: 104274 - DNA, 120 bp, Artificial Sequence
  ENSG00000095485_17 (sequence is synthesized)
tttgtgcagtcccatggaacttgcctacagcaagaggcctaagattgaatctttttggggaaaagtcattctaggatgaaaatcctatgttaaggccgggcgcagtggctcacgcctgta

SEQ ID NO: 104275 - DNA, 69 bp, Artificial Sequence
  ENSG00000095485_18 (sequence is synthesized)
tgaaactccatctcaaaaataaaagaataaaagtatgtctgtcatccagctcctatgtctgttatccag

SEQ ID NO: 104276 - DNA, 120 bp, Artificial Sequence
  ENSG00000095485_19 (sequence is synthesized)
aaagtatgtctgtcatccagctcctatgtctgttatccagctccaagtacagcttgtgtatatcaacattttcaaaaacctttaaactaccaaatgaaatccagatgtttttccatggtt

SEQ ID NO: 104277 - DNA, 120 bp, Artificial Sequence
  ENSG00000095485_20 (sequence is synthesized)
gtagtttggataagtgttgatgtatgactgagacttcaggcatcagaactgggaagatattttgcttccctagagtgtgcagaaaggactgagaagaaagataggtatggcatggcagga

SEQ ID NO: 104278 - DNA, 120 bp, Artificial Sequence
  ENSG00000095485_21 (sequence is synthesized)
caaagctaattccctgcccttcagcagaaacctgaaggaaacaagcataagacaaaaggaaattcctgctttacgtagtggaaaacaaactttgttagcttatttccaagtaataccttc

SEQ ID NO: 104279 - DNA, 120 bp, Artificial Sequence
  ENSG00000095485_22 (sequence is synthesized)
tcttagaatagagttcataaataatgctgtgggtgagagatcacttaattggttgttaacagaatctggggatgttctgggagcaagaataactttgagcaaacttcatattacttaaga

SEQ ID NO: 104280 - DNA, 120 bp, Artificial Sequence
  ENSG00000095485_23 (sequence is synthesized)
agggtgtggttatgcccttcctcaaactgccacttccttgactgaagcaaaataaaggattatatgctggtgatgaagtccttgaatactctataccagatattctgtggatcctaggag

SEQ ID NO: 104281 - DNA, 120 bp, Artificial Sequence
  ENSG00000095485_24 (sequence is synthesized)
ccctgaagcctagcttttcgctttgattttctgaattgactatgactgtctggacccgtgaactacagatgcactacgtaacaaactagaggctgggcgcagtggctcacgcgtgcactt

SEQ ID NO: 104282 - DNA, 120 bp, Artificial Sequence
  ENSG00000095485_25 (sequence is synthesized)
ccatctcaaaaaaaaaaaacaaaccaaaactagaagcccagtctgtgggctccagagggagagcttactttccaaaaaaggttttaataatttgtgttttgggtattgatatggaggagt

SEQ ID NO: 104283 - DNA, 120 bp, Artificial Sequence
  ENSG00000095485_26 (sequence is synthesized)
taccttttaatctctggcttccaacagttgttcctatttctacattcatagtagttcagctcccttatttgttaagattttttctctgattgccatacttatgaaattcaatgtgcagtt

SEQ ID NO: 104284 - DNA, 120 bp, Artificial Sequence
  ENSG00000095485_27 (sequence is synthesized)
ccttctgtccacatctgtattcatgtataaatttcaaagacatttcaaaatgtcttattatttatttgcatttcttgataacttttggtctgtatggatgactaagtttttgtttactag

SEQ ID NO: 104285 - DNA, 120 bp, Artificial Sequence
  ENSG00000095539_0 (sequence is synthesized)
gcttcccattccccgcccccacaacctgtgactctggctccctttgggggtcttgttagtctgggcctccccaggaagatgtgggggaggctctggcccctcctcctcagcatcctcaca

SEQ ID NO: 104286 - DNA, 120 bp, Artificial Sequence
  ENSG00000095539_1 (sequence is synthesized)
gcaactgcagtcccaggaccctcactgcggagaccgtctagagaactagatgccacccctcggatgaccataccctatgaagagctctctgggacccggcacttcaagggccaagcccag

SEQ ID NO: 104287 - DNA, 120 bp, Artificial Sequence
  ENSG00000095539_2 (sequence is synthesized)
aactactcaacactgctgctggaggaggcctcagcaaggctgctggtgggagcccgaggtgccctgttctctctcagtgccaacgacataggagatggggctcacaaagagatccactgg

SEQ ID NO: 104288 - DNA, 120 bp, Artificial Sequence
  ENSG00000095539_3 (sequence is synthesized)
gaagcctccccagagatgcaaagcaaatgtcatcaaaaagggaaaaacaaccagacggagtgctttaaccatgtgcggttcctgcagcggctcaattctacccacctctatgcatgtggg

SEQ ID NO: 104289 - DNA, 120 bp, Artificial Sequence
  ENSG00000095539_4 (sequence is synthesized)
actcacgccttccagcccctctgtgcagccattgatgctgaggccttcaccttgccaaccagcttcgaggaggggaaggagaagtgtccttatgacccagcccgtggcttcacaggcctc

SEQ ID NO: 104290 - DNA, 120 bp, Artificial Sequence
  ENSG00000095539_5 (sequence is synthesized)
atcattgatggaggcctctacacagccactaggtatgaattccggagcattcctgacatccgccggagccgccacccacactccctgagaactgaggagacaccaatgcattggctcaat

SEQ ID NO: 104291 - DNA, 120 bp, Artificial Sequence
  ENSG00000095539_6 (sequence is synthesized)
gatgcggagtttgtgttctccgtcctcgtgcgggagagcaaggccagtgcagtgggtgatgatgacaaggtgtactacttcttcacggagcgtgccactgaggagggctctggcagcttc

SEQ ID NO: 104292 - DNA, 120 bp, Artificial Sequence
  ENSG00000095539_7 (sequence is synthesized)
actcagagccgcagcagtcaccgtgtggcccgtgtggctcgtgtctgcaagggagacctgggagggaagaagatcctgcagaagaagtggacttccttcctgaaagcccgtctcatctgc

SEQ ID NO: 104293 - DNA, 120 bp, Artificial Sequence
  ENSG00000095539_8 (sequence is synthesized)
cacattccactgtatgagacactgcgtggggtctgcagcctggatgctgaaacctcaagccgtacacacttctatgcagccttcacgctgagcacacagtggaagaccctggaggcctca

SEQ ID NO: 104294 - DNA, 120 bp, Artificial Sequence
  ENSG00000095539_9 (sequence is synthesized)
gccatctgccgctatgacctggcagagatccaggctgtctttgcaggaccctatatggaataccaggatggttcccggcgctggggtcgctatgagggtggggtgcctgagccccggcct

SEQ ID NO: 104295 - DNA, 120 bp, Artificial Sequence
  ENSG00000095539_10 (sequence is synthesized)
ggctcgtgtatcacagattcattgcgcagccaaggctacaattcatcccaagacttgccatccctggtcctggactttgtaaagttgcacccactgatggctcggcccgttgtgcccaca

SEQ ID NO: 104296 - DNA, 120 bp, Artificial Sequence
  ENSG00000095539_11 (sequence is synthesized)
cgtggacggcccctgctgctcaagcgcaacatacgctacacacaccttacagggacacctgtcaccacgcctgctggacctacctatgacctgctctttctgggcacagctgatggctgg

SEQ ID NO: 104297 - DNA, 120 bp, Artificial Sequence
  ENSG00000095539_12 (sequence is synthesized)
atccacaaggccgtagtcctgggctctgggatgcacattattgaagagacacaagtgttcagggagtcccagtctgtggaaaatctagtcatctctctattgcagcacagcctctatgtg

SEQ ID NO: 104298 - DNA, 120 bp, Artificial Sequence
  ENSG00000095539_13 (sequence is synthesized)
ggggctcctagcggagtcatccagctaccactctccagctgctcccgctaccgatcctgctatgactgcatcttggcccgagacccctactgtggctgggaccctggcacccatgcctgc

SEQ ID NO: 104299 - DNA, 120 bp, Artificial Sequence
  ENSG00000095539_14 (sequence is synthesized)
gcagcagccaccaccatagccaacaggtcccagggaagcaggacagcactgatacaggacatagagagaggaaatcgaggctgtgagagcagcagggatacagggccaccaccaccactg

SEQ ID NO: 104300 - DNA, 120 bp, Artificial Sequence
  ENSG00000095539_15 (sequence is synthesized)
aagacccgctctgtgctccggggtgatgatgtcctcctgccctgtgaccagccatccaacctggcccgggccttgtggctactcaatgggagcatgggcctgagcgatgggcagggtggc

SEQ ID NO: 104301 - DNA, 120 bp, Artificial Sequence
  ENSG00000095539_16 (sequence is synthesized)
taccgtgtgggcgtggacgggctgctggttacagatgcacagcctgagcacagtggcaactatggctgctatgccgaggaaaatggcctccgcaccctgctggcctcctatagtctcaca

SEQ ID NO: 104302 - DNA, 120 bp, Artificial Sequence
  ENSG00000095539_17 (sequence is synthesized)
tcctgccccagctccaaaagcccctgccacacctggggcacagctggcacctgatgtgagactgctctatgtgctagccattgccgcgcttggtggcctctgcctcatcctggcctcctc

SEQ ID NO: 104303 - DNA, 120 bp, Artificial Sequence
  ENSG00000095539_18 (sequence is synthesized)
cctcctctatgtggcctgtctgcgggaaggcagacgagggcgccgacggaaatactcactgggtcgggccagccgggcaggaggatctgcggtgcaactgcagacagtctcaggccagtg

SEQ ID NO: 104304 - DNA, 120 bp, Artificial Sequence
  ENSG00000095539_19 (sequence is synthesized)
tcctggagaggaagatgagggtgatgatgagggggctgggggcctggagggcagctgtctccagatcatccctggggagggagccccagccccaccacccccaccgcccccaccgccacc

SEQ ID NO: 104305 - DNA, 120 bp, Artificial Sequence
  ENSG00000095539_20 (sequence is synthesized)
ggctgagctgaccaatggcttggtggcactgcccagccggctgcggaggatgaatggcaatagctatgtgcttctgaggcagagcaacaatggagtaccagcagggccctgctccttcgc

SEQ ID NO: 104306 - DNA, 120 bp, Artificial Sequence
  ENSG00000095539_21 (sequence is synthesized)
cgaggaactcagccgcatcctggaaaaaaggaagcacacgcagctcgtggagcagctagatgagagctctgtctgagcccagcctcccagaacaaatgctcttccaagccagcctatctg

SEQ ID NO: 104307 - DNA, 120 bp, Artificial Sequence
  ENSG00000095539_22 (sequence is synthesized)
tcccaggctgggccactgcctccctaacacagccaccctcccttcattacccccactccatacccttctcccaactttttgatgtccctgtagggctggccagtcaggcccagccaaagc

SEQ ID NO: 104308 - DNA, 120 bp, Artificial Sequence
  ENSG00000095539_23 (sequence is synthesized)
cccctcctcagtctccacagacccacatgtgagcagcccaggcccatcggtgctcctcagaggtaggtgctccctcaggatcaggtgccctgcagacccagagccagttcctatccccta

SEQ ID NO: 104309 - DNA, 120 bp, Artificial Sequence
  ENSG00000095539_24 (sequence is synthesized)
acctaaacacttataggtgaggactccatcctcctgttccattcatctgcccaaaccctttctctttctcccaggcagggctctgcaggtccatatgggctcaatgtcaccaccctctgc

SEQ ID NO: 104310 - DNA, 120 bp, Artificial Sequence
  ENSG00000095539_25 (sequence is synthesized)
atggccctgtgtgctggatggtcctgaaaccagacaagacctctgccagccacctaagccctgcgtacattcacatgcacacatggaagaatgtttatcggctgggctgcagtgccccca

SEQ ID NO: 104311 - DNA, 120 bp, Artificial Sequence
  ENSG00000095539_26 (sequence is synthesized)
ccctcaccttctcctggtgcattcttgtttcatccctgcttctggacttggggtaccctcccaattgccacatcctatctggtcctcttccccagccccatgtggtgacctctttgtcaa

SEQ ID NO: 104312 - DNA, 120 bp, Artificial Sequence
  ENSG00000095539_27 (sequence is synthesized)
gagcttgggaacgggccagcctggggaggtaagactgcatcactcccctcctctcccttcctgtgtggcccttgtgaatcagcctccccactctccttggtcattctcaagagtatgaga

SEQ ID NO: 104313 - DNA, 120 bp, Artificial Sequence
  ENSG00000095539_28 (sequence is synthesized)
gacagagctccaggcatgtcccatccccatgcacatgtggtaacacacacctgtatcacacatgtgcttacatttccactcacatgcacctctgagcctcccttgctgtcttggacctgt

SEQ ID NO: 104314 - DNA, 120 bp, Artificial Sequence
  ENSG00000095539_29 (sequence is synthesized)
ctgttgggtttagtccgtggacatttcagagggagatccccctcccatttaactgtcctcacaggcccttgcctaggatggatgaccaacactgcactcaatgagccagcctctcttttg

SEQ ID NO: 104315 - DNA, 120 bp, Artificial Sequence
  ENSG00000095539_30 (sequence is synthesized)
ggggaatcaagcatttgcttcctctagactacagcagggaaagggaggagaaatctgatgtctcaactggcacatgaagcccattcttggaactatgcaaagggcagaggctgggagttt

SEQ ID NO: 104316 - DNA, 120 bp, Artificial Sequence
  ENSG00000095539_31 (sequence is synthesized)
ggacgcttagctcctacccctgtcctacctcaccggggcactttcaggggccaggggcctctgaagtctctaggcctatatgggacaatcaattctgactgagctcccccattcccctcg

SEQ ID NO: 104317 - DNA, 120 bp, Artificial Sequence
  ENSG00000095539_32 (sequence is synthesized)
ggtgaggatgactgttatttttgtagctgagaacgtggaatcccacgggtttttactgcccttcacccaacctctcccacctccaccccacaatgaatgtatttattgtgagaatggcta

SEQ ID NO: 104318 - DNA, 120 bp, Artificial Sequence
  ENSG00000095539_33 (sequence is synthesized)
cacttctttaggaatgcccccacttacaaccaggtgggtggaacaggcatgtgacagagtggggagcctgggctcagctcctccccctgccgttggttaataaacaccctttttccccac

SEQ ID NO: 104319 - DNA, 120 bp, Artificial Sequence
  ENSG00000095539_34 (sequence is synthesized)
cagaaaaccaggactagctctactgtcgggggcagggtgaccccatcagtaacctacaacccctctagaacttcacaactccctctcaccatggagtttgcatttgatgcagaaaggcat

SEQ ID NO: 104320 - DNA, 120 bp, Artificial Sequence
  ENSG00000095539_35 (sequence is synthesized)
gtgatccctccctccttctgacctcttagctggggattccatggccacacaaccctgtgactccatgtccccccgattccaggaccccccatggccccatgattccttgactcctatgac

SEQ ID NO: 104321 - DNA, 120 bp, Artificial Sequence
  ENSG00000095539_36 (sequence is synthesized)
cttcatctagatgcgcccacccctgatcaccaggggacaggctcctgagcctatacagaaggtgatatctgcctccaggattggctctgctccccaatacaactatttgcagaggaaatt

SEQ ID NO: 104322 - DNA, 120 bp, Artificial Sequence
  ENSG00000095539_37 (sequence is synthesized)
gggatcctccgcttccatcctgactccttggcaggcacacaggcctctttagtaaggttcacactattcattgatcatggtgttagggcatgacaagaaaatgacaacagttcaagaatt

SEQ ID NO: 104323 - DNA, 120 bp, Artificial Sequence
  ENSG00000095539_38 (sequence is synthesized)
caggacatagagagaggaaatcgaggctgtgagagcagcagggatacaggtaagtgactcatatgagtgtgggtctagctacgcagactgtcctctttgccatttactgccatgtgtacg

SEQ ID NO: 104324 - DNA, 120 bp, Artificial Sequence
  ENSG00000095539_39 (sequence is synthesized)
tatatgtttgtatctgagtggctgtggctatgtacatttggtaaggatgactcaaacacagagcctggcacagagtaagtgctcaacaaacatttactgcccaaatgaattataaactag

SEQ ID NO: 104325 - DNA, 120 bp, Artificial Sequence
  ENSG00000095539_40 (sequence is synthesized)
ggtgctgtggggccgcggagccgcgcgtcgctgtctctatggccccggatccgagcgcaaagctgggccaggcctttctcaccaccaagtcccccggtcctgcatgacggctctagaggg

SEQ ID NO: 104326 - DNA, 120 bp, Artificial Sequence
  ENSG00000095539_41 (sequence is synthesized)
gcgcgggccaggcctcgggctgcgcggggtgcaaaccggccaccacggagtcggggaccagcgcggggagggggccgcgtggcgaacagtgttccccaggatctgggtcacgtctcccgg

SEQ ID NO: 104327 - DNA, 120 bp, Artificial Sequence
  ENSG00000095539_42 (sequence is synthesized)
gctggtgctgtggggccgcggagccgcgcgtcgctgtctctatggccccggatccgagcgcaaagtctgggcctccccaggaagatgtgggggaggctctggcccctcctcctcagcatc

SEQ ID NO: 104328 - DNA, 120 bp, Artificial Sequence
  ENSG00000095539_43 (sequence is synthesized)
gcgggaaggcagacgagggcgccgacggaaatactcactgggtcgggccagccgggcaggaggatctgcggtgcaactgcagacagtctcaggcagggctctgcaggtccatatgggctc

SEQ ID NO: 104329 - DNA, 120 bp, Artificial Sequence
  ENSG00000095539_44 (sequence is synthesized)
cgcagctggtgctgtggggccgcggagccgcgcgtcgctgtctctatggccccggatccgagcgcaaaggtgagcaaggcgaggagtgcgggcggcgccctggcgtgagcctggggctgc

SEQ ID NO: 104330 - DNA, 120 bp, Artificial Sequence
  ENSG00000095564_0 (sequence is synthesized)
agttgtgcgtgccgacgcccgcgtcagcaaagagcggagctgagggtacccggtttgaagtcgtgcgggtcggaggactgccgcctccgctaccgtcttggacccctgcttaccggccgc

SEQ ID NO: 104331 - DNA, 120 bp, Artificial Sequence
  ENSG00000095564_1 (sequence is synthesized)
gggacgagctcgggtaggcggcagggcagatgcccgagggcctgcgctggaacgccccacgccgcaccggccgctcccctgtgctccgcggcctgggcctgcgccgctcagctctctgga

SEQ ID NO: 104332 - DNA, 120 bp, Artificial Sequence
  ENSG00000095564_2 (sequence is synthesized)
tggaaactagcgcctcagctgcgcggcgcgtaggtcgcggggagctccgaaccgccggcgcccggccatggcggtctccaggctagatcgcctttttattttactggatactggcactac

SEQ ID NO: 104333 - DNA, 120 bp, Artificial Sequence
  ENSG00000095564_3 (sequence is synthesized)
tcctgttacaagaaaagctgctgcacagcaacttggagaagtggtgaagcttcatccccatgaactaaataatctcctgtctaaagtgttgatatatttaaggagtgcaaattgggatac

SEQ ID NO: 104334 - DNA, 120 bp, Artificial Sequence
  ENSG00000095564_4 (sequence is synthesized)
ccggattgcagcaggacaagctgttgaagctatagtgaaaaatgtacctgagtggaatccagtgccgagaaccagacaagaacctacttccgaaagttctatggaagattcacctactac

SEQ ID NO: 104335 - DNA, 120 bp, Artificial Sequence
  ENSG00000095564_5 (sequence is synthesized)
agagcgattgaattttgacagatttgatatatgtagattgttacaacatggtgcatcactcctgggatctgctggtgccgaatttgaagtccaagatgaaaaatcaggtgaagtggatcc

SEQ ID NO: 104336 - DNA, 120 bp, Artificial Sequence
  ENSG00000095564_6 (sequence is synthesized)
taaagagaggatagcacgccaacgaaaattattacagaagaaacttggccttaatatgggagaagcaattggaatgagtactgaagaacttttcaatgatgaggatttggattatacccc

SEQ ID NO: 104337 - DNA, 120 bp, Artificial Sequence
  ENSG00000095564_7 (sequence is synthesized)
aacttcagcatcctttgttaacaaacaacctactcttcaggcagctgaattgattgactcagagtttcgagcaggaatgagcaatagacaaaagaacaaagctaaaagaatggccaagtt

SEQ ID NO: 104338 - DNA, 120 bp, Artificial Sequence
  ENSG00000095564_8 (sequence is synthesized)
atttgcaaaacagagatccagggatgcagtggaaactaatgagaagagcaatgatagcactgatggggagccagaagaaaagagacggaaaatagcaaatgttgttattaatcagtctgc

SEQ ID NO: 104339 - DNA, 120 bp, Artificial Sequence
  ENSG00000095564_9 (sequence is synthesized)
aaatgattccaaagtcttgattgataatattccagacagctcttccttaattgaagagacaaatgaatggcctttggaaagcttttgtgaagaactttgcaatgacctttttaatccctc

SEQ ID NO: 104340 - DNA, 120 bp, Artificial Sequence
  ENSG00000095564_10 (sequence is synthesized)
ctgggaggttcgacatggtgcaggcactggacttagggaaattcttaaagctcatgggaaaagtggtggtaaaatgggtgacagcactttagaagagatgattcagcagcatcaagagtg

SEQ ID NO: 104341 - DNA, 120 bp, Artificial Sequence
  ENSG00000095564_11 (sequence is synthesized)
gttggaagacttggttattagactcctttgtgtttttgcattagacagatttggagactttgtttctgatgaagttgtggcaccagttcgtgaaacttgtgctcaaacattaggtgtggt

SEQ ID NO: 104342 - DNA, 120 bp, Artificial Sequence
  ENSG00000095564_12 (sequence is synthesized)
tttaaaacacatgaacgaaacaggagttcataagactgtggatgtgctgctaaaattacttacacaagaacaatgggaagttagacatggtggtctgctgggaataaaatatgctttggc

SEQ ID NO: 104343 - DNA, 120 bp, Artificial Sequence
  ENSG00000095564_13 (sequence is synthesized)
agtccgtcaggatgtaattaatactttattgcctaaagttttaactagaataattgaaggactccaggatcttgatgatgatgtcagagctgttgctgcagcatcattagtgcctgtagt

SEQ ID NO: 104344 - DNA, 120 bp, Artificial Sequence
  ENSG00000095564_14 (sequence is synthesized)
agaaagccttgtctatcttcagacacaaaaggtgcccttcattataaatacattgtgggatgctcttctggaattagatgatctaacagcttcaacaaatagtattatgactctcctttc

SEQ ID NO: 104345 - DNA, 120 bp, Artificial Sequence
  ENSG00000095564_15 (sequence is synthesized)
atccttgttaacttaccctcaggtccaacaatgcagtattcagcagtcactgacagttttagttccacgtgtctggccttttttgcatcacactatatcatcagttcgaagagcagcatt

SEQ ID NO: 104346 - DNA, 120 bp, Artificial Sequence
  ENSG00000095564_16 (sequence is synthesized)
ggaaactctgtttacgttattatcaacacaggaccagaactcttcatcttggcttatacctatactgcctgatatgctccgacacatttttcagttctgtgttttggaaagcagccagga

SEQ ID NO: 104347 - DNA, 120 bp, Artificial Sequence
  ENSG00000095564_17 (sequence is synthesized)
aattctggaccttattcacaaggtttggatggaactgttgagtaaggcttcagttcagtatgtggtagcagctgcttgcccatggatgggtgcttggctttgcttgatgatgcagccttc

SEQ ID NO: 104348 - DNA, 120 bp, Artificial Sequence
  ENSG00000095564_18 (sequence is synthesized)
tcatttacctatcgatttaaatatgttgctagaagtaaaagctagagccaaggaaaaaacaggtggtaaggtgcgccaaggccaaagccagaataaagaagtacttcaggagtatattgc

SEQ ID NO: 104349 - DNA, 120 bp, Artificial Sequence
  ENSG00000095564_19 (sequence is synthesized)
aggtgccgacaccatcatggaagacccagccaccagggattttgtagttatgcgggccagaatgatggcagccaagttgttaggagcactttgttgctgtatttgtgatccaggtgtaaa

SEQ ID NO: 104350 - DNA, 120 bp, Artificial Sequence
  ENSG00000095564_20 (sequence is synthesized)
tgtggtaactcaagaaattaaaccagctgaatccctgggccagttactactcttccatttgaactccaagtctgctttacagaggattagtgtagctttggtaatctgtgaatgggctgc

SEQ ID NO: 104351 - DNA, 120 bp, Artificial Sequence
  ENSG00000095564_21 (sequence is synthesized)
tttacaaaaggagtgtaaagctgttaccttagctgtgcagccgcgtttacttgatatcctttcagaacatttatattatgacgaaattgccgttccattcacacgaatgcagaatgaatg

SEQ ID NO: 104352 - DNA, 120 bp, Artificial Sequence
  ENSG00000095564_22 (sequence is synthesized)
taaacaacttatatcatcattagctgatgtacatattgaagttggtaatcgagtaaacaacaatgttttaacaatagatcaagctagtgacttggtcactactgtttttaatgaagccac

SEQ ID NO: 104353 - DNA, 120 bp, Artificial Sequence
  ENSG00000095564_23 (sequence is synthesized)
atcatctttcgatttaaatcctcaagtgttacaacagttagatagtaaacgacagcaggtccaaatgacagttacagagaccaaccaggagtggcaagtgttgcagttgagagtgcatac

SEQ ID NO: 104354 - DNA, 120 bp, Artificial Sequence
  ENSG00000095564_24 (sequence is synthesized)
ttttgctgcctgtgcagttgtgagcttgcagcagcttccggagaaattaaatcctatcataaaaccattaatggagacaattaaaaaagaagagaatacactagtgcaaaactatgcagc

SEQ ID NO: 104355 - DNA, 120 bp, Artificial Sequence
  ENSG00000095564_25 (sequence is synthesized)
tcagtgcatagctaaactccttcagcagtgcacaacaaggacgccctgtcccaattcaaaaattattaaaaacctctgtagctcactttgtgtggacccatatctaactccttgtgtcac

SEQ ID NO: 104356 - DNA, 120 bp, Artificial Sequence
  ENSG00000095564_26 (sequence is synthesized)
atgtccagtaccaacacaaagtggccaggaaaattctaaaggatccacctcagaaaaagatggaatgcaccatactgtcaccaagcacagaggtataattacactctacaggcaccagaa

SEQ ID NO: 104357 - DNA, 120 bp, Artificial Sequence
  ENSG00000095564_27 (sequence is synthesized)
agctgcctttgctatcacaagtaggcgaggtcctacccccaaagcagtaaaagctcaaatagcagatcttcctgcaggaagtagtggaaatattcttgttgaacttgatgaggcccagaa

SEQ ID NO: 104358 - DNA, 120 bp, Artificial Sequence
  ENSG00000095564_28 (sequence is synthesized)
gccttacctggtacaacggagaggagctgaatttgctttgacaactatagtaaagcattttggtggtgaaatggcagtgaagttgccacatctctgggatgctatggttggcccattgag

SEQ ID NO: 104359 - DNA, 120 bp, Artificial Sequence
  ENSG00000095564_29 (sequence is synthesized)
gaatacaatcgacataaataattttgatggaaaatccctcctggataagggagatagccctgctcaagaattggtgaattctctgcaggtttttgaaacagcagcagcttcaatggattc

SEQ ID NO: 104360 - DNA, 120 bp, Artificial Sequence
  ENSG00000095564_30 (sequence is synthesized)
cttcaataccccagtactgcagtgaggcacatggctgctcgttgtgtaggtgtcatgagcaaaatagctaccatggaaacaatgaatatttttttggagaaggttcttccgtggctggga

SEQ ID NO: 104361 - DNA, 120 bp, Artificial Sequence
  ENSG00000095564_31 (sequence is synthesized)
gcaattgatgacagtgtcaaacaagagggtgcaattgaagcacttgcctgtgtaatggaacaactagatgttggtattgttccatatattgtccttttagttgttcctgtattaggaaga

SEQ ID NO: 104362 - DNA, 120 bp, Artificial Sequence
  ENSG00000095564_32 (sequence is synthesized)
atgagtgatcagacagacagtgtgagattcatggccacgcagtgctttgcaacgctaattagactcatgccacttgaggcaggcattccagaccctccaaacatgtcagcagaattaatc

SEQ ID NO: 104363 - DNA, 120 bp, Artificial Sequence
  ENSG00000095564_33 (sequence is synthesized)
caattgaaagccaaggagcgacactttttggagcaattgttagatgggaaaaaattggaaaattataaaattccagtaccaatcaatgctgaactcagaaaatatcagcaggatggtgtg

SEQ ID NO: 104364 - DNA, 120 bp, Artificial Sequence
  ENSG00000095564_34 (sequence is synthesized)
aactggttagcatttcttaataagtataaacttcatggaattctgtgtgatgacatgggtttaggaaaaactttacagtccatctgcattctagcaggagatcattgtcatagggcccag

SEQ ID NO: 104365 - DNA, 120 bp, Artificial Sequence
  ENSG00000095564_35 (sequence is synthesized)
gaatatgcaagatcaaaattagcagaatgtatgccacttccttccttagtggtttgtccgccaacattaacaggccattgggtggatgaagtaggtaaattttgctctagagaatatctc

SEQ ID NO: 104366 - DNA, 120 bp, Artificial Sequence
  ENSG00000095564_36 (sequence is synthesized)
aacccgttgcattacactggacctcccactgaaagaataaggttacagcaccaagtaaaaaggcacaatctaatagtggcttcatatgatgttgtgaggaatgacatagatttctttaga

SEQ ID NO: 104367 - DNA, 120 bp, Artificial Sequence
  ENSG00000095564_37 (sequence is synthesized)
aatattaaatttaactactgcattcttgatgaaggccatgtcatcaaaaatggaaaaacaaagttgtcaaaagcagtaaaacaactgactgctaattataggattattctttctggaaca

SEQ ID NO: 104368 - DNA, 120 bp, Artificial Sequence
  ENSG00000095564_38 (sequence is synthesized)
ccaatccagaacaacgttttggagctgtggtcattatttgatttcctcatgccaggatttttgggtactgaacgccagtttgctgctcgatatggtaaacctatattagcaagtagggat

SEQ ID NO: 104369 - DNA, 120 bp, Artificial Sequence
  ENSG00000095564_39 (sequence is synthesized)
gctcgaagctccagtcgagagcaagaagcaggtgttcttgctatggatgcgctgcaccgccaagtactaccgtttcttttgagaagaatgaaagaagatgttttgcaggatcttccacct

SEQ ID NO: 104370 - DNA, 120 bp, Artificial Sequence
  ENSG00000095564_40 (sequence is synthesized)
aaaattattcaagactattattgtactcttagtcctctccaggttcagctctatgaagattttgctaagtctcgtgccaagtgtgatgttgatgaaacagtttcttcagctacactttct

SEQ ID NO: 104371 - DNA, 120 bp, Artificial Sequence
  ENSG00000095564_41 (sequence is synthesized)
gaagaaactgaaaaaccaaagcttaaagctacaggccacgtattccaggcattacagtacttacgtaaactgtgcaaccatccagcattagtcttaacacctcaacatccagaattcaag

SEQ ID NO: 104372 - DNA, 120 bp, Artificial Sequence
  ENSG00000095564_42 (sequence is synthesized)
accactgccgaaaaactggcagttcagaattcttctctacatgatattcaacatgcccctaagctctcagctttgaaacaattgctgttggactgcggtttgggaaatggcagcacttcc

SEQ ID NO: 104373 - DNA, 120 bp, Artificial Sequence
  ENSG00000095564_43 (sequence is synthesized)
gagagtggcacagagtctgttgtggcccagcacaggatactgatattctgtcagctgaaaagcatgcttgatatagtagagcatgatctcctcaaacctcacttgccctctgtcacttat

SEQ ID NO: 104374 - DNA, 120 bp, Artificial Sequence
  ENSG00000095564_44 (sequence is synthesized)
ttgagattagatggcagcatacctcctggtcagaggcattccattgtttcccggtttaataatgatccatctatagacgttctgttacttaccactcacgttggtggcctgggacttaat

SEQ ID NO: 104375 - DNA, 120 bp, Artificial Sequence
  ENSG00000095564_45 (sequence is synthesized)
ttgacaggcgctgacacagtagtatttgtggagcatgactggaatcctatgcgagatctacaagccatggaccgggcccatcgcattgggcagaaacgtgtggttaacgtataccgattg

SEQ ID NO: 104376 - DNA, 120 bp, Artificial Sequence
  ENSG00000095564_46 (sequence is synthesized)
ataaccagaggaacattggaagaaaaaataatggggttgcagaaattcaagatgaacatagcgaatactgttattagccaagagaattctagtttgcagagcatggggactgatcagctt

SEQ ID NO: 104377 - DNA, 120 bp, Artificial Sequence
  ENSG00000095564_47 (sequence is synthesized)
cttgatctgtttactcttgataaggatggcaaagcagaaaaagctgacacctctacttctgggaaagcaagtatgaaatcaattcttgaaaacctgagtgatctttgggatcaagagcag

SEQ ID NO: 104378 - DNA, 120 bp, Artificial Sequence
  ENSG00000095564_48 (sequence is synthesized)
tatgattcagagtacagcctggaaaattttatgcattctctcaagtaactatcaaatattgtaaatgcaattgctgctagttcagttacatttctgctgatattcagcaaatttctaagt

SEQ ID NO: 104379 - DNA, 120 bp, Artificial Sequence
  ENSG00000095564_49 (sequence is synthesized)
ttatggtgaacttttaactcaatgtgtaaatagatctggagaatattcagcataatgctggctcttgtttcactgggggaaacaagttattctcaaatatttgcactgtattaaatttaa

SEQ ID NO: 104380 - DNA, 120 bp, Artificial Sequence
  ENSG00000095564_50 (sequence is synthesized)
atgttaatgtgaaatggtttaaattttacatgctgaaaagctgcagagcagaggaaccaaaccaggtttatttgtgctaccaggaggtgttcttaatgggaacaggcctcctatctttag

SEQ ID NO: 104381 - DNA, 120 bp, Artificial Sequence
  ENSG00000095564_51 (sequence is synthesized)
tcactttgtacaggatgatatccatgagtactttagtgtttgtatatgttttttcttttaaatagaacttgtttttataattgatttaaaatagggctttttttctataaaagccttaat

SEQ ID NO: 104382 - DNA, 120 bp, Artificial Sequence
  ENSG00000095564_52 (sequence is synthesized)
gagccataattttaagaatataagaataatgactatgatattggtcagtcttagaacatgaaaatgtcagacaatgaatttaatcgggcccttggtggaaacatttatatatttaatgca

SEQ ID NO: 104383 - DNA, 120 bp, Artificial Sequence
  ENSG00000095564_53 (sequence is synthesized)
gatgcatagtgtttttcaaatctttaacatcattttttcaacttttaagatataatatcaactattctaaatacaggtaatggtatatttaaggctaccataacatcctatttagagggt

SEQ ID NO: 104384 - DNA, 120 bp, Artificial Sequence
  ENSG00000095564_54 (sequence is synthesized)
ggttttttttaatttatctaatggctacgatatagccagattcaaataacatatgtactcaataggtttcaatcatatatataatatattttttgtaactatgaacatacacagttttcc

SEQ ID NO: 104385 - DNA, 120 bp, Artificial Sequence
  ENSG00000095564_55 (sequence is synthesized)
agaaatagattttacactgtttagaattccaacacctacagtggaaagactgtttattgtagtaatgcatggctgaagcataaaagggagagagaatttctttatatacacaaacataca

SEQ ID NO: 104386 - DNA, 120 bp, Artificial Sequence
  ENSG00000095564_56 (sequence is synthesized)
tgaatatgcatatctatatgcatagatgtacctatcctgcacccaaaaaggtgcctggtattggcactaaaatcatgtagttatactgggcagcaataataattgggcatgaggctgatt

SEQ ID NO: 104387 - DNA, 120 bp, Artificial Sequence
  ENSG00000095564_57 (sequence is synthesized)
actcaatggtgagggtaggtatatgtagatagatgtgcatgtatgtgtttgtatatataattttataagtttcacgcataaattaatacatgcctgtgtgcatacatatgtatgggatat

SEQ ID NO: 104388 - DNA, 120 bp, Artificial Sequence
  ENSG00000095564_58 (sequence is synthesized)
atttgtatatatatgtacaggtaataaacatccccaaggtttgtggctggccatacacataggcatcagtttaacaaccatcagacctcagctgtacaataacaggtgttttgtttaatt

SEQ ID NO: 104389 - DNA, 120 bp, Artificial Sequence
  ENSG00000095564_59 (sequence is synthesized)
aaaattatactgttctgcagcatttagacatttgtcacatttcattagctttgacaaccatactgtaacattaaacctagcattccacaagagaataaatataagattgaaactgtaaaa

SEQ ID NO: 104390 - DNA, 120 bp, Artificial Sequence
  ENSG00000095564_60 (sequence is synthesized)
gaagattcctctgctgtctccatcagtccttccttccttcatcacactaattatagcctaaggaaaaattagagtaagcaaatacttctaattattttaaagctttaaaataggatttat

SEQ ID NO: 104391 - DNA, 120 bp, Artificial Sequence
  ENSG00000095574_0 (sequence is synthesized)
gggcgggaagggagtcggagacacaacaaagatggcggcggcgactgtgacggtgacgaagacggcggcggcggcgacggcatttaacaaggcggtgtggtttactccatgcagttgtca

SEQ ID NO: 104392 - DNA, 120 bp, Artificial Sequence
  ENSG00000095574_1 (sequence is synthesized)
ggagacctctgtatggcttttcaattttagttgaaattctctctccatggccttttggagtcccttgctgtatctccgaagtaaatttcaattactctacatttcatcaatgttggagtg

SEQ ID NO: 104393 - DNA, 120 bp, Artificial Sequence
  ENSG00000095574_2 (sequence is synthesized)
gcaagaaaaaggaggaacagatttggggtgaaaagttttgttttctaggtctaacaaactgtaaatgttaaaaaagcaaagatgggtgaaaaaaaaccagagcctttggacttcgtgaaa

SEQ ID NO: 104394 - DNA, 120 bp, Artificial Sequence
  ENSG00000095574_3 (sequence is synthesized)
gattttcaggaatacctgactcagcagacccatcacgtgaacatgatttctggatcagttagtggggacaaagaagcagaggctcttcagggagctggaacagatggtgatcaaaatgga

SEQ ID NO: 104395 - DNA, 120 bp, Artificial Sequence
  ENSG00000095574_4 (sequence is synthesized)
cttgatcacccatctgttgaagtttccttggatgaaaactcaggaatgttagtagacgggtttgaaaggacctttgatgggaagcttaagtgtcggtactgcaactatgccagcaaagga

SEQ ID NO: 104396 - DNA, 120 bp, Artificial Sequence
  ENSG00000095574_5 (sequence is synthesized)
acagcccggcttattgaacacatcagaatccacacaggtgaaaaacctcatcgatgtcatctttgtccatttgcatctgcttatgagcgtcatctggaagcccatatgcgttctcatact

SEQ ID NO: 104397 - DNA, 120 bp, Artificial Sequence
  ENSG00000095574_6 (sequence is synthesized)
ggagaaaaaccatacaaatgtgaattatgttccttccgctgcagtgatcgaagtaacttgtcccatcatcgaaggcgcaagcataaaatggtaccaattaaaggtactaggtcttcctta

SEQ ID NO: 104398 - DNA, 120 bp, Artificial Sequence
  ENSG00000095574_7 (sequence is synthesized)
agcagcaagaaaatgtggggggttttacagaagaaaacaagcaatctgggctatagcagaagagcactaatcaacttaagtccaccttccatggtggttcagaaaccagactaccttaac

SEQ ID NO: 104399 - DNA, 120 bp, Artificial Sequence
  ENSG00000095574_8 (sequence is synthesized)
gattttacccacgaaatcccaaatatccagactgactcctatgaaagtatggcaaaaaccacaccaactggtggccttccaagggacccccaagaactcatggttgataaccctttgaat

SEQ ID NO: 104400 - DNA, 120 bp, Artificial Sequence
  ENSG00000095574_9 (sequence is synthesized)
cagctctcgactctagcagggcagttgtccagtctgccacccgaaaaccaaaaccctgcatcccctgatgtagttccctgccctgatgaaaagcctttcatgattcagcagccctctacc

SEQ ID NO: 104401 - DNA, 120 bp, Artificial Sequence
  ENSG00000095574_10 (sequence is synthesized)
caagcagtagtttctgccgtatcagcaagtattcctcagagctcctctcccacaagcccagaacctcggccatcccatagtcaaaggaactatagtccagtggcaggtccaagcagtgag

SEQ ID NO: 104402 - DNA, 120 bp, Artificial Sequence
  ENSG00000095574_11 (sequence is synthesized)
ccaagtgcccacacgagcactcccagcataggaaacagccagccaagcaccccagccccagccctgccggtccaggaccctcagcttctgcaccactgccagcactgtgatatgtacttt

SEQ ID NO: 104403 - DNA, 120 bp, Artificial Sequence
  ENSG00000095574_12 (sequence is synthesized)
gcagacaacatcctttacactattcatatgggatgtcatgggtatgaaaatccttttcagtgtaatatatgtggatgcaaatgtaaaaacaagtatgattttgcctgtcattttgcaaga

SEQ ID NO: 104404 - DNA, 120 bp, Artificial Sequence
  ENSG00000095574_13 (sequence is synthesized)
gggcaacataaccaacattgattgaaaatagtcatattttacttagttttgctgtttttgtggtttggttttttttgttttttgttttggtcatccctaataaagtgtctgctaattcaa

SEQ ID NO: 104405 - DNA, 120 bp, Artificial Sequence
  ENSG00000095574_14 (sequence is synthesized)
ggcttatacattatatttatagaatataaatttgtcagtggaataaaatttcccctttttttcataaaaatctggtcagggtcatttatatattagaacagttagacacattggtgtctc

SEQ ID NO: 104406 - DNA, 120 bp, Artificial Sequence
  ENSG00000095574_15 (sequence is synthesized)
ttttttcctttcctttcgacattggagaattggagtgcagtcataatcttacaagatgttcatttgaatttctcacatttatggtccataaaaacttcaaggcttatccatacttttgat

SEQ ID NO: 104407 - DNA, 120 bp, Artificial Sequence
  ENSG00000095574_16 (sequence is synthesized)
gtttcaatatgcattgaactggatgttatttctgccatatttcaaaatggtagaataaattacagaatttattactactcatttcagtgtttagtacagaaattgccttaaaaattgcta

SEQ ID NO: 104408 - DNA, 120 bp, Artificial Sequence
  ENSG00000095574_17 (sequence is synthesized)
ttaattgaaatatcatttagttcacattccttaagttgaatcggtagtttcatttcaactgataatagtaaagctatttcagtttagtaaaaattttcttttttccacaagaggaaatgt

SEQ ID NO: 104409 - DNA, 120 bp, Artificial Sequence
  ENSG00000095574_18 (sequence is synthesized)
ctagagtgctagatgcctttttcccctgtcagtttgactttcatttaaatccttcattctgatatcattactgttaggtgaggtggataactataatgagaatctcttattcttcctatt

SEQ ID NO: 104410 - DNA, 120 bp, Artificial Sequence
  ENSG00000095574_19 (sequence is synthesized)
cctttgatgaccaaagagataaagtgaagtcatccttattattaaaatgcagcctccaaacaaatttctcaagattccttttccttccttctatccattttctgcccataatttccaaga

SEQ ID NO: 104411 - DNA, 120 bp, Artificial Sequence
  ENSG00000095574_20 (sequence is synthesized)
aaaggtgggtatggaaacacatgagagaatgtgatagtgaagtcatatttacaaaactgagaacatgtccaaaatggattcttgtctcctcttcagaattagccatttaaaatattttct

SEQ ID NO: 104412 - DNA, 120 bp, Artificial Sequence
  ENSG00000095574_21 (sequence is synthesized)
gtgacttcaaattgtaattcttatttgcagttttaccagtcttcatgtacagtgacgaaactgtgtagaaactaaatcatcgctttagtaagaaaggataaaaaggtgtggaagtgaata

SEQ ID NO: 104413 - DNA, 120 bp, Artificial Sequence
  ENSG00000095574_22 (sequence is synthesized)
taaaatgcatctaaacatgacatttaatttgtttataaaaataagacttactaaatatagagtaattcattttgaataggaggctattgtttttatattgtgtaataactcacgtactct

SEQ ID NO: 104414 - DNA, 120 bp, Artificial Sequence
  ENSG00000095574_23 (sequence is synthesized)
gaagagagcttggtcaaacaataaaatacattgttactaacttggtttcttttctgtgtactttgcaaaaattctatttttaattttgttcatatgttgaatgtgcccctaattggcatc

SEQ ID NO: 104415 - DNA, 120 bp, Artificial Sequence
  ENSG00000095574_24 (sequence is synthesized)
ttaaagagaatagtaagcatctattaaccaaaaaagaactctaatagtaaaggaaagggaaatattggtggtatgtacccacaaaacccccaagtgccaagttaatggaatctctgcttt

SEQ ID NO: 104416 - DNA, 120 bp, Artificial Sequence
  ENSG00000095574_25 (sequence is synthesized)
ccctttcagatgctagaaagccactgtaatgagttcttgcagtttagcatccagtctaagctactgcattgtttaaagagcagcatcaaggacactttctccaaactggaactctcttct

SEQ ID NO: 104417 - DNA, 120 bp, Artificial Sequence
  ENSG00000095574_26 (sequence is synthesized)
ttgtcaaatcttgtactttaaaattctacaattctgttacattgttgtttaaatcacagactgctcagatccattttactgcagtagtttccaagtgtgtaacttggctttagtatttat

SEQ ID NO: 104418 - DNA, 120 bp, Artificial Sequence
  ENSG00000095574_27 (sequence is synthesized)
cagttgccagaaagaaacaggttgtcatttggaagtttttgtggttattttttcccatttttattcttcagataaaagcagtaccccaaaatagaaaatgaaaattttcatgaaacaaag

SEQ ID NO: 104419 - DNA, 120 bp, Artificial Sequence
  ENSG00000095574_28 (sequence is synthesized)
agaactcccttgttaaaaccagcttattaactctgtattctgtcaaatgcatttttttctaacaactgaccatggatgttgtgaaggtgcattttaatttaaacatggaaaagatttttt

SEQ ID NO: 104420 - DNA, 120 bp, Artificial Sequence
  ENSG00000095574_29 (sequence is synthesized)
tcataattacatactagaatgtaaaattataattttgccatgacttaaagagcacagttgatatcccaaaggttttgatgctaagaagctacagttattctaaatgcactaaaatgtttg

SEQ ID NO: 104421 - DNA, 120 bp, Artificial Sequence
  ENSG00000095574_30 (sequence is synthesized)
aggcaaatctaccttagaggcttttttggtatggtattttttaaaatatttagattttatttaaatttcctgtgagttattctgtatttgaaaagatgttcgtgtcttcccctctgtatt

SEQ ID NO: 104422 - DNA, 120 bp, Artificial Sequence
  ENSG00000095574_31 (sequence is synthesized)
gaatgtttcactcattttatttttaatcaaatattttatagaaatgagttgttgggaagagtttaacatgcactatttatagtactttgccgttaacaggcaatgttctgaaactaaatt

SEQ ID NO: 104423 - DNA, 120 bp, Artificial Sequence
  ENSG00000095574_32 (sequence is synthesized)
tatttttgttcagtgaacataagtttagatttttaaagttggtagataatttatctccactaatatttttttaagaaactgtgaagagattaactgggaataattttatttcagatttta

SEQ ID NO: 104424 - DNA, 120 bp, Artificial Sequence
  ENSG00000095574_33 (sequence is synthesized)
ctaatgtagtatgtagctacaacttcttgaacttcaagttaaggctagacatttactttgaaaaaattccactgggtgtttccagggctatttcattttagaaataagtgtttgccattc

SEQ ID NO: 104425 - DNA, 120 bp, Artificial Sequence
  ENSG00000095574_34 (sequence is synthesized)
ttctgcaaaaactggacaaggggaatactacaaaaaatactcagagataaaatcctcatttcaagttctacaaaatatttatcaaatgaatgttaatttttttttaattccctgctaaag

SEQ ID NO: 104426 - DNA, 120 bp, Artificial Sequence
  ENSG00000095574_35 (sequence is synthesized)
acgttttcattagtcttagagggtatatgctttctagaacttgtttttgttaacatgtgctttgatgtaaagaacatattttgtatgcaaaacataacttgcattatggttgtacaatac

SEQ ID NO: 104427 - DNA, 120 bp, Artificial Sequence
  ENSG00000095574_36 (sequence is synthesized)
actatattgtttagggattccggaaagcagtttaatgcagaaataactatatctagtatgcagttcatattgtgaatgaagctttgcttttgtaataaataaataagactttctaatgac

SEQ ID NO: 104428 - DNA, 120 bp, Artificial Sequence
  ENSG00000095574_37 (sequence is synthesized)
aattcactttttatacacgtactatgattgcgtgtagctgttactgtgaagaccactgcgcattaatgtgaatcattctgttttttctagaaagatacagggcattttttcccccttttt

SEQ ID NO: 104429 - DNA, 120 bp, Artificial Sequence
  ENSG00000095574_38 (sequence is synthesized)
taaacatatcagacttctgctggagagtacttaacatggtctggagatgcattatggtcttgttggaaggttaggggctccaaatacccttcctgtcctccagtttttatgagctaccat

SEQ ID NO: 104430 - DNA, 120 bp, Artificial Sequence
  ENSG00000095585_0 (sequence is synthesized)
gcagcctgcactctcagaaatcagacttgagtggccggaacccttgagaccagaggcttaccatgctgctccctaggagggccaggaactgctgacgtgaccactggacagttattcgtg

SEQ ID NO: 104431 - DNA, 120 bp, Artificial Sequence
  ENSG00000095585_1 (sequence is synthesized)
tctcttacaattaccaaacagaatggacaagcttaataaaataaccgtccccgccagtcagaagttgaggcagcttcaaaagatggtccatgatattaaaaacaatgaaggtggaataat

SEQ ID NO: 104432 - DNA, 120 bp, Artificial Sequence
  ENSG00000095585_2 (sequence is synthesized)
gaataaaatcaaaaagctaaaagtcaaagcacctccaagtgttcctcgaagggactacgcttcagagagccctgctgacgaagaggagcagtggtccgatgactttgacagcgactatga

SEQ ID NO: 104433 - DNA, 120 bp, Artificial Sequence
  ENSG00000095585_3 (sequence is synthesized)
aaatccagatgagcactcggactcagagatgtacgtgatgcccgccgaggagaacgctgatgacagctacgagccgcctccagtagagcaggaaaccaggccggttcacccagccctgcc

SEQ ID NO: 104434 - DNA, 120 bp, Artificial Sequence
  ENSG00000095585_4 (sequence is synthesized)
cttcgccagaggcgagtatatagacaatcgatcaagccagaggcattccccacccttcagcaagacacttcccagtaagcccagctggccttcagagaaagcaaggctcacctccaccct

SEQ ID NO: 104435 - DNA, 120 bp, Artificial Sequence
  ENSG00000095585_5 (sequence is synthesized)
gccggccctgactgctttgcagaaacctcaagtcccacccaaacccaaaggcctccttgaggatgaggctgattatgtggtccccgtggaagataatgatgaaaactatattcatcccac

SEQ ID NO: 104436 - DNA, 120 bp, Artificial Sequence
  ENSG00000095585_6 (sequence is synthesized)
agaaagcagttcacctccacctgaaaaagctcccatggtgaatagatcaaccaagccaaattcctcaacgcccgcctctcctccaggaacagcttcaggtcgaaacagtggggcctggga

SEQ ID NO: 104437 - DNA, 120 bp, Artificial Sequence
  ENSG00000095585_7 (sequence is synthesized)
caagtgtttgtgaagaaaaacctatacctgctgaacgccaccgagggtcaagtcacagacaagaagctgtgcagtcaccagtgtttcctcctgcccagaaacaaatccaccaaaaaccca

SEQ ID NO: 104438 - DNA, 120 bp, Artificial Sequence
  ENSG00000095585_8 (sequence is synthesized)
tacctctgccaagatttacagaagggggaaacccaactgtggatgggcccctacccagcttttcatctaattccactatttcagaacaggaagctggcgttctctgcaagccatggtatg

SEQ ID NO: 104439 - DNA, 120 bp, Artificial Sequence
  ENSG00000095585_9 (sequence is synthesized)
ctggagcctgtgatcgaaagtctgctgaagaggcattgcacagatcaaacaaggatggatcatttcttattcggaaaagctctggccatgattccaaacaaccatatacactagttgtat

SEQ ID NO: 104440 - DNA, 120 bp, Artificial Sequence
  ENSG00000095585_10 (sequence is synthesized)
tctttaataagcgagtatataatattcctgtgcgatttattgaagcaacaaaacaatatgccttgggcagaaagaaaaatggtgaagagtactttggaagtgttgctgaaatcatcagga

SEQ ID NO: 104441 - DNA, 120 bp, Artificial Sequence
  ENSG00000095585_11 (sequence is synthesized)
atcatcaacatagtcctttggttcttattgacagtcagaataacacaaaagattccaccagactgaagtatgcagttaaagtttcataaagggggaaaaaaaagatcaataccattgctt

SEQ ID NO: 104442 - DNA, 120 bp, Artificial Sequence
  ENSG00000095585_12 (sequence is synthesized)
cagacactttcccaaagtttctccttttgagaaaaagtcccaaaacttcatattttggattatgaatcatccagtaataaaatggaagatggagtcagctattgaagtggtcatccattt

SEQ ID NO: 104443 - DNA, 120 bp, Artificial Sequence
  ENSG00000095585_13 (sequence is synthesized)
ctttttaagaagctcatgtggacttgttctattgcctgacctgatgaactgttaatatctggtgaggttgagttatcatgctactaatattttccaaataaatatttttatttttaaaaa

SEQ ID NO: 104444 - DNA, 120 bp, Artificial Sequence
  ENSG00000095585_14 (sequence is synthesized)
agaaagcagttcacctccacctgaaaaaggtcgaaacagtggggcctgggaaaccaagtcacctccaccagctgcaccatccccgttgccacgggccgggaaaaaaccaacgacaccact

SEQ ID NO: 104445 - DNA, 120 bp, Artificial Sequence
  ENSG00000095585_15 (sequence is synthesized)
ttgatgtcagaacatttaatctctcctggaatgcagaagtgtggcccaacaggatcttctaagcctttgcaacacaaagtttgattcccagcaagatagcatcaacctcatctggagctt

SEQ ID NO: 104446 - DNA, 120 bp, Artificial Sequence
  ENSG00000095585_16 (sequence is synthesized)
gttagaaatgcagaatcttggccccaccctagaactactggatcagaatttacattttagcaagatctccaggggatctgaatgtaaatcatatttaagaaaccctgctataaaccacca

SEQ ID NO: 104447 - DNA, 120 bp, Artificial Sequence
  ENSG00000095585_17 (sequence is synthesized)
gaaaatttttagcagttgatcaggatgtataagagtatttggtagtaagcactaagaggctcagaaatgacagtgcccaggactttctcccctgggccacagtgtgtgcttctttggctg

SEQ ID NO: 104448 - DNA, 120 bp, Artificial Sequence
  ENSG00000095585_18 (sequence is synthesized)
tccccttcctcttccatgctttaatcttcccatctcacattatgaaagcacctgggtagttctcttcagctgccctcgcttcaaatggatttctcataaaacctaatacaatgtcacaag

SEQ ID NO: 104449 - DNA, 120 bp, Artificial Sequence
  ENSG00000095585_19 (sequence is synthesized)
ccaccatgttggccttgtaaacattgcaccaagaacagtttctgcagaggagtgaaaaaatgaaagagtgaaatatgccctgagtcctggttctttaaatttagtagtatgataagccta

SEQ ID NO: 104450 - DNA, 120 bp, Artificial Sequence
  ENSG00000095585_20 (sequence is synthesized)
tgaaacatttcatccgtaaacccttcacagaacaacaaatgctatgaccaatgaattaccttaaaaagccagtgctacataagattaggcatggaaacagggtatgtttactctgaatat

SEQ ID NO: 104451 - DNA, 120 bp, Artificial Sequence
  ENSG00000095585_21 (sequence is synthesized)
agtcactatggagaatatgatccagtacaagtgatacctcttcaggtaacattactcatctactactctcaactccatggtagccatattcaggtttcagtccgccatcatgtagcaacc

SEQ ID NO: 104452 - DNA, 120 bp, Artificial Sequence
  ENSG00000095585_22 (sequence is synthesized)
ctctcccgtactccgtacctatcaccaacagcttcaagacccacctgaattcccaagccacccattaccacaaaagaacaaatacacattccctccttaccaacccctctttaaaaaaac

SEQ ID NO: 104453 - DNA, 120 bp, Artificial Sequence
  ENSG00000095585_23 (sequence is synthesized)
gatgaatgcagaggtggtaggatgtacctgtaacactgctgggagggagtcctggtcctcatagcacaaccacatcaacagactggcaagtgcacagatccatgacatctcagtaactaa

SEQ ID NO: 104454 - DNA, 120 bp, Artificial Sequence
  ENSG00000095585_24 (sequence is synthesized)
gacatgttcccgggaagacttctgatcaaatttggttcttctcagctgatgttgctgggttttgggatgaggacagacatttcactctaatcctaatatgataattttcctgatccagaa

SEQ ID NO: 104455 - DNA, 120 bp, Artificial Sequence
  ENSG00000095585_25 (sequence is synthesized)
attgcacagatcaaacaaggtctgatcatttttattatttattatttttattttattttattttatttatttgttttgagatgatgcagtttcactggagtgcagtggctcgatctcagc

SEQ ID NO: 104456 - DNA, 120 bp, Artificial Sequence
  ENSG00000095585_26 (sequence is synthesized)
acatttgtgcagtgtgcacagatgtaggtgtgagctgttggctcccttcctgaaggacctctgtgggggtcctcactgagtcctcagaatcagtgggctcaggacttgccccatggggca

SEQ ID NO: 104457 - DNA, 120 bp, Artificial Sequence
  ENSG00000095585_27 (sequence is synthesized)
gggggcgggtaaggagaaggtcctttagaaatgttaaggtggagtccctaacccccatcccagctctgagcttatacactgacacttttaaaatgtgtcatcacctttgcccacaagttt

SEQ ID NO: 104458 - DNA, 120 bp, Artificial Sequence
  ENSG00000095587_0 (sequence is synthesized)
acactcgcagccgccgcagcctcggccgccgggcaagtagctccgagcggctgcttcccggttgcctcgacgaagacagggggcgccgcgctccgcttgctccgcgcctgagccatgccc

SEQ ID NO: 104459 - DNA, 120 bp, Artificial Sequence
  ENSG00000095587_1 (sequence is synthesized)
agcagccctgtgtaaccaccgagtcccggccggagccgaccgacccagtgtgcgccgtctttcggccgagctgagctttcgtgcacgcaactccctctgccccagccggccccgcgccac

SEQ ID NO: 104460 - DNA, 120 bp, Artificial Sequence
  ENSG00000095587_2 (sequence is synthesized)
catgccccgggcgactgcacttggggccctggtgtcactgctgctgctgctgccgctgcctcgcggcgccgggggactcggggagcgcccggacgccaccgcagactactcagagctgga

SEQ ID NO: 104461 - DNA, 120 bp, Artificial Sequence
  ENSG00000095587_3 (sequence is synthesized)
cggcgaggagggcacggagcagcagctggagcattaccacgacccttgcaaagccgctgtcttttggggagacattgccttagatgaagatgacttgaagctgtttcacattgacaaagc

SEQ ID NO: 104462 - DNA, 120 bp, Artificial Sequence
  ENSG00000095587_4 (sequence is synthesized)
cagagactggaccaagcagacagtgggggcaacaggacacagcacaggtgggcttgaagagcaggcatctgagagcagcccagacaccacagccatggacactggcaccaaggaagctgg

SEQ ID NO: 104463 - DNA, 120 bp, Artificial Sequence
  ENSG00000095587_5 (sequence is synthesized)
aaaggatggccgggagaataccacactcctgcacagccctgggaccttgcatgccgcagccaagaccttctctccccgggtccgaagagccacaacctcaaggacagagaggatatggcc

SEQ ID NO: 104464 - DNA, 120 bp, Artificial Sequence
  ENSG00000095587_6 (sequence is synthesized)
tggaggagtcatcccctacgtcattggagggaacttcactgggagccagagggccatttttaagcaggccatgagacactgggagaagcacacctgtgtgaccttcatagaaaggacgga

SEQ ID NO: 104465 - DNA, 120 bp, Artificial Sequence
  ENSG00000095587_7 (sequence is synthesized)
tgaggaaagctttattgtattcagttacagaacctgtggctgttgctcctatgttgggcgccgaggaggaggcccacaggccatatccattgggaagaactgtgacaagtttggcattgt

SEQ ID NO: 104466 - DNA, 120 bp, Artificial Sequence
  ENSG00000095587_8 (sequence is synthesized)
ggctcacgagctgggccatgtggttgggttttggcatgaacacacccggccagacagagaccaacatgtcaccatcatcagggaaaacatccagccaggtcaggagtataatttcttaaa

SEQ ID NO: 104467 - DNA, 120 bp, Artificial Sequence
  ENSG00000095587_9 (sequence is synthesized)
aatggaagctggggaagtgagctctctgggagagacatacgactttgacagcatcatgcactacgcccggaacaccttctcaagaggagttttcttagacaccatccttccccgtcaaga

SEQ ID NO: 104468 - DNA, 120 bp, Artificial Sequence
  ENSG00000095587_10 (sequence is synthesized)
tgacaatggcgtcaggccaaccattggccagcgcgtgcggctcagtcagggagacatagctcaagcccggaagctgtacaaatgcccagcgtgtggggagaccctgcaggacacaacggg

SEQ ID NO: 104469 - DNA, 120 bp, Artificial Sequence
  ENSG00000095587_11 (sequence is synthesized)
aaacttttctgcacctggtttcccaaatgggtacccatcttactcccactgcgtctggaggatctcggtcaccccaggggaaaagatcgtattaaacttcacatccatggatttgtttaa

SEQ ID NO: 104470 - DNA, 120 bp, Artificial Sequence
  ENSG00000095587_12 (sequence is synthesized)
aagccgactgtgctggtatgattacgtggaggtccgggatggttactggagaaaagccccccttttgggcaggttttgtggcgataagatcccggagcccctcgtctccacggacagccg

SEQ ID NO: 104471 - DNA, 120 bp, Artificial Sequence
  ENSG00000095587_13 (sequence is synthesized)
gctctgggtggagttccgcagcagcagcaacatcttgggcaagggcttctttgcagcgtacgaagctacctgcgggggagacatgaacaaagatgccggtcagattcaatctcccaacta

SEQ ID NO: 104472 - DNA, 120 bp, Artificial Sequence
  ENSG00000095587_14 (sequence is synthesized)
tccggatgactacagaccttccaaggaatgtgtctggaggattacggtttcagaggggtttcacgtgggacttaccttccaagcttttgagattgaaaggcacgacagctgtgcatatga

SEQ ID NO: 104473 - DNA, 120 bp, Artificial Sequence
  ENSG00000095587_15 (sequence is synthesized)
ctacctggaagtccgggatggccccacggaagagagtgccctgatcggccacttttgtggctatgagaagccggaggatgtgaaatcgagctccaacagactgtggatgaagtttgtgtc

SEQ ID NO: 104474 - DNA, 120 bp, Artificial Sequence
  ENSG00000095587_16 (sequence is synthesized)
cgatggctctatcaataaagcgggctttgcagccaattttttcaaggaggtggatgagtgttcctggccagatcacggcgggtgcgagcatcgctgtgtgaacacgctgggcagctacaa

SEQ ID NO: 104475 - DNA, 120 bp, Artificial Sequence
  ENSG00000095587_17 (sequence is synthesized)
gtgtgcctgtgaccctggctacgagctggccgccgataagaagatgtgtgaagtggcctgtggcggtttcattaccaagctgaatggaaccatcaccagccctgggtggccgaaggagta

SEQ ID NO: 104476 - DNA, 120 bp, Artificial Sequence
  ENSG00000095587_18 (sequence is synthesized)
tcccacaaacaaaaactgtgtctggcaggtggtggcccccgctcagtaccggatctcccttcagtttgaagtgtttgaactggaaggcaatgacgtctgtaagtacgactttgtagaggt

SEQ ID NO: 104477 - DNA, 120 bp, Artificial Sequence
  ENSG00000095587_19 (sequence is synthesized)
gcgcagcggcctgtcccccgacgccaagctgcacggcaggttctgcggctctgagacgccggaggtcatcacctcgcagagcaacaacatgcgcgtggagttcaagtccgacaacaccgt

SEQ ID NO: 104478 - DNA, 120 bp, Artificial Sequence
  ENSG00000095587_20 (sequence is synthesized)
ctccaagcgcggcttcagggcccacttcttctcagataaggacgagtgtgccaaggacaacggcgggtgtcagcatgagtgcgtcaacaccttcgggagctacctgtgcaggtgcagaaa

SEQ ID NO: 104479 - DNA, 120 bp, Artificial Sequence
  ENSG00000095587_21 (sequence is synthesized)
cggctactggctccacgagaatgggcatgactgcaaagaggctggctgtgcacacaagatcagcagtgtggaggggaccctggcgagccccaactggcctgacaaataccccagccggag

SEQ ID NO: 104480 - DNA, 120 bp, Artificial Sequence
  ENSG00000095587_22 (sequence is synthesized)
ggagtgtacctggaacatctcttcgactgcaggccacagagtgaaactcacctttaatgagtttgagatcgagcagcaccaggaatgtgcctatgaccacctggaaatgtatgacgggcc

SEQ ID NO: 104481 - DNA, 120 bp, Artificial Sequence
  ENSG00000095587_23 (sequence is synthesized)
ggacagcctggcccccattctgggccgtttctgcggcagcaagaaaccagaccccacggtggcttccggcagcagtatgtttctcaggttttattcggatgcctcagtgcagaggaaagg

SEQ ID NO: 104482 - DNA, 120 bp, Artificial Sequence
  ENSG00000095587_24 (sequence is synthesized)
cttccaggcagtgcacagcacagagtgcgggggcaggctgaaggctgaagtgcagaccaaagagctctattcccacgcccagtttggggacaacaactacccgagcgaggcccgctgtga

SEQ ID NO: 104483 - DNA, 120 bp, Artificial Sequence
  ENSG00000095587_25 (sequence is synthesized)
ctgggtgatcgtggcagaggacggctacggcgtggagctgacattccggacctttgaggttgaggaggaggccgactgcggctacgactacatggaagcctacgacggctacgacagctc

SEQ ID NO: 104484 - DNA, 120 bp, Artificial Sequence
  ENSG00000095587_26 (sequence is synthesized)
agcgcccaggctcggccgcttctgtggctctgggccattagaagaaatctactctgcaggtgattccctgatgattcgattccgcacagatgacaccatcaacaagaaaggctttcatgc

SEQ ID NO: 104485 - DNA, 120 bp, Artificial Sequence
  ENSG00000095587_27 (sequence is synthesized)
ccgatacaccagcaccaagttccaggatgccctgcacatgaagaaatagtgctgatgttcttgaaagacagaaactgagaattttttttgttttgttttgtttttaacaacaatagcacc

SEQ ID NO: 104486 - DNA, 120 bp, Artificial Sequence
  ENSG00000095587_28 (sequence is synthesized)
tcagaatccagccttagaggtatatatttgaatgaaagtcttgtaagtttggccaacaaggtggagagaaaaatgttcttttgcttctgtctgcaatgttatcattcatgaactgttaaa

SEQ ID NO: 104487 - DNA, 120 bp, Artificial Sequence
  ENSG00000095587_29 (sequence is synthesized)
gtgttaaagattaggattgaagtcactgaccattccggctatgcttcttcataccattctccttgtcccttgctcctatgtggcaaaaggtcagccttggggttggccgttcctctaatc

SEQ ID NO: 104488 - DNA, 120 bp, Artificial Sequence
  ENSG00000095587_30 (sequence is synthesized)
tggacttgcttgcaaaggtgccaggctgtcttctgtccatgttgggcataagggatgaaaacttggccgagactaatgtgtggcccacagctttggctggaatcattttctttctctctg

SEQ ID NO: 104489 - DNA, 120 bp, Artificial Sequence
  ENSG00000095587_31 (sequence is synthesized)
ccagggacatgtcaaccaagaaacctgaaaatatggatggatgtcaggactaaaaaaaggcatcacagtgagcagtgagcacagagggagtttcgagtataagaatcattgtcatgaagt

SEQ ID NO: 104490 - DNA, 120 bp, Artificial Sequence
  ENSG00000095587_32 (sequence is synthesized)
taggagaccacaaagccatttctcagagtcattcactctccttgtccctttggtttccccccctccctaattgcagtgggggctaaggcatccattatgaatacagcagaacatttgctg

SEQ ID NO: 104491 - DNA, 120 bp, Artificial Sequence
  ENSG00000095587_33 (sequence is synthesized)
gcgagagtcctgtctgctgagaagacaatattgtggctcgtcctgatatttttttcattcattgactttgagaagactccacctgtgcttggaattccatgggcttcaaagaacatttct

SEQ ID NO: 104492 - DNA, 120 bp, Artificial Sequence
  ENSG00000095587_34 (sequence is synthesized)
tcttttagctttggaggcacttgccgtggcacacctggactccttgacatccaattcaaactgcatttgcaaaatgtgcaaagacctcttatgagggaccaattcaggtcccttatgggg

SEQ ID NO: 104493 - DNA, 120 bp, Artificial Sequence
  ENSG00000095587_35 (sequence is synthesized)
tgaacactgttgaagactggttaattataagttatgtaagaatcatcgccttgtggaacaagtcaatcagtgactagcttcctgtagccaatcaggttaaagagtgcgttggtaactttg

SEQ ID NO: 104494 - DNA, 120 bp, Artificial Sequence
  ENSG00000095587_36 (sequence is synthesized)
ctctgattaactagtattcaatcaccaacttgcaaacagaattcataacacttggcacttgttctagagaagtgtagaggatgatgtttacataattttagcacctcaaggtataattta

SEQ ID NO: 104495 - DNA, 120 bp, Artificial Sequence
  ENSG00000095587_37 (sequence is synthesized)
aacagtgaggtagttttgaatggcatttcattaaggcatctatgggcattatgagctaaaagctgtggtatgttagctttaaaagagtatttatgttggaataatttttaaataatgttt

SEQ ID NO: 104496 - DNA, 120 bp, Artificial Sequence
  ENSG00000095587_38 (sequence is synthesized)
acataactgtaagtcctgtttggttgttgttggacgcagggcggcacatgagtgtttttggttagagccaagatagctcccatgcaccggaattcctttgggatgaatcagcatcatttt

SEQ ID NO: 104497 - DNA, 120 bp, Artificial Sequence
  ENSG00000095587_39 (sequence is synthesized)
aaacaaagtatatgtaaaaggtgaaaggttatattttttacagatcagaatgtggcaccagaggactgtgtctcattaaagtgattgctgggagcaaaaactagaatgatacaaagaaag

SEQ ID NO: 104498 - DNA, 120 bp, Artificial Sequence
  ENSG00000095587_40 (sequence is synthesized)
gtcagagaaatgcatgggaatattttttccttaaaacagaaaaaaattaaagtattattaataatatatgtctgtatatatgtatgtatgtaaaagatcagctgtcaaagccttaatcaa

SEQ ID NO: 104499 - DNA, 120 bp, Artificial Sequence
  ENSG00000095587_41 (sequence is synthesized)
tgcagtgtggaaaatgccaacccctggtcctcgctttactgtgggccctgcaggactggctctccatttcctgcctctcctttcaccaagctctgttttggcctttctcggccctggact

SEQ ID NO: 104500 - DNA, 120 bp, Artificial Sequence
  ENSG00000095587_42 (sequence is synthesized)
gaggctcagcctacacgctcatattgtgcatatggcagaccctgcccagcgtgcgctttgatacagcaaatggagcagctgacctcatggctccaatcccacctgcctgttagggtagat

SEQ ID NO: 104501 - DNA, 120 bp, Artificial Sequence
  ENSG00000095587_43 (sequence is synthesized)
tccatttatctgatttttgtattttctgaggttttatttggtctcatcttgtctatgagagttgaaactggaactgggaaacctaagatgggtgttatggttctttctccaaggaaataa

SEQ ID NO: 104502 - DNA, 120 bp, Artificial Sequence
  ENSG00000095587_44 (sequence is synthesized)
aaattctgcagttttaacctttagaagtctaagcaagattaacaaatttcatagaaaagtgggagggagtcagaaacagagttggtgctgctcagcaggacggtgaaacaatgatacttc

SEQ ID NO: 104503 - DNA, 120 bp, Artificial Sequence
  ENSG00000095587_45 (sequence is synthesized)
tttttatctctttagtatgaacattttcaaaaacacacagcttcaacaattgtcaccatatggccaatttgcaacaatgggactcttatgaaaaacctttatttaggccttctgtgtgac

SEQ ID NO: 104504 - DNA, 120 bp, Artificial Sequence
  ENSG00000095587_46 (sequence is synthesized)
gtatccacagaaaagagaagctctgattcagctggggctagctgggccgctcctctggaagcccacacttgtggggacttaggcatgacacaggttcttgcaaagaaactagaggctggc

SEQ ID NO: 104505 - DNA, 120 bp, Artificial Sequence
  ENSG00000095587_47 (sequence is synthesized)
ttcactagagagagtccattcagcagaaagtcccaggcctctgccttggtgcttccaattatcagtgacctgcctgcaagcatccccagaagcaaacagcagaggtagaagatatcactg

SEQ ID NO: 104506 - DNA, 120 bp, Artificial Sequence
  ENSG00000095587_48 (sequence is synthesized)
cagcctgctttgtgctttaattgggtaccaagctttggggatgacagtgagttgcaagaatagttttagttcagagaattgtcttaggacaacaggctaatgaaggatttggggtctggg

SEQ ID NO: 104507 - DNA, 120 bp, Artificial Sequence
  ENSG00000095587_49 (sequence is synthesized)
tttttagcctggctccgttctggtgtaacccggtctagcaaaagctaagcctggattgcagggcaggaaaaaatctggaattaactttagccagtggaatttcttcaaacagagaaagag

SEQ ID NO: 104508 - DNA, 120 bp, Artificial Sequence
  ENSG00000095587_50 (sequence is synthesized)
aggctgttcattgatccactattccctctattttcctctaaggtaaatatttagaggtatttacctgtaaggtgaagtttcctttttatttctactttacaatttctctctaaagcaagc

SEQ ID NO: 104509 - DNA, 120 bp, Artificial Sequence
  ENSG00000095587_51 (sequence is synthesized)
ttgtccaacccttggcccaggacggctttgaatatggcccgacacaaattcgtaaactttttaaaaaacattgtaagattctttctgtgatttttttttttctcgtcagctatcgttagt

SEQ ID NO: 104510 - DNA, 120 bp, Artificial Sequence
  ENSG00000095587_52 (sequence is synthesized)
tccaatgtggcccagggaagccaaaagatgggacacccctgctgtaaagtttcatatcactcatgaattgctcagctgatttaaataatttgtaaaatcctgctaactagcaaattcaca

SEQ ID NO: 104511 - DNA, 120 bp, Artificial Sequence
  ENSG00000095587_53 (sequence is synthesized)
tttgtaaaatcctgctaactagcaaattcacattgagattttctattgattgggtccctttgatagctttcagattggtattgttagcgttccatttgtgaacaaatgttcccttggctt

SEQ ID NO: 104512 - DNA, 120 bp, Artificial Sequence
  ENSG00000095587_54 (sequence is synthesized)
tagcagatgtttttaaagtttcttttgtagaccgaacttctgaagagtaataccaaatgcctaaaattttatttttaaaaaggaaaattgtttaaagtattatatgtaaacatatgggta

SEQ ID NO: 104513 - DNA, 120 bp, Artificial Sequence
  ENSG00000095587_55 (sequence is synthesized)
ttttttattttgtgtaattttacatttcatgaaatgatgtcagtttcaaagagaaagtggagaggacctaacatatgtctctacctagaacggatggtttcattaaagaatgtggattta

SEQ ID NO: 104514 - DNA, 120 bp, Artificial Sequence
  ENSG00000095587_56 (sequence is synthesized)
ttgggaaacggatggtggctatattgattgcgcgcttttcgctaccatagaatcatcaccagaagtaagagagaaaatgcgcataaatgcttggcatggaataaacactcggcgagagtc

SEQ ID NO: 104515 - DNA, 120 bp, Artificial Sequence
  ENSG00000095587_57 (sequence is synthesized)
agccaccatgagggtgctgcctggagcagcgtgcacctcatacaacctcaccagcgtcatttgtactaaagggtcgtgcagcagagtgcacaggtcaacagcagggtctctgatgccaga

SEQ ID NO: 104516 - DNA, 120 bp, Artificial Sequence
  ENSG00000095587_58 (sequence is synthesized)
gcaccagatcatggcccaactctcagtatgtgaccttgggcaagtcatctgacagcgatgagcctcattttcctcacctgtaaagcggggattagacacatcacaggggtgtaaagatta

SEQ ID NO: 104517 - DNA, 120 bp, Artificial Sequence
  ENSG00000095587_59 (sequence is synthesized)
aatgaggcgatacttgtaaagcatttaaaacagctgccgacagagtgggcactcagcccttgctggctcttagccctaagtgagagagaagctgtgtgatgggatggaaggaagacagat

SEQ ID NO: 104518 - DNA, 120 bp, Artificial Sequence
  ENSG00000095587_60 (sequence is synthesized)
ttgggctgtgtaaagcctggctctgtcgcttaatagctgtcaaaatgtcaagcatttaatctctgaacccctgctctctcatctgcagtgtggtcattgtagcaatagctcatgtaacta

SEQ ID NO: 104519 - DNA, 120 bp, Artificial Sequence
  ENSG00000095587_61 (sequence is synthesized)
cttcatagggccacttgctggaccaaaagcaaggcggaggttgagaccctctctacagatgtcctcaagcatcatcacggccacacaccccctgcacagccagctggacgtctccctgca

SEQ ID NO: 104520 - DNA, 120 bp, Artificial Sequence
  ENSG00000095587_62 (sequence is synthesized)
cctggggtgggacactggcttccacctgatgagcacttggacaggagacagagaaatggtgaaggcacgacaaggactgccttttattctgactgggggagggcgaggggaggaaggtgc

SEQ ID NO: 104521 - DNA, 70 bp, Artificial Sequence
  ENSG00000095587_63 (sequence is synthesized)
cttttattctgactgggggagggcgaggggaggaaggtgcgtgataaaatgtcctattaaaatgaagcat

SEQ ID NO: 104522 - DNA, 71 bp, Artificial Sequence
  ENSG00000095587_64 (sequence is synthesized)
acgatagagtgagactttgtctctaaaaaaataaaaaaaataaaatgaagcatcagcaaccaaagggaaaa

SEQ ID NO: 104523 - DNA, 120 bp, Artificial Sequence
  ENSG00000095596_0 (sequence is synthesized)
gctggcggcggcggcaggtggcgcgggaggtcgcggcgcgccatggggctcccggcgctgctggccagtgcgctctgcaccttcgtgctgccgctgctgctcttcctggctgcgatcaag

SEQ ID NO: 104524 - DNA, 120 bp, Artificial Sequence
  ENSG00000095596_1 (sequence is synthesized)
ctctgggacctgtactgcgtgagcggccgcgaccgcagttgtgccctcccattgccccccgggactatgggcttccccttctttggggaaaccttgcagatggtactgcagcggaggaag

SEQ ID NO: 104525 - DNA, 120 bp, Artificial Sequence
  ENSG00000095596_2 (sequence is synthesized)
ttcctgcagatgaagcgcaggaaatacggcttcatctacaagacgcatctgttcgggcggcccaccgtacgggtgatgggcgcggacaatgtgcggcgcatcttgctcggagagcaccgg

SEQ ID NO: 104526 - DNA, 120 bp, Artificial Sequence
  ENSG00000095596_3 (sequence is synthesized)
ctggtgtcggtccactggccagcgtcggtgcgcaccattctgggatctggctgcctctctaacctgcacgactcctcgcacaagcagcgcaagaaggtgattatgcgggccttcagccgc

SEQ ID NO: 104527 - DNA, 120 bp, Artificial Sequence
  ENSG00000095596_4 (sequence is synthesized)
gaggcactcgaatgctacgtgccggtgatcaccgaggaagtgggcagcagcctggagcagtggctgagctgcggcgagcgcggcctcctggtctaccccgaggtgaagcgcctcatgttc

SEQ ID NO: 104528 - DNA, 120 bp, Artificial Sequence
  ENSG00000095596_5 (sequence is synthesized)
cgaatcgccatgcgcatcctactgggctgcgaaccccaactggcgggcgacggggactccgagcagcagcttgtggaggccttcgaggaaatgacccgcaatctcttctcgctgcccatc

SEQ ID NO: 104529 - DNA, 120 bp, Artificial Sequence
  ENSG00000095596_6 (sequence is synthesized)
gacgtgcccttcagcgggctgtaccggggcatgaaggcgcggaacctcattcacgcgcgcatcgagcagaacattcgcgccaagatctgcgggctgcgggcatccgaggcgggccagggc

SEQ ID NO: 104530 - DNA, 120 bp, Artificial Sequence
  ENSG00000095596_7 (sequence is synthesized)
tgcaaagacgcgctgcagctgttgatcgagcactcgtgggagaggggagagcggctggacatgcaggcactaaagcaatcttcaaccgaactcctctttggaggacacgaaaccacggcc

SEQ ID NO: 104531 - DNA, 120 bp, Artificial Sequence
  ENSG00000095596_8 (sequence is synthesized)
taagggtttactttgcaagagcaatcaagacaacaagttggacatggaaattttggaacaacttaaatacatcgggtgtgttattaaggagacccttcgactgaatcccccagttccagg

SEQ ID NO: 104532 - DNA, 120 bp, Artificial Sequence
  ENSG00000095596_9 (sequence is synthesized)
agggtttcgggttgctctgaagacttttgaattaaatggataccagattcccaagggctggaatgttatctacagtatctgtgatactcatgatgtggcagagatcttcaccaacaagga

SEQ ID NO: 104533 - DNA, 120 bp, Artificial Sequence
  ENSG00000095596_10 (sequence is synthesized)
agaatttaatcctgaccgattcatgctgcctcacccagaggatgcatccaggttcagcttcattccatttggaggaggccttaggagctgtgtaggcaaagaatttgcaaaaattcttct

SEQ ID NO: 104534 - DNA, 120 bp, Artificial Sequence
  ENSG00000095596_11 (sequence is synthesized)
caaaatatttacagtggagctggccaggcattgtgactggcagcttctaaatggacctcctacaatgaaaaccagtcccaccgtgtatcctgtggacaatctccctgcaagattcaccca

SEQ ID NO: 104535 - DNA, 120 bp, Artificial Sequence
  ENSG00000095596_12 (sequence is synthesized)
tttccatggggaaatctgatgagcttgaatgttcaaacctgagacttattggaagtgtacatatgagtttttaaggagtgttgtgttgactttatatttaatttctaaatgtatattata

SEQ ID NO: 104536 - DNA, 120 bp, Artificial Sequence
  ENSG00000095596_13 (sequence is synthesized)
atatttatgtgttttgactatactaccacaatctttaaatattaaaataatgaatttgtatcatttccaaataaagtaaaatttgaaggtacttttctggtattttaagattcctgttgg

SEQ ID NO: 104537 - DNA, 120 bp, Artificial Sequence
  ENSG00000095596_14 (sequence is synthesized)
gtaaaactcaccagtttagtattttcttagtgtatttaaccagattttacaatgcctacctggacttatttgtcatctttgcatctgttttctgtgagaagaaatcttagctgtttttta

SEQ ID NO: 104538 - DNA, 120 bp, Artificial Sequence
  ENSG00000095596_15 (sequence is synthesized)
tgttaacagttattagaaaatatatgtctgtgtgtgttattccagacgtatctctgtaaattcttctacagtcacttagattccctatttggaaaattgatccaagttaatttaattttt

SEQ ID NO: 104539 - DNA, 120 bp, Artificial Sequence
  ENSG00000095596_16 (sequence is synthesized)
ttttggtttgctgtactttagggaaagatgaacctgaaaaggtaacactgagaactgtcactctaacctctccagcttatctaacatgtcataaacataataaatctgtgttgtccaata

SEQ ID NO: 104540 - DNA, 120 bp, Artificial Sequence
  ENSG00000095596_17 (sequence is synthesized)
cggcacctggaaatggaaagccagtgaaggctgctttgggccggggcagcgggtgggaccgggcgggagggattccaaagagaccgccgggaaggctagagcttggaattccggctcctc

SEQ ID NO: 104541 - DNA, 120 bp, Artificial Sequence
  ENSG00000095596_18 (sequence is synthesized)
ggagtcctggccctcccccaccgccgcctcggagctcagcacaccttggatgggggaggcgggcagctcctagccccgcaccccaggaggcgcgctcggagggaagccgccaccgcgccg

SEQ ID NO: 104542 - DNA, 120 bp, Artificial Sequence
  ENSG00000095596_19 (sequence is synthesized)
cctctgcctcggcgcggaacaaacggttaaagattttgggcagcgcctcgcggggggaggagccaggggcccaatccgcaattaaagatgaactttgggtgaactaattgtctgaccaag

SEQ ID NO: 104543 - DNA, 120 bp, Artificial Sequence
  ENSG00000095596_20 (sequence is synthesized)
tcgtactcgccttactgctccagctgaactaaagggacgttgcattttgtttaaagatattgctttccttgactttctgtcagcaaaacatttagcccttctagtcttccctccagaact

SEQ ID NO: 104544 - DNA, 120 bp, Artificial Sequence
  ENSG00000095596_21 (sequence is synthesized)
ctcagttcgattctgagtaatccttctgtcaaaccgcaggcagacttgtgagaatgtgggtctcactctattcttaggcactaaagcaatcttcaaccgaactcctctttggaggacacg

SEQ ID NO: 104545 - DNA, 120 bp, Artificial Sequence
  ENSG00000095596_22 (sequence is synthesized)
cttctaactggtgagcagcattctcctgggattgtaaatagatagtggatttgggcaggcaaatggccattagctgctgtttccccctcccagtctctcccatcatggggccctttgggt

SEQ ID NO: 104546 - DNA, 120 bp, Artificial Sequence
  ENSG00000095627_0 (sequence is synthesized)
gctgaggccaggagggcgcactggggattggaggcgagggaagtgcagggcgcatcccaggcggcagggctcccagcatcggcagtcgccatcaccgccagaccgcagagacaggttcgg

SEQ ID NO: 104547 - DNA, 120 bp, Artificial Sequence
  ENSG00000095627_1 (sequence is synthesized)
atccgcggtcctcttgcctctttccaggcctcgatgagtgttaaatcgccatttaatgtgatgtcaagaaataatttggaagcacctccttgtaagatgacagagccatttaattttgag

SEQ ID NO: 104548 - DNA, 120 bp, Artificial Sequence
  ENSG00000095627_2 (sequence is synthesized)
aaaaatgaaaacaagcttccaccacatgagtctttaagaagtcctggaacacttcctaaccaccctaatttcaggctgaaaagctcagagaatggaaataaaaagaacaattttttgctt

SEQ ID NO: 104549 - DNA, 120 bp, Artificial Sequence
  ENSG00000095627_3 (sequence is synthesized)
tgtgagcaaaccaaacaatatttggctagtcaggaagacaattcagtttcttcaaacccgaatggcatcaacggagaagtagttggctccaaaggagacaggaaaaaattgccagcagga

SEQ ID NO: 104550 - DNA, 120 bp, Artificial Sequence
  ENSG00000095627_4 (sequence is synthesized)
aactcagtgtcaccaccaagtgctgaaagtaattcaccacccaaagaagtgaatattaagcctggaaataatgtacgtcctgcaaaatcaaaaaaactaaacaagttggtcgagaattcc

SEQ ID NO: 104551 - DNA, 120 bp, Artificial Sequence
  ENSG00000095627_5 (sequence is synthesized)
ttgtccataagtaatccagggctcttcacctccttaggacctcctcttcggtccacaacttgccatcgctgtggcctatttggatcgctgaggtgctctcagtgcaagcagacctactat

SEQ ID NO: 104552 - DNA, 120 bp, Artificial Sequence
  ENSG00000095627_6 (sequence is synthesized)
tgctccacagcatgtcaaagaagagactggtctgcacacagcatcgtgtgcaggcctgttcagccaaatttccacaaacttgaaaataaatcatctattgaaacaaaggatgtggaggta

SEQ ID NO: 104553 - DNA, 120 bp, Artificial Sequence
  ENSG00000095627_7 (sequence is synthesized)
aacaataagagtgactgtccacttggagttactaaggaaatagccatttgggctgagagaataatgttttctgatttgagaagtctacaactcaagaaaaccatggaaataaagggtacg

SEQ ID NO: 104554 - DNA, 120 bp, Artificial Sequence
  ENSG00000095627_8 (sequence is synthesized)
gttaccgaattcaaacacccaggggacttctacgtgcagttatattcttcagaagttttagaatacatgaaccaactctctgccagcttaaaagaaacatatgcaaatgtgcatgaaaaa

SEQ ID NO: 104555 - DNA, 120 bp, Artificial Sequence
  ENSG00000095627_9 (sequence is synthesized)
gactatattcctgttaagggggaagtttgtattgccaagtacactgttgatcagacctggaacagagcaatcatacaaaacgttgatgtgcagcaaaagaaggcacatgtcttatatatt

SEQ ID NO: 104556 - DNA, 120 bp, Artificial Sequence
  ENSG00000095627_10 (sequence is synthesized)
gattatggaaatgaagaaataattccattaaacagaatttaccacctcaacaggaacattgacttgtttcctccttgtgccataaagtgctttgtagccaatgttatcccagcagaaggg

SEQ ID NO: 104557 - DNA, 120 bp, Artificial Sequence
  ENSG00000095627_11 (sequence is synthesized)
aattggagcagtgattgtatcaaagctactaaaccactgttaatggagcagtactgctccataaagattgtcgacatcttggaagaggaagtggttacctttgctgtagaagttgagctg

SEQ ID NO: 104558 - DNA, 120 bp, Artificial Sequence
  ENSG00000095627_12 (sequence is synthesized)
ccaaattcaggaaaacttttagaccatgtgcttatagaaatgggatatggcttgaaacccagtggacaagattctaagaaggaaaatgcagatcaaagtgatcctgaagatgttggaaaa

SEQ ID NO: 104559 - DNA, 120 bp, Artificial Sequence
  ENSG00000095627_13 (sequence is synthesized)
atgacaactgaaaacaacattgtcgtagacaaaagtgacctaatcccaaaagtgttaactttgaatgtaggtgatgagttttgtggtgtggttgcccacattcaaacaccagaagacttc

SEQ ID NO: 104560 - DNA, 120 bp, Artificial Sequence
  ENSG00000095627_14 (sequence is synthesized)
ttttgtcaacaactgcaaagtggccgaaagcttgctgaacttcaggcatcccttagcaagtactgtgatcagttgcctccacgctctgatttttatccagccattggtgatatatgttgt

SEQ ID NO: 104561 - DNA, 120 bp, Artificial Sequence
  ENSG00000095627_15 (sequence is synthesized)
gctcagttctcagaggatgatcagtggtaccgtgcctctgttttggcttacgcttctgaagaatctgtactggtcggatatgtagattatggaaactttgaaatccttagtttgatgaga

SEQ ID NO: 104562 - DNA, 120 bp, Artificial Sequence
  ENSG00000095627_16 (sequence is synthesized)
ctttgtcccataatcccaaagttgttggaattgccaatgcaagctataaagtgtgtactagcaggagtaaagccatcattaggaatttggactccagaagctatttgtctcatgaaaaaa

SEQ ID NO: 104563 - DNA, 120 bp, Artificial Sequence
  ENSG00000095627_17 (sequence is synthesized)
cttgtacagaacaaaataatcacagtgaaagtggtggacaagttggaaaacagttccctggtggagcttattgataaatccgagacgcctcatgtcagtgttagcaaagttctcctagat

SEQ ID NO: 104564 - DNA, 120 bp, Artificial Sequence
  ENSG00000095627_18 (sequence is synthesized)
ccttgggtgtggaaggaaaagtaaatccattggagtggacatgggttgaacttggtgttgaccaaacagtagatgttgtggtctgtgtgatatatagtcctggagaattttattgccatg

SEQ ID NO: 104565 - DNA, 120 bp, Artificial Sequence
  ENSG00000095627_19 (sequence is synthesized)
tgcttaaagaggatgctttaaagaaactcaatgatttgaacaagtcattagcagaacactgccagcagaagttacctaatggtttcaaggcagagataggacaaccttgttgtgcttttt

SEQ ID NO: 104566 - DNA, 120 bp, Artificial Sequence
  ENSG00000095627_20 (sequence is synthesized)
ttgcaggtgatggtagttggtatcgtgctttagtcaaggaaatcttaccaaatggacatgttaaagtacattttgtggattatggaaacatcgaagaagttactgcagatgaactccgaa

SEQ ID NO: 104567 - DNA, 120 bp, Artificial Sequence
  ENSG00000095627_21 (sequence is synthesized)
tgatatcatcaacatttttaaaccttccctttcagggaatacggtgccagttagcagatatacagtctagaaacaaacattggtctgaagaagccataacaagattccagatgtgtgttg

SEQ ID NO: 104568 - DNA, 120 bp, Artificial Sequence
  ENSG00000095627_22 (sequence is synthesized)
ctgggataaaattgcaagccagagtggttgaagtcactgaaaatgggataggagttgaactcaccgatctctccacttgttatcccagaataattagtgatgttctgattgatgaacatc

SEQ ID NO: 104569 - DNA, 120 bp, Artificial Sequence
  ENSG00000095627_23 (sequence is synthesized)
tggttttaaaatctgcttcaccacataaagacttaccaaatgacagacttgttaataaacatgagcttcaagttcatgtacagggacttcaagctacctcttcagctgagcaatggaaga

SEQ ID NO: 104570 - DNA, 120 bp, Artificial Sequence
  ENSG00000095627_24 (sequence is synthesized)
cgatagaattgccagtggataaaactatacaagcaaatgtattagaaatcataagcccaaacttgttttatgctctaccaaaagggatgccagaaaatcaggaaaagctgtgcatgttga

SEQ ID NO: 104571 - DNA, 120 bp, Artificial Sequence
  ENSG00000095627_25 (sequence is synthesized)
cagctgaattattagaatactgcaatgctccgaaaagtcgaccaccctatagaccaagaattggagacgcatgctgtgccaaatacacaagtgatgatttttggtatcgtgcagttgttc

SEQ ID NO: 104572 - DNA, 120 bp, Artificial Sequence
  ENSG00000095627_26 (sequence is synthesized)
tggggacatcagacactgatgtggaagtgctctatgcagactatggaaacattgaaaccctgcctctttgcagagtgcaaccaatcacctctagccacctggcgcttcctttccaaatta

SEQ ID NO: 104573 - DNA, 120 bp, Artificial Sequence
  ENSG00000095627_27 (sequence is synthesized)
ttagatgttcacttgaaggattaatggaattgaatggaagctcttctcaattaataataatgctattaaaaaatttcatgttgaatcagaatgtaatgctttctgtgaaaggaattacaa

SEQ ID NO: 104574 - DNA, 120 bp, Artificial Sequence
  ENSG00000095627_28 (sequence is synthesized)
agaatgtccatacagtgtcagttgagaaatgttctgagaatgggactgtcgatgtagctgataagctagtgacatttggtctggcaaaaaacatcacacctcaaaggcagagtgctttaa

SEQ ID NO: 104575 - DNA, 120 bp, Artificial Sequence
  ENSG00000095627_29 (sequence is synthesized)
atacagaaaagatgtataggatgaattgctgctgcacagagttacagaaacaagttgaaaaacatgaacatattcttctcttcctcttaaacaattcaaccaatcaaaataaatttattg

SEQ ID NO: 104576 - DNA, 120 bp, Artificial Sequence
  ENSG00000095627_30 (sequence is synthesized)
aaatgaaaaaactgttaaaaaaaacagcatctcttggaggtaaacccttatgagacaggaaacagcaaaggctagctttaggagagaaagtacagcacctggtgtttttatttatgagaa

SEQ ID NO: 104577 - DNA, 120 bp, Artificial Sequence
  ENSG00000095627_31 (sequence is synthesized)
ccttttctttgtccactttctctgtaatgaccttctatccctccgtttttgcctgcctgccattctcctattaggttggtggtttttattttcctctaagttccttccaccaaataaata

SEQ ID NO: 104578 - DNA, 120 bp, Artificial Sequence
  ENSG00000095627_32 (sequence is synthesized)
ttacgtaaaaaattcataccaaatcaatgagaatactggcaaggaatacatagggactttctgctatatatgtaactttttattacttaaaggtaccgaaggaaggccaggtgcagtggc

SEQ ID NO: 104579 - DNA, 120 bp, Artificial Sequence
  ENSG00000095627_33 (sequence is synthesized)
aaaaaaaaaaaaaaagttgatatgagttttattttctgtccgtttgaaatattttgtaatattccctgcattctctgtcgtctgcctcttccacataatgtcctttgctttcatgtttgt

SEQ ID NO: 104580 - DNA, 120 bp, Artificial Sequence
  ENSG00000095627_34 (sequence is synthesized)
tatcttctttttctgttcactcagaggtcatcaatttctttctctccgtccttaattggattatttttcttttggcctttgggcacagagtctgacctctggaccactctaactggagaa

SEQ ID NO: 104581 - DNA, 120 bp, Artificial Sequence
  ENSG00000095627_35 (sequence is synthesized)
ggaactttatgttccctctcctgctgtgtccacaaccttagaaatctgtagctagatttttgttgttatagatagaatttactgtttctgaaacccaaatacagttatcagtttaaggtt

SEQ ID NO: 104582 - DNA, 120 bp, Artificial Sequence
  ENSG00000095627_36 (sequence is synthesized)
ggtgtgggaggattctctgagtttggaaatagcgcttccaggcatcactccttcaaatgcaaacgttcaccttctctctaagagaaacttgcatgtggattcagtgccttcgtttgacta

SEQ ID NO: 104583 - DNA, 120 bp, Artificial Sequence
  ENSG00000095627_37 (sequence is synthesized)
aaaattacgatacaaacaatattaacatttactagacttttttttccctactttcctcctataggaaaggaagatgtgctagggcatttacttagatgtgggtcagctggcgctagtttg

SEQ ID NO: 104584 - DNA, 120 bp, Artificial Sequence
  ENSG00000095627_38 (sequence is synthesized)
tttaaggagttcctgctgtgtgccagtagcttttccgggccctagggtccttgctataaatacgttagccctgctgggcttctgaactaagggagctaaatgcttccagcttccttagtg

SEQ ID NO: 104585 - DNA, 120 bp, Artificial Sequence
  ENSG00000095627_39 (sequence is synthesized)
catcttcaggcatattggcaggatagagctaatggagtgaaacctattgtaaggctgtactttcgtgatttaatgacctgaggtttggtcataatgcttctgctgtttttgtaggtttat

SEQ ID NO: 104586 - DNA, 120 bp, Artificial Sequence
  ENSG00000095627_40 (sequence is synthesized)
ctgatcgttttcctttgctactgctaatggaactgaacccccaggggtattccagttgtaatagcctttccttactgttgtttggttctgtgaatgcctatgttattgatatgtggaggg

SEQ ID NO: 104587 - DNA, 120 bp, Artificial Sequence
  ENSG00000095637_0 (sequence is synthesized)
atgagttctgaatgtgatggtggttccaaagctgtgatgaatggcttggcacctggcagcaatgggcaagacaaagacatggatcttacaaaaatctgcactgggaagggagcggtgact

SEQ ID NO: 104588 - DNA, 120 bp, Artificial Sequence
  ENSG00000095637_1 (sequence is synthesized)
ctccgggcctcgtcttcctacagggaaaccccaagcagtagccctgcgagccctcaggaaacccggcaacacgaaagcaaaccagatgagtggaggctttcttccagtgctgatgccaat

SEQ ID NO: 104589 - DNA, 120 bp, Artificial Sequence
  ENSG00000095637_2 (sequence is synthesized)
ggaaatgcccagccctcttcactcgctgccaagggctacagaagtgtgcatcccaaccttccttctgacaagtcccaggattccagtcctctactaaatgaagtttcttcttcccttatt

SEQ ID NO: 104590 - DNA, 120 bp, Artificial Sequence
  ENSG00000095637_3 (sequence is synthesized)
ggaactgattcccaagcctttccatcagttagcaagccttcatccgcctatccctccacaacgattgtcaatcctactattgtgctcttgcaacacaatcgagaacagcaaaaacgactc

SEQ ID NO: 104591 - DNA, 120 bp, Artificial Sequence
  ENSG00000095637_4 (sequence is synthesized)
agtagcctttcagatcctgtctcagaaagaagagtgggagagcaggactcagcaccaacccaggaaaaacccacctcacctggcaaggctattgaaaaaagagcaaaggatgacagtagg

SEQ ID NO: 104592 - DNA, 120 bp, Artificial Sequence
  ENSG00000095637_5 (sequence is synthesized)
cgggtggtgaagagcactcaggacttaagcgatgtttccatggatgaagtgggcatcccactccggaacactgagagatcaaaagactggtacaagactatgtttaaacagatccacaaa

SEQ ID NO: 104593 - DNA, 120 bp, Artificial Sequence
  ENSG00000095637_6 (sequence is synthesized)
ctgaacagagatgatgattcagatctgtactctcccagatactcattttctgaagacacaaaatctcccctttctgtgcctcgctcaaaaagtgagatgagctacattgatggtgagaag

SEQ ID NO: 104594 - DNA, 120 bp, Artificial Sequence
  ENSG00000095637_7 (sequence is synthesized)
gtagtcaagaggtcggccacactacccctcccagcccgctcttcctcactgaagtcaagctcagaaagaaatgactgggaacccccagataagaaagtagacacaagaaaatatcgtgca

SEQ ID NO: 104595 - DNA, 120 bp, Artificial Sequence
  ENSG00000095637_8 (sequence is synthesized)
tacgaatatcagcctggcaagtcttccgttctgaccaacgaaaagatgagctcagccatcagccctactccggaaatttcttcagagactcctggatatatatattcttccaacttccat

SEQ ID NO: 104596 - DNA, 120 bp, Artificial Sequence
  ENSG00000095637_9 (sequence is synthesized)
gcagtgaagagggaatcagacggggctcctggggatctcactagcttggagaatgagagacaaatttataaaagtgtcttggaaggtggtgacatccctcttcagggcctgagtgggctc

SEQ ID NO: 104597 - DNA, 120 bp, Artificial Sequence
  ENSG00000095637_10 (sequence is synthesized)
aagcgaccatccagctctgcttccactaaagattcagaatcgccaagacattttataccagctgattacttggaatccacggaagaatttattcgaagacgtcatgatgataaagagatg

SEQ ID NO: 104598 - DNA, 120 bp, Artificial Sequence
  ENSG00000095637_11 (sequence is synthesized)
agacctgccagagccaaatttgactttaaagctcagacactaaaggagcttcctctgcagaagggagatattgtttacatttataagcaaattgatcagaactggtatgaaggagaacac

SEQ ID NO: 104599 - DNA, 120 bp, Artificial Sequence
  ENSG00000095637_12 (sequence is synthesized)
cacggccgggtgggaatcttcccacgcacctacatcgagcttcttcctcctgctgagaaggcacagcccaaaaagttgacaccagtgcaggttttggaatatggagaagctattgctaag

SEQ ID NO: 104600 - DNA, 120 bp, Artificial Sequence
  ENSG00000095637_13 (sequence is synthesized)
tttaactttaatggtgatacacaagtagaaatgtccttcagaaagggtgagaggatcacactgctccggcaggtagatgagaactggtacgaagggaggatcccggggacatcccgacaa

SEQ ID NO: 104601 - DNA, 120 bp, Artificial Sequence
  ENSG00000095637_14 (sequence is synthesized)
ggcatcttccccatcacctacgtggatgtgatcaagcgaccactggtgaaaaaccctgtggattacatggacctgcctttctcctcctccccaagtcgcagtgccactgcaagcccacag

SEQ ID NO: 104602 - DNA, 120 bp, Artificial Sequence
  ENSG00000095637_15 (sequence is synthesized)
caacctcaagcccagcagcgaagagtcacccccgacaggagtcaaacctcacaagatttatttagctatcaagcattatatagctatataccacagaatgatgatgagttggaactccgc

SEQ ID NO: 104603 - DNA, 120 bp, Artificial Sequence
  ENSG00000095637_16 (sequence is synthesized)
gatggagatatcgttgatgtcatggaaaaatgtgacgatggatggtttgttggtacttcaagaaggacaaagcagtttggtacttttccaggcaactatgtaaaacctttgtatctataa

SEQ ID NO: 104604 - DNA, 120 bp, Artificial Sequence
  ENSG00000095637_17 (sequence is synthesized)
ctcccccacgccctcctctccctcaaaaggaccgctttgcatggcagtcccccaccatccacaatacctataaggattccctctacctgagctcaccaaagccttatgtcccactcggca

SEQ ID NO: 104605 - DNA, 120 bp, Artificial Sequence
  ENSG00000095637_18 (sequence is synthesized)
cccccagacagcagaacccctcacaaccccagcctatctctgtcctcctggcagctggatcggctcccaaaggtgtggtgtgccctggttccttgcttccggactccacgttccccagtg

SEQ ID NO: 104606 - DNA, 120 bp, Artificial Sequence
  ENSG00000095637_19 (sequence is synthesized)
cttcatcccaaccccagcagcgctatgcagccaccaggacagtttatcataagaatgtgagctctaacccatgtcatgaggcagttgggattaaaaaggtcagcagcttatatgtacctt

SEQ ID NO: 104607 - DNA, 120 bp, Artificial Sequence
  ENSG00000095637_20 (sequence is synthesized)
gcaccggctcccggccttgtctcccgcacagccggcacaggaaaaccaccccctgctcctcctcctgaccctcccaagctattctttgacatccgtaaagatgccgttaaccgtggcgag

SEQ ID NO: 104608 - DNA, 120 bp, Artificial Sequence
  ENSG00000095637_21 (sequence is synthesized)
agtccttccctggggactcaggcttcgttcccagatgtgagaccacctgtgctaggcccccgggttacctctgatcccgaaaaccggaagagcaaagaatcttaccttttgcagccgagt

SEQ ID NO: 104609 - DNA, 120 bp, Artificial Sequence
  ENSG00000095637_22 (sequence is synthesized)
gtgtagtgcgagtggggcggacgcgcgcagcccgcccgcccggcgaccagcaaggagttggcatcctttggaagagttcgtgaaagctttctgcccagagctcctggaccaatgcatctt

SEQ ID NO: 104610 - DNA, 120 bp, Artificial Sequence
  ENSG00000095637_23 (sequence is synthesized)
cacctctggggcctcttggctgcgtccccacaatcccagcgactgcctctgccgcctcacctctgaccttcccgactctagatgatttcattccccctcatctgcagaggtggccccacc

SEQ ID NO: 104611 - DNA, 120 bp, Artificial Sequence
  ENSG00000095637_24 (sequence is synthesized)
tcctttgcccccattagccagacgccaccatccttctcaccaccacctccgctggtccctcctgccccggaggacctccgcagagtctcggagcctgacctcacgggagctgtttcgagt

SEQ ID NO: 104612 - DNA, 120 bp, Artificial Sequence
  ENSG00000095637_25 (sequence is synthesized)
ttttccagtcacagcaagctcatcacgccagccccctcatctctgccccactcccgccgagccctgtcccccgagatgcacgctgtcacctctgagtggatctcactgactgtgggggtc

SEQ ID NO: 104613 - DNA, 120 bp, Artificial Sequence
  ENSG00000095637_26 (sequence is synthesized)
ccaggcaggcgttctctggccctgaccccacccttgcctcctctgccagaggcttctatctataacactgaccacctcgccttgtcaccaagggccagtccctccctgtctctcagcctc

SEQ ID NO: 104614 - DNA, 120 bp, Artificial Sequence
  ENSG00000095637_27 (sequence is synthesized)
ccccatttgagttggtcagatcgtcccaccccacgatcagtagcttctccactggccctaccttccccacacaaaacctactccctagcacctacttcccaggcctcccttcacatgaat

SEQ ID NO: 104615 - DNA, 120 bp, Artificial Sequence
  ENSG00000095637_28 (sequence is synthesized)
ggagacggtggtgtccacacgccatcttcaggcatccaccaagatagcttcttgcagctgccgctggggagctctgatagtgtcatctcccagcttagtgatgcctttagcagccagagc

SEQ ID NO: 104616 - DNA, 120 bp, Artificial Sequence
  ENSG00000095637_29 (sequence is synthesized)
gctgcttgaagccttcagacgtggtcaggtgcctgagtactgaacagagactctcagatctcaacacccctgaggagagccggcccggcaagcccctgggtagcgcttttccaggaagtg

SEQ ID NO: 104617 - DNA, 120 bp, Artificial Sequence
  ENSG00000095637_30 (sequence is synthesized)
aggctgagcagacagagcggcatagaggtggcgagcaggcggggaggaaagctgctcggagaggtgggagccaggaagcggtttgcaatgagatcataaacattgccgaaaaatctgttc

SEQ ID NO: 104618 - DNA, 120 bp, Artificial Sequence
  ENSG00000095637_31 (sequence is synthesized)
agcagacctctagacagcctgagtggcgcctggatgccagaggggacaagagcaccctcctcaggaacatctacctaatgagcccccttcctttccggctgaaaaagcccctccaccacc

SEQ ID NO: 104619 - DNA, 120 bp, Artificial Sequence
  ENSG00000095637_32 (sequence is synthesized)
accccagacaaccttcccctggtgactcctcaggcctcctggtgggccagaagccagacctccccagtcagccccatcaggaccagcccccttctggggggaagcccgtggttcccacac

SEQ ID NO: 104620 - DNA, 120 bp, Artificial Sequence
  ENSG00000095637_33 (sequence is synthesized)
actacccaagggccattaataatggaaactccgtgccatactcagaccacagcctggacaggaacaacaacccacaaagtgaactggcaccatcccgtggagattcagaatcgccaagac

SEQ ID NO: 104621 - DNA, 120 bp, Artificial Sequence
  ENSG00000095637_34 (sequence is synthesized)
cgcgcacgctctatttctgctgttaaaatcattcctgtgaagacagtgaaaaacgcctcaggcctagttctccctacagacatggatcttacaaaaatctgcactgggaagggagcggtg

SEQ ID NO: 104622 - DNA, 74 bp, Artificial Sequence
  ENSG00000095637_35 (sequence is synthesized)
gtacaaattccctgaacttcctgaaatccagcaaacttccgaagagacaaagtcttgctctgtcgcctcaaact

SEQ ID NO: 104623 - DNA, 120 bp, Artificial Sequence
  ENSG00000095637_36 (sequence is synthesized)
agtcttccgttctgaccaacgaaaagatgagtcgggatataagcccagaagagatagatttaaagaatgaaccttggtataaattcttttcggaattggagtttgggaaaccgcctccca

SEQ ID NO: 104624 - DNA, 120 bp, Artificial Sequence
  ENSG00000095637_37 (sequence is synthesized)
aaaagatatgggattatactcctggagactgctctatccttcctagagaggatagaaagactaatctagacaaagatctcagcctctgccagacagagttagaggcagatttagaaaaaa

SEQ ID NO: 104625 - DNA, 120 bp, Artificial Sequence
  ENSG00000095637_38 (sequence is synthesized)
cggaccagagacgacttaaacgcgagcaagaagaggctgatattgcagctcgacgccacacaggcgtcattccgacgcaccatcagtttatcactaatgagcgctttggggacctcctca

SEQ ID NO: 104626 - DNA, 120 bp, Artificial Sequence
  ENSG00000095637_39 (sequence is synthesized)
gcatcccaaccttccttctgacaagtcccaggatgccacttcctccagtgcagcccagccggaggtaatagttgtccctctctacctggttaatactgacagagggcaagaaggcactgc

SEQ ID NO: 104627 - DNA, 120 bp, Artificial Sequence
  ENSG00000095637_40 (sequence is synthesized)
ttcatgaaccgatctttttagttgagtcagtaggaaaattaatacagtggataaagtaagaagcaaaagacagggacagagaagtgttgtgtttaaaacccaagcctgtctaaggttact

SEQ ID NO: 104628 - DNA, 120 bp, Artificial Sequence
  ENSG00000095637_41 (sequence is synthesized)
gtgtattagacagggccgaactagtgtgctgagcaaaaagaattgaagcaaattgtatttacttagccgcttctgggagccacttcagcctttcccctcccctccacttcttgggtaatc

SEQ ID NO: 104629 - DNA, 120 bp, Artificial Sequence
  ENSG00000095637_42 (sequence is synthesized)
tgacctgaagcatagtccaggagcagagttagccagaaatgcctcctgctgccccagccttagagagctcccatctcaatcattgagcctgaaggcttcaagcccaagaatgcaacaaga

SEQ ID NO: 104630 - DNA, 120 bp, Artificial Sequence
  ENSG00000095637_43 (sequence is synthesized)
cccccagcctacatttctcagctcccctggagccagctgatcctgtaacgctgctggaggtcagtctgagctaccaagactgtccctagacaaaggtggagtcccccacactgcccaaga

SEQ ID NO: 104631 - DNA, 120 bp, Artificial Sequence
  ENSG00000095637_44 (sequence is synthesized)
ccaaatccctcactcaacctgctgaggtgtggatggggaaacagaggcaaaactgaggcacctgatgcattcagcctgctgtgcagcagtgccattgactgccctgatgttcagagagaa

SEQ ID NO: 104632 - DNA, 120 bp, Artificial Sequence
  ENSG00000095637_45 (sequence is synthesized)
acgcacacaaggtttgcccatgagaattggggagcagatggccaagcagataggttatgtctgttttctgagtgatgaagtcaggaagccctgtggctctggaggccacttgtggttcat

SEQ ID NO: 104633 - DNA, 120 bp, Artificial Sequence
  ENSG00000095637_46 (sequence is synthesized)
tcttttcccatatccttggcttttagaaatggttaccttcaggacagtgcagctgcatttatcagagcactattgctaagttttcttttctggcttgtgtttttctgggacagtttagaa

SEQ ID NO: 104634 - DNA, 120 bp, Artificial Sequence
  ENSG00000095637_47 (sequence is synthesized)
ttgggaggcctattctcatagaacaccaaaaatgatgttcagtgattcatttaacatacaccaatgtactctggctgctggggggacaaccataagcaagacatgcccagggtttgccgt

SEQ ID NO: 104635 - DNA, 120 bp, Artificial Sequence
  ENSG00000095637_48 (sequence is synthesized)
ggctccagatctactccctgtaggagttcaaggatcacacaaacggtagtaaccagggttgtgaatctgagtacaccctggcaaggcttctcttcagactgaagcagcaattctgccact

SEQ ID NO: 104636 - DNA, 120 bp, Artificial Sequence
  ENSG00000095637_49 (sequence is synthesized)
accagcagcaaccaggacgtctgttctttgtgggggccagatcagaagagagaggcccctgtgacgcccgggctgcttggtcacaactctgtccaattcaaggatgtttatcggcctctc

SEQ ID NO: 104637 - DNA, 120 bp, Artificial Sequence
  ENSG00000095637_50 (sequence is synthesized)
ttagatcctgagtgagacaaatacagaaatgacccattccctgcccaccagaaactcagaggtgattggggagactgacacaggaaaatgaacttaatcaagagagactgtgatatgtgc

SEQ ID NO: 104638 - DNA, 120 bp, Artificial Sequence
  ENSG00000095637_51 (sequence is synthesized)
taagaagggtgtgagggagggagagatgaattttccctggagggatcctagaaagcattgtcatattgccatctccattagctcacttttaaacaactagggtgctggaagaacctttgt

SEQ ID NO: 104639 - DNA, 120 bp, Artificial Sequence
  ENSG00000095637_52 (sequence is synthesized)
ctgagggtagttcatagctggaaatacttggaatattttccagagtctctaaactctcatcttcccccacagatacacatccaagctcacaaataggagtagcaattctaggtggtaggg

SEQ ID NO: 104640 - DNA, 120 bp, Artificial Sequence
  ENSG00000095637_53 (sequence is synthesized)
ttgtgtacggaacccctggctgtctgcatatatctcagaattaccccaggaccattgtcccaaagtctagagtctttacaggtaggcaaaatttgttttcaatgcctgtgcctcagctgc

SEQ ID NO: 104641 - DNA, 120 bp, Artificial Sequence
  ENSG00000095637_54 (sequence is synthesized)
tgtcacaaatacccatcttaggatcccatcagcttcccatcccccaccagacagccacagtaccctcactttctccctattgttctttcaaatcctgttctcaggaaagaaactgccact

SEQ ID NO: 104642 - DNA, 120 bp, Artificial Sequence
  ENSG00000095637_55 (sequence is synthesized)
aattcattcacactaaggtgtaaatgattgataataggaatgagttacctcttcccacagacatttgtttttaagtatgacagagcagggccttaatcccaagggaaaaggttatggaac

SEQ ID NO: 104643 - DNA, 120 bp, Artificial Sequence
  ENSG00000095637_56 (sequence is synthesized)
tggagggggtgagctttctgggtagaaggagacttcctgaatttccttaaaacccagtaagagtaagacctgttgttttggaaggtctgctccaccatctaagagcactgtttttttttt

SEQ ID NO: 104644 - DNA, 120 bp, Artificial Sequence
  ENSG00000095637_57 (sequence is synthesized)
tttgttgttgttgttgttttacggtctctgagggaatatagtaaaaatgcatatgcacgtgcaatttgcacggcagcatttcaccgattgtggactgtattggctaatgtgtttcctggt

SEQ ID NO: 104645 - DNA, 120 bp, Artificial Sequence
  ENSG00000095637_58 (sequence is synthesized)
ctttagatgcaaaccattaataacactatcttatctcatagttttttcaggggtgcttcttgattagtagggaattttgaacacctctttaaatacagctagaaaataaaaccaatttgt

SEQ ID NO: 104646 - DNA, 120 bp, Artificial Sequence
  ENSG00000095637_59 (sequence is synthesized)
aaagccacatttgcatatgatgccagcctcacgcatttgtatatctccagaaattcaggtatgcctcaccaatttgcccgtctttaataaaatcttgtgttaaaatttgcatcacgtcgc

SEQ ID NO: 104647 - DNA, 120 bp, Artificial Sequence
  ENSG00000095637_60 (sequence is synthesized)
cttcctatgtatgacgaaacaagaaacagagatttccaattgctcttttgtcttcagacatttagtaatataaagtacctatttttatgctgaaatgtttatacaggtttattaatagca

SEQ ID NO: 104648 - DNA, 120 bp, Artificial Sequence
  ENSG00000095637_61 (sequence is synthesized)
agtgcaactaactggcggcatgccttgcaacacattttgatatattagccatgcttccgggtaaaggcaagccccaaactccttatcttttgcagtctctctgggatcagtaaaagaaaa

SEQ ID NO: 104649 - DNA, 120 bp, Artificial Sequence
  ENSG00000095637_62 (sequence is synthesized)
aaaaaataatgtgcttaagaagtgggactgtaaatatgtatatttaactttgtatagcccatgtacctaccttgtatagaaaaataattttaaaaatttgaatggaagggggtaaaggaa

SEQ ID NO: 104650 - DNA, 120 bp, Artificial Sequence
  ENSG00000095637_63 (sequence is synthesized)
gtcatgaagtttttttgcatttttatttaaatgaaggaattccaaataactcacctacagatttttagcacaaaaatagccattgtaaagtgttaaaatttacgataagtattctattgg

SEQ ID NO: 104651 - DNA, 120 bp, Artificial Sequence
  ENSG00000095637_64 (sequence is synthesized)
ggaggaaaggtaactctgatctcagttacagtttttttttcctttttaatttcattattttgggtttttggtttttgcagtcctatttatctgcagtcgtattaagtcctattgctagaa

SEQ ID NO: 104652 - DNA, 120 bp, Artificial Sequence
  ENSG00000095637_65 (sequence is synthesized)
taggttactacaaaaaaggttatattctgaaagaaaaataactgacattatatataaccaattaatttaaagtattgccatttaaattacacactgagagcatgtcctatgcagacatag

SEQ ID NO: 104653 - DNA, 120 bp, Artificial Sequence
  ENSG00000095637_66 (sequence is synthesized)
atttttctgttcatttatttttcttcattgcagtggattgatttgataaatagatgtgttgaattactacatttgctgtacatattatttaataaactttattcagaattgcgtggcata

SEQ ID NO: 104654 - DNA, 120 bp, Artificial Sequence
  ENSG00000095637_67 (sequence is synthesized)
ctgtgtgtaagcacaagaagcccctgtcagctgcgaaggcctgcatttcggaaatccttccatccaaattcaaacccaggctctctgctcccagcgctcttttgcaggaacagaagagta

SEQ ID NO: 104655 - DNA, 120 bp, Artificial Sequence
  ENSG00000095637_68 (sequence is synthesized)
tcctcttgccctcagagaaggctcaaagctgtgagaacctttgtgtttctggttctttaaatgattccaaaagaggcctccccctccaagtgggagggagcattgagaacctgctcatgc

SEQ ID NO: 104656 - DNA, 120 bp, Artificial Sequence
  ENSG00000095637_69 (sequence is synthesized)
gctcccgacgggattatgacagcaagtcgagcagtaccatgagcctccaggagtacagcaccagcggcaggaggccctgtcctctctcaagaaaggctgggatgcagttcaccatgcttt

SEQ ID NO: 104657 - DNA, 120 bp, Artificial Sequence
  ENSG00000095637_70 (sequence is synthesized)
atcgggacatgcaccagatcaaccgatctggcctcttcctgggctccatctcctcctcctcgagtgtgcgggatcttgcctcccactttgaaaagagtagcctggcattgtccaggggtg

SEQ ID NO: 104658 - DNA, 120 bp, Artificial Sequence
  ENSG00000095637_71 (sequence is synthesized)
cccgcatcaccgcttttgagcagctgattcagcggtcccgttccatgccatccctggacctgtccggaaggctgagcaagtctcccacacctgtgctgtcccggggcagcctgacctcag

SEQ ID NO: 104659 - DNA, 120 bp, Artificial Sequence
  ENSG00000095637_72 (sequence is synthesized)
cccgctcggccgagtccctacttgagtcaaccaagctccatcccaaggagatggatgggatgaactccagtggggtctatgcttccccaacatgtagcaatatggcacaccatgccttga

SEQ ID NO: 104660 - DNA, 120 bp, Artificial Sequence
  ENSG00000095637_73 (sequence is synthesized)
gcttcaggggccttgtgccttctgagcctctctccacctgctctgatgacgtggaccgctgttcaaatatctccactgacagcagagaaggcagtggcggcagtgttcatggagatttcc

SEQ ID NO: 104661 - DNA, 120 bp, Artificial Sequence
  ENSG00000095637_74 (sequence is synthesized)
ttcccatcacagccgggaaagcccaactgcttagagaaaaagctgagtcaaagtgcttgggtctcctttttccttaggagccctgggaattgagagaatctgataacttcattgcgagtt

SEQ ID NO: 104662 - DNA, 120 bp, Artificial Sequence
  ENSG00000095637_75 (sequence is synthesized)
gtaatatgggaatacgtgaatctactcacagggcttcgggttcagtaggatcgagtgtaaaagttcctgttatggagcttgacatagagaaggattccagtcctctactaaatgaagttt

SEQ ID NO: 104663 - DNA, 120 bp, Artificial Sequence
  ENSG00000095637_76 (sequence is synthesized)
cgtgcccatgttctttaatcagaatgcattgtgcagttggattacattctttccccttgagatagacttaactttgttttgaagataatgacaaaaatgaagtacttttacccttttcat

SEQ ID NO: 104664 - DNA, 120 bp, Artificial Sequence
  ENSG00000095637_77 (sequence is synthesized)
ttttgcaggtgttcataaaataagtcccgcgagtctgcttttaaaaaaccctcttattgtggctctgttgctttttttgtgcatggttttaactaatattaatttttctactaacataaa

SEQ ID NO: 104665 - DNA, 120 bp, Artificial Sequence
  ENSG00000095637_78 (sequence is synthesized)
cctgagtagctgggattacaggagttggcatcctttggaagagttcgtgaaagctttctgcccagagctcctggaccaatgcatcttcccaccaccttaaaccactggtgaatatatgtg

SEQ ID NO: 104666 - DNA, 120 bp, Artificial Sequence
  ENSG00000095637_79 (sequence is synthesized)
gaatgcgatttgcagagaactatgctgtcctttctattatagaaggaagtatactgggctgggcctaggcatatctgggttttggtacttacttgattctgccatttttactgtgggatt

SEQ ID NO: 104667 - DNA, 120 bp, Artificial Sequence
  ENSG00000095637_80 (sequence is synthesized)
gtaggtgaattctttgacctcccaggccccagacagagaaacatatcctgctgtttacaggatatgtttgctttgcagactaaaagagataatccatgcaagaagtaatgtatgcacgaa

SEQ ID NO: 104668 - DNA, 120 bp, Artificial Sequence
  ENSG00000095637_81 (sequence is synthesized)
agtagagatgggttcctaatgtcatcgtttatttctcatggctgccagtaataaacacgaaagaagaactaaatatagtgagttatgtactcaccagctcatggtattatcctgaacttg

SEQ ID NO: 104669 - DNA, 120 bp, Artificial Sequence
  ENSG00000095637_82 (sequence is synthesized)
ccgcactgagaggaaattctgtagctctgtttagtagatggtacagagtaaaccccaggcagagagttttcatcttcttgtcatcccgcagaatatttctgatgactagagctctcagag

SEQ ID NO: 104670 - DNA, 120 bp, Artificial Sequence
  ENSG00000095637_83 (sequence is synthesized)
ctttctcatcattcattgagagcaggaccagatctcacagaatctgaaaagagctatgtggaagcggtttgcaatgagatcataaacattgccgaaaaatctgttcattactgcagcact

SEQ ID NO: 104671 - DNA, 80 bp, Artificial Sequence
  ENSG00000095713_0 (sequence is synthesized)
gtataaagcgagcgcgcggcgtcggggcgggaggctcgaggccagcccgggaccggggctgggagcaagcaggcggcggc

SEQ ID NO: 104672 - DNA, 120 bp, Artificial Sequence
  ENSG00000095713_1 (sequence is synthesized)
ccctaggcggcggggccgagagcgggaggatggctccgagcgctgaccccggcatgtccaggatgttaccgttcctgctgctgctctggtttctgcccatcactgaggggtcccagcggg

SEQ ID NO: 104673 - DNA, 120 bp, Artificial Sequence
  ENSG00000095713_2 (sequence is synthesized)
ctgaacccatgttcactgcagtcaccaactcagttctgcctcctgactatgacagtaatcccacccagctcaactatggtgtggcagttactgatgtggaccatgatggggactttgaga

SEQ ID NO: 104674 - DNA, 120 bp, Artificial Sequence
  ENSG00000095713_3 (sequence is synthesized)
tcgtcgtggcggggtacaatggacccaacctggttctgaagtatgaccgggcccagaagcggctggtgaacatcgcggtcgatgagcgcagctcaccctactacgcgctgcgggaccggc

SEQ ID NO: 104675 - DNA, 120 bp, Artificial Sequence
  ENSG00000095713_4 (sequence is synthesized)
aggggaacgccatcggggtcacagcctgcgacatcgacggggacggccgggaggagatctacttcctcaacaccaataatgccttctcgggggtggccacgtacaccgacaagttgttca

SEQ ID NO: 104676 - DNA, 120 bp, Artificial Sequence
  ENSG00000095713_5 (sequence is synthesized)
agttccgcaataaccggtgggaagacatcctgagcgatgaggtcaacgtggcccgtggtgtggccagcctctttgccggacgctctgtggcctgtgtggacagaaagggctctggacgct

SEQ ID NO: 104677 - DNA, 120 bp, Artificial Sequence
  ENSG00000095713_6 (sequence is synthesized)
actctatctacattgccaattacgcctacggtaatgtgggccctgatgccctcattgaaatggaccctgaggccagtgacctctcccggggcattctggcgctcagagatgtggctgctg

SEQ ID NO: 104678 - DNA, 120 bp, Artificial Sequence
  ENSG00000095713_7 (sequence is synthesized)
aggctggggtcagcaaatatacagggggccgaggcgtcagcgtgggccccatcctcagcagcagtgcctcggatatcttctgcgacaatgagaatgggcctaacttccttttccacaacc

SEQ ID NO: 104679 - DNA, 120 bp, Artificial Sequence
  ENSG00000095713_8 (sequence is synthesized)
ggggcgatggcacctttgtggacgctgcggccagtgctggtgtggacgacccccaccagcatgggcgaggtgtcgccctggctgacttcaaccgtgatggcaaagtggacatcgtctatg

SEQ ID NO: 104680 - DNA, 120 bp, Artificial Sequence
  ENSG00000095713_9 (sequence is synthesized)
gcaactggaatggcccccaccgcctctatctgcaaatgagcacccatgggaaggtccgcttccgggacatcgcctcacccaagttctccatgccctcccctgtccgcacggtcatcaccg

SEQ ID NO: 104681 - DNA, 120 bp, Artificial Sequence
  ENSG00000095713_10 (sequence is synthesized)
ccgactttgacaatgaccaggagctggagatcttcttcaacaacattgcctaccgcagctcctcagccaaccgcctcttccgcgtcatccgtagagagcacggagaccccctcatcgagg

SEQ ID NO: 104682 - DNA, 120 bp, Artificial Sequence
  ENSG00000095713_11 (sequence is synthesized)
agggggtgtggtgaccgacttcgacggagacgggatgctggacctcatcttgtcccatggagagtccatggctcagccgctgtccgtcttccggggcaatcagggcttcaacaacaactg

SEQ ID NO: 104683 - DNA, 120 bp, Artificial Sequence
  ENSG00000095713_12 (sequence is synthesized)
gctgcgagtggtgccacgcacccggtttggggcctttgccaggggagctaaggtcgtgctctacaccaagaagagtggggcccacctgaggatcatcgacgggggctcaggctacctgtg

SEQ ID NO: 104684 - DNA, 120 bp, Artificial Sequence
  ENSG00000095713_13 (sequence is synthesized)
tgagatggagcccgtggcacactttggcctggggaaggatgaagccagcagtgtggaggtgacgtggccagatggcaagatggtgagccggaacgtggccagcggggagatgaactcagt

SEQ ID NO: 104685 - DNA, 120 bp, Artificial Sequence
  ENSG00000095713_14 (sequence is synthesized)
gctggagatcctctacccccgggatgaggacacacttcaggacccagccccactggagtgtggccaaggattctcccagcaggaaaatggccattgcatggacaccaatgaatgcatcca

SEQ ID NO: 104686 - DNA, 120 bp, Artificial Sequence
  ENSG00000095713_15 (sequence is synthesized)
gttcccattcgtgtgccctcgagacaagcccgtatgtgtcaacacctatggaagctacaggtgccggaccaacaagaagtgcagtcggggctacgagcccaacgaggatggcacagcctg

SEQ ID NO: 104687 - DNA, 120 bp, Artificial Sequence
  ENSG00000095713_16 (sequence is synthesized)
cgtggggactctcggccagtcaccgggcccccgccccaccacccccaccgctgctgctgccactgccgctgctgctgccgctgctggagctgccactgctgcaccggtcctcgtagatgg

SEQ ID NO: 104688 - DNA, 120 bp, Artificial Sequence
  ENSG00000095713_17 (sequence is synthesized)
agatctcaatctggggtcggtggttaaggagagctgcgagcccagctgctgagcaggggtgggacatgaaccagcggatggagtccagcaggggagtgggaaagtgggcttgtgctgctg

SEQ ID NO: 104689 - DNA, 120 bp, Artificial Sequence
  ENSG00000095713_18 (sequence is synthesized)
cctagacagtagggatgtaaaggcctgggagctagaccctccccaagcccatccatgcacattacttagctaacaattagggagactcgtaaggccaggccctgtgctgggcacatagct

SEQ ID NO: 104690 - DNA, 120 bp, Artificial Sequence
  ENSG00000095713_19 (sequence is synthesized)
gtgatcacagcagacagggtcgctgccctgatggcgcttacattccagtgggtctaatgaccatatcttaggacacagatgtgcccagggaggtggtgtcactgcacaggaagtatgagg

SEQ ID NO: 104691 - DNA, 120 bp, Artificial Sequence
  ENSG00000095713_20 (sequence is synthesized)
actttagtgtcctgagttcaaatcctgattcaggaactcacaaagctatgtgaccttacaccagtcacttaacttgttagccatccattatcgcatctgcaaaatggggattaagaatag

SEQ ID NO: 104692 - DNA, 120 bp, Artificial Sequence
  ENSG00000095713_21 (sequence is synthesized)
aatcttggggttagtgtggagattagattaaatgtatgtaagacacttggcacaaaacctggcacatagtaaaggctcaataaaaacaagtgcctctcactgggctttgtcaacacgtga

SEQ ID NO: 104693 - DNA, 120 bp, Artificial Sequence
  ENSG00000095713_22 (sequence is synthesized)
agccgcctctagaatctctgagcctctctctcgggcctcatatctttctctaggccttggactttgccttcagttatatgcactttaaatcccatcaataaaggaaaaaacaaaacaaaa

SEQ ID NO: 104694 - DNA, 80 bp, Artificial Sequence
  ENSG00000095713_23 (sequence is synthesized)
ctggctgccggctgctgccaccgcaatcccggctcctaaatcagcgcggggaggcgctccctccccacgcccggctctcc

SEQ ID NO: 104695 - DNA, 120 bp, Artificial Sequence
  ENSG00000095713_24 (sequence is synthesized)
gtagccagaacactctttggaaatgatgtaacgccacagaatatgctcacgaccagcctcagtagtgaaggcttgttataaaacatagatctattcttcatggggaaaaaaagtcatccc

SEQ ID NO: 104696 - DNA, 120 bp, Artificial Sequence
  ENSG00000095713_25 (sequence is synthesized)
aggatataataaaattacacttaagaatgcagcaacccttttaaaaacatattcaacaaaaaaaaagcccctgccattttctgatatcatggtaatactcctaataaatcacaaaatatg

SEQ ID NO: 104697 - DNA, 120 bp, Artificial Sequence
  ENSG00000095713_26 (sequence is synthesized)
cagacagacaggtctattggacagcattgctccagagaggagggacctcaaatctgtcttgttcaccatttccctagcacttagaacagtgctcaattcatgcttttattcaatggatga

SEQ ID NO: 104698 - DNA, 120 bp, Artificial Sequence
  ENSG00000095739_0 (sequence is synthesized)
gggctggcgcgggcgggagctgcggcggatacccttgcgtgctgtggagaccctactctcttcgctgagaacggccgctagcggggactgaaggccgggagcccactcccgacccggggc

SEQ ID NO: 104699 - DNA, 120 bp, Artificial Sequence
  ENSG00000095739_1 (sequence is synthesized)
tagcgtgcgtccctagagtcgagcggggcaagggagccagtggccgccgacgggggaccgggaaacttttctgggctcctgggcgcgccctgtagccgcgctccatgctccggcagcggc

SEQ ID NO: 104700 - DNA, 80 bp, Artificial Sequence
  ENSG00000095739_2 (sequence is synthesized)
ccgaaacccagccccgccgctgacggcgcccgccgctccgggcagggcccatgccctgcgcgctccgggggtcgtaggct

SEQ ID NO: 104701 - DNA, 120 bp, Artificial Sequence
  ENSG00000095739_3 (sequence is synthesized)
ggccgtgcggggcgtcaatggatcgccactccagctacatcttcatctggctgcagctggagctctgcgccatggccgtgctgctcaccaaaggtgaaattcgatgctactgtgatgctg

SEQ ID NO: 104702 - DNA, 120 bp, Artificial Sequence
  ENSG00000095739_4 (sequence is synthesized)
cccactgtgtagccactggttatatgtgtaaatctgagctcagcgcctgcttctctagacttcttgatcctcagaactcaaattccccactcacccatggctgcctggactctcttgcaa

SEQ ID NO: 104703 - DNA, 120 bp, Artificial Sequence
  ENSG00000095739_5 (sequence is synthesized)
gcacgacagacatctgccaagccaaacaggcccgaaaccactctggcaccaccatacccacattggaatgctgtcatgaagacatgtgcaattacagagggctgcacgatgttctctctc

SEQ ID NO: 104704 - DNA, 120 bp, Artificial Sequence
  ENSG00000095739_6 (sequence is synthesized)
ctcccaggggtgaggcctcaggacaaggaaacaggtatcagcatgatggtagcagaaaccttatcaccaaggtgcaggagctgacttcttccaaagagttgtggttccgggcagcggtca

SEQ ID NO: 104705 - DNA, 120 bp, Artificial Sequence
  ENSG00000095739_7 (sequence is synthesized)
attgctggagggctgattttagtgttgcttattatgttggccctgaggatgcttcgaagtgaaaataagaggctgcaggatcagcggcaacagatgctctcccgtttgcactacagcttt

SEQ ID NO: 104706 - DNA, 120 bp, Artificial Sequence
  ENSG00000095739_8 (sequence is synthesized)
cacggacaccattccaaaaaggggcaggttgcaaagttagacttggaatgcatggtgccggtcagtgggcacgagaactgctgtctgacctgtgataaaatgagacaagcagacctcagc

SEQ ID NO: 104707 - DNA, 120 bp, Artificial Sequence
  ENSG00000095739_9 (sequence is synthesized)
aacgataagatcctctcgcttgttcactggggcatgtacagtgggcacgggaagctggaattcgtatgacggagtcttatctgaactacacttactgaacagcttgaaggccttttgagt

SEQ ID NO: 104708 - DNA, 120 bp, Artificial Sequence
  ENSG00000095739_10 (sequence is synthesized)
tctgctggacaggagcactttatctgaagacaaactcatttaatcatctttgagagacaaaatgacctctgcaaacagaatcttggatatttcttctgaaggattatttgcacagactta

SEQ ID NO: 104709 - DNA, 120 bp, Artificial Sequence
  ENSG00000095739_11 (sequence is synthesized)
aatacagttaaatgtgttatttgcttttaaaattataaaaagcaaagagaagactttgtacacactgtcaccagggttatttgcatccaagggagctggaattgagtacctaaataaaca

SEQ ID NO: 104710 - DNA, 120 bp, Artificial Sequence
  ENSG00000095739_12 (sequence is synthesized)
aaaatgtgccctatgtaagcttctacatcttgatttattgtaaagatttaaaagaaatatatatattttgtctgaaatttaatagtgtctttcataaatttaactgggaaacgtgagaca

SEQ ID NO: 104711 - DNA, 120 bp, Artificial Sequence
  ENSG00000095739_13 (sequence is synthesized)
gtacatgttaattatacaaatggccatttgctgttaataatttgttctcaactctaggatgtggcttggtttttttttttctcttttcttttttaaacaagaccaagatcttgcttattc

SEQ ID NO: 104712 - DNA, 120 bp, Artificial Sequence
  ENSG00000095739_14 (sequence is synthesized)
attagatgtctgtctacataataggttttgcctgttttttcaacattttgaagacattaaaaggccattacatctcagtaatgacagtctgtaaacaaatgcgtttgtaagcttcttcag

SEQ ID NO: 104713 - DNA, 120 bp, Artificial Sequence
  ENSG00000095739_15 (sequence is synthesized)
atagttttgcaatgttttctaaatatcgttgatttaattgtaagcttctttttaatggaattcttggttaaaatgaattgatgattatgaatatccctaggaggagttagcatggagttt

SEQ ID NO: 104714 - DNA, 120 bp, Artificial Sequence
  ENSG00000095752_0 (sequence is synthesized)
actgccgcggccctgctgctcagggcacatgcctcccctccccaggccgcggcccagctgaccctcggggctcccccggcagcggacagggaagggttaaaggcccccggctccctgccc

SEQ ID NO: 104715 - DNA, 120 bp, Artificial Sequence
  ENSG00000095752_1 (sequence is synthesized)
cctgccctggggaacccctggccctgtggggacatgaactgtgtttgccgcctggtcctggtcgtgctgagcctgtggccagatacagctgtcgcccctgggccaccacctggcccccct

SEQ ID NO: 104716 - DNA, 120 bp, Artificial Sequence
  ENSG00000095752_2 (sequence is synthesized)
cgagtttccccagaccctcgggccgagctggacagcaccgtgctcctgacccgctctctcctggcggacacgcggcagctggctgcacagctgagggacaaattcccagctgacggggac

SEQ ID NO: 104717 - DNA, 120 bp, Artificial Sequence
  ENSG00000095752_3 (sequence is synthesized)
cacaacctggattccctgcccaccctggccatgagtgcgggggcactgggagctctacagctcccaggtgtgctgacaaggctgcgagcggacctactgtcctacctgcggcacgtgcag

SEQ ID NO: 104718 - DNA, 120 bp, Artificial Sequence
  ENSG00000095752_4 (sequence is synthesized)
tggctgcgccgggcaggtggctcttccctgaagaccctggagcccgagctgggcaccctgcaggcccgactggaccggctgctgcgccggctgcagctcctgatgtcccgcctggccctg

SEQ ID NO: 104719 - DNA, 120 bp, Artificial Sequence
  ENSG00000095752_5 (sequence is synthesized)
gccggcgcccccgctggcgcccccctcctcagcctgggggggcatcagggccgcccacgccatcctgggggggctgcacctgacacttgactgggccgtgaggggactgctgctgctgaa

SEQ ID NO: 104720 - DNA, 120 bp, Artificial Sequence
  ENSG00000095752_6 (sequence is synthesized)
aggggactgctgctgctgaagactcggctgtgacccggggcccaaagccaccaccgtccttccaaagccagatcttatttatttatttatttcagtactgggggcgaaacagccaggtga

SEQ ID NO: 104721 - DNA, 120 bp, Artificial Sequence
  ENSG00000095752_7 (sequence is synthesized)
tccccccgccattatctccccctagttagagacagtccttccgtgaggcctggggggcatctgtgccttatttatacttatttatttcaggagcaggggtgggaggcaggtggactcctg

SEQ ID NO: 104722 - DNA, 120 bp, Artificial Sequence
  ENSG00000095752_8 (sequence is synthesized)
ggtccccgaggaggaggggactggggtcccggattcttgggtctccaagaagtctgtccacagacttctgccctggctcttccccatctaggcctgggcaggaacatatattatttattt

SEQ ID NO: 104723 - DNA, 120 bp, Artificial Sequence
  ENSG00000095752_9 (sequence is synthesized)
gaattaaatgtgtcatacatatccacttgagggcgatttgtctgagagctggggctggatgcttgggtaactggggcagggcaggtggaggggagacctccattcaggtggaggtcccga

SEQ ID NO: 104724 - DNA, 120 bp, Artificial Sequence
  ENSG00000095752_10 (sequence is synthesized)
gtgggcggggcagcgactgggagatgggtcggtcacccagacagctctgtggaggcagggtctgagccttgcctggggccccgcactgcatagggccttttgtttgttttttgagatgga

SEQ ID NO: 104725 - DNA, 120 bp, Artificial Sequence
  ENSG00000095752_11 (sequence is synthesized)
ttacaggtgtgagccaccacacctgacccataggtcttcaataaatatttaatggaaggttccacaagtcaccctgtgatcaacagtacccgtatgggacaaagctgcaaggtcaagatg

SEQ ID NO: 104726 - DNA, 120 bp, Artificial Sequence
  ENSG00000095752_12 (sequence is synthesized)
ctgcaaggtcaagatggttcattatggctgtgttcaccatagcaaactggaaacaatctagatatccaacagtgagggttaagcaacatggtgcatctgtggatagaacgccacccagcc

SEQ ID NO: 104727 - DNA, 120 bp, Artificial Sequence
  ENSG00000095752_13 (sequence is synthesized)
ggatagaacgccacccagccgcccggagcagggactgtcattcagggaggctaaggagagaggcttgcttgggatatagaaagatatcctgacattggccaggcatggtggctcacgcct

SEQ ID NO: 104728 - DNA, 120 bp, Artificial Sequence
  ENSG00000095752_14 (sequence is synthesized)
ggacgaagcgagtggatcactgaagtccaagagttcgagaccggcctgcgagacatggcaaaaccctgtctcaaaaaagaaagaatgatgtcctgacatgaaacagcaggctacaaaacc

SEQ ID NO: 104729 - DNA, 120 bp, Artificial Sequence
  ENSG00000095752_15 (sequence is synthesized)
actgcatgctgtgatcccaattttgtgtttttctttctatatatggattaaaacaaaaatcctaaagggaaatacgccaaaatgttgacaatgactgtctccaggtcaaaggagagaggt

SEQ ID NO: 104730 - DNA, 120 bp, Artificial Sequence
  ENSG00000095752_16 (sequence is synthesized)
gggattgtgggtgacttttaatgtgtatgattgtctgtattttacagaatttctgccatgactgtgtattttgcatgacacattttaaaaataataaacactatttttagaataacagaa

SEQ ID NO: 104731 - DNA, 120 bp, Artificial Sequence
  ENSG00000095752_17 (sequence is synthesized)
gcccgcctggccctgcgacctgcccgcgggcgttccaccctgggacttaagacctccagctccatcctccctaaggccgggagtccaggccccagaccctcctccccgagacccaggagt

SEQ ID NO: 104732 - DNA, 90 bp, Artificial Sequence
  ENSG00000095752_18 (sequence is synthesized)
gcgagtccagaccccagttcctcctccctcagacccgggagtccaggcccaggccctcctctctcagacccggagtccagcctgagctct

SEQ ID NO: 104733 - DNA, 120 bp, Artificial Sequence
  ENSG00000095777_0 (sequence is synthesized)
agttcttcccctgctcggctgcccctgcccgcccctcgagggagcgcccgtagccagcgcccccgtaaagaaataaggaggcgcccggcttcccgcccaggcccagggccccagtgcagc

SEQ ID NO: 104734 - DNA, 120 bp, Artificial Sequence
  ENSG00000095777_1 (sequence is synthesized)
ctggacacagtattcaaagttttggcgtctgagcattgttatgcgttattttcaagctttgctaacggtttttaaacctttgagatgtttccattaattggaaaaacaatcatctttgat

SEQ ID NO: 104735 - DNA, 120 bp, Artificial Sequence
  ENSG00000095777_2 (sequence is synthesized)
aactttcctgatccttctgatacatgggaaatcactgagacaattggcaaaggaacttatgggaaagtttttaaagtattgaataagaaaaatggccaaaaagcagcagtcaaaattctt

SEQ ID NO: 104736 - DNA, 120 bp, Artificial Sequence
  ENSG00000095777_3 (sequence is synthesized)
gatccaattcacgatattgacgaagagattgaagcagaatataacatcttaaaagcactttctgaccaccctaatgtggtcagattctatgggatatactttaagaaggataaagtaaat

SEQ ID NO: 104737 - DNA, 120 bp, Artificial Sequence
  ENSG00000095777_4 (sequence is synthesized)
ggagacaagctgtggttggttcttgagctctgcagtggaggatcagtgactgaccttgtgaaaggatttctgaagaggggtgaaagaatgagtgagcctctaattgcctatattttacat

SEQ ID NO: 104738 - DNA, 120 bp, Artificial Sequence
  ENSG00000095777_5 (sequence is synthesized)
gaagcactaatgggacttcaacatttgcataacaacaaaactatccacagagatgtgaaaggcaataacattctattgaccacggaaggtggagtgaaactagtagattttggtgtgtct

SEQ ID NO: 104739 - DNA, 120 bp, Artificial Sequence
  ENSG00000095777_6 (sequence is synthesized)
gcacagctcaccagtacccggcaccgtcggaacacatccgtaggaacaccgttttggatggctcctgaggtgattgcatgtgaacagcaattggataccacttatgacgccagatgtgac

SEQ ID NO: 104740 - DNA, 120 bp, Artificial Sequence
  ENSG00000095777_7 (sequence is synthesized)
acttggtccctgggtatcacggccattgagctgggtgatggagatcctccactagctgaccttcatcccatgagagcactcttcaaaataccaaggaatccacccccaaaactaaggcag

SEQ ID NO: 104741 - DNA, 120 bp, Artificial Sequence
  ENSG00000095777_8 (sequence is synthesized)
cctgagctatggtcagcagaattcaatgacttcataagcaagtgcttgactaaagattatgaaaagcgtccaacagtgtcagaacttttacagcataaattcattactcaaattgagggc

SEQ ID NO: 104742 - DNA, 120 bp, Artificial Sequence
  ENSG00000095777_9 (sequence is synthesized)
aaagatgtgatgctacaaaaacaactaacggaattcattggcatccatcaatgcatgggaggcacagaaaaggccagacgtgaacgtattcacacgaagaaagggaacttcaaccgacct

SEQ ID NO: 104743 - DNA, 120 bp, Artificial Sequence
  ENSG00000095777_10 (sequence is synthesized)
ctaatatccaatctgaaggatgtagatgatttagcaaccctagaaattttggatgagaatacagtctcagagcaacttgagaagtgttattccagagatcagatctacgtctatgtggga

SEQ ID NO: 104744 - DNA, 120 bp, Artificial Sequence
  ENSG00000095777_11 (sequence is synthesized)
gacatactcattgctcttaacccttttcagagtctgggtctttactccacaaagcattccaaactatatattggatcaaagagaactgccagtcctcctcacatttttgcaatggctgac

SEQ ID NO: 104745 - DNA, 120 bp, Artificial Sequence
  ENSG00000095777_12 (sequence is synthesized)
ttaggatatcaatctatgataacatataattcagatcagtgcattgttatttctggagaaagtggtgctggaaagactgaaaatgctcatcttttagttcagcagctgacagtgcttgga

SEQ ID NO: 104746 - DNA, 120 bp, Artificial Sequence
  ENSG00000095777_13 (sequence is synthesized)
aaggctaataacagaaccttgcaagagaagattttacaagtgaacaatttggtagaagcctttggcaatgcctgcactattataaatgacaattctagcagatttggaaaatacttagaa

SEQ ID NO: 104747 - DNA, 120 bp, Artificial Sequence
  ENSG00000095777_14 (sequence is synthesized)
atgaaattcacctcttctggagcggtagtgggagcacagatttctgaatatctcctggaaaaatcccgagttatccaccaagctattggagaaaaaaattttcatattttttactacatt

SEQ ID NO: 104748 - DNA, 120 bp, Artificial Sequence
  ENSG00000095777_15 (sequence is synthesized)
tatgctggtttggctgaaaagaagaaactagcccattacaaactgcctgaaaataagcctcccaggtacctacaaaatgaccacctcagaacagtacaagacatcatgaataatagtttc

SEQ ID NO: 104749 - DNA, 120 bp, Artificial Sequence
  ENSG00000095777_16 (sequence is synthesized)
tataaatcccagtatgaattaattgagcaatgtttcaaagtcataggttttacaatggagcaacttggtagtatatacagcatactcgctgcaatcttgaatgttggcaacattgaattt

SEQ ID NO: 104750 - DNA, 120 bp, Artificial Sequence
  ENSG00000095777_17 (sequence is synthesized)
tcttctgtggcaactgaacaccagattgacaagagccacatttctaatcatacagccctggagaactgtgcttctttgctttgcattcgggcagatgagctacaagaagctctcacctcc

SEQ ID NO: 104751 - DNA, 120 bp, Artificial Sequence
  ENSG00000095777_18 (sequence is synthesized)
cactgtgtggtcactagaggagaaacaattatacgacccaatactgtagaaaaagctaccgatgtcagggatgccatggctaaaactttatatggacgtctctttagttggatagtcaat

SEQ ID NO: 104752 - DNA, 120 bp, Artificial Sequence
  ENSG00000095777_19 (sequence is synthesized)
tgcattaacagtttgttgaagcatgactcatcaccaagtgggaatggtgatgagctgagcattggcattcttgatatatttggctttgaaaatttcaaaaaaaattccttcgagcagctg

SEQ ID NO: 104753 - DNA, 120 bp, Artificial Sequence
  ENSG00000095777_20 (sequence is synthesized)
tgcattaacattgcaaatgaacaaattcagtattattataatcaacatgtgtttgcatgggaacagaatgaatacctaaatgaagatgtggatgctagagttattgaatatgaggataac

SEQ ID NO: 104754 - DNA, 120 bp, Artificial Sequence
  ENSG00000095777_21 (sequence is synthesized)
tggcccctcttagatatgtttctgcaaaagccaatgggtttactttccctacttgatgaagaaagtagatttcccaaggccactgaccagactcttgtagaaaaatttgaaggtaacctg

SEQ ID NO: 104755 - DNA, 120 bp, Artificial Sequence
  ENSG00000095777_22 (sequence is synthesized)
aaatcacaatacttctggagacccaaaagaatggaacttagttttggaattcaccattatgcaggaaaggtcctctataatgcaagtggattcttagccaaaaacagagacactcttcct

SEQ ID NO: 104756 - DNA, 120 bp, Artificial Sequence
  ENSG00000095777_23 (sequence is synthesized)
aaatgttataaactatcaaatgaggacttcagaaaaattaatcaacctggcaaagggcgacactggagaagccacacgtcatgccagagagacaaccaacatgaaaacacaaacggttgc

SEQ ID NO: 104757 - DNA, 120 bp, Artificial Sequence
  ENSG00000095777_24 (sequence is synthesized)
atcatattttagatattccctgatggatttgttgtctaaaatggtggtgggccaacctcattttgtccgttgcatcaaaccaaatagtgagcgtcaggcaagaaaatatgacaaagagaa

SEQ ID NO: 104758 - DNA, 120 bp, Artificial Sequence
  ENSG00000095777_25 (sequence is synthesized)
agttctgctacagcttcggtacacaggaattctggaaacagcaagaattcgaagactaggattctcccatcggatactttttgctaactttataaagcggtactaccttctctgctacaa

SEQ ID NO: 104759 - DNA, 120 bp, Artificial Sequence
  ENSG00000095777_26 (sequence is synthesized)
gtcgagcgaggagccccgcatgagccctgacacctgtgccaccattttggaaaaagctggtctcgataactgggctcttggaaaaacaaaagtgttccttaagtattatcacgtggagca

SEQ ID NO: 104760 - DNA, 120 bp, Artificial Sequence
  ENSG00000095777_27 (sequence is synthesized)
gttaaatctaatgcgaaaggaagctattgacaagcttattttgattcaagcttgtgtcagagcattcttgtgttcaagaagataccaaaaaatacaggagaaaaggaaagaaagcgctat

SEQ ID NO: 104761 - DNA, 120 bp, Artificial Sequence
  ENSG00000095777_28 (sequence is synthesized)
aataatacagtcagctgcaagaggacaccttgtcaggaaacaaagaaaagaaattgttgacatgaaaaacacagcagtaacaaccattcaaacttctgatcaggaattcgactacaagaa

SEQ ID NO: 104762 - DNA, 120 bp, Artificial Sequence
  ENSG00000095777_29 (sequence is synthesized)
aaactttgaaaatacaagggaatctttcgtgaagaaacaagcagaaaatgcaatctctgctaatgaaagattcatttcagctccaaataataaaggaagtgtatctgtagtgaagacttc

SEQ ID NO: 104763 - DNA, 120 bp, Artificial Sequence
  ENSG00000095777_30 (sequence is synthesized)
cactttcaaacctgaagaggaaaccaccaatgctgtggagagtaacaacagagtgtatcagactccaaaaaaaatgaataatgtgtatgaggaagaggttaagcaagaattctaccttgt

SEQ ID NO: 104764 - DNA, 120 bp, Artificial Sequence
  ENSG00000095777_31 (sequence is synthesized)
agggccagaagtaagccccaaacagaagtctgtcaaagacctggaagagaacagcaatctaaggaaagtggagaaagaggaagctatgatccagagttactatcagaggtacacagagga

SEQ ID NO: 104765 - DNA, 120 bp, Artificial Sequence
  ENSG00000095777_32 (sequence is synthesized)
gaggaattgtgaagagtcaaaagcagcatatctagaaaggaaggccatatcagaaaggccaagctacccagtgccttggttagctgaaaatgagacttcctttaaaaaaactttggaacc

SEQ ID NO: 104766 - DNA, 120 bp, Artificial Sequence
  ENSG00000095777_33 (sequence is synthesized)
tacacttagccaaaggtcaatttatcaaaatgcaaacagcatggaaaaagaaaagaagacatctgtagttacccagcgtgcaccgatatgcagccaggaggaaggcagaggccgtctgag

SEQ ID NO: 104767 - DNA, 120 bp, Artificial Sequence
  ENSG00000095777_34 (sequence is synthesized)
gcatgagacagtcaaagagaggcaagttgaaccagtgacacaggcccaggaggaagaagataaagcagcggtattcattcagagcaaataccggggttacaagagaaggcagcagttgag

SEQ ID NO: 104768 - DNA, 120 bp, Artificial Sequence
  ENSG00000095777_35 (sequence is synthesized)
gaaggacaagatgtcttcttttaagcatcagaggattgtcacaacaccaacagaagtagcaagaaacactcataatttgtattcctatcccacaaaacatgaggaaatcaataacatcaa

SEQ ID NO: 104769 - DNA, 120 bp, Artificial Sequence
  ENSG00000095777_36 (sequence is synthesized)
gaagaaggataacaaagactcgaaagcaacttcagaaagagaagcatgtggtttggcaattttttcaaaacagatatcaaagttatctgaagaatatttcattctgcagaaaaaattgaa

SEQ ID NO: 104770 - DNA, 120 bp, Artificial Sequence
  ENSG00000095777_37 (sequence is synthesized)
tgaaatgattttgtcacagcaactgaagtcactttatctgggtgtctcgcaccataagccaattaatagacgagtttcttctcagcagtgcctctcaggtgtctgtaaaggagaggagcc

SEQ ID NO: 104771 - DNA, 120 bp, Artificial Sequence
  ENSG00000095777_38 (sequence is synthesized)
aaaaatattgagacccccaagacgaccccggaaacccaaaacattaaataaccctgaagactccacatactattatctacttcataagtcaatccaagaagaaaaacgaagaccaaggaa

SEQ ID NO: 104772 - DNA, 120 bp, Artificial Sequence
  ENSG00000095777_39 (sequence is synthesized)
agacagtcagggaaaattattagatttggaagatttctattataaggaatttttgcccagtcgttctggaccaaaggaacatagccctagtttaagagaacgaagaccacagcaagaact

SEQ ID NO: 104773 - DNA, 120 bp, Artificial Sequence
  ENSG00000095777_40 (sequence is synthesized)
ccagaatcaatgtattaaggctaatgaaaggtgctgggcggcggagagccccgagaaggaggaggagagagagccagcagccaacccctacgacttcaggaggctcctgcgcaaaacctc

SEQ ID NO: 104774 - DNA, 120 bp, Artificial Sequence
  ENSG00000095777_41 (sequence is synthesized)
ccagcgccggcgcctcgtccagcagtcctaaccgttcaacgaggcagtcaccgccgtcggaaggcgctggagcctgcggggcagcaggggccaagcaggcactctggggctggcaccagc

SEQ ID NO: 104775 - DNA, 120 bp, Artificial Sequence
  ENSG00000095777_42 (sequence is synthesized)
aggcactgaagctgcggccctgatctccgcagaggctgcctgctgcgctcggccctcaagtgcccgggccggccttcgtgctccgaaacaagagacctgggagccctcgggaaacctccc

SEQ ID NO: 104776 - DNA, 120 bp, Artificial Sequence
  ENSG00000095777_43 (sequence is synthesized)
ccgacgctctctctcggaactcccgcaccctcctttctcaccagcccgccagttgtggcaaccctgtccttgttcccctaatctatcactttgttctttttttttgtgactcctgtggac

SEQ ID NO: 104777 - DNA, 120 bp, Artificial Sequence
  ENSG00000095777_44 (sequence is synthesized)
tccactgcgcctgggatctcgccaacccctctctcatttggggtgactgaattcacagatttttttttttattggaaacggcttttcttggccaacagaacacttgctagcggttgaatc

SEQ ID NO: 104778 - DNA, 120 bp, Artificial Sequence
  ENSG00000095777_45 (sequence is synthesized)
ttagagaaaaaagcccgggaggggtggggagaatttcgaagatgtatttcatctcaagcttgctctttctcttcctttggttattaaggtcactaaataaaggaagtgccttggaaaacc

SEQ ID NO: 104779 - DNA, 120 bp, Artificial Sequence
  ENSG00000095777_46 (sequence is synthesized)
ttttacctgcagacaaagaagcaagacattcaaagcagcttaattaacctgcttccatcacaactgcatttgtatagagaaatgggcttcccagaaattttagtttgctcccgtttgtag

SEQ ID NO: 104780 - DNA, 120 bp, Artificial Sequence
  ENSG00000095777_47 (sequence is synthesized)
taaatagatcttatgtatagccttgtttatattggtcactgtgtgggaaatacatttttcatgtggaatgcaaagattcgtttcagtttagaagtcaatccaagaagaaaaacgaagacc

SEQ ID NO: 104781 - DNA, 120 bp, Artificial Sequence
  ENSG00000095777_48 (sequence is synthesized)
cttgggatccagcactgtaacatgttggagcttagagatgttctagtctaatctcagagctctgtacagaagaacaccaaatgccagaaagattaagtgatttgcccaagatcacacact

SEQ ID NO: 104782 - DNA, 120 bp, Artificial Sequence
  ENSG00000095777_49 (sequence is synthesized)
gagttagtgaactaaaatcccagatgttcactccctgcccatttgcttttcactgacttacctgcttcccattttaaaagctcaccctgccccttctccaatgtatccttccccttcccc

SEQ ID NO: 104783 - DNA, 120 bp, Artificial Sequence
  ENSG00000095777_50 (sequence is synthesized)
ccactggcagatacacatctgctatgaaagcgttctattcctgaaatactcctgatgtagattaagtgatgtctatgggtgttatttagtatccactgcaataaatgctagcagctagta

SEQ ID NO: 104784 - DNA, 120 bp, Artificial Sequence
  ENSG00000095777_51 (sequence is synthesized)
tgctcttcatggagacgttcagatatattccaacaagttgggagcagaagatcctggaatattattctgcttcttctgagacattgtatttgttcagtagttgcatttccctggtctaag

SEQ ID NO: 104785 - DNA, 120 bp, Artificial Sequence
  ENSG00000095777_52 (sequence is synthesized)
taaaagagctttctcttgataatcagtgtgtctttctctcttttgctaggatttgatttcagaaaatagcagttcctcccaccctttatccattccccaatgagtcagtgaggcatcaga

SEQ ID NO: 104786 - DNA, 120 bp, Artificial Sequence
  ENSG00000095777_53 (sequence is synthesized)
gtccatagcctgtgcaagtgttttgctttgctttacctaccaatctagtaattttttactacttgctaagatttccctttgttcagaactttaaaataatattattaagaaaattatata

SEQ ID NO: 104787 - DNA, 120 bp, Artificial Sequence
  ENSG00000095777_54 (sequence is synthesized)
cctcttttggtgccatgaaagcacttgactatttatgtggccccccactccttcatgtgtgtttcaacagattttcccctactatcctataaactaatttctttaaacactattttctat

SEQ ID NO: 104788 - DNA, 120 bp, Artificial Sequence
  ENSG00000095777_55 (sequence is synthesized)
gagtggtggttagtcccttgatgtttcagataactaatgtgaaaagactgcctatatttattaaaggtgttatttttaaatatctttttaaggattttgccttaattataatgcagtgca

SEQ ID NO: 104789 - DNA, 120 bp, Artificial Sequence
  ENSG00000095777_56 (sequence is synthesized)
cagccagagcctgtggtgacagggttccaaaacattagaatatttggcatctaactaaattattataagactaaaacatttgaattcatttttaattttgcctttgaatttcttgtccta

SEQ ID NO: 104790 - DNA, 120 bp, Artificial Sequence
  ENSG00000095777_57 (sequence is synthesized)
tctagatgttccaaattataataccttggctatatatcatcctttacatactgcttattttgttaagtggagaaacaacattatggaaaagaatggaaaacctctatactaaatccaaga

SEQ ID NO: 104791 - DNA, 120 bp, Artificial Sequence
  ENSG00000095777_58 (sequence is synthesized)
catttcattaattttgaagaaagcaggaaaaaaatctgtagtttctaattcctattgtcattcagtatgtaaggtgaagttctgtactgccttagctgttttaactgtggattaaaccat

SEQ ID NO: 104792 - DNA, 120 bp, Artificial Sequence
  ENSG00000095777_59 (sequence is synthesized)
catatttagtctgatgttattactcttgatgataatgccacatgaaggaaggatgacactgttgatagatattgtacctaggtaacaggcaatgtgcaaagtaattctagaaactgcatc

SEQ ID NO: 104793 - DNA, 120 bp, Artificial Sequence
  ENSG00000095777_60 (sequence is synthesized)
atcttagttatttcttaattatgtctaccagcagtggaattccaagaatactgactatggtaatatggagaaaaagggaatctgaaaagctacccagttctgagtgttctgaaataatcc

SEQ ID NO: 104794 - DNA, 120 bp, Artificial Sequence
  ENSG00000095777_61 (sequence is synthesized)
aaactttgttattcaaagcaagccaataaatctcataaaaggaaattttcaggaggacaagaaacaaaacaacatttctggagaaaagaattacttcttttaatgtgcaaattagcaatc

SEQ ID NO: 104795 - DNA, 120 bp, Artificial Sequence
  ENSG00000095777_62 (sequence is synthesized)
ttcaaattgtcctaaggattgtgaaatgagcttagtcctgatctggggtagatgagtagctgcacttttctttaatgagcctgtacaaactgtacattaatttcattataagctatttaa

SEQ ID NO: 104796 - DNA, 120 bp, Artificial Sequence
  ENSG00000095777_63 (sequence is synthesized)
ggagtaatgcagaactgaagacaaagtatttccatttcactaatgaaaacaaagagctgttagaattaacataaagcagcacttcagcaaattcaactatcatggttgatcaatgttgct

SEQ ID NO: 104797 - DNA, 120 bp, Artificial Sequence
  ENSG00000095777_64 (sequence is synthesized)
tgattacagagttagatcagcctcattttcaaatgatgttcctttgtattcaacgaatgtgccaaaaaatatatttgttcagcttaaactgaaaggaattaataaaattgttaaagttgt

SEQ ID NO: 104798 - DNA, 120 bp, Artificial Sequence
  ENSG00000095777_65 (sequence is synthesized)
caaaggtgaaaacacaatgctcaaatttatacagactggactgggtttccatcagtttggaatttggtctactccgaagttgttctgaggatgcctaaaggatttctccgcatcaagtct

SEQ ID NO: 104799 - DNA, 120 bp, Artificial Sequence
  ENSG00000095787_0 (sequence is synthesized)
cgtcgtcttgcccccctccccccggttcgcggtgccgccgtgtagttggcgccgctgccccggctgagagtgagcgtggtgtcgacggagggagatggcccgggagcgccggcgccagta

SEQ ID NO: 104800 - DNA, 120 bp, Artificial Sequence
  ENSG00000095787_1 (sequence is synthesized)
aggtgccggggctgcccgccgcccgccgccgccgccgcctgcgcgcccgcccgcctttcgcggccgctctcccccctccccgacacacactcacaggccgggcattgatggtaatgtatg

SEQ ID NO: 104801 - DNA, 120 bp, Artificial Sequence
  ENSG00000095787_2 (sequence is synthesized)
cgacacacactcacaggccgggcattgatggtaatgtatgcgaggaaacagcagagactcagtgatggctgtcacgaccggaggggggactcgcagccttaccaggcacttaagtattca

SEQ ID NO: 104802 - DNA, 120 bp, Artificial Sequence
  ENSG00000095787_3 (sequence is synthesized)
tcgaagagtcaccccagtagcggtgatcacagacatgaaaagatgcgagacgccggagatccttcaccaccaaataaaatgttgcggagatctgatagtcctgaaaacaaatacagtgac

SEQ ID NO: 104803 - DNA, 120 bp, Artificial Sequence
  ENSG00000095787_4 (sequence is synthesized)
agcacaggtcacagtaaggccaaaaatgtgcatactcacagagttagagagagggatggtgggaccagttactctccacaagaaaattcacacaaccacagtgctcttcatagttcaaat

SEQ ID NO: 104804 - DNA, 120 bp, Artificial Sequence
  ENSG00000095787_5 (sequence is synthesized)
tcacattcttctaatccaagcaataacccaagcaaaacttcagatgcaccttatgattctgcagatgactggtctgagcatattagctcttctgggaaaaagtactactacaattgtcga

SEQ ID NO: 104805 - DNA, 120 bp, Artificial Sequence
  ENSG00000095787_6 (sequence is synthesized)
acagaagtttcacaatgggaaaaaccaaaagagtggcttgaaagagaacagagacaaaaagaagcaaacaagatggcagtcaacagcttcccaaaagatagggattacagaagagaggtg

SEQ ID NO: 104806 - DNA, 120 bp, Artificial Sequence
  ENSG00000095787_7 (sequence is synthesized)
atgcaagcaacagccactagtgggtttgccagtggaaaatctacatcaggagacaaacccgtatcacattcttgcacaactccttccacgtcttctgcctctggactgaaccccacatct

SEQ ID NO: 104807 - DNA, 120 bp, Artificial Sequence
  ENSG00000095787_8 (sequence is synthesized)
gcacctccaacatctgcttcagcggtccctgtttctcctgttccacagtcgccaatacctcccttacttcaggacccaaatcttcttagacaattgcttcctgctttgcaagccacgctg

SEQ ID NO: 104808 - DNA, 120 bp, Artificial Sequence
  ENSG00000095787_9 (sequence is synthesized)
cagcttaataattctaatgtggacatatctaaaataaatgaagttcttacagcagctgtgacacaagcctcactgcagtctataattcataagtttcttactgctggaccatctgctttc

SEQ ID NO: 104809 - DNA, 120 bp, Artificial Sequence
  ENSG00000095787_10 (sequence is synthesized)
aacataacgtctctgatttctcaagctgctcagctctctacacaagcccagccatctaatcagtctccgatgtctttaacatctgatgcgtcatccccaagatcatatgtttctccaaga

SEQ ID NO: 104810 - DNA, 120 bp, Artificial Sequence
  ENSG00000095787_11 (sequence is synthesized)
gtactccagtagttaagcaaggaccagtgtcacagtcagccacacagcagcctgtaactgctgacaagcagcaaggtcatgaacctgtctctcctcgaagtcttcagcgctcaagtagcc

SEQ ID NO: 104811 - DNA, 120 bp, Artificial Sequence
  ENSG00000095787_12 (sequence is synthesized)
agagaagtccatcacctggtcccaatcatacttctaatagtagtaatgcatcaaatgcaacagttgtaccacagaattcttctgcccgatccacgtgttcattaacgcctgcactagcag

SEQ ID NO: 104812 - DNA, 120 bp, Artificial Sequence
  ENSG00000095787_13 (sequence is synthesized)
cacacttcagtgaaaatctcataaaacacgttcaaggatggcctgcagatcatgcagagaagcaggcatcaagattacgcgaagaagcgcataacatgggaactattcacatgtccgaaa

SEQ ID NO: 104813 - DNA, 120 bp, Artificial Sequence
  ENSG00000095787_14 (sequence is synthesized)
tttgtactgaattaaaaaatttaagatctttagtccgagtatgtgaaattcaagcaactttgcgagagcaaaggatactatttttgagacaacaaattaaggaacttgaaaagctaaaaa

SEQ ID NO: 104814 - DNA, 120 bp, Artificial Sequence
  ENSG00000095787_15 (sequence is synthesized)
atcagaattccttcatggtgtgaagatgtgaataattgcacatggttttgagaacaggaactgtaaatctgttgcccaatcttaacatttttgagctgcatttaagtagactttggaccg

SEQ ID NO: 104815 - DNA, 120 bp, Artificial Sequence
  ENSG00000095787_16 (sequence is synthesized)
ttaagctgggcaaaggaaatgacaaggggacggggtctgtgagagtcaattcaggggaaagatacaagattgatttgtaaaacccttgaaatgtagatttcttgtagatgtatccttcac

SEQ ID NO: 104816 - DNA, 120 bp, Artificial Sequence
  ENSG00000095787_17 (sequence is synthesized)
gttgtaaatatgttttgtagagtgaagccatgggaagccatgtgtaacagagcttagacatccaaaactaatcaatgctgaggtggctaaatacctagccttttacatgtaaacctgtct

SEQ ID NO: 104817 - DNA, 120 bp, Artificial Sequence
  ENSG00000095787_18 (sequence is synthesized)
gcaaaattagcttttttaaaaaaaaaaaaaaaaaaattgggggggttaatttatcattcagaaatcttgcattttcaaaaattcagtgcaagcgccaggcgatttgtgtctaaggatacg

SEQ ID NO: 104818 - DNA, 120 bp, Artificial Sequence
  ENSG00000095787_19 (sequence is synthesized)
attttgaaccatatgggcagtgtacaaaatatgaaacaactgtttccacacttgcacctgatcaagagcagtgcttctccatttgttttgcagagaaatgtttttcatttcccgtgtgtt

SEQ ID NO: 104819 - DNA, 120 bp, Artificial Sequence
  ENSG00000095787_20 (sequence is synthesized)
tccatttccttctgaaattctgattttatccatttttttaaggctcctctttatctcctttcttaaggcactgttgctatggcacttttctataaccttttcattcctgtgtacagtagc

SEQ ID NO: 104820 - DNA, 120 bp, Artificial Sequence
  ENSG00000095787_21 (sequence is synthesized)
ttaaaattgcagtgattgagcataacctacttgtttgtataaattattgaaatccatttgcaccctgttaagaatggacttaaaagtactgctggacaggcatgtgtgctcaaagtacat

SEQ ID NO: 104821 - DNA, 120 bp, Artificial Sequence
  ENSG00000095787_22 (sequence is synthesized)
tgattgctcaaatataaggaaatggcccaatgaacgtggttgtgggaggggaaagaggaaacagagctagtcagatgtgaattgtatctgttgtaataaacatgttaaaacaaacaaaaa

SEQ ID NO: 104822 - DNA, 120 bp, Artificial Sequence
  ENSG00000095787_23 (sequence is synthesized)
cgggcgggcgggaacgcagtgtggcggggagcgggggcccggcttcgcggcatttcgccctctccggcccttccggaggctccgggtttgtgccgtgtgcgtgcggggctcggcgctggg

SEQ ID NO: 104823 - DNA, 120 bp, Artificial Sequence
  ENSG00000095787_24 (sequence is synthesized)
tggggcgctcggtaggtctcccgcggggaggggcggcgggggccccgttttcttcctccccggccccccacccgcgccgtgtcttatgtcgctgccttctcttcctgtttttcagctgtc

SEQ ID NO: 104824 - DNA, 120 bp, Artificial Sequence
  ENSG00000095787_25 (sequence is synthesized)
tttttctaaattgacaattctacatatttatggggtacatagtgatgtttcgatacatacagtatatttttataatgttcaaaagagtaatttgcatatcatctcatttatttgtgttgg

SEQ ID NO: 104825 - DNA, 120 bp, Artificial Sequence
  ENSG00000095787_26 (sequence is synthesized)
gaacactcaaaatcctcttttctagctatttgacaaaatataatcaatgttatttcagtaagctcctttgaaaaaataaggaattcaaccaggatagttgagattctaccagatttcctg

SEQ ID NO: 104826 - DNA, 120 bp, Artificial Sequence
  ENSG00000095787_27 (sequence is synthesized)
ggggcaattagatacttaactaatctttgtgagattcgtttcgtggaaactagacctttcagatctttctaatttcattatgttacgttgtctataaaactacctggaagagactgtacc

SEQ ID NO: 104827 - DNA, 120 bp, Artificial Sequence
  ENSG00000095787_28 (sequence is synthesized)
tgagaatttttgaaagaccatttttagttatgggaaaaagagtgatactgctaatcctgtatattacatgagaacaagattctggtttatgtgtacttgatccatcttgttgattttgaa

SEQ ID NO: 104828 - DNA, 120 bp, Artificial Sequence
  ENSG00000095787_29 (sequence is synthesized)
ggtgaaacaaacttacagcttttaattagctttctgtttatgtttacatattttggttccttttctcactgagtaacagttaatacaggcaagattgttctcttttataccatatataat

SEQ ID NO: 104829 - DNA, 120 bp, Artificial Sequence
  ENSG00000095787_30 (sequence is synthesized)
tagtattgtgccttagaatttagaactgatgatttcatgccatcatctagtcgagagtgcattccccacccccatgttactggatttcaacaattaaaattgtggtgggagattttgtca

SEQ ID NO: 104830 - DNA, 120 bp, Artificial Sequence
  ENSG00000095787_31 (sequence is synthesized)
tgctttctaaaatcaaggtgatgttaatttcacagttttctttctgtgcctaacaatctaatttttattctgcttaattttgatattttataaagttctgttgtctttgaagattttcat

SEQ ID NO: 104831 - DNA, 120 bp, Artificial Sequence
  ENSG00000095787_32 (sequence is synthesized)
aaactaaggtcttataaatacttacacagataattgcattctagttcagagtacctttatctcataagtgttttcctgtatgtgtgctttgatgttgttgatatttcatgtgattaaata

SEQ ID NO: 104832 - DNA, 120 bp, Artificial Sequence
  ENSG00000095787_33 (sequence is synthesized)
attcgtatttatttttcaaatctgtatccattgccatctacatatgtaaattaaaataaatagaaacatacggagattcttttatgttggatttattataccctccaccattttggtccc

SEQ ID NO: 104833 - DNA, 120 bp, Artificial Sequence
  ENSG00000095787_34 (sequence is synthesized)
tgaaaagggaaaagatacacggtcgagtagtacaggtatgtgtttcccactacacattatggctataatggagttgaattgcaaacagtaaaattttgttttggattggtttcccctgat

SEQ ID NO: 104834 - DNA, 120 bp, Artificial Sequence
  ENSG00000095787_35 (sequence is synthesized)
ccccccagacaggagcttcctctcccaccctacctgcctgcccttaagttgtgtcctattaaactggacacaaatctcaccggcttttagtctaataattgaatcatagctacacacagt

SEQ ID NO: 104835 - DNA, 120 bp, Artificial Sequence
  ENSG00000095787_36 (sequence is synthesized)
gacaccagaatagctacttgtttttttatgttaccagtgagtaacttgtttatccttgtatgtagaaactaatttcaccatgatcacagatctgtgtaacatctctagtttgaatttcca

SEQ ID NO: 104836 - DNA, 120 bp, Artificial Sequence
  ENSG00000095787_37 (sequence is synthesized)
cacaattttaaaatgtctactagaaaacttacacctttttgttccaaggtgctcttcatctataaaaccgtgggcatacttcagtgttcttctgaggccaaattttgtgctcgtgggaca

SEQ ID NO: 104837 - DNA, 120 bp, Artificial Sequence
  ENSG00000095787_38 (sequence is synthesized)
attttgtataacatacatttattttgtaattcattctccaaatttgaagctttattaaaggtattctatttccactggcttcccttaacttgaataaaatttactcccagtgccgtggct

SEQ ID NO: 104838 - DNA, 120 bp, Artificial Sequence
  ENSG00000095787_39 (sequence is synthesized)
ccagccctttgggaggccgaggcaggaggatggcttgaggccaagagtttgagaccggcctgtgcaacatggcgagacccagtgtccacagaattaaaaattaaccacgcagctgtaatc

SEQ ID NO: 104839 - DNA, 88 bp, Artificial Sequence
  ENSG00000095787_40 (sequence is synthesized)
ccacgcagagaagatgacttgagccctggcatttggctatgatcttgccactgcactctagcctggcaacagagtcagactctgtctc

SEQ ID NO: 104840 - DNA, 120 bp, Artificial Sequence
  ENSG00000095787_41 (sequence is synthesized)
tctcccccctccccgacacacactcacaggccgggcattgatggtaatgtatgcgaggaaacagcagagactcagtgatggctgtcacgaccggaggggggactcgcagccttaccaggt

SEQ ID NO: 104841 - DNA, 120 bp, Artificial Sequence
  ENSG00000095787_42 (sequence is synthesized)
gactggagggagttcgctgatttaggaaaaaagaatcatttgcagccagaaagacctgactcgattatttgattatttgcgagtgaaggaatcgatgggatgagatgataggcacttaag

SEQ ID NO: 104842 - DNA, 120 bp, Artificial Sequence
  ENSG00000095787_43 (sequence is synthesized)
aagcaacagccactagtgggtttgccagtggaatggaagacaagcattccagtgatgccagtagtttgctcccacagaatattttgtctcaaacaagcagacacaatgacagagactaca

SEQ ID NO: 104843 - DNA, 120 bp, Artificial Sequence
  ENSG00000095787_44 (sequence is synthesized)
gactgccaagagcagagactcacagtagttctacgccagtacagcaccccatcaaaccagtggttcatccaactgctaccccaagcactgttccttctagtccatttacgctacagtctg

SEQ ID NO: 104844 - DNA, 120 bp, Artificial Sequence
  ENSG00000095787_45 (sequence is synthesized)
atcaccagccaaagaaatcatttgatgctaatggagcatctactttatcaaaactgcctacacccacatcttctgtccctgcacagaaaacagaaagaaaagaatctacatcaggagaca

SEQ ID NO: 104845 - DNA, 120 bp, Artificial Sequence
  ENSG00000095787_46 (sequence is synthesized)
aagcagctgtgacacaagcctcactgcagtctataattcataagtttcttactgctggaccatctgctttcaacataacgtctctgatttctcaagctgctcagctctctacacaaggta

SEQ ID NO: 104846 - DNA, 120 bp, Artificial Sequence
  ENSG00000095787_47 (sequence is synthesized)
ctctctacacaaggtattcttactcatcttagatatctctagaatggcatcttgattttgttttggaattaatagcccttttttgtatttagttttttctttcatttttttttttagttt

SEQ ID NO: 104847 - DNA, 120 bp, Artificial Sequence
  ENSG00000095787_48 (sequence is synthesized)
caataattttgttttttttgtaacactggcatatacagtagtatttttatttcctttctttttagatgaagcaagctttgacatttgtcttaaggtattgccatcaaatctgtaattatt

SEQ ID NO: 104848 - DNA, 120 bp, Artificial Sequence
  ENSG00000095787_49 (sequence is synthesized)
taagacagtatttaattcagactttgttattaatgagtttttttatgccaaagctgaaagtaaactatgatgtgccatatatctttgtgaaacattgcatgtatttgaagagttgaagtt

SEQ ID NO: 104849 - DNA, 120 bp, Artificial Sequence
  ENSG00000095787_50 (sequence is synthesized)
tggttcagattgacgttagatgttttttgactggataatatggaaatgctcattttctgccttgaattagatatccctcttcatgaaggtatccaaatggagagagatacacataggagc

SEQ ID NO: 104850 - DNA, 120 bp, Artificial Sequence
  ENSG00000095787_51 (sequence is synthesized)
aaatgggaagtgaaagggtcactttgtcagaaagctgataaacagcaggaatgccttgtctggaatggaagtataatggtgcaaagactcttgcaaccctctggctagcctcatgagcag

SEQ ID NO: 104851 - DNA, 120 bp, Artificial Sequence
  ENSG00000095787_52 (sequence is synthesized)
gagactgcgtgggatacctgggcctaaatgtagaataagaaagaagaaataaggatggtgaggaggccttccatgtgagattaggttcaggcctagcttcctgttccagccacataaagg

SEQ ID NO: 104852 - DNA, 120 bp, Artificial Sequence
  ENSG00000095787_53 (sequence is synthesized)
agagtgggccacactgggtgtgcttacctctgaacacacagctcacttagtcagtgtggcccagtgagaaggtcagattctgatttattccaataagtgttctctgggtaatatgggggt

SEQ ID NO: 104853 - DNA, 120 bp, Artificial Sequence
  ENSG00000095787_54 (sequence is synthesized)
gggggggtttagagtaatacaaatatctttgccacatatattacaaaggactttagttttttgttttgttttgtttttctttaaaattaattgcttccctcttttacagcccagccatct

SEQ ID NO: 104854 - DNA, 120 bp, Artificial Sequence
  ENSG00000095787_55 (sequence is synthesized)
tatatctgtaaaatagaacttaacctttaaactccatgaataccctaaagtaggcttacatgttgtaaaatttacaaagacaaacctgtatacaagaggtaggttattgtctctagtagt

SEQ ID NO: 104855 - DNA, 120 bp, Artificial Sequence
  ENSG00000095787_56 (sequence is synthesized)
gaagcccgggttattttgaagaaagtggctctttaaaattttacacagtggaatatgacggggctaaagatttgtgatacttgtaccagaaaggcacacgattttacaatatttgttgga

SEQ ID NO: 104856 - DNA, 120 bp, Artificial Sequence
  ENSG00000095787_57 (sequence is synthesized)
attaccttactttttaacctcctcatagcagttttggtttgagtatattgatgaaagccaaagtctggtatctaaaacttgggccaatgtttcccaactggtatatgtcaggctttccca

SEQ ID NO: 104857 - DNA, 120 bp, Artificial Sequence
  ENSG00000095787_58 (sequence is synthesized)
atagcttaactgtgaccctatacggatggctttttagatagttctatactgctgtattgtgttagcacttttctttgttcattaacaacacaactttaaatgacatttgttgaatgaatg

SEQ ID NO: 104858 - DNA, 120 bp, Artificial Sequence
  ENSG00000095787_59 (sequence is synthesized)
gttttcatttgattgattttcctgttttttatttcatgctatgaggtagcaaaataattcaactgttgtttttattgttgttttctaaacaagcatttcagaacttacacctccaaatga

SEQ ID NO: 104859 - DNA, 120 bp, Artificial Sequence
  ENSG00000095787_60 (sequence is synthesized)
gagttgttcccttcaaaataatgaccttgggaagctgtctacttactccagcaatgttgccattgctctgaacatttttgggaaattcttcttttaaattgtttttagaggctgcagtat

SEQ ID NO: 104860 - DNA, 120 bp, Artificial Sequence
  ENSG00000095787_61 (sequence is synthesized)
tattttaaatatcctcagtgatgaaaactcttcatcctttgggagatttagtttttggaaataactgaaattcattcagagccaagtctggtgaagcaggtaggagatcaacttgggtga

SEQ ID NO: 104861 - DNA, 120 bp, Artificial Sequence
  ENSG00000095787_62 (sequence is synthesized)
ttaaattttttggttctcaccaccatatccccaaccctggcccaaaccattcagttttaaaagaagataaagaatctcagagtgttatttttttggttttgttttgccactgtgcttgtt

SEQ ID NO: 104862 - DNA, 120 bp, Artificial Sequence
  ENSG00000095787_63 (sequence is synthesized)
cagtgctatccaataaaatgtctgtattttgcttcacattatttcaccctctgattcagcagttctgacgttgaacaaaggcaatatatattttccccttatctagatgtgtatgagcag

SEQ ID NO: 104863 - DNA, 120 bp, Artificial Sequence
  ENSG00000095787_64 (sequence is synthesized)
tcttcagatgtgcatctacagctgttaaaatgtgactttttttagttatattattagtgtttgtggtacacaaagttaacaggttctgctctcagatttggagagtagtttacatttgac

SEQ ID NO: 104864 - DNA, 120 bp, Artificial Sequence
  ENSG00000095787_65 (sequence is synthesized)
tctgacagtagtgttaaaagggttttttccccctaaagtgttttgaggaatcatatactttggattattaattctctttatttgacattaaaataacaaatttttcttaggaatttggat

SEQ ID NO: 104865 - DNA, 120 bp, Artificial Sequence
  ENSG00000095787_66 (sequence is synthesized)
ccgccgccgcctgcgcgcccgcccgcctttcgcggccgctctcccccctccccgacacacactcacaggccgggcattgatgctgtcacgaccggaggggggactcgcagccttaccagg

SEQ ID NO: 104866 - DNA, 120 bp, Artificial Sequence
  ENSG00000095787_67 (sequence is synthesized)
attctcagccaaatttttttattttttgcagaatcagtgtgcaaggtggtttataagataatggagtgggttttttttgtgtttagtgtgatttgttatcaggagtcttattgtaacgct

SEQ ID NO: 104867 - DNA, 120 bp, Artificial Sequence
  ENSG00000095787_68 (sequence is synthesized)
taagcattaggttttttgtctgagaaactttaaagagtaaagcagaattgaaagtggaaattttaattttgtaagttcataaaatttaatgataatacaccaaagtttatgtttaaatta

SEQ ID NO: 104868 - DNA, 120 bp, Artificial Sequence
  ENSG00000095787_69 (sequence is synthesized)
gcggcgtccggtgaggggcagcggcccgggctcggttccggcttccagcagcggcccgaaggcgccggagcacgctccccgctccccagaacgcagcttccgcggctgcagcccaggcag

SEQ ID NO: 104869 - DNA, 120 bp, Artificial Sequence
  ENSG00000095787_70 (sequence is synthesized)
ccaggcagctcttcgggaagcgtccgcccgtggtctcgccagggggtttccgacctccccgcccgacagcgcaggggcgggggccgcggccggagagctcgcccgagagcaccccctccc

SEQ ID NO: 104870 - DNA, 120 bp, Artificial Sequence
  ENSG00000095787_71 (sequence is synthesized)
gctgcgcctctgggcgcacgcgcagccgctgcagcctcccttatttagtccgcgatggcttccctcgcgccccaccgtcctcttccggaaggcggctccctccctgcgcagcccggagcc

SEQ ID NO: 104871 - DNA, 120 bp, Artificial Sequence
  ENSG00000095787_72 (sequence is synthesized)
cctgagatcagcctcgagcaggcgcccgagcgagactatccctaaacgggaacggcggtggccgactcgcgagtgaggaaaagaaggaaagggcagactggtcgcgaagagaagatccag

SEQ ID NO: 104872 - DNA, 120 bp, Artificial Sequence
  ENSG00000095787_73 (sequence is synthesized)
ctggggattctttatcagaactgttcttgttgaatatttatacttaattgaaataattccttaagggaggttttgtttaaaacgtattaacaggaaattgtgtatgagatatttaatgaa

SEQ ID NO: 104873 - DNA, 120 bp, Artificial Sequence
  ENSG00000095787_74 (sequence is synthesized)
ataagaaattcaacaagaatgattaagtcacttcccaagtggttgtcatttgttaaaccctggtttacctgtcttgctattatgacatttcatttggaaggatgtttgtgttgtagctaa

SEQ ID NO: 104874 - DNA, 120 bp, Artificial Sequence
  ENSG00000095787_75 (sequence is synthesized)
ctgttcaagtctggtgctgactgctgttcttagccatcacaaaacgctaaatttgtgtaattggagcttcctgctgttatctggaaatagcaggaaagcgcagctttgtatattgtttcc

SEQ ID NO: 104875 - DNA, 120 bp, Artificial Sequence
  ENSG00000095787_76 (sequence is synthesized)
taaagtatattaaaataaaaaaagaaactattgctactataaaattaccttgactttttttttcctttgctgaaatattagtcacatagccttagcttcacactgccagtaatgtatcaa

SEQ ID NO: 104876 - DNA, 120 bp, Artificial Sequence
  ENSG00000095787_77 (sequence is synthesized)
atcacaagggtttccgcatgaaaaaaatcttttcttcccccacaaaaaaacctttaccatcaaaatcttgccatctgatttagaaaggtgtttcttcttcttcttcttttttttctttaa

SEQ ID NO: 104877 - DNA, 120 bp, Artificial Sequence
  ENSG00000095787_78 (sequence is synthesized)
ttggtgattttttttttttttttttttctgttggggcagataagtgcttccaaaactggcagcaccaagggcttattttttatgttagacatcaatgtcaatgttactacattctcggat

SEQ ID NO: 104878 - DNA, 120 bp, Artificial Sequence
  ENSG00000095787_79 (sequence is synthesized)
tactacattctcggatgctaacataaattttgaaattgctcttgtgctttaagcatatattgaaagtatggaagttaaatgttcaggcttttcagtaagctcaaaaagttaactgtaagc

SEQ ID NO: 104879 - DNA, 120 bp, Artificial Sequence
  ENSG00000095787_80 (sequence is synthesized)
gatagtgttggtgttttctaaaatacaaaaatgttccagtgtaattaaaaggaattaaaatcttgaagatattttcctgtaatttaaggatactttttaaatgtaagaaaagacatgtca

SEQ ID NO: 104880 - DNA, 120 bp, Artificial Sequence
  ENSG00000095787_81 (sequence is synthesized)
ttaatttattgtcatgtttatacctctgtgagattgttaacatctgctgaatttaactagtgcatgtaaatgaaaccccaaagagctgtgtgttcagctagaaaccttactgtatctttc

SEQ ID NO: 104881 - DNA, 120 bp, Artificial Sequence
  ENSG00000095787_82 (sequence is synthesized)
ctggaaagaagtgagcaatttgttgtaataggcaaatgtttcctgatcagatggcaatttgtgatttaggtaaatttgaatttgatttgcttatagtctactggtctgtgtacctatgtt

SEQ ID NO: 104882 - DNA, 120 bp, Artificial Sequence
  ENSG00000095787_83 (sequence is synthesized)
tgttttgtttttcaaaaaagtttacatccctaaatgaattagtcacatatatttaggagaagatgcctaatttggtatttcttaatagtgaatttttttttttcttgagacagagtttca

SEQ ID NO: 104883 - DNA, 120 bp, Artificial Sequence
  ENSG00000095787_84 (sequence is synthesized)
aggcgtgagccaccgctcctggccagtagtgaatttttaaacacagaaaatctaaaattttgtggaaatattttaaatattgcaccttaatacaaggtatccagctcctaaccttaacta

SEQ ID NO: 104884 - DNA, 120 bp, Artificial Sequence
  ENSG00000095787_85 (sequence is synthesized)
gggaatatctattaaaataagcataatgttctggactagagtattccttatctagttggttatggatttgaacatgtaccttggtttagatactttgaaaatagaagtactgaatagcct

SEQ ID NO: 104885 - DNA, 120 bp, Artificial Sequence
  ENSG00000095787_86 (sequence is synthesized)
ccctgcccccccccccccccccccgttttaaaagatcagtagtctctattcaaacttttaaaatgtcgtggtattgtaacaatatatttgatgaaagaaggttacagactcccctgaaga

SEQ ID NO: 104886 - DNA, 120 bp, Artificial Sequence
  ENSG00000095787_87 (sequence is synthesized)
gaaagaaggttacagactcccctgaagaaccagctttcctacgctttttatttttctaacttgtctaacctgattttaaaatgactgcaattccagactaaaaacatgcttcagccctgt

SEQ ID NO: 104887 - DNA, 120 bp, Artificial Sequence
  ENSG00000095787_88 (sequence is synthesized)
ttcaagacattatgcttcttttaacagtccaaattagtagttttatttttcttctaaatctttgtttcacacttgtaaaatcttgggaaggaggttcttaaaactttgccaggaattgtt

SEQ ID NO: 104888 - DNA, 120 bp, Artificial Sequence
  ENSG00000095787_89 (sequence is synthesized)
acccatttccaaaaacagtttattatgttcaaaaaccaccatatctttgagggactgtttgaaaggggagagggcaacgcgggaaataattcactctgcgcaccggaactattgtagttc

SEQ ID NO: 104889 - DNA, 120 bp, Artificial Sequence
  ENSG00000095787_90 (sequence is synthesized)
aggacttccagctactgtatttagatgttgggtttgaatatacagatttcttttcaatacctgtaaatatggctatattcttgtatttgtacgggagtgtacaaaatgacactgaaaagt

SEQ ID NO: 104890 - DNA, 120 bp, Artificial Sequence
  ENSG00000095787_91 (sequence is synthesized)
aataaatatgttttgactatattgtgcagttatttcagaactgtgttttgaaagtcttagaatgcataatttgcatttgagtaaggaaatttaaaatacagattactgctgagattttaa

SEQ ID NO: 104891 - DNA, 120 bp, Artificial Sequence
  ENSG00000095787_92 (sequence is synthesized)
gcaaagttatgtaagtagtaaaatccccagtttaggaatggtctttgttttcttttgaaatttatagttgaacacttttttttgttttgttttttgtttttggagtttggaaatttatat

SEQ ID NO: 104892 - DNA, 120 bp, Artificial Sequence
  ENSG00000095787_93 (sequence is synthesized)
tactcacagagttagagagagggatggtggtgagtatctttcttgttgaaactttgacatacagttttaacaatagctctatataaaaggcggcagtagtatttctagcttgaagaagtt

SEQ ID NO: 104893 - DNA, 120 bp, Artificial Sequence
  ENSG00000095787_94 (sequence is synthesized)
actgttcagttatgtcattaaaatattttaatcctatcattttttttttactctgaacaagttactgtagaaacaagatgctgatgtgagcatctaaaaagtggactcttaaggccaggc

SEQ ID NO: 104894 - DNA, 120 bp, Artificial Sequence
  ENSG00000095787_95 (sequence is synthesized)
gagttgcccggatgtagttggtggagcggcagcggcggcaccagcggcggcggcggcggcgggaggaggaggaggagaagaaggaccaggcggcggcagcagcggcggcggcggggggag

SEQ ID NO: 104895 - DNA, 120 bp, Artificial Sequence
  ENSG00000095787_96 (sequence is synthesized)
atatatttttatgtttctcaggattatgattcttaaatcgaactaaagaatgtaaatcacattttatttatgaaatgtaaagttctcttcgatacattgatcacattctatcactgcatt

SEQ ID NO: 104896 - DNA, 120 bp, Artificial Sequence
  ENSG00000095787_97 (sequence is synthesized)
ttcataagttaatatttctcgtgaaggataaagcctgtcgattttctcttaacccatgatgaatgcttcattagacttttctcataactccataagctgcaataatatattactgaaaaa

SEQ ID NO: 104897 - DNA, 120 bp, Artificial Sequence
  ENSG00000095787_98 (sequence is synthesized)
aaaatgtgcatactcacagagttagagagagggatggtggtgaagtaatcccaagaacattctgttgcttattcattcaacaaacctggggcatctactgtgtgccaacatttgtgtgat

SEQ ID NO: 104898 - DNA, 120 bp, Artificial Sequence
  ENSG00000095787_99 (sequence is synthesized)
gccgcctgcgcgcccgcccgcctttcgcggccgctctcccccctccccgacacacactcacaggccgggcattgatgctgtcacgaccggaggggggactcgcagccttaccaggcactt

SEQ ID NO: 104899 - DNA, 120 bp, Artificial Sequence
  ENSG00000095794_0 (sequence is synthesized)
gacccgcctgcctcctcgcgaacttgggacgagttggaaaatcctccctgagagagccgtgcggctcaggggagcggtttaactcggaaaaggaaaaggaatccagaagataaataaaga

SEQ ID NO: 104900 - DNA, 120 bp, Artificial Sequence
  ENSG00000095794_1 (sequence is synthesized)
aaacaggaaaggaggaaagcattgattacaaatatcttaacaatgagcaaatgtgcaaggaaaaaatatattaagacaaatccaagacaaatgaccatggaaacagttgaatcccagcat

SEQ ID NO: 104901 - DNA, 120 bp, Artificial Sequence
  ENSG00000095794_2 (sequence is synthesized)
gatggaagtataacagcttctttgacagagagcaagtctgctcatgtgcagactcagactggccaaaattcaatccctgctttagctcaggtagcagcaattgcagagacagatgaatct

SEQ ID NO: 104902 - DNA, 120 bp, Artificial Sequence
  ENSG00000095794_3 (sequence is synthesized)
gcagaatcagaaggtgtaattgattctcataaacgtagagaaatcctttcacgaagaccctcttataggaaaatactgaatgaactgtcctctgatgtgcctggtgttcccaagattgaa

SEQ ID NO: 104903 - DNA, 120 bp, Artificial Sequence
  ENSG00000095794_4 (sequence is synthesized)
gaagagagatcagaggaagaaggaacaccacctagtattgctaccatggcagtaccaactagcatatatcagactagcacggggcaatacattgctatagcccaaggtggaacaatccag

SEQ ID NO: 104904 - DNA, 120 bp, Artificial Sequence
  ENSG00000095794_5 (sequence is synthesized)
atttctaacccaggatctgatggtgttcagggactgcaggcattaacaatgacaaattcaggagctcctccaccaggtgctacaattgtacagtacgcagcacaatcagctgatggcaca

SEQ ID NO: 104905 - DNA, 120 bp, Artificial Sequence
  ENSG00000095794_6 (sequence is synthesized)
cagcagttctttgtcccaggcagccaggttgttgttcaagctgccactggtgacatgccaacttaccagatccgagctcctactgctgctttgccacagggagtggtgatggctgcatcg

SEQ ID NO: 104906 - DNA, 120 bp, Artificial Sequence
  ENSG00000095794_7 (sequence is synthesized)
cccggaagtttgcacagtccccagcagctggcagaagaagcaacacgcaaacgagagctgaggctaatgaaaaacagggaagctgccaaagaatgtcgacgtcgaaagaaagaatatgta

SEQ ID NO: 104907 - DNA, 120 bp, Artificial Sequence
  ENSG00000095794_8 (sequence is synthesized)
aaatgtctggagagccgagttgcagtgctggaagtccagaacaagaagcttatagaggaacttgaaaccttgaaagacatttgttctcccaaaacagattactagaaatatttaactatg

SEQ ID NO: 104908 - DNA, 120 bp, Artificial Sequence
  ENSG00000095794_9 (sequence is synthesized)
gtggcttcttttctttgtatcattcatcttcttctttaatcacttaacattcctaaaatgcttcactgtacgtagttaagtcgtagctataacttcaaattttttaaaagagacaaactg

SEQ ID NO: 104909 - DNA, 120 bp, Artificial Sequence
  ENSG00000095794_10 (sequence is synthesized)
taaaaaatgtgtgtattcttaaaatgcaatatttgtaaggcttgttccaatgccacatacttgcagctcccattctatgtgtcatcaatagtgtcctatgcaataaaattatttgcaggt

SEQ ID NO: 104910 - DNA, 120 bp, Artificial Sequence
  ENSG00000095794_11 (sequence is synthesized)
ctttaaatcattttaggaaaggatgatcaaaaataatgcatccagcagtacaataaaagtaaaccacaaaaaaatacctcaggaaagaatagaaagaaagtctatctaatgacatgccta

SEQ ID NO: 104911 - DNA, 120 bp, Artificial Sequence
  ENSG00000095794_12 (sequence is synthesized)
tatgagaagaatagcctagatatgaatatatggcatttgcagatttttatattagttgctttgttaaaaaaaaaaagattgtattgctgtccttgaatgccatagtcaaagagagttttt

SEQ ID NO: 104912 - DNA, 120 bp, Artificial Sequence
  ENSG00000095794_13 (sequence is synthesized)
aatagaaccatgttggttgcactttgtagtgtttggtgctcatttaaatatctgaacatttactacagtttttaactctactgtgtaatataaaagatcttgcagaagttcttagtgttg

SEQ ID NO: 104913 - DNA, 120 bp, Artificial Sequence
  ENSG00000095794_14 (sequence is synthesized)
gtttaatattacctaatgaaagtgatgacatattttttatatctggaatgagcctgttgggatcgcattgcataccttcggggtacaagtcagtttctacactgggtgctgatccttgca

SEQ ID NO: 104914 - DNA, 120 bp, Artificial Sequence
  ENSG00000095794_15 (sequence is synthesized)
cgcgccctttctaccatctcacggtggggatggccgcagggctgtgcacccagaagaagatggctgttagcgtttcggccttcataatggcctgagactttctttctgtaggtggtctgg

SEQ ID NO: 104915 - DNA, 120 bp, Artificial Sequence
  ENSG00000095794_16 (sequence is synthesized)
agctgtccggctggtggccccctattttgccatttagcgaacaaccacaggaattttaaaaacaaaaacatcccaagattttttcatttcaaaatgcttcaaagtccacattagatcaga

SEQ ID NO: 104916 - DNA, 120 bp, Artificial Sequence
  ENSG00000095794_17 (sequence is synthesized)
tactccgctgtcggcacattcagctgaggttcattacaatcgagactgcaatgtgatctatgtttcatcttgtttttataataaaaagcttcagggaacaagcccaaagccctcaccaca

SEQ ID NO: 104917 - DNA, 120 bp, Artificial Sequence
  ENSG00000095794_18 (sequence is synthesized)
aagaagaaagaatatgtcaaatgtcttgaaaatcgtgtggctgtgcttgaaaaccaaaacaagactctcattgaggaactcaaggccctcaaagatctttattgccataaagtagagtaa

SEQ ID NO: 104918 - DNA, 120 bp, Artificial Sequence
  ENSG00000095794_19 (sequence is synthesized)
taaaccccatcgtgagggaacctagctacgggtcagagctagtccactaggtgctaatcaaatgctgtgttacaacactgtgaggttttcccagttataagtgtcactattagggttttt

SEQ ID NO: 104919 - DNA, 120 bp, Artificial Sequence
  ENSG00000095794_20 (sequence is synthesized)
tttaattgcaaagccaaataaggctgtcaattgcatcatcttaccttatttcttcagattaagtactgtttatagtgggatttttggtggatgtggtggcatcagcataatctatgtttc

SEQ ID NO: 104920 - DNA, 120 bp, Artificial Sequence
  ENSG00000095794_21 (sequence is synthesized)
tggaacactttatgttgaactgtggtagaggaaacaagacagttctgtctgcagaagcccattatggctgtaactggagatgacacagatgaggaaactgaacttgccccaagtcacatg

SEQ ID NO: 104921 - DNA, 120 bp, Artificial Sequence
  ENSG00000095794_22 (sequence is synthesized)
gacccttaagaatccagtttggattagtgtttgaaattgaattgggaatgttgttccaggatgtggaatgcagccgtgatcacacttaccgagcttactttgatctgtttgtcaatagca

SEQ ID NO: 104922 - DNA, 120 bp, Artificial Sequence
  ENSG00000095794_23 (sequence is synthesized)
ccgcaccttcccgccgcccctccccggttccatttcattgttggattgtggcgcttcactcctgctggcggccggcagggggcggagttcgagcctggatttttttcctcggggcctccc

SEQ ID NO: 104923 - DNA, 120 bp, Artificial Sequence
  ENSG00000095794_24 (sequence is synthesized)
ccgggaggccgtcccggcgtgggggaggggaggacggggcgggaggacgcggttcggtcggctgcagcgctacttttggtccggggtcggcagggaggccgcggctaccgcatcacagct

SEQ ID NO: 104924 - DNA, 120 bp, Artificial Sequence
  ENSG00000095794_25 (sequence is synthesized)
gacgtgaggactacgtggggccgctgccggctccgggttgctgggcggcggcgccgctgctgagcggcggtcgggctcgccgtctccacctcctcgcgtccgtaatcagtgacgaggtcc

SEQ ID NO: 104925 - DNA, 120 bp, Artificial Sequence
  ENSG00000095794_26 (sequence is synthesized)
gctcaggtttctgtggctggatcaggcaccagaagaggctccccagctgtaactctagtgcagttaccttcgggccaaactatacatgtccagggagtaattcagacaccacagccatgg

SEQ ID NO: 104926 - DNA, 120 bp, Artificial Sequence
  ENSG00000095794_27 (sequence is synthesized)
cgccccacgcccgcttcgtgcgctcagctgccccgggacccgcctgcctcctcgcgaacttgggacgagttggaaaatcctccctgagagagccgtgcggctcaggggagcggtttaact

SEQ ID NO: 104927 - DNA, 120 bp, Artificial Sequence
  ENSG00000095794_28 (sequence is synthesized)
ctagcacggggcaatacagtatgtatgctgcaattcgatatgatacagtgctagctttaagtcttctctagttatattgaagcaactcaggttttggcattaaattgttccattttaaaa

SEQ ID NO: 104928 - DNA, 120 bp, Artificial Sequence
  ENSG00000095794_29 (sequence is synthesized)
tgcatcattaatacctaaactgtatcatagaatgaaagtatatgttaaaaagtgagatctttgtattgacagctgtcatataattttgaaaagtaaaaattttgactgccgaatatagaa

SEQ ID NO: 104929 - DNA, 120 bp, Artificial Sequence
  ENSG00000095794_30 (sequence is synthesized)
gtttattcagtggtcttgtttgtaatacagtactgaatttgcagttgaattaagagttttaaacaacttcactacaatttagctcttcgaagttaatgggtctcagccctctttgtggat

SEQ ID NO: 104930 - DNA, 67 bp, Artificial Sequence
  ENSG00000095794_31 (sequence is synthesized)
agcataatctatgtttcaggcgtcctatagaagaggattattcttcaggggatgtggaagaaaaggc

SEQ ID NO: 104931 - DNA, 120 bp, Artificial Sequence
  ENSG00000095794_32 (sequence is synthesized)
gtaaaatgctgctgacagatttagagttaactagctcaccactgcctctgcctccaagctgccttttagactgaatagcttttcttgttagccctactttaacatttcttttgaagtggt

SEQ ID NO: 104932 - DNA, 120 bp, Artificial Sequence
  ENSG00000095794_33 (sequence is synthesized)
ggaaacacgtcatgaaactgtaatgcatgaacagaactcaggagttgtctggccagcttagtggtaagatcgagcctcctactgaggccgtccctgcatgcgcctgctgccactggtgac

SEQ ID NO: 104933 - DNA, 120 bp, Artificial Sequence
  ENSG00000095794_34 (sequence is synthesized)
gagcttctgctaatcaagaatatactatgaaaatcatcagagacctagcaactgttgagcttggttttggctgtcaggcccctgttctgctgatggattgaggtgaggtgcaggtacacc

SEQ ID NO: 104934 - DNA, 120 bp, Artificial Sequence
  ENSG00000095794_35 (sequence is synthesized)
ggaataaagcagccctggcatgccatcggggattgaagtaggaacgatttaacaagggatacttggaaatgttgtcatgtgcgagttgtaaattttcttttttaatctggtggaaaattg

SEQ ID NO: 104935 - DNA, 120 bp, Artificial Sequence
  ENSG00000095794_36 (sequence is synthesized)
aatggcatttctctgttttgcccagctatgccaaaaatcttcttggtcccacataggcctaggaaggatgtagatggcaatcacaaaacaaacaaaaaatgagcaaacaaatagaagacc

SEQ ID NO: 104936 - DNA, 120 bp, Artificial Sequence
  ENSG00000095794_37 (sequence is synthesized)
tcaagcaacattttctcttgttaataggttagcaacctcatatttgtatattaaagagatctgcattatgttaggttgatttcatataatttcagctaagtagatctagtttaaggtcag

SEQ ID NO: 104937 - DNA, 120 bp, Artificial Sequence
  ENSG00000095794_38 (sequence is synthesized)
tgttttattgaatcttgtattttagcttcagtatattaatttccttagctgagggactcctactgaaggagaaaagtgttcctgttaaaattttgaaataaaagtttctgttttactgta

SEQ ID NO: 104938 - DNA, 120 bp, Artificial Sequence
  ENSG00000095794_39 (sequence is synthesized)
ggaacattcttagccaccgaagtatgggcaccaaaagcgataaggagcatgtgttccttaataaatgtcacatcagaaaatgactgttccaggacagtaaccacctcccgatggtagcag

SEQ ID NO: 104939 - DNA, 120 bp, Artificial Sequence
  ENSG00000095794_40 (sequence is synthesized)
tatttcattcttgttggcttttgttacccacaattacatactattcttactaatctgagagttttctaaagtatgttttcaatgtttcactactctctactctgttaatttgtgctacag

SEQ ID NO: 104940 - DNA, 120 bp, Artificial Sequence
  ENSG00000095794_41 (sequence is synthesized)
tttttcctaaaagagaatggaaaaatgatttaattttttaaactgtagcaattggatagataattttatttgaaattttacacactgaaagctctaaataaacagatacattcacattca

SEQ ID NO: 104941 - DNA, 120 bp, Artificial Sequence
  ENSG00000095794_42 (sequence is synthesized)
ggaacattcttagccaccgaagtatgggcaccaaaagcgataaggagcatgtgttccttaataaatgtcacatcagaaaatgactgttccaggacagtaaccacctcccgatgttgctat

SEQ ID NO: 104942 - DNA, 120 bp, Artificial Sequence
  ENSG00000095794_43 (sequence is synthesized)
aggtgcagattctgttttcttgccattgatcttaaattttccatgttccctggttatcagccattcttgcttatttgattgtgaagaaaagatacgtgttgtaattagccttgcatttta

SEQ ID NO: 104943 - DNA, 120 bp, Artificial Sequence
  ENSG00000095794_44 (sequence is synthesized)
gtgcttggaacattcttagccaccgaagtatgggcaccaaaagcgataaggagcatgtgttccttaataaatgtcacatcagaaaatgactgttccaggacagtaaccacctcccgatgg

SEQ ID NO: 104944 - DNA, 120 bp, Artificial Sequence
  ENSG00000095794_45 (sequence is synthesized)
attcttagccaccgaagtatgggcaccaaaagcgataaggagcatgtgttccttaataaatgtcacatcagaaaatgactgttccaggacagtaaccacctcccgatgaaaatcttgtat

SEQ ID NO: 104945 - DNA, 120 bp, Artificial Sequence
  ENSG00000095906_0 (sequence is synthesized)
gggaggctgacggcccgcgggcgtaagcggactgcagccgcgagctcctggaggcggcgggatggaggcggcggccgagcctggaaacctggccggcgtcaggcacatcatcctggtcct

SEQ ID NO: 104946 - DNA, 120 bp, Artificial Sequence
  ENSG00000095906_1 (sequence is synthesized)
ctcaggaaaggggggcgttgggaaaagcaccatctccacggagctggccctggcactgcgccatgcaggcaagaaggtgggaatcctggatgtggacctgtgtggccccagtatcccccg

SEQ ID NO: 104947 - DNA, 120 bp, Artificial Sequence
  ENSG00000095906_2 (sequence is synthesized)
catgctcggggcgcagggcagggctgtgcaccagtgcgaccgcggctgggcacccgtcttcctggaccgggagcagagcatctcgctcatgtctgtgggcttcctgctggagaagccgga

SEQ ID NO: 104948 - DNA, 120 bp, Artificial Sequence
  ENSG00000095906_3 (sequence is synthesized)
cgaggccgtggtgtggagaggccccaagaaaaacgcgctgataaagcagtttgtgtccgacgtggcctggggggagctggactacctggtggtggacacgcccccggggacctccgatga

SEQ ID NO: 104949 - DNA, 120 bp, Artificial Sequence
  ENSG00000095906_4 (sequence is synthesized)
gcacatggccaccatagaagccctgcgtccctaccagcccctgggggccctcgtggtcaccacgccccaggcggtgtccgtgggggacgtgaggcgcgagctgaccttctgtaggaagac

SEQ ID NO: 104950 - DNA, 120 bp, Artificial Sequence
  ENSG00000095906_5 (sequence is synthesized)
atatgagcggcttcacctgcccacactgcacggagtgcaccagcgtcttctccaggggcggcggagaggagctggcccagctcgccggggtgcccttcttaggctccgtgcccctggacc

SEQ ID NO: 104951 - DNA, 120 bp, Artificial Sequence
  ENSG00000095906_6 (sequence is synthesized)
ctgcgctcatgaggaccctggaggagggccacgacttcatccaggagttccctgggagccccgccttcgctgcactcacctccatagcccagaagattctggacgcgacgcccgcgtgcc

SEQ ID NO: 104952 - DNA, 120 bp, Artificial Sequence
  ENSG00000095906_7 (sequence is synthesized)
tcccctgactaaggccaccttgcagccgctttccagggccaccaagggctctgctccagcctctcagagaaacagaggcctgggctcggttcccgggccctgcaggggcaggcccaggca

SEQ ID NO: 104953 - DNA, 120 bp, Artificial Sequence
  ENSG00000095906_8 (sequence is synthesized)
gcgtcagccggagagcttctccccgaccagcccagccccaggatgtgtcgcaccagcagctctgcctggttggcctgcagtgccgtggtctgcgtgctctgcagctgtgagacgggggcg

SEQ ID NO: 104954 - DNA, 120 bp, Artificial Sequence
  ENSG00000095906_9 (sequence is synthesized)
gcctgggctctcttcccatccatgttgcctacctgtgcccctggcagccgcgtgtccacacagttagcggagcgcgggacttctgcagtcctcaggtgaccccgggcctccagcaccctg

SEQ ID NO: 104955 - DNA, 120 bp, Artificial Sequence
  ENSG00000095906_10 (sequence is synthesized)
ggtcgctgtcatctgtgtttagctcggggagtgccccctaagggggcgaactgacctcaggcatgttttgtaactgtagaggcgcctgccattaaacgtgtccgctgctgtggcgacaga

SEQ ID NO: 104956 - DNA, 120 bp, Artificial Sequence
  ENSG00000095906_11 (sequence is synthesized)
gtggagaatatgagcggcttcacctgcccacactgcacggtgagtcccgggggttgcagagggggcgaggcagcacctggccggtgggggctttgggcagtgctgggctcaccaccgtct

SEQ ID NO: 104957 - DNA, 120 bp, Artificial Sequence
  ENSG00000095906_12 (sequence is synthesized)
cctaggagtgcaccagcgtcttctccaggggcggcggagaggagctggcccagctcgccggggtgcccttcttaggctccgtgcccctggaccctgcgctcatgaggaccctggaggagg

SEQ ID NO: 104958 - DNA, 120 bp, Artificial Sequence
  ENSG00000095906_13 (sequence is synthesized)
tcactgggcggagccccgggcagctgcccgcatcccggtggaggcctggcggtgcccccggcctaggctgtgccgctccttgcaggtgggaatcctggatgtggacctgtgtggccccag

SEQ ID NO: 104959 - DNA, 120 bp, Artificial Sequence
  ENSG00000095906_14 (sequence is synthesized)
cctcttcagcagccaggcctgttcctggggacctgcacatgacacccacgaccaggcacagggctcaggctggcggtgtgtctccagttgggtccgtgctgccacacagctgtccccaac

SEQ ID NO: 104960 - DNA, 120 bp, Artificial Sequence
  ENSG00000095906_15 (sequence is synthesized)
tcccggtcagagggagtggggtctgctgagaccctggccatggcatgcagggacctgaggccccagtgtggcaggtcataggggcagagctgagggggttctggtgcctctggagcaggt

SEQ ID NO: 104961 - DNA, 120 bp, Artificial Sequence
  ENSG00000095906_16 (sequence is synthesized)
ggcattagacgcccccaaaggcagggagaggctggtgggagtgaggcgcaggctgtgggtgcaccagtggggcatccaccacggagaatgtgggtgctcccatgtgtgggtacagacgcc

SEQ ID NO: 104962 - DNA, 120 bp, Artificial Sequence
  ENSG00000095906_17 (sequence is synthesized)
tggagggtcctggctccgtgttctgatttggggcctcggggagtcagcgggggctctgtgggcaggggccagacactgcagaaagggacgctgtaatggccccggccccatctttgcact

SEQ ID NO: 104963 - DNA, 120 bp, Artificial Sequence
  ENSG00000095906_18 (sequence is synthesized)
ggaggctggtggcaagtgacacctgatggactgcagcccctcggcctgacctggctggttcttagtggcgcagggccacgtgtgcagacctgccctgccctgaccgccccgtctgccccg

SEQ ID NO: 104964 - DNA, 89 bp, Artificial Sequence
  ENSG00000095906_19 (sequence is synthesized)
gacagggtttcgccatgtttttgagaccagcatggccaacatagagaaacagtctctacgaaaaaaataaaaaattagctgggcatggt

SEQ ID NO: 104965 - DNA, 80 bp, Artificial Sequence
  ENSG00000095906_20 (sequence is synthesized)
ctctacgaaggtcccaggtactctggaagctgaggcgtgggaggctgaggcacgagaattgcttggacccaggaggcgga

SEQ ID NO: 104966 - DNA, 120 bp, Artificial Sequence
  ENSG00000095906_21 (sequence is synthesized)
cactgtactccagcctgggcgacagaatgagaccccctctcaaaataaaaatatacatttactgtaaaaatatatttgtccaccacgtggaatgatctggatttgctaacccataaagct

SEQ ID NO: 104967 - DNA, 120 bp, Artificial Sequence
  ENSG00000095906_22 (sequence is synthesized)
gaccgggactcattgtccatggagagcgcactcgccttcctcggggagatggtgcttcgcctccttcctgcacttccagccccactgccccacccggcaggctcatgctgactgtgcttt

SEQ ID NO: 104968 - DNA, 120 bp, Artificial Sequence
  ENSG00000095906_23 (sequence is synthesized)
gctgacaatctgcttaggagctgcctcagtttgctgagaagtgaaatgttcttgggggaaccctcagggttgttgtcccggttcctgacactaaggcctgcatttaccatggtgctcagc

SEQ ID NO: 104969 - DNA, 120 bp, Artificial Sequence
  ENSG00000095906_24 (sequence is synthesized)
cgaggagagcccctgggggttaacactgccgctggtgccagcactgatggcagcatggcagtcaggacccaggcctgacagagtccccggcagctacagaagtgcatgctccctctctgc

SEQ ID NO: 104970 - DNA, 120 bp, Artificial Sequence
  ENSG00000095906_25 (sequence is synthesized)
acgggccacttctggtacctcttggtgttgaagtaatttaagtcagaaccccttttattgccccaggggtgaccgggaggccgtggtctcggggctttgtgtttgcaggagtgtggggct

SEQ ID NO: 104971 - DNA, 120 bp, Artificial Sequence
  ENSG00000095906_26 (sequence is synthesized)
ggggctgccttttccgcgtcccctggaggagacctcaggcagcctctgtaggtctgaggacccgcctgcatgccaggttctccgggaggctttggacttgggagcctttgaacgtgccct

SEQ ID NO: 104972 - DNA, 120 bp, Artificial Sequence
  ENSG00000095906_27 (sequence is synthesized)
tgagaggcggatcagaagggggcaggttttacgcatcatgtgttgagcccctcacatgcaccctccaaggacctgtcggggatggagcagcttgctggagacaaggggcatggcctcagc

SEQ ID NO: 104973 - DNA, 120 bp, Artificial Sequence
  ENSG00000095906_28 (sequence is synthesized)
ggtggcgccggggtgagaatgcaggggttttgccaaggtatctgcacacagcagcccctgccgtgtggcagggacaggatgggaccctggaaggaagaggagctggagctgtgctggaag

SEQ ID NO: 104974 - DNA, 120 bp, Artificial Sequence
  ENSG00000095906_29 (sequence is synthesized)
cagccggctcccctcacttaccgcacattgcagggaccgagagccggggacgctggtgtgtgacaacgcgtggttgttgccacccaccctgggccctctgctgcctctgccgagcccagg

SEQ ID NO: 104975 - DNA, 120 bp, Artificial Sequence
  ENSG00000095906_30 (sequence is synthesized)
acgcgcacgaaggaacgcatgcacccttccacacagcgagaggagttgggcagtttccactctcagcagcgccgcctcaggcaggtgcagggagtgccgtggtcttagagggtccccccg

SEQ ID NO: 104976 - DNA, 120 bp, Artificial Sequence
  ENSG00000095906_31 (sequence is synthesized)
ggtctggggctgcaggggacctgcctggaggtctttacatcggggcgaagtggggcacgggctgcctctgggtctggcgattcaccactgccccgctcagaacgtgggtgcaagaggcag

SEQ ID NO: 104977 - DNA, 120 bp, Artificial Sequence
  ENSG00000095906_32 (sequence is synthesized)
gtgagccacggcgcctggcccagtgctggagtcttattccagaggagaagcctggaaaagcctgtccttattatcaggacggatttactacaaaagcctggaaacctggccggcgtcagg

SEQ ID NO: 104978 - DNA, 80 bp, Artificial Sequence
  ENSG00000095906_33 (sequence is synthesized)
ggaggcggcggccggtgagtggcgggccagggtgcggagccgctccagggcctcgcttggggccccgccgcgtcccttcc

SEQ ID NO: 104979 - DNA, 120 bp, Artificial Sequence
  ENSG00000095906_34 (sequence is synthesized)
tcaccggccggcgtggctgggccgggccagaggccgcggcgcgggcattttctaaacagggtcgtttcccgcgtgctcctgcttcgatgtggaagctccgtgatctcggagggcctgagt

SEQ ID NO: 104980 - DNA, 120 bp, Artificial Sequence
  ENSG00000095906_35 (sequence is synthesized)
cgtggagttgggggagcttttaaagttaactttgttgagcaccgcgttgtaggcgggcgcggtggcgcctgtgggccccgctatcctggaggtcgcggttgcaactgcaccgcagcccgg

SEQ ID NO: 104981 - DNA, 120 bp, Artificial Sequence
  ENSG00000095917_0 (sequence is synthesized)
agaaggaacagggagtggccagggtaagtccctactctcagagaccctgacatcagcgtcacctggagcagagtggcccagcctcagactcagagcaccaagacccaggcccgcaggcct

SEQ ID NO: 104982 - DNA, 120 bp, Artificial Sequence
  ENSG00000095917_1 (sequence is synthesized)
ggacccaccccggtccccccgtcccagctccattcttcaccccacaatctgtagcccccagccctgccctgtgaggcccggccaggcccacgatgctcctccttgctccccagatgctga

SEQ ID NO: 104983 - DNA, 120 bp, Artificial Sequence
  ENSG00000095917_2 (sequence is synthesized)
gcctgctgctgctggcgctgcccgtcctggcgagcccggcctacgtggcccctgccccaggccaggccctgcagcaaacgggcattgttggggggcaggaggcccccaggagcaagtggc

SEQ ID NO: 104984 - DNA, 120 bp, Artificial Sequence
  ENSG00000095917_3 (sequence is synthesized)
cctggcaggtgagcctgagagtccgcggcccatactggatgcacttctgcgggggctccctcatccacccccagtgggtgctaaccgcggcgcactgcgtggaaccggacatcaaggatc

SEQ ID NO: 104985 - DNA, 120 bp, Artificial Sequence
  ENSG00000095917_4 (sequence is synthesized)
tggccgccctcagggtgcaactgcgggagcagcacctctactaccaggaccagctgctgccggtcagcaggatcatcgtgcacccacagttctacatcatccagaccggggcggacatcg

SEQ ID NO: 104986 - DNA, 120 bp, Artificial Sequence
  ENSG00000095917_5 (sequence is synthesized)
ccctgctggagctggaggagcccgtgaacatctccagccacatccacacggtcacgctgccccctgcctcggagaccttccccccggggatgccgtgctgggtcactggctggggcgacg

SEQ ID NO: 104987 - DNA, 120 bp, Artificial Sequence
  ENSG00000095917_6 (sequence is synthesized)
gcacctgccgccgccatacccgctgaaggaggtggaagtccccgtagtggaaaaccacctttgcaacgcggaatatcacaccggcctccatacgggccacagctttcaaatcgtccgcga

SEQ ID NO: 104988 - DNA, 120 bp, Artificial Sequence
  ENSG00000095917_7 (sequence is synthesized)
tgacatgctgtgtgcggggagcgaaaatcacgactcctgccagggtgactctggagggcccctggtctgcaaggtgaatggcacctaactgcaggcgggcgtggtcagctgggaggagag

SEQ ID NO: 104989 - DNA, 120 bp, Artificial Sequence
  ENSG00000095917_8 (sequence is synthesized)
ctgtgcccagcccaaccggcctggcatctacacccgtgtcacctactacttggactggatccaccactatgtccccaagaagccctgagccaggcctggggtgtccacccgggtcactgg

SEQ ID NO: 104990 - DNA, 120 bp, Artificial Sequence
  ENSG00000095917_9 (sequence is synthesized)
agggccagcccctcctgtccaaaccaccactgcttcctacccaggtggtgactgccccccacaccttcccccatcctgagtcccctctcccatcctgagccctgtcccctgtcctgagcc

SEQ ID NO: 104991 - DNA, 120 bp, Artificial Sequence
  ENSG00000095917_10 (sequence is synthesized)
ccctcccctttcttgatcccctcccccatcctgagcccctcccccaccctgagccccttcccctttcttgagccccctcccccaccctgagccccctcccctttcttgagtccctcctcc

SEQ ID NO: 104992 - DNA, 120 bp, Artificial Sequence
  ENSG00000095917_11 (sequence is synthesized)
atcctgagccccctcccctttcttgagtccctcctccatcctgagccccctcccctttcttgagcccctcctccatcctgagccccctcctccatcctgccccctcctccatcctgagcc

SEQ ID NO: 104993 - DNA, 120 bp, Artificial Sequence
  ENSG00000095917_12 (sequence is synthesized)
tcctccccaaccctgaatccgcccctcccggcccctccggccctcccctgcccaggcagctggtggtggacgcccatcctctctagtgctgactctcattaaagtgcatgatggaaagca

SEQ ID NO: 104994 - DNA, 120 bp, Artificial Sequence
  ENSG00000095932_0 (sequence is synthesized)
accaaacctgtggacgccgacccgggaccgccgctggctggctgctggctcactcgaccgtcatggagaccctgggggcccttctggtgctggagtttctgctcctctccccggtggagg

SEQ ID NO: 104995 - DNA, 120 bp, Artificial Sequence
  ENSG00000095932_1 (sequence is synthesized)
cccagcaggccacggagcatcgcctgaagccgtggctggtgggcctggctgcggtagtcggcttcctgttcatcgtctatttggtcttgctggccaaccgcctctggtgttccaaggcca

SEQ ID NO: 104996 - DNA, 120 bp, Artificial Sequence
  ENSG00000095932_2 (sequence is synthesized)
gggctgaggacgaggaggagaccacgttcagaatggagtccaacctataccaggaccagagtgaagacaagagagagaagaaagaggccaaggagaaagaagagaagaggaagaaggaga

SEQ ID NO: 104997 - DNA, 120 bp, Artificial Sequence
  ENSG00000095932_3 (sequence is synthesized)
aaaagacagcaaaggaaggagagagcaacttgggactggatctggaggaaaaagagcccggagaccatgagagagcaaagagcacagtcatgtgaagattcctggctgcctcttccaggc

SEQ ID NO: 104998 - DNA, 120 bp, Artificial Sequence
  ENSG00000095932_4 (sequence is synthesized)
agtcccccagagatgcctcttctgccccctaaaagcagtgccctggacttgaagcccgtgaaatgactccatctgggattcagaatacagtgttctcaagtgaagaaggcttggaaccca

SEQ ID NO: 104999 - DNA, 120 bp, Artificial Sequence
  ENSG00000095932_5 (sequence is synthesized)
tgaggagacacccgcaatcctccacgatctcatggctccacctgcttctccccactgcctgatttcttttctctctgcctgatgtctactgaacagaacttcccctctcccatgcaccca

SEQ ID NO: 105000 - DNA, 120 bp, Artificial Sequence
  ENSG00000095932_6 (sequence is synthesized)
ctgccagctgagagctgcttcccaatggcctgcattaaagcattcgtaacagccctttggaagggctcctgtcatctcttgggactcagtttacctctggggaaggaggctgcttttggg

SEQ ID NO: 105001 - DNA, 120 bp, Artificial Sequence
  ENSG00000095932_7 (sequence is synthesized)
gctgcgggcgatggctgggcggatgatatggaggctcagggtgcacaggtgcccagacgccctgagcagattaaacactcccccggcaatctggttttttgctgtcctgagccctggact

SEQ ID NO: 105002 - DNA, 120 bp, Artificial Sequence
  ENSG00000095932_8 (sequence is synthesized)
ttgagccctgagcgccgtctccaagcaaatctttgctccttcccccacctcactttgttttggggcacgtgacttttttcctgggagctgtatcttggagggtgggggtgccccagggcc

SEQ ID NO: 105003 - DNA, 120 bp, Artificial Sequence
  ENSG00000095932_9 (sequence is synthesized)
ctgcaatatcttggaaagggactagcacttccttttcccagtttctgttctcctgcttcccctcaccttctccaggccctggaccttaccctgaacaatgaccatttctcttttatttga

SEQ ID NO: 105004 - DNA, 120 bp, Artificial Sequence
  ENSG00000095932_10 (sequence is synthesized)
cccctacgccatccaggtctctgaagctccgtccctttccaataccccctctgtcggagcacccccagtgaccttctctctctccttgctagggtggtgggggaagggggtcttctgacc

SEQ ID NO: 105005 - DNA, 120 bp, Artificial Sequence
  ENSG00000095951_0 (sequence is synthesized)
gccagtcgccggccttcagcgtggcggctgctgggcggcggcagggtggcggacggagcgggggaccggggagcggcggccgccggaggaggttatgtttgtgtttggggttgtcaagtg

SEQ ID NO: 105006 - DNA, 120 bp, Artificial Sequence
  ENSG00000095951_1 (sequence is synthesized)
ggttgtcaagtgaaggagggatcccaggcgccgccgccgccgccgcgcgggggtcgcggagatcccgagccgcggccgccgccatcagcagcgcagctccagggccggctgcagcggcag

SEQ ID NO: 105007 - DNA, 120 bp, Artificial Sequence
  ENSG00000095951_2 (sequence is synthesized)
gcgtcctggcagcagcacatggattaattgatgtatgttgagtttatggagctgccttttggtggcttgctttatctgcagtttttaagaagaaaaagaaggccctgagtcaaagaagat

SEQ ID NO: 105008 - DNA, 120 bp, Artificial Sequence
  ENSG00000095951_3 (sequence is synthesized)
gcctcgaactaaacaaattcatcccagaaatctaagagacaaaattgaagaagcacaaaaagaacttaatggggcagaagtttcaaaaaaagaaatcttacaggctggtgttaaaggaac

SEQ ID NO: 105009 - DNA, 120 bp, Artificial Sequence
  ENSG00000095951_4 (sequence is synthesized)
ttcggaatcccttaaaggtgtgaaacgcaaaaagatcgtagctgagaatcacctgaaaaaaataccaaaatccccactgagaaatcctcttcaggcaaaacataaacaaaatacagaaga

SEQ ID NO: 105010 - DNA, 120 bp, Artificial Sequence
  ENSG00000095951_5 (sequence is synthesized)
gtcatctttcgccgttcttcatagtgcttcggagtctcacaagaaacagaattatattcctgtaaaaaatgggaagcagtttaccaaacaaaatggagaaacacctggaataattgctga

SEQ ID NO: 105011 - DNA, 120 bp, Artificial Sequence
  ENSG00000095951_6 (sequence is synthesized)
agcctcaaaatctgaagaatctgtctccccaaagaagcccttgtttctgcagcaaccatctgaactgcgtagatggagatccgaaggcgctgatcctgccaaattcagtgacctcgatga

SEQ ID NO: 105012 - DNA, 120 bp, Artificial Sequence
  ENSG00000095951_7 (sequence is synthesized)
acaatgtgactcaagttccttgtcaagtaaaaccaggactgacaatagcgaatgcatctcttctcattgtggcactacgtccccctcctatacaaacactgcattcgatgtcttactgaa

SEQ ID NO: 105013 - DNA, 120 bp, Artificial Sequence
  ENSG00000095951_8 (sequence is synthesized)
agcaatggagccagaactgagcaccttgtcacaaaagggctcaccttgtgcaattaagacagaaaaactgaggccaaataaaactgcacgttcccctcccaaattaaaaaacagttcaat

SEQ ID NO: 105014 - DNA, 120 bp, Artificial Sequence
  ENSG00000095951_9 (sequence is synthesized)
ggatgccccaaatcagacttcacaggaattggttgctgaatcacagtcttcttgtacctcatacacagtccatatgtctgctgctcagaagaatgagcaaggggcaatgcagtcagcttc

SEQ ID NO: 105015 - DNA, 120 bp, Artificial Sequence
  ENSG00000095951_10 (sequence is synthesized)
tcatttgtatcatcaacatgaacactttgttcccaaatccaaccaacataatcaacagcttccggggtgttcaggtttcacaggatcactgacaaatctgcaaaatcaagagaatgccaa

SEQ ID NO: 105016 - DNA, 120 bp, Artificial Sequence
  ENSG00000095951_11 (sequence is synthesized)
acttgaacaggtttataatatagcagtgacatcatctgtaggcctaacttcaccttccagtagatctcaggttactcctcaaaaccagcaaatggattctgcttcacctttgtcaataag

SEQ ID NO: 105017 - DNA, 120 bp, Artificial Sequence
  ENSG00000095951_12 (sequence is synthesized)
tccggctaattctacacagtcgccccccatgccaatctataattcaactcatgttgcctctgttgttaatcaaagcgtagagcaaatgtgcaatcttcttctgaaagatcagaagccaaa

SEQ ID NO: 105018 - DNA, 120 bp, Artificial Sequence
  ENSG00000095951_13 (sequence is synthesized)
aaaacaaggaaaatatatttgtgagtattgcaatagagcatgtgcaaagcctagtgtgcttttaaagcatatccgctcccacactggagagcgaccctatccctgtgtgacttgtggatt

SEQ ID NO: 105019 - DNA, 120 bp, Artificial Sequence
  ENSG00000095951_14 (sequence is synthesized)
ttcatttaagactaaaagtaatctgtataagcacaagaaatcccacgcacatactatcaaactgggtcttgtcttgcaaccagatgctggtggcttgttcttgtcccacgagtcccccaa

SEQ ID NO: 105020 - DNA, 120 bp, Artificial Sequence
  ENSG00000095951_15 (sequence is synthesized)
agcacttagtattcattcagacgtagaagacagtggggagagcgaggaggaaggcgccactgatgagagacagcatgacctgggcgccatggagctgcagcctgtgcacataataaagag

SEQ ID NO: 105021 - DNA, 120 bp, Artificial Sequence
  ENSG00000095951_16 (sequence is synthesized)
gatgtcaaatgctgaaactttactaaaatcaagcttcactccaagcagtccagaaaatgtgataggtgactttttgctacaggacagatctgcagaatcacaagctgtgacagagttacc

SEQ ID NO: 105022 - DNA, 120 bp, Artificial Sequence
  ENSG00000095951_17 (sequence is synthesized)
gaaagttgtggtccaccatgtcactgtgtcccccttaagaactgacagtccaaaggccatggatcccaagcctgaactttctagtgcacaaaagcagaaggaccttcaggtgacaaacgt

SEQ ID NO: 105023 - DNA, 120 bp, Artificial Sequence
  ENSG00000095951_18 (sequence is synthesized)
acagccactttcagccaacatgtcccagggtggagtctccaggttggagactaatgagaattcccaccagaaaggcgacatgaatccactggaaggaaagcaagactctcacgtaggaac

SEQ ID NO: 105024 - DNA, 120 bp, Artificial Sequence
  ENSG00000095951_19 (sequence is synthesized)
ggtacacgcccagctacaaaggcagcaggctaccgattactcccaagagcagcaaggaaagctcctgagtcctcgaagtttaggaagtacggattctggttacttttcacgttctgaaag

SEQ ID NO: 105025 - DNA, 120 bp, Artificial Sequence
  ENSG00000095951_20 (sequence is synthesized)
tgccgatcaaacagtgagtccaccaactccctttgccagaaggttacccagcacagaacaagactctggaaggagtaacggaccctctgcagctcttgtcaccacgtcaacaccctctgc

SEQ ID NO: 105026 - DNA, 120 bp, Artificial Sequence
  ENSG00000095951_21 (sequence is synthesized)
tttgcccacaggggaaaaggcattgcttttaccaggtcagatgcgcccacctttggccacaaaaacacttgaggagcggatatcgaagcttatctcagacaatgaagctttggtagatga

SEQ ID NO: 105027 - DNA, 120 bp, Artificial Sequence
  ENSG00000095951_22 (sequence is synthesized)
caagcaactggatagtgtgaagccgcggagaacctcactgtcaagacgaggaagcattgattcccccaaatcatacatatttaaagattctttccagtttgatttaaaaccagtgggacg

SEQ ID NO: 105028 - DNA, 120 bp, Artificial Sequence
  ENSG00000095951_23 (sequence is synthesized)
gagaacaagttcaagctctgatataccgaagtcacctttcacccctactgaaaaatcaaagcaagtgtttcttctgtctgtaccttcacttgactgtttacctatcacaagaagtaattc

SEQ ID NO: 105029 - DNA, 120 bp, Artificial Sequence
  ENSG00000095951_24 (sequence is synthesized)
catgccgaccacaggttattcagcagtacctgcaaatataatacctcctcctcatccactaagaggaagtcagtcatttgatgacaaaattggcgctttctatgatgatgtctttgtatc

SEQ ID NO: 105030 - DNA, 120 bp, Artificial Sequence
  ENSG00000095951_25 (sequence is synthesized)
gggacctaacgctcctgtgccccagagtgggcatccccgtacacttgtgagacaagcagccatagaagactcttcagcaaatgaaagtcatgttcttggtactggacagtccctggatga

SEQ ID NO: 105031 - DNA, 120 bp, Artificial Sequence
  ENSG00000095951_26 (sequence is synthesized)
gagccaccaaggatgccatgctgctggtgaagccatgtcagtgaggagcaaggcactggcacaaggcccacatatagaaaaaaagaagtctcatcaagggcgagggacaatgtttgagtg

SEQ ID NO: 105032 - DNA, 120 bp, Artificial Sequence
  ENSG00000095951_27 (sequence is synthesized)
tgaaacttgtagaaacaggtataggaaactggaaaattttgaaaatcataagaaattttactgttctgagttacatggaccaaaaacaaaggtagccatgagagaacctgagcacagccc

SEQ ID NO: 105033 - DNA, 120 bp, Artificial Sequence
  ENSG00000095951_28 (sequence is synthesized)
tgtgcccggcggtctgcagcctcagattctacactacagagtcgctgggtcctccggcatctgggaacagacgccccagataagaaaaaggaggaaaatgaaaagtgttggggatgatga

SEQ ID NO: 105034 - DNA, 120 bp, Artificial Sequence
  ENSG00000095951_29 (sequence is synthesized)
agaacttcagcaaaatgaaagtggaacatctccaaaaagttctgaaggccttcagtttcagaatgctctgggctgtaatcccagtttgcctaaacataatgttaccataagaagtgacca

SEQ ID NO: 105035 - DNA, 120 bp, Artificial Sequence
  ENSG00000095951_30 (sequence is synthesized)
gcagcataaaaatatacagttgcaaaactcccatattcaccttgttgccaggggccctgagcagaccatggatcccaagctgtcgaccatcatggaacaacagataagttcagcagccca

SEQ ID NO: 105036 - DNA, 120 bp, Artificial Sequence
  ENSG00000095951_31 (sequence is synthesized)
ggacaagatagaactgcagagacacggaactggaatctctgtcatccagcacaccaactccctgagcaggcccaactcatttgacaagcctgagccttttgaaagagcctccccagtttc

SEQ ID NO: 105037 - DNA, 120 bp, Artificial Sequence
  ENSG00000095951_32 (sequence is synthesized)
tttccaggagctgaatagaacggggaagtccgggtctctaaaagtgataggaatctcccaagaggaaagtcacccttctcgggacgggtctcatcctcaccagcttgcactatcagacgc

SEQ ID NO: 105038 - DNA, 120 bp, Artificial Sequence
  ENSG00000095951_33 (sequence is synthesized)
tctcagaggagaacttcaggaaagctccagaaagagtccaagtgaacgacatgtgttaggacagccctcaagacttgtccggcagcacaacatccaagttccagagattttggtcacaga

SEQ ID NO: 105039 - DNA, 120 bp, Artificial Sequence
  ENSG00000095951_34 (sequence is synthesized)
agaaccagatcgagacctggaagctcaatgccatgatcaagaaaagtcagagaagttcagttggccccagcgtagtgaaaccttgtcaaaattgccaacagagaaactgccacccaaaaa

SEQ ID NO: 105040 - DNA, 120 bp, Artificial Sequence
  ENSG00000095951_35 (sequence is synthesized)
gaaaaggctccgtctggctgagatagaacattcctcaacagaatcgagctttgattccactctctccaggagtctaagtagggagagcagtttatctcacacttcaagtttctcagcctc

SEQ ID NO: 105041 - DNA, 120 bp, Artificial Sequence
  ENSG00000095951_36 (sequence is synthesized)
tttagacatagaggacgtttctaaaacggaggcttcccccaaaatcgattttctaaataaagccgagtttcttatgattccagctggcttgaatactctgaatgttcctggatgtcaccg

SEQ ID NO: 105042 - DNA, 120 bp, Artificial Sequence
  ENSG00000095951_37 (sequence is synthesized)
aggtctctgatctcagaagcaaatcattcgattgtggaagcatcaccccaccccagacaacaccacttactgaattgcagcctccatcttcaccttctcgagtgggagtgactgggcatg

SEQ ID NO: 105043 - DNA, 120 bp, Artificial Sequence
  ENSG00000095951_38 (sequence is synthesized)
tgcctctcttagaaagaaggagaggcccactggtacggcaaatatctttaaacatagccccagatagtcatctgtctcctgtacacccaacatctttccaaaatactgctcttcccagtg

SEQ ID NO: 105044 - DNA, 120 bp, Artificial Sequence
  ENSG00000095951_39 (sequence is synthesized)
tgaatgcagtgccatatcaggggcctcagctcactagtacatctttagctgagttttctgcaaatactttgcactctcagactcaggttaaggatctgcaggcagaaacatcaaactcca

SEQ ID NO: 105045 - DNA, 120 bp, Artificial Sequence
  ENSG00000095951_40 (sequence is synthesized)
gctctaccaacgtttttcctgttcaacagctctgtgatatcaatttgttaaatcaaatccatgcaccgcctagccaccagagcacacagctatctctgcaagtgtctacgcagggtagca

SEQ ID NO: 105046 - DNA, 120 bp, Artificial Sequence
  ENSG00000095951_41 (sequence is synthesized)
agccagataaaaattctgttttatctgggtcttctaaaagtgaggattgctttgctcccaaataccaattgcattgtcaggttttcacttcaggcccatcttgctcttctaatcctgtgc

SEQ ID NO: 105047 - DNA, 120 bp, Artificial Sequence
  ENSG00000095951_42 (sequence is synthesized)
attctttgccaaatcaagttatttcagatccagttggaacagatcattgtgtgacatcagcaacattaccaaccaaattaattgacagcatgtctaattcgcatcctctgctaccaccag

SEQ ID NO: 105048 - DNA, 120 bp, Artificial Sequence
  ENSG00000095951_43 (sequence is synthesized)
agctcaggccccttggaagtcaggtgcagaaggtgccatcatcattcatgctgcccatacgcctgcagagtagtgttcctgcttactgttttgctacactcacatccctgccacaaatac

SEQ ID NO: 105049 - DNA, 120 bp, Artificial Sequence
  ENSG00000095951_44 (sequence is synthesized)
tagtgacccaagatctgcccaatcagccaatttgccagactaatcatagtgtagtgccaatcagtgaagaacaaaattctgtgccaacattacaaaaaggtcatcagaatgctttgccaa

SEQ ID NO: 105050 - DNA, 120 bp, Artificial Sequence
  ENSG00000095951_45 (sequence is synthesized)
acccagagaaggaatttctatgtgaaaatgttttttcagagatgagccaaaattcttctctatcagaatccttgcccataactcagaaaatatctgttggtcgactttcccctcaacaag

SEQ ID NO: 105051 - DNA, 120 bp, Artificial Sequence
  ENSG00000095951_46 (sequence is synthesized)
aatcttcagcttcgagtaaaaggatgctttccccagcaaatagtttagacattgccatggaaaagcaccagaagcgggccaaagatgaaaatggagctgtttgtgcaacagacgtgagac

SEQ ID NO: 105052 - DNA, 120 bp, Artificial Sequence
  ENSG00000095951_47 (sequence is synthesized)
ctttagaggctttgagttcgagagttaatgaagctagtaaacagaagaagcctattttagtgagacaggtttgtactacagagcccctggacggtgtgatgttggaaaaggatgtttttt

SEQ ID NO: 105053 - DNA, 120 bp, Artificial Sequence
  ENSG00000095951_48 (sequence is synthesized)
ctcaacctgaaattagtaatgaggctgttaatttgacaaatgttttaccagctgataattcatcaacaggatgctctaaatttgtcgttatagaacctataagtgaattgcaggaatttg

SEQ ID NO: 105054 - DNA, 120 bp, Artificial Sequence
  ENSG00000095951_49 (sequence is synthesized)
aaaacatcaagtcatccacatcattaactcttacagttcgaagttcacctgctccttcagaaaatactcatatttctcctttgaaatgtacagacaataaccaagaaaggaagtctccag

SEQ ID NO: 105055 - DNA, 120 bp, Artificial Sequence
  ENSG00000095951_50 (sequence is synthesized)
gggttaaaaatcaaggtgacaaagtgaacatccaagagcaaagtcaacagccagtcacttctctttcattgtttaacatcaaggacacccagcagctggctttccctagcctgaaaacta

SEQ ID NO: 105056 - DNA, 120 bp, Artificial Sequence
  ENSG00000095951_51 (sequence is synthesized)
caaccaactttacatggtgttatctcttaaggcagaagtcgttgcatttgcctcagaaggaccagaaaacttcagcctatactgattggacagtaagcgccagtaatccaaatccactcg

SEQ ID NO: 105057 - DNA, 120 bp, Artificial Sequence
  ENSG00000095951_52 (sequence is synthesized)
gtttgcccacaaaagttgcacttgctctccttaattcaaaacagaacactggaaaatcactatactgtcaagcaataactacccattccaagtcagacttattggtctattcaagcaagt

SEQ ID NO: 105058 - DNA, 120 bp, Artificial Sequence
  ENSG00000095951_53 (sequence is synthesized)
ggaaaagcagcttaagcaagagagcattaggtaatcaaaagtccacagtagttgaattcagcaataaagatgcctctgaaattaacagtgagcaagataaagaaaattccttaatcaaaa

SEQ ID NO: 105059 - DNA, 120 bp, Artificial Sequence
  ENSG00000095951_54 (sequence is synthesized)
gtgaaccaagaagaattaaaatatttgatggaggatataagtcaaatgaagagtatgtatatgtccgaggcaggggaagaggaaaatacatttgtgaagaatgtggaatacgttgtaaga

SEQ ID NO: 105060 - DNA, 120 bp, Artificial Sequence
  ENSG00000095951_55 (sequence is synthesized)
aacctagcatgttaaagaaacacatacgaacccatacagatgtccgcccctaccactgcacttactgtaacttctcctttaagactaaaggaaatctgacaaaacacatgaagtccaagg

SEQ ID NO: 105061 - DNA, 120 bp, Artificial Sequence
  ENSG00000095951_56 (sequence is synthesized)
cacatagcaagaaatgtgtggatttaggcgtctcagtaggtttaatagatgaacaggatacagaagaatcagatgaaaaacagagattcagttatgagcgatctggatatgatcttgaag

SEQ ID NO: 105062 - DNA, 120 bp, Artificial Sequence
  ENSG00000095951_57 (sequence is synthesized)
aatctgatggcccagatgaggatgacaatgaaaatgaagacgatgatgaggacagccaggctgaatcagtcctgtcagccacaccctcagtcacagctagcccgcagcaccttccatcta

SEQ ID NO: 105063 - DNA, 120 bp, Artificial Sequence
  ENSG00000095951_58 (sequence is synthesized)
gaagtagccttcaggaccctgtgagtactgacgaggatgtcaggatcaccgattgcttttctggggtacacacggacccaatggacgttctgcccagggcgctgctcaccagaatgactg

SEQ ID NO: 105064 - DNA, 120 bp, Artificial Sequence
  ENSG00000095951_59 (sequence is synthesized)
tcctgagcacagcacagtctgactacaataggaagacactctctccggggaaggccaggcagcgtgctgcgagagatgaaaacgacacaattccgtctgtagacacttccaggtccccgt

SEQ ID NO: 105065 - DNA, 120 bp, Artificial Sequence
  ENSG00000095951_60 (sequence is synthesized)
gtcatcagatgtctgtggactaccctgagtcagaagaaattctgagaagttctatggcaggaaaagctgttgctataacacagagcccatcatctgtaagacttcctcctgctgcagctg

SEQ ID NO: 105066 - DNA, 120 bp, Artificial Sequence
  ENSG00000095951_61 (sequence is synthesized)
agcacagcccccagacagcagcggggatgccttctgtggcctcaccacatcctgaccctcaagaacagaagcagcaaataactctacagccgactccaggcttgccttctccccacactc

SEQ ID NO: 105067 - DNA, 120 bp, Artificial Sequence
  ENSG00000095951_62 (sequence is synthesized)
atttgtttagccaccttcctttgcattcccagcagcaatcgaggacaccttataatatggttccagttggggggatccatgtggtacctgctggcctcacatactccacgtttgtgcccc

SEQ ID NO: 105068 - DNA, 120 bp, Artificial Sequence
  ENSG00000095951_63 (sequence is synthesized)
ttcaggctggaccagtgcagctcacgatccctgctgtcagtgtcgttcacagaactttgggtactcataggaatacggtcacagaagtgtctggcactacaaaccctgctggagtggctg

SEQ ID NO: 105069 - DNA, 120 bp, Artificial Sequence
  ENSG00000095951_64 (sequence is synthesized)
aattaagcagtgttgtgccatgtattcctatcggccaaatccgcgtgccaggccttcagaacctaagtaccccaggcttgcagtcactcccctcgttaagcatggaaaccgtcaatattg

SEQ ID NO: 105070 - DNA, 120 bp, Artificial Sequence
  ENSG00000095951_65 (sequence is synthesized)
taggcctagccaatacaaatatggccccacaagtccatccaccaggactggctctgaatgctgtcggactgcaggttctgactgcaaacccttcatcacaaagcagccccgcccctcagg

SEQ ID NO: 105071 - DNA, 120 bp, Artificial Sequence
  ENSG00000095951_66 (sequence is synthesized)
cacacattccaggtctccagatcttgaacatagcattgcccaccttaatcccctcagtcagtcaagtagccgttgatgcacagggagctccagaaatgccagcttcccaaagcaaagcat

SEQ ID NO: 105072 - DNA, 120 bp, Artificial Sequence
  ENSG00000095951_67 (sequence is synthesized)
gcgagacacaacccaagcagacttctgtagccagcgcaaaccaggtcagcaggaccgagtctcctcaggggttacctacagtccagcgggaaaatgcaaaaaaagttctgaatccacctg

SEQ ID NO: 105073 - DNA, 120 bp, Artificial Sequence
  ENSG00000095951_68 (sequence is synthesized)
cccctgcaggtgaccatgcaaggcttgatggcctgagtaaaatggacacagagaaggctgcctcggcaaatcacgtgaagcccaagcctgaactcacttccatacagggccaaccagcgt

SEQ ID NO: 105074 - DNA, 120 bp, Artificial Sequence
  ENSG00000095951_69 (sequence is synthesized)
ccacgtcacaacctctgctgaaggcacattctgaagtttttacaaagccctcaggccagcagactctctctccagacagacaggttcccaggcccacagcactaccgcggaggcagccca

SEQ ID NO: 105075 - DNA, 120 bp, Artificial Sequence
  ENSG00000095951_70 (sequence is synthesized)
ctgtgcacttcagcgacgtgagcagcgatgatgacgaggacaggcttgtgatagcaacctgatggattttattttttatttgctttttttttatataacacttaaaggtttctttgaaaa

SEQ ID NO: 105076 - DNA, 120 bp, Artificial Sequence
  ENSG00000095951_71 (sequence is synthesized)
ccctcctttccttaaagcacatttttctgacataaactcatgactaatctttgtgcaatcatgaacttttgaccaataattgttgttttgtgtcagctccagccatttttgtacatgttg

SEQ ID NO: 105077 - DNA, 120 bp, Artificial Sequence
  ENSG00000095951_72 (sequence is synthesized)
tatagacaattgtgccttttaggagctttatgtttagaaactgtacagattgttgaatatctatatacataaaaatatattatatatgtatatgaaaaccaggtagttatttgtgtttag

SEQ ID NO: 105078 - DNA, 120 bp, Artificial Sequence
  ENSG00000095951_73 (sequence is synthesized)
taaggaaaacctgtcaaataaatcaaatgattaaattatatgttccactgttgaatataaattttatggctatggggcagagtttctgtgtataaattagtatgtaaactccatatttat

SEQ ID NO: 105079 - DNA, 120 bp, Artificial Sequence
  ENSG00000095951_74 (sequence is synthesized)
tgtattcatattagtctttgaaaatgggtctgtcctccttgtgtaagacagtaactttacacttcagacagattttctgtgttatgaaatgtttcagtaaaatattgtttactgacttta

SEQ ID NO: 105080 - DNA, 120 bp, Artificial Sequence
  ENSG00000095951_75 (sequence is synthesized)
tttcctctcacgcccacttccaacctaggaggcttttggtttctgcttttttgtttttaaaattaaaagttaaacccaggaagctttggatcagacttttgtgttgcagttcggcacatg

SEQ ID NO: 105081 - DNA, 120 bp, Artificial Sequence
  ENSG00000095951_76 (sequence is synthesized)
tgcagtttttaagaagaaaaagaaggccctgagtcaaagaagatgcctcgaactaaacaaattcatcccagaaatctaagagggtcttgctcttttgctcaggctggagtgcagtggtgt

SEQ ID NO: 105082 - DNA, 120 bp, Artificial Sequence
  ENSG00000095951_77 (sequence is synthesized)
agttgtagctcactgcaaccccaaacttctggggacaagctaaggcttgtccccttcctgctttagcgtcccgaatagcttggactacaggcacatgccagtgtgcctagctactttttt

SEQ ID NO: 105083 - DNA, 120 bp, Artificial Sequence
  ENSG00000095951_78 (sequence is synthesized)
tttttggcggaggggaggggagttcctcactttgttgcccagactggtcttgaactcccagcctcaagtgaacctcctgtgttggccccccaaagcactgagattacaggcatgagccac

SEQ ID NO: 105084 - DNA, 120 bp, Artificial Sequence
  ENSG00000095951_79 (sequence is synthesized)
cgcacctagtctgtggtttttcttcttcttatttttaaacatcctgtgcagaaaaaaattaaggaacctgatgtatctgttagacattaataccgtgcaaattcagtatgttttagtgtt

SEQ ID NO: 105085 - DNA, 120 bp, Artificial Sequence
  ENSG00000095951_80 (sequence is synthesized)
ttgatctattgatatcctttctattgaaggcaaggaacaatagttattcggggctttattagattttatttaatgctttcataaagaagcacagatattactatttatcaactgtaattt

SEQ ID NO: 105086 - DNA, 120 bp, Artificial Sequence
  ENSG00000095951_81 (sequence is synthesized)
ttaatatttgagaactatattttggtgtaattgtttttttaatcctgtgtattttatgcattttaaaacattctgaaaaggggtccatcaatttggctaaactgcagaggcatacagggt

SEQ ID NO: 105087 - DNA, 120 bp, Artificial Sequence
  ENSG00000095951_82 (sequence is synthesized)
tgggcgacagggcgagactccatctcaacaacgacaacaacaacaacaacaacaaagaaccaacaacaacaacaacaaagaaccaccaccaccaccaccaacaacaacaacaaagaatca

SEQ ID NO: 105088 - DNA, 120 bp, Artificial Sequence
  ENSG00000095951_83 (sequence is synthesized)
ttctccattccccaaaccctaaagccaggaagggagtaagattaactttagaaattaataaatagagttttggatctctactctgccttttaggagctctgtggatgggacgttttactt

SEQ ID NO: 105089 - DNA, 120 bp, Artificial Sequence
  ENSG00000095951_84 (sequence is synthesized)
ctgactgtcattctctgtgttataaaatgagtataatatatctgtcacagatttgtgatgagagttaaaatggacactttatataatatacctggcagagtaacaggcacatagaatgaa

SEQ ID NO: 105090 - DNA, 120 bp, Artificial Sequence
  ENSG00000095951_85 (sequence is synthesized)
tgttgttacccctttggtccttagtcttatcatgaactagctatgtccttagccaaattacttaccactttttgatctttgttacctatttatctacactgaaaggatttagatttgtat

SEQ ID NO: 105091 - DNA, 120 bp, Artificial Sequence
  ENSG00000095951_86 (sequence is synthesized)
atttctacttcagctaaaaaaaatctgtgattatgtaaaaaaccaggattacctttttcaaattggaatgcttggtcagctaagcttttattttgttgattaaagacatgcatatatcaa

SEQ ID NO: 105092 - DNA, 120 bp, Artificial Sequence
  ENSG00000095951_87 (sequence is synthesized)
tgacaccgacctatcctttgtgaggttgaagaattttggaagagcatgagagcagcacttggtgttcagaagaaaggcttagcatgttgtcctgggttccgtggagaagggtcactggac

SEQ ID NO: 105093 - DNA, 120 bp, Artificial Sequence
  ENSG00000095951_88 (sequence is synthesized)
tgcacggggtggctcttccgcatggtcttgacaaaattgaagaagcacaaaaagaacttaatggggcagaagtttcaaaaaaagaaatcttacaggctggtgttaaaggaacttcggaat

SEQ ID NO: 105094 - DNA, 120 bp, Artificial Sequence
  ENSG00000095970_0 (sequence is synthesized)
tgacatgcctgatcctctcttttctgcagttcaagggaaagacgagatcttgcacaaggcactctgcttctgcccttggctggggaagggtggcatggagcctctccggctgctcatctt

SEQ ID NO: 105095 - DNA, 120 bp, Artificial Sequence
  ENSG00000095970_1 (sequence is synthesized)
actctttgtcacagagctgtccggagcccacaacaccacagtgttccagggcgtggcgggccagtccctgcaggtgtcttgcccctatgactccatgaagcactgggggaggcgcaaggc

SEQ ID NO: 105096 - DNA, 120 bp, Artificial Sequence
  ENSG00000095970_2 (sequence is synthesized)
ctggtgccgccagctgggagagaagggcccatgccagcgtgtggtcagcacgcacaacttgtggctgctgtccttcctgaggaggtggaatgggagcacagccatcacagacgataccct

SEQ ID NO: 105097 - DNA, 120 bp, Artificial Sequence
  ENSG00000095970_3 (sequence is synthesized)
gggtggcactctcaccattacgctgcggaatctacaaccccatgatgcgggtctctaccagtgccagagcctccatggcagtgaggctgacaccctcaggaaggtcctggtggaggtgct

SEQ ID NO: 105098 - DNA, 120 bp, Artificial Sequence
  ENSG00000095970_4 (sequence is synthesized)
cagcatctccaggagcctcttggaaggagaaatccccttcccacccacttccatccttctcctcctggcctgcatctttctcatcaagattctagcagccagcgccctctgggctgcagc

SEQ ID NO: 105099 - DNA, 120 bp, Artificial Sequence
  ENSG00000095970_5 (sequence is synthesized)
ctggcatggacagaagccagggacacatccacccagtgaactggactgtggccatgacccagggtatcagctccaaactctgccagggctgagagacacgtgaaggaagatgatgggagg

SEQ ID NO: 105100 - DNA, 120 bp, Artificial Sequence
  ENSG00000095970_6 (sequence is synthesized)
aaaagcccaggagaagtcccaccagggaccagcccagcctgcatacttgccacttggccaccaggactccttgttctgctctggcaagagactactctgcctgaacactgcttctcctgg

SEQ ID NO: 105101 - DNA, 120 bp, Artificial Sequence
  ENSG00000095970_7 (sequence is synthesized)
accctggaagcagggactggttgagggagtggggaggtggtaagaacacctgacaacttctgaatattggacattttaaacacttacaaataaatccaagactgtcatatttagctggat

SEQ ID NO: 105102 - DNA, 120 bp, Artificial Sequence
  ENSG00000095970_8 (sequence is synthesized)
ctggatcaccgggatgctggagatctctggttccccggggagtctgagagcttcgaggatgcccatgtggagcacagcatctccagggctgagagacacgtgaaggaagatgatgggagg

SEQ ID NO: 105103 - DNA, 120 bp, Artificial Sequence
  ENSG00000095981_0 (sequence is synthesized)
tctcccccatagccagccccacggccctggcagggtcctggccacagcatgcccagtgctgggctctgcagctgctggggtggccgggtgctgcccctgctgctggcctatgtctgctac

SEQ ID NO: 105104 - DNA, 120 bp, Artificial Sequence
  ENSG00000095981_1 (sequence is synthesized)
ctgctgctcggtgccactatcttccagctgctagagaggcaggcggaggctcagtccagggaccagtttcagttggagaagctgcgcttcctggagaactacacctgcctggaccagtgg

SEQ ID NO: 105105 - DNA, 120 bp, Artificial Sequence
  ENSG00000095981_2 (sequence is synthesized)
gccatggagcagtttgtgcaggtcatcatggaagcctgggtgaaaggtgtgaaccccaaaggcaactctaccaaccccagcaactgggactttggcagcagtttcttctttgcaggcaca

SEQ ID NO: 105106 - DNA, 120 bp, Artificial Sequence
  ENSG00000095981_3 (sequence is synthesized)
gtcgtcactaccataggatatgggaacctggcacccagcacagaggcaggtcaggtcttctgtgtcttctatgccctgttgggcatcccgcttaacgtgatcttcctcaaccacctgggc

SEQ ID NO: 105107 - DNA, 120 bp, Artificial Sequence
  ENSG00000095981_4 (sequence is synthesized)
gccgccattgaaagatgggaggaccgtcccaggcgctcccaggtactgcaagtcctgggcctggctctgttcctgaccctggggacgctggtcattctcatcttcccacccatggtcttc

SEQ ID NO: 105108 - DNA, 120 bp, Artificial Sequence
  ENSG00000095981_5 (sequence is synthesized)
agccatgtggagggctggagcttcagcgagggcttctactttgctttcatcactctcagcaccattggctttggggactatgttgttggcacagaccccagcaagcattatatctcagtg

SEQ ID NO: 105109 - DNA, 120 bp, Artificial Sequence
  ENSG00000095981_6 (sequence is synthesized)
tatcggagcctggcagccatctggatcctcctgggcctggcgtggctggcgctgatcctcccactgggccccctgcttctgcacagatgctgccagctctggctgctcagtaggggcctc

SEQ ID NO: 105110 - DNA, 120 bp, Artificial Sequence
  ENSG00000095981_7 (sequence is synthesized)
ggcgtcaaggatggggcagcctctgaccccagtgggctccccaggcctcagaagatccccatctctgcatgaggcccccggggggggcccagaaacccctttcatcctccccagtcccac

SEQ ID NO: 105111 - DNA, 120 bp, Artificial Sequence
  ENSG00000095981_8 (sequence is synthesized)
aacttcatcactccctctgggctcctgccttctcaagagcctttccaaacaccccatgggaagccagagagccagcagatcccaggatccttccagaaagtgagctccatgaacgtctgg

SEQ ID NO: 105112 - DNA, 120 bp, Artificial Sequence
  ENSG00000095981_9 (sequence is synthesized)
cctctctcaggaatgcattctccaggtctggcctttcccctgccagactgcaacatccctgaccaggagagatttagaccactccatcccggggcctggaaattttggcctttgcctctc

SEQ ID NO: 105113 - DNA, 120 bp, Artificial Sequence
  ENSG00000095981_10 (sequence is synthesized)
ccatcatccaacagcaagtgggctcctatgtggctgggttcctctgcacaggtctgaggcaaggctgtggagccaaggcggctccaggcaggagacccaggagaggctctacagcagcaa

SEQ ID NO: 105114 - DNA, 120 bp, Artificial Sequence
  ENSG00000095981_11 (sequence is synthesized)
gaggagtccaagtcacaccccaggacttccccatatccaagaaaggactgggaagctgaggacccacggactcttcacacagcctagacgcttcctccactccaggtagagggatttcgg

SEQ ID NO: 105115 - DNA, 120 bp, Artificial Sequence
  ENSG00000095981_12 (sequence is synthesized)
gggccttctcagaagcaaggagtggacaagcctcttggttaaggctcctcttacctcccaagctcatggacaagtggcaatcagctggggtccctcttttggggtacaaaggaaaggaca

SEQ ID NO: 105116 - DNA, 120 bp, Artificial Sequence
  ENSG00000095981_13 (sequence is synthesized)
gtgtgggagacccaaggtggtcttgagattgacagacagcaagtccttggagatagcccccgagtccaagaacttaggcaggggccccaagacaataaagttggtctctactatctccta

SEQ ID NO: 105117 - DNA, 120 bp, Artificial Sequence
  ENSG00000095981_14 (sequence is synthesized)
cagccttcaagggtgaagacgctgggggcggccgagagagcccactggggcctggacagagtgagcacacctatccgatttagcccagaaacatctatccaacttggagacagagagaga

SEQ ID NO: 105118 - DNA, 120 bp, Artificial Sequence
  ENSG00000096006_0 (sequence is synthesized)
atatacggctctaaccttctctctctgcaccttccttctgtcaatagatgaaacaaatacttcatcctgctctggaaaccactgcaatgacattattcccagtgctgttgttcctggttg

SEQ ID NO: 105119 - DNA, 120 bp, Artificial Sequence
  ENSG00000096006_1 (sequence is synthesized)
ctgggctgcttccatcttttccagcaaatgaagataaggatcccgcttttactgctttgttaaccacccaaacacaagtgcaaagggagattgtgaataagcacaatgaactgaggagag

SEQ ID NO: 105120 - DNA, 120 bp, Artificial Sequence
  ENSG00000096006_2 (sequence is synthesized)
cagtatctccccctgccagaaacatgctgaagatggaatggaacaaagaggctgcagcaaatgcccaaaagtgggcaaaccagtgcaattacagacacagtaacccaaaggatcgaatga

SEQ ID NO: 105121 - DNA, 120 bp, Artificial Sequence
  ENSG00000096006_3 (sequence is synthesized)
caagtctaaaatgtggtgagaatctctacatgtcaagtgcctccagctcatggtcacaagcaatccaaagctggtttgatgagtacaatgattttgactttggtgtagggccaaagactc

SEQ ID NO: 105122 - DNA, 120 bp, Artificial Sequence
  ENSG00000096006_4 (sequence is synthesized)
ccaacgcagtggttggacattatacacaggttgtttggtactcttcatacctcgttggatgtggaaatgcctactgtcccaatcaaaaagttctaaaatactactatgtttgccaatatt

SEQ ID NO: 105123 - DNA, 120 bp, Artificial Sequence
  ENSG00000096006_5 (sequence is synthesized)
gtcctgctggtaattgggctaatagactatatgtcccttatgaacaaggagcaccttgtgccagttgcccagataactgtgacgatggactatgcaccaatggttgcaagtacgaagatc

SEQ ID NO: 105124 - DNA, 120 bp, Artificial Sequence
  ENSG00000096006_6 (sequence is synthesized)
tctatagtaactgtaaaagtttgaagctcacattaacctgtaaacatcagttggtcagggacagttgcaaggcctcctgcaattgttcaaacagcatttattaaatacgcattacacacc

SEQ ID NO: 105125 - DNA, 120 bp, Artificial Sequence
  ENSG00000096006_7 (sequence is synthesized)
gagtagggctatgtagagaggagtcagattatctacttagatttggcatctacttagatttaacatatactagctgagaaattgtaggcatgtttgatacacatttgatttcaaatgttt

SEQ ID NO: 105126 - DNA, 120 bp, Artificial Sequence
  ENSG00000096006_8 (sequence is synthesized)
ttcttctggatctgctttttattttacaaaaatatttttcatacaaatggttaaaaagaaacaaaatctataacaacaactttggatttttatatataaactttgtgatttaaatttact

SEQ ID NO: 105127 - DNA, 120 bp, Artificial Sequence
  ENSG00000096006_9 (sequence is synthesized)
agggtgaaaattttgaaagttgtattctcatatgactaagttcactaaaaccctggattgaaagtgaaaattatgttcctagaacaaaatgtacaaaaagaacaatataattttcacatg

SEQ ID NO: 105128 - DNA, 120 bp, Artificial Sequence
  ENSG00000096006_10 (sequence is synthesized)
aacccttggctgtagttgcctttcctagctccactctaaggctaagcatcttcaaagacgttttcccatatgctgtcttaattcttttcactcattcacccttcttcccaatcatctggc

SEQ ID NO: 105129 - DNA, 120 bp, Artificial Sequence
  ENSG00000096006_11 (sequence is synthesized)
tggcatcctcacaattgagttgaagctgttcctcctaaaacaatcctgacttttattttgccaaaatcaatacaatcctttgaattttttatctgcataaattttacagtagaatatgat

SEQ ID NO: 105130 - DNA, 120 bp, Artificial Sequence
  ENSG00000096006_12 (sequence is synthesized)
caaaccttcatttttaaacctctcttctctttgacaaaacttccttaaaaaagaatacaagataatataggtaaataccctccactcaaggaggtagaactcagtcctctcccttgtgag

SEQ ID NO: 105131 - DNA, 120 bp, Artificial Sequence
  ENSG00000096006_13 (sequence is synthesized)
tcttcactaaaatcagtgactcacttccaaagagtggagtatggaaagggaaacatagtaactttacaggggagaaaaatgacaaatgacgtcttcaccaagtgatcaaaattaacgtca

SEQ ID NO: 105132 - DNA, 120 bp, Artificial Sequence
  ENSG00000096006_14 (sequence is synthesized)
ccagtgataagtcattcagatttgttctagataatctttctaaaaattcataatcccaatctaattatgagctaaaacatccagcaaactcaagttgaaggacattctacaaaatatccc

SEQ ID NO: 105133 - DNA, 120 bp, Artificial Sequence
  ENSG00000096006_15 (sequence is synthesized)
tggggtattttagagtattcctcaaaactgtaaaaatcatggaaaataagggaatcctgagaaacaatcacagaccacatgagactaaggagacatgtgagccaaatgcaatgtgcttct

SEQ ID NO: 105134 - DNA, 120 bp, Artificial Sequence
  ENSG00000096006_16 (sequence is synthesized)
tggatcagatcctggaacagaaaaagatcagtaatgaaaaaactgatgaagtctgaatagaatctggagtatttttaacagtagtgttgatttcttaatcttgataaatatagcagggta

SEQ ID NO: 105135 - DNA, 120 bp, Artificial Sequence
  ENSG00000096006_17 (sequence is synthesized)
atgtaagatgataacgttagagaaactgaaactgggtgagggctatctaggaattctctgtactatcttaccaaattttcggtaagtctaagaaagcaatgcaaaataaaaagtgtcttg

SEQ ID NO: 105136 - DNA, 120 bp, Artificial Sequence
  ENSG00000096006_18 (sequence is synthesized)
accttccttctgtcaatagatgaaacaaatacttcatcctgctctggaaaccactgcatgtaccaatcattttaatgcagatccctgttccaccggttttgttttcccagcaatgacatt

SEQ ID NO: 105137 - DNA, 120 bp, Artificial Sequence
  ENSG00000096006_19 (sequence is synthesized)
aaaacaggaaataggtgtttcatatatacggctctaaccttctctctctgcaccttccttctgtcaatagatgaaacaaatacttcatcctgctctggaaaccactgatccctgttccac

SEQ ID NO: 105138 - DNA, 120 bp, Artificial Sequence
  ENSG00000096060_0 (sequence is synthesized)
gggccggctcgcgggcgctgccagtctcgggcggcggtgtccggcgcgcgggcggcctgctgggcgggctgaagggttagcggagcacgggcaaggcggagagtgacggagtcggcgagc

SEQ ID NO: 105139 - DNA, 120 bp, Artificial Sequence
  ENSG00000096060_1 (sequence is synthesized)
ccccgcggcgacaggttctctacttaaaagacaatgactactgatgaaggtgccaagaacaatgaagaaagccccacagccactgttgctgagcagggagaggatattacctccaaaaaa

SEQ ID NO: 105140 - DNA, 120 bp, Artificial Sequence
  ENSG00000096060_2 (sequence is synthesized)
gacaggggagtattaaagattgtcaaaagagtggggaatggtgaggaaacgccgatgattggagacaaagtttatgtccattacaaaggaaaattgtcaaatggaaagaagtttgattcc

SEQ ID NO: 105141 - DNA, 120 bp, Artificial Sequence
  ENSG00000096060_3 (sequence is synthesized)
agtcatgatagaaatgaaccatttgtctttagtcttggcaaaggccaagtcatcaaggcatgggacattggggtggctaccatgaagaaaggagagatatgccatttactgtgcaaacca

SEQ ID NO: 105142 - DNA, 120 bp, Artificial Sequence
  ENSG00000096060_4 (sequence is synthesized)
gaatatgcatatggctcggctggcagtctccctaaaattccctcgaatgcaactctcttttttgagattgagctccttgatttcaaaggagaggatttatttgaagatggaggcattatc

SEQ ID NO: 105143 - DNA, 120 bp, Artificial Sequence
  ENSG00000096060_5 (sequence is synthesized)
cggagaaccaaacggaaaggagagggatattcaaatccaaacgaaggagcaacagtagaaatccacctggaaggccgctgtggtggaaggatgtttgactgcagagatgtggcattcact

SEQ ID NO: 105144 - DNA, 120 bp, Artificial Sequence
  ENSG00000096060_6 (sequence is synthesized)
gtgggcgaaggagaagaccacgacattccaattggaattgacaaagctctggagaaaatgcagcgggaagaacaatgtattttatatcttggaccaagatatggttttggagaggcaggg

SEQ ID NO: 105145 - DNA, 120 bp, Artificial Sequence
  ENSG00000096060_7 (sequence is synthesized)
aagcctaaatttggcattgaacctaatgctgagcttatatatgaagttacacttaagagcttcgaaaaggccaaagaatcctgggagatggataccaaagaaaaattggagcaggctgcc

SEQ ID NO: 105146 - DNA, 120 bp, Artificial Sequence
  ENSG00000096060_8 (sequence is synthesized)
attgtcaaagagaagggaaccgtatacttcaagggaggcaaatacatgcaggcggtgattcagtatgggaagatagtgtcctggttagagatggaatatggtttatcagaaaaggaatcg

SEQ ID NO: 105147 - DNA, 120 bp, Artificial Sequence
  ENSG00000096060_9 (sequence is synthesized)
aaagcttctgaatcatttctccttgctgcctttctgaacctggccatgtgctacctgaagcttagagaatacaccaaagctgttgaatgctgtgacaaggcccttggactggacagtgcc

SEQ ID NO: 105148 - DNA, 120 bp, Artificial Sequence
  ENSG00000096060_10 (sequence is synthesized)
aatgagaaaggcttgtataggaggggtgaagcccagctgctcatgaacgagtttgagtcagccaagggtgactttgagaaagtgctggaagtaaacccccagaataaggctgcaagactg

SEQ ID NO: 105149 - DNA, 120 bp, Artificial Sequence
  ENSG00000096060_11 (sequence is synthesized)
cagatctccatgtgccagaaaaaggccaaggagcacaacgagcgggaccgcaggatatacgccaacatgttcaagaagtttgcagagcaggatgccaaggaagaggccaataaagcaatg

SEQ ID NO: 105150 - DNA, 120 bp, Artificial Sequence
  ENSG00000096060_12 (sequence is synthesized)
ggcaagaagacttcagaaggggtcactaatgaaaaaggaacagacagtcaagcaatggaagaagagaaacctgagggccacgtatgacgccacgccaaggagggaagagtcccagtgaac

SEQ ID NO: 105151 - DNA, 120 bp, Artificial Sequence
  ENSG00000096060_13 (sequence is synthesized)
tcggcccctcctcaatgggctttcccccaactcaggacagaacagtgtttaatgtaaagtttgttatagtctatgtgattctggaagcaaatggcaaaaccagtagcttcccaaaaacag

SEQ ID NO: 105152 - DNA, 120 bp, Artificial Sequence
  ENSG00000096060_14 (sequence is synthesized)
cccccctgctgctgcccggagggttcactgaggggtggcacgggaccactccaggtggaacaaacagaaatgactgtggtgtggagggagtgagccagcagcttaagtccagctcatttc

SEQ ID NO: 105153 - DNA, 120 bp, Artificial Sequence
  ENSG00000096060_15 (sequence is synthesized)
acaatgtggggctgttaggttttacctttgaactttcatagcactgcagaaacctttaaaaaaaaaatgcttcatgaatttctcctttcctacagttgggtagggtaggggaaggaggat

SEQ ID NO: 105154 - DNA, 120 bp, Artificial Sequence
  ENSG00000096060_16 (sequence is synthesized)
aagcttttgttttttaaatgactgaagtgctataaatgtagtctgttgcatttttaaccaacagaacccacagtagaggggtctcatgtctccccagttccacagcagtgtcacagacgt

SEQ ID NO: 105155 - DNA, 120 bp, Artificial Sequence
  ENSG00000096060_17 (sequence is synthesized)
gaaagccagaacctcagaggccacttgcttgctgacttagcctcctcccaaagtccccctcctcagccagcctccttgtgagagtggctttctaccacacacagcctgtccctgggggag

SEQ ID NO: 105156 - DNA, 120 bp, Artificial Sequence
  ENSG00000096060_18 (sequence is synthesized)
taattctgtcattcctaaaacacccttcagcaatgataatgagcagatgagagtttctggattagcttttcctattttcgatgaagttctgagatactgaaatgtgaaaagagcaatcag

SEQ ID NO: 105157 - DNA, 120 bp, Artificial Sequence
  ENSG00000096060_19 (sequence is synthesized)
aattgtgctttttctcccctcctctattccttttagggaataatattcaatacacagtacttcctcccagcattgctactgctcagcttcttctttcattctaatccttgctattaagaa

SEQ ID NO: 105158 - DNA, 120 bp, Artificial Sequence
  ENSG00000096060_20 (sequence is synthesized)
tttaagacttgtgcttacaatatttttgacctggagtggatctatttacatagtcatttaggatccatgcagctttttttgtctttttaagattattggctcataagcatatgtatactg

SEQ ID NO: 105159 - DNA, 120 bp, Artificial Sequence
  ENSG00000096060_21 (sequence is synthesized)
gtttatggaactttatttacactcctctatcatgcaaaaaaattttgactttttagtactaagcttaatttttaaaaacaaaatctgtagggttgacaaataaatagttgctcttctaca

SEQ ID NO: 105160 - DNA, 120 bp, Artificial Sequence
  ENSG00000096060_22 (sequence is synthesized)
ctaggggtttcacctgcaggtttgacacgcagttgctcgcttttcctgccctgtcaagcttctctgttctggcgtgagttgtgaaagagttgaagacagcttcccatgccggtacacagc

SEQ ID NO: 105161 - DNA, 120 bp, Artificial Sequence
  ENSG00000096060_23 (sequence is synthesized)
cagtagcctaaatctccagtacttgagctgaccattgaactagggcaagtcttaaatgtgtacatgtagttgaatttcagtccttacgggtaaacagattgagcatggctctctattccc

SEQ ID NO: 105162 - DNA, 120 bp, Artificial Sequence
  ENSG00000096060_24 (sequence is synthesized)
tcagcctaagaaacactcatgggaatgcatttggcaacccaaggaaccatttgcttaaacctggaacatctcacctttttaaatcctaaaaaacactggcagttatattttaaattagtt

SEQ ID NO: 105163 - DNA, 120 bp, Artificial Sequence
  ENSG00000096060_25 (sequence is synthesized)
tttatttttatgatggttttatcaaaagacttttattattagattgggacccccttcaaacctaaaaatcaagttatttccttttataatacttttcttccccatggaacaaatgggatc

SEQ ID NO: 105164 - DNA, 120 bp, Artificial Sequence
  ENSG00000096060_26 (sequence is synthesized)
aatttgtgagttttttcctttaatgataactaaaatccctctaatttctcatttatgcttttgtcttttttatgaaatatttcttttaaaagccccagtctcacctacgaaatatgaaga

SEQ ID NO: 105165 - DNA, 120 bp, Artificial Sequence
  ENSG00000096060_27 (sequence is synthesized)
gcaaaagctgattttgcttacttgctaaactgttgggaaagctctgtagagcatggttccagtgaggccaagattgaaatttgatactaaaaaggccacctagctttttgcagataacaa

SEQ ID NO: 105166 - DNA, 120 bp, Artificial Sequence
  ENSG00000096060_28 (sequence is synthesized)
acaagaaagctattccaagactcagatgatgccagctgtctcccacgtgtgtattatggttcaccagggggaactggcaaaagtgtgtgtggggaggggaagggtgtgtgagtggttctg

SEQ ID NO: 105167 - DNA, 120 bp, Artificial Sequence
  ENSG00000096060_29 (sequence is synthesized)
agcaaataactacagggtgcccattaccactcaagaagacacttcacgtattcttgtatcaaattcaataatcttaaacaatttgtgtagaagtccacagacatctttcaaccacctttt

SEQ ID NO: 105168 - DNA, 120 bp, Artificial Sequence
  ENSG00000096060_30 (sequence is synthesized)
aggctgcatatggattgccaagtcagcatatgaggaattaaagacattgtttttaaaaaaaaaaaatcatttagatgcacttttttgtgtgttctttaaataaatccaaaaaaaatgtga

SEQ ID NO: 105169 - DNA, 120 bp, Artificial Sequence
  ENSG00000096060_31 (sequence is synthesized)
agaacaaactcctacctctgtttgcaactaagagttacatcccccatgccaagaccttccgaggcgtcccagagggggaaattcctcgctgccggactgcgcccacccttgaggacctca

SEQ ID NO: 105170 - DNA, 120 bp, Artificial Sequence
  ENSG00000096060_32 (sequence is synthesized)
cattctctttgggcagagcggaagccagacagagacagggactacgaagcgacaatccccagccctgtgtgtgcaaggagcccccgaggggcaggcagccacgctgcagaaggctagact

SEQ ID NO: 105171 - DNA, 120 bp, Artificial Sequence
  ENSG00000096060_33 (sequence is synthesized)
agtctcgggcggcggtgtccggcgcgcgggcggcctgctgggcgggctgaagggttagcggagcacgggcaaggcggagagtgacggagtcggcgagcccccgcggcgacaggtaccggc

SEQ ID NO: 105172 - DNA, 120 bp, Artificial Sequence
  ENSG00000096060_34 (sequence is synthesized)
gatggataccaaagaaaaattggagcaggctgccattgtcaaagagaagggaaccgtatacttcaaggtgtgtgagtccctatgcaatcctttccatctcaaagaatttattcaagtgtt

SEQ ID NO: 105173 - DNA, 120 bp, Artificial Sequence
  ENSG00000096060_35 (sequence is synthesized)
ggtgaattgtgctgatattccctactctgaattttgtcaacactgcttggtaagaataagctgcaatttttataaatctgtcattttcaatatgaaaaatggtgagaaaacaatcatgtg

SEQ ID NO: 105174 - DNA, 120 bp, Artificial Sequence
  ENSG00000096060_36 (sequence is synthesized)
gaaaaaaaaaaaagtacagattcctcttttacacattctgctctagattgtaaccttccatacaggcagaccaggtctggcatccccacccaccacagtatcactcactcctaaagcatc

SEQ ID NO: 105175 - DNA, 120 bp, Artificial Sequence
  ENSG00000096060_37 (sequence is synthesized)
ttgcttggtacatagttggcactcaacaagtgtttttggaatgaaaaaagaatgaatagaataattgttagcaaagaatggaattcataagggtaagtttcacatcatttttctttcttc

SEQ ID NO: 105176 - DNA, 120 bp, Artificial Sequence
  ENSG00000096060_38 (sequence is synthesized)
gtttcacatcatttttctttcttcctttttttttttttgtatgagagacagggtctccctttctttcccaggctggtctcaaacttctagcctcaagcaatcctcccacctcagcttccc

SEQ ID NO: 105177 - DNA, 120 bp, Artificial Sequence
  ENSG00000096060_39 (sequence is synthesized)
gccactgcaccgggcccatcttcctttagactgtcttgatgaagtcactagagcatatgataaaaggagagaggacatgcacaaatttcaaaacaaactgacaggagagtattgattgct

SEQ ID NO: 105178 - DNA, 120 bp, Artificial Sequence
  ENSG00000096060_40 (sequence is synthesized)
tctaatggccaagatgattcctgcacacttgcttttatgaggaatctccggatattcctgaatgatattcatcataaattgcttctcagaaacccttcttggagcaactaggagtgtgat

SEQ ID NO: 105179 - DNA, 120 bp, Artificial Sequence
  ENSG00000096060_41 (sequence is synthesized)
attttctcacttagatcttaaacctctagatgtaagaaaaaaagaaaccgcccttcattctgttttaatcagtgttctacccattgcttccccaccccaaatatatgccttctccatgtc

SEQ ID NO: 105180 - DNA, 120 bp, Artificial Sequence
  ENSG00000096060_42 (sequence is synthesized)
aagcagaaagggcttagtgatgagaattagagggagaatgggagttctgtcaaggtttctttcgttttctgccactgcaatacagaaattagatgtttttcagcagtataaagcagtgag

SEQ ID NO: 105181 - DNA, 120 bp, Artificial Sequence
  ENSG00000096060_43 (sequence is synthesized)
gcataagtgtactttaacaagtctttatggggcatctgctataagacatgctattattaagttacaaccttgtcaggagggaggagtggcaatgttaatccaaatgaaacaactagagaa

SEQ ID NO: 105182 - DNA, 120 bp, Artificial Sequence
  ENSG00000096060_44 (sequence is synthesized)
ttatgtaagaatatataatcaacccaaaattaacacagccagagggcaccatgtgttttcagaatttgagctgagacaatattgggtcatgaaatcagttttgtggaagtgtattgcaat

SEQ ID NO: 105183 - DNA, 120 bp, Artificial Sequence
  ENSG00000096060_45 (sequence is synthesized)
atgttataaggatcagttttgttgcataaaactttgcttgtgtatgagtaagtactggattgcatatttcttactgtgggtggtattcaaacaaattttaaatcatgggtttagataagt

SEQ ID NO: 105184 - DNA, 120 bp, Artificial Sequence
  ENSG00000096060_46 (sequence is synthesized)
ataaatatataaatatgttatttatcattatttactatgtatactaaactcttatggatcaccagaaagcatgggggtatgatagaataagctcagaattgggaaaaatgggctttattg

SEQ ID NO: 105185 - DNA, 120 bp, Artificial Sequence
  ENSG00000096060_47 (sequence is synthesized)
ctcttcaaatgatttagtcatttaaggtccaaagaggttatattttcaagtgaaaaataggggagttagatgttccccaagtttctttccagcctgaatttctgtgagtttctaaactct

SEQ ID NO: 105186 - DNA, 120 bp, Artificial Sequence
  ENSG00000096060_48 (sequence is synthesized)
caagaacaagtgttatttttttggttttgttttgtttttaattctaattgaggtatattggatacttctaaactattcaagtaagattccaagtgggttatttgtatatccaaatacata

SEQ ID NO: 105187 - DNA, 120 bp, Artificial Sequence
  ENSG00000096060_49 (sequence is synthesized)
atacactagagggaaaaatgtttctacaaaatttcttaagatcgtgagtccttaacagtattttctatatttccgaagtccataaaaatccttaactatattttatatatttcctcaata

SEQ ID NO: 105188 - DNA, 120 bp, Artificial Sequence
  ENSG00000096060_50 (sequence is synthesized)
cttccaaatagaatattaacagtttgggaagatttgaggcttttggcctttgactagaattatatcgattcagtgtagtaaaacagctcagctattcagaggctctaatcggtgctatga

SEQ ID NO: 105189 - DNA, 120 bp, Artificial Sequence
  ENSG00000096060_51 (sequence is synthesized)
tacagaattttggagaacattattggtaatgaaataatgttatgaagccatctgtcatatagctgtgttctgaatatatacagagagatggccagaattagtgatcagtagcagaaagca

SEQ ID NO: 105190 - DNA, 120 bp, Artificial Sequence
  ENSG00000096060_52 (sequence is synthesized)
atgagtgtctgtacagttacttaactttgttgcttatcagcatcacaactgcaagagtgatactattatgaacctacttaaaattaccaatctttggataaaatctggatcagcagtcac

SEQ ID NO: 105191 - DNA, 120 bp, Artificial Sequence
  ENSG00000096060_53 (sequence is synthesized)
acacatggaaaaaattatttttaacatggaatttgataggcaaaatttttcaaaacattagtccattggggaaaaattaatgaaaggttcaaaaccactgacctgagacttttctcccag

SEQ ID NO: 105192 - DNA, 120 bp, Artificial Sequence
  ENSG00000096060_54 (sequence is synthesized)
aatgtctctgaacattttgtaccactaaaaacttccctggaggcacctttataattataggtaaaagatcccagcagtagtcctagcgttagctgtaaaacttcaaaatggttagtagat

SEQ ID NO: 105193 - DNA, 120 bp, Artificial Sequence
  ENSG00000096060_55 (sequence is synthesized)
agtttcctgtacatattcccttcccaactcagggcaggtttcaatctgccatactgccctcccgggccttgtctttccagggtgtctgacttggcatgttatgcatttgcacagagtcca

SEQ ID NO: 105194 - DNA, 120 bp, Artificial Sequence
  ENSG00000096060_56 (sequence is synthesized)
gatgtgtaggtgagagcagagatgggctgaactaaagatctgtatttcatgccatctgcatattggaattctgtttccattgatctgttggtttggtttatacctaaatgggtaaagcct

SEQ ID NO: 105195 - DNA, 120 bp, Artificial Sequence
  ENSG00000096060_57 (sequence is synthesized)
taaagtcctcatttcaacctctgaatactaaagagaagaaaaatagagaactctatttggctctgaaaataattattaagtacaggtaacagcataatattaagccaggcattgtgcaag

SEQ ID NO: 105196 - DNA, 120 bp, Artificial Sequence
  ENSG00000096060_58 (sequence is synthesized)
cgagttaaacagacacgatttttgccctcatagctgacagtgttctgcaggacaggagcattaactcacacctggtcagtgtttttcttttttctgacttggcagcagagtggcaagaag

SEQ ID NO: 105197 - DNA, 120 bp, Artificial Sequence
  ENSG00000096060_59 (sequence is synthesized)
gctaagaacactgaagtgatgtgggattcttgcgcccccttgtgcttctcctgggaagaaagcatttctaaaacaaactagttgaggagaattgttcaacctctaaactcttcagataaa

SEQ ID NO: 105198 - DNA, 120 bp, Artificial Sequence
  ENSG00000096060_60 (sequence is synthesized)
tcgggctttgctatattttcaccacccttgctgttccaagataccagtaatgtgatttagaaacaagccgtttatgactctaggatttgatgttttaaaaaaaattcctaagaagagtcc

SEQ ID NO: 105199 - DNA, 120 bp, Artificial Sequence
  ENSG00000096060_61 (sequence is synthesized)
accctgtctttcatctctttcctttagtgcagaatttttcaacctcagtactatcaacatttggagtgggataattcttgattgtgtggggctgtcttgtgcattgtagaatatttagca

SEQ ID NO: 105200 - DNA, 120 bp, Artificial Sequence
  ENSG00000096060_62 (sequence is synthesized)
gcattcctggcctctgcccattagatgccagtagcatcctacccagttatgacaactaaaaatgcctccagacctgccaggtgttccctggggggcaaaatcaccccccagttgagaact

SEQ ID NO: 105201 - DNA, 120 bp, Artificial Sequence
  ENSG00000096060_63 (sequence is synthesized)
gctttagtacctcagaagcagggagtacaagacagacttttcgctaattggaagttgaagtctaaataaagttacatgatatatatgcaagagctttcaaaaaattaaaatgccctatgt

SEQ ID NO: 105202 - DNA, 120 bp, Artificial Sequence
  ENSG00000096060_64 (sequence is synthesized)
gaaggaactattaagaagtctaatacctgttttttgtgttttgttttgttttaccatggccttctaccattctgattattcagaacttattgaaatgttaagatctaggtttttgtcctc

SEQ ID NO: 105203 - DNA, 120 bp, Artificial Sequence
  ENSG00000096060_65 (sequence is synthesized)
cctggctcttcttttctttccctatacaatatattaggagataatcagaaaagttaagttaatcaatgcattagagagggaggaggagagaggatgaagaaatgaggcatgacaggggaa

SEQ ID NO: 105204 - DNA, 120 bp, Artificial Sequence
  ENSG00000096060_66 (sequence is synthesized)
atgcctgtccttcctatctcatctcagtgaaacaacacttttcatttccacccacacattttttgctcccaatgatagcaaaaggttttgttgttggtattgtttttagagagagagggt

SEQ ID NO: 105205 - DNA, 77 bp, Artificial Sequence
  ENSG00000096060_67 (sequence is synthesized)
tttagagagagcatagctaactgcagcttcgaactcctggacttaagagatcctcctgcctcagcttcccaaagtgc

SEQ ID NO: 105206 - DNA, 120 bp, Artificial Sequence
  ENSG00000096060_68 (sequence is synthesized)
agccaccacaccactttagaaaaagtcttgattccatatttacattcctttgatttcaatatttactcaacaaacctttattaaagacctcttggtgctaaaccctgaatattccaaaag

SEQ ID NO: 105207 - DNA, 120 bp, Artificial Sequence
  ENSG00000096060_69 (sequence is synthesized)
ggagaggacaatgctgcctgtcctcaaagaccagcaagagaaaaggcagtgacagaaagaaaatgccgacctgaaactggtgaggactttattcttttttttttgtagcatccaaaaaag

SEQ ID NO: 105208 - DNA, 120 bp, Artificial Sequence
  ENSG00000096060_70 (sequence is synthesized)
gagtggtaggcctaagactatgacaaaatttaagtattgtcttagcttgggctgccacagtaaaataccatacactgggtggcttcaacaacaggaatttacttctggagactgtaagtc

SEQ ID NO: 105209 - DNA, 120 bp, Artificial Sequence
  ENSG00000096060_71 (sequence is synthesized)
ccagatcaaggtgttagcaggatcagtgtctggggagggcctctcctctggttccttgtagctcccttcttgctgtgttctcacatggcctttccacatgcatgtgagtggagagagggc

SEQ ID NO: 105210 - DNA, 120 bp, Artificial Sequence
  ENSG00000096060_72 (sequence is synthesized)
agagggcagcaagcacccgagtttcttcttataaaggctctaatcccatcatgaggccccaccctcatgaccacatctaacctaattccctccccaaatgctccatctgcaaatatcaca

SEQ ID NO: 105211 - DNA, 120 bp, Artificial Sequence
  ENSG00000096060_73 (sequence is synthesized)
ttcggggtgagggcttcaacataggaatttaggatgggggacacaattcagtccatagcaaatctaatttcctcaagaatttcagcatttaaaataaaatgccctggtttcgtgttctta

SEQ ID NO: 105212 - DNA, 120 bp, Artificial Sequence
  ENSG00000096060_74 (sequence is synthesized)
tgaatgacctgtatcacacacttctgaggcagagagggtgacagactttgattttagtgccagtcttccctctcctaagtgagtgacttgggaagaaggatgttcgagggatgtagcctg

SEQ ID NO: 105213 - DNA, 120 bp, Artificial Sequence
  ENSG00000096060_75 (sequence is synthesized)
gccctcattcacacccaggccctccagctggaacaggtctgccccatcttcatcaccagaaaatccacaccagggcttcctttctacaggcagagctcgtttcttacatcacccacttga

SEQ ID NO: 105214 - DNA, 120 bp, Artificial Sequence
  ENSG00000096060_76 (sequence is synthesized)
agtcctgtatcacaggcatgtcctcttagacctgctctatggtttttctcttactcagactccttgggtgagggttggagtatttgtggggagagacaactcggcagtgagatgtacgcg

SEQ ID NO: 105215 - DNA, 120 bp, Artificial Sequence
  ENSG00000096060_77 (sequence is synthesized)
ctgcttgggctgtggtaaatcctagtaacatggtcttaacactgttggtcaggcattgaatttaatgtcctaataggtctggctgctcctctgccatctggcaggatgtatcatctgtgg

SEQ ID NO: 105216 - DNA, 120 bp, Artificial Sequence
  ENSG00000096060_78 (sequence is synthesized)
ttttgagcttatcacctcctcaaaggagaatccccacttgtactcctgtttctatttgcgtatttaccagcgattccccagtgctttcatttaccttaaaatcacagtggacacattgtc

SEQ ID NO: 105217 - DNA, 120 bp, Artificial Sequence
  ENSG00000096060_79 (sequence is synthesized)
gggattacaggtatgagccactgtgctcagcccccagcgtttctcatatgagcatgtatatatatatatattatatatatattatatatgtttatatttatatatattatatataactga

SEQ ID NO: 105218 - DNA, 120 bp, Artificial Sequence
  ENSG00000096060_80 (sequence is synthesized)
tgtttatatttatatatattatatataactgacagacctttctgatgtatattgttttatagttgttatttatgttgtatgctactatccaactattcatattcccattgcctatagatc

SEQ ID NO: 105219 - DNA, 120 bp, Artificial Sequence
  ENSG00000096060_81 (sequence is synthesized)
tatagatcaggggtcagcaaactacagtttgctggccaaatctggtccctgcctgtttttgtaagtacagtttaactgaaacacagctgcacccattgatttacatactgtctagagcag

SEQ ID NO: 105220 - DNA, 120 bp, Artificial Sequence
  ENSG00000096060_82 (sequence is synthesized)
cttttgcactacaaatgataagaatttagtagttgcaacagagactggttcaaataggattggctgtgtttggaactagcacttgccagaatgtaatatttgctgtgaagtgctgaaaag

SEQ ID NO: 105221 - DNA, 120 bp, Artificial Sequence
  ENSG00000096060_83 (sequence is synthesized)
tgctgtgaagtgctgaaaagaaaagtaacttccttttcatttttttagtggcatagtctaaaactgctcacaatccttttgaaagactaaagaataggccaggtgtggtggctcatgcct

SEQ ID NO: 105222 - DNA, 120 bp, Artificial Sequence
  ENSG00000096063_0 (sequence is synthesized)
gccactcgagtgcgcaggcgcctggcgattaccggtctcaccatggagcggaaagtgcttgcgctccaggcccgaaagaaaaggaccaaggccaagaaggacaaagcccaaaggaaatct

SEQ ID NO: 105223 - DNA, 120 bp, Artificial Sequence
  ENSG00000096063_1 (sequence is synthesized)
gaaactcagcaccgaggctctgctccccactctgagagtgatctaccagagcaggaagaggagattctgggatctgatgatgatgagcaagaagatcctaatgattattgtaaaggaggt

SEQ ID NO: 105224 - DNA, 120 bp, Artificial Sequence
  ENSG00000096063_2 (sequence is synthesized)
tatcatcttgtgaaaattggagatctattcaatgggagataccatgtgatccgaaagttaggctggggacacttttcaacagtatggttatcatgggatattcaggggaagaaatttgtg

SEQ ID NO: 105225 - DNA, 120 bp, Artificial Sequence
  ENSG00000096063_3 (sequence is synthesized)
gcaatgaaagtagttaaaagtgctgaacattacactgaaacagcactagatgaaatccggttgctgaagtcagttcgcaattcagaccctaatgatccaaatagagaaatggttgttcaa

SEQ ID NO: 105226 - DNA, 120 bp, Artificial Sequence
  ENSG00000096063_4 (sequence is synthesized)
ctactagatgactttaaaatatcaggagttaatggaacacatatctgcatggtatttgaagttttggggcatcatctgctcaagtggatcatcaaatccaattatcaggggcttccactg

SEQ ID NO: 105227 - DNA, 120 bp, Artificial Sequence
  ENSG00000096063_5 (sequence is synthesized)
ccttgtgtcaaaaaaattattcagcaagtgttacagggtcttgattatttacataccaagtgccgtatcatccacactgacattaaaccagagaacatcttattgtcagtgaatgagcag

SEQ ID NO: 105228 - DNA, 120 bp, Artificial Sequence
  ENSG00000096063_6 (sequence is synthesized)
tacattcggaggctggctgcagaagcaacagaatggcagcgatctggagctcctccgccttccggatctgcagtcagtactgctccccagcctaaaccagctgacaaaatgtcaaagaat

SEQ ID NO: 105229 - DNA, 120 bp, Artificial Sequence
  ENSG00000096063_7 (sequence is synthesized)
aagaagaagaaattgaagaagaagcagaagcgccaggcagaattactagagaagcgaatgcaggaaattgaggaaatggagaaagagtcgggccctgggcaaaaaagaccaaacaagcaa

SEQ ID NO: 105230 - DNA, 120 bp, Artificial Sequence
  ENSG00000096063_8 (sequence is synthesized)
gaagaatcagagagtcctgttgaaagacccttgaaagagaacccacctaataaaatgacccaagaaaaacttgaagagtcaagtaccattggccaggatcaaacgcttatggaacgtgat

SEQ ID NO: 105231 - DNA, 120 bp, Artificial Sequence
  ENSG00000096063_9 (sequence is synthesized)
acagagggtggtgcagcagaaattaattgcaatggagtgattgaagtcattaattatactcagaacagtaataatgaaacattgagacataaagaggatctacataatgctaatgactgt

SEQ ID NO: 105232 - DNA, 120 bp, Artificial Sequence
  ENSG00000096063_10 (sequence is synthesized)
gatgtccaaaatttgaatcaggaatctagtttcctaagctcccaaaatggagacagcagcacatctcaagaaacagactcttgtacacctataacatctgaggtgtcagacaccatggtg

SEQ ID NO: 105233 - DNA, 120 bp, Artificial Sequence
  ENSG00000096063_11 (sequence is synthesized)
tgccagtcttcctcaactgtaggtcagtcattcagtgaacaacacattagccaacttcaagaaagcattcgggcagagataccctgtgaagatgaacaagagcaagaacataacggacca

SEQ ID NO: 105234 - DNA, 120 bp, Artificial Sequence
  ENSG00000096063_12 (sequence is synthesized)
ctggacaacaaaggaaaatccacggctggaaattttcttgttaatccccttgagccaaaaaatgcagaaaagctcaaggtgaagattgctgaccttggaaatgcttgttgggtgcacaaa

SEQ ID NO: 105235 - DNA, 120 bp, Artificial Sequence
  ENSG00000096063_13 (sequence is synthesized)
catttcactgaagatattcaaacaaggcaatatcgttccttggaagttctaatcggatctggctataatacccctgctgacatttggagcacggcatgcatggcctttgaactggccaca

SEQ ID NO: 105236 - DNA, 120 bp, Artificial Sequence
  ENSG00000096063_14 (sequence is synthesized)
ggtgactatttgtttgaacctcattcaggggaagagtacactcgagatgaagatcacattgcattgatcatagaacttctggggaaggtgcctcgcaagctcattgtggcaggaaaatat

SEQ ID NO: 105237 - DNA, 120 bp, Artificial Sequence
  ENSG00000096063_15 (sequence is synthesized)
tccaaggaatttttcaccaaaaaaggtgacctgaaacatatcacgaagctgaaaccttggggcctttttgaggttctagtggagaagtatgagtggtcgcaggaagaggcagctggcttc

SEQ ID NO: 105238 - DNA, 120 bp, Artificial Sequence
  ENSG00000096063_16 (sequence is synthesized)
acagatttcttactgcccatgttggagctgatccctgagaagagagccactgccgccgagtgtctccggcacccttggcttaactcctaagcccctgcccagcaccacagcagagatcac

SEQ ID NO: 105239 - DNA, 120 bp, Artificial Sequence
  ENSG00000096063_17 (sequence is synthesized)
acactgaccctccgcccttccccttcaagcattttcctcttcccttttcagggtgaagctcttccttcaagagtttctagatcttgttttttttttaatccaacatgttcatttgggttt

SEQ ID NO: 105240 - DNA, 120 bp, Artificial Sequence
  ENSG00000096063_18 (sequence is synthesized)
agccattgggcatcctaggtgaatttggccttggttgggctctgccaaagactaatggactaaaatgtgaaacagcctcttgccctgtacctttccttcccattaggacatcctttaaat

SEQ ID NO: 105241 - DNA, 120 bp, Artificial Sequence
  ENSG00000096063_19 (sequence is synthesized)
tataagcatcctttttgaaaagagctatgaaggtgtatgagcccatccttttattcattgactctaagagtcaaattttctagtgcatatcctattgccagcataaggatgaggaggggg

SEQ ID NO: 105242 - DNA, 120 bp, Artificial Sequence
  ENSG00000096063_20 (sequence is synthesized)
aaagggtcttaattctatgtacagcagagacattaaacttgctgtgtccgggctgcatcatcttcctggactgtttctgttgttctctgtgttcacattttttcctgcaacttttaagct

SEQ ID NO: 105243 - DNA, 120 bp, Artificial Sequence
  ENSG00000096063_21 (sequence is synthesized)
actgtcttttttaaatagctatatgaacaccaaatttgggtaccattttatcactgttcaaagcactgtcaaattcctttcatcctttaatagttaagatctttgaatcttcagtctgat

SEQ ID NO: 105244 - DNA, 120 bp, Artificial Sequence
  ENSG00000096063_22 (sequence is synthesized)
ttttaatgtaagcaaaaacagaaccattgaatagtaatttcttgagaacctcaggtgttctataaacagtcctttcctgtatgtcttctattaccctaagaccagagttattttggttgg

SEQ ID NO: 105245 - DNA, 120 bp, Artificial Sequence
  ENSG00000096063_23 (sequence is synthesized)
ttgttttgttttattttttgtttttgtatccatggctggcactttactcattgcacttgagtttattgccccataactaaaggatcaggatgatggtagaacggagatctgggtttcaga

SEQ ID NO: 105246 - DNA, 120 bp, Artificial Sequence
  ENSG00000096063_24 (sequence is synthesized)
gctttcccatttaagaaaaatagatcttgagattctgattcttttccaaacagtcccctgctttcatgtacagctttttctttaccttacccaaaattctggccttgaagcagttttcct

SEQ ID NO: 105247 - DNA, 120 bp, Artificial Sequence
  ENSG00000096063_25 (sequence is synthesized)
ctatggctttgcctttctgattttctcagaggctcgagtctttaatataaccccaaatgaaagaaccaaggggaggggtgggatggcacttttttttgttggtcttgttttgttttgttt

SEQ ID NO: 105248 - DNA, 120 bp, Artificial Sequence
  ENSG00000096063_26 (sequence is synthesized)
tttggttggttggttcgttattttttaagattagccattctctgctgctatttccctacataatgtcaatttttaaccataattttgacatgattgagatgtacttgaggcttttttgtt

SEQ ID NO: 105249 - DNA, 120 bp, Artificial Sequence
  ENSG00000096063_27 (sequence is synthesized)
ttaattgagaaaagactttgcaattttttttttaggatgagcctctcctagacttgacctagaatattacatattcctccagtaagtaatactgaagagcaaaagagaggcaggattggg

SEQ ID NO: 105250 - DNA, 120 bp, Artificial Sequence
  ENSG00000096063_28 (sequence is synthesized)
gtcacagccgcttcttcagcatggaccaagtgggccttggggattgcagcgttctcgaagtggctgtaggactcgaatttacagaaagccacagaggtgcaacttgaggctctgctagca

SEQ ID NO: 105251 - DNA, 120 bp, Artificial Sequence
  ENSG00000096063_29 (sequence is synthesized)
agccaccagtgaggctattgggtaaccacctttctatacaggagattggaatctactttgtcatttatccaccacagtgacaaaggaaaagtggtgccgttatgcaatccatttaactca

SEQ ID NO: 105252 - DNA, 120 bp, Artificial Sequence
  ENSG00000096063_30 (sequence is synthesized)
taaacatattactctgagtaactggccagccattcatcggatccttcattgggtactcctgaaatcagacatgttcctgtagaaagaattttaagttaggctttctatgcacctatcaag

SEQ ID NO: 105253 - DNA, 120 bp, Artificial Sequence
  ENSG00000096063_31 (sequence is synthesized)
aatcaagagaatagattgtatcaaacaacggcagggaaatccttcagcaattctaatccactttgggttttcagctgtttttacatctaaagcaatagactagaactgaattatcttcta

SEQ ID NO: 105254 - DNA, 120 bp, Artificial Sequence
  ENSG00000096063_32 (sequence is synthesized)
catagtaaaatcacaattgtggaattacaggaattctggtgatattaaggtgaaataacaaaacacaaaaggccctattttaacagttgatgtgacagtaagttttaatagaacctgtaa

SEQ ID NO: 105255 - DNA, 120 bp, Artificial Sequence
  ENSG00000096063_33 (sequence is synthesized)
cttcattttggaaatgcttctccaccaaataagggctttttcccctatttaaggagccagatggattgaaagatgtggaaataggcagctgtagatcttgatcttccaggtaccccatgt

SEQ ID NO: 105256 - DNA, 120 bp, Artificial Sequence
  ENSG00000096063_34 (sequence is synthesized)
acctttattgagcttaattataatactgtcaaattgccacgatctcactaaaggatttctatttgctgtcagttaaaaataaagccctaaatacatttttattctttctactgagggcat

SEQ ID NO: 105257 - DNA, 120 bp, Artificial Sequence
  ENSG00000096063_35 (sequence is synthesized)
tgtctgttttctttgtaaatgccgtacaataaacaaattatttaataacctacatgtttccaaaaatctctgttcatttgttgtccaaattgctctgccctgagtaaaaggaggaaaaga

SEQ ID NO: 105258 - DNA, 120 bp, Artificial Sequence
  ENSG00000096063_36 (sequence is synthesized)
ggtctcaccatggagcggaaaggtgagcggtggagcggcctccgccacgaggggcaatggtcgccggggcgaggcccgggtcagcgccgggagcttcgcttaactgccgcggttcggttc

SEQ ID NO: 105259 - DNA, 120 bp, Artificial Sequence
  ENSG00000096063_37 (sequence is synthesized)
taactgccgcggttcggttcccggacgtgcggcgcccctccactgaggtggcgccgccccacaccccctgcctctgggctgcgggtccgcgcccctcagtccgggcgtcctctggcgccg

SEQ ID NO: 105260 - DNA, 80 bp, Artificial Sequence
  ENSG00000096063_38 (sequence is synthesized)
ccttgttccccgccaggccggctcgcgccttggggccactccagggcccggcccttggcgggcgacgcagacccccaccc

SEQ ID NO: 105261 - DNA, 120 bp, Artificial Sequence
  ENSG00000096063_39 (sequence is synthesized)
gccggccgcctcgccggagcccgcagccgcccccgaggcaggccccgcagccgggcctggcgcccctgctgggtctccaccctcaccttggtcgcctcctttcctccacattcgcccttc

SEQ ID NO: 105262 - DNA, 120 bp, Artificial Sequence
  ENSG00000096063_40 (sequence is synthesized)
aaatagaacaaaactaaccttgccaggtttccaagcttggatctctaacactccttcaacgttcaccccggcgttcctccccgctgcgccccctccctctccttgccgccccctcctcgg

SEQ ID NO: 105263 - DNA, 120 bp, Artificial Sequence
  ENSG00000096063_41 (sequence is synthesized)
gagcaggtggtaggctccgcgcccaacgcgcaagcgcgcggcatcgtggggcgggggtggggcgggactgagggcggagtgtgagcgggctcggttttgggccgcggcgggagcgggagt

SEQ ID NO: 105264 - DNA, 120 bp, Artificial Sequence
  ENSG00000096063_42 (sequence is synthesized)
actcgagtgcgcaggcgcctggcgattaccggtctcaccatggagcggaaagtgcttgcgctccaggcccgaaagaaaaggaccaaggccaagaaggacaaagcccaaaggaagtgagtc

SEQ ID NO: 105265 - DNA, 120 bp, Artificial Sequence
  ENSG00000096063_43 (sequence is synthesized)
ttgtaccccaacatcccattctttggattttcctccggcaccttctctgctctggtttcacgtcttgaacgtgcaccgggtttgggcaccctgtggctgcagccacatggcctcggggca

SEQ ID NO: 105266 - DNA, 120 bp, Artificial Sequence
  ENSG00000096063_44 (sequence is synthesized)
ggaggaggaccagagcccgcccggtacctttcctccccaactccacagaggaggcacaaactcccctagcttggacctccccaccggagctggtagatcattatcggtctgtttctgaac

SEQ ID NO: 105267 - DNA, 120 bp, Artificial Sequence
  ENSG00000096063_45 (sequence is synthesized)
tctggtctctcttacctgctccccaacgtcttaacttgcctccgacgtcttcacgatctgaaactcagcaccgaggctctgctccccactctgagagtgatctaccagagcaggaagagg

SEQ ID NO: 105268 - DNA, 120 bp, Artificial Sequence
  ENSG00000096063_46 (sequence is synthesized)
gcagaaaagaacgtaacacagatgatttaccataggtattctaaattctatgtctagagaggtccgaattcaaaaacctgtctggcatttcatttggttactgctaagttcctgttaggt

SEQ ID NO: 105269 - DNA, 120 bp, Artificial Sequence
  ENSG00000096063_47 (sequence is synthesized)
gaaggaaccaaaagtttcttactacagattgttagtggggggaaataatgaaaacaactactaagaggtgttgttggttttgattaggagattacaagtatctttgcatttttagcactc

SEQ ID NO: 105270 - DNA, 120 bp, Artificial Sequence
  ENSG00000096063_48 (sequence is synthesized)
tacagcttgtccttgatctgttcttcttacccttctattttagaccacattgtgcacattatagagctgataggcagaattccaagacgcttttccctcagtgggaaatattcacaagac

SEQ ID NO: 105271 - DNA, 120 bp, Artificial Sequence
  ENSG00000096063_49 (sequence is synthesized)
ttcttcagtcacagaggtagtattgttatgtaggacccagggatacttcaggaagcagagcattcacaccaagattgtttttagttatcactgaatccacaaaaatttgactttgtgaat

SEQ ID NO: 105272 - DNA, 120 bp, Artificial Sequence
  ENSG00000096063_50 (sequence is synthesized)
tccttctgctgttttctagagctgcatttgttactcttgttacggatcttttttttcccccctcttgaaatgtttgaaatatacagatcacattgcattgatcatagaacttctggggaa

SEQ ID NO: 105273 - DNA, 120 bp, Artificial Sequence
  ENSG00000096063_51 (sequence is synthesized)
acactgaaacagcactagatgaaatccggttgctgaagtcagtgagtattagattatatgtatgaatgtgaagaattataaataaatcaagtttcattgaataaaaacacaccaagtgga

SEQ ID NO: 105274 - DNA, 120 bp, Artificial Sequence
  ENSG00000096063_52 (sequence is synthesized)
ggctctttagcatggataattttctctataaagttctagtaaccttaaagaggtaaaggaagacaacaatatttacacataccatgcatgtagtagggaactggtggcaaatgctatgat

SEQ ID NO: 105275 - DNA, 120 bp, Artificial Sequence
  ENSG00000096070_0 (sequence is synthesized)
gccgacctgctcggcggcctgcccgcccgcgcccaggggccccgaacggtggggccgggcaggcggctgaggcctgtcccctcagttcccaggtgccatgaggaagcctcgtcggaagtc

SEQ ID NO: 105276 - DNA, 120 bp, Artificial Sequence
  ENSG00000096070_1 (sequence is synthesized)
gttcccaggtgccatgaggaagcctcgtcggaagtcccggcagaatgccgagggccggcgttccccgtccccctacagtctcaagtgctcacccacccgggagaccctgacatatgccca

SEQ ID NO: 105277 - DNA, 120 bp, Artificial Sequence
  ENSG00000096070_2 (sequence is synthesized)
ggcccagcggattgtcgaggtagacattgatggacgcctgcatcgtatcagcatctatgacccactcaaaatcattactgaagatgagctaactgcccaggatatcaccgaatgcaatag

SEQ ID NO: 105278 - DNA, 120 bp, Artificial Sequence
  ENSG00000096070_3 (sequence is synthesized)
taacaaggaaaacagtgaacagcctcagttccctggcaagtccaagaaaccctcatccaagggcaaaaagaaggaatcctgctccaagcatgcatctggtacttccttccacctcccaca

SEQ ID NO: 105279 - DNA, 120 bp, Artificial Sequence
  ENSG00000096070_4 (sequence is synthesized)
gcccagcttccgtatggtggactcaggcatccagccagaagcacccccgctgcctgctgcctactaccgctacattgagaagccacctgaagacctggatgcagaggtagagtatgacat

SEQ ID NO: 105280 - DNA, 120 bp, Artificial Sequence
  ENSG00000096070_5 (sequence is synthesized)
ggatgaggaggaccttgcctggctggacatggtgaatgaaaaacggcgagtagatgggcacagtttggtgtctgcagatacctttgagctgctggtagaccggcttgagaaagagtcata

SEQ ID NO: 105281 - DNA, 120 bp, Artificial Sequence
  ENSG00000096070_6 (sequence is synthesized)
cttggagagtcgcagcagtggggcccaacagtcactcatcgatgaagacgctttctgctgtgtgtgcctggatgatgaatgtcacaatagcaatgttattctcttctgtgacatctgcaa

SEQ ID NO: 105282 - DNA, 120 bp, Artificial Sequence
  ENSG00000096070_7 (sequence is synthesized)
cctggctgtacaccaggagtgctatggcgtcccatacatccctgagggccagtggctatgccgctgctgcctgcagtctccctcccggcctgtggattgcatcctttgccccaataaggg

SEQ ID NO: 105283 - DNA, 120 bp, Artificial Sequence
  ENSG00000096070_8 (sequence is synthesized)
tggcgccttcaaacagaccagtgatgggcactgggcccatgtggtgtgtgccatctggatccctgaagtctgctttgctaacaccgtgttcttggaacctattgagggcattgacaatat

SEQ ID NO: 105284 - DNA, 120 bp, Artificial Sequence
  ENSG00000096070_9 (sequence is synthesized)
cccgcctgcccgctggaaactaacctgctatatctgcaagcagaaagggctaggtgcagccatccagtgccataaggtgaactgctacacagcattccatgtgacatgtgcacagcgggc

SEQ ID NO: 105285 - DNA, 120 bp, Artificial Sequence
  ENSG00000096070_10 (sequence is synthesized)
tgggctcttcatgaagattgagcccatgcgcgaaaccagcctcaatggcaccatctttacagtgcgcaagactgcctactgtgaggcccactcgccaccaggtgcggccactgctaggag

SEQ ID NO: 105286 - DNA, 120 bp, Artificial Sequence
  ENSG00000096070_11 (sequence is synthesized)
gaagggcgactcccctagaagcatcagtgagactggcgatgaggaagggctgaaggagggtgatggagaggaggaagaagaggaagaggtggaggaagaagagcaggaagctcaaggcgg

SEQ ID NO: 105287 - DNA, 120 bp, Artificial Sequence
  ENSG00000096070_12 (sequence is synthesized)
ggtgagtggctccctcaagggagtgcccaagaaaagcaagatgagtttgaagcagaagatcaagaaggagccagaggaagcaggccaagacacaccctccactctccccatgcttgctgt

SEQ ID NO: 105288 - DNA, 120 bp, Artificial Sequence
  ENSG00000096070_13 (sequence is synthesized)
cccacagataccctcttacaggttgaacaagatctgtagtggtctctcctttcagaggaaaaaccagtttatgcagcggcttcacaattattggctgttgaagcggcaggcacggaatgg

SEQ ID NO: 105289 - DNA, 120 bp, Artificial Sequence
  ENSG00000096070_14 (sequence is synthesized)
tgtccctcttatccggcgcttgcactcccatctgcagtcccaaagaaacgctgagcagcgagagcaggatgagaagacaagtgcagtgaaggaggagctgaagtattggcagaagctccg

SEQ ID NO: 105290 - DNA, 120 bp, Artificial Sequence
  ENSG00000096070_15 (sequence is synthesized)
gcatgacttggagcgggcgcggctgctgattgagctgattcggaagagagagaagctcaaacgagagcaggtcaaagtccagcaggctgccatggagctggagctgatgccattcaatgt

SEQ ID NO: 105291 - DNA, 120 bp, Artificial Sequence
  ENSG00000096070_16 (sequence is synthesized)
tctgttgaggacaacactggacctgctgcaggagaaggatcctgcacacatcttcgcagaaccagtcaacttgagtgaggttccagattacctggaattcatatccaagccaatggattt

SEQ ID NO: 105292 - DNA, 120 bp, Artificial Sequence
  ENSG00000096070_17 (sequence is synthesized)
ttctactatgaggcggaagctggagtcccacctgtaccgcaccttggaggagtttgaggaggactttaaccttatagttaccaactgcatgaagtataatgctaaagacacaattttcca

SEQ ID NO: 105293 - DNA, 120 bp, Artificial Sequence
  ENSG00000096070_18 (sequence is synthesized)
ccgagcagctgtccgcctgcgggacctgggaggggccatcctacggcacgcccggcggcaggcagagaacatcggctatgaccccgagaggggcactcacctgcccgagtcacccaaatt

SEQ ID NO: 105294 - DNA, 120 bp, Artificial Sequence
  ENSG00000096070_19 (sequence is synthesized)
ggaagacttttaccgcttctcctgggaagacgtggacaacatcctcatcccagagaaccgggcccatttgtccccagaggtgcagctgaaggagctgctggagaaactggacctggtgag

SEQ ID NO: 105295 - DNA, 120 bp, Artificial Sequence
  ENSG00000096070_20 (sequence is synthesized)
cgccatgcggtccagtggggcccgcacccgtcgtgtccgcctgctacgccgggagatcaatgcccttcggcagaagctggcacagccaccaccaccacagccaccatcactcaacaagac

SEQ ID NO: 105296 - DNA, 120 bp, Artificial Sequence
  ENSG00000096070_21 (sequence is synthesized)
agtatccaatggggagctgccagcagggccccagggggatgcagctgtgctggagcaggccttgcaggaggagccagaagacgatggggacagagatgactccaaactgcctcctccgcc

SEQ ID NO: 105297 - DNA, 120 bp, Artificial Sequence
  ENSG00000096070_22 (sequence is synthesized)
aaccctggagcccactgggcctgcaccttccttgtctgagcaagaatcccccccggagccccctactctgaaacccattaatgatagcaaacctccaagcaggttcctaaagcccagaaa

SEQ ID NO: 105298 - DNA, 120 bp, Artificial Sequence
  ENSG00000096070_23 (sequence is synthesized)
ggtggaagaagatgagctcttggaaaaatcaccactgcagctagggaatgagcctttgcaacgcttgctcagtgacaatggcatcaacagactatccctcatggcccctgacaccccggc

SEQ ID NO: 105299 - DNA, 120 bp, Artificial Sequence
  ENSG00000096070_24 (sequence is synthesized)
gccaagaatggggttaagctacagagaagcccagacagggtcctggagaatggcgaggaccatggtgtggcaggctctcctgcctctccagccagcatcgaggaagagcgccactcccgg

SEQ ID NO: 105300 - DNA, 120 bp, Artificial Sequence
  ENSG00000096070_25 (sequence is synthesized)
aagcggccaaggagcaggagctgtagtgagagcgaaggggagaggtccccccagcaggaggaagagacaggcatgaccaacggctttggaaaacacaccgaaagcgggtctgactctgaa

SEQ ID NO: 105301 - DNA, 120 bp, Artificial Sequence
  ENSG00000096070_26 (sequence is synthesized)
tgtagtttgggtctcagtggtggactggcatttgaagcttgcagtggtctgacgccccccaaacgcagccgtgggaagccagccctgtctcgagtgcccttcctggaaggtgtgaacgga

SEQ ID NO: 105302 - DNA, 120 bp, Artificial Sequence
  ENSG00000096070_27 (sequence is synthesized)
gactctgactacaatggctcaggcagaagcctcctgctgccctttgaagaccgcggagacctggagcccttggagctggtgtgggccaagtgccgaggctacccctcctaccctgccttg

SEQ ID NO: 105303 - DNA, 120 bp, Artificial Sequence
  ENSG00000096070_28 (sequence is synthesized)
atcatcgatcccaagatgccccgggagggcctcctgcacaatggcgttcccatccctgtccccccgctggacgtgctgaagctgggagagcagaaacaggcagaggctggagagaagctc

SEQ ID NO: 105304 - DNA, 120 bp, Artificial Sequence
  ENSG00000096070_29 (sequence is synthesized)
ttccttgtcctcttctttgacaacaagcgcacctggcagtggcttccaagggacaaagtcctgcccttgggtgtggaagacaccgtggacaagctcaagatgctggaaggccgcaagacc

SEQ ID NO: 105305 - DNA, 120 bp, Artificial Sequence
  ENSG00000096070_30 (sequence is synthesized)
agcatccgcaagtcagtgcaggtggcctatgaccgtgcgatgatccacctgagcagagtccgggggccccactccttcgtcacttccagctacctgtaagggcagggctgggcctgcatc

SEQ ID NO: 105306 - DNA, 120 bp, Artificial Sequence
  ENSG00000096070_31 (sequence is synthesized)
cgcttgccctgcctccatcccgcagggcacagagaagcctcttctgcccctgccagatgtatggccggcagcttccccctctcatggtaggccagggactgggctttctccccactaagg

SEQ ID NO: 105307 - DNA, 120 bp, Artificial Sequence
  ENSG00000096070_32 (sequence is synthesized)
gcaaggccccagttttgaccaatcgcatggttctcctggcaggcctgctgtgtgccaaaaactcccacccaaggtccctcaggggatatttcactgaagaaccagttagaagtagaaaca

SEQ ID NO: 105308 - DNA, 120 bp, Artificial Sequence
  ENSG00000096070_33 (sequence is synthesized)
gctgtggggcttgggcccagcttaggagattgcccagatggcaagaggtcctgggctccttcttgaggggctgcctggcccgctccatcctactcccactaactacacctcagggcgggt

SEQ ID NO: 105309 - DNA, 120 bp, Artificial Sequence
  ENSG00000096070_34 (sequence is synthesized)
gaggttccgacactgatcccagagatgccgtggatacgccagggtcccagggggaatctccccaagctcacactctctcccgcttatcgcctattctcacacctcttctcggtcccatct

SEQ ID NO: 105310 - DNA, 120 bp, Artificial Sequence
  ENSG00000096070_35 (sequence is synthesized)
tctgcacccattgcccagtcttgctttctctttcccatattccttttctttttctcttgtgccaaactgacagaaaccgtcaccacactggtctttttctttaatgtctcattccccttg

SEQ ID NO: 105311 - DNA, 120 bp, Artificial Sequence
  ENSG00000096070_36 (sequence is synthesized)
aggccagctgctatgccaggtggtgtctctgccaggctcctcaggcccagacagaggccagcccacaacctatgaccccctcccccaggacaccacctcccacccacagaccttcccttt

SEQ ID NO: 105312 - DNA, 120 bp, Artificial Sequence
  ENSG00000096070_37 (sequence is synthesized)
agctgttgacacaacttcccagctctgcaagtgtgccccctggatcaaggcgggtcccctcttgtttttttctttgctgccacgaggtggtccaagccttcagggtgggctcctatcagg

SEQ ID NO: 105313 - DNA, 120 bp, Artificial Sequence
  ENSG00000096070_38 (sequence is synthesized)
ctgggtgtgcgagtgtccatctgtccacatggatgtcgagggtggtttgtgtggagctgtgctcgtcagctgggtctgccctcttcccccttttctccttcttctctcctcatggacttt

SEQ ID NO: 105314 - DNA, 120 bp, Artificial Sequence
  ENSG00000096070_39 (sequence is synthesized)
ttctgcaattgcagtcttaagcttcactctccaccacctggatggcatggcgcctgccaccaaacatcttcctggcctgcgctctgccctgccctgcctagcctctgctactcccacttc

SEQ ID NO: 105315 - DNA, 120 bp, Artificial Sequence
  ENSG00000096070_40 (sequence is synthesized)
ccaactccagggaatgcattacttttatttcaaaccctctgcctccttccttctttctcttcaaccccctccccaccttcaccttctcaaaaatggaaggaaaaaaaaactgtgaatggg

SEQ ID NO: 105316 - DNA, 120 bp, Artificial Sequence
  ENSG00000096070_41 (sequence is synthesized)
gaatgctgactgacaaaccaacacaactttcagaggcttcagtgtctgttctctggacatttcttttcacctcctgagcaccaaagtcgcagggccagttgcaggccgctgattgccatg

SEQ ID NO: 105317 - DNA, 120 bp, Artificial Sequence
  ENSG00000096070_42 (sequence is synthesized)
ttgatttttaacctgatattctttttaattgttttaaatttttcataggggagttttggacaaaacagtcactggggagatcactgccatttttacacacttgactttttaaaaatacaa

SEQ ID NO: 105318 - DNA, 120 bp, Artificial Sequence
  ENSG00000096070_43 (sequence is synthesized)
ccaaccaaccaccacaacttcttatacatttgggacatgagccagagtttaaaagggaaccaacaaaacactataacttaaaaggatggggttttggattttgtataataataaaaacaa

SEQ ID NO: 105319 - DNA, 120 bp, Artificial Sequence
  ENSG00000096070_44 (sequence is synthesized)
tacagcatatggctagggaaggacatggtgtatataattgtaaaatactgttctaaattattcaggcctatagtttccattactggagtcctccattgtgtggccacacagtgtcgttga

SEQ ID NO: 105320 - DNA, 120 bp, Artificial Sequence
  ENSG00000096070_45 (sequence is synthesized)
tttaaaggagccagtgcttcccctctccccaggtagttggtcagctgtggactctgtgacctttgtctaaacctgtgttgtaagatcttgggacttcctctctttctatgtctatctctt

SEQ ID NO: 105321 - DNA, 120 bp, Artificial Sequence
  ENSG00000096070_46 (sequence is synthesized)
ccccccaacactttctcttcttagtctctctctttatttttcaatctctgaatattttagtctctctctgagtctcattttttaaaatgctcttttagaacgggaaacggctcagatcct

SEQ ID NO: 105322 - DNA, 120 bp, Artificial Sequence
  ENSG00000096070_47 (sequence is synthesized)
gctgtggcacggggcctatgtgtctctgtcgcgtctgctgtgaagcacatgatgctctatttattgtagagagtgactttatttgctttctagaattgtttataacagatggtataagag

SEQ ID NO: 105323 - DNA, 120 bp, Artificial Sequence
  ENSG00000096070_48 (sequence is synthesized)
aggtaataaacagagaaaaatctatgcttgtaaagaatacaaaagttaattttacctactataatatgactgtctgaaacttattttctctctgagaaataaatgttctaatgggcagta

SEQ ID NO: 105324 - DNA, 120 bp, Artificial Sequence
  ENSG00000096070_49 (sequence is synthesized)
atttccctcctttcttctccgaggggtcaagattcttctggaagaggtgcccccttaaaggagcaggagccttggctggggtcctccttgtctcctgagtatcttgtgtgaggtgcaggg

SEQ ID NO: 105325 - DNA, 120 bp, Artificial Sequence
  ENSG00000096070_50 (sequence is synthesized)
ttcttttggaggattaggactgcaaggcaagaggtggaaaagcaaatgaaataactcatgctgaatctgagctgcttaactttactgtccttttcaagcctttctctgaggtgaggtatt

SEQ ID NO: 105326 - DNA, 120 bp, Artificial Sequence
  ENSG00000096080_0 (sequence is synthesized)
aggtttttgaagatggcggccctcaaggctctggtgtccggctgtgggcggcttctccgtgggctactagcgggcccggcagcgaccagctggtctcggcttccagctcgcgggttcagg

SEQ ID NO: 105327 - DNA, 120 bp, Artificial Sequence
  ENSG00000096080_1 (sequence is synthesized)
gaagtggtggagacccaagaagggaagacaactataattgaaggccgtatcacagcgactcccaaggagagtccaaatcctcctaacccctctggccagtgccccatctgccgttggaac

SEQ ID NO: 105328 - DNA, 120 bp, Artificial Sequence
  ENSG00000096080_2 (sequence is synthesized)
ctgaagcacaagtataactatgacgatgttctgctgcttagccagttcatccggcctcatggaggcatgctgccccgaaagatcacaggcctatgccaggaagaacaccgcaagatcgag

SEQ ID NO: 105329 - DNA, 120 bp, Artificial Sequence
  ENSG00000096080_3 (sequence is synthesized)
gagtgtgtgaagatggcccaccgagcaggtctattaccaaatcacaggcctcggcttcctgaaggagttgttccgaagagcaaaccccaactcaaccggtacctgacgcgctgggctcct

SEQ ID NO: 105330 - DNA, 120 bp, Artificial Sequence
  ENSG00000096080_4 (sequence is synthesized)
ccttggaagctgtatcactgacagagagcagtgcttccagagttcctcctgcacctgtgctggggagtaggaggcccactcacaagcccttggccacaactatactcctgtcccacccca

SEQ ID NO: 105331 - DNA, 120 bp, Artificial Sequence
  ENSG00000096080_5 (sequence is synthesized)
ccacgatggcctggtccctccaacatgcatggacaggggacagtgggactaacttcagtacccttggcctgcacagtagcaatgctgggagctagaggcaggcagggcagttgggtccct

SEQ ID NO: 105332 - DNA, 120 bp, Artificial Sequence
  ENSG00000096080_6 (sequence is synthesized)
tgccagctgctatggggcttaggccatgctcagtgctggggacaggagttttgcccaacgcagtgtcataaactgggttcatgggcttacccattgggtgtgcgctcactgcttgggaag

SEQ ID NO: 105333 - DNA, 120 bp, Artificial Sequence
  ENSG00000096080_7 (sequence is synthesized)
tgcagggggtcctgggcacattgccagctgggtgctgagcattgagtcactgatctcttgtgatggggccaatgagtcaattgaattcatgggccaaacaggtcccatcctcttcatgac

SEQ ID NO: 105334 - DNA, 120 bp, Artificial Sequence
  ENSG00000096080_8 (sequence is synthesized)
ccagctgccccatgtttcagcccctcctggaagaaaagtggatatccggagtgttaattatactcaccacccaatgccaaccttcccgctcccttgggctttccctctggccccctcaga

SEQ ID NO: 105335 - DNA, 120 bp, Artificial Sequence
  ENSG00000096088_0 (sequence is synthesized)
actccactgcgactgcagaactcagagctgctcttcctctgtggccagttggggaccagcatcatgaagtggatggtggtggtcttggtctgcctccagctcttggaggcagcagtggtc

SEQ ID NO: 105336 - DNA, 120 bp, Artificial Sequence
  ENSG00000096088_1 (sequence is synthesized)
aaagtgcccctgaagaaatttaagtctatccgtgagaccatgaaggagaagggcttgctgggggagttcctgaggacccacaagtatgatcctgcttggaagtaccgctttggtgacctc

SEQ ID NO: 105337 - DNA, 120 bp, Artificial Sequence
  ENSG00000096088_2 (sequence is synthesized)
agcgtgacctacgagcccatggcctacatggatgctgcctactttggtgagatcagcatcgggactccaccccagaacttcctggtcctttttgacaccggctcctccaacttgtgggtg

SEQ ID NO: 105338 - DNA, 120 bp, Artificial Sequence
  ENSG00000096088_3 (sequence is synthesized)
ccctctgtctactgccagagccaggcctgcaccagtcactcccgcttcaaccccagcgagtcgtccacctactccaccaatgggcagaccttctccctgcagtatggcagtggcagcctc

SEQ ID NO: 105339 - DNA, 120 bp, Artificial Sequence
  ENSG00000096088_4 (sequence is synthesized)
accggcttctttggctatgacaccctgactgtccagagcatccaggtccccaaccaggagttcggcttgagtgagaatgagcctggtaccaacttcgtctatgcgcagtttgatggcatc

SEQ ID NO: 105340 - DNA, 120 bp, Artificial Sequence
  ENSG00000096088_5 (sequence is synthesized)
cagggcatggtgcaggagggcgccctcaccagccccgtcttcagcgtctacctcagcaaccagcagggctccagcgggggagcggttgtctttgggggtgtggatagcagcctgtacacg

SEQ ID NO: 105341 - DNA, 120 bp, Artificial Sequence
  ENSG00000096088_6 (sequence is synthesized)
gggcagatctactgggcgcctgtcacccaggaactctactggcagattggcattgaagagttcctcatcggcggccaggcctccggctggtgttctgagggttgccaggccatcgtggac

SEQ ID NO: 105342 - DNA, 120 bp, Artificial Sequence
  ENSG00000096088_7 (sequence is synthesized)
acaggcacctctctgctcactgtgccccagcagtacatgagtgctcttctgcaggccacaggggcccaggaggatgagtatggacagtttctcgtgaactgtaacagcattcagaatctg

SEQ ID NO: 105343 - DNA, 120 bp, Artificial Sequence
  ENSG00000096088_8 (sequence is synthesized)
cccagcttgaccttcatcatcaatggtgtggagttccctctgccaccttcctcctatatcctcagtaacaacggctactgcaccgtgggagtcgagcccacctacctgtcctcccagaac

SEQ ID NO: 105344 - DNA, 120 bp, Artificial Sequence
  ENSG00000096088_9 (sequence is synthesized)
ggccagcccctgtggatcctcggggatgtcttcctcaggtcctactattccgtctacgacttgggcaacaacagagtaggctttgccactgccgcctagacttgctgcctcgacacgtgg

SEQ ID NO: 105345 - DNA, 120 bp, Artificial Sequence
  ENSG00000096088_10 (sequence is synthesized)
gctcccctcttcctcttgaccctgcaccctcctagggcattgtatctgtctttccactctggattcagccttctttttctggactctggactttctctaataataaatagttcttcttta

SEQ ID NO: 105346 - DNA, 120 bp, Artificial Sequence
  ENSG00000096088_11 (sequence is synthesized)
gggcgccctcaccagccccgtcttcagcgtctacctcagcaacctggtcctggagtcttctggtctaggtccactgctgacccctagcagagcagctccacccagctccacactccagct

SEQ ID NO: 105347 - DNA, 120 bp, Artificial Sequence
  ENSG00000096088_12 (sequence is synthesized)
accagagaagcctctggaacaaacatggaatatccttacccccttcaccaagaccctacctgtctccaatctcagcagaaaagtaacaagctgggccggggtggggatcccggtgacatg

SEQ ID NO: 105348 - DNA, 120 bp, Artificial Sequence
  ENSG00000096088_13 (sequence is synthesized)
tctaccagaggcaggaagcggaggggagaggagagcagagtgtgggctgggggtcccaaccactaggggaccccccagaagtcagcatcattcgggagcctgaggcgctgggaattccaa

SEQ ID NO: 105349 - DNA, 120 bp, Artificial Sequence
  ENSG00000096088_14 (sequence is synthesized)
ggcctggccagaaagccccagtctaagggacgcatcccagtccccagggagccccaatctaagggatacagccccatcctcagggagccccagtctgagggagacacagactcgtcctca

SEQ ID NO: 105350 - DNA, 120 bp, Artificial Sequence
  ENSG00000096088_15 (sequence is synthesized)
agagagaagagagggcaaagcaaagagaagcaggaatgagaaatggagaaagggtcctggtagtgtttgcatctcagattctagctgatcctaaggctccaccctatccctccccttcct

SEQ ID NO: 105351 - DNA, 120 bp, Artificial Sequence
  ENSG00000096092_0 (sequence is synthesized)
agcgcgagacggctgggcgccgagtgggacagcgctggtgcggagactgcttccggactccaggtaccgcgcttggcggcagctggccccagacttctgtcttttcagctgcagtgaagg

SEQ ID NO: 105352 - DNA, 120 bp, Artificial Sequence
  ENSG00000096092_1 (sequence is synthesized)
ctcggggctgcagaattgcaaccttgccaatggacctgatcggttttggttatgcagccctcgtgacatttggaagcatttttggatataagcggagaggtggtgttccgtctttgattg

SEQ ID NO: 105353 - DNA, 120 bp, Artificial Sequence
  ENSG00000096092_2 (sequence is synthesized)
ctggtctttttgttggatgtttggccggctatggagcttaccgtgtctccaatgacaaacgagatgtaaaagtgtcactgtttacagctttcttcctggctaccataatgggtgtgagat

SEQ ID NO: 105354 - DNA, 120 bp, Artificial Sequence
  ENSG00000096092_3 (sequence is synthesized)
ttaagaggtccaagaaaataatgcctgctggtttggttgcaggtttaagcctcatgatgatcctgagacttgtcttgttgctgctctgagcatctggaggaacagaaaactaagttcatg

SEQ ID NO: 105355 - DNA, 120 bp, Artificial Sequence
  ENSG00000096092_4 (sequence is synthesized)
tttttttgtatttaaaagataaacttcaatatggaatgctagaaacacaaatagcactgtcacctctaatatgaacattagtttgaggtagtttttttctaaagcaaaaattttaactgt

SEQ ID NO: 105356 - DNA, 120 bp, Artificial Sequence
  ENSG00000096092_5 (sequence is synthesized)
tttctaattgtcaagcactattttcattaaaagtgtctaatgaatcatgatatactcttccatttgttgtgtctattttttatatatttggtattttttgaaaattccaaatactcatgt

SEQ ID NO: 105357 - DNA, 120 bp, Artificial Sequence
  ENSG00000096092_6 (sequence is synthesized)
ctcaagtaagcttaaactacaacttgtcacataaaggaagtcttaagtggagttcacagaatgataatgtatctatttgtcatttgtgttatatttgaaattattagaaattatgctttt

SEQ ID NO: 105358 - DNA, 120 bp, Artificial Sequence
  ENSG00000096092_7 (sequence is synthesized)
tccattttaattgtattgctgccagtgctatttttttctttaaaaaattttattcttagcacactgttatgtcctaactgaatgtattcagtattcaaataaaagacattttggttcaaa

SEQ ID NO: 105359 - DNA, 120 bp, Artificial Sequence
  ENSG00000096093_0 (sequence is synthesized)
actgcttgtcgcctgggcaaccggagaggacgaagcaggacctaggtggcggcggtggtaccggctgcaatggtgtccaatcccgtgcatggcttgccctttcttccgggcacgtccttt

SEQ ID NO: 105360 - DNA, 120 bp, Artificial Sequence
  ENSG00000096093_1 (sequence is synthesized)
aaggactctacgaaaacagccttccacagaagtcagacgctgagctacaggaacggctatgcaattgttcgacgtccaacagttgggataggcggagaccggctccagttcaaccagctg

SEQ ID NO: 105361 - DNA, 120 bp, Artificial Sequence
  ENSG00000096093_2 (sequence is synthesized)
tcccaggctgagctggatgagttggccagtaaggcaccagtcttaacttatggccaacctaaacaagccccacctgcggattttattcctgcgcatgtggcctttgacaaaaaggtactg

SEQ ID NO: 105362 - DNA, 120 bp, Artificial Sequence
  ENSG00000096093_3 (sequence is synthesized)
aaatttgatgcctatttccaagaagatgttcctatgtcaactgaggaacagtataggatccgtcaggtgaacatttactattatctagaagatgacagcatgtctgtcatagagcctgtt

SEQ ID NO: 105363 - DNA, 120 bp, Artificial Sequence
  ENSG00000096093_4 (sequence is synthesized)
gtagaaaattctggaatccttcaaggcaagttaataaaacgccagcggctagccaagaatgaccggggtgaccattaccattggaaagacctaaatcgaggaataaacatcacaatttat

SEQ ID NO: 105364 - DNA, 120 bp, Artificial Sequence
  ENSG00000096093_5 (sequence is synthesized)
ggcaaaactttccgcgttgttgactgtgaccaattcacacaggtatttttagaaagccaaggaattgagttaaatccaccagagaagatggctcttgatccttacactgaactccgaaaa

SEQ ID NO: 105365 - DNA, 120 bp, Artificial Sequence
  ENSG00000096093_6 (sequence is synthesized)
cagcctcttcgtaagtatgtcaccccatcagactttgatcaactcaagcaatttctcacctttgacaaacaggtccttcgattctatgcaatctgggatgatacagacagcatgtatggt

SEQ ID NO: 105366 - DNA, 120 bp, Artificial Sequence
  ENSG00000096093_7 (sequence is synthesized)
gaatgtcggacctacatcattcattactatcttatggatgatacggtggaaattcgagaggtccacgaacggaatgatgggagagatcctttcccactcctaatgaaccgccagcgtgtg

SEQ ID NO: 105367 - DNA, 120 bp, Artificial Sequence
  ENSG00000096093_8 (sequence is synthesized)
cccaaagttttggtggaaaatgcaaagaacttccctcagtgtgtgctagaaatctctgaccaagaagtgttggaatggtatactgctaaagacttcattgttgggaagtcactcactatc

SEQ ID NO: 105368 - DNA, 120 bp, Artificial Sequence
  ENSG00000096093_9 (sequence is synthesized)
cttgggagaactttcttcatttatgattgtgatccatttactcgacggtattacaaagagaagtttggaatcactgatttaccacgtattgatgtgagcaagcgggaaccacctccagta

SEQ ID NO: 105369 - DNA, 120 bp, Artificial Sequence
  ENSG00000096093_10 (sequence is synthesized)
aaacaggagttgcctccttataacggttttggactagtggaagattctgctcagaattgttttgctctcattccaaaagctccaaaaaaagacgttattaaaatgctggtgaatgataac

SEQ ID NO: 105370 - DNA, 120 bp, Artificial Sequence
  ENSG00000096093_11 (sequence is synthesized)
aaggtgcttcgttatttggctgtactggaatcccccatcccagaagacaaagaccgcagatttgtcttctcttactttctagctaccgacatgatcagtatctttgagcctcctgttcgc

SEQ ID NO: 105371 - DNA, 120 bp, Artificial Sequence
  ENSG00000096093_12 (sequence is synthesized)
aattctggtatcattgggggcaagtaccttggcaggactaaagttgttaaaccatactctacagtggacaaccctgtctactatggccccagtgacttcttcattggtgctgtgattgaa

SEQ ID NO: 105372 - DNA, 120 bp, Artificial Sequence
  ENSG00000096093_13 (sequence is synthesized)
gtgtttggtcaccggttcatcatccttgatacagacgagtatgttttgaaatacatggagagcaacgctgcccagtattcaccagaagcactcgcgtcaattcagaaccatgtccgaaag

SEQ ID NO: 105373 - DNA, 120 bp, Artificial Sequence
  ENSG00000096093_14 (sequence is synthesized)
cgagaagcgcctgctccagaagcagaaagcaagcaaactgaaaaggatccaggcgtgcaggaattggaagcattaatagacacaattcagaagcaactgaaagatcactcatgcaaagac

SEQ ID NO: 105374 - DNA, 120 bp, Artificial Sequence
  ENSG00000096093_15 (sequence is synthesized)
aacattcgtgaggcatttcaaatttatgacaaggaagcttcaggatatgtggacagagacatgttctttaaaatctgtgaatcgcttaacgtcccagtggatgactccttggttaaggag

SEQ ID NO: 105375 - DNA, 120 bp, Artificial Sequence
  ENSG00000096093_16 (sequence is synthesized)
ttaatcaggatgtgctctcatggagaaggcaaaattaactactataactttgttcgtgctttctcaaactgacctgctgatgagaaaatgcaagacaatttttgatactggaactatgct

SEQ ID NO: 105376 - DNA, 120 bp, Artificial Sequence
  ENSG00000096093_17 (sequence is synthesized)
ttgaaatacaccttacactcttcatagaggcatttacagggttcctgaagttttatttctgttttggttcttctttcactcctactgaagtcgaaactaaattggatctaataggatcta

SEQ ID NO: 105377 - DNA, 120 bp, Artificial Sequence
  ENSG00000096093_18 (sequence is synthesized)
agattggtgccttatttagggtgataggggtatagcaatgtctaattttgtgtgtcaaattgacttggccacagggggcccaaatatttcctttctttctttttaaaaaaataaattttt

SEQ ID NO: 105378 - DNA, 120 bp, Artificial Sequence
  ENSG00000096093_19 (sequence is synthesized)
ttctttctttttaaaaaaataaatttttttagagatgggatctcactctgtcatacaggctggagtgtggtggcactatcctagttctatgaagcctcagactcctgggctcaagtgatc

SEQ ID NO: 105379 - DNA, 120 bp, Artificial Sequence
  ENSG00000096093_20 (sequence is synthesized)
gacaacaggctcaagccaccatgcccagctaatttttaaaattattttgtagagacaaggtcttgctaggttgcctgaacttgtctcaaactcatgagctccagaaattctcccacctca

SEQ ID NO: 105380 - DNA, 120 bp, Artificial Sequence
  ENSG00000096093_21 (sequence is synthesized)
tataggcatgagccactgtgcccagcctcagatatttcattattctgggggtttctctgaaggtatttttcgatgagataaacatttgaatcagaagactaagtaaaacagatagtcctc

SEQ ID NO: 105381 - DNA, 120 bp, Artificial Sequence
  ENSG00000096093_22 (sequence is synthesized)
aagtaaaacagatagtcctccctaatgtgggtgggcctcctccaatcatttgaagacatgagtagaataaaaaggctgacctttccccaggtaagagaattcctcctgcctgactggctt

SEQ ID NO: 105382 - DNA, 120 bp, Artificial Sequence
  ENSG00000096093_23 (sequence is synthesized)
caaattggaacatcagccttttcttgccttcagacacaaatggaaacatcagctgttggtctggagcctgctgaccttcagactggacctaaaccatcagctctcctaagtcataggcct

SEQ ID NO: 105383 - DNA, 120 bp, Artificial Sequence
  ENSG00000096093_24 (sequence is synthesized)
ttggattcagactggaattatacctttagctctcctgggtctccagcttgccaatttaccctgcagatcttgggacttgtaagccttcataattgtgtgagcaatttcttataactctct

SEQ ID NO: 105384 - DNA, 120 bp, Artificial Sequence
  ENSG00000096093_25 (sequence is synthesized)
ttgtgtgagcaatttcttataactctctctttctctctctctacatatatatatatatatatattttatatgtacacattcatacacacacacgcttatatgtatacatatagtatgtat

SEQ ID NO: 105385 - DNA, 81 bp, Artificial Sequence
  ENSG00000096093_26 (sequence is synthesized)
ttagaaaaatgctgcttttagagagcctggccttgagagaggaaggaaagactagttgcagttactattctctggtgagct

SEQ ID NO: 105386 - DNA, 120 bp, Artificial Sequence
  ENSG00000096093_27 (sequence is synthesized)
actagttgcagttactattctctggtgagctctgactggctttttacaaacagggcttctctttggttgaagtcagccactaagttcatctttaaacatgctatctcaaattccccgaag

SEQ ID NO: 105387 - DNA, 120 bp, Artificial Sequence
  ENSG00000096093_28 (sequence is synthesized)
ccacccaaaatgtggtatgaatgaggatagagttacacagaattcagactgctttgccctctcagaacttctagggaacttcccttggtgtttccttccctaacgagctcagccacttgt

SEQ ID NO: 105388 - DNA, 120 bp, Artificial Sequence
  ENSG00000096093_29 (sequence is synthesized)
aaccagcttattgaaagggctgtgaatgtattatgttgattccttttctgttccaggttattatcttgggaataacccatgttttgttttgttttaccctcagtcgctcataactattta

SEQ ID NO: 105389 - DNA, 120 bp, Artificial Sequence
  ENSG00000096093_30 (sequence is synthesized)
aaacagtatctctttcaagtacagatgctcctctacttatggggctatgtctcaataaactcacgtaagtaaaaaatatcacaagttgaaaacacatttaataaccctgataagcccatt

SEQ ID NO: 105390 - DNA, 120 bp, Artificial Sequence
  ENSG00000096093_31 (sequence is synthesized)
gtaaagtaggcaaataagttggaccattgaaagttggggactatctgtattttagaagttttttcagcttaaaaattaccaagctctatcctacttggcccagctcagtccttcccccag

SEQ ID NO: 105391 - DNA, 120 bp, Artificial Sequence
  ENSG00000096093_32 (sequence is synthesized)
gcttagaagcctgtggtaaagagtgtgtgtatactggggtgatgatagtggtttcttcttactcccttctttctgtcttctgctccctttgttcctattcagccatgctgctgtttctag

SEQ ID NO: 105392 - DNA, 120 bp, Artificial Sequence
  ENSG00000096093_33 (sequence is synthesized)
cccatgtaggctctgggaaaggttaagcgggtagaaaccagagaaaaagggcaaagtcttatttctgtggctagtaatgtcgtaatgtggggccaggtctgagtgacatgtgccgaaagg

SEQ ID NO: 105393 - DNA, 120 bp, Artificial Sequence
  ENSG00000096093_34 (sequence is synthesized)
ctgactctttctcccagagcaccttttctctctttttggattcagggggtacatgtgcaggtttgttacatgagtatattgcacccaggtagtgagcatagtgcccagtaagtagttttt

SEQ ID NO: 105394 - DNA, 120 bp, Artificial Sequence
  ENSG00000096093_35 (sequence is synthesized)
ccacacataccccctccttcccttcccactctggtagtccccagtgtctattgttcccatcattatgtctatgtgtattcaatgtttagctcccacttagaagtaagaacatgcaatatt

SEQ ID NO: 105395 - DNA, 80 bp, Artificial Sequence
  ENSG00000096093_36 (sequence is synthesized)
aatgtttagctcccacttagaagtaagaacatgcaatatttggtttcctattcctgcatcaattcacaatacatgatttc

SEQ ID NO: 105396 - DNA, 120 bp, Artificial Sequence
  ENSG00000096093_37 (sequence is synthesized)
ttcatttaaaaaatctaatccaccattgattggcacctaggttgattccatgtcctttgctcagagccccgttttggtgagttcttagaactctttccaaccggaaactgcccagtgcac

SEQ ID NO: 105397 - DNA, 120 bp, Artificial Sequence
  ENSG00000096093_38 (sequence is synthesized)
cactctcagatggacgggacccagtctgtacctgatcaccccggctctaatggtatggtctccaaggctccttctgatcttcccaggaggccctttcaggctgacacaccttccagggtg

SEQ ID NO: 105398 - DNA, 120 bp, Artificial Sequence
  ENSG00000096093_39 (sequence is synthesized)
tgcactctcgccatgttctcacccagatggctctcttggctgtgtaattaggcagctcaatccctttcctttagactgtttcaggggagaaccaggtaccccaaatcttatgctctccaa

SEQ ID NO: 105399 - DNA, 120 bp, Artificial Sequence
  ENSG00000096093_40 (sequence is synthesized)
actccaggggacagacacatgtcaaaccctgagtcttttaaagtataccctcacttagcttgcagacccaaggcactccagcccctttcaagaagcttgcactttctgatattttctcca

SEQ ID NO: 105400 - DNA, 120 bp, Artificial Sequence
  ENSG00000096093_41 (sequence is synthesized)
tcactcttgcctcctgtggtagaggagctttgggctactccttaacaaatcattcatggatcggcagcaaatctgcaacatatggatatatttgccaatttttgtcctcagctttgggtc

SEQ ID NO: 105401 - DNA, 120 bp, Artificial Sequence
  ENSG00000096093_42 (sequence is synthesized)
tcagccaaaatggagatttaggaaagtctcatttagcatcctctagcctgcttttggctgttttgttttgtttttgtgtttgttttttagagacagggtcttactctgttgccagactgg

SEQ ID NO: 105402 - DNA, 120 bp, Artificial Sequence
  ENSG00000096093_43 (sequence is synthesized)
actgcagcctcaaactcctgggctcatgcaatcctcctgcctcagccttctgagtagctaggcctgtagtctcagagggaactgtcttcaataaagttggcactgtccacatacactcct

SEQ ID NO: 105403 - DNA, 120 bp, Artificial Sequence
  ENSG00000096093_44 (sequence is synthesized)
ttggcactgtccacatacactccttaagtttgctgtccacttcttgccttgcatctccttttaagtttacttaagactgagaagctgagatctgacagcaccaacacaaggtataaaaga

SEQ ID NO: 105404 - DNA, 120 bp, Artificial Sequence
  ENSG00000096093_45 (sequence is synthesized)
gatttcatgaaagaccaaagccagcaggccatttctgtggtgtccaaacactcgctgctcacctgtttatacaaagcagcaagtataggagccacaaacgtcagagcaaatcactttttc

SEQ ID NO: 105405 - DNA, 120 bp, Artificial Sequence
  ENSG00000096093_46 (sequence is synthesized)
tactaaaatcctgaatggcagtgcagccattagatgtcactaattaccttatgctacagtcatagctggcatgcatctggagtgtcaggttcaggtggtggaagggagctgagcattacc

SEQ ID NO: 105406 - DNA, 120 bp, Artificial Sequence
  ENSG00000096093_47 (sequence is synthesized)
ctgtagcaagcaatattgtaggaagcagaaatgatcatcacttcaaactggccaccagggagttgaaagattctaatacacacacacacccacacacacacacacacaaagagagaatga

SEQ ID NO: 105407 - DNA, 120 bp, Artificial Sequence
  ENSG00000096093_48 (sequence is synthesized)
gaattattaagattagcactggtagctgaagctatcaggtctaactgaagcatttgactaagactgcttatagtgcttacggctttgggactaataaaaatctgccttgcgggtaaagat

SEQ ID NO: 105408 - DNA, 120 bp, Artificial Sequence
  ENSG00000096093_49 (sequence is synthesized)
gggctgtgagttagccactactcagaaacctgggcctgtaccttgtctgcaccatcagggggccttgaaaataccatccaattaaggtgtatcaaatccatatctataggctttgagggt

SEQ ID NO: 105409 - DNA, 120 bp, Artificial Sequence
  ENSG00000096093_50 (sequence is synthesized)
atttgggacacataggtagagaagacgtctctaaatgttgtccagagaatccacttggttaagtgactcctgagtatcctgctggcacataagttcattttaaaaagccaatatgagtgc

SEQ ID NO: 105410 - DNA, 120 bp, Artificial Sequence
  ENSG00000096093_51 (sequence is synthesized)
tttatatgtaccatgaacttagcattcagtatctctaaatctctcaccatgactccccacaaaacatgaaacccttttgacacagatgcacaaaaagactcggaagggttaactgcttga

SEQ ID NO: 105411 - DNA, 120 bp, Artificial Sequence
  ENSG00000096093_52 (sequence is synthesized)
gttcacctagcttctcatggcagagcaggacccaactctacaatgaagcttgccatgcatcagaaccactcaccttcacctcaagcaaacatttcctctttctcacaccccatgggtgtc

SEQ ID NO: 105412 - DNA, 120 bp, Artificial Sequence
  ENSG00000096093_53 (sequence is synthesized)
cttgactaactgccacctgtaactgcactcatcttttgagatctttttccaaagaaagatggttctggtaaacacagcaagcagctacagccaacagcagccatgtaagtgacaccagca

SEQ ID NO: 105413 - DNA, 120 bp, Artificial Sequence
  ENSG00000096093_54 (sequence is synthesized)
atccccactattactaatacttggatgtcttctagtcagcaccaacatatttgttggcctttacacaaacgaaaccccatttcctccaagctaaataacatcatagtatagtaggcatca

SEQ ID NO: 105414 - DNA, 120 bp, Artificial Sequence
  ENSG00000096093_55 (sequence is synthesized)
aggatgatgtgcttgtttctggagcttcctacccacaaaccccatgttaagaaaacctcttttccactttactattaaagagtcaaataaaaatgatgcttattgctatccagcacttga

SEQ ID NO: 105415 - DNA, 120 bp, Artificial Sequence
  ENSG00000096093_56 (sequence is synthesized)
ttgagttcagcttcccaagtagctggaactacagtctatcatgaacccttgtgaaatgaaatatttgaagacacagatatgaagggaccaaggaaaagctttgttcctaccccatctttc

SEQ ID NO: 105416 - DNA, 120 bp, Artificial Sequence
  ENSG00000096093_57 (sequence is synthesized)
ctggctgcacatccagattctcttgaaaggcagctgtgtcgacattcctacagtcagctttctcttctataactctatttatatttgacttgaattcacttcttgcatctttgctgtact

SEQ ID NO: 105417 - DNA, 120 bp, Artificial Sequence
  ENSG00000096093_58 (sequence is synthesized)
ttcatccttattggccaattctctcttttgattttccatttttgtaaaataaagtttgtgtatcactgagagacaaggaggcaagatagctacacactttactgtctgcgtgaactataa

SEQ ID NO: 105418 - DNA, 120 bp, Artificial Sequence
  ENSG00000096093_59 (sequence is synthesized)
aacaaatatacagtgactagtcaccaacagactttgaaagaagtgatgtaattgtcactgattgtgatatgcatctgtttaattacattgtggttagtggactaaagtcctgacagataa

SEQ ID NO: 105419 - DNA, 120 bp, Artificial Sequence
  ENSG00000096093_60 (sequence is synthesized)
gtttgtactttatgcaattactcatagttattaactgtgttaactgaaatttgaaccatgttgttgggggaatgggttattttactaaatggtggtaatcgaaattcatgcatcttgtaa

SEQ ID NO: 105420 - DNA, 120 bp, Artificial Sequence
  ENSG00000096093_61 (sequence is synthesized)
ctgtgcaaactgagaaatgccatcatatcaaggaagacagacttgatggaggacaggtgagcttcaaaattagggctcagccagagagagttattggcttttcccaagaaagaattccag

SEQ ID NO: 105421 - DNA, 120 bp, Artificial Sequence
  ENSG00000096093_62 (sequence is synthesized)
ggagagctggtgctgttaaacagcaactgtttttaagcaacagtgtacagcagcagctgaggttctgctccttgtagagtagggataccccataggcattgtgcccagaattgtagctca

SEQ ID NO: 105422 - DNA, 120 bp, Artificial Sequence
  ENSG00000096093_63 (sequence is synthesized)
aaggcagttctgcactcatattatgcagaaatttccaggaaaagggtggtaacttccaggtgttcgcgtcgttgctgtggaaaggggtggttacttccggatgttgtcatggcaatggta

SEQ ID NO: 105423 - DNA, 120 bp, Artificial Sequence
  ENSG00000096093_64 (sequence is synthesized)
aactgatatggcgcactggtgggcatgtcttatggaaagctgcctctgccccagacctattttagctagtcctcaatttggccctgtgtctgagccgagcctccagagtcgagccccact

SEQ ID NO: 105424 - DNA, 120 bp, Artificial Sequence
  ENSG00000096093_65 (sequence is synthesized)
tcctacctcagaatgattcattatgtcagatggggatttagcaatattaagggaattggggaccttggagaccttaatgaggagtttcagtggaatgggaagagggggagaacctgatgg

SEQ ID NO: 105425 - DNA, 120 bp, Artificial Sequence
  ENSG00000096093_66 (sequence is synthesized)
cagtagatttaagagagaatgggagagaggaattctggatcagagcggagactactcttttggggaggtttggtgcaagggacaacagaaaaatggggcagcagctggcagagaaagtga

SEQ ID NO: 105426 - DNA, 120 bp, Artificial Sequence
  ENSG00000096093_67 (sequence is synthesized)
agtcaggagaagtttttgttttattttgtttttgcttttgtttttacatagaataaatagcatgtttgtatgctaatgggaatgattccatagagaggaaaacattgataagtgtgtgag

SEQ ID NO: 105427 - DNA, 120 bp, Artificial Sequence
  ENSG00000096093_68 (sequence is synthesized)
agagcggggacaatttctggagtttgtgagaggatggggtttagtatgagtggaggaattggcttcagatagaagcaccaactattcacctagggcagtatttctcaaacttccgggtct

SEQ ID NO: 105428 - DNA, 120 bp, Artificial Sequence
  ENSG00000096093_69 (sequence is synthesized)
tgagacacctttatacccttaaaaattattgagggccccaaagagtttttatgtgtttatatctattgctatttagcatattagaaattgtatctgaaaaattttcaaatattaatttat

SEQ ID NO: 105429 - DNA, 120 bp, Artificial Sequence
  ENSG00000096093_70 (sequence is synthesized)
tttgaaaacgataaacccatttcatgtcaacacaacataattttgtgaaaaatcagtttttacaaacaaaaaaaatttagtgagaagagtgatattgctttacatttttgcaaacctctt

SEQ ID NO: 105430 - DNA, 120 bp, Artificial Sequence
  ENSG00000096093_71 (sequence is synthesized)
aatgtctgacttacttagtagtagaagatgactggattttcatgtgcttttgtattctgcctgcggtgatagcctgtgttgtgtgacctttggaaaactccattgtgcacttatgggaaa

SEQ ID NO: 105431 - DNA, 120 bp, Artificial Sequence
  ENSG00000096093_72 (sequence is synthesized)
tgagctggtgtccacttcttactgacatcccatctgcttctgagaactcatgtgagccagggcaggcatctgccctagaagcttcttcttttgtctgaaagctagttgtttaaagagcat

SEQ ID NO: 105432 - DNA, 120 bp, Artificial Sequence
  ENSG00000096093_73 (sequence is synthesized)
aaagagcaaggggtcctttgcagtcatttgattagcaatcccagagctggaattgccccttggtttgagctctcccgcttcagcagtcctgagaatggctcaccgtcaccaccacgtaga

SEQ ID NO: 105433 - DNA, 120 bp, Artificial Sequence
  ENSG00000096093_74 (sequence is synthesized)
agcaccaaatcaccgaggtgaaatgaaagacgaccagctgtccagattcattgaacttgctgtgtttgactttggagagatgaagccgtttgctgattttctaaagaataaagaaaaccc

SEQ ID NO: 105434 - DNA, 120 bp, Artificial Sequence
  ENSG00000096093_75 (sequence is synthesized)
ctcatattaatatacaaatgtatccatattgggcaggtttcaaactcttgtattctccccacagaagggttgaacatcgttagaagtttgcagctggccataatccaagtcatttggtgt

SEQ ID NO: 105435 - DNA, 120 bp, Artificial Sequence
  ENSG00000096093_76 (sequence is synthesized)
aagcctactgcgtgcatacagtgcttggtctaaggcaagcattttgagaaagtggcaagatgaatgtctctagcctatgtgtaaagaaaataaccccaattactcaatgtgccccagacc

SEQ ID NO: 105436 - DNA, 120 bp, Artificial Sequence
  ENSG00000096093_77 (sequence is synthesized)
cataaggacaccatctccagacagctttctctctgtgtaataaatactgctgtcccatgtgctgattaaaggaggctgtgaacagaaaccaaagtgtggtgaaggaagcccaggcaatag

SEQ ID NO: 105437 - DNA, 120 bp, Artificial Sequence
  ENSG00000096093_78 (sequence is synthesized)
acccaaccagtgcaagcaagttggaggatgaatgggtgcagagctgcagtttcctccaaggccaggtcctccaccccaaggcacctccccagcttctgatctcagaatccagacatgtca

SEQ ID NO: 105438 - DNA, 120 bp, Artificial Sequence
  ENSG00000096093_79 (sequence is synthesized)
cttacatctaaaatgtactcctgaaccacagcatgcaagatgatggtgatgaagatgtagaacaagattgtgaccaggtccttagggccatagtggtagtgcacggtctcactgtctgtg

SEQ ID NO: 105439 - DNA, 120 bp, Artificial Sequence
  ENSG00000096093_80 (sequence is synthesized)
gaggtaataaaagtcccatcagcatccctgggggaaggaaatactctgggacccaaaactgaaatgagatgggaggcgaaatgcgccatcaaatgctacccgtttgctatagcctcagac

SEQ ID NO: 105440 - DNA, 120 bp, Artificial Sequence
  ENSG00000096093_81 (sequence is synthesized)
tcagaagaaggtttctgccccagaatcctgcccaccctctggtcttagcacttggaagcaccaatggagatggctaaggagaaccaagtgcatggctgtattgtcataacagtatctcct

SEQ ID NO: 105441 - DNA, 120 bp, Artificial Sequence
  ENSG00000096093_82 (sequence is synthesized)
gagtctgtgcagcagagcacagtggttataacagagccagggttagagaccaccaatccccatcactggctctatcactccctaactgtgtgactgtggataaaggactaacctctttga

SEQ ID NO: 105442 - DNA, 120 bp, Artificial Sequence
  ENSG00000096093_83 (sequence is synthesized)
gcctcagtttcctcccctgtaaaatgggactatagttatgctttctcaagaaagcaccgcgtaagggctaaatgtggactcagaagctggactcttcagtttgtattgcagctctgtcct

SEQ ID NO: 105443 - DNA, 120 bp, Artificial Sequence
  ENSG00000096093_84 (sequence is synthesized)
atgtgacccaggggtatctccatgtgtgacttttctgtacctcagttttctcatctgaaaaatgaggacaacatttcctgcatagtaagtttattatgagaattaaatgaataaatgcga

SEQ ID NO: 105444 - DNA, 120 bp, Artificial Sequence
  ENSG00000096093_85 (sequence is synthesized)
tattaatatatatataccactatgtaaagaacttcattgctcttttaatttagcttctctttcactgactaatattttggatcaaagtgagctcttcttttttggcacaaacttataatc

SEQ ID NO: 105445 - DNA, 120 bp, Artificial Sequence
  ENSG00000096093_86 (sequence is synthesized)
ctattatttaattctttccagctgctgacatatagtacataatttcagatgttttagtatgtttgatgaatatttctttttttttcaatttaccccatctgaaattacttcatagtcttt

SEQ ID NO: 105446 - DNA, 120 bp, Artificial Sequence
  ENSG00000096093_87 (sequence is synthesized)
ccagctagtctttccatcgttgatacataattgccaaagtagccaagttgaactccctacttttaggattcttgagtcactactttggattcttcaaaggtccttcgattctatgcaatc

SEQ ID NO: 105447 - DNA, 120 bp, Artificial Sequence
  ENSG00000096093_88 (sequence is synthesized)
attcttttctaaaggcaattgtgtgtgtatttcactacaactgggccagatttaggatgttcagatcagatctactattctgtcctgattaggtattgcccgttgattctagcattggta

SEQ ID NO: 105448 - DNA, 120 bp, Artificial Sequence
  ENSG00000096093_89 (sequence is synthesized)
ttcttttctaattgctgttgcagggcatctctttaagtgggcctggggctggacaacacagagtggttagtagaccaacatgtcaggactgaagaagggcaacagagacgatccaggagg

SEQ ID NO: 105449 - DNA, 120 bp, Artificial Sequence
  ENSG00000096093_90 (sequence is synthesized)
ggtggctaccaaggggagactcaaagataagttgatagagcagactggttggcagcctttgatacccttcacagctgatacctacactggcccatcagtagggttagcatgaaagaaggc

SEQ ID NO: 105450 - DNA, 120 bp, Artificial Sequence
  ENSG00000096093_91 (sequence is synthesized)
atgaccactgcaggagggctgtggcatctgtcagtagtggtagcatggccagcagctgatggaggaagggcatggaagttttcttccttgaattttcataagtgagttgaagggggactt

SEQ ID NO: 105451 - DNA, 120 bp, Artificial Sequence
  ENSG00000096093_92 (sequence is synthesized)
tcatgccttttcttcattataaaccctttagccagggttcccttggaagtcagaacaaagtccccctgagaaatgccaaggactgtggcttatgatcattgagacattcttactgattaa

SEQ ID NO: 105452 - DNA, 120 bp, Artificial Sequence
  ENSG00000096093_93 (sequence is synthesized)
acaatgtggcagtgggagaattaaggatgagatgattgcattagttcattgaccatccctgagcaacagaaacacaatcatgggtaatcctcggcccctgcctacaagaagcatgggtct

SEQ ID NO: 105453 - DNA, 120 bp, Artificial Sequence
  ENSG00000096093_94 (sequence is synthesized)
agtttagtagcactgccaactggaccgaccatttacacttctgtgtgaaatggggcagaggggggagaaaagagtgcctgagctcacagcgttggcggggcgcagtgaggtccgccagga

SEQ ID NO: 105454 - DNA, 120 bp, Artificial Sequence
  ENSG00000096093_95 (sequence is synthesized)
ctaggtggaaggagagaaggaacgtccctctctgcaactcatctaagggcctgctcggaccccggatctcacagcgagaactaccgcctcgctacacccgcctttccccgcgccacccaa

SEQ ID NO: 105455 - DNA, 120 bp, Artificial Sequence
  ENSG00000096093_96 (sequence is synthesized)
cagctcccacgtctcatcctccgggagcggggcggggcgaagcggaagaggaggggccgacacaaccacgcccactagccgcgctccaaggccgcggcccacttaccgcgagaacgcgga

SEQ ID NO: 105456 - DNA, 120 bp, Artificial Sequence
  ENSG00000096093_97 (sequence is synthesized)
tacatttattggcaaaaggtttgggtagctgtattggtaactattttgaaacattacagctataattgaactgtttggacacagtactgtctttctgctttcatcaagggttacaggtac

SEQ ID NO: 105457 - DNA, 120 bp, Artificial Sequence
  ENSG00000096093_98 (sequence is synthesized)
aggaatgcctacatttcatatggagatccaaagaagatcgtggagttgcggagttgttttgtgaacctcaccaaacatttaaatctcaaagcaattcctgagctacatctgcttcccacc

SEQ ID NO: 105458 - DNA, 120 bp, Artificial Sequence
  ENSG00000096093_99 (sequence is synthesized)
ttacgtttccaattgacaatttctttcccttaaaatgagctaatttcatagactcctttgtgaaaccataaatcgattattaggaaatttcacaaatatgcatacatgtaggttgtaatg

SEQ ID NO: 105459 - DNA, 120 bp, Artificial Sequence
  ENSG00000096093_100 (sequence is synthesized)
ttaaaatgtttaatttcacagaagccccactacagatgcttccttgttaaatgttatattaatattggagtccagaatgttctgagcattttccaactctgttccaaccttcctaatcct

SEQ ID NO: 105460 - DNA, 120 bp, Artificial Sequence
  ENSG00000096093_101 (sequence is synthesized)
tttctgtactaaagggagaaagaaaaggaagagatcaccctcagtgcttctttgctgctccttttctttagacatttaaccccttttagttcagaaaatgtaaactagcactagcatggt

SEQ ID NO: 105461 - DNA, 120 bp, Artificial Sequence
  ENSG00000096093_102 (sequence is synthesized)
cttttaaggattttgttcatatcagtcatatatctgttattattttgtatttaaagattgtgtttattcccacgatttgaagaagcctagccaaaaaaaaaaaaaaaaagattgtgttta

SEQ ID NO: 105462 - DNA, 120 bp, Artificial Sequence
  ENSG00000096093_103 (sequence is synthesized)
cttcttactgacatcccatctgcttctgagaactcatggagcgagaatgggcatgaaaagacctggagctcacttctggagccatcagttgtctgtcatatgacccagggtccctctgtc

SEQ ID NO: 105463 - DNA, 120 bp, Artificial Sequence
  ENSG00000096093_104 (sequence is synthesized)
tcagttaacccttctgaacaatgggataaaaccatctaccttttctcacagagctacacactgtaaggtgctatgcaaatagatgaaagtattatgcctacttccaacagaaacaatcag

SEQ ID NO: 105464 - DNA, 120 bp, Artificial Sequence
  ENSG00000096093_105 (sequence is synthesized)
cagctgaggcatagaggttcccaggtggtgccgatggtgttggtctacggaaaatctgagtagcaagcccttcagaggactcccagggcttcctgtctacaagaaccactggggctgagg

SEQ ID NO: 105465 - DNA, 120 bp, Artificial Sequence
  ENSG00000096093_106 (sequence is synthesized)
gagtggtcatcactctggattttgcagatgcaagatggagatccaggtgttaagtgtttcacccaagaccattcagcgttaagtgtttcacccaagacaattcagcaaattagtagcaca

SEQ ID NO: 105466 - DNA, 120 bp, Artificial Sequence
  ENSG00000096093_107 (sequence is synthesized)
acccaagacaaccttgtggctaaatgcttagcccatttgggctcacctgttctagatcagaaaggaagccagcaggcctggagtctgcctgtgggaagaatcaaacttttcttttctggc

SEQ ID NO: 105467 - DNA, 120 bp, Artificial Sequence
  ENSG00000096093_108 (sequence is synthesized)
cagcattaaaggcccacttcatattcatagtcatatatttaattcaagtacttcccgaaagtttttttctgtaattgtcacttgtttatgcaaataccagcagacactggaaagcttctt

SEQ ID NO: 105468 - DNA, 120 bp, Artificial Sequence
  ENSG00000096093_109 (sequence is synthesized)
gcttcagcataccactaattaaatcatctttaaaatttttttaaatttagtaatttaagttttttaaaatgtagtaatgaggaaaagataccactgtgactcttagaatatgatatcaat

SEQ ID NO: 105469 - DNA, 120 bp, Artificial Sequence
  ENSG00000096093_110 (sequence is synthesized)
aaaaataaggagaaattcaaattttaggttgccatatggatatggtttgtttggccccagcaagctatggttttagatatggtttgtttggccccatgaagccttatgttgaaatctgat

SEQ ID NO: 105470 - DNA, 120 bp, Artificial Sequence
  ENSG00000096093_111 (sequence is synthesized)
ccccattgttggagatgggcctcatggaaggtgtctggatcctgagggcagatccatcataaatagcttggtgccattctcataggaatgagttctcacttgtagttcccatgagaactg

SEQ ID NO: 105471 - DNA, 120 bp, Artificial Sequence
  ENSG00000096093_112 (sequence is synthesized)
ttgttgaaaagagcctggcaccacctactctctctctcttgcctcttctcttatcatgtgatctctgcacatgtctgctccccttccccttccaccatgaagggaagcagcctgacattt

SEQ ID NO: 105472 - DNA, 120 bp, Artificial Sequence
  ENSG00000096093_113 (sequence is synthesized)
tcactagaagcaaatgttggtaccatgttccttatacagtctgcagaactctgagccaaataagcctgcttttcttttttaaataaattaccagcctcagttatttcatagcaacacaaa

SEQ ID NO: 105473 - DNA, 120 bp, Artificial Sequence
  ENSG00000096093_114 (sequence is synthesized)
tggactacgacatggggtaagagatccattgccatcctcattttgatcctcacccccgcccttcttctcttgtgatgggtcagagagatgagttaggaaaaacacatggagacgatacaa

SEQ ID NO: 105474 - DNA, 120 bp, Artificial Sequence
  ENSG00000096093_115 (sequence is synthesized)
atccactgtcgcatcttctgtgcctcttagctattctgcgtttagctcccgactcacccatctgataaagaatcgcgatctaaggaaatgcagttacaaatatattttgccactcattgc

SEQ ID NO: 105475 - DNA, 120 bp, Artificial Sequence
  ENSG00000096093_116 (sequence is synthesized)
agagtcatgaaaggggatcatgagtacttgtcagaccagtactttttatgtcaattgtcagttctaagatgatgaaatttggagttggccatttgctttctctgagccagaaaattagaa

SEQ ID NO: 105476 - DNA, 120 bp, Artificial Sequence
  ENSG00000096093_117 (sequence is synthesized)
taatgcataggtaactgagtattaacttcatcttcaagttcttaaattctctttgggtttggggtcctccactgcagtattttgaactcaagacttaaggccagcaaatgcacacactta

SEQ ID NO: 105477 - DNA, 120 bp, Artificial Sequence
  ENSG00000096093_118 (sequence is synthesized)
ttaacctaccttccacaggaaatccacatgtgtgaatagcatagatacatacacacatttgttcatatgtattattcttgttccattaacatgcctatttgtgcactttagcttcaagag

SEQ ID NO: 105478 - DNA, 120 bp, Artificial Sequence
  ENSG00000096093_119 (sequence is synthesized)
gaccctactcacttactcaattatctttttaatccttttctttttcacttctagctacttttcccatgagaattttccaaatattctcattttcttttccattttctttaaggagataga

SEQ ID NO: 105479 - DNA, 120 bp, Artificial Sequence
  ENSG00000096093_120 (sequence is synthesized)
agtaattggtttcaaatatgagatcaaatgatccaatgtgggcttcatcagttttctcacccttcatcttagaatgtttctctactatcactcttcttctctttaccttcttttgtcaga

SEQ ID NO: 105480 - DNA, 120 bp, Artificial Sequence
  ENSG00000096093_121 (sequence is synthesized)
gataagtaactcctcctatttcttcaaatctaattcttctattttgtgtctgtaaccactttcctcctgactgctccagaatctttttgactttttttaatgactgcttcataaattgct

SEQ ID NO: 105481 - DNA, 120 bp, Artificial Sequence
  ENSG00000096093_122 (sequence is synthesized)
ttcttgaaggtcattggttgtttccaagtataatggactcttctcatttagtcattaattcaacagatatttgagcttataccatataccaaactttatattaaatgcttaggcaattat

SEQ ID NO: 105482 - DNA, 120 bp, Artificial Sequence
  ENSG00000096093_123 (sequence is synthesized)
atgagagaatagggagctcataatctagagcaagggttggcaatttttttttttttaagtgaagggacaggtagtaagtagtttaggctttgtgggtcataccttctttggcatgactac

SEQ ID NO: 105483 - DNA, 120 bp, Artificial Sequence
  ENSG00000096093_124 (sequence is synthesized)
tcaactctacccttacagcgtgaaagcagccgtaaacaatacataaatgaataggagtggctatatttcaataaaattttatgtataaaaaataggcagcaggttggctttggcctgggt

SEQ ID NO: 105484 - DNA, 120 bp, Artificial Sequence
  ENSG00000096093_125 (sequence is synthesized)
attcaaagtttctggtagtcctacctctcttaaagcctattgtgtgtgtctttcctacttccgtctactaggttggcatttctcaaggtcctgtttttggtccttttgcttgccttctct

SEQ ID NO: 105485 - DNA, 120 bp, Artificial Sequence
  ENSG00000096093_126 (sequence is synthesized)
aaactttctagacattgcagtatctgaattgctctccattctgctgaatctattttcaacatgtctttgtccatctgagccaccagcatctcccactttgtacaactaaaaatgaagcca

SEQ ID NO: 105486 - DNA, 120 bp, Artificial Sequence
  ENSG00000096093_127 (sequence is synthesized)
ttgtcattttcatctttctagcacacctgctcttccttattccttctttttgcttatctgtctcattttctaagtggaggactttgccaggatgctcatagcaaaatattctaagagcac

SEQ ID NO: 105487 - DNA, 120 bp, Artificial Sequence
  ENSG00000096093_128 (sequence is synthesized)
acagaaaactgtgacatccctcttacctctggaagattagccactctataaaacacgttcacttttatggaagttatggaaggtcattggagggcttggcacagagttcaactagcatgt

SEQ ID NO: 105488 - DNA, 120 bp, Artificial Sequence
  ENSG00000096093_129 (sequence is synthesized)
taggacctccggccacctctcagttggcagtccctgttggacataaccagctggcccctctgttttcttgttgagccatgtgagcaaaccttgccctgtaacttgcagctcttttccaga

SEQ ID NO: 105489 - DNA, 120 bp, Artificial Sequence
  ENSG00000096093_130 (sequence is synthesized)
gtgtgccctgacttgggctttggcaataaagtaggggctgtaactttaactagctcttccttaaacagtaccacctattgccatctatctgtgaatttactccatcttgctcaaaggcag

SEQ ID NO: 105490 - DNA, 120 bp, Artificial Sequence
  ENSG00000096093_131 (sequence is synthesized)
cagatgccatgggtatttttcctgctgtataaaggggaatgggaatctggcttctttgggaaagggagagttattgtctctttccccaaatgattggatgatcacattttaactttatat

SEQ ID NO: 105491 - DNA, 120 bp, Artificial Sequence
  ENSG00000096093_132 (sequence is synthesized)
gtttcatggctctagttcttggaaacacatgcaagattgaggtttgactgctttctgccactaaaatagctccctggtggtcattcataatttagtatatatgatttgaattacattcat

SEQ ID NO: 105492 - DNA, 120 bp, Artificial Sequence
  ENSG00000096093_133 (sequence is synthesized)
cagataaacacattctgcttctataattaataatgccagagagcatttagatattggggattattacaacaatttttattgttcttggcttactacaaaagtaacacatgaccagaattt

SEQ ID NO: 105493 - DNA, 120 bp, Artificial Sequence
  ENSG00000096093_134 (sequence is synthesized)
gaaaatttagggaataaaaatctaggtaatagaaatggaaataaacaaaaatttttgaaaatcttataactcagagataactgcttctaatattttgtttttaaagatgcatataaagtg

SEQ ID NO: 105494 - DNA, 120 bp, Artificial Sequence
  ENSG00000096093_135 (sequence is synthesized)
ttattcccccacaacttttataacacaaggtaacactctatacatacttttatgtcttgagtttctcactaaaaatatctttatactctttctgcagcattgtcaatggctgcagtatta

SEQ ID NO: 105495 - DNA, 120 bp, Artificial Sequence
  ENSG00000096093_136 (sequence is synthesized)
ttctgttgctttattgtagtgtaaattatttaattccctatttttggacatttagactatctcaaaacaatcttatagatgtatctttgcatacaacccatgattatttccttaggataa

SEQ ID NO: 105496 - DNA, 120 bp, Artificial Sequence
  ENSG00000096093_137 (sequence is synthesized)
attatttgagattatttgctggacttttgcttcatgtttccaaatttttcctgaaaggttattccactttataccttccccagcaagacttgccagcaggtaaaagagggaaataagtta

SEQ ID NO: 105497 - DNA, 120 bp, Artificial Sequence
  ENSG00000096093_138 (sequence is synthesized)
aacagaggctatttgcaacagtgaactttaaaaatattatacgcaagaaaagtaaatacagaaaagcaatggtagattgatagttttcaagttacggaaggagaggaattcagtgagagg

SEQ ID NO: 105498 - DNA, 120 bp, Artificial Sequence
  ENSG00000096093_139 (sequence is synthesized)
tgactgggcataattgagagaatatgttggaactggagtgggatgtgagtgctagttttgccgctgacatgggatctgggatcagtcactcgggtcttcaaatgtgttttctcatcactg

SEQ ID NO: 105499 - DNA, 120 bp, Artificial Sequence
  ENSG00000096093_140 (sequence is synthesized)
aaagagggaagaatgcttactgactttatgtggcccattttgttctaaaaggatttatgaagatgaaatatgagggaatctttcagctctaaaatttttaattttataactgtaccttca

SEQ ID NO: 105500 - DNA, 120 bp, Artificial Sequence
  ENSG00000096093_141 (sequence is synthesized)
actgcagcctcaaactcctgagatcctccttgagttcagcttcccaagtagctggaactacaggtgtacaccactattcctagctaatttttaaattttcagtagagacaggggtctcag

SEQ ID NO: 105501 - DNA, 77 bp, Artificial Sequence
  ENSG00000096093_142 (sequence is synthesized)
tcctggcctgggtgaaatctctaaaggagttaatgtagctaaagaaaagaatggctctaagaactaagctctggggt

SEQ ID NO: 105502 - DNA, 120 bp, Artificial Sequence
  ENSG00000096093_143 (sequence is synthesized)
gctaaagaaaagaatggctctaagaactaagctctggggtccaccaacgcttacagttaaggagactgaaaaggaaaacgaataaagcaggaagaaaatgtggtatcctggatgtcaaat

SEQ ID NO: 105503 - DNA, 120 bp, Artificial Sequence
  ENSG00000096093_144 (sequence is synthesized)
gaaggggtagcataggactgtaaaaaataacatgcaaaacaattttaataatcaaagggaaaatgtacaattgttctgtgccctttaaaaatttttgtcactgccaggcgcggtggctca

SEQ ID NO: 105504 - DNA, 76 bp, Artificial Sequence
  ENSG00000096093_145 (sequence is synthesized)
aagaagagctactgatatgtgtatattaattttgtatccagaaacttcgctgaattcttttatcagttctaggagc

SEQ ID NO: 105505 - DNA, 120 bp, Artificial Sequence
  ENSG00000096093_146 (sequence is synthesized)
cactcccagctccatttcctgttttgtatgtatatcgattccgctcctcttctttccgccagtttttgtagagacagcatcttgttgcccaggctggtctcgaactctggggctgaagtg

SEQ ID NO: 105506 - DNA, 120 bp, Artificial Sequence
  ENSG00000096093_147 (sequence is synthesized)
ggtcacagccacccgcgggaagctcgtggccgggaccccgaggcgggagcgcgggctgggccgggctgggctacgcgcacgggctcggccgccgcccctgccgaaaacagccttccacag

SEQ ID NO: 105507 - DNA, 120 bp, Artificial Sequence
  ENSG00000096093_148 (sequence is synthesized)
aaaaaaaaatttgtcacagcattaaaaatgttatggttgtaaatgtataaggacatgaaaaaatagtaaaactaatttttacttagcacattgtaatttaaaacactgataacattaata

SEQ ID NO: 105508 - DNA, 120 bp, Artificial Sequence
  ENSG00000096093_149 (sequence is synthesized)
attaaagtgttttatttctttataaaaactttatcaaaagtggtttgagcagcacttgcctacttctcattgtataacttatgatgcagactgaacgtctgttctgtgccttggtgaatt

SEQ ID NO: 105509 - DNA, 120 bp, Artificial Sequence
  ENSG00000096093_150 (sequence is synthesized)
ctaggagctttctggaggagtctttaggattttccaggacttcttctagtactgtgctgaagaggagtggagagagtgggcatccttatgttgtcccagttctcagagggaatgctttca

SEQ ID NO: 105510 - DNA, 120 bp, Artificial Sequence
  ENSG00000096093_151 (sequence is synthesized)
tgttttcgtattattttgaattttttacactatatataaatccagaattagatatggaaacaccaccacaaacaaaatctggaggcaaatgatcacctggggaaaatatttacaattcag

SEQ ID NO: 105511 - DNA, 120 bp, Artificial Sequence
  ENSG00000096093_152 (sequence is synthesized)
atcagagacaaagggctaatcttgctaatatgtagtaagttgctataatttcacaataaaaggatttttaaaaatcgagtagaaatgaacaaaggatataaacagacaagccacagaaaa

SEQ ID NO: 105512 - DNA, 120 bp, Artificial Sequence
  ENSG00000096093_153 (sequence is synthesized)
aagaaacagaaaagatggctgttatacatttaaaaaaatgctcagccttacacagaagagatatgcaaattaaagctacactaagataccatttcatacctatcagattggcaaaaatac

SEQ ID NO: 105513 - DNA, 120 bp, Artificial Sequence
  ENSG00000096093_154 (sequence is synthesized)
aaagcttgacaatatattcttgctaaggctgtggggaaacagactctttcttacacactgccagcaggaatgtaaaacggtaccacctctttggagggcaatttggcaatttctgttgag

SEQ ID NO: 105514 - DNA, 120 bp, Artificial Sequence
  ENSG00000096093_155 (sequence is synthesized)
attacaaacgcatcaatccttcgatgcagcaattctacttctggaaatttatcctgcagctggtacctgctacagtcaaaatgacgtgtgtacaaggttacacaccacagcactgttttt

SEQ ID NO: 105515 - DNA, 120 bp, Artificial Sequence
  ENSG00000096093_156 (sequence is synthesized)
aatggtaaatgaatggaaacaacccatgttgttttatctatagggaactggtagatatagttataatacaccagggttactcaacatgtggccatgggccaatagcatcagtaacacctg

SEQ ID NO: 105516 - DNA, 120 bp, Artificial Sequence
  ENSG00000096093_157 (sequence is synthesized)
tgagcttaaaaacacgcattcttgggccctaccccaggcctattggctcagaaacttaaagtagaaatctgtatttaactacacctccaggtgatgctgacccagcaaaaatttaaaaaa

SEQ ID NO: 105517 - DNA, 120 bp, Artificial Sequence
  ENSG00000096093_158 (sequence is synthesized)
tatttatgtaagcaatagagcgatttaaaaacatcagagagaaatgaaatcaagagcaggtaaaactgtaactgagagatttatgaatcagaataccagttactttaggaggggtgctga

SEQ ID NO: 105518 - DNA, 120 bp, Artificial Sequence
  ENSG00000096093_159 (sequence is synthesized)
ctggaaggggcagaaggaagctggggtgctgtatcttgatctaggctagagctgcattaaacctcaaaacacatttttagaaagttgatgacgctctctgcatattgatatgaaatgata

SEQ ID NO: 105519 - DNA, 120 bp, Artificial Sequence
  ENSG00000096093_160 (sequence is synthesized)
tctaggatacattatttggtggagaaaaaagccaggtacagaagaagcatatagtattccatcttttatgtaagaaagggcaggaaagaaaaatatgcatttgtatttgcataaagcaac

SEQ ID NO: 105520 - DNA, 120 bp, Artificial Sequence
  ENSG00000096093_161 (sequence is synthesized)
tctggattgccagttaagaaattcttggggcggggggtgggtacacaagacacaacagggactgcccacagggagtaggggtgtgaaagggacggagggcagggtgggaacaagactctc

SEQ ID NO: 105521 - DNA, 120 bp, Artificial Sequence
  ENSG00000096093_162 (sequence is synthesized)
tccctctgtagtcatggactggatggggcacagggaagctaggaagtgggaaatactctatcttggtctaggttcaatcggtacaaaaaaccttgacctaggttagagctgtacaggaaa

SEQ ID NO: 105522 - DNA, 120 bp, Artificial Sequence
  ENSG00000096093_163 (sequence is synthesized)
gtgttttaatacagatttatacttgaactgtgtgaatgtatttctattcaaaaaacaatttttaagtaagtcttcaaattcttcctgctttgtacagataaagtggtgtcttcttctcta

SEQ ID NO: 105523 - DNA, 120 bp, Artificial Sequence
  ENSG00000096093_164 (sequence is synthesized)
gcagaaaggtgtgtgtttgattgctagggtttggcacactcaagatattcaggaagtaattcttgagaaaacaaatgagtaatcacattttagattttctgatttctctcaccaggtggg

SEQ ID NO: 105524 - DNA, 120 bp, Artificial Sequence
  ENSG00000096093_165 (sequence is synthesized)
aattattagatataaacagaaggttccctgtgtcaatgtaatagctagtaacttagaactttttcaacttcatttgtttagcaaatacagttgacccttgaacaatgtgggagttagggg

SEQ ID NO: 105525 - DNA, 120 bp, Artificial Sequence
  ENSG00000096093_166 (sequence is synthesized)
taccagcctccctccacagctgaaaattcatgtataacttttgacaccccaaaacttaactactaatagcctactcttgactgtaagccttactgataacataaacagttgattaacaca

SEQ ID NO: 105526 - DNA, 120 bp, Artificial Sequence
  ENSG00000096093_167 (sequence is synthesized)
atatggactgatatttagggaaggtctttattccaggcaggggaagtgagtatattcaggaaaaacaggtaaagtttgttaaaatacaataggaatttgagaagaaggcccagaggcttt

SEQ ID NO: 105527 - DNA, 120 bp, Artificial Sequence
  ENSG00000096093_168 (sequence is synthesized)
atagctaccttcttattgcaaaatccttcaaccctcagtgacctccctattggccccccagccaggatgctctcattgtgtggtgttggtacaagtgcaaagcaagttcagataccacca

SEQ ID NO: 105528 - DNA, 120 bp, Artificial Sequence
  ENSG00000096093_169 (sequence is synthesized)
ctttgcagtttctgcctagcctccagagaaaactcagatgcttagcatgtaggccgtcagctcagggttcctctgtccatagttacctgtaaattcactgagtagtggttttgcaattga

SEQ ID NO: 105529 - DNA, 120 bp, Artificial Sequence
  ENSG00000096093_170 (sequence is synthesized)
agcaaattaggtcattttccatctgctaaatccactagtcatattctagccatgattaccacattaactacagtcccagcaagtgattttggggtcagtgttccaagtagtacgccgtag

SEQ ID NO: 105530 - DNA, 120 bp, Artificial Sequence
  ENSG00000096093_171 (sequence is synthesized)
acaaatttaatagtcctttgttgttgaagaaatactctgttatggatggtactagggactatatggacttacttgttaaagtgcctgaaaataatatataaaaagattttgtggaggtat

SEQ ID NO: 105531 - DNA, 120 bp, Artificial Sequence
  ENSG00000096093_172 (sequence is synthesized)
atacaagagaaaatgtgtgctacacaggaccctcactggggtgggactaggtcctgcttttgtagtaaggggtcagtggacatcagcaatagtttctctgtagccctgagagttacttta

SEQ ID NO: 105532 - DNA, 120 bp, Artificial Sequence
  ENSG00000096093_173 (sequence is synthesized)
gagcatcatcagttacttctgtgatcagtgaacatgatgcaaaatccacagaggaaggggataagtgatatgttatattttctgactatatttgtttatgtagaaaatatatttgcataa

SEQ ID NO: 105533 - DNA, 120 bp, Artificial Sequence
  ENSG00000096093_174 (sequence is synthesized)
atgactggtgtccatataagaagaggagaagacacagaggaaagacagccatgtgaagacacatagacacacacaggggacagcatcatgtgacaatgtaggcagagatgggagttatgt

SEQ ID NO: 105534 - DNA, 63 bp, Artificial Sequence
  ENSG00000096093_175 (sequence is synthesized)
tattcctgcgcatgtggcctttgacaaaaaggttactggggaacaggtcgtgtttggttacat

SEQ ID NO: 105535 - DNA, 120 bp, Artificial Sequence
  ENSG00000096093_176 (sequence is synthesized)
tctggtgagggctctcttcctggcttgcatacagcggtcttcttgctatgtcttcatgtggccttaccttggtactgaaatttgatgcctatttccaagaagatgttcctatgtcaactg

SEQ ID NO: 105536 - DNA, 120 bp, Artificial Sequence
  ENSG00000096264_0 (sequence is synthesized)
aggcatcttctacagaggcctgggaagctgtgtgccagacagcgccgagcccaccagacccagactcacctacagctggagatccccacttccctgtgcccacagaatctgccctttgca

SEQ ID NO: 105537 - DNA, 120 bp, Artificial Sequence
  ENSG00000096264_1 (sequence is synthesized)
gtctcccatctccccaacccaggcctcagcctgtctcatttttctatcagacgtgctggaagagcagcagaatcaggcccagctcccaattccctctccccagtcttctccaggtgtccc

SEQ ID NO: 105538 - DNA, 120 bp, Artificial Sequence
  ENSG00000096264_2 (sequence is synthesized)
ctcccatgagcgcacaggaaaaggaccacatggcctggcgagccctacacccactgctactgctgctgctgctgttcccaggctctcaggcacaatccaaggctcaggtacttcaaagtg

SEQ ID NO: 105539 - DNA, 120 bp, Artificial Sequence
  ENSG00000096264_3 (sequence is synthesized)
tggcagggcagacgctaaccgtgagatgccagtacccgcccacgggcagtctctacgagaagaaaggctggtgtaaggaggcttcagcacttgtgtgcatcaggttagtcaccagctcca

SEQ ID NO: 105540 - DNA, 120 bp, Artificial Sequence
  ENSG00000096264_4 (sequence is synthesized)
accctgatgctggcttcttcactgtcaccatgactgatctgagagaggaagactcaggacattactggtgtagaatctaccgcccttctgacaactctgtctctaagtccgtcagattct

SEQ ID NO: 105541 - DNA, 120 bp, Artificial Sequence
  ENSG00000096264_5 (sequence is synthesized)
atctggtggtatctccagcctctgcctccacacagacctcctggactccccgcgacctggtctcttcacagacccagacccagagctgtgtgcctcccactgcaggagccagacaagccc

SEQ ID NO: 105542 - DNA, 120 bp, Artificial Sequence
  ENSG00000096264_6 (sequence is synthesized)
ctgagtctccatctaccatccctgtcccttcacagccacagaactccacgctccgccctggccctgcagcccccattgccctggtgcctgtgttctgtggactcctcgtagccaagagcc

SEQ ID NO: 105543 - DNA, 120 bp, Artificial Sequence
  ENSG00000096264_7 (sequence is synthesized)
tggtgctgtcagccctgctcgtctggtggggggacatatggtggaaaaccatgatggagctcaggagcctggatacccaaaaagccacctgccaccttcaacaggtcacggaccttccct

SEQ ID NO: 105544 - DNA, 120 bp, Artificial Sequence
  ENSG00000096264_8 (sequence is synthesized)
ggacctcagtttcctcacctgtagagagagaaatattatatcacactgttgcaaggactaagataagcgatgatgatgatgaacacactttgtgaataataaaattatctgaatgtttta

SEQ ID NO: 105545 - DNA, 120 bp, Artificial Sequence
  ENSG00000096384_0 (sequence is synthesized)
ggcacgcagtagctctctcgagtcactccggcgcagtgttgggactgtctgggtatcggaaagcaagcctacgttgctcactattacgtataatccttttcttttcaagatttttatttt

SEQ ID NO: 105546 - DNA, 120 bp, Artificial Sequence
  ENSG00000096384_1 (sequence is synthesized)
agatgcctgaggaagtgcaccatggagaggaggaggtggagacttttgcctttcaggcagaaattgcccaactcatgtccctcatcatcaataccttctattccaacaaggagattttcc

SEQ ID NO: 105547 - DNA, 120 bp, Artificial Sequence
  ENSG00000096384_2 (sequence is synthesized)
ttcgggagttgatctctaatgcttctgatgccttggacaagattcgctatgagagcctgacagacccttcgaagttggacagtggtaaagagctgaaaattgacatcatccccaaccctc

SEQ ID NO: 105548 - DNA, 120 bp, Artificial Sequence
  ENSG00000096384_3 (sequence is synthesized)
aggaacgtaccctgactttggtagacacaggcattggcatgaccaaagctgatctcataaataatttgggaaccattgccaagtctggtactaaagcattcatggaggctcttcaggctg

SEQ ID NO: 105549 - DNA, 120 bp, Artificial Sequence
  ENSG00000096384_4 (sequence is synthesized)
gtgcagacatctccatgattgggcagtttggtgttggcttttattctgcctacttggtggcagagaaagtggttgtgatcacaaagcacaacgatgatgaacagtatgcttgggagtctt

SEQ ID NO: 105550 - DNA, 120 bp, Artificial Sequence
  ENSG00000096384_5 (sequence is synthesized)
ctgctggaggttccttcactgtgcgtgctgaccatggtgagcccattggcaggggtaccaaagtgatcctccatcttaaagaagatcagacagagtacctagaagagaggcgggtcaaag

SEQ ID NO: 105551 - DNA, 120 bp, Artificial Sequence
  ENSG00000096384_6 (sequence is synthesized)
aagtagtgaagaagcattctcagttcataggctatcccatcaccctttatttggagaaggaacgagagaaggaaattagtgatgatgaggcagaggaagagaaaggtgagaaagaagagg

SEQ ID NO: 105552 - DNA, 120 bp, Artificial Sequence
  ENSG00000096384_7 (sequence is synthesized)
aagataaagatgatgaagaaaaacccaagatcgaagatgtgggttcagatgaggaggatgacagcggtaaggataagaagaagaaaactaagaagatcaaagagaaatacattgatcagg

SEQ ID NO: 105553 - DNA, 120 bp, Artificial Sequence
  ENSG00000096384_8 (sequence is synthesized)
aagaactaaacaagaccaagcctatttggaccagaaaccctgatgacatcacccaagaggagtatggagaattctacaagagcctcactaatgactgggaagaccacttggcagtcaagc

SEQ ID NO: 105554 - DNA, 120 bp, Artificial Sequence
  ENSG00000096384_9 (sequence is synthesized)
acttttctgtagaaggtcagttggaattcagggcattgctatttattcctcgtcgggctccctttgacctttttgagaacaagaagaaaaagaacaacatcaaactctatgtccgccgtg

SEQ ID NO: 105555 - DNA, 120 bp, Artificial Sequence
  ENSG00000096384_10 (sequence is synthesized)
gttgactctgaggatctgcccctgaacatctcccgagaaatgctccagcagagcaaaatcttgaaagtcattcgcaaaaacattgttaagaagtgccttgagctcttctctgagctggca

SEQ ID NO: 105556 - DNA, 120 bp, Artificial Sequence
  ENSG00000096384_11 (sequence is synthesized)
gaagacaaggagaattacaagaaattctatgaggcattctctaaaaatctcaagcttggaatccacgaagactccactaaccgccgccgcctgtctgagctgctgcgctatcatacctcc

SEQ ID NO: 105557 - DNA, 120 bp, Artificial Sequence
  ENSG00000096384_12 (sequence is synthesized)
cagtctggagatgagatgacatctctgtcagagtatgtttctcgcatgaaggagacacagaagtccatctattacatcactggtgagagcaaagagcaggtggccaactcagcttttgtg

SEQ ID NO: 105558 - DNA, 120 bp, Artificial Sequence
  ENSG00000096384_13 (sequence is synthesized)
gagcgagtgcggaaacggggcttcgaggtggtatatatgaccgagcccattgacgagtactgtgtgcagcagctcaaggaatttgatgggaagagcctggtctcagttaccaaggagggt

SEQ ID NO: 105559 - DNA, 120 bp, Artificial Sequence
  ENSG00000096384_14 (sequence is synthesized)
ctggagctgcctgaggatgaggaggagaagaagaagatggaagagagcaaggcaaagtttgagaacctctgcaagctcatgaaagaaatcttagataagaaggttgagaaggtgacaatc

SEQ ID NO: 105560 - DNA, 120 bp, Artificial Sequence
  ENSG00000096384_15 (sequence is synthesized)
tccaatagacttgtgtcttcaccttgctgcattgtgaccagcacctacggctggacagccaatatggagcggatcatgaaagcccaggcacttcgggacaactccaccatgggctatatg

SEQ ID NO: 105561 - DNA, 120 bp, Artificial Sequence
  ENSG00000096384_16 (sequence is synthesized)
atggccaaaaagcacctggagatcaaccctgaccaccccattgtggagacgctgcggcagaaggctgaggccgacaagaatgataaggcagttaaggacctggtggtgctgctgtttgaa

SEQ ID NO: 105562 - DNA, 120 bp, Artificial Sequence
  ENSG00000096384_17 (sequence is synthesized)
accgccctgctatcttctggcttttcccttgaggatccccagacccactccaaccgcatctatcgcatgatcaagctaggtctaggtattgatgaagatgaagtggcagcagaggaaccc

SEQ ID NO: 105563 - DNA, 120 bp, Artificial Sequence
  ENSG00000096384_18 (sequence is synthesized)
aatgctgcagttcctgatgagatcccccctctcgagggcgatgaggatgcgtctcgcatggaagaagtcgattaggttaggagttcatagttggaaaacttgtgcccttgtatagtgtcc

SEQ ID NO: 105564 - DNA, 120 bp, Artificial Sequence
  ENSG00000096384_19 (sequence is synthesized)
ccatgggctcccactgcagcctcgagtgcccctgtcccacctggctccccctgctggtgtctagtgtttttttccctctcctgtccttgtgttgaaggcagtaaactaagggtgtcaagc

SEQ ID NO: 105565 - DNA, 120 bp, Artificial Sequence
  ENSG00000096384_20 (sequence is synthesized)
cccattccctctctactcttgacagcaggattggatgttgtgtattgtggtttattttattttcttcattttgttctgaaattaaagtatgcaaaataaagaatatgccgtttttataca

SEQ ID NO: 105566 - DNA, 120 bp, Artificial Sequence
  ENSG00000096384_21 (sequence is synthesized)
gtgcccggatgctggggcgagggagggtgcactgcggcgccccctcctcgcgtggtcctggccgacgcatgtccggcagtgacgagtgtcggcctggtggctacggccaccatctttctt

SEQ ID NO: 105567 - DNA, 120 bp, Artificial Sequence
  ENSG00000096384_22 (sequence is synthesized)
agaggggggtcccccccgcaggtactccactctcagtctgcaaaagtgtacgcccgcagagccgccccaggtgcctgggtgttgtgtgattgacgcggggaaggaggggtcagccgatcc

SEQ ID NO: 105568 - DNA, 120 bp, Artificial Sequence
  ENSG00000096395_0 (sequence is synthesized)
agaagacaagcagagagactcctccagacccactcagaccacgtgcacgccctccaagatggtatcccgtaaggctgtggctgctctgctggtggtgcatgtagctgccatgctggcctc

SEQ ID NO: 105569 - DNA, 120 bp, Artificial Sequence
  ENSG00000096395_1 (sequence is synthesized)
ccagacggaagccttcgtccccatcttcacctatggcgaactccagaggatgcaggaaaaggaacggaataaagggcaaaagaaatccctgagtgtatggcagaggtctggggaggaagg

SEQ ID NO: 105570 - DNA, 120 bp, Artificial Sequence
  ENSG00000096395_2 (sequence is synthesized)
gaggatgaactccagacagctggaaaagtacccggccaccctggaagggctgctgagtgagatgcttccccagcatgcagccaagtgatggccacgctggggagaaggtggacagatttg

SEQ ID NO: 105571 - DNA, 120 bp, Artificial Sequence
  ENSG00000096395_3 (sequence is synthesized)
ggaggcccctcctgcccaagtgaggccctgggaatttacagagcctgccagctgggcttggaaggaaaacaccctttccaaagcaaattcccctccagcaaataaagcatgaaatataca

SEQ ID NO: 105572 - DNA, 120 bp, Artificial Sequence
  ENSG00000096401_0 (sequence is synthesized)
cttcaaagcagaaggtcgcgcttggaggaagtggcggctttgagtccggtggcccaatcgctgttactacttctctgaagctcctctcggctgcttgccgagacaccctgccgccaagat

SEQ ID NO: 105573 - DNA, 120 bp, Artificial Sequence
  ENSG00000096401_1 (sequence is synthesized)
gcctcgaattatgatcaaggggggcgtatggaggaataccgaggatgaaattctgaaagcagcggtaatgaaatatgggaaaaatcagtggtctaggattgcctcattgctgcatagaaa

SEQ ID NO: 105574 - DNA, 120 bp, Artificial Sequence
  ENSG00000096401_2 (sequence is synthesized)
atcagcaaagcagtgcaaagccagatggtatgaatggctggatccaagcattaagaagacagaatggtccagagaagaagaggaaaaactcttgcacttggccaagttgatgccaactca

SEQ ID NO: 105575 - DNA, 120 bp, Artificial Sequence
  ENSG00000096401_3 (sequence is synthesized)
gtggaggaccattgctccaatcattggaagaacagcggcccagtgcttagaacactatgaatttcttctggataaagctgcccaaagagacaatgaagaggaaacaacagatgatccacg

SEQ ID NO: 105576 - DNA, 120 bp, Artificial Sequence
  ENSG00000096401_4 (sequence is synthesized)
aaaacttaaacctggagaaatagatccaaatccagaaacaaaaccagcgcggcctgatccaattgatatggatgaggatgaacttgagatgctttctgaagccagagcccgcttggctaa

SEQ ID NO: 105577 - DNA, 120 bp, Artificial Sequence
  ENSG00000096401_5 (sequence is synthesized)
tactcagggaaagaaggccaagaggaaagcaagagagaaacaattggaagaagcaagacgtcttgctgccctccaaaaaagaagagaacttcgagcagctggcatagaaattcagaagaa

SEQ ID NO: 105578 - DNA, 120 bp, Artificial Sequence
  ENSG00000096401_6 (sequence is synthesized)
aagaaaaaggaagagaggagttgattataatgccgaaatcccatttgaaaaaaagcctgcccttggtttttatgatacttctgaggaaaactaccaagctcttgacgcagatttcaggaa

SEQ ID NO: 105579 - DNA, 120 bp, Artificial Sequence
  ENSG00000096401_7 (sequence is synthesized)
attaagacaacaggatcttgatggggagctaagatctgaaaaagaaggaagagatagaaaaaaagacaaacagcatttgaaaaggaaaaaagaatctgatttaccatcagctattcttca

SEQ ID NO: 105580 - DNA, 120 bp, Artificial Sequence
  ENSG00000096401_8 (sequence is synthesized)
aactagtggtgtttctgaatttactaaaaagagaagcaaactagtacttcctgcccctcagatttcagatgcagaactccaggaagttgtaaaagtaggccaagcgagtgaaattgcacg

SEQ ID NO: 105581 - DNA, 120 bp, Artificial Sequence
  ENSG00000096401_9 (sequence is synthesized)
tcaaactgccgaggaatctggcataacaaattctgcttccagtacacttttgtctgagtacaatgtcaccaacaacagcgttgctcttagaacaccacgaacaccagcttcccaggacag

SEQ ID NO: 105582 - DNA, 120 bp, Artificial Sequence
  ENSG00000096401_10 (sequence is synthesized)
aattctgcaggaagcccagaacctcatggccctcaccaatgtggacaccccattgaaaggtggacttaataccccattgcatgagagtgacttctcaggtgtaactccacagcgacaagt

SEQ ID NO: 105583 - DNA, 120 bp, Artificial Sequence
  ENSG00000096401_11 (sequence is synthesized)
tgtacagactccaaacacagttctctctactccattcaggactccttctaatggagctgaagggctgactccccggagtggaacaactcccaaaccagttattaactctactccgggtag

SEQ ID NO: 105584 - DNA, 120 bp, Artificial Sequence
  ENSG00000096401_12 (sequence is synthesized)
aactcctcttcgagacaagttaaacattaatcccgaggatggaatggcagactatagtgatccctcttacgtgaagcagatggaaagagaatcccgagaacatctccgtttagggttgtt

SEQ ID NO: 105585 - DNA, 120 bp, Artificial Sequence
  ENSG00000096401_13 (sequence is synthesized)
gggccttcctgcccctaagaatgattttgaaattgttctaccagaaaatgccgagaaggagctggaagaacgtgaaatagatgatacttacattgaagatgctgctgatgtggatgctcg

SEQ ID NO: 105586 - DNA, 120 bp, Artificial Sequence
  ENSG00000096401_14 (sequence is synthesized)
aaagcaggccatacgagatgcagagcgtgtaaaggaaatgaaacgaatgcataaagctgtccagaaagatctgccaagaccatcagaagtaaatgaaactattctaagacccttaaatgt

SEQ ID NO: 105587 - DNA, 120 bp, Artificial Sequence
  ENSG00000096401_15 (sequence is synthesized)
agaaccgcctttaacagatttacagaaaagtgaagaactaatcaaaaaagaaatgatcacaatgcttcattatgaccttctacatcacccttatgaaccatctggaaataaaaaaggcaa

SEQ ID NO: 105588 - DNA, 120 bp, Artificial Sequence
  ENSG00000096401_16 (sequence is synthesized)
aactgtagggtttggtaccaataattcagagcacattacctatctggaacataatccttatgaaaagttctccaaagaagagctgaaaaaggcccaggatgttttggtgcaggagatgga

SEQ ID NO: 105589 - DNA, 120 bp, Artificial Sequence
  ENSG00000096401_17 (sequence is synthesized)
agtggttaaacaaggaatgagccatggagagctctcaagtgaagcttataaccaggtgtgggaagaatgctacagtcaagttttatatcttcctgggcagagccgctacacacgggccaa

SEQ ID NO: 105590 - DNA, 120 bp, Artificial Sequence
  ENSG00000096401_18 (sequence is synthesized)
tctggctagtaaaaaggacagaattgaatcacttgaaaagaggctcgagataaacaggggtcacatgacgacagaagccaagagggctgcaaagatggaaaagaagatgaaaattttgct

SEQ ID NO: 105591 - DNA, 120 bp, Artificial Sequence
  ENSG00000096401_19 (sequence is synthesized)
tgggggttaccagtctcgtgctatggggctcatgaaacagttgaatgacttatgggaccaaattgaacaggctcacttggagttacgcacttttgaagaactcaagaaacatgaagattc

SEQ ID NO: 105592 - DNA, 120 bp, Artificial Sequence
  ENSG00000096401_20 (sequence is synthesized)
tgctattccccggaggctagagtgtctaaaagaagacgttcagcgacaacaagaaagagaaaaggaacttcaacatagatatgctgatttgctgctggagaaagagactttaaagtcaaa

SEQ ID NO: 105593 - DNA, 120 bp, Artificial Sequence
  ENSG00000096401_21 (sequence is synthesized)
attctgaagtacagtttatattctgtcacaggattaattaattgccggttttcatactctagaaggctgaaactgatgtttatcttcattgacaaatttacccaccatctgtggtttttc

SEQ ID NO: 105594 - DNA, 120 bp, Artificial Sequence
  ENSG00000096401_22 (sequence is synthesized)
agttgtttattttaaatgatatcgatcttacacattctgtgtataaagaccttaactccacaggacggacattttagagtttaaattattaaggctatcattcttttagtaatgtcatat

SEQ ID NO: 105595 - DNA, 120 bp, Artificial Sequence
  ENSG00000096401_23 (sequence is synthesized)
ttgcaaacttttttagttttggcctttaatttaaaaagcctaattttaaagtgctgcctgtgagtaactcttgaataaaaacaaaatataaaaaattgagaatgtagccttttgtttgaa

SEQ ID NO: 105596 - DNA, 120 bp, Artificial Sequence
  ENSG00000096401_24 (sequence is synthesized)
gtaattagatacttaagagtgcctgcaaaccagcagctatgtactctgtgtcatatttaatgagtaactcttgggtaatcaaaatggtgatgcagtatcttaaacacttaagaggcagtt

SEQ ID NO: 105597 - DNA, 120 bp, Artificial Sequence
  ENSG00000096401_25 (sequence is synthesized)
ctttgtggctttgttagtttcagcaaagagtggtcatttctgtatacactgacaagttagattaactttttagtacctcaaattttttttttgttaatatcactttaaagaaggtctctt

SEQ ID NO: 105598 - DNA, 120 bp, Artificial Sequence
  ENSG00000096401_26 (sequence is synthesized)
tctgccagctacttaaataatttatgggtcagggcttaaaagatttaacttccttgccccattattttcttataagtattttttgacaaaggcattttaaaagttaatttcaagaaggcc

SEQ ID NO: 105599 - DNA, 120 bp, Artificial Sequence
  ENSG00000096401_27 (sequence is synthesized)
atcaaacttaaagctctatgtttagcctaagaagtcagttacatcagtgtagaatttggggaatggatagaggtggagatatttaattttatataattcatataaattgatttagttaca

SEQ ID NO: 105600 - DNA, 120 bp, Artificial Sequence
  ENSG00000096401_28 (sequence is synthesized)
gtatcagttggctacaagctcattatagactagcaatgttttgacatcaccaaaaacgtttgcccagtcttagaatactagggactataggaagggaagggattcattcattcattcgat

SEQ ID NO: 105601 - DNA, 120 bp, Artificial Sequence
  ENSG00000096401_29 (sequence is synthesized)
attgaatgtataccctgtgccagagtcttagagagagaacaacaaacaaaataggcctagttcttgtttagtagagcttatagtcttttgagaatgacagacaattaaaatccaaatgtt

SEQ ID NO: 105602 - DNA, 120 bp, Artificial Sequence
  ENSG00000096401_30 (sequence is synthesized)
tatttggtgattcttatgtgtcagacacttaagtgttgggagataagcagttattaagacagagttcttgctctcatggaggtgacattagtggggaggagatactaagtatgtccaggg

SEQ ID NO: 105603 - DNA, 120 bp, Artificial Sequence
  ENSG00000096401_31 (sequence is synthesized)
aaagtatcagaccatgagttttagattctgtggaggaaattaaagtagggtgattatgagatagtgaatgagtggctattttagactggacgatcaaagagacctcttggaaggcagcta

SEQ ID NO: 105604 - DNA, 120 bp, Artificial Sequence
  ENSG00000096401_32 (sequence is synthesized)
tgctcaccactataccactgcactgtgccgcaccgtaccactataagctgcacggccaaagagacctcttaaagaagtaacatttaagataacatgtgattgacattttagaatgggcta

SEQ ID NO: 105605 - DNA, 120 bp, Artificial Sequence
  ENSG00000096401_33 (sequence is synthesized)
tccttgtgagattcaaggaaagaacatcctaggtggagtgaatagcaaacataaagcctcttttgtatgtttgaggaacaaaaaggacaatgcagctagagtgtcaagaatggcatttct

SEQ ID NO: 105606 - DNA, 120 bp, Artificial Sequence
  ENSG00000096401_34 (sequence is synthesized)
gtatataagacctcgttgtatagagccacataaataaggctataataaggaatttggatcttactttaaatatgataagaatcgatgagaagatctaagcaaaggaatgacatgatcaga

SEQ ID NO: 105607 - DNA, 120 bp, Artificial Sequence
  ENSG00000096401_35 (sequence is synthesized)
tttggttttagaaacatcactatctccttagtgtgtaaaatctcaccaggctggagatagggaagccagtccaattaggagcctgatgcagtgatccagacaaaaaaataatagtgattc

SEQ ID NO: 105608 - DNA, 120 bp, Artificial Sequence
  ENSG00000096401_36 (sequence is synthesized)
taactagagtccaggtaatagtagtggagatatgtggagagacatgataggtatatacttaatagtcttatcagacgataaattgatattttcctggtgtgtagtcacttaattcaaata

SEQ ID NO: 105609 - DNA, 120 bp, Artificial Sequence
  ENSG00000096401_37 (sequence is synthesized)
cttttttcagtaagttctgggttttctaggaaaaacttcagtatcatcagtgaataatgatagtgtttcttctgatagttttatttcacttttattgcatgttttgttatctgaaatgtt

SEQ ID NO: 105610 - DNA, 120 bp, Artificial Sequence
  ENSG00000096401_38 (sequence is synthesized)
taggacaatgttaacaataatgatgttagacatttttttttcttattttaatgggaatgtccatagttttaagtttgctgttgggagttagatagtctttatctgaaagacagtgtctct

SEQ ID NO: 105611 - DNA, 120 bp, Artificial Sequence
  ENSG00000096401_39 (sequence is synthesized)
cttttagtttttaaagagtttgaattagaaatggctctggaactttaaacagtataccatttgggcatctattaaagcattcatataattgttctcatttgatgttttgatgaggtatat

SEQ ID NO: 105612 - DNA, 120 bp, Artificial Sequence
  ENSG00000096401_40 (sequence is synthesized)
taatagattttcccacattaaatcatctttgcactcctggaatcaggtagattaatttttaaaagaaattttaaaggatttatagtttatttgcactttttgtagacttgaattatatgg

SEQ ID NO: 105613 - DNA, 120 bp, Artificial Sequence
  ENSG00000096401_41 (sequence is synthesized)
atttaaaagttgatctaatattaataaaggctcactttgttttcaaaatttgaagtaattcacatacttatagcctaaaaaaatcggcaggaattacaaaatttcaaaactggcacattg

SEQ ID NO: 105614 - DNA, 120 bp, Artificial Sequence
  ENSG00000096401_42 (sequence is synthesized)
taaactgcatatgcatttgccaggtagtggtgccacttgaaatggtgaacagacacactgttatcctttgtcagtatcctgtaaagcccaggattctttaccagcaccatacagcgattt

SEQ ID NO: 105615 - DNA, 82 bp, Artificial Sequence
  ENSG00000096401_43 (sequence is synthesized)
gtaaagcccaggattctttaccagcaccatacagcgattttggtgactattttaacattcacactgaggccaggggtggtga

SEQ ID NO: 105616 - DNA, 120 bp, Artificial Sequence
  ENSG00000096401_44 (sequence is synthesized)
gtaacatagtgagaccctgtctctattaaaaaataataataaaaataacattcacattggtattgttcactaaggtattggttgttaaggcattcattaaggtattgttaaaacttgtgt

SEQ ID NO: 105617 - DNA, 120 bp, Artificial Sequence
  ENSG00000096401_45 (sequence is synthesized)
taagcatgttaaagtctcagtaactttgggatagaaataaaatgtgataaaaagctgaaagaaaccaccacaagggagagtcctttttgaaatattagagacataatgctgtctaataaa

SEQ ID NO: 105618 - DNA, 120 bp, Artificial Sequence
  ENSG00000096401_46 (sequence is synthesized)
aaacgacatcaaagaaaaactacactacagtgactgcagacttaatgttggccaaccatgcatcctccctagaaatgcatttgaatttgatttactaatcttttatttaggaaatttaca

SEQ ID NO: 105619 - DNA, 63 bp, Artificial Sequence
  ENSG00000096401_47 (sequence is synthesized)
caccttattgtattttgatattgggattttgctagctctctaaagtaaataggataactgtat

SEQ ID NO: 105620 - DNA, 120 bp, Artificial Sequence
  ENSG00000096401_48 (sequence is synthesized)
ggattttgctagctctctaaagtaaataggataactgtatatctttttctgtgcattaagcagttataacatgggaatgatttgttcatgaaaggttgaaagtctgtacttacagaactt

SEQ ID NO: 105621 - DNA, 120 bp, Artificial Sequence
  ENSG00000096401_49 (sequence is synthesized)
ttgagttcacagtgctttctggaaataatttctttataactgtcagtttcttttgtgactattatgttacctatttttaaatttaagcaactttaaattaaaaaaattgtttttaaaata

SEQ ID NO: 105622 - DNA, 120 bp, Artificial Sequence
  ENSG00000096433_0 (sequence is synthesized)
ggcaccctatcttaggcgttcaaataaaggactaggaagcaaacacccaagcaccggggaacagaacagaaagaaagacggaaggagccaagagttttggagccaactcctggagaggga

SEQ ID NO: 105623 - DNA, 120 bp, Artificial Sequence
  ENSG00000096433_1 (sequence is synthesized)
gcggctgaactgattcggaagttggatctctttgtacacaggaatgcggagagaaaaaaaacaaaacccaccccattgcttcatttcccctccaagcctgagcactttctattgtgcaat

SEQ ID NO: 105624 - DNA, 120 bp, Artificial Sequence
  ENSG00000096433_2 (sequence is synthesized)
gaaaaggcttttcacgttgagaaaaatgaatcccgaatttgctctgcaaagggatgagcgcgcctctgggcgccagcctgctctcagctgggcgcggagaccgcgcggtggccgcagggc

SEQ ID NO: 105625 - DNA, 120 bp, Artificial Sequence
  ENSG00000096433_3 (sequence is synthesized)
ggcgctccagggcgcgccctccgcgagcggctccggggtgacgcccgccggagagctggactcccccttccgcgggcgcctgcactggctcttagccagccgagggcccgggtgcagata

SEQ ID NO: 105626 - DNA, 120 bp, Artificial Sequence
  ENSG00000096433_4 (sequence is synthesized)
cgggtgcagatagtccgggaaccccgagggcggagagctccccactacgcctgggcctcccagggatggcagctccgagagccccctagacccggtgccttgcaggacgcctctggagat

SEQ ID NO: 105627 - DNA, 120 bp, Artificial Sequence
  ENSG00000096433_5 (sequence is synthesized)
gccttgcaggacgcctctggagatcaggagggctggcggcgcattcggcgtccgggaggccgggccccggacgcgcgaggagcgcggggcgcgggaaggcaggcgggtgcacatgggtgc

SEQ ID NO: 105628 - DNA, 120 bp, Artificial Sequence
  ENSG00000096433_6 (sequence is synthesized)
gggggcggggtgtggcctccccgcctcccgggcgggatttgcatgtgtgtggtggccccagacttcctgctccttctacgctgcaggtacgcgcgggccgggcggggcgggcgggcggcg

SEQ ID NO: 105629 - DNA, 80 bp, Artificial Sequence
  ENSG00000096433_7 (sequence is synthesized)
ggcgcgccaagacgtgggcacctcctcacccggaccccgggccccgccgagccgcctcctggctcccgtggccgccagcc

SEQ ID NO: 105630 - DNA, 120 bp, Artificial Sequence
  ENSG00000096433_8 (sequence is synthesized)
gtacccctccccgctccccggacgcctcagtcctccgcactgagcttggccacgcgcccctaggcgccccccacgccctgggccccggagggccgcagccatgagtgaaatgtccagctt

SEQ ID NO: 105631 - DNA, 120 bp, Artificial Sequence
  ENSG00000096433_9 (sequence is synthesized)
tcttcacatcggggacatcgtctccctgtacgccgagggctccgtcaatggcttcatcagcactttggggctggtggatgaccgctgtgtggtggagcccgcggccggggacctggacaa

SEQ ID NO: 105632 - DNA, 120 bp, Artificial Sequence
  ENSG00000096433_10 (sequence is synthesized)
cccccctaagaagttccgtgactgcctcttcaaggtgtgccccatgaaccgctactcggcccagaagcagtactggaaggccaagcagactaagcaggacaaggagaagatcgctgatgt

SEQ ID NO: 105633 - DNA, 120 bp, Artificial Sequence
  ENSG00000096433_11 (sequence is synthesized)
ggtgttgctgcagaagctgcagcatgcggcgcagatggagcagaagcaaaatgacacggagaacaagaaggtgcatggggatgtcgtgaagtatggcagtgtgatccagctcctgcacat

SEQ ID NO: 105634 - DNA, 120 bp, Artificial Sequence
  ENSG00000096433_12 (sequence is synthesized)
gaagagcaacaagtacctgacagtgaacaagcggcttccggccttgctggagaagaacgccatgcgggtgactctggatgccacaggcaacgagggttcctggctcttcatccagccctt

SEQ ID NO: 105635 - DNA, 120 bp, Artificial Sequence
  ENSG00000096433_13 (sequence is synthesized)
ctggaagctgcggagcaacggggacaacgtggtcgtgggggacaaggtgatcctgaatcctgtcaatgccgggcagcctctgcatgccagcaattacgagctcagcgacaacgccggctg

SEQ ID NO: 105636 - DNA, 120 bp, Artificial Sequence
  ENSG00000096433_14 (sequence is synthesized)
caaggaggtcaattctgtgaactgcaacaccagctggaagatcaacctgtttatgcagtttcgggaccacctggaggaggtgttgaaagggggagacgtggtgcggctgttccatgcgga

SEQ ID NO: 105637 - DNA, 120 bp, Artificial Sequence
  ENSG00000096433_15 (sequence is synthesized)
gcaggagaagttcctgacgtgtgacgagtacaagggcaagctgcaggtgttcctgcgaactacactgcgccagtctgccacctcggccaccagctccaatgctctctgggaggtggaggt

SEQ ID NO: 105638 - DNA, 120 bp, Artificial Sequence
  ENSG00000096433_16 (sequence is synthesized)
ggtccaccacgacccctgccgtggaggagctgggcactggaatggcttgtaccgcttcaagcacctggctacaggcaactacctggctgctgaggagaaccccagttacaaaggtgatgc

SEQ ID NO: 105639 - DNA, 120 bp, Artificial Sequence
  ENSG00000096433_17 (sequence is synthesized)
ctcagatcccaaggcagcaggaatgggggcacagggccgcacaggccgcaggaatgctggggagaagatcaagtactgcctggtggctgtgcctcatggcaatgacatcgcctctctctt

SEQ ID NO: 105640 - DNA, 120 bp, Artificial Sequence
  ENSG00000096433_18 (sequence is synthesized)
tgagctggaccccaccaccttgcagaaaaccgactctttcgtgccccggaactcgtacgtccggctgcggcacctctgcaccaacacgtggattcagagcaccaatgtgcccattgacat

SEQ ID NO: 105641 - DNA, 120 bp, Artificial Sequence
  ENSG00000096433_19 (sequence is synthesized)
cgaggaggagcggcccatccggctcatgctgggcacctgccccaccaaggaggacaaggaggcctttgccatcgtgtcagtgcccgtgtctgagatccgagacctggactttgccaatga

SEQ ID NO: 105642 - DNA, 120 bp, Artificial Sequence
  ENSG00000096433_20 (sequence is synthesized)
cgccagctccatgctggccagtgccgtggagaaactcaacgagggcttcatcagccagaatgaccgcaggtttgtcatccagctgctggaagacctggtgttctttgtcagcgatgtccc

SEQ ID NO: 105643 - DNA, 120 bp, Artificial Sequence
  ENSG00000096433_21 (sequence is synthesized)
caacaatgggcagaatgtcctggacatcatggtcactaagcccaaccgggaacggcagaagctgatgagggagcagaacatcctcaaacaggtctttggcattctgaaggccccgttccg

SEQ ID NO: 105644 - DNA, 120 bp, Artificial Sequence
  ENSG00000096433_22 (sequence is synthesized)
tgagaaggggggtgaaggtcccctggtgcggctggaggagctgtcagaccagaagaacgccccctaccagcacatgttccgcctgtgctaccgcgtgttgcggcattcccaggaggacta

SEQ ID NO: 105645 - DNA, 120 bp, Artificial Sequence
  ENSG00000096433_23 (sequence is synthesized)
ccgcaagaaccaggagcacattgccaagcagtttgggatgatgcagtcccagattggctacgacatcctggccgaggacaccatcactgccctgctgcacaacaaccgcaagctcctgga

SEQ ID NO: 105646 - DNA, 120 bp, Artificial Sequence
  ENSG00000096433_24 (sequence is synthesized)
aaagcacatcaccaagaccgaggtggagaccttcgtcagccttgtgcgcaagaaccgggagcccaggttcctggactacctctctgacctgtgtgtgtccaaccacatcgccatccccgt

SEQ ID NO: 105647 - DNA, 120 bp, Artificial Sequence
  ENSG00000096433_25 (sequence is synthesized)
cacccaagagctcatctgcaagtgtgtgctggaccccaagaacagtgacattctcatccggaccgagcttcggcccgtgaaggagatggcccaatcccacgagtacctgagcatcgagta

SEQ ID NO: 105648 - DNA, 120 bp, Artificial Sequence
  ENSG00000096433_26 (sequence is synthesized)
ctcagaagaggaagtgtggctcacgtggactgacaagaataacgagcatcatgagaagagtgtgaggcagctggcccaggaggcgcgggccggcaacgcccacgacgagaatgtgctcag

SEQ ID NO: 105649 - DNA, 120 bp, Artificial Sequence
  ENSG00000096433_27 (sequence is synthesized)
ctactacaggtaccagctgaagctctttgcccgcatgtgcttggaccgccagtacttggccatcgacgagatctcccagcagctgggcgtggacctgattttcctgtgcatggcagacga

SEQ ID NO: 105650 - DNA, 120 bp, Artificial Sequence
  ENSG00000096433_28 (sequence is synthesized)
gatgctgccctttgacctgcgcgcctccttctgccacctgatgctgcacgtgcacgtggaccgtgacccccaggagctggtcacgccggtcaagtttgcccgtctctggactgagatccc

SEQ ID NO: 105651 - DNA, 120 bp, Artificial Sequence
  ENSG00000096433_29 (sequence is synthesized)
cacagccatcaccatcaaggactatgattccaacctcaacgcgtcccgagatgacaagaagaacaagtttgccaacaccatggagttcgtggaggactacctcaacaatgtagtcagcga

SEQ ID NO: 105652 - DNA, 120 bp, Artificial Sequence
  ENSG00000096433_30 (sequence is synthesized)
ggccgtgccctttgccaacgaggagaagaacaagctcacttttgaggtggtcagcctggcgcacaatctcatctacttcggcttctacagcttcagcgagctgctgcggctcactcgcac

SEQ ID NO: 105653 - DNA, 120 bp, Artificial Sequence
  ENSG00000096433_31 (sequence is synthesized)
actgctgggcatcatcgactgtgtgcaggggcccccggccatgctgcaggcctatgaggaccccggtggcaagaatgtgcggcggtccatccagggcgtggggcacatgatgtccaccat

SEQ ID NO: 105654 - DNA, 120 bp, Artificial Sequence
  ENSG00000096433_32 (sequence is synthesized)
ggtgctgagccgcaagcagtccgtcttcagtgcccccagcctgtctgctggggccagtgctgctgagccgctggacagaagcaagtttgaggagaatgaggacattgtggtgatggagac

SEQ ID NO: 105655 - DNA, 120 bp, Artificial Sequence
  ENSG00000096433_33 (sequence is synthesized)
caagctgaagatcctggaaatccttcagttcatcctcaatgtccgcctggattaccgcatatcctacctgctgtctgtcttcaagaaggagtttgtggaggtgtttcccatgcaggacag

SEQ ID NO: 105656 - DNA, 120 bp, Artificial Sequence
  ENSG00000096433_34 (sequence is synthesized)
tggggctgatggcacagcccctgccttcgactctaccactgccaacatgaacctggatcgcatcggggagcaggcggaggccatgtttggagtggggaagacaagcagcatgctggaggt

SEQ ID NO: 105657 - DNA, 120 bp, Artificial Sequence
  ENSG00000096433_35 (sequence is synthesized)
ggatgacgagggcggccgcatgttcctgcgcgtgctcatccacctcaccatgcacgactatgcgccgctggtctcgggtgccctgcagctgctcttcaagcacttcagccagcgccagga

SEQ ID NO: 105658 - DNA, 120 bp, Artificial Sequence
  ENSG00000096433_36 (sequence is synthesized)
ggccatgcacaccttcaagcaggttcagctgctgatctcagcgcaggacgtggagaactacaaggtgatcaagtcggagctggaccggctgcggaccatggtggagaagtcagagctgtg

SEQ ID NO: 105659 - DNA, 120 bp, Artificial Sequence
  ENSG00000096433_37 (sequence is synthesized)
ggtggacaagaagggcagtggcaagggtgaggaggtggaggcaggcgccgccaaggacaagaaagagcgtcccacggacgaggagggctttctgcacccaccaggggagaaaagcagtga

SEQ ID NO: 105660 - DNA, 120 bp, Artificial Sequence
  ENSG00000096433_38 (sequence is synthesized)
gaactaccagatcgtcaagggcatcctggaaaggctgaacaagatgtgcggggttggggagcaaatgaggaagaagcagcaacggctgctgaagaacatggatgcccacaaggtcatgct

SEQ ID NO: 105661 - DNA, 120 bp, Artificial Sequence
  ENSG00000096433_39 (sequence is synthesized)
ggacctgctgcagatcccctatgacaagggtgatgccaagatgatggagatcctgcgctacacgcaccagttcctgcagaagttctgtgcagggaaccccggcaaccaggccctgctgca

SEQ ID NO: 105662 - DNA, 120 bp, Artificial Sequence
  ENSG00000096433_40 (sequence is synthesized)
caaacacctgcacctcttcctcacgccagggctcctggaggcagagaccatgcagcacatcttcctgaacaactatcagctctgctccgagatcagcgagcctgtgttgcagcacttcgt

SEQ ID NO: 105663 - DNA, 120 bp, Artificial Sequence
  ENSG00000096433_41 (sequence is synthesized)
gcagtacctggacttcctgcacaccgtcattaaggccgagggcaagtacgtcaagaagtgccaggacatgatcatgactgagctgaccaatgcaggtgacgatgtggtcgtgttctacaa

SEQ ID NO: 105664 - DNA, 120 bp, Artificial Sequence
  ENSG00000096433_42 (sequence is synthesized)
tgataaggcatcgctggcccacctgctggacatgatgaaggccgcccgcgacggcgtggaggaccacagccccctcatgtaccacatttccctggtggacctgctggccgcctgtgccga

SEQ ID NO: 105665 - DNA, 120 bp, Artificial Sequence
  ENSG00000096433_43 (sequence is synthesized)
gggcaaaaacgtctacactgagatcaagtgcacctccctgctgccgctggaggacgtggtgtctgtggtgacgcatgaggactgcatcactgaggtgaaaatggcctatgtgaacttcgt

SEQ ID NO: 105666 - DNA, 120 bp, Artificial Sequence
  ENSG00000096433_44 (sequence is synthesized)
gaaccactgctacgtggacacggaggtggagatgaaggagatctacaccagcaaccacatctggacgctctttgagaacttcaccctggacatggcccgggtctgcagcaagcgtgagaa

SEQ ID NO: 105667 - DNA, 120 bp, Artificial Sequence
  ENSG00000096433_45 (sequence is synthesized)
gcgcgtggctgaccccaccttggagaagtacgtgctgagcgttgtgctggacaccatcaacgccttcttcagctccccattctctgagaacagcacttccctgcagacacaccagacgat

SEQ ID NO: 105668 - DNA, 120 bp, Artificial Sequence
  ENSG00000096433_46 (sequence is synthesized)
tgtggtgcagctgctgcagtctaccacacgcctcctcgagtgtccgtggctacagcagcagcacaagggctccgtggaggcctgcatccggaccctcgccatggtggccaagggccgggc

SEQ ID NO: 105669 - DNA, 120 bp, Artificial Sequence
  ENSG00000096433_47 (sequence is synthesized)
catcttgctgcccatggacctggatgcccacatcagctcgatgctcagcagtggagccagctgtgcagctgccgcccagcggaacgcctccagctacaaggcaaccacgcgggccttccc

SEQ ID NO: 105670 - DNA, 120 bp, Artificial Sequence
  ENSG00000096433_48 (sequence is synthesized)
ccgcgtcacccccaccgccaaccagtgggactacaagaacatcattgagaagctgcaggacatcatcacagccctggaggagcggctgaagcccctggtacaggctgagctgtccgtgct

SEQ ID NO: 105671 - DNA, 120 bp, Artificial Sequence
  ENSG00000096433_49 (sequence is synthesized)
ggtggatgtcctgcactggcctgagctgctcttcctggagggcagtgaggcctaccagcgctgcgagagtgggggcttcctgtccaagctgatccagcacaccaaggacctcatggagtc

SEQ ID NO: 105672 - DNA, 120 bp, Artificial Sequence
  ENSG00000096433_50 (sequence is synthesized)
ggaggagaagctgtgcatcaaggtgctgcggaccctgcagcagatgctgctcaagaagaccaagtacggggaccggggcaaccagctgcgcaagatgctgctgcaaaactacctccagaa

SEQ ID NO: 105673 - DNA, 120 bp, Artificial Sequence
  ENSG00000096433_51 (sequence is synthesized)
ccggaagtccacctcgcggggggaccttcccgaccccataggcactggcctggacccagactggtcggcaatcgcagccacccagtgccggctggacaaggagggggccaccaagttggt

SEQ ID NO: 105674 - DNA, 120 bp, Artificial Sequence
  ENSG00000096433_52 (sequence is synthesized)
atgcgacctcatcaccagcaccaagaacgagaagatcttccaggagagcatcggcctggccatccacctgctggatggtggcaacacagagatccagaaatccttccacaacctgatgat

SEQ ID NO: 105675 - DNA, 120 bp, Artificial Sequence
  ENSG00000096433_53 (sequence is synthesized)
gagtgacaagaagtcagagcgcttcttcaaggtgctgcacgaccgcatgaagcgggcccagcaggagaccaagtccacggtggcagtcaacatgaatgacctgggcagccagccacatga

SEQ ID NO: 105676 - DNA, 120 bp, Artificial Sequence
  ENSG00000096433_54 (sequence is synthesized)
ggaccgcgagccagtcgaccccaccaccaaaggccgcgtggcctccttctcgatacctggctcctcatcccgctactcgctgggccccagcctgcgccgggggcacgaggtgagcgaacg

SEQ ID NO: 105677 - DNA, 120 bp, Artificial Sequence
  ENSG00000096433_55 (sequence is synthesized)
tgtgcagagcagtgagatgggcacatccgtgctcatcatgcagcccatcctgcgctttctgcagctgctgtgtgagaaccacaaccgggacctgcagaacttcctgcgctgtcagaacaa

SEQ ID NO: 105678 - DNA, 120 bp, Artificial Sequence
  ENSG00000096433_56 (sequence is synthesized)
caaaaccaactacaacttggtatgcgagacgctgcagttcctggacatcatgtgcggcagcaccacgggcggcctggggctgctggggctctacatcaatgaggacaacgtgggcctcgt

SEQ ID NO: 105679 - DNA, 120 bp, Artificial Sequence
  ENSG00000096433_57 (sequence is synthesized)
catccagaccttggagaccctcactgagtactgccagggcccctgccatgagaaccagacttgcattgtgactcacgagtccaatggcatagacatcatcaccgcactgatcctcaatga

SEQ ID NO: 105680 - DNA, 120 bp, Artificial Sequence
  ENSG00000096433_58 (sequence is synthesized)
catcagccccctgtgcaagtaccgcatggatctggtgctgcagctcaaggacaatgcctccaagctgctcctggctctgatggagagccggcatgacagtgaaaatgctgagcgaatcct

SEQ ID NO: 105681 - DNA, 120 bp, Artificial Sequence
  ENSG00000096433_59 (sequence is synthesized)
catcagcctgcggccccaggagctggtggacgtcatcaagaaggcctacctgcaggaggaagagcgtgagaactcggaggtgagcccacgtgaagtgggccataacatctatatcctggc

SEQ ID NO: 105682 - DNA, 120 bp, Artificial Sequence
  ENSG00000096433_60 (sequence is synthesized)
gctgcagctctccaggcacaataaacagctgcagcacctgctgaagccggtgaagcgcattcaagaggaggaggccgagggtatctcttccatgctcagcctcaacaacaagcagctgtc

SEQ ID NO: 105683 - DNA, 120 bp, Artificial Sequence
  ENSG00000096433_61 (sequence is synthesized)
acagatgctcaagtcctcagcgccagcacaggaggaggaggaagaccccctggcctactatgagaaccacacgtcccagatcgagattgtgcggcaggaccgcagcatggagcagatcgt

SEQ ID NO: 105684 - DNA, 120 bp, Artificial Sequence
  ENSG00000096433_62 (sequence is synthesized)
gttcccagtgcccggcatctgccagttcctgacggaggaaaccaagcaccggctcttcaccactactgagcaggacgagcagggcagcaaagtgagcgacttcttcgaccagtcctcctt

SEQ ID NO: 105685 - DNA, 120 bp, Artificial Sequence
  ENSG00000096433_63 (sequence is synthesized)
cctgcacaacgagatggagtggcagcgcaagctccgcagcatgccgctgatctactggttctcccgccgcatgaccctgtggggcagcatctccttcaacctggccgtgtttatcaacat

SEQ ID NO: 105686 - DNA, 120 bp, Artificial Sequence
  ENSG00000096433_64 (sequence is synthesized)
catcattgccttcttctacccttacatggagggcgcgtccacaggcgtgctggactcccctctcatctcattgctcttctggatcctcatctgcttctccatcgcggccctgttcaccaa

SEQ ID NO: 105687 - DNA, 120 bp, Artificial Sequence
  ENSG00000096433_65 (sequence is synthesized)
gcgctacagcatccgccccctcatcgtggcgctcatcctgcgctccatctactatctgggcatcgggcccacactcaacatcctgggtgccctcaatctgaccaacaagatcgtgtttgt

SEQ ID NO: 105688 - DNA, 120 bp, Artificial Sequence
  ENSG00000096433_66 (sequence is synthesized)
ggtgagcttcgtgggcaaccgtggcaccttcatccggggctataaggccatggtcatggacatggaattcctctaccacgtgggctacatcctgaccagtgtcctgggcctctttgctca

SEQ ID NO: 105689 - DNA, 120 bp, Artificial Sequence
  ENSG00000096433_67 (sequence is synthesized)
tgagctgttctacagcatcctgctctttgacctcatctaccgcgaggagacgctgttcaacgtcatcaagagtgtgacccgcaatggccgctccatcctgctgacagccctgctggccct

SEQ ID NO: 105690 - DNA, 120 bp, Artificial Sequence
  ENSG00000096433_68 (sequence is synthesized)
catcctggtctacctcttctccatcgtcggcttcctcttcctcaaggatgacttcattctcgaggtcgaccggctgcccaacaaccactccacagccagccccctggggatgccacatgg

SEQ ID NO: 105691 - DNA, 120 bp, Artificial Sequence
  ENSG00000096433_69 (sequence is synthesized)
agctgctgcatttgtggacacctgcagtggggacaagatggactgtgtctcagggctctcggtgcctgaggtcctggaagaggacagggagctggacagcacagagcgggcctgtgacac

SEQ ID NO: 105692 - DNA, 120 bp, Artificial Sequence
  ENSG00000096433_70 (sequence is synthesized)
tctgttgatgtgcatcgtcactgtcatgaaccatgggctacgcaacggtggtggcgtgggcgacattctccgcaagccctccaaagatgagtctctcttcccagcccgagtggtctatga

SEQ ID NO: 105693 - DNA, 120 bp, Artificial Sequence
  ENSG00000096433_71 (sequence is synthesized)
cctcctgttcttcttcatcgtcatcatcattgtgctgaacctcatctttggggtaatcatcgacaccttcgctgacctgcgtagtgagaagcagaagaaggaggagattcttaagacgac

SEQ ID NO: 105694 - DNA, 120 bp, Artificial Sequence
  ENSG00000096433_72 (sequence is synthesized)
atgcttcatctgtggtctggagagggacaagtttgataacaagacagtgtcatttgaggaacacatcaagctggagcacaacatgtggaactacttgtacttcattgtgctggtccgcgt

SEQ ID NO: 105695 - DNA, 120 bp, Artificial Sequence
  ENSG00000096433_73 (sequence is synthesized)
gaagaacaagaccgactacacgggccctgagagctacgtggcccagatgatcaagaacaagaacctggactggttcccccggatgcgggccatgtcccttgtcagcaatgagggcgaggg

SEQ ID NO: 105696 - DNA, 120 bp, Artificial Sequence
  ENSG00000096433_74 (sequence is synthesized)
ggagcagaatgagattcggattctccaggacaagctcaactccaccatgaagctggtgtcccacctcactgcccagctcaacgagctcaaggagcagatgacggagcagcggaaacgcag

SEQ ID NO: 105697 - DNA, 120 bp, Artificial Sequence
  ENSG00000096433_75 (sequence is synthesized)
gcaacgcctaggctttgtggatgtccagaactgcattagccgctgaggagagccaccgaaggccccaacaggggatgctcatcactggagactgcgactgggaagaacactgccccctcc

SEQ ID NO: 105698 - DNA, 120 bp, Artificial Sequence
  ENSG00000096433_76 (sequence is synthesized)
ctcgggttgggtggcccagccagctggccagcctccactcccactctgccagacaccctgacacccacccaggctttgaagagcatggagggggagcctcagagctgacagtcctgctta

SEQ ID NO: 105699 - DNA, 120 bp, Artificial Sequence
  ENSG00000096433_77 (sequence is synthesized)
gagcccttaaaaagacttgaaagttcactgggactcagtttaccttaatgccttagcagaagataaatcctacctagagacctttgttccttaaagcaataactgacaactctttgtagt

SEQ ID NO: 105700 - DNA, 120 bp, Artificial Sequence
  ENSG00000096433_78 (sequence is synthesized)
cctccttgtgggtagttaagagtggggtcacccctttaactccaagcactacattttggcggctgccggcctctgggggaggtggcagttatgctgttactagtgattttagggctttgt

SEQ ID NO: 105701 - DNA, 120 bp, Artificial Sequence
  ENSG00000096433_79 (sequence is synthesized)
tatttaacttatttcaagggtgctgtgctcagccctgcccatggctgtgcagctccctccgtgcctcagatctgctgtagccagtgcagacctcactgtcgtgtccatgccacccccggc

SEQ ID NO: 105702 - DNA, 120 bp, Artificial Sequence
  ENSG00000096433_80 (sequence is synthesized)
atggctccaggtggcctggtgactccatgatggacgatcttgctcccaggacctgcctcttcccaggcttcctggggaagagttgtacgcccaggcaacaagggctgagctgcgcttgcg

SEQ ID NO: 105703 - DNA, 120 bp, Artificial Sequence
  ENSG00000096433_81 (sequence is synthesized)
tggctgtttcatgaccgcttgtttttctccttttggtgtaatgttttacaaatcctttggcctgagaactaatatgttaattgccttaaataaattaatagaaatctagtccgttaaaaa

SEQ ID NO: 105704 - DNA, 120 bp, Artificial Sequence
  ENSG00000096654_0 (sequence is synthesized)
gttgaagccggttgtaggcgtggaaagaggttggcgcgctggaagtccagttgcttcggctccctgcgttaggtctggtggcggtcaatgcgcttccggacccgggatcagagtgtgtgg

SEQ ID NO: 105705 - DNA, 120 bp, Artificial Sequence
  ENSG00000096654_1 (sequence is synthesized)
atcgctatagggggaggggagctcagggtagacaacctcagcgtgttgcagattccctgcaaggggagttagacatctgagtcctagaccgagataccagctgaaggaacgctgcctggc

SEQ ID NO: 105706 - DNA, 120 bp, Artificial Sequence
  ENSG00000096654_2 (sequence is synthesized)
gaaccctggtgttcaagttccagaggaacgggatgagctcctgagatggaagatctgtcctctccagactccacccttctccaagggggacataatctactctcatcagccagttttcag

SEQ ID NO: 105707 - DNA, 120 bp, Artificial Sequence
  ENSG00000096654_3 (sequence is synthesized)
gaagcggtgactttcaaggatgtgatagtggactttacccaggaagaatggaaacagctggaccctggccagagagatttgttcagggatgtgacattggaaaattatacacacctggtc

SEQ ID NO: 105708 - DNA, 120 bp, Artificial Sequence
  ENSG00000096654_4 (sequence is synthesized)
tctataggactccaagtttctaaacctgatgtgatttcccagttagagcaagggacagagccatggatcatggagccaagcattccagtaggtacctgtgcagactgggagacaagactt

SEQ ID NO: 105709 - DNA, 120 bp, Artificial Sequence
  ENSG00000096654_5 (sequence is synthesized)
gaaaatagtgtgtcagccccagagcctgacatttctgaagaagagctatctccagaggtaatagtggaaaaacacaaaagagatgattcttggagttccaacttgctagaaagttgggaa

SEQ ID NO: 105710 - DNA, 120 bp, Artificial Sequence
  ENSG00000096654_6 (sequence is synthesized)
tatgaaggcagtttagagagacagcaggcaaaccaacagacactgccaaaggaaataaaggtaaccgaaaagacaatacccagttgggaaaaaggccctgtaaataatgaatttgggaaa

SEQ ID NO: 105711 - DNA, 120 bp, Artificial Sequence
  ENSG00000096654_7 (sequence is synthesized)
agtgtcaatgtgagttcaaaccttgtaacacaagaaccatctccagaagagacctctactaaaagaagcatcaaacagaattcaaacccagttaaaaaagagaaatcttgtaagtgcaat

SEQ ID NO: 105712 - DNA, 120 bp, Artificial Sequence
  ENSG00000096654_8 (sequence is synthesized)
gaatgtgggaaagcctttagttattgttcagctcttattcgccatcagagaacacatactggagaaaaaccctacaaatgtaatgaatgtgaaaaagccttcagccggagtgaaaacctt

SEQ ID NO: 105713 - DNA, 120 bp, Artificial Sequence
  ENSG00000096654_9 (sequence is synthesized)
ataaaccatcaaagaattcatactggagataaaccatataaatgtgatcagtgtggaaaaggcttcattgagggtccatctcttactcaacatcaaagaattcatactggagaaaaacca

SEQ ID NO: 105714 - DNA, 120 bp, Artificial Sequence
  ENSG00000096654_10 (sequence is synthesized)
tataaatgtgatgaatgtgggaaagcctttagtcagaggacccatcttgttcagcatcagagaattcatactggcgagaagccatacacttgtaatgagtgtggaaaagcctttagccag

SEQ ID NO: 105715 - DNA, 120 bp, Artificial Sequence
  ENSG00000096654_11 (sequence is synthesized)
agaggccactttatggaacatcagaaaattcatacgggagaaaaaccttttaaatgtgatgaatgtgataaaaccttcaccaggagcacacaccttactcaacatcaaaaaattcatact

SEQ ID NO: 105716 - DNA, 120 bp, Artificial Sequence
  ENSG00000096654_12 (sequence is synthesized)
atgcaatgaatgtgggaaagccttcagccagcactcaaacctcactcagcatcaaaaaactcatactggggagaaaccctatgattgtgcagaatgtggaaaatcttttagttactggtc

SEQ ID NO: 105717 - DNA, 120 bp, Artificial Sequence
  ENSG00000096654_13 (sequence is synthesized)
atcccttgctcaacacctgaaaattcatactggagaaaaaccttacaaatgcaatgaatgtggaaaggccttcagttactgctcatcccttactcaacatcggagaattcacacgagaga

SEQ ID NO: 105718 - DNA, 120 bp, Artificial Sequence
  ENSG00000096654_14 (sequence is synthesized)
aaagccctttgaatgcagtgaatgtggaaaggctttcagttatctctcaaaccttaatcagcatcagaaaactcatactcaagagaaagcttatgaatgtaaagaatgtgggaaagcttt

SEQ ID NO: 105719 - DNA, 120 bp, Artificial Sequence
  ENSG00000096654_15 (sequence is synthesized)
tattcggagttcatctcttgctaagcatgaaagaattcatactggagagaaaccctatcagtgtcatgaatgtgggaaaaccttcagttatggttcatcccttattcagcataggaagat

SEQ ID NO: 105720 - DNA, 120 bp, Artificial Sequence
  ENSG00000096654_16 (sequence is synthesized)
ccatactggagaacgaccttacaagtgtaatgagtgtgggagagcattcaaccagaacatacaccttacacagcataagagaattcatacaggagccaagccttatgagtgtgctgagtg

SEQ ID NO: 105721 - DNA, 120 bp, Artificial Sequence
  ENSG00000096654_17 (sequence is synthesized)
tggtaaagcctttcgacattgttcatctcttgctcaacatcaaaaaactcacacagaagaaaaaccctaccagtgtaataaatgtgaaaagacctttagccagagctcccatctaactca

SEQ ID NO: 105722 - DNA, 120 bp, Artificial Sequence
  ENSG00000096654_18 (sequence is synthesized)
gcatcaacgaattcacactggggagaagccctataagtgcaatgaatgtgacaaagcctttagccggagcactcatctgactgaacatcagaatactcatactggagagaaaccttataa

SEQ ID NO: 105723 - DNA, 120 bp, Artificial Sequence
  ENSG00000096654_19 (sequence is synthesized)
ctgtaatgaatgcagaaagacttttagccagagcacatatctcattcagcaccagagaattcattcaggagagaagccttttggatgtaatgattgtggaaaatccttcagatatcgctc

SEQ ID NO: 105724 - DNA, 120 bp, Artificial Sequence
  ENSG00000096654_20 (sequence is synthesized)
tgctctcaacaaacatcagagactgcatcctggcatatgacaattctaggaacatcataaatttaggggagatatttactttagtttgtccttttgttaagtactgaagaatcagagtgg

SEQ ID NO: 105725 - DNA, 120 bp, Artificial Sequence
  ENSG00000096654_21 (sequence is synthesized)
atttagaaactgccttgaaatcttttaaattttcactatcatgttatggaatggaaagtacattgggctgaactaatccaattgttattaagccactctgtgacattagaaaactctact

SEQ ID NO: 105726 - DNA, 120 bp, Artificial Sequence
  ENSG00000096654_22 (sequence is synthesized)
gttttaagctttagtttcctttatggaatgaaggatttggagtagattatttcaaaggtagtttggagttttataatcagttttgtatatttacaatattttcttgaatgggtttactat

SEQ ID NO: 105727 - DNA, 120 bp, Artificial Sequence
  ENSG00000096654_23 (sequence is synthesized)
acatcagcattttgctgtgttgcatctagaatgtgtatgtttatgcatgttttgccaatagaatttgtgcttcagtaactagatcggggatctagtatgctcctggtctaatgcatttac

SEQ ID NO: 105728 - DNA, 120 bp, Artificial Sequence
  ENSG00000096654_24 (sequence is synthesized)
attgtttaggtaactggttcctaataaaaagaattataaaataccctcaaattaacaattcaattgcatataatagcctaactcagtaagaatattaaaacttactattattcttcttct

SEQ ID NO: 105729 - DNA, 120 bp, Artificial Sequence
  ENSG00000096696_0 (sequence is synthesized)
cctctgcgcccttgccgccctccgagccacagctttcctcccgctcctgcccccggcccgtcgccgtctccgcgctcgcagcggcctcgggagggcccaggtagcgagcagcgacctcgc

SEQ ID NO: 105730 - DNA, 120 bp, Artificial Sequence
  ENSG00000096696_1 (sequence is synthesized)
gagccttccgcactcccgcccggttccccggccgtccgcctatccttggccccctccgctttctccgcgccggcccgcctcgcttatgcctcggcgctgagccgctctcccgattgcccg

SEQ ID NO: 105731 - DNA, 120 bp, Artificial Sequence
  ENSG00000096696_2 (sequence is synthesized)
ccgacatgagctgcaacggaggctcccacccgcggatcaacactctgggccgcatgatccgcgccgagtctggcccggacctgcgctacgaggtgaccagcggcggcgggggcaccagca

SEQ ID NO: 105732 - DNA, 120 bp, Artificial Sequence
  ENSG00000096696_3 (sequence is synthesized)
ggatgtactattctcggcgcggcgtgatcaccgaccagaactcggacggctactgtcaaaccggcacgatgtccaggcaccagaaccagaacaccatccaggagctgctgcagaactgct

SEQ ID NO: 105733 - DNA, 120 bp, Artificial Sequence
  ENSG00000096696_4 (sequence is synthesized)
ccgactgcttgatgcgagcagagctcatcgtgcagcctgaattgaagtatggagatggaatacaactgactcggagtcgagaattggatgagtgttttgcccaggccaatgaccaaatgg

SEQ ID NO: 105734 - DNA, 120 bp, Artificial Sequence
  ENSG00000096696_5 (sequence is synthesized)
aaatcctcgacagcttgatcagagagatgcggcagatgggccagccctgtgatgcttaccagaaaaggcttcttcagctccaagagcaaatgcgagccctttataaagccatcagtgtcc

SEQ ID NO: 105735 - DNA, 120 bp, Artificial Sequence
  ENSG00000096696_6 (sequence is synthesized)
ctcgagtccgcagggccagctccaagggtggtggaggctacacttgtcagagtggctctggctgggatgagttcaccaaacatgtcaccagtgaatgtttggggtggatgaggcagcaaa

SEQ ID NO: 105736 - DNA, 120 bp, Artificial Sequence
  ENSG00000096696_7 (sequence is synthesized)
gggcggagatggacatggtggcctggggtgtggacctggcctcagtggagcagcacattaacagccaccggggcatccacaactccatcggcgactatcgctggcagctggacaaaatca

SEQ ID NO: 105737 - DNA, 120 bp, Artificial Sequence
  ENSG00000096696_8 (sequence is synthesized)
aagccgacctgcgcgagaaatctgcgatctaccagttggaggaggagtatgaaaacctgctgaaagcgtcctttgagaggatggatcacctgcgacagctgcagaacatcattcaggcca

SEQ ID NO: 105738 - DNA, 120 bp, Artificial Sequence
  ENSG00000096696_9 (sequence is synthesized)
cgtccagggagatcatgtggatcaatgactgcgaggaggaggagctgctgtacgactggagcgacaagaacaccaacatcgctcagaaacaggaggccttctccatacgcatgagtcaac

SEQ ID NO: 105739 - DNA, 120 bp, Artificial Sequence
  ENSG00000096696_10 (sequence is synthesized)
tggaagttaaagaaaaagagctcaataagctgaaacaagaaagtgaccaacttgtcctcaatcagcatccagcttcagacaaaattgaggcctatatggacactctgcagacgcagtgga

SEQ ID NO: 105740 - DNA, 120 bp, Artificial Sequence
  ENSG00000096696_11 (sequence is synthesized)
gttggattcttcagatcaccaagtgcattgatgttcatctgaaagaaaatgctgcctactttcagttttttgaagaggcgcagtctactgaagcatacctgaaggggctccaggactcca

SEQ ID NO: 105741 - DNA, 120 bp, Artificial Sequence
  ENSG00000096696_12 (sequence is synthesized)
tcaggaagaagtacccctgcgacaagaacatgcccctgcagcacctgctggaacagatcaaggagctggagaaagaacgagagaaaatccttgaatacaagcgtcaggtgcagaacttgg

SEQ ID NO: 105742 - DNA, 120 bp, Artificial Sequence
  ENSG00000096696_13 (sequence is synthesized)
taaacaagtctaagaagattgtacagctgaagcctcgtaacccagactacagaagcaataaacccattattctcagagctctctgtgactacaaacaagatcagaaaatcgtgcataagg

SEQ ID NO: 105743 - DNA, 120 bp, Artificial Sequence
  ENSG00000096696_14 (sequence is synthesized)
gggatgagtgtatcctgaaggacaacaacgagcgcagcaagtggtacgtgacgggcccgggaggcgttgacatgcttgttccctctgtggggctgatcatccctcctccgaacccactgg

SEQ ID NO: 105744 - DNA, 120 bp, Artificial Sequence
  ENSG00000096696_15 (sequence is synthesized)
ccgtggacctctcttgcaagattgagcagtactacgaagccatcttggctctgtggaaccagctctacatcaacatgaagagcctggtgtcctggcactactgcatgattgacatagaga

SEQ ID NO: 105745 - DNA, 120 bp, Artificial Sequence
  ENSG00000096696_16 (sequence is synthesized)
agatcagggccatgacaatcgccaagctgaaaacaatgcggcaggaagattacatgaagacgatagccgaccttgagttacattaccaagagttcatcagaaatagccaaggctcagaga

SEQ ID NO: 105746 - DNA, 120 bp, Artificial Sequence
  ENSG00000096696_17 (sequence is synthesized)
tgtttggagatgatgacaagcggaaaatacagtctcagttcaccgatgcccagaagcattaccagaccctggtcattcagctccctggctatccccagcaccagacagtgaccacaactg

SEQ ID NO: 105747 - DNA, 120 bp, Artificial Sequence
  ENSG00000096696_18 (sequence is synthesized)
aaatcactcatcatggaacctgccaagatgtcaaccataataaagtaattgaaaccaacagagaaaatgacaagcaagaaacatggatgctgatggagctgcagaagattcgcaggcaga

SEQ ID NO: 105748 - DNA, 120 bp, Artificial Sequence
  ENSG00000096696_19 (sequence is synthesized)
tagagcactgcgagggcaggatgactctcaaaaacctccctctagcagaccagggatcttctcaccacatcacagtgaaaattaacgagcttaagagtgtgcagaatgattcacaagcaa

SEQ ID NO: 105749 - DNA, 120 bp, Artificial Sequence
  ENSG00000096696_20 (sequence is synthesized)
ttgctgaggttctcaaccagcttaaagatatgcttgccaacttcagaggttctgaaaagtactgctatttacagaatgaagtatttggactatttcagaaactggaaaatatcaatggtg

SEQ ID NO: 105750 - DNA, 120 bp, Artificial Sequence
  ENSG00000096696_21 (sequence is synthesized)
ttacagatggctacttaaatagcttatgcacagtaagggcactgctccaggctattctccaaacagaagacatgttaaaggtttatgaagccaggctcactgaggaggaaactgtctgcc

SEQ ID NO: 105751 - DNA, 120 bp, Artificial Sequence
  ENSG00000096696_22 (sequence is synthesized)
tggacctggataaagtggaagcttaccgctgtggactgaagaaaataaaaaatgacttgaacttgaagaagtcgttgttggccactatgaagacagaactacagaaagcccagcagatcc

SEQ ID NO: 105752 - DNA, 120 bp, Artificial Sequence
  ENSG00000096696_23 (sequence is synthesized)
actctcagacttcacagcagtatccactttatgatctggacttgggcaagttcggtgaaaaagtcacacagctgacagaccgctggcaaaggatagataaacagatcgactttaggttat

SEQ ID NO: 105753 - DNA, 120 bp, Artificial Sequence
  ENSG00000096696_24 (sequence is synthesized)
gggacctggagaaacaaatcaagcaattgaggaattatcgtgataactatcaggctttctgcaagtggctctatgatgctaaacgccgccaggattccttagaatccatgaaatttggag

SEQ ID NO: 105754 - DNA, 120 bp, Artificial Sequence
  ENSG00000096696_25 (sequence is synthesized)
attccaacacagtcatgcggtttttgaatgagcagaagaacttgcacagtgaaatatctggcaaacgagacaaatcagaggaagtacaaaaaattgctgaactttgcgccaattcaatta

SEQ ID NO: 105755 - DNA, 120 bp, Artificial Sequence
  ENSG00000096696_26 (sequence is synthesized)
aggattatgagctccagctggcctcatacacctcaggactggaaactctgctgaacatacctatcaagaggaccatgattcagtccccttctggggtgattctgcaagaggctgcagatg

SEQ ID NO: 105756 - DNA, 120 bp, Artificial Sequence
  ENSG00000096696_27 (sequence is synthesized)
ttcatgctcggtacattgaactacttacaagatctggagactattacaggttcttaagtgagatgctgaagagtttggaagatctgaagctgaaaaataccaagatcgaagttttggaag

SEQ ID NO: 105757 - DNA, 120 bp, Artificial Sequence
  ENSG00000096696_28 (sequence is synthesized)
aggagctcagactggcccgagatgccaactcggaaaactgtaataagaacaaattcctggatcagaacctgcagaaataccaggcagagtgttcccagttcaaagcgaagcttgcgagcc

SEQ ID NO: 105758 - DNA, 120 bp, Artificial Sequence
  ENSG00000096696_29 (sequence is synthesized)
tggaggagctgaagagacaggctgagctggatgggaagtcggctaagcaaaatctagacaagtgctacggccaaataaaagaactcaatgagaagatcacccgactgacttatgagattg

SEQ ID NO: 105759 - DNA, 120 bp, Artificial Sequence
  ENSG00000096696_30 (sequence is synthesized)
aagatgaaaagagaagaagaaaatctgtggaagacagatttgaccaacagaagaatgactatgaccaactgcagaaagcaaggcaatgtgaaaaggagaaccttggttggcagaaattag

SEQ ID NO: 105760 - DNA, 120 bp, Artificial Sequence
  ENSG00000096696_31 (sequence is synthesized)
agtctgagaaagccatcaaggagaaggagtacgagattgaaaggttgagggttctactgcaggaagaaggcacccggaagagagaatatgaaaatgagctggcaaaggtaagaaaccact

SEQ ID NO: 105761 - DNA, 120 bp, Artificial Sequence
  ENSG00000096696_32 (sequence is synthesized)
ataatgaggagatgagtaatttaaggaacaagtatgaaacagagattaacattacgaagaccaccatcaaggagatatccatgcaaaaagaggatgattccaaaaatcttagaaaccagc

SEQ ID NO: 105762 - DNA, 120 bp, Artificial Sequence
  ENSG00000096696_33 (sequence is synthesized)
ttgatagactttcaagggaaaatcgagatctgaaggatgaaattgtcaggctcaatgacagcatcttgcaggccactgagcagcgaaggcgagctgaagaaaacgcccttcagcaaaagg

SEQ ID NO: 105763 - DNA, 120 bp, Artificial Sequence
  ENSG00000096696_34 (sequence is synthesized)
cctgtggctctgagataatgcagaagaagcagcatctggagatagaactgaagcaggtcatgcagcagcgctctgaggacaatgcccggcacaagcagtccctggaggaggctgccaaga

SEQ ID NO: 105764 - DNA, 120 bp, Artificial Sequence
  ENSG00000096696_35 (sequence is synthesized)
ccattcaggacaaaaataaggagatcgagagactcaaagctgagtttcaggaggaggccaagcgccgctgggaatatgaaaatgaactgagtaaggtaagaaacaattatgatgaggaga

SEQ ID NO: 105765 - DNA, 120 bp, Artificial Sequence
  ENSG00000096696_36 (sequence is synthesized)
tcattagcttaaaaaatcagtttgagaccgagatcaacatcaccaagaccaccatccaccagctcaccatgcagaaggaagaggataccagtggctaccgggctcagatagacaatctca

SEQ ID NO: 105766 - DNA, 120 bp, Artificial Sequence
  ENSG00000096696_37 (sequence is synthesized)
cccgagaaaacaggagcttatctgaagaaataaagaggctgaagaacactctaacccagaccacagagaatctcaggagggtggaagaagacatccaacagcaaaaggccactggctctg

SEQ ID NO: 105767 - DNA, 120 bp, Artificial Sequence
  ENSG00000096696_38 (sequence is synthesized)
aggtgtctcagaggaaacagcagctggaggttgagctgagacaagtcactcagatgcgaacagaggagagcgtaagatataagcaatctcttgatgatgctgccaaaaccatccaggata

SEQ ID NO: 105768 - DNA, 120 bp, Artificial Sequence
  ENSG00000096696_39 (sequence is synthesized)
aaaacaaggagatagaaaggttaaaacaactgatcgacaaagaaacaaatgaccggaaatgcctggaagatgaaaacgcgagattacaaagggtccagtatgacctgcagaaagcaaaca

SEQ ID NO: 105769 - DNA, 120 bp, Artificial Sequence
  ENSG00000096696_40 (sequence is synthesized)
gaaggaccaggatatcacgcggttccagaactctctgaaagagctgcagctgcagaagcagaaggtggaagaggagctgaatcggctgaagaggaccgcgtcagaagactcctgcaagag

SEQ ID NO: 105770 - DNA, 120 bp, Artificial Sequence
  ENSG00000096696_41 (sequence is synthesized)
gaagaagctggaggaagagctggaaggcatgaggaggtcgctgaaggagcaagccatcaaaatcaccaacctgacccagcagctggagcaggcatccattgttaagaagaggagtgagga

SEQ ID NO: 105771 - DNA, 120 bp, Artificial Sequence
  ENSG00000096696_42 (sequence is synthesized)
tgacctccggcagcagagggacgtgctggatggccacctgagggaaaagcagaggacccaggaagagctgaggaggctctcttctgaggtcgaggccctgaggcggcagttactccagga

SEQ ID NO: 105772 - DNA, 120 bp, Artificial Sequence
  ENSG00000096696_43 (sequence is synthesized)
acaggaaagtgtcaaacaagctcacttgaggaatgagcatttccagaaggcgatagaagataaaagcagaagcttaaatgaaagcaaaatagaaattgagaggctgcagtctctcacaga

SEQ ID NO: 105773 - DNA, 120 bp, Artificial Sequence
  ENSG00000096696_44 (sequence is synthesized)
gaacctgaccaaggagcacttgatgttagaagaagaactgcggaacctgaggctggagtacgatgacctgaggagaggacgaagcgaagcggacagtgataaaaatgcaaccatcttgga

SEQ ID NO: 105774 - DNA, 120 bp, Artificial Sequence
  ENSG00000096696_45 (sequence is synthesized)
actaaggagccagctgcagatcagcaacaaccggaccctggaactgcaggggctgattaatgatttacagagagagagggaaaatttgagacaggaaattgagaaattccaaaagcaggc

SEQ ID NO: 105775 - DNA, 120 bp, Artificial Sequence
  ENSG00000096696_46 (sequence is synthesized)
tttagaggcatctaataggattcaggaatcaaagaatcagtgtactcaggtggtacaggaaagagagagccttctggtgaaaatcaaagtcctggagcaagacaaggcaaggctgcagag

SEQ ID NO: 105776 - DNA, 120 bp, Artificial Sequence
  ENSG00000096696_47 (sequence is synthesized)
gctggaggatgagctgaatcgtgcaaaatcaactctagaggcagaaaccagggtgaaacagcgcctggagtgtgagaaacagcaaattcagaatgacctgaatcagtggaagactcaata

SEQ ID NO: 105777 - DNA, 120 bp, Artificial Sequence
  ENSG00000096696_48 (sequence is synthesized)
ttcccgcaaggaggaggctattaggaagatagaatcggaaagagaaaagagtgagagagagaagaacagtcttaggagtgagatcgaaagactccaagcagagatcaagagaattgaaga

SEQ ID NO: 105778 - DNA, 120 bp, Artificial Sequence
  ENSG00000096696_49 (sequence is synthesized)
gaggtgcaggcgtaagctggaggattctaccagggagacacagtcacagttagaaacagaacgctcccgatatcagagggagattgataaactcagacagcgcccatatgggtcccatcg

SEQ ID NO: 105779 - DNA, 120 bp, Artificial Sequence
  ENSG00000096696_50 (sequence is synthesized)
agagacccagactgagtgtgagtggaccgttgacacctccaagctggtgtttgatgggctgaggaagaaggtgacagcaatgcagctctatgagtgtcagctgatcgacaaaacaacctt

SEQ ID NO: 105780 - DNA, 120 bp, Artificial Sequence
  ENSG00000096696_51 (sequence is synthesized)
ggacaaactattgaaggggaagaagtcagtggaagaagttgcttctgaaatccagccattccttcggggtgcaggatctatcgctggagcatctgcttctcctaaggaaaaatactcttt

SEQ ID NO: 105781 - DNA, 120 bp, Artificial Sequence
  ENSG00000096696_52 (sequence is synthesized)
ggtagaggccaagagaaagaaattaatcagcccagaatccacagtcatgcttctggaggcccaggcagctacaggtggtataattgatccccatcggaatgagaagctgactgtcgacag

SEQ ID NO: 105782 - DNA, 120 bp, Artificial Sequence
  ENSG00000096696_53 (sequence is synthesized)
tgccatagctcgggacctcattgacttcgatgaccgtcagcagatatatgcagcagaaaaagctatcactggttttgatgatccattttcaggcaagacagtatctgtttcagaagccat

SEQ ID NO: 105783 - DNA, 120 bp, Artificial Sequence
  ENSG00000096696_54 (sequence is synthesized)
caagaaaaatttgattgatagagaaaccggaatgcgcctgctggaagcccagattgcttcagggggtgtagtagaccctgtgaacagtgtctttttgccaaaagatgtcgccttggcccg

SEQ ID NO: 105784 - DNA, 120 bp, Artificial Sequence
  ENSG00000096696_55 (sequence is synthesized)
ggggctgattgatagagatttgtatcgatccctgaatgatccccgagatagtcagaaaaactttgtggatccagtcaccaaaaagaaggtcagttacgtgcagctgaaggaacggtgcag

SEQ ID NO: 105785 - DNA, 120 bp, Artificial Sequence
  ENSG00000096696_56 (sequence is synthesized)
aatcgaaccacatactggtctgctcttgctttcagtacagaagagaagcatgtccttccaaggaatcagacaacctgtgaccgtcactgagctagtagattctggtatattgagaccgtc

SEQ ID NO: 105786 - DNA, 120 bp, Artificial Sequence
  ENSG00000096696_57 (sequence is synthesized)
cactgtcaatgaactggaatctggtcagatttcttatgacgaggttggtgagagaattaaggacttcctccagggttcaagctgcatagcaggcatatacaatgagaccacaaaacagaa

SEQ ID NO: 105787 - DNA, 120 bp, Artificial Sequence
  ENSG00000096696_58 (sequence is synthesized)
gcttggcatttatgaggccatgaaaattggcttagtccgacctggtactgctctggagttgctggaagcccaagcagctactggctttatagtggatcctgttagcaacttgaggttacc

SEQ ID NO: 105788 - DNA, 120 bp, Artificial Sequence
  ENSG00000096696_59 (sequence is synthesized)
agtggaggaagcctacaagagaggtctggtgggcattgagttcaaagagaagctcctgtctgcagaacgagctgtcactgggtataatgatcctgaaacaggaaacatcatctctttgtt

SEQ ID NO: 105789 - DNA, 120 bp, Artificial Sequence
  ENSG00000096696_60 (sequence is synthesized)
ccaagccatgaataaggaactcatcgaaaagggccacggtattcgcttattagaagcacagatcgcaaccggggggatcattgacccaaaggagagccatcgtttaccagttgacatagc

SEQ ID NO: 105790 - DNA, 120 bp, Artificial Sequence
  ENSG00000096696_61 (sequence is synthesized)
atataagaggggctatttcaatgaggaactcagtgagattctctcagatccaagtgatgataccaaaggattttttgaccccaacactgaagaaaatcttacctatctgcaactaaaaga

SEQ ID NO: 105791 - DNA, 120 bp, Artificial Sequence
  ENSG00000096696_62 (sequence is synthesized)
aagatgcattaaggatgaggaaacagggctctgtcttctgcctctgaaagaaaagaagaaacaggtgcagacatcacaaaagaataccctcaggaagcgtagagtggtcatagttgaccc

SEQ ID NO: 105792 - DNA, 120 bp, Artificial Sequence
  ENSG00000096696_63 (sequence is synthesized)
agaaaccaataaagaaatgtctgttcaggaggcctacaagaagggcctaattgattatgaaaccttcaaagaactgtgtgagcaggaatgtgaatgggaagaaataaccatcacgggatc

SEQ ID NO: 105793 - DNA, 120 bp, Artificial Sequence
  ENSG00000096696_64 (sequence is synthesized)
agatggctccaccagggtggtcctggtagatagaaagacaggcagtcagtatgatattcaagatgctattgacaagggccttgttgacaggaagttctttgatcagtaccgatccggcag

SEQ ID NO: 105794 - DNA, 120 bp, Artificial Sequence
  ENSG00000096696_65 (sequence is synthesized)
cctcagcctcactcaatttgctgacatgatctccttgaaaaatggtgtcggcaccagcagcagcatgggcagtggtgtcagcgatgatgtttttagcagctcccgacatgaatcagtaag

SEQ ID NO: 105795 - DNA, 120 bp, Artificial Sequence
  ENSG00000096696_66 (sequence is synthesized)
taagatttccaccatatccagcgtcaggaatttaaccataaggagcagctctttttcagacaccctggaagaatcgagccccattgcagccatctttgacacagaaaacctggagaaaat

SEQ ID NO: 105796 - DNA, 120 bp, Artificial Sequence
  ENSG00000096696_67 (sequence is synthesized)
ctccattacagaaggtatagagcggggcatcgttgacagcatcacgggtcagaggcttctggaggctcaggcctgcacaggtggcatcatccacccaaccacgggccagaagctgtcact

SEQ ID NO: 105797 - DNA, 120 bp, Artificial Sequence
  ENSG00000096696_68 (sequence is synthesized)
tcaggacgcagtctcccagggtgtgattgaccaagacatggccaccaggctgaagcctgctcagaaagccttcataggcttcgagggtgtgaagggaaagaagaagatgtcagcagcaga

SEQ ID NO: 105798 - DNA, 120 bp, Artificial Sequence
  ENSG00000096696_69 (sequence is synthesized)
ggcagtgaaagaaaaatggctcccgtatgaggctggccagcgcttcctggagttccagtacctcacgggaggtcttgttgacccggaagtgcatgggaggataagcaccgaagaagccat

SEQ ID NO: 105799 - DNA, 120 bp, Artificial Sequence
  ENSG00000096696_70 (sequence is synthesized)
ccggaaggggttcatagatggccgcgccgcacagaggctgcaagacaccagcagctatgccaaaatcctgacctgccccaaaaccaaattaaaaatatcctataaggatgccataaatcg

SEQ ID NO: 105800 - DNA, 120 bp, Artificial Sequence
  ENSG00000096696_71 (sequence is synthesized)
ctccatggtagaagatatcactgggctgcgccttctggaagccgcctccgtgtcgtccaagggcttacccagcccttacaacatgtcttcggctccggggtcccgctccggctcccgctc

SEQ ID NO: 105801 - DNA, 120 bp, Artificial Sequence
  ENSG00000096696_72 (sequence is synthesized)
gggatctcgctccggatctcgctccgggtcccgcagtgggtcccggagaggaagctttgacgccacagggaattcttcctactcttattcctactcatttagcagtagttctattgggca

SEQ ID NO: 105802 - DNA, 120 bp, Artificial Sequence
  ENSG00000096696_73 (sequence is synthesized)
ctagtagtcagttgggagtggttgctataccttgacttcatttatatgaatttccactttattaaataatagaaaagaaaatcccggtgcttgcagtagagtgataggacattctatgct

SEQ ID NO: 105803 - DNA, 120 bp, Artificial Sequence
  ENSG00000096696_74 (sequence is synthesized)
tacagaaaatatagccatgattgaaatcaaatagtaaaggctgttctggctttttatcttcttagctcatcttaaataagcagtacacttggatgcagtgcgtctgaagtgctaatcagt

SEQ ID NO: 105804 - DNA, 120 bp, Artificial Sequence
  ENSG00000096696_75 (sequence is synthesized)
tgtaacaatagcacaaatcgaacttaggatttgtttcttctcttctgtgtttcgatttttgatcaattctttaattttggaagcctataatacagttttctattcttggagataaaaatt

SEQ ID NO: 105805 - DNA, 120 bp, Artificial Sequence
  ENSG00000096696_76 (sequence is synthesized)
aaatggatcactgatattttagtcattctgcttctcatctaaatatttccatattctgtattaggagaaaattaccctcccagcaccagcccccctctcaaacccccaacccaaaaccaa

SEQ ID NO: 105806 - DNA, 120 bp, Artificial Sequence
  ENSG00000096696_77 (sequence is synthesized)
gcattttggaatgagtctcctttagtttcagagtgtggattgtataacccatatactcttcgatgtacttgtttggtttggtattaatttgactgtgcatgacagcggcaatcttttctt

SEQ ID NO: 105807 - DNA, 120 bp, Artificial Sequence
  ENSG00000096696_78 (sequence is synthesized)
tggtcaaagttttctgtttattttgcttgtcatattcgatgtactttaaggtgtctttatgaagtttgctattctggcaataaacttttagacttttgaagtgtttgtgttttaatttaa

SEQ ID NO: 105808 - DNA, 120 bp, Artificial Sequence
  ENSG00000096696_79 (sequence is synthesized)
tatgtttataagcatgtataaacatttagcatatttttatcataggtctaaaaatatttgtttactaaatacctgtgaagaaataccattaaaaaactatttggttctgaattcttacta

SEQ ID NO: 105809 - DNA, 120 bp, Artificial Sequence
  ENSG00000096696_80 (sequence is synthesized)
tggggtctcggggaatgattggtctattaataatttaatcagccacttgcaattcagccttctttgaaatggtcgtgaaaaatccttccttcctgaaaacttctccgtgtggaggccatt

SEQ ID NO: 105810 - DNA, 85 bp, Artificial Sequence
  ENSG00000096696_81 (sequence is synthesized)
atccttagcaaacttatgcgggagtgggaactaaatgatgagaatacatggatacatcgagggcaacaacacacactggggcctt

SEQ ID NO: 105811 - DNA, 120 bp, Artificial Sequence
  ENSG00000096717_0 (sequence is synthesized)
gccagtgccgcgcgtcgagcgggagcagaggaggcgagggaggagggccagagaggcagttggaagatggcggacgaggcggccctcgcccttcagcccggcggctccccctcggcggcg

SEQ ID NO: 105812 - DNA, 80 bp, Artificial Sequence
  ENSG00000096717_1 (sequence is synthesized)
ggggccgacagggaggccgcgtcgtcccccgccggggagccgctccgcaagaggccgcggagagatggtcccggcctcga

SEQ ID NO: 105813 - DNA, 80 bp, Artificial Sequence
  ENSG00000096717_2 (sequence is synthesized)
ggcgctgtggcgggaggcggaggcagaggcggcggcggcaggcggggagcaagaggcccaggcgactgcggcggctgggg

SEQ ID NO: 105814 - DNA, 120 bp, Artificial Sequence
  ENSG00000096717_3 (sequence is synthesized)
ggggaaggagacaatgggccgggcctgcagggcccatctcgggagccaccgctggccgacaacttgtacgacgaagacgacgacgacgagggcgaggaggaggaagaggcggcggcggcg

SEQ ID NO: 105815 - DNA, 120 bp, Artificial Sequence
  ENSG00000096717_4 (sequence is synthesized)
gcgattgggtaccgagataaccttctgttcggtgatgaaattatcactaatggttttcattcctgtgaaagtgatgaggaggatagagcctcacatgcaagctctagtgactggactcca

SEQ ID NO: 105816 - DNA, 120 bp, Artificial Sequence
  ENSG00000096717_5 (sequence is synthesized)
aggccacggataggtccatatacttttgttcagcaacatcttatgattggcacagatcctcgaacaattcttaaagatttattgccggaaacaatacctccacctgagttggatgatatg

SEQ ID NO: 105817 - DNA, 120 bp, Artificial Sequence
  ENSG00000096717_6 (sequence is synthesized)
acactgtggcagattgttattaatatcctttcagaaccaccaaaaaggaaaaaaagaaaagatattaatacaattgaagatgctgtgaaattactgcaagagtgcaaaaaaattatagtt

SEQ ID NO: 105818 - DNA, 120 bp, Artificial Sequence
  ENSG00000096717_7 (sequence is synthesized)
ctaactggagctggggtgtctgtttcatgtggaatacctgacttcaggtcaagggatggtatttatgctcgccttgctgtagacttcccagatcttccagatcctcaagcgatgtttgat

SEQ ID NO: 105819 - DNA, 120 bp, Artificial Sequence
  ENSG00000096717_8 (sequence is synthesized)
attgaatatttcagaaaagatccaagaccattcttcaagtttgcaaaggaaatatatcctggacaattccagccatctctctgtcacaaattcatagccttgtcagataaggaaggaaaa

SEQ ID NO: 105820 - DNA, 120 bp, Artificial Sequence
  ENSG00000096717_9 (sequence is synthesized)
ctacttcgcaactatacccagaacatagacacgctggaacaggttgcgggaatccaaaggataattcagtgtcatggttcctttgcaacagcatcttgcctgatttgtaaatacaaagtt

SEQ ID NO: 105821 - DNA, 120 bp, Artificial Sequence
  ENSG00000096717_10 (sequence is synthesized)
gactgtgaagctgtacgaggagatatttttaatcaggtagttcctcgatgtcctaggtgcccagctgatgaaccgcttgctatcatgaaaccagagattgtgttttttggtgaaaattta

SEQ ID NO: 105822 - DNA, 120 bp, Artificial Sequence
  ENSG00000096717_11 (sequence is synthesized)
ccagaacagtttcatagagccatgaagtatgacaaagatgaagttgacctcctcattgttattgggtcttccctcaaagtaagaccagtagcactaattccaagttccataccccatgaa

SEQ ID NO: 105823 - DNA, 120 bp, Artificial Sequence
  ENSG00000096717_12 (sequence is synthesized)
gtgcctcagatattaattaatagagaacctttgcctcatctgcattttgatgtagagcttcttggagactgtgatgtcataattaatgaattgtgtcataggttaggtggtgaatatgcc

SEQ ID NO: 105824 - DNA, 120 bp, Artificial Sequence
  ENSG00000096717_13 (sequence is synthesized)
aaactttgctgtaaccctgtaaagctttcagaaattactgaaaaacctccacgaacacaaaaagaattggcttatttgtcagagttgccacccacacctcttcatgtttcagaagactca

SEQ ID NO: 105825 - DNA, 120 bp, Artificial Sequence
  ENSG00000096717_14 (sequence is synthesized)
agttcaccagaaagaacttcaccaccagattcttcagtgattgtcacacttttagaccaagcagctaagagtaatgatgatttagatgtgtctgaatcaaaaggttgtatggaagaaaaa

SEQ ID NO: 105826 - DNA, 120 bp, Artificial Sequence
  ENSG00000096717_15 (sequence is synthesized)
ccacaggaagtacaaacttctaggaatgttgaaagtattgctgaacagatggaaaatccggatttgaagaatgttggttctagtactggggagaaaaatgaaagaacttcagtggctgga

SEQ ID NO: 105827 - DNA, 120 bp, Artificial Sequence
  ENSG00000096717_16 (sequence is synthesized)
acagtgagaaaatgctggcctaatagagtggcaaaggagcagattagtaggcggcttgatggtaatcagtatctgtttttgccaccaaatcgttacattttccatggcgctgaggtatat

SEQ ID NO: 105828 - DNA, 120 bp, Artificial Sequence
  ENSG00000096717_17 (sequence is synthesized)
tctagttcttgtggcagtaacagtgatagtgggacatgccagagtccaagtttagaagaacccatggaggatgaaagtgaaattgaagaattctacaatggcttagaagatgagcctgat

SEQ ID NO: 105829 - DNA, 120 bp, Artificial Sequence
  ENSG00000096717_18 (sequence is synthesized)
gttccagagagagctggaggagctggatttgggactgatggagatgatcaagaggcaattaatgaagctatatctgtgaaacaggaagtaacagacatgaactatccatcaaacaaatca

SEQ ID NO: 105830 - DNA, 120 bp, Artificial Sequence
  ENSG00000096717_19 (sequence is synthesized)
tagtgtaataattgtgcaggtacaggaattgttccaccagcattaggaactttagcatgtcaaaatgaatgtttacttgtgaactcgatagagcaaggaaaccagaaaggtgtaatattt

SEQ ID NO: 105831 - DNA, 120 bp, Artificial Sequence
  ENSG00000096717_20 (sequence is synthesized)
ataggttggtaaaatagattgtttttcatggataatttttaacttcattatttctgtacttgtacaaactcaacactaacttttttttttttaaaaaaaaaaaggtactaagtatcttca

SEQ ID NO: 105832 - DNA, 120 bp, Artificial Sequence
  ENSG00000096717_21 (sequence is synthesized)
atcagctgttggtcaagactaactttcttttaaaggttcatttgtatgataaattcatatgtgtatatataattttttttgttttgtctagtgagtttcaacatttttaaagttttcaaa

SEQ ID NO: 105833 - DNA, 120 bp, Artificial Sequence
  ENSG00000096717_22 (sequence is synthesized)
aagccatcggaatgttaaattaatgtaaagggaacagctaatctagaccaaagaatggtattttcacttttctttgtaacattgaatggtttgaagtactcaaaatctgttacgctaaac

SEQ ID NO: 105834 - DNA, 120 bp, Artificial Sequence
  ENSG00000096717_23 (sequence is synthesized)
ttttgattctttaacacaattatttttaaacactggcattttccaaaactgtggcagctaactttttaaaatctcaaatgacatgcagtgtgagtagaaggaagtcaacaatatgtgggg

SEQ ID NO: 105835 - DNA, 120 bp, Artificial Sequence
  ENSG00000096717_24 (sequence is synthesized)
agagcactcggttgtctttacttttaaaagtaatacttggtgctaagaatttcaggattattgtatttacgttcaaatgaagatggcttttgtacttcctgtggacatgtagcaatgtct

SEQ ID NO: 105836 - DNA, 120 bp, Artificial Sequence
  ENSG00000096717_25 (sequence is synthesized)
atattggctcataaaactaacctgaaaaacaaataaatgctttggaaatgtttcagttgctttagaaacattagtgcctgcctggatccccttagttttgaaatatttgccattgttgtt

SEQ ID NO: 105837 - DNA, 120 bp, Artificial Sequence
  ENSG00000096717_26 (sequence is synthesized)
taaatacctatcactgtggtagagcttgcattgatcttttccacaagtattaaactgccaaaatgtgaatatgcaaagcctttctgaatctataataatggtacttctactggggagagt

SEQ ID NO: 105838 - DNA, 120 bp, Artificial Sequence
  ENSG00000096717_27 (sequence is synthesized)
gtaatattttggactgctgttttccattaatgaggagagcaacaggcccctgattatacagttccaaagtaataagatgttaattgtaattcagccagaaagtacatgtctcccattggg

SEQ ID NO: 105839 - DNA, 120 bp, Artificial Sequence
  ENSG00000096717_28 (sequence is synthesized)
aggatttggtgttaaataccaaactgctagccctagtattatggagatgaacatgatgatgtaacttgtaatagcagaatagttaatgaatgaaactagttcttataatttatctttatt

SEQ ID NO: 105840 - DNA, 120 bp, Artificial Sequence
  ENSG00000096717_29 (sequence is synthesized)
taaaagcttagcctgccttaaaactagagatcaactttctcagctgcaaaagcttctagtctttcaagaagttcatactttatgaaattgcacagtaagcatttatttttcagaccattt

SEQ ID NO: 105841 - DNA, 120 bp, Artificial Sequence
  ENSG00000096717_30 (sequence is synthesized)
ttgaacatcactcctaaattaataaagtattcctctgttgctttagtatttattacaataaaaagggtttgaaatatagctgttctttatgcataaaacacccagctaggaccattactg

SEQ ID NO: 105842 - DNA, 120 bp, Artificial Sequence
  ENSG00000096717_31 (sequence is synthesized)
ccagagaaaaaaatcgtattgaatggccatttccctacttataagatgtctcaatctgaatttatttggctacactaaagaatgcagtatatttagttttccatttgcatgatgtttgtg

SEQ ID NO: 105843 - DNA, 120 bp, Artificial Sequence
  ENSG00000096717_32 (sequence is synthesized)
tgctatagatgatattttaaattgaaaagtttgttttaaattatttttacagtgaagactgttttcagctctttttatattgtacatagtcttttatgtaatttactggcatatgttttg

SEQ ID NO: 105844 - DNA, 120 bp, Artificial Sequence
  ENSG00000096717_33 (sequence is synthesized)
tagactgtttaatgactggatatcttccttcaacttttgaaatacaaaaccagtgttttttacttgtacactgttttaaagtctattaaaattgtcatttgacttttttctgttaactta

SEQ ID NO: 105845 - DNA, 120 bp, Artificial Sequence
  ENSG00000096717_34 (sequence is synthesized)
gcatctcctcctccctctccccgggctcctactggcctgaggttgagggcggctgggggctcggggcaggctccgcggcgttcccctccccaccccggccctccgttcagccgcgctcct

SEQ ID NO: 105846 - DNA, 120 bp, Artificial Sequence
  ENSG00000096717_35 (sequence is synthesized)
cagatcctcaagcgatgtttgatattgaatatttcagaaaagatccaagaccattcttcaagtttgcaaagaagaaacagcattgaagcattatttggggggaaaaacacacacacaaaa

SEQ ID NO: 105847 - DNA, 120 bp, Artificial Sequence
  ENSG00000096717_36 (sequence is synthesized)
tccagcaactcagcattcatgagcaactctatactataccagtatgtgcctgtgcagtggaaggaaaacaattttggaaatatatcctggacaattccagccatctctctgtcacaaatt

SEQ ID NO: 105848 - DNA, 120 bp, Artificial Sequence
  ENSG00000096717_37 (sequence is synthesized)
cacttactaaatggaatttaataaaaacactgtcaaaagttgggaggaccaaaattgatactttttctctgatctttttgccatgtgtatatctgaattctttgtttttaaagaagaaac

SEQ ID NO: 105849 - DNA, 120 bp, Artificial Sequence
  ENSG00000096746_0 (sequence is synthesized)
tgcgcagctccctaagcggttgtcaccgctggagacggttgggagaaccgttgtggcgagcgctacacgaggcaaacgacttctcccttctttgaactggaccccgcgagcaccagagtc

SEQ ID NO: 105850 - DNA, 120 bp, Artificial Sequence
  ENSG00000096746_1 (sequence is synthesized)
ggcgtaactatcgcctgacaggcatttaaatcaaacggtattgagatggattgggttatgaaacataatggtccaaatgacgctagtgatgggacagtacgacttcgtggactaccattt

SEQ ID NO: 105851 - DNA, 120 bp, Artificial Sequence
  ENSG00000096746_2 (sequence is synthesized)
ggttgcagcaaagaggaaatagttcagttctttcaagggttggaaatcgtgccaaatgggataacattgacgatggactaccaggggagaagcacaggggaggccttcgtgcagtttgct

SEQ ID NO: 105852 - DNA, 120 bp, Artificial Sequence
  ENSG00000096746_3 (sequence is synthesized)
tcaaaggagatagcagaaaatgctctggggaaacacaaggaaagaatagggcacaggtatattgagatcttcagaagtagcaggagtgaaatcaaaggattttatgatccaccaagaaga

SEQ ID NO: 105853 - DNA, 120 bp, Artificial Sequence
  ENSG00000096746_4 (sequence is synthesized)
ttgctgggacagcgaccgggaccatatgatagaccaataggaggaagagggggttattatggagctgggcgtggaagtatgtatgacagaatgcgacgaggaggtgatggatatgatggt

SEQ ID NO: 105854 - DNA, 120 bp, Artificial Sequence
  ENSG00000096746_5 (sequence is synthesized)
ggttatggaggttttgatgactatggtggctataataattacggctatgggaatgatggctttgatgacagaatgagagatggaagaggtatgggaggacatggctatggtggagctggt

SEQ ID NO: 105855 - DNA, 120 bp, Artificial Sequence
  ENSG00000096746_6 (sequence is synthesized)
gatgcaagttcaggttttcatggtggtcatttcgtacatatgagagggttgccttttcgtgcaactgaaaatgacattgctaatttcttctcaccactaaatccaatacgagttcatatt

SEQ ID NO: 105856 - DNA, 120 bp, Artificial Sequence
  ENSG00000096746_7 (sequence is synthesized)
gatattggagctgatggcagagccacaggagaagcagatgtagagtttgtgacacatgaagatgcagtagctgccatgtctaaagataaaaataacatgcaacatcgatatattgaactc

SEQ ID NO: 105857 - DNA, 120 bp, Artificial Sequence
  ENSG00000096746_8 (sequence is synthesized)
ttcttgaattctactcctggaggcggctctggcatgggaggttctggaatgggaggctacggaagagatggaatggataatcagggaggctatggatcagttggaagaatgggaatgggg

SEQ ID NO: 105858 - DNA, 120 bp, Artificial Sequence
  ENSG00000096746_9 (sequence is synthesized)
tggaggcagtggaggttactatgggcaaggcggcatgagtggaggtggatggcgtgggatgtactgaaagcaaaaacaccaacatacaagtcttgacaacagcatctggtctactagact

SEQ ID NO: 105859 - DNA, 120 bp, Artificial Sequence
  ENSG00000096746_10 (sequence is synthesized)
ttcttacagatttaatttcttttgtattttaagaactttataatgactgaaggaatgtgttttcaaaatattatttggtaaagcaacagattgtgatgggaaaatgttttctgtaggttt

SEQ ID NO: 105860 - DNA, 120 bp, Artificial Sequence
  ENSG00000096746_11 (sequence is synthesized)
atttgttgcatactttgacttaaaaataaatttttatattcaaaccactgatgttgatactttttatatactagttactcctaaagatgtgctgccttcataagatttgggttgatgtat

SEQ ID NO: 105861 - DNA, 120 bp, Artificial Sequence
  ENSG00000096746_12 (sequence is synthesized)
tttactattagttctacaagaagtagtgtggtgtaattttagaggataatggttcacctctgcgtaaactgcaagtcttaagcagacatctggaatagagcttgacaaataattagtgta

SEQ ID NO: 105862 - DNA, 120 bp, Artificial Sequence
  ENSG00000096746_13 (sequence is synthesized)
acttttttctttagttcctcctggacaacactgtaaatataaagcctaaagatgaagtggcttcaggagtataaattcagctaattatttctatattattatttttcaaatgtcatttat

SEQ ID NO: 105863 - DNA, 120 bp, Artificial Sequence
  ENSG00000096746_14 (sequence is synthesized)
caggcatagctctgaaacattgatgatctaagaggtattgatttctgaatattcataattgtgttacctgggtatgagagtgttggaagctgaattctagccctagattttggagtaaaa

SEQ ID NO: 105864 - DNA, 120 bp, Artificial Sequence
  ENSG00000096746_15 (sequence is synthesized)
ccccttcagcacttgaccgaaataccaaaaatgtctccaaaaaattgatagttgcaggttatcgcaagatgtcttagagtagggttaaggttctcagtgacacaagaattcagtattaag

SEQ ID NO: 105865 - DNA, 120 bp, Artificial Sequence
  ENSG00000096746_16 (sequence is synthesized)
tacataggtatttactatggagtataattctcacaattgtattttcagttttctgcccaatagagtttaaataactgtataaatgatgactttaaaaaaatgtaagcaacaagtccatgt

SEQ ID NO: 105866 - DNA, 120 bp, Artificial Sequence
  ENSG00000096746_17 (sequence is synthesized)
catagtcaataaaaacaatcctgcagttgggttttgtatctgatccctgcttggagttttagtttaaagaatctatatgtagcaaggaaaaggtgctttttaattttaatccctttgatc

SEQ ID NO: 105867 - DNA, 120 bp, Artificial Sequence
  ENSG00000096746_18 (sequence is synthesized)
aatatggcttttttccaaattggctaatggatcaaaatgaaacctgttgatgtgaattcagttattgaacttgttacttgtttttgccagaaatgttattaataaatgtcattgtgggag

SEQ ID NO: 105868 - DNA, 120 bp, Artificial Sequence
  ENSG00000096746_19 (sequence is synthesized)
ttaattaagtttgtaggtttaaactgttaacttacggtgtatttaggcaatttaaattgggttatgtatctagatatagaaaaacttactgcattttgcccagtatctaatttacactaa

SEQ ID NO: 105869 - DNA, 120 bp, Artificial Sequence
  ENSG00000096746_20 (sequence is synthesized)
ctctataatggctttctgtgggctttatatatcgctgtactagtaattaataagcatactttgtttaatattacttaattgatcttttttacaaagcttgtattgatgaattttatccat

SEQ ID NO: 105870 - DNA, 120 bp, Artificial Sequence
  ENSG00000096746_21 (sequence is synthesized)
cattcctttctcccctgttactctttctttttttcttaaagaacatcgatatattgaactcttcttgaattctactcctggaggcggctctggcatgggaggttctggaatgggaggcta

SEQ ID NO: 105871 - DNA, 120 bp, Artificial Sequence
  ENSG00000096746_22 (sequence is synthesized)
cggaagagatggaatgggtatgtaaagtttttaaaatatgcagggttagctgcttatcgatgagtctcaattttttttcttttttctttttaaagataatcagggaggctatggatcagt

SEQ ID NO: 105872 - DNA, 120 bp, Artificial Sequence
  ENSG00000096746_23 (sequence is synthesized)
gttttaaagaatttgaataatcagttgaataaaaacctgaaaagtggtgaatgaaaatttgagagataaggaaaggctagagttggcattcaggggacacaaatagtttgaagactctgg

SEQ ID NO: 105873 - DNA, 120 bp, Artificial Sequence
  ENSG00000096746_24 (sequence is synthesized)
tagtagaattatgcaagttttcttaaaattaggcaatatataatattgatactacgaaattcagtacttttccgtaggagggggtcaggtctcattgccttttccgtaccccaaaatatg

SEQ ID NO: 105874 - DNA, 120 bp, Artificial Sequence
  ENSG00000096746_25 (sequence is synthesized)
aaaggtggtctacaattttgttgtggcattgtcacagcagttggccccatgttacatttcctcttgtggcacctctgagaggtgtttcttcattacctcttgacaagagtatattttgat

SEQ ID NO: 105875 - DNA, 120 bp, Artificial Sequence
  ENSG00000096746_26 (sequence is synthesized)
gtaaaacccatttgattttggaacttttaagtttaactatgatagtcttggttaatgtattaaaataatatgctccagttaatattcaatacagaatgtgtagaatatgtaaaacctagt

SEQ ID NO: 105876 - DNA, 120 bp, Artificial Sequence
  ENSG00000096746_27 (sequence is synthesized)
taatgtgcagtaacatatttgagaattgtgatgaaatgaaccgtgaattagtatatggagcatatatttgattttgtagccttttttcatgtaatataggtgggcttttagagtgtgtaa

SEQ ID NO: 105877 - DNA, 120 bp, Artificial Sequence
  ENSG00000096746_28 (sequence is synthesized)
ttacacagtgtttttacactggtcgcaaaaaatttatttaatccagtaatatttgaaaaaatctttcatttgtattatggggtgatgggaaactaagcttttttgttttgttttgttttg

SEQ ID NO: 105878 - DNA, 120 bp, Artificial Sequence
  ENSG00000096746_29 (sequence is synthesized)
tttagacttgttttaaatatttgattcagatgggaatgtttcagcctttaacactgttccccttgatggggttatttgtccttgggttaaagggttggaaatcgtgccaaatgggataac

SEQ ID NO: 105879 - DNA, 120 bp, Artificial Sequence
  ENSG00000096746_30 (sequence is synthesized)
gagagtttgggatggtgttaaatttttatttttgggggttgtgggtcactattgcttaaatgggggggtagccataacatttttctggggtagtttaaaagaattgataattatctaaat

SEQ ID NO: 105880 - DNA, 120 bp, Artificial Sequence
  ENSG00000096746_31 (sequence is synthesized)
tttccatttctctgtaggatgttgttgataaatgcttttgtataatcacctatttcctttaaaacacctattatgtactaaaagagacaaagtaaaaatatactttatgaattgttttcc

SEQ ID NO: 105881 - DNA, 120 bp, Artificial Sequence
  ENSG00000096746_32 (sequence is synthesized)
caccggagaacttctccagagcgctacggcacggttccttctacacactggcagaactgccattgccatcgccccgaggcggcagaatggtacgctctgaaaactggatggttctaacgt

SEQ ID NO: 105882 - DNA, 120 bp, Artificial Sequence
  ENSG00000096746_33 (sequence is synthesized)
tgaaaatacggattcccatggctagctgtgggacttgactgatgcacatattggcacctagaaaacttacacagaaattaaaattaagatgttggcatattttgacctttttttgcctaa

SEQ ID NO: 105883 - DNA, 120 bp, Artificial Sequence
  ENSG00000096746_34 (sequence is synthesized)
ggatgaaatttaatttacatgtctgaacttaattaactttctgagattttaaatttccatcacgttgactgcttttttcataggttttaagttgggaattgcaaacttgcaatcaagtta

SEQ ID NO: 105884 - DNA, 120 bp, Artificial Sequence
  ENSG00000096746_35 (sequence is synthesized)
aaaaaaagccataatgtgtcattaggaaccttggtgacatgacagcaaaaccaaaatgtacttatttattaggtgtcacttggaagcgcaattttcaacaacgcaaaactataaaaaaaa

SEQ ID NO: 105885 - DNA, 120 bp, Artificial Sequence
  ENSG00000096746_36 (sequence is synthesized)
cccaacgtcggcctccacaggctaatcagtctccgaggcactgacggcgggagagatgaaaacgcgaaggccagaggagaaaaagaggaaggatttgcagagagaacggtaacgtggtgg

SEQ ID NO: 105886 - DNA, 120 bp, Artificial Sequence
  ENSG00000096746_37 (sequence is synthesized)
acatgaatacacccaagaaacccggatcccgcgcggcacattgggacgaagcgcgctggcgggcggccagcaactctgggccaggggaaggaggcggacacccagcccgagagccgaaat

SEQ ID NO: 105887 - DNA, 120 bp, Artificial Sequence
  ENSG00000096746_38 (sequence is synthesized)
cggccccagtggacgctttcatcttcgcggcccagaaacactcctatttttcaccgcacaatgcaaacatggtggaccagaaaatccgccccgcgtttgccggtcgaaccacgtggggcc

SEQ ID NO: 105888 - DNA, 120 bp, Artificial Sequence
  ENSG00000096746_39 (sequence is synthesized)
ggtctacctcgcccccaacagctgcgcaacccaccaccgcgcaggcgcgctgcgtgccgccagcgccatgcgaaaccgactttcccgtctcgcgagagtggggccggccgccttcgcagt

SEQ ID NO: 105889 - DNA, 120 bp, Artificial Sequence
  ENSG00000096872_0 (sequence is synthesized)
atcccgcccccgttgccgggatacgccgcggcgcacggcagttagtgggtaggcctgagagccgaggaaaactgagcgtgggcctcagaaagaagttaaggcacccgcgagccgggcaac

SEQ ID NO: 105890 - DNA, 120 bp, Artificial Sequence
  ENSG00000096872_1 (sequence is synthesized)
tgccctccttccgcgccggcggagcgattaaagtgaagaaacaatggccagcaatcacaaatcttcagcagctcgccctgtttcaagaggtggagttgggttaacaggaaggcctccttc

SEQ ID NO: 105891 - DNA, 120 bp, Artificial Sequence
  ENSG00000096872_2 (sequence is synthesized)
tgggatacgacccctatcaggaaatattcgagtggcaactgcaatgccacctgggacagcaagaccaggttctcgtggttgtcccatagggactggtggagttctgtcttctcaaatcaa

SEQ ID NO: 105892 - DNA, 120 bp, Artificial Sequence
  ENSG00000096872_3 (sequence is synthesized)
agttgcccatcgccctgtaacacaacaaggtttgactggaatgaaaactgggacgaaaggtccccagaggcaaattttagacaaatcttactatcttgggcttcttagaagtaaaataag

SEQ ID NO: 105893 - DNA, 120 bp, Artificial Sequence
  ENSG00000096872_4 (sequence is synthesized)
tgaacttacaactgaagttaataaacttcagaagggaatagaaatgtacaatcaagagaattcagtatatttgtcatatgaaaagagggctgagactttagctgttgagataaaagagct

SEQ ID NO: 105894 - DNA, 120 bp, Artificial Sequence
  ENSG00000096872_5 (sequence is synthesized)
tcaaggacaactagcagactacaacatgttggtagataaacttaataccaacactgaaatggaagaagtaatgaatgattacaatatgcttaaagctcaaaatgatcgagaaacacaaag

SEQ ID NO: 105895 - DNA, 120 bp, Artificial Sequence
  ENSG00000096872_6 (sequence is synthesized)
tttggatgtcatatttactgaaagacaagcgaaagaaaaacaaatcagaagtgtcgaagaagaaattgaacaggaaaaacaagcaacagatgacattatcaaaaatatgtcttttgaaaa

SEQ ID NO: 105896 - DNA, 120 bp, Artificial Sequence
  ENSG00000096872_7 (sequence is synthesized)
ccaagtcaagtacctagagatgaaaaccacaaatgagaaactgttacaggaattagatacacttcaacaacaattggattcacagaacatgaaaaaagagagcctggaagcagaaatagc

SEQ ID NO: 105897 - DNA, 120 bp, Artificial Sequence
  ENSG00000096872_8 (sequence is synthesized)
tcactcccaggtgaaacaggaggcggtattgctgcatgaaaaactttatgagttggagtcccatcgagatcaaatgattgcagaagacaaaagcataggatctccaatggaagagagaga

SEQ ID NO: 105898 - DNA, 120 bp, Artificial Sequence
  ENSG00000096872_9 (sequence is synthesized)
gaaattacttaagcagattaaagatgataatcaggaaatagccagcatggaaagacagttaacagatacaaaagaaaagataaatcagtttattgaagaaattagacaacttgacatgga

SEQ ID NO: 105899 - DNA, 120 bp, Artificial Sequence
  ENSG00000096872_10 (sequence is synthesized)
tttagaggaacaccaaggtgaaatgaaccagaaatacaaggagctaaagaaaagggaggaacatatggacacttttattgagacttttgaggaaacaaagaatcaggaactgaaacgaaa

SEQ ID NO: 105900 - DNA, 120 bp, Artificial Sequence
  ENSG00000096872_11 (sequence is synthesized)
ggcacagatagaagccaacattgttgcactcttggagcactgcagtcgaaatataaatcgtatagaacagatatcctctatcaccaatcaagagctaaagatgatgcaggatgacctcaa

SEQ ID NO: 105901 - DNA, 120 bp, Artificial Sequence
  ENSG00000096872_12 (sequence is synthesized)
ttttaaatctactgaagtgcagaaatcacaaagtacagctcagaatttgacttcagacattcaacgtctgcagttggatctgcagaaaatggagcttctagaaagtaagatgactgaaga

SEQ ID NO: 105902 - DNA, 120 bp, Artificial Sequence
  ENSG00000096872_13 (sequence is synthesized)
acagcattctctaaaaagcaaaattaagcaaatgacaactgatctggagatatataatgatttgccagctttaaaatcatcaggtgaagaaaagataaagaaattacatcaggagagaat

SEQ ID NO: 105903 - DNA, 120 bp, Artificial Sequence
  ENSG00000096872_14 (sequence is synthesized)
gatattatcaacccacagaaatgcctttaagaaaataatggagaagcaaaacatagagtatgaggcactaaaaacacaattgcaagaaaatgagacacattctcagcttacaaatttgga

SEQ ID NO: 105904 - DNA, 120 bp, Artificial Sequence
  ENSG00000096872_15 (sequence is synthesized)
gagaaagtggcaacaccttgagcaaaataattttgcgatgaaagaattcatagcaaccaagagtcaagagagtgattaccagccaattaagaaaaatgtgaccaagcagattgcagagta

SEQ ID NO: 105905 - DNA, 120 bp, Artificial Sequence
  ENSG00000096872_16 (sequence is synthesized)
caataaaaccatcgtggatgctttacatagcaccagcggaaactgagtttaagtccactgaaagtctctaaggaagtatcctcttgctgctaaacttggtacaagttgactaccaaaaaa

SEQ ID NO: 105906 - DNA, 120 bp, Artificial Sequence
  ENSG00000096872_17 (sequence is synthesized)
aaaaaaagcttacttttggagtttacctaaaatttctgaatgttataatttttgtggcctcttttaagaatgatattttaaaatagtaaatagttcaataaatggtttgcatattaaaaa

SEQ ID NO: 105907 - DNA, 120 bp, Artificial Sequence
  ENSG00000096872_18 (sequence is synthesized)
tcgtcatggccagtgtctgtctggcgcccggtgcccaggcactgtgcgagaccagtccgcaggggcgactcggagagcgccgggccgcggcgggagaagagcctgcagcgattaaagtga

SEQ ID NO: 105908 - DNA, 120 bp, Artificial Sequence
  ENSG00000096872_19 (sequence is synthesized)
gacgccgatgcggagctgagctggctttcctccagggctctggactccctgctgagcaagagagaaagaggcccgcccttccaccaggacgcctgaccctggggtccttcccaaacccgg

SEQ ID NO: 105909 - DNA, 72 bp, Artificial Sequence
  ENSG00000096872_20 (sequence is synthesized)
caggcttgtcttgagctcctgacctcaccccaccgcacccagccagaatatacctcattcttaatgaaataa

SEQ ID NO: 105910 - DNA, 120 bp, Artificial Sequence
  ENSG00000096872_21 (sequence is synthesized)
aatatacctcattcttaatgaaataagccacctaaactttctgcattcttttagtgaatttcacaaaactatttatattattattacgtattaatggaaagtttaaattttgcttaacta

SEQ ID NO: 105911 - DNA, 120 bp, Artificial Sequence
  ENSG00000096872_22 (sequence is synthesized)
gggtcatctacagaggactagagagccagtcttttcctaaataaggaaaggaatgtgagctggggctgtggcatgcctgggcatgtagtaaaatcagaaagaagaaaaaaggagaagaaa

SEQ ID NO: 105912 - DNA, 120 bp, Artificial Sequence
  ENSG00000096872_23 (sequence is synthesized)
ggcagggggtacctggaattagagaataagtagctgagcaggctatttgaagagaaaccttgccatatctcacatcttttatatcttctcatgcctatgccacctgggacagcaagacca

SEQ ID NO: 105913 - DNA, 120 bp, Artificial Sequence
  ENSG00000096872_24 (sequence is synthesized)
attgtcctcataataggatatgctatttttcgatatttatgcaatttgtaaaagatatcctaatgtcatcgtcagttatagtattgtccttagaataagacatattatttttagatattg

SEQ ID NO: 105914 - DNA, 120 bp, Artificial Sequence
  ENSG00000096872_25 (sequence is synthesized)
tttatgcaacttggaaaagatatctaacctccccatcaattgtttttattgaatgtctatatttccttcataaattcattaaaaatattttcaacaggttaacagatacaaaagaaaaga

SEQ ID NO: 105915 - DNA, 80 bp, Artificial Sequence
  ENSG00000096872_26 (sequence is synthesized)
tcccagctactcaggaggctgaggcacgcgaatcacttgaacccaggaggcggagggttcagtggaaagaaaaacaaatc

SEQ ID NO: 105916 - DNA, 120 bp, Artificial Sequence
  ENSG00000096872_27 (sequence is synthesized)
aacaccaagatcctaccaactatggatggaaaatacttgaaaaaaatacaggaagtttcaaaaagcaagtttgaacctgccatgtgctaagcactatgctgaatccatttgaactgaaga

SEQ ID NO: 105917 - DNA, 120 bp, Artificial Sequence
  ENSG00000096872_28 (sequence is synthesized)
ataccctgctatagcctcccattgtttcacagatcttcagtctctctctagcacccactgtttgagcagtgttcatctggcattttattcattggctacttgtgttcactctttgcttct

SEQ ID NO: 105918 - DNA, 120 bp, Artificial Sequence
  ENSG00000096872_29 (sequence is synthesized)
gtgaaaaaaaaaagactcctaaaaatcaattatatggtgaaagaaatcccttacagactaagagagagcgtaaagtgctgtctctcaacaagaaaataaaattcttagatcttttgaaaa

SEQ ID NO: 105919 - DNA, 120 bp, Artificial Sequence
  ENSG00000096872_30 (sequence is synthesized)
cttactatcttgggcttcttagacggagttttgcttgtcacccaagctggagtgcaatgatgggatctcacgtcactgcaacttccaccgcctggattcaagtgattctcttgcctcagc

SEQ ID NO: 105920 - DNA, 120 bp, Artificial Sequence
  ENSG00000096968_0 (sequence is synthesized)
ctgcaggaaggagagaggaagaggagcagaagggggcagcagcggacgccgctaacggcctccctcggcgctgacaggctgggccggcgcccggctcgcttgggtgttcgcgtcgccact

SEQ ID NO: 105921 - DNA, 120 bp, Artificial Sequence
  ENSG00000096968_1 (sequence is synthesized)
tcggcttctcggccggtcgggcccctcggcccgggcttgcggcgcgcgtcggggctgagggctgctgcggcgcagggagaggcctggtcctcgctgccgagggatgtgagtgggagctga

SEQ ID NO: 105922 - DNA, 120 bp, Artificial Sequence
  ENSG00000096968_2 (sequence is synthesized)
gcccacactggagggcccccgagggcccagcctggaggtcgttcagagccgtgcccgtcccggggcttcgcagaccttgacccgccgggtaggagccgcccctgcgggctcgagggcgcg

SEQ ID NO: 105923 - DNA, 120 bp, Artificial Sequence
  ENSG00000096968_3 (sequence is synthesized)
ctctggtcgcccgatctgtgtagccggtttcagaagcaggcaacaggaacaagatgtgaactgtttctcttctgcagaaaaagaggctcttcctcctcctcccgcgacggcaaatgttct

SEQ ID NO: 105924 - DNA, 120 bp, Artificial Sequence
  ENSG00000096968_4 (sequence is synthesized)
gaaaaagactctgcatgggaatggcctgccttacgatgacagaaatggagggaacatccacctcttctatatatcagaatggtgatatttctggaaatgccaattctatgaagcaaatag

SEQ ID NO: 105925 - DNA, 120 bp, Artificial Sequence
  ENSG00000096968_5 (sequence is synthesized)
atccagttcttcaggtgtatctttaccattcccttgggaaatctgaggcagattatctgacctttccatctggggagtatgttgcagaagaaatctgtattgctgcttctaaagcttgtg

SEQ ID NO: 105926 - DNA, 120 bp, Artificial Sequence
  ENSG00000096968_6 (sequence is synthesized)
gtatcacacctgtgtatcataatatgtttgctttaatgagtgaaacagaaaggatctggtatccacccaaccatgtcttccatatagatgagtcaaccaggcataatgtactctacagaa

SEQ ID NO: 105927 - DNA, 120 bp, Artificial Sequence
  ENSG00000096968_7 (sequence is synthesized)
taagattttactttcctcgttggtattgcagtggcagcaacagagcctatcggcatggaatatctcgaggtgctgaagctcctcttcttgatgactttgtcatgtcttacctctttgctc

SEQ ID NO: 105928 - DNA, 120 bp, Artificial Sequence
  ENSG00000096968_8 (sequence is synthesized)
agtggcggcatgattttgtgcacggatggataaaagtacctgtgactcatgaaacacaggaagaatgtcttgggatggcagtgttagatatgatgagaatagccaaagaaaacgatcaaa

SEQ ID NO: 105929 - DNA, 120 bp, Artificial Sequence
  ENSG00000096968_9 (sequence is synthesized)
ccccactggccatctataactctatcagctacaagacattcttaccaaaatgtattcgagcaaagatccaagactatcatattttgacaaggaagcgaataaggtacagatttcgcagat

SEQ ID NO: 105930 - DNA, 120 bp, Artificial Sequence
  ENSG00000096968_10 (sequence is synthesized)
ttattcagcaattcagccaatgcaaagccactgccagaaacttgaaacttaagtatcttataaatctggaaactctgcagtctgccttctacacagagaaatttgaagtaaaagaacctg

SEQ ID NO: 105931 - DNA, 120 bp, Artificial Sequence
  ENSG00000096968_11 (sequence is synthesized)
gaagtggtccttcaggtgaggagatttttgcaaccattataataactggaaacggtggaattcagtggtcaagagggaaacataaagaaagtgagacactgacagaacaggatttacagt

SEQ ID NO: 105932 - DNA, 120 bp, Artificial Sequence
  ENSG00000096968_12 (sequence is synthesized)
tatattgcgattttcctaatattattgatgtcagtattaagcaagcaaaccaagagggttcaaatgaaagccgagttgtaactatccataagcaagatggtaaaaatctggaaattgaac

SEQ ID NO: 105933 - DNA, 120 bp, Artificial Sequence
  ENSG00000096968_13 (sequence is synthesized)
ttagctcattaagggaagctttgtctttcgtgtcattaattgatggatattatagattaactgcagatgcacatcattacctctgtaaagaagtagcacctccagccgtgcttgaaaata

SEQ ID NO: 105934 - DNA, 120 bp, Artificial Sequence
  ENSG00000096968_14 (sequence is synthesized)
tacaaagcaactgtcatggcccaatttcgatggattttgccattagtaaactgaagaaagcaggtaatcagactggactgtatgtacttcgatgcagtcctaaggactttaataaatatt

SEQ ID NO: 105935 - DNA, 120 bp, Artificial Sequence
  ENSG00000096968_15 (sequence is synthesized)
ttttgacttttgctgtcgagcgagaaaatgtcattgaatataaacactgtttgattacaaaaaatgagaatgaagagtacaacctcagtgggacaaagaagaacttcagcagtcttaaag

SEQ ID NO: 105936 - DNA, 120 bp, Artificial Sequence
  ENSG00000096968_16 (sequence is synthesized)
atcttttgaattgttaccagatggaaactgttcgctcagacaatataattttccagtttactaaatgctgtcccccaaagccaaaagataaatcaaaccttctagtcttcagaacgaatg

SEQ ID NO: 105937 - DNA, 120 bp, Artificial Sequence
  ENSG00000096968_17 (sequence is synthesized)
gtgtttctgatgtaccaacctcaccaacattacagaggcctactcatatgaaccaaatggtgtttcacaaaatcagaaatgaagatttgatatttaatgaaagccttggccaaggcactt

SEQ ID NO: 105938 - DNA, 120 bp, Artificial Sequence
  ENSG00000096968_18 (sequence is synthesized)
ttacaaagatttttaaaggcgtacgaagagaagtaggagactacggtcaactgcatgaaacagaagttcttttaaaagttctggataaagcacacagaaactattcagagtctttctttg

SEQ ID NO: 105939 - DNA, 120 bp, Artificial Sequence
  ENSG00000096968_19 (sequence is synthesized)
aagcagcaagtatgatgagcaagctttctcacaagcatttggttttaaattatggagtatgtgtctgtggagacgagaatattctggttcaggagtttgtaaaatttggatcactagata

SEQ ID NO: 105940 - DNA, 120 bp, Artificial Sequence
  ENSG00000096968_20 (sequence is synthesized)
catatctgaaaaagaataaaaattgtataaatatattatggaaacttgaagttgctaaacagttggcatgggccatgcattttctagaagaaaacacccttattcatgggaatgtatgtg

SEQ ID NO: 105941 - DNA, 120 bp, Artificial Sequence
  ENSG00000096968_21 (sequence is synthesized)
ccaaaaatattctgcttatcagagaagaagacaggaagacaggaaatcctcctttcatcaaacttagtgatcctggcattagtattacagttttgccaaaggacattcttcaggagagaa

SEQ ID NO: 105942 - DNA, 120 bp, Artificial Sequence
  ENSG00000096968_22 (sequence is synthesized)
tgggtaccacctgaatgcattgaaaatcctaaaaatttaaatttggcaacagacaaatggagttttggtaccactttgtgggaaatctgcagtggaggagataaacctctaagtgctctg

SEQ ID NO: 105943 - DNA, 120 bp, Artificial Sequence
  ENSG00000096968_23 (sequence is synthesized)
gattctcaaagaaagctacaattttatgaagataggcatcagcttcctgcaccaaagtgggcagaattagcaaaccttataaataattgtatggattatgaaccagatttcaggccttct

SEQ ID NO: 105944 - DNA, 120 bp, Artificial Sequence
  ENSG00000096968_24 (sequence is synthesized)
ttcagagccatcatacgagatcttaacagtttgtttactccagattatgaactattaacagaaaatgacatgttaccaaatatgaggataggtgccctggggttttctggtgcctttgaa

SEQ ID NO: 105945 - DNA, 120 bp, Artificial Sequence
  ENSG00000096968_25 (sequence is synthesized)
gaccgggatcctacacagtttgaagagagacatttgaaatttctacagcaacttggcaagggtaattttgggagtgtggagatgtgccggtatgaccctctacaggacaacactggggag

SEQ ID NO: 105946 - DNA, 120 bp, Artificial Sequence
  ENSG00000096968_26 (sequence is synthesized)
gtggtcgctgtaaaaaagcttcagcatagtactgaagagcacctaagagactttgaaagggaaattgaaatcctgaaatccctacagcatgacaacattgtaaagtacaagggagtgtgc

SEQ ID NO: 105947 - DNA, 120 bp, Artificial Sequence
  ENSG00000096968_27 (sequence is synthesized)
tacagtgctggtcggcgtaatctaaaattaattatggaatatttaccatatggaagtttacgagactatcttcaaaaacataaagaacggatagatcacataaaacttctgcagtacaca

SEQ ID NO: 105948 - DNA, 120 bp, Artificial Sequence
  ENSG00000096968_28 (sequence is synthesized)
tctcagatatgcaagggtatggagtatcttggtacaaaaaggtatatccacagggatctggcaacgagaaatatattggtggagaacgagaacagagttaaaattggagattttgggtta

SEQ ID NO: 105949 - DNA, 120 bp, Artificial Sequence
  ENSG00000096968_29 (sequence is synthesized)
accaaagtcttgccacaagacaaagaatactataaagtaaaagaacctggtgaaagtcccatattctggtatgctccagaatcactgacagagagcaagttttctgtggcctcagatgtt

SEQ ID NO: 105950 - DNA, 120 bp, Artificial Sequence
  ENSG00000096968_30 (sequence is synthesized)
tggagctttggagtggttctgtatgaacttttcacatacattgagaagagtaaaagtccaccagcggaatttatgcgtatgattggcaatgacaaacaaggacagatgatcgtgttccat

SEQ ID NO: 105951 - DNA, 120 bp, Artificial Sequence
  ENSG00000096968_31 (sequence is synthesized)
ttgatagaacttttgaagaataatggaagattaccaagaccagatggatgcccagatgagatctatatgatcatgacagaatgctggaacaataatgtaaatcaacgcccctcctttagg

SEQ ID NO: 105952 - DNA, 120 bp, Artificial Sequence
  ENSG00000096968_32 (sequence is synthesized)
gatctagctcttcgagtggatcaaataagggataacatggctggatgaaagaaatgaccttcattctgagaccaaagtagatttacagaacaaagttttatatttcacattgctgtggac

SEQ ID NO: 105953 - DNA, 120 bp, Artificial Sequence
  ENSG00000096968_33 (sequence is synthesized)
tattattacatatatcattattatataaatcatgatgctagccagcaaagatgtgaaaatatctgctcaaaactttcaaagtttagtaagtttttcttcatgaggccaccagtaaaagac

SEQ ID NO: 105954 - DNA, 120 bp, Artificial Sequence
  ENSG00000096968_34 (sequence is synthesized)
attaatgagaattccttagcaaggattttgtaagaagtttcttaaacattgtcagttaacatcactcttgtctggcaaaagaaaaaaaatagactttttcaactcagctttttgagacct

SEQ ID NO: 105955 - DNA, 120 bp, Artificial Sequence
  ENSG00000096968_35 (sequence is synthesized)
gaaaaaattattatgtaaattttgcaatgttaaagatgcacagaatatgtatgtatagtttttaccacagtggatgtataataccttggcatcttgtgtgatgttttacacacatgaggg

SEQ ID NO: 105956 - DNA, 120 bp, Artificial Sequence
  ENSG00000096968_36 (sequence is synthesized)
ctggtgttcattaatactgttttctaatttttccatagttaatctataattaattacttcactatacaaacaaattaagatgttcagataattgaataagtacctttgtgtccttgttca

SEQ ID NO: 105957 - DNA, 120 bp, Artificial Sequence
  ENSG00000096968_37 (sequence is synthesized)
tttatatcgctggccagcattataagcaggtgtatacttttagcttgtagttccatgtactgtaaatatttttcacataaagggaacaaatgtctagttttatttgtataggaaatttcc

SEQ ID NO: 105958 - DNA, 120 bp, Artificial Sequence
  ENSG00000096968_38 (sequence is synthesized)
ctgaccctaaataatacattttgaaatgaaacaagcttacaaagatataatctattttattatggtttcccttgtatctatttgtggtgaatgtgttttttaaatggaactatctccaaa

SEQ ID NO: 105959 - DNA, 120 bp, Artificial Sequence
  ENSG00000096968_39 (sequence is synthesized)
tttttctaagactactatgaacagttttcttttaaaattttgagattaagaatgccaggaatattgtcatcctttgagctgctgactgccaataacattcttcgatctctgggatttatg

SEQ ID NO: 105960 - DNA, 120 bp, Artificial Sequence
  ENSG00000096968_40 (sequence is synthesized)
ctcatgaactaaatttaagcttaagccataaaatagattagattgttttttaaaaatggatagctcattaagaagtgcagcaggttaagaattttttcctaaagactgtatatttgaggg

SEQ ID NO: 105961 - DNA, 120 bp, Artificial Sequence
  ENSG00000096968_41 (sequence is synthesized)
gtttcagaattttgcattgcagtcatagaagagatttatttcctttttagaggggaaatgaggtaaataagtaaaaaagtatgcttgttaattttattcaagaatgccagtagaaaattc

SEQ ID NO: 105962 - DNA, 120 bp, Artificial Sequence
  ENSG00000096968_42 (sequence is synthesized)
ataacgtgtatctttaagaaaaatgagcatacatcttaaatcttttcaattaagtataaggggttgttcgttgttgtcatttgttatagtgctactccactttagacaccatagctaaaa

SEQ ID NO: 105963 - DNA, 67 bp, Artificial Sequence
  ENSG00000096968_43 (sequence is synthesized)
gtgctactccactttagacaccatagctaaaataaaatatggatacaaaacttaaaatacttgctgt

SEQ ID NO: 105964 - DNA, 120 bp, Artificial Sequence
  ENSG00000096968_44 (sequence is synthesized)
gcaggacgcgcgtccggctctcccccagcctctatccggcccggtctcctgccattcggggagactgcaggccaaccgggaggctgagttcgaagctagcagggcggcgaagccagtgtc

SEQ ID NO: 105965 - DNA, 120 bp, Artificial Sequence
  ENSG00000096968_45 (sequence is synthesized)
accctctcccgggctacaccaggccacgccggtaaagttgtttctcctctaggagaaacattcgctaggccttgttgccaacccgcaggcggctgggcgcttcatcccaccctcacccct

SEQ ID NO: 105966 - DNA, 120 bp, Artificial Sequence
  ENSG00000096968_46 (sequence is synthesized)
ttccagccaaggtggctgatgggagtcaggctctcgagggcgcattgccacgaaacagcgtgtgtgagcgcgttgtccccggcccccggcgccacttcccctcggcctagcagcctggac

SEQ ID NO: 105967 - DNA, 120 bp, Artificial Sequence
  ENSG00000096968_47 (sequence is synthesized)
tggggaaggacgggtctgctgtacccgggaggtggaaggaaaagccgaaagcggagaagtgtgcgggaggggagtctccgcgcggaggcagcccggcctcctccagtgcaggctgcgcgc

SEQ ID NO: 105968 - DNA, 120 bp, Artificial Sequence
  ENSG00000096968_48 (sequence is synthesized)
ttatattctcttttatattcaactttttatttcaattgaaatgtaatatgataaaaatatgagttttttaacaacaaaaaactcaaaggaaatatgtttttagttcatgtgttttgagcc

SEQ ID NO: 105969 - DNA, 120 bp, Artificial Sequence
  ENSG00000096968_49 (sequence is synthesized)
tcatgtgttttgagccctcctcaggggatttgtgttgagtttattacagctatggaaatggaaattatagaagttccatatttaacagccttatgtttttgatcctaaaagtagtttgtt

SEQ ID NO: 105970 - DNA, 120 bp, Artificial Sequence
  ENSG00000096968_50 (sequence is synthesized)
ttgaaaaggtttgaaaacatacaaaagcacacatatactaaattttttcccattgactggaggaaattgagaaagaattttgctacaaattaaatgtacaaaaaatattgaaagtgggtt

SEQ ID NO: 105971 - DNA, 120 bp, Artificial Sequence
  ENSG00000096996_0 (sequence is synthesized)
agtcttttctccttgctcagcttcaatgtgttccggagtggggacggggtggctgaacctcgcaggtggcagagaggctcccctggggctgtggggctctacgtggatccgatggagccg

SEQ ID NO: 105972 - DNA, 120 bp, Artificial Sequence
  ENSG00000096996_1 (sequence is synthesized)
ctggtgacctgggtggtccccctcctcttcctcttcctgctgtccaggcagggcgctgcctgcagaaccagtgagtgctgttttcaggacccgccatatccggatgcagactcaggctcg

SEQ ID NO: 105973 - DNA, 120 bp, Artificial Sequence
  ENSG00000096996_2 (sequence is synthesized)
gcctcgggccctagggacctgagatgctatcggatatccagtgatcgttacgagtgctcctggcagtatgagggtcccacagctggggtcagccacttcctgcggtgttgccttagctcc

SEQ ID NO: 105974 - DNA, 120 bp, Artificial Sequence
  ENSG00000096996_3 (sequence is synthesized)
gggcgctgctgctacttcgccgccggctcagccaccaggctgcagttctccgaccaggctggggtgtctgtgctgtacactgtcacactctgggtggaatcctgggccaggaaccagaca

SEQ ID NO: 105975 - DNA, 120 bp, Artificial Sequence
  ENSG00000096996_4 (sequence is synthesized)
gagaagtctcctgaggtgaccctgcagctctacaactcagttaaatatgagcctcctctgggagacatcaaggtgtccaagttggccgggcagctgcgtatggagtgggagaccccggat

SEQ ID NO: 105976 - DNA, 120 bp, Artificial Sequence
  ENSG00000096996_5 (sequence is synthesized)
aaccaggttggtgctgaggtgcagttccggcaccggacacccagcagcccatggaagttgggcgactgcggacctcaggatgatgatactgagtcctgcctctgccccctggagatgaat

SEQ ID NO: 105977 - DNA, 120 bp, Artificial Sequence
  ENSG00000096996_6 (sequence is synthesized)
gtggcccaggaattccagctccgacgacggcagctggggagccaaggaagttcctggagcaagtggagcagccccgtgtgcgttccccctgaaaaccccccacagcctcaggtgagattc

SEQ ID NO: 105978 - DNA, 120 bp, Artificial Sequence
  ENSG00000096996_7 (sequence is synthesized)
tcggtggagcagctgggccaggatgggaggaggcggctgaccctgaaagagcagccaacccagctggagcttccagaaggctgtcaagggctggcgcctggcacggaggtcacttaccga

SEQ ID NO: 105979 - DNA, 120 bp, Artificial Sequence
  ENSG00000096996_8 (sequence is synthesized)
ctacagctccacatgctgtcctgcccgtgtaaggccaaggccaccaggaccctgcacctggggaagatgccctatctctcgggtgctgcctacaacgtggctgtcatctcctcgaaccaa

SEQ ID NO: 105980 - DNA, 120 bp, Artificial Sequence
  ENSG00000096996_9 (sequence is synthesized)
tttggtcctggcctgaaccagacgtggcacattcctgccgacacccacacagaaccagtggctctgaatatcagcgtcggaaccaacgggaccaccatgtattggccagcccgggctcag

SEQ ID NO: 105981 - DNA, 120 bp, Artificial Sequence
  ENSG00000096996_10 (sequence is synthesized)
agcatgacgtattgcattgaatggcagcctgtgggccaggacgggggccttgccacctgcagcctgactgcgccgcaagacccggatccggctggaatggcaacctacagctggagtcga

SEQ ID NO: 105982 - DNA, 120 bp, Artificial Sequence
  ENSG00000096996_11 (sequence is synthesized)
ccttgtggtctacggtcctgtccacctaccactttgggggcaatgcctcagcagctgggacaccgcaccacgtctcggtgaagaatcatagcttggactctgtgtctgtggactgggcac

SEQ ID NO: 105983 - DNA, 120 bp, Artificial Sequence
  ENSG00000096996_12 (sequence is synthesized)
catccctgctgagcacctgtcccggcgtcctaaaggagtatgttgtccgctgccgagatgaagacagcaaacaggtgtcagagcatcccgtgcagcccacagagacccaagttaccctca

SEQ ID NO: 105984 - DNA, 120 bp, Artificial Sequence
  ENSG00000096996_13 (sequence is synthesized)
gtggcctgcgggctggtgtagcctacacggtgcaggtgcgagcagacacagcgtggctgaggggtgtctggagccagccccagcgcttcagcatcgaagtgcaggtttctgattggctca

SEQ ID NO: 105985 - DNA, 120 bp, Artificial Sequence
  ENSG00000096996_14 (sequence is synthesized)
tcttcttcgcctccctggggagcttcctgagcatccttctcgtgggcgtccttggctaccttggcctgaacagggccgcacggcacctgtgcccgccgctgcccacaccctgtgccagct

SEQ ID NO: 105986 - DNA, 120 bp, Artificial Sequence
  ENSG00000096996_15 (sequence is synthesized)
ccgccattgagttccctggagggaaggagacttggcagtggatcaacccagtggacttccaggaagaggcatccctgcaggaggccctggtggtagagatgtcctgggacaaaggcgaga

SEQ ID NO: 105987 - DNA, 120 bp, Artificial Sequence
  ENSG00000096996_16 (sequence is synthesized)
ggactgagcctctcgagaagacagagctacctgagggtgcccctgagctggccctggatacagagttgtccttggaggatggagacaggtgcaaggccaagatgtgatcgttgaggctca

SEQ ID NO: 105988 - DNA, 120 bp, Artificial Sequence
  ENSG00000096996_17 (sequence is synthesized)
gagagggtgagtgactcgcccgaggctacgtagcacacacaggagtcacatttggacccaaataacccagagctcctccaggctccagtgcacctgcctcctctctgccccgtgcctgtt

SEQ ID NO: 105989 - DNA, 120 bp, Artificial Sequence
  ENSG00000096996_18 (sequence is synthesized)
gccacccatcctgcgggggaaccctagatgctgccatgaaatggaagctgctgcaccctgctgggcctggcatccgtggggcaggagcagaccctgccatttacctgttctggcgtagaa

SEQ ID NO: 105990 - DNA, 120 bp, Artificial Sequence
  ENSG00000096996_19 (sequence is synthesized)
tggactgggaatgggggcaaggggggctcagatggatccctggaccctgggctgggcatccacccccaggagcactggatggggagtctggactcaagggctccctgcagcattgcgggg

SEQ ID NO: 105991 - DNA, 120 bp, Artificial Sequence
  ENSG00000096996_20 (sequence is synthesized)
tcttgtagcttggaggatccaggcatatagggaagggggctgtaaactttgtgggaaaaatgacggtcctcccatcccaccccccaccccaccctcacccccctataaaatgggggtggt

SEQ ID NO: 105992 - DNA, 120 bp, Artificial Sequence
  ENSG00000096996_21 (sequence is synthesized)
gataatgaccttacacagctgttcaaaatcatcgtaaatgagcctcctcttgggtatttttttcctgtttgaagcttgaatgtcctgctcaaaatctcaaaacacgagccttggaattca

SEQ ID NO: 105993 - DNA, 120 bp, Artificial Sequence
  ENSG00000096996_22 (sequence is synthesized)
ggtcaggcgcctccttcacttgctgtgagtcccttatcacaactgatcactccgtggggtcaccgctgctctggcgtctacctcccccaacaggttggggtttctaggagggcagctcca

SEQ ID NO: 105994 - DNA, 120 bp, Artificial Sequence
  ENSG00000096996_23 (sequence is synthesized)
agaacactccgctgcctctccagagccaggcacacagcaggcgctccataaatgttcgttggatgatcctcagcgacgttagggtctcttgccacatggagggaagctcggccctcctcc

SEQ ID NO: 105995 - DNA, 120 bp, Artificial Sequence
  ENSG00000096996_24 (sequence is synthesized)
tcgggctgaaggtctctctccctgagaaggcggaagctgaggagcagctgccaggcagaggccactggggaacaacaacaatgactaatcacactggccagcgggtggacagcgctcact

SEQ ID NO: 105996 - DNA, 77 bp, Artificial Sequence
  ENSG00000096996_25 (sequence is synthesized)
gacctactatttttattatttttgagctaggttctcagtctgttggcagactggagtgcaatcatggctcactgcag

SEQ ID NO: 105997 - DNA, 89 bp, Artificial Sequence
  ENSG00000096996_26 (sequence is synthesized)
gccgacctactatttttattatttttgagctaggttctcagtctgttggcagactggagtcagactcaagtgatccttccacctcagcc

SEQ ID NO: 105998 - DNA, 74 bp, Artificial Sequence
  ENSG00000096996_27 (sequence is synthesized)
ctacagacatgcaccaccacacctggttaattttttatttttattttttgtagagacaggtgtctctctactct

SEQ ID NO: 105999 - DNA, 120 bp, Artificial Sequence
  ENSG00000096996_28 (sequence is synthesized)
caggcgtgagccaccgtacccagcctggtcccatatcatagtgaaatggtgcctgtaaagctctcagcattggcttggcacatgcagttggtactcaataaacggctgttgctatcccca

SEQ ID NO: 106000 - DNA, 120 bp, Artificial Sequence
  ENSG00000096996_29 (sequence is synthesized)
ctccaccaccaggccaaagacccagccctgcctgtggtcttgggagtccccaccccaccacctgctggcccattcttaccaggttcaagttgccctggagtagccagccgcctctctgaa

SEQ ID NO: 106001 - DNA, 120 bp, Artificial Sequence
  ENSG00000096996_30 (sequence is synthesized)
cattatcacttccctagcatggtctcagggctggtgtctgtgtccgttcagattggtcggtacatgggagaaagtacctgttaagcattttgaagccccccccccaacctgataaattat

SEQ ID NO: 106002 - DNA, 120 bp, Artificial Sequence
  ENSG00000097007_0 (sequence is synthesized)
gcctggcctcgttgtggagcggctcgtaatccatcatggcggccgcggggtttggtgtctgtgcctgagcagcgctggagccggagccggttcccgggtcctgcggctgaggagcccctc

SEQ ID NO: 106003 - DNA, 120 bp, Artificial Sequence
  ENSG00000097007_1 (sequence is synthesized)
cgctgtccacggcccctaccggcggggggcggctgggtccctcggcggagctcgggagatgtgactgcctgagggcggtggtggtgtcagcgtccggggccgggggagggggtgtctcgg

SEQ ID NO: 106004 - DNA, 120 bp, Artificial Sequence
  ENSG00000097007_2 (sequence is synthesized)
gcagagacccccgggcttggggcagctgaggcggccgggcctcctctacacggggcccgccttccgctgtctgggccgcgagagtccttcgtcccttacagccccgccccggctttggga

SEQ ID NO: 106005 - DNA, 120 bp, Artificial Sequence
  ENSG00000097007_3 (sequence is synthesized)
cactgcgggtggtctgtttcccccagcttgggacaccccgttttctgaggcgtggaagagcgtcgccccggagtaagctgcccgtgccgcgccccgacagcttccctcagccccaagccg

SEQ ID NO: 106006 - DNA, 120 bp, Artificial Sequence
  ENSG00000097007_4 (sequence is synthesized)
ccccttattccggatcccggccccaactttggccacggagcctcccattcaaatccctcccttgctgtcaaggggtctccccttcccccaaggtggctcccgcgagcctctaatgccctg

SEQ ID NO: 106007 - DNA, 120 bp, Artificial Sequence
  ENSG00000097007_5 (sequence is synthesized)
acttcttccaatgtcacctacggcccccttagtctcagctcagccaaaaactttaatgcaaaggaaaagtctggattggttccacaggccttttaaaaagcggacttaaaagttgctggc

SEQ ID NO: 106008 - DNA, 120 bp, Artificial Sequence
  ENSG00000097007_6 (sequence is synthesized)
aatgcattccttttcgtcagagtcgagggcaaactcgctgaaatctgggtgacccgtgtccttttccggagagcaaagcagagaagcgagagcggccactagttcggcaggaaatttgtt

SEQ ID NO: 106009 - DNA, 120 bp, Artificial Sequence
  ENSG00000097007_7 (sequence is synthesized)
ggaagatgaagaagctaagatagggggttggtgacttccacaggaaaagttctggaggagtagccaaagaccatcagcgtttcctttatgtgtgagaattgaaatgactagcattattga

SEQ ID NO: 106010 - DNA, 120 bp, Artificial Sequence
  ENSG00000097007_8 (sequence is synthesized)
cccttttcagcatcccctgtgaatatttctgtttaggtttttcttcttgaaaagaaattgttattcagcccgtttaaaacaaatcaagaaacttttgggtaacattgcaattacatgaaa

SEQ ID NO: 106011 - DNA, 120 bp, Artificial Sequence
  ENSG00000097007_9 (sequence is synthesized)
ttgataaccgcgaaaataattggaactcctgcttgcaagtgtcaacctaaaaaaagtgcttccttttgttatggaagatgtctttctgtgattgacttcaattgctgacttgtggagatg

SEQ ID NO: 106012 - DNA, 120 bp, Artificial Sequence
  ENSG00000097007_10 (sequence is synthesized)
cagcgaatgtgaaatcccacgtatatgccatttccctctacgctcgctgaccgttctggaagatcttgaaccctcttctggaaaggggtacctattattactttatggggcagcagcctg

SEQ ID NO: 106013 - DNA, 120 bp, Artificial Sequence
  ENSG00000097007_11 (sequence is synthesized)
gaaaagtacttggggaccaaagaaggccaagcttgcctgccctgcattttatcaaaggagcagggaagaaggaatcatcgaggcatgggggtccacactgcaatgtttttgtggaacatg

SEQ ID NO: 106014 - DNA, 120 bp, Artificial Sequence
  ENSG00000097007_12 (sequence is synthesized)
aagcccttcagcggccagtagcatctgactttgagcctcagggtctgagtgaagccgctcgttggaactccaaggaaaaccttctcgctggacccagtgaaaatgaccccaaccttttcg

SEQ ID NO: 106015 - DNA, 120 bp, Artificial Sequence
  ENSG00000097007_13 (sequence is synthesized)
ttgcactgtatgattttgtggccagtggagataacactctaagcataactaaaggtgaaaagctccgggtcttaggctataatcacaatggggaatggtgtgaagcccaaaccaaaaatg

SEQ ID NO: 106016 - DNA, 120 bp, Artificial Sequence
  ENSG00000097007_14 (sequence is synthesized)
gccaaggctgggtcccaagcaactacatcacgccagtcaacagtctggagaaacactcctggtaccatgggcctgtgtcccgcaatgccgctgagtatctgctgagcagcgggatcaatg

SEQ ID NO: 106017 - DNA, 120 bp, Artificial Sequence
  ENSG00000097007_15 (sequence is synthesized)
gcagcttcttggtgcgtgagagtgagagcagtcctggccagaggtccatctcgctgagatacgaagggagggtgtaccattacaggatcaacactgcttctgatggcaagctctacgtct

SEQ ID NO: 106018 - DNA, 120 bp, Artificial Sequence
  ENSG00000097007_16 (sequence is synthesized)
cctccgagagccgcttcaacaccctggccgagttggttcatcatcattcaacggtggccgacgggctcatcaccacgctccattatccagccccaaagcgcaacaagcccactgtctatg

SEQ ID NO: 106019 - DNA, 120 bp, Artificial Sequence
  ENSG00000097007_17 (sequence is synthesized)
gtgtgtcccccaactacgacaagtgggagatggaacgcacggacatcaccatgaagcacaagctgggcgggggccagtacggggaggtgtacgagggcgtgtggaagaaatacagcctga

SEQ ID NO: 106020 - DNA, 120 bp, Artificial Sequence
  ENSG00000097007_18 (sequence is synthesized)
cggtggccgtgaagaccttgaaggaggacaccatggaggtggaagagttcttgaaagaagctgcagtcatgaaagagatcaaacaccctaacctggtgcagctccttggggtctgcaccc

SEQ ID NO: 106021 - DNA, 120 bp, Artificial Sequence
  ENSG00000097007_19 (sequence is synthesized)
cggcaggaggtgaacgccgtggtgctgctgtacatggccactcagatctcgtcagccatggagtacctggagaagaaaaacttcatccacagagatcttgctgcccgaaactgcctggta

SEQ ID NO: 106022 - DNA, 120 bp, Artificial Sequence
  ENSG00000097007_20 (sequence is synthesized)
ggggagaaccacttggtgaaggtagctgattttggcctgagcaggttgatgacaggggacacctacacagcccatgctggagccaagttccccatcaaatggactgcacccgagagcctg

SEQ ID NO: 106023 - DNA, 120 bp, Artificial Sequence
  ENSG00000097007_21 (sequence is synthesized)
gcctacaacaagttctccatcaagtccgacgtctgggcatttggagtattgctttgggaaattgctacctatggcatgtccccttacccgggaattgacctgtcccaggtgtatgagctg

SEQ ID NO: 106024 - DNA, 120 bp, Artificial Sequence
  ENSG00000097007_22 (sequence is synthesized)
ctagagaaggactaccgcatggagcgcccagaaggctgcccagagaaggtctatgaactcatgcgagcatgttggcagtggaatccctctgaccggccctcctttgctgaaatccaccaa

SEQ ID NO: 106025 - DNA, 120 bp, Artificial Sequence
  ENSG00000097007_23 (sequence is synthesized)
gcctttgaaacaatgttccaggaatccagtatctcagacgaagtggaaaaggagctggggaaacaaggcgtccgtggggctgtgagtaccttgctgcaggccccagagctgcccaccaag

SEQ ID NO: 106026 - DNA, 120 bp, Artificial Sequence
  ENSG00000097007_24 (sequence is synthesized)
acgaggacctccaggagagctgcagagcacagagacaccactgacgtgcctgagatgcctcactccaagggccagggagagagcgatcctctggaccatgagcctgccgtgtctccattg

SEQ ID NO: 106027 - DNA, 120 bp, Artificial Sequence
  ENSG00000097007_25 (sequence is synthesized)
ctccctcgaaaagagcgaggtcccccggagggcggcctgaatgaagatgagcgccttctccccaaagacaaaaagaccaacttgttcagcgccttgatcaagaagaagaagaagacagcc

SEQ ID NO: 106028 - DNA, 120 bp, Artificial Sequence
  ENSG00000097007_26 (sequence is synthesized)
ccaacccctcccaaacgcagcagctccttccgggagatggacggccagccggagcgcagaggggccggcgaggaagagggccgagacatcagcaacggggcactggctttcacccccttg

SEQ ID NO: 106029 - DNA, 120 bp, Artificial Sequence
  ENSG00000097007_27 (sequence is synthesized)
gacacagctgacccagccaagtccccaaagcccagcaatggggctggggtccccaatggagccctccgggagtccgggggctcaggcttccggtctccccacctgtggaagaagtccagc

SEQ ID NO: 106030 - DNA, 120 bp, Artificial Sequence
  ENSG00000097007_28 (sequence is synthesized)
acgctgaccagcagccgcctagccaccggcgaggaggagggcggtggcagctccagcaagcgcttcctgcgctcttgctccgcctcctgcgttccccatggggccaaggacacggagtgg

SEQ ID NO: 106031 - DNA, 120 bp, Artificial Sequence
  ENSG00000097007_29 (sequence is synthesized)
aggtcagtcacgctgcctcgggacttgcagtccacgggaagacagtttgactcgtccacatttggagggcacaaaagtgagaagccggctctgcctcggaagagggcaggggagaacagg

SEQ ID NO: 106032 - DNA, 120 bp, Artificial Sequence
  ENSG00000097007_30 (sequence is synthesized)
tctgaccaggtgacccgaggcacagtaacgcctccccccaggctggtgaaaaagaatgaggaagctgctgatgaggtcttcaaagacatcatggagtccagcccgggctccagcccgccc

SEQ ID NO: 106033 - DNA, 120 bp, Artificial Sequence
  ENSG00000097007_31 (sequence is synthesized)
aacctgactccaaaacccctccggcggcaggtcaccgtggcccctgcctcgggcctcccccacaaggaagaagctggaaagggcagtgccttagggacccctgctgcagctgagccagtg

SEQ ID NO: 106034 - DNA, 120 bp, Artificial Sequence
  ENSG00000097007_32 (sequence is synthesized)
acccccaccagcaaagcaggctcaggtgcaccagggggcaccagcaagggccccgccgaggagtccagagtgaggaggcacaagcactcctctgagtcgccagggagggacaaggggaaa

SEQ ID NO: 106035 - DNA, 120 bp, Artificial Sequence
  ENSG00000097007_33 (sequence is synthesized)
ttgtccaggctcaaacctgccccgccgcccccaccagcagcctctgcagggaaggctggaggaaagccctcgcagagcccgagccaggaggcggccggggaggcagtcctgggcgcaaag

SEQ ID NO: 106036 - DNA, 120 bp, Artificial Sequence
  ENSG00000097007_34 (sequence is synthesized)
acaaaagccacgagtctggttgatgctgtgaacagtgacgctgccaagcccagccagccgggagagggcctcaaaaagcccgtgctcccggccactccaaagccacagtccgccaagccg

SEQ ID NO: 106037 - DNA, 120 bp, Artificial Sequence
  ENSG00000097007_35 (sequence is synthesized)
tcggggacccccatcagcccagcccccgttccctccacgttgccatcagcatcctcggccctggcaggggaccagccgtcttccaccgccttcatccctctcatatcaacccgagtgtct

SEQ ID NO: 106038 - DNA, 120 bp, Artificial Sequence
  ENSG00000097007_36 (sequence is synthesized)
cttcggaaaacccgccagcctccagagcggatcgccagcggcgccatcaccaagggcgtggtcctggacagcaccgaggcgctgtgcctcgccatctctaggaactccgagcagatggcc

SEQ ID NO: 106039 - DNA, 120 bp, Artificial Sequence
  ENSG00000097007_37 (sequence is synthesized)
agccacagcgcagtgctggaggccggcaaaaacctctacacgttctgcgtgagctatgtggattccatccagcaaatgaggaacaagtttgccttccgagaggccatcaacaaactggag

SEQ ID NO: 106040 - DNA, 120 bp, Artificial Sequence
  ENSG00000097007_38 (sequence is synthesized)
aataatctccgggagcttcagatctgcccggcgacagcaggcagtggtccagcggccactcaggacttcagcaagctcctcagttcggtgaaggaaatcagtgacatagtgcagaggtag

SEQ ID NO: 106041 - DNA, 120 bp, Artificial Sequence
  ENSG00000097007_39 (sequence is synthesized)
agccgggcctgagccgggcccgcggaccgagctgggagaggggttccggcccccgacgtgctggcgcgggaaaatgttggagatctgcctgaagctggtgggctgcaaatccaagaaggg

SEQ ID NO: 106042 - DNA, 120 bp, Artificial Sequence
  ENSG00000097007_40 (sequence is synthesized)
cagtggctgacaagggactagtgagtcagcaccttggcccaggagctctgcgccaggcagagctgagggccctgtggagtccagctctactacctacgtttgcaccgcctgccctcccgc

SEQ ID NO: 106043 - DNA, 120 bp, Artificial Sequence
  ENSG00000097007_41 (sequence is synthesized)
accttcctcctccccgctccgtctctgtcctcgaattttatctgtggagttcctgctccgtggactgcagtcggcatgccaggacccgccagccccgctcccacctagtgccccagactg

SEQ ID NO: 106044 - DNA, 120 bp, Artificial Sequence
  ENSG00000097007_42 (sequence is synthesized)
agctctccaggccaggtgggaacggctgatgtggactgtctttttcatttttttctctctggagcccctcctcccccggctgggcctccttcttccacttctccaagaatggaagcctga

SEQ ID NO: 106045 - DNA, 120 bp, Artificial Sequence
  ENSG00000097007_43 (sequence is synthesized)
actgaggccttgtgtgtcaggccctctgcctgcactccctggccttgcccgtcgtgtgctgaagacatgtttcaagaaccgcatttcgggaagggcatgcacgggcatgcacacggctgg

SEQ ID NO: 106046 - DNA, 120 bp, Artificial Sequence
  ENSG00000097007_44 (sequence is synthesized)
tcactctgccctctgctgctgcccggggtggggtgcactcgccatttcctcacgtgcaggacagctcttgatttgggtggaaaacagggtgctaaagccaaccagcctttgggtcctggg

SEQ ID NO: 106047 - DNA, 120 bp, Artificial Sequence
  ENSG00000097007_45 (sequence is synthesized)
caggtgggagctgaaaaggatcgaggcatggggcatgtcctttccatctgtccacatccccagagcccagctcttgctctcttgtgacgtgcactgtgaatcctggcaagaaagcttgag

SEQ ID NO: 106048 - DNA, 120 bp, Artificial Sequence
  ENSG00000097007_46 (sequence is synthesized)
tctcaagggtggcaggtcactgtcactgccgacatccctcccccagcagaatggaggcaggggacaagggaggcagtggctagtggggtgaacagctggtgccaaatagccccagactgg

SEQ ID NO: 106049 - DNA, 120 bp, Artificial Sequence
  ENSG00000097007_47 (sequence is synthesized)
gcccaggcaggtctgcaagggcccagagtgaaccgtcctttcacacatctgggtgccctgaaagggcccttcccctcccccactcctctaagacaaagtagattcttacaaggccctttc

SEQ ID NO: 106050 - DNA, 120 bp, Artificial Sequence
  ENSG00000097007_48 (sequence is synthesized)
ctttggaacaagacagccttcacttttctgagttcttgaagcatttcaaagccctgcctctgtgtagccgccctgagagagaatagagctgccactgggcacctgcgcacaggtgggagg

SEQ ID NO: 106051 - DNA, 120 bp, Artificial Sequence
  ENSG00000097007_49 (sequence is synthesized)
aaagggcctggccagtcctggtcctggctgcactcttgaactgggcgaatgtcttatttaattaccgtgagtgacatagcctcatgttctgtgggggtcatcagggagggttaggaaaac

SEQ ID NO: 106052 - DNA, 120 bp, Artificial Sequence
  ENSG00000097007_50 (sequence is synthesized)
cacaaacggagcccctgaaagcctcacgtatttcacagagcacgcctgccatcttctccccgaggctgccccaggccggagcccagatacgggggctgtgactctgggcagggacccggg

SEQ ID NO: 106053 - DNA, 120 bp, Artificial Sequence
  ENSG00000097007_51 (sequence is synthesized)
gtctcctggaccttgacagagcagctaactccgagagcagtgggcaggtggccgcccctgaggcttcacgccgggagaagccaccttcccaccccttcataccgcctcgtgccagcagcc

SEQ ID NO: 106054 - DNA, 120 bp, Artificial Sequence
  ENSG00000097007_52 (sequence is synthesized)
tcgcacaggccctagctttacgctcatcacctaaacttgtactttatttttctgatagaaatggtttcctctggatcgttttatgcggttcttacagcacatcacctctttgcccccgac

SEQ ID NO: 106055 - DNA, 120 bp, Artificial Sequence
  ENSG00000097007_53 (sequence is synthesized)
ggctgtgacgcagccggagggaggcactagtcaccgacagcggccttgaagacagagcaaagcgcccacccaggtcccccgactgcctgtctccatgaggtactggtcccttccttttgt

SEQ ID NO: 106056 - DNA, 120 bp, Artificial Sequence
  ENSG00000097007_54 (sequence is synthesized)
taacgtgatgtgccactatattttacacgtatctcttggtatgcatcttttatagacgctcttttctaagtggcgtgtgcatagcgtcctgccctgccccctcgggggcctgtggtggct

SEQ ID NO: 106057 - DNA, 120 bp, Artificial Sequence
  ENSG00000097007_55 (sequence is synthesized)
ccccctctgcttctcggggtccagtgcattttgtttctgtatatgattctctgtggttttttttgaatccaaatctgtcctctgtagtattttttaaataaatcagtgtttacattagaa

SEQ ID NO: 106058 - DNA, 120 bp, Artificial Sequence
  ENSG00000097021_0 (sequence is synthesized)
cggtcctaggaggagcaggagcctggtgctttctatcagggagggatcacaccggctcactgctgagccggccaggcagacacaggcttgggctctgctgggcatcatacttgtcactgg

SEQ ID NO: 106059 - DNA, 120 bp, Artificial Sequence
  ENSG00000097021_1 (sequence is synthesized)
gtaaacagtttgcccacttaccgcaggatgaagctgcttgccagggctctccggctctgtgagtttgggaggcaggcatcttccaggaggctggtggctggccagggatgtgtggggccc

SEQ ID NO: 106060 - DNA, 120 bp, Artificial Sequence
  ENSG00000097021_2 (sequence is synthesized)
cggcgagggtgctgcgctcccgtccaggtggttgggcccagggctgatctcccaccctgtggagcctgcattactggaaggatcatgcggccagatgatgccaacgtggccggcaatgtc

SEQ ID NO: 106061 - DNA, 120 bp, Artificial Sequence
  ENSG00000097021_3 (sequence is synthesized)
cacggggggaccatcctgaagatgatcgaggaggcaggcgccatcatcagcacccggcattgcaacagccagaacggggagcgctgtgtggccgccctggctcgtgtcgagcgcaccgac

SEQ ID NO: 106062 - DNA, 120 bp, Artificial Sequence
  ENSG00000097021_4 (sequence is synthesized)
ttcctgtctcccatgtgcatcggtgaggtggcgcatgtcagcgcggagatcacctacacctccaagcactctgtggaggtgcaggtcaacgtgatgtccgaaaacatcctcacaggtgcc

SEQ ID NO: 106063 - DNA, 120 bp, Artificial Sequence
  ENSG00000097021_5 (sequence is synthesized)
aaaaagctgaccaataaggccaccctgtggtatgtgcccctgtcgctgaagaatgtggacaaggtcctcgaggtgcctcctgttgtgtattcccggcaggagcaggaggaggagggccgg

SEQ ID NO: 106064 - DNA, 120 bp, Artificial Sequence
  ENSG00000097021_6 (sequence is synthesized)
gacatcgtccagccagtcctcaacccagagccgaacactgtcagctacagccagtccagcttgatccacctggtggggccttcagactgcaccctgcacggctttgtgcacggaggtgtg

SEQ ID NO: 106065 - DNA, 120 bp, Artificial Sequence
  ENSG00000097021_7 (sequence is synthesized)
accatgaagctcatggatgaggtcgccgggatcgtggctgcacgccactgcaagaccaacatcgtcacagcttccgtggacgccattaattttcatgacaagatcagaaaaggctgcgtc

SEQ ID NO: 106066 - DNA, 120 bp, Artificial Sequence
  ENSG00000097021_8 (sequence is synthesized)
atcaccatctcgggacgcatgaccttcacgagcaataagtccatggagatcgaggtgttggtggacgccgaccctgttgtggacagctctcagaagcgctaccgggccgccagtgccttc

SEQ ID NO: 106067 - DNA, 120 bp, Artificial Sequence
  ENSG00000097021_9 (sequence is synthesized)
ttcacctacgtgtcgctgagccaggaaggcaggtcgctgcctgtgccccagctggtgcccgagaccgaggacgagaagaagcgctttgaggaaggcaaagggcggtacctgcagatgaag

SEQ ID NO: 106068 - DNA, 120 bp, Artificial Sequence
  ENSG00000097021_10 (sequence is synthesized)
gcgaagcgacagggccacgcggagcctcagccctagactccctcctcctgccactggtgcctcgagtagccatggcaacgggcccagtgtccagtcacttagaagttccccccttggcca

SEQ ID NO: 106069 - DNA, 120 bp, Artificial Sequence
  ENSG00000097021_11 (sequence is synthesized)
aaaacccaattcacattgagagctggtgttgtctgaagttttcgtatcacagtgttaacctgtactctctcctgcaaacctacacaccaaagctttatttatatcattccagtatcaatg

SEQ ID NO: 106070 - DNA, 120 bp, Artificial Sequence
  ENSG00000097021_12 (sequence is synthesized)
ctacacagtgttgtcccgagcgccgggaggcgttgggcagaaaccctcgggaatgcttccgagcacgctgtagggtatgggaagaacccagcaccactaataaagctgctgcttggctgg

SEQ ID NO: 106071 - DNA, 120 bp, Artificial Sequence
  ENSG00000097021_13 (sequence is synthesized)
gccggagttgcgtgggttttaatttaaagatgtaagtacaaatctatgtgcattgtagaaaattcggaaaaggtccaactgcctagcaagtaaaaagctgtcattccagcacgtgggggg

SEQ ID NO: 106072 - DNA, 120 bp, Artificial Sequence
  ENSG00000097021_14 (sequence is synthesized)
tgaccgcttctcccttcttgggtgttttttggtggattttttttggtgaccccgactggcctagactccattcaagggcacatcttgtgcagtaaaacacgcatgtttcagggctcctca

SEQ ID NO: 106073 - DNA, 120 bp, Artificial Sequence
  ENSG00000097021_15 (sequence is synthesized)
ctgcaacacgtgcacctccaggctggcgctcagcgctcccagtaaaagctgcaggcggcggtgtagatagtcgccggcctttcctcctccccacctcgtgacgctttgtgctgcggaagc

SEQ ID NO: 106074 - DNA, 120 bp, Artificial Sequence
  ENSG00000097021_16 (sequence is synthesized)
aaaggcccgttccattccccgtgtcttcccagcagccgccaccaatgctcctttctaggaaacagccttccattctctcttagggccgatcttagcgagagccgcgatgcgggcgactgg

SEQ ID NO: 106075 - DNA, 120 bp, Artificial Sequence
  ENSG00000097021_17 (sequence is synthesized)
ctggtgccggggtgggttgggggcgggggtgggaatcaggccccactgccaggagcccgggccgcgccttccgctctgacctcatccggccgcccaggcactgggcgcggcagcgaatcg

SEQ ID NO: 106076 - DNA, 120 bp, Artificial Sequence
  ENSG00000097021_18 (sequence is synthesized)
cgcgggcggccgggaacgcccagcacaaatatttaccgccgcgcggagagtgagggcccaagtccgccctgctccgccacttaggccgccccagacgcttccctcggggctgccaccggg

SEQ ID NO: 106077 - DNA, 120 bp, Artificial Sequence
  ENSG00000097021_19 (sequence is synthesized)
ccaccgggtcgggcgcggctgccgcggctagcgggccttccccgcaccggcgcggcccaaccgccaccgaaccttctggaagcggcggctgcctgggcccccacgccgccagaatcgtac

SEQ ID NO: 106078 - DNA, 80 bp, Artificial Sequence
  ENSG00000097021_20 (sequence is synthesized)
aatcgtacgcccgcgcgagctctctgcagccttggcggcctgggaggcggggctcggggtggggccggcgcgggggcggg

SEQ ID NO: 106079 - DNA, 120 bp, Artificial Sequence
  ENSG00000097021_21 (sequence is synthesized)
gccccatcgctccacctctgccctccccctttatggcgcggcccgggctcattcattccgcgccgggcctgccagacacctgcgcccttctgcagccgcccgccgcatccgccgccgcag

SEQ ID NO: 106080 - DNA, 120 bp, Artificial Sequence
  ENSG00000097021_22 (sequence is synthesized)
aggatgcaggcttggacctgctggagtccttgctggcctgtgaccttcctcccctgtctacatttcagggagctctagaaggcggcagtggggccagacctggctttggctgagaccctg

SEQ ID NO: 106081 - DNA, 120 bp, Artificial Sequence
  ENSG00000097021_23 (sequence is synthesized)
gagaaagactagggggtcttgtgccctgtcagagaaggcagagcctcatagccgcttccctgaggccgctcagcagcggcccctctgccttcctgatctcctggcatggcagccagaaga

SEQ ID NO: 106082 - DNA, 120 bp, Artificial Sequence
  ENSG00000097021_24 (sequence is synthesized)
gctcacagaattacttcttctgtaattatttataaagcaaggtttccatgacgaccggtttctggtagacgctctggattggcgaggcagcctcttcctggccagattgggcagctcagg

SEQ ID NO: 106083 - DNA, 120 bp, Artificial Sequence
  ENSG00000097021_25 (sequence is synthesized)
aagctgggggtggggggtgctccccaccaagcccggtgtggcagggagctgggacagtcctgggtcaggcaaggactctgtgatgcttccctgctccctcgcctttctctgcatctgatc

SEQ ID NO: 106084 - DNA, 120 bp, Artificial Sequence
  ENSG00000097021_26 (sequence is synthesized)
gagttccatttggctgcagcttctggagggagccgacaggagacgtggggagacgatgctcctgcttcggagaagcttgtcactaaacgtcctcagaaaggaagtcgacagggcctgttt

SEQ ID NO: 106085 - DNA, 120 bp, Artificial Sequence
  ENSG00000097021_27 (sequence is synthesized)
gctctgtacaagtttctgttgaacatgtatttcttctgggtatctgcctaggagtggaattgctaggttatacggtccctctgtgtttatcctcttgcgaaacttcaaactgtttccaaa

SEQ ID NO: 106086 - DNA, 120 bp, Artificial Sequence
  ENSG00000097021_28 (sequence is synthesized)
gtacctgcacctttggctcccactggcagtggaggagggttccagtttcccccacatcctcgccagcacgtgctgttctgtgacttcaggattgcagccatcccagttgatattgtaaca

SEQ ID NO: 106087 - DNA, 120 bp, Artificial Sequence
  ENSG00000097021_29 (sequence is synthesized)
aaacttgcccagcagggtgagatatctgtagaggacaggaaaagggctgttttgttagtggcttggcatatcagccatggtcgtttttttcaaaatctcctgaggaagccccatgtagcg

SEQ ID NO: 106088 - DNA, 120 bp, Artificial Sequence
  ENSG00000097021_30 (sequence is synthesized)
ccctgcacccctgctggctgcggcccttgctggtggctagtgggaggggagggctcgagttgtaacttgtttccagggtgtgaaataatctcctctgcctccgtgtctcatctgccgcat

SEQ ID NO: 106089 - DNA, 120 bp, Artificial Sequence
  ENSG00000097021_31 (sequence is synthesized)
tgactgcgggcgctttgcatgggactctgtaccttacagctcacgtaatgcctgctggcgctgaccacacagctccttcctcctctcccagcactggcacgaagtgctccctgctgcgtc

SEQ ID NO: 106090 - DNA, 120 bp, Artificial Sequence
  ENSG00000097033_0 (sequence is synthesized)
gtttttcccttgggacccgggtccacacggcggggtcgcccgtccatctccggctcgcccgcggggcccatcgtcgacgttagcggccgttctccgagccgactgacccatccttggcgc

SEQ ID NO: 106091 - DNA, 120 bp, Artificial Sequence
  ENSG00000097033_1 (sequence is synthesized)
tgccgccgcgcgcttgttctcctccctcgccccgccttcatcctccccgttcacggaaacgacagctgcggctgcggggctggcgccgcctccctccacctaccacgtctgccctcgccg

SEQ ID NO: 106092 - DNA, 120 bp, Artificial Sequence
  ENSG00000097033_2 (sequence is synthesized)
ctctagccctgcgccccagcccggccgcggcacctccgcctcgccgccgctaggtcggccggctccgcccggctgccgcctaggatgaatatcatggacttcaacgtgaagaagctggcg

SEQ ID NO: 106093 - DNA, 120 bp, Artificial Sequence
  ENSG00000097033_3 (sequence is synthesized)
gccgacgcaggcaccttcctcagtcgcgccgtgcagttcacagaagaaaagcttggccaggctgagaagacagaattggatgctcacttagagaacctccttagcaaagctgaatgtacc

SEQ ID NO: 106094 - DNA, 120 bp, Artificial Sequence
  ENSG00000097033_4 (sequence is synthesized)
aaaatatggacagaaaaaataatgaaacaaactgaagtgttattgcagccaaatccaaatgccaggatagaagaatttgtttatgagaaactggatagaaaagctccaagtcgtataaac

SEQ ID NO: 106095 - DNA, 120 bp, Artificial Sequence
  ENSG00000097033_5 (sequence is synthesized)
aacccagaacttttgggacaatatatgattgatgcagggactgagtttggcccaggaacagcttatggtaatgcccttattaaatgtggagaaacccaaaaaagaattggaacagcagac

SEQ ID NO: 106096 - DNA, 120 bp, Artificial Sequence
  ENSG00000097033_6 (sequence is synthesized)
agagaactgattcaaacgtcagccttaaattttcttactcctttaagaaactttatagaaggagattacaaaacaattgctaaagaaaggaaactattgcaaaataagagactggatttg

SEQ ID NO: 106097 - DNA, 120 bp, Artificial Sequence
  ENSG00000097033_7 (sequence is synthesized)
gatgctgcaaaaacgagactaaaaaaggcaaaagctgcagaaactagaaattcatctgaacaggaattaagaataactcaaagtgaatttgatcgtcaagcagagattaccagacttctg

SEQ ID NO: 106098 - DNA, 120 bp, Artificial Sequence
  ENSG00000097033_8 (sequence is synthesized)
ctagagggaatcagcagtacacatgcccatcaccttcgctgtctgaatgactttgtagaagcccagatgacttactatgcacagtgttaccagtatatgttggacctccagaaacaactg

SEQ ID NO: 106099 - DNA, 120 bp, Artificial Sequence
  ENSG00000097033_9 (sequence is synthesized)
ggaagttttccatccaattatcttagtaacaacaatcagacttctgtgacacctgtaccatcagttttaccaaatgcgattggttcttctgccatggcttcaacaagtggcctagtaatc

SEQ ID NO: 106100 - DNA, 120 bp, Artificial Sequence
  ENSG00000097033_10 (sequence is synthesized)
acctctccttccaacctcagtgaccttaaggagtgtagtggcagcagaaaggccagggttctctatgattatgatgcagcaaacagtactgaattatcacttctggcagatgaggtgatc

SEQ ID NO: 106101 - DNA, 120 bp, Artificial Sequence
  ENSG00000097033_11 (sequence is synthesized)
actgtgttcagtgttgttggaatggattcagactggctaatgggggaaaggggaaaccagaagggcaaggtgccaattacctacttagaactgctcaattaagtaggtggactatggaaa

SEQ ID NO: 106102 - DNA, 120 bp, Artificial Sequence
  ENSG00000097033_12 (sequence is synthesized)
ggttgcccatcatgactttgtatttatatacaattaactctaaataaagcaggttaagtatcttccatgttaatgtgttaagagactgaaaataccagccatcagaaactggcctttctg

SEQ ID NO: 106103 - DNA, 120 bp, Artificial Sequence
  ENSG00000097033_13 (sequence is synthesized)
ccaataaagttgcatggtaaatatttcattacagaatttatgttagagctttcatgccaagaatgttttcttacaaaattctctttttattgaggtttcactaataagcagcttctactt

SEQ ID NO: 106104 - DNA, 120 bp, Artificial Sequence
  ENSG00000097033_14 (sequence is synthesized)
ttgagcctcaacttaaagcagaactgttttctactggatttttcattaacagcaagctttttcttttatgtaaaataaatctattgtgaattgatatcagcgactcatttattaggtata

SEQ ID NO: 106105 - DNA, 120 bp, Artificial Sequence
  ENSG00000097033_15 (sequence is synthesized)
aataatagccaaagaataaaattaaaatttattttaaactttcggtcttaaaaagagctgtaggatataaacctcttttgtgaaaagtagaattttctgaatgctttcatagacaaaaac

SEQ ID NO: 106106 - DNA, 120 bp, Artificial Sequence
  ENSG00000097033_16 (sequence is synthesized)
gcatttaaactatgtttacctggttttccaacagaaatcaaatgattttaatattatgttttgatgggttattttcagagttgtttggttttttaaacactactgaatggtttcttttaa

SEQ ID NO: 106107 - DNA, 120 bp, Artificial Sequence
  ENSG00000097033_17 (sequence is synthesized)
atttaagaacaactagttcttgaaaagcaataccgtatttctctgataaatttgtagttaaggttctagaaaatctaggacaaatttacttcattaaacataaagtttttaagattattc

SEQ ID NO: 106108 - DNA, 120 bp, Artificial Sequence
  ENSG00000097033_18 (sequence is synthesized)
agttggcacaatttaatgcataattgggattggatccatttactgtactgtggtacagtaaagagaatgtgttcttattgaacagcagatttgtatacaaatacggaataatgcaactac

SEQ ID NO: 106109 - DNA, 120 bp, Artificial Sequence
  ENSG00000097033_19 (sequence is synthesized)
attataaattgtatacgaacaaaataaattgggtcactctgagcttactattaaaacattgaaaatttattaatgaacacaggctatcttgatgaggatctctgcttatgaaacacatac

SEQ ID NO: 106110 - DNA, 120 bp, Artificial Sequence
  ENSG00000097033_20 (sequence is synthesized)
taatgaaattattagtgacacattggaagctagaaaattgctgttggggccattgctataaatcattgtttccatgttaagacttctgttctaattcattcattcaacaaacatttgttg

SEQ ID NO: 106111 - DNA, 120 bp, Artificial Sequence
  ENSG00000097033_21 (sequence is synthesized)
agggccagatactgtgctggtcaactggggatactgtcctgaacaatatgcacacagttcttgcccctgcagagcttaaagaccattaaaggatacagaaaattaagcaattatcctata

SEQ ID NO: 106112 - DNA, 120 bp, Artificial Sequence
  ENSG00000097033_22 (sequence is synthesized)
gtaggattcgtggtgtgatggggaaaatacaaggtactgtatttgggagtcatgtaactccagttttgggagtgagagagggtctggggaagaactgttccagataaaaagatgtgtaac

SEQ ID NO: 106113 - DNA, 120 bp, Artificial Sequence
  ENSG00000097033_23 (sequence is synthesized)
caagatagcatagcacattctgacaactaaagcaatttactctaacttaagcatgaagtacaaaagtatagttcatttattgagggaatgttaagctattaaaatgatactttttggtac

SEQ ID NO: 106114 - DNA, 120 bp, Artificial Sequence
  ENSG00000097033_24 (sequence is synthesized)
ttttaaaaaaatgaatacttaaacaccgttttaaaattttgtgttaagagctcctaataagaacttggtaaacatgttgacaatttaactcacagtctaaactttaaaagtagtagttac

SEQ ID NO: 106115 - DNA, 120 bp, Artificial Sequence
  ENSG00000097033_25 (sequence is synthesized)
ccttttatttctgtgccatgagacaaattcttctgcagttttatagttgtacaagatgttttgactcactctcaattgccatattcttaaagaaaccctgaaaagctgctcaagctggtc

SEQ ID NO: 106116 - DNA, 120 bp, Artificial Sequence
  ENSG00000097033_26 (sequence is synthesized)
aaaccaagtaaatgaaattttctctcccctcagaaaggaagttctacagcctagagtaccatctattgtgttttataagtccagatttaggctttgaaagatcataccaaaacttcagat

SEQ ID NO: 106117 - DNA, 120 bp, Artificial Sequence
  ENSG00000097033_27 (sequence is synthesized)
cgacttaaacagcaactatgaattaggtttatgggaaatgtagtaatacaggggaaagaatatcggtaatggagtgaaatggtcctgggttcaaatccagtcttcctcacatattgtgct

SEQ ID NO: 106118 - DNA, 120 bp, Artificial Sequence
  ENSG00000097033_28 (sequence is synthesized)
ctttaagcttcaaatgagatgtataactgccttttccttaccagtaaaatgaggacaataattatgacaccatagggtggttgtgaggattagcaaatgttatcttgtatttcaggtgcc

SEQ ID NO: 106119 - DNA, 120 bp, Artificial Sequence
  ENSG00000097033_29 (sequence is synthesized)
tttcagggaaaggcttggcacatagtaaacacatcctgtaaatatcagtttccccttgttagcccctgtagcatcctgacctaccaagtctataggccttgcatatcactgtgcaccaga

SEQ ID NO: 106120 - DNA, 120 bp, Artificial Sequence
  ENSG00000097033_30 (sequence is synthesized)
gatacctcttttacatctgggctctgttttctctctatcaatcctatcctccaccctctttaaatcagaccccaggtttaaccttcccacagtcagtataaatcatttttcagaactttc

SEQ ID NO: 106121 - DNA, 120 bp, Artificial Sequence
  ENSG00000097033_31 (sequence is synthesized)
agctttccatcaagtgaaagttgattttagttacccagtaatgtacagaaaccttcaataatgttaagcttcaaaggcttctggtacgtttgtctaccacagaaccaccacaatatatat

SEQ ID NO: 106122 - DNA, 120 bp, Artificial Sequence
  ENSG00000097033_32 (sequence is synthesized)
gcttgttcttaggtttattgctttttattttaatggggtttggttgtttgggttttattttggttttggcttattttaaagtcaagtttagtttttactcaggtaaaggcctgaagtttc

SEQ ID NO: 106123 - DNA, 120 bp, Artificial Sequence
  ENSG00000097033_33 (sequence is synthesized)
ttgggcgtggaagaaaaagcttgggaagcctattaattcatggtgcagttcagaattgtttaaataagctctgtgccactgagcttaatctgaaagtatagtgacatgtgaaggatgcac

SEQ ID NO: 106124 - DNA, 120 bp, Artificial Sequence
  ENSG00000097033_34 (sequence is synthesized)
atatgaatgaaaaactaaaataattgtaggctcttctataaatgaaaaaaaaagtgattggattgtgtctacctttttcctcaaagtaatctaacctaaacggtcatggtgttaaaactt

SEQ ID NO: 106125 - DNA, 120 bp, Artificial Sequence
  ENSG00000097033_35 (sequence is synthesized)
tttatggtgctaatcagaaaaattgatgttgcaagaaatgaggtctcaaaaatgggaatgtgcctcctcactctgcgtcacatgggaaataaatcctgaggccaggatcaccagtggggt

SEQ ID NO: 106126 - DNA, 120 bp, Artificial Sequence
  ENSG00000097033_36 (sequence is synthesized)
agagtcatcttcatagtctcctgttatcctccccctgaacaaagaacaaagtgagactgggaagctagtgttggggaaacatttctgggataaactgtggagtggagaagacaatggagg

SEQ ID NO: 106127 - DNA, 120 bp, Artificial Sequence
  ENSG00000097033_37 (sequence is synthesized)
gcaaggcaaaaacccacagacttgtttacccatagaggccccactcacctccatgctgacagaattccagaaaaattccttccctatctcccaaacacctgaaattctgaaatattgccc

SEQ ID NO: 106128 - DNA, 120 bp, Artificial Sequence
  ENSG00000097033_38 (sequence is synthesized)
tactatttagcactttaagcttcagtgaggtgctgtaatggagagatagcttcatagtttagcctatagccaactttgcctcaagacctccagataagatgaagtggcttttacctcatg

SEQ ID NO: 106129 - DNA, 120 bp, Artificial Sequence
  ENSG00000097033_39 (sequence is synthesized)
ttttacctcatgtgagtctcaaacgctggagagagagttccacaaccacccctgccctttctcccatattacgctcattagaaagtctactcagggctgggtgccgtggctcatgcctgt

SEQ ID NO: 106130 - DNA, 72 bp, Artificial Sequence
  ENSG00000097033_40 (sequence is synthesized)
ttgaaccccagaggcatagaataagactcttgtctcaaggaaagaaaaaatgtctactcagtagagcagtga

SEQ ID NO: 106131 - DNA, 120 bp, Artificial Sequence
  ENSG00000097033_41 (sequence is synthesized)
tctcaaggaaagaaaaaatgtctactcagtagagcagtgattggcaaagtgtgagaccccagaccggcaatattggcatctcctggagacttgtttaaaatgctgattactattttcaag

SEQ ID NO: 106132 - DNA, 120 bp, Artificial Sequence
  ENSG00000097033_42 (sequence is synthesized)
aactttctaccttcatttttacttattttttgttttcaagggctcatggaatcagtcttccatgtgacagctttttaaatattttaagacaaaaactgagtcttctaatcttaattgtgt

SEQ ID NO: 106133 - DNA, 120 bp, Artificial Sequence
  ENSG00000097033_43 (sequence is synthesized)
tctagcagtagtcattgtaattatagttatttttataatttatttgtttagtgtatatctgtcactctagaatgtaggctccctgagataaaaactataattcttttgatggcagttaca

SEQ ID NO: 106134 - DNA, 120 bp, Artificial Sequence
  ENSG00000097033_44 (sequence is synthesized)
ttcccaactcttagcacaagatctaggacatagtatgaactcaataaatttttgttgaatgaaagaaaaatgcaaatttataagccttttcagagacctactgaatcaaactctgagagt

SEQ ID NO: 106135 - DNA, 120 bp, Artificial Sequence
  ENSG00000097033_45 (sequence is synthesized)
ggagcccagcaatctgttgtaaaagctgtttgagtaatactgttgcactctaagcttgagaaccactgcaatagaactaagagaacattcatttcaccttcaggcctattctctgacatc

SEQ ID NO: 106136 - DNA, 120 bp, Artificial Sequence
  ENSG00000097033_46 (sequence is synthesized)
acttgaaaaatcctctctgccttctgtaacccttaaccaacaacagtgccctgtccatgtaggggaaacttctgggctgtattacaagtgggtaggaaggtataaggatatcatagtggg

SEQ ID NO: 106137 - DNA, 120 bp, Artificial Sequence
  ENSG00000097033_47 (sequence is synthesized)
aagtattgcttagaatgccagtacttgtttgctgtggaaggtttctaggaatggattgcttagtctaaagtaagcactaccaccatccacgttttcactcaacacagtgccttttaattg

SEQ ID NO: 106138 - DNA, 120 bp, Artificial Sequence
  ENSG00000097033_48 (sequence is synthesized)
gtgactaacatcaaaacaccttgacaaaccgttaaaacagtatcagaaaccatgtgtacatccctgtgcctcttagattgctaagttctgctctcattcttacttcaaaggacacttttt

SEQ ID NO: 106139 - DNA, 120 bp, Artificial Sequence
  ENSG00000097033_49 (sequence is synthesized)
aaagaattgttaatgcttttttataatacaagtcatagccctgttggcaaaaagaaaaaagattcagtgagaaagaaaaatcactgataattccatcatccagggagaaccactgttatt

SEQ ID NO: 106140 - DNA, 120 bp, Artificial Sequence
  ENSG00000097033_50 (sequence is synthesized)
taagtatatggccttccagacttttctgtgcatttatagatatttttaatgggatcaaagtgtacatactgttttgtaactttttttcactcaacaataccatgactgtcttgctgtgtc

SEQ ID NO: 106141 - DNA, 120 bp, Artificial Sequence
  ENSG00000097033_51 (sequence is synthesized)
aagtatatttctacatctcttaatggctgcatgatattccatcatatgtgccacattttattaaactactgttcaatttttaggtttccaactttcattaataaagtgctttaaagaaca

SEQ ID NO: 106142 - DNA, 120 bp, Artificial Sequence
  ENSG00000097033_52 (sequence is synthesized)
ctggtcatcttaaaattttgtaaaatagtaaaatttagcaaaattgatactagaaaatttatgaaaatatcttggctttctcttagtagtttttgtaggctcttaagagtgtatcattaa

SEQ ID NO: 106143 - DNA, 120 bp, Artificial Sequence
  ENSG00000097033_53 (sequence is synthesized)
gctttagcgtaacagattcttttcaatcaagtactggaatcagttgtccaggtggagtaatacagaaaagctaaggtctagaaaccaggggaccattttagatacaaagcagaattgcgg

SEQ ID NO: 106144 - DNA, 120 bp, Artificial Sequence
  ENSG00000097046_0 (sequence is synthesized)
gttgcgcaggcgcatccgatcgactcggtaggtggggatctcttggagacggcgacccaggcatctggggagccacagaagtcgtactcccttaaaccctgctttgctccccctgtggat

SEQ ID NO: 106145 - DNA, 120 bp, Artificial Sequence
  ENSG00000097046_1 (sequence is synthesized)
gtaaccccttagctggcattttgcatctcaattggcttgtgatggaggcgtctttggggattcagatggatgagccaatggctttttctccccagcgtgaccggtttcaggctgaaggct

SEQ ID NO: 106146 - DNA, 120 bp, Artificial Sequence
  ENSG00000097046_2 (sequence is synthesized)
ctttaaaaaaaaacgagcagaattttaaacttgcaggtgttaaaaaagatattgagaagctttatgaagctgtaccacagcttagtaatgtgtttaagattgaggacaaaattggagaag

SEQ ID NO: 106147 - DNA, 120 bp, Artificial Sequence
  ENSG00000097046_3 (sequence is synthesized)
gcactttcagctctgtttatttggccacagcacagttacaagtaggacctgaagagaaaattgctctaaaacacttgattccaacaagtcatcctataagaattgcagctgaacttcagt

SEQ ID NO: 106148 - DNA, 120 bp, Artificial Sequence
  ENSG00000097046_4 (sequence is synthesized)
gcctaacagtggctggggggcaagataatgtcatgggagttaaatactgctttaggaagaatgatcatgtagttattgctatgccatatctggagcatgagtcgtttttggacattctga

SEQ ID NO: 106149 - DNA, 120 bp, Artificial Sequence
  ENSG00000097046_5 (sequence is synthesized)
attctctttcctttcaagaagtacgggaatatatgcttaatctgttcaaagctttgaaacgcattcatcagtttggtattgttcaccgtgatgttaagcccagcaattttttatataata

SEQ ID NO: 106150 - DNA, 120 bp, Artificial Sequence
  ENSG00000097046_6 (sequence is synthesized)
ggcgcctgaaaaagtatgccttggtagactttggtttggcccaaggaacccatgatacgaaaatagagcttcttaaatttgtccagtctgaagctcagcaggaaaggtgttcacaaaaca

SEQ ID NO: 106151 - DNA, 120 bp, Artificial Sequence
  ENSG00000097046_7 (sequence is synthesized)
aatcccacataatcacaggaaacaagattccactgagtggcccagtacctaaggagctggatcagcagtccaccacaaaagcttctgttaaaagaccctacacaaatgcacaaattcaga

SEQ ID NO: 106152 - DNA, 120 bp, Artificial Sequence
  ENSG00000097046_8 (sequence is synthesized)
ttaaacaaggaaaagacggaaaggagggatctgtaggcctttctgtccagcgctctgtttttggagaaagaaatttcaatatacacagctccatttcacatgagagccctgcagtgaaac

SEQ ID NO: 106153 - DNA, 120 bp, Artificial Sequence
  ENSG00000097046_9 (sequence is synthesized)
tcatgaagcagtcaaagactgtggatgtactgtctagaaagttagcaacaaaaaagaaggctatttctacaaaagttatgaatagtgctgtgatgaggaaaactgccagttcttgcccag

SEQ ID NO: 106154 - DNA, 120 bp, Artificial Sequence
  ENSG00000097046_10 (sequence is synthesized)
ctagcctgacctgtgactgctatgcaacagataaagtttgtagtatttgcctttcaaggcgtcagcaggttgcccctagggcaggtacaccaggattcagagcaccagaggtcttgacaa

SEQ ID NO: 106155 - DNA, 120 bp, Artificial Sequence
  ENSG00000097046_11 (sequence is synthesized)
agtgccccaatcaaactacagcaattgacatgtggtctgcaggtgtcatatttctttctttgcttagtggacgatatccattttataaagcaagtgatgatttaactgctttggcccaaa

SEQ ID NO: 106156 - DNA, 120 bp, Artificial Sequence
  ENSG00000097046_12 (sequence is synthesized)
ttatgacaattaggggatccagagaaactatccaagctgctaaaacttttgggaaatcaatattatgtagcaaagaagttccagcacaagacttgagaaaactctgtgagagactcaggg

SEQ ID NO: 106157 - DNA, 120 bp, Artificial Sequence
  ENSG00000097046_13 (sequence is synthesized)
tgcctcgttcaaacacctccaggacaatactcagggaattcatttaaaaagggggatagtaatagctgtgagcattgttttgatgagtataataccaatttagaaggctggaatgaggta

SEQ ID NO: 106158 - DNA, 120 bp, Artificial Sequence
  ENSG00000097046_14 (sequence is synthesized)
cctgatgaagcttatgacctgcttgataaacttctagatctaaatccagcttcaagaataacagcagaagaagctttgttgcatccattttttaaagatatgagcttgtgataatggatc

SEQ ID NO: 106159 - DNA, 120 bp, Artificial Sequence
  ENSG00000097046_15 (sequence is synthesized)
ttcatttaatgtttactgttatgaggtagaataaaaaagaatactttgtaatagccacaagttcttgtttagagaccagagcaggattaataatttattttaacattttagtgtttggtg

SEQ ID NO: 106160 - DNA, 120 bp, Artificial Sequence
  ENSG00000097046_16 (sequence is synthesized)
gcacattctaaaatatagattaagaatacttaaaatgcctgggatagttcttgggactaacaacatgatcttctttgagttaaacctacctaagtagattttaggtgggttcctattagg

SEQ ID NO: 106161 - DNA, 120 bp, Artificial Sequence
  ENSG00000097046_17 (sequence is synthesized)
tcagatttttagcttccctaattacctttcactgacatatacagaaaaaggagcagttttagttttaattaattaaaattaacagatgtgatgaggattaaatgaatcaaaagacttaat

SEQ ID NO: 106162 - DNA, 120 bp, Artificial Sequence
  ENSG00000097046_18 (sequence is synthesized)
ttgtagattcttttagagttatgagctaggtatagtttggggaaactcaacctggtgctggtgctcttaacaattttgtaaataaagaagataatttccttttctagaggtacatattag

SEQ ID NO: 106163 - DNA, 120 bp, Artificial Sequence
  ENSG00000097046_19 (sequence is synthesized)
gccttttatgaacactaaaacaatgaggaaatgttggtcatggggcaaagtatcacttaaaattgaattcatccatttttaaaaaacacttcatgaaagcattctggtgtgaattgccat

SEQ ID NO: 106164 - DNA, 120 bp, Artificial Sequence
  ENSG00000097046_20 (sequence is synthesized)
ttttttcttactggcttctcaattttcttccttctctgcccctacctaaaacattctcctcggaaattacatggtgctgaccacaaagtttctggatgttttattaaatattgtacgtgt

SEQ ID NO: 106165 - DNA, 120 bp, Artificial Sequence
  ENSG00000097046_21 (sequence is synthesized)
ttacagttgggaatttaaaataatacatacactggttgataaagggaagctgcaggaccaaggtgaagattgatagtccaaatgcttttcttttttgagttgtatattttttcacaccat

SEQ ID NO: 106166 - DNA, 120 bp, Artificial Sequence
  ENSG00000097046_22 (sequence is synthesized)
cttagatataattaggtagctgctgaaaggaaaagtgaatacagaattgacggtattattggagatttttcctctgcgtagagccatccagatctctgtatcctgttttgactaagtctt

SEQ ID NO: 106167 - DNA, 120 bp, Artificial Sequence
  ENSG00000097046_23 (sequence is synthesized)
aggtgggttgggaagacagataatgaagtaggcaaagagaaaaggacccaagatagaggtttatattcagaaatggtatatatcaatgacagcatatcaaacttcctatgggaaaaagtc

SEQ ID NO: 106168 - DNA, 120 bp, Artificial Sequence
  ENSG00000097046_24 (sequence is synthesized)
tggtgggtggtcagctgacagatttcccatttagtagtcatagaatacagaaatagtttagggacatgtattcattttgttattttgagcattgataggtcagtatatctacctaatctg

SEQ ID NO: 106169 - DNA, 120 bp, Artificial Sequence
  ENSG00000097046_25 (sequence is synthesized)
tttggtaagtataggatatataaaccattaccattgatctgtcttatgccataatcttaaaaaaaatttgaatgctcttgaatttgtatattcaataaagttatccttttatatttttta

SEQ ID NO: 106170 - DNA, 120 bp, Artificial Sequence
  ENSG00000097046_26 (sequence is synthesized)
atctggttcggtctctggcccgagggaagccggtccttcccggctgagctcgcggccagcgctggccggcggattcccattcattcacccttctcctcctccgcccagtactcgtggcca

SEQ ID NO: 106171 - DNA, 120 bp, Artificial Sequence
  ENSG00000097046_27 (sequence is synthesized)
gcgcttcctgtcagtggcgaaaaggttttctccctcagttcttttcctgacttcaaaccgcccccggcgctcggcccctcccccacgcggtcccgctggctgtgccggactggcagcctc

SEQ ID NO: 106172 - DNA, 120 bp, Artificial Sequence
  ENSG00000097096_0 (sequence is synthesized)
attatctgctgatccaggccatgcacgacctgccccctgactcgggcgcgcggcggggcggcaggggcttggcggatcacagcttccccgcgggagcccgggctccgggccagccgcctt

SEQ ID NO: 106173 - DNA, 120 bp, Artificial Sequence
  ENSG00000097096_1 (sequence is synthesized)
acggggagcggggaggcggcggacgccctcggcagcaggtgtccccgccccggtcgcctcagagggagccgcggggaggccagctgcggactcctcggatgcggccgtcctgcagcagaa

SEQ ID NO: 106174 - DNA, 120 bp, Artificial Sequence
  ENSG00000097096_2 (sequence is synthesized)
tgcggactcctcggatgcggccgtcctgcagcagaagcctcgagagcctccgggtgggtgccaagccgcctcccttccagcggtggccgagcgacagctggatcaggtgcggcgcgcacc

SEQ ID NO: 106175 - DNA, 120 bp, Artificial Sequence
  ENSG00000097096_3 (sequence is synthesized)
gggactgggacgagcccccgccacgtggaggcaggatggacggctggagtggggaccgcgcccgggcggctgcacccaccggcctccagcctccaggctgcaaggaccacggctgctcct

SEQ ID NO: 106176 - DNA, 120 bp, Artificial Sequence
  ENSG00000097096_4 (sequence is synthesized)
cgggaagccctttcagggatccagcggggtcctctgtgatacgcagtggcaaaggagaccgccaggaaggcccctccttcctcaggccgccggcagtgacagtcaagaagctgcagaagt

SEQ ID NO: 106177 - DNA, 120 bp, Artificial Sequence
  ENSG00000097096_5 (sequence is synthesized)
ggatgtacaaagggcgtctgctgtccctgggaatgaagggtcgtgcccgtgggacggctcccaaagtcacaggaacgcaggcagcctccccaaatgtgggcgctttgaaagtgcgtgaaa

SEQ ID NO: 106178 - DNA, 120 bp, Artificial Sequence
  ENSG00000097096_6 (sequence is synthesized)
accgtgtcctgtcggtgcctccagaccaaagaattacgctgacagatttatttgaaaatgcctatgggtcttcaatgaagggaagagaacttgaagagctgaaggataatattgaattca

SEQ ID NO: 106179 - DNA, 120 bp, Artificial Sequence
  ENSG00000097096_7 (sequence is synthesized)
gaggtcataagccacttaacagcatcactgtttcaaagaaacgcaattggctatatcagagtactctgaggcctcttaatctggaagaagaaaataagaaatgccaagatagaagtcatt

SEQ ID NO: 106180 - DNA, 120 bp, Artificial Sequence
  ENSG00000097096_8 (sequence is synthesized)
tatccatctcacctgtgtctctacctaaacatcagctatcacagtctttcctcaaatcatctaaagagtactgtacatatgtggtatgtaacgctacaaactcttcattatcgaaaaact

SEQ ID NO: 106181 - DNA, 120 bp, Artificial Sequence
  ENSG00000097096_9 (sequence is synthesized)
gtgctttagattttaatgaggaaaatgatgcagatgatgaaggagaaatatggtacaatcccattcctgaggatgatgaccttggtatatcaagtgccttgagttttggtgaggccgact

SEQ ID NO: 106182 - DNA, 120 bp, Artificial Sequence
  ENSG00000097096_10 (sequence is synthesized)
ctgctgttctgaagctccctgctgtcaatttgagcatgttgtctggcagtgacctgatgaaagcagagcggcatactgaagactcactgtgctcttccgaacatgcaggtgatattcaga

SEQ ID NO: 106183 - DNA, 120 bp, Artificial Sequence
  ENSG00000097096_11 (sequence is synthesized)
ccacacggtcaaatggaatgaatcctatacatcctgcccattccacagaatttgtgcagcagtacaagcaaaagctaggacacaagacacaagaaggtataatggtggaggacagtccca

SEQ ID NO: 106184 - DNA, 120 bp, Artificial Sequence
  ENSG00000097096_12 (sequence is synthesized)
tgttgaaatctccttttgcaggttctgggatcctggctgctacaaatagtactgaattgggaattatggaaccatcttctccaaatcctagccctgtgaaaaaaggcagttcaattaatt

SEQ ID NO: 106185 - DNA, 120 bp, Artificial Sequence
  ENSG00000097096_13 (sequence is synthesized)
ggtcattgccagataaaataaaatctccacgaactgtgaggaaactttccatgaaaatgaaaaagttgccagaatttagccgaaagctaagcgttaagggaacattgaattatataaaca

SEQ ID NO: 106186 - DNA, 120 bp, Artificial Sequence
  ENSG00000097096_14 (sequence is synthesized)
gtccagataatactccttctttgtctaaatataactgccgagaagttcatcatactgatattctgccctctgggaacacaaccaccgctgctaagaggaatgttataagccgataccatc

SEQ ID NO: 106187 - DNA, 120 bp, Artificial Sequence
  ENSG00000097096_15 (sequence is synthesized)
ttgataccagtgtatcctcccagcagagctaccagaagaaaaactctatgagttctaagtattcctgcaaaggtggttaccttagtgatggagactcacctgaacttacaactaaagcta

SEQ ID NO: 106188 - DNA, 120 bp, Artificial Sequence
  ENSG00000097096_16 (sequence is synthesized)
gcaaacatggatctgaaaacaaatttggaaaaggaaaagaaataatttcaaatagttgtagcaagaatgaaatagacattgatgcttttaggcattatagcttttctgatcaacctaagt

SEQ ID NO: 106189 - DNA, 120 bp, Artificial Sequence
  ENSG00000097096_17 (sequence is synthesized)
gttcacagtacatatctgggctcatgagtgtacatttctatggtgctgaggatttaaaaccacctcggatagattcaaaagacgtcttttgtgcaattcaggtagattcagtaaacaaag

SEQ ID NO: 106190 - DNA, 120 bp, Artificial Sequence
  ENSG00000097096_18 (sequence is synthesized)
caagaacagctttgctcacatgccgaacaacatttttagacatggatcacactttcaacatagaaattgaaaatgcacaacatttgaaactagtagtattcagttgggaacccactccaa

SEQ ID NO: 106191 - DNA, 120 bp, Artificial Sequence
  ENSG00000097096_19 (sequence is synthesized)
gaaaaaatcgagtttgttgtcatggaactgttgttcttcccaccttatttagagtgacaaagactcatcagttggctgtcaaacttgaacctagaggtcttatttatgtgaaagtgactc

SEQ ID NO: 106192 - DNA, 120 bp, Artificial Sequence
  ENSG00000097096_20 (sequence is synthesized)
ttatggaacagtgggagaattctcttcatggactagatataaaccaagaaccaataatatttggagttgatattcaaaaagttgtagagaaagaaaatataggactgatggtgccccttc

SEQ ID NO: 106193 - DNA, 120 bp, Artificial Sequence
  ENSG00000097096_21 (sequence is synthesized)
tgatacagaaatgtattatggaaattgaaaagagaggctgtcaggtagtaggcctgtatcgattatgtggttcggcagcagtcaagaaagaactgcgagaggcttttgagagagatagca

SEQ ID NO: 106194 - DNA, 120 bp, Artificial Sequence
  ENSG00000097096_22 (sequence is synthesized)
atttaagagaactcccttctcctctgataacaaagcagctttatgaggctgtattagatgcaatggcaaaaagtcctttgaaaatgtcatcaaatggttgtgagaatgacccaggtgact

SEQ ID NO: 106195 - DNA, 120 bp, Artificial Sequence
  ENSG00000097096_23 (sequence is synthesized)
ctaagtacactgttgacctgctggattgtctgccagagattgagaaggcaaccctaaagatgttgttggatcatttgaaattggtggcttcctatcatgaagtgaataagatgacgtgcc

SEQ ID NO: 106196 - DNA, 120 bp, Artificial Sequence
  ENSG00000097096_24 (sequence is synthesized)
agaatttggctgtgtgctttggaccagtattattaagtcagaggcaagagccttccacccataacaacagagtctttactgattcagaagaacttgcaagtgctttggattttaaaaaac

SEQ ID NO: 106197 - DNA, 120 bp, Artificial Sequence
  ENSG00000097096_25 (sequence is synthesized)
acattgaagttcttcattacttactccaactctggccagtgcagcgtttaactgtcaaaaaatcaacagacaatttattcccagagcagaagtcttctctgaattatctgaggcagaaga

SEQ ID NO: 106198 - DNA, 120 bp, Artificial Sequence
  ENSG00000097096_26 (sequence is synthesized)
aagaacgacctcatatgttaaatttgagtggtactgattcatcaggagtacttaggccaaggcaaaaccgattagacagtccacttagcaatcgttatgcaggagactggagcagctgtg

SEQ ID NO: 106199 - DNA, 120 bp, Artificial Sequence
  ENSG00000097096_27 (sequence is synthesized)
gggaaaactactttttaaatacaaaagaaaatttaaatgatgtggattatgatgatgtcccttcagaagatagaaaaatcggagaaaattatagcaaaatggatgggccagaagtaatga

SEQ ID NO: 106200 - DNA, 120 bp, Artificial Sequence
  ENSG00000097096_28 (sequence is synthesized)
ttgaacagccaattcccatgtccaaagagtgtacatttcagacatatttgacaatgcagacagttgagtctacagtggatcgaaaaaacaatctcaaagatctacaagaaagtattgata

SEQ ID NO: 106201 - DNA, 120 bp, Artificial Sequence
  ENSG00000097096_29 (sequence is synthesized)
ctttgattggaaatctggaacgtgagctcaacaaaaacaagcttaatatgagtttttgagattgagggtttttttttgtaatgtcttaaagtttcaaatctgtttttgttttattttctt

SEQ ID NO: 106202 - DNA, 120 bp, Artificial Sequence
  ENSG00000097096_30 (sequence is synthesized)
ataccacccacagcgatgttttcatttttttactcttgaaatctttaattaatttttaataagtttatctgattcaattaaaaacactattcattaatacaatttttacttatctcacta

SEQ ID NO: 106203 - DNA, 120 bp, Artificial Sequence
  ENSG00000097096_31 (sequence is synthesized)
gaaaacttttctggggatcaataaaacttggacttcttgggatattttactaaatcttgccaactctatggagataactttcaaatgcacttaagaaggttcacataagttattagcccc

SEQ ID NO: 106204 - DNA, 120 bp, Artificial Sequence
  ENSG00000097096_32 (sequence is synthesized)
acttaagaaggttcacataagttattagcccctcaaggtttttctgctttatgggaaccactcttctgtagctgagacagatgtccttttttttgttgttttttgagacagagtctcact

SEQ ID NO: 106205 - DNA, 120 bp, Artificial Sequence
  ENSG00000097096_33 (sequence is synthesized)
gttcttttagaggaacatcacagctgctcagtctgatttgcagtactggtcctggtacactgcaacatcctttggtcaaattttatttgtaatgcaaatgctgctataagaaaatctttt

SEQ ID NO: 106206 - DNA, 120 bp, Artificial Sequence
  ENSG00000097096_34 (sequence is synthesized)
ttaatgttttctgtattaacagtaattatttaagcttataaaaattaaatatttttataatcctgaaactgtatatatttataaatgcatatatgtatagatatcaggatgggggagggg

SEQ ID NO: 106207 - DNA, 120 bp, Artificial Sequence
  ENSG00000097096_35 (sequence is synthesized)
atgtatagatatcaggatgggggaggggttattgtagaatcacatgtatttttaaagtatatatgtcatgaggccaaaattattatcttaaagtatttttttcagggaaagaacatttaa

SEQ ID NO: 106208 - DNA, 120 bp, Artificial Sequence
  ENSG00000097096_36 (sequence is synthesized)
attaaaggaggaattacataaaaacacttgaacaataatactctagaagcatctgaatagaaataatagactttctttcctttattcacagaaagtcacaatgtcccctgggaaaagtca

SEQ ID NO: 106209 - DNA, 120 bp, Artificial Sequence
  ENSG00000097096_37 (sequence is synthesized)
tcttttaaatttgaaatcctctaactccttaagggattaagtacccagatttctgcactggtgacttagatttaataaatctgctcctgttctatgcatttttatattctgctttgtttt

SEQ ID NO: 106210 - DNA, 120 bp, Artificial Sequence
  ENSG00000097096_38 (sequence is synthesized)
aattatttatttgtagtagtacatttataacattgactttataattacccccatttgtttctaaatagtcttgccagcatattacatgttactgatttttaaaaattaacttattttggc

SEQ ID NO: 106211 - DNA, 120 bp, Artificial Sequence
  ENSG00000097096_39 (sequence is synthesized)
aaattataaatagactttaagttaccaacttttaagacatggcagccattgaaaaactggcttcctgatgtttttctaaatattaaagtacttaaaatatttctatgcaataaatattga

SEQ ID NO: 106212 - DNA, 120 bp, Artificial Sequence
  ENSG00000097096_40 (sequence is synthesized)
ttgataaacagacattatttaatttgaaaacccattgttaaaaaagataaatatttttatatgaaattttcattttttaaaactttgtgttaacaattcagaagaataccaagagaacat

SEQ ID NO: 106213 - DNA, 120 bp, Artificial Sequence
  ENSG00000097096_41 (sequence is synthesized)
attgagtaaacagtcaaaggaaagtactcttgaatgttttataggaaagctgtctcagtttccttccttttgttgctatatcatgtatgaattgaataaattgctctagaaatgtaaaaa

SEQ ID NO: 106214 - DNA, 120 bp, Artificial Sequence
  ENSG00000097096_42 (sequence is synthesized)
attgaaaagagaggctgtcaggtattatcttactatggttccctactacttcctttattgattgattaattgtaagtcttgggggaagaaattcaaggtaatgtaaaaaaatcaaattta

SEQ ID NO: 106215 - DNA, 120 bp, Artificial Sequence
  ENSG00000097096_43 (sequence is synthesized)
gatattttaccattcctattctttatttttattccattactgtttagggtataatttttaacttgactcatgttgtccattattgagagcatgctagatgattccacaaatttatattgc

SEQ ID NO: 106216 - DNA, 120 bp, Artificial Sequence
  ENSG00000097096_44 (sequence is synthesized)
aacacagagcttcatgggtcttataattagaaatcaggattgcttcaaaatggcattaaaaggaaaagtcagagctgataacataggcaaaggatattgattctttatactaatttttgt

SEQ ID NO: 106217 - DNA, 120 bp, Artificial Sequence
  ENSG00000097096_45 (sequence is synthesized)
ttctttatactaatttttgtgatacatattaagactaaaaattacgttgagttatttctgctttagtactatctgaatttataatattggttgaaaagttaagttaaaagacaatgagta

SEQ ID NO: 106218 - DNA, 120 bp, Artificial Sequence
  ENSG00000097096_46 (sequence is synthesized)
atttatttaataaacttaagcttaacatggaaactatagaaacagcctaagttaatggaattttgcattaagatacagaatacctggattctggtttctcctccattattacttagctgt

SEQ ID NO: 106219 - DNA, 120 bp, Artificial Sequence
  ENSG00000097096_47 (sequence is synthesized)
ctccattattacttagctgtgtcatgttgggcaagtcacttaatctctgtgggtcttacttgcttgtatctataaaaatagatggagtggctgggcatgggggctcacacctgtaatccc

SEQ ID NO: 106220 - DNA, 89 bp, Artificial Sequence
  ENSG00000097096_48 (sequence is synthesized)
ttaggaggctgatcattacagtgagcccagattgtgccactgcattctagcctgggcgatagagtgagactccgttgcaaaaaaaaaaa

SEQ ID NO: 106221 - DNA, 120 bp, Artificial Sequence
  ENSG00000099139_0 (sequence is synthesized)
cggagggagcgctgggagcgagcaagcgagcgtttggagcccgggccagcagagggggcgcccggtcgctgcctgtaccgctcccgctggtcatctccgccgcgctcgggggccccggga

SEQ ID NO: 106222 - DNA, 120 bp, Artificial Sequence
  ENSG00000099139_1 (sequence is synthesized)
ggagcgagaccgagtcggagagtccgggagccaagccgggcgaaacccaactgcggaggacgcccgccccactcagcctcctcctgcgtccgagccggggagcatcgccgagcgccccac

SEQ ID NO: 106223 - DNA, 120 bp, Artificial Sequence
  ENSG00000099139_2 (sequence is synthesized)
gggccggagagctgggagcacaggtcccggcagccccagggatggtctaggagccggcgtaaggctcgctgctctgctccctgccggggctagccgcctcctgccgatcgcccggggctg

SEQ ID NO: 106224 - DNA, 120 bp, Artificial Sequence
  ENSG00000099139_3 (sequence is synthesized)
cgagctgcggcggcccggggctgctcgccgggcggcgcaggccggagaagttagttgtgcgcgcccttagtgcgcggaaccagccagcgagcgagggagcagcgaggcgccgggaccatg

SEQ ID NO: 106225 - DNA, 120 bp, Artificial Sequence
  ENSG00000099139_4 (sequence is synthesized)
ggctgggggagccgctgctgctgcccgggacgtttggacctgctgtgcgtgctggcgctgctcgggggctgcctgctccccgtgtgtcggacgcgcgtctacaccaaccactgggcagtc

SEQ ID NO: 106226 - DNA, 120 bp, Artificial Sequence
  ENSG00000099139_5 (sequence is synthesized)
aaaatcgccgggggcttcccggaggccaaccgtatcgccagcaagtacggattcatcaacataggacagataggggccctgaaggactactaccacttctaccatagcaggacgattaaa

SEQ ID NO: 106227 - DNA, 120 bp, Artificial Sequence
  ENSG00000099139_6 (sequence is synthesized)
aggtcagttatctcgagcagagggacccacagtttcatttcaatggaaccaaaggtggaatggatccaacagcaagtggtaaaaaagcggacaaagagggattatgacttcagtcgtgcc

SEQ ID NO: 106228 - DNA, 120 bp, Artificial Sequence
  ENSG00000099139_7 (sequence is synthesized)
cagtctacctatttcaatgatcccaagtggcccagcatgtggtatatgcactgcagtgacaatacacatccctgccagtctgacatgaatatcgaaggagcctggaagagaggctacacg

SEQ ID NO: 106229 - DNA, 120 bp, Artificial Sequence
  ENSG00000099139_8 (sequence is synthesized)
ggaaagaacattgtggtcactatcctggatgacggaattgagagaacccatccagatctgatgcaaaactacgatgctctggcaagttgcgacgtgaatgggaatgacttggacccaatg

SEQ ID NO: 106230 - DNA, 120 bp, Artificial Sequence
  ENSG00000099139_9 (sequence is synthesized)
cctcgttatgatgcaagcaacgagaacaagcatgggactcgctgtgctggagaagtggcagccgctgcaaacaattcgcactgcacagtcggaattgctttcaacgccaagatcggagga

SEQ ID NO: 106231 - DNA, 120 bp, Artificial Sequence
  ENSG00000099139_10 (sequence is synthesized)
gtgcgaatgctggacggagatgtcacggacatggttgaagcaaaatcagttagcttcaacccccagcacgtgcacatttacagcgccagctggggcccggatgatgatggcaagactgtg

SEQ ID NO: 106232 - DNA, 120 bp, Artificial Sequence
  ENSG00000099139_11 (sequence is synthesized)
gacggaccagcccccctcacccggcaagcctttgaaaacggcgttagaatggggcggagaggcctcggctctgtgtttgtttgggcatctggaaatggtggaaggagcaaagaccactgc

SEQ ID NO: 106233 - DNA, 120 bp, Artificial Sequence
  ENSG00000099139_12 (sequence is synthesized)
tcctgtgatggctacaccaacagcatctacaccatctccatcagcagcactgcagaaagcggaaagaaaccttggtacctggaagagtgttcatccacgctggccacaacctacagcagc

SEQ ID NO: 106234 - DNA, 120 bp, Artificial Sequence
  ENSG00000099139_13 (sequence is synthesized)
ggggagtcctacgataagaaaatcatcactacagatctgaggcagcgttgcacggacaaccacactgggacgtcagcctcagcccccatggctgcaggcatcattgcgctggccctggaa

SEQ ID NO: 106235 - DNA, 120 bp, Artificial Sequence
  ENSG00000099139_14 (sequence is synthesized)
gccaatccgtttctgacctggagagacgtacagcatgttattgtcaggacttcccgtgcgggacatttgaacgctaatgactggaaaaccaatgctgctggttttaaggtgagccatctt

SEQ ID NO: 106236 - DNA, 120 bp, Artificial Sequence
  ENSG00000099139_15 (sequence is synthesized)
tatggatttggactgatggacgcagaagccatggtgatggaggcagagaagtggaccaccgttccccggcagcacgtgtgtgtggagagcacagaccgacaaatcaagacaatccgccct

SEQ ID NO: 106237 - DNA, 120 bp, Artificial Sequence
  ENSG00000099139_16 (sequence is synthesized)
aacagtgcagtgcgctccatctacaaagcttcaggctgctcggataaccccaaccgccatgtcaactacctggagcacgtcgttgtgcgcatcaccatcacccaccccaggagaggagac

SEQ ID NO: 106238 - DNA, 120 bp, Artificial Sequence
  ENSG00000099139_17 (sequence is synthesized)
ctggccatctacctgacctcgccctctggaactaggtctcagcttttggccaacaggctatttgatcactccatggaaggattcaaaaactgggagttcatgaccattcattgctgggga

SEQ ID NO: 106239 - DNA, 120 bp, Artificial Sequence
  ENSG00000099139_18 (sequence is synthesized)
gaaagagctgctggtgactgggtccttgaagtttatgatactccctctcagctaaggaactttaagactccaggtaaattgaaagaatggtctttggtcctctacggcacctccgtgcag

SEQ ID NO: 106240 - DNA, 120 bp, Artificial Sequence
  ENSG00000099139_19 (sequence is synthesized)
ccatattcaccaaccaatgaatttccgaaagtggaacggttccgctatagccgagttgaagaccccacagacgactatggcacagaggattatgcaggtccctgcgaccctgagtgcagt

SEQ ID NO: 106241 - DNA, 120 bp, Artificial Sequence
  ENSG00000099139_20 (sequence is synthesized)
gaggttggctgtgacgggccaggaccagaccactgcaatgactgtttgcactactactacaagctgaaaaacaataccaggatctgtgtctccagctgcccccctggccactaccacgcc

SEQ ID NO: 106242 - DNA, 120 bp, Artificial Sequence
  ENSG00000099139_21 (sequence is synthesized)
gacaagaagcgctgcaggaagtgtgcccccaactgtgagtcctgctttgggagccatggtgaccaatgcatgtcctgcaaatatggatactttctgaatgaagaaaccaacagctgtgtt

SEQ ID NO: 106243 - DNA, 120 bp, Artificial Sequence
  ENSG00000099139_22 (sequence is synthesized)
actcactgccctgatgggtcatatcaggataccaagaaaaatctttgccggaaatgcagtgaaaactgcaagacatgtactgaattccataactgtacagaatgtagggatgggttaagc

SEQ ID NO: 106244 - DNA, 120 bp, Artificial Sequence
  ENSG00000099139_23 (sequence is synthesized)
cattaactgcacagagggctacttcatggaggatgggagatgcgtgcagagctgtagtatcagctattactttgaccactcttcagagaatggatacaaatcctgcaaaaaatgtgatat

SEQ ID NO: 106245 - DNA, 120 bp, Artificial Sequence
  ENSG00000099139_24 (sequence is synthesized)
cagttgtttgacgtgcaatggcccaggattcaagaactgtacaagctgccctagtgggtatctcttagacttaggaatgtgtcaaatgggagccatttgcaaggatgcaacggaagagtc

SEQ ID NO: 106246 - DNA, 120 bp, Artificial Sequence
  ENSG00000099139_25 (sequence is synthesized)
ctgggcggaaggaggcttctgtatgcttgtgaaaaagaacaatctgtgccaacggaaggttcttcaacaactttgctgcaaaacatgtacatttcaaggctgagcagccatcttagattt

SEQ ID NO: 106247 - DNA, 88 bp, Artificial Sequence
  ENSG00000099139_26 (sequence is synthesized)
gcaagccacctctctctttcttttcttgctctctttttctttctctctctctcaagtttgtgcagggagatggtgaactgttttgtca

SEQ ID NO: 106248 - DNA, 120 bp, Artificial Sequence
  ENSG00000099139_27 (sequence is synthesized)
ctctcaagtttgtgcagggagatggtgaactgttttgtcagaacttaaatggaaaaaaaaataaaactacaacaagcctaccttttataactgggtgtttagtgctaaacagccagaacc

SEQ ID NO: 106249 - DNA, 120 bp, Artificial Sequence
  ENSG00000099139_28 (sequence is synthesized)
acagagacagtattgtatgaccaaagcatttgatgccaaaatttgacgttaaagtaatgatttgatttcctgccctggttttgaaggtccatttttttcccttttgcattgacttgcttg

SEQ ID NO: 106250 - DNA, 120 bp, Artificial Sequence
  ENSG00000099139_29 (sequence is synthesized)
tttcccctttgaaacacctaaaaatacctttccaaaacatcgcgagagcatacatagacaaaaatgaaatagaaagctcttgcatgcttgagtccaccattgggggaaatgacagaaaac

SEQ ID NO: 106251 - DNA, 120 bp, Artificial Sequence
  ENSG00000099139_30 (sequence is synthesized)
tggacctgagggcattaggaacatcctacagagttgtgtttagtgtcgtttgccatggtatttcacagtgaaacatggatactctccacacatcatttacttcatgctgtgtacttatgt

SEQ ID NO: 106252 - DNA, 120 bp, Artificial Sequence
  ENSG00000099139_31 (sequence is synthesized)
actggtttttgcattttactcacttgataagtctgctccactggtttcatcagatagacttgctgctactggcttttccattgtagattgggttattttacacgcagttcgccaaatggg

SEQ ID NO: 106253 - DNA, 120 bp, Artificial Sequence
  ENSG00000099139_32 (sequence is synthesized)
attgctctgtatagtcaaattggtgatggacagatggacagaatgcagaggtacatagatgagctgaggctgatccagctcccctgaaattcagagtgttaactttgtagaccctgcaca

SEQ ID NO: 106254 - DNA, 120 bp, Artificial Sequence
  ENSG00000099139_33 (sequence is synthesized)
atctcttggtgctatctagccattacccccattttttttttaaaggccatctgaaattccatttgtcatggtgggaagcattttggatatgatgcaggaaatctcttcctggagtcaaaa

SEQ ID NO: 106255 - DNA, 120 bp, Artificial Sequence
  ENSG00000099139_34 (sequence is synthesized)
gttcccaagaggtcctgtatttttaagaaatggaatttatttaaataatatttaagcttgtgcccatgttggccgggcaacttttttcaatggtgcttattagaagaagttttttcatct

SEQ ID NO: 106256 - DNA, 120 bp, Artificial Sequence
  ENSG00000099139_35 (sequence is synthesized)
tgtcattttaagaaaataaaactggaaattgaatatgggtggcatgattgtacccttttagttctcttatttttctactcctctgtccctctataactatgccatactattatatgctgg

SEQ ID NO: 106257 - DNA, 120 bp, Artificial Sequence
  ENSG00000099139_36 (sequence is synthesized)
tccactgaatgctgagatgatctgttttttggggttttttttttttaagaaatattttcactggttttctgtgactctctaaacacttcatcgaaactagaagactgaattatgaggaaa

SEQ ID NO: 106258 - DNA, 120 bp, Artificial Sequence
  ENSG00000099139_37 (sequence is synthesized)
ctatttggattagtggccagaaacgatgaaatcttatagatcttttgacagtttctctgtttaggggagcctagactgatatcaagtttcttcatatcaaagcttcattggtgacctcat

SEQ ID NO: 106259 - DNA, 120 bp, Artificial Sequence
  ENSG00000099139_38 (sequence is synthesized)
ttgctttacaagtgaccagccatcttgcaggcttcatgcttctgagagccttacttagaagatgctgctggagtcacagctgaggagaggaatactatcaacatggactatcctgggaaa

SEQ ID NO: 106260 - DNA, 120 bp, Artificial Sequence
  ENSG00000099139_39 (sequence is synthesized)
gagctaggaagtagatgctgaggtccccatccaaacagcaagctaggaaaaagcctgccttgaaaatatttctagacatcaaagataacttacaacccaaagtgaataataagtaaatag

SEQ ID NO: 106261 - DNA, 120 bp, Artificial Sequence
  ENSG00000099139_40 (sequence is synthesized)
tctgatgaccctcttaatagcattgcaattgtattgaatcacataatgattcataagtaactagggaaccaactgattttgctaagcagtcttccccttataacaccacaggcccttctg

SEQ ID NO: 106262 - DNA, 120 bp, Artificial Sequence
  ENSG00000099139_41 (sequence is synthesized)
acacacaaaaaaatgaaagttaatcctgggtacagcatacagttttacatttaaacgcacagtcttacgtggacaaatgcaagcacaagcctaaagcaaggtcaagcagatggcaaaacc

SEQ ID NO: 106263 - DNA, 120 bp, Artificial Sequence
  ENSG00000099139_42 (sequence is synthesized)
gaatttgcctgcaaagaaatctatttaactgaatcagcccataatatttgaggcacgaggttactgtgattgataggaaagataaaaatgatgtctgtttttgtagacgaataaccatca

SEQ ID NO: 106264 - DNA, 120 bp, Artificial Sequence
  ENSG00000099139_43 (sequence is synthesized)
acatgacaacaaaattcattggggtctaccagcgtgcattccatttcccactgaccatgcaggtgcacgtcgcggaaatactggtttaactactagtgtgttactgcctcatttatctac

SEQ ID NO: 106265 - DNA, 120 bp, Artificial Sequence
  ENSG00000099139_44 (sequence is synthesized)
actagaacataatgctttcaaagtttaagttaatgttatatattatgtataaatatatatattcataatgagatatatgtaatggatagtacaaagtttggagactcaacaaatgctcta

SEQ ID NO: 106266 - DNA, 120 bp, Artificial Sequence
  ENSG00000099139_45 (sequence is synthesized)
acaaatgctctaaccttctagagacaaaagtcctatttctgttttcttttgtctttttattttcaattagtgacccattgttaaatccaaatccacttttactgaaaaatactgtacatg

SEQ ID NO: 106267 - DNA, 120 bp, Artificial Sequence
  ENSG00000099139_46 (sequence is synthesized)
tgtaaaatgttcagttgtttttttgtaaaatatagtagaacggttgtaactgatactggccaaaatcaatgttattccatattttattttttctattaaattaacctaagttcctgttta

SEQ ID NO: 106268 - DNA, 120 bp, Artificial Sequence
  ENSG00000099139_47 (sequence is synthesized)
agactgcactacctgccccatgacaaggatttttgatgatggccgctgtgtttcgaactgcccctcatggaaatttgaatttgagaaccaatgccatccatgccaccacacctgccagag

SEQ ID NO: 106269 - DNA, 120 bp, Artificial Sequence
  ENSG00000099139_48 (sequence is synthesized)
atgccaaggaagtggccctacccactgcacctcctgtggagcagacaactatggccgagagcacttcctgtaccagggagagtgtggagatagctgcccagagggccactatgccactga

SEQ ID NO: 106270 - DNA, 120 bp, Artificial Sequence
  ENSG00000099139_49 (sequence is synthesized)
ggggaacacctgcctgccctgcccagacaactgtgagctttgccacagcgtgcatgtctgcacaagatgcatgaagggctacttcatagcgcccaccaaccacacatgccagaagttaga

SEQ ID NO: 106271 - DNA, 120 bp, Artificial Sequence
  ENSG00000099139_50 (sequence is synthesized)
gtgtggacaaggtgaagtccaagacccagactatgaagaatgtgtcccttgtgaagaaggatgtctgggatgcagcttggatgatccaggaacatgtacatcttgcgctatggggtatta

SEQ ID NO: 106272 - DNA, 120 bp, Artificial Sequence
  ENSG00000099139_51 (sequence is synthesized)
caggtttgatcaccattgttataaaacctgtcctgagaagacctacagtgaggaagtggaatgcaaggcgtgtgatagtaactgtggcagctgtgaccagaatgggtgttactggtgtga

SEQ ID NO: 106273 - DNA, 120 bp, Artificial Sequence
  ENSG00000099139_52 (sequence is synthesized)
agagggcttctttctcttaggtggcagttgtgtgaggaaatgtggtcctggattctatggtgaccaagaaatgggagaatgtgagtcctgccaccgagcatgcgaaacctgcacaggccc

SEQ ID NO: 106274 - DNA, 120 bp, Artificial Sequence
  ENSG00000099139_53 (sequence is synthesized)
tggtcatgacgagtgcagcagctgccaggaaggactgcagctgctgcgtgggatgtgcgtgcatgccaccaagacccaggaggagggcaaattctggaatgatattttgagaaaactcca

SEQ ID NO: 106275 - DNA, 120 bp, Artificial Sequence
  ENSG00000099139_54 (sequence is synthesized)
gccttgtcattcttcttgtaaaacctgcaatggatctgcaactctgtgcacttcatgtcccaaaggtgcatatcttctggctcaggcctgtgtttcctcctgtccccaaggcacatggcc

SEQ ID NO: 106276 - DNA, 120 bp, Artificial Sequence
  ENSG00000099139_55 (sequence is synthesized)
ttccgtaaggagtgggagctgcgagaactgtacggaggcctgtgccatctgctctggagccgatctttgcaaaaaatgccagatgcagccgggccaccctctcttcctccatgaaggcag

SEQ ID NO: 106277 - DNA, 120 bp, Artificial Sequence
  ENSG00000099139_56 (sequence is synthesized)
gtgctactccaagtgcccggagggctcttatgcagaagacggcatatgtgaacgctgtagctctccttgcagaacatgtgaaggaaacgccaccaactgccattcttgtgaaggaggcca

SEQ ID NO: 106278 - DNA, 120 bp, Artificial Sequence
  ENSG00000099139_57 (sequence is synthesized)
cgtcctgcaccacggagtgtgccaggaaaactgccccgagaggcacgtggctgtgaagggggtatgcaagcattgcccagagatgtgtcaggactgcatccatgagaaaacatgcaaaga

SEQ ID NO: 106279 - DNA, 120 bp, Artificial Sequence
  ENSG00000099139_58 (sequence is synthesized)
gtgcacgcctgagttcttcctgcacgatgatatgtgccaccagtcctgtccccgtggcttctatgcagactcgcgccactgtgtcccctgccataaagactgtctggagtgcagtggccc

SEQ ID NO: 106280 - DNA, 120 bp, Artificial Sequence
  ENSG00000099139_59 (sequence is synthesized)
tgcttggaggagtgtccagcaggaacctattatgaaaaggagactaaggagtgcagagattgccacaagtcctgcttgacctgctcatcatctgggacctgcaccacctgtcagaaaggc

SEQ ID NO: 106281 - DNA, 120 bp, Artificial Sequence
  ENSG00000099139_60 (sequence is synthesized)
ctgatcatgaaccctcgtgggagctgcatggccaacgagaagtgctcaccctccgagtactgggatgaggatgctcccgggtgcaagccctgccatgttaagtgcttccactgcatgggg

SEQ ID NO: 106282 - DNA, 120 bp, Artificial Sequence
  ENSG00000099139_61 (sequence is synthesized)
ccggcggaggaccagtgtcaaacatgccccatgaacagccttcttctcaacacaacctgtgtgaaggactgcccagagggctattatgccgatgaggacagcaaccggtgtgcccactgc

SEQ ID NO: 106283 - DNA, 120 bp, Artificial Sequence
  ENSG00000099139_62 (sequence is synthesized)
cacagctcttgcaggacatgtgaagggagacacagcaggcagtgccactcctgccgaccgggctggttccagctaggaaaagagtgcctgctccagtgcagggaaggatattacgcagac

SEQ ID NO: 106284 - DNA, 120 bp, Artificial Sequence
  ENSG00000099139_63 (sequence is synthesized)
aactccactggccggtgtgagaggtgcaacaggagctgcaaggggtgccagggcccacggcccacagactgcctgtcttgcgatagatttttctttctgctccgctccaaaggagagtgt

SEQ ID NO: 106285 - DNA, 120 bp, Artificial Sequence
  ENSG00000099139_64 (sequence is synthesized)
catcgctcctgcccagaccattactatgtagagcaaagcacacagacctgtgagagatgccatccgacttgtgatcaatgcaaaggaaaaggagcgttgaattgtttatcctgtgtgtgg

SEQ ID NO: 106286 - DNA, 120 bp, Artificial Sequence
  ENSG00000099139_65 (sequence is synthesized)
agttaccacctcatgggagggatctgcacctcggactgtcttgtgggggaatacagagtgggagagggagagaagtttaactgtgaaaaatgccacgagagctgcatggaatgcaaggga

SEQ ID NO: 106287 - DNA, 120 bp, Artificial Sequence
  ENSG00000099139_66 (sequence is synthesized)
ccaggggccaagaactgcaccttgtgccctgccaacctggtgctgcacatggacgacagccactgcctccactgctgcaacacctctgatccccccagtgcccaggagtgctgtgactgc

SEQ ID NO: 106288 - DNA, 120 bp, Artificial Sequence
  ENSG00000099139_67 (sequence is synthesized)
caggacaccacggacgaatgcatccttcgaacaagcaaggttaggcctgcaactgagcatttcaagacagctctgttcatcacctcctccatgatgctggtgcttctgctcggggcagct

SEQ ID NO: 106289 - DNA, 120 bp, Artificial Sequence
  ENSG00000099139_68 (sequence is synthesized)
gtggtagtgtggaagaaatctcgtggccgagtccagccagcagcaaaggccggctatgaaaaactggccgaccccaacaagtcttactcctcctataagagcagctatagagagagcacc

SEQ ID NO: 106290 - DNA, 120 bp, Artificial Sequence
  ENSG00000099139_69 (sequence is synthesized)
agctttgaagaggatcaggtgattgagtacagggatcgggactatgatgaggatgatgatgatgacatcgtctacatgggccaggatggcacagtctaccggaaatttaaatatgggctg

SEQ ID NO: 106291 - DNA, 120 bp, Artificial Sequence
  ENSG00000099139_70 (sequence is synthesized)
ctggatgacgatgacatagatgagctggaatatgatgacgagagttactcctactaccagtaaacaggcactcccccaccaacaccaccattccactctcaggcatgcctgtgagcatca

SEQ ID NO: 106292 - DNA, 120 bp, Artificial Sequence
  ENSG00000099139_71 (sequence is synthesized)
ctgtttttggttttatccccacaccaggctgatgtgtgagtttttctatttgtcttctttaaccatgagtccaaccagaatatgtaagaatgatgaaatactttgttcttcttttgagtg

SEQ ID NO: 106293 - DNA, 120 bp, Artificial Sequence
  ENSG00000099139_72 (sequence is synthesized)
gctaaactcaattaacagttcctgttcaaccgtaattgaagagcaaggataaaattcagaggcattttcctcaaaataatgtgttaagacacaaaaatgaaggaagtgaaaacaaatgag

SEQ ID NO: 106294 - DNA, 120 bp, Artificial Sequence
  ENSG00000099139_73 (sequence is synthesized)
atttgtacaaactcttctatgtgattttaaaaaaaggacagcagatctatagaaattctgtttccgagctgcattgtggaggtgtctgctgcctcctggtattctaatttttctttatct

SEQ ID NO: 106295 - DNA, 120 bp, Artificial Sequence
  ENSG00000099139_74 (sequence is synthesized)
aattttggggataatggaggtacaaaggagttgttggtttggtggtgtttttcttccctttagctgtctttaggcagaaatttgttttgtaagggccaagaaaagagggctcttatcaat

SEQ ID NO: 106296 - DNA, 120 bp, Artificial Sequence
  ENSG00000099139_75 (sequence is synthesized)
tgactccaggccacccctggtgagcagaagagaccacctgggctgggctgctcaggacctacttgagataagggaagaaaagagaaggtgcatcatagctgaggagccatgaggtcaccc

SEQ ID NO: 106297 - DNA, 120 bp, Artificial Sequence
  ENSG00000099139_76 (sequence is synthesized)
caggccctagttcctccgcaggaatccagagtcacaacaattctaaaggcagagcaagcccagcgagaaagaaataactgaatttccaggaactgcactctcatgattttctgggtactt

SEQ ID NO: 106298 - DNA, 120 bp, Artificial Sequence
  ENSG00000099139_77 (sequence is synthesized)
ttcgcctgggagacatcagctaagacatcgaataataaaagaaaaatggcagtgttaacctaacataaaatggaataaaatgacaaacacttcatccgctctaaaaaattcagagctttc

SEQ ID NO: 106299 - DNA, 120 bp, Artificial Sequence
  ENSG00000099139_78 (sequence is synthesized)
cttcatcaacaacccatcacaaaaccgtggactctcaatagaaagagttggaatagagtctaacatggaaaaaaaaaaatcccaatatgctgctcacaagctgtactctagctgctgacc

SEQ ID NO: 106300 - DNA, 120 bp, Artificial Sequence
  ENSG00000099139_79 (sequence is synthesized)
agccttccagcactgctcatcactatgatttttgtttctagacttcctaggcttccttttttccattcttctgtcaagtgtattcttggattcatgcaactgaggacagtttttgtccag

SEQ ID NO: 106301 - DNA, 120 bp, Artificial Sequence
  ENSG00000099139_80 (sequence is synthesized)
attgtaacacagagaagggctcttgctatgcaaaatgatgttggcagggtcttacagatttccttgtcaaaatagaccttacaggcagtactagaaatggagcaccagaaagcaaaaatg

SEQ ID NO: 106302 - DNA, 120 bp, Artificial Sequence
  ENSG00000099139_81 (sequence is synthesized)
acattttcagagaatgatgataattataatctattgcacacctactaccagataacaagctaagtaattcccccccaaaaatgccccacttatccattttggtacttaccatactcccat

SEQ ID NO: 106303 - DNA, 120 bp, Artificial Sequence
  ENSG00000099139_82 (sequence is synthesized)
gaggttggtattgctattattctgttcttgtaggaaacctgaggcttacaagaggttaggtaactagtccaaggtcatgcaaagctcaacaaaattcaagaaaaaagaatgatcacccta

SEQ ID NO: 106304 - DNA, 120 bp, Artificial Sequence
  ENSG00000099139_83 (sequence is synthesized)
aagcgtgtgttcttataactatgctactgaaataaggtgggaaaataagcatcctaaatataattaaagtcatgcctattgttttagtctataatatcaatgttatctttactaaattca

SEQ ID NO: 106305 - DNA, 120 bp, Artificial Sequence
  ENSG00000099139_84 (sequence is synthesized)
tggattttctttttttaacataatgtatcactgacacagaaaatctttatgaagaagtcttcagtttactaaaggcttgtgcttctttagaggaaagctcttaaaacagggttgacaaac

SEQ ID NO: 106306 - DNA, 120 bp, Artificial Sequence
  ENSG00000099139_85 (sequence is synthesized)
agtctctggaaagagccagctagtaagtacattaggctttcttggccagaaagtctctgtcataaccactcagctctgctattatagcatgaatgcagctggtacataacggatgggtga

SEQ ID NO: 106307 - DNA, 120 bp, Artificial Sequence
  ENSG00000099139_86 (sequence is synthesized)
gctgtgcttcaataaaaccttatttatggacactgacatttgaaattcaggtaattttcacatattataaaattttattcttcttttgatttttttcaaccttttaaaatttaaaaatgc

SEQ ID NO: 106308 - DNA, 120 bp, Artificial Sequence
  ENSG00000099139_87 (sequence is synthesized)
aaaagctattctcagttcacagcattacaagaacaggtggtgggtcagatttggccaacaggctgtactttgctgactttatctttaaaacagttttcagagatcatacatgtacatgta

SEQ ID NO: 106309 - DNA, 120 bp, Artificial Sequence
  ENSG00000099139_88 (sequence is synthesized)
tcagagatcatacatgtacatgtatgatatgcctccaaaaattttgatcatttaaaattatctccttggccaggcgtggtggctcatacctctaatcctagcactttgggagactgaggc

SEQ ID NO: 106310 - DNA, 74 bp, Artificial Sequence
  ENSG00000099139_89 (sequence is synthesized)
gtgaaaccccatttctactaaaaatacaataaaaatctgggcatgaaatcacttgagcccgggaggcagaggtt

SEQ ID NO: 106311 - DNA, 66 bp, Artificial Sequence
  ENSG00000099139_90 (sequence is synthesized)
gtaactaactaactaactaaataaataaataaataaaattatctccttgccaggactgctggctca

SEQ ID NO: 106312 - DNA, 87 bp, Artificial Sequence
  ENSG00000099139_91 (sequence is synthesized)
caggaggattgctgacccaccacctgttcttgagcccaggagttcgacatcagccttggacaacatagtgagactcccgtgtctaca

SEQ ID NO: 106313 - DNA, 89 bp, Artificial Sequence
  ENSG00000099139_92 (sequence is synthesized)
aagtgtctgtagtctcagctactcaggaggctaaggtggaaggatcacttgaacccgggaggtcgaggctgcagtgagctgtgatcttg

SEQ ID NO: 106314 - DNA, 120 bp, Artificial Sequence
  ENSG00000099139_93 (sequence is synthesized)
tgaacccgggaggtcgaggctgcagtgagctgtgatcttgctattgcacttcagcctgaatgacagagctaagaccctgactcaaaataaataaataacattatctcttcaaaatgtatc

SEQ ID NO: 106315 - DNA, 120 bp, Artificial Sequence
  ENSG00000099139_94 (sequence is synthesized)
tgaagccctgatagttctactttcaattcttagaaacatataaaaatatatgcatgatagccatcatatcaatggaagactttctcacctctgtggttgcagttagcttacaaaaacgag

SEQ ID NO: 106316 - DNA, 120 bp, Artificial Sequence
  ENSG00000099139_95 (sequence is synthesized)
caattttgcttatactgtgttgttcatcttccttgttaattctaaagctctgatagactgagtttgacatttctttctgtaaactggaaattgttttctatgaaaaaaaaactctatgat

SEQ ID NO: 106317 - DNA, 120 bp, Artificial Sequence
  ENSG00000099139_96 (sequence is synthesized)
acacagttaaagattggttgaggttgagatgaacttcaatactaagaaaaattgtggtgttcctctgtgtggcctgcaatgaaaagaaggctcatgcttgtgtattgaggtttgacatct

SEQ ID NO: 106318 - DNA, 120 bp, Artificial Sequence
  ENSG00000099139_97 (sequence is synthesized)
ttccttctttgtttttagtcatgcaacgtcattcttagatggcttttgaatactatgctaatgactatctaaatagataaatatgtgattggaaaacaaagtcaccttttagttttctac

SEQ ID NO: 106319 - DNA, 120 bp, Artificial Sequence
  ENSG00000099139_98 (sequence is synthesized)
ttggaaatattaagagaatccttgtagactggaaacacaccaaaaggctgggtaaagcatgggaggttccagttaatagaaagtaattttaaaattggaaataaaattaaatcaagacca

SEQ ID NO: 106320 - DNA, 82 bp, Artificial Sequence
  ENSG00000099139_99 (sequence is synthesized)
cgaatcgaatcgaatagaatagaatagaatagaacagaacagaatagaatagaacagaacaatctactacccatattctgac

SEQ ID NO: 106321 - DNA, 120 bp, Artificial Sequence
  ENSG00000099139_100 (sequence is synthesized)
aatagaatagaacagaacaatctactacccatattctgacatattttcttccccttaaatatttgtgtgtgtatatcagtgcactcatatattcaaatatccatatgtgttatctgcaaa

SEQ ID NO: 106322 - DNA, 120 bp, Artificial Sequence
  ENSG00000099139_101 (sequence is synthesized)
gctaatagtccatattgcgattgtaccataatatagttaatctgtaatctgggacatattgttcgcttacagaattttacactattttaaacacggtttggataaacatcattatttatc

SEQ ID NO: 106323 - DNA, 120 bp, Artificial Sequence
  ENSG00000099194_0 (sequence is synthesized)
agtcaactcctcgcactttgcccctgcttggcagcggataaaagggggctgaggaaataccggacacggtcacccgttgccagctctagcctttaaattcccggctcggggacctccacg

SEQ ID NO: 106324 - DNA, 120 bp, Artificial Sequence
  ENSG00000099194_1 (sequence is synthesized)
caccgcggctagcgccgacaaccagctagcgtgcaaggcgccgcggctcagcgcgtaccggcgggcttcgaaaccgcagtcctccggcgaccccgaactccgctccggagcctcagcccc

SEQ ID NO: 106325 - DNA, 120 bp, Artificial Sequence
  ENSG00000099194_2 (sequence is synthesized)
ctggaaagtgatcccggcatccgagagccaagatgccggcccacttgctgcaggacgatatctctagctcctataccaccaccaccaccattacagcgcctccctccagggtcctgcaga

SEQ ID NO: 106326 - DNA, 120 bp, Artificial Sequence
  ENSG00000099194_3 (sequence is synthesized)
atggaggagataagttggagacgatgcccctctacttggaagacgacattcgccctgatataaaagatgatatatatgaccccacctacaaggataaggaaggcccaagccccaaggttg

SEQ ID NO: 106327 - DNA, 120 bp, Artificial Sequence
  ENSG00000099194_4 (sequence is synthesized)
aatatgtctggagaaacatcatccttatgtctctgctacacttgggagccctgtatgggatcactttgattcctacctgcaagttctacacctggctttggggggtattctactattttg

SEQ ID NO: 106328 - DNA, 120 bp, Artificial Sequence
  ENSG00000099194_5 (sequence is synthesized)
tcagtgccctgggcataacagcaggagctcatcgtctgtggagccaccgctcttacaaagctcggctgcccctacggctctttctgatcattgccaacacaatggcattccagaatgatg

SEQ ID NO: 106329 - DNA, 120 bp, Artificial Sequence
  ENSG00000099194_6 (sequence is synthesized)
tctatgaatgggctcgtgaccaccgtgcccaccacaagttttcagaaacacatgctgatcctcataattcccgacgtggctttttcttctctcacgtgggttggctgcttgtgcgcaaac

SEQ ID NO: 106330 - DNA, 120 bp, Artificial Sequence
  ENSG00000099194_7 (sequence is synthesized)
acccagctgtcaaagagaaggggagtacgctagacttgtctgacctagaagctgagaaactggtgatgttccagaggaggtactacaaacctggcttgctgatgatgtgcttcatcctgc

SEQ ID NO: 106331 - DNA, 120 bp, Artificial Sequence
  ENSG00000099194_8 (sequence is synthesized)
ccacgcttgtgccctggtatttctggggtgaaacttttcaaaacagtgtgttcgttgccactttcttgcgatatgctgtggtgcttaatgccacctggctggtgaacagtgctgcccacc

SEQ ID NO: 106332 - DNA, 120 bp, Artificial Sequence
  ENSG00000099194_9 (sequence is synthesized)
tcttcggatatcgtccttatgacaagaacattagcccccgggagaatatcctggtttcacttggagctgtgggtgagggcttccacaactaccaccactcctttccctatgactactctg

SEQ ID NO: 106333 - DNA, 120 bp, Artificial Sequence
  ENSG00000099194_10 (sequence is synthesized)
ccagtgagtaccgctggcacatcaacttcaccacattcttcattgattgcatggccgccctcggtctggcctatgaccggaagaaagtctccaaggccgccatcttggccaggattaaaa

SEQ ID NO: 106334 - DNA, 120 bp, Artificial Sequence
  ENSG00000099194_11 (sequence is synthesized)
gaaccggagatggaaactacaagagtggctgagtttggggtccctcaggttcctttttcaaaaaccagccaggcagaggttttaatgtctgtttattaactactgaataatgctaccagg

SEQ ID NO: 106335 - DNA, 120 bp, Artificial Sequence
  ENSG00000099194_12 (sequence is synthesized)
atgctaaagatgatgatgttaacccattccagtacagtattcttttaaaattcaaaagtattgaaagccaacaactctgcctttatgatgctaagctgatattatttcttctcttatcct

SEQ ID NO: 106336 - DNA, 120 bp, Artificial Sequence
  ENSG00000099194_13 (sequence is synthesized)
ctctctcttctaggcccattgtcctccttttcactttattgctatcgccctcctttcccttattgcctcccaggcaagcagctggtcagtctttgctcagtgtccagcttccaaagccta

SEQ ID NO: 106337 - DNA, 120 bp, Artificial Sequence
  ENSG00000099194_14 (sequence is synthesized)
gacaacctttctgtagcctaaaacgaatggtctttgctccagataactctctttccttgagctgttgtgagctttgaagtaggtggcttgagctagagataaaacagaatcttctgggta

SEQ ID NO: 106338 - DNA, 120 bp, Artificial Sequence
  ENSG00000099194_15 (sequence is synthesized)
gtcccctgttgattatcttcagcccaggcttttgctagatggaatggaaaagcaacttcatttgacacaaagcttctaaagcaggtaaattgtcgggggagagagttagcatgtatgaat

SEQ ID NO: 106339 - DNA, 120 bp, Artificial Sequence
  ENSG00000099194_16 (sequence is synthesized)
gtaaggatgagggaagcgaagcaagaggaacctctcgccatgatcagacatacagctgcctacctaatgaggacttcaagccccaccacatagcatgcttcctttctctcctggctcggg

SEQ ID NO: 106340 - DNA, 120 bp, Artificial Sequence
  ENSG00000099194_17 (sequence is synthesized)
gtaaaaagtggctgcggtgtttggcaatgctaattcaatgccgcaacatatagttgaggccgaggataaagaaaagacattttaagtttgtagtaaaagtggtctctgctggggaagggt

SEQ ID NO: 106341 - DNA, 120 bp, Artificial Sequence
  ENSG00000099194_18 (sequence is synthesized)
tttcttttctttttttctttaataacaaggagatttcttagttcatatatcaagaagtcttgaagttgggtgtttccagaattggtaaaaacagcagctcatagaattttgagtattcca

SEQ ID NO: 106342 - DNA, 120 bp, Artificial Sequence
  ENSG00000099194_19 (sequence is synthesized)
tgagctgctcattacagttctttcctctttctgctctgccatcttcaggatattggttcttcccctcatagtaataagatggctgtggcatttccaaacatccaaaaaaagggaaggatt

SEQ ID NO: 106343 - DNA, 120 bp, Artificial Sequence
  ENSG00000099194_20 (sequence is synthesized)
taaggaggtgaagtcgggtcaaaaataaaatatatatacatatatacattgcttagaacgttaaactattagagtatttcccttccaaagagggatgtttggaaaaaactctgaaggaga

SEQ ID NO: 106344 - DNA, 120 bp, Artificial Sequence
  ENSG00000099194_21 (sequence is synthesized)
taagagcgaacttcacataggaagggatctgagaacacgttgccaggggcttgagaaggttactgagtgagttattgggagtcttaataaaataaactagatattaggtccattcattaa

SEQ ID NO: 106345 - DNA, 120 bp, Artificial Sequence
  ENSG00000099194_22 (sequence is synthesized)
ttagttccagtttctccttgaaatgagtaaaaactagaaggcttctctccacagtgttgtgccccttcactcatttttttttgaggagaagggggtctctgttaacatctagcctaaagt

SEQ ID NO: 106346 - DNA, 120 bp, Artificial Sequence
  ENSG00000099194_23 (sequence is synthesized)
atacaactgcctggggggcagggttaggaatctcttcactaccctgattcttgattcctggctctaccctgtctgtcccttttctttgaccagatctttctcttccctgaacgttttctt

SEQ ID NO: 106347 - DNA, 120 bp, Artificial Sequence
  ENSG00000099194_24 (sequence is synthesized)
ctttccctggacaggcagcctcctttgtgtgtattcagaggcagtgatgacttgctgtccaggcagctccctcctgcacacagaatgctcagggtcactgaaccactgcttctcttttga

SEQ ID NO: 106348 - DNA, 120 bp, Artificial Sequence
  ENSG00000099194_25 (sequence is synthesized)
aagtagagctagctgccactttcacgtggcctccgcagtgtctccacctacacccctgtgctcccctgccacactgatggctcaagacaaggctggcaaaccctcccagaaacatctctg

SEQ ID NO: 106349 - DNA, 120 bp, Artificial Sequence
  ENSG00000099194_26 (sequence is synthesized)
gcccagaaagcctctctctccctccctctctcatgaggcacagccaagccaagcgctcatgttgagccagtgggccagccacagagcaaaagagggtttattttcagtcccctctctctg

SEQ ID NO: 106350 - DNA, 120 bp, Artificial Sequence
  ENSG00000099194_27 (sequence is synthesized)
ggtcagaaccagagggcatgctgaatgccccctgcttacttggtgagggtgccccgcctgagtcagtgctctcagctggcagtgcaatgcttgtagaagtaggaggaaacagttctcact

SEQ ID NO: 106351 - DNA, 120 bp, Artificial Sequence
  ENSG00000099194_28 (sequence is synthesized)
gggaagaagcaagggcaagaacccaagtgcctcacctcgaaaggaggccctgttccctggagtcagggtgaactgcaaagctttggctgagacctgggatttgagataccacaaaccctg

SEQ ID NO: 106352 - DNA, 120 bp, Artificial Sequence
  ENSG00000099194_29 (sequence is synthesized)
ctgaacacagtgtctgttcagcaaactaaccagcattccctacagcctagggcagacaatagtatagaagtctggaaaaaaacaaaaacagaatttgagaaccttggaccactcctgtcc

SEQ ID NO: 106353 - DNA, 120 bp, Artificial Sequence
  ENSG00000099194_30 (sequence is synthesized)
ctgtagctcagtcatcaaagcagaagtctggctttgctctattaagattggaaatgtacactaccaaacactcagtccactgttgagccccagtgctggaagggaggaaggcctttcttc

SEQ ID NO: 106354 - DNA, 120 bp, Artificial Sequence
  ENSG00000099194_31 (sequence is synthesized)
tgtgttaattgcgtagaggctacaggggttagcctggactaaaggcatccttgtcttttgagctattcacctcagtagaaaaggatctaagggaagatcactgtagtttagttctgttga

SEQ ID NO: 106355 - DNA, 120 bp, Artificial Sequence
  ENSG00000099194_32 (sequence is synthesized)
cctgtgcacctaccccttggaaatgtctgctggtatttctaattccacaggtcatcagatgcctgcttgataatatataaacaataaaaacaactttcacttcttcctattgtaatcgtg

SEQ ID NO: 106356 - DNA, 120 bp, Artificial Sequence
  ENSG00000099194_33 (sequence is synthesized)
tgccatggatctgatctgtaccatgaccctacataaggctggatggcacctcaggctgagggccccaatgtatgtgtggctgtgggtgtgggtgggagtgtgtctgctgagtaaggaaca

SEQ ID NO: 106357 - DNA, 120 bp, Artificial Sequence
  ENSG00000099194_34 (sequence is synthesized)
cgattttcaagattctaaagctcaattcaagtgacacattaatgataaactcagatctgatcaagagtccggatttctaacagtccttgctttggggggtgtgctgacaacttagctcag

SEQ ID NO: 106358 - DNA, 120 bp, Artificial Sequence
  ENSG00000099194_35 (sequence is synthesized)
gtgccttacatcttttctaatcacagtgttgcatatgagcctgccctcactccctctgcagaatccctttgcacctgagaccctactgaagtggctggtagaaaaaggggcctgagtgga

SEQ ID NO: 106359 - DNA, 120 bp, Artificial Sequence
  ENSG00000099194_36 (sequence is synthesized)
ggattatcagtatcacgatttgcaggattcccttctgggcttcattctggaaacttttgttagggctgcttttcttaagtgcccacatttgatggagggtggaaataatttgaatgtatt

SEQ ID NO: 106360 - DNA, 120 bp, Artificial Sequence
  ENSG00000099194_37 (sequence is synthesized)
tgatttataagttttttttttttttttgggttaaaagatggttgtagcatttaaaatggaaaattttctccttggtttgctagtatcttgggtgtattctctgtaagtgtagctcaaata

SEQ ID NO: 106361 - DNA, 120 bp, Artificial Sequence
  ENSG00000099194_38 (sequence is synthesized)
ggtcatcatgaaaggttaaaaaagcgaggtggccatgttatgctggtggttaaggccagggcctctccaaccactgtgccactgacttgctgtgtgaccctgggcaagtcacttaactat

SEQ ID NO: 106362 - DNA, 120 bp, Artificial Sequence
  ENSG00000099194_39 (sequence is synthesized)
aaggtgcctcagttttccttctgttaaaatggggataataatactgacctacctcaaagggcagttttgaggcatgactaatgctttttagaaagcattttgggatccttcagcacagga

SEQ ID NO: 106363 - DNA, 120 bp, Artificial Sequence
  ENSG00000099194_40 (sequence is synthesized)
attctcaagacctgagtattttttataataggaatgtccaccatgaacttgatacgtccgtgtgtcccagatgctgtcattagtctatatggttctccaagaaactgaatgaatccattg

SEQ ID NO: 106364 - DNA, 120 bp, Artificial Sequence
  ENSG00000099194_41 (sequence is synthesized)
gagaagcggtggataactagccagacaaaatttgagaatacataaacaacgcattgccacggaaacatacagaggatgccttttctgtgattgggtgggattttttccctttttatgtgg

SEQ ID NO: 106365 - DNA, 120 bp, Artificial Sequence
  ENSG00000099194_42 (sequence is synthesized)
gatatagtagttacttgtgacaagaataattttggaataatttctattaatatcaactctgaagctaattgtactaatctgagattgtgtttgttcataataaaagtgaagtgaatctga

SEQ ID NO: 106366 - DNA, 120 bp, Artificial Sequence
  ENSG00000099203_0 (sequence is synthesized)
gcagaccagagggtgacccggatgatggcggccggcgcggccctagccctggccttgtggctactaatgccaccagtggaggtgggaggggcggggcccccgccaatccaggacggtgag

SEQ ID NO: 106367 - DNA, 120 bp, Artificial Sequence
  ENSG00000099203_1 (sequence is synthesized)
ttcacgttcctgttgccggcggggaggaagcagtgtttctaccagtccgcgccggccaacgcaagcctcgagaccgaataccaggtgatcggaggtgctggactggacgtggacttcacg

SEQ ID NO: 106368 - DNA, 120 bp, Artificial Sequence
  ENSG00000099203_2 (sequence is synthesized)
ctggagagccctcagggcgtgctgttggtcagcgagtcccgcaaggctgatggggtacacacggtggagccaacggaggccggggactacaagctgtgctttgacaactccttcagcacc

SEQ ID NO: 106369 - DNA, 120 bp, Artificial Sequence
  ENSG00000099203_3 (sequence is synthesized)
atctccgagaagctggtgttctttgaactgatctttgacagcctccaggatgacgaggaggtcgaaggatgggcagaggctgtggagcccgaggagatgctggatgttaaaatggaggac

SEQ ID NO: 106370 - DNA, 120 bp, Artificial Sequence
  ENSG00000099203_4 (sequence is synthesized)
atcaaggagtccattgagaccatgcggacccggctggagcgcagcatccagatgctcacgctactgcgggccttcgaggcacgtgaccgcaacctgcaagagggcaacttggagcgggtc

SEQ ID NO: 106371 - DNA, 120 bp, Artificial Sequence
  ENSG00000099203_5 (sequence is synthesized)
aacttctggtcagctgtcaacgtggcggtgctgctgctggtggctgtgctgcaggtctgcacgctcaagcgcttcttccaggacaagcgcccggtgcccacgtagcccctgccatggaag

SEQ ID NO: 106372 - DNA, 120 bp, Artificial Sequence
  ENSG00000099203_6 (sequence is synthesized)
cctgccaaaacgggagtgtgcagtcagggcctgcggtctggccccatgagtctccttccgtcctcagcgggcagggaacacctctggcttgtagaagggacggctcagtggctgcaccga

SEQ ID NO: 106373 - DNA, 120 bp, Artificial Sequence
  ENSG00000099203_7 (sequence is synthesized)
cggtcctggaaatctcacatggtgggcactgcagcgttggaacgtgagcctcggatttcctggcccctctactgtaaatgtgccttagcctaagcctcccatcctgtgttagcgttgcct

SEQ ID NO: 106374 - DNA, 120 bp, Artificial Sequence
  ENSG00000099203_8 (sequence is synthesized)
ggtgcggggcagggcctaacaaggaaacctgggccctccaagccaggttgaggtctggtaacagaatgccaggaagggggcctggaagaccacctgccccggcccctctcctgcaggggc

SEQ ID NO: 106375 - DNA, 120 bp, Artificial Sequence
  ENSG00000099203_9 (sequence is synthesized)
cccacacaggcatgagggatggcccggccaaagtctaggcagaagcctcctataacaaagggtggtgtggcctgggcattggagtcaataaattatggtcagaaaatcacaagagcctgc

SEQ ID NO: 106376 - DNA, 120 bp, Artificial Sequence
  ENSG00000099203_10 (sequence is synthesized)
tgattggggctcagggacaccagccaggacagaccggcccccgagggggcagccagacaggtgggaggggcctcccacgaagctcagaagaaaggtcgtgcgggagccgatggaggtggt

SEQ ID NO: 106377 - DNA, 120 bp, Artificial Sequence
  ENSG00000099203_11 (sequence is synthesized)
cgcctggcacaagagaaaaatcagaaagcaaagtttaactgagccccagttgggccacgaggcttgggcttccccacgaggtgagagaagcagggcctgagggtaggaagggggtggagc

SEQ ID NO: 106378 - DNA, 120 bp, Artificial Sequence
  ENSG00000099203_12 (sequence is synthesized)
gctggggtccccgcttcaccaggcagcagccaggcctgtgcacgtgggggtgtgcagggggtcagagaatatctgctcccactcctcacatgctaaggaaagtaaaagctctcccctgta

SEQ ID NO: 106379 - DNA, 120 bp, Artificial Sequence
  ENSG00000099203_13 (sequence is synthesized)
aggaggtcgaaggatgggcagaggctgtggagcccgaggagatgctggatgttaaaatggaggacatcaaggtgtgtccaggctgcgctggggccactccttccagatctctaggattca

SEQ ID NO: 106380 - DNA, 120 bp, Artificial Sequence
  ENSG00000099204_0 (sequence is synthesized)
agacagtaaggagccaggggaacagagagaattgtggggcagcaccgctccttgggtccccactccccatttctcattgcttggaaatccatgccaagatgcctgccttccttggtctaa

SEQ ID NO: 106381 - DNA, 120 bp, Artificial Sequence
  ENSG00000099204_1 (sequence is synthesized)
agtgtctggggaaattgtgcagctctgagaaaagcaaagtcacctcatctgagagaaccagtgccaggggctcgaacagaaagagactgattgttgaggaccggagggtctctgggacct

SEQ ID NO: 106382 - DNA, 120 bp, Artificial Sequence
  ENSG00000099204_2 (sequence is synthesized)
ccttcaccgctcataggcgtgccactatcactcatttgctgtatctctgtcccaaggactactgcccacgtgggcgtgtatgtaacagcgttgatccttttgtggcccaccctcaggacc

SEQ ID NO: 106383 - DNA, 120 bp, Artificial Sequence
  ENSG00000099204_3 (sequence is synthesized)
ctcaccacccatcagagaagcctgtcattcactgccataaatgtggggagccttgcaagggtgaagtgcttcgggtccagaccaaacatttccacatcaagtgtttcacctgcaaagtgt

SEQ ID NO: 106384 - DNA, 120 bp, Artificial Sequence
  ENSG00000099204_4 (sequence is synthesized)
gtggctgtgacctggcacaagggggcttcttcataaagaacggagagtatctctgcaccctggactaccagcggatgtacgggacacgctgccatggctgtggggagttcgtggagggcg

SEQ ID NO: 106385 - DNA, 120 bp, Artificial Sequence
  ENSG00000099204_5 (sequence is synthesized)
aagtggtgactgctctgggcaagacctaccatcccaattgctttgcttgtactatctgcaagcgcccgtttccacccggagaccgagtcacattcaatgggagagactgcctttgtcaac

SEQ ID NO: 106386 - DNA, 120 bp, Artificial Sequence
  ENSG00000099204_6 (sequence is synthesized)
tctgtgcacagccgatgtcgtccagtccgaaagaaaccaccttctccagcaattgtgccggctgcggaagagatatcaagaatgggcaggcgctgctggcgctggataagcagtggcact

SEQ ID NO: 106387 - DNA, 120 bp, Artificial Sequence
  ENSG00000099204_7 (sequence is synthesized)
tggggtgctttaaatgcaagtcctgcgggaaggtcctcaccggggagtacatcagcaaggatggtgctccgtactgtgaaaaggactaccagggactctttggggtgaaatgtgaggcgt

SEQ ID NO: 106388 - DNA, 120 bp, Artificial Sequence
  ENSG00000099204_8 (sequence is synthesized)
gtcaccagtttatcacagggaaagtcctggaggcaggtgacaaacattaccaccccagctgtgcacgatgcagcagatgcaaccagatgttcacagaaggagaggaaatgtatcttcaag

SEQ ID NO: 106389 - DNA, 120 bp, Artificial Sequence
  ENSG00000099204_9 (sequence is synthesized)
gctccaccgtttggcatcccgactgtaagcaatctacgaagaccgaggaaaagctgcggcctaccaggacatcctcggaaagtatttattctaggccaggctccagtattcctggctcac

SEQ ID NO: 106390 - DNA, 120 bp, Artificial Sequence
  ENSG00000099204_10 (sequence is synthesized)
caggtcatactatctatgcaaaagtagacaatgagatcctggattacaaggatttagcagccattccgaaggtcaaggcaatttatgacattgaacgtccagatcttattacctatgagc

SEQ ID NO: 106391 - DNA, 120 bp, Artificial Sequence
  ENSG00000099204_11 (sequence is synthesized)
tatgatgacaaacaggagagacagagccttggagagtctccgaggactttgtctcctactccatcagcagaagggtaccaggatgttcgggatcggatgatccatcggtccacgagccag

SEQ ID NO: 106392 - DNA, 120 bp, Artificial Sequence
  ENSG00000099204_12 (sequence is synthesized)
ggctccatcaactcccctgtgtacagccgccacagctacactccaaccacgtcccgctctccccagcatttccacagacctggcaatgagccgtccagcggccggaactcccctctccct

SEQ ID NO: 106393 - DNA, 120 bp, Artificial Sequence
  ENSG00000099204_13 (sequence is synthesized)
taccggccagacagccgccctctaactccaacttacgctcaggcccctaaacatttccatgttccagatcaaggaatcaacatttaccgaaagccacccatctacaaacagcatgctgcc

SEQ ID NO: 106394 - DNA, 120 bp, Artificial Sequence
  ENSG00000099204_14 (sequence is synthesized)
ttggcagcccagagcaagtcctcagaagatatcatcaagttttccaagttcccagcagcccaggcaccagaccccagcgagacaccaaagattgagacggaccactggcctggtcccccc

SEQ ID NO: 106395 - DNA, 120 bp, Artificial Sequence
  ENSG00000099204_15 (sequence is synthesized)
tcatttgctgtcgtaggacctgacatgaaacgcagatctagtggcagagaggaagatgatgaggaacttctgagacgtcggcagcttcaagaagagcaattaatgaagcttaactcaggc

SEQ ID NO: 106396 - DNA, 120 bp, Artificial Sequence
  ENSG00000099204_16 (sequence is synthesized)
ctgggacagttgatcttgaaagaagagatggagaaagagagccgggaaaggtcatctctgttagccagtcgctacgattctcccatcaactcagcttcacatattccatcatctaaaact

SEQ ID NO: 106397 - DNA, 120 bp, Artificial Sequence
  ENSG00000099204_17 (sequence is synthesized)
gcatctctccctggctatggaagaaatgggcttcaccggcctgtttctaccgacttcgctcagtataacagctatggggatgtcagcgggggagtgcgagattaccagacactcccagat

SEQ ID NO: 106398 - DNA, 120 bp, Artificial Sequence
  ENSG00000099204_18 (sequence is synthesized)
ggccacatgcctgcaatgagaatggaccgaggagtgtctatgcccaacatgttggaaccaaagatatttccatatgaaatgctcatggtgaccaacagagggcgaaacaaaatcctcaga

SEQ ID NO: 106399 - DNA, 120 bp, Artificial Sequence
  ENSG00000099204_19 (sequence is synthesized)
gaggtggacagaaccaggctggagcgccacttagcccctgaagtgtttcgggaaatctttggaatgtccatacaggagtttgacaggttacctctttggagacgcaacgacatgaagaaa

SEQ ID NO: 106400 - DNA, 120 bp, Artificial Sequence
  ENSG00000099204_20 (sequence is synthesized)
aaagcaaaactcttctaagtcccactcgtgaatggcaattagagaaaggactgacagtggcggtgccccataggatgtcatattgaggcccaaacttgattggagaatttgcaaactacc

SEQ ID NO: 106401 - DNA, 120 bp, Artificial Sequence
  ENSG00000099204_21 (sequence is synthesized)
gtcgctcagcaacaccaaaaagagaaagtctggttaaaacaccatgagtcaaatgtcgggccagccaacagtaacacttgccaagaagcatggcgtagaaatttctatgttccgaaacac

SEQ ID NO: 106402 - DNA, 120 bp, Artificial Sequence
  ENSG00000099204_22 (sequence is synthesized)
gtcattgagctgatgtgcttttgcaaggggtctctttagaagtggtaggggcagggtcgagagaagaaggggatgcagaatctgtacatgaggaaggagccagagtcactcaggaaactc

SEQ ID NO: 106403 - DNA, 120 bp, Artificial Sequence
  ENSG00000099204_23 (sequence is synthesized)
ctcattcttcctgcgctggctgtggcacacccaccggtggcacacccctccctcgggtccagttcagcccacagactcctgggaggagagccagggccccagcctctcctttgaggagtg

SEQ ID NO: 106404 - DNA, 120 bp, Artificial Sequence
  ENSG00000099204_24 (sequence is synthesized)
ttgcagcctttctgtgtgccagatgcctagtgaagaaaagctgaaaccctggagctttgtgcatgttaatgaccttggaaatgactgagctcacggaccctcatcacaccatgggagact

SEQ ID NO: 106405 - DNA, 120 bp, Artificial Sequence
  ENSG00000099204_25 (sequence is synthesized)
ggataagagctggcaagtgcccttaggatgccgcatgggaaaaatcggttatcataatttcaaagtataaatatatttattaagtagcgctgcggctaagaaggaagagtgaggggtctg

SEQ ID NO: 106406 - DNA, 120 bp, Artificial Sequence
  ENSG00000099204_26 (sequence is synthesized)
tccatggggtggcagtgatttcacacccgcctttcttgaatggcttcgtgttactcagccgtgccctggcaggaatggaactccatcagggaacagggcagctctgtttgaatggggtga

SEQ ID NO: 106407 - DNA, 120 bp, Artificial Sequence
  ENSG00000099204_27 (sequence is synthesized)
aaaacagcaaaattaattcttagcaagctccttgttctctactgttcaccgggacctggctggcaaatgacttagctattagtatatttaaaaactgttcaaaagcaaaagagaaggaac

SEQ ID NO: 106408 - DNA, 120 bp, Artificial Sequence
  ENSG00000099204_28 (sequence is synthesized)
aggaatgaaaggaaaccttcccttaactctttctgcttcccatagcaggtctggttcctgctccccgcctaggacaggagctgtctggagctccacctttgcaaagaaaggaaaaacaca

SEQ ID NO: 106409 - DNA, 120 bp, Artificial Sequence
  ENSG00000099204_29 (sequence is synthesized)
aattgcccccagattggcccagtggcatgccattaggtgattttgcataggggccatatcattcatggccaaaaaaaaccaaaaagcaaaaaacaaaaacaagtcccatgtcctactgac

SEQ ID NO: 106410 - DNA, 120 bp, Artificial Sequence
  ENSG00000099204_30 (sequence is synthesized)
tctagttcttccagtcgttatcctctgctgtctctctggcatcctatgaatcagatcaagcccatgctgttgttggtttttaaggtttctttcaataataggctaaggaaagacatgttt

SEQ ID NO: 106411 - DNA, 120 bp, Artificial Sequence
  ENSG00000099204_31 (sequence is synthesized)
ttctcttttaaatctctgcaactccaaagtagactccttcgaacgtatttaatttggccttttcagctttcttcttgcccagctctgtcgaattcatgggtgtgtgtgcacatgttggtt

SEQ ID NO: 106412 - DNA, 120 bp, Artificial Sequence
  ENSG00000099204_32 (sequence is synthesized)
tcactcacccagagtaattttgtgagcatgcatgtgctttttaatttctgcttgaatgtttgtcctgctgtgttgcagcttctaaagacattgtcaccgagtgtgtgtgactcaaagatc

SEQ ID NO: 106413 - DNA, 120 bp, Artificial Sequence
  ENSG00000099204_33 (sequence is synthesized)
ctaaactgcgaccccaacatcacttccttcatggaaaggtgttggcgctgatgtagctcatggaaggatcagactgggaaccacagaggaaggatgaggtgggatgtggaggtcagagca

SEQ ID NO: 106414 - DNA, 120 bp, Artificial Sequence
  ENSG00000099204_34 (sequence is synthesized)
tctcacgagagtccctcaggctctgcaacactagattcgaatatgagcctagggtttccccaacacgtgcgtgcatatgaaaccacatcatgattcccgacgtgagttagatgagggaga

SEQ ID NO: 106415 - DNA, 120 bp, Artificial Sequence
  ENSG00000099204_35 (sequence is synthesized)
gtttgtgtaactccacacccaggagggtaagccactttattatcatgctttggggctgtgcttaagaatttaagctctgttttaaagccgaagaagaaaacatttgaatttaccttcata

SEQ ID NO: 106416 - DNA, 120 bp, Artificial Sequence
  ENSG00000099204_36 (sequence is synthesized)
tgccactaagaacaaaagctctgaagttcttcctgctggcaccaaatattaggattacaagctgtctctctgacaccagtggtaaaaaagcaagtagaatagtttctgagtctgtgttgc

SEQ ID NO: 106417 - DNA, 120 bp, Artificial Sequence
  ENSG00000099204_37 (sequence is synthesized)
agcctctgacacgtggctcaccgctgtcatttgggggatggaatgaacagtcactgttctatagcatcctcctgtgctcttacctaaggaatctaaattgtcctagccttccattgctat

SEQ ID NO: 106418 - DNA, 83 bp, Artificial Sequence
  ENSG00000099204_38 (sequence is synthesized)
ctactaacatgtttagcaaatggctctgacagggtggccatgagcagatgagaccagctcttgcttggttggaagccacactg

SEQ ID NO: 106419 - DNA, 120 bp, Artificial Sequence
  ENSG00000099204_39 (sequence is synthesized)
gcagatgagaccagctcttgcttggttggaagccacactgcagtttgcagtttagcctttggtgtctcagtggcttcttgcttattccatgctttttctatcccatcctctctctgtgcc

SEQ ID NO: 106420 - DNA, 120 bp, Artificial Sequence
  ENSG00000099204_40 (sequence is synthesized)
ctcctgcaatggcagccttggcacaatgcctgggtgtcctcatccttgctttactctggaaagtgtggggatggagaggatggtgcatttccagtgcttccttacctgtcaataacaatg

SEQ ID NO: 106421 - DNA, 120 bp, Artificial Sequence
  ENSG00000099204_41 (sequence is synthesized)
gtggccacctgggtcccagcacttggctggtggagagatttttttcattatggagctaataaagggtccctacgttttacattgattaatgaattatcacccagacatgtgcagatgaaa

SEQ ID NO: 106422 - DNA, 120 bp, Artificial Sequence
  ENSG00000099204_42 (sequence is synthesized)
tgtcaatataagaaaaatcaaggtatttgggaaacatgggcataatcaggtagttttgctaaaattcctcttccttggtctacataaagaagacatgggtctgtcatagaatggggacat

SEQ ID NO: 106423 - DNA, 120 bp, Artificial Sequence
  ENSG00000099204_43 (sequence is synthesized)
tagactgaaaactgggacaacccccttccttattttatagagactaggagttaaggggcctgcctaagattgcagtgataaagaactgaaccctaaatcagctcccactaatgaaaccct

SEQ ID NO: 106424 - DNA, 120 bp, Artificial Sequence
  ENSG00000099204_44 (sequence is synthesized)
gctttccttgtatcttttaaactcagttctgcatccaacttgagaagaaaaaaagcttctttccatatcaagtaccatatgagttcatttaaactgcaccttgcagaaatgcattgccag

SEQ ID NO: 106425 - DNA, 120 bp, Artificial Sequence
  ENSG00000099204_45 (sequence is synthesized)
aaagcaccagtagcctcctatctgcaagcagagtagtgctctgctctggggaggggtcattggaaaccataatgcagagtgggccccctactccatttcccagcaaaaggctccagctgg

SEQ ID NO: 106426 - DNA, 120 bp, Artificial Sequence
  ENSG00000099204_46 (sequence is synthesized)
agggatgggttgtggggcaacctggttcctgctaactgccagattgaatgtgtgggctagaatgcctgcacatttagttaaactgggctcagcatgcttgtcctcaaaatgtccatcctg

SEQ ID NO: 106427 - DNA, 120 bp, Artificial Sequence
  ENSG00000099204_47 (sequence is synthesized)
gtcacagcacacaagatggctattggtctgcttttaccctaccctgtactatacatgaaaattccagttattaacacactcaaactggtggagcttgttcaccctaggaaggggattgta

SEQ ID NO: 106428 - DNA, 120 bp, Artificial Sequence
  ENSG00000099204_48 (sequence is synthesized)
tatatggcaggcttccctggtgccgatgtaaagggctacatttgggaacatttgacttccttgggactcttaagtgcataatgatggcatgaagtaaaaggggcctcaatgatgatagga

SEQ ID NO: 106429 - DNA, 120 bp, Artificial Sequence
  ENSG00000099204_49 (sequence is synthesized)
aaatcagttcttttaaaatttcttcaagaaaatccaggctatcacatagtctttctgtgtgacttattaggagataggaagagcattgggaaacttgcacagctagctatgcatctacat

SEQ ID NO: 106430 - DNA, 120 bp, Artificial Sequence
  ENSG00000099204_50 (sequence is synthesized)
tttggtttggggttagttatgaaatgttcttaatatgacgtgttcaataacttcacataaacttcctgttctccaaaacctcaaagagatagagttaatgagttgttgtttttttttaaa

SEQ ID NO: 106431 - DNA, 120 bp, Artificial Sequence
  ENSG00000099204_51 (sequence is synthesized)
tgggggtagttttctatctgtcatgggctctagcatctactccgctacccaattctgtcatctccaagctgagtttcctcttctgaggcagaggctggagcagttctttttcagttctca

SEQ ID NO: 106432 - DNA, 120 bp, Artificial Sequence
  ENSG00000099204_52 (sequence is synthesized)
tcctctccatcccaatccagtatatcaatcaactctaactcggagacgtctagctggcaatgtttctaaaactttcactggatttctttagacattgaagcaaacatttttttctaagaa

SEQ ID NO: 106433 - DNA, 120 bp, Artificial Sequence
  ENSG00000099204_53 (sequence is synthesized)
ttgcttctcagatgatgatatcaaatgtatatgcttttgcaagtttgaaaagttcaaattaaccacttttgactaggtaagtctttctaaaaaccatttaaagctaactgggtcttagca

SEQ ID NO: 106434 - DNA, 120 bp, Artificial Sequence
  ENSG00000099204_54 (sequence is synthesized)
tcctcctgtgtatggaagagacaggtgaccgctccaggttgggtgctcacagaacccttttcctgactctcatggaagatggtggaaggaaaatagactgtctcatcaaccctcctgtgt

SEQ ID NO: 106435 - DNA, 120 bp, Artificial Sequence
  ENSG00000099204_55 (sequence is synthesized)
cctctgaagcaatctcagtttttattaaccacctcttctgtgtttctggtagctatttaacctgtatttaatctgtacttcctatgccagcctcaattttatttgatttttacaattatt

SEQ ID NO: 106436 - DNA, 120 bp, Artificial Sequence
  ENSG00000099204_56 (sequence is synthesized)
ctcttctaaccaatgaagtgtttgtcagtatgccccaaagcttgctcttttgtgctcccttttgaataactttctatccagaaaaagagattatttgggacttgagatttgcagtgatac

SEQ ID NO: 106437 - DNA, 120 bp, Artificial Sequence
  ENSG00000099204_57 (sequence is synthesized)
caacttatagcaatgatgtactttaagggaactacccaactatgttgtgatagaagaaagagaaaccttcactttggcatttttttttaatcactgtttatttttctgtttgcggcccag

SEQ ID NO: 106438 - DNA, 120 bp, Artificial Sequence
  ENSG00000099204_58 (sequence is synthesized)
gaagcagtgggaggtggtggcagatatgctttgcatatggattgttatgtttttatttgggcaagtttaatcatggaaaactcaaaaagaaggggggaaatggtcagtttaagccaaaag

SEQ ID NO: 106439 - DNA, 120 bp, Artificial Sequence
  ENSG00000099204_59 (sequence is synthesized)
aaactttctaaacaatgtataggtacacagcaaaattaaacaaatccaacaatttctgaagcttagtgtaattgagtggtggttgttattcaataaaattattcccaaaagtgtttctcc

SEQ ID NO: 106440 - DNA, 120 bp, Artificial Sequence
  ENSG00000099204_60 (sequence is synthesized)
taagagtgcagttcccatgagtcacttcctgaacccattgaccaaaggtggacagagacaatcctgtagaccttgacattcagaaagatgtgagctgcttactgatcatatatgcatacg

SEQ ID NO: 106441 - DNA, 120 bp, Artificial Sequence
  ENSG00000099204_61 (sequence is synthesized)
tttctttacagcagaggaaaccattgtccacaaaactgatgttcttttggggttttatgtacagacttgtccaatcatgtgtgtggttcctgcgagttgctgatgactccgcattgaagc

SEQ ID NO: 106442 - DNA, 120 bp, Artificial Sequence
  ENSG00000099204_62 (sequence is synthesized)
tctctgagttctttgattttaagttgggtttatggaattttttcaaatgttggaaggtgtgtggttcttcctgccctccctccccttttggaaatatgaaagcaaatgtttagaagaatt

SEQ ID NO: 106443 - DNA, 120 bp, Artificial Sequence
  ENSG00000099204_63 (sequence is synthesized)
ccttttgaaaagctgtgtcgtgttccctgtgaaactgagcaggtgtgtgttggcgcgctaagtgccacatgcttgtgtgtagaggaggaggtggccctgccggctccgcgctgctgtgcc

SEQ ID NO: 106444 - DNA, 120 bp, Artificial Sequence
  ENSG00000099204_64 (sequence is synthesized)
tgtgatccctacctgctccccgctcctgttgccagcagcactcactgcactcctttgtcatatactctgcatcactgtcatactcacaacttcgtgaataaagttgtgtgctttattcgt

SEQ ID NO: 106445 - DNA, 120 bp, Artificial Sequence
  ENSG00000099204_65 (sequence is synthesized)
ataccaggagtttgtcagggaactgtttccaaagccataatgaataatcaggctgttagtaaaagaagcctctccaagttatagcattttttaaaaattctagtagtgaagaaaataatt

SEQ ID NO: 106446 - DNA, 120 bp, Artificial Sequence
  ENSG00000099204_66 (sequence is synthesized)
aaaagcccatctggttgagatagtaattcattaaggaaaaagaggaggcagaaggctggggaataatcgatccttttctttctttatttcatgtgtttcagttattgtgaaatgatagtg

SEQ ID NO: 106447 - DNA, 120 bp, Artificial Sequence
  ENSG00000099204_67 (sequence is synthesized)
atcccgactgtaagcaatctacgaagaccgaggaaaagctgcggctgttatccccaccttgtctagtgaacttcaacaaaaacccaaggcagcctaccaggacatcctcggaaagtattt

SEQ ID NO: 106448 - DNA, 120 bp, Artificial Sequence
  ENSG00000099204_68 (sequence is synthesized)
tgcagaggttgtcgtacctgcgcaccagcagcctcagccccacccacagcgactcccgccccaacccccctttccgacaccacttcattccccatatcaaaggcaatgagccgtccagcg

SEQ ID NO: 106449 - DNA, 120 bp, Artificial Sequence
  ENSG00000099204_69 (sequence is synthesized)
ggcccgccgaggcggggcgggactcgagaccacagccccggacctcacaagcggatgccggggcttctcctggctgccccagcgcccgcggatctgtctgccgaggcgcgcttccactcc

SEQ ID NO: 106450 - DNA, 120 bp, Artificial Sequence
  ENSG00000099204_70 (sequence is synthesized)
cgagcttcggagagaagcctgatatgtaacccaggcaggtgggagcctcagtctgtcgggctgaggtctggcatctacaaagcctcttggccgtgttctgaacttgaagcctggaggagt

SEQ ID NO: 106451 - DNA, 120 bp, Artificial Sequence
  ENSG00000099204_71 (sequence is synthesized)
agacctggtaagggtgactgttcctggattcactctatataacaaactatgtttctgtgattttttcccctactattgatagcacattgaaaaatcaacgactaaacatttccatccctc

SEQ ID NO: 106452 - DNA, 120 bp, Artificial Sequence
  ENSG00000099204_72 (sequence is synthesized)
tcccagagcaaaatgaaaactggtatccaactatattttatgctctatcttttcttgaaacatcagtcatcctaagcctgtgttcattttgatttattaaataattatattttgacagcg

SEQ ID NO: 106453 - DNA, 120 bp, Artificial Sequence
  ENSG00000099204_73 (sequence is synthesized)
atttccacagacctgatcaaggaatcaacatttaccgaaagccacccatctacaaacagcatgtactgtttgaagtcatccttttgttgttaatttaagaataaaattctcagcatttga

SEQ ID NO: 106454 - DNA, 120 bp, Artificial Sequence
  ENSG00000099204_74 (sequence is synthesized)
ccgggcgttgtggttcttctgcaggtcctggtctcaggggccccaccccatcaatggtgctgaaattgttcacatcctgccatcataatgaacttgttgctataaaacttttgaaaagaa

SEQ ID NO: 106455 - DNA, 120 bp, Artificial Sequence
  ENSG00000099204_75 (sequence is synthesized)
ggggatgtcagcgggggagtgcgagattaccaggtatggaacactttgtctttcttgaattggccacaccgatagaacagccatgttccaacccagactgctggctccaaggcaacagtt

SEQ ID NO: 106456 - DNA, 120 bp, Artificial Sequence
  ENSG00000099204_76 (sequence is synthesized)
tctgttgagaagatgcttgttgtggttgatctctctagtcattactctatagccgtgaagagcagacatgcctggtgcctgggtcaagctgtccctgcaggccttggggacactgcatga

SEQ ID NO: 106457 - DNA, 120 bp, Artificial Sequence
  ENSG00000099204_77 (sequence is synthesized)
ggtctctcttgctttggccttggagagtcctctctggggtggaagtggaccagcatcaagggtctgctcatatacagtttttcttcttttaattataatctctcagtactttaggccacc

SEQ ID NO: 106458 - DNA, 120 bp, Artificial Sequence
  ENSG00000099204_78 (sequence is synthesized)
cttttcctgcgcgttctcaaatgaaaagacactgatgtcttagccaataggagagagcagtttgccctcatgacattcctttctcactagaacctcaatcttgttaaaaaaagaaagaaa

SEQ ID NO: 106459 - DNA, 120 bp, Artificial Sequence
  ENSG00000099204_79 (sequence is synthesized)
catttagaaaagaccaaggaccaaggagactgcccagagaatcaagattgttcagccaaattgtctgttttcagtgatcctttcctgggctgtcccatatataaaatcaactactcccta

SEQ ID NO: 106460 - DNA, 120 bp, Artificial Sequence
  ENSG00000099204_80 (sequence is synthesized)
gctccaccgtttggcatcccgactgtaagcaatctacgaagaccgaggaaaagctgcggctgccaaacattcggcgttcttcatccgatttcttttattccaaaagtctgattcgacgca

SEQ ID NO: 106461 - DNA, 120 bp, Artificial Sequence
  ENSG00000099219_0 (sequence is synthesized)
aggaggcgctgcggcagcgacggcggcgtcggcggcggccggggctgtcgcgggttggggcggttgggctggcagctgaggctcgtggccatggagtggggttctgagtcggctgctgtg

SEQ ID NO: 106462 - DNA, 120 bp, Artificial Sequence
  ENSG00000099219_1 (sequence is synthesized)
aggcggcaccgcgtcggagtagagcgtcgagagggagcggcggccgcgccaccgccggagagggaggcccgagcgcaggagcctctggtggatgggtgcagcggcggcgggaggacgcgg

SEQ ID NO: 106463 - DNA, 120 bp, Artificial Sequence
  ENSG00000099219_2 (sequence is synthesized)
aagaggagccccgggggtagcggcggcgcgagcaggggcgcggggaccgggctgtctgaggtgcgcgccgcgctggggctcgcgctctacctgatcgcgctgcggacgctggtgcagctc

SEQ ID NO: 106464 - DNA, 120 bp, Artificial Sequence
  ENSG00000099219_3 (sequence is synthesized)
tcgctgcagcagctcgtgctacgcggggccgctggacaccgcggggagttcgacgcgctccaagccagggattatcttgaacacataacctccattggccccaggactacaggaagtcca

SEQ ID NO: 106465 - DNA, 120 bp, Artificial Sequence
  ENSG00000099219_4 (sequence is synthesized)
gaaaatgaaattctgaccgtgcactaccttttggaacagattaaactgattgaagtgcaaagcaacagccttcataagatttcagtagatgtacaacggcccacaggctcttttagcatt

SEQ ID NO: 106466 - DNA, 120 bp, Artificial Sequence
  ENSG00000099219_5 (sequence is synthesized)
gatttcttgggaggttttacaagctattatgacaacatcaccaatgttgtggtaaagctggaacccagagatggagcccagcatgctgtcttggctaattgtcattttgactcagtagca

SEQ ID NO: 106467 - DNA, 120 bp, Artificial Sequence
  ENSG00000099219_6 (sequence is synthesized)
aactcaccaggtgccagtgatgatgcagttagctgctcagtgatgctggaagtccttcgcgtcttgtcaacatcttcagaagccttgcatcatgctgtcatatttctctttaatggtgct

SEQ ID NO: 106468 - DNA, 120 bp, Artificial Sequence
  ENSG00000099219_7 (sequence is synthesized)
gaggaaaatgtcttgcaagccagtcatggtttcattactcagcacccctgggctagcttgattcgtgcattcattaacctagaggcagcaggtgtaggagggaaagaacttgtattccaa

SEQ ID NO: 106469 - DNA, 120 bp, Artificial Sequence
  ENSG00000099219_8 (sequence is synthesized)
acaggtcctgaaaatccttggttggttcaagcttatgtttcagcagctaaacacccttttgcttctgtggtggctcaggaggtttttcagagtggaatcattccttcagatactgacttt

SEQ ID NO: 106470 - DNA, 120 bp, Artificial Sequence
  ENSG00000099219_9 (sequence is synthesized)
cgtatctacagggattttgggaacattccaggaatagacttagcttttattgagaatggatacatttatcacaccaagtatgacacagcggacagaattctaacagattccattcagaga

SEQ ID NO: 106471 - DNA, 120 bp, Artificial Sequence
  ENSG00000099219_10 (sequence is synthesized)
gcaggtgacaacattttagcagttcttaagcatctagctacatctgatatgctggctgctgcttctaagtatcgacatggaaacatggtcttctttgatgtgctgggcctgtttgtcatt

SEQ ID NO: 106472 - DNA, 120 bp, Artificial Sequence
  ENSG00000099219_11 (sequence is synthesized)
gcctacccctctcgtattggctcaatcataaactacatggtggtaatgggtgttgttttgtacctgggcaaaaaatttttgcagcccaaacataagactggtaactacaagaaggacttc

SEQ ID NO: 106473 - DNA, 120 bp, Artificial Sequence
  ENSG00000099219_12 (sequence is synthesized)
ttgtgtggacttggcatcactttgatcagctggttcactagccttgttaccgttctcattatagcagtgttcatctctcttattggacagtctctctcatggtataaccacttctatgtc

SEQ ID NO: 106474 - DNA, 120 bp, Artificial Sequence
  ENSG00000099219_13 (sequence is synthesized)
tccgtttgtctgtatggaactgcaactgtagccaaaataatacttatacatactcttgcgaaaagattttattacatgaatgccagtgcccagtatctgggagaagtattttttgacatt

SEQ ID NO: 106475 - DNA, 120 bp, Artificial Sequence
  ENSG00000099219_14 (sequence is synthesized)
tcgctgtttgtccattgctgttttcttgttaccctcacttaccaaggactttgctcggcgtttattagtgctgtctgggtagcattcccattgctcacaaagctctgtgtgcataaggac

SEQ ID NO: 106476 - DNA, 120 bp, Artificial Sequence
  ENSG00000099219_15 (sequence is synthesized)
ttcaagcagcatggtgcccaaggaaaatttattgctttttaccttttggggatgtttattccttatctttatgcattgtacctcatctgggcagtatttgagatgtttacccctatcctc

SEQ ID NO: 106477 - DNA, 120 bp, Artificial Sequence
  ENSG00000099219_16 (sequence is synthesized)
gggagaagtggttctgaaatcccacctgatgttgtgctggcatccattttggctggctgtacaatgattctctcgtcctattttattaacttcatctaccttgccaagagcacaaaaaaa

SEQ ID NO: 106478 - DNA, 120 bp, Artificial Sequence
  ENSG00000099219_17 (sequence is synthesized)
accatgctaactttaactttggtatgtgcaattacattcctccttgtttgcagtggaacattttttccatatagctccaatcctgctaatccgaagccaaagagagtgtttcttcagcat

SEQ ID NO: 106479 - DNA, 120 bp, Artificial Sequence
  ENSG00000099219_18 (sequence is synthesized)
atgactagaacattccatgacttggaaggaaatgcagttaaacgggactctggaatatggatcaatgggtttgattatactggaatttctcacataacccctcacattcctgagatcaat

SEQ ID NO: 106480 - DNA, 120 bp, Artificial Sequence
  ENSG00000099219_19 (sequence is synthesized)
gatagtatccgagctcactgtgaggagaatgcacctctttgtggttttccttggtatcttccagtgcactttctgatcaggaaaaactggtatcttcctgccccagaagtttctccaaga

SEQ ID NO: 106481 - DNA, 120 bp, Artificial Sequence
  ENSG00000099219_20 (sequence is synthesized)
aatcctcctcatttccgactcatatccaaagaacagacaccttgggattctataaaattgacttttgaagcaacaggaccaagccatatgtccttctatgttcgagcccacaaagggtca

SEQ ID NO: 106482 - DNA, 120 bp, Artificial Sequence
  ENSG00000099219_21 (sequence is synthesized)
acactttctcagtggtctcttggcaatggcaccccagtcacaagtaaaggaggagactactttgtcttttactcccatggactccaggcctctgcatggcagttctggatagaagtgcag

SEQ ID NO: 106483 - DNA, 120 bp, Artificial Sequence
  ENSG00000099219_22 (sequence is synthesized)
aggaaaagttcccagattggacatttccctctgcctgggtgtgcacctacgatctctttgtattttaatcttgtggatgagctctaagtacatgcccagtggatactccatgtgacatgg

SEQ ID NO: 106484 - DNA, 120 bp, Artificial Sequence
  ENSG00000099219_23 (sequence is synthesized)
tttctccctatgttacgtggatgtttgtaacgtaagtcaatgaattttaatgatcatatgttcaaagagctttctgggttaacgcttttcagggccaagcactataagggtttagctgtg

SEQ ID NO: 106485 - DNA, 120 bp, Artificial Sequence
  ENSG00000099219_24 (sequence is synthesized)
gcgcagtgatgcatggcctgttgacacttgaaaatgccagtcttttggcacttcagcacatgtgggtactgccactacacacacgtcattttatatgaccttaaggacaaagccaacaat

SEQ ID NO: 106486 - DNA, 120 bp, Artificial Sequence
  ENSG00000099219_25 (sequence is synthesized)
ccacttcaatagctgcccctttaggatcaagaaagatgtacactgtcagagcattgttaatgagacaaaagttgtttccaatttaagccccaaaaccatttgttgtattagtggatggtg

SEQ ID NO: 106487 - DNA, 120 bp, Artificial Sequence
  ENSG00000099219_26 (sequence is synthesized)
ggtaaaatatcattcactgaggtaatgattccccttgagaatataactctgtgtaggtcactggaaagtgattgccatagggctgggagagaagcattgcactcttgaggctgtagcctg

SEQ ID NO: 106488 - DNA, 120 bp, Artificial Sequence
  ENSG00000099219_27 (sequence is synthesized)
tgtcaagctgtttcttcaggcagcctctcaaatgtgctttgtctctctgtgctgaggcctggaccctgtgctgagctggtgactcactgtcctgacaagtggacacacagatgcactgct

SEQ ID NO: 106489 - DNA, 120 bp, Artificial Sequence
  ENSG00000099219_28 (sequence is synthesized)
gtgctgctttcctgaggtggttttctatgcctgttttcctctgaaacatgtctgttacccctctccatcttaccaagttgaaaaggggaatatttggccacatacccctctggttttcgt

SEQ ID NO: 106490 - DNA, 120 bp, Artificial Sequence
  ENSG00000099219_29 (sequence is synthesized)
aggttcttttggttcagaatattgtttgtgccagtacatgaccttaacttccttcctcagagcactgagctgccatctgggctattctggggtagaaggaaggctgggagtggtgggaat

SEQ ID NO: 106491 - DNA, 120 bp, Artificial Sequence
  ENSG00000099219_30 (sequence is synthesized)
tttataaatatttattctcttttctttgtttcataggagtcttgtgttatacaaggttagtccttcatggtataatcttactgatgcactgggcctatctttttgttttccagccagttg

SEQ ID NO: 106492 - DNA, 120 bp, Artificial Sequence
  ENSG00000099219_31 (sequence is synthesized)
aatagattagtttttctcagtaacttactatccagcagactggctttcctgagacttgaggttgtggcttatactggaatgagaccactgtacgtgtaggtggttcagatcctgcgtaat

SEQ ID NO: 106493 - DNA, 120 bp, Artificial Sequence
  ENSG00000099219_32 (sequence is synthesized)
ggcagcatgaggacttaaaaggtggttttcattttgaagatggctatgtagcttgtaaggtgtatcacagcagtacctctcatggctttttggttccagcagtgagggcattggtgagat

SEQ ID NO: 106494 - DNA, 120 bp, Artificial Sequence
  ENSG00000099219_33 (sequence is synthesized)
caatggtaaactgtgcaagctttctttttatcattaggaaatgtgaaacgttggacaaattttgagttttaacaaggacaaaaagttgaaagaaaaggcacagttaacaaaaaagggtgg

SEQ ID NO: 106495 - DNA, 120 bp, Artificial Sequence
  ENSG00000099219_34 (sequence is synthesized)
ctagatttatcttgggtgatggaggaaatgagagaggaatgctcttgaaaggtggtctgtggatctgtctgaatagaaagagcacagtaagtatgcattgccggagaaaacgtccttgaa

SEQ ID NO: 106496 - DNA, 120 bp, Artificial Sequence
  ENSG00000099219_35 (sequence is synthesized)
gctgcttgtctcatgtgtatgatgtgctttttaaatcatgcccctcgttgcctgcctaatctgtgactccctaaaaactaactgggcccatgtagatggggctgcaaccagagctgaata

SEQ ID NO: 106497 - DNA, 120 bp, Artificial Sequence
  ENSG00000099219_36 (sequence is synthesized)
acatgttaggctcacacatgcatcagcactgcacactggaatcattgctcttcctggactttgtagaaatcagtctcaagtgcttcaagagtctggctcctgctacttttatctgtcagg

SEQ ID NO: 106498 - DNA, 120 bp, Artificial Sequence
  ENSG00000099219_37 (sequence is synthesized)
tagcacataaggtttgcagggtttatattttgtatagaatcacagttgtggagaaaaagtaataatttctcaatgaattttaaaaatgggcctattttctatccccgtggttcatctgat

SEQ ID NO: 106499 - DNA, 120 bp, Artificial Sequence
  ENSG00000099219_38 (sequence is synthesized)
ataattagtgttccctgtgaattccccccctctatgggaaggatgcctttactctttatcagtaataaattatgactgttttcatattgccttagggttatttccctgtgtaaaccattg

SEQ ID NO: 106500 - DNA, 120 bp, Artificial Sequence
  ENSG00000099219_39 (sequence is synthesized)
tcttttgttttggttttctttagcattatgaagctttggtattgtacaaggtcagtagtaagatgctcactagtctcagggcttgtgtaatattctgggaggtcatttaaatgccagaaa

SEQ ID NO: 106501 - DNA, 120 bp, Artificial Sequence
  ENSG00000099219_40 (sequence is synthesized)
tggtcaagcaattatacacagtatttatgactctgttaagcataccgtttgtctgtcacattagtagattctgagattaaaaaaaatttttaaagagtgatcatttaaataatttctaaa

SEQ ID NO: 106502 - DNA, 120 bp, Artificial Sequence
  ENSG00000099219_41 (sequence is synthesized)
agggtcttttcaagctctaacaaagtcactaacaaatgcattattttctacagaattagatgttagtagtacagtactgcatattcagggaaaaagtgtgaggaattgatttcaaaatag

SEQ ID NO: 106503 - DNA, 120 bp, Artificial Sequence
  ENSG00000099219_42 (sequence is synthesized)
ttcgttcttgtgtttgacctaagaatgattgtcgcatgaagtgtttgtttttacagtttagcatatataaacaaacatgataggattccttaagatgttaccacccagggggccacaagc

SEQ ID NO: 106504 - DNA, 120 bp, Artificial Sequence
  ENSG00000099219_43 (sequence is synthesized)
cagcctgctgtctcaggaagctgtagaaggagtgtttgtcaatttcttgtcactggtttgctgacttactgaggattaattgttgccttacaatgttactgaaataaactgtttaatata

SEQ ID NO: 106505 - DNA, 120 bp, Artificial Sequence
  ENSG00000099219_44 (sequence is synthesized)
gcggggagttcgacgcgctccaagccaggtaccggccgctccctcctggcacggcccgcgcgtccgtttgcggctcctgcgcaggctccggggcaccgcacctgtgtgcacccgcccctg

SEQ ID NO: 106506 - DNA, 120 bp, Artificial Sequence
  ENSG00000099219_45 (sequence is synthesized)
ccggaccgctgggactcgctgacccctcccaggctgcacgtggggtggggtgaccttgcttgtccttcttctggggtctgaattgccgggacttggggcttgcctgtccccggttaagct

SEQ ID NO: 106507 - DNA, 120 bp, Artificial Sequence
  ENSG00000099219_46 (sequence is synthesized)
gcatttatttatcaaaagcaaattttaaatcttgaaagtatgtgagtaaacagcattttctgagatcaaattctttatgtgagaaatatacattgactcactaaaacagagtttgtttcc

SEQ ID NO: 106508 - DNA, 120 bp, Artificial Sequence
  ENSG00000099219_47 (sequence is synthesized)
ttgtaacagggaccagatggcatacttagtgttttctgtaaactgaatttactggcaggaacattttcagctgactgggataaactgatgcttcgattcctgaagaactcaaatccacca

SEQ ID NO: 106509 - DNA, 120 bp, Artificial Sequence
  ENSG00000099219_48 (sequence is synthesized)
cttgaactgggttcctaggattacacaccatatgcagtaccattagagaaagatgctacgtgggtgtatggcctagagaagatgtgtaacttttgcaactaacctgagctgtgggtgtgg

SEQ ID NO: 106510 - DNA, 120 bp, Artificial Sequence
  ENSG00000099219_49 (sequence is synthesized)
atggaggtgtctcagattctccagagccaatggctttaagaaatcgaatcatgtgtcgacaaaggtcccacttgccttgttctagtgctgtgttgaatagaagggtagcatgttgcctac

SEQ ID NO: 106511 - DNA, 120 bp, Artificial Sequence
  ENSG00000099219_50 (sequence is synthesized)
ttactgcagggacttccatattctacaaaaaacaaccaggacagcattctttttatactacacaatttgggaagatatgagcaattctttatctcgttttctaaactcaaagaatgtagc

SEQ ID NO: 106512 - DNA, 120 bp, Artificial Sequence
  ENSG00000099219_51 (sequence is synthesized)
cacaccaccacaggggttagtttaataataagattaaaaagtaccatacaaggaaaagcgaggcaagtactcttctggtgtatgtaaactataatttattaaactcctactacatgccag

SEQ ID NO: 106513 - DNA, 120 bp, Artificial Sequence
  ENSG00000099219_52 (sequence is synthesized)
atagcatacatatactttaagtcatttcatttatttctcccagtgactctgcagataggcatatcatttgtattttacaagtgaggaaactgagttaagtaaattgttgaagatcagcag

SEQ ID NO: 106514 - DNA, 120 bp, Artificial Sequence
  ENSG00000099246_0 (sequence is synthesized)
tggcagacgtggagcggcgcgcatgcgcagcagctcactctgctgaagggctgagaggcgcacccgggcggccagctgggctcggagcggaacggggtcaggatggacgaggacgtgcta

SEQ ID NO: 106515 - DNA, 120 bp, Artificial Sequence
  ENSG00000099246_1 (sequence is synthesized)
accaccctgaagatcctcatcatcggcgagagtggggtgggcaagtccagcctgctcttgaggttcacagatgatacgtttgatccagaacttgcagcaacaataggtgttgactttaag

SEQ ID NO: 106516 - DNA, 120 bp, Artificial Sequence
  ENSG00000099246_2 (sequence is synthesized)
gtgaaaacaatttcagtggatggaaataaggctaaacttgcaatatgggatactgctggtcaagagaggtttagaacattaactcccagctattatagaggtgcacagggtgttatatta

SEQ ID NO: 106517 - DNA, 120 bp, Artificial Sequence
  ENSG00000099246_3 (sequence is synthesized)
gtttatgatgtcacaagaagagatacatttgttaaactggataattggttaaatgaattggaaacatactgtacaagaaatgacatagtaaacatgctagttggaaataaaatcgataag

SEQ ID NO: 106518 - DNA, 120 bp, Artificial Sequence
  ENSG00000099246_4 (sequence is synthesized)
gaaaatcgtgaagtcgatagaaatgaaggcctgaaatttgcacgaaagcattccatgttatttatagaggcaagtgcaaaaacctgtgatggtgtacaatgtgcctttgaagaacttgtt

SEQ ID NO: 106519 - DNA, 120 bp, Artificial Sequence
  ENSG00000099246_5 (sequence is synthesized)
gaaaagatcattcagacccctggactgtgggaaagtgagaaccagaataaaggagtcaaactgtcacacagggaagaaggccaaggaggaggagcctgtggtggttattgctctgtgtta

SEQ ID NO: 106520 - DNA, 120 bp, Artificial Sequence
  ENSG00000099246_6 (sequence is synthesized)
taaactctgggaaattccatctcttgcatatttgatcagatagtgacatctttctgtatataaactctttaactgctattttagggaccttgcagtttgcacataattgttttatatcat

SEQ ID NO: 106521 - DNA, 120 bp, Artificial Sequence
  ENSG00000099246_7 (sequence is synthesized)
agcagtaaatatttgcaagaaatcccactcatcgaccccgggtaaaatgttatggtaagcatgcacagtttgcagtctacagtttttttatgtagcacaaaataggtgtacctttataag

SEQ ID NO: 106522 - DNA, 120 bp, Artificial Sequence
  ENSG00000099246_8 (sequence is synthesized)
tacattcaattttatgatttacatttatcatgtaatttttaaaaaaatccatctatctaggatatgttgatacaaagtctgcttttgctattctttttgcttaaatactcctatcatttt

SEQ ID NO: 106523 - DNA, 120 bp, Artificial Sequence
  ENSG00000099246_9 (sequence is synthesized)
ctgaattacttggtatttagaactcctagcaccacggggaagaatagaggtatcatcaaacgtggcaaattttctttcaggaataataaagagcatgattccacagcttttctgggatgt

SEQ ID NO: 106524 - DNA, 120 bp, Artificial Sequence
  ENSG00000099246_10 (sequence is synthesized)
ttgagattcttttttagtactaagcaaaattctcatcacagaatgtagcccaggccaatttataactaaatctctatttgttcggatgatgcttctaaaacagcattgataggttaaaga

SEQ ID NO: 106525 - DNA, 120 bp, Artificial Sequence
  ENSG00000099246_11 (sequence is synthesized)
agcttggtatttttaatttacttcaatgattagctcagttgcttaactggagttttaatcctgtgatatgtacattggattcatgactgtgcagcatttttagttatgtggtgtttggca

SEQ ID NO: 106526 - DNA, 120 bp, Artificial Sequence
  ENSG00000099246_12 (sequence is synthesized)
gaatgacaataaggttttcccccattttggtttcaggaggacatgaatagtgtgtttattgtaactcctcatacacttttaaaaccaacatcttttttcataaatgttggtagtgtttgt

SEQ ID NO: 106527 - DNA, 120 bp, Artificial Sequence
  ENSG00000099246_13 (sequence is synthesized)
ccaggtaccttaactgtagcttgtgtaatgttgatgaatatctgtatcttacggcttccataatggctagttgatattcaaaaacctatttctgtgttttgaggggtggggaaaaaaaac

SEQ ID NO: 106528 - DNA, 120 bp, Artificial Sequence
  ENSG00000099246_14 (sequence is synthesized)
actaagtgataatttgaaaaaggcatattgcttccagattctgatgtgtgagggaaaatactgtcacaatgaaaatcttgacaatttacttaacaagtaaccagtagttcatcaaaacca

SEQ ID NO: 106529 - DNA, 120 bp, Artificial Sequence
  ENSG00000099246_15 (sequence is synthesized)
acttgtacagactaataaatctttttcacagtattcagttttctcacctcttgctattgtatattgtagatttttttcattcatgtgttatttaatttacactgatctctgctattttaa

SEQ ID NO: 106530 - DNA, 120 bp, Artificial Sequence
  ENSG00000099246_16 (sequence is synthesized)
ccccccaaataagttatttgtcctttaaggttggttactataatacccctcagtaagattccagtattaatttctgggcagtttgttctctgtatacaattgcaaatgataagcattttt

SEQ ID NO: 106531 - DNA, 120 bp, Artificial Sequence
  ENSG00000099246_17 (sequence is synthesized)
gtgagtgaccacctttgcaatatgtttgttaatttacttcatgttgggttctttctgaaatgtacatctttacatataaaaacctcacattctacttgatttacacttcctagtctacat

SEQ ID NO: 106532 - DNA, 120 bp, Artificial Sequence
  ENSG00000099246_18 (sequence is synthesized)
tacatgtggttgaaggttttatacattctatatgcttttactaaatatacaagatttactactagaaatttggagaaagaacactaacacatgtacttgtgatttgttcatgttatatta

SEQ ID NO: 106533 - DNA, 120 bp, Artificial Sequence
  ENSG00000099246_19 (sequence is synthesized)
aaacttgagatttgtgtatttatgtagagtctgtattgacaagactgttgttttttgctccttgagctatataataatctgtgtattggattgttgtcttgatttggtctaaatttgaat

SEQ ID NO: 106534 - DNA, 120 bp, Artificial Sequence
  ENSG00000099246_20 (sequence is synthesized)
gcctgctttccctagatgcatttgtgtaggaagtatatacatttccctattactctcatcagctgaagaatatgtactattgtgttactcaaattatgtggctttcattttgttgttttg

SEQ ID NO: 106535 - DNA, 120 bp, Artificial Sequence
  ENSG00000099246_21 (sequence is synthesized)
ttgcaagcttagtgttttgtagtggaggttttgtaaatgaaacagttgtaatatctaaggtcaggcacctagtaacagggttttgttaattcttttcagaatcattgaagcagtcttaaa

SEQ ID NO: 106536 - DNA, 120 bp, Artificial Sequence
  ENSG00000099246_22 (sequence is synthesized)
gggtcttttgcagatggtacaaattagaacaattagaatatagtattttgagttctagtagtactgagattgacccaaacaaataaaaaactattcaatttctgagtaatagttaatatt

SEQ ID NO: 106537 - DNA, 120 bp, Artificial Sequence
  ENSG00000099246_23 (sequence is synthesized)
tattgaaagcttccttggtgccagatgcctttctaagtgctgaattatctcattaaacctcacagcaaccttaagagattagtactcctattatgcccattttaaaggtgaggacaacac

SEQ ID NO: 106538 - DNA, 120 bp, Artificial Sequence
  ENSG00000099246_24 (sequence is synthesized)
aatgtaggtatgttaggtaacccccaaagatcacatagctactcagtcactgagctggattccagtcatggcatttttacttctgagcccatactcttcaccatcgctcattttacaatg

SEQ ID NO: 106539 - DNA, 120 bp, Artificial Sequence
  ENSG00000099246_25 (sequence is synthesized)
ggtagttagttaccagctttttgtaacacaaccaagttaaggcagttccactatttctttatcactcttttgttatatgtaatagaagtatttcacacttttgggttatagagtaaatcc

SEQ ID NO: 106540 - DNA, 120 bp, Artificial Sequence
  ENSG00000099246_26 (sequence is synthesized)
catgatgtaaacctacctcataagtcatgtgacataaaagttaaggtagtggagtaggtggtcttatttctttcacctgctcagagtggactgaaaatcctgacttagaaaaggtacaaa

SEQ ID NO: 106541 - DNA, 120 bp, Artificial Sequence
  ENSG00000099246_27 (sequence is synthesized)
gttaggggacttatggtaccttcactttttatgtgagaatagaaattatggaaacagtaatttgctcaaaactgaaatctggggtgatgttttcatttcatgtatttgattgccatccat

SEQ ID NO: 106542 - DNA, 120 bp, Artificial Sequence
  ENSG00000099246_28 (sequence is synthesized)
aaactcatacttggtgttgacattctagctgagtgttgtggaaatagacttgattttgattcatcgtagcttgcatggtcaagagacatgattctctactaagggtggggctagcaccat

SEQ ID NO: 106543 - DNA, 120 bp, Artificial Sequence
  ENSG00000099246_29 (sequence is synthesized)
agctcataaaagaatccttcttacaccagtacttgttctgcctgtgagttggcacagacttacctaataaccatagtgtctttaagtacaacttaatacatattttttctgtgtattttt

SEQ ID NO: 106544 - DNA, 120 bp, Artificial Sequence
  ENSG00000099246_30 (sequence is synthesized)
ttcaaatgaactcaacaattcttcaggtattatagatcagagatcctctccatattcaagcattatgcttctctttcttgggggtacatttcactagtaatacttaggaagttattttgt

SEQ ID NO: 106545 - DNA, 120 bp, Artificial Sequence
  ENSG00000099246_31 (sequence is synthesized)
ctttcctgtatttccctagttaagtataggggtaaaaacgttattcagctttcagaagacattgttctgactccgaccctgccgtgtatactcaactatatagacttcaccctgggtttt

SEQ ID NO: 106546 - DNA, 120 bp, Artificial Sequence
  ENSG00000099246_32 (sequence is synthesized)
gcctaaactgttgaaagacgagaataaatagacatagacaggctagctaagtcaagactaggggctaaggaatatagaatcacccaggtctttttttttttttttaatttttctctcctc

SEQ ID NO: 106547 - DNA, 120 bp, Artificial Sequence
  ENSG00000099246_33 (sequence is synthesized)
agttgggaacatctatcatgctggaggactactgtgatggggctttacattttactgttttgttgctagcttattgtttcatacttgggaatcagtcatgtttctgattgtggtataaag

SEQ ID NO: 106548 - DNA, 120 bp, Artificial Sequence
  ENSG00000099246_34 (sequence is synthesized)
tttgcttaagtgccccttagttaaagctgttcaatgaatgtaagcacacacacacctacacacatattttgaatagtcgtgtgttcatgcctgttctcagtcttgtcccctttaccgttt

SEQ ID NO: 106549 - DNA, 120 bp, Artificial Sequence
  ENSG00000099246_35 (sequence is synthesized)
ctcatgcaggttatttcttgctttttttttttttcctcttttttaaccggagaagcaacaaattacgtagttttttttgtgtttctttgattactagtgagcttgagtacttttaatatt

SEQ ID NO: 106550 - DNA, 120 bp, Artificial Sequence
  ENSG00000099246_36 (sequence is synthesized)
ttattggatatgtttgtgactgactttaatttcttgtttgtgtgtgctgtggctgcccgatccagcacctacttccttctcccaccataccacccccacccccacccctgcaaacaattg

SEQ ID NO: 106551 - DNA, 120 bp, Artificial Sequence
  ENSG00000099246_37 (sequence is synthesized)
gcatgtggtttgggtggcattgtcacaccctcggctttctagattaacccagttaccttttagcagtgccccacttccccagtagcaatggttcaggggtaggcacctgacccagaccag

SEQ ID NO: 106552 - DNA, 120 bp, Artificial Sequence
  ENSG00000099246_38 (sequence is synthesized)
actactgagataaagatgtttgcctaggctttttcaggagcaattgaagacatcttgttggagatagtgtgctgggaggagtcacattctgaacttgctgcagctcgtttttctaatata

SEQ ID NO: 106553 - DNA, 120 bp, Artificial Sequence
  ENSG00000099246_39 (sequence is synthesized)
aaggaaccagcctgaggcagtaccagggtgagagggagtctattggagcccttgggaacttctggatcaaattggacctgaattgagatctatttctcagctttcacttatgtgagccaa

SEQ ID NO: 106554 - DNA, 120 bp, Artificial Sequence
  ENSG00000099246_40 (sequence is synthesized)
ctgaagatcctcatcatcggcgagagtggggtgggcaagtccagcctgctcttgaggttcacagatgatacgtttgatccagaacttgcagcaacaatagcagttggggaggagatgact

SEQ ID NO: 106555 - DNA, 120 bp, Artificial Sequence
  ENSG00000099246_41 (sequence is synthesized)
ggcactctggccttctgcataaacctcctacaaatatcaggttctggacaaccagcacttcttcagagatgaataatcaaaaggaattcattaagcttgactgccacaaatgtttggaaa

SEQ ID NO: 106556 - DNA, 120 bp, Artificial Sequence
  ENSG00000099246_42 (sequence is synthesized)
gcgcctgcctggttcccggcctttgccaggcccaagttctctgggtcgctctccctcctgtagcgccgagaaaacaccattccgagggccgccgctcggccggcagtcggctgtgaaaga

SEQ ID NO: 106557 - DNA, 120 bp, Artificial Sequence
  ENSG00000099246_43 (sequence is synthesized)
actggatcttgtgactgctggaaaatttcgctttagtgtaaggtccgagtgcttcagccgtgggccacctttgaaaataaaatgtaattgttatttctcattttgccacatcctgtggag

SEQ ID NO: 106558 - DNA, 120 bp, Artificial Sequence
  ENSG00000099246_44 (sequence is synthesized)
acagaagattagtgttgtgctttcattttttactttttccttggggaaaataatattgacagtggagttgagtataagcctgctcttgaggttcacagatgatacgtttgatccagaact

SEQ ID NO: 106559 - DNA, 120 bp, Artificial Sequence
  ENSG00000099246_45 (sequence is synthesized)
aacaatttcagtggatggaaataaggctaaacttgcaatatgggttactttgcatcagcagactgcaaactttttcttaaagagccagataggaaatagtccaatcctgaagtgggccat

SEQ ID NO: 106560 - DNA, 120 bp, Artificial Sequence
  ENSG00000099246_46 (sequence is synthesized)
agctcactctgctgaagggctgagaggcgcacccgggcggccagctgggctcggagcggaacggggtcaggatggacgaggacgtgctaaccaccctgaagatcctcatcatcgcctgct

SEQ ID NO: 106561 - DNA, 120 bp, Artificial Sequence
  ENSG00000099246_47 (sequence is synthesized)
cttgaggttcacagatgatacgtttgatccagaacttgcagcaacaataggtaagcctgtgtttaaaaattctatagaaatggccagtattttcttgcctttggcctttttaatctaaat

SEQ ID NO: 106562 - DNA, 120 bp, Artificial Sequence
  ENSG00000099246_48 (sequence is synthesized)
ccttctaccttcctctcaccaccccactgcctccatgtctgttgaaatcttatttgtccttcaagacttaattttggtatcattaaatctttgaagcctttctagatcttaccaagagaa

SEQ ID NO: 106563 - DNA, 120 bp, Artificial Sequence
  ENSG00000099246_49 (sequence is synthesized)
ttatctgttgtctcatgatactttattaaaactgctaatgtgattatctgtacacacatttctctcctatactatggattgtcttttattttgtaatatacaacagttatttgaatactt

SEQ ID NO: 106564 - DNA, 120 bp, Artificial Sequence
  ENSG00000099246_50 (sequence is synthesized)
attgtatgccagggactgctactaagaggaggggttataatagtgaataacaaacttggtctctgtcatcgtggacctaacagagtgtgttaattttgtatgttcagcatttgctacagt

SEQ ID NO: 106565 - DNA, 120 bp, Artificial Sequence
  ENSG00000099246_51 (sequence is synthesized)
gtttgacgtgtattcttatcttcacatatgtattgatactagttattaaggattgttaggagcaatgatacttaaatgccttttaaggataagatttagatcgcctgaaagtggttagtc

SEQ ID NO: 106566 - DNA, 120 bp, Artificial Sequence
  ENSG00000099250_0 (sequence is synthesized)
gccaaaacctttgaccagagtctccttgccagcattcctacctccctttggccagctatttgtgccagacacccggacctcccctgggcgccagctccgcggctccaacgggtccagaaa

SEQ ID NO: 106567 - DNA, 120 bp, Artificial Sequence
  ENSG00000099250_1 (sequence is synthesized)
gaaacaagccggattttttttttttcttcctggaaattggctttggtgtgtgttgccctacctccctcctccccctcccacccacagcccccccccggcctttttttttttttttttttt

SEQ ID NO: 106568 - DNA, 120 bp, Artificial Sequence
  ENSG00000099250_2 (sequence is synthesized)
gagacatggcccgggcagtggctcctggaagaggaacaagtgtgggaaaagggagaggaagccggagctaaatgacaggatgcaggcgacttgagacacaaaaagagaagcgttcctctc

SEQ ID NO: 106569 - DNA, 120 bp, Artificial Sequence
  ENSG00000099250_3 (sequence is synthesized)
ggatccaggcattgcctcgctgctttcttttctccaagacgggctgaggattgtacagctctaggcggagttggggctcttcggatcgcttagattctcctctttgctgcatttcccccc

SEQ ID NO: 106570 - DNA, 120 bp, Artificial Sequence
  ENSG00000099250_4 (sequence is synthesized)
acgtcctcgttctcccgcgtctgcctgcggacccggagaagggagaatggagagggggctgccgctcctctgcgccgtgctcgccctcgtcctcgccccggccggcgcttttcgcaacga

SEQ ID NO: 106571 - DNA, 120 bp, Artificial Sequence
  ENSG00000099250_5 (sequence is synthesized)
taaatgtggcgatactataaaaattgaaagccccgggtaccttacatctcctggttatcctcattcttatcacccaagtgaaaaatgcgaatggctgattcaggctccggacccatacca

SEQ ID NO: 106572 - DNA, 120 bp, Artificial Sequence
  ENSG00000099250_6 (sequence is synthesized)
gagaattatgatcaacttcaaccctcacttcgatttggaggacagagactgcaagtatgactacgtggaagtcttcgatggagaaaatgaaaatggacattttaggggaaagttctgtgg

SEQ ID NO: 106573 - DNA, 120 bp, Artificial Sequence
  ENSG00000099250_7 (sequence is synthesized)
aaagatagcccctcctcctgttgtgtcttcagggccatttctttttatcaaatttgtctctgactacgaaacacatggtgcaggattttccatacgttatgaaattttcaagagaggtcc

SEQ ID NO: 106574 - DNA, 120 bp, Artificial Sequence
  ENSG00000099250_8 (sequence is synthesized)
tgaatgttcccagaactacacaacacctagtggagtgataaagtcccccggattccctgaaaaatatcccaacagccttgaatgcacttatattgtctttgtgccaaagatgtcagagat

SEQ ID NO: 106575 - DNA, 120 bp, Artificial Sequence
  ENSG00000099250_9 (sequence is synthesized)
tatcctggaatttgaaagctttgacctggagcctgactcaaatcctccaggggggatgttctgtcgctacgaccggctagaaatctgggatggattccctgatgttggccctcacattgg

SEQ ID NO: 106576 - DNA, 120 bp, Artificial Sequence
  ENSG00000099250_10 (sequence is synthesized)
gcgttactgtggacagaaaacaccaggtcgaatccgatcctcatcgggcattctctccatggttttttacaccgacagcgcgatagcaaaagaaggtttctcagcaaactacagtgtctt

SEQ ID NO: 106577 - DNA, 120 bp, Artificial Sequence
  ENSG00000099250_11 (sequence is synthesized)
gcagagcagtgtctcagaagatttcaaatgtatggaagctctgggcatggaatcaggagaaattcattctgaccagatcacagcttcttcccagtatagcaccaactggtctgcagagcg

SEQ ID NO: 106578 - DNA, 120 bp, Artificial Sequence
  ENSG00000099250_12 (sequence is synthesized)
ctcccgcctgaactaccctgagaatgggtggactcccggagaggattcctaccgagagtggatacaggtagacttgggccttctgcgctttgtcacggctgtcgggacacagggcgccat

SEQ ID NO: 106579 - DNA, 120 bp, Artificial Sequence
  ENSG00000099250_13 (sequence is synthesized)
ttcaaaagaaaccaagaagaaatattatgtcaagacttacaagatcgacgttagctccaacggggaagactggatcaccataaaagaaggaaacaaacctgttctctttcagggaaacac

SEQ ID NO: 106580 - DNA, 120 bp, Artificial Sequence
  ENSG00000099250_14 (sequence is synthesized)
caaccccacagatgttgtggttgcagtattccccaaaccactgataactcgatttgtccgaatcaagcctgcaacttgggaaactggcatatctatgagatttgaagtatacggttgcaa

SEQ ID NO: 106581 - DNA, 120 bp, Artificial Sequence
  ENSG00000099250_15 (sequence is synthesized)
gataacagattatccttgctctggaatgttgggtatggtgtctggacttatttctgactcccagatcacatcatccaaccaaggggacagaaactggatgcctgaaaacatccgcctggt

SEQ ID NO: 106582 - DNA, 120 bp, Artificial Sequence
  ENSG00000099250_16 (sequence is synthesized)
aaccagtcgctctggctgggcacttccacccgcacctcattcctacatcaatgagtggctccaaatagacctgggggaggagaagatcgtgaggggcatcatcattcagggtgggaagca

SEQ ID NO: 106583 - DNA, 120 bp, Artificial Sequence
  ENSG00000099250_17 (sequence is synthesized)
ccgagagaacaaggtgttcatgaggaagttcaagatcgggtacagcaacaacggctcggactggaagatgatcatggatgacagcaaacgcaaggcgaagtcttttgagggcaacaacaa

SEQ ID NO: 106584 - DNA, 120 bp, Artificial Sequence
  ENSG00000099250_18 (sequence is synthesized)
ctatgatacacctgagctgcggacttttccagctctctccacgcgattcatcaggatctaccccgagagagccactcatggcggactggggctcagaatggagctgctgggctgtgaagt

SEQ ID NO: 106585 - DNA, 120 bp, Artificial Sequence
  ENSG00000099250_19 (sequence is synthesized)
ggaagcccctacagctggaccgaccactcccaacgggaacttggtggatgaatgtgatgacgaccaggccaactgccacagtggaacaggtgatgacttccagctcacaggtggcaccac

SEQ ID NO: 106586 - DNA, 120 bp, Artificial Sequence
  ENSG00000099250_20 (sequence is synthesized)
tgtgctggccacagaaaagcccacggtcatagacagcaccatacaatcagagtttccaacatatggttttaactgtgaatttggctggggctctcacaagaccttctgccactgggaaca

SEQ ID NO: 106587 - DNA, 120 bp, Artificial Sequence
  ENSG00000099250_21 (sequence is synthesized)
tgacaatcacgtgcagctcaagtggagtgtgttgaccagcaagacgggacccattcaggatcacacaggagatggcaacttcatctattcccaagctgacgaaaatcagaagggcaaagt

SEQ ID NO: 106588 - DNA, 120 bp, Artificial Sequence
  ENSG00000099250_22 (sequence is synthesized)
ggctcgcctggtgagccctgtggtttattcccagaactctgcccactgcatgaccttctggtatcacatgtctgggtcccacgtcggcacactcagggtcaaactgcgctaccagaagcc

SEQ ID NO: 106589 - DNA, 120 bp, Artificial Sequence
  ENSG00000099250_23 (sequence is synthesized)
agaggagtacgatcagctggtctggatggccattggacaccaaggtgaccactggaaggaagggcgtgtcttgctccacaagtctctgaaactttatcaggtgattttcgagggcgaaat

SEQ ID NO: 106590 - DNA, 120 bp, Artificial Sequence
  ENSG00000099250_24 (sequence is synthesized)
gaaaaggaaaccttggtgggattgctgtggatgacattagtattaataaccacatttcacaagaagattgtgcaaaaccagcagacctggataaaaagaacccagaaattaaaattgatg

SEQ ID NO: 106591 - DNA, 120 bp, Artificial Sequence
  ENSG00000099250_25 (sequence is synthesized)
aaacagggagcacgccaggatacgaaggtgaaggagaaggtgacaagaacatctccaggaagccaggcaatgtgttgaagaccttagaccccatcctcatcaccatcatagccatgagtg

SEQ ID NO: 106592 - DNA, 120 bp, Artificial Sequence
  ENSG00000099250_26 (sequence is synthesized)
ccctgggggtcctcctgggggctgtctgtggggtcgtgctgtactgtgcctgttggcataatgggatgtcagaaagaaacttgtctgccctggagaactataactttgaacttgtggatg

SEQ ID NO: 106593 - DNA, 120 bp, Artificial Sequence
  ENSG00000099250_27 (sequence is synthesized)
gtgtgaagttgaaaaaagacaaactgaatacacagagtacttattcggaggcatgaaggcagacagagatgaaaagacagtcaaaggacggaagtggaaggacgggagtgagctggggag

SEQ ID NO: 106594 - DNA, 120 bp, Artificial Sequence
  ENSG00000099250_28 (sequence is synthesized)
ctgttgatctttcactatacaggctgggaagtgtgttgatgaccactgagccaggcttttctcaggagcttcaatgagtatggccgacagacatggacaaggagctgtgttcaccatcgg

SEQ ID NO: 106595 - DNA, 120 bp, Artificial Sequence
  ENSG00000099250_29 (sequence is synthesized)
actcatgtgcagtcagcttttttcctgttggtttcatttgaataatcagatgctggtgttgagaccaagtatgattgacataatcattcatttcgacccctcctgcccctctctctctct

SEQ ID NO: 106596 - DNA, 120 bp, Artificial Sequence
  ENSG00000099250_30 (sequence is synthesized)
ctcctctcccctttgtggattctttttggaaactgagcgaaatccaagatgctggcaccaagcgtattccgtgtggccctttggatggacatgctacctgaaacccagtgcccagaatat

SEQ ID NO: 106597 - DNA, 120 bp, Artificial Sequence
  ENSG00000099250_31 (sequence is synthesized)
actagaatcaccgcatttcagtggactcctgaagttgtacttgtgtataattgcccgcgtcgtgcataggcaaagaaggattaggctgttttctttttaaagtactgtagcctcagtact

SEQ ID NO: 106598 - DNA, 120 bp, Artificial Sequence
  ENSG00000099250_32 (sequence is synthesized)
ggtgtagtgtgtcagctctgtttacgaagcaatactgtccagttttcttgctgtttttccggtgttgtactaaacctcgtgcttgtgaactccatacagaaaacggtgccatccctgaac

SEQ ID NO: 106599 - DNA, 120 bp, Artificial Sequence
  ENSG00000099250_33 (sequence is synthesized)
acggctggccactgggtatactgctgacaaccgcaacaacaaaaacacaaatccttggcactggctagtctatgtcctctcaagtgcctttttgtttgtactggttcattgtgttacatt

SEQ ID NO: 106600 - DNA, 120 bp, Artificial Sequence
  ENSG00000099250_34 (sequence is synthesized)
aacgacccactctgcttcttgctggtgaaagccctgctctttaatcaaactctggtggcccactgactaagaagaaagtttattttcgtgtgagatgccagcccctccgggcaggcaagg

SEQ ID NO: 106601 - DNA, 120 bp, Artificial Sequence
  ENSG00000099250_35 (sequence is synthesized)
gctctgaagatttggcaacgtggcttaattgttctgctttttctgtagttcaatttcatgtttcttgacccttttgtataaagctacaatattctctcttattgttctttcatatggaat

SEQ ID NO: 106602 - DNA, 120 bp, Artificial Sequence
  ENSG00000099250_36 (sequence is synthesized)
gtattttcaaatgtaaactctcttctctttctctctcctatctctctgtcttttttctctcttagaattggaggatttgccattgtccaggaaagaaacttgcagctttaacctgctggg

SEQ ID NO: 106603 - DNA, 120 bp, Artificial Sequence
  ENSG00000099250_37 (sequence is synthesized)
aatggcaaacgattttactagactttatgtttaaaaataaataaataagggaaattcctaactttgccctccaaagtctaactttggttttcttgttaactggttaaagtgacagtatct

SEQ ID NO: 106604 - DNA, 120 bp, Artificial Sequence
  ENSG00000099250_38 (sequence is synthesized)
tttttccttatctattctattcaaaatgacctttgatagaaatgttggcatttagtagaaatagtgataagttgaggaaagaaataatacaaattggctttcaagtgagacccaaaggaa

SEQ ID NO: 106605 - DNA, 120 bp, Artificial Sequence
  ENSG00000099250_39 (sequence is synthesized)
gaactggataaaatcttccaaatccaaaagcatgagatttttctatccaaatatgcaaaaatgacccaagagaactttcttattttgctactgagtcacacaagggaagtggaaggaaga

SEQ ID NO: 106606 - DNA, 120 bp, Artificial Sequence
  ENSG00000099250_40 (sequence is synthesized)
acagttaatttaagaatgaaactataaatcctgatgcctgggggtcaagtattttaagataagagggggaaaaacacataaagtcaaacaaatgttttaaaaattcataacagcaacctt

SEQ ID NO: 106607 - DNA, 120 bp, Artificial Sequence
  ENSG00000099250_41 (sequence is synthesized)
gaaaaaatagacttaaatgaatgcttctagaaacttccagcggctcacaaagaataagcctgccttagggctggcaacatctaagcctctaacagcacagggaagcaaatatcttaccag

SEQ ID NO: 106608 - DNA, 120 bp, Artificial Sequence
  ENSG00000099250_42 (sequence is synthesized)
gcagcctatgaattaacccaaagaagctttggttggttttggtggatttttatcatgccatgttggacatgagattttttagatcttccttcccacattgctagacgtctcactcaaaga

SEQ ID NO: 106609 - DNA, 120 bp, Artificial Sequence
  ENSG00000099250_43 (sequence is synthesized)
catttgttgggagtcacatttgcatcatagacgagacagtccattcatcttagttaaattggattgagaatgccttttgtttccaggaaaatattgatcaccatgaaagaagaatagttt

SEQ ID NO: 106610 - DNA, 120 bp, Artificial Sequence
  ENSG00000099250_44 (sequence is synthesized)
tttgtccccagagacattcatttagttgatataatcctaccagaaggaaagcactaagaaacactcgtttgttgtttttaaaggcaacagacttaaagttgtcctcagccaaggaaaaat

SEQ ID NO: 106611 - DNA, 120 bp, Artificial Sequence
  ENSG00000099250_45 (sequence is synthesized)
ccaaggaaaaatgatactgcaactttaaaatttaaagtatcttgcactgataaatatatttaaaaattatatgtttataaagttattaatttgtaaaggcagtgttacaaaatgttcagt

SEQ ID NO: 106612 - DNA, 120 bp, Artificial Sequence
  ENSG00000099250_46 (sequence is synthesized)
agattgttttgtaatttttaaaggtgtaaaataacatattttttctttatggaaatctataaaactttctgtagtaaaatgttttcattttactggtatattattgcttcatgttttgta

SEQ ID NO: 106613 - DNA, 120 bp, Artificial Sequence
  ENSG00000099250_47 (sequence is synthesized)
ccatcataagattttgtgcagattttttttacagaaattattattttctatgacaatatgacacttgtaaattgttgtttcaaaatgaacagcgaagccttaactttaaatgacatttgt

SEQ ID NO: 106614 - DNA, 120 bp, Artificial Sequence
  ENSG00000099250_48 (sequence is synthesized)
attctcagacactgagtagcataaaaaccacatagaactgaactgtaacttaaattccaaactatgactactacattccaaagaaacagttgaattaaacattttcataaaatatcccac

SEQ ID NO: 106615 - DNA, 120 bp, Artificial Sequence
  ENSG00000099250_49 (sequence is synthesized)
aagagatgggcagactccactcactgcagatgcgttcgttcaattcacggagaaatgtggtcatctggaaaaggagtctgctccctggatgcgaatctgtagcctggattctggaaggcg

SEQ ID NO: 106616 - DNA, 120 bp, Artificial Sequence
  ENSG00000099250_50 (sequence is synthesized)
atgctgatttaggaggtggagtgaatggagaattgaaaagacagcctggtggcagttttgaaagcacgcttgcaaaaattgtaatgagaacatgatgacagtgaaagagatctgacctaa

SEQ ID NO: 106617 - DNA, 120 bp, Artificial Sequence
  ENSG00000099250_51 (sequence is synthesized)
cattcctgggcataggccaaactaactttaggaggaacttatagtttaactttgaaacaaagacaatgacagctctttcccaaaacaaacccccttcctgcctggggactagattgcctt

SEQ ID NO: 106618 - DNA, 120 bp, Artificial Sequence
  ENSG00000099250_52 (sequence is synthesized)
caaaacaaacccccttcctgcctggggactagattgccttcgcaagactaacaaattagccacaaaattggaaattatggtttagggggaaaaaaatgaaattatggtttaggggtcatg

SEQ ID NO: 106619 - DNA, 120 bp, Artificial Sequence
  ENSG00000099250_53 (sequence is synthesized)
cagctggaggctgcaagactctgaacctccccaaattgcttctgggaataatgtcactgttgtaaaacctgagatcagtgcttcagatattttccagaccctgtacttgatggatcagct

SEQ ID NO: 106620 - DNA, 120 bp, Artificial Sequence
  ENSG00000099250_54 (sequence is synthesized)
ccacccagatcgataaactggctcatcctgtcttgtgtccctcaccagaaactgactcagcacaagaggacacctttgactccctgtgatttcacctcagacctgaccaatgagcacctg

SEQ ID NO: 106621 - DNA, 120 bp, Artificial Sequence
  ENSG00000099250_55 (sequence is synthesized)
cctgccccttttcaacccctgctcaacaaattacccttcaaaacctaaaccccaagtaataatagaacccccatctcccatacagttgtctctgcatgaattaaactctttctctattgc

SEQ ID NO: 106622 - DNA, 120 bp, Artificial Sequence
  ENSG00000099250_56 (sequence is synthesized)
aaatgtacaggatggggaaggacattggaaggtaaaggcagactgtcattctctgaagcgagaagtgcctgaaacattttttcaggcaaagcggttccatgtcctggtcatttcaaaaat

SEQ ID NO: 106623 - DNA, 120 bp, Artificial Sequence
  ENSG00000099250_57 (sequence is synthesized)
atccaagttcctacattttatggtatcatcagaatatgaagagccaaaagaatggatgatgtcattttctgttctataaacaataaatgtaatgtattaacaaagtaaatacaggcagaa

SEQ ID NO: 106624 - DNA, 120 bp, Artificial Sequence
  ENSG00000099250_58 (sequence is synthesized)
agtcaatgagacctcaaaaccttcatcataattccattttgctattatagactcaactcagagtcttactatttcatcttgctgattctcatcaatataataaactccatgggcatataa

SEQ ID NO: 106625 - DNA, 120 bp, Artificial Sequence
  ENSG00000099250_59 (sequence is synthesized)
gtgtgtgcttgtaactccgcatggcagagagctgcccaggaatagaagctgccttgccagaacacgtgcatcttcatttcctcatgtcatctggatagatgagttgttcttaatagccac

SEQ ID NO: 106626 - DNA, 120 bp, Artificial Sequence
  ENSG00000099250_60 (sequence is synthesized)
aaccatttgtaacaataatttgagccatttcgagagccaaaggctaggattatcttaattgaataagaatttccccatggctaaatgtactaaaccgatccttattttcattattttcag

SEQ ID NO: 106627 - DNA, 120 bp, Artificial Sequence
  ENSG00000099250_61 (sequence is synthesized)
acccccccccaataacacgtgcaccacccctacgtaaccacacacttcagaatgtttattttcattttctaatgaggacaagtttttttgagtggatcctttatccaacaaatggataaa

SEQ ID NO: 106628 - DNA, 120 bp, Artificial Sequence
  ENSG00000099250_62 (sequence is synthesized)
gttaggcttatatttgaagtgcggcttttaagttgggatttggtaaatcattgtacattaacatttacaaaggcagaattagctgctatttcacatcaccaccgaccagcaaatgcatca

SEQ ID NO: 106629 - DNA, 120 bp, Artificial Sequence
  ENSG00000099250_63 (sequence is synthesized)
gagatgttgtgtgccaaatgtctcactaattaatctagagtattactctctaatctcctaaaaccctaaaagctaggaaatgaccttctcttccacttggaatggcagaggaaatattag

SEQ ID NO: 106630 - DNA, 120 bp, Artificial Sequence
  ENSG00000099250_64 (sequence is synthesized)
gcaagtggagaaatgggattataccatttggaaattggccaaggcactagggttttcaccctgtggttgcaaaaggtatcgtgggacttttactgctccctgggtcaaaacgcagtttca

SEQ ID NO: 106631 - DNA, 120 bp, Artificial Sequence
  ENSG00000099250_65 (sequence is synthesized)
atagcatctgactctcatttgagattaaacatgagcttttgaatgcaggtctgcatttttacccagaagggactcggagagcccacataattaatttccatgggcaaaactgaaggcgtt

SEQ ID NO: 106632 - DNA, 120 bp, Artificial Sequence
  ENSG00000099250_66 (sequence is synthesized)
accatgtaacttcataataaagccatgttattggctaatgcattcgtacaaaatctggaaggaagtgtcctagagtacatttccaattatttcaaaagctctcctctgaaggagtgagag

SEQ ID NO: 106633 - DNA, 120 bp, Artificial Sequence
  ENSG00000099250_67 (sequence is synthesized)
ggctctgcactctaagatggaataaagagtaaaagaaagaaaaaaaaattgaaaatctgtcccagaaatttagtactgtgaactgagtttacatttaaatcccacctcctaaagctgtct

SEQ ID NO: 106634 - DNA, 120 bp, Artificial Sequence
  ENSG00000099250_68 (sequence is synthesized)
ctctccaaatttccaggataatcatttacattcatatggccaataaatgtcacattgctatgagcttttgaatgcaaatcttgtatacaagcagccacaagccacaaaacttagattaat

SEQ ID NO: 106635 - DNA, 120 bp, Artificial Sequence
  ENSG00000099250_69 (sequence is synthesized)
taatgcagagacattttctgtgtaacatgtcaagttcaagttgaaaactcaaccactgatataaaaaacagagtactattccatgaaccaagtcctctggaagcttcccggggttgcctg

SEQ ID NO: 106636 - DNA, 120 bp, Artificial Sequence
  ENSG00000099250_70 (sequence is synthesized)
taaacactctgccacaaacctcaggctttttacagaccccgtcacacatccatagtgaaatttctcataaaaaaggaatgattgcaggatcccagtgtgccctttcaattgccctcttgt

SEQ ID NO: 106637 - DNA, 120 bp, Artificial Sequence
  ENSG00000099250_71 (sequence is synthesized)
ggaaggggttcttttcttcataaaccctaaagtggtcagttaatattgattagaaacaaagcctcagatttactcctcatatcagaacaaccagccttctcatttttgcattagttcatg

SEQ ID NO: 106638 - DNA, 120 bp, Artificial Sequence
  ENSG00000099250_72 (sequence is synthesized)
actgaatcaattgaaactgaaggctttgaatgaaatagggcgagtatgttagcctggagcaaattgtgtatggcagcgagttacaaaccacagaaaatgggtcatttatagtggaaacac

SEQ ID NO: 106639 - DNA, 120 bp, Artificial Sequence
  ENSG00000099250_73 (sequence is synthesized)
tgacaacctttcaaaactataaggttttgctttacctacagtgtttcaattatttctttggtagatagaagaaagttcattctgattttttctttttacatattagcatggtgaaaaaaa

SEQ ID NO: 106640 - DNA, 120 bp, Artificial Sequence
  ENSG00000099250_74 (sequence is synthesized)
tggccacagaaaagcccacggtcatagacagcaccatacaatcagccaggctggaagtttccacattgaacctctcactccataaccctccccaacaaaaggcattgatctaaaaacata

SEQ ID NO: 106641 - DNA, 120 bp, Artificial Sequence
  ENSG00000099250_75 (sequence is synthesized)
tccgtgtatcagtggtgcgatcaaaatcttcctcttcaagcacatcattagaacccaggccattaagctcattgaaactgagtttcttttcctataaaataaaaataacgtagccttcac

SEQ ID NO: 106642 - DNA, 120 bp, Artificial Sequence
  ENSG00000099250_76 (sequence is synthesized)
gcagggtctctgggaaagacagacagacggacggggagagcactcggagggaaagttgttcctcccagtctcctgtcaggcaattacagacacccggacctcccctgggcgccagctccg

SEQ ID NO: 106643 - DNA, 120 bp, Artificial Sequence
  ENSG00000099250_77 (sequence is synthesized)
gcctctggcattctcccgaggaagggcttcttatttccttccagccatgacattagaggaggtgtgtgatggggtcagtaagacccttgattctaggaagacaggaatatggcatgaaaa

SEQ ID NO: 106644 - DNA, 120 bp, Artificial Sequence
  ENSG00000099250_78 (sequence is synthesized)
gtgatgtctgagataacatgcaaaagaattgcattgctggtcccattccctggctgtagggatggacagacagctcaacatgcagacaggagacggggaagcccaaggctgacagcagcc

SEQ ID NO: 106645 - DNA, 120 bp, Artificial Sequence
  ENSG00000099250_79 (sequence is synthesized)
atccagccagcgctcagaaccccttgcagataccactcagtcgtttgggtctgccctccccccatctcaaacctacccctagtttaagtgctttgtttcttttataaatttttattgtgg

SEQ ID NO: 106646 - DNA, 77 bp, Artificial Sequence
  ENSG00000099250_80 (sequence is synthesized)
taatcccagcactttgggatgccgagtcgggcggattgtctgagctcaggagttcgagaccagactggacagggtgt

SEQ ID NO: 106647 - DNA, 77 bp, Artificial Sequence
  ENSG00000099250_81 (sequence is synthesized)
acagggtgtggcagcgtgtgcctgtagtcctagctattctggaggctgaagcaggagaattgcttaaacccgggagg

SEQ ID NO: 106648 - DNA, 120 bp, Artificial Sequence
  ENSG00000099250_82 (sequence is synthesized)
gagtgagattccgtctcaaaaaaaaaaaattaattgtgataaaatacatataatatacaatttcccatcttaacctttttagtgtgcagttcaacagtgttaagtatgtgtatattgtgc

SEQ ID NO: 106649 - DNA, 120 bp, Artificial Sequence
  ENSG00000099250_83 (sequence is synthesized)
gtgttaagtatgtgtatattgtgcaaccaatctctagaactttctcatcttgcaaaactgaaactctacacccattaagcaacaactcccagtccccctgcccccagcctctggtgacca

SEQ ID NO: 106650 - DNA, 120 bp, Artificial Sequence
  ENSG00000099250_84 (sequence is synthesized)
cctccactttctgtctgtgtgaattcaaccattttagggacctcatactgtatttgtctttttgtgattggcttatgtcacttaggataatgttttcaagggccatcagtgttatagcat

SEQ ID NO: 106651 - DNA, 120 bp, Artificial Sequence
  ENSG00000099250_85 (sequence is synthesized)
tgtgtcagaatttccatccttcgaaaggctggataatattcattgtgtgtttataccacactttgtttatccattcagccactgatggacacttgaattgctgtcacctttagctattgt

SEQ ID NO: 106652 - DNA, 120 bp, Artificial Sequence
  ENSG00000099250_86 (sequence is synthesized)
gaataatgcttaagtatatttctttatgcgttgaaaccttttaagatgcagtaggctcttgataatccagtgaaaagaaaaggaaatctcaacacaaaaacattccattccaacatccac

SEQ ID NO: 106653 - DNA, 120 bp, Artificial Sequence
  ENSG00000099250_87 (sequence is synthesized)
caaaacccgtggtataatttttttcaaccaacaaatcaacctcagtcattatgttttacttagagtgatggctaaatttatttgcgaacatgcaacagcaacttggaaaggataccctgg

SEQ ID NO: 106654 - DNA, 120 bp, Artificial Sequence
  ENSG00000099250_88 (sequence is synthesized)
agtgtgctgggtggcccagaagctggtttaggattcaaatatggaccaacctacagacaactagcagtttaagttctgtgttcagtgtgggaattatattcagcgatggtatttctcaca

SEQ ID NO: 106655 - DNA, 120 bp, Artificial Sequence
  ENSG00000099250_89 (sequence is synthesized)
ccaatacaattggccttttggtcttagcctttccatccctgctttggccaggacctactcctcttgtgaaaaacagattttagcttattgaagggaatattaccctcactcccactctaa

SEQ ID NO: 106656 - DNA, 120 bp, Artificial Sequence
  ENSG00000099250_90 (sequence is synthesized)
gcaagtgtgggaacatggcttaatatagtgactcaagccagaggcattgcaggcagcaaagaagccaggctgtgctgccagctcccactccctccagatgtgaaggctccaaggaaacct

SEQ ID NO: 106657 - DNA, 120 bp, Artificial Sequence
  ENSG00000099250_91 (sequence is synthesized)
ccgtgtccccgacaggccaccggctaccactagagcagcgggccactggcagggctgggtgccatcagaaatatctgaatctctctcccatctctcccttccttaacttgtggtttctaa

SEQ ID NO: 106658 - DNA, 120 bp, Artificial Sequence
  ENSG00000099250_92 (sequence is synthesized)
aatattttcagtgttatatttatctctctgtgcagctaccttttttcttgtgtccctttcattttccccttttgtgccttgtttggggggaagaaaaagtaaaataaacatcagaaactg

SEQ ID NO: 106659 - DNA, 120 bp, Artificial Sequence
  ENSG00000099256_0 (sequence is synthesized)
gtcttcccttcccgcgttccccgggagaaacatggccgggagcagcgaggaggcgccagactacgggcgaggcgtcgtgattatggatgattggccagggtatgacttgaatttattcac

SEQ ID NO: 106660 - DNA, 120 bp, Artificial Sequence
  ENSG00000099256_1 (sequence is synthesized)
gtacccacagcactattatggagacttggagtatgtcctcatccctcatggtatcattgtggacagaattgagcggctggccaaggatattatgaaagacataggatatagtgacatcat

SEQ ID NO: 106661 - DNA, 120 bp, Artificial Sequence
  ENSG00000099256_2 (sequence is synthesized)
ggtcctgtgtgtgcttaaaggaggttacaaattctgtgctgatctcgtagaacaccttaagaacatcagccgaaattcagatcgatttgtctcaatgaaggttgatttcatcagactaaa

SEQ ID NO: 106662 - DNA, 120 bp, Artificial Sequence
  ENSG00000099256_3 (sequence is synthesized)
aagttacaggaatgaccagtccatgggtgagatgcagataatcggaggcgatgatctttcaacgctggctggaaagaatgttctcattgttgaggatgttgtcggaactgggaggaccat

SEQ ID NO: 106663 - DNA, 120 bp, Artificial Sequence
  ENSG00000099256_4 (sequence is synthesized)
gaaagcactactcagcaatatagagaaatacaagcccaacatgattaaggtagccagtttgttggtgaagagaacatccagaagtgacggctttagacctgactatgctggatttgagat

SEQ ID NO: 106664 - DNA, 120 bp, Artificial Sequence
  ENSG00000099256_5 (sequence is synthesized)
tccaaacttatttgtggtgggatatgccttagattacaatgaatacttcagagatctgaatcacatatgcgtcatcaatgagcacggtaaagaaaaatatcgagtctaaagacatgaatt

SEQ ID NO: 106665 - DNA, 120 bp, Artificial Sequence
  ENSG00000099256_6 (sequence is synthesized)
ctcaccactaaagtcccagatagcatcatatttacgcctgtacttgggaagccagctgtcaagtttgtccccccaggcatcttcactcagcaggatataaaagaaaaaaatgttcaaatg

SEQ ID NO: 106666 - DNA, 120 bp, Artificial Sequence
  ENSG00000099256_7 (sequence is synthesized)
agagagctttcttttctgaggttaatataaagagtatcaaaggttcctaaggaaaagaaagcagtgcttttatttgacttgttccaaattaaacactccgccttgtgactcagcaatgct

SEQ ID NO: 106667 - DNA, 120 bp, Artificial Sequence
  ENSG00000099256_8 (sequence is synthesized)
agctccgccttcctttgttttgatacagtcattatatttgattagtattcccaggaatacccccacctagttactcaaatatttttcacttaactttttatactcttattttggtaataa

SEQ ID NO: 106668 - DNA, 120 bp, Artificial Sequence
  ENSG00000099256_9 (sequence is synthesized)
gcttacaatattaagaagctggggacttttttttaactgaagacttgagtcccctataccgggaatgcagctattaatagattcccatattttaaaaggagggaaaggacaatttaatat

SEQ ID NO: 106669 - DNA, 120 bp, Artificial Sequence
  ENSG00000099256_10 (sequence is synthesized)
aaatttctgtttgtgcatttctgacaggccattattatctgctttgacaaagcctttctgaaacgcagtgtacaatgaatcttaatgatgttatgaaacgagctttgctcggggctcttg

SEQ ID NO: 106670 - DNA, 120 bp, Artificial Sequence
  ENSG00000099256_11 (sequence is synthesized)
attggagcttccggtatgtgatgacggtatgtcatgtatgcatggatgtactcaactgtgtttaatactctgaattttaattagaaaaaaatacaatagcagcaaggccctggtttctaa

SEQ ID NO: 106671 - DNA, 120 bp, Artificial Sequence
  ENSG00000099256_12 (sequence is synthesized)
gctgtatccttttattcatgtgggacatgagcaaatggcagaattaggggcgagtgctttcaatgctcgaaactaagcaagtataaatttttcctcttatttgcatgaaaggacaagaca

SEQ ID NO: 106672 - DNA, 120 bp, Artificial Sequence
  ENSG00000099256_13 (sequence is synthesized)
ctgttatgccctgtcctaaatgtgaagacagaggttgaattttttaaaaaatatctttaaaagactgatcacaaaatccaaggtgctacaggaaacaagcacactcaagaaagttttttt

SEQ ID NO: 106673 - DNA, 120 bp, Artificial Sequence
  ENSG00000099256_14 (sequence is synthesized)
ctgaataacatttttttccaatttctccgttttataagacatttcctaatttatggggattttaattgaaaataaacttgagtcccaatagagctgtttttttctcacttcctacaaaat

SEQ ID NO: 106674 - DNA, 120 bp, Artificial Sequence
  ENSG00000099256_15 (sequence is synthesized)
gcaaatgcaaaataaataactaagcagcttttgtttggttctgaaccgtatgtggcgtattgttattaggttctagcttcctttaaactaataaagaataagaaaacttgttatgtttta

SEQ ID NO: 106675 - DNA, 120 bp, Artificial Sequence
  ENSG00000099256_16 (sequence is synthesized)
ccatctgtgatagaggaggactggccttcagtcaagggtatatgagtagctgtgctcccctgcaagaatctccaaataccctctggagaggttacctccaagtgctcattccctgtttcc

SEQ ID NO: 106676 - DNA, 120 bp, Artificial Sequence
  ENSG00000099256_17 (sequence is synthesized)
acatccggtttcagttaccaagatcagagcagaattaggtctgagatccagtgaggtgtacagtagcacctggaccattctagggctcactgtcttcaagccctggctgtgcccacagtc

SEQ ID NO: 106677 - DNA, 120 bp, Artificial Sequence
  ENSG00000099256_18 (sequence is synthesized)
ttcatgaagaaactggacactgtgtctgctggatgatgtatttcttcttgcttgaggttatgaaaaatatcaaaatatgtaaagaaacatgctggataaaaatattgccttgaaatacaa

SEQ ID NO: 106678 - DNA, 120 bp, Artificial Sequence
  ENSG00000099260_0 (sequence is synthesized)
attacatgtgtctgtctggcctgatctgtgcatctgctcggagacgctcctgacaagtcgggaatttctctatttctccactggtgcaaagagcggatttctccctgcttctcttctgtc

SEQ ID NO: 106679 - DNA, 120 bp, Artificial Sequence
  ENSG00000099260_1 (sequence is synthesized)
acccccgctcctctcccccaggaggctccttgatttatggtagctttggacttgcttccccgtctgactgtccttgacttctagaatggaagaagctgagctggtgaagggaagactcca

SEQ ID NO: 106680 - DNA, 120 bp, Artificial Sequence
  ENSG00000099260_2 (sequence is synthesized)
ggccatcacagataaaagaaaaatacaggaagaaatctcacagaagcgtctgaaaatagaggaagacaaactaaagcaccagcatttgaagaaaaaggccttgagggagaaatggcttct

SEQ ID NO: 106681 - DNA, 120 bp, Artificial Sequence
  ENSG00000099260_3 (sequence is synthesized)
agatggaatcagcagcggaaaagaacaggaagagatgaagaagcaaaatcaacaagaccagcaccagatccaggttctagaacaaagtatcctcaggcttgagaaagagatccaagatct

SEQ ID NO: 106682 - DNA, 120 bp, Artificial Sequence
  ENSG00000099260_4 (sequence is synthesized)
tgaaaaagctgaactgcaaatctcaacgaaggaagaggccattttaaagaaactaaagtcaattgagcggacaacagaagacattataagatctgtgaaagtggaaagagaagaaagagc

SEQ ID NO: 106683 - DNA, 120 bp, Artificial Sequence
  ENSG00000099260_5 (sequence is synthesized)
agaagagtcaattgaggacatctatgctaatatccctgaccttccaaagtcctacataccttctaggttaaggaaggagataaatgaagaaaaagaagatgatgaacaaaataggaaagc

SEQ ID NO: 106684 - DNA, 120 bp, Artificial Sequence
  ENSG00000099260_6 (sequence is synthesized)
tttatatgccatggaaattaaagttgaaaaagacttgaagactggagaaagtacagttctgtcttcaatacctctgccatcagatgactttaaaggtacaggaataaaagtttatgatga

SEQ ID NO: 106685 - DNA, 120 bp, Artificial Sequence
  ENSG00000099260_7 (sequence is synthesized)
tgggcaaaagtcagtgtatgcagtaagttctaatcacagtgcagcatacaatggcaccgatggcctggcaccagttgaagtagaggaacttctaagacaagcctcagagagaaactctaa

SEQ ID NO: 106686 - DNA, 120 bp, Artificial Sequence
  ENSG00000099260_8 (sequence is synthesized)
atccccaacagagtatcatgagcctgtatatgccaatcccttttacaggcctacaaccccacagagagaaacggtgacccctggaccaaactttcaagaaaggataaagattaaaactaa

SEQ ID NO: 106687 - DNA, 120 bp, Artificial Sequence
  ENSG00000099260_9 (sequence is synthesized)
agaggaaaggggaaacaacttcaatcacatcagtcccattccgccagtgcctcatccccgatcagtgattcaacaagcagaagagaagcttcacaccccgcaaaaaaggctaatgactcc

SEQ ID NO: 106688 - DNA, 120 bp, Artificial Sequence
  ENSG00000099260_10 (sequence is synthesized)
ttgggaagaatcgaatgtcatgcaggacaaagatgcaccctctccaaagccaaggctgagccccagagagacaatatttgggaaatctgaacaccagaattcttcacccacttgtcagga

SEQ ID NO: 106689 - DNA, 120 bp, Artificial Sequence
  ENSG00000099260_11 (sequence is synthesized)
ggacgaggaagatgtcagatataatatcgttcattccctgcctccagacataaatgatacagaaccggtgacaatgattttcatggggtatcagcaggcagaagacagtgaagaagataa

SEQ ID NO: 106690 - DNA, 120 bp, Artificial Sequence
  ENSG00000099260_12 (sequence is synthesized)
gaagtttctgacaggatatgatgggatcatccatgctgagctggttgtgattgatgatgaggaggaggaggatgaaggagaagcagagaaaccgtcctaccaccccatagctccccatag

SEQ ID NO: 106691 - DNA, 120 bp, Artificial Sequence
  ENSG00000099260_13 (sequence is synthesized)
tcaggtgtaccagccagccaaaccaacaccacttcctagaaaaagatcagaagctagtcctcatgaaaacacaaatcataaatccccccacaaaaattccatatctctgaaagagcaaga

SEQ ID NO: 106692 - DNA, 120 bp, Artificial Sequence
  ENSG00000099260_14 (sequence is synthesized)
agaaagcttaggcagccctgtccaccattccccatttgatgctcagacaactggagatgggactgaggatccatccttaacagctttaaggatgagaatggcaaagctgggaaaaaaggt

SEQ ID NO: 106693 - DNA, 120 bp, Artificial Sequence
  ENSG00000099260_15 (sequence is synthesized)
gatctaagagttgtaccacctatataaacatcctttgaagaagaaactaagaagcatttgcaaatttctcttctggatattttgtttattttttctgaagtccaaaaaattatcattaca

SEQ ID NO: 106694 - DNA, 120 bp, Artificial Sequence
  ENSG00000099260_16 (sequence is synthesized)
gtgtaccatattaagccatgtgaataagtagtagtcattatttgtgaaaaattcccaaaaagctggggaaaacaaatgtgtaacttttccagttacttgacacgattcagtgggggaaaa

SEQ ID NO: 106695 - DNA, 120 bp, Artificial Sequence
  ENSG00000099260_17 (sequence is synthesized)
ccagcattttttattctattgataccaaagcatttctaataagagcttgttaaatttaagaataaagttatttaaaatattctgagtatagtatattaactggcattgtaattttgatga

SEQ ID NO: 106696 - DNA, 120 bp, Artificial Sequence
  ENSG00000099260_18 (sequence is synthesized)
tacaaagattgaaagatcataggaaagcattgcccttcatcacagaagtattcaactctgacaaataaatatgtcatcctgaattaataatgccttaataaaagtacatcctcctgctaa

SEQ ID NO: 106697 - DNA, 120 bp, Artificial Sequence
  ENSG00000099260_19 (sequence is synthesized)
aactggagatgggactgaggatccatccttaacaggtaataaaaatgacaaggcatgccactgctgttcagtcatgtgaccagcttctcttgtgctaatgcagtcttgctttcaggcttc

SEQ ID NO: 106698 - DNA, 120 bp, Artificial Sequence
  ENSG00000099260_20 (sequence is synthesized)
tctgaccacctcataaactaatacgcactgagatttttttattaatgctgatagagattattatcaccacagtaaagtgattaagtcacttcaaaagataaagaaagtaaaaataaatca

SEQ ID NO: 106699 - DNA, 120 bp, Artificial Sequence
  ENSG00000099260_21 (sequence is synthesized)
cccatgttgtgcatagacatgccattctcactttcaggggcataatcaaatcttccatttgaatttcttttttttttttttaaggcacgctttcacactgtcacccaggctggagtgcag

SEQ ID NO: 106700 - DNA, 83 bp, Artificial Sequence
  ENSG00000099260_22 (sequence is synthesized)
ggctcacggcaacttccactcccagggcggatgatgggcacccacaaccaatgcttggctaatttttgtatttttgtagagac

SEQ ID NO: 106701 - DNA, 120 bp, Artificial Sequence
  ENSG00000099260_23 (sequence is synthesized)
gtagagacagggtttcaccatgttgccctggctggtctagaactcctgagctcaaagtgatgcacctgcctcggcctcccgatgtacaggtgtgagccaccatggtcagccttccatatg

SEQ ID NO: 106702 - DNA, 120 bp, Artificial Sequence
  ENSG00000099260_24 (sequence is synthesized)
aatttctaaaaaagggattacaggtgtcagccaccgcggtcagccttccatatgaatttctaaaaaagactagggaaacacaccaaaaggccacagtagaaattttactataagtatcac

SEQ ID NO: 106703 - DNA, 120 bp, Artificial Sequence
  ENSG00000099260_25 (sequence is synthesized)
ctgagtatagcaacactagatttatttttaagtgcatattgatgacttactcatacctctctgagcctatttcctgcagaatggtagtaacaatgcctaacttttaaaaaatacatgcac

SEQ ID NO: 106704 - DNA, 120 bp, Artificial Sequence
  ENSG00000099260_26 (sequence is synthesized)
taaactaccagcacctacctagcacatggtaggtacacaaacaaaagtccttcttcacagccccagcccctactctcaccttaggacaggtgacaagtctacaggtgtgtttacccggtc

SEQ ID NO: 106705 - DNA, 120 bp, Artificial Sequence
  ENSG00000099260_27 (sequence is synthesized)
cttccatcatatttctctcaggcaccctccccagtcacaaccatgatattggaaagaaggttctataggaatactctactcacagtttccctcttctagttctttgatgatttggtcaca

SEQ ID NO: 106706 - DNA, 120 bp, Artificial Sequence
  ENSG00000099260_28 (sequence is synthesized)
gttctaaaattatcttggcttgaaataaggtgatggacaagaaaaaactggaaagctcaaatgtaagatgggattattagtattatcacatgcaaaaaagcacaaaagaaacagatacgg

SEQ ID NO: 106707 - DNA, 120 bp, Artificial Sequence
  ENSG00000099260_29 (sequence is synthesized)
gaaaggccagaatcattttctaacctacaaagggaaaatatttaaaagatggaatttcttgtgttataatcacgacaacaaattaaagtctacccatctttgaatatagacgactttcaa

SEQ ID NO: 106708 - DNA, 120 bp, Artificial Sequence
  ENSG00000099260_30 (sequence is synthesized)
aacctcattcgctataatgtattgcctttagtgaggactgtagaaaagatctgaaacacaaaagtatttggtatctgtgctacgaccgcattttgtccatactcactgcactatacaaac

SEQ ID NO: 106709 - DNA, 120 bp, Artificial Sequence
  ENSG00000099260_31 (sequence is synthesized)
agatctcattaggcttaagactgacaacatgaagaaagtcttcctctcttcaaatgatttccattttacttgattaattacatgcacttgtatattgaatagctaaaataactgactgtt

SEQ ID NO: 106710 - DNA, 120 bp, Artificial Sequence
  ENSG00000099260_32 (sequence is synthesized)
catccttatctagatgtttttgaaattaacaattcttaaaaggttatataattgaaatgtttgcatttataaacccctcagttatttactcaaagatttgaagtgcttctaaatagtgga

SEQ ID NO: 106711 - DNA, 120 bp, Artificial Sequence
  ENSG00000099260_33 (sequence is synthesized)
taataaatactttaaaaataacccaataaatcaactctatagtttggaaaactcaattcttatcaaggcatcccttagcaagacattctcaccaagatcccggcataagtgggtgattac

SEQ ID NO: 106712 - DNA, 120 bp, Artificial Sequence
  ENSG00000099260_34 (sequence is synthesized)
tttctttattcctcaacacagaacccttatctctgaaggagtcctgaatttaatccccgtaaacctttcccactgcacagacacctacttgcttcccctcaaaacctccttttagagtct

SEQ ID NO: 106713 - DNA, 120 bp, Artificial Sequence
  ENSG00000099260_35 (sequence is synthesized)
ttccacacactgaacacctacaactttctctgcatctgatgataattgaagtggctacatatactcaaactccattaacaggcttgggcagcattctgagtaatccgagtattaaccagg

SEQ ID NO: 106714 - DNA, 120 bp, Artificial Sequence
  ENSG00000099260_36 (sequence is synthesized)
actctactgattgcttttaggccttgcctgaatgctctgagaagcacacgagctcccagaagtattgacagtggctggtctagttagagctccttcctaaccaaaaattaaaaaggagaa

SEQ ID NO: 106715 - DNA, 120 bp, Artificial Sequence
  ENSG00000099260_37 (sequence is synthesized)
ggaaacttatccactcctgtggtgataaataccaactcccaaatgtatatcttcaaacccagacttctctgagctccagtcttgtatatccaactgtcttctccatatcacacttgattg

SEQ ID NO: 106716 - DNA, 120 bp, Artificial Sequence
  ENSG00000099260_38 (sequence is synthesized)
tctcaaatttaacacatcccccacaaatcccctttcttctctctcccagatttcttcagccaattgtattgcatgtttccaattattcaggtcacaaacagtggaatcaccttgacatct

SEQ ID NO: 106717 - DNA, 120 bp, Artificial Sequence
  ENSG00000099260_39 (sequence is synthesized)
ccctttctcttatcccctgcatgtaatcatcaacaaattctgacagctctttctgtcaaatatttctagaatccaaccacttctcacccttctactggcaaccaacctggattacaccat

SEQ ID NO: 106718 - DNA, 120 bp, Artificial Sequence
  ENSG00000099260_40 (sequence is synthesized)
cttcatctagatttttagcacaattgacctccatgtttgccccatccagtctattttccacacagcagccagtgtaactgtttacatttcaagtcatagcatgtttcctctctgttcaaa

SEQ ID NO: 106719 - DNA, 120 bp, Artificial Sequence
  ENSG00000099260_41 (sequence is synthesized)
attccagtggcttccccaaagcccttccatgcacaaggccctgcctatctggtcatctgcctcctctctgacttcatttcacctttctactctcttggctcttccttcgctctctatagt

SEQ ID NO: 106720 - DNA, 120 bp, Artificial Sequence
  ENSG00000099260_42 (sequence is synthesized)
tactcttccatctctctggagcacactccctttgaaaccctcatgtttcccgctctcacttccttcatgtctctgctcaaatgacactttatcagagaaacttccctcaccacactgtgt

SEQ ID NO: 106721 - DNA, 120 bp, Artificial Sequence
  ENSG00000099260_43 (sequence is synthesized)
gaaatagtgccccctcctcaggctttctctatattctttatcttgctgtttacagcccctatcctgcttttctcatcaaaaatattttttcttcataaataaatgtgtttatgtgtatat

SEQ ID NO: 106722 - DNA, 120 bp, Artificial Sequence
  ENSG00000099260_44 (sequence is synthesized)
atatgtatgtacatacatctgcaatatatacatatttgtattacacatttattaatgcagggattgacaaactatggcccaggaccaaatctagccctggcctgattttgtacagacaca

SEQ ID NO: 106723 - DNA, 120 bp, Artificial Sequence
  ENSG00000099260_45 (sequence is synthesized)
agctaaaaatggtttttatattattaaaaggctgtaaaagaaaaaggggaaaaaagatgaataagaaacagaaagcatatgtggactgcaaaacctaaaatatttggcatccggcccctt

SEQ ID NO: 106724 - DNA, 120 bp, Artificial Sequence
  ENSG00000099260_46 (sequence is synthesized)
atagaaaaaggttgccagcccctgtattgtctcccactagaacataaactccttgagctcagggactttgttttggtcactgtaagatccccagcacatagaagagtgcctggttcaaag

SEQ ID NO: 106725 - DNA, 120 bp, Artificial Sequence
  ENSG00000099260_47 (sequence is synthesized)
cctggttcaaagtagatgctaagtaaatatttttaaaagaatgaatgaataaagacaatgagttttattgtttgtttgtttgtttgttagcccagatctcactctgttgcccaggctgga

SEQ ID NO: 106726 - DNA, 90 bp, Artificial Sequence
  ENSG00000099260_48 (sequence is synthesized)
aagaccacaggtgtatgctcagctaattttttttaatatttgtagagactgaggtctcactatgttgtccaggctcatctctaactccta

SEQ ID NO: 106727 - DNA, 120 bp, Artificial Sequence
  ENSG00000099260_49 (sequence is synthesized)
gaggtctcactatgttgtccaggctcatctctaactcctaggctcaagcaatcttcctgcctcagcttcccaaagtgctggattataggcatgagccacttctctcagcccaacactgag

SEQ ID NO: 106728 - DNA, 120 bp, Artificial Sequence
  ENSG00000099260_50 (sequence is synthesized)
tcttagtgaggtcaggtgacttgtctaaggtcacacaggaagctggcagatgaaccaggtttcaaacccaggtccacctgattccacagctaggccctgatgtgcaagagctgcttgaag

SEQ ID NO: 106729 - DNA, 120 bp, Artificial Sequence
  ENSG00000099260_51 (sequence is synthesized)
caatgatttgaaccttcttgttttctaccaaaaggctttcctttgtagactgtctctaacaggcaaattaggtaagcaccctgtgggacaggggatgaaaaaagaaagacatacagtatg

SEQ ID NO: 106730 - DNA, 120 bp, Artificial Sequence
  ENSG00000099260_52 (sequence is synthesized)
ttgcagaaaacttttaaaaattatatcataacatatttacatctgatatcaaccatattcaatgtactttcatatacatcatctcttagtgtcaccacatatctgtctgtatatggtaat

SEQ ID NO: 106731 - DNA, 120 bp, Artificial Sequence
  ENSG00000099260_53 (sequence is synthesized)
gagcgtaatctgtaattatgctcattacacacattacaaaacagagtttcagagaggttaggggaactggctttcacaagaaatgagtagcagagacagaattgaatccagatttatcac

SEQ ID NO: 106732 - DNA, 120 bp, Artificial Sequence
  ENSG00000099260_54 (sequence is synthesized)
ttttagtgcagagctttcccctttaccaaattggaccaacatatatccccacagctctgctgaagggtaaaagtgctgccatggatgtggaggaattttaataaaatggcagtcacagtt

SEQ ID NO: 106733 - DNA, 120 bp, Artificial Sequence
  ENSG00000099260_55 (sequence is synthesized)
cagtcacttctaagaaaccaggggctactccatttcacttagaggtctgtggcatacaagaaaacctcctcagttataaacggcaatctaccaatggccagaggcagcagcaaagtaaga

SEQ ID NO: 106734 - DNA, 120 bp, Artificial Sequence
  ENSG00000099260_56 (sequence is synthesized)
actttgaaactgaagcaatgagcaagagagctgtcaagctgaccacatcttgggcttttactggtgtgacaatagtgcagcatttttgagctgccaggcccatgaccatcttcaagaagg

SEQ ID NO: 106735 - DNA, 120 bp, Artificial Sequence
  ENSG00000099260_57 (sequence is synthesized)
aagccaagaaaactgacagttctcttagctgacacgaatatccacagctgtcacctcctggaccagctgctgaatctaatcagccatcctctgaggcagctgactttagagccttagtgt

SEQ ID NO: 106736 - DNA, 120 bp, Artificial Sequence
  ENSG00000099260_58 (sequence is synthesized)
atttggctgagaaaccatgtgtgttacgtggctgccaagggccagccttctgcgtgattgccagtgtctctatgtttttatagaggagaggtcacgatgctgccccctggagttcatttg

SEQ ID NO: 106737 - DNA, 120 bp, Artificial Sequence
  ENSG00000099260_59 (sequence is synthesized)
ctgtacactggccaagataccagctcagaatgcttgcaacagtctagtttcaaatgtctgtctctttgttgctgtaagttccttatgctgtgtcaggccatgtgtgccctaccccccgcc

SEQ ID NO: 106738 - DNA, 120 bp, Artificial Sequence
  ENSG00000099260_60 (sequence is synthesized)
cagaaaatgtagcctctataaacagcagcagttgaagctactgtactatatttggtccatttctgcatctcttcaccctcctcactataatatggcccaactcttaggaaactgaaatta

SEQ ID NO: 106739 - DNA, 120 bp, Artificial Sequence
  ENSG00000099260_61 (sequence is synthesized)
tcaatggtagaatatgcaagaattttaagtactaaatgactatgattattaaatcagtttaataattataatgttttcttcaaataatttatatgatgacttggatatgaaaacctgatg

SEQ ID NO: 106740 - DNA, 120 bp, Artificial Sequence
  ENSG00000099260_62 (sequence is synthesized)
atatgaaaacctgatgaactacataataactacaaatgtaccattcctttcggtacaactttaaacttatgtctctgtattttaaaaatctcttttatttggaaataacattagtaattg

SEQ ID NO: 106741 - DNA, 120 bp, Artificial Sequence
  ENSG00000099260_63 (sequence is synthesized)
caatgaagaacatggagcaaaggtcaaatgctttacctaatatattcctttgtcaaaaaaagaaaacttgaaaatcgttcaaagtcgggcattaggtatcttccatatattaagtatcat

SEQ ID NO: 106742 - DNA, 120 bp, Artificial Sequence
  ENSG00000099260_64 (sequence is synthesized)
gcttagtgtgatgctaagtgtgacattatattcttagaaagtgtctggctacttacatgcatattccaaggaaactttatatatggggaagacatatttgagaactccgcatttgtactg

SEQ ID NO: 106743 - DNA, 120 bp, Artificial Sequence
  ENSG00000099282_0 (sequence is synthesized)
gtcagtcccggagagaacgccggtggcggggctggtagcccggcagccgcaggtggggccacgagcgctggctgagggaccgagccggagagccccggagcccccgtaacccgcgcgggg

SEQ ID NO: 106744 - DNA, 120 bp, Artificial Sequence
  ENSG00000099282_1 (sequence is synthesized)
agcgcccaggatgccgcgcggggactcggagcaggtgcgctactgcgcgcgcttctcctacctctggctcaagttttcacttatcatctattccaccgtgttctggctgattggggccct

SEQ ID NO: 106745 - DNA, 120 bp, Artificial Sequence
  ENSG00000099282_2 (sequence is synthesized)
ggtcctgtctgtgggcatctatgcagaggttgagcggcagaaatataaaacccttgaaagtgccttcctggctccagccatcatcctcatcctcctgggcgtcgtcatgttcatggtctc

SEQ ID NO: 106746 - DNA, 120 bp, Artificial Sequence
  ENSG00000099282_3 (sequence is synthesized)
cttcattggtgtgctggcgtccctccgtgacaacctgtaccttctccaagcattcatgtacatccttgggatctgcctcatcatggagctcattggtggcgtggtggccttgaccttccg

SEQ ID NO: 106747 - DNA, 120 bp, Artificial Sequence
  ENSG00000099282_4 (sequence is synthesized)
gaaccagaccattgacttcctgaacgacaacattcgaagaggaattgagaactactatgatgatctggacttcaaaaacatcatggactttgttcagaaaaagttcaagtgctgtggcgg

SEQ ID NO: 106748 - DNA, 120 bp, Artificial Sequence
  ENSG00000099282_5 (sequence is synthesized)
ggaggactaccgagattggagcaagaatcagtaccacgactgcagtgcccctggacccctggcctgtggggtgccctacacctgctgcatcaggaacacgacagaagttgtcaacaccat

SEQ ID NO: 106749 - DNA, 120 bp, Artificial Sequence
  ENSG00000099282_6 (sequence is synthesized)
gtgtggctacaaaactatcgacaaggagcgtttcagtgtgcaggatgtcatctacgtgcggggctgcaccaacgccgtgatcatctggttcatggacaactacaccatcatggcgggcat

SEQ ID NO: 106750 - DNA, 120 bp, Artificial Sequence
  ENSG00000099282_7 (sequence is synthesized)
agttcctgggggtgctgctgacgctgctgtacatcacccgggtggaggacatcatcatggagcactctgtcactgatgggctcctggggcccggtgccaagcccagcgtggaggcggcag

SEQ ID NO: 106751 - DNA, 120 bp, Artificial Sequence
  ENSG00000099282_8 (sequence is synthesized)
gcacgggatgctgcttgtgctaccccaattagggcccagcctgccatggcagctccaacaaggaccgtctgggatagcacctctcagtcaacatcgtggggctggacagggctgcggccc

SEQ ID NO: 106752 - DNA, 120 bp, Artificial Sequence
  ENSG00000099282_9 (sequence is synthesized)
ctctgcccacactcagtactgaccaaagccagggctgtgtgtgcctgtgtgtaggtcccacggcctctgcctccccagggagcagagcctgggcctcccctaagaggctttccccgaggc

SEQ ID NO: 106753 - DNA, 120 bp, Artificial Sequence
  ENSG00000099282_10 (sequence is synthesized)
agctctggaatctgtgcccacctggggcctggggaacaaggccctcctttctccaggcctgggctacgggggagggagagcctgaggctctgctcagggcccatttcatctctggcagtg

SEQ ID NO: 106754 - DNA, 120 bp, Artificial Sequence
  ENSG00000099282_11 (sequence is synthesized)
ccttggcggtggtattcaaggcagttttgtagcacctgtaattggggagagggagtgtgcccctcggggcaggagggaagggcatctggggaagggcaggagggaagagctgtccatgca

SEQ ID NO: 106755 - DNA, 120 bp, Artificial Sequence
  ENSG00000099282_12 (sequence is synthesized)
gccacgcccatggccaggttggcctcttctcagcctcccaggtgccttgagccctcttgcaagggcggctgcttccttgagcctagtttttttacgtgatttttgtaacattcatttttt

SEQ ID NO: 106756 - DNA, 120 bp, Artificial Sequence
  ENSG00000099282_13 (sequence is synthesized)
tgtacagataacaggagtttctgactaatcaaagctggtatttccccgcatgtcttattcttgcccttcccccaaccagtttgttaatcaaacaataaaaacatgttttttttttttttt

SEQ ID NO: 106757 - DNA, 120 bp, Artificial Sequence
  ENSG00000099282_14 (sequence is synthesized)
tccccagataacaggagtttctgactaatcaaagctggtatttccccgcatgtcttattcttgcccttcccccaaccagtttgttaatcaaacaataaaaacatgttttttttttttttt

SEQ ID NO: 106758 - DNA, 120 bp, Artificial Sequence
  ENSG00000099282_15 (sequence is synthesized)
ctgccatgttcctcccggcagggattgtcccagccctagccgagggggaccgagtgctgcagtgatgaggagaacagcccatgagggaggtcaggagacctgaattccagtcctggcaag

SEQ ID NO: 106759 - DNA, 120 bp, Artificial Sequence
  ENSG00000099282_16 (sequence is synthesized)
accccacccagcctgctctgtgacctcactccctccccaagtctcgagctcctcatctgtaaaacaagaggctggatggtggaggagtgtggagaggggctctggagggcaaagggaaga

SEQ ID NO: 106760 - DNA, 120 bp, Artificial Sequence
  ENSG00000099282_17 (sequence is synthesized)
tgggcatcctgcttccccaggtgggcaggccgtgggttcagagaaagtgtgacttggtgattgcagaagggcagagaaggtgcagaggggaagagcgaagaggcttttttcatagaagtc

SEQ ID NO: 106761 - DNA, 120 bp, Artificial Sequence
  ENSG00000099282_18 (sequence is synthesized)
gaggctggatggtggaggagtgtggagaggggctctggagggcaaagggaagattccagcgtgggcccatccctgggcggtagaaagagcactgggcctggaaccaggacagccaggtct

SEQ ID NO: 106762 - DNA, 120 bp, Artificial Sequence
  ENSG00000099282_19 (sequence is synthesized)
cagctcaggcatggcggcatcagagctgtgtgtccccaagcacggccccagcctctcagggcctgggctgtctggtctgcaaagggagtggagtgaattactcctgctgggacatagcac

SEQ ID NO: 106763 - DNA, 120 bp, Artificial Sequence
  ENSG00000099282_20 (sequence is synthesized)
gacaacctgtaccttctccaagcagtgagtggaccacaccacccctcagccgggactccccaggagagctggggcgcctgcccctgtgcccttgggcagctcagtttcttttgtccctgc

SEQ ID NO: 106764 - DNA, 120 bp, Artificial Sequence
  ENSG00000099282_21 (sequence is synthesized)
ctcaaaccacctcctttagagagctccttagatcagcccatctgaccacactggcccaagaatgcccaggccacctcccctcctgcatgtaaaagctgatttgaatactgttcttactta

SEQ ID NO: 106765 - DNA, 120 bp, Artificial Sequence
  ENSG00000099282_22 (sequence is synthesized)
cagaatctagggtcaccttctcatgctgcatatgggaaactgaggatcacagcggttgagggactagcctggaccttgtgtacatggcagagtcggggctgtggctcctgccagccgagg

SEQ ID NO: 106766 - DNA, 120 bp, Artificial Sequence
  ENSG00000099284_0 (sequence is synthesized)
agagaactgccgcttgccgccattgacacgcacagatagaacccaaagaaaggcaaagagtcctgcccggcaccggcgccgcgtgggccaaacctgcgcccgtggaggggcgcgcagagg

SEQ ID NO: 106767 - DNA, 120 bp, Artificial Sequence
  ENSG00000099284_1 (sequence is synthesized)
gcaccgggcgccgggagcaggcggcgcagcaccagcattgtgttagtgccgggaggccactgtgtcagcaagctgagagggaaactgaagcaagatgtcgggccggagtgggaagaagaa

SEQ ID NO: 106768 - DNA, 120 bp, Artificial Sequence
  ENSG00000099284_2 (sequence is synthesized)
aatgtccaagctgtcccgttcagctagggcaggtgtcatctttccagtggggaggctgatgcgttatctgaagaaagggacgttcaagtaccggatcagcgtgggcgcccctgtctacat

SEQ ID NO: 106769 - DNA, 120 bp, Artificial Sequence
  ENSG00000099284_3 (sequence is synthesized)
ggcggcagtcattgagtacctggcagcggaaattctagaattggccggcaatgccgcgagggacaacaagaaggcccggatagccccgagacacatcttgctggcagttgccaatgacga

SEQ ID NO: 106770 - DNA, 120 bp, Artificial Sequence
  ENSG00000099284_4 (sequence is synthesized)
ggagctcaaccagctgctaaaaggagtgaccatcgccagtggaggcgtcctgcccagaattcaccccgaactgctggccaaaaagcgagggaccaaaggcaagtcggaaacgatcctctc

SEQ ID NO: 106771 - DNA, 120 bp, Artificial Sequence
  ENSG00000099284_5 (sequence is synthesized)
cccacccccagagaaaagaggcaggaaggccacgtcaggcaagaagggggggaagaaatccaaggctgccaaaccacggacgtccaaaaagtccaaaccaaaggacagcgataaagaagg

SEQ ID NO: 106772 - DNA, 120 bp, Artificial Sequence
  ENSG00000099284_6 (sequence is synthesized)
aacttcaaattccacctctgaagatgggccaggggatggattcaccattctgtcttctaagagccttgttctgggacagaagctgtccttaacccagagtgacatcagccatattggctc

SEQ ID NO: 106773 - DNA, 120 bp, Artificial Sequence
  ENSG00000099284_7 (sequence is synthesized)
catgagagtggagggcattgtccacccaaccacagccgaaattgacctcaaagaagatataggtaaagccttggaaaaggctgggggaaaagagttcttggaaacggtaaaggagcttcg

SEQ ID NO: 106774 - DNA, 120 bp, Artificial Sequence
  ENSG00000099284_8 (sequence is synthesized)
ccctttggaagtcgccgaagccgccgtcagccaatccagtggactcgcagccaaatttgtcatccactgtcacatccctcagtggggctccgacaaatgtgaagaacagcttgaagagac

SEQ ID NO: 106775 - DNA, 120 bp, Artificial Sequence
  ENSG00000099284_9 (sequence is synthesized)
catcaaaaactgcctgtcagcggcggaggacaagaagctaaagtccgtcgcgttcccgcctttccccagcggcagaaactgctttcccaaacagactgcggcccaggtgaccctcaaagc

SEQ ID NO: 106776 - DNA, 120 bp, Artificial Sequence
  ENSG00000099284_10 (sequence is synthesized)
catctcagcccactttgatgactcgagcgcgtcctcgctgaagaacgtgtacttcctgctcttcgacagcgagagcatcggcatctacgtgcaggagatggccaagctcgacgccaagta

SEQ ID NO: 106777 - DNA, 120 bp, Artificial Sequence
  ENSG00000099284_11 (sequence is synthesized)
gccgccgcactttccagcagggatcggaggacgacccgagtcccaagagtggggttttgctttttaaaaggagagaggaggggtgatggcaggggagtggagggtggccgggcaggtcct

SEQ ID NO: 106778 - DNA, 120 bp, Artificial Sequence
  ENSG00000099284_12 (sequence is synthesized)
gccggcgcagggagccctctgcccttcacactctcctccaaaagagcctccatctgtaaggaagcaggtctccgcgaggggtttctttccatgtgttttcctcctgttgttttagaactt

SEQ ID NO: 106779 - DNA, 120 bp, Artificial Sequence
  ENSG00000099284_13 (sequence is synthesized)
ttttaaaaaaacagacctcgttttagatttatagcattgacttttacacacattcacacaagaaaaaaatcctttcaaaattcttaaatcttctgttcctcctttttccaagggaagagg

SEQ ID NO: 106780 - DNA, 120 bp, Artificial Sequence
  ENSG00000099284_14 (sequence is synthesized)
gcaaaaagtggcctgggctctgttggtgtgcgtgttccgtggcggagagaagaaaatgggaaagacatctcactggtgcttttctcttttgttttagtgccccccgcccccatccctata

SEQ ID NO: 106781 - DNA, 120 bp, Artificial Sequence
  ENSG00000099284_15 (sequence is synthesized)
atatctgtaactactcctaaaaaggttttgattcaggcttttttttggtttcattttgtttttttaagaaaaagaaaatgaaaggaaaaaaataaaagatccagtgtctttcttacaaca

SEQ ID NO: 106782 - DNA, 120 bp, Artificial Sequence
  ENSG00000099290_0 (sequence is synthesized)
agtcctcggcgtgtgctggcagcttcggagcccaccgagccgggcggctaggatgatgaaccggacgacccccgaccaggagctggcgccagcgtcggagcccgtgtgggagcggccgtg

SEQ ID NO: 106783 - DNA, 120 bp, Artificial Sequence
  ENSG00000099290_1 (sequence is synthesized)
gtcggtggaggagatccgcaggagcagccagagctggtcgctggcggccgacgcgggcctactacagtttctacaggaattctcacagcaaactatctctaggacccatgaaatcaagaa

SEQ ID NO: 106784 - DNA, 120 bp, Artificial Sequence
  ENSG00000099290_2 (sequence is synthesized)
acaagtggacggactaattcgggaaaccaaagccacagattgtcgcctgcataatgtcttcaatgacttccttatgctctctaatacccagttcattgagaatcgtgtatatgatgaaga

SEQ ID NO: 106785 - DNA, 120 bp, Artificial Sequence
  ENSG00000099290_3 (sequence is synthesized)
agtggaggagccagtactcaaggctgaggcagaaaaaacagagcaggagaagacacgagagcagaaagaagtagatctcattcctaaagtccaggaggctgtgaactatggcttacaagt

SEQ ID NO: 106786 - DNA, 120 bp, Artificial Sequence
  ENSG00000099290_4 (sequence is synthesized)
attggacagtgcctttgagcaacttgatatcaaagcaggaaactcagactccgaggaagatgatgctaatgggcgggtggaactgatccttgaaccaaaggatctatacattgatcgtcc

SEQ ID NO: 106787 - DNA, 120 bp, Artificial Sequence
  ENSG00000099290_5 (sequence is synthesized)
tttaccatatctcattgggtcaaagctgttcatggaacaagaagatgtaggtcttggagagctgtccagtgaagaaggctctgtaggcagtgatcgtggcagtattgtggacactgagga

SEQ ID NO: 106788 - DNA, 120 bp, Artificial Sequence
  ENSG00000099290_6 (sequence is synthesized)
agagaaagaagaggaggagtcagatgaagattttgcccatcatagtgacaatgaacaaaaccggcacaccacacaaatgagtgatgaggaagaggatgatgatggctgtgaccttttcgc

SEQ ID NO: 106789 - DNA, 120 bp, Artificial Sequence
  ENSG00000099290_7 (sequence is synthesized)
tgactctgagaaggaggaggaagatattgaggacattgaagaaaatactagacctaaaagaagcagacctacatcgtttgcagatgagctggctgcccgcatcaagggggatgccgtggg

SEQ ID NO: 106790 - DNA, 120 bp, Artificial Sequence
  ENSG00000099290_8 (sequence is synthesized)
tcgagtggacgaggagccgacaaccttaccctcaggagaagcaaaacctcggaagacactcaaagagaagaaggaaaggagaactccttcagacgatgaagaggataacttattcgcacc

SEQ ID NO: 106791 - DNA, 120 bp, Artificial Sequence
  ENSG00000099290_9 (sequence is synthesized)
ccccaagctgaccgacgaggacttctcgccatttggctctggaggtggcctgttcagtgggggcaaggggctctttgatgatgaggacgaggagagtgacctcttcacggaagcccccca

SEQ ID NO: 106792 - DNA, 120 bp, Artificial Sequence
  ENSG00000099290_10 (sequence is synthesized)
ggatcggcaagctggagcctctgttaaggaggagtcttcatcatccaaacctggaaagaaaatcccagcaggagctgtttctgtatttttaggagacacggatgtgtttggtgctgcctc

SEQ ID NO: 106793 - DNA, 120 bp, Artificial Sequence
  ENSG00000099290_11 (sequence is synthesized)
cgttccatcaatgaaggagccacagaagcctgagcagcccactccaaggaaaagcccctatggtccccctcccactggcctctttgatgatgatgatggtgatgatgatgacgacttttt

SEQ ID NO: 106794 - DNA, 120 bp, Artificial Sequence
  ENSG00000099290_12 (sequence is synthesized)
ctcggcaccccacagcaaaccttctaaaacaggcaaagtccaatccactgccgatatctttggtgacgaagaaggagatctgttcaaagaaaaagccgtagcatcgccagaagccactgt

SEQ ID NO: 106795 - DNA, 120 bp, Artificial Sequence
  ENSG00000099290_13 (sequence is synthesized)
gagtcagacagatgaaaataaagcaagagcagaaaaaaaggttaccttatcttccagcaaaaatctcaagccctcatcagaaacaaagactcaaaaaggcttattttcagatgaggagga

SEQ ID NO: 106796 - DNA, 120 bp, Artificial Sequence
  ENSG00000099290_14 (sequence is synthesized)
ctctgaggatttgttttcttctcaaagtgcgagtaagttaaaaggtgcgtctctgctgcctggcaagctccccacgttggtttccctgtttgatgatgaagatgaagaggataatctttt

SEQ ID NO: 106797 - DNA, 120 bp, Artificial Sequence
  ENSG00000099290_15 (sequence is synthesized)
tgggggtacagctgctaagaagcagacattgtgtctacaagctcagagagaagagaaagcaaaagcctccgagctctccaaaaagaaagcatctgccctgttgttcagcagtgatgagga

SEQ ID NO: 106798 - DNA, 120 bp, Artificial Sequence
  ENSG00000099290_16 (sequence is synthesized)
ggaccagtggaatattcctgcttcacagacccacttagcatctgacagcaggtctaaaggagaacccagggattctgggaccctccagagccaggaggccaaggctgtgaaaaagaccag

SEQ ID NO: 106799 - DNA, 120 bp, Artificial Sequence
  ENSG00000099290_17 (sequence is synthesized)
tctctttgaggaagacgaagaagatgatctttttgccattgccaaggacagccaaaagaagacccagagagtgtcactcctctttgaagacgatgttgatagcggaggctctctgtttgg

SEQ ID NO: 106800 - DNA, 120 bp, Artificial Sequence
  ENSG00000099290_18 (sequence is synthesized)
ctctcctcccacatctgttcctcctgcaacaaagaaaaaagagactgtctctgaggcaccacctttgctgttcagcgatgaagaagagaaggaggcacaacttggagtgaagtctgtgga

SEQ ID NO: 106801 - DNA, 120 bp, Artificial Sequence
  ENSG00000099290_19 (sequence is synthesized)
agatctgctcaggaaacagtcaagcattctgatttattttcttcatcatccccatgggacaaaggaaccaagcctagaaccaaaactgttcttagcttgtttgatgaggaagaggataaa

SEQ ID NO: 106802 - DNA, 120 bp, Artificial Sequence
  ENSG00000099290_20 (sequence is synthesized)
atggaagatcaaaacattatccaggctccacagaaagaagtaggaaagggccgcgatcctgatgcccaccccaagagcacaggtgtcttccaggatgaagagctgcttttcagccacaag

SEQ ID NO: 106803 - DNA, 120 bp, Artificial Sequence
  ENSG00000099290_21 (sequence is synthesized)
ctccaaaaggacaatgacccagatgttgacctttttgctggcaccaaaaaaaccaagctgttagagccaagtgttgggagcctgtttggggatgatgaagatgatgatcttttcagctct

SEQ ID NO: 106804 - DNA, 120 bp, Artificial Sequence
  ENSG00000099290_22 (sequence is synthesized)
gccaagtcccagcctttggtacaagagaaaaagagagtagtgaaaaaagaccactctgttgactctttcaaaaaccagaaacatcctgaatccattcaaggtagtaaagaaaaaggcata

SEQ ID NO: 106805 - DNA, 120 bp, Artificial Sequence
  ENSG00000099290_23 (sequence is synthesized)
tggaagccggaaacacctcaggactcatcaggtctcgctccatttaaaaccaaagaaccatccactcggatcgggaagatacaagcaaatttagcgatcaacccagcggccttgctgccc

SEQ ID NO: 106806 - DNA, 120 bp, Artificial Sequence
  ENSG00000099290_24 (sequence is synthesized)
acagcggcttcccagatctctgaagtaaagcctgttttgccagaattggcttttccttcatctgaacacagaaggagccacggtctggaaagtgtgcctgtccttcccgggagtggggag

SEQ ID NO: 106807 - DNA, 120 bp, Artificial Sequence
  ENSG00000099290_25 (sequence is synthesized)
gccggtgtgagttttgatcttccagctcaggcagacaccttacacagtgcaaacaagagccgtgtcaagatgagagggaagcgtagaccgcagacccgtgcagctaggcggctggctgct

SEQ ID NO: 106808 - DNA, 120 bp, Artificial Sequence
  ENSG00000099290_26 (sequence is synthesized)
caggagtccagcgagactgaggacatgagcgtccccagaggacccattgcacagtgggctgatggcgccatttccccaaatggccatcggccacagctcagagcagccagtggagaagac

SEQ ID NO: 106809 - DNA, 120 bp, Artificial Sequence
  ENSG00000099290_27 (sequence is synthesized)
agcactgaggaggccctggcagctgccgctgcaccttgggaaggtggtcctgtgcctggagtggacagaagcccctttgcaaagtctctgggtcattccagaggggaggctgaccttttt

SEQ ID NO: 106810 - DNA, 120 bp, Artificial Sequence
  ENSG00000099290_28 (sequence is synthesized)
gattctggggacatcttttccacgggcactggatctcagtctgtggagagaacaaaacccaaggcaaagatagcagagaatcctgccaacccaccagtgggtggtaaagcaaagagcccc

SEQ ID NO: 106811 - DNA, 120 bp, Artificial Sequence
  ENSG00000099290_29 (sequence is synthesized)
atgtttcctgctctaggtgaggccagcagtgatgatgatctctttcagtctgctaaaccaaaaccagcaaagaaaacaaatccctttcctctcctggaagatgaggatgacctctttaca

SEQ ID NO: 106812 - DNA, 120 bp, Artificial Sequence
  ENSG00000099290_30 (sequence is synthesized)
gatcagaaagtcaagaagaatgagacaaaatccaatagtcagcaggatgtcatattaacaacacaagatatttttgaggatgatatatttgctacggaagcaattaaaccctctcagaaa

SEQ ID NO: 106813 - DNA, 120 bp, Artificial Sequence
  ENSG00000099290_31 (sequence is synthesized)
accagagagaaggagaaaacattggaatctaatttatttgatgataacattgatatctttgctgacttaactgtaaaaccaaaagaaaagtccaaaaagaaagtggaagccaagtctata

SEQ ID NO: 106814 - DNA, 120 bp, Artificial Sequence
  ENSG00000099290_32 (sequence is synthesized)
tttgatgatgatatggatgacatcttctcctctggtatccaggctaagacaaccaaaccaaaaagccgatctgcacaggccgcacctgaaccaagatttgaacacaaggtgtccaacatc

SEQ ID NO: 106815 - DNA, 120 bp, Artificial Sequence
  ENSG00000099290_33 (sequence is synthesized)
tttgatgatcccctgaatgcctttggaggccagtagagcacacagggtatccacatgttaccctgcagctacattgttgagttagtgatgatgttgtatatgctgatggtcttaactgga

SEQ ID NO: 106816 - DNA, 120 bp, Artificial Sequence
  ENSG00000099290_34 (sequence is synthesized)
ttacaaaaagcaaatactagaacagctagctcatcgttcacccaatgtacttggtatttttctgcactggtttaatcatgcttaatactacaaaacaaaaataaatatttcacagtggtt

SEQ ID NO: 106817 - DNA, 120 bp, Artificial Sequence
  ENSG00000099290_35 (sequence is synthesized)
ggtttgttttgtttttaaaccacagtttgatttagttagccttgctggggccataatatgcttcagggtgtgtaaaagaagaaatctctttgtggctttcatgggcagggaatcccagag

SEQ ID NO: 106818 - DNA, 120 bp, Artificial Sequence
  ENSG00000099290_36 (sequence is synthesized)
atagcaaatgccacctgaccagaagtctttgttatatggatgggaaccctaacttagggcctgggcaggggaaagagaaagaaggtgagagattatacttcatgagtcttagcaatatgg

SEQ ID NO: 106819 - DNA, 120 bp, Artificial Sequence
  ENSG00000099290_37 (sequence is synthesized)
gagcaggttttcactgaattctgagggtgcctctgcatgtcctccaaggcaaagtttggcaaactgtggcccccccactgtcatattttgttaataaaattttattggaacacaaccaca

SEQ ID NO: 106820 - DNA, 120 bp, Artificial Sequence
  ENSG00000099290_38 (sequence is synthesized)
gtctgcattaaggaggaaacagcaaccagggctaccgctttgtcttcactgcactccccccaagtcatctcccctctcctcgctccacacgccagagtttcatgaatctatactttaata

SEQ ID NO: 106821 - DNA, 120 bp, Artificial Sequence
  ENSG00000099290_39 (sequence is synthesized)
gttagtgttttttgatgccatgccagatttaactctgaagtggagttaaggtaggatgaagaatcttcttcccactaaagaatttatttctccctctggatttccttggaatagaattaa

SEQ ID NO: 106822 - DNA, 120 bp, Artificial Sequence
  ENSG00000099308_0 (sequence is synthesized)
atggacgagtcgagcctcctgcggcgccgcgggctccagaaggagctgagcctgccacgccgaggacgtggctgccgcagcgggaaccgcaagagcttggtggtaggaacgccctccccg

SEQ ID NO: 106823 - DNA, 120 bp, Artificial Sequence
  ENSG00000099308_1 (sequence is synthesized)
accctctcccggcccctgtcgccattgtcggtcccaacggcaggcagcagccccttggatagtcctcggaatttctcggctgcctctgccctaaatttcccctttgcccggagggcagac

SEQ ID NO: 106824 - DNA, 120 bp, Artificial Sequence
  ENSG00000099308_2 (sequence is synthesized)
ggcagaagatggtccctcgcgtctctcccatcttccggctatggaaccaacacacccagctccaccctctcgtcaagctcatcctcccgggaacgtctccaccagcttcccttccagccg

SEQ ID NO: 106825 - DNA, 120 bp, Artificial Sequence
  ENSG00000099308_3 (sequence is synthesized)
acgccggacgagctgcacttcctgtccaagcacttccgcagctcagagaatgtgcttgatgaggaaggcggccggtcaccccgcctccgaccccgctctcgcagtctcagcccgggccgt

SEQ ID NO: 106826 - DNA, 120 bp, Artificial Sequence
  ENSG00000099308_4 (sequence is synthesized)
gcaacggggaccttcgacaatgagattgtcatgatgaatcacgtgtaccgggagaggttccccaaggccacagcacagatggagggccgtctgcaggagttcctgacggcctacgcgccc

SEQ ID NO: 106827 - DNA, 120 bp, Artificial Sequence
  ENSG00000099308_5 (sequence is synthesized)
ggcgcccggctggcgctggctgatggcgtcttgggcttcatccaccaccagatcgtcgagctggcccgagactgcttggccaagtctggcgagaacctcgtcacctcccgctacttccta

SEQ ID NO: 106828 - DNA, 120 bp, Artificial Sequence
  ENSG00000099308_6 (sequence is synthesized)
gagatgcaggagaagctggagcggcttctgcaggatgcccatgagcgttcggacagtgaggaggtcagcttcatcgtccagcttgtccggaaactgctgatcatcatctcacggccagct

SEQ ID NO: 106829 - DNA, 120 bp, Artificial Sequence
  ENSG00000099308_7 (sequence is synthesized)
cggctgctggagtgtctggagtttgaccctgaggaattttaccacctgctggaggcggctgagggccatgcgcgggagggccaaggcattaagactgaccttccacagtacatcattggg

SEQ ID NO: 106830 - DNA, 120 bp, Artificial Sequence
  ENSG00000099308_8 (sequence is synthesized)
cagctgggcctggccaaggaccccctggaggagatggtgccactgagtcacctcgaagaagaacagcccccagcacctgagtccccagagagccgcgccctggtcggccagtcacggagg

SEQ ID NO: 106831 - DNA, 120 bp, Artificial Sequence
  ENSG00000099308_9 (sequence is synthesized)
aagccatgcgaaagcgactttgagaccatcaaactcattagcaacggagcctatggggccgtctacctggtgcggcaccgtgacacacggcagcgctttgccatcaagaagatcaacaaa

SEQ ID NO: 106832 - DNA, 120 bp, Artificial Sequence
  ENSG00000099308_10 (sequence is synthesized)
cagaacttgatcctgcgtaaccagatccagcaggtctttgtggagcgtgacattctcacctttgccgagaacccctttgtggtcagcatgttctgctcctttgagacccggcgccaccta

SEQ ID NO: 106833 - DNA, 120 bp, Artificial Sequence
  ENSG00000099308_11 (sequence is synthesized)
tgtatggtcatggaatacgtggaaggcggcgactgcgccacgctcctgaagaacatgggcccgctgcccgtggacatggcccgcctgtacttcgccgagacggtgttggcgctggagtac

SEQ ID NO: 106834 - DNA, 120 bp, Artificial Sequence
  ENSG00000099308_12 (sequence is synthesized)
ctgcataactatggcatcgtgcaccgtgacctcaaaccagacaatctgctcatcacctcgcttggccacatcaagctcacggacttcggcctgtccaagatcggcctcatgagcatggcc

SEQ ID NO: 106835 - DNA, 120 bp, Artificial Sequence
  ENSG00000099308_13 (sequence is synthesized)
accaacctctatgagggccacatcgagaaggacgcccgagagttcatcgacaagcaggtgtgtgggacgccggagtacatagcccccgaggtgatcttccgccagggctatgggaagcca

SEQ ID NO: 106836 - DNA, 120 bp, Artificial Sequence
  ENSG00000099308_14 (sequence is synthesized)
gtggactggtgggccatgggcgtcgtcctctatgagtttctggtgggctgcgtgcctttctttggagatacccccgaggaactcttcggtcaggtggtcagcgatgagatcatgtggcca

SEQ ID NO: 106837 - DNA, 120 bp, Artificial Sequence
  ENSG00000099308_15 (sequence is synthesized)
gagggagatgaggcccttccagcagacgcccaggacctcatcaccaggttgctccggcagagcccgctggaccgtctgggcactggtggcacccacgaagtgaagcagcacccctttttc

SEQ ID NO: 106838 - DNA, 120 bp, Artificial Sequence
  ENSG00000099308_16 (sequence is synthesized)
ctggccctggactgggcagggcttctccgacacaaagccgagttcgtgccccagctcgaagctgaggatgataccagctactttgacacacgttcggaacgttaccgccatctgggctcc

SEQ ID NO: 106839 - DNA, 120 bp, Artificial Sequence
  ENSG00000099308_17 (sequence is synthesized)
gaggacgacgagaccaatgatgaagaatcgtccacagagatcccccagttctcctcctgctcccaccggttcagcaaggtctacagcagctctgagttcctggccgtccagcccactcct

SEQ ID NO: 106840 - DNA, 120 bp, Artificial Sequence
  ENSG00000099308_18 (sequence is synthesized)
accttcgctgaaaggagcttcagtgaagaccgggaggaggggtgggagcgcagcgaagtggactatggccgccggctgagtgctgacatccggctgaggtcctggacatcctctggatcc

SEQ ID NO: 106841 - DNA, 120 bp, Artificial Sequence
  ENSG00000099308_19 (sequence is synthesized)
tcctgtcagtcatcttcgtcccagcccgagcggggtcccagcccatctctcctgaataccatcagcctggacacaatgcccaagtttgccttctcatcagaggatgagggggtaggccca

SEQ ID NO: 106842 - DNA, 120 bp, Artificial Sequence
  ENSG00000099308_20 (sequence is synthesized)
ggccctgcaggccccaagaggcccgtcttcattctaggggagcctgaccccccaccagcggccaccccagtgatgcccaagccctcgagcctttctgccgacacagctgctctcagccac

SEQ ID NO: 106843 - DNA, 120 bp, Artificial Sequence
  ENSG00000099308_21 (sequence is synthesized)
gcccgcctacggagcaatagcatcggcgcccgacactccacaccaaggcctctggatgccggccggggccgccgccttgggggcccaagagacccagcccctgagaagtccagagcctcc

SEQ ID NO: 106844 - DNA, 120 bp, Artificial Sequence
  ENSG00000099308_22 (sequence is synthesized)
tccagcggtggcagtggtggcggcagtgggggccgcgtgcccaagtcagcctctgtctctgccctgtccctcatcatcacggcagatgatggcagcggcggccccctcatgagccccctt

SEQ ID NO: 106845 - DNA, 120 bp, Artificial Sequence
  ENSG00000099308_23 (sequence is synthesized)
tccccgcgctctctgtcctcgaacccgtcgtcccgtgactcttcgccgagccgagacccgtcccccgtgtgtggcagcctgcggccccccatcgttatccacagctctggcaagaagtac

SEQ ID NO: 106846 - DNA, 120 bp, Artificial Sequence
  ENSG00000099308_24 (sequence is synthesized)
cgatccgcgtctacatgggtgatagcgacgtctacactgtgcaccacgtcgtctggagtgtggaggacggaagccccgcccaggaggcgggcctgcgggctggggacctcatcacccaca

SEQ ID NO: 106847 - DNA, 120 bp, Artificial Sequence
  ENSG00000099308_25 (sequence is synthesized)
tcaacggggagtcagtgctggggctggtgcacatggacgtcgtggagctgctgctgaagagcggcaacaagatatccctgcggaccacagccctggagaacacctccatcaaggtgggcc

SEQ ID NO: 106848 - DNA, 120 bp, Artificial Sequence
  ENSG00000099308_26 (sequence is synthesized)
ccgcccggaagaatgtggccaagggccgcatggcacgcaggagcaagaggagccgtcggcgggagacccaggatcggcggaagtcacttttcaagaagatctccaagcagacctccgtgc

SEQ ID NO: 106849 - DNA, 120 bp, Artificial Sequence
  ENSG00000099308_27 (sequence is synthesized)
tgcacaccagccgcagcttctcctccggactccaccactcactgtcatccagtgagagcctccccggctcgcccacccacagcctctcccccagccccaccactccctgccgaagcccag

SEQ ID NO: 106850 - DNA, 120 bp, Artificial Sequence
  ENSG00000099308_28 (sequence is synthesized)
cccctgatgtcccagcagataccactgcatccccacccagcgcatccccgagctccagcagccccgcctccccagctgctgctggccacacccgccccagctccctgcacggcctggctg

SEQ ID NO: 106851 - DNA, 120 bp, Artificial Sequence
  ENSG00000099308_29 (sequence is synthesized)
cctggctgccaagcttgggccaccccgccccaagactggccgccgcaagtccaccagcagcatcccgccctccccgctggcctgcccgcccatctccgcgcccccaccccgctcgccctc

SEQ ID NO: 106852 - DNA, 120 bp, Artificial Sequence
  ENSG00000099308_30 (sequence is synthesized)
ccgcccgcacctgcccgatccccgcggctgcgccggggccagtcagctgacaagctgggcacaggggagcggctggatggggaggcggggcggcgcactcgtgggccagaggccgagctc

SEQ ID NO: 106853 - DNA, 120 bp, Artificial Sequence
  ENSG00000099308_31 (sequence is synthesized)
ccgagctcgtggtcatgcggcggctgcacctgtccgagcgccgagactccttcaagaagcaggaggccgtgcaggaggttagcttcgatgagccgcaggaggaggccactgggctgccca

SEQ ID NO: 106854 - DNA, 120 bp, Artificial Sequence
  ENSG00000099308_32 (sequence is synthesized)
cctcagtgccacagatcgccgtggagggcgaggaagccgtgccagtagctctcgggcccaccggaagagactgatcccctgccaggtctctccctggcatcaaagttacgcgttttcttg

SEQ ID NO: 106855 - DNA, 120 bp, Artificial Sequence
  ENSG00000099308_33 (sequence is synthesized)
tgcaatgttttttccgtaaagtcatgcctggatggggactgagccaccagcctgacacccagaaggcgagaagccatctcggtccttgctggaaggtggagacatcgcttgtgttctggt

SEQ ID NO: 106856 - DNA, 120 bp, Artificial Sequence
  ENSG00000099308_34 (sequence is synthesized)
gacatcgcttgtgttctggtgtcaatcggggctggatggggcaagaatgggggacaagggtggctttgtaaatagcagcaaatccctgcaactaatttattactttttttttcttttttt

SEQ ID NO: 106857 - DNA, 120 bp, Artificial Sequence
  ENSG00000099308_35 (sequence is synthesized)
caggcgtgagccactgggcccagcctaatttattactttttataagcgatagccgtactgagccgccccctgaaggcggctgccaggtcttgccccaggcacctgggactctgtttgcag

SEQ ID NO: 106858 - DNA, 120 bp, Artificial Sequence
  ENSG00000099308_36 (sequence is synthesized)
gtttgcaggccctgccctctgggctgagaaggatgcactttggacaagtcatctgtgtttgtgttttccagtttttctgtactttttaagtgttttgtgttacctggtctcattcccctc

SEQ ID NO: 106859 - DNA, 120 bp, Artificial Sequence
  ENSG00000099308_37 (sequence is synthesized)
cccacacctacccatttgaggggatggagttgaagtcacctggtcacctgtaccggcccagttcggctacaacctggagtgtccgtaaacaattcctctcacccacaaaacaatgtaatc

SEQ ID NO: 106860 - DNA, 120 bp, Artificial Sequence
  ENSG00000099308_38 (sequence is synthesized)
ccagcgatggactggattctgaaggccacttcccaccatcatagctgccatgcccaggcagtgcctgctctatatatagagtctgcctccaatcctgctggcttcagcctggagaaggga

SEQ ID NO: 106861 - DNA, 120 bp, Artificial Sequence
  ENSG00000099308_39 (sequence is synthesized)
tatgggagctggagctttgatggatgaataggtgttcaccggatctgggcagaggggtcatccgctccccaggtgggcactgataaaggaaggtacaggcctcacctggaactgccaagg

SEQ ID NO: 106862 - DNA, 120 bp, Artificial Sequence
  ENSG00000099308_40 (sequence is synthesized)
cagcctccagaaatgctcggctgtctcggggcacgctccagtatgccagtcctgcgggattacgtccagctacttccagaaacactcagtgtcccctcccctcaggctctgccttggcct

SEQ ID NO: 106863 - DNA, 120 bp, Artificial Sequence
  ENSG00000099308_41 (sequence is synthesized)
ggccttgtccagtctaccctggacaagatgccgtgtgtttgaggcccagcagagtaagcccttggccgtgatgtgtctgaaacacctgttaggggttccctccatatgtcagagcctctc

SEQ ID NO: 106864 - DNA, 120 bp, Artificial Sequence
  ENSG00000099308_42 (sequence is synthesized)
tgggatgaagttcaagccagaaaacccagtcgaggctcaagtttgaatttcagcttcactgtgtggctctgggaaaatggctttcccactctgtgcctcagtttccttgtgtttacaaga

SEQ ID NO: 106865 - DNA, 120 bp, Artificial Sequence
  ENSG00000099308_43 (sequence is synthesized)
ctaatcccattgactgtttattaagcacctactgtgtgccaagcgcttttacgtggcttctccctcagccagccttgagaaggctggaggtggtgtcatcacctccattttacagacaaa

SEQ ID NO: 106866 - DNA, 120 bp, Artificial Sequence
  ENSG00000099308_44 (sequence is synthesized)
gcagctgagaccccagcgaggggcggagacctgtcccacgatcacccagcaggagtcgtggcagaacggagcatcagccagaccctgttgtgggcgttgtcatcaagggagcttgaatgg

SEQ ID NO: 106867 - DNA, 120 bp, Artificial Sequence
  ENSG00000099308_45 (sequence is synthesized)
agggtctggtgtcagatacagccgactccagccccagctcatcccccatgatgctgtgtgacccactgggcactctggtgagggagctttccagacatcaacagcccactctgcttccct

SEQ ID NO: 106868 - DNA, 120 bp, Artificial Sequence
  ENSG00000099308_46 (sequence is synthesized)
ttctgagtcccctgtccagcactgcctagtgttggagggtagaccaaggctgtgcatgattcaccccctccttccatcctggagctggcagtgaataaaagcccgtatttacaaagatga

SEQ ID NO: 106869 - DNA, 120 bp, Artificial Sequence
  ENSG00000099308_47 (sequence is synthesized)
ccccggcccctccctgggctggtgtggaggcccaagttgtggctcctccttcaccccagccctgaccctgcctgagcctagcctctgattcttgtccctcaaccctggctcagatccccc

SEQ ID NO: 106870 - DNA, 120 bp, Artificial Sequence
  ENSG00000099308_48 (sequence is synthesized)
ctgagtgctgacatccggggagcctgaccccccaccagcggccaccccagtgatgcccaagccctcgagcctttctgccgacacagctgctctcagccacgcccgcctacggagcaatag

SEQ ID NO: 106871 - DNA, 120 bp, Artificial Sequence
  ENSG00000099308_49 (sequence is synthesized)
gcccccgcgtctagtctgccgcaccagccaggcgtctgtccctgcgtccgtgtgtccgtccgtcggtccgctcgcgccacgatcagggcttccgggggccaacaagggggcgtcggtacc

SEQ ID NO: 106872 - DNA, 120 bp, Artificial Sequence
  ENSG00000099308_50 (sequence is synthesized)
ccgccgcacagaggcggcctctgcctcggcatgaagtcccgcagggacaagctgcacatcccggcgctgaccctcgatctgtctccgagcagccagagcccgtccctgctgggtcccagc

SEQ ID NO: 106873 - DNA, 120 bp, Artificial Sequence
  ENSG00000099308_51 (sequence is synthesized)
atggttgaggcccaggcagctcctgcatccccctcctaccccagcagggctcacacattcatccttgaatgggcagagaaggcacctgaggactggagggggaagtggagacacgccata

SEQ ID NO: 106874 - DNA, 120 bp, Artificial Sequence
  ENSG00000099308_52 (sequence is synthesized)
gcgaggttacagcctcatgtgtgctctgtccacgagccaggcctttacctgccccaggtgtagggcgttctaggggcttgggggctgatcaaggaaatagatgcccacccagtgggagta

SEQ ID NO: 106875 - DNA, 120 bp, Artificial Sequence
  ENSG00000099308_53 (sequence is synthesized)
gcacgcagtgagctttatttaggtgctgctttgaatggcaggcttgcatacaagggaagtccctcatagcataagccttttggaggctgaggttccaggagtcaccatcaagagggagag

SEQ ID NO: 106876 - DNA, 120 bp, Artificial Sequence
  ENSG00000099326_0 (sequence is synthesized)
aggcggtgctgccgtctgttgtacctgagaggcttgcgcatgccgacgcacggattcgaggcggggagcatgggaagaagcggccaggagtatgacctgatcattgcgaccaccgctagg

SEQ ID NO: 106877 - DNA, 120 bp, Artificial Sequence
  ENSG00000099326_1 (sequence is synthesized)
ggaagggaggagagggtgtagaaacggggacgagggtgggggaagggcaaggaggcgctcgagctggtgcgcggagcatcctgggagacgtagtccagcgggagggggaagtcgaagact

SEQ ID NO: 106878 - DNA, 120 bp, Artificial Sequence
  ENSG00000099326_2 (sequence is synthesized)
gcgcgtgctcaggagcgcggagcggcccgctgagcgcagaggggcagacactggcctcagatacctgacctggtaccctctatgaggcctgcggtgctgggctccccagaccgagcaccc

SEQ ID NO: 106879 - DNA, 120 bp, Artificial Sequence
  ENSG00000099326_3 (sequence is synthesized)
ccagaagatgaggggcctgtcatggtgaagctagaggactctgaggaggagggtgaggctgccttatgggacccaggccctgaagctgcacgcctgcgtttccggtgcttccgctatgag

SEQ ID NO: 106880 - DNA, 120 bp, Artificial Sequence
  ENSG00000099326_4 (sequence is synthesized)
gaggccacagggccccaagaggccctggcccagctccgagagctgtgtcgccagtggctgcgtccagaggtacgctccaaggagcagatgctggagctgttggtgctggagcagttcctg

SEQ ID NO: 106881 - DNA, 120 bp, Artificial Sequence
  ENSG00000099326_5 (sequence is synthesized)
ggcgcactgccccctgagatccaggcccgtgtgcaggggcagcggccaggcagccccgaggaggctgctgccctagtagatgggctgcgccgggagccgggcggaccccggagatgggtc

SEQ ID NO: 106882 - DNA, 120 bp, Artificial Sequence
  ENSG00000099326_6 (sequence is synthesized)
acagtccaggtgcagggccaggaggtcctatcagagaagatggagccctccagtttccagcccctacctgaaactgagcctccaactccagagcctgggcccaagacacctcctaggact

SEQ ID NO: 106883 - DNA, 120 bp, Artificial Sequence
  ENSG00000099326_7 (sequence is synthesized)
atgcaggaatcaccactgggcctgcaggtgaaagaggagtcagaggttacagaggactcagatttcctggagtctgggcctctagctgccacccaggagtctgtacccaccctcctgcct

SEQ ID NO: 106884 - DNA, 120 bp, Artificial Sequence
  ENSG00000099326_8 (sequence is synthesized)
gaggaggcccagagatgtgggaccgtgctggaccagatctttccccacagcaagactgggcctgagggtccctcatggagggagcaccccagggccctgtggcatgaggaagctgggggc

SEQ ID NO: 106885 - DNA, 120 bp, Artificial Sequence
  ENSG00000099326_9 (sequence is synthesized)
atcttctccccagggttcgcgctgcagctaggcagcatctccgcaggtccaggtagtgtaagccctcacctccacgtcccctgggacctcggcatggctggcctttctggccagatccaa

SEQ ID NO: 106886 - DNA, 120 bp, Artificial Sequence
  ENSG00000099326_10 (sequence is synthesized)
tcaccctcccgcgaaggtggctttgcgcatgcgcttctgctccccagcgatctgaggagtgaacaggaccccacggacgaggatccctgccggggtgtgggccctgctctgatcaccacc

SEQ ID NO: 106887 - DNA, 120 bp, Artificial Sequence
  ENSG00000099326_11 (sequence is synthesized)
ccggggccgccccagcactgggggcggggtggttaggggcggccgttgcgatgtatgtggcaaggtgttcagccaacgcagcaacctgctgaggcaccagaagatccacacgggtgagcg

SEQ ID NO: 106888 - DNA, 120 bp, Artificial Sequence
  ENSG00000099326_12 (sequence is synthesized)
accattcgtgtgcagcgagtgcggccgcagcttcagccgcagctcgcacctgctgcgccaccagcttacgcacaccgaggagcggccgttcgtgtgcggcgactgtggccagggcttcgt

SEQ ID NO: 106889 - DNA, 120 bp, Artificial Sequence
  ENSG00000099326_13 (sequence is synthesized)
gcgcagcgcgcgcctggaagagcatcggagagtgcacacgggcgaacagcctttccgttgcgctgagtgcggccagagcttccggcagcgctccaatctgctgcagcaccagcgcatcca

SEQ ID NO: 106890 - DNA, 120 bp, Artificial Sequence
  ENSG00000099326_14 (sequence is synthesized)
gatcccccgggccctggcgctaagcccccggcccctcctggtgcgcccgagcctcccggcccctttccgtgcagcgagtgccgcgagagcttcgcgcggcgcgccgtgctgctggagcac

SEQ ID NO: 106891 - DNA, 120 bp, Artificial Sequence
  ENSG00000099326_15 (sequence is synthesized)
gcaccaggcggtacacacgggcgacaagtcctttggctgcgtcgagtgcggcgagcgcttcggccgccgctcagtgctgctgcagcaccggcgcgtgcacagtggcgagcggcccttcgc

SEQ ID NO: 106892 - DNA, 120 bp, Artificial Sequence
  ENSG00000099326_16 (sequence is synthesized)
ctgtgccgagtgcggccagagcttccggcagcgctccaacctgacgcagcaccggcgcatccacaccggggagcggcccttcgcctgcgccgagtgtggcaaggccttccgccagcggcc

SEQ ID NO: 106893 - DNA, 120 bp, Artificial Sequence
  ENSG00000099326_17 (sequence is synthesized)
tacgctcacgcagcatctccgcgtacacacgggcgagaaaccctttgcctgccccgagtgtggccagcgcttcagccagcgcctcaagctcacgcgtcatcagaggacacacaccggcga

SEQ ID NO: 106894 - DNA, 120 bp, Artificial Sequence
  ENSG00000099326_18 (sequence is synthesized)
aaagccctaccactgcggtgagtgcggcctgggcttcacgcaggtctcgcggctcaccgagcaccagcgcatccacacgggcgaacggcccttcgcctgccccgagtgcggccagagctt

SEQ ID NO: 106895 - DNA, 120 bp, Artificial Sequence
  ENSG00000099326_19 (sequence is synthesized)
tcggcagcacgccaacctcacccagcaccggcgcatccacacgggtgaacggccctacgcatgccctgagtgtggcaaggccttccgccagcggcccacgctcacgcagcatctgcgcac

SEQ ID NO: 106896 - DNA, 120 bp, Artificial Sequence
  ENSG00000099326_20 (sequence is synthesized)
ccaccgacgagagaagcccttcgcctgccaggactgtggccgccgcttccaccagagcaccaagctcattcagcaccagcgcgtccacagcgccgagtagctccagccgggacgcactgt

SEQ ID NO: 106897 - DNA, 120 bp, Artificial Sequence
  ENSG00000099326_21 (sequence is synthesized)
gtccgccatggtcagaacacctacctcccctggttattgtgaggctggcgattacataagtataagcaggtccgcccagggcttggctactgtaggtgtccaataaacagtagatggaaa

SEQ ID NO: 106898 - DNA, 120 bp, Artificial Sequence
  ENSG00000099326_22 (sequence is synthesized)
gcgcacgtacacacgaagggcctgctgactacatctgccggaaagcatcgggccaagcctttctccattttgcggtctaggaagtagcagaggccccttcctgtagggagttgccatgga

SEQ ID NO: 106899 - DNA, 120 bp, Artificial Sequence
  ENSG00000099326_23 (sequence is synthesized)
gacgcggtggggcaccgacggagttctaatgacggccgtgattggtgcaggatcctgctaatctcaggaaggcccgtagagaagggcagacactggcctcagatacctgacctggtaccc

SEQ ID NO: 106900 - DNA, 120 bp, Artificial Sequence
  ENSG00000099326_24 (sequence is synthesized)
gacccaagtctctcccagggtttcaggttgacttggcaccttgaagagtggaggcttggcccccaggatgaggcggccctcgaaatcgatgccacccacgggggaatgattctgcggtgc

SEQ ID NO: 106901 - DNA, 120 bp, Artificial Sequence
  ENSG00000099326_25 (sequence is synthesized)
agcaccacgctttgccagacacacgttctcccttgtggtacagaagtggccacctgcaacagagaccctgtgcaaggctgcccagggcagagggattccagggccagactccccagccca

SEQ ID NO: 106902 - DNA, 120 bp, Artificial Sequence
  ENSG00000099326_26 (sequence is synthesized)
ttcctgcatcacctgcagtcacgtggacataggagctgcaggctaggggaatatggggaaggtactggaaggccacgatgtcagagcaggggagggactgcaggtggtcccttcattctt

SEQ ID NO: 106903 - DNA, 120 bp, Artificial Sequence
  ENSG00000099326_27 (sequence is synthesized)
tgctcagggcctaggggaggtaggtccttggaggacctagtcagtaggtatttacaaggcaggcccctgggatcctacagtgggatgggcacccacaaaccccaggttgcggccagcctt

SEQ ID NO: 106904 - DNA, 120 bp, Artificial Sequence
  ENSG00000099326_28 (sequence is synthesized)
tcctcatctgccttccacatggggtaggtctgaggatcaaacggtacagcatagactaggcagtgaagcattcactgtactccttttgcaacagcctcatcctatttcttcaccaggggc

SEQ ID NO: 106905 - DNA, 120 bp, Artificial Sequence
  ENSG00000099326_29 (sequence is synthesized)
aggtgagggcatgcacggtgggcgcgcctaaggtctggttgggtgggccagggaacctggcctgagcagtcagtctgaagtccactgggccaggtttgttataaatggaatggtttccat

SEQ ID NO: 106906 - DNA, 120 bp, Artificial Sequence
  ENSG00000099326_30 (sequence is synthesized)
ctgccagcagcccccacattctacccagtcaggtctcccctccaccgcagccagtgctgtcactacccctcacacaccaagcctgactgccacagccctgtacccacgaaccccatggca

SEQ ID NO: 106907 - DNA, 120 bp, Artificial Sequence
  ENSG00000099326_31 (sequence is synthesized)
tggagcaggctgttggggtttcccagtacagatggcatgtggtgttcagtccccaaggagatgcgttaggcaatatgtgcttgtcactggggaacagacagcaggcagaggtataattag

SEQ ID NO: 106908 - DNA, 120 bp, Artificial Sequence
  ENSG00000099326_32 (sequence is synthesized)
gtagtgttaggggtatgacccctttcacctcccaggcagggcacctgaactagctgctcacaccctgccattcctatgtggacccttgtacaatacctctgacccccgctgaccaccttg

SEQ ID NO: 106909 - DNA, 120 bp, Artificial Sequence
  ENSG00000099326_33 (sequence is synthesized)
ccccatggttcacatacggctacaggggcacaaacctcagcccatctcatcccactgcagctcaacccctggccttccagggtactctgcttcacccagcccctgagctgggccctcagc

SEQ ID NO: 106910 - DNA, 120 bp, Artificial Sequence
  ENSG00000099326_34 (sequence is synthesized)
taccctgcactgccctccccaacccaagcccacaaccaagaatcccacctctctgcatcccagcacctggcacaccactaagaagggcagtggggtggaaactcactcaggctgcctgat

SEQ ID NO: 106911 - DNA, 120 bp, Artificial Sequence
  ENSG00000099326_35 (sequence is synthesized)
ccttccgcatggacagcaccatctctgccgaccccactcctggccctacgcaggcagccctcttactccagcatccccaagttcccccattccctagatcatcccctataaggttcaacc

SEQ ID NO: 106912 - DNA, 120 bp, Artificial Sequence
  ENSG00000099326_36 (sequence is synthesized)
tcctctagcatcttctgccctcaaaaaaagccacccaccactaccactgatcccacagcccctctactttctagaaactccccaccctagtaaaaccttttgcaagcagggcgagtattc

SEQ ID NO: 106913 - DNA, 120 bp, Artificial Sequence
  ENSG00000099326_37 (sequence is synthesized)
cccgtacccacattctctcccagtcctggtatcctggatggcctcctgggcttgcatcctgctggtcaggcatcaggacaggtagggctgggacctgacaaggacagcaggttagtagac

SEQ ID NO: 106914 - DNA, 120 bp, Artificial Sequence
  ENSG00000099326_38 (sequence is synthesized)
agagcaggtgggcaggagggaccttgacacaggatagggatcctgcccaatcatcgaagcattacggaccagaggccccctgccatctacctctcagccaccacctttgtctggcatcat

SEQ ID NO: 106915 - DNA, 120 bp, Artificial Sequence
  ENSG00000099326_39 (sequence is synthesized)
ccaggctcctcctacaacccatcttctgttatgttccttcctgttcctgagacccagggtctcctctttcttagttcacacctttgttttggtggagctttgtgggtgttctggtgtgga

SEQ ID NO: 106916 - DNA, 120 bp, Artificial Sequence
  ENSG00000099326_40 (sequence is synthesized)
agataaaattctgacatgtcccatatctgaaacacattgtctagccctcaacattagattgaagtttggctggaagaattctttttattagtacagtcacagacctttttttatcactat

SEQ ID NO: 106917 - DNA, 120 bp, Artificial Sequence
  ENSG00000099326_41 (sequence is synthesized)
tgttggtgagctttttcagtttgaaattcacatctctcagttctgggaaactgccttgaaatttttttttatttccttcccttctattgctctgctccctgtttctgggatgcctcttac

SEQ ID NO: 106918 - DNA, 120 bp, Artificial Sequence
  ENSG00000099326_42 (sequence is synthesized)
ttggctattggcatctgggatgggtcctttaatgttcttatcttttcactccaattttccattcctttgtctttctactctattttcctggaaattttctcacttgtatctttcagacct

SEQ ID NO: 106919 - DNA, 120 bp, Artificial Sequence
  ENSG00000099326_43 (sequence is synthesized)
tctgttaagattttcatttctggtagctttttttttggtggggggagggggtctcactatttcacacagactagagcacagtggtgccatcatagcttactgtaaccttgaactcctggg

SEQ ID NO: 106920 - DNA, 120 bp, Artificial Sequence
  ENSG00000099326_44 (sequence is synthesized)
caatacataggaacacttgggtccctgcagtcagggtgtggaaatggcagatgagttcagccctaaggtgcatttttcttactaggaggagatggagtgtattttatgggatataagcat

SEQ ID NO: 106921 - DNA, 120 bp, Artificial Sequence
  ENSG00000099326_45 (sequence is synthesized)
tagctacatttcctgtcctgttcacatcctttgcccatgtgtctatgaggttattgatctttcttactgatttattgtagctctttacttaggaggttaattagccttttgcctgtggag

SEQ ID NO: 106922 - DNA, 120 bp, Artificial Sequence
  ENSG00000099326_46 (sequence is synthesized)
agttttttggtttgccatttgtccttttttaattttttttgttttttggccatttgtcttttgactctgatgtggtttttgctgatttcctttgatgtattctagtttatctgacttttc

SEQ ID NO: 106923 - DNA, 120 bp, Artificial Sequence
  ENSG00000099326_47 (sequence is synthesized)
tttggcgacttatggactttctctcaccactaaaagccctcactgctctctcagtcttcttgatttaacctcctccaggcttccgccttctccaggccctgattctcagttggagttgct

SEQ ID NO: 106924 - DNA, 120 bp, Artificial Sequence
  ENSG00000099326_48 (sequence is synthesized)
ggtgcctcctccttcacccagcgtctgacgctggagtgctcacagtgtggctgggacccacttctctcctctgtagatacccacccctgtgttgatcacttgcaggcccgggttctgtgt

SEQ ID NO: 106925 - DNA, 120 bp, Artificial Sequence
  ENSG00000099326_49 (sequence is synthesized)
gccatgtgtatgccctagagcccttgctcacgtttccccacagccttcatgaagtctgtgttcctcagatgccccacagacatcacaagcaaggcacatccaaaccccagaccactatcc

SEQ ID NO: 106926 - DNA, 120 bp, Artificial Sequence
  ENSG00000099326_50 (sequence is synthesized)
aggagcctgcaccctctttctgttggctccacctccagcctccgagacccacccacttccctgcatttgctgagaccatcattttccacctagacaatgcccccacgcttgccctacagc

SEQ ID NO: 106927 - DNA, 120 bp, Artificial Sequence
  ENSG00000099326_51 (sequence is synthesized)
ccttccaaaaacgattttttccaacctaaatcagacctagaaagctttttcacatagcccagtcttcctccttgtgctgggttctgtctcattatcacctcatcagggaagtctgtacag

SEQ ID NO: 106928 - DNA, 120 bp, Artificial Sequence
  ENSG00000099326_52 (sequence is synthesized)
atagaatccctacccctgcatttgtcgcctccgtctgcctctttggtcagtttcaggtccctgtagttcacactgtgtccccagggatgaagtgggtcccggcacggtgggcattctgtc

SEQ ID NO: 106929 - DNA, 120 bp, Artificial Sequence
  ENSG00000099330_0 (sequence is synthesized)
agtcgggtccatcctgcagtaaatgcacaacccggacggaagtgcctctccgacagcagatccaggctcggagctccagacgctgggacaggccgcccgcagaccacccccgccgcgcgc

SEQ ID NO: 106930 - DNA, 120 bp, Artificial Sequence
  ENSG00000099330_1 (sequence is synthesized)
gggacacgacgccccccgcaggacccgcccatcagcccggaaacccctgagctgcttctcccggaggccgatgcccacccgggagcccccaaagactcgcggctcccgggggcacctgca

SEQ ID NO: 106931 - DNA, 120 bp, Artificial Sequence
  ENSG00000099330_2 (sequence is synthesized)
tactcacccgcctgggcctgggcccccgctgcagggactggcgccccgaggcctcaaaaccagcgccccccgccctccgtgccagccccagccgggaccccacaaggcaaagaccaagaa

SEQ ID NO: 106932 - DNA, 120 bp, Artificial Sequence
  ENSG00000099330_3 (sequence is synthesized)
gattgtgtttgaggatgagttgctctcccaggccctcctgggcgccaagaagcctattggagccatccctaaggggcataagcctaggccccacccagtgcccgactatgagcttaagta

SEQ ID NO: 106933 - DNA, 120 bp, Artificial Sequence
  ENSG00000099330_4 (sequence is synthesized)
cgctatgtcgcagtgttccaggaccagtacggagagttcttggagctccagcacgaggtggggtgtgcacaggcaaagctcaggcagctggaggccctgctgagctccctgcccccaccc

SEQ ID NO: 106934 - DNA, 120 bp, Artificial Sequence
  ENSG00000099330_5 (sequence is synthesized)
caaagccagaaggaggcccaagttgcagcccgggtttggagggagtttgagatgaagcgaatggatcctggcttcctggacaagcaggctcgctgccactacctgaagggtaaactgagg

SEQ ID NO: 106935 - DNA, 120 bp, Artificial Sequence
  ENSG00000099330_6 (sequence is synthesized)
catctcaagactcagatccagaaattcgatgaccaaggagacagcgagggctccgtgtacttctaagtgcccctgcagatgggcagagggatgcatggggatgcaggtcccttgcatttc

SEQ ID NO: 106936 - DNA, 120 bp, Artificial Sequence
  ENSG00000099330_7 (sequence is synthesized)
ttggtatctctcagcttttcctcttgcagctccccctaccaggggtcgctttctcctggattgcaaatgcctcttcagtttggactcagctctgacagcccctcctccaggaaggccttc

SEQ ID NO: 106937 - DNA, 120 bp, Artificial Sequence
  ENSG00000099330_8 (sequence is synthesized)
caggacttcctcctctgggtcctctagctctgaccctacagggactccagatctcaacctgttccctggaagtagggcctgctctccatcccagtgaaataaacatgtattagacaccta

SEQ ID NO: 106938 - DNA, 120 bp, Artificial Sequence
  ENSG00000099330_9 (sequence is synthesized)
cgccagtcgggtccatcctgcagtaaatgcacaacccggacggaagtgcctctccgacagcagatccaggctcggagctccagacgctgggacaggtgacccggggcggtagcgagccgg

SEQ ID NO: 106939 - DNA, 89 bp, Artificial Sequence
  ENSG00000099330_10 (sequence is synthesized)
tatgatctcagctcactgcaacctcagcgtgggatcacaggcgcccaccaccgtgcctggcaaatttttgtatttgtagtagagatggg

SEQ ID NO: 106940 - DNA, 120 bp, Artificial Sequence
  ENSG00000099330_11 (sequence is synthesized)
tactcacccgcctgggcctgggcccccggtgagcctgaccgggagggggtccccaggccgggcctctaggcaaaagatttagcccctccagtttgagggactccggtttcccgacacccc

SEQ ID NO: 106941 - DNA, 120 bp, Artificial Sequence
  ENSG00000099330_12 (sequence is synthesized)
agtgcccgactatgagctaaggaggcccaagttgcagcccgggtttggagggagtttgagatgaagcgaatgtttcttttttttttctttcttttgagacagaatctcgctctgtcaccc

SEQ ID NO: 106942 - DNA, 120 bp, Artificial Sequence
  ENSG00000099330_13 (sequence is synthesized)
gggattacaggcatgagccaccttgcccggctcacccggtcgcctgtgcccagtttcaaggagagaaaattgaggctcggagaatgaaaggcagagagttaagcagcttgaaggccacag

SEQ ID NO: 106943 - DNA, 120 bp, Artificial Sequence
  ENSG00000099330_14 (sequence is synthesized)
agagagttaagcagcttgaaggccacagggcagactgctgcaaagacttccgggtctcgccctgcctaggatcctggcttcctggacaagcaggctcgctgccactacctgaagggtaaa

SEQ ID NO: 106944 - DNA, 120 bp, Artificial Sequence
  ENSG00000099330_15 (sequence is synthesized)
ggggcataagcctaggccccacccagtgcccgactatgagctaaggaggcccaagttgcagcccgggtttggagggagtttgagatgaagcgaatggtgagtcttgcatcccacagcttg

SEQ ID NO: 106945 - DNA, 120 bp, Artificial Sequence
  ENSG00000099331_0 (sequence is synthesized)
ctagctccaggacacgcgcgccccgagcctgggaggcatgctgaagccaggcggccggcaggatgagtgtgaaagaggcaggcagctcgggccgccgggagcaggcggcctaccacctgc

SEQ ID NO: 106946 - DNA, 120 bp, Artificial Sequence
  ENSG00000099331_1 (sequence is synthesized)
acatctacccccagctgtccaccaccgagagccaggcctcgtgccgcgtgactgccaccaaggacagcaccacctcggacgtcatcaaggacgccattgccagcctgcggctggacggca

SEQ ID NO: 106947 - DNA, 120 bp, Artificial Sequence
  ENSG00000099331_2 (sequence is synthesized)
ccaaatgttatgtgctggtggaggtcaaagagtcgggaggcgaggaatgggtgctggacgccaacgactcgcctgtgcaccgggtgctgctatggccccggcgggcacaggacgagcacc

SEQ ID NO: 106948 - DNA, 120 bp, Artificial Sequence
  ENSG00000099331_3 (sequence is synthesized)
ctcaggaggatggctactacttcctgctgcaggagcgcaacgcagatggaaccatcaagtacgtgcatatgcagctggtggcgcaggccacagccacccggcgcctagtggagcgtggcc

SEQ ID NO: 106949 - DNA, 120 bp, Artificial Sequence
  ENSG00000099331_4 (sequence is synthesized)
tcctgccacggcagcaggcggactttgatgacctgtgtaacctccccgagctaaccgagggcaacctcctgaagaacctcaagcaccgcttcctgcaacaaaagatctacacgtacgcgg

SEQ ID NO: 106950 - DNA, 120 bp, Artificial Sequence
  ENSG00000099331_5 (sequence is synthesized)
ggagcatcctggtggccatcaacccctttaagttcctgcccatctacaaccccaagtacgtgaagatgtatgagaaccagcagctgggcaagctggagccacacgtcttcgcgctggccg

SEQ ID NO: 106951 - DNA, 120 bp, Artificial Sequence
  ENSG00000099331_6 (sequence is synthesized)
acgtggcctactacaccatgctcaggaagcgcgtgaaccagtgcatcgtgatctcgggtgagagcggctccggcaagacccagagcaccaacttcctcatccactgcctcaccgccctca

SEQ ID NO: 106952 - DNA, 120 bp, Artificial Sequence
  ENSG00000099331_7 (sequence is synthesized)
gccagaagggctacgccagcggcgtcgagaggaccatcctgggtgctggccctgtgctggaggcttttggaaatgccaagacagcccacaacaacaactccagccggtttgggaaattca

SEQ ID NO: 106953 - DNA, 120 bp, Artificial Sequence
  ENSG00000099331_8 (sequence is synthesized)
tccaagtcagctacctagagagtggcatcgtgagaggagctgtcgtcgagaaatatctgcttgaaaagtctcgcctggtgtctcaggagaaggatgagaggaactaccatgtgttttatt

SEQ ID NO: 106954 - DNA, 120 bp, Artificial Sequence
  ENSG00000099331_9 (sequence is synthesized)
atttgttacttggggtcagcgaggaagagcgccaagaatttcagctcaagcagcctgaagattatttctacctcaaccagcataacttgaagattgaagatggggaggacctgaagcatg

SEQ ID NO: 106955 - DNA, 120 bp, Artificial Sequence
  ENSG00000099331_10 (sequence is synthesized)
actttgagaggctcaagcaggccatggagatggtgggcttcctccccgccaccaagaagcagatttttgccgtcctctcggccatcctgtacctgggcaacgtcacttataagaagagag

SEQ ID NO: 106956 - DNA, 120 bp, Artificial Sequence
  ENSG00000099331_11 (sequence is synthesized)
ctacaggccgagaggaagggttggaggtcgggccacccgaggtgctggacaccctgtcgcagcttctgaaggtgaagcgagaaatcttggtggaggttctgaccaaaagaaaaacggtga

SEQ ID NO: 106957 - DNA, 120 bp, Artificial Sequence
  ENSG00000099331_12 (sequence is synthesized)
ccgtcaacgacaagcttatccttccctacagcctcagcgaggccatcactgcccgcgactccatggccaagtctctgtacagcgccctgttcgactggattgtgctgcggatcaaccacg

SEQ ID NO: 106958 - DNA, 120 bp, Artificial Sequence
  ENSG00000099331_13 (sequence is synthesized)
cactcctcaacaagaaggacgtggaagaggcagtctcgtgcctgtccattggggtcctggacatcttcgggtttgaagacttcgagaggaacagctttgagcagttctgcatcaactacg

SEQ ID NO: 106959 - DNA, 120 bp, Artificial Sequence
  ENSG00000099331_14 (sequence is synthesized)
ccaatgagcagctgcagtattacttcaaccagcacatcttcaagctggagcaggaggaatatcagggcgaggggatcacgtggcacaacatcggctacacagacaatgtcggctgcatcc

SEQ ID NO: 106960 - DNA, 120 bp, Artificial Sequence
  ENSG00000099331_15 (sequence is synthesized)
atctcatcagcaagaaacccacgggcctcttctacctgctggacgaggagagcaacttcccccacgccacgagccagaccctgctggccaagttcaaacagcaacatgaggacaataagt

SEQ ID NO: 106961 - DNA, 120 bp, Artificial Sequence
  ENSG00000099331_16 (sequence is synthesized)
acttcctgggcaccccggtcatggagccagctttcatcatccagcacttcgcagggaaggtgaaatatcagatcaaggacttccgggagaagaacatggactacatgcggccagacatcg

SEQ ID NO: 106962 - DNA, 120 bp, Artificial Sequence
  ENSG00000099331_17 (sequence is synthesized)
tggccctgctgcggggcagtgacagctcctacgtgcgggagctcatcggcatggaccccgtggccgtgttccgctgggccgtgctccgggctgctatccgggccatggcagtgcttcggg

SEQ ID NO: 106963 - DNA, 120 bp, Artificial Sequence
  ENSG00000099331_18 (sequence is synthesized)
aggccggacgcctgcgggccgagagggccgaaaaggctgcaggtatgagcagccctggtgcccaaagtcacccagaagagctgccaagaggagccagcaccccttcggaaaaactttacc

SEQ ID NO: 106964 - DNA, 120 bp, Artificial Sequence
  ENSG00000099331_19 (sequence is synthesized)
gcgatttgcataaccaaatgatcaagagcatcaaaggattgccctggcagggcgaggacccccgtagccttctccagtccctcagtcggctccagaaaccccgcgccttcatcctgaaaa

SEQ ID NO: 106965 - DNA, 120 bp, Artificial Sequence
  ENSG00000099331_20 (sequence is synthesized)
gtaaaggtatcaaacaaaagcagatcattccaaagaacctactggactccaagtccctgaaactcatcatcagcatgactctgcacgaccgcaccaccaagtccctactgcacctgcaca

SEQ ID NO: 106966 - DNA, 120 bp, Artificial Sequence
  ENSG00000099331_21 (sequence is synthesized)
agaagaaaaagccaccaagcatcagcgcccagttccagacatcccttaacaagctcttggaggcactggggaaggcggagcccttctttatccgctgcatccgttccaatgctgaaaaga

SEQ ID NO: 106967 - DNA, 120 bp, Artificial Sequence
  ENSG00000099331_22 (sequence is synthesized)
aagagctgtgctttgacgacgagctggtcctgcagcagctgcgctacaccggcatgctggagaccgtgcgcatccggaggtcagggtacagcgccaagtacacgttccaggatttcaccg

SEQ ID NO: 106968 - DNA, 120 bp, Artificial Sequence
  ENSG00000099331_23 (sequence is synthesized)
agcagttccaggtgctcctgcccaaggatgcccagccctgcagggaggtcatctccaccctcctggagaaaatgaagatagacaagaggaactaccagatcgggaagaccaaggtcttcc

SEQ ID NO: 106969 - DNA, 120 bp, Artificial Sequence
  ENSG00000099331_24 (sequence is synthesized)
tgaaggagacggagcggcaagccctgcaggagacgctgcaccgggaggtggtgcggaaaatcctgctgctgcagagctggttccggatggtgctggagcgtcggcacttcctgcagatga

SEQ ID NO: 106970 - DNA, 120 bp, Artificial Sequence
  ENSG00000099331_25 (sequence is synthesized)
agcgggccgccgtcaccatccaggcctgctggcggtcctaccgggtccggagggcgctggagaggacgcaggctgccgtgtacctccaggcctcatggaggggctactggcagcggaagc

SEQ ID NO: 106971 - DNA, 120 bp, Artificial Sequence
  ENSG00000099331_26 (sequence is synthesized)
tctaccggcaccagaaacagagcatcatccgcctgcagagcctgtgtcgggggcacctgcagcgcaagagcttcagccagatgatctcggagaagcagaaggcagaagagaaggagaggg

SEQ ID NO: 106972 - DNA, 120 bp, Artificial Sequence
  ENSG00000099331_27 (sequence is synthesized)
aagccctggaagccgcaagagcaggtgctgaggagggcggacagggtcaggcggctggagggcagcaggtagctgagcaggggccggagccagcggaggatggcgggcacctggcatcgg

SEQ ID NO: 106973 - DNA, 120 bp, Artificial Sequence
  ENSG00000099331_28 (sequence is synthesized)
agcctgaggtgcagccaagtgacaggtcccccctagagcactcctcacctgagaaggaggccccaagcccagagaagactctcccaccccagaaaaccgtggcggctgaaagtcacgaga

SEQ ID NO: 106974 - DNA, 120 bp, Artificial Sequence
  ENSG00000099331_29 (sequence is synthesized)
aagtccccagcagccgggagaagcgtgagtcgcgtcggcaaagagggctggagcacgtcaagttccagaacaaacacatccagtcctgcaaggaggagagtgccctcagagaaccttcca

SEQ ID NO: 106975 - DNA, 120 bp, Artificial Sequence
  ENSG00000099331_30 (sequence is synthesized)
gaagggtcacccaggagcaaggggtgagtctcctggaagacaaaaaggagagcagagaagatgaaacccttctagtcgtagagacggaggctgagaacacatctcaaaagcagcccacag

SEQ ID NO: 106976 - DNA, 120 bp, Artificial Sequence
  ENSG00000099331_31 (sequence is synthesized)
ccgaccagcctggccctggacagcagggtcagcccaccggcccctggcagcgcccccgagacccccgaggacaagagcaaaccatgtggcagcccaagggttcaggaaaagcccgacagc

SEQ ID NO: 106977 - DNA, 120 bp, Artificial Sequence
  ENSG00000099331_32 (sequence is synthesized)
cccggaggctccacgcagatccagcggtacctggacgccgagcggctggccagcgccgtggaactgtggcggggcaagaagctggtggccgccgccagccctagtgccatgctcagccag

SEQ ID NO: 106978 - DNA, 120 bp, Artificial Sequence
  ENSG00000099331_33 (sequence is synthesized)
tccctggacctcagcgacagacaccgggccacaggggccgccctcacgcccacagaggagaggcgcacctccttctccacgagcgacgtctccaagctcctcccgtccctggccaaggct

SEQ ID NO: 106979 - DNA, 120 bp, Artificial Sequence
  ENSG00000099331_34 (sequence is synthesized)
cagcctgcagcagaaaccacggacggagagcgaagtgcgaaaaagccagctgtccagaagaagaagccaggcgacgcatcctccctcccagacgcagggctgtccccgggctctcaggtc

SEQ ID NO: 106980 - DNA, 120 bp, Artificial Sequence
  ENSG00000099331_35 (sequence is synthesized)
gactctaaatccacgtttaagaggctttttctgcataaaaccaaggataaaaaatacagcctggagggcgcagaggagctggagaatgcagtgtccgggcacgtggtgctggaagccacc

SEQ ID NO: 106981 - DNA, 120 bp, Artificial Sequence
  ENSG00000099331_36 (sequence is synthesized)
accatgaagaagggcctggaagccccctccggacagcagcatcgccacgctgcaggtgagaagcgcaccaaggaaccaggaggcaaagggaagaagaaccgaaatgtcaagattgggaag

SEQ ID NO: 106982 - DNA, 120 bp, Artificial Sequence
  ENSG00000099331_37 (sequence is synthesized)
atcacagtgtcagagaagtggcgggaatcggtgttccgccagatcaccaacgccaatgagctcaagtacctggacgagttcctgctcaacaagataaatgacctccgttcccagaagacg

SEQ ID NO: 106983 - DNA, 120 bp, Artificial Sequence
  ENSG00000099331_38 (sequence is synthesized)
cccattgagagcttgtttatcgaagccaccgagaagttcaggagcaacatcaaaacgatgtactctgtcccgaacgggaagatccacgtgggctacaaggatctgatggagaactaccag

SEQ ID NO: 106984 - DNA, 120 bp, Artificial Sequence
  ENSG00000099331_39 (sequence is synthesized)
atcgtcgtcagcaacctggccactgagcgtggccagaaggacaccaacctggtcctcaacctcttccagtcactgctagatgagttcacccgtggctacaccaagaacgacttcgagcca

SEQ ID NO: 106985 - DNA, 120 bp, Artificial Sequence
  ENSG00000099331_40 (sequence is synthesized)
gtgaagcagagcaaagctcagaagaagaagcggaagcaggagcgtgctgtccaggagcacaacgggcacgtgttcgccagctaccaggttagcatcccgcagtcgtgcgagcagtgcctc

SEQ ID NO: 106986 - DNA, 120 bp, Artificial Sequence
  ENSG00000099331_41 (sequence is synthesized)
tcctatatctggctcatggacaaggccctgctctgcagcgtgtgcaagatgacctgccacaagaagtgcgtgcacaagattcagagccactgctcctacacctacgggaggaagggcgag

SEQ ID NO: 106987 - DNA, 120 bp, Artificial Sequence
  ENSG00000099331_42 (sequence is synthesized)
ccaggcgttgagcctggccacttcggcgtgtgcgtagacagcctgaccagcgacaaggcctcggtgcccatcgtgctggagaagctcctggaacacgtggagatgcacggcctgtacacc

SEQ ID NO: 106988 - DNA, 120 bp, Artificial Sequence
  ENSG00000099331_43 (sequence is synthesized)
gagggcctctaccgcaagtcgggtgctgccaaccgcactcgggagctccggcaggcgctgcagacagaccccgcagcagtcaagctggagaacttccccatccacgccatcacaggggtg

SEQ ID NO: 106989 - DNA, 120 bp, Artificial Sequence
  ENSG00000099331_44 (sequence is synthesized)
ctgaagcagtggctgcgggagctgcccgagcccctcatgaccttcgcacagtacggcgacttcctccgagccgtcgagctgccggagaagcaggagcagctggctgccatctatgccgtc

SEQ ID NO: 106990 - DNA, 120 bp, Artificial Sequence
  ENSG00000099331_45 (sequence is synthesized)
ctggagcaccttccagaagccaaccacaactccctggagagactcatcttccaccttgtcaaggtggccctgctcgaggatgtcaaccgcatgtcacctggggcgctggccattatcttc

SEQ ID NO: 106991 - DNA, 120 bp, Artificial Sequence
  ENSG00000099331_46 (sequence is synthesized)
gcaccctgcctcctgcgctgccctgacaactcggacccgctgaccagcatgaaggacgtcctcaagatcaccacgtgcgtggagatgctgatcaaggagcagatgaggaaatacaaagtg

SEQ ID NO: 106992 - DNA, 120 bp, Artificial Sequence
  ENSG00000099331_47 (sequence is synthesized)
aagatggaggagatcagccaactggaggctgcagagagtatcgccttccgcaggctttcgctcctgcgacaaaatgctccatggcctctcaaactggggttttcgtctccctatgagggg

SEQ ID NO: 106993 - DNA, 120 bp, Artificial Sequence
  ENSG00000099331_48 (sequence is synthesized)
gtcctgaacaagagccccaagacccgggacatccaggaggaggagctggaggtgctgctggaggaggaggcagccggcggcgatgaggaccgggaaaaggagattctcattgaacggatc

SEQ ID NO: 106994 - DNA, 120 bp, Artificial Sequence
  ENSG00000099331_49 (sequence is synthesized)
cagtccatcaaggaggagaaggaggacatcacctaccggctgccggagctggacccaaggggctcggacgaggagaacctggactcggagacgtcggccagcaccgagagcctgctggag

SEQ ID NO: 106995 - DNA, 120 bp, Artificial Sequence
  ENSG00000099331_50 (sequence is synthesized)
gggccgggcggggggcctcggaaggtcagtattaagggccccctgcgcctgctctcccttgccccggcgcgcccaccccgagccccctccccaccgtggccgcccctccacgacgaaggc

SEQ ID NO: 106996 - DNA, 120 bp, Artificial Sequence
  ENSG00000099331_51 (sequence is synthesized)
aggccgtcgtccttcgtaacggtcagagtgaagaccccccggcggacccccatcatgcccacggccaacatcaagctcccaccaggcctgccctcccacctgcctcgctgggcaccgggt

SEQ ID NO: 106997 - DNA, 120 bp, Artificial Sequence
  ENSG00000099331_52 (sequence is synthesized)
gcccgggaggcggctgccccagtgcggcgccgggagccacctgcccgccgcccggaccagatacattccgtgtacatcacgcccggggcagacctgccagtgcagggcgccctggagccc

SEQ ID NO: 106998 - DNA, 120 bp, Artificial Sequence
  ENSG00000099331_53 (sequence is synthesized)
ctagaagaggatggccagccacctggggccaagcggaggtactcggatcccccaacgtactgcctgccccccgcctcgggccagaccaatggctgagagccacagctgacaaagtctgca

SEQ ID NO: 106999 - DNA, 120 bp, Artificial Sequence
  ENSG00000099331_54 (sequence is synthesized)
tgtccgaggacggcccctgcactggagctgggcgccagagctgcagagctagtgttcggccctcagagaaggatccagaatcaaaagctcaagagtgacgtgaggtgggcaccggcccca

SEQ ID NO: 107000 - DNA, 120 bp, Artificial Sequence
  ENSG00000099331_55 (sequence is synthesized)
agtgcagagtcaaggcagggagaggccggctggagccaggccccctcgcacgcagcccccaaatcatggacgcacctgtggggagcaccacatctccacctgcggcctcacatctcccca

SEQ ID NO: 107001 - DNA, 120 bp, Artificial Sequence
  ENSG00000099331_56 (sequence is synthesized)
ctcccctttttgtacgtttaactgtttctttgtacgtggtttacgtaactttaaactgtaacagccttaatggaagaccaaatggttttttatatgtgtatgtacaaagttttctattaa

SEQ ID NO: 107002 - DNA, 120 bp, Artificial Sequence
  ENSG00000099331_57 (sequence is synthesized)
cgctgcccgtctcccttataacctggacgtgagctgtcagagcagaagccactaggccactgcgcgtctgaggctcagaccctgctgtggttggcttggggtggccaatgggctgggacc

SEQ ID NO: 107003 - DNA, 120 bp, Artificial Sequence
  ENSG00000099331_58 (sequence is synthesized)
ctccatgagagttttggacacttgggtcacctgacccgtgcctctctgacacatgtctccggggggcagccacctggccaatgtgcatttttgcacatgctggaaccttccatgggggtc

SEQ ID NO: 107004 - DNA, 120 bp, Artificial Sequence
  ENSG00000099331_59 (sequence is synthesized)
tgggctattggctggagccaggacatgagtcaggggcaccatggacctcacgtgccagggagacttgaatgtggctgtcactcttccggacgccaagggctgcaggaggctgcttttggc

SEQ ID NO: 107005 - DNA, 120 bp, Artificial Sequence
  ENSG00000099331_60 (sequence is synthesized)
actacccaccccgtgtgacagaataggagccagcgactcaggactgctcacgggtcaggagggcaacgcctgaagtcagacctccctataggtcaacagggacaacctggggatctctgg

SEQ ID NO: 107006 - DNA, 120 bp, Artificial Sequence
  ENSG00000099331_61 (sequence is synthesized)
agcagggccctcctctctcaggcttggcccactcccccagacacctggacacgtggccacaaatctgggacaaggggcccccgcacagcatgaaataaaaagtgcctgagaagtgtgtgc

SEQ ID NO: 107007 - DNA, 120 bp, Artificial Sequence
  ENSG00000099331_62 (sequence is synthesized)
ccatctatgccgtcctggagcaccttccagaagccaaccacaactccctggagagactcatcttccaccttgtcaagcaagtgcctccccacctgccctctgtggggttagggtcgcatt

SEQ ID NO: 107008 - DNA, 120 bp, Artificial Sequence
  ENSG00000099331_63 (sequence is synthesized)
ttcttgactcaagtaatgtaaactgtaggagctatgcagaggagagggacggccaggttcagtagcactggcttcctctctaacccagaggaagaggaaatggggcagccactcaggctg

SEQ ID NO: 107009 - DNA, 120 bp, Artificial Sequence
  ENSG00000099331_64 (sequence is synthesized)
tgaaagaggctgtcatcagccctcccggaaccagcgctgtgtgcaaggtgcaaacccacctcattccactgggcccacatcaatagtgtggtcctgagaccaaacctaagagctgctgcc

SEQ ID NO: 107010 - DNA, 120 bp, Artificial Sequence
  ENSG00000099331_65 (sequence is synthesized)
cagctggaaatgatgtattgaaaaggatcaatgatctgtgttgccaagtccaatttgcctcaaagccctgccccgctccagggcttggggaggctggcccagtccccatttctggcaaaa

SEQ ID NO: 107011 - DNA, 120 bp, Artificial Sequence
  ENSG00000099331_66 (sequence is synthesized)
gagagaggggcagcattgagcacagtgtctttcccccagctgcatgttttggcttcagtggcctggggatggtcccaatggcgctgggaaccccgaggtggcaggcctgcttctaactcc

SEQ ID NO: 107012 - DNA, 120 bp, Artificial Sequence
  ENSG00000099331_67 (sequence is synthesized)
ttttctccttcccgtccatcccagcaggccccagggcgagggtcctccggctgccggccctgaagctgcagtaaccctgccatctgtctctcaaaagggccccctgcgcctgctctccct

SEQ ID NO: 107013 - DNA, 120 bp, Artificial Sequence
  ENSG00000099331_68 (sequence is synthesized)
agcaggagcgtgctgtgagtaggctgcacatagatgagagtccgagcaggcgaacattggcaggagcatgcacgtgtgtgtcagtgtcaatgtgcgcatgggcccgtctgcacgcgtatg

SEQ ID NO: 107014 - DNA, 120 bp, Artificial Sequence
  ENSG00000099331_69 (sequence is synthesized)
ttactcacagttcccgaaagaagaggatgcaatgccatggaaggccacagggggaagcactgggactcatcaggaggctgagggagagagggaaaaagggagcggggagaggcaggaaac

SEQ ID NO: 107015 - DNA, 120 bp, Artificial Sequence
  ENSG00000099331_70 (sequence is synthesized)
tttattgtgattttcatgcatcagaatgtgctaggcagagtaagctggcttaggattggcttgtttgaattatttcaatgggctctggggcataggggctgccccttgttgtcaggtgcc

SEQ ID NO: 107016 - DNA, 120 bp, Artificial Sequence
  ENSG00000099331_71 (sequence is synthesized)
agggcctggggtgatgagggcaggggatagtgggctggagtgtgagagtcccagagaggaggtggctggggtgtaggctctggactggttggtttgcatatggaaggcaagtcccaaacc

SEQ ID NO: 107017 - DNA, 120 bp, Artificial Sequence
  ENSG00000099331_72 (sequence is synthesized)
atctctaggaactggctagaatcaatctaggaattgggaagggccgtctccctggggtcagccaggccccagatgtcagagcatcagaaatacagaaaataagtcactgggcgcggtggc

SEQ ID NO: 107018 - DNA, 120 bp, Artificial Sequence
  ENSG00000099331_73 (sequence is synthesized)
ctggggccctgggcccctcgtaggatagacagagcctgtcctaaccttccggaagtgcatgctggggaggccccttgcctgctgaccttctgtgctcaggacgactaatcggccacatga

SEQ ID NO: 107019 - DNA, 120 bp, Artificial Sequence
  ENSG00000099331_74 (sequence is synthesized)
ccaccactctgtcccatgggattcctagagaagtctcactaagagcccagcacactcacatcacaactaacctcctgggatctgctcacacctccggcagtaacctcgcccactcagaga

SEQ ID NO: 107020 - DNA, 120 bp, Artificial Sequence
  ENSG00000099331_75 (sequence is synthesized)
atatacggagccgtagtcttgaataagtcacccctgagatcccatgggtcgtcatccaccagtggctggggagggctgccttcccctttccctgcccagcgccttcctctggcctcacag

SEQ ID NO: 107021 - DNA, 120 bp, Artificial Sequence
  ENSG00000099331_76 (sequence is synthesized)
acaccccgcgcgacacgttccaagatatcttgcttctctgcccgtcttgagagctttcacttctgcaacttcatttcctcctccttcccactatctccccctccctccaagaaaaaaaaa

SEQ ID NO: 107022 - DNA, 120 bp, Artificial Sequence
  ENSG00000099337_0 (sequence is synthesized)
gccgcgcctgtagcactcccggaactggaactaggtgccagacggtccggaggcgggggccacgtcagcggggccacccagggctcgcggggtcccggtgggtgccatgcggaggggcgc

SEQ ID NO: 107023 - DNA, 120 bp, Artificial Sequence
  ENSG00000099337_1 (sequence is synthesized)
gcttctggcgggcgccttggccgcgtacgccgcgtacctggtgctgggcgcgctgttggtggcgcggctggaggggccgcacgaagccaggctccgagccgagctggagacgctgcgggc

SEQ ID NO: 107024 - DNA, 120 bp, Artificial Sequence
  ENSG00000099337_2 (sequence is synthesized)
gcagctgcttcagcgcagcccgtgtgtggctgcccccgccctggacgccttcgtggagcgagtgctggcggccggacggctggggcgggtcgtgcttgctaacgcttcggggtccgccaa

SEQ ID NO: 107025 - DNA, 120 bp, Artificial Sequence
  ENSG00000099337_3 (sequence is synthesized)
cgcctcggaccccgcctgggacttcgcctctgctctcttcttcgccagcacgctgatcaccaccgtgggctatgggtacacaacgccactgactgatgcgggcaaggccttctccatcgc

SEQ ID NO: 107026 - DNA, 120 bp, Artificial Sequence
  ENSG00000099337_4 (sequence is synthesized)
ctttgcgctcctgggcgtgccgaccaccatgctgctgctgaccgcctcagcccagcgcctgtcactgctgctgactcacgtgcccctgtcttggctgagcatgcgttggggctgggaccc

SEQ ID NO: 107027 - DNA, 120 bp, Artificial Sequence
  ENSG00000099337_5 (sequence is synthesized)
ccggcgggcggcctgctggcacttggtggccctgttgggggtcgtagtgaccgtctgctttctggtgccggctgtgatctttgcccacctcgaggaggcctggagcttcttggatgcctt

SEQ ID NO: 107028 - DNA, 120 bp, Artificial Sequence
  ENSG00000099337_6 (sequence is synthesized)
ctacttctgctttatctctctgtccaccatcggcctgggcgactacgtgcccggggaggcccctggccagccctaccgggccctctacaaggtgctggtcacagtctacctcttcctggg

SEQ ID NO: 107029 - DNA, 120 bp, Artificial Sequence
  ENSG00000099337_7 (sequence is synthesized)
cctggtggccatggtgctggtgctgcagaccttccgccacgtgtccgacctccacggcctcacggagctcatcctgctgccccctccgtgccctgccagtttcaatgcggatgaggacga

SEQ ID NO: 107030 - DNA, 120 bp, Artificial Sequence
  ENSG00000099337_8 (sequence is synthesized)
tcgggtggacatcctgggcccccagccggagtcgcaccagcaactctctgccagctcccacaccgactacgcttccatccccaggtagctggggcagcctctgccaggcttgggtgtgcc

SEQ ID NO: 107031 - DNA, 120 bp, Artificial Sequence
  ENSG00000099337_9 (sequence is synthesized)
tggcctgggactgaggggtccaggcgaccagagctggctgtacaggaatgtccacgagcacagcaggtgatcttgaggccttgccgtccaccgtctctcctttgtttcccagcatctggc

SEQ ID NO: 107032 - DNA, 120 bp, Artificial Sequence
  ENSG00000099337_10 (sequence is synthesized)
tgggatgtgaagggcagcactccctgtccccatgtcccgggctccactgggcaccaacataaccttgttctctgtcctttctctcatcctctttacactgtgtctctctggctctctggc

SEQ ID NO: 107033 - DNA, 120 bp, Artificial Sequence
  ENSG00000099337_11 (sequence is synthesized)
attctcgctgcctctgtctttccctcttgctgtctctgtttctcattctctttcatgttccgtctgtgtctctcaattaaccactcgtcaactgctgattctactgggctgtgggctcag

SEQ ID NO: 107034 - DNA, 120 bp, Artificial Sequence
  ENSG00000099337_12 (sequence is synthesized)
acctcatttcaggcaccagattggtcgctacaccctggacaagtgactgcccgtctctgagccttgatttcctcagctgccaaatgggaagaatagaagaatttgcccctaaacccctcc

SEQ ID NO: 107035 - DNA, 120 bp, Artificial Sequence
  ENSG00000099337_13 (sequence is synthesized)
tgtgtgctggccctgtgctagacagtgctggagacatagttgggggtggagaactgcccttatggagcttgcagtccagtgaggtggacagacctgtccccagacagtgatggcccaaaa

SEQ ID NO: 107036 - DNA, 120 bp, Artificial Sequence
  ENSG00000099337_14 (sequence is synthesized)
tggtcaggactttaatggaggaggtgaggtgttgaaagcacaggcagagtggtcagggctgaagtcggagaagcatagggactaggcccaatccagcctggaaagtcagggaggacttcc

SEQ ID NO: 107037 - DNA, 120 bp, Artificial Sequence
  ENSG00000099337_15 (sequence is synthesized)
tagaggaagggacatcgaactaagacctgaactatgagaaataggcaggaagaagttgtacctgactcatttttctcaggtgtctccagggagcaggacccatggagggacccctggtgt

SEQ ID NO: 107038 - DNA, 120 bp, Artificial Sequence
  ENSG00000099337_16 (sequence is synthesized)
aggcctgggcgatagactcttcctcagcagcctggcaggcaggaaacagacataggaccccagcccagatctgaatggcatgggaggtgctgcccttaaccatgacaccattgtaagagc

SEQ ID NO: 107039 - DNA, 120 bp, Artificial Sequence
  ENSG00000099337_17 (sequence is synthesized)
tgtccacatttgtatgttgtgccctggaatcagcctggttgagctcaaatcccaacttagccacgtctggcctgtgtccttgggcagtcacactacctctctgattttgtttccttatct

SEQ ID NO: 107040 - DNA, 120 bp, Artificial Sequence
  ENSG00000099337_18 (sequence is synthesized)
gtaaaatggtgatcatcataatacaacttcaaaaggatttcaggctgagtgtggtggctcacgcctatacacccagcactttggaaggctgaggaaggaggatcgcttgaggccaggagt

SEQ ID NO: 107041 - DNA, 88 bp, Artificial Sequence
  ENSG00000099337_19 (sequence is synthesized)
aaggctgaggatagcctaggcaacacagtgaggccttatctcaacaacaaccacaaaatctaaaaattagctgggtgtggtggtgcat

SEQ ID NO: 107042 - DNA, 74 bp, Artificial Sequence
  ENSG00000099337_20 (sequence is synthesized)
aggagtttgaggctgcagtgagttatgatggcactgctgcactccagcctgcgggacagagtgagaccctgtct

SEQ ID NO: 107043 - DNA, 89 bp, Artificial Sequence
  ENSG00000099337_21 (sequence is synthesized)
aggaaggaaaaagaaagagaaagtaagaaagaaaaaagaaaaagaaagaaaagtaagaaagaaaaaaagaaaaagaaagaaagtaagtc

SEQ ID NO: 107044 - DNA, 120 bp, Artificial Sequence
  ENSG00000099337_22 (sequence is synthesized)
aaaaagaaagaaagaaaagaaaagaaggaaagaagcggggcacagtggctcagtcctgtaatcccagcaccttgggaaggccaaggtgggaagatcacttgaggctaggagtttgagaca

SEQ ID NO: 107045 - DNA, 90 bp, Artificial Sequence
  ENSG00000099337_23 (sequence is synthesized)
cacagtggctcagtcctgtaatcccagcaccttgggaaggccaaggtgggaagatcacttgaggctaggagtttgagacaagcctggcta

SEQ ID NO: 107046 - DNA, 120 bp, Artificial Sequence
  ENSG00000099337_24 (sequence is synthesized)
acagtagacaagtagaaaaggcatggagagggcataccaggtgggaggagctgtgtgcaaaggcctggagatggaaaagcatgctggccaccagcttctgacaagcagtttagtatgaac

SEQ ID NO: 107047 - DNA, 120 bp, Artificial Sequence
  ENSG00000099337_25 (sequence is synthesized)
ggtatgcagggaaagagggaaggagggcagaggggtgcgcacgagcacccgttagtgtccttaaatgaccagcatgggaacctggtctctttcctgagggccctagagagccatggaagg

SEQ ID NO: 107048 - DNA, 120 bp, Artificial Sequence
  ENSG00000099337_26 (sequence is synthesized)
gtttagagtaggagtgggtcatggttaggtttgggttttaggatgatccccctagttgctctggagaggtggagcagagcgggtactgaggctgggtgcctgtgggaggctgaggcagga

SEQ ID NO: 107049 - DNA, 120 bp, Artificial Sequence
  ENSG00000099337_27 (sequence is synthesized)
atgaagagggagacgatgggcctgggctgagccatggaagggaggaggggtgagtgcgggcacactcaggagccaagtggacaggccatagcccccacagactggagggacgcggctagg

SEQ ID NO: 107050 - DNA, 120 bp, Artificial Sequence
  ENSG00000099337_28 (sequence is synthesized)
gaatgtcccacagagtggccagttatccctgagagaaagagcaggttttagcggagacgctgaggctgctttagaatatggtgggtgtgtggggcaaaagggacacccaggggtgtatca

SEQ ID NO: 107051 - DNA, 86 bp, Artificial Sequence
  ENSG00000099337_29 (sequence is synthesized)
ctctgtctcaaaaaaaaaaaaaaagtcataggggctgggcatagtggctctcacctataatcctagcaaatcgtagtcccaggggt

SEQ ID NO: 107052 - DNA, 86 bp, Artificial Sequence
  ENSG00000099337_30 (sequence is synthesized)
ataatcctagcaaatcgtagtcccaggggttcaagaccagcctcagcaacataaaatacaaaaaatacaaaaattagctgggtttg

SEQ ID NO: 107053 - DNA, 120 bp, Artificial Sequence
  ENSG00000099337_31 (sequence is synthesized)
agaaaagaaaaagaaaaagaaaaagaaaatatgtatattggatatactatgtgccaggcacgattccaagcccctgatacattctctacattttacagatgggggaaggaggtccagaga

SEQ ID NO: 107054 - DNA, 120 bp, Artificial Sequence
  ENSG00000099337_32 (sequence is synthesized)
gagatgttaaatacttgcccaaggtcacacagaaagtggaacactgggatttgaacaaggttttggttgggcatcttttcctatgggagctcagaaatatctgttgtctagccctttctc

SEQ ID NO: 107055 - DNA, 120 bp, Artificial Sequence
  ENSG00000099337_33 (sequence is synthesized)
agcctcccaaccttctcggttccttacctatgtcacagctgactttgagctaaagtcatctcggggcagctaggtgcctatgtgagctggcgttcatttctcactgtttctccttccaaa

SEQ ID NO: 107056 - DNA, 120 bp, Artificial Sequence
  ENSG00000099337_34 (sequence is synthesized)
caaatacctccaggaagaaaagcaagtcctttttggtccaagacattaaaaaagccaggctcagcggctcatgcctgtaatcccaacacttggggaggctgaggcaggaggatcgcttga

SEQ ID NO: 107057 - DNA, 120 bp, Artificial Sequence
  ENSG00000099337_35 (sequence is synthesized)
gaggcaggaggatcgcttgagcccgggagctggagaccagcctggacatgttaacatagcaagacccctctacagaaaatgttaaaaatgagctgggtgtggtggcgcacacctgtagtc

SEQ ID NO: 107058 - DNA, 84 bp, Artificial Sequence
  ENSG00000099337_36 (sequence is synthesized)
ttgaggctgcagtgagccatgatcacactactggactccagcctgggccatagagcaagaccctgtcctaggagaaaaaaatac

SEQ ID NO: 107059 - DNA, 120 bp, Artificial Sequence
  ENSG00000099337_37 (sequence is synthesized)
agactccgtctcagaaaaaaaaaaaaaagaaaaaagtgtgtgctaaaaaattcatcaggtactaaagagtgtacggtggaaagtaagtctttctcctacactcagatcatggatggatgt

SEQ ID NO: 107060 - DNA, 120 bp, Artificial Sequence
  ENSG00000099337_38 (sequence is synthesized)
gatcatggatggatgtctcaggtcttcccaggcacatttgatgttatgtaccagccatatgcatgtgtgtgtcatttatttttcactctacacaagtagtacctaatatggtgaggttgt

SEQ ID NO: 107061 - DNA, 120 bp, Artificial Sequence
  ENSG00000099337_39 (sequence is synthesized)
tatgattacagactctggaggcaaagttcctgggtataaatctgaactctgtcactcccaagctaagtggctttgggcaagtgatttcacctccatgtgcctcagtttgctagtctgtac

SEQ ID NO: 107062 - DNA, 120 bp, Artificial Sequence
  ENSG00000099337_40 (sequence is synthesized)
aatgggatggtaatagcacctacctcatggacttgagaagtcagcaacttcatacctctaaagcccttagagctagcagtgtgtggcactcaataaaatgttgactaatgatgattctca

SEQ ID NO: 107063 - DNA, 120 bp, Artificial Sequence
  ENSG00000099337_41 (sequence is synthesized)
tcttcgccagcacgctgatcaccaccgtggatacgaggctggccatgccatgtgggagatggagttattgctcaactcaaatcactctccaccatccatctctaaaactttttttttttt

SEQ ID NO: 107064 - DNA, 83 bp, Artificial Sequence
  ENSG00000099337_42 (sequence is synthesized)
gcctggcccattgtctcgcccattttagaatagggcaagctgaggctcagagccaggcaagagcctgcacccttcattctttg

SEQ ID NO: 107065 - DNA, 120 bp, Artificial Sequence
  ENSG00000099338_0 (sequence is synthesized)
actggtgcggccgagtgacagttgaccggttttaaccaagtgactggttctagccacgttatgtgcggcccagccatgttccctgccggtcctccgtggcccagagtccgagtcgtgcag

SEQ ID NO: 107066 - DNA, 120 bp, Artificial Sequence
  ENSG00000099338_1 (sequence is synthesized)
gtgctgtgggccctgctggcagtgctcctggcgtcgtggaggctgtgggcgatcaaggatttccaggaatgcacctggcaggttgtcctgaacgagtttaagagggtaggcgagagtggt

SEQ ID NO: 107067 - DNA, 120 bp, Artificial Sequence
  ENSG00000099338_2 (sequence is synthesized)
gtgagcgacagcttctttgagcaagagcccgtggacacagtgagcagcttgtttcacatgctggtggactcacccatcgacccgagcgagaaatacctgggcttcccttactacctgaag

SEQ ID NO: 107068 - DNA, 120 bp, Artificial Sequence
  ENSG00000099338_3 (sequence is synthesized)
atcaactactcctgcgaggaaaagccctctgaggacctggtgcgcatgggccacctgacggggctaaagcccctggtgctggtcaccttccagtccccagtcaacttctaccgctggaag

SEQ ID NO: 107069 - DNA, 120 bp, Artificial Sequence
  ENSG00000099338_4 (sequence is synthesized)
atagagcagctgcagatccagatggaggctgcccccttccgcagcaaagagccatgcatggcagaagaagtgtgtagcatgagctggtacacgcccatgcccatcaagaaaggcagtgtg

SEQ ID NO: 107070 - DNA, 120 bp, Artificial Sequence
  ENSG00000099338_5 (sequence is synthesized)
gtcatgcgtgtggacatcagcagcaatggcctggggaccttcattccagataaaaggttccagatgaatatcaacggcttcctgaagagagaccgggacaataacatccaattcactgtg

SEQ ID NO: 107071 - DNA, 120 bp, Artificial Sequence
  ENSG00000099338_6 (sequence is synthesized)
ggagaggagctcttcaacctgatgccccagtactttgtgggtgtctcatcgaggcccttgtggcacactgtggaccagtcacctgtgcttatcctgggaggcattcccaatgagaagtac

SEQ ID NO: 107072 - DNA, 120 bp, Artificial Sequence
  ENSG00000099338_7 (sequence is synthesized)
gtcctgatgactgacaccagcttcaaggacttctctctcgtggagctgagcattgacagttgctgggtgggctccttctactgcccccattctggcttcacagccaccatctatgacact

SEQ ID NO: 107073 - DNA, 120 bp, Artificial Sequence
  ENSG00000099338_8 (sequence is synthesized)
attgccaccgagagcaccctcttcattcggcagaaccagctggtctactattttacaggcacctataccacactctatgagagaaaccgcggcagtggcagttggattcgtgtcctggcc

SEQ ID NO: 107074 - DNA, 120 bp, Artificial Sequence
  ENSG00000099338_9 (sequence is synthesized)
agcgagtgcatcaagaagctgtgccctgtgtatttccatagcaatggctctgagtacataatggccctcaccacgggcaagcatgagggttatgtacacttcgggaccatcagagatggc

SEQ ID NO: 107075 - DNA, 120 bp, Artificial Sequence
  ENSG00000099338_10 (sequence is synthesized)
caggtgtcctttgagatgctgcccaggcagtggtctgtgtgcgagcagataggagttaccacctgctccataatttggtctgaatacatcgcgggtgagtatactctactgctgctggtg

SEQ ID NO: 107076 - DNA, 120 bp, Artificial Sequence
  ENSG00000099338_11 (sequence is synthesized)
gagagtggatatggtaatgcaagtaaacgtttccaggtggtcagctacaacacagctagtgatgacctggaacttctctaccacatcccagaattcatccctgaagctcgaggattggag

SEQ ID NO: 107077 - DNA, 120 bp, Artificial Sequence
  ENSG00000099338_12 (sequence is synthesized)
ttcctgatgatcctagggacagagtcctacaccagcactgcaatggcccccaagggcatcttctgtaacccgtacaacaatctgatcttcatctggggcaacttcctcctgcagagctct

SEQ ID NO: 107078 - DNA, 120 bp, Artificial Sequence
  ENSG00000099338_13 (sequence is synthesized)
aacaaggaaaacttcatctacctggcagacttccccaaggaactgtccatcaaatacatggccagatcgttccgtggggctgtggctattgtcacagagacggaggagatctggtacctc

SEQ ID NO: 107079 - DNA, 120 bp, Artificial Sequence
  ENSG00000099338_14 (sequence is synthesized)
ctggagggcagctaccgggtctaccagctgttcccttccaagggctggcaggtgcacatcagcttaaagctgatgcaacagtcctctctctacgcatccaatgagaccatgctgaccctc

SEQ ID NO: 107080 - DNA, 120 bp, Artificial Sequence
  ENSG00000099338_15 (sequence is synthesized)
ttctgatgtatcaacagcacaccagccactatgacttggagcggaaagggggctacttgatgctctccttcatcgacttctgccccttctcggtgatgcgcctgcggagcctgcccagtc

SEQ ID NO: 107081 - DNA, 120 bp, Artificial Sequence
  ENSG00000099338_16 (sequence is synthesized)
cgcagagatacacgcgccaggagcgctaccgggcgcggccgccgcgcgtcctggagcgctcgggcttccacaacgagaactcgctcgccatctaccagggcctggtctactacctgctgt

SEQ ID NO: 107082 - DNA, 120 bp, Artificial Sequence
  ENSG00000099338_17 (sequence is synthesized)
ggctgcactccgtgtacgacaagccgtacgcggacccggtgcacgaccccacctggcgctggtgggcgaacaacaaacaagaccaggattactacttcttcttggcgagcaattggcgaa

SEQ ID NO: 107083 - DNA, 120 bp, Artificial Sequence
  ENSG00000099338_18 (sequence is synthesized)
gcgcgggcggcgtgtccatagaaatggacagctacgaaaagatctacaacctcgagtccgcgtacgagctgccggagcgcattttcctggacaagggcactgagtacagcttcgccatct

SEQ ID NO: 107084 - DNA, 120 bp, Artificial Sequence
  ENSG00000099338_19 (sequence is synthesized)
tcctgtcggcgcagggccactcgttccggacgcagtcagaactcggcaccgccttccagctgcatagccaggtggacgtgggcgtggtgctggccgaccccggctgcatcgaggcctcgg

SEQ ID NO: 107085 - DNA, 120 bp, Artificial Sequence
  ENSG00000099338_20 (sequence is synthesized)
tgaagcaggaggtcctgattaatcgcaactcggtgctattttcgattacgctcaaggataaaaagctttgctatgaccaaggcattagtggacatcaccttatggagacttccatgacgg

SEQ ID NO: 107086 - DNA, 120 bp, Artificial Sequence
  ENSG00000099338_21 (sequence is synthesized)
tcaatgtggtgggttcatccgggctctgcttccaggaaacacacctggggccccatatgcaaggcaacctgatggtgccagtgttcattggctgccccccaggcaagcgcctggccttcg

SEQ ID NO: 107087 - DNA, 120 bp, Artificial Sequence
  ENSG00000099338_22 (sequence is synthesized)
acatcacctacacgctggaatacagccgcctgaagaacaaacactactttgactgcgttaacgtgaacccggagatgccctgctttctcttccgggacattttctaccccttcttcttga

SEQ ID NO: 107088 - DNA, 120 bp, Artificial Sequence
  ENSG00000099338_23 (sequence is synthesized)
ttcaagatttggtgacaggagactccggcagtttccagggcagctatgttctgctggtggtgggtggcgggcccacactggacagcctcaaggactacagtgaggacgaaatctaccgct

SEQ ID NO: 107089 - DNA, 120 bp, Artificial Sequence
  ENSG00000099338_24 (sequence is synthesized)
tcaacagccccctggacaagaccaacagccttatctggaccacgaggaccacaaggaccaccaaagactcagcctttcacatcatgtcccacgagagcccaggcatcgagtggctctgtc

SEQ ID NO: 107090 - DNA, 120 bp, Artificial Sequence
  ENSG00000099338_25 (sequence is synthesized)
tggagaatgccccatgctatgacaatgttccccaaggcatctttgcccctgaattcttcttcaaggtgttggtgagcaatagaggagtggacacgagcacctactgcaactaccagctca

SEQ ID NO: 107091 - DNA, 120 bp, Artificial Sequence
  ENSG00000099338_26 (sequence is synthesized)
ccttcctgctgcacatccacgggctgccactcagtcccaagcgggcccttttcatcatcatggtgtcagctagcgtgtttgtgggcctggtgatcttctacatcgccttctgcctcctgt

SEQ ID NO: 107092 - DNA, 120 bp, Artificial Sequence
  ENSG00000099338_27 (sequence is synthesized)
ggcccctcgtggtgaagggctgcacgatgatccggtggaagataaacaacctcattgcctcagaatcctactacacctacgcctccatttccggaatctcgagcatgccgtctctgagac

SEQ ID NO: 107093 - DNA, 120 bp, Artificial Sequence
  ENSG00000099338_28 (sequence is synthesized)
attccaggatgggctccatgttcagctccaggatgacagaggacagggctgaacccaaggaagccgtggagagacagttgatgacctgagtgtcccacctgccccagcccccagttactg

SEQ ID NO: 107094 - DNA, 120 bp, Artificial Sequence
  ENSG00000099338_29 (sequence is synthesized)
tcacgcctctcttatgaggcccatcttgaagatgcaacctgtcacccagcccaggcctctctttctgttttgcttgatgtttacttctcgttcagactcaaataaagccttttttcagga

SEQ ID NO: 107095 - DNA, 120 bp, Artificial Sequence
  ENSG00000099338_30 (sequence is synthesized)
atcgcaacctggcaggggtgtggggtttgctgggggcctctgtggggccatgatctgaggagggtatgtggggggcgggagctcagcacattccatggcctagaggggccacacagaggc

SEQ ID NO: 107096 - DNA, 73 bp, Artificial Sequence
  ENSG00000099338_31 (sequence is synthesized)
gagcgagaaatacctgggcttcccttactacctgaagatcaactactcctgcgaggaaaagacggagtcttgc

SEQ ID NO: 107097 - DNA, 120 bp, Artificial Sequence
  ENSG00000099338_32 (sequence is synthesized)
ggacgcagtcagaactcggtctgcgcgggaccagagtggagcccgaagggcggggcgagggctaccagaatctgggagcctggggggcggggacaccatcggaggggcggggcctgtctg

SEQ ID NO: 107098 - DNA, 120 bp, Artificial Sequence
  ENSG00000099338_33 (sequence is synthesized)
actgcactccagcctgggcgacagggagatcctgtctcaggggggaaataaaagaaaagaaactctaaggactagcaaacccgagtgggaagctctttggagggttttacaggaggctga

SEQ ID NO: 107099 - DNA, 120 bp, Artificial Sequence
  ENSG00000099338_34 (sequence is synthesized)
gaggctgagaagcaaacaacttgctccagctccaggttttgaaagtgcagggcctcaggagattttgctgtgttctccccacctgtagctagtgatgacctggaacttctctaccacatc

SEQ ID NO: 107100 - DNA, 120 bp, Artificial Sequence
  ENSG00000099338_35 (sequence is synthesized)
ctggggccccatatgcaagtattggagcttgggatactgggccctgggaggggaaggttggggtcgggtctcaacagggctaatccccctgagaatcccactaatgcattcataatttcc

SEQ ID NO: 107101 - DNA, 120 bp, Artificial Sequence
  ENSG00000099338_36 (sequence is synthesized)
ctaatgcattcataatttcctttcttctcattctttctcaacattcatccacccacccactaccacccactaactcctttcattcttttttctttaagacggagtttcactcttgttgcc

SEQ ID NO: 107102 - DNA, 66 bp, Artificial Sequence
  ENSG00000099338_37 (sequence is synthesized)
aattttttgtatttttagtggagacagagtttttccatgttggccaggatggtcacaaactcctaa

SEQ ID NO: 107103 - DNA, 120 bp, Artificial Sequence
  ENSG00000099338_38 (sequence is synthesized)
ttcattcattcacgttttcagaaagggccaccttcccagttgtgcaggttgcacacaaactggtatgttccctctgataacttttcttcagagggagaatagagtgagcaacagggccgt

SEQ ID NO: 107104 - DNA, 61 bp, Artificial Sequence
  ENSG00000099338_39 (sequence is synthesized)
ataccaccatgcctagctaattttttatattttaaatagagacggagtttcaccatgttgg

SEQ ID NO: 107105 - DNA, 90 bp, Artificial Sequence
  ENSG00000099338_40 (sequence is synthesized)
agggccactttttgcaattggcacaaaggtggcataagggctggcctggccctgctttcacatctctctcttcttctgcccactcacaca

SEQ ID NO: 107106 - DNA, 120 bp, Artificial Sequence
  ENSG00000099338_41 (sequence is synthesized)
cctgctttcacatctctctcttcttctgcccactcacacattcctcattcagttctttgggtgcttggtgcttcacttgcttatacacgtgatatcgcctttgcccggggcagacactga

SEQ ID NO: 107107 - DNA, 120 bp, Artificial Sequence
  ENSG00000099338_42 (sequence is synthesized)
ggctcagagaggtgcagagtaacccagggagctaataagtggtagaggaggggcgtgccccagagttcttgttctcacccatttccctacccactccctggcatgcagatcctggtgttc

SEQ ID NO: 107108 - DNA, 120 bp, Artificial Sequence
  ENSG00000099338_43 (sequence is synthesized)
ctccctcctggcttagaatgaccttgggcagtcaaaaggggttgtaacagcccccacctccttagagtacatgagatttcatgtgctagactgaataaacaaggaggaagtgtgattgca

SEQ ID NO: 107109 - DNA, 120 bp, Artificial Sequence
  ENSG00000099338_44 (sequence is synthesized)
tcagggtgggcaagggggaacgtggtgggatgagctcggagcagtgatggggcagagtaagcggagcccttatgggccatggtatgtgagctggctcctcgggagggctctaagcagagg

SEQ ID NO: 107110 - DNA, 120 bp, Artificial Sequence
  ENSG00000099338_45 (sequence is synthesized)
agggactcgggtgtccccagggcccatctggctgcatggggtggggggacatcaatgaggggactggaagcagggagactctggaagagacaaggttggacaaaacagggtgggggcaaa

SEQ ID NO: 107111 - DNA, 78 bp, Artificial Sequence
  ENSG00000099338_46 (sequence is synthesized)
ctggaagagacaaggttggacaaaacagggtgggggcaaaggagttggaggtttaggggagagaacaggcaggctctc

SEQ ID NO: 107112 - DNA, 84 bp, Artificial Sequence
  ENSG00000099338_47 (sequence is synthesized)
ctggccaggctagtctcgaactcctggactcaagtgatcagcccgcctcggcctcccgaagttctgggattacaggcatgagcc

SEQ ID NO: 107113 - DNA, 120 bp, Artificial Sequence
  ENSG00000099338_48 (sequence is synthesized)
tgggattacaggcatgagccactgcaccaggccgtgttaatgatattaatgaccatattgcccttgggggtgagggagagccaggcagctggtggtggtgtttgtgggagggggactgtc

SEQ ID NO: 107114 - DNA, 120 bp, Artificial Sequence
  ENSG00000099338_49 (sequence is synthesized)
tttgtgggagggggactgtccttcctgccccttacccctccaggggcctgaggagaccctggccacccctgtgagccttttttcctcccaccgagggcaacctgatggtgccagtgttca

SEQ ID NO: 107115 - DNA, 120 bp, Artificial Sequence
  ENSG00000099338_50 (sequence is synthesized)
tcttccgggacagtgtgtgtccagtcccttcccctgcacagttcactgccctcttgcccccactactttgtgctctccctccccattcctctccccgcagactacccaccctttttcctg

SEQ ID NO: 107116 - DNA, 120 bp, Artificial Sequence
  ENSG00000099338_51 (sequence is synthesized)
cggcatctcactttcccccgtctcggtcctcagcttctcgggccaagctaatttcttcttctggtctcaatcccctccaaccccatagttttctaccccttcttcttgattcaagatttg

SEQ ID NO: 107117 - DNA, 120 bp, Artificial Sequence
  ENSG00000099338_52 (sequence is synthesized)
gtgacaggagactccggcagtttccagggcaggtaaaggcgtggccagcttgcagctagggcaggtggagggagtggaaggagatgggtgcaggactcgagacccggaggccagtctgtg

SEQ ID NO: 107118 - DNA, 120 bp, Artificial Sequence
  ENSG00000099338_53 (sequence is synthesized)
tgcacttctgtccctggtagctatgttctgctggtggtgggtggcgggcccacactggacagcctcaaggactacagtgaggacgaaatctaccgcttcaacagccccctggacaagtaa

SEQ ID NO: 107119 - DNA, 120 bp, Artificial Sequence
  ENSG00000099338_54 (sequence is synthesized)
tccccgtggggtcccacgtgtaatccaccttgcttcccctggaggcctttcccacttccaagccaagcccacctcgcaagcccccacctctgcgtctcaggccctgcccacagtggggct

SEQ ID NO: 107120 - DNA, 120 bp, Artificial Sequence
  ENSG00000099338_55 (sequence is synthesized)
cttaggatctcacaggcaaactcctgcccgcccctaacaccatgtcccctgcacccacctgtggcctccctccacactgaccactgaggtcatacctcccctacaccgccccccaacccc

SEQ ID NO: 107121 - DNA, 120 bp, Artificial Sequence
  ENSG00000099338_56 (sequence is synthesized)
atgcgtgtggacatcagcagcaatggcctggggaccttcattccagataaaaggtaccctttcccaagacgggggctggggtggactccgggggaattcctcaccccagggtccccagag

SEQ ID NO: 107122 - DNA, 120 bp, Artificial Sequence
  ENSG00000099338_57 (sequence is synthesized)
gccagtgggagatccaagggagagaatggggagaggagaggcagctacgagctgtggaacccctgacactgggacctcacctgcgcctattctgcacctgctgctaggttccagatgaat

SEQ ID NO: 107123 - DNA, 120 bp, Artificial Sequence
  ENSG00000099338_58 (sequence is synthesized)
ggaagagtcgtgggagctgggagaggagggaaagaggggaagagtcgtgggagctggcagaggagggaaagggggagccgaacgtgaagggcgaagggcggggcggggcaggagagtcgg

SEQ ID NO: 107124 - DNA, 120 bp, Artificial Sequence
  ENSG00000099338_59 (sequence is synthesized)
ggtatagagcaggcaggtgttaatggcatgggaaggaagagtaagaagtggggcaagaaggtgtcgcggtacgaggggaaggtgagactcaagaaggtgccggctaagaagctggtgccg

SEQ ID NO: 107125 - DNA, 120 bp, Artificial Sequence
  ENSG00000099338_60 (sequence is synthesized)
gcgtggaaggagaaggtgtggggcgaggaaacaacgaagggcgaggaaagatcccgaggcgaagagacagttttcatcgagaaggggcagggcgaggaggaggggcgttaccagagggcg

SEQ ID NO: 107126 - DNA, 120 bp, Artificial Sequence
  ENSG00000099338_61 (sequence is synthesized)
ggacggggcgacgggcccgcgcgggaagaaccaatcgccgagaacccggggaaggaacgggtccataaagaccaagtggaggagtaggggcgcggtcaggagcggaagcagagtgaggag

SEQ ID NO: 107127 - DNA, 120 bp, Artificial Sequence
  ENSG00000099338_62 (sequence is synthesized)
caagccccgggcgagaaacgggggcccggccgggagcaagagcaggggcggggccgggagcaagagcaggggcggggcccggagacgggcgagaccaggtacagtacccagcccctgggc

SEQ ID NO: 107128 - DNA, 120 bp, Artificial Sequence
  ENSG00000099338_63 (sequence is synthesized)
agtccgtgcgggggcagggccaggagcaagagcaggggcgggaccaagagcaagtgcaggggcggggccaggagcaagagccggggcgtggccaggagcaagtgctgtgagaggcgcaga

SEQ ID NO: 107129 - DNA, 120 bp, Artificial Sequence
  ENSG00000099338_64 (sequence is synthesized)
cccacccccaaaccccaggggcccctctttcccccgtcacagtaaaggagccaagggaagggggcaccctcggggaccctgagaaagggcagtgaagctccatttataactgaaactcct

SEQ ID NO: 107130 - DNA, 120 bp, Artificial Sequence
  ENSG00000099338_65 (sequence is synthesized)
ggaactcagggtaagtgtcagctccaaagtcacgcagaccggagctatgatccgatgttcagaggcggccctctttcatcccacagtgtggtcgttcacttcataaatattgagcattta

SEQ ID NO: 107131 - DNA, 120 bp, Artificial Sequence
  ENSG00000099338_66 (sequence is synthesized)
agacaggtaatgggccgacaccataacaaggcttgagggagacacatctcagatgacggtgaaaacccaatcgccacacgtagaaactacaagaagatcctatgatcctgttttagttct

SEQ ID NO: 107132 - DNA, 120 bp, Artificial Sequence
  ENSG00000099338_67 (sequence is synthesized)
tagaaactacaagaagatcctatgatcctgttttagttctttttcttttttttctttttgtcatggtctcactttcttacccaggctggagttcagtgatgcaatcttggctcactgcag

SEQ ID NO: 107133 - DNA, 73 bp, Artificial Sequence
  ENSG00000099338_68 (sequence is synthesized)
cattgccatgttgcccagcttggtcttgaactcctgacctcaagccatcctcctgcgttggcctcccaaagtg

SEQ ID NO: 107134 - DNA, 120 bp, Artificial Sequence
  ENSG00000099338_69 (sequence is synthesized)
acaggcatgagccaccgtgcccagccttgttcttgttctctaaccaaggagatttctccctgatggcctcatctgtttgtctcctctcttccctgctcctgtctctctccaccactccct

SEQ ID NO: 107135 - DNA, 120 bp, Artificial Sequence
  ENSG00000099338_70 (sequence is synthesized)
ctctccaccactcccttccacactgcccccaggaaacgaatcctcccctggctcatggttggggtccaggtatagatgctgtaacaaagagaccctggaagggaattacttaaacagaga

SEQ ID NO: 107136 - DNA, 120 bp, Artificial Sequence
  ENSG00000099341_0 (sequence is synthesized)
agttagggcaaaagccaacttccggtcaccatcttgagtgacgacagaggcggagctccaactgacatgttcattaagggcagggctccgagggcgccacctcgagagcgacggcgggct

SEQ ID NO: 107137 - DNA, 120 bp, Artificial Sequence
  ENSG00000099341_1 (sequence is synthesized)
acccggggcgggctgaggcaggttgtagccccgccccgggccttgggctccacctctcggccccacttccgccgggcaagcgtttgtaggcggcgctgccgtaaatcaggcggtctgctt

SEQ ID NO: 107138 - DNA, 120 bp, Artificial Sequence
  ENSG00000099341_2 (sequence is synthesized)
gccgcatcacgcaagatggcggccgcggcggtgaacggggcggcaggcttctcgagctccgggcccgcggcaacctcgggcgctgttctgcaggccgcgaccggcatgtacgagcaactc

SEQ ID NO: 107139 - DNA, 120 bp, Artificial Sequence
  ENSG00000099341_3 (sequence is synthesized)
aagggcgagtggaaccgtaaaagccccaatcttagcaagtgcggggaagagctgggtcgactcaagctagttcttctggagctcaacttcttgccaaccacagggaccaagctgaccaaa

SEQ ID NO: 107140 - DNA, 120 bp, Artificial Sequence
  ENSG00000099341_4 (sequence is synthesized)
cagcagctaattctggcccgtgacatactggagatcggggcccaatggagcatcctacgcaaggacatcccctccttcgagcgctacatggcccagctcaaatgctactactttgattac

SEQ ID NO: 107141 - DNA, 120 bp, Artificial Sequence
  ENSG00000099341_5 (sequence is synthesized)
aaggagcagctccccgagtcagcctatatgcaccagctcttgggcctcaacctcctcttcctgctgtcccagaaccgggtggctgagttccacacggagttggagcggctgcctgccaag

SEQ ID NO: 107142 - DNA, 120 bp, Artificial Sequence
  ENSG00000099341_6 (sequence is synthesized)
caccttcttcattgacatcctgctcgacactatcagggatgagatcgctgggtgcatcgagaaggcctacgagaaaatccttttcactgaggccacccggatcctcttcttcaacacacc

SEQ ID NO: 107143 - DNA, 120 bp, Artificial Sequence
  ENSG00000099341_7 (sequence is synthesized)
caaaaagatgacagactacgccaagaagcgagggtgggtcctgggccccaacaactactacagttttgccagccagcagcagaagccggaagacaccaccattccctccacagaactggc

SEQ ID NO: 107144 - DNA, 120 bp, Artificial Sequence
  ENSG00000099341_8 (sequence is synthesized)
caaacaggtcatcgagtatgcccggcagctggagatgatcgtctgagccccccgggcactgggtggggcagggcacgagttatttaaaacagttacactgcagggtttcgcccaataaag

SEQ ID NO: 107145 - DNA, 120 bp, Artificial Sequence
  ENSG00000099341_9 (sequence is synthesized)
gtggactgacattccctcttccaggcccttgtctccccagttgggacggcagagagacaagttcttatatctgaagaacttggaggttttggggcattcaggagttggagatagcctcca

SEQ ID NO: 107146 - DNA, 120 bp, Artificial Sequence
  ENSG00000099341_10 (sequence is synthesized)
actgggtcagcctctgtctggtgggcattgctcagggtctcaaacatggacgcccactgtggggccccagcagcactgtggcctgcaggagggcatggccccaggtagggggactgttct

SEQ ID NO: 107147 - DNA, 120 bp, Artificial Sequence
  ENSG00000099341_11 (sequence is synthesized)
agccagctgtggacacataggaatgctggaccagggtaccagattttttcaacaaagggggtgaagtgtcctactaaaaagaataaatgttggcagtgaattaaacaatttttcaaatga

SEQ ID NO: 107148 - DNA, 120 bp, Artificial Sequence
  ENSG00000099341_12 (sequence is synthesized)
tacctgatggagggcagctacaacaaagtgttcctggccaagggtaacatccccgccgagagctacaccttcttcattgacatcctgctcgacactatcagtgaattgggcctggtcatg

SEQ ID NO: 107149 - DNA, 120 bp, Artificial Sequence
  ENSG00000099341_13 (sequence is synthesized)
gctacgaggtgtctggacccaaccaagtcccgggccgcggaagccacctcggtgccagcgagactgaggcgggctgggggatccgatggggtgaaagatttggaacagccaaagtggggg

SEQ ID NO: 107150 - DNA, 120 bp, Artificial Sequence
  ENSG00000099341_14 (sequence is synthesized)
ctcggagggcgtcaagaagcgagagagggacagggagcgttgatggtcacgcctgtaatcgcagcgctttgggaggccgaggcgggggagcgtcgcttgagcccaggagttcaagatcag

SEQ ID NO: 107151 - DNA, 120 bp, Artificial Sequence
  ENSG00000099341_15 (sequence is synthesized)
cctgagcaacatagcgagactctgtctctacattttttttttaagtgagagatgactggaatggacccacgcgggggtggtgggggaatgattggaagacttatggcagaactgagtgag

SEQ ID NO: 107152 - DNA, 120 bp, Artificial Sequence
  ENSG00000099341_16 (sequence is synthesized)
gggttagatttttggtgcgtggaggcttaactggtcggagtggcaggattgggattcgggcttttcctgatggtggattccaggcaagaccaagtgggaagtgaggactgcccggagtga

SEQ ID NO: 107153 - DNA, 120 bp, Artificial Sequence
  ENSG00000099341_17 (sequence is synthesized)
tcactaacaacagtgtggggtggcttagagggacactggaacaagactgcccaggtttaagttcaactgtgtgactctaggcaagctgccaaagctctctgacatcagtttctctatcca

SEQ ID NO: 107154 - DNA, 120 bp, Artificial Sequence
  ENSG00000099341_18 (sequence is synthesized)
cagaatggggctagatacatgggatgagcttagtacctggcagcagctggaggtgggcgctgcacgcatgttggctgctgtctttatcaaaatttcttagaggtggcagctttttctgca

SEQ ID NO: 107155 - DNA, 120 bp, Artificial Sequence
  ENSG00000099341_19 (sequence is synthesized)
agactttgcttcatttggtctcaggcgtttgagcacgagcaacgcttggtgttgcaggaggagggctgggaccaggctatggaaggtgaaattgggctgggtgcagtggctcccgcgcac

SEQ ID NO: 107156 - DNA, 84 bp, Artificial Sequence
  ENSG00000099341_20 (sequence is synthesized)
ggaaggtgaaattgggctgggtgcagtggctcccgcgcaccaaggtggatcctcccacctaggctcactctgggaggctgaggt

SEQ ID NO: 107157 - DNA, 120 bp, Artificial Sequence
  ENSG00000099341_21 (sequence is synthesized)
tcaggtgcgtagcggggccgggccctgtggagtttggaaagaacttgggcttgagtcggacagctccgagtctgaatctcattccagccattggttgtctgggtaggctaggtgtgtttc

SEQ ID NO: 107158 - DNA, 120 bp, Artificial Sequence
  ENSG00000099341_22 (sequence is synthesized)
ttatcctcctagcacctcagctctccttttcagtgaattgggcctggtcatgggattgtggataacggctctcatctcaccacccttggctgttgacatgtgtggccacgtgtgtcaaac

SEQ ID NO: 107159 - DNA, 120 bp, Artificial Sequence
  ENSG00000099341_23 (sequence is synthesized)
gctaattctggcccgtgagtgtcactggggttggttgggggtgataatctgggggtcatggcaggaatggtagcactggtggttggggaagagacctcagtcacctcctgagagctcact

SEQ ID NO: 107160 - DNA, 120 bp, Artificial Sequence
  ENSG00000099364_0 (sequence is synthesized)
aaactcatctccagccctccttcctatgacctctccaccctggggaactggccctccttcctagaccctgcttccccttgaaagcccccacccccgcctgcagtcgccgccctccaggcc

SEQ ID NO: 107161 - DNA, 120 bp, Artificial Sequence
  ENSG00000099364_1 (sequence is synthesized)
cctcccctggagcgctggagggccccttagccccatggatgggtatgaaagtccccggaaagggggaatctgggccctcggcgttgctgacgcccccaatgtcgtcgagcagccgggggc

SEQ ID NO: 107162 - DNA, 120 bp, Artificial Sequence
  ENSG00000099364_2 (sequence is synthesized)
cgggggccggagcgcgccgacgccgaacccgctgccgccgctgccgggcctgtgtgcgaactgagtgcggggattgccacttctgccgagacatgaagaagttcggggggcccgggcgca

SEQ ID NO: 107163 - DNA, 120 bp, Artificial Sequence
  ENSG00000099364_3 (sequence is synthesized)
tgaagcagtcgtgcctgctccggcagtgcactgcccccgtgctcccacacacagctgtgtgcctcttgtgtggggaggctgggaaggaggacacggtggagggagaggaagagaaatttg

SEQ ID NO: 107164 - DNA, 120 bp, Artificial Sequence
  ENSG00000099364_4 (sequence is synthesized)
gtttgagcctcatggagtgtacaatctgcaacgagatcgtccaccccggctgcctgaagatggggaaggctgagggtgtcatcaatgcagagatccccaactgctgggagtgccctcgct

SEQ ID NO: 107165 - DNA, 120 bp, Artificial Sequence
  ENSG00000099364_5 (sequence is synthesized)
gcacccaggaaggccgcaccagcaaggattcaggtgaggggcctggccgccgtagggccgacaacggcgaggagggcgccagcttggggagcggatggaagctgacagaggagccaccgc

SEQ ID NO: 107166 - DNA, 120 bp, Artificial Sequence
  ENSG00000099364_6 (sequence is synthesized)
ttccaccgcccccgcccaggcgcaagggccccctgcctgccgggccccccccggaggacgtgcctgggccccccaaacgaaaggaaagggaggcagggaatgagcctcccaccccaagga

SEQ ID NO: 107167 - DNA, 120 bp, Artificial Sequence
  ENSG00000099364_7 (sequence is synthesized)
aaaaggtgaaaggaggccgagagaggcacctgaagaaggtgggtggagacgcctgcctcctccgaggatcggacccaggcggcccgggcctgctgccccccagggttctgaatccgagcc

SEQ ID NO: 107168 - DNA, 120 bp, Artificial Sequence
  ENSG00000099364_8 (sequence is synthesized)
aggctttctcatcctgccaccctgggctccctcccgagaactgggagaaaccaaagccgcctttggcctctgcagagggcccagcggtgccgtccccgtccccgcagagggagaagctag

SEQ ID NO: 107169 - DNA, 120 bp, Artificial Sequence
  ENSG00000099364_9 (sequence is synthesized)
agcgtttcaagcggatgtgccagctgctggaacgggtgcctgacacctcctcttcctcctcggactcagactccgactccgactcttcgggcacatcgctgagtgaggacgaagcccccg

SEQ ID NO: 107170 - DNA, 120 bp, Artificial Sequence
  ENSG00000099364_10 (sequence is synthesized)
acgaagcccccggcgaggcccggaatgggcgacggccagcccggggcagctctggcgagaaggagaaccgtggggggcggcgggctgtgcgccctggcagtggggggcccctactcagct

SEQ ID NO: 107171 - DNA, 120 bp, Artificial Sequence
  ENSG00000099364_11 (sequence is synthesized)
cagccccaccaccccggcctccacagctggagcggcacgtggtgcggcccccgcctcgaagccctgagcccgacacactccccttggctgctggatccgaccaccccctgccccgggccg

SEQ ID NO: 107172 - DNA, 120 bp, Artificial Sequence
  ENSG00000099364_12 (sequence is synthesized)
cctggcttcgcgtcttccagcacctcgggccgcgggagctgtgtatctgcatgcgagtctgccgaacttggagccgctggtgctatgacaagcgtctgtggcctcgaatggacctgagcc

SEQ ID NO: 107173 - DNA, 120 bp, Artificial Sequence
  ENSG00000099364_13 (sequence is synthesized)
ggcggaagtcactgaccccgcccatgctcagtggtgtggttcgccgccagccccgtgccctggacctcagctggacaggtgtctccaagaagcagctcatgtggcttctgaaccgactac

SEQ ID NO: 107174 - DNA, 120 bp, Artificial Sequence
  ENSG00000099364_14 (sequence is synthesized)
aaggcctgcaggagctggtgctctctggctgctcctggctctctgtctctgccctgggctcagccccactgccagccctgcggctcctggacctccgctggatcgaggatgttaaagact

SEQ ID NO: 107175 - DNA, 120 bp, Artificial Sequence
  ENSG00000099364_15 (sequence is synthesized)
ggtggcagaactgcgtctggcaggtttggagctgacagatgcctccctgcgtctcctgctgcgtcacgcaccccagctgagcgccctggacctgagccactgcgcccacgtcggggaccc

SEQ ID NO: 107176 - DNA, 120 bp, Artificial Sequence
  ENSG00000099364_16 (sequence is synthesized)
cagtgttcacctcctcacggcccccacgtccccactccgcgagaccctggtgcacctcaatcttgctggttgccaccgcctaacggaccactgcctcccgctgttccgccgctgccctcg

SEQ ID NO: 107177 - DNA, 120 bp, Artificial Sequence
  ENSG00000099364_17 (sequence is synthesized)
tctacgccgcctagacctgcgctcctgccgccagctctcacccgaagcttgtgcccggctggcagctgccgggccccctggccccttccgctgccctgaggagaagctgcttctcaagga

SEQ ID NO: 107178 - DNA, 120 bp, Artificial Sequence
  ENSG00000099364_18 (sequence is synthesized)
cagctagttgggcgccccccaccctcccccggactcgacaggagcctggacctccggcttcatttcacccctgctgggaggccaggttcccacctcaccaccctgggattcctgagtgtc

SEQ ID NO: 107179 - DNA, 120 bp, Artificial Sequence
  ENSG00000099364_19 (sequence is synthesized)
agtgacttgggattcccacccagggactcaagccagccacccccttctttcccccctgcactgatatctctgggggtttctccttcctatgtcctgcccctgctacctgcttcattgtcc

SEQ ID NO: 107180 - DNA, 120 bp, Artificial Sequence
  ENSG00000099364_20 (sequence is synthesized)
atcccctgggggagtgggtcagaggtactggagggtgctgagccgaagggacggtgggaggggggttatggtgcaagtgttgggggggagaatggggaaaggacacacacaggatatggg

SEQ ID NO: 107181 - DNA, 120 bp, Artificial Sequence
  ENSG00000099364_21 (sequence is synthesized)
agccaggggctgggggaggtggaaggggcggggggcggggcagacagcagaccaccaagggttcagggaacaaagaccagttacttggagtggggggtgggggtggggccacaaaaggaa

SEQ ID NO: 107182 - DNA, 120 bp, Artificial Sequence
  ENSG00000099364_22 (sequence is synthesized)
aaccggaggagcaattggggatccaggtgtcagaggtaggggaaccaggggcaagctggggctgagctggaggtggggatgagagcaggtgtggggacagcaatacccccttgggggtca

SEQ ID NO: 107183 - DNA, 120 bp, Artificial Sequence
  ENSG00000099364_23 (sequence is synthesized)
cctctctgcttcccccctccccaggcttcagttccttccccctgaccctgactccttgaacgtcactgaaaacggcagctattgcaaggagtgggggccgcgggcagccgctcttcagct

SEQ ID NO: 107184 - DNA, 120 bp, Artificial Sequence
  ENSG00000099364_24 (sequence is synthesized)
cgcggcccaggggagtggcgaggggcgccccaaccccctgcccgcctctccgcacaatacttgaacattcatctgtactgaagtgttacttgaaccgggggaatctcggacctgggggag

SEQ ID NO: 107185 - DNA, 120 bp, Artificial Sequence
  ENSG00000099364_25 (sequence is synthesized)
ccggggtgtgaggggactggaccagcttggactgagacctgagaccgggccggtgggcgcccatttgggactgcgccacccccaggcttgttcttgttttactgtattgagcggcggcac

SEQ ID NO: 107186 - DNA, 120 bp, Artificial Sequence
  ENSG00000099364_26 (sequence is synthesized)
ccgccggacccgcattatggctgggggcgccagcccaagaatggggaccatgggactcctccagcctggctcttcccactctttcatcgtcatggaaacttgtatcccatttgcccaggg

SEQ ID NO: 107187 - DNA, 120 bp, Artificial Sequence
  ENSG00000099364_27 (sequence is synthesized)
aactgccactcctggttgccatggaaatagcagccaacggacacctcccgatgccagtgctaaggctggaaatggccccctcttagttgccatgggaacctagtaacagactctgctggc

SEQ ID NO: 107188 - DNA, 120 bp, Artificial Sequence
  ENSG00000099364_28 (sequence is synthesized)
cctccttccctgccccttcctcgagcgcggggtggggcttcgggaccccggggatgagccgggccaggtcccgcccctccgcgcaggcctccggggggccggggcttaccatgtagggga

SEQ ID NO: 107189 - DNA, 120 bp, Artificial Sequence
  ENSG00000099364_29 (sequence is synthesized)
ggggagatctatccacatacctcaggtaacagggaggtgcgcgggtggggggagggctgggcggaccaaaggccggaggggtggggcctggggatagcgagaggcttgagaatggggccg

SEQ ID NO: 107190 - DNA, 120 bp, Artificial Sequence
  ENSG00000099364_30 (sequence is synthesized)
cttgggggagggaagaggcagcccggcgaggggcaagcgggggacccagccgggctgggcccctgggccccgggtctgtacaatacggtttgctataaaactcaaaatcttccagccggg

SEQ ID NO: 107191 - DNA, 120 bp, Artificial Sequence
  ENSG00000099364_31 (sequence is synthesized)
gggaggggagctgggactcggacccgggactgagtgggccccgggcagaagctgagcaccctgcgcccaaggagcccccgttggcctgggggggctgagggactgagcctcccagagcag

SEQ ID NO: 107192 - DNA, 80 bp, Artificial Sequence
  ENSG00000099364_32 (sequence is synthesized)
gacctccccctggaagggccgcgccgcagcccgtgggagggcctcgcccccggcgccccccatctccactcgccgccgtc

SEQ ID NO: 107193 - DNA, 120 bp, Artificial Sequence
  ENSG00000099364_33 (sequence is synthesized)
ttctgagcgttccgcgccccgcgccgcccggcccccccgccgccgatggccgccgacccgccgggagctgccgagaagggagagatggctcccgggacacgtgtgagccctcggcgttgc

SEQ ID NO: 107194 - DNA, 120 bp, Artificial Sequence
  ENSG00000099364_34 (sequence is synthesized)
cagccccactgccagccctgcggctcctggacctccgctggatcgaggatgttaaagactcccagctccgggagttgctgctgcctccaccagacaccaaaccagctgagcgccctggac

SEQ ID NO: 107195 - DNA, 120 bp, Artificial Sequence
  ENSG00000099364_35 (sequence is synthesized)
atcttgcttgtagtcctctttccttttcacctttccattgttcctgacgagtagaaatggcagcgggaaggcagcagatggactgcgactcccgtcagccctcggcgttgctgacgcccc

SEQ ID NO: 107196 - DNA, 120 bp, Artificial Sequence
  ENSG00000099364_36 (sequence is synthesized)
tgtaggtggagggacctgtcaggggtctcccaggccagggccccagtgggcccatctgaccctgccaccatccacctacagccctcggcgttgctgacgcccccaatgtcgtcgagcagc

SEQ ID NO: 107197 - DNA, 80 bp, Artificial Sequence
  ENSG00000099365_0 (sequence is synthesized)
atcctaccctgtgccgcagccgcatcgccaccgcagcccggcagagccgagcccggcccaggcccctgcccctgcccggc

SEQ ID NO: 107198 - DNA, 120 bp, Artificial Sequence
  ENSG00000099365_1 (sequence is synthesized)
cgcagcggccgcggcgccccccggcgcccccagaccccggcctccggcacagaggcgggagacccggagcagcagcagaggcaggaggactaggaggaggaggaggagccgtcgcaggat

SEQ ID NO: 107199 - DNA, 120 bp, Artificial Sequence
  ENSG00000099365_2 (sequence is synthesized)
ggatgaaggatcggactcaagagctgcggagtgcgaaagacagtgatgatgaagaggaggtggtccacgtggatcgggaccacttcatggatgagttctttgaacaggtggaagagatcc

SEQ ID NO: 107200 - DNA, 120 bp, Artificial Sequence
  ENSG00000099365_3 (sequence is synthesized)
ggggctgcattgagaaactgtcggaggatgtggagcaggtgaaaaaacagcatagcgccatcctggccgcacccaacccagatgagaagaccaaacaggagctggaggatctcactgcag

SEQ ID NO: 107201 - DNA, 120 bp, Artificial Sequence
  ENSG00000099365_4 (sequence is synthesized)
acatcaagaagacggccaacaaggttcggtccaaattgaaagcgatcgagcaaagcattgaacaggaggaggggctgaaccgttcctccgcggacctgcgcatccgcaagacccagcact

SEQ ID NO: 107202 - DNA, 120 bp, Artificial Sequence
  ENSG00000099365_5 (sequence is synthesized)
ccacactgtcccggaagttcgtggaggtaatgaccgaatataacgcgacccagtccaagtaccgggaccgctgcaaggaccggatccagcggcaactggagatcactggaaggaccacca

SEQ ID NO: 107203 - DNA, 120 bp, Artificial Sequence
  ENSG00000099365_6 (sequence is synthesized)
ccaacgaagaactggaagacatgctggagagcgggaagctggccatcttcacagatgacatcaaaatggactcacagatgacgaagcaggcgctgaatgagattgagacgaggcacaatg

SEQ ID NO: 107204 - DNA, 120 bp, Artificial Sequence
  ENSG00000099365_7 (sequence is synthesized)
agatcatcaagctggagaccagcatccgcgagctgcacgatatgtttgtggacatggccatgctcgtagagagccagggagagatgattgaccgcatcgagtacaacgtggaacattctg

SEQ ID NO: 107205 - DNA, 120 bp, Artificial Sequence
  ENSG00000099365_8 (sequence is synthesized)
tggactacgtggagcgagctgtgtctgacaccaagaaagcagtgaaatatcagagcaaggcccggaggaagaaaatcatgatcatcatttgctgtgtggtgctgggggtggtcttggcgt

SEQ ID NO: 107206 - DNA, 120 bp, Artificial Sequence
  ENSG00000099365_9 (sequence is synthesized)
catccattggggggacgctgggcttgtaggccccccccacccttctctctcccagacccttcccccaccacatcgggagcaatacccccaccacccctttcactccatcccctgctccag

SEQ ID NO: 107207 - DNA, 120 bp, Artificial Sequence
  ENSG00000099365_10 (sequence is synthesized)
gctcactcccaaaacagacccaggcagccccacccccacggcagaccctggtgtccctggacctcaccgggccatggaccccccccccgtccccgcacgtagatcgcagcaggcgtgatt

SEQ ID NO: 107208 - DNA, 120 bp, Artificial Sequence
  ENSG00000099365_11 (sequence is synthesized)
acacatgcacaccaacatgcatgccgccggcacatgctcgagacgtgtggacaccccagcgtgcgtgtgcgtgtgatgtgtgtgatgcaccagagcaccccctccacccccaccttgggt

SEQ ID NO: 107209 - DNA, 120 bp, Artificial Sequence
  ENSG00000099365_12 (sequence is synthesized)
gtgtgtgcgtggtctgagcttcccccttcaccggggctgttgtgtagactgcagccaagtgtaacacagcagtccatcacgccctctctgtcctctgtgaacagtgtgtgtgcgtgcgtg

SEQ ID NO: 107210 - DNA, 120 bp, Artificial Sequence
  ENSG00000099365_13 (sequence is synthesized)
agaccacagatctgtggacacaccatttgtgtacgtggaattttgtgtttcagtgtttgaacctaatgcaacagcaacaaagccactgatacctgagccctttgtgtctgctacaaacca

SEQ ID NO: 107211 - DNA, 120 bp, Artificial Sequence
  ENSG00000099365_14 (sequence is synthesized)
ggcaggtggtgtgtgtggactcacactcacattctcagaggatccagggaggcccaggtacacacaggccatggcagacaccccatgtctttgttaccccaggggctgtggcatgtccca

SEQ ID NO: 107212 - DNA, 120 bp, Artificial Sequence
  ENSG00000099365_15 (sequence is synthesized)
tgtgtgtgtgtgtgtgtgtgtgtccaggatgtgcctgaagtattgataggtcttctcagatagagccctccacactgtggactggacacctgttttgggagggcacagaaatgtgtattt

SEQ ID NO: 107213 - DNA, 120 bp, Artificial Sequence
  ENSG00000099365_16 (sequence is synthesized)
acagaaatgtgtatttcttgctacctagaatgcagctgtgtgtgtgtggcgtgcgtgtgtatgcacgtgtgtgtgtgtgttaggggctctctacatggtgtgctttttaatttttttttg

SEQ ID NO: 107214 - DNA, 120 bp, Artificial Sequence
  ENSG00000099365_17 (sequence is synthesized)
cgtattacacacacacacacacacgtgcgtgcacacacacttctaaggacgtggccccatctggctttgtctctccagttgtccttgccctgcccccctccccagaggtgctgcccagtg

SEQ ID NO: 107215 - DNA, 120 bp, Artificial Sequence
  ENSG00000099365_18 (sequence is synthesized)
ctggtgtggccacacacggctacatcattgtgcaggcagagctccctgcctgcccagcctcagggctctgcatgctcacacctagatcctcatcttcctccatgtctctgcccagcatag

SEQ ID NO: 107216 - DNA, 120 bp, Artificial Sequence
  ENSG00000099365_19 (sequence is synthesized)
ccccgagcccctggaagctggtacccctcagtgtgctcacacgtggcaaggccgaggtggccccaggcaggggccataccaggcacaaaccatgcacgctggcatgggtgcggggatcac

SEQ ID NO: 107217 - DNA, 120 bp, Artificial Sequence
  ENSG00000099365_20 (sequence is synthesized)
acgaatgcctcctggaaggaaagggctacttgtaggaatgttactgatgaggcaagatgccaaggacttccctgcagggatcaaagatcaggacacgaccccttcctcacacacccacct

SEQ ID NO: 107218 - DNA, 120 bp, Artificial Sequence
  ENSG00000099365_21 (sequence is synthesized)
cagacctgggagaggactgtgtgtcccccactgccccatcggatgctctgggctctgcctcagggaactcgggtttggggaaatgtctatttcagaagtactggagtggccagtgtggca

SEQ ID NO: 107219 - DNA, 120 bp, Artificial Sequence
  ENSG00000099365_22 (sequence is synthesized)
gtggccactcagggtgggctgggtcctgagacccatccccgacacctctcctgctgaaccctcaggctgctccccacaccagggtgtgactgaggggtacacaggcctggatttctggtg

SEQ ID NO: 107220 - DNA, 120 bp, Artificial Sequence
  ENSG00000099365_23 (sequence is synthesized)
tgaggaaggggctagcacctcccctgttgtgtagccagcacaggcacaatttgtgggtttggtggcaggtaggtggtgcgtgggagaaaggacagtgttagaggtccccactccgtggtc

SEQ ID NO: 107221 - DNA, 120 bp, Artificial Sequence
  ENSG00000099365_24 (sequence is synthesized)
taggatcatgaaaggtgaacacacaagtacacaaatgtgccatgccctggcatggggcttatgtgtgcacaggcaaggcactcggtgtgtgtgtgcggaccccagggtcccaggtcatgt

SEQ ID NO: 107222 - DNA, 120 bp, Artificial Sequence
  ENSG00000099365_25 (sequence is synthesized)
gaagcgtacgtgtgtgtgcattgtatgtgtgtgtacattgtgtgtgcattgtgtgtgcatgtggccaaacagatgtgacctcccagaacacagtacccctccacctctacccgagctcag

SEQ ID NO: 107223 - DNA, 120 bp, Artificial Sequence
  ENSG00000099365_26 (sequence is synthesized)
acagccgagctctcccttgtcctgtgtgtgtgtcagtgtggccacgtgcgtaaccccaggtgggctgtcctgagctgggggcctgcctgtcccttcccagaacgcccctctgcaggacag

SEQ ID NO: 107224 - DNA, 120 bp, Artificial Sequence
  ENSG00000099365_27 (sequence is synthesized)
gaagtctgccccaagtctggccacggccctcctgctcccatctcgggctgcttgggagacatcagagcaggccccagcccccagtcccctcttccggccgcctggacaggacccccattc

SEQ ID NO: 107225 - DNA, 120 bp, Artificial Sequence
  ENSG00000099365_28 (sequence is synthesized)
agcccaggtgtttccggaagtcccacggccttggggccacaggagaagggttgaagcgtggctggggcaccactccccccacctggagtggcattgggcccacagctgcccatctctggg

SEQ ID NO: 107226 - DNA, 120 bp, Artificial Sequence
  ENSG00000099365_29 (sequence is synthesized)
cctcaggtggaccaggggatctctaagggtctgctgtgccctttctatgcgtcctccacatcctatgatgtgcctgcttgttggctgctgtctgtgtgcgtcctggcatgttgtctggag

SEQ ID NO: 107227 - DNA, 120 bp, Artificial Sequence
  ENSG00000099365_30 (sequence is synthesized)
gctggtgtcttttgcatgttcttggacaaatgtgtgctacctgcccaggcgcctgcaaccattgagcccacatgtgccccacgtgtgccctgcgggtggtcccgggcctggccagggctc

SEQ ID NO: 107228 - DNA, 120 bp, Artificial Sequence
  ENSG00000099365_31 (sequence is synthesized)
agtgctcctcttccccctcctccctgttcccacccctcatgaagcacactgcgtgtccatcccatgtacccgtgggtcgacacacgctcttgccacgccctgagcgtgtacacatgatgt

SEQ ID NO: 107229 - DNA, 120 bp, Artificial Sequence
  ENSG00000099365_32 (sequence is synthesized)
gttctatgcattcaccctgccccccagcccgccctgcagaggacaagatgggtggccccggctccctttcccctaaccgcccctgcccgctgtgcagccgtgtgcgttggcgtgtgtttc

SEQ ID NO: 107230 - DNA, 120 bp, Artificial Sequence
  ENSG00000099365_33 (sequence is synthesized)
tgtgtcactggcgtgtcacgtgatgtagccgtgtttgctgacatgagcccctgcccccttctctgtttctccgttggtttctagagctctctccctccccttctcagaggggacaggact

SEQ ID NO: 107231 - DNA, 120 bp, Artificial Sequence
  ENSG00000099365_34 (sequence is synthesized)
cctggggcctggctggggcccagagccaggccgccctctcctgttagccctcagagtcccatttctgttagccctcagagtcccatttctattggtgaccaacttgcaaatggataaaac

SEQ ID NO: 107232 - DNA, 120 bp, Artificial Sequence
  ENSG00000099365_35 (sequence is synthesized)
acaggaaaatcctgccccccccttcctccctgcatgtcctgtccccagagccccccaccccaccctgggccaggtcaggccctgtgggacgggagaaatagcaaccaatccaacagcggg

SEQ ID NO: 107233 - DNA, 120 bp, Artificial Sequence
  ENSG00000099365_36 (sequence is synthesized)
ctggaagacatgctggagagcgggaagctggccatcttcacagatgacgtgagccgcgggtggggcgggctctgcttttggaaaatttttgcctcccctccctaagttcaggttgaacta

SEQ ID NO: 107234 - DNA, 120 bp, Artificial Sequence
  ENSG00000099365_37 (sequence is synthesized)
ctggggaattccatgggagcggagcaggaaggcacccccatcagatgacggagtcgttcgtgtgccaggcactgttctaagcactttccatcttcacattcacccaccaactcatttaat

SEQ ID NO: 107235 - DNA, 120 bp, Artificial Sequence
  ENSG00000099365_38 (sequence is synthesized)
actcacacatccccttcgaggaaaccccatttcacagatgaggaaaactggcccagagagatgaaatcacttggcaagatctcagagcgagggagagggccaggacttgaatcctgtcta

SEQ ID NO: 107236 - DNA, 120 bp, Artificial Sequence
  ENSG00000099365_39 (sequence is synthesized)
gtttcagagtcagaactctcgagccctaggatacacgacatactctgctactgaagcaagtcgtttcaccagagaactgatttgcctacattaaaagaaattttttttaattaaaaaaaa

SEQ ID NO: 107237 - DNA, 120 bp, Artificial Sequence
  ENSG00000099377_0 (sequence is synthesized)
agcggaaggacggtgtgcgggccggccagccctggacgaaagaagagggcccctccaggccagtctgggcaccctgggatagcggctgcagccaggcatggccgactctgcacaggccca

SEQ ID NO: 107238 - DNA, 120 bp, Artificial Sequence
  ENSG00000099377_1 (sequence is synthesized)
gaagctggtgtacctggtcacagggggctgtggcttcctgggagagcacgtggtgcgaatgctgctgcagcgggagccccggctcggggagctgcgggtctttgaccaacacctgggtcc

SEQ ID NO: 107239 - DNA, 120 bp, Artificial Sequence
  ENSG00000099377_2 (sequence is synthesized)
ctggctggaggagctgaagacagggcctgtgagggtgactgccatccagggggacgtgacccaggcccatgaggtggcagcagctgtggccggagcccatgtggtcatccacacggctgg

SEQ ID NO: 107240 - DNA, 120 bp, Artificial Sequence
  ENSG00000099377_3 (sequence is synthesized)
gctggtagacgtgtttggcagggccagtcccaagaccatccatgaggtcaacgtgcagggtacccggaacgtgatcgaggcttgtgtgcagaccggaacacggttcctggtctacaccag

SEQ ID NO: 107241 - DNA, 120 bp, Artificial Sequence
  ENSG00000099377_4 (sequence is synthesized)
cagcatggaagttgtggggcctaacaccaaaggtcaccccttctacaggggcaacgaagacaccccatacgaagcagtgcacaggcacccctatccttgcagcaaggccctggccgagtg

SEQ ID NO: 107242 - DNA, 120 bp, Artificial Sequence
  ENSG00000099377_5 (sequence is synthesized)
gctggtcctggaggccaacgggaggaaggtccgtggggggctgcccctggtgacgtgtgcccttcgtcccacgggcatctacggtgaaggccaccagatcatgagggacttctaccgcca

SEQ ID NO: 107243 - DNA, 120 bp, Artificial Sequence
  ENSG00000099377_6 (sequence is synthesized)
gggcctgcgcctgggaggttggctcttccgggccatcccggcctctgtggagcatggccgggtctatgtgggcaatgttgcctggatgcacgtgctggcagcccgggagctggagcagcg

SEQ ID NO: 107244 - DNA, 120 bp, Artificial Sequence
  ENSG00000099377_7 (sequence is synthesized)
ggcaaccctgatgggcggccaggtatacttctgctacgatggatcaccctacaggagctacgaggatttcaacatggagttcctgggcccctgcggactgcggctggtgggcgcccgccc

SEQ ID NO: 107245 - DNA, 120 bp, Artificial Sequence
  ENSG00000099377_8 (sequence is synthesized)
attgctgccctactggctgctggtgttcctggctgccctcaatgccctgctgcagtggctgctgcggccactggtgctctacgcacccctgctgaacccctacacgctggccgtggccaa

SEQ ID NO: 107246 - DNA, 120 bp, Artificial Sequence
  ENSG00000099377_9 (sequence is synthesized)
ccgtcagcaccgacaaggctcagcgccatttcggctatgagcccctgttctcgtgggaggatagccggacccgtaccattctctgggtacaggccgctacgggttcagcccagtgacggt

SEQ ID NO: 107247 - DNA, 120 bp, Artificial Sequence
  ENSG00000099377_10 (sequence is synthesized)
ggggctggggcctggaggcccagatacagcacatccacccaggtcccgagccctcacaccctggacgggaagggacagctgcattccagagcaggaggcagggctctggggccagaatgg

SEQ ID NO: 107248 - DNA, 76 bp, Artificial Sequence
  ENSG00000099377_11 (sequence is synthesized)
gcattccagagcaggaggcagggctctggggccagaatggctgtccttgtcgtagagccctccacattttcttttt

SEQ ID NO: 107249 - DNA, 89 bp, Artificial Sequence
  ENSG00000099377_12 (sequence is synthesized)
aagcaatcctcctgcctcagcctcctgaacagctgggaccacaggtgcacgccaccacacctggcttttttttgttgtttttagagaca

SEQ ID NO: 107250 - DNA, 120 bp, Artificial Sequence
  ENSG00000099377_13 (sequence is synthesized)
aactcctgggctcaagtgatcttcccacgtgggcctcccaaaacgctggaactacaagtgtgagccaccgcgcctggcccaagccctccacattttcaatccaggagccttgagtctgtg

SEQ ID NO: 107251 - DNA, 120 bp, Artificial Sequence
  ENSG00000099377_14 (sequence is synthesized)
tgtgttgtgtcctgacacctccaagttctagggccgtcaggacacgggagggtttggggacagagtgtccttcctctgtcctctcatcccagtcctgatggccgcttggtgagtgtctgg

SEQ ID NO: 107252 - DNA, 120 bp, Artificial Sequence
  ENSG00000099377_15 (sequence is synthesized)
tgccctggtggcctgccccagctctcttctggctttctgagcaggaagcgagcagaggctccacaggcttacgctgctctcctgacagccacacgcgaccctcggtgcagagtgcagagg

SEQ ID NO: 107253 - DNA, 120 bp, Artificial Sequence
  ENSG00000099377_16 (sequence is synthesized)
cggctctggttcctccagccacctcagtccctctttgggaggtgatgttcccattgtttttcaaaggcctcaccttcaactgtctgtcttagaattcccctctggagggctatggcctcc

SEQ ID NO: 107254 - DNA, 120 bp, Artificial Sequence
  ENSG00000099377_17 (sequence is synthesized)
ctatgctttcacttcccacctctctacctaagttccttcccagcacatcgccagccctgggcctggggatgtccccaatgctgtacctggctgaccccggattaaaagcctcatccacga

SEQ ID NO: 107255 - DNA, 120 bp, Artificial Sequence
  ENSG00000099377_18 (sequence is synthesized)
acggtgtgcgggccggccagccctggacgaaagaagagggcccctccaggccagtctgggcaccctgggatagcggctgcagctcccaggatcagctctgccctccccgcaaacgccagc

SEQ ID NO: 107256 - DNA, 120 bp, Artificial Sequence
  ENSG00000099377_19 (sequence is synthesized)
agcggaaggacggtgtgcgggccggccagccctggacgaaagaagagggcccctccaggccagtctgggcaccctgggatagcggctgcagcccgcccctctctccgtaactcagccatc

SEQ ID NO: 107257 - DNA, 120 bp, Artificial Sequence
  ENSG00000099377_20 (sequence is synthesized)
aggagctgaagacaggttcttgttgggggagcttgtggtggagagggtgtggacgcttccccaacccttcccaagctgggatccccacccctgcagtggaacagatgatgctggtttctg

SEQ ID NO: 107258 - DNA, 120 bp, Artificial Sequence
  ENSG00000099381_0 (sequence is synthesized)
gtcaaggtcccgggccgcagcatctagatcgtcgtggcgaagccgactctccgggggatgcggccaatctccaagctccctgggccgcaacttccgagcctcccagggcgccggccgagg

SEQ ID NO: 107259 - DNA, 120 bp, Artificial Sequence
  ENSG00000099381_1 (sequence is synthesized)
cgaagccgctaccctcggccccgtgggtcccccggcagcgcctgtggcgaaagtgcgaatgcagaccctgtgcccgctgggcctcgcgcagtgtaaatgagcaaagatggatcaggaagg

SEQ ID NO: 107260 - DNA, 120 bp, Artificial Sequence
  ENSG00000099381_2 (sequence is synthesized)
tgggggagatgggcagaaggccccgagcttccagtggcggaactacaagctcatcgtggatcctgccttggaccctgccctgcgcaggccttctcagaaggtgtaccgctatgatggagt

SEQ ID NO: 107261 - DNA, 120 bp, Artificial Sequence
  ENSG00000099381_3 (sequence is synthesized)
ccacttcagtgtcaacgactcaaagtatataccagtcgaagacctccaagacccccgttgccatgtcaggtccaaaaacagagacttttccctcccagtccctaagtttaagctggacga

SEQ ID NO: 107262 - DNA, 120 bp, Artificial Sequence
  ENSG00000099381_4 (sequence is synthesized)
gttctatattggacagattccactgaaggaagtgacttttgcaaggctgaatgacaacgtgcgggagaccttcctgaaggatatgtgccgtaagtacggtgaggtggaagaggtagagat

SEQ ID NO: 107263 - DNA, 120 bp, Artificial Sequence
  ENSG00000099381_5 (sequence is synthesized)
cctccttcacccccgtacgcgcaagcacctgggcctggcccgtgtgctcttcaccagcactcggggcgccaaggaaacggtcaaaaacctccaccttacctccgtcatgggcaacatcat

SEQ ID NO: 107264 - DNA, 120 bp, Artificial Sequence
  ENSG00000099381_6 (sequence is synthesized)
ccatgcccagcttgacatcaaaggacaacaacgaatgaaatactatgaactaattgtcaatggctcctacacccctcagactgtgcccactgggggcaaggccctgagtgagaagttcca

SEQ ID NO: 107265 - DNA, 120 bp, Artificial Sequence
  ENSG00000099381_7 (sequence is synthesized)
aggctcgggtgcagccactgagacggccgaatcccgccgccgctcttcctctgacacagctgcctacccagcaggcaccactgcggtgggcactcctggcaacggcaccccctgctccca

SEQ ID NO: 107266 - DNA, 120 bp, Artificial Sequence
  ENSG00000099381_8 (sequence is synthesized)
ggacacaagcttctccagcagccgacaagataccccatcttcctttggccagttcacacctcagtcctcccaaggaaccccctacacgtctcggggcagcaccccctactctcaggactc

SEQ ID NO: 107267 - DNA, 120 bp, Artificial Sequence
  ENSG00000099381_9 (sequence is synthesized)
tgcctactccagcagcaccacttcaacctccttcaagccccggcggtcagagaacagctaccaagatgccttttcccgccgccacttctctgcatcttcagcctccacaaccgcctccac

SEQ ID NO: 107268 - DNA, 120 bp, Artificial Sequence
  ENSG00000099381_10 (sequence is synthesized)
ggccatcgccgccaccactgcagccactgcctcatcctccgcctcttcctcctcattgtcctcgtcctcctcgtcatcctcttcctcctcgtcctctcagtttcgtagttctgatgcaaa

SEQ ID NO: 107269 - DNA, 120 bp, Artificial Sequence
  ENSG00000099381_11 (sequence is synthesized)
ctacccagcgtattatgaaagctggaatcgctaccagcgccatacttcctacccaccacgccgggccacacgggaggaaccccctggagccccttttgctgaaaatacagctgagcgctt

SEQ ID NO: 107270 - DNA, 120 bp, Artificial Sequence
  ENSG00000099381_12 (sequence is synthesized)
cccaccttcttacacctcctacctgccccccgagcccagccggcccaccgaccaggactaccggcctcctgcctcagaggctccacccccggagcctccagaacctggtggaggcggggg

SEQ ID NO: 107271 - DNA, 120 bp, Artificial Sequence
  ENSG00000099381_13 (sequence is synthesized)
tggaggagggcccagccctgagagagaagaagttcggacttccccccgcccagcctcccctgcccgctctggctccccagccccggagaccaccaatgagagtgtgcccttcgcccagca

SEQ ID NO: 107272 - DNA, 120 bp, Artificial Sequence
  ENSG00000099381_14 (sequence is synthesized)
cagcagcctggattcccgcatcgagatgctgctgaaggagcagcgctccaagttttccttcttggcctctgacacagaggaggaggaagagaacagcagcatggtccttggggccagaga

SEQ ID NO: 107273 - DNA, 120 bp, Artificial Sequence
  ENSG00000099381_15 (sequence is synthesized)
tacagggagtgaggtgccttctgggtcagggcatgggccctgcacaccccctccggccccagctaattttgaggatgtggcacctacagggagcggggagccaggggctacccgggagtc

SEQ ID NO: 107274 - DNA, 120 bp, Artificial Sequence
  ENSG00000099381_16 (sequence is synthesized)
tcccaaggcaaatggacagaaccaggcttctccatgctcttctggagacgacatggagatctccgacgacgaccggggtggctcaccccctccggccccgacgccccctcagcagcctcc

SEQ ID NO: 107275 - DNA, 120 bp, Artificial Sequence
  ENSG00000099381_17 (sequence is synthesized)
gccacctccccctcccccgccgcctcctcctccctacctggcgtcccttcctcttggttatcctccccaccaacctgcctacctcctcccacccagacctgatgggccgccgccccctga

SEQ ID NO: 107276 - DNA, 120 bp, Artificial Sequence
  ENSG00000099381_18 (sequence is synthesized)
gtaccccccacctcctccaccacccccgcacatctatgactttgtgaactccttggagctcatggaccgacttggggctcagtggggagggatgcccatgtccttccagatgcagaccca

SEQ ID NO: 107277 - DNA, 120 bp, Artificial Sequence
  ENSG00000099381_19 (sequence is synthesized)
gatgttaactcggctccatcagctgcggcagggcaagggattgattgccgcctcagctggcccccccggtggggcctttggggaggccttcctcccgtttccacccccgcaggaggcagc

SEQ ID NO: 107278 - DNA, 120 bp, Artificial Sequence
  ENSG00000099381_20 (sequence is synthesized)
ctacggcttgccgtatgctctatatgcacaggggcaggagggcagaggggcatactcacgggaggcctaccacctgcccatgccaatggcagccgagcccctgccctcctcctcagtctc

SEQ ID NO: 107279 - DNA, 120 bp, Artificial Sequence
  ENSG00000099381_21 (sequence is synthesized)
gggagaggaggcccggctgccacccagggaagaagcagagctggcagagggcaagaccctcccgacagcaggcaccgtgggccgtgtgctcgccatgctggtccaggagatgaagagcat

SEQ ID NO: 107280 - DNA, 120 bp, Artificial Sequence
  ENSG00000099381_22 (sequence is synthesized)
catgcagcgagacctcaaccgcaagatggtggagaacgtggccttcggagcctttgaccagtggtgggagagcaaggaggagaaggccaagccattccagaacgcggccaagcagcaagc

SEQ ID NO: 107281 - DNA, 120 bp, Artificial Sequence
  ENSG00000099381_23 (sequence is synthesized)
caaggaggaggataaagagaagacgaagctgaaggagcctggcctgctgtccctcgtggactgggccaagagcgggggcactacgggcatcgaggctttcgcctttgggtcagggctgag

SEQ ID NO: 107282 - DNA, 120 bp, Artificial Sequence
  ENSG00000099381_24 (sequence is synthesized)
agacgaccctgaacaagagaaggaggctggagagccaggacgtccggggaccaagcccccgaagcgggacgaagagcgaggcaagacccagggcaagcaccgcaagtcctttgctctgga

SEQ ID NO: 107283 - DNA, 120 bp, Artificial Sequence
  ENSG00000099381_25 (sequence is synthesized)
cagcgaaggggaggaggcatcccaggagtcctcctcggagaaggatgaggaggatgacgaggaagatgaggaagatgaagatcgagaggaagctgtggataccacaaagaaggagacaga

SEQ ID NO: 107284 - DNA, 120 bp, Artificial Sequence
  ENSG00000099381_26 (sequence is synthesized)
ggtgtcggatggcgaggacgaggaaagcgattcgtcttccaaatgttctctgtatgctgactcagatggcgaaaatgacagcacatcagactccgagagcagcagctcttccagctcctc

SEQ ID NO: 107285 - DNA, 120 bp, Artificial Sequence
  ENSG00000099381_27 (sequence is synthesized)
atcctcctcctcctcctcgtcctcatcctcctcgtcctcttcatcctctgagtcctcctctgaagatgaagaggaagaggagcggccagcagcccttccctcagcctccccgccccccag

SEQ ID NO: 107286 - DNA, 120 bp, Artificial Sequence
  ENSG00000099381_28 (sequence is synthesized)
agaagtcccagtgcccacgccagcacctgtggaggtgccagtgccggaaagggttgcaggctccccagtcacacccctgcccgaacaggaggcgtctccagcaaggcctgcaggccccac

SEQ ID NO: 107287 - DNA, 120 bp, Artificial Sequence
  ENSG00000099381_29 (sequence is synthesized)
ggaggagtcaccccccagtgcgcctctgcgtcccccagaaccacctgctgggcccccggcccctgccccacgccccgatgagcgtccctcttctcccatccccctcctgcccccacccaa

SEQ ID NO: 107288 - DNA, 120 bp, Artificial Sequence
  ENSG00000099381_30 (sequence is synthesized)
gaaacgccggaaaactgtctccttctctgccatcgaggtggtgccagccccggagccccctccagccacaccgccgcaggccaagtttcccggcccagcctcccgcaaggctccccgggg

SEQ ID NO: 107289 - DNA, 120 bp, Artificial Sequence
  ENSG00000099381_31 (sequence is synthesized)
cgtggagcggaccatccgcaacctgcccctggaccacgcatctctggtcaagagttggcccgaggaggtgtcccgaggaggccggagccgggctggaggccgaggccgcctcaccgagga

SEQ ID NO: 107290 - DNA, 120 bp, Artificial Sequence
  ENSG00000099381_32 (sequence is synthesized)
agaggaggctgagccagggacagaggtggacctggcggtcctggccgacctggccctgacccctgcccggcgcgggctgcctgccctgcctgctgttgaagactcagaggccacagagac

SEQ ID NO: 107291 - DNA, 120 bp, Artificial Sequence
  ENSG00000099381_33 (sequence is synthesized)
atcggacgaggccgagcgccctaggcccctgctcagccacatcctcctggagcacaactatgccctggccgtcaagcccacgccccctgcgccagccctgcggcccccggagccagtgcc

SEQ ID NO: 107292 - DNA, 120 bp, Artificial Sequence
  ENSG00000099381_34 (sequence is synthesized)
cgcacccgccgccctcttcagttccccagctgatgaggtcctggaggcccccgaggtggtggtggctgaggcggaggagcccaagccgcagcaactgcagcagcagcgggaggagggcga

SEQ ID NO: 107293 - DNA, 120 bp, Artificial Sequence
  ENSG00000099381_35 (sequence is synthesized)
agaggagggggaggaagagggggaggaagaggaggaggagtcctctgacagcagcagcagcagcgatggggagggcgccctccggaggcgcagcctccgctcccacgcccggcgccgccg

SEQ ID NO: 107294 - DNA, 120 bp, Artificial Sequence
  ENSG00000099381_36 (sequence is synthesized)
ccctccgcccccacccccgccgccaccgccccgcgcctacgagccacgcagtgagtttgaacagatgaccatcctgtatgacatttggaactcgggcctggactcagaggacatgagtta

SEQ ID NO: 107295 - DNA, 120 bp, Artificial Sequence
  ENSG00000099381_37 (sequence is synthesized)
cctgcggcttacgtacgagcggctgctgcagcagacaagcggggctgactggctcaacgacactcactgggtccatcacacaatcaccaacctgaccaccccaaaacgcaagcggcggcc

SEQ ID NO: 107296 - DNA, 120 bp, Artificial Sequence
  ENSG00000099381_38 (sequence is synthesized)
ccaggatgggccccgggagcaccagacaggctcagcccgcagcgaaggctactaccccatcagcaagaaggagaaggacaagtacctggacgtgtgcccagtctcggcccggcagctgga

SEQ ID NO: 107297 - DNA, 120 bp, Artificial Sequence
  ENSG00000099381_39 (sequence is synthesized)
gggcgtggacactcaggggacgaaccgcgtgctgtccgagcgccggtccgagcagcggcggctgctgagcgccatcggtacctccgccatcatggacagtgacctgctgaaactcaacca

SEQ ID NO: 107298 - DNA, 120 bp, Artificial Sequence
  ENSG00000099381_40 (sequence is synthesized)
gctcaagttccggaagaagaagctccgatttggccggagccggatccacgagtggggtctgtttgccatggaacccattgctgctgacgagatggtcatcgaatacgtgggtcagaacat

SEQ ID NO: 107299 - DNA, 120 bp, Artificial Sequence
  ENSG00000099381_41 (sequence is synthesized)
ccgtcagatggtggccgacatgcgggagaagcgctacgtgcaggagggcattggcagcagctacctgttccgggtggaccacgacaccatcatcgatgccaccaagtgtggcaacctggc

SEQ ID NO: 107300 - DNA, 120 bp, Artificial Sequence
  ENSG00000099381_42 (sequence is synthesized)
cagattcatcaaccactgctgcacgcctaactgctacgccaaggtcatcaccatcgagtcccagaagaagatcgtgatctactccaagcagcccattggcgtggacgaggagatcaccta

SEQ ID NO: 107301 - DNA, 120 bp, Artificial Sequence
  ENSG00000099381_43 (sequence is synthesized)
cgactacaagttcccactggaagacaacaagatcccgtgtctgtgtggcacagagagctgccggggctccctaaactgaggtggggcaggatgggtgcccacacccctatttattccccc

SEQ ID NO: 107302 - DNA, 120 bp, Artificial Sequence
  ENSG00000099381_44 (sequence is synthesized)
tggtgccctgagctcccagcacccccccagccttagtgggctcagcagggcccacatgcccccatctccaagcgtggggttgggggccccaagcccagcgagggagcctcagtccctgga

SEQ ID NO: 107303 - DNA, 120 bp, Artificial Sequence
  ENSG00000099381_45 (sequence is synthesized)
ggcagcttctgcctctcctgtcacccctgcccaccaccccctgattgtttttctttgcggagaagaagctgtaaatgttttgtagcagccagcagctgtttcctgtggaaacctggggtg

SEQ ID NO: 107304 - DNA, 120 bp, Artificial Sequence
  ENSG00000099381_46 (sequence is synthesized)
ccggcctgtacagattctgtcctggggggctacacagtcctcttgctttgtgttaatggggacttccccttacgccctgcgtgtacccctccccagtttaggggtctctggggcagtggc

SEQ ID NO: 107305 - DNA, 120 bp, Artificial Sequence
  ENSG00000099381_47 (sequence is synthesized)
catgttctccccctgggggggctctgcacccccagtcctggggactccgtgcctggaaccctgcctcatctgttcctgccagaccctgagggtcacccttccaccctggtgtcactcccc

SEQ ID NO: 107306 - DNA, 120 bp, Artificial Sequence
  ENSG00000099381_48 (sequence is synthesized)
ggctcagccaggccaggatggcggggtgggtcccttttgctgggctggactgtacatatgttaatagcgcaaacccgacgccacatttttataattgtgattaaactttattgtacaaaa

SEQ ID NO: 107307 - DNA, 120 bp, Artificial Sequence
  ENSG00000099381_49 (sequence is synthesized)
actcactgggtccatcacacaaatatcctgagtgtgggcggccttccccgggcttgggtcctcccccgacccctccaggcacctgcatctgtgccccactctgtctgcctcccctctggc

SEQ ID NO: 107308 - DNA, 120 bp, Artificial Sequence
  ENSG00000099385_0 (sequence is synthesized)
catcatgcgacttgtctatgttgctgtgtgtagccgggcatgtcaatcccgttgctgtgtctatgtgcatggtagtgagtagggcatcattcattttccattctgttgatgggttatttc

SEQ ID NO: 107309 - DNA, 120 bp, Artificial Sequence
  ENSG00000099385_1 (sequence is synthesized)
cagtttggggctgttatgaaagggctctgaacattcccatgcaccctcttgatgctcacacctacacatttctgctgggtgttgacagcctaggagtggaactgctggatcacagaggtg

SEQ ID NO: 107310 - DNA, 120 bp, Artificial Sequence
  ENSG00000099385_2 (sequence is synthesized)
gcatatgttcggcttcattagaaaactgccagttttccaaaatgtctctaccaatttacactcccccagaaatacaagagaggtccagtcgctctactttctcgcctccacacggtgcgg

SEQ ID NO: 107311 - DNA, 120 bp, Artificial Sequence
  ENSG00000099385_3 (sequence is synthesized)
tctttttcactttagccattctggtggtggagacccactcgtattcgcagcgcctggagcgtaattggcactcagttaacaagactgttgaatgaatggatgactgagtaagttgggcgg

SEQ ID NO: 107312 - DNA, 120 bp, Artificial Sequence
  ENSG00000099385_4 (sequence is synthesized)
tgtagaccaacagcctggcgagggcggacacacgcacgcactccacacacagcgtttcgcggacacccaccgcggctcacgcagcgcaggacacagaccctgtcgcgcaccccgcgccca

SEQ ID NO: 107313 - DNA, 120 bp, Artificial Sequence
  ENSG00000099385_5 (sequence is synthesized)
cgtggtctgaacacacggcctcggccctgcctcgcgcgtccggtcgcaactcccgctctccgtccccaactcgcgcgtccgtccccaactcccgctctcggcggcgggcagggggcgctg

SEQ ID NO: 107314 - DNA, 80 bp, Artificial Sequence
  ENSG00000099385_6 (sequence is synthesized)
gtccccaactcccgctctcggcggcgggcagggggcgctgagcgtccaggcgctccaagggggcgggcccgggtcggggc

SEQ ID NO: 107315 - DNA, 80 bp, Artificial Sequence
  ENSG00000099385_7 (sequence is synthesized)
gacgagagagggcgcggccaactccaggggggacggcaggccgagagcgcggcgcccgggcctggcgcggagcctgagcc

SEQ ID NO: 107316 - DNA, 120 bp, Artificial Sequence
  ENSG00000099385_8 (sequence is synthesized)
ccggccggactgtacgggccgagacccggagccgggccaaggatgacatcaagaaggtgatggcgaccatcgagaaggtccggagatgggagaagcgatgggtgactgtgggcgacactt

SEQ ID NO: 107317 - DNA, 120 bp, Artificial Sequence
  ENSG00000099385_9 (sequence is synthesized)
cccttcgtatcttcaagtgggtgccagtggtggatccccaggaggaggagcgaaggcgggcaggtggcggggcagagagatcccgtggccgggaacgtcggggcaggggcgccagtcccc

SEQ ID NO: 107318 - DNA, 120 bp, Artificial Sequence
  ENSG00000099385_10 (sequence is synthesized)
gagggggtggccctctcatcctgctggatcttaatgatgagaacagcaaccagagtttccattcggaaggttccctgcaaaagggcacagagcccagtcctgggggcaccccccagccca

SEQ ID NO: 107319 - DNA, 120 bp, Artificial Sequence
  ENSG00000099385_11 (sequence is synthesized)
gccgccctgtgtcacctgccggacccccagaaggggtccctgaggaggctcagcccccacggctgggccaagagagagatcccgggggcataactgctggcagcaccgacgaacccccaa

SEQ ID NO: 107320 - DNA, 120 bp, Artificial Sequence
  ENSG00000099385_12 (sequence is synthesized)
tgctgaccaaggaggagcctgttccagaactgctggaagctgaggcccccgaagcttaccctgtctttgagccagtgccacctgtccctgaggcagcccagggtgacacagaggactcgg

SEQ ID NO: 107321 - DNA, 120 bp, Artificial Sequence
  ENSG00000099385_13 (sequence is synthesized)
agggtgcccccccactcaagcgcatctgcccaaatgcccctgacccctgagaagccggcctgcctgtcctgttgccccaggggcccctttggctttttacaaataaagacccttttgtaa

SEQ ID NO: 107322 - DNA, 120 bp, Artificial Sequence
  ENSG00000099385_14 (sequence is synthesized)
gcccaggaggggcctccggacaaatgtccggcccagttccatggcggtgccggacaccagagctcccgggggaggcagcaaggccccgagggcacccagaacaatcccccagggtaaggg

SEQ ID NO: 107323 - DNA, 120 bp, Artificial Sequence
  ENSG00000099385_15 (sequence is synthesized)
gaggtgagtgggctccccaagcaagccaagacccctaaagcctcccttggctgccccaagatccagccactacctgtgccccgagggcggaaagagcttcccagctcacccaccgcggta

SEQ ID NO: 107324 - DNA, 120 bp, Artificial Sequence
  ENSG00000099385_16 (sequence is synthesized)
ggcgagcggccccacacctgcccgaacctaaggccacagcacccatctggctcgccactggcgcccgaatgcatgggaagggcttagggcagaactcggaccacatccagtgcctgaggc

SEQ ID NO: 107325 - DNA, 120 bp, Artificial Sequence
  ENSG00000099385_17 (sequence is synthesized)
cgccttgctagaggcctaggggaggggtgcactgggctgcctcgcccacctcctcacgcacccatgcggccaccctcccagcggtctgagtgtgccatgcgaggcgcctgccaccccggg

SEQ ID NO: 107326 - DNA, 120 bp, Artificial Sequence
  ENSG00000099385_18 (sequence is synthesized)
agaggcgccgagtcccgagtcctgccggcactgagcctccgggtccacagcgggcaagggccgtggcggggacaagcgcaggggacccgccggcctcccgccttctgcagcaccacgaga

SEQ ID NO: 107327 - DNA, 120 bp, Artificial Sequence
  ENSG00000099385_19 (sequence is synthesized)
tgcccacgtggcacctggacgtccatgcatatgttgaggcccgtgcacgcgcagagaccccagcgcagaagccgccccgcacgccagggcttatgtatgccagcgctgggagacctccag

SEQ ID NO: 107328 - DNA, 120 bp, Artificial Sequence
  ENSG00000099385_20 (sequence is synthesized)
cgcccgaggacatacggcaagtggttccaccagggtgtcagcctagcaggccaacctgggaacccatgtggacaagcggcctttcagcccaggcgcccgcctcgggtggaggcgtggaga

SEQ ID NO: 107329 - DNA, 120 bp, Artificial Sequence
  ENSG00000099385_21 (sequence is synthesized)
cttctggcgcagccctgagctggtggcctaacctacctggaaaatcctagcccgagaagcagcgcgagtgagccttttgggtggttccaaggcccttcaccaagctctcacttcctgact

SEQ ID NO: 107330 - DNA, 120 bp, Artificial Sequence
  ENSG00000099385_22 (sequence is synthesized)
tcaccgttgggtctgttgtactaggaaataataacgcctcccatttatcaagggtttactctgtaccaggcattgtgactgatgtaatttagttctcactgcatccctgtggcatggata

SEQ ID NO: 107331 - DNA, 120 bp, Artificial Sequence
  ENSG00000099385_23 (sequence is synthesized)
ttctcattatctgcattttgcagatggagaaattgagtctctgagaggttaaggaacctgcccaaagtcagcaatgcagtaccacttcttgtgctgggacacagcggggttaaggccgtg

SEQ ID NO: 107332 - DNA, 120 bp, Artificial Sequence
  ENSG00000099385_24 (sequence is synthesized)
ggttaacagggcctccatttatggagagcattcatttttctctggtgaattacagaaaacgctttctacactgaagtgagtagatactccctgggatgaaagtcaacattcgtaccaatg

SEQ ID NO: 107333 - DNA, 120 bp, Artificial Sequence
  ENSG00000099385_25 (sequence is synthesized)
attgagatgacagaaatttcacgcttcaagccaatgctttaggttcagcccatggaattctggaatgaccttttctcagtcgtcaccagggtgatgttggtgaaggaagctccattccag

SEQ ID NO: 107334 - DNA, 120 bp, Artificial Sequence
  ENSG00000099385_26 (sequence is synthesized)
tgcttccccttccgccatgactgtaagtttcctgggacctctccagccatgctgaaccgattcgggagtgagaatgacgaggagagcccttcacgagaaggggctgaagacagagcccct

SEQ ID NO: 107335 - DNA, 120 bp, Artificial Sequence
  ENSG00000099385_27 (sequence is synthesized)
agtggagacacttcgcaacatcaacaacacacttggcccaggaactgctaatgaacatatagtacagtggtggttcaagaagttttgcaaagaagacaagagccttgaagatgagaagca

SEQ ID NO: 107336 - DNA, 120 bp, Artificial Sequence
  ENSG00000099385_28 (sequence is synthesized)
ctcattgaagctgatcctgttaaaactacacaagaagttgcccaagaactcaaccatcgaccattctatggccgtctggcatttgaagcaaattggaaaggtgaaaaagctcaataagtg

SEQ ID NO: 107337 - DNA, 120 bp, Artificial Sequence
  ENSG00000099385_29 (sequence is synthesized)
ggtgcctcatgaccttaccaaaaattaaaaaaatcgtcattttgaagtgtcatcttctcttattctatgcaacaacaacgaaccatttcttgatcagattgtgatgtgtgacaaaaagtc

SEQ ID NO: 107338 - DNA, 120 bp, Artificial Sequence
  ENSG00000099385_30 (sequence is synthesized)
gattttatatgacaaccggcaacaaccagctctgtggctgtactgagaagcagctctaaagtacttcccaaagccaaccttgcaccaaaaaaaggtcacggtcactgtttggtggtctgc

SEQ ID NO: 107339 - DNA, 77 bp, Artificial Sequence
  ENSG00000099385_31 (sequence is synthesized)
tgcaccaaaaaaaggtcacggtcactgtttggtggtctgctgctggtctgatccactgcaactttctgaatcccagt

SEQ ID NO: 107340 - DNA, 120 bp, Artificial Sequence
  ENSG00000099385_32 (sequence is synthesized)
aaactgcaaggcctgctgtggcactgctcaacagaaagggcccagttattctccatgacaacaaccacacatcgcataaccagcgcttcaaatattgaggccgggtgcggtggctcacgc

SEQ ID NO: 107341 - DNA, 120 bp, Artificial Sequence
  ENSG00000099399_0 (sequence is synthesized)
acttccgctttggaggcgaggacccgagcgagtgtagggggtgcggcgtctggtcagccaggggtgaattctcaggactggtcggcagtcaagccatcatgcctcgtggtcagaagagta

SEQ ID NO: 107342 - DNA, 120 bp, Artificial Sequence
  ENSG00000099399_1 (sequence is synthesized)
agctccgtgcccgtgagaaacgccgcaaggcccgagatgagacccggggtctcaatgttcctcaggtcactgaagcagaggaagaagaggccccctgctgttcctcttctgtttctgggg

SEQ ID NO: 107343 - DNA, 120 bp, Artificial Sequence
  ENSG00000099399_2 (sequence is synthesized)
gtgctgcttcaagctctcctgctgctggcattccccaggagcctcagagagccccaaccactgccgctgctgcggctgcgggtgtttcatccacaaaatctaaaaaaggtgccaagagcc

SEQ ID NO: 107344 - DNA, 120 bp, Artificial Sequence
  ENSG00000099399_3 (sequence is synthesized)
accaaggtgagaaaaatgcaagttcctcccaggcctcaacatccactaagagcccaagcgaagatcctctaaccaggaagtcagggtcgttggtgcagttcctgttgtacaagtataaaa

SEQ ID NO: 107345 - DNA, 120 bp, Artificial Sequence
  ENSG00000099399_4 (sequence is synthesized)
taaaaaagtccgttacaaagggagaaatgctgaaaattgttggcaaaaggttcagggagcacttccctgagatcctcaagaaagcctctgagggcctcagtgttgtctttggccttgagc

SEQ ID NO: 107346 - DNA, 120 bp, Artificial Sequence
  ENSG00000099399_5 (sequence is synthesized)
tgaataaagtcaaccccaacggccacacttacaccttcatcgacaaggtagacctcactgatgaggaatccctgctcagttcctgggactttcccaggagaaagcttctgatgcctctcc

SEQ ID NO: 107347 - DNA, 120 bp, Artificial Sequence
  ENSG00000099399_6 (sequence is synthesized)
tgggaattcctgaatatgttgggagtctatgatggagaggagcactcagtctttggggaaccctggaagctcatcaccaaagatctggtgcaggaaaaatatctggagtacaagcaggtg

SEQ ID NO: 107348 - DNA, 120 bp, Artificial Sequence
  ENSG00000099399_7 (sequence is synthesized)
cccagcagtgatcccccacgctttcaattcctgtggggtccgagagcctatgctgaaaccagcaagatgaaagtcctggagtttttggccaaggtaaatggtaccaccccctgtgccttc

SEQ ID NO: 107349 - DNA, 120 bp, Artificial Sequence
  ENSG00000099399_8 (sequence is synthesized)
ccaacccattacgaagaagctttgaaagatgaagagaaagccggagtctgagccagagttgtagccaggccttgcactactgccatagccaatcaatctcccaaagccaagtttacctgc

SEQ ID NO: 107350 - DNA, 120 bp, Artificial Sequence
  ENSG00000099399_9 (sequence is synthesized)
tgttctcacccccaatgaggtcttaggcagattctttactttgtaattcaaaaggcctgttaacctttgttcttgttatgcatgaataacttgttgactttttttttttctctttttcaa

SEQ ID NO: 107351 - DNA, 120 bp, Artificial Sequence
  ENSG00000099399_10 (sequence is synthesized)
ctagtgtttcaacaggtttatttagattcagaatgtaaatttacaaatgatatagatcaccctgttattgctgtttttcagggacagtagaaagtgttttgttttttgagtgaaacaact

SEQ ID NO: 107352 - DNA, 120 bp, Artificial Sequence
  ENSG00000099399_11 (sequence is synthesized)
tattaataaaaatccttaaatcacttttgtaatccaggacaagaaaatgtggcattagagtagaaatatctttggaaatgtgaaagaccccatagtgaaatatttgggatcagaagccag

SEQ ID NO: 107353 - DNA, 120 bp, Artificial Sequence
  ENSG00000099399_12 (sequence is synthesized)
aggtgtaaaagtggtcaattcttggtttacttcatttaatctttcttttcataaagatacatacctggatttgtttatgttattcaagaatgtgtgagaaattaaaccatagttagttaa

SEQ ID NO: 107354 - DNA, 80 bp, Artificial Sequence
  ENSG00000099617_0 (sequence is synthesized)
gacttctcggcgcccgaggtcgcgcgcgcggaggcgggggcggcccgggatctccaagcgccgccgcgccctcctcccgc

SEQ ID NO: 107355 - DNA, 80 bp, Artificial Sequence
  ENSG00000099617_1 (sequence is synthesized)
cggccggaccggggccatggcgcccgcgcagcgcccgctgctcccgctgctgctcctgctgttaccgctgccgccgccgc

SEQ ID NO: 107356 - DNA, 120 bp, Artificial Sequence
  ENSG00000099617_2 (sequence is synthesized)
ccttcgcgcgcgccgaggacgccgcccgcgccaactcggaccgctacgccgtctactggaaccgcagcaaccccaggttccacgcaggcgcgggggacgacggcgggggctacacggtgg

SEQ ID NO: 107357 - DNA, 120 bp, Artificial Sequence
  ENSG00000099617_3 (sequence is synthesized)
aggtgagcatcaatgactacctggacatctactgcccgcactatggggcgccgctgccgccggccgagcgcatggagcactacgtgctgtacatggtcaacggcgagggccacgcctcct

SEQ ID NO: 107358 - DNA, 120 bp, Artificial Sequence
  ENSG00000099617_4 (sequence is synthesized)
gcgaccaccgccagcgcggcttcaagcgctgggagtgcaaccggcccgcggcgcccggggggccgctcaagttctcggagaagttccagctcttcacgcccttctccctgggcttcgagt

SEQ ID NO: 107359 - DNA, 120 bp, Artificial Sequence
  ENSG00000099617_5 (sequence is synthesized)
tccggcccggccacgagtattactacatctctgccacgcctcccaatgctgtggaccggccctgcctgcgactgaaggtgtacgtgcggccgaccaacgagaccctgtacgaggctcctg

SEQ ID NO: 107360 - DNA, 120 bp, Artificial Sequence
  ENSG00000099617_6 (sequence is synthesized)
agcccatcttcaccagcaataactcgtgtagcagcccgggcggctgccgcctcttcctcagcaccatccccgtgctctggaccctcctgggttcctagtcccagccccgcaggacgccga

SEQ ID NO: 107361 - DNA, 120 bp, Artificial Sequence
  ENSG00000099617_7 (sequence is synthesized)
ccctgcctggacggccccgcctggaccgcctgacctcggccctccggacccggctgcggcccccgcctccgagaccaaatagagacgctgcttctccctcgcctggtgccgcccccgccg

SEQ ID NO: 107362 - DNA, 120 bp, Artificial Sequence
  ENSG00000099617_8 (sequence is synthesized)
ggcaggggccatccacccgccccaggaccagccctcagggaggggaaacggccgagagcccccccccggaggcccgaggggccggggtgtggatgcggaccgtggccaggccatctcctc

SEQ ID NO: 107363 - DNA, 120 bp, Artificial Sequence
  ENSG00000099617_9 (sequence is synthesized)
tttttttttttttttttagtgtatttttcgtggttggatcaaaaagacttgagtttttaatttaatttattccctgccgttgtagcggggcggggtccctgtgccctggcctgggggagg

SEQ ID NO: 107364 - DNA, 120 bp, Artificial Sequence
  ENSG00000099617_10 (sequence is synthesized)
gggtccctgtgccctggcctgggggaggggaacgcggaacatggggtcgggaacacagccgctcccctctgctctgcaccccactcgtgggggaacacagccgctcccctctgctctgca

SEQ ID NO: 107365 - DNA, 120 bp, Artificial Sequence
  ENSG00000099617_11 (sequence is synthesized)
ccccactcgtgggggaacacagccgctcccctctgctctgcaccccactcgtgggggaacacagccgctcccctctgctctgcaccccactcgtgggggaacacagctgcagcccaccgc

SEQ ID NO: 107366 - DNA, 120 bp, Artificial Sequence
  ENSG00000099617_12 (sequence is synthesized)
ggacccccctggtgctccaggttgggtgagtctgagccggaaggggtacgtggtgggcgcccctcattgtggctggggagacctcataccccatcgcccacccccgtcctcctggtcatt

SEQ ID NO: 107367 - DNA, 120 bp, Artificial Sequence
  ENSG00000099617_13 (sequence is synthesized)
tcctcccagacactgttttgccccagcgcccttcggaatcacagtcccgccgtgtcttagaaactgctttggccgatgcaaacagccccctacccgtccccctcgcctcacacggtccct

SEQ ID NO: 107368 - DNA, 120 bp, Artificial Sequence
  ENSG00000099617_14 (sequence is synthesized)
ctccgaggccgagaagaccttctgttcctgtaaatacagccagcaagtgcaaactgtgattttattttccacgtattcctgaggacggactggaccgtctatgttttttcagcccttcat

SEQ ID NO: 107369 - DNA, 120 bp, Artificial Sequence
  ENSG00000099617_15 (sequence is synthesized)
agggggtcttttattttggtgggggggtggggtggacttttagagtagaagctgcacttggcaataagctcgtgtcgtctgtcagagcccctctctcaactctgtgacctgataatgttt

SEQ ID NO: 107370 - DNA, 120 bp, Artificial Sequence
  ENSG00000099617_16 (sequence is synthesized)
ctaagaaaaagaaaaaaaggacaaaagggagggaaccactaccaaaaaaaaaaaaagaaactcctccccgaagacactttaatgaaggaaacaacacatttatacggatttcatatttct

SEQ ID NO: 107371 - DNA, 120 bp, Artificial Sequence
  ENSG00000099617_17 (sequence is synthesized)
acccgcctttcctgactctgtgttttatatatattatatataaatatatattgtgtacggccgccggccggcggctcgaggcacgcccggtggtggggggtgggcagagggcttttgtag

SEQ ID NO: 107372 - DNA, 120 bp, Artificial Sequence
  ENSG00000099617_18 (sequence is synthesized)
ggggtcggcggggcgggccgcgttgccaggcctggagctggcgaccgggcctccctcttcccgtcacaatcaactttggattctgtatttttttataataaaatgagcataaacctcaaa

SEQ ID NO: 107373 - DNA, 120 bp, Artificial Sequence
  ENSG00000099622_0 (sequence is synthesized)
tcgcgcgttaggaggctcgggtcgttgtggtgcgctgtcttcccgcttgcgtcagggacctgcccgactcagtggccgccatggcatcagatgaaggcaaactttttgttggagggctga

SEQ ID NO: 107374 - DNA, 120 bp, Artificial Sequence
  ENSG00000099622_1 (sequence is synthesized)
gttttgacaccaatgagcagtcgctggagcaggtcttctcaaagtacggacagatctctgaagtggtggttgtgaaagacagggagacccagagatctcggggatttgggtttgtcacct

SEQ ID NO: 107375 - DNA, 120 bp, Artificial Sequence
  ENSG00000099622_2 (sequence is synthesized)
ttgagaacattgacgacgctaaggatgccatgatggccatgaatgggaagtctgtagatggacggcagatccgagtagaccaggcaggcaagtcgtcagacaaccgatcccgtgggtacc

SEQ ID NO: 107376 - DNA, 120 bp, Artificial Sequence
  ENSG00000099622_3 (sequence is synthesized)
gtggtggctctgccgggggccggggcttcttccgtgggggccgaggacggggccgtgggttctctagaggaggaggggaccgaggctatggggggaaccggttcgagtccaggagtgggg

SEQ ID NO: 107377 - DNA, 120 bp, Artificial Sequence
  ENSG00000099622_4 (sequence is synthesized)
gctacggaggctccagagactactatagcagccggagtcagagtggtggctacagtgaccggagctcgggcgggtcctacagagacagttatgacagttacgctacacacaacgagtaaa

SEQ ID NO: 107378 - DNA, 120 bp, Artificial Sequence
  ENSG00000099622_5 (sequence is synthesized)
ctgctcaagatcgtccttccaatggctgtgtgtttaaagattgtgggagcttcgctgaacgttaatgtgtagtaaatgcacctccttgtattcccactttcgtagtcatttcggttctga

SEQ ID NO: 107379 - DNA, 120 bp, Artificial Sequence
  ENSG00000099622_6 (sequence is synthesized)
tcttgtcaaacccagcctgaccgcttctgacgccgggatggcctcgttactagacttttctttttaaggaagtgctgtttttttttgagggttttcaaaacattttgaaaagcatttact

SEQ ID NO: 107380 - DNA, 120 bp, Artificial Sequence
  ENSG00000099622_7 (sequence is synthesized)
tttttgaccacgagccatgagttttcaaaaaaatcgggggttgtgtgggtttttggtttttgttttagtttttggttgcgttgcctttttttttttagtggggttggccccatgaagtgg

SEQ ID NO: 107381 - DNA, 120 bp, Artificial Sequence
  ENSG00000099622_8 (sequence is synthesized)
gtgccccactcacttctctgagatcgaacggactgtgaatccgctctttgtcggaagctgagcaagctgtggcttttttccaactccgtgtgacgtttctgagtgtagtgtggtaggacc

SEQ ID NO: 107382 - DNA, 120 bp, Artificial Sequence
  ENSG00000099622_9 (sequence is synthesized)
ccggcgggtgtggcagcaactgccctggagccccagcccctgcgtccatctgtgctgtgcgccccacagtagacgtgcagacgtccctgagaggttcttgaagatgtttatttatattgt

SEQ ID NO: 107383 - DNA, 120 bp, Artificial Sequence
  ENSG00000099622_10 (sequence is synthesized)
ccttttttactggaagacgtacgcatactccatcgatgttgtatttgcagtggctgaggaattcttgtacgcagttttctttggctttacgaagccgattaaaagaccgtgtgaaatgaa

SEQ ID NO: 107384 - DNA, 120 bp, Artificial Sequence
  ENSG00000099622_11 (sequence is synthesized)
cgtcagggacctgcccgactcagtggaagcggggagaggtggtgagagatgacccctgttgaggatttcattggtgtctgccacaggccgccatggcatcagatgaaggcaaactttttg

SEQ ID NO: 107385 - DNA, 120 bp, Artificial Sequence
  ENSG00000099622_12 (sequence is synthesized)
cgacgccccgcaggggaggaggcccgggaggagtatcagggtgcaggaggccgccatggcatcagatgaaggcaaactttttgttggagggctgagttttgacaccaatgagcagtcgct

SEQ ID NO: 107386 - DNA, 120 bp, Artificial Sequence
  ENSG00000099622_13 (sequence is synthesized)
aagtcccttagggtgtggggcgagggcctgcctgcctgcttcgtggcctgggcaggaccctggccccctcaggacctgccagtatgggggagacgcgaccaccagctctccccagccaca

SEQ ID NO: 107387 - DNA, 120 bp, Artificial Sequence
  ENSG00000099622_14 (sequence is synthesized)
ggagtcggggactcccactctgccacacccacctgctccccttcctggagtctcacatctgtgtggcttgctgcagggagatcaccaggccgactgggaggacctaggactccgcagggt

SEQ ID NO: 107388 - DNA, 120 bp, Artificial Sequence
  ENSG00000099622_15 (sequence is synthesized)
aaacgccgcggacggagcgaggccgcagcgccccctggtgtccgcaacgggcagcgcgtcccggtcgggtcccgcatggtcagtggccagcaggggtggatgaaggggtcccagccgcct

SEQ ID NO: 107389 - DNA, 120 bp, Artificial Sequence
  ENSG00000099622_16 (sequence is synthesized)
gagacccccggtggggacacaggatcgcggtgagatacctgggagtcacgggtgctcgcagacgcagctgaccccagaggcacaggccgccatggcatcagatgaaggcaaactttttgt

SEQ ID NO: 107390 - DNA, 120 bp, Artificial Sequence
  ENSG00000099622_17 (sequence is synthesized)
atgacctctggggtcactgtcccaggagggacttcacctggaacaagagctggaggcagccgcttgcccaggaggcttgtcccctgtaagtgctttcgggaagagtggcatgtggcgctg

SEQ ID NO: 107391 - DNA, 120 bp, Artificial Sequence
  ENSG00000099622_18 (sequence is synthesized)
agccctgtcccgggcggcacctgggcgtttcagtgagtcctgctctcccgcacctatggccccatggcgggcgcctttcggtgtgtgttgggtgcagggcagcgcctcccgggagcgccg

SEQ ID NO: 107392 - DNA, 120 bp, Artificial Sequence
  ENSG00000099622_19 (sequence is synthesized)
tctcctggagcacgggctgcggtgcgccggcagcttacggggcggccagtccttgcccacaacgatgtggagccctgtgaaagtcggattcgaataaagggccacgtgtgcacccagaaa

SEQ ID NO: 107393 - DNA, 120 bp, Artificial Sequence
  ENSG00000099622_20 (sequence is synthesized)
actctgactgatccccgcgcctcgccgggcaggggcgagccccgcgcgtcgggcccggaatagcagtctcgcccccgcccggcgcggctattttgagctcctccgttggggccgaggcgc

SEQ ID NO: 107394 - DNA, 120 bp, Artificial Sequence
  ENSG00000099622_21 (sequence is synthesized)
gcggcgggaggctgggggtcgacacgcaggctgcgtcctcgccccgcgagattggacccctcgaggactgtgcgctgtggccgcgcagggctgggcggcggggccccctctcccacgcga

SEQ ID NO: 107395 - DNA, 120 bp, Artificial Sequence
  ENSG00000099622_22 (sequence is synthesized)
gcaccgggagcccggccgctcgagccaaacgccgcggacggagcgaggccgcagcgccccctggtgtccgcaacgggcagcgcgtcccggtcgggtcccgcatggccgccatggcatcag

SEQ ID NO: 107396 - DNA, 120 bp, Artificial Sequence
  ENSG00000099622_23 (sequence is synthesized)
aggctgggggagctcagacaggaggctaggaggagggggactttggggctgaggctttgccaaaggagcaggagtttgccaagtgttgtaggaagcgggaagggtgcgccaggtaggggg

SEQ ID NO: 107397 - DNA, 120 bp, Artificial Sequence
  ENSG00000099622_24 (sequence is synthesized)
cacggcgtgtgccaaggcccggaaacgtgaaaccgagtgcttttcgggggcaaccgggaagtcagttggtggagaaaaatcaaagatgggaggaaaggcgaggctgacaaggaccctaaa

SEQ ID NO: 107398 - DNA, 120 bp, Artificial Sequence
  ENSG00000099622_25 (sequence is synthesized)
cagcgctcccggcctgcatacgggatgattccatgtggactgccacatcaaggaagcaaacaacaaggaaagcctggcgctgcgtggagctgtcttttgctgctaactgcccttgaccga

SEQ ID NO: 107399 - DNA, 120 bp, Artificial Sequence
  ENSG00000099622_26 (sequence is synthesized)
cttcctaccaggtcttccctgtgcgcctctaaccccaggaggtgctgctggcatgcccacctctcagatgaagcagtgcggtccagagagcgtcttgggcaccgcctgcctcacagctgg

SEQ ID NO: 107400 - DNA, 120 bp, Artificial Sequence
  ENSG00000099622_27 (sequence is synthesized)
cctctccaagcactttaggctggacactcagaccttgtcactgtgcttgcccagaagaggcgcatctgtcctctcagagccatttctatcgcaggacgcaaaagccaaatgagactgacc

SEQ ID NO: 107401 - DNA, 120 bp, Artificial Sequence
  ENSG00000099622_28 (sequence is synthesized)
aaaaaggcaagggagagcgagggcccgctgggcagtcagctaggtgcatgtgtggccgcaggccagcctccctcggctgtggggggtggttgctccccggccgcaggccgcgccctggtc

SEQ ID NO: 107402 - DNA, 120 bp, Artificial Sequence
  ENSG00000099622_29 (sequence is synthesized)
gacgacgctaaggatgccatgatggccatgaatgggaaggtgaggatcagggtgctgagcaggagtcccgtctcgaggatggggcacccacctgctaacccgtcccgccctctgtctcca

SEQ ID NO: 107403 - DNA, 120 bp, Artificial Sequence
  ENSG00000099622_30 (sequence is synthesized)
ggccagagagcagaggcacgtggcatcccagggcgacctcagacggccagccggttagctagttctgctgttgcttcacgagttctgagcattctctgctagcctatggaagctgcagcc

SEQ ID NO: 107404 - DNA, 120 bp, Artificial Sequence
  ENSG00000099622_31 (sequence is synthesized)
ctcggaggacagaagtgttgtgcgcccaacagaaccctctgagacgcaagctgctcccttggctagctcatatgtggaaatagccctgtaattcgaggttgaaggggcccggccaggact

SEQ ID NO: 107405 - DNA, 120 bp, Artificial Sequence
  ENSG00000099622_32 (sequence is synthesized)
gagtgccatgagtgggtcccttggggatgctgtgaggtactgctggtgggagctggtactcactttttcctgtatgtgcaggaggaggggaccgaggctatggggggaaccggttcgagt

SEQ ID NO: 107406 - DNA, 120 bp, Artificial Sequence
  ENSG00000099622_33 (sequence is synthesized)
ccctcactcgcgcgttaggaggctcgggtcgttgtggtgcgctgtcttcccgcttgcgtcagggacctgcccgactcagtgtgtggccgccatggcatcagatgaaggcaaactttttgt

SEQ ID NO: 107407 - DNA, 120 bp, Artificial Sequence
  ENSG00000099622_34 (sequence is synthesized)
aggtccctgggggagctgagatgagactggctgggcaaggagcagaggcaggtggggacccaggccaagaggagaggagactgctcaggacattcgcagaagcgggagggcctgggggac

SEQ ID NO: 107408 - DNA, 120 bp, Artificial Sequence
  ENSG00000099622_35 (sequence is synthesized)
agggacggctggcatgggggctggcggctcagcctgttgtggcagagcagaagtagacgggtaccttccggtactcaacgtttgtctgtcttgcagccggagtcagagtggtggctacag

SEQ ID NO: 107409 - DNA, 120 bp, Artificial Sequence
  ENSG00000099622_36 (sequence is synthesized)
ttttttttaactttgtttttgtttttttcaattaagctggaactaaagtcaggcccagccattacgctccccacgtgcagccaggtgcagcctgggcccagtcatgcctggctcatagat

SEQ ID NO: 107410 - DNA, 120 bp, Artificial Sequence
  ENSG00000099622_37 (sequence is synthesized)
gtcatgcctggctcatagatgaaatcccttaagcaggattgaagaccagtgaacgcccccgccttttggattttttgctcaattgaccgtcttttccagacctctttaagtcacactctt

SEQ ID NO: 107411 - DNA, 120 bp, Artificial Sequence
  ENSG00000099622_38 (sequence is synthesized)
tagctggctccagctgcgccaaggtgcagacccgccctgggcatgctggcctgtgacggagcctgaggtcacagccccctgactagcctgagaccttcctaggggctgtggctgtttccg

SEQ ID NO: 107412 - DNA, 120 bp, Artificial Sequence
  ENSG00000099622_39 (sequence is synthesized)
ccgagggtctgacggctgcggcggggcctggacggaagagggggcgagccccggggcgccgcacgtggacccccggcacgggcacgctcacgtgcacccgtcctttcacgccaacgcgtt

SEQ ID NO: 107413 - DNA, 120 bp, Artificial Sequence
  ENSG00000099622_40 (sequence is synthesized)
acagatgcaaagcggcaggtgtgcgcaggtgcgtgtcaacgccaccctgggaacccaggatggctgcggacactcacggagcccgcacccaggaacccgctcgtagccgccatggcatca

SEQ ID NO: 107414 - DNA, 120 bp, Artificial Sequence
  ENSG00000099622_41 (sequence is synthesized)
gtagtgtggtaggaccccggcgggtgtggcagcaactgccctggagccccagcccctgcgtccatctgtgctgtgcgccccacagtagacgtgcagacgtccctgagagcagcgatgacc

SEQ ID NO: 107415 - DNA, 120 bp, Artificial Sequence
  ENSG00000099622_42 (sequence is synthesized)
ccctggggcctgcagagctagaaagggaggcccagcagactggcgctggtcagggtaggggagccaggcgggggacgggagcgggcagctcaggcctcagggcagccctgggaggcttct

SEQ ID NO: 107416 - DNA, 120 bp, Artificial Sequence
  ENSG00000099622_43 (sequence is synthesized)
cactggagggatgacttgggggaccagagaggaagagcagagacagggtctagctatgttgccccggctggtatcaaactcctggactcaaacgaaagtgctgggattccaggcatgagc

SEQ ID NO: 107417 - DNA, 120 bp, Artificial Sequence
  ENSG00000099622_44 (sequence is synthesized)
aggtggttggcaaggcgggggtaacagggggaaggagaaaatctgaaatgccggtgtgagctccgggccaagagagttgaggactcaggaggcaggaatcccccgtggccgcccgctgct

SEQ ID NO: 107418 - DNA, 120 bp, Artificial Sequence
  ENSG00000099622_45 (sequence is synthesized)
tggctgtgggctccaacttggtgtgtgctcagagaaggcagtggttggagtgaacagggcctgtgccaggtggggagactagccaaggtgtttgtgcagcctggcctctggagcggcctg

SEQ ID NO: 107419 - DNA, 120 bp, Artificial Sequence
  ENSG00000099622_46 (sequence is synthesized)
gaccctccagggactgtggctgagcagccatggctgcctggacgggtgtcccctggcccgtctgtccgtctggatgtgggaaccctccaggcacgctggggcgggcaggtgccaggtgcc

SEQ ID NO: 107420 - DNA, 120 bp, Artificial Sequence
  ENSG00000099622_47 (sequence is synthesized)
gtcgctggagcaggtcttctcaaagtacggacagatctctgaagacctctctcccctgcacagtggtggttgtgaaagacagggagacccagagatctcggggatttgggtttgtcacct

SEQ ID NO: 107421 - DNA, 80 bp, Artificial Sequence
  ENSG00000099624_0 (sequence is synthesized)
agacgtccctgcgcgtcgtcctcctcgccctccaggccgcccgcgccgcgccggagtccgctgtccgccagctacccgct

SEQ ID NO: 107422 - DNA, 120 bp, Artificial Sequence
  ENSG00000099624_1 (sequence is synthesized)
ccgccgcccgggacttggccgcctcgtccgccacgcccgtgcctatgccgaggccgccgccgccccggctgccgcctctggccccaaccagatgtccttcaccttcgcctctcccacgca

SEQ ID NO: 107423 - DNA, 120 bp, Artificial Sequence
  ENSG00000099624_2 (sequence is synthesized)
ggtgttcttcaacggtgccaacgtccggcaggtggacgtgcccacgctgaccggagccttcggcatcctggcggcccacgtgcccacgctgcaggtcctgcggccggggctggtcgtggt

SEQ ID NO: 107424 - DNA, 120 bp, Artificial Sequence
  ENSG00000099624_3 (sequence is synthesized)
gcatgcagaggacggcaccacctccaaatactttgtgagcagcggttccatcgcagtgaacgccgactcttcggtgcagttgttggccgaagaggccgtgacgctggacatgttggacct

SEQ ID NO: 107425 - DNA, 120 bp, Artificial Sequence
  ENSG00000099624_4 (sequence is synthesized)
cggagctggtggggacagctgacgaggccacgcgggcagagatccagatccgaatcgaggccaacgaggccctggtgaaggccctggagtaggcggtgcgtacccggtgtcccgaggccc

SEQ ID NO: 107426 - DNA, 120 bp, Artificial Sequence
  ENSG00000099624_5 (sequence is synthesized)
ggccaggggctgggcagggatgccaggtgggcccagccagctcctggggtcccggccacctggggaagccgcgcctgccaaggaggccaccagagggcagtgcaggcttctgcctgggcc

SEQ ID NO: 107427 - DNA, 120 bp, Artificial Sequence
  ENSG00000099624_6 (sequence is synthesized)
ccaggccctgcctgtgttgaaagctctggggactgggccagggaagctcctcctcagctttgagctgtggctgccacccatggggctctccttccgcctctcaagatccccccagcctga

SEQ ID NO: 107428 - DNA, 120 bp, Artificial Sequence
  ENSG00000099624_7 (sequence is synthesized)
cgggccgcttaccatcccctctgccctgcagagccagccgccaaggttgacctcagcttcggagccacctctggatgaactgcccccagcccccgccccattaaagacccggaagcctga

SEQ ID NO: 107429 - DNA, 120 bp, Artificial Sequence
  ENSG00000099624_8 (sequence is synthesized)
ctggtgaaggccctggagtaggcgatccccccagcctgacgggccgcttaccatcccctctgccctgcagagccagccgccaaggttgacctcagcttcggagccacctctggatgaact

SEQ ID NO: 107430 - DNA, 80 bp, Artificial Sequence
  ENSG00000099624_9 (sequence is synthesized)
cccacccccagggcgcgacccccgcttccgggcccccggacccgcgcgccccggaagccgaggctactcagccctggacc

SEQ ID NO: 107431 - DNA, 120 bp, Artificial Sequence
  ENSG00000099624_10 (sequence is synthesized)
ctcggccctgcctctgctgcccgagccctgcgctgccctcgtcccgggcacctccccgagataagcgtctcctgggtgccctccccgatctccctggccaaagcctgggtgtcgccggat

SEQ ID NO: 107432 - DNA, 120 bp, Artificial Sequence
  ENSG00000099624_11 (sequence is synthesized)
cgttgcattcccatttcgcggatcagtagaatgaggcgcaactgttgaggaccaaagctgcaacttcggatccctgcgctgggttgtctcagtgcctcacatcagcgccaggtcctgccc

SEQ ID NO: 107433 - DNA, 120 bp, Artificial Sequence
  ENSG00000099624_12 (sequence is synthesized)
tccggtggagggctgcagggccaggccaggctggggctccacatcccaggtcagtctccgtctcagttgaggctgcgagaaaaaatagttttaggccgggcacggtggctcaagcctgta

SEQ ID NO: 107434 - DNA, 82 bp, Artificial Sequence
  ENSG00000099624_13 (sequence is synthesized)
gagaccagcctggccaacatgatgtaaccccgtctcttctaaaaatacagaaaactggccgggtgcggtggctcccgcctgt

SEQ ID NO: 107435 - DNA, 67 bp, Artificial Sequence
  ENSG00000099624_14 (sequence is synthesized)
gaaaaatacagttttagcaggtttgtccactgaggagcctgggctggccggtgatgaaagcgaacca

SEQ ID NO: 107436 - DNA, 120 bp, Artificial Sequence
  ENSG00000099624_15 (sequence is synthesized)
cactgaggagcctgggctggccggtgatgaaagcgaaccagaggggaccctgctctcagccggtttatgactggctctggaccaaccaatgtaggatggtcgaagcaagagatgtaaaac

SEQ ID NO: 107437 - DNA, 79 bp, Artificial Sequence
  ENSG00000099624_16 (sequence is synthesized)
cacccaggccagtgggagaatcgcttaagcccaggagtttgagactagccttggcaacatagtgagaccctgtctctac

SEQ ID NO: 107438 - DNA, 120 bp, Artificial Sequence
  ENSG00000099625_0 (sequence is synthesized)
acgtgcgcggcccctcctctcgcgccggcctcccccgcgccgcgctctccattcataaattctccgcctgctccgcggccaccgggcgccggagccagccgcgagcgccacgcagccgcc

SEQ ID NO: 107439 - DNA, 120 bp, Artificial Sequence
  ENSG00000099625_1 (sequence is synthesized)
gccgcccatgggccgctcgtcccggcgctgagggccctcctccccagttcagaatgcagcccacagccaccatggccacagccgccaccaccaccaccaccaccactgccacagtagccc

SEQ ID NO: 107440 - DNA, 120 bp, Artificial Sequence
  ENSG00000099625_2 (sequence is synthesized)
tgacgacgtcgtgggacaatgccactggacgccccacggcagagccagaccccatcctggacaactacgtgctgctggtggtggtgatgtcgctgttcgtggggggcacgctggtggtgt

SEQ ID NO: 107441 - DNA, 120 bp, Artificial Sequence
  ENSG00000099625_3 (sequence is synthesized)
tgtctggcgtcctgctcctctgcaagcgctgctgggacgtccaccagcgcctcaacagggccatggaggaagcggagaagaccaccaccacctacctggacaacggcacccacccagccc

SEQ ID NO: 107442 - DNA, 120 bp, Artificial Sequence
  ENSG00000099625_4 (sequence is synthesized)
aagaccccgacttccggggagaggaccccgagtgccaggatgcggagaccgaacgcttcctgtccaccagctccacgggccgccgggtctccttcaatgaggcggcgctgtttgagcaga

SEQ ID NO: 107443 - DNA, 120 bp, Artificial Sequence
  ENSG00000099625_5 (sequence is synthesized)
gccgcaagacgcaggacaagggtcgccggtacacactgacggagggggacttccaccacctgaagaatgcccggctcacgcacctgcacctgccgcccctcaagattgtcaccatccacg

SEQ ID NO: 107444 - DNA, 120 bp, Artificial Sequence
  ENSG00000099625_6 (sequence is synthesized)
agtgtgactcaggcgaggccagctcagccaccacgccccacccggccacctctcccaaggccactctggccatcttccagcccccggggaaggccctcaccggccgctctgtgggcccca

SEQ ID NO: 107445 - DNA, 120 bp, Artificial Sequence
  ENSG00000099625_7 (sequence is synthesized)
gctccgccctgccaggtgacccctacaactcagccgcgggcgccactgacttcgcagagatcagcccctcggcatctagcgactctggggaaggcacctcgttggatgccggtaccagga

SEQ ID NO: 107446 - DNA, 120 bp, Artificial Sequence
  ENSG00000099625_8 (sequence is synthesized)
gcaccaaggctggagggcccggggctgcagcagggcctggggaggcgggcccgggatccggggcaggtaccgttctgcagttcctcacccgcctgcgccgccatgccagcctggatgggg

SEQ ID NO: 107447 - DNA, 120 bp, Artificial Sequence
  ENSG00000099625_9 (sequence is synthesized)
ccagcccctatttcaaggtcaagaagtggaagctggagcccagccagcgggcagccagtctggacacgagaggttcccccaagcggcaccacttccagcggcagcgggcagccagtgaga

SEQ ID NO: 107448 - DNA, 120 bp, Artificial Sequence
  ENSG00000099625_10 (sequence is synthesized)
gcacggagcaggaggagggggatgccccccaggaggacttcatccagtacattgcccgggcgggcgacgccgtggccttcccgcacccccgcccctttctggccagcccgccccctgctc

SEQ ID NO: 107449 - DNA, 120 bp, Artificial Sequence
  ENSG00000099625_11 (sequence is synthesized)
tcggcaggtatttttcagtagatggaggtgctaggggtggacctgtgggcccttgccccccttcgcccccccctaggcggcccagggagcgctctccaggccccgtggacacgcgctcgc

SEQ ID NO: 107450 - DNA, 120 bp, Artificial Sequence
  ENSG00000099625_12 (sequence is synthesized)
ctgcctccagcggcaaggcccctcccagaggcggactcactggggccacctctccagcatggaccagaggagggaagcagggagagactgggtaagggtagggcggtgggtggggaggag

SEQ ID NO: 107451 - DNA, 120 bp, Artificial Sequence
  ENSG00000099625_13 (sequence is synthesized)
gggccccccgaggatggcgctggtactgctgcttgctggtggagtccgaggcctgaagggttctgctgtggtcccaggccctctcccacccccgccccgcccatgctcccaaggctgggc

SEQ ID NO: 107452 - DNA, 120 bp, Artificial Sequence
  ENSG00000099625_14 (sequence is synthesized)
agactcctctcagaagctgctgtgaccactccggccagcagcacccctcccccaacccaagggcaacttccctgaagcccagggcccacgtcggtgggatgggaatggggcgtggggctg

SEQ ID NO: 107453 - DNA, 120 bp, Artificial Sequence
  ENSG00000099625_15 (sequence is synthesized)
gggcagagcagggttcctggggcagccctggtatggcgggtgaccctcacgtctgtgcactgtcctcctgctggttatccagcatgggtgggcagagagccctagcctggagcaggggct

SEQ ID NO: 107454 - DNA, 120 bp, Artificial Sequence
  ENSG00000099625_16 (sequence is synthesized)
gaaaacgtgactcccggagagaagcatgttgacttttcctgggggcttccaagggagggggccccgccgtctgcagtccagcatggaggcaccctgcttaataagcaggcgccacagctc

SEQ ID NO: 107455 - DNA, 120 bp, Artificial Sequence
  ENSG00000099625_17 (sequence is synthesized)
agggtcaatgcaagacgcatcccctgcaaaacacactggctcattttaaagctctcaccttccaaggcccgcccgagtcccaagtcccacccgcgtccaccctccctgatccagaggcgg

SEQ ID NO: 107456 - DNA, 120 bp, Artificial Sequence
  ENSG00000099625_18 (sequence is synthesized)
cctgatccagaggcgggatggccggccgggtagggggcgcggggctcggcggggctctgacggcgcggcctggcttgcaggctagaggcggccgaggcagcgggaggagcgagccccgat

SEQ ID NO: 107457 - DNA, 120 bp, Artificial Sequence
  ENSG00000099625_19 (sequence is synthesized)
gggcagcgcggggcctgagcagcagcagccgccactggagccggacgccgagcgggacgcgggccccgagcaggcccagaccagctaccgcgacctgtggagcctgcgcgcctcgcttga

SEQ ID NO: 107458 - DNA, 120 bp, Artificial Sequence
  ENSG00000099625_20 (sequence is synthesized)
tcgcttgagctgcatgcggccgcctcggaccacagcagcagcggcaacgaccgcgactcggtgcgcagcggcgacagctcgggctcaggctccgggggcgcggcgcccgccttcccgccg

SEQ ID NO: 107459 - DNA, 120 bp, Artificial Sequence
  ENSG00000099625_21 (sequence is synthesized)
ccctccccgcccgcgccgcggcccaaggacggcgaggcgcgccggctgctgcagatggacagtggctacgccagcatcgagggccgcggcgcaggcgacgacaccgagccacctgccgcg

SEQ ID NO: 107460 - DNA, 120 bp, Artificial Sequence
  ENSG00000099625_22 (sequence is synthesized)
cccggccccgcagcccgcgcgcctggccccgccgcccgcgccgcgactacagcatcgacgagaagacggacgcgctgttccacgagttcctgcgccacgacccgcacttcgacgacacgc

SEQ ID NO: 107461 - DNA, 120 bp, Artificial Sequence
  ENSG00000099625_23 (sequence is synthesized)
agttcctgcgccacgacccgcacttcgacgacacgccggctgccgcgcgacaccgcgcccgcgcgcacccgcacgcccgcaaacagtggcagcgtggccggcagcacagcgaccccggcg

SEQ ID NO: 107462 - DNA, 80 bp, Artificial Sequence
  ENSG00000099625_24 (sequence is synthesized)
gcgcggcgacagcgtggacggcccgcccgacggtcgcaccctgggcggcgccggcgacgaccccgccatccccgtcatcg

SEQ ID NO: 107463 - DNA, 120 bp, Artificial Sequence
  ENSG00000099625_25 (sequence is synthesized)
aggaggagccgggcggcggggggtgccccggctcgggcctgtgcgtcctaccatccgggtcggtgctggacaagctggcggctggcctcgacgagagactctttccgccgcgcctcgccg

SEQ ID NO: 107464 - DNA, 120 bp, Artificial Sequence
  ENSG00000099625_26 (sequence is synthesized)
agcccgtcgtggcgactcccgcgttggtcgccgccgcccccacgtcccccgaccacagcccggcctaagtcccgcgtcctgggcccatctctctggcagcttctccggcgccgcacgggg

SEQ ID NO: 107465 - DNA, 80 bp, Artificial Sequence
  ENSG00000099625_27 (sequence is synthesized)
cctcggcggcgggagagacgtgggggcgcgacgccccgacgcgaatgcgcggggaccgcgggcccttcgcgcacgcgccg

SEQ ID NO: 107466 - DNA, 120 bp, Artificial Sequence
  ENSG00000099625_28 (sequence is synthesized)
gagccccggccgccctcgcgccgccgaagtgtgcactgctctttccggtgcttgccgggtgctgggcgtcgtgaggcgcgggccgcggagaccccggctgggcgggaaggaaggggcgtg

SEQ ID NO: 107467 - DNA, 120 bp, Artificial Sequence
  ENSG00000099625_29 (sequence is synthesized)
aacggctctcagcttcgggctcctgaggacaacgatcactcgccctcagtcccggacggggcggccgcttagtcgcagggcccgccacccgagggtcgcgcagcccactgggcccgatgg

SEQ ID NO: 107468 - DNA, 120 bp, Artificial Sequence
  ENSG00000099625_30 (sequence is synthesized)
cgtgccgggcgcgtgcgcgagctcgcccgggcgggggccgcggggcgctaacggtcgcagacgagttcgccgccctgggccgggaggcggctcaacaccgtgactgccgacctccgagac

SEQ ID NO: 107469 - DNA, 120 bp, Artificial Sequence
  ENSG00000099625_31 (sequence is synthesized)
tccgagaccgtttacctcactgcggcgtgtgctggcggcagcccgcgccgcctccgagcaataaccgcgccgccaccgctgctgccgccggccctgagggagccggccccggccctcccg

SEQ ID NO: 107470 - DNA, 120 bp, Artificial Sequence
  ENSG00000099625_32 (sequence is synthesized)
cgccccgagtccccactgccctccgcatgtcaacggcgcccgccccgctgccgccccatccacgttgagacgcgaacaaaacccagacggccaggtccaagcttcccaagctttatttat

SEQ ID NO: 107471 - DNA, 120 bp, Artificial Sequence
  ENSG00000099625_33 (sequence is synthesized)
tgccaaatttgggcggcctcgcccgcacggcaccctccgagtccccgccgcgtctgcaccatcccgcgatggcgtttctcgtgtttttcttttctggatgatataaatattgaccgcaca

SEQ ID NO: 107472 - DNA, 120 bp, Artificial Sequence
  ENSG00000099625_34 (sequence is synthesized)
ctgagcgagtgagtgtgtgagcggatggacgagtgtccctcgccccgccagcccggccgcccgtgccgcggccccagccctccctgccgtggccgcccggaggagcagccctcccgggac

SEQ ID NO: 107473 - DNA, 120 bp, Artificial Sequence
  ENSG00000099715_0 (sequence is synthesized)
ggtggtccagtacctccaaagatatggaatacactcctgaaatatcctgaaaccttttttttttcagaatcctttaataagcagttatgtcaatctgaaagttgcttacttgtactttat

SEQ ID NO: 107474 - DNA, 120 bp, Artificial Sequence
  ENSG00000099715_1 (sequence is synthesized)
attaatagctattcttgtttttcttatccaaagaaaaatcctctaatccccttttcacatgatagttgttaccatgtttaggcgttagtcacatcaacccctctcctctcccaaacttct

SEQ ID NO: 107475 - DNA, 120 bp, Artificial Sequence
  ENSG00000099715_2 (sequence is synthesized)
cttcttcaaatcaaactttattagtccctcctttataatgattccttgcctccttttatccagatcaattttttttcactttgatgcccagagctgaagaaatggactattgtataaatt

SEQ ID NO: 107476 - DNA, 120 bp, Artificial Sequence
  ENSG00000099715_3 (sequence is synthesized)
attcattgccaagagaataattgcattttaaacccatgttataacaaagaataatgattatattttgtgatttgtaacaaataccctttattttcccttaactattgaattaaatatttt

SEQ ID NO: 107477 - DNA, 120 bp, Artificial Sequence
  ENSG00000099715_4 (sequence is synthesized)
aattatttgtattctctttaactatcttggtatattaaagtattatcttttatatatttatcaatggtggacacttttataggtactctgtgtcatttttgatactgtaggtatcttatt

SEQ ID NO: 107478 - DNA, 120 bp, Artificial Sequence
  ENSG00000099715_5 (sequence is synthesized)
tcatttatctttattcttaatgtacgaattcataatatttgattcagaacagatttatcactaattaacagagtgtcaattatgctaacatctcatttactgattttaatttaaaacagt

SEQ ID NO: 107479 - DNA, 120 bp, Artificial Sequence
  ENSG00000099715_6 (sequence is synthesized)
ttttgttaacatgcatgtttagggttggcttcttaataatttcttcttcctcttctctctctcctcttcttttggtcagtgttgtgcgggttaatacaacaaactgtcacaagtgtttgt

SEQ ID NO: 107480 - DNA, 120 bp, Artificial Sequence
  ENSG00000099715_7 (sequence is synthesized)
tgtccgggacgtacattttcgcggtcctgctagtatgcgtggtgttccactctggcgcccaggagaaaaactacaccatccgagaagaaattccagaaaacgtcctgataggcaacttgt

SEQ ID NO: 107481 - DNA, 120 bp, Artificial Sequence
  ENSG00000099715_8 (sequence is synthesized)
tgaaagaccttaacttgtcgctgattccaaacaagtccttgacaactactatgcagttcaagctagtgtacaagaccggagatgtgccactgattcgaattgaagaggatactggtgaga

SEQ ID NO: 107482 - DNA, 120 bp, Artificial Sequence
  ENSG00000099715_9 (sequence is synthesized)
tcttcactaccggcgctcgcattgatcgtgagaaattatgtgctggtatcccaagggatgagcattgcttttatgaagtggaggttgccattttgccggatgaaatatttagactggtta

SEQ ID NO: 107483 - DNA, 120 bp, Artificial Sequence
  ENSG00000099715_10 (sequence is synthesized)
agatacgttttctgatagaagatataaatgataatgcaccattgttcccagcaacagttatcaacatatcaattccagagaactcggctataaactctaaatatactctcccagcggctg

SEQ ID NO: 107484 - DNA, 120 bp, Artificial Sequence
  ENSG00000099715_11 (sequence is synthesized)
ttgatcctgacgtaggcataaacggagttcaaaactacgaactaattaagagtcaaaacatttttggcctcgatgtcattgaaacaccagaaggagacaagatgccacaactgattgttc

SEQ ID NO: 107485 - DNA, 120 bp, Artificial Sequence
  ENSG00000099715_12 (sequence is synthesized)
aaaaggagttagatagggaagagaaggatacctatgtgatgaaagtaaaggttgaagatggtggctttcctcaaagatccagtactgctattttgcaagtaagtgttactgatacaaatg

SEQ ID NO: 107486 - DNA, 120 bp, Artificial Sequence
  ENSG00000099715_13 (sequence is synthesized)
acaaccacccagtctttaaggagacagagattgaagtcagtataccagaaaatgctcctgtaggcacttcagtgacacagctccatgccacagatgctgacataggtgaaaatgccaaga

SEQ ID NO: 107487 - DNA, 120 bp, Artificial Sequence
  ENSG00000099715_14 (sequence is synthesized)
tccacttctctttcagcaatctagtctccaacattgccaggagattatttcacctcaatgccaccactggacttatcacaatcaaagaaccactggatagggaagaaacaccaaaccaca

SEQ ID NO: 107488 - DNA, 120 bp, Artificial Sequence
  ENSG00000099715_15 (sequence is synthesized)
agttactggttttggcaagtgatggtggattgatgccagcaagagcaatggtgctggtaaatgttacagatgtcaatgataatgtcccatccattgacataagatacatcgtcaatcctg

SEQ ID NO: 107489 - DNA, 120 bp, Artificial Sequence
  ENSG00000099715_16 (sequence is synthesized)
tcaatgacacagttgttctttcagaaaatattccactcaacaccaaaattgctctcataactgtgacggataaggatgcggaccataatggcagggtgacatgcttcacagatcatgaaa

SEQ ID NO: 107490 - DNA, 120 bp, Artificial Sequence
  ENSG00000099715_17 (sequence is synthesized)
gtattcagtaatcagttcctcctggagaatgcagcatatcttgactatgagtccacaaaagaatatgccattaaattactggctgcagatgctggcaaacctcctttgaatcagtcagca

SEQ ID NO: 107491 - DNA, 120 bp, Artificial Sequence
  ENSG00000099715_18 (sequence is synthesized)
atgctcttcatcaaagtgaaagatgaaaatgacaatgctccagttttcacccagtctttcgtaactgtttctattcctgagaataactctcctggcatccagttgatgaaagtaagtgca

SEQ ID NO: 107492 - DNA, 120 bp, Artificial Sequence
  ENSG00000099715_19 (sequence is synthesized)
acggatgcagacagtgggcctaatgctgagatcaattacctgctaggccctgatgctccacctgaattcagcctggatcgtcgtacaggcatgctgactgtagtgaagaaactagataga

SEQ ID NO: 107493 - DNA, 120 bp, Artificial Sequence
  ENSG00000099715_20 (sequence is synthesized)
gaaaaagaggataaatatttattcacaattctggcaaaagataatggggtaccacccttaaccagcaatgtcacagtctttgtaagcattattgatcagaatgacaatagcccagttttc

SEQ ID NO: 107494 - DNA, 120 bp, Artificial Sequence
  ENSG00000099715_21 (sequence is synthesized)
actcacaatgaatacaaattctatgtcccagaaaaccttccaaggcatggtacagtaggactaatcactgtaactgatcctgattatggagacaattctgcagttacgctctccatttta

SEQ ID NO: 107495 - DNA, 120 bp, Artificial Sequence
  ENSG00000099715_22 (sequence is synthesized)
gatgagaatgatgacttcaccattgattcacaaactggtgtcatccgaccaaatatttcatttgatagagaaaaacaagaatcttacactttctatgtaaaggctgaggatggtggtaga

SEQ ID NO: 107496 - DNA, 120 bp, Artificial Sequence
  ENSG00000099715_23 (sequence is synthesized)
gtatcacgttcttcaagtgccaaagtaaccataaatgtggttgatgtcaatgacaacaaaccagttttcattgtccctccttacaactattcttatgaattggttctaccgtccactaat

SEQ ID NO: 107497 - DNA, 120 bp, Artificial Sequence
  ENSG00000099715_24 (sequence is synthesized)
ccaggcacagtggtctttcaggtaattgctgttgacaatgacactggcatgaatgcagaggttcgttacagcattgtaggaggaaacacaagagatctgtttgcaatcgaccaagaaaca

SEQ ID NO: 107498 - DNA, 120 bp, Artificial Sequence
  ENSG00000099715_25 (sequence is synthesized)
ggcaacataacattgatggagaaatgtgatgttacagaccttggtttacacagagtgttggtcaaagctaatgacttaggacagcctgattctctcttcagtgttgtaattgtcaatctg

SEQ ID NO: 107499 - DNA, 120 bp, Artificial Sequence
  ENSG00000099715_26 (sequence is synthesized)
ttcgtgaatgagtcagtgaccaatgctacactgattaatgaactggtgcgcaaaagcattgaagcaccagtgaccccaaatactgagatagctgatgtatcctcaccaactagtgactat

SEQ ID NO: 107500 - DNA, 120 bp, Artificial Sequence
  ENSG00000099715_27 (sequence is synthesized)
gtcaagatcctggttgcagctgttgctggcaccataactgtcgttgtagttattttcatcactgctgtagtaagatgtcgccaggcaccacaccttaaggctgctcagaaaaacatgcag

SEQ ID NO: 107501 - DNA, 120 bp, Artificial Sequence
  ENSG00000099715_28 (sequence is synthesized)
aattctgaatgggctaccccaaacccagaaaacaggcagatgataatgatgaagaaaaagaaaaagaagaagaagcattcccctaagaacctgctgcttaatgttgtcactattgaagaa

SEQ ID NO: 107502 - DNA, 120 bp, Artificial Sequence
  ENSG00000099715_29 (sequence is synthesized)
actaaggcagatgatgttgacagtgatggaaacagagtcacactagaccttcctattgatctagaagagcaaacaatgggaaagtacaattgggtaactacacctactactttcaagcct

SEQ ID NO: 107503 - DNA, 120 bp, Artificial Sequence
  ENSG00000099715_30 (sequence is synthesized)
gacagccctgatttggcccgacactacaaatctgcctctccacagcctgccttccaaattcagcctgaaactcccctgaatttgaagcaccacatcatccaagaactgcctctcgataac

SEQ ID NO: 107504 - DNA, 120 bp, Artificial Sequence
  ENSG00000099715_31 (sequence is synthesized)
acctttgtggcctgtgactctatctccaattgttcctcaagcagttcagatccctacagcgtttctgactgtggctatccagtgacaaccttcgaggtacctgtgtccgtacacaccaga

SEQ ID NO: 107505 - DNA, 120 bp, Artificial Sequence
  ENSG00000099715_32 (sequence is synthesized)
ccgactgattccaggacatgaactattgaaatctgcagtgagatgtaactttctaggaacaacaaaattccattccccttccaaaaaatttcaatgattgtgatttcaaaattaggctaa

SEQ ID NO: 107506 - DNA, 120 bp, Artificial Sequence
  ENSG00000099715_33 (sequence is synthesized)
gatcattaattttgtaatctagatttcccattataaaagcaagcaaaaatcatcttaaaaatgatgtcctagtgaaccttgtgctttctttagctgtaatctggcaatggaaatttaaaa

SEQ ID NO: 107507 - DNA, 120 bp, Artificial Sequence
  ENSG00000099715_34 (sequence is synthesized)
tttatggaagagacagtgcagcgcaataacagagtactctcatgctgtttctctgtttgctctgaatcaacagccatgatgtaatataaggctgtcttggtgtatacacttatggttaat

SEQ ID NO: 107508 - DNA, 120 bp, Artificial Sequence
  ENSG00000099715_35 (sequence is synthesized)
aagtttctaacacaactttctaactatttttttattattattttcagttgatgtagaactttacaaaatctattgacttcaaagagggatcaaaacaatcatattctacagatgtaccca

SEQ ID NO: 107509 - DNA, 120 bp, Artificial Sequence
  ENSG00000099715_36 (sequence is synthesized)
atagatatatggattcaattaagtttggtagaagatgagaacaaaataactactgatttaggaaaattggatgcagaataataattatagtaggggcaattttgtctgtagatggcagta

SEQ ID NO: 107510 - DNA, 120 bp, Artificial Sequence
  ENSG00000099715_37 (sequence is synthesized)
tgacaattcttgctagaaaatatattgaaaaaaacttcaacacaaagggttgtagcactgtcctcagtaccattgtgggcatgaggatcagaatagtctgggctagatacatcacattaa

SEQ ID NO: 107511 - DNA, 120 bp, Artificial Sequence
  ENSG00000099715_38 (sequence is synthesized)
agcttttcagaatctgataaatagctctaaatactaatgatattgagaagcctagcttcacttgggaaaatctgtggctgttcacagaaattcagcaccaagatattccccccatactct

SEQ ID NO: 107512 - DNA, 120 bp, Artificial Sequence
  ENSG00000099715_39 (sequence is synthesized)
accaggccttcaggtcctcataaagaaaagtgtcgttttcagattaggaactcaaaattattttggtgcatcaaatctacagtaacacaatataacaagaatgggattagaaaaatgaaa

SEQ ID NO: 107513 - DNA, 120 bp, Artificial Sequence
  ENSG00000099715_40 (sequence is synthesized)
gcctactcattctcatctttaagccagagaatgaaatatatatgaggtctctactttagatagctatttaaatatttgcatatttatgcaaggtattttgagcccttcagaagacattct

SEQ ID NO: 107514 - DNA, 120 bp, Artificial Sequence
  ENSG00000099715_41 (sequence is synthesized)
cccctttctccccctctgttaagtccctccccctcgccattcaaaagggctggctcggcactggctccttgcagtcggcgaactgtctgggcgggaggagccgtgagcagtagctgcact

SEQ ID NO: 107515 - DNA, 120 bp, Artificial Sequence
  ENSG00000099715_42 (sequence is synthesized)
cagctgcccgcgcggcaaagaggaaggcaagccaaacagagtgcgcagagtggcagtgccagcggcgacacaggcagcacaggcagcccgggctgcctgaatagcctcagaaacaacctc

SEQ ID NO: 107516 - DNA, 120 bp, Artificial Sequence
  ENSG00000099715_43 (sequence is synthesized)
agcgactccggctgctctgcggactgcgagctgtggcggtagagcccgctacagcagtcgcagtctccgtggagcgggcggaagccttttttctccctttcgtttacctcttcattctac

SEQ ID NO: 107517 - DNA, 120 bp, Artificial Sequence
  ENSG00000099715_44 (sequence is synthesized)
tctaaaggcatcgttattaggaaaatcctgttgtgaataagaaggattccacagatcacataccagagcggttttgcctcagctgctctcaactttgtaatcttgtgaagaagctgacaa

SEQ ID NO: 107518 - DNA, 120 bp, Artificial Sequence
  ENSG00000099715_45 (sequence is synthesized)
acttgccctgtctgattgttgaataattaaaacattatctccaggagtttggaagtgagctgaactagccaaactactctctgaaaggtatccagggcaagagacatttttaagacccca

SEQ ID NO: 107519 - DNA, 120 bp, Artificial Sequence
  ENSG00000099715_46 (sequence is synthesized)
aacaaacaaaaaacaaaaccaaaacactctggttcagtgttttgaaaatattgactaacataatattgctgagaaaatcatttttattacccaccactctgcttaaaagttgagtgggcc

SEQ ID NO: 107520 - DNA, 120 bp, Artificial Sequence
  ENSG00000099715_47 (sequence is synthesized)
aagactctgtctcaaaaagaaaaaaatgttcagtgatagaaaataattttactaggtttttatgttgattgtactcatgctgttccactccttttaattattaaaaagttatttttggct

SEQ ID NO: 107521 - DNA, 120 bp, Artificial Sequence
  ENSG00000099715_48 (sequence is synthesized)
catcccatggcctgccccttggctatcctcaggaggagtactttgatcgtgctacacccagcaatcgcactgaaggggatggcaactccgatcctgaatctactttcatacctggactaa

SEQ ID NO: 107522 - DNA, 120 bp, Artificial Sequence
  ENSG00000099715_49 (sequence is synthesized)
agaaagaaataactgttcaaccaactgtggaagaggcctctgacaactgcactcaagaatgtctcatctatggccattctgatgcctgctggatgccggcatctctggatcattccagct

SEQ ID NO: 107523 - DNA, 120 bp, Artificial Sequence
  ENSG00000099715_50 (sequence is synthesized)
cttcacaagcacaggcctctgctctatgccacagcccaccactgtcacaggcctctactcagcaccacagcccaccagtgacacagaccattgttctctgccacagccctccagtgacac

SEQ ID NO: 107524 - DNA, 120 bp, Artificial Sequence
  ENSG00000099715_51 (sequence is synthesized)
agaccatcgcattgtgccacagcccaccaccgatacaggtgtctgctctccaccacagtcctcctctagtgcagggtactgcacttcaccacagcccaccatcagcacaggcctcagccc

SEQ ID NO: 107525 - DNA, 120 bp, Artificial Sequence
  ENSG00000099715_52 (sequence is synthesized)
gccacagctcttctctgccacaggttattgccctccatcgtagtcaggcccaatcatcagtcagtttgcagcaaggttgggtgcaaggtgctaatggactatgctctgttgatcagggag

SEQ ID NO: 107526 - DNA, 120 bp, Artificial Sequence
  ENSG00000099715_53 (sequence is synthesized)
tgcaaggtagtgcaacatctcagttttacaccatgtctgaaagacttcatcccagtgatgattcaattaaagtcattcctttgacaaccttcgctccacgccaacaggccagaccgtcca

SEQ ID NO: 107527 - DNA, 120 bp, Artificial Sequence
  ENSG00000099715_54 (sequence is synthesized)
gaggtgattcccccattatggaaacacatcccttgtaaagctaaaatagttacttcaaattttcagaaaagatgtatatagtcaaaatttaagatacaattccaatgagtattctgatta

SEQ ID NO: 107528 - DNA, 120 bp, Artificial Sequence
  ENSG00000099715_55 (sequence is synthesized)
tcagatttgtaaataactatgtaaatagaaacagataccagaataaatctacagctagacccttagtcaatagttaaccaaaaaattgcaatttgtttaattcagaatgtgtatttaaaa

SEQ ID NO: 107529 - DNA, 120 bp, Artificial Sequence
  ENSG00000099715_56 (sequence is synthesized)
agaaaaggaatttaacaatttgcatccccttgtacagtaaggcttatcatgacagagcgtactatttctgatgtacagtattttttgttgtttttatcatcatgtgcaatattactgatt

SEQ ID NO: 107530 - DNA, 120 bp, Artificial Sequence
  ENSG00000099715_57 (sequence is synthesized)
tgtttccatgctgattgtgtggaaccagtatgtagcaaatggaaagcctagaaatatcttattttctaagtttacctttagtttacctaaacttttgttcagataatgttaaaaggtata

SEQ ID NO: 107531 - DNA, 120 bp, Artificial Sequence
  ENSG00000099715_58 (sequence is synthesized)
cgtactctagccttttttggggctttctttttgatttttgtttgtggttttcagtttttttgttgttgttagtgagtctcccttcaaaatacacagtaggtagtgtaaatactgcttgtt

SEQ ID NO: 107532 - DNA, 120 bp, Artificial Sequence
  ENSG00000099715_59 (sequence is synthesized)
tgtgtctctctgctgtcatgttttctaccttattccaatactatattgttgataaaatttgtatatacattttcaataaagaatatgtataaactgtacagatctagatctacaacctat

SEQ ID NO: 107533 - DNA, 120 bp, Artificial Sequence
  ENSG00000099715_60 (sequence is synthesized)
ttctctactctttagtagagttcgagacacagaagtgcaataactgccctaattaagcaactatttgttaaaaagggcccctttttactttaatagtttagtgtaaagtacatcagaaat

SEQ ID NO: 107534 - DNA, 120 bp, Artificial Sequence
  ENSG00000099715_61 (sequence is synthesized)
aaaactgtatctgacattttaagcctgtagtccattattacttgggtctttacttctgggaatttgtatgtaacagcctagaaaattaaaaggaggtggatgcatccaaagcacgagtca

SEQ ID NO: 107535 - DNA, 120 bp, Artificial Sequence
  ENSG00000099715_62 (sequence is synthesized)
cttaaaatatcgacggtaaactactattttgtagagaaactcaggaagatttaaatgttgatttgacagctcaataggctgttaccaaagggtgttcagtaaaaataacaaatacatgta

SEQ ID NO: 107536 - DNA, 120 bp, Artificial Sequence
  ENSG00000099715_63 (sequence is synthesized)
actgtagataaaaccacatactaaatctataagactaagggatttttgttattctagctcaacttactgaagaaaaccactaataacaacaagaatatcaggaaggaacttttcaagaaa

SEQ ID NO: 107537 - DNA, 120 bp, Artificial Sequence
  ENSG00000099715_64 (sequence is synthesized)
tgtaattataaatctacatcaaacagaattttaaggaaaaatgcagagggagaaataaggcacatgactgcttcttgcagtcaagaagaaataccaataacacacacagaacaaaaacca

SEQ ID NO: 107538 - DNA, 120 bp, Artificial Sequence
  ENSG00000099715_65 (sequence is synthesized)
tcaaaatctcatatatgaaataaaatatattcttctaagcaaagaaacagtactattcatagaaaacattagttttctcctgttgtctgttatttccttcttttatcctcttaactggcc

SEQ ID NO: 107539 - DNA, 120 bp, Artificial Sequence
  ENSG00000099715_66 (sequence is synthesized)
attatcttgtatgtgcacattttataaatgtacagaaacatcaccaacttgattttcttccatagcaaaactgagaaaataccttgtttcagtataacactaaaccaagagacaattgat

SEQ ID NO: 107540 - DNA, 120 bp, Artificial Sequence
  ENSG00000099715_67 (sequence is synthesized)
gtttaatgggggcggttggggttgggggggagtcaatatctcctattgattaacttagacatagattttgtaatgtataacttgatatttaatttatgattaaactgtaattttgtaaca

SEQ ID NO: 107541 - DNA, 120 bp, Artificial Sequence
  ENSG00000099715_68 (sequence is synthesized)
taaactgtggtaattgcataatttcattggtgaggatttcctttgaatattgagaaagtttcttttcatgtgcccagcaggttaagtagcgttttcagaatatacattattcccatccat

SEQ ID NO: 107542 - DNA, 120 bp, Artificial Sequence
  ENSG00000099715_69 (sequence is synthesized)
tgtaaagttccttaagtcatatttgactgggcgtgcagaataacttcttaactattaactatcagagtttgattaataaaattaattaattttttttctccttcgtgttgttaatgttcc

SEQ ID NO: 107543 - DNA, 120 bp, Artificial Sequence
  ENSG00000099715_70 (sequence is synthesized)
aagggatttggagcatactggttttccaggtgcatgtgaatcccgaaggactgatgatatttgaatgtttattaaattattatcacacaaatgtgttgatattgtggctattgttgatgt

SEQ ID NO: 107544 - DNA, 120 bp, Artificial Sequence
  ENSG00000099715_71 (sequence is synthesized)
tgaaaattgtaaacttggggaagattaagaaaagaaccaatagtgacaaaaatcagtgcttccagtagattttagaacattctttgcctcaaaaaacctgcaaagatgatgtgagatttt

SEQ ID NO: 107545 - DNA, 120 bp, Artificial Sequence
  ENSG00000099715_72 (sequence is synthesized)
tcaaaaaacctgcaaagatgatgtgagattttttcttgtgttttaattattttcacattttctctctgcaaacctttagttttctgatgatctacacacacacatacacacacacacaca

SEQ ID NO: 107546 - DNA, 120 bp, Artificial Sequence
  ENSG00000099715_73 (sequence is synthesized)
aaaaagaagaggttgaaagattattaaataacttatcaggcatctcaatggttactatctatgttagtgaaaatcaaataggactcaaagttggatatttgggatttttcttctgacagt

SEQ ID NO: 107547 - DNA, 120 bp, Artificial Sequence
  ENSG00000099715_74 (sequence is synthesized)
ataatttattgagttactagggaggttcttaaatcctcatatctggaaacttgtgaagttttgacacctttcctatagatataggaatgaaccaatacgcttttattaccctttctaact

SEQ ID NO: 107548 - DNA, 120 bp, Artificial Sequence
  ENSG00000099715_75 (sequence is synthesized)
ctgattttataatcagacttagattgtgtttagaatattaaatgactgggcaccctcttcttggtttttaccagagaggctttgaatggaagcaggctgagagtagccaaagaggcaagg

SEQ ID NO: 107549 - DNA, 120 bp, Artificial Sequence
  ENSG00000099715_76 (sequence is synthesized)
ggtattagcccagttattctcccctatgccttctcttcctaagcgtccactaggtctggccttggaaatctgttacttctacggcttcagatctgatgatatctttttcatcacattaca

SEQ ID NO: 107550 - DNA, 120 bp, Artificial Sequence
  ENSG00000099715_77 (sequence is synthesized)
agttatttctttgactgaatagacagtggtataggttgacacagcacacaagtggctattgtgatgtatgatgtatgtagtcccacaactgcaaaacgtcttactgaagcaacaatcgaa

SEQ ID NO: 107551 - DNA, 120 bp, Artificial Sequence
  ENSG00000099715_78 (sequence is synthesized)
aaatggttctgttttaaaaaggattttgtttgatttgaaattaaaacttcaaactgaatgacttatatgagaataatatgttcaatcaaagtagttattctattttgtgtccatattcca

SEQ ID NO: 107552 - DNA, 120 bp, Artificial Sequence
  ENSG00000099715_79 (sequence is synthesized)
ttagattgtgattattaattttctagctatggtattactatatcacacttgtgagtatgtattcaaatactaagtatcttatatgctacgtgcatacacattcttttcttaaactttacc

SEQ ID NO: 107553 - DNA, 120 bp, Artificial Sequence
  ENSG00000099715_80 (sequence is synthesized)
cacattcttttcttaaactttacctgtgttttaactaatattgtgtcagtgtattaaaaattagcttttacatatgatatctacaatgtaataaatttagagagtaattttgtgtattct

SEQ ID NO: 107554 - DNA, 120 bp, Artificial Sequence
  ENSG00000099715_81 (sequence is synthesized)
attatgtaaatttggttagaaaataataataaatggttagtgctattgtgtaatggtagcagttacaaagagcctctgccttcccaaactaatatttatcacacatggtcattaaatggg

SEQ ID NO: 107555 - DNA, 120 bp, Artificial Sequence
  ENSG00000099715_82 (sequence is synthesized)
aaaaaaatagactaaacaaatcacaaattgttcagttcttaaaatgtaattatgtcacacacacaaaaaaatccttttcaatcctgagaaaattaaaggtgttttactcacatggatatt

SEQ ID NO: 107556 - DNA, 120 bp, Artificial Sequence
  ENSG00000099715_83 (sequence is synthesized)
tcaacattagttttttttgtttgtttctttttcatggtattactgaaggtgtgtatactccctaatacacatttatgaaaatctacttgtttagacttttatttatactcttctgattta

SEQ ID NO: 107557 - DNA, 120 bp, Artificial Sequence
  ENSG00000099715_84 (sequence is synthesized)
attataattattatttcttatcttcttttatattttttggaaaccaaatttatagttagtttaggtaaactttttattatgaccattagaaactattttgaatgtttccaactggctcaa

SEQ ID NO: 107558 - DNA, 120 bp, Artificial Sequence
  ENSG00000099715_85 (sequence is synthesized)
tggctcaattggctgggaaaacatgggaacaagagaagctgaaatatatttctgcaagaacctttctatattatgtgccaattaccacaccagatcaattttatgcagaggccttaaaat

SEQ ID NO: 107559 - DNA, 120 bp, Artificial Sequence
  ENSG00000099715_86 (sequence is synthesized)
attctttcacagtagctttcttacactaaccgtcatgtgcttttagtaaatatgatttttaaaagcagttcaagttgacaacagcagaaacagtaacaaaaaaatctgctcagaaaaatg

SEQ ID NO: 107560 - DNA, 120 bp, Artificial Sequence
  ENSG00000099715_87 (sequence is synthesized)
tatgtgcacaaataaaaaaaattaatggcaattgtttagtgactgtaagtgatactttttaaagagtaaactgtgtgaaatttatactatccctgcttaaaatattaagatttttatgaa

SEQ ID NO: 107561 - DNA, 120 bp, Artificial Sequence
  ENSG00000099715_88 (sequence is synthesized)
atatgtatttatgtttgtattgtgggaagattcctcctctgtgatatcatacagcatctgaaagtgaacagtatcccaaagcagttccaagcatgctttggaagtaagaaggttgactat

SEQ ID NO: 107562 - DNA, 120 bp, Artificial Sequence
  ENSG00000099715_89 (sequence is synthesized)
tgtatggccaaggatggcagtatgtaatccagaagcaaacttgtattaattgttctatttcaggttctgtattgcatgttttcttattaatatatattaataaaagttatgagaaataaa

SEQ ID NO: 107563 - DNA, 120 bp, Artificial Sequence
  ENSG00000099715_90 (sequence is synthesized)
gatggaatatcttaacaaaacacattttccttaagtaaattcatgcatactccaaataaaatacagaatgtgaagtatctctgaactgtgctgttgaatatggtagctactagctacatg

SEQ ID NO: 107564 - DNA, 120 bp, Artificial Sequence
  ENSG00000099715_91 (sequence is synthesized)
ttattagttcatcatagagagagcgcggaccgtgtgcgggccgtcttgacgaaagaaccgagagatggatgcgctaaggaaaatcctgttgtgaataagaaggattccacagatcacata

SEQ ID NO: 107565 - DNA, 120 bp, Artificial Sequence
  ENSG00000099721_0 (sequence is synthesized)
agaggaccaagcctccctgtgtagcacaaagaaagtttctctgaatatatttaaagaaccatcaagaaatggggacctggattttgtttgcctgccttgtgggagcagcttttgccatgc

SEQ ID NO: 107566 - DNA, 120 bp, Artificial Sequence
  ENSG00000099721_1 (sequence is synthesized)
ctctaccacctcatcctgggcaccctggttatatcaacttcagctatgaggtgctcacccctttgaagtggtaccagagcatgataagaccaccatactcttcctatggttacgagccca

SEQ ID NO: 107567 - DNA, 120 bp, Artificial Sequence
  ENSG00000099721_2 (sequence is synthesized)
tgggtggatggctgcaccaccaaatcatccccgtggtgtcccaacagcaccccctgactcacaccctgcagtctcatcaccacatcccagtggtgccagctcagcagcccagggtccgcc

SEQ ID NO: 107568 - DNA, 120 bp, Artificial Sequence
  ENSG00000099721_3 (sequence is synthesized)
cctgcccagcagcccttccagccccagcctgttcagccacagcctcaccagcccatgcagccccagccacctgtgcaacccatgcagcccctgctgccacagccacctctgcctccaatg

SEQ ID NO: 107569 - DNA, 120 bp, Artificial Sequence
  ENSG00000099721_4 (sequence is synthesized)
ttccccctgcggcccctgccccccatacttcctgatctgcatctggaagcttggccagcaacagacaagaccaagcaggaggaagtggattaaaagaccagaatatgagacaggaactga

SEQ ID NO: 107570 - DNA, 120 bp, Artificial Sequence
  ENSG00000099721_5 (sequence is synthesized)
agtaaacactttagttgctttcagggatgacacaagcacacaatgatttttgcttacaatcacttaacttagcaaattctgtaactaaaaatgtaccaatagtagacaataaaatgtttt

SEQ ID NO: 107571 - DNA, 120 bp, Artificial Sequence
  ENSG00000099721_6 (sequence is synthesized)
agcggacggccccgccccctccgtgagagaaggtaccactgggaagcaaggccggacccaggatctgccagaccccgacccgccagaacctaggatcaacagataccttgaaggatataa

SEQ ID NO: 107572 - DNA, 120 bp, Artificial Sequence
  ENSG00000099721_7 (sequence is synthesized)
atggggacctggattttgtttgcctgccttgtgggagcagcttttgccatgcctctaccacctcatcctgggcaccctggttatatcaacttcagctatgagaactcacattctcaggct

SEQ ID NO: 107573 - DNA, 120 bp, Artificial Sequence
  ENSG00000099725_0 (sequence is synthesized)
gcggccgcggcggagagcaactcccgagaggtgacggaggatgccgccgactgggcgcccgcgctctgccccagccccgaggcgcggtcgccggaggcgcctgcctaccgcctgcaggac

SEQ ID NO: 107574 - DNA, 120 bp, Artificial Sequence
  ENSG00000099725_1 (sequence is synthesized)
gcgcctgcctaccgcctgcaggactgcgacgcgctggtcaccatgggcactgggacgttcgggcgggtgcacctggtgaaggagaagacagccaagcatttcttcgccctcaaggtgatg

SEQ ID NO: 107575 - DNA, 120 bp, Artificial Sequence
  ENSG00000099725_2 (sequence is synthesized)
agcattcccgacgtcatccgccggaagcaggagcagcacgtgcacaatgagaagtctgtcctgaaggaagtcagccacccgttcctcatcaggctgttctggacgtggcatgaggagcgc

SEQ ID NO: 107576 - DNA, 120 bp, Artificial Sequence
  ENSG00000099725_3 (sequence is synthesized)
ttcctctacatgctcatggagtatgtgccgggtggcgagctcttcagctacctgcgcaaccgggggcacttctccagcaccacggggctcttctactctgcggagatcatctgtgccatt

SEQ ID NO: 107577 - DNA, 120 bp, Artificial Sequence
  ENSG00000099725_4 (sequence is synthesized)
ggatagggatggtcacatcaagctcacggactttgggtttgccaagaagctggtagacaggacttggaccctctgtggaacacccgagtacctagcccccgaagtcattcagagcaaggg

SEQ ID NO: 107578 - DNA, 120 bp, Artificial Sequence
  ENSG00000099725_5 (sequence is synthesized)
ccacggaagggccgtggactggtgggccctcggcatcctgatattcgagatgctttcggggtttcctccattttttgatgacaacccgtttggcatttatcagaaaattcttgcaggcaa

SEQ ID NO: 107579 - DNA, 120 bp, Artificial Sequence
  ENSG00000099725_6 (sequence is synthesized)
actatatttccccagacatttggatttccatgtaaaaacggggcgaatgatgtgaaacaccatcggtggttccgctccgtggactggaaagctgttccgcagagaaaactgaagcctccc

SEQ ID NO: 107580 - DNA, 120 bp, Artificial Sequence
  ENSG00000099725_7 (sequence is synthesized)
atcgtgcccacgatagctggcaacggcgacacttccaacttcgaaacttaccctgagcatgactgggacacagccgcgcccgtgccgcagaaggatttagaaatcttcaagaatttctga

SEQ ID NO: 107581 - DNA, 120 bp, Artificial Sequence
  ENSG00000099725_8 (sequence is synthesized)
aggagatcgtctacagggatttgaagccggagaacatcctgctggatagggatggtcacatcaagctcacggactttgggtttgccaagaagctggtagacagacagggtctcatcctgt

SEQ ID NO: 107582 - DNA, 120 bp, Artificial Sequence
  ENSG00000099725_9 (sequence is synthesized)
ctgtcacccaagctgaagtgccgttgcacaatcttgtctcactacagcctcaaactcctcggctcaagtgatcctccctcctcagcctctgaagtagctgggactacaggcatgtgccac

SEQ ID NO: 107583 - DNA, 120 bp, Artificial Sequence
  ENSG00000099725_10 (sequence is synthesized)
ccaggctaatttttttatttttaattttagagatgtgatctcactttattgctcaggctggtcttgaactcttggccccaagatatcgtcccacctcagcttcccaaagcactggaatta

SEQ ID NO: 107584 - DNA, 120 bp, Artificial Sequence
  ENSG00000099725_11 (sequence is synthesized)
gaagcatgtgccactgtgcctggccaattctatttttgaatttaacatttttagcaccagacagttgttaaatcagtatcattttattatttgtttatttatttagatggagtctcactc

SEQ ID NO: 107585 - DNA, 120 bp, Artificial Sequence
  ENSG00000099725_12 (sequence is synthesized)
gcacgcggccaccgagctggaggaggcggcgggcgtgagaccgggaatgcttggggcccccgccttcctcgcagccatccagcactcggtgcacgccccgcgaggccagcggctgctccc

SEQ ID NO: 107586 - DNA, 120 bp, Artificial Sequence
  ENSG00000099725_13 (sequence is synthesized)
tcccggggctattgctgctagtgccgtgagcaccgcccagccattgtctctgtgtctccgtcagccgtgccgagccgcgcacccagaggcgagggcgcgcatggggagcctccgttgatg

SEQ ID NO: 107587 - DNA, 120 bp, Artificial Sequence
  ENSG00000099725_14 (sequence is synthesized)
aaatgtcttcttcacggcctgaggacatttccagttttctctgtacctgtgtgtatagaaatagatcagagcacagttgaaattcatggaactggcattatttaagcaaccagaattcca

SEQ ID NO: 107588 - DNA, 120 bp, Artificial Sequence
  ENSG00000099725_15 (sequence is synthesized)
cactgtaggaaggttttgaaaattgtttcgttatagattttatcttatcttttggtgttgtcttggtttttctcatagactttataagtttgaactggacttatttgattataaccacaa

SEQ ID NO: 107589 - DNA, 120 bp, Artificial Sequence
  ENSG00000099725_16 (sequence is synthesized)
attgtgtgtgtgtgtgtgtgtgtatatatagaagtcattatggcagatgcacaaattgtgcagtgatgtaaatatacatacttcacagagcctattatttttatttttcaattcagtttc

SEQ ID NO: 107590 - DNA, 120 bp, Artificial Sequence
  ENSG00000099725_17 (sequence is synthesized)
tcaaattatcttcccttctcttggggacaacatctgaagggtatgttgcatgcatttttaaaaaaatcatctcatatgcattgtatagtttgggggaataagatatccgggggccggggg

SEQ ID NO: 107591 - DNA, 120 bp, Artificial Sequence
  ENSG00000099725_18 (sequence is synthesized)
tgtctacattcagtatctttagttcttcctacctagtaacttgagactttaaaagaagaaacatggagaagatgtgggagcgaatttattgcaggaatccacaatgactttgaagttgtt

SEQ ID NO: 107592 - DNA, 120 bp, Artificial Sequence
  ENSG00000099725_19 (sequence is synthesized)
ggagcaatgcattgtattcagaaaacctgtgtcacattaaaaaatttcatctaggctaggtgcagtggcttgttcctgtagtcccagcactctgggaacctgggttgggaggattgctta

SEQ ID NO: 107593 - DNA, 120 bp, Artificial Sequence
  ENSG00000099725_20 (sequence is synthesized)
tgagaccagcttgggcaacatagtgaaaccctgtctgtatggaatttacacaaattataaaaattagtcgggtgtcattgtgcatacctgtagtcccagctattcaggagctgtggtagg

SEQ ID NO: 107594 - DNA, 120 bp, Artificial Sequence
  ENSG00000099725_21 (sequence is synthesized)
tgcatacctgtagtcccagctattcaggagctgtggtaggaggatggcttgagctcaagaggttgaggctgcagtgagccctgattgtgccagtgcactccagcctggacgacagagcaa

SEQ ID NO: 107595 - DNA, 120 bp, Artificial Sequence
  ENSG00000099725_22 (sequence is synthesized)
tgcacagggaaatggctacctattaaagtcccagttgaaattttttgaaaaaatacacctcccacagttcacaaataacttttaagatcagctcatctataaggctgaccttcatgcaga

SEQ ID NO: 107596 - DNA, 120 bp, Artificial Sequence
  ENSG00000099725_23 (sequence is synthesized)
gattttatttcacctttagttttgggaaaagcgagaaacagatgatctataggatgtgagtgggtggcagagtcaaaaggaacctcacctgttcctaatttctccttttaaatattcatg

SEQ ID NO: 107597 - DNA, 120 bp, Artificial Sequence
  ENSG00000099725_24 (sequence is synthesized)
ttgagtgtgcctaatactctcctcgacaagtcatgctgttttatgcagaataatccaggcgtgagagtgttctcttgggaaatgactggggagacacctgaaaggagcaacctccagatg

SEQ ID NO: 107598 - DNA, 120 bp, Artificial Sequence
  ENSG00000099725_25 (sequence is synthesized)
ttcttccctgggtgttgatgtcatgacagccatacagtgagtttgttctgaaacatctcttgctaaatgtgggtcatgctagacacagcataaactgagggtgtgggttctggctttgta

SEQ ID NO: 107599 - DNA, 120 bp, Artificial Sequence
  ENSG00000099725_26 (sequence is synthesized)
cataactcattttctcccttgctttttctctggaccatcctggctggaaacttggctgtagacatctgaagagggtgcaccttttctctttactgtgactcacctcaaatatggcattgc

SEQ ID NO: 107600 - DNA, 120 bp, Artificial Sequence
  ENSG00000099725_27 (sequence is synthesized)
tcaaatctgctgtgtatgaggtcacagggcccagctgtggcaggggtgagtgcattgaagaagtaggttttggagccttccaggaattccttgttgacaacaggggtacactcacacaga

SEQ ID NO: 107601 - DNA, 120 bp, Artificial Sequence
  ENSG00000099725_28 (sequence is synthesized)
cctccaagactttcttctccacctcttctttttctcatgccctgccttcatctgtctccttctgcacccagagtaggggtggagtatacccttgccatgtgttagtgaaaatgtgtgcag

SEQ ID NO: 107602 - DNA, 120 bp, Artificial Sequence
  ENSG00000099725_29 (sequence is synthesized)
tgagaagccagttgggtcccctcggctcctaatctcttctcaaaactcagtagctcaggttctctggagccatccggtgcattccttgctattggagctgtttttccaagcaatatctgg

SEQ ID NO: 107603 - DNA, 120 bp, Artificial Sequence
  ENSG00000099725_30 (sequence is synthesized)
gaagagatttctccctctagcacttgctacctctcttctgcacacatatcacacatcagtactgtggagagtttctgttaggaaaagccatacatttttaaaaatgtagcaaaatgtcaa

SEQ ID NO: 107604 - DNA, 120 bp, Artificial Sequence
  ENSG00000099725_31 (sequence is synthesized)
gggaaatgtaatcagatttggccagagttcgcctacagataagaaggcactgggccaggctcacacctgtaatcctaagtaacactttgggaggctggggcgagaggattgcttgagccc

SEQ ID NO: 107605 - DNA, 120 bp, Artificial Sequence
  ENSG00000099725_32 (sequence is synthesized)
ggcgagaggattgcttgagcccaggagttcaatacctgtctgggaaacacctcatctctacaaaatacaaaaaagttaactgggcatggtggagcatgcctgtagtctcagctactcagg

SEQ ID NO: 107606 - DNA, 120 bp, Artificial Sequence
  ENSG00000099725_33 (sequence is synthesized)
gcctgggtgacagagtgagaccctgttccaaaaaaaaaaaaaaacccaaaaaacctcaatggctttttgcttttgaaggtggtatgaagagaacgtccactttaaggctttaaaagacag

SEQ ID NO: 107607 - DNA, 120 bp, Artificial Sequence
  ENSG00000099725_34 (sequence is synthesized)
tgaagagaacgtccactttaaggctttaaaagacagtgaagctggttgtagggctcacttttataatcctaggatttggggaagctgaagcagaaagattgcttgagcctgggagtttga

SEQ ID NO: 107608 - DNA, 120 bp, Artificial Sequence
  ENSG00000099725_35 (sequence is synthesized)
gactggcctgggcagcatagcgagaccccatctctatataaaaaaaaagatgttaaaacagtgaaattacagaaacagaacatagccaccctgtttcatcagtgaccttttcttcacgtg

SEQ ID NO: 107609 - DNA, 120 bp, Artificial Sequence
  ENSG00000099725_36 (sequence is synthesized)
acggtcaactcagtaggtgagaataattagtaggttcagcagaataaactctttacaattaataactcagtggaaaatgatgttcagatggtgaaatgtggaaatgttttagacaactct

SEQ ID NO: 107610 - DNA, 120 bp, Artificial Sequence
  ENSG00000099725_37 (sequence is synthesized)
attttcagcctgtgcttctcactcaccatcctgttgggattaacagttgagggccatcgctgcctaaacatttagcgtgcggtttcccatcagttttactgtgaatgtgaaaaggtgaaa

SEQ ID NO: 107611 - DNA, 120 bp, Artificial Sequence
  ENSG00000099725_38 (sequence is synthesized)
ctgttgctgacttcggcagcaggtatactaaaattggaatgacacagaggagattagcatggccccctgcgcgaggaagatccgcagattcatgcagcattccatatttttttaaaaaaa

SEQ ID NO: 107612 - DNA, 120 bp, Artificial Sequence
  ENSG00000099725_39 (sequence is synthesized)
ggttacactgtgcaccgacgtggagctagaaggaaaagcatgaagtctcatgtttgctgactataaaaataaatcatagtaataatattattgaacattctactttaaaaattattaata

SEQ ID NO: 107613 - DNA, 120 bp, Artificial Sequence
  ENSG00000099725_40 (sequence is synthesized)
aaaccataaatgaaacacttgagcacactttaaaaagtacataaacccatgagtccatatgtgtaattttatgttgtctgttttattatccaggatttcatactcagatgagcattagca

SEQ ID NO: 107614 - DNA, 120 bp, Artificial Sequence
  ENSG00000099725_41 (sequence is synthesized)
tcaggaaagcctgaaatgccttaattgtgaactgatacgcaggaaaatgaaatatgtaagcacattggtgaccttgttctttacagacatcatgatcagcctccagccatacagaacaaa

SEQ ID NO: 107615 - DNA, 120 bp, Artificial Sequence
  ENSG00000099725_42 (sequence is synthesized)
tgagaaattagaagcaattccaagaacgtgtgatggtgtgaaacccacttttgaccgtcacacacatttcagcatttgaagagacacaggctacctggaaactgcccatggcggggtcat

SEQ ID NO: 107616 - DNA, 120 bp, Artificial Sequence
  ENSG00000099725_43 (sequence is synthesized)
aatttaaatgtcccaatgtcatatagaggttaatttaatcaaaatgagctaaaacatggaacaatcactgaataatttaaaaagagtttacctggcagagtgtgtcatgcctgcaatccc

SEQ ID NO: 107617 - DNA, 120 bp, Artificial Sequence
  ENSG00000099725_44 (sequence is synthesized)
acatgcctgtaatcccagttagtcgggaggctgaggcaggagaatatggaactcaggaggcggaggctgcagtcaaccaagattgcgccactgcactccagccagggcgaaggagtgaga

SEQ ID NO: 107618 - DNA, 120 bp, Artificial Sequence
  ENSG00000099725_45 (sequence is synthesized)
aaaataaaaaaaaaaataaataaaaatagttgacccgggtgggcattccaaaatgttcccatagatgatcgtgaaacaatcactgtgcaaaatgtagaggaaaattcttacgataatcac

SEQ ID NO: 107619 - DNA, 120 bp, Artificial Sequence
  ENSG00000099725_46 (sequence is synthesized)
tacgataatcacaaaatttgtatcagaaaaacattacaaatttactttgctccatgtaattttatgaattggcagtattttcttaaattgggatacagtaagagaatatctttaggaaat

SEQ ID NO: 107620 - DNA, 120 bp, Artificial Sequence
  ENSG00000099725_47 (sequence is synthesized)
ggaaatgttaaaacaagaagtaacaagaggttgtttttctgaagggaaatgccaccggcctgctttcataggcattgataaagccaggaaggaaataaagtcacaaccgaatagtataca

SEQ ID NO: 107621 - DNA, 120 bp, Artificial Sequence
  ENSG00000099725_48 (sequence is synthesized)
ctgtatctactgaattcttctaattccttcacaacagaagtctaaatcctgcttagcctaaacatatctatagccagcgatgggcaaattatatttgctgtcagcatgatggaataagaa

SEQ ID NO: 107622 - DNA, 120 bp, Artificial Sequence
  ENSG00000099725_49 (sequence is synthesized)
acagaaaccccccagcagtggggtaagattgcacgcttcatcccctcaaaatgcagttcagccccactccctctccatgcccatcaaacaactgcaaaatcacttgttactgaatttctc

SEQ ID NO: 107623 - DNA, 120 bp, Artificial Sequence
  ENSG00000099725_50 (sequence is synthesized)
attcagcgttttgtttctttctgtccatacttaaagaccaaattatttgtttgctttgaagaaaaagcaaaagcaacaaaaacaccaaatcatttgaaatcactacccattaaaaaaaat

SEQ ID NO: 107624 - DNA, 120 bp, Artificial Sequence
  ENSG00000099725_51 (sequence is synthesized)
caccagtggaactaaacagttgagtggtttgggatgtgttgttcgccatttctgtgtttgacctacatggtctctagttctttggacaattgtaactgtgaaactatggcttaacactgt

SEQ ID NO: 107625 - DNA, 120 bp, Artificial Sequence
  ENSG00000099725_52 (sequence is synthesized)
taaagactccaaggctccactctgtagccaggtgcaactcaggctgcacaaataccccaccagaatgtcacaatcattcattgctccagctgctgagtgaacagagtgcaagacagcact

SEQ ID NO: 107626 - DNA, 120 bp, Artificial Sequence
  ENSG00000099725_53 (sequence is synthesized)
ggcttgggttttatttttgcagccagttaactttgcatcaggtctacacagtccttgcagcctttgatttctccagttgtacagatttgaaatggggtgcccgggttcctctcgtttttc

SEQ ID NO: 107627 - DNA, 120 bp, Artificial Sequence
  ENSG00000099725_54 (sequence is synthesized)
cttcaatctacctagcatgcattttacacacattggaggagtcgtatgcactgtttttctcttgctgatggaggcaagaacgccttctaattagtataacttaaatggacgggattcact

SEQ ID NO: 107628 - DNA, 120 bp, Artificial Sequence
  ENSG00000099725_55 (sequence is synthesized)
taaaagcaagaagaaaagcacatgaacaggtgtcttaatgcatttggatactttggggtgtgtgcctgtctgtgtgtgtgtcttggtgaaggtgggctgtattttcaccaagccttttca

SEQ ID NO: 107629 - DNA, 120 bp, Artificial Sequence
  ENSG00000099725_56 (sequence is synthesized)
taatcaagtttgctttgcaaaccatctggccttgcccccagcagtacagtccttcctaataacggggatgctctgtcatgtttctctgtaaattgttgtgtgttgggaagttctgttgag

SEQ ID NO: 107630 - DNA, 120 bp, Artificial Sequence
  ENSG00000099725_57 (sequence is synthesized)
gcttagtttgatcttccatggtggacatgtctgttctgtatataaaaagcattacatctgtgttttagcaggtgggatttgaagcttttccacagtccttgtgctctgagatggctgttg

SEQ ID NO: 107631 - DNA, 120 bp, Artificial Sequence
  ENSG00000099725_58 (sequence is synthesized)
agctctgctcagctgtcacagctgaattctttttttgtgctgaacactgggcagcctcaccttgttgccaacgtgcttctggggcccctgtgactgctgccggatgctgtgcacacaggc

SEQ ID NO: 107632 - DNA, 120 bp, Artificial Sequence
  ENSG00000099725_59 (sequence is synthesized)
agagtgccttggcaggtttgtgcaccccttggcgagccagaactgggaaccccgcggagtgaccccaccttctcatggggggtcagggaggggagtgcctatttttaatcttgtttgttg

SEQ ID NO: 107633 - DNA, 120 bp, Artificial Sequence
  ENSG00000099725_60 (sequence is synthesized)
cgcaatggaaatcactgtgatttgtacatatgccctaggaaaattttaccgctgtctaatttatgtaataatactgatgattctaggtttgtttaataaaactttatatcttttcagaag

SEQ ID NO: 107634 - DNA, 120 bp, Artificial Sequence
  ENSG00000099725_61 (sequence is synthesized)
aagtgttgggattacaggtgtgagccaacgcaccaggtcttgaataacatttttgaacgtttcccagaaaggacttggaccctctgtggaacacccgagtacctagcccccgaagtcatt

SEQ ID NO: 107635 - DNA, 120 bp, Artificial Sequence
  ENSG00000099769_0 (sequence is synthesized)
aggtgacaggcgcgggctgccccgcagtggggaaatccagagggcaggggtggccggcacagcagacgtaccctccctcgctgcctgcctgcagcctgccctgcatgcaggatggccctg

SEQ ID NO: 107636 - DNA, 120 bp, Artificial Sequence
  ENSG00000099769_1 (sequence is synthesized)
aggaaaggaggcctggccctggcgctgctgctgctgtcctgggtggcactgggcccccgcagcctggagggagcagaccccggaacgccgggggaagccgagggcccagcgtgcccggcc

SEQ ID NO: 107637 - DNA, 120 bp, Artificial Sequence
  ENSG00000099769_2 (sequence is synthesized)
gcctgtgtctgcagctacgatgacgacgcggatgagctcagcgtcttctgcagctccaggaacctcacgcgcctgcctgatggagtcccgggcggcacccaagccctgtggctggacggc

SEQ ID NO: 107638 - DNA, 120 bp, Artificial Sequence
  ENSG00000099769_3 (sequence is synthesized)
aacaacctctcgtccgtccccccggcagccttccagaacctctccagcctgggcttcctcaacctgcagggcggccagctgggcagcctggagccacaggcgctgctgggcctagagaac

SEQ ID NO: 107639 - DNA, 120 bp, Artificial Sequence
  ENSG00000099769_4 (sequence is synthesized)
ctgtgccacctgcacctggagcggaaccagctgcgcagcctggcactcggcacgtttgcacacacgcccgcgctggcctcgctcggcctcagcaacaaccgtctgagcaggctggaggac

SEQ ID NO: 107640 - DNA, 120 bp, Artificial Sequence
  ENSG00000099769_5 (sequence is synthesized)
gggctcttcgagggcctcggcagcctctgggacctcaacctcggctggaatagcctggcggtgctccccgatgcggcgttccgcggcctgggcagcctgcgcgagctggtgctggcgggc

SEQ ID NO: 107641 - DNA, 120 bp, Artificial Sequence
  ENSG00000099769_6 (sequence is synthesized)
aacaggctggcctacctgcagcccgcgctcttcagcggcctggccgagctccgggagctggacctgagcaggaacgcgctgcgggccatcaaggcaaacgtgttcgtgcagctgccccgg

SEQ ID NO: 107642 - DNA, 120 bp, Artificial Sequence
  ENSG00000099769_7 (sequence is synthesized)
ctccagaaactctacctggaccgcaacctcatcgctgccgtggccccgggcgccttcctgggcctgaaggcgctgcgatggctggacctgtcccacaaccgcgtggctggcctcctggag

SEQ ID NO: 107643 - DNA, 120 bp, Artificial Sequence
  ENSG00000099769_8 (sequence is synthesized)
ccttcaaggacctgcacttcctggaggagctgcagctgggccacaaccgcatccggcagctggctgagcgcagctttgagggcctggggcagcttgaggtgctcacgctagaccacaacc

SEQ ID NO: 107644 - DNA, 120 bp, Artificial Sequence
  ENSG00000099769_9 (sequence is synthesized)
agctccaggaggtcaaggcgggcgctttcctcggcctcaccaacgtggcggtcatgaacctctctgggaactgtctccggaaccttccggagcaggtgttccggggcctgggcaagctgc

SEQ ID NO: 107645 - DNA, 120 bp, Artificial Sequence
  ENSG00000099769_10 (sequence is synthesized)
acagcctgcacctggagggcagctgcctgggacgcatccgcccgcacaccttcaccggcctctcggggctccgccgactcttcctcaaggacaacggcctcgtgggcattgaggagcaga

SEQ ID NO: 107646 - DNA, 120 bp, Artificial Sequence
  ENSG00000099769_11 (sequence is synthesized)
gcctgtgggggctggcggagctgctggagctcgacctgacctccaaccagctcacgcacctgccccaccgcctcttccagggcctgggcaagctggagtacctgctgctctcccgcaacc

SEQ ID NO: 107647 - DNA, 120 bp, Artificial Sequence
  ENSG00000099769_12 (sequence is synthesized)
gcctggcagagctgccggcggacgccctgggccccctgcagcgggccttctggctggacgtctcgcacaaccgcctggaggcattgcccaacagcctcttggcaccactggggcggctgc

SEQ ID NO: 107648 - DNA, 120 bp, Artificial Sequence
  ENSG00000099769_13 (sequence is synthesized)
gctacctcagcctcaggaacaactcactgcggaccttcacgccgcagcccccgggcctggagcgcctgtggctggagggtaacccctgggactgtggctgccctctcaaggcgctgcggg

SEQ ID NO: 107649 - DNA, 120 bp, Artificial Sequence
  ENSG00000099769_14 (sequence is synthesized)
acttcgccctgcagaaccccagtgctgtgccccgcttcgtccaggccatctgtgagggggacgattgccagccgcccgcgtacacctacaacaacatcacctgtgccagcccgcccgagg

SEQ ID NO: 107650 - DNA, 120 bp, Artificial Sequence
  ENSG00000099769_15 (sequence is synthesized)
tcgtggggctcgacctgcgggacctcagcgaggcccactttgctccctgctgaccaggtccccggactcaagccccggactcaggcccccacctggctcaccttgtgctggggacaggtc

SEQ ID NO: 107651 - DNA, 120 bp, Artificial Sequence
  ENSG00000099769_16 (sequence is synthesized)
ctcagtgtcctcaggggcctgcccagtgcacttgctggaagacgcaagggcctgatggggtggaaggcatggcggcccccccagctgtcatcaattaaaggcaaaggcaatcgaatctaa

SEQ ID NO: 107652 - DNA, 120 bp, Artificial Sequence
  ENSG00000099769_17 (sequence is synthesized)
gaaatccagagggcaggggtggccggcacagcagacgtaccctccctcgctgcctgcctgcagcctgccctgcatgcaggatggccctgaggaaagcgggtgacctcgagcctcagttca

SEQ ID NO: 107653 - DNA, 120 bp, Artificial Sequence
  ENSG00000099769_18 (sequence is synthesized)
ctttctccccgtggatctataatttctcagaagaggagccgagacgccacctggaaaatgatcaattctcgataaagggaagacgatgacagtgggccggcggcttcccacagctctgca

SEQ ID NO: 107654 - DNA, 120 bp, Artificial Sequence
  ENSG00000099783_0 (sequence is synthesized)
acacaaagcccagacgcggagaaaatggcggcaggggtcgaagcggcggcggaggtggcggcgacggagatcaaaatggaggaagagagcggcgcgcccggcgtgccgagcggcaacggg

SEQ ID NO: 107655 - DNA, 120 bp, Artificial Sequence
  ENSG00000099783_1 (sequence is synthesized)
gctccgggccctaagggtgaaggagaacgacctgctcagaatgagaagaggaaggagaaaaacataaaaagaggaggcaatcgctttgagccatatgccaatccaactaaaagatacaga

SEQ ID NO: 107656 - DNA, 120 bp, Artificial Sequence
  ENSG00000099783_2 (sequence is synthesized)
gccttcattacaaacataccttttgatgtgaaatggcagtcacttaaagacctggttaaagaaaaagttggtgaggtaacatacgtggagctcttaatggacgctgaaggaaagtcaagg

SEQ ID NO: 107657 - DNA, 120 bp, Artificial Sequence
  ENSG00000099783_3 (sequence is synthesized)
ggatgtgctgttgttgaattcaagatggaagagagcatgaaaaaagctgcggaagtcctaaacaagcatagtctgagcggaagaccactgaaagtcaaagaagatcctgatggtgaacat

SEQ ID NO: 107658 - DNA, 120 bp, Artificial Sequence
  ENSG00000099783_4 (sequence is synthesized)
gccaggagagcaatgcaaaaggtgatggctacgactggtgggatgggtatgggaccaggtggcccaggaatgattactatcccacccagtatcctaaataatcccaacatcccaaatgag

SEQ ID NO: 107659 - DNA, 120 bp, Artificial Sequence
  ENSG00000099783_5 (sequence is synthesized)
attatccatgcattacaggctggaagacttggaagcacagtatttgtagcaaatctggattataaagttggctggaagaaactgaaggaagtatttagtatggctggtgtggtggtccga

SEQ ID NO: 107660 - DNA, 120 bp, Artificial Sequence
  ENSG00000099783_6 (sequence is synthesized)
gcagacattcttgaagataaagatggaaaaagtcgtggaataggcactgttacttttgaacagtccattgaagctgtgcaagctatatctatgttcaatggccagctgctatttgataga

SEQ ID NO: 107661 - DNA, 120 bp, Artificial Sequence
  ENSG00000099783_7 (sequence is synthesized)
ccaatgcacgtcaagatggatgagagggccttaccaaaaggagatttcttccctcctgagcgtccacaacaacttccccatggccttggtggtattggcatggggttaggaccaggaggg

SEQ ID NO: 107662 - DNA, 120 bp, Artificial Sequence
  ENSG00000099783_8 (sequence is synthesized)
caacccattgatgccaatcacctgaataaaggcatcggaatgggaaacataggtcccgcaggaatgggaatggaaggcataggatttggaataaataaaatgggaggaatggaggggccc

SEQ ID NO: 107663 - DNA, 120 bp, Artificial Sequence
  ENSG00000099783_9 (sequence is synthesized)
tttggtggtggtatggaaaacatgggtcgatttggatctgggatgaacatgggcaggataaatgaaatcctaagtaatgcactgaagagaggagagatcattgcaaagcagggaggaggt

SEQ ID NO: 107664 - DNA, 120 bp, Artificial Sequence
  ENSG00000099783_10 (sequence is synthesized)
catgggcgcgggcctgggccacggcatggatcgcgtgggctccgagatcgagcgcatgggcctggtcatggaccgcatgggctccgtggagcgcatgggctccggcattgagcgcatggg

SEQ ID NO: 107665 - DNA, 120 bp, Artificial Sequence
  ENSG00000099783_11 (sequence is synthesized)
cccgctgggcctcgaccacatggcctccagcattgagcgcatgggccagaccatggagcgcattggctctggcgtggagcgcatgggtgccggcatgggcttcggccttgagcgcatggc

SEQ ID NO: 107666 - DNA, 120 bp, Artificial Sequence
  ENSG00000099783_12 (sequence is synthesized)
cgctcccatcgaccgtgtgggccagaccattgagcgcatgggctctggcgtggagcgcatgggccctgccatcgagcgcatgggcctgagcatggagcgcatggtgcccgcaggtatggg

SEQ ID NO: 107667 - DNA, 120 bp, Artificial Sequence
  ENSG00000099783_13 (sequence is synthesized)
agctggcctggagcgcatgggccccgtgatggatcgcatggccaccggcctggagcgcatgggcgccaacaatctggagcggatgggcctggagcgcatgggcgccaacagcctcgagcg

SEQ ID NO: 107668 - DNA, 120 bp, Artificial Sequence
  ENSG00000099783_14 (sequence is synthesized)
catgggcctggagcgcatgggtgccaacagcctcgagcgcatgggccctgccatgggcccggccctgggcgctggcattgagcgcatgggcctggccatgggtggcggtggcggtgccag

SEQ ID NO: 107669 - DNA, 120 bp, Artificial Sequence
  ENSG00000099783_15 (sequence is synthesized)
ctttgaccgtgccatcgagatggagcgtggcaacttcggaggaagcttcgcaggttcctttggtggagctggaggccatgctcctggggtggccaggaaggcctgccagatatttgtgag

SEQ ID NO: 107670 - DNA, 120 bp, Artificial Sequence
  ENSG00000099783_16 (sequence is synthesized)
aaatctgccattcgatttcacatggaagatgctaaaggacaaattcaacgagtgcggccacgtgctgtacgccgacatcaagatggagaatgggaagtccaaggggtgtggcgtggttaa

SEQ ID NO: 107671 - DNA, 120 bp, Artificial Sequence
  ENSG00000099783_17 (sequence is synthesized)
gttcgagtcgccagaggtggccgagagagcctgccggatgatgaatggcatgaagctgagtggccgagagattgacgttcgaattgatagaaacgcttaagcagttgccttttttaaaca

SEQ ID NO: 107672 - DNA, 120 bp, Artificial Sequence
  ENSG00000099783_18 (sequence is synthesized)
tcgatacgagacctctgaatttgtattttttcttgttaaccattttaatttgttggctggatgtataaagatgtttaaaaaattcagttgctttttggggtaatttgaattactttttta

SEQ ID NO: 107673 - DNA, 120 bp, Artificial Sequence
  ENSG00000099783_19 (sequence is synthesized)
atgactggggttccatttgactgtttgcattgagattgcaatgtgcgcaattttttttgtagttgtggcatcttgttgacatcgaatatgactttgataataaataccggttcctgaaaa

SEQ ID NO: 107674 - DNA, 120 bp, Artificial Sequence
  ENSG00000099783_20 (sequence is synthesized)
cgcgccgggaacagccagtcggtgcctaacgcgagtgtatctcgagagagaagcgatcaacagctgccggtctgcgcctgcgcgcggcgggggcgtggcccggggcgagtggggccaagg

SEQ ID NO: 107675 - DNA, 120 bp, Artificial Sequence
  ENSG00000099783_21 (sequence is synthesized)
gatcctactttggaattagggaaagacggtcatggtcccagacggcatttacaaagcaagtgccagcctgttgtttctaatgaagagtgtcggtcatagcctacagcagccattccctgc

SEQ ID NO: 107676 - DNA, 120 bp, Artificial Sequence
  ENSG00000099783_22 (sequence is synthesized)
ggaggcctgtgaatgccgatgggagaattccgccattctctgcaaatcagtggcatgttggttgaaagcttttgcagctgtcttgcagaaatcctaagtaatgcactgaagagaggagag

SEQ ID NO: 107677 - DNA, 120 bp, Artificial Sequence
  ENSG00000099783_23 (sequence is synthesized)
caacgagtgcggtaagtgttgggaacggctttgtaggtgcttccctcgtgcttgttggtgacgcagccgagtcagcagcaaaacctccctcccagccccctccgtcggctcaggacccat

SEQ ID NO: 107678 - DNA, 120 bp, Artificial Sequence
  ENSG00000099783_24 (sequence is synthesized)
gcattaaaccaagctcagggcccctgagtgcggggctctgtacaattgcacgagttgctcacctgtgaagctggccctgcggccgtgtgtgcctgtgagcttataccttcgcatacgtgc

SEQ ID NO: 107679 - DNA, 120 bp, Artificial Sequence
  ENSG00000099783_25 (sequence is synthesized)
gtccttgtatttatagcatgtgagctcagcccgatggcatcgcaatttgtatgcatttcacctgcttgccaccaatgagagcgtatgtgtaaaacctcctcccttccccagaaaagtaaa

SEQ ID NO: 107680 - DNA, 120 bp, Artificial Sequence
  ENSG00000099783_26 (sequence is synthesized)
tcacgcagacttctttcctatagatttggattgcctctagtcatgaatgagtcttccagacagggaaattgatacggaaatctgtggaatagcttgtttgtggtgggaggaaaatcaagg

SEQ ID NO: 107681 - DNA, 120 bp, Artificial Sequence
  ENSG00000099783_27 (sequence is synthesized)
aatgcctagttcggtggtttagagaatatggagtgtttctgggctttcttataaggcagaggctccatacaaggttgctgatgattgttctaaattcccattgttttcttggcttttctc

SEQ ID NO: 107682 - DNA, 120 bp, Artificial Sequence
  ENSG00000099783_28 (sequence is synthesized)
gtctttgaaacaaggtagtagtgtccccatttcacagatgagtcaggcagagtcttccttctgaggttacctggcttctaggtggcaaggctaaataaatacatcccagacgaggtcgct

SEQ ID NO: 107683 - DNA, 120 bp, Artificial Sequence
  ENSG00000099783_29 (sequence is synthesized)
ttcccctcagcacagctggtgtggggcctcggagagaacacagcccagcaggtgccatggggaggcggtgcaggctctgggcacacagcagctcctgtgagggtgaggctaaggtcttgt

SEQ ID NO: 107684 - DNA, 120 bp, Artificial Sequence
  ENSG00000099783_30 (sequence is synthesized)
ggtttcctggcacatcgggcaactcttctggagggctctgtctgtggctgaaagcaagttgtcttccttccctgccctccagggtgagcccccaccccgcatgcaccacctctgttcttt

SEQ ID NO: 107685 - DNA, 120 bp, Artificial Sequence
  ENSG00000099783_31 (sequence is synthesized)
ttagctagaggggcctgagctagaggtctgggcagctgcttccgcactgtcctcccgcttcctgtttcagcagtggctccgatttcaccaccattgctgcttctccatggttcttggggc

SEQ ID NO: 107686 - DNA, 120 bp, Artificial Sequence
  ENSG00000099783_32 (sequence is synthesized)
aagccgttgagtcatgatctgcctctttgctccattcttcacctctttccccactcctgagttcccatgttgtagctagatattctgaaaaggccagtgggatcacagcgcccccagccc

SEQ ID NO: 107687 - DNA, 120 bp, Artificial Sequence
  ENSG00000099783_33 (sequence is synthesized)
ccacttttgcaatgcctggagcggccctgtgccttcaagaggaagtccagactcacaagccccttgaagacctggtcctatcctcctccatctccctcctgtcccagaacctgagcggca

SEQ ID NO: 107688 - DNA, 120 bp, Artificial Sequence
  ENSG00000099783_34 (sequence is synthesized)
agtgctgcacgtgtcccgcaatgctctcgtgtgagccaattactggcaagtcttctttctggtgaatttctgtgtaagctcactcagaacttgcccctgaggacccctccaccctacctg

SEQ ID NO: 107689 - DNA, 120 bp, Artificial Sequence
  ENSG00000099783_35 (sequence is synthesized)
ctctcttaggcactgagttcccacctctggcattgtggccctaccacctttggtactcctggagtagagcctttgccctctagggctctgtccacggcgttgacacatatctggatgctt

SEQ ID NO: 107690 - DNA, 120 bp, Artificial Sequence
  ENSG00000099783_36 (sequence is synthesized)
aacgggtgctcaaatgaataagtgaaacctgctggctttcatttggacagtacagacgtgtccattggattgcggatggctttgtaaccaggggcggtggcatatcaaaaatgaagactt

SEQ ID NO: 107691 - DNA, 120 bp, Artificial Sequence
  ENSG00000099783_37 (sequence is synthesized)
tgtaaaatgtatgggaactttctgcctataaagctggctttacactgcgccttcttttttgaacttcctgaagcgtaaaggcgtgcattgaatccgccaggaaggcttttcatggggcag

SEQ ID NO: 107692 - DNA, 120 bp, Artificial Sequence
  ENSG00000099783_38 (sequence is synthesized)
gggcaggctctgttagcagaagaatggcagtgtggctgagggggccgtagtcattggttctcgccattgtattctgagcctttgtgctctaggcttcagggcctctcctttttgactctg

SEQ ID NO: 107693 - DNA, 120 bp, Artificial Sequence
  ENSG00000099783_39 (sequence is synthesized)
agcacacccagctcatttcaggcaaggctggcatgctcaaggatttccgcgcagagctcatttgttagcgttgaggttgtccgtggagctgcagctttaatttgctctatgataatgaga

SEQ ID NO: 107694 - DNA, 120 bp, Artificial Sequence
  ENSG00000099783_40 (sequence is synthesized)
ggtgcctctgggtggataaatgtgggctccaagtgggtgatgctgggcggtcttctgaacaagaagttggctggggtgggggtgggggcttactttccagctcaggggaggcaaggaagc

SEQ ID NO: 107695 - DNA, 120 bp, Artificial Sequence
  ENSG00000099783_41 (sequence is synthesized)
ctcagtcctgagagcctggaccagctttagaaaactgccgctgagcgagacccgatggccctcttcttgctctggctctcagttcatgaatgcatatgactcctatctctgctgggcgca

SEQ ID NO: 107696 - DNA, 120 bp, Artificial Sequence
  ENSG00000099783_42 (sequence is synthesized)
cccagcatcaaggactctcctagttctctgtaaaatgatcttgtctgtgcgtgtgtttctcaaacccctttccctttatcttgtcatttttattagtagtatttctactctggaatctgt

SEQ ID NO: 107697 - DNA, 120 bp, Artificial Sequence
  ENSG00000099783_43 (sequence is synthesized)
aatgagcacatttctattgccatagaggaatttggctaatttttttttcttcctgatttccttagaaatcctaagtaatgcactgaagagaggagagatcattgcaaagcagggaggagg

SEQ ID NO: 107698 - DNA, 120 bp, Artificial Sequence
  ENSG00000099783_44 (sequence is synthesized)
ttcgatttcacatggaagatgctaaaggacaaattcaacgagtgcgaacctgagcggcaagtgctgcacgtgtcccgcaatgctctcgtgtgagccaattactggccacgtgctgtacgc

SEQ ID NO: 107699 - DNA, 80 bp, Artificial Sequence
  ENSG00000099785_0 (sequence is synthesized)
gggccgggaccggggccgaggcgaaccgaggggcctgtgcggccgcccggcccggccgcggatcaggctcctggaaccat

SEQ ID NO: 107700 - DNA, 120 bp, Artificial Sequence
  ENSG00000099785_1 (sequence is synthesized)
tcctggaaccatgggcctcaggccctgaggatacggggctcccggtggccatgacgacgggtgactgctgccacctccccggctccctgtgtgactgctccggcagccctgccttctcca

SEQ ID NO: 107701 - DNA, 120 bp, Artificial Sequence
  ENSG00000099785_2 (sequence is synthesized)
aggtcgtggaggctacgggcctcggaccgccccagtatgtggcacaggtgacttcaagggatggccggctcctctccaccgtcatccgtgccttggacacaccgagtgatggtcctttct

SEQ ID NO: 107702 - DNA, 120 bp, Artificial Sequence
  ENSG00000099785_3 (sequence is synthesized)
gccggatctgccatgagggagcgaacggggagtgcttgctgtccccgtgtggctgcaccggcacgctgggtgccgtgcataagagctgtctggagaagtggctttcctcatctaacacca

SEQ ID NO: 107703 - DNA, 120 bp, Artificial Sequence
  ENSG00000099785_4 (sequence is synthesized)
gctactgcgagctgtgccacacggagtttgcagtggagaaacggcctcgacccctcacagagtggctgaaggacccggggccgcggacggagaagcggacactgtgctgcgacatggtgt

SEQ ID NO: 107704 - DNA, 120 bp, Artificial Sequence
  ENSG00000099785_5 (sequence is synthesized)
gcccaggaccacctccggctccacagccagctggaggccgtgggtctcattgccctcaccatcgccctcttcaccatctatgtcctctggacgctggtctccttccgctaccactgccag

SEQ ID NO: 107705 - DNA, 120 bp, Artificial Sequence
  ENSG00000099785_6 (sequence is synthesized)
ctgtactccgagtggagaaagaccaaccagaaagttcgcctgaagatccgggaggcggacagccccgagggcccccagcattctccactggcagctggactcctgaagaaggtggcagag

SEQ ID NO: 107706 - DNA, 120 bp, Artificial Sequence
  ENSG00000099785_7 (sequence is synthesized)
gagacaccagtatgaatgctgggctctccggaccctgcagcagagaggccagaggtagctggtgataccctgtcctgtggaaggacttccacttcaacacttccacttcaacagttcccg

SEQ ID NO: 107707 - DNA, 120 bp, Artificial Sequence
  ENSG00000099785_8 (sequence is synthesized)
cacggcctgaacgcttcttaggccaagagacaccatgcagagcctagtctgtgatcctgtgtgaagatattttcagggtttttttttttttttttttgcatatggaggacaggtggacat

SEQ ID NO: 107708 - DNA, 120 bp, Artificial Sequence
  ENSG00000099785_9 (sequence is synthesized)
ggtcctgagctctggacggagcaggcaccctgatctcattctgaggtccacatggcaccttctgggccagcagctgtggccggtgtatcaagggcgcccttaaagctggaacattccagc

SEQ ID NO: 107709 - DNA, 120 bp, Artificial Sequence
  ENSG00000099785_10 (sequence is synthesized)
aagcttcttgcgcttctctgcacccggcaggcccactttcctggcaccctcgactttatataaaagttgcactgcgtttcaaaaacccacccctgaatgaataaaaggagccctggctgg

SEQ ID NO: 107710 - DNA, 120 bp, Artificial Sequence
  ENSG00000099785_11 (sequence is synthesized)
catttatccagcagtgaaccgtcctagcgcaagagttagtaattgctcccctgttccttcacctccccactttggagctcagatttgtttttttgtttgtttgtttgcttgctttctttt

SEQ ID NO: 107711 - DNA, 63 bp, Artificial Sequence
  ENSG00000099785_12 (sequence is synthesized)
agatttgtttttttgtttgtttgtttgcttgctttcttttgttctgttttagagactggagac

SEQ ID NO: 107712 - DNA, 120 bp, Artificial Sequence
  ENSG00000099785_13 (sequence is synthesized)
ctcccaagtagctgggactacaggctttcagcaccatgcctggctaattcaaaaaaaccttcagagagatagggtctctctatgttgccctagctcgtctcaaactcctggcctcaagtg

SEQ ID NO: 107713 - DNA, 120 bp, Artificial Sequence
  ENSG00000099785_14 (sequence is synthesized)
taggcacgggcctgcaggtagggccggaggacgccagtccgcgggccggccccgggttcgaggccggagctcggcacccgggcgggacggctgggctcgatcccttggccacagccttct

SEQ ID NO: 107714 - DNA, 120 bp, Artificial Sequence
  ENSG00000099785_15 (sequence is synthesized)
cggggacgcggggacctcagttcccgtgtcaaggccggtgggaggtctccggggtccggcacacataggcgcctctccgagcctcggtttccccacctgtgaaactgggtcatcccattg

SEQ ID NO: 107715 - DNA, 120 bp, Artificial Sequence
  ENSG00000099785_16 (sequence is synthesized)
ccaacctgatggggcttctgggaggattcaggaggtggctggtgcagaaaacgcctgacacacagtaggcaactgctaagtggccaatgcccttccccaacctccttctcagagcggctc

SEQ ID NO: 107716 - DNA, 120 bp, Artificial Sequence
  ENSG00000099795_0 (sequence is synthesized)
gtcagtggttccgggtaggagctaggtgaccctcggctgctgcagggatctgcagcgactgcagccatgggggcccacctggtccggcgctacctgggcgatgcctcggtggagcccgac

SEQ ID NO: 107717 - DNA, 120 bp, Artificial Sequence
  ENSG00000099795_1 (sequence is synthesized)
cccctgcagatgccaaccttcccgccagactacggcttccccgaacgcaaggagcgcgagatggtggccacacagcaggagatgatggacgcgcagctgaggctccagctgcgggactac

SEQ ID NO: 107718 - DNA, 120 bp, Artificial Sequence
  ENSG00000099795_2 (sequence is synthesized)
tcctggcctgcaagcaggagcggcacgactgggactactgcgagcaccgcgactatgtgatgcgcatgaaggagtttgagcgggagcggaggctgctccagcggaagaagcggcgggaga

SEQ ID NO: 107719 - DNA, 120 bp, Artificial Sequence
  ENSG00000099795_3 (sequence is synthesized)
agaaggcggcagagttggccaaaggccagggacccggggaagtggaccccaaggtggccctgtagggggtgcaccccccaccctatggaccagtcaaataaaagccttcaggcccctcaa

SEQ ID NO: 107720 - DNA, 120 bp, Artificial Sequence
  ENSG00000099797_0 (sequence is synthesized)
gtttagtctatcgctgcggttgcgagcgctgtagggagcctgtgctgtgccgcgcagttaggcagcagcagccgcggagcagtagccgccgtgggagggagccatgaagcattacgaggt

SEQ ID NO: 107721 - DNA, 120 bp, Artificial Sequence
  ENSG00000099797_1 (sequence is synthesized)
ggagattctggacgcaaagacaagggagaagctgtgtttcttggacaaggtggagccccacgccaccattgcggagatcaagaacctcttcactaagacccatccgcagtggtaccccgc

SEQ ID NO: 107722 - DNA, 120 bp, Artificial Sequence
  ENSG00000099797_2 (sequence is synthesized)
ccgccagtccctccgcctggaccccaagggcaagtccctgaaggatgaggatgttctgcagaagctgcccgtgggcaccacggccacactgtacttccgggacctgggggcccagatcag

SEQ ID NO: 107723 - DNA, 120 bp, Artificial Sequence
  ENSG00000099797_3 (sequence is synthesized)
ctgggtgacggtcttcctaacagagtacgcggggccccttttcatctacctgctcttctacttccgagtgcccttcatctatggccacaaatatgactttacgtccagtcggcatacagt

SEQ ID NO: 107724 - DNA, 120 bp, Artificial Sequence
  ENSG00000099797_4 (sequence is synthesized)
tcttcgtgcaccgcttctcccatggcactatgcctttgcgcaacatcttcaagaactgcacctactactggggcttcgccgcgtggatggcctattacatcaatcaccctctctacactc

SEQ ID NO: 107725 - DNA, 120 bp, Artificial Sequence
  ENSG00000099797_5 (sequence is synthesized)
cccctacctacggagctcagcaggtgaaactggcgctcgccatctttgtgatctgccagctcggcaacttctccatccacatggccctgcgggacctgcggcccgctgggtccaagacgc

SEQ ID NO: 107726 - DNA, 120 bp, Artificial Sequence
  ENSG00000099797_6 (sequence is synthesized)
ggaagatcccataccccaccaagaaccccttcacgtggctcttcctgctggtgtcctgccccaactacacctacgaggtggggtcctggatcggtttcgccatcatgacgcagtgtctcc

SEQ ID NO: 107727 - DNA, 120 bp, Artificial Sequence
  ENSG00000099797_7 (sequence is synthesized)
cagtggccctgttctccctggtgggcttcacccagatgaccatctgggccaagggcaagcaccgcagctacctgaaggagttccgggactacccgcccctgcgcatgcccatcatcccct

SEQ ID NO: 107728 - DNA, 120 bp, Artificial Sequence
  ENSG00000099797_8 (sequence is synthesized)
tcctgctctgagcgctcacccctgctgaggctcagcccctcaacccggtggcattctgggggaggagtggggcccacagctctccagcacccggaataaagcccgcctgccccagtcgga

SEQ ID NO: 107729 - DNA, 120 bp, Artificial Sequence
  ENSG00000099797_9 (sequence is synthesized)
gacagacacccctgcacacggttgagccctttgtaggtctccgtgtgacaagtacatccctgctgtgcttgggaaagggctgcggcttgggaaagggctgtgtgggttccctggcttctt

SEQ ID NO: 107730 - DNA, 120 bp, Artificial Sequence
  ENSG00000099797_10 (sequence is synthesized)
ccatgctcccaggcccctcgggatgagacatgggcagcatctgccttgtccggtgctggcccaagtcccatccctgccctgctccctttcagaactgcacctactactggggcttcgccg

SEQ ID NO: 107731 - DNA, 120 bp, Artificial Sequence
  ENSG00000099797_11 (sequence is synthesized)
agcctgtgctgtgccgcgcagttaggcagcagcagccgcggagcagtagccgccgtgggagggagccatgaagcattacgaggtaagaagcgagaaacaggggccgtgtggccactgctg

SEQ ID NO: 107732 - DNA, 120 bp, Artificial Sequence
  ENSG00000099797_12 (sequence is synthesized)
acccattctttttccttctttgcgggaccacgggaccccactttctggtcctgtgccccgaaggaagagccagacggcgcaggcgcagtgggcaagcgttgcgccccgggccactcgtaa

SEQ ID NO: 107733 - DNA, 120 bp, Artificial Sequence
  ENSG00000099797_13 (sequence is synthesized)
attccaatgcgcatgtgcgcaggaagtatttataaatctgcaacccaggctgttttgggggtactttttcttgggggtctctgcaggggctgggacgcttgcaggttccttgcagctccc

SEQ ID NO: 107734 - DNA, 120 bp, Artificial Sequence
  ENSG00000099797_14 (sequence is synthesized)
ccagcgggctgagttgcagactttgtcatgggagccacgaaggtgcgggacccttgctcccaatccgagggagtcttgcacaaatcttgcgccacgccgccgtcaccagcgtaggaaggg

SEQ ID NO: 107735 - DNA, 120 bp, Artificial Sequence
  ENSG00000099797_15 (sequence is synthesized)
gctttgctatcagtattcttgtgtacgacctttggaccccttccctcgcccgggacgttcccgggagacttaggcggtgagggaggtgcagctccacggctggctttcgcagagcagcga

SEQ ID NO: 107736 - DNA, 120 bp, Artificial Sequence
  ENSG00000099797_16 (sequence is synthesized)
agctgatcttgctttctggttatcaaagaggtcatctacgtcaacccttgggtgtcaccaaggagaaatcttatacccacccacagccactcttgaagcccaagtcttctgactcctaac

SEQ ID NO: 107737 - DNA, 120 bp, Artificial Sequence
  ENSG00000099797_17 (sequence is synthesized)
ttgggtctctttttcccttaaaacgaagtcttctgatgtgcttatcgccctaggtgataatataatattaataattcaaccaattatccctgaattattgctgacttttaagtaactatc

SEQ ID NO: 107738 - DNA, 120 bp, Artificial Sequence
  ENSG00000099797_18 (sequence is synthesized)
atcaaataataaaatttgttattaaaattcaaaataacaatttagcaagtgcttactcttgtgctggtgagattctgttaccttgtataagaactattattattcctgtttgtaaggatg

SEQ ID NO: 107739 - DNA, 120 bp, Artificial Sequence
  ENSG00000099797_19 (sequence is synthesized)
aataaagtctcagagatataaagtgacttgttcaaaggcccctagttagtaaatgcaaaacagataggggaactcaggacgccaaggtcttagttcctagccactatgccatgctggtcc

SEQ ID NO: 107740 - DNA, 120 bp, Artificial Sequence
  ENSG00000099797_20 (sequence is synthesized)
tcaaatgaaaaatagcaggtcgagcgatttcttgtttctcacttcccctccaatttaaaaaattctggcaaaatacacataaaatttaccatcttgactatttttaagtgtgcagttcag

SEQ ID NO: 107741 - DNA, 120 bp, Artificial Sequence
  ENSG00000099797_21 (sequence is synthesized)
tggcattaagaacattcacattgttgtgcaaccatcaccaccacccatctccagaactctttgcatcttggaaaacagaagctgtagacgttaaatactaactccccattcctctccacc

SEQ ID NO: 107742 - DNA, 120 bp, Artificial Sequence
  ENSG00000099797_22 (sequence is synthesized)
tccacctctggcagccaccattctactcagccaccattccgtcttaatgaattgactactctaggtaccttggatacgtagaaggattttttttttcttttggagacagagtttcggtct

SEQ ID NO: 107743 - DNA, 79 bp, Artificial Sequence
  ENSG00000099797_23 (sequence is synthesized)
gtttcaccatgttgaccaggctggcctcaaactcttgacctcaagtgatttgcccgtgcgcccggctgtttgtttttat

SEQ ID NO: 107744 - DNA, 120 bp, Artificial Sequence
  ENSG00000099797_24 (sequence is synthesized)
gcccggctgtttgtttttattgacaagttgaatattactacctctgcctcctgccccctttattgctactatttttggaaatttacccacaatcctttgaagcctttttttgagacggag

SEQ ID NO: 107745 - DNA, 120 bp, Artificial Sequence
  ENSG00000099797_25 (sequence is synthesized)
tgggattacaggcatgagccacggtgcctagccccttagaagcctttaacccacaaatcctgtaatttttgacatggtatcaagaatgaggaggtttgtattcaataatctctgtcattt

SEQ ID NO: 107746 - DNA, 120 bp, Artificial Sequence
  ENSG00000099797_26 (sequence is synthesized)
tctctgtcatttaagttttcattctagaatgaagttctgatgtggattcccctctcaaactctatatctaaacctgtagtcccactactgtagtctcagctactcgggaggctgaagcag

SEQ ID NO: 107747 - DNA, 120 bp, Artificial Sequence
  ENSG00000099797_27 (sequence is synthesized)
gaaacatgcagtttggaacatccatatggcattttgcaaatgtagttggtttagttttgctagttaacagtcagataaagtaggcctctgagcaccctgggggtgcgtgcttttgttcca

SEQ ID NO: 107748 - DNA, 120 bp, Artificial Sequence
  ENSG00000099797_28 (sequence is synthesized)
ggaagctgggcacagcctgaggcccaagacttggactggagaatatgctccaccgtacttaatccttttctctcccagaaagaagggggagctttggccaggcatggtggctcacgcctg

SEQ ID NO: 107749 - DNA, 120 bp, Artificial Sequence
  ENSG00000099797_29 (sequence is synthesized)
tcttcagcctacggagctcagcaggtgaaactggcgctcgccatctttgtggtaaggaggctgggtgtggggacggggtcgggggagtctgggcggccctaggctgatcctgcttctctg

SEQ ID NO: 107750 - DNA, 120 bp, Artificial Sequence
  ENSG00000099797_30 (sequence is synthesized)
gcagactctctctcgagcttcccttacagggggaaacagcttggaagccatgggggaggaacttttttgtctgtcaggggagagcaaggaagaaccccaagtttctacctctcactgcca

SEQ ID NO: 107751 - DNA, 120 bp, Artificial Sequence
  ENSG00000099797_31 (sequence is synthesized)
acagcagagacgcccccctaccaacagtatttccgcgtagcctgacagtggaaaaggactcatgcggttaggtgttcacctccaggtgccacctaggccctgccactcctggactgaccc

SEQ ID NO: 107752 - DNA, 120 bp, Artificial Sequence
  ENSG00000099797_32 (sequence is synthesized)
ccgtgggcagagccgagtggcagggctggtggcaggcggcatggacttgaacttgagcttgttggcccgggaggccaccccaggcctcctccctggcctcaatgggctccccaggcccac

SEQ ID NO: 107753 - DNA, 120 bp, Artificial Sequence
  ENSG00000099797_33 (sequence is synthesized)
tttagtctatcgctgcggttgcgagcgctgtagggagcctgtgctgtgccgcgcagttaggcagcagcagccgcggagcagtagccgccgtgggagggagccatgaagcattacgagcag

SEQ ID NO: 107754 - DNA, 120 bp, Artificial Sequence
  ENSG00000099797_34 (sequence is synthesized)
gctctgtgcagggcgggggctgggaggtgttgtcatgcctgcccctggggctttccctgtgctggtgccgttgagggttttgaggtgaccactcaaaagctgctttcagggcagcctggc

SEQ ID NO: 107755 - DNA, 120 bp, Artificial Sequence
  ENSG00000099797_35 (sequence is synthesized)
ggagattctggacgcaaagacaagggagaagctgtgtttcttggacaagtacctccccatcctgagtctgggctccccgcagagctgacgtccctgcgcctgtgcttcccccaggtggag

SEQ ID NO: 107756 - DNA, 120 bp, Artificial Sequence
  ENSG00000099797_36 (sequence is synthesized)
tgcaacccctttgaccagggaccttagggtgggagggatcccatcctgcacccctctcccaggggcctgcagagatgccccagtgtggcccaggcttctggggcgtgactggggcaggcg

SEQ ID NO: 107757 - DNA, 120 bp, Artificial Sequence
  ENSG00000099797_37 (sequence is synthesized)
cctccacgtggcactccgcaggaacgcccttgctaggctctgggaaggacaagatcctgcttctgcccgcgctcttctggcttgtgtcctgaaaccgcacaagcctgagggtttgccccc

SEQ ID NO: 107758 - DNA, 120 bp, Artificial Sequence
  ENSG00000099800_0 (sequence is synthesized)
agttagttacgagtcggcgcacgcggcctcggtccggttgactttgcggagccatggagggcggcttcggctccgatttcgggggctccggcagcgggaagctggacccagggctcataa

SEQ ID NO: 107759 - DNA, 120 bp, Artificial Sequence
  ENSG00000099800_1 (sequence is synthesized)
tggagcaggtgaaagtgcagatcgccgtggccaacgcgcaggagctgctgcagaggatgacggacaagtgtttccggaagtgtatagggaaacctgggggctccctggacaactccgagc

SEQ ID NO: 107760 - DNA, 120 bp, Artificial Sequence
  ENSG00000099800_2 (sequence is synthesized)
agaagtgcatcgccatgtgcatggaccgctacatggacgcctggaacaccgtgtctcgcgcctacaactcgcggctgcagcgggaacgagccaacatgtgaccggcgagcgcgggccacc

SEQ ID NO: 107761 - DNA, 120 bp, Artificial Sequence
  ENSG00000099800_3 (sequence is synthesized)
ccaccctgttcatttccataaacgtgctttgagaggcggggtccgcatgtacgtactgcctgcccggggcttaggagggtggcaccggtgctgggacacacgggactgtgtcctcgccac

SEQ ID NO: 107762 - DNA, 120 bp, Artificial Sequence
  ENSG00000099800_4 (sequence is synthesized)
cccccgccctgccccctgccagccagtgcagcttggatctcgggggtgtggggccctgtgccttcctgaagtgctggcagcccagtggcacctccttcaggcctttggggtattccccta

SEQ ID NO: 107763 - DNA, 120 bp, Artificial Sequence
  ENSG00000099800_5 (sequence is synthesized)
gtgtgcccaagtcagcctcatattctgggcggacagcttgtctggacttcggagttgggggtggtcagacaccacaggagctgtcacctcctgcggatgggcaaataaattggtggagga

SEQ ID NO: 107764 - DNA, 120 bp, Artificial Sequence
  ENSG00000099800_6 (sequence is synthesized)
gaagtccatctttccccttagtgccaccgggctgctgagtcacgaggaatgtgttgctgctgccacccctgccccaaaggctaagggggacagccttccccttgtcagggcttgctttga

SEQ ID NO: 107765 - DNA, 120 bp, Artificial Sequence
  ENSG00000099800_7 (sequence is synthesized)
ccctgcttcgttccaccccgggtcctggtggagcaccaggcaggtggtcctcgctgtgacactgaggtgctgagccagtgagctagggtggaggggctgtgtttattggaacaaagggtg

SEQ ID NO: 107766 - DNA, 120 bp, Artificial Sequence
  ENSG00000099800_8 (sequence is synthesized)
gtaccaaaatgcatccccatgacccacagcccccccacacccgtccttgggtagggtacggtggggtggggtgttgggtggcctgctgctcctgttgctttcacgtagagtctcggcctg

SEQ ID NO: 107767 - DNA, 120 bp, Artificial Sequence
  ENSG00000099800_9 (sequence is synthesized)
ggcagtcacgtggtggtcactcctggatgtgctgtcctatccagcctctcacagctgccacccgggtatagacacctgggaagtggggccggccacagccatagccccagctagtgaccc

SEQ ID NO: 107768 - DNA, 120 bp, Artificial Sequence
  ENSG00000099800_10 (sequence is synthesized)
cagttagcacccaccgtccagagggctccctgcaggccaggggtcccccagcgtcaccctgttggggagagaagaaagggggttcagaggccggtacctcccctacagcagcccttgggt

SEQ ID NO: 107769 - DNA, 120 bp, Artificial Sequence
  ENSG00000099800_11 (sequence is synthesized)
cattggcccctctaggagtgaccctagtgacttcccctgggagccgcattttcactatctggaaaatgggctcaatgcaaaggtggcagacatttatggacacccgccacgtggtcccgg

SEQ ID NO: 107770 - DNA, 120 bp, Artificial Sequence
  ENSG00000099800_12 (sequence is synthesized)
agtggaacggtgcctcccactgcagcctctgcctgctctgccgccgaggcccggggatgggatgcggtgggttgcccaataaacggctgtggagtggaaattcctccagagccaaaaagg

SEQ ID NO: 107771 - DNA, 120 bp, Artificial Sequence
  ENSG00000099800_13 (sequence is synthesized)
gagccatggagggcggcttcggctccgatttcgggggctccggcagcgggaagctggacccagggctcataatggagcagaggatgacggacaagtgtttccggaagtgtatagggaaac

SEQ ID NO: 107772 - DNA, 80 bp, Artificial Sequence
  ENSG00000099804_0 (sequence is synthesized)
cagaggaggaggcaggcggcggccccggtggctcccccccggacggtgcgcggcccggcccgtctcgcgaactcgcggtg

SEQ ID NO: 107773 - DNA, 120 bp, Artificial Sequence
  ENSG00000099804_1 (sequence is synthesized)
ggtggtcgcgcggccccgcgctgctccgaccccgggcccctccgccgccgccatggctcggccgctagtgcccagctcgcagaaggcgctgctgctggagctcaaggggctgcaggaaga

SEQ ID NO: 107774 - DNA, 120 bp, Artificial Sequence
  ENSG00000099804_2 (sequence is synthesized)
gccggtcgagggattccgcgtgacactggtggacgagggcgatctatacaactgggaggtggccatcttcgggccccccaacacctactacgagggcggctacttcaaggcgcgcctcaa

SEQ ID NO: 107775 - DNA, 120 bp, Artificial Sequence
  ENSG00000099804_3 (sequence is synthesized)
gttccccatcgactacccatactctccaccagcctttcggttcctgaccaagatgtggcaccctaacatctacgagacgggggacgtgtgtatctccatcctccacccgccggtggacga

SEQ ID NO: 107776 - DNA, 120 bp, Artificial Sequence
  ENSG00000099804_4 (sequence is synthesized)
cccccagagcggggagctgccctcagagaggtggaaccccacgcagaacgtcaggaccattctcctgagtgtgatctccctcctgaacgagcccaacaccttctcgcccgcaaacgtgga

SEQ ID NO: 107777 - DNA, 120 bp, Artificial Sequence
  ENSG00000099804_5 (sequence is synthesized)
cggagcgtgacggcgtgaaggtgcccaccacgctggccgagtactgcgtgaagaccaaggcgccggcgcccgacgagggctcagacctcttctacgacgactactacgaggacggcgagg

SEQ ID NO: 107778 - DNA, 120 bp, Artificial Sequence
  ENSG00000099804_6 (sequence is synthesized)
tggaggaggaggccgacagctgcttcggggacgatgaggatgactctggcacggaggagtcctgacaccaccagaataaacttgccgagtttacctcactagggccggacccgtggctcc

SEQ ID NO: 107779 - DNA, 120 bp, Artificial Sequence
  ENSG00000099804_7 (sequence is synthesized)
ttagacgacagactacctcacggaggttttgtgctggtccccgtctcctctggttgtttcgttttggctttttctccctccccatgtctgttctgggttttcacgtgcttcagagaagag

SEQ ID NO: 107780 - DNA, 120 bp, Artificial Sequence
  ENSG00000099804_8 (sequence is synthesized)
gggctgccccaccgccactcacgtcactcggggctcggtggacgggcccagggtgggagcggccggcccacctgtcccctcgggaggggagctgagcccgacttctaccggggtccccca

SEQ ID NO: 107781 - DNA, 120 bp, Artificial Sequence
  ENSG00000099804_9 (sequence is synthesized)
gcttccggactggccgcaccccggaggagccacgggggcgctgctgggaacgtgggcggggggccgtttcctgacactaccagcctgggaggcccaggtgtagcggtccgaggggcccgg

SEQ ID NO: 107782 - DNA, 120 bp, Artificial Sequence
  ENSG00000099804_10 (sequence is synthesized)
tcctgcctgtcagctccaggtcctggagccacgtccagcacagagtggacggattcaccgtggccgactcttttccctgctttggtttgtttgaaatctaaataaaactactttatgaga

SEQ ID NO: 107783 - DNA, 120 bp, Artificial Sequence
  ENSG00000099804_11 (sequence is synthesized)
cccctgtgtccacccagaacatcaggtaggccgggctccgtcccgtatccacccagaccatcaggtaggccgggctcccccacaggctgtggcgccaaggcctgattcgggacctgccag

SEQ ID NO: 107784 - DNA, 120 bp, Artificial Sequence
  ENSG00000099804_12 (sequence is synthesized)
ctggcggtcctgggcctcgctgtacctgcacggtaggtgctttcacggggcctgcggcaccgtgtgtcggtgcagactcccaccaggaccccaggccggccccaccgtctggaaccacct

SEQ ID NO: 107785 - DNA, 120 bp, Artificial Sequence
  ENSG00000099804_13 (sequence is synthesized)
agaggtgtcccgccatcctcagtcctggggccttctccttacccagccgtctctgggttggtcacctcgtgccacgtgtgccgcctgggcctcgtccccaggtacaagcactgggccgtg

SEQ ID NO: 107786 - DNA, 120 bp, Artificial Sequence
  ENSG00000099810_0 (sequence is synthesized)
ctccgcactgctcactcccgcgcagtgaggttggcacagccaccgctctgtggctcgcttggttcccttagtcccgagcgctcgcccactgcagattcctttcccgtgcagacatggcct

SEQ ID NO: 107787 - DNA, 120 bp, Artificial Sequence
  ENSG00000099810_1 (sequence is synthesized)
ctggcaccaccaccaccgccgtgaagattggaataattggtggaacaggcctggatgatccagaaattttagaaggaagaactgaaaaatatgtggatactccatttggcaagccatctg

SEQ ID NO: 107788 - DNA, 120 bp, Artificial Sequence
  ENSG00000099810_2 (sequence is synthesized)
atgccttaattttggggaagataaaaaatgttgattgcgtcctccttgcaaggcatggaaggcagcacaccatcatgccttcaaaggtcaactaccaggcgaacatctgggctttgaagg

SEQ ID NO: 107789 - DNA, 120 bp, Artificial Sequence
  ENSG00000099810_3 (sequence is synthesized)
aagagggctgtacacatgtcatagtgaccacagcttgtggctccttgagggaggagattcagcccggcgatattgtcattattgatcagttcattgacaggaccactatgagacctcagt

SEQ ID NO: 107790 - DNA, 120 bp, Artificial Sequence
  ENSG00000099810_4 (sequence is synthesized)
ccttctatgatggaagtcattcttgtgccagaggagtgtgccatattccaatggctgagccgttttgccccaaaacgagagaggttcttatagagactgctaagaagctaggactccggt

SEQ ID NO: 107791 - DNA, 120 bp, Artificial Sequence
  ENSG00000099810_5 (sequence is synthesized)
gccactcaaaggggacaatggtcacaatcgagggacctcgttttagctcccgggcagaaagcttcatgttccgcacctggggggcggatgttatcaacatgaccacagttccagaggtgg

SEQ ID NO: 107792 - DNA, 120 bp, Artificial Sequence
  ENSG00000099810_6 (sequence is synthesized)
ttcttgctaaggaggctggaatttgttacgcaagtatcgccatggcgacagattatgactgctggaaggagcacgaggaagcagtttcggtggaccgggtcttaaagaccctgaaagaaa

SEQ ID NO: 107793 - DNA, 120 bp, Artificial Sequence
  ENSG00000099810_7 (sequence is synthesized)
acgctaataaagccaaaagcttactgctcactaccatacctcagatagggtccacagaatggtcagaaaccctccataacctgaagaatatggcccagttttctgttttattaccaagac

SEQ ID NO: 107794 - DNA, 120 bp, Artificial Sequence
  ENSG00000099810_8 (sequence is synthesized)
attaaagtagcatggctgcccaggagaaaagaagacattctaattccagtcattttgggaattcctgcttaacttgaaaaaaatatgggaaagacatgcagctttcatgcccttgcctat

SEQ ID NO: 107795 - DNA, 120 bp, Artificial Sequence
  ENSG00000099810_9 (sequence is synthesized)
caaagagtatgttgtaagaaagacaagacattgtgtgtattagagactcctgaatgatttagacaacttcaaaatacagaagaaaagcaaatgactagtaaacatgtgggaaaaaatatt

SEQ ID NO: 107796 - DNA, 120 bp, Artificial Sequence
  ENSG00000099810_10 (sequence is synthesized)
acattttaagggggaaaaaaaaacccaccattctcttctccccctattaaatttgcaacaataaagggtggagggtaatctctactttcctatactgccaaagaatgtgaggaagaaatg

SEQ ID NO: 107797 - DNA, 120 bp, Artificial Sequence
  ENSG00000099810_11 (sequence is synthesized)
ggactctttggttatttattgatgcgactgtaaattggtacagtatttctggagggcaatttggtaaaatgcatcaaaagacttaaaaatacggacgtactttgtgctgggaactctaca

SEQ ID NO: 107798 - DNA, 120 bp, Artificial Sequence
  ENSG00000099810_12 (sequence is synthesized)
tctagcaatttctctttaaaaccatatcagagatgcatacaaagaattatatataaagaagggtgtttaataatgatagttataataataaataattgaaacaatctgaatcccttgcaa

SEQ ID NO: 107799 - DNA, 120 bp, Artificial Sequence
  ENSG00000099810_13 (sequence is synthesized)
ttggaggtaaattatgtcttagttataattagattgtgaatcagccaactgaaaatcctttttgcatatttcaatgtcctaaaaagacacggttgctctatatatgaagtgaaaaaagga

SEQ ID NO: 107800 - DNA, 120 bp, Artificial Sequence
  ENSG00000099810_14 (sequence is synthesized)
tatggtagcattttatagtactagttttgctttaaaatgctatgtaaatatacaaaaaaactagaaagaaatatatataaccttgttattgtatttgggggagggatactgggataattt

SEQ ID NO: 107801 - DNA, 120 bp, Artificial Sequence
  ENSG00000099810_15 (sequence is synthesized)
ttattttctttgaatctttctgtgtcttcacatttttctacagtgaatttaatcaaatagtaaagttgttgtaaaaataaaagtggatttagaaagatccagttcttgaaaacactgttt

SEQ ID NO: 107802 - DNA, 120 bp, Artificial Sequence
  ENSG00000099810_16 (sequence is synthesized)
ctggtaatgaagcagaatttaagttggtaatattaaggtgaatgtcatttaagggagttacatctttattctgctaaagaagaggatcattgatttctgtacagtcagaacagtacttgg

SEQ ID NO: 107803 - DNA, 120 bp, Artificial Sequence
  ENSG00000099810_17 (sequence is synthesized)
gtttgcaacagctttctgagaaaagctaggtgtttaatagtttaactgaaagtttaactatttaaaagactaaatgcacattttatggtatctgatattttaaaaagtaatgtttgattc

SEQ ID NO: 107804 - DNA, 120 bp, Artificial Sequence
  ENSG00000099810_18 (sequence is synthesized)
tcctttttatgagttaaattattttatacgagttggtaatttttgctttttaataaagtggaagcttgcttttttaactctttttttattgttattttatagaaatgctttttgttggcc

SEQ ID NO: 107805 - DNA, 74 bp, Artificial Sequence
  ENSG00000099810_19 (sequence is synthesized)
tttttttattgttattttatagaaatgctttttgttggccgggcacagttgctcatccatgtaatcccagcact

SEQ ID NO: 107806 - DNA, 120 bp, Artificial Sequence
  ENSG00000099810_20 (sequence is synthesized)
aagactcagtctcaaaaaaaaaaaaaagagtgaaatgctttttgtttgcttcagttttttatcatggggagatctttttcctcagaattgttttcttttcactgtaggctattacaggat

SEQ ID NO: 107807 - DNA, 120 bp, Artificial Sequence
  ENSG00000099810_21 (sequence is synthesized)
ctcagaattgttttcttttcactgtaggctattacaggatacttcaggatcaagatacagaaccttttatttaaagagtttgtaaagtcaatgtgtttgtttgtgtctctgagattgact

SEQ ID NO: 107808 - DNA, 120 bp, Artificial Sequence
  ENSG00000099810_22 (sequence is synthesized)
tcaagataataagctgctaattgtaaacaaaacagttaccctccagtattaatatgactcattagtgtgagccatttgggtcaagtatgattatgacccttggacttcctgatgtagtat

SEQ ID NO: 107809 - DNA, 120 bp, Artificial Sequence
  ENSG00000099810_23 (sequence is synthesized)
taaatttcaactctggttatccattagcaatctgtagagaacttaatgaacctgaacccaggcttctctagctctggtaacgtgtgattgttttcactacaatatgatacatagatggta

SEQ ID NO: 107810 - DNA, 120 bp, Artificial Sequence
  ENSG00000099810_24 (sequence is synthesized)
agaatgtcagggcaaaagtatgggcatttttcttgctatgttcagaaagtacagttctctccaacttgcagaggtacttttcttgattaaatagccttctctagcaacatcattttcaga

SEQ ID NO: 107811 - DNA, 120 bp, Artificial Sequence
  ENSG00000099810_25 (sequence is synthesized)
ctaactaaatgaatgcagtatactcttttctttgttctcaatcattcactccttatgcaaagccaatataattttcctcataccttatgcttgaggatattgttgaagaacacttcctgg

SEQ ID NO: 107812 - DNA, 120 bp, Artificial Sequence
  ENSG00000099810_26 (sequence is synthesized)
aacacttctcacttgtgatgctgtactaattttttttttttaatttaagctagtatactaagtgaacaccatggtcagttgtgagcattttggtttccgcaaaggatggatggtgagcat

SEQ ID NO: 107813 - DNA, 120 bp, Artificial Sequence
  ENSG00000099810_27 (sequence is synthesized)
catgggaaagctgtagtttagtgacttagcccttagtgattaatagatttgcatgtacatagaagtctttgttggccttataatctgctgttatatttggcatggattttcatggttttg

SEQ ID NO: 107814 - DNA, 120 bp, Artificial Sequence
  ENSG00000099810_28 (sequence is synthesized)
agaatgacatcctggccctgtggtccccgagggtcatggtccttgtgacctggcccctgttcactgcccccttcgctagcacgagttgctgtgcagggctggaggtagctaccatggctt

SEQ ID NO: 107815 - DNA, 120 bp, Artificial Sequence
  ENSG00000099810_29 (sequence is synthesized)
gtttcaaggaaggaaactctggtacggtggcaccctcaggagtggaggacagtgaacttccttgaagagggagtgactaaggtgacctccaacctgccctgagccagctgccctgcaggt

SEQ ID NO: 107816 - DNA, 120 bp, Artificial Sequence
  ENSG00000099810_30 (sequence is synthesized)
gccacgtgagcctgctctggcatccacaggatgctcctggagcctcttctctggctgctacctcagggcatggttgtggccccaccaacacctattttccaaataattattcattcttgt

SEQ ID NO: 107817 - DNA, 120 bp, Artificial Sequence
  ENSG00000099810_31 (sequence is synthesized)
gacagtggcctgaacatgtttttaattttctcaacaagcatttagccagcacttatccagtgaaacaatttgataaggtttcaaggagtatctgatgggttaggaagtcacgaaatgagg

SEQ ID NO: 107818 - DNA, 88 bp, Artificial Sequence
  ENSG00000099810_32 (sequence is synthesized)
tcaaggagtatctgatgggttaggaagtcacgaaatgaggagttcttgccacatttgcagagtccctccttgataaggtttggcggtt

SEQ ID NO: 107819 - DNA, 90 bp, Artificial Sequence
  ENSG00000099810_33 (sequence is synthesized)
acccagtgggaggtaattaaatcatgggggtggttacccccacactgctgttctcatgatactgagttctcacaagtcctgtttcaacac

SEQ ID NO: 107820 - DNA, 120 bp, Artificial Sequence
  ENSG00000099810_34 (sequence is synthesized)
tttgctcaacacttcttcctgccatcatgtgaagaaggacgtgtttgtttccccttctgccacgattgtaagtttcctgaggccttcccagctatgtggaactgtgagttaattaaacct

SEQ ID NO: 107821 - DNA, 120 bp, Artificial Sequence
  ENSG00000099810_35 (sequence is synthesized)
atgggcagtcctttacagcagcatgagaatggactaatacactcctcaaatgttttgaagattgttgcaccttggaactaccagtgtgcacacaatctggctcaatgtatatattggccc

SEQ ID NO: 107822 - DNA, 120 bp, Artificial Sequence
  ENSG00000099810_36 (sequence is synthesized)
agcaaggcaaagaactgaagttccaggatggaagaacctgtgttctcctcataatagtatagaataattcaagataggcaagaaggacagcagtaaatgaagaccatggaagaaaagaag

SEQ ID NO: 107823 - DNA, 120 bp, Artificial Sequence
  ENSG00000099810_37 (sequence is synthesized)
gaatgccaaagatcgaggaaatctaccaagactagtagggtagtccagaagaagctgtttcagggcctgttgccagctatgcctttgagaacctcgggatcccaaagaatgaggggaatt

SEQ ID NO: 107824 - DNA, 120 bp, Artificial Sequence
  ENSG00000099810_38 (sequence is synthesized)
tcttcagaaagacaatctcggcatgcattatttctttgttttgaagattcactcatgttgcatgcatctgtagcttgtgccttttttattgcctagtagtattctgtcatatgcctatct

SEQ ID NO: 107825 - DNA, 120 bp, Artificial Sequence
  ENSG00000099810_39 (sequence is synthesized)
tacaatttgattatctattcacctgttgatgaatgtttgaattttttccatttgaggaattttatgaataaagctgctataagcatgaaattacaagtctttttgtgaacatattttcac

SEQ ID NO: 107826 - DNA, 120 bp, Artificial Sequence
  ENSG00000099810_40 (sequence is synthesized)
ttgtgcaaatgcctatactcccaccagtaatttgtaagaattcttgacaaagcttggtattgtcagcgtttttaattttagccattctattgggtatattttgatatctcgtggttttga

SEQ ID NO: 107827 - DNA, 120 bp, Artificial Sequence
  ENSG00000099810_41 (sequence is synthesized)
tttgcatttttctgattaaagatgttgaacttcttttcatgtgcttattggccattcacatatttcgtgaactatctgtacaaatatttttgtttattaaaaaattagattgttttgttt

SEQ ID NO: 107828 - DNA, 120 bp, Artificial Sequence
  ENSG00000099810_42 (sequence is synthesized)
tattattgaatagtaagaattgtttatatattctggatacactctttttcagatatgtgtgttgtgactattcttagtctttagcttgccttttcattttcttaattatgtctttcaaag

SEQ ID NO: 107829 - DNA, 120 bp, Artificial Sequence
  ENSG00000099810_43 (sequence is synthesized)
aacaagtttttcattttgacgaagcctagtttatcaattttttttatggttggtgctttttgtgtgttccaagaaatctttgcctactcatttaattacctgtgtgcccttgtcaaaatc

SEQ ID NO: 107830 - DNA, 120 bp, Artificial Sequence
  ENSG00000099810_44 (sequence is synthesized)
atttaattttgactactcacttaattaccttgcctactcatttaattacctgtgtgcccttgtcaaaatttactgtttatctgtgaatctggatgatctatttatgtcatttatctatgt

SEQ ID NO: 107831 - DNA, 120 bp, Artificial Sequence
  ENSG00000099810_45 (sequence is synthesized)
gtctcttcttatgccagtaccccactgtcttgattattgtggctttatggtgtcttgaaattaagtattgttaagctttgcaatcttttccaagattgttttggctataggtcctttctt

SEQ ID NO: 107832 - DNA, 120 bp, Artificial Sequence
  ENSG00000099810_46 (sequence is synthesized)
tataaagtttatattaagcttctccatttttctttaagaaaaaatctgctggaatggcactgaatttttaggtcgatttgggaagaattgacaatattgaacctttcaatcgatggacat

SEQ ID NO: 107833 - DNA, 120 bp, Artificial Sequence
  ENSG00000099810_47 (sequence is synthesized)
ggtatgtttctgcatttatttgggccttttaaaatttatctcagcaatattttgtagttttagtgaagaagtcttgtatatatcttttgttaaatgtattcctaaatattttgtggaaat

SEQ ID NO: 107834 - DNA, 120 bp, Artificial Sequence
  ENSG00000099810_48 (sequence is synthesized)
ggactcctagacttcccatcagtgggacatggcagaggtgaaatcctgcccctgtctcccttagacctggctggatactgcttccaacaacccatgcagccaccctgccctgacagctag

SEQ ID NO: 107835 - DNA, 120 bp, Artificial Sequence
  ENSG00000099810_49 (sequence is synthesized)
gggtcatggatttttgcgggggaaaatgttagagtaggtaattaggcagacatgagtaagggaggagagaccccctccaactaggaatgtcaggtgagcatcagatgatcatcaggtggt

SEQ ID NO: 107836 - DNA, 120 bp, Artificial Sequence
  ENSG00000099810_50 (sequence is synthesized)
tgttaaactctctctctaaaataataataggttgcaactggcagcagggaaagacaatctcccaatagatagaaaagtcctgaagctggtgatcagcagcttcctagtaagatctcagga

SEQ ID NO: 107837 - DNA, 120 bp, Artificial Sequence
  ENSG00000099810_51 (sequence is synthesized)
tttgggcaagcaggctcaaacatgggcactaagaggcaaaatcgtggagtttaactggtatacagacttcctctaaaaacacatgactcatgcacatgtggacagcctgccccaaggaaa

SEQ ID NO: 107838 - DNA, 120 bp, Artificial Sequence
  ENSG00000099810_52 (sequence is synthesized)
aatcaaaagaggagagatgcaaaaccccagaagcatgccaatatataaaaccccaagtctaaggtcaaacagggcacttggatttctcaagttgcccacttggccctcttctaagtgtac

SEQ ID NO: 107839 - DNA, 120 bp, Artificial Sequence
  ENSG00000099810_53 (sequence is synthesized)
tttatttcctttcattcctgctctaaaactttttaaatttcactcctgctcaaaaacttgcctcagtctttcactctgccttatgccccttggaagaattatttccttcaagatggcaaa

SEQ ID NO: 107840 - DNA, 120 bp, Artificial Sequence
  ENSG00000099810_54 (sequence is synthesized)
aagcaagctgctgcagacccatacagatttgctgctgctaacaggaggataacttgagcccagaaggttaaggctgcggtgagccttgattatgccactgctctccagcctggcaacaga

SEQ ID NO: 107841 - DNA, 120 bp, Artificial Sequence
  ENSG00000099810_55 (sequence is synthesized)
atgagactctatttttttttcttttaaaaagactttttacaaaaggcaaaatgataatggaactaaaaatgtacgttgactgacttaactccaactgcttcttccctcaattgaaaccac

SEQ ID NO: 107842 - DNA, 120 bp, Artificial Sequence
  ENSG00000099810_56 (sequence is synthesized)
gcaaaaattataacagtgagaaaattatggcagtaggggtgatctgatcaagccaaaccccatcttgcctttagccttcaagctgcccataattattcctgggcttaggccaagctaact

SEQ ID NO: 107843 - DNA, 120 bp, Artificial Sequence
  ENSG00000099810_57 (sequence is synthesized)
aactttgggagacacttggtctatagtttaaatgataatagtccttccttaaaattcaaccacctcagcaaagctgatgagaggccaccaggcaaggaggatagaggagtctaaattctg

SEQ ID NO: 107844 - DNA, 120 bp, Artificial Sequence
  ENSG00000099810_58 (sequence is synthesized)
ctaaggtgtagatataaacagtttccagccattattctggaggtcacaaaatgtgcaacttcttcaattactcctgcagataacatcagtattttagaacctaagattggccttttgaga

SEQ ID NO: 107845 - DNA, 120 bp, Artificial Sequence
  ENSG00000099810_59 (sequence is synthesized)
tgtcttttcaggtttttttgtgtgtctgactaccgatggctccacctggacccaccaaccactcctgtggccccatccagaagcaactcagcatgcataaggactatttcccacacccct

SEQ ID NO: 107846 - DNA, 120 bp, Artificial Sequence
  ENSG00000099810_60 (sequence is synthesized)
atgattgcacccccaaccaattagcagcaaggacttattgcctaaaacagccccattcatcccccaaaccatccatgaaaaaccctagctttcaaatttccggggaagctgatttgagca

SEQ ID NO: 107847 - DNA, 120 bp, Artificial Sequence
  ENSG00000099810_61 (sequence is synthesized)
ataataaaatacgtctcccatttagccaactctacatgtataaaactctttctctattgcaattcccctgccttgataaatgataaatcagctctatctgggcagcaggcaagaagaacc

SEQ ID NO: 107848 - DNA, 120 bp, Artificial Sequence
  ENSG00000099810_62 (sequence is synthesized)
cgttgagtccttacaatatccttctttctaccctcctctgcctaattactctgaatctactaactttttcactcagttatttttccactttgaagacaaaaagttagaaaaaaaaatgcc

SEQ ID NO: 107849 - DNA, 120 bp, Artificial Sequence
  ENSG00000099810_63 (sequence is synthesized)
ttatgaaattagtccctcagaataaaccagctgggctttctttagccacctgtatgctttagtcaaaatctaagctcagaggcaatagtgaaaggctttcttatcccaaaggaaaactct

SEQ ID NO: 107850 - DNA, 120 bp, Artificial Sequence
  ENSG00000099810_64 (sequence is synthesized)
cagaaatttgctgaagctatccacactgagtgtaggtatagaacatgctttgccctatttattcatgggcaccatcctgaactcagtaatctagcttttttcttttgaagctggatgggg

SEQ ID NO: 107851 - DNA, 120 bp, Artificial Sequence
  ENSG00000099810_65 (sequence is synthesized)
aagacacagatctagctgaattagttgccaaaatatgctatctggcataaagattattttgagagagttattttgagactctttgtaagagaaatttatatctacaaaggaagtctccat

SEQ ID NO: 107852 - DNA, 120 bp, Artificial Sequence
  ENSG00000099810_66 (sequence is synthesized)
ttataagcttgtctctctgcatcaggaagaaaagaaggactaaatcaccagacactcttaaccaatggagaaggagtttaagtaacaaaccttacctttgtttaaggtgctttttctggc

SEQ ID NO: 107853 - DNA, 120 bp, Artificial Sequence
  ENSG00000099810_67 (sequence is synthesized)
tctctgccattaagatctacattttccaccctgtctcctctaggacctgagggttatctctttgatatgcaaatgccagggagattactcaccagaagaagaagaagaaatagagctaat

SEQ ID NO: 107854 - DNA, 120 bp, Artificial Sequence
  ENSG00000099810_68 (sequence is synthesized)
tggaaattgagcaaataaaaaaatcttgttttttctcccagaaacagtgaaaagctttagccatcctttagataatcttaacttgttccatctgccagaaacacaatttggattcagaaa

SEQ ID NO: 107855 - DNA, 120 bp, Artificial Sequence
  ENSG00000099810_69 (sequence is synthesized)
ttctttatgaactgtttttgtattattgtacctggcacatggctacagttttcaaatgaaaactgtgaaatctgcttctgtctgtattttatgtatgtctgtgtatgcatgtatgtgtaa

SEQ ID NO: 107856 - DNA, 120 bp, Artificial Sequence
  ENSG00000099810_70 (sequence is synthesized)
acctagcgcaaatgttcttcaagttgatattgttaaaagaagaaacttcagccaaattaaacttaaagaagtttaattgagcaatgaatgattcacaaatcaggcagcctccagagttac

SEQ ID NO: 107857 - DNA, 77 bp, Artificial Sequence
  ENSG00000099810_71 (sequence is synthesized)
tggtcagaacaaatttatagacaaaaaaagggaagtgacatacagaaattagaagtgaagtacagaaagagctggac

SEQ ID NO: 107858 - DNA, 120 bp, Artificial Sequence
  ENSG00000099810_72 (sequence is synthesized)
tgaacacagtttgaacactcagcagtgtctaagtggttgaagtatggctactagaattggccaagactcggctattgttacaggaacgtactcctaaattaggttttcaatcttgtctac

SEQ ID NO: 107859 - DNA, 78 bp, Artificial Sequence
  ENSG00000099810_73 (sequence is synthesized)
tatcttcagttctctttaacagtatgatacgggataatcttcagtaaataaaaatttctttaagtttgttggattaac

SEQ ID NO: 107860 - DNA, 120 bp, Artificial Sequence
  ENSG00000099810_74 (sequence is synthesized)
cttcagtaaataaaaatttctttaagtttgttggattaactaaagcaggcatgtcttcagagttgtcaacattaaatataatacatacatacagtttttttctaccaggggttactaggc

SEQ ID NO: 107861 - DNA, 120 bp, Artificial Sequence
  ENSG00000099810_75 (sequence is synthesized)
aaataagtttgttattgtaactagatgtttaagattataaaactgtcagtttaatctaagagcaaaagtgaaaatgtggtagctattttattaagtacagcggtaaagcaagtatatatt

SEQ ID NO: 107862 - DNA, 120 bp, Artificial Sequence
  ENSG00000099810_76 (sequence is synthesized)
attttattaagtacagcggtaaagcaagtatatattaagtatagcagtaaagcaaaaaaacaaaaaaaaacaagtatttaacttttttttggtttttttttttgagacggagtctctctc

SEQ ID NO: 107863 - DNA, 120 bp, Artificial Sequence
  ENSG00000099810_77 (sequence is synthesized)
aggttcttgcttttgtgatatttggctaacatacatatgctgtaaaaattgttaataggaaaatattaataatgagatgttgactagctttgtctgtctaatgaaatttcataagtcaat

SEQ ID NO: 107864 - DNA, 120 bp, Artificial Sequence
  ENSG00000099810_78 (sequence is synthesized)
agaatagaattcaattgaattctattgaatacacttgctgaatacaacaattgaattgtaaatagaatagaaattataaatgaacttttcaatagtaattattttttaatacgggtactt

SEQ ID NO: 107865 - DNA, 120 bp, Artificial Sequence
  ENSG00000099810_79 (sequence is synthesized)
aattattttttaatacgggtacttaaaattgtgtcaacttcttaacaaaagaaatggaggcaaaattagtataaacagtttatttgggccaaatttgagaactgcaatgtgggagacacg

SEQ ID NO: 107866 - DNA, 120 bp, Artificial Sequence
  ENSG00000099810_80 (sequence is synthesized)
tcttcaagttgctatgaatataaactccaattagcagcagttacaagcggttttttttttttaaagaaggggcagttctttagttgcatataaactattgattggctatacatttttttt

SEQ ID NO: 107867 - DNA, 120 bp, Artificial Sequence
  ENSG00000099810_81 (sequence is synthesized)
taaccataaattccaggagcatgaacataatgggtgagggtcacatcccctgggcatggatttggggcaggatgtgacaaaaatctcatactcatgtctctctgggcctgataaattttg

SEQ ID NO: 107868 - DNA, 120 bp, Artificial Sequence
  ENSG00000099810_82 (sequence is synthesized)
catactttatatagttcagactcttctgagctacgtttctttctcttccttttggttgagtttttttttcttctgaaagtattgatgatcaacattttagatgtaagtttgtcccatgtc

SEQ ID NO: 107869 - DNA, 120 bp, Artificial Sequence
  ENSG00000099810_83 (sequence is synthesized)
actggaagacttagttttagttagtctcatcccacattggaggaagagaggagagataaaatggcttaagaatgcagtgaagtctcaaggccaagttgattggcaacacaaagggacagg

SEQ ID NO: 107870 - DNA, 120 bp, Artificial Sequence
  ENSG00000099810_84 (sequence is synthesized)
gcaatggtatttcaggtcatctgcttacaaaggagctatggcatgttggatcatttctaagcatctagctatcattattttagtgtttttgttgattttggacatctagaagtgcaaagt

SEQ ID NO: 107871 - DNA, 120 bp, Artificial Sequence
  ENSG00000099810_85 (sequence is synthesized)
ataatcaatttgagaataaaagacatgatgcaaataaagacaattactaacaaaagccagatctgaaaaatgtttttatttccgaaggcgaccaaataaatatgttttctacttcttgtg

SEQ ID NO: 107872 - DNA, 120 bp, Artificial Sequence
  ENSG00000099810_86 (sequence is synthesized)
ctgatctaaagatcaatgtataggagatctccagtgatgagtttgtccactcaggcagagctgcctttttaaaataaaaattatgaatgcataagtcaatgtatttgaatttaactccac

SEQ ID NO: 107873 - DNA, 120 bp, Artificial Sequence
  ENSG00000099810_87 (sequence is synthesized)
aagtattggttaacaatacagatatggtcgcttccaaggtgtttggagggagttttgtatttgatggcattccacattggaggccatgctatttgatgtcttcatctcctggaaccacac

SEQ ID NO: 107874 - DNA, 120 bp, Artificial Sequence
  ENSG00000099810_88 (sequence is synthesized)
tgtattgtttggacatatctatccagacagatgatgataaattttgcatatctcacatagttcagactgctctgggctacttttctttctcaatagcttctcattgttaacttatgcctg

SEQ ID NO: 107875 - DNA, 120 bp, Artificial Sequence
  ENSG00000099810_89 (sequence is synthesized)
tagagttttgctaaactaaattagataatggacatttattaaatatttagatcatttccaaataacataaaatgctgaaacattaattgcttaacataagttaatctacttttggttttt

SEQ ID NO: 107876 - DNA, 120 bp, Artificial Sequence
  ENSG00000099810_90 (sequence is synthesized)
atatatttacatctgttaaaaaacactttaaactgtactatgagaaagaatatacttctatagaaattataaaatggtatatttatagatttaccattttatggaataccccataaccgt

SEQ ID NO: 107877 - DNA, 120 bp, Artificial Sequence
  ENSG00000099810_91 (sequence is synthesized)
aataccccataaccgttcacaatttcttatttcctagttttcactagaaattgaagttactaagagttaacaattttaactaatatagagtagttaaaaagactaaaaataataagggag

SEQ ID NO: 107878 - DNA, 120 bp, Artificial Sequence
  ENSG00000099810_92 (sequence is synthesized)
ataactatatgcaaagaaagtaagacatgtttttggtaaggaaagccataaggtataaggatgtgcttttttttaaggaaaaggaagaataatttggtctagtttggaggttatttaaag

SEQ ID NO: 107879 - DNA, 120 bp, Artificial Sequence
  ENSG00000099810_93 (sequence is synthesized)
gttgtttcagaatgaatgaaagataaaatctaaatggatacaaaaaggaagagagatgacacacacacaaaatgaatgactcttgtatggacaagttggctagaactgaatgtattataa

SEQ ID NO: 107880 - DNA, 64 bp, Artificial Sequence
  ENSG00000099810_94 (sequence is synthesized)
tcttgtatggacaagttggctagaactgaatgtattataaggttttaaaaatgagtcttgacca

SEQ ID NO: 107881 - DNA, 120 bp, Artificial Sequence
  ENSG00000099810_95 (sequence is synthesized)
acagtgagactccatctcaaaaaaaaaaagagtcttaatatcaaaagtaaactgatgcaaaactagaatttggtcttctctgtgaaaatgacagttttctttttaaagagtattgctcca

SEQ ID NO: 107882 - DNA, 120 bp, Artificial Sequence
  ENSG00000099810_96 (sequence is synthesized)
agttttctttttaaagagtattgctccagtttttaaaagtgattgtgaaaaattttcctttcccttgtaactaatcggcctacaaaatgaagattttgtgttttctcaaaataattcttt

SEQ ID NO: 107883 - DNA, 120 bp, Artificial Sequence
  ENSG00000099810_97 (sequence is synthesized)
gtgcttcgtgttgcctttttttggtctttaattacttaagaaaattgaatcttcccaacaaaagagctagttttgtttgttttgtttttacagttattaaactttctctatttgcctttg

SEQ ID NO: 107884 - DNA, 120 bp, Artificial Sequence
  ENSG00000099810_98 (sequence is synthesized)
caaggctggagctcagaaaaatgttttatgacaagcagtggaattttaagttctagtaacctccagtgctattgtttctctaggtttcggtggaccgggtcttaaagaccctgaaagaaa

SEQ ID NO: 107885 - DNA, 120 bp, Artificial Sequence
  ENSG00000099810_99 (sequence is synthesized)
ctctggcaccaccaccaccgccgtgaaggtgagatgagccctcccagccgcagcggttcgccctgccggatgccttctcgcccccgcgccgggggaccgcgcctccgggggccatgcgcc

SEQ ID NO: 107886 - DNA, 120 bp, Artificial Sequence
  ENSG00000099810_100 (sequence is synthesized)
aaagaccctgaaagaaaacgctaataaagccaaaagcttactgctcactaccatacctcagatagggtccacagaatggtcagaaaccctccataacctgaaggaaagggaggtgaggaa

SEQ ID NO: 107887 - DNA, 78 bp, Artificial Sequence
  ENSG00000099810_101 (sequence is synthesized)
tttggcttatctgcacccgcaccctgtagggcgtaggcacccctttagagagagaggtcgtggatgggagaggctgca

SEQ ID NO: 107888 - DNA, 120 bp, Artificial Sequence
  ENSG00000099810_102 (sequence is synthesized)
acccctttagagagagaggtcgtggatgggagaggctgcacccatgccaccaccattcctgagaaccactcttcttccaagaaagacacccggctggagtcaggaggtgtccgggcgcct

SEQ ID NO: 107889 - DNA, 120 bp, Artificial Sequence
  ENSG00000099810_103 (sequence is synthesized)
aatggactggaacttgtaccatagattatgtacccctggacatctttatactccctggcaatctctctcttccagcaccaatccatgggaattctatcttgcccagggtgaaaagggcta

SEQ ID NO: 107890 - DNA, 120 bp, Artificial Sequence
  ENSG00000099810_104 (sequence is synthesized)
tccaattaattccccttcttatgggcctcagcattatagctggtatgggaacctaaactgccggaatctcaaaagcctccttgacctatagccaactctgaaaggaaatagccagcaagt

SEQ ID NO: 107891 - DNA, 120 bp, Artificial Sequence
  ENSG00000099810_105 (sequence is synthesized)
ttaatatcatggctaaaacctcaaccatggccagagcaaattaacactttagcagttgtagtcctccaaaactgtcaaggactagatatgttaatggcagcacagggaggaatttgttta

SEQ ID NO: 107892 - DNA, 120 bp, Artificial Sequence
  ENSG00000099810_106 (sequence is synthesized)
gctttagatgaaaaatgttgcttttgggtaaatcaatcagtaaaagtacaaaacaacatcagacaactcctaaatcgagcctccagcttacaagaacaagcctctcgtggttagttagat

SEQ ID NO: 107893 - DNA, 120 bp, Artificial Sequence
  ENSG00000099810_107 (sequence is synthesized)
tggtaaggaacctggaaatgggatcttccctgggttcttccctttttaggcccacatgttagcctctacttttgctcctttcagtccatgtcttcaaaaatctaataacccaatttgtct

SEQ ID NO: 107894 - DNA, 120 bp, Artificial Sequence
  ENSG00000099810_108 (sequence is synthesized)
cgttcgtcctgtcatttatctcattttaagataaagggacgacaaaactgcagtcacttttgaagtaaggaaaacatttaggggtgactttctgagcacatttagggtttcggtggaccg

SEQ ID NO: 107895 - DNA, 120 bp, Artificial Sequence
  ENSG00000099810_109 (sequence is synthesized)
cacgtgggagaactgcttacttgctcttttgtatgcttccggcttctttttcctccaaacgtaggccttctccgcgctgaagttttccccagcagcgtaatactgtattctgttatagca

SEQ ID NO: 107896 - DNA, 120 bp, Artificial Sequence
  ENSG00000099810_110 (sequence is synthesized)
gcagaaaacagactaagaaaaatgttgtgcttgtaagagattgggacacggacacatacagagggaagaccatgtgaagacacatggagaacgctgccatctacaagccaaggagactga

SEQ ID NO: 107897 - DNA, 120 bp, Artificial Sequence
  ENSG00000099810_111 (sequence is synthesized)
ccttagaagaaatcaatcccaatctcaccttaatgttggacttctagcctccagaactgtgaggatatgggctggatggtttcttagcctcctcatgacctgtggtgcttcagaggtcca

SEQ ID NO: 107898 - DNA, 120 bp, Artificial Sequence
  ENSG00000099812_0 (sequence is synthesized)
ctctgtgcccatcgaggagtcagagtggaggctgcagactgtggagccgggagccggcagtaagcccagaggtctccaccccacgggaggaaggctgaggccaagaccccggaagagatg

SEQ ID NO: 107899 - DNA, 120 bp, Artificial Sequence
  ENSG00000099812_1 (sequence is synthesized)
gaccgcgtgaccagataccccatcctgggcatccctcaggcacaccgtggcaccggcctggtgctggatggagacaccagctacacataccatctggtgtgcatgggccccgaggccagc

SEQ ID NO: 107900 - DNA, 120 bp, Artificial Sequence
  ENSG00000099812_2 (sequence is synthesized)
ggctggggccaggatgagccgcagacatggcccactgaccacagggcccagcagggcgtgcagaggcagggggtgtcctacagcgtgcatgcctacactggccagccgtccccacggggg

SEQ ID NO: 107901 - DNA, 120 bp, Artificial Sequence
  ENSG00000099812_3 (sequence is synthesized)
ctccactcggagaacagggaggatgagggttggcaggtttaccgcctgggcgccagggatgcccaccagggacgtccaacatgggcactccgcccagaggacggggaggacaaggagatg

SEQ ID NO: 107902 - DNA, 120 bp, Artificial Sequence
  ENSG00000099812_4 (sequence is synthesized)
aagacctaccgcctggatgctggggacgctgaccccaggaggctgtgtgacctggagcgggagcgctgggccgtcatccagggccaggcagtcaggaagagcagcaccgtggccacgctc

SEQ ID NO: 107903 - DNA, 120 bp, Artificial Sequence
  ENSG00000099812_5 (sequence is synthesized)
cagggcactcctgaccacggagaccccaggacccccggcccacctcggtccacgcccctggaggagaacgtggttgacagggagcagattgacttcctggcagcgagacagcagttcctg

SEQ ID NO: 107904 - DNA, 120 bp, Artificial Sequence
  ENSG00000099812_6 (sequence is synthesized)
agtctggagcaggcgaacaagggggcccctcatagctccccggccagggggacccctgcaggcacaaccccaggggccagccaggcccccaaggccttcaacaagccccacctggccaac

SEQ ID NO: 107905 - DNA, 120 bp, Artificial Sequence
  ENSG00000099812_7 (sequence is synthesized)
gggcacgtggttcccatcaagccccaggtgaagggggtggtcagggaagagaacaaggtgcgtgctgtgcccacctgggccagtgtccaagttgtggatgaccctggctccttggcctca

SEQ ID NO: 107906 - DNA, 120 bp, Artificial Sequence
  ENSG00000099812_8 (sequence is synthesized)
gtggagtccccggggacccccaaggagacgcccatcgagcgggagatccgtctggctcaggagcgtgaggcagacctgcgagagcagagggggcttcggcaggcaaccgaccaccaggag

SEQ ID NO: 107907 - DNA, 120 bp, Artificial Sequence
  ENSG00000099812_9 (sequence is synthesized)
ctggtggaaatccccaccaggccgctgctgaccaagctgagcctgatcacagccccacggcgggagagagggcgcccgtccctctacgtgcagcgggacatagtacaggagacacagcgt

SEQ ID NO: 107908 - DNA, 120 bp, Artificial Sequence
  ENSG00000099812_10 (sequence is synthesized)
gaggaagaccaccggcgggagggcctgcacgtgggccgggcgtccacacccgactgggtctcggagggtccccagcccggactccggagagccctcagctcagattccatcctcagcccg

SEQ ID NO: 107909 - DNA, 120 bp, Artificial Sequence
  ENSG00000099812_11 (sequence is synthesized)
gccccagatgcccgtgcggccgacccagctccagaagtgaggaaggtgaaccgcatcccacctgatgcctaccagccgtacctgagccccgggaccccccagctagaattctcagccttc

SEQ ID NO: 107910 - DNA, 120 bp, Artificial Sequence
  ENSG00000099812_12 (sequence is synthesized)
attcggcaagcccagcagtctctccacagcggaggccaaggctgcgacttcaccaaaggccacgatgtccccgaggcatctctcagaatcctctggaaaacccctgagcacaaagcaaga

SEQ ID NO: 107911 - DNA, 120 bp, Artificial Sequence
  ENSG00000099812_13 (sequence is synthesized)
ggcatcgaagccccctcggggatgcccgcaagccaacaggggtgtcgtgcggtgggagtacttccgcctgcgtcctctgcggttcagggccccagacgagccccagcaggcccaagtccc

SEQ ID NO: 107912 - DNA, 120 bp, Artificial Sequence
  ENSG00000099812_14 (sequence is synthesized)
ccatgtctggggctgggaggtggctggggcccctgcactgaggctgcagaagtcccagtcatctgatctgctggaaagggagagggagagtgtcctgcgccgggagcaagaggtggcaga

SEQ ID NO: 107913 - DNA, 120 bp, Artificial Sequence
  ENSG00000099812_15 (sequence is synthesized)
ggagcggagaaatgctctcttcccagaggtcttctccccaacgccagatgagaactctgaccagaactccaggagctcctcccaggcatccggcatcacgggcagttactcggtgtctga

SEQ ID NO: 107914 - DNA, 120 bp, Artificial Sequence
  ENSG00000099812_16 (sequence is synthesized)
gtctcccttcttcagccccatccacctacactcaaacgtggcgtggacagtggaagatccagtggacagtgctcctcccgggcagagaaagaaggagcaatggtacgctggcatcaaccc

SEQ ID NO: 107915 - DNA, 120 bp, Artificial Sequence
  ENSG00000099812_17 (sequence is synthesized)
ctcggacggtatcaactcagaggtcctggaagccatacgggtgacccgtcacaagaacgccatggcagagcgctgggaatcccgcatctacgccagtgaggaggatgactgagcctcggg

SEQ ID NO: 107916 - DNA, 120 bp, Artificial Sequence
  ENSG00000099812_18 (sequence is synthesized)
atggggcgcccaccccctgccctgccctgaccctcgtgggaactgccaagaccatcgccaagcccccaccctaggaaatgggtcctaggtccaggatccaagaaccacagctcatctgcc

SEQ ID NO: 107917 - DNA, 120 bp, Artificial Sequence
  ENSG00000099812_19 (sequence is synthesized)
aacaatcccaccatgggcacatttgggactgttgggtttttcgtttccgtttctatcttcctttagaaatgtttctgcctttggggtctaaagcttttggggatgaaatgggacccctgc

SEQ ID NO: 107918 - DNA, 120 bp, Artificial Sequence
  ENSG00000099812_20 (sequence is synthesized)
tgattctttctgcttctaagactttgccaaatgccctgggtctaagaaagaaagagacccgctcctccactttcaggtgtaatttgcttccgctagtctgagggcagagggaccggtcaa

SEQ ID NO: 107919 - DNA, 120 bp, Artificial Sequence
  ENSG00000099812_21 (sequence is synthesized)
agagggtggcacagatcgcagcaccttgaggggctgcgggtctgagggaggagacactcagctcctccctctgagaagtcccaagctgagaggggagacctgcccctttccaaccctggg

SEQ ID NO: 107920 - DNA, 120 bp, Artificial Sequence
  ENSG00000099812_22 (sequence is synthesized)
aaaccatccagtctgagggaggaggccaaactcccagtgctgggggtccctgtgcagccctcaaacccttcaccttggtgcacccagccacacctggtggacacaaagctctcacatcga

SEQ ID NO: 107921 - DNA, 120 bp, Artificial Sequence
  ENSG00000099812_23 (sequence is synthesized)
taggatcccatgaggatggtccccttcacctgggagaaaagtgacccagtttaggagctggaggggggtctttgtcccccacccccaaactgccctgaaataaacctggagtgagctgcc

SEQ ID NO: 107922 - DNA, 80 bp, Artificial Sequence
  ENSG00000099814_0 (sequence is synthesized)
cagcgctcggccgggcgggcgggcgggcgcgagggcagggaccgagccgggccgagctggggaacaagccggggaccaag

SEQ ID NO: 107923 - DNA, 120 bp, Artificial Sequence
  ENSG00000099814_1 (sequence is synthesized)
cgagctggggaacaagccggggaccaagccggggaccaagccggggactaaggcgagccggagaccgagcccgaacagcagggccagacgggcccagccagcaccaagatgagtgccacg

SEQ ID NO: 107924 - DNA, 120 bp, Artificial Sequence
  ENSG00000099814_2 (sequence is synthesized)
tcctggttcctggtgagcagcagcggcgcccgccaccggctccctcgggagctcatcttcgtggggcgtgaggagtgtgagctcatgctacagtcccgcagcgtggacaagcagcatgcc

SEQ ID NO: 107925 - DNA, 120 bp, Artificial Sequence
  ENSG00000099814_3 (sequence is synthesized)
gtcatcaactacgaccaggacagggacgagcactgggtgaaggacctgggcagcctcaatgggacgtttgtgaatgacatgcgcatcccggaccagaagtacgtcacgctgaagctcaac

SEQ ID NO: 107926 - DNA, 120 bp, Artificial Sequence
  ENSG00000099814_4 (sequence is synthesized)
gatgtcatccgcttcggctacgattccaacatgtatgtgctggagcgtgtgcagcaccgagtcccggaggaggcactcaagcatgaaaagtacaccagccagctgcaggtgagcgtgaag

SEQ ID NO: 107927 - DNA, 120 bp, Artificial Sequence
  ENSG00000099814_5 (sequence is synthesized)
ggtttggcgcccaagaggagcgaggcactgccggaacacacaccatactgcgaggcctcgaaccccaggccggagaagggggaccggagaccaggaacagaggcagcctcttaccgcaca

SEQ ID NO: 107928 - DNA, 120 bp, Artificial Sequence
  ENSG00000099814_6 (sequence is synthesized)
cccctgtatgggcagccctcctggtggggtgaggacgatggtagcacgctgcctgacgcccagcgccagggagagccctacccagcagagcgccccaagggaccagtgcagcaggacggg

SEQ ID NO: 107929 - DNA, 120 bp, Artificial Sequence
  ENSG00000099814_7 (sequence is synthesized)
gagctccacggcttccgcgcccctgctgagcctcagggctgctcgttccggcgggagcccagctacttcgagatccccacgaaggagaccccgcagccgtcgcagccccccgaggtgccg

SEQ ID NO: 107930 - DNA, 120 bp, Artificial Sequence
  ENSG00000099814_8 (sequence is synthesized)
gcacacgagatgcccacgaaggatgcagaggcaggtgggggcggagcggcccctgtggtgcagagccacgcctccttcaccatcgagtttgatgactgcagccctggcaagatgaagatc

SEQ ID NO: 107931 - DNA, 120 bp, Artificial Sequence
  ENSG00000099814_9 (sequence is synthesized)
aaggaccatatcaccaagttttccctgcgccagcggcggcccccgggcaaggaggccacacctggcgagatggtgtcggctgagaccaaggtggccgactggctggtgcagaatgacccg

SEQ ID NO: 107932 - DNA, 120 bp, Artificial Sequence
  ENSG00000099814_10 (sequence is synthesized)
agcctgctgcaccgggttggccctggggatgaccgccacagcaccaagagcgacctgcctgtccacacccgcaccctgaagggccacaagcacgaggacggcacgcagagtgactcagag

SEQ ID NO: 107933 - DNA, 120 bp, Artificial Sequence
  ENSG00000099814_11 (sequence is synthesized)
gaccccctggccaaggcggcctcggccgctggggtgcccttggaggccagcggggagcaggtgcggctgcagaggcagatcaagcgggacccccaggagctactacataaccagcaggcc

SEQ ID NO: 107934 - DNA, 120 bp, Artificial Sequence
  ENSG00000099814_12 (sequence is synthesized)
tttgtcatcgagttcttcgacgaggacacaccccgaaagaagcgctcccagtccttcacgcacagcccgtccggggaccccaaggccgacaagcgccgtggcccaacgccggccgatagg

SEQ ID NO: 107935 - DNA, 120 bp, Artificial Sequence
  ENSG00000099814_13 (sequence is synthesized)
gaccgccccagtgtcccagccccagtccaggcagggggccgcagctcggggccacagagggccggctcgctcaagcgggagaagacagaggaacggctgggcagcccctcgcccgcctcc

SEQ ID NO: 107936 - DNA, 120 bp, Artificial Sequence
  ENSG00000099814_14 (sequence is synthesized)
cgaacccctgcccgccccttcggaagcgtggggcgccgctcccgcctggcccaggacttcatggcccagtgtctgcgggagagctccccggccgcccggcccagccccgagaaggttcct

SEQ ID NO: 107937 - DNA, 120 bp, Artificial Sequence
  ENSG00000099814_15 (sequence is synthesized)
ccggtgctgcccgctcccctgacaccccatgggaccagccccgtgggccccccgaccccaccgcccgcccccacggacccccagctgaccaaggcacggaaacaggaggaggacgacagc

SEQ ID NO: 107938 - DNA, 120 bp, Artificial Sequence
  ENSG00000099814_16 (sequence is synthesized)
ctcagtgacgcagggacatacaccatcgagaccgaggcgcaggacacggaggtggaggaggcccggaagatgatcgaccaggtctttggggtgttggagtcccctgaactctccagggca

SEQ ID NO: 107939 - DNA, 120 bp, Artificial Sequence
  ENSG00000099814_17 (sequence is synthesized)
tcttcggccacctttcgcccagtcatcagaggggacagagatgagtctgatgacgggggcgtggcccagcggatggcgctactgcaggagtttgcctcccggccactgggtgcggccccc

SEQ ID NO: 107940 - DNA, 120 bp, Artificial Sequence
  ENSG00000099814_18 (sequence is synthesized)
caggcggagcaccagggcctcccggtgccgggctcccctgggggtcagaagtgggtgtcccgctgggccagcctggctgacagctactcagacccgggcctcacagaggatggcctggga

SEQ ID NO: 107941 - DNA, 120 bp, Artificial Sequence
  ENSG00000099814_19 (sequence is synthesized)
cgtagaggcggggagccggaggggtccctgcctgtgcgcatgcggcgacggctccctcagctgcccagtgagagggctgacagccctgcgggcccagagagcagcaggaggagtgggcct

SEQ ID NO: 107942 - DNA, 120 bp, Artificial Sequence
  ENSG00000099814_20 (sequence is synthesized)
gggccaccggagctggacagtgagcagcccagccgcctcttcggccaggaggagttggatcctgacagcctcagcgatgccagtgggtcggacgggggccgaggccccgagccaggggtg

SEQ ID NO: 107943 - DNA, 120 bp, Artificial Sequence
  ENSG00000099814_21 (sequence is synthesized)
gagccacaggacagcagacgcaggagcccccaggaggggcccacgtggagcaggggtcggcgctcaccaagggcccccggggagccaactcccgcctctttcttcattggggaccagaat

SEQ ID NO: 107944 - DNA, 120 bp, Artificial Sequence
  ENSG00000099814_22 (sequence is synthesized)
ggggacgctgtgttatctaggaaaccgcttgcggctccaggggatggggagggcctagggcagacagcccagcccagccccccagcacgggatggcgtctatgtcagtgccaatgggaga

SEQ ID NO: 107945 - DNA, 120 bp, Artificial Sequence
  ENSG00000099814_23 (sequence is synthesized)
atggtcatccagctacggcctggacggtccccagaacccgacggccctgccccagcctttctccggcaagagagcttcactaaggagccagccagtggtcccccagcgcccggcaagccc

SEQ ID NO: 107946 - DNA, 120 bp, Artificial Sequence
  ENSG00000099814_24 (sequence is synthesized)
ccccacatctccagccacccgcttctacaggacctggccgctacccgggccgcacgcatggacttccactcccaggacacccacctgatcttgaaggagacggagacggccctggcggcc

SEQ ID NO: 107947 - DNA, 120 bp, Artificial Sequence
  ENSG00000099814_25 (sequence is synthesized)
ctggaggcccgactcctctctaattctgtggatgccgagtgtgaggggggcagcaccccgaggccgccggaggacgccctgtctggggactcggacgtggacacagccagcaccgtcagc

SEQ ID NO: 107948 - DNA, 120 bp, Artificial Sequence
  ENSG00000099814_26 (sequence is synthesized)
ctgcgtagtggcaagagcgggcccagccccacaaccccccagcctctgcgggcacagaaggagatgtcgccatccccgccagctgcacaggacccgggaggcaccgccctggtcagtgcc

SEQ ID NO: 107949 - DNA, 120 bp, Artificial Sequence
  ENSG00000099814_27 (sequence is synthesized)
cgtgagcagtcctcagagaggcagcatcacccacttggcccgacggacatgggccgtggagagccggtacggcgctcagccataaggcgtggccacaggccccgagggtccctggattgg

SEQ ID NO: 107950 - DNA, 120 bp, Artificial Sequence
  ENSG00000099814_28 (sequence is synthesized)
cggctaggttctcgccggaaaccagcggccccaccgccatccccagctgcccgggaggagcagagccgtagctcagccagctcccagaaggggccgcaggccttgacccgctccaacagc

SEQ ID NO: 107951 - DNA, 120 bp, Artificial Sequence
  ENSG00000099814_29 (sequence is synthesized)
ctgtccacccctcgccccacacgggcctcccggctgaggcgggcccggctgggggacgcttcagacactgaggctgcggatggtgagcgggggtccctgggcaaccctgagcccgtgggc

SEQ ID NO: 107952 - DNA, 120 bp, Artificial Sequence
  ENSG00000099814_30 (sequence is synthesized)
cggccagctgctgagcaggccaagaagctgtcacgcctggacatcctggccatgccccggaagcgggccggctccttcacagggactagtgaccccgaggcagcccctgcccgcaccagc

SEQ ID NO: 107953 - DNA, 120 bp, Artificial Sequence
  ENSG00000099814_31 (sequence is synthesized)
ttctctggccgcagtgtggagttgtgctgtgccagccgcaagcccaccatggccgaagcacgggctgtctccaggaaggctgccaacacagccaccaccacgggtccccgccagcccttc

SEQ ID NO: 107954 - DNA, 120 bp, Artificial Sequence
  ENSG00000099814_32 (sequence is synthesized)
agcagggcccgctcaggcagtgcccgatacacctccaacacgaggcgccggcagcagggctcggattacacgtccacctctgaggaggagtacggctcccgccacggctcccccaaacac

SEQ ID NO: 107955 - DNA, 120 bp, Artificial Sequence
  ENSG00000099814_33 (sequence is synthesized)
acacgctcccacacctcaacagccactcagaccccgagggctggcagctccagccgggctcgttcccgggcccccggcccccgggacacggacgacgatgaggaggagcctgacccttat

SEQ ID NO: 107956 - DNA, 120 bp, Artificial Sequence
  ENSG00000099814_34 (sequence is synthesized)
ggtttcatcgtgcagacggcagagattgcggagattgccaggctgagccagacgctggtgaaggacgtggccatcctagcccaggagatccacgatgtggctggggacggtgacacactg

SEQ ID NO: 107957 - DNA, 120 bp, Artificial Sequence
  ENSG00000099814_35 (sequence is synthesized)
ggctcctcggagcctgcccacagcgcctccctcagcaacatgcccagcacccccgcctcgaccatctctgcccgggaggagctggtgcagcgcatccccgaggccagcctcaacttccag

SEQ ID NO: 107958 - DNA, 120 bp, Artificial Sequence
  ENSG00000099814_36 (sequence is synthesized)
aaggtgccgcccggctcgctgaactctcgggactttgaccagaacatgaacgacagctgtgaggacgccctggccaacaagacgcggcctcggaaccgagaggaggtgatcttcgataac

SEQ ID NO: 107959 - DNA, 120 bp, Artificial Sequence
  ENSG00000099814_37 (sequence is synthesized)
ctgatgctgaacccggtgtcccagctgtcgcaggccatccgtgagaacacagagcaccttgccgagaagatgaagatcctctttcagaacacagggagagcttgggaggacctggaagcc

SEQ ID NO: 107960 - DNA, 120 bp, Artificial Sequence
  ENSG00000099814_38 (sequence is synthesized)
aggatcaacgccgagaacgaggtgcccatcctgaagacatctaacaaggaaatcagctccatcctgaaggaactgaggcgggtgcagaaacagctggaagttatcaatgccatcgtggac

SEQ ID NO: 107961 - DNA, 120 bp, Artificial Sequence
  ENSG00000099814_39 (sequence is synthesized)
cccagtgggagcctggacctgctcacaggaaacaggagcttggccagctctgcacagccggggctggggaagggccgcgtggctgcccagagcccaccctcacccgcctcagccgaggcc

SEQ ID NO: 107962 - DNA, 120 bp, Artificial Sequence
  ENSG00000099814_40 (sequence is synthesized)
ctgctgccagccctgcccctgaggaatttcccacagcgggccagctgtgggcctcccagcctcccggaccccaccttcctccctgatgccgagaggttcctgatctaggccccagacctg

SEQ ID NO: 107963 - DNA, 120 bp, Artificial Sequence
  ENSG00000099814_41 (sequence is synthesized)
gccaggccagcctccctgtgcgtgtgcgtctctgccttccgtccgccgcacacccgcctgcctggccgcaggtggttctccctgaagacccccacatgtgccatatccctgtgggcgggt

SEQ ID NO: 107964 - DNA, 120 bp, Artificial Sequence
  ENSG00000099814_42 (sequence is synthesized)
gcctcccacgcccttgccccctcgtcagctcccagccagcaccctactcaccctgtccagccccatggccacccccacccctgcctcgccccctacaggcctctgggcccagctcctggc

SEQ ID NO: 107965 - DNA, 120 bp, Artificial Sequence
  ENSG00000099814_43 (sequence is synthesized)
caggctgctgccaaggtcaagccctcaagggcattaccccgcctcctcttcatcactgttatttttgtctttagctttaaaggaaagagttgttggtgccattgcaggtgccccctccag

SEQ ID NO: 107966 - DNA, 120 bp, Artificial Sequence
  ENSG00000099814_44 (sequence is synthesized)
gcctgactggctccgccaggcactaacctgccataaccctttgtgctggcctgcggccaggcagaggaagagaggtcgactgtggggtcatttggtgccaaacatggaggtgggcaggct

SEQ ID NO: 107967 - DNA, 120 bp, Artificial Sequence
  ENSG00000099814_45 (sequence is synthesized)
cacctgttcctgggactgtctgagatggcagggcacttgccctggtggctcccacctgaccccaggccttttataggcaggagccccactgcttccagcctctggtgccaacacagttgc

SEQ ID NO: 107968 - DNA, 120 bp, Artificial Sequence
  ENSG00000099814_46 (sequence is synthesized)
caaacccattgagcttggggctgccctgtggaggcctcctgggtatggaccaggggcttgttgagagctgagccatgcacacaggtgcagacaccccccaactcccatgcacacggctag

SEQ ID NO: 107969 - DNA, 120 bp, Artificial Sequence
  ENSG00000099814_47 (sequence is synthesized)
tccaggcgcctccacgctgcaccgtgaggactgcagggcatgtccccgtgaggggctatgggcctctgtaggtgggcttccaaggtcctgggtgcagccgggtgcatggcagcccttctg

SEQ ID NO: 107970 - DNA, 120 bp, Artificial Sequence
  ENSG00000099814_48 (sequence is synthesized)
gcgggggtgagcgcacgaccaaagtcactggaagccgggtttccggaagctcgcagcttggcctgcaccacacgccctccccttttggcttcacgccatcaggcctcaagtgggcatggg

SEQ ID NO: 107971 - DNA, 120 bp, Artificial Sequence
  ENSG00000099814_49 (sequence is synthesized)
ggcagggacgggcccaggaactgttgttttctcaggattctttcagctgggaacatggcaggtgagcagagcttggtgcctctgccgtggcccctgctggggcagcccgtgttgccggag

SEQ ID NO: 107972 - DNA, 120 bp, Artificial Sequence
  ENSG00000099814_50 (sequence is synthesized)
cctctaagccaaagagcccgttggccgtggttggtgggggtggacgtgggggtgtcccacctggaccagactggcgtgggtgagctccacaccctgcctggcaatggtatgagagtcgga

SEQ ID NO: 107973 - DNA, 120 bp, Artificial Sequence
  ENSG00000099814_51 (sequence is synthesized)
cctggacagggccagctgctgggggagcggcactggggactggaggctggaagcgggtggtgtgtgtcccctgtttacttttagctgagctggggttgggtgtacgggttctgttcctct

SEQ ID NO: 107974 - DNA, 120 bp, Artificial Sequence
  ENSG00000099814_52 (sequence is synthesized)
gagcctgcggcccacctgatgtttacgtgtgtgtgtgagggggggcgggggtggcaggtgtccccccctggtccccgccccaagagcctgctgtctgtatggaggaggtgctagcccggt

SEQ ID NO: 107975 - DNA, 120 bp, Artificial Sequence
  ENSG00000099814_53 (sequence is synthesized)
ccaccgggctgctgcccacccctgcatgccccagttgcccaccccgcctgcccctggacatgaagtggtcacgcttcatccacggctccttcccacccctcggcagtggctgtgcaatgt

SEQ ID NO: 107976 - DNA, 120 bp, Artificial Sequence
  ENSG00000099814_54 (sequence is synthesized)
tttaagttcacaagttcctgctcctccccacactgagctcctttgttcctccccctccagcctttgcctgggaactggtccttgtttgccgggcttctcggagggttcactgtacattcg

SEQ ID NO: 107977 - DNA, 120 bp, Artificial Sequence
  ENSG00000099814_55 (sequence is synthesized)
ttctcaggtggtcttgtggctgtctttcggaaaatggttattttatatgatttgtcatggaatttgttctaataaatcattcttctatcacatggcagcacgctggagcctgtcaccttg

SEQ ID NO: 107978 - DNA, 120 bp, Artificial Sequence
  ENSG00000099814_56 (sequence is synthesized)
gggcagcggtttcatgggtactcgtgtgcacctgtggagcagccctcccgtgtgcacgtgtatgtggctcccagcaggcagaccctgaactcagaggagccagcgcctccagggcggccc

SEQ ID NO: 107979 - DNA, 120 bp, Artificial Sequence
  ENSG00000099814_57 (sequence is synthesized)
ttcctccccttctcccctagccctcatcccgggcccagccctccccaccgccgagtgtcaggcacagatgggactttggtgcccttcatgcatcaggcctcagtttcccccttaggccca

SEQ ID NO: 107980 - DNA, 120 bp, Artificial Sequence
  ENSG00000099814_58 (sequence is synthesized)
ggtgggctgggatgaacttcaccatggcagaggaggtctgggagaattgtgcctcagctctgtcatctctgtccttgtccccccatttctgcctccccctacctcggacaggatcctctt

SEQ ID NO: 107981 - DNA, 120 bp, Artificial Sequence
  ENSG00000099817_0 (sequence is synthesized)
ggagaaggggtgcgagcggcggcggcggcggaggctgccatggacgacgaggaggagacgtaccggctctggaaaatccgcaagaccatcatgcagctgtgccacgaccgtggctatctg

SEQ ID NO: 107982 - DNA, 120 bp, Artificial Sequence
  ENSG00000099817_1 (sequence is synthesized)
gtgacccaggacgagcttgaccagaccctggaggagttcaaagcccaatctggggacaagccgagtgaggggcggccgcggcgcacggacctcaccgtgctggtggcccacaacgatgac

SEQ ID NO: 107983 - DNA, 120 bp, Artificial Sequence
  ENSG00000099817_2 (sequence is synthesized)
cccaccgaccagatgtttgtgttctttccagaggagcccaaggtgggcatcaagaccatcaaggtgtactgccagcgcatgcaggaggagaacatcacacgggctctcatcgtggtgcag

SEQ ID NO: 107984 - DNA, 120 bp, Artificial Sequence
  ENSG00000099817_3 (sequence is synthesized)
cagggcatgacaccctccgccaagcagtccctggtcgacatggcccccaagtacatcctggagcagtttctgcagcaggagctgctcatcaacatcacggagcacgagctagtccctgag

SEQ ID NO: 107985 - DNA, 120 bp, Artificial Sequence
  ENSG00000099817_4 (sequence is synthesized)
aggaggaggtgacagagctgctggcccgatataagctccgagagaaccagctgcccaggatccaggcgggggaccctgtggcgcgctactttgggataaagcgtgggcaggtggtgaaga

SEQ ID NO: 107986 - DNA, 120 bp, Artificial Sequence
  ENSG00000099817_5 (sequence is synthesized)
tcatccggcccagtgagacggctggcaggtacatcacctaccggctggtgcagtagctaccgcctgacagttccacaggcgcatgggccacgtttccagtgcttggtggccatgtggggc

SEQ ID NO: 107987 - DNA, 120 bp, Artificial Sequence
  ENSG00000099817_6 (sequence is synthesized)
tgacgtgcgaaaccttagagccgggggatacgtccgtcatcgagaacgttttcctggactgccctgggctgcaggtggacgtgacgaggtcattcgatgcctgaccgtctgcacagcctg

SEQ ID NO: 107988 - DNA, 120 bp, Artificial Sequence
  ENSG00000099817_7 (sequence is synthesized)
tggtgaagaccacccgggctcccacctcgcggggccccgtggcggggggttcccttcctcacacatccctcccctagggggaggcccagggccacgccacggggctctctctgtcccctc

SEQ ID NO: 107989 - DNA, 120 bp, Artificial Sequence
  ENSG00000099817_8 (sequence is synthesized)
cctggccccttcttctaagcttgcagctgccacagaaaatcttctaagcttgcagctgccacagaaaacacccgattaaaaactttttatttcagcaaaataaacgtgcctgtgaaagaa

SEQ ID NO: 107990 - DNA, 120 bp, Artificial Sequence
  ENSG00000099817_9 (sequence is synthesized)
cccctgccctgccagaatccggcccccacagctctcacggctgctgctcctctggactccccaaggcaggtggcctccacccacgttctcccgtcctggggtgaggcttcctgtggccca

SEQ ID NO: 107991 - DNA, 120 bp, Artificial Sequence
  ENSG00000099817_10 (sequence is synthesized)
tcacctgggggcagctggtgccgggtcttcacccagaccacgctgggtcccctctgttgggggtttggggtccgggtctcccaccagccactgcttcctcctgggccctcggccttccac

SEQ ID NO: 107992 - DNA, 120 bp, Artificial Sequence
  ENSG00000099817_11 (sequence is synthesized)
ccctcgtcttccctccctcgggggccctgatgcgtggcggcccccgcccggcctcggctctttactccattcacagccatgcacgcgctcaagccaccagggtgcgagatgccagctctg

SEQ ID NO: 107993 - DNA, 120 bp, Artificial Sequence
  ENSG00000099817_12 (sequence is synthesized)
gagttctcggttgttgtaggaggttgggtgttttcaaatggtaaagatgttttgagcaaataaatttgcttgatacagaaaccaggccgactaacaaggtttccagcaggtggccttgcc

SEQ ID NO: 107994 - DNA, 120 bp, Artificial Sequence
  ENSG00000099817_13 (sequence is synthesized)
tcaccccaagcacacgaggtcagcctggcaggtgtgccctcctcgcgctggcttcaggggtcagtgtctccccaggccctcgccctgccctcccacttcgtgctcctgggtaaggcgtga

SEQ ID NO: 107995 - DNA, 120 bp, Artificial Sequence
  ENSG00000099817_14 (sequence is synthesized)
gcgtgtctgtctcttcccttcccgtgagggtgtggagttgttctctggcttgtgcagctgtggtttgcggccagttcctcttacagacgtttgggatctggctctacttccccgtttgct

SEQ ID NO: 107996 - DNA, 120 bp, Artificial Sequence
  ENSG00000099817_15 (sequence is synthesized)
tactgtctgatttcagaaggcctcgcctgcccaagtttaacctagccacgtggttctctcacagtagctttattaagatgtaattcaccctcgggcggtcggtggtctgtaacgcgccca

SEQ ID NO: 107997 - DNA, 120 bp, Artificial Sequence
  ENSG00000099817_16 (sequence is synthesized)
ctgttctgtgcagcagggtccccagatccccaggccgcggactgtgtgtgtgatggggacagtgcttccccttctctccaaatgtacttttttcaaaattgtcttggccaaagcaagcca

SEQ ID NO: 107998 - DNA, 120 bp, Artificial Sequence
  ENSG00000099817_17 (sequence is synthesized)
ggtggggatgggggttcccagggctggggaggagggaggggacagagtgtgtcatgtgcacagttttagtttgggaagatgagaaaattctggaggtggccgggcgcggtggctcacgcc

SEQ ID NO: 107999 - DNA, 120 bp, Artificial Sequence
  ENSG00000099817_18 (sequence is synthesized)
gaatcacttgaacccaggaagtggaggatcgcttgagctcaggagttaaaagaccagcccgggcaacacagagaaaccccccacctctacaaaaaactttaagattacctgggcacagtg

SEQ ID NO: 108000 - DNA, 79 bp, Artificial Sequence
  ENSG00000099817_19 (sequence is synthesized)
tttgagcccaggaggccgaggctgcagtgagctacgattgtgctcctgtactccagcctgggccacagggtcacaccct

SEQ ID NO: 108001 - DNA, 120 bp, Artificial Sequence
  ENSG00000099817_20 (sequence is synthesized)
gcggcggcggcggaggctgccatggacgacgaggaggagacgtaccggctctggaaaatccgcaagaccatcatgcaggtgagcagcgggtcccgggggagttccggtgaagccaccaga

SEQ ID NO: 108002 - DNA, 120 bp, Artificial Sequence
  ENSG00000099817_21 (sequence is synthesized)
gcacctgccgaggagccggtcgctagcacccacccccactcgcctggtgcccagcatttgtctctctgcccagtctgggaggaaaactcccctccccttccttgctaggagcccaaggtg

SEQ ID NO: 108003 - DNA, 120 bp, Artificial Sequence
  ENSG00000099817_22 (sequence is synthesized)
agtccgcgcgggttctcgcgcggagaaggggtgcgagcggcggcggcggcggaggctgccatggacgacgaggaggagacgtaccggctctggaaaatccgcaagaccatcatgcagagg

SEQ ID NO: 108004 - DNA, 120 bp, Artificial Sequence
  ENSG00000099817_23 (sequence is synthesized)
agtccgcgcgggttctcgcgcggagaaggggtgcgagcggcggcggcggcggaggctgccatggacgacgaggaggagacgtaccggctctggaaaatccgcaagaccatcatgcaggtg

SEQ ID NO: 108005 - DNA, 120 bp, Artificial Sequence
  ENSG00000099817_24 (sequence is synthesized)
agccgcgcctggtgttgggggcgggggcgcgggcggcgggtgtaggggcccgaggtggggtcgagcacggcgtctcctcgtactctcgtcggagcagcagcgatgaagggccgggccgat

SEQ ID NO: 108006 - DNA, 120 bp, Artificial Sequence
  ENSG00000099817_25 (sequence is synthesized)
acgggaggcccagaggtcgccggggataccaggcgctggacccgacctgagccggcagcggggaagggagggggtttcgagacgtctgggtgcggtgcttaggggtgggtgggcggcttg

SEQ ID NO: 108007 - DNA, 120 bp, Artificial Sequence
  ENSG00000099817_26 (sequence is synthesized)
ggctggtgcggcgcgcgtggcggcgagaggaggaggaagccgcgaatggggacggggggcgcccccagactctgcccttctctgtgattcagcgtcgctatttgtccttgcgtcctgaac

SEQ ID NO: 108008 - DNA, 120 bp, Artificial Sequence
  ENSG00000099817_27 (sequence is synthesized)
cccatggagtcttcagcatccgaggctggcagagttggtggttgggaagcagcgggcgagctggggctttcgatggggacgtggagctcggaacccgtgccttggggtctggggcagatg

SEQ ID NO: 108009 - DNA, 120 bp, Artificial Sequence
  ENSG00000099817_28 (sequence is synthesized)
gaggccactgggtcgagtccggtttggaagccgggcacaggcctgaggacctgcggttcagggtattgcctcagccattggggccgtttgagagcttttgctttgtcttgcttcccaccc

SEQ ID NO: 108010 - DNA, 120 bp, Artificial Sequence
  ENSG00000099817_29 (sequence is synthesized)
tttgcccttgtcctcagcgaagccccccgcagcctgattcttctttctccgatcctcaaacattgtcagcctgaagtcacatctgtttcggtccctgtcattttttttttttaagagata

SEQ ID NO: 108011 - DNA, 120 bp, Artificial Sequence
  ENSG00000099817_30 (sequence is synthesized)
tgcagtggtgcaatcatagctcactgcatccttgaactggcctccagcaaccctcctgcctcagcctccctaagtactgggatcacgggcgtgagcctccgcgccccgcctttgtccctg

SEQ ID NO: 108012 - DNA, 120 bp, Artificial Sequence
  ENSG00000099817_31 (sequence is synthesized)
gagcctccgcgccccgcctttgtccctgcctttagggtagctctgcaaagtggtttggagggctttgctccctgccaggtttctgtgaggctgggtggacagacggtcttggtcaaggct

SEQ ID NO: 108013 - DNA, 120 bp, Artificial Sequence
  ENSG00000099817_32 (sequence is synthesized)
ggacatctctgggagcctctcaggatcatactggtcccatcctgtggtgtgaggctgtgggggccggggtggctgtcatggagcacacagtgagtgttcatcccgtttgctgttcacctc

SEQ ID NO: 108014 - DNA, 120 bp, Artificial Sequence
  ENSG00000099817_33 (sequence is synthesized)
acaaggtttccagcaggtggccttgcctcaccccaagcacacgaggtcagcctggcaggtgtgccctcctcgcgctggcttcagggttccacaggcgcatgggccacgtttccagtgctt

SEQ ID NO: 108015 - DNA, 120 bp, Artificial Sequence
  ENSG00000099817_34 (sequence is synthesized)
aggcgggggaccctgtggcgcgctactttgggataaagcgtgggcaggtgagccctgtggggagaaggggccctggggctgctctgagctgaccactcggagaagggggcttctgtccct

SEQ ID NO: 108016 - DNA, 120 bp, Artificial Sequence
  ENSG00000099817_35 (sequence is synthesized)
ccccgacagcccctcccccttgatccagggcctggaggggacctcgagaccacacccccaatatccccctcttaaagccagggccactgggcccagagaagagcgtgacccaggttccca

SEQ ID NO: 108017 - DNA, 120 bp, Artificial Sequence
  ENSG00000099817_36 (sequence is synthesized)
gggagcgggtcccacagcccagggtcagccatctcggacccctgccggccatccccagcccgtgtgctgcccgcctgctgtctggtgactgcagtgagacccctcaagcattcgcagccc

SEQ ID NO: 108018 - DNA, 120 bp, Artificial Sequence
  ENSG00000099817_37 (sequence is synthesized)
ccgcaagcagtacccacaggcggcccacgtgccttgggctttgggccaggccagccagggtgccctggaggatgtggccgggatgtccggcaagccccgaccgcctccctcccaccgcgt

SEQ ID NO: 108019 - DNA, 120 bp, Artificial Sequence
  ENSG00000099817_38 (sequence is synthesized)
ccatgggccccaccccaggcagccgccgtcctcccccagctctcaggaggggcgtcagggcggagggcactgtgcctctcgccagctcctgtgggctccagccctcggcctggtgcagat

SEQ ID NO: 108020 - DNA, 120 bp, Artificial Sequence
  ENSG00000099821_0 (sequence is synthesized)
ggggtggcctggagcggcgtgcgtaatgtcggcactttgctggggccgcggagcggcggggctcaaacgagccctacggccttgcggccgcccgggactccccggcaaagaagggaccgc

SEQ ID NO: 108021 - DNA, 120 bp, Artificial Sequence
  ENSG00000099821_1 (sequence is synthesized)
cggtggcgtctgcggccccaggaggagctcgtccgccagcccccaggagcaagaccaagaccgcaggaaggactggggccacgtggagctgctggaggtgctccaggcgcgggtgcggca

SEQ ID NO: 108022 - DNA, 120 bp, Artificial Sequence
  ENSG00000099821_2 (sequence is synthesized)
gctgcaggctgagagcgtgtcggaggtggtggtgaacagggtggatgtggcgcggctcccagaatgtggcagtggagatggtagcctccagccacccaggaaggtccagatgggggccaa

SEQ ID NO: 108023 - DNA, 120 bp, Artificial Sequence
  ENSG00000099821_3 (sequence is synthesized)
ggatgccaccccggtgccctgtggccgctgggcaaagatactggagaaggataagcggacccagcagatgcgtatgcagcggttgaaggcgaagctgcagatgccattccagagcgggga

SEQ ID NO: 108024 - DNA, 120 bp, Artificial Sequence
  ENSG00000099821_4 (sequence is synthesized)
gttcaaggcgctgaccaggcgcctgcaggtggagccccggctcctgagcaagcagatggccgggtgcctggaggactgcacgcgccaggcccccgagagcccctgggaggagcagctggc

SEQ ID NO: 108025 - DNA, 120 bp, Artificial Sequence
  ENSG00000099821_5 (sequence is synthesized)
ccggctgctgcaggaggcccctgggaagctgagcctcgatgtggagcaggccccgtcggggcagcactcgcaggcccagctctcaggtcagcagcagaggctcctggccttcttcaagtg

SEQ ID NO: 108026 - DNA, 120 bp, Artificial Sequence
  ENSG00000099821_6 (sequence is synthesized)
ctgcctgctcactgaccagctgcccctcgcccaccacctgctggtcgtccaccacggccagcggcagaagcggaagctgctcacgctggacatgtacaacgccgtgatgcttggctgggc

SEQ ID NO: 108027 - DNA, 120 bp, Artificial Sequence
  ENSG00000099821_7 (sequence is synthesized)
gcggcagggtgccttcaaggagctggtatatgtgttattcatggtgaaggatgccggcttgactccggacctgctgtcctatgcggctgccctccagtgcatggggaggcaggaccagga

SEQ ID NO: 108028 - DNA, 120 bp, Artificial Sequence
  ENSG00000099821_8 (sequence is synthesized)
cgccgggaccatcgaaaggtgtctggaacagatgagccaggaggggctgaagctgcaggcactcttcaccgccgttctgctgtctgaggaggatcgggccactgttctgaaggccgtgca

SEQ ID NO: 108029 - DNA, 120 bp, Artificial Sequence
  ENSG00000099821_9 (sequence is synthesized)
caaggtgaagcccaccttcagcctcccgccgcagctgccgcccccggtcaacacctccaagctgctcagggacgtgtatgccaaggatgggcgtgtgtcctacccgaagctgcacctgcc

SEQ ID NO: 108030 - DNA, 120 bp, Artificial Sequence
  ENSG00000099821_10 (sequence is synthesized)
cttgaagaccctgcagtgcctctttgagaagcagctccacatggagctggccagcagggtgtgcgtggtgtccgtggagaagcccacgttgccaagcaaggaggtcaagcacgcgcggaa

SEQ ID NO: 108031 - DNA, 120 bp, Artificial Sequence
  ENSG00000099821_11 (sequence is synthesized)
gaccctgaagaccctgcgggaccaatgggagaaagcactgtgccgggcgctgcgggagaccaagaaccgcctagagcgcgaggtgtacgagggccggttctcactttaccccttcctgtg

SEQ ID NO: 108032 - DNA, 120 bp, Artificial Sequence
  ENSG00000099821_12 (sequence is synthesized)
cctgctggacgagcgcgaggtggtgcggatgctcctgcaggtcctgcaggcgctgcccgcccaaggtgagtccttcaccaccctggcccgggagctgagtgcgcgcactttcagccggca

SEQ ID NO: 108033 - DNA, 120 bp, Artificial Sequence
  ENSG00000099821_13 (sequence is synthesized)
cgtggtgcagaggcagcgggtcagtggccaggtgcaggcgctgcagaaccactacaggaagtacctctgcttgctggcctccgacgccgaggtgcccgagccctgcctgccgcggcagta

SEQ ID NO: 108034 - DNA, 120 bp, Artificial Sequence
  ENSG00000099821_14 (sequence is synthesized)
ctgggaggagctgggggcgcccgaggccctgcgggagcagccctggcccctgccagtgcagatggagctgggcaagctgctggcggagatgctggtgcaggctacgcagatgccatgcag

SEQ ID NO: 108035 - DNA, 120 bp, Artificial Sequence
  ENSG00000099821_15 (sequence is synthesized)
gtattccttccgcaacgtccagcagatcggcatcctgaagccgcacccggcctacgtgcagctgctggagaaggccgcggagcccacgctgaccttcgaggcggtggatgtacccatgct

SEQ ID NO: 108036 - DNA, 120 bp, Artificial Sequence
  ENSG00000099821_16 (sequence is synthesized)
ttgccccccgctgccctggacatcgccgcactctggtgctttcctgctcagccccaccaagctgatgcgcacggtggaaggcgccacgcagcaccaggagctgctggaaacctgcccgcc

SEQ ID NO: 108037 - DNA, 120 bp, Artificial Sequence
  ENSG00000099821_17 (sequence is synthesized)
caccgcgctgcatggcgcactggacgccctcacccaactgggcaactgcgcctggcgcgtcaacgggcgcgtgctggacctggtgctgcagctcttccaggccaagggctgcccccagct

SEQ ID NO: 108038 - DNA, 120 bp, Artificial Sequence
  ENSG00000099821_18 (sequence is synthesized)
gcccgaggcccacctgccgcacagcgccgcgcccgcccgcaaggccgagctgcgccgtgagctggcgcactgccagaaggtggcccgggagatgcacagcctgcgggcggaggcgctgta

SEQ ID NO: 108039 - DNA, 120 bp, Artificial Sequence
  ENSG00000099821_19 (sequence is synthesized)
ccgggagatgcacagcctgcgggcggaggcgctgtaccgcctctcgctggcgcagcacctgcgggaccgcgtcttctggctgccgcacaacatggacttccgcggccgcacctacccctg

SEQ ID NO: 108040 - DNA, 120 bp, Artificial Sequence
  ENSG00000099821_20 (sequence is synthesized)
cccgccgcacttcaaccacctgggcagcgacgtggcgcgggccctgctggagttcgcccagggccgcccgctcggcccgcacggcctggattggctcaagatccacctggtcaatctcac

SEQ ID NO: 108041 - DNA, 120 bp, Artificial Sequence
  ENSG00000099821_21 (sequence is synthesized)
ggggttgaagaagcgggagccgctgcggaagcgcctggcctttgcggaggaggtgatggatgacatcctggactccgcggaccaacccttgacgggccgaaagtggtggatgggcgcgga

SEQ ID NO: 108042 - DNA, 120 bp, Artificial Sequence
  ENSG00000099821_22 (sequence is synthesized)
ggaaccctggcagacgctggcctgctgtatggaggtggcgaacgctgtgcgcgcctccgaccctgccgcctatgtctcccacctccccgtccatcaggacggctcttgcaacggcctgca

SEQ ID NO: 108043 - DNA, 120 bp, Artificial Sequence
  ENSG00000099821_23 (sequence is synthesized)
gcattatgctgctctgggccgcgacagcgtgggcgccgcctccgtcaacctggagccctcggatgtgccgcaggacgtgtacagcggcgtggccgcgcaggtggaggtgttccgtaggca

SEQ ID NO: 108044 - DNA, 120 bp, Artificial Sequence
  ENSG00000099821_24 (sequence is synthesized)
ggacgcccagcggggcatgcgggtggcacaggtgctggaaggtttcatcacccgcaaggtggtgaagcagacggtgatgacggtggtgtacggggtcacgcgctatggcgggcgcctgca

SEQ ID NO: 108045 - DNA, 120 bp, Artificial Sequence
  ENSG00000099821_25 (sequence is synthesized)
gattgagaagcgcctccgggagctgagcgactttccccaggagttcgtgtgggaggcctctcactatctcgtacgccaggtcttcaagagtctacaggagatgttctcggggacccgggc

SEQ ID NO: 108046 - DNA, 120 bp, Artificial Sequence
  ENSG00000099821_26 (sequence is synthesized)
catccagcactggctgaccgagagtgcccgcctcatctcccacatgggctctgtggtggagtgggtcacacccctgggcgtccccgtcatccagccctatcgcctggactccaaggtcaa

SEQ ID NO: 108047 - DNA, 120 bp, Artificial Sequence
  ENSG00000099821_27 (sequence is synthesized)
gcaaataggaggtggaattcagagcatcacctacacccacaacggagacatcagccgaaagcccaacacacgtaagcagaagaacggcttcccgcccaacttcatccactcgctggactc

SEQ ID NO: 108048 - DNA, 120 bp, Artificial Sequence
  ENSG00000099821_28 (sequence is synthesized)
ctcccacatgatgctcaccgccctgcactgctacaggaagggcctgaccttcgtctctgtgcacgactgttactggactcacgcagctgatgtctccgtcatgaaccaggtgtgccggga

SEQ ID NO: 108049 - DNA, 120 bp, Artificial Sequence
  ENSG00000099821_29 (sequence is synthesized)
gcagtttgtccgcttgcacagcgagcccatcctgcaggacctgtccagattcctggtcaagcggttctgctctgagccccagaagatcttggaggccagccagctgaaggagacactgca

SEQ ID NO: 108050 - DNA, 120 bp, Artificial Sequence
  ENSG00000099821_30 (sequence is synthesized)
ggcggtgcccaagccaggggccttcgacctggagcaggtgaagcgttccacctacttcttcagctgacaccccgtgagccttgtcagtgtgtaaataaagctcttttgccacccccagga

SEQ ID NO: 108051 - DNA, 120 bp, Artificial Sequence
  ENSG00000099821_31 (sequence is synthesized)
gtctgagcctcagtccacccatgggtggggcccccacactggggcgttgggtaggggtggtgcccagagcctgcctgatcacccctggggatcctctgactcctgcccaggtgtgccggg

SEQ ID NO: 108052 - DNA, 120 bp, Artificial Sequence
  ENSG00000099821_32 (sequence is synthesized)
ggggcggggcgaggggtggggcgaggcctgcaggagggtgggcttccctggacctcaagtggagggggctgagcgcagggccaggatgctggtcactgggtggccctgtgagctcccctc

SEQ ID NO: 108053 - DNA, 120 bp, Artificial Sequence
  ENSG00000099821_33 (sequence is synthesized)
ccacatgatgctcaccgccctgcactgctacaggtgggcgtctccggacggcgtgggtgccgctcgcctcccaggggcgtcttctggctagcagggcacagctggcaaggctgggtctag

SEQ ID NO: 108054 - DNA, 120 bp, Artificial Sequence
  ENSG00000099821_34 (sequence is synthesized)
ctgggggcagggactgggcagagtggatctgctgtgtctgtggggcctgtgtagaggccctgaggctgtgtgccccgaatgtaggtggtcctggcagctcccctcctgtggcccgacagg

SEQ ID NO: 108055 - DNA, 120 bp, Artificial Sequence
  ENSG00000099821_35 (sequence is synthesized)
gagagccgagcatgggcgctgccccttcctgctgggcatttcttggcaccgcgatgtgtggttagatctggagcacgtggaggtcgttccagcagaatctaccggccacgggagctggga

SEQ ID NO: 108056 - DNA, 120 bp, Artificial Sequence
  ENSG00000099821_36 (sequence is synthesized)
atgctcaggatgcggggtggtggccctggcaggaggggacctcgtagccgccctcggagctgaggctcccacagcagcgtggggggcggcaggggtggggcgaggaggcttctgggaaca

SEQ ID NO: 108057 - DNA, 120 bp, Artificial Sequence
  ENSG00000099821_37 (sequence is synthesized)
agcggcgtgcgtaatgtcggcactttgctggggccgcggagcggcggggctcaaacgagccctacggccttgcggccgcccgggactccccggcaaagaaggtaacacaaagggagacgg

SEQ ID NO: 108058 - DNA, 120 bp, Artificial Sequence
  ENSG00000099821_38 (sequence is synthesized)
ccaggcagcccgggggccacggcgtgggctcctccccgcgcggccggggcctttggcgctttgacctttgcctctttgcacctgggcgtgcgcagcccaccgacccggccccgctttcca

SEQ ID NO: 108059 - DNA, 120 bp, Artificial Sequence
  ENSG00000099821_39 (sequence is synthesized)
ggtttaacaagctgcctcccagaggaacgtgaacctcccacagtcccacctggcgggccatgcggctgcctctgcaggtggagcttgtgtgtcagaacctcagggggatgcatcggtctg

SEQ ID NO: 108060 - DNA, 120 bp, Artificial Sequence
  ENSG00000099821_40 (sequence is synthesized)
cccagctggccactcctgcctggtgaccctgtcccctgctgagctggtggctacagagaaggggtctccagggagcagggaggatgtggaggttgggccatccccccagaccctcaccct

SEQ ID NO: 108061 - DNA, 120 bp, Artificial Sequence
  ENSG00000099821_41 (sequence is synthesized)
gcctggactccaaggtcaagcaaataggaggtggaattcagagcatcacctacacccacaacggagacatcagccgcccaacacacgtaagcagaagaacggcttcccgcccaacttcat

SEQ ID NO: 108062 - DNA, 80 bp, Artificial Sequence
  ENSG00000099822_0 (sequence is synthesized)
cagccgcgacagctcgtgcggccgccccggcaccccgggcgcggcgagcacggccaagggcagcccgaacggcgagtgcg

SEQ ID NO: 108063 - DNA, 120 bp, Artificial Sequence
  ENSG00000099822_1 (sequence is synthesized)
ggccggcggaggaggcgggcagcgaggaggcgggcccggcgggggagccgcgcggcagccaggccagcttcatgcagcgccagttcggcgcgctcctgcagccgggcgtcaacaagttct

SEQ ID NO: 108064 - DNA, 120 bp, Artificial Sequence
  ENSG00000099822_2 (sequence is synthesized)
cgctgcggatgttcggcagccagaaggccgtggagcgcgagcaggagcgcgtcaagtcggcgggggcctggatcatccacccgtacagcgacttcaggttctactgggacttcaccatgc

SEQ ID NO: 108065 - DNA, 120 bp, Artificial Sequence
  ENSG00000099822_3 (sequence is synthesized)
tgctgttcatggtgggaaacctcatcatcatcccagtgggcatcaccttcttcaaggatgagaccactgccccgtggatcgtgttcaacgtggtctcggacaccttcttcctcatggacc

SEQ ID NO: 108066 - DNA, 120 bp, Artificial Sequence
  ENSG00000099822_4 (sequence is synthesized)
tggtgttgaacttccgcaccggcattgtgatcgaggacaacacggagatcatcctggaccccgagaagatcaagaagaagtatctgcgcacgtggttcgtggtggacttcgtgtcctcca

SEQ ID NO: 108067 - DNA, 120 bp, Artificial Sequence
  ENSG00000099822_5 (sequence is synthesized)
tccccgtggactacatcttccttatcgtggagaagggcattgactccgaggtctacaagacggcacgcgccctgcgcatcgtgcgcttcaccaagatcctcagcctcctgcggctgctgc

SEQ ID NO: 108068 - DNA, 120 bp, Artificial Sequence
  ENSG00000099822_6 (sequence is synthesized)
gcctctcacgcctgatccgctacatccatcagtgggaggagatcttccacatgacctatgacctggccagcgcggtgatgaggatctgcaatctcatcagcatgatgctgctgctctgcc

SEQ ID NO: 108069 - DNA, 120 bp, Artificial Sequence
  ENSG00000099822_7 (sequence is synthesized)
actgggacggctgcctgcagttcctggtgcctatgctgcaggacttcccgcgcaactgctgggtgtccatcaatggcatggtgaaccactcgtggagtgaactgtactccttcgcactct

SEQ ID NO: 108070 - DNA, 120 bp, Artificial Sequence
  ENSG00000099822_8 (sequence is synthesized)
tcaaggccatgagccacatgctgtgcatcgggtacggccggcaggcgcccgagagcatgacggacatctggctgaccatgctcagcatgattgtgggtgccacctgctacgccatgttca

SEQ ID NO: 108071 - DNA, 120 bp, Artificial Sequence
  ENSG00000099822_9 (sequence is synthesized)
tcggccacgccactgccctcatccagtcgctggactcctcgcggcgccagtaccaggagaagtacaagcaggtggagcagtacatgtccttccacaagctgccagctgacttccgccaga

SEQ ID NO: 108072 - DNA, 120 bp, Artificial Sequence
  ENSG00000099822_10 (sequence is synthesized)
agatccacgactactatgagcaccgttaccagggcaagatgtttgacgaggacagcatcctgggcgagctcaacgggcccctgcgggaggagatcgtcaacttcaactgccggaagctgg

SEQ ID NO: 108073 - DNA, 120 bp, Artificial Sequence
  ENSG00000099822_11 (sequence is synthesized)
agctcaagttcgaggtcttccagccgggtgactacatcatccgcgaaggcaccatcgggaagaagatgtacttcatccagcacggcgtggtcagcgtgctcactaagggcaacaaggaga

SEQ ID NO: 108074 - DNA, 120 bp, Artificial Sequence
  ENSG00000099822_12 (sequence is synthesized)
tgaagctgtccgatggctcctacttcggggagatctgcctgctcacccggggccgccgcacggcgagcgtgcgggctgacacctactgccgcctctattcgctgagcgtggacaacttca

SEQ ID NO: 108075 - DNA, 120 bp, Artificial Sequence
  ENSG00000099822_13 (sequence is synthesized)
acgaggtgctggaggagtaccccatgatgcggcgcgccttcgagacggtggccatcgaccgcctggaccgcatcggcaagaagaattccatcctcctgcacaaggtgcagcatgacctca

SEQ ID NO: 108076 - DNA, 120 bp, Artificial Sequence
  ENSG00000099822_14 (sequence is synthesized)
actcgggcgtattcaacaaccaggagaacgccatcatccaggagatcgtcaagtacgaccgcgagatggtgcagcaggccgagctgggtcagcgcgtgggcctcttcccgccgccgccgc

SEQ ID NO: 108077 - DNA, 80 bp, Artificial Sequence
  ENSG00000099822_15 (sequence is synthesized)
cgccgccgcaggtcacctcggccatcgccacgctgcagcaggcggcggccatgagcttctgcccgcaggtggcgcggccg

SEQ ID NO: 108078 - DNA, 80 bp, Artificial Sequence
  ENSG00000099822_16 (sequence is synthesized)
cctgagccgcgcgtcgcgcccactgtccgcctcgcagccctcgctgcctcacggcgcccccggccccgcggcctccacac

SEQ ID NO: 108079 - DNA, 80 bp, Artificial Sequence
  ENSG00000099822_17 (sequence is synthesized)
ccagcccggaccgcagggactcggcctcacccggcgccgccggcggcctggacccccaggactccgcgcgctcgcgcctc

SEQ ID NO: 108080 - DNA, 120 bp, Artificial Sequence
  ENSG00000099822_18 (sequence is synthesized)
actccgcgcgctcgcgcctctcgtccaacttgtgaccctcgccgaccgccccgcgggcccaggcgggccgggggcggggccgtcatccagaccaaagccatgccattgcgctgccccggc

SEQ ID NO: 108081 - DNA, 120 bp, Artificial Sequence
  ENSG00000099822_19 (sequence is synthesized)
cgccagtccgcccagaagccatagacgagacgtaggtagccgtagttggacggacgggcagggccggcggggcagccccctccgcgcccccggccgtcccccctcatcgccccgcgccca

SEQ ID NO: 108082 - DNA, 120 bp, Artificial Sequence
  ENSG00000099822_20 (sequence is synthesized)
cccccatcgcccctgcccccggcggcggcctcgcgtgcgagggggctcccttcacctcggtgcctcagttcccccagctgtaagacagggacggggcggcccagtggctgagaggagccg

SEQ ID NO: 108083 - DNA, 120 bp, Artificial Sequence
  ENSG00000099822_21 (sequence is synthesized)
gctgtggagccccgcccgccccccaccctctaggtggcccccgtccgaggaggatcgttttctaagtgcaatacttggcccgccggcttcccgctgcccccatcgcgctcacgcaataac

SEQ ID NO: 108084 - DNA, 120 bp, Artificial Sequence
  ENSG00000099822_22 (sequence is synthesized)
gcgctcacgcaataaccggcccggcccccgtccgcgcgcgtcccccggtgacctcggggagcagcaccccgcctccctccagcactggcaccgagaggcaggcctggctgcgcagggcgc

SEQ ID NO: 108085 - DNA, 120 bp, Artificial Sequence
  ENSG00000099822_23 (sequence is synthesized)
tcccgccgccgtgatgaatgtactgacgagccgaggcagcagtgcccccaccgtggccccccacgccccattaacccccacacccccattccgcgcaataaacgacagcattggcgccaa

SEQ ID NO: 108086 - DNA, 120 bp, Artificial Sequence
  ENSG00000099834_0 (sequence is synthesized)
attctggggctcgggggatcccggacaccctctcagctcctgcccgggggcccatgtgtcccttctgccctgtgcctcggtgcctgtgacctgagccccctggttgacccctgcactcag

SEQ ID NO: 108087 - DNA, 120 bp, Artificial Sequence
  ENSG00000099834_1 (sequence is synthesized)
tccaacttgggccaaacgactgcccctccttctggcagtgggctggaccagccggccagcgggagcccccttggcagaagccggtcgtaaaggatcataaactgggcggcgtctggctgg

SEQ ID NO: 108088 - DNA, 120 bp, Artificial Sequence
  ENSG00000099834_2 (sequence is synthesized)
ggcgaaggtcgctgaggtaggaactgcgccagtcctagacgccagacccgctcagaccctcctgccaggtgacagccgccaagatggggtcttgggccctgctgtggcctcccctgctgt

SEQ ID NO: 108089 - DNA, 120 bp, Artificial Sequence
  ENSG00000099834_3 (sequence is synthesized)
tcaccgggctgctcgtccgacccccggggaccatggcccaggcccagtactgctctgtgaacaaggacatctttgaagtagaggagaacacaaatgtcaccgagccgctggtggacatcc

SEQ ID NO: 108090 - DNA, 120 bp, Artificial Sequence
  ENSG00000099834_4 (sequence is synthesized)
acgtcccggagggccaggaggtgaccctcggagccttgtccaccccctttgcatttcggatccagggaaaccagctgtttctcaacgtgactcctgattacgaggagaagtcactgcttg

SEQ ID NO: 108091 - DNA, 120 bp, Artificial Sequence
  ENSG00000099834_5 (sequence is synthesized)
aggctcagctgctgtgtcagagcggaggcacattggtgacccagctaagggtgttcgtgtcagtgctggacgtcaatgacaatgcccccgaattcccctttaagaccaaggagataaggg

SEQ ID NO: 108092 - DNA, 120 bp, Artificial Sequence
  ENSG00000099834_6 (sequence is synthesized)
tggaggaggacacgaaagtgaactccaccgtcatccccgagacgcaactgcaggctgaggaccgcgacaaggacgacattctgttctacaccctccaggaaatgacagcaggtgccagtg

SEQ ID NO: 108093 - DNA, 120 bp, Artificial Sequence
  ENSG00000099834_7 (sequence is synthesized)
actacttctccctggtgagtgtaaaccgtcccgccctgaggctggaccggcccctggacttctacgagcggccgaacatgaccttctggctgctggtgcgggacactccgggggagaatg

SEQ ID NO: 108094 - DNA, 120 bp, Artificial Sequence
  ENSG00000099834_8 (sequence is synthesized)
tggaacccagccacactgccaccgccacactagtgctgaacgtggtgcccgccgacctgcggcccccgtggttcctgccctgcaccttctcagatggctacgtctgcattcaagctcagt

SEQ ID NO: 108095 - DNA, 120 bp, Artificial Sequence
  ENSG00000099834_9 (sequence is synthesized)
accacggggctgtccccacggggcacatactgccatctcccctcgtcctgcgtcccggacccatctacgctgaggacggagaccgcggcatcaaccagcccatcatctacagcatcttta

SEQ ID NO: 108096 - DNA, 120 bp, Artificial Sequence
  ENSG00000099834_10 (sequence is synthesized)
ggggaaacgtgaatggtacattcatcatccacccagactcgggcaacctcaccgtggccaggagtgtccccagccccatgaccttccttctgctggtgaagggccaacaggccgaccttg

SEQ ID NO: 108097 - DNA, 120 bp, Artificial Sequence
  ENSG00000099834_11 (sequence is synthesized)
cccgctactcagtgacccaggtcaccgtggaggctgtggctgcggccgggagcccgccccgcttcccccagagactgtatcgtggcaccgtggcgcgtggcgctggagcgggcgttgtgg

SEQ ID NO: 108098 - DNA, 120 bp, Artificial Sequence
  ENSG00000099834_12 (sequence is synthesized)
tcaaggatgcagctgccccttctcagcctctgaggatccaggctcaggacccggagttctcggacctcaactcggccatcacatatcgaattaccaaccactcacacttccggatggagg

SEQ ID NO: 108099 - DNA, 120 bp, Artificial Sequence
  ENSG00000099834_13 (sequence is synthesized)
gagaggttgtgctgaccaccaccacactggcacaggcgggagccttctacgcagaggttgaggcccacaacacggtgacctctggcaccgcaaccacagtcattgagatacaagtttccg

SEQ ID NO: 108100 - DNA, 120 bp, Artificial Sequence
  ENSG00000099834_14 (sequence is synthesized)
aacaggagcccccctccacagatgtccccccatccccagaggctggaggaacaactgggccctggaccagcaccacttccgaggtccccagaccccctgagccctcccagggaccctcca

SEQ ID NO: 108101 - DNA, 120 bp, Artificial Sequence
  ENSG00000099834_15 (sequence is synthesized)
ccctctggcacaactctgaggccaccaacctcgtccacacccggggggcccccgggtgcagaaaacagcacctcccaccaaccagccactcccggtggggacacagcacagaccccaaag

SEQ ID NO: 108102 - DNA, 120 bp, Artificial Sequence
  ENSG00000099834_16 (sequence is synthesized)
ccaggaacctctcagccgatgccccccggtgtgggaaccagcacctcccaccaaccagccacacccagtgggggcacagcacagaccccagagccaggaacctctcagccgatgcccccc

SEQ ID NO: 108103 - DNA, 120 bp, Artificial Sequence
  ENSG00000099834_17 (sequence is synthesized)
agtatgggaaccagcacctcccaccaaccagccacacccggtgggggcacagcacagaccccagaggcaggaacctctcagccgatgccccccggtatgggaaccagcacctcccaccaa

SEQ ID NO: 108104 - DNA, 120 bp, Artificial Sequence
  ENSG00000099834_18 (sequence is synthesized)
ccaaccacacccggtgggggcacagcacagaccccagagccaggaacctctcagccgatgcccctcagcaagagcaccccatcttcaggtggcggcccctcggaggacaagcgcttctcg

SEQ ID NO: 108105 - DNA, 120 bp, Artificial Sequence
  ENSG00000099834_19 (sequence is synthesized)
gtggtggatatggcggccctgggcggggtgctgggtgcgctgctgctgctggctctccttggcctcgccgtccttgtccacaagcactatggcccccggctcaagtgctgctgtggcaaa

SEQ ID NO: 108106 - DNA, 120 bp, Artificial Sequence
  ENSG00000099834_20 (sequence is synthesized)
gctccggagccccagccccaaggctttgacaaccaggcgttcctccctgaccacaaggccaactgggcgcccgtccccagccccacgcacgaccccaagcccgcggaggcaccgatgccc

SEQ ID NO: 108107 - DNA, 120 bp, Artificial Sequence
  ENSG00000099834_21 (sequence is synthesized)
ccggccctgcctccccaggcggtgcccctgagccccccgcagcggcccgagctggcggaagccccacggcggtgaggtccatcctgaccaaggagcggcggccggagggcgggtacaagg

SEQ ID NO: 108108 - DNA, 120 bp, Artificial Sequence
  ENSG00000099834_22 (sequence is synthesized)
gagggcgggtacaaggctgtctggtttggcgaggacatcgggacggaggcagacgtggtcgttctcaacgcgcccaccctggacgtggatggcgccagtgactccggcagcggcgatgag

SEQ ID NO: 108109 - DNA, 120 bp, Artificial Sequence
  ENSG00000099834_23 (sequence is synthesized)
ggcgagggcgcggggaggggtgggggtccctacgatgcgcccggtggtgatgactcctacatctaagtggcccctccaccctctcccccagccgcacgggcactggaggtctcgctcccc

SEQ ID NO: 108110 - DNA, 120 bp, Artificial Sequence
  ENSG00000099834_24 (sequence is synthesized)
cagcctccgacccgaggcagaataaagcaaggctcccgaaacccaggccatggcgtggggcaggcgcgcgggtccatgggggtcccattcactcagtcccctgtcgtcattagcgcttga

SEQ ID NO: 108111 - DNA, 120 bp, Artificial Sequence
  ENSG00000099834_25 (sequence is synthesized)
gcccaggtgtgcagatgaggcggtgggtctggccacgctgtccccaccccaaggctgcagcacttcccgtaaaccacctgcagtgcccgccgccttcccgaggctctgtgccagctagtc

SEQ ID NO: 108112 - DNA, 120 bp, Artificial Sequence
  ENSG00000099834_26 (sequence is synthesized)
tgggaagttcctctcccgctctaaccacagcccgaggggggctcccctcccccgacctgcaccggagatctcaggcacccggctcatctcagacctcccgctcccgaccctacacagaga

SEQ ID NO: 108113 - DNA, 120 bp, Artificial Sequence
  ENSG00000099834_27 (sequence is synthesized)
ttgcctggggaggctgaggagccgatgcaaacccccaaggcgacgcacttgggagccggtggtctcaaacacctgccgggggtcctagtccccttctgaaatctacatgcttgggttgga

SEQ ID NO: 108114 - DNA, 120 bp, Artificial Sequence
  ENSG00000099834_28 (sequence is synthesized)
gcgcagcagtaaacaccctgcccagtgacctggactgaggcgcgctgggggtgggtgcgccgtgtggcctgagcaggagccagaccaggaggcctaggggtgagagacacattcccctcg

SEQ ID NO: 108115 - DNA, 120 bp, Artificial Sequence
  ENSG00000099834_29 (sequence is synthesized)
ctgctcccaaagccagagcccaggctgggcgcccatgcccagaaccatcaagggatcccttgcggcttgtcagcactttccctaatggaaatacaccattaattcctttccaaatgtttt

SEQ ID NO: 108116 - DNA, 120 bp, Artificial Sequence
  ENSG00000099840_0 (sequence is synthesized)
tgcgcggctgaagggtgtggcgcgagcagcgtcgttggttggccggcggcgggccgggacgggcatggccctgctgctgtgcctggtgtgcctgacggcggcgctggcccacggctgtct

SEQ ID NO: 108117 - DNA, 120 bp, Artificial Sequence
  ENSG00000099840_1 (sequence is synthesized)
gcactgccacagcaacttctccaagaagttctccttctaccgccaccatgtgaacttcaagtcctggtgggtgggcgacatccccgtgtcaggggcgctgctcaccgactggagcgacga

SEQ ID NO: 108118 - DNA, 120 bp, Artificial Sequence
  ENSG00000099840_2 (sequence is synthesized)
cacgatgaaggagctgcacctggccatccccgccaagatcacccgggagaagctggaccaagtggcgacagcagtgtaccagatgatggatcagctgtaccaggggaagatgtacttccc

SEQ ID NO: 108119 - DNA, 120 bp, Artificial Sequence
  ENSG00000099840_3 (sequence is synthesized)
tcttccagtacgagaccatctcctgcaacaactgcacagactcgcacgtcgcctgctttggctataactgcgagtcctcggcgcagtggaagtcagctgtccagggcctcctgaactaca

SEQ ID NO: 108120 - DNA, 120 bp, Artificial Sequence
  ENSG00000099840_4 (sequence is synthesized)
taaataactggcacaaacaggacacgagcatgagcctggtatcgccagccttaaggtgtctggagcccccacacttggccaacctgaccttggaagatgctgctgagtgtctcaagcagc

SEQ ID NO: 108121 - DNA, 120 bp, Artificial Sequence
  ENSG00000099840_5 (sequence is synthesized)
actgacagcagctgggcctgccccagggcaacgtgggggcggagactcagctggacagcccctgcctgtcactctggagctgggctgctgctgcctcaggaccccctctccgaccccgga

SEQ ID NO: 108122 - DNA, 120 bp, Artificial Sequence
  ENSG00000099840_6 (sequence is synthesized)
cagagctgagctggccagggccaggagggcgggagggagggaatgggggtgggctgtgcgcagcatcagcgcctgggcaggtccgcagagctgcgggatgtgattaaagtccctgatgtt

SEQ ID NO: 108123 - DNA, 120 bp, Artificial Sequence
  ENSG00000099840_7 (sequence is synthesized)
acacaggcagtgtgtgtatgtgagcacctcgtgggtgagtatgtgtggggcacaggctggctccctcagctcccacgtcctagaggggctcccgaggaggtggaacctcaacccagctct

SEQ ID NO: 108124 - DNA, 120 bp, Artificial Sequence
  ENSG00000099840_8 (sequence is synthesized)
gcgcaggaggcggctgcagtccttttctccctcaaaggtctccgaccctcagctggaggcgggcatctttcctaaagggtccccatagggtctggttccaccccatcccaggtctgtggt

SEQ ID NO: 108125 - DNA, 120 bp, Artificial Sequence
  ENSG00000099840_9 (sequence is synthesized)
cagagcctgggagggttccctacgatggttaggggtgccccatggaggggctgactgccccacattgcctttcagacaggacacgagcatgaggtaaggccgccctgacctggacttcag

SEQ ID NO: 108126 - DNA, 120 bp, Artificial Sequence
  ENSG00000099840_10 (sequence is synthesized)
ggctctccctatacctgggacacctgctggatgtcacctctgcaaccacacccatgtggtggtttcatgaacagaccacgctcctctgccttctcctggcctgggacacacagagccacc

SEQ ID NO: 108127 - DNA, 120 bp, Artificial Sequence
  ENSG00000099840_11 (sequence is synthesized)
ggaggagggcagctctccagggagggacccagcctagcacctgaaggatcaatgccatcaccccgcggggacctcccctaagtagcccccagaggcgctgggagtgttgccaccgccctc

SEQ ID NO: 108128 - DNA, 120 bp, Artificial Sequence
  ENSG00000099840_12 (sequence is synthesized)
ccctgaagtttgctccatctcacgctgggggtcaacctggggaccccttccctccgggccatggacacacatacatgaaaaccaggccgcatcgactgtcagcaccgctgtggcatcttc

SEQ ID NO: 108129 - DNA, 120 bp, Artificial Sequence
  ENSG00000099840_13 (sequence is synthesized)
tcccaggctctccttggagggggctccccgccttccacctggctgtcatcgggtagggcggggccgtgggttcaggggcgcaccacttccaagcctgtgtcccacaggtcctcggcgcag

SEQ ID NO: 108130 - DNA, 120 bp, Artificial Sequence
  ENSG00000099840_14 (sequence is synthesized)
accctgctgacatcccaggcacgagggtgtcgtggatgtggccacacataggaccacacgtcccagctgggaggagaggcctggggcccccagggagggaggcagggggtgggggacatg

SEQ ID NO: 108131 - DNA, 120 bp, Artificial Sequence
  ENSG00000099840_15 (sequence is synthesized)
ccccaacgagctgcgaaacatcttccgggagcaggtgcacctcatccagaacgccatcatcgaaagccgcatcgactgtcagcaccgctgtggtaagcaaggctccgtccaggctgaggg

SEQ ID NO: 108132 - DNA, 120 bp, Artificial Sequence
  ENSG00000099840_16 (sequence is synthesized)
ctggcacaaaccacgctcctctgccttctcctggcctgggacacacagagccaccccggccttgtgagtgacccagagaagggaggcctcgggagaaggggtgctcgtaagccaacacca

SEQ ID NO: 108133 - DNA, 120 bp, Artificial Sequence
  ENSG00000099840_17 (sequence is synthesized)
tcccagactcggtcccgcgggctttaaggggcccgggcggcgaaggcgcacggagccaagttccgggcagcagccctgggatgccctgagccgggccgggcggaggtctccgttgcctag

SEQ ID NO: 108134 - DNA, 120 bp, Artificial Sequence
  ENSG00000099840_18 (sequence is synthesized)
cggcctgtgggcggagcctgcaccgtggctgcgacacggggcggggcctcagcgggagccggccgaggagcgggcaccggccattggcacaggcacgggccattggcgcatgcgtagggc

SEQ ID NO: 108135 - DNA, 120 bp, Artificial Sequence
  ENSG00000099840_19 (sequence is synthesized)
catgcgtagggcgcggccttggggcggggcccacccagtggcggagtcttctgaggggcgggtcgtgggcggggcctggaggcggagccggcgccgtcagtagtcggctgaggacggagg

SEQ ID NO: 108136 - DNA, 120 bp, Artificial Sequence
  ENSG00000099849_0 (sequence is synthesized)
gcgccggagcgggtctccaggctggcgagcgcccaggtgagccgcgccgggtccccggtacttgggagcgcggggcgcgcctcgagccggccggacgccgactccaactggggagagttt

SEQ ID NO: 108137 - DNA, 120 bp, Artificial Sequence
  ENSG00000099849_1 (sequence is synthesized)
ggacgccgactccaactggggagagttttccgcgatgcccggacggagagcgggggcggcgccgcacctgcgcccgccctgcggaacggggacgccctggctcccgccaggctggggtcg

SEQ ID NO: 108138 - DNA, 120 bp, Artificial Sequence
  ENSG00000099849_2 (sequence is synthesized)
gcgggcttcggtgcccgcggcggggaccgggactttcggggcgagcgcagcgattaggcggcagcggcggggctccccgggctggcgggggctgctcagacccggagtctgctccatctg

SEQ ID NO: 108139 - DNA, 120 bp, Artificial Sequence
  ENSG00000099849_3 (sequence is synthesized)
ctgctccatctgcagggtcgaggtctgggttgcgaccccgagcgcctctgcggcctgagcaggtcggggtggggcgttcccatgccggcggccgcggggcctggcgtgcgggcgcctccg

SEQ ID NO: 108140 - DNA, 120 bp, Artificial Sequence
  ENSG00000099849_4 (sequence is synthesized)
ggggagggggcagtgtcctccgagccaggacaggcatgttgttgggactggcggccatggagctgaaggtgtgggtggatggcatccagcgtgtggtctgtggggtctcagagcagacca

SEQ ID NO: 108141 - DNA, 120 bp, Artificial Sequence
  ENSG00000099849_5 (sequence is synthesized)
cctgccaggaagtggtcatcgcactagcccaagcaataggccagactggccgctttgtgcttgtgcagcggcttcgggagaaggagcggcagttgctgccacaagagtgtccagtgggcg

SEQ ID NO: 108142 - DNA, 120 bp, Artificial Sequence
  ENSG00000099849_6 (sequence is synthesized)
cccaggccacctgcggacagtttgccagcgatgtccagtttgtcctgaggcgcacagggcccagcctagctgggaggccctcctcagacagctgtccacccccggaacgctgcctaattc

SEQ ID NO: 108143 - DNA, 120 bp, Artificial Sequence
  ENSG00000099849_7 (sequence is synthesized)
gtgccagcctccctgtaaagccacgggctgcgctgggctgtgagccccgcaaaacactgacccccgagccagcccccagcctctcacgccctgggcctgcggcccctgtgacacccacac

SEQ ID NO: 108144 - DNA, 120 bp, Artificial Sequence
  ENSG00000099849_8 (sequence is synthesized)
ggagcaggcccgggagcgagagggacaggcacgcctgcaggcactaagtgcggccactgctgagcatgccgcccggctgcaggccctggacgctcaggcccgtgccctggaggctgagct

SEQ ID NO: 108145 - DNA, 120 bp, Artificial Sequence
  ENSG00000099849_9 (sequence is synthesized)
gcagctggcagcggaggcccctgggcccccctcacctatggcatctgccactgagcgcctgcaccaggacctggctgttcaggagcggcagagtgcggaggtgcagggcagcctggctct

SEQ ID NO: 108146 - DNA, 120 bp, Artificial Sequence
  ENSG00000099849_10 (sequence is synthesized)
ggtgagccgggccctggaggcagcagagcgagccttgcaggctcaggctcaggagctggaggagctgaaccgagagctccgtcagtgcaacctgcagcagttcatccagcagaccggggc

SEQ ID NO: 108147 - DNA, 120 bp, Artificial Sequence
  ENSG00000099849_11 (sequence is synthesized)
tgcgctgccaccgcccccacggcctgacaggggccctcctggcactcagggccctctgcctccagccagagaggagtccctcctgggcgctccctctgagtcccatgctggtgcccagcc

SEQ ID NO: 108148 - DNA, 120 bp, Artificial Sequence
  ENSG00000099849_12 (sequence is synthesized)
taggccccgaggtggcccccatgacgcagaactcctggaggtagcagcagctcctgccccagagtggtgtcctctggcagcccagccccaggctctgtgacagcctagtgagggctgcaa

SEQ ID NO: 108149 - DNA, 120 bp, Artificial Sequence
  ENSG00000099849_13 (sequence is synthesized)
gaccatcctgcccggaccacagaaggagagttggcggtcacagagggctcctctgccaggcagtgggaagccctgggtttggcctcaggagctgggggtgcagtgggggactgccctagt

SEQ ID NO: 108150 - DNA, 120 bp, Artificial Sequence
  ENSG00000099849_14 (sequence is synthesized)
ccttgccaggtcgccagcaccctggagaagcatggggcgtagccagctcggaacttgccaggccccaaaggccacgactgcctgttggggacaggagatgcatggacagtgtgctcaagc

SEQ ID NO: 108151 - DNA, 120 bp, Artificial Sequence
  ENSG00000099849_15 (sequence is synthesized)
tgtgggcatgtgcttgcctgcgggagaggtccttcactgtgtgtacacagcaagagcatgtgtgtgccacttcccctaccccaacgtgaaaacctcaataaactgcccgaagcagcttga

SEQ ID NO: 108152 - DNA, 120 bp, Artificial Sequence
  ENSG00000099849_16 (sequence is synthesized)
tgacaggggccctcctggcactcaggtcggagtggttctggggggaggctgggaggtgaggacctggcccagccccactccaagctgacttcccaacccacagggccctctgcctccagc

SEQ ID NO: 108153 - DNA, 120 bp, Artificial Sequence
  ENSG00000099849_17 (sequence is synthesized)
cagagaggagtccctcctgggcgctccctctgagtcccatgctggtgcccagcctaggccccgagggtatgtctgtgccccacctccccctggggcaccgggccctcctgtggctgcagc

SEQ ID NO: 108154 - DNA, 120 bp, Artificial Sequence
  ENSG00000099849_18 (sequence is synthesized)
tcccgcaccaggactctgcgcccgccagctccgcagggctccacctccctcgccgggactggtgaccctgcgaccccgcgacccctgcgcgtccagactactgcagctgcggacaggcat

SEQ ID NO: 108155 - DNA, 120 bp, Artificial Sequence
  ENSG00000099849_19 (sequence is synthesized)
aggaagctggtgaagtgggggaggatgcgtgctccggagggccgccaccccaggaatgtgtggctggcgggtggggctggcacaggagggtggggcccgtgcggaggggcggcagcccag

SEQ ID NO: 108156 - DNA, 120 bp, Artificial Sequence
  ENSG00000099860_0 (sequence is synthesized)
agatcgccgaagcgtcggactaccgttggtttccgcaacttcctggattatcctcgccaaggactttgcaatatatttttccgccttttctggaaggatttcgctgcttcccgaaggtct

SEQ ID NO: 108157 - DNA, 120 bp, Artificial Sequence
  ENSG00000099860_1 (sequence is synthesized)
tggacgagcgctctagctctgtgggaaggttttgggctctctggctcggattttgcaatttctccctggggactgccgtggagccgcatccactgtggattataattgcaacatgacgct

SEQ ID NO: 108158 - DNA, 120 bp, Artificial Sequence
  ENSG00000099860_2 (sequence is synthesized)
ggaagagctcgtggcgtgcgacaacgcggcgcagaagatgcagacggtgaccgccgcggtggaggagcttttggtggccgctcagcgccaggatcgcctcacagtgggggtgtacgagtc

SEQ ID NO: 108159 - DNA, 120 bp, Artificial Sequence
  ENSG00000099860_3 (sequence is synthesized)
ggccaagttgatgaatgtggacccagacagcgtggtcctctgcctcttggccattgacgaggaggaggaggatgacatcgccctgcaaatccacttcacgctcatccagtccttctgctg

SEQ ID NO: 108160 - DNA, 120 bp, Artificial Sequence
  ENSG00000099860_4 (sequence is synthesized)
tgacaacgacatcaacatcgtgcgggtgtcgggcatgcagcgcctggcgcagctcctgggagagccggccgagacccagggcaccaccgaggcccgagacctgcattgtctcctggtcac

SEQ ID NO: 108161 - DNA, 120 bp, Artificial Sequence
  ENSG00000099860_5 (sequence is synthesized)
ctactgcgaagaaagccggggcaacaaccagtgggtcccctacatctctcttcaggaacgctgaggcccttcccagcagcagaatctgttgagttgctgccacaaacaaaaaatacaata

SEQ ID NO: 108162 - DNA, 120 bp, Artificial Sequence
  ENSG00000099860_6 (sequence is synthesized)
aatatttgaaccccctcccccccagcacaacccccccaaaacaacccaacccacgaggaccatcgggggcagagtcgttggagactgaagaggaagaggaggaggagaaggggagtgagc

SEQ ID NO: 108163 - DNA, 120 bp, Artificial Sequence
  ENSG00000099860_7 (sequence is synthesized)
ggccgcccccagggcggagatccaggagctggcggccgccgatccgatggagaaggggggacccaggccagcaggagacaggacccccgaagctgaggccttgggatggagcagaagccg

SEQ ID NO: 108164 - DNA, 120 bp, Artificial Sequence
  ENSG00000099860_8 (sequence is synthesized)
gagtggcggggcacgctgccgccttccccatcacggagggtccagactgtccactcgggggtggagtgagactgactgcaagccccaccctccttgagactggagctggcgtctgcatac

SEQ ID NO: 108165 - DNA, 120 bp, Artificial Sequence
  ENSG00000099860_9 (sequence is synthesized)
gagagacttggttgaacttggttggtccttgtctgcaccctcgacaagaccacactttgggacttgggagctggggctgaagttgctctgtacccatgaactcccagtttgcgaattata

SEQ ID NO: 108166 - DNA, 120 bp, Artificial Sequence
  ENSG00000099860_10 (sequence is synthesized)
gagacaatctattttgttacttgcacttgttattcgaaccactgagagcgagatgggaagcatagatatctatatttttatttctactatgagggccttgtaataaatttctaaagcctc

SEQ ID NO: 108167 - DNA, 120 bp, Artificial Sequence
  ENSG00000099860_11 (sequence is synthesized)
ggccaagttgatgaatgtgtgagtcagacccccttcccgggctgggcgcgggtgggacgggacctcccctccgctctggacgctttccgcacgcttgtcttgcatggagctgggacttcc

SEQ ID NO: 108168 - DNA, 120 bp, Artificial Sequence
  ENSG00000099860_12 (sequence is synthesized)
ccaagtgccccccgctgtggatgcagagcttctctgccgttttgtggatcgggggctgccgtatcctgatgtatcgtctgcaaacacccctcccgccgtgggcctgtctccccctacccc

SEQ ID NO: 108169 - DNA, 120 bp, Artificial Sequence
  ENSG00000099860_13 (sequence is synthesized)
atactttgaaccgtgtgccctcccctccccccaccgtcaccagcttgcagaggcaatcccctgcacccttgcagtttctcttttgctcttgcacgctccttttttgcaaactccccctgc

SEQ ID NO: 108170 - DNA, 120 bp, Artificial Sequence
  ENSG00000099860_14 (sequence is synthesized)
gtgtttgtcaacaaagtcgggctgactggtcctgcacagctcagcgctcagccacgtttggcatgtcccgtgggcagccgggctggggcctcctcacccaggaagctattttgagcctga

SEQ ID NO: 108171 - DNA, 120 bp, Artificial Sequence
  ENSG00000099860_15 (sequence is synthesized)
agaagtaagtagccggggctgccgccgcctgaggtcagccgggacgggatgggtcgggttgggccgggccgggagcggaacgtagcacccggtggtccgcccgtcactgatccctctttc

SEQ ID NO: 108172 - DNA, 80 bp, Artificial Sequence
  ENSG00000099864_0 (sequence is synthesized)
gcgcccgccgccgcccggacaataaacagcagctttgcgcggggcgatgcccgagccggtgccgccgcccccgcgccgcg

SEQ ID NO: 108173 - DNA, 120 bp, Artificial Sequence
  ENSG00000099864_1 (sequence is synthesized)
cgcgccacccgcgcccgcccccgcccggcaccgcggacccacccggacctcggcggggagatggaggtcctggcggcagagaccacgtcccagcaggagcggctgcaggccatcgcagag

SEQ ID NO: 108174 - DNA, 120 bp, Artificial Sequence
  ENSG00000099864_2 (sequence is synthesized)
cccagcaggagcggctgcaggccatcgcagagaagcggaagcggcaggcggagatcgagaacaagcgccggcagctggaggacgagcggaggcagctgcagcacctgaagtccaaggcac

SEQ ID NO: 108175 - DNA, 120 bp, Artificial Sequence
  ENSG00000099864_3 (sequence is synthesized)
tgcgggagcgctggctgctggaggggacgccgtcctcggcctcagagggggatgaggacctgaggaggcagatgcaggacgacgagcagaagacacggctgctggaggactcggtgtcca

SEQ ID NO: 108176 - DNA, 120 bp, Artificial Sequence
  ENSG00000099864_4 (sequence is synthesized)
ggttggagaaggaaattgaggtgctggagcgtggagactccgccccagccactgccaaggagaacgcggcggccccgagcccagtccgggccccagccccgagtccagccaaggaggagc

SEQ ID NO: 108177 - DNA, 120 bp, Artificial Sequence
  ENSG00000099864_5 (sequence is synthesized)
gcaagacagaggtggtgatgaattcacagcagacgccggtgggcacgcccaaagacaagcgagtctccaacacgcccctgaggacggttgacggctcccccatgatgaaggcagccatgt

SEQ ID NO: 108178 - DNA, 120 bp, Artificial Sequence
  ENSG00000099864_6 (sequence is synthesized)
actcggttgagatcactgtggagaaggacaaggtgacaggggagaccagggtgctgtccagcaccacgctgctccctcggcagccgctccctctgggcatcaaagtctacgaggacgaga

SEQ ID NO: 108179 - DNA, 120 bp, Artificial Sequence
  ENSG00000099864_7 (sequence is synthesized)
ccaaagtggtccatgctgtggacggcaccgccgagaacgggatccaccccctgagctcctccgaggtggacgaactcatccacaaagcggacgaggtcacgctgagcgaggcagggtcca

SEQ ID NO: 108180 - DNA, 120 bp, Artificial Sequence
  ENSG00000099864_8 (sequence is synthesized)
gctgagcgaggcagggtccacggccggggcggcagagacccggggggctgtggagggggcagcccggaccacgccctcccggcgggagatcaccggtgtgcaggcacagccaggcgaggc

SEQ ID NO: 108181 - DNA, 120 bp, Artificial Sequence
  ENSG00000099864_9 (sequence is synthesized)
tccagcccggccaggagcccccggtcacaatgatcttcatgggttaccagaacgtggaggatgaggccgagaccaagaaggtgctgggccttcaagataccatcacggcggagctggtgg

SEQ ID NO: 108182 - DNA, 120 bp, Artificial Sequence
  ENSG00000099864_10 (sequence is synthesized)
tcatcgaagacgcggctgagcccaaggagcctgcaccacccaacggcagtgctgccgagcctcccacggaggccgcctccagggaagagaatcaggcggggcccgaggccaccaccagcg

SEQ ID NO: 108183 - DNA, 120 bp, Artificial Sequence
  ENSG00000099864_11 (sequence is synthesized)
acccccaggacctcgacatgaagaagcaccgttgtaaatgctgctccatcatgtgagccggcccccgagaccccggcccccaccccacaccacagacacccaccagcccggcccctcccg

SEQ ID NO: 108184 - DNA, 120 bp, Artificial Sequence
  ENSG00000099864_12 (sequence is synthesized)
ccctccacccacagcctcacgggtccaggacttggcgtgttgttacatgttccttccgagttttctttcgctggaaagagggacaggggcccccacccgtcaccacgccccaacactccc

SEQ ID NO: 108185 - DNA, 120 bp, Artificial Sequence
  ENSG00000099864_13 (sequence is synthesized)
cccgaaccagagccgtgcacttgtgcctggtaggagagagacaggacagacccgcttttcccgagacaaggaccccccatgtcacggcagcttcacagacgcggctcgcgcccaccgggg

SEQ ID NO: 108186 - DNA, 120 bp, Artificial Sequence
  ENSG00000099864_14 (sequence is synthesized)
tcctggcgggtgggacccgcagcctccacgcggcccaggccagcctgccaccctctgggcctcctacctgtgcctttctctgaggggacaccccgccagagagggccccgggagccgggg

SEQ ID NO: 108187 - DNA, 120 bp, Artificial Sequence
  ENSG00000099864_15 (sequence is synthesized)
gtgggtactgaggcctgctcaggccctggaagtgaggctctatggggttccctggccaaggcgctggccccccaatctcaggcagttggggtgaggccgtgcctctttgggggctaaagg

SEQ ID NO: 108188 - DNA, 120 bp, Artificial Sequence
  ENSG00000099864_16 (sequence is synthesized)
tcttgggtggaggacaggcccctctgctgtgcccctatgccctgtgtgggcccaaccagtggacaatggagtctgggggagggggaaccccggggacatgcccccacccgggaggggccg

SEQ ID NO: 108189 - DNA, 120 bp, Artificial Sequence
  ENSG00000099864_17 (sequence is synthesized)
gtaacccctgggctatcttctagacggggcgaaccaggggtcattgacctgccccctgcacagggcagggaccgagtgagccactccttgtcccgagctcccgcccccactgggccctcc

SEQ ID NO: 108190 - DNA, 120 bp, Artificial Sequence
  ENSG00000099864_18 (sequence is synthesized)
ttcctcctggtgctaatttggggaccccaggggccgcccccggcctcttctccatcctgcttggaccagggtcctgggtcttcccaaccataccccgagatcaggccccacctgccagct

SEQ ID NO: 108191 - DNA, 120 bp, Artificial Sequence
  ENSG00000099864_19 (sequence is synthesized)
ctactgggcttggagcacgtccgggcagtggagggagggacacagcctgggacaggaagcctcttgggttggagcaggagaccctcatttgccacccagaccaatgtgagcctgccccca

SEQ ID NO: 108192 - DNA, 120 bp, Artificial Sequence
  ENSG00000099864_20 (sequence is synthesized)
gccccctctcattggaagtggcaaggggcttccctcctgggggcagctacactcgtccccagaggcacattcgtgcacattctcacagacaccgtctcacacgttggctttggacaacca

SEQ ID NO: 108193 - DNA, 120 bp, Artificial Sequence
  ENSG00000099864_21 (sequence is synthesized)
ggccccaacttggtccctgccctagggacctccagcctggtgcccagtgctcaggccacctcctggtccagtcaccacctgcagcctcggcagggcaggtacaggggccacctcggatgg

SEQ ID NO: 108194 - DNA, 120 bp, Artificial Sequence
  ENSG00000099864_22 (sequence is synthesized)
gagcctgggtccctgcctccgctctgcccctgggtggctgggaggagaggccctctcgggggtgacctgggcgtcagccgtggaaccccctcctcctccctggagtctgcctgagtccct

SEQ ID NO: 108195 - DNA, 120 bp, Artificial Sequence
  ENSG00000099864_23 (sequence is synthesized)
cgagccgcgagccttcgctgaagtgcccttgctataaccccctctgcttctggtgtgtgacgaggcccccgatgttcttgattttcccagagaagcaaataaacagcgtgaacagcccca

SEQ ID NO: 108196 - DNA, 120 bp, Artificial Sequence
  ENSG00000099864_24 (sequence is synthesized)
gcacgcccaaaggtaggacctctggaaggaactcgtggggcctcggcgcactctggtggccagagaggggatggcagggcggggagtgaagctacaaagttgctcggtgcctcacgcctg

SEQ ID NO: 108197 - DNA, 69 bp, Artificial Sequence
  ENSG00000099864_25 (sequence is synthesized)
aggccgaggcgggttcagtgtctactgaaaaaatgcaaagacaattagccgggtgtggtggctcatgcc

SEQ ID NO: 108198 - DNA, 120 bp, Artificial Sequence
  ENSG00000099864_26 (sequence is synthesized)
actttgggaggctgaggcaggaggatcgatcgcttgagcccaggagttcaagagcatgctgggcaacacagggagaccctgtctctgccaaacataaaaaaattagccgccggccaggcc

SEQ ID NO: 108199 - DNA, 87 bp, Artificial Sequence
  ENSG00000099864_27 (sequence is synthesized)
ccctgtctctgccaaacataaaaaaattagccgccggccaggcccagtggctcagacctgtaaccccagcgctctgggaggctgaga

SEQ ID NO: 108200 - DNA, 120 bp, Artificial Sequence
  ENSG00000099864_28 (sequence is synthesized)
gcgacagagcgagaccctgtctgtaaactgcatttcacggaacgtgtccgcttctgtatcgatagcgggacagccaccagccgggattgacgctggcgtctgaagtgcttctggcctggt

SEQ ID NO: 108201 - DNA, 120 bp, Artificial Sequence
  ENSG00000099864_29 (sequence is synthesized)
ttgttgtgtgttaattattcataaggagagtgtcttcttgtcttactgtagaattaaaaattaatcattaaaaaaatccagacaggcctctcagggattttgtgaaaatcactgggctga

SEQ ID NO: 108202 - DNA, 120 bp, Artificial Sequence
  ENSG00000099864_30 (sequence is synthesized)
caggcttgagccaccacacctggcctagggtctgattctctttttgagaagctgcctctggctggcgggtggagagggagctgtgagggggcagggagttggcagggaacactagaggcc

SEQ ID NO: 108203 - DNA, 120 bp, Artificial Sequence
  ENSG00000099864_31 (sequence is synthesized)
tgggctagggtggggaacttggggtaggcaggaagcgagggcccgggcctcaagggaacgcacagtggatggttcactgcctgcatcacccgttgctggggctgaccgagaactccagct

SEQ ID NO: 108204 - DNA, 120 bp, Artificial Sequence
  ENSG00000099864_32 (sequence is synthesized)
accccacccggtgaaggcagctgaacccagcctccctgaggagggagaagggaaagccacagagggcgcagctggtgttcccgggcccctgggaggcaccgggaaggggtcctggcggca

SEQ ID NO: 108205 - DNA, 120 bp, Artificial Sequence
  ENSG00000099864_33 (sequence is synthesized)
ggcgctgggctcggcgcctgcccgggcagggaccccctcgttctggctggagctgcccgggcgtgggttctggaaggacgagtgcgacgcccccatcccacacacgcccctcccgcctcg

SEQ ID NO: 108206 - DNA, 120 bp, Artificial Sequence
  ENSG00000099864_34 (sequence is synthesized)
gacagggcccgccctgctcgctgggtgaccttggccgttgcgtaacctctctgggcccttccaacaccaacgccccgcaccgcggaggcctctgcggggctcccgtcgggtttgggcctc

SEQ ID NO: 108207 - DNA, 120 bp, Artificial Sequence
  ENSG00000099864_35 (sequence is synthesized)
cgtaaaaagcatcgcggggacgggaggcctgtgcgcgccggggtgggcgtcgggcggggggcgtggcgctccaggggctctgcgcggctgccgggagccagggaggctcggagacccagc

SEQ ID NO: 108208 - DNA, 120 bp, Artificial Sequence
  ENSG00000099864_36 (sequence is synthesized)
ctgggacccccagcagcaccaggaccgccgccgccctgagcttttccacgcctttgcccgggactcagctcctccgcccagcatggtcctggcggcagagaccacgtcccagcaggagcg

SEQ ID NO: 108209 - DNA, 120 bp, Artificial Sequence
  ENSG00000099866_0 (sequence is synthesized)
agaggggactgagcatggatttcggactggccctcctgctggcggggcttctggggctcctcctcggccagtccctccaggtgaagcccctgcaggtggagcccccggagccggtggtgg

SEQ ID NO: 108210 - DNA, 120 bp, Artificial Sequence
  ENSG00000099866_1 (sequence is synthesized)
agctcacctgccgcctggcctgcgcggaccgcggggcctcggtgcagtggcggggcctggacaccagcctgggcgcggtgcagtcggacacgggccgcagcgtcctcaccgtgcgcaacg

SEQ ID NO: 108211 - DNA, 120 bp, Artificial Sequence
  ENSG00000099866_2 (sequence is synthesized)
gcagcgtcctcaccgtgcgcaacgcctcgctgtcggcggccgggacccgcgtgtgcgtgggctcctgcgggggccgcaccttccagcacaccgtgcagctccttgtgtacgccttcccgg

SEQ ID NO: 108212 - DNA, 120 bp, Artificial Sequence
  ENSG00000099866_3 (sequence is synthesized)
accagctgaccgtctccccagcagccctggtgcctggtgacccggaggtggcctgtacggcccacaaagtcacgcccgtggaccccaacgcgctctccttctccctgctcgtcgggggcc

SEQ ID NO: 108213 - DNA, 120 bp, Artificial Sequence
  ENSG00000099866_4 (sequence is synthesized)
aggaactggagggggcgcaagccctgggcccggaggtgcaggaggaggaggaggagccccagggggacgaggacgtgctgttcagggtgacagagcgctggcggctgccgcccctgggga

SEQ ID NO: 108214 - DNA, 120 bp, Artificial Sequence
  ENSG00000099866_5 (sequence is synthesized)
cccctgtcccgcccgccctctactgccaggccacgatgaggctgcctggcttggagctcagccaccgccaggccatccccgtcctgcacagcccgacctccccggagcctcccgacacca

SEQ ID NO: 108215 - DNA, 120 bp, Artificial Sequence
  ENSG00000099866_6 (sequence is synthesized)
ccggagcccgccccccagcagggctccacacacacccccaggagcccaggctccaccaggactcgccgccctgagatctcccaggctgggcccacgcagggagaagtgatcccaacaggc

SEQ ID NO: 108216 - DNA, 120 bp, Artificial Sequence
  ENSG00000099866_7 (sequence is synthesized)
tcgtccaaacctgcgggtgaccagctgcccgcggctctgtggaccagcagtgcggtgctgggactgctgctcctggccttgcccacctatcacctctggaaacgctgccggcacctggct

SEQ ID NO: 108217 - DNA, 120 bp, Artificial Sequence
  ENSG00000099866_8 (sequence is synthesized)
gaggacgacacccacccaccagcttctctgaggcttctgccccaggtgtcggcctgggctgggttaagggggaccggccaggtcgggatcagcccctcctgagtggccagcctttccccc

SEQ ID NO: 108218 - DNA, 120 bp, Artificial Sequence
  ENSG00000099866_9 (sequence is synthesized)
tgtgaaagcaaaatagcttggaccccttcaagttgagaactggtcagggcaaacctgcctcccattctactcaaagtcatccctctgttcacagagatggatgcatgttctgattgcctc

SEQ ID NO: 108219 - DNA, 120 bp, Artificial Sequence
  ENSG00000099866_10 (sequence is synthesized)
tttggagaagctcatcagaaactcaaaagaaggccactgtttgtctcacctacccatgacctgaagcccctccctgagtggtccccacctttctggacggaaccacgtactttttacata

SEQ ID NO: 108220 - DNA, 120 bp, Artificial Sequence
  ENSG00000099866_11 (sequence is synthesized)
cattgattcatgtctcacgtctccctaaaaatgcgtaagaccaagctgtgccctgaccaccctgggcccctgtcgtcaggacctcctgaggctttggcaaataaacctcctaaaatgata

SEQ ID NO: 108221 - DNA, 120 bp, Artificial Sequence
  ENSG00000099866_12 (sequence is synthesized)
acccgcggaaaaggagggggagcggctggtcagctgcgccctgcgggtcgagaatgtcatcagcagggatggcggcgctttgagtgctgagcgcggccccgaccgggaccccctaccctt

SEQ ID NO: 108222 - DNA, 120 bp, Artificial Sequence
  ENSG00000099866_13 (sequence is synthesized)
ctcgcaggccgagccccgactcccgacccgccgtcgcagcccgcggccccgacctctgacccgccctcgcagcccgcggccccgacctctgacccgccctcccagccagaccctctacgc

SEQ ID NO: 108223 - DNA, 120 bp, Artificial Sequence
  ENSG00000099866_14 (sequence is synthesized)
ctctacgcccgacccgccctcgcagcccatggcccatcggcccggcagtggacgcagagcctcggccccgttccctccccggaccccccggacccgctctccgtcctccctgcagagccg

SEQ ID NO: 108224 - DNA, 120 bp, Artificial Sequence
  ENSG00000099866_15 (sequence is synthesized)
agggccttggcccagccccgcatcctccccgaccgtgctcgatccagcccgggtgtgctgcacccgaaacaggctcccgggggccgtcgggcctgtgggtgaccgtgcaggccaggatct

SEQ ID NO: 108225 - DNA, 120 bp, Artificial Sequence
  ENSG00000099866_16 (sequence is synthesized)
cccccttcccagtcgtgacaaccacagatggccccagatgccacgttagggttagtgcctcctgggggcgggattgcggccgggggagaaccaccctcccaacccgttaggaactgcagg

SEQ ID NO: 108226 - DNA, 120 bp, Artificial Sequence
  ENSG00000099866_17 (sequence is synthesized)
gacggagagcgcgctcgggatgtccagcactcagcgcgggttgggtggcgaatggagagcgagtcgtcctcagaggccgccggcctgcaggcgagaaccctcccagccaggaggctgcgg

SEQ ID NO: 108227 - DNA, 120 bp, Artificial Sequence
  ENSG00000099866_18 (sequence is synthesized)
ctctgcctgaaccccgacccagggcgaacacccacatttggcccctgcccggtgctgagagaggccagagcggcgtccccagaagcggagcgggagccccacgtccggcggccacgatag

SEQ ID NO: 108228 - DNA, 80 bp, Artificial Sequence
  ENSG00000099875_0 (sequence is synthesized)
cggctcctctcagcggcggtggcccaggtagaggggtccgcgctggcggcggcggcggcgctgttccccgcgcggtccgc

SEQ ID NO: 108229 - DNA, 80 bp, Artificial Sequence
  ENSG00000099875_1 (sequence is synthesized)
ggccgcccgccctcgggcctccccccgggccctcggtcccctcccccgctggcggggcccggacagaagatggtgcagaa

SEQ ID NO: 108230 - DNA, 120 bp, Artificial Sequence
  ENSG00000099875_2 (sequence is synthesized)
agaagatggtgcagaagaaaccagccgaacttcagggtttccaccgttcgttcaaggggcagaaccccttcgagctggccttctccctagaccagcccgaccacggagactctgactttg

SEQ ID NO: 108231 - DNA, 120 bp, Artificial Sequence
  ENSG00000099875_3 (sequence is synthesized)
gcctgcagtgctcagcccgccctgacatgcccgccagccagcccattgacatcccggacgccaagaagaggggcaagaagaagaagcgcggccgggccaccgacagcttctcgggcaggt

SEQ ID NO: 108232 - DNA, 120 bp, Artificial Sequence
  ENSG00000099875_4 (sequence is synthesized)
ttgaagacgtctaccagctgcaggaagatgtgctgggggagggcgctcatgcccgagtgcagacctgcatcaacctgatcaccagccaggagtacgccgtcaagatcattgagaagcagc

SEQ ID NO: 108233 - DNA, 120 bp, Artificial Sequence
  ENSG00000099875_5 (sequence is synthesized)
caggccacattcggagcagggttttcagggaggtggagatgctgtaccagtgccagggacacaggaacgtcctagagctgattgagttcttcgaggaggaggaccgcttctacctggtgt

SEQ ID NO: 108234 - DNA, 120 bp, Artificial Sequence
  ENSG00000099875_6 (sequence is synthesized)
ttgagaagatgcggggaggctccatcctgagccacatccacaagcgccggcacttcaacgagctggaggccagcgtggtggtgcaggacgtggccagcgccttggactttctgcataaca

SEQ ID NO: 108235 - DNA, 120 bp, Artificial Sequence
  ENSG00000099875_7 (sequence is synthesized)
aaggcatcgcccacagggacctaaagccggaaaacatcctctgtgagcaccccaaccaggtctcccccgtgaagatctgtgacttcgacctgggcagcggcatcaaactcaacggggact

SEQ ID NO: 108236 - DNA, 120 bp, Artificial Sequence
  ENSG00000099875_8 (sequence is synthesized)
gctcccctatctccaccccggagctgctcactccgtgcggctcggcggagtacatggccccggaggtagtggaggccttcagcgaggaggctagcatctacgacaagcgctgcgacctgt

SEQ ID NO: 108237 - DNA, 120 bp, Artificial Sequence
  ENSG00000099875_9 (sequence is synthesized)
ggagcctgggcgtcatcttgtatatcctactcagcggctacccgcccttcgtgggccgctgtggcagcgactgcggctgggaccgcggcgaggcctgccctgcctgccagaacatgctgt

SEQ ID NO: 108238 - DNA, 120 bp, Artificial Sequence
  ENSG00000099875_10 (sequence is synthesized)
ttgagagcatccaggagggcaagtacgagttccccgacaaggactgggcccacatctcctgcgctgccaaagacctcatctccaagctgctggtccgtgacgccaagcagaggctgagtg

SEQ ID NO: 108239 - DNA, 120 bp, Artificial Sequence
  ENSG00000099875_11 (sequence is synthesized)
ccgcccaagtcctgcagcacccctgggttcaggggtgcgccccggagaacaccttgcccactcccatggtcctgcagaggaacagctgtgccaaagacctcacgtccttcgcggctgagg

SEQ ID NO: 108240 - DNA, 120 bp, Artificial Sequence
  ENSG00000099875_12 (sequence is synthesized)
ccattgccatgaaccggcagctggcccagcacgacgaggacctggctgaggaggaggccgcggggcagggccagcccgtcctggtccgagctacctcacgctgcctgcagctgtctccac

SEQ ID NO: 108241 - DNA, 120 bp, Artificial Sequence
  ENSG00000099875_13 (sequence is synthesized)
cctcccagtccaagctggcgcagcggcggcaaagggccagtctgtcctcggccccagtggtcctggtgggagaccacgcctgaccctcccatctcccctctgtacataggtcacccgtcc

SEQ ID NO: 108242 - DNA, 120 bp, Artificial Sequence
  ENSG00000099875_14 (sequence is synthesized)
cccaatcaaatctaaaggttttttaagctatcgccagccggtgtccagcgggctgcccctcctctgcctggattcccaggcactaagctcagctgaggggggtgttttatagaaggtttt

SEQ ID NO: 108243 - DNA, 120 bp, Artificial Sequence
  ENSG00000099875_15 (sequence is synthesized)
ggatggttaaaagcattgcaggcacccgggaaggtgagcagagggtaggtgggtgggcttgtcccctccccggtcccccgccctgctcacctctactatgaaggtgcccccaggtcacct

SEQ ID NO: 108244 - DNA, 120 bp, Artificial Sequence
  ENSG00000099875_16 (sequence is synthesized)
gtgctgcccgccatctgcccacgtggcttgcagtgactcaggagagcaggcccacagcgtttgccatcttgcagagctggggaggggcacaggaccctgccctcgtgttccctcccagcc

SEQ ID NO: 108245 - DNA, 120 bp, Artificial Sequence
  ENSG00000099875_17 (sequence is synthesized)
cgcagtatttcagggacaggctcttcccctctatccctcaccctgagagcacccctggtggcttggttggggaagggaggggctgcctgtctctggaggtgtcaggcaggcaggtggcag

SEQ ID NO: 108246 - DNA, 120 bp, Artificial Sequence
  ENSG00000099875_18 (sequence is synthesized)
gcagctcacccacccaccccatgggatcccccagcccttcacccgcgcctgccttgtccccatgatagttgacaatcggggcttcctgcaaggcccgtctgtctgtccaggactcctggt

SEQ ID NO: 108247 - DNA, 120 bp, Artificial Sequence
  ENSG00000099875_19 (sequence is synthesized)
ggccagattcggcctccgaccttgaccttaaactgcagctgaccccaggggctcgccgctgcccctcccctccacaccaaggcctgagacagcaggagccccgcctggcccgaagccgtt

SEQ ID NO: 108248 - DNA, 120 bp, Artificial Sequence
  ENSG00000099875_20 (sequence is synthesized)
tccaccgcagcaggcagaggggctggacaggcactgtcagccaatgtggggggtcctgaagacacccccttggggcacccgagtgccccttctcagggctcagtctgaccgtagccacgt

SEQ ID NO: 108249 - DNA, 120 bp, Artificial Sequence
  ENSG00000099875_21 (sequence is synthesized)
cctgcctcgcgccgcccctcgggcctgacctggaagctccgtcagctccgtccttgtccttagagctgagcccagaccccggggtctggccgaatcctcacccccagggcagtgtttttg

SEQ ID NO: 108250 - DNA, 120 bp, Artificial Sequence
  ENSG00000099875_22 (sequence is synthesized)
gtctgccaccttcaggaaaacggctgcggcctcggcctcccttcgggcacccaggaatgcgggggtctgctcagtccccccaccctccatgctccaacccccgggggctgcggagcctgc

SEQ ID NO: 108251 - DNA, 120 bp, Artificial Sequence
  ENSG00000099875_23 (sequence is synthesized)
tgccccctccccgcgggtggggacgttctatgcaatacagggttccactttagaagtgcgcgcggctagggtcaccgcccgcccttcccggcgcagcccccgagctccacagctggggca

SEQ ID NO: 108252 - DNA, 120 bp, Artificial Sequence
  ENSG00000099875_24 (sequence is synthesized)
gcccctctggcttctaaatccgcggtcgggattcttcctcctgtttagttttttagtttttccttaaaaaaaaacaacacatcgatggactttgcttccctgttcttgaagaatacttga

SEQ ID NO: 108253 - DNA, 120 bp, Artificial Sequence
  ENSG00000099875_25 (sequence is synthesized)
atgtcggggggcctgggggtgggggcctcggagaccgtctgcctggccctgctgcccctcctgaatctcgtatgatggtcacagtccggtggccgtgggggtgctctgccttccctggtc

SEQ ID NO: 108254 - DNA, 120 bp, Artificial Sequence
  ENSG00000099875_26 (sequence is synthesized)
cccactgcccatatctgtggactgccccttccaaagacccctggggggggtggggcattccgcccacccctttcccccatcacttctcgcctgtcagtgattccatgtttcgtaacgggg

SEQ ID NO: 108255 - DNA, 120 bp, Artificial Sequence
  ENSG00000099875_27 (sequence is synthesized)
gattctctgcctttttgtatcaaagaacaagcaaatggacccccgcccgctgcaggcgcccatagccatcgggtctctaaagctgagtggctagcagcgtttgtttgtttgttttttttt

SEQ ID NO: 108256 - DNA, 120 bp, Artificial Sequence
  ENSG00000099875_28 (sequence is synthesized)
ttttttctgaaggtgggacagtcacttcctcctccctccccacccctgtcgcatccacgtgcgacctggaggactggtcagaaccgttactgtgaatgagtgaagatcctggaggaccct

SEQ ID NO: 108257 - DNA, 120 bp, Artificial Sequence
  ENSG00000099875_29 (sequence is synthesized)
gggccccaggccagctcccatcgctgggggacggtgaacggccatgtgttaatgttacgatgtttttaaaagacaaaaaaaaaaaaaaaacctcaaaagtttttttaaagtgggggaaaa

SEQ ID NO: 108258 - DNA, 120 bp, Artificial Sequence
  ENSG00000099875_30 (sequence is synthesized)
acatccaagcactttaattccaatgtaccaggtgaactgacggagctcagaagttttcctttacaccaactgtcaatgccggaattttgtattctgttttgtaaagatttaataaaagtc

SEQ ID NO: 108259 - DNA, 120 bp, Artificial Sequence
  ENSG00000099875_31 (sequence is synthesized)
acccggagaactgctttggggtcggggaggcaggcaagcctggtgactcagtgaagctcccggtggggccctggtgctcagaggagccccagggtgggggctgggaggggggcatgaagc

SEQ ID NO: 108260 - DNA, 120 bp, Artificial Sequence
  ENSG00000099875_32 (sequence is synthesized)
cccttcccccagggccttcacagaccccaggggtcccctgaggggtgcctcttggtgaccacctacccccaccccgtttcccaggaacagctgtgccaaagacctcacgtccttcgcggc

SEQ ID NO: 108261 - DNA, 120 bp, Artificial Sequence
  ENSG00000099875_33 (sequence is synthesized)
ggggcggggtccgagccggctggcgcaggtgacccgcagttacccgggctcggttcccacgtaatgctgggaaaccccggctgacgcgcccctcccccgcccgcagtgcggctcggcgga

SEQ ID NO: 108262 - DNA, 120 bp, Artificial Sequence
  ENSG00000099875_34 (sequence is synthesized)
tgccctgggatgaggggtgcagccgaaatccccaccgcccgcctgtgcacggtgcccgctggccagccaggcggctcccaggagcagctactcagagaaccttcctggagggtggtgggg

SEQ ID NO: 108263 - DNA, 120 bp, Artificial Sequence
  ENSG00000099875_35 (sequence is synthesized)
acccacagcctgcagcaggctggagcgaagcgggcagcgagcccagctcacatagaccccagcctagcctgccgtcagtctcaagcccaggctgtgcctccacccttccctgtgtggcct

SEQ ID NO: 108264 - DNA, 120 bp, Artificial Sequence
  ENSG00000099875_36 (sequence is synthesized)
ccagtcgaggaggagtcgggtgtttctcctgccagaggtcatctgagctgagctgccaccccagggagtgaggatttactaaaaatagaagctggggtcactctgtgtccccaggcgagg

SEQ ID NO: 108265 - DNA, 120 bp, Artificial Sequence
  ENSG00000099875_37 (sequence is synthesized)
ggctgggggcctccaatctccttgcagaagcatccagagacccatgggttaagaggggggcggaggtgggtttgggctgggaacagccgggagagatggggcttggggctctgcccccac

SEQ ID NO: 108266 - DNA, 120 bp, Artificial Sequence
  ENSG00000099875_38 (sequence is synthesized)
cctcactgggtcctgtaacaccaggcctcagcctggcccagcctcgggttccctgggcagggggacatggagcctcaccatagggacctcggggtgggcgcttggctcccggggcaccca

SEQ ID NO: 108267 - DNA, 120 bp, Artificial Sequence
  ENSG00000099875_39 (sequence is synthesized)
caccccacccagcgccccaggcggccccagctgctctccagccctgcccccgcccactctcgttgcagtgcgccccggagaacaccttgcccactcccatggtcctgcagaggtaaggcc

SEQ ID NO: 108268 - DNA, 80 bp, Artificial Sequence
  ENSG00000099889_0 (sequence is synthesized)
ctcgggttgcgcgctgggcctggagggagggggcggcccccgcaccggtccgagttgcggccgcgtggactgcgacccgc

SEQ ID NO: 108269 - DNA, 120 bp, Artificial Sequence
  ENSG00000099889_1 (sequence is synthesized)
aacgccgctccccgcgcgccaacggacccggggaagcccttctggggtccgaggccgcgctgcggggccgcccacgctgcgctccaggagccagagcctgcagggtgggtgtcgggacat

SEQ ID NO: 108270 - DNA, 120 bp, Artificial Sequence
  ENSG00000099889_2 (sequence is synthesized)
agagcctgcagggtgggtgtcgggacatgctgatcttccctcaagacagctggcgggcgctctggtcatggaggactgcaatgtgcactcggccgccagcatcctggcctcggtgaagga

SEQ ID NO: 108271 - DNA, 120 bp, Artificial Sequence
  ENSG00000099889_3 (sequence is synthesized)
gcaggaggcccgcttcgagaggctgacacgggcactggagcaggagcggcgccatgttgccctacagctggagcgtgcccagcagcctggcatggtcagtggtggcatgggcagtgggca

SEQ ID NO: 108272 - DNA, 120 bp, Artificial Sequence
  ENSG00000099889_4 (sequence is synthesized)
gcccctgccaatggcctggcaacagctggtcctccaggagcagagcccaggcagccaggcctcactggccacgatgccggaggcacctgatgtgctggaggagaccgtgacggtggagga

SEQ ID NO: 108273 - DNA, 120 bp, Artificial Sequence
  ENSG00000099889_5 (sequence is synthesized)
ggaccccggcacacccacttcccatgtgtctattgtcacatccgaagatggcacaacccggcgcaccgagaccaaggtcaccaagactgtcaagacggtgaccactcggacagtacgcca

SEQ ID NO: 108274 - DNA, 120 bp, Artificial Sequence
  ENSG00000099889_6 (sequence is synthesized)
ggtgcccgtgggcccagatggactccccctgctggatggcggccccccactaggcccttttgcagatggtgccctggaccggcatttcctgctgcgtggtggtggcccagtggccacact

SEQ ID NO: 108275 - DNA, 120 bp, Artificial Sequence
  ENSG00000099889_7 (sequence is synthesized)
ctctcgagcctacctcagcagtgggggtggctttcccgaaggccccgagccccgggacagccccagctatggcagcctgtcccgagggctgggcatgcggcccccacgtgctggccccct

SEQ ID NO: 108276 - DNA, 120 bp, Artificial Sequence
  ENSG00000099889_8 (sequence is synthesized)
tggcccaggccctggtgatggctgcttcacactgcctggccaccgggaagccttcccggtgggtcctgagcctgggccaccaggtggccgctccctgcccgagcgcttccaggcagagcc

SEQ ID NO: 108277 - DNA, 120 bp, Artificial Sequence
  ENSG00000099889_9 (sequence is synthesized)
gtatggcttggaggatgacacgcgcagcctggccgctgatgacgagggtggccctgagctggagcctgactatggcacggccacaaggaggaggcctgagtgtgggcggggccttcatac

SEQ ID NO: 108278 - DNA, 120 bp, Artificial Sequence
  ENSG00000099889_10 (sequence is synthesized)
cagggcctacgaggacacagcagatgatggcggcgagctggcggacgagcggcctgcgttcccaatggtgacggcgcccctggcccagcctgaacggggcagcatgggcagcctggaccg

SEQ ID NO: 108279 - DNA, 120 bp, Artificial Sequence
  ENSG00000099889_11 (sequence is synthesized)
gctggtgcggcgctcgccctcagtggatagcgcccgcaaggagccgcgctggcgggaccctgagctgcctgaggtgctggccatgctgcggcaccccgtggaccccgtgaaggccaatgc

SEQ ID NO: 108280 - DNA, 120 bp, Artificial Sequence
  ENSG00000099889_12 (sequence is synthesized)
ggccgcctacctgcagcatctgtgctttgagaacgagggtgtcaagcggcgtgtacggcagttgcgggggctgccgctgcttgtggcactgctggaccacccgcgggctgaggtgcggcg

SEQ ID NO: 108281 - DNA, 120 bp, Artificial Sequence
  ENSG00000099889_13 (sequence is synthesized)
ccgggcctgtggggcactgcgcaacctctcctatggccgcgacactgacaacaaggccgccatccgggactgcggtggtgtgcctgccctggtgcgcctgctgagggctgcccgggacaa

SEQ ID NO: 108282 - DNA, 120 bp, Artificial Sequence
  ENSG00000099889_14 (sequence is synthesized)
cgaggtccgtgagcttgtcactggcaccctgtggaacctgtcatcctatgagcccctgaagatggtcatcattgaccatggcctgcagacgctgacccacgaggtgatcgtgccccactc

SEQ ID NO: 108283 - DNA, 120 bp, Artificial Sequence
  ENSG00000099889_15 (sequence is synthesized)
aggatgggagcgtgagcccaacgaggactccaagccacgggacgccgagtggacaactgtcttcaagaacacgtcgggctgcctgaggaatgtgagctccgatggtgctgaggcccggcg

SEQ ID NO: 108284 - DNA, 120 bp, Artificial Sequence
  ENSG00000099889_16 (sequence is synthesized)
ctgcgtgtgcatcatgcggaacctgtcctaccacgtgcacaaggaggtgcccggggccgacaggtaccaggaggccgagcccgggcccctgggcagtgctgtaggctcccagcgccggag

SEQ ID NO: 108285 - DNA, 120 bp, Artificial Sequence
  ENSG00000099889_17 (sequence is synthesized)
gcgggatgatgccagctgctttggaggcaagaaggccaaagaggagtggttccaccaaggaaagaaggatggtgagatggaccggaactttgacacgctagacctgcccaagcgaactga

SEQ ID NO: 108286 - DNA, 120 bp, Artificial Sequence
  ENSG00000099889_18 (sequence is synthesized)
ggccgccaaaggctttgagctgctgtaccagcccgaggtggtacgtctctacctctccctcctcacggagagccggaacttcaacaccctggaggctgccgccggcgctctgcagaacct

SEQ ID NO: 108287 - DNA, 120 bp, Artificial Sequence
  ENSG00000099889_19 (sequence is synthesized)
cagtgccggcaactggatgtgggccacgtacatccgcgccacagtgcgcaaagagcgcgggctgccggtgcttgtggaactgctgcagtctgagaccgacaaggtggtgcgcgccgtcgc

SEQ ID NO: 108288 - DNA, 120 bp, Artificial Sequence
  ENSG00000099889_20 (sequence is synthesized)
catcgctctgcgcaacctctcgctggaccggcgcaacaaagacctcatcgggagctacgccatggctgagcttgtgcggaatgtgcgcaatgcacaggctccgccgcgaccgggggcctg

SEQ ID NO: 108289 - DNA, 120 bp, Artificial Sequence
  ENSG00000099889_21 (sequence is synthesized)
cctggaggaagacaccgtggtggcggtgctcaacaccatccacgaaatcgtgtccgacagcctggataacgcgcgctcgctcctgcaggcacgcggggtgccagcgttggtggctctcgt

SEQ ID NO: 108290 - DNA, 120 bp, Artificial Sequence
  ENSG00000099889_22 (sequence is synthesized)
ggcctccagccaatcggtacgcgaagcgaaggcggcgtcacacgtgctgcagacagtgtggagctacaaggagctgcgtggtaccttgcagaaagatggttggaccaaggcgcgcttcca

SEQ ID NO: 108291 - DNA, 120 bp, Artificial Sequence
  ENSG00000099889_23 (sequence is synthesized)
gtcagctgctgctactgccaaggggcctaagggagcactgagtcctgggggcttcgatgacagcacgctgccactggtggacaagagccttgagggcgagaaaactggcagccgggatgt

SEQ ID NO: 108292 - DNA, 120 bp, Artificial Sequence
  ENSG00000099889_24 (sequence is synthesized)
gatccccatggatgcgctgggcccagacggatactccacggtggaccggagggagcggaggccacggggcgccagctctgcaggagaggcctctgagaaggaacccttgaaactcgaccc

SEQ ID NO: 108293 - DNA, 120 bp, Artificial Sequence
  ENSG00000099889_25 (sequence is synthesized)
cagcaggaaggcccctccccccgggcccagcaggcccgcggtcaggctggtggacgccgtaggggacgctaagcctcagcccgttgattcctgggtctagcttgcatgcctgggcccagg

SEQ ID NO: 108294 - DNA, 120 bp, Artificial Sequence
  ENSG00000099889_26 (sequence is synthesized)
cccagcctcttgttcttagggcttggatcgtggaagaagggccaccctgagcagatcgtgccgtggagcttggagccccctggcggcaggggttggcagcgcctcgccccagccaagcct

SEQ ID NO: 108295 - DNA, 120 bp, Artificial Sequence
  ENSG00000099889_27 (sequence is synthesized)
gactttggggacaccctcctgcccccccaccccactccccccatcctacctaactccctaggcctgagttagctgtttactgacatggtgctgtgtgtgagcgagtgacagaaggcccga

SEQ ID NO: 108296 - DNA, 120 bp, Artificial Sequence
  ENSG00000099889_28 (sequence is synthesized)
ggaggccgactgggctgctggggcagggcccagggaggtggcagggaagggtgcctggctgggctttggggctggtgggataggagggtgcccctgggaacacagtgccccagtggtgcg

SEQ ID NO: 108297 - DNA, 120 bp, Artificial Sequence
  ENSG00000099889_29 (sequence is synthesized)
ggccaggtctggcgccaggggcaggcagctaggcagggagggggctgggaaagaacttggacttctaaaggcggagggtctccctgggcaccctgcaggcaggcagaccacggtgtgggg

SEQ ID NO: 108298 - DNA, 120 bp, Artificial Sequence
  ENSG00000099889_30 (sequence is synthesized)
ggtgccccacaaggcccagccctgggcaaggaagctttggaagcagcaaggtgggggtcaggctacaggtgccccacctccccagagccctgcagtcacgtgaggcccctgtgcagtaga

SEQ ID NO: 108299 - DNA, 120 bp, Artificial Sequence
  ENSG00000099889_31 (sequence is synthesized)
gagcctttctccagcccatgctggctggggccggggctgccgcatctgcctggagcctgggcagcacctccgggactgaccttcggcagtggctgggggactgctttcagtgcctgctgt

SEQ ID NO: 108300 - DNA, 120 bp, Artificial Sequence
  ENSG00000099889_32 (sequence is synthesized)
tcgtgactcagaaacagaagaaaaacactgagaaaaagcattaaaaataagccaaaataagactattggtaaacacctaaatttttgtaagaaaatttaaaaattaaagcagcaaaggaa

SEQ ID NO: 108301 - DNA, 120 bp, Artificial Sequence
  ENSG00000099889_33 (sequence is synthesized)
gtgccttgtgagagctgagggacaggtagggtcaccgtgtctctgtgaggccctgtggcctcaggagtgttagtgccacctgccacatggcagggaatgggtgggacgggacagcactgc

SEQ ID NO: 108302 - DNA, 120 bp, Artificial Sequence
  ENSG00000099889_34 (sequence is synthesized)
cacaccctcctctgcacctcctcccctttggggctccttcctagctggaaaccagtactgggtgtcccccggaaccactcacggcttttgttacttcctactgttctgcatgagctggga

SEQ ID NO: 108303 - DNA, 120 bp, Artificial Sequence
  ENSG00000099889_35 (sequence is synthesized)
tcgtcagggacagaagaaaggtggaccctggggtggtaggagttcggctgggcactgtcctgcaggcccagggcccaggaaagctgggaagagtgccggccactggccttgctccagcca

SEQ ID NO: 108304 - DNA, 120 bp, Artificial Sequence
  ENSG00000099889_36 (sequence is synthesized)
cactctgggtaaccagaacccagagccctggcccttgtcacagcccctggttctgtccccattgccctcagtttctgcatctctggagtggggatgtgaccacagcccgggtcaggattt

SEQ ID NO: 108305 - DNA, 120 bp, Artificial Sequence
  ENSG00000099889_37 (sequence is synthesized)
tgttgtgtgaccctggccaagtcacctgaccgtcactcctagcctcagggcaggcggtttgatgacagcaacccacagggctactgagagctaaggagatcttgtgccccaaggggctgg

SEQ ID NO: 108306 - DNA, 120 bp, Artificial Sequence
  ENSG00000099889_38 (sequence is synthesized)
tggcctgaatactcctcaggtggtcctactgggatggcttcatgcggagagggccatttactccccctacatcctggcacagccagagatgggcctcatggaagatggggtggttttgtg

SEQ ID NO: 108307 - DNA, 120 bp, Artificial Sequence
  ENSG00000099889_39 (sequence is synthesized)
gaagggaggtgagacggtctctccagcagccatagcagatgtctcacagaaacttgttttgctcgggattgggaaactgcccggtgacagcagtgagtgagtttgctgtcctgggagggt

SEQ ID NO: 108308 - DNA, 120 bp, Artificial Sequence
  ENSG00000099889_40 (sequence is synthesized)
tgcctgggtcctggtagccgctggctggggtttggcatttggctctgaattggttctcactgggctggtgcatgactctctgtgtccccaccatgctccgggccaagatacaggtgctct

SEQ ID NO: 108309 - DNA, 120 bp, Artificial Sequence
  ENSG00000099889_41 (sequence is synthesized)
tccaggaaagaaggatggtgagatggaccggaactttgacacgctagacctgcccaagcgaactgaggccgccaaagattctgggtgaccgtgggtggcggttgccctgcacctaggctt

SEQ ID NO: 108310 - DNA, 120 bp, Artificial Sequence
  ENSG00000099889_42 (sequence is synthesized)
ccgagcctggtccagccaccgcctcccccgctgctggccagcgccccccgagtcccggcccgatgccggccgaactcagacaggaaggaggctgaagtctgaagagggaagcccgggagc

SEQ ID NO: 108311 - DNA, 120 bp, Artificial Sequence
  ENSG00000099889_43 (sequence is synthesized)
agcctgagcccgagcggccgaggcgccggagccgagcctggtccagccaccgcctcccccgctgctggccagcgccccccgagtcccggcccgatgccggccgaactcagacaggagcag

SEQ ID NO: 108312 - DNA, 120 bp, Artificial Sequence
  ENSG00000099899_0 (sequence is synthesized)
atagagacgctcggcctccgccgcacgcgctggcggactaagagtggctggcgaagcgagcggccggcgcgggcccctggcgggcgggcggtacagccccaagcctgagacccggacctg

SEQ ID NO: 108313 - DNA, 120 bp, Artificial Sequence
  ENSG00000099899_1 (sequence is synthesized)
agcatcgcaggttcgagtcccgccccgcctggggcgaagccgggggtggcggcgacctcgcggcgttgcaccggctctgtgagcacctcccctctgagcacttcccttgtgacaggccac

SEQ ID NO: 108314 - DNA, 120 bp, Artificial Sequence
  ENSG00000099899_2 (sequence is synthesized)
ttcccttgtgacaggcccaggacgaggtggccaggcggcccccatggcgtccctggtctaggcggagaaccgcctgggcgatgagtgagaacctcgacaacgagggcccgaagcccatgg

SEQ ID NO: 108315 - DNA, 120 bp, Artificial Sequence
  ENSG00000099899_3 (sequence is synthesized)
agagctgtggccaggagagcagcagtgccctgagctgccctaccgtctcggtgccccctgcagccccggcagccctggaggaggtggagaaagagggcgctggggcggctacagggccgg

SEQ ID NO: 108316 - DNA, 120 bp, Artificial Sequence
  ENSG00000099899_4 (sequence is synthesized)
ggcctcagcccgggctctacagctacatcagggatgacttgtttacctctgagatctttaaactggagctgcagaacgtgcctcgccacgccagcttcagcgacgtccggcgcttcctgg

SEQ ID NO: 108317 - DNA, 120 bp, Artificial Sequence
  ENSG00000099899_5 (sequence is synthesized)
gccgctttggtctgcagccccacaaaaccaaactctttgggcaaccaccctgcgcctttgtgacattccgcagcgctgcagagagggacaaggccctgcgcgttttgcatggtgccctct

SEQ ID NO: 108318 - DNA, 120 bp, Artificial Sequence
  ENSG00000099899_6 (sequence is synthesized)
ggaaaggccgcccactcagtgtgcgcctggcccggcccaaggccgaccccatggccaggaggaggcgacaggagggtgagagtgagccaccagtaacacgagtggccgacgtggtgaccc

SEQ ID NO: 108319 - DNA, 120 bp, Artificial Sequence
  ENSG00000099899_7 (sequence is synthesized)
ctctatggacagtgccctatgctgagcagcttgagcggaagcagctggagtgcgagcaggtgctgcagaaacttgccaaggaaatcgggagcaccaaccgtgccttgctgccctggctgc

SEQ ID NO: 108320 - DNA, 120 bp, Artificial Sequence
  ENSG00000099899_8 (sequence is synthesized)
tcgagcagaggcacaagcacaacaaggcctgctgcccgctggagggggtcaggccatcaccccagcagactgagtatcgtaataagtgtgagtttctggttggcgtcggggtggatgggg

SEQ ID NO: 108321 - DNA, 120 bp, Artificial Sequence
  ENSG00000099899_9 (sequence is synthesized)
aggataacaccgtgggctgtcggctcggcaagtacaagggcgggacgtgtgctgtggcagccccgtttgacaccgtgcacatccccgaagccaccaagcaggtggtgaaggccttccagg

SEQ ID NO: 108322 - DNA, 120 bp, Artificial Sequence
  ENSG00000099899_10 (sequence is synthesized)
agttcatccggtccactccatactcggcatacgacccagagacgtacacaggccactggaagcagctgactgtgcgcaccagccgccgccaccaggccatggccattgcctacttccacc

SEQ ID NO: 108323 - DNA, 120 bp, Artificial Sequence
  ENSG00000099899_11 (sequence is synthesized)
cccagaagctgagccctgaggagctggcagagctgaagacctccctagcgcagcacttcacagcagggccaggcagggccagtggagtgacctgcctctacttcgtggaggagggacagc

SEQ ID NO: 108324 - DNA, 120 bp, Artificial Sequence
  ENSG00000099899_12 (sequence is synthesized)
ctcctagccaggagggcctgcccctggagcatgtggctggggaccggtgcatccacgaggacctgctagggctgaccttccggatctctccacacgccttcttccaggtgaacacacccg

SEQ ID NO: 108325 - DNA, 120 bp, Artificial Sequence
  ENSG00000099899_13 (sequence is synthesized)
cagccgaggtgctctacacagtcatccaggactgggcccaattggatgcggggagcatggtgctggacgtgtgctgtggcaccggcaccattggcctggccctggcccggaaggtaaaga

SEQ ID NO: 108326 - DNA, 120 bp, Artificial Sequence
  ENSG00000099899_14 (sequence is synthesized)
gggtcattggggtcgagctatgcccagaggctgtggaggacgcccgggtgaacgcccaggacaatgagttgagtaatgtggagttccactgcgggagggccgaggacctggtgcccaccc

SEQ ID NO: 108327 - DNA, 120 bp, Artificial Sequence
  ENSG00000099899_15 (sequence is synthesized)
tggtgagcagactggcctcccagcacctcgtggccatcctggacccaccccgtgctggcttgcattccaaggtgatcctggccatccggagagctaagaacctcaggcggctgctgtacg

SEQ ID NO: 108328 - DNA, 120 bp, Artificial Sequence
  ENSG00000099899_16 (sequence is synthesized)
tctcatgcaacccccgggcagccatgggcaactttgtggacctctgcagagccccatctaaccgggtgaagggcattcccttccggccggtcaaggctgtggcagtggacctgttcccgc

SEQ ID NO: 108329 - DNA, 120 bp, Artificial Sequence
  ENSG00000099899_17 (sequence is synthesized)
agaccccgcactgtgagatgctcatcctgtttgagagggtggagcaccccaatggcacaggggtcttggggccccacagccctccagctcaacccacaccaggacccccagataacaccc

SEQ ID NO: 108330 - DNA, 120 bp, Artificial Sequence
  ENSG00000099899_18 (sequence is synthesized)
tacaagaaactgggaccttcccctcatcctaggcccaggacccattatggggacaggagctgaagggctcccagggccccaggggcggggaaggcatggcttgctggccaggatattcag

SEQ ID NO: 108331 - DNA, 120 bp, Artificial Sequence
  ENSG00000099899_19 (sequence is synthesized)
aggtaggcagccaaagggcacagaaccctgtgccccaccaggattggcctgctgctaggggccaggggccctgaccaggaagacaggtgggttcctgtagcctgttgcccatccccaggg

SEQ ID NO: 108332 - DNA, 120 bp, Artificial Sequence
  ENSG00000099899_20 (sequence is synthesized)
cctttgtggactagccaaggctgtgagggccagaataaacaactgctcaacaaagggtgtttctgtgatgagagccaggggtctgaacacagggcctgggtgccagggaaagggccaaac

SEQ ID NO: 108333 - DNA, 120 bp, Artificial Sequence
  ENSG00000099899_21 (sequence is synthesized)
taggcctaggcagctctgcaagcctctctgcatggctgggggagtcagggcagagcttactttaaaaaagaatgttcgatttgatacttaaacttgaggagaggcagagagaggtctggg

SEQ ID NO: 108334 - DNA, 120 bp, Artificial Sequence
  ENSG00000099899_22 (sequence is synthesized)
aactgcaccagctgggggcatggggtggagaacactgggcagagttggcccctctgtggccagcctggccctcagcccagcagagagggcatcaaccaaggaaggggccatgctggggtg

SEQ ID NO: 108335 - DNA, 120 bp, Artificial Sequence
  ENSG00000099899_23 (sequence is synthesized)
ctgctcagctgttacaaaggcagggtccagcctgcagggaggccccaggaggggatctggccagtcaagggtccacagggtgccagcctctcaccctcagaataaagacatcagccattc

SEQ ID NO: 108336 - DNA, 120 bp, Artificial Sequence
  ENSG00000099899_24 (sequence is synthesized)
aaaacgcccgcggcgcatgcccggcccgcccgtcagccagaggagcgcgcactcccggcgacacccgcgcgcacttccgtcccggccacgcgcgcctctagagctggctaaagtggttgg

SEQ ID NO: 108337 - DNA, 120 bp, Artificial Sequence
  ENSG00000099899_25 (sequence is synthesized)
ctgcaagcctcagccacagccagggcttgggggctgcccgacaggtagagcaagtgagcaagctctttggctaggggttccccagggctggccctgctgggagggcatgtggccctctga

SEQ ID NO: 108338 - DNA, 120 bp, Artificial Sequence
  ENSG00000099899_26 (sequence is synthesized)
gggggtcaggccatcaccccagcaggtcagactagacttcggtggccacaaacccctatcctgggttttgaaaaactttgcttttgctcacccttcctgttgatctccctgctttgtgtt

SEQ ID NO: 108339 - DNA, 120 bp, Artificial Sequence
  ENSG00000099899_27 (sequence is synthesized)
ttcttctggtaacatcacatagttgtcagctgttcctcttgtttgactgccagcccctgtggggaaatcagggtttccaggcccaagcgctgggcagccagggtaaggtgcagctctctc

SEQ ID NO: 108340 - DNA, 120 bp, Artificial Sequence
  ENSG00000099899_28 (sequence is synthesized)
ccccgggaattctggagtgcctgccatttcagccagatgaaggaaggtgtggccagaggagagagcagggggactgcttgcccagttgtgggcacttgggccagctcgtgattcccacag

SEQ ID NO: 108341 - DNA, 120 bp, Artificial Sequence
  ENSG00000099899_29 (sequence is synthesized)
gtgagcagactggcctcccagcacctcgtggccatcctggacccaccccgtgctggcttgcgtgagtggcttttgcttaaggaggtggcacgggaacgaggacacatggggtggctcacc

SEQ ID NO: 108342 - DNA, 120 bp, Artificial Sequence
  ENSG00000099901_0 (sequence is synthesized)
gcgccagacgcggagggaaggagctacgagtagccgccgagaggccgcggagccagcgacgaccgacccagccgagccgccgccgccgccgcgcccccatggcggccgccaaggacactc

SEQ ID NO: 108343 - DNA, 120 bp, Artificial Sequence
  ENSG00000099901_1 (sequence is synthesized)
actcatgaggaccatgatacttccactgagaatacagacgagtccaaccatgaccctcagtttgagccaatagtttctcttcctgagcaagaaattaaaacactggaagaagatgaagag

SEQ ID NO: 108344 - DNA, 120 bp, Artificial Sequence
  ENSG00000099901_2 (sequence is synthesized)
gaactttttaaaatgcgggcaaaactgttccgatttgcctctgagaacgatctcccagaatggaaggagcgaggcactggtgacgtcaagctcctgaagcacaaggagaaaggggccatc

SEQ ID NO: 108345 - DNA, 120 bp, Artificial Sequence
  ENSG00000099901_3 (sequence is synthesized)
gctgacttcgccgacgagtgccccaagccagagctgctggccatccgcttcctgaatgctgagaatgcacagaaattcaaaacaaagtttgaagaatgcaggaaagagatcgaagagaga

SEQ ID NO: 108346 - DNA, 120 bp, Artificial Sequence
  ENSG00000099901_4 (sequence is synthesized)
gaaaagaaagcaggatcaggcaaaaatgatcatgccgaaaaagtggcggaaaagctagaagctctctcggtgaaggaggagaccaaggaggatgctgaggagaagcaataaatcgtctta

SEQ ID NO: 108347 - DNA, 120 bp, Artificial Sequence
  ENSG00000099901_5 (sequence is synthesized)
ttttattttcttttcctctctttcctttcctttttttaaaaaattttaccctgcccctctttttcggtttgtttttattctttcatttttacaagggacgttatataaagaactgaactc

SEQ ID NO: 108348 - DNA, 120 bp, Artificial Sequence
  ENSG00000099901_6 (sequence is synthesized)
gagtgtccgcctcctgagccaataaagctgtactggttttgaatcgcggcgcgtttcccgccgctggggtcaggggtcgaggttcgggtcgtggggcggagggaagagcgggcgggcggg

SEQ ID NO: 108349 - DNA, 120 bp, Artificial Sequence
  ENSG00000099901_7 (sequence is synthesized)
acttcagaaaatccattccccagtcatgaaaatgtactgtgctaactttcttttccatagtggaaacacttatttatagtcatcaaaaatagtgaataaaaaacacatttggaacctggg

SEQ ID NO: 108350 - DNA, 120 bp, Artificial Sequence
  ENSG00000099901_8 (sequence is synthesized)
actgtccatagaggggtcaccacgtcggccactcgtgttactggtggctcactctcaccctcctgtcgcctcctcctggccatggggtcggccttgggccgggccaggcgcacactgagt

SEQ ID NO: 108351 - DNA, 120 bp, Artificial Sequence
  ENSG00000099901_9 (sequence is synthesized)
gggcggcctttccagagggcaccatgcaaaacgcgcagggccttgtccctctctgcagcgctgcggaatgtcacaaaggcgcagggtggttgcccaaagagtttggttttgtggggctgc

SEQ ID NO: 108352 - DNA, 120 bp, Artificial Sequence
  ENSG00000099901_10 (sequence is synthesized)
agatcctgtgctgggcctcccaactggtgcatggacaggctgaggaagcacaggccgggcagagccctggccaagaggggcgtcttgcgcccacactcacttggcaagtttctgcagcac

SEQ ID NO: 108353 - DNA, 120 bp, Artificial Sequence
  ENSG00000099901_11 (sequence is synthesized)
tggggggcttctttgcagactcactctgcatctgactatacttccaggcgggtgctttttctgtctgccagataaacattccagggtgctgtggccgcctcacgtatccagagtgatgca

SEQ ID NO: 108354 - DNA, 120 bp, Artificial Sequence
  ENSG00000099901_12 (sequence is synthesized)
gctccctggggacacaggtgcttcctggggagccctgagcacttgtcagtgttgctggcctcagtccaattgggcaggcattggagtccgggcactgcctggagctcaccagaaggtgct

SEQ ID NO: 108355 - DNA, 120 bp, Artificial Sequence
  ENSG00000099901_13 (sequence is synthesized)
acaagaccctgaagatctgtgccaaccactacaacgtgcctctgaactcagagcaggcccgcagcgaagcttagagcacacgggggtgtggagtcagccagacgggccctgatgggagga

SEQ ID NO: 108356 - DNA, 120 bp, Artificial Sequence
  ENSG00000099901_14 (sequence is synthesized)
caagtgaccagatgtcactgagcagcctgaccatggtctaggcagtgcttgagtgcatccacctggcttcctttcgtcactgaatttcaagaagacagactccaggaggcggcttggcca

SEQ ID NO: 108357 - DNA, 120 bp, Artificial Sequence
  ENSG00000099901_15 (sequence is synthesized)
ggcaggagtctgtcccgagggcgggcaagccgctgtgggtgggtgacggcacttgggaccagcctggcgagggccatgtgcttgaatgcaccgtgcttctgttttctcactgtgctgctt

SEQ ID NO: 108358 - DNA, 120 bp, Artificial Sequence
  ENSG00000099901_16 (sequence is synthesized)
cgacagtccccagcagcttggcctgggacctttgggaagattcagggctgattgggaactggggagcgtgttatttcatggagtgcaagtttgtggtgtgtttgttgaatttaaaaccag

SEQ ID NO: 108359 - DNA, 120 bp, Artificial Sequence
  ENSG00000099901_17 (sequence is synthesized)
aaatacgtttttcagacgtgcctctgaactcagagcaggcccgcagcgaagcttagagcacacgggggtgtggagtcagccagacgggccctgatgggaggacgcagcgcccaggctggg

SEQ ID NO: 108360 - DNA, 120 bp, Artificial Sequence
  ENSG00000099901_18 (sequence is synthesized)
gcctccaggaactggtgcgggcggcgggtttcctccggctcggcccacttggggctccccactagtacggtgcatttattctttccgtcgcccacgcagcacttcattcattcggttctt

SEQ ID NO: 108361 - DNA, 120 bp, Artificial Sequence
  ENSG00000099901_19 (sequence is synthesized)
acgtctggaaccgccactggcctctgtggcagaagctcgcgttccagcgtggggcacaggtcctagatgcgccgacccaggcggcggctttgttggctgcggtgtctggttgagtgcggg

SEQ ID NO: 108362 - DNA, 120 bp, Artificial Sequence
  ENSG00000099901_20 (sequence is synthesized)
ccgctgcagagccgcagtgctgtggggaacagtgaagagcagcgaaaagcttatgttttcttttccagtttgagtctagtggtgaagtcttgggtctcttacggacttctgggtgaccaa

SEQ ID NO: 108363 - DNA, 120 bp, Artificial Sequence
  ENSG00000099901_21 (sequence is synthesized)
tctgctgggcctcggtggcgcggagtcggggcgcgtggggtttgggggctcgaggcctgcggagttggggcgtttgggggtgcaggctctgcagaggcctgggggctgcagggcccccgc

SEQ ID NO: 108364 - DNA, 120 bp, Artificial Sequence
  ENSG00000099901_22 (sequence is synthesized)
cgtttgaatcatttccttgggggtcttccctgatgccctgtgctgctcccagagcctgggtcaggttgtgggttgttgtgtgtgcatcataagttggttctgggctcctgggcatctggg

SEQ ID NO: 108365 - DNA, 120 bp, Artificial Sequence
  ENSG00000099901_23 (sequence is synthesized)
cagagccatctgtgtagccagcagtgtcttgtgcccatcatgggcccttggtagacagggaaagtggcagtgggtagaggctggcttctgggtaaggtgtcgaagaggctgtgggctggg

SEQ ID NO: 108366 - DNA, 120 bp, Artificial Sequence
  ENSG00000099901_24 (sequence is synthesized)
tcggggcggggtgtgaagggggcatgcagggggcttggcatccgctgtggcaggctgcagtagacgagacccccccccagctcccagttcagatagtgacgtgtaggggtatcctggggg

SEQ ID NO: 108367 - DNA, 120 bp, Artificial Sequence
  ENSG00000099901_25 (sequence is synthesized)
tgcatgtggcctggactgggcatgggcacctgggatggtctgggttctcagggagctgttctgaagagtggtcacctgcagggccatctccccttggggctgcctgtgcctggggagttg

SEQ ID NO: 108368 - DNA, 120 bp, Artificial Sequence
  ENSG00000099901_26 (sequence is synthesized)
gggtggaggcgtccattgcaggccgtggctctgtctcctgtgccctccaggcttcagtcatggggatgcaggtgggcactcctgcatcaatcatggggatgcatggccacggcccccagt

SEQ ID NO: 108369 - DNA, 120 bp, Artificial Sequence
  ENSG00000099901_27 (sequence is synthesized)
gggctcccttctggcaactgccccactttctagccttctgctgccccccactttcagataggctggctctatgtgttgggttcccttaggaaagactgggccccctgggccttgtgccct

SEQ ID NO: 108370 - DNA, 120 bp, Artificial Sequence
  ENSG00000099901_28 (sequence is synthesized)
gatatctgaccctgggcttctgacttcacggccagggtcagaatcaaggggatcagggttgggcttgagtgcagccctgggatacagctggggcctgctttgccagctctgcttctctgc

SEQ ID NO: 108371 - DNA, 120 bp, Artificial Sequence
  ENSG00000099901_29 (sequence is synthesized)
atttctggaggtgggggtctgtgtgccaagtgatcttgaacacagctcaggagctcctcgtggagatggccttacggtcagggaacaggtgcccattcctatttaggatggtcctggttt

SEQ ID NO: 108372 - DNA, 120 bp, Artificial Sequence
  ENSG00000099901_30 (sequence is synthesized)
taagtgaatatggaggattttcaaagaggtttgaataaaactcaggcgccgtggtactttgtctaagcctggttctccaaccccagactgtccccgtgttgtctgaagcagacccctcag

SEQ ID NO: 108373 - DNA, 120 bp, Artificial Sequence
  ENSG00000099901_31 (sequence is synthesized)
tctgtggccgagggctgggtgggctggcctttgcagtcatctcaccatcttcacgagcttctctctcttcagtcacgccgatgatggagctgaagcccaacgcaggtagcgaccgtgcct

SEQ ID NO: 108374 - DNA, 120 bp, Artificial Sequence
  ENSG00000099901_32 (sequence is synthesized)
ggaaatttaacccgttcctttcatgaatcttcaccagatgcccttgctgccctgcagccagttgcatgaagggcatcccatcttgctgctctgtccactggcatggcggccccactgccc

SEQ ID NO: 108375 - DNA, 120 bp, Artificial Sequence
  ENSG00000099901_33 (sequence is synthesized)
ttttttgccactggcttctgaggatccagggagtcccttggttgagcagggggttttaagtttttgcagcatagacttctttggcatcgtgaagcttataaatcccccacccggtgtctg

SEQ ID NO: 108376 - DNA, 120 bp, Artificial Sequence
  ENSG00000099904_0 (sequence is synthesized)
tgcggcggcgcggcgcccaggatgccccgcagccccgggacgcgcctcaaacccgccaagtacatcccggtggccacggccgccgcgctgctggtcggctccagcaccctcttcttcgtg

SEQ ID NO: 108377 - DNA, 120 bp, Artificial Sequence
  ENSG00000099904_1 (sequence is synthesized)
ttcacgtgcccgtggttgacacgagctgtgtccccagctgttcccgtctacaatggcatcatcttcctctttgtcctggccaacttcagcatggccactttcatggaccctggtgttttc

SEQ ID NO: 108378 - DNA, 120 bp, Artificial Sequence
  ENSG00000099904_2 (sequence is synthesized)
ccccgagcggatgaggatgaggacaaggaggacgacttccgggctccgctgtacaagaacgtggatgtgcgaggtatccaggtccgcatgaagtggtgtgccacgtgccacttctaccgc

SEQ ID NO: 108379 - DNA, 120 bp, Artificial Sequence
  ENSG00000099904_3 (sequence is synthesized)
ccgccgcgctgctcccactgcagcgtctgtgacaactgtgtagaggactttgaccaccactgcccctgggtcaacaactgcatcgggcgtcgaaactatcgctacttcttcctgttcctg

SEQ ID NO: 108380 - DNA, 120 bp, Artificial Sequence
  ENSG00000099904_4 (sequence is synthesized)
ctgtcactcagtgcacacatggtgggcgtcgtggccttcggcctggtctacgtgctgaaccacgctgaggggctgggagccgcgcacaccaccatcaccatggctgtcatgtgtgtggcc

SEQ ID NO: 108381 - DNA, 120 bp, Artificial Sequence
  ENSG00000099904_5 (sequence is synthesized)
ggcctcttcttcatccctgtcattggcctcactggcttccatgtggtgctggtcactcgggggcgcaccaccaacgagcaggtgactgggaagttccgcgggggtgtgaaccctttcacc

SEQ ID NO: 108382 - DNA, 120 bp, Artificial Sequence
  ENSG00000099904_6 (sequence is synthesized)
cgaggctgctgtgggaatgtggagcacgtgctgtgtagccccctggcgccccggtacgtggtggagccaccccggctgccgctcgcggtgagtttgaagccgcctttccttaggcctgaa

SEQ ID NO: 108383 - DNA, 120 bp, Artificial Sequence
  ENSG00000099904_7 (sequence is synthesized)
ctcctggaccgagctgcaccgctcaaggtcaagcttagtgacaacgggctgaaggctggcctgggccgtagcaagtccaagggcagcctggaccggctggatgagaagccactggacttg

SEQ ID NO: 108384 - DNA, 120 bp, Artificial Sequence
  ENSG00000099904_8 (sequence is synthesized)
gggccaccactgccccccaagatagaggctggcacgttcagcagtgacctgcagaccccgcgcccaggcagtgctgagagtgccctgtcggtgcagaggaccagccccccgacacctgcc

SEQ ID NO: 108385 - DNA, 120 bp, Artificial Sequence
  ENSG00000099904_9 (sequence is synthesized)
atgtacaagtttaggccggctttccccacgggtcccaaggtgcccttctgtggaccaggcgagcaggttccaggccctgattccctgaccctgggggacgacagcatccgtagcctggac

SEQ ID NO: 108386 - DNA, 120 bp, Artificial Sequence
  ENSG00000099904_10 (sequence is synthesized)
tttgtgtccgagccgagcctggacctccctgactatgggccagggggcctgcatgcagcctacccgccatccccaccgctcagcgcctctgatgccttctcgggcgctttgcgctccctg

SEQ ID NO: 108387 - DNA, 120 bp, Artificial Sequence
  ENSG00000099904_11 (sequence is synthesized)
agcctcaaggcctcgagccggcggggcggggatcatgtggccctgcagcccctgcgctctgagggggggccccccacgccccaccgtagcatttttgccccccatgcactgcccaaccgc

SEQ ID NO: 108388 - DNA, 120 bp, Artificial Sequence
  ENSG00000099904_12 (sequence is synthesized)
aacggcagcctgtcctatgacagcctgctcaatcctggctcgcctggtggccacgcctgccctgcccacccagcagttggcgtggccggataccactcaccctacctgcatcctggggca

SEQ ID NO: 108389 - DNA, 120 bp, Artificial Sequence
  ENSG00000099904_13 (sequence is synthesized)
acgggcgacccgccacggcccctaccccgcagcttcagccccgtgctgggcccccgcccccgggagccctcgcctgtgcgctacgacaacctgtccaggaccatcatggcatccatccag

SEQ ID NO: 108390 - DNA, 120 bp, Artificial Sequence
  ENSG00000099904_14 (sequence is synthesized)
gagcgcaaggacagggaggagcgtgagcgcctgctgcgctcccaggccgactcactcttcggcgactcaggcgtctatgacgctcccagctcctacagcctgcagcaggccagtgtgctg

SEQ ID NO: 108391 - DNA, 120 bp, Artificial Sequence
  ENSG00000099904_15 (sequence is synthesized)
tccgagggcccccgaggtcccgcgctgcgctatggctccagagacgaccttgtggctgggcccggcttcggtggcgcccgcaaccctgccctgcagacgtcactgtcctcgctgtccagc

SEQ ID NO: 108392 - DNA, 120 bp, Artificial Sequence
  ENSG00000099904_16 (sequence is synthesized)
tccgtgagccgtgcaccgcggacgtcgtcctcctccctgcaggctgatcaggccagcagcaacgccccggggccccggcccagcagtggctcacacaggtcacctgcacgccagggcctg

SEQ ID NO: 108393 - DNA, 120 bp, Artificial Sequence
  ENSG00000099904_17 (sequence is synthesized)
ccctccccgcccggcactccccactcaccatcctacgcgggccccaaagctgtcgccttcatccacacggacctcccagagccaccgccctcgctgaccgtgcagagggaccaccctcag

SEQ ID NO: 108394 - DNA, 120 bp, Artificial Sequence
  ENSG00000099904_18 (sequence is synthesized)
ctgaagactcccccaagtaagcttaatgggcagtccccgggcctggcccggctgggacctgccaccggccccccagggccctctgccagccctacacggcacacgctggttaagaaggtg

SEQ ID NO: 108395 - DNA, 120 bp, Artificial Sequence
  ENSG00000099904_19 (sequence is synthesized)
tccggcgtgggtgggaccacctacgagatctcggtgtgaggactgactgccacacatccgccatggtgccacggggaccaggaccccacagcgcaccccccctccccaccaacttctctg

SEQ ID NO: 108396 - DNA, 120 bp, Artificial Sequence
  ENSG00000099904_20 (sequence is synthesized)
ggacccgaggccaccccagcctggtgtggacccatcggcgggagagagtgccacgcctccacagcttgccccaagcgctctgcctgcccgtccactcatctgcccatggggaagtcggct

SEQ ID NO: 108397 - DNA, 120 bp, Artificial Sequence
  ENSG00000099904_21 (sequence is synthesized)
cactgggacaagggccactgggctggtctgtgtctgggcctgtcccatggctggggcagtgagggggcccagtcagcctctttggggcaccctctctcagccaggcttggcccactgcca

SEQ ID NO: 108398 - DNA, 120 bp, Artificial Sequence
  ENSG00000099904_22 (sequence is synthesized)
tcacccagcaccccagatcaccgccaggccagcccccaatggtccccttacggacaggtcccagagatggacagaggcacccagggcccccaccgtccttctgacacagcctgtgggctc

SEQ ID NO: 108399 - DNA, 120 bp, Artificial Sequence
  ENSG00000099904_23 (sequence is synthesized)
ccggaccgagtgtcccccgccaggctactcctaactaacgcgttgcctttcacggaccccgctggaagcttgtagcttggcaaggctgatgcttctgccctggcctgctctgggtggtgg

SEQ ID NO: 108400 - DNA, 120 bp, Artificial Sequence
  ENSG00000099904_24 (sequence is synthesized)
tggataggtggacagacggccagccagccagctgtggccgggggcccggctccatgtgtcccgtgtctgtgtgctgtgctgccgcgccgtgtctgatgtgtcagtgctccggccgccgct

SEQ ID NO: 108401 - DNA, 120 bp, Artificial Sequence
  ENSG00000099904_25 (sequence is synthesized)
gtccctttcatcaaagccttaacctttgctttatgctcttgtgggaggcgacgggggggcaggcgggagcaggcacgggggtgatgctgccacagggggctggtgacacccagagccccc

SEQ ID NO: 108402 - DNA, 120 bp, Artificial Sequence
  ENSG00000099904_26 (sequence is synthesized)
tccccagccctcaggccctccctgccaaactggagaaccccaccccaaggcatgccacgtccgcagccccggcctggctgcggtgctcgcgccgtgggaaagcacactggggaggggtca

SEQ ID NO: 108403 - DNA, 120 bp, Artificial Sequence
  ENSG00000099904_27 (sequence is synthesized)
gtgcttcccttggtgtcagggacctgagagtaagcacatgacagcgtctgcttgcgttgtgtctgttttatgtttttatatctacatctatatatctataattttattaaaaaaaagaaa

SEQ ID NO: 108404 - DNA, 120 bp, Artificial Sequence
  ENSG00000099904_28 (sequence is synthesized)
aagagttattttgattctttccttgggcaaggccagggctattgctgcaggatcccgagttaggggagggcaggggccgggccccagaagagggagtggctgctgtctggtgtgcagggg

SEQ ID NO: 108405 - DNA, 120 bp, Artificial Sequence
  ENSG00000099904_29 (sequence is synthesized)
tcggtgggttcctcaggggcatttctgccgacttgggctgagtcagaggcttgggaagagggggcggccgatggtctgtggctgggaagtgtgagggtctctcgccttgggtctgtgtca

SEQ ID NO: 108406 - DNA, 120 bp, Artificial Sequence
  ENSG00000099904_30 (sequence is synthesized)
gttctggcagtgacagggtgtttgggggaaagacttgggtctgccgctacccacaggggactctcaggaacccgagagcttggggagatgaaatgggggtgcataggggccacctgttgg

SEQ ID NO: 108407 - DNA, 120 bp, Artificial Sequence
  ENSG00000099904_31 (sequence is synthesized)
ctcagggccctgtgggggccgctgaacctgctggaactctcctgcctgccacatgccaggggcagggctgagggagtgtgagggatgcacagctgttcagggctgagacattctgggctg

SEQ ID NO: 108408 - DNA, 120 bp, Artificial Sequence
  ENSG00000099904_32 (sequence is synthesized)
gggctgtcccagcgtgggaggcgtgcgggctgtagggccccgaagctgacctccacctttctgcttctctctcacggacgccgcggcccgcagggggcggattggcacctgcacccgtgg

SEQ ID NO: 108409 - DNA, 120 bp, Artificial Sequence
  ENSG00000099904_33 (sequence is synthesized)
attggcacctgcacccgtggatgggggcggcgtggccagccttgggtgcctcctgggctgcacctgtgccaccttggccgcccggaggaccgcccaccactgcgggccccctggagccag

SEQ ID NO: 108410 - DNA, 120 bp, Artificial Sequence
  ENSG00000099904_34 (sequence is synthesized)
cggggccatgtgccgcctgcacttggctgcctccagtcttttccccagcctctcggggccctagcaggatgacaagtaggcggctctggggcccaggacagcccagctggggacccagga

SEQ ID NO: 108411 - DNA, 120 bp, Artificial Sequence
  ENSG00000099904_35 (sequence is synthesized)
ggtcagactgcagtggaccctggggcagggctgggggtgggctgggctctctgctccaccagccacagcttgacagattcccagcctgccagggcctgagaccctgtgtccacatgacct

SEQ ID NO: 108412 - DNA, 120 bp, Artificial Sequence
  ENSG00000099904_36 (sequence is synthesized)
cagggagtcccccacctgctgcagggggtccagcaccccacaggggggcagtcccagagctgtggggaccggcacgacctttgcccagcctccctacccaaccaagcactttagactaag

SEQ ID NO: 108413 - DNA, 120 bp, Artificial Sequence
  ENSG00000099904_37 (sequence is synthesized)
ccacttcctcctcggggagcccaggcctccgtgggttgggctgggtggggggggggtctcaggttgcccctgaaggtctctgcactcctcctgcccttcccctgacacatgaacagatgc

SEQ ID NO: 108414 - DNA, 120 bp, Artificial Sequence
  ENSG00000099904_38 (sequence is synthesized)
cttaacttcctggagccaccagcctggtgagccattggcctctgcctgccaccaaggtcctgtggtcttggccagctccgcctgggccccactggggctgcctgcacccagagacgatgc

SEQ ID NO: 108415 - DNA, 120 bp, Artificial Sequence
  ENSG00000099904_39 (sequence is synthesized)
cggcgggatctcagagggcctgaggcccaagccctgtgtcctccagcagtggtacggcctgcggcagggtggcactccggccagcccttctccgtcacagggtccctgtccctgggtcca

SEQ ID NO: 108416 - DNA, 120 bp, Artificial Sequence
  ENSG00000099904_40 (sequence is synthesized)
ccctgggctgtggctctacatctcccatttggggacgagaaagccacaaaaccattctctattgttcttaagggtacccctgctaattaattccccaaataaaatttttggtgttgatca

SEQ ID NO: 108417 - DNA, 120 bp, Artificial Sequence
  ENSG00000099904_41 (sequence is synthesized)
gacactgtggccaccagtgacccagaaatcccacagctccctgcaagttcaggctgggtaacctatgtgaggggcagccctgggctgatcccacctaagccacttcccgcaagtatcagc

SEQ ID NO: 108418 - DNA, 120 bp, Artificial Sequence
  ENSG00000099904_42 (sequence is synthesized)
ttctaaggaaccccagctcccttgcccagccccctgcccaccctggcctggaccttgggaggccaggctggctgagggtcctgcatccacaggtgactgggaagttccgcgggggtgtga

SEQ ID NO: 108419 - DNA, 120 bp, Artificial Sequence
  ENSG00000099904_43 (sequence is synthesized)
cggggacacgttcaccagggagattgagcctcagaaggcttggttcctgcccagggatccccagtgggcaggtggccgtccctaggttgggaggaggtttgtccacaggcacctgctctg

SEQ ID NO: 108420 - DNA, 120 bp, Artificial Sequence
  ENSG00000099910_0 (sequence is synthesized)
agctgcgagtgcggcctcggctggcggcggcaccaggccacagttgtaagggatcttgtggctgtcaggatggcagaggagcaggagttcacccagctctgcaagttgcctgcacagccc

SEQ ID NO: 108421 - DNA, 120 bp, Artificial Sequence
  ENSG00000099910_1 (sequence is synthesized)
tcacacccacactgcgtgaacaacacctaccgcagcgcacagcactcccaggctctgctccgagggctgctggctctccgggacagcggaatcctcttcgatgttgtgctggtggtggag

SEQ ID NO: 108422 - DNA, 120 bp, Artificial Sequence
  ENSG00000099910_2 (sequence is synthesized)
ggcagacacatcgaggcccatcgcatcctgctggctgcgtcctgcgattacttcagaggaatgtttgctgggggattgaaggagatggaacaggaagaggtcctgatccacggtgtgtcc

SEQ ID NO: 108423 - DNA, 120 bp, Artificial Sequence
  ENSG00000099910_3 (sequence is synthesized)
tacaatgctatgtgccaaatcctacatttcatatacacctccgagctggagctcagcctgagcaatgtacaagagacactggtggctgcctgccagcttcagatcccagaaattatccat

SEQ ID NO: 108424 - DNA, 120 bp, Artificial Sequence
  ENSG00000099910_4 (sequence is synthesized)
ttctgctgtgatttcctcatgtcctgggtggacgaagagaacattctcgatgtctaccggctggcagagctgtttgacttgagccgcctgactgagcaactggacacctatatcctcaaa

SEQ ID NO: 108425 - DNA, 120 bp, Artificial Sequence
  ENSG00000099910_5 (sequence is synthesized)
aactttgtggccttctctcggactgacaagtaccgccagcttccattggagaaggtctactccctcctcagcagcaatcgcctggaggtctcctgcgagaccgaggtatatgagggggcc

SEQ ID NO: 108426 - DNA, 120 bp, Artificial Sequence
  ENSG00000099910_6 (sequence is synthesized)
cttctctaccattatagcctggagcaggtgcaggctgaccagatctcgctgcacgagcccccaaagctccttgagacagtgcggtttccgctgatggaagctgaggtcctgcagcggctg

SEQ ID NO: 108427 - DNA, 120 bp, Artificial Sequence
  ENSG00000099910_7 (sequence is synthesized)
catgacaagctggaccccagccctttgagggacacagtggccagcgccctcatgtaccaccggaacgagagcctacagcccagcctgcagagcccgcaaacggagctgcggtcggacttc

SEQ ID NO: 108428 - DNA, 120 bp, Artificial Sequence
  ENSG00000099910_8 (sequence is synthesized)
cagtgcgttgtgggcttcgggggcattcactccacgccgtccactgtcctcagcgaccaggccaagtatctaaaccccttactgggagagtggaagcacttcactgcctccctggccccc

SEQ ID NO: 108429 - DNA, 120 bp, Artificial Sequence
  ENSG00000099910_9 (sequence is synthesized)
cgcatgtccaaccagggcatcgcggtgctcaacaacttcgtatacttgattggaggggacaacaatgtccaaggatttcgagcagagtcccgatgctggaggtatgacccacggcacaac

SEQ ID NO: 108430 - DNA, 120 bp, Artificial Sequence
  ENSG00000099910_10 (sequence is synthesized)
ccagatccagtccctgcagcaggagcacgccgacctgtccgtgtgtgttgtaggcaggtacatctacgctgtggcgggccgtgactaccacaatgacctgaatgctgtggagcgctacga

SEQ ID NO: 108431 - DNA, 120 bp, Artificial Sequence
  ENSG00000099910_11 (sequence is synthesized)
ccctgccaccaactcctgggcatacgtggccccactcaagagggaggtgtatgcccacgcaggcgcgacgctggaggggaagatgtatatcacctgcggccgcagaggggaggattacct

SEQ ID NO: 108432 - DNA, 120 bp, Artificial Sequence
  ENSG00000099910_12 (sequence is synthesized)
gaaagagacacactgctacgatccaggcagcaacacttggcacacactggctgatgggcctgtgcggcgcgcctggcacggcatggcaaccctcctcaacaagctgtatgtgatcggggg

SEQ ID NO: 108433 - DNA, 120 bp, Artificial Sequence
  ENSG00000099910_13 (sequence is synthesized)
cagcaacaacgatgccggatacaggagggacgtgcaccaggtggcctgctacagctgcacgtctggacagtggtcatctgtctgcccactccctgctgggcacggtgagcctggcattgc

SEQ ID NO: 108434 - DNA, 120 bp, Artificial Sequence
  ENSG00000099910_14 (sequence is synthesized)
tgtgctggacaacaggatctatgtgttaggtggccgctcacacaaccgcggcagccgcacaggctacgtgcacatttacgatgtggagaaggactgctgggaggaagggccccagctgga

SEQ ID NO: 108435 - DNA, 120 bp, Artificial Sequence
  ENSG00000099910_15 (sequence is synthesized)
caactccatctcaggcctggcggcctgtgtgctcaccctgccccgctccctgctccttgagccgccccgcgggacccctgaccgcagccaggccgacccggactttgcctctgaggtgat

SEQ ID NO: 108436 - DNA, 120 bp, Artificial Sequence
  ENSG00000099910_16 (sequence is synthesized)
gagtgtgtctgactgggaggagtttgacaactccagtgaggactaggctccctgtgcctggcatcagagggaagggaggctggggctgcagggcagtgaaacccacgcagcctaggccag

SEQ ID NO: 108437 - DNA, 120 bp, Artificial Sequence
  ENSG00000099910_17 (sequence is synthesized)
agcactttactccaggcagggcccctgcccctgttggccacagcttatgggccctgccctctttcttcacaccagccccttggccagcctgccgcaggcatctcagggccatgcagatcc

SEQ ID NO: 108438 - DNA, 120 bp, Artificial Sequence
  ENSG00000099910_18 (sequence is synthesized)
caggctgtggattacgtcactgcaggaactgcttctgaaaggctttggccttcctcagtgagccctggaggggttggccttctctcctccctgcctagatcagtccttctccaaaaggac

SEQ ID NO: 108439 - DNA, 120 bp, Artificial Sequence
  ENSG00000099910_19 (sequence is synthesized)
ctgggagctggcagcctgggcaggggggctgaggcacgtggtagccctctttctgtgaatggggtggggctgtgggggcagctggggttggaggatgagagctcctgaggggcagaggag

SEQ ID NO: 108440 - DNA, 120 bp, Artificial Sequence
  ENSG00000099910_20 (sequence is synthesized)
cagagatgcatcagctcgcctgggactggctctgtgataaaaagacccctcccgctgggttttcagaccccatgttgttggtcaatgaaataaagcatcttacagaaggtgttaactgtt

SEQ ID NO: 108441 - DNA, 120 bp, Artificial Sequence
  ENSG00000099910_21 (sequence is synthesized)
agcagttctccagcttggccacagaggggcagccttggctttcaaccagctgcatcgtggctgccggtgttccttcatgcacgcattcattccgcaactactaagcaccatgtaccaagt

SEQ ID NO: 108442 - DNA, 120 bp, Artificial Sequence
  ENSG00000099910_22 (sequence is synthesized)
cctgggaatccagtggtgacaagaaatgagaaagactccccactccatggtgtttacagccttgtaggagaaaccactcttaaccagaaaacagatcagtaaagtggttacaattatggt

SEQ ID NO: 108443 - DNA, 120 bp, Artificial Sequence
  ENSG00000099910_23 (sequence is synthesized)
tccagctgcgagtgcggcctcggctggcggcggcaccagttgaacacatggaggctcctaaagagtgatgttcctggagagggcctggaagctctgcaccacttcccacatgtctggccc

SEQ ID NO: 108444 - DNA, 120 bp, Artificial Sequence
  ENSG00000099910_24 (sequence is synthesized)
catgcatctcttcatcttaaaggaaagtaggccctggaaatgccacccccttggcacccacctcccagactcctggctgtgtgtctcctgaccactactcaggccacagttgtaagggat

SEQ ID NO: 108445 - DNA, 120 bp, Artificial Sequence
  ENSG00000099910_25 (sequence is synthesized)
gagaggtcagaaaagggagaattatcatagagcagagtttccaggcaagagaatcctaagtgagaggtggtcatggggtatacaccttggctgtggccatctctggggccttggtgagaa

SEQ ID NO: 108446 - DNA, 120 bp, Artificial Sequence
  ENSG00000099910_26 (sequence is synthesized)
agatgagccagcccaggagggggaaaggaatgggtgggtggctggatagaggtcccaggtcctggaggcagactcaggggcagacacatcgaggcccatcgcatcctgctggctgcgtcc

SEQ ID NO: 108447 - DNA, 120 bp, Artificial Sequence
  ENSG00000099910_27 (sequence is synthesized)
tcacctcagagcctcccctactccttgtggctatgacttagtcaacaagtgtgagagacagaagggggtcttagagttcatttttcattcagtgatcctgtttcttgggctttgcctcct

SEQ ID NO: 108448 - DNA, 120 bp, Artificial Sequence
  ENSG00000099910_28 (sequence is synthesized)
cttctcttccctctcttctcttccttttcttttccttttctctctcttttcttttctcttttctttcctcctttctctcctcccctcccttaccattcctcccctccgtcagtaattatt

SEQ ID NO: 108449 - DNA, 120 bp, Artificial Sequence
  ENSG00000099910_29 (sequence is synthesized)
gctgtgtatgcatcaccttctggctcacacctctcatccctcaggtgttagcctctggccctcccagtgagctctgtggcccctctggggtttcttatggcctccttcgtgaccccatcc

SEQ ID NO: 108450 - DNA, 120 bp, Artificial Sequence
  ENSG00000099910_30 (sequence is synthesized)
agctgcgagtgcggcctcggctggcggcggcaccagtatgggtttagggagtagctgccatttatcccttcccaagagagcagaggcactactatgctcacggaaggccacagttgtaag

SEQ ID NO: 108451 - DNA, 120 bp, Artificial Sequence
  ENSG00000099910_31 (sequence is synthesized)
gtactgtgatattgtgaaatatatatttggtcttgtctcatttcttggcatacaacttctaaaatctttggactttccagagtgatgcctttttgtatgctggccagcagcccctaggta

SEQ ID NO: 108452 - DNA, 120 bp, Artificial Sequence
  ENSG00000099910_32 (sequence is synthesized)
gcttcaggatgggggctggtgacaggaaaggccaaggcaggcataagagggttgggactttcagcctcacctctcaacctccggagaggggagacaggctgaagattaagttcatcacca

SEQ ID NO: 108453 - DNA, 120 bp, Artificial Sequence
  ENSG00000099910_33 (sequence is synthesized)
atggccagtgatttaatcagtcatgcctacataatgaagcttccataaaaattctgaatgactgggtttggaaaacttctggatagttgaacacatggaggctcctaaagagtgatgttc

SEQ ID NO: 108454 - DNA, 120 bp, Artificial Sequence
  ENSG00000099910_34 (sequence is synthesized)
agggctctggttcctggatcttcgtgtcccgctccaccagcttccagggctgcatggggtctgggggcctggccgcggggatggctggggatctggcaggaatgggaagcatccagaatg

SEQ ID NO: 108455 - DNA, 120 bp, Artificial Sequence
  ENSG00000099910_35 (sequence is synthesized)
agaaggagaccatacaaagcctgaatgaccgcctggcctcctacctggacagagcgaggagcctggagaccgagaaccggaagctggagagcaaaatccagaagcacttggagaagaagg

SEQ ID NO: 108456 - DNA, 120 bp, Artificial Sequence
  ENSG00000099910_36 (sequence is synthesized)
gacccagatcagagactggaggcattacttcaagaccatcgaggacctgagggctcagatctttgcaaatactgtggacaacgcccgtatctttctgtagatcgacaatgcccgtcttgc

SEQ ID NO: 108457 - DNA, 120 bp, Artificial Sequence
  ENSG00000099917_0 (sequence is synthesized)
ttgggcctggctctgtgactgaggcggcggcggtggcggccaagcgggatacgggcggcgggagctggggaacaggcatggacgtttccgggcaagagaccgactggcggagcaccgcct

SEQ ID NO: 108458 - DNA, 120 bp, Artificial Sequence
  ENSG00000099917_1 (sequence is synthesized)
tccggcagaagctggtcagtcaaatcgaggatgccatgaggaaagctggtgtggcacacagtaaatccagcaaggatatggagagccatgttttcctgaaggccaagacccgggacgaat

SEQ ID NO: 108459 - DNA, 120 bp, Artificial Sequence
  ENSG00000099917_2 (sequence is synthesized)
acctttctctcgtggccaggctcattatccattttcgagacattcataacaagaaatctcaagcttccgtcagtgatcctatgaatgcactccagagcctgactggcggacctgctgcgg

SEQ ID NO: 108460 - DNA, 120 bp, Artificial Sequence
  ENSG00000099917_3 (sequence is synthesized)
gagccgctggaattggcatgcctcctcggggcccgggacagtctctgggcgggatgggtagccttggtgccatgggacagccaatgtctctctcagggcagccgcctcctgggacctcgg

SEQ ID NO: 108461 - DNA, 120 bp, Artificial Sequence
  ENSG00000099917_4 (sequence is synthesized)
ggatggcccctcacagcatggctgtcgtgtctacggcaactccacagacccagctgcagctccagcaggtggcgctgcagcagcagcagcaacagcagcagttccagcagcagcagcagg

SEQ ID NO: 108462 - DNA, 120 bp, Artificial Sequence
  ENSG00000099917_5 (sequence is synthesized)
cggcgctacagcagcagcagcagcagcagcaacagcagcagttccaggctcagcagagtgccatgcagcagcagttccaagcagtagtgcagcagcagcagcagctccagcagcagcagc

SEQ ID NO: 108463 - DNA, 120 bp, Artificial Sequence
  ENSG00000099917_6 (sequence is synthesized)
agcagcagcagcatctaattaaattgcatcatcaaaatcagcaacagatacagcagcagcaacagcagctgcagcgaatagcacagctgcagctccaacaacagcaacagcagcagcagc

SEQ ID NO: 108464 - DNA, 120 bp, Artificial Sequence
  ENSG00000099917_7 (sequence is synthesized)
agcagcagcagcagcagcagcaggctttgcaggcccagccaccaattcagcagccaccgatgcagcagccacagcctccgccctcccaggctctgccccagcagctgcagcagatgcatc

SEQ ID NO: 108465 - DNA, 120 bp, Artificial Sequence
  ENSG00000099917_8 (sequence is synthesized)
acacacagcaccaccagccgccaccacagccccagcagcctccagttgctcagaaccaaccatcacaactcccgccacagtcgcagacccagcctttggtgtcacaggcgcaagctctcc

SEQ ID NO: 108466 - DNA, 120 bp, Artificial Sequence
  ENSG00000099917_9 (sequence is synthesized)
ctggacaaatgttgtatacccaaccaccactgaaatttgtccgagctccgatggtggtgcagcagcccccagtgcagccccaggtgcagcagcagcagacagcagtacagacagctcagg

SEQ ID NO: 108467 - DNA, 120 bp, Artificial Sequence
  ENSG00000099917_10 (sequence is synthesized)
ctgcccagatggtggctcccggagtccaggtcagccagagcagcctccccatgctgtcctcgccgtcaccgggccagcaggtgcagaccccgcagtcgatgccccctcccccccagccgt

SEQ ID NO: 108468 - DNA, 120 bp, Artificial Sequence
  ENSG00000099917_11 (sequence is synthesized)
ccccgcagcccggccagcccagctcacagcccaactccaacgtcagctctggccctgccccatctcccagtagcttcctgcccagcccctcaccgcagccctcccagagcccagtgacgg

SEQ ID NO: 108469 - DNA, 120 bp, Artificial Sequence
  ENSG00000099917_12 (sequence is synthesized)
cgcggaccccacagaacttcagtgtcccctcacctggacctttaaacacacctgtgaaccccagctctgtcatgagcccagctggctccagccaggctgaggagcagcagtacctggaca

SEQ ID NO: 108470 - DNA, 120 bp, Artificial Sequence
  ENSG00000099917_13 (sequence is synthesized)
tgtcgaagtacatcgagcccctgcgccgcatgatcaacaagatcgacaagaacgaagacagaaaaaaggacctgagtaagatgaagagccttctggacattctgacagacccctcgaagc

SEQ ID NO: 108471 - DNA, 120 bp, Artificial Sequence
  ENSG00000099917_14 (sequence is synthesized)
ggtgtcccctgaagaccttgcaaaagtgtgagatcgccctggagaaactcaagaatgacatggcggtgcccactcccccaccgcccccggtgccaccgaccaaacagcagtacctatgcc

SEQ ID NO: 108472 - DNA, 120 bp, Artificial Sequence
  ENSG00000099917_15 (sequence is synthesized)
agccgctcctggatgccgtcctggccaacatccgctcacctgtcttcaaccattccctgtaccgcacattcgttccagccatgaccgccattcacggcccacccatcacggccccagtgg

SEQ ID NO: 108473 - DNA, 120 bp, Artificial Sequence
  ENSG00000099917_16 (sequence is synthesized)
tgtgcacccggaagcgcaggcttgaggatgatgagcggcagagcatccccagtgtgctccagggtgaggtggccaggctggaccccaagttcctggtaaacctggacccttctcactgca

SEQ ID NO: 108474 - DNA, 120 bp, Artificial Sequence
  ENSG00000099917_17 (sequence is synthesized)
gcaacaatggcactgtccacctgatctgcaagctggatgacaaggacctcccaagtgtgccaccactggagctcagtgtgcccgctgactatcctgcccaaagcccgctgtggatagacc

SEQ ID NO: 108475 - DNA, 120 bp, Artificial Sequence
  ENSG00000099917_18 (sequence is synthesized)
ggcagtggcagtacgacgccaaccccttcctccagtcggtgcaccgctgcatgacctccaggctgctgcagctcccggacaagcactcggtcaccgccttgctcaacacctgggcccaga

SEQ ID NO: 108476 - DNA, 120 bp, Artificial Sequence
  ENSG00000099917_19 (sequence is synthesized)
gcgtccaccaggcctgcctctcagccgcctagccaagactgcagggatggcccgcagcctcatcggggccaaggacacacgcctcctgtcagacacttctaggtgttggcttccttagag

SEQ ID NO: 108477 - DNA, 120 bp, Artificial Sequence
  ENSG00000099917_20 (sequence is synthesized)
agcctggggttaggttagctttcctgcttttatcttctgccttggggacctgccaaacgaaatcccacacctgtacagaactgggataggcgcagtggagcgggttgcttggggggcgtt

SEQ ID NO: 108478 - DNA, 120 bp, Artificial Sequence
  ENSG00000099917_21 (sequence is synthesized)
ggccgacttcttagagaaggccctccatgtgacttcctcccaggagccagatgcgatcctcaggctgctctcaccgtggcctgtccacggtccaggtccatctcagcagcgtgagggtgc

SEQ ID NO: 108479 - DNA, 120 bp, Artificial Sequence
  ENSG00000099917_22 (sequence is synthesized)
actcagggtgttgttagagcgtctcgtgtgtgctagacgcacccctactcgttcctatagaacacagaggacataggaaacccttaaaacacacatgggattctctggtcacagttttgg

SEQ ID NO: 108480 - DNA, 120 bp, Artificial Sequence
  ENSG00000099917_23 (sequence is synthesized)
gttcaggctatgctgctttgggcaggtggagcaccccccgaggaagcctgcaagtccagggcacaggctgccttttggagggagggctggcccataggtgctgctggctccccgccacca

SEQ ID NO: 108481 - DNA, 120 bp, Artificial Sequence
  ENSG00000099917_24 (sequence is synthesized)
gctgggcctcagccctcacggcattcctgctgagcaccgtggggcacccagggagcaggggcgtcagggatcctgctgccggcacccctgtgccgctggcatgagggccgtgtccccact

SEQ ID NO: 108482 - DNA, 120 bp, Artificial Sequence
  ENSG00000099917_25 (sequence is synthesized)
gtgaaggatgaagagcaaggccctcaggacccgtgtcctcagagcaccacacactgagcacccagagacagcgggcctggcagcgggccgggccatgcagggagcgcctccctatgttgc

SEQ ID NO: 108483 - DNA, 120 bp, Artificial Sequence
  ENSG00000099917_26 (sequence is synthesized)
ctgccactctgggcaccggccagcaccctctggtgagaagaggtcccccctttttatgtgcactaccccaccatctgtgattataataaatttattattcctgtgtttgtcagttgttca

SEQ ID NO: 108484 - DNA, 120 bp, Artificial Sequence
  ENSG00000099917_27 (sequence is synthesized)
atggtggctcccggagtccagatgatcacggaagccttggcccaaggtgggatgcacataagagcccggttcccgcctaccaccgctgtgtccgccatcccgtcaagctccatccctttg

SEQ ID NO: 108485 - DNA, 120 bp, Artificial Sequence
  ENSG00000099917_28 (sequence is synthesized)
aatgaaagcccttctttacagatagtgcaaagacacagcggcccacccacggctgcctctgacaggccttgtgccctcaggccagcgcctcatcacccccaacctgcctgtcccctttgt

SEQ ID NO: 108486 - DNA, 120 bp, Artificial Sequence
  ENSG00000099917_29 (sequence is synthesized)
gatgaagagagggcactcaagatggctcccagctctctcagctgagtgcctttccatcaggggagaggagtggccgttggaggctctctgtccccttcttgtttctttgtgcctgttatt

SEQ ID NO: 108487 - DNA, 120 bp, Artificial Sequence
  ENSG00000099917_30 (sequence is synthesized)
gggggttcccggcctggccgggtagcagcgcgggggcggccctggggcggggagacagggggcggctccactccggcgctctgcggaggacagcagcgatcgccaaggctcactctatga

SEQ ID NO: 108488 - DNA, 120 bp, Artificial Sequence
  ENSG00000099917_31 (sequence is synthesized)
ctgcggaggacagcagcgatcgccaaggctcactctatgatcagaagatggcataagtggggctgggcacagtggctcagtgcccagctgggattacgcctgtaataccagcactttggg

SEQ ID NO: 108489 - DNA, 120 bp, Artificial Sequence
  ENSG00000099917_32 (sequence is synthesized)
gtctgaatctgccttgcaggatgggcttcagctcggacgaatacctttctctcgtggccaggctcattatccattttcgagacattcggacagtggcctggctggtgcacacagtcctgt

SEQ ID NO: 108490 - DNA, 120 bp, Artificial Sequence
  ENSG00000099917_33 (sequence is synthesized)
aaccacactgaatagggaaagggagagaagcagccggctgtagtgggtttagcagggctgggtgcttcatggtttctcttccagaaaagcgcatcaacggtgaaagaaagtgatgggagg

SEQ ID NO: 108491 - DNA, 120 bp, Artificial Sequence
  ENSG00000099917_34 (sequence is synthesized)
agggtggatgtaagatgagattgggaaggtagttgtttggggtgtgggcggtgggacggaggatctgagggtgaccccccgaaggaatgtggactttgccgaaggatggcaggaagccgc

SEQ ID NO: 108492 - DNA, 120 bp, Artificial Sequence
  ENSG00000099917_35 (sequence is synthesized)
tgtcaggaagcgatcgtcgtttctggaggagagcgtgaagagctggggtcagtggccccgctcagaggaactctagcccctcaccaccgactgcttgtttctgttagcagtttttttcat

SEQ ID NO: 108493 - DNA, 120 bp, Artificial Sequence
  ENSG00000099917_36 (sequence is synthesized)
gtcagcagtacattagacttaagctttgcattccttgcgtttttttgtttgtttttctcttcctggaaaaaagtttgcttctctcataccatctgacttacttccaggcttttctccctt

SEQ ID NO: 108494 - DNA, 120 bp, Artificial Sequence
  ENSG00000099917_37 (sequence is synthesized)
gtggaacgagtgccgttgagccctgctgcactctcagacgggctcctccgaagtgccgcaggtggtggtaaatcgactctcacccactggggtcgctccttcgtgtctccccccggtcgg

SEQ ID NO: 108495 - DNA, 120 bp, Artificial Sequence
  ENSG00000099917_38 (sequence is synthesized)
ttcatctgttgctctggctgcaggaggaacgagtgagcttctggtcggcgtctgccatgccgtgtcaccccggcttctggcacctcctgtgcgtgcccaggattgtgaatgtgggccgtg

SEQ ID NO: 108496 - DNA, 120 bp, Artificial Sequence
  ENSG00000099917_39 (sequence is synthesized)
tgtgtgaggccacgggtctccctgcagccactctcctgctggagctctgttactggcacctgtcgctgcctgcaccgaaggctggcagcacctcctggagcttgggacccagagcacagc

SEQ ID NO: 108497 - DNA, 120 bp, Artificial Sequence
  ENSG00000099917_40 (sequence is synthesized)
ctcccaccatgagatgtgttgtttttctgtggatcagtcctcctttctttctgagcctggcgtgttttgttctagtttgttaccgtcctaagtgcctgtaggccctgctctccagggacg

SEQ ID NO: 108498 - DNA, 120 bp, Artificial Sequence
  ENSG00000099917_41 (sequence is synthesized)
agactcgggctctacccccaactcagaacccagagcaagagtggtcgggcccgggcccacaacagtgctcagctgtcctgctgcctttgtagttcaagaagtgtccattgatgaggggaa

SEQ ID NO: 108499 - DNA, 120 bp, Artificial Sequence
  ENSG00000099917_42 (sequence is synthesized)
tggtcctggctcatgctggagttcctgactcgcatccctgtggagatgaacttcctcgtcagggcggaggcctgccaagcagtccccccaggcttctcttgctcacctttgcccattttt

SEQ ID NO: 108500 - DNA, 120 bp, Artificial Sequence
  ENSG00000099917_43 (sequence is synthesized)
attacgaaagaaaaccagttccttgatagataccaggaccatcagcctcaggcctggaggaggagaggaggatgatttgggttcgggctgtaagaggtgtgccactgagaaggagggatg

SEQ ID NO: 108501 - DNA, 120 bp, Artificial Sequence
  ENSG00000099917_44 (sequence is synthesized)
ctgtgagcaggcttaactgagctcatggttcagtgggagttgagtgttctcatcacaggctttggtggaatgtactcttgacatctgtccccaggagcctggtctccagaaacaccagct

SEQ ID NO: 108502 - DNA, 120 bp, Artificial Sequence
  ENSG00000099917_45 (sequence is synthesized)
caggccctcaaggtctggctctgatggttctgtgggctataggattctgatctgttagcgaggtgtgttcagaagtgtgttgaggacaccagtgcaggagagcaaccagtagaacagaaa

SEQ ID NO: 108503 - DNA, 120 bp, Artificial Sequence
  ENSG00000099917_46 (sequence is synthesized)
ggtctggaagcagcattcttggcaaatcttctagattcccaatgcccagacagacctggaggtgctgtgggcttgaacatgtgggtggcctcccctcccaggctgccccgagctgcccaa

SEQ ID NO: 108504 - DNA, 120 bp, Artificial Sequence
  ENSG00000099917_47 (sequence is synthesized)
gctttccttgccctggtgctccttcttgcagaggctacacgtgccctctccacctgcccaggcactgagtttctttgttgcgatcaccttgtctgttgtccctctgtcctcaaagatgat

SEQ ID NO: 108505 - DNA, 120 bp, Artificial Sequence
  ENSG00000099917_48 (sequence is synthesized)
gcagcatgtgttaaccacaacagatggctgtagccaccaggcttgtccttggtgcagtcagcctgggggctgcgggggcttgtggaagcatgtgggaagacggtcccactggtcagcaga

SEQ ID NO: 108506 - DNA, 120 bp, Artificial Sequence
  ENSG00000099917_49 (sequence is synthesized)
gcagggtcctcaccgacccacagaggagcatgtcacaggacaggcaggcgtgtcagggaaggccaggctagtgccagccaagggcattgcctcccagactgcccttttcctcacactccc

SEQ ID NO: 108507 - DNA, 120 bp, Artificial Sequence
  ENSG00000099917_50 (sequence is synthesized)
acgacacagccctcaaagcctgtgcccctgtgggtccctggccaaggagcaagggctgccctgcctgggccccccccgccagccccttggtcacctcatgctgtgtgccaggctggggga

SEQ ID NO: 108508 - DNA, 120 bp, Artificial Sequence
  ENSG00000099917_51 (sequence is synthesized)
gtgtgcctgtgtgtatgtccaggtggcatttggatgaagacacaggtgtgtggtgaggctgtgcgggaggatgggcctatgcgtgcggtgggcaggtggtgtggaggcaggcgggcgggc

SEQ ID NO: 108509 - DNA, 120 bp, Artificial Sequence
  ENSG00000099917_52 (sequence is synthesized)
agtgtcccctcacctggacctttaaacacacctggtaagttgggcctgaggtgctaaggtcactcctcacctttatgaggcctcagctcatactgggtgtgcgagctctggggccctcag

SEQ ID NO: 108510 - DNA, 120 bp, Artificial Sequence
  ENSG00000099917_53 (sequence is synthesized)
gctctttggaccctggccagaggcctccaaggctccactctggtgtgtgctggggcttcaagcccaggcttcatcttggcccatgcccagcctttgccctattcctggctgctgctgtgg

SEQ ID NO: 108511 - DNA, 120 bp, Artificial Sequence
  ENSG00000099917_54 (sequence is synthesized)
ccctcatgctgggccatcacagccagacctcatccagtcagcagccaggggcccagcttgcagtggcctgaccatcagctggcccagatgggcctgagcctgacctggagttctgcccct

SEQ ID NO: 108512 - DNA, 120 bp, Artificial Sequence
  ENSG00000099917_55 (sequence is synthesized)
gacttgctggtgaccatgggcaggcgactgcatctcagttaccccatttgtagcccacgtgtgttgtcatgaaaatgaaacaaggtggcgctggtgagaagcaggtggaaggcagggctg

SEQ ID NO: 108513 - DNA, 120 bp, Artificial Sequence
  ENSG00000099917_56 (sequence is synthesized)
ctggccacaggctgctgtgaggatcagagctcgggcagtacctccaaactgcatgggcattggcatatacctccctttcacctcaactcaggctatcccccaacccctgtctagaagggt

SEQ ID NO: 108514 - DNA, 120 bp, Artificial Sequence
  ENSG00000099917_57 (sequence is synthesized)
ctctctgttctgcttgtctggatagaatgccagtcactattgggtggtcctccaggtcttcatgggttgatcctttgttagggttatagggatgagtggggcagggactggcctacatga

SEQ ID NO: 108515 - DNA, 120 bp, Artificial Sequence
  ENSG00000099917_58 (sequence is synthesized)
caatgaggcattcacagcctgatcaggggcctggccactgtcccttctcttgacccatcacctcactctgccaaccagggacaagcagctcctggggttgagggctgcctgccttcaact

SEQ ID NO: 108516 - DNA, 120 bp, Artificial Sequence
  ENSG00000099917_59 (sequence is synthesized)
ctgggtctgggaacagctggtcaactggtaggagctcctgcagaggtttctgatggctgaggcccagtggcagtagttgggatcctgagcctgagaactgccatgtcttccactctttca

SEQ ID NO: 108517 - DNA, 120 bp, Artificial Sequence
  ENSG00000099917_60 (sequence is synthesized)
gcccaagtcctctctctctgcaggtgtcccctgaagaccttgcaaaagtgtgagatcgccctggagaaactcaagaatgacatggcggtggtgagtgggatgccagacacccctagggga

SEQ ID NO: 108518 - DNA, 120 bp, Artificial Sequence
  ENSG00000099917_61 (sequence is synthesized)
cctgggagtgctgctgagagggccttcaaggtcagggcatctgggcgggggccgggcctgaccttggaccctgcccacgaggcttcctggccaggtctgctgtgctgggtgggaacatgg

SEQ ID NO: 108519 - DNA, 120 bp, Artificial Sequence
  ENSG00000099917_62 (sequence is synthesized)
gagaagtcaccctctgtctacggcccccgtgggtgcctccttcacccatttcagaggaggcagggactgtagggaggataggctgtgggggtgggggattattcccaggatcagccaaca

SEQ ID NO: 108520 - DNA, 120 bp, Artificial Sequence
  ENSG00000099917_63 (sequence is synthesized)
ttgtctgcacaagggtggaggctgtgagagaggcctcgggaatctgactgtgagtgaccatgggcctggggtgtgaaggccccctaaatggggaaccctcgggtcccgggctgctgaccg

SEQ ID NO: 108521 - DNA, 120 bp, Artificial Sequence
  ENSG00000099917_64 (sequence is synthesized)
cagccccaggactctgccatccaagccagatggcacagcgcccagaacccaccctgtgttcacgccccgccaggctgtctgctctatcctcacacacaccgggctccagacagcctggcc

SEQ ID NO: 108522 - DNA, 120 bp, Artificial Sequence
  ENSG00000099917_65 (sequence is synthesized)
atgcctcagtccccactgccagagcccgcacactctcacctccccaacacagatgtggctttgcttgcctgggccctagggaggtggtaggcaggacctctgggcacccatcaatgcaga

SEQ ID NO: 108523 - DNA, 120 bp, Artificial Sequence
  ENSG00000099917_66 (sequence is synthesized)
gcactccaggcttcacgtttggaaatctgagagtcagagagacctcctccaggctttgccacaagcttcaccagaacctccctgggtgtggagtcctgttccagagcagggctgtgaggc

SEQ ID NO: 108524 - DNA, 120 bp, Artificial Sequence
  ENSG00000099917_67 (sequence is synthesized)
tgggttgttgagatctctgtgagaggccagccctgacgctgcctcggcagagctttctgggcaggccgtggtgcctgagtcagaaggtctgtgtcacctcacttgcttctgggaagttct

SEQ ID NO: 108525 - DNA, 120 bp, Artificial Sequence
  ENSG00000099917_68 (sequence is synthesized)
tcactgccttgcatttgactccagatccctccatcctcccagagccttggcctcaaaaatgctgattctagcatcatggaaatgctgtcctcaaagtggtctaaacgggttgctgcttca

SEQ ID NO: 108526 - DNA, 120 bp, Artificial Sequence
  ENSG00000099917_69 (sequence is synthesized)
gactgaggcggcggcggtggcggccaagcgggatacgggcggcgggagctggggaacaggcatggacgtttccgggcaagagaccgactggcggagcaccgccttccggcagaagctgcg

SEQ ID NO: 108527 - DNA, 120 bp, Artificial Sequence
  ENSG00000099917_70 (sequence is synthesized)
acatgcttgcctggtggtgaatgggacactttcaggcgagacctaggggagccccaggccagcaccaggacagagatctcgaggcctttccaactctgctggttcttcagaagtcaaacc

SEQ ID NO: 108528 - DNA, 120 bp, Artificial Sequence
  ENSG00000099917_71 (sequence is synthesized)
ggcatggcggtcctgccaggacatacctgtctgtgggtagctgtttgctgtgaagtccacactgttgtgacaatggcatccttgtccttggttgtggcattgctcactgagctgctgacc

SEQ ID NO: 108529 - DNA, 120 bp, Artificial Sequence
  ENSG00000099917_72 (sequence is synthesized)
tggtgggcttgggacatttctcctcagtgctctgtggagccctcctctgcacccctaagctgttctggcatggtggccctgcacacaggggcccaggctgagttggactctgcaacagca

SEQ ID NO: 108530 - DNA, 120 bp, Artificial Sequence
  ENSG00000099917_73 (sequence is synthesized)
cgagtggagctgtgtgtgcctgtggacttgtgccctccctgggagagcgtcccctggccactgtgttaccgcttgctcagaagggcccatcgtgctttgtacgctcacccagcaggaggg

SEQ ID NO: 108531 - DNA, 120 bp, Artificial Sequence
  ENSG00000099917_74 (sequence is synthesized)
ctggacagccaggagaggcaggggttgccacctgccctcaaggcctcagcccatctttagtgtatctgcaggcatcagagaggtcatttgtcccttaacattaggactctggtccaggcc

SEQ ID NO: 108532 - DNA, 120 bp, Artificial Sequence
  ENSG00000099917_75 (sequence is synthesized)
aggctagaggtatgggtcatgcagtgaccaacacacctggcgtcctagccattcatatttgggagtctccaggagcctagtctcttactgcttggggctgtgaggggattgagcctgtag

SEQ ID NO: 108533 - DNA, 120 bp, Artificial Sequence
  ENSG00000099917_76 (sequence is synthesized)
gtaggcgagatctgtgctctgtgagccttacgccctttgagccatggtcagtctggtaggccctttcctgagaagctctgcccttgtgttcccacagatcctatgaatgcactccagagc

SEQ ID NO: 108534 - DNA, 120 bp, Artificial Sequence
  ENSG00000099917_77 (sequence is synthesized)
agagaccgactggcggagcaccgccttccggcagaagctggtcagtcaaatggtctcactctgtcactcaggctgaagtgcagtggcgtgattgtggctcactgcaacctccacctcctg

SEQ ID NO: 108535 - DNA, 120 bp, Artificial Sequence
  ENSG00000099917_78 (sequence is synthesized)
agaggactcaggtgcacacctgcatggcagaaccaggctctgggcccaggtgtctgacactgagtagctcgcctctcccaggggcgctggtgtgggccgatgcaagtgccaccatgggtg

SEQ ID NO: 108536 - DNA, 120 bp, Artificial Sequence
  ENSG00000099937_0 (sequence is synthesized)
atctctgaagcgccacttctcagaaacacagagctttagctccgccaaaatgaaacactcattaaacgcacttctcattttcctcatcataacatctgcgtggggtgggagcaaaggccc

SEQ ID NO: 108537 - DNA, 120 bp, Artificial Sequence
  ENSG00000099937_1 (sequence is synthesized)
gctggatcagctagagaaaggaggggaaactgctcagtctgcagatccccagtgggagcagttaaataacaaaaacctgagcatgcctcttctccctgccgacttccacaaggaaaacac

SEQ ID NO: 108538 - DNA, 120 bp, Artificial Sequence
  ENSG00000099937_2 (sequence is synthesized)
cgtcaccaacgactggattccagagggggaggaggacgacgactatctggacctggagaagatattcagtgaagacgacgactacatcgacatcgtcgacagtctgtcagtttccccgac

SEQ ID NO: 108539 - DNA, 120 bp, Artificial Sequence
  ENSG00000099937_3 (sequence is synthesized)
agactctgatgtgagtgctgggaacatcctccagctttttcatggcaagagccggatccagcgtcttaacatcctcaacgccaagttcgctttcaacctctaccgagtgctgaaagacca

SEQ ID NO: 108540 - DNA, 120 bp, Artificial Sequence
  ENSG00000099937_4 (sequence is synthesized)
ggtcaacactttcgataacatcttcatagcacccgttggcatttctactgcgatgggtatgatttccttaggtctgaagggagagacccatgaacaagtgcactcgattttgcattttaa

SEQ ID NO: 108541 - DNA, 120 bp, Artificial Sequence
  ENSG00000099937_5 (sequence is synthesized)
agactttgttaatgccagcagcaagtatgaaatcacgaccattcataatctcttccgtaagctgactcatcgcctcttcaggaggaattttgggtacacactgcggtcagtcaatgacct

SEQ ID NO: 108542 - DNA, 120 bp, Artificial Sequence
  ENSG00000099937_6 (sequence is synthesized)
ttatatccagaagcagtttccaatcctgcttgacttcaaaactaaagtaagagagtattactttgctgaggcccagatagctgacttctcagaccctgccttcatatcaaaaaccaacaa

SEQ ID NO: 108543 - DNA, 120 bp, Artificial Sequence
  ENSG00000099937_7 (sequence is synthesized)
ccacatcatgaagctcaccaagggcctcataaaagatgctctggagaatatagaccctgctacccagatgatgattctcaactgcatctacttcaaaggatcctgggtgaataaattccc

SEQ ID NO: 108544 - DNA, 120 bp, Artificial Sequence
  ENSG00000099937_8 (sequence is synthesized)
agtggaaatgacacacaaccacaacttccggctgaatgagagagaggtagttaaggtttccatgatgcagaccaaggggaacttcctcgcagcaaatgaccaggagctggactgcgacat

SEQ ID NO: 108545 - DNA, 120 bp, Artificial Sequence
  ENSG00000099937_9 (sequence is synthesized)
gtcccacacaagatgtctgggatgaagaccctcgaagcgcaactgacaccccgggtggtggagagatggcaaaaaagcatgacaaacagaactcgagaagtgcttctgccgaaattcaag

SEQ ID NO: 108546 - DNA, 120 bp, Artificial Sequence
  ENSG00000099937_10 (sequence is synthesized)
ctggagaagaactacaatctagtggagtccctgaagttgatggggatcaggatgctgtttgacaaaaatggcaacatggcaggcatctcagaccaaaggatcgccatcgacctgttcaag

SEQ ID NO: 108547 - DNA, 120 bp, Artificial Sequence
  ENSG00000099937_11 (sequence is synthesized)
caccaaggcacgatcacagtgaacgaggaaggcacccaagccaccactgtgaccacggtggggttcatgccgctgtccacccaagtccgcttcactgtcgaccgcccctttcttttcctc

SEQ ID NO: 108548 - DNA, 120 bp, Artificial Sequence
  ENSG00000099937_12 (sequence is synthesized)
atctacgagcatcgcaccagctgcctgctcttcatgggaagagtggccaaccccagcaggtcctagaggtggaggtctaggtgtctgaagtgccttgggggcaccctcattttgtttcca

SEQ ID NO: 108549 - DNA, 120 bp, Artificial Sequence
  ENSG00000099937_13 (sequence is synthesized)
ttccaacaacgagaacagagatgttctggcatcatttacgtagtttacgctaccaatctgaattcgaggcccatatgagaggagcttagaaacgaccaagaagagaggcttgttggaatc

SEQ ID NO: 108550 - DNA, 120 bp, Artificial Sequence
  ENSG00000099937_14 (sequence is synthesized)
aattctgcacaatagcccatgctgtaagctcatagaagtcactgtaactgtagtgtgtctgctgttacctagagggtctcacctccccactcttcacagcaaacctgagcagcgcgtcct

SEQ ID NO: 108551 - DNA, 120 bp, Artificial Sequence
  ENSG00000099937_15 (sequence is synthesized)
aagcacctcccgctccggtgaccccatccttgcacacctgactctgtcactcaagcctttctccaccaggcccctcatctgaataccaagcacagaaatgagtggtgtgactaattcctt

SEQ ID NO: 108552 - DNA, 120 bp, Artificial Sequence
  ENSG00000099937_16 (sequence is synthesized)
acctctcccaaggagggtacacaactagcaccattcttgatgtccagggaagaagccacctcaagacatatgaggggtgccctgggctaatgttagggcttaattttctcaaagcctgac

SEQ ID NO: 108553 - DNA, 120 bp, Artificial Sequence
  ENSG00000099937_17 (sequence is synthesized)
ctttcaaatccatgatgaatgccatcagtccctcctgctgttgcctccctgtgacctggaggacagtgtgtgccatgtctcccatactagagataaataaatgtagccacatttactgtg

SEQ ID NO: 108554 - DNA, 120 bp, Artificial Sequence
  ENSG00000099937_18 (sequence is synthesized)
taatgctgtgagggcctcttcctgggtcaaagccacagggaacctgccatgtggatgctgcagcggggtgtggatcagccaggccgcctttcactgtgttctgttttccctcccagcttt

SEQ ID NO: 108555 - DNA, 120 bp, Artificial Sequence
  ENSG00000099940_0 (sequence is synthesized)
gttcgcgcgacgaccgcggggtcggcgggcggggcgaggccctggacggcggcggcagtggggctcctccttctgtttcccagaccgagagccgcgccggcaccatgtcagcttacccta

SEQ ID NO: 108556 - DNA, 120 bp, Artificial Sequence
  ENSG00000099940_1 (sequence is synthesized)
aaagctacaatccgttcgacgacgacggggaggacgaaggcgcccggccggccccttggagggacgcccgagacctccccgacgggcccgacgcgcccgcggacaggcagcagtacttgc

SEQ ID NO: 108557 - DNA, 120 bp, Artificial Sequence
  ENSG00000099940_2 (sequence is synthesized)
ggcaggaggtcctccgcagggctgaggccacggccgccagcaccagcaggtccctggccctcatgtacgagtccgagaaggttggggtcgcctcttccgaggagctcgcccgtcagcgag

SEQ ID NO: 108558 - DNA, 120 bp, Artificial Sequence
  ENSG00000099940_3 (sequence is synthesized)
gagtcctggagcgcacagagaagatggtggacaagatggaccaagatttgaagatcagccagaaacacatcaatagcattaagagcgtgtttggggggctggtcaattacttcaaatcca

SEQ ID NO: 108559 - DNA, 120 bp, Artificial Sequence
  ENSG00000099940_4 (sequence is synthesized)
aaccagtagagaccccacctgaacagaatggcaccctcacctcccagcccaacaacagattgaaagaagctataagtacaagtaaagaacaggaagcaaagtaccaggccagccacccaa

SEQ ID NO: 108560 - DNA, 120 bp, Artificial Sequence
  ENSG00000099940_5 (sequence is synthesized)
accttagaaagctggatgatacagaccctgtccccagaggggctggttctgccatgagtactgatgcttacccaaagaacccacaccttcgagcctatcaccagaagatcgacagcaacc

SEQ ID NO: 108561 - DNA, 120 bp, Artificial Sequence
  ENSG00000099940_6 (sequence is synthesized)
tagatgagctgtccatgggactgggtcgtctgaaggacatagccctggggatgcagacagaaattgaggagcaagatgacattcttgaccggctgacaaccaaagtggacaagttagatg

SEQ ID NO: 108562 - DNA, 120 bp, Artificial Sequence
  ENSG00000099940_7 (sequence is synthesized)
tcaacataaaaagcacagaaagaaaagttcgacaactctgaagacagacggatttccactctattgtgatgaaaagatttgaaagatctttttttgaacttccaagaaatttcatttact

SEQ ID NO: 108563 - DNA, 120 bp, Artificial Sequence
  ENSG00000099940_8 (sequence is synthesized)
attttagtatgtaaattaatgtgtgtttgcaaatgttataatagagtaggtcttaagacatttttgctgttataaggaagtgtttgtcccacattttcctagggttaacacctcaccaag

SEQ ID NO: 108564 - DNA, 120 bp, Artificial Sequence
  ENSG00000099940_9 (sequence is synthesized)
ttcttccagcaaaatgcttattagagtttttgtctgagcacagtagcctggccctgcatatcttgggcgtttgattaccatgctggaataagaagagttgcatttctcattttaatgagc

SEQ ID NO: 108565 - DNA, 120 bp, Artificial Sequence
  ENSG00000099940_10 (sequence is synthesized)
atatggaaagatgggaacagaatttcagtcttgcagccatgagcctctatttctcattcctaagccttaccatgagtcagagtgttaagggggcctgtgaaccagtcgtttggtggagga

SEQ ID NO: 108566 - DNA, 74 bp, Artificial Sequence
  ENSG00000099940_11 (sequence is synthesized)
gagcacattatctgtgattctttcatcctcccagaaaggatcagtgttagaatgggaaatagagtgtgccatct

SEQ ID NO: 108567 - DNA, 120 bp, Artificial Sequence
  ENSG00000099940_12 (sequence is synthesized)
aaaggatcagtgttagaatgggaaatagagtgtgccatcttgctcttttgttggcagatgtccccgcttccctccagccccccatccttggcatgtatattagtaggagggcttcacacc

SEQ ID NO: 108568 - DNA, 120 bp, Artificial Sequence
  ENSG00000099940_13 (sequence is synthesized)
agcactgctcactgcgactcctggaaatgtgtggggaattgggtgagcccctcttccccacgtgctcccatctgtaactctccatctgtgatttgcaacaggtcttccactggctcgagg

SEQ ID NO: 108569 - DNA, 120 bp, Artificial Sequence
  ENSG00000099940_14 (sequence is synthesized)
ctgcgaggctgaccgacaggggcgcccaatagagtttgtgggaatggagtattgcacagatgcagctgcacaatggtcttcctccacccctctgggaatcaccattaggcaggcctcagt

SEQ ID NO: 108570 - DNA, 120 bp, Artificial Sequence
  ENSG00000099940_15 (sequence is synthesized)
agggcaaaatgtttatttggtaccgggggtctcctgacctgtctagcattcccacccactcttctgcacttcttgcaaggtaacttgaatcatcacttatttctctgccacctggtttta

SEQ ID NO: 108571 - DNA, 120 bp, Artificial Sequence
  ENSG00000099940_16 (sequence is synthesized)
ggactggcactctataaatgacgctgactttgtatagaaggattttgctaagggggcaaaaagcccagataccattttaactggcccagttcattttctcctttcattttacaaaagaaa

SEQ ID NO: 108572 - DNA, 120 bp, Artificial Sequence
  ENSG00000099940_17 (sequence is synthesized)
tggagccacaaggcccttgtctttttaaaaaaacaaaatattttgaagatggtgaaagtgactgattttaataatgagataggtcacttaaaataacagtgcctttgaccttaaaacatg

SEQ ID NO: 108573 - DNA, 120 bp, Artificial Sequence
  ENSG00000099940_18 (sequence is synthesized)
gcactggcccatgtgacctttgccatttcccagtacttccctttacagtctgcagcctataaacagtggtgtctcaaagcaaaggaaacctccacaagtgctgcaacagtgcattagttt

SEQ ID NO: 108574 - DNA, 120 bp, Artificial Sequence
  ENSG00000099940_19 (sequence is synthesized)
ttatgtagcaatttgtttataaaaattcccatcccataatgcatgaccttcctaaaaatatccacagcctccataggcaaggtgagctttctgtgctacccacttgttagattccagcca

SEQ ID NO: 108575 - DNA, 120 bp, Artificial Sequence
  ENSG00000099940_20 (sequence is synthesized)
cctcagggattctgatccatgtcattaacgaccatcccagggtgtgagggcctgattaaagcttatcgaactagacatttgtttattagatgagctcggcattattattttctcaataac

SEQ ID NO: 108576 - DNA, 120 bp, Artificial Sequence
  ENSG00000099940_21 (sequence is synthesized)
tggtagaagggaaattttaaacataacactcaacccaaacaaaactacttcgtgaggctttcagcaaaaaggctgcttaaaagcatgaacccgggatgcagagcagcttttgtgcacggt

SEQ ID NO: 108577 - DNA, 120 bp, Artificial Sequence
  ENSG00000099940_22 (sequence is synthesized)
tccacttactgtaattgtttctggttctttcctctaacaccttccatgtatgtcaactttttatcaccgtcaggcatagactcgtggagattagtcattatagctcagacctaagctaat

SEQ ID NO: 108578 - DNA, 120 bp, Artificial Sequence
  ENSG00000099940_23 (sequence is synthesized)
tatttaaaataaatacatgtaaaggccactgccacattctcagcagacttccacttgcctaatgagattagtgattcaactgacttgaagcacagtaacatcttattttatgcacattcc

SEQ ID NO: 108579 - DNA, 120 bp, Artificial Sequence
  ENSG00000099940_24 (sequence is synthesized)
ctgtcttttgctggactgatgaagccagtcacccgcccttctctgttttttggttttttttttcttaaccccaggtatatggaaggggagttgccttcacttttctggaaatttgtcttc

SEQ ID NO: 108580 - DNA, 120 bp, Artificial Sequence
  ENSG00000099940_25 (sequence is synthesized)
gtctgacatattagagggcctcgttttgtcctgttcttgttcagaccctctcgttctacgtcctgtgctgaggggactgtccgtaagctacaggacagcgagctggtcctttctgccact

SEQ ID NO: 108581 - DNA, 120 bp, Artificial Sequence
  ENSG00000099940_26 (sequence is synthesized)
tcttccccactcccatgcccaggaaggcctggttgctgatgctactttataaatgagttgcttgcattttcacagagaatgaaggaagacgtaacatggctccagaaacttttcacatga

SEQ ID NO: 108582 - DNA, 120 bp, Artificial Sequence
  ENSG00000099940_27 (sequence is synthesized)
tgattgggatcgacaaaaaaatgctaccctctagactagacacatttcatggagacaagcaaaatggtgccagggctgggctgactgtgggatgggatttggtactgcagacagattttg

SEQ ID NO: 108583 - DNA, 120 bp, Artificial Sequence
  ENSG00000099940_28 (sequence is synthesized)
atttccacagttgagctggaaacaaactgtgccttcaaaaaatgacttttctaacttaaggttggttatatgttaagtgtgctactaacttaaaaaatagtggctgggcgcggtggctca

SEQ ID NO: 108584 - DNA, 83 bp, Artificial Sequence
  ENSG00000099940_29 (sequence is synthesized)
cagtgagccaatagtgcactgtccttcgagaaagttttctaacatctagtaatttgtaacttagaagtggagttgccttgtgg

SEQ ID NO: 108585 - DNA, 120 bp, Artificial Sequence
  ENSG00000099940_30 (sequence is synthesized)
atctagtaatttgtaacttagaagtggagttgccttgtggatgtcttttttgcattctgtaggaaatgaaacgtgaatttaactcgggttgcaagaaataaaaatgtcagtgcatttaaa

SEQ ID NO: 108586 - DNA, 120 bp, Artificial Sequence
  ENSG00000099940_31 (sequence is synthesized)
aaaggagcagaagtggggattagtgcaaatgaccaagactttcagtccacgtcagtgccatgaagggatccaacaaccctttaagttactcatcaggggatatttgtcctcaaacattgt

SEQ ID NO: 108587 - DNA, 120 bp, Artificial Sequence
  ENSG00000099940_32 (sequence is synthesized)
gaaaccaggaactgttcttccctgatcccatgttcacttgattgacatctagtctgtcaatagcttctccaataattgtgaccccactactttgaaagagagggtgttcacctcagcgta

SEQ ID NO: 108588 - DNA, 120 bp, Artificial Sequence
  ENSG00000099940_33 (sequence is synthesized)
accccactactttgaaagagagggtgttcacctcagcgtaatctgtacaaatgtgactcacttcacataatttttgctttaaaaaatctttagggctgggtgcagtggctcacacctgta

SEQ ID NO: 108589 - DNA, 120 bp, Artificial Sequence
  ENSG00000099940_34 (sequence is synthesized)
gtagattgcttaagcccaggagctcgagaccagcctgggcaacatagtgggaacccagtctttacaaaaattacccaggcattgtggtgcacacctgtagtcccagctcctcaggaggct

SEQ ID NO: 108590 - DNA, 120 bp, Artificial Sequence
  ENSG00000099940_35 (sequence is synthesized)
gtggtaacaatctgttaactatgtaaaggtatgtgcatctggagtacttgaagagggcagtttaccccagaaatcttccttagctattagtctgcttcgttgattttttttttcttacgc

SEQ ID NO: 108591 - DNA, 120 bp, Artificial Sequence
  ENSG00000099942_0 (sequence is synthesized)
gcagacggagcgcgctgagcggagggggaggtggctgccgcttctcccgcgtccgccattttgttgctgtggctattgggaacaagctgggcaaaagcaccccggaggcgcgacgctcct

SEQ ID NO: 108592 - DNA, 120 bp, Artificial Sequence
  ENSG00000099942_1 (sequence is synthesized)
tcgagttcggtgcctcgtgtgacggcgggggtcggtgaagacccgtcgagctgcggcgccggcgcgttccaggccgggagtcactggaggcacccctgggacgccgagcagcccgagaac

SEQ ID NO: 108593 - DNA, 120 bp, Artificial Sequence
  ENSG00000099942_2 (sequence is synthesized)
gggtggcctccgctgcggctcgggtttgcctgccccgaccccccggctctgccgtgcattcccgggcggctctctccgtgtggcggccccggagcaggcgggcggcgtcggaggatgctg

SEQ ID NO: 108594 - DNA, 120 bp, Artificial Sequence
  ENSG00000099942_3 (sequence is synthesized)
gctgcgggcccggagccgagaggaaagtgctggcccagccctctgagcgctcctcgaggtgtgcgagaggcccttcctcggccccaaagccgtctgccgggctaaggcgtgcagagcagg

SEQ ID NO: 108595 - DNA, 120 bp, Artificial Sequence
  ENSG00000099942_4 (sequence is synthesized)
cgaggacagccgccgcccctaccgccgcagagtccccggtccaacaccatgtcctccgccaggttcgactcctcggaccgctccgcctggtatatggggccggtgtctcgccaggaggcg

SEQ ID NO: 108596 - DNA, 120 bp, Artificial Sequence
  ENSG00000099942_5 (sequence is synthesized)
cagacccggctccagggccagcgccacggtatgttcctcgtccgcgattcttccacctgccctggggactatgtgctgtcggtgtccgagaactcgcgggtctcccactacatcatcaac

SEQ ID NO: 108597 - DNA, 120 bp, Artificial Sequence
  ENSG00000099942_6 (sequence is synthesized)
tcgctgcccaaccgccgttttaagatcggggaccaggaatttgaccatttgccggccctgctggagttttacaagatccactacctggacaccaccaccctcatcgagcctgcgcccagg

SEQ ID NO: 108598 - DNA, 120 bp, Artificial Sequence
  ENSG00000099942_7 (sequence is synthesized)
tatccaagcccaccaatgggatctgtctcagcacccaacctgcctacagcagaagataacctggaatatgtacggactctgtatgattttcctgggaatgatgccgaagacctgcccttt

SEQ ID NO: 108599 - DNA, 120 bp, Artificial Sequence
  ENSG00000099942_8 (sequence is synthesized)
aaaaagggtgagatcctagtgataatagagaagcctgaagaacagtggtggagtgcccggaacaaggatggccgggttgggatgattcctgtcccttatgtcgaaaagcttgtgagatcc

SEQ ID NO: 108600 - DNA, 120 bp, Artificial Sequence
  ENSG00000099942_9 (sequence is synthesized)
tcaccacacggaaagcatggaaataggaattccaacagttatgggatcccagaacctgctcatgcatacgctcaacctcagaccacaactcctctacctgcagtttccggttctcctggg

SEQ ID NO: 108601 - DNA, 120 bp, Artificial Sequence
  ENSG00000099942_10 (sequence is synthesized)
gcagcaatcacccctttgccatccacacagaatggacctgtctttgcgaaagcaatccagaaaagagtaccctgtgcttatgacaagactgccttggcattagaggttggtgacatcgtg

SEQ ID NO: 108602 - DNA, 120 bp, Artificial Sequence
  ENSG00000099942_11 (sequence is synthesized)
aaagtcacaaggatgaatataaatggccagtgggaaggcgaagtgaacgggcgcaaagggcttttcccctttacgcacgtcaaaatctttgaccctcaaaacccagatgaaaacgagtga

SEQ ID NO: 108603 - DNA, 120 bp, Artificial Sequence
  ENSG00000099942_12 (sequence is synthesized)
ttgctgttgccctgtttcctgctgctttgttgttctgcctgtcctagtctcctttgaagtgggaaagcattttctctcataggcaagtcacactgcattgccgaagtccagctttctgca

SEQ ID NO: 108604 - DNA, 120 bp, Artificial Sequence
  ENSG00000099942_13 (sequence is synthesized)
gactggcagtcgcacacacatttggaatgcacacagcggctgcctcctgatgtttgtatcatagtcgtattgtcaaagagtagccgattttagagttcttttggatcataaactggaaat

SEQ ID NO: 108605 - DNA, 120 bp, Artificial Sequence
  ENSG00000099942_14 (sequence is synthesized)
actgatggaagcacacaagtggagagaagttgacatggaaagggtcttccttctcattgctgcccgtttgtacatgggactgattctgttgtgttcaccagagaaagcttgaggccatgg

SEQ ID NO: 108606 - DNA, 120 bp, Artificial Sequence
  ENSG00000099942_15 (sequence is synthesized)
cgagatactgcatgtttgctgttccacaaagcagtggcttagctgccatcttgcttttctttggacaacaggaagtgaaccttaaggaagagagaattctgttctaaaactccaaaatct

SEQ ID NO: 108607 - DNA, 120 bp, Artificial Sequence
  ENSG00000099942_16 (sequence is synthesized)
agaattctgttctaaaactccaaaatctggcttttttttttcttttgttttggtttggttttggaaaactaattaattagacttgtgtgggggtttttttttgttttgttttgtttgttt

SEQ ID NO: 108608 - DNA, 61 bp, Artificial Sequence
  ENSG00000099942_17 (sequence is synthesized)
cagcctcccaacgtgctgggattacagccgtgagccgccgcgcctggcctagacttgtgtg

SEQ ID NO: 108609 - DNA, 120 bp, Artificial Sequence
  ENSG00000099942_18 (sequence is synthesized)
ttacagccgtgagccgccgcgcctggcctagacttgtgtgttctaaacaggttaagtagcaggttgggtttttatgatagtgcaaggaatgactcatgcctctgagcttctaaactgaag

SEQ ID NO: 108610 - DNA, 120 bp, Artificial Sequence
  ENSG00000099942_19 (sequence is synthesized)
ctgctgtaactaaaggaatctgaaaagaacaaccctgaagcagaggcctttattgtcttggttgccagtagtaccttgttttgccatgtagcagacaacacacaaaataatgcagttgtg

SEQ ID NO: 108611 - DNA, 120 bp, Artificial Sequence
  ENSG00000099942_20 (sequence is synthesized)
gtgtgccatgctatgtgcacagccccttggattactttgttttaaaaagcatcagagttgggggtactttagggaaacctttgcttaccttgttttgccagtgataagagcagtgggttg

SEQ ID NO: 108612 - DNA, 120 bp, Artificial Sequence
  ENSG00000099942_21 (sequence is synthesized)
ttaaacttccttaaaaagtggcgttgttcatagaatcgttggactcattaatgaatcgttcaactccactcactgaagcccagacctccgtgcccaggcccaatctcgtcaggctgccag

SEQ ID NO: 108613 - DNA, 120 bp, Artificial Sequence
  ENSG00000099942_22 (sequence is synthesized)
agaaagttggtgctgctcatactggtctcacagtctaagtaagtgtctgtgatgctcccaagcaaaggaaatgcaagctctggaaattcgttaatgtatttgatgtcttagtgttttagt

SEQ ID NO: 108614 - DNA, 120 bp, Artificial Sequence
  ENSG00000099942_23 (sequence is synthesized)
gactagggagaccattaactagtttatcattaaccacttatcagtgtattgatgttaaagcatttccctgttagctaaaagaggcctgttcatacaagccaactggtatatacgtgtggt

SEQ ID NO: 108615 - DNA, 120 bp, Artificial Sequence
  ENSG00000099942_24 (sequence is synthesized)
tcatccatcatctgctgcacatagcagactagaattctgggaaccctgtgcaattcagtctgctctcccttgtggaccctggtaaagaaaagcctcagctcatagtgaacacagcagacc

SEQ ID NO: 108616 - DNA, 120 bp, Artificial Sequence
  ENSG00000099942_25 (sequence is synthesized)
tagaaatgtagcagcagcctactgagtagctttcatttactgatcatctgctgtgactgtggccctgtctggaggttcctaggttttgagatttagagcaatgcattctggagacagaac

SEQ ID NO: 108617 - DNA, 120 bp, Artificial Sequence
  ENSG00000099942_26 (sequence is synthesized)
cagcagaacagccatttttcaatttttctttaaatcagtattccatcaggcagataactgctgtattcatgaatcttgagagtgttcctgagacagaattaatggtcatttgggaaaact

SEQ ID NO: 108618 - DNA, 120 bp, Artificial Sequence
  ENSG00000099942_27 (sequence is synthesized)
atcgccatggcttcccatctgtggttttcctctaaaagccttggagattagcccttccttgccagtgagaacggtgaccgcctcctgctctgcacggtctgcggcagttgccgcttctgg

SEQ ID NO: 108619 - DNA, 120 bp, Artificial Sequence
  ENSG00000099942_28 (sequence is synthesized)
ttaggtgtgtcaggttggcttattttgggttcaggcctggcgtagcacccacaagtggcagacatatcacaagagtccccagactctgcctagaaacagtgtttgccctttggccagtga

SEQ ID NO: 108620 - DNA, 120 bp, Artificial Sequence
  ENSG00000099942_29 (sequence is synthesized)
cgtggttcatcccggcccatgttgagccatgagtggagtttccaacagagggaggaatgtgtgccttgttcaaggagggcacgacccttaggcctttttcaaccagatttagctgaaggg

SEQ ID NO: 108621 - DNA, 120 bp, Artificial Sequence
  ENSG00000099942_30 (sequence is synthesized)
cttgacacctttgaattacagcagttgactcagagtgcaagaagtctggccattttggaaagcaaggtttcctttcagccctgtctactgaccaataccccgactcaccttgtgtggcgc

SEQ ID NO: 108622 - DNA, 120 bp, Artificial Sequence
  ENSG00000099942_31 (sequence is synthesized)
acttcagaatcagatatacctagagtatacctgtggtttggttttataattaatcagctcgttacttcagcccatgaaaatggcatccagggctgccaggagattcagagctcaaaacaa

SEQ ID NO: 108623 - DNA, 120 bp, Artificial Sequence
  ENSG00000099942_32 (sequence is synthesized)
ggcgagcttgagttctgcactccagatatgtgccaaaactagtaaaacttaacggacttacaaccttgtcagtttttttaatgaggcagggatactctgtttttcacactaaacatatga

SEQ ID NO: 108624 - DNA, 120 bp, Artificial Sequence
  ENSG00000099942_33 (sequence is synthesized)
atgcagcactgctgcctcagctcagcttcgtgcctgggttccccactggtctgggaagactgttgtgctccatagagcagtgcacatctgacccagagggtgggtgttcataactgctac

SEQ ID NO: 108625 - DNA, 120 bp, Artificial Sequence
  ENSG00000099942_34 (sequence is synthesized)
ttgctctgctctaccatgtttaaagaaatatttggatgttaaattaactcactatggtttttcacctgggaaggaaacaaattacgtactagagggcattgactggttaaaaacttgtgt

SEQ ID NO: 108626 - DNA, 120 bp, Artificial Sequence
  ENSG00000099942_35 (sequence is synthesized)
atcccgggaaggacctgcggtacaggagtcagccatgtctgtgctgtgtggaaccacctgatgacatggttaacgaggaagacgatgtgttgaccggctgccgtttgaggactttggtca

SEQ ID NO: 108627 - DNA, 120 bp, Artificial Sequence
  ENSG00000099942_36 (sequence is synthesized)
cccagactagacaccttctgtgctcatgtttggaaagctgaaagggaaggacagctgtgccctcctgggagctcatgtgtccctggcgctgtgctagctttcctttacagctgtttacag

SEQ ID NO: 108628 - DNA, 120 bp, Artificial Sequence
  ENSG00000099942_37 (sequence is synthesized)
acaaggcaggcctgaggcagatggccactgctcttgtgatgtttgctcagaggaatatgaacattttatttttgaaaagggatgatgtggttttttgccaggtgtttataattaatcctt

SEQ ID NO: 108629 - DNA, 120 bp, Artificial Sequence
  ENSG00000099942_38 (sequence is synthesized)
taatattatggttattaacctcttaaacatgaatgaattcttgattgttttaacacagtacctaagactaatgctttctgtggacaccactgagctctgcctcaactccaccctctgcga

SEQ ID NO: 108630 - DNA, 120 bp, Artificial Sequence
  ENSG00000099942_39 (sequence is synthesized)
ccggaggactatgcccctagtaactgctgtcggtgtggacgctgtgctggttctgttttctaaaggagcagaaggacaggtctctgagacaggatcgttgtccctacaggaggaacagtg

SEQ ID NO: 108631 - DNA, 120 bp, Artificial Sequence
  ENSG00000099942_40 (sequence is synthesized)
aaacaacaacaacaacaacaacaacaacataaaactcttttgacctgtaacttaaagatcataaacttcaggcaataatattttctgtgtaagcttttaaaattatttttggggatcata

SEQ ID NO: 108632 - DNA, 120 bp, Artificial Sequence
  ENSG00000099942_41 (sequence is synthesized)
ctgtgtaagcttttaaaattatttttggggatcatagcttgttttattttgtgctataaaattaacagtattaaatgacttatattcttagaatacatcgagtgtcttttcttaacagat

SEQ ID NO: 108633 - DNA, 120 bp, Artificial Sequence
  ENSG00000099942_42 (sequence is synthesized)
tagtgcctttttatttttgtattccgttttacgttactggtcccagcatcaaaacccttgtttccatggcctgtttgtatattgtctcaataaaacttgcatcagccggtggtggcggca

SEQ ID NO: 108634 - DNA, 120 bp, Artificial Sequence
  ENSG00000099949_0 (sequence is synthesized)
gtggtttctccagccggcccggggcggtggccgcaagttgggcttacagcgcggccgatccggcgtggacccgggatggctggaccgggcagcacgggggggcagatcggggctgcggcc

SEQ ID NO: 108635 - DNA, 120 bp, Artificial Sequence
  ENSG00000099949_1 (sequence is synthesized)
ctggcaggcggcgcgcggtccaaggtagccccgagcgtggacttcgaccatagctgctcggacagtgtcgagtacctgacgctcaacttcgggcccttcgaaacagtgcatcgctggcgg

SEQ ID NO: 108636 - DNA, 120 bp, Artificial Sequence
  ENSG00000099949_2 (sequence is synthesized)
cgcctcccgccctgcgacgagttcgtgggtgcccggcgcagcaagcacacagtggtggcctataaagatgccatttatgtatttggtggagacaatgggaagaccatgctcaatgacctc

SEQ ID NO: 108637 - DNA, 120 bp, Artificial Sequence
  ENSG00000099949_3 (sequence is synthesized)
ctgcggttcgatgtgaaagactgctcctggtgcagggcctttaccactgggaccccaccggccccccgttaccaccactcggccgtcgtctatgggagcagcatgtttgtctttgggggt

SEQ ID NO: 108638 - DNA, 120 bp, Artificial Sequence
  ENSG00000099949_4 (sequence is synthesized)
tacactggggacatttattccaattctaacttgaagaataaaaacgacctctttgaatacaagtttgcaactggccagtggacggagtggaaaattgaaggacggttgccagtcgctagg

SEQ ID NO: 108639 - DNA, 120 bp, Artificial Sequence
  ENSG00000099949_5 (sequence is synthesized)
tcagcccatggggccacggtgtacagtgacaagctgtggatctttgctggctatgacggcaacgccaggttgaatgacatgtggacaattggcctccaggaccgagagctcacctgctgg

SEQ ID NO: 108640 - DNA, 120 bp, Artificial Sequence
  ENSG00000099949_6 (sequence is synthesized)
gaggaggtggcccagagtggcgagatccccccatcttgctgcaacttccccgtggctgtgtgccgggacaagatgtttgtattctctgggcaaagcggagccaaaataaccaacaacctc

SEQ ID NO: 108641 - DNA, 120 bp, Artificial Sequence
  ENSG00000099949_7 (sequence is synthesized)
ttccagtttgaattcaaggacaagacgtggacacgcatcccaactgaacacctgctccggggctccccaccacccccgcagcggcgctacgggcataccatggtggcctttgaccgccac

SEQ ID NO: 108642 - DNA, 120 bp, Artificial Sequence
  ENSG00000099949_8 (sequence is synthesized)
ctctatgtgtttgggggtgcggccgacaacacgctgcccaacgagctgcactgctatgacgtggacttccagacctgggaggtcgtccagcccagctccgacagcgaggttggtggggct

SEQ ID NO: 108643 - DNA, 120 bp, Artificial Sequence
  ENSG00000099949_9 (sequence is synthesized)
gaagtgcccgagcgagcctgtgcttccgaggaggtgcccaccctgacctatgaggagcgggttggcttcaagaagtcccgagatgtgtttggcctggactttggcaccacctcagccaag

SEQ ID NO: 108644 - DNA, 120 bp, Artificial Sequence
  ENSG00000099949_10 (sequence is synthesized)
cagcccacccagcctgcctcggagctgcccagtgggaggctcttccacgcggctgctgtcatctcggacgccatgtacatcttcgggggcacggtggacaacaacatccgcagcggggag

SEQ ID NO: 108645 - DNA, 120 bp, Artificial Sequence
  ENSG00000099949_11 (sequence is synthesized)
atgtacaggttccagttctcctgttaccctaaatgcacgctgcacgaggactacgggcggctgtgggagagccgccagttctgcgacgtggagttcgtgctgggtgagaaggaggagtgc

SEQ ID NO: 108646 - DNA, 120 bp, Artificial Sequence
  ENSG00000099949_12 (sequence is synthesized)
gtgcagggccacgtagccattgtcacagcgcggagccgctggcttcgcaggaagatcacgcaggcgcgggagaggctggcccagaagctggagcaggaggccgccccagttcccagggag

SEQ ID NO: 108647 - DNA, 120 bp, Artificial Sequence
  ENSG00000099949_13 (sequence is synthesized)
gcccccggcgtggctgctggtggggcccggccgcccctgctgcacgtggccatccgggaggccgaggcccggcccttcgaggtgctcatgcagttcctctacaccgacaagatcaaatac

SEQ ID NO: 108648 - DNA, 120 bp, Artificial Sequence
  ENSG00000099949_14 (sequence is synthesized)
ccacggaaaggccatgtggaggatgtgctgctcatcatggatgtgtacaaactggcactgagcttccagttgtgccgcctggagcagctgtgccgccagtacatcgaggcctccgtggac

SEQ ID NO: 108649 - DNA, 120 bp, Artificial Sequence
  ENSG00000099949_15 (sequence is synthesized)
ctgcagaacgtgctggttgtgtgcgagagtgccgcccggctgcagctgagccaactcaaggagcactgcctgaacttcgtggtaaaggagtcccacttcaaccaggtgatcatgatgaag

SEQ ID NO: 108650 - DNA, 120 bp, Artificial Sequence
  ENSG00000099949_16 (sequence is synthesized)
gagttcgagcgcctctcctctccactgatagtggagattgtgcggcggaagcagcagccgccccctcgcactcccttggaccagccagtggacattggcacatctctgatccaggacatg

SEQ ID NO: 108651 - DNA, 120 bp, Artificial Sequence
  ENSG00000099949_17 (sequence is synthesized)
ctatcctggccgcccgctccagctactttgaagccatgttccggtccttcatgcccgaagatgggcaggtgaacatctccatcggggagatggtgcccagcaggcaggccttcgagtcca

SEQ ID NO: 108652 - DNA, 120 bp, Artificial Sequence
  ENSG00000099949_18 (sequence is synthesized)
tgctgcgctacatctactacggcgaggtcaacatgccgcccgaggactcgctctacttgtttgcggccccctactactacggcttctacaacaaccggctgcaggcgtactgcaagcaga

SEQ ID NO: 108653 - DNA, 120 bp, Artificial Sequence
  ENSG00000099949_19 (sequence is synthesized)
acctggagatgaacgtgacggtgcagaacgtgctgcagatcctggaggcagctgacaaaacgcaggcactggacatgaagcggcactgcctgcacatcattgtgcaccagttcaccaagg

SEQ ID NO: 108654 - DNA, 120 bp, Artificial Sequence
  ENSG00000099949_20 (sequence is synthesized)
tctccaagttgcccaccctgcggtcgctgagccagcagctgctgctggacatcatagactccctggcctcccacatctcagacaagcagtgcgcagagctgggcgccgacatctgaggcc

SEQ ID NO: 108655 - DNA, 120 bp, Artificial Sequence
  ENSG00000099949_21 (sequence is synthesized)
ctgtggcgcctgcccattgtgaagaatcgccgtgcctgcctgccctgcctactgagaagactaccggctatgcgcatgcctatggcagtgggtgcacctgccaggccaagggtcagggtg

SEQ ID NO: 108656 - DNA, 120 bp, Artificial Sequence
  ENSG00000099949_22 (sequence is synthesized)
cccagagcctccaaagagagctgaggggatgtggggccccaaactcattaattcactgaagacacaggtcccacagggagcggatgatgaagcagaccccctcctgtcatcaccctctcc

SEQ ID NO: 108657 - DNA, 120 bp, Artificial Sequence
  ENSG00000099949_23 (sequence is synthesized)
tggtgtagtgtggatgcgaggccacggctcagtgatgggctcaccacccagaagtggggagagactttgggcctcccacccagtggggcttggcctggcttctgtggcctgggcgtgttg

SEQ ID NO: 108658 - DNA, 120 bp, Artificial Sequence
  ENSG00000099949_24 (sequence is synthesized)
tggactcaggcactggggcctgtcaccaaggctcctccaacatgcgggaggaggcttagcagacttgcgctgcaccagcgaatctgcctgggctgctcctgtcccacccaccctcactga

SEQ ID NO: 108659 - DNA, 120 bp, Artificial Sequence
  ENSG00000099949_25 (sequence is synthesized)
gatccatgtaaggggctcctcttcccacctggaacttgtgagtggggacccatgatgtatgggtctcacctgacttgaggtgaattttggagtgaagggccctgaggtcagctcccaggt

SEQ ID NO: 108660 - DNA, 120 bp, Artificial Sequence
  ENSG00000099949_26 (sequence is synthesized)
cggtcgtgctgggccaggcctggttttcacaggggctgaaggatcccagtccacctgtgtgcatgtcagggctcggccgggaagaagccagcaaagtcccccgtgtcccttgctgagtat

SEQ ID NO: 108661 - DNA, 120 bp, Artificial Sequence
  ENSG00000099949_27 (sequence is synthesized)
tctgtcacagacaagcctccattaaagccacagcagtgctacccaccacacacaccttgctggcccggccaccactgctggcttcagccccttgagcagcccatggcttagcagaccccc

SEQ ID NO: 108662 - DNA, 120 bp, Artificial Sequence
  ENSG00000099949_28 (sequence is synthesized)
agatgtaggtcagtggccttacctgtctctatccatgctgtcaactcctgcctccacctggggtcacccagtcacattgggaagggctgtgaaggcctccaggctggccccttccagggg

SEQ ID NO: 108663 - DNA, 120 bp, Artificial Sequence
  ENSG00000099949_29 (sequence is synthesized)
aatcctggaggcctggggtgggctcctgccccttctgccctgccttgcccctgcactatgctcttggctcctgtggaaggagggctgccctcttgccctagtgagggccccatgtggatc

SEQ ID NO: 108664 - DNA, 120 bp, Artificial Sequence
  ENSG00000099949_30 (sequence is synthesized)
cactctagtgctgggagccagcgctcccttactgggaacaggattccaggacccctttcttgttgtggctgccatgaagccacagctccttggggaagtgacctgctctcctttgggtgt

SEQ ID NO: 108665 - DNA, 120 bp, Artificial Sequence
  ENSG00000099949_31 (sequence is synthesized)
atgcaggtgtgtggggggccctgagtggcaagttgcttagctaacaggagatccataggcagcctgcaggctaggaagtggcctagtgcaagatgagctgggaacaagggaggagagagc

SEQ ID NO: 108666 - DNA, 120 bp, Artificial Sequence
  ENSG00000099949_32 (sequence is synthesized)
aggagctggggcagaggctgagccgggaggcccttgaggtgaggacacagcaggcccaggaccatggctggggaggatatgtcagcacctggaagtggagtgcaggctgcagcgcccagc

SEQ ID NO: 108667 - DNA, 120 bp, Artificial Sequence
  ENSG00000099949_33 (sequence is synthesized)
catgtgggccaggtgcattcactcagagtggggccacacacccatctacccagtttccacaagatgtggctcctgccacacccacagggcagcctcctccaaatccctcctggaggggcc

SEQ ID NO: 108668 - DNA, 120 bp, Artificial Sequence
  ENSG00000099949_34 (sequence is synthesized)
tacccagaagcctccttgaaccagtctgcaaccctgctctatgctgacccttgtcactgaaccctgatctagacttatatgaataaatgaaattacatgccaagggccctaaaaagcaaa

SEQ ID NO: 108669 - DNA, 120 bp, Artificial Sequence
  ENSG00000099949_35 (sequence is synthesized)
gaacgcctcttgcacctggtggccatggtaaccatccttgtgagctctgcaaacagcaggaggttacagcccggagcagggatgtgcggtgcccctggcaggtccccaggatatggctac

SEQ ID NO: 108670 - DNA, 120 bp, Artificial Sequence
  ENSG00000099949_36 (sequence is synthesized)
agcttagcaagataaggcctggcgaggaggcccctggctaggcctccctctgaacgtgaaggacgtccccttcctcgtgaatagcttggtcagtgccaccagtaacagacgtggcctgca

SEQ ID NO: 108671 - DNA, 120 bp, Artificial Sequence
  ENSG00000099949_37 (sequence is synthesized)
ggctcttggtgatgtctgcaggcaccagaggccatgcagtgggcctggagggggcttgatcatgaggcacatctctgatccaggacatgaaggcatacctggagggagcgggcgcggaat

SEQ ID NO: 108672 - DNA, 120 bp, Artificial Sequence
  ENSG00000099949_38 (sequence is synthesized)
attgggagccatggagagcacctgccaggccctcggggtgggggtgggtgccatgggaccccagagtgctctcctgggtacagggaggaaacagatgaaggcagaagcccccgacccatg

SEQ ID NO: 108673 - DNA, 120 bp, Artificial Sequence
  ENSG00000099949_39 (sequence is synthesized)
gggcttgccacagtgggctgtgtcctggtgacctgggatttcctgagccaatttctgggggtggacatggggcacctctttcgggctaggatgtcaggtctgatggcccagggtcacggt

SEQ ID NO: 108674 - DNA, 120 bp, Artificial Sequence
  ENSG00000099949_40 (sequence is synthesized)
gatcagtctctggacttctctttgcttgtaatgtcacaggccccttcattcccccagctctccctggggcttgtgctgaccccggttgctggctcttggtgatgtctgcaggcaccagag

SEQ ID NO: 108675 - DNA, 120 bp, Artificial Sequence
  ENSG00000099949_41 (sequence is synthesized)
gccatgcagtgggcctggagggggcttgatcatgaggtcagcgagggggtacagcaagctgggtggaagatgagacgctgggtggtgggctgtgcgtggggcatagtgcttgagtcggcc

SEQ ID NO: 108676 - DNA, 120 bp, Artificial Sequence
  ENSG00000099949_42 (sequence is synthesized)
agggcgccgagggaggacagaatgtggctgatggtacctcagggcgagtgaggccttctgcctgggtgaagttttgttcagggcagcaacatgggcagatatgcaggaaggtagtgccgt

SEQ ID NO: 108677 - DNA, 120 bp, Artificial Sequence
  ENSG00000099949_43 (sequence is synthesized)
aggtccccaccaaggggtcctggcacccacctcaggtggctttgaggcccgctctcctgccccagctaggtgatctgggcccagcgcctccctccagagggtttgctggtgcctggggct

SEQ ID NO: 108678 - DNA, 120 bp, Artificial Sequence
  ENSG00000099949_44 (sequence is synthesized)
gggcctggtgctctctgaagcagttggcagctggcaaggaggggtttgcagccaggaggaaccagtgggttcctgaccctcacaactgcccagaggacggggtgggtcattgctttgtgt

SEQ ID NO: 108679 - DNA, 120 bp, Artificial Sequence
  ENSG00000099949_45 (sequence is synthesized)
gacagttgagcacagacatggaggtactccttatgtcacttcagtaggggtctgaacatggagggtcaggatgcctgttaggcctgcaaggccatggaacagcgctacagatgtacagac

SEQ ID NO: 108680 - DNA, 120 bp, Artificial Sequence
  ENSG00000099949_46 (sequence is synthesized)
actatttttctcgggaggggattcatggttttctttggatcctgaatggggcctttgacccactaagtagttcagaatccatttggagagcatgctggcgtgggggcttggggctccagc

SEQ ID NO: 108681 - DNA, 120 bp, Artificial Sequence
  ENSG00000099949_47 (sequence is synthesized)
tgcgcccttccctgtccttccctgggagggtgcgggcggaccagcttcctttagtcagctccttaaccaggccccagctacttgtttgcggccccctactactacggcttctacaacaac

SEQ ID NO: 108682 - DNA, 120 bp, Artificial Sequence
  ENSG00000099949_48 (sequence is synthesized)
caggtcctgtgatcaacacctctcacacatggggagactgaggccccgagaaatacttgcttggggtcacaccacaaagggggtacagggccaagggccctcaccctgctggccaggctg

SEQ ID NO: 108683 - DNA, 120 bp, Artificial Sequence
  ENSG00000099949_49 (sequence is synthesized)
gaggacgcaggtccaggcagagtggagacggcagagctctgctgaggcctggggcccagccgaaggcaagagaggcaggggagccctttcctgctgtggagccggccgtggacagttgca

SEQ ID NO: 108684 - DNA, 120 bp, Artificial Sequence
  ENSG00000099949_50 (sequence is synthesized)
gctgcaggagagggcacaaggagtgtgagctgcaggtacagggggtttgggaagggacttgggagcttccctggaggccacgggtgcgtgggaggaagggcagggagccccaggatgagg

SEQ ID NO: 108685 - DNA, 120 bp, Artificial Sequence
  ENSG00000099949_51 (sequence is synthesized)
gaaattgtcaagggcctggggctcagcatggagccagatggcatagccctgccaggccaggatctgttctgaagtcttcagctaacttagcaaaagagaggacttgctgggaggtactgg

SEQ ID NO: 108686 - DNA, 120 bp, Artificial Sequence
  ENSG00000099949_52 (sequence is synthesized)
gaagcctgggaggtggaaggtgctggggcagcatcaggatgtggggtacaggcagctcccaggatggggactcagctgtggggatgctctgactgggcagcgtgaacacagtgacctgca

SEQ ID NO: 108687 - DNA, 120 bp, Artificial Sequence
  ENSG00000099949_53 (sequence is synthesized)
atggtctctgcacaactttactccccagagagcaggactgcctgggcgggtcagatgccaccctcctgcccatcactgctgcctgctccatggggagaggggggagctctggcaggaccc

SEQ ID NO: 108688 - DNA, 120 bp, Artificial Sequence
  ENSG00000099949_54 (sequence is synthesized)
tgcggtgggccacatggagccaggcagggctggtgcccgtgctggatggggtgagaggtgctcagcgcaggtgtctaggccctccctctggaccctgggctagtcaccgtaagggatgca

SEQ ID NO: 108689 - DNA, 120 bp, Artificial Sequence
  ENSG00000099949_55 (sequence is synthesized)
gtccgcctgggtgggggtggagcagggttggtgtgggctggggtgcgggcagcagagccaaaaggtgggtgctgccagccctgccttactgatgggccccctgaggctcagaggctgcag

SEQ ID NO: 108690 - DNA, 120 bp, Artificial Sequence
  ENSG00000099949_56 (sequence is synthesized)
gtcaccctccttacccatgatcactgcagctggacgccatctgagtcccccgaggccttgttcctacctagtggccccagcccacactcttccatggggggagccctgcgccctgtgccc

SEQ ID NO: 108691 - DNA, 120 bp, Artificial Sequence
  ENSG00000099949_57 (sequence is synthesized)
ctgcggttcgatgtgaaagactgctcctggtgcaggtgggtggccccgtgctccagggccctgcctttcctcctagaacacagtggcacagtgctgggtcccagttgctagcagagtctc

SEQ ID NO: 108692 - DNA, 120 bp, Artificial Sequence
  ENSG00000099949_58 (sequence is synthesized)
tctcatcatgggaagctagaaagaagcttccaggaggagataaccacggcctcagggatgccacatccagagccgccctgtcaggctgaggagatcaagtaaccaccccgcacctgcagc

SEQ ID NO: 108693 - DNA, 120 bp, Artificial Sequence
  ENSG00000099949_59 (sequence is synthesized)
tgccaagctgggcacacagggcggcacccttctgggctgtccacctctacctcgaggctgatgctagtatgggtacagaagttgctatgtcttttctctcacacttgattttgtaagatg

SEQ ID NO: 108694 - DNA, 81 bp, Artificial Sequence
  ENSG00000099949_60 (sequence is synthesized)
aattgcttaagtataaaactcagaaaaaagctaggagttcaagaccagctgggcaacaaagtgagaccctgtctaggaaga

SEQ ID NO: 108695 - DNA, 120 bp, Artificial Sequence
  ENSG00000099949_61 (sequence is synthesized)
agacaaagagagatgatagatagatgataggtagattagacagatagatgacagatagatagatagtggatagatgatagatgacagatcgatagatagatgataggtagatgataggta

SEQ ID NO: 108696 - DNA, 120 bp, Artificial Sequence
  ENSG00000099949_62 (sequence is synthesized)
ggtagattagatagatgatgggtagatagatgacagacaatagatgatagatgataggtagatagatgatagatgacagatagatgatggatagattatataggtagatgataggtggat

SEQ ID NO: 108697 - DNA, 120 bp, Artificial Sequence
  ENSG00000099949_63 (sequence is synthesized)
agatgatggatatatagattatatagattagatgattgatagatgataggtagatagatagatgatggttagatagataggtattaaatgaaattgatggaccccgtgctgtaagatgct

SEQ ID NO: 108698 - DNA, 120 bp, Artificial Sequence
  ENSG00000099949_64 (sequence is synthesized)
gcactgctgctgagagcaggagtgtggatggtcctggagtagcatgaggacctggtcacattctgtgagtggaataagcaatttacaaaatatctgccacttgattccattttaaaaaat

SEQ ID NO: 108699 - DNA, 120 bp, Artificial Sequence
  ENSG00000099949_65 (sequence is synthesized)
ttcatggaagcctaagtatgcgtaggagaggtgtgcagggaagacctcaaggtgttgccagaggttttctggtaatgggaatttgcatgagctttagtgcctattttgttttttccttat

SEQ ID NO: 108700 - DNA, 120 bp, Artificial Sequence
  ENSG00000099949_66 (sequence is synthesized)
gtgcctattttgttttttccttattggtgattttttttttttaagtttctatgatgagacaggtatcaccttcaaaatacaaaagtgaaacgtagctgggcgcggtggctcacgcctgta

SEQ ID NO: 108701 - DNA, 80 bp, Artificial Sequence
  ENSG00000099953_0 (sequence is synthesized)
gggcggatggctccggccgcctggctccgcagcgcggccgcgcgcgccctcctgcccccgatgctgctgctgctgctcca

SEQ ID NO: 108702 - DNA, 120 bp, Artificial Sequence
  ENSG00000099953_1 (sequence is synthesized)
tctgccgccggacgcccaccacctccatgccgagaggagggggccacagccctggcatgcagccctgcccagtagcccggcacctgcccctgccacgcaggaagccccccggcctgccag

SEQ ID NO: 108703 - DNA, 120 bp, Artificial Sequence
  ENSG00000099953_2 (sequence is synthesized)
cagcctcaggcctccccgctgtggcgtgcccgacccatctgatgggctgagtgcccgcaaccgacagaagaggttcgtgctttctggcgggcgctgggagaagacggacctcacctacag

SEQ ID NO: 108704 - DNA, 120 bp, Artificial Sequence
  ENSG00000099953_3 (sequence is synthesized)
gatccttcggttcccatggcagttggtgcaggagcaggtgcggcagacgatggcagaggccctaaaggtatggagcgatgtgacgccactcacctttactgaggtgcacgagggccgtgc

SEQ ID NO: 108705 - DNA, 120 bp, Artificial Sequence
  ENSG00000099953_4 (sequence is synthesized)
tgacatcatgatcgacttcgccaggtactggcatggggacgacctgccgtttgatgggcctgggggcatcctggcccatgccttcttccccaagactcaccgagaaggggatgtccactt

SEQ ID NO: 108706 - DNA, 120 bp, Artificial Sequence
  ENSG00000099953_5 (sequence is synthesized)
cgactatgatgagacctggactatcggggatgaccagggcacagacctgctgcaggtggcagcccatgaatttggccacgtgctggggctgcagcacacaacagcagccaaggccctgat

SEQ ID NO: 108707 - DNA, 120 bp, Artificial Sequence
  ENSG00000099953_6 (sequence is synthesized)
gtccgccttctacacctttcgctacccactgagtctcagcccagatgactgcaggggcgttcaacacctatatggccagccctggcccactgtcacctccaggaccccagccctgggccc

SEQ ID NO: 108708 - DNA, 120 bp, Artificial Sequence
  ENSG00000099953_7 (sequence is synthesized)
ccaggctgggatagacaccaatgagattgcaccgctggagccagacgccccgccagatgcctgtgaggcctcctttgacgcggtctccaccatccgaggcgagctctttttcttcaaagc

SEQ ID NO: 108709 - DNA, 120 bp, Artificial Sequence
  ENSG00000099953_8 (sequence is synthesized)
gggctttgtgtggcgcctccgtgggggccagctgcagcccggctacccagcattggcctctcgccactggcagggactgcccagccctgtggacgctgccttcgaggatgcccagggcca

SEQ ID NO: 108710 - DNA, 120 bp, Artificial Sequence
  ENSG00000099953_9 (sequence is synthesized)
tccatgctgccttggtctggggtcccgagaagaacaagatctacttcttccgaggcagggactactggcgtttccaccccagcacccggcgtgtagacagtcccgtgccccgcagggcca

SEQ ID NO: 108711 - DNA, 120 bp, Artificial Sequence
  ENSG00000099953_10 (sequence is synthesized)
ctgactggagaggggtgccctctgagatcgacgctgccttccaggatgctgatggctatgcctacttcctgcgcggccgcctctactggaagtttgaccctgtgaaggtgaaggctctgg

SEQ ID NO: 108712 - DNA, 120 bp, Artificial Sequence
  ENSG00000099953_11 (sequence is synthesized)
aaggcttcccccgtctcgtgggtcctgacttctttggctgtgccgagcctgccaacactttcctctgaccatggcttggatgccctcaggggtgctgacccctgccaggccacgaatatc

SEQ ID NO: 108713 - DNA, 120 bp, Artificial Sequence
  ENSG00000099953_12 (sequence is synthesized)
aggctagagacccatggccatctttgtggctgtgggcaccaggcatgggactgagcccatgtctcctcagggggatggggtggggtacaaccaccatgacaactgccgggagggccacgc

SEQ ID NO: 108714 - DNA, 120 bp, Artificial Sequence
  ENSG00000099953_13 (sequence is synthesized)
aggtcgtggtcacctgccagcgactgtctcagactgggcagggaggctttggcatgacttaagaggaagggcagtcttgggcccgctatgcaggtcctggcaaacctggctgccctgtct

SEQ ID NO: 108715 - DNA, 120 bp, Artificial Sequence
  ENSG00000099953_14 (sequence is synthesized)
ccatccctgtccctcagggtagcaccatggcaggactgggggaactggagtgtccttgctgtatccctgttgtgaggttccttccaggggctggcactgaagcaagggtgctggggcccc

SEQ ID NO: 108716 - DNA, 120 bp, Artificial Sequence
  ENSG00000099953_15 (sequence is synthesized)
atggccttcagccctggctgagcaactgggctgtagggcagggccacttcctgaggtcaggtcttggtaggtgcctgcatctgtctgccttctggctgacaatcctggaaatctgttctc

SEQ ID NO: 108717 - DNA, 120 bp, Artificial Sequence
  ENSG00000099953_16 (sequence is synthesized)
cagaatccaggccaaaaagttcacagtcaaatggggaggggtattcttcatgcaggagaccccaggccctggaggctgcaacatacctcaatcctgtcccaggccggatcctcctgaagc

SEQ ID NO: 108718 - DNA, 120 bp, Artificial Sequence
  ENSG00000099953_17 (sequence is synthesized)
ccttttcgcagcactgctatcctccaaagccattgtaaatgtgtgtacagtgtgtataaaccttcttcttctttttttttttttaaactgaggattgtcattaaacacagttgttttcta

SEQ ID NO: 108719 - DNA, 120 bp, Artificial Sequence
  ENSG00000099953_18 (sequence is synthesized)
cccagggagtggtcagtaggcatttgtcacagccaaatgccagtggaaggagcagccgcccaggcagccctctactgatgagagtaacctcacccgtgcactagtttacagagcattcac

SEQ ID NO: 108720 - DNA, 120 bp, Artificial Sequence
  ENSG00000099953_19 (sequence is synthesized)
tgccccagcttatcccaggcctcccgcttccctctgcgggtggggtgctgagcaggcattattggcctgcatgttttactgatgaggaaactgaggctgggagagtctgtggtaggggtc

SEQ ID NO: 108721 - DNA, 120 bp, Artificial Sequence
  ENSG00000099953_20 (sequence is synthesized)
aagcaggtccacagtggcggggcatggcagtggtggctgggcaggtccttgcagccttccctctccggcaggtgctcagtactgggtgtacgacggtgaaaagccagtcctgggccccgc

SEQ ID NO: 108722 - DNA, 120 bp, Artificial Sequence
  ENSG00000099953_21 (sequence is synthesized)
actaacggcctttacgcgacatccgagcagcgtgtctatcccaaaggcctaggagcatttgcccggctcggtcaaatctagcgcaagtttgaagcctgcggcctcgcaattttagcagct

SEQ ID NO: 108723 - DNA, 120 bp, Artificial Sequence
  ENSG00000099953_22 (sequence is synthesized)
gggaggtgggcacagcagccgcttctcccacctggtggtggctgggctcccacatgcctgccacaggaagtctggctcttcatcacaggtcctttgtccagagccatctgccctcctctc

SEQ ID NO: 108724 - DNA, 120 bp, Artificial Sequence
  ENSG00000099953_23 (sequence is synthesized)
tccgtgggtaagccagctgccctcacagctgctgcttgagacacaggccagggtagatcttcgtgtctaacagacctgtgtgtccactgaaccccagggaggtcatctatgggcaaaccc

SEQ ID NO: 108725 - DNA, 120 bp, Artificial Sequence
  ENSG00000099953_24 (sequence is synthesized)
cctgaaaccccaacttagacacatacacatatggagaccctccctcagcagaggggcagagcctccgtcatcatgcaaagagtcgcagcacatgcctgcggacgggtgttcagtcactca

SEQ ID NO: 108726 - DNA, 120 bp, Artificial Sequence
  ENSG00000099953_25 (sequence is synthesized)
gagcggagttgggggttgttgcgagccctggaggggagaggagacggggaggcgacgggatggggccagctgggaaggggacgcgaggctccaggctggactccgctctctgccccctcc

SEQ ID NO: 108727 - DNA, 120 bp, Artificial Sequence
  ENSG00000099953_26 (sequence is synthesized)
cggactcggctgtctgtcccctccctccagacagggtctgctgaccaccgcgtggcctgggagtctccggtggcctagggaagtgaagcgcggccctggggaaggcctggagcaacccat

SEQ ID NO: 108728 - DNA, 120 bp, Artificial Sequence
  ENSG00000099953_27 (sequence is synthesized)
ccccagaactcccacgagggggcgtcccaacccgtcttcgactgttggccaaaatgcgctgccaatgctggcagccttacgcagtgcccgcgggggatatgaggccccccgcgcggccct

SEQ ID NO: 108729 - DNA, 120 bp, Artificial Sequence
  ENSG00000099953_28 (sequence is synthesized)
gaaacatttccccacccgcttccctttcttggcccaggcttcctgaccacagcctcacctttgagcagctcagagccctgcctgccaggatgcgagccactgcctggatcgtggctctgc

SEQ ID NO: 108730 - DNA, 120 bp, Artificial Sequence
  ENSG00000099953_29 (sequence is synthesized)
agacacagccccatcctctgtgtcagtctgaggtgggtgtcagccatgtcattgtccaactctaccatcacaacttgggcttcgagcaggtggagacagtggtaagcggggagaggcaat

SEQ ID NO: 108731 - DNA, 120 bp, Artificial Sequence
  ENSG00000099953_30 (sequence is synthesized)
agtgggcatctcactgggtgacctgggaggaccctgggcaggtgatggggaagctgaggctcacacatcctgcgggtggggacccagcctgaagaatgggctggtgtcacacagcattgg

SEQ ID NO: 108732 - DNA, 120 bp, Artificial Sequence
  ENSG00000099953_31 (sequence is synthesized)
agctgagactggggtctttagaatttcctaggtgggggcctgggaaccaacaggggctcaaggaaccaaggtgtccccacagtaagtggcactgtcaggtctaggatgggggtctcggga

SEQ ID NO: 108733 - DNA, 120 bp, Artificial Sequence
  ENSG00000099953_32 (sequence is synthesized)
cccctggtcctggttctttccactgaattcagacacttgtatttgcctaagtatgagcaaaccacatacacatgtgcccatgtggccagggagaccagtgcgctgaagctgaggcccaga

SEQ ID NO: 108734 - DNA, 120 bp, Artificial Sequence
  ENSG00000099953_33 (sequence is synthesized)
ccaggctgggatagacaccaatgagattgcaccgctggaggtgaggccctgcctgccagtccccctactcctctgctggccactgtgactgcagcatatgccctcagcatgtgtccctct

SEQ ID NO: 108735 - DNA, 120 bp, Artificial Sequence
  ENSG00000099953_34 (sequence is synthesized)
gggagagctgccccaaagcctgggggccgagggagagagagtgtggtttgttcctcaggcacaggtaggaggttctcggaggtggctcttgagataggagcagcgtggaagggattgcac

SEQ ID NO: 108736 - DNA, 120 bp, Artificial Sequence
  ENSG00000099953_35 (sequence is synthesized)
ggtggggcctcgtgttggtgcgttcaaccctcagccaccccatggggcggggttctagagatgaggcctctggggccccgaggcagtgaagtgactcactgtgagtgcagctgggaagag

SEQ ID NO: 108737 - DNA, 120 bp, Artificial Sequence
  ENSG00000099953_36 (sequence is synthesized)
agagatgagagcctggagcattgcagatgccagggacttcacaaatgaaggcacagcatgggaaacctgcgtgggttccagggcagtccagcctgcaggggcccagggagtggtgctcag

SEQ ID NO: 108738 - DNA, 120 bp, Artificial Sequence
  ENSG00000099954_0 (sequence is synthesized)
aggaaaaaggatgaacaaatgcctgtgtggtttcacttatatagtactcagcttgacgccatgtgaaatgaagaggagttagaagccgctcttcacagagatgacgtggagtttatcagt

SEQ ID NO: 108739 - DNA, 120 bp, Artificial Sequence
  ENSG00000099954_1 (sequence is synthesized)
gacctgattgcctgcctgcttcagggctgctatcaacgaagagatatcacgcctcagacattccacagctacctagaggacatcatcaactaccgctgggagctcgaagaagggaagccc

SEQ ID NO: 108740 - DNA, 120 bp, Artificial Sequence
  ENSG00000099954_2 (sequence is synthesized)
aaccctctgagggaagccagtttccaggacctgcctcttcgcacacgggtggagatcctgcaccgactctgtgattaccggctggatgcagacgatgtcttcgatcttctaaagggcctg

SEQ ID NO: 108741 - DNA, 120 bp, Artificial Sequence
  ENSG00000099954_3 (sequence is synthesized)
gatgcagacagtctccgtgtggagccattgggtgaagacaattctggggcactatattggtatttctatggaacacgaatgtacaaagaggacccggtgcaaggaaaatccaatggagaa

SEQ ID NO: 108742 - DNA, 120 bp, Artificial Sequence
  ENSG00000099954_4 (sequence is synthesized)
ctctctttgagcagggaaagtgaaggacaaaaaaatgtctcaagtattcctggaaaaacgggaaaaagaagaggaagacccccaaaacggaagaaactgcaggaggagattctgttgagt

SEQ ID NO: 108743 - DNA, 120 bp, Artificial Sequence
  ENSG00000099954_5 (sequence is synthesized)
gaaaagcaggaagaaaattccttggcatccgagccacagacaagacatgggtcccaagggccaggccaaggtacttggtggctcctgtgccagacagaagaggaatggagacaggtcacc

SEQ ID NO: 108744 - DNA, 120 bp, Artificial Sequence
  ENSG00000099954_6 (sequence is synthesized)
gagagttttcgcgagaggacctcccttcgagaacggcagctctacaagctcctcagtgaggacttcctgcctgagatctgcaacatgatcgcccagaagggaaaacgtccacagcgcaca

SEQ ID NO: 108745 - DNA, 120 bp, Artificial Sequence
  ENSG00000099954_7 (sequence is synthesized)
aaggcagagttgcatcctaggtggatgtctgaccacctgtccatcaaacccgtcaagcaagaggagactcctgtgctgaccagaatagaaaaacaaaagcgcaaagaggaggaagaagag

SEQ ID NO: 108746 - DNA, 120 bp, Artificial Sequence
  ENSG00000099954_8 (sequence is synthesized)
cgtcagattcttctagcagtgcagaagaaggagcaggagcagatgctaaaggaagagaggaaacgcgagttggaggagaaggtcaaggcagtggaagatcgagcgaagaggagaaagctc

SEQ ID NO: 108747 - DNA, 120 bp, Artificial Sequence
  ENSG00000099954_9 (sequence is synthesized)
agggaagaaagggcatggctgctggctcaaggaaaggagctccctccagaactttcccatctggaccccaattcccccatgagagaggaaaaaaagactaaagacctctttgagttggat

SEQ ID NO: 108748 - DNA, 120 bp, Artificial Sequence
  ENSG00000099954_10 (sequence is synthesized)
gatgatttcactgctatgtataaagttctagacgtggtaaaggctcacaaggattcctggcccttcttggaacctgtggatgaatcttatgcccctaactattatcagattattaaggcc

SEQ ID NO: 108749 - DNA, 120 bp, Artificial Sequence
  ENSG00000099954_11 (sequence is synthesized)
cccatggatatttccagcatggagaagaaactgaatggaggtttatactgtaccaaggaggaatttgtaaatgacatgaagaccatgttcaggaattgtcgaaagtataatggggaaagt

SEQ ID NO: 108750 - DNA, 120 bp, Artificial Sequence
  ENSG00000099954_12 (sequence is synthesized)
agtgagtataccaagatgtctgataatttagagaggtgtttccatcgggcaatgatgaaacattttcctggagaagatggagacacagatgaagaattttggattcgagaggatgaaaag

SEQ ID NO: 108751 - DNA, 120 bp, Artificial Sequence
  ENSG00000099954_13 (sequence is synthesized)
cgggagaaaagacggagtcgggctgggcgaagtggtgggagccatgtttggacccgctccagggacccagaagggtccagcaggaaacagcagcccatggagaatggaggaaagtcgttg

SEQ ID NO: 108752 - DNA, 120 bp, Artificial Sequence
  ENSG00000099954_14 (sequence is synthesized)
ccccccacacgccgagcgccctcttctggggacgatcagagcagcagctccacacagcccccgcgggaggtgggcacttccaatggccgaggtttttctcatcccctgcattgtggtggg

SEQ ID NO: 108753 - DNA, 120 bp, Artificial Sequence
  ENSG00000099954_15 (sequence is synthesized)
acacccagccaggcaccctttttaaaccagatgaggccagcagtaccaggaacatttggccctctgcgaggatcagatcctgccaccttgtatggctcctctggagtcccggagccacac

SEQ ID NO: 108754 - DNA, 120 bp, Artificial Sequence
  ENSG00000099954_16 (sequence is synthesized)
cccggggagcctgtgcagcagcgtcagcctttcaccatgcagcctccagttggaattaacagcctccgaggacccaggctaggcacaccagaggagaagcaaatgtgcggggggctgaca

SEQ ID NO: 108755 - DNA, 120 bp, Artificial Sequence
  ENSG00000099954_17 (sequence is synthesized)
cacctttctaacatgggcccacaccctggatccttgcagcttgggcagataagtggcccaagtcaggatggaagcatgtatgctccagctcagttccagccaggattcattcctccccgg

SEQ ID NO: 108756 - DNA, 120 bp, Artificial Sequence
  ENSG00000099954_18 (sequence is synthesized)
catgggggggctccagcccggccaccagactttcctgaaagctcagaaattcctcccagccatatgtatcgatcgtacaagtacctgaatcgagtacactctgccgtctggaatgggaac

SEQ ID NO: 108757 - DNA, 120 bp, Artificial Sequence
  ENSG00000099954_19 (sequence is synthesized)
catggtgctacgaaccaaggacccttgggcccagatgagaagccccacctggggccaggaccctctcaccagcctcgcactctcggtcacgtgatggattcccgagtcatgagaccacct

SEQ ID NO: 108758 - DNA, 120 bp, Artificial Sequence
  ENSG00000099954_20 (sequence is synthesized)
ttcctacctcatggagttccttcctcagggtacatgcgaccgccctgcaagtctgccggacatcggttacagccacctccagtgccagcacccagttctttgtttggagcacctgcccag

SEQ ID NO: 108759 - DNA, 120 bp, Artificial Sequence
  ENSG00000099954_21 (sequence is synthesized)
gctcttcggggggtgcagggaggggactccatgatggacagcccagagatgattgcgatgcagcagctctcctcccgcgtctgccccccaggtgtgccttaccacccccaccagcctgca

SEQ ID NO: 108760 - DNA, 120 bp, Artificial Sequence
  ENSG00000099954_22 (sequence is synthesized)
cacccccgtttacctggcccttttccgcaggtagctcacccaatgtcagtcactgtgtcagcccccaagcctgccctgggcaaccctgggagggcaccggagaacagtgaagcacaagag

SEQ ID NO: 108761 - DNA, 120 bp, Artificial Sequence
  ENSG00000099954_23 (sequence is synthesized)
cctgagaatgaccaagagccgttgcctggccttgaagagaaaccaccaggtgttggtacttcagagggggtctacctcacacaactacctcaccccacacctcccctgcagactgactgc

SEQ ID NO: 108762 - DNA, 120 bp, Artificial Sequence
  ENSG00000099954_24 (sequence is synthesized)
accaggcagagctcaccacaagaaagggaaacagtgggcccggagctcaaaagcagctcctccgaatctgcggacaactgtaaagcaatgaagggcaagaatccctggccctcggatagc

SEQ ID NO: 108763 - DNA, 120 bp, Artificial Sequence
  ENSG00000099954_25 (sequence is synthesized)
agctaccccggcccagccgcccaagggtgcgtgagagacctctccacggtggcagacaggggcgctctatccgagaacggagtcattggggaagcatctccttgtggatcggaggggaag

SEQ ID NO: 108764 - DNA, 120 bp, Artificial Sequence
  ENSG00000099954_26 (sequence is synthesized)
ggccttggtagcagtggttccgaaaagctgctctgccccagaggcagaacgttgcaggaaaccatgccatgcacgggacagaacgcagcgacaccgcccagcacagaccccggtttgacg

SEQ ID NO: 108765 - DNA, 120 bp, Artificial Sequence
  ENSG00000099954_27 (sequence is synthesized)
ggaggcactgtgagccagtttcccccgctgtatatgcctggcctagagtacccgaattcagctgcccattaccacatcagtccaggcctgcagggtgtgggccctgtgatgggagggaag

SEQ ID NO: 108766 - DNA, 120 bp, Artificial Sequence
  ENSG00000099954_28 (sequence is synthesized)
tccccagcatcccatccccagcattttcccccaaggggctttcagtctaaccacccacattctggaggctttccccggtatcgccccccacaaggaatgaggtattcctaccacccaccg

SEQ ID NO: 108767 - DNA, 120 bp, Artificial Sequence
  ENSG00000099954_29 (sequence is synthesized)
ccacagccttcctaccaccactatcagcgaactccttactatgcctgtccacagagcttttctgactggcagagacctctccatccccagggaagcccaagcggacccccagccagtcag

SEQ ID NO: 108768 - DNA, 120 bp, Artificial Sequence
  ENSG00000099954_30 (sequence is synthesized)
cctcccccaccaaggtccctcttctcagataagaatgccatggccagtctgcaaggctgtgagacactgaatgctgccttaacttctccaacccgtatggatgcagtggctgctaaagtc

SEQ ID NO: 108769 - DNA, 120 bp, Artificial Sequence
  ENSG00000099954_31 (sequence is synthesized)
ccaaatgacgggcagaatcctggtccagaggaagagaagctggatgaatctatggagaggccagagagtcccaaagaatttttagacctggacaaccataacgcagctaccaagcggcag

SEQ ID NO: 108770 - DNA, 120 bp, Artificial Sequence
  ENSG00000099954_32 (sequence is synthesized)
agctcgttgtcagccagcgagtatctctatggaactcctccgcctctgagttcaggaatgggatttggttcatctgcatttccaccccacagtgtgatgctgcagacggggcctccctat

SEQ ID NO: 108771 - DNA, 120 bp, Artificial Sequence
  ENSG00000099954_33 (sequence is synthesized)
acccctcagcggccggccagtcactttcagcccagggcttactcttcccctgtggctgccctcccacctcaccacccaggggccacccagcccaacggcctctctcaggagggtcccatc

SEQ ID NO: 108772 - DNA, 120 bp, Artificial Sequence
  ENSG00000099954_34 (sequence is synthesized)
tatcgctgccaggaagaaggcctgggtcactttcaagctgtgatgatggaacaaattggcactagaagtggaataagaggacctttccaggaaatgtacagaccatcaggaatgcagatg

SEQ ID NO: 108773 - DNA, 120 bp, Artificial Sequence
  ENSG00000099954_35 (sequence is synthesized)
cacccggtccagtcgcaggcctcgttcccaaagacccccacagcagcaacatcacaggaggaggtgccgcctcataagcctccaacacttcccctggatcagagctagtccaaggaggaa

SEQ ID NO: 108774 - DNA, 120 bp, Artificial Sequence
  ENSG00000099954_36 (sequence is synthesized)
atgagccccaagcaatggaaagctgcacacgaagactggaatgtggagaactggggagtgccctgtcagctctattcccatcacctgctccaccccttcacggcgacccactcgtgccat

SEQ ID NO: 108775 - DNA, 120 bp, Artificial Sequence
  ENSG00000099954_37 (sequence is synthesized)
acttgagctggagccagtcacgggccctaaaaggacactccttagatgactgacacacagattgcaaaggtcctcggccagggatctcttgcacagctgatgtagacagtcaggcaaaac

SEQ ID NO: 108776 - DNA, 120 bp, Artificial Sequence
  ENSG00000099954_38 (sequence is synthesized)
taatgaacgtggagttaatgatgacttttccaaatcctgagacacttttcagggaaaatcactttaaacttgggggagggggtatactcaagaatggagtggtgcttttaaactttgatg

SEQ ID NO: 108777 - DNA, 120 bp, Artificial Sequence
  ENSG00000099954_39 (sequence is synthesized)
agcagctaaactcaggtatatatttggggaagggactactcttagtattaatggttttggagctgggtccagtttacagaattttcatgttgccttttaaaataatttttgttggtggtg

SEQ ID NO: 108778 - DNA, 120 bp, Artificial Sequence
  ENSG00000099954_40 (sequence is synthesized)
cgggggttgttgttgtggcgcgggcagccccgccccctcctcgtgggcggcccctcccccaggccccgcgtccggcccctccgcccctagccccatctgtttctccggcggggactcgat

SEQ ID NO: 108779 - DNA, 120 bp, Artificial Sequence
  ENSG00000099954_41 (sequence is synthesized)
gactcgattatattgtaggggactgggggcggccgccgccgcagccgcgggatggggcgagcgcgcggaccccgcgggcagccgcagccgcagccgcctcagtagttcgggcccccgcgc

SEQ ID NO: 108780 - DNA, 120 bp, Artificial Sequence
  ENSG00000099954_42 (sequence is synthesized)
aggggccgccgcctgtgccgcagcggggagatgtgcccagaggagggcggcgcggccgggctgggcgagctccgctcctggtgggaggtcccggccatcgcgcacttctgctcgctcttt

SEQ ID NO: 108781 - DNA, 120 bp, Artificial Sequence
  ENSG00000099954_43 (sequence is synthesized)
ctgtttacaatcatgtcacactgaatacttatgggagccggagatgagggtaggaaaggtttgatcttgtaatatgtcactgtgtttccttagtggccagccagccttcagaatagctaa

SEQ ID NO: 108782 - DNA, 120 bp, Artificial Sequence
  ENSG00000099954_44 (sequence is synthesized)
aggccttccttccttccagtcagcctgagagagaacacctgtcccctaagcacctggtgtctccattggaggcagactgctctcaggagactactagaagcttcagcccggaagacaggc

SEQ ID NO: 108783 - DNA, 120 bp, Artificial Sequence
  ENSG00000099954_45 (sequence is synthesized)
tgctctctcatgctggtggcccaaattgagaaagtggtgtcccttcctgattttgccaccagccctaccgaatagttgtaaaccagtatcaggaattgggatcgctagagtgtttcacgt

SEQ ID NO: 108784 - DNA, 120 bp, Artificial Sequence
  ENSG00000099954_46 (sequence is synthesized)
attagaagatgaatcgtcctcatcacagacctccctgtcaggactgtgatctagaaggcatcacacacagctttctggcacgaatcacattttgtggaagtgactactcaggtttgtata

SEQ ID NO: 108785 - DNA, 120 bp, Artificial Sequence
  ENSG00000099954_47 (sequence is synthesized)
ttttagtatcaataaagaattgcacaggtttgaataggaaaaatgtattctatagatttacagtttgaatttaggaatatttcagtatatatagtttttattcgttttaagtgaatcata

SEQ ID NO: 108786 - DNA, 120 bp, Artificial Sequence
  ENSG00000099954_48 (sequence is synthesized)
gtaaaatcagtcatggtgatttaaaatagctatcaagaacaagttcttggaattatctgttgtatctgtgataggaaaccattttacagtattaaattactttattacagttgtagagtt

SEQ ID NO: 108787 - DNA, 120 bp, Artificial Sequence
  ENSG00000099954_49 (sequence is synthesized)
tagctgaaaggtcaccaaagttaggacccatgttttaaacttttgaatattccacaaaagaaaaaactaaggaaaatactgaaattacaggtctttgtaaagaatagcatatttttaagc

SEQ ID NO: 108788 - DNA, 120 bp, Artificial Sequence
  ENSG00000099954_50 (sequence is synthesized)
atgcttttgggatagtagaagagtctctatgaaatattaatctgccctagtttcttataaattcagctgtgggaggggccagtagagtgtttccctccaattccaggattcctagtgaag

SEQ ID NO: 108789 - DNA, 120 bp, Artificial Sequence
  ENSG00000099954_51 (sequence is synthesized)
catggaactgtcgtgtttacagtttgctaaacatatgctgtccgtggaaaaggaagctaatcggaagcatccatgatacagagaaatgaaagccaagacaccagttccaggatgatggaa

SEQ ID NO: 108790 - DNA, 120 bp, Artificial Sequence
  ENSG00000099954_52 (sequence is synthesized)
gttcatatccgtacgcaaatgctgaacctggtgctgctgcctagggctcaggcagatttgagagttgagtagggaacacaggtgcctctaaggtataatgcacaaaaatacagattttct

SEQ ID NO: 108791 - DNA, 120 bp, Artificial Sequence
  ENSG00000099954_53 (sequence is synthesized)
ctcagagaggttttaattttaaatttgatgtatttgcaagtggattgagttttgagcctgtgttctcactggatcctaattcttgttagaaacctatcactggcataacctggtttagaa

SEQ ID NO: 108792 - DNA, 120 bp, Artificial Sequence
  ENSG00000099954_54 (sequence is synthesized)
gagtgaagaggacagaaggattgtggatgggtctgccctttagctagtatccgctaacatggggcattactacttcagtttctgtgtttgtgcagaagcagggaggaggtaaaaagctag

SEQ ID NO: 108793 - DNA, 120 bp, Artificial Sequence
  ENSG00000099954_55 (sequence is synthesized)
tttggagctggttagacctggtctaggcccagagaatttggccactgacagcctttctcttttcctggtaatgctggtttgaatcagaggcctctcacttctccttaacaggagcactga

SEQ ID NO: 108794 - DNA, 120 bp, Artificial Sequence
  ENSG00000099954_56 (sequence is synthesized)
cactgtgggcctctccccatgactaccccaggggcctgggtgggagtggctgtaagcagcagttgggccattgccccctttccttctgccctcgtggtccttgagcagttgtgtgcacac

SEQ ID NO: 108795 - DNA, 120 bp, Artificial Sequence
  ENSG00000099954_57 (sequence is synthesized)
tcttccaggtaatcctgtctcctctctctcccagtgaccgccccaatcagctgttgctagagcgatgctgtgaacgatacaggaaaagtcagtaaatccctttatccttaatctcccttc

SEQ ID NO: 108796 - DNA, 120 bp, Artificial Sequence
  ENSG00000099954_58 (sequence is synthesized)
ttggttttcgacagaaaatattaaggaagagcaataggaaatagaactactgtattataacactgtgaacaagaacatcagcagcagcagaattgtcagccttcctgcgtcctgtgtggg

SEQ ID NO: 108797 - DNA, 120 bp, Artificial Sequence
  ENSG00000099954_59 (sequence is synthesized)
aatgtgtccatgccttataggtactagtgcttcgtccattgtccagggagtgtcctgagctttcactggtctttgaagtgcagatctgctataagctgtctggagctgcaaggttgcagg

SEQ ID NO: 108798 - DNA, 120 bp, Artificial Sequence
  ENSG00000099954_60 (sequence is synthesized)
aatccacaggagcgtgagctgctgtgaacccctagcccacccatccccaagcaggatcttcttctcaccttttcttcctcctctagcacttctctttccaagtgtcttaagcagatgcaa

SEQ ID NO: 108799 - DNA, 120 bp, Artificial Sequence
  ENSG00000099954_61 (sequence is synthesized)
tgtcttaaagcagatgcaaatgcatttgccatcttctccattaggaaaatgatggttatgtgatatgttatatttaggaagtagtgtgtaaggtatcctgaaaaggtttgctctcaagct

SEQ ID NO: 108800 - DNA, 120 bp, Artificial Sequence
  ENSG00000099954_62 (sequence is synthesized)
agaaggacatttcaccctgtgggtcactgtcaccttgtcagcgtgccggctctcagtggtccccaggaggatggggatagctgagatcgtggagaatgggaaataccattgcatctcttt

SEQ ID NO: 108801 - DNA, 120 bp, Artificial Sequence
  ENSG00000099954_63 (sequence is synthesized)
gatttaacactcatggctcacctttagtagagttgttaataagttagaaacttgtgtccctaaggcccaagagaaaagatgagcttcttgggaggattctgggtttgttttcccctcaga

SEQ ID NO: 108802 - DNA, 120 bp, Artificial Sequence
  ENSG00000099954_64 (sequence is synthesized)
attaaaaaatagtttttaattcagctactttttcccctcagttaaaaggtagcaggagctattggctgaaatttgttacagtgaatgaatgtggagaataaataagaacaaaccctgtag

SEQ ID NO: 108803 - DNA, 120 bp, Artificial Sequence
  ENSG00000099954_65 (sequence is synthesized)
gattcttgttgacgtaactttccatcccacctctccgcctctccttcatcaccagccttcatcaggttggtttagtttacctggccgtacacacgagctgctcatcaacagttcgtatct

SEQ ID NO: 108804 - DNA, 120 bp, Artificial Sequence
  ENSG00000099954_66 (sequence is synthesized)
tctcactgagcccgggccagatgctctcagaaggccttctcatgctcctcttcgttaggcttagtgaaaaccttaagacctgcagtttgtgcccctcagttcagtcagacctcagcttta

SEQ ID NO: 108805 - DNA, 120 bp, Artificial Sequence
  ENSG00000099954_67 (sequence is synthesized)
aatgtcgatttactctgtcttgttccctgaaagtgtttcttgtgactaagcatttggtgtcattatcccatgccatttatctgctgtatagttactatattatttttgctgattcctact

SEQ ID NO: 108806 - DNA, 120 bp, Artificial Sequence
  ENSG00000099954_68 (sequence is synthesized)
gctggcagatgccatcccaggcccacaaaatcccagtgttgcagtcaccacagctgtcagaaacaagtttgcaatccatacttcttggttcaatttttttttttaatggacattcaaatc

SEQ ID NO: 108807 - DNA, 120 bp, Artificial Sequence
  ENSG00000099954_69 (sequence is synthesized)
tgtaaatactacactgctcttaagacctgatttgaaatttcacaggaaggcctaatcctatagtcacaaggtaaggacagttgagtagtgtaagaaccccaacctgcttgcagagaacct

SEQ ID NO: 108808 - DNA, 120 bp, Artificial Sequence
  ENSG00000099954_70 (sequence is synthesized)
tggttttcatagaaaggaaaggctgaaggttttctagcattgttgcccttctttgtctgtcagtcagttcaccctctgtgattctccatggacccgcattgcagaaaatcagtcccatat

SEQ ID NO: 108809 - DNA, 120 bp, Artificial Sequence
  ENSG00000099954_71 (sequence is synthesized)
attagtgagccatgtactgcccaatccgggggctcctggggtgtggtgtgtccaccagtgactctccggacactagcttcagtaaggatacttcttatttcggttgagaatgcagaggct

SEQ ID NO: 108810 - DNA, 120 bp, Artificial Sequence
  ENSG00000099954_72 (sequence is synthesized)
tttattcgtggactcacatcactgcatagcacaaagaatgtgattgccatttgctgcgtgagaaaaagctgggctccctatttcttttttgggttggactctgccgtgcagccataggac

SEQ ID NO: 108811 - DNA, 120 bp, Artificial Sequence
  ENSG00000099954_73 (sequence is synthesized)
ttgggttggactctgccgtgcagccataggacaccaagcctcacgcactttccccttgggacagtagtgtttgggtgaatgttactgcatcccgttttttttcttttctttttttttttt

SEQ ID NO: 108812 - DNA, 120 bp, Artificial Sequence
  ENSG00000099954_74 (sequence is synthesized)
tgagccaacacaccggaccttcattttttaaattaagctgggacacaagttttgcctccaggctggatgttgatcctgctctgtgctagacagatgtgcggagggactgttccgggctcg

SEQ ID NO: 108813 - DNA, 120 bp, Artificial Sequence
  ENSG00000099954_75 (sequence is synthesized)
gcttgaccttttcctacctagtttctccctcttgtcctgcacaagaggactaactgaactctaacgtcagaacggctgacgagcagttgattgtccttgcttgtgttgttgacaggggtg

SEQ ID NO: 108814 - DNA, 120 bp, Artificial Sequence
  ENSG00000099954_76 (sequence is synthesized)
ggtggggtgggagcaggggtatggatattgcataagttattgaaatgctgacccccgttcaggaaaccatgcagccccttcccttcccttcccttcccttcctttcccttccctagccag

SEQ ID NO: 108815 - DNA, 120 bp, Artificial Sequence
  ENSG00000099954_77 (sequence is synthesized)
ggctcaggtacctcactctcctgccttgtgcgtagctcctggggccccggtcagtccccagcagccttggcacacagtgtctggagcctctgctcctgctgcaaaagcagaaaccatgtg

SEQ ID NO: 108816 - DNA, 120 bp, Artificial Sequence
  ENSG00000099954_78 (sequence is synthesized)
aaccttctggccagtactggaaaggggaatgctatttatttttatattgtgtatattttgtcgtggtctgctgattccctgtttcactgagagcgacacttacctcaatagttagttcaa

SEQ ID NO: 108817 - DNA, 120 bp, Artificial Sequence
  ENSG00000099954_79 (sequence is synthesized)
tattgtgtgttggataattttttaaaagaactttttaaaaagctttttgatccttggaggtctgtagatttatttccatatgaactggttattttgtataaagtacatgcttaaaatagc

SEQ ID NO: 108818 - DNA, 120 bp, Artificial Sequence
  ENSG00000099954_80 (sequence is synthesized)
atggtgatgggagtagtcacataatgtctgctgtctctgagatgtgagcagacattgattgttactgcctagatcctagatccattattttttagggcttgtacagtggcgatttttttc

SEQ ID NO: 108819 - DNA, 120 bp, Artificial Sequence
  ENSG00000099954_81 (sequence is synthesized)
tttttagcgttagtaccttcagagtgcacagtacttacacaatggcggtaatttaatttttggtcattcattcttcaaagataactggaatatcttcataaagagaaacttatcaaacat

SEQ ID NO: 108820 - DNA, 120 bp, Artificial Sequence
  ENSG00000099954_82 (sequence is synthesized)
ttacaggtgcccgccaccacacctggctgagttttgtatgatactataaacttaataaccacagtttgagagctgtaagcaagcctgtgtcaacattgctgccatgtggagacactctga

SEQ ID NO: 108821 - DNA, 120 bp, Artificial Sequence
  ENSG00000099956_0 (sequence is synthesized)
gcgcgcgcgtcagcgtcaacgccagcgcctgcgcactgagggcggcctggtcgtcgtctgcggcggcggcggcggctgaggagcccggctgaggcgccagtacccggcccggtccgcatt

SEQ ID NO: 108822 - DNA, 120 bp, Artificial Sequence
  ENSG00000099956_1 (sequence is synthesized)
tcgccttccggcttcggtttccctcggcccagcacgccccggccccgccccagccctcctgatccctcgcagcccggctccggccgcccgcctctgccgccgcaatgatgatgatggcgc

SEQ ID NO: 108823 - DNA, 120 bp, Artificial Sequence
  ENSG00000099956_2 (sequence is synthesized)
tgagcaagaccttcgggcagaagcccgtgaagttccagctggaggacgacggcgagttctacatgatcggctccgaggtgggaaactacctccgtatgttccgaggttctctgtacaaga

SEQ ID NO: 108824 - DNA, 120 bp, Artificial Sequence
  ENSG00000099956_3 (sequence is synthesized)
gatacccctcactctggaggcgactagccactgtggaagagaggaagaaaatagttgcatcgtcacatggtaaaaaaacaaaacctaacactaaggatcacggatacacgactctagcca

SEQ ID NO: 108825 - DNA, 120 bp, Artificial Sequence
  ENSG00000099956_4 (sequence is synthesized)
ccagtgtgaccctgttaaaagcctcggaagtggaagagattctggatggcaacgatgagaagtacaaggctgtgtccatcagcacagagccccccacctacctcagggaacagaaggcca

SEQ ID NO: 108826 - DNA, 120 bp, Artificial Sequence
  ENSG00000099956_5 (sequence is synthesized)
agaggaacagccagtgggtacccaccctgcccaacagctcccaccacttagatgccgtgccatgctccacaaccatcaacaggaaccgcatgggccgagacaagaagagaaccttccccc

SEQ ID NO: 108827 - DNA, 120 bp, Artificial Sequence
  ENSG00000099956_6 (sequence is synthesized)
tttgctttgatgaccatgacccagctgtgatccatgagaacgcatctcagcccgaggtgctggtccccatccggctggacatggagatcgatgggcagaagctgcgagacgccttcacct

SEQ ID NO: 108828 - DNA, 120 bp, Artificial Sequence
  ENSG00000099956_7 (sequence is synthesized)
ggaacatgaatgagaagttgatgacgcctgagatgttttcagaaatcctctgtgacgatctggatttgaacccgctgacgtttgtgccagccatcgcctctgccatcagacagcagatcg

SEQ ID NO: 108829 - DNA, 120 bp, Artificial Sequence
  ENSG00000099956_8 (sequence is synthesized)
agtcctaccccacggacagcatcctggaggaccagtcagaccagcgcgtcatcatcaagctgaacatccatgtgggaaacatttccctggtggaccagtttgagtgggacatgtcagaga

SEQ ID NO: 108830 - DNA, 120 bp, Artificial Sequence
  ENSG00000099956_9 (sequence is synthesized)
aggagaactcaccagagaagtttgccctgaagctgtgctcggagctggggttgggcggggagtttgtcaccaccatcgcatacagcatccggggacagctgagctggcatcagaagacct

SEQ ID NO: 108831 - DNA, 120 bp, Artificial Sequence
  ENSG00000099956_10 (sequence is synthesized)
acgccttcagcgagaaccctctgcccacagtggagattgccatccggaacacgggcgatgcggaccagtggtgcccactgctggagactctgacagacgctgagatggagaagaagatcc

SEQ ID NO: 108832 - DNA, 120 bp, Artificial Sequence
  ENSG00000099956_11 (sequence is synthesized)
gcgaccaggacaggaacacgaggcggatgaggcgtcttgccaacacggccccggcctggtaaccagcccatcagcacacggctcccacggagcatctcagaagattgggccgcctctcct

SEQ ID NO: 108833 - DNA, 120 bp, Artificial Sequence
  ENSG00000099956_12 (sequence is synthesized)
ccatcttctggcaaggacagaggcgaggggacagcccagcgccatcctgaggatcgggtgggggtggagtgggggcttccaggtggcccttcccggcacacattccatttgttgagcccc

SEQ ID NO: 108834 - DNA, 120 bp, Artificial Sequence
  ENSG00000099956_13 (sequence is synthesized)
agtcctgccccccaccccaccctccctacccctccccagtctctggggtcaggaagaaaccttattttaggttgtgttttgtttttgtataggagccccaggcagggctagtaacagttt

SEQ ID NO: 108835 - DNA, 120 bp, Artificial Sequence
  ENSG00000099956_14 (sequence is synthesized)
ttaaataaaaggcaacaggtcatgttcaatttcttcaacaggtcatgttcaatttcttcaaagttttaacataaaaataatgagagccaggagtggggccggggcctggggggacgaagg

SEQ ID NO: 108836 - DNA, 120 bp, Artificial Sequence
  ENSG00000099956_15 (sequence is synthesized)
tggtatgtgaacaaggttggcacacaggcctcaccctcctctgcctcagattcccaagtgggcaggtgggggtgaatggggctccgggtagcacctcagctcctctcagctcccctcagc

SEQ ID NO: 108837 - DNA, 120 bp, Artificial Sequence
  ENSG00000099956_16 (sequence is synthesized)
ctgttctccttccagacccagagagctgagaagagtagctgtgaggctcagggcaagaggctctctgcctttcaggaacagccctaaccctgctccccttgcttggcctcaggaaggtgc

SEQ ID NO: 108838 - DNA, 120 bp, Artificial Sequence
  ENSG00000099956_17 (sequence is synthesized)
cgcgagctctcctgccgtccctgggccgccctggctctgctgtgtccagatggtcaggctactgccagctggggccttgctgctctgaagtcccctgcggagggcccagtcctgtgtggg

SEQ ID NO: 108839 - DNA, 120 bp, Artificial Sequence
  ENSG00000099956_18 (sequence is synthesized)
cactgctgggctgtcgccagcctgggtgcaggagggctgttctagctccagtggcacccatagccaggtcagctggggccctttcccaccccagcaggtgctgtggcctgggccagctcc

SEQ ID NO: 108840 - DNA, 120 bp, Artificial Sequence
  ENSG00000099956_19 (sequence is synthesized)
tgccttacaagccagctgtgaggaatatgggaatagccctcccggcctggtgccagctcttggagttgacacggtacagggaggagacacagcccagggtcccttcccagccctgcctcc

SEQ ID NO: 108841 - DNA, 120 bp, Artificial Sequence
  ENSG00000099956_20 (sequence is synthesized)
aaggagttcatgtcccctctgttctcatctgtaatagggaggtgtccccattcttcagaatggacacaggatctgggagggcagcaaactggctcgcagctccagccttactgaagagaa

SEQ ID NO: 108842 - DNA, 120 bp, Artificial Sequence
  ENSG00000099956_21 (sequence is synthesized)
ctgttggcaggtcccatgctgccagggcagggctagggtcagaggctgctgtgctccctggaagtggggtagggccccatgtggggcagaggcagagctctgattagggattggggttct

SEQ ID NO: 108843 - DNA, 120 bp, Artificial Sequence
  ENSG00000099956_22 (sequence is synthesized)
tggtcgctgagatgtgagaggagggctcctttgagcacatgttagcatgggactcttcccagggagtttgcactcagggcctctgccctccatcaaagagtggaactccccagagcccca

SEQ ID NO: 108844 - DNA, 120 bp, Artificial Sequence
  ENSG00000099956_23 (sequence is synthesized)
tgcacagcaaggggacagctgggccttactggaaggccttgaacaaaggggaagattcccagcccagctgctcttagacatgaacaggtttcattgctgaggtgtttgttctgtccatga

SEQ ID NO: 108845 - DNA, 120 bp, Artificial Sequence
  ENSG00000099956_24 (sequence is synthesized)
ggtaggaacctcggcaatgaaagggtgaggcagccctgtgtctccacaactggggggatggaaggaaccttggctgcctcaccccacaggtcgggcagggccacctggctgggaggtgcc

SEQ ID NO: 108846 - DNA, 120 bp, Artificial Sequence
  ENSG00000099956_25 (sequence is synthesized)
gggaaggctgggccctcactcctgaccgccagctcacaccgccgcaaagccatctccacaaggtctggctacaacacggagggcagactcaacagagaacagtgttgttaccatgaaaat

SEQ ID NO: 108847 - DNA, 120 bp, Artificial Sequence
  ENSG00000099956_26 (sequence is synthesized)
gacaacctgtctttggaggaggccccgtgccactgagcatccagaaataaaccacaacatggacaggcttagaacaacaaggaaagctgccaggtcagaagagaaaaatgagccacaggg

SEQ ID NO: 108848 - DNA, 120 bp, Artificial Sequence
  ENSG00000099956_27 (sequence is synthesized)
gtcggataaggctcacacacgtcctcagctaaaaagggcaggaacagaaccttccagaagtccctgcctcacccagtctcagaactctgctaaggtgaaaacttaggctctgaggtcata

SEQ ID NO: 108849 - DNA, 120 bp, Artificial Sequence
  ENSG00000099956_28 (sequence is synthesized)
gaaagggcagaagacctagtcctggccctcttctgcacctgaatccatggggctttggcatcaccagatgaaaaatgaggcatacgcccacctgtcagggtggctgatgagagacaggag

SEQ ID NO: 108850 - DNA, 120 bp, Artificial Sequence
  ENSG00000099956_29 (sequence is synthesized)
aggctagattggcatcagcctgaaggcaccactggcaggaacatctgtaggctggtttggcacaacctaggagacgcctgtcctggccccagcagccgaaatctggtgaacttccccgct

SEQ ID NO: 108851 - DNA, 120 bp, Artificial Sequence
  ENSG00000099956_30 (sequence is synthesized)
gactggcaggtagcagaggcctatggtgggcaggacttgcccaaggccctggtggggccaggatgagaaccctgagcctgtcacctgtgagctcaaaagctctgcctggcaacctgtgag

SEQ ID NO: 108852 - DNA, 120 bp, Artificial Sequence
  ENSG00000099956_31 (sequence is synthesized)
ctcaaagctctgccaggcaaccatgggcagtttctttgccctctgtgggcacccctatcctaccacctgcagttgggctgagaggccacactgagtgaggacggggcaggcatagaagga

SEQ ID NO: 108853 - DNA, 120 bp, Artificial Sequence
  ENSG00000099956_32 (sequence is synthesized)
tgtggccaggtgagatggggaagccagtgctgtgggccaagagactgcagctcattctgtttattcaggtgggcccttgcatgggcccagcctttaggatgggttttttctgccccaagt

SEQ ID NO: 108854 - DNA, 120 bp, Artificial Sequence
  ENSG00000099956_33 (sequence is synthesized)
aggggtcatgggtaggatggaagctgccagaagcctcttaggcctggccctgggtgggggtcactgctgcgggggtggcagatggggtcctggctgttcctcagggaggggcaggtaatt

SEQ ID NO: 108855 - DNA, 120 bp, Artificial Sequence
  ENSG00000099956_34 (sequence is synthesized)
ggggtcttctgcaggggcatccaggagcagctttctgtggggaggggcccgtgttgagcacaggccagcacaggtccccatcggtggggatccttctgagggtggggagagggagggagg

SEQ ID NO: 108856 - DNA, 120 bp, Artificial Sequence
  ENSG00000099956_35 (sequence is synthesized)
gctctcaacactcacaggaagccaggggtctgcaggagcctcttgcctccaggctggttggggaagacgtcctccaggaagtagtagatatggcccaccgcaatccctgtgagacagcca

SEQ ID NO: 108857 - DNA, 120 bp, Artificial Sequence
  ENSG00000099956_36 (sequence is synthesized)
cggactgtggggtcaccctccacagcccagagtcctagaccagcagagcctgccccaggcccccatccacagcctggtggccctgcaggccccacagcatgagtgccccaaagccttgca

SEQ ID NO: 108858 - DNA, 120 bp, Artificial Sequence
  ENSG00000099956_37 (sequence is synthesized)
cagagtgccagccccgggttggccgtgaaggacaagcttaaaaggcccagaagcaggcaggacccagggaggggagggcctgagaatagtggaggagtgggagccatggggcaggaaccc

SEQ ID NO: 108859 - DNA, 120 bp, Artificial Sequence
  ENSG00000099956_38 (sequence is synthesized)
tgaccctcccatcctcactcccatcaggaccgtgcaagcatcagtagatccgtcctgacgatgcaaattatgtgggccggctggcttgaggggctgtaagagcacagcagctgggagggc

SEQ ID NO: 108860 - DNA, 120 bp, Artificial Sequence
  ENSG00000099956_39 (sequence is synthesized)
aggaagatggggatggagccaggtgtgaggagaactccagcaaggatgggagaggggccccagggcataagcagcgtgtcctgaggggagtggccagcctggggcggactagatgtaccg

SEQ ID NO: 108861 - DNA, 120 bp, Artificial Sequence
  ENSG00000099956_40 (sequence is synthesized)
ggaggctcacccagcaggtccacgaggatggagttgcccagcagcagcgagaagcccatgagcgcccaaggcaggaacggtgcctggaaagtgagcaggccgaagaagttgaccctcacc

SEQ ID NO: 108862 - DNA, 120 bp, Artificial Sequence
  ENSG00000099956_41 (sequence is synthesized)
cgagggctgcggcggctccacacgtacaccagcatggccatgagggcctggcccaggaagaacaggctgcccaggagtcccagcagctgggccagagtcaaggtgctccggtgcaggcct

SEQ ID NO: 108863 - DNA, 120 bp, Artificial Sequence
  ENSG00000099956_42 (sequence is synthesized)
cagcccaagcccagggcccctctgacttcccaagaccctggaattcttcccctcatctcccctatgtgctattccctcatcaagatgagccagtccaataaaggcgacacactccacggg

SEQ ID NO: 108864 - DNA, 120 bp, Artificial Sequence
  ENSG00000099956_43 (sequence is synthesized)
aactgttgtgtttccctgacttccaggacattgtccatagcctccttggctctgtctgctgtcaccttgccatgtcctcctcacctctctggcccctcaagtggagttactcagggcgcg

SEQ ID NO: 108865 - DNA, 120 bp, Artificial Sequence
  ENSG00000099956_44 (sequence is synthesized)
gtccttgggccctttctctgccctcagtttcacatgagtgggccacagccagtctgatggtgcagatgccatccacgtgactcccactgtgccaccatttcccagagcctgctggagtaa

SEQ ID NO: 108866 - DNA, 120 bp, Artificial Sequence
  ENSG00000099956_45 (sequence is synthesized)
accaccacaaactggtggcttcgagcagagcacatttcttccctcacagttctggggcccaggagcctggatttagtttcactagaccagactcatgtgtggacagggccatgctccctc

SEQ ID NO: 108867 - DNA, 120 bp, Artificial Sequence
  ENSG00000099956_46 (sequence is synthesized)
cagaggccatcgaggcgattcggtccttgcttcttccagctttgggggctgccacgttccagtctcagcctctgtggtcacgtggccttctctgcatgaaacttccctgtctctctctta

SEQ ID NO: 108868 - DNA, 120 bp, Artificial Sequence
  ENSG00000099956_47 (sequence is synthesized)
gaaggacacttggcgatgtaatttagggcccttctggttaatctctcaggatctttcacttaatcgtatcttcaaagtctccttttttggccatatgagctgacagtcacaggttttggg

SEQ ID NO: 108869 - DNA, 120 bp, Artificial Sequence
  ENSG00000099956_48 (sequence is synthesized)
gattaagttgtagatgtcttcggggtctgttttttacctctgtggcccagacttcctcagctgccctcaccccctcagcctcatgctgcctgaagacctctccatctcggcgcgtggaga

SEQ ID NO: 108870 - DNA, 120 bp, Artificial Sequence
  ENSG00000099956_49 (sequence is synthesized)
tccagccctctccttgctcaggctgtaggtttctttcccaaggcctgccttttcctcacacagcaagtccagtctctccaggttctcccctgggactgcctcagacagccccccactgct

SEQ ID NO: 108871 - DNA, 120 bp, Artificial Sequence
  ENSG00000099956_50 (sequence is synthesized)
ggcagattctggacctgacacgcaggacatcggggcatagttttggagggtgtgggctctgggttcagtcctggttctgttgctgttcactgtggattgggcctgtgaactttggactct

SEQ ID NO: 108872 - DNA, 120 bp, Artificial Sequence
  ENSG00000099956_51 (sequence is synthesized)
tttccctgtctgtttcccagcgcattcatgcctggcactcagctcacttttctctgtcttccatctacctcccaaggtcactgggggcctttcgcagccctctccatgctcccagacgcc

SEQ ID NO: 108873 - DNA, 120 bp, Artificial Sequence
  ENSG00000099956_52 (sequence is synthesized)
cttaggtgtcctgtgtcctccagctccatttcaccaacctgcctgccggactcttccctctttatcttcccaaagtactccattgcttggaatcctcctgggactccctcagggcagtgg

SEQ ID NO: 108874 - DNA, 120 bp, Artificial Sequence
  ENSG00000099956_53 (sequence is synthesized)
ccagtttgcatagcctgagggaagaactgtgggtgcttcgacacccgctagctttgcagcatccctgaccactgctcctcacggaatctgtgctctgtggtctgtttgtacgtcctcagc

SEQ ID NO: 108875 - DNA, 120 bp, Artificial Sequence
  ENSG00000099956_54 (sequence is synthesized)
agttcctccattcacctgccttggccttgctagaatatttcctcttctggaaatgcccttctcctttcccatagccttccatgaaagtcctgccaaatttcaggcttaaatatcccttca

SEQ ID NO: 108876 - DNA, 120 bp, Artificial Sequence
  ENSG00000099956_55 (sequence is synthesized)
caggatgtctgggtgttgttccaacactgcccaggtcgattctattgcagacagactggtgcttgttatttatggccccaactgtccccattagaccgtggccccgggacccctgctagc

SEQ ID NO: 108877 - DNA, 84 bp, Artificial Sequence
  ENSG00000099956_56 (sequence is synthesized)
gaccagtcagaccagcgcgtcatcatcaagcagagacttggacctcgtgatctgcccacctcgacctcccagagtgctgggatt

SEQ ID NO: 108878 - DNA, 120 bp, Artificial Sequence
  ENSG00000099956_57 (sequence is synthesized)
ttgttttcttgattaatattttaaaattgtggtaacattcataacataaaatttaccattttaaccacttaagtgtaaattcagtggcagtatattcacatccatggctgtgtaattatc

SEQ ID NO: 108879 - DNA, 120 bp, Artificial Sequence
  ENSG00000099956_58 (sequence is synthesized)
ccttcaggtaggatcatgcatgagtctctccctccctcatctccctgcaaaactgttttgagaaagacttctctgtgtgagcggtgatacctttgaggctttctcacgcttcgcagcaca

SEQ ID NO: 108880 - DNA, 120 bp, Artificial Sequence
  ENSG00000099956_59 (sequence is synthesized)
atctggctggggtctgtgtgtttgctccgtcctcctcctgccctatgtatctctccagggctccgctgtgccaggtagggttagaagcacctaacacaatagctggcaaagacttggagt

SEQ ID NO: 108881 - DNA, 120 bp, Artificial Sequence
  ENSG00000099956_60 (sequence is synthesized)
tctgtcagggtgaacctcaagtccttgcctccacggagccctggcctgcccccaccatccaccattcagttgtcctgccccacaccctctctctctgctcttgcccagactgttattttg

SEQ ID NO: 108882 - DNA, 120 bp, Artificial Sequence
  ENSG00000099956_61 (sequence is synthesized)
gtcagggtgacccctgcccagggttcttcatctgttgaacttgaattatgtcttaaacacaaaggcccgcccagcttttgagagtcaggggtccctagcagctccttcttactctagtat

SEQ ID NO: 108883 - DNA, 120 bp, Artificial Sequence
  ENSG00000099956_62 (sequence is synthesized)
ctctgcctttggtcagtcagagagcatttgatgagtaccatgctgggctggaccccatcctggctgccctggaagatagagacaggtcaccttgatccctgcctgtagcatttgggctgg

SEQ ID NO: 108884 - DNA, 120 bp, Artificial Sequence
  ENSG00000099956_63 (sequence is synthesized)
ctgagatggtggaagtgtgaacagaatattccagtccagtgtcctctgtggtagggatggggatggacccgggagaggccctcctgttcctggcaggaggtgggactcagagttaaaagt

SEQ ID NO: 108885 - DNA, 120 bp, Artificial Sequence
  ENSG00000099956_64 (sequence is synthesized)
gaggtcaaggcccagtgcgatggctcacacctgcagtcctagcacttcgcggagctgaggtggatcaccagaacccagtagttcaagaccagcctgggaaaaacatggtgagaccccacc

SEQ ID NO: 108886 - DNA, 120 bp, Artificial Sequence
  ENSG00000099956_65 (sequence is synthesized)
tggtgtggcctctgctccaggcagatcatgtcacctctccacgcagaatcctccaggctccccatcaccctcggagcagaagcaggagttctcactggggtgccaggcccaacctggcct

SEQ ID NO: 108887 - DNA, 120 bp, Artificial Sequence
  ENSG00000099956_66 (sequence is synthesized)
ggtgctgccaccgctgcactctgccccactcaccctgcctcaggcctgagaacgtcctcattgctgtcagacctcccagagctcctgccctgcagttgcctctgctgaggtttagccccg

SEQ ID NO: 108888 - DNA, 120 bp, Artificial Sequence
  ENSG00000099956_67 (sequence is synthesized)
ttctccctcctcccctctttcctttcctccttccttccttccatcattcctccttccctccctcccatcctaccccctcctccttttccttctgtcttccttccctctatctcctcttcc

SEQ ID NO: 108889 - DNA, 120 bp, Artificial Sequence
  ENSG00000099956_68 (sequence is synthesized)
catcatggagcactgagggtacaccaaggcctcagcagaagcccgtctttgggttccatatcatctggaaagtcataacacctggctttgctccctgcaatcccccaggaagggcatagg

SEQ ID NO: 108890 - DNA, 120 bp, Artificial Sequence
  ENSG00000099956_69 (sequence is synthesized)
ctgagttctcatagtaaagtgttatattccggacacattcagggggtgtctctgaggcactgccaggctctgagcaaagcccggaggtctagaggaggtgaaggcagctgattggctggg

SEQ ID NO: 108891 - DNA, 120 bp, Artificial Sequence
  ENSG00000099956_70 (sequence is synthesized)
ccaggctgagtgctccaggggggcctagtaacccaataagatgctgccttagtggccatattacaggtgaagaggtgggcacgtggagagctgagatcacctgcggaagttgcaaactgg

SEQ ID NO: 108892 - DNA, 120 bp, Artificial Sequence
  ENSG00000099956_71 (sequence is synthesized)
ccagttgagaaatggtgaggctggcgattgggcgcaggcctgcaccctgcagagcctatagcataatccttgctgtgctgagccgccactgccagactatgccttgagggtgaggggagc

SEQ ID NO: 108893 - DNA, 120 bp, Artificial Sequence
  ENSG00000099956_72 (sequence is synthesized)
tttgaaaataggaagatatgagaagtaggtgaaattggcacatgtgatgaccctaaaaaggtcagtggtttggttagatctgatgctgtgcctttggcttccattttaggaaaacattga

SEQ ID NO: 108894 - DNA, 120 bp, Artificial Sequence
  ENSG00000099956_73 (sequence is synthesized)
tgtataaaaataagagccatgttacaaagggttcctgaaaatagtctttggggtcgaggagcctcgggagggatgcctcctgtgactgagggatgcctctgccccgtgcaccagatggag

SEQ ID NO: 108895 - DNA, 120 bp, Artificial Sequence
  ENSG00000099956_74 (sequence is synthesized)
cctgggccgacttcttcccactgtggttctccgtggcactttactaagattttggaaaataacgtgggggaatcaccagcaacttcctctgtggtcccccaagtaacaaacaactaaata

SEQ ID NO: 108896 - DNA, 71 bp, Artificial Sequence
  ENSG00000099956_75 (sequence is synthesized)
aacttcctctgtggtcccccaagtaacaaacaactaaatatcttatttagttagtcaactcattgcaacct

SEQ ID NO: 108897 - DNA, 70 bp, Artificial Sequence
  ENSG00000099956_76 (sequence is synthesized)
cagcctcctgagtagctaggattacagttgcccgccactaatcagtctggtctcaaactccttacctcag

SEQ ID NO: 108898 - DNA, 74 bp, Artificial Sequence
  ENSG00000099956_77 (sequence is synthesized)
gccaccgcacctggccgaaatacagtctcactctgtcgcccaggctggcttgcagtgtgcgatctcagctcact

SEQ ID NO: 108899 - DNA, 61 bp, Artificial Sequence
  ENSG00000099956_78 (sequence is synthesized)
gtgtgtgtgtgtgtgtgtgtgtgtgtcgcagtctcactctgtcgcccaggctggcttgcag

SEQ ID NO: 108900 - DNA, 120 bp, Artificial Sequence
  ENSG00000099956_79 (sequence is synthesized)
aaagacaggaagagaaatttcactaaagaagttatataggtggcaaataaacattgaaaagcttttccacattgttagccttagggaaatgcagattaaaattacactgttattccacat

SEQ ID NO: 108901 - DNA, 120 bp, Artificial Sequence
  ENSG00000099956_80 (sequence is synthesized)
ctttaaaaagtggtgacagcatcagatgctggcgaggatgtggaggaactgggtcactcacaagctgctgatgggaatgtaaagtggctggaaaactgccctagaaaacagtgtggcaat

SEQ ID NO: 108902 - DNA, 60 bp, Artificial Sequence
  ENSG00000099956_81 (sequence is synthesized)
aaagtggctggaaaactgccctagaaaacagtgtggcaatttctgttaaaaactaaacat

SEQ ID NO: 108903 - DNA, 85 bp, Artificial Sequence
  ENSG00000099956_82 (sequence is synthesized)
aaactaaacatgcaaccagtgtaccttgagcatttatcctggagaaatgaagacatgtttatacaatagcctacacgtggatgtt

SEQ ID NO: 108904 - DNA, 120 bp, Artificial Sequence
  ENSG00000099956_83 (sequence is synthesized)
aatgaagacatgtttatacaatagcctacacgtggatgttcatagcagctttatttataatagcgggaaactggaaatgatctagatagccttcagtgagtgaatagttaaagtgaggcc

SEQ ID NO: 108905 - DNA, 120 bp, Artificial Sequence
  ENSG00000099956_84 (sequence is synthesized)
ccttcgtaccacagaatgtcacttggcagtaaaaggaagtgacaatctggatgaatcactggatacagatacagtcctctatcttgtcttttttggaggaaactgggcgcagtgtgcatg

SEQ ID NO: 108906 - DNA, 120 bp, Artificial Sequence
  ENSG00000099956_85 (sequence is synthesized)
gaatttctctgtgttgtttcttgcatctgtacatgaatctacaattacttaaaaattttaaaatgctctgggcagtgtattcactgggtgtttaccccgtgcacctgaggttcctgctgt

SEQ ID NO: 108907 - DNA, 120 bp, Artificial Sequence
  ENSG00000099956_86 (sequence is synthesized)
tgtctgctctgaggcaatttttcttggctttttcagcttattcctgcaaggcgtcttgtcagtacggtctgggtggagcagggagagaatgttgactgagaggaccttgctgaggtctgg

SEQ ID NO: 108908 - DNA, 120 bp, Artificial Sequence
  ENSG00000099956_87 (sequence is synthesized)
ctggccacagatggtccctgtgagctcccatctggtacaattccttttccaggatccgggatctgtagggacctccacgcttgtgaccttgttgaggccctgctgctgctactgcagtca

SEQ ID NO: 108909 - DNA, 120 bp, Artificial Sequence
  ENSG00000099956_88 (sequence is synthesized)
caggcctggaaatcgctgtggcttggcacagtgtgttttgctcacatgaggcctggtattgggccagcctctgtgccatcacgtctgccaccagttcagcacagaggggagtagagagat

SEQ ID NO: 108910 - DNA, 120 bp, Artificial Sequence
  ENSG00000099956_89 (sequence is synthesized)
ggcacgcaagctttgatgtgcctttgctggcctcgcctggatcatctcattagttgggataatctcatgcgcccacccagctatgagtggaatgagggaagtgtttatggccatgaccac

SEQ ID NO: 108911 - DNA, 120 bp, Artificial Sequence
  ENSG00000099956_90 (sequence is synthesized)
ccccagggcatggagcaggaggtctgtgcaggatgagggctgggggcctgctagtcatgtgcttcctccttccactcccagtttccaggaaggccacccccagtgccctggttgtcctct

SEQ ID NO: 108912 - DNA, 120 bp, Artificial Sequence
  ENSG00000099956_91 (sequence is synthesized)
agataaaacgttttcactccagagtgtcttcactgcagccttggccttagtcgggcagggagcatcccggggtgggccgccctgtgagcactccaggcaaggaagtggctccagggagcc

SEQ ID NO: 108913 - DNA, 120 bp, Artificial Sequence
  ENSG00000099956_92 (sequence is synthesized)
attggtggtccactgtcagttatttccagcagggccattgggtatgtgagcgggccggggccaggacactagcaggtgctgtgaagacatgttggtctcaaaacgttttaggaatgctgc

SEQ ID NO: 108914 - DNA, 120 bp, Artificial Sequence
  ENSG00000099956_93 (sequence is synthesized)
gatgctctgccatctgtcgtgggtgtgtcgccataatcatcttccatgcagcccaagtggcgggtggtggtcccagctcccactcccctctggggctttcactgcttgcttcctggagca

SEQ ID NO: 108915 - DNA, 120 bp, Artificial Sequence
  ENSG00000099956_94 (sequence is synthesized)
catccatcccatagcacttcatcctggcagccagtgtgctagagcccatgtgcatgtccctgctcctggtggcctgcgtgtgcctggggcttgctaggtacactagtgaaactagtgggc

SEQ ID NO: 108916 - DNA, 120 bp, Artificial Sequence
  ENSG00000099956_95 (sequence is synthesized)
tttgggtcacggcagctctgtgcagggtgaaagggtgctcttcagacactctgggggctctgtgggagacactcccatggagacatttgggtgtggacacagcatgtccttgggcaggtg

SEQ ID NO: 108917 - DNA, 120 bp, Artificial Sequence
  ENSG00000099956_96 (sequence is synthesized)
gcaaaactgcttcccacgtggcaatggcgccttgtagagagctgccctgggcctgggtgtgtctgtgagcatgtgcgcgatgcttcgtagtctgccctgtttgtttgtgtctgtaggtgc

SEQ ID NO: 108918 - DNA, 120 bp, Artificial Sequence
  ENSG00000099956_97 (sequence is synthesized)
tgctgtggttttgtccactgcgggaaagtagtggttcttttaatgcaggagccggagcttctttttgatctgctgctatgacatttccactcacttgcttaaaacagtttcctttttgtt

SEQ ID NO: 108919 - DNA, 120 bp, Artificial Sequence
  ENSG00000099956_98 (sequence is synthesized)
ccccctcctcccctagcagagcatcagtcgctaacacagtgagtccccagctttgcttccccctccgcaagtccctgggctaagtcttgggagataccttccccataagcgattgatttc

SEQ ID NO: 108920 - DNA, 120 bp, Artificial Sequence
  ENSG00000099956_99 (sequence is synthesized)
tccaggagaagccagactgggcccacagacaggtagctcttgacggagattccccggaagagctaggggtcgagctgcctagaatctgtcctgcttcccaggcagcacgtgtggaccggc

SEQ ID NO: 108921 - DNA, 120 bp, Artificial Sequence
  ENSG00000099956_100 (sequence is synthesized)
tcggggatagaaattcgtgtttggtgtgaagcagctctttccaactctctgggctcttgttttaaaagaaaagtattcttcatcttccattccatctccccaccttgcatcgtgttgtgg

SEQ ID NO: 108922 - DNA, 120 bp, Artificial Sequence
  ENSG00000099956_101 (sequence is synthesized)
ccaagagaatatgttctggagtcgagtgtccccgctggtcgtgctgtattgtagttgctggtgctgccctgagcacttccctctgccccgagccagtgctcctggggcagattagtccaa

SEQ ID NO: 108923 - DNA, 120 bp, Artificial Sequence
  ENSG00000099956_102 (sequence is synthesized)
atcagtcccattggaggctctacccagcaggacttgtaagtaaagcactcagtccagattgcccttttggaagaggccagcattcagcagtagtaagtttgacaccttgcttttcccacc

SEQ ID NO: 108924 - DNA, 120 bp, Artificial Sequence
  ENSG00000099956_103 (sequence is synthesized)
tcccgcatgcgaggaccttgatgtgctgcatccacttggctggctgctgtgtgccaccgccaccagcagagtgacccagtgatgtttgtctgttacagatcacggatacacgactctagc

SEQ ID NO: 108925 - DNA, 120 bp, Artificial Sequence
  ENSG00000099956_104 (sequence is synthesized)
tggcatgggaggcggctgatctgcatagcatggatgatgatgacaatgccagtcagacctagttcagcccccgagccctgcacacacctgccttgggtcctgtccaccactctgcttctg

SEQ ID NO: 108926 - DNA, 120 bp, Artificial Sequence
  ENSG00000099956_105 (sequence is synthesized)
ctgtgtgaggctgcatgtgtgccccgtgcctctctcctcctctaactggtcatctctagacatcctcactctgtaagtcctgggtcagatgccatctcttctggctcttcctgggcttcc

SEQ ID NO: 108927 - DNA, 120 bp, Artificial Sequence
  ENSG00000099956_106 (sequence is synthesized)
aaagcctggacagaactcggtctttgtgcaaatgtagacagaaaggttagaaggatatgcatcccaggtgtctagactgcttatcccatctgggagggtggatcatgcatgcatttattg

SEQ ID NO: 108928 - DNA, 120 bp, Artificial Sequence
  ENSG00000099956_107 (sequence is synthesized)
ttttctctatttttaagtctgttagaatgtatttttattattttattttatgattactgtttttttagatcttgttgcataccagttttttttttacttagtgtctgtatcctgctgaat

SEQ ID NO: 108929 - DNA, 120 bp, Artificial Sequence
  ENSG00000099956_108 (sequence is synthesized)
gaatttttataatgaacatactatttatattcagacaaaatgcagtgaatatcatctttattttacttatttttttttttaagagacagagtcccactctgttgcccaggctggagtaca

SEQ ID NO: 108930 - DNA, 120 bp, Artificial Sequence
  ENSG00000099956_109 (sequence is synthesized)
tactctcatagctcactgtaatcttgaactgcctgggctcaagcagtcctcctgccacagcctcccaaatagctaggaatacaggtgtgcaccactgtgccaagcgttaccatttttaaa

SEQ ID NO: 108931 - DNA, 120 bp, Artificial Sequence
  ENSG00000099956_110 (sequence is synthesized)
cctttctcagaacagccttttgaatgtttgtctctcttgtgcctctccttggtagacacacagtctagactttggaataaatgaatgtgttagtgactgaatggcaggggacaggcaact

SEQ ID NO: 108932 - DNA, 120 bp, Artificial Sequence
  ENSG00000099956_111 (sequence is synthesized)
ccatccatgagcccagggcagggagggcttgctgggtgggagccatgtgcctatggtcctatggggtcctgttgggtggttccatgggctgtctgctgctgcacgttctttttggaccca

SEQ ID NO: 108933 - DNA, 120 bp, Artificial Sequence
  ENSG00000099956_112 (sequence is synthesized)
gcacccacgtggtttgcttggcattagattccagttgggaagggccagtgcctccgattccattcatcatcaggcgtgggcgtatgtggagatagcaaaggacatgggggcccgactgca

SEQ ID NO: 108934 - DNA, 120 bp, Artificial Sequence
  ENSG00000099956_113 (sequence is synthesized)
gtccccattgcctggctgcatgccgtgtacaggacactgcagctctgccctcggcttcctccctctgcgtgaggattccttcattcccagaacaaatacaccctgcctgtgctagaattc

SEQ ID NO: 108935 - DNA, 120 bp, Artificial Sequence
  ENSG00000099956_114 (sequence is synthesized)
ctggaggcaaatgattcagattgtttcagacagtcctaagtgctgtgaagaaaataggagaggtgccagcatggtggcccgcacgtatagtcgcagctactcaggagactctcgggggag

SEQ ID NO: 108936 - DNA, 120 bp, Artificial Sequence
  ENSG00000099956_115 (sequence is synthesized)
gatcttttgaggccagcctgggccaacacagagaggcagcagggaagcctgcggggaacagaaggctcaaccacagggtctcttctctgcccaaaacacttgatacattgcctgggcctt

SEQ ID NO: 108937 - DNA, 120 bp, Artificial Sequence
  ENSG00000099956_116 (sequence is synthesized)
tcttctctgcccaaaacacttgatacattgcctgggccttgtagaaaccttgtctctacaaaatattagccagacatggtagtgcatgtccgtagttccagctactcaggaggctgaggc

SEQ ID NO: 108938 - DNA, 120 bp, Artificial Sequence
  ENSG00000099956_117 (sequence is synthesized)
tgcactccagcctgagtgacagagtgacatcctgtctccaaagggggagaaaatggagagaagggtgtggaaaggggctgatgggaaggggagctctcaggagctggcactttagcttag

SEQ ID NO: 108939 - DNA, 120 bp, Artificial Sequence
  ENSG00000099956_118 (sequence is synthesized)
tggcactttagcttagaccaggatgctgagaagaggctggtcctgccaggtgaggggaagagcattctagcaagtgggtggtgatgtgcagggctcagaggcacagggctttatgaacat

SEQ ID NO: 108940 - DNA, 120 bp, Artificial Sequence
  ENSG00000099956_119 (sequence is synthesized)
gatcggggattggggtaccctaatctctaaaaggaggcagaagtccccggaagggctggactccgaggcagtggtgagttttccctgcagctgcccaccctgatccttgacttaaaagct

SEQ ID NO: 108941 - DNA, 120 bp, Artificial Sequence
  ENSG00000099956_120 (sequence is synthesized)
aagggccaacaatgaatgggcaggtgcactgtgacctggttgccctgtggagcactggatagcagtgagggatgaccccagccccacactctaatgggaggagtcttgcaagcatgatgc

SEQ ID NO: 108942 - DNA, 120 bp, Artificial Sequence
  ENSG00000099956_121 (sequence is synthesized)
ctggaccccgaagtgtccatcctattcagaacagccacacctactcaaggggtgagaagtcaaaatggtgcctccccaggggggcaggtgtaggtgggagcccctggggtacagtctgtg

SEQ ID NO: 108943 - DNA, 120 bp, Artificial Sequence
  ENSG00000099956_122 (sequence is synthesized)
ttctctcagctgggtgctggcttcccaggtgtccactagtggaaaacccctgacagcacacccggggcctgggccctctggctgtgagtcacgtgctgcagggagtcctctggggaatgt

SEQ ID NO: 108944 - DNA, 120 bp, Artificial Sequence
  ENSG00000099956_123 (sequence is synthesized)
ggaggagctggcccagcactgtgatccctgcaggcttccctgtcccctcaccgtgttgacccagagtggggtgcatctgtgaacacgctaggcagggttttccgagaggggcaagctctg

SEQ ID NO: 108945 - DNA, 120 bp, Artificial Sequence
  ENSG00000099956_124 (sequence is synthesized)
taaagggcatagacattggctcaagacagggcttagggatgccttagctgagccctgcctttctggtgtagtcacgtaagaccgatggcagcaggagcgaagggcagaaaggaaggtccc

SEQ ID NO: 108946 - DNA, 120 bp, Artificial Sequence
  ENSG00000099956_125 (sequence is synthesized)
caccagcacagggcacaggggagatgggatgaaggtaaggtgggactcaggtgcccccggggtcacttcagggcctcccgagggtgactgtgctgggccctgagccagagcccctcatgg

SEQ ID NO: 108947 - DNA, 120 bp, Artificial Sequence
  ENSG00000099956_126 (sequence is synthesized)
cagacagggttgtggggtcagccttgttttggggatggggaactggaaggacaaggaccacctgcagttctcagctggtggaccctggtgggcagggcccaccccaggcctggcagggcc

SEQ ID NO: 108948 - DNA, 120 bp, Artificial Sequence
  ENSG00000099957_0 (sequence is synthesized)
ctgggattaggggttgagggctgggtgttggaggctggatctggatcctgctttagtggaagtgtccctttaacagcaactggcctggcctggctcgggccctgctttgcctcctgttca

SEQ ID NO: 108949 - DNA, 120 bp, Artificial Sequence
  ENSG00000099957_1 (sequence is synthesized)
gctgcggctgcagctgccatgctgactcatgtgcccgcagctagcaggagctggcagcatgggctccccaggggctacgacaggctgggggcttctggattataagacggagaagtatgt

SEQ ID NO: 108950 - DNA, 120 bp, Artificial Sequence
  ENSG00000099957_2 (sequence is synthesized)
gatgaccaggaactggcgggtgggcgccctgcagaggctgctgcagtttgggatcgtggtctatgtggtagggtgggctctcctcgccaaaaaaggctaccaggagcgggacctggaacc

SEQ ID NO: 108951 - DNA, 120 bp, Artificial Sequence
  ENSG00000099957_3 (sequence is synthesized)
ccagttttccatcatcaccaaactcaaaggggtttccgtcactcagatcaaggagcttggaaaccggctgtgggatgtggccgacttcgtgaagccacctcagggagagaacgtgttctt

SEQ ID NO: 108952 - DNA, 120 bp, Artificial Sequence
  ENSG00000099957_4 (sequence is synthesized)
cttggtgaccaacttccttgtgacgccagcccaagttcagggcagatgcccagagcacccgtccgtcccactggctaactgctgggtcgacgaggactgccccgaaggggagggaggcac

SEQ ID NO: 108953 - DNA, 120 bp, Artificial Sequence
  ENSG00000099957_5 (sequence is synthesized)
acacagccacggtgtaaaaacaggccagtgtgtggtgttcaatgggacccacaggacctgtgagatctggagttggtgccccgtggagagtggcgttgtgccctcgaggcccctgctggc

SEQ ID NO: 108954 - DNA, 120 bp, Artificial Sequence
  ENSG00000099957_6 (sequence is synthesized)
ccaggcccagaacttcacactgttcatcaaaaacacagtcaccttcagcaagttcaacttctctaagtccaatgccttggagacctgggaccccacctattttaagcactgccgctatga

SEQ ID NO: 108955 - DNA, 120 bp, Artificial Sequence
  ENSG00000099957_7 (sequence is synthesized)
accacaattcagcccctactgtcccgtgttccgcattggggacctcgtggccaaggctggagggaccttcgaggacctggcgttgctgggtggctctgtaggcatcagagttcactggga

SEQ ID NO: 108956 - DNA, 120 bp, Artificial Sequence
  ENSG00000099957_8 (sequence is synthesized)
ttgtgacctggacaccggggactctggctgctggcctcactactccttccagctgcaggagaagagctacaacttcaggacagccactcactggtgggagcaaccgggtgtggaggcccg

SEQ ID NO: 108957 - DNA, 120 bp, Artificial Sequence
  ENSG00000099957_9 (sequence is synthesized)
caccctgctcaagctctatggaatccgcttcgacatcctcgtcaccgggcaggcagggaagttcgggctcatccccacggccgtcacactgggcaccggggcagcttggctgggcgtggt

SEQ ID NO: 108958 - DNA, 120 bp, Artificial Sequence
  ENSG00000099957_10 (sequence is synthesized)
cacctttttctgtgacctgctactgctgtatgtggatagagaagcccatttctactggaggacaaagtatgaggaggccaaggccccgaaagcaaccgccaactctgtgtggagggagct

SEQ ID NO: 108959 - DNA, 120 bp, Artificial Sequence
  ENSG00000099957_11 (sequence is synthesized)
ggcccttgcatcccaagcccgactggccgagtgcctcagacggagctcagcacctgcacccacggccactgctgctgggagtcagacacagacaccaggatggccctgtccaagttctga

SEQ ID NO: 108960 - DNA, 120 bp, Artificial Sequence
  ENSG00000099957_12 (sequence is synthesized)
cacccacttgccaacccattccgggagcctgtagccgttccctgctggttgagagttgggggctgggaagggcggggccctgcctggggatctcaaggatgaggccccagcatggaggat

SEQ ID NO: 108961 - DNA, 120 bp, Artificial Sequence
  ENSG00000099957_13 (sequence is synthesized)
tgggggtagaattccacccttgaaccccagcagacagtccctcccctgactcccaccttggtagggtgctgcctcagggagccatagaagtcggctgtgttttgagacggcgacagaacc

SEQ ID NO: 108962 - DNA, 120 bp, Artificial Sequence
  ENSG00000099957_14 (sequence is synthesized)
tgacccgtggagactgggagagcccagcaggcacctgtattgcagggctccgactgcatgtggcaggggctcctgctgcgtctgggcctggaggtctctctcccagtgctctgtccccag

SEQ ID NO: 108963 - DNA, 120 bp, Artificial Sequence
  ENSG00000099957_15 (sequence is synthesized)
atcataggtagagaccccaccctcccatcggtcctacatggggctgtgcagctggagccaaaaaggcaaggtagaaagaggagtgatgggggagggggattgtttcagcttctctggtgc

SEQ ID NO: 108964 - DNA, 120 bp, Artificial Sequence
  ENSG00000099957_16 (sequence is synthesized)
tgtgatgccccaggagagtcctaatctagggaatggggtggagtaggcagataatccacctccctatcccccaggcaagggcggagcatgtgtcttgggcccacacctgcttagtttatg

SEQ ID NO: 108965 - DNA, 120 bp, Artificial Sequence
  ENSG00000099957_17 (sequence is synthesized)
aggaccggctgctttccagtggtagcccttttgccatggaggtctgggagagagagcagagggcggcagggctaagttggtgatcattgggttcttcaggaccttctatatccctcctcg

SEQ ID NO: 108966 - DNA, 120 bp, Artificial Sequence
  ENSG00000099957_18 (sequence is synthesized)
gtaaccccccagcccaaccccttggaatctttcctccaggcttcctgagagccctgggggtgggaggctgtgggaggctgtacatctgaaattcacttcagtccaagtcatacctaggaa

SEQ ID NO: 108967 - DNA, 120 bp, Artificial Sequence
  ENSG00000099957_19 (sequence is synthesized)
gctgtctgggcagctgctcgagggaggccctggctctgatcccaggctggatggagtggctggaaggaatggttccaaacaacaccaccgagatctccctcaggctggccaggttttgca

SEQ ID NO: 108968 - DNA, 120 bp, Artificial Sequence
  ENSG00000099957_20 (sequence is synthesized)
gctggaattctcctcttggtcccagggcggggcagggaattctaagtgtccaccccagggaggcaaggggctgctttccactgtgggtacctggtgatcagggcaagctgtggagggcca

SEQ ID NO: 108969 - DNA, 120 bp, Artificial Sequence
  ENSG00000099957_21 (sequence is synthesized)
ggggtggggctgagactgggctgacatctagaatcacctgccacctggagcctcagtaaaatgcctggggtccctgctgcctctcaatctccagagccatgtccatggggaggtgggctc

SEQ ID NO: 108970 - DNA, 120 bp, Artificial Sequence
  ENSG00000099957_22 (sequence is synthesized)
tgaagggcgaaggtgggagagcagggcccctgaggcctgggtatccaaggaggggcacgtgcacctgattctccttggggcccagaggaagctgatgtcatggctggacaaagtcacgga

SEQ ID NO: 108971 - DNA, 120 bp, Artificial Sequence
  ENSG00000099957_23 (sequence is synthesized)
gtaaagccagcaaagccaccctcttcctgtgtagtccttacaggcatgactggaaagttggggggcatctatggtagacatggcacagccatgaagagaccagtggggtggtgcagggtg

SEQ ID NO: 108972 - DNA, 120 bp, Artificial Sequence
  ENSG00000099957_24 (sequence is synthesized)
gacttggggaccctacccctgaagactgaggccctgcagctaccaggtgggctagaaggtaactggaacaggcctgggcacttgtgcacccatgtaggagcatgagggccacactctttt

SEQ ID NO: 108973 - DNA, 120 bp, Artificial Sequence
  ENSG00000099957_25 (sequence is synthesized)
cacctcaaagcccttgaagagtgggcaaagacagcaagagagctgcagcctgggcccgagctcagaaacagctgtcgcctcagtctgcgcacaggcatgcaccccagggtagtgcctgca

SEQ ID NO: 108974 - DNA, 120 bp, Artificial Sequence
  ENSG00000099957_26 (sequence is synthesized)
gggatgcatgtgtccccgtgggggtgcctgtgccaggcaggcctcaggtgcatgccatgctcagaaccctgctgccctttctaggcagcctccttggggcccaagctctgctccctggat

SEQ ID NO: 108975 - DNA, 120 bp, Artificial Sequence
  ENSG00000099957_27 (sequence is synthesized)
ctgccacctagcagacgtggggagcctgaccccatgcctgtcatggaaccctccttgcctggtgtgtgtggctcccctcttcactgggcacctggatccaggcccacctgtgtccctgac

SEQ ID NO: 108976 - DNA, 120 bp, Artificial Sequence
  ENSG00000099957_28 (sequence is synthesized)
tcagggtggtcccaggactggcacctactctttagagagccccagcatctttgatgtggattggagacaattgcctggttccctggggcaggtgaagacttggtgccacaaagaatgcca

SEQ ID NO: 108977 - DNA, 120 bp, Artificial Sequence
  ENSG00000099957_29 (sequence is synthesized)
cagtggatacgccagcaggccacatggctggccaagcaattattattatggatcccttgggctgtgggccttcccatccaccccaccacaactgcccaggtagctggagctgatcataaa

SEQ ID NO: 108978 - DNA, 120 bp, Artificial Sequence
  ENSG00000099957_30 (sequence is synthesized)
gactcatgtgcccgcagctagcaggagctggcagcatgggctccccaggggctacgacaggctgggggcttctggattataagacggagaagtgggctctcctcgccaaaaaaggctacc

SEQ ID NO: 108979 - DNA, 120 bp, Artificial Sequence
  ENSG00000099957_31 (sequence is synthesized)
acgagcccagccaggccaaccttgagacttgcctcctagggagagaacgtgttcttcttggtgaccaacttccttgtgacgccagcccaagttcagggcagatgcccagaggtgtaaaaa

SEQ ID NO: 108980 - DNA, 120 bp, Artificial Sequence
  ENSG00000099957_32 (sequence is synthesized)
gctacatcttttcctgaatcattatgttcagtcttcacatatcccctgcctggtaggaagtcctgtgatccccatttcagaggagaagactgaggctcagtgaggttgagtcactttctt

SEQ ID NO: 108981 - DNA, 120 bp, Artificial Sequence
  ENSG00000099957_33 (sequence is synthesized)
aaggcctccaggcctgtgggtgacaggaccccgagctctgggcagcagcagttcccatgaggtgtccaggccctcccatcctggtcctgcctctgggtactctccaggttggtagtgtga

SEQ ID NO: 108982 - DNA, 120 bp, Artificial Sequence
  ENSG00000099957_34 (sequence is synthesized)
cacccagagctgcgcacatgctcagggaggttctaatagcaagagccaagctggaatatcacctccccttgtctgtgcccagcctctattaatatgtcctgaggcagctttcatctttgt

SEQ ID NO: 108983 - DNA, 120 bp, Artificial Sequence
  ENSG00000099957_35 (sequence is synthesized)
gggccaacacagcacactcttgctcatggtgaattcaggattgcttatgatttctggatagttttttttgttttatttttgagacggagtttcactctgtcacccacgctggagtgcagt

SEQ ID NO: 108984 - DNA, 120 bp, Artificial Sequence
  ENSG00000099958_0 (sequence is synthesized)
gtgcttgagaaggttcaatggcgtggcagggactagcggccgagttcctgcaggtgccggcggtgacgcgggcttacaccgcagcctgtgtcctcaccaccgccgcggtgcagctggagc

SEQ ID NO: 108985 - DNA, 120 bp, Artificial Sequence
  ENSG00000099958_1 (sequence is synthesized)
tcctcagcccctttcaactctacttcaacccgcaccttgtgttccggaagttccaggtctggaggctcgtcaccaacttcctcttcttcgggcccctgggattcagcttcttcttcaaca

SEQ ID NO: 108986 - DNA, 120 bp, Artificial Sequence
  ENSG00000099958_2 (sequence is synthesized)
tgctcttcgtgttccgctactgccgcatgctggaagagggctccttccgcggccgcacggccgacttcgtcttcatgtttctcttcgggggcgtccttatgaccctgctgggactcctgg

SEQ ID NO: 108987 - DNA, 120 bp, Artificial Sequence
  ENSG00000099958_3 (sequence is synthesized)
caggccctcatggccatgctggtgtacgtgtggagccgccgcagccctcgggtgagggtcaacttcttcggcctgctcactttccaggcaccgttcctgccttgggcgctcatgggcttc

SEQ ID NO: 108988 - DNA, 120 bp, Artificial Sequence
  ENSG00000099958_4 (sequence is synthesized)
tcgctgctgctgggcaactccatcctcgtggacctgctggggattgcggtgggccatatctactacttcctggaggacgtcttccccaaccagcctggaggcaagaggctcctgcagacc

SEQ ID NO: 108989 - DNA, 120 bp, Artificial Sequence
  ENSG00000099958_5 (sequence is synthesized)
cctggcttcctaaagctgctcctggatgcccctgcagaagaccccaattacctgcccctccctgaggaacagccaggaccccatctgccacccccgcagcagtgacccccacccagggcc

SEQ ID NO: 108990 - DNA, 120 bp, Artificial Sequence
  ENSG00000099958_6 (sequence is synthesized)
aggcctaagaggcttctggcagcttccatcctacccatgacccctacttggggcagaaaaaacccatcctaaaggctgggcccatgcaagggcccacctgaataaacagaatgagctgca

SEQ ID NO: 108991 - DNA, 120 bp, Artificial Sequence
  ENSG00000099958_7 (sequence is synthesized)
ccagggacggcaggagagctcgcggcaccttcctgaggccaagcaaggggagcagggttagggctgttcctgaaaggcagagagcctcttgccctgagcctcacagctactcttctcagc

SEQ ID NO: 108992 - DNA, 120 bp, Artificial Sequence
  ENSG00000099958_8 (sequence is synthesized)
tctctgggtctggaaggagaacaggctgaggggagctgagaggagctgaggtgctacccggagccccattcacccccacctgcccacttgggaatctgaggcagaggagggtgaggcctg

SEQ ID NO: 108993 - DNA, 120 bp, Artificial Sequence
  ENSG00000099958_9 (sequence is synthesized)
tgtgccaaccttgttcacataccaccttcgtccccccaggccccggccccactcctggctctcattatttttatgttaaaactttgaagaaattgaacatgacctgttgaagaaattgaa

SEQ ID NO: 108994 - DNA, 120 bp, Artificial Sequence
  ENSG00000099958_10 (sequence is synthesized)
ttccattggctgtcgggctcaggggctctcttttcagcctggggcgcgcagcgcctcggatgcggattggccgaaggcggggctgggaggcgggttaaagagcgcgttgctggctgggcc

SEQ ID NO: 108995 - DNA, 120 bp, Artificial Sequence
  ENSG00000099958_11 (sequence is synthesized)
acgcgtgcttgagaaggttcaatggcgtggcagggactagcggccgagttcctgcaggtgccggcggtgacgcgggcttacaccgcagcctgtgtcctcaccaccgccgcggtggtaagc

SEQ ID NO: 108996 - DNA, 120 bp, Artificial Sequence
  ENSG00000099958_12 (sequence is synthesized)
ggccgggcggaccggacgtcgccttggttacagcctctggcgggaggggtgagggtcgccatggttacggcgtggctcccgggcagctcttgactggcccctggttccacagcagctgga

SEQ ID NO: 108997 - DNA, 120 bp, Artificial Sequence
  ENSG00000099958_13 (sequence is synthesized)
ggctctggaacctcgggctagggcgcctcggcgtccagcctgtgttggtcctggggccaacacagccatgccagagagggacacagtcgctgtctccagcttagtatgtgttgagggccc

SEQ ID NO: 108998 - DNA, 120 bp, Artificial Sequence
  ENSG00000099958_14 (sequence is synthesized)
cccatctcacctggccacatccttctatgcctgccccgtcctcactcagtgtggcctctcagcccaactgcaggtggtaggataggggtgcccacagagggcaaagaaactgcccatggt

SEQ ID NO: 108999 - DNA, 120 bp, Artificial Sequence
  ENSG00000099958_15 (sequence is synthesized)
tgcctggcagagctttgagctcacaggttgccaggcagagcttttgagctcacaggtgacaggctcagggttctcatcctggccccaccagggccttgggcaagtcctgcccaccatagg

SEQ ID NO: 109000 - DNA, 120 bp, Artificial Sequence
  ENSG00000099958_16 (sequence is synthesized)
cctctgctacctgccagtcagcggggaagttcaccagatttcggctgctggggccaggacaggcgtctcctaggttgtgccaaaccagcctacagatgttcctgccagtggtgccttcag

SEQ ID NO: 109001 - DNA, 120 bp, Artificial Sequence
  ENSG00000099958_17 (sequence is synthesized)
caggtgggcgtatgcctcatttttcatctggtgatgccaaagccccatggattcaggtgcagaagagggccaggactaggtcttctgccctttctatgacctcagagcctaagttttcac

SEQ ID NO: 109002 - DNA, 120 bp, Artificial Sequence
  ENSG00000099958_18 (sequence is synthesized)
cttagcagagttctgagactgggtgaggcagggacttctggaaggttctgttcctgccctttttagctgaggacgtgtgtgagccttatccgacccctgtggctcatttttctcttctga

SEQ ID NO: 109003 - DNA, 120 bp, Artificial Sequence
  ENSG00000099958_19 (sequence is synthesized)
cctggcagctttccttgttgttctaagcctgtccatgttgtggtttatttctggatgctcagtggcacggggcctcctccaaagacaggttgtcattttcatggtaacaacactgttctc

SEQ ID NO: 109004 - DNA, 120 bp, Artificial Sequence
  ENSG00000099958_20 (sequence is synthesized)
tgttgagtctgccctccgtgttgtagccagaccttgtggagatggctttgcggcggtgtgagctggcggtcaggagtgagggcccagccttcccggcacctcccagccaggtggccctgc

SEQ ID NO: 109005 - DNA, 120 bp, Artificial Sequence
  ENSG00000099958_21 (sequence is synthesized)
ccgacctgtggggtgaggcagccaaggttccttccatccccccagttgtggagacacagggctgcctcaccctttcattgccgaggttcctacctcatggacagaacaaacacctcagca

SEQ ID NO: 109006 - DNA, 120 bp, Artificial Sequence
  ENSG00000099958_22 (sequence is synthesized)
atgaaacctgttcatgtctaagagcagctgggctgggaatcttcccctttgttcaaggccttccagtaaggcccagctgtccccttgctgtgcatggggctctggggagttccactcttt

SEQ ID NO: 109007 - DNA, 120 bp, Artificial Sequence
  ENSG00000099958_23 (sequence is synthesized)
gatggagggcagaggccctgagtgcaaactccctgggaagagtcccatgctaacatgtgctcaaaggagccctcctctcacatctcagcgaccaagaaccccaatccctaatcagagctc

SEQ ID NO: 109008 - DNA, 120 bp, Artificial Sequence
  ENSG00000099958_24 (sequence is synthesized)
tgcctctgccccacatggggccctaccccacttccagggagcacagcagcctctgaccctagccctgccctggcagcatgggacctgccaacagctgagggtggcagcagtctgtgctgg

SEQ ID NO: 109009 - DNA, 120 bp, Artificial Sequence
  ENSG00000099958_25 (sequence is synthesized)
gatctgtgcccggatctgtgcccattctcttcagtaaggctggagctgcgagccagtttgctgccctcccagatcctgtgtccattctgaagaatggggacacctccctattacagatga

SEQ ID NO: 109010 - DNA, 120 bp, Artificial Sequence
  ENSG00000099958_26 (sequence is synthesized)
gaacagaggggacatgaactccttggaggcagggctgggaagggaccctgggctgtgtctcctccctgtaccgtgtcaactccaagagctggcaccaggccgggagggctattcccatat

SEQ ID NO: 109011 - DNA, 120 bp, Artificial Sequence
  ENSG00000099958_27 (sequence is synthesized)
tcctcacagctggcttgtaaggcaggagctggcccaggccacagcacctgctggggtgggaaagggccccagctgacctggctatgggtgccactggagctagaacagccctcctgcacc

SEQ ID NO: 109012 - DNA, 120 bp, Artificial Sequence
  ENSG00000099958_28 (sequence is synthesized)
caggctggcgacagcccagcagtgcccacacaggactgggccctccgcaggggacttcagagcagcaaggccccagctggcagtagcctgaccatctggacacagcagagccagggcggc

SEQ ID NO: 109013 - DNA, 120 bp, Artificial Sequence
  ENSG00000099958_29 (sequence is synthesized)
ttcctggaggacgtcttccccaaccagcctggaggcaagaggctcctgcagacccctggcttcctggttctcatcctggccccaccagggccttgggcaagtcctgcccaccataggcct

SEQ ID NO: 109014 - DNA, 120 bp, Artificial Sequence
  ENSG00000099958_30 (sequence is synthesized)
gcgtgcttgagaaggttcaatggcgtggcagggactagcggccgagttcctgcaggtgccggcggtgacgcgggcttacaccgcagcctgtgtcctcaccaccgccgcggtgttccaggt

SEQ ID NO: 109015 - DNA, 120 bp, Artificial Sequence
  ENSG00000099958_31 (sequence is synthesized)
gaggccgccccgcgccgcgcacctgtgggcccgacccacccaccccgcacctgaccgcccgtcccccgtaggtctggaggctcgtcaccaacttcctcttcttcgggcccctgggattca

SEQ ID NO: 109016 - DNA, 120 bp, Artificial Sequence
  ENSG00000099960_0 (sequence is synthesized)
agagcggaggcagcggctgcggcagcagcaggttccagtagctggctcggtgctcttctcggccacctgccatggcccgggggctgcccaccattgctagcctggcacgcttatgccaga

SEQ ID NO: 109017 - DNA, 120 bp, Artificial Sequence
  ENSG00000099960_1 (sequence is synthesized)
agctgaaccgcctgaagccgctggaggactccaccatggagacgtcactgcggcgctgcctgtccacgctggacctgactcttctgggcgtgggtggcatggtgggctcgggtctctacg

SEQ ID NO: 109018 - DNA, 120 bp, Artificial Sequence
  ENSG00000099960_2 (sequence is synthesized)
tgctcacaggtgccgtggccaaggaggtggctggccctgctgtgctcttgtccttcggtgtggccgctgtggcctccctgctggcagccctatgctatgcagaatttggggcacgtgtgc

SEQ ID NO: 109019 - DNA, 120 bp, Artificial Sequence
  ENSG00000099960_3 (sequence is synthesized)
cacgcacgggctctgcctacctgttcacctacgtatccatgggcgagctgtgggccttcctcatcggctggaatgttctcctcgaatacatcatcggtggcgccgccgtggcccgtgcct

SEQ ID NO: 109020 - DNA, 120 bp, Artificial Sequence
  ENSG00000099960_4 (sequence is synthesized)
ggagtggctacctggactctatgttcagccacagcatccgcaacttcactgagacccacgtgggttcttggcaggtgcccctcctgggccactacccggacttcctggctgctggcatca

SEQ ID NO: 109021 - DNA, 120 bp, Artificial Sequence
  ENSG00000099960_5 (sequence is synthesized)
tcctcctggcctctgcctttgtctcctgtggagcccgcgtgtcctcctggctcaatcacaccttctcggccatcagcctgcttgtcattctcttcattgtcatcctgggcttcatcctgg

SEQ ID NO: 109022 - DNA, 120 bp, Artificial Sequence
  ENSG00000099960_6 (sequence is synthesized)
cccagcctcacaactggagcgctgacgaaggcggctttgcacccttcggcttctccggcgtcatggccggcactgcctcctgcttctatgctttcgtgggcttcgacgtcattgccgcct

SEQ ID NO: 109023 - DNA, 120 bp, Artificial Sequence
  ENSG00000099960_7 (sequence is synthesized)
ccagtgaggaggcccagaacccacggcggtctgtgcctctggccatcgccatctcgcttgccattgcagctggtgcctacatccttgtctccaccgtgctaaccctcatggtgccctggc

SEQ ID NO: 109024 - DNA, 120 bp, Artificial Sequence
  ENSG00000099960_8 (sequence is synthesized)
acagcctggaccccgactcagcgcttgcagatgccttctaccagcggggctacaggtgggctggcttcatcgtggcagctggctccatctgcgccatgaacaccgtcctgctcagcctcc

SEQ ID NO: 109025 - DNA, 120 bp, Artificial Sequence
  ENSG00000099960_9 (sequence is synthesized)
ccgatgggctcttcttccaggtgtttgcccatgtgcacccccggacacaggtgcctgtggcgggcaccctggcgttcgggctcctcacggccttcctggcactgctgctggacctggagt

SEQ ID NO: 109026 - DNA, 120 bp, Artificial Sequence
  ENSG00000099960_10 (sequence is synthesized)
cgctggttcagttcctgtcccttggcacactcctggcctacacattcgtggccaccagtatcattgtgctgcgcttccagaagtcttccccgcccagctccccaggcccagccagccctg

SEQ ID NO: 109027 - DNA, 120 bp, Artificial Sequence
  ENSG00000099960_11 (sequence is synthesized)
gccccctgaccaagcagcagagctccttctcagaccacctacagctggtgggcactgtacacgcctccgtccctgagccaggggagctgaagccagccctgaggccctacctgggcttct

SEQ ID NO: 109028 - DNA, 120 bp, Artificial Sequence
  ENSG00000099960_12 (sequence is synthesized)
tggatgggtacagccctggagcagtggtgacttgggcgcttggcgttatgttggcctcagccatcaccataggctgcgtgcttgtctttgggaactcgaccctgcacctcccacactggg

SEQ ID NO: 109029 - DNA, 120 bp, Artificial Sequence
  ENSG00000099960_13 (sequence is synthesized)
gttacatcctgctgctcctgctcaccagtgtcatgtttctgctcagcctccttgtcctgggggctcaccagcaacagtatcgggaagacttatttcagatccccatggttcccctgattc

SEQ ID NO: 109030 - DNA, 120 bp, Artificial Sequence
  ENSG00000099960_14 (sequence is synthesized)
cagccctgagcatcgtcctcaacatctgcctcatgctgaaacttagctatctgacctgggtgcgcttctccatctggctgctgatgggacttgcagtgtatttcggctatggcatccggc

SEQ ID NO: 109031 - DNA, 120 bp, Artificial Sequence
  ENSG00000099960_15 (sequence is synthesized)
atagcaaggagaaccagcgggagctgccagggctgaactccacacactacgtggtattccccaggggcagcctggaggagacagtgcaggctatgcagccccccagccaggcaccagcac

SEQ ID NO: 109032 - DNA, 120 bp, Artificial Sequence
  ENSG00000099960_16 (sequence is synthesized)
aggaccctggccatatggagtagctgatcagcccacacttgccccgccctcccacacctgcttgggaggccagagaggccagacaagccgagagccccttctgttgtgggcagcctgggt

SEQ ID NO: 109033 - DNA, 120 bp, Artificial Sequence
  ENSG00000099960_17 (sequence is synthesized)
ttgcaggcctgcacaggctggggagtcctcaggaccttaggaccttcatccaggggctgggcttcgggtcttcaggagtgggccttggctggtgctggtgccatggactctgcccagagc

SEQ ID NO: 109034 - DNA, 120 bp, Artificial Sequence
  ENSG00000099960_18 (sequence is synthesized)
cttcttgtttatgatcagctccagctacctgggcagttgtggtggggtggatgggaaggcccacagcccaagggatccataataataattgcttggccagccatgtggcctgctggcgta

SEQ ID NO: 109035 - DNA, 120 bp, Artificial Sequence
  ENSG00000099960_19 (sequence is synthesized)
agaaggtgggctgcggactttcagacgtggcccttaacctccccgaactgacctaggctagtcagtcagccggcggtctgaccttctccatctgtgactgagtcacagtcacagggcttc

SEQ ID NO: 109036 - DNA, 120 bp, Artificial Sequence
  ENSG00000099968_0 (sequence is synthesized)
accctccaacatggcggcggcggtagattagggccgcgggtcggagcactcaccgccgctgggggaccctgtcggaagcaactgccgccgccgcctctttcatctcttctggggcagggg

SEQ ID NO: 109037 - DNA, 120 bp, Artificial Sequence
  ENSG00000099968_1 (sequence is synthesized)
ccagggccaggttttacacatccataagtagacctttttggagcctcaccagccaattcaatggcgtcctcttctactgtgcctctgggatttcactatgaaacaaagtatgttgttctc

SEQ ID NO: 109038 - DNA, 120 bp, Artificial Sequence
  ENSG00000099968_2 (sequence is synthesized)
agctacttgggactcctctctcaagagaagctgcaagagcaacatctttcctcaccccaaggggttcaactagatatagcttcacaatctctggatcaagaaattttattaaaagttaaa

SEQ ID NO: 109039 - DNA, 120 bp, Artificial Sequence
  ENSG00000099968_3 (sequence is synthesized)
actgaaattgaagaagagctaaaatctctggacaaagaaatttctgaagccttcaccagcacaggctttgaccgtcacacttctccagtgttcagccctgccaatccagaaagctcaatg

SEQ ID NO: 109040 - DNA, 120 bp, Artificial Sequence
  ENSG00000099968_4 (sequence is synthesized)
gaagactgcttggcccatcttggagaaaaagtgtcccaggaactgaaagagcctctccataaagcattgcaaatgctcctgagccagccagtgacatatcaggcatttcgggaatgtaca

SEQ ID NO: 109041 - DNA, 120 bp, Artificial Sequence
  ENSG00000099968_5 (sequence is synthesized)
ctggagaccacagttcatgccagcggctggaataagattttggtgcctctggttttgctacgacaaatgcttttggaattgacaagacgtggtcaagaacctttgagcgcactgctgcag

SEQ ID NO: 109042 - DNA, 120 bp, Artificial Sequence
  ENSG00000099968_6 (sequence is synthesized)
tttggcgtgacatacctggaggactattcggcagagtacatcattcagcaaggtggctggggcactgtgtttagtcttgagtcagaggaggaggaataccctggaatcactgcagaagat

SEQ ID NO: 109043 - DNA, 120 bp, Artificial Sequence
  ENSG00000099968_7 (sequence is synthesized)
agcaatgacatttacatcctgcccagcgacaactctggacaagtcagtcccccagagtctccaactgtgaccacttcctggcagtctgagagcttacctgtgtcactgtcagctagccag

SEQ ID NO: 109044 - DNA, 120 bp, Artificial Sequence
  ENSG00000099968_8 (sequence is synthesized)
agttggcacacagaaagcctgccagtgtcactaggccctgagtcctggcagcagattgcaatggatcctgaagaagtgaaaagcttagacagcaacggagctggagagaagagtgagaac

SEQ ID NO: 109045 - DNA, 120 bp, Artificial Sequence
  ENSG00000099968_9 (sequence is synthesized)
aactcctctaattctgacattgtgcacgtggagaaagaagaggtgcccgagggcatggaagaggctgctgtggcttctgtggtcttgccagcgcgggagctgcaagaggcacttcctgaa

SEQ ID NO: 109046 - DNA, 120 bp, Artificial Sequence
  ENSG00000099968_10 (sequence is synthesized)
gccccagctcccttgcttccacatatcactgccacctccctgctggggacaagggaacctgacacagaagtgatcacagttgagaaatccagccctgctacatctctgtttgtagaactt

SEQ ID NO: 109047 - DNA, 120 bp, Artificial Sequence
  ENSG00000099968_11 (sequence is synthesized)
gatgaagaagaggtgaaagcagcaacaactgaacctactgaagtggaggaggtggtccccgcactggaacccacagaaacgctgctgagtgagaaggagataaacgcaagggaagagagc

SEQ ID NO: 109048 - DNA, 120 bp, Artificial Sequence
  ENSG00000099968_12 (sequence is synthesized)
cttgtggaagagctgtcccctgccagcgagaagaagcccgtgccgccgtctgagggcaagtctagactgtcccccgccggtgagatgaagcccatgccgctgtctgagggcaagtctata

SEQ ID NO: 109049 - DNA, 120 bp, Artificial Sequence
  ENSG00000099968_13 (sequence is synthesized)
ctgctgtttggaggggctgctgctgttgccatcctggcagtggccatcggggtagccctggctctgagaaagaaataggaggcttttcagaagagaaagacagaaggatgtaaggttgga

SEQ ID NO: 109050 - DNA, 120 bp, Artificial Sequence
  ENSG00000099968_14 (sequence is synthesized)
gttgtattggctggaatttgaacctccagcagctgtctggacatttgtggaacactctgggataattggggacttctgctcaacatggcagtggcatgttaggcatgttagggcttgagg

SEQ ID NO: 109051 - DNA, 120 bp, Artificial Sequence
  ENSG00000099968_15 (sequence is synthesized)
tggggcattcacattcatctgactgtaaatcccaagggcctccgctcatgctaaattgagaatcttaggggtaaagcaccccctccaggaccgggtttctcagccttggcactagtgctg

SEQ ID NO: 109052 - DNA, 120 bp, Artificial Sequence
  ENSG00000099968_16 (sequence is synthesized)
ttctgaccattctctgtgttggggctgtcctgtgtgtggtgggctccacccactagatgccagtggcaccccctcccagagatgacaaacgaaaatgtctctagacattgccaaatgtcc

SEQ ID NO: 109053 - DNA, 120 bp, Artificial Sequence
  ENSG00000099968_17 (sequence is synthesized)
cgtgtgaacatcccctattgagacccactgctttagcgagagagggtttacttaggaagaattgggatagaaattcccagctgagagaacttagctgtgggctcctcagctactgacttc

SEQ ID NO: 109054 - DNA, 120 bp, Artificial Sequence
  ENSG00000099968_18 (sequence is synthesized)
ttagctcttaatccccttagaatttcatctttctcgatgagcaggctctgcacccactctttttttgccccccgccctcatcctggagtgtgagggtgctcgcccgtactctcagctgcc

SEQ ID NO: 109055 - DNA, 120 bp, Artificial Sequence
  ENSG00000099968_19 (sequence is synthesized)
tctcagggactgcactgttcctcttcacccccaggttcctgctaagatcccacgggcgagggcttgctctggactcagtctgtcaagtccccgaagcttcctgcagctccaccttgtaaa

SEQ ID NO: 109056 - DNA, 120 bp, Artificial Sequence
  ENSG00000099968_20 (sequence is synthesized)
aaaatcacatgaaggagacctggggtccccacttgtgagtgcaactgcaagtaactctggctagagagacacatgtgtcttgtgtcaaggcaggaggataacctggatgaccttctgagg

SEQ ID NO: 109057 - DNA, 120 bp, Artificial Sequence
  ENSG00000099968_21 (sequence is synthesized)
tctcttcagcccttttcgctagtggtcacccaccaccatggttacttgccagcaacatctctattgctggatggtccctgtctataaccttgggctagtatattttttccaatatgggac

SEQ ID NO: 109058 - DNA, 120 bp, Artificial Sequence
  ENSG00000099968_22 (sequence is synthesized)
cttagtcttactactgatgagttctatgggtctcttgctagggggtaaggatttttattcttgggcttatagagccagttagatcataattcttatgaaatagagagtgtcctaaatatc

SEQ ID NO: 109059 - DNA, 120 bp, Artificial Sequence
  ENSG00000099968_23 (sequence is synthesized)
actgaaataaaaagtaggaaaaagaagcttgaattttaagactgaggctgctctgcagattctagtttggctttcagagttcaagagtggtggcatcttcacctgaattcttcaatgcca

SEQ ID NO: 109060 - DNA, 120 bp, Artificial Sequence
  ENSG00000099968_24 (sequence is synthesized)
gggtaataaaccaaaatagtcctaatcagtatatgctagttgagcatcggcataattttctttcctctggctgatcccagccctaaaggaagggtagacccgtgtctttccagccctaaa

SEQ ID NO: 109061 - DNA, 120 bp, Artificial Sequence
  ENSG00000099968_25 (sequence is synthesized)
ggaagggtagacccgtgtctttccagccctaaaggaagggcagacccgtgtctttccatgcccgagggccacgacgtcactatgcagggcacacgtggcttggtttaaaaaggtcatctt

SEQ ID NO: 109062 - DNA, 120 bp, Artificial Sequence
  ENSG00000099968_26 (sequence is synthesized)
agatttatcttagtaaatgtaataaattattttttagatcttgaaatttataataaaaatactttacctaccctgatcaccaaaacctgatgttttaaatgtgctttctttttgaaattt

SEQ ID NO: 109063 - DNA, 120 bp, Artificial Sequence
  ENSG00000099968_27 (sequence is synthesized)
atgttttcaaataaaatctccctaaagcaatatttaaaaattggtcaaaacaaggtctgggagtatgtttgtgtgtctttccagctttatcctgtagcgtgtctttgttctgtgttttag

SEQ ID NO: 109064 - DNA, 120 bp, Artificial Sequence
  ENSG00000099968_28 (sequence is synthesized)
tgtcccatttagggagtgatgttttaagggtttttgtgtacttggattaagtaattagaggtgagtggggggaatgggattattgaggcaatgatttttttcttcatgggctctgatagt

SEQ ID NO: 109065 - DNA, 120 bp, Artificial Sequence
  ENSG00000099968_29 (sequence is synthesized)
tgcattgattgttctgtattctaattgctatatttgtgtttgcataggtgaagagcaaactggtgcgttatcttgatttttaaaaagtaataaatcctatgagttccagtattaacactt

SEQ ID NO: 109066 - DNA, 120 bp, Artificial Sequence
  ENSG00000099968_30 (sequence is synthesized)
gccagttctggatcctcacacccattggctgagcgcattcaagcaccaatcgaagccaggttcatctctgagctgctgaaaggaggtgtgaggcttaggaaattggagcctgtgttgccc

SEQ ID NO: 109067 - DNA, 120 bp, Artificial Sequence
  ENSG00000099968_31 (sequence is synthesized)
acgaaaggaaagaataaggaagaaatgtggtatggaagcggctacttgctgctttattttcccacctgttagacattcctccacagtgatttggccagttgtatttcacggtaatggaac

SEQ ID NO: 109068 - DNA, 120 bp, Artificial Sequence
  ENSG00000099968_32 (sequence is synthesized)
tagatagtgttttccattggctttctctggtagctcttggtcagctcctgagttaacaggatgtggcagcatccctgttcttccttcacgtcctcaccctctgcctccagcagtggaagg

SEQ ID NO: 109069 - DNA, 120 bp, Artificial Sequence
  ENSG00000099968_33 (sequence is synthesized)
gaacagccctcatgaggactgcttcctactgcagctcctgctttttgctcatacatttaaaaaactatttctcaagcttcccctccttttggggggaggagctgatagtaggaggccatt

SEQ ID NO: 109070 - DNA, 120 bp, Artificial Sequence
  ENSG00000099968_34 (sequence is synthesized)
ccttccacctccaacttataccctctaagtctaaggtgaaggaaagattcagaataaatccaacttgtttatagaaaagttcttgttagtccttagacctcatctcaactgctctgttga

SEQ ID NO: 109071 - DNA, 120 bp, Artificial Sequence
  ENSG00000099968_35 (sequence is synthesized)
aggtaatgatttattggggggaaaaaacaacgccaatttatcctctctgtattaaagtgataattctgggcccacagaaatcagtcagtacctgcggtgtgccttaaggggactctcatg

SEQ ID NO: 109072 - DNA, 120 bp, Artificial Sequence
  ENSG00000099968_36 (sequence is synthesized)
atcatcattcccttctagagaacattctagatgaagaaatgcaactgttgaccttctggttcacccatctccccctcgaggcattcttgataccccttctcacctgcatttctgtcccag

SEQ ID NO: 109073 - DNA, 120 bp, Artificial Sequence
  ENSG00000099968_37 (sequence is synthesized)
ggataccagatgcagccactacctaactaggcttgtcctgggggagtgagccgtgaacctggagacatggctttgacccacagctactgttcatttcctcaggctttgcgctgattccct

SEQ ID NO: 109074 - DNA, 120 bp, Artificial Sequence
  ENSG00000099968_38 (sequence is synthesized)
caataatatgacagtaaggcaagtagtctccttgcctttctcctgaaaggtatgagatgtggacatttcagtgtttgaattattttaagagatgttttatagaaataaaacgttttgtag

SEQ ID NO: 109075 - DNA, 120 bp, Artificial Sequence
  ENSG00000099968_39 (sequence is synthesized)
ctaagaattttccctttctcttaatttcttacatctttccacacaaacttatctttccaagaatttgaggtggtgatcatacccatcaagacggccttgtaggctatctgattgctaaca

SEQ ID NO: 109076 - DNA, 120 bp, Artificial Sequence
  ENSG00000099968_40 (sequence is synthesized)
gacacgacctagagcttctgcccaaattcccacacaagcattatctcgtttaacatctcagcgacatactggataccagaataatgtttcctcttctctggtgcaccaaaacctgccctt

SEQ ID NO: 109077 - DNA, 120 bp, Artificial Sequence
  ENSG00000099968_41 (sequence is synthesized)
tcctaaactgggatcttgggtaggaggaagaaaagataaggagttcctctatctgaaattagtcgggctgttttgaggagtactggttagataccttccgatactcctccaaagaactct

SEQ ID NO: 109078 - DNA, 120 bp, Artificial Sequence
  ENSG00000099968_42 (sequence is synthesized)
cggattcaagtaaacaaacatccattaatacaagttaagtatgttccaggcgctgtgtgttccaggtactgttaacaaaagcgggttactagttaagacttccttcatgccctggcgcct

SEQ ID NO: 109079 - DNA, 120 bp, Artificial Sequence
  ENSG00000099968_43 (sequence is synthesized)
ctgctcagccagttcccttcgcctaggaggacctctctacaccaccccgctatattccctccccggaattccttcccaaccttcaaggaccatctgccccaactagtggcgaacatcgag

SEQ ID NO: 109080 - DNA, 120 bp, Artificial Sequence
  ENSG00000099968_44 (sequence is synthesized)
gctgtcgtgactgtgtagatacttatttgacctgctcccttggcaaacacttgaaacgcaatacatgtttgtggaactgaacatagcctgtgcatgcagcaaggcttctttccctggaat

SEQ ID NO: 109081 - DNA, 120 bp, Artificial Sequence
  ENSG00000099968_45 (sequence is synthesized)
cgcctgcccttcctccaacacagcgaccagccggtcagaatcccaacccctcgactccggaaatgatctgagagacggaacttccgaacgtcgcaatcagatttgggcgggctaggaggg

SEQ ID NO: 109082 - DNA, 120 bp, Artificial Sequence
  ENSG00000099968_46 (sequence is synthesized)
ctggaggactattcggcagagtacatcattcagcaaggtggctgggtatgagctgttatatattaaaaatattttcttgaaaaaaaattaggtttgttgtttttcttaagagatgggttc

SEQ ID NO: 109083 - DNA, 120 bp, Artificial Sequence
  ENSG00000099968_47 (sequence is synthesized)
taggtttgttgtttttcttaagagatgggttcttgctgtgttacccgggctggagtgcagtgtctaattgctggcactatcatggcaggcttcggtctcaaactcctgggctcaagtgat

SEQ ID NO: 109084 - DNA, 120 bp, Artificial Sequence
  ENSG00000099968_48 (sequence is synthesized)
attcagttggttcagttgtttataaattttccttatatgttctttgacccttgaattacttagaaatgtattttttaatttctaaatacttacaggtttaaaaattttgttttcaattac

SEQ ID NO: 109085 - DNA, 120 bp, Artificial Sequence
  ENSG00000099968_49 (sequence is synthesized)
taatttaattctgtttcatcagaaagcacgaccatcgtggcattgaaacttgagttatagcctactatcatgatcaatttaaaaaatatatatatagggctgggtgcagtggtgcacatc

SEQ ID NO: 109086 - DNA, 69 bp, Artificial Sequence
  ENSG00000099968_50 (sequence is synthesized)
caaaaccccatctgtacaaaaaaatacaaaaaattaactgggcttggtggcatgtgcctgtaatcccag

SEQ ID NO: 109087 - DNA, 120 bp, Artificial Sequence
  ENSG00000099968_51 (sequence is synthesized)
aacagagcaacaacaacaacaacaacaaaatatatatatacacacacacacacacatatgtatatgtatatacacacatgtatatttttatgtatgtttcagaacatgtattctctaatg

SEQ ID NO: 109088 - DNA, 120 bp, Artificial Sequence
  ENSG00000099968_52 (sequence is synthesized)
gttggtgcagaagtctgtacgtgtccatttacatttaatcagtcttaataatacgtattttaaatctttcagtcatttccaattattttgtctaattatttactaagagagacatgttct

SEQ ID NO: 109089 - DNA, 120 bp, Artificial Sequence
  ENSG00000099968_53 (sequence is synthesized)
atttgctactatggtggtagattttccattttccctttagttctgtcaattgtaggtgactaaaagttgtaattattgacccctggacatttatgcggactctctttctttctttgggcc

SEQ ID NO: 109090 - DNA, 120 bp, Artificial Sequence
  ENSG00000099968_54 (sequence is synthesized)
tagaaatggtttttaagtttatttgttgtaatttgcccaacagtcagtgattctgtagagagagtacttttcataaagtatactactcattattgttttttagccactatgcatctgagg

SEQ ID NO: 109091 - DNA, 120 bp, Artificial Sequence
  ENSG00000099968_55 (sequence is synthesized)
gtttgagttaatttttaaaatatgtaaatttaattactatggatactaatatcgaacatcctaggtttacgtgcttggtaaatgcttactgaataaaatcctgaacatttgtcttaggaa

SEQ ID NO: 109092 - DNA, 120 bp, Artificial Sequence
  ENSG00000099968_56 (sequence is synthesized)
gcaatcagatttgggcgggctaggagggtttgggtcttcaggtcacatctggacggagagacctccggggcctccgttggtcggtccttccgctccggataccgttccggatgtcaggta

SEQ ID NO: 109093 - DNA, 120 bp, Artificial Sequence
  ENSG00000099968_57 (sequence is synthesized)
ttctccctgagtcatccttgctccctccctcctcattctcttttcatttcctgggcttgtgttgctacgttagaagtctgtctgtctcctggaaagggcagagcaagtccactgtgggca

SEQ ID NO: 109094 - DNA, 120 bp, Artificial Sequence
  ENSG00000099968_58 (sequence is synthesized)
aatattttagattttttacctttaaaaaaagttaaaattctggttttcattgtgctaatgagatcatttttgttattattttatcctgtattaataattcaggtatttctttgcagcata

SEQ ID NO: 109095 - DNA, 120 bp, Artificial Sequence
  ENSG00000099968_59 (sequence is synthesized)
aaaatcctatcctgtaagttccaagcagttacaaaaaaattactagaatatacatttatcttgctatgttattaactatttcccaggcatgcatcacagcttatagaatgcttgaaaaaa

SEQ ID NO: 109096 - DNA, 120 bp, Artificial Sequence
  ENSG00000099974_0 (sequence is synthesized)
agagctgtttccgttcctctgcccgccatgccgttcctggagctggacacgaatttgcccgccaaccgagtgcccgcggggctggagaaacgactctgcgccgccgctgcctccatcctg

SEQ ID NO: 109097 - DNA, 120 bp, Artificial Sequence
  ENSG00000099974_1 (sequence is synthesized)
ggcaaacctgcggaccgcgtgaacgtgacggtacggccgggcctggccatggcgctgagcgggtccaccgagccctgcgcgcagctgtccatctcctccatcggcgtagtgggcaccgcc

SEQ ID NO: 109098 - DNA, 120 bp, Artificial Sequence
  ENSG00000099974_2 (sequence is synthesized)
gaggacaaccgcagccacagcgcccacttctttgagtttctcaccaaggagctagccctgggccaggaccggttccctacggtcttatccaccagccctgctgcccatggtggccccaga

SEQ ID NO: 109099 - DNA, 120 bp, Artificial Sequence
  ENSG00000099974_3 (sequence is synthesized)
tgcccaggagagataatagaaggtaagaagtcatgtttgaatgaggaagctctcttcatttatttcatatgaggatgaagaagaggattatgtgatcacaggaatgttgcatgcgggata

SEQ ID NO: 109100 - DNA, 120 bp, Artificial Sequence
  ENSG00000099974_4 (sequence is synthesized)
atccaaagctggttatctccaggccctcactctgccaagagatctctctggaagaagcagccagttcacagatgccctggatccctccgtgcccaatcataaaaaagtcatgaccgtccc

SEQ ID NO: 109101 - DNA, 120 bp, Artificial Sequence
  ENSG00000099974_5 (sequence is synthesized)
tatcttgccaatctgccaggactccaaggggaaaaagcggataagtatccttcaggagacagagaaaaagatatcatcagctccttggctaataccacatcttgcaagacccctgccagg

SEQ ID NO: 109102 - DNA, 120 bp, Artificial Sequence
  ENSG00000099974_6 (sequence is synthesized)
gacagcctgcctcagtccaccaggcattttgcaaacctgctcatcccaataatgattttccccaacccccagcagggcagtgggacactcaggtgtgggaggtagccgcacatcatgacc

SEQ ID NO: 109103 - DNA, 120 bp, Artificial Sequence
  ENSG00000099974_7 (sequence is synthesized)
cagctaggacagacacacaatacagtagcctcggtgtgtgtgccgtacactctatcatctccatcagtttgtgtactgaggggtaccctgcctcctaattgcaggctccctaagggcaca

SEQ ID NO: 109104 - DNA, 120 bp, Artificial Sequence
  ENSG00000099974_8 (sequence is synthesized)
gtacctcagccacctgttttctcaaaggctgagcacagggtgaccccccaccccaccaaccccgccactaatgtctgggccataagtgaacatgcccctctcagaggtaacagcaagttt

SEQ ID NO: 109105 - DNA, 120 bp, Artificial Sequence
  ENSG00000099974_9 (sequence is synthesized)
ccagtgaggaaaaccagaacttgggacagcctggttggggcgggcgggagtatgaacagcctgtcttctcatcataaaattggcataatggagattatctacctcatggggatagcatgt

SEQ ID NO: 109106 - DNA, 120 bp, Artificial Sequence
  ENSG00000099974_10 (sequence is synthesized)
cttgtctgagcaaagggagagtggatagggattgtaaggatcaaatgggatcatgagtgtaaagtacctgtagaggacctagcacatggtaagtgtataacacttgttgttagagtaaca

SEQ ID NO: 109107 - DNA, 120 bp, Artificial Sequence
  ENSG00000099974_11 (sequence is synthesized)
gttttccctgagtatccgtgggagatttgttctagaatccccagaggaaaccagaatctacatttgctcaagtcccttacataaaatggtgtaatatttgcatgtaacctacacacatcc

SEQ ID NO: 109108 - DNA, 120 bp, Artificial Sequence
  ENSG00000099974_12 (sequence is synthesized)
tctcatatactttaaataatctctgggttacttataatacctaatataatgtacgtactatgtaaatagttgtattgtttagggaataatgacaaggaataaagtctatacgtattttca

SEQ ID NO: 109109 - DNA, 120 bp, Artificial Sequence
  ENSG00000099977_0 (sequence is synthesized)
gatcccggtgccagggaccctgcccagttccaggcgtcgccctgacccagaaacgactgggcgccgccgtcctggaaaggccccagcgcacggacatctgaggagctgtttccgttcctc

SEQ ID NO: 109110 - DNA, 120 bp, Artificial Sequence
  ENSG00000099977_1 (sequence is synthesized)
tgcccgccatgccgttcctggagctggacacgaatttgcccgccaaccgagtgcccgcggggctggagaaacgactctgcgccgccgctgcctccatcctgggcaaacctgcggaccgcg

SEQ ID NO: 109111 - DNA, 120 bp, Artificial Sequence
  ENSG00000099977_2 (sequence is synthesized)
atctcctccatcggcgtagtgggcaccgccgaggacaaccgcagccacagcgcccacttctttgagtttctcaccaaggagctagccctgggccaggaccggatacttatccgctttttc

SEQ ID NO: 109112 - DNA, 120 bp, Artificial Sequence
  ENSG00000099977_3 (sequence is synthesized)
cccttggagtcctggcagattggcaagatagggacggtcatgacttttttatgattgggcacggagggatccagggcatctgtgaactggctgcttcttccagagagatctcttggcaga

SEQ ID NO: 109113 - DNA, 120 bp, Artificial Sequence
  ENSG00000099977_4 (sequence is synthesized)
gtgagggcctggagataaccagctttggattatcccgcatgcaacattcctgtgatcacataatcctcttcttcatcctcatatgaaataaatgaagagagcttcctcattcaaacatga

SEQ ID NO: 109114 - DNA, 120 bp, Artificial Sequence
  ENSG00000099977_5 (sequence is synthesized)
gtttgcagaagcgggaggtaccctaggcagccaatcggggagcgccgagtctctgtccagccaatgagaagccaggttgctgtggcgcctcgcccctcctccctggtccgcgagccttgg

SEQ ID NO: 109115 - DNA, 120 bp, Artificial Sequence
  ENSG00000099977_6 (sequence is synthesized)
gttccaggtgaagttcacgggagactcacagagtagtgaaagaccattggcctggatgtctagacatctgctttctgggtcctgcatagctgggggaccccagacaaacttggaaatgaa

SEQ ID NO: 109116 - DNA, 120 bp, Artificial Sequence
  ENSG00000099977_7 (sequence is synthesized)
ccatctccagttggcaacctcctcttctgtgaatacaggggaaaagacctccctcccccacaagaagcgtctgcaacccaaacctggcgttctgtgaccgagttaaagtttcctcttggg

SEQ ID NO: 109117 - DNA, 120 bp, Artificial Sequence
  ENSG00000099977_8 (sequence is synthesized)
ggtgcgtaggggtagtaggggatccatgtgggactgccgcagactggagccactgatcctgcctcagggggaaaaacccatttcttgccctgcccagtaaggacacatcagggtctggag

SEQ ID NO: 109118 - DNA, 120 bp, Artificial Sequence
  ENSG00000099977_9 (sequence is synthesized)
tcagtgtgtaagtctgtgaaccgggaaggctctcttttaacacccccggggcagtgcaagggtcatgtgggattgtctgtgtgctgtacctgccttggcacctgacagggtaggtacacg

SEQ ID NO: 109119 - DNA, 120 bp, Artificial Sequence
  ENSG00000099985_0 (sequence is synthesized)
agccgagaggtgtcacccccagcgggcgcgggccggagcacgggcacccagcatgggggtactgctcacacagaggacgctgctcagtctggtccttgcactcctgtttccaagcatggc

SEQ ID NO: 109120 - DNA, 120 bp, Artificial Sequence
  ENSG00000099985_1 (sequence is synthesized)
gagcatggcggctataggcagctgctcgaaagagtaccgcgtgctccttggccagctccagaagcagacagatctcatgcaggacaccagcagactcctggacccctatatacgtatcca

SEQ ID NO: 109121 - DNA, 120 bp, Artificial Sequence
  ENSG00000099985_2 (sequence is synthesized)
aggcctggatgttcctaaactgagagagcactgcagggagcgccccggggccttccccagtgaggagaccctgagggggctgggcaggcggggcttcctgcagaccctcaatgccacact

SEQ ID NO: 109122 - DNA, 120 bp, Artificial Sequence
  ENSG00000099985_3 (sequence is synthesized)
gggctgcgtcctgcacagactggccgacttagagcagcgcctccccaaggcccaggatttggagaggtctgggctgaacatcgaggacttggagaagctgcagatggcgaggccgaacat

SEQ ID NO: 109123 - DNA, 120 bp, Artificial Sequence
  ENSG00000099985_4 (sequence is synthesized)
cctcgggctcaggaacaacatctactgcatggcccagctgctggacaactcagacacggctgagcccacgaaggctggccggggggcctctcagccgcccacccccacccctgcctcgga

SEQ ID NO: 109124 - DNA, 120 bp, Artificial Sequence
  ENSG00000099985_5 (sequence is synthesized)
tgcttttcagcgcaagctggagggctgcaggttcctgcatggctaccatcgcttcatgcactcagtggggcgggtcttcagcaagtggggggagagcccgaaccggagccggagacacag

SEQ ID NO: 109125 - DNA, 120 bp, Artificial Sequence
  ENSG00000099985_6 (sequence is synthesized)
cccccaccaggccctgaggaagggggtgcgcaggaccagaccctccaggaaaggcaagagactcatgaccaggggacagctgccccggtagcctcgagagcaccccttgccggtgaagga

SEQ ID NO: 109126 - DNA, 120 bp, Artificial Sequence
  ENSG00000099985_7 (sequence is synthesized)
gttcccctctgctactagccactgagaagtgcactttaagaggtgggagctgggcagacccctctacctcctccaggctgggagacagagtcaggctgttgcgctcccacctcagcccca

SEQ ID NO: 109127 - DNA, 120 bp, Artificial Sequence
  ENSG00000099985_8 (sequence is synthesized)
agttccccaggcccagtggggtggccgggcgggccacgcgggaccgactttccattgattcaggggtctgatgacacaggctgactcatggccgggctgactgcccccctgccttgctcc

SEQ ID NO: 109128 - DNA, 120 bp, Artificial Sequence
  ENSG00000099985_9 (sequence is synthesized)
ccgaggcctgccggtccttccctctcatgacttgcagggccgttgcccccagacttcctcctttccgtgtttctgaaggggaggtcacagcctgagctggcctcctatgcctcatcatgt

SEQ ID NO: 109129 - DNA, 120 bp, Artificial Sequence
  ENSG00000099985_10 (sequence is synthesized)
cccaaaccagacacctggatgtctgggtgacctcactttaggcagctgtaacagcggcagggtgtcccaggagccctgatccgggggtccagggaatggagctcaggtcccaggccagcc

SEQ ID NO: 109130 - DNA, 120 bp, Artificial Sequence
  ENSG00000099985_11 (sequence is synthesized)
ccgaagtcgccacgtggcctggggcaggtcactttacctctgtggacctgttttctctttgtgaagctagggagttagaggctgtacaaggcccccactgcctgtcggttgcttggattc

SEQ ID NO: 109131 - DNA, 120 bp, Artificial Sequence
  ENSG00000099985_12 (sequence is synthesized)
cctgacgtaaggtggatattaaaaatctgtaaatcaggacaggtggtgcaaatggcgctgggaggtgtacacggaggtctctgtaaaagcagacccacctcccagcgccgggaagcccgt

SEQ ID NO: 109132 - DNA, 120 bp, Artificial Sequence
  ENSG00000099985_13 (sequence is synthesized)
cttgggtcctcgctgctggctgctccccctggtggtggatcctggaattttctcacgcaggagccattgctctcctagagggggtctcagaaactgcgaggccagttccttggagggaca

SEQ ID NO: 109133 - DNA, 120 bp, Artificial Sequence
  ENSG00000099985_14 (sequence is synthesized)
gagggacatgactaatttatcgatttttatcaatttttatcagttttatatttataagccttatttatgatgtatatttaatgttaatattgtgcaaacttatatttaaaacttgcctgg

SEQ ID NO: 109134 - DNA, 120 bp, Artificial Sequence
  ENSG00000099985_15 (sequence is synthesized)
ggagggaggcaagagaggtcaggggagagccctggccttgtgtgacctgagtaggaccttctcctgagacttggtttacctgtcaggaaagtggggacatggactggaaggtcttccaca

SEQ ID NO: 109135 - DNA, 120 bp, Artificial Sequence
  ENSG00000099985_16 (sequence is synthesized)
tctgttccaggctgcacctctggttgaaaaggcagcctctcctggttctagacagagctgaggacacaagctgctcccgggctgcctgccctgaagccctctcaggcccatctacctgga

SEQ ID NO: 109136 - DNA, 120 bp, Artificial Sequence
  ENSG00000099991_0 (sequence is synthesized)
gtcaggcgcgcagccggacggcgcggtggtcgggacagactggccgttgctgtggagacgcctggagagttgtggactggggcaacctttgccagtgatgagaagtgatgctcgtggcag

SEQ ID NO: 109137 - DNA, 120 bp, Artificial Sequence
  ENSG00000099991_1 (sequence is synthesized)
tgctgaatctctctgaatatgattcgaattgcagccttaaatgccagctccaccattgaggatgatcatgaaggaagctttaaaagtcacaaaacccagacaaaggaggctcaggaagca

SEQ ID NO: 109138 - DNA, 120 bp, Artificial Sequence
  ENSG00000099991_2 (sequence is synthesized)
gaggcttttgcattgtaccacaaggcccttgatctgcagaaacatgaccggtttgaggagtctgccaaagcctaccatgagctcttggaggcgagcctgctgcgggaggcagtttcatcc

SEQ ID NO: 109139 - DNA, 120 bp, Artificial Sequence
  ENSG00000099991_3 (sequence is synthesized)
ggtgatgagaaagaggggttgaaacaccctgggctgatactgaaatattccacttataagaacttggcccagctggcagcccagcgggaggatctggagacagccatggagttctactta

SEQ ID NO: 109140 - DNA, 120 bp, Artificial Sequence
  ENSG00000099991_4 (sequence is synthesized)
gaggcagtgatgctggactccacagatgtcaacctctggtataagattggacatgtggccctgaggctcatccggatccccctggctcgccatgcttttgaggaagggctgcggtgcaat

SEQ ID NO: 109141 - DNA, 120 bp, Artificial Sequence
  ENSG00000099991_5 (sequence is synthesized)
cctgaccactggccctgtttggataacctaatcactgtcctgtacaccctcagtgattacacaacatgtctgtacttcatctgcaaagctttggagaaggattgccggtacagcaaaggg

SEQ ID NO: 109142 - DNA, 120 bp, Artificial Sequence
  ENSG00000099991_6 (sequence is synthesized)
ctggtcctcaaggagaagatttttgaggagcagccttgtctccggaaggactctctcagaatgttcctcaaatgtgacatgtcgattcacgatgtttcggtgagtgcagctgagacacag

SEQ ID NO: 109143 - DNA, 120 bp, Artificial Sequence
  ENSG00000099991_7 (sequence is synthesized)
gcgattgtagatgaggccttggggctgcgaaaaaagaggcaagcgctgattgtgcgggagaaggagccggacctgaaacttgtgcagcccattcctttcttcacctggaagtgcctcgga

SEQ ID NO: 109144 - DNA, 120 bp, Artificial Sequence
  ENSG00000099991_8 (sequence is synthesized)
gagagcttgctggccatgtacaatcatctcaccacctgtgagcccccacgtcccagccttggcaaaaggattgatttgtcggactaccaggaccccagccagcctcttgagtcctccatg

SEQ ID NO: 109145 - DNA, 120 bp, Artificial Sequence
  ENSG00000099991_9 (sequence is synthesized)
gtggtgacgccagttaacgtgatccagccaagcactgtcagcaccaacccagctgtggctgtcgccgagcctgtggtctcctacacctctgtggctacaaccagcttcccactgcacagt

SEQ ID NO: 109146 - DNA, 120 bp, Artificial Sequence
  ENSG00000099991_10 (sequence is synthesized)
cctggtctgttggagacaggcgctcctgtgggtgatatttctgggggagataaatccaagaaaggggtaaaacggaagaagatttcagaagagagtggagaaacagcaaagcggcggtct

SEQ ID NO: 109147 - DNA, 120 bp, Artificial Sequence
  ENSG00000099991_11 (sequence is synthesized)
gcccgtgtccgaaacaccaagtgcaaaaaagaagagaaagtagacttccaggagcttctgatgaagttcttgccgtccaggttaagaaagctggaccctgaggaggaagatgattccttt

SEQ ID NO: 109148 - DNA, 120 bp, Artificial Sequence
  ENSG00000099991_12 (sequence is synthesized)
aataactatgaagtccagtcagaagccaaactggaaagcttcccaagcattgggcctcaaaggctgtcatttgactcagccacattcatggaatctgaaaagcaggacgtgcatgagttc

SEQ ID NO: 109149 - DNA, 120 bp, Artificial Sequence
  ENSG00000099991_13 (sequence is synthesized)
ctgctggagaacctaaccaacgggggcatcctggagctgatgatgcgctacctgaaagccatgggccacaagttcttggtaaggtggcctccaggcttggcggaggtcgtgctcagcgtc

SEQ ID NO: 109150 - DNA, 120 bp, Artificial Sequence
  ENSG00000099991_14 (sequence is synthesized)
taccacagctggaggaggcacagcaccagcctgcccaacccgctgctgagggactgcagcaacaagcacatcaaggacatgatgctgatgtctctctcctgcatggaactccagctggac

SEQ ID NO: 109151 - DNA, 120 bp, Artificial Sequence
  ENSG00000099991_15 (sequence is synthesized)
cagtggctgctgaccaaaggcagaagctctgcagtgtctcctcggaactgccctgctggtatggtgaatggcagatttggacctgacttcccagggacccactgcctgggtgacctccta

SEQ ID NO: 109152 - DNA, 120 bp, Artificial Sequence
  ENSG00000099991_16 (sequence is synthesized)
cagctgtcatttgcctcgtcccagcgcgacctgttcgaggatggttggctggagtttgtggtccgtgtttactggctgaaggctcgcttcctggcgctgcagggagacatggagcaggcc

SEQ ID NO: 109153 - DNA, 120 bp, Artificial Sequence
  ENSG00000099991_17 (sequence is synthesized)
ctggagaactatgacatctgcacagaaatgctccagagttccaccgccatccaggtggaggcaggggctgaacgaagagacattgtcatccggctgcccaacctccataatgactctgtg

SEQ ID NO: 109154 - DNA, 120 bp, Artificial Sequence
  ENSG00000099991_18 (sequence is synthesized)
gtttccctggaggagattgataagaacctgaagtcgctggagcggtgccagtccctggaggagattcagcggctgtatgaagcaggcgactacaaggctgttgtgcatctgctccgcccc

SEQ ID NO: 109155 - DNA, 120 bp, Artificial Sequence
  ENSG00000099991_19 (sequence is synthesized)
actttgtgcaccagtgggtttgaccgggccaaacacctggagtttatgacttccattcctgagaggccagcccagctgcttcttctgcaggactccttgctccggctgaaggactatcgg

SEQ ID NO: 109156 - DNA, 120 bp, Artificial Sequence
  ENSG00000099991_20 (sequence is synthesized)
cagtgttttgagtgttccgatgtggctctgaacgaggctgtccagcagatggtgaactcaggtgaggctgccgccaaggaggagtgggtggccacagtgacccaactgctgatgggcatc

SEQ ID NO: 109157 - DNA, 120 bp, Artificial Sequence
  ENSG00000099991_21 (sequence is synthesized)
gagcaggccctctctgcggacagcagtggtagcatcctgaaggtatcatcctccaccactggccttgtgcggctcaccaacaacctcatccaggtcattgactgcagcatggctgtgcag

SEQ ID NO: 109158 - DNA, 120 bp, Artificial Sequence
  ENSG00000099991_22 (sequence is synthesized)
gaggaggccaaggagccccacgtctcttcagtgctaccctggatcattctacaccggatcatctggcaggaggaagacaccttccattctctgtgccaccagcagcagctccaaaaccca

SEQ ID NO: 109159 - DNA, 120 bp, Artificial Sequence
  ENSG00000099991_23 (sequence is synthesized)
gcggaggaagggatgtcagagacgcccatgctcccatcctccctcatgctgctgaacacagcccacgagtatttgggcagaaggtcctggtgctgcaattcagatggggctctgctgcga

SEQ ID NO: 109160 - DNA, 120 bp, Artificial Sequence
  ENSG00000099991_24 (sequence is synthesized)
ttctatgtgcgagtactccagaaggaactggctgcatccacctctgaagacacgcacccttacaaggaggagctggagacagccttggagcagtgcttctactgcctgtacagcttcccc

SEQ ID NO: 109161 - DNA, 120 bp, Artificial Sequence
  ENSG00000099991_25 (sequence is synthesized)
agcaagaagagtaaggccaggtacctggaggaacactcggcccagcaggtggatcttatatgggaggatgcactgttcatgtttgagtattttaagcccaagacccttcctgaatttgac

SEQ ID NO: 109162 - DNA, 120 bp, Artificial Sequence
  ENSG00000099991_26 (sequence is synthesized)
agctataagaccagcaccgtgtctgctgacttggccaacctactgaagagaattgccaccattgtgcctcgcacagagaggccagcccttagcctggacaaagtctctgcctacattgag

SEQ ID NO: 109163 - DNA, 120 bp, Artificial Sequence
  ENSG00000099991_27 (sequence is synthesized)
ggaacttcaactgaggtaccctgcctcccagagggggctgacccctcccctccagtggtgaacgagctttactacctcctggctgattatcatttcaaaaacaaggagcagtccaaggcc

SEQ ID NO: 109164 - DNA, 120 bp, Artificial Sequence
  ENSG00000099991_28 (sequence is synthesized)
atcaagttctacatgcatgacatctgcatctgccccaataggtttgattcctgggcaggcatggctctggcccgggccagccgcattcaggacaagctgaactccaatgagctgaagagt

SEQ ID NO: 109165 - DNA, 120 bp, Artificial Sequence
  ENSG00000099991_29 (sequence is synthesized)
gatgggcccatttggaagcatgccacgcccgtcttgaactgcttccgtcgggccctggagattgacagctccaacttgtccctatggattgagtatggcaccatgtcctatgccttgcac

SEQ ID NO: 109166 - DNA, 120 bp, Artificial Sequence
  ENSG00000099991_30 (sequence is synthesized)
ggcgagctgccccctgagctcgtgcagcagatggagggccggcgcgacagcatgctagagacagccaagcactgtttcacatcagcagcccgctgcgagggtgatggtgacgaggaggag

SEQ ID NO: 109167 - DNA, 120 bp, Artificial Sequence
  ENSG00000099991_31 (sequence is synthesized)
tggctcatccactacatgctgggcaaggtggctgagaagcagcagcagccacccaccgtttacttgctgcactacaggcaggctggccactacctgcacgaggaggctgcccgctacccc

SEQ ID NO: 109168 - DNA, 120 bp, Artificial Sequence
  ENSG00000099991_32 (sequence is synthesized)
aagaagatccactaccacaacccacctgagctggccatggaggccctggaggtgtactttcggctccatgcttccatcctgaagctcctggggaagcccgattctggggttggtgcagag

SEQ ID NO: 109169 - DNA, 120 bp, Artificial Sequence
  ENSG00000099991_33 (sequence is synthesized)
gtcctggtcaactttatgaaggaggctgcagaaggaccctttgccaggggcgaggagaagaacacacccaaagcttcagaaaaggagaaggcctgcctggtggacgaggactcccactct

SEQ ID NO: 109170 - DNA, 120 bp, Artificial Sequence
  ENSG00000099991_34 (sequence is synthesized)
tcagctgggacactgccgggccccggagcctccctcccctcctcctctggcccaggtctgacatccccaccttacacagccactccgattgaccacgattacgtcaaatgtaaaaaaccc

SEQ ID NO: 109171 - DNA, 120 bp, Artificial Sequence
  ENSG00000099991_35 (sequence is synthesized)
caccagcaggcaacgccggacgaccgaagccaggacagcacagccgtagcactctcagactctagctcaacgcaggacttctttaatgagcccaccagcttactggaaggctccaggaaa

SEQ ID NO: 109172 - DNA, 120 bp, Artificial Sequence
  ENSG00000099991_36 (sequence is synthesized)
tcctacacagagaagaggctgcccattctcagttcccaagcaggagcgacgggtaaagatcttcagggggccacagaagaaagaggaaaaaacgaggagtcattggagagtacagaaggc

SEQ ID NO: 109173 - DNA, 120 bp, Artificial Sequence
  ENSG00000099991_37 (sequence is synthesized)
ttccgggctgcagagcaaggtgtccagaagcctgctgcagaaaccccagcctctgcttgcatccctggcaagccctcagcatccacacccaccctgtgggatgggaagaagagaggggac

SEQ ID NO: 109174 - DNA, 120 bp, Artificial Sequence
  ENSG00000099991_38 (sequence is synthesized)
ctcccaggggagccagtggccttcccccaggggctgccggctggtgctgaggagcagcggcagtttctcacagagcagtgcatcgcctccttccgcctgtgcctgagccgcttcccccag

SEQ ID NO: 109175 - DNA, 120 bp, Artificial Sequence
  ENSG00000099991_39 (sequence is synthesized)
cactataagagtctctaccgtctggccttcctctacacctacagcaagacccaccggaacctccagtgggcccgcgacgtgttgctaggcagcagtatcccgtggcaacaactgcagcac

SEQ ID NO: 109176 - DNA, 120 bp, Artificial Sequence
  ENSG00000099991_40 (sequence is synthesized)
atgccggcacaggggctcttctgcgagaggaacaagaccaatttcttcaacggcatctggcggatccccgtggacgagattgaccggccgggcagctttgcctggcacatgaaccgctcc

SEQ ID NO: 109177 - DNA, 120 bp, Artificial Sequence
  ENSG00000099991_41 (sequence is synthesized)
atcgtgctgctgctcaaggtgctggcccagctgcgggaccacagcaccctgctgaaggtgtcctccatgcttcagcggaccccagaccagggcaagaagtatctgcgagatgctgaccgc

SEQ ID NO: 109178 - DNA, 120 bp, Artificial Sequence
  ENSG00000099991_42 (sequence is synthesized)
caggtcctggcgcagcgggccttcatcctcactgtgaaggtgctcgaagacacgctgagcgagctcgcagaggggtcagaacgcccagggcccaaggtctgtggcctccccggagccagg

SEQ ID NO: 109179 - DNA, 120 bp, Artificial Sequence
  ENSG00000099991_43 (sequence is synthesized)
atgaccaccgatgtctcacacaaggccagtcctgaggatggccaggagggcctcccccagccgaagaagccccctctggctgatggctcagggccagggcccgagccaggaggcaaagtg

SEQ ID NO: 109180 - DNA, 120 bp, Artificial Sequence
  ENSG00000099991_44 (sequence is synthesized)
ggcctcctcaaccaccggcctgtggccatggatgcaggagacagtgcagaccaaagcggggagcggaaggataaagagagcccacgggcagggcccactgagcccatggacacgagtgag

SEQ ID NO: 109181 - DNA, 120 bp, Artificial Sequence
  ENSG00000099991_45 (sequence is synthesized)
gccactgtttgccactcagacttggagcggacaccacccctgctgccaggtcgccccgcaagggaccggggccccgagagccggcccactgagctgtccctggaggagctgagcatcagt

SEQ ID NO: 109182 - DNA, 120 bp, Artificial Sequence
  ENSG00000099991_46 (sequence is synthesized)
cagcccagccagcccccgcccccgcccccgccaccaccacagggaccagggcagggggccacccggaggagccgctctcccggctcagccgcaagaggaagctcctggaggacacagagt

SEQ ID NO: 109183 - DNA, 120 bp, Artificial Sequence
  ENSG00000099991_47 (sequence is synthesized)
aagaggaagctcctggaggacacagagtcaggcaagacacttctgttggatgcctaccgtgtgtggcagcagggccagaagggtgtggcctatgacctgggccgtgtggagaggatcatg

SEQ ID NO: 109184 - DNA, 120 bp, Artificial Sequence
  ENSG00000099991_48 (sequence is synthesized)
tcggagacctacatgctcatcaagcaggtggatgaggaggctgcgctggagcaggctgtgaagttctgccaggtccatcttggggctgccgcccagagacaggcctcgggggacaccccc

SEQ ID NO: 109185 - DNA, 120 bp, Artificial Sequence
  ENSG00000099991_49 (sequence is synthesized)
accactccaaagcaccccaaagacagccgagagaacttctttcctgtgacagtggtgcccacagcccctgaccctgtgccagctgactctgtccagcggcccagtgatgctcacaccaag

SEQ ID NO: 109186 - DNA, 120 bp, Artificial Sequence
  ENSG00000099991_50 (sequence is synthesized)
cctcgccctgcactagctgccgccacaactattatcacctgccctccgtcagcatcagcttccaccctggaccagtccaaggaccctgggcctccccggccacacaggcctgaagctacc

SEQ ID NO: 109187 - DNA, 120 bp, Artificial Sequence
  ENSG00000099991_51 (sequence is synthesized)
cccagcatggcctctctgggcccagagggagaagagctggcgagagtggcagagggcaccagcttcccgcctcaggagccacggcacagtccgcaggtgaagatggcccccacaagttcc

SEQ ID NO: 109188 - DNA, 120 bp, Artificial Sequence
  ENSG00000099991_52 (sequence is synthesized)
ccggcagagccacactgctggccggcagaggctgccctgggcacaggcgctgagcccacctgcagccaggaggggaaactgaggcctgagccgagaagggatggggaggctcaggaggct

SEQ ID NO: 109189 - DNA, 120 bp, Artificial Sequence
  ENSG00000099991_53 (sequence is synthesized)
gcgagtgagactcagcccctgagctctcccccaacagctgccagctccaaggcccccagcagtgggagtgcccagccaccagagggtcacccaggcaagcctgagcccagccgggctaag

SEQ ID NO: 109190 - DNA, 120 bp, Artificial Sequence
  ENSG00000099991_54 (sequence is synthesized)
tcccgccccctgcccaacatgccaaagctggtcatcccctccgccgccaccaagttcccccctgagatcaccgtcacgccacccaccccaaccctgctctcccccaaaggcagcatctcg

SEQ ID NO: 109191 - DNA, 120 bp, Artificial Sequence
  ENSG00000099991_55 (sequence is synthesized)
gaggagaccaagcagaagctgaagtcagccatcctttctgcccagtctgctgccaacgtgaggaaggagagcctatgccagccagccctggaggtcctggagacatccagccaggagtcc

SEQ ID NO: 109192 - DNA, 120 bp, Artificial Sequence
  ENSG00000099991_56 (sequence is synthesized)
tcgctggagagcgagacagacgaggacgacgactacatggacatttgaggggccactgcagccccaccgccacgccccaggggaccagccaggcctggaatgccccctgggcaggaccct

SEQ ID NO: 109193 - DNA, 120 bp, Artificial Sequence
  ENSG00000099991_57 (sequence is synthesized)
gggcaggaccagaggcccacatggatgccactccccacacagcccccaggcctgcccagcccacctcctcatggcatcctccctgtacccaggtcaggctgtccacaccacatgggagcc

SEQ ID NO: 109194 - DNA, 120 bp, Artificial Sequence
  ENSG00000099991_58 (sequence is synthesized)
cagaggaggaggggcccgccttagccatgtgaaggtggattggtcgccatctgcacgccaggcggcatccttttctatgaagtgttgactttgtaaatctgcccacacccagctggccat

SEQ ID NO: 109195 - DNA, 120 bp, Artificial Sequence
  ENSG00000099991_59 (sequence is synthesized)
atccacccctcgacgccgggatgagccggctctgcctgtgtcacagtggaggggtcctttagggccaggctcacccctcaccctttttttggttgcttttctaataaagatggaacagtt

SEQ ID NO: 109196 - DNA, 120 bp, Artificial Sequence
  ENSG00000099991_60 (sequence is synthesized)
ctcagcagagcccggggcacaggccggaggggctgcaggcgcgaggctgggttacgtgaggaagctgggggtttcgcgggcagctttagagccccagtcagggaaaccgaggccgggctt

SEQ ID NO: 109197 - DNA, 120 bp, Artificial Sequence
  ENSG00000099991_61 (sequence is synthesized)
cctggctgcctcgcgagcctcttcatggctctcgccgccgccctgaggtgcctagaatgggttccggcctccggggaggttcccagtaaccgcaggagccaccattgatttggcgtctgc

SEQ ID NO: 109198 - DNA, 120 bp, Artificial Sequence
  ENSG00000099991_62 (sequence is synthesized)
tgggtgcaaagcccagcgcgctaaccctttactcgcgacctttcgcttcaccttcacagcagccctgcgaggagagttgtggactggggcaacctttgccagtgatgagaagtgatgctc

SEQ ID NO: 109199 - DNA, 120 bp, Artificial Sequence
  ENSG00000099991_63 (sequence is synthesized)
actttgcccggcagcggtccacagcccgccaccagcggccagtccagggaaccggagaggattggccggcaaaagtcagttgcgctcctgggcccgcttccagtagagtgccggcgcccc

SEQ ID NO: 109200 - DNA, 120 bp, Artificial Sequence
  ENSG00000099991_64 (sequence is synthesized)
ctgccccgccccggcccgccgcgagcgagagagcgaacgagcctccgcggccatggcccggcgctcgccctagctccactgcacagatgccacggcggagccggcggggcatctggcgga

SEQ ID NO: 109201 - DNA, 120 bp, Artificial Sequence
  ENSG00000099991_65 (sequence is synthesized)
ggaaggcgccgacgaggagctgtgccgtgccgctcttggggatggggcacttgatttcctgaagagcctttgcctgtgccctagaagtggaggaagctctagaaggagtcatgactgaaa

SEQ ID NO: 109202 - DNA, 120 bp, Artificial Sequence
  ENSG00000099991_66 (sequence is synthesized)
aagcccagctccacctggtgtaggcagaaagccagttggcttgctaccaccctgctggctcgtgactctgcctggtggcttcactcttcagaccagctttctctggaggccagcctcatg

SEQ ID NO: 109203 - DNA, 120 bp, Artificial Sequence
  ENSG00000099991_67 (sequence is synthesized)
gccataggaagtcccctcaccgttcgggagggcatctggcggatccccgtggacgagattgaccggccgggcagctttgcctggcacatgaaccgctccatcgtgctgctgctcaaggtg

SEQ ID NO: 109204 - DNA, 120 bp, Artificial Sequence
  ENSG00000099991_68 (sequence is synthesized)
ccagcatacaccatcagtaacatttctcattccattgccaccctcttctctggtctcctcctctgtgttcccataacatctgtgcagatgtctgaagcacaaatctcactggagtaggat

SEQ ID NO: 109205 - DNA, 120 bp, Artificial Sequence
  ENSG00000099991_69 (sequence is synthesized)
ccctgccctgccccagcaggtatgtctctgtgacatcctgcttcttcagtagttcatagctttcattgctaattaggcacccaaaggggacatgatggcttctttggttggaactttcgg

SEQ ID NO: 109206 - DNA, 120 bp, Artificial Sequence
  ENSG00000099991_70 (sequence is synthesized)
ttctttatctccctgggcatgtggctcaaggttccagtgaccgtccttcaacctgccgcaaacttatctgtgttgagcagcttcatgtgcaattgaattaaaacatcatttcctctcttt

SEQ ID NO: 109207 - DNA, 120 bp, Artificial Sequence
  ENSG00000099991_71 (sequence is synthesized)
tcacccctggaggctcacctgtcttcccagttgaatttcctacccatctgaaaaacgagacagccactctgcagaagtgcccagcagaaggcaggcctaagagcccccacagactgtgcg

SEQ ID NO: 109208 - DNA, 120 bp, Artificial Sequence
  ENSG00000099991_72 (sequence is synthesized)
cctgagtggaggttgagttgagaagtcttcctcagctctttcccacggtggctcaagcagcaagcaggtgctgatgttttcacctgatgccatccacactgctttgaggattgtgaacat

SEQ ID NO: 109209 - DNA, 120 bp, Artificial Sequence
  ENSG00000099991_73 (sequence is synthesized)
atccccaccttacacagccactccgattgaccacgattacgtcaaatgtaaaaaaccccaccagcaggcaacgccggacggtacagtccctgttctccctactgccagcccagggcggca

SEQ ID NO: 109210 - DNA, 120 bp, Artificial Sequence
  ENSG00000099991_74 (sequence is synthesized)
ccatcccctctcactgccttgtgatgggatcttaagagaggctgggcctcgaagactcaggtgtggccccactgggtcaggtgtatagccctctcgggaggcggaggagccctctggggg

SEQ ID NO: 109211 - DNA, 120 bp, Artificial Sequence
  ENSG00000099991_75 (sequence is synthesized)
tggggagccagcccctaccagtgtcctcttgggtggtgagtggtttcttggcagcaccaacctggactgcctcagccaggaccccagcattggccacactcccctgcccagtgtcccagg

SEQ ID NO: 109212 - DNA, 80 bp, Artificial Sequence
  ENSG00000099992_0 (sequence is synthesized)
cggcgcccattgggcgtggggggagagctccggggtgggcctggagccccgccccccggccttgcggcggccaataggcg

SEQ ID NO: 109213 - DNA, 120 bp, Artificial Sequence
  ENSG00000099992_1 (sequence is synthesized)
gcggctgaggtggccgctggagctcaggcggcgggcgcggctgggatggcgaagagcaacggagagaatgggccgcgcgcgcccgcggccggggaaagcctgtcgggaacccgggagagc

SEQ ID NO: 109214 - DNA, 120 bp, Artificial Sequence
  ENSG00000099992_2 (sequence is synthesized)
ctggcccagggccccgacgccgcaaccaccgacgaactcagctctctcgggtctgactcggaggccaacggcttcgccgagcgccgcatcgacaagttcggcttcatcgtgggctcgcag

SEQ ID NO: 109215 - DNA, 120 bp, Artificial Sequence
  ENSG00000099992_3 (sequence is synthesized)
ggcgccgagggcgcgctggaggaagtacccctggaggtgctgaggcagagggagtccaagtggctggacatgctcaacaactgggacaaatggatggccaagaagcacaaaaagattcgt

SEQ ID NO: 109216 - DNA, 120 bp, Artificial Sequence
  ENSG00000099992_4 (sequence is synthesized)
ctgcggtgccaaaagggcatcccgccttctctgcggggccgtgcttggcagtacctgtcaggaggcaaggtgaagttacagcagaaccctggaaagtttgacgagctggacatgtcccct

SEQ ID NO: 109217 - DNA, 120 bp, Artificial Sequence
  ENSG00000099992_5 (sequence is synthesized)
ggggaccccaagtggctggacgtgattgagcgtgacctgcaccggcagttcccattccatgagatgtttgtgtcccgggggggccacggccagcaggacctattccgtgtgctgaaggcc

SEQ ID NO: 109218 - DNA, 120 bp, Artificial Sequence
  ENSG00000099992_6 (sequence is synthesized)
tacacgctgtaccggcccgaggagggctactgccaggcccaggcgcccattgccgctgtcttgctcatgcatatgcctgctgagcaagccttctggtgcctggtacagatctgtgagaag

SEQ ID NO: 109219 - DNA, 120 bp, Artificial Sequence
  ENSG00000099992_7 (sequence is synthesized)
tacctgcccggctactacagcgagaaactggaggcgatccagctggacggggagatccttttctcgctgttgcagaaggtgtcgccggtggcccacaagcacctcagccgtcagaagatc

SEQ ID NO: 109220 - DNA, 120 bp, Artificial Sequence
  ENSG00000099992_8 (sequence is synthesized)
ccttctcccgaaccttgccctggagctctgtgctgcgtgtctgggacatgttcttctgtgaaggggtcaagatcatcttccgggtggggctggtgctgctgaagcacgcgctgggctccc

SEQ ID NO: 109221 - DNA, 120 bp, Artificial Sequence
  ENSG00000099992_9 (sequence is synthesized)
ctgagaaggtcaaagcctgccagggccagtacgagaccatcgagcgactgcggagcctcagccccaagatcatgcaggaggcctttctggtccaggaggtggtggagttgcccgtgacag

SEQ ID NO: 109222 - DNA, 120 bp, Artificial Sequence
  ENSG00000099992_10 (sequence is synthesized)
agcgccagattgagcgcgaacacctcattcagctgcggcgctggcaggagacccggggtgagctgcagtgccgctccccgcccaggctgcatggtgccaaggctatcttggatgcagaac

SEQ ID NO: 109223 - DNA, 120 bp, Artificial Sequence
  ENSG00000099992_11 (sequence is synthesized)
ctggtccccggcctgccctacaaccttcaccatccatccgcctgcccctagatgcccccctccctggctccaaagccaagcccaagccacccaagcaggcccagaaggagcagcggaaac

SEQ ID NO: 109224 - DNA, 120 bp, Artificial Sequence
  ENSG00000099992_12 (sequence is synthesized)
agatgaaggggagagggcagctggagaagcccccagccccaaatcaagccatggtggtggccgctgcaggagatgcatgtcccccacagcatgtgcccccgaaggactcagcccccaagg

SEQ ID NO: 109225 - DNA, 120 bp, Artificial Sequence
  ENSG00000099992_13 (sequence is synthesized)
actcagcccctcaggatttggctccccaggtctcagcccaccaccgctcccaggagagcttgacgtcccaagagagtgaggacacctacttgtaaccctggcagctaaggcctccagggc

SEQ ID NO: 109226 - DNA, 120 bp, Artificial Sequence
  ENSG00000099992_14 (sequence is synthesized)
ggggtctccatataactacacggttcatgaactgacattccacatcctgcccaccctctgagggccaagctgcctggccactgggctgggctggagtctggctggtccaacacagattct

SEQ ID NO: 109227 - DNA, 120 bp, Artificial Sequence
  ENSG00000099992_15 (sequence is synthesized)
gcctggtccaacacagattctgcctgagcctccttatttattttctttacagtggcactcaggctggcccagccagggcaggcagaagctagggcctggggggtggggcctccttcagcc

SEQ ID NO: 109228 - DNA, 120 bp, Artificial Sequence
  ENSG00000099992_16 (sequence is synthesized)
ccctcctcctgggggatgctccccagggttagggtgctggtgtgaggggaaagggtggggtgttctttgtgtaaaatagaaacatggttttgtacagaaataaacagccttgtatagaga

SEQ ID NO: 109229 - DNA, 120 bp, Artificial Sequence
  ENSG00000099992_17 (sequence is synthesized)
ccattgcactccagcctgggcaacaagcgcaaaactccgtctcaaaaaaataaaataaaaaggggagaatgatgttatagtagggttattacaaaaggtacatgtgataaaggctggagg

SEQ ID NO: 109230 - DNA, 120 bp, Artificial Sequence
  ENSG00000099992_18 (sequence is synthesized)
cctgccccttatcatggggagggaggaagacaggtgggggtcctttgaagggggtcccgctaaccctcagcccctgagggtggatcctatgccaggaccattgctaggcaacacagaaca

SEQ ID NO: 109231 - DNA, 120 bp, Artificial Sequence
  ENSG00000099992_19 (sequence is synthesized)
tgtgggtggacctcatccttctgtctggtgaagagcatggggcacagagaggcttggctctgcagggccttctggatccgagccgcttgggaatgaagaagaatgttgacccacggcccc

SEQ ID NO: 109232 - DNA, 120 bp, Artificial Sequence
  ENSG00000099992_20 (sequence is synthesized)
ggcacattctggttcatctcatgagctaccttccctgtggctgcagctgagccgcacacagtgcaatgccctccctggtgacagactatggggttcacccaacttgtaatggttcctttt

SEQ ID NO: 109233 - DNA, 120 bp, Artificial Sequence
  ENSG00000099992_21 (sequence is synthesized)
gtgtggccaagtgccttaggctgctgaagtgccagatgaacacatcctaggaactgacttccggggttttcgggttcctacctcatgggaactgctaggagaatttgtggggccctcttc

SEQ ID NO: 109234 - DNA, 120 bp, Artificial Sequence
  ENSG00000099992_22 (sequence is synthesized)
cccattctgacaaaagcaaacctgcactgcgctcagacagtacttagaggtgcacagtacacagacccccatcacaagggtgtgtggggccccagaggcacgcatccaccgctccgctat

SEQ ID NO: 109235 - DNA, 120 bp, Artificial Sequence
  ENSG00000099992_23 (sequence is synthesized)
gtgcctgctctagggctctgtgtggaggccccagcccctccctgtcccctccagccctgaacactctgtcagccgctcctctcagtccttaccctctagtcaagttcctggcaccctagg

SEQ ID NO: 109236 - DNA, 120 bp, Artificial Sequence
  ENSG00000099992_24 (sequence is synthesized)
ttcttgagcttaatgctaggacactcccactgagggccagagagggaaaggggcttgtatgaagtcacctgctcgtcagggcagggcctgtgtctgcgcccactgggtatgtttgctgag

SEQ ID NO: 109237 - DNA, 120 bp, Artificial Sequence
  ENSG00000099992_25 (sequence is synthesized)
gacctggcctccctcctgagggccttccctgatgctgcccctgccctgcaggcaacttgtacttaaaccaacactcccatgaaggtgcctgggccacacctttcagcacattctggttcc

SEQ ID NO: 109238 - DNA, 120 bp, Artificial Sequence
  ENSG00000099992_26 (sequence is synthesized)
tctggtgaatactctgcttccctgctcagccctctgggcttcctccttatttattttttctttcttttttaaaaattgaggtatgaatttacatacagtaaaatgcatagatcttgaatg

SEQ ID NO: 109239 - DNA, 120 bp, Artificial Sequence
  ENSG00000099992_27 (sequence is synthesized)
tgcatgcagttcagtgagttttgataaataatacacatccatgtaaccaacatgcagatcaaggtagagaacatttcaaatgaccaagaaaagattttcctttttgtaatggctttgttg

SEQ ID NO: 109240 - DNA, 120 bp, Artificial Sequence
  ENSG00000099992_28 (sequence is synthesized)
ttttgtaaaggtgcacatactgaagcgttcacagaagttcaaagaaaagagtaaaactttgttgaaacctcggcacccagagaagtatctgaggttaatggtttgacagatgtcatgtcc

SEQ ID NO: 109241 - DNA, 120 bp, Artificial Sequence
  ENSG00000099992_29 (sequence is synthesized)
ttccagaaagagctctgtgcagatctcacacacacctggcttcctggatagttgacgccacctgcacagggaggcatgtagctgaggagctgggatggacggctttgagtcagacctggc

SEQ ID NO: 109242 - DNA, 120 bp, Artificial Sequence
  ENSG00000099992_30 (sequence is synthesized)
ttccagtcccagctccaccatttttctagccagagttaaataccttgacatgaggccttgacattcagttttctcatctgcgaacagggtgtaatgataggtcctatctctggaggttgg

SEQ ID NO: 109243 - DNA, 120 bp, Artificial Sequence
  ENSG00000099992_31 (sequence is synthesized)
ggagcaggatcagtaaggcccacaggtaccctgtgcccagcttagcgcctggctcagagaagtgggaacagctggtagctattgctcagagaagcagccttctgtcttaaggatgtgaca

SEQ ID NO: 109244 - DNA, 120 bp, Artificial Sequence
  ENSG00000099992_32 (sequence is synthesized)
taatgtatctgactcccgaatgaaatgtctagaggtccttccagccgcagctggagtggacactcttgccctcatcggtcttcctagagccaggtttaaggtttccagggcccttccctc

SEQ ID NO: 109245 - DNA, 120 bp, Artificial Sequence
  ENSG00000099992_33 (sequence is synthesized)
cttgcccctttgcccctgcccaggcattccttacctgagcttctcttcctgtccttgggaaggcccagtctgtgatgggcttgggtgggcactgcccctggtggagggccccctccccta

SEQ ID NO: 109246 - DNA, 120 bp, Artificial Sequence
  ENSG00000099992_34 (sequence is synthesized)
cttttctccctgtttctgctcttgctgctgtgtgcactgagggcccaccacgcattggcagaggggctgggctaggggagctgcctgggtggctgcatgggctcagctgtccttttgatt

SEQ ID NO: 109247 - DNA, 120 bp, Artificial Sequence
  ENSG00000099992_35 (sequence is synthesized)
ttcagattcgtctgcggtgccaaaagggcatcccgccttctctgcggggccgtgcttggcagtacctgtcaggaggcaaggtgaagttacagcagaaccctggaaagtttgacgtaagtt

SEQ ID NO: 109248 - DNA, 120 bp, Artificial Sequence
  ENSG00000099992_36 (sequence is synthesized)
tcccttcctttgccctgccctcccttccgcatctcttggcgtcctccccatggcggcaatcctccatgtgctcacctgaacctcacaggatgagcagtccatgaaacctccagtcatgtg

SEQ ID NO: 109249 - DNA, 120 bp, Artificial Sequence
  ENSG00000099992_37 (sequence is synthesized)
cccaactgcccaggccccagcaggccagaccggcccagtcctgggtacctgtgtctcctggagggtctgtacaactgaggctccagccctgagcagccctcagtggaatggccagatttg

SEQ ID NO: 109250 - DNA, 120 bp, Artificial Sequence
  ENSG00000099992_38 (sequence is synthesized)
gtaccccctattccagctctttctcttgatgaccactcaggttttgctttcctgggctcagtaggctacctccctgctcttggtcatcaggaggggacactcagaccatttccctgactg

SEQ ID NO: 109251 - DNA, 120 bp, Artificial Sequence
  ENSG00000099992_39 (sequence is synthesized)
ccttgggccctgtgccctgggcctatgggggcttgactagcaggaccacaggtccttcagtgtctcccggcctcccatcctctactttctcctgccttgtccaagcctggccagcacagc

SEQ ID NO: 109252 - DNA, 120 bp, Artificial Sequence
  ENSG00000099992_40 (sequence is synthesized)
ccacctgtgtgtcttgtggggtcatcagccctaggagtagcagagccaaacccaagggggctgaagggaactgcccaagtagctcaaggggtcagacgccagtcagtggccagagagggt

SEQ ID NO: 109253 - DNA, 120 bp, Artificial Sequence
  ENSG00000099992_41 (sequence is synthesized)
gccctctgttgttatccctcctcctgtcccgatatccctcctgctgctccctgccccatggctggccagagtaaaatacctctccattcagagctgggcagctcctccagcctgctcccc

SEQ ID NO: 109254 - DNA, 120 bp, Artificial Sequence
  ENSG00000099992_42 (sequence is synthesized)
cagggaactatggggaagcagttggattccctggggttgccccggcttacctgccagatctggccgcaggcatcggggtttctcgcaggcccttgggactggtgacaggcagacagtgag

SEQ ID NO: 109255 - DNA, 120 bp, Artificial Sequence
  ENSG00000099992_43 (sequence is synthesized)
acagagcagagctgcctaccaccagctctttgttgacatatctcatgcttcttcattgaacactccagtcttgccaaacctgttccttgagatgactgggcaggagcagggcaaggtagc

SEQ ID NO: 109256 - DNA, 120 bp, Artificial Sequence
  ENSG00000099992_44 (sequence is synthesized)
ctagagtttctgctgttgacctggagagggcgagagctttttgctggcaacacgtggacttgcaggggcagggaagctggtagagtgtctggctggggtaggtctgaatctggctgattg

SEQ ID NO: 109257 - DNA, 120 bp, Artificial Sequence
  ENSG00000099992_45 (sequence is synthesized)
gattattccccagagcaccaataccaggccacactggagcagcctcttgactccagagtcttcctcctagtggctacatctcttccatttcgaggggccgcatcctgggcaaagtgggag

SEQ ID NO: 109258 - DNA, 120 bp, Artificial Sequence
  ENSG00000099992_46 (sequence is synthesized)
gctcaggggtgggaacctcagtccaagtccatagttaaaatcaggctgccagagccaggcatgagagccaagagcgtgggcagcctggtcagcctcttggctgtgtggttcagcaagcat

SEQ ID NO: 109259 - DNA, 120 bp, Artificial Sequence
  ENSG00000099992_47 (sequence is synthesized)
gagtgtgtgtgcagcagaacacagagctgtgtgcatgtgtgtgtagagctgtgcttccagagaagaatcagccaccccccagggggtctggaaagttgcttgtgtgaggaggtggatttg

SEQ ID NO: 109260 - DNA, 120 bp, Artificial Sequence
  ENSG00000099992_48 (sequence is synthesized)
cagagaaggccttcttgatgcaccgaagctgagtgacgggttcctgcatggttctgggggctggaagaatggtttgtgagcacacctggaaagactttgcctgtgggtgacccagaggaa

SEQ ID NO: 109261 - DNA, 120 bp, Artificial Sequence
  ENSG00000099992_49 (sequence is synthesized)
gcatgaggagcttcccctggttgctgcgggtcctgtgccgaggcagggcacagtgggggtctggtgatggcagcatgcacctgtttctgtgctctctccccacagggccctccattcaat

SEQ ID NO: 109262 - DNA, 120 bp, Artificial Sequence
  ENSG00000099992_50 (sequence is synthesized)
acccagtccaggtggcccatcccaacctcagcattcagggcaggctctgcaggtgctggtggctccttctcctgcacgtgctatttcttcctccttccttgggcaggcaggacctcctgt

SEQ ID NO: 109263 - DNA, 120 bp, Artificial Sequence
  ENSG00000099992_51 (sequence is synthesized)
ccttttttacctggctttcttctctggcttcaccttatgatggcgccagtacccctcaggctggtggaggctacaggccccatgaccatggtacctgcttgtctgccggtgccctttcga

SEQ ID NO: 109264 - DNA, 120 bp, Artificial Sequence
  ENSG00000099992_52 (sequence is synthesized)
gggcctctctttgcagagaaaccccaaaaagcttccttgtacttactgcccatcccccatgcaggggtcaagatcatcttccgggtggggctggtgctgctgaagcacgcgctgggctcc

SEQ ID NO: 109265 - DNA, 120 bp, Artificial Sequence
  ENSG00000099992_53 (sequence is synthesized)
ggcatggaagacggcataaagaggagctggattgcaggcagtgagacctgttgggagaatcaaggatggcctaaaagggctgtggtgagacctggaagaggtctggagcagtgaggataa

SEQ ID NO: 109266 - DNA, 120 bp, Artificial Sequence
  ENSG00000099992_54 (sequence is synthesized)
gaaatggaggctcacagaggcagaatcactaagcaactccccttaaagtcacccacccaggtggagctggaatttgagcctaagcagccaggctgccctgggcagcggtgggtgacaggt

SEQ ID NO: 109267 - DNA, 120 bp, Artificial Sequence
  ENSG00000099994_0 (sequence is synthesized)
actgcactgctggctgcagacacaggctgcaccatgaagccagccctcctgccctgggccctgctgctgctggcgacagccctcggcccgggccccggacccacagcagatgcccaagag

SEQ ID NO: 109268 - DNA, 120 bp, Artificial Sequence
  ENSG00000099994_1 (sequence is synthesized)
agctgctccatgcgctgtggcgccctggacgggccatgttcctgccacccgacgtgctctggccttggcacctgctgcttggatttccgggacttctgcctggagatattgccctactca

SEQ ID NO: 109269 - DNA, 120 bp, Artificial Sequence
  ENSG00000099994_2 (sequence is synthesized)
ggatccatgatgggcggcaaggactttgtggtgcggcacttcaagatgtccagccccacagacgccagtgtgatctgcaggtttaaggacagcatccagaccctcggccatgtggactcc

SEQ ID NO: 109270 - DNA, 120 bp, Artificial Sequence
  ENSG00000099994_3 (sequence is synthesized)
tccgggcaagtgcactgtgtgtcacctctgctctatgagagcggccgcatccccttcactgtgtcactggacaacggccactccttccctcgtgcgggcacctggctggctgtgcacccc

SEQ ID NO: 109271 - DNA, 120 bp, Artificial Sequence
  ENSG00000099994_4 (sequence is synthesized)
aacaaagtgtcaatgatggagaagagcgagttggtgaacgagacgcgttggcaatactacggcaccgccaacacctcaggcaacctcagcctgacctggcatgtcaagtcgctgcccacg

SEQ ID NO: 109272 - DNA, 120 bp, Artificial Sequence
  ENSG00000099994_5 (sequence is synthesized)
cagaccatcaccatcgaactgtggggctacgaggagacaggaatgccctactcacaggagtggactgcaaagtggtcgtacctgtaccccctggccacacacatccccaactccggctct

SEQ ID NO: 109273 - DNA, 120 bp, Artificial Sequence
  ENSG00000099994_6 (sequence is synthesized)
ttcactttcaccccaaaacctgctcctcccagctaccagagatggcgagtgggtgcacttcggatcatcgacagcaaaaattacgcagggcagaaggacgtgcaggcgctctggaccaac

SEQ ID NO: 109274 - DNA, 120 bp, Artificial Sequence
  ENSG00000099994_7 (sequence is synthesized)
gaccacgcactggcctggcacctgagcgatgacttccgagaggaccctgtggcctgggcacgaactcagtgccaggcctgggaggagctggaggatcagctgcccaacttcctggaggag

SEQ ID NO: 109275 - DNA, 120 bp, Artificial Sequence
  ENSG00000099994_8 (sequence is synthesized)
ctgccggactgcccctgcaccctgacccaggcccgggctgactccggccgcttcttcacggactacggctgtgacatggagcagggcagcgtgtgcacctaccaccccggggccgtgcac

SEQ ID NO: 109276 - DNA, 120 bp, Artificial Sequence
  ENSG00000099994_9 (sequence is synthesized)
tgtgtgcgttctgtgcaggccagcctccggtacggctcaggtcagcagtgctgctacacagcggacgggacgcagctcctgacagctgactccagcggcggcagcactcccgaccgcggc

SEQ ID NO: 109277 - DNA, 120 bp, Artificial Sequence
  ENSG00000099994_10 (sequence is synthesized)
catgactggggcgcacccccgttccgcacgccaccccgagtgcccagcatgtcccactggctctacgatgtcctcagcttctattactgctgcctctgggcacccgactgcccccgctac

SEQ ID NO: 109278 - DNA, 120 bp, Artificial Sequence
  ENSG00000099994_11 (sequence is synthesized)
atgcaacggcggccctccaatgactgccgcaactaccggcccccaagactggcctccgccttcggagacccacactttgtgaccttcgacggcaccaacttcacattcaatgggcgcgga

SEQ ID NO: 109279 - DNA, 120 bp, Artificial Sequence
  ENSG00000099994_12 (sequence is synthesized)
gagtacgtgctgctggaggcagcgctgaccgacctgagggtgcaggcgcgggcccagcccgggacgatgtccaacggcacggagacccgtggcactgggctgaccgcagtggccgtccag

SEQ ID NO: 109280 - DNA, 120 bp, Artificial Sequence
  ENSG00000099994_13 (sequence is synthesized)
tggaggtgctgctgaaccaggaggtgctgagcttcaccgagcagagctggatggacctgaaaggaatgttcctgtcggtggctgccggggacagggtctccatcatgctggcatcagggg

SEQ ID NO: 109281 - DNA, 120 bp, Artificial Sequence
  ENSG00000099994_14 (sequence is synthesized)
ccggcctggaggtcagcgtgcagggcccgttcctgagtgtgtccgtcctgctgcctgagaagttcctcacccacacccacggcctcctcgggacactcaacaacgaccccaccgacgact

SEQ ID NO: 109282 - DNA, 120 bp, Artificial Sequence
  ENSG00000099994_15 (sequence is synthesized)
tcaccctgcacagcgggcgcgtcctgcccccaggcaccagtccccaggagctgttcctgtttggggccaactggaccgtgcacaatgcgtcctccctgctcacctacgattcctggttcc

SEQ ID NO: 109283 - DNA, 120 bp, Artificial Sequence
  ENSG00000099994_16 (sequence is synthesized)
tggtccacaacttcctgtaccaacccaagcacgaccccaccttcgagcccctcttccccagtgagaccaccctcaaccccagcctggcacaagaggcagccaaactatgtggggacgatc

SEQ ID NO: 109284 - DNA, 120 bp, Artificial Sequence
  ENSG00000099994_17 (sequence is synthesized)
atttctgcaactttgatgtggcagccactgggagcctgagcacgggcactgccactcgggtggcccaccagctgcaccagcgtcgcatgcagagcctgcagccagtggtgtcctgtggct

SEQ ID NO: 109285 - DNA, 120 bp, Artificial Sequence
  ENSG00000099994_18 (sequence is synthesized)
ggctggccccacctcccaacggacaaaaggagggcaacaggtacctggcgggttccaccatctacttccactgtgacaacggctacagcctggccggggcagagaccagcacctgccagg

SEQ ID NO: 109286 - DNA, 120 bp, Artificial Sequence
  ENSG00000099994_19 (sequence is synthesized)
ctgacggcacctggtcctcacccaccccgaagtgccagccaggacgcagctacgcggtgctgttgggcatcatctttgggggcctcgcggtggtggcggcggttgcgctcgtctatgtgc

SEQ ID NO: 109287 - DNA, 120 bp, Artificial Sequence
  ENSG00000099994_20 (sequence is synthesized)
tgctgcgccgcaggaagggcaacacgcacgtctggggtgcacagccctgatgggagcagcttggctgtgagcaccaggccaagactcctgagaacaggcagcccagtcctgcgactcccg

SEQ ID NO: 109288 - DNA, 120 bp, Artificial Sequence
  ENSG00000099994_21 (sequence is synthesized)
catccccaggaccagacacctgggacctggatacttgatacctgggcatttaaccccctactctgtcatctcagaccccaggcaggaggcccagtgttccaacacccaagccccgtgcta

SEQ ID NO: 109289 - DNA, 120 bp, Artificial Sequence
  ENSG00000099994_22 (sequence is synthesized)
gcagcgctccgtgctcttccccaaatactcacggctctaattccccaaacctgaaacttcataccctgggattctaatacctatgtcctgagccctgacactcccacacctgagcctcag

SEQ ID NO: 109290 - DNA, 120 bp, Artificial Sequence
  ENSG00000099994_23 (sequence is synthesized)
attccaatagctcactccctagagcctgacgccggggcccctgacccctgagcctcagattccaatacctcactccccagagcctgatgccggggcccctgacccctgatctacggaggc

SEQ ID NO: 109291 - DNA, 120 bp, Artificial Sequence
  ENSG00000099994_24 (sequence is synthesized)
ctgctcccggaccgtgcgggcaccagtgcagtgctgccttggttcctggacccctgggcccatcctgggaccccagatggggtaaggagaggccccagaaccccaaagcagacagcgaga

SEQ ID NO: 109292 - DNA, 120 bp, Artificial Sequence
  ENSG00000099994_25 (sequence is synthesized)
cccccagcggcagaggcctccctcggcactccaggcttataatttcgaactcttctggaaggtcactcaggaacaccctccctgcctgtgcaaagagaaaacaagcgccttgtttccttc

SEQ ID NO: 109293 - DNA, 120 bp, Artificial Sequence
  ENSG00000099994_26 (sequence is synthesized)
atatcccccaccccagtccaggcaagcaagaggggttcttctgcaggcttcagggcccccagaaggcgtgctgaccacagacaccctggggagccaagagaggtcgagggctccagctac

SEQ ID NO: 109294 - DNA, 120 bp, Artificial Sequence
  ENSG00000099994_27 (sequence is synthesized)
cgtggcccactgaggacccctgcctgtgggatagaggacttggtggctgaagggcagtcatgcccaggggcttctcctgaccctgcagggctgagcggatgcagctttttgcctcttctc

SEQ ID NO: 109295 - DNA, 120 bp, Artificial Sequence
  ENSG00000099994_28 (sequence is synthesized)
gctgcattctagcccgtcagtcagggcaacagccagatggtctgtgctaagattcatcccatccccacgggccctgtggctttctactgtgtccacctggtggcctgtgcagttcctggc

SEQ ID NO: 109296 - DNA, 120 bp, Artificial Sequence
  ENSG00000099994_29 (sequence is synthesized)
cagcgttctcctggggatgctgctgtctaatgggctgtgggagaaacagagacaggccctgcacatggggcagccagtccagtacccgccgggccaggccctcagcatcctctcctccag

SEQ ID NO: 109297 - DNA, 120 bp, Artificial Sequence
  ENSG00000099994_30 (sequence is synthesized)
ctggtgagccctcctccctgcccacagcctgcccccacggggactttccccagcgctaatctatgcacaccgagacttggcctgtccgtgccctgcctctctggctgaaccagtcccttg

SEQ ID NO: 109298 - DNA, 120 bp, Artificial Sequence
  ENSG00000099994_31 (sequence is synthesized)
ggaggcctgcccgcctgcgagagttccttcagctcctttccactccctggcatccagaccgcggtcccagcccagagtgagtgggagctgcaggggtccctagagaggtgggccagtgcc

SEQ ID NO: 109299 - DNA, 120 bp, Artificial Sequence
  ENSG00000099994_32 (sequence is synthesized)
tatccactgagctccgccatgccagggcaggggagaagccaggtcgaggctagaggcgtgggcagtggagggagggcaggcccctgcctctgcggcctcagcgtccttttctgctgtgcg

SEQ ID NO: 109300 - DNA, 120 bp, Artificial Sequence
  ENSG00000099994_33 (sequence is synthesized)
ggccagagagaccatcacccagctgctgccatgcattggccctggaggctcccacagcccttgaagcctcagggcctcctccctgcttccctgggcccaggccctcactcacccctcacc

SEQ ID NO: 109301 - DNA, 120 bp, Artificial Sequence
  ENSG00000099994_34 (sequence is synthesized)
agcagtccagccacgcgaggctgcgggctgccctcacctcctccccattcctgcagggagactgaggggaagccctgggccttcatgcctctcccagtcctggctagaggcctgggtggt

SEQ ID NO: 109302 - DNA, 120 bp, Artificial Sequence
  ENSG00000099994_35 (sequence is synthesized)
ccgacctcaggccttcacacccaccgaggtgcccccgtcgtacccacctggtcaaaagccgagaggccgtgacggtgggacatgtcctccctacggaggatcccgggagccttctggagg

SEQ ID NO: 109303 - DNA, 120 bp, Artificial Sequence
  ENSG00000099994_36 (sequence is synthesized)
ggaactcaccctggtaacgttcaccgctggcctgcacagagccactcctgtgctcctgtcactccctcagtcctcaaaagccactgcaaggtctccagccctgcacggttaaggatgccc

SEQ ID NO: 109304 - DNA, 120 bp, Artificial Sequence
  ENSG00000099994_37 (sequence is synthesized)
ctggcaagtggtagctccacatctgaaccccttgcctcagggaactgagtcaatgaaaggattcctggttgggatgggtgaggacctgggaggggcctgtcagcactgagggttcaggga

SEQ ID NO: 109305 - DNA, 120 bp, Artificial Sequence
  ENSG00000099994_38 (sequence is synthesized)
ccctcgggacgtgcccaggcaggtgtggctgctgcagccaaggccagagggacccacacgtgcatctcaacatgggggattcactgcaggggctgcacctcaggtgccgctgggagttcc

SEQ ID NO: 109306 - DNA, 120 bp, Artificial Sequence
  ENSG00000099994_39 (sequence is synthesized)
accgcaagcatggcaggggtggcggagggtcatggtcagcagaattggccccgggaacgccctcccttcccctgcaggtgccctcacccacagcccctgggtgccgaccaccctgtcctg

SEQ ID NO: 109307 - DNA, 120 bp, Artificial Sequence
  ENSG00000099994_40 (sequence is synthesized)
gggctgcgggaggggacaagatgctcacagcgggtgaccctaatgcatcccccttgagcccaggaatgttcctgtcggtggctgccggggacagggtctccatcatgctggcatcagggg

SEQ ID NO: 109308 - DNA, 120 bp, Artificial Sequence
  ENSG00000099994_41 (sequence is synthesized)
aacatggcacgggcagggcttggggaccaaagggagccatgcccagccaggccccggtcatgtatcttccagggaccgtgcacaatgcgtcctccctgctcacctacgattcctggttcc

SEQ ID NO: 109309 - DNA, 120 bp, Artificial Sequence
  ENSG00000099995_0 (sequence is synthesized)
gccatcttgcgagctcgtcgtactgaccgagcggggaggctgtcttgaggcggcaccgctcaccgacaccgaggcggactggcagccctgagcgtcgcagtcatgccggccggacccgtg

SEQ ID NO: 109310 - DNA, 120 bp, Artificial Sequence
  ENSG00000099995_1 (sequence is synthesized)
caggcggtgcccccgccgccgcccgtgcccacggagcccaaacagcccacagaagaagaagcatcttcaaaggaggattctgcaccttctaagccagttgtggggattatttaccctcct

SEQ ID NO: 109311 - DNA, 120 bp, Artificial Sequence
  ENSG00000099995_2 (sequence is synthesized)
ccagaggtcagaaatattgttgacaagactgccagctttgtggccagaaacgggcctgaatttgaagctaggatccgacagaacgagatcaacaaccccaagttcaactttctgaacccc

SEQ ID NO: 109312 - DNA, 120 bp, Artificial Sequence
  ENSG00000099995_3 (sequence is synthesized)
aatgacccttaccatgcctactaccgccacaaggtcagcgagttcaaggaagggaaggctcaggagccgtccgccgccatccccaaggtcatgcagcagcagcagcagaccacccagcag

SEQ ID NO: 109313 - DNA, 120 bp, Artificial Sequence
  ENSG00000099995_4 (sequence is synthesized)
cagctgccccagaaggtccaagcccaagtaatccaagagaccatcgtgcccaaagagcctcctcctgagtttgagttcattgctgatcctccctctatctcagccttcgacttggatgtg

SEQ ID NO: 109314 - DNA, 120 bp, Artificial Sequence
  ENSG00000099995_5 (sequence is synthesized)
gtgaagctgacggctcagtttgtggccaggaatgggcgccagtttctgacccagctgatgcagaaagagcagcgcaactaccagtttgactttctccgcccacagcacagcctcttcaac

SEQ ID NO: 109315 - DNA, 120 bp, Artificial Sequence
  ENSG00000099995_6 (sequence is synthesized)
tacttcacgaagctagtggaacagtacaccaagatcttgattccacccaaaggtttattttcaaagctcaagaaagaggctgaaaacccccgagaagttttggatcaggtgtgttaccga

SEQ ID NO: 109316 - DNA, 120 bp, Artificial Sequence
  ENSG00000099995_7 (sequence is synthesized)
gtggaatgggccaaattccaggaacgtgagaggaagaaggaagaagaggagaaggagaaggagcgggtggcctatgctcagatcgactggcatgattttgtggtggtggaaacagtggac

SEQ ID NO: 109317 - DNA, 120 bp, Artificial Sequence
  ENSG00000099995_8 (sequence is synthesized)
ttccaacccaatgagcaagggaacttccctccccccaccacgccagaggagctgggggcccgaatcctcattcaggagcgctatgaaaagtttggggagagtgaggaagttgagatggag

SEQ ID NO: 109318 - DNA, 120 bp, Artificial Sequence
  ENSG00000099995_9 (sequence is synthesized)
gtcgagtctgatgaggaggatgacaaacaggagaaggcggaggagcctccttcccagctggaccaggacacccaagtacaagatatggatgagggttcagatgatgaagaagaagggcag

SEQ ID NO: 109319 - DNA, 120 bp, Artificial Sequence
  ENSG00000099995_10 (sequence is synthesized)
aaagtgcccccacccccagagacacccatgcctccacctctgcccccaactccagaccaagtcattgtccgcaaggattatgatcccaaagcctccaagcccttgcctccagcccctgct

SEQ ID NO: 109320 - DNA, 120 bp, Artificial Sequence
  ENSG00000099995_11 (sequence is synthesized)
ccagatgagtatcttgtgtcccccattactggggagaagatccccgccagcaaaatgcaggaacacatgcgcattggacttcttgaccctcgctggctggagcagcgggatcgctccatc

SEQ ID NO: 109321 - DNA, 120 bp, Artificial Sequence
  ENSG00000099995_12 (sequence is synthesized)
cgtgagaagcagagcgatgatgaggtgtacgcaccaggtctggatattgagagcagcttgaagcagttggctgagcggcgtactgacatcttcggtgtagaggaaacagccattggtaag

SEQ ID NO: 109322 - DNA, 120 bp, Artificial Sequence
  ENSG00000099995_13 (sequence is synthesized)
aagatcggtgaggaggagatccagaagccagaggaaaaggtgacctgggatggccactcaggcagcatggcccggacccagcaggctgcccaggccaacatcaccctccaggagcagatt

SEQ ID NO: 109323 - DNA, 120 bp, Artificial Sequence
  ENSG00000099995_14 (sequence is synthesized)
gaggccattcacaaggccaaaggcctggtgccagaggatgacactaaagagaagattggccccagcaagcccaatgaaatccctcaacagccaccgccaccatcttcagccaccaacatc

SEQ ID NO: 109324 - DNA, 120 bp, Artificial Sequence
  ENSG00000099995_15 (sequence is synthesized)
cccagctcggctccacccatcacttcagtgccccgaccacccacaatgccacctccagttcgtactacagttgtctccgcagtacccgtcatgccccggcccccaatggcatctgtggtc

SEQ ID NO: 109325 - DNA, 120 bp, Artificial Sequence
  ENSG00000099995_16 (sequence is synthesized)
cggctgcccccaggctcagtgatcgcccccatgccgcccatcatccacgcgcccagaatcaacgtggtgcccatgcctccctcggcccctcctattatggccccccgcccaccccccatg

SEQ ID NO: 109326 - DNA, 120 bp, Artificial Sequence
  ENSG00000099995_17 (sequence is synthesized)
attgtgccaacagcctttgtgcctgctccacctgtggcacctgtcccagctccagccccaatgccccctgtgcatcccccacctcccatggaagatgagcccacctccaaaaaactgaag

SEQ ID NO: 109327 - DNA, 120 bp, Artificial Sequence
  ENSG00000099995_18 (sequence is synthesized)
acagaggacagcctcatgccagaggaggagttcctgcgcagaaacaagggtccagtgtccatcaaagtccaggtgcccaacatgcaggataagacggaatggaaactgaatgggcaggtg

SEQ ID NO: 109328 - DNA, 120 bp, Artificial Sequence
  ENSG00000099995_19 (sequence is synthesized)
ctggtcttcaccctcccactcacggaccaggtctctgtcattaaggtgaagattcatgaagccacaggcatgcctgcagggaaacagaagctacagtatgagggtatcttcatcaaagat

SEQ ID NO: 109329 - DNA, 120 bp, Artificial Sequence
  ENSG00000099995_20 (sequence is synthesized)
tccaactcactggcttactacaacatggccaatggcgcagtcatccacctggccctcaaggagagaggcgggaggaagaagtagacaagaggaacctgctgtcaagtccctgccattttg

SEQ ID NO: 109330 - DNA, 120 bp, Artificial Sequence
  ENSG00000099995_21 (sequence is synthesized)
tttgccttgcctgcatatttgtttcgctcttactcagtttgggaattcaaattgtcctgcagaggttcattcccctgaccctttccccacattggtaagagtagctgggttttctaagcc

SEQ ID NO: 109331 - DNA, 120 bp, Artificial Sequence
  ENSG00000099995_22 (sequence is synthesized)
actctctggaatctctttgtgttagggtctcgatttgaggacattcatttcttcagcagcccattagcaactgagagcccagggatgtcctacaggatagtttcatagtgacaggtggca

SEQ ID NO: 109332 - DNA, 120 bp, Artificial Sequence
  ENSG00000099995_23 (sequence is synthesized)
cttggctaatagaatatggctgatattgtcattaatcattttgtaccttgacatgggttgtctaataaaactcggacccttcttgtgaaatcagttaaataagacttgtctcggtcacct

SEQ ID NO: 109333 - DNA, 120 bp, Artificial Sequence
  ENSG00000099995_24 (sequence is synthesized)
gtgccctgtccagactcgaggcagtggtaacactgcacagtgctatgtggcttctctttgaggatttttgggttttgtaactaaattcttgctgccctcatactttttatgtattagaat

SEQ ID NO: 109334 - DNA, 120 bp, Artificial Sequence
  ENSG00000099995_25 (sequence is synthesized)
catattcgtattgcccttttaaaacattgggatcctccaaaggcctgccccatgtatttaacagtaatacaggaagcatggcaggcaccatgcaaaccaaggatggatggtgcagtccct

SEQ ID NO: 109335 - DNA, 120 bp, Artificial Sequence
  ENSG00000099995_26 (sequence is synthesized)
gtgtcagtgggcggtggtttcctgctggcctggaatcactcatcacctgattgattggctctgtggtcctgggcaggtgcctcataggtgtgtggatatgatgacgtttctttaaaatgt

SEQ ID NO: 109336 - DNA, 120 bp, Artificial Sequence
  ENSG00000099995_27 (sequence is synthesized)
atgtatttaacaaatacttaattgtattaaggtcatgtaccaaggatttgataaagtttaaataatttactctctacttttatccattttatccattttaactcatgtaatcctcatgtg

SEQ ID NO: 109337 - DNA, 120 bp, Artificial Sequence
  ENSG00000099995_28 (sequence is synthesized)
agtattcctgtttaacacttgagtaaactgaggcacagagaacataagttgcatgccatagtcacacactgtgaaagtgaaaagagaatgtgtgcaaaacacgtcacagtcctggtttct

SEQ ID NO: 109338 - DNA, 120 bp, Artificial Sequence
  ENSG00000099995_29 (sequence is synthesized)
gagtaaaggcaggctgttatctttagaatcaagctatcacagggagataggcaatgctgtgggtgttggaggaaggtgagagcctgttgctaacaatttcctggttttaaagctaaggct

SEQ ID NO: 109339 - DNA, 120 bp, Artificial Sequence
  ENSG00000099995_30 (sequence is synthesized)
gattttattgggaagatctcacatgtgtgtggcccctgagagttcccagtgccttttatttgcagtccttccatttggacctcctagctgccccatcaggtcatctccagggctcagagg

SEQ ID NO: 109340 - DNA, 120 bp, Artificial Sequence
  ENSG00000099995_31 (sequence is synthesized)
ggtgagaccatttcccaaggtcacagaaccagctctctagtcaccaccctgcctctccctctcacccagagtcagtaccagttttatggctttattacaaactgctgggtccctcccatt

SEQ ID NO: 109341 - DNA, 120 bp, Artificial Sequence
  ENSG00000099995_32 (sequence is synthesized)
ttcaacttgattgatgggatgtcatcccttatcctgtctgacatttgcctctggcctggttgctagaagtttgccccaggggcaagagttgaaatttggcttcctgaggtgggctttgtg

SEQ ID NO: 109342 - DNA, 120 bp, Artificial Sequence
  ENSG00000099995_33 (sequence is synthesized)
gtttgcgtccctaaagtgagcccactactggttgcttgtccatggccaacaccagaaatcccctgagcactacctgggtctcattccaagaaggaagagggtcaggagacctggggagtc

SEQ ID NO: 109343 - DNA, 120 bp, Artificial Sequence
  ENSG00000099995_34 (sequence is synthesized)
tcatattccaagttcttctttctttctgggagcagtgggcagttcatggtgttagggcactcacccccacagactggcaaaccctgcaggacttccgtggctgaggctgtgaccggaggc

SEQ ID NO: 109344 - DNA, 120 bp, Artificial Sequence
  ENSG00000099995_35 (sequence is synthesized)
caggaatgccgttgggtggattgtgagtgaatgggccctttgagctgccctctagagagcaaatccagtttcctggagctcctgaatgaatatctgtactggctcgctcagatgcagaag

SEQ ID NO: 109345 - DNA, 120 bp, Artificial Sequence
  ENSG00000099995_36 (sequence is synthesized)
ctccattgaccatgaggccttgtgaacatcagtggccacaggcccagtgtgctgcttggcactgcactagtttaggacctgcagcatgtaggtagcgtcctagtgtttataatacaaagc

SEQ ID NO: 109346 - DNA, 120 bp, Artificial Sequence
  ENSG00000099995_37 (sequence is synthesized)
tgctctgcacagcttttctgattcttcttgcaatctcctgaggattatctgccccatttttaaaacgaggtggaatacccaaggtcatgtagccagtgagtgctctggaaagccaaagca

SEQ ID NO: 109347 - DNA, 120 bp, Artificial Sequence
  ENSG00000099995_38 (sequence is synthesized)
gctcatcccttcctggggaccacactgctctgctccaccagaccacactatgaaataggaataagtgctcctgttgcaggactgctgggaaaacaggtggtgtgggacttaagtcaccat

SEQ ID NO: 109348 - DNA, 120 bp, Artificial Sequence
  ENSG00000099995_39 (sequence is synthesized)
aattttgaagacttgcatgcagagggctccaggaattgtagacattaaggaatttcactttcagttctacccactacttaagtacttgtcatgtactcttagaggaggccagtaatgatc

SEQ ID NO: 109349 - DNA, 120 bp, Artificial Sequence
  ENSG00000099995_40 (sequence is synthesized)
gaggccagtaatgatcagaaccattttactttaaaattaataatattgtattagagaatatattaaatggttatattgggttatgttaggatatatacttgaatggaaatacatgtacta

SEQ ID NO: 109350 - DNA, 120 bp, Artificial Sequence
  ENSG00000099995_41 (sequence is synthesized)
atttatccctgtaattagacaagaaagcataatatagctctactcatgggtacacataccagtgtataagatttttagaagtttactttttaaaaataaaagcaaaatgtaagatcttaa

SEQ ID NO: 109351 - DNA, 120 bp, Artificial Sequence
  ENSG00000099995_42 (sequence is synthesized)
agacttcagcactgaatcagcacaagggtttttaaagagacgttgttggcttgggccttttagttcataaaaaaccacaacatggcactggggtaggcaataggtaggactggtgtccct

SEQ ID NO: 109352 - DNA, 120 bp, Artificial Sequence
  ENSG00000099995_43 (sequence is synthesized)
gacacagcatagcagtggccaaagtgagaatcacacttagccccacagtcaccaggagcctctgcttctaaaactggcctgaggaaatgcctggaaagctgcttcatcacagatggtgtg

SEQ ID NO: 109353 - DNA, 120 bp, Artificial Sequence
  ENSG00000099995_44 (sequence is synthesized)
tgtctgtgcctgagctgctggcctgaggaagataaaaaggggagtttattattctcattgtacaaagaccacattccaagagcctcaaatgacccatctgcaaaatggaaaaaatgccat

SEQ ID NO: 109354 - DNA, 120 bp, Artificial Sequence
  ENSG00000099995_45 (sequence is synthesized)
cccccacccccagagacacccatgcctccacctctgcccccaactccagaccaagtcattgtccgcaaggattatgatcccaaaggtagggagggcctgcttcccaaccctcgggctgcc

SEQ ID NO: 109355 - DNA, 120 bp, Artificial Sequence
  ENSG00000099995_46 (sequence is synthesized)
caggaagtcctgtgtgccctcatgtgttcctcacacccgtctttctaggagggcttgaggtgcagcttattgtaaaagcattgcaagcccgtctgttacaggtttcatggtgggaacagg

SEQ ID NO: 109356 - DNA, 120 bp, Artificial Sequence
  ENSG00000099995_47 (sequence is synthesized)
gcccagtcatctctggtgccctagtgcctttcacagtgccaggtacaagagtggcactgaatagatgccttgatgaatgatgcacgcatgaaataccaccctcttaactcaggtggctgc

SEQ ID NO: 109357 - DNA, 120 bp, Artificial Sequence
  ENSG00000099995_48 (sequence is synthesized)
cttggtcttagttccagaagcattgtggctttgctttcacttgcaggtgacctgggatggccactcaggcagcatggcccggacccagcaggctgcccaggccaacatcaccctccagga

SEQ ID NO: 109358 - DNA, 120 bp, Artificial Sequence
  ENSG00000099995_49 (sequence is synthesized)
agctttgtggccagatcttgattccacccaaaggtttattttcaaagctcaagaaagaggctgaaaacccccgagaagttttggatcaggtgtgttaccgagtggaatgggccaaattcc

SEQ ID NO: 109359 - DNA, 120 bp, Artificial Sequence
  ENSG00000099995_50 (sequence is synthesized)
cttgcaaccagttactggtggttggttctgttttatgtctgaaaacagtctctgaggcaggaccttgttatgttccagtcatgggaatggtgggagaaaaggctttgttggctacaaagg

SEQ ID NO: 109360 - DNA, 120 bp, Artificial Sequence
  ENSG00000099995_51 (sequence is synthesized)
ccaaagaaacctggagtccggatgcttcccaacataccacaactttctgctttgctctcagcctcaatatatctccctcttttccactctagctagaagacagaaggccagctcccaagc

SEQ ID NO: 109361 - DNA, 120 bp, Artificial Sequence
  ENSG00000099998_0 (sequence is synthesized)
tgcctggcctcctgccagcaacaagcaggagctgaaaaccagaagttgaggcgtgagtttggccactccgtagtgtgcacttggtgagggcagcagctcgccacagctgccagccatctg

SEQ ID NO: 109362 - DNA, 120 bp, Artificial Sequence
  ENSG00000099998_1 (sequence is synthesized)
tccattcacccatctgtccatctggcagcccgctgttcagacctgtctgtctgtccgcccatctgtaagcccatctctgtcccattgtctatctgaccatctttctcttactgtcctctt

SEQ ID NO: 109363 - DNA, 120 bp, Artificial Sequence
  ENSG00000099998_2 (sequence is synthesized)
tgtctagctatctggcctatctgtcgatccatcttcgtgtctgtcttcagcccccacctgtttgtccatctgtccaattacctgtgactctgtgcatcttcttgtccattcatctgccca

SEQ ID NO: 109364 - DNA, 120 bp, Artificial Sequence
  ENSG00000099998_3 (sequence is synthesized)
cccatccgtccctccgtctgcccaccagccgcccctctcctcctgggctgcagagccatggcccggggctacggggccacggtcagcctagtcctgctgggtctggggctggcgctggct

SEQ ID NO: 109365 - DNA, 120 bp, Artificial Sequence
  ENSG00000099998_4 (sequence is synthesized)
gtcattgtgctggctgtggtcctctctcgacaccaggccccatgtggcccccaggcctttgcccacgctgctgttgccgccgactccaaggtctgctcggatattggacgagccatcctc

SEQ ID NO: 109366 - DNA, 120 bp, Artificial Sequence
  ENSG00000099998_5 (sequence is synthesized)
cagcagcagggctcacccgtggatgccaccatcgcggctctggtctgcaccagcgtcgtcaaccctcagagcatgggcctgggcggaggggtcatcttcaccatctacaatgtgacaaca

SEQ ID NO: 109367 - DNA, 120 bp, Artificial Sequence
  ENSG00000099998_6 (sequence is synthesized)
gggaaggtggaggtcatcaatgcccgggagacggtgccggccagccacgccccgagcctgctggaccagtgtgcacaggctctgccactgggcacaggggcccagtggatcggggtgccc

SEQ ID NO: 109368 - DNA, 120 bp, Artificial Sequence
  ENSG00000099998_7 (sequence is synthesized)
ggggagctccgtggctatgccgaggcccaccgccgccatggccgcctgccctgggcgcagctgttccagcccaccatcgcgctgctccgaggggggcatgtggtggcccctgtcctcagc

SEQ ID NO: 109369 - DNA, 120 bp, Artificial Sequence
  ENSG00000099998_8 (sequence is synthesized)
cgtttcctgcacaacagcatcctgcggccttccttgcaggcgtcaaccctgcgccagctcttcttcaacgggacagaacccctgaggcctcaggacccactcccatggcctgcactggcc

SEQ ID NO: 109370 - DNA, 120 bp, Artificial Sequence
  ENSG00000099998_9 (sequence is synthesized)
accaccctggagaccgtggccacagagggcgtggaggtcttctacacggggaggctgggccagatgctggtggaggacattgccaaggaagggagccagctgacgctgcaggacctggcc

SEQ ID NO: 109371 - DNA, 120 bp, Artificial Sequence
  ENSG00000099998_10 (sequence is synthesized)
gctttatcctcaacgtgctaagagggttcaacttctcaacagagtctatggccaggcctgaagggagggtgaacgtgtaccaccaccttgtagagacgctcaagtttgccaaggggcaga

SEQ ID NO: 109372 - DNA, 120 bp, Artificial Sequence
  ENSG00000099998_11 (sequence is synthesized)
ggtggaggctgggggaccctcgaagccacccgaagctccagaatgcctcccgggacctgctgggggagaccctggcccagctcatccgccaacagatcgatggccggggggaccaccagc

SEQ ID NO: 109373 - DNA, 120 bp, Artificial Sequence
  ENSG00000099998_12 (sequence is synthesized)
tcagccactacagcttggccgaggcctggggccacgggacaggcacgtcccatgtgtctgtgctgggggaggatggcagcgccgtggctgccaccagcaccatcaacacaccctttggag

SEQ ID NO: 109374 - DNA, 120 bp, Artificial Sequence
  ENSG00000099998_13 (sequence is synthesized)
cgatggtgtattcaccacggacaggcatcatcctcaacaacgagctcctggacttatgcgagcgatgcccccggggttccggcaccaccccctcacctgtgagtggagacagggtgggtg

SEQ ID NO: 109375 - DNA, 120 bp, Artificial Sequence
  ENSG00000099998_14 (sequence is synthesized)
gagctcccggaaggtgctggcccccagttccaggcgagcgttccccatcctccatggtgccctccatcttgatcaacaaagcccaggggtcgaagctagtgattggcggggctggcgggg

SEQ ID NO: 109376 - DNA, 120 bp, Artificial Sequence
  ENSG00000099998_15 (sequence is synthesized)
agctcatcatctctgctgtggcccaggccatcatgagcaagctgtggcttggctttgacctgagagcggccattgcagcccccatcctgcatgtcaacagcaagggctgtgtggagtacg

SEQ ID NO: 109377 - DNA, 120 bp, Artificial Sequence
  ENSG00000099998_16 (sequence is synthesized)
agcccaacttcagccaggaggtgcagaggggactccaagaccgtggccagaaccagacccagaggcccttcttcctgaacgtggtccaggctgtgtcccaggagggggcctgtgtgtacg

SEQ ID NO: 109378 - DNA, 120 bp, Artificial Sequence
  ENSG00000099998_17 (sequence is synthesized)
ccgtctcggacctgaggaagagtggggaggccgcaggctactaagacactgctctgcccagagctgaagtctggccccaccatgagtcctgtgtccaggccggacatggctgggggacca

SEQ ID NO: 109379 - DNA, 120 bp, Artificial Sequence
  ENSG00000099998_18 (sequence is synthesized)
actactctggcaggatctggacccctggcaggggagtccagctgagagtggaagaggtggcggggaccagctgggcagatgagaggctgagcctcatccctaaccccctttcccagagcc

SEQ ID NO: 109380 - DNA, 120 bp, Artificial Sequence
  ENSG00000099998_19 (sequence is synthesized)
cctggtggtcctgaaccggcccctctatccctccgcaggcctcttgcctggggccactctcccaccctctcgatctgtatatcctccagtccaagattaaagaggcggactgtggcctga

SEQ ID NO: 109381 - DNA, 120 bp, Artificial Sequence
  ENSG00000099998_20 (sequence is synthesized)
cccctcctggagaaggcgtgtgtgtgtgtgtgtgtgtgagtgaatgtatgtgtgggtgtgtgtgtgagtgtctgggtatgtgtgattgcatgcatgtgtgggtgtgtgtgagtgtatgtg

SEQ ID NO: 109382 - DNA, 120 bp, Artificial Sequence
  ENSG00000099998_21 (sequence is synthesized)
agtgtgagtgtggggagtgtgggtgtgtgtgaatgtgtgtgattgtgtgtgggtatgtgtatgtgtgggtgggtgtgtgtgtgtgtgtgtgtgcacgtgcactggcccaggaagcaggag

SEQ ID NO: 109383 - DNA, 120 bp, Artificial Sequence
  ENSG00000099998_22 (sequence is synthesized)
ccgtgtgtgtgtgggcttcagcacctgcaggtcttgggcgcaaggaggcagcctcagggcccttgcacagaacaggtggcagggtgtgctcgtggggcagatggggacttggggacaatg

SEQ ID NO: 109384 - DNA, 120 bp, Artificial Sequence
  ENSG00000099998_23 (sequence is synthesized)
gtggtgtgtgagtccacgcctggctccaggattcaggaggcccatttgcatatcccaggtgggaacctgtctggccccgcctgaccctgctggccggtgcaggccccttcagtgaggcca

SEQ ID NO: 109385 - DNA, 120 bp, Artificial Sequence
  ENSG00000099998_24 (sequence is synthesized)
attctccaaggctgcggtcttctcccagggtcatgggtgaaggggtttggaggctccctgcgtgggtactggcctgctggggtacacacaatgctgccatagccagtctgccccaacacc

SEQ ID NO: 109386 - DNA, 120 bp, Artificial Sequence
  ENSG00000099998_25 (sequence is synthesized)
cagcctggggccacatctcgggtctctcagtcctgaggagcccggtgccccacccctcacatcctctctccctgagtcagggcctgggtctcgtgagctgagtgactgatacttggtgtc

SEQ ID NO: 109387 - DNA, 120 bp, Artificial Sequence
  ENSG00000099998_26 (sequence is synthesized)
ctggatgagggcgtggtggagaggggccacagcgggtgtttcctgaccctcttccaggaagcccagcccaagggaggcctccgctgctgctgctgcagaggacacatacaggatgcccct

SEQ ID NO: 109388 - DNA, 120 bp, Artificial Sequence
  ENSG00000099998_27 (sequence is synthesized)
tcctgctccctgcctcccactgggcccacaaaagccagggcaagcctcccctccctgccagccacctggtctgcttcccagaagttctgtcttgcaggctgttgggaggatcccagtgct

SEQ ID NO: 109389 - DNA, 120 bp, Artificial Sequence
  ENSG00000099998_28 (sequence is synthesized)
ttgtaaattaaagcaagggaggagtggctgctctctctctctgttcattcattcaccttttcattcattccttcttccctccattcccccatctgtccatccttccctgccctgatttct

SEQ ID NO: 109390 - DNA, 120 bp, Artificial Sequence
  ENSG00000099998_29 (sequence is synthesized)
catgccaccccccgcccctcctgacctggtcctttggtttctcttcaggtctttctgtctcctcccacagggctgagaatggcagctcagggacaagtcggggctggggactgcttagtc

SEQ ID NO: 109391 - DNA, 120 bp, Artificial Sequence
  ENSG00000099998_30 (sequence is synthesized)
tccccagtggctctcaggggatttgagggattgacgccagccgccaccccaggctgtgcccctcctctgctcaggaggacattcaggatgcgacacccacttaaactcgaagttgcaaag

SEQ ID NO: 109392 - DNA, 120 bp, Artificial Sequence
  ENSG00000099998_31 (sequence is synthesized)
agtggggacctgctgccacaaatttctaggtggagtctggacctgctgggtctccctgagtgactgtctgggggtctccatagcgtgccctgctgtgtgcgtgacggtcactggttgggt

SEQ ID NO: 109393 - DNA, 120 bp, Artificial Sequence
  ENSG00000099998_32 (sequence is synthesized)
aggggtctctactctaaagctccctctgctggcatcccctcaaactgtcccttgaagagagaggatgtggtttgccccagtgttttgtcaaacaactctctccacttcctgtcttaagaa

SEQ ID NO: 109394 - DNA, 120 bp, Artificial Sequence
  ENSG00000099998_33 (sequence is synthesized)
gctgggagtggaagagagcctggggctggccccagctgctgctgcggaacaggggtcattggacactgggaccctggccggactggctggggggcctcaggaagaggcctgctgcagcgt

SEQ ID NO: 109395 - DNA, 120 bp, Artificial Sequence
  ENSG00000099998_34 (sequence is synthesized)
catcctggccaagatccctccttgcagaggcccctggccacactgccacagggtctgctggggccaccagaagcccatgctcctgactccatcatctctcccctctgtgctcacctctca

SEQ ID NO: 109396 - DNA, 120 bp, Artificial Sequence
  ENSG00000099998_35 (sequence is synthesized)
catctctcccctctgtgctcacctctcaccaggaggccctcccagagtccagtctcctgctcttttttctgttttgtttttgagatgctgtttcgctctgtcaccaggctggagtgcagt

SEQ ID NO: 109397 - DNA, 79 bp, Artificial Sequence
  ENSG00000099998_36 (sequence is synthesized)
ggcacccagccccatctcctactctttcagcactaggttttattcttgggattctgctacagccggagcccctgggtgc

SEQ ID NO: 109398 - DNA, 120 bp, Artificial Sequence
  ENSG00000099998_37 (sequence is synthesized)
ttattcttgggattctgctacagccggagcccctgggtgcaagctcctaagctttctgtgagtgtggacccagcaccgtgcctagtagacatacaaaaggagcatggtgacagtgaggtc

SEQ ID NO: 109399 - DNA, 88 bp, Artificial Sequence
  ENSG00000099998_38 (sequence is synthesized)
cctagtagacatacaaaaggagcatggtgacagtgaggtctgttatctccagcataatgactgttttgatccttgtaaaaaaggtgga

SEQ ID NO: 109400 - DNA, 120 bp, Artificial Sequence
  ENSG00000099998_39 (sequence is synthesized)
tcttcattctataattatatgttttatataattataatagctatataagatataatacccctagtatgttgttttttggatattctactcgttcctgatggttaatttatgtgtcaactt

SEQ ID NO: 109401 - DNA, 120 bp, Artificial Sequence
  ENSG00000099998_40 (sequence is synthesized)
ctactcgttcctgatggttaatttatgtgtcaacttggctaagctctggtgccccgttgtttggtcaaatacttgtcaatatcttgctgggaggttatttcatagatgtgattaacactg

SEQ ID NO: 109402 - DNA, 120 bp, Artificial Sequence
  ENSG00000099998_41 (sequence is synthesized)
acagtcagttgactttaggtaaaacagattacccaccataatatgggtgggccacctccaatcagttgaaggccgtaagaacaaaaactgaggtttcccagagaagcaggaattctgctt

SEQ ID NO: 109403 - DNA, 120 bp, Artificial Sequence
  ENSG00000099998_42 (sequence is synthesized)
caacactataacacacaaaccctgcctgagtttctggcctgctgactgctctacagatgttaggttccagacttcgagatcaactcttacctgaatttatagcctgctggcttgccctac

SEQ ID NO: 109404 - DNA, 120 bp, Artificial Sequence
  ENSG00000099998_43 (sequence is synthesized)
agattttaaacttgccagtccccaaaatcatgtgagccaattcctaaataaatctctatgtataacctattggtttagtttctctaaaaaaacttctatatccagtttcctggatgttaa

SEQ ID NO: 109405 - DNA, 74 bp, Artificial Sequence
  ENSG00000099998_44 (sequence is synthesized)
tctctaaaaaaacttctatatccagtttcctggatgttaagtaatactgaaactagctagtaacctcgtacagg

SEQ ID NO: 109406 - DNA, 80 bp, Artificial Sequence
  ENSG00000099999_0 (sequence is synthesized)
gccccgtccggcagcggcctcgctccctccgatcccccccgcgcccgggacccctggccccactgttgggccagctcgcc

SEQ ID NO: 109407 - DNA, 80 bp, Artificial Sequence
  ENSG00000099999_1 (sequence is synthesized)
cgctgagatcgccgccgccgcctccgccgccgcctccgtctccgctgctgctgctgctgcccctgctgccgctgtggctg

SEQ ID NO: 109408 - DNA, 120 bp, Artificial Sequence
  ENSG00000099999_2 (sequence is synthesized)
cggggcggggcggagcccgcgccgtgcgggtggacgtgagactgccgcgccaggacgctctggtcctggagggcgtcaggatcggctccgaagccgacccggcgcccctgctgggcggtc

SEQ ID NO: 109409 - DNA, 120 bp, Artificial Sequence
  ENSG00000099999_3 (sequence is synthesized)
tgctgggcggtcgtctgctgctgatggacatcgtggatgccgagcaggaggcaccagtggaaggctggattgcagtggcatacgtgggcaaggagcaggcggcccagttccaccaggaga

SEQ ID NO: 109410 - DNA, 120 bp, Artificial Sequence
  ENSG00000099999_4 (sequence is synthesized)
ataagggcagtggcccgcaggcctatcccaaggccctggtccagcagatgcggcgggccctcttcctgggtgcctctgccctgcttcttctcatcctgaaccacaacgtggtccgagagc

SEQ ID NO: 109411 - DNA, 120 bp, Artificial Sequence
  ENSG00000099999_5 (sequence is synthesized)
tggacatatcccagcttctgctcaggccagtgatcgtcctccattattcctccaatgtcaccaagctgttggatgcattgctgcagaggacccaggccacggctgagatcaccagcggag

SEQ ID NO: 109412 - DNA, 120 bp, Artificial Sequence
  ENSG00000099999_6 (sequence is synthesized)
agtccctgtctgccaatatcgagtggaagttgaccttgtggaccacctgtggcctctccaaggatggctatggaggatggcaggacttggtctgccttggaggcagtcgtgcccaggagc

SEQ ID NO: 109413 - DNA, 120 bp, Artificial Sequence
  ENSG00000099999_7 (sequence is synthesized)
agaaacccctgcagcagctgtggaacgccatcctgctggtggccatgctcctgtgcacaggcctcgtggtccaggcccagcggcaggcgtcgcggcagagccagcgggagctcggaggcc

SEQ ID NO: 109414 - DNA, 120 bp, Artificial Sequence
  ENSG00000099999_8 (sequence is synthesized)
agatccgggtgctgagacctgtgcggtgtgcctggactacttctgcaacaaacagtggctccgggtgctgccctgtaagcacgagtttcaccgagactgtgtggacccctggctgatgct

SEQ ID NO: 109415 - DNA, 120 bp, Artificial Sequence
  ENSG00000099999_9 (sequence is synthesized)
ccagcagacctgcccactgtgcaaattcaacgtcctggggaaccgctactccgatgattagctgcccagctggactctgcacatggggatggacccttcctgcctgcaccccggtcctca

SEQ ID NO: 109416 - DNA, 120 bp, Artificial Sequence
  ENSG00000099999_10 (sequence is synthesized)
gcctgggctcccaggacaggacaggatgggacagcaggatagacaggacagcaagcccagtgggtgggaggaaggatgagggccccaccatgtccacactgggaaggagggccccacagc

SEQ ID NO: 109417 - DNA, 120 bp, Artificial Sequence
  ENSG00000099999_11 (sequence is synthesized)
ttcagactgaggatctagggctgggacctgtcagtcaaggaagagaggtcactttgggaccttctctgcaatcctgtgacgtgagtctgccctccttacaggcagctcccaggtcaataa

SEQ ID NO: 109418 - DNA, 120 bp, Artificial Sequence
  ENSG00000099999_12 (sequence is synthesized)
ggaaagagaatatggggccagtgtagctgtcgccagggttctgggagctccctgtggcctgtctgggaattcctgggggctgagactacagtggccaggttttgtgcttatttattgggg

SEQ ID NO: 109419 - DNA, 120 bp, Artificial Sequence
  ENSG00000099999_13 (sequence is synthesized)
ggtgggttgagggaagagctatctggccttggggtaccctggcctgaccgtctttcaggatacttcttgtcaaggctgtctgcctgttgcctttggtcctcaagcactgggagccatggg

SEQ ID NO: 109420 - DNA, 120 bp, Artificial Sequence
  ENSG00000099999_14 (sequence is synthesized)
tcccactgcctgtccagcctggctcccttcctgggcctggctaggaccagaggtcttagaaaccgtcctgttctggaatccttggctgcggctttgtgttgctgaccgggatactcgaag

SEQ ID NO: 109421 - DNA, 84 bp, Artificial Sequence
  ENSG00000099999_15 (sequence is synthesized)
cttggctgcggctttgtgttgctgaccgggatactcgaagccacaggatcaatgtggtgcctcatccagggttggagtagggaa

SEQ ID NO: 109422 - DNA, 120 bp, Artificial Sequence
  ENSG00000099999_16 (sequence is synthesized)
acacagtgaggaaatgacagagctggagtttccgtctgttccacattgctgcatttgttctgcctgacttggaccctggaaaacctggccctcttcaatttctgacaaaagagacggagt

SEQ ID NO: 109423 - DNA, 120 bp, Artificial Sequence
  ENSG00000099999_17 (sequence is synthesized)
gtctcaaaaaaaaaaaaaagaaagactgtcctgtcccaggctgaaaaatgggtgaggggatgggaaggaggtgccagagcctggagcttggagcaaggaagtggctctgtgggcagagag

SEQ ID NO: 109424 - DNA, 120 bp, Artificial Sequence
  ENSG00000099999_18 (sequence is synthesized)
gactggccccagcaaggaggaagatggacttgcaggcttccctggcctggctggtgtgaaaattggaaaaaccaatagagggaaaaggcctggggcaaagtgtaaggccagcaggggcga

SEQ ID NO: 109425 - DNA, 120 bp, Artificial Sequence
  ENSG00000099999_19 (sequence is synthesized)
cagtcgtaggtatccttttcctgcagagctggggtgggtgggtctgggcctcccttcccaagagtccttccatctggccccggtgacttcccctcccaggaggacccaggccacggctga

SEQ ID NO: 109426 - DNA, 120 bp, Artificial Sequence
  ENSG00000099999_20 (sequence is synthesized)
gcctgggctcccaggacaggacaggatgggacagcaggatagacaggacagcaagcccaatggagggagccccatggcaaggaaggtggacggcctctaggagccgtgagaggacctggc

SEQ ID NO: 109427 - DNA, 120 bp, Artificial Sequence
  ENSG00000099999_21 (sequence is synthesized)
ttacagccagccagcgaggacatggggacctcagtcccacagccgcaaggatcggaattctgccaacaagtggagcttggaagccaattcttccccagaaccggcagaaaggaacgcaac

SEQ ID NO: 109428 - DNA, 120 bp, Artificial Sequence
  ENSG00000099999_22 (sequence is synthesized)
ctggtagatgcctcaatttcagccctctgggacccggagcaaaaaaacccagccacacagaacctggacttctgactgccagaactgggagctaatgaatacatggcacggagttggtgg

SEQ ID NO: 109429 - DNA, 120 bp, Artificial Sequence
  ENSG00000099999_23 (sequence is synthesized)
gcgcctgagagagctactcagctgtgaggtccttcccctggacttgagcacaggccttctggctcagggtgctgagggatggtgctcccctgtgaggggggtgcccggggcaccccagcc

SEQ ID NO: 109430 - DNA, 120 bp, Artificial Sequence
  ENSG00000099999_24 (sequence is synthesized)
tccctcaggaactcccaggcccctcagaagcaggaagttgggctgaccaaagctgtggtagctcagctatatacatggcccctcttgacccttctctgtgaactgaggtgctctacctga

SEQ ID NO: 109431 - DNA, 120 bp, Artificial Sequence
  ENSG00000099999_25 (sequence is synthesized)
cggcctcttcaccaagggaaaatgcttcaggcatttgggagcgtgcgccctgagaaggcctcagcaagtttttggagattgtccttcacagaaacggggtcccattatattgtccaggct

SEQ ID NO: 109432 - DNA, 120 bp, Artificial Sequence
  ENSG00000099999_26 (sequence is synthesized)
ggtctcaaactcctgggctcgagtgatctgcccgcctcagcctctcaaattgttgggattacaggcatgagccgccgcacccggcctgacgaggcttcttgctgcacttaaaggaatgac

SEQ ID NO: 109433 - DNA, 120 bp, Artificial Sequence
  ENSG00000099999_27 (sequence is synthesized)
agctatagagggcatatgggactggaaggcatcggatccataacatcctcacgccttctggaaatgtgaaaaatgtttcacaaaagcacagcctaaggcctcatgtgatgaggtgggctc

SEQ ID NO: 109434 - DNA, 120 bp, Artificial Sequence
  ENSG00000099999_28 (sequence is synthesized)
tccacaagttcccggggcagagtctgaagacctgctgctggataggggcttcctcctggtccccaagggcccgccctctcaggcccaccttgaggccaccctgctgggccacttcccgga

SEQ ID NO: 109435 - DNA, 120 bp, Artificial Sequence
  ENSG00000099999_29 (sequence is synthesized)
ttttggacagcattgattggagccgcccgttctcctcctgtaggacccggatgcggatgtcgttggactgcacttgcctctccatgtgatctgtgacgttgccagagtctgtgggacatg

SEQ ID NO: 109436 - DNA, 120 bp, Artificial Sequence
  ENSG00000099999_30 (sequence is synthesized)
ttatctgggattccacgctgctggatctgcctcctgtgcccaatgggacaggaccttagaagggaggcacaccagcttgggcaggtggcctggaggcacaaaggagctgtgtagtgcacc

SEQ ID NO: 109437 - DNA, 120 bp, Artificial Sequence
  ENSG00000099999_31 (sequence is synthesized)
aggcctcctagctcatcttccttctcccgaggccttattcccccttccctgtcccccaacctgcagggaagatgaccatagtattataaaatctgagagctgggtgggacctagagctct

SEQ ID NO: 109438 - DNA, 62 bp, Artificial Sequence
  ENSG00000099999_32 (sequence is synthesized)
gtattataaaatctgagagctgggtgggacctagagctctcaaaagacttcaggggatcatt

SEQ ID NO: 109439 - DNA, 76 bp, Artificial Sequence
  ENSG00000099999_33 (sequence is synthesized)
caaataagcatgagaggagagtgaatctctgacaaggcccccccgttttggacaggctacagccaaagtgagctgt

SEQ ID NO: 109440 - DNA, 120 bp, Artificial Sequence
  ENSG00000099999_34 (sequence is synthesized)
gcccccccgttttggacaggctacagccaaagtgagctgtccaaggtcacacggccagctcaagcttgggaacggcaggaattccgccaggctgctcttcccctgcttttgtgatggatg

SEQ ID NO: 109441 - DNA, 120 bp, Artificial Sequence
  ENSG00000099999_35 (sequence is synthesized)
cttccttctggctccaggagcccgggagaattgctgccccttctggttcagtttcctgctatgggaaatagctatggggctatgacctgcctcacaaggtggttgagaaggggacagaag

SEQ ID NO: 109442 - DNA, 120 bp, Artificial Sequence
  ENSG00000099999_36 (sequence is synthesized)
ggcctggatgatgtctcacgagcagctaactgcacatcttcctgccagctctgcaaaaggatttgccctagtgctttaggggtctggaggggctgggagaacccaggtcacctgatatcc

SEQ ID NO: 109443 - DNA, 120 bp, Artificial Sequence
  ENSG00000099999_37 (sequence is synthesized)
aatcctgtgccaagatgggtacctagcactcctatgccatggggtccaggacagtgggcagctggaggctgtgtccttgggactagtcccatggtgtggtttggggacccattccaagaa

SEQ ID NO: 109444 - DNA, 120 bp, Artificial Sequence
  ENSG00000099999_38 (sequence is synthesized)
ccaagaagggggacacacagaagtcgagcaagaattagcatgtgacgtagtgaagagcacaggctgtggggacaaccagacctgtgtctgcgtttggctgttgtgactagaggcagtcac

SEQ ID NO: 109445 - DNA, 120 bp, Artificial Sequence
  ENSG00000099999_39 (sequence is synthesized)
atcactgttgggctttcacgtccctgtctatgcagagtggatgacgcatgaagcacttgcgtgctgtggtgggtccacaggggctgcgctgctggccgcctggctttaacacccttgctg

SEQ ID NO: 109446 - DNA, 120 bp, Artificial Sequence
  ENSG00000099999_40 (sequence is synthesized)
caggctagggagctgcagtccccagtgtcctgcccacacgagccctcagctgctggccctgagccccagcatgcccttggcaccatccccagtcccctaccatggatctgggtctcggtg

SEQ ID NO: 109447 - DNA, 120 bp, Artificial Sequence
  ENSG00000099999_41 (sequence is synthesized)
ggcctgtgcaggtctgggaaggccaccagcagccgctcccgctccttcagctcctccagctcccgttctagctccaggatggttagccgcaggtccgtagtcgcctgctccaggccttgc

SEQ ID NO: 109448 - DNA, 120 bp, Artificial Sequence
  ENSG00000099999_42 (sequence is synthesized)
ttctccctctgcaggctctgcagcagctcctgggacagacggaggctcaggcctggctcctgagtgagctacatggtactcagcgccctggggcaccgtccctacccaagaaaagacatg

SEQ ID NO: 109449 - DNA, 120 bp, Artificial Sequence
  ENSG00000099999_43 (sequence is synthesized)
ggacaggcctgcaggcactcagttggccggagacttctctggcaaaaaggaagacccccaccctcacctgctgggccctgagctggcattgcccctgctcccgctcgctctgcagctgct

SEQ ID NO: 109450 - DNA, 120 bp, Artificial Sequence
  ENSG00000099999_44 (sequence is synthesized)
cctccacgcgggcccgctgggcctcagcctcgtccaggctgccccgcagctcctcacgttcctggtccaggctgtccagctgctttagcagggctcgctgcttggcctgcagagactaag

SEQ ID NO: 109451 - DNA, 120 bp, Artificial Sequence
  ENSG00000099999_45 (sequence is synthesized)
caggaacggacaagcagggaggctgtgagacccacagggctaggcccagccatgtggaactaaggaggctacagcatctactacccctcggctgctacccccctggggtgtgtgtctgtg

SEQ ID NO: 109452 - DNA, 120 bp, Artificial Sequence
  ENSG00000099999_46 (sequence is synthesized)
tctagggaatgctggtcacatgcgtggaagggtaggggtcgggggaagctggcagcaggcagatgcacaccggacctggtcaaggccaggatcccagcttgaagaccccggcccttggaa

SEQ ID NO: 109453 - DNA, 120 bp, Artificial Sequence
  ENSG00000099999_47 (sequence is synthesized)
cgcagatggctggctctgggggtctcacccccacttccttccagtcatacacagaccccacttggagaggaattctgggaactaagtttttcttctcctcgggtctccagtgtcacatca

SEQ ID NO: 109454 - DNA, 120 bp, Artificial Sequence
  ENSG00000099999_48 (sequence is synthesized)
tcccatgttgctgaagcccacatttcctaacacccactgaatggaaagcaggaagaactaacgctggactgctcggagtcctggctccacctctcactagctgtgtggccttgggcaact

SEQ ID NO: 109455 - DNA, 120 bp, Artificial Sequence
  ENSG00000099999_49 (sequence is synthesized)
tccttaacctcactcaataaggctgtttcctcattcgtaaaatgggggtgacaagagtatctacctcctgttgctgtagcgaggagtaagcatcagaggctgcggcgcctgaagcctggg

SEQ ID NO: 109456 - DNA, 120 bp, Artificial Sequence
  ENSG00000099999_50 (sequence is synthesized)
ctgaccctggggactctcaactgaactcctggctccttgctgagcttttgagggttagacccagccaagacagcccccagacctgcccctttcactaggcaacaggtcacctactccctc

SEQ ID NO: 109457 - DNA, 120 bp, Artificial Sequence
  ENSG00000099999_51 (sequence is synthesized)
aaccacacttctgaggactcctgtgaggccccattgcccagagcacagctatgccccgggccctggctcaccctctgcctgccctgtccttcccctggctgatggactaattgcctgtca

SEQ ID NO: 109458 - DNA, 120 bp, Artificial Sequence
  ENSG00000099999_52 (sequence is synthesized)
tgggcgtccagctcaaaggccacctcctcctagaagccattctggattcccatggcagatgtggccatccctccctgcaccccttagccatctggcaggagagtgtggcacacctgctca

SEQ ID NO: 109459 - DNA, 120 bp, Artificial Sequence
  ENSG00000099999_53 (sequence is synthesized)
tctttgcctgtggggcgctcttccagagtgaggcctcactgggcagtatcagtccctgggtcactgttcccccagtgcctggttcagggtagactctctgtaaaggtgagtcaaccccca

SEQ ID NO: 109460 - DNA, 120 bp, Artificial Sequence
  ENSG00000099999_54 (sequence is synthesized)
cacctggaggcatctcagggagcagatgcccaatatagatgatcccccattccctgacagtggagccctctttccctgcagcctacattgcagatgcccaggctagcgagggccctggcc

SEQ ID NO: 109461 - DNA, 120 bp, Artificial Sequence
  ENSG00000099999_55 (sequence is synthesized)
tcacctcctggtggcggaccatgctgtcgacacgggccttctccttatccagctccgtgctggcccagcagacctgctggccagcgccctccagccgacccaccaacagctgcacctgcg

SEQ ID NO: 109462 - DNA, 120 bp, Artificial Sequence
  ENSG00000099999_56 (sequence is synthesized)
cctccaactgctgcacctgctcctccagctgctgcacctgcctctccgctgccgccctgcgctcaccttcctcctgcagctgctgggcctttgcctctgcagcattaagtggacatggga

SEQ ID NO: 109463 - DNA, 120 bp, Artificial Sequence
  ENSG00000099999_57 (sequence is synthesized)
tggggtagggcaggggagcgctgtactacctcagacctaggacgggagctcacatcccatctctgggcctcagagtcctcagccacaaaatggggctctagaccccacctgaggtgggtt

SEQ ID NO: 109464 - DNA, 120 bp, Artificial Sequence
  ENSG00000099999_58 (sequence is synthesized)
tggaaaatagaaggcgctttctcggtaggaggtggcaacccagtttggtcatcgccaatagtgtggttggtcaggcccaccctcctgtggctggttcccttcaactttgccctggatgct

SEQ ID NO: 109465 - DNA, 120 bp, Artificial Sequence
  ENSG00000099999_59 (sequence is synthesized)
caggggacagagatggacgatgctcatccagccacacccctggcttgagatgtggcatgggggcctatgatggggctccttacccacagcctgtgtggactcccgctgctgtttcagttc

SEQ ID NO: 109466 - DNA, 120 bp, Artificial Sequence
  ENSG00000099999_60 (sequence is synthesized)
tctctccagggtggccatctttgtctttaggtcacttgtttctatggcagccaagagagaggcccttcagagggtcccatggacctggccggcggccttcatgcccagtgtgccccgtgg

SEQ ID NO: 109467 - DNA, 120 bp, Artificial Sequence
  ENSG00000099999_61 (sequence is synthesized)
agtggaggcagcccatcgcctgcagaggggccgcctgcggccatgggaggagctctagggaggctggtggaagcggctgggcccttacccaccctgcttctcatgggctggctgccatgt

SEQ ID NO: 109468 - DNA, 120 bp, Artificial Sequence
  ENSG00000099999_62 (sequence is synthesized)
gtctacacctctctgggccttggtgtcgtccatggaggcaactgtgatgaggctcagaaagggcaaatccctcaggcctcccatcagtgggcactggccatcttctggtgccaggaactt

SEQ ID NO: 109469 - DNA, 120 bp, Artificial Sequence
  ENSG00000099999_63 (sequence is synthesized)
tgtctctaatggcttttgccacaaccagagaggctgctctgcttggctggaagtgccaggggaataactctctggaagtagccctcaatgactgacagtgcaagtggatacatacctcgg

SEQ ID NO: 109470 - DNA, 120 bp, Artificial Sequence
  ENSG00000099999_64 (sequence is synthesized)
ttccctcactgaccgatggacgagtctgggcaagcgtcctagcccagctcctggtggccccagtgggactgagatcacagtgtcaccaccggatgaacacccccttccttgctgccctcc

SEQ ID NO: 109471 - DNA, 120 bp, Artificial Sequence
  ENSG00000099999_65 (sequence is synthesized)
cttccctgcctcttgcctgtgtcccagcctgggttcttccacacaaaccacttgccctggaagccctgtctcacaaacatccatgcaaaggctgtggcagagcccctgggcaccaggcgt

SEQ ID NO: 109472 - DNA, 120 bp, Artificial Sequence
  ENSG00000099999_66 (sequence is synthesized)
ctggcctctggggcacagacctgtgagcagctgctgtttgtcgtgctcccactcagacaggcactgctcatcctcctccgcctgtcgccgccgtgccccctgctcctgtttcagcgcctg

SEQ ID NO: 109473 - DNA, 120 bp, Artificial Sequence
  ENSG00000099999_67 (sequence is synthesized)
ctccagcttgcccgcctgcttcctcaggccatccttctgcccttcagcctcctccagctgggccctgagggcctccacatgcttactgaggcgcgtcaggtctttcctctgctctgctgc

SEQ ID NO: 109474 - DNA, 120 bp, Artificial Sequence
  ENSG00000099999_68 (sequence is synthesized)
ccagcggcccacggtggcagccggcagtggcctgagccccatgctgtcctgcaccagttgctggaactggcctaaggacgagggcaggttctggctctgacacaggctgatgaccacctt

SEQ ID NO: 109475 - DNA, 120 bp, Artificial Sequence
  ENSG00000099999_69 (sequence is synthesized)
gcccaccttctgcaggcttccctggacgctggcgcatgcgtcacagggcaccagggccgtctcaatggtctgggagtggacactcctggtgttcttgaaggtcgtggctgggaactgcag

SEQ ID NO: 109476 - DNA, 120 bp, Artificial Sequence
  ENSG00000099999_70 (sequence is synthesized)
ggaggctctgacagggatgctctctggctcttggcaggtctggggcaagcctagcactggggaggagggcttgattaacttggtagtcagatattcagggctcctggctggctcgccctt

SEQ ID NO: 109477 - DNA, 120 bp, Artificial Sequence
  ENSG00000099999_71 (sequence is synthesized)
ggtggtgggcttggaggtgggagtctccctttggtttgcccctttctgtgttcagaaaaagacaagggaaagcaggtgagggagagagtagagagggaggtgactggttccctgggggat

SEQ ID NO: 109478 - DNA, 120 bp, Artificial Sequence
  ENSG00000099999_72 (sequence is synthesized)
gttctgtgacagtgtgacagccttgcctgacactcagaccctcaaatgttctctgacaccgacgtgaataagagagaactttctccctctgttactctgactcagcttactacagccagg

SEQ ID NO: 109479 - DNA, 120 bp, Artificial Sequence
  ENSG00000099999_73 (sequence is synthesized)
tctcctctctgcggcccgcaccccaagctccaggcttgatctgattgtatgcatggtgttgggaaggtgatggtgacggtcacagctgctggttactgggctcttgcttactggacctgc

SEQ ID NO: 109480 - DNA, 120 bp, Artificial Sequence
  ENSG00000099999_74 (sequence is synthesized)
ctgctcttgtgtcaccataaccactctcagttttagtttccttcccatcatgggaacagtggttcttccccagtgggtggttgtgtggattacgggatagcccataacaaacaggggtca

SEQ ID NO: 109481 - DNA, 120 bp, Artificial Sequence
  ENSG00000099999_75 (sequence is synthesized)
catgacctccgttgtatagatgaagaaactgcggttcaaagtaggcaagatttttccaaagtcccacagggatgtcagagccagggagcaaggcatgatccccaaggcctgcgttcttaa

SEQ ID NO: 109482 - DNA, 120 bp, Artificial Sequence
  ENSG00000099999_76 (sequence is synthesized)
ccgccacactgtgtggggcttgattgggagggcggtgggagccagtaaaggctgtggtgcacatagtggtaggctaggaagccagagctggggcgaggtgtgaaggccaccacagtgggg

SEQ ID NO: 109483 - DNA, 120 bp, Artificial Sequence
  ENSG00000099999_77 (sequence is synthesized)
agatagaggctgaggctgacccacctgagacagaggctgggacccacctgggggagtggctgctggtggagcgtgcccagcctcagcaggctgtcccagaagcgccgcaccgtgagcccc

SEQ ID NO: 109484 - DNA, 120 bp, Artificial Sequence
  ENSG00000099999_78 (sequence is synthesized)
acggacatgcagggccccgcagcctgtgcagggggcatcatctgctctgagccaaggttctccaagtagctcatacagctttgaagcagcagcaggagcctgcgggcagagatgctaggt

SEQ ID NO: 109485 - DNA, 120 bp, Artificial Sequence
  ENSG00000099999_79 (sequence is synthesized)
tgctggggcccaggctggtgctaacataccctcagaccatacaaccgcagctctggctctggggaactggcccaggcatcaagagcttggagagtctcagaatatgctctgctgggccag

SEQ ID NO: 109486 - DNA, 120 bp, Artificial Sequence
  ENSG00000099999_80 (sequence is synthesized)
cttcaaacctaacccaggggctacttcctcagggaagccctccctggccacagcctcagcttgggagcctcttctgtgtctcctgggtggcacttctgcctggctcttctccactggacc

SEQ ID NO: 109487 - DNA, 120 bp, Artificial Sequence
  ENSG00000099999_81 (sequence is synthesized)
agggagctctgtgaagccaggcctggccttgcctcagttgtatcctgagtccttgaaaagttctgggtgaatggctgccttatatccagtggcccggagcctccacttgatagatgacag

SEQ ID NO: 109488 - DNA, 120 bp, Artificial Sequence
  ENSG00000099999_82 (sequence is synthesized)
agctgagacccagagaggggaagagcttgcccacagacacacattgatagggcagagcagggagtgtgcacagtctcctgaggctagtcaggggcttctgcagggtgagctgcttctgtg

SEQ ID NO: 109489 - DNA, 120 bp, Artificial Sequence
  ENSG00000099999_83 (sequence is synthesized)
acagtggagacctgtgtcaagacagctaggtctctgtcctaacctccaagtttaaaactacagtcaggcatgaattgtaagaaaaaggagtattataataaaaagctaagtttgcatttg

SEQ ID NO: 109490 - DNA, 120 bp, Artificial Sequence
  ENSG00000099999_84 (sequence is synthesized)
attccggcttcccaaaccagagagccagatgctctgggaactctggccttggcatccactgtgatgaccccggctccctcccccaccacaccctacctccctctgctcatggccccttgc

SEQ ID NO: 109491 - DNA, 120 bp, Artificial Sequence
  ENSG00000099999_85 (sequence is synthesized)
gactgtgtggacccctggctgatgctccagcagacctgcccactgtgcaaattcaacgtcctggatggagggagccccatggcaaggaaggtggacggcctctaggagccgtgagaggac

SEQ ID NO: 109492 - DNA, 120 bp, Artificial Sequence
  ENSG00000100003_0 (sequence is synthesized)
gactttactccgggtggcggcgaggacgagtctgtgctccatcagctgccgcacccgccgcctcccgcccccaaaccccatccccgcggttgagccacgatgagcggcagagtcggcgat

SEQ ID NO: 109493 - DNA, 120 bp, Artificial Sequence
  ENSG00000100003_1 (sequence is synthesized)
ctgagccccaggcagaaggaggcattggccaagtttcgggagaatgtccaggatgtgctgccggccctgccgaatccagatgactattttctcctgcgttggctccgagccagaagcttc

SEQ ID NO: 109494 - DNA, 120 bp, Artificial Sequence
  ENSG00000100003_2 (sequence is synthesized)
gacctgcagaagtcggaggccatgctccggaagcatgtggagttccgaaagcaaaaggacattgacaacatcattagctggcagcctccagaggtgatccaacagtatctgtcagggggt

SEQ ID NO: 109495 - DNA, 120 bp, Artificial Sequence
  ENSG00000100003_3 (sequence is synthesized)
atgtgtggctatgacctggatggctgcccagtctggtacgacataattggacctctggatgccaagggtctgctgttctcagcctccaaacaggacctgctgaggaccaagatgcgggag

SEQ ID NO: 109496 - DNA, 120 bp, Artificial Sequence
  ENSG00000100003_4 (sequence is synthesized)
tgtgagctgcttctgcaagagtgtgcccaccagaccacaaagttggggaggaaggtggagaccatcaccataatttatgactgcgaggggcttggcctcaagcatctctggaagcctgct

SEQ ID NO: 109497 - DNA, 120 bp, Artificial Sequence
  ENSG00000100003_5 (sequence is synthesized)
gtggaggcctatggagagtttctctgcatgtttgaggaaaattatcccgaaacactgaagcgtctttttgttgttaaagcccccaaactgtttcctgtggcctataacctcatcaaaccc

SEQ ID NO: 109498 - DNA, 120 bp, Artificial Sequence
  ENSG00000100003_6 (sequence is synthesized)
ttcctgagtgaggacactcgtaagaagatcatggtcctgggagcaaattggaaggaggttttactgaaacatatcagccctgaccaggtgcctgtggagtatgggggcaccatgactgac

SEQ ID NO: 109499 - DNA, 120 bp, Artificial Sequence
  ENSG00000100003_7 (sequence is synthesized)
cctgatggaaaccccaagtgcaaatccaagatcaactacgggggtgacatccccaggaagtattatgtgcgagaccaggtgaaacagcagtatgaacacagcgtgcagatttcccgtggc

SEQ ID NO: 109500 - DNA, 120 bp, Artificial Sequence
  ENSG00000100003_8 (sequence is synthesized)
tcctcccaccaagtggagtatgagatcctcttccctggctgtgtcctcaggtggcagtttatgtcagatggagcggatgttggttttgggattttcctgaagaccaagatgggagagagg

SEQ ID NO: 109501 - DNA, 120 bp, Artificial Sequence
  ENSG00000100003_9 (sequence is synthesized)
cagcgggcaggggagatgacagaggtgctgcccaaccagaggtacaactcccacctggtccctgaagatgggaccctcacctgcagtgatcctggcatctatgtcctgcggtttgacaac

SEQ ID NO: 109502 - DNA, 120 bp, Artificial Sequence
  ENSG00000100003_10 (sequence is synthesized)
acctacagcttcattcatgccaagaaggtcaatttcactgtggaggtcctgcttccagacaaagcctcagaagagaagatgaaacagctgggggcaggcaccccgaaataacaccttctc

SEQ ID NO: 109503 - DNA, 120 bp, Artificial Sequence
  ENSG00000100003_11 (sequence is synthesized)
ctatagcaggcctggccccctcagtgtctccctgtcaatttctaccccttgtagcagtcattttcgcacaaccctgaagcccaaagaaactgggctggaggacagacctcaggagctttc

SEQ ID NO: 109504 - DNA, 120 bp, Artificial Sequence
  ENSG00000100003_12 (sequence is synthesized)
atttcagttaggcagaggaagagcgactgcagtgggtctccgtgtctatcaaatacctaaggagtccccaggagctggctggccatcgtgataggatctgtctgtcctgtaaactgtgcc

SEQ ID NO: 109505 - DNA, 120 bp, Artificial Sequence
  ENSG00000100003_13 (sequence is synthesized)
aacttcacctgtccagggacagcgaagctgggggtggcggggggcatgtaccacagggtggcagcagggaaaaaaattagaaaagggtgaaagattgggacttaacacttcagggaagtc

SEQ ID NO: 109506 - DNA, 120 bp, Artificial Sequence
  ENSG00000100003_14 (sequence is synthesized)
agctgccggggagaaacttgctcctaaatgaacacataagtttagatcgcaatgaggagtagcagggtagctggttgctagagttacggtggggatcagaaactcttccaaacattttag

SEQ ID NO: 109507 - DNA, 120 bp, Artificial Sequence
  ENSG00000100003_15 (sequence is synthesized)
cactgaggctggggtagcttttggcttttcccaggtctcaggaggtggcctgagtcagcacacatcttcccactcggtagacaggctggcctctccctcactttgagactttggcaactc

SEQ ID NO: 109508 - DNA, 120 bp, Artificial Sequence
  ENSG00000100003_16 (sequence is synthesized)
ctgggccacacggcctgcctctttgattactaatgattgtcagtgactcagagcttcctgggacttcgggtacccacccgctgttctccatgcaaacaaagcgccagggaaatgacccac

SEQ ID NO: 109509 - DNA, 120 bp, Artificial Sequence
  ENSG00000100003_17 (sequence is synthesized)
gcagctgcagggagggccagggaggttgggggtgggagtgaatgctaaaagcagatcgtccagtgcccttttcagtgctaccggcctctcaccaagcagtcctccatgtgagcaaccccg

SEQ ID NO: 109510 - DNA, 120 bp, Artificial Sequence
  ENSG00000100003_18 (sequence is synthesized)
agacaaaaatgctaagtgggatcaagagagcagcactcggagagggtgtttgccagtctgagtgtcccgcggtgcccgccaacccgcttcctgactgacctgagcaaggtcttactaagc

SEQ ID NO: 109511 - DNA, 120 bp, Artificial Sequence
  ENSG00000100003_19 (sequence is synthesized)
agtcccatctctgtgggaggcatgcaacgcgtgcagggagttcaggtgccggtcggcgtagccaggcctggaggccccccaggcaggaggccgcccaaaggcggggccggcgtctcgcag

SEQ ID NO: 109512 - DNA, 120 bp, Artificial Sequence
  ENSG00000100003_20 (sequence is synthesized)
actaggggctgggggcggccacagacggcctcgaaaccacagcccttaccccaatcccacgagccccgccaacgaaccacaggtgctgggctttagagaacatgggaaggcggccccaga

SEQ ID NO: 109513 - DNA, 120 bp, Artificial Sequence
  ENSG00000100003_21 (sequence is synthesized)
cctggcgggaacgcctttccctcagagccaggccccggccccgtctgggaagctcatcttgcgaagctgagggagctcagggcaaaggccaggctagcgcggaccggaaggggccgaggc

SEQ ID NO: 109514 - DNA, 120 bp, Artificial Sequence
  ENSG00000100003_22 (sequence is synthesized)
tgcacgggcctctgccagaacgctcaggacatcccggcctgggtttacaacgctgttaggaaaattaaccaatgaataaagcaacgttcagtgcgcagggagtgaaattcaatgcccacc

SEQ ID NO: 109515 - DNA, 120 bp, Artificial Sequence
  ENSG00000100003_23 (sequence is synthesized)
gctaggctcctcgctgcctctcactcaagaggcccaaactcagacggcgtcagggacccggacccagcagccgtttcacgccaatagatagggcgcatgcgcagaaatcctcctcggctc

SEQ ID NO: 109516 - DNA, 120 bp, Artificial Sequence
  ENSG00000100003_24 (sequence is synthesized)
tctagcgtgagctttcccaaggggccacgcccagcttgccttctgattggtccagctggtgggttgtcttccgccatctttgatcagggcactaaggatgctccccacggccttcacagt

SEQ ID NO: 109517 - DNA, 120 bp, Artificial Sequence
  ENSG00000100003_25 (sequence is synthesized)
gacggcggagaccctgccccgccagctgctcagtacgtgccgcgtagcccgtgcgagccaagtgtgagtccgggcgagcgcctgcggagctagcactgggcccagaatgagagggaggcg

SEQ ID NO: 109518 - DNA, 120 bp, Artificial Sequence
  ENSG00000100003_26 (sequence is synthesized)
gaggagcagcgatcacgtggttttagggactgtctaataattccacgccagcattgccggtgtttcagggggtgggaaccgctgcgttccccatcaacttttctcccacccaccaccctc

SEQ ID NO: 109519 - DNA, 120 bp, Artificial Sequence
  ENSG00000100003_27 (sequence is synthesized)
cccaacctacaagcccagctcagcttgaggtaactgctgaccggactgtcctatacagccctacaagacagaggcgcctagggctgaaagcgggggcctccgtagggagccagcgggggc

SEQ ID NO: 109520 - DNA, 120 bp, Artificial Sequence
  ENSG00000100003_28 (sequence is synthesized)
ctcaatagttactcattttctctacctttgatgaaaataagagctaattcttaataaggcctaccgggtatcacgcaaaaaccctgtgcttactattacactttgggttgttgcaaagat

SEQ ID NO: 109521 - DNA, 120 bp, Artificial Sequence
  ENSG00000100003_29 (sequence is synthesized)
taaaggaaataagccgtgcaaagcgcttaagagcttggtataagtaagtgctcgtcaatgttggctactctcattttttttgcagacgtgggaactggggctcagggaggctaacagcca

SEQ ID NO: 109522 - DNA, 120 bp, Artificial Sequence
  ENSG00000100003_30 (sequence is synthesized)
gtaggcggcacagctaggatttgaacccaggattgtctccaacgccgctcaattatacccgccaaggagtcacagagacttagtgaagtgcacacattgctcacctgggtgaactgaggt

SEQ ID NO: 109523 - DNA, 120 bp, Artificial Sequence
  ENSG00000100003_31 (sequence is synthesized)
ccagcgggggaaggcttcctcctgttgtaatcactaaccccaactctgtctcccttgcccgattcattcattcgttaattaattcatccaacatcctgtccccaagaagctcagtctggg

SEQ ID NO: 109524 - DNA, 120 bp, Artificial Sequence
  ENSG00000100003_32 (sequence is synthesized)
gacatactgatccagttaaatgcgagtgcttcctagttatacatggcgactgctgagaagggactccagagtccaggcacctacctcccaggggctcaccgttcactcctctagcctcat

SEQ ID NO: 109525 - DNA, 120 bp, Artificial Sequence
  ENSG00000100003_33 (sequence is synthesized)
ttagagctcgcattaagagcacgggatctggatccacactgtttggattcaaatcacaacttcaccacttagcagctgtgtgttctgggaaaatgacccaccttctctgtgcctccattt

SEQ ID NO: 109526 - DNA, 120 bp, Artificial Sequence
  ENSG00000100003_34 (sequence is synthesized)
tctcacctgtaaaacgggctcccaggctggtgggagggtttcaggtgtaagacatggagagtcctttagcgaacatgtagactggcaataaactcaataaatggtgactgttataattaa

SEQ ID NO: 109527 - DNA, 120 bp, Artificial Sequence
  ENSG00000100003_35 (sequence is synthesized)
gctccccccatgaggcactgggttggtgttagtttgagctgagaccagccgtcccctatcttgcatcccagacccctgcctggttcaggacttaaggtttatgctcctcagaaggcaaga

SEQ ID NO: 109528 - DNA, 120 bp, Artificial Sequence
  ENSG00000100003_36 (sequence is synthesized)
cagaccacaaagtgcaatcatttggcctggactggaacgggcttctgaagtaggacagcctgacaagacttcctgctctctgttccctgcagttggggaggaaggtggagaccatcacca

SEQ ID NO: 109529 - DNA, 120 bp, Artificial Sequence
  ENSG00000100003_37 (sequence is synthesized)
tgttagaactagaagtggaatgccatcagttcaatcctctccttgtatagatgaagaaatctagccttggagacttgtttatggtgacccaactggttaacagcagggtgggactttgat

SEQ ID NO: 109530 - DNA, 120 bp, Artificial Sequence
  ENSG00000100003_38 (sequence is synthesized)
ctcatactcctaggtatgggtgagtcacagtcctaggcgatcacaggggttcaacacgtctgctttctggtccaggtctaactgggtctgtgactggacagatatttcttggggatgctc

SEQ ID NO: 109531 - DNA, 120 bp, Artificial Sequence
  ENSG00000100003_39 (sequence is synthesized)
cttcccagaggtcacagagacagaactggctgggtgggcatgggatcacaaggtaagcagatgctcaaaagtgcagccttcacccctgagtttcactcatctcccagctgaccaaagaat

SEQ ID NO: 109532 - DNA, 120 bp, Artificial Sequence
  ENSG00000100003_40 (sequence is synthesized)
ggacacagactatgagcaggcagtttacacaagaatataagaatgggaaacagacatttgaaaaggtgcttaatctctcttaactttgtaataccattaaaattccccttgactcagcaa

SEQ ID NO: 109533 - DNA, 120 bp, Artificial Sequence
  ENSG00000100003_41 (sequence is synthesized)
tccagatgactattttctcctgcgttggctccgaggctctagagcccaggtcctggttccagctcttccccagcctggctgtggtgccttgttcagggtaaatacttccctaggatcctc

SEQ ID NO: 109534 - DNA, 120 bp, Artificial Sequence
  ENSG00000100003_42 (sequence is synthesized)
ggaagagcaggacaagacctgcctgctgcaagacgtgacatgacagaactctgcatgtggtgttgaaatgcacacatttctactggcatgagggtcaaattcagcctggtgccccaatcc

SEQ ID NO: 109535 - DNA, 120 bp, Artificial Sequence
  ENSG00000100003_43 (sequence is synthesized)
actacctgcactttcccgcttcctggcttcccctactggaactgttccctccacctgagttgcccacctctctcccccgctgcctttgaagtccttcaagcccagcacaaatgccatgtt

SEQ ID NO: 109536 - DNA, 120 bp, Artificial Sequence
  ENSG00000100003_44 (sequence is synthesized)
ttataggaagccgtgtgagaccacctctttcttccctctgctccccagcaaactcctcatccttccatggggcagaagaccatggtggaaagagtgtgtgctctggactcagacagaccc

SEQ ID NO: 109537 - DNA, 120 bp, Artificial Sequence
  ENSG00000100003_45 (sequence is synthesized)
tttccgggaggctttcttcttgtagggtcagtggcacgatggaaagggctctggatagctccttgggagacttggatagctcctgccccggcaccaagccgctgtgcgaccttgggcaaa

SEQ ID NO: 109538 - DNA, 120 bp, Artificial Sequence
  ENSG00000100012_0 (sequence is synthesized)
gggcaaaaggacccagctgggtcagggctgacaaactaggcttggcctcttgcctatagtggccaccactcctcaagccccagccagcaccatgagcggccgagttggagacctgagccc

SEQ ID NO: 109539 - DNA, 120 bp, Artificial Sequence
  ENSG00000100012_1 (sequence is synthesized)
caaacaggcagagaccctggccaagttccgagaaaacgtccaggatgtgcttcctgccctgcccaaccctgatgattatttccttctacgctggctccgagctcggaattttgacttgca

SEQ ID NO: 109540 - DNA, 120 bp, Artificial Sequence
  ENSG00000100012_2 (sequence is synthesized)
gaagtcggaggctttgctccgcaagtacatggagttccggaagaccatggatattgaccatatccttgattggcagcccccagaggtgatccagaagtacatgcctgggggcctgtgtgg

SEQ ID NO: 109541 - DNA, 120 bp, Artificial Sequence
  ENSG00000100012_3 (sequence is synthesized)
ctatgaccgtgatggctgccccgtgtggtatgacatcattgggccacttgatcccaaggggttgctcttctcagtcaccaagcaggacctgctcaagaccaagatgagggactgtgagcg

SEQ ID NO: 109542 - DNA, 120 bp, Artificial Sequence
  ENSG00000100012_4 (sequence is synthesized)
catcctgcatgagtgtgacctgcagacagagaggctagggaagaagattgagaccatcgtgatgatatttgactgtgagggcctgggactgaaacacttctggaaacctctggtagaagt

SEQ ID NO: 109543 - DNA, 120 bp, Artificial Sequence
  ENSG00000100012_5 (sequence is synthesized)
gtaccaggagttctttggcctccttgaagagaattacccagagaccctgaagttcatgctcatcgtgaaagctaccaaactgttccctgtgggctacaacctcatgaagccattcctgag

SEQ ID NO: 109544 - DNA, 120 bp, Artificial Sequence
  ENSG00000100012_6 (sequence is synthesized)
tgaggacactcgcaggaaaattattgtgttgggaaataactggaaggaaggtttgctgaaactcatcagtcctgaggaactgcctgcccagtttgggggcaccctgactgacccagatgg

SEQ ID NO: 109545 - DNA, 120 bp, Artificial Sequence
  ENSG00000100012_7 (sequence is synthesized)
gaaccccaaatgtttaaccaagattaactatggcggggagatccccaagtccatgtacgtgcgggaccaggtgaagactcagtacgagcactcggtgcagatcaaccgcggctcatcaca

SEQ ID NO: 109546 - DNA, 120 bp, Artificial Sequence
  ENSG00000100012_8 (sequence is synthesized)
cagttctcatctgatggtgcggacatcggcttcggagttttcctgaagaccaagatgggggagcgacagcgggcaggggagatgacagatgttctacccagccagcgctataacgcccac

SEQ ID NO: 109547 - DNA, 120 bp, Artificial Sequence
  ENSG00000100012_9 (sequence is synthesized)
atggtgcccgaggatgggaacctcacctgctcagaggccggcgtctatgtcctacgcttcgacaacacctatagctttgtccacgccaagaaggtcagcttcacagtggaggtcctgctc

SEQ ID NO: 109548 - DNA, 120 bp, Artificial Sequence
  ENSG00000100012_10 (sequence is synthesized)
cctgacgagggcatgcagaaatatgataaggagctcacccctgtctaggtggctccctcatttctcagagacctcctaaccctttgatttctctgtttatatcctacactccctccctcc

SEQ ID NO: 109549 - DNA, 120 bp, Artificial Sequence
  ENSG00000100012_11 (sequence is synthesized)
ctgaaattgattgttagtcctcctgactctgtgacgttagtgagtacagaaagagatgccctggggaaaactcatctactgtggtcagatcaagaaaggtatgagaggcacaaccttgga

SEQ ID NO: 109550 - DNA, 120 bp, Artificial Sequence
  ENSG00000100012_12 (sequence is synthesized)
gggtaccaaggttgcagaagaggaaaaagcaagggtaaaggcaagaagtgggtgtcatgaaactcaataaatagcaaaatgaatcccctagcctttgtcctcacctaccctaaggcaggt

SEQ ID NO: 109551 - DNA, 120 bp, Artificial Sequence
  ENSG00000100012_13 (sequence is synthesized)
gtgtatgcttgaattccttccgtatggctgtgagcaacttgggttggagacatatctaaatcctttttacttccactccctatatatagtagatgctcagtgtatatttgtggcattgaa

SEQ ID NO: 109552 - DNA, 120 bp, Artificial Sequence
  ENSG00000100012_14 (sequence is synthesized)
tggaggaccagaaggtagggtgcaggtgactcaacagctgtacatgattaggaggagcctatgtggggtggatttcagcaccttggacaggagcagatgtgtggtggggttggactctct

SEQ ID NO: 109553 - DNA, 120 bp, Artificial Sequence
  ENSG00000100012_15 (sequence is synthesized)
tctggagacccagacaattcagtctccagatttctggcagtggctgtcttttgagggccccagccacaaaggccacatgcctctgataggagctgcctacatcaggctttgtctgacttg

SEQ ID NO: 109554 - DNA, 120 bp, Artificial Sequence
  ENSG00000100012_16 (sequence is synthesized)
cacgctcagcttcccaccctaacccacttcccttgttgcacatagcttatgttttagggactttcctggaagcaaaggcagtcacatctggcataatcataataaagaaaacaactatca

SEQ ID NO: 109555 - DNA, 77 bp, Artificial Sequence
  ENSG00000100012_17 (sequence is synthesized)
caccactcctcaagccccagccagcaccatgagcggccgagttggagacctgagccccaaacaggcagagaccctgg

SEQ ID NO: 109556 - DNA, 120 bp, Artificial Sequence
  ENSG00000100012_18 (sequence is synthesized)
caccactcctcaagccccagccagcaccatgagcggccgagttggagacctgagccccaaacaggcagagaccctggccaagatggagtctctgtcatccaggctggagtgctgtggagc

SEQ ID NO: 109557 - DNA, 120 bp, Artificial Sequence
  ENSG00000100012_19 (sequence is synthesized)
caagtgatggcataccaaatggtacgaaaatgcaagctaagtaggcctttacccctccctgccagtaactaatttttgtctgtgtgagtaactggcctgtgtgtaagaggactcaccccc

SEQ ID NO: 109558 - DNA, 120 bp, Artificial Sequence
  ENSG00000100012_20 (sequence is synthesized)
tacgtggtctccagttaattctttttcccatttgggctcctgaccgccttgccatgctgcttctaagaggggttatctatactcagagggcctagggcagaccaaggaagggaaagaagt

SEQ ID NO: 109559 - DNA, 84 bp, Artificial Sequence
  ENSG00000100012_21 (sequence is synthesized)
actcagagggcctagggcagaccaaggaagggaaagaagttttggaggtttgtttgtttgttttttagagacagggctttgctt

SEQ ID NO: 109560 - DNA, 120 bp, Artificial Sequence
  ENSG00000100012_22 (sequence is synthesized)
ctcactgcaaccttgagctcttgggctcaagtgattctcccctctcagcctcctgagtggctgagaccacaggtacacatcaccatgcctgggttttttttctttctttctttctttctt

SEQ ID NO: 109561 - DNA, 120 bp, Artificial Sequence
  ENSG00000100012_23 (sequence is synthesized)
ggctggtctcaaattcctgacctcaagcaatcctcctaccttggcctcccagtgctaggattacatgtgtgagccaccactcctggtctgggctttttttttttttttttttaggagaat

SEQ ID NO: 109562 - DNA, 120 bp, Artificial Sequence
  ENSG00000100012_24 (sequence is synthesized)
gtaaggcatttgtttagtgtttactgagcatctactgcatgccaagctctgctcaggaggccaagagagcaggataggagtgagccctgcacctggggtttggcctggctggggagccct

SEQ ID NO: 109563 - DNA, 120 bp, Artificial Sequence
  ENSG00000100012_25 (sequence is synthesized)
agcctcaggaagcaggactgccctggaccccaggaggcccctgctcaacctgcgacaagactgaaaggctccccagatgcactgtgacggtcaagggagagaaatgggtgacctgggatc

SEQ ID NO: 109564 - DNA, 120 bp, Artificial Sequence
  ENSG00000100012_26 (sequence is synthesized)
ctggtggcttcagatctcattgggggaaggagcaagggaccccaggggtcagaggcattgggggggtagggctgtcagagggcacccagcagagtgactcacaggctatgaggaaagaag

SEQ ID NO: 109565 - DNA, 120 bp, Artificial Sequence
  ENSG00000100012_27 (sequence is synthesized)
tctcctcttgcttgtatcttcaggatgccaagacctgcagcccaggcctggggtggtggttatcccggagcggccttaccaggtgcacagctggccaagggaggcttggtcatgggcaga

SEQ ID NO: 109566 - DNA, 120 bp, Artificial Sequence
  ENSG00000100012_28 (sequence is synthesized)
gagggcaggaggaaggcccttgctccaccaccccctctcccaagggagtcctatgcccagaacttaccaagtagcaagactagagcaaccagcagaagacccttgggggcagccatcatg

SEQ ID NO: 109567 - DNA, 120 bp, Artificial Sequence
  ENSG00000100012_29 (sequence is synthesized)
ctgagacctggctttgccatttaccctctgtgagcaaggccctcccctgcaggacctcagctttctcacctgagacaatagcactgtcttccagggagggacagtgctttttataccatg

SEQ ID NO: 109568 - DNA, 120 bp, Artificial Sequence
  ENSG00000100014_0 (sequence is synthesized)
gcccgcgagggaggccgggcggcccggcaagcggcgctgcggggtaggctgctttcctgaggccggactcaacgggtctcggctgagccaccgggtgagctcaccgcccagcccaaacca

SEQ ID NO: 109569 - DNA, 120 bp, Artificial Sequence
  ENSG00000100014_1 (sequence is synthesized)
ggagattgcgagggagcgatgcggtgcagcgcgtgttcttggggaagatcccgactaagccattttccagtggcacctcttccatcatgagttcctgaggcagtccgatggggctacttt

SEQ ID NO: 109570 - DNA, 120 bp, Artificial Sequence
  ENSG00000100014_2 (sequence is synthesized)
attccagaacaatcacaatttgcttgtaaatgcatcacgaagaggcagcccagaatgaagaaagcaagcaggagtgttggctcagtgcctaaagtgtctgcaataagtaaaacgcaaaca

SEQ ID NO: 109571 - DNA, 120 bp, Artificial Sequence
  ENSG00000100014_3 (sequence is synthesized)
gcagaaaaaattaaacctgaaaacagctcttcagcatctacgggaggcaaacttgtaaaacctggaacagcagcatcattgtcaaagaccaagagcagtgatgaccttttagctggaatg

SEQ ID NO: 109572 - DNA, 120 bp, Artificial Sequence
  ENSG00000100014_4 (sequence is synthesized)
gccggaggggtaacggtgactaatggtgttaaaggaaagaaaagcacctgcccatctgcagcaccttcagcatctgcccctgccatgaccaccgtggagaacaaatccaagattagcaca

SEQ ID NO: 109573 - DNA, 120 bp, Artificial Sequence
  ENSG00000100014_5 (sequence is synthesized)
ggcacagcttcttcaaccaagcggagcacttctacaggtaataaagaatccagttctactagagaaagattacgtgaacgtacccgattaaaccagagcaaaaaactaccttctgcaggt

SEQ ID NO: 109574 - DNA, 120 bp, Artificial Sequence
  ENSG00000100014_6 (sequence is synthesized)
cagggagctaatgacatggcattggccaaacgttcccgcagtcgaactgctacagaatgtgacgttcgtatgagcaagtctaagtcagacaatcagatcagtgacagagctgctttggag

SEQ ID NO: 109575 - DNA, 120 bp, Artificial Sequence
  ENSG00000100014_7 (sequence is synthesized)
gccaaagtgaaggatcttctcacgctggcaaaaaccaaagacgtagaaattttacatttgagaaatgaactgcgagacatgcgtgcccagctgggcattaatgaggatcattctgagggt

SEQ ID NO: 109576 - DNA, 120 bp, Artificial Sequence
  ENSG00000100014_8 (sequence is synthesized)
gatgaaaaatctgagaaggaaactattatggctcaccagccgactgatgtggagtccactttattgcagttgcaggaacagaatactgccatccgtgaagaactcaaccagctgaaaaat

SEQ ID NO: 109577 - DNA, 120 bp, Artificial Sequence
  ENSG00000100014_9 (sequence is synthesized)
gaaaacagaatgttaaaggacaggttgaatgcattgggcttttccctagagcagaggttagacaattctgaaaaactgtttggctatcagtccctgagcccagaaatcacccctggtaac

SEQ ID NO: 109578 - DNA, 120 bp, Artificial Sequence
  ENSG00000100014_10 (sequence is synthesized)
cagagcgatggaggaggaactctgacttcttcagtggaaggctctgcccctggctcagtggaggatctcttgagtcaggatgaaaatacactaatggaccatcagcacagtaactccatg

SEQ ID NO: 109579 - DNA, 120 bp, Artificial Sequence
  ENSG00000100014_11 (sequence is synthesized)
gacaatttagacagtgagtgcagtgaggtctaccagcccctcacatcgagcgatgatgcgctggatgcaccatcctcctcagagtcggaaggcatccccagcatagagcgctcccggaag

SEQ ID NO: 109580 - DNA, 120 bp, Artificial Sequence
  ENSG00000100014_12 (sequence is synthesized)
gggagcagcgggaatgccagtgaagtgtccgtggcttgcctgactgaacggatacaccagatggaagagaaccaacacagtacaagtgaggaactccaggcaaccctgcaagagctagct

SEQ ID NO: 109581 - DNA, 120 bp, Artificial Sequence
  ENSG00000100014_13 (sequence is synthesized)
gatttacagcagattacccaggaactgaatagtgaaaacgaaaggcttggagaagagaaggttattctgatggagtctttatgtcagcagagcgataagttggaacactttagtcgacag

SEQ ID NO: 109582 - DNA, 120 bp, Artificial Sequence
  ENSG00000100014_14 (sequence is synthesized)
attgaatacttccgctctcttctagatgagcatcacatttcttatgtcatagatgaagatgtaaaaagtgggcgctatatggaattagagcaacgttacatggacctcgctgagaatgcc

SEQ ID NO: 109583 - DNA, 120 bp, Artificial Sequence
  ENSG00000100014_15 (sequence is synthesized)
cgttttgaacgggagcagcttcttggtgtccagcagcatttaagcaatactttgaaaatggcagaacaagacaataaggaagctcaagaaatgataggggcactcaaagaacgcagtcac

SEQ ID NO: 109584 - DNA, 120 bp, Artificial Sequence
  ENSG00000100014_16 (sequence is synthesized)
catatggagcgaattattgagtctgagcagaaaggaaaagcagccttggcagccacgttagaggaatacaaagccacagtggccagtgaccagatagagatgaatcgcctgaaggctcag

SEQ ID NO: 109585 - DNA, 120 bp, Artificial Sequence
  ENSG00000100014_17 (sequence is synthesized)
ctggagaatgaaaagcagaaagtggcagagctgtattctatccataactctggagacaaatctgatattcaggacctcctggagagtgtcaggctggacaaagaaaaagcagagactttg

SEQ ID NO: 109586 - DNA, 120 bp, Artificial Sequence
  ENSG00000100014_18 (sequence is synthesized)
gctagtagcttgcaggaagatctggctcatacccgaaatgatgccaatcgattacaggatgccattgctaaggtagaggatgaataccgagccttccaagaagaagctaagaaacaaatt

SEQ ID NO: 109587 - DNA, 120 bp, Artificial Sequence
  ENSG00000100014_19 (sequence is synthesized)
gaagatttgaatatgacgttagaaaaattaagatcagacctggatgaaaaagaaacagaaaggagtgacatgaaagaaaccatctttgaacttgaagatgaagtagaacaacatcgtgct

SEQ ID NO: 109588 - DNA, 120 bp, Artificial Sequence
  ENSG00000100014_20 (sequence is synthesized)
gtgaaacttcatgacaacctcattatttctgatctagagaatacagttaaaaaactccaggaccaaaagcacgacatggaaagagaaataaagacactccacagaagacttcgggaagaa

SEQ ID NO: 109589 - DNA, 120 bp, Artificial Sequence
  ENSG00000100014_21 (sequence is synthesized)
tctgcggaatggcggcagtttcaggctgatctccagactgcagtagtcattgcaaatgacattaaatctgaagcccaagaggagattggtgatctaaagcgccggttacatgaggctcaa

SEQ ID NO: 109590 - DNA, 120 bp, Artificial Sequence
  ENSG00000100014_22 (sequence is synthesized)
gaaaaaaatgagaaactcacaaaagaattggaggaaataaagtcacgcaagcaagaggaggagcgaggccgggtatacaattacatgaatgccgttgagagagatttggcagccttaagg

SEQ ID NO: 109591 - DNA, 120 bp, Artificial Sequence
  ENSG00000100014_23 (sequence is synthesized)
cagggaatgggactgagtagaaggtcctcgacttcctcagagccaactcctacagtaaaaaccctcatcaagtcctttgacagtgcatctcaagtaccaaaccctgctgcagctgcaatt

SEQ ID NO: 109592 - DNA, 120 bp, Artificial Sequence
  ENSG00000100014_24 (sequence is synthesized)
cctcgaacgcccctgagcccaagtcctatgaaaacccctcctgcagcagctgtgtcccctatgcagagacattccataagtggaccaatctcaacatccaaacccctgacagccctgtca

SEQ ID NO: 109593 - DNA, 120 bp, Artificial Sequence
  ENSG00000100014_25 (sequence is synthesized)
gataagagaccaaactatggggaaatccctgttcaagagcatctgttaagaacatcttcagccagccggcctgcttccctgccaagagtgcctgcgatggaaagtgccaagaccctctca

SEQ ID NO: 109594 - DNA, 120 bp, Artificial Sequence
  ENSG00000100014_26 (sequence is synthesized)
gtgtctcgacgaagtagtgaagaagtgaaacgggacatttctgcacaggagggagcgtcgccagcctctctgatggctatgggaaccacgtctccacagctttccctgtcctcttctcca

SEQ ID NO: 109595 - DNA, 120 bp, Artificial Sequence
  ENSG00000100014_27 (sequence is synthesized)
acggcatctgtgactcccaccacccgaagccgaataagagaagaaaggaaagaccctctctcagcattggccagagaatatggaggatcaaagaggaacgccttgctgaagtggtgtcag

SEQ ID NO: 109596 - DNA, 120 bp, Artificial Sequence
  ENSG00000100014_28 (sequence is synthesized)
gcagcagctggaatgatgggctggccttctgtgccctcctgcatacatatctccctgcccacattccatatcaagaactgaacagccaggataagagaaggaacttcatgctggctttcc

SEQ ID NO: 109597 - DNA, 120 bp, Artificial Sequence
  ENSG00000100014_29 (sequence is synthesized)
aggcagctgaaagtgtcggcatcaaatccacactggacattaatgaaatggtacggactgaacgacccgactggcagaacgtgatgctgtatgtgacggcgatctacaagtactttgaga

SEQ ID NO: 109598 - DNA, 120 bp, Artificial Sequence
  ENSG00000100014_30 (sequence is synthesized)
cctgagcatgccgggaggagccgccccaatagcgggggtacccctccacagcgaccgagcgacaccgacgccattagctacgcacccctgtaaagcttccagcaactctgggctgcccca

SEQ ID NO: 109599 - DNA, 120 bp, Artificial Sequence
  ENSG00000100014_31 (sequence is synthesized)
cagcgtgtgagcctccagctcggggcttccgtattggaagaactcagccgtgtggcccacagctcccaccagggcccctcccacatgacccgtccattcaggtcatgtgggctcagcaca

SEQ ID NO: 109600 - DNA, 120 bp, Artificial Sequence
  ENSG00000100014_32 (sequence is synthesized)
catcctgcaggccggtggctgctggagttttccttctgaagagaatattgaactacactagtgctccagggcaccaaacaaaaagggctcatgcacagctgaatttgggaaaagggattc

SEQ ID NO: 109601 - DNA, 120 bp, Artificial Sequence
  ENSG00000100014_33 (sequence is synthesized)
agttctgtgggaaactcactagggttgatgaaggctcggccgcggcacttcctgactattggctggggtgggttccggtgctggtgagaacccagaaggagagtcagcgcctggcagttc

SEQ ID NO: 109602 - DNA, 120 bp, Artificial Sequence
  ENSG00000100014_34 (sequence is synthesized)
ccagcgccctgggcccttcaccgtcctagtttggaggagcatgttcaccacagacgtgggtcagctgccccacacctgacggggctgtcccggccgacacaatccaggcgtgttcagcct

SEQ ID NO: 109603 - DNA, 120 bp, Artificial Sequence
  ENSG00000100014_35 (sequence is synthesized)
gagctaggagagtatctagagggcgtggtgcgggcacgccagggctggggtgctgctgctgcactcacgcggctgggctttctggcgggaagcagttacgggggccccttgcctggactc

SEQ ID NO: 109604 - DNA, 120 bp, Artificial Sequence
  ENSG00000100014_36 (sequence is synthesized)
agcgacctgtcttccagcctggaaggggtttggagtcccagctctggctttagatttcttcatcataaggagtttttctagttaacatttttgttttgttacgagcaatgctggaaaagg

SEQ ID NO: 109605 - DNA, 120 bp, Artificial Sequence
  ENSG00000100014_37 (sequence is synthesized)
tcgctcctgttctgttagtaccaaagttacattgtttcaataagcatagaaatctaaacaacatctgtacattagcatggtgagagcaaggaataaagcaggaaataggagaaaagtaaa

SEQ ID NO: 109606 - DNA, 120 bp, Artificial Sequence
  ENSG00000100014_38 (sequence is synthesized)
caactttagggagcccaggcagtgtcatttaaactcactgagtcactaagacataattctcctaggccagagttaaagaaagtgccttaactcttcttgtgagggcagccactgccctcc

SEQ ID NO: 109607 - DNA, 120 bp, Artificial Sequence
  ENSG00000100014_39 (sequence is synthesized)
gtggccaaggcaggacctccaagactcagtggttgagttgtctcctaccaccatgcccgccctccccaggtactgggtccatgccccctgtgcccaccctccccaggtgctgggtccatg

SEQ ID NO: 109608 - DNA, 120 bp, Artificial Sequence
  ENSG00000100014_40 (sequence is synthesized)
ctgtttgaaccaaagccttatttaaaggtggtcactggagatgctctcaggccagaactcaacagctatttttgggaatagggatctcccgtgtgcctaacgcagtagctattggtttga

SEQ ID NO: 109609 - DNA, 120 bp, Artificial Sequence
  ENSG00000100014_41 (sequence is synthesized)
acaatgtccagacaagacctgtacctttgagaatataactgtgtttggcacctgcatagcaccatgaggaagaccagccaccagtggaagcggggtcactgccccacagactggatgcaa

SEQ ID NO: 109610 - DNA, 120 bp, Artificial Sequence
  ENSG00000100014_42 (sequence is synthesized)
tgaggggctcacaggaggcccagccagcccgattgtgggctgaggggtctgcattcaagcacgatgttctagaataggagtttaacgtgtctacgtaacctagaatgtggttattaggaa

SEQ ID NO: 109611 - DNA, 120 bp, Artificial Sequence
  ENSG00000100014_43 (sequence is synthesized)
aggggctgtgcatgtgggtgcagctggcggcacacctggtcaccagatggccagaagctgcccatcagccctgcccagatgtcagcctgggagctcaggctgctgccgctggctggatgc

SEQ ID NO: 109612 - DNA, 120 bp, Artificial Sequence
  ENSG00000100014_44 (sequence is synthesized)
cctttggtgaaatgcctgttttcagctaagaaaggagaggccaggcaagcaaagtcatgccacaaagcatatcagagacccccgcagactcctggccccgtcccgccccctgtctgagtt

SEQ ID NO: 109613 - DNA, 120 bp, Artificial Sequence
  ENSG00000100014_45 (sequence is synthesized)
gtgtttttgttgctgttcctctgttgatggccagctctgctgttggcatgagccactgatgttcatgtgagaattactgtttttaagtgtctctccacttaggtgtcctcagttcccact

SEQ ID NO: 109614 - DNA, 120 bp, Artificial Sequence
  ENSG00000100014_46 (sequence is synthesized)
tttgctctcatttgccttcacagaggccactccacctgtccggatccagctgtctggtcatggtttggtttatttattttgtccttcaggggctgttttgccctaagaatgagggggctt

SEQ ID NO: 109615 - DNA, 120 bp, Artificial Sequence
  ENSG00000100014_47 (sequence is synthesized)
cccctggtctgcagttcccaactttatcccttgctggccatgcgagcccagccctggtgcctcatgggatgggggggtaggggtccccaggatcttctggaggaaggtggccatggatgg

SEQ ID NO: 109616 - DNA, 120 bp, Artificial Sequence
  ENSG00000100014_48 (sequence is synthesized)
atgggctgtatctgtgttttccctctgggagtctcatgggtccagcatcaggcctgaggtcagcaacagggaaagagggtgggcacggggagggcttggccccgcctatctagaggcttg

SEQ ID NO: 109617 - DNA, 120 bp, Artificial Sequence
  ENSG00000100014_49 (sequence is synthesized)
cctcgggcccctccttggggaaggtttgcgtgcagagctgcaagggagagggttccagaagcattgccttttgcctcgtctaataggatccttaggacactgtgggctttaggaatgact

SEQ ID NO: 109618 - DNA, 120 bp, Artificial Sequence
  ENSG00000100014_50 (sequence is synthesized)
atagatgctcacacgtgtttaaagtgacatttggagatgctctcagtcctgtggcatctggcacgaagtctccaagaagccactttgcctcttctcccttcaagcacaagctttactgca

SEQ ID NO: 109619 - DNA, 120 bp, Artificial Sequence
  ENSG00000100014_51 (sequence is synthesized)
aaagggccagtcgcgtttctatttctctcgatcccaggcttctgcggaccgacgatacgtttaaatgttgttctagtaaatattcttgaatgtattaaaatggctgaaacaacaagcttg

SEQ ID NO: 109620 - DNA, 120 bp, Artificial Sequence
  ENSG00000100014_52 (sequence is synthesized)
ggcttttctagcttgccctccactccctgccgtccctctgacgtcgcataaaccagaacccagctccctcctgggactggctgtggagagaagggcacctctgagccagcctgtggccct

SEQ ID NO: 109621 - DNA, 120 bp, Artificial Sequence
  ENSG00000100014_53 (sequence is synthesized)
accccaaggcgcacttcctcatgtgggcagatcctgaccaggagtccagggtggcctcccctgggccacagcacatcaccgtgtggcctggggctgtgggacagtgagccctgtaaccac

SEQ ID NO: 109622 - DNA, 120 bp, Artificial Sequence
  ENSG00000100014_54 (sequence is synthesized)
tagggttctgtgacagatgccaagaccccagagaccgtggcagagctacccccaggagagcggaagcccctacacagcccagacacatgccttccctgggggctggggagtgtgtctcga

SEQ ID NO: 109623 - DNA, 120 bp, Artificial Sequence
  ENSG00000100014_55 (sequence is synthesized)
ggggttttgtttgttttgaggcatgtatcatcttggaaataattgtcaggatgtataaaatagagaaaaagaaaaaaggtatcctacccagaggcaaccagataaacttttttgcctgtg

SEQ ID NO: 109624 - DNA, 120 bp, Artificial Sequence
  ENSG00000100014_56 (sequence is synthesized)
cacagcttcttcaaccaagcggagcacttctacaggtagaggatgaataccgagccttccaagaagaagctaagaaacaaattgaagatttgaatatgacgttagaaaaattaagatcag

SEQ ID NO: 109625 - DNA, 120 bp, Artificial Sequence
  ENSG00000100014_57 (sequence is synthesized)
atcacagctcagtgcagctttgacctcccgggctcaagcgatcctctcacttcaaccttcccaataactaggactacaggcatgtgccactttgcccagaccaagagcagtgatgacctt

SEQ ID NO: 109626 - DNA, 120 bp, Artificial Sequence
  ENSG00000100014_58 (sequence is synthesized)
gtttcatccagatagttccttggggacagggtcagggaagaagccctacccagagggccactggagaggatccaggcccgcagcccccaccccagtcccctgcttcccccatgtcagccc

SEQ ID NO: 109627 - DNA, 120 bp, Artificial Sequence
  ENSG00000100014_59 (sequence is synthesized)
ccagccctgcagacaaccctcgaagatccctgtgggggaagctcatttgatgagtgttcctaactagcttttgggggtgcgtgttcaggtgccacagcattggtgcggcagaagtaggat

SEQ ID NO: 109628 - DNA, 120 bp, Artificial Sequence
  ENSG00000100014_60 (sequence is synthesized)
tcttcaggagtgaggaaagaacgggtgttggtgggtcactgcagcaggtcaggaggggagggtggccgggcctagtgcagggtacttggtgcagatgcagaagctcaggctcccagcata

SEQ ID NO: 109629 - DNA, 120 bp, Artificial Sequence
  ENSG00000100023_0 (sequence is synthesized)
ggaagtggtcacggaactcggctgcggctccatggtctgagttgtcagccgttgttttttcgtgctcgctagtcgccgccgccgctccgccatggggaagcgacagcaccaaaaggacaa

SEQ ID NO: 109630 - DNA, 120 bp, Artificial Sequence
  ENSG00000100023_1 (sequence is synthesized)
aatgtacattacctgtgctgaatacactcacttttatggtggcaagaagccagatctcccacaaacaaattttcgtcgtttaccttttgaccactgcagtctctctctgcagccctttgt

SEQ ID NO: 109631 - DNA, 120 bp, Artificial Sequence
  ENSG00000100023_2 (sequence is synthesized)
ctacccagtctgcactcccgatggcatcgtctttgacttactgaacattgttccatggcttaagaagtacgggaccaaccccagcaatggagagaagctggacgggaggtccctgatcaa

SEQ ID NO: 109632 - DNA, 120 bp, Artificial Sequence
  ENSG00000100023_3 (sequence is synthesized)
gctgaacttttccaagaacagtgaggggaagtaccactgcccagtgctgtttaccgtgttcaccaacaacacccacatcgtggctgtgaggacgaccggcaacgtctacgcctatgaggc

SEQ ID NO: 109633 - DNA, 120 bp, Artificial Sequence
  ENSG00000100023_4 (sequence is synthesized)
agtggaacagctaaatatcaaggccaagaacttccgggacctgctgaccgacgagcccttctcccggcaggacatcatcaccctccaggaccccaccaatttggacaagttcaatgtctc

SEQ ID NO: 109634 - DNA, 120 bp, Artificial Sequence
  ENSG00000100023_5 (sequence is synthesized)
taacttctatcatgtgaagaataacatgaaaataatagacccagatgaagagaaggccaaacaggacccgtcttattatctgaaaaatacaaatgccgagacccgagagaccctgcagga

SEQ ID NO: 109635 - DNA, 120 bp, Artificial Sequence
  ENSG00000100023_6 (sequence is synthesized)
gctctacaaggagttcaaaggggacgagattctggcagccaccatgaaggccccggagaagaagaaagtggacaagctgaacgctgcccactattccacagggaaggtcagcgcttcctt

SEQ ID NO: 109636 - DNA, 120 bp, Artificial Sequence
  ENSG00000100023_7 (sequence is synthesized)
cacctccaccgcgatggtcccggagaccacacatgaagcagctgccatcgacgaggatgtgctgcgctaccagtttgtgaagaagaagggctacgtgcggctgcacaccaacaagggcga

SEQ ID NO: 109637 - DNA, 120 bp, Artificial Sequence
  ENSG00000100023_8 (sequence is synthesized)
cctcaacctggagctgcactgcgacctgacaccaaaaacctgcgaaaacttcatcaggctttgcaagaagcattattacgatggcaccatcttccacagatccatccggaactttgtgat

SEQ ID NO: 109638 - DNA, 120 bp, Artificial Sequence
  ENSG00000100023_9 (sequence is synthesized)
ccaagggggcgaccccacaggcacaggcacgggtggggagtcatactgggggaagcccttcaaagacgagttccggcccaacctctcgcacacgggccgcggcatcctcagcatggccaa

SEQ ID NO: 109639 - DNA, 120 bp, Artificial Sequence
  ENSG00000100023_10 (sequence is synthesized)
ctccgggcccaacagcaacaggtctcaattcttcatcacgtttcgctcctgtgcctacctggacaagaagcataccatctttggacgggttgttgggggctttgacgtactgacagccat

SEQ ID NO: 109640 - DNA, 120 bp, Artificial Sequence
  ENSG00000100023_11 (sequence is synthesized)
ggagaatgtggagagtgaccccaaaactgaccgccctaaggaggagatccgcattgatgccactacagtgttcgtggacccctatgaggaggccgatgcccagattgcgcaggagcggaa

SEQ ID NO: 109641 - DNA, 120 bp, Artificial Sequence
  ENSG00000100023_12 (sequence is synthesized)
gacacagctcaaggtagccccggagaccaaagtgaagagcagccagccccaggcagggagccagggcccccagaccttccgccagggcgtgggcaagtacatcaacccagcagccacgaa

SEQ ID NO: 109642 - DNA, 120 bp, Artificial Sequence
  ENSG00000100023_13 (sequence is synthesized)
gcgagcagcagaggaagagccctcaaccagtgccactgtccccatgtccaagaagaagcccagtcggggttttggggacttcagctcctggtagcagcagcaacttgcaggctgtacctc

SEQ ID NO: 109643 - DNA, 120 bp, Artificial Sequence
  ENSG00000100023_14 (sequence is synthesized)
tgcccttccttttctcatcaatcactgatgctgaagctgcaggcctgagccctttgtctccctggatgctgggtggcgcctcatctgcatctctgcctcaccccatccactgccacaggc

SEQ ID NO: 109644 - DNA, 120 bp, Artificial Sequence
  ENSG00000100023_15 (sequence is synthesized)
tgcctgatgaccactagaggtatgtctgcccctcgtcaccctgctgcacaccaatctgtggcccttcatcatgctaagaacaagaactgcgccatggctggctccttctcttctccagcc

SEQ ID NO: 109645 - DNA, 120 bp, Artificial Sequence
  ENSG00000100023_16 (sequence is synthesized)
catccctctgcagcctgtcatccctgtctgtgaccattggtcgggcccctgggctctagagtgacttttgacgccctccatccctcccgccaggcactgtcctccgcaaggcctggtgca

SEQ ID NO: 109646 - DNA, 120 bp, Artificial Sequence
  ENSG00000100023_17 (sequence is synthesized)
gccctggcagtaactggcttgtaagaggctcagacaccaagctgggcctgcagaggaggggcacagtaggacacagtgactgcccaggtgtccacacacctgtaggcctctgagccagcg

SEQ ID NO: 109647 - DNA, 120 bp, Artificial Sequence
  ENSG00000100023_18 (sequence is synthesized)
tccagggtacaggtgcgggtggtggggatgaaggcctgaccagggagggagaagcaggtttggagaggaccctgtgcccaccctgacagacaccctggctggccctgactgactgtattc

SEQ ID NO: 109648 - DNA, 120 bp, Artificial Sequence
  ENSG00000100023_19 (sequence is synthesized)
tctggccacattcaagtcccccattggtgggggcagagaagtaggaccaggccatccttggctccagagctcgaagaccccaagacagccctctgctctcagcggcgccacagagagcct

SEQ ID NO: 109649 - DNA, 120 bp, Artificial Sequence
  ENSG00000100023_20 (sequence is synthesized)
cttctgcatcaggacatggcctcgtccactgagggcacgatttaaacatttgacatcagaagctttatttgtaaacctcacacagataaggaccaagggctggcggtgtggccagaggac

SEQ ID NO: 109650 - DNA, 120 bp, Artificial Sequence
  ENSG00000100023_21 (sequence is synthesized)
aggggaagctgaaggccccgtgcttgagctcggcagtcctgctccttgcagtgaagccaccatgggtgaccgtccagcctcacccggtggcctgcacagtgagggaagggcttcagggcc

SEQ ID NO: 109651 - DNA, 120 bp, Artificial Sequence
  ENSG00000100023_22 (sequence is synthesized)
atctgctcccagggcaggggacaggccaccaaggacctttggcaaatgaaggtttacatttctgtagtttgtttgttttagagcttaatttgtagttttttagctattaaaaccatttga

SEQ ID NO: 109652 - DNA, 120 bp, Artificial Sequence
  ENSG00000100023_23 (sequence is synthesized)
atttttaacgacctgatgagggcatcaggtaaattaaaggattttgggaagattcttattttcaattctaatatctgacagatgccatcaagaataagcattaaggtataaaaaatactg

SEQ ID NO: 109653 - DNA, 120 bp, Artificial Sequence
  ENSG00000100023_24 (sequence is synthesized)
tgtgtataaaacaatgccaaaccacattcctacagcaaatgcactgtgccatttataaccctgacatcacctcccaaggctctcaaggaagatttattttaaataacttaaatagaagtc

SEQ ID NO: 109654 - DNA, 120 bp, Artificial Sequence
  ENSG00000100023_25 (sequence is synthesized)
ctagatgatattgtttaggaatttaagagggtggtggatatggtcctgtgaatagcacttcccctgaagccagctcatggtctgttcatttggtttaaaaatgagcttgtattttgcaga

SEQ ID NO: 109655 - DNA, 120 bp, Artificial Sequence
  ENSG00000100023_26 (sequence is synthesized)
agcccaacaaaaaaaaagtgataaaagtgttgttggtataaattacaaaaaaaaaaaaaaatacaaaagtcataagactactagtaaaaaatgttcaatcaatgccgtcacaaaagacag

SEQ ID NO: 109656 - DNA, 120 bp, Artificial Sequence
  ENSG00000100023_27 (sequence is synthesized)
tacaaaaaccaaagtgcccaaatagaaggagcagcgaacttgcccaaaacagaaaagctctaaatagaactttagtatatacaaaaaccactcggtagagttttagaagtttcttccatg

SEQ ID NO: 109657 - DNA, 120 bp, Artificial Sequence
  ENSG00000100023_28 (sequence is synthesized)
taagtgaagcatcttgagtcactcaggacttggctgtcctcgcacccgtggcaggctggggacggcacgaacctccaactgtttcccctagtccccggggcatcggaggctgggttccca

SEQ ID NO: 109658 - DNA, 120 bp, Artificial Sequence
  ENSG00000100023_29 (sequence is synthesized)
catgggagaggaatgaagactcactcaaagggaagggtcagtttaagataagttttcagtgaactccttcttccacccgggaaggtgtctttcagcctcttcacagtctcaagacaattg

SEQ ID NO: 109659 - DNA, 120 bp, Artificial Sequence
  ENSG00000100023_30 (sequence is synthesized)
actgaagccacaggcattgctaacttcatgggccagcttgtgggcggagcctcttcaggcttgagaccatggcagcaagagccctgcagcgtgcagtgacccctgcgctctgggtggctg

SEQ ID NO: 109660 - DNA, 120 bp, Artificial Sequence
  ENSG00000100023_31 (sequence is synthesized)
cacgcgagctcaggaggacaggatgtgctgggccagcctaaaccctcgggggagactagcgcagggataaagcagcttgcagggccatagccggatgtggaggcttccaagacagtacaa

SEQ ID NO: 109661 - DNA, 120 bp, Artificial Sequence
  ENSG00000100023_32 (sequence is synthesized)
agatttccttcctttcctaagtggaagatgtgctttaaaggaacttctgcctctgtcactcctgctgagtggatgcatctcagtgccatgcccaccagggcagcggcatttcccacctgc

SEQ ID NO: 109662 - DNA, 120 bp, Artificial Sequence
  ENSG00000100023_33 (sequence is synthesized)
caaggcttccaggcttgggcaaagagatggcacccaaaggcatgctgtgtgtgggcagtgagctcgagtgggcacagcccagtgcctgcctggaccgcaggtctgggtttaggaagggct

SEQ ID NO: 109663 - DNA, 120 bp, Artificial Sequence
  ENSG00000100023_34 (sequence is synthesized)
gaagtcgggggaggtgtgaagctgggcaggtggccacgttcttattgtcagccagctcgcactcttgcccctagactagccttgtctgaaggcagcttcagagccacttgccaggctgag

SEQ ID NO: 109664 - DNA, 120 bp, Artificial Sequence
  ENSG00000100023_35 (sequence is synthesized)
aactatccgggctcagtgctctcctatctgctgcccctcggtccccctgcctgccctctgccctgagacaagttactaaatgttgaaaaccaaacttatctgggagtggtttttgacctc

SEQ ID NO: 109665 - DNA, 120 bp, Artificial Sequence
  ENSG00000100023_36 (sequence is synthesized)
catcctctgcaaagtggcctaaacccttatggggtgcccactcctggtggagggcaggtggatgagtggattgtaatttataataaaatatatggcagaaacacaggccttaggagattg

SEQ ID NO: 109666 - DNA, 120 bp, Artificial Sequence
  ENSG00000100023_37 (sequence is synthesized)
cacaggcccctctatcagttcaagtgacatgggacagcaccacgcagggacgggcaacgcgtctagcaggccaggcgtcttcatgcacaaaggctaaacttgttgctttaaccttttctg

SEQ ID NO: 109667 - DNA, 120 bp, Artificial Sequence
  ENSG00000100023_38 (sequence is synthesized)
aacaaattttaaacattctggcaaatgtcaagttttgaagtttttcctgtgggttctggcctctttcatatgcaaaaataattctttttcttcaagtacatccagggtagaaaatgaaat

SEQ ID NO: 109668 - DNA, 120 bp, Artificial Sequence
  ENSG00000100023_39 (sequence is synthesized)
ctgacttttcctcggtccagtgtgttactctatagacatggaccagccactcagcaactgcctgacacctaagctgctgtcactgctgagggcacaacccctggtaccagaccctgtgag

SEQ ID NO: 109669 - DNA, 120 bp, Artificial Sequence
  ENSG00000100023_40 (sequence is synthesized)
gctgtcacctcagtaagggcacctctgcgggccccgggacagccttctctaagggctagctcacctgctttctagataaggaatctactggcttaaataaacatgttccactagacacca

SEQ ID NO: 109670 - DNA, 120 bp, Artificial Sequence
  ENSG00000100023_41 (sequence is synthesized)
gggttgcagggctgggggcccatgtccacatctccatttccagcctttctagcctgccctctgctgccagccaataaattgcttgcctgctgcctgcatcccctttcctggcccctggga

SEQ ID NO: 109671 - DNA, 120 bp, Artificial Sequence
  ENSG00000100023_42 (sequence is synthesized)
gcccacagccttcccatcccttaacctgttgccaagggccttggccctgtttccaggacctggcccagccagagcccactgctgggaccttcaagcacaaggcctgccctacacccaggc

SEQ ID NO: 109672 - DNA, 63 bp, Artificial Sequence
  ENSG00000100023_43 (sequence is synthesized)
ccgtgcaccactacatccagctgtatatgtctggttttcttacccctacttctgtcatcttct

SEQ ID NO: 109673 - DNA, 120 bp, Artificial Sequence
  ENSG00000100023_44 (sequence is synthesized)
tatatgtctggttttcttacccctacttctgtcatcttctcagggacagcctatttatacaaccagtgtggtcccctgaccaacgccattacctgggacaagttttcagaccccagactt

SEQ ID NO: 109674 - DNA, 120 bp, Artificial Sequence
  ENSG00000100023_45 (sequence is synthesized)
actgagcctaagcctctgcagggtgggcttctcggtctgttttgacaaaacttcaggggcttctgaaggctggtgttggacggcagcattgagtttcctgccgtgccctgcctgagctct

SEQ ID NO: 109675 - DNA, 120 bp, Artificial Sequence
  ENSG00000100023_46 (sequence is synthesized)
cagggccctgctcacctgctctggctgtgaaccacctgggcttcatctcaagcctgcctggcgtctctgtgcccctgtgagaatcttgaggggacccacactgggttgaggccagtgtct

SEQ ID NO: 109676 - DNA, 120 bp, Artificial Sequence
  ENSG00000100023_47 (sequence is synthesized)
cctgctgtgagaacaagtggatgtccctctccccgccctcctgctgaagtggccttgctgctctcaggcccggccactgggctccaagactctgctcctcctgtcagtcactgactctga

SEQ ID NO: 109677 - DNA, 120 bp, Artificial Sequence
  ENSG00000100023_48 (sequence is synthesized)
tggccttgggccagctgcatcagcagcccttaaagaaagacccctccctcaacccccatttttctgttaaatgtgcccctggctggctttttcttcgtcttcagcccaggccagtggtca

SEQ ID NO: 109678 - DNA, 120 bp, Artificial Sequence
  ENSG00000100023_49 (sequence is synthesized)
gtgttctcatgtcatggactctccttgcctgacacttgcctcttgggctccctgttgccctcaggccaccccccacttctagttcttcacactaagccctaacttaggccttgttcttgg

SEQ ID NO: 109679 - DNA, 120 bp, Artificial Sequence
  ENSG00000100023_50 (sequence is synthesized)
aatgtacattacctgtgctgaatacactcacttttatggtggcaagaagccaggtaaggcatgcagtctttctgttccccgttgggggagtggtattaaggaactgtgtcttcaggatac

SEQ ID NO: 109680 - DNA, 120 bp, Artificial Sequence
  ENSG00000100023_51 (sequence is synthesized)
atagacaacaagaacacggaaactatggtagacgaatgggctgaggacacagttcatgaaagagaaatatactcaagatagaagaacctgcttcatcttagtggtgatttttgtaaaatg

SEQ ID NO: 109681 - DNA, 120 bp, Artificial Sequence
  ENSG00000100023_52 (sequence is synthesized)
taatttaaaatattccccgatgctgggagctaagtaaaaaataaataagtaaatgaaatacaaaattacatgtacatttaaatgttttttctctatcaagtttataaggaataaaaagaa

SEQ ID NO: 109682 - DNA, 120 bp, Artificial Sequence
  ENSG00000100023_53 (sequence is synthesized)
ctaaggtctgtgcccagggaggtggggcgtggcggctgggggccaggcaggcagggggaggacctgccgtgcactgagccccctttgctgctaggaggagatccgcattgatgccactac

SEQ ID NO: 109683 - DNA, 120 bp, Artificial Sequence
  ENSG00000100023_54 (sequence is synthesized)
agacccagaggggcaagcaagctatgggcactggtcccggccgtgggcttgtgctgtgtggcctctgcagccgagggactgcctctgaaggcctggccggggcctctgtgggtggaagag

SEQ ID NO: 109684 - DNA, 120 bp, Artificial Sequence
  ENSG00000100023_55 (sequence is synthesized)
atcaaattcagggggatgtgggagcagcaggtgggaggggttgggcctacaccgggagggctgtatggagacacagacaagtcaggaggggctgagggagggtgtgggctcccagcggct

SEQ ID NO: 109685 - DNA, 120 bp, Artificial Sequence
  ENSG00000100023_56 (sequence is synthesized)
gtgctgaatacactcacttttatggtggcaagaagccagctgtcaaaactatcaagactacaataacaagagcactgtcataattttaatggaagtaaaaaatctcccacaaacaaattt

SEQ ID NO: 109686 - DNA, 120 bp, Artificial Sequence
  ENSG00000100023_57 (sequence is synthesized)
caagctgaacgctgatcttgctatgttgtctaagctggtcttgaattcctggcttcaagtgagagcctcctgccttggcctccgaaagtgctggaattacaggcccactattccacaggg

SEQ ID NO: 109687 - DNA, 120 bp, Artificial Sequence
  ENSG00000100023_58 (sequence is synthesized)
ttggtgttggatcctgctctagaccttcaccaggggtggcacaaacactattgtagttggaggagaaggttggtgagagagggaggtggccaggctgcccagagagggctccctgggaca

SEQ ID NO: 109688 - DNA, 120 bp, Artificial Sequence
  ENSG00000100023_59 (sequence is synthesized)
gcatttcaggaggtcaccatgccagtctcagccagcccacatcctgaccagggtgcgtggcaactcaccaggaatgactgtcctttttcagtctctctctgcagccctttgtctacccag

SEQ ID NO: 109689 - DNA, 120 bp, Artificial Sequence
  ENSG00000100023_60 (sequence is synthesized)
aatacactcacttttatggtggcaagaagccagtttataaggaataaaaagaatgataatattttcagctgtcaaaactatcaagactacaataacaagagcactgtcataattttaatg

SEQ ID NO: 109690 - DNA, 120 bp, Artificial Sequence
  ENSG00000100023_61 (sequence is synthesized)
ggaccaaccccagcaatggagaggtactctttggggttcccaaacttgtcgattgtgctggcccccacacccacaaagtctgatctggcagttagccacgctgttagggcttacatcagg

SEQ ID NO: 109691 - DNA, 120 bp, Artificial Sequence
  ENSG00000100023_62 (sequence is synthesized)
aactcggctgcggctccatggtctgagttgtcagccgttgttttttcgtgctcgctagtcgccgccgccgctccgccatggggaagcgacagcaccaaaaggacaaaatagacagattct

SEQ ID NO: 109692 - DNA, 120 bp, Artificial Sequence
  ENSG00000100024_0 (sequence is synthesized)
gggcacctcctcccactgcgggcaaagggcaggcagttcgtgcgcggacacaagcactggcggaccgtggccatggcgggcgctgagtggaagtcgctggaggaatgcttggagaagcac

SEQ ID NO: 109693 - DNA, 120 bp, Artificial Sequence
  ENSG00000100024_1 (sequence is synthesized)
ctgccgctccccgacttgcaggaagtgaagcgcgttctctatggcaaggaactcaggaagcttgatctgcccagggaagctttcgaagctgcctccagagaagactttgaactgcaggga

SEQ ID NO: 109694 - DNA, 120 bp, Artificial Sequence
  ENSG00000100024_2 (sequence is synthesized)
tatgcctttgaagcagcggaggagcagctgagacgaccccgcattgtgcacgtggggctggttcagaacagaatccccctccccgcaaatgcccctgtggcagaacaggtctctgccctt

SEQ ID NO: 109695 - DNA, 120 bp, Artificial Sequence
  ENSG00000100024_3 (sequence is synthesized)
catagacgcataaaggctatcgtagaggtggctgcaatgtgtggagtcaacatcatctgtttccaggaagcatggactatgccctttgccttctgtacgagagagaagcttccttggaca

SEQ ID NO: 109696 - DNA, 120 bp, Artificial Sequence
  ENSG00000100024_4 (sequence is synthesized)
gaatttgctgagtcagcagaggatgggcccaccaccagattctgtcagaagctggcgaagaaccatgacatggtggtggtgtctcccatcctggaacgagacagcgagcatggggatgtt

SEQ ID NO: 109697 - DNA, 120 bp, Artificial Sequence
  ENSG00000100024_5 (sequence is synthesized)
ttgtggaatacagccgtggtgatctccaattccggagcagtcctgggaaagaccaggaaaaaccacatccccagagtgggtgatttcaacgagtcaacttactacatggagggaaacctg

SEQ ID NO: 109698 - DNA, 120 bp, Artificial Sequence
  ENSG00000100024_6 (sequence is synthesized)
ggccaccccgtgttccagacgcagttcggaaggatcgcggtgaacatttgctacgggcggcaccaccccctcaactggcttatgtacagcatcaacggggctgagatcatcttcaacccc

SEQ ID NO: 109699 - DNA, 120 bp, Artificial Sequence
  ENSG00000100024_7 (sequence is synthesized)
tcggccacgataggagcactcagcgagtccctgtggcccatcgaggccagaaacgcagccattgccaatcactgcttcacctgcgccatcaatcgagtgggcaccgagcacttcccgaac

SEQ ID NO: 109700 - DNA, 120 bp, Artificial Sequence
  ENSG00000100024_8 (sequence is synthesized)
gagtttacctcgggagatggaaagaaagctcaccaggactttggctacttttatggctcgagctatgtggcagcccctgacagcagccggactcctgggctgtcccgtagccgggatgga

SEQ ID NO: 109701 - DNA, 120 bp, Artificial Sequence
  ENSG00000100024_9 (sequence is synthesized)
ctgctagttgctaagctcgacctaaacctctgccagcaggtgaatgatgtctggaacttcaagatgacgggcaggtatgagatgtacgcacgggagctcgccgaagctgtcaagtccaac

SEQ ID NO: 109702 - DNA, 120 bp, Artificial Sequence
  ENSG00000100024_10 (sequence is synthesized)
tacagccccaccatcgtgaaagagtagccggcttcagtgcctgccttggggtgaggaagacacctctgccccagtggattagcaagtgtggcaggcttaacatgtccaggttctccccaa

SEQ ID NO: 109703 - DNA, 120 bp, Artificial Sequence
  ENSG00000100024_11 (sequence is synthesized)
taacattgtccaggttggttttaaaattcccaggcagggggagagtggcatggggagtgacttcttaatgggtaaggggctgcttacttctggggtattggaaatgtttggggactaggt

SEQ ID NO: 109704 - DNA, 120 bp, Artificial Sequence
  ENSG00000100024_12 (sequence is synthesized)
agaggtgaatgtactaaatgccactgaatttgtatacttcagaatgtttgttatgtaaattttacctcaactaaaaaaaaaaatgcccaggtactgcttgtgcaggtggatttgaggtta

SEQ ID NO: 109705 - DNA, 120 bp, Artificial Sequence
  ENSG00000100024_13 (sequence is synthesized)
ggcagatgatgctgtccatcccgtacaccagtgggaagagggtgagggctgatccagagaccctgagcctacagcaaggctgtggtgggtcggatggtctttggatgtgtcagcttagct

SEQ ID NO: 109706 - DNA, 120 bp, Artificial Sequence
  ENSG00000100024_14 (sequence is synthesized)
aggccacagtcaccagtaattcaatcagacactaatctaggtatttctgtgaaggtattttgtagatgtgacagaagtccattcccaattgactaagtaagtgagattatctcagataat

SEQ ID NO: 109707 - DNA, 120 bp, Artificial Sequence
  ENSG00000100024_15 (sequence is synthesized)
gagttcctgacagtctgcccttctgatagcctgcctcacagagtttagacatgactagccagctcctacaatcactgaagtcaattccttgcaataaatctcaatatatcccctactggt

SEQ ID NO: 109708 - DNA, 120 bp, Artificial Sequence
  ENSG00000100024_16 (sequence is synthesized)
tctgcttctctagttgaatctgactgatacagattttggtgccaaaagtggttctagaaaaatagaatcttaaagatgagttttctgcattggttctggatttttttagaattcttccct

SEQ ID NO: 109709 - DNA, 120 bp, Artificial Sequence
  ENSG00000100024_17 (sequence is synthesized)
agtttgattgaacttaaaggcatcaatgactctatttccatagagtcagggtaaagagggtagttggtagtccatggcatggtgcagcaatagttatttatgtgcgagactagccatcag

SEQ ID NO: 109710 - DNA, 120 bp, Artificial Sequence
  ENSG00000100024_18 (sequence is synthesized)
ccatcagtttgtgcccagagttccagcctgccctttctgatggcttgtcctgtggatatcagacttgcctgaccagattccatcatcatagaaggtaatttgttgcactaaatcctttta

SEQ ID NO: 109711 - DNA, 120 bp, Artificial Sequence
  ENSG00000100024_19 (sequence is synthesized)
tatctctatccatcacctactaattctgctagttctgctaatgtggttgagctccattttacacatcagattactcacttctctacaccttggtttttacatctgtaaaatgggactggg

SEQ ID NO: 109712 - DNA, 69 bp, Artificial Sequence
  ENSG00000100024_20 (sequence is synthesized)
ctctacaccttggtttttacatctgtaaaatgggactgggccaggtgtggtggggtggcttatgcctgt

SEQ ID NO: 109713 - DNA, 76 bp, Artificial Sequence
  ENSG00000100024_21 (sequence is synthesized)
gcgcatgcctataatcccagctactcagcaggctgaggtatgagaattgcttgaatctgggaggcaacaacagagt

SEQ ID NO: 109714 - DNA, 120 bp, Artificial Sequence
  ENSG00000100024_22 (sequence is synthesized)
acgccactgtgctccagcctggacaacagagtgagagcctatctccaaaaaaaaaaaggggtggggaccatattcctgctttatgtcaagacactggtaagagacagactagatgggcca

SEQ ID NO: 109715 - DNA, 120 bp, Artificial Sequence
  ENSG00000100024_23 (sequence is synthesized)
gggagccccttggcagttatcagtgcagcgcctatttagccctgtccctgaacaacacggcaagagcccaacctgccaagtctcaaatagcagttaaccagagtatcgggttggaggtgg

SEQ ID NO: 109716 - DNA, 120 bp, Artificial Sequence
  ENSG00000100024_24 (sequence is synthesized)
ggttgagattctgtaattccccgcttattgttcccaatcagagaaggcagccagagaaggcagcttcatcccttcactggcccagcagctgaactatatggaaacctccatgtcagggct

SEQ ID NO: 109717 - DNA, 120 bp, Artificial Sequence
  ENSG00000100024_25 (sequence is synthesized)
agggtactcctggacagccaccaaggatgagaaaccctgatggagctgcctggccacagctctgcggtaacttccttgaactctctgtgctgcaggttttcactttacctaatggccctt

SEQ ID NO: 109718 - DNA, 120 bp, Artificial Sequence
  ENSG00000100024_26 (sequence is synthesized)
cttgcacctttaaaaaaaaaaaaaaaaaattccagtcctacagacacagtgagcttttttgcctgttcctttagctttcaaaatttagtgtcagccaaggcgggcagatcacaaggtcaa

SEQ ID NO: 109719 - DNA, 72 bp, Artificial Sequence
  ENSG00000100024_27 (sequence is synthesized)
atcacaccactgcactccagctccttagtgtttttggtttctagagggtgtaatcaacctaatacagaagcc

SEQ ID NO: 109720 - DNA, 120 bp, Artificial Sequence
  ENSG00000100024_28 (sequence is synthesized)
tttggtttctagagggtgtaatcaacctaatacagaagccagcttaggtgacaaattggtacatttgtgaaacaggcatgaataaatggaccacaactctttgattatctgcaactctca

SEQ ID NO: 109721 - DNA, 120 bp, Artificial Sequence
  ENSG00000100024_29 (sequence is synthesized)
ttgcctggaaacagaacagtcaggcccatcttagagtatgcaggccctgtacagccaaggtcatttcaaggtttaactcatccctggaacatgcagatgctcagtaaacatttgaatgaa

SEQ ID NO: 109722 - DNA, 120 bp, Artificial Sequence
  ENSG00000100024_30 (sequence is synthesized)
tgaggacaggctggcctggttgcaggtttggggtgtgaccggtgagtctcctggttgtccccaccactggcccaggaaagcctgcagccaggccaggctctgtccccaccactggcccag

SEQ ID NO: 109723 - DNA, 120 bp, Artificial Sequence
  ENSG00000100024_31 (sequence is synthesized)
atagcagagtaggagagttagggtagggcaggtacagcctgtgctcagccctcacaggccctgcacaagcccaccaggcccccggctcccttctggcattcaccaggagaggttctgccc

SEQ ID NO: 109724 - DNA, 120 bp, Artificial Sequence
  ENSG00000100024_32 (sequence is synthesized)
agcccagcagcgagtccctgtggcccatcgaggccagaaacgcagccattgccaatcactgcttcacctgcgccatcaatcgagtgggcaccctcaccaggactttggctacttttatgg

SEQ ID NO: 109725 - DNA, 120 bp, Artificial Sequence
  ENSG00000100024_33 (sequence is synthesized)
ttcccacatcgttctgaatccattcgctcctctccatctctctaccaccacctggtccaagcccctggcagctcacctctggcttttgtaattccctccagctggtctcctgtgccctcc

SEQ ID NO: 109726 - DNA, 120 bp, Artificial Sequence
  ENSG00000100024_34 (sequence is synthesized)
tgaccaggacttctttaccttcagatctcagcccagagccagcccccccatctaaacatcctggtagtatgtacctttgtggtttttatttttatcagagttttacatgctcatggttta

SEQ ID NO: 109727 - DNA, 120 bp, Artificial Sequence
  ENSG00000100024_35 (sequence is synthesized)
gagtcagatgggtgtacaaggtctgttaccaaaaaatagctattatccccagcatcaacactgagctagttcctttggaatttacctttgttagtgttgctacttcctaattttttagtt

SEQ ID NO: 109728 - DNA, 120 bp, Artificial Sequence
  ENSG00000100024_36 (sequence is synthesized)
cctattgacttccccctatggaagatgtcagtgttagccctttcttgcctcctcctggcccttcgacatacatgtgtccttgttctatccccccagcccattttgtcaactttgattcct

SEQ ID NO: 109729 - DNA, 120 bp, Artificial Sequence
  ENSG00000100024_37 (sequence is synthesized)
gtcaactttgattccttttctttttttttaagacaaggacttactctgtcacccaggcttagagtacaatcacagctcactgcagccttgatcccaggcccaagcaatcctcccacctca

SEQ ID NO: 109730 - DNA, 120 bp, Artificial Sequence
  ENSG00000100024_38 (sequence is synthesized)
ggaccacaggtgcacaccatcacgcccagctaattgaaaaaaaaaagtttgtagagatggagatctcactatattgctaggctgaactttgatttcttttcctgaattattttctgtttt

SEQ ID NO: 109731 - DNA, 120 bp, Artificial Sequence
  ENSG00000100024_39 (sequence is synthesized)
ccctagagtttgctttgttttctacttgccacgcattcaaccccaaactttctatcaattcctaaatctcccttaatgtgttttagacgcatcaaacagtctatcagtttcatctcctcc

SEQ ID NO: 109732 - DNA, 120 bp, Artificial Sequence
  ENSG00000100024_40 (sequence is synthesized)
aaggaatctgccccagagccttgtgactgctgtggtctgaatcaggtgccccctctgctggccacacagttattgtcctgggatcccccctcatcatcaccctggggaatccctttgcct

SEQ ID NO: 109733 - DNA, 120 bp, Artificial Sequence
  ENSG00000100024_41 (sequence is synthesized)
tgctcttgtgtttctctgttcccacagcttcctctttcttggtttatacccttattttagtggagtggtgtagtggatccttatagatttatgttgcctcggcatccatgttgaatacaa

SEQ ID NO: 109734 - DNA, 120 bp, Artificial Sequence
  ENSG00000100024_42 (sequence is synthesized)
gtttaactctctcataccagcggcagggctcggtcacgctggacacagtttccagatctacaccacaccgagatggctcaagccaagtggccagaggtaagaacttaagaggcctctctc

SEQ ID NO: 109735 - DNA, 120 bp, Artificial Sequence
  ENSG00000100024_43 (sequence is synthesized)
ccaccagcagactgggctgcccactttcctgctgcttcctttaaatggaccatccaggcatttggccattaacttaaggtgaccacatcttagtcattatgtgtactgctagttgcccca

SEQ ID NO: 109736 - DNA, 120 bp, Artificial Sequence
  ENSG00000100024_44 (sequence is synthesized)
agataaagcaacagaagcctccagcgactaagttaaactttcctggggtcacaaggtttacaagtggctgaataggatttctacagactggttccttcacccggctgcccgccgaagtaa

SEQ ID NO: 109737 - DNA, 120 bp, Artificial Sequence
  ENSG00000100024_45 (sequence is synthesized)
gcgggccttactgccctaattctcaataggaccccaaagaggacgcttctttgctcctgaagggatggcaccctctggattcgcggtaacagcaaatggggctctcactcctaccatctc

SEQ ID NO: 109738 - DNA, 120 bp, Artificial Sequence
  ENSG00000100024_46 (sequence is synthesized)
agtgacagtttaaagcgcaccctaccgcaggaaagtgcccatatttgcacacacgcggcagagggcagggctgaaaaggggccctagggtgcagggggcgcgccctcacccggggacccc

SEQ ID NO: 109739 - DNA, 120 bp, Artificial Sequence
  ENSG00000100024_47 (sequence is synthesized)
gcattttacaatattagctccaccgaggcgcacggaaccgcaggcgagcaactgaccttcggctccagcggccccaaagccgggggtgggaacgcgcgacccaggtagcggcatggactc

SEQ ID NO: 109740 - DNA, 120 bp, Artificial Sequence
  ENSG00000100024_48 (sequence is synthesized)
cgagcctggcccctcgggggttaaaactccccagacataaaggctccggacgacagaggtgcagccgccgcgtgcccgtgggacactgaaactcttcccttaccttcctcggtagtcctg

SEQ ID NO: 109741 - DNA, 120 bp, Artificial Sequence
  ENSG00000100024_49 (sequence is synthesized)
tagtcctgtgagggaggctggcccggccggctgccctacggtgcggacaggaggtcgcggtcgggaggggccctgcccggcggttgctgctggaaccagcccccgcaagggcccgcagcg

SEQ ID NO: 109742 - DNA, 120 bp, Artificial Sequence
  ENSG00000100024_50 (sequence is synthesized)
gtttacctcagacccgcgccgcagcctcccggagcccgcgcccaggactccctcacgacctctccagggtcccggcccgacaccaaggggcaggtgaggggtggaacctggaggcacccg

SEQ ID NO: 109743 - DNA, 120 bp, Artificial Sequence
  ENSG00000100024_51 (sequence is synthesized)
cgccagggcccctgagggaggcgggagggggacagcctcagtcctgactcgcagccgaggcgcgacgactccgcgcagtcccgcctgtggaggggcgtgcctcatcgcttgctaaccgag

SEQ ID NO: 109744 - DNA, 120 bp, Artificial Sequence
  ENSG00000100024_52 (sequence is synthesized)
aggcgaagggcaaggggcgaagggcaagcgccggatcctttcgccccctccccacgtgaggccctggaggctgattggccgtgtgctgcggaggcggcaagaggaacgtgtcctggcacg

SEQ ID NO: 109745 - DNA, 120 bp, Artificial Sequence
  ENSG00000100024_53 (sequence is synthesized)
tgccgaaggagcgctaaaggccaggggcggtcccacccgcgaagccctggaaggcggattggctgcgcgaggaagtggcgtgtcctcacttgagctgtctgggagcgagagtaagagata

SEQ ID NO: 109746 - DNA, 120 bp, Artificial Sequence
  ENSG00000100027_0 (sequence is synthesized)
caaaacaaagggcaggcggcccgcggggcggcggcgggaggatgcctcgcgccctgcctaggcgttaacggcctcagcgcgtcccgggccgcgccgggaacgcctgagagccgagcccgc

SEQ ID NO: 109747 - DNA, 120 bp, Artificial Sequence
  ENSG00000100027_1 (sequence is synthesized)
gctgaccggggcccgggccggatgggcgctgcgggccggggcgcggaccgcggagcggccgttacgtttttctctcgtcccagctgtgtggacagtgccacacgccctcctggacaacga

SEQ ID NO: 109748 - DNA, 120 bp, Artificial Sequence
  ENSG00000100027_2 (sequence is synthesized)
cggctcttgcgtgcattttccagtgttgcttttgtcagagaggccagcagagccacggttcttccagaaccagccctgagctgagtgaggagtgcccaggagagatggtgaaaatgacaa

SEQ ID NO: 109749 - DNA, 120 bp, Artificial Sequence
  ENSG00000100027_3 (sequence is synthesized)
agtccaaaactttccaagcgtatctgccgaactgtcaccgaacgtacagctgtatccactgcagagcacacctggccaatcatgacgagctcatctccaagtcctttcaggggagccagg

SEQ ID NO: 109750 - DNA, 120 bp, Artificial Sequence
  ENSG00000100027_4 (sequence is synthesized)
gacgcgcctacctcttcaattccgtggtgaacgtgggctgcggccctgcagaggagagggtccttctcaccgggctgcatgcggttgccgacatctactgcgagaactgcaagaccacgc

SEQ ID NO: 109751 - DNA, 120 bp, Artificial Sequence
  ENSG00000100027_5 (sequence is synthesized)
tcgggtggaaatacgagcatgcctttgagagcagtcagaaatataaggaaggaaaattcatcattgagcttgctcatatgatcaaagacaatggctgggagtaatgtgcgaactttccct

SEQ ID NO: 109752 - DNA, 120 bp, Artificial Sequence
  ENSG00000100027_6 (sequence is synthesized)
tctcctttgaatgctgttttgtgaaagaaactgtgaatgtaatggaaacgtaggagcatctggtgacagcctttcttgccctctgacctcaaaggctagctgcgcatagctcttgacact

SEQ ID NO: 109753 - DNA, 120 bp, Artificial Sequence
  ENSG00000100027_7 (sequence is synthesized)
ctcggccatctctgtgggtaaggtgtccctcggatctgtcctcttcgtgtacacagttgtttctgaaaattttcaatgagctttttctaacttctcaagttctagagaaagaattaacca

SEQ ID NO: 109754 - DNA, 120 bp, Artificial Sequence
  ENSG00000100027_8 (sequence is synthesized)
actgatgacttacctgcctagttaatatcttcctttcacctttgtcttcaatatagttgggctctgcttttttaaggttcagttgaaaaccaaactggggccgggtgcggtggctcacgc

SEQ ID NO: 109755 - DNA, 90 bp, Artificial Sequence
  ENSG00000100027_9 (sequence is synthesized)
taaggcaggagaatcacttgaacctgggacatcgcactccagcctgggggacaaaagtgagacatcgtctcaaaaaaaaaaaaaaaagct

SEQ ID NO: 109756 - DNA, 89 bp, Artificial Sequence
  ENSG00000100027_10 (sequence is synthesized)
cagtgagctaagatcatgccatcgcactccagcctgggggacaaaagtgagacatcgtctcaaaaaaaaaaaaaaaagctgggtatggt

SEQ ID NO: 109757 - DNA, 120 bp, Artificial Sequence
  ENSG00000100027_11 (sequence is synthesized)
tcgcgccactgcactccagcctggcaatagggcgagactccgtctcaatttaaaacaagagagaaccagactgagtctctgaagaccacagggacagggtctctttagatagcaagtctc

SEQ ID NO: 109758 - DNA, 120 bp, Artificial Sequence
  ENSG00000100027_12 (sequence is synthesized)
ttagatagcaagtctcaccattcccttttttagagaaaaggtattgtagcccaccctccaccccgctgtttttcttaaatttgcagaacttcaaattggctattcctcttgcaaatgaac

SEQ ID NO: 109759 - DNA, 120 bp, Artificial Sequence
  ENSG00000100027_13 (sequence is synthesized)
ccttaaagtacagtgttatttaagaatcttccagaggcagtcaacagacttatacactaagggcatttttggtttttagcttgttcaaaaacagaggccagcacagatgacattttagat

SEQ ID NO: 109760 - DNA, 120 bp, Artificial Sequence
  ENSG00000100027_14 (sequence is synthesized)
acactctaaattgagaatggtgtctagtggaacatgtttatttaagccagtagattccttatctagaaagcaggtgagctagcccttagagaaggctgtcccggggcccgcagaggtgcc

SEQ ID NO: 109761 - DNA, 120 bp, Artificial Sequence
  ENSG00000100027_15 (sequence is synthesized)
cttactgaggtgacagcctcacagggtctggtaccaggggttgtgccctcagcagtgacagcagcttaggtgtcaggcagttgctgagtggctggtccatgtctatagagtaacacactg

SEQ ID NO: 109762 - DNA, 120 bp, Artificial Sequence
  ENSG00000100027_16 (sequence is synthesized)
cttcaaaacttgacatttgccagaatgtttaaaatttgttcagaaaaggttaaagcaacaagtttagcctttgtgcatgaagacgcctggcctgctagacgcgttgcccgtccctgcgtg

SEQ ID NO: 109763 - DNA, 120 bp, Artificial Sequence
  ENSG00000100027_17 (sequence is synthesized)
gtgctgtcccatgtcacttgaactgatagaggggcctgtgcaatctcctaaggcctgtgtttctgccatatattttattataaattacaatccactcatccacctgccctccaccaggag

SEQ ID NO: 109764 - DNA, 120 bp, Artificial Sequence
  ENSG00000100027_18 (sequence is synthesized)
tgggcaccccataagggtttaggccactttgcagaggatggaggtcaaaaaccactcccagataagtttggttttcaacatttagtaacttgtctcagggcagagggcaggcagggggac

SEQ ID NO: 109765 - DNA, 120 bp, Artificial Sequence
  ENSG00000100027_19 (sequence is synthesized)
cgaggggcagcagataggagagcactgagcccggatagttctcagcctggcaagtggctctgaagctgccttcagacaaggctagtctaggggcaagagtgcgagctggctgacaataag

SEQ ID NO: 109766 - DNA, 120 bp, Artificial Sequence
  ENSG00000100027_20 (sequence is synthesized)
aacgtggccacctgcccagcttcacacctcccccgacttcagcccttcctaaacccagacctgcggtccaggcaggcactgggctgtgcccactcgagctcactgcccacacacagcatg

SEQ ID NO: 109767 - DNA, 120 bp, Artificial Sequence
  ENSG00000100027_21 (sequence is synthesized)
cctttgggtgccatctctttgcccaagcctggaagccttggcaggtgggaaatgccgctgccctggtgggcatggcactgagatgcatccactcagcaggagtgacagaggcagaagttc

SEQ ID NO: 109768 - DNA, 120 bp, Artificial Sequence
  ENSG00000100027_22 (sequence is synthesized)
ctttaaagcacatcttccacttaggaaaggaaggaaatctttgtactgtcttggaagcctccacatccggctatggccctgcaagctgctttatccctgcgctagtctcccccgagggtt

SEQ ID NO: 109769 - DNA, 120 bp, Artificial Sequence
  ENSG00000100027_23 (sequence is synthesized)
taggctggcccagcacatcctgtcctcctgagctcgcgtgcagccacccagagcgcaggggtcactgcacgctgcagggctcttgctgccatggtctcaagcctgaagaggctccgccca

SEQ ID NO: 109770 - DNA, 120 bp, Artificial Sequence
  ENSG00000100027_24 (sequence is synthesized)
caagctggcccatgaagttagcaatgcctgtggcttcagtcaattgtcttgagactgtgaagaggctgaaagacaccttcccgggtggaagaaggagttcactgaaaacttatcttaaac

SEQ ID NO: 109771 - DNA, 120 bp, Artificial Sequence
  ENSG00000100027_25 (sequence is synthesized)
tgacccttccctttgagtgagtcttcattcctctcccatgtgggaacccagcctccgatgccccggggactaggggaaacagttggaggttcgtgccgtccccagcctgccacgggtgcg

SEQ ID NO: 109772 - DNA, 120 bp, Artificial Sequence
  ENSG00000100027_26 (sequence is synthesized)
aggacagccaagtcctgagtgactcaagatgcttcacttacatggaagaaacttctaaaactctaccgagtggtttttgtatatactaaagttctatttagagcttttctgttttgggca

SEQ ID NO: 109773 - DNA, 120 bp, Artificial Sequence
  ENSG00000100027_27 (sequence is synthesized)
agttcgctgctccttctatttgggcactttggtttttgtactgtcttttgtgacggcattgattgaacattttttactagtagtcttatgacttttgtatttttttttttttttgtaatt

SEQ ID NO: 109774 - DNA, 120 bp, Artificial Sequence
  ENSG00000100027_28 (sequence is synthesized)
tataccaacaacacttttatcactttttttttgttgggcttctgcaaaatacaagctcatttttaaaccaaatgaacagaccatgagctggcttcaggggaagtgctattcacaggacca

SEQ ID NO: 109775 - DNA, 120 bp, Artificial Sequence
  ENSG00000100027_29 (sequence is synthesized)
tatccaccaccctcttaaattcctaaacaatatcatctaggacttctatttaagttatttaaaataaatcttccttgagagccttgggaggtgatgtcagggttataaatggcacagtgc

SEQ ID NO: 109776 - DNA, 120 bp, Artificial Sequence
  ENSG00000100027_30 (sequence is synthesized)
atttgctgtaggaatgtggtttggcattgttttatacacacagtattttttataccttaatgcttattcttgatggcatctgtcagatattagaattgaaaataagaatcttcccaaaat

SEQ ID NO: 109777 - DNA, 120 bp, Artificial Sequence
  ENSG00000100027_31 (sequence is synthesized)
cctttaatttacctgatgccctcatcaggtcgttaaaaattcaaatggttttaatagctaaaaaactacaaattaagctctaaaacaaacaaactacagaaatgtaaaccttcatttgcc

SEQ ID NO: 109778 - DNA, 120 bp, Artificial Sequence
  ENSG00000100027_32 (sequence is synthesized)
aaaggtccttggtggcctgtcccctgccctgggagcagatggccctgaagcccttccctcactgtgcaggccaccgggtgaggctggacggtcacccatggtggcttcactgcaaggagc

SEQ ID NO: 109779 - DNA, 120 bp, Artificial Sequence
  ENSG00000100027_33 (sequence is synthesized)
aggactgccgagctcaagcacggggccttcagcttcccctgtcctctggccacaccgccagcccttggtccttatctgtgtgaggtttacaaataaagcttctgatgtcaaatgtttaaa

SEQ ID NO: 109780 - DNA, 120 bp, Artificial Sequence
  ENSG00000100027_34 (sequence is synthesized)
gtacctacatagtggaagaatatttaagcatcacatgacttcctgagtctgctgtgtcctgaacgtctagagccttctaggcagcattgtcacttgcagaatgttgacgcagcagaatca

SEQ ID NO: 109781 - DNA, 120 bp, Artificial Sequence
  ENSG00000100028_0 (sequence is synthesized)
attcgcttgactcacgccttcgccgtagcatctttcgcagcggaccgaagagaagaaaagtaggccagagccgaactctcttcctgccaagatgtctattggtgtgccgattaaagtact

SEQ ID NO: 109782 - DNA, 120 bp, Artificial Sequence
  ENSG00000100028_1 (sequence is synthesized)
gcatgaggccgagggccacattgtgacatgtgagacgaacaccggtgaggtatatcgggggaagctcattgaagcagaggacaacatgaactgccagatgtccaacatcacagtcacata

SEQ ID NO: 109783 - DNA, 120 bp, Artificial Sequence
  ENSG00000100028_2 (sequence is synthesized)
cagagatggccgagtggcacagctggagcaggtatacatccgtggcagcaaaatccgctttctgattttgcctgacatgctgaagaacgcacccatgttaaagagcatgaaaaataaaaa

SEQ ID NO: 109784 - DNA, 120 bp, Artificial Sequence
  ENSG00000100028_3 (sequence is synthesized)
ccaaggctcaggggctggccgaggaaaagctgctattctcaaggcccaagtggccgcaagaggaagaggacgtggaatgggacgtggaaacatctttcaaaagcgaagataattttctaa

SEQ ID NO: 109785 - DNA, 120 bp, Artificial Sequence
  ENSG00000100028_4 (sequence is synthesized)
gttgaacagaactttgtccttttttctttcaggttatctgagttcattggagtgggtgcttgtgcatatatgctaggtatcttttgccatctttctctttagatcaggggaaatgtttaa

SEQ ID NO: 109786 - DNA, 120 bp, Artificial Sequence
  ENSG00000100028_5 (sequence is synthesized)
gctaaataaatctggggggttttttgttctgttttgttttgttttctttgagaaaataaggactttgtgttcatttgaagtttgctttggctaaattttgacaccctgggggatgtcctg

SEQ ID NO: 109787 - DNA, 120 bp, Artificial Sequence
  ENSG00000100028_6 (sequence is synthesized)
ggagaatgccagtactttgaaatagcacagctattgatgagattttaagctgctgttcctggccagttgcaggttaagccccagaaaagttcaccttggagaagctccgagaacacacag

SEQ ID NO: 109788 - DNA, 120 bp, Artificial Sequence
  ENSG00000100028_7 (sequence is synthesized)
attgtgtctcattcatcttcagacacaggcacatagtgtggcactttgttcagttaacatttgtggagctgtcatcagctcagctttaacaacacaggtgactctttcccttgataaagt

SEQ ID NO: 109789 - DNA, 67 bp, Artificial Sequence
  ENSG00000100028_8 (sequence is synthesized)
cagctttaacaacacaggtgactctttcccttgataaagtcataggtaattcaggggctgggtgcgg

SEQ ID NO: 109790 - DNA, 70 bp, Artificial Sequence
  ENSG00000100028_9 (sequence is synthesized)
gcctggccaatatggtgaaacctcgtgtgtactaaaaataaaaaaattagccgggtgttcgcttgaaccc

SEQ ID NO: 109791 - DNA, 120 bp, Artificial Sequence
  ENSG00000100028_10 (sequence is synthesized)
agcagagatcatgccactgtactccagcttgggtgacagagcgagactgcacctcaaaaaaaaaaaagtaattcaggggatcctagtggccagcttccttggctcgtatactggctacaa

SEQ ID NO: 109792 - DNA, 120 bp, Artificial Sequence
  ENSG00000100028_11 (sequence is synthesized)
caagtagttttgtggtgatttgtggaaacagattcttgggagcatatcagagcatctcagcattgattggcacatccatagttgttaatgtaggaagggtgaccagcagctcagcacagt

SEQ ID NO: 109793 - DNA, 120 bp, Artificial Sequence
  ENSG00000100028_12 (sequence is synthesized)
gaccagcagctcagcacagtggcttgcttccagcactctgggaggctgaggtagaggattgtttgagaggagttcaaaaccagcccgcgagacatagtgagaccctgtctctacaaaaaa

SEQ ID NO: 109794 - DNA, 120 bp, Artificial Sequence
  ENSG00000100028_13 (sequence is synthesized)
aggtgggaggatcacttgagcctgggagtatgaggctgcagtgagctatgaccttgccactgtactccagcctgggcaaaagagcaagactttgtctttaaagaaaaataagtagtagta

SEQ ID NO: 109795 - DNA, 120 bp, Artificial Sequence
  ENSG00000100028_14 (sequence is synthesized)
aaaatcaaatcaccaaaaagaggtcttgccaggtattcattatggtatgagctacagcataagccatcaagaggaaaactgatcaattattggcttttagaatattgctcattgaacaga

SEQ ID NO: 109796 - DNA, 120 bp, Artificial Sequence
  ENSG00000100028_15 (sequence is synthesized)
ttattcaagtaatgaaagaggaggggaaaaaaatccagcacattagttaacctggcatcaattaatgaggttctaataagctttgtcttatgatactacctggaggttacagagctggta

SEQ ID NO: 109797 - DNA, 120 bp, Artificial Sequence
  ENSG00000100028_16 (sequence is synthesized)
ttctgaggaataagcatcagtgagttggtcagatacaatagacgtttaaaatagggcttcaggccaaacatggtgccccacgcctataatgccagcactttgggaggtcgaggcgggagg

SEQ ID NO: 109798 - DNA, 120 bp, Artificial Sequence
  ENSG00000100028_17 (sequence is synthesized)
atcacttgaacctaggagtttgagactagcctgggctgttaagctttgttaaccaagaccgcatctctacaaaaaattgaaaagtagctgggcacagctgatgcctgcagtcccagctat

SEQ ID NO: 109799 - DNA, 82 bp, Artificial Sequence
  ENSG00000100028_18 (sequence is synthesized)
aaagtagctgggcacagctgatgcctgcagtcccagctatcctggaggttgaggcaggacgaccacatgagcccaggagatt

SEQ ID NO: 109800 - DNA, 120 bp, Artificial Sequence
  ENSG00000100028_19 (sequence is synthesized)
aaatgaaagcagtggttttcaacatcaactaaggatcttattagaaatgaagactgcaagccgcacacctggagtggggcccaggaatctgcattttaaacaattccctggtccccagat

SEQ ID NO: 109801 - DNA, 120 bp, Artificial Sequence
  ENSG00000100028_20 (sequence is synthesized)
aagtaattcttaagtattctatcttaagtagacctaaagccgtattttgaccctgtactagtatgttattttagtataatcattactgaattcatcatacttttacagtaaacagtactt

SEQ ID NO: 109802 - DNA, 120 bp, Artificial Sequence
  ENSG00000100028_21 (sequence is synthesized)
actttgaataataacacattacacttaatagtagtgaactgcatcctcgatatcaaaagcgacttttgatgtagttcactctggacccgtacaggaacaccagccttgcagattctccac

SEQ ID NO: 109803 - DNA, 120 bp, Artificial Sequence
  ENSG00000100028_22 (sequence is synthesized)
gcaatggaaactggctataaccctacctagatctgaaaagtgaagggggatcaacctaaaatatgtagctttgtaaacagttttatatcctgcatcttaggggggaaaatcagttgacgc

SEQ ID NO: 109804 - DNA, 120 bp, Artificial Sequence
  ENSG00000100028_23 (sequence is synthesized)
agattgaaaacaagttgttccataaggtttattatgaaaaacagtagccctcctaccctgcctttaccccactttccttgcctcacagtagtctgtccaactcttggctgatttgtttgt

SEQ ID NO: 109805 - DNA, 120 bp, Artificial Sequence
  ENSG00000100028_24 (sequence is synthesized)
atttacctccatgtctcaatatgaacatgttttcatgactattccttgatggttttttgtttgcttgttttaagacggtctcactcttccccaggcgggagtgcaatggcacaatcatgg

SEQ ID NO: 109806 - DNA, 84 bp, Artificial Sequence
  ENSG00000100028_25 (sequence is synthesized)
ccatgttgcccaagctggtcttgaactccggggctcaagtgatctgcccgcctcggccaccattatcttttgaatcctctcttc

SEQ ID NO: 109807 - DNA, 120 bp, Artificial Sequence
  ENSG00000100028_26 (sequence is synthesized)
ctctcttcctcctgcccaccatgaatttacttcctctcacccatctccctgatattgtaattctggttagatcatattcagtgtcaaattattaagatgtgattaaactttttaaaaata

SEQ ID NO: 109808 - DNA, 120 bp, Artificial Sequence
  ENSG00000100028_27 (sequence is synthesized)
tcttgaaggacagaaaagtgtgtgttgagggtctctggaaattgttctcattcagcagtgatttcctaagtgcctaatgcataccagtcaggtgctgttataggctctgggggtgtgggc

SEQ ID NO: 109809 - DNA, 120 bp, Artificial Sequence
  ENSG00000100028_28 (sequence is synthesized)
atgaacgagacacataatcttgaggcagaaaagccatttggaggtttggaatattttactttgtcctttttgttttttccatccccaaatatgggggtctatttgggagaagtgctactt

SEQ ID NO: 109810 - DNA, 120 bp, Artificial Sequence
  ENSG00000100028_29 (sequence is synthesized)
tcccagagaaaaacctccatgctgggttgatagcagcagctaggatcagttgcccaagactctggattctcgagatgaagaccgtcagcagaggctgatctctcctgtgggctcatgtcc

SEQ ID NO: 109811 - DNA, 120 bp, Artificial Sequence
  ENSG00000100029_0 (sequence is synthesized)
gtccttggcagggcacgtgcgggaggaagtggagctccctgtacgcgcggccctagtcggctcctcaacgtggagcgatgggaggccttgagaagaagaagtatgaacgaggctcggcca

SEQ ID NO: 109812 - DNA, 120 bp, Artificial Sequence
  ENSG00000100029_1 (sequence is synthesized)
ccaactacatcacccggaacaaagcccggaagaagctccagctgagcttggctgactttaggcggctgtgcattctgaagggcatttatccccatgaacccaaacacaagaagaaggtta

SEQ ID NO: 109813 - DNA, 120 bp, Artificial Sequence
  ENSG00000100029_2 (sequence is synthesized)
acaagggttctacagcagcccgaacgttttaccttatcaaagacatcaggtttctcctccacgaacccattgtcaacaagttccgtgaatacaaggtgttcgtccggaagctccggaagg

SEQ ID NO: 109814 - DNA, 120 bp, Artificial Sequence
  ENSG00000100029_3 (sequence is synthesized)
cttatgggaagagcgagtggaacactgtagagcgtttaaaggacaataagcccaactacaaactcgaccacatcatcaaggaacggtatcccacgttcatcgatgccctgcgggacctgg

SEQ ID NO: 109815 - DNA, 120 bp, Artificial Sequence
  ENSG00000100029_4 (sequence is synthesized)
acgatgccctctccatgtgcttcctgttttccaccttcccgcggactggcaagtgccacgtgcagaccattcagctgtgccgccggctcactgtggagttcatgcactacattatcgctg

SEQ ID NO: 109816 - DNA, 120 bp, Artificial Sequence
  ENSG00000100029_5 (sequence is synthesized)
cccgtgccctgcgcaaggtcttcctgtccatcaaaggcatttactaccaggccgaggtactggggcagcccatcgtgtggatcactccctatgccttctcccatgaccacccgacagacg

SEQ ID NO: 109817 - DNA, 120 bp, Artificial Sequence
  ENSG00000100029_6 (sequence is synthesized)
tggactacagggtcatggccaccttcaccgagttctacaccacgctgctgggctttgtcaacttccgcctttaccagttgctcaacctccactatcccccgaagctcgagggtcaggccc

SEQ ID NO: 109818 - DNA, 120 bp, Artificial Sequence
  ENSG00000100029_7 (sequence is synthesized)
aagcagaggcaaaggccggtgagggcacctacgcgttggactccgagagttgtatggagaaactggcagccctcagtgccagcctggcccgcgtggtggtgcctgccacagaggaggagg

SEQ ID NO: 109819 - DNA, 120 bp, Artificial Sequence
  ENSG00000100029_8 (sequence is synthesized)
ccgaggtggatgagtttcccaccgatggggagatgtcagcgcaggaggaagaccgcaggaaggagctggaggcgcaggagaagcacaagaagctttttgagggcctgaagttcttcctga

SEQ ID NO: 109820 - DNA, 120 bp, Artificial Sequence
  ENSG00000100029_9 (sequence is synthesized)
actcccgcatcacccatcagattgtcgaccggcctgggcagcagacctcagtcattggcaggtgctacgtgcagccccagtgggtgtttgactcagtgaacgccaggctccttctccccg

SEQ ID NO: 109821 - DNA, 120 bp, Artificial Sequence
  ENSG00000100029_10 (sequence is synthesized)
tggcagagtacttctctggggtgcagctgcccccacacctttcaccctttgtgaccgagaaggaaggagattacgttccacctgagaagctgaagctgctggctctgcagcggggagagg

SEQ ID NO: 109822 - DNA, 120 bp, Artificial Sequence
  ENSG00000100029_11 (sequence is synthesized)
acccaggaaacctgaatgagtcagaagaggaggaggaagaggacgacaacaacgaaggtgatggtgatgaagagggagaaaatgaggaggaggaggaagatgcagaggctggttcagaaa

SEQ ID NO: 109823 - DNA, 120 bp, Artificial Sequence
  ENSG00000100029_12 (sequence is synthesized)
aggaggaagaggcccggctggcagccctggaagagcagaggatggaggggaagaagcccagggtgatggcaggcaccttgaagctggaggataagcagcggctggcccaggaggaggaga

SEQ ID NO: 109824 - DNA, 120 bp, Artificial Sequence
  ENSG00000100029_13 (sequence is synthesized)
gtgaggccaagcgcctggccattatgatgatgaagaagcgggagaagtacctgtaccagaagatcatgtttggcaagaggcgaaaaatccgagaggccaacaagctggcggagaagcgga

SEQ ID NO: 109825 - DNA, 120 bp, Artificial Sequence
  ENSG00000100029_14 (sequence is synthesized)
aagcccacgatgaggcggtgaggtctgagaagaaggccaagaaggcaaggccggagtgagtgcctgcggcccctcacagggctgaggccagcccctagcagctggatgtggcagaggcag

SEQ ID NO: 109826 - DNA, 120 bp, Artificial Sequence
  ENSG00000100029_15 (sequence is synthesized)
gccagaggacctaagtgtgatggaccagagtcacttctcctcctcctttctccagccagccctgacccctcatgctctctggctgggccagtgggcagccctcgcttcccttggatggag

SEQ ID NO: 109827 - DNA, 120 bp, Artificial Sequence
  ENSG00000100029_16 (sequence is synthesized)
ctgccctgctggtgcctggtcagagaagaggcctctgtgcccagcctgattctctgctcccaggagccagtgacatgaggtgcagaggcccacccagccccctacctactgcccccattc

SEQ ID NO: 109828 - DNA, 120 bp, Artificial Sequence
  ENSG00000100029_17 (sequence is synthesized)
atcctggctttccacagccccctcccacacagttggacccgtgattctcagggtgctgtgatggggtgagggtagggggagcatttgttattaaatgactggacttttgtgccaattgca

SEQ ID NO: 109829 - DNA, 120 bp, Artificial Sequence
  ENSG00000100029_18 (sequence is synthesized)
tggtagtgcccacctagcccaggacaaggagtggaacgggagctgcagctgcagtggtcacgaaggcagcctggaggaggtggccatggaggatagccttcgttatcgtcagcctctggt

SEQ ID NO: 109830 - DNA, 120 bp, Artificial Sequence
  ENSG00000100029_19 (sequence is synthesized)
gagaagcagcagcatccttccagagagtcacttctgatccccaagtttccaaggaaacaagactctaggtccactttgccgtccagacctgaagcggacccttcatacacagccctgtga

SEQ ID NO: 109831 - DNA, 120 bp, Artificial Sequence
  ENSG00000100029_20 (sequence is synthesized)
ctgcttgcctcaaaacactgcttgctttacacttcacctaactccacccttcccttcaattctttaataacctttccctttgttcagccagatcactatagttcctctgctgggtggttt

SEQ ID NO: 109832 - DNA, 120 bp, Artificial Sequence
  ENSG00000100029_21 (sequence is synthesized)
ccctcattggaataagtcaacaactgggtttgtttctggtggttttaggctgacttggcgaggactagcctaaaaattaacccaaaagagaaaaataaaattgtatgcatgaagatggca

SEQ ID NO: 109833 - DNA, 120 bp, Artificial Sequence
  ENSG00000100029_22 (sequence is synthesized)
aggggacgggcttgtgctgcctcctagacagatatggatgtggaggaagggggattttgctgtccatggagtttagcaagtgctgggttcccaactgttgatgaggggtgaggcgcggca

SEQ ID NO: 109834 - DNA, 120 bp, Artificial Sequence
  ENSG00000100029_23 (sequence is synthesized)
agaagcagcagcatccttccagagagtcacttctgatccccaagccgcataaccgcgaatgaaccaaagagaacccgaagccggtgggaactcagcgcagtctcaccctgcccctcggga

SEQ ID NO: 109835 - DNA, 120 bp, Artificial Sequence
  ENSG00000100029_24 (sequence is synthesized)
accgcttctcagcagcggcagccgaagtctgacgacgcttagcaaccgttaccttgacaacgcaatcctatcgcgcaccatggagtgcggcgcccctctgcatcccagaaggcaccgcgc

SEQ ID NO: 109836 - DNA, 120 bp, Artificial Sequence
  ENSG00000100029_25 (sequence is synthesized)
agggaacaaagggaggaggagggctagtgggaccatgtgagacatcttgaggccattcacgttcctgcttaaagagcccgggaccagcgcagagggcctgatgcctgatctgtcaagtct

SEQ ID NO: 109837 - DNA, 120 bp, Artificial Sequence
  ENSG00000100029_26 (sequence is synthesized)
gtctctgccctagcaccagggatacaatagggaataagaccaagaccctgctcaaagagcttgcaactttttcaaggacacagaccaaaaaccaagctagcaaattactataatgattac

SEQ ID NO: 109838 - DNA, 120 bp, Artificial Sequence
  ENSG00000100029_27 (sequence is synthesized)
gaggtttgtagttacaggcttgtcagaggggtctctgaagggagacgtttgagccagcccgcggaagcacaatccaagcagaggccatggcaagtgcaaaggccccatggtgggagagcc

SEQ ID NO: 109839 - DNA, 120 bp, Artificial Sequence
  ENSG00000100029_28 (sequence is synthesized)
catccttgttggcttcgtcatttaccagaggattccccgaaacacattctgctctggctcttcctggacccaattccctgggtctcattggttctgccaactagacatgtccaagggatg

SEQ ID NO: 109840 - DNA, 120 bp, Artificial Sequence
  ENSG00000100029_29 (sequence is synthesized)
agcagacctcagtcattggcaggtaggccctcaagggtcctcgtccggatttctgggtatcctgtctcaaaggccctgcgatgcagcaggaccctgagttgccctctgtgactcgttttt

SEQ ID NO: 109841 - DNA, 120 bp, Artificial Sequence
  ENSG00000100029_30 (sequence is synthesized)
ggcccacgctggctgtttcccttagctgccaaggtggaaagctccagggaacaggcagtaggagcagaaagccctttgaagtcacctgtagaataaggcttaggagaagggacatctacc

SEQ ID NO: 109842 - DNA, 120 bp, Artificial Sequence
  ENSG00000100029_31 (sequence is synthesized)
tcctggggtcaggtgttatttgacgttcaggatgactgagcagaagaacatgctgcattgtcatcagagtttacattggaggcgacagagctcaggactgggggtcttggaatttcctct

SEQ ID NO: 109843 - DNA, 120 bp, Artificial Sequence
  ENSG00000100029_32 (sequence is synthesized)
gatggcagctgggctgtggggaggtgcaagagagggccacaattgggacatccctgaactgcccatggctaaagacggcagggtcagagaggatggggcctgggcctgttgtcaccctgc

SEQ ID NO: 109844 - DNA, 120 bp, Artificial Sequence
  ENSG00000100029_33 (sequence is synthesized)
agaggcccggctggcagccctggaagagcagaggatggaggggaaggtagggggagctgcaatgcggggcttggcctgggaagcagccctgcttggtgcctgctctggcctagaaggtca

SEQ ID NO: 109845 - DNA, 120 bp, Artificial Sequence
  ENSG00000100030_0 (sequence is synthesized)
aggcaatcggtccgagtggctgtcggctcttcagctctcccgctcggcgtcttccttcctcctcccggtcagcgtcggcggctgcaccggcggcggcgcagtccctgcgggaggggcgac

SEQ ID NO: 109846 - DNA, 80 bp, Artificial Sequence
  ENSG00000100030_1 (sequence is synthesized)
aagagctgagcggcggccgccgagcgtcgagctcagcgcggcggaggcggcggcggcccggcagccaacatggcggcggc

SEQ ID NO: 109847 - DNA, 120 bp, Artificial Sequence
  ENSG00000100030_2 (sequence is synthesized)
gtgttcgacgtggggccgcgctacaccaacctctcgtacatcggcgagggcgcctacggcatggtgtgctctgcttatgataatgtcaacaaagttcgagtagctatcaagaaaatcagc

SEQ ID NO: 109848 - DNA, 120 bp, Artificial Sequence
  ENSG00000100030_3 (sequence is synthesized)
ccctttgagcaccagacctactgccagagaaccctgagggagataaaaatcttactgcgcttcagacatgagaacatcattggaatcaatgacattattcgagcaccaaccatcgagcaa

SEQ ID NO: 109849 - DNA, 120 bp, Artificial Sequence
  ENSG00000100030_4 (sequence is synthesized)
atgaaagatgtatatatagtacaggacctcatggaaacagatctttacaagctcttgaagacacaacacctcagcaatgaccatatctgctattttctctaccagatcctcagagggtta

SEQ ID NO: 109850 - DNA, 120 bp, Artificial Sequence
  ENSG00000100030_5 (sequence is synthesized)
aaatatatccattcagctaacgttctgcaccgtgacctcaagccttccaacctgctgctcaacaccacctgtgatctcaagatctgtgactttggcctggcccgtgttgcagatccagac

SEQ ID NO: 109851 - DNA, 120 bp, Artificial Sequence
  ENSG00000100030_6 (sequence is synthesized)
catgatcacacagggttcctgacagaatatgtggccacacgttggtacagggctccagaaattatgttgaattccaagggctacaccaagtccattgatatttggtctgtaggctgcatt

SEQ ID NO: 109852 - DNA, 120 bp, Artificial Sequence
  ENSG00000100030_7 (sequence is synthesized)
ctggcagaaatgctttctaacaggcccatctttccagggaagcattatcttgaccagctgaaccacattttgggtattcttggatccccatcacaagaagacctgaattgtataataaat

SEQ ID NO: 109853 - DNA, 120 bp, Artificial Sequence
  ENSG00000100030_8 (sequence is synthesized)
ttaaaagctaggaactatttgctttctcttccacacaaaaataaggtgccatggaacaggctgttcccaaatgctgactccaaagctctggacttattggacaaaatgttgacattcaac

SEQ ID NO: 109854 - DNA, 120 bp, Artificial Sequence
  ENSG00000100030_9 (sequence is synthesized)
ccacacaagaggattgaagtagaacaggctctggcccacccatatctggagcagtattacgacccgagtgacgagcccatcgccgaagcaccattcaagttcgacatggaattggatgac

SEQ ID NO: 109855 - DNA, 120 bp, Artificial Sequence
  ENSG00000100030_10 (sequence is synthesized)
ttgcctaaggaaaagctcaaagaactaatttttgaagagactgctagattccagccaggatacagatcttaaatttgtcaggacaagggctcagaggactggacgtgctcagacatcggt

SEQ ID NO: 109856 - DNA, 120 bp, Artificial Sequence
  ENSG00000100030_11 (sequence is synthesized)
gttcttcttcccagttcttgacccctggtcctgtctccagcccgtcttggcttatccactttgactcctttgagccgtttggaggggcggtttctggtagttgtggcttttatgctttca

SEQ ID NO: 109857 - DNA, 120 bp, Artificial Sequence
  ENSG00000100030_12 (sequence is synthesized)
aagaatttcttcagtccagagaattcctcctggcagccctgtgtgtgtcacccattggtgacctgcggcagtatgtacttcagtgcacctactgcttactgttgctttagtcactaattg

SEQ ID NO: 109858 - DNA, 120 bp, Artificial Sequence
  ENSG00000100030_13 (sequence is synthesized)
ctttctggtttgaaagatgcagtggttcctccctctcctgaatccttttctacatgatgccctgctgaccatgcagccgcaccagagagagattcttccccaattggctctagtcactgg

SEQ ID NO: 109859 - DNA, 120 bp, Artificial Sequence
  ENSG00000100030_14 (sequence is synthesized)
catctcactttatgatagggaaggctactacctagggcactttaagtcagtgacagccccttatttgcacttcaccttttgaccataactgtttccccagagcaggagcttgtggaaata

SEQ ID NO: 109860 - DNA, 120 bp, Artificial Sequence
  ENSG00000100030_15 (sequence is synthesized)
ccttggctgatgttgcagcctgcagcaagtgcttccgtctccggaatccttggggagcacttgtccacgtcttttctcatatcatggtagtcactaacatatataaggtatgtgctattg

SEQ ID NO: 109861 - DNA, 120 bp, Artificial Sequence
  ENSG00000100030_16 (sequence is synthesized)
gcccagcttttagaaaatgcagtcatttttctaaataaaaaggaagtactgcacccagcagtgtcactctgtagttactgtggtcacttgtaccatatagaggtgtaacacttgtcaaga

SEQ ID NO: 109862 - DNA, 120 bp, Artificial Sequence
  ENSG00000100030_17 (sequence is synthesized)
agcgttatgtgcagtacttaatgtttgtaagacttacaaaaaaagatttaaagtggcagcttcactcgacatttggtgagagaagtacaaaggttgcagtgctgagctgtgggcggtttc

SEQ ID NO: 109863 - DNA, 120 bp, Artificial Sequence
  ENSG00000100030_18 (sequence is synthesized)
tggggatgtcccagggtggaactccacatgctggtgcatatacgcccttgagctacttcaaatgtgggtgtttcagtaaccacgttccatgcctgaggatttagcagagaggaacactgc

SEQ ID NO: 109864 - DNA, 120 bp, Artificial Sequence
  ENSG00000100030_19 (sequence is synthesized)
gtctttaaatgagaaagtatacaattctttttccttctacagcatgtcagcatctcaagttcatttttcaacctacagtataacaatttgtaataaagcctccaggagctcatgacgtga

SEQ ID NO: 109865 - DNA, 120 bp, Artificial Sequence
  ENSG00000100030_20 (sequence is synthesized)
agcactgttctgtcctcaagtactcaaatatttctgatactgctgagtcagactgtcagaaaaagctagcactaactcgtgtttggagctctatccatattttactgatctctttaagta

SEQ ID NO: 109866 - DNA, 120 bp, Artificial Sequence
  ENSG00000100030_21 (sequence is synthesized)
tttgttcctgccactgtgtactgtggagttgactcggtgttctgtcccagtgcggtgcctcctcttgacttccccactgctctctgtggtgagaaatttgccttgttcaataattactgt

SEQ ID NO: 109867 - DNA, 120 bp, Artificial Sequence
  ENSG00000100030_22 (sequence is synthesized)
accctcgcatgactgttacagctttctgtgcagagatgactgtccaagtgccacatgcctacgattgaaatgaaaactctattgttacctctgagttgtgttccacggaaaatgctatcc

SEQ ID NO: 109868 - DNA, 120 bp, Artificial Sequence
  ENSG00000100030_23 (sequence is synthesized)
agcagatcatttaggaaaaataattctatttttagcttttcatttctcagctgtccttttttcttgtttgatttttgacagcaatggagaatgggttatataaagactgcctgctaatat

SEQ ID NO: 109869 - DNA, 120 bp, Artificial Sequence
  ENSG00000100030_24 (sequence is synthesized)
gaacagaaatgcatttgtaattcatgaaaataaatgtacatcttctatcttcacattcatgttaagattcagtgttgctttcctctggatcagcgtgtctgaatggacagtcaggttcag

SEQ ID NO: 109870 - DNA, 120 bp, Artificial Sequence
  ENSG00000100030_25 (sequence is synthesized)
gttgtgctgaacacagaaatgctcacaggcctcactttgccgcccaggcactggcccagcacttggatttacataagatgagttagaaaggtacttctgtagggtcctttttacctctgc

SEQ ID NO: 109871 - DNA, 120 bp, Artificial Sequence
  ENSG00000100030_26 (sequence is synthesized)
tcggcagagaatcgatgctgtcatgttcctttattcacaatcttaggtctcaaatattctgtcaaaccctaacaaagaagccccgacatctcaggttggattccctggttctctctaaag

SEQ ID NO: 109872 - DNA, 120 bp, Artificial Sequence
  ENSG00000100030_27 (sequence is synthesized)
agggcctgcccttgtgccccagaggtgctgctgggcacagccaagagttgggaagggccgccccacagtacgcagtcctcaccacccagcccagggtgctcacgctcaccactcctgtgg

SEQ ID NO: 109873 - DNA, 120 bp, Artificial Sequence
  ENSG00000100030_28 (sequence is synthesized)
ctgaggaaggatagctggctcatcctcggaaaacagacccacatctctattcttgccctgaaatacgcgcttttcacttgcgtgctcagagctgccgtctgaaggtccacacagcattga

SEQ ID NO: 109874 - DNA, 120 bp, Artificial Sequence
  ENSG00000100030_29 (sequence is synthesized)
cgggacacagaaatgtgactgttaccggataacactgattagtcagttttcatttataaaaaagcattgacagttttattactcttgtttctttttaaatggaaagttactattataagg

SEQ ID NO: 109875 - DNA, 120 bp, Artificial Sequence
  ENSG00000100030_30 (sequence is synthesized)
ttaatttggagtcctcttctaaatagaaaaccatatccttggctactaacatctggagactgtgagctccttcccattccccttcctggtactgtggagtcagattggcatgaaaccact

SEQ ID NO: 109876 - DNA, 120 bp, Artificial Sequence
  ENSG00000100030_31 (sequence is synthesized)
aacttcattctagaatcattgtagccataagttgtgtgctttttattaatcatgccaaacataatgtaactgggcagagaatggtcctaaccaaggtacctatgaaaagcgctagctatc

SEQ ID NO: 109877 - DNA, 120 bp, Artificial Sequence
  ENSG00000100030_32 (sequence is synthesized)
atgtgtagtagatgcatcattttggctcttcttacatttgtaaaaatgtacagattaggtcatcttaattcatattagtgacacggaacagcacctccactatttgtatgttcaaataag

SEQ ID NO: 109878 - DNA, 120 bp, Artificial Sequence
  ENSG00000100030_33 (sequence is synthesized)
ctttcagactaatagcttttttggtgtctaaaatgtaagcaaaaaattcctgctgaaacattccagtcctttcatttagtataaaagaaatactgaacaagccagtgggatggaattgaa

SEQ ID NO: 109879 - DNA, 120 bp, Artificial Sequence
  ENSG00000100030_34 (sequence is synthesized)
agaactaatcatgaggactctgtcctgacacaggtcctcaaagctagcagagatacgcagacattgtggcatctgggtagaagaatactgtattgtgtgtgcagtgcacagtgtgtggtg

SEQ ID NO: 109880 - DNA, 120 bp, Artificial Sequence
  ENSG00000100030_35 (sequence is synthesized)
tgtgcacactcattccttctgctcttgggcacaggcagtgggtgtagaggtaaccagtagctttgagaagctacatgtagctcaccagtggttttctctaaggaatcacaaaagtaaact

SEQ ID NO: 109881 - DNA, 120 bp, Artificial Sequence
  ENSG00000100030_36 (sequence is synthesized)
acccaaccacatgccacgtaatatttcagccattcagaggaaactgttttctctttatttgcttatatgttaatatggtttttaaattggtaacttttatatagtatggtaacagtatgt

SEQ ID NO: 109882 - DNA, 120 bp, Artificial Sequence
  ENSG00000100030_37 (sequence is synthesized)
taatacacacatacatacgcacacatgctttgggtccttccataatacttttatatttgtaaatcaatgttttggagcaatcccaagtttaagggaaatatttttgtaaatgtaatggtt

SEQ ID NO: 109883 - DNA, 120 bp, Artificial Sequence
  ENSG00000100030_38 (sequence is synthesized)
ttgaaaatctgagcaatccttttgcttatacatttttaaagcatttgtgctttaaaattgttatgctggtgtttgaaacatgatactcctgtggtgcagatgagaagctataacagtgaa

SEQ ID NO: 109884 - DNA, 120 bp, Artificial Sequence
  ENSG00000100030_39 (sequence is synthesized)
tatgtggtttctcttacgtcatccaccttgacatgatgggtcagaaacaaatggaaatccagagcaagtcctccagggttgcaccaggtttacctaaagcttgttgccttttcttgtgct

SEQ ID NO: 109885 - DNA, 120 bp, Artificial Sequence
  ENSG00000100030_40 (sequence is synthesized)
gtttatgcgtgtagagcactcaagaaagttctgaaactgctttgtatctgctttgtactgttggtgccttcttggtattgtaccccaaaattctgcatagattatttagtataatggtaa

SEQ ID NO: 109886 - DNA, 120 bp, Artificial Sequence
  ENSG00000100030_41 (sequence is synthesized)
aatggtaagttaaaaaatgttaaaggaagattttattaagaatctgaatgtttattcattatattgttacaatttaacattaacatttatttgtggtatttgtgatttggttaatctgta

SEQ ID NO: 109887 - DNA, 120 bp, Artificial Sequence
  ENSG00000100030_42 (sequence is synthesized)
gtaagtagaaaggtttatatttcatcttaattcttttgatgttgtaaacgtactttttaaaagatggattatttgaatgtttatggcacctgacttgtaaaaaaaaaaaactacaaaaaa

SEQ ID NO: 109888 - DNA, 120 bp, Artificial Sequence
  ENSG00000100030_43 (sequence is synthesized)
atccttagaatcattaaattgtgtccctgtattaccaaaataacacagcaccgtgcatgtatagtttaattgcagtttcatctgtgaaaacgtgaaattgtctagtccttcgttatgttc

SEQ ID NO: 109889 - DNA, 120 bp, Artificial Sequence
  ENSG00000100030_44 (sequence is synthesized)
cccagatgtcttccagatttgctctgcatgtggtaacttgtgttagggctgtgagctgttcctcgagttgaatggggatgtcagtgctcctagggttctccaggtggttcttcagacctt

SEQ ID NO: 109890 - DNA, 120 bp, Artificial Sequence
  ENSG00000100030_45 (sequence is synthesized)
tcagagcaagaagtcataaagataggatttcttggacatttggttcttatcaatattgggcattatgtaatgacttatttacaaaacaaagatactggaaaatgttttggatgtggtgtt

SEQ ID NO: 109891 - DNA, 120 bp, Artificial Sequence
  ENSG00000100030_46 (sequence is synthesized)
atggaaagagcacaggccttggacccatccagctgggttcagaactaccccctgcttataactgcggctggctgtgggccagtcattctgcgtctctgctttcttcctctgcttcagact

SEQ ID NO: 109892 - DNA, 120 bp, Artificial Sequence
  ENSG00000100030_47 (sequence is synthesized)
gtcagctgtaaagtggaagcaatattacttgccttgtatatggtaaagattataaaaatacatttcaactgttcagcatagtacttcaaagcaagtactcagtaaatagcaagtcttttt

SEQ ID NO: 109893 - DNA, 120 bp, Artificial Sequence
  ENSG00000100030_48 (sequence is synthesized)
aaatgctgctttatttcactaaattttgttgtgaggtgtcactaaaatgcctgcaaacaaacgtaactgctaatctgagaggaaaccctcttactaatcagagaagaaaccctcctgtca

SEQ ID NO: 109894 - DNA, 120 bp, Artificial Sequence
  ENSG00000100030_49 (sequence is synthesized)
gaaaccttcagggaagtgagctgatcacacctaaactgggagtttgcaatggggtatttgaagcactgtgggagtattccactggccctctccctgagagacttaacagtcttccctgtt

SEQ ID NO: 109895 - DNA, 120 bp, Artificial Sequence
  ENSG00000100030_50 (sequence is synthesized)
gtccagattctgtataaggcaatcagaataatcatcttccttgttcagcagaggagcctggtcccattttccccactttgtgatgggcttctctcagcggtagctcagcagttccagatg

SEQ ID NO: 109896 - DNA, 120 bp, Artificial Sequence
  ENSG00000100030_51 (sequence is synthesized)
gcagtttggaccagcatctaggctggccagttcgctgtgtttacttagaaccaacacgttcagagctggcctggaccatctgaggggaacaggaaacacccctaggctgtggaagcaagt

SEQ ID NO: 109897 - DNA, 120 bp, Artificial Sequence
  ENSG00000100030_52 (sequence is synthesized)
gcagacccccacccccggccctgaagccaagggggcagggtttgggagtggccaaagagaagcagtgcagggatgggttttcctagggacaggcttagcattcctgactctaggaagaag

SEQ ID NO: 109898 - DNA, 120 bp, Artificial Sequence
  ENSG00000100030_53 (sequence is synthesized)
gagcagtgaggcggagaaacagtggaggggatggtggcattgggccccatggggccgagatggacacagggctcgttctcttgagtctggtgccaaggacagctgaagacgacatcattt

SEQ ID NO: 109899 - DNA, 120 bp, Artificial Sequence
  ENSG00000100030_54 (sequence is synthesized)
tcaggtggagaggagagagtggagggagatcatgccctgtgatgtgtcttttgcaggtgaaggtgggagacaaggtctctgctgacgatgaggcagagccaccgtgaaagttgtaatagg

SEQ ID NO: 109900 - DNA, 120 bp, Artificial Sequence
  ENSG00000100030_55 (sequence is synthesized)
aggactgcccgccgctggaagggcctgcagtgacgctaggacaccctctgcctgcatgtcacgttagctgggctgggcgaagtagaagaccaaggggaagaggtgcagtggggagaccag

SEQ ID NO: 109901 - DNA, 120 bp, Artificial Sequence
  ENSG00000100030_56 (sequence is synthesized)
gtgggatgcaaccacaggaccagtggaggggctgtggcacgtgggcggagactgagtggctgggcatgtgttgtggctgagcatgtggtgtgggcagtggtcctagaccccgccatgtcc

SEQ ID NO: 109902 - DNA, 120 bp, Artificial Sequence
  ENSG00000100030_57 (sequence is synthesized)
ggacaatgatatagagcgtctcagcatcgccagtctagactgtctatggagagcagaaagttgtctggggctgcctggggaactgtgaggccagctatatcaccgtcgctgatggtgaca

SEQ ID NO: 109903 - DNA, 120 bp, Artificial Sequence
  ENSG00000100030_58 (sequence is synthesized)
ttacggtggtggcaggagcaaggagagagggaagaaggaccccgtccagctttagtcacaaaatacccaatggaagatgccagtgccaatcctgtgggtttccttgggacttcacactgg

SEQ ID NO: 109904 - DNA, 120 bp, Artificial Sequence
  ENSG00000100030_59 (sequence is synthesized)
ctttcttatctgctccagatccattcagtagtcactgagttcctgccaaatactttgtagcgccagaagccaggagcggggtctgcagcagggcagtccccattttcaggaaatgcctgg

SEQ ID NO: 109905 - DNA, 120 bp, Artificial Sequence
  ENSG00000100030_60 (sequence is synthesized)
ggaaatgcctggagctgctggtccctgagagaaaggaaaacatctttcagccgtacgcaggccaagaaggccaatgtccagtagctttgtgattttttttatatttttttatttatttat

SEQ ID NO: 109906 - DNA, 60 bp, Artificial Sequence
  ENSG00000100030_61 (sequence is synthesized)
ttatttatttatttttgagattccgcctcctggggtcaagcagttctgcctcagcctccc

SEQ ID NO: 109907 - DNA, 120 bp, Artificial Sequence
  ENSG00000100030_62 (sequence is synthesized)
gtgagccactgcacccagcctgtgatgtttctgtggggttccacaaatgtgtgtgtgtgtaaaagctgatgattacagcaagaatgtgaacagtagcagttttccatttgaaggcaagtt

SEQ ID NO: 109908 - DNA, 120 bp, Artificial Sequence
  ENSG00000100030_63 (sequence is synthesized)
ttgtctttatctgggtatcagaaggaccctctgggccattgtcgcttcctgtactcagagccaccctagtactacgggcacacacagaaaacagcagcctgcgtactttcaaaggaaagg

SEQ ID NO: 109909 - DNA, 120 bp, Artificial Sequence
  ENSG00000100030_64 (sequence is synthesized)
catctttaatcaccaatgcctggaaaaattattttgtttccctcttccttccgtcttgtttcctaacttcttaccaaagtttagagtctgagtttttcgtataataatgtcccacatcca

SEQ ID NO: 109910 - DNA, 120 bp, Artificial Sequence
  ENSG00000100030_65 (sequence is synthesized)
cacatcgggcctacagatgctctcccttgaatcgactggaaacatgacaccggttccatgctctggaactgtcacctgtgatgtgctgggctgtgtcccaagcacaggaatcccagcagt

SEQ ID NO: 109911 - DNA, 120 bp, Artificial Sequence
  ENSG00000100030_66 (sequence is synthesized)
ttcagctcgatgcagaaccaccatgctccagacacaggcttgggaaagacacgtcaaaattaaaatactaggtaagagaagcacctgattgggtagaagttggagaggaatcctggaatt

SEQ ID NO: 109912 - DNA, 120 bp, Artificial Sequence
  ENSG00000100030_67 (sequence is synthesized)
ttgtggccagaaggagccactgccccttttgtttagtaagactagacagtaacagaagccagttgtcagctatgaaagtggtgggtgaagcaggggaggctcctctatggtgggaccctg

SEQ ID NO: 109913 - DNA, 120 bp, Artificial Sequence
  ENSG00000100030_68 (sequence is synthesized)
gacaagggaagccgaatgtgtgaagaaggggtgcgggggtgtgcggtgccctaggacactagggcaaaggtttcaaacctggaacaaggcactggaggaagatctgctgccagtcagcag

SEQ ID NO: 109914 - DNA, 120 bp, Artificial Sequence
  ENSG00000100030_69 (sequence is synthesized)
tgcgggccctcgagttagcagtccgtgcgcagaggggccagttctgagaccagtttggagagtcaggcagtgacccattggccatgtcataattccttcagcctgcctcctctttaatcc

SEQ ID NO: 109915 - DNA, 120 bp, Artificial Sequence
  ENSG00000100030_70 (sequence is synthesized)
cagagagtgctctttcttcatacttcctttaaaatactaaattgttcccattccatggggagctggctaggctttacaggctaggaaatgtaggttttctgagatggaaccatctacaca

SEQ ID NO: 109916 - DNA, 120 bp, Artificial Sequence
  ENSG00000100030_71 (sequence is synthesized)
aggaggaggaaggcactaagactacagatgagacccatgacagggctgagcatttggaagccaaccctggttgcttttcaagaattgctttgtggctgggtgcagtggttcacacctgta

SEQ ID NO: 109917 - DNA, 85 bp, Artificial Sequence
  ENSG00000100030_72 (sequence is synthesized)
gggacaccccaccgcccccggctctgcaaaaaaattaaaaattagccaggcgtggtgtcatgagcctgtggtctcaactactcag

SEQ ID NO: 109918 - DNA, 120 bp, Artificial Sequence
  ENSG00000100030_73 (sequence is synthesized)
ccaggcgtggtgtcatgagcctgtggtctcaactactcaggaggctgaggctggaggatcgcttgaacctgggaggtcaaggctccagtgaaccataattgtgccactgcactgcagcct

SEQ ID NO: 109919 - DNA, 120 bp, Artificial Sequence
  ENSG00000100030_74 (sequence is synthesized)
gggcgacaatttgttttctaaattgcttttgaaagtctactgcattacatattccaaaaagcagtggttttcaaatacttttatcaccgatatccttttatgaaatgaaatcagtagaac

SEQ ID NO: 109920 - DNA, 120 bp, Artificial Sequence
  ENSG00000100030_75 (sequence is synthesized)
tttctctgctctgaataagcaagggtgggaacctgtctacctcccacagatagcataatgtgcctgccatagaggagccaaaaaatggtgatgggaactgagaggagagcaaatgtcaca

SEQ ID NO: 109921 - DNA, 120 bp, Artificial Sequence
  ENSG00000100030_76 (sequence is synthesized)
aaagactgagcaattgagaaaacaaaacaagaccacagatgactgttaacgcctccacagtggaccaagaaaggacagagagctggcagcatgggcatcactgtctggtcggcagcagga

SEQ ID NO: 109922 - DNA, 120 bp, Artificial Sequence
  ENSG00000100030_77 (sequence is synthesized)
aggcctcgctagggaattgagtacagtcatctaactagtttaaaagtacaggaaggatgattaaggctattggagaggtcatacaaataggggaggggcaggcaatggctgataagacat

SEQ ID NO: 109923 - DNA, 120 bp, Artificial Sequence
  ENSG00000100030_78 (sequence is synthesized)
gaatttgtaaggcgatgagtattgcagtcagcaaaacaaacgagactgctctcccaacacataactcagcagggaggccaggcattggtttaaccatttaatataaagaagttaaaatta

SEQ ID NO: 109924 - DNA, 120 bp, Artificial Sequence
  ENSG00000100030_79 (sequence is synthesized)
caaatgcgctaagtgcctaaagaagaataagtgcaggaatgagagcagcatggactgccacagttttagaataagcactgtcactgctagattggaaacaaaaatccataaatttggccc

SEQ ID NO: 109925 - DNA, 120 bp, Artificial Sequence
  ENSG00000100030_80 (sequence is synthesized)
gtcagagtgagaactctgtatcaaaaaataaaaataaaaaaaagtccataaatctgcaatgtctcagttaagaaagaaagactgggccaatgcagatttcaaaccggagaaagtcatact

SEQ ID NO: 109926 - DNA, 120 bp, Artificial Sequence
  ENSG00000100030_81 (sequence is synthesized)
gtcagtgaaggccgcctgtggccggaaggcgccaggggattagcaccctggactcagtgttgctgggaaacagggccccaaggctgggagcacagtgtttaaagggcatctacccaagaa

SEQ ID NO: 109927 - DNA, 120 bp, Artificial Sequence
  ENSG00000100030_82 (sequence is synthesized)
gggagcacagggcaaggaggagctgcaggggggcttggctgccaaagtgaattctgaggagagagctattgctgcctacgatatgcaggctgcacagaacacaagtggaatcagcaggca

SEQ ID NO: 109928 - DNA, 120 bp, Artificial Sequence
  ENSG00000100030_83 (sequence is synthesized)
ggagaggcagctaacgacgcagcccgtttcttatttctgttttctcacaagcgatgaaagtggaaaagagggtgagcaggtggcccacacatgtgcctccagtgctgcggcccctccggg

SEQ ID NO: 109929 - DNA, 120 bp, Artificial Sequence
  ENSG00000100030_84 (sequence is synthesized)
gaccatcagccaggccccggggagggagccagccacagtgtgtccggctcttctctgaagggaagagagccttgaatagactgaagcgaagacggttctgcaaggacaaggcagaccgaa

SEQ ID NO: 109930 - DNA, 120 bp, Artificial Sequence
  ENSG00000100030_85 (sequence is synthesized)
ggcattggttttttttttcagataaggagaattagactcccaagtagacaccagagtcactgtttggttggtgggtgatagtggggtcacagtggctgcctgtgctcccccagggtgagc

SEQ ID NO: 109931 - DNA, 120 bp, Artificial Sequence
  ENSG00000100030_86 (sequence is synthesized)
gtgactgtgctaacctgggtggggcagcatgcacacccctctggcagccctttgttgctcgctgatgacaagtttggatgatcccgccaaacagcttgctaagatgtagtccccagtgtt

SEQ ID NO: 109932 - DNA, 120 bp, Artificial Sequence
  ENSG00000100030_87 (sequence is synthesized)
ggaggtggggcctgatgggaggtgctacccttgtgagataaggttgtgtaaaagcctgtggcacctccccacactgacgctctcacccctgctctggccatgtgccgcgcctgctcccac

SEQ ID NO: 109933 - DNA, 120 bp, Artificial Sequence
  ENSG00000100030_88 (sequence is synthesized)
ccgcgcctgctcccacttccccttctgccaggagtaaaagcccccgagacctcccagaagccaagcagatgctagtgccatgcttcctctgcagcctgcagaactgtgagccaattaaac

SEQ ID NO: 109934 - DNA, 120 bp, Artificial Sequence
  ENSG00000100030_89 (sequence is synthesized)
gaggcgctgccttttgtttctagaatattatgttcctcaaggtccattattttgtattcttttccaagctccttattggaaggtatttttttaaatttagaattaaaaattatttagaaa

SEQ ID NO: 109935 - DNA, 120 bp, Artificial Sequence
  ENSG00000100030_90 (sequence is synthesized)
agtcctgttgtaaattcagaatctgagcagtggtcattttatgaatcagtaaattactgccttacccataacaactttgactgttaaatgttttgttttcttttaaagcccatcgccgaa

SEQ ID NO: 109936 - DNA, 120 bp, Artificial Sequence
  ENSG00000100031_0 (sequence is synthesized)
cagaccgggcgtcgggtgagcccagaagtgagagcagttggctgtgccccagtgctgtgtgacccagaggcgccgctcaccctctctgagctggtggacatcatagcgggtgcagcccag

SEQ ID NO: 109937 - DNA, 120 bp, Artificial Sequence
  ENSG00000100031_1 (sequence is synthesized)
aactgtcttctgaggaagaggtgctctcctgggcccccactgtccccaggcctcagatgctgcatattgctggcccagctcctgaggctctttggacctccaggaatcggtgtctctatc

SEQ ID NO: 109938 - DNA, 120 bp, Artificial Sequence
  ENSG00000100031_2 (sequence is synthesized)
aggaacccttaaccctgacccggactcccagctgggacccggggtgtcggagtggcaagagcgctgtcaggcctggtgaagggtgtgagctgtccaacggggcagggaggaggcagggcc

SEQ ID NO: 109939 - DNA, 120 bp, Artificial Sequence
  ENSG00000100031_3 (sequence is synthesized)
tgttctgcagttggacagacagagccctctagctgctttctggaagactgaagggcagcaaggcaagtgaggtgctgccgtcatccaggctggacagttcagtgatttgcctgaggcccc

SEQ ID NO: 109940 - DNA, 120 bp, Artificial Sequence
  ENSG00000100031_4 (sequence is synthesized)
acagcaggagaacgagaaggctgcctgatcagagagtccctgaagaagattctgtggctacaggcttcagcagagtgtgagggagaccccggttatttcctcagctatttccaccaaatc

SEQ ID NO: 109941 - DNA, 120 bp, Artificial Sequence
  ENSG00000100031_5 (sequence is synthesized)
ctcctgtctttcgtggccaacaccccaggcaaggcttggggcccccgtctgctgctggacgcagagccatgaagaagaagttagtggtgctgggcctgctggccgtggtcctggtgctgg

SEQ ID NO: 109942 - DNA, 120 bp, Artificial Sequence
  ENSG00000100031_6 (sequence is synthesized)
tcattgtcggcctctgtctctggctgccctcagcctccaaggaacctgacaaccatgtgtacaccagggctgccgtggccgcggatgccaagcagtgctcgaagattgggagggatgcac

SEQ ID NO: 109943 - DNA, 120 bp, Artificial Sequence
  ENSG00000100031_7 (sequence is synthesized)
tgcgggacggtggctctgcggtggatgcagccattgcagccctgttgtgtgtggggctcatgaatgcccacagcatgggcatcgggggtggcctcttcctcaccatctacaacagcacca

SEQ ID NO: 109944 - DNA, 120 bp, Artificial Sequence
  ENSG00000100031_8 (sequence is synthesized)
cacgaaaagctgaggtcatcaacgcccgcgaggtggcccccaggctggcctttgccaccatgttcaacagctcggagcagtcccagaagggggggctgtcggtggcggtgcctggggaga

SEQ ID NO: 109945 - DNA, 120 bp, Artificial Sequence
  ENSG00000100031_9 (sequence is synthesized)
tccgaggctatgagctggcacaccagcggcatgggcggctgccctgggctcgcctcttccagcccagcatccagctggcccgccagggcttccccgtgggcaagggcttggcggcagccc

SEQ ID NO: 109946 - DNA, 120 bp, Artificial Sequence
  ENSG00000100031_10 (sequence is synthesized)
atcgagcagcagcctgtcttgtgtgaggtgttctgccgggatagaaaggtgcttcgggagggggagagactgaccctgccgcagctggctgacacctacgagacgctggccatcgagggt

SEQ ID NO: 109947 - DNA, 120 bp, Artificial Sequence
  ENSG00000100031_11 (sequence is synthesized)
gcccaggccttctacaacggcagcctcacggcccagattgtgaaggacatccaggcggccgggggcattgtgacagctgaggacctgaacaactaccgtgctgagctgatcgagcacccg

SEQ ID NO: 109948 - DNA, 120 bp, Artificial Sequence
  ENSG00000100031_12 (sequence is synthesized)
ctgaacatcagcctgggagacgtggtgctgtacatgcccagtgcgccgctcagcgggcccgtgctggccctcatcctcaacatcctcaaagggtacaacttctcccgggagagcgtggag

SEQ ID NO: 109949 - DNA, 120 bp, Artificial Sequence
  ENSG00000100031_13 (sequence is synthesized)
agccccgagcagaagggcctgacgtaccaccgcatcgtagaggctttccggtttgcctacgccaagaggaccctgcttggggaccccaagtttgtggatgtgactgaggtggtccgcaac

SEQ ID NO: 109950 - DNA, 120 bp, Artificial Sequence
  ENSG00000100031_14 (sequence is synthesized)
atgacctccgagttcttcgctgcccagctccgggcccagatctctgacgacaccactcacccgatctcctactacaagcccgagttctacacgccggatgacgggggcactgctcacctg

SEQ ID NO: 109951 - DNA, 120 bp, Artificial Sequence
  ENSG00000100031_15 (sequence is synthesized)
tctgtcgtcgcagaggacggcagtgctgtgtccgccaccagcaccatcaacctctactttggctccaaggtccgctccccggtcagcgggatcctgttcaataatgaaatggacgacttc

SEQ ID NO: 109952 - DNA, 120 bp, Artificial Sequence
  ENSG00000100031_16 (sequence is synthesized)
agctctcccagcatcaccaacgagtttggggtacccccctcacctgccaatttcatccagccagggaagcagccgctctcgtccatgtgcccgacgatcatggtgggccaggacggccag

SEQ ID NO: 109953 - DNA, 85 bp, Artificial Sequence
  ENSG00000100031_17 (sequence is synthesized)
gggccaggacggccaggtccggatggtggtgggagctgctgggggcacacagatcaccacggccactgcacttgaagcgggccgt

SEQ ID NO: 109954 - DNA, 87 bp, Artificial Sequence
  ENSG00000100031_18 (sequence is synthesized)
cggctatgacgtgaagcgggccgtggaggagccccggctgcacaaccagcttctgcccaacgtcacgacagtggagagaaacattga

SEQ ID NO: 109955 - DNA, 120 bp, Artificial Sequence
  ENSG00000100031_19 (sequence is synthesized)
caagccatcgtccgcacggctggtggctgggcagctgcctcggactccaggaaaggcggggagcctgccggctactgagtgctccaggaggacaaggctgacaagcaatccagggacaag

SEQ ID NO: 109956 - DNA, 120 bp, Artificial Sequence
  ENSG00000100031_20 (sequence is synthesized)
atactcaccaggaccaggaaggggactctgggggaccggcttcccctgtgagcagcagagcagcacaataaatgaggccactgtgccaggctccaggtggcctccctggcctgtctcccc

SEQ ID NO: 109957 - DNA, 120 bp, Artificial Sequence
  ENSG00000100031_21 (sequence is synthesized)
acatcataggtggggaagctcaggtcagggcactcccatgagtgtctggaggcctgagtcccattctcagctctgccatatgcttgctgcgctctagaggagttcctcttcctctccaag

SEQ ID NO: 109958 - DNA, 120 bp, Artificial Sequence
  ENSG00000100031_22 (sequence is synthesized)
cctcggtttatgtacccgtgcagtgggagtgagttgcacttcggggtgaagggggcaagacttgtgtgggcgcatcctgcagaaggatcccacagcgggtgcagcccagaactgtcttct

SEQ ID NO: 109959 - DNA, 120 bp, Artificial Sequence
  ENSG00000100031_23 (sequence is synthesized)
agtggagcagccctctgccttcaggaccctgtgctgataatgggatgaggagatacagacccttcccaccacgtgtggggacacattctgagcgtggggtcccagtggccactgtggctg

SEQ ID NO: 109960 - DNA, 120 bp, Artificial Sequence
  ENSG00000100031_24 (sequence is synthesized)
gccatgtgtcctgagtggcaagggacactaggaagctcccggaagggacactaggaagacgagcgctgagtgacagggccacccacctgtgacaggcgctgcccctgttctgctccgttc

SEQ ID NO: 109961 - DNA, 120 bp, Artificial Sequence
  ENSG00000100031_25 (sequence is synthesized)
ggcccaccaagcctggggaggtggccacccttccatgatggcatttggatgttccctgtgtgtggggagggcacagggactccattcgtagaccacctctgggacagtgtgtctgcctct

SEQ ID NO: 109962 - DNA, 120 bp, Artificial Sequence
  ENSG00000100031_26 (sequence is synthesized)
gaggtcagacgctctgcactgggacagggtggagtggagggaaatccagcttggggctcattggaggggcttgctggcagacaccgccctttgtgggaaactgactgtgggagaggggaa

SEQ ID NO: 109963 - DNA, 120 bp, Artificial Sequence
  ENSG00000100031_27 (sequence is synthesized)
ccccaacctctgtcaccacatccctcttccctgttgtcacacctgtcacctgctgccatagccatgagacttcccaagggtcactgctgccactcactgcacagcctggaagggagtcca

SEQ ID NO: 109964 - DNA, 120 bp, Artificial Sequence
  ENSG00000100031_28 (sequence is synthesized)
caggggacatacagtgagcaagagacctgtgccactcaggcctcctgggggtgtccccagtgcagccatgatgataatcacagctaccattcaccaagccctgcccacagtctaacctac

SEQ ID NO: 109965 - DNA, 120 bp, Artificial Sequence
  ENSG00000100031_29 (sequence is synthesized)
tctattcacaacactcccagcagcaaggcaagtgaggtgctgccgtcatccaggctggacagttcagtgatttgcctgaggccccacagcagagttcaactggagacagagaaaccagct

SEQ ID NO: 109966 - DNA, 120 bp, Artificial Sequence
  ENSG00000100031_30 (sequence is synthesized)
ggtcagcgggatcctgttcaataatgaaatggacgacttcagctctcccagcatcaccaacgagtttggggtacccccctcacctgccaatttcatccagccagcccccaagccatgctg

SEQ ID NO: 109967 - DNA, 120 bp, Artificial Sequence
  ENSG00000100031_31 (sequence is synthesized)
tccgtgagaggcctgcctgtcctgcaccctgtgcagatgcctcccactgtccgccggggctgctgggcacgccctggctggtctcttggactagcgggtgcagcccagaactgtcttctg

SEQ ID NO: 109968 - DNA, 76 bp, Artificial Sequence
  ENSG00000100031_32 (sequence is synthesized)
cggtcagagtcacagtcaagggccttctgagacctgtgccccctccccaccctccctccccacctcctcaggccag

SEQ ID NO: 109969 - DNA, 120 bp, Artificial Sequence
  ENSG00000100031_33 (sequence is synthesized)
attgaatgcagcaagggtctggaggctgaggaccaggcagacagacattcagagttgctggaacgcgacagagacagggagtcagactggtcatgcaaggccagctctggggtctcggca

SEQ ID NO: 109970 - DNA, 120 bp, Artificial Sequence
  ENSG00000100031_34 (sequence is synthesized)
cgcctcttccagcccagcatccagctggcccgccagggcttccccgtgggcaagggcttggcggcagccctggaaaacaagcggaccgtcatcgagcagcagcctgtcttgtgggggcat

SEQ ID NO: 109971 - DNA, 85 bp, Artificial Sequence
  ENSG00000100031_35 (sequence is synthesized)
aggctggcctttgccaccatgttcaacagctcggagcagtcccagaaggcactttaggaggccaagtcaggaggagcgcaagcaa

SEQ ID NO: 109972 - DNA, 120 bp, Artificial Sequence
  ENSG00000100031_36 (sequence is synthesized)
ggtcagagctttaagctgcagctctgatgccccagggacctctcagacccccctgcccagagcaggcagcccgcgggtgcagcccagaactgtcttctgaggaagaggtgctctcctggg

SEQ ID NO: 109973 - DNA, 120 bp, Artificial Sequence
  ENSG00000100033_0 (sequence is synthesized)
ggtctcactctgttgctgtcttcacggagagcaggagcagaggctttgagaagccagtgggccttggcctcagccctgccggcagagggtccccaccatgcagctgaagtgccagggtgc

SEQ ID NO: 109974 - DNA, 120 bp, Artificial Sequence
  ENSG00000100033_1 (sequence is synthesized)
ttgtgaagtctaagcccttgtctggcatttgtcaggaatatagggtgaggcctctgggaccgagcggggcggggcggggcggggcggggcggggcgggaccaacagcgcacacttaagcg

SEQ ID NO: 109975 - DNA, 120 bp, Artificial Sequence
  ENSG00000100033_2 (sequence is synthesized)
cacacttaagcggcccgggcgggtaccgccgtcccgccatggctctgaggcgcgccctgcccgcgctgcgcccctgcattccccgcttcgtcccgctgtccacggcgccggcctcccgcg

SEQ ID NO: 109976 - DNA, 120 bp, Artificial Sequence
  ENSG00000100033_3 (sequence is synthesized)
gcagcgggcccagcggccgtgccaggaggtgggtcggccacggcagtgcggccgccggtgcccgccgtggacttcggcaacgcgcaggaggcgtaccgcagccggcgaacctgggagctg

SEQ ID NO: 109977 - DNA, 120 bp, Artificial Sequence
  ENSG00000100033_4 (sequence is synthesized)
ggagcctgctggtgctgcgcttgtgcgcctggcccgcgctgctggcgcgccacgagcagctgctgtatgtttccaggaaacttctaggacagaggctattcaacaagctcatgaagatga

SEQ ID NO: 109978 - DNA, 120 bp, Artificial Sequence
  ENSG00000100033_5 (sequence is synthesized)
ccttctatgggcattttgtagccggggaggaccaggagtccatccagcccctgcttcggcactacagggccttcggtgtcagcgccatcctggactatggagtggaggaggacctgagcc

SEQ ID NO: 109979 - DNA, 120 bp, Artificial Sequence
  ENSG00000100033_6 (sequence is synthesized)
ccgaggaggcagagcacaaggagatggagtcctgcacctcagctgcggagagggatggcagtggcacgaataagcgggacaagcaataccaggcccactgggccttcggggaccgcagga

SEQ ID NO: 109980 - DNA, 120 bp, Artificial Sequence
  ENSG00000100033_7 (sequence is synthesized)
atggtgtcatcagtgcccgcacctacttctacgccaatgaggccaagtgcgacagccacatggagacattcttgcgctgcatcgaagcctcaggtagagtcagcgatgacggcttcatag

SEQ ID NO: 109981 - DNA, 120 bp, Artificial Sequence
  ENSG00000100033_8 (sequence is synthesized)
ccattaagctcacagcactggggagaccccagtttctgctgcagttctcagaggtgctggccaagtggaggtgcttctttcaccaaatggctgtggagcaagggcaggcgggcctggctg

SEQ ID NO: 109982 - DNA, 120 bp, Artificial Sequence
  ENSG00000100033_9 (sequence is synthesized)
ccatggacaccaagctggaggtggcggtgctgcaggaaagtgtcgcaaagttgggcatcgcatccagggctgagattgaggactggttcacggcagagaccctgggagtgtctggcacca

SEQ ID NO: 109983 - DNA, 120 bp, Artificial Sequence
  ENSG00000100033_10 (sequence is synthesized)
gtccccaacgcacagacaggacagctggagcccctgctgtcccggttcactgaggaggaggagctacagatgaccaggatgctacagcggatggatgtcctggccaagaaagccacagag

SEQ ID NO: 109984 - DNA, 120 bp, Artificial Sequence
  ENSG00000100033_11 (sequence is synthesized)
atgggcgtgcggctgatggtggatgccgagcagacctacttccagccggccatcagccgcctgacgctggagatgcagcggaagttcaatgtggagaagccgctcatcttcaacacatac

SEQ ID NO: 109985 - DNA, 120 bp, Artificial Sequence
  ENSG00000100033_12 (sequence is synthesized)
cagtgctacctcaaggatgcctatgacaatgtgaccctggacgtggagctggctcgccgtgagggctggtgttttggggccaagctggtgcggggcgcatacctggcccaggagcgagcc

SEQ ID NO: 109986 - DNA, 120 bp, Artificial Sequence
  ENSG00000100033_13 (sequence is synthesized)
cgtgcggcagagatcggctatgaggaccccatcaaccccacgtacgaggccaccaacgccatgtaccacaggtgcctggactacgtgttggaggagctgaagcacaacgccaaggccaag

SEQ ID NO: 109987 - DNA, 120 bp, Artificial Sequence
  ENSG00000100033_14 (sequence is synthesized)
gtgatggtggcctcccacaatgaggacacagtgcgctttgcactgcgcaggatggaggagctgggcctgcatcctgctgaccaccgggtgtactttggacagctgctaggcatgtgtgac

SEQ ID NO: 109988 - DNA, 120 bp, Artificial Sequence
  ENSG00000100033_15 (sequence is synthesized)
cagatcagcttcccgctgggccaggccggctaccccgtgtacaagtacgtgccctatggccccgtgatggaggtgctgccctacttgtcccgccgtgccctggagaacagcagcctcatg

SEQ ID NO: 109989 - DNA, 120 bp, Artificial Sequence
  ENSG00000100033_16 (sequence is synthesized)
aagggcacccatcgggagcggcagctgctgtggctggagctcttgaggcggctccgaactggcaacctcttccatcgccctgcctagcacccgccagcacacccttagcctccagcaccc

SEQ ID NO: 109990 - DNA, 120 bp, Artificial Sequence
  ENSG00000100033_17 (sequence is synthesized)
cccgcccccgcccaggccatcaccacagctgcagccaaccccatcctcacacagattcaccttttttcaccccacacttgcagagctgctggaggtgaggtcaggtgcctcccagccctg

SEQ ID NO: 109991 - DNA, 120 bp, Artificial Sequence
  ENSG00000100033_18 (sequence is synthesized)
cccagagtatgggcactcaggtgtgggccgaacctgatacctgcctgggacagccactggaaacttttgggaactctcctcgaatgtgtgggcccaaggcccccacctctgtgaccccca

SEQ ID NO: 109992 - DNA, 120 bp, Artificial Sequence
  ENSG00000100033_19 (sequence is synthesized)
tgtccttggacctagaggattgtccaccttctgccaaggccagcccacacagcccgagccccttggggagcagtggccgggctggggaggcctgcctggtcaataaaccactgttcctgc

SEQ ID NO: 109993 - DNA, 120 bp, Artificial Sequence
  ENSG00000100033_20 (sequence is synthesized)
ctcccaaagtgctgggattataggtgcatgccgctgcacctggcacttctgagcagtgcttggaagccgcctcctgatgggggctgagggtcagagtggccagctgaatgctgggccatc

SEQ ID NO: 109994 - DNA, 120 bp, Artificial Sequence
  ENSG00000100033_21 (sequence is synthesized)
ggtcagagtggccagctgaatgctgggccatcagggtgaggggcgtcttctcctcgtccattgcctgttctcccagggcaggtggaaggggaaggccctgcattggggtggcgtgaaaca

SEQ ID NO: 109995 - DNA, 120 bp, Artificial Sequence
  ENSG00000100033_22 (sequence is synthesized)
agatgagatggtaagatctgctttcactttaaaggaacatttctggttgttgcttggaaagaagtgtcaggggcaagaatgctgcaggagggctggcctggaggacagggtgggactgcg

SEQ ID NO: 109996 - DNA, 120 bp, Artificial Sequence
  ENSG00000100033_23 (sequence is synthesized)
ggctggctgcacgggggcaggagcctgcgcttgcgtcagaggttcctgagagactcggtctctggggcagaggcctgagcaaggggacctcgctggggtgtctctgtcttagccacgctc

SEQ ID NO: 109997 - DNA, 120 bp, Artificial Sequence
  ENSG00000100033_24 (sequence is synthesized)
ggtgtttctgggtcctgtgacccacgtgtgagcagcctgtggtgctggtggcacagggaaggaaaccgaggcagggagcctgtgggggctgcttggcaggggacaggcagctcctgtgcc

SEQ ID NO: 109998 - DNA, 120 bp, Artificial Sequence
  ENSG00000100033_25 (sequence is synthesized)
cactgctgtcccacacctgcatggaaacagaaaccccgccacggagccccctcccatctccacagggcctctagagcgccatgtgcaaggacttcatgggcggggtggggtggggtcagg

SEQ ID NO: 109999 - DNA, 120 bp, Artificial Sequence
  ENSG00000100033_26 (sequence is synthesized)
agcctgctgtgggctggccaggccctggccctccctgtcgcaccctgcgctgcctccatgcacctctcagggctgtcatggcttttcctgtggcttctgacaggtagagtcagcgatgac

SEQ ID NO: 110000 - DNA, 120 bp, Artificial Sequence
  ENSG00000100033_27 (sequence is synthesized)
aaaaacacaggtgcccatgccttagaggcctgagctggccacaggggctgtgtgggggactggggtgggcaggggcgtgtgcagatggcattcaggcctgcgtttgcagctgcagttctc

SEQ ID NO: 110001 - DNA, 120 bp, Artificial Sequence
  ENSG00000100033_28 (sequence is synthesized)
cttttaaaactgaacaccgaggtgggttttgtggtgggtggtgaacggacaggtttgggcctcgatcccccacccgaccctagcacccacaggtgggggtgccccctctgctgatgcgcc

SEQ ID NO: 110002 - DNA, 120 bp, Artificial Sequence
  ENSG00000100033_29 (sequence is synthesized)
tcctccctcagcaccatggacctgctggactggagcagcctcatcgacagcaggaccaagctgtccaagcacttggtagtccccaacgcacaggtaacacctccgctcctcagtgaggcc

SEQ ID NO: 110003 - DNA, 120 bp, Artificial Sequence
  ENSG00000100033_30 (sequence is synthesized)
cagctcagcagggcgctgcgctaagaagggaattcagcctgccacgtgtgtctcttgttgcctaccctgggaacttaacatgaccaaaatcactgcacactatggccccacagaccccct

SEQ ID NO: 110004 - DNA, 120 bp, Artificial Sequence
  ENSG00000100033_31 (sequence is synthesized)
gtggtccagggggaagaagacaagcccactagtgtccacagagtgcttggcgggacagagacccacgcggagccttaagacaccacaaggagagggggtctgggggccttccccaagtca

SEQ ID NO: 110005 - DNA, 120 bp, Artificial Sequence
  ENSG00000100033_32 (sequence is synthesized)
tctgtcttgtgcatcaggtcaccccaaacttcagaggcctgaaacggcagcagccactctgcttctgcctcatggttctggggttgacagggctcagctgggcagtcctcccctggggtc

SEQ ID NO: 110006 - DNA, 120 bp, Artificial Sequence
  ENSG00000100033_33 (sequence is synthesized)
tcctgggtagctgtactcacagagtggtggcgctgggacctgggggaggcacccattcacatgtctgggagttggtgctggctgtggcttgggctttttcccaacatggcagctgggctc

SEQ ID NO: 110007 - DNA, 120 bp, Artificial Sequence
  ENSG00000100033_34 (sequence is synthesized)
taagggccagtgtcacctgagacgtgagagccaggcagaagctgggtgaccttttcctgcctcgcctcagaagtcacacggtgtcttttctggcaagttctgtttgttagaagcatgtca

SEQ ID NO: 110008 - DNA, 120 bp, Artificial Sequence
  ENSG00000100033_35 (sequence is synthesized)
ccaggccagcctgtatacagcggggagaggaatgagactcatctgcctgtgggaggggggcccaggacctggcagactgcttgaaaccacagcttaaactgggattcaaagaaagaacag

SEQ ID NO: 110009 - DNA, 120 bp, Artificial Sequence
  ENSG00000100033_36 (sequence is synthesized)
aagcaccttcagaaaacatcctgcagaggcagctttccatgacacatctagccccagtccactaagggcccagcctcaaacttagagcccccgacccagagcctcggggcgcagtgcgta

SEQ ID NO: 110010 - DNA, 120 bp, Artificial Sequence
  ENSG00000100033_37 (sequence is synthesized)
cagtgtggctgtgcaccaaggccaccagctgttggagactttagcatggtgtagcaagggatagagtggtactgtttgtgcccagtgaggcaaggctgctggggccagcaaaggggtgag

SEQ ID NO: 110011 - DNA, 120 bp, Artificial Sequence
  ENSG00000100033_38 (sequence is synthesized)
cgggaggccctgcgggatgggtccccacggcctctgagcaccagcaacttgaaggcctcatcctggtggttgccctggtccctggctacgtgtcagcacgtgctgcacaactgccctgtc

SEQ ID NO: 110012 - DNA, 120 bp, Artificial Sequence
  ENSG00000100033_39 (sequence is synthesized)
tgcctgtagccaggggtcttcctcctgggccctctgcctgctccgggtggagcccttctgtttgacgattgggtgatcagtgttcacttgttcaatgtcacatgggagttgcagggggct

SEQ ID NO: 110013 - DNA, 120 bp, Artificial Sequence
  ENSG00000100033_40 (sequence is synthesized)
ctcccacaacggtggggcctctgtgggaactggggagtacacacttcggagtgcaggcctggactgagcctggggcccactgacatgggcactgagctccctcgtggtacccctaggccc

SEQ ID NO: 110014 - DNA, 120 bp, Artificial Sequence
  ENSG00000100033_41 (sequence is synthesized)
cgcatagggcagtgcactggctgcgttggaggttcaggggcactgtgctgcttgtccaggtggccctccctcccagccctgcacagacgggtgagagggttcctgtgggctgggaatact

SEQ ID NO: 110015 - DNA, 120 bp, Artificial Sequence
  ENSG00000100033_42 (sequence is synthesized)
cctcccacaatgaggacacagtgcgctttgcactgcgcaggtaggtgtgccccaccctgcaccgaaaccccaacctgagccgttgtctcctccggctggggagaggtggcagcagcgcag

SEQ ID NO: 110016 - DNA, 120 bp, Artificial Sequence
  ENSG00000100033_43 (sequence is synthesized)
agctcagggtgggcagagcgacctgctgggtggtcgggcatttgtggggaaaggctggtgaaatgagctggagggtggcttcagtgggcaggcccaggcccgctggcgttctggacatcg

SEQ ID NO: 110017 - DNA, 120 bp, Artificial Sequence
  ENSG00000100033_44 (sequence is synthesized)
gactgtgagagcacaatggctttttgcagttacgttggtttttaaaattaacttttttctttttttgagatagaatctcgctctgtcacctatgctggagtgcagtggcgtggtctcggc

SEQ ID NO: 110018 - DNA, 85 bp, Artificial Sequence
  ENSG00000100033_45 (sequence is synthesized)
cctcaagtgatcctccccagccactgtacccagacttttaaaaattaacatctgacttattaaacttcacaattaaaaaactaaa

SEQ ID NO: 110019 - DNA, 120 bp, Artificial Sequence
  ENSG00000100033_46 (sequence is synthesized)
taacatctgacttattaaacttcacaattaaaaaactaaatttcatcagggtattcggatggctcctgaaaggtacaaatgcagtgttggaggccagtccctcaggaggcctccacagtg

SEQ ID NO: 110020 - DNA, 120 bp, Artificial Sequence
  ENSG00000100033_47 (sequence is synthesized)
ccacctcattaatacgcccttaacattttaactacatctggaatgtaacggtttgttttctctttaaacatttgtcccatggagcacaacttcggtagaattctaacaagtcaaatgcag

SEQ ID NO: 110021 - DNA, 120 bp, Artificial Sequence
  ENSG00000100033_48 (sequence is synthesized)
aagttaggtgaagtcagttcttggatactcctgtactgtcaccctggtcttatctcatgccttagtccaagctatgcacacaatggggtcctaggtccccctcccctcccagattccgcc

SEQ ID NO: 110022 - DNA, 120 bp, Artificial Sequence
  ENSG00000100033_49 (sequence is synthesized)
ttcccagggatgggaccccctagaaccctcgggggcctgggcagtggcctcgctggctctcgccttcctaggagctgagcaggagctccactctcagcagggcagggtgccccagatcca

SEQ ID NO: 110023 - DNA, 120 bp, Artificial Sequence
  ENSG00000100033_50 (sequence is synthesized)
gggcttgtggcacgagggggctccccaagaagctgtgaagccacagggccaggcttggggccagggctgcagccaacaggacacatcctggtgctgctcgggagctgactcacggctctg

SEQ ID NO: 110024 - DNA, 120 bp, Artificial Sequence
  ENSG00000100033_51 (sequence is synthesized)
aaatcattcagtgatgtccacattcagcctttgtttacgatgctgctactttttcatggcctgaaattgcagcacacccatttttgtgccctgatcctctgctaattgtcatagatgtgt

SEQ ID NO: 110025 - DNA, 120 bp, Artificial Sequence
  ENSG00000100033_52 (sequence is synthesized)
cggtgatgggacagactcactttctccacacgcacaggcctggtggccagcactgcccagcactcgggagctggtgggggttcctctcagcttgtaatcaggactcccagcctctgggtg

SEQ ID NO: 110026 - DNA, 120 bp, Artificial Sequence
  ENSG00000100033_53 (sequence is synthesized)
gactctcaatgctggtggactcacagcctgactagacacatcaccatccaactccgaaaggacagcctgccctcagcagggcttcctctctccagcttccgcccggcacctgtctgtccc

SEQ ID NO: 110027 - DNA, 120 bp, Artificial Sequence
  ENSG00000100033_54 (sequence is synthesized)
tactatcttgctgtggcagtggcttccccagtggacacagcttccccctcccctgagtggcagccgggctctctcctcttggccccaagggccctgtgccaggctcccccagtaccacgc

SEQ ID NO: 110028 - DNA, 120 bp, Artificial Sequence
  ENSG00000100033_55 (sequence is synthesized)
tcacatccctgcctgagaggctggacccctgcaggcttcagctctgcccctgctgtgggtggttggggagctctggggagctggggtcccctcccatgggtaagtggttctagactatgg

SEQ ID NO: 110029 - DNA, 120 bp, Artificial Sequence
  ENSG00000100033_56 (sequence is synthesized)
cagctgctctgtcctgtgctgggcccagactgccacaccacccaccctcaaacaatcggagttggctttggccaaggaacaaaccagccccaaacttagaggctggaacagtggcatgtt

SEQ ID NO: 110030 - DNA, 120 bp, Artificial Sequence
  ENSG00000100033_57 (sequence is synthesized)
ctgtaggccaggggtgggctggctcagctgatgcttctgctgctggctgtgcctgtgtccctcctgcgtctgtgatctggggccggtggggcctaatgagctcattcatggctggggcag

SEQ ID NO: 110031 - DNA, 120 bp, Artificial Sequence
  ENSG00000100033_58 (sequence is synthesized)
taaaggagactgcatcccgggtccagcgtcccacaggccagcccaggcttgagcacgtggtgggctcaggcttccagaaggcctggagagggcaagcctctgcttgtgtcacctttggta

SEQ ID NO: 110032 - DNA, 120 bp, Artificial Sequence
  ENSG00000100033_59 (sequence is synthesized)
cctccctgctggccaaagtgcctcacgaggccaagcccagatgccaggtggagtgagccactgtcctgtgctgggaggagccgcagtcacatggcagaggctgtgcacaccagcagggga

SEQ ID NO: 110033 - DNA, 120 bp, Artificial Sequence
  ENSG00000100033_60 (sequence is synthesized)
gggggcagccagcagtggcacccggctctcgggttcatgtcctggggttgaggaagacacaagatggaagccagggcgatgtggcagagatgggtgcctgctttagactgggtggtcccg

SEQ ID NO: 110034 - DNA, 120 bp, Artificial Sequence
  ENSG00000100033_61 (sequence is synthesized)
actaagctggggcaggagccagagggctgggttctgaccacacttgggtccctcactgttcagccccttcctgaggggccccactgcctcccagaaggcatctcctctcctgccccagct

SEQ ID NO: 110035 - DNA, 120 bp, Artificial Sequence
  ENSG00000100033_62 (sequence is synthesized)
ccctgttccctgatcccgcctcatgccccccacccttctccctggctcagggccaggatcgggagctgcaggaagttggtccatgtcagctgccgagccacacttagcccagggtggagg

SEQ ID NO: 110036 - DNA, 120 bp, Artificial Sequence
  ENSG00000100033_63 (sequence is synthesized)
tctgggtgagagcagcccccaggctgagaggacacgagcatcagccatggttccagccaagccccagtgacgtctcccagtcctggctgccctgcctgagagggtgggccctgggatgac

SEQ ID NO: 110037 - DNA, 120 bp, Artificial Sequence
  ENSG00000100033_64 (sequence is synthesized)
agtgctgaaggaactgcttttcacacagcaggacttgatggcttcaggagtccctgaggctggggctgggctgggcaggggagacacagggccagcacagaccccatagagggctcttta

SEQ ID NO: 110038 - DNA, 120 bp, Artificial Sequence
  ENSG00000100033_65 (sequence is synthesized)
tagaattatctgggtccagagcaaaggtggcactctcagccctccctggagtccacgccggcaggtgaaggatcagagccccatgccccatccttggagccaggggctgggacccagatc

SEQ ID NO: 110039 - DNA, 120 bp, Artificial Sequence
  ENSG00000100033_66 (sequence is synthesized)
accaggagcctccagttgaagtggggaggtgactggggtggtgcagtagtgagccatcccctcacacactgccagccttgcccactgtgtcctccctggccgcccggagctgtgtccgcc

SEQ ID NO: 110040 - DNA, 120 bp, Artificial Sequence
  ENSG00000100033_67 (sequence is synthesized)
tcctgcctggctgcctgtgctcggcccctccacaagcccaaaacagcctagggtactcagtgttttcagagccgcctagatgcaggactgtttgtgttttggttttaaatttatttaatt

SEQ ID NO: 110041 - DNA, 120 bp, Artificial Sequence
  ENSG00000100033_68 (sequence is synthesized)
aatttattttttatagagaccaggtctcaccatgttgcccaggctggtttcaaacccctgggctcaagtgacctgcccgccgcagcccccaaagtgctgggattataagtttgagccccc

SEQ ID NO: 110042 - DNA, 120 bp, Artificial Sequence
  ENSG00000100034_0 (sequence is synthesized)
agcagcttgcgggacacggagccgcgaggagacagctgaggcccgcggagaccagggggtgaagcctggagaccctcttgccctggcctagctgcaggcccccgggatgctttgggcatg

SEQ ID NO: 110043 - DNA, 120 bp, Artificial Sequence
  ENSG00000100034_1 (sequence is synthesized)
tcctctggagccccacagaagagcagcccaatggccagtggagctgaggagaccccaggcttcctggacacgctcctgcaagacttcccagccctgctgaacccagaggaccctctgcca

SEQ ID NO: 110044 - DNA, 120 bp, Artificial Sequence
  ENSG00000100034_2 (sequence is synthesized)
tggaaggccccagggacggtgctcagccaggaggaggtggagggcgagctggctgagctggccatgggctttctgggcagcaggaaggccccgccaccacttgctgctgctctggcccac

SEQ ID NO: 110045 - DNA, 120 bp, Artificial Sequence
  ENSG00000100034_3 (sequence is synthesized)
gaagcagtttcacagctgctacagacagacctttccgaattcaggaagttgcccagggaggaagaagaagaggaggaggacgatgacgaggaggaaaaggcccctgtgaccttgctggat

SEQ ID NO: 110046 - DNA, 120 bp, Artificial Sequence
  ENSG00000100034_4 (sequence is synthesized)
gcccaaagcctggcacagagtttctttaaccgcctttgggaagtcgccggccagtggcagaagcaggtgccattggctgcccgggcctcacagcggcagtggctggtctccatccacgcc

SEQ ID NO: 110047 - DNA, 120 bp, Artificial Sequence
  ENSG00000100034_5 (sequence is synthesized)
atccggaacactcgccgcaagatggaggaccggcacgtgtccctcccttccttcaaccagctcttcggcttgtctgaccctgtgaaccgcgcctactttgctgtgtttgatggtcacgga

SEQ ID NO: 110048 - DNA, 120 bp, Artificial Sequence
  ENSG00000100034_6 (sequence is synthesized)
ggcgtggatgctgcgaggtacgccgctgtccacgtgcacaccaacgctgcccgccagccagagctgcccacagaccctgagggagccctcagagaagccttccggcgcaccgaccagatg

SEQ ID NO: 110049 - DNA, 120 bp, Artificial Sequence
  ENSG00000100034_7 (sequence is synthesized)
tttctcaggaaagccaagcgagagcggctgcagagcggcaccacaggtgtgtgtgcgctcattgcaggagcgaccctgcacgtcgcctggctcggggattcccaggtcattttggtacag

SEQ ID NO: 110050 - DNA, 120 bp, Artificial Sequence
  ENSG00000100034_8 (sequence is synthesized)
cagggacaggtggtgaagctgatggagccacacagaccagaacggcaggatgagaaggcgcgcattgaagcattgggtggctttgtgtctcacatggactgctggagagtcaacgggacc

SEQ ID NO: 110051 - DNA, 120 bp, Artificial Sequence
  ENSG00000100034_9 (sequence is synthesized)
ctggccgtctccagagccatcggggatgtcttccagaagccctacgtgtctggggaggccgatgcagcttcccgggcgctgacgggctccgaggactacctgctgcttgcctgtgatggc

SEQ ID NO: 110052 - DNA, 120 bp, Artificial Sequence
  ENSG00000100034_10 (sequence is synthesized)
ttctttgacgtcgtaccccaccaggaagttgttggcctggtccagagccacctgaccaggcagcagggcagcgggctccgtgtcgccgaggagctggtggctgcggcccgggagcggggc

SEQ ID NO: 110053 - DNA, 120 bp, Artificial Sequence
  ENSG00000100034_11 (sequence is synthesized)
tcccacgacaacatcacggtcatggtggtcttcctcagggacccccaagagctgctggagggcgggaaccagggagaaggggacccccaggcagaagggaggaggcaggacttgccctcc

SEQ ID NO: 110054 - DNA, 120 bp, Artificial Sequence
  ENSG00000100034_12 (sequence is synthesized)
agccttccagaacctgagacccaggctccaccaagaagctaggtggtttccaggcccctgccctccccttcctcccatccttgtccttctctccctcagaagcctcaggacccaacaggt

SEQ ID NO: 110055 - DNA, 120 bp, Artificial Sequence
  ENSG00000100034_13 (sequence is synthesized)
ggcaggcagtggacagggtgcccgccccacagtgctttccccagcaccccagagccagtcgggacaccccccgcagcccgtcctggtggctgtggaactgcactgggtggcgggcagatg

SEQ ID NO: 110056 - DNA, 120 bp, Artificial Sequence
  ENSG00000100034_14 (sequence is synthesized)
gtggaaggcagcttaggagacctcaccaaagagaagatggaccggctcttgctcccagctcctattaggcccggggtgggaccagaggtcataggtgcccaacggcagccaaaccaaaga

SEQ ID NO: 110057 - DNA, 120 bp, Artificial Sequence
  ENSG00000100034_15 (sequence is synthesized)
cactggtgtgcatggggcagcatggttgtgcacgtgggaccctggggcggacccaggagccaaactcttgaagcaccccctgggtcaggcccagcagcggagtggccagccccagtttcc

SEQ ID NO: 110058 - DNA, 120 bp, Artificial Sequence
  ENSG00000100034_16 (sequence is synthesized)
cattgctcctctctgcggccagggccaggtgggttcatatttacagatatgcccagccagtcctggtcggccacaccagtgtcccaaagaggagagcgcagcagagccaggggtctgttc

SEQ ID NO: 110059 - DNA, 120 bp, Artificial Sequence
  ENSG00000100034_17 (sequence is synthesized)
tgtagcagccacccccctgcccccactccagggcagccatgatgtgcttgggcccaccagggccttccgggctgctctcttccctgagcccggaaccggcgacgcacatgtgtcttttgt

SEQ ID NO: 110060 - DNA, 120 bp, Artificial Sequence
  ENSG00000100034_18 (sequence is synthesized)
tggtgtgtttgtttttttccagggaggtctaattccgaagcagtattccaggttttctctttgttttatcagtgccaagatgacctgttgtgtcatataatttaagcagagcttagcatt

SEQ ID NO: 110061 - DNA, 120 bp, Artificial Sequence
  ENSG00000100034_19 (sequence is synthesized)
tattttattctttagaaaacttaagtatttacttttttaaagctatttttcaaggaacctttttttgcagtattattgaatttattttctaaatcaggattgaaacaggaacttttccag

SEQ ID NO: 110062 - DNA, 120 bp, Artificial Sequence
  ENSG00000100034_20 (sequence is synthesized)
gtggtgttaataagccattcaagtgccttacacagctttgaagaaactaggactgcagtgggctcggataggcccattgaggtttttagaaaagcaggatttgttttgttagggaggcat

SEQ ID NO: 110063 - DNA, 120 bp, Artificial Sequence
  ENSG00000100034_21 (sequence is synthesized)
gccacgtagtggtgcctgggcccgacagcggggctctgggcatcccgggtgaccttggcccatctgcctgcattcccacccccttgggcctggctggatcccaggcagagggaccttgct

SEQ ID NO: 110064 - DNA, 120 bp, Artificial Sequence
  ENSG00000100034_22 (sequence is synthesized)
gctgtgtgattggaacattcccaaatatcttgtgaatttgtaatcaaattggtctcattgggaaagactcttaattaagaggctcaggcaagcacagaggcagcccgtgggtctctgtct

SEQ ID NO: 110065 - DNA, 120 bp, Artificial Sequence
  ENSG00000100034_23 (sequence is synthesized)
cagtctggaggcagcagggatgctgctgggagtccatggcacaggccacagcccctcaccttgccgcggtggctggcagcacgcctgccttgctctgccccatgccctgaacaggcatga

SEQ ID NO: 110066 - DNA, 120 bp, Artificial Sequence
  ENSG00000100034_24 (sequence is synthesized)
gagctccacgtcccctagtgcaccctgagagggggctcacaagtgaccgatcctgggtgcctcagggagctcactgagggcgtgcaaagttgaaagtggcaaggctgggggagggtgtcg

SEQ ID NO: 110067 - DNA, 120 bp, Artificial Sequence
  ENSG00000100034_25 (sequence is synthesized)
ggtagagggaagagggcagggggctaggggaggactcagaggccatctgcagggccaagccacaggaagggctgagctggaggtgggcagggctgctccaggcaggtcagagcagtgcag

SEQ ID NO: 110068 - DNA, 120 bp, Artificial Sequence
  ENSG00000100034_26 (sequence is synthesized)
ggggaggagaggagaaagggaggaagctgggctgtgtggtccccatgaaggcattcagagtccacctgcagacagcgagagccccaggaaggtttgcacagctgtgccccaagcaccttg

SEQ ID NO: 110069 - DNA, 120 bp, Artificial Sequence
  ENSG00000100034_27 (sequence is synthesized)
gcctcctctcagctcgccgaggaggcacgctagagccgccttcccggtgggagccctctgtcccacagggagcggggagccagctttgctggggccctacctgcatgcccagccttaccc

SEQ ID NO: 110070 - DNA, 120 bp, Artificial Sequence
  ENSG00000100034_28 (sequence is synthesized)
ctcattctcacagcacagatgaggttgagaccatgcagtcaatgcattgcttaaggtctcttatttacaaaaaaaaaccttaaacatagtcgctgtcattcagacattcagagaatggtt

SEQ ID NO: 110071 - DNA, 120 bp, Artificial Sequence
  ENSG00000100034_29 (sequence is synthesized)
ggccacaaacaatgaccaagtattgcttggcttaacttgaaggcctgctgtctccttctgggggtcagggacgcagctccaccctcaccactagcccaccctgcccgtgggcataacctt

SEQ ID NO: 110072 - DNA, 120 bp, Artificial Sequence
  ENSG00000100034_30 (sequence is synthesized)
gacgaagagagagaatgattggcatctgcttttctcttttctttgctaataattctgttcctggctgccgagagtgaagtttcaccatgtggaggtttggctcctatcacctggtggtct

SEQ ID NO: 110073 - DNA, 120 bp, Artificial Sequence
  ENSG00000100034_31 (sequence is synthesized)
gattcataccctagcctgaggctccactggaagatctcgcagcctcagtgtatgggaaaccctttccccaggcttgtcccagcactgccgctccccacccctgagccaggaccccagagg

SEQ ID NO: 110074 - DNA, 120 bp, Artificial Sequence
  ENSG00000100034_32 (sequence is synthesized)
atggccatgccccgtgcctggcagaggtctggtgccagcactgggagctgctccgcccttgccttggggccgagggagccctcgtccacccctgcacagcagctgggcacagaggagcgc

SEQ ID NO: 110075 - DNA, 120 bp, Artificial Sequence
  ENSG00000100034_33 (sequence is synthesized)
tcttccatcttgaccaggactgcaccaagaagcaccaggtgtcttcagcctccaacctccggggcgaccttctcttccagccacagtcccatgagggcccctagccagggacactggtct

SEQ ID NO: 110076 - DNA, 120 bp, Artificial Sequence
  ENSG00000100034_34 (sequence is synthesized)
gtaaattgtaatcctttctccagcccagctctccacttgttccttgtgtgagctgagcaggcagtgcacctctgagtgtcccttttgtaaggcccaggggttgcactgagtctgcagagg

SEQ ID NO: 110077 - DNA, 120 bp, Artificial Sequence
  ENSG00000100034_35 (sequence is synthesized)
ccgcgacctcctagaacgctgtgggtgcaggtgagccggcgtgtcctggggagatgctgccagcacacaggggccctcctgctgccagcaggttggggtggttaagtcttattagtgtct

SEQ ID NO: 110078 - DNA, 120 bp, Artificial Sequence
  ENSG00000100034_36 (sequence is synthesized)
attcttaaaattaagtgggctggagaagaatggagctccacatgccagcaccgtatatggaatacaaaagctggggaagcagggcctgccttacaggtgtggctgactctgagcccaggc

SEQ ID NO: 110079 - DNA, 120 bp, Artificial Sequence
  ENSG00000100034_37 (sequence is synthesized)
ctgcaggggtggagggcagtccctcagaatcccagaggcagtcccagcctcagaacccaggataggaaatgggtgtgtttagtggggaaagggacggggtgcagacggcagggccagtat

SEQ ID NO: 110080 - DNA, 120 bp, Artificial Sequence
  ENSG00000100034_38 (sequence is synthesized)
ggggccccctccctctcctctcctctcctatggtgagcccagcgtgggcaccgggccgtctcagccgtgttcccagggctgggaggacagctctggcccttcttaggcctagcctcgtcc

SEQ ID NO: 110081 - DNA, 120 bp, Artificial Sequence
  ENSG00000100034_39 (sequence is synthesized)
caagctaaatgtaagccagttgggctgtgttaaaggaagcagtgtttttggttcgattctgcctctgtagctcaaggggggcagcccccagagtcctgtgcattctgccaaggctccata

SEQ ID NO: 110082 - DNA, 120 bp, Artificial Sequence
  ENSG00000100034_40 (sequence is synthesized)
gctttgccaaatgcacggagctctgccattccggtgcagtgcaggccttgcgaagggtttatctgcgttcgtctcggtgggcttctcctgcatgggagttgtgttcctgtgcaaggggga

SEQ ID NO: 110083 - DNA, 120 bp, Artificial Sequence
  ENSG00000100034_41 (sequence is synthesized)
gctttgctccaggacaggatgactgtcttccctattcttagggacaagtcccaagatgccagaaaggcagtctcccaaggacccaccatgcagaagtgtcaataaaccacaagttctgaa

SEQ ID NO: 110084 - DNA, 120 bp, Artificial Sequence
  ENSG00000100034_42 (sequence is synthesized)
tccctgttgttctaaattcggcattactagtgcatgcgtgcatccggggaaaaggaacaaggtgggagaagagagagaaagcgaatacccgaggccgccagcatcagtgggtgcccgcgc

SEQ ID NO: 110085 - DNA, 120 bp, Artificial Sequence
  ENSG00000100034_43 (sequence is synthesized)
tctcctcctcgctctcgtcctctgccctccgccctggctccctgcccgcattccctgggagcgcagccttgccttagcctgggagacagctgtccacagtgacaggcggccattgttctc

SEQ ID NO: 110086 - DNA, 120 bp, Artificial Sequence
  ENSG00000100034_44 (sequence is synthesized)
ggccgagccagcaggcttccggccggtggcagctgctgctcctccgctctgcggccccaccaagggggcgccgccaccgcccaggccctccccgcctgatgggtctctgtccgtccacgc

SEQ ID NO: 110087 - DNA, 120 bp, Artificial Sequence
  ENSG00000100034_45 (sequence is synthesized)
gggagacagcgccacctgccggtgagaaggagcgttgctgcgccggcaccagcccagtcctacgctcggggctcctgcaggcctgggaaggagggagggcgcagctagaaggaagtctcg

SEQ ID NO: 110088 - DNA, 120 bp, Artificial Sequence
  ENSG00000100034_46 (sequence is synthesized)
cctgcccttgcttccccgtctgtcagagtgcctcgcatgcaggcctgcctagcggccttgatcatgctctccctgtcacggaagtagaatgtagtcaagtttttggactccaagccattc

SEQ ID NO: 110089 - DNA, 120 bp, Artificial Sequence
  ENSG00000100034_47 (sequence is synthesized)
ttacaaaattgcgtcagagtggggattgtattataagaattgccactgaagagcagcgagtggctgaaacctctgtgtggctgccagtcagcccctccccggtgactggatcagcgaaga

SEQ ID NO: 110090 - DNA, 120 bp, Artificial Sequence
  ENSG00000100034_48 (sequence is synthesized)
atccagaagcgaggttgcggggctgcagcccttggcatggggagtccgtgggctgggcagcactgcctcagccgctggcctttcctgagcagagtctaggctaagcggctgttggaaata

SEQ ID NO: 110091 - DNA, 120 bp, Artificial Sequence
  ENSG00000100034_49 (sequence is synthesized)
cagtgtgatgggccgagggggatttgtcatgcactggggtgataccctcgtagtgtgaagggaacagggcagattcagagactgcagcaccagtgtctgagtgtaagttacactgtatgt

SEQ ID NO: 110092 - DNA, 120 bp, Artificial Sequence
  ENSG00000100034_50 (sequence is synthesized)
tattatctcacctaaaacagctcctacaaatctcatagaaacctgtggctcaccaccctatgggctggaagtagagcttccaatattccggaaatgaggtttatcctcctcccgcgttca

SEQ ID NO: 110093 - DNA, 79 bp, Artificial Sequence
  ENSG00000100034_51 (sequence is synthesized)
caatattccggaaatgaggtttatcctcctcccgcgttcatgctgacaatccttttttctcttttgggaaaaaagtggg

SEQ ID NO: 110094 - DNA, 76 bp, Artificial Sequence
  ENSG00000100034_52 (sequence is synthesized)
agttcgagaccagcctgatgaaaccccatgagcccctgtaattccagctattcagaaggctgaggcaggagaatca

SEQ ID NO: 110095 - DNA, 120 bp, Artificial Sequence
  ENSG00000100034_53 (sequence is synthesized)
ggcttatattatttgttgctacataacaaattgccccaaatgtagtggcttaaaacaacagacatttattctcccagtttctgtgggtctggaatctgggagcagcttagctggttctgg

SEQ ID NO: 110096 - DNA, 120 bp, Artificial Sequence
  ENSG00000100034_54 (sequence is synthesized)
tccagggtctcttactgggttgtggtgacatggttgctggctgggctggagggcctgcttccacggtggtttcaacacacggccactgacaggaggccctggtcccgtcccatgtggact

SEQ ID NO: 110097 - DNA, 120 bp, Artificial Sequence
  ENSG00000100034_55 (sequence is synthesized)
ctccgtggcgctgcttgagcatcctcacagctcagattgagcgatgagagggagggaggaagagagtgagaatacacaaggcgggaggcgcagggcctctttgtttcgtaacacctgaag

SEQ ID NO: 110098 - DNA, 120 bp, Artificial Sequence
  ENSG00000100034_56 (sequence is synthesized)
cacacgcagtcactgccactcttcatcagaagcagccagctcccacactcagcagtgggaagtgagctccacctcgcaaaaggggaagtcaaagaatttgtggacatgctttaaagccac

SEQ ID NO: 110099 - DNA, 120 bp, Artificial Sequence
  ENSG00000100034_57 (sequence is synthesized)
tgtcacacgagactaacacttgtaatgaaaaactggggaagtattaagaaagtgtacttcaggaaaaagctgtccgtggaactgccacgtgcaggcccactctgacaccttggttgtgtg

SEQ ID NO: 110100 - DNA, 120 bp, Artificial Sequence
  ENSG00000100034_58 (sequence is synthesized)
ctgttcccgcctttttttttttctggccctggtggtttttcatggacttgtagttaaactgcatatgtaattttccttcttttttcacttagtatcatgacagaagcattttacatgctt

SEQ ID NO: 110101 - DNA, 120 bp, Artificial Sequence
  ENSG00000100034_59 (sequence is synthesized)
ataaactctattaaaatccattttttagttttctgttttaagagaccaggtctccctctgtcacccagactggaatgcagtggtgtaatcggagatcgccgtaacctcgacgtccttggc

SEQ ID NO: 110102 - DNA, 120 bp, Artificial Sequence
  ENSG00000100034_60 (sequence is synthesized)
tcaagggatcctcctgccccagcctcccgaatagctgggagtagatataccaccacacacagctaattttttttggtttggtgttgttcatttgcgactgagtttcgctctgttgtccag

SEQ ID NO: 110103 - DNA, 120 bp, Artificial Sequence
  ENSG00000100034_61 (sequence is synthesized)
gtagagacggggtttcactttgttggtcagggtggtctcgaactccggacctcaagtgatctgcctgcctttacctctcaaagcgcgggactacaggcatgagccatggcgcccagcctg

SEQ ID NO: 110104 - DNA, 89 bp, Artificial Sequence
  ENSG00000100034_62 (sequence is synthesized)
ctgcctttacctctcaaagcgcgggactacaggcatgagccatggcgcccagcctgtttgtttttaagagacaaggtctctttatgtta

SEQ ID NO: 110105 - DNA, 120 bp, Artificial Sequence
  ENSG00000100034_63 (sequence is synthesized)
ggcatgagccactatgcctgggctagttttttttaattaaactttttgttttgagataatcatagctgcacatgcagttgtaataaataatacaaagagattccatgtatactttaccca

SEQ ID NO: 110106 - DNA, 120 bp, Artificial Sequence
  ENSG00000100034_64 (sequence is synthesized)
gtttcctccaatggtaacattttgcaaaactataataaaatatcaccaccaggatcctaacatggtcaaaatacagagcagttccatcaccaggatccctcctgtcacccttttaaggcc

SEQ ID NO: 110107 - DNA, 120 bp, Artificial Sequence
  ENSG00000100034_65 (sequence is synthesized)
ccactggcaactactaatcttctcggcttctaccattttattatttcaagaacacatataaatggaagcatatgatgtgtaactttaggggactggtttaattctctggagattagccca

SEQ ID NO: 110108 - DNA, 120 bp, Artificial Sequence
  ENSG00000100034_66 (sequence is synthesized)
ggttgtttgatgcatcaggagttcattctttgccattcttgagtggtattcaaaggtatgggtcgaccacggtttgtttaaccatttccacgttgaaggacatctaggctgactccagat

SEQ ID NO: 110109 - DNA, 120 bp, Artificial Sequence
  ENSG00000100034_67 (sequence is synthesized)
tttggctgttccagataaagctgctatgaacatttgtgttcatgtgttcaagcttttatgtgaacagccttcattgttctgggataagtccacaggagtgccacggtggggtcgtatggg

SEQ ID NO: 110110 - DNA, 120 bp, Artificial Sequence
  ENSG00000100034_68 (sequence is synthesized)
caggagtgccacggtggggtcgtatgggagttgcatatttcgttatgaaaatcatatttaatagcagcttaattcttcatcaagagactagatcttttttttttttttttttttttgaga

SEQ ID NO: 110111 - DNA, 120 bp, Artificial Sequence
  ENSG00000100034_69 (sequence is synthesized)
gcgcctggccgagactagatcataatttaagtattattcctttgtcattggatatatagtatttctaattaatgggcaattataagtgattctgtactttgtctttaaaattatttttgt

SEQ ID NO: 110112 - DNA, 120 bp, Artificial Sequence
  ENSG00000100034_70 (sequence is synthesized)
gtttctgatgatttcttcagggtgggttcccatgagtagagttgctccatggtgggatgggagacttcaaggggcaagttgccaaactagacatttctaattctggtaacaggctgccat

SEQ ID NO: 110113 - DNA, 120 bp, Artificial Sequence
  ENSG00000100034_71 (sequence is synthesized)
gtgcgcgttattgagttgatgtgctcacaatgccccgggaggtgatgggggctttgcaggcccctgtgggagctgtcagggagccagcgaggcctcagctggcttggttggcacttccct

SEQ ID NO: 110114 - DNA, 120 bp, Artificial Sequence
  ENSG00000100034_72 (sequence is synthesized)
gctccggctgcagggatttcggcacagcgcttgacacacagtgaggcccactgcatggtggcgggctccttcgaagccttccaccctgcgggacagagtcacacatgtcgtggtggcatt

SEQ ID NO: 110115 - DNA, 120 bp, Artificial Sequence
  ENSG00000100034_73 (sequence is synthesized)
atgctccatcttggcccagcagctttcagggcagagacggtgtccccgagctagagacagggaagcagaaggatctgctgtctgtgtcgggctcgcaagcctcgatgagaaggcgcgcat

SEQ ID NO: 110116 - DNA, 120 bp, Artificial Sequence
  ENSG00000100034_74 (sequence is synthesized)
aggagctctttcctcctctcagttccccatgtcctttgggtgtggcctgtgacactcaactcctgccctcggctgactggccctgattcaccatgcttgccacatgcacctgggctggca

SEQ ID NO: 110117 - DNA, 120 bp, Artificial Sequence
  ENSG00000100034_75 (sequence is synthesized)
ggagttccaggagagtttgtgcattgaagtgacatgagtccctgaagccagagcccccatggtttcctttgggcctgttactggttgatcttttcttgagaagccaagcttaggtaggat

SEQ ID NO: 110118 - DNA, 120 bp, Artificial Sequence
  ENSG00000100034_76 (sequence is synthesized)
ggaggctgtcatctgagatcaggatattgacagaactggctccttctggtggtttgtgggcaacccttggcattccctggcttgaaggccccgccaccacttgctgctgctctggcccac

SEQ ID NO: 110119 - DNA, 120 bp, Artificial Sequence
  ENSG00000100036_0 (sequence is synthesized)
gtgagtcgcagcaggagccgcagccggagtcacagccgcagccagagccgcagccaaagcctcagagagcaggagttggagcgcaggccctgctggatccgcgcctagctcgccgccagg

SEQ ID NO: 110120 - DNA, 80 bp, Artificial Sequence
  ENSG00000100036_1 (sequence is synthesized)
caccggccggaggacgggccgtggtgtcagctcactgcccgggcgctgtgggaggcagcgagcccgcgaccccccgggcc

SEQ ID NO: 110121 - DNA, 120 bp, Artificial Sequence
  ENSG00000100036_2 (sequence is synthesized)
ggcctggtcacggccagagcacgcaggagttcccagggtctggatctgcgcgcaccctaatgacctggggactgaagagaaaaaaggaacgaggatttcatctaaaagcataacgtgggc

SEQ ID NO: 110122 - DNA, 120 bp, Artificial Sequence
  ENSG00000100036_3 (sequence is synthesized)
actaggcgaggaggaaagtggagaccacctggcacggggcagaggtgcctggagcccacgcttgagcatcggagaccctggcatcctagcagccgcgaccttggctctgccctgtctgag

SEQ ID NO: 110123 - DNA, 120 bp, Artificial Sequence
  ENSG00000100036_4 (sequence is synthesized)
ctggaaacacagcttagcttctagacatcgctggcacaggcctggcacaagtaagcagtgtcctcacctgtctgaaacgggacacggggtcggaggaaccaggatctagcctggccccaa

SEQ ID NO: 110124 - DNA, 120 bp, Artificial Sequence
  ENSG00000100036_5 (sequence is synthesized)
gcggaactctctggtggcccagaggtcgtcactggggagcccgcctcctgccctagcctcactggtgcggatgtgccgctgcccgccggagcaccatgatggcaggatgacctcagccga

SEQ ID NO: 110125 - DNA, 120 bp, Artificial Sequence
  ENSG00000100036_6 (sequence is synthesized)
agtaggagcagcagctggtggtgctcaggcggctgggccccccgagtggccccctggcagccctcaggccctccggcagcctggccgggcccgagtggccatggcagcactggtgtggct

SEQ ID NO: 110126 - DNA, 120 bp, Artificial Sequence
  ENSG00000100036_7 (sequence is synthesized)
gctggcgggagccagcatgtcaagcctcaacaagtggatcttcacagtgcacggctttgggcggcccctgctgctgtcggccctgcacatgctggtggcagccctggcatgccaccgggg

SEQ ID NO: 110127 - DNA, 120 bp, Artificial Sequence
  ENSG00000100036_8 (sequence is synthesized)
ggcacggcgccccatgccaggcggcactcgctgccgagtcctactgctcagtctcacctttggcacgtccatggcctgcggcaacgtgggcctaagggctgtgcccctggacctggcaca

SEQ ID NO: 110128 - DNA, 120 bp, Artificial Sequence
  ENSG00000100036_9 (sequence is synthesized)
actggttactaccaccacacctctgttcaccctggccctgtcggcgctgctgctgggccgccgccaccacccacttcagttggccgccatgggtccgctctgcctgggggccgcctgcag

SEQ ID NO: 110129 - DNA, 120 bp, Artificial Sequence
  ENSG00000100036_10 (sequence is synthesized)
gcggactcaagtcggttcagcaaagtgccctgctgcaggaggagaggctggacgcggtgaccctgctttacgccacctcgctgcccagcttctgcctgctggcgggtgcagccctggtgc

SEQ ID NO: 110130 - DNA, 120 bp, Artificial Sequence
  ENSG00000100036_11 (sequence is synthesized)
tggaggctggcgttgccccaccgcccactgctggcgactctcgcctctgggcctgcatcctgctcagctgcctcctgtctgttctctataacctggccagcttctccctgctggccctca

SEQ ID NO: 110131 - DNA, 120 bp, Artificial Sequence
  ENSG00000100036_12 (sequence is synthesized)
cctctgccctcaccgtccacgtcctgggcaacctcaccgtggtgggcaacctcatcctgtcccggctgttgtttggcagccgcctcagtgccctcagctacgtgggcatcgcactcactc

SEQ ID NO: 110132 - DNA, 120 bp, Artificial Sequence
  ENSG00000100036_13 (sequence is synthesized)
tttcaggaatgttcctttaccacaactgcgagttcgtggcctcctgggctgcccgtcgggggctgtggcggagggaccagcccagcaagggtctttgagacctgggggatctcaggagcc

SEQ ID NO: 110133 - DNA, 120 bp, Artificial Sequence
  ENSG00000100036_14 (sequence is synthesized)
gggtctttgagacctgggggatctcaggagccacctgggatggccctggcctgaatccagcctccgctgtggccatagaaggaatggagaacagggctgggcatggtggctcacgcctat

SEQ ID NO: 110134 - DNA, 88 bp, Artificial Sequence
  ENSG00000100036_15 (sequence is synthesized)
aggctaaggtgggaggatcacttgagccctggagatcgaggctgcagtaagccaagatcgcatgctgctgtctcaattaaaaaaaaaa

SEQ ID NO: 110135 - DNA, 120 bp, Artificial Sequence
  ENSG00000100036_16 (sequence is synthesized)
aaaagtggagaactggcagtgacctctactgggggccatggcagggaggggagccttctggaagggctgccttggagattggaatggggactcccagggagacctgcgttccatccctgc

SEQ ID NO: 110136 - DNA, 120 bp, Artificial Sequence
  ENSG00000100036_17 (sequence is synthesized)
ctgcctcacccctgccacagactctgcacaccactggatggtgggtccaagcctggcacagtccctgtgcttgtcagagtcattattatgattaatatcaattacgatgccaaaaattgc

SEQ ID NO: 110137 - DNA, 120 bp, Artificial Sequence
  ENSG00000100036_18 (sequence is synthesized)
tgggcaaactttgaagacctcaacttgttacaatgacgatgatgatgattcttggcggttacacaatccttcctcctgggggggaggcagctaggaggcccagcaggggggcttctatgc

SEQ ID NO: 110138 - DNA, 120 bp, Artificial Sequence
  ENSG00000100036_19 (sequence is synthesized)
tgctgggctcccctagggagttggggtagtctgtgccaactccaggcagctgctgtggcctcacccctgggccccccaattttgggtcatccatcctcaaatacactatttttgcttgta

SEQ ID NO: 110139 - DNA, 120 bp, Artificial Sequence
  ENSG00000100036_20 (sequence is synthesized)
tccgcggactcaagtcggttcagcaaagcctcagcttccagatctgcaaaatggaactgatgatccctatggagagggttcgaatgaggagcgctgggcagggccaggagtgaggaagga

SEQ ID NO: 110140 - DNA, 120 bp, Artificial Sequence
  ENSG00000100036_21 (sequence is synthesized)
gggtaactttttggaagagtactttgtaacaataaagtgctgtgcacagaaaggagaaatgccattatggggatgtgtgtgccgacctgggaccagcagggtgaaagagtctatcattca

SEQ ID NO: 110141 - DNA, 120 bp, Artificial Sequence
  ENSG00000100036_22 (sequence is synthesized)
aggcactatgccaagaaattgttgaatcttcacaataactctgtgagaaaagggctgtcattggacagatgaggacactgatgctcccaggggtccacatcacatgaagaggaggtgaca

SEQ ID NO: 110142 - DNA, 120 bp, Artificial Sequence
  ENSG00000100036_23 (sequence is synthesized)
gggctgggccttggtccgaagctccagccttccaagccaaggcctgtgagaggaaccgctgagacctgatgttaggcctgtttttctcatgtgccctggagaaggggactaacaccatct

SEQ ID NO: 110143 - DNA, 120 bp, Artificial Sequence
  ENSG00000100036_24 (sequence is synthesized)
tttgccaaagtttggtgagggatggccaagagctctttgaaactttgccatgtacaatagcactcacaattttttttaaattttttatacagtggtatcggggtacagtggctcatcaac

SEQ ID NO: 110144 - DNA, 120 bp, Artificial Sequence
  ENSG00000100036_25 (sequence is synthesized)
aggccaggagtttgagaccagtctgggcgacatagtaaaatctcatctctataaaaaaagaaaaaaaatgaggcgggcatggtggcaaacatctgtagtcccagccacgcaggaggctaa

SEQ ID NO: 110145 - DNA, 120 bp, Artificial Sequence
  ENSG00000100036_26 (sequence is synthesized)
acatctgtagtcccagccacgcaggaggctaaggtaagaggatcacttgagcctgagaggttgtggctacagtgagccatgatcacactactgcactctaggatgggtgacagagcagga

SEQ ID NO: 110146 - DNA, 120 bp, Artificial Sequence
  ENSG00000100036_27 (sequence is synthesized)
cagtttcaaaaaaagacaaaaaaaaatttacacagtggaatgctttctttaaaaactatcttatgcataagtacaatctagaaaaccagaactgggccacttatagtgaaggtggaagca

SEQ ID NO: 110147 - DNA, 120 bp, Artificial Sequence
  ENSG00000100036_28 (sequence is synthesized)
gaggtggcctgggaccccccaggattcctggagcactgcctgaaggccatttatctagtagattggcactcactgtaagaagcgcaagaggtaccatgatgcttaaggctctggctctgg

SEQ ID NO: 110148 - DNA, 120 bp, Artificial Sequence
  ENSG00000100036_29 (sequence is synthesized)
gtgtgaaagaatgaggtggaattgtagcagattcattcctgggtcaatctgtttttggggagggctgcaggattccaggcctgccatgtgcaatgggtgctgccctctttcttctgggca

SEQ ID NO: 110149 - DNA, 120 bp, Artificial Sequence
  ENSG00000100036_30 (sequence is synthesized)
ccatctgcctcaacctatcccctggccagtgtcactcacagggcagaaaatttatcttcaccatctcacaattagtttaatcttaaaaaaaatggattataaagttaaaagctacagcaa

SEQ ID NO: 110150 - DNA, 120 bp, Artificial Sequence
  ENSG00000100036_31 (sequence is synthesized)
ccccctaccggctgtggcttcctgctcgcagccacctgcctccgcggactcaagtcggttcagcaaaatcctgatctggtccattcagcagaggactgcagaagtctgaggagccttaag

SEQ ID NO: 110151 - DNA, 120 bp, Artificial Sequence
  ENSG00000100036_32 (sequence is synthesized)
atatcaacttaaagcaatgggctcgtcgcagaaaggaatagcctgtgccgggtcttcagagaaatcctggcctcggctccacgcccctgagcagccccaccctggctcaacctgttaccc

SEQ ID NO: 110152 - DNA, 120 bp, Artificial Sequence
  ENSG00000100036_33 (sequence is synthesized)
gccctgccggcaagccggggtcactgcagtccccgtggcgaagcagggtcagctcagctcaccgcaccccactccatccagccctgcccatctctacggcaacgggccgggtcgcaccag

SEQ ID NO: 110153 - DNA, 120 bp, Artificial Sequence
  ENSG00000100036_34 (sequence is synthesized)
ggctgcagccgagagacagtctcaccgcttccgtagccgcccgggctctgtgcgcatgtgcgacactccctccccggccccgcccccttatgcgtctcccaggcaacgcgccgcgcgggg

SEQ ID NO: 110154 - DNA, 120 bp, Artificial Sequence
  ENSG00000100036_35 (sequence is synthesized)
gcccaacgaccatgactcccaaccggcctccagtttccaactgtttctcgaacagggaagccgccatgacacagctgactacgcccttggtcacaggggacctgagatcctccacgattt

SEQ ID NO: 110155 - DNA, 120 bp, Artificial Sequence
  ENSG00000100036_36 (sequence is synthesized)
acgggaccggcgccacctcgggctcgaaccaccctctcgatagggccgccgctaagtaatcggcgtaggggttcagccgcacatctccttcccgcgccgcggaccgagcagtcgttggtg

SEQ ID NO: 110156 - DNA, 120 bp, Artificial Sequence
  ENSG00000100036_37 (sequence is synthesized)
ctcttcaggtgcggcctgggtgcccagagccttcgttagactctcggacccgcaagggagcccgaactctttcagactcgctctccctcagccggacctcggccctttttcacaccccag

SEQ ID NO: 110157 - DNA, 120 bp, Artificial Sequence
  ENSG00000100036_38 (sequence is synthesized)
gggagtctggatttctcatagtcctgggcaccagccccttcccagtctagctcttgggactccctgaagccggaactccctcgcctggactcccgggagaacctggaatccccatctcca

SEQ ID NO: 110158 - DNA, 120 bp, Artificial Sequence
  ENSG00000100036_39 (sequence is synthesized)
gtccacattttctcagaatctgtcctagcccttcagtctcccaggcatgacatcgtgtggtcccagcgccctaggtggtgagctgtgactctccttagagcctggcgaggccgaggtcct

SEQ ID NO: 110159 - DNA, 120 bp, Artificial Sequence
  ENSG00000100036_40 (sequence is synthesized)
ccccagctcgaacccatcccacactccccttctcagcctctgtgttccccagtggtcctggaaaagcccccagttccctctgcctggccccaatcctcacaaacccaattacccacgctc

SEQ ID NO: 110160 - DNA, 120 bp, Artificial Sequence
  ENSG00000100036_41 (sequence is synthesized)
ctttccattccataacccccatcactgcatcctccaggctcccatccatggaggacttgaggtggaaagcaatttggttcaaaataaccattatttattacttgaaagggaatatttcca

SEQ ID NO: 110161 - DNA, 120 bp, Artificial Sequence
  ENSG00000100036_42 (sequence is synthesized)
gtcgttgccagcctcctccccttctagtattggtaaattttttgcaccactgagtgggtgaagagttttatgcgtctttaaatgttttaaggatttttttaaaaaaacaaaaaactctca

SEQ ID NO: 110162 - DNA, 120 bp, Artificial Sequence
  ENSG00000100038_0 (sequence is synthesized)
gccagaagcggctggacccggaaataggggttgtcggtagccgccccgggaacaaggaccggagctggatccgcggtgcggctgtgggagtcagcattggtaatagtgctgtgctgcgga

SEQ ID NO: 110163 - DNA, 120 bp, Artificial Sequence
  ENSG00000100038_1 (sequence is synthesized)
agagtggagtctaaactttttcattgccagtgccccgaaactggagtgtgaaggaccgagacaaaatgaagactgtgctcatggttgctgaaaagccgtccttggcacagtcaattgcca

SEQ ID NO: 110164 - DNA, 120 bp, Artificial Sequence
  ENSG00000100038_2 (sequence is synthesized)
aaatcctctctagagggagcctgtcctcacacaaagggctgaacggggcctgctcagtccacgagtacactgggacctttgctggccagccagtgcgcttcaagatgacgtctgtctgtg

SEQ ID NO: 110165 - DNA, 120 bp, Artificial Sequence
  ENSG00000100038_3 (sequence is synthesized)
gtcacgtgatgaccctggatttcctgggaaaatacaacaaatgggacaaagtggaccccgcagaactgttcagccaagctcccacggagaagaaagaagctaaccccaagctgaacatgg

SEQ ID NO: 110166 - DNA, 120 bp, Artificial Sequence
  ENSG00000100038_4 (sequence is synthesized)
tgaagttcctgcaggtggagggcagaggctgcgactacatcgtgctgtggctggactgcgacaaggagggggagaacatctgctttgaggttcttgatgctgttctgcccgtcatgaaca

SEQ ID NO: 110167 - DNA, 120 bp, Artificial Sequence
  ENSG00000100038_5 (sequence is synthesized)
aggcccatggtggcgagaagaccgtgttccgggccaggtttagctccatcacggacacagacatctgtaatgccatggcctgcctaggcgagcctgaccacaacgaggcgctctcagtgg

SEQ ID NO: 110168 - DNA, 120 bp, Artificial Sequence
  ENSG00000100038_6 (sequence is synthesized)
atgctcgccaggagctggacctgcgaatcggctgtgcattcaccaggtttcagactaaatatttccaggggaaatacggtgatttagacagctctctcatctcctttgggccgtgtcaga

SEQ ID NO: 110169 - DNA, 120 bp, Artificial Sequence
  ENSG00000100038_7 (sequence is synthesized)
ctccaaccctgggattctgtgtggagagacatgataaaatccagtccttcaaaccagagacctactgggtgctgcaggccaaggttaacactgacaaagacagatctctccttttggact

SEQ ID NO: 110170 - DNA, 120 bp, Artificial Sequence
  ENSG00000100038_8 (sequence is synthesized)
gggaccgagtaagagtgtttgaccgggagatcgcacagatgtttttaaacatgacaaagctggagaaggaagcccaggtggaggccacaagcaggaaagaaaaggccaagcagaggcccc

SEQ ID NO: 110171 - DNA, 120 bp, Artificial Sequence
  ENSG00000100038_9 (sequence is synthesized)
tggccctgaacactgtggagatgctgcgtgtggccagctcttctctgggcatggggccgcagcacgccatgcagacggctgagcggctctacacgcaaggctacatcagctacccacgga

SEQ ID NO: 110172 - DNA, 120 bp, Artificial Sequence
  ENSG00000100038_10 (sequence is synthesized)
cagagaccacccactaccctgagaactttgacctgaagggctctctgcggcagcaggccaaccacccctactgggccgacacggtgaagcggttgttagcagaaggtatcaaccgcccgc

SEQ ID NO: 110173 - DNA, 120 bp, Artificial Sequence
  ENSG00000100038_11 (sequence is synthesized)
cagacacttcatcgccacggtcagccatgactgcaagtacctgcagagcaccatctccttcagaattgggcccgagctcttcacctgctccgggaagaccgtcctctcaccaggcttcac

SEQ ID NO: 110174 - DNA, 120 bp, Artificial Sequence
  ENSG00000100038_12 (sequence is synthesized)
ggaggtcatgccctggcagagcgtgcccctggaggagagcctgcccacttgccagcggggtgatgccttccctgtgggcgaggtgaagatgctggagaagcagacgaacccacccgacta

SEQ ID NO: 110175 - DNA, 120 bp, Artificial Sequence
  ENSG00000100038_13 (sequence is synthesized)
cctgacggaggccgagctcatcacgctcatggagaagcatggcatcggcacggatgccagcatccctgtgcatatcaacaacatctgccagcgcaactatgtcacggtggagagcgggcg

SEQ ID NO: 110176 - DNA, 120 bp, Artificial Sequence
  ENSG00000100038_14 (sequence is synthesized)
ccggctcaagcccaccaacctcggcatcgtcctggtgcacggctactataagattgatgcagagctggtgctccccaccatccgcagtgcagtggagaagcagctgaacctgatcgccca

SEQ ID NO: 110177 - DNA, 120 bp, Artificial Sequence
  ENSG00000100038_15 (sequence is synthesized)
gggcaaggccgactaccgccaggtcctgggccacaccctggacgtgttcaagaggaagttccactactttgtcgactccattgctggcatggatgagttgatggaggtgtctttctcgcc

SEQ ID NO: 110178 - DNA, 120 bp, Artificial Sequence
  ENSG00000100038_16 (sequence is synthesized)
cctggcggccacaggcaagcccctctcacgctgtgggaagtgccaccgcttcatgaagtacatccaggccaagccaagccgcctgcactgctcccactgcgatgagacctacacgctccc

SEQ ID NO: 110179 - DNA, 120 bp, Artificial Sequence
  ENSG00000100038_17 (sequence is synthesized)
ccagaacggcaccatcaagctctacaaggagctccgctgccctctggatgacttcgagctggtcctgtggtcatcaggctctcggggcaagagctacccgctgtgcccctactgctacaa

SEQ ID NO: 110180 - DNA, 120 bp, Artificial Sequence
  ENSG00000100038_18 (sequence is synthesized)
ccacccacccttccgagacatgaagaaaggcatgggctgcaacgagtgtacgcacccctcctgccagcactcgctgagcatgctgggcatcggccagtgcgtggaatgtgagagcggggt

SEQ ID NO: 110181 - DNA, 120 bp, Artificial Sequence
  ENSG00000100038_19 (sequence is synthesized)
gctggtgctggaccccacctcgggccccaagtggaaggtggcctgcaacaagtgcaacgtggtagcgcactgcttcgagaacgcccaccgcgtgcgggtgtccgccgacacctgcagtgt

SEQ ID NO: 110182 - DNA, 120 bp, Artificial Sequence
  ENSG00000100038_20 (sequence is synthesized)
ctgtgaggccgccttgcttgatgtggacttcaacaaggccaagtccccactcccgggcgatgagacgcagcacatgggctgcgtcttttgtgaccccgtcttccaggagctggtggagct

SEQ ID NO: 110183 - DNA, 120 bp, Artificial Sequence
  ENSG00000100038_21 (sequence is synthesized)
gaagcatgcggcctcctgccaccccatgcaccgcggtggaccagggagaaggcagggtcgagggcggggccgggccaggaggccccctgggaagcccaaccccagacggcccaaggacaa

SEQ ID NO: 110184 - DNA, 120 bp, Artificial Sequence
  ENSG00000100038_22 (sequence is synthesized)
gatgtcagccctggccgcctactttgtatgatgaccctgtcctccctcacccaggctgcagtgccatgcagacacctcatggcacttcaaactattaaaatgcattttatcttatccaga

SEQ ID NO: 110185 - DNA, 120 bp, Artificial Sequence
  ENSG00000100038_23 (sequence is synthesized)
ggatccgcggtgcggctgtgggtgagcggcgggctgcgggaccctcgcccggcggctcagaaaggcgggaagcgcacgcatttttctggcttgtttcctgaacgttggccggcggaggac

SEQ ID NO: 110186 - DNA, 120 bp, Artificial Sequence
  ENSG00000100038_24 (sequence is synthesized)
ccgcgagctcgggagagcgcccgggccgggctctgcattcttgttgcctcttccctggcgggggtgatactctcccgcggggcttgctgtgggggttcagggaggtggagatgggcccgc

SEQ ID NO: 110187 - DNA, 120 bp, Artificial Sequence
  ENSG00000100038_25 (sequence is synthesized)
catgtgcctgcagggagcaggcgctgtggttaatacttttcttcttcgaaccctcccacagctctttagggtgagatctgctgtaccagtctcacaggagtcagcattggtaatagtgct

SEQ ID NO: 110188 - DNA, 120 bp, Artificial Sequence
  ENSG00000100038_26 (sequence is synthesized)
gggctccccaccctccacagctgccatgtctttgcccacccttgcttgagtcctaatcccccttggacaggggggcctttgctagctttttctgtgagtgccccctgctggcccacgagg

SEQ ID NO: 110189 - DNA, 120 bp, Artificial Sequence
  ENSG00000100038_27 (sequence is synthesized)
cacctgcaggcacccccaacacacaaggcagttgccattgccaaccctcagtcctggagagcaggccttctgcttttaaaatagcttgtttggtcggggggtttttctccttaattttaa

SEQ ID NO: 110190 - DNA, 120 bp, Artificial Sequence
  ENSG00000100038_28 (sequence is synthesized)
aacaaatgcatacagattatggaaaattagaaagtgcagataagtagaaagacagaaaaattatgcataatcatattacccaagacgactgctgttatcatttagggttatttcatttta

SEQ ID NO: 110191 - DNA, 120 bp, Artificial Sequence
  ENSG00000100038_29 (sequence is synthesized)
agaagcggctggacccggaaataggggttgtcggtagccgccccgggaacaaggaccggagctggatccgcggtgcggctgtggctctttagggtgagatctgctgtaccagtctcacag

SEQ ID NO: 110192 - DNA, 120 bp, Artificial Sequence
  ENSG00000100038_30 (sequence is synthesized)
cacaggtagctgcagtctcttttcagtgccaacccctgccttgcaccaggctggactctgaggggacccctcaccctggcctttcctgcactcattggcactgagacgagagaccctgga

SEQ ID NO: 110193 - DNA, 120 bp, Artificial Sequence
  ENSG00000100038_31 (sequence is synthesized)
tgtagctggggcactgcttaggcctcagccagtggtgccaccctctctctgtgtcagaatcgagcaggcaaccctagtccaccctcaggacctgggcacaggtgtgcagtgctccctctg

SEQ ID NO: 110194 - DNA, 120 bp, Artificial Sequence
  ENSG00000100038_32 (sequence is synthesized)
gagctgagtgagcaagaggatgcagcagtcgggggacccacccggtgagcgggcacccccagtcagcgtccaccaccgtcctccatcctcatcctcgtcctcattactggaggagggagc

SEQ ID NO: 110195 - DNA, 120 bp, Artificial Sequence
  ENSG00000100038_33 (sequence is synthesized)
gcatgtccaggcaggcaggacagagcaccgagccagaccaggaatcagcgggagtgaggcatctgcccacattcaccgtgtgctctgcagaaagctccctcaggcctcagtctgcaccca

SEQ ID NO: 110196 - DNA, 120 bp, Artificial Sequence
  ENSG00000100038_34 (sequence is synthesized)
ggctgccccgggagtgagaccccatccctgccctcctgctgccgccagagtagctgacagggtggttccatgtggcccagtgacatgagggtcatgtggcattaccagtaacaagctggc

SEQ ID NO: 110197 - DNA, 120 bp, Artificial Sequence
  ENSG00000100038_35 (sequence is synthesized)
agcaaagcaaaggggggatggagtcagctgaaacccactgggatggtgccagcgaggggccttgaaagttgaggaggtttcaggtaagcagaaaacaggggtaatggcagccaggagccg

SEQ ID NO: 110198 - DNA, 120 bp, Artificial Sequence
  ENSG00000100038_36 (sequence is synthesized)
aaacatgagcaaggctgtccccaagagcaaggccaagaagagttccttctgctgggacgagggatccaggagcttgaggcattgggagcaggcagcagagggcaggtgggcacagtgggc

SEQ ID NO: 110199 - DNA, 120 bp, Artificial Sequence
  ENSG00000100038_37 (sequence is synthesized)
cccacgtgggaccagctcccagatctgggcttcaggcctccgtaggccaggtcagtgacacctcctggctgggttgaaagagcaggtgcattaacaccacacatggccaggaacacgtgc

SEQ ID NO: 110200 - DNA, 120 bp, Artificial Sequence
  ENSG00000100038_38 (sequence is synthesized)
ctctgacgcacagggctgctgccctgccgtgctgccaggacagtagaaaccaccgcctatagggaccctttcacactcagacccttgaccacgtgttgcggagccttttgctggggactg

SEQ ID NO: 110201 - DNA, 120 bp, Artificial Sequence
  ENSG00000100038_39 (sequence is synthesized)
tgtgccttcatgggcagacaaacattctacatcgtgtctggggatgggaggcccagggtctgaggccccggccacccaggctggggaccctgagtggcggcgcatatctctccaggcttc

SEQ ID NO: 110202 - DNA, 120 bp, Artificial Sequence
  ENSG00000100038_40 (sequence is synthesized)
tcagggaagctgtgcagccaccggggcccagatcggtgcggtacacacccaggcagcttccactcgccgccccctaggccctggctgggttttgagggcacccaggttctctgacctgtt

SEQ ID NO: 110203 - DNA, 120 bp, Artificial Sequence
  ENSG00000100038_41 (sequence is synthesized)
aggggccaaattgtctgggtggatgcaggtttcagaatgggattgtcttggggcagcttggtgttcagcatcttgtgcccagcgtgacttctcagggaccttgggttgatgctggttgat

SEQ ID NO: 110204 - DNA, 120 bp, Artificial Sequence
  ENSG00000100038_42 (sequence is synthesized)
tcccgacctcagcactgagctccttttgcaggcctcgctctgctcatctcctgcctcatccaggatgcctcctgcctccagccaaccctgggagccctgcagagaagcaggtggcagctg

SEQ ID NO: 110205 - DNA, 120 bp, Artificial Sequence
  ENSG00000100038_43 (sequence is synthesized)
ctccctgtgcacaccccatgccccatgcttgccccggccatggtgccctcacagtggccatgactgctggtctcacttggtgcccttcagactgttgttctatgggtcgcccccgtgctc

SEQ ID NO: 110206 - DNA, 120 bp, Artificial Sequence
  ENSG00000100038_44 (sequence is synthesized)
cccccagctctcacccgtggctcaagagctggtcagtgagacagagctgaggcacctggcgttgcagtacagcaccctcagcaaatgcgatcacactctgtctcttcccagataccctct

SEQ ID NO: 110207 - DNA, 120 bp, Artificial Sequence
  ENSG00000100038_45 (sequence is synthesized)
cctcccctgcagggcggctcctccctgggggcctttgcatctgggaatggagaatgggggcagctcatggggctttctcccttcagaaatgaagccacttattcccagtaaggaagctgc

SEQ ID NO: 110208 - DNA, 120 bp, Artificial Sequence
  ENSG00000100038_46 (sequence is synthesized)
cccatcacccccatgaagtctgccacagaggccgaattaggatttgcagtgtgtcctgcacagcggctctgtaagcaggagcttgctgctcgagcgagagtactgggggctcctcacggc

SEQ ID NO: 110209 - DNA, 120 bp, Artificial Sequence
  ENSG00000100038_47 (sequence is synthesized)
gttgtcggtagccgccccgggaacaaggaccggagctggatccgcggtgcggctgtgggtgagtccacctgtaggtggaagagccagtccagagaggagggccaggcatccacctggcct

SEQ ID NO: 110210 - DNA, 120 bp, Artificial Sequence
  ENSG00000100038_48 (sequence is synthesized)
gacccatcactccagatccccaggccccagcatcttcctagcatggatttaggaataaaattgacctgagatcactggggccacttcaccttcccccaaatggagccacattcccaggat

SEQ ID NO: 110211 - DNA, 120 bp, Artificial Sequence
  ENSG00000100038_49 (sequence is synthesized)
aacaaggaccggagctggatccgcggtgcggctgtggctctttagggtgagatctgctgtaccagtctcacaggtgagtccacctgtaggtggaagagccagtccagagaggagggccag

SEQ ID NO: 110212 - DNA, 120 bp, Artificial Sequence
  ENSG00000100038_50 (sequence is synthesized)
actcacaaagctgccccgccagccctgtgtgcccagcccagcacccctccatgggctggtatctggaaactggtgacccagtgtgtggccagccaggcaggtccacagcgggcatcccct

SEQ ID NO: 110213 - DNA, 120 bp, Artificial Sequence
  ENSG00000100038_51 (sequence is synthesized)
cctgaggcctccattcaggacctggccttccctgtgaaggcccagatgtgccctcgtgcactgtggggtgtgcacacaccgactaacgcccacaaggctgaagattggcccagatgccag

SEQ ID NO: 110214 - DNA, 120 bp, Artificial Sequence
  ENSG00000100038_52 (sequence is synthesized)
ttgtttttaatctcagatgtcttcaagtttccctaattccctaatttttcttcttcttgcctcaggttggtcttgttttttctttgttaaagtgattttccttgtagtggtgtaggttct

SEQ ID NO: 110215 - DNA, 120 bp, Artificial Sequence
  ENSG00000100053_0 (sequence is synthesized)
gagtctgcagacggccgtggctcctctgttcttcccgaggctacagcaacagccagaggtgttcctggggagatggcggaacagcacggagcacccgaacaggctgcagctggcaagagc

SEQ ID NO: 110216 - DNA, 120 bp, Artificial Sequence
  ENSG00000100053_1 (sequence is synthesized)
catggagaccttgggggcagctacaaggtgatcttgtacgaactagagaacttccaaggcaaacgctgcgagctctcggccgagtgccccagcctgaccgacagcctgctggagaaggtg

SEQ ID NO: 110217 - DNA, 120 bp, Artificial Sequence
  ENSG00000100053_2 (sequence is synthesized)
ggctccatccaagtggagtccgggccgtggctggcatttgagtccagggccttccgcggggagcagtttgttctggagaagggggattatcctcgctgggatgcctggtccaacagccgt

SEQ ID NO: 110218 - DNA, 120 bp, Artificial Sequence
  ENSG00000100053_3 (sequence is synthesized)
ctgtccctccggcctctgaatattgatagtccacatcacaagctgcatctgtttgagaacccagctttcagtggccgcaagatggagatagtggatgatgacgtgcccagcctgtgggct

SEQ ID NO: 110219 - DNA, 120 bp, Artificial Sequence
  ENSG00000100053_4 (sequence is synthesized)
catggcttccaggaccgtgtggcgagtgtccgtgccatcaacgggacgtgggttggctatgagttccccggctaccgtgggcgccagtacgtgtttgagcggggcgagtaccgccactgg

SEQ ID NO: 110220 - DNA, 120 bp, Artificial Sequence
  ENSG00000100053_5 (sequence is synthesized)
aatgagtgggacgccagccagccgcagctgcagtctgtgcgccgcatccgtgaccagaagtggcacaagcggggccgcttccccagcagctgaaaggcacccagacttcaaggacccaga

SEQ ID NO: 110221 - DNA, 120 bp, Artificial Sequence
  ENSG00000100053_6 (sequence is synthesized)
cccaccctggggggctgcaagggcaagaagaggaggctccagggttggggcgagggccgacctgtccacccttccctggaatctgctcaataaagcctggggttggtcccccacccgcca

SEQ ID NO: 110222 - DNA, 120 bp, Artificial Sequence
  ENSG00000100055_0 (sequence is synthesized)
gaacagcagctgggtcggcaagcgacaggagcacgggtcatcttttccccagaggcgtcggaatggacctgtgccacccagagcccgcggagctgagcagcggggagacggaagagttac

SEQ ID NO: 110223 - DNA, 120 bp, Artificial Sequence
  ENSG00000100055_1 (sequence is synthesized)
agaggatcaagtggcaccgaaagcagctcctggaggacatccagaagctgaaggatgagattgcagatgtgtttgcccaaatcgactgcttcgagagtgcggaggagagccggatggccc

SEQ ID NO: 110224 - DNA, 120 bp, Artificial Sequence
  ENSG00000100055_2 (sequence is synthesized)
agaaggagaaggagctgtgtattgggcgcaagaagttcaacatggaccccgccaagggtatccagtatttcattgagcacaagctgctgacccctgacgtccaggacattgcacggttcc

SEQ ID NO: 110225 - DNA, 120 bp, Artificial Sequence
  ENSG00000100055_3 (sequence is synthesized)
tgtataaaggcgagggcctcaacaagacagccattggtacctacctgggggagagggatcccatcaacctgcaggtcctccaggccttcgtggactgccacgagttcgccaacctcaacc

SEQ ID NO: 110226 - DNA, 120 bp, Artificial Sequence
  ENSG00000100055_4 (sequence is synthesized)
tcgtccaggccctcaggcagttcctgtggagcttccggctgccgggcgaggcccagaagatagaccggatgatggaggcctttgccactcgatactgcctctgcaacccaggcgtcttcc

SEQ ID NO: 110227 - DNA, 120 bp, Artificial Sequence
  ENSG00000100055_5 (sequence is synthesized)
agtccacagacacctgctacgtgttgtccttctccatcatcatgctcaacaccagcctccacaatcccaacgtccgggacaggccgccttttgagcgctttgtgtccatgaaccgcggca

SEQ ID NO: 110228 - DNA, 120 bp, Artificial Sequence
  ENSG00000100055_6 (sequence is synthesized)
tcaacaatggtagcgacctgcccgaggaccagctgcggaacctcttcgacagcatcaagagtgagccattctccatccctgaggacgacggcaatgacctcactcacaccttcttcaatc

SEQ ID NO: 110229 - DNA, 120 bp, Artificial Sequence
  ENSG00000100055_7 (sequence is synthesized)
cagaccgggagggttggctgctcaagctagggggccgcgtgaagacgtggaaacggcgctggttcatcctgaccgacaactgcctctactacttcgagttcaccactgacaaggagccac

SEQ ID NO: 110230 - DNA, 120 bp, Artificial Sequence
  ENSG00000100055_8 (sequence is synthesized)
ggggaattatacctcttgagaacctctcggtgcagaaggtggatgaccccaagaagccattctgcctggagctctacaaccctagctgccgaggccagaaaatcaaggcctgcaagaccg

SEQ ID NO: 110231 - DNA, 120 bp, Artificial Sequence
  ENSG00000100055_9 (sequence is synthesized)
atggcgacggcagggtggtggagggcaagcacgaatcgtaccgcatctcagccaccagtgccgaggaacgtgaccagtggatcgagtccatccgagccagcatcacccgtgtccccttct

SEQ ID NO: 110232 - DNA, 120 bp, Artificial Sequence
  ENSG00000100055_10 (sequence is synthesized)
acgacctggtctctactcggaagaagaagattgccagcaagcagtgagattcctggaggtggcactgggggctggtcaccctgagagtcccatcgcctgcagcacctggagacccacctc

SEQ ID NO: 110233 - DNA, 120 bp, Artificial Sequence
  ENSG00000100055_11 (sequence is synthesized)
ccaccccagtgcactcttttgggccacagacatcattgctgttccccgttacctcgagctgactctagaggggaaggcagagctcaggagggtgggtgggagctgcagtgggctcagagt

SEQ ID NO: 110234 - DNA, 120 bp, Artificial Sequence
  ENSG00000100055_12 (sequence is synthesized)
agcagccagaggaaaaccagccccagaatgctgcaacttctcttctctctggacttcggtgtcctcggctctgaaggcgctctctgcacttagatgctgtcagccctcaacgtaggaggg

SEQ ID NO: 110235 - DNA, 120 bp, Artificial Sequence
  ENSG00000100055_13 (sequence is synthesized)
gccgtggggtccctaagtgattcttctccctggcaaggctcttccttttcagggatatctctgccaacccctcccctgtcctcgggttgggcttggccctctctgcctgagagagctcag

SEQ ID NO: 110236 - DNA, 120 bp, Artificial Sequence
  ENSG00000100055_14 (sequence is synthesized)
cacacacacagctcagacccacggacaggaccccgggacagaaccccgggagcactgccctaggagcccggaccccacgagctcagtcccagctctgcctctgactcgctgtgtgccctc

SEQ ID NO: 110237 - DNA, 120 bp, Artificial Sequence
  ENSG00000100055_15 (sequence is synthesized)
tgccaagtcatgcccattctctagttcttgcaaaactgcagtgtttggactagaaacgtattggcccctgctagccctgtgctccagcttccagctggagatggcagccgttgtttgcgg

SEQ ID NO: 110238 - DNA, 120 bp, Artificial Sequence
  ENSG00000100055_16 (sequence is synthesized)
agcccaggctgactccggattcaacgttgctggggagagaaaagcagtatagactccaccttccaggatgtccatttcggggagaggagcaggtgggaccctcaagaaaatgacggagaa

SEQ ID NO: 110239 - DNA, 120 bp, Artificial Sequence
  ENSG00000100055_17 (sequence is synthesized)
catcccagacagatgggactcaagcaggatgggtgctatatccaagaagccaagaagggagagtttcgtgcactgtggttaacaggagggctgcctggaggcagtggctgagccagaaag

SEQ ID NO: 110240 - DNA, 120 bp, Artificial Sequence
  ENSG00000100055_18 (sequence is synthesized)
taacacagagctcatgcttggagagagagagtcttggccatggctttcctgcaagaccactgacgagcagtcccatggtgataaagggcagcccggcgggtcccagcatctcgagaccct

SEQ ID NO: 110241 - DNA, 120 bp, Artificial Sequence
  ENSG00000100055_19 (sequence is synthesized)
ctgcagaagtattatcagagtagagctgacttccagtacccgggcagccagctctgtctccagggaggcctggcctggaggaggagtccactaacaggaaacacttctcaccccctcaca

SEQ ID NO: 110242 - DNA, 120 bp, Artificial Sequence
  ENSG00000100055_20 (sequence is synthesized)
caggcccaggggagcccctggagggaaattccttggcaggggaacaggaaatgtggccgcctctgccccactgccagcctgagtgggcaaggaagcaggtggatcccccagaaggaaccg

SEQ ID NO: 110243 - DNA, 120 bp, Artificial Sequence
  ENSG00000100055_21 (sequence is synthesized)
cagctcgcgaggcacctctcctcgtccccacccacccccacatttgcacaccttccacagggtcaggatggagtagctgccttgcgaggtggtgagactcctgtctctggaggtctgcaa

SEQ ID NO: 110244 - DNA, 120 bp, Artificial Sequence
  ENSG00000100055_22 (sequence is synthesized)
gcactggtagtgatattgcagcagacaaggtctgggttgggcgtctgcaggaggacaccttgtgggacatctgaggacatccgcagattcttgtcagcctgtgaactaggccctgcctct

SEQ ID NO: 110245 - DNA, 120 bp, Artificial Sequence
  ENSG00000100055_23 (sequence is synthesized)
gtcacctcattggtccatgaaggagcagccaggggtggtggaaggagcactgggctaggggtcaggggtcagagattctgtcctgctcctgggatgcactggctactcccttagtctact

SEQ ID NO: 110246 - DNA, 120 bp, Artificial Sequence
  ENSG00000100055_24 (sequence is synthesized)
cccttcccctctctggtcctcagcttcctccatcatggaggagatgggatcatggattttctgggcataagtggctgttctgggagtcattccaaagagagaataaaactcctgatccaa

SEQ ID NO: 110247 - DNA, 120 bp, Artificial Sequence
  ENSG00000100055_25 (sequence is synthesized)
ctgcccgaggaccagctgcgggttacatgggagtgctcccagaggagaagccgggaaaggacatttcaaaaagaagaagtggccagaacggaggcgtgtcctgattgggaaaggagaggt

SEQ ID NO: 110248 - DNA, 120 bp, Artificial Sequence
  ENSG00000100055_26 (sequence is synthesized)
cctctcggtgcagaaggtggatgaccccaagaagccagtaggtgttcaggttgcaggatcccgaggctggagccactgggaaatttcctaaacagaacgtggggagagggcctgaggctg

SEQ ID NO: 110249 - DNA, 120 bp, Artificial Sequence
  ENSG00000100055_27 (sequence is synthesized)
ggctctccaggaagccaggctgtgccccttacaccttccctgtggctcagggctgccttctctccctcctggggccatggacagtgagaaaaggtcaatgtgggtccaaggacgtggttg

SEQ ID NO: 110250 - DNA, 120 bp, Artificial Sequence
  ENSG00000100055_28 (sequence is synthesized)
tcccctgttgtcccacacagcccgactggctggatggccccgagtaagctccactccattcagaacctcagtgagcccacatgtcacgtggggactttagggaggatggtggattcagga

SEQ ID NO: 110251 - DNA, 120 bp, Artificial Sequence
  ENSG00000100055_29 (sequence is synthesized)
gcctgccacagagagagtgctcagtgtgggagcagcagctcctgccccttcgcctgtcgtagggctgtcacgctgatcagggacactagcgtctgggcttctctgagcctcctggagggc

SEQ ID NO: 110252 - DNA, 120 bp, Artificial Sequence
  ENSG00000100055_30 (sequence is synthesized)
gattccgagaaggagcatctgatctgggctttggagggtgagtaggagttcacaatacagagaaggaagaagccaccaccatccagtgttctctaactcccagctctttaagggagaggg

SEQ ID NO: 110253 - DNA, 120 bp, Artificial Sequence
  ENSG00000100055_31 (sequence is synthesized)
tattgggcgcaagaagttcaacatggaccccgccaaggtaggtggctgtggagggcccgggccacagggtgtgggggctgcatgggagcacctgcctggtgtcctctcgctcccctcggc

SEQ ID NO: 110254 - DNA, 120 bp, Artificial Sequence
  ENSG00000100055_32 (sequence is synthesized)
actcccaggcatacacgccttggggcaggaggagccaggagcatggaggaggccacggtgtccatgcacttggcctagtcccttccccactctgggcctccatttccttctccatgaatg

SEQ ID NO: 110255 - DNA, 120 bp, Artificial Sequence
  ENSG00000100055_33 (sequence is synthesized)
tggcttgggacagtggagctcttggatctggggcttaggctccagaagcatcttccagccctgggctcagggagggccagtcctgcggtcccaccacccacccctctgctagtaggagca

SEQ ID NO: 110256 - DNA, 120 bp, Artificial Sequence
  ENSG00000100055_34 (sequence is synthesized)
gcagctcagggctgggttacctcgatcccccacaccactcccaagcccctggcctcaccccaccaggtggcagctgggcttccatcctgaaaggacggagacagaaggaaaccgcaggca

SEQ ID NO: 110257 - DNA, 120 bp, Artificial Sequence
  ENSG00000100055_35 (sequence is synthesized)
aggcgagggcctcaacaagacagccattggtacctacctgggggagaggtaagaacgagtggagccttagcgaggcaggaaatgaaggtgtgcaggtgtgtacaggtgtgtggatgtgca

SEQ ID NO: 110258 - DNA, 120 bp, Artificial Sequence
  ENSG00000100055_36 (sequence is synthesized)
ggggctcacggatcatcccctccagattctgagtcaaagcctgactgccttcattcatttagtcatttattcaacaaataaatgttgctcagggtctactgtgttccaggcaccatccta

SEQ ID NO: 110259 - DNA, 120 bp, Artificial Sequence
  ENSG00000100055_37 (sequence is synthesized)
agccctgggtgtacaccagtgaataagacagacaaaactcttgtcctcaggaagtccatgctagtgggagagacaggtctcaatagttgtaaaatatgttagagaatgataagctctgtg

SEQ ID NO: 110260 - DNA, 120 bp, Artificial Sequence
  ENSG00000100055_38 (sequence is synthesized)
caatagttgtaaaatatgttagagaatgataagctctgtggaatacaaatcgagcagggaagggaagtcagaaatgctggggaccggccaggctcggggctcatgcctgtaatcccagca

SEQ ID NO: 110261 - DNA, 66 bp, Artificial Sequence
  ENSG00000100055_39 (sequence is synthesized)
tgtagtcccagttactcaggaggctgaagcaggggaatcgcttgagcctgggagtttgagaacgag

SEQ ID NO: 110262 - DNA, 120 bp, Artificial Sequence
  ENSG00000100055_40 (sequence is synthesized)
aagtgggagttggaagagagcttgtggggtggaacacagggggccctgctaggactgtccaagttgggcgctcctatggcatatatgtgaggaggctgccacgtgaatgcccatggtccc

SEQ ID NO: 110263 - DNA, 120 bp, Artificial Sequence
  ENSG00000100055_41 (sequence is synthesized)
tcgtccaggccctcagggttgtgaagactaaatgggaaagtgtttaaaactggtccacagtgagtgcttagtaagtcttgatgctgcttgaaaactcagattccgagaaggagcatctga

SEQ ID NO: 110264 - DNA, 120 bp, Artificial Sequence
  ENSG00000100055_42 (sequence is synthesized)
ataccacttcttggttgttcaaataaataagtgaataaataatgagcccatgagccagtggaggaggagattcaagttccggggaaggaatgcgtgccttcagcgagtgtttaactgagt

SEQ ID NO: 110265 - DNA, 120 bp, Artificial Sequence
  ENSG00000100055_43 (sequence is synthesized)
gcttatgacatgtcagactctttctaggtgctggggacacagtagtgagcaaaagagtagaacaactgaactctcatggagccgagagtctagcgggagggacagaaaagatgcaaggaa

SEQ ID NO: 110266 - DNA, 120 bp, Artificial Sequence
  ENSG00000100055_44 (sequence is synthesized)
ggaggtgggcctctgtgaatagggcaagtcctgggtttccggagggaagggggccctgcagaagtgagggcaagtgggtgtggctggagccaagtgatggggaaggccggttgtctctct

SEQ ID NO: 110267 - DNA, 120 bp, Artificial Sequence
  ENSG00000100055_45 (sequence is synthesized)
gtagagcccgcggagctgagcagcggggagacggaagagttacagaggatcaagtggcaccgaaagcagctcctggaggacatccagaagctgaaggatgagattgcagatgtgtttgcc

SEQ ID NO: 110268 - DNA, 120 bp, Artificial Sequence
  ENSG00000100055_46 (sequence is synthesized)
gcccgtggccccgtttctcccccaggcagttcctgtggagcttccggctgccgggcgaggcccagaagatagaccggatgatggaggcctttgccactcgatactgcctctgcaacccag

SEQ ID NO: 110269 - DNA, 87 bp, Artificial Sequence
  ENSG00000100055_47 (sequence is synthesized)
ctcccacaagccaaagttactcaatccatacatcaaccgtttgagacacctgctacgtgttgtccttctccatcatcatgctcaaca

SEQ ID NO: 110270 - DNA, 120 bp, Artificial Sequence
  ENSG00000100056_0 (sequence is synthesized)
ctgggatagcgatggagacgccgggcgcatcagcgtcgtccttgttgcttcccgccgcgtccaggcccccgaggaagcgcgaggcgggagaggctggggctgcgacgagcaagcagcggg

SEQ ID NO: 110271 - DNA, 120 bp, Artificial Sequence
  ENSG00000100056_1 (sequence is synthesized)
tcctggacgaggaagagtatatcgagggcctccagacggtcatccaaagggatttctttcctgatgtggagaagctccaggcacagaaggagtacctggaagccgaggagaatggagact

SEQ ID NO: 110272 - DNA, 120 bp, Artificial Sequence
  ENSG00000100056_2 (sequence is synthesized)
tggaacggatgcgccagattgccatcaagtttggctctgccttgggcaagatgtcccgggagcccccgccaccctatgtgactccagccacatttgaaacccctgaggtgcatgcaggca

SEQ ID NO: 110273 - DNA, 120 bp, Artificial Sequence
  ENSG00000100056_3 (sequence is synthesized)
ctggagtggtgggcaacaagcccaggccccgcggccgaggcctggaggatggagaggctggagaggaggaggagaaggagccgctgcccagcctagatgtcttcctgagccgctacacga

SEQ ID NO: 110274 - DNA, 120 bp, Artificial Sequence
  ENSG00000100056_4 (sequence is synthesized)
gtgaggacaatgcctccttccaggagatcatggaggtggccaaggagagaagccgggcacgccacgcttggctctaccaggctgaggaagagtttgagaagaggcagaaagataatctcg

SEQ ID NO: 110275 - DNA, 120 bp, Artificial Sequence
  ENSG00000100056_5 (sequence is synthesized)
aactcccgtcagcagagcaccaggccatcgagagcagccaggccagtgtggagacctggaagtacaaggccaagaattccctcatgtactatccagagggtgtccctgacgaggagcagc

SEQ ID NO: 110276 - DNA, 120 bp, Artificial Sequence
  ENSG00000100056_6 (sequence is synthesized)
tgtttaagaagccccggcaggtggtacataagaacacgcgcttccttagggaccccttcagccaagccctgagcaggtgccagctccagcaggcagccgccctcaatgcccagcacaaac

SEQ ID NO: 110277 - DNA, 120 bp, Artificial Sequence
  ENSG00000100056_7 (sequence is synthesized)
agggcaaggtgggccccgatggcaaggagctgatcccccaggagtcccctcgagtgggtggatttggatttgttgccactccttcccctgcccctggtgtgaacgagtccccgatgatga

SEQ ID NO: 110278 - DNA, 120 bp, Artificial Sequence
  ENSG00000100056_8 (sequence is synthesized)
cctggggggaggttgagaacacacccttgagagttgaagggtcggaaacgccctacgtggacaggacacccggcccagcttttaagatcctggagccaggccgcagggagcggctgggtc

SEQ ID NO: 110279 - DNA, 120 bp, Artificial Sequence
  ENSG00000100056_9 (sequence is synthesized)
tgaagatggccaacgaggccgctgccaagaaccgggccaagaagcaggaagccttgcggagagtgacggagaatctggccagcctcacccccaaaggcctgagcccagccatgtcgccag

SEQ ID NO: 110280 - DNA, 120 bp, Artificial Sequence
  ENSG00000100056_10 (sequence is synthesized)
ccctacagcgccttgtgagcaggacggccagcaagtacacagaccgggccctgcgggccagctacacaccatccccagcacgctccacccacctcaagaccccggccagtgggctgcaga

SEQ ID NO: 110281 - DNA, 120 bp, Artificial Sequence
  ENSG00000100056_11 (sequence is synthesized)
cccccacaagcacaccggcgcctggctctgccacacgcacccctctcacacaggacccggcctccatcacggacaacctgctgcagctccctgcccggcgcaaagcttcggacttctttt

SEQ ID NO: 110282 - DNA, 120 bp, Artificial Sequence
  ENSG00000100056_12 (sequence is synthesized)
agagccaggcctgggctgggctcatagacgcttcacagagcctgcagggcagctgtacacccagcagaggactccagccttctcggggcccaggcctgggccagaagctgttgaccatac

SEQ ID NO: 110283 - DNA, 120 bp, Artificial Sequence
  ENSG00000100056_13 (sequence is synthesized)
caggagtcactggagaaaggggctgtgctggggccagactggcacaaggcactcgtgcccacaccacaccccagggccttgccaagctgtttgctgtttaattggccccttgaactgtca

SEQ ID NO: 110284 - DNA, 120 bp, Artificial Sequence
  ENSG00000100056_14 (sequence is synthesized)
ttaaagaacacctaggtacagtctggggggttgcctctccatcttgctccccacacgagccctagccttgccctggggcctgcatcacgtctcaggactgcggggcttgaagcgaggggc

SEQ ID NO: 110285 - DNA, 120 bp, Artificial Sequence
  ENSG00000100056_15 (sequence is synthesized)
cccccaggtgaggaagctgcaggtggggcggctgtgggagcaccgggtgactggcgttgctttctgcggcactcggaacctgtgttctgagttgagctcacatcctgcagtgctttctgc

SEQ ID NO: 110286 - DNA, 120 bp, Artificial Sequence
  ENSG00000100056_16 (sequence is synthesized)
ttctctggggggatatgaaggagaaacggagcccttggaagttgtacccttaggttcccctgcggttctgggcccaggtctgcagcctccactctgggcttgccggctgtgaggtgcgct

SEQ ID NO: 110287 - DNA, 120 bp, Artificial Sequence
  ENSG00000100056_17 (sequence is synthesized)
ggttataggactgtgtgggggctgcatatcaggtgatctcagctatcaccttctcccagcacctggcttccagctcatggggtgggactatcccactcacccctctgctataggcactgc

SEQ ID NO: 110288 - DNA, 120 bp, Artificial Sequence
  ENSG00000100056_18 (sequence is synthesized)
ccatcttatgctgctggccctggcctcacctggtcacttccaccaacaggagctcccagataacagtgggttgctggacagatcaggctgggactcttaaggggtgggggacgtggggcc

SEQ ID NO: 110289 - DNA, 120 bp, Artificial Sequence
  ENSG00000100056_19 (sequence is synthesized)
ttcagtgctttatcccctaggaaagggtgcacgttatcccaagggagcccccaggaagtggggagggaggggggaggagcatgtctaggtgctgaccacctggagcacttggccagcaag

SEQ ID NO: 110290 - DNA, 120 bp, Artificial Sequence
  ENSG00000100056_20 (sequence is synthesized)
tgggccgcatgctttgggagcaatgggtgacccagcaggaagcacaaaagaccggccagtgtgccatcatcaagggctgctgagcagcttgaagagccactgggtggggagggcacacgg

SEQ ID NO: 110291 - DNA, 120 bp, Artificial Sequence
  ENSG00000100056_21 (sequence is synthesized)
ggaggtctcagctggggctgcccctggaggacagggcagggaacttgagggctgaggacagaaatctcacatgactccaggaaatagaggaagaggaggatgctgagcgagggattgtga

SEQ ID NO: 110292 - DNA, 120 bp, Artificial Sequence
  ENSG00000100056_22 (sequence is synthesized)
gggcattggggacaaggccaggtcagagggagacagtgtgggcctggtgggtggaccctggcagaggccctcttgtcccccacaaggccaggccacactgtgattctgcctgtacctgag

SEQ ID NO: 110293 - DNA, 120 bp, Artificial Sequence
  ENSG00000100056_23 (sequence is synthesized)
catctgtcctgtgctcctaggccggagaccactgtgtgtcaggtggggcggttggctgagtcccagagaaaaacactcctcactgggcactcttgatgcttgcacacaccctgtggttta

SEQ ID NO: 110294 - DNA, 120 bp, Artificial Sequence
  ENSG00000100056_24 (sequence is synthesized)
tttggtggtcagtaaggaacgtctttgctgctaagtggaagaaagctaatggaacgtaatcaaaatagtggtttaattgacgaattttacttgcacctgtgccttcttcagatcctacct

SEQ ID NO: 110295 - DNA, 120 bp, Artificial Sequence
  ENSG00000100056_25 (sequence is synthesized)
gcctacttagtttacgtgaaggccgactgcaccatgccccccaaccccgacccccaccacacacaacggggccattgtcatgctaggtgcttgctttccccacctcagctccggagatgt

SEQ ID NO: 110296 - DNA, 120 bp, Artificial Sequence
  ENSG00000100056_26 (sequence is synthesized)
gatggtctttggccctggaggtctcggccagcctgtcctccatcctgttctcgttctcgggcaccaccagcagccggtgctgggttttggctccaagcttgtggtcgggccggtggtcgg

SEQ ID NO: 110297 - DNA, 120 bp, Artificial Sequence
  ENSG00000100056_27 (sequence is synthesized)
gcctcaagcctgtcttggtgtccagtttgcactcagcgcggtacttgccctccccctccctcttgaaggaggcagaagacgtggctttgggcttggggggctgcagccacgagtggctga

SEQ ID NO: 110298 - DNA, 120 bp, Artificial Sequence
  ENSG00000100056_28 (sequence is synthesized)
ggatctcatcgatgtggagccgctggctgacgtcgggctgcagcatgcggtagatgaggtccttgcactcgcaggtcaggttcttggagcgcgggaagtccacacggtgctccttctgga

SEQ ID NO: 110299 - DNA, 120 bp, Artificial Sequence
  ENSG00000100056_29 (sequence is synthesized)
tacgcagcatcttcctgatgtcggagtcgtcatagggcatggagccgcagaccatgatgtacaggatcacgcccaggctccagatgtcatacaccttgggctggtaggggatgctctgca

SEQ ID NO: 110300 - DNA, 120 bp, Artificial Sequence
  ENSG00000100056_30 (sequence is synthesized)
gcacctcgggggctgcatatgctgccgacccgcagaaggtcttgctgaggatgatgcgcccattgctgtcccgcaggcagcgcttggagaagccaaagtcagacagcttgatgttgaagt

SEQ ID NO: 110301 - DNA, 120 bp, Artificial Sequence
  ENSG00000100056_31 (sequence is synthesized)
ccttgtcgaggagaaggttctcgcacttgaggtcccggtggacgatgtccaggtcgtggcagtacttgacggcggaggagagctgtcggaacatcttgcgtgccacgtcctcatgcaggg

SEQ ID NO: 110302 - DNA, 120 bp, Artificial Sequence
  ENSG00000100056_32 (sequence is synthesized)
ctccctggcacttgatgaactcgaggaggtcgccctggacgccaagctccatgatgatgtagatccgtccgtcagaggtctcaaagatctcgtaagtcttgatgatggagccgtggttga

SEQ ID NO: 110303 - DNA, 120 bp, Artificial Sequence
  ENSG00000100056_33 (sequence is synthesized)
cagttgccaggatgtccatctcccgaggaaggaatctctccacaaagtcagtaggtgttttcttgcggtcgatgatcttgacagccacattgaacttgaggcgctcagagtaggcagatt

SEQ ID NO: 110304 - DNA, 120 bp, Artificial Sequence
  ENSG00000100056_34 (sequence is synthesized)
tgacttttgcgtaggaacccttgccaagattgatgcctacgatgtaacccttcttccttaggactgtggcatcgtccatggtgccaggagcgactggcgccgctgccgtctacatccccc

SEQ ID NO: 110305 - DNA, 120 bp, Artificial Sequence
  ENSG00000100056_35 (sequence is synthesized)
cgtcatgtgggccagcaggcattgtcctcatttacactaccggaggcgtctggctgggctgccctgggctgggcttcgactcaggggtggaacactcagcattgtctccgggtgacttca

SEQ ID NO: 110306 - DNA, 120 bp, Artificial Sequence
  ENSG00000100056_36 (sequence is synthesized)
gccaatgaactcataaagccaaggagtgggggcggggactgggctgagggagaacagggtctctggaaccgtggaagccaggctggtctggcaggagcacccactccccgcccgctggaa

SEQ ID NO: 110307 - DNA, 120 bp, Artificial Sequence
  ENSG00000100056_37 (sequence is synthesized)
ggaagcctgtccccaggacaggactctggtggccctgctgctgctgcattggtttccctgtcacaagtcaagctggaggggaggcggcccacgtccagcctgtttgcatcacctggctgt

SEQ ID NO: 110308 - DNA, 120 bp, Artificial Sequence
  ENSG00000100056_38 (sequence is synthesized)
ggggactgaccctgcattggtctttgtcccactagggtgggtttcctgcagcttctttggctatgaagaaaagcacccccagggctgtgtccttggtgtggtaggacagttgtccctgac

SEQ ID NO: 110309 - DNA, 120 bp, Artificial Sequence
  ENSG00000100056_39 (sequence is synthesized)
agtcacccagacaggcctgcatagcaccccagttacacagacagatttccacagcactgccttaccattgagcacatagttaaatctagggaaatcagtgcccagacatcaaagctagaa

SEQ ID NO: 110310 - DNA, 120 bp, Artificial Sequence
  ENSG00000100056_40 (sequence is synthesized)
atgaaacatggtcagcaggagccttgcatgggcttctcttttgctggagcaagccaaaataataggaacggttttacattcctagtgccaggacccatctcgggtcgacaaaatctgaag

SEQ ID NO: 110311 - DNA, 120 bp, Artificial Sequence
  ENSG00000100056_41 (sequence is synthesized)
acaagttaagggaacaggcagctgtttgaatagatcaattggatagtctaaggcagctctctggaccaagctgtaaaggagatacaatcgaaataatcactccggtaccacagtagacag

SEQ ID NO: 110312 - DNA, 120 bp, Artificial Sequence
  ENSG00000100056_42 (sequence is synthesized)
gccttgaaggcactgggccccttttaatcggacttagcaagcattttttttgcctctgaccttctccttggaacaaaattagttaccagtagacttaggtgattgctgtactgcatgtag

SEQ ID NO: 110313 - DNA, 120 bp, Artificial Sequence
  ENSG00000100056_43 (sequence is synthesized)
gcacataaccccaacctatataaacagtaagaaaattgtagcactttgagttggtctgctggaattatctccagccttctccctgtatccagttacagtgataaactcccttctttccta

SEQ ID NO: 110314 - DNA, 120 bp, Artificial Sequence
  ENSG00000100056_44 (sequence is synthesized)
tgttgtcagggaaaagagagagcggctctctttgtatgggacgggggtcagggaaagaagattttctgttaaagtgtgagtaggagtttgacaaactggaaggatggtggcaaagagggc

SEQ ID NO: 110315 - DNA, 120 bp, Artificial Sequence
  ENSG00000100056_45 (sequence is synthesized)
tttctaaagagcggtggcagcaagtgtgaatgctggggttcctggaaagagaccgcagttgtgacagcatctcgaggcctccagacggtcatccaaagggatttctttcctgatgtggag

SEQ ID NO: 110316 - DNA, 120 bp, Artificial Sequence
  ENSG00000100056_46 (sequence is synthesized)
atatcgaggtacgacctcggtgcggacgccggcgacttctgggcccatcctctgcttcaagctcctctcaggttccctctctcgggtgttgacactccgtctcctcgtggaagtggagga

SEQ ID NO: 110317 - DNA, 120 bp, Artificial Sequence
  ENSG00000100056_47 (sequence is synthesized)
aaagagaccgcagttgtgacagcatctcgagtgagtggacctgcgtcgccccaccacacgcacacagaaggaggagctgaaacggggattggcggaaggcctccagacggtcatccaaag

SEQ ID NO: 110318 - DNA, 120 bp, Artificial Sequence
  ENSG00000100060_0 (sequence is synthesized)
agcaggtggaggactggcggcggtcgagatcgtgctgccatggctcagcctctgggtccagagcctcagctcctacctcttccctccttgccagcccctgatgcctgccagacttttgcc

SEQ ID NO: 110319 - DNA, 120 bp, Artificial Sequence
  ENSG00000100060_1 (sequence is synthesized)
tctgctggagcccctgcctgaccagcttcccctccctgtctggttgggatttgggggctgagctgtctggggtcccagggccaaccaatgcagtgccggctcccgcggggcctggctgga

SEQ ID NO: 110320 - DNA, 120 bp, Artificial Sequence
  ENSG00000100060_2 (sequence is synthesized)
gccctcctcaccctcctgtgcatggggctcctgtgtctgcggtaccacttgaacctgtccccgcagcgggtacaagggacccccgagctgagccagccgaacccggggccccctaagcta

SEQ ID NO: 110321 - DNA, 120 bp, Artificial Sequence
  ENSG00000100060_3 (sequence is synthesized)
cagctacacgatgtcttcattgcagtgaagacgacccgggctttccaccgcttgcgcctggagctgctgcttgacacgtgggtttccaggaccagggaacagacatttgtcttcaccgac

SEQ ID NO: 110322 - DNA, 120 bp, Artificial Sequence
  ENSG00000100060_4 (sequence is synthesized)
agcccagacaaaggcctccaggagagactggggtcccaccttgtggtcaccaactgctccgcggaacacagccacccagctctgtcctgcaagatggctgctgagttcgacaccttcttg

SEQ ID NO: 110323 - DNA, 120 bp, Artificial Sequence
  ENSG00000100060_5 (sequence is synthesized)
gccagtgggcttaggtggttctgccatgtggacgatgacaactatgtgaacccaagggcgctgctgcagcttctgagagccttcccgctggcccgcgacgtctatgtgggaaggcccagc

SEQ ID NO: 110324 - DNA, 120 bp, Artificial Sequence
  ENSG00000100060_6 (sequence is synthesized)
ctgaaccggcccatccatgcctcagagccacagccccacaaccgcacgaggctggtacagttctggtttgccactgggggtgctggcttctgcatcaatcgcaaactggctttgaagatg

SEQ ID NO: 110325 - DNA, 120 bp, Artificial Sequence
  ENSG00000100060_7 (sequence is synthesized)
gctccgtgggccagtggctcccgtttcatggacacatctgctctcatccggctgcctgatgactgcaccatgggctatatcattgagtgcaagctgggcggccgcctgcagcccagcccc

SEQ ID NO: 110326 - DNA, 120 bp, Artificial Sequence
  ENSG00000100060_8 (sequence is synthesized)
ctgaggactgcacagctcccagaacaggtcaccctcagctacggtgtctttgaggggaaactcaacgtcattaagctacagggccccttctccccggaggaggacccctccagatttcgc

SEQ ID NO: 110327 - DNA, 120 bp, Artificial Sequence
  ENSG00000100060_9 (sequence is synthesized)
tccctccattgtctgctctatccagatacaccctggtgtccccagctgggtgcccgatgaatcctgaactgctgggcaaaggttgggcagagacttctgggtgtgccttggctcccaagg

SEQ ID NO: 110328 - DNA, 120 bp, Artificial Sequence
  ENSG00000100060_10 (sequence is synthesized)
tggcactgtgggtccctggcaagtgtcttgtgataggcagtccctggcagggccttcgggtggttggcaagcccaggatctgagtggcaattggcactgaaggcaccccaggcccctggg

SEQ ID NO: 110329 - DNA, 120 bp, Artificial Sequence
  ENSG00000100060_11 (sequence is synthesized)
aggtgagttagacagcccaggggaccaggtggaccaggtggtggccagagaggctccaggggctagactccctcaggaggctgaattgaaaaagggcagggggcacttgagctgggctgg

SEQ ID NO: 110330 - DNA, 120 bp, Artificial Sequence
  ENSG00000100060_12 (sequence is synthesized)
ggctcaggggtcctaaccctttaggcagtgacatggcctctgggtggggtctggccgttggccctggctaatgtctctcagtcattcccctggggctcaagcgctgggccgcccactcct

SEQ ID NO: 110331 - DNA, 120 bp, Artificial Sequence
  ENSG00000100060_13 (sequence is synthesized)
gcctccctcatctgtgtcccgagttcctgaagggacatgggtggaatgatggcagaatccagggtctgcagcacctgctgttgttgccaaccagtctcccaaagctccttgctccccacc

SEQ ID NO: 110332 - DNA, 120 bp, Artificial Sequence
  ENSG00000100060_14 (sequence is synthesized)
ccttgcgaacaggaccagattttgtttggagcctcagcatgccggggcccagatgatggagcataacgggtcccagccaattgtgatgatcctttttgctcatttcccagcctttcttgc

SEQ ID NO: 110333 - DNA, 120 bp, Artificial Sequence
  ENSG00000100060_15 (sequence is synthesized)
tgttaggggctaccatgggaccagctctggccagagggaactaagcaaatccaatagagatgtttctggggaaggttttgcagcccactccccatcttcctgctataaatgtgggtgtga

SEQ ID NO: 110334 - DNA, 120 bp, Artificial Sequence
  ENSG00000100060_16 (sequence is synthesized)
tggctggatctggggcagccaccttgctaccatgaaggaaaggccaagacaatcatccacagctattccctccagcatctggttctgtacaaaaattaaatgcttatttgtttaagtctc

SEQ ID NO: 110335 - DNA, 120 bp, Artificial Sequence
  ENSG00000100060_17 (sequence is synthesized)
gagggtgagatgctgcccaggtgtgtggctgtggttgggtccctgtggtgctgctctggaaagggggtgagtgtatgtgtttagactgtgggctgtgtacaccctgaagttgtgtgtcta

SEQ ID NO: 110336 - DNA, 120 bp, Artificial Sequence
  ENSG00000100060_18 (sequence is synthesized)
ggagtacagagtccatctggggcctggtggtggtgggctgtggattggtctggggtgtcccttgggccgatgtgagtcctgaccccttcttctccttcctagacatttgtcttcaccgac

SEQ ID NO: 110337 - DNA, 120 bp, Artificial Sequence
  ENSG00000100060_19 (sequence is synthesized)
tttcctgtcttatctccatcaccgcggtggtgcccttgccccggatgaggaaactgaggccagagagaggaagtgctggctggcgtggtgtcacgcagaaggcctgaggggacagagccc

SEQ ID NO: 110338 - DNA, 120 bp, Artificial Sequence
  ENSG00000100060_20 (sequence is synthesized)
agtgggacctagaaccttgctcctggttgggtgcttttctcccctgctgagacttgggaacccttttccccatctgcacggggcaggagtgtctggaccgggcctgagctggttaactgc

SEQ ID NO: 110339 - DNA, 120 bp, Artificial Sequence
  ENSG00000100060_21 (sequence is synthesized)
taagggcatggcagtgctcttccagctgtgaagtgccttggggcgtggggtgggctcccaccaccagcggggaatttcaggttcccgggcagctttccctgcagcttaaaacccctcctc

SEQ ID NO: 110340 - DNA, 120 bp, Artificial Sequence
  ENSG00000100060_22 (sequence is synthesized)
gaacagatgacaacgcctgcctcgtgaggtttgagggtcgttgcgggcaagtgcatgtccaatctgggagagccggactgggttgtgaggcagcatttccgagatggcttgcacaggggg

SEQ ID NO: 110341 - DNA, 120 bp, Artificial Sequence
  ENSG00000100065_0 (sequence is synthesized)
gagtgcggacccgggagcccgaggcgactgtagcgtgcggggtgagtcgcggggagctcggggcgcgcccccgacggcgggtctgcggacgacgccccgggggtgcttggccgcacatct

SEQ ID NO: 110342 - DNA, 120 bp, Artificial Sequence
  ENSG00000100065_1 (sequence is synthesized)
acgacgccccgggggtgcttggccgcacatctagccctagggagccctggtcgacccccgtgcgcctcttgcccgcagaccctgaggacacggccatgccgggccgggcggaggcggggg

SEQ ID NO: 110343 - DNA, 120 bp, Artificial Sequence
  ENSG00000100065_2 (sequence is synthesized)
aggccgaggaggaggccggggccggctcggggtctgaggcggaggaggacgcgctgtgggagcgaatcgagggcgtccggcatcggctggctcgcgccctgaacccggccaagctcacgc

SEQ ID NO: 110344 - DNA, 120 bp, Artificial Sequence
  ENSG00000100065_3 (sequence is synthesized)
cgtatctgcgccagtgccgggtcatcgacgagcaggacgaggaggaggtgctgagcacctaccgcttcccgtgccgcgtcaaccgcaccgggcgcctgatggacatcttgcgctgccgtg

SEQ ID NO: 110345 - DNA, 120 bp, Artificial Sequence
  ENSG00000100065_4 (sequence is synthesized)
gcaagaggggctatgaggccttcctggaagccctggagttctactaccccgaacacttcacgctgctcacgggccaggaacccgcccagcgctgctccatgatcctcgatgaggaggggc

SEQ ID NO: 110346 - DNA, 120 bp, Artificial Sequence
  ENSG00000100065_5 (sequence is synthesized)
ctgagggcctgacccaattcttgatgacagaggtgcgacggctgcgggaagctcgcaagagccagctgcagcgggagcagcaactgcaggcccggggccgggtgctcgaggaggagcggg

SEQ ID NO: 110347 - DNA, 120 bp, Artificial Sequence
  ENSG00000100065_6 (sequence is synthesized)
cagggctggagcagcggctgcgggaccagcagcaggctcaggagcgctgtcaacggctgcgggaggactgggaggcgggcagcctggagctgctgcggctcaaggatgagaactacatga

SEQ ID NO: 110348 - DNA, 120 bp, Artificial Sequence
  ENSG00000100065_7 (sequence is synthesized)
tcgccatgcgcctggcacagctcagtgaggagaagaactcggctgtacttcgcagccgtgacctgcagctggcggtggatcagctcaagctcaaagtgagtcggctggaggaagagtgtg

SEQ ID NO: 110349 - DNA, 86 bp, Artificial Sequence
  ENSG00000100065_8 (sequence is synthesized)
ccagacaatgtggaccttgtctctgagctgcgtgctgagaaccagcggctgacggcgtcactgcgggagttgcaggagggcctgca

SEQ ID NO: 110350 - DNA, 120 bp, Artificial Sequence
  ENSG00000100065_9 (sequence is synthesized)
ggctgacggcgtcactgcgggagttgcaggagggcctgcagcaggaggcgagccggccgggggccccgggctccgagcgcatcctgctggacatcctagagcatgactggcgggaggcgc

SEQ ID NO: 110351 - DNA, 120 bp, Artificial Sequence
  ENSG00000100065_10 (sequence is synthesized)
aggacagcaggcaggagctgtgccagaagctgcatgccgtgcagggggagctgcagtgggccgaggagctgcgcgaccagtacctgcaggagatggaagacctgcggctcaagcaccgca

SEQ ID NO: 110352 - DNA, 120 bp, Artificial Sequence
  ENSG00000100065_11 (sequence is synthesized)
cgctgcagaaggactgtgacctgtacaagcaccgcatggccactgtcctggcccaactggaggagattgagaaggagcgagaccaggccatccagagccgtgaccggatccagttgcagt

SEQ ID NO: 110353 - DNA, 120 bp, Artificial Sequence
  ENSG00000100065_12 (sequence is synthesized)
actcacagagcctcatcgagaaggaccagtaccgcaagcaggtgcggggcctggaggcggagcgggatgagctgctgacaacgctcaccagcctggagggcaccaaggctctgctggagg

SEQ ID NO: 110354 - DNA, 120 bp, Artificial Sequence
  ENSG00000100065_13 (sequence is synthesized)
ttcagctgcagcgggcccagggtggcacctgcctcaaggcctgtgcctcctcccattccctgtgctccaacctcagcagcacttggagcctgagcgagttcccctcccctctgggaggcc

SEQ ID NO: 110355 - DNA, 120 bp, Artificial Sequence
  ENSG00000100065_14 (sequence is synthesized)
cagaagcaactggggaggcagctgtcatggggggacctgagcctcacaactcggaggaagccacagacagtgaaaaggagatcaatcggctctccatcctgcccttcccccccagtgccg

SEQ ID NO: 110356 - DNA, 120 bp, Artificial Sequence
  ENSG00000100065_15 (sequence is synthesized)
gctccatcctccgccggcagcgtgaggaagaccccgcaccccctaagagatccttcagcagcatgtcagacatcacagggagtgtgacacttaagccctggtcccctggcctctcttcgt

SEQ ID NO: 110357 - DNA, 120 bp, Artificial Sequence
  ENSG00000100065_16 (sequence is synthesized)
cctcatcctctgacagcgtgtggcctttgggaaagccggaaggcctcctggctcggggctgtggcctggacttcctcaacaggtctctggctattcgggtgtctggccggagccccccag

SEQ ID NO: 110358 - DNA, 120 bp, Artificial Sequence
  ENSG00000100065_17 (sequence is synthesized)
tggactgtcgttttatggggacagatggtctggggctgtggtgcgcagggtgctgtctgggcctgggtccgccaggatggaaccaagagagcaaagggtggaagctgctggtctggaggg

SEQ ID NO: 110359 - DNA, 120 bp, Artificial Sequence
  ENSG00000100065_18 (sequence is synthesized)
ggcgtgcctggaagccgaggcccagcagagaaccttgctctggaatcaggggtccacactcccctccctgatggactcgaaggcctgccagtccttccacgaggccctagaagcctgggc

SEQ ID NO: 110360 - DNA, 120 bp, Artificial Sequence
  ENSG00000100065_19 (sequence is synthesized)
aaagggaccaggtgccgagcccttctacattcgtgccaacctcaccttgcctgagagggcagatccccatgccctttgcgtgaaagcccaagagatccttcgactggtggactcggcata

SEQ ID NO: 110361 - DNA, 120 bp, Artificial Sequence
  ENSG00000100065_20 (sequence is synthesized)
caagcggaggcaggaatggttctgcacccgggttgaccccctcactctgcgggacctggaccggggcaccgtgcccaattatcagagagcccagcagctcctagaagttcaggagaaatg

SEQ ID NO: 110362 - DNA, 120 bp, Artificial Sequence
  ENSG00000100065_21 (sequence is synthesized)
cctgccctccagccggcaccgaggcccccgcagtaatctgaagaagagagccctggaccagctgcggctggtgaggcccaagcccgtgggggcgcctgcaggggactccccggatcagct

SEQ ID NO: 110363 - DNA, 120 bp, Artificial Sequence
  ENSG00000100065_22 (sequence is synthesized)
gctgctggagccctgtgcagagccggagcggagcctcagaccctacagtttggtgcggccgctactggtgtctgccctgcggcccgtggtgctgttgcctgagtgcctggcgccccggct

SEQ ID NO: 110364 - DNA, 120 bp, Artificial Sequence
  ENSG00000100065_23 (sequence is synthesized)
catccgtaacctgctagacctgcccagctcccggctggacttccaagtgtgcccagcggaaagcctctctggggaggaactgtgcccatcctcagcgcctggagcccccaaggctcagcc

SEQ ID NO: 110365 - DNA, 120 bp, Artificial Sequence
  ENSG00000100065_24 (sequence is synthesized)
tgccacccctgggctaggcagcaggatccgggccatccaggagtctgttgggaagaagcactgcctgctggagctgggtgctcggggtgtgcgggagctggtgcagaacgagatctaccc

SEQ ID NO: 110366 - DNA, 120 bp, Artificial Sequence
  ENSG00000100065_25 (sequence is synthesized)
catcgtcatccacgtggaggtgactgagaagaatgtccgggaagtcaggggtctgctgggccggccgggctggcgggactcagagctgctgcggcagtgccgtggctcagagcaggtgct

SEQ ID NO: 110367 - DNA, 120 bp, Artificial Sequence
  ENSG00000100065_26 (sequence is synthesized)
ctgggggctgccctgctcctgggtgcaggtgcccgcccatgagtggggacacgcagaggagctggccaaggtggtgcgcggccgcatcctgcaggagcaggcccgcctcgtgtgggtgga

SEQ ID NO: 110368 - DNA, 120 bp, Artificial Sequence
  ENSG00000100065_27 (sequence is synthesized)
gtgcggcagcagcagaggctgccccagcagcagtgaggcctgaggctcatctgatacctgcaccttctccccaagccagcgtggaccctggtgtctatggtgaagctgggccctcccacc

SEQ ID NO: 110369 - DNA, 120 bp, Artificial Sequence
  ENSG00000100065_28 (sequence is synthesized)
ctgagccttcctagacccttggactctcagatgcagggcccttggctctggcctctcacccccaaggctgtctctggccctgccgagcctatgggagtcccgggacagagtgcccactcc

SEQ ID NO: 110370 - DNA, 120 bp, Artificial Sequence
  ENSG00000100065_29 (sequence is synthesized)
cctctacttgctgctctgggcctccccacctttcctggggtctccacattcccactagtgggtcttatgtgtgtctgtgtcttctccttaaacactcgccctggagtctgttctcacacc

SEQ ID NO: 110371 - DNA, 120 bp, Artificial Sequence
  ENSG00000100065_30 (sequence is synthesized)
tgtgcgcaggtttgcacactcaagttctcatgggcaggctcaggtctgtcccgctgccctgggcacgaggtctcctgaggacctgggcctgttctgctcctaggagacctgagcccgtta

SEQ ID NO: 110372 - DNA, 120 bp, Artificial Sequence
  ENSG00000100065_31 (sequence is synthesized)
ccgcgtgactcccaccatccagctcgcgctcctcgtggattcagccatgcatggactggggtgttccctggcccatggtcacctgtgcccctcgtgtctcctcacatgggtgtctgtggt

SEQ ID NO: 110373 - DNA, 120 bp, Artificial Sequence
  ENSG00000100065_32 (sequence is synthesized)
tctctcctgtgtaaatgtcacgccccacccctgtttcatgtgggcactaacacgtgtgcgttcctggcgggcacactcaggaccgtgcctcacagggcccactccctgcctatgcctccc

SEQ ID NO: 110374 - DNA, 120 bp, Artificial Sequence
  ENSG00000100065_33 (sequence is synthesized)
tcttggggggccgaggagggcggctgctctgtcatgagaatgtacggcccgtggatgattaacgggcctttttcacttagaagctgcacattatggagcattaaacacttttgtcataga

SEQ ID NO: 110375 - DNA, 80 bp, Artificial Sequence
  ENSG00000100065_34 (sequence is synthesized)
cacgggcaccgcccccctgcgccggcggagccgccgcccgagtgcggacccgggagcccgaggcgactgtagcgtgcggg

SEQ ID NO: 110376 - DNA, 120 bp, Artificial Sequence
  ENSG00000100065_35 (sequence is synthesized)
tagacaagcctggggaggactcctgcttcggcttctctgggaatctgggaggcacccaggagtgagggagcaggtcttcccacccctgtaacccgtggctcccagtgtgtctccctctgg

SEQ ID NO: 110377 - DNA, 120 bp, Artificial Sequence
  ENSG00000100065_36 (sequence is synthesized)
gcacttggctggggtgtgggtctgggggcaagatcttgggcccagggtctacctgtatgggccaggctcagccccttgaagacccctagtcatgggggtgggagtaggtcttgggaatgg

SEQ ID NO: 110378 - DNA, 120 bp, Artificial Sequence
  ENSG00000100065_37 (sequence is synthesized)
gaactgaatccaagtactgattggactccaattctcatctcctttctcccttctcaggtctctggctattcgggtgtctggccggagccccccagggggcccagagccgcaggacaaggg

SEQ ID NO: 110379 - DNA, 120 bp, Artificial Sequence
  ENSG00000100065_38 (sequence is synthesized)
agcagtgcaggccgcacggcacgcaggaggctctctccagccatgttgctcgaggctgcacagtgggttctgaccgtggagtttgaagcctccctaccccaggagccttgggccgtggct

SEQ ID NO: 110380 - DNA, 120 bp, Artificial Sequence
  ENSG00000100065_39 (sequence is synthesized)
acagcattgcaggtggctgtgaggctgtagatgtgggtgcactggtgtgccagtcctcggtttgtgcacgccaggtggatcagctcaagctcaaagtgagtcggctggaggaagagtgtg

SEQ ID NO: 110381 - DNA, 120 bp, Artificial Sequence
  ENSG00000100065_40 (sequence is synthesized)
tttctaccaaggtcacattgctaattcattggaagagaccctaaagtttgcctcgtatgtgacatttggttcctcttggtctctgggcctcagtctccccatctgtagcttggggggtat

SEQ ID NO: 110382 - DNA, 120 bp, Artificial Sequence
  ENSG00000100065_41 (sequence is synthesized)
acctaaggctcctccaccaggctcagacgggctggcttcccgggggccacagggatggctgctctcatctgcctgggggactgtgctgggctggggaggggcaggggagggcctggtgga

SEQ ID NO: 110383 - DNA, 120 bp, Artificial Sequence
  ENSG00000100065_42 (sequence is synthesized)
gaaggacatctttgctgacccaggctcttctggcaagcctggaccacagtggcagtggggcccgctgtgccaggggtcccgtttcctcctctccctgagggggcggggctgagctctcag

SEQ ID NO: 110384 - DNA, 120 bp, Artificial Sequence
  ENSG00000100065_43 (sequence is synthesized)
agaaagacctggatgagctgggcgggttggggagtcctgtggatgggggcgtcctgtggatggggacgggtctgactgggctgggcatggcagtttctgagggggcgctatctgaactgt

SEQ ID NO: 110385 - DNA, 120 bp, Artificial Sequence
  ENSG00000100065_44 (sequence is synthesized)
gaggcatgaaacacccccacacctggtcttcctccagcccctgggctgctctactctcagaggctcacttctttccctccctgcctgggttttctcccagcaaagggtggaagctgctgg

SEQ ID NO: 110386 - DNA, 120 bp, Artificial Sequence
  ENSG00000100065_45 (sequence is synthesized)
agtgcactcatagtccagcaaactggccatgcacgtctgctcccagcttggtggtcacaccacagctgcccaccccccataccaggccaacttctggctgcacactccgaactggtgatt

SEQ ID NO: 110387 - DNA, 120 bp, Artificial Sequence
  ENSG00000100065_46 (sequence is synthesized)
ggttaggggcatgggattttgtttgaagctgtgaagacagccacggtcacactgtggcagctctgtagcccttcatagtttagaggcctctgcccacttgctgtcttgtttgattcttgc

SEQ ID NO: 110388 - DNA, 120 bp, Artificial Sequence
  ENSG00000100065_47 (sequence is synthesized)
aacacctttgggaggcaaatgatggggccaggggattgactgggcccattttactgatgaggaaactgaggcccagaggaggtggatcagctcaagctcaaagtgagtcggctggaggaa

SEQ ID NO: 110389 - DNA, 120 bp, Artificial Sequence
  ENSG00000100068_0 (sequence is synthesized)
tacatgtactgggcagattggggtgagacgccctggatcgagcaggtggggatggacgacagcacccagaagatcattgtggacttggacatttactggcccaatagactgaccatcgac

SEQ ID NO: 110390 - DNA, 120 bp, Artificial Sequence
  ENSG00000100068_1 (sequence is synthesized)
ctgggggagaagaagctctactgggctgacactaagctcggcttcatccaccgtgccaacctggacggctcgttccggcagaaggtggtgaagggcagcctgacgcaccccttcaccctg

SEQ ID NO: 110391 - DNA, 120 bp, Artificial Sequence
  ENSG00000100068_2 (sequence is synthesized)
acactctccggggacactctgcactggatggactggctgacgtgctccatccatgcctgcaacaggaacactgcggggaagaggaacgagatcttgagcgccctctactcagcatggata

SEQ ID NO: 110392 - DNA, 120 bp, Artificial Sequence
  ENSG00000100068_3 (sequence is synthesized)
tccaggtgctgagccaggagcagcagcctttctgagccaaggaggtcctgctgctggcccggtagacggaccaatggagggtctcgctggacacaccggacttcaccgacatcgtgctgc

SEQ ID NO: 110393 - DNA, 120 bp, Artificial Sequence
  ENSG00000100068_4 (sequence is synthesized)
agctggacgacatccagcatgccatcgccatcaactatgacccaatggagggccacgtctactggacggatgacgaggtgtgggccatccgcagggcatacctggatgggtctggggcgc

SEQ ID NO: 110394 - DNA, 120 bp, Artificial Sequence
  ENSG00000100068_5 (sequence is synthesized)
agacgctgatcaacaccaagatcaacgaccccgatgacatcgcagtcaactgggtggcccgaagcctctattggacccacacaggcactgaacacatcgaggtgacgtgcctcaacagca

SEQ ID NO: 110395 - DNA, 120 bp, Artificial Sequence
  ENSG00000100068_6 (sequence is synthesized)
cctgaaatcaagcgtgccaacctggacaggcaggagctgcgcgtgctggtcaatgcttccctcgggtggcccaacggcctggccctggacctgcaggaagggaagctctactggggagat

SEQ ID NO: 110396 - DNA, 120 bp, Artificial Sequence
  ENSG00000100068_7 (sequence is synthesized)
gccaagacagacaagatcgaggcgatcagtgtcgatgagacgaagaggcagaccctcctgaaggacaagctcccacacattttcaggttcaccctgctgggggacttcatctactggacc

SEQ ID NO: 110397 - DNA, 120 bp, Artificial Sequence
  ENSG00000100068_8 (sequence is synthesized)
gcctggcagcaccacagcatcaagcgggtacacaaggtcaaggccaaccgggacgtcatcattgaccagctgcccgacctgatggggctcaaagctgtgaacgtggacaaggtcgtcgga

SEQ ID NO: 110398 - DNA, 120 bp, Artificial Sequence
  ENSG00000100068_9 (sequence is synthesized)
accaaccctcatgcggacaggaatgggggtgcagccacctgtgcttcttcacgccccacacaacccggtttggctgccccatctagggcctggaactgctgagtgacatgaagacctgca

SEQ ID NO: 110399 - DNA, 120 bp, Artificial Sequence
  ENSG00000100068_10 (sequence is synthesized)
tcatgcccaaggccttcttggtcttcaccagtagagccgccatccacaggatctccctcgagaccaacaacaacgatgtggccatcctgctctcggcgtcaaggaggcctcggccctgga

SEQ ID NO: 110400 - DNA, 120 bp, Artificial Sequence
  ENSG00000100068_11 (sequence is synthesized)
ctttgatgtgtccagcaaccacatctactggacagacatcagcctgaaggtagcgtgggcccgaacatgcacacgtgcagcctatatgggaaaaccttccctctgtacctgcctcaaagg

SEQ ID NO: 110401 - DNA, 120 bp, Artificial Sequence
  ENSG00000100068_12 (sequence is synthesized)
tttcagacatttttcttaaagcactataatatttattgtaacacaattcaagctaattaaatatgagcaagcctatttcaaaaaaaatagacgattataatgagcaaatccggtagacac

SEQ ID NO: 110402 - DNA, 120 bp, Artificial Sequence
  ENSG00000100068_13 (sequence is synthesized)
gcctagagggagaaaacttgttgaaattcagagatccccctccccctaccaatacacaccaaatcagacgcctctgaccagatctgaatttggctctcagagatttccattgtagccagg

SEQ ID NO: 110403 - DNA, 120 bp, Artificial Sequence
  ENSG00000100068_14 (sequence is synthesized)
cagttggggcactttctgagtgctgcctccacctcactgtccccagcctgcctgcctccgtttccctagccctgggcctgtgccgctgtcaccatcacctgggcgccctctagtggatga

SEQ ID NO: 110404 - DNA, 120 bp, Artificial Sequence
  ENSG00000100068_15 (sequence is synthesized)
atcggattatgcacgagggggcttggagcaggattcagaaggggctcctgtccttccttgaaatgctggacgccgggatcctggaacagctcttcaggtctctgcattcctcctggcaac

SEQ ID NO: 110405 - DNA, 120 bp, Artificial Sequence
  ENSG00000100068_16 (sequence is synthesized)
agccagagcctgggcgcagggggctactgttgtttgaaggctgaaggctgcagcctggtagggcactcaggagacctggcagttggctgcagggccaggtctaggggccagggcatgagg

SEQ ID NO: 110406 - DNA, 120 bp, Artificial Sequence
  ENSG00000100068_17 (sequence is synthesized)
gatgctctgggctggctcagccccgggcccccatgcggattgtgactgtgggggcatggccacatgatgttgaggggggatctctgaccctgaccttcttggctctgtgcatccttgaaa

SEQ ID NO: 110407 - DNA, 120 bp, Artificial Sequence
  ENSG00000100068_18 (sequence is synthesized)
ccagaaaggtctggaacaaatcagtgaacaatgccctaactcggggagggagccacatcctgaccccagcagcctcagaaggatccgtgtcagggttatggggcaccctgggggccccga

SEQ ID NO: 110408 - DNA, 120 bp, Artificial Sequence
  ENSG00000100068_19 (sequence is synthesized)
gtctgcatgggtctccacatgcaacttctgccggaaactctgaaaaatcccaactggggggtcataggacacaatcagaaatgctgatgccactgtgtgtggatccccgggccctggggg

SEQ ID NO: 110409 - DNA, 120 bp, Artificial Sequence
  ENSG00000100068_20 (sequence is synthesized)
gtcaggagcatgtagaaggtgggccacagggggttcataagagaatcctgtaaccgcccctgccccccaaacttagaagcccactggagggccatgggtgaaagcttgggggggtgtcct

SEQ ID NO: 110410 - DNA, 120 bp, Artificial Sequence
  ENSG00000100068_21 (sequence is synthesized)
gtggagtgggtggtggggggtctttgggtttacatgctgctgggcctgagcagcaggaccccgtccacagctgatccctgggccctgctgctcagctgctctcttgagtgttgctgtggc

SEQ ID NO: 110411 - DNA, 120 bp, Artificial Sequence
  ENSG00000100068_22 (sequence is synthesized)
tgccgagagagcctgagtcgagcctctcttgtgccggccgtacgctgtcaggccacgctggtgagtttggcaaggcacagatgcccagagcagagaactttccttggggatttaatatgt

SEQ ID NO: 110412 - DNA, 120 bp, Artificial Sequence
  ENSG00000100068_23 (sequence is synthesized)
gcgaatcttgaggtccggcaaatctttccctcagctagagagggggtttttgagactagaatcacctcagcatcctcctgtccccagctgtgtccagcctgtctgcagggacatcctgag

SEQ ID NO: 110413 - DNA, 120 bp, Artificial Sequence
  ENSG00000100068_24 (sequence is synthesized)
aggactaggctctcccctcatccacctgcgtaagtgccaccctgaagcctgtccacccatgcttggagaggcttggcctcaacctgcttagccagcagcaggcttgggcctggggtgcag

SEQ ID NO: 110414 - DNA, 120 bp, Artificial Sequence
  ENSG00000100068_25 (sequence is synthesized)
cagagacccaggtggctgtggggtggttgcttcatggggtggttctgaaacgcagttggaagtgcatggacagtgccttacctgttctctgtgggaccctgtttagaaaccaggtctgag

SEQ ID NO: 110415 - DNA, 120 bp, Artificial Sequence
  ENSG00000100068_26 (sequence is synthesized)
ttactgggggtcatcgctacattctgatggcctagctgtgtggaggccacggtggagccccatccaaggagccagggccctgggtctagccgtgaccagaacgcatgccctggaggtgtt

SEQ ID NO: 110416 - DNA, 120 bp, Artificial Sequence
  ENSG00000100068_27 (sequence is synthesized)
tctcatcttgcacctgtgttgcctggtgtctcaagtggccacaaaactgtgttagctcttggtgcccctgggcttcggaaccagggtttcccttcatctcagtgacccgggagcatctgg

SEQ ID NO: 110417 - DNA, 120 bp, Artificial Sequence
  ENSG00000100068_28 (sequence is synthesized)
agtgagtaaagagggtgatttacttgatgggtacgtttggtcctgcctgggagcccccccaggcacggtcctgggacctgaagctgccctcgttggtggaggggagggagagagcttcag

SEQ ID NO: 110418 - DNA, 120 bp, Artificial Sequence
  ENSG00000100068_29 (sequence is synthesized)
ggatgaggtggcgttgagctgggcgggaagggtgagcccctgcaaggtggggtgggtgtgctggggacgctgagcagcacggccagcaggtgggtcttcagctcggtacccggtgggact

SEQ ID NO: 110419 - DNA, 120 bp, Artificial Sequence
  ENSG00000100068_30 (sequence is synthesized)
tgtggttggggctggtgtgtggccaggagaggggctggcagaagacaagggggactgtgaggcagctcccatccagcggttgaagcctgatggcctggctctgtgcctcagttctctcat

SEQ ID NO: 110420 - DNA, 120 bp, Artificial Sequence
  ENSG00000100068_31 (sequence is synthesized)
ctataaaatgagaaaacagtgccagcctcccagacctgtcatgaggatgaacgagtgaccacgtagcatgggctgggtgcgtgtcacctaacattaccagcctttgcaaggagagccctg

SEQ ID NO: 110421 - DNA, 120 bp, Artificial Sequence
  ENSG00000100068_32 (sequence is synthesized)
agacgaagatgcagggacacgcgcgaggagccgccgcagccgccgccgccgcgctgtggagcccgagtgagcgcggcgccagcccgtccggccgctggacaacatggaggctgcactgcc

SEQ ID NO: 110422 - DNA, 120 bp, Artificial Sequence
  ENSG00000100068_33 (sequence is synthesized)
gctgctcccacctgtgtctgctgtccctaagggaggctttctacatgtgcgcctgccccatgggtgtgcagctgcaggacaacggcagggcatgtgaggccagagccaaggaggtcctgc

SEQ ID NO: 110423 - DNA, 120 bp, Artificial Sequence
  ENSG00000100068_34 (sequence is synthesized)
gagactagaatcacctcagcatcctcctgtccccagctgtgtccagcctgtctgcagggacatcctgagaggactaggctctcccctcatccacctgcgagccaaggaggtcctgctgct

SEQ ID NO: 110424 - DNA, 120 bp, Artificial Sequence
  ENSG00000100068_35 (sequence is synthesized)
ggctggtgcagtgaagcctgcacagggtggaagtgggcaccactgtcccaggggagcccccagggactctggtcactgggcttgtggctggcatgctcagtcctccagcacttactgaca

SEQ ID NO: 110425 - DNA, 120 bp, Artificial Sequence
  ENSG00000100068_36 (sequence is synthesized)
ccagcatctaccaacaccaacatttacaaacactgacattgaccaacactgacaattactgacaccgacatttaccaacactgatattgaccgacgccgacatttacctacaccagcatt

SEQ ID NO: 110426 - DNA, 120 bp, Artificial Sequence
  ENSG00000100068_37 (sequence is synthesized)
ccgatatttactgaccccaacatttagccatgtgatgggggccggctcggggacgggccttgctcttagcagtgggggtgccacagaaactagacagatgcatggggtcatggacttctg

SEQ ID NO: 110427 - DNA, 80 bp, Artificial Sequence
  ENSG00000100075_0 (sequence is synthesized)
gagcgcggagttctggagtctcggacccgaagccgccacagggcgccccgcctcccgcccgccatgcccgcgccccgcgc

SEQ ID NO: 110428 - DNA, 120 bp, Artificial Sequence
  ENSG00000100075_1 (sequence is synthesized)
gccaagctgacgcacccggggaaggcgatcctggcaggcggcctggcgggtggcatcgagatctgcatcaccttccccaccgagtacgtgaagacgcagctgcagctggacgagcgctcg

SEQ ID NO: 110429 - DNA, 120 bp, Artificial Sequence
  ENSG00000100075_2 (sequence is synthesized)
cacccgccgcggtaccggggcatcggggactgcgtgcggcagacggttcgcagccatggcgtcctgggcctgtaccgcggccttagctccctgctctacggttccatccccaaggcggcc

SEQ ID NO: 110430 - DNA, 120 bp, Artificial Sequence
  ENSG00000100075_3 (sequence is synthesized)
gtcaggtttggaatgttcgagttcctcagcaaccacatgcgggatgcccagggacggctggacagcacgcgtgggctgctgtgcggcctgggcgctggcgtggccgaggccgtggtggtc

SEQ ID NO: 110431 - DNA, 120 bp, Artificial Sequence
  ENSG00000100075_4 (sequence is synthesized)
gtgtgccccatggagaccatcaaggtgaagttcatccacgaccagacctccccaaaccccaagtacagaggattcttccacggggttagggagattgtgcgggaacaagggctgaagggg

SEQ ID NO: 110432 - DNA, 120 bp, Artificial Sequence
  ENSG00000100075_5 (sequence is synthesized)
acgtaccagggcctcacagccactgtcctgaagcagggctcgaaccaggccatccgcttcttcgtcatgacctccctgcgcaactggtaccgaggggacaaccccaacaagcccatgaac

SEQ ID NO: 110433 - DNA, 120 bp, Artificial Sequence
  ENSG00000100075_6 (sequence is synthesized)
taccggaacacgtgggactgcggcttgcagatcctgaagaaggaggggctcaaggcattctacaagggcactgtcccccgcctgggccgggtctgcctggatgtggccatagtgtttgtc

SEQ ID NO: 110434 - DNA, 120 bp, Artificial Sequence
  ENSG00000100075_7 (sequence is synthesized)
atctatgatgaagtggtgaagctgctcaacaaagtgtggaagacggactaagcctagagaggccgcaaggggaccgccccaggcaccgccagagtgtcctgctacctttgtctcacgatt

SEQ ID NO: 110435 - DNA, 120 bp, Artificial Sequence
  ENSG00000100075_8 (sequence is synthesized)
ccagtgcagtagtgccaaaaggccccttcccacgtccctcgagctctgtagcctggtctgtgcattgtggctgtcaaatccatgtgtcccccctgtggtctgtgtgtgacaccaccactg

SEQ ID NO: 110436 - DNA, 120 bp, Artificial Sequence
  ENSG00000100075_9 (sequence is synthesized)
tgtcccagtgtctggcccagccatggctggatgtgcatctggcctatgaccctgtgcctgtgtttcatgttctgtgtcacgtgaccctgtgccccgcctcccggggtgcccgtgtggcct

SEQ ID NO: 110437 - DNA, 120 bp, Artificial Sequence
  ENSG00000100075_10 (sequence is synthesized)
gggtcctcggccctgtagccctggcccggtcccagtccggtgccttccaccctgccctggcctaccacagctgcctccgggcctcggcctggcttcaccgcattccaggggctgcagccc

SEQ ID NO: 110438 - DNA, 120 bp, Artificial Sequence
  ENSG00000100075_11 (sequence is synthesized)
cctgcttctcccgccattggccttaactggccctcgggccctctctccgccccggacagggtggcacccaccactctcaggaccaccctgccaaggcagaataaaccggatcctgttgca

SEQ ID NO: 110439 - DNA, 80 bp, Artificial Sequence
  ENSG00000100075_12 (sequence is synthesized)
gtggggtcctgaccgccccctcccccaggggactgcgtgcggcagacggttcgcagccatggcgtcctgggcctgtaccg

SEQ ID NO: 110440 - DNA, 120 bp, Artificial Sequence
  ENSG00000100075_13 (sequence is synthesized)
ccccacttccgggttgggccgtgggctggggagtcgtggaggcgcggtcctggtccccacccggcgcgctgggactcgcccgcctcccgtctgtcaccccctgcgcctcgccgggacaac

SEQ ID NO: 110441 - DNA, 120 bp, Artificial Sequence
  ENSG00000100075_14 (sequence is synthesized)
ggaggcgcggtcctggtccccacccggcgcgctgggactcgcccgcctcccgtctgtcaccccctgcgcctcgccgggacaacggggtgagggcatgggggcgtggggccccagcctatg

SEQ ID NO: 110442 - DNA, 120 bp, Artificial Sequence
  ENSG00000100075_15 (sequence is synthesized)
gcggccgcgccgaccgaagtccgggacgggggaggggcccgagcgccagcggccgggcgggagtctcaggagcgggttcccggtccctgcaggcggcctggcgggtggcatcgagatctg

SEQ ID NO: 110443 - DNA, 120 bp, Artificial Sequence
  ENSG00000100077_0 (sequence is synthesized)
acttggtcgggaggcgccggcccagcgaggccgctgggactgtgcactgaggggcgctgaccgttggacgcgcgctccccgcagaccctcgctgaaggagcagggggcggcgcgcgtgcg

SEQ ID NO: 110444 - DNA, 80 bp, Artificial Sequence
  ENSG00000100077_1 (sequence is synthesized)
ggagcggggaggcgtgctgcgaccccggccggctacagcctgcggcgcgcgcagagcgctagtggggcgcgcggcgcgcg

SEQ ID NO: 110445 - DNA, 80 bp, Artificial Sequence
  ENSG00000100077_2 (sequence is synthesized)
gcggcgggcggcggcggcgggcgcgcgtcccgtccaggtccggagtaaccgccgccgccgccgccaaagctcgccaacat

SEQ ID NO: 110446 - DNA, 120 bp, Artificial Sequence
  ENSG00000100077_3 (sequence is synthesized)
gccaacatggcggacctggaggctgtgctggccgatgtcagttacctgatggccatggagaagagcaaggcgaccccggccgcccgcgccagcaagaggatcgtcctgccggagcccagt

SEQ ID NO: 110447 - DNA, 120 bp, Artificial Sequence
  ENSG00000100077_4 (sequence is synthesized)
atccggagtgtgatgcagaagtaccttgcagagagaaatgaaataacctttgacaagattttcaatcagaaaattggtttcttgctatttaaagatttttgtttgaatgaaattaatgaa

SEQ ID NO: 110448 - DNA, 120 bp, Artificial Sequence
  ENSG00000100077_5 (sequence is synthesized)
gctgtacctcaggtgaagttttatgaagagataaaggaatatgaaaaacttgataatgaggaagaccgcctttgcagaagtcgacaaatttatgatgcctacatcatgaaggaacttctt

SEQ ID NO: 110449 - DNA, 120 bp, Artificial Sequence
  ENSG00000100077_6 (sequence is synthesized)
tcctgttcacatcctttctcaaagcaagctgtagaacacgtacaaagtcatttatccaagaaacaagtgacatcaactctttttcagccatacatagaagaaatttgtgaaagccttcga

SEQ ID NO: 110450 - DNA, 120 bp, Artificial Sequence
  ENSG00000100077_7 (sequence is synthesized)
ggtgacatttttcaaaaatttatggaaagtgacaagttcactagattttgtcagtggaaaaacgttgaattaaatatccatttgaccatgaatgagttcagtgtgcataggattattgga

SEQ ID NO: 110451 - DNA, 120 bp, Artificial Sequence
  ENSG00000100077_8 (sequence is synthesized)
cgaggaggattcggggaagtttatggttgcaggaaagcagacactggaaaaatgtatgcaatgaaatgcttagataagaagaggatcaaaatgaaacaaggagaaacattagccttaaat

SEQ ID NO: 110452 - DNA, 120 bp, Artificial Sequence
  ENSG00000100077_9 (sequence is synthesized)
gaaagaatcatgttgtctcttgtcagcacaggagactgtcctttcattgtatgtatgacctatgccttccataccccagataaactctgcttcatcctggatctgatgaacgggggcgat

SEQ ID NO: 110453 - DNA, 120 bp, Artificial Sequence
  ENSG00000100077_10 (sequence is synthesized)
ttgcactaccacctttcacaacacggtgtgttctctgagaaggagatgcggttttatgccactgaaatcattctgggtctggaacacatgcacaatcggtttgttgtctacagagatttg

SEQ ID NO: 110454 - DNA, 120 bp, Artificial Sequence
  ENSG00000100077_11 (sequence is synthesized)
aagccagcaaatattctcttggatgaacatggacacgcaagaatatcagatcttggtcttgcctgcgatttttccaaaaagaagcctcatgcgagtgttggcacccatgggtacatggct

SEQ ID NO: 110455 - DNA, 120 bp, Artificial Sequence
  ENSG00000100077_12 (sequence is synthesized)
cccgaggtgctgcagaaggggacggcctatgacagcagtgccgactggttctccctgggctgcatgcttttcaaacttctgagaggtcacagccctttcagacaacataaaaccaaagac

SEQ ID NO: 110456 - DNA, 120 bp, Artificial Sequence
  ENSG00000100077_13 (sequence is synthesized)
aagcatgaaattgaccgaatgacactcaccgtgaatgtggaacttccagacaccttctctcctgaactgaagtcccttttggagggcttgcttcagcgagacgttagcaagcggctgggc

SEQ ID NO: 110457 - DNA, 120 bp, Artificial Sequence
  ENSG00000100077_14 (sequence is synthesized)
tgtcacggaggcggctcacaggaagtaaaagagcacagctttttcaaaggtgttgactggcagcatgtctacttacaaaagtacccaccacccttgattcctccccggggagaagtcaat

SEQ ID NO: 110458 - DNA, 120 bp, Artificial Sequence
  ENSG00000100077_15 (sequence is synthesized)
gctgctgatgcctttgatattggctcatttgatgaagaggataccaaagggattaagctacttgattgcgaccaagaactctacaagaacttccctttggtcatctctgaacgctggcag

SEQ ID NO: 110459 - DNA, 120 bp, Artificial Sequence
  ENSG00000100077_16 (sequence is synthesized)
caagaagtaacggaaacagtttatgaagcagtaaatgcagacacagataaaatcgaggccaggaagagagctaaaaataagcaacttggccacgaagaagattacgctctggggaaggac

SEQ ID NO: 110460 - DNA, 120 bp, Artificial Sequence
  ENSG00000100077_17 (sequence is synthesized)
tgtattatgcacgggtacatgctgaaactgggaaacccatttctgactcagtggcagcgtcgctatttttacctctttccaaatagacttgaatggagaggagagggagagtcccggcaa

SEQ ID NO: 110461 - DNA, 120 bp, Artificial Sequence
  ENSG00000100077_18 (sequence is synthesized)
aatttactgacaatggaacagattctctctgtggaagaaactcaaattaaagacaaaaaatgcattttgttcagaataaaaggagggaaacaatttgtcttgcaatgtgagagtgatcca

SEQ ID NO: 110462 - DNA, 120 bp, Artificial Sequence
  ENSG00000100077_19 (sequence is synthesized)
gagtttgtgcagtggaagaaagagttgaacgaaaccttcaaggaggcccagcggctattgcgtcgtgccccgaagttcctcaacaaacctcggtcaggtactgtggagctcccaaagcca

SEQ ID NO: 110463 - DNA, 120 bp, Artificial Sequence
  ENSG00000100077_20 (sequence is synthesized)
tccctctgtcacagaaacagcaacggcctctagcacccagaaacagggagggtcctcgaggaggacacaccagggtctcagccttttggggtgaacgaggatgaggcatctgatctattc

SEQ ID NO: 110464 - DNA, 120 bp, Artificial Sequence
  ENSG00000100077_21 (sequence is synthesized)
gctaccgggactcctccaggctcccgagaggagtcgggacccttcggcttggggtcagctcagctccctgccttgtcacatttgtctgcattagaaactactgaagaaataaaagttctt

SEQ ID NO: 110465 - DNA, 120 bp, Artificial Sequence
  ENSG00000100077_22 (sequence is synthesized)
tttctttgctacacactttggtacctatgaacctagaacttgaagtgactcctacttatcacgtaaatttttatgtctgatatcaaacacatcttagactccccagaatggaatttaaag

SEQ ID NO: 110466 - DNA, 120 bp, Artificial Sequence
  ENSG00000100077_23 (sequence is synthesized)
atgttcagtgttgggtaacagattgccctaagcattgccacatattctgtctagtcactgctgattttctatgtctttgctccatactgctgggggatgggagagccacagtgtgtttct

SEQ ID NO: 110467 - DNA, 120 bp, Artificial Sequence
  ENSG00000100077_24 (sequence is synthesized)
tttgtgcacttcgcaactgacttcttgtcctggggttaaaagttgaagatattttctgatgatattaaaagttgaagatatttctgcacttgggccctcctctgggagccgcacccacat

SEQ ID NO: 110468 - DNA, 120 bp, Artificial Sequence
  ENSG00000100077_25 (sequence is synthesized)
gactgccctgcctctgaccagtctgttccggggccccctcagccaggtgggaatgacggacacgtactatccaagtgtatgggattaactaatcattgaaggcattcatccgtccatcat

SEQ ID NO: 110469 - DNA, 120 bp, Artificial Sequence
  ENSG00000100077_26 (sequence is synthesized)
tggaaagatttacagtgattctgaaggacaggccgtggagttttaggtttcaggggcaagagcagttttcaaaagtctttgagtccagtgtgcacgagtcgacaagcagtacctggcatg

SEQ ID NO: 110470 - DNA, 120 bp, Artificial Sequence
  ENSG00000100077_27 (sequence is synthesized)
caggagcactcatgggtgagtccgtctcaggtctcgacaattagcagttgtgtgacagtcattctggttccttctgcctgaccctgggagacatatcagtaatggatgtacaaaagcagg

SEQ ID NO: 110471 - DNA, 120 bp, Artificial Sequence
  ENSG00000100077_28 (sequence is synthesized)
tctgttttatgtcttagtataatttcagatgaattgtattgaaaaaatgctgaggaatgaatgtgtcaaaatgggttaactgtgtatattgactttcatgtcgtcatgcatctgtcatga

SEQ ID NO: 110472 - DNA, 120 bp, Artificial Sequence
  ENSG00000100077_29 (sequence is synthesized)
atgaatgatactttgcactgggctgtacgacagtgaggaccttagggcatgaagcctttttcctggtcccagcagcatctgccctgtgaagtttgttttctcccactgcctccaggcccc

SEQ ID NO: 110473 - DNA, 120 bp, Artificial Sequence
  ENSG00000100077_30 (sequence is synthesized)
actgatacccccaaatagatgctgggttatgagaaccagcgaaatcccccatgtcatcagtcttaaaaaaaaaattttacaaatccacgtatttgtcccattcttggagtagttttagtg

SEQ ID NO: 110474 - DNA, 120 bp, Artificial Sequence
  ENSG00000100077_31 (sequence is synthesized)
tatgtctttacattaactactaacagtataaataacttgacatcgtaattgtctgcatcctgtccttgatatttttagcagttccaaatctttgtttttgtatttgtttgctgtgttcat

SEQ ID NO: 110475 - DNA, 120 bp, Artificial Sequence
  ENSG00000100077_32 (sequence is synthesized)
gggcaaagtaagtactttttaatgcagttattttgagagtttggaagataattaccaaaagggtccattatttcataagagttactttgcaaaaaaaaaaatgtgggtttttttttttgt

SEQ ID NO: 110476 - DNA, 120 bp, Artificial Sequence
  ENSG00000100077_33 (sequence is synthesized)
ctatctcaactactagttggggtttaaattaacatacattttctactatctgttatttccagtgtgggaggagggatgtactacttacatgcattctccttatttaaaaaggaagaatag

SEQ ID NO: 110477 - DNA, 120 bp, Artificial Sequence
  ENSG00000100077_34 (sequence is synthesized)
acacacacacacacacacacactccagaagcagaaaagccattgttcttaaagagtgaatgtcttcccagccctggttaattatagctgtgactgatgccgttcccgtctgcatctcaag

SEQ ID NO: 110478 - DNA, 120 bp, Artificial Sequence
  ENSG00000100077_35 (sequence is synthesized)
gtgactgatgccgttcccgtctgcatctcaagctcataggttctcagcatgtgcagttgaggatgcgctgggcctcatgcctgttctagatctccaggataaagggcctgctgttgactc

SEQ ID NO: 110479 - DNA, 120 bp, Artificial Sequence
  ENSG00000100077_36 (sequence is synthesized)
caccagggtctgggcttagcgtctaatatctcgtacctagggcgtgagctgcacaaacgtgttcagaaagattattcaactttcccatacttgttctaaaattgagctgatccgcatctc

SEQ ID NO: 110480 - DNA, 120 bp, Artificial Sequence
  ENSG00000100077_37 (sequence is synthesized)
tttcaaaaactagaatttctgctctaagaatagaacataaggctccactcccttttagaaaagatatatgaattggaaaatgctctgaaagtccttttgcttcaaacaaaagtgtaaact

SEQ ID NO: 110481 - DNA, 120 bp, Artificial Sequence
  ENSG00000100077_38 (sequence is synthesized)
atggttgagaagtacatctagatgtcatttattaaaagtgctttgtaagactagattgagctgtttctgagggcggtcaccagttgtgttggggtctggtttgagtgccttctgccaaaa

SEQ ID NO: 110482 - DNA, 120 bp, Artificial Sequence
  ENSG00000100077_39 (sequence is synthesized)
tgttgtgatggaggtgtttctgcgaccagacacaggataccgctgtgtctgcacccggttgcctgcatggccagaggaaaagtcagttggattaaacatcatggtatacttggctgttgt

SEQ ID NO: 110483 - DNA, 120 bp, Artificial Sequence
  ENSG00000100077_40 (sequence is synthesized)
ttttttttaattttttaattttttgggatagggcctcgctctgtcacccaggctggagaacagtgggatgatcatggctcactgcagccttgaattcctaggttcaagcaatcctcccac

SEQ ID NO: 110484 - DNA, 120 bp, Artificial Sequence
  ENSG00000100077_41 (sequence is synthesized)
agtagctaggactacaggtgcatgccacctttcctggctaatttattttttgggtagagatggggtcttgaactcttaggctcaagtgatcctccttccttggcctcccaaaatgctgga

SEQ ID NO: 110485 - DNA, 120 bp, Artificial Sequence
  ENSG00000100077_42 (sequence is synthesized)
caaaatgctggaattagagatgtaagccaccatgcccagccatagtacttggatgttttagaaggttttccaagtattacataattcctagatgttcacccttattacactccaactatt

SEQ ID NO: 110486 - DNA, 120 bp, Artificial Sequence
  ENSG00000100077_43 (sequence is synthesized)
aaaaaggtcaaaattcagcctattttttttcattattttagattcctgtggttgggatattttaacattgatgagaaaaataattgaggttgatatttttacaaaatcatgcggtaataa

SEQ ID NO: 110487 - DNA, 120 bp, Artificial Sequence
  ENSG00000100077_44 (sequence is synthesized)
gtcttgatttcatgattcaaaagaatcaataaagcctaaaaataatagattactttaagctgctatgtaagatatatatggaataaattaaaaacctttgtgaattcaggtttattattt

SEQ ID NO: 110488 - DNA, 120 bp, Artificial Sequence
  ENSG00000100077_45 (sequence is synthesized)
ttaacctaaaacattctctttggttcattcatcccctcatgtcatgggggctcattggttttccttctttgtcatatttaagtatgatttttcaacaaaacttctagaagtcagcttatt

SEQ ID NO: 110489 - DNA, 120 bp, Artificial Sequence
  ENSG00000100077_46 (sequence is synthesized)
atgtcaccattcatgcaaagtgctcatgcctctgattggtccattcactgacgtgacaatttcaggtcctatgtttaaaaagaaggggctggccgggcacgatggctcacgcctataatc

SEQ ID NO: 110490 - DNA, 120 bp, Artificial Sequence
  ENSG00000100077_47 (sequence is synthesized)
cgagactctgtctcaaaaaaaaaaaggaggggggctaaatatccagtgagatgcactgaggaaaggaagcattttgctgaagacagcagcagcaacaaacaatggtctgtttgttgcaaa

SEQ ID NO: 110491 - DNA, 120 bp, Artificial Sequence
  ENSG00000100077_48 (sequence is synthesized)
caagatgtagcttgatttctggtctgacatatgccatatacagatattagaaacgactgtttgaaggccacactggtcatctacaaagtaatgtttaccaattgacgacagggatttaac

SEQ ID NO: 110492 - DNA, 120 bp, Artificial Sequence
  ENSG00000100077_49 (sequence is synthesized)
tagattaaaaagatcaaagtgtggtttttctctgctttttaaaatttcactcggaatttgtagctgggccaattcaacacattttacttttcagtggaattgatttttctaatgtttcag

SEQ ID NO: 110493 - DNA, 120 bp, Artificial Sequence
  ENSG00000100077_50 (sequence is synthesized)
aattttaacatatcaagaagaaaacaacgttctcaaagtctggcctctttagcatgatgtaaacctatagaaatgctttgaaatgtgctggtgtaagataagagttatcttgtatgattt

SEQ ID NO: 110494 - DNA, 120 bp, Artificial Sequence
  ENSG00000100077_51 (sequence is synthesized)
aatcatatgcagtgttgtctcagttacgttcagggaaatgtttctgtgtcattcagagatgcttgatgaattaacacctcccaccctgagtgaggggttgacttgttgggagatgatttg

SEQ ID NO: 110495 - DNA, 120 bp, Artificial Sequence
  ENSG00000100077_52 (sequence is synthesized)
ggcttcactgggatctgtgacaggtgggggctgggctgggtgtcacaaagagaatagtggtagaaatcgggcgaaggaagaaagaagttactggtaaaaatcattacaccataaagcacc

SEQ ID NO: 110496 - DNA, 120 bp, Artificial Sequence
  ENSG00000100077_53 (sequence is synthesized)
aaggaaataactgagttaaaataggtgaagtttcttttttcccccctgtaacaggagagttttccttatgataattattctgagacttggtcactttgtttttgaatgtggagctgctga

SEQ ID NO: 110497 - DNA, 120 bp, Artificial Sequence
  ENSG00000100077_54 (sequence is synthesized)
actcattcagaagccatttgctgcctatcaggactttctgaagaagttcttttgcctctgcctaccctctggcaccctcccatggaggcacaggggacccagagctaaagcattaccagg

SEQ ID NO: 110498 - DNA, 120 bp, Artificial Sequence
  ENSG00000100077_55 (sequence is synthesized)
gtgtgtgtgtgtgtgtgtgtgtgcactttgcagcccccgaggtggagaggcagtgtctggatcactgtgaatgcattgccccattggtcagttggggacactgttacaaatccactgaag

SEQ ID NO: 110499 - DNA, 120 bp, Artificial Sequence
  ENSG00000100077_56 (sequence is synthesized)
ccattggtcagttggggacactgttacaaatccactgaagtcctggtaaaactgtcaagagtaacaggcctcttctgttctaccctgctcacttccacggtgagttaccagcctgggcaa

SEQ ID NO: 110500 - DNA, 120 bp, Artificial Sequence
  ENSG00000100077_57 (sequence is synthesized)
cacagcaagaccccatctctacaaaaaaaatttttttaagtaattaaccgtttaaattttttcctaaagatttaacatgatttttccctcctatgtaaagtttactggagagacttgaat

SEQ ID NO: 110501 - DNA, 120 bp, Artificial Sequence
  ENSG00000100077_58 (sequence is synthesized)
tacttaaattcatgttaatatgatttttttttaatccaggtcacattttaacaaagtttattatgaaacaaatgaaatttgaactctaaaatggtactccttggcttcctcaagtcacaa

SEQ ID NO: 110502 - DNA, 120 bp, Artificial Sequence
  ENSG00000100077_59 (sequence is synthesized)
tgaactttatattttctttgtccttaaggactaagatagttgttttatttcagccgaatcacagagataaccactcctgcaggcccccacagctggcccaaaggggctgtctttctgacc

SEQ ID NO: 110503 - DNA, 120 bp, Artificial Sequence
  ENSG00000100077_60 (sequence is synthesized)
tggctgtgttagcactgattgagaaacgcaggctcccaaattttaaattgcctttattaaaaacacaaactacagaaaatgggttaagagtatacgcatttcatcaaacacatatagggg

SEQ ID NO: 110504 - DNA, 120 bp, Artificial Sequence
  ENSG00000100077_61 (sequence is synthesized)
aaaaaatccttcaatttagagttaaataactcagctttgtatagtagagttagcgctccagtatctaacaatctcagaatcatctctgaaaactggtaactatgcttccatttttaattt

SEQ ID NO: 110505 - DNA, 120 bp, Artificial Sequence
  ENSG00000100077_62 (sequence is synthesized)
tgtcctaaatatcagatgtctttgatgtaagggtagggaatggagaaatattttcaattgtgtatttgtattacaaagaacttgaaatttactttcttagttgattatattaaatgatgt

SEQ ID NO: 110506 - DNA, 120 bp, Artificial Sequence
  ENSG00000100077_63 (sequence is synthesized)
atatattatatgtggtttataagctcaacactggccatttttttagttttattgttaaatggtatttttctatgtttaattataatagatctggctttttctggatagcataaagatcac

SEQ ID NO: 110507 - DNA, 120 bp, Artificial Sequence
  ENSG00000100077_64 (sequence is synthesized)
tgaactatatatatataagaaacaagagttctattttagcacaaaggcattttatattatttattgaatccataagtttgttttcgtcaaaaacattccatattatttctgctccttttt

SEQ ID NO: 110508 - DNA, 120 bp, Artificial Sequence
  ENSG00000100077_65 (sequence is synthesized)
atttgtatagtttgttatttaaagaaatggcagtccttcctgttcttaatacaataaaattgaaataatgcacctagtaatgtggccgacatctcttctcaccaccatggactgttttca

SEQ ID NO: 110509 - DNA, 120 bp, Artificial Sequence
  ENSG00000100077_66 (sequence is synthesized)
acaacagttgatcttctggtctgtgctgagaggcgcatgcatgtctttcgtcacgtcgggcagcacacctgctgtgaaatactgctttcatctacctcttcagaaggcttcttgcttgtt

SEQ ID NO: 110510 - DNA, 120 bp, Artificial Sequence
  ENSG00000100077_67 (sequence is synthesized)
gacaagtaccgcaaaggctttattctggactggctatctcataaaaggatttctgtaagactttgcagtgtcattccctcagaacctaggtttgtttctaaagccacggtattgtccagg

SEQ ID NO: 110511 - DNA, 120 bp, Artificial Sequence
  ENSG00000100077_68 (sequence is synthesized)
agcccctgtgtgtggggcaggtagctatccctcccatgtcattagtaatcctttaggatttaaggtacaactggacagcatcattccttccccttattgtgccaaatccccaccatcagc

SEQ ID NO: 110512 - DNA, 120 bp, Artificial Sequence
  ENSG00000100077_69 (sequence is synthesized)
cttgccattgccttaagatttgattattgcacccaattacctaaccactaaacagaaaggccaccttcactctttgaaaaaggcaagctgtgcttagaaacactgcttttaagagtagca

SEQ ID NO: 110513 - DNA, 120 bp, Artificial Sequence
  ENSG00000100077_70 (sequence is synthesized)
catttgagtgtgactttttccccccttcactatttcaaaatggttttgaaatggggtcttaaaggtaagcgccctcatacatgactgaaactttgtgagaggtcttatatttgaatggac

SEQ ID NO: 110514 - DNA, 120 bp, Artificial Sequence
  ENSG00000100077_71 (sequence is synthesized)
ccttaatgatttatgtgaaatagaatgaagtcctgtctctgtgagagaacgtgcctcctcactcatttgtctctgtctgttttcatagccatcaatatagtaacatatttactatattct

SEQ ID NO: 110515 - DNA, 120 bp, Artificial Sequence
  ENSG00000100077_72 (sequence is synthesized)
tgaatacccttgaagaaagaaatccgttttctattgtgcattgctatacgaagtgaagccagtaaactagatactgtaaatctagatattgtacctagacaaaatatcattggttctatc

SEQ ID NO: 110516 - DNA, 120 bp, Artificial Sequence
  ENSG00000100077_73 (sequence is synthesized)
tctttttgtatctgttgtgccagggaaggtttataatcccttctcagtatacactcactagtgcacgtctgaaatagtatcccacgggagatgctgctccacgtctgaggtcacctgccc

SEQ ID NO: 110517 - DNA, 120 bp, Artificial Sequence
  ENSG00000100077_74 (sequence is synthesized)
tgtgtggggcacaccaccgtcagcaccaccgtttttacagttactttggagctgctagactggttttctgtgttggtaaattgcctatataaatctgaataaaaaggatctgtacaaaga

SEQ ID NO: 110518 - DNA, 120 bp, Artificial Sequence
  ENSG00000100078_0 (sequence is synthesized)
ctctttcctcctcctcccgcagctccattcattggtcccgccgcaccgggcctgctgggctccgcttccgttccactgctcagctgccgcctggtggggccaccaagggcaggcatccca

SEQ ID NO: 110519 - DNA, 120 bp, Artificial Sequence
  ENSG00000100078_1 (sequence is synthesized)
ggggctttgtctgactggactgggccagtgcagaatgggggttcaggcagggctgtttgggatgctgggcttcctgggggtggccctggggggctcccctgccctccgctggtacaggac

SEQ ID NO: 110520 - DNA, 120 bp, Artificial Sequence
  ENSG00000100078_2 (sequence is synthesized)
ctcctgccacttgaccaaggccgtccctggcaacccactggggtacctgagcttcctggccaaggatgctcagggactggccctgatccatgcccgctgggatgcgcataggaggctgca

SEQ ID NO: 110521 - DNA, 120 bp, Artificial Sequence
  ENSG00000100078_3 (sequence is synthesized)
gtcatgtagctgggaggatgagccggagctcaccgcagcctacggtgctctctgtgctcatgagactgcctggggctccttcatccacacccccggacccgagctgcagagagcactggc

SEQ ID NO: 110522 - DNA, 120 bp, Artificial Sequence
  ENSG00000100078_4 (sequence is synthesized)
cactcttcagagtcagtgggaggcatgccgagcgcttgaggagagtccagcaggggccaggaagaagcgagcagcagggcagagtggagtccctggtggagggcaccagcgagagaagag

SEQ ID NO: 110523 - DNA, 120 bp, Artificial Sequence
  ENSG00000100078_5 (sequence is synthesized)
aggatggaccatgcctggcacactgtggtgtggagttggagattctgctgggaactcctcggagctgggggtcttccagggacctgatctctgttgccgggaacatgaccgctgcccaca

SEQ ID NO: 110524 - DNA, 120 bp, Artificial Sequence
  ENSG00000100078_6 (sequence is synthesized)
gaacatctcacccttgcagtacaactatggcatccgaaactaccgattccacaccatctcccactgtgactgtgacaccaggtttcagcaatgcctacagaatcagcacgactccatctc

SEQ ID NO: 110525 - DNA, 120 bp, Artificial Sequence
  ENSG00000100078_7 (sequence is synthesized)
ggacatcgtgggcgtggccttcttcaacgtgctggagatcccctgctttgtgctggaggagcaggaggcgtgtgtggcgtggtactggtggggcgggtgtaggatgtacggcacagtgcc

SEQ ID NO: 110526 - DNA, 120 bp, Artificial Sequence
  ENSG00000100078_8 (sequence is synthesized)
cctcgctcgcctgcagcccaggaccttctacaatgcctcctggagctcccgggccacctccccaactcccagctcccggagcccagcccctcccaagcctcgacagaagcagcaccttcg

SEQ ID NO: 110527 - DNA, 120 bp, Artificial Sequence
  ENSG00000100078_9 (sequence is synthesized)
gaaggggccaccacatcagaaagggtccaagcgccccagcaaagccaacaccacagccctccaggaccctatggtctctcccaggcttgatgtggcccccacaggcctccagggcccaca

SEQ ID NO: 110528 - DNA, 120 bp, Artificial Sequence
  ENSG00000100078_10 (sequence is synthesized)
ggccccgggaaatcgagttccagctgctcaacagcgcccaagagcccctcttccactgcaactgcacgcgccgtctggcacgcttcctgaggctccacagcccacccgaggttaccaaca

SEQ ID NO: 110529 - DNA, 120 bp, Artificial Sequence
  ENSG00000100078_11 (sequence is synthesized)
tgctttgggagctgctgggcacaacctgcttcaagctggcccctccactggactgtgtggaaggcaaaaactgttccagagaccctagggccatcagggtgtcagcccggcacttgcgga

SEQ ID NO: 110530 - DNA, 120 bp, Artificial Sequence
  ENSG00000100078_12 (sequence is synthesized)
ggcttcagcagaggcgacaccagctccaggataaaggcacagatgagaggcagccatggccttcagagcccctgagaggccccatgtcattctacaaccagtgcctgcagctaacccagg

SEQ ID NO: 110531 - DNA, 120 bp, Artificial Sequence
  ENSG00000100078_13 (sequence is synthesized)
cagccaggagacccgacaggcagcagaagtcctggagccagtgacctcagtttcagctttcctgggcaccagcctggaccttgcccatggctatgccaagccttgggaatctcagcctcc

SEQ ID NO: 110532 - DNA, 120 bp, Artificial Sequence
  ENSG00000100078_14 (sequence is synthesized)
cctccgtaggttagactgaagcatggcagaggctgttgtggacaatcaagaggatgaatggggggatctcaaggcccaaatgctggaccacatctcctgctgttctgggtaaccttgagc

SEQ ID NO: 110533 - DNA, 120 bp, Artificial Sequence
  ENSG00000100078_15 (sequence is synthesized)
tatgtatgacacaactcttctatgcctggatgtggtgttcaggaagctcattctgatgccctgggctttggccttgccagggaacttcacatacagatgagaatggggaaagggtaactt

SEQ ID NO: 110534 - DNA, 120 bp, Artificial Sequence
  ENSG00000100078_16 (sequence is synthesized)
attgcagcagccccaggcagtaccaggaggaggtacatgtatgtccgtgttgcaaaaataatacatgcctcaaaaacctgcctaggggagccctagtgcctgggtgctgtggcctgaggt

SEQ ID NO: 110535 - DNA, 120 bp, Artificial Sequence
  ENSG00000100078_17 (sequence is synthesized)
agcaggtgggaagttagggatgtcacagaaatgtctgtgtctgaatccaggattggggtgggtgttggagagggctttcagctcccctcctcccaggggggcctctttttttaacggctg

SEQ ID NO: 110536 - DNA, 120 bp, Artificial Sequence
  ENSG00000100078_18 (sequence is synthesized)
ccgtgcccttcctggcccagccctaaacctaaattcaaatctcctccatgcctttgcgcaaaggacctccctcttgcactctaagccttagtttcctcctctaaaaaaagggggtctcta

SEQ ID NO: 110537 - DNA, 120 bp, Artificial Sequence
  ENSG00000100078_19 (sequence is synthesized)
aacaggagctacctcatagggttgttgaggattaagtgaaccaatacatatacagtgcttagcacttaataagtattcccccctgcgacacctagctgaactatggtttggtgtctgatc

SEQ ID NO: 110538 - DNA, 120 bp, Artificial Sequence
  ENSG00000100078_20 (sequence is synthesized)
ttgagaggttgatgtaaccttttaaaggcctcagttcgctcacctgtgaaatgggtctaagaatagcactgatctcacagggttgtgatgcagattaaaggagatggcatgtgtaatgta

SEQ ID NO: 110539 - DNA, 120 bp, Artificial Sequence
  ENSG00000100079_0 (sequence is synthesized)
ctgtttgtgctgggtactgggagatgcaggcggggagacacaaggtagaaggggcaaagtcctcacctaggaccttgagggagttaatgtgtaatattctaggatataagcttgaccacg

SEQ ID NO: 110540 - DNA, 120 bp, Artificial Sequence
  ENSG00000100079_1 (sequence is synthesized)
agttgagaccctgagcacaggcctccaggagccgctgggagctgccgccaggagctgtcaccatgacgggggaacttgaggttaagaacatggacatgaagccggggtcaaccctgaaga

SEQ ID NO: 110541 - DNA, 120 bp, Artificial Sequence
  ENSG00000100079_2 (sequence is synthesized)
tcattggacggcagcaactgggggcaagaacaacgggaagatcacctgtgcttcagcccagggtcagaggtcaagttcacagtgacctttgagagtgacaaattcaaggtgaagctgcca

SEQ ID NO: 110542 - DNA, 120 bp, Artificial Sequence
  ENSG00000100079_3 (sequence is synthesized)
gatgggcacgagctgacttttcccaacaggctgggtcacagccacctgagctacctgagcgtaaggggcgggttcaacatgtcctctttcaagttaaaagaataaaagacttccagccga

SEQ ID NO: 110543 - DNA, 120 bp, Artificial Sequence
  ENSG00000100079_4 (sequence is synthesized)
actttctagttgcgtgagtcctgggatccctaattccccacctgaaaaatggggtgagaacagaggttcccttgagaatgtactatgagcttataacgatgagggctgaagaaagtggtt

SEQ ID NO: 110544 - DNA, 120 bp, Artificial Sequence
  ENSG00000100083_0 (sequence is synthesized)
ggtgccgaggctgggggccggtggcggatggagcccgcgatggagccggagactctggaggcgcgaatcaatagagccacgaaccccctgaacaaggagctcgactgggccagcatcaac

SEQ ID NO: 110545 - DNA, 120 bp, Artificial Sequence
  ENSG00000100083_1 (sequence is synthesized)
ggcttctgcgagcagctcaacgaggactttgaggggcctccactcgccacccggctgctggcccacaagatccagtccccacaggagtgggaggcgatccaggccttgacggtgctggaa

SEQ ID NO: 110546 - DNA, 120 bp, Artificial Sequence
  ENSG00000100083_2 (sequence is synthesized)
acatgcatgaagagctgcggcaagcggttccacgacgaagtgggcaagttccgctttctcaacgagctcatcaaggtcgtgtctcccaagtatctgggctctcggacatcggagaaggtg

SEQ ID NO: 110547 - DNA, 120 bp, Artificial Sequence
  ENSG00000100083_3 (sequence is synthesized)
aagaacaagatcttggagctcctctacagctggacagtgggcctgcccgaggaggtgaaaatcgcagaggcctaccagatgctaaagaagcaggggattgtaaagtccgaccccaagctt

SEQ ID NO: 110548 - DNA, 120 bp, Artificial Sequence
  ENSG00000100083_4 (sequence is synthesized)
ccagatgacactacctttccccttcctcctccacggccgaagaatgtgatctttgaagatgaggagaaatccaagatgctggcccgcctgctgaagagctcccatcccgaagacctccgc

SEQ ID NO: 110549 - DNA, 120 bp, Artificial Sequence
  ENSG00000100083_5 (sequence is synthesized)
gcagccaataagctcatcaaagagatggtgcaggaggaccagaagcggatggagaagatctcgaagagggtgaatgccatcgaggaggtgaacaacaatgtgaaactgctcacggagatg

SEQ ID NO: 110550 - DNA, 120 bp, Artificial Sequence
  ENSG00000100083_6 (sequence is synthesized)
gtgatgagccacagccagggcggcgcagcagctggcagcagcgaggacctcatgaaggaactgtaccagcgctgtgagcggatgcggcccacgctcttccgactggcgagtgacacagag

SEQ ID NO: 110551 - DNA, 120 bp, Artificial Sequence
  ENSG00000100083_7 (sequence is synthesized)
gacaatgatgaggccttagcggagatcctgcaggccaatgacaacctcacccaggtgatcaacctgtataagcagctggtgcggggtgaggaggtcaacggtgatgccacagccggctcc

SEQ ID NO: 110552 - DNA, 120 bp, Artificial Sequence
  ENSG00000100083_8 (sequence is synthesized)
atccctgggagcacctcggccctgctggatctctcaggcctggatctcccgcctgcgggcaccacctacccagctatgcccacccgccctggcgagcaggccagccctgagcagcccagt

SEQ ID NO: 110553 - DNA, 120 bp, Artificial Sequence
  ENSG00000100083_9 (sequence is synthesized)
gcctcagtttccctgcttgacgacgagctcatgtctctgggcctcagtgaccccacacccccttcaggcccaagcctggatggtaccggatggaacagcttccagtcgtcggatgccact

SEQ ID NO: 110554 - DNA, 120 bp, Artificial Sequence
  ENSG00000100083_10 (sequence is synthesized)
gagcccccagcccctgctctggcccaggcccccagtatggaaagccgacccccagcgcagacatccctgccagcaagcagcggtctggacgacctagacctcctggggaagaccctcctg

SEQ ID NO: 110555 - DNA, 120 bp, Artificial Sequence
  ENSG00000100083_11 (sequence is synthesized)
agaagcagcagccaaccccccggctcacactccgggacctgcagaataagagcagcagctgcagctcccccagctccagcgccaccagccttctccacaccgtgtccccagagcccccca

SEQ ID NO: 110556 - DNA, 120 bp, Artificial Sequence
  ENSG00000100083_12 (sequence is synthesized)
ggcctccgcagcagcccgtaccaaccgagctctcactggccagcatcactgtgcccctggagtccatcaaacccagcaacatcctgcccgtgactgtgtatgaccagcacggcttccgca

SEQ ID NO: 110557 - DNA, 120 bp, Artificial Sequence
  ENSG00000100083_13 (sequence is synthesized)
tcctcttccattttgcccgggacccactgccagggcgctccgacgtgctggtggtggtggtttccatgctgagcaccgccccccagcccatccgcaacatcgtgttccagtcagctgtcc

SEQ ID NO: 110558 - DNA, 120 bp, Artificial Sequence
  ENSG00000100083_14 (sequence is synthesized)
ccaaggttatgaaggtgaagctgcagccaccctcgggcacggagctgccagcttttaaccccatcgtccacccctcagcaatcacccaggtcctgctgcttgccaacccccagaaggaga

SEQ ID NO: 110559 - DNA, 120 bp, Artificial Sequence
  ENSG00000100083_15 (sequence is synthesized)
aggttcgcctccgctacaagctcaccttcaccatgggtgaccagacctacaacgagatgggggatgtggaccagttccccccacctgaaacctggggtagcctctagaacagaggggctg

SEQ ID NO: 110560 - DNA, 120 bp, Artificial Sequence
  ENSG00000100083_16 (sequence is synthesized)
gggagaggaaggggcagagggaccggtcactgtccagcctggagggaggcattggtggccaaggacaccctttgttgcccatggccattcacccccaggcctggtgcttctccccacacc

SEQ ID NO: 110561 - DNA, 120 bp, Artificial Sequence
  ENSG00000100083_17 (sequence is synthesized)
cctgtaggcctcaagtgactcttccccctcctgctccggccccgcccctgctgagccaaacccagtaggaggctgggcctgggtttgtgccgctggggtctccatcaccgggacctggag

SEQ ID NO: 110562 - DNA, 120 bp, Artificial Sequence
  ENSG00000100083_18 (sequence is synthesized)
agggaggggctgtgtagccttggaagaacttgggtcatggggaggaagcacagctgttggggaagggccaggacctcaggcccagccccaaccccagctggggtggggtcttccccacct

SEQ ID NO: 110563 - DNA, 120 bp, Artificial Sequence
  ENSG00000100083_19 (sequence is synthesized)
gtctcttatgccttatgggaaggcccagccataactcgggggccatgctggagctggggaccagcttaggcctcctccataggaacccagtgactggggggtgacgcctacacccccagc

SEQ ID NO: 110564 - DNA, 120 bp, Artificial Sequence
  ENSG00000100083_20 (sequence is synthesized)
tatttgcactctggtgtgtggtttgactctgcttttcttccggattggccctgtggtcacagcctcagggggccaggctgggggaacctcacctggcccgtactcctgggggtttccctt

SEQ ID NO: 110565 - DNA, 120 bp, Artificial Sequence
  ENSG00000100083_21 (sequence is synthesized)
tgccattgggccccctgagggactgtgggggctcaagggtaatgccagaggcccatggccccagcgaggggctgtggggcacctagagttctcggtgtgtctccttcattcattggcctc

SEQ ID NO: 110566 - DNA, 120 bp, Artificial Sequence
  ENSG00000100083_22 (sequence is synthesized)
tgctggggcctcctatgggtgtcttacgtctgtccatccatctgtccgtggtcagaagtggggtcagtgtgtgagtgagagcaggagtatttatgaaaataaaacgtcgtttttcctgga

SEQ ID NO: 110567 - DNA, 120 bp, Artificial Sequence
  ENSG00000100083_23 (sequence is synthesized)
ggaccccggccccggcgcggtccagcggtgggagcgggcgccgcccacctgtcggatccctgggccatgacccctgggacggcgagtgagctgcgccgggaacccccgggacggagagag

SEQ ID NO: 110568 - DNA, 120 bp, Artificial Sequence
  ENSG00000100083_24 (sequence is synthesized)
tcacacccgggagggagggaccctactattttcaggccccgaatcctccactctctggccctgcatggcgttcctggagcccgagtagaggattagagaaggggacaccggagccactcc

SEQ ID NO: 110569 - DNA, 120 bp, Artificial Sequence
  ENSG00000100083_25 (sequence is synthesized)
tccacctcctgcccccacctcccccaggccctgctaagtatctgcagttggaaggagccaccaccagggggcccccttctccagcaccgaccttgggtttctcctctctgaggacacaga

SEQ ID NO: 110570 - DNA, 120 bp, Artificial Sequence
  ENSG00000100083_26 (sequence is synthesized)
gcaggggccgcccccctgttgagaggccctgtgggccagcccccttaacaggcatcttatttactacccgcagctgcacaggaggcagacccatccccttttcacaactggggctaaggg

SEQ ID NO: 110571 - DNA, 120 bp, Artificial Sequence
  ENSG00000100083_27 (sequence is synthesized)
gagcgatggaggaccccggccccggcgcggtccagcggtgggagcgggcgccgcccacctgtcggatccctgggccatgacccctgggacggcgagtgtggacatgagtggctgggatgc

SEQ ID NO: 110572 - DNA, 120 bp, Artificial Sequence
  ENSG00000100083_28 (sequence is synthesized)
agtgccgtagcaggctgggggacacaaaagagaactgacccagcactgctaccctgggcaggagtagaggattagagaaggggacaccggagccactcccaagggaatgaaggctttctg

SEQ ID NO: 110573 - DNA, 120 bp, Artificial Sequence
  ENSG00000100083_29 (sequence is synthesized)
tctgctgtgagagccactttccccagcccagtttgctgctaggagacggagagtaggcccagggcctcccagttccaccctcacccctccctgggcagcctggagacctctggctcctct

SEQ ID NO: 110574 - DNA, 120 bp, Artificial Sequence
  ENSG00000100083_30 (sequence is synthesized)
ttcctgggatgtcaaggctaagtccccagagccgactatgagcaggcctgtccctcatgtcagttctgcatcctcaccatggtgccatctagcaggtggggaaacagacactgagggctg

SEQ ID NO: 110575 - DNA, 120 bp, Artificial Sequence
  ENSG00000100083_31 (sequence is synthesized)
aaggggagaggccaccatccgtcccccgccatgtgacgacaccaagggaggccaagactgaggttcttggggtccataaggctcttcagagcccaagagagttgtgctaagatggcccag

SEQ ID NO: 110576 - DNA, 120 bp, Artificial Sequence
  ENSG00000100083_32 (sequence is synthesized)
gatggaggtccgggcctgccccaagggtcccaccacagccagcgggctggcctcccaccccagcatccatacacgtaggcctgttgctgagggaaggccctctagggtcatctggtccag

SEQ ID NO: 110577 - DNA, 120 bp, Artificial Sequence
  ENSG00000100083_33 (sequence is synthesized)
gggttctttgcttcagctgcacatcggctgcctctccaggaagcgtgttcaacacatggaatcagggctccacccagacctgccgaggccacactcctggagtatctgcatccagagatc

SEQ ID NO: 110578 - DNA, 120 bp, Artificial Sequence
  ENSG00000100083_34 (sequence is synthesized)
agcagaggagagaggggtgtactgtctgtggcccccagcatgggccacataccaacccaccatggagcaaagctgattttaagtggtggtagagatacagtttctcttttaatacttacg

SEQ ID NO: 110579 - DNA, 120 bp, Artificial Sequence
  ENSG00000100083_35 (sequence is synthesized)
tgtttagttgggtgcagtggcttatacctgtaatttcagcacttggggaggccaaggcaggaggcttgcttgaggcaaggagttcaaggctacagtgagctatgattgtgccactgtact

SEQ ID NO: 110580 - DNA, 120 bp, Artificial Sequence
  ENSG00000100083_36 (sequence is synthesized)
ccagactggacaacagagtgagaccccatctctaaataataatcattattgttacatatttgttttaacatttttttctcaagtataactagtcctatgatttcatagatgtagcttagg

SEQ ID NO: 110581 - DNA, 120 bp, Artificial Sequence
  ENSG00000100083_37 (sequence is synthesized)
ctagtcctatgatttcatagatgtagcttaggataaggccaaggtaggtgttgcctatataaggtttttttaaaaaaggaaaaataggccgggctggtggctcacgcctgtaatcccagc

SEQ ID NO: 110582 - DNA, 72 bp, Artificial Sequence
  ENSG00000100083_38 (sequence is synthesized)
gcagccccatgtctactaaaaataaaaaattagcgaggcgtggtgggcgggcgcctgtaatcccagctactt

SEQ ID NO: 110583 - DNA, 120 bp, Artificial Sequence
  ENSG00000100083_39 (sequence is synthesized)
aaaacattctcaggtttagaaacagtgggggttttctgagagtccagagagtctaaaaccaggcagaagttagagatacctgggtttggctgggccctgacacactggggctgggatttt

SEQ ID NO: 110584 - DNA, 120 bp, Artificial Sequence
  ENSG00000100083_40 (sequence is synthesized)
ctcctttccttccccctttgtgtcctagcagaattgtaagatctttcctcttcccttgtggaggctggaggtaaaggatagcttcttctttttttttttgagacgggttttcactcttgt

SEQ ID NO: 110585 - DNA, 90 bp, Artificial Sequence
  ENSG00000100083_41 (sequence is synthesized)
agcctcccgagtagctggaattacaggtgatccgcctatatatagccactcatccgcccacgtcggcctctcaaagtgttgggattacag

SEQ ID NO: 110586 - DNA, 82 bp, Artificial Sequence
  ENSG00000100083_42 (sequence is synthesized)
gaggagtagaggattagagaaggggacaccggagccactcccaagggaatgaaggctttctgaacctggtgtgatgatagag

SEQ ID NO: 110587 - DNA, 120 bp, Artificial Sequence
  ENSG00000100083_43 (sequence is synthesized)
caccatggctggcatggggtggggagcactccctgttcccacaaaccagcaacttctcctgggcttgtccaggcccagcagggagaggctcgttgctgtcttgttttgtaagcagcagat

SEQ ID NO: 110588 - DNA, 80 bp, Artificial Sequence
  ENSG00000100083_44 (sequence is synthesized)
cctcacgccccgcccccggcccgggaggggcggtgtcctcagtcggcccctcagaccctggagcgatggaggaccccggc

SEQ ID NO: 110589 - DNA, 66 bp, Artificial Sequence
  ENSG00000100083_45 (sequence is synthesized)
gagtagctgggaccacaggtgtgcgctaccacgcccagctagttttttgtattttttatacagacc

SEQ ID NO: 110590 - DNA, 120 bp, Artificial Sequence
  ENSG00000100083_46 (sequence is synthesized)
gggccagcccccttaacaggcatcttatttactacccgcagctgcacaggaggcagacccatccccttttcacaactggggctaagggaggaaaatgacttgcccagatcacagagcaga

SEQ ID NO: 110591 - DNA, 120 bp, Artificial Sequence
  ENSG00000100083_47 (sequence is synthesized)
acagtggcagagccaggggagacggagggccatctgcccccagaccttcctccctaatgagggtgaatggaagctaagagtgcatcccacagcccaggcagttccagacctgagcctgac

SEQ ID NO: 110592 - DNA, 120 bp, Artificial Sequence
  ENSG00000100083_48 (sequence is synthesized)
ggcttctgccagggccacataccaggttcttttccttgatctctgcccacgtgtcagcctgggccacttgggctgcggtctgggtaccatccactccctcattaagcaggagccccaccc

SEQ ID NO: 110593 - DNA, 120 bp, Artificial Sequence
  ENSG00000100083_49 (sequence is synthesized)
acaaggctcactgcccagattgccccacaccctggcacctggggaaggcagtgttgccgagggcctgattggtgccaggcactgttctaggccctcagggatctggcactgatcaaagtt

SEQ ID NO: 110594 - DNA, 120 bp, Artificial Sequence
  ENSG00000100083_50 (sequence is synthesized)
ctctatttcaaatatatttatattaaaaaaaaaaaaaaaaggttgacaaaaacttcctcatggtagtttagtgagaggagacagacaataaccaagtccatgagcaccgacagttcgtca

SEQ ID NO: 110595 - DNA, 120 bp, Artificial Sequence
  ENSG00000100083_51 (sequence is synthesized)
cggtggtgagtggcatggaggaagagaagcagggaagggatgaggtggtgcaggagggatttaggacaggcctccctgaggtgagccttgggtgaagacctgaaggcagtaagggatgaa

SEQ ID NO: 110596 - DNA, 120 bp, Artificial Sequence
  ENSG00000100083_52 (sequence is synthesized)
gccatgcagagatctggggcagccagagagcagagctggagtggaggcctggaggcgggagcgggcccagtgtgttgagacagcccaggcagtatggcagggagtgaatgagggaagggt

SEQ ID NO: 110597 - DNA, 120 bp, Artificial Sequence
  ENSG00000100083_53 (sequence is synthesized)
gggaggtgagaccagggaggtggcggagggccagagtctcagcagacgagatgggctgtttccctgcccctttcccttcccctcacacacaggctgtgatggatgtggggtcctcgtccc

SEQ ID NO: 110598 - DNA, 120 bp, Artificial Sequence
  ENSG00000100083_54 (sequence is synthesized)
caggcctggaggagggcgggctcagcagcagatggggcatgatcccagggcccactcacagctagcggaaccacgtaccccaggtgtggatcctgtggggcacgtggatgagcattaggc

SEQ ID NO: 110599 - DNA, 120 bp, Artificial Sequence
  ENSG00000100083_55 (sequence is synthesized)
ccacttcacaactgaggaaactgaggctcggggaagttaggagcttgtgcgaggccacacggccagagggtgaggctggcaacctctaagccggcctcggataagctaaccagcattcag

SEQ ID NO: 110600 - DNA, 120 bp, Artificial Sequence
  ENSG00000100083_56 (sequence is synthesized)
gctctggcagcctggggggaaaccaggggatttccccgcaacaggttagagcctggaattgagaactgtctgggcaaaagttcagcagtttcttcatccaccaagaggagagggagggct

SEQ ID NO: 110601 - DNA, 120 bp, Artificial Sequence
  ENSG00000100083_57 (sequence is synthesized)
ctgggctccagagcacccagaggctccagagaagccgaggccagagcgcgagggactcggtgatccaagctggtccagggccaggcctgctgttactcccgggcaggctccggctccaga

SEQ ID NO: 110602 - DNA, 120 bp, Artificial Sequence
  ENSG00000100083_58 (sequence is synthesized)
gcccagcaggggccaggcttccccggggggaagcagcaaagcgttcccagctgcccaaaccatttttgggtttccaactgctctcagggcagcagccccatccgagagctgagatcagaa

SEQ ID NO: 110603 - DNA, 120 bp, Artificial Sequence
  ENSG00000100083_59 (sequence is synthesized)
cagcctcctcctgagagccactgaagggatgaagagcagatacgttagggccacatcaaaggaatcctcagggatatgttggaagccaagattcagactgtggtttcctgagccagttct

SEQ ID NO: 110604 - DNA, 120 bp, Artificial Sequence
  ENSG00000100083_60 (sequence is synthesized)
gaagcaaaaaccagacccgaaggccttgaagaagtgatggggacccggggcgccctgggcggggtctgcctgggttccaggagtgcttcctttggtggtgcccactactgcactctgtcc

SEQ ID NO: 110605 - DNA, 120 bp, Artificial Sequence
  ENSG00000100083_61 (sequence is synthesized)
tgcactctgtcctgtcttaggtgaccctcacggtctctgcaggcaggtgccgttaatagccccactgcacaatgaggaaacggcagcacagaaaggcgcggtggctcacgcctggaatcc

SEQ ID NO: 110606 - DNA, 62 bp, Artificial Sequence
  ENSG00000100083_62 (sequence is synthesized)
cctgtagtcccagctactggggaggctgatgcaggaaaattgcttgaactggggaagcgctc

SEQ ID NO: 110607 - DNA, 120 bp, Artificial Sequence
  ENSG00000100083_63 (sequence is synthesized)
gagggcttcccggggagtcctggggaggcagtagggtgtggacagggcttgagactgaagtgagtggggctgggcagtatcaaaggcctccccactgtgtccctgaagtatctgggctct

SEQ ID NO: 110608 - DNA, 120 bp, Artificial Sequence
  ENSG00000100083_64 (sequence is synthesized)
aaaaaaaaaaaatccatatttcattccagctttacaagatggggaaatggaggttcagggaagcatgtaagctagattgttgtttaaccagtattgggggttaaaggggtagctgtctgg

SEQ ID NO: 110609 - DNA, 80 bp, Artificial Sequence
  ENSG00000100084_0 (sequence is synthesized)
gttgcccgggagccgcctgaggaggagcggcgcaggggatgcggctgtggtggcggcggcggcggccgagcgcgggtggc

SEQ ID NO: 110610 - DNA, 120 bp, Artificial Sequence
  ENSG00000100084_1 (sequence is synthesized)
gggtggcgcgggaggaagcggcggcggtggctccatggcccgggcgcgctgagggacccggcgctcgcctcagcccggcggcggcggcggccgaacaatgaagctcctgaagccgacctg

SEQ ID NO: 110611 - DNA, 120 bp, Artificial Sequence
  ENSG00000100084_2 (sequence is synthesized)
gcggcggcggccgaacaatgaagctcctgaagccgacctgggtcaaccacaatggcaagccgattttttcagttgatattcaccctgacgggaccaagttcgcaactggaggacaagggc

SEQ ID NO: 110612 - DNA, 120 bp, Artificial Sequence
  ENSG00000100084_3 (sequence is synthesized)
aggattctgggaaggttgtgatctggaatatgtctccagtcctccaggaggatgacgagaaggatgaaaatattcccaagatgctttgccagatggacaatcacttagcatgtgtgaact

SEQ ID NO: 110613 - DNA, 120 bp, Artificial Sequence
  ENSG00000100084_4 (sequence is synthesized)
gtgtgcggtggtcaaacagtgggatgtatttagcttctgggggagatgacaaactgattatggtgtggaagcgggctacgtacatcggccccagcaccgtgttcggctccagtggtaagc

SEQ ID NO: 110614 - DNA, 120 bp, Artificial Sequence
  ENSG00000100084_5 (sequence is synthesized)
ttgccaatgtggagcagtggcggtgtgtctctatcctccggaatcattcaggcgatgtgatggatgtagcatggtctccccacgatgcctggctagcctcatgcagcgtggataacactg

SEQ ID NO: 110615 - DNA, 120 bp, Artificial Sequence
  ENSG00000100084_6 (sequence is synthesized)
tcgtcatctggaatgctgtaaagttcccagaaattctagctactctgagaggtcattctggcttggtcaaagggttgacatgggaccctgttggtaaatacatagcttctcaagctgatg

SEQ ID NO: 110616 - DNA, 120 bp, Artificial Sequence
  ENSG00000100084_7 (sequence is synthesized)
accgcagcctaaaggtgtggaggacgctggactggcagttggagaccagcatcaccaagccttttgatgagtgtggaggaacgacccatgtgttgcggctcagctggtcacctgatgggc

SEQ ID NO: 110617 - DNA, 120 bp, Artificial Sequence
  ENSG00000100084_8 (sequence is synthesized)
attacctggtgtctgcccatgccatgaacaactcaggccccactgcccagatcatcgaacgggagggatggaagaccaacatggactttgttgggcaccggaaagctgtgactgtcgtga

SEQ ID NO: 110618 - DNA, 120 bp, Artificial Sequence
  ENSG00000100084_9 (sequence is synthesized)
aattcaacccaaaaatcttcaaaaagaagcagaagaatgggagttctgcgaagcctagctgcccgtactgctgctgtgctgttggcagcaaggaccgctcgctttctgtctggctcacat

SEQ ID NO: 110619 - DNA, 120 bp, Artificial Sequence
  ENSG00000100084_10 (sequence is synthesized)
gtctgaaacggccgctggtggtcatccatgaactgtttgacaaatccatcatggatatttcctggactctgaatgggctgggcatcttggtatgctctatggacggctctgtggcattcc

SEQ ID NO: 110620 - DNA, 120 bp, Artificial Sequence
  ENSG00000100084_11 (sequence is synthesized)
tcgacttctcccaggatgagcttggcgatcccctgagcgaggaggagaagagccgcattcaccagtccacctatggcaagagcctagccatcatgaccgaggcccagctctccacagccg

SEQ ID NO: 110621 - DNA, 120 bp, Artificial Sequence
  ENSG00000100084_12 (sequence is synthesized)
tcattgagaaccctgagatgctcaagtaccagcgaaggcagcagcagcagcagctggaccagaagagtgctgcgaccagggagatgggctcagccacctcagtcgcaggcgttgtcaacg

SEQ ID NO: 110622 - DNA, 120 bp, Artificial Sequence
  ENSG00000100084_13 (sequence is synthesized)
gggagagtcttgaagatatcaggaagaatcttttgaagaaacaagttgagactcggacagcagatggccggagaagaatcacgcctctctgcatagcacagctggacactggggacttct

SEQ ID NO: 110623 - DNA, 120 bp, Artificial Sequence
  ENSG00000100084_14 (sequence is synthesized)
ccacggcattctttaacagcatccccctctcgggctccctggcgggcaccatgctctcttctcatagcagtccacagctactgccactggactccagtacccctaactccttcggcgcct

SEQ ID NO: 110624 - DNA, 120 bp, Artificial Sequence
  ENSG00000100084_15 (sequence is synthesized)
cgaagccttgcacagagcctgtggtggctgccagtgccagacctgcaggcgattctgtcaataaagacagtatgaatgctacctctactcctgctgcattgtcaccttctgtgttaacga

SEQ ID NO: 110625 - DNA, 120 bp, Artificial Sequence
  ENSG00000100084_16 (sequence is synthesized)
ctccgacagctgtggaaaggttaaaagagcagaaccttgtgaaagagctgaggccccgagacctcctggagagcagcagtgacagcgatgagaaagtccctttggctaaggcttcctcac

SEQ ID NO: 110626 - DNA, 120 bp, Artificial Sequence
  ENSG00000100084_17 (sequence is synthesized)
tgtccaagcgaaaacttgagcttgaggtagagacagtagagaagaagaagaaagggcggcctcggaaggactctcgtctcatgcctgtgtctctgtctgtccagtctccagctgccctaa

SEQ ID NO: 110627 - DNA, 120 bp, Artificial Sequence
  ENSG00000100084_18 (sequence is synthesized)
ccgcagagaaggaggccatgtgtctgtctgcaccagcacttgcactgaagctgccaattccaagcccccagagagcattcaccctccaggtcagctccgatccttccatgtacattgagg

SEQ ID NO: 110628 - DNA, 120 bp, Artificial Sequence
  ENSG00000100084_19 (sequence is synthesized)
tggagaatgaagtgacagtggtggggggcgtgaagctgagccgcctgaagtgcaaccgggaagggaaggagtgggagacggtactcaccagccggatcctcactgctgcgggcagctgtg

SEQ ID NO: 110629 - DNA, 120 bp, Artificial Sequence
  ENSG00000100084_20 (sequence is synthesized)
acgtggtgtgtgtcgcctgtgaaaaaaggatgctgtcagtgttctccacctgtggtcgccgtctcctctctcccatcctcctgccatccccgatctctactttgcattgcacaggctcct

SEQ ID NO: 110630 - DNA, 120 bp, Artificial Sequence
  ENSG00000100084_21 (sequence is synthesized)
acgtcatggcgctcaccgctgcagccacactctctgtctgggatgttcacagacaggtggttgtggtgaaagaagagtctctacactccatcctggcaggaagtgatatgacggtatcac

SEQ ID NO: 110631 - DNA, 120 bp, Artificial Sequence
  ENSG00000100084_22 (sequence is synthesized)
agatcttgctgacgcagcatggaatcccagtaatgaacctgtccgatgggaaggcgtactgctttaatccgtcactttccacatggaacctggtttctgacaagcaggactcactggctc

SEQ ID NO: 110632 - DNA, 120 bp, Artificial Sequence
  ENSG00000100084_23 (sequence is synthesized)
agtgtgcagactttaggagcagcctgccatcccaggacgccatgctgtgctcaggaccgttagccataatccagggccgcacctccaactcgggaaggcaggctgcccggctcttctccg

SEQ ID NO: 110633 - DNA, 120 bp, Artificial Sequence
  ENSG00000100084_24 (sequence is synthesized)
tgcctcatgtggtgcagcaagagaccaccctggcctacctagagaaccaggtggcagcagcactcaccctgcagtccagccacgagtaccgccattggctcctcgtctacgcacggtacc

SEQ ID NO: 110634 - DNA, 120 bp, Artificial Sequence
  ENSG00000100084_25 (sequence is synthesized)
tcgtaaacgaagggtttgaataccgacttcgagaaatatgcaaggacttactgggtccggttcactactccactggaagccagtgggagtcaacagtagtgggtctgcggaagagggagc

SEQ ID NO: 110635 - DNA, 120 bp, Artificial Sequence
  ENSG00000100084_26 (sequence is synthesized)
tgctgaaggagctgctaccagtcatcgggcagaacctccgattccagcgcctcttcaccgagtgtcaggaacagctcgacatcctgagggacaagtagcctgccccagcctgccctggct

SEQ ID NO: 110636 - DNA, 120 bp, Artificial Sequence
  ENSG00000100084_27 (sequence is synthesized)
gcagcaagggcagggccacactctcgccgctgatgacatgcaggaccgcctctcacctgaccaggctgtagggggaggagacactggcaggagatgtgctgtcctgcaccagcgccagcc

SEQ ID NO: 110637 - DNA, 120 bp, Artificial Sequence
  ENSG00000100084_28 (sequence is synthesized)
cagctccctgggcagatgtgccctgtgtcctgggtctgacattgcctcaggagggggaagctcatccctccctccaagcccccgatgcggagctagggctggagctctgcccaggtgccc

SEQ ID NO: 110638 - DNA, 120 bp, Artificial Sequence
  ENSG00000100084_29 (sequence is synthesized)
tggggccagcaaggcagtcccaggcctgccgtctccagcacggccccaaggtggacactagcccctgctgctgcaggcaccatgctgcttcagcagtgacgattgagccatttgtgagag

SEQ ID NO: 110639 - DNA, 120 bp, Artificial Sequence
  ENSG00000100084_30 (sequence is synthesized)
agaatccggaagcgttaggtattacagcagactgacctaagacctatgtaaaaggaaagctgttccaacacacggactatttttgtactagaatttgctaacttgtaatattgaatttcc

SEQ ID NO: 110640 - DNA, 120 bp, Artificial Sequence
  ENSG00000100084_31 (sequence is synthesized)
tttggccgataatcaggatttccctataagtcacttggacattggtcacttgtaggaaatttaaactctaattatgacagctacactgaaaaataattgtactgaaattaacttgtctat

SEQ ID NO: 110641 - DNA, 120 bp, Artificial Sequence
  ENSG00000100084_32 (sequence is synthesized)
cttcatttggttttaatttttaaatgtttgtaaaaagagactgttttgggggaatggggcaaaggggtgggcgatttcttttgtaagtgtaaaataaatgaacacgcattgaataccaaa

SEQ ID NO: 110642 - DNA, 120 bp, Artificial Sequence
  ENSG00000100084_33 (sequence is synthesized)
ggcctgcgaacagtggcagcgcgacctggccagctgccgcgactgggaggagcgccggaacgccgaggcccaggcaagccgattttttcagttgatattcaccctgacgggaccaagttc

SEQ ID NO: 110643 - DNA, 120 bp, Artificial Sequence
  ENSG00000100084_34 (sequence is synthesized)
accccggtagatgtgctgtatcactgtctgtgtgttttgcctggcatggaaggtgtgagggtactttccatatgcccccagggtagggactgcctcagtcccttctgtatgccctactgc

SEQ ID NO: 110644 - DNA, 120 bp, Artificial Sequence
  ENSG00000100092_0 (sequence is synthesized)
cgcccacccatccggggcaagagccgcgccgcaggagaggcaggctggaccgggggctccccgggcccgcgacccccgccgtgaccccgcagcccccagctcgcccccaagatgatgaag

SEQ ID NO: 110645 - DNA, 120 bp, Artificial Sequence
  ENSG00000100092_1 (sequence is synthesized)
tgatgaagaggcagctgcaccgcatgcggcagctggcccagacgggcagcttgggacgcaccccggagaccgctgagttcctgggtgaggacctgctgcaggtagaacagcggctggagc

SEQ ID NO: 110646 - DNA, 120 bp, Artificial Sequence
  ENSG00000100092_2 (sequence is synthesized)
cggccaagcgggcagcccacaacatccacaagcggctgcaggcctgtctgcagggccagagcggggcagacatggacaagcgggtgaagaagcttcccctcatggctctgtccaccacga

SEQ ID NO: 110647 - DNA, 120 bp, Artificial Sequence
  ENSG00000100092_3 (sequence is synthesized)
tggctgagagcttcaaggagctggaccctgattccagcatggggaaggccttggagatgagctgtgccatccagaatcagctggcccgcatcctggccgagtttgagatgaccctggaga

SEQ ID NO: 110648 - DNA, 120 bp, Artificial Sequence
  ENSG00000100092_4 (sequence is synthesized)
gggacgtcctgcagccactcagcaggctgagtgaggaggagctgccagccatcctcaaacacaagaaaagcctccagaagctcgtgtccgactggaacacactcaagagcaggctcagtc

SEQ ID NO: 110649 - DNA, 120 bp, Artificial Sequence
  ENSG00000100092_5 (sequence is synthesized)
aggcaaccaagaattcaggcagcagtcaaggcctaggaggcagcccgggtagtcacagccatacgaccatggccaacaaggtggagacgctgaaggaggaggaggaggagctgaagagga

SEQ ID NO: 110650 - DNA, 120 bp, Artificial Sequence
  ENSG00000100092_6 (sequence is synthesized)
aagtggagcaatgcagggacgagtacttggctgacctgtaccactttgttaccaaggaggactcctatgccaactacttcattcgtctcctggagattcaggccgattaccatcgcaggt

SEQ ID NO: 110651 - DNA, 120 bp, Artificial Sequence
  ENSG00000100092_7 (sequence is synthesized)
cactgagctcgctggacacagccctggctgagctgagggagaaccacggccaagcagaccactccccttcgatgacagccacccacttccccagggtgtatggggtgtcgctggcaaccc

SEQ ID NO: 110652 - DNA, 120 bp, Artificial Sequence
  ENSG00000100092_8 (sequence is synthesized)
acctgcaagagctgggccgggagattgccctgcccatcgaggcctgcgtcatgatgctgctttctgagggcatgaaggaagagggtctcttccgtctggctgctggggcctcggtgctga

SEQ ID NO: 110653 - DNA, 120 bp, Artificial Sequence
  ENSG00000100092_9 (sequence is synthesized)
agcgtctcaagcagacaatggcctcggacccccacagcctggaggagttctgctccgacccgcacgctgtggcaggtgccctcaagtcctatctgcgggagctgccagagcctctgatga

SEQ ID NO: 110654 - DNA, 120 bp, Artificial Sequence
  ENSG00000100092_10 (sequence is synthesized)
ccttcgacctctatgatgactggatgagggcagccagcctgaaggagccaggggcccggctgcaggccctccaagaggtgtgcagccgcctaccccccgagaacctcagcaacctcaggt

SEQ ID NO: 110655 - DNA, 120 bp, Artificial Sequence
  ENSG00000100092_11 (sequence is synthesized)
cggctggccgaggagcaggaggtgaacaagatgacacccagcaacatcgccatagtcctgggacccaacttgctgtggccacctgagaaagaaggggaccaggcccagctggatgcagcc

SEQ ID NO: 110656 - DNA, 120 bp, Artificial Sequence
  ENSG00000100092_12 (sequence is synthesized)
tccgtgtcttccatccaggtggtgggcgtcgtcgaggcgctgatccagagcgcagacaccctcttccctggagacatcaacttcaacgtgtcaggcctcttctcagctgttaccctccag

SEQ ID NO: 110657 - DNA, 120 bp, Artificial Sequence
  ENSG00000100092_13 (sequence is synthesized)
gacacagtcagtgacaggctggcctctgaggaacttccgtccactgccgtgcccaccccagccaccaccccggctccggctccggctccagctccagctccggccccagccttggcttca

SEQ ID NO: 110658 - DNA, 120 bp, Artificial Sequence
  ENSG00000100092_14 (sequence is synthesized)
gcagctaccaaggaaaggacagagtctgaggtgcctcccagaccagcctcccccaaggtcaccaggagtcccccggagacagctgccccagtggaggacatggctcggaggaccaagcgc

SEQ ID NO: 110659 - DNA, 120 bp, Artificial Sequence
  ENSG00000100092_15 (sequence is synthesized)
ccaccatgccgcccccccaggtctccggctcccgctcctcccctccagccccgcccttgccccctggctctggcagccctgggaccccccaagccctgccccgacgtctggttggcagca

SEQ ID NO: 110660 - DNA, 120 bp, Artificial Sequence
  ENSG00000100092_16 (sequence is synthesized)
cgtctggttggcagcagcctccgagcccccacagtgccacccccgttaccccccacaccccctcagcctgcccggcgccaaagccggcgttcaccagcctcccccagcccggcctcccca

SEQ ID NO: 110661 - DNA, 120 bp, Artificial Sequence
  ENSG00000100092_17 (sequence is synthesized)
ggtccagcctcccccagcccagtctctttgagtaaccctgcacaggtggacctgggggctgccacagcagagggaggagcccctgaggctatcagtggggtccccactcccccagctatc

SEQ ID NO: 110662 - DNA, 120 bp, Artificial Sequence
  ENSG00000100092_18 (sequence is synthesized)
ccccctcagccccgccccaggagccttgcctcagagaccaactgagtggctggtttctccctaagcagccctcagcaccccctccctccccacctggccctcccaggacagctctcgccc

SEQ ID NO: 110663 - DNA, 120 bp, Artificial Sequence
  ENSG00000100092_19 (sequence is synthesized)
cccacaaaggggcatgggcctccagcctttgcccacaagtgcctcagtgcccactgggtcggcccccatggccaggagggctcaggacaatcctctatttcctgaccttttcctcgtcca

SEQ ID NO: 110664 - DNA, 120 bp, Artificial Sequence
  ENSG00000100092_20 (sequence is synthesized)
ccctgggcttggggacccccccaccggactctccactctccggcaggtcctaggggagccaccggaaggaaggagaggtttgcctgctcctacgggactgattcttctcttgccgacatg

SEQ ID NO: 110665 - DNA, 120 bp, Artificial Sequence
  ENSG00000100092_21 (sequence is synthesized)
ttttttgtaaggctggtaaataaattattttggacaaaactggagcagctgcccaaatgatagttttattttctgtccttgaaataaagaagccaattttataaaggggaaaacaataca

SEQ ID NO: 110666 - DNA, 120 bp, Artificial Sequence
  ENSG00000100092_22 (sequence is synthesized)
agccacgtggcctcgttcctgttccccttccctaccctgcaggactcgcctccacacttgtgatgtctcctgaagataactccggttggaagtttcttctacctgaaatgaaaccataac

SEQ ID NO: 110667 - DNA, 120 bp, Artificial Sequence
  ENSG00000100092_23 (sequence is synthesized)
ccctgcagcatccacttggggtgccagagtcccacctccagcacagtcttcattactggccatggcagggaggagtacagaatgggcaggcccaggacagctggcccatcagaccattag

SEQ ID NO: 110668 - DNA, 120 bp, Artificial Sequence
  ENSG00000100092_24 (sequence is synthesized)
aaacagcgagtccggagttccaggggcttgtccacggccacacagcagcccgtggccccaggaagccaaagctcccagccagtcatccagtggtggggggtttagttccagggggccaga

SEQ ID NO: 110669 - DNA, 120 bp, Artificial Sequence
  ENSG00000100092_25 (sequence is synthesized)
ggtcctctgcggaagagagtgcaaggcagtatccgcggcaggcccagagaggccaggacaggtcagaaaggcctacccctctttcgcttggtaccctttcctctttgcgagggatgcaaa

SEQ ID NO: 110670 - DNA, 120 bp, Artificial Sequence
  ENSG00000100092_26 (sequence is synthesized)
ggttatttatacttcgggtctgcaggctgcgggtggggcaggcaccccgcctggggcgggttgcgggcgcaggggcaggaatgggcttacctgcttcccgccaccggggctgggcggggc

SEQ ID NO: 110671 - DNA, 120 bp, Artificial Sequence
  ENSG00000100092_27 (sequence is synthesized)
gaggaggagccgggcacaacctgtggacggccgcggccggcggacacacagcagcgggggcccggccgggggtcgcccgggggcccggaagccggggaagagcgaggaaaccaacttgga

SEQ ID NO: 110672 - DNA, 120 bp, Artificial Sequence
  ENSG00000100092_28 (sequence is synthesized)
ctgagggagaaccacggccaagcaggtggggacataggcccggcgataccacacccctgaccctgccctgctcggggcttattgagaagctcgcacttcatcctgaaaggtagcaggaag

SEQ ID NO: 110673 - DNA, 120 bp, Artificial Sequence
  ENSG00000100092_29 (sequence is synthesized)
cggaggagtcctaggggagccaccggaaggaaggagaggtttgcctgctcctacgggactgattcttctcttgccgacatgttttttgtaaggctggtaaataaattattttggacaaaa

SEQ ID NO: 110674 - DNA, 120 bp, Artificial Sequence
  ENSG00000100092_30 (sequence is synthesized)
ctggactcaggtggaaatatccccaggtctcccagctcccacccccagcctctgagccggtggcacggaggccggaagtttggggagcctctcagagcctgtcttctctgctcctcttcc

SEQ ID NO: 110675 - DNA, 120 bp, Artificial Sequence
  ENSG00000100092_31 (sequence is synthesized)
cccagcctcaggagttccccattctctgggtccagggaggggactgggtgtccagagacctggttctagtctcacactggcacagatgcctacatagcctggacagtcagaccaccttgc

SEQ ID NO: 110676 - DNA, 120 bp, Artificial Sequence
  ENSG00000100092_32 (sequence is synthesized)
agtgggccttggcatcccccatgtgtccccaggtgggggccaagggcctgtgcacccctgcccacagctgtagtccagagtgctgtgtgactgtgcctaggagtctgagctcctgcactt

SEQ ID NO: 110677 - DNA, 120 bp, Artificial Sequence
  ENSG00000100092_33 (sequence is synthesized)
cccgttcttggggccagctaatactcctcatcccggggtgggctgaggatttgggagtgggcagaaaagaggcttctgtgtcccaaagctgggccccgggtgggtctctcagcctcccct

SEQ ID NO: 110678 - DNA, 120 bp, Artificial Sequence
  ENSG00000100092_34 (sequence is synthesized)
ttagtttcatctgtccgccctctctcaggacacagccctgggtggaggaggaaaaacccatgtatcctattcccacccccatggaatgtgctccgactgggatgaagcaactgggccacc

SEQ ID NO: 110679 - DNA, 120 bp, Artificial Sequence
  ENSG00000100092_35 (sequence is synthesized)
cagggcaggcctcagctgggagggacagtggaagcactggggtccaggtgccctgctgcggggaagggaagtagggggcgttctaacccaggcaggctcagcagaagcactctccccccc

SEQ ID NO: 110680 - DNA, 120 bp, Artificial Sequence
  ENSG00000100092_36 (sequence is synthesized)
atggggtgagcacagacggggcccagccctcacctggggataccaagacgtgatctcagctgggagggggtccaggtggtgagggcatccacatcagaagaatgaccaggctggggacag

SEQ ID NO: 110681 - DNA, 120 bp, Artificial Sequence
  ENSG00000100092_37 (sequence is synthesized)
accaaatctgccaccagggggcaacccagagcactcatggcccagcctgggcagaggccccggccagtggagctctcagatctgcagctctaaatcctagaatcccatgtggtctgctgt

SEQ ID NO: 110682 - DNA, 120 bp, Artificial Sequence
  ENSG00000100095_0 (sequence is synthesized)
ggccagagcgaccgcggggctgagcgcgcgtccgcccagggggctccggaagctgccccggcccgcggcctcctccctcgctcccgcttcccctttctcgctcaccgccgccctccttcc

SEQ ID NO: 110683 - DNA, 120 bp, Artificial Sequence
  ENSG00000100095_1 (sequence is synthesized)
ctccctcgctcccgcttcccctttctcgctcaccgccgccctccttccccagctccctcgccgtccgcccgccccacagccagcggctccgcgccccctgcagccacgatgcccgcggcc

SEQ ID NO: 110684 - DNA, 120 bp, Artificial Sequence
  ENSG00000100095_2 (sequence is synthesized)
ccgcgggatctcgctgttcctcgctctgctcctggggagcccggcggcagcgctggagcgagatgctcttcccgagggagatgctagccctttgggtccttacctcctgccctcaggagc

SEQ ID NO: 110685 - DNA, 120 bp, Artificial Sequence
  ENSG00000100095_3 (sequence is synthesized)
cccggagagaggcagtcctggcaaagagcaccctgaagagagagtggtaacagcgccccccagttcctcacagtcggcggaagtgctgggcgagctggtgctggatgggaccgcaccctc

SEQ ID NO: 110686 - DNA, 120 bp, Artificial Sequence
  ENSG00000100095_4 (sequence is synthesized)
tgcacatcacgacatcccagccctgtcaccgctgcttccagaggaggcccgccccaagcacgccttgccccccaagaagaaactgccttcgctcaagcaggtgaactctgccaggaagca

SEQ ID NO: 110687 - DNA, 120 bp, Artificial Sequence
  ENSG00000100095_5 (sequence is synthesized)
gctgaggcccaaggccacctccgcagccactgtccaaagggcagggtcccagccagcgtcccagggcctagatctcctctcctcctccacggagaagcctggcccaccgggggacccgga

SEQ ID NO: 110688 - DNA, 120 bp, Artificial Sequence
  ENSG00000100095_6 (sequence is synthesized)
ccccatcgtggcctccgaggaggcatcagaagtgcccctttggctggaccgaaaggagagtgcggtccctacaacacccgcacccctgcaaatctcccccttcacttcgcagccctatgt

SEQ ID NO: 110689 - DNA, 120 bp, Artificial Sequence
  ENSG00000100095_7 (sequence is synthesized)
ggcccacacactcccccagaggccagaacccggggagcctgggcctgacatggcccaggaggccccccaggaggacaccagccccatggccctgatggacaaaggtgagaatgagctgac

SEQ ID NO: 110690 - DNA, 120 bp, Artificial Sequence
  ENSG00000100095_8 (sequence is synthesized)
tgggtcagcctcagaggagagccaggagaccactacctccaccattatcaccaccacggtcatcaccaccgagcaggcaccagctctctgcagtgtgagcttctccaatcctgaggggta

SEQ ID NO: 110691 - DNA, 120 bp, Artificial Sequence
  ENSG00000100095_9 (sequence is synthesized)
cattgactccagcgactacccactgctgcccctcaacaactttctggagtgcacatacaacgtgacagtctacactggctatggggtggagctccaggtgaagagtgtgaacctgtccga

SEQ ID NO: 110692 - DNA, 120 bp, Artificial Sequence
  ENSG00000100095_10 (sequence is synthesized)
tggggaactgctctccatccgcggggtggacggccctaccctgaccgtcctggccaaccagacactcctggtggaggggcaggtaatccgaagccccaccaacaccatctccgtctactt

SEQ ID NO: 110693 - DNA, 120 bp, Artificial Sequence
  ENSG00000100095_11 (sequence is synthesized)
ccggaccttccaggacgacggccttgggaccttccagcttcactaccaggccttcatgctgagctgcaactttccccgccggcctgactctggggatgtcacggtgatggacctgcactc

SEQ ID NO: 110694 - DNA, 120 bp, Artificial Sequence
  ENSG00000100095_12 (sequence is synthesized)
aggtggggtggcccactttcactgccacctgggctatgagctccagggcgctaagatgctgacatgcatcaatgcctccaagccgcactggagcagccaggagcccatctgctcagctcc

SEQ ID NO: 110695 - DNA, 120 bp, Artificial Sequence
  ENSG00000100095_13 (sequence is synthesized)
ttgtggaggggcagtgcacaatgccaccatcggccgcgtcctctccccaagttaccctgaaaacacaaatgggagccaattctgcatctggacgattgaagctccagagggccagaagct

SEQ ID NO: 110696 - DNA, 120 bp, Artificial Sequence
  ENSG00000100095_14 (sequence is synthesized)
gcacctgcactttgagaggctgttgctgcatgacaaggacaggatgacggttcacagcgggcagaccaacaagtcagctcttctctacgactcccttcaaaccgagagtgtcccttttga

SEQ ID NO: 110697 - DNA, 120 bp, Artificial Sequence
  ENSG00000100095_15 (sequence is synthesized)
gggcctgctgagcgaaggcaacaccatccgcatcgagttcacgtccgaccaggcccgggcggcctccaccttcaacatccgatttgaagcgtttgagaaaggccactgctatgagcccta

SEQ ID NO: 110698 - DNA, 120 bp, Artificial Sequence
  ENSG00000100095_16 (sequence is synthesized)
catccagaatgggaacttcactacatccgacccgacctataacattgggactatagtggagttcacctgcgaccccggccactccctggagcagggcccggccatcatcgaatgcatcaa

SEQ ID NO: 110699 - DNA, 120 bp, Artificial Sequence
  ENSG00000100095_17 (sequence is synthesized)
tgtgcgggacccatactggaatgacacagagcccctgtgcagagccatgtgtggtggggagctctctgctgtggctggggtggtattgtccccaaactggcccgagccctacgtggaagg

SEQ ID NO: 110700 - DNA, 120 bp, Artificial Sequence
  ENSG00000100095_18 (sequence is synthesized)
tgaagattgtatctggaagatccacgtgggagaagagaaacggatcttcttagatatccagttcctgaatctgagcaacagtgacatcttgaccatctacgatggcgacgaggtcatgcc

SEQ ID NO: 110701 - DNA, 120 bp, Artificial Sequence
  ENSG00000100095_19 (sequence is synthesized)
ccacatcttggggcagtaccttgggaacagtggcccccagaaactgtactcctccacgccagacttaaccatccagttccattcggaccctgctggcctcatctttggaaagggccaggg

SEQ ID NO: 110702 - DNA, 120 bp, Artificial Sequence
  ENSG00000100095_20 (sequence is synthesized)
atttatcatgaactacatagaggtatcaaggaatgactcctgctcggatttacccgagatccagaatggctggaaaaccacttctcacacggagttggtgcggggagccagaatcaccta

SEQ ID NO: 110703 - DNA, 120 bp, Artificial Sequence
  ENSG00000100095_21 (sequence is synthesized)
ccagtgtgaccccggctatgacatcgtggggagtgacaccctcacctgccagtgggacctcagctggagcagcgaccccccattttgtgagaaaattatgtactgcaccgaccccggaga

SEQ ID NO: 110704 - DNA, 120 bp, Artificial Sequence
  ENSG00000100095_22 (sequence is synthesized)
ggtggatcactcgacccgcttaatttcggatcctgtgctgctggtggggaccaccatccaatacacctgcaaccccggttttgtgcttgaagggagttctcttctgacctgctacagccg

SEQ ID NO: 110705 - DNA, 120 bp, Artificial Sequence
  ENSG00000100095_23 (sequence is synthesized)
tgaaacagggactcccatctggacgtctcgcctgccccactgcgtttcggaggagtccctggcatgtgacaacccagggctgcctgaaaatggataccaaatcctgtacaagcgactcta

SEQ ID NO: 110706 - DNA, 120 bp, Artificial Sequence
  ENSG00000100095_24 (sequence is synthesized)
cctgccaggagagtccctcaccttcatgtgctacgaaggctttgagctcatgggtgaagtgaccatccgctgcatcctgggacagccatcccactggaacgggcccctgcccgtgtgtaa

SEQ ID NO: 110707 - DNA, 120 bp, Artificial Sequence
  ENSG00000100095_25 (sequence is synthesized)
agttaatcaagacagttttgaacatgctttagaagtagcagaagcggcagcagagacgtcgctggaaggggggaacatggccctggctatcttcatcccggtcctcatcatctccttact

SEQ ID NO: 110708 - DNA, 120 bp, Artificial Sequence
  ENSG00000100095_26 (sequence is synthesized)
gctgggaggagcctacatttacatcacaagatgtcgctactattccaacctccgcctgcctctgatgtactcccacccctacagccagatcaccgtggaaaccgagtttgacaaccccat

SEQ ID NO: 110709 - DNA, 120 bp, Artificial Sequence
  ENSG00000100095_27 (sequence is synthesized)
ccagagaccatgtggcacttgattgaaaccccagaatgtcgactgtcttttgtttagactctttatcaaaggtttactgttttcttccctgtatttattatatttaaaagtgaaataggt

SEQ ID NO: 110710 - DNA, 120 bp, Artificial Sequence
  ENSG00000100095_28 (sequence is synthesized)
gtgggtttggatgtttcgcggcctcagccaaattcatgttacagcctcaattctgaaggcaggtggaagacttgcaaaatggcaaaccgcggcagcaaaaacacaaaacagcagatggag

SEQ ID NO: 110711 - DNA, 120 bp, Artificial Sequence
  ENSG00000100095_29 (sequence is synthesized)
tttctcccatcagcaatgccatgctaaggctgcattgaattgcatgcatctttgggaaccatgcccatgatgttttcagtacaaatctaagtcccaagattaggttggaaagggtatttc

SEQ ID NO: 110712 - DNA, 120 bp, Artificial Sequence
  ENSG00000100095_30 (sequence is synthesized)
ttgttggcttagtttgggttggaatttagcatgggtacttaaacccatttggagagctgtgctcctaaacaaattctgtgtcctctcttcccattttgccagcttctgaaaggtttttcc

SEQ ID NO: 110713 - DNA, 120 bp, Artificial Sequence
  ENSG00000100095_31 (sequence is synthesized)
acagcccctccctctcacggttcttctgaaggtagcaaaggtgttatataaacattgtcttttaccactctggcctcgctggacagtgacaaaacaagaaaacgttttctttctagaaag

SEQ ID NO: 110714 - DNA, 120 bp, Artificial Sequence
  ENSG00000100095_32 (sequence is synthesized)
gtgataaacgaccaaaggcaatttttcagagacaaatgagagatttgagagttccaatgaagaattgggtgagggggatcattgggtaagggaattgggttaaaatgttcttttctttga

SEQ ID NO: 110715 - DNA, 120 bp, Artificial Sequence
  ENSG00000100095_33 (sequence is synthesized)
cactctttcaatgatgaaagagcgtgtaatttatgctacaagtgccagaatcgatcaccatgttcagcaagccactctcaagctgtggtaataaacacacaggcttgggaggcaccagcg

SEQ ID NO: 110716 - DNA, 120 bp, Artificial Sequence
  ENSG00000100095_34 (sequence is synthesized)
gccccactcatacagtgacaaggatttgtgatgggaaaaaggaggtgccatgtttggaaatgcaggggtgagctctggtttctcctggggttctggaatatctcagccctcaaaatagag

SEQ ID NO: 110717 - DNA, 120 bp, Artificial Sequence
  ENSG00000100095_35 (sequence is synthesized)
gagactcaagtgcactgattctctaaaaggtgtcatcttcagaatatacttgccatcaagtatttcagggggcgggagggtcccatgagaagaaactatttttctattctccaaagctgt

SEQ ID NO: 110718 - DNA, 120 bp, Artificial Sequence
  ENSG00000100095_36 (sequence is synthesized)
ctggatgttggagggtggtgtgaatgctgactgaggaggtgcagagaacaggggcaggggattttaaatcacagcagaccatccagtggaatcctgtatcatctgatctgaacatcaatg

SEQ ID NO: 110719 - DNA, 120 bp, Artificial Sequence
  ENSG00000100095_37 (sequence is synthesized)
aagacagagagaggaatttcattcagaaaggattccatagccccacatctagtcacacgggcattcctcttattttatcagggtctgttttcccccaacccagtgaaaccggtgagtgtg

SEQ ID NO: 110720 - DNA, 120 bp, Artificial Sequence
  ENSG00000100095_38 (sequence is synthesized)
taactcttgggaagattcttttctaaatacaggtataaagagaaggtggagggtgcgggtgcatggaagaaatactatgtgtgaagcagattcaccttcctgggaccggtgacatggtgg

SEQ ID NO: 110721 - DNA, 120 bp, Artificial Sequence
  ENSG00000100095_39 (sequence is synthesized)
tgacagtcaatggcttggacagacagacgggcacagtggcatttggaaccctctttggtgccctcccattctctctggaattgtttcaagtctgctggttttcaaacaagaaaagacctt

SEQ ID NO: 110722 - DNA, 120 bp, Artificial Sequence
  ENSG00000100095_40 (sequence is synthesized)
tctggccatagggagaatagcagggagtctatgttttggtggttacattggaaacatcttaagcaagatagggaaagttgattttaggcacacatgtaccctccttgacagcaggaactc

SEQ ID NO: 110723 - DNA, 120 bp, Artificial Sequence
  ENSG00000100095_41 (sequence is synthesized)
agacttcaatcttgggggtctaagaccagaatattttccttctgccagaaaagaatcttgcacatatactcctgaaggcatgagtgtgtggtccatggcaagaaatagctaaaggctgct

SEQ ID NO: 110724 - DNA, 120 bp, Artificial Sequence
  ENSG00000100095_42 (sequence is synthesized)
ttccaggacccaaagccccatttaatgcaagaaccagagaagtgttctaggccattagtggacaatgtcatgtttggagaaagataacaacacaaataatgtaacctttccttaaaaggc

SEQ ID NO: 110725 - DNA, 120 bp, Artificial Sequence
  ENSG00000100095_43 (sequence is synthesized)
agaactcaatccattttatttgatgcttattctaaccctaaccctgggtcacctggaatgaagaactctatgaataatatttgattttacaacgtgttatggttatgtgaaaactaaaca

SEQ ID NO: 110726 - DNA, 120 bp, Artificial Sequence
  ENSG00000100095_44 (sequence is synthesized)
tttgccttttataaagactgacaaaatataaatctttattctaaccctatccccaaaactagccaggccacaccccagatgttcttattgactattggaaagatagaaaaggcgttgtgt

SEQ ID NO: 110727 - DNA, 120 bp, Artificial Sequence
  ENSG00000100095_45 (sequence is synthesized)
tttttgtttttttgttgttgttgtcattgttgtttttttcagaagaccagtgtctcagttctgtcttagtagtaccacacccgtaaccgtgttttaaaagtttgttttagcctagagaca

SEQ ID NO: 110728 - DNA, 120 bp, Artificial Sequence
  ENSG00000100095_46 (sequence is synthesized)
gatcatacgagttcaacaatgtacagtgtgattgaaaagacaggttggtgtctatttttctttttaaaatatctgaatgtgtatttgtaatacgtaaaggtaaaaaaaaatagtgccaaa

SEQ ID NO: 110729 - DNA, 120 bp, Artificial Sequence
  ENSG00000100095_47 (sequence is synthesized)
aatgtgcaaggcatctcattacagctcatgtacgtctgtttttataagatcaatattaaaacccattgggattaaatatttttgaataggatacactcttgagaaactcgagaatggact

SEQ ID NO: 110730 - DNA, 120 bp, Artificial Sequence
  ENSG00000100095_48 (sequence is synthesized)
gagccttcctacaagccactctttgtttttaaaacagtggggaaatacgtttacagagattgtgagcttcagagaatgcatgtgatggtgtgtattacatgctaattcatataagctgta

SEQ ID NO: 110731 - DNA, 120 bp, Artificial Sequence
  ENSG00000100095_49 (sequence is synthesized)
tctgtcagctaccaccctgtgctttaaaaatgcacacactcaaccctctttagcttggagctcagctttttgcttttttttttttttttttgtagaattatttagctaacataagtattc

SEQ ID NO: 110732 - DNA, 120 bp, Artificial Sequence
  ENSG00000100095_50 (sequence is synthesized)
tgattgctacctgatggccattcttacttagtttcatagatgtgctttaactatgatcctttgaagctcaccccttggagagcctacagaacctcaggctgatagctttgaagactgcca

SEQ ID NO: 110733 - DNA, 120 bp, Artificial Sequence
  ENSG00000100095_51 (sequence is synthesized)
aacagcccagaaggaagcaaagcatctgcataatcaggagggttgtataacaagtagtgatttggcaaatatgtgggtagctttaggctgaggcacgggcctcaggcaaaaatgcccttc

SEQ ID NO: 110734 - DNA, 120 bp, Artificial Sequence
  ENSG00000100095_52 (sequence is synthesized)
gagtgaatccgaagggcatgatcttcctatgtccttgactaggcatgacgagtcatttgaggtcagatattatttgagttgttcagcacccccaaaggtaggcattctcctgggaaattt

SEQ ID NO: 110735 - DNA, 120 bp, Artificial Sequence
  ENSG00000100095_53 (sequence is synthesized)
tcatttccattttatcgccaaacaaaataaaaagcaaaacaaactttctaagctagaataatgaaattaagtcattttccactttgtatatattgatgctaataaaacagatgaaaaaga

SEQ ID NO: 110736 - DNA, 120 bp, Artificial Sequence
  ENSG00000100095_54 (sequence is synthesized)
aaaggaagggagggagggagaaaggagaagttggtttagaggccagccggacgagctttgggcaccgcccttaggagggccaccctcagagtctgacagcaggtgaaggtcctaaatctc

SEQ ID NO: 110737 - DNA, 120 bp, Artificial Sequence
  ENSG00000100095_55 (sequence is synthesized)
ggacgtctcgcctgccccactgcgtttgtgagtcctgtttaatgaattgggcccccagtaggtagaagcagattcactttctcttgttcatgatggaaggctgggctgctaggaggcctt

SEQ ID NO: 110738 - DNA, 120 bp, Artificial Sequence
  ENSG00000100095_56 (sequence is synthesized)
ctgcttttcgacaggggcttttattatcattactatgacaaaacagtacctaacactgattgggagcacacatactataacatttacagtaaatttatcacgcgttgctctaagtcttct

SEQ ID NO: 110739 - DNA, 120 bp, Artificial Sequence
  ENSG00000100095_57 (sequence is synthesized)
acagtgcatgcagtgctggagaaactaagaagactgacgactcaattcacggtaggaggcatcaaggaaggcttcctggagaaggagaaatgaagattgagtattgaaagacaagacgta

SEQ ID NO: 110740 - DNA, 120 bp, Artificial Sequence
  ENSG00000100095_58 (sequence is synthesized)
gtcataatggatgcgcaggttaggtgtcaggtgaaaagcaagaagaagatttcataattaaacaccaccaccgtccatcatttactaacggaggagtccctggcatgtgacaacccaggg

SEQ ID NO: 110741 - DNA, 120 bp, Artificial Sequence
  ENSG00000100097_0 (sequence is synthesized)
atctctctcgggtggagtcttctgacagctggtgcgcctgcccgggaacatcctcctggactcaatcatggcttgtggtctggtcgccagcaacctgaatctcaaacctggagagtgcct

SEQ ID NO: 110742 - DNA, 120 bp, Artificial Sequence
  ENSG00000100097_1 (sequence is synthesized)
tcgagtgcgaggcgaggtggctcctgacgctaagagcttcgtgctgaacctgggcaaagacagcaacaacctgtgcctgcacttcaaccctcgcttcaacgcccacggcgacgccaacac

SEQ ID NO: 110743 - DNA, 120 bp, Artificial Sequence
  ENSG00000100097_2 (sequence is synthesized)
ggaggctgtctttcccttccagcctggaagtgttgcagaggtgtgcatcaccttcgaccaggccaacctgaccgtcaagctgccagatggatacgaattcaagttccccaaccgcctcaa

SEQ ID NO: 110744 - DNA, 120 bp, Artificial Sequence
  ENSG00000100097_3 (sequence is synthesized)
cctggaggccatcaactacatggcagctgacggtgacttcaagatcaaatgtgtggcctttgactgaaatcagccagcccatggcccccaataaaggcagctgcctctgctccctctgaa

SEQ ID NO: 110745 - DNA, 120 bp, Artificial Sequence
  ENSG00000100097_4 (sequence is synthesized)
agagtgccttcgagtgcgaggcgaggtggctcctgacgctaagagttaggtgaccttggaccagtcaaccaacctcacctagcctcagtttgttagaaaaacaaggggggaggtggttgt

SEQ ID NO: 110746 - DNA, 120 bp, Artificial Sequence
  ENSG00000100097_5 (sequence is synthesized)
gcaacctgaatctcaaacctggagagtgccttcgagtgcgaggcgaggtggctcctgacgctaagagtgagttcttccagcaaggtgcgttcatgggatactgagtgacagattagtcgg

SEQ ID NO: 110747 - DNA, 120 bp, Artificial Sequence
  ENSG00000100097_6 (sequence is synthesized)
ctcctggactcaatcatggcttgtggtctggtcgccagcaacctgaatctcaaacctggagagtgccttcgagtgcgaggcgaggtggctcctgacgctaagagtgagttcttccagcaa

SEQ ID NO: 110748 - DNA, 120 bp, Artificial Sequence
  ENSG00000100097_7 (sequence is synthesized)
ctgacagctggtgcgcctgcccgggaacatcctcctggactcaatcatggcttgtgcttccccttggcttggtcagaggatgccgggcgggaacaaccccactcccacccccagccaccc

SEQ ID NO: 110749 - DNA, 120 bp, Artificial Sequence
  ENSG00000100097_8 (sequence is synthesized)
gtccagcagggagggcgtggccggccaagcccacatctcctccctggccgggagcgggttaacggccagccgccgatgctgcgttttctgggtgactcacttcccccgcagggtctgggc

SEQ ID NO: 110750 - DNA, 120 bp, Artificial Sequence
  ENSG00000100099_0 (sequence is synthesized)
gtgacctaaggcctctctgccgcgcgcgcagagccaaggcactgatgtttgaactggaaacttcaaaacgtttaataagagtcttcaggatgggtttgaactagacaagctagaaatttc

SEQ ID NO: 110751 - DNA, 120 bp, Artificial Sequence
  ENSG00000100099_1 (sequence is synthesized)
tttagaacaccagctctagcatgcatctcccacttttggctttcctggagaggagcttgaagaggtggttctgcagacagccacagtgatacttaggaaaccagaggaatggatttgact

SEQ ID NO: 110752 - DNA, 120 bp, Artificial Sequence
  ENSG00000100099_2 (sequence is synthesized)
tttctgctaggattctctgttatagtttctccctgagttgtaagaggcatggaaatatacatgaaactgaagaacctgcaaggaagggaagtggaactttccatgctgagtgaaaactaa

SEQ ID NO: 110753 - DNA, 120 bp, Artificial Sequence
  ENSG00000100099_3 (sequence is synthesized)
ccaagtggcagttgtgactgaaaacactgaaacctaccacgtccagattcactggattgggggatagaggaacggtcacagctagggagaaagaagtgataccggaaaagaaaacctaaa

SEQ ID NO: 110754 - DNA, 120 bp, Artificial Sequence
  ENSG00000100099_4 (sequence is synthesized)
tgaagagaatgaggatgactgcacagtagatggccacctctacctccacagaggcaaagtcagcctcgtggtggaattatttttttctttatgatggttccaaggtaaaggaagaaggcg

SEQ ID NO: 110755 - DNA, 120 bp, Artificial Sequence
  ENSG00000100099_5 (sequence is synthesized)
atccaacaagagctggcatttgttacttttatccttcccagaccctgctagaccaacaggagttgctttgtggacagattgctggagttgtccgctgtgtttctgacatttctgactctc

SEQ ID NO: 110756 - DNA, 120 bp, Artificial Sequence
  ENSG00000100099_6 (sequence is synthesized)
ctcctactcttgttcgtctgagaaaactgaagtttgccataaaagttgatggagattacctttgggtgctgggctgtgctgtggagctccctgatgtcagctgcaagcggtttctggatc

SEQ ID NO: 110757 - DNA, 120 bp, Artificial Sequence
  ENSG00000100099_7 (sequence is synthesized)
agctagttggattctttaatttttacaatggacctgtttccctagcttatgagaactgttctcaggaagaactgagcacggagtgggacaccttcatcgagcaaattctgaaaaacacca

SEQ ID NO: 110758 - DNA, 120 bp, Artificial Sequence
  ENSG00000100099_8 (sequence is synthesized)
gtgatctgcataagattttcaattccctctggaacttggaccaaactaaagtggagcccctgttgttgctgaaggcagcccgcattctgcagacctgccagcgctcgcctcacattctcg

SEQ ID NO: 110759 - DNA, 120 bp, Artificial Sequence
  ENSG00000100099_9 (sequence is synthesized)
ctggctgcatcctctataaaggactgattgtcagcacccaactcccgccctccctcaccgccaaggtcctgcttcaccgaacagcacctcaggagcagagactccctacgggagaggatg

SEQ ID NO: 110760 - DNA, 120 bp, Artificial Sequence
  ENSG00000100099_10 (sequence is synthesized)
ccccgcaggaacatggagcggcattgcccccgaatgtccagattatccctgtttttgtgaccaaagaggaagccattagtctccacgagttcccggtggaacagatgacaaggtctctag

SEQ ID NO: 110761 - DNA, 120 bp, Artificial Sequence
  ENSG00000100099_11 (sequence is synthesized)
catctccagcaggactccaggatggttcagcccagcaccatccaaagggtgggagcacatctgccctgaaagaaaacgccactggccatgtggaatccatggcctggaccaccccagatc

SEQ ID NO: 110762 - DNA, 120 bp, Artificial Sequence
  ENSG00000100099_12 (sequence is synthesized)
ccacatcccctgacgaagcttgtccagatggcaggaaggagaacggatgcttgtctggccatgatctggagagcatcaggcccgcaggactgcacaactctgccaggggtgaggttcttg

SEQ ID NO: 110763 - DNA, 120 bp, Artificial Sequence
  ENSG00000100099_13 (sequence is synthesized)
gcctcagctcctccctggggaaggaactagtctttctccaagaagaactcgacttgtctgaaatccacattccagaggctcaggaagtggaaatggcctcaggtcattttgccttcctac

SEQ ID NO: 110764 - DNA, 120 bp, Artificial Sequence
  ENSG00000100099_14 (sequence is synthesized)
atgtgcctgttccagatggcagggctccttactgcaaggcatctctcagcgcctccagcagcctggaacccacgcctcctgaggacacagccatcagcagcttgcgccctccctctgctc

SEQ ID NO: 110765 - DNA, 120 bp, Artificial Sequence
  ENSG00000100099_15 (sequence is synthesized)
cccccattcccagagcagaccctctccccagaaggacccgcaggcccttgttattgcctcgcttagatccaggacagagaggaaacaagcttcccacgggggaacaaggcctggatgagg

SEQ ID NO: 110766 - DNA, 120 bp, Artificial Sequence
  ENSG00000100099_16 (sequence is synthesized)
atgttgatggggtctgtgaaagccacgcagcccctggtctggaatgcagttcaggctcagcaaactgtcagggtgctggcccctctgcagatggaatcagctccaggctgacaccagcag

SEQ ID NO: 110767 - DNA, 120 bp, Artificial Sequence
  ENSG00000100099_17 (sequence is synthesized)
agtcctgcatggggctcgtgaggatgaatctctacactcactgcgtcaaagggctggtgctgtccctgctggctgaggagccgctgctgggagacagcgcagccatagaggaagtgtacc

SEQ ID NO: 110768 - DNA, 120 bp, Artificial Sequence
  ENSG00000100099_18 (sequence is synthesized)
acagcagcctggcttcactgaatgggctggaagtccacctgaaagagacgctgcccagggatgaggcagcctccacgagcagcacctacaacttcacacattacgaccgcattcagagct

SEQ ID NO: 110769 - DNA, 120 bp, Artificial Sequence
  ENSG00000100099_19 (sequence is synthesized)
tgctgatggcaaacctgccgcaggtggccaccccgcaggatcgccgcttcctccaggccgtcagcctgatgcatagcgaatttgcccagctgcccgcgctttatgaaatgactgtcagaa

SEQ ID NO: 110770 - DNA, 120 bp, Artificial Sequence
  ENSG00000100099_20 (sequence is synthesized)
atgcctccacggctgtgtacgcctgttgcaaccccatccaggagacatatttccagcagctggcacctgcagcacggagctccggcttcccaaaccctcaggatggcgccttcagcctct

SEQ ID NO: 110771 - DNA, 120 bp, Artificial Sequence
  ENSG00000100099_21 (sequence is synthesized)
ccggcaaagcaaagcagaagctgctgaagcacggggtgaacttgctctgaactgcacccaggaggtgactgggaaggagaaaaccagcaaaggaagctctgccttttataattgaaaagg

SEQ ID NO: 110772 - DNA, 120 bp, Artificial Sequence
  ENSG00000100099_22 (sequence is synthesized)
cccctctattttatttttcttgaaaacattcccttttttaggaaccaaatgatatttgagtttttgttattccttttgcagattgggatgtgttttgggggcaggggttagttcttcagg

SEQ ID NO: 110773 - DNA, 120 bp, Artificial Sequence
  ENSG00000100099_23 (sequence is synthesized)
tcggcagacccagagcacttgataaagaactgtatttaatcggtagtgttggggccgggacgggcttggctccctctctgccatactgagcctgaggtatttcatatctcctgctgttcc

SEQ ID NO: 110774 - DNA, 120 bp, Artificial Sequence
  ENSG00000100099_24 (sequence is synthesized)
atcccagcttgaattggtgccacaagcttccaagttggcattttttctagaacctgatcgtccactagcccagagtgtgtgtgttcaacccccacaccaggtggtggtaggcggtgtgac

SEQ ID NO: 110775 - DNA, 120 bp, Artificial Sequence
  ENSG00000100099_25 (sequence is synthesized)
tgcacagcgaggtgccggatctgtgagcaggccgactccactcccacgccgcaggtaggtttctccagtgcgctcttgctgggaggtccggatcgttcctgcagggaagcggcagcacac

SEQ ID NO: 110776 - DNA, 120 bp, Artificial Sequence
  ENSG00000100099_26 (sequence is synthesized)
ggagaccacttggttgaattctgttggaactctactcaaatctaggggcgtcttctttggacccacaatgggggcaagccttaataatatggaagggagtttgggctttagagatccctt

SEQ ID NO: 110777 - DNA, 120 bp, Artificial Sequence
  ENSG00000100099_27 (sequence is synthesized)
tataaaagctctgggggctgagccctgagaattcagtgacaacaggaccaacctgcgctgcctttgactacaagtgggccgtgcagctggttcctctcgagcgagtgtccctaaatagga

SEQ ID NO: 110778 - DNA, 120 bp, Artificial Sequence
  ENSG00000100099_28 (sequence is synthesized)
gtttacaagatgtctgggggtaaaagcactgtgcttttcagtggtggctgcgtgaaagggagcgacactcagctgtgtgttcctgggcttgtgtggtacttagaacctcagttctattac

SEQ ID NO: 110779 - DNA, 120 bp, Artificial Sequence
  ENSG00000100099_29 (sequence is synthesized)
gttatagtcagacatttttttgacagtatgagacagactgcaggatgaaaatatttgtcaaaatcttaactgaatgtttactggaagtacttgagattccatttgagagttgtattgtta

SEQ ID NO: 110780 - DNA, 120 bp, Artificial Sequence
  ENSG00000100099_30 (sequence is synthesized)
ataatttcatgtcagtgaactgatatctgatgtttatgatatggtgtctttttcttgaaacaagcttccaagggctagaaataaaatagccaaaaaatgctggagttctgagtaattaaa

SEQ ID NO: 110781 - DNA, 120 bp, Artificial Sequence
  ENSG00000100099_31 (sequence is synthesized)
ggtaggcggggcggcgcgtgacctaaggcctctctgccgcgcgcgcaggtacggggcagaagtcgcaggtacccagctgctgcccacatttctggtccagagtcccgaaccccgagcact

SEQ ID NO: 110782 - DNA, 70 bp, Artificial Sequence
  ENSG00000100099_32 (sequence is synthesized)
aaatagccaaaaaatgctggagttctgagtaattaaatggcagcatttttttgtgacaaaggtaagggtt

SEQ ID NO: 110783 - DNA, 120 bp, Artificial Sequence
  ENSG00000100099_33 (sequence is synthesized)
ccctgggttcagtgtggctgggtaaggaccgtctgtttgtagggctgccaggctgcagcctgctgctccagggagcaccagctgcagctgatccaatacaccaagcctgtgtctccctct

SEQ ID NO: 110784 - DNA, 120 bp, Artificial Sequence
  ENSG00000100099_34 (sequence is synthesized)
tctatcacctctctccaggatctctgctgtctcttggatcccatctgcctagatggaagaggatcctatccgaagctaggataaatgttgtcttactcctctgctatgttctcccagaaa

SEQ ID NO: 110785 - DNA, 120 bp, Artificial Sequence
  ENSG00000100099_35 (sequence is synthesized)
aaattgattacaagttctctgctgtggttgctgcagctccaggaagtccccgcaatgtctcacgttgtctttgaccagtggtccccagtaccaggccagcgaagacaactttataatgtc

SEQ ID NO: 110786 - DNA, 120 bp, Artificial Sequence
  ENSG00000100099_36 (sequence is synthesized)
atttgtgttgtgaaaattcttccactgacccaaaatggaaccgtacaaagcctatccgtgtatatggaaaagtctcatgcacctggattaactcagaaaaagtaaagtcctgaaacttca

SEQ ID NO: 110787 - DNA, 120 bp, Artificial Sequence
  ENSG00000100099_37 (sequence is synthesized)
agaccatgtggttgtatagttaaggttcagtgtttcaaataagagcagtcattgtgggcgcctcgtttttttttctagctactcgtgtcttctccggcagatggtctaacggctggatag

SEQ ID NO: 110788 - DNA, 120 bp, Artificial Sequence
  ENSG00000100099_38 (sequence is synthesized)
aggcatatttttagtttgaatttcctgcgcttacagaatggttttatctaatttgtagctactggggttctttattctctggggccacctgaaggctttcaaacacagtaataagccctc

SEQ ID NO: 110789 - DNA, 120 bp, Artificial Sequence
  ENSG00000100099_39 (sequence is synthesized)
ctcgggctgggaaacaggaagctgtgttttaaatgccgtgatcactggattaaaggaaacatggctccactctgttctcttgccaggtggaattatttttttctttatgatggttccaag

SEQ ID NO: 110790 - DNA, 120 bp, Artificial Sequence
  ENSG00000100099_40 (sequence is synthesized)
aaaacaagtagcaacagaagacagacttacaagggcactaagtctctggtcactcaaggaccaatcaaaggaatgcgctgttaggccagaaaggagtctctgaagcaaatgattggaagg

SEQ ID NO: 110791 - DNA, 120 bp, Artificial Sequence
  ENSG00000100099_41 (sequence is synthesized)
ttttatgctacctacccctgtacaagttatgcgaaggaaaccaagccatctgcatgtttatttcctctgctcataataggaaaatggatgttatggagcttcaagaatcgagttacccac

SEQ ID NO: 110792 - DNA, 120 bp, Artificial Sequence
  ENSG00000100099_42 (sequence is synthesized)
cagaaccctaatggtaaagctatgattttaggcatgctgtcaaatccctgctttcagaccctccttaacttcatattgtgagactgctcggtcaagtgccaggagattgtgattgggaga

SEQ ID NO: 110793 - DNA, 120 bp, Artificial Sequence
  ENSG00000100099_43 (sequence is synthesized)
gggtaaggcaaacagcgactgccagaaagaccttttgcaggatgtggaggcgtcctcaggagagttatttcgatttattctgaagcctgagttggagcagatccctttcttagcttatat

SEQ ID NO: 110794 - DNA, 120 bp, Artificial Sequence
  ENSG00000100099_44 (sequence is synthesized)
cttcttcttgtaaaagtgcttttcaacctttctctcccgaacatcttccttctccaaagctgggagtcatgttgcctgcagggactctttccttactgggcccaggagttcgaggtgcag

SEQ ID NO: 110795 - DNA, 120 bp, Artificial Sequence
  ENSG00000100099_45 (sequence is synthesized)
tgtcctggctgaggaatgcactcacagcacccctttccgagcccacgtgtgggttggatgcatcacgccagtgcagctattgccccgctgccctctctggctcaggggaaagtcctgttc

SEQ ID NO: 110796 - DNA, 120 bp, Artificial Sequence
  ENSG00000100099_46 (sequence is synthesized)
aggagctggagggggaggtaggcggggcggcgcgtgacctaaggcctctctgccgcgcgcgcagagcgttatccagactagcgagtgggaggcagatgtaaaatctggaacgcagatttt

SEQ ID NO: 110797 - DNA, 120 bp, Artificial Sequence
  ENSG00000100099_47 (sequence is synthesized)
cgtctgagaaaactgaagtttgccataaaagttgatggagattacctttgggtaagttgaatggcagaatcagtgctgaagtgttgcaatgataagtttaggaagttatgttgtttctga

SEQ ID NO: 110798 - DNA, 120 bp, Artificial Sequence
  ENSG00000100099_48 (sequence is synthesized)
gtcttgaatttagaattatctgcccccaccaacctcatccatgtactgtgtttagtaatcaccctcgcttcctgtggtactctctgcaggttttcatcatcaagtgctttccaaaacatt

SEQ ID NO: 110799 - DNA, 120 bp, Artificial Sequence
  ENSG00000100099_49 (sequence is synthesized)
tctaacatattctgcattgcacacagctggtttctcctttcctttcaaagacttaggccaacttgtggaaattctgtttactctgtgttgtaaattgagtttttatcatcatcttttctt

SEQ ID NO: 110800 - DNA, 120 bp, Artificial Sequence
  ENSG00000100099_50 (sequence is synthesized)
ctccatgctctctacacttactgggtaagtgacccagaaaaaaatgatagatatatgttaggttttagagaacccattaaaaaaaaaaaaagaatattgcttgagtccaggagttcgata

SEQ ID NO: 110801 - DNA, 120 bp, Artificial Sequence
  ENSG00000100099_51 (sequence is synthesized)
tcagcctgggcaacatagtaagacccccgtctctataaaaaatttaaaaattaaccgggtgtggtggctcatgtctgtggtcttagctactggggaggctgaggggaggattgcttgagc

SEQ ID NO: 110802 - DNA, 120 bp, Artificial Sequence
  ENSG00000100099_52 (sequence is synthesized)
aatagtagcatataatctaaagtgctgtttcccatggctacatttattttaaggcttcctgaggtaaagggatgcttaagtgtgggatgctatattcaactttgtaggtattatttccaa

SEQ ID NO: 110803 - DNA, 120 bp, Artificial Sequence
  ENSG00000100099_53 (sequence is synthesized)
cattttattacgaaaattttttaaagtactgaacagttgaattttacagtgaatactcatatacctcctcaattctacagttagcattttattatagttgttttattacctatctattca

SEQ ID NO: 110804 - DNA, 120 bp, Artificial Sequence
  ENSG00000100099_54 (sequence is synthesized)
ttcctttatcctcccattaattcaaattatttttattttattttattgagacagggtctcaatctgttgctcaggctggagtgctgaggtgtgaccttggtttactgcaacctccgcctc

SEQ ID NO: 110805 - DNA, 88 bp, Artificial Sequence
  ENSG00000100099_55 (sequence is synthesized)
gtgctgaggtgtgaccttggtttactgcaacctccgcctcccaggctcaaacgatcctcccatctcagcctcctgagttgctaggacc

SEQ ID NO: 110806 - DNA, 85 bp, Artificial Sequence
  ENSG00000100099_56 (sequence is synthesized)
acactgtaacccagccccaaattattttgttacagttttcaaagtaagttgcacacattagtgtactctccacacagatactctc

SEQ ID NO: 110807 - DNA, 120 bp, Artificial Sequence
  ENSG00000100099_57 (sequence is synthesized)
ttcaaagtaagttgcacacattagtgtactctccacacagatactctctctatcatgcatatcatcaactaaaatttaatgtttggggctgagcgctgtggctcaggcctgtaatcccag

SEQ ID NO: 110808 - DNA, 120 bp, Artificial Sequence
  ENSG00000100099_58 (sequence is synthesized)
tgtacaaccctttccccttttctcccttcctgattgtgagcatgctgatgggtgggcatgatgcctcttgccctgcacaggtggagcccctgttgttgctgaaggcagcccgcattctgc

SEQ ID NO: 110809 - DNA, 120 bp, Artificial Sequence
  ENSG00000100099_59 (sequence is synthesized)
tgatgttttcattttatgtgatggaatagagtcatggaacctggtcagacatcaagccacctgtatcaccatggggattgtgcttcagaaggaaagtggaggatagggtggagcccctgt

SEQ ID NO: 110810 - DNA, 120 bp, Artificial Sequence
  ENSG00000100099_60 (sequence is synthesized)
gactcctttctcggacactgccattgcctcgtcatagaggcagggcagccccagctactcactctgagcctcagggtccttgtctgtgaaatgggaccataccaccactgcagagcttat

SEQ ID NO: 110811 - DNA, 120 bp, Artificial Sequence
  ENSG00000100099_61 (sequence is synthesized)
gtgaggggcaaagcagagactgtatgcagagcacattgcatagctgccagtatgtcaaaaaagccagcactccacagttcctttatgcaatacttataactccaggatctgtggctgctg

SEQ ID NO: 110812 - DNA, 120 bp, Artificial Sequence
  ENSG00000100099_62 (sequence is synthesized)
gctcataatacattattcagaaaaggcatctctagtgtggctggccggctacgctttcacacatcagctaacacaggctatttctagagtgagtgcctcaaactggtctcctgggacctt

SEQ ID NO: 110813 - DNA, 120 bp, Artificial Sequence
  ENSG00000100099_63 (sequence is synthesized)
ttccttcgggaagagatccacatgttcttcacaggagaccagaaaaccagcacaacggccacgggtcctctgggcatgtaggtcttctctgtctcctcactagcacacactggcttgggt

SEQ ID NO: 110814 - DNA, 120 bp, Artificial Sequence
  ENSG00000100099_64 (sequence is synthesized)
cattgtcacgcagtgcacacctttgtgccatgacaaagacacagggccaactcttccactatctccaagtctagtgtttgaacatttatgtacagacaaataaatgaaaaaaaaaaaaac

SEQ ID NO: 110815 - DNA, 120 bp, Artificial Sequence
  ENSG00000100099_65 (sequence is synthesized)
gcagaggccgtggagcagttgtttcacttggtcttgtcaggaccccaagtcctccaatgtcattctcctcagtagtgaagccattggtgaggctgaaagaaaatgttttcttccacgagc

SEQ ID NO: 110816 - DNA, 120 bp, Artificial Sequence
  ENSG00000100099_66 (sequence is synthesized)
taggcctggatagttgttttttcttcaaaccaaggaaatcttggttgaattcgacttcccataagaatttgatgtctctttatgtcaaagagatgttagacttttcagagacagactgta

SEQ ID NO: 110817 - DNA, 70 bp, Artificial Sequence
  ENSG00000100099_67 (sequence is synthesized)
tatgtcaaagagatgttagacttttcagagacagactgtaaaggatgtgtctttagaaagatttaggggg

SEQ ID NO: 110818 - DNA, 71 bp, Artificial Sequence
  ENSG00000100099_68 (sequence is synthesized)
ctccagcctgggtagcgaaaacaaactcttctaaaatacttccattttatatttatttaattgtttttata

SEQ ID NO: 110819 - DNA, 120 bp, Artificial Sequence
  ENSG00000100099_69 (sequence is synthesized)
atacttccattttatatttatttaattgtttttatattgaaaaaaaagccatgcatgctcattgagaataaaattgcccatctttgaactgtacagggatagccactgccagcatctggc

SEQ ID NO: 110820 - DNA, 120 bp, Artificial Sequence
  ENSG00000100099_70 (sequence is synthesized)
atatctccttccagtcctttttttgttttgtgtatgaagctgtggtttccagcgtatcatgaggctgtctttttacatgtattagtgaacaggcatgtaaaatgctggtagggctctatt

SEQ ID NO: 110821 - DNA, 120 bp, Artificial Sequence
  ENSG00000100099_71 (sequence is synthesized)
cagcctcctcagccactgtggctatgggtgtcaattcaagtagcctttctgggaaacactttgataatgagaacgttaaggatgccctttatttttttcctaataatttgacttctagga

SEQ ID NO: 110822 - DNA, 120 bp, Artificial Sequence
  ENSG00000100099_72 (sequence is synthesized)
atatatcttaaggaaataatgtaactgctgaaaaaaatttatactcaaaacttgatcacaacaagctttatgaaagtgaaaaatcagacaaaacttgaatgcttaaagtaggaggtggca

SEQ ID NO: 110823 - DNA, 120 bp, Artificial Sequence
  ENSG00000100099_73 (sequence is synthesized)
aattatggcctgtgggccacctgcctacaaatgaagttttatttggctgcttttgagctataatagcagaaccaagtaggtgggacagagaccatatgccctgcaaagccaaaaatattt

SEQ ID NO: 110824 - DNA, 120 bp, Artificial Sequence
  ENSG00000100099_74 (sequence is synthesized)
actgtcttgtcttttgcacagaaagtttactaattactggtctaaggtaggtaaatgattaatttactcatatcacttaaaccttcataaaattttaatcagccgtttaaaatggccaaa

SEQ ID NO: 110825 - DNA, 120 bp, Artificial Sequence
  ENSG00000100099_75 (sequence is synthesized)
gatgttttagtggcaggaaatgcgtgttactgttttaagcagaaatatgaaattttatatagtgtggcctcaaaagtataaaaactgcataggcttaaggaaaaaatacccaatattaat

SEQ ID NO: 110826 - DNA, 120 bp, Artificial Sequence
  ENSG00000100099_76 (sequence is synthesized)
agtactagcttggggatgagggattgtatgtgattttttttttcaacgctttgtctagagtaaattgaggttaggcttagtaatctaaaacatagttttttaaaaatcaccaaaaaagga

SEQ ID NO: 110827 - DNA, 120 bp, Artificial Sequence
  ENSG00000100099_77 (sequence is synthesized)
agaacaccatatcattctaagattgaaagtcattttggctagaagagcagttcttgtttggtttggttttgttttggtgggttcttttggaaccctcagattgaaacgagagatgttttc

SEQ ID NO: 110828 - DNA, 120 bp, Artificial Sequence
  ENSG00000100099_78 (sequence is synthesized)
tcaggttttaggccctgattgtgaaccagaacaaacgagagattgggtatagcattttgtttaagtcaaatcctttatcgtgagagtcacagtattttgacatttttattataatggaat

SEQ ID NO: 110829 - DNA, 120 bp, Artificial Sequence
  ENSG00000100099_79 (sequence is synthesized)
ttatgtgaattctacatcagggctgtggcagatgtgactgtattctagaatatgagttccccaaaggtgtaaaagagaacaggaatcctcaattttattcccagaagggagagagactga

SEQ ID NO: 110830 - DNA, 120 bp, Artificial Sequence
  ENSG00000100099_80 (sequence is synthesized)
gaaaatcagaacgtagagtgtgatgtgagtttgggtggagctgctgccttgcagcctgtgtgggcccaggttcttgcttcatcccagccatagtgggagccagcagcttgggggagcttc

SEQ ID NO: 110831 - DNA, 120 bp, Artificial Sequence
  ENSG00000100099_81 (sequence is synthesized)
tgttccatctgcttggctcttagcatgtggttgggacaagctttctgggcctggctaagttttatgaacagatggcacagcaaattcctgatggttaggtcaagaggagaatgtggtgcc

SEQ ID NO: 110832 - DNA, 120 bp, Artificial Sequence
  ENSG00000100100_0 (sequence is synthesized)
agttctaaagagaggctgtttaccagaacagcataacaagggcaggtctgactgcaaggctgggactgggaggcagagccgccgccaagggggcctcggttaaacactggtcgttcaatc

SEQ ID NO: 110833 - DNA, 120 bp, Artificial Sequence
  ENSG00000100100_1 (sequence is synthesized)
acctgcaagacgaaggaggcaaggatgctgttggcctgggtacaagcattcctcgtcagcaacatgctcctagcagaagcctatggatctggaggctgtttctgggacaacggccacctg

SEQ ID NO: 110834 - DNA, 120 bp, Artificial Sequence
  ENSG00000100100_2 (sequence is synthesized)
taccgggaggaccagacctcccccgcgccgggcctccgctgcctcaactggctggacgcgcagagcgggctggcctcggcccccgtgtcgggggccggcaatcacagttactgccgaaac

SEQ ID NO: 110835 - DNA, 120 bp, Artificial Sequence
  ENSG00000100100_3 (sequence is synthesized)
ccggacgaggacccgcgcgggccctggtgctacgtcagtggcgaggccggcgtccctgagaaacggccttgcgaggacctgcgctgtccagagaccacctcccaggccctgccagccttc

SEQ ID NO: 110836 - DNA, 120 bp, Artificial Sequence
  ENSG00000100100_4 (sequence is synthesized)
acgacagaaatccaggaagcgtctgaagggccaggtgcagatgaggtgcaggtgttcgctcctgccaacgccctgcccgctcggagtgaggcggcagctgtgcagccagtgattgggatc

SEQ ID NO: 110837 - DNA, 120 bp, Artificial Sequence
  ENSG00000100100_5 (sequence is synthesized)
agccagcgggtgcggatgaactccaaggagaaaaaggacctgggaactctgggctacgtgctgggcattaccatgatggtgatcatcattgccatcggagctggcatcatcttgggctac

SEQ ID NO: 110838 - DNA, 120 bp, Artificial Sequence
  ENSG00000100100_6 (sequence is synthesized)
tcctacaagagggggaaggatttgaaagaacagcatgatcagaaagtatgtgagagggagatgcagcgaatcactctgcccttgtctgccttcaccaaccccacctgtgagattgtggat

SEQ ID NO: 110839 - DNA, 120 bp, Artificial Sequence
  ENSG00000100100_7 (sequence is synthesized)
gagaagactgtcgtggtccacaccagccagactccagttgaccctcaggagggcaccaccccccttatgggccaggccgggactcctggggcctgagcccccccagtgggcaggagccca

SEQ ID NO: 110840 - DNA, 120 bp, Artificial Sequence
  ENSG00000100100_8 (sequence is synthesized)
tgcagacactggtgcaggacagcccaccctcctacagctaggaggaactaccactttgtgttctggttaaaaccctaccactcccccgcttttttggcgaatcctagtaagagtgacaga

SEQ ID NO: 110841 - DNA, 120 bp, Artificial Sequence
  ENSG00000100100_9 (sequence is synthesized)
agcaggtggccctgtgggctgagggtaaggctgggtagggtcctaacagtgctccttgtccatcccttggagcagattttgtctgtggatggagacagtggcagctcccacagtgatgct

SEQ ID NO: 110842 - DNA, 120 bp, Artificial Sequence
  ENSG00000100100_10 (sequence is synthesized)
attgcctgcacccctggaactgaaccagggatagacggggagctcccccaggctcctctgtgctttactaagatggcctcagtctccactgtgggcttgagtggcatacactgttattca

SEQ ID NO: 110843 - DNA, 120 bp, Artificial Sequence
  ENSG00000100100_11 (sequence is synthesized)
tggttaaggtaaagcaggtcaagggatggcattgaaaaaatatatttagtttttaaaatatttgggatggaactccctactgacctctgagaactggaaacgagtttgtacagaagtcag

SEQ ID NO: 110844 - DNA, 120 bp, Artificial Sequence
  ENSG00000100100_12 (sequence is synthesized)
aactttgggttgggaatgagatctaggttgtggctgctggtatgcttcagcttgctggcaatgatgtgccttgacaaccgtgggccaggcctgggcccagggactcttcctgtttcataa

SEQ ID NO: 110845 - DNA, 120 bp, Artificial Sequence
  ENSG00000100100_13 (sequence is synthesized)
ggaaaggaagaattgcactgagcattccacttaggaagaggatagagaaggatctgctccgcctttggccacaggagcagaggcagacctgggatgccccagtttctcttcagggatgga

SEQ ID NO: 110846 - DNA, 120 bp, Artificial Sequence
  ENSG00000100100_14 (sequence is synthesized)
tagtgacctgtcttcattttgcacaggtaagagagtagttagctaacctatgggaattatactgtggggccttgtgagctgcttctaagaggctaacctggaaactaagctcagaggcaa

SEQ ID NO: 110847 - DNA, 120 bp, Artificial Sequence
  ENSG00000100100_15 (sequence is synthesized)
ggtaataaagcacttcagggcttgctccccaagtgggcctgatttagcaggtggtcctgcgggcgtccaggtcagcaccttcctgtagggcactggggctagggtcacagcccctaactc

SEQ ID NO: 110848 - DNA, 120 bp, Artificial Sequence
  ENSG00000100100_16 (sequence is synthesized)
ataaagcaatcaaagaaccattagaaagggctcattaagccttttggacacaggaccccagagaggaaaaagtgacttgcccaaggtcgtaagcaagctactggcatggcaagagcccag

SEQ ID NO: 110849 - DNA, 120 bp, Artificial Sequence
  ENSG00000100100_17 (sequence is synthesized)
cttcctgacggagcgcaacatttctccactgcactgtgctagcagctcagcagggcctctaacctgtgatgtcacactcaagaggccttggcagctcctagccatagagcttcctttcca

SEQ ID NO: 110850 - DNA, 120 bp, Artificial Sequence
  ENSG00000100100_18 (sequence is synthesized)
gaacccttccactgcccaatgtggagacgggttagtggggctttctatggagccatctgctttggggacctagacctcaggtggtctcttggtgttagtgatgctggagaagagaatatt

SEQ ID NO: 110851 - DNA, 120 bp, Artificial Sequence
  ENSG00000100100_19 (sequence is synthesized)
actggtttctacttttctataaaggcatttctctatatacatgttttatatacctcattctgacacctgcatatagtgtgggaaattgctctgcatttgacttaattaaaaaaaaaaaaa

SEQ ID NO: 110852 - DNA, 120 bp, Artificial Sequence
  ENSG00000100100_20 (sequence is synthesized)
gaggctaggtctctccgccgcgcgtcctgaggagtggcttttggcccctcagcgtttattgaccgtttgcggagcgtctgcagtgtgctagacccacactgctcacaaccccagctcccc

SEQ ID NO: 110853 - DNA, 120 bp, Artificial Sequence
  ENSG00000100100_21 (sequence is synthesized)
aacctcccctgacacacaccgcgggaagaagtcgtttgaggcatctgagcttcagagaagttaagcgatttaccaaaggcaatggcaggggacagatttgaattcacgtttcttagattc

SEQ ID NO: 110854 - DNA, 120 bp, Artificial Sequence
  ENSG00000100100_22 (sequence is synthesized)
cagagcgcaggctttttgctcccaaagcagcaagagagttttctaggtttaaatgggataatcaaaataaagcatttattttttattttttattttttgagacggagtctcgttctgtca

SEQ ID NO: 110855 - DNA, 86 bp, Artificial Sequence
  ENSG00000100100_23 (sequence is synthesized)
ttccgccttccgcgttacagtgattctcctgcctcagccgcttgagtagctgggataacaggcgtgcaccaccacgcccagctaat

SEQ ID NO: 110856 - DNA, 70 bp, Artificial Sequence
  ENSG00000100100_24 (sequence is synthesized)
cggggtttcaccatgttggccgggctgctctctaactcctgacctcaggtgatccgaccgtcaaagtaaa

SEQ ID NO: 110857 - DNA, 120 bp, Artificial Sequence
  ENSG00000100100_25 (sequence is synthesized)
tgagccaccgctcccggcacaaagtaaaacattttacctaaggactggcacagagcgtacgcttagatgtgagctgctcaaaggaagcatgggttgtttcctgaagtagaagtgggggga

SEQ ID NO: 110858 - DNA, 120 bp, Artificial Sequence
  ENSG00000100100_26 (sequence is synthesized)
ggaggaaggtacacaaagtcaaactttgtggctttcttacccaaaaggaagcaagatgttgaaaatcagctcaagatgtagagacttggtcctagtctttatctgctgaccttggacaaa

SEQ ID NO: 110859 - DNA, 120 bp, Artificial Sequence
  ENSG00000100100_27 (sequence is synthesized)
ccctttcctttggtgcctttacacctcacttaaaagccttgtgagggatgttcttgttccgcattttacaaatgaagaagcctctgtcagagacttgctcaaagtcacatagcctaggag

SEQ ID NO: 110860 - DNA, 120 bp, Artificial Sequence
  ENSG00000100100_28 (sequence is synthesized)
cctacggccttcctctctcatttgccttgtccctgagatggttcagccctctcaggcctgatcttacctctggggcagaatttgactttgggttgtgtgtggggggaaattcttaggtga

SEQ ID NO: 110861 - DNA, 120 bp, Artificial Sequence
  ENSG00000100100_29 (sequence is synthesized)
cccaccttcatctaccctaacactcaggccaggttcagctgtggaattcactcagggcagtccctgatgagagctgtttcccacctcatctccagagaccacctcccaggccctgccagc

SEQ ID NO: 110862 - DNA, 120 bp, Artificial Sequence
  ENSG00000100104_0 (sequence is synthesized)
gacgtcagagaccaatggctgcggccgcagctgcggcgctggaatcctggcaggcggcggctccgcggaagaggcgctccgcggctcgacggccgcggcggagggaggcggcgccccggg

SEQ ID NO: 110863 - DNA, 120 bp, Artificial Sequence
  ENSG00000100104_1 (sequence is synthesized)
ggagagaggcggcgccccgggggagagaggcggcgccccggggccccgaggcggagttcgagtctgacagcggagtcgtgcttcgtcgcatctgggaggctgagaaggacctgtttatct

SEQ ID NO: 110864 - DNA, 120 bp, Artificial Sequence
  ENSG00000100104_2 (sequence is synthesized)
ctgatttctggagttcagcactagaaaccatcaatagatgtctcacaaaacatctggaacaactgaaggcccctgtggggactctttcagacatctttggaaacctgcatcttgactcat

SEQ ID NO: 110865 - DNA, 120 bp, Artificial Sequence
  ENSG00000100104_3 (sequence is synthesized)
tgccagaggagtcagatgtggccactgattctatcccaagagagatcttggtcacaggaacctgccatttgaagtgtgtgtgttacggcattgggaactttgccacctgcatcgtagcta

SEQ ID NO: 110866 - DNA, 120 bp, Artificial Sequence
  ENSG00000100104_4 (sequence is synthesized)
gaaaccagctaacgtttttgctgcttttgttggaaaagtgccagattcccagaagtcactgttgggtatatgaccctctgtttagccaacttgaaattgaagtccttaacacccttggtg

SEQ ID NO: 110867 - DNA, 120 bp, Artificial Sequence
  ENSG00000100104_5 (sequence is synthesized)
tgactgttctcagtgagaacgaggaagggaaacggagtattcgcggggagcctaccatcttttacatgctccattgtgggacggccttgtacaacaatcttttatggagtaactggtcag

SEQ ID NO: 110868 - DNA, 120 bp, Artificial Sequence
  ENSG00000100104_6 (sequence is synthesized)
tagatgccctttctaagatggtcatcattgggaacagtttcaaaggacttgaggagaggttgttggcaaggattctgcagaaaaattatccctacattgcaaagattttaaaaggactgg

SEQ ID NO: 110869 - DNA, 120 bp, Artificial Sequence
  ENSG00000100104_7 (sequence is synthesized)
aggagcttgagtttcctcagacttcacaatacatggacatatttaatgatacctctgtccactggttccctgtgcaaaagctagaacagctctccatagatatttgggagtttcgggaag

SEQ ID NO: 110870 - DNA, 120 bp, Artificial Sequence
  ENSG00000100104_8 (sequence is synthesized)
aaccagattatcaggactgtgaggaccttgaaatcatcaggaacaagagagaagatccttctgctactgactgaactcgttgtgaggtactcagtgttggctgaggtagaagctgccacc

SEQ ID NO: 110871 - DNA, 120 bp, Artificial Sequence
  ENSG00000100104_9 (sequence is synthesized)
agagactaaagggaaggctgctatggaggaactacagagaactcctttgccaggaaagaacatcaacttggctgtcctgttttgaggacgataccccacatgaggacttggtataaagat

SEQ ID NO: 110872 - DNA, 120 bp, Artificial Sequence
  ENSG00000100104_10 (sequence is synthesized)
tcctgccctacgtggcattgtcccattttacatccttccctcatgacctggcctgatgtggagtagctcctgagtaaagaagttacccttttgaaggtgatctaaaaatactgtttattt

SEQ ID NO: 110873 - DNA, 120 bp, Artificial Sequence
  ENSG00000100104_11 (sequence is synthesized)
acagtacatccctcttaggggcaagtctctgactggttctggacctgccacagttcacttggccatgtcgatcaggctctgcagtgaggtgggcacccacgtcttctcgccctggacaaa

SEQ ID NO: 110874 - DNA, 120 bp, Artificial Sequence
  ENSG00000100104_12 (sequence is synthesized)
gaccactccccggtcgatgtagatcacaatgcggccaaaggtgtagagctgcttcccttcgtgtcgcttcccaatgacgggcatgaagacaatgttgtgctcctcagccttggtctcaat

SEQ ID NO: 110875 - DNA, 120 bp, Artificial Sequence
  ENSG00000100104_13 (sequence is synthesized)
gaggtccttaaagttcatgggcacagagctagcggccacgccaatgcccctctgagccatgttctcagcctcccgcctctcctgcatggcctcgtactggaagtccttcctccgctccgt

SEQ ID NO: 110876 - DNA, 120 bp, Artificial Sequence
  ENSG00000100104_14 (sequence is synthesized)
gtgggtgagataggcaatgttctcccgtgctcctggctgcatgtaggcacctaagatacaggaggacagggcggtgaggagaggtgtttccaggtgtatggaagttgacactgtggcttg

SEQ ID NO: 110877 - DNA, 120 bp, Artificial Sequence
  ENSG00000100104_15 (sequence is synthesized)
gcccaggtcttgggtgtgccagagtgcttgtgactcactgaagggcagctctgcctcaaagatacaactttggaggaagtttagacgactggccagtatcacataaaaactgttcagaag

SEQ ID NO: 110878 - DNA, 120 bp, Artificial Sequence
  ENSG00000100104_16 (sequence is synthesized)
tgcaagggatttcttccttcagagctggaaacattaacagagagtcctcagccactcttctgttcccaccttgctctgtagagtttccatttcccaccaccaaagaggcagcttttagta

SEQ ID NO: 110879 - DNA, 120 bp, Artificial Sequence
  ENSG00000100104_17 (sequence is synthesized)
ccttgaaaacatagggcccatactggctttatttttaacctacccacacagggcccccatcctgaaagaagttcacatatatttagggagctgaaatgagtgtttaaaggataataccaa

SEQ ID NO: 110880 - DNA, 120 bp, Artificial Sequence
  ENSG00000100104_18 (sequence is synthesized)
gaccataaatgctaagtgctaattgaggggtatattcagggaacagttttggaaacatgaggccaagggtagctaaggaagagtttttagaaaaaacttgataattacagaagcagagaa

SEQ ID NO: 110881 - DNA, 120 bp, Artificial Sequence
  ENSG00000100104_19 (sequence is synthesized)
gagtttttagaaaaaacttgataattacagaagcagagaagtatatttgccttattacttaatctctgttttcacagaataggctatttttctttttttttttttgagaccgagtctcgc

SEQ ID NO: 110882 - DNA, 120 bp, Artificial Sequence
  ENSG00000100104_20 (sequence is synthesized)
aacaagaattaaagactcaggaaatagaaattccagttctaactgccaccctttaactatgtgaccttgaacaggctctcagcctcgctgggcttatctgtaaaacacagactagacgat

SEQ ID NO: 110883 - DNA, 120 bp, Artificial Sequence
  ENSG00000100104_21 (sequence is synthesized)
cccatttcaatgctgcgaatcggctaatgagcaacactggagcacaggactggttgaaataggctcccaaatgtagaaacataaatatactctcacttacttatgatctaggcagaatga

SEQ ID NO: 110884 - DNA, 120 bp, Artificial Sequence
  ENSG00000100104_22 (sequence is synthesized)
cttacctagaacttgggaacagatatagtacacgaacagtgaactgcctgtttttgacaacacagacaccacctattgaaggctatacacaagcatgaactcactctcccttttagccta

SEQ ID NO: 110885 - DNA, 120 bp, Artificial Sequence
  ENSG00000100104_23 (sequence is synthesized)
taaagtagatcttactgtttaacaggtaaaatggggctgattaaggctgagcaatcaccaagtgtcagaccgcgtgccaaactccacactgtaagatgcgtcacctaagcagcatgctca

SEQ ID NO: 110886 - DNA, 120 bp, Artificial Sequence
  ENSG00000100104_24 (sequence is synthesized)
ggcatgaatgagccttaaaaggccacacagcacagtggttaagagggcggggcctggggttagactgacatcatctgaatccagcttaagtcagtctccactcagggaagatgcccctct

SEQ ID NO: 110887 - DNA, 120 bp, Artificial Sequence
  ENSG00000100104_25 (sequence is synthesized)
cagtcatggtagacctgggcagtgggtgccagctgaccatgtaccccagtcagcagggtgagagtctgttgctatgtgcaaaagtgtgacctaaggtttaggctgcctacaggaaccaga

SEQ ID NO: 110888 - DNA, 120 bp, Artificial Sequence
  ENSG00000100104_26 (sequence is synthesized)
aaactctgattctgtgtcatttacatgtgtaaaatctgaaacttggggccaggacatccaaaatgggaatcctcacttaccaacgttggaggacaccgcccggttcatgatatcaagtgc

SEQ ID NO: 110889 - DNA, 120 bp, Artificial Sequence
  ENSG00000100104_27 (sequence is synthesized)
ctcattaaatttgtccttgacagatggatgtgccagcacttggtctgagaacatcgacttccaacccaggtaccacttggtgatctcctcataatttgggctgttactgagccaagagca

SEQ ID NO: 110890 - DNA, 120 bp, Artificial Sequence
  ENSG00000100104_28 (sequence is synthesized)
cagcacctgccaaaaagaaaaattacttgcatccatcgtggcaacaaatgaaggcaagatttctgaagtggccatttgttttgttttgatcctggtcctacaggctagtgacactacttt

SEQ ID NO: 110891 - DNA, 120 bp, Artificial Sequence
  ENSG00000100104_29 (sequence is synthesized)
acagggatttatagtagctaaacagtctagcacttatgaatatggattttggagtcagcctggtagctaaagtgcccttgcatgtaaactctctgagcctcagcttccatgtctacacaa

SEQ ID NO: 110892 - DNA, 120 bp, Artificial Sequence
  ENSG00000100104_30 (sequence is synthesized)
cagggataccatatcccctaccccatagggttgctgagaggagctgagataaagcaaataaagtgcttggaacagcttctgatacatggcaaatgtccaataaatggtgcccactatgaa

SEQ ID NO: 110893 - DNA, 120 bp, Artificial Sequence
  ENSG00000100104_31 (sequence is synthesized)
cctgacctcaaatgatccgcccgcctcagtctcctgaagtgctgggattacctgcgcctggcccacattttcaactatttaactggtttactccacatcttgagttttttcctgaattct

SEQ ID NO: 110894 - DNA, 120 bp, Artificial Sequence
  ENSG00000100104_32 (sequence is synthesized)
ttttttcctgaattcttactatgcttcaatcatcttgcccttctatgtgtcttaaaagttgaatgaaactatcctcatacctcctaatcatggtgttttttttttgtttttttggttttt

SEQ ID NO: 110895 - DNA, 120 bp, Artificial Sequence
  ENSG00000100105_0 (sequence is synthesized)
gccatctttcctccgctccgaacacacggagcccggggccgcacagccgccgctccgccgccgccttctcccggcctgaggaagggcctactctgccgccgccgccgcccgcccgctcca

SEQ ID NO: 110896 - DNA, 80 bp, Artificial Sequence
  ENSG00000100105_1 (sequence is synthesized)
ggacccggcccgcgccaccgcccccgtgcgcgccccgccgccgccgccttcgccttcgccttttgtttcctccgctccgg

SEQ ID NO: 110897 - DNA, 80 bp, Artificial Sequence
  ENSG00000100105_2 (sequence is synthesized)
ggcccgggaaaagccgcggcgcgcgcgcgcgcctgcgcggcggacccctccttctcctccccgcgtgcgcgtgcccttct

SEQ ID NO: 110898 - DNA, 120 bp, Artificial Sequence
  ENSG00000100105_3 (sequence is synthesized)
gcccttcttggctgcgcgccggcgccgcctggcgggcgggaggggaggtggcaggcgcgtttgcaggaggggcgcacctcttcgctcgcgcacccccccggaaggtagaccgggaagggg

SEQ ID NO: 110899 - DNA, 120 bp, Artificial Sequence
  ENSG00000100105_4 (sequence is synthesized)
aggcgggcgggcggagaggagagagtggcgcgcagtccagcgagggcgggggttggctatgtggggggtggtgcaccccgcagtctagacagtctgatccgggctgggggcgtgtacact

SEQ ID NO: 110900 - DNA, 120 bp, Artificial Sequence
  ENSG00000100105_5 (sequence is synthesized)
cggcgcacctgcgagactacagagcctcgggccggcacgtgtggggagtgtggacacgtctgctgcgccccgcttctcgctgctgaggggaagggagggggcgggcaggtgcagcggccg

SEQ ID NO: 110901 - DNA, 120 bp, Artificial Sequence
  ENSG00000100105_6 (sequence is synthesized)
ggctagtgggagggggcggcggccatggagcgggtgaacgacgcttcgtgcggcccgtctggctgctacacataccaggtgagcagacacagcacggagatgctgcacaacctgaaccag

SEQ ID NO: 110902 - DNA, 120 bp, Artificial Sequence
  ENSG00000100105_7 (sequence is synthesized)
cagcgcaaaaacggcgggcgcttctgcgacgtgctcttgcgggtaggcgacgagagcttcccagcgcaccgcgccgtgctggccgcctgcagcgagtactttgagtcggtgttcagcgcc

SEQ ID NO: 110903 - DNA, 120 bp, Artificial Sequence
  ENSG00000100105_8 (sequence is synthesized)
cagttgggcgacggcggagctgcggacgggggtccggctgatgtagggggcgcgacggcagcaccaggcggcggggccgggggcagccgggagctggagatgcacactatcagctccaag

SEQ ID NO: 110904 - DNA, 120 bp, Artificial Sequence
  ENSG00000100105_9 (sequence is synthesized)
gtatttggggacattctggacttcgcctacacttcccgcatcgtggtgcgcttggagagctttcccgaactcatgacggccgccaagttcctgctgatgaggtcggttatcgagatctgc

SEQ ID NO: 110905 - DNA, 120 bp, Artificial Sequence
  ENSG00000100105_10 (sequence is synthesized)
caggaagtcatcaaacagtccaacgtacagatcctggtaccccctgcccgcgccgatataatgctctttcgcccccctgggacctcggacttgggcttccctttggacatgaccaacggg

SEQ ID NO: 110906 - DNA, 120 bp, Artificial Sequence
  ENSG00000100105_11 (sequence is synthesized)
gcagccttggcagccaacagcaatggcatcgccggcagcatgcagccagaggaggaggcagctcgggcggctggtgcagccattgcaggccaagcctctttgcctgtgttacctggggtg

SEQ ID NO: 110907 - DNA, 120 bp, Artificial Sequence
  ENSG00000100105_12 (sequence is synthesized)
gaccgcttgcccatggtggctggacccctatccccccaactgctgacttccccattccccagtgtggcatccagtgcccctcccctgactggcaagcgaggccggggccgcccaaggaag

SEQ ID NO: 110908 - DNA, 120 bp, Artificial Sequence
  ENSG00000100105_13 (sequence is synthesized)
gccaacctgctggactcaatgtttgggtccccagggggcctgagggaggcaggcatccttccatgcggtctatgtggtaaggtgttcactgatgccaaccggctccggcagcacgaggcc

SEQ ID NO: 110909 - DNA, 120 bp, Artificial Sequence
  ENSG00000100105_14 (sequence is synthesized)
cagcacggtgtcaccagcctccagctgggctacatcgaccttcctcctccgaggctgggtgagaatgggctacccatctctgaagaccccgacggcccccgaaagaggagccggaccagg

SEQ ID NO: 110910 - DNA, 120 bp, Artificial Sequence
  ENSG00000100105_15 (sequence is synthesized)
aagcaggtggcttgtgagatctgcggcaagatcttccgtgatgtgtatcatcttaaccggcacaagctgtcccactctggggagaagccctactcctgccctgtgtgtgggttgcggttc

SEQ ID NO: 110911 - DNA, 120 bp, Artificial Sequence
  ENSG00000100105_16 (sequence is synthesized)
agccttacatctgccagagctgtgggaaaggcttctccaggcctgatcacttgaacggacatatcaagcaggtgcacacttctgagcggcctcacaagtgtcagacctgcaatgcttctt

SEQ ID NO: 110912 - DNA, 120 bp, Artificial Sequence
  ENSG00000100105_17 (sequence is synthesized)
ttgccacccgagaccgtctgcgctcccacctggcctgtcatgaagacaaggtgccctgccaggtgtgtgggaagtacttgcgggcagcatacatggcagaccacctgaagaagcacagcg

SEQ ID NO: 110913 - DNA, 120 bp, Artificial Sequence
  ENSG00000100105_18 (sequence is synthesized)
aggggcccagcaacttctgcagtatctgtaaccgaggtttctcctctgcctcctacttaaaggtccatgttaaaacccaccacggtgttccccttccccaggtctccaggcaccaggagc

SEQ ID NO: 110914 - DNA, 120 bp, Artificial Sequence
  ENSG00000100105_19 (sequence is synthesized)
ccatcctgaatgggggagcagcgttccactgcgccaggacctatggcaacaaagaaggccagaaatgctcacatcaggatccgattgagagctctgactcctatggtgacctctcagatg

SEQ ID NO: 110915 - DNA, 120 bp, Artificial Sequence
  ENSG00000100105_20 (sequence is synthesized)
ccagcgacctgaagacgccagagaagcagagtgccaatggctctttctcctgcgacatggcagtccccaaaaacaaaatggagtctgatggggagaagaagtacccatgccctgaatgtg

SEQ ID NO: 110916 - DNA, 120 bp, Artificial Sequence
  ENSG00000100105_21 (sequence is synthesized)
ggagcttcttccgctctaagtcctacttgaacaaacacatccagaaggtgcatgtccgggctctcgggggccccctgggggacctgggccctgcccttggctcacctttctctcctcagc

SEQ ID NO: 110917 - DNA, 120 bp, Artificial Sequence
  ENSG00000100105_22 (sequence is synthesized)
agaacatgtctctcctcgagtcctttgggtttcagattgttcagtcggcatttgcgtcatctttagtagatcctgaggttgaccagcagcccatggggcctgaagggaaatgaggcagct

SEQ ID NO: 110918 - DNA, 120 bp, Artificial Sequence
  ENSG00000100105_23 (sequence is synthesized)
gctgtgtccccacggaaacaaccatctggggactgctgggaaatgctgtgaatgcggagggaagtgatgtttgggttctgtagctgagagatttttattcatttttaactgccccccaac

SEQ ID NO: 110919 - DNA, 120 bp, Artificial Sequence
  ENSG00000100105_24 (sequence is synthesized)
cccactccaactccttctccaccacccattctcccaatggtctttagaaatagattttcatctgatattctgcagaaatatcaatgagacttggtatgggacaggggcagaaaacactac

SEQ ID NO: 110920 - DNA, 120 bp, Artificial Sequence
  ENSG00000100105_25 (sequence is synthesized)
ataggcctccaaggcaaaaccagtcccagtttctttaatgggaagaagctggaattcctggtgctcaattcttagtgaccccaatcctatacccaaatctatgatattctgggacctcag

SEQ ID NO: 110921 - DNA, 120 bp, Artificial Sequence
  ENSG00000100105_26 (sequence is synthesized)
tgattttggtcccctcccacttctctagttcgtcatcctcccttcccatatccttcaaaagaaccacactagggtctccacctacttatacaatgcggatgcccaactgtttttaaggaa

SEQ ID NO: 110922 - DNA, 120 bp, Artificial Sequence
  ENSG00000100105_27 (sequence is synthesized)
gccagaagcatcccatggaccatggggtgagtgtcctccaagagccccctgagctcagccctctgcctggagggctccagacctttctgagccctgcttggaggcgagcattttcactgc

SEQ ID NO: 110923 - DNA, 120 bp, Artificial Sequence
  ENSG00000100105_28 (sequence is synthesized)
taggacaagctcagctgttgaggacacccccaccccaaatttcagttcttacgtgattttaaccattcaacatgctgttgggttttaattctctaattattattattattgttattattt

SEQ ID NO: 110924 - DNA, 120 bp, Artificial Sequence
  ENSG00000100105_29 (sequence is synthesized)
tttaggaccagttgtagtgaattgctactgaaagctatcccaggtgatacagagctctttgtaaaccgcagtcacacattagggttagtattaaactttgtttagatgtaccataattaa

SEQ ID NO: 110925 - DNA, 120 bp, Artificial Sequence
  ENSG00000100105_30 (sequence is synthesized)
cttggctagttgattgtttgaagtctatggaagaaatagttttatgcaaaattttaaaaaatgccagtctggtcagggaagtagggggtttcaatgctgttgggaaccaggaaggtggga

SEQ ID NO: 110926 - DNA, 120 bp, Artificial Sequence
  ENSG00000100105_31 (sequence is synthesized)
cagccggcaggtagggacattgtgtacctcagttgtgtcacatgtgagcaagcccaggttgaccttgtgatgtgaattgatctgatcagactgtattaaaaatgttagtacattactcta

SEQ ID NO: 110927 - DNA, 120 bp, Artificial Sequence
  ENSG00000100105_32 (sequence is synthesized)
aggcagctctgtttcattctactgccaccgcctctggtcctagaaaacactgagtttctggtggggagaattgagggagtggggaggcaaaatcagagacaaatgcccatttctcttccc

SEQ ID NO: 110928 - DNA, 120 bp, Artificial Sequence
  ENSG00000100105_33 (sequence is synthesized)
ccctccagagaaaaccagggcagagaggcctgggcctgtggagccagaactgggtggtgactttgtctttgtcatgctggggttggggagagggagtcctttccagcagtgagtgtgtgt

SEQ ID NO: 110929 - DNA, 120 bp, Artificial Sequence
  ENSG00000100105_34 (sequence is synthesized)
tgggcctgagcgtgtatgggaggcctaggggtgtctcaatcaccctgcctcagactccactctttgcacagccaccccctacttcccactgaatgataaacaccttcatcacccaactag

SEQ ID NO: 110930 - DNA, 120 bp, Artificial Sequence
  ENSG00000100105_35 (sequence is synthesized)
ctatttgctacctcttccttcccaagaagcttggggtgcttagaatgggaagtcccaggagaccagcaggtcaaaacagaaggagagaggttcttcccaagcttgggcccataactctca

SEQ ID NO: 110931 - DNA, 120 bp, Artificial Sequence
  ENSG00000100105_36 (sequence is synthesized)
tttaacctggattgtaggaccttgtgtgtgtgaacacagggatggagaactccctcagagggccccgaccaggaaccagtcttaccggtcaggcagcccctgcccacctgctcaggcggg

SEQ ID NO: 110932 - DNA, 120 bp, Artificial Sequence
  ENSG00000100105_37 (sequence is synthesized)
catctggcttaccagcccagctggggacttaaggctccactgctggcctctggggactgaattccatccgggtggcattcattggctgcccgtggcgggagaggctgggggaggggattg

SEQ ID NO: 110933 - DNA, 120 bp, Artificial Sequence
  ENSG00000100105_38 (sequence is synthesized)
tgccgcccctggaacctcttcctagcgacctgccatcatgggactttgcccagcctgctttgtggaggtcgtcccattcggttcctgacaccgccttttccctttctctaaaaaaatcat

SEQ ID NO: 110934 - DNA, 120 bp, Artificial Sequence
  ENSG00000100105_39 (sequence is synthesized)
cccagcacactccagcaacactctcttctgcccagccccgccgggatatctgaggcagggctggaccaccccagagggcagcagggcctttacccagtggcctgttggctagcctgggcc

SEQ ID NO: 110935 - DNA, 120 bp, Artificial Sequence
  ENSG00000100105_40 (sequence is synthesized)
tccctggagagggttgacagtggaagggaacaggaggggcatttggcctgagacccctgcttttgggagaggctagcagggtggttcctgcccagcatgcccagctcctccctgggtgac

SEQ ID NO: 110936 - DNA, 120 bp, Artificial Sequence
  ENSG00000100105_41 (sequence is synthesized)
tcggagtctttcccatgtcagagcccccaaatgggggtagcaaggagcacctttctggaaccccctatagcatccaagtttctttctgggctctcttgccttttcccccctttcacagat

SEQ ID NO: 110937 - DNA, 120 bp, Artificial Sequence
  ENSG00000100105_42 (sequence is synthesized)
ggcacccctgggcatctgtccttgcctaggtgattttggaggttggtgccttcctgggaactagccaccagcttatctgcttcccttcccctggcatcacttcccataggcctggggttt

SEQ ID NO: 110938 - DNA, 120 bp, Artificial Sequence
  ENSG00000100105_43 (sequence is synthesized)
ctagactggggcctggccacccctttccccactccacgagtgagtcggcctccagagaagactggcacaattccaactagagtcaacccatgctgccctctgcccttcccactcagatct

SEQ ID NO: 110939 - DNA, 120 bp, Artificial Sequence
  ENSG00000100105_44 (sequence is synthesized)
agatcctgctttcatttctggctagtgaagtagacttttgtgtttttgaggtttattagcaggtctgctcaggaaccaaactaatgagtagctttatattgggccaccccaatatatggc

SEQ ID NO: 110940 - DNA, 120 bp, Artificial Sequence
  ENSG00000100105_45 (sequence is synthesized)
tttgggggctgaaaaagcagatgtagaccccctccctcggatccttattggtgtgccctttagcactccgcagactctgcggggtgaacaggagtgatgataaaatttttcattctaaca

SEQ ID NO: 110941 - DNA, 80 bp, Artificial Sequence
  ENSG00000100106_0 (sequence is synthesized)
atgggcggatggaaggggccggggcagcgtcggggaaaggaagggccggaggcgcggcggcgggcggccgagaggggcgg

SEQ ID NO: 110942 - DNA, 120 bp, Artificial Sequence
  ENSG00000100106_1 (sequence is synthesized)
gcccgagagccgcgtccacgttcctgcctcctgctcccgccgccctggggcgccgccatgacgcccgatctgctcaacttcaagaagggatggatgtcgatcttggacgagcctggagag

SEQ ID NO: 110943 - DNA, 120 bp, Artificial Sequence
  ENSG00000100106_2 (sequence is synthesized)
cctccctccccctcgctcaccaccacctctacttcgcagtggaagaaacattggtttgtgctgacagattcaagtctcaaatattacagagactccactgctgaggaggcagatgagctg

SEQ ID NO: 110944 - DNA, 120 bp, Artificial Sequence
  ENSG00000100106_3 (sequence is synthesized)
gatggtgagatcgacctgcgttcctgcacggatgtcactgagtacgcggtgcagcgcaactatggcttccagatccacaccaaggatgctgtctataccttgtcggccatgacctcaggc

SEQ ID NO: 110945 - DNA, 120 bp, Artificial Sequence
  ENSG00000100106_4 (sequence is synthesized)
atccggcggaactggatcgaggctctgagaaagaccgtacgtccaacttcagccccagatgtcaccaagctctcggactctaacaaggagaacgcgctgcacagctacagcacccagaag

SEQ ID NO: 110946 - DNA, 120 bp, Artificial Sequence
  ENSG00000100106_5 (sequence is synthesized)
ggccccctgaaggcaggggagcagcgggcgggctctgaggtcatcagccggggtggccctcggaaggcggacgggcagcgtcaggccttggactacgtggagctctcgccgctgacccag

SEQ ID NO: 110947 - DNA, 120 bp, Artificial Sequence
  ENSG00000100106_6 (sequence is synthesized)
gcttccccgcagcgggcccgcaccccagcccgcactcctgaccgcctggccaagcaggaggagctggagcgggacctggcccagcgctccgaggagcggcgcaagtggtttgaggccaca

SEQ ID NO: 110948 - DNA, 120 bp, Artificial Sequence
  ENSG00000100106_7 (sequence is synthesized)
gacagcaggaccccagaggtgcctgctggtgaggggccgcgccggggcctgggtgcccccctgactgaggaccagcaaaaccggcttagtgaggagatcgagaagaagtggcaggagctg

SEQ ID NO: 110949 - DNA, 120 bp, Artificial Sequence
  ENSG00000100106_8 (sequence is synthesized)
gggcccccaagtgacggccacgaggcactggagaaggaggttcaggctcttcgggcccagctggaggcgtggcgtctccaaggggaggctcctcagagtgcactgagatcccaggaggat

SEQ ID NO: 110950 - DNA, 120 bp, Artificial Sequence
  ENSG00000100106_9 (sequence is synthesized)
ggccacatccccccgggctacatctcacagctggtgggcgtgatcactgtgcccgttttacagacaaggccactgagctctgagaggttatgtgacttgcccaaggtcaccccgcctgca

SEQ ID NO: 110951 - DNA, 120 bp, Artificial Sequence
  ENSG00000100106_10 (sequence is synthesized)
ggtctcaaaggtgggatttgagcgagggtccggctgactgcagagcctgtgtgtgagtccccgtgtgacactctgcacttggacccttgccccggggaagtggggggctagtggccccga

SEQ ID NO: 110952 - DNA, 120 bp, Artificial Sequence
  ENSG00000100106_11 (sequence is synthesized)
gagtcactccctgaacacagggaaatcctgccgaggcccactgggccaaggccccacacaaggaggtctgcaggacaggggagcctccagtagccctcagagaatgcaccgtccgcctag

SEQ ID NO: 110953 - DNA, 120 bp, Artificial Sequence
  ENSG00000100106_12 (sequence is synthesized)
gacagcggttctcaacggggtccattttgtcccccttggggacatttggctgtgtctgggaatacttctggttgtcacaactaggacaaactaactctctagaaaaaacgtgtgtgtgta

SEQ ID NO: 110954 - DNA, 120 bp, Artificial Sequence
  ENSG00000100106_13 (sequence is synthesized)
tgtacacatatataagtttattataaattttaccaataaaaacaatgcttagtacacaatttacaaataaaaatatataattttattgtgaattccgtacagcaaatggatttttctcag

SEQ ID NO: 110955 - DNA, 120 bp, Artificial Sequence
  ENSG00000100106_14 (sequence is synthesized)
ctttcagtgattttttccatactcttgtatccacaactgattaacaaagggggttgttctaacgtgtgctggttgacatttttgtttatggtaatgagtaagatgagaagacatttgtcg

SEQ ID NO: 110956 - DNA, 120 bp, Artificial Sequence
  ENSG00000100106_15 (sequence is synthesized)
aaactttactggtccatgttgtcagctacttctttgctagatcggatagtagttttctattgagaatatttgagaatattctattaagaatatttttgcaattttttgttctatttacaa

SEQ ID NO: 110957 - DNA, 120 bp, Artificial Sequence
  ENSG00000100106_16 (sequence is synthesized)
tgtaatggttatagatgtgagatacttctaagtttaatctgcattattagcattttcttatcacttgcttaagtctagacaatcaacaaaacaataaatcaagccctgatgtgtaatgtt

SEQ ID NO: 110958 - DNA, 120 bp, Artificial Sequence
  ENSG00000100106_17 (sequence is synthesized)
gctggtctggactgccctctgagctctcagggggtctctatgcaggcagagtcctcccagcccctctctcccattcttgggcgaggggtcggctggagagaggcccctgggacatctggc

SEQ ID NO: 110959 - DNA, 120 bp, Artificial Sequence
  ENSG00000100106_18 (sequence is synthesized)
cggcggggttcccgcgccgcggagcccggcccgagagccgcgtccacgttcctgcctcctgctcccgccgccctggggcgccgccatgacggtatacagggaggggctgggatgccaacc

SEQ ID NO: 110960 - DNA, 120 bp, Artificial Sequence
  ENSG00000100106_19 (sequence is synthesized)
tgccaacctactgggtcccccgactgtggctgtggaaggttctggatcttcagctgtcccaagccccgcccgatctgctcaacttcaagaagggatggatgtcgatcttggacgagcctg

SEQ ID NO: 110961 - DNA, 120 bp, Artificial Sequence
  ENSG00000100106_20 (sequence is synthesized)
actcccaccccggcagcccctgtgcgtggaaacccagccaaggtctgatgatggaggagccttggccctggctgtcccaggggaggaggtgaaattcctcagctctccaccaagattggc

SEQ ID NO: 110962 - DNA, 120 bp, Artificial Sequence
  ENSG00000100106_21 (sequence is synthesized)
cacaaaagcctgatcccctggaacacagcaggcctcacatagacggtcagccattggatcataggaactgccctggcctgactcacccaatatggaggaggtgcctggggatgccctgtg

SEQ ID NO: 110963 - DNA, 120 bp, Artificial Sequence
  ENSG00000100106_22 (sequence is synthesized)
tgaacactttgaggccaacatacttacccagaaccgctgtcaaaactgcttccaccctgaggaggcccatggagcaagataccaggagctcaggagcccttcaggtgctgaggtgcccta

SEQ ID NO: 110964 - DNA, 120 bp, Artificial Sequence
  ENSG00000100106_23 (sequence is synthesized)
ctgcgacctgcctcgatgtccacctgcccctgaggacccactcagcgcctcaacctccggctgccagtctgtggtggacccaggcctcaggccagggcccaagaggggcccatccccctc

SEQ ID NO: 110965 - DNA, 120 bp, Artificial Sequence
  ENSG00000100106_24 (sequence is synthesized)
agcagggctcccagaagagggtcccacagctgcccccaggagcaggagccgggagcttgaggcagtaccctatctggagggcctgaccacttccttgtgtggcagctgcaacgaggaccc

SEQ ID NO: 110966 - DNA, 120 bp, Artificial Sequence
  ENSG00000100106_25 (sequence is synthesized)
cggctctgaccccacctccagccctgactccgccacccctgatgataccagcaactcgtcctctgtggactgggacactgttgagaggcaggaggaggaggcccccagctgggacgagct

SEQ ID NO: 110967 - DNA, 120 bp, Artificial Sequence
  ENSG00000100106_26 (sequence is synthesized)
cgcagtgatgatcccgaggaggcctcgggaggggccgagagctgacagctcccaaagggctccgtctctcctcaccaggtcccctgtgggaggagatgctgcaggccagaaaaaggagga

SEQ ID NO: 110968 - DNA, 120 bp, Artificial Sequence
  ENSG00000100106_27 (sequence is synthesized)
caccggcggtgggggccggagcgcaggacagcactgggcaaggctccggggagaaagcgggttgtccctggagcggcaccggtcaacactgacccaggcttcctccatgacaccacacag

SEQ ID NO: 110969 - DNA, 120 bp, Artificial Sequence
  ENSG00000100106_28 (sequence is synthesized)
tggacctcgaagcaccacgtctcaggcttctcctgcccaaagggacactgctcaggctgcctctacacgtgaaatccccagagcctcctctccccatcgaatcacccaaagggacacctc

SEQ ID NO: 110970 - DNA, 120 bp, Artificial Sequence
  ENSG00000100106_29 (sequence is synthesized)
cagggcctcatccacccaacaggaaatctccagggcctcatccacccaacaggaaacctccagggcctcatccacccaagaggacacccctagggcctcatccacccaagaggacacccc

SEQ ID NO: 110971 - DNA, 120 bp, Artificial Sequence
  ENSG00000100106_30 (sequence is synthesized)
cagggcctcatctacacagtggaacacccccagagcttcctctccctcacgaagcacccaactggataaccccagaacctcttctacccagcaggacaacccccaaacttcttttcctac

SEQ ID NO: 110972 - DNA, 120 bp, Artificial Sequence
  ENSG00000100106_31 (sequence is synthesized)
ttgtactccccagcgggaaaaccccaggacaccctgtgtccagcaggacgatcccagagcctcctctcccaacagaaccactcaacgagagaattccagaacatcctgtgcccagcggga

SEQ ID NO: 110973 - DNA, 120 bp, Artificial Sequence
  ENSG00000100106_32 (sequence is synthesized)
cagaacatcctgtgcccagcgggacaatcccaaagcctccagaacctcctctcccaatagagccacacgagacaaccccagaacatcctgcgcccagcgggacaatcccagagcctcctc

SEQ ID NO: 110974 - DNA, 120 bp, Artificial Sequence
  ENSG00000100106_33 (sequence is synthesized)
ccccacaacatcctgtgcccagcgggacaatcccagagcctccagaacctcctctcccaatagagccacacgagacaaccccagaacatcctgtgcccagcgggacaatcccagagcctc

SEQ ID NO: 110975 - DNA, 120 bp, Artificial Sequence
  ENSG00000100106_34 (sequence is synthesized)
ctctcccagtagagctacacgagacaaccccacaacatcctgtgcccagcgggacaatcccagagcctccagaacctcctctcccaatagagccacacgagacaaccccagaacatcctg

SEQ ID NO: 110976 - DNA, 120 bp, Artificial Sequence
  ENSG00000100106_35 (sequence is synthesized)
cccagagcctcctctcccaatagagctgcacgagacaaccccacaacatcctgtgcccagcgggacaatcccagagcctccagaacctcctctcccaatagagccacacgagacaacccc

SEQ ID NO: 110977 - DNA, 120 bp, Artificial Sequence
  ENSG00000100106_36 (sequence is synthesized)
aatcccagagcctcctctcccaatagagctacacgagacaaccccacaacatcctgtgcccagcgggacaatcccagagcctccagaacctcctctcccaatagagccacacgagataac

SEQ ID NO: 110978 - DNA, 120 bp, Artificial Sequence
  ENSG00000100106_37 (sequence is synthesized)
cacaacatcctgtgcccagcgggacaatcccagagcctccagaacctcctctcccaatagagccacacgagataaccccagaacatcctgtgcccagcgggacaatcccagagcctcctc

SEQ ID NO: 110979 - DNA, 120 bp, Artificial Sequence
  ENSG00000100106_38 (sequence is synthesized)
atcctgtgcccgacgggacgatcccagagcctcctctcctaacagaaccatccaacaagagaaccccagaacatcctgtgccctacgggacaatcccagagcctcctctcccagcagaac

SEQ ID NO: 110980 - DNA, 120 bp, Artificial Sequence
  ENSG00000100106_39 (sequence is synthesized)
catccaacaagagaaccccagaacatcctgtgcccaacgggacgatcccagagcctcctctcctaacagaaccacccaacaagagaaccccagaacatcctgtgcccgacgggacaatcc

SEQ ID NO: 110981 - DNA, 120 bp, Artificial Sequence
  ENSG00000100106_40 (sequence is synthesized)
gaaccccagaacatcctgtgcccgacgggacaatcccagagcctcctctcgcaacagaaccatccagcgagacaaccccagaacatcctgtgcccagcgggacaatcccagagcctcctc

SEQ ID NO: 110982 - DNA, 120 bp, Artificial Sequence
  ENSG00000100106_41 (sequence is synthesized)
atcctgtacccgacaggacaatcccaggacctcctctcccaatagagccacacgagacaaccccagaacatcctgtgcccagcgggacaatctcagagcctcctctcccatcagagccac

SEQ ID NO: 110983 - DNA, 120 bp, Artificial Sequence
  ENSG00000100106_42 (sequence is synthesized)
ccaacaggacaaccccagaacttgtattcaacagaacatccccagatcatcttctacccaacaagacaaccctaaaacctcttgtaccaaacgagataacctcagacccacttgtacaca

SEQ ID NO: 110984 - DNA, 120 bp, Artificial Sequence
  ENSG00000100106_43 (sequence is synthesized)
gcgggaccgcacacagtccttttcctttcaacgagacaaccctggaacctcctcatctcaatgctgcacccaaaaggagaatctgagaccatcatctccccaccgctccactcaatggaa

SEQ ID NO: 110985 - DNA, 120 bp, Artificial Sequence
  ENSG00000100106_44 (sequence is synthesized)
caatcccaggaattcatctccccatcgtactaacaaagacatcccctgggcctcgtttcccctccggccaactcagagtgatggtccccgaacctcttccccatctcgctccaagcaaag

SEQ ID NO: 110986 - DNA, 120 bp, Artificial Sequence
  ENSG00000100106_45 (sequence is synthesized)
cgaggttccctgggcatccatcgccctccggccaacccaaggtgacaggcctcagacatcctctcccagcaggccagcccagcatgacccaccccagtcctcctttggccccacccagta

SEQ ID NO: 110987 - DNA, 120 bp, Artificial Sequence
  ENSG00000100106_46 (sequence is synthesized)
caacttgccatcccgggccacctcttcctcccataacccaggccaccagagcacctcccgaacttcctcacctgtgtaccccgctgcctatggggctcccctgacctctcctgagccctc

SEQ ID NO: 110988 - DNA, 120 bp, Artificial Sequence
  ENSG00000100106_47 (sequence is synthesized)
ccagcctccatgtgctgtgtgcattgggcaccgggatgcccctcgagcctcttcgccccctcgctatttgcagcacgaccccttccccttcttcccagagccccgcgcccctgagagtga

SEQ ID NO: 110989 - DNA, 120 bp, Artificial Sequence
  ENSG00000100106_48 (sequence is synthesized)
accgccccaccacgagcctccctatataccacctgctgtgtgcattggacaccgagatgccccccgggcgtcctcgcccccccgccacacccaatttgaccccttccccttcctcccaga

SEQ ID NO: 110990 - DNA, 120 bp, Artificial Sequence
  ENSG00000100106_49 (sequence is synthesized)
cacatcagatgccgagcatcagtgtcagtccccccaacacgagccccttcagctccctgcacctgtgtgtattgggtaccgagatgcaccccgggcctcctccccaccacgccaggcccc

SEQ ID NO: 110991 - DNA, 120 bp, Artificial Sequence
  ENSG00000100106_50 (sequence is synthesized)
agagccttccctcttattccaggacctccccagggccagcacagagagccttgtcccttccatggactctctgcacgagtgcccccacatccccacccctgtgtgcattgggcaccggga

SEQ ID NO: 110992 - DNA, 120 bp, Artificial Sequence
  ENSG00000100106_51 (sequence is synthesized)
tgcaccctccttctcatccccaccacgccaggctcctgagccatccctcttcttccaggatccccctggaactagtatggagagcctggccccctccactgactctctgcatggctcccc

SEQ ID NO: 110993 - DNA, 120 bp, Artificial Sequence
  ENSG00000100106_52 (sequence is synthesized)
agtgctgatcccccaagtgtgcatcgggcaccgggatgcaccccgagcctcctccccaccccgccacccacccagtgacctagcgttcctggcaccctcaccttcaccgggcagctctgg

SEQ ID NO: 110994 - DNA, 120 bp, Artificial Sequence
  ENSG00000100106_53 (sequence is synthesized)
gggctcccggggctcagcgcctcccggggagaccaggcacaacttggagcgggaggagtacactgtgctggccgacctgcccccacccaggaggctggcccagagacagccagggcccca

SEQ ID NO: 110995 - DNA, 120 bp, Artificial Sequence
  ENSG00000100106_54 (sequence is synthesized)
ggcgcagtgcagcagcgggggccgcacccacagccctggccgtgcagaggtggagcgcctcttcgggcaagagcgcaggaagtccgaggcagcgggggccttccaggcccaggacgaggg

SEQ ID NO: 110996 - DNA, 120 bp, Artificial Sequence
  ENSG00000100106_55 (sequence is synthesized)
acggtcacagcagcccagccaaggccagagccaacttctccgaagacagtccagccctgcccccagcaggcaggtgaccatgctccctgccaaacaggcagaactgacccggcggagcca

SEQ ID NO: 110997 - DNA, 120 bp, Artificial Sequence
  ENSG00000100106_56 (sequence is synthesized)
agcagagccccctcatccttggagtcctgagaagagacctgagggagatcggcagctccaggggtccccgctgccccccaggacatcagccaggacccctgagagggagctgcggacaca

SEQ ID NO: 110998 - DNA, 120 bp, Artificial Sequence
  ENSG00000100106_57 (sequence is synthesized)
gagacctctggagagtggccaagcaggcccaagacagcctctgggggtgtggcagagtcaggaggaaccgccagggtcccagggccctcatagacacctagaaaggagctggagcagcca

SEQ ID NO: 110999 - DNA, 120 bp, Artificial Sequence
  ENSG00000100106_58 (sequence is synthesized)
ggagggaggcctgggccctgggggctggtggggatgtggagagcccagcctgggggcagccaaagccccggagggagcatgggggggcacttccagggagtacaaggagagctgggggca

SEQ ID NO: 111000 - DNA, 120 bp, Artificial Sequence
  ENSG00000100106_59 (sequence is synthesized)
gccagaggcctgggaggagaagcccactcatgagctccccagagaactaggaaagagaagcccactcacgagcccccctgagaactggggaggccccgcagagtcctcacaatcctggca

SEQ ID NO: 111001 - DNA, 120 bp, Artificial Sequence
  ENSG00000100106_60 (sequence is synthesized)
ctctgggacacccactgctgtgggctggggggcagagggagcgtgtccatacccgcgtggctctgagaggcgacccgagcttgactggagggatctgcttggccttctccgggcaccagg

SEQ ID NO: 111002 - DNA, 120 bp, Artificial Sequence
  ENSG00000100106_61 (sequence is synthesized)
agagggggtctgggcccgtgtccccagcctggactgggagggcctcttggagctcctgcaggccaggctgccccgcaaggacccagctggacacagggatgacctggccagggctttagg

SEQ ID NO: 111003 - DNA, 120 bp, Artificial Sequence
  ENSG00000100106_62 (sequence is synthesized)
agctgggtcccccaggcacaaacgatgtccctgagcaggagtcacacagccagccagaaggctgggccgaggccaccccagtcaatggacacagccccgcactgcagtcccagagcccgg

SEQ ID NO: 111004 - DNA, 120 bp, Artificial Sequence
  ENSG00000100106_63 (sequence is synthesized)
tccagctgcccagccctgcctgcacctccacccagtggccaaagatcaaagtgacaagaggaccagcgaccgcaactctggcaggcctggagcagacgggccccctggggagcaggagca

SEQ ID NO: 111005 - DNA, 120 bp, Artificial Sequence
  ENSG00000100106_64 (sequence is synthesized)
ctgcgaagggccccagcttgccagagctgcagttccaaccagaggagcctgaggagtcagaaccaagcagaggccaagaccccctgactgaccagaagcaggcagactcggcagacaaga

SEQ ID NO: 111006 - DNA, 120 bp, Artificial Sequence
  ENSG00000100106_65 (sequence is synthesized)
ggccagcagagggcaaggctgggagcccgctcaagggccgactggtgacctcatggcggatgcccggggaccggcccacgctgttcaatccgttcctgctgtctctgggggtcctcaggt

SEQ ID NO: 111007 - DNA, 120 bp, Artificial Sequence
  ENSG00000100106_66 (sequence is synthesized)
accacgagcgggagctgcagcgcctgcagcaggagaaggagtggctcctggctgaggagacggcagccacggcctcagccattgaagccatgaagaaggcctaccaggaagagctgagcc

SEQ ID NO: 111008 - DNA, 120 bp, Artificial Sequence
  ENSG00000100106_67 (sequence is synthesized)
gagagctgagcaaaacacggagtctccagcagggcccggatggcctccggaagcagcaccagtcagatgtggaggcactgaagcgagagctgcaggtgctatcggagcagtactcgcaga

SEQ ID NO: 111009 - DNA, 120 bp, Artificial Sequence
  ENSG00000100106_68 (sequence is synthesized)
agtgcctggagattggggcactcatgcggcaggctgaggagcgcgagcacacgctgcgccgctgccagcaggagggccaggagctgctgcgccacaaccaggagctgcatggccgcctgt

SEQ ID NO: 111010 - DNA, 120 bp, Artificial Sequence
  ENSG00000100106_69 (sequence is synthesized)
cagaggagatagaccagctgcgcggcttcattgcctcgcagggcatgggcaatggctgcgggcgcagcaacgagcggagttcctgcgagctagaggtgctgcttcgcgtaaaagaaaacg

SEQ ID NO: 111011 - DNA, 120 bp, Artificial Sequence
  ENSG00000100106_70 (sequence is synthesized)
aactccagtacctaaagaaggaggtgcagtgcctccgggacgagctccagatgatgcagaaggacaagcgcttcacctcgggaaagtaccaggacgtctatgtggagctgagccacatca

SEQ ID NO: 111012 - DNA, 120 bp, Artificial Sequence
  ENSG00000100106_71 (sequence is synthesized)
agacacggtctgagcgggagatcgagcagctgaaggagcacctgcgtcttgccatggccgccctccaggagaaggagtcgatgcgcaacagcctggctgagtagaggtcccgcccagctg

SEQ ID NO: 111013 - DNA, 120 bp, Artificial Sequence
  ENSG00000100106_72 (sequence is synthesized)
cagaccctccaggctggaggaccagccgccctccttccctcctggatggaagtaaaaagccaagctttctccccaccctctgtgggccacacgtgcacttgcacccaccacacacacaca

SEQ ID NO: 111014 - DNA, 120 bp, Artificial Sequence
  ENSG00000100106_73 (sequence is synthesized)
cacacacacacacagacacacagacacatacgcacacacgtgcacacatgtacacacggatacacacacacacacacacactgcatatctgagcgcgcccctcgcactgggtctcacctt

SEQ ID NO: 111015 - DNA, 120 bp, Artificial Sequence
  ENSG00000100106_74 (sequence is synthesized)
ctcaccttgcaccttcttcaggattttatatgtgaagagatttttatatagatttttttcctttttttccaaaacactttatactttaaaaaaaaaaaaaaaaagcaattcctggtggct

SEQ ID NO: 111016 - DNA, 120 bp, Artificial Sequence
  ENSG00000100106_75 (sequence is synthesized)
gtgtgcctccaaccctggtccccctctgtctccagccaccctctgcttgggcttctgagctggtggccctggcccagaggtctggcggaggcccaggcagcagccatggcggggtgtctc

SEQ ID NO: 111017 - DNA, 120 bp, Artificial Sequence
  ENSG00000100106_76 (sequence is synthesized)
tacaggggagaggcgggagcctgccaccctcttcctgccctacctcctactaacacttcctgccccatttggacccgtaccatggggctcaggacagagggagctagcagctggcctcca

SEQ ID NO: 111018 - DNA, 120 bp, Artificial Sequence
  ENSG00000100106_77 (sequence is synthesized)
tggccccacagcctccttcgaggctgtgctgggtgcagaaccgccagagccacccaaaaggtgtttctcttctgctccctgaacctcttaacttaataaaacgttccagcagctctggtg

SEQ ID NO: 111019 - DNA, 120 bp, Artificial Sequence
  ENSG00000100106_78 (sequence is synthesized)
tcctagatggctggcagaacaggaatggagattggggtttcttgaagtggcttccccactcacaccctacccacaccccacccttcctaaagcagcggcctctaggcttctgagggtggg

SEQ ID NO: 111020 - DNA, 120 bp, Artificial Sequence
  ENSG00000100106_79 (sequence is synthesized)
gctgaaaatccaaggtctcccttagtacagactgtgacgcccccagtgtggcttgcaggctagtggcagcggaagcatgtgggaaatagcaagtccagtcccaccccaacctactgaacc

SEQ ID NO: 111021 - DNA, 120 bp, Artificial Sequence
  ENSG00000100106_80 (sequence is synthesized)
agcgtctgcattttaacagggtgccccagtgattcacgtgaccttcaaagtctgaggagccctggagtagggcccagggcccaggcctgagagagaggcctggggctaagactagccctg

SEQ ID NO: 111022 - DNA, 120 bp, Artificial Sequence
  ENSG00000100106_81 (sequence is synthesized)
accatgaccttgggcaagtcacacccctcactgagcctcagtttgcttctccatcaaatgggtgtttttctttcagtcccagtcctctcctgaggcttttcccagaggtcatgcccagcc

SEQ ID NO: 111023 - DNA, 120 bp, Artificial Sequence
  ENSG00000100106_82 (sequence is synthesized)
ctgggcaggggtgagggcagggttgtggctgccaggcacaggtccagcgggctgggagtcctcaccatggctggctgtgctgattatggttgcatggggctgggaagaggtcccatttct

SEQ ID NO: 111024 - DNA, 120 bp, Artificial Sequence
  ENSG00000100106_83 (sequence is synthesized)
gagccacagaaacaggccacatccagtaggggtcctggaaggctgtgagaacccagaggagaccctgacccagcctgcaggtagaagactgcctttggaggcagctttgaaagatgactc

SEQ ID NO: 111025 - DNA, 120 bp, Artificial Sequence
  ENSG00000100106_84 (sequence is synthesized)
ttccagatggaagaatcaggaagggccttcccacgtggaggcaccagcaggagcaaacgtccctggtgtgttcaggcaaagagccacaggagagtgacctcgtggagtgggaagagattg

SEQ ID NO: 111026 - DNA, 120 bp, Artificial Sequence
  ENSG00000100106_85 (sequence is synthesized)
tttcccattcccttgccagggattggttgaggaatggacaaggcttgcagttcacgcaagccagtgaaatgcgaggggaagtcttgggagtggggtggaggaggtcatctgggaagggtg

SEQ ID NO: 111027 - DNA, 120 bp, Artificial Sequence
  ENSG00000100106_86 (sequence is synthesized)
tgggagtggggtggaggaggtcatctgggaagggtgtccttggtcttaaaaagaggcacaagaggccgggcgcggtggctcttgcctattatcctagcactttgggaggccaaggcaggg

SEQ ID NO: 111028 - DNA, 120 bp, Artificial Sequence
  ENSG00000100106_87 (sequence is synthesized)
cgcgccactgcactccagcctgtgtgacaagggcgaaactccatctcaaaaaaaaagggggagggtggcgcaaggagaggacacctctctcctggccctgtcgccatcttccctcatcaa

SEQ ID NO: 111029 - DNA, 120 bp, Artificial Sequence
  ENSG00000100106_88 (sequence is synthesized)
cctgtcgccatcttccctcatcaatagctaaaaatggcaaagaagaaagagccaggaccccgtgccatcaaatcctccggccttgtgctgccctgtctcggcactgcttgccttaggaga

SEQ ID NO: 111030 - DNA, 120 bp, Artificial Sequence
  ENSG00000100106_89 (sequence is synthesized)
tcaggagtgttcctagccactgggagatgggatgcctgccactggcagctctgccgtccatcctcaccatcccaccgtccccccaagacagctctccatcccatcctctgcctcccttct

SEQ ID NO: 111031 - DNA, 120 bp, Artificial Sequence
  ENSG00000100106_90 (sequence is synthesized)
agcctcaacctaactcagggctcccccgtctcacacctgggttgcaggaacatcctcttcaccaacccccctcccatccctcctcagggctgcctagggcagctacaaaaaccaggccag

SEQ ID NO: 111032 - DNA, 120 bp, Artificial Sequence
  ENSG00000100106_91 (sequence is synthesized)
cctctgaaaggtgctccacatctcattaaaaaccgtgaaatcgcactgccccactatcagaatagctcagaggagaaggtctgccagtaccaagtgctggtggggatacggagaagagca

SEQ ID NO: 111033 - DNA, 120 bp, Artificial Sequence
  ENSG00000100106_92 (sequence is synthesized)
gctcccaggcgctgctggtgcaaatgtgctttgttgcacccacggcaggaaactgaccagcttctcatcaagttaaatacgcatctaccctatggcctagcatttccactcttgcttaca

SEQ ID NO: 111034 - DNA, 120 bp, Artificial Sequence
  ENSG00000100106_93 (sequence is synthesized)
catccaggagaaatgagtccttacatgcacaaaaggatgagtaccgtaatactcacatcagcaaataaacaatacagctgtgtgtcagtagtagaatgaataaattgtggtcgattcata

SEQ ID NO: 111035 - DNA, 120 bp, Artificial Sequence
  ENSG00000100106_94 (sequence is synthesized)
ttcgcgcagtgctgctggtctggactgccctctgagctctcagggggtctctatgcaggcagagtcctcccagcccctctctcccattcttgggcgaggggtcggctggagagaggcccc

SEQ ID NO: 111036 - DNA, 120 bp, Artificial Sequence
  ENSG00000100106_95 (sequence is synthesized)
tgggacatctgggtgtgtgtgccagccacccagcccaacttcttggctctctgagtgccactatcaggaaaggggccagggctgcctcagtggctgggaggcctgcttggacttgggggt

SEQ ID NO: 111037 - DNA, 120 bp, Artificial Sequence
  ENSG00000100106_96 (sequence is synthesized)
gctcaccatggagactggatcccttcactcatttacccagaggccctatcttcagagccagagctgtgatgccaacacttagcatatctgggggagacgctggagccagcagggctcttc

SEQ ID NO: 111038 - DNA, 120 bp, Artificial Sequence
  ENSG00000100106_97 (sequence is synthesized)
ccaggccaatggaagggaggttttgtaccccctgcccaccccagactcaagaccttagatgcatcctgggaaggaagggccaccctccctggggtccatagtggggagggagtcatgcgg

SEQ ID NO: 111039 - DNA, 120 bp, Artificial Sequence
  ENSG00000100106_98 (sequence is synthesized)
cttagatgagagaggtctccccagcaggaagggagggtctggtggttggcacccactagatgagcatggtcagaaaaatatcaggatgagcaacttctttatctaggcctgggtgggggt

SEQ ID NO: 111040 - DNA, 120 bp, Artificial Sequence
  ENSG00000100106_99 (sequence is synthesized)
gcctggcacaggtctccatgggacatgctgcagctggtagcccccagaccccggggctgtgcccccctgggcggcacccagaagcccgatctgctcaacttcaagaagggatggatgtcg

SEQ ID NO: 111041 - DNA, 120 bp, Artificial Sequence
  ENSG00000100109_0 (sequence is synthesized)
gtcatttccggcgcgccggccacggtgcttccgggttctggtgtaggagcggcgtcttctcgcgcggatggtgaagctgaatttggtacgctggaccctcggacagacagcaagagagag

SEQ ID NO: 111042 - DNA, 120 bp, Artificial Sequence
  ENSG00000100109_1 (sequence is synthesized)
agcaagagagagacaagcccgaggcctgacttctagcactcctgagtttgagccctatgagcagtggaacctaggttcttcagctttggaacttgactggctctccttgctcctcagcct

SEQ ID NO: 111043 - DNA, 120 bp, Artificial Sequence
  ENSG00000100109_2 (sequence is synthesized)
ttgtgggaccttttgatcgtgaccaccaaggatccagatataattctttcctcagtaatagaaaaaagaatctgggatctaagaagatacctactcattttctaagtgactggccatgtc

SEQ ID NO: 111044 - DNA, 120 bp, Artificial Sequence
  ENSG00000100109_3 (sequence is synthesized)
attgtcccacttataccgggatggggaaggccgcattgatgatgatgatgacgagcgggagaactttgagatcactgactgggatctccagaatgagttcaaccccaaccgacagcgcca

SEQ ID NO: 111045 - DNA, 120 bp, Artificial Sequence
  ENSG00000100109_4 (sequence is synthesized)
ctggcagaccaaggaagaagccacctacggggtgtgggcagagcgagactcggatgatgagaggcccagctttggaggcaaacgggcccgtgactactctgcgccagtcaacttcatcag

SEQ ID NO: 111046 - DNA, 120 bp, Artificial Sequence
  ENSG00000100109_5 (sequence is synthesized)
cgcagggctcaagaaaggggcagcggaggaggcagagttggaagattctgatgacgaagagaaacctgttaagcaggacgactttcctaaggattttggaccaaggaagctaaaaacggg

SEQ ID NO: 111047 - DNA, 120 bp, Artificial Sequence
  ENSG00000100109_6 (sequence is synthesized)
tggcaattttaagcccagccagaaaggttttgcaggaggaaccaaatctttcatggacttcggcagctgggaaagacacacaaaaggaattggacagaagcttcttcagaagatgggcta

SEQ ID NO: 111048 - DNA, 120 bp, Artificial Sequence
  ENSG00000100109_7 (sequence is synthesized)
cgtccctggacggggcctcgggaagaatgcacaaggtatcattaacccaattgaagccaagcagagaaagggaaaaggtgctgtgggggcttatggatccgagcgcaccactcagtccat

SEQ ID NO: 111049 - DNA, 120 bp, Artificial Sequence
  ENSG00000100109_8 (sequence is synthesized)
gcaagacttccctgtggttgactcagaggaagaagctgaagaggagtttcagaaggagctgagccagtggaggaaagacccaagtggaagcaagaagaagcccaaatactcttacaagac

SEQ ID NO: 111050 - DNA, 120 bp, Artificial Sequence
  ENSG00000100109_9 (sequence is synthesized)
cgtggaagagttgaaggccaagggcaggattagcaagaagctcactgctccccagaaggaactttctcaagtcaaggtcatagacatgacaggccgggagcagaaggtctactacagcta

SEQ ID NO: 111051 - DNA, 120 bp, Artificial Sequence
  ENSG00000100109_10 (sequence is synthesized)
cagtcagatcagccacaagcacaacgttcccgatgatgggctgccgctacagtcccaacagctgccacagtctggcaaagaggccaaggcccccggcttcgcgctgcccgagctggagca

SEQ ID NO: 111052 - DNA, 120 bp, Artificial Sequence
  ENSG00000100109_11 (sequence is synthesized)
caacctgcagctgctcatcgacctcacggagcaggagatcatccagaatgaccggcagctacagtatgagcgggacatggtggtcaacctcttccacgagctggagaagatgaccgaggt

SEQ ID NO: 111053 - DNA, 120 bp, Artificial Sequence
  ENSG00000100109_12 (sequence is synthesized)
cgggtcatctcgaacctcagcaaggtcctggagatggtggaggagtgcgagcggcggatgcagcccgactgcagcaaccccctcaccctggacgagtgtgcccgcatcttcgaaaccctg

SEQ ID NO: 111054 - DNA, 120 bp, Artificial Sequence
  ENSG00000100109_13 (sequence is synthesized)
caggacaagtactatgaggagtacaggatgtccgaccgtgtggaccttgctgtggccatcgtctatccactcatgaaggagtacttcaaggagtgggatcccctcaaagactgcacttat

SEQ ID NO: 111055 - DNA, 120 bp, Artificial Sequence
  ENSG00000100109_14 (sequence is synthesized)
ggcaccgagatcatctctaagtggaaaagcctcctagagaatgaccagctcttgtcccatggcggacaggacctctcagcagatgcctttcacaggttgatatgggaagtctggatgcct

SEQ ID NO: 111056 - DNA, 120 bp, Artificial Sequence
  ENSG00000100109_15 (sequence is synthesized)
tttgttcgaaatattgtcacccagtggcagccaaggaactgtgacccgatggtggactttttggatagttgggtgcacattattcctgtgtggatcttagataacatactggaccaactc

SEQ ID NO: 111057 - DNA, 120 bp, Artificial Sequence
  ENSG00000100109_16 (sequence is synthesized)
atcttccccaagctgcaaaaggaggtggaaaactggaacccgctcacagacactgttcccatccactcttggatccacccatggctgccccttatgcaggcacggctggagccactctat

SEQ ID NO: 111058 - DNA, 120 bp, Artificial Sequence
  ENSG00000100109_17 (sequence is synthesized)
tcccccatccgtagtaagctgtccagcgccctgcagaagtggcaccccagcgactcctctgccaagctcatcctccagccctggaaggatgtcttcactcctggctcctgggaagcattc

SEQ ID NO: 111059 - DNA, 120 bp, Artificial Sequence
  ENSG00000100109_18 (sequence is synthesized)
atggtcaaaaacatagtgcccaagctggggatgtgtcttggtgagctagtcattaacccccaccagcagcacatggatgcattctattgggtgattgactgggaagggatgatctctgtc

SEQ ID NO: 111060 - DNA, 120 bp, Artificial Sequence
  ENSG00000100109_19 (sequence is synthesized)
tctagcctggtgggacttcttgaaaagcacttcttccccaagtggcttcaggtgctgtgctcttggctcagtaacagcccaaattatgaggagatcaccaagtggtacctgggttggaag

SEQ ID NO: 111061 - DNA, 120 bp, Artificial Sequence
  ENSG00000100109_20 (sequence is synthesized)
tcgatgttctcagaccaagtgctggcacatccatctgtcaaggacaaatttaatgaggcacttgatatcatgaaccgggcggtgtcctccaacgttggtgcctacatgcagccaggagca

SEQ ID NO: 111062 - DNA, 120 bp, Artificial Sequence
  ENSG00000100109_21 (sequence is synthesized)
cgggagaacattgcctatctcacccacacggagcggaggaaggacttccagtacgaggccatgcaggagaggcgggaggctgagaacatggctcagaggggcattggcgtggccgctagc

SEQ ID NO: 111063 - DNA, 120 bp, Artificial Sequence
  ENSG00000100109_22 (sequence is synthesized)
tctgtgcccatgaactttaaggacctcattgagaccaaggctgaggagcacaacattgtcttcatgcccgtcattgggaagcgacacgaagggaagcagctctacacctttggccgcatt

SEQ ID NO: 111064 - DNA, 120 bp, Artificial Sequence
  ENSG00000100109_23 (sequence is synthesized)
gtgatctacatcgaccggggagtggtctttgtccagggcgagaagacgtgggtgcccacctcactgcagagcctgatcgacatggccaagtgaactgtggcaggtccagaaccagtcaga

SEQ ID NO: 111065 - DNA, 120 bp, Artificial Sequence
  ENSG00000100109_24 (sequence is synthesized)
acaaggggactcagcgccagtgagagtagggacgaaggctcagggaaggcgagcttcggtccaagccgttggggtgtggggaggggaatccatttcgtagacagctctgccgaggcacgg

SEQ ID NO: 111066 - DNA, 120 bp, Artificial Sequence
  ENSG00000100109_25 (sequence is synthesized)
agaggggcggtgctgcttggggtcaactgggatttagggcttggattcatttaagaacctgagcttccttcaccaaacctagacagcaagagagagacaagcccgaggcctgacttctag

SEQ ID NO: 111067 - DNA, 120 bp, Artificial Sequence
  ENSG00000100109_26 (sequence is synthesized)
taaataaacagtatttttagatcaccttcaaaagggtaacttctttactcaggagctactccacatcaggccaggtcatgagggaaggatgtaaaatgggacaatgccacgtagggcagg

SEQ ID NO: 111068 - DNA, 120 bp, Artificial Sequence
  ENSG00000100109_27 (sequence is synthesized)
aatctttataccaagtcctcatgtggggtatcgtcctcaaaacaggacagccaagttgatgttctttcctggcaaaggagttctctgtagttcctccatagcagccttccctttagtctc

SEQ ID NO: 111069 - DNA, 120 bp, Artificial Sequence
  ENSG00000100109_28 (sequence is synthesized)
tggtggcagcttctacctcagccaacactgagtacctcacaacgagttcagtcagtagcagaaggatcttctctcttgttcctgatgatttcaaggtcctcacagtcctgataatctggt

SEQ ID NO: 111070 - DNA, 120 bp, Artificial Sequence
  ENSG00000100109_29 (sequence is synthesized)
tcttcccgaaactcccaaatatctatggagagctgttctagcttttgcacagggaaccagtggacagaggtatcattaaatatgtccatgtattgtgaagtctgaggaaactcaagctcc

SEQ ID NO: 111071 - DNA, 120 bp, Artificial Sequence
  ENSG00000100109_30 (sequence is synthesized)
tccagtccttttaaaatctgagcagaaaaattcaagtataaaaacttcagatagtcacagtaatccccactcttctgggataaatttccactttacttgtcatccccactttacttttta

SEQ ID NO: 111072 - DNA, 120 bp, Artificial Sequence
  ENSG00000100109_31 (sequence is synthesized)
aaaaaataacaaatagggtattttgatttaaatgcttttgcacaatgaattgggcgccccaaggacagtggatatcatggactgtgatactaagaataaaggaaataaggaaaaaactaa

SEQ ID NO: 111073 - DNA, 90 bp, Artificial Sequence
  ENSG00000100109_32 (sequence is synthesized)
aaggaaagggttagggtctaaaacaggctgcaaacaggttgaaaacaggctttttttctggtcctgaccagtgcttctaaaaacaaaaat

SEQ ID NO: 111074 - DNA, 120 bp, Artificial Sequence
  ENSG00000100109_33 (sequence is synthesized)
gggttgggaaggattgctgaaggtgggggaaggcagcagtgctggccttgattaattctctgctcatgctgacagtgctttaggaatttaaattcatttggctatgaatttttttttttt

SEQ ID NO: 111075 - DNA, 120 bp, Artificial Sequence
  ENSG00000100109_34 (sequence is synthesized)
acagacagcaagagagagacaagcccgaggcctgacttctagcactcctgagtttgagccctatgagcagtggaacctaggctgccagcacggcaagaatataagcaggcagaaaaatgt

SEQ ID NO: 111076 - DNA, 120 bp, Artificial Sequence
  ENSG00000100109_35 (sequence is synthesized)
cagaagctgttccaagcactttatttgctttatctcagctcctctcagcaaccctatggggtaggggatatggtatccctgttgtgtagacatggaagctgaggctcagagagtttacat

SEQ ID NO: 111077 - DNA, 120 bp, Artificial Sequence
  ENSG00000100109_36 (sequence is synthesized)
gcaagggcactttagctaccaggctgactccaaaatccatattcataagtgctagactgtttagctactataaatccctgtaaagtagtgtcactagcctgtaggaccaggatcaaaaca

SEQ ID NO: 111078 - DNA, 120 bp, Artificial Sequence
  ENSG00000100109_37 (sequence is synthesized)
aaacaaatggccacttcagaaatcttgccttcatttgttgccacgatggatgcaagtaatttttctttttggcaggtgctgtgctcttggctcagtaacagcccaaattatgaggagatc

SEQ ID NO: 111079 - DNA, 120 bp, Artificial Sequence
  ENSG00000100109_38 (sequence is synthesized)
ttattaccatttactatgcccacgcaggcagtggtattatttaactttatgtatttgagattccccgtcttttctgaaaatccttctgtcctaaacactcctggaagaggttgggacccg

SEQ ID NO: 111080 - DNA, 120 bp, Artificial Sequence
  ENSG00000100109_39 (sequence is synthesized)
ttgcacccaaccggtgcaccagtgagtagaagaaggcagagataacgttttgccagaggtgaccagagtttgacactgcctgtggaagtagtgaactccgtgtgccttaaggccgctttc

SEQ ID NO: 111081 - DNA, 120 bp, Artificial Sequence
  ENSG00000100109_40 (sequence is synthesized)
attttctagccagggagaaactcatctggaatgaatttcgtgagtgtctccttttggtggcaggtttctgtgagttgtgaagtgtgtagtgcagtctcttccttcctgacacgttatcac

SEQ ID NO: 111082 - DNA, 120 bp, Artificial Sequence
  ENSG00000100109_41 (sequence is synthesized)
acacatttttggttcatatgacacttttcatagtgctgtataacttaggccattttcctgttggccaagctttcttagatttttcttcattttgtttttccattaactaagctttgattt

SEQ ID NO: 111083 - DNA, 120 bp, Artificial Sequence
  ENSG00000100116_0 (sequence is synthesized)
gtccgcgatgcgcacggctcccaggcaggcaggcgcgctcgggcgaggtaggagcgatgtggcctgggaacgcctggcgcgccgcactcttctgggtgccccgcggccgccgcgcacagt

SEQ ID NO: 111084 - DNA, 120 bp, Artificial Sequence
  ENSG00000100116_1 (sequence is synthesized)
cagcgctggcccagctgcgtggcattctggagggggagctggaaggcatccgcggagctggcacttggaagagtgagcgggtcatcacgtcccgtcaggggccgcacatccgcgtggacg

SEQ ID NO: 111085 - DNA, 120 bp, Artificial Sequence
  ENSG00000100116_2 (sequence is synthesized)
gcgtctccggaggaatccttaacttctgtgccaacaactacctgggcctgagcagccaccctgaggtgatccaggcaggtctgcaggctctggaggagtttggagctggcctcagctctg

SEQ ID NO: 111086 - DNA, 120 bp, Artificial Sequence
  ENSG00000100116_3 (sequence is synthesized)
tccgctttatctgtggaacccagagcatccacaagaatctagaagcaaaaatagcccgcttccaccagcgggaggatgccatcctctatcccagctgttatgacgccaacgccggcctct

SEQ ID NO: 111087 - DNA, 120 bp, Artificial Sequence
  ENSG00000100116_4 (sequence is synthesized)
ttgaggccctgctgaccccagaggacgcagtcctgtcggacgagctgaaccatgcctccatcatcgacggcatccggctgtgcaaggcccacaagtaccgctatcgccacctggacatgg

SEQ ID NO: 111088 - DNA, 120 bp, Artificial Sequence
  ENSG00000100116_5 (sequence is synthesized)
ccgacctagaagccaagctgcaggaggcccagaagcatcggctgcgcctggtggccactgatggggccttttccatggatggcgacatcgcacccctgcaggagatctgctgcctcgcct

SEQ ID NO: 111089 - DNA, 120 bp, Artificial Sequence
  ENSG00000100116_6 (sequence is synthesized)
ccacaggacggggcacagatgagctgctgggtgtgatggaccaggtcaccatcatcaactccaccctggggaaggccctgggtggagcatcagggggctacacgacagggcctgggcccc

SEQ ID NO: 111090 - DNA, 120 bp, Artificial Sequence
  ENSG00000100116_7 (sequence is synthesized)
tggtgtccctgctgcggcagcgcgcccggccatacctcttctccaacagtctgccacctgctgtcgttggctgcgcctccaaggccctagatctgctgatggggagtaacaccattgtcc

SEQ ID NO: 111091 - DNA, 120 bp, Artificial Sequence
  ENSG00000100116_8 (sequence is synthesized)
agtctatggctgccaagacccagaggttccgtagtaagatggaagctgctggcttcactatctcgggagccagtcaccccatctgccctgtgatgctgggtgatgcccggctggcctctc

SEQ ID NO: 111092 - DNA, 120 bp, Artificial Sequence
  ENSG00000100116_9 (sequence is synthesized)
gcatggcggatgacatgctgaagagaggcatctttgtcatcgggttcagctaccccgtggtccccaagggcaaggcccggatccgggtacagatctcagcagtgcatagcgaggaagaca

SEQ ID NO: 111093 - DNA, 120 bp, Artificial Sequence
  ENSG00000100116_10 (sequence is synthesized)
ttgaccgctgcgtggaggccttcgtggaagtggggcgactgcacggggcactgccctgagctctgggtaaggacgagaagagccaaggtccgcctactgccacagggtcaaaggaggttt

SEQ ID NO: 111094 - DNA, 120 bp, Artificial Sequence
  ENSG00000100116_11 (sequence is synthesized)
tcgatcagcccagaccagaggctctgagccctgaaccaaagtcccagagctgggctgggacgtgacctgtgctgagggctgtgagaatgtgaaacaacagtgtgaaaattggctgtgaca

SEQ ID NO: 111095 - DNA, 120 bp, Artificial Sequence
  ENSG00000100116_12 (sequence is synthesized)
ctgtggccggttgaagaatcaggcaggagccagggctctgaggggaggcgcctgaggactgcagatctccactgacctctttccctagattaagatgggacccagtggccgggcacggtg

SEQ ID NO: 111096 - DNA, 120 bp, Artificial Sequence
  ENSG00000100121_0 (sequence is synthesized)
attgaatgcagcaagggtctggaggctgaggaccaggcagacagacattcagagttgctggaatgcgacagagacagggagtcagactggtcatgcaaggccagctctggggtctcggca

SEQ ID NO: 111097 - DNA, 120 bp, Artificial Sequence
  ENSG00000100121_1 (sequence is synthesized)
ggtggtccacaacatgacctctgagttcttcgctgcccagctccgggcccagatctctgacgacaccactcacccgatctcctactacaagcccgagttctacacgccggttgatggggg

SEQ ID NO: 111098 - DNA, 120 bp, Artificial Sequence
  ENSG00000100121_2 (sequence is synthesized)
cactgctcacctgtctgtcgtcgcagaggacggcagtgctgtgtccgccaccagcaccatcaacctctactttggctccaaggtccgctccccggtcagcgagatcctgttcaatgatga

SEQ ID NO: 111099 - DNA, 120 bp, Artificial Sequence
  ENSG00000100121_3 (sequence is synthesized)
aatggatgacttcagctctcccaacatcaccaacgagtttggggtgcccccctcacctgccaatttcatccagccagggaagcagccgctctcgtcaatgtgcccgacgatcatggtggg

SEQ ID NO: 111100 - DNA, 85 bp, Artificial Sequence
  ENSG00000100121_4 (sequence is synthesized)
gggccaggacggccaggtccggatggtggtgggagctgctgggggcacacagatcaccacagccactgcacttgaagcgggccgt

SEQ ID NO: 111101 - DNA, 87 bp, Artificial Sequence; identical to SEQ ID NO: 109954
  ENSG00000100121_5 (sequence is synthesized)

SEQ ID NO: 111102 - DNA, 120 bp, Artificial Sequence; identical to SEQ ID NO: 109955
  ENSG00000100121_6 (sequence is synthesized)

SEQ ID NO: 111103 - DNA, 120 bp, Artificial Sequence
  ENSG00000100121_7 (sequence is synthesized)
atactcaccaggaccaggaaggggactctgggggactggcttcccctgtgagcagcagagcagcacaataaatgaggccactgtgccaggctccaggtggcctccctgccctgtctcccc

SEQ ID NO: 111104 - DNA, 120 bp, Artificial Sequence
  ENSG00000100121_8 (sequence is synthesized)
ctcgagagctgggctctgagcgtcctcgtccagccgccaactcggccaacggctaagccagcagtttcttctgttgccgggcaacgcgccttttaaacctgagggagcgggcgcgtgagc

SEQ ID NO: 111105 - DNA, 120 bp, Artificial Sequence
  ENSG00000100121_9 (sequence is synthesized)
ggtcagcgagatcctgttcaatgatgaaatggatgacttcagctctcccaacatcaccaacgagtttggggtgcccccctcacctgccaatttcatccagccagcccccaagccatgctg

SEQ ID NO: 111106 - DNA, 120 bp, Artificial Sequence
  ENSG00000100122_0 (sequence is synthesized)
atagcacctgcccgcctgcctgtcctccagcaggaagtagcaagtccccagacttttgcaggcgggaaccatgtctcaggctgcaaaggcctcggcctcggccacagtggcggtgaaccc

SEQ ID NO: 111107 - DNA, 120 bp, Artificial Sequence
  ENSG00000100122_1 (sequence is synthesized)
agggcctgacaccaaggggaagggggccccacctgcaggaacatcccctagtcccggcactaccctggccccaacaaccgtgcctattaccagcgccaaggcggcggaactgcctcctgg

SEQ ID NO: 111108 - DNA, 120 bp, Artificial Sequence
  ENSG00000100122_2 (sequence is synthesized)
gaactacaggctggtggtcttcgaactggaaaacttccagggccgtcgagcagaattctcgggggagtgctcaaatctggcagaccgtggcttcgaccgtgtgcgcagcatcattgtctc

SEQ ID NO: 111109 - DNA, 120 bp, Artificial Sequence
  ENSG00000100122_3 (sequence is synthesized)
cgcgggaccctgggtcgcctttgagcagtccaacttccgcggggagatgttcatcctggagaagggcgagtaccctcgctggaacacatggtcgagcagctaccgcagtgatcggctcat

SEQ ID NO: 111110 - DNA, 120 bp, Artificial Sequence
  ENSG00000100122_4 (sequence is synthesized)
agagatccagggggacgacgcacccagtctctgggtctacggcttcagtgaccgcgtgggcagcgtgaaggtctccagtggaacatgggttggctatcagtatcctggctaccgcgggta

SEQ ID NO: 111111 - DNA, 120 bp, Artificial Sequence
  ENSG00000100122_5 (sequence is synthesized)
ccagtacctcctagagcctggtgacttccggcactggaatgagtggggagccttccagccacagatgcagtccctgcgtcgcctgcgtgacaagcagtggcacctcgaggggtccttccc

SEQ ID NO: 111112 - DNA, 120 bp, Artificial Sequence
  ENSG00000100122_6 (sequence is synthesized)
tgtcctggccacagagccccccaagtgagtccacacctcactctgctaccttgccccaacccttcttcatgttcaattatttcccccatttttcccaggcaaataaaattccctaaagcc

SEQ ID NO: 111113 - DNA, 120 bp, Artificial Sequence
  ENSG00000100122_7 (sequence is synthesized)
aaaatttctcctggatctgtaaacagatgtgtgccttgaggtcccccatagttactgggatgtgacttcctcgctcttaataattacaacgataataaaagcagcaaacactgaaaagtt

SEQ ID NO: 111114 - DNA, 120 bp, Artificial Sequence
  ENSG00000100122_8 (sequence is synthesized)
tctagagaaacagtgtgctcagataatcacacacatttatctcacttaatccttcaccaactccaaggaaacaggcatatgagtgtagatgagaaacaaaggctcagagagctgggtcgc

SEQ ID NO: 111115 - DNA, 120 bp, Artificial Sequence
  ENSG00000100124_0 (sequence is synthesized)
agctcgctgacagcacgactcagggcggagggaagtaggtccgttggtcggtcgggaacgaggctcaggcggccaggcccgcgcggagccgttgccatggcagccgccgccggggacgcg

SEQ ID NO: 111116 - DNA, 120 bp, Artificial Sequence
  ENSG00000100124_1 (sequence is synthesized)
gacgacgagccgcgctcaggccactcgagctcggagggcgagtgcgcggtggcgccggagccgctgactgacgctgagggcctcttctccttcgctgacttcgggtctgcgctgggcggc

SEQ ID NO: 111117 - DNA, 120 bp, Artificial Sequence
  ENSG00000100124_2 (sequence is synthesized)
ggcggcgcgggcctctcgggccgggcgtccggcggggcccagtcgccgctgcgctacttgcacgtcctgtggcagcaggatgcggagccgcgcgacgagctgcgctgcaagatacccgct

SEQ ID NO: 111118 - DNA, 120 bp, Artificial Sequence
  ENSG00000100124_3 (sequence is synthesized)
ggccggctgaggcgcgctgccaggccccaccggcggctcgggcccacgggcaaggaggtgcacgctctgaagagactgagggactcggccaatgccaatgatgtggaaacagtgcagcag

SEQ ID NO: 111119 - DNA, 120 bp, Artificial Sequence
  ENSG00000100124_4 (sequence is synthesized)
ctgctggaagatggcgcggatccctgtgcagctgatgacaagggccgcacagctctacactttgcctcatgcaatggcaatgaccagattgtgcagctgctcctggaccatggtgctgat

SEQ ID NO: 111120 - DNA, 120 bp, Artificial Sequence
  ENSG00000100124_5 (sequence is synthesized)
cctaaccagcgagatgggctggggaacacgccactgcacctggcggcctgcaccaaccacgttcctgtcatcaccacactgctacgaggaggggcccgtgtagatgccctggaccgagct

SEQ ID NO: 111121 - DNA, 120 bp, Artificial Sequence
  ENSG00000100124_6 (sequence is synthesized)
ggtcgcacacccctgcacctggccaagtcaaagctgaatatcctgcaggagggccatgcccagtgcctagaggctgtgcgtctggaggtgaagcagatcatccatatgctgagggagtat

SEQ ID NO: 111122 - DNA, 120 bp, Artificial Sequence
  ENSG00000100124_7 (sequence is synthesized)
ctggagcgcctagggcaacatgagcagcgagaacgcctggatgacctctgcacccgcctgcagatgaccagtaccaaagagcaggtggatgaagtgactgacctcctggccagcttcacc

SEQ ID NO: 111123 - DNA, 120 bp, Artificial Sequence
  ENSG00000100124_8 (sequence is synthesized)
gctccctgccttcctgccactgccccaccctgccccactgctgtctcagtaccaagaaaaagcccaacatctgggacttggagctgcacttgtctggtgaggaccttgccctcacccgca

SEQ ID NO: 111124 - DNA, 120 bp, Artificial Sequence
  ENSG00000100124_9 (sequence is synthesized)
gatgccgtggggcagagatgctctctctccacggcctcagagccactcccagccacagtttccagcatctctgtggacagggaccacagctcccagcttcttccagttctcgcagcacca

SEQ ID NO: 111125 - DNA, 120 bp, Artificial Sequence
  ENSG00000100124_10 (sequence is synthesized)
gaccagcctctgcagctgcacttcagctccgcagacctgcgctatctcagcagacctcacttgccccatggccttcatggcgcgctccaggcctcagacccttctctgtgttccgtcctg

SEQ ID NO: 111126 - DNA, 120 bp, Artificial Sequence
  ENSG00000100124_11 (sequence is synthesized)
gccatgggcttgttgcagtcagcaggtgtgggcttaggcgggcaccctgtggccaggggtactgcgtgaggccctcagttggtcctgtgcctctcaccagcacttagacagacacgtcac

SEQ ID NO: 111127 - DNA, 120 bp, Artificial Sequence
  ENSG00000100124_12 (sequence is synthesized)
cagactttcaaggagatactgcagtgagtttctctggttggaaggggagggttggtgagtcccagaccttaaaaatacaaggttaagagggaccccaaagcaaaaaattccaaccctttt

SEQ ID NO: 111128 - DNA, 120 bp, Artificial Sequence
  ENSG00000100124_13 (sequence is synthesized)
cctcccagtcattgaaacaccaaaactattataccggagggtgtaatagttttgctgcccagttgtggtaggccagtagtggcctcccaagatgcccatgtcctaatcccaggaacctgt

SEQ ID NO: 111129 - DNA, 120 bp, Artificial Sequence
  ENSG00000100124_14 (sequence is synthesized)
caaaattaccttgtatggccaaaggggctttgcagatgtaatgaagttaaggatctttcgccaggaagattatcccagcttgttcaggagggcttgatgtcctcacccgggtctgtataa

SEQ ID NO: 111130 - DNA, 120 bp, Artificial Sequence
  ENSG00000100124_15 (sequence is synthesized)
cagaagagcaggtgacgggagaggaggttggaggtgtagcgatggagcaggaaactggagttgaggagggcagctcaagccacagagtccaggccacctcagagccaggaaatgcatcct

SEQ ID NO: 111131 - DNA, 120 bp, Artificial Sequence
  ENSG00000100124_16 (sequence is synthesized)
cccacagagccctggaaggccccagccctgctcccacctggactggctcagtgaggctaattttataattctggctgattttagaactctaagggaataaatttgtgttgttttaagtca

SEQ ID NO: 111132 - DNA, 120 bp, Artificial Sequence
  ENSG00000100124_17 (sequence is synthesized)
ggggcggggcagcccgggcgaggggcggggcctcagaggaccagtggccgcgctttggtcgcccccgaccctcagccggggtcccccgacgtctgcgctgagggccacactgacccttga

SEQ ID NO: 111133 - DNA, 120 bp, Artificial Sequence
  ENSG00000100124_18 (sequence is synthesized)
gtctcctttcagtaacgatggtgatgatggtttttttagaaagtcttcctgctctgagccagtcaccccagtcttctctcactgggtaatttctgaatggaaacttcccatgactcggaa

SEQ ID NO: 111134 - DNA, 86 bp, Artificial Sequence
  ENSG00000100124_19 (sequence is synthesized)
tggccatctgagacagccatatccagaaggaagaggagccgcgttccgtggctcacacctgtaaccccaccagtgaggccgggggt

SEQ ID NO: 111135 - DNA, 89 bp, Artificial Sequence
  ENSG00000100124_20 (sequence is synthesized)
gaaaactccgtctaaaaagaataagagggttacaagtagcctgaattttcctctcttcaaatagggacttctcaaagaagctctgaaga

SEQ ID NO: 111136 - DNA, 120 bp, Artificial Sequence
  ENSG00000100124_21 (sequence is synthesized)
tttttttttttttttgagacagggtctgtctctgttgcctaggctggagtgcactggcaccatctcggctgactgcaacctcgaccttctgggctcaagccgccctgccacctcagcctc

SEQ ID NO: 111137 - DNA, 85 bp, Artificial Sequence
  ENSG00000100124_22 (sequence is synthesized)
aagccgcccttctgccatcactatgcccagctaatttttgtgtttttagtatagagaaagggtttctccatgttgcccaggctgg

SEQ ID NO: 111138 - DNA, 120 bp, Artificial Sequence
  ENSG00000100124_23 (sequence is synthesized)
cctcggcatcccaaagtgctgggattaacaggcctgagctcccatgcctggccttttctttcctatggttagtatttttgtgacctatttaagaaatctttgcctgcccaagatgttcat

SEQ ID NO: 111139 - DNA, 120 bp, Artificial Sequence
  ENSG00000100124_24 (sequence is synthesized)
tctttgcctgcccaagatgttcatgttcttctggaagcctgttttagcattcacacttatgtctatggtccctcttgaattagtttttgtacatggtgtgaggctcagcctgacctccct

SEQ ID NO: 111140 - DNA, 120 bp, Artificial Sequence
  ENSG00000100124_25 (sequence is synthesized)
gtatgatgtctgggatccaggctacctgcctatgcatccttctgggtattggcagaccctggtgataatacagcacacccctgaggtgatcccaagactgccaggagggagaggttatcc

SEQ ID NO: 111141 - DNA, 120 bp, Artificial Sequence
  ENSG00000100124_26 (sequence is synthesized)
atggagctcagcatcatttattgacttaattcctaccatggtgcttggctgtgggagaagcagaaaatgccctggacagccttcaccaggagcagctgctattggaagaactttacttaa

SEQ ID NO: 111142 - DNA, 120 bp, Artificial Sequence
  ENSG00000100124_27 (sequence is synthesized)
cccttcaaatctcattcctacacctgcataggccaagaggccctccccaaatcctcagttcctggccctcagggctttgcccatgaactctgtgcagctgctcctggaccatggtgctga

SEQ ID NO: 111143 - DNA, 120 bp, Artificial Sequence
  ENSG00000100124_28 (sequence is synthesized)
aaatagggacttctcaaagaaggtgaatctataatagtggtgtagattcagatataaggacacgtatttggcgtaaaggagaggcaaagttagaggaaccagaaagaatgctacacaaaa

SEQ ID NO: 111144 - DNA, 120 bp, Artificial Sequence
  ENSG00000100124_29 (sequence is synthesized)
ggatttagttgtaggcggtttgcctgcagcgagtaaattattcaaacgttcggacttcacaagactaaacttactggggataaaaattgagatttggccgggcgcgatggctcacgcctg

SEQ ID NO: 111145 - DNA, 75 bp, Artificial Sequence
  ENSG00000100124_30 (sequence is synthesized)
aaaattagccgggagtggtagcgtgtggaacctgagaggcagaggctgtagtgagccgagatcgcgccactgcac

SEQ ID NO: 111146 - DNA, 120 bp, Artificial Sequence
  ENSG00000100124_31 (sequence is synthesized)
gtctaaaaaaaaaaagaaaaaaaaaaattgagatttggtcccatgcagtaagagggaatggagaacaggagccacccaactttggacattaaagttggagcaggcaaagatgaggccagc

SEQ ID NO: 111147 - DNA, 120 bp, Artificial Sequence
  ENSG00000100124_32 (sequence is synthesized)
tgtgtcgcgaagcctgggacatgggcagctcttgagtacaccgggttcgaggccaggggaaaccctcaaggtagagatggggttataaagcaaaccaataaaaaccggtgtatgagtcaa

SEQ ID NO: 111148 - DNA, 120 bp, Artificial Sequence
  ENSG00000100129_0 (sequence is synthesized)
gctgaacttccggcctcaggacgcaggcgcgggccgctcatttcgctctttccggcggtgctcgcaagcgaggcagccatgtcttatcccgctgatgattatgagtctgaggcggcttat

SEQ ID NO: 111149 - DNA, 120 bp, Artificial Sequence
  ENSG00000100129_1 (sequence is synthesized)
gacccctacgcttatcccagcgactatgatatgcacacaggagatccaaagcaggaccttgcttatgaacgtcagtatgaacagcaaacctatcaggtgatccctgaggtgatcaaaaac

SEQ ID NO: 111150 - DNA, 120 bp, Artificial Sequence
  ENSG00000100129_2 (sequence is synthesized)
ttcatccagtatttccacaaaactgtctcagatttgattgaccagaaagtgtatgagctacaggccagtcgtgtctccagtgatgtcattgaccagaaggtgtatgagatccaggacatc

SEQ ID NO: 111151 - DNA, 120 bp, Artificial Sequence
  ENSG00000100129_3 (sequence is synthesized)
tatgagaacagctggaccaagctgactgaaagattcttcaagaatacaccttggcccgaggctgaagccattgctccacaggttggcaatgatgctgtcttcctgattttatacaaagaa

SEQ ID NO: 111152 - DNA, 120 bp, Artificial Sequence
  ENSG00000100129_4 (sequence is synthesized)
ttatactacaggcacatatatgccaaagtcagtgggggaccttccttggagcagaggtttgaatcctattacaactactgcaatctcttcaactacattcttaatgccgatggtcctgct

SEQ ID NO: 111153 - DNA, 120 bp, Artificial Sequence
  ENSG00000100129_5 (sequence is synthesized)
ccccttgaactacccaaccagtggctctgggatattatcgatgagttcatctaccagtttcagtcattcagtcagtaccgctgtaagactgccaagaagtcagaggaggagattgacttt

SEQ ID NO: 111154 - DNA, 120 bp, Artificial Sequence
  ENSG00000100129_6 (sequence is synthesized)
cttcgttccaatcccaaaatctggaatgttcatagtgtcctcaatgtccttcattccctggtagacaaatccaacatcaaccgacagttggaggtatacacaagcggaggtgaccctgag

SEQ ID NO: 111155 - DNA, 120 bp, Artificial Sequence
  ENSG00000100129_7 (sequence is synthesized)
agtgtggctggggagtatgggcggcactccctctacaaaatgcttggttacttcagcctggtcgggcttctccgcctgcactccctgttaggagattactaccaggccatcaaggtgctg

SEQ ID NO: 111156 - DNA, 120 bp, Artificial Sequence
  ENSG00000100129_8 (sequence is synthesized)
caggtcaccacatactattatgttgggtttgcatatttgatgatgcgtcgttaccaggatgccatccgggtcttcgccaacatcctcctctacatccagaggaccaagagcatgttccag

SEQ ID NO: 111157 - DNA, 120 bp, Artificial Sequence
  ENSG00000100129_9 (sequence is synthesized)
aggaccacgtacaagtatgagatgattaacaagcagaatgagcagatgcatgcgctgctggccattgccctcacgatgtaccccatgcgtattgatgagagcattcacctccagctgcgg

SEQ ID NO: 111158 - DNA, 120 bp, Artificial Sequence
  ENSG00000100129_10 (sequence is synthesized)
gagaaatatggggacaagatgttgcgcatgcagaaaggtgacccacaagtctatgaagaacttttcagttactcctgccccaagttcctgtcgcctgtagtgcccaactatgataatgtg

SEQ ID NO: 111159 - DNA, 120 bp, Artificial Sequence
  ENSG00000100129_11 (sequence is synthesized)
caccccaactaccacaaagagcccttcctgcagcagctgaaggtgttttctgatgaagtacagcagcaggcccagctttcaaccatccgcagcttcctgaagctctacaccaccatgcct

SEQ ID NO: 111160 - DNA, 120 bp, Artificial Sequence
  ENSG00000100129_12 (sequence is synthesized)
gtggccaagctggctggcttcctggacctcacagagcaggagttccggatccagcttcttgtcttcaaacacaagatgaagaacctcgtgtggaccagcggtatctcagccctggatggt

SEQ ID NO: 111161 - DNA, 120 bp, Artificial Sequence
  ENSG00000100129_13 (sequence is synthesized)
gaatttcagtcagcctcagaggttgacttctacattgataaggacatgatccacatcgcggacaccaaggtcgccaggcgttatggggatttcttcatccgtcagatccacaaatttgag

SEQ ID NO: 111162 - DNA, 120 bp, Artificial Sequence
  ENSG00000100129_14 (sequence is synthesized)
gagcttaatcgaaccctgaagaagatgggacagagaccttgatgatattcacacacattcaggaacctgttttgatgtattataggcaggaagtgtttttgctaccgtgaaacctttacc

SEQ ID NO: 111163 - DNA, 120 bp, Artificial Sequence
  ENSG00000100129_15 (sequence is synthesized)
tagatcagccatcagcctgtcaactcagttaacaagttaaggaccgaagtgtttcaagtggatctcagtaaaggatctttggagccagatttgtcgtctcattattgtaggagagaattt

SEQ ID NO: 111164 - DNA, 120 bp, Artificial Sequence
  ENSG00000100129_16 (sequence is synthesized)
gtgggttgtggcagtaatacatttcccatgtgtcctgatgctttcaggatacatcagttgttagtgtttaaattgagttatttttattttgtgcttttgagatggagtctcactctgtct

SEQ ID NO: 111165 - DNA, 60 bp, Artificial Sequence
  ENSG00000100129_17 (sequence is synthesized)
gctggagtgcagtagcgtgatctcagttcgttgcatcctccgctgcccaggttcaagcag

SEQ ID NO: 111166 - DNA, 87 bp, Artificial Sequence
  ENSG00000100129_18 (sequence is synthesized)
gcctcaagtgattcgcctgccttggcctcccaaaatcgcctaaattcaaaatctttttgtttttttttagacggagtctcactctgt

SEQ ID NO: 111167 - DNA, 76 bp, Artificial Sequence
  ENSG00000100129_19 (sequence is synthesized)
taggattacaggcatgagccaccacgccccgcctaaattcaaaatctttttgtactggcgcgatctcggctcactg

SEQ ID NO: 111168 - DNA, 60 bp, Artificial Sequence
  ENSG00000100129_20 (sequence is synthesized)
cccggcatttcctgacctcgtgatctgcccatctctgcctcctaaagtactgggattaca

SEQ ID NO: 111169 - DNA, 77 bp, Artificial Sequence
  ENSG00000100129_21 (sequence is synthesized)
caccgtgttagccaggatggtctcagatttcctgacctcgtgatctgcccatctctgcctccaaattgaattcttaa

SEQ ID NO: 111170 - DNA, 120 bp, Artificial Sequence
  ENSG00000100129_22 (sequence is synthesized)
tttccggcggtgctcgcaagcgaggcagccatgtcttatcccgctgatgattatgagtctgaggcggcttatgacccctacgcttatcccagcgactatgatatgcacacagagacgagg

SEQ ID NO: 111171 - DNA, 120 bp, Artificial Sequence
  ENSG00000100129_23 (sequence is synthesized)
ttagatgttgtttagtcttcagaattacctttattcctccccaccaaagagctaaagctgccaggataccccagttttatggttagtgaagcacccttctgccatctctttcagatgctg

SEQ ID NO: 111172 - DNA, 120 bp, Artificial Sequence
  ENSG00000100129_24 (sequence is synthesized)
aggtaaggtggccgtaagggcgcggtgggctccacgacggggtgatctctgggaccactggatgtgggtcccggcgcgaggcagcttccgggtcgcggccagctccggccgacctcccgc

SEQ ID NO: 111173 - DNA, 120 bp, Artificial Sequence
  ENSG00000100129_25 (sequence is synthesized)
ccggccctcaggctgctcccacagttcccggtccctagacaaccctggctctgcccgcccacttcgcgtgttcgattggcttgtccttcccctttctaagaccggagactaaggcctgtt

SEQ ID NO: 111174 - DNA, 120 bp, Artificial Sequence
  ENSG00000100129_26 (sequence is synthesized)
agacgtttctgtgtttctgcacctgagtttttttggtctaggctccgtctggtcaaatctcgctgattcccacagcctcttgtcctttgctccacctcattgcacccgtaatgttgtatt

SEQ ID NO: 111175 - DNA, 120 bp, Artificial Sequence
  ENSG00000100129_27 (sequence is synthesized)
gtcattgtctgtttactgtcccttttctctaaggcgtgtgagttcctcaaaggcaggcacagtgtcttattcgcctctgtatccttagctctctgcttggcatctagactctaggatgag

SEQ ID NO: 111176 - DNA, 120 bp, Artificial Sequence
  ENSG00000100129_28 (sequence is synthesized)
aactttgcctctcctttacgccaaatacgtgtccttatatctgaatctacaccactattatagattcaccttctttgagaagtccctatttgaagagaggaaaattcaggctacttgtaa

SEQ ID NO: 111177 - DNA, 69 bp, Artificial Sequence
  ENSG00000100129_29 (sequence is synthesized)
agtccctatttgaagagaggaaaattcaggctacttgtaaccctcttattctttttagacggagttttc

SEQ ID NO: 111178 - DNA, 120 bp, Artificial Sequence
  ENSG00000100129_30 (sequence is synthesized)
gtgatccgcccgcctcggcctcccaaactggtggggttacaggtgtgagccacggaacgcggctcctcttccttctggatatggctgtctcagatggccagaggcctcggaaaggcttcc

SEQ ID NO: 111179 - DNA, 120 bp, Artificial Sequence
  ENSG00000100138_0 (sequence is synthesized)
gagaactcctccatccttcacctaattcttcctagttgtcctgggaccaagacaaattcgcctaagataaggagttacgtagaagacagggcgtcctggtgtacgggctggccctggacg

SEQ ID NO: 111180 - DNA, 120 bp, Artificial Sequence
  ENSG00000100138_1 (sequence is synthesized)
tcacttccgctggcggcagtggcgtcacttcctgctcttgggggcggggcatccgtgtccttgcggtgctgggcagcagaccgtccaaaccgacacgcgtggtatcctcgcggtgtccgg

SEQ ID NO: 111181 - DNA, 120 bp, Artificial Sequence
  ENSG00000100138_2 (sequence is synthesized)
caagagactaccaagacagacgctatgactgaggctgatgtgaatccaaaggcctatccccttgccgatgcccacctcaccaagaagctactggacctcgttcagcagtcatgtaactat

SEQ ID NO: 111182 - DNA, 120 bp, Artificial Sequence
  ENSG00000100138_3 (sequence is synthesized)
ccctcaacaggggcatctctgagttcatcgtgatggctgcagacgccgagccactggagatcattctgcacctgccgctgctgtgtgaagacaagaatgtgccctacgtgtttgtgcgct

SEQ ID NO: 111183 - DNA, 120 bp, Artificial Sequence
  ENSG00000100138_4 (sequence is synthesized)
ccaagcaggccctggggagagcctgtggggtctccaggcctgtcatcgcctgttctgtcaccatcaaagaaggctcgcagctgaaacagcagatccaatccattcagcagtccattgaaa

SEQ ID NO: 111184 - DNA, 120 bp, Artificial Sequence
  ENSG00000100138_5 (sequence is synthesized)
ggctcttagtctaaacctgtggcctctgccacgtgctccctgccagcttcccccctgaggttgtgtatcatattatctgtgttagcatgtagtattttcagctactctctattgttataa

SEQ ID NO: 111185 - DNA, 120 bp, Artificial Sequence
  ENSG00000100138_6 (sequence is synthesized)
aatgtagtactaaatctggtttctggatttttgtgttgtttttgttctgttttacagggttgctatcccccttcctttcctccctccctctgccatccttcatccttttatcctcccttt

SEQ ID NO: 111186 - DNA, 120 bp, Artificial Sequence
  ENSG00000100138_7 (sequence is synthesized)
agaaagagccaggagaaagctgatggagccaggacagagatctggttccagctttcagccactagcttcctgttgtgtgcggggtgtggtggaattaaacagcattcattgtgtgtccct

SEQ ID NO: 111187 - DNA, 120 bp, Artificial Sequence
  ENSG00000100138_8 (sequence is synthesized)
gtgcctggcacacagaatcattcatacgtgttcaagtgatcaaggggtttcatttgctcttgggggattaggtatcatttggggaggaagcatgtgttctgtgaggttgttcggctatgt

SEQ ID NO: 111188 - DNA, 120 bp, Artificial Sequence
  ENSG00000100138_9 (sequence is synthesized)
ccaagtgtcgtttactaatgtacccctgctgtttgcttttggtaatgtgatgttgatgttctccccctacccacaaccatgcccttgagggtagcagggcagcagcataccaaagagatg

SEQ ID NO: 111189 - DNA, 120 bp, Artificial Sequence
  ENSG00000100138_10 (sequence is synthesized)
tgctgcaggactccggaggcagcctgggtgggtgagccatggggcagttgacctgggtcttgaaagagtcgggagtgacaagctcagagagcatgaactgatgctggcatgaaggattcc

SEQ ID NO: 111190 - DNA, 120 bp, Artificial Sequence
  ENSG00000100138_11 (sequence is synthesized)
aggaagatcatggagacctggctggtagctgtaacagagatggtggagtccaaggaaacagcctgtctctggtgaatgggactttctttggtggacacttggcaccagctctgagagccc

SEQ ID NO: 111191 - DNA, 120 bp, Artificial Sequence
  ENSG00000100138_12 (sequence is synthesized)
ttcccctgtgtcctgccaccatgtgggtcagatgtactctctgtcacatgaggagagtgctagttcatgtgttctccattcttgtgagcatcctaataaatctgttccattttgatgaca

SEQ ID NO: 111192 - DNA, 120 bp, Artificial Sequence
  ENSG00000100138_13 (sequence is synthesized)
tttccgctgctgcttctgtgagtttttccggtgcacgcgagtgcttctgaaacgtcagctgcgctcccctaggagtgctgagcccgcggaaccgcagccatgttgtcctgggaccaagac

SEQ ID NO: 111193 - DNA, 120 bp, Artificial Sequence
  ENSG00000100138_14 (sequence is synthesized)
aggagtgctgagcccgcggaaccgcagccatggaggagatctcccatgggtctgcgcttagtgcccgccgcgagtcacacgcgccagggacctagaggagcctttggcatttgggggctg

SEQ ID NO: 111194 - DNA, 120 bp, Artificial Sequence
  ENSG00000100138_15 (sequence is synthesized)
acggcctggagtgcaggaaaggcttctcctgcaaggcggtggcttcaaaaaccagaagtctggtagcaccacgtgcggcgtctctaaactcttggtcgtctctgacttttaaacatctag

SEQ ID NO: 111195 - DNA, 120 bp, Artificial Sequence
  ENSG00000100138_16 (sequence is synthesized)
ggaaagttctaaaacgtgtgtcctggcgtagtagttttggttggcacttggtgaggagggaagaatttgtaaagcactgtaacttctatagttaatccttccagtggagcttggatcccg

SEQ ID NO: 111196 - DNA, 120 bp, Artificial Sequence
  ENSG00000100138_17 (sequence is synthesized)
gcctagaacttgaagcttccaaactcagtgctcgctttaacgcagctccctgaaacgttttggaatcggatggtctcaggttgaactttgcagttttcctcaactgtaaaatggggatga

SEQ ID NO: 111197 - DNA, 120 bp, Artificial Sequence
  ENSG00000100138_18 (sequence is synthesized)
aaagggggctgatgccccagcctcaactctgaccctggtgccaggcctggttagcatgctcttggtgcagggccagtttccgcgccagtgcccccgtagagggcggggcccactcgctcg

SEQ ID NO: 111198 - DNA, 120 bp, Artificial Sequence
  ENSG00000100138_19 (sequence is synthesized)
gggcatccgtgtccttgcggtgctgggcagcagaccgtccaaaccgacacgcgtggtatcctcgcggtgtccggcaagagactaccaagacagacgctatggcggaagagtgatacaaga

SEQ ID NO: 111199 - DNA, 120 bp, Artificial Sequence
  ENSG00000100138_20 (sequence is synthesized)
ggtacttctcatcttctacctggttaccgcctaatacagcatttaggaaaggcacagaagatgattgtttccctttcccagttttcaaaatattgagttgctatcacttgcatagttttg

SEQ ID NO: 111200 - DNA, 120 bp, Artificial Sequence
  ENSG00000100138_21 (sequence is synthesized)
acttttaaaccatgaagatattttacatatttgaaaaataaaatttaaagcaagctgactacaaaataaatctacttgtataccaaattgctaaccacaaggaaaattttaatttgaata

SEQ ID NO: 111201 - DNA, 120 bp, Artificial Sequence
  ENSG00000100139_0 (sequence is synthesized)
ggggtcatggctgggccgcggggcgcgctgctggcctggtgccgccgccagtgcgagggctaccgcggcgtggagatccgcgacctgagcagctccttccgggacggcctggccttctgc

SEQ ID NO: 111202 - DNA, 120 bp, Artificial Sequence
  ENSG00000100139_1 (sequence is synthesized)
gccatcctgcaccggcaccggcccgacctgctagattttgattcgctttccaaggacaatgtcttcgagaataaccgtttggcctttgaagtggctgagaaggagctggggatccccgct

SEQ ID NO: 111203 - DNA, 120 bp, Artificial Sequence
  ENSG00000100139_2 (sequence is synthesized)
ctcctggaccccaatgacatggtctccatgagcgtccctgactgcctcagcatcatgacctatgtgtcccagtattacaaccacttctgcagtcctggccaagctggtgtctcgccaccc

SEQ ID NO: 111204 - DNA, 120 bp, Artificial Sequence
  ENSG00000100139_3 (sequence is synthesized)
agaaagggccttgcaccctgttccccgccgtctgtagcacccactccagtggaaccagaagatgtggctcagggcgaggagctctcctcaggcagcctgtcagagcagggcaccggccag

SEQ ID NO: 111205 - DNA, 120 bp, Artificial Sequence
  ENSG00000100139_4 (sequence is synthesized)
acccccagcagcacgtgcgcagcctgccagcagcatgtgcacttggtgcagcgctacctggctgacggcaggctgtaccatcgccactgcttccggtgtcggcggtgctccagcaccctg

SEQ ID NO: 111206 - DNA, 120 bp, Artificial Sequence
  ENSG00000100139_5 (sequence is synthesized)
ctccctggggcttatgagaatgggcctgaggagggcacctttgtgtgtgcagaacactgtgccaggctgggcccggggacacggtcggggaccaggcctgggcccttctcacagccaaag

SEQ ID NO: 111207 - DNA, 120 bp, Artificial Sequence
  ENSG00000100139_6 (sequence is synthesized)
cagcagcaccagcagcaactcgcagaagatgccaaggatgttccaggaggcggccccagctccagtgctcctgcaggggctgaggccgatggacccaaggccagccctgaggcccggccg

SEQ ID NO: 111208 - DNA, 120 bp, Artificial Sequence
  ENSG00000100139_7 (sequence is synthesized)
cagatccctaccaagccccgggttcctggcaaactacaggagctggccagcccccctgcgggccgccccacccctgcccccaggaaggcctctgagagcaccaccccagcaccccccacg

SEQ ID NO: 111209 - DNA, 120 bp, Artificial Sequence
  ENSG00000100139_8 (sequence is synthesized)
ccccggccccgctccagtctgcagcaggagaacctggtggagcaggctggcagcagcagcctggtgaacgggagactgcacgaactgcctgtccccaagccgagggggacaccgaagccg

SEQ ID NO: 111210 - DNA, 120 bp, Artificial Sequence
  ENSG00000100139_9 (sequence is synthesized)
tccgaggggacaccagcccccaggaaggaccccccatggatcacgctggtgcaggcagaaccaaagaagaagccagccccacttcccccaagcagcagcccggggccaccaagccaggac

SEQ ID NO: 111211 - DNA, 120 bp, Artificial Sequence
  ENSG00000100139_10 (sequence is synthesized)
agcaggcaggtggagaatggaggcaccgaggaggtggcccagccgagcccaacggccagcctggagtccaaaccctataacccctttgaggaggaggaggaggacaaggaggaagaggct

SEQ ID NO: 111212 - DNA, 120 bp, Artificial Sequence
  ENSG00000100139_11 (sequence is synthesized)
ccagctgcacccagcctggccaccagccctgccctgggccacccggagtccacacccaagtccctgcacccctggtacggcatcacccctaccagcagccccaagacaaagaagcgccct

SEQ ID NO: 111213 - DNA, 120 bp, Artificial Sequence
  ENSG00000100139_12 (sequence is synthesized)
gccccgcgcgcacccagcgcgtccccactggctctccacgcctcccgcctctcgcactcggagccgccctcggccacaccatcgccagcgctcagcgtggagagcctgtcgtctgagagc

SEQ ID NO: 111214 - DNA, 120 bp, Artificial Sequence
  ENSG00000100139_13 (sequence is synthesized)
gccagccagactgcaggtgcagagcttctggagccgccagctgtgcccaagagctcctcagagcctgctgtccatgcccctggtacccctggaaaccctgtcagcctctctaccaactcc

SEQ ID NO: 111215 - DNA, 120 bp, Artificial Sequence
  ENSG00000100139_14 (sequence is synthesized)
tccctggcctcctctggggaactagtggagcctagagtggaacaaatgcctcaagccagccctggccttgcccccaggaccaggggcagctcaggtccccagccagccaagccctgcagt

SEQ ID NO: 111216 - DNA, 120 bp, Artificial Sequence
  ENSG00000100139_15 (sequence is synthesized)
ggcgccaccccaacgcctctcttgttggttggagacaggagcccggtgccttcccctggaagctcgtccccacagctgcaggtaaagtcctcctgcaaggagaatccttttaaccggaag

SEQ ID NO: 111217 - DNA, 120 bp, Artificial Sequence
  ENSG00000100139_16 (sequence is synthesized)
ccatcacctgcagcgtccccagccacaaagaaggccaccaagggatccaagccagtgaggccacctgcccctggacacggctttccactcatcaaacgcaaggtccaggctgaccagtac

SEQ ID NO: 111218 - DNA, 120 bp, Artificial Sequence
  ENSG00000100139_17 (sequence is synthesized)
atccctgaggaggacatccatggagagatggataccattgagcgccggctggatgccctggagcaccgtggggtgctgctggaggagaagctgcgtggcggcctgaatgagggccgtgag

SEQ ID NO: 111219 - DNA, 120 bp, Artificial Sequence
  ENSG00000100139_18 (sequence is synthesized)
atccacgagaagcacctactggtgcggcgagagtccgagctcatctatgtcttcaagcagcagaacctggagcagcgccaggctgatgtcgagtatgagctccggtgcctcctcaataag

SEQ ID NO: 111220 - DNA, 120 bp, Artificial Sequence
  ENSG00000100139_19 (sequence is synthesized)
ccagaaaaggactggacggaggaggaccgggcccgggagaaggtgctgatgcaggagcttgtgaccctcattgagcagcgcaacgctatcatcaactgcctggatgaggaccggcagagg

SEQ ID NO: 111221 - DNA, 120 bp, Artificial Sequence
  ENSG00000100139_20 (sequence is synthesized)
gaggaagaggaagacaagatgttggaagccatgatcaagaagaaagagttccagagggaggctgaacctgagggcaagaagaaggggaagttcaagaccatgaagatgttgaaactgcta

SEQ ID NO: 111222 - DNA, 120 bp, Artificial Sequence
  ENSG00000100139_21 (sequence is synthesized)
ggaaacaaacgtgatgccaagagcaagtcccccagagacaagagctaacagcacgagaagccagttggggactgccccctcctggagcagctcctgggctgtgctctgtttgaagggggc

SEQ ID NO: 111223 - DNA, 120 bp, Artificial Sequence
  ENSG00000100139_22 (sequence is synthesized)
gccctgctcccctcagatcagtcaggaggaagatgactaaggggagggatcctctgggtgatggcctcttcctcctcagggacctctgactgctctgggccaaagaatctcttgtttctt

SEQ ID NO: 111224 - DNA, 120 bp, Artificial Sequence
  ENSG00000100139_23 (sequence is synthesized)
ctccgagccccaggcagcggtgattcagccctgcccaacctgattctgatgactgcggatgctgtgacggacccaaggggcaaatagggtcccagggtccagggaggggcgcctgctgag

SEQ ID NO: 111225 - DNA, 120 bp, Artificial Sequence
  ENSG00000100139_24 (sequence is synthesized)
cacttccgcccctcaccctgcccagcccctgccatgagctctgggctgggtctccgcctccagggttctgctcttccaggcaggccagcaagtggcgctgggccacactggcttcttcct

SEQ ID NO: 111226 - DNA, 120 bp, Artificial Sequence
  ENSG00000100139_25 (sequence is synthesized)
gccccatccctggctctgagtctctgtcttcctgtcctgtgcaggcgcccttggatctcagtttccctcactcaggaactctgtttctgaagtcttcagttaagtttgagtttatgactg

SEQ ID NO: 111227 - DNA, 120 bp, Artificial Sequence
  ENSG00000100139_26 (sequence is synthesized)
agtggcctgtactgtcagacgtgaatgggcctgacgggcaaatccatccctctctccctcacagttccaggagcggcttccctcgtctccccttactccacagggagcctcccttgccag

SEQ ID NO: 111228 - DNA, 120 bp, Artificial Sequence
  ENSG00000100139_27 (sequence is synthesized)
gaccagggctgcgacggccatgctggggcaggtgagtgctctgttagctgctcccagtgctgtccccaggctgcagttctggtccctggttgtcaggtaggaagggtgcacttgaagcag

SEQ ID NO: 111229 - DNA, 120 bp, Artificial Sequence
  ENSG00000100139_28 (sequence is synthesized)
gtgctcatctcggttccttaacgtttatagtctgacccctcacttaggctttcctctgccaccccggtccagggaagaggctcgctcccgcccatggtcatcactggtctgtctgctctg

SEQ ID NO: 111230 - DNA, 120 bp, Artificial Sequence
  ENSG00000100139_29 (sequence is synthesized)
ttgtctgttctttccctgactccctcccaccgaaggcctgatggctactcacccctctgggatggctatgggagaggaggagtgatggggaccgccaccttttctgcaggaaatgtgccc

SEQ ID NO: 111231 - DNA, 120 bp, Artificial Sequence
  ENSG00000100139_30 (sequence is synthesized)
agcagctcttggtcaaagcactgttgctataagctatctctgggatgcctctaggcccccttccctctacacacctctgggaaaagattacactgtattaactctcgaggagtttcctca

SEQ ID NO: 111232 - DNA, 120 bp, Artificial Sequence
  ENSG00000100139_31 (sequence is synthesized)
ccaataaacagacaacctcaactgccagtgccctgcagcctcgggccacagcggcagccttgtttgccttcccacctgcctctgccacacctggtggctgaacatctctggtcgcccaga

SEQ ID NO: 111233 - DNA, 120 bp, Artificial Sequence
  ENSG00000100139_32 (sequence is synthesized)
ggccatgttggggccatcctccaagagggatctctgccctcaccgcctgccactgggcaggatccctttcctctgcagggagaggtggctcctcggccatgcagcccctggcaggctcct

SEQ ID NO: 111234 - DNA, 120 bp, Artificial Sequence
  ENSG00000100139_33 (sequence is synthesized)
tctaaacatgcctgttgacctggagctggcgccaccaactccagggcctttccagggccagacaggtaacacgcatgaacccgagtgacagctctgacgggctgtttcggtgtcaggaga

SEQ ID NO: 111235 - DNA, 120 bp, Artificial Sequence
  ENSG00000100139_34 (sequence is synthesized)
caaagctggcaggggcaggggtgaactggaggcaagtcaagtcacctgtggcctgtggggctgaatgtgggcccggtgttgccagatcctttgtcataagaagctagaaatccagatttt

SEQ ID NO: 111236 - DNA, 75 bp, Artificial Sequence
  ENSG00000100139_35 (sequence is synthesized)
gccagatcctttgtcataagaagctagaaatccagattttatgtgtgtgtaatttgtaaatgctgaaagctagcc

SEQ ID NO: 111237 - DNA, 120 bp, Artificial Sequence
  ENSG00000100139_36 (sequence is synthesized)
tgacctctttgaaggggtgttgagccctctttgggggccctgggcctctcctaccctaaactcttctccacgggctcgccgggcctcccctctcccccgaggcttcccactcggggtggc

SEQ ID NO: 111238 - DNA, 120 bp, Artificial Sequence
  ENSG00000100139_37 (sequence is synthesized)
cccttgctccgggtgtgcaggtgaacccccacttctctgacccccaaataggagcttgtctccggacagtagcacagttcccggcacagaggagacctcggctaacaggtgttggatgaa

SEQ ID NO: 111239 - DNA, 120 bp, Artificial Sequence
  ENSG00000100139_38 (sequence is synthesized)
tggatgtacagaccctgtgctttccccacgccccccaacttaggacgcagccctgcctcccgggtgtgtgctcgatggccctgcagccctcctcagtggggcacgcaggtggggcgcgca

SEQ ID NO: 111240 - DNA, 120 bp, Artificial Sequence
  ENSG00000100139_39 (sequence is synthesized)
gccggcaatgttgggaagactcctaggatccgattgatagacaccaaccgggtgctgcaggttgtgaaatggccccttcctgcccagagctgcccaatgaggttctcatgggaaaatgca

SEQ ID NO: 111241 - DNA, 120 bp, Artificial Sequence
  ENSG00000100139_40 (sequence is synthesized)
ttcagactccccggaacagttgacttggagcctctgtctttgctctctctgccttgagccctggaacctctcctcctttcgtcccttcattcctaaaacactggagattttgattcgctt

SEQ ID NO: 111242 - DNA, 120 bp, Artificial Sequence
  ENSG00000100139_41 (sequence is synthesized)
ctgggcctcctccgcccagtgcttcccccctcacccaggaacgctggagtttttggccctcaccttctcccagtcttctgataccctgagctgggtttttggccctaaccttcaccatgg

SEQ ID NO: 111243 - DNA, 120 bp, Artificial Sequence
  ENSG00000100139_42 (sequence is synthesized)
ctgggtctggccgcctctgagagttccatgggaccccctctcacagtggggcaagagcatgccagagctggcagaggcaggtgctcagggggtctgagcggagccctgggaccccagctg

SEQ ID NO: 111244 - DNA, 120 bp, Artificial Sequence
  ENSG00000100139_43 (sequence is synthesized)
aggctggcctgtctgggtggaagtggtgggcagcttcaggggacagcagaggagcatgagctctggagtcagatacagtggattcagtcccaccccgtgctggggcgagtgccctctcct

SEQ ID NO: 111245 - DNA, 120 bp, Artificial Sequence
  ENSG00000100139_44 (sequence is synthesized)
ctctaagcctgttgcctcatctggaaaatgcagataatgtgtttggaagcatcatatccatcagccacgaggagataaattggtgcccggcagtgcctgtcccagagctggtggctgcga

SEQ ID NO: 111246 - DNA, 120 bp, Artificial Sequence
  ENSG00000100142_0 (sequence is synthesized)
aagctaggagccgcgcgagtcgtagtgtcgctgtttgcgggtctccgcgcgggaccggggcgcagcggggtcgctgaggcgagggtgtcatgtcagacaacgaggacaattttgatggcg

SEQ ID NO: 111247 - DNA, 120 bp, Artificial Sequence
  ENSG00000100142_1 (sequence is synthesized)
acgactttgatgatgtggaggaggatgaagggctagatgacttggagaatgccgaagaggaaggccaggagaatgtcgagatcctcccctctggggagcgaccgcaggccaaccagaagc

SEQ ID NO: 111248 - DNA, 120 bp, Artificial Sequence
  ENSG00000100142_2 (sequence is synthesized)
gaatcaccacaccatacatgaccaagtacgagcgagcccgcgtgctgggcacccgagcgctccagattgcgatgtgtgcccctgtgatggtggagctggagggggagacagatcctctgc

SEQ ID NO: 111249 - DNA, 120 bp, Artificial Sequence
  ENSG00000100142_3 (sequence is synthesized)
tcattgccatgaaggaactcaaggcccgaaagatccccatcatcattcgccgttacctgccagatgggagctatgaagactggggggtggacgagctcatcatcaccgactgagctggag

SEQ ID NO: 111250 - DNA, 120 bp, Artificial Sequence
  ENSG00000100142_4 (sequence is synthesized)
tcatcttcctgcccttgccccatgcccaattttcattctcactttatatgtgtaaataataaaatattcaactttccaacccccttcccctctgcttatctgcaatgtcaccacctgttg

SEQ ID NO: 111251 - DNA, 120 bp, Artificial Sequence
  ENSG00000100142_5 (sequence is synthesized)
cttccccgttaccgccatgctgcgtggagcatgcacctattccagtggccctgtgactgtcagctccttaagaagcaccaggggcccttagcccctttggatcccccacatccttccctc

SEQ ID NO: 111252 - DNA, 120 bp, Artificial Sequence
  ENSG00000100142_6 (sequence is synthesized)
catctccctgttccccagagcaaaggctgctgcaggggagacacctcagctgccttccaagcagacagacaagtctttgtgcccagggagctggttgccacggaaacccccaatttcctt

SEQ ID NO: 111253 - DNA, 120 bp, Artificial Sequence
  ENSG00000100142_7 (sequence is synthesized)
tccagtggggactggctgcaggggcttctcccttctcaggagtatcacagagcaggtctcatcaagccacccattgtttcctaaggacctgcttcgagcctcttatcgtgggctcggatc

SEQ ID NO: 111254 - DNA, 120 bp, Artificial Sequence
  ENSG00000100142_8 (sequence is synthesized)
cgtgggggtgtgctgatctcccaccctccccaggcagagccctgctgggcaagtcagcagctggagcaaggaccgagcacctgcctacccctgcccccatggctctgtccccactcctcc

SEQ ID NO: 111255 - DNA, 120 bp, Artificial Sequence
  ENSG00000100142_9 (sequence is synthesized)
tcaggactctgcccacacgctgtcctctgtggcccacctctttggtgtgccacacccatgccttcttcctagcctctataagatatcctttccctcctatttggggctggtgatcccctg

SEQ ID NO: 111256 - DNA, 120 bp, Artificial Sequence
  ENSG00000100142_10 (sequence is synthesized)
aggccttggggacatggtgctggggtggtggtgctcctgggttccaggtgttacattaagtcagagctggagttcccccttcctctgcctgaggttctaatgggtcctcttcctttctcc

SEQ ID NO: 111257 - DNA, 120 bp, Artificial Sequence
  ENSG00000100142_11 (sequence is synthesized)
accctgcttacccaacctgaggtaagaccagtcacactggctcctccctcctagagggggtcagggggagggtgtatattgacatgaacagggatagagggtaaactggctccctgaata

SEQ ID NO: 111258 - DNA, 120 bp, Artificial Sequence
  ENSG00000100142_12 (sequence is synthesized)
tgccagccttaacctccattccactgccagctccccttcaaagaggaggagctgggcttccctaacctctgcaggaggcagggcctccaggcctaggtgcagcctggccctgggatggga

SEQ ID NO: 111259 - DNA, 120 bp, Artificial Sequence
  ENSG00000100142_13 (sequence is synthesized)
tgtggggagtgaatggtgaggatctgcattggtgggaggggtgtccgctgccctggagaagggttaattcagggagcagtggacttcacactcccatccaccctcctccaagcctgtgga

SEQ ID NO: 111260 - DNA, 120 bp, Artificial Sequence
  ENSG00000100142_14 (sequence is synthesized)
atcctttaatcaagttgggtgctgaaatttcagctctgaaatgccgcctttgtgctggcatccaggcagccgccccagagtgcgggggtcactttctcggccccatttctctaaatggtc

SEQ ID NO: 111261 - DNA, 120 bp, Artificial Sequence
  ENSG00000100142_15 (sequence is synthesized)
tctttgttccctgctgggctgctcagtatcagatgtgattaaagggagatggggtttgggctggggaggaggggaattgggggttaacccttaggggatagagtgcaagggaaatgggac

SEQ ID NO: 111262 - DNA, 120 bp, Artificial Sequence
  ENSG00000100142_16 (sequence is synthesized)
agaaggggtgtttttcctcctgtcttcctcttcccattctcctcttttggggagtcccctgctattcagctgtctgggcctggcttttgacttctcttgaataaaatgtcccggtcacca

SEQ ID NO: 111263 - DNA, 120 bp, Artificial Sequence
  ENSG00000100142_17 (sequence is synthesized)
ctggatggacagagggacgagggacgagcatctgccgtcgtgtcccggctgccctgcagtcgcctccaacacccgctgctgcccgcccgctgcctgcctgcctggcatctctctctcccg

SEQ ID NO: 111264 - DNA, 120 bp, Artificial Sequence
  ENSG00000100142_18 (sequence is synthesized)
ggctgggaccgtctcttctccctcctgtcttctacatgggatggactcaggagcgctcaacagatgctctgaaatcaatgactctgaatctagaagtcaaccggagaatgtgctcctcag

SEQ ID NO: 111265 - DNA, 120 bp, Artificial Sequence
  ENSG00000100142_19 (sequence is synthesized)
agggccctggaatcttcccctcgtgcacttgggtttcagtttgctgaataagacggactctgctgcctgctcttcagagaaggttttggtggaggactcccctcaggtgcccctgcctgg

SEQ ID NO: 111266 - DNA, 120 bp, Artificial Sequence
  ENSG00000100142_20 (sequence is synthesized)
gccagcagacccaggacccagccctttctctgccaccagccagcactcactctgctgtgtgacctgagaccaggcagaccatctctctgggtctcagtttccccctctataacaccaggg

SEQ ID NO: 111267 - DNA, 120 bp, Artificial Sequence
  ENSG00000100142_21 (sequence is synthesized)
gctggtcttcatgatcccagggccctccccagctgtgcccatctgcaactgtgagattctgagagcagaggagggaaggcgggatggcccctctttccccaccgcctctctctgtccccc

SEQ ID NO: 111268 - DNA, 120 bp, Artificial Sequence
  ENSG00000100142_22 (sequence is synthesized)
agggtcaccccaaagccgccccctcccccggctccctggaacttccctgcagctgcaggcctggtgagacaattgggtgttttagagaaatacatttttgggctaatttgccatgcataa

SEQ ID NO: 111269 - DNA, 120 bp, Artificial Sequence
  ENSG00000100142_23 (sequence is synthesized)
acgactttgatgatgtggaggaggatgaagggctagatgacttggagaatgccgaagaggtcagtattcagcctcaggctcccacctctgcagcccaagctgccaaatcgtctgacagga

SEQ ID NO: 111270 - DNA, 120 bp, Artificial Sequence
  ENSG00000100142_24 (sequence is synthesized)
agtcactcaaatcatggttcacttctccaaatctctgggaggcatctgttgggctctctgttgcaccctttgctcccacttgcctggctggagaagttgatgcttattcctacagatcct

SEQ ID NO: 111271 - DNA, 120 bp, Artificial Sequence
  ENSG00000100142_25 (sequence is synthesized)
cgctgtttgcgggtctccgcgcgggaccggggcgcagcggggtcgctgaggcgagggtgtcatgtcagacaacgaggacaagtgagtgcgggagcggagtggcctttgcggcaaccttgg

SEQ ID NO: 111272 - DNA, 120 bp, Artificial Sequence
  ENSG00000100142_26 (sequence is synthesized)
tcattgccatgaaggaactcaactacttccagaaagcatttgaggaagcaccagtacagggataagagatgaagagacaggccaggtcaggctcaccaagcaggcagccctttctgcccc

SEQ ID NO: 111273 - DNA, 120 bp, Artificial Sequence
  ENSG00000100142_27 (sequence is synthesized)
atcctgcacagtaagagagacttctcagggatccctctgagaagtgcagagccccagcttgacccctggtcccttctctgcagacacccagcacacgcgcgttctggtctggttcaaggt

SEQ ID NO: 111274 - DNA, 120 bp, Artificial Sequence
  ENSG00000100142_28 (sequence is synthesized)
ggaaacacaagactaaagctgccaggaggccaaggtgaacggcaatcatgtgattaacacacacacacataaaaagctttttaacagcgcccgctcggcctcagaaccgcccggagagga

SEQ ID NO: 111275 - DNA, 120 bp, Artificial Sequence
  ENSG00000100142_29 (sequence is synthesized)
cactgcctggcagagctgcctccggtcagcagtgacccttcaccccccagctcccaagtcctcttcctgagggagctggtccggctttatggaaggctccgcctgtgttcccccactggg

SEQ ID NO: 111276 - DNA, 120 bp, Artificial Sequence
  ENSG00000100142_30 (sequence is synthesized)
tccctggtccctcacctgtcacgtggggcgatggtcaccctccctccctgcctgccctgaaggatacactgagatgaaggtcaggaaatctgctggctgcagaaccaggggccatgcagg

SEQ ID NO: 111277 - DNA, 120 bp, Artificial Sequence
  ENSG00000100142_31 (sequence is synthesized)
agtgagggatggtctggtcaagttgaggctctgccccagcctcagtttccccacacaggcatgagactgtcttcctgactttcagaggacagggctgagatgggatgagggaacacaggg

SEQ ID NO: 111278 - DNA, 120 bp, Artificial Sequence
  ENSG00000100142_32 (sequence is synthesized)
aaagcgtttagcacctctgagtgctgtgtggatgcgacctggggggtcctggcctccactctttaattctatctggactgtgtgccctcctacctccagtttccctgcgggggcctttca

SEQ ID NO: 111279 - DNA, 120 bp, Artificial Sequence
  ENSG00000100142_33 (sequence is synthesized)
cagggcctggcttgcggatacggggtttggcgtagggcagtgcttctcaaatgggaaggcgcactgggattcttcaggttggggtggggcctgaggttctgcatttctaatcagttgcct

SEQ ID NO: 111280 - DNA, 120 bp, Artificial Sequence
  ENSG00000100142_34 (sequence is synthesized)
gaggttctgcatttctaatcagttgcctaggactggctctaattcttgttgaatttacaatcacttgtggagttaagaaaaacatactgggccttggttgggtgtggtggctcacacctg

SEQ ID NO: 111281 - DNA, 120 bp, Artificial Sequence
  ENSG00000100142_35 (sequence is synthesized)
agcatctcctcccgctgacttctcccgacagtcctgctgggtggatatcatcaccccattgtacagatgcataaactgagcccaggttgctgatggtctcacccgagctgaacacaggat

SEQ ID NO: 111282 - DNA, 120 bp, Artificial Sequence
  ENSG00000100142_36 (sequence is synthesized)
atctgtaaaggaaaatagtgctaagccacaggtcaggtacgggggaactgagttacagagggtaactaccaccattcttctctcatcctttaactcaggggtccccaaccctccgtccgt

SEQ ID NO: 111283 - DNA, 120 bp, Artificial Sequence
  ENSG00000100142_37 (sequence is synthesized)
cgaggacaattttgatggcgacgactttgatgatgtggaggaggatgaagggctagatgacttggagaatgccgaagagttttagtagtgacggggttcaccgtgttagccaggatggtc

SEQ ID NO: 111284 - DNA, 120 bp, Artificial Sequence
  ENSG00000100142_38 (sequence is synthesized)
gaagagagaagaggaggcagggaaagtgggagggcactgatgagacatggacgtcttctggctgttggaatttccctgttcctgctgcaggaggccttaccaatattctgtcattcttcc

SEQ ID NO: 111285 - DNA, 120 bp, Artificial Sequence
  ENSG00000100142_39 (sequence is synthesized)
ccctcttgtctgatataaaaactttctttttcttgtaattgctttcttacaaagtacactcatcagccccaagaggctgctcctaagacttctctttgcttgtgttttgcacacaatctg

SEQ ID NO: 111286 - DNA, 120 bp, Artificial Sequence
  ENSG00000100142_40 (sequence is synthesized)
aagaaattgagaaaagggtaggaaagcagatgtgaatggcaaaactggtggggagaggcaccccaggccatgggctggagcagagggcctggcaggggtggtgggagaggcagcaggggg

SEQ ID NO: 111287 - DNA, 120 bp, Artificial Sequence
  ENSG00000100142_41 (sequence is synthesized)
aagagcagtcagcaaagtggctacagaggtcagcagggagctcctgaggaccaagggtggcctgggaaggtctggggactagatcctgagggcagtggggtggtcactgtaggatttcaa

SEQ ID NO: 111288 - DNA, 120 bp, Artificial Sequence
  ENSG00000100142_42 (sequence is synthesized)
gggagtcagatttgtgttctagaaaggttgtcaccatatggcctgaccatatgccagtctggttcattactgttttcctagcacctagctcagtgccagcacacagtagatgttcagtaa

SEQ ID NO: 111289 - DNA, 120 bp, Artificial Sequence
  ENSG00000100142_43 (sequence is synthesized)
atgctttgaatcaatacacagatgccagcggtgtatccagaggcaatggttaactcctgtgggggtccttcagcttcagtttcctcctttgtgaacgagggcactggcacctgcctggtg

SEQ ID NO: 111290 - DNA, 120 bp, Artificial Sequence
  ENSG00000100142_44 (sequence is synthesized)
ggcatgttgtgatggtgaagggagcatggcagtttgggcttgctgtcctgcacacggtcagcgctctgtaatggcagcttttataaaacgtgtggaggatgtgccaaggggaacatgggg

SEQ ID NO: 111291 - DNA, 120 bp, Artificial Sequence
  ENSG00000100142_45 (sequence is synthesized)
gcaaggaccctggacaggagtggtcaagtcagccagaggagagagaataatgatgacaacagtgacgttgatcaaaggctgaagttcttcatgtatttcattcatgtcatcctcaacaca

SEQ ID NO: 111292 - DNA, 120 bp, Artificial Sequence
  ENSG00000100142_46 (sequence is synthesized)
ggctcagagaggagtgactcgcctgaagccccgtgaacaatgcatggtggacggaagtacatggaatgccagagccaggctggtgactagtgctggtggtggggactggtcaaggcggcc

SEQ ID NO: 111293 - DNA, 120 bp, Artificial Sequence
  ENSG00000100142_47 (sequence is synthesized)
gccagggaagggatgtgaggacacggtctagactgatggaccagatggcgggggcaggcacagggggagggaggtttccaggacacccctcagtttctggcccaggtgaccaggtggaag

SEQ ID NO: 111294 - DNA, 120 bp, Artificial Sequence
  ENSG00000100142_48 (sequence is synthesized)
gtcattccatctcctgagtgagggacacagcaggacagacaggcttggggagggactgttgggatgtctggagtctaggagaggatccaggcgggggatggaggggagggcggaatgagc

SEQ ID NO: 111295 - DNA, 120 bp, Artificial Sequence
  ENSG00000100142_49 (sequence is synthesized)
tcatggggcaagtggaaggcttgtgggcggtggaaaagctccagcccccggacacctagccaaggtcaagtaataacgacagtagacgttacatagccttgactctgtacagacctcatc

SEQ ID NO: 111296 - DNA, 120 bp, Artificial Sequence
  ENSG00000100142_50 (sequence is synthesized)
ctgcatccttacgttaactcattgaaccctcccaaccattatcaaattggaggtaccattatcacccccattttatagttggggaaactgaggcaagagacattaagtctgcaatattgg

SEQ ID NO: 111297 - DNA, 120 bp, Artificial Sequence
  ENSG00000100142_51 (sequence is synthesized)
aataggcaaatctgtagagaaaggaatgtgggtgagtggtgggctggggctgggggctgggaaggatcatggctaacgggcacaggctttcttttttgggtgatgaaaatattctaaaat

SEQ ID NO: 111298 - DNA, 120 bp, Artificial Sequence
  ENSG00000100142_52 (sequence is synthesized)
gactgtgaaaatattgcacaactctgtgaacatgtgaaaacccactgaactgtatgctctaactgtatgaattgtatggtatttgaatttcacctcaataaagctgttatcaaaaagcaa

SEQ ID NO: 111299 - DNA, 120 bp, Artificial Sequence
  ENSG00000100142_53 (sequence is synthesized)
accaggttggggaggaggcttggttggtgccttgtccatcctcctgagcactgaagccctgaataggcagcttctgagcagaacactcaatttccctctctttccctcctgcccagggta

SEQ ID NO: 111300 - DNA, 120 bp, Artificial Sequence
  ENSG00000100146_0 (sequence is synthesized)
ggggggtgaagggtcactgctgaccggaggcagctctgccaggcagtgtcatcagtgggcttcacgtttgactgacagcccaccagcgtcacctcccagccccgagctggaccgcacacc

SEQ ID NO: 111301 - DNA, 120 bp, Artificial Sequence
  ENSG00000100146_1 (sequence is synthesized)
ttgggacacggttttccacttcctaaggacgagccccagactggaggagaggtccgaggaggtgggcgttggactctttgcgaggaccccggcggctggcccgggggaggcggccgaggc

SEQ ID NO: 111302 - DNA, 120 bp, Artificial Sequence
  ENSG00000100146_2 (sequence is synthesized)
ggcggcggcggcggccgggggcgacatggcggaggagcaggacctatcggaggtggagctgagccccgtgggctcggaggagccccgctgcctgtccccggggagcgcgccctcgctagg

SEQ ID NO: 111303 - DNA, 120 bp, Artificial Sequence
  ENSG00000100146_3 (sequence is synthesized)
gcccgacggcggcggcggcggatcgggcctgcgagccagcccggggccaggcgagctgggcaaggtcaagaaggagcagcaggacggcgaggcggacgatgacaagttccccgtgtgcat

SEQ ID NO: 111304 - DNA, 120 bp, Artificial Sequence
  ENSG00000100146_4 (sequence is synthesized)
ccgcgaggccgtcagccaggtgctcagcggctacgactggacgctggtgcccatgcccgtgcgcgtcaacggcgccagcaaaagcaagccgcacgtcaagcggcccatgaacgccttcat

SEQ ID NO: 111305 - DNA, 120 bp, Artificial Sequence
  ENSG00000100146_5 (sequence is synthesized)
ggtgtgggctcaggcagcgcgcaggaagctcgcggaccagtacccgcacctgcacaacgctgagctcagcaagacgctgggcaagctctggaggctgctgaacgaaagtgacaagcgccc

SEQ ID NO: 111306 - DNA, 120 bp, Artificial Sequence
  ENSG00000100146_6 (sequence is synthesized)
cttcatcgaggaggctgagcggctccgtatgcagcacaagaaagaccacccggactacaagtaccagcccaggcggcggaagaacgggaaggccgcccagggcgaggcggagtgccccgg

SEQ ID NO: 111307 - DNA, 120 bp, Artificial Sequence
  ENSG00000100146_7 (sequence is synthesized)
tggggaggccgagcaaggtgggaccgccgccatccaggcccactacaagagcgcccacttggaccaccggcacccaggagagggctcccccatgtcagatgggaaccccgagcacccctc

SEQ ID NO: 111308 - DNA, 120 bp, Artificial Sequence
  ENSG00000100146_8 (sequence is synthesized)
aggccagagccatggcccacccacccctccaaccaccccgaagacagagctgcagtcgggcaaggcagacccgaagcgggacgggcgctccatgggggagggcgggaagcctcacatcga

SEQ ID NO: 111309 - DNA, 120 bp, Artificial Sequence
  ENSG00000100146_9 (sequence is synthesized)
cttcggcaacgtggacattggtgagatcagccacgaggtaatgtccaacatggagacctttgatgtggctgagttggaccagtacctgccgcccaatgggcacccaggccatgtgagcag

SEQ ID NO: 111310 - DNA, 120 bp, Artificial Sequence
  ENSG00000100146_10 (sequence is synthesized)
ctactcagcagccggctatgggctgggcagtgccctggccgtggccagtggacactccgcctggatctccaagccaccaggcgtggctctgcccacggtctcaccacctggtgtggatgc

SEQ ID NO: 111311 - DNA, 120 bp, Artificial Sequence
  ENSG00000100146_11 (sequence is synthesized)
cccactatggctcagccttcccctccatctcccgcccccagtttgactactctgaccatcagccctcaggaccctattatggccactcgggccaggcctctggcctctactcggccttct

SEQ ID NO: 111312 - DNA, 120 bp, Artificial Sequence
  ENSG00000100146_12 (sequence is synthesized)
cctatatggggccctcgcagcggcccctctacacggccatctctgaccccagcccctcagggccccagtcccacagccccacacactgggagcagccagtatatacgacactgtcccggc

SEQ ID NO: 111313 - DNA, 120 bp, Artificial Sequence
  ENSG00000100146_13 (sequence is synthesized)
cctaaagggggccctgtcgccaccaccccccgcccagcccctgcccccagcctgtgtgccctgttccttgcccacctcaggcctggtggtggcagtggaggaggctgaggaggctgaaga

SEQ ID NO: 111314 - DNA, 120 bp, Artificial Sequence
  ENSG00000100146_14 (sequence is synthesized)
ggctgacaggtcggggggctttctgtctggctcactgccctgatgacccacccgccccatccaggctccagcagcaaagccccaggagaacaggctggacagaggagaaggaggttgact

SEQ ID NO: 111315 - DNA, 120 bp, Artificial Sequence
  ENSG00000100146_15 (sequence is synthesized)
gttgcacccacactgaaagatgaggggctgcaccttcccccaggaatgaccctctatcccaggacctgagaagggcctgctcaccctcctcggggaggggaagcaccagggttggtggca

SEQ ID NO: 111316 - DNA, 120 bp, Artificial Sequence
  ENSG00000100146_16 (sequence is synthesized)
tcggaggccttaccactcctatgactcctgttttctctctcacagatagtgagggtctgacatgcccatgccacctatgccacagtgcctaagggctaggccacccagagactgtgcccg

SEQ ID NO: 111317 - DNA, 120 bp, Artificial Sequence
  ENSG00000100146_17 (sequence is synthesized)
gagctggccgtgtctcccactcaggggctgagagtagctttgaggagcctcattggggagtggggggttcgagggacttagtggagttctcatcccttcaatgccccctccctttctgaa

SEQ ID NO: 111318 - DNA, 120 bp, Artificial Sequence
  ENSG00000100146_18 (sequence is synthesized)
ggcaggaaggagttggcacagaggccccctgatccaattctgtgccaataacctcattctttgtctgagaaacagcccccagtcctcctccactacaacctccatgaccttgagacgcat

SEQ ID NO: 111319 - DNA, 120 bp, Artificial Sequence
  ENSG00000100146_19 (sequence is synthesized)
cccaggaggtgacgaggcaggggctccaggaaaggaatcagagacaattcacagagcctccctccctgggctccttgccagctccctcttcccttactaggctctatggcccctgctcag

SEQ ID NO: 111320 - DNA, 120 bp, Artificial Sequence
  ENSG00000100146_20 (sequence is synthesized)
tcagccccactccctgggcttcccagagagtgacagctgctcaggccctaacccttggctccaggagacacagggcccagcacccaggttgctgtcggcaggctgaagacactagaatcc

SEQ ID NO: 111321 - DNA, 120 bp, Artificial Sequence
  ENSG00000100146_21 (sequence is synthesized)
tgacctgtacattctgcccttgcctcttaccccttgcctcccagtggtatttgaataaagtatgtagctatatctgcccctattttcctgttctgcagccccccaaatccacatgtaact

SEQ ID NO: 111322 - DNA, 120 bp, Artificial Sequence
  ENSG00000100146_22 (sequence is synthesized)
cattactgtctcctgttatttatctcagtagtcccctctcctagccactctagcccctattaactctgcattaagcattccacataataaaattaaaggttccggttacctgcttggtga

SEQ ID NO: 111323 - DNA, 120 bp, Artificial Sequence
  ENSG00000100146_23 (sequence is synthesized)
agtcgctcagtcagtctcgggctgtccggccagggtggttggtggtaaggattcaggctccgtcctaacgaggccgtggcctgaggctcagggccccccgcccctccctcccagcccacc

SEQ ID NO: 111324 - DNA, 120 bp, Artificial Sequence
  ENSG00000100146_24 (sequence is synthesized)
agtttgcgaggctgatgctaagaagtgctggtgccagaatctgaacccagctctgactccaaggcttgcatttttaaccatcatcccctccacctgcctgtggtttgcagcccctgcttc

SEQ ID NO: 111325 - DNA, 120 bp, Artificial Sequence
  ENSG00000100146_25 (sequence is synthesized)
tgctttgtatctggagcaatgcatcttccactgctccagactgggcatcctcagctcccttccttccatctgcggtctccagcccctagtcaggaccaggggagaggcagggcaccaaga

SEQ ID NO: 111326 - DNA, 120 bp, Artificial Sequence
  ENSG00000100146_26 (sequence is synthesized)
agtagcccagtccccagggtggccaaaatccctccatctaggacctgcatcatggaagctcttcaagcaacctccccaaaactgctggttcccgtgaagctggatggtaaccgaaacccc

SEQ ID NO: 111327 - DNA, 120 bp, Artificial Sequence
  ENSG00000100146_27 (sequence is synthesized)
gatcttttagacaatatccattgcaaagtcatatccaaattgtatgtatgctgtttttgttttgttttagataaaagcaggactttacactgatctttaacagatctcaccttgttgggt

SEQ ID NO: 111328 - DNA, 120 bp, Artificial Sequence
  ENSG00000100146_28 (sequence is synthesized)
ttgacccatttccccacctgtattaaactttttagaacttagctctcctttagagctttatgtatctgcaaacttgaatagcctcattcaagtcactaataaaggtcgaaatgaagaggg

SEQ ID NO: 111329 - DNA, 120 bp, Artificial Sequence
  ENSG00000100146_29 (sequence is synthesized)
ggtgagcacccgaccgccccccgggctcgggccctctagcttcgggtggattcagggtagccgaggcggcccggcctcctgcacctcagagcgggactgtctggcagtcctccttggata

SEQ ID NO: 111330 - DNA, 120 bp, Artificial Sequence
  ENSG00000100146_30 (sequence is synthesized)
gggctggaagaccaggtgtgggggccgcgcccgcccttccatcacaaggaccctggaactcggaactccagcggcctaggccgggtctccctacggggcggcgggcaggaaggcgccccc

SEQ ID NO: 111331 - DNA, 120 bp, Artificial Sequence
  ENSG00000100146_31 (sequence is synthesized)
tcgtggttggaattttgcgggtggcagaccgtggggcctggggctttggagggagggaaggaggccttcactaactcctgcccacagatacgcacactatgccaccagctgctgtggtca

SEQ ID NO: 111332 - DNA, 120 bp, Artificial Sequence
  ENSG00000100146_32 (sequence is synthesized)
acaccttgggacacggttttccacttcctaaggacgagccccagactggaggagaggtccgaggaggctgctgaacgaaagtgacaagcgccccttcatcgaggaggctgagcggctccg

SEQ ID NO: 111333 - DNA, 120 bp, Artificial Sequence
  ENSG00000100146_33 (sequence is synthesized)
ccgaggaggtgagtgcgcagcctgctcctccctggcccgcccaggcctgggaccctgctgtgaggtggagagaggcgacaccccgcccttgccccccacctggctctcctctaaaccccg

SEQ ID NO: 111334 - DNA, 120 bp, Artificial Sequence
  ENSG00000100147_0 (sequence is synthesized)
agttgctttgctgttagcctgttggaccttcgagcctagctgctcgcacaggactcggccacctgcccttcctgcaccgactggccagctcaagaggtttggatatggaccttcttcaat

SEQ ID NO: 111335 - DNA, 120 bp, Artificial Sequence
  ENSG00000100147_1 (sequence is synthesized)
tcctggccttcctctttgtcctgcttttgtctgggatgggagccacaggcaccttgaggacctccctggacccaagcctggagatctacaagaagatgtttgaggtgaagcggcgggagc

SEQ ID NO: 111336 - DNA, 120 bp, Artificial Sequence
  ENSG00000100147_2 (sequence is synthesized)
agctgttggcactgaagaacctggcacagctgaacgacatccaccagcagtacaagatccttgatgtcatgctcaaggggctctttaaggtgctggaggactcccggacagtgctcaccg

SEQ ID NO: 111337 - DNA, 120 bp, Artificial Sequence
  ENSG00000100147_3 (sequence is synthesized)
ctgctgatgtgctcccagatgggcccttcccccaggacgagaagctgaaggatgctttctcccacgtggtggagaacacggccttcttcggcgatgtggtgctgcgcttcccgaggattg

SEQ ID NO: 111338 - DNA, 120 bp, Artificial Sequence
  ENSG00000100147_4 (sequence is synthesized)
tgcactattactttgaccacaactccaactggaacctcctcatccgctggggtatcagtttctgcaaccagacaggcgtcttcaaccaggggccccactcgcccatcctcagcctgatgg

SEQ ID NO: 111339 - DNA, 120 bp, Artificial Sequence
  ENSG00000100147_5 (sequence is synthesized)
cattcccagcactgaccctttccagaaggccctgagagaagaagagaaacgccgaaagaaagaggagaagcggaaggagatccgaaaaggcccaaggatctccagatcccagtctgagtt

SEQ ID NO: 111340 - DNA, 120 bp, Artificial Sequence
  ENSG00000100147_6 (sequence is synthesized)
atagccctggagcagctcagggctcagggggccacaaggaggcaggtcgggaggaagaagaggtggaggtgtggttgtggtggagagcaccagctagccccttccagaaggggaggccac

SEQ ID NO: 111341 - DNA, 120 bp, Artificial Sequence
  ENSG00000100147_7 (sequence is synthesized)
atttgcccggccccctggagctgggtctgagccccagctgaagggactgagcctcagatggctggattttctctcaggggcctcctgctgaaggggccttcagaggattttatgctggaa

SEQ ID NO: 111342 - DNA, 120 bp, Artificial Sequence
  ENSG00000100147_8 (sequence is synthesized)
atatgaccctgtgcagactgctgggggaggcaggaggatgcctgcctggaccctgttggtggctgaagacctctggccagctggcttccgcccttggtggggaagcagcagaactaggtt

SEQ ID NO: 111343 - DNA, 120 bp, Artificial Sequence
  ENSG00000100147_9 (sequence is synthesized)
ctgagccacgggtcagggtgccaccctgctgctggccccactgtgtcacagagctgcctggcacaggtcccagcccctctgcagagacacaataaaagccagcagaccctttggaccgac

SEQ ID NO: 111344 - DNA, 120 bp, Artificial Sequence
  ENSG00000100150_0 (sequence is synthesized)
accggagcggcgcgggttctcagggaggcaagatgacttctctgccccaagcttggaacagctaaagggaaaaacagtgcaagatgagaacaacaaaggtctacaaactcgtcatccaca

SEQ ID NO: 111345 - DNA, 120 bp, Artificial Sequence
  ENSG00000100150_1 (sequence is synthesized)
agaagggctttgggggcagtgatgatgagctagttgtgaaccccaaagtgttccctcacatcaagcttggagacattgtagagattgcacaccccaacgatgaatacagccctctgcttt

SEQ ID NO: 111346 - DNA, 120 bp, Artificial Sequence
  ENSG00000100150_2 (sequence is synthesized)
tgcaggtcaagtctcttaaggaagatttacagaaggaaactatcagtgtggaccagactgtgactcaagtgttccggctgagaccttatcaggatgtctatgttaatgtcgtagacccta

SEQ ID NO: 111347 - DNA, 120 bp, Artificial Sequence
  ENSG00000100150_3 (sequence is synthesized)
aggatgtgacccttgacctagtggaattaacttttaaggatcagtatattggccgtggggatatgtggcgactaaagaaaagtttggtcagcacatgtgcctatatcacccagaaggtgg

SEQ ID NO: 111348 - DNA, 120 bp, Artificial Sequence
  ENSG00000100150_4 (sequence is synthesized)
agtttgctggcatcagagcacaggctggtgaactgtgggttaagaatgagaaggtcatgtgtggctacatcagtgaagataccagggtggtgtttcgttctacgtcggctatggtttaca

SEQ ID NO: 111349 - DNA, 120 bp, Artificial Sequence
  ENSG00000100150_5 (sequence is synthesized)
tatttattcagatgagctgtgaaatgtgggattttgatatttatggggatttgtattttgagaaagctgtgaatggtttccttgctgatctatttaccaagtggaaggagaagaactgta

SEQ ID NO: 111350 - DNA, 120 bp, Artificial Sequence
  ENSG00000100150_6 (sequence is synthesized)
gtcatgaagtgacagtggtcctgttttctagaactttctatgatgcaaaatctgttgatgaatttcctgaaataaaccgagcctcaattcgacaggatcacaaggggagattctatgaag

SEQ ID NO: 111351 - DNA, 120 bp, Artificial Sequence
  ENSG00000100150_7 (sequence is synthesized)
acttttacaaagtggtggtgcagaatgagagaagagaagaatggacttcacttctcgtaaccattaaaaaactcttcatccagtatccagtgttggtgcgactggaacaggcagagggct

SEQ ID NO: 111352 - DNA, 120 bp, Artificial Sequence
  ENSG00000100150_8 (sequence is synthesized)
ttcctcaaggagataattctacctcagcacaaggaaactacctggaggccatcaatctgtcattcaatgtgtttgataagcactacatcaaccgcaactttgaccgaactgggcagatgt

SEQ ID NO: 111353 - DNA, 120 bp, Artificial Sequence
  ENSG00000100150_9 (sequence is synthesized)
cagtggtgatcacgcccggggtgggtgtctttgaagtggaccgcctactcatgatcctgaccaagcagcggatgatagataatggaattggtgtggatttggtgtgcatgggagagcaac

SEQ ID NO: 111354 - DNA, 120 bp, Artificial Sequence
  ENSG00000100150_10 (sequence is synthesized)
cgttacatgctgtcccattgttcaagctccataatcggagtgctccccgtgattctcgtctgggcgatgactataatatccctcactggataaaccacagtttctacacatccaaaagcc

SEQ ID NO: 111355 - DNA, 120 bp, Artificial Sequence
  ENSG00000100150_11 (sequence is synthesized)
agctcttttgtaatagtttcaccccacgaataaaactggcaggaaagaagcccgcctctgagaaagcaaaaaatggccgtgatacatctctcgggagtccaaaagaatctgagaacgccc

SEQ ID NO: 111356 - DNA, 120 bp, Artificial Sequence
  ENSG00000100150_12 (sequence is synthesized)
ttcccatccaagtagattatgacgcctatgacgctcaagtgttcaggctgcccggcccatcccgggcccagtgcctcaccacctgcagatctgtgcgagagcgagagagtcacagtcgaa

SEQ ID NO: 111357 - DNA, 120 bp, Artificial Sequence
  ENSG00000100150_13 (sequence is synthesized)
agagtgccagctcctgtgatgtttcatccagcccttccctaccaagccgcacactgcccactgaggaagtgaggagccaggcttctgacgacagctccctaggcaagagtgccaacatcc

SEQ ID NO: 111358 - DNA, 120 bp, Artificial Sequence
  ENSG00000100150_14 (sequence is synthesized)
tgatgatcccacacccccacctgcaccagtatgaagtcagcagctccttgggatacaccagcactcgagatgtcctggagaacatgatggagccaccacagcgagactccagtgcaccag

SEQ ID NO: 111359 - DNA, 120 bp, Artificial Sequence
  ENSG00000100150_15 (sequence is synthesized)
ggaggtttcacgttggcagtgcagaatccatgctgcatgttcgacctggtggatacacgccccagagagcactgattaaccccttcgctccctctcggatgcccatgaagcttacgtcca

SEQ ID NO: 111360 - DNA, 120 bp, Artificial Sequence
  ENSG00000100150_16 (sequence is synthesized)
acagaaggcgctggatgcacacttttcctgtggggccatccggagaagccatccagatccaccaccagacccgacagaatatggcggagctacaaggcagcgggcagagggatccaactc

SEQ ID NO: 111361 - DNA, 120 bp, Artificial Sequence
  ENSG00000100150_17 (sequence is synthesized)
actcctctgcagagctgctggagttagcatatcatgaagctgctggaaggcacagcaattcccgccagcctggtgacggcatgtccttcttgaacttcagtggaacagaggagctttctg

SEQ ID NO: 111362 - DNA, 120 bp, Artificial Sequence
  ENSG00000100150_18 (sequence is synthesized)
tcggcctgcttagcaacagtggtgcaggtatgaatcctaggacccagaataaggattctctagaggacagtgtttctacctctccagacccaatgccaggcttctgttgcacagttggag

SEQ ID NO: 111363 - DNA, 120 bp, Artificial Sequence
  ENSG00000100150_19 (sequence is synthesized)
tggactggaagtctctcactactccggcgtgcctcccccttaccaccgactacttccctgaccgccagggcctgcagaatgactacacagagggctgttatgatctccttccagaagcag

SEQ ID NO: 111364 - DNA, 120 bp, Artificial Sequence
  ENSG00000100150_20 (sequence is synthesized)
acatcgacaggagggacgaagatggtgtgcagatgacagcccagcaggtatttgaagagtttatttgccaacgtctcatgcagggctaccaaatcatagtgcagcccaagacacagaaac

SEQ ID NO: 111365 - DNA, 120 bp, Artificial Sequence
  ENSG00000100150_21 (sequence is synthesized)
ccaatcctgctgtcccgcccccgctgagcagtagcccactctatagccgaggccttgtgtcccgaaaccgccctgaggaggaggaccagtattggctgagtatgggcagaacgttccaca

SEQ ID NO: 111366 - DNA, 120 bp, Artificial Sequence
  ENSG00000100150_22 (sequence is synthesized)
accttcccaagtatccttatgaatctgcccagatccactacacctacagcctctgtccttcccactcagactcagagttcgtctcctgctgggtggaattctcccacgaacggctggagg

SEQ ID NO: 111367 - DNA, 120 bp, Artificial Sequence
  ENSG00000100150_23 (sequence is synthesized)
agtacaagtggaattacttagatcagtatatctgttctgccggctctgaagacttcagcttaattgagtccctgaagttctggaggacccgcttcctgctgctgccagcctgtgtcaccg

SEQ ID NO: 111368 - DNA, 120 bp, Artificial Sequence
  ENSG00000100150_24 (sequence is synthesized)
ccaccaagcgcatcacggagggggaggcccactgcgacatctatggggacaggccccgtgcagacgaggacgagtggcaactcctggatggttttgtccgctttgtggagggcttgaatc

SEQ ID NO: 111369 - DNA, 120 bp, Artificial Sequence
  ENSG00000100150_25 (sequence is synthesized)
gcattcgcaggcggcatcgctcggatcgcatgatgcggaaagggaccgccatgaaaggcttgcagatgactgggcccatttccacgcattctctggagtcaactgcacccccagtgggga

SEQ ID NO: 111370 - DNA, 120 bp, Artificial Sequence
  ENSG00000100150_26 (sequence is synthesized)
agaagggaacctcagctctctctgccctgttggagatggaggccagtcagaagtgcctgggagaacagcaggcagctgtgcatggtgggaagagctccgcccagtcagccgagagcagca

SEQ ID NO: 111371 - DNA, 120 bp, Artificial Sequence
  ENSG00000100150_27 (sequence is synthesized)
gcgttgccatgactcccacctacatggacagcccacgaaaggtatctgtggaccaaacagccactcctatgttggacggcaccagtttgggcatatgcacaggccaatccatggacagag

SEQ ID NO: 111372 - DNA, 120 bp, Artificial Sequence
  ENSG00000100150_28 (sequence is synthesized)
gcaacagccagacctttgggaactcccagaacataggagaacagggctactcctccacaaactccagtgacagcagctctcagcagctggtggcaagctccttgacctcatcctctaccc

SEQ ID NO: 111373 - DNA, 120 bp, Artificial Sequence
  ENSG00000100150_29 (sequence is synthesized)
tgacagagatcctggaagccatgaagcacccctcgacaggagtccagctgctctctgaacagaagggcctctcaccgtactgcttcatcagcgcggaggtggtacactggttggtgaacc

SEQ ID NO: 111374 - DNA, 120 bp, Artificial Sequence
  ENSG00000100150_30 (sequence is synthesized)
acgtggaggggatccagacacaggcgatggccattgacatcatgcagaaaatgctggaagagcagctcatcacacatgcatctggcgaagcctggcggaccttcatctacggcttctatt

SEQ ID NO: 111375 - DNA, 120 bp, Artificial Sequence
  ENSG00000100150_31 (sequence is synthesized)
tctacaagatagtaacggacaaagagcccgaccgagtggccatgcagcagcccgccaccacctggcacacagcaggagtggacgacttcgccagcttccagcgcaagtggtttgaggtgg

SEQ ID NO: 111376 - DNA, 120 bp, Artificial Sequence
  ENSG00000100150_32 (sequence is synthesized)
cctttgtggcagaagagctcgtgcactctgagattcctgcctttctcctgccctggctgcctagccggccagcctcctatgcaagtaggcacagctcctttagccgaagttttggaggac

SEQ ID NO: 111377 - DNA, 120 bp, Artificial Sequence
  ENSG00000100150_33 (sequence is synthesized)
ggagccaggcggcagcacttttagctgccactgtcccagagcagaggactgtgaccctggatgttgacgtgaacaaccgcacagaccggctggagtggtgcagctgttattaccatggca

SEQ ID NO: 111378 - DNA, 120 bp, Artificial Sequence
  ENSG00000100150_34 (sequence is synthesized)
acttttctctgaatgcagcctttgagatcaagctgcactggatggcggtgaccgcagcagtactcttcgagatggtccaaggttggcatcggaaagccacctcctgtggcttcttgttag

SEQ ID NO: 111379 - DNA, 120 bp, Artificial Sequence
  ENSG00000100150_35 (sequence is synthesized)
tcccagttttggaggggccttttgcactgcccagttacctgtatggcgacccccttcgtgcccagctcttcatcccactcaacatcagctgcttgctcaaggagggcagcgagcacctgt

SEQ ID NO: 111380 - DNA, 120 bp, Artificial Sequence
  ENSG00000100150_36 (sequence is synthesized)
ttgatagctttgaacccgaaacgtactgggatcgaatgcacctcttccaggaagccattgcacacaggtttgggtttgtacaagataaatattctgcctctgcttttaacttccctgctg

SEQ ID NO: 111381 - DNA, 120 bp, Artificial Sequence
  ENSG00000100150_37 (sequence is synthesized)
agaacaagcctcagtatatccacgttacaggaacagtgtttctgcagctgccctactccaagcgcaagttctcagggcagcagcggcggcggcggaactccaccagctccaccaaccaga

SEQ ID NO: 111382 - DNA, 120 bp, Artificial Sequence
  ENSG00000100150_38 (sequence is synthesized)
acatgttctgcgaggagcgggtcggctacaactgggcctacaacaccatgctcaccaaaacatggcgctccagcgccacaggggatgaaaagtttgctgatcggctgctgaaggacttca

SEQ ID NO: 111383 - DNA, 120 bp, Artificial Sequence
  ENSG00000100150_39 (sequence is synthesized)
cggacttctgcatcaaccgtgacaaccggctggtcacgttctggacaagttgcctggagaagatgcatgccagtgccccgtgaggccaggctgcacctgtgctgggggaaggtgggtgag

SEQ ID NO: 111384 - DNA, 120 bp, Artificial Sequence
  ENSG00000100150_40 (sequence is synthesized)
tgggtgagccactgccctcaaacccggggcggaggattccaggcaggctctaggagtcaggtgtccgtttgctgctatcagtgagtgggggccattgttttttgtttgtttgtttgtttg

SEQ ID NO: 111385 - DNA, 120 bp, Artificial Sequence
  ENSG00000100150_41 (sequence is synthesized)
tttttggcccccacgacaagtcttctactctagaagaaagactttggaagcagctgctgctgctgccaccactcctgtcagcaagtgctcagagcaggtgggaggcacagattgtccgtg

SEQ ID NO: 111386 - DNA, 120 bp, Artificial Sequence
  ENSG00000100150_42 (sequence is synthesized)
ggagggctccagtgtctgggaagagggcaggcggcccccatgaatgtcctcggaagggggtggctcctggtagcatccttttccttcaccatctatgggatattaggggcagaatctgcc

SEQ ID NO: 111387 - DNA, 120 bp, Artificial Sequence
  ENSG00000100150_43 (sequence is synthesized)
acttcttgcccaggagtgtgcacagatgtaagataattttgtgaaataatgtaccatagactctcaccaactgtatatacctgtacatatcagaagcaaataaagagctccacgtgcatc

SEQ ID NO: 111388 - DNA, 120 bp, Artificial Sequence
  ENSG00000100150_44 (sequence is synthesized)
gcgctacacggtcggggcgggcctagtaggcgcttcaggcttaggggcggaacagcgcgggccgcgcgggcgtaggcggggtatctggaggaggcgcagggaacctggagagggtccagc

SEQ ID NO: 111389 - DNA, 120 bp, Artificial Sequence
  ENSG00000100150_45 (sequence is synthesized)
ccaggtggccggggtcatggcagtcaatgaagtggtcacagatggtgagagggcttcagaattcactggcttagagtctggctgggagtttattgagagatttctttcataggccactgg

SEQ ID NO: 111390 - DNA, 120 bp, Artificial Sequence
  ENSG00000100150_46 (sequence is synthesized)
gcaggagcaaggatggttccagtgaggacagtgagcaggcagtataacttacaaggtaactgcaggctcatgctgtcagaatgaatcttgctaaatgggtgagctcagctctgggacgca

SEQ ID NO: 111391 - DNA, 120 bp, Artificial Sequence
  ENSG00000100150_47 (sequence is synthesized)
atcttgctaaatgggtgagctcagctctgggacgcagatatgatggcattctgaaaaaaatcaaaggaaacattttgtagactctaacttaggttttttttgttgttgttttttttgttg

SEQ ID NO: 111392 - DNA, 120 bp, Artificial Sequence
  ENSG00000100150_48 (sequence is synthesized)
ccaccatgcccggcctaacttagatttgctgagataagactcagcttggtgcttcacctcagcaccctgccttaagctactcagggcagttcaggagctgtgggtcagaggggagaatcc

SEQ ID NO: 111393 - DNA, 120 bp, Artificial Sequence
  ENSG00000100150_49 (sequence is synthesized)
gacagtgactgccacttcttgctgtgccatctcaccacgtggagttcatcacaagctctgttgatttgcctcctcaatggctttgcatccattctcttcttcccaggccctgagctgcca

SEQ ID NO: 111394 - DNA, 120 bp, Artificial Sequence
  ENSG00000100150_50 (sequence is synthesized)
ctcagtccagccttcctttgtctttctcttagatccccaggaaaaccttctaatttgtctctgctttcactccacttgtcagtcagtctttttataaaaccactgtgattttgcccacca

SEQ ID NO: 111395 - DNA, 120 bp, Artificial Sequence
  ENSG00000100150_51 (sequence is synthesized)
acactaagaagccatacctgaccatcccccatcgcagtgctcactccttagccaagttgtcagtatcttccaggacagctccttaaccatctttatagtgtgccactcctttttatacac

SEQ ID NO: 111396 - DNA, 120 bp, Artificial Sequence
  ENSG00000100150_52 (sequence is synthesized)
tctccaatatagccaaaaagaatattcttctgtggcttctactgaatctcgcttctctcaacaccagcccagccatctcttcatacaacagagaacagctgggaagttcaaaaagagttt

SEQ ID NO: 111397 - DNA, 120 bp, Artificial Sequence
  ENSG00000100150_53 (sequence is synthesized)
actaaaagctaggagataagcaaagagaaatgagtacagcatgagccagcaggtttttttttttgtccagagctcataggctaagttttgtcccacaaaacatggtatcctgggaaagca

SEQ ID NO: 111398 - DNA, 120 bp, Artificial Sequence
  ENSG00000100150_54 (sequence is synthesized)
atttttccaggtctctgtctgcctccacatggcattagcatcttcaaggacccctcccttggaaagactctcatctggggaacatccttaaggtccaaataaaaaaagacagcctgctgc

SEQ ID NO: 111399 - DNA, 120 bp, Artificial Sequence
  ENSG00000100150_55 (sequence is synthesized)
tgctcaacccagacaaggtctgagggtgtgccagtgggtggctgcgggaaagtagtggccagccaagggaacgatgccacatgaaccaggattagagtcgctgaggccgtcacacaggcc

SEQ ID NO: 111400 - DNA, 120 bp, Artificial Sequence
  ENSG00000100150_56 (sequence is synthesized)
actgtgtctgtcggcactgttggctccgttgctgacttccacttgccgagtggttttatgactgtcccaaccaacagacggtatttagcacctctcaaatcagaacatagtgccagacct

SEQ ID NO: 111401 - DNA, 120 bp, Artificial Sequence
  ENSG00000100150_57 (sequence is synthesized)
gttcggataggagagaagaaatatgtggccaattttcccgagggttctgtaggatataggagatgtgagatagtgctcattgcaccagctagttcctgccggagcccctccctacaacca

SEQ ID NO: 111402 - DNA, 120 bp, Artificial Sequence
  ENSG00000100150_58 (sequence is synthesized)
tagcatcctatgatctcagaagaggaaggaacctaaaaggtcatccattccagacactcatgcagagcaaaagtctctctctctctctcctcttcctttcctccccaaatgtgcttacca

SEQ ID NO: 111403 - DNA, 120 bp, Artificial Sequence
  ENSG00000100150_59 (sequence is synthesized)
aattttaccatctttcaccctgaacttttttccccactcttccctccccttccctcccctggccccccatcccacacttgccatggtgaccacatgtaccttttccccctgttacgtgag

SEQ ID NO: 111404 - DNA, 120 bp, Artificial Sequence
  ENSG00000100150_60 (sequence is synthesized)
agtatgaagtcagcagctccttgggatacaccagcactcgagagcacctaggataaagtgcagtgatgcaatcacagctcacctcagtgcggccttgaactcctggactcaatcgatcct

SEQ ID NO: 111405 - DNA, 120 bp, Artificial Sequence
  ENSG00000100150_61 (sequence is synthesized)
cccacctctgcctcccaagtaactgggactatagcatgccaccacacccagctgattatcatatttttttttgtagaggtggggaagtgcagtgatgcaatcacagctcacctcagtgcg

SEQ ID NO: 111406 - DNA, 120 bp, Artificial Sequence
  ENSG00000100150_62 (sequence is synthesized)
gccttgaactcctggactcaattgatcctcccacttctgcctcccaagtaactgggactatagcatgccaccacacccagctgattatcatatttttttttgtagaggtggggttttacc

SEQ ID NO: 111407 - DNA, 120 bp, Artificial Sequence
  ENSG00000100150_63 (sequence is synthesized)
ccaggctggtcttgaactcctggactcgagggatccacccattggcctccaaaagtgctgagattacaggcatgaaccaatgttaccgcaccctgcctctattatactattttttgttta

SEQ ID NO: 111408 - DNA, 120 bp, Artificial Sequence
  ENSG00000100150_64 (sequence is synthesized)
tttagcctttcttcatccatcatttaactgtatgcctttccatatgttaatggaaagcttttcttaggcctagggtcaaaagggtttatttccttatgatttccatttgtgccatatata

SEQ ID NO: 111409 - DNA, 120 bp, Artificial Sequence
  ENSG00000100150_65 (sequence is synthesized)
tgactcccacctacatggacagcccacgaaaggacggggccttctttatggagtttgtccgcagcccacgcacagcatcgtccgccttctaccctcaggtatctgtggaccaaacagcca

SEQ ID NO: 111410 - DNA, 120 bp, Artificial Sequence
  ENSG00000100150_66 (sequence is synthesized)
ccagtgacagcaggaagtggagactgttcctaatattcgtgctcttgactgcatacgtgccatcttgctttgctgacctgacaccctgtgttacagctctcagcagctggtggcaagctc

SEQ ID NO: 111411 - DNA, 120 bp, Artificial Sequence
  ENSG00000100150_67 (sequence is synthesized)
gatgtgctgttttgcacagcctttgccgtatacactctcgtctccctgagaatacgatttccttattcaaataatgaaatgctactacagcagtttaaatgaatgagctgaaggtacatg

SEQ ID NO: 111412 - DNA, 120 bp, Artificial Sequence
  ENSG00000100150_68 (sequence is synthesized)
tatcaacatggataaatgtcagaagcatgatgtggactggaaaaccaacttataaaatgatataatattatgccctttatttaaaaacttagaatcccgaaagaataccttatattctct

SEQ ID NO: 111413 - DNA, 120 bp, Artificial Sequence
  ENSG00000100150_69 (sequence is synthesized)
acaggcgtgagcgaccacgctgggcccccggtaacagtttcttttgtcctctcatgggtgtttctctgagtctaggaatagcatagggacattgctttatggtattaaatgctctagtgg

SEQ ID NO: 111414 - DNA, 120 bp, Artificial Sequence
  ENSG00000100150_70 (sequence is synthesized)
gagtcccttctttttcatctttccttccacttgttgccatggggcacacacatcccctgctccccgttcaccgtgttggaacccaggacaggagtccagctgctctctgaacagaagggc

SEQ ID NO: 111415 - DNA, 120 bp, Artificial Sequence
  ENSG00000100150_71 (sequence is synthesized)
aagaggcagctgaagctggatggagggtgatgatgagatgaaaaggaagggatgaagaacacggcagggtgcctacggtgcctgggagaacagcaggcagctgtgcatggtgggaagagc

SEQ ID NO: 111416 - DNA, 120 bp, Artificial Sequence
  ENSG00000100150_72 (sequence is synthesized)
gcacacttttcctgtgggtatgaatcctaggacccagaataaggattctctagaggacagtgtttctacctctccagacccaagtaagagggggcagctgactggggaaaggggtagaca

SEQ ID NO: 111417 - DNA, 120 bp, Artificial Sequence
  ENSG00000100150_73 (sequence is synthesized)
gggagtgtggggtggtcagagcatgaggaaacaagaggaagccctgtgggaagtgagtggtcctgaggtacacatacctctggggtatgggaaggcgatgtggtgagggaggactctctg

SEQ ID NO: 111418 - DNA, 120 bp, Artificial Sequence
  ENSG00000100150_74 (sequence is synthesized)
gactctgtgatggaaagtgagggggtgtgtgactgaatgacctgttttggaaggtgattcaggggcacctgggaaaggtagcagattccctataaggcccccatgctggtccagagctgg

SEQ ID NO: 111419 - DNA, 120 bp, Artificial Sequence
  ENSG00000100150_75 (sequence is synthesized)
gattgtaactgctaaggggagaattttctggaactgcaaatgctaattcatgaatgcccagggtcccccacatcatcttctaacaaactttaaatatcattgtgagaataatcatatttg

SEQ ID NO: 111420 - DNA, 120 bp, Artificial Sequence
  ENSG00000100150_76 (sequence is synthesized)
tctaaagatacactacttttttcaataatcaaatttttttcaaactgcattgtatgttgaagtcatagcctcttagtagtgaggcagatattaaatttggcttcaaaaaataaagaaata

SEQ ID NO: 111421 - DNA, 120 bp, Artificial Sequence
  ENSG00000100150_77 (sequence is synthesized)
aataaacttggcttcttagtttgagaatgaaaccactttgtacatctggcttttatgatcttgttttaagatgtacaaaacaggccgggcacagcggttcatgcctgtaatcctagcact

SEQ ID NO: 111422 - DNA, 120 bp, Artificial Sequence
  ENSG00000100150_78 (sequence is synthesized)
ctggggttacaggcgtgagccactgctcccggccatctgaatttcttcatgcccttctgcatgtttgaaatatttgatgatgatacgagtttacattttaaaatataatttatatcaagt

SEQ ID NO: 111423 - DNA, 120 bp, Artificial Sequence
  ENSG00000100150_79 (sequence is synthesized)
tgatacgagtttacattttaaaatataatttatatcaagtacaacatgtctaatctgggggtggagggtagggtctcctcagtgctcctgtcactcccttgtctccagagcatgactgag

SEQ ID NO: 111424 - DNA, 120 bp, Artificial Sequence
  ENSG00000100150_80 (sequence is synthesized)
cagaaggcgctggatgcacacttttcctgtggaaaatttagctccaagtggcttttggctattgacaaagaacagataacatttcaacagctaaaaattggtgccccagatggatagtca

SEQ ID NO: 111425 - DNA, 120 bp, Artificial Sequence
  ENSG00000100150_81 (sequence is synthesized)
ttcatgtcactttaattttttagttcaggctcttattaccattcatcgggactattggagtaacctttttaaaaaatttaaacatagtaaaaattttaagcaatcaaaaaaggtagaatc

SEQ ID NO: 111426 - DNA, 120 bp, Artificial Sequence
  ENSG00000100150_82 (sequence is synthesized)
agggtttcttagccttagcagtattgacatctgaggccagataattctctgtgggggagtcctgcaccttatgggaaattgagcaacaaccctagcctctacccactaaatgctagtagc

SEQ ID NO: 111427 - DNA, 120 bp, Artificial Sequence
  ENSG00000100150_83 (sequence is synthesized)
acagccccaggtgtggtaagcaaaatgtccccagatattgtcacatgtccccaggaagggggagtattgctccctcttgagaatcactggtttagagtgaaaagtaagtctgtttcccac

SEQ ID NO: 111428 - DNA, 120 bp, Artificial Sequence
  ENSG00000100150_84 (sequence is synthesized)
tctcattccctgggatctacttctgctttgttgagtaaacttccagagagattctaagcatggacaaaatcacgttactttttttttttttcagcagagatggtagcattggatacatac

SEQ ID NO: 111429 - DNA, 120 bp, Artificial Sequence
  ENSG00000100150_85 (sequence is synthesized)
tacttacattgcattttttctatcacctatgtgttccatgtcagtacaaataaatctgccttgggattttttttattattattgttattgggatttttgtttgtttttgttttgcctcgt

SEQ ID NO: 111430 - DNA, 120 bp, Artificial Sequence
  ENSG00000100150_86 (sequence is synthesized)
tgtttttaagggctggagagttttctattatttgtttaaccatagttaaccagtcccctgttaataaacatcactgctttgaactcagtggttctttacctgggcggattttgccacccg

SEQ ID NO: 111431 - DNA, 120 bp, Artificial Sequence
  ENSG00000100150_87 (sequence is synthesized)
gccacccgggatcatttggcaatatctgaagacagaaaagggtggctgggcacggaggttcacgccttgggaggccgaggcaggcagatcactcaaggtcaggagttcaaaaccagcctg

SEQ ID NO: 111432 - DNA, 62 bp, Artificial Sequence
  ENSG00000100150_88 (sequence is synthesized)
aggttgttaaaaaaaaaaggaaaaaaaaaaagaaggccgggagcagtggctcacgcctgtaa

SEQ ID NO: 111433 - DNA, 74 bp, Artificial Sequence
  ENSG00000100150_89 (sequence is synthesized)
tgagttcaggagtttgagaccagagtacccaggcgtggtggtgggcgtctgtaatctcagctacttgggaggct

SEQ ID NO: 111434 - DNA, 60 bp, Artificial Sequence
  ENSG00000100150_90 (sequence is synthesized)
caaaaacaaacaaacaaaacaaaccccaggcagcctctattttttttcaataatacatac

SEQ ID NO: 111435 - DNA, 120 bp, Artificial Sequence
  ENSG00000100150_91 (sequence is synthesized)
aaaccccaggcagcctctattttttttcaataatacatacttcagcgtaagtttctttctttttttacatgttatttatttatttagtgtcacccagcctggcacaaagctgattagtat

SEQ ID NO: 111436 - DNA, 120 bp, Artificial Sequence
  ENSG00000100150_92 (sequence is synthesized)
atgtttcaacaaataagaactaaaagaaaacccatcacggtaccattatcattggtaacaaaattaacactaatccctaaatgccctctaatagccagtgcatagtcagttttttgaatt

SEQ ID NO: 111437 - DNA, 120 bp, Artificial Sequence
  ENSG00000100150_93 (sequence is synthesized)
gcctcaaaaatgtgcttttgcagttagtttgaaatgggacctaaacaagatccactttttgcatttggttataatgccttttgtgtgtgtgtgtgacagtagaatgtcttgctttctaca

SEQ ID NO: 111438 - DNA, 120 bp, Artificial Sequence
  ENSG00000100150_94 (sequence is synthesized)
tttggctgattgttgccttgtagtgtttcagttttcctctattctgcagattccctgtaaactggcaattatctctggaagcttgattagatttagattcaaatttgagggcaagtagac

SEQ ID NO: 111439 - DNA, 120 bp, Artificial Sequence
  ENSG00000100150_95 (sequence is synthesized)
ttcttgggcactatgttctttctcccacatcacatcatacctctcttctcattctgtttttagtgatgagagattaatcagtgggattaggtggggtcagcctggagcagtcctttcttt

SEQ ID NO: 111440 - DNA, 120 bp, Artificial Sequence
  ENSG00000100150_96 (sequence is synthesized)
acaactatgatcctaggactttggctgcataatgtctgtcatttcccccctctcttatataacatctcaagctgttaagggtgaagtaccgcatacaggtttcccacttgtagatcacac

SEQ ID NO: 111441 - DNA, 120 bp, Artificial Sequence
  ENSG00000100150_97 (sequence is synthesized)
taatagagttgggatgtttagatcaggctcacatctggaaatgacacaagggccagaaaagcagggccatgtctattttgagatcatttcagccacacttttgggtgacctatttagaaa

SEQ ID NO: 111442 - DNA, 120 bp, Artificial Sequence
  ENSG00000100150_98 (sequence is synthesized)
cagtgctctataatgcatggaattaaaaatgggctgcacgttaacatttttagctcagaacatgttggtcaagccacatttatcatcattctgtcacagagttgtgattgagggcagctt

SEQ ID NO: 111443 - DNA, 120 bp, Artificial Sequence
  ENSG00000100150_99 (sequence is synthesized)
aggagcatagtattgagggcaacaccatggacagagctggagtggtctgtgctctagagggacttttggttgtcaggggcaatggggagcaaacccacctccataacaggagagacccag

SEQ ID NO: 111444 - DNA, 120 bp, Artificial Sequence
  ENSG00000100150_100 (sequence is synthesized)
gtgtcagagaaaaaggcacttggcttggttggtgagggtttcggatatatcccacacatgcatcagaacactggatttgtgctggcttcagcaacacatatattaaaattggaacgatat

SEQ ID NO: 111445 - DNA, 90 bp, Artificial Sequence
  ENSG00000100150_101 (sequence is synthesized)
tgaggcaggagaatcgcttgaacctgggcggcagtgagccagtatcatgccactgcattccagcctgggagacaaagtgatgtacaaaat

SEQ ID NO: 111446 - DNA, 120 bp, Artificial Sequence
  ENSG00000100150_102 (sequence is synthesized)
tttcttatagaagaagttgcaagcagtttacttagggaattgcttagagaagaatttacttagagaagaaattagagaagaaattgcaagcaagaaataaagattgttctcatgttctca

SEQ ID NO: 111447 - DNA, 120 bp, Artificial Sequence
  ENSG00000100150_103 (sequence is synthesized)
acccggactccagatttaaattaccctaataatctcaatttatgagaatttatgaaaaacacaaagctaacatcacactcaatggtaaaagactgaaaactttcccccaagatcagtaac

SEQ ID NO: 111448 - DNA, 120 bp, Artificial Sequence
  ENSG00000100150_104 (sequence is synthesized)
taagttcttattatggcactaaaccttttgttaagaaaatgtggaaaccaagttctaacatttgctcaaagctctgtacacacaaagcagtagcagtatcataggaacagtctatggtga

SEQ ID NO: 111449 - DNA, 120 bp, Artificial Sequence
  ENSG00000100150_105 (sequence is synthesized)
tattttcaacaaagccatgagctgtagcatcaaatgagcacatactcatggggagatggaccttcacacaccaactccacagagagtttactgagagtgctttcattatctcctttctct

SEQ ID NO: 111450 - DNA, 120 bp, Artificial Sequence
  ENSG00000100150_106 (sequence is synthesized)
tcagatccgggattgcatgtgcagaggctttggatgaattctaccctgaaccctttaaaggttctattactgttactacttttatatagggactttcttattcacagttgtaaggaagct

SEQ ID NO: 111451 - DNA, 74 bp, Artificial Sequence
  ENSG00000100150_107 (sequence is synthesized)
tttatatagggactttcttattcacagttgtaaggaagctaacttctagttaaatccggatataaaacggtcag

SEQ ID NO: 111452 - DNA, 120 bp, Artificial Sequence
  ENSG00000100150_108 (sequence is synthesized)
gagcccaggagtttgagaccagcatacgcaacataaggagacaccatttcttaaaaaaattaaaaataaaattagctagatgtggtggtgtgtacctgtagtctcagctactcagaaggc

SEQ ID NO: 111453 - DNA, 120 bp, Artificial Sequence
  ENSG00000100150_109 (sequence is synthesized)
gttgaagtgagccatgatcacacgactgcgctccagccttgggtgacgcagtgagaccctgcctcaaaaaaataaaatacaacagttaagctaaacctctttggttcaatgcccaagatc

SEQ ID NO: 111454 - DNA, 120 bp, Artificial Sequence
  ENSG00000100150_110 (sequence is synthesized)
tggcctgagctttgtatttggccgtctggttttccttcaccctcatctttagctttcccagaggggaatagaaagctactgaagtagcttccaccagagctcgctcttctttgataatga

SEQ ID NO: 111455 - DNA, 120 bp, Artificial Sequence
  ENSG00000100150_111 (sequence is synthesized)
aattcccatcagttttctcagactgctgagaaatacagtcaaatgggagtatcctggggtggggggaaaatacagaaaacctgagactttaggcctctatcaggaacaagtacaataaag

SEQ ID NO: 111456 - DNA, 120 bp, Artificial Sequence
  ENSG00000100150_112 (sequence is synthesized)
aagccaaaaactccatgggtcttttaagaccaatagacttggctctgtcagctccttctgggaaattcagattcagatcattctgttgtgataggacaagctgactgtacttacctctct

SEQ ID NO: 111457 - DNA, 120 bp, Artificial Sequence
  ENSG00000100150_113 (sequence is synthesized)
cttgtccctatcactgggagatgaaggagattcaatacatatatgttatttttcaaaattgtggtcaaatggtatatctgtgtttattttacctccatatcatgaaaatttctcatgtca

SEQ ID NO: 111458 - DNA, 120 bp, Artificial Sequence
  ENSG00000100150_114 (sequence is synthesized)
ttaaatgttttacaaaagcatgatttttaaaaataattatatacttttttctttcgttttttttcccctaagcaaccccaaagaaaaaaatagctatatatcattttatcatatgaatat

SEQ ID NO: 111459 - DNA, 120 bp, Artificial Sequence
  ENSG00000100150_115 (sequence is synthesized)
gccttaatttataacttcttttggttaaaattgtagatggtgatttttaaatgatttttggtatttttctataaactttaagaattattctacagtataccacagttataatgttgcagt

SEQ ID NO: 111460 - DNA, 120 bp, Artificial Sequence
  ENSG00000100150_116 (sequence is synthesized)
gaatatgcttggaataatcatttgaccacaccactgataattccttagcataaatactgtaattacactacatgggtagagggataaaaatctgagaagaagtatcagccaaggctgtgg

SEQ ID NO: 111461 - DNA, 120 bp, Artificial Sequence
  ENSG00000100150_117 (sequence is synthesized)
gcaacttgtaaaccaaacgttggcaaacctaaatacatattttagactttgtggccaagaggcaaagcaaagctattgtgtaagtatagtatttccataactatttaaagttgtaaaaac

SEQ ID NO: 111462 - DNA, 120 bp, Artificial Sequence
  ENSG00000100150_118 (sequence is synthesized)
accaaggagcctgtttctgctcacactgaagaagcatatcttgggggtagtggtacccccagtgtgaagggtgagattctcagccaaccccaaggcaggaggcaggacaaagagacccaa

SEQ ID NO: 111463 - DNA, 76 bp, Artificial Sequence
  ENSG00000100150_119 (sequence is synthesized)
tcacgccactgccctccagcctggagattgttgtagctcaaacaaaccacaaaatgcactatagtagtttgaggct

SEQ ID NO: 111464 - DNA, 120 bp, Artificial Sequence
  ENSG00000100150_120 (sequence is synthesized)
ctcaaacaaaccacaaaatgcactatagtagtttgaggcttattaatggaaaaagttgatgaagccccctggcattctgtaaaaaaggaagtagaaaaaaaaaaggagatagagactcgt

SEQ ID NO: 111465 - DNA, 120 bp, Artificial Sequence
  ENSG00000100150_121 (sequence is synthesized)
aattttacaactggaaaaaccctagatgcacgtattgaatcatactttctcattttacaaattaggaaacaggtttagaaacataaaatgactggcacattggctcctgatttgttacct

SEQ ID NO: 111466 - DNA, 120 bp, Artificial Sequence
  ENSG00000100150_122 (sequence is synthesized)
ttttaactatattgctgtactcttgatttattaaaactatttctatattttagtttgtgaagaaaaaagagactttgtgaaatcccctttaaattcaaaaagtggctgggtgtggtggct

SEQ ID NO: 111467 - DNA, 120 bp, Artificial Sequence
  ENSG00000100150_123 (sequence is synthesized)
atgcatttgcattcagacttttaaggaacattgtgaatgctgccggtttactacccttcatttgttgaattgcattattaattacaaatcttccgtgtatgttccataaaattccagcct

SEQ ID NO: 111468 - DNA, 120 bp, Artificial Sequence
  ENSG00000100150_124 (sequence is synthesized)
gcactggtttggcagataagagaaactaaaatcgtttatcagtttttacattgagtgagagagaagtggcatagatgtgcatagagcaggtatgatcaaagcatgaacctttgcctggct

SEQ ID NO: 111469 - DNA, 120 bp, Artificial Sequence
  ENSG00000100150_125 (sequence is synthesized)
tgtaggcatgggaagaaggagcaggatacagcatgttattctgcactgagctatagtctgagtatctactctgcttctaattttcctggtgaccttgggcaagctcctagtgtaccttat

SEQ ID NO: 111470 - DNA, 120 bp, Artificial Sequence
  ENSG00000100151_0 (sequence is synthesized)
gacaatcgcggccaccgccaggtggaacggcaggtgggttcaggtaccagcctggccgggacccggctgtgggaccaacgcttccggtgagcgacagaggcagctccccagggcctggag

SEQ ID NO: 111471 - DNA, 120 bp, Artificial Sequence
  ENSG00000100151_1 (sequence is synthesized)
acccgtggggcggactctgggatctgagcctatcgccctggcctggagcccccctttgtacctattccccattcccctaccgagctgggcagttagccagcccactccaactctcggaac

SEQ ID NO: 111472 - DNA, 120 bp, Artificial Sequence
  ENSG00000100151_2 (sequence is synthesized)
catgtttgcagacttggattatgacatcgaagaggataaactcggaatcccgactgtgcctgggaaggtgaccctgcagaaggatgctcagaacctgatcgggatcagcattggaggagg

SEQ ID NO: 111473 - DNA, 120 bp, Artificial Sequence
  ENSG00000100151_3 (sequence is synthesized)
ggcccagtactgtccctgcctctatatcgtccaggtatttgacaacaccccagcagccttggacggcacagtggcagctggcgatgagatcaccggtgtcaatggcaggtcaatcaaagg

SEQ ID NO: 111474 - DNA, 120 bp, Artificial Sequence
  ENSG00000100151_4 (sequence is synthesized)
gaaaactaaggtggaggtggcgaagatgattcaggaggtgaagggggaggtgaccatccactacaacaagctgcaggcggaccccaagcagggcatgtccctggacattgtgttgaagaa

SEQ ID NO: 111475 - DNA, 120 bp, Artificial Sequence
  ENSG00000100151_5 (sequence is synthesized)
agtcaagcaccggctggtggagaacatgagttcagggaccgcagatgctctgggcctgagccgggccatcctgtgcaatgatgggcttgtcaagaggctagaggagctggagcggaccgc

SEQ ID NO: 111476 - DNA, 120 bp, Artificial Sequence
  ENSG00000100151_6 (sequence is synthesized)
tgagctatacaaagggatgacggaacacaccaagaacctcctacgggccttttatgagctgtcgcagactcaccgggcctttggggacgtgttctccgtgatcggggtgcgggagcccca

SEQ ID NO: 111477 - DNA, 120 bp, Artificial Sequence
  ENSG00000100151_7 (sequence is synthesized)
gccagctgcgagcgaggcttttgtgaagttcgccgatgcccaccgcagcatcgagaagttcggcattcggcttctgaaaaccatcaagccgatgctgacggatctgaacacgtacctcaa

SEQ ID NO: 111478 - DNA, 120 bp, Artificial Sequence
  ENSG00000100151_8 (sequence is synthesized)
tcgcctcaccatcaagaagtacctggacgtgaagtttgagtacctgtcgtactgcctgaaggtgaaggagatggatgacgaggaatacagctgcattgccctaggcgagcccctttaccg

SEQ ID NO: 111479 - DNA, 120 bp, Artificial Sequence
  ENSG00000100151_9 (sequence is synthesized)
ggtgagcaccggcaactatgagtaccgcctgatcctgcgctgccgccaggaggcgcgcgcccgcttctcccagatgcgcaaggatgtgctggagaagatggagctgctggaccagaagca

SEQ ID NO: 111480 - DNA, 120 bp, Artificial Sequence
  ENSG00000100151_10 (sequence is synthesized)
cgtccaggacatcgtgttccagctgcagcgcctcgtgtccaccatgtccaagtactacaacgactgctacgcagtgctgcgggatgccgacgtcttccccatcgaggtagacctggcgca

SEQ ID NO: 111481 - DNA, 120 bp, Artificial Sequence
  ENSG00000100151_11 (sequence is synthesized)
caccacattggcctatggcctcaaccaggaggagttcacagatggggaggaggaggaggaggaggaagacacggcagctggggagccgtccagggatacacgaggggctgctgggccctt

SEQ ID NO: 111482 - DNA, 120 bp, Artificial Sequence
  ENSG00000100151_12 (sequence is synthesized)
ggacaagggtggaagctggtgtgactcctgagtgccccgcggctgtggtgccgggggcagggtgcgtgggaggacggagcctgggagcggggcggggccgccgcgcaagggggcgacgca

SEQ ID NO: 111483 - DNA, 120 bp, Artificial Sequence
  ENSG00000100151_13 (sequence is synthesized)
taaaggcctgctggcttggggcgcctgcctccctgctcctctgtcctcgcacagcgaacctgggctcctgcccaggacaggcaccagggtcatggcctgggacctggacactggcccctc

SEQ ID NO: 111484 - DNA, 120 bp, Artificial Sequence
  ENSG00000100151_14 (sequence is synthesized)
caccctccctcccctcccggctccccggccagagggagagcttggtctctggacctgccttaggaaggagagggagggcaggaaggaaaagaaaggacttggaggtggcaggagtccgag

SEQ ID NO: 111485 - DNA, 120 bp, Artificial Sequence
  ENSG00000100151_15 (sequence is synthesized)
ccctgctccttgtgggcgctcacactgcccccggagcctgctgggagtggggccagccgtggacagctgaggttggggtcaatgcctcctgggcacccttgcctcgccccagaccggccc

SEQ ID NO: 111486 - DNA, 120 bp, Artificial Sequence
  ENSG00000100151_16 (sequence is synthesized)
gtccagtccccatcacacctcggcggcctttatttattctgttcccccagctcggccacttctctgaaggagggctgggttctgggcctgtatcgaataaacacaaacctggatggcgca

SEQ ID NO: 111487 - DNA, 120 bp, Artificial Sequence
  ENSG00000100151_17 (sequence is synthesized)
ggcggggttagacgctgtcagcctgtccagaccgttcctctgttttcgcttgttcctactaacagcgagcttccgccaatacttgttctcgttcttggttccgagcgtcccgggagccgg

SEQ ID NO: 111488 - DNA, 120 bp, Artificial Sequence
  ENSG00000100151_18 (sequence is synthesized)
gaagggaaggattgtctgcagggattggagcaaatatccagtggggggaaagccgggacttccgcgtcttgccggaagtgacgtgacaatcgcggccaccgccaggtggaacggcaggtg

SEQ ID NO: 111489 - DNA, 120 bp, Artificial Sequence
  ENSG00000100151_19 (sequence is synthesized)
ggcactgctgtcccgtatgaggtggtggagggaggggtggcgttggcatttaggcacttgggttccttaaatcctatgctcctttctctcccggatccagttccccattcccctaccgag

SEQ ID NO: 111490 - DNA, 120 bp, Artificial Sequence
  ENSG00000100151_20 (sequence is synthesized)
ccgcacccggccttgggctcaggagtctcagtccagaacagtcttggctgggaaggggctcagggtgtggagcctcgctcactagtctgtgtgtgctgctcttccagggggaggtgacca

SEQ ID NO: 111491 - DNA, 120 bp, Artificial Sequence
  ENSG00000100151_21 (sequence is synthesized)
ttggagggggtggggggcttgtacttccccccacctggtctgccagggatagcaggtggctcaggccaacccgggagagaccggggggacttggctggactctcgttcctggagatttag

SEQ ID NO: 111492 - DNA, 120 bp, Artificial Sequence
  ENSG00000100151_22 (sequence is synthesized)
cagtcccgctcgctgggcctcggggtgctgggcacccggccgggaaccactccctcagtctgggggactcttggagggaaatcggattttcttcactcctatgaggcgcttttaagtgtt

SEQ ID NO: 111493 - DNA, 120 bp, Artificial Sequence
  ENSG00000100151_23 (sequence is synthesized)
tgatttttctgctgtcgggatccatttcgtggccagtgttcattgaatgtggcagaggtttgggtttggttttttcctctcttcaaagctatcactgagtgcttctgagaaacactgaag

SEQ ID NO: 111494 - DNA, 120 bp, Artificial Sequence
  ENSG00000100151_24 (sequence is synthesized)
tctcagaaatgaggtctcaggaatgaagaacagccgtggctttgaaagcacagtgcggtgcgaggccgtccctgagcaggcactcctgtcccacccccgccccaggccctaggcgagccc

SEQ ID NO: 111495 - DNA, 120 bp, Artificial Sequence
  ENSG00000100151_25 (sequence is synthesized)
gcgaagatgattcaggaggtgaaggtaagggctgctgcagagcaggtgtccagaggcagcaacacatgtttctgagacctccaggctgccagaggtcccagcaggcctggaagggggtat

SEQ ID NO: 111496 - DNA, 120 bp, Artificial Sequence
  ENSG00000100151_26 (sequence is synthesized)
actcaattagccacctaaggagagagtagggcggggcttccaccggccgtgggatatgtggataatcatccttctgtatctttcttccatggctcctggggcagctggggaagcaagctg

SEQ ID NO: 111497 - DNA, 120 bp, Artificial Sequence
  ENSG00000100151_27 (sequence is synthesized)
gatgggcctggccccatgctgccggatgaggtggatgcctggctgtggctctgggagagccaacctcccccagggaacccactttacacaatagcagtggcagcagaggctggcgaggag

SEQ ID NO: 111498 - DNA, 120 bp, Artificial Sequence
  ENSG00000100151_28 (sequence is synthesized)
gccagccctgccctcccctttatgacaggagaatccagagttacatggctgtgggctctgacctctgaccaagcaaatctgaaaggcctgggaggcctcccggtgctctccctgcatctg

SEQ ID NO: 111499 - DNA, 120 bp, Artificial Sequence
  ENSG00000100151_29 (sequence is synthesized)
ttcttgtactctgtccctggtttctcactcccccgcgtttcacccctacctccctgcttctgccatctcctctggggacttgctaccctagggttgtcctttgcaggccagcgcctcggc

SEQ ID NO: 111500 - DNA, 120 bp, Artificial Sequence
  ENSG00000100151_30 (sequence is synthesized)
ggtgtgaccgtgggcaatccctggggcctctcactcccatgctgaggtgggtcagacccacagcgcctgacctcaggctccctctgggctgggcctggtcccaggtgctgggatttgcga

SEQ ID NO: 111501 - DNA, 120 bp, Artificial Sequence
  ENSG00000100151_31 (sequence is synthesized)
tgggcctgcggggaacatctagatcagctggtctcttaagggccgcaacgatgaacaggccccaccctgtctcctcacactgccactggcagtacacaaggcccttgcttatttatattt

SEQ ID NO: 111502 - DNA, 120 bp, Artificial Sequence
  ENSG00000100151_32 (sequence is synthesized)
cagtcccacagacccttgcttctcagcggtggatcagttgttgtactgaagcagcaatggaccctgctctcccaggagctcactatttgtagggggctgtggacagttaaagggataatc

SEQ ID NO: 111503 - DNA, 120 bp, Artificial Sequence
  ENSG00000100151_33 (sequence is synthesized)
acagctcagtgccataagggcactattagcatgacttggtgacaagaagagcaaagcagatggagcagtgcttctgctgggatggtcaaggaaagcttcatggaggacgtagcaattgaa

SEQ ID NO: 111504 - DNA, 80 bp, Artificial Sequence
  ENSG00000100154_0 (sequence is synthesized)
ggcggcgcgcagcacggcgggaacatggcgcgcggaaccggcgcgcgcgcctagctggcgggaccgttagctcgaggcgg

SEQ ID NO: 111505 - DNA, 120 bp, Artificial Sequence
  ENSG00000100154_1 (sequence is synthesized)
gtggggatggagcagtcgccgccgccggcgcccgagccgacccaagggccgacccccgcaaggagccgaaggcggcgggagccagagtcgccgccggcgtcggcgccgattcctctcttt

SEQ ID NO: 111506 - DNA, 120 bp, Artificial Sequence
  ENSG00000100154_2 (sequence is synthesized)
gccgattcctctctttggtgctgacactattggccagagaagtcctgatggaccggtactgagcaaagctgaatttgttgagaaagttcgtcagagtaatcaggcctgtcatgatggaga

SEQ ID NO: 111507 - DNA, 120 bp, Artificial Sequence
  ENSG00000100154_3 (sequence is synthesized)
tttccacacagctattgttctgtataatgaagccctggctgttgaccctcagaactgcatcttatacagcaatagatctgcagcctacatgaaaatccagcagtatgacaaggcactgga

SEQ ID NO: 111508 - DNA, 120 bp, Artificial Sequence
  ENSG00000100154_4 (sequence is synthesized)
tgatgcaatcaaagctcgacttctcaatcccaagtggccaaaggcatacttccgacagggtgttgccctccagtaccttggacgtcatgccgatgccctggcagcctttgcatctggact

SEQ ID NO: 111509 - DNA, 120 bp, Artificial Sequence
  ENSG00000100154_5 (sequence is synthesized)
ggctcaagaccccaagagtctccagcttctggtggggatggtggaagccgccatgaaatctcccatgagagactccctcgagcccacttatcagcagcttcagaaaatgaaactggacaa

SEQ ID NO: 111510 - DNA, 120 bp, Artificial Sequence
  ENSG00000100154_6 (sequence is synthesized)
gagtccctttgtggtcgtgtctgtggttgggcaggaactcctgacagctggccatcatggggcctctgtggttgtcttagaagccgcactgaagattggcacctgcagcctcaaactgag

SEQ ID NO: 111511 - DNA, 120 bp, Artificial Sequence
  ENSG00000100154_7 (sequence is synthesized)
aggttctgttttctctgccctgagcagtgcttactggtctcttggaaatacagagaagagcaccggatatatgcagcaggacttggatgtagccaagaccttaggtgaccagacaggaga

SEQ ID NO: 111512 - DNA, 120 bp, Artificial Sequence
  ENSG00000100154_8 (sequence is synthesized)
atgccgagctcatgggaatctgggctctgcattcttctccaaaggaaattaccgggaggctctcactaaccacaggcatcagttggtactcgccatgaaactcaaagatcgagaggcagc

SEQ ID NO: 111513 - DNA, 120 bp, Artificial Sequence
  ENSG00000100154_9 (sequence is synthesized)
ttcatcagccttgagcagtctgggccacgtgtacacagccattggagactaccccaatgcactggccagtcacaaacagtgtgttcttcttgccaagcaatccaaagatgaactttctga

SEQ ID NO: 111514 - DNA, 120 bp, Artificial Sequence
  ENSG00000100154_10 (sequence is synthesized)
agcccgagaacttggcaacatgggagctgtgtatattgccatgggtgactttgagaatgctgtgcagtgccatgagcagcatctgaagatagccaaggacctggggaacaagcgagaaga

SEQ ID NO: 111515 - DNA, 120 bp, Artificial Sequence
  ENSG00000100154_11 (sequence is synthesized)
ggcccgggcttatagcaacctgggcagtgcctatcactaccggaggaactttgacaaggccatgtcttaccataactatgtcctggagctggcacaggagttgatggagaaggctattga

SEQ ID NO: 111516 - DNA, 120 bp, Artificial Sequence
  ENSG00000100154_12 (sequence is synthesized)
gatgcgggcctatgctggactaggccatgctgccaggtgcatgcaggatttggagagagctaaacaataccatgagcagcagctgggcattgctgaggatctcaaggaccgggctgcaga

SEQ ID NO: 111517 - DNA, 120 bp, Artificial Sequence
  ENSG00000100154_13 (sequence is synthesized)
ggggcgagcatcctccaatctaggaatcatacaccagatgaaaggtgattatgacactgcactgaaactccacaagacccacctgtgcattgcccaggagctgagtgattatgctgccca

SEQ ID NO: 111518 - DNA, 120 bp, Artificial Sequence
  ENSG00000100154_14 (sequence is synthesized)
gggccgtgcctatgggaatatgggcaatgcctacaatgccctgggcatgtacgaccaggcggtcaaataccatcggcaggagctgcagatctccatggaagtgaatgaccgcgcctcaca

SEQ ID NO: 111519 - DNA, 120 bp, Artificial Sequence
  ENSG00000100154_15 (sequence is synthesized)
ggcctccacacatgggaaccttgccgtggcctaccaggccctgggtgcccatgaccgggccctgcaacactatcagaaccacttgaacatcgcccgggagctacgagacatccagagcga

SEQ ID NO: 111520 - DNA, 120 bp, Artificial Sequence
  ENSG00000100154_16 (sequence is synthesized)
ggcccgggccctcagcaacctgggcaatttccactgctctcggggagagtatgtccaggctgccccctattatgaacagtacctccggcttgctcccgaccttcaagacatggaaggaga

SEQ ID NO: 111521 - DNA, 120 bp, Artificial Sequence
  ENSG00000100154_17 (sequence is synthesized)
agggaaggtctgccacaatcttggctatgcccattactgccttggaaactatcaggaggcagtgaagtactacgaacaggatctggcactggctaaagaccttcacgacaagttgagcca

SEQ ID NO: 111522 - DNA, 120 bp, Artificial Sequence
  ENSG00000100154_18 (sequence is synthesized)
agcaaaagcctactgcaacttgggcctagcattcaaggctctgctgaatttcagtaaagctgaagagtgtcagaagtacctactgtccctagcccagtctctgaataattcccaggctaa

SEQ ID NO: 111523 - DNA, 120 bp, Artificial Sequence
  ENSG00000100154_19 (sequence is synthesized)
atttcgagccctaggaaacctgggcgatatattcatctgtaaaaaagatataaatggtgcaataaaattctatgagcagcaactgggcttagctcaccaggtaaaggacagaagattaga

SEQ ID NO: 111524 - DNA, 120 bp, Artificial Sequence
  ENSG00000100154_20 (sequence is synthesized)
agccagtgcatatgcagccctgggcactgcataccgaatgatccagaagtatgacaaggccctgggttatcacacacaggaactggaggtatatcaggagctgagtgacttgccagggga

SEQ ID NO: 111525 - DNA, 120 bp, Artificial Sequence
  ENSG00000100154_21 (sequence is synthesized)
gtgcagagctcatgggcacctggctgctgtctacatggcccttgggaaatacacaatggcattcaagtgttatgaagagcaactggatctagggcaaaagctgaaggatccgagtctgga

SEQ ID NO: 111526 - DNA, 120 bp, Artificial Sequence
  ENSG00000100154_22 (sequence is synthesized)
agcccaggtctatggcaacatgggcatcacaaagatgaacatgaatgtgatggaagaagccattggctactttgagcagcaattggccatgctgcagcagctaagtggaaatgagtctgt

SEQ ID NO: 111527 - DNA, 120 bp, Artificial Sequence
  ENSG00000100154_23 (sequence is synthesized)
gctcgacaggggccgggcctatggcaacctgggggattgctacgaagccctgggtgactatgaggaagctatcaaatactatgaacaatatttatctgtcgcgcagagtctgaatcgcat

SEQ ID NO: 111528 - DNA, 120 bp, Artificial Sequence
  ENSG00000100154_24 (sequence is synthesized)
gcaagaccaagccaaggcttaccggggcctgggaaatggacacagggcaatggggagcttgcagcaagcccttgtgtgctttgaaaagaggctcgtggttgctcatgaacttggagaggc

SEQ ID NO: 111529 - DNA, 120 bp, Artificial Sequence
  ENSG00000100154_25 (sequence is synthesized)
cttcaataaagcccaggcctatggagagctgggaagtctgcacagccaattagggaattacgaacaagccatttcctgccttgaacgccagctgaacattgctagagatatgaaagaccg

SEQ ID NO: 111530 - DNA, 120 bp, Artificial Sequence
  ENSG00000100154_26 (sequence is synthesized)
agccctggagagtgacgcagcctgtggcctggggggcgtttaccagcagatgggggagtatgacacagccctgcagtaccaccagcttgatctacagatagcagaggaaaccaacaaccc

SEQ ID NO: 111531 - DNA, 120 bp, Artificial Sequence
  ENSG00000100154_27 (sequence is synthesized)
cacgtgccagggccgagcctatgggaacctgggcctgacttatgaatccctgggcaccttcgagagggctgtggtctatcaagaacagcacttgagcattgctgcacagatgaatgactt

SEQ ID NO: 111532 - DNA, 120 bp, Artificial Sequence
  ENSG00000100154_28 (sequence is synthesized)
ggcggccaagacggtgtcatatagtagccttggaaggacccatcatgccttgcagaactattcccaagcagtcatgtacttacaggaaggtttaaggttagctgagcaactgggccgaag

SEQ ID NO: 111533 - DNA, 120 bp, Artificial Sequence
  ENSG00000100154_29 (sequence is synthesized)
agaagatgaggcaaaaattcgccatggccttggcctctccctttgggctagtggaaacttggaggaggcccaacaccagctttatagggcatcagccttgtttgaaacaatccgacatga

SEQ ID NO: 111534 - DNA, 120 bp, Artificial Sequence
  ENSG00000100154_30 (sequence is synthesized)
ggcacagctgagcacggactacaaactctccctctttgacctgcagacatcatcctaccaggccttgcagcgggtgctcgtcagcctaggccatcatgatgaagccctggctgtggcaga

SEQ ID NO: 111535 - DNA, 120 bp, Artificial Sequence
  ENSG00000100154_31 (sequence is synthesized)
aaggggacggacaagggcatttgctgatcttctggtggaacgacaaacaggacaacaagactccgacccctactccccagtcactattgatcagatcttagagatggtaaatggccagag

SEQ ID NO: 111536 - DNA, 120 bp, Artificial Sequence
  ENSG00000100154_32 (sequence is synthesized)
gggactagtgctttactattccctggctgcaggctatctgtatagctggctgctggctcctggggcaggaattgtgaagtttcatgaacactacctgggtgagaacacagtggaaaactc

SEQ ID NO: 111537 - DNA, 120 bp, Artificial Sequence
  ENSG00000100154_33 (sequence is synthesized)
aagtgacttccaggccagcagcagtgtaacccttccaacagcaaccggctcagccctggagcagcacattgccagtgtccgggaggccctgggggtggagtctcactactcaagggcctg

SEQ ID NO: 111538 - DNA, 120 bp, Artificial Sequence
  ENSG00000100154_34 (sequence is synthesized)
tgccagcagtgagacagagagtgaagcgggagacatcatggaccagcaatttgaagagatgaacaacaaactcaactcggtcactgaccccactggctttctgcggatggttcgccgcaa

SEQ ID NO: 111539 - DNA, 120 bp, Artificial Sequence
  ENSG00000100154_35 (sequence is synthesized)
taacctgtttaacaggagctgccagagcatgacgagcctgttcagtaacactgtgtcaccgacccaggacgggacctcctctcttcccaggaggcagagctcgtttgccaagcccccgct

SEQ ID NO: 111540 - DNA, 120 bp, Artificial Sequence
  ENSG00000100154_36 (sequence is synthesized)
ccgtgccctgtatgacctgctcatcgcgcccatggaagggggcctgatgcactccagcggccccgtgggccggcaccggcagctcatcctggttctggagggggagctctacctcattcc

SEQ ID NO: 111541 - DNA, 120 bp, Artificial Sequence
  ENSG00000100154_37 (sequence is synthesized)
tttcgccctcctgaagggaagctcctccaatgagtacctctacgagcgcttcggcctccttgctgtcccttccatccgctccctcagcgtgcagtccaagtctcacttacggaagaaccc

SEQ ID NO: 111542 - DNA, 120 bp, Artificial Sequence
  ENSG00000100154_38 (sequence is synthesized)
gcccacatactccagctccacatccatggcggctgtcatcggcaaccccaagctaccatcggccgtgatggacaggtggctgtgggggcccatgccatcggccgaggaagaggcctacat

SEQ ID NO: 111543 - DNA, 120 bp, Artificial Sequence
  ENSG00000100154_39 (sequence is synthesized)
ggtgtccgagctgctgggctgccagcccctagtgggcagtgtggccaccaaggagagggtcatgagtgccctgacccaggctgaatgcgtccactttgccacccacatctcctggaagct

SEQ ID NO: 111544 - DNA, 120 bp, Artificial Sequence
  ENSG00000100154_40 (sequence is synthesized)
gtcggccttggtcctcacgcccagcatggacggcaaccctgccagcagcaagagctccttcggccacccctacacgatccctgagtccttgcgggtgcaggacgatgccagtgatgggga

SEQ ID NO: 111545 - DNA, 120 bp, Artificial Sequence
  ENSG00000100154_41 (sequence is synthesized)
gagcatctcggactgcccgcccctgcaggagctgctgcttactgccgccgacgtcctggacctgcagctgcctgtgaagctggtggtgcttggctcctcccaggagtccaacagcaaagt

SEQ ID NO: 111546 - DNA, 120 bp, Artificial Sequence
  ENSG00000100154_42 (sequence is synthesized)
cacagccgacggggtcatcgcgctgacaagggccttcctggctgccggcgctcagtgtgtcctcgtgtctctgtggcctgtgccagtggctgcttctaagatgttcatccatgccttcta

SEQ ID NO: 111547 - DNA, 120 bp, Artificial Sequence
  ENSG00000100154_43 (sequence is synthesized)
ctcatccctgctgaacggcctgaaagccagcgccgccctgggggaggccatgaaggtggtgcagagcagcaaggccttctcgcacccctccaactgggcagggttcatgctcatcgggag

SEQ ID NO: 111548 - DNA, 120 bp, Artificial Sequence
  ENSG00000100154_44 (sequence is synthesized)
tgacgttaagctgaacagcccctcatcactcatcggccaggccctcacagagatcctgcagcacccggagcgtgcgcgggacgccctgcgagtgctgctgcacctggtggagaaatccct

SEQ ID NO: 111549 - DNA, 120 bp, Artificial Sequence
  ENSG00000100154_45 (sequence is synthesized)
gcagcgcatccagaatgggcagcgcaatgccatgtacacatcccagcagagtgtggagaacaaagtgggcggcatccctggctggcaggccctcctcaccgctgtgggcttccggctgga

SEQ ID NO: 111550 - DNA, 120 bp, Artificial Sequence
  ENSG00000100154_46 (sequence is synthesized)
ccccccaaccagtggcctgccagcggctgtcttcttcccaacctccgacccgggcgaccggctccagcagtgcagcagcacactccagtccctgctgggtctgcccaatcctgccctcca

SEQ ID NO: 111551 - DNA, 120 bp, Artificial Sequence
  ENSG00000100154_47 (sequence is synthesized)
agccctttgcaaactcatcactgcctccgagacgggcgagcagctcatcagccgggctgttaaaaatatggttggaatgctccaccaggtgctggttcagctccaggctggcgagaagga

SEQ ID NO: 111552 - DNA, 120 bp, Artificial Sequence
  ENSG00000100154_48 (sequence is synthesized)
gcaggacttggcatcagctcccattcaggtctccatcagcgtccagctgtggcggctcccgggatgccacgagttcctggcagctctaggttttgatctctgtgaagttggtcaggagga

SEQ ID NO: 111553 - DNA, 120 bp, Artificial Sequence
  ENSG00000100154_49 (sequence is synthesized)
ggactgtgcacttcgcgctccagtccctgctgtctctgtttgattctactgagctacccaagcgcctcagccttgacagctcctcctccctcgagtctcttgcttctgctcagtctgttt

SEQ ID NO: 111554 - DNA, 120 bp, Artificial Sequence
  ENSG00000100154_50 (sequence is synthesized)
ccaacgccctgcccttgggttaccagcaaccccccttctctcccaccggtgcggacagcatcgcctcagatgccatctctgtgtacagtctgagctccattgcctcctcaatgagctttg

SEQ ID NO: 111555 - DNA, 120 bp, Artificial Sequence
  ENSG00000100154_51 (sequence is synthesized)
tctccaaacccgagggtggatcagagggtggaggccccggaggacggcaggaccatgaccggtccaagaacgcttacctgcagagatccaccctgcctaggagccagctgcctccccaga

SEQ ID NO: 111556 - DNA, 120 bp, Artificial Sequence
  ENSG00000100154_52 (sequence is synthesized)
cccgccctgcaggcaacaaagatgaagaagaatatgaagggttttctatcatcagtaacgagcccttggcgacctaccaagaaaaccgaaacacatgcttctcaccagaccacaaacaac

SEQ ID NO: 111557 - DNA, 120 bp, Artificial Sequence
  ENSG00000100154_53 (sequence is synthesized)
cccaacctgggacagccggaggcatgagagtctcggtgagctccaaagggagcatcagcactccaaattctccagtgaaaatgactctgattcccagccccaactcacccttccaaaagg

SEQ ID NO: 111558 - DNA, 120 bp, Artificial Sequence
  ENSG00000100154_54 (sequence is synthesized)
tgggaaaactagcaagctcagatacaggagaatcagaccagtctagcacagaaacggacagtaccgtgaaatcccaagaagaaagcaacccaaaactggatccacaagagttagcccaga

SEQ ID NO: 111559 - DNA, 120 bp, Artificial Sequence
  ENSG00000100154_55 (sequence is synthesized)
aaattctggaggagacacagagtcatctcattgcggtggagcgtcttcagaggagcggcggccaggtgagcaagagtaataaccctgaagacggcgttcaggcgcccagcagcactgctg

SEQ ID NO: 111560 - DNA, 120 bp, Artificial Sequence
  ENSG00000100154_56 (sequence is synthesized)
tcttcagagcgtcagaaaccagtgcgttcagcaggcctgttctctcccatcagaagagtcagccatcaccagtcactgttaaaccaaagcccccagccaggagctcctccctgcccaagg

SEQ ID NO: 111561 - DNA, 120 bp, Artificial Sequence
  ENSG00000100154_57 (sequence is synthesized)
tgagttccggatatagcagccccaccacctcagagatgtccatcaaagacagcccgagccagcacagtggccggccatcgcccggctgcgactcacagacttcccagctggaccagcctc

SEQ ID NO: 111562 - DNA, 120 bp, Artificial Sequence
  ENSG00000100154_58 (sequence is synthesized)
tctttaaactgaagtaccccagctctccttacagcgctcacatttccaaatcaccaaggaacatgtccccaagctccggccaccagtctcctgctggcagtgcaccctccccagctctct

SEQ ID NO: 111563 - DNA, 120 bp, Artificial Sequence
  ENSG00000100154_59 (sequence is synthesized)
cctactcctcagctggatctgctcgctcaagtccagcagacgctcccgacatagacaaactgaaaatggcagccattgatgaaaaggtgcaggctgtccataacctgaagatgttctggc

SEQ ID NO: 111564 - DNA, 120 bp, Artificial Sequence
  ENSG00000100154_60 (sequence is synthesized)
agagcacaccccagcattccacagggccaatgaagatcttccggggggctcctggcacgatgacttccaaaagggatgtcctcagtctgttgaatttgtcaccacggcacaataagaagg

SEQ ID NO: 111565 - DNA, 120 bp, Artificial Sequence
  ENSG00000100154_61 (sequence is synthesized)
aggagggagtggataagcttgaactgaaggagctgtccctgcagcagcatgacggagctccaccgaaagcccctcccaacggacactggcgcaccgagaccacctcgctgggctcactgc

SEQ ID NO: 111566 - DNA, 120 bp, Artificial Sequence
  ENSG00000100154_62 (sequence is synthesized)
cgctgcccgccggccctcccgccacagcccccgcgcgccctttgaggcttccttctggaaatggctacaagttcctgtctccaggaagatttttcccttcttccaaatgctaaagcatct

SEQ ID NO: 111567 - DNA, 120 bp, Artificial Sequence
  ENSG00000100154_63 (sequence is synthesized)
tttatacccactgactctgagcagcctgcagatgggggcctggcgtttgcttcagcccttccctgagtgcagtccccccacagccaccagcaccctcatgatgctgtgctctgcaggcga

SEQ ID NO: 111568 - DNA, 120 bp, Artificial Sequence
  ENSG00000100154_64 (sequence is synthesized)
ggggcaccaccacgtccaaaggctgccacacacactggtggcttttctgggccacattcaccaaaagccaggacttctgtggggctggtacaggaggctcatggaatttcctacacactt

SEQ ID NO: 111569 - DNA, 120 bp, Artificial Sequence
  ENSG00000100154_65 (sequence is synthesized)
caccaaatgtttgtttacctttgaactccctgcttctcatctttgatatgattcttcaccaggattttgtacaaaaatgatcatggttctggggtggggagaggaaagggagcacatatt

SEQ ID NO: 111570 - DNA, 120 bp, Artificial Sequence
  ENSG00000100154_66 (sequence is synthesized)
ttgctaagaggtatatatgcagtaccttttatacacagaaatacaaatagagctttttctaaggctttcggttgctggttgggggtgggatatatgaaatttcagttgaattctacagga

SEQ ID NO: 111571 - DNA, 120 bp, Artificial Sequence
  ENSG00000100154_67 (sequence is synthesized)
aagtgttatattagccaaaaacagaaaaatggtttttaaaatgccaatgatttgtaattaaattgtagcaattttggtctcatgatagtgtaatatctcagcaacaatgcaataattcac

SEQ ID NO: 111572 - DNA, 120 bp, Artificial Sequence
  ENSG00000100154_68 (sequence is synthesized)
attgaaacagcgcttccattctgaactctgctctgcaaatgtcttttgggtcccgctgtcaaccaaacttgaattttcttaaaaaaaaaattatgtaactcttatccaggcattttagaa

SEQ ID NO: 111573 - DNA, 120 bp, Artificial Sequence
  ENSG00000100154_69 (sequence is synthesized)
ctatgcaattgtgatttaaaatgcaactttgtgcttttaaaacattattgaccttttttgtatatggataaacaacttggttttattatcaatagtactttgcatttatagctattattt

SEQ ID NO: 111574 - DNA, 120 bp, Artificial Sequence
  ENSG00000100154_70 (sequence is synthesized)
ttaaaagctcaaaaagttttttaaaatgtcaaattttgaatagtcatcaataagtaattatcaagtttggaaggaaaggttgaaatgactccgtttccttataagcaaaaaaaaaaaaaa

SEQ ID NO: 111575 - DNA, 120 bp, Artificial Sequence
  ENSG00000100154_71 (sequence is synthesized)
aaaaaaaaaaaaaaaaaaaaaaatttccatggctaactagatttaaccagaatcccgccttccaggctcctgttcccttttattagctgctgaattttattcccttttcccaactccagg

SEQ ID NO: 111576 - DNA, 120 bp, Artificial Sequence
  ENSG00000100154_72 (sequence is synthesized)
tccctcagttgtcttatatctaaatcctttgccaggtccccacaatcccagcacctgcctctgtgagctgcccccaggccctcaccttggccctggccagcctcctgtgctcctgctgtc

SEQ ID NO: 111577 - DNA, 120 bp, Artificial Sequence
  ENSG00000100154_73 (sequence is synthesized)
tgaaggactggcccctcccccactgctgaagccacacgtacagatcctaagcaacagggccttttgctgggacgtatgcctggattatggccaaccgggaagagagagatgtatcttaaa

SEQ ID NO: 111578 - DNA, 120 bp, Artificial Sequence
  ENSG00000100154_74 (sequence is synthesized)
aagtggaggtggacttctcctacagctctgacggtaacttaaattgttgccagcttgaggcaagacaagggaatcatctagttaggggtaaccattaatttattttataaagaaaggaaa

SEQ ID NO: 111579 - DNA, 120 bp, Artificial Sequence
  ENSG00000100154_75 (sequence is synthesized)
tgctgaaagtcgtattagtactgagtttagttggagaatttagataagtaagtatcttttaggtaattctaaaattaaaatcctacccacctcactacagggttcctcatgaaggtgggc

SEQ ID NO: 111580 - DNA, 120 bp, Artificial Sequence
  ENSG00000100154_76 (sequence is synthesized)
ggccacctggcctgggccaccagcagcacatggagcagacctgaggggcctggcagggggcactgacctcaggatccccaggtgggggttttaaccatgggtgggatctcagcttctgcg

SEQ ID NO: 111581 - DNA, 120 bp, Artificial Sequence
  ENSG00000100154_77 (sequence is synthesized)
catacactgacaatctcacctgttcctcagtgtactcctctgaaaagaagaaaggataatatttatccaatctgtgttctcctgagctccatcctaggggtttttaatttaaccaacagc

SEQ ID NO: 111582 - DNA, 120 bp, Artificial Sequence
  ENSG00000100154_78 (sequence is synthesized)
catgttgacaaaagccaacaataagcatgtcttattctagccctgatcccaacactgaaagcgaagtactttataaagaagccagcaattatgagggtttctttatgttagtaggggaaa

SEQ ID NO: 111583 - DNA, 120 bp, Artificial Sequence
  ENSG00000100154_79 (sequence is synthesized)
aaatggtaataaaagtaccagtgtagcaagtgaagaccaaatttatagcactgtgcattagatagcaaaatcaggttcttaacaatgaaaagtaaacctcaagtttctaaatccatatgc

SEQ ID NO: 111584 - DNA, 120 bp, Artificial Sequence
  ENSG00000100154_80 (sequence is synthesized)
agatggttaggctgtccctctcttagcaaatctctcagcctccttctttcccaagtgccaaggatccctggagtaaagctctggggtctgtgctctctttctgtgaggggaaggctgcgg

SEQ ID NO: 111585 - DNA, 120 bp, Artificial Sequence
  ENSG00000100154_81 (sequence is synthesized)
ccctatttgcccctctctagcaaacacccccaccaccctgccgcttcctgtggttattgagccagctaggagttactcatggactctaacctggttttagtcccatgtacatcgttgttt

SEQ ID NO: 111586 - DNA, 120 bp, Artificial Sequence
  ENSG00000100154_82 (sequence is synthesized)
taggtttcatactgaagagccaatggtttatgtggttttattctgtcttaaatataagtttcaaggaagggaaaacaaaagtgataaaatgatagaacagtctagaggccactgtaaagt

SEQ ID NO: 111587 - DNA, 120 bp, Artificial Sequence
  ENSG00000100154_83 (sequence is synthesized)
caccgccactttacgtgtatgtcagtcttggtgttcttgtatgagtaaaatggatgtaaaatcataaaatcacagtgaatgtttcaggctacactggaaaaagtatgcacttagaattaa

SEQ ID NO: 111588 - DNA, 120 bp, Artificial Sequence
  ENSG00000100154_84 (sequence is synthesized)
aggaaattgtataattcaccaagatttctttgtgtagatcaggggttggcaactatgacccacaggctaagactggtcagcggtctggtttttcacagccatgagctaagttaccttttt

SEQ ID NO: 111589 - DNA, 120 bp, Artificial Sequence
  ENSG00000100154_85 (sequence is synthesized)
gctaagttacctttttaaagggttatataagtaattacatcatatttttgattttgcctttggcccacaccacataaaatattcaatacctggcctttttttttttttttgagacagagt

SEQ ID NO: 111590 - DNA, 63 bp, Artificial Sequence
  ENSG00000100154_86 (sequence is synthesized)
gacagagtctcgctctgtcacccaggatagagtgcactggtgcgatttaagtagctgggacta

SEQ ID NO: 111591 - DNA, 120 bp, Artificial Sequence
  ENSG00000100154_87 (sequence is synthesized)
cactgcgcccagccaatacctggccttttaagaagtttgctgactcctggtatggatgacagaaaatggaataacgttttgtttctccagtctaggaaaagcaagtcaggtagtggatag

SEQ ID NO: 111592 - DNA, 120 bp, Artificial Sequence
  ENSG00000100154_88 (sequence is synthesized)
actgactggcgtccggggagcccagggtatgtgagggccacgtggatggaagcaaatgcctcctgcatagcccttggctctttgtcccacttgggaggagtccatggatgtaatatttac

SEQ ID NO: 111593 - DNA, 120 bp, Artificial Sequence
  ENSG00000100154_89 (sequence is synthesized)
aaaacaattttttccttaccatttgcagaaagcattgcatatatttccttttagctcaggaaactggcatgccccaccctctgctactccatcagatgtaaatacaatgactataagccg

SEQ ID NO: 111594 - DNA, 120 bp, Artificial Sequence
  ENSG00000100154_90 (sequence is synthesized)
tacaactcccctctcttagaaacctcagcaggaccacagagcaagggagtcaaagctttcttaattctctccagtaaatgactcaactaatttgatttttttaattaagtcaaaatatca

SEQ ID NO: 111595 - DNA, 120 bp, Artificial Sequence
  ENSG00000100154_91 (sequence is synthesized)
agagaaaaattgctactaaaacttacattttgatccacactgatgtgcaacacaaaatgaaagttttcacctccattccattttttaaaaattcacggtccacactgaaacttgctgggt

SEQ ID NO: 111596 - DNA, 120 bp, Artificial Sequence
  ENSG00000100154_92 (sequence is synthesized)
tttagcaggagacaaaggtgtcacccacgctgtcctcatcctgctctctctgtcccagtgacgctccagcatatgatcactgcagccggtccctggcccgtgccgattctgccacctccc

SEQ ID NO: 111597 - DNA, 120 bp, Artificial Sequence
  ENSG00000100154_93 (sequence is synthesized)
agccacacacatttgcagacccacaagaagaactgtagccttgataatttcagttcaggctggaaaaatgccatgcaataatctggtttgctttcagtaagtaggcaacaagtgaaaact

SEQ ID NO: 111598 - DNA, 120 bp, Artificial Sequence
  ENSG00000100154_94 (sequence is synthesized)
gtataattttcatcacctattctgctgttctatctaaaatgagtgtacctgtggtttgtgaactgggcccttgtttgtgccagatccttcaaagatgttccctgtcaggacacctgtggc

SEQ ID NO: 111599 - DNA, 120 bp, Artificial Sequence
  ENSG00000100154_95 (sequence is synthesized)
cctgcccctcctcagacaccttcccactggcattcacgttccttatatgcagtgttagccatctttggcctacgtggactttttttgtaaattacaccatttccagacattaaacttttt

SEQ ID NO: 111600 - DNA, 120 bp, Artificial Sequence
  ENSG00000100154_96 (sequence is synthesized)
atattatgaaatttaccatgtaaaaagaacttcatatttttattgagattgctaaggcacttggccttcctcctttgtgattttcagtgtctattaaagcatgagttccctcagttttaa

SEQ ID NO: 111601 - DNA, 120 bp, Artificial Sequence
  ENSG00000100154_97 (sequence is synthesized)
cttctcagccagtgaaggcaggtgacacttacctccaccaggtgatgcaggctgtggtgataaactagagtgtgaagagctcagagtgcagcctctggccttgccactcacaagctgtag

SEQ ID NO: 111602 - DNA, 120 bp, Artificial Sequence
  ENSG00000100154_98 (sequence is synthesized)
gacactagggaggcagtttcacctctgtcagcctcagtctcgtcatctgtgaaatggggatggcttcttaccctgcagggttcctgtaatgtgggaataaaggagccaatgtataaataa

SEQ ID NO: 111603 - DNA, 120 bp, Artificial Sequence
  ENSG00000100154_99 (sequence is synthesized)
aaatttttacctatgaagatttattttcatagaatcttttgtcctggcttcttactttaatgtaatattttgttgatttagtgtacttactaatattttaataatctgtacttcagcaaa

SEQ ID NO: 111604 - DNA, 120 bp, Artificial Sequence
  ENSG00000100154_100 (sequence is synthesized)
gcgaaaagactggactctcctggggcttttcccttcgcagtgaatatgggaaagaattagggggtgggagggaggcagcatgacttgcagtcgtcgctgccctgcatctgcccccagccc

SEQ ID NO: 111605 - DNA, 120 bp, Artificial Sequence
  ENSG00000100154_101 (sequence is synthesized)
ccatccagtgagtcagatgccccaggccagcctgtgagctgctcccctgccaggccctgctctttctgctgggttaacctcgaggcgtaagtgagccctggaagccggggtggggctggg

SEQ ID NO: 111606 - DNA, 120 bp, Artificial Sequence
  ENSG00000100156_0 (sequence is synthesized)
cagttgtccttcagagggagcctgcagaggtgcagagtcaggtgggacccgtcgtcctcccctcgtccttcagcgccctttgcaggagaaggagacttgggaggcagcgatgggcgctgg

SEQ ID NO: 111607 - DNA, 120 bp, Artificial Sequence
  ENSG00000100156_1 (sequence is synthesized)
cggcccccggcggggcgagggccccccagacggcggctggggctgggtggtgctgggcgcctgctttgtggtcaccggcttcgcctacggcttccccaaagccgtgagcgtcttcttccg

SEQ ID NO: 111608 - DNA, 120 bp, Artificial Sequence
  ENSG00000100156_2 (sequence is synthesized)
cgcgctcatgcgcgacttcgacgccggctacagcgacacggcctgggtgtcctccatcatgctagccatgctctacggcacgggccccgtgtccagcatcctcgtgacccgctttggctg

SEQ ID NO: 111609 - DNA, 120 bp, Artificial Sequence
  ENSG00000100156_3 (sequence is synthesized)
tcgcccggtgatgctggcgggtgggctgctggcttccgcgggcatgatcctagcttcctttgccacgcgcctcctggagctctacctgaccgctggggtgctcacaggcctgggcctggc

SEQ ID NO: 111610 - DNA, 120 bp, Artificial Sequence
  ENSG00000100156_4 (sequence is synthesized)
cctcaacttccagccgtcgctcatcatgctggggctgtacttcgagcggcggcggcctctggccaacgggctggcggcggcgggcagccccgtgttcctgtccgcgctgtcgccgctcgg

SEQ ID NO: 111611 - DNA, 120 bp, Artificial Sequence
  ENSG00000100156_5 (sequence is synthesized)
gtcgccgctcggccagcagctgctggagcgcttcggctggcgcggcggcttcctgctgctcggcgggctcctgctgcactgctgcgcctgcggggctgtcatgaggccgccgcccgggcc

SEQ ID NO: 111612 - DNA, 120 bp, Artificial Sequence
  ENSG00000100156_6 (sequence is synthesized)
ggggacgctccgggcgaggcggaggctgacggtgcggggctgcagctgcgcgaggcatcccccagggtccggccccgccggcgcctgctggacttggcagtgtgcaccgaccgcgccttc

SEQ ID NO: 111613 - DNA, 120 bp, Artificial Sequence
  ENSG00000100156_7 (sequence is synthesized)
cgccatcctgctggtgaactacgccaaggacgcgggcgtgcccgacaccgacgccgccttcctgctgtccatcgtgggcttcgtggacatcgtggcgcgcccggcgtgcggcgccctggc

SEQ ID NO: 111614 - DNA, 120 bp, Artificial Sequence
  ENSG00000100156_8 (sequence is synthesized)
gggcctggcgcgtctgcggccgcacgtcccgtatctgttcagcctggccctgctggccaatgggctcacagacctgagcagcgcacgcgcgcgctcctacggcgccctcgtcgccttctg

SEQ ID NO: 111615 - DNA, 120 bp, Artificial Sequence
  ENSG00000100156_9 (sequence is synthesized)
cgtcgccttcggcctctcctacggcatggtgggcgcgctgcagttcgaggtgctcatggcggctgtgggcgcgccccgcttccccagtgcgctgggcctggtgttgctcgtggaggccgc

SEQ ID NO: 111616 - DNA, 120 bp, Artificial Sequence
  ENSG00000100156_10 (sequence is synthesized)
ggctgtgctcatcggaccgccctctgccggccgcctggtggatgtgttgaagaactatgagatcatcttctacctggccggctctgaggtggccctggctggggtcttcatggctgtcgc

SEQ ID NO: 111617 - DNA, 120 bp, Artificial Sequence
  ENSG00000100156_11 (sequence is synthesized)
caccaactgctgcctgcgttgtgctaaagctgccccgtcaggcccaggcactgagggcggagccagtgacactgaggacgctgaggctgaaggggactctgagcccctgcctgttgttgc

SEQ ID NO: 111618 - DNA, 120 bp, Artificial Sequence
  ENSG00000100156_12 (sequence is synthesized)
agaggaacccggcaacctggaggccctggaggtgctcagcgcccggggcgagcccacagaaccagaaatagaggcgaggccgaggctggctgccgagtctgtataactcagggtgctctg

SEQ ID NO: 111619 - DNA, 120 bp, Artificial Sequence
  ENSG00000100156_13 (sequence is synthesized)
ggtggggtggcccagtgacttgggaacacagcttcttgtctcagagagcctggtacgctgggaggctggtctggggtggtcactcccggggtccacgtctgggctccagttgatcccctg

SEQ ID NO: 111620 - DNA, 120 bp, Artificial Sequence
  ENSG00000100156_14 (sequence is synthesized)
ggtgtctgggaactgcctccctcatctgtgccccaagttccgccaggccctgccccatcgccagtgaagctgctatggagcaacaggaaactggtgataaagctcagctgaacgacagaa

SEQ ID NO: 111621 - DNA, 120 bp, Artificial Sequence
  ENSG00000100156_15 (sequence is synthesized)
gcagcccccatccgggtaagcttcaccgggagctgcggcggcggcccctccctgcaggcctcaggagatgtgaggctggacccccaaacccacgaggcaggctcagtcatttgtgatcac

SEQ ID NO: 111622 - DNA, 120 bp, Artificial Sequence
  ENSG00000100156_16 (sequence is synthesized)
tgagaaacattaggaacatggcggaaggctaaagaggaaaatcacgcacagcggccctttgcagccggcatctgcccctctgctgtttgttctgttgtcccgagaccctcacgcgtacgg

SEQ ID NO: 111623 - DNA, 120 bp, Artificial Sequence
  ENSG00000100156_17 (sequence is synthesized)
gcagcccccatccgggtaagcttcaccgggagctgcggcggcggcccctccctgcaggcctcaggagatgtgaggctggacccccaaacccacgaggcaggctcaggccgcctggtggat

SEQ ID NO: 111624 - DNA, 120 bp, Artificial Sequence
  ENSG00000100162_0 (sequence is synthesized)
gctctaggggctggactcagggcggtttgaaagatcggcgcgcaccgcaggagcaacggttggtcctgcggctgtgatgtcggtgttgaggcccctggacaagctgcccggcctgaacac

SEQ ID NO: 111625 - DNA, 120 bp, Artificial Sequence
  ENSG00000100162_1 (sequence is synthesized)
ggccaccatcttgctggtgggcacggaggatgctcttctgcagcagctggcggactcgatgctcaaagaggactgcgcctccgagctgaaggtccacttggcaaagtccctccctttgcc

SEQ ID NO: 111626 - DNA, 120 bp, Artificial Sequence
  ENSG00000100162_2 (sequence is synthesized)
ctccagtgtgaatcggccccgaattgacctgatcgtgtttgtggttaatcttcacagcaaatacagtctccagaacacagaggagtccctgcgccatgtggatgccagcttcttcttggg

SEQ ID NO: 111627 - DNA, 120 bp, Artificial Sequence
  ENSG00000100162_3 (sequence is synthesized)
tgctctactgtgacctggaggtggaaggctttagggccaccatggcgcagcgcctggtgcgcgtgctgcagatctgtgctggccacgtgcccggtgtctcagctctgaacctgctgtccc

SEQ ID NO: 111628 - DNA, 120 bp, Artificial Sequence
  ENSG00000100162_4 (sequence is synthesized)
tgctgagaagctctgagggcccctccctggaggacctgtgagggtggctggcccctgggctgccccttctcatggcttcgtgctgactccataaacattctctgttgaggatgtccagtc

SEQ ID NO: 111629 - DNA, 120 bp, Artificial Sequence
  ENSG00000100162_5 (sequence is synthesized)
agggcttgacaggcccaggctcagcccgccgtggctgggaaggttccctgcagtgccagtgctgcagcagggagagctgggcagaagcagcgagggggcccagctggcgagactgtagcc

SEQ ID NO: 111630 - DNA, 120 bp, Artificial Sequence
  ENSG00000100162_6 (sequence is synthesized)
ccctcccactcccacactcactcttgcagagcctgtgtctttaagcagctggcgtgttacatctccatttaaggtttcctttgaacaaaaggtctgtggctaaaaaaagtttaaaaatca

SEQ ID NO: 111631 - DNA, 120 bp, Artificial Sequence
  ENSG00000100162_7 (sequence is synthesized)
cttcttgctgaggcaccctgggtgatggaaagagcatgtattttacacacactggggcctatcggagggtggagggcaggaagaaggagaagatctggaaaaataactaatgggtactag

SEQ ID NO: 111632 - DNA, 79 bp, Artificial Sequence
  ENSG00000100162_8 (sequence is synthesized)
ggtactaggcttaatacctgggtgacaatgatctgtacaacaaaccccatgacacaagttttaactacataacaaaaaa

SEQ ID NO: 111633 - DNA, 120 bp, Artificial Sequence
  ENSG00000100162_9 (sequence is synthesized)
gagctgaaggtgtaagtagccgcggctgtggcctgggcccacgtgtctctcactccagagggattcggtcctagctgctaaactccgaagcccagcgccccctcctctgaggctggtcct

SEQ ID NO: 111634 - DNA, 120 bp, Artificial Sequence
  ENSG00000100162_10 (sequence is synthesized)
ggcggtgggagcgagggtcgggtagtagagagtgcggtgcccacaggcctgcagcgggtccaaacctcaggcccccagcccgtgccgcttcgcggggtccacttctcgggaaatgtcctc

SEQ ID NO: 111635 - DNA, 120 bp, Artificial Sequence
  ENSG00000100162_11 (sequence is synthesized)
cgagccgcctgctggcggtgtcccgatccccccgggagtgggtcgaagggccaggccctccccagggggtgctgtgcctagggctcgactgtccgctctctctccctgcgcagctggtgg

SEQ ID NO: 111636 - DNA, 120 bp, Artificial Sequence
  ENSG00000100167_0 (sequence is synthesized)
cgggtgggaggagagcgcgaaggggcgaggcccgtttgcaggggccgctcggcccggggaagcccgcgccccgctcagccttgcagccccgcgcccggagcatctccctggaggaacgga

SEQ ID NO: 111637 - DNA, 120 bp, Artificial Sequence
  ENSG00000100167_1 (sequence is synthesized)
gacaaaggaggattcatgtccaaagggctcccagagaccaggacggacgcagccatgtcagagctggtgcctgagcccaggcctaagccagcggtgcccatgaagcccatgagcatcaac

SEQ ID NO: 111638 - DNA, 120 bp, Artificial Sequence
  ENSG00000100167_2 (sequence is synthesized)
tccaacctgctgggctacatcggcatcgacaccatcatcgagcagatgcgcaagaagaccatgaagaccggtttcgacttcaacatcatggtcgttggccagagtggactgggcaaatca

SEQ ID NO: 111639 - DNA, 120 bp, Artificial Sequence
  ENSG00000100167_3 (sequence is synthesized)
acgctggtcaacacgctcttcaaatcccaagtgagccgcaaggcctccagctggaaccgggaggagaagatccccaagacagtggagatcaaagctatcgggcatgtgatagaggaaggc

SEQ ID NO: 111640 - DNA, 120 bp, Artificial Sequence
  ENSG00000100167_4 (sequence is synthesized)
ggtgtcaaaatgaagctgaccgtcatcgacaccccaggctttggagaccaaatcaacaatgaaaactgctgggagcccattgagaagtacatcaatgagcagtacgagaagttcctgaag

SEQ ID NO: 111641 - DNA, 120 bp, Artificial Sequence
  ENSG00000100167_5 (sequence is synthesized)
gaggaggtcaacatcgccaggaagaaacgcatccctgacactcgtgtccactgctgcctttacttcatctctcccacaggacactccttgcgacctctggatcttgagttcatgaaacac

SEQ ID NO: 111642 - DNA, 120 bp, Artificial Sequence
  ENSG00000100167_6 (sequence is synthesized)
ctcagcaaggttgtgaacatcatccctgtcattgctaaggctgacaccatgaccctggaggagaagtctgaattcaagcaaagggttcgcaaggagcttgaagtaaatggcattgaattc

SEQ ID NO: 111643 - DNA, 120 bp, Artificial Sequence
  ENSG00000100167_7 (sequence is synthesized)
tacccccagaaggaatttgatgaggatttggaggataagacggagaatgacaaaatcaggcaggagagcatgccttttgctgtggtgggaagtgacaaggagtaccaagtgaatggcaag

SEQ ID NO: 111644 - DNA, 120 bp, Artificial Sequence
  ENSG00000100167_8 (sequence is synthesized)
agggtcctcggccgaaaaactccatgggggatcatcgaagtggaaaacctcaaccactgtgagtttgccctgcttcgagactttgtcatcaggacccacctccaggacctcaaggaagtg

SEQ ID NO: 111645 - DNA, 120 bp, Artificial Sequence
  ENSG00000100167_9 (sequence is synthesized)
ggagaaggcctcctgggcactgtccttccacctgtgccagccaccccctgccccactgctgaatgaaggccatttcaagcgctgcttctcactccattcctctcagctgttattgctgca

SEQ ID NO: 111646 - DNA, 120 bp, Artificial Sequence
  ENSG00000100167_10 (sequence is synthesized)
gggccaagccctttttagtgctgtgctcgtccagctcaccaccacagcccctctcagccctcagtaggtgggaggggccagctgcctctttaggccagttgcatcctccatttatccaaa

SEQ ID NO: 111647 - DNA, 120 bp, Artificial Sequence
  ENSG00000100167_11 (sequence is synthesized)
ccactcctctcctcccagtggagtggggttctgccagtacagccctactgcatcatctgcgtcagccggtcctagcccatctgcagggtgaaagaactcatcaagagctccttctgccct

SEQ ID NO: 111648 - DNA, 120 bp, Artificial Sequence
  ENSG00000100167_12 (sequence is synthesized)
tgtaagcccatcccagctacttgtaaccatctctaagggcaatggcattgctccctacccattcatctgcatgagctactcttggcttccttaaagggtcaagaaagcaatttttctgct

SEQ ID NO: 111649 - DNA, 120 bp, Artificial Sequence
  ENSG00000100167_13 (sequence is synthesized)
tactagattcattgagatcagctgtgtgagccccaaagtgggacaagggtgtctccttcattacttaaagatattcatgagggtgggtcactacagatgttggggagcaagggctaggat

SEQ ID NO: 111650 - DNA, 120 bp, Artificial Sequence
  ENSG00000100167_14 (sequence is synthesized)
cactttttaaaaaatcaccacttgtggctgtcccagagtgcggttgtacatcctccccacctcataacgcagccactgaggaagagtggttttcctaagaagacattgctggagttgact

SEQ ID NO: 111651 - DNA, 120 bp, Artificial Sequence
  ENSG00000100167_15 (sequence is synthesized)
ttcttctgtccaaacaaacaaacaaaaactaaacacacacacaaacccccagaaacccacaatatgtacacgctaaggaaaaactagcacccttctgtccactcagcaataagagggatc

SEQ ID NO: 111652 - DNA, 120 bp, Artificial Sequence
  ENSG00000100167_16 (sequence is synthesized)
tcttcccacctaccctacctactcctacccccaacccccttccccattaatgtgagtaatgaattagcctgaccacaggtggtcactgtaggctaatggaaaatacccaagggagggcaa

SEQ ID NO: 111653 - DNA, 120 bp, Artificial Sequence
  ENSG00000100167_17 (sequence is synthesized)
agccccccatcagatgcatgaatgtttgcgaatgttgactgccactgccccacacactgtgtctttatagaattcccctttgcccaccctcttcctgtctccacctggacacaacttgct

SEQ ID NO: 111654 - DNA, 120 bp, Artificial Sequence
  ENSG00000100167_18 (sequence is synthesized)
caaaggctggtgacttgtgggccattcatctacaaccaagtcctgatggagcaagaggcccacgcctaggggatgcaagaacaacccgtttcttaaatgttaccagtcccagccaatctt

SEQ ID NO: 111655 - DNA, 120 bp, Artificial Sequence
  ENSG00000100167_19 (sequence is synthesized)
acggtgacattacagttaaatttcccaattgaaaacaagcaaacagacactcaaactggtcctgtaattgttgctagactttatgtgttgtacaactaaacattgctgtttgaacagtaa

SEQ ID NO: 111656 - DNA, 120 bp, Artificial Sequence
  ENSG00000100167_20 (sequence is synthesized)
acaacatccactatgagacttacagggccaagcggctcaatgacaatggaggcctccctccggtgagcgtggacacagaggaaagccacgacagtaacccatgacgaccacttctctgtg

SEQ ID NO: 111657 - DNA, 120 bp, Artificial Sequence
  ENSG00000100167_21 (sequence is synthesized)
tcatcacacatacccacttcacacacacacatcccaaataccaccaccaaccaccttcttcctctcaactctgtcccacaggcctgtctggtatttgtggagcatcttgtctgtgtgtgt

SEQ ID NO: 111658 - DNA, 120 bp, Artificial Sequence
  ENSG00000100167_22 (sequence is synthesized)
gtgtgtgtgtgtgtgacagagagagagcgagagagcctgtgtgtgtgcatgcaggggtgaggtattttcactgccctccctggagagtcccttgtaagtttggctcctccatgcctgtcc

SEQ ID NO: 111659 - DNA, 120 bp, Artificial Sequence
  ENSG00000100167_23 (sequence is synthesized)
tcctccatgcctgtccattatctgtctcctttccttgtgtcccaaaacaaagctgtttgcctcactcaggagatctgggggaggtttcatttaaaagtgctgggagcaggtgagccacag

SEQ ID NO: 111660 - DNA, 120 bp, Artificial Sequence
  ENSG00000100167_24 (sequence is synthesized)
gcaactcttctctcggaacctgcacacaaactggggctatagagattctccaaggacagatggcagtggagctagacctgagtagggggcagggagttcaggacaaccctcctgtaagtt

SEQ ID NO: 111661 - DNA, 120 bp, Artificial Sequence
  ENSG00000100167_25 (sequence is synthesized)
gggggtggtctgggggtaaggctggggcttcctgggaaaaggaaggccatgagaaggcagagaagtaggccagagctgggttcttgcagaaagcatcagtgcctacaaatggagctccac

SEQ ID NO: 111662 - DNA, 120 bp, Artificial Sequence
  ENSG00000100167_26 (sequence is synthesized)
ccttcagtctgtgtcgtgttcagtgtcacaaagctaccacctgtcaccagagcctactgctgctctccactcaactggcctctgctgccaggccactgcctgtctctgcttccgactttg

SEQ ID NO: 111663 - DNA, 120 bp, Artificial Sequence
  ENSG00000100167_27 (sequence is synthesized)
tcttctttctccctttccctccttccctcatacattgctttctctccctctcctgcgtgtctctgacatctctcacttccttttagatgaatctactttaggttcattcctatatttagc

SEQ ID NO: 111664 - DNA, 120 bp, Artificial Sequence
  ENSG00000100167_28 (sequence is synthesized)
atttatgcccagtctacttccagaaatgactttagactgcctttcacataaaatcacaaaactacaggacagtacaaacagattgccagagaaatctgggtcaaagaaaggaataggaaa

SEQ ID NO: 111665 - DNA, 120 bp, Artificial Sequence
  ENSG00000100167_29 (sequence is synthesized)
gaaagtttctgtagtcaagcacctgaacaggccctgagctcacaggcagccaatgtaaagagggaaacacagtgagttatgcagttcccagtgtccagttaaaggaagcacacatgctag

SEQ ID NO: 111666 - DNA, 120 bp, Artificial Sequence
  ENSG00000100167_30 (sequence is synthesized)
agtaatttggcttcaaagacaaatttttgaccacacctccgttttctccgtcagacttctctcccttctaagcaggcttctctgttgctccatttgcttcatacatacttgacctctctt

SEQ ID NO: 111667 - DNA, 120 bp, Artificial Sequence
  ENSG00000100167_31 (sequence is synthesized)
ttctattccccatcacttttgtgctgaagctaatcatatttatgtctgtctttctctacttttccctaattccctctcctcctgactcctgtagacattcccaatgatacccaccgtcat

SEQ ID NO: 111668 - DNA, 120 bp, Artificial Sequence
  ENSG00000100167_32 (sequence is synthesized)
acatttaggcttttcttgcctttccctgaagccctgtatttattaatgcatatatttcccctgcttgttgtacaagtaagttactcttttcctttaatctgtaagattcatgaaattcgg

SEQ ID NO: 111669 - DNA, 120 bp, Artificial Sequence
  ENSG00000100167_33 (sequence is synthesized)
ggccagggaaacagtttagccttagggaagggaaaacactaagtgaaactgtttacaataacctcatacaaccttctgtcccatctcctggttcagcctaggtgtttcactggtcctcta

SEQ ID NO: 111670 - DNA, 120 bp, Artificial Sequence
  ENSG00000100167_34 (sequence is synthesized)
tgaatcccagcacttataatcccagtcttttatcactcaggtgctaggaaaaaaaacatagactcaagacccaagattcaatggaccaggagaaaggggggcggtgatcaggtcaccagt

SEQ ID NO: 111671 - DNA, 120 bp, Artificial Sequence
  ENSG00000100167_35 (sequence is synthesized)
gaccccaacctatgctctcggtctttcctggaggctgccaacccagccctcatcctcccttgctcacaaagttacagggtaggcacctgtcaggacagaacagcagcagcgctacagccc

SEQ ID NO: 111672 - DNA, 120 bp, Artificial Sequence
  ENSG00000100167_36 (sequence is synthesized)
agaggttatacatttcaacagaacagggatccttggctactgtagaagcagtcctgtatggagaccttggaccagcaggggaagatctatgggcatgggaggtgggcgttggaaaggctg

SEQ ID NO: 111673 - DNA, 120 bp, Artificial Sequence
  ENSG00000100167_37 (sequence is synthesized)
agtaggaatggtgcctggcacccctgaaccatgatctgagcctccctggagaaggtattttatatgtctgctgccagctgctggtctccacaccctcaaccgttctcaacccccctgcag

SEQ ID NO: 111674 - DNA, 120 bp, Artificial Sequence
  ENSG00000100167_38 (sequence is synthesized)
agctggtgggacagtgagcagagggctgggccctgtgcctggggactgtggcctggaggctgagcaggagctgaggaggggaccagagggacaaggcccctaagctggccaccatggcca

SEQ ID NO: 111675 - DNA, 120 bp, Artificial Sequence
  ENSG00000100167_39 (sequence is synthesized)
gactctgagtgcaggggaggtgaggggcctgcgtgtgccttatcttcccagacacactggatccttcttgtcctctgatcaagggaaagacaaacgacctggatggaccacaactttgct

SEQ ID NO: 111676 - DNA, 120 bp, Artificial Sequence
  ENSG00000100167_40 (sequence is synthesized)
cctgctcctccagagatgcagtcgcatggagctccaggcccgggaacctccttctcccatagccatgtgctggggcgccctatccgcccctcgagactccctggaggagggtcccccctc

SEQ ID NO: 111677 - DNA, 120 bp, Artificial Sequence
  ENSG00000100167_41 (sequence is synthesized)
acccccgtcctcaggaagaccatccatctggataccttcccccaaagccatatcccacagacctccagccggctgggccttggagccaggacccggagtgtgcccccacaggagacgggc

SEQ ID NO: 111678 - DNA, 120 bp, Artificial Sequence
  ENSG00000100167_42 (sequence is synthesized)
atcgctctgggggcttccttgagccccctgcccaccagcagccttgtacccaggaagctcagctccatctccttgactctccatcagaacagccaggcacggtccctggatcgcccactt

SEQ ID NO: 111679 - DNA, 120 bp, Artificial Sequence
  ENSG00000100167_43 (sequence is synthesized)
tctcactgggaagagttgcctaccccaggaaagaaggctgctccccatgaaggagggagggtgtcctcgccaggctcgccacctgtgaccctagtgccagggggcagggtccactctgag

SEQ ID NO: 111680 - DNA, 120 bp, Artificial Sequence
  ENSG00000100167_44 (sequence is synthesized)
ggcccagggaacccaggtctgaccaaatccaacaggatgcttgccacggagaagcccctggtgagttcctacctagccttacctttccaatcccggttagcccagagtgcaccagtcctt

SEQ ID NO: 111681 - DNA, 120 bp, Artificial Sequence
  ENSG00000100167_45 (sequence is synthesized)
gcagagccaggctcgttgggccaggggcaccttgtctcagtgactgaccacatgcctaccagagcttctccaggaaaaggcaagccccgggccagggggatccccagaccccgggggcgt

SEQ ID NO: 111682 - DNA, 120 bp, Artificial Sequence
  ENSG00000100167_46 (sequence is synthesized)
ctccaaagggccaacacgactgtgaatttgactgctatggacacaaggacagacgcagccagacatttagccacaatggccaccaacagacctagcttggctatcaatttagccacacca

SEQ ID NO: 111683 - DNA, 120 bp, Artificial Sequence
  ENSG00000100167_47 (sequence is synthesized)
aacacatcccaactggacacaggcacagagttccctgccctggatatcaagctgggcacagccagagacttgtcttcggtagggacagtcaagtcaggcaaaaccgtgaacttggctaca

SEQ ID NO: 111684 - DNA, 120 bp, Artificial Sequence
  ENSG00000100167_48 (sequence is synthesized)
gcaggcacaatcaagccgggcacagccatgaatctgactacagttgggacaaccaagccagggatggtcatggatttgatagcctcagaaccagacaagctgggcaaagccatggctaca

SEQ ID NO: 111685 - DNA, 120 bp, Artificial Sequence
  ENSG00000100167_49 (sequence is synthesized)
agaagcacagccaaaccagatatgaccacagagggtatagccatggattcagcaacatcagacccagtcaagccggacacaatcacagctacagtgggcaccagtaggttggaaacagcc

SEQ ID NO: 111686 - DNA, 120 bp, Artificial Sequence
  ENSG00000100167_50 (sequence is synthesized)
atggctttggccagagtgaacagagccaagctgggcacggctaagaattctcttgctttggacacaagcaggatgggcacagctgtgggttcagttgtgccagtaaccccagacccagcc

SEQ ID NO: 111687 - DNA, 120 bp, Artificial Sequence
  ENSG00000100167_51 (sequence is synthesized)
actgggaagaccacactgggcagtgttaataacctaaccatatcagacgttgctacatgcctgctaatgccaagcagatccacagacctagccctggacaacactaatgctgccatggac

SEQ ID NO: 111688 - DNA, 120 bp, Artificial Sequence
  ENSG00000100167_52 (sequence is synthesized)
atcattaaaaagtgaaaacctaagcaaaaaatggaatcacgagaaaacagaaaaccacgacactagacatatgcagaggttgtcccttttcccagtggtcctgtggctctgggaaggaga

SEQ ID NO: 111689 - DNA, 120 bp, Artificial Sequence
  ENSG00000100167_53 (sequence is synthesized)
gaatatggaatccaagtgatgtttccccaaggccctctgcagtaagcaggaagccattcccacctgcctgcaatccccactcagcctggccatcccccagtgagtggtcagacaaggtgt

SEQ ID NO: 111690 - DNA, 120 bp, Artificial Sequence
  ENSG00000100167_54 (sequence is synthesized)
actagacccagaaccttcgaggggagggatggttgtcctcacccctgtgaggcaatatgctgtccattagtatccactgaatgcgtgaaatttttttctaatgggcaaactgaggctcag

SEQ ID NO: 111691 - DNA, 120 bp, Artificial Sequence
  ENSG00000100167_55 (sequence is synthesized)
agaagttcctgtctggctcaaggttattggttcatcattctggagcagggcctggaacccgggcccctgactcggctctacaggcacccgcgcaacaccccagcccccgcgtgactcacg

SEQ ID NO: 111692 - DNA, 120 bp, Artificial Sequence
  ENSG00000100170_0 (sequence is synthesized)
gaaggacgcaacgctgccaccatggacagtagcacctggagccccaagaccaccgcggtcacccggcctgttgagacccacgagctcattcgcaatgcagccgatatctccatcatcgtt

SEQ ID NO: 111693 - DNA, 120 bp, Artificial Sequence
  ENSG00000100170_1 (sequence is synthesized)
atctacttcgtggtagtgatggccgtcggactgtgggctatgttttccaccaatcgtgggactgttggaggcttcttcctggcaggccgaagtatggtgtggtggccgattggagcctcc

SEQ ID NO: 111694 - DNA, 120 bp, Artificial Sequence
  ENSG00000100170_2 (sequence is synthesized)
ctctttgctagtaacattggaagtggccactttgtggggctggccgggactggggcagcttcaggcatcgccattggaggctttgaatggaatgccctggttttggtggttgtgctgggc

SEQ ID NO: 111695 - DNA, 120 bp, Artificial Sequence
  ENSG00000100170_3 (sequence is synthesized)
tggctgtttgtccccatctatattaaggctggggtggtgacaatgccagagtacctgaggaagcggtttggaggccagcggatccaggtctacctttcccttctgtccctgctgctctac

SEQ ID NO: 111696 - DNA, 120 bp, Artificial Sequence
  ENSG00000100170_4 (sequence is synthesized)
attttcaccaagatctcggcagacatcttctcgggggccatattcatcaatctggccttaggcctgaatctgtatttagccatctttctcttattggcaatcactgccctttacacaatt

SEQ ID NO: 111697 - DNA, 120 bp, Artificial Sequence
  ENSG00000100170_5 (sequence is synthesized)
acagggggcctggcggcggtgatttacacggacaccttgcagacggtgatcatgctggtggggtctttaatcctgactgggtttgcttttcacgaagtgggaggctatgacgccttcatg

SEQ ID NO: 111698 - DNA, 120 bp, Artificial Sequence
  ENSG00000100170_6 (sequence is synthesized)
gaaaagtacatgaaagccattccaaccatagtgtctgatggcaacaccacctttcaggaaaaatgctacactccaagggccgactccttccacatcttccgagatcccctcacgggagac

SEQ ID NO: 111699 - DNA, 120 bp, Artificial Sequence
  ENSG00000100170_7 (sequence is synthesized)
ctcccatggcctgggttcatctttgggatgtccatccttaccttgtggtactggtgcacagatcaggtcattgtgcagcgctgcctctcagccaagaatatgtctcacgtgaagggtggc

SEQ ID NO: 111700 - DNA, 120 bp, Artificial Sequence
  ENSG00000100170_8 (sequence is synthesized)
tgcatcctgtgtgggtatctaaagctgatgcccatgttcatcatggtgatgccaggaatgatcagccgcattctgtacacagaaaaaattgcctgtgtcgtcccttcagaatgtgagaaa

SEQ ID NO: 111701 - DNA, 120 bp, Artificial Sequence
  ENSG00000100170_9 (sequence is synthesized)
tattgcggtaccaaggttggctgtaccaacatcgcctatccaaccttagtggtggagctcatgcccaatggactgcgaggcctgatgctatcagtcatgctggcctccctcatgagctcc

SEQ ID NO: 111702 - DNA, 120 bp, Artificial Sequence
  ENSG00000100170_10 (sequence is synthesized)
ctgacctccatcttcaacagcgccagcaccctcttcaccatggacatctacgccaaggtccgcaagagagcatctgagaaagagctcatgattgccggaaggttgtttatcctggtgctg

SEQ ID NO: 111703 - DNA, 120 bp, Artificial Sequence
  ENSG00000100170_11 (sequence is synthesized)
attggcatcagcatcgcctgggtgcccattgtgcagtcagcacaaagtgggcaactcttcgattacatccagtccatcaccagttacttgggaccacccattgcggctgtcttcctgctt

SEQ ID NO: 111704 - DNA, 120 bp, Artificial Sequence
  ENSG00000100170_12 (sequence is synthesized)
gctattttctggaagagagtcaatgagccaggagccttttggggactgatcctaggacttctgattgggatttcacgtatgattactgagtttgcttatggaaccgggagctgcatggag

SEQ ID NO: 111705 - DNA, 120 bp, Artificial Sequence
  ENSG00000100170_13 (sequence is synthesized)
cccagcaactgtcccacgattatctgtggggtgcactacttgtactttgccattatcctcttcgccatttctttcatcaccatcgtggtcatctccctcctcaccaaacccattccggat

SEQ ID NO: 111706 - DNA, 120 bp, Artificial Sequence
  ENSG00000100170_14 (sequence is synthesized)
gtgcatctctaccgtctgtgttggagcctgcgcaacagcaaagaggagcgtattgacctggatgcggaagaggagaacatccaagaaggccctaaggagaccattgaaatagaaacacaa

SEQ ID NO: 111707 - DNA, 120 bp, Artificial Sequence
  ENSG00000100170_15 (sequence is synthesized)
gttcctgagaagaaaaaaggaatcttcaggagagcctatgacctattttgtgggctagagcagcacggtgcacccaagatgactgaggaagaggagaaagccatgaagatgaagatgacg

SEQ ID NO: 111708 - DNA, 120 bp, Artificial Sequence
  ENSG00000100170_16 (sequence is synthesized)
gacacctctgagaagcctttgtggaggacagtgttgaacgtcaatggcatcatcctggtgaccgtggctgtcttttgccatgcatattttgcctgagtcctaccttttgctgtagattta

SEQ ID NO: 111709 - DNA, 120 bp, Artificial Sequence
  ENSG00000100170_17 (sequence is synthesized)
ccatggctggactcttactcaccttcctttagtctcgtcctgtggtgttgaagggaaatcagccagttgtaaattttgcccaggtggataaatgtgtacatgtgtaattataggctagct

SEQ ID NO: 111710 - DNA, 120 bp, Artificial Sequence
  ENSG00000100170_18 (sequence is synthesized)
ggaagaaaaccattagtttgctgttaatttatgcatttgaagccagtgtgatacagccatctgtacctactggagctgcagaagggaagtccactcagtcacatccagaaaaaggcagac

SEQ ID NO: 111711 - DNA, 120 bp, Artificial Sequence
  ENSG00000100170_19 (sequence is synthesized)
taagaatcagaagccatgtgattgatgtctgacgtgagtctgtctcaggtagattccgggtgtcagtgtggtttataatccttgaatattgttttagaaactttggtctccctggttcct

SEQ ID NO: 111712 - DNA, 120 bp, Artificial Sequence
  ENSG00000100170_20 (sequence is synthesized)
tttttttaaaagaaagctgttttcccctcatcatatccctcttgagttttgcctggactttccctctcaagtgtgtcaatcaggtaaactgaggaatgcatggaagctgaggatggagct

SEQ ID NO: 111713 - DNA, 120 bp, Artificial Sequence
  ENSG00000100170_21 (sequence is synthesized)
tgatgggctccctgtcctgggtgtttgctctctgaagtggaggcctgaggaaggtagtacttccacaaaagggagggacccgggccccagcctcaagctagtgggggaggcagatagcct

SEQ ID NO: 111714 - DNA, 120 bp, Artificial Sequence
  ENSG00000100170_22 (sequence is synthesized)
gaatccaggggattttctgggcttcttaaaatgtccattgtgagttccccgtgtttgggattccactcattttggcattcacagtgcctggaatgtcttagattttcagcaatgcgtgtt

SEQ ID NO: 111715 - DNA, 120 bp, Artificial Sequence
  ENSG00000100170_23 (sequence is synthesized)
gaataaatgaatgacataggcatttatttttaaatctttgcttgctttttacatgagcctggcccttagttaaccttttcttgtggctacacaaagtatgctcactggttactaatgact

SEQ ID NO: 111716 - DNA, 120 bp, Artificial Sequence
  ENSG00000100170_24 (sequence is synthesized)
tgggatgcatttgtcaaactgattatattagttttctagggatgccataacaaagtagcacagaccagatggctcaagcagcagacatttattttctcacagttctagaggctagaagtt

SEQ ID NO: 111717 - DNA, 120 bp, Artificial Sequence
  ENSG00000100170_25 (sequence is synthesized)
ggaggccaagatgtcagcagggttggtttcttctgaggcctctctccttggttgcagatggtcatatctcactctgtcttccgtggccttccttttgtctgtgtcctaaatctactcttc

SEQ ID NO: 111718 - DNA, 120 bp, Artificial Sequence
  ENSG00000100170_26 (sequence is synthesized)
tgataaggacatcagtcatattggaataggacccaccctaatgtcttcattttaatcacctctttaaagcccctacctccaaatacagtcacactgtgagaaactgagggttaggaagtc

SEQ ID NO: 111719 - DNA, 120 bp, Artificial Sequence
  ENSG00000100170_27 (sequence is synthesized)
agcaagtgagtcttgaagagatactaaacaaacccacaacacagataaagtatgcattttggagatttccaagccagagtctcccgtgaaaaaggtaaacggaagcagttattgtgcagc

SEQ ID NO: 111720 - DNA, 120 bp, Artificial Sequence
  ENSG00000100170_28 (sequence is synthesized)
aaaaggaaaaagaattacaaactgaacgtatgtaggtgaggcaaggcagggtagggcagggcctttgggtaggctgatcagagggtttttcaacaataaatcaatgggaatgcatttgtt

SEQ ID NO: 111721 - DNA, 120 bp, Artificial Sequence
  ENSG00000100170_29 (sequence is synthesized)
gctcccaggaccctggcaccttgactctggtactatagcatgtcagcaaatacaagcaaagcccaacactctgatttgcatttatgccaatctaaactatccggtgtttagtttgatttt

SEQ ID NO: 111722 - DNA, 120 bp, Artificial Sequence
  ENSG00000100170_30 (sequence is synthesized)
ttgagtgcaggttcattcaaggaccaggttcccttgtgctcagggtgaagtagaaccagaaaacatcgttatccattcccagaagttttggaagagccttggtagaaaagcagaagctgc

SEQ ID NO: 111723 - DNA, 120 bp, Artificial Sequence
  ENSG00000100170_31 (sequence is synthesized)
tttgaccgtgaaaatatttgactcctatcagtttttggtcaggagaagatatccacctagaccaacctgaggagaaggctcagagtacagatataccccgagcaacgtgatcaatgtcct

SEQ ID NO: 111724 - DNA, 120 bp, Artificial Sequence
  ENSG00000100170_32 (sequence is synthesized)
tgaaccttcatttttcatctgaaaacagagacataaatgcctggctcacagatttaaatgttatacattgacagcatttatcagtataacatttatttaaataagtaggtgctcaatagg

SEQ ID NO: 111725 - DNA, 120 bp, Artificial Sequence
  ENSG00000100170_33 (sequence is synthesized)
tgttggtcttctaacttgtctacatcccatccccattccagggtcttcagaattgaaggagagatgttgtatcactgttagaaggctgctttgggacattctgcagcagggaggagggac

SEQ ID NO: 111726 - DNA, 120 bp, Artificial Sequence
  ENSG00000100170_34 (sequence is synthesized)
tgtcaacccctacaccatgaccaccaagttcctcaccttggctgagtccctaaaactctctgaacctcaggttcctccaagcataatgcagacttcacagagctgttgtaaagattaggt

SEQ ID NO: 111727 - DNA, 120 bp, Artificial Sequence
  ENSG00000100170_35 (sequence is synthesized)
gaggtcaattgatactgcttaaaaggcccggtccgtagaaaatgcccaataaacattactgctttccccctcaccctactgcctgaaaaaatattacacctgtgagactgactttgagaa

SEQ ID NO: 111728 - DNA, 120 bp, Artificial Sequence
  ENSG00000100170_36 (sequence is synthesized)
ccagtgtgggtggggagttgtgcatataaactatttaatgagtaccaaacacaaaagtcaagcttgtaaaatatcaggccttgccccagaaagacaaataccacatgatctcactgatat

SEQ ID NO: 111729 - DNA, 120 bp, Artificial Sequence
  ENSG00000100170_37 (sequence is synthesized)
gtagaatcttaaaaagtcaaactcagaagcagagagtagaatgatggttatcaagggctgggggagggagggactggggagatgttggtcaaatgatacaaaggtttagttaggtggaat

SEQ ID NO: 111730 - DNA, 120 bp, Artificial Sequence
  ENSG00000100170_38 (sequence is synthesized)
aagttcagaaaatcaattgtacaatgtatcaattatagttaatagcaatataacatatacttgaaaattgctgagagtagtgtgagtgttctaccacaaaaaaatatgtgcagtaataga

SEQ ID NO: 111731 - DNA, 120 bp, Artificial Sequence
  ENSG00000100170_39 (sequence is synthesized)
accacaaaaaaatatgtgcagtaatagatgttaattaccttaatttagtcatttcacaatatgtacatatataaaaatatgttgtatgccatgagtatatataattattatttgtgaatt

SEQ ID NO: 111732 - DNA, 120 bp, Artificial Sequence
  ENSG00000100170_40 (sequence is synthesized)
tgagccgagatcatgccactgcactcctgcctgggcgacagaaaaagactctgtcccaaaagtgggctctttgaaggctagaaggtatttggggcagcagacttgtgtggaagcagttat

SEQ ID NO: 111733 - DNA, 120 bp, Artificial Sequence
  ENSG00000100191_0 (sequence is synthesized)
ctgcctgcagccatggccagtacggttagccccagcaccatagctgagaccccagagccacctccattgtctgaccacatccgaaatgctgctgacatctcagtcattgtcatctatttt

SEQ ID NO: 111734 - DNA, 120 bp, Artificial Sequence
  ENSG00000100191_1 (sequence is synthesized)
ctggtggtgatggctgttgggctgtgggcgatgctgaagaccaaccgaggtactataggaggcttcttcctcgctggtcgtgatatggcctggtggccgatgggcgcctctctctttgcc

SEQ ID NO: 111735 - DNA, 120 bp, Artificial Sequence
  ENSG00000100191_2 (sequence is synthesized)
agtaacatcggcagcaaccactatgtggggctggctgggacaggagcagcttcaggagtcgccaccgtaacatttgaatggacttcctcagtaatgttgctgattcttgggtggatcttt

SEQ ID NO: 111736 - DNA, 120 bp, Artificial Sequence
  ENSG00000100191_3 (sequence is synthesized)
gtccctatctacatcaagtcgggggtgatgaccatgccggaatatctcaagaagcggtttggtggggagcgactccaggtctacctctccatcctctccctcttcatctgtgtggttttg

SEQ ID NO: 111737 - DNA, 120 bp, Artificial Sequence
  ENSG00000100191_4 (sequence is synthesized)
ttaatttctgcagacatatttgctggagccatattcatcaagctggccttgggattggacctttacctggcaatcttcatcctcttggctatgactgctgtttacaccaccactgggggc

SEQ ID NO: 111738 - DNA, 120 bp, Artificial Sequence
  ENSG00000100191_5 (sequence is synthesized)
ttggcctcggtgatttacacagacaccctccagaccatcatcatgctgattggctcttttattctcatggggtttgcatttaacgaagttggaggttatgagagctttaccgagaagtac

SEQ ID NO: 111739 - DNA, 120 bp, Artificial Sequence
  ENSG00000100191_6 (sequence is synthesized)
gtgaatgccaccccatccgtagtcgagggggacaacttgacaatcagtgccagttgctacacacctcgggcggactccttccacatcttccgagatgctgtgactggggacattccatgg

SEQ ID NO: 111740 - DNA, 120 bp, Artificial Sequence
  ENSG00000100191_7 (sequence is synthesized)
ccaggaattatatttggaatgcccattacagctttgtggtactggtgcacaaatcaggtcattgtgcagcgctgcctgtgtggcaaggacatgtctcacgtgaaggccgcttgcattatg

SEQ ID NO: 111741 - DNA, 120 bp, Artificial Sequence
  ENSG00000100191_8 (sequence is synthesized)
acactgtggcgttgatgttggctgcaccaactacgcataccccacgatggtgctggaactgatgccccaaggactgcgaggcctgatgctttcggtcatgctggcctctctcatgagctc

SEQ ID NO: 111742 - DNA, 120 bp, Artificial Sequence
  ENSG00000100191_9 (sequence is synthesized)
cctgacctccatcttcaacagcgccagcaccctcttcaccattgacctctacaccaagatgcggaagcaagcgtcggagaaagagctcctgatagctggacggatatttgttcttctatt

SEQ ID NO: 111743 - DNA, 120 bp, Artificial Sequence
  ENSG00000100191_10 (sequence is synthesized)
aactgttgtgagcattgtgtgggtcccactggtacaagtttctcaaaatggacaactaatccattacacagaatcaatttctagctaccttgggcctccaattgcagctgtctttgtgct

SEQ ID NO: 111744 - DNA, 120 bp, Artificial Sequence
  ENSG00000100191_11 (sequence is synthesized)
tgccatcttctgtaaaagagtcaatgaacagggagcattctggggtctaatggttggacttgcaatgggcctcattcgtatgataacagagtttgcttatggaacagggagttgcttggc

SEQ ID NO: 111745 - DNA, 120 bp, Artificial Sequence
  ENSG00000100191_12 (sequence is synthesized)
tcccagtaactgtcccaagattatctgtggagtgcactatctgtacttttccatcgttctcttttttgggtccatgctggtcaccctgggaatttccctcttaacaaaacccattcctga

SEQ ID NO: 111746 - DNA, 120 bp, Artificial Sequence
  ENSG00000100191_13 (sequence is synthesized)
tgtacatctgtaccgcctgtgctgggttcttcggaacagtacagaggagcgaatcgatatagatgcagaagagaaaagtcaggaagaaacagatgatggtgttgaagaagattatcctga

SEQ ID NO: 111747 - DNA, 120 bp, Artificial Sequence
  ENSG00000100191_14 (sequence is synthesized)
gaaatcacgtggatgcctcaagaaagcttatgacttgttctgcggtttgcagaagggacccaagctaaccaaggaggaggaggaagccttgagcaagaagctcacagacacgtctgagag

SEQ ID NO: 111748 - DNA, 120 bp, Artificial Sequence
  ENSG00000100191_15 (sequence is synthesized)
gccctcgtggaggacaatagtgaacatcaacgccatcctcctcctggctgtggtggtctttattcacggctactatgcctgaactctatctgagccattagaataatgaataattcttaa

SEQ ID NO: 111749 - DNA, 120 bp, Artificial Sequence
  ENSG00000100196_0 (sequence is synthesized)
gcgatcgcggagctgtgaggcgcaggcagggctctggggcacctagagaccggggccggagacgtggcagccgccctgcccgccagaaagtttcctagaagtttgctgggcgcgggcgca

SEQ ID NO: 111750 - DNA, 120 bp, Artificial Sequence
  ENSG00000100196_1 (sequence is synthesized)
cgactgactggctggaccatgaacgtgttccgaatcctcggcgacctgagccacctcctggccatgatcttgctgctggggaagatctggaggtccaagtgctgcaagggcatctctggg

SEQ ID NO: 111751 - DNA, 120 bp, Artificial Sequence
  ENSG00000100196_2 (sequence is synthesized)
aagagccagatcctgtttgctctcgtcttcaccaccaggtacctggacctgttcaccaacttcatctccatctacaacacagtaatgaaggtggtttttctcctctgtgcctatgttaca

SEQ ID NO: 111752 - DNA, 120 bp, Artificial Sequence
  ENSG00000100196_3 (sequence is synthesized)
gtgtacatgatatatgggaaattccgtaaaacttttgacagtgagaatgacacattccgcctggagtttcttctggtcccagtcattggcctttccttccttgaaaactacagtttcact

SEQ ID NO: 111753 - DNA, 120 bp, Artificial Sequence
  ENSG00000100196_4 (sequence is synthesized)
ctgctggagatcctctggactttctctatctatctggaatcagtggctatcctgccccagctcttcatgatcagcaagactggagaggctgagaccataactactcactacctgttcttt

SEQ ID NO: 111754 - DNA, 120 bp, Artificial Sequence
  ENSG00000100196_5 (sequence is synthesized)
ctgggtctgtaccgggcactctacctggctaactggatcaggcggtaccagactgagaatttctatgaccaaattgcagtcgtgtctggagtagtacaaaccatcttctactgtgacttc

SEQ ID NO: 111755 - DNA, 120 bp, Artificial Sequence
  ENSG00000100196_6 (sequence is synthesized)
ttctacttgtatgtgaccaaagtccttaagggaaagaagttaagtcttccaatgccaatctgaggaccttcagagacagtctacgccttaacaagcacatgaaggaaactattttgaatg

SEQ ID NO: 111756 - DNA, 120 bp, Artificial Sequence
  ENSG00000100196_7 (sequence is synthesized)
ttatccataatttgggatcaaatgttaaaaccagaaaagtgtttagtgtggatttcagcaaaacctgatcatcccacccagaagaccttctcatcaatagatcgcccttaaagacccatt

SEQ ID NO: 111757 - DNA, 120 bp, Artificial Sequence
  ENSG00000100196_8 (sequence is synthesized)
gtaaggtcataaaaaacctcggccacctgcacaaagatggtgcctcactgcaacaagaaaccttaaggtgtcttaccgacgaaataaaaaacataaatgattgttctccaaggcctgagg

SEQ ID NO: 111758 - DNA, 120 bp, Artificial Sequence
  ENSG00000100196_9 (sequence is synthesized)
gcaagactcatgatgagcaagtcaaccccaatctggaacaatgtccctcctcttagaatgtcccaactaaagaccagttaaaatattagggtacgttcttgtgaatttccactttccagg

SEQ ID NO: 111759 - DNA, 120 bp, Artificial Sequence
  ENSG00000100196_10 (sequence is synthesized)
tagatgaccaaatttaggtggtcaagatataaaggtgtcagctagttttaagtgtgaaacttatttcactttcacactgccttcaggccagaagcaaaccaaatttaccaggtttggctg

SEQ ID NO: 111760 - DNA, 120 bp, Artificial Sequence
  ENSG00000100196_11 (sequence is synthesized)
gaggagttttgtgactcatcttttactggtttgaattttttcaaaccagtggctgatacctgccttgtacttagtaccttaataccaataacctaatggtacttaggcgagtaccatttg

SEQ ID NO: 111761 - DNA, 120 bp, Artificial Sequence
  ENSG00000100196_12 (sequence is synthesized)
cacaatcactgttttacttatgagcagatacagatatatccaaacccttacctactaggtatcctgctagggttttcaattccaattcttgtattaagttttttcctttcagttttaggt

SEQ ID NO: 111762 - DNA, 120 bp, Artificial Sequence
  ENSG00000100196_13 (sequence is synthesized)
gcgaaagtaatcagtcaatccaatatcccccatctttgtcttgaaacaaaaactgttttaagacgtctacgttgaattattcagagaattaagcaataaaagctcacaccttattgtcaa

SEQ ID NO: 111763 - DNA, 120 bp, Artificial Sequence
  ENSG00000100196_14 (sequence is synthesized)
ccatttaataagtattccagcagatacagatgtgaacagtcaagtctctgccatccacaatgcttgtgttctaatgcaagaagacaaatattttcaataaagaaacaaatgccataaaaa

SEQ ID NO: 111764 - DNA, 120 bp, Artificial Sequence
  ENSG00000100197_0 (sequence is synthesized)
atttggtagtgaggcaggtatggggctagaagcactggtgcccctggccgtgatagtggccatcttcctgctcctggtggacctgatgcaccggcgccaacgctgggctgcacgctaccc

SEQ ID NO: 111765 - DNA, 120 bp, Artificial Sequence
  ENSG00000100197_1 (sequence is synthesized)
accaggccccctgccactgcccgggctgggcaacctgctgcatgtggacttccagaacacaccatactgcttcgaccagttgcggcgccgcttcggggacgtgttcagcctgcagctggc

SEQ ID NO: 111766 - DNA, 120 bp, Artificial Sequence
  ENSG00000100197_2 (sequence is synthesized)
ctggacgccggtggtcgtgctcaatgggctggcggccgtgcgcgaggcgctggtgacccacggcgaggacaccgccgaccgcccgcctgtgcccatcacccagatcctgggtttcgggcc

SEQ ID NO: 111767 - DNA, 120 bp, Artificial Sequence
  ENSG00000100197_3 (sequence is synthesized)
gcgttcccaaggggtgttcctggcgcgctatgggcccgcgtggcgcgagcagaggcgcttctccgtgtccaccttgcgcaacttgggcctgggcaagaagtcgctggagcagtgggtgac

SEQ ID NO: 111768 - DNA, 120 bp, Artificial Sequence
  ENSG00000100197_4 (sequence is synthesized)
cgaggaggccgcctgcctttgtgccgccttcgccaaccactccggacgcccctttcgccccaacggtctcttggacaaagccgtgagcaacgtgatcgcctccctcacctgcgggcgccg

SEQ ID NO: 111769 - DNA, 120 bp, Artificial Sequence
  ENSG00000100197_5 (sequence is synthesized)
cttcgagtacgacgaccctcgcttcctcaggctgctggacctagctcaggagggactgaaggaggagtcgggctttctgcgcgaggtgctgaatgctgtccccgtcctcctgcatatccc

SEQ ID NO: 111770 - DNA, 120 bp, Artificial Sequence
  ENSG00000100197_6 (sequence is synthesized)
caaaaggctttcctgacccagctggatgagctgctaactgagcacaggatgacctgggacccagcccagcccccccgagacctgactgaggccttcctggcagagatggagaaggccaag

SEQ ID NO: 111771 - DNA, 120 bp, Artificial Sequence
  ENSG00000100197_7 (sequence is synthesized)
gggaaccctgagagcagcttcaatgatgagaacctgcgcatagtggtggctgacctgttctctgccgggatggtgaccacctcgaccacgctggcctggggcctcctgctcatgatccta

SEQ ID NO: 111772 - DNA, 120 bp, Artificial Sequence
  ENSG00000100197_8 (sequence is synthesized)
catccggatgtgcagcgccgtgtccaacaggagatcgacgacgtgatagggcaggtgcggcgaccagagatgggtgaccaggctcacatgccctacaccactgccgtgattcatgaggtg

SEQ ID NO: 111773 - DNA, 120 bp, Artificial Sequence
  ENSG00000100197_9 (sequence is synthesized)
cagcgctttggggacatcgtccccctgggtgtgacccatatgacatcccgtgacatcgaagtacagggcttccgcatccctaagggaacgacactcatcaccaacctgtcatcggtgctg

SEQ ID NO: 111774 - DNA, 120 bp, Artificial Sequence
  ENSG00000100197_10 (sequence is synthesized)
aaggatgaggccgtctgggagaagcccttccgcttccaccccgaacacttcctggatgcccagggccactttgtgaagccggaggccttcctgcctttctcagcaggccgccgtgcatgc

SEQ ID NO: 111775 - DNA, 120 bp, Artificial Sequence
  ENSG00000100197_11 (sequence is synthesized)
ctcggggagcccctggcccgcatggagctcttcctcttcttcacctccctgctgcagcacttcagcttctcggtgcccactggacagccccggcccagccaccatggtgtctttgctttc

SEQ ID NO: 111776 - DNA, 120 bp, Artificial Sequence
  ENSG00000100197_12 (sequence is synthesized)
ctggtgagcccatccccctatgagctttgtgctgtgccccgctagaatggggtacctagtccccagcctgctccctagccagaggctctaatgtacaataaagcaatgtggtagttccaa

SEQ ID NO: 111777 - DNA, 120 bp, Artificial Sequence
  ENSG00000100197_13 (sequence is synthesized)
ggctcccctaccagaagcaaacatggatggtgggtgaaaccacaggctggaccagaagccaggctgagaaggggaagcaggtttgggggacgtcctggagaagggcatttatacatggca

SEQ ID NO: 111778 - DNA, 120 bp, Artificial Sequence
  ENSG00000100197_14 (sequence is synthesized)
tgaaggactggattttccaaaggccaaggaagagtagggcaagggcctggaggtggagctggacttggcagtgggcatgcaagcccattgggcaacatatgttatggagtacaaagtccc

SEQ ID NO: 111779 - DNA, 120 bp, Artificial Sequence
  ENSG00000100197_15 (sequence is synthesized)
ttctgctgacaccagaaggaaaggccttgggaatggaagatgagttagtcctgagtgccgtttaaatcacgaaatcgaggatgaagggggtgcagtgacccggttcaaaccttttgcact

SEQ ID NO: 111780 - DNA, 120 bp, Artificial Sequence
  ENSG00000100197_16 (sequence is synthesized)
gtgggtcctcgggcctcactgctcaccggcatggaccatcatctgggaatgggatgctaactggggcctctcggcaattttggtgactcttgcaaggtcatacctgggtgacgcatccaa

SEQ ID NO: 111781 - DNA, 120 bp, Artificial Sequence
  ENSG00000100197_17 (sequence is synthesized)
actgagttcctccatcacagaaggtgtgacccccacccccgccccacgatcaggaggctgggtctcctccttccacctgctcactcctggtagccccgggggtcgtccaaggttcaaata

SEQ ID NO: 111782 - DNA, 120 bp, Artificial Sequence
  ENSG00000100201_0 (sequence is synthesized)
gccattttgtgcagtcgctgggaaggaaggagacgcctaaaccgcggcactgcccggtttgagcgtagccaaacctgcccaccggctttgtagccccgattctctgtgttttgctcccgt

SEQ ID NO: 111783 - DNA, 120 bp, Artificial Sequence
  ENSG00000100201_1 (sequence is synthesized)
ctccgacgagagaggcggcgacggtggcgtctgcgacgggagacagcgcgtcggagcgagagagcgctgcgcctgccgccgccccaacagcggaggcgccgccgccatcggtcgtcacca

SEQ ID NO: 111784 - DNA, 120 bp, Artificial Sequence
  ENSG00000100201_2 (sequence is synthesized)
gaccggagccgcaggccctcccgagcccggccatccgtgccccgctcccagatctctatccttttgggaccatgcgcggaggaggctttggggaccgggaccgggatcgtgaccgtggag

SEQ ID NO: 111785 - DNA, 120 bp, Artificial Sequence
  ENSG00000100201_3 (sequence is synthesized)
gatttggagcaagaggtggtggtggccttcccccgaagaaatttggtaatcctggggagcgtttgcgtaaaaaaaagtgggatttgagtgagctccccaagtttgagaaaaatttttatg

SEQ ID NO: 111786 - DNA, 120 bp, Artificial Sequence
  ENSG00000100201_4 (sequence is synthesized)
tggaacatccggaagtagcaaggctgacaccatatgaggttgatgagctacgccgaaagaaggagattacagtgagggggggagatgtttgtcctaaacccgtgtttgccttccatcatg

SEQ ID NO: 111787 - DNA, 120 bp, Artificial Sequence
  ENSG00000100201_5 (sequence is synthesized)
ctaacttcccacaatatgtaatggatgtgttgatggatcagcactttacagaaccaactccaattcagtgccagggatttccgttggctcttagtggccgggatatggtgggcattgctc

SEQ ID NO: 111788 - DNA, 120 bp, Artificial Sequence
  ENSG00000100201_6 (sequence is synthesized)
agactggctctgggaagacgttggcgtatctcctgcctgcaattgttcatattaaccaccagccatacttggaaaggggagatggcccaatctgtctagttctggctcctaccagagagc

SEQ ID NO: 111789 - DNA, 120 bp, Artificial Sequence
  ENSG00000100201_7 (sequence is synthesized)
ttgcccagcaagtacagcaggtggccgatgactatggcaaatgttctagattgaagagtacttgtatttatggaggtgctcctaaaggtccccagattcgagacttggaaagaggtgttg

SEQ ID NO: 111790 - DNA, 120 bp, Artificial Sequence
  ENSG00000100201_8 (sequence is synthesized)
agatctgcatagccactcctggacgtctgatagatttcctggagtcaggaaagacaaatcttcgccgatgtacttaccttgtattggacgaagctgacagaatgcttgatatggggtttg

SEQ ID NO: 111791 - DNA, 120 bp, Artificial Sequence
  ENSG00000100201_9 (sequence is synthesized)
aaccccagatccgtaaaattgttgaccaaatcaggcctgataggcagacactgatgtggagtgcaacctggccaaaagaagtaagacagcttgcagaggatttccttcgtgattacaccc

SEQ ID NO: 111792 - DNA, 120 bp, Artificial Sequence
  ENSG00000100201_10 (sequence is synthesized)
agatcaacgtaggcaatctggagttgagtgccaaccacaacatcctccagatagtggatgtctgcatggaaagtgaaaaagaccacaagttgatccaactaatggaagaaataatggctg

SEQ ID NO: 111793 - DNA, 120 bp, Artificial Sequence
  ENSG00000100201_11 (sequence is synthesized)
aaaaggaaaacaaaacaataatatttgtggagacaaagagacgctgtgatgatctgactcgaaggatgcgcagagatggttggccagctatgtgtatccatggagacaagagtcaaccag

SEQ ID NO: 111794 - DNA, 120 bp, Artificial Sequence
  ENSG00000100201_12 (sequence is synthesized)
aaagagattgggtacttaatgagttccgttctggaaaggcacccatccttattgctacagatgtagcctcccgtgggctagatgtggaagatgtcaagtttgtgatcaactatgactatc

SEQ ID NO: 111795 - DNA, 120 bp, Artificial Sequence
  ENSG00000100201_13 (sequence is synthesized)
caaacagctcagaggattatgtgcaccgtattggccgaacagcccgtagcaccaacaagggtaccgcctataccttcttcaccccagggaacctaaaacaggccagagagcttatcaaag

SEQ ID NO: 111796 - DNA, 120 bp, Artificial Sequence
  ENSG00000100201_14 (sequence is synthesized)
tgctggaagaggccaatcaggctatcaatccaaaactgatgcagcttgtggaccacagaggaggcggcggaggcgggggtggtcgttctcgttaccggaccacttcttcagccaacaatc

SEQ ID NO: 111797 - DNA, 120 bp, Artificial Sequence
  ENSG00000100201_15 (sequence is synthesized)
ccaatctgatgtatcaggatgagtgtgaccgaaggcttcgaggagtcaaggatggtggccggagagactctgcaagctatcgggatcgtagtgaaaccgatagagctggttatgctaatg

SEQ ID NO: 111798 - DNA, 120 bp, Artificial Sequence
  ENSG00000100201_16 (sequence is synthesized)
gcagtggctatggaagtccaaattctgcctttggagcacaagcaggccaatacacctatggtcaaggcacctatggggcagctgcttatggcaccagtagctatacagctcaagaatatg

SEQ ID NO: 111799 - DNA, 120 bp, Artificial Sequence
  ENSG00000100201_17 (sequence is synthesized)
gtgctggcacttatggagctagtagcaccacctcaactgggagaagttcacagagctctagccagcagtttagtgggataggccggtctgggcagcagccacagccactgatgtcacaac

SEQ ID NO: 111800 - DNA, 120 bp, Artificial Sequence
  ENSG00000100201_18 (sequence is synthesized)
agtttgcacagcctccgggagctaccaatatgataggttacatggggcagactgcctaccaataccctcctcctcctccccctcctcctccttcacgtaaatgaaaccactcaagtggta

SEQ ID NO: 111801 - DNA, 120 bp, Artificial Sequence
  ENSG00000100201_19 (sequence is synthesized)
ttttttctttttttttttttaatttttccccccaaccatcgtgatttgtcttttcatgcagattagttagaattcactgccaggtttcttctgcccaccaaaatgatccagtctggaata

SEQ ID NO: 111802 - DNA, 120 bp, Artificial Sequence
  ENSG00000100201_20 (sequence is synthesized)
aaaaaaaaaaatatatatatatatatatagctgactggaagagattaatttcttcccccaacttcttgcatgttgaagatatttgagctatttttcatctaaaagagtaaggtattaggc

SEQ ID NO: 111803 - DNA, 120 bp, Artificial Sequence
  ENSG00000100201_21 (sequence is synthesized)
aaggtattaggcccttttgtgggagccccatgttttgtttttctgagttggtggggagggagggagggggagggctgaattgttttgcagaggaagatggcatctgtgctttaaatttct

SEQ ID NO: 111804 - DNA, 120 bp, Artificial Sequence
  ENSG00000100201_22 (sequence is synthesized)
cattactgggttagaaaacaaagagggattgccctgcacattttcttttgtgcttttaaatgtttcttaagttggaacaggtttcctcgggcctgttttgactgattgctggagtgcatt

SEQ ID NO: 111805 - DNA, 120 bp, Artificial Sequence
  ENSG00000100201_23 (sequence is synthesized)
tgatagttaaaaattactaattggttttatttcccttcacactctgcctccccacttctccccccgttactgaaaaataaccattttagtgtcaggctagaaattgaattgctgagtttt

SEQ ID NO: 111806 - DNA, 120 bp, Artificial Sequence
  ENSG00000100201_24 (sequence is synthesized)
gtgtatcctttaaattaaaaaccacaagtgtttattgtagtggttaaactgtagcatctcagcatctgggtggaagctgcctatatttcttcccagtttaactggggaccatctgtgaaa

SEQ ID NO: 111807 - DNA, 120 bp, Artificial Sequence
  ENSG00000100201_25 (sequence is synthesized)
ttaattttccatccagacagctgctgtgagcaaatgaacataaatgctcgctggaaatttactaaccagtttttatattgacctgcagtgtaaaaagcacatttaattataaacaatata

SEQ ID NO: 111808 - DNA, 120 bp, Artificial Sequence
  ENSG00000100201_26 (sequence is synthesized)
ttcaaaatgggcaaattttattttcaaatgcagtgtagagctagattaaaagcaactctttgccacctactctgcccttttggcaaagttaccttgaacaaagaatcttaagggtttatt

SEQ ID NO: 111809 - DNA, 120 bp, Artificial Sequence
  ENSG00000100201_27 (sequence is synthesized)
aagaactctttattttcttcataccctgttctctgcagtgctttctaacagcttctgggtgcagattttcttcggcatccttttgcactcagcttattacaggtaggtagtgcttaagaa

SEQ ID NO: 111810 - DNA, 120 bp, Artificial Sequence
  ENSG00000100201_28 (sequence is synthesized)
aagtcatggaggactaaagcctaagtccttttcacttttcctccatctgaaggtaggtgagttcatcctcttcatggtaatgctgttttaccaagactttatagcagatggacccagaaa

SEQ ID NO: 111811 - DNA, 120 bp, Artificial Sequence
  ENSG00000100201_29 (sequence is synthesized)
gaattttctgctattgtgttcactacaacaggatagggacatcagacagccccagaaaccccttccagatctgatatgggactattaatttttatgctgttaattggtattcattcacaa

SEQ ID NO: 111812 - DNA, 120 bp, Artificial Sequence
  ENSG00000100201_30 (sequence is synthesized)
tgcagttgaagggggaaggctccactgcattctttggctaaggcctgaatgcttgctcatctgtaagatctatactcgaggttttgttttccttttaaaattctttagggagagagggat

SEQ ID NO: 111813 - DNA, 120 bp, Artificial Sequence
  ENSG00000100201_31 (sequence is synthesized)
ggtttctgaggggttctgaaagtatgattcaatgtgcaacatacaggtaggtcttcagcataagctgaaatatatgcatgtaaaaactttgacatctttttttttaattttccactttct

SEQ ID NO: 111814 - DNA, 120 bp, Artificial Sequence
  ENSG00000100201_32 (sequence is synthesized)
tcttaactttacttctctttttgtcccccccccatcttacagaagttgaggccaagggagaatggtaggcacagaagaaacatggcaaactgctctgtgctttcaaaccaaagtgttccc

SEQ ID NO: 111815 - DNA, 120 bp, Artificial Sequence
  ENSG00000100201_33 (sequence is synthesized)
cccaaccccaaatttgtctaagcactggccagtctgttgtgggcattgttttctacaaccaaattctgggtttttttcttctttctttaaacatagaggtaccaccacaagggatgccct

SEQ ID NO: 111816 - DNA, 120 bp, Artificial Sequence
  ENSG00000100201_34 (sequence is synthesized)
actctctcgcagctcttgaaagcatctgtttgagggaaaggtctctgggcaagcaagtggttatttggattgcttgcttccctttttccacctgggacattgtaatcataaaataacagt

SEQ ID NO: 111817 - DNA, 120 bp, Artificial Sequence
  ENSG00000100201_35 (sequence is synthesized)
aaattccaaacctcaaaaactattatggcctgagcacagctgaaatctagcagagtttaactcttctgcctccatgtctgtcacttataattcaggttctgctgttggcttcagaacatg

SEQ ID NO: 111818 - DNA, 120 bp, Artificial Sequence
  ENSG00000100201_36 (sequence is synthesized)
agcagaagaatcgttttatgctagttattgcattcatggttgaaactcaacttagggaaagggttccaatgtattaagcaatgggctgcttctccccaatcctccctaacaattcgttgt

SEQ ID NO: 111819 - DNA, 120 bp, Artificial Sequence
  ENSG00000100201_37 (sequence is synthesized)
gtggacttctcatctaaaaggttagtggcttttgcttgggatcagtgctctctattgatgttcttgctggtctccagacacattcctgttgcattaagacttgaaagacttgtagatgtg

SEQ ID NO: 111820 - DNA, 120 bp, Artificial Sequence
  ENSG00000100201_38 (sequence is synthesized)
tgatgttcaggcacaggatgctgaaagctatgttactattcttagtttgtaaattgtccttttgataccatcatcttgttttctttttgtaggtataaataaaaacactgttgacaataa

SEQ ID NO: 111821 - DNA, 120 bp, Artificial Sequence
  ENSG00000100201_39 (sequence is synthesized)
gcttcttggggaggcccggcggactgcgagcctgggagccttgctctcgacccgggaggcgaggggaggcgactcgaggcgagacagcggtttcgtgcgcggacctcggccccggggtca

SEQ ID NO: 111822 - DNA, 80 bp, Artificial Sequence
  ENSG00000100201_40 (sequence is synthesized)
ctcgggacccgaggagggcggccgcttggcgacgctgggcctctccgtgcggacggccgtcgtggcgcggcccggcccca

SEQ ID NO: 111823 - DNA, 120 bp, Artificial Sequence
  ENSG00000100201_41 (sequence is synthesized)
tcactgccacggacccttgatgcatgctccccgcgctccagtggtcccgtgtcagaaggcggagttttcgaaaggaggccgccaaaaataaaaggcaaagagacgggatcggctgcagcg

SEQ ID NO: 111824 - DNA, 120 bp, Artificial Sequence
  ENSG00000100201_42 (sequence is synthesized)
gtttcccaaaggaggagggagtgtgcatcgatgtggaagatgtcaagtttgtgatcaactatgactatccaaacagctcagaggattatgtgcaccgtattggccgaacagcccgtagca

SEQ ID NO: 111825 - DNA, 120 bp, Artificial Sequence
  ENSG00000100201_43 (sequence is synthesized)
caaggtttcatggttttcccacgttctttggctattaatttaatttcccaggtcacgtagacaatcattgataattgaaacaagtcctgagttgaaataaccttgagttgagcaaaaata

SEQ ID NO: 111826 - DNA, 120 bp, Artificial Sequence
  ENSG00000100201_44 (sequence is synthesized)
tcctcattttggcagaagctgggcttggtagtacagtaaaattttagtgtaatgtgctcttgtaattgaaaggggatagataatctggatgtttctgcaaaggaaaataggtgtgtactt

SEQ ID NO: 111827 - DNA, 120 bp, Artificial Sequence
  ENSG00000100201_45 (sequence is synthesized)
aacagctttggctctactcagtttcttaaaaagataagagcaaaaaaagttaaatgttaatcaaaacatttaagtttcctttaaattgtagtaataaaatatatgaagctccttttttta

SEQ ID NO: 111828 - DNA, 120 bp, Artificial Sequence
  ENSG00000100201_46 (sequence is synthesized)
ctttgctctgtgactggtttaaaggtaagtttgttatgttgttggtagattttgccaggcttctcccaacagagtagaagtgatttggcctcataacttcacagtggtttaccactttgt

SEQ ID NO: 111829 - DNA, 120 bp, Artificial Sequence
  ENSG00000100201_47 (sequence is synthesized)
tctatgttctggttttgtaaaggatagtactggaatttgcgtctgaagaccaatattggtgtaactcctgtcagtatattggtaaaatgtagcagaggcaggagtttggatgtttggatg

SEQ ID NO: 111830 - DNA, 120 bp, Artificial Sequence
  ENSG00000100201_48 (sequence is synthesized)
ggattcccttaggattctacagccaataaagatcctatttcctatgcatgtcccaggaatcagtaatcctcttttactctgttgggatgagtctttttttgtttctgttcagagtggtta

SEQ ID NO: 111831 - DNA, 120 bp, Artificial Sequence
  ENSG00000100201_49 (sequence is synthesized)
ctaacttcaccttctttcctcttgctgtcatctgcattcgtgcttcccacctgttgttggcatgtcctttaccttctctttccctgccacatcaacctacacactgactcatcattgacg

SEQ ID NO: 111832 - DNA, 120 bp, Artificial Sequence
  ENSG00000100201_50 (sequence is synthesized)
tttgatatcagctgcagatcactcaatacatggccgagacaaatctacattggccggaagcagctctagatgagcctcttggctagacttagtccctccttattagtgattggcgattca

SEQ ID NO: 111833 - DNA, 120 bp, Artificial Sequence
  ENSG00000100201_51 (sequence is synthesized)
cagtatattttgaggcctgagaacattaaaagcattgctaggtttctgataatccatcatcatatcatttgtcagagcattatggttaaatgcaaggattctgaattcttgagtttgaaa

SEQ ID NO: 111834 - DNA, 120 bp, Artificial Sequence
  ENSG00000100201_52 (sequence is synthesized)
tttagctctgctgattacaagctgtataattttgcacaattttgtgtcttggtgctgcagtttcttcatctgtgaaatgggagtaataccacttacatgagacttgctgtgaggatggta

SEQ ID NO: 111835 - DNA, 120 bp, Artificial Sequence
  ENSG00000100201_53 (sequence is synthesized)
cgtcatttcaaattcagacttcaagtttagaaagttgtatatacatgtggttagataaatatttgaaagaaaaaaatacaaagcgtgattctccccattccctgccccccccacaatttt

SEQ ID NO: 111836 - DNA, 120 bp, Artificial Sequence
  ENSG00000100201_54 (sequence is synthesized)
ttttaactttggtttcccccaccccccttttattttcaaagtctcttcctgctcctaacaaacaggctttggtctgcagcaaggcctaggcatgactattcaaacagagggagaggagac

SEQ ID NO: 111837 - DNA, 120 bp, Artificial Sequence
  ENSG00000100201_55 (sequence is synthesized)
agacagctgaatggctcagcttctctctggtggtggtttctggctggatagaataagcctgacgaaacctagctattgtaagctagtttcttcagttattcttttccctatccctgtcta

SEQ ID NO: 111838 - DNA, 120 bp, Artificial Sequence
  ENSG00000100201_56 (sequence is synthesized)
agctagatatatacagagaggtccagttttatgaatgcttattagatggaattttataagtctaatgcagtatcagaatagcaaatatgtgtattgcccagtttaatttactgaggtcaa

SEQ ID NO: 111839 - DNA, 120 bp, Artificial Sequence
  ENSG00000100201_57 (sequence is synthesized)
attatcatgggcacttggctatcccctcctacccatgcacttatctgtaggtgtgttatcaactgatgattttctggagtttttgacccattaccatttaagatatacagagaattttat

SEQ ID NO: 111840 - DNA, 120 bp, Artificial Sequence
  ENSG00000100201_58 (sequence is synthesized)
ggtagtttagcccactattctgagctaaacaggtctaactcagaacttctatattttaaaaaaaaagattatttgtattacaaggaaatccttaaattattgacaggtatttaatttgcc

SEQ ID NO: 111841 - DNA, 120 bp, Artificial Sequence
  ENSG00000100201_59 (sequence is synthesized)
cagtaaggtgagaagtaccatattattcccttatactatataatataaagagaacaggtattcaaactggaatacaaaagtaatgaagcctttttatgcattgcactcatcattccctcc

SEQ ID NO: 111842 - DNA, 120 bp, Artificial Sequence
  ENSG00000100201_60 (sequence is synthesized)
ttcagaggtggtgacctgcagccatgatggaaagttctctctgcccctctgccctctgaggtcatgtctggatctgtgccattagaacttgggcctgttgggagaggaggcggaggcctg

SEQ ID NO: 111843 - DNA, 120 bp, Artificial Sequence
  ENSG00000100201_61 (sequence is synthesized)
aaagcagtttacataaagctttcagtaatggttggtttttaaacaggcttgctatgtgctggtagcttctttgtgcatcttgcctagacaattaaaaatatttgctccatgtccccttgc

SEQ ID NO: 111844 - DNA, 120 bp, Artificial Sequence
  ENSG00000100201_62 (sequence is synthesized)
atttctaaaccaaattaattggctaccattagaataacttagactcttcatcccacccccactcatccaagtgaggggagagggaaggtacccgagtctgtttcttgttactcaacatca

SEQ ID NO: 111845 - DNA, 120 bp, Artificial Sequence
  ENSG00000100201_63 (sequence is synthesized)
gtgcttgttttgggcccctttgtttgctgccttgtaaaaaatcaaaagagggagaaaacccaccaaaatggcagaattctgaccaatgtcctacaagatcctggaaagtgaaggcttcta

SEQ ID NO: 111846 - DNA, 120 bp, Artificial Sequence
  ENSG00000100201_64 (sequence is synthesized)
cctcatagacaggggtgcaattttcagctgagtcaccagggccttttttcacttcctgtcaagcgatggtctcttaaatgttcccttcaggtaagttctttgattcccataattttataa

SEQ ID NO: 111847 - DNA, 120 bp, Artificial Sequence
  ENSG00000100201_65 (sequence is synthesized)
tagtcatccttaggctaccacttccctttccactgggatattttttatttttccttttttttgtttgaactacacactgttaaactaaaagtattgaatttattttgttttgttttttaa

SEQ ID NO: 111848 - DNA, 120 bp, Artificial Sequence
  ENSG00000100201_66 (sequence is synthesized)
ttaccctgctacagcatcttctagaaaggcagcaagataatattgtggcagtgcacagataacatcagggtagacttgactggagaaaaccaaattctgcgcttgctcctgtgtgccccc

SEQ ID NO: 111849 - DNA, 120 bp, Artificial Sequence
  ENSG00000100201_67 (sequence is synthesized)
atccagctgtgcatgcacacacaggacacctttctagtatgaagaacttgcatcatgtctgccctctattgagcacccccttctagaaatacttccaagtattagcatgtgaactgttga

SEQ ID NO: 111850 - DNA, 120 bp, Artificial Sequence
  ENSG00000100201_68 (sequence is synthesized)
ctccaccctggtgctttctgctaggaaagcacacttaacgcatccagtgtagtaattgaacttgttctactgccatggtcatatgcagtgggattgcataaggagcattatcctagctct

SEQ ID NO: 111851 - DNA, 120 bp, Artificial Sequence
  ENSG00000100201_69 (sequence is synthesized)
gaagataccatggagtagaattccccaccccctgtcttacatccaccctggccctgtaaattcttttttcctttgttgcgtcaacgaccctagccggagactcaagctgccccctgtgat

SEQ ID NO: 111852 - DNA, 120 bp, Artificial Sequence
  ENSG00000100201_70 (sequence is synthesized)
aagtgccttctcgtctttctggtgtgattcaggactttaggggtcagtaaagaccgaggagcctttattgtaataagaaacagacataatgccccttcttcacaagccctgtaacaacag

SEQ ID NO: 111853 - DNA, 120 bp, Artificial Sequence
  ENSG00000100201_71 (sequence is synthesized)
ctaattttttttttttaatctcccctttctcccttgaaattaatccagtctgggcaatagatgcagtctgaccctttggatgtaacttacatttttttttattaattatttttttctaca

SEQ ID NO: 111854 - DNA, 120 bp, Artificial Sequence
  ENSG00000100201_72 (sequence is synthesized)
atcaccccaattatccttgggggaggcgttggaggacctgaaatttttacccgaacccaggttctccggcgcttggcaaccaaatggggctacagagaagcatctaagccagttcacaga

SEQ ID NO: 111855 - DNA, 120 bp, Artificial Sequence
  ENSG00000100201_73 (sequence is synthesized)
tttctgaatattctttgtaaaatgcagatttttttccacaaaacagtaggattctttgttatattcttaaaattgtttgtttaagtaggtaaaaatatacattcagctgaaagcattaca

SEQ ID NO: 111856 - DNA, 120 bp, Artificial Sequence
  ENSG00000100201_74 (sequence is synthesized)
ggtacttaatggtaagtttaaaactaagcattttctgttgattccccaccccctgcccataagtgaatgttcatgctctatttcagggataggcaaactttctgtaaagggccacatagt

SEQ ID NO: 111857 - DNA, 120 bp, Artificial Sequence
  ENSG00000100201_75 (sequence is synthesized)
aagtatgcttggctttgtaaaccaaatggtggtctctgttatagccactcagcactgctgttttaggacaaaagctgtaggctgtagataatatgtaaagaagtggcctggactgggcac

SEQ ID NO: 111858 - DNA, 78 bp, Artificial Sequence
  ENSG00000100201_76 (sequence is synthesized)
cgttcgcgtggatcacctaggcccaggagttcaagaccggtctgggcaacatagtgaaatcctgtctctaaaagaaaa

SEQ ID NO: 111859 - DNA, 120 bp, Artificial Sequence
  ENSG00000100206_0 (sequence is synthesized)
gccaaaccctgtggtcaacggcgcgcgggtctccaggctccgtgttctaggcccgagttagaatcctgtcagctgaggaggtcgggcggggcagaggggcttcaccttgaaaatctcggg

SEQ ID NO: 111860 - DNA, 120 bp, Artificial Sequence
  ENSG00000100206_1 (sequence is synthesized)
gagactgtgggtacgagggggaagtgattatttttctgttgcccacttttcaatatgaaggaggatcaagttgtggcggaagaaccaggattccaagatgaagaggaatctttgtttcaa

SEQ ID NO: 111861 - DNA, 120 bp, Artificial Sequence
  ENSG00000100206_2 (sequence is synthesized)
gatattgacctgttacagaaacatggaattaacgtggctgacattaagaaactgaaatcagtaggaatctgtaccatcaaaggtatacagatgacaacaagaagagctctatgcaatgtc

SEQ ID NO: 111862 - DNA, 120 bp, Artificial Sequence
  ENSG00000100206_3 (sequence is synthesized)
aaaggactctcagaagccaaagtagacaagattaaagaggcagcgaacaaactaattgaaccaggattcttgactgcatttgagtatagtgaaaagaggaaaatggttttccatatcacc

SEQ ID NO: 111863 - DNA, 120 bp, Artificial Sequence
  ENSG00000100206_4 (sequence is synthesized)
accgggagccaggaatttgataagttactaggaggtggaattgaaagtatggcaattacagaagcttttggagaatttcgtactggaaaaacccagctttctcataccctctgtgtgaca

SEQ ID NO: 111864 - DNA, 120 bp, Artificial Sequence
  ENSG00000100206_5 (sequence is synthesized)
gctcaacttccaggagctggtggctacccaggaggaaagattatcttcattgatacagaaaatactttccgtccagatcgccttagggacattgctgatcgctttaatgtagaccatgat

SEQ ID NO: 111865 - DNA, 120 bp, Artificial Sequence
  ENSG00000100206_6 (sequence is synthesized)
gcagtactggacaacgtactttatgcacgtgcatatactagtgaacatcagatggagctacttgattatgtagcagcaaagttccatgaagaagctggcatcttcaagctattgattatc

SEQ ID NO: 111866 - DNA, 120 bp, Artificial Sequence
  ENSG00000100206_7 (sequence is synthesized)
gattcaataatggcactttttcgagtggatttcagtggccgtggggagttggccgaacggcagcaaaaattggcccagatgttgtcacgactccaaaaaatctcagaagaatataacgtg

SEQ ID NO: 111867 - DNA, 120 bp, Artificial Sequence
  ENSG00000100206_8 (sequence is synthesized)
gctgtttttgtgaccaatcaaatgactgccgatccaggagcaactatgacctttcaggcagatcccaaaaaacccattgggggacacattctggctcatgcttcaacaacaagaataagc

SEQ ID NO: 111868 - DNA, 120 bp, Artificial Sequence
  ENSG00000100206_9 (sequence is synthesized)
aggagtaggtggtgaattgatgcaaattgcttcttagtgcttattaggagctgaagaaatggaaaagcagtctccaatttcacatcttgaaatagaggttttttcccacatgttactaaa

SEQ ID NO: 111869 - DNA, 120 bp, Artificial Sequence
  ENSG00000100206_10 (sequence is synthesized)
gaaaagtcagcaaagagatttaaatcttatatttatcttaaaagtccctgatttatgataactatacattgtatgtaaattcagggatatgtatatgtatgtttgtgtgtgtgtgtgttt

SEQ ID NO: 111870 - DNA, 120 bp, Artificial Sequence
  ENSG00000100206_11 (sequence is synthesized)
gtgtgtgtatacctgacatatatagtagatatatatacctattgaaattctctcactctgtgtatgtatatatacctatggaaaactagttgttgggaaaggagtacgtgattccctccc

SEQ ID NO: 111871 - DNA, 120 bp, Artificial Sequence
  ENSG00000100206_12 (sequence is synthesized)
tttcacttttcaaagtgagccactaaacagaaagtctaagagttcagaaatgtcccattctcctaaggactttcccttcaccatttttctagggtatagtgccactgacttacatagcta

SEQ ID NO: 111872 - DNA, 120 bp, Artificial Sequence
  ENSG00000100206_13 (sequence is synthesized)
gatgtttttccacaagaggatttaagggaggaatgtttataggacacacacacaaaagctctttctatttataatatcaaactgcatattcacctttatagcaacagaaaacagacatta

SEQ ID NO: 111873 - DNA, 120 bp, Artificial Sequence
  ENSG00000100206_14 (sequence is synthesized)
ttcacctttatagcaacagaaaacagacattaaattaagccaaattttaaatcatttgactttgacaagcagaaattacttttaaaaaatgtatttatggctgggcgtggtggctcacac

SEQ ID NO: 111874 - DNA, 120 bp, Artificial Sequence
  ENSG00000100206_15 (sequence is synthesized)
ctcatctttccaagctaaatgcttctcttactgtccttctagtccttgttgactttgaaatgaaatcagaggcccctggacaaaggactacttcttacataatatttcttattttcccag

SEQ ID NO: 111875 - DNA, 120 bp, Artificial Sequence
  ENSG00000100206_16 (sequence is synthesized)
tctgagatatacaatctttgtagtcattccataaaccagtagtaatgagacaaaccaaagggaaaacaattactgtttaagttctccaatcactttgtatttaatgaggtttcacttctt

SEQ ID NO: 111876 - DNA, 120 bp, Artificial Sequence
  ENSG00000100206_17 (sequence is synthesized)
catatgggtttatgagacaaaacaaatacatgagaggaaattatatcatcatttttaatcctcttacttctctaaagatgttgcttaatagttagaaaaaagatttttttttttttgaga

SEQ ID NO: 111877 - DNA, 83 bp, Artificial Sequence
  ENSG00000100206_18 (sequence is synthesized)
ttgcttaatagttagaaaaaagatttttttttttttgagacggaatctccctgttgcccaggctggagtcttgggttcaatca

SEQ ID NO: 111878 - DNA, 120 bp, Artificial Sequence
  ENSG00000100206_19 (sequence is synthesized)
tgagccacgatgcccggcctgcaatttggattttactaagaacaataggaatacttaggagctaagtcatatgcaagagagagtggagaagaacagctgggtgggggtgcagggcactgt

SEQ ID NO: 111879 - DNA, 120 bp, Artificial Sequence
  ENSG00000100206_20 (sequence is synthesized)
ggcaagggccacattggagtgttctcattctttccgtgtctcatacttatactgctgtctcttgatagttttctttttatatgtttatattttgcctccttaattatgttttaaatttac

SEQ ID NO: 111880 - DNA, 120 bp, Artificial Sequence
  ENSG00000100206_21 (sequence is synthesized)
ctagggcataggttgtcttaggactccttatatcctccataatgctttgccttggtaattgattaatatggtaattaattccatatggtaattggttaataaatatttataattgatctg

SEQ ID NO: 111881 - DNA, 120 bp, Artificial Sequence
  ENSG00000100206_22 (sequence is synthesized)
gggtacgagggggggtccaacccctgactttggtatcaaatgaggaaatggaatcgaccaagaaaaatgatgatttggaccgcattttattgtaataaataaacacaatcacgccttgtg

SEQ ID NO: 111882 - DNA, 120 bp, Artificial Sequence
  ENSG00000100207_0 (sequence is synthesized)
tctgggcctctgattcatctttattccctccatcatctagacttgattttatttgtaccaaggagatgcgtgtctaatgtttttctttcttctatttctaggagggctgttggcctgctg

SEQ ID NO: 111883 - DNA, 120 bp, Artificial Sequence
  ENSG00000100207_1 (sequence is synthesized)
ctgtgctgctgaacagtatgcagtcctttcgggagcaaagcagttaccacggaaaccagcaaagctacccacaggaggtacacggctcatcccggctagaagagttcagccctcgtcagg

SEQ ID NO: 111884 - DNA, 120 bp, Artificial Sequence
  ENSG00000100207_2 (sequence is synthesized)
cccagatgttccagaattttggaggtacaggtggcagtagtggcagcagtggcagtggcagtggtggtggacgacgaggagcagcagctgctgcggcagcgatggctagcgagacctctg

SEQ ID NO: 111885 - DNA, 120 bp, Artificial Sequence
  ENSG00000100207_3 (sequence is synthesized)
gccatcaaggttaccagggtttcaggaaagaggctggagatttttactacatggcaggcaacaaagaccccgtgactacaggaaccccacagcctcctcagcgaaggccttctgggcctg

SEQ ID NO: 111886 - DNA, 120 bp, Artificial Sequence
  ENSG00000100207_4 (sequence is synthesized)
tgcagagctatggacccccccaggggagcagctttggcaatcagtatgggagtgagggtcatgtgggccagtttcaagcacagcactctggccttggcggtgtgtcacattatcagcagg

SEQ ID NO: 111887 - DNA, 120 bp, Artificial Sequence
  ENSG00000100207_5 (sequence is synthesized)
attacactgggcctttctctccagggagtgctcagtaccaacagcaggcttccagccagcagcagcagcagcaagtccagcagttgagacaacagctttaccagtcccatcagcccctgc

SEQ ID NO: 111888 - DNA, 120 bp, Artificial Sequence
  ENSG00000100207_6 (sequence is synthesized)
cacaggccactggccaaccagcatccagctcatcccatctacagccaatgcagcggccctcaactctgccatcctctgctgctggttaccagttaagagtgggtcagtttggccaacact

SEQ ID NO: 111889 - DNA, 120 bp, Artificial Sequence
  ENSG00000100207_7 (sequence is synthesized)
atcagtcttctgcttcctcctcctcctcctcctccttcccttcaccacagcgttttagccagtctggacagagctatgatggcagttacaatgtgaatgctggatctcagtatgaaggac

SEQ ID NO: 111890 - DNA, 120 bp, Artificial Sequence
  ENSG00000100207_8 (sequence is synthesized)
acaatgtgggttctaatgcacaggcttatggaacacaatccaattacagctatcagcctcaatctatgaagaattttgaacaggcaaagattccacaagggacccaacaggggcagcagc

SEQ ID NO: 111891 - DNA, 120 bp, Artificial Sequence
  ENSG00000100207_9 (sequence is synthesized)
agcagcaaccgcagcaacaacaacacccttctcagcatgtgatgcagtatactaacgctgccaccaagctgcccctgcaaagccaagtggggcagtacaaccagcctgaggttcctgtga

SEQ ID NO: 111892 - DNA, 120 bp, Artificial Sequence
  ENSG00000100207_10 (sequence is synthesized)
ggtcccccatgcagtttcaccagaacttcagccccatttctaacccttctccagctgcctctgtggttcagtctccaagctgtagttctaccccatctcctctcatgcagactggggaga

SEQ ID NO: 111893 - DNA, 120 bp, Artificial Sequence
  ENSG00000100207_11 (sequence is synthesized)
atctccagtgtgggcaaggcagtgtgcctatgggttccagaaacagaattttacagttaatgcctcaactcagtccaaccccatcaatgatgcccagtcctaattctcatgctgcaggct

SEQ ID NO: 111894 - DNA, 120 bp, Artificial Sequence
  ENSG00000100207_12 (sequence is synthesized)
tcaaagggtttggactagaaggggtaccagaaaagcgactgacagatcctgggttgagtagtttgagtgctctgagtactcaagtggccaatcttcctaacactgtccagcacatgttac

SEQ ID NO: 111895 - DNA, 120 bp, Artificial Sequence
  ENSG00000100207_13 (sequence is synthesized)
tttctgatgccctgactcctcagaagaagacctccaagaggccctcatcttccaagaaagcagatagctgcacaaattctgaaggctcctcacaacctgaagaacagctgaagtccccta

SEQ ID NO: 111896 - DNA, 120 bp, Artificial Sequence
  ENSG00000100207_14 (sequence is synthesized)
tggcagagtcattagatggaggctgctccagcagttcagaggatcaaggcgagagagtgcggcaactaagtggccagagcaccagctctgacaccacctacaagggtggagcctctgaga

SEQ ID NO: 111897 - DNA, 120 bp, Artificial Sequence
  ENSG00000100207_15 (sequence is synthesized)
aagctggctcctcaccggcacaaggtgctcagaatgaaccccccagactcaatgctagtcctgccgcaagagaagaggccacctcaccaggcgctaaggacatgccattgtcatccgacg

SEQ ID NO: 111898 - DNA, 120 bp, Artificial Sequence
  ENSG00000100207_16 (sequence is synthesized)
ggaacccaaaggttaatgagaagactgttggggtgattgtctcccgggaagccatgacaggtcgggtagaaaagcctggtggacaagataaaggctcccaagaggatgatcctgcagcca

SEQ ID NO: 111899 - DNA, 120 bp, Artificial Sequence
  ENSG00000100207_17 (sequence is synthesized)
ctcaaaggccacctagcaatggtggggcaaaggaaaccagtcatgcatcacttccccagccagagcctccaggaggaggagggagcaaaggaaacaagaatggcgataacaactccaacc

SEQ ID NO: 111900 - DNA, 120 bp, Artificial Sequence
  ENSG00000100207_18 (sequence is synthesized)
ataatggagaaggaaatggccagagtggccactctgcagcgggccctggttttacgagcagaactgagcctagcaaatctcctggaagtctgcgctatagttacaaagatagtttcgggt

SEQ ID NO: 111901 - DNA, 120 bp, Artificial Sequence
  ENSG00000100207_19 (sequence is synthesized)
cagccgtgccacgaaatgtcagtggctttcctcagtatcctacagggcaagaaaagggagatttcactggccatggggaacgaaagggtagaaatgaaaaattcccaagcctcctgcagg

SEQ ID NO: 111902 - DNA, 120 bp, Artificial Sequence
  ENSG00000100207_20 (sequence is synthesized)
aagtgcttcagggttaccaccaccaccctgacaggagatattctaggagtactcaagagcatcaggggatggctggtagcctagaaggaaccacaaggcccaatgtcttggttagtcaaa

SEQ ID NO: 111903 - DNA, 120 bp, Artificial Sequence
  ENSG00000100207_21 (sequence is synthesized)
ccaatgaattagctagcaggggccttctgaacaaaagcattgggtctctattagaaaatccccactggggcccctgggaaaggaaatcaagcagcacagctcctgaaatgaaacagatca

SEQ ID NO: 111904 - DNA, 120 bp, Artificial Sequence
  ENSG00000100207_22 (sequence is synthesized)
atttgactgactatccaattcccagaaagtttgaaatagagcctcagtcatcagcacatgagcctgggggttccctctctgaaagaagatcagtgatctgtgatatttctccactaagac

SEQ ID NO: 111905 - DNA, 120 bp, Artificial Sequence
  ENSG00000100207_23 (sequence is synthesized)
agattgtcagggacccaggggctcactcactgggacacatgagtgccgacaccagaattgggaggaatgaccgtctcaatccaactttaagtcagtcggtcattcttcctggtggtttgg

SEQ ID NO: 111906 - DNA, 120 bp, Artificial Sequence
  ENSG00000100207_24 (sequence is synthesized)
tgtccatggaaaccaagctgaaatcccagagcgggcagataaaagaggaagactttgaacagtctaaatctcaagctagtttcaacaacaagaaatctggagaccactgccatcctccta

SEQ ID NO: 111907 - DNA, 120 bp, Artificial Sequence
  ENSG00000100207_25 (sequence is synthesized)
gcatcaagcatgagtcttaccgcggcaatgccagccctggagcagcaacccatgattccctttcagactatggcccgcaagacagcagacccacgccaatgcggcgggtccctggcagag

SEQ ID NO: 111908 - DNA, 120 bp, Artificial Sequence
  ENSG00000100207_26 (sequence is synthesized)
ttggtggtcgggagggcatgaggggtcggtccccttctcaatatcatgactttgcagaaaaattgaaaatgtctcctgggcggagcagaggcccagggggagaccctcatcacatgaatc

SEQ ID NO: 111909 - DNA, 120 bp, Artificial Sequence
  ENSG00000100207_27 (sequence is synthesized)
cacacatgaccttttcagagagggctaaccggagttctttacacactcccttttctcccaactcagaaaccctggcctctgcttatcatgcaaatactcgggctcatgcttatggggacc

SEQ ID NO: 111910 - DNA, 120 bp, Artificial Sequence
  ENSG00000100207_28 (sequence is synthesized)
ctaacgcaggtttgaattctcagctgcattataagagacagatgtaccaacagcaaccagaggagtataaagactggagcagcggttctgctcagggagtaattgctgcagcacagcaca

SEQ ID NO: 111911 - DNA, 120 bp, Artificial Sequence
  ENSG00000100207_29 (sequence is synthesized)
ggcaggaggggccacggaagagtccaaggcagcagcagtttcttgacagagtacggagccctctgaaaaatgacaaagatggtatgatgtatggcccaccagtggggacttaccatgacc

SEQ ID NO: 111912 - DNA, 120 bp, Artificial Sequence
  ENSG00000100207_30 (sequence is synthesized)
aagaatcctgttgggatctttctcggcaaacttctccagccaaaagcagcggtcctccaggaatgtccagtcaaaaaaggtatgggccgccccatgagactgatggacatggactagctg

SEQ ID NO: 111913 - DNA, 120 bp, Artificial Sequence
  ENSG00000100207_31 (sequence is synthesized)
aggctacacagtcatccaaacctggtagtgttatgctgagacttccaggccaggaggatcattcttctcaaaaccccttaatcatgaggaggcgtgttcgttcttttatctctcccattc

SEQ ID NO: 111914 - DNA, 120 bp, Artificial Sequence
  ENSG00000100207_32 (sequence is synthesized)
ccagtaagagacagtcacaagatgtaaagaacagtagcactgaagataaaggtcgcctccttcactcatcaaaagaaggcgctgataaagcattcaattcctatgcccatctttctcaca

SEQ ID NO: 111915 - DNA, 120 bp, Artificial Sequence
  ENSG00000100207_33 (sequence is synthesized)
gtcaggatatcaagtctatccctaagagagattcctccaaggaccttccaagtccagatagtagaaactgccctgctgttaccctcacaagccctgctaagaccaaaatactgcccccac

SEQ ID NO: 111916 - DNA, 120 bp, Artificial Sequence
  ENSG00000100207_34 (sequence is synthesized)
ggaaaggacggggattgaaattggaagctatagttcagaagattacatccccaaatattaggaggagcgcatcttcgaacagtgcggaggctgggggagacacggttacgcttgatgata

SEQ ID NO: 111917 - DNA, 120 bp, Artificial Sequence
  ENSG00000100207_35 (sequence is synthesized)
tactgtctttgaagagtggtcctcctgaaggtgggagtgttgctgttcaggatgctgacatagagaagagaaaaggtgaggtggcttcggacctagtcagtccagcaaaccaggagttgc

SEQ ID NO: 111918 - DNA, 120 bp, Artificial Sequence
  ENSG00000100207_36 (sequence is synthesized)
acgtagagaaacctcttccaaggtcttcagaagagtggcgtggcagcgtggatgacaaagtgaagacagagacacatgcagaaacagttactgccggaaaggaaccccctggtgccatga

SEQ ID NO: 111919 - DNA, 120 bp, Artificial Sequence
  ENSG00000100207_37 (sequence is synthesized)
catccacaacctcacagaagcctggtagtaaccaagggagaccagatggttccctgggtggaacagcacctttaatctttccagactcaaagaatgtacctccagtgggcatattggccc

SEQ ID NO: 111920 - DNA, 120 bp, Artificial Sequence
  ENSG00000100207_38 (sequence is synthesized)
ctgaggcaaaccccaaggctgaagagaaggagaacgatacagtgacgatttcaccgaagcaagagggtttccctccaaagggatatttcccatcaggaaagaagaaggggagacccattg

SEQ ID NO: 111921 - DNA, 120 bp, Artificial Sequence
  ENSG00000100207_39 (sequence is synthesized)
gtagtgtgaataagcaaaagaaacagcagcagccaccgcctccaccccctcagcccccacagataccagaaggttctgcagatggagagccaaagccaaaaaaacagaggcaaaggaggg

SEQ ID NO: 111922 - DNA, 120 bp, Artificial Sequence
  ENSG00000100207_40 (sequence is synthesized)
agagaaggaagcctggggcccagccgaggaagcgaaaaaccaaacaagcagttcccattgtggaaccccaagaacctgagatcaaactaaaatatgccacccagccactggataaaactg

SEQ ID NO: 111923 - DNA, 120 bp, Artificial Sequence
  ENSG00000100207_41 (sequence is synthesized)
atgccaagaacaagtctttttacccttacatccatgtagtaaataagtgtgaacttggagccgtttgtacaatcatcaatgctgaggaagaagaacagaccaaattagtgaggggcagga

SEQ ID NO: 111924 - DNA, 120 bp, Artificial Sequence
  ENSG00000100207_42 (sequence is synthesized)
agggtcagaggtcactgacccctccacctagcagcactgaaagcaaggcgctcccggcctcgtcctttatgctgcagggacctgttgtgacagagtcttcggttatggggcacctggttt

SEQ ID NO: 111925 - DNA, 120 bp, Artificial Sequence
  ENSG00000100207_43 (sequence is synthesized)
gctgtctgtgtggcaagtgggccagttaccggaacatgggtgacctctttggacctttttatccccaagattatgcagccactctcccgaagaatccacctcctaagagggccacagaaa

SEQ ID NO: 111926 - DNA, 120 bp, Artificial Sequence
  ENSG00000100207_44 (sequence is synthesized)
tgcagagcaaagttaaggtacggcacaaaagtgcttctaatggctccaagacggacactgaggaggaggaagagcagcagcagcagcagaaggagcagagaagcctggccgcacacccca

SEQ ID NO: 111927 - DNA, 120 bp, Artificial Sequence
  ENSG00000100207_45 (sequence is synthesized)
ggtttaagcggcgccaccgctcggaagactgtggtggaggccctcggtccctgtccagggggctcccttgtaaaaaagcagccactgagggcagcagtgaaaagactgttttggactcga

SEQ ID NO: 111928 - DNA, 120 bp, Artificial Sequence
  ENSG00000100207_46 (sequence is synthesized)
agccctccgtgcccaccacttcagaaggtggccctgagctggagttacaaatccctgaactacctcttgacagcaatgaattttgggtccatgagggttgtattctctgggccaatggaa

SEQ ID NO: 111929 - DNA, 120 bp, Artificial Sequence
  ENSG00000100207_47 (sequence is synthesized)
tctacctggtttgtggcaggctctatggcctgcaggaagcgctggaaatagccagagagatgaaatgttcccactgccaggaggcaggcgccaccttgggctgctacaacaaaggctgct

SEQ ID NO: 111930 - DNA, 120 bp, Artificial Sequence
  ENSG00000100207_48 (sequence is synthesized)
ccttccgataccattacccgtgtgccattgatgcagattgtttgctacatgaggagaacttctcggtgaggtgccctaagcacaagcctccccttccgtgccctctcccccccttgcaga

SEQ ID NO: 111931 - DNA, 120 bp, Artificial Sequence
  ENSG00000100207_49 (sequence is synthesized)
acaagaccgcgaaaggcagcctcagcacagagcagtcggagcgggggtgaggggggcagtgtgctcgtgggaatggaaaggacagcaagcacaggtgagactgtggagatgagaaggtgg

SEQ ID NO: 111932 - DNA, 120 bp, Artificial Sequence
  ENSG00000100207_50 (sequence is synthesized)
tggacactcgtgatggaatggaaatcgtcctaccgtgcagccacaccctgccctgccccgccccgccccgcccgcgtgcctgcccatgccagcacttccttaagttctcacatcacactc

SEQ ID NO: 111933 - DNA, 120 bp, Artificial Sequence
  ENSG00000100207_51 (sequence is synthesized)
aaaccagtgacaccacaggaaagaaagacccaagacgttggaatggctgtttccatggacacaatctccatagtgacaatgtggggggaggggggaggggtgggatgatggggaaagggt

SEQ ID NO: 111934 - DNA, 120 bp, Artificial Sequence
  ENSG00000100207_52 (sequence is synthesized)
ggggggaattaaaagggagggataaatatatatatataaatctatttttagtctggaaagactttgtttaaatgaaaggtgcgctatcccttttgattctgttttaaaattatctcgtta

SEQ ID NO: 111935 - DNA, 120 bp, Artificial Sequence
  ENSG00000100207_53 (sequence is synthesized)
aagatctccaaatttgttccgatgacaagtgaaatttaaatgtgagattgaactgaacaaaccctcatctcatgaaggacggggtgtgtgtgtggcgttgatctttagcctgtctcacac

SEQ ID NO: 111936 - DNA, 120 bp, Artificial Sequence
  ENSG00000100207_54 (sequence is synthesized)
cagttcagaaaacactagacccaggattgaaaaagcaaaccacagcagaaccatccttttgtcattaatttgtctcaaagtgggaaggttttgggggagggggaaatacagggatggtcc

SEQ ID NO: 111937 - DNA, 120 bp, Artificial Sequence
  ENSG00000100207_55 (sequence is synthesized)
atgttttcaagagtaggggaatgatgtttaaacacaaaaataaattttttttcatttccagaaacactatttatttatggttttttttttttaattttttctttttgggggtgaaattgg

SEQ ID NO: 111938 - DNA, 120 bp, Artificial Sequence
  ENSG00000100207_56 (sequence is synthesized)
cagatgcctgaggtcatagctgtgtcctgggtcactgtggctggtgaggacctcaaggaccccatcaagtgtacacagcagcagcaaaatcaagggatgaccctcctctggggccccctg

SEQ ID NO: 111939 - DNA, 120 bp, Artificial Sequence
  ENSG00000100207_57 (sequence is synthesized)
tcctcagcacattccaggcagctgtgccctgacccacagggacccgtggggatgggaggaggtccaggcctgtgttgccagagctggcagtgtgagctgtaggcagggacggggagggac

SEQ ID NO: 111940 - DNA, 120 bp, Artificial Sequence
  ENSG00000100207_58 (sequence is synthesized)
tgtcgctgtgatcagagtgggttaagctgaccaggaacacccatttaacccctttttctttttgctttcatttttataaaggaaaagaggacctgtcagataggcagccccatgctacgt

SEQ ID NO: 111941 - DNA, 120 bp, Artificial Sequence
  ENSG00000100207_59 (sequence is synthesized)
gattctttatgttgtgttgttttgttttgtaaattgtataatttttaaatatctgagttttaaaaaaagaaaaaagtacaaaaaaatcttgttatggccttaagaaggggttagtgcatc

SEQ ID NO: 111942 - DNA, 120 bp, Artificial Sequence
  ENSG00000100207_60 (sequence is synthesized)
aatcttgttatggccttaagaaggggttagtgcatctttcaggggtcactctgccatggggataaaatagctgtttcacaaacagttttatttaaaaaaacaaaaaacaaaaaaaatcaa

SEQ ID NO: 111943 - DNA, 80 bp, Artificial Sequence
  ENSG00000100207_61 (sequence is synthesized)
ctccggagcccggccccgctgcccgggctctcctgcgggaccgatgccggccctccggccgccagggagggctgttggcc

SEQ ID NO: 111944 - DNA, 120 bp, Artificial Sequence
  ENSG00000100209_0 (sequence is synthesized)
agacgctctctttgcttttccccacgagtgaccacggctagataggccgccggccagatgtggcgggggagagccggggctttgctccgggtgtgggggttttggccgacaggggttccc

SEQ ID NO: 111945 - DNA, 120 bp, Artificial Sequence
  ENSG00000100209_1 (sequence is synthesized)
agaaggagaccgctaagctgcgatgctgcgtcgcaggcgggaagcaattatccccgctgttggaactgcggcggcccatggggccccgggcgggaggacaggttcttctgcccacagtgc

SEQ ID NO: 111946 - DNA, 120 bp, Artificial Sequence
  ENSG00000100209_2 (sequence is synthesized)
cgagcgctgcaggcacctgaccccactcgagactacttcagccttatggactgcaaccgttccttcagagttgatacagcgaagctccagcacaggtaccagcaactgcagcgtcttgtc

SEQ ID NO: 111947 - DNA, 120 bp, Artificial Sequence
  ENSG00000100209_3 (sequence is synthesized)
cacccagatttcttcagccagaggtctcagactgaaaaggacttctcagagaagcattcgaccctggtgaatgatgcctataagaccctcctggcccccctgagcagaggactgtacctt

SEQ ID NO: 111948 - DNA, 120 bp, Artificial Sequence
  ENSG00000100209_4 (sequence is synthesized)
tgaaaggacagattatgaaatggacaggcaattcctcatagaaataatggaaatcaatgaaaaactcgcagaagctgaaagtgaagctgccatgaaagagattgaatccattgtcaaagc

SEQ ID NO: 111949 - DNA, 120 bp, Artificial Sequence
  ENSG00000100209_5 (sequence is synthesized)
taaacagaaagaatttactgacaatgtgagcagtgcttttgaacaagatgactttgaagaagccaaggaaattttgacaaagatgagatacttttcaaatatagaagaaaagatcaagtt

SEQ ID NO: 111950 - DNA, 120 bp, Artificial Sequence
  ENSG00000100209_6 (sequence is synthesized)
agatgagatacttttcaaatatagaagaaaagatcaagttaaagaagattcccctttaattgtggatagtttaaagtttaaaaaataaagttcttgctgggcacagtggctcacacctgt

SEQ ID NO: 111951 - DNA, 61 bp, Artificial Sequence
  ENSG00000100209_7 (sequence is synthesized)
cccgtctctgtaggccgaggcaggagaatcgcttaaacccgtgaggtggaggttgcagtga

SEQ ID NO: 111952 - DNA, 88 bp, Artificial Sequence
  ENSG00000100209_8 (sequence is synthesized)
ggcgcgtgcctgtaatcccagctacttggtaggccgaggcaggagaatcgcttaaacccgtaactgcactccagcttgggcaacagag

SEQ ID NO: 111953 - DNA, 120 bp, Artificial Sequence
  ENSG00000100211_0 (sequence is synthesized)
gcggcaggaggcgggtgggtcaaggtaactctgggctacagagtccttgctgggggttcggggagcgcttggaccccggcttctgggacgcgtcaggagaagggagcactggctttgctt

SEQ ID NO: 111954 - DNA, 120 bp, Artificial Sequence
  ENSG00000100211_1 (sequence is synthesized)
tcatcaggccaaagatgcctttctttgggaatacgttcagtccgaagaagacacctcctcggaagtcggcatctctctccaacctgcattctttggatcgatcaacccgggaggtggagc

SEQ ID NO: 111955 - DNA, 120 bp, Artificial Sequence
  ENSG00000100211_2 (sequence is synthesized)
tgggcttggaatacggatccccgactatgaacctggcagggcaaagcctgaagtttgaaaatggccagtggatagcagagacaggggttagtggcggtgtggaccggagggaggttcagc

SEQ ID NO: 111956 - DNA, 120 bp, Artificial Sequence
  ENSG00000100211_3 (sequence is synthesized)
gccttcgcaggcggaaccagcagttggaggaagagaacaatctcttgcggctgaaagtggacatcttattagacatgctttcagagtccactgctgaatcccacttaatggagaaggaac

SEQ ID NO: 111957 - DNA, 120 bp, Artificial Sequence
  ENSG00000100211_4 (sequence is synthesized)
ttggggagtaggatgtggctgagtgctttttttttggccagactagcggattcagtcctggaagagagtatcatataatgagacccacaggcactggcacccttgggttggcaatagaag

SEQ ID NO: 111958 - DNA, 120 bp, Artificial Sequence
  ENSG00000100211_5 (sequence is synthesized)
gtgacatggaatggagaaaaccaagattccagatggggatagtaactagaaggtgcttcagatgcactgcctgcgggtgccagtctgaaaaccagaccgcacagaggcctggggctgctg

SEQ ID NO: 111959 - DNA, 120 bp, Artificial Sequence
  ENSG00000100211_6 (sequence is synthesized)
atgagctttttggtgctctccacacacaagctcgcaaacacacatgtcccagaatagctctgttgggttgtgttgggagaagcggctggagttcattctctcacccccttatgttggtgt

SEQ ID NO: 111960 - DNA, 120 bp, Artificial Sequence
  ENSG00000100211_7 (sequence is synthesized)
ttggcgtgtgacagcagttctacagagctctgtgttggggtcatggatgagcggctctcttggctcttaaaggcaggcctctctcttcttgcctttaaagaatcctccttcctcacacct

SEQ ID NO: 111961 - DNA, 120 bp, Artificial Sequence
  ENSG00000100211_8 (sequence is synthesized)
ggcctcctctggcttcagcttctcagcagcaagcaccagccttccacaacaacactatatttttatgctactttcctgtttgcactactacttttttattaaacgatgttaaataatctc

SEQ ID NO: 111962 - DNA, 120 bp, Artificial Sequence
  ENSG00000100211_9 (sequence is synthesized)
gcaggcggcaggaggcgggtgggtcaaggtaactctgggctacagagtccttgctgggggttcggggagcgcttggaccccggcttctgggacgcgtcagaatattatccagcaatgcaa

SEQ ID NO: 111963 - DNA, 120 bp, Artificial Sequence
  ENSG00000100211_10 (sequence is synthesized)
atgaacaaactataactacacacagctgcatggataaatgtcagaaacatgacgttgagtgtgagaagccagatgcaaacgaggactcactgtgcaattctgtgcatgtacagtggccag

SEQ ID NO: 111964 - DNA, 120 bp, Artificial Sequence
  ENSG00000100211_11 (sequence is synthesized)
gcaggagggcatcctttccgtccatatcattgctattgcggaaaacatttttgaactcttgtttgggaatgatcgtcagagcttgtttatccaagaacctaagaagacaatctcattatg

SEQ ID NO: 111965 - DNA, 86 bp, Artificial Sequence
  ENSG00000100211_12 (sequence is synthesized)
gcttgtttatccaagaacctaagaagacaatctcattatgatatttgaccccaaatatccaaaccgtcccacaggctagggtgcag

SEQ ID NO: 111966 - DNA, 120 bp, Artificial Sequence
  ENSG00000100211_13 (sequence is synthesized)
tgaggcaggtgatggggaagagaggcctagcttctccttttggggaggctccacctcgagtcacttaatccaacagatatctcctcaatgccagtttggccaggtacgttgctttgcatc

SEQ ID NO: 111967 - DNA, 120 bp, Artificial Sequence
  ENSG00000100211_14 (sequence is synthesized)
caaaccatagcaccaggatcgttagtagccacatgataaaatgtatgtcttcaagatttgaagacaatggcataaggtcagtgatccagctgcttgtacccctgactttttctgacccta

SEQ ID NO: 111968 - DNA, 120 bp, Artificial Sequence
  ENSG00000100211_15 (sequence is synthesized)
aaggtaactctgggctacagagtccttgctgggggttcggggagcgcttggaccccggcttctgggacgcgtcaggtcgccgtgaagatgattgcatgagatcgtgcgtgtgaacgtttg

SEQ ID NO: 111969 - DNA, 120 bp, Artificial Sequence
  ENSG00000100211_16 (sequence is synthesized)
ttgacagctgttacttgagtccgacagccctgggggccgtgcatctgcgtaacatggctacctctgaactccttgggggacacgtatatctttgagaatccgatgaaaaccagagattcc

SEQ ID NO: 111970 - DNA, 120 bp, Artificial Sequence
  ENSG00000100216_0 (sequence is synthesized)
gcttccggtgtcccctacagtcatggctgccgccgtcgctgctgccggtgcaggggaaccccagtccccggacgaattgctcccgaaaggcgacgcggagaagcctgaggaggagctgga

SEQ ID NO: 111971 - DNA, 120 bp, Artificial Sequence
  ENSG00000100216_1 (sequence is synthesized)
ggaggacgacgatgaggagctagatgagaccctgtcggagagactatggggcctgacggagatgtttccggagagggtccggtccgcggccggagccacttttgatctttccctctttgt

SEQ ID NO: 111972 - DNA, 120 bp, Artificial Sequence
  ENSG00000100216_2 (sequence is synthesized)
ggctcagaaaatgtacaggttttccagggcagccttgtggattgggaccacttcctttatgatcctggttcttcccgttgtctttgagacggagaagttgcaaatggagcaacagcagca

SEQ ID NO: 111973 - DNA, 120 bp, Artificial Sequence
  ENSG00000100216_3 (sequence is synthesized)
actgcagcagcggcagatacttctaggacctaacacagggctctcaggaggaatgccaggggctctaccctcacttcctggaaagatctagattgttattgctgtttgagctgtctcagt

SEQ ID NO: 111974 - DNA, 120 bp, Artificial Sequence
  ENSG00000100216_4 (sequence is synthesized)
gggataagtttgaaattcaagtgtttgaactgctgataatttggatttttttttttttttaactttggcacattgatctatctaaacctggtggggagaattatccccacattgtctcat

SEQ ID NO: 111975 - DNA, 120 bp, Artificial Sequence
  ENSG00000100216_5 (sequence is synthesized)
ggaaagactcaacttgcaactgtgccctccacactatccttacttctgtctccactctgataccagagtgcagccatgcagatggttattccagctctggtcacccgactcctttcacca

SEQ ID NO: 111976 - DNA, 120 bp, Artificial Sequence
  ENSG00000100216_6 (sequence is synthesized)
aattgctcctaactggaagatctcactttccccttgtggggtaggaaccgatgccagtgggagggatgtgcccctgaccattaacgactgttttttttttttttttttaaagaatggagt

SEQ ID NO: 111977 - DNA, 120 bp, Artificial Sequence
  ENSG00000100216_7 (sequence is synthesized)
tgttggggcaggacatgcacacaatgtgaaacagacaaaatgcattacacctgtagtgtaaagtggccactatgaatccctatgtatgagaggagggaggcaggctgcagcttcagccac

SEQ ID NO: 111978 - DNA, 120 bp, Artificial Sequence
  ENSG00000100216_8 (sequence is synthesized)
aatattaaaaatgattccaactgaaagtgtcatcctaagtaccttgaaatgagaccacgtcagagacatgtactgcccctcacattttctcacctaaaccagcagcacctccatcttaac

SEQ ID NO: 111979 - DNA, 120 bp, Artificial Sequence
  ENSG00000100216_9 (sequence is synthesized)
agccataggcccaaattgtttccaagtgaaaattcatttttagccaagtacttcatagcaatctttgccctgaatttaggcagtcactttgagatccatcagcctaaaacaaaggattgg

SEQ ID NO: 111980 - DNA, 120 bp, Artificial Sequence
  ENSG00000100216_10 (sequence is synthesized)
gtctatgtacttctttagtctataatgacactgtgtaattataaagtatttgtagggaataacatagtactgatttctggggaataggggagggggacagaatttttttttttttttttt

SEQ ID NO: 111981 - DNA, 120 bp, Artificial Sequence
  ENSG00000100216_11 (sequence is synthesized)
tgcctgagatcaggtctcactggagtacagtggtgtcgtttgggttcactgcaacctcttacctcccctccaacttggcctcctgggtagctaagactacaggtacacgccaccgtgccc

SEQ ID NO: 111982 - DNA, 120 bp, Artificial Sequence
  ENSG00000100216_12 (sequence is synthesized)
agctagtttcttttatttttggtagagtcagggtttcgccttgttgccccagatagtcttgaactcctgagttctagccatccacccgcctctggcccctcaaagtgctgggattatagg

SEQ ID NO: 111983 - DNA, 120 bp, Artificial Sequence
  ENSG00000100216_13 (sequence is synthesized)
cgtcacccaccacgcccagccagagtaagccttttgtgtgtttatcagatcaaccaacactacaatctaggtggtactgttcccattttacagaagaggaaacagccacagaaaggtaat

SEQ ID NO: 111984 - DNA, 120 bp, Artificial Sequence
  ENSG00000100216_14 (sequence is synthesized)
tgctcaaggctgcagagttaagtgctagacctggattcaaatccaggcagtccagctacagaacactgctgctgtgcgctcgggatggtggggctgggcccaggcccgctgggtatacat

SEQ ID NO: 111985 - DNA, 120 bp, Artificial Sequence
  ENSG00000100216_15 (sequence is synthesized)
gatctttcacttgttaactagggaaaaacactagtcaccagtgtggtacaaacttgtacttaggtggattcttcaaattgtcaagattagtttttataaattaaaatagactgaaaaatg

SEQ ID NO: 111986 - DNA, 120 bp, Artificial Sequence
  ENSG00000100216_16 (sequence is synthesized)
agcgaagcggctgctttgggaggcggggttaggggccctgctgggccctgggtgccctagctccagtggggctcggcggctcccagtgccgcagcggggccaggaatggatgtcgctttt

SEQ ID NO: 111987 - DNA, 120 bp, Artificial Sequence
  ENSG00000100218_0 (sequence is synthesized)
agtggcgcgggctactggaagcagaaagggctgcggaggcagtgagtggtttctgcagagcttcatttggaaaggcctctgtagttggggaaagatggcccattcccagaactccttgga

SEQ ID NO: 111988 - DNA, 120 bp, Artificial Sequence
  ENSG00000100218_1 (sequence is synthesized)
gcttcccattaacatcaatgccacccagattaccactgcctatggccatcgggccctgcccaagctgaaggaggagctgcagtcagaggacctccagacgaggcagaaagccctcatggc

SEQ ID NO: 111989 - DNA, 120 bp, Artificial Sequence
  ENSG00000100218_2 (sequence is synthesized)
cttgtgtgacctcatgcatgaccccgagtgtatctacaaggccatgaacataggctgtatggagaacctgaaagctttgctgaaggatagcaacagtatggtgcgcataaagaccaccga

SEQ ID NO: 111990 - DNA, 120 bp, Artificial Sequence
  ENSG00000100218_3 (sequence is synthesized)
ggtgctccacatcacggcaagccatagcgtgggcagatacgcctttctagagcacgacatcgtccttgccctgtccttcctgctgaatgaccccagcccagtctgccgggggaacctgta

SEQ ID NO: 111991 - DNA, 120 bp, Artificial Sequence
  ENSG00000100218_4 (sequence is synthesized)
ggagttccaggagttcatcctggacacactggtcctctgcctgcaggaggatgccaccgaggccctgggcagcaatgtggtgcttgtcctgaagcagaagctcctcagcgccaaccagaa

SEQ ID NO: 111992 - DNA, 120 bp, Artificial Sequence
  ENSG00000100218_5 (sequence is synthesized)
catccgcagcaaggccgcccgtgcgctccttaatgtcagcatatctcgagagggcaagaaacaggtgtgtcattttgacgtcatccccatcctggtccatctgctgaaagacccagtgga

SEQ ID NO: 111993 - DNA, 120 bp, Artificial Sequence
  ENSG00000100218_6 (sequence is synthesized)
gcatgtgaagtctaacgctgccggtgccctgatgttcgccacagtgatcactgaagggaagtatgcggccctggaggcacaagccatcggcctgctcctggagctgctgcactcccccat

SEQ ID NO: 111994 - DNA, 120 bp, Artificial Sequence
  ENSG00000100218_7 (sequence is synthesized)
gaccatagcgcgcctgaatgccaccaaggcccttaccatgctggcagaggcccccgagggccgcaaggccctgcagacgcacgtgcccactttccgtgccatggaggtggagacttacga

SEQ ID NO: 111995 - DNA, 120 bp, Artificial Sequence
  ENSG00000100218_8 (sequence is synthesized)
aaagcctcaagtggccgaagccttacagcgggcagcccggatcgccatcagtgtcatcgagttcaaaccctgagcccttcattcacctctgtgagtgaataaatgtgctaagtctcttta

SEQ ID NO: 111996 - DNA, 120 bp, Artificial Sequence
  ENSG00000100218_9 (sequence is synthesized)
cgggggaacctgtacaaggcatacatgcagctggtccaggtgcctagagcagaaaaccccaccattaacaagaggacactgcagaggcttatgtacaacacgtgtcccgcgaggctggcg

SEQ ID NO: 111997 - DNA, 120 bp, Artificial Sequence
  ENSG00000100218_10 (sequence is synthesized)
cacaaaaaagaccacctgaaaaaaaatatgttttgaaaatctgcatttaaaaaagaatactcaactgcatttgaaattttctggatttttttctgcgaaacaccacgagatttggccaaa

SEQ ID NO: 111998 - DNA, 120 bp, Artificial Sequence
  ENSG00000100218_11 (sequence is synthesized)
cattggataccaccagccagctttgccaaatctttacattctatatccatattttatacttgcttgaaatttttatttgaagaaatcataggtacagtccaagcaccctgtgaacctccc

SEQ ID NO: 111999 - DNA, 120 bp, Artificial Sequence
  ENSG00000100218_12 (sequence is synthesized)
cccacccagagcactcttcctcctgcctttccttgagctactaataatctggtgactatgtccccaaaatgcatatctttatattttaccacagatataattacatatggacgatatata

SEQ ID NO: 112000 - DNA, 120 bp, Artificial Sequence
  ENSG00000100218_13 (sequence is synthesized)
atcttgttttgcatgttttaaaactatgtaagtggatcttgctgtatgtatccctctgttacttccaaaaccttaaaaaacctaaataacattagagatttatagaaattttgagatgaa

SEQ ID NO: 112001 - DNA, 120 bp, Artificial Sequence
  ENSG00000100218_14 (sequence is synthesized)
gtgacaggaagggggaatgaggatagcagccctgggcttggcatcttgtcaccttgaggagttaatttgcatgacatcccacggacaagagagcttcctggcagcctgttccctgccctc

SEQ ID NO: 112002 - DNA, 120 bp, Artificial Sequence
  ENSG00000100218_15 (sequence is synthesized)
accaaggaagcccccgtggtcagggaagacccctgcaacttgtgtgtccaacggtgactttctttttccagacgattcaaaacacaccataagtgaaaataaataaataaataaaataaa

SEQ ID NO: 112003 - DNA, 120 bp, Artificial Sequence
  ENSG00000100219_0 (sequence is synthesized)
atggtggtggtggcagccgcgccgaacccggccgacgggacccctaaagttctgcttctgtcggggcagcccgcctccgccgccggagccccggccggccaggccctgccgctcatggtg

SEQ ID NO: 112004 - DNA, 120 bp, Artificial Sequence
  ENSG00000100219_1 (sequence is synthesized)
ccagcccagagaggggccagcccggaggcagcgagcggggggctgccccaggcgcgcaagcgacagcgcctcacgcacctgagccccgaggagaaggcgctgaggaggaaactgaaaaac

SEQ ID NO: 112005 - DNA, 120 bp, Artificial Sequence
  ENSG00000100219_2 (sequence is synthesized)
agagtagcagctcagactgccagagatcgaaagaaggctcgaatgagtgagctggaacagcaagtggtagatttagaagaagagaaccaaaaacttttgctagaaaatcagcttttacga

SEQ ID NO: 112006 - DNA, 120 bp, Artificial Sequence
  ENSG00000100219_3 (sequence is synthesized)
gagaaaactcatggccttgtagttgagaaccaggagttaagacagcgcttggggatggatgccctggttgctgaagaggaggcggaagccaaggggaatgaagtgaggccagtggccggg

SEQ ID NO: 112007 - DNA, 120 bp, Artificial Sequence
  ENSG00000100219_4 (sequence is synthesized)
ctccccatggattctggcggtattgactcttcagattcagagtctgatatcctgttgggcattctggacaacttggacccagtcatgttcttcaaatgcccttccccagagcctgccagc

SEQ ID NO: 112008 - DNA, 120 bp, Artificial Sequence
  ENSG00000100219_5 (sequence is synthesized)
ctggaggagctcccagaggtctacccagaaggacccagttccttaccagcctccctttctctgtcagtggggacgtcatcagccaagctggaagccattaatgaactaattcgttttgac

SEQ ID NO: 112009 - DNA, 120 bp, Artificial Sequence
  ENSG00000100219_6 (sequence is synthesized)
cacatatataccaagcccctagtcttagagataccctctgagacagagagccaagctaatgtggtagtgaaaatcgaggaagcacctctcagcccctcagagaatgatcaccctgaattc

SEQ ID NO: 112010 - DNA, 120 bp, Artificial Sequence
  ENSG00000100219_7 (sequence is synthesized)
attgtctcagtgaaggaagaacctgtagaagatgacctcgttccggagctgggtatctcaaatctgctttcatccagccactgcccaaagccatcttcctgcctactggatgcttacagt

SEQ ID NO: 112011 - DNA, 120 bp, Artificial Sequence
  ENSG00000100219_8 (sequence is synthesized)
gactgtggatacgggggttccctttccccattcagtgacatgtcctctctgcttggtgtaaaccattcttgggaggacacttttgccaatgaactctttccccagctgattagtgtctaa

SEQ ID NO: 112012 - DNA, 120 bp, Artificial Sequence
  ENSG00000100219_9 (sequence is synthesized)
tgttgcccttttccttgactattacactgcctggaggatagcagagaagcctgtctgtacttcattcaaaaagccaaaatagagagtatacagtcctagagaattcctctatttgttcag

SEQ ID NO: 112013 - DNA, 120 bp, Artificial Sequence
  ENSG00000100219_10 (sequence is synthesized)
atctcatagatgacccccaggtattgtcttttgacatccagcagtccaaggtattgagacatattactggaagtaagaaatattactataattgagaactacagcttttaagattgtact

SEQ ID NO: 112014 - DNA, 120 bp, Artificial Sequence
  ENSG00000100219_11 (sequence is synthesized)
tttatcttaaaagggtggtagttttccctaaaatacttattatgtaagggtcattagacaaatgtcttgaagtagacatggaatttatgaatggttctttatcatttctcttcccccttt

SEQ ID NO: 112015 - DNA, 120 bp, Artificial Sequence
  ENSG00000100219_12 (sequence is synthesized)
ttggcatcctggcttgcctccagttttaggtcctttagtttgcttctgtaagcaacgggaacacctgctgagggggctctttccctcatgtatacttcaagtaagatcaagaatcttttg

SEQ ID NO: 112016 - DNA, 120 bp, Artificial Sequence
  ENSG00000100219_13 (sequence is synthesized)
tgaaattatagaaatttactatgtaaatgcttgatggaattttttcctgctagtgtagcttctgaaaggtgctttctccatttatttaaaactacccatgcaattaaaaggtacaatgca

SEQ ID NO: 112017 - DNA, 120 bp, Artificial Sequence
  ENSG00000100219_14 (sequence is synthesized)
tgagtactggttccaagtgacatgacccagcgattatgtttacagtctggacttctgatcaagagcgttcttgaaattttccttcagttttaagacattttcatgcaggcagagtgttct

SEQ ID NO: 112018 - DNA, 120 bp, Artificial Sequence
  ENSG00000100219_15 (sequence is synthesized)
tcccctaaaggcacttgacactcattttttaagtgtgtagtgaacagtactaagatctaataatgaaaacaagttacatggctccctaagaacaagtactaacaaatgcagtagccaaca

SEQ ID NO: 112019 - DNA, 120 bp, Artificial Sequence
  ENSG00000100219_16 (sequence is synthesized)
agattaccatgcaatcattaaggagaaccaaagtaagagagccactcaaaccagattttgaacgctactaaaattaaagtagttctttgatgaatatgaatgagtagggaaaggattctt

SEQ ID NO: 112020 - DNA, 120 bp, Artificial Sequence
  ENSG00000100219_17 (sequence is synthesized)
tgtaatagtgatacctctgtggtaagagaagggtggtatgtgagttttagtctacagattatggcaaattcagtgacaacaatcaaatggtctaagattgacagtagcacagttttactc

SEQ ID NO: 112021 - DNA, 120 bp, Artificial Sequence
  ENSG00000100219_18 (sequence is synthesized)
tgtgaaggtaatgttcaggacaaatttcaagaaaactagaaaaccattctttacagctgaaatctttccctaaccattgttatttccacttttaagtcctcaagagatgagaaaagggag

SEQ ID NO: 112022 - DNA, 120 bp, Artificial Sequence
  ENSG00000100219_19 (sequence is synthesized)
gtaaggcttccttatacatttcctgcacaatgaaacatttttcctcctccaggcaaagattcaagcagaactggcaaatatcttatcttgctcttctcaataataataatgttgttagat

SEQ ID NO: 112023 - DNA, 120 bp, Artificial Sequence
  ENSG00000100219_20 (sequence is synthesized)
aataaagttctatagcaatttaaccctagaatctttttgaaaagtaattctttaaagttgagaatcacagctgtctagcaagcatttccttgggcacttgaagctgtttattcactttgg

SEQ ID NO: 112024 - DNA, 120 bp, Artificial Sequence
  ENSG00000100219_21 (sequence is synthesized)
cattgtatacccttccttggtgaatgttctgatatttgcttcccatcccaagttgtttcagcccctattagaatacaattgaatatatgattaaaagttaaactaggctgggcatggtgg

SEQ ID NO: 112025 - DNA, 120 bp, Artificial Sequence
  ENSG00000100219_22 (sequence is synthesized)
ccggactgaccggatccgccacgctgggaacctagggcggcccagggctcttttctgtactttttaactctctcgttagagatgaccagagctggggatgcgggcacctgtcttccaggc

SEQ ID NO: 112026 - DNA, 120 bp, Artificial Sequence
  ENSG00000100220_0 (sequence is synthesized)
gttcttggaaggcggtgctctgagaagccggactacgcggcagcggctcttcaaagcggagccgggagtttttgctacagttttcgccaccatgagtcgcagctataatgatgagctgca

SEQ ID NO: 112027 - DNA, 120 bp, Artificial Sequence
  ENSG00000100220_1 (sequence is synthesized)
gttcttggagaagatcaataaaaactgctggaggatcaagaagggcttcgtgcccaacatgcaggttgaaggtgttttctatgtgaatgatgctctggagaaattgatgtttgaggaatt

SEQ ID NO: 112028 - DNA, 120 bp, Artificial Sequence
  ENSG00000100220_2 (sequence is synthesized)
aaggaatgcctgtcgaggtggtggtgttggtggcttcctgccagccatgaaacagattggcaatgtggcagccctgcctggaattgttcatcgatctattgggcttcctgatgtccattc

SEQ ID NO: 112029 - DNA, 120 bp, Artificial Sequence
  ENSG00000100220_3 (sequence is synthesized)
aggatatgggtttgctattgggaacatggcagcctttgatatgaatgaccctgaagcagtagtatccccaggtggtgtcgggtttgacatcaactgtggtgtccgcttgctaagaaccaa

SEQ ID NO: 112030 - DNA, 120 bp, Artificial Sequence
  ENSG00000100220_4 (sequence is synthesized)
tttagatgaaagtgatgtccagcctgtgaaggagcaacttgcccaagctatgtttgaccacattcctgttggggtggggtcaaaaggtgtcatcccaatgaatgccaaagacttggagga

SEQ ID NO: 112031 - DNA, 120 bp, Artificial Sequence
  ENSG00000100220_5 (sequence is synthesized)
ggccttggagatgggggtggactggtccttaagagaagggtatgcctgggctgaagacaaggagcactgcgaggagtacggaaggatgctgcaggctgaccccaataaagtttctgcaag

SEQ ID NO: 112032 - DNA, 120 bp, Artificial Sequence
  ENSG00000100220_6 (sequence is synthesized)
ggcgaagaaaagaggccttcctcagttggggaccctgggagcaggcaaccattatgcagaaatccaggttgtggatgagattttcaatgagtatgctgctaaaaaaatgggcatcgacca

SEQ ID NO: 112033 - DNA, 120 bp, Artificial Sequence
  ENSG00000100220_7 (sequence is synthesized)
taagggacaggtgtgtgtgatgatccacagtggaagcagaggcttgggccaccaagtagccacagatgcgctggtagctatggagaaggccatgaagagagacaagattatagtcaatga

SEQ ID NO: 112034 - DNA, 120 bp, Artificial Sequence
  ENSG00000100220_8 (sequence is synthesized)
catgaccttcttaacccgtcaggctttcgccaaggtcttcaacacaacccctgatgacttggacctacatgtgatctatgatgtttctcacaacattgccaaagtggagcagcatgtggt

SEQ ID NO: 112035 - DNA, 120 bp, Artificial Sequence
  ENSG00000100220_9 (sequence is synthesized)
ggacggaaaggaacggacactgttagtacacaggaagggatccacccgcgctttccctcctcaccatcccctcattgctgttgattaccaactcactggacagccagtgctcattggtgg

SEQ ID NO: 112036 - DNA, 120 bp, Artificial Sequence
  ENSG00000100220_10 (sequence is synthesized)
caccatgggaacctgtagttatgttcttactggcactgaacagggcatgactgagacctttggaacaacctgtcatggagcgggccgtgcattgtcccgagcaaaatctcgacgtaattt

SEQ ID NO: 112037 - DNA, 120 bp, Artificial Sequence
  ENSG00000100220_11 (sequence is synthesized)
agatttccaggatgtcttagacaaattggcagatatgggaattgcgatccgtgttgcctcacccaaactggttatggaagaggctcctgagtcctataagaatgtgacagatgtggtaaa

SEQ ID NO: 112038 - DNA, 120 bp, Artificial Sequence
  ENSG00000100220_12 (sequence is synthesized)
tacctgccatgatgctggaatcagcaagaaagccattaaactgagaccaattgctgtgatcaaaggatagaaccttggacagcagggctgcctgacaccaccaaccctctctgaagtgga

SEQ ID NO: 112039 - DNA, 120 bp, Artificial Sequence
  ENSG00000100220_13 (sequence is synthesized)
agtggactgacatgctcttctgacatcagactcaaggcgggacaagttgcaaagtgtgcagctgtaactgctcacgccaaaatggctgatggggaggctgctgctttcaggggcccgtgc

SEQ ID NO: 112040 - DNA, 120 bp, Artificial Sequence
  ENSG00000100220_14 (sequence is synthesized)
ttgtaaaataaccttccaggaagaggcacattgcccacctttggaaagggaggaatatgccttctccttggttgttccacagagttttaggaaaatctgttagggatgggtagatgtcaa

SEQ ID NO: 112041 - DNA, 120 bp, Artificial Sequence
  ENSG00000100220_15 (sequence is synthesized)
actgccttacgcagtcatactgatctttagccatcagattgatcttcttcacaccaagctctgtttacattccgagaggtgtcatgaagaaagttctgttcaataaggttttggaatgtt

SEQ ID NO: 112042 - DNA, 120 bp, Artificial Sequence
  ENSG00000100220_16 (sequence is synthesized)
acttcctatgcagaggatcattgaagaagaaatggcaagaagtttaagggttagcactgagggggaggaagagaggacagcatagcccccaccacagtttaacattcatattctatcaga

SEQ ID NO: 112043 - DNA, 120 bp, Artificial Sequence
  ENSG00000100220_17 (sequence is synthesized)
taatgatgtctaatagggcatttatcattttatattggaattatttatatgactgcattcctcaaaaaaccagttactgagagcttaaactttgtatctgactcaaggcttggaacacag

SEQ ID NO: 112044 - DNA, 120 bp, Artificial Sequence
  ENSG00000100220_18 (sequence is synthesized)
agaggtagatgttgaaaatggatctattcggcagacatttttgaggtcttctttatgccagttaccatgttgggcacttggtagagggaatgaaatgcgatctattgggcttcctgatgt

SEQ ID NO: 112045 - DNA, 120 bp, Artificial Sequence
  ENSG00000100220_19 (sequence is synthesized)
ttccagtgcagtacacttgagagatgaggattgttcagttacttttcaggaagtagtaagaactgtttttttaagcatgaggtacagcccatttattggagacattagtcaaccgatgtt

SEQ ID NO: 112046 - DNA, 120 bp, Artificial Sequence
  ENSG00000100220_20 (sequence is synthesized)
tgaatggccatgcctgatagtggtgtcatttagacaatgacctttggacagccagacataaccatgaagccaggctcagtggctcatgccacccgcaacactttgagagaccaagatgga

SEQ ID NO: 112047 - DNA, 120 bp, Artificial Sequence
  ENSG00000100220_21 (sequence is synthesized)
aggattgcatgagcccaggaattcaagactagtctgggcaacatggcaagaccctgtctataccaaaaaaattagtcaggtgtgatgtcacatgcttgttgtcccagctacttagaatgc

SEQ ID NO: 112048 - DNA, 120 bp, Artificial Sequence
  ENSG00000100221_0 (sequence is synthesized)
acttcccgcgcccgctcgccgctgaccggagttgtctcctcctccgcagggccgcggccagagggctagaatccgcgccttccgagggagccgcgccctgcgggccccaccgtacccgag

SEQ ID NO: 112049 - DNA, 120 bp, Artificial Sequence
  ENSG00000100221_1 (sequence is synthesized)
gggatggagggctgcccccgaggcccccgcgcggctcgcggtcccacgcctgccggcccgcgctagctactcgactcgtgcgctaaatttatccgtcacccaggccttgtctcccgagtc

SEQ ID NO: 112050 - DNA, 120 bp, Artificial Sequence
  ENSG00000100221_2 (sequence is synthesized)
attggcgtcgtggttcaaaagaaatggaagaaaaggagcgatgtgaccgattgtgttcggtcctcctgctttgaggcctggcatttgcagagggaaacagcaagaaaatcgtggggattt

SEQ ID NO: 112051 - DNA, 120 bp, Artificial Sequence
  ENSG00000100221_3 (sequence is synthesized)
tggaggggggtgggagggaagggtggggaaacggaaacaaggtcttacattttatgtgtttttttaaattctgcactttgacagtggtagcaaaataaaagtaatccaaaagttattttt

SEQ ID NO: 112052 - DNA, 120 bp, Artificial Sequence
  ENSG00000100221_4 (sequence is synthesized)
ctattgagaagagagaagaggtgggttttatttttttccttttgattccaatcttttctcccagtgacaaagcataaatcatggacaccagagaataaggtggacctcaggaatccggaa

SEQ ID NO: 112053 - DNA, 120 bp, Artificial Sequence
  ENSG00000100221_5 (sequence is synthesized)
aagactgagaagcttacattcttcctctagagggaagagtggggtgtttatagccatctctggaacctaaaacaaaaaacatgagttgtgtgccatggaaaggagacaaggccaaatctg

SEQ ID NO: 112054 - DNA, 120 bp, Artificial Sequence
  ENSG00000100221_6 (sequence is synthesized)
aatcattggagctgccccaggcagcacccccacaaatctaccatgagaaacagcgcagggagctttgtgccctccacgccctcaataacgtcttccaggacagcaatgccttcacccggg

SEQ ID NO: 112055 - DNA, 120 bp, Artificial Sequence
  ENSG00000100221_7 (sequence is synthesized)
atacgctgcaagagattttccagaggttgtctccaaacaccatggtgacacctcacaagaagagcatgctgggaaatggcaactacgatgtgaatgtcattatggcagcacttcagacca

SEQ ID NO: 112056 - DNA, 120 bp, Artificial Sequence
  ENSG00000100221_8 (sequence is synthesized)
aaggctatgaagctgtttggtgggacaagcgcagggatgtcggtgtcattgccctcactaacgtcatgggcttcatcatgaatctgccctccagcctatgctggggtccactgaaactgc

SEQ ID NO: 112057 - DNA, 120 bp, Artificial Sequence
  ENSG00000100221_9 (sequence is synthesized)
ccctcaaaaggcagcactggatctgtgttcgagaggtgggaggggcctactacaacctcgactccaaactcaagatgcccgagtggattggaggcgagagcgagctcaggaagtttctaa

SEQ ID NO: 112058 - DNA, 120 bp, Artificial Sequence
  ENSG00000100221_10 (sequence is synthesized)
aacatcatttgcgaggaaagaactgtgaactcctgctggtggtaccagaagaggtagaggctcatcagagttggaggaccgatgtgtaacagttctgcccaacctccctctcgcctcagc

SEQ ID NO: 112059 - DNA, 120 bp, Artificial Sequence
  ENSG00000100221_11 (sequence is synthesized)
cccttcagtcctctgtgacgtgctgtggcctctacagtgggtctgcccttgccacttccccaaacatctcatcaagtttttccccttcagatctgacagtgcaataggacagacgtgtgg

SEQ ID NO: 112060 - DNA, 120 bp, Artificial Sequence
  ENSG00000100221_12 (sequence is synthesized)
actgttataagaactactcagtgttttgttcctgggcaaggaaggtaggagttctgtgcacttaaggccagtggtcacaaacccttgttttatttaagagacagaggagaaagtggagcg

SEQ ID NO: 112061 - DNA, 120 bp, Artificial Sequence
  ENSG00000100221_13 (sequence is synthesized)
gggagggaatcctagcttattttcccttttctatgaggacttgacacaggttctgctgagttgtcactgctgctccagactcacctagagatgctgcctccactttccatcctgtctggg

SEQ ID NO: 112062 - DNA, 120 bp, Artificial Sequence
  ENSG00000100221_14 (sequence is synthesized)
tctgaaaacagtgggtctgcagatagtgcccacaaaccccatgtgactggtttgaaggacccagagcataaaggtctctcaggaaaccatgtccaaaaccctagcagcggtacagcatgc

SEQ ID NO: 112063 - DNA, 120 bp, Artificial Sequence
  ENSG00000100221_15 (sequence is synthesized)
caggcgtgagccaccgcacccggcagagttttataatgaaaaattaactaatattctagtatgaagtgaggaggatactgaacaggatgtggctaaagccaacctgggacagccatgggg

SEQ ID NO: 112064 - DNA, 120 bp, Artificial Sequence
  ENSG00000100221_16 (sequence is synthesized)
aacaggatgtggctaaagccaacctgggacagccatggggtggcttggtttcttcactccagtgttgtccctaccatttcgcagcattgatttaggaggctctgggacaaaagagaagcc

SEQ ID NO: 112065 - DNA, 120 bp, Artificial Sequence
  ENSG00000100221_17 (sequence is synthesized)
aaagagcagttttcccagttcactcactctggcaaaatcaggaaaaaaaagtctgcttttgacatcaaattccactaatttggggcagcgttgggtgaggaaagtattgtgaagacaggc

SEQ ID NO: 112066 - DNA, 120 bp, Artificial Sequence
  ENSG00000100221_18 (sequence is synthesized)
ttcttggagtaggggcagccacaattcagtagacactctaggctcggaggctgccactgtagttgccaagctcaggttgggtggttctgtgctgtatggatggaataggacctgggctgg

SEQ ID NO: 112067 - DNA, 120 bp, Artificial Sequence
  ENSG00000100221_19 (sequence is synthesized)
tcatcttcatgtcgtttcctctctgtatcaatggaagttcaacccgcccctacctcttcagatagttgtaggccacttttctcttgtaactttggaaaacaaaagaggagaaataagtat

SEQ ID NO: 112068 - DNA, 120 bp, Artificial Sequence
  ENSG00000100221_20 (sequence is synthesized)
cataccatatgcgtgtctccaaagtggatgtggttgcctcaaggcaggtggcaggcaggggtgacctgctggccctcagatcaatggtcgtggcaggtctgagagctgtcccactggcca

SEQ ID NO: 112069 - DNA, 120 bp, Artificial Sequence
  ENSG00000100221_21 (sequence is synthesized)
gacttctctccagcagcaaagccagcctggggcttgcatgttgatcctgagcaagcttaacggggtgaagctgggctttctcccccctgtgactggagtgcatgttgacaccagcacttt

SEQ ID NO: 112070 - DNA, 120 bp, Artificial Sequence
  ENSG00000100221_22 (sequence is synthesized)
ttctgcacatgtatcttcaatccaacaaggccgtttttttaatgctgagtaacaggccaccaagcggctactgcgttatatcttctcagcaactggccgcagtctcttctgcaccatttt

SEQ ID NO: 112071 - DNA, 120 bp, Artificial Sequence
  ENSG00000100221_23 (sequence is synthesized)
ctacaccagacctgcttggcaccacagggagctcttttcctgccctgcacaatgacattccaaccaccaccagccagacattacagccaaccttgctgattgtcacaagcaggaccttgg

SEQ ID NO: 112072 - DNA, 120 bp, Artificial Sequence
  ENSG00000100221_24 (sequence is synthesized)
ggccactggcactgtcagatagtaagccatttcttgggtagaggaggaaactcctctccacaaatccacttgggcctgtgcaaatggcacttgaaagagtccccatgcacttggagtcca

SEQ ID NO: 112073 - DNA, 120 bp, Artificial Sequence
  ENSG00000100221_25 (sequence is synthesized)
tgagccaatgggatatgcaaagacgcttaaacatttcagggctggtttctctgttcatatccaattctggtgcttaggaacagggacccatgctgatgcccaagggcaaaaagccccact

SEQ ID NO: 112074 - DNA, 120 bp, Artificial Sequence
  ENSG00000100221_26 (sequence is synthesized)
tcctttaaggaagtgaacaggcctgaccctgatgcccaataacgggcaaccctaggctttttgtttttcttgcttttattcctttttgttgttggccttgtgctgcgtttgtttacaaaa

SEQ ID NO: 112075 - DNA, 120 bp, Artificial Sequence
  ENSG00000100221_27 (sequence is synthesized)
gatgtattttgtttaaccaaatattaaaaatggaaaactccatatatgtctccttgtctgcctgaattctataattgtgtaaagaaaaataaactttagtatgacgctgttttaaaagga

SEQ ID NO: 112076 - DNA, 80 bp, Artificial Sequence
  ENSG00000100221_28 (sequence is synthesized)
ccagttggcggcgcgcactccaggtggcggccggctgcggtgaggggaccgccagcggcgagcagtcccggcggccctgg

SEQ ID NO: 112077 - DNA, 120 bp, Artificial Sequence
  ENSG00000100221_29 (sequence is synthesized)
gaggacggcgcgggagggcgtttccggagcacgcgccgggcgggggccgctgacgtcgggctcagtgacaaagcataaatcatggacaccagagaataaggtggacctcaggaatccgga

SEQ ID NO: 112078 - DNA, 120 bp, Artificial Sequence
  ENSG00000100221_30 (sequence is synthesized)
atgaagctgtttggtgggacaagcgcaggtaatctgaatcaggcttgacttgatggagaacagcacggttgtggtataagcttttagtacttgggctcatggcatgagtggggaggtagc

SEQ ID NO: 112079 - DNA, 120 bp, Artificial Sequence
  ENSG00000100221_31 (sequence is synthesized)
aaccacacataaaacagtcaacgcagaaggagcgagaacgttcggccgaaaagcccggcacagagaagggaggggtgctgaaagccgcggactgcagccgctggcctggctgccgccccg

SEQ ID NO: 112080 - DNA, 120 bp, Artificial Sequence
  ENSG00000100221_32 (sequence is synthesized)
agttggcggcgcgcactccaggtggcggccggctgcggtgaggggaccgccagcggcgagcagtcccggcggccctgggtgacaaagcataaatcatggacaccagagaataaggtggac

SEQ ID NO: 112081 - DNA, 120 bp, Artificial Sequence
  ENSG00000100221_33 (sequence is synthesized)
acttgaaatgtgactcccagcgagacacctacccttgacgctccctggacagtgcggcacggtcgggcccactaaccaaggcaatttgcgcccgaccgaatcaggtgcttcaaaatcccc

SEQ ID NO: 112082 - DNA, 120 bp, Artificial Sequence
  ENSG00000100225_0 (sequence is synthesized)
gctctattccagagaccgagtggcagggcggccactgtggcggggctctttccccgtttcgcctcagctacccctcagctccggtagtcgccagtccggggtcgtcgccgtttggggcgg

SEQ ID NO: 112083 - DNA, 120 bp, Artificial Sequence
  ENSG00000100225_1 (sequence is synthesized)
gagctgctcggccccgccgccgtccccgtcgccgcttccgggtccaggcccctcgggccgcctgccgccgtcatgaggctgcgggtgcggcttctgaagcggacctggccgctggaggtg

SEQ ID NO: 112084 - DNA, 120 bp, Artificial Sequence
  ENSG00000100225_2 (sequence is synthesized)
cccgagacggagccgacgctggggcatttgcgctcgcacctgaggcagtccctgctgtgcacctgggggtacagttctaatacccgatttacaattacattgaactacaaggatcccctc

SEQ ID NO: 112085 - DNA, 120 bp, Artificial Sequence
  ENSG00000100225_3 (sequence is synthesized)
actggagatgaagagaccttggcttcatatgggattgtttctggggacttgatatgtttgattcttcaagatgacattccagcgcctaatataccttcatccacagattcagagcattct

SEQ ID NO: 112086 - DNA, 120 bp, Artificial Sequence
  ENSG00000100225_4 (sequence is synthesized)
tcactccagaataatgagcaaccctctttggccaccagctccaatcagactagcatgcaggatgaacaaccaagtgattcattccaaggacaggcagcccagtctggtgtttggaatgac

SEQ ID NO: 112087 - DNA, 120 bp, Artificial Sequence
  ENSG00000100225_5 (sequence is synthesized)
gacagtatgttagggcctagtcaaaattttgaagctgagtcaattcaagataatgcgcatatggcagagggcacaggtttctatccctcagaacccatgctctgtagtgaatcggtggaa

SEQ ID NO: 112088 - DNA, 120 bp, Artificial Sequence
  ENSG00000100225_6 (sequence is synthesized)
gggcaagtgccacattcattagagaccttgtatcaatcagctgactgttctgatgccaatgatgccttgatagtgttgatacatcttctcatgttggagtcaggttacatacctcagggc

SEQ ID NO: 112089 - DNA, 120 bp, Artificial Sequence
  ENSG00000100225_7 (sequence is synthesized)
accgaagccaaagcactgtccatgccggagaagtggaagttgagcggggtgtataagctgcagtacatgcatcctctctgcgagggcagctccgctactctcacctgtgtgcctttggga

SEQ ID NO: 112090 - DNA, 120 bp, Artificial Sequence
  ENSG00000100225_8 (sequence is synthesized)
tacactaaaaatcaacaatgagattagaagtgtgaaaagattgcagctgctaccagaatcttttatttgcaaagagaaactaggggaaaatgtagccaacatatacaaagatcttcagaa

SEQ ID NO: 112091 - DNA, 120 bp, Artificial Sequence
  ENSG00000100225_9 (sequence is synthesized)
actctctcgcctctttaaagaccagctggtgtatcctcttctggcttttacccgacaagcactgaacctaccagatgtatttgggttggtcgtcctcccattggaactgaaactacggat

SEQ ID NO: 112092 - DNA, 120 bp, Artificial Sequence
  ENSG00000100225_10 (sequence is synthesized)
cttccgacttctggatgttcgttccgtcttgtctttgtctgcggtttgtcgtgacctctttactgcttcaaatgacccactcctgtggaggtttttatatctgcgtgattttcgagacaa

SEQ ID NO: 112093 - DNA, 120 bp, Artificial Sequence
  ENSG00000100225_11 (sequence is synthesized)
tactgtcagagttcaagacacagattggaaagaactgtacaggaagaggcacatacaaagaaaagaatccccgaaagggcggtttgtgatgctcctgccatcgtcaactcacaccattcc

SEQ ID NO: 112094 - DNA, 120 bp, Artificial Sequence
  ENSG00000100225_12 (sequence is synthesized)
attctatcccaaccccttgcaccctaggccatttcctagctcccgccttcctccaggaattatcgggggtgaatatgaccaaagaccaacacttccctatgttggagacccaatcagttc

SEQ ID NO: 112095 - DNA, 120 bp, Artificial Sequence
  ENSG00000100225_13 (sequence is synthesized)
actcattcctggtcctggggagacgcccagccagtttcctccactgagaccacgctttgatccagttggcccacttccaggacctaaccccatcttgccagggcgaggcggccccaatga

SEQ ID NO: 112096 - DNA, 120 bp, Artificial Sequence
  ENSG00000100225_14 (sequence is synthesized)
cagatttccctttagacccagcaggggtcggccaactgatggccggctgtcattcatgtgattgatttgtaatttcatttctggagctccatttgtttttgtttctaaactacagatgtc

SEQ ID NO: 112097 - DNA, 120 bp, Artificial Sequence
  ENSG00000100225_15 (sequence is synthesized)
aactccttggggtgctgatctcgagtgttattttctgattgtggtgttgagagttgcactcccagaaaccttttaagagatacatttatagccctaggggtggtatgacccaaaggttcc

SEQ ID NO: 112098 - DNA, 120 bp, Artificial Sequence
  ENSG00000100225_16 (sequence is synthesized)
tctgtgacaaggttggccttgggaatagttggctgccaatctccctgctcttggttctcctctagattgaagtttgttttctgatgctgttcttaccagattaaaaaaaagtgtaaatta

SEQ ID NO: 112099 - DNA, 120 bp, Artificial Sequence
  ENSG00000100225_17 (sequence is synthesized)
ggggggccttcacgggaggcccgggctcttccgggcgtcgcggagccggagggtgcaggcgacgggaagcgcgggtggtcggctggggtccggctcctggagaacatggcccggcctccc

SEQ ID NO: 112100 - DNA, 120 bp, Artificial Sequence
  ENSG00000100225_18 (sequence is synthesized)
tatttaacttttggggtgaaactctgtgaaattcatataagaaaaaaatctgaaagataatgttcaaaagactgaaaatttctatatgagattaaagcatattgaagacaatgtggtttg

SEQ ID NO: 112101 - DNA, 120 bp, Artificial Sequence
  ENSG00000100225_19 (sequence is synthesized)
tttaagaatgcaaaggtttaaaaaatgtgaaagttttgcttataatttgaggagtttgtttctttcctgtttttcttagggtcatagtgtgctgaattatattgttatgagataacacta

SEQ ID NO: 112102 - DNA, 120 bp, Artificial Sequence
  ENSG00000100225_20 (sequence is synthesized)
gtatgtaatttattacactctgatgatagttcatagtttctgtactaatctttggagatctccctattgagatctccatattggtatttaaccaatatggaggggatctgtgtttcatga

SEQ ID NO: 112103 - DNA, 120 bp, Artificial Sequence
  ENSG00000100225_21 (sequence is synthesized)
aagtaattcaatgtcaagttcattattgaagattattggaggaaaaactacaatcaaaatgtttgtttaaacctatataaatttgatggctattttatacagattgatactttaccaaag

SEQ ID NO: 112104 - DNA, 120 bp, Artificial Sequence
  ENSG00000100225_22 (sequence is synthesized)
gtttgcattctaggtaaggttttgcttaaactctataaaattattaatagatacaaagaagacaggttttcccttttatcatttttcagttaaaccaaactgtgagaggcagttataggt

SEQ ID NO: 112105 - DNA, 120 bp, Artificial Sequence
  ENSG00000100225_23 (sequence is synthesized)
ggttggagcagaagagataaggtggagaggggaactgacattttttaagtgcctgtttcattctgtacttgtgcctgtacatatgttattccatttaatcttcttagtaaacttaggagg

SEQ ID NO: 112106 - DNA, 120 bp, Artificial Sequence
  ENSG00000100225_24 (sequence is synthesized)
gttttaagagcctagtgggaatgttgtggtacaatgggaagatggcatttatagcagtcctttaggaaaggctggctagattgacattgttgctttgaaggcctaaaggcttattcttgt

SEQ ID NO: 112107 - DNA, 120 bp, Artificial Sequence
  ENSG00000100225_25 (sequence is synthesized)
tcattcctaggggagatcagccctgagagattgacttatactaactaaaactgacaggaaaaggagatagcagaatacatatttataacggtctctgattggatgtagagtcagaaattg

SEQ ID NO: 112108 - DNA, 86 bp, Artificial Sequence
  ENSG00000100225_26 (sequence is synthesized)
attgggaattagctgaattgaaaggctggagtgccgtggcgctatctcggctcacttcaacttccacctcctgggttcaagcaatt

SEQ ID NO: 112109 - DNA, 120 bp, Artificial Sequence
  ENSG00000100225_27 (sequence is synthesized)
ttacaggcatgagccactgcgcccgaccgagttgaacatttaatgtcagactaggccagagtttctcaatctttttattctcacttcccaaaggagccgttggagattttcccctcaatc

SEQ ID NO: 112110 - DNA, 120 bp, Artificial Sequence
  ENSG00000100225_28 (sequence is synthesized)
tcacttcccaaaggagccgttggagattttcccctcaatctctctccttcatgaaatttcataccacaaatatagtatgttttatttatgtactgtgaccctttgaaggatcacaaacca

SEQ ID NO: 112111 - DNA, 120 bp, Artificial Sequence
  ENSG00000100225_29 (sequence is synthesized)
atataatagtttttctttttaacccgtcaaggaccagtttttgcccctgttggaaatgcataaactggactgatgaattggtatagatggcttttatcatgaggatcagaaaaacttgaa

SEQ ID NO: 112112 - DNA, 120 bp, Artificial Sequence
  ENSG00000100225_30 (sequence is synthesized)
attccttggctacgacactccatatttatcaccgtatagggaggaccttgttatggggagtagaaacactctacactttacagcagtagaggttttatgcccattttatagatcaggaaa

SEQ ID NO: 112113 - DNA, 120 bp, Artificial Sequence
  ENSG00000100225_31 (sequence is synthesized)
cagatctagaggaggctcacttacttaagggtcacagagccaataaatggtgaaatacaggataggaatagatttggctgactcccagccttttaaaacaacttttacaggaatgtagct

SEQ ID NO: 112114 - DNA, 120 bp, Artificial Sequence
  ENSG00000100225_32 (sequence is synthesized)
cagattgttattctttatctggtttctcttaaataaagaaaaatgaaatggaagggaggaggaacattaaatactgttaaattacaagtttatggactgttataatgaagtatttttaat

SEQ ID NO: 112115 - DNA, 120 bp, Artificial Sequence
  ENSG00000100225_33 (sequence is synthesized)
aaagtcttatgttgagtaggaatatgctgctcatttggcaagtcattttaatgaatttttactgtggttcatagcacctagtaactataactaggcactgttatttatccttttatttat

SEQ ID NO: 112116 - DNA, 120 bp, Artificial Sequence
  ENSG00000100225_34 (sequence is synthesized)
aagttcctaattaaatagttacataccaggttgctgaaggaaaacattcatttaaagaaaatcaattttcacatttgaaaaaagcccttgagccaaattgattttaaagaatgatatctt

SEQ ID NO: 112117 - DNA, 120 bp, Artificial Sequence
  ENSG00000100225_35 (sequence is synthesized)
gacagcaaatttcaactcaagattgcaagtcacacaacaaagatttagacattagctgcatatctctttccttcttcttatcgatcctgttatactgagtgttttatttgttatagatag

SEQ ID NO: 112118 - DNA, 120 bp, Artificial Sequence
  ENSG00000100225_36 (sequence is synthesized)
tgaaatacataaatatgaaatggggaaggagcaagcataaattgcctactgataccctaggcactgctcgtggagctttcaattataacaacgcttatctggtgtagtggtggtgtctcc

SEQ ID NO: 112119 - DNA, 120 bp, Artificial Sequence
  ENSG00000100225_37 (sequence is synthesized)
tttaaacagttgagcaaaaaggtgaggatcagaggggcaggttatttgtccaaggctatacacttggtaaatagcaaaacaagtgggaacctcggctgcagtttgctagtgcgtccgtac

SEQ ID NO: 112120 - DNA, 120 bp, Artificial Sequence
  ENSG00000100225_38 (sequence is synthesized)
tttactatgagtcacctggggatcttattaaaatataggttctgatttggtaggtctgtgggggcctgagattcagtagttctaaacagttccaggtattgtcagttctggtgatctgtc

SEQ ID NO: 112121 - DNA, 120 bp, Artificial Sequence
  ENSG00000100225_39 (sequence is synthesized)
ttgagccacacggacttgggtttgtgcactgttctgccactaaccatggggccttggacaggctttctgtaccttgacctgtttttaaaatggagatagtaattaggaaagaacttctga

SEQ ID NO: 112122 - DNA, 120 bp, Artificial Sequence
  ENSG00000100225_40 (sequence is synthesized)
tgtgaaagcttgaaaaacgcttgacacaggtgctgatacatagtcatcatgcgataaatgctattaatttaccaggttctaagcgttaacaggagcagttctccactgtatccttagtgc

SEQ ID NO: 112123 - DNA, 120 bp, Artificial Sequence
  ENSG00000100225_41 (sequence is synthesized)
ccagaacagattgatagctatcaggaaatcttcgtatgtatgaatctctcacaagtcttttctacaactgcagcctatgagctagagaggttgggcacagctctactaatttgatatcat

SEQ ID NO: 112124 - DNA, 120 bp, Artificial Sequence
  ENSG00000100225_42 (sequence is synthesized)
ggaatttttagcttttatatctaagattcagtttcatcaagtcttgcactgtacttcttccatgagggaatttggttcatgcttatctttgtgaattatttgtgaatatttattcaccat

SEQ ID NO: 112125 - DNA, 120 bp, Artificial Sequence
  ENSG00000100225_43 (sequence is synthesized)
gttgattgggtttggcagaaatagaggacagttttttcacttgattttgggttttgattttactttaaaaaatattctaggggaaaatgtagccaacatatacaaagatcttcagaaact

SEQ ID NO: 112126 - DNA, 120 bp, Artificial Sequence
  ENSG00000100225_44 (sequence is synthesized)
ctctcgcctctttaaagaccagctggtgtatcctcttctggcttttacccgacaaggtaagagatgaaatactgtcacaatttaaatgactgtaaagaatagtaagtatacttaatattc

SEQ ID NO: 112127 - DNA, 120 bp, Artificial Sequence
  ENSG00000100225_45 (sequence is synthesized)
ttggtgagtatgacatctgactgccctcttttctgctcctggcgaaatgttcctcttctaagactaagcttaatattccttaagtgctatttactttatctttgtatctccatgccattt

SEQ ID NO: 112128 - DNA, 120 bp, Artificial Sequence
  ENSG00000100225_46 (sequence is synthesized)
tgtacatatttttattgtagtctcttttccatggactataattgttgatatgatttctttccacctaaggttgggaataccttgaaggtagggaatatatcttacttttgtattcttgtg

SEQ ID NO: 112129 - DNA, 120 bp, Artificial Sequence
  ENSG00000100225_47 (sequence is synthesized)
tgtggtctagcatgaggtcaggtacataatagatgctctttctctctgtgtagatacatatatatatgtctatatagacatatatttagatatatatgtctatatagacatatatttaga

SEQ ID NO: 112130 - DNA, 120 bp, Artificial Sequence
  ENSG00000100225_48 (sequence is synthesized)
tatgtctatatagacatatataaataatacatggtctgtaattggatctaagtttttttttttaaaccatttattggaggctctttgcaggcacttagttggatatttcacatgcattct

SEQ ID NO: 112131 - DNA, 120 bp, Artificial Sequence
  ENSG00000100225_49 (sequence is synthesized)
tatttactgctaatgacttcgaagtaaattatgtggtacttattttatagatgatgaaatcataattcaataaggtttataattcactcgagatccttatattagcttctcatttttttg

SEQ ID NO: 112132 - DNA, 120 bp, Artificial Sequence
  ENSG00000100225_50 (sequence is synthesized)
cagttaaaaaaattaaaatctcagtgtcttacagtgaaatttacttctcactcgtgtacatgttgtgtgtgggtttgctttggctgaaggagttgtctttatccaggacatgctcctctt

SEQ ID NO: 112133 - DNA, 120 bp, Artificial Sequence
  ENSG00000100225_51 (sequence is synthesized)
gtagtagaaggaaaggagtgccagtggcccaattatgtgttggttcaacgcttttgcccagaaattatatatgtcacttccactcacgttttgtcagaaaaaataagacaaaaatggcca

SEQ ID NO: 112134 - DNA, 120 bp, Artificial Sequence
  ENSG00000100225_52 (sequence is synthesized)
agcctgatggtggtgggatggggaagtataattatgcgtaggaagtgattgagaaccataatacaatctaccacaattctccaactagtaggtagtttgacttatatgaatagatagtgg

SEQ ID NO: 112135 - DNA, 120 bp, Artificial Sequence
  ENSG00000100225_53 (sequence is synthesized)
cttttatttgctctctatatgtagagaaataagtaaaacgtttttggtgtcaagttgaatggtggcatgtctattattacagtagtcttctctgtagttggtgataagggaaagggagta

SEQ ID NO: 112136 - DNA, 120 bp, Artificial Sequence
  ENSG00000100225_54 (sequence is synthesized)
atgccaattgaaaaacatgtagatatgtctgttggattttgattatttttgctagtggagaatagtatcacaaatattttgaaggtgctaataaccaaaacataattttcattgaacttg

SEQ ID NO: 112137 - DNA, 120 bp, Artificial Sequence
  ENSG00000100225_55 (sequence is synthesized)
ggacatattatttttcctttcctttcttggctttgtttctgaatttatctatctctttttagcctgctagacttcagataatagtaatttgctaacacttgagtgcttatgcttggtgtg

SEQ ID NO: 112138 - DNA, 120 bp, Artificial Sequence
  ENSG00000100225_56 (sequence is synthesized)
ccaaacattgttctaagcacttaatatgtgttaatacatttacttctcacaactcattgaagtaggtggaatgtaatattaatccattttacagatgaaattaagatagcatttaaataa

SEQ ID NO: 112139 - DNA, 120 bp, Artificial Sequence
  ENSG00000100225_57 (sequence is synthesized)
cttgtccaaaggcacacagttaataactggcatggaaacagatataaaagccagtgaattattcattttctgtagttgaatgaagaaattttgttgtattgaataatgtttgagacagaa

SEQ ID NO: 112140 - DNA, 120 bp, Artificial Sequence
  ENSG00000100225_58 (sequence is synthesized)
gagaccattggctagtatttagcaattatcatagttatttgatttatattaaaaagcatttgtctttccactaaaacataaagggaataagggcctagagttatatgagttaatagtaat

SEQ ID NO: 112141 - DNA, 120 bp, Artificial Sequence
  ENSG00000100225_59 (sequence is synthesized)
tatagtcaagctggggttaaaaatttgttgtagatgatgcatacttggggataattaagagtaccatctaattttctgtcactttagaaaggaacaagtggcaactttgttgactatgtg

SEQ ID NO: 112142 - DNA, 120 bp, Artificial Sequence
  ENSG00000100225_60 (sequence is synthesized)
cgcgctctcaggcagcgccgttgcgcgcggagtcatcgatcggccgaccccgagaggcccggttcctttaggccgcctgcccgcctccagctctcggggtcggctccaggaggcgccctc

SEQ ID NO: 112143 - DNA, 120 bp, Artificial Sequence
  ENSG00000100225_61 (sequence is synthesized)
tgaagaggagtcagtcatttgaagatctggaagaacaaacggagaggcccgaaggctgcaatgaagttgatctgctttttggaacggatggaaagctcatgtgaatagagaacagtgaga

SEQ ID NO: 112144 - DNA, 120 bp, Artificial Sequence
  ENSG00000100225_62 (sequence is synthesized)
agttaaaaatctgccctcaatccgaggccaccggtagcttgtatcgctgctgtgaagcggcaacaattttagattctgttgtgttcatgcgccgagcaccgcggtgagcgcttggacttc

SEQ ID NO: 112145 - DNA, 120 bp, Artificial Sequence
  ENSG00000100225_63 (sequence is synthesized)
gccgccgaaaagttttagaaaggacagcgtgtaggcgtgtttcagaccatttcattttcttgggtgaaatgttgcttttttgctaaaactgaggcaaacgttgatcttgagagcttgcag

SEQ ID NO: 112146 - DNA, 120 bp, Artificial Sequence
  ENSG00000100225_64 (sequence is synthesized)
tttgggggcagtaaagttgagaaaggatcatattctgttattggtttgtgggactgcaggtgaagctgctttgtttccctaaaagatactttttggggacaataatttgggagtaaagcg

SEQ ID NO: 112147 - DNA, 120 bp, Artificial Sequence
  ENSG00000100225_65 (sequence is synthesized)
tatatttatcctttgggtctggaagagagatgatgctgtgaaaactagcaagattattttaatgaacaaaggaagactcattgccaagggttaaataaaaaataaatggagtttttagtg

SEQ ID NO: 112148 - DNA, 120 bp, Artificial Sequence
  ENSG00000100225_66 (sequence is synthesized)
acttcattagaaataatgattttattgtgtttagttgcctctgattaaccttgttgcatatctttaagttactaataagctgctgcctagtggattttatataaagatgcttactgtagt

SEQ ID NO: 112149 - DNA, 120 bp, Artificial Sequence
  ENSG00000100225_67 (sequence is synthesized)
gaacagtttgttttgtataatgtgtccttagtatattaggagctaggaaatgcaagcccatactaaaaaagaaaggcagttgatgaagtgacagaattctttatcatctttcttttgttt

SEQ ID NO: 112150 - DNA, 120 bp, Artificial Sequence
  ENSG00000100225_68 (sequence is synthesized)
atttacagctacactaaaaatcaacaatgagattagaagtgtgaaaagattgcagctgctaccagaatcttttatttgcaaagagaaactaggggaaaatgtagccaacatatacaaaga

SEQ ID NO: 112151 - DNA, 120 bp, Artificial Sequence
  ENSG00000100226_0 (sequence is synthesized)
aagttattaaagatggcgacggagcgcagtcgctccgcgatggactcgccggtcccggcctctatgttcgcccccgagcccagctccccgggggcggccagggccgcggcggccgccgcc

SEQ ID NO: 112152 - DNA, 120 bp, Artificial Sequence
  ENSG00000100226_1 (sequence is synthesized)
cgactccacggcggctttgactcggactgcagcgaggacggcgaggcgctcaacggcgagccagagctggacctcaccagcaagctggttctagtgagccctacatcagagcagtatgac

SEQ ID NO: 112153 - DNA, 120 bp, Artificial Sequence
  ENSG00000100226_2 (sequence is synthesized)
agcctacttcggcagatgtgggagaggatggacgagggatgcggagagaccatatatgtcattgggcagggatcagatgggactgagtatgggctgagtgaagctgacatggaggcctcc

SEQ ID NO: 112154 - DNA, 120 bp, Artificial Sequence
  ENSG00000100226_3 (sequence is synthesized)
tacgccacagtgaagagcatggcggaacagatagaggccgatgtcatccttctgcgggaacggcaagaagctgggggccgcgtgcgtgattacctggtccggaaacgagtaggagacaat

SEQ ID NO: 112155 - DNA, 120 bp, Artificial Sequence
  ENSG00000100226_4 (sequence is synthesized)
gacttcctggaggtcagggtagcagtggtgggcaacgtggatgctggcaaaagcacgcttctgggggtcctgacacatggggagctggacaatggccgaggctttgcccgccagaaactc

SEQ ID NO: 112156 - DNA, 120 bp, Artificial Sequence
  ENSG00000100226_5 (sequence is synthesized)
ttccgccacaaacatgaaattgaatctggtcgcaccagcagtgtgggcaacgacattctgggctttgacagtgaaggcaatgtagtgaacaagcctgacagccacggcggcagcctggag

SEQ ID NO: 112157 - DNA, 120 bp, Artificial Sequence
  ENSG00000100226_6 (sequence is synthesized)
tggaccaagatctgtgagaagtccacgaaagtcattaccttcatcgacttggctggtcatgagaagtacctgaaaaccactgtcttcggcatgacaggccatctgcctgacttctgcatg

SEQ ID NO: 112158 - DNA, 120 bp, Artificial Sequence
  ENSG00000100226_7 (sequence is synthesized)
ctcatggtgggcagcaatgctggcatcgtggggatgaccaaagaacacctgggcttggcactggcactcaatgtacctgtctttgtggtagtcaccaagattgacatgtgtcctgccaac

SEQ ID NO: 112159 - DNA, 120 bp, Artificial Sequence
  ENSG00000100226_8 (sequence is synthesized)
atcctgcaagaaaccctgaagctgttacagcgcctgctgaagtcaccaggctgccggaagatccccgtgctggtgcagagcaaagatgatgtgattgtcacagcctccaacttcagctct

SEQ ID NO: 112160 - DNA, 120 bp, Artificial Sequence
  ENSG00000100226_9 (sequence is synthesized)
gaaaggatgtgcccgatattccagatctccaacgttacaggcgagaacctagatctgctgaagatgttcctcaacctcctctccccccgcaccagctacagggaggaggagcctgctgag

SEQ ID NO: 112161 - DNA, 120 bp, Artificial Sequence
  ENSG00000100226_10 (sequence is synthesized)
tttcagattgatgacacctactccgtcccgggtgtggggacagtggtttcggggacaacactgagaggcctgatcaagctgaatgacacgctgctgctgggcccagaccccttgggtaac

SEQ ID NO: 112162 - DNA, 120 bp, Artificial Sequence
  ENSG00000100226_11 (sequence is synthesized)
ttcctgtccattgctgtcaaatccatccatcgcaagcgcatgcctgtcaaggaggtgcggggtggccagacagcatcctttgcgctgaagaagatcaagcgctcgtccatccggaagggc

SEQ ID NO: 112163 - DNA, 120 bp, Artificial Sequence
  ENSG00000100226_12 (sequence is synthesized)
atggtgatggtttccccacgtttgaatccccaagcctcctgggagtttgaggccgagattctcgtcctccaccaccccaccacaattagcccgcgctaccaggccatggtgcactgtggg

SEQ ID NO: 112164 - DNA, 120 bp, Artificial Sequence
  ENSG00000100226_13 (sequence is synthesized)
agcatcaggcagacagccaccattctgagcatggacaaggactgtctgcgcactggggacaaggccactgtacacttccgcttcatcaagacccctgagtacctgcacatagaccagcgg

SEQ ID NO: 112165 - DNA, 120 bp, Artificial Sequence
  ENSG00000100226_14 (sequence is synthesized)
ctggtgttccgggaaggccgcaccaaggctgtcggcaccatcaccaagctcctccagaccaccaacaactccccaatgaactccaagccgcagcagattaaaatgcagtcgacgaaaaag

SEQ ID NO: 112166 - DNA, 120 bp, Artificial Sequence
  ENSG00000100226_15 (sequence is synthesized)
ggccccctgacgaaacgagacgaggggggcccgtctggtgggccagcagtaggagcacccccacctggagatgaagcctcctctgtaggggcagggcaaccagctgcgtccagcaatctc

SEQ ID NO: 112167 - DNA, 120 bp, Artificial Sequence
  ENSG00000100226_16 (sequence is synthesized)
cagcctcagcctaagcccagcagtggaggccggcgacgagggggccagcgccacaaggtgaagtcccagggggcctgtgtgactcctgccagcggctgctgaaccttcccctggcccacc

SEQ ID NO: 112168 - DNA, 120 bp, Artificial Sequence
  ENSG00000100226_17 (sequence is synthesized)
ctcaccacccaaggggtcatcatctctggccaccactccaccagatgggcagagcagctatgaccgccacccagccctcccgctcaggccacagccggagcctccgcattgcccccaccc

SEQ ID NO: 112169 - DNA, 120 bp, Artificial Sequence
  ENSG00000100226_18 (sequence is synthesized)
ccattttccaggggggttgtaatttataagctgacgaaggtagccagacttccggaggactgaccatctctcactgtcctccccaccttcttcctcactcacacattttttgtacatctg

SEQ ID NO: 112170 - DNA, 83 bp, Artificial Sequence
  ENSG00000100226_19 (sequence is synthesized)
ccccaccttcttcctcactcacacattttttgtacatctgggcccttagtttttattctgtttattatatgtctctgtctctc

SEQ ID NO: 112171 - DNA, 120 bp, Artificial Sequence
  ENSG00000100226_20 (sequence is synthesized)
ctgctcctcttggcactcaggggcaccttccatggagccagaccgggtggaggggcttctgggatttggtgtctgctgctgccagagcaggaacccccagtctaggacttgggcatttta

SEQ ID NO: 112172 - DNA, 120 bp, Artificial Sequence
  ENSG00000100226_21 (sequence is synthesized)
acagggagaaagtagtggcttcccttttctctctctcctcctttttccctttaagcccacagattcaggtcatgccaaaagctctctggttgtaacctggagacatgtggaggggaatgg

SEQ ID NO: 112173 - DNA, 120 bp, Artificial Sequence
  ENSG00000100226_22 (sequence is synthesized)
cgatgggattataggactctccccatctcgggccctgaccctgacccttgccaccaacccaaagacagctggtgggtttccccttggagacaatcctgcgtttgcctgggccggccctgg

SEQ ID NO: 112174 - DNA, 120 bp, Artificial Sequence
  ENSG00000100226_23 (sequence is synthesized)
ctgccctcagctttcgctgatctgcccggcctggagcctcccatcaccccgcttcttgttgggcctcaggcactggttaccagaagggggtctgggtctgctcaggatcatgttttgtag

SEQ ID NO: 112175 - DNA, 120 bp, Artificial Sequence
  ENSG00000100226_24 (sequence is synthesized)
cacctcctgttggaggggtggagggatgttcccctgagccaggctgagactagaaccccatcttccctgagccaggctgagactagaaccccatcttccccaccacgccacccctgtggc

SEQ ID NO: 112176 - DNA, 120 bp, Artificial Sequence
  ENSG00000100226_25 (sequence is synthesized)
tgctacaggagcacagtagtgaaggcctgagctccaggtttgaaagacccaactggagcgtggggcgggcaggcaggggttagtgaaaggacacttccagggttaggacagagcatttag

SEQ ID NO: 112177 - DNA, 120 bp, Artificial Sequence
  ENSG00000100226_26 (sequence is synthesized)
ccttctggaagaacccctgcctggggtgggactgtgcaggccagagaaggtggcatgggcctgaacccacctggactgacttctgcactgaagccacagatggagggtaggctggtgggt

SEQ ID NO: 112178 - DNA, 120 bp, Artificial Sequence
  ENSG00000100226_27 (sequence is synthesized)
gggggtggttcgttctctagccggggcagacacccagctggctgggtccttcctcagccttgcctcctcctgtccccaaccctttcctttcctcctgcttgcggactgctggtcccctct

SEQ ID NO: 112179 - DNA, 120 bp, Artificial Sequence
  ENSG00000100226_28 (sequence is synthesized)
ccttccctccttccagctgtttctagttaccacctacccctggccgtggactgatcagaccagcattcaaaataaaagtttgttccaagttgacagtgtggtgctccctgcccagcccct

SEQ ID NO: 112180 - DNA, 120 bp, Artificial Sequence
  ENSG00000100226_29 (sequence is synthesized)
ccaggtggaggtgctgccacgggaacgcagttgctctgcctgccctggggcccctggcgacagctgggagcagggcagtgctgtgaggagcccagctttcccagtcaggcaggcatggct

SEQ ID NO: 112181 - DNA, 120 bp, Artificial Sequence
  ENSG00000100226_30 (sequence is synthesized)
tccgtgttcaggctccctcaccagctggtgacacgggacaagcttacaaaccttctctgaacctcagttttctcatttacaagaggcaaagccatccatcaccttgtgtggattcagaga

SEQ ID NO: 112182 - DNA, 120 bp, Artificial Sequence
  ENSG00000100226_31 (sequence is synthesized)
atgtgaggccctggggtgtcctacacaagggaaaggcttgctcagtgagcggtctgcacaccgttagccaccctgccacctctgtgccctgggcaggctccaaaggaaagctctggctgg

SEQ ID NO: 112183 - DNA, 120 bp, Artificial Sequence
  ENSG00000100226_32 (sequence is synthesized)
agctctggctgggactgccaggagtctcacacgctcctgttgacattcccagcagccgcccctgaggtcgatgtttgttctgtttttctttttcttttttgagacggagtctcgctgtgt

SEQ ID NO: 112184 - DNA, 66 bp, Artificial Sequence
  ENSG00000100226_33 (sequence is synthesized)
ttttgagacggagtctcgctggccagtttcaagtgattctctgcctcagccttctgagtagctggg

SEQ ID NO: 112185 - DNA, 120 bp, Artificial Sequence
  ENSG00000100226_34 (sequence is synthesized)
cgggcctgttctatttttctagttaagggaactgaagctcagagaggtgtcaccagcaggtgttcattcccatgccagccttgccccccggcttttcccaggcaggctcctgcgtgccca

SEQ ID NO: 112186 - DNA, 120 bp, Artificial Sequence
  ENSG00000100226_35 (sequence is synthesized)
ctggctccagcctggtcctctgtctcttggctgcttcactcctgctctttgtcccgactctggccctgcttacaggggccactacctgctggtgcctccataacaagcgtctggcgttga

SEQ ID NO: 112187 - DNA, 120 bp, Artificial Sequence
  ENSG00000100226_36 (sequence is synthesized)
gacccctggcatggcaggggctttggggtctggtttccacaaggcttagccatggcagaacctcgttttattttaactctttgcccctacaaacaaacagcagtacttgccagaaccatt

SEQ ID NO: 112188 - DNA, 120 bp, Artificial Sequence
  ENSG00000100226_37 (sequence is synthesized)
cttgggattcaggagctcgggcgactgccttggcctctggccgcacccaggagggtggggttggatctgtgtagttgccaggcccacacctgccagcagggggctgactggatccatgct

SEQ ID NO: 112189 - DNA, 120 bp, Artificial Sequence
  ENSG00000100226_38 (sequence is synthesized)
ttactgtgtttaatgggggtaacaggggtccctacagccctcccagctaaacatttggaacaaaacaccagcccttttgtagtggatgcagaataaaattgttaatccaatcacctccaa

SEQ ID NO: 112190 - DNA, 120 bp, Artificial Sequence
  ENSG00000100226_39 (sequence is synthesized)
ttcttcacagaggttggtgactgagcctgtggcacttggcgtgtcagctccatcctttcccctcctgaggcggggaaagagtgtccaggtgtctggagacgtgggctccttgctctaatt

SEQ ID NO: 112191 - DNA, 120 bp, Artificial Sequence
  ENSG00000100226_40 (sequence is synthesized)
atttgagcttgttgatattcttgagtgcctattctgtgcaggcactattctaggagctgtggggaatgtgtaattcgtgatctcaaggattttaattcagtcaccctgaataggagcaat

SEQ ID NO: 112192 - DNA, 120 bp, Artificial Sequence
  ENSG00000100226_41 (sequence is synthesized)
agaggccatttacaggactctgatgaaaaatcagatgcagtcatgtgtaatagagaaaaagctctccaggaactcagaggagtcaagagtgtccacccaggaaggatttcatggaagaag

SEQ ID NO: 112193 - DNA, 120 bp, Artificial Sequence
  ENSG00000100226_42 (sequence is synthesized)
gattcggagaccgagagtctcctctccctggaccgcgcgggacagcagaggggcgagggggcccgggcagggggccgagacgctcatgaagacaggtagtcggaggccagggcagggtgg

SEQ ID NO: 112194 - DNA, 120 bp, Artificial Sequence
  ENSG00000100226_43 (sequence is synthesized)
ccgccgcgtctcttcccagactcgggaaaggaaacagaaagtagtcgctcagctggggaggagcatgtccgagaatgtctacttttcgaggccacccgaaacaaaatggaaagatggtca

SEQ ID NO: 112195 - DNA, 120 bp, Artificial Sequence
  ENSG00000100226_44 (sequence is synthesized)
cgcgaaccagtcacaggtccaaggggcaaatagcgaattcccatggaggagaatcactgcactccaagtggacgtggctggtaggatgggaagcagacgccacgggcacagagggaagga

SEQ ID NO: 112196 - DNA, 120 bp, Artificial Sequence
  ENSG00000100226_45 (sequence is synthesized)
agaagggagctgctggagcctgctaaccgcctcgagccacctgctgctcaggagaccctgcccgtccttttcatctgcatggggccacaggctcctctcttgtgctcctagaagtcagag

SEQ ID NO: 112197 - DNA, 120 bp, Artificial Sequence
  ENSG00000100226_46 (sequence is synthesized)
catgggagagctggacccactgaggtgtggcctcggtgccatctctctactcccttagaggtatcctgtggcctcctgtcctgggcagtggtggtgaccatggagaggagaaggtagggt

SEQ ID NO: 112198 - DNA, 120 bp, Artificial Sequence
  ENSG00000100226_47 (sequence is synthesized)
tagggtatgatcttcctccatagaaaactggtgacagaatgtctgggcccagccaggctcagcctccagggtgctgtcacaggttcctatggcctcactgggaccatgtctaaggtctcc

SEQ ID NO: 112199 - DNA, 120 bp, Artificial Sequence
  ENSG00000100226_48 (sequence is synthesized)
tctcagagcagaggtctggttggagtaagtgcagggggttatgggcgtgagttctcttggggcttaagctgttggtgtatcctggacacttgcccactgcagaccttgcccctggtcttg

SEQ ID NO: 112200 - DNA, 120 bp, Artificial Sequence
  ENSG00000100226_49 (sequence is synthesized)
gaggggcatttgatagaggggtttgacccctgctccgtacaaaggaggtactggccccagcctatctgagatcttggaatcagtctttggctggccttgcctccagaaaaggcccccatc

SEQ ID NO: 112201 - DNA, 120 bp, Artificial Sequence
  ENSG00000100226_50 (sequence is synthesized)
catggtcaccctggggctacagatgtccttgaaggcctgcatgctcctgggactgctgagtttggccaaggctgcagcaaacactgtaatgtcctctgggactcactgggcttcttttgt

SEQ ID NO: 112202 - DNA, 120 bp, Artificial Sequence
  ENSG00000100226_51 (sequence is synthesized)
gctttgtatgagatagaacttgggccacaagggaagatttcaagtcagttacttctggccaaactccagatgtttccagctgaggagacattcacttggtctcttcgggaggccctgagt

SEQ ID NO: 112203 - DNA, 120 bp, Artificial Sequence
  ENSG00000100226_52 (sequence is synthesized)
taacacttgccctagacttgttacgggggcagcagcagcgtgctggggctggagctgcagcatgctctgaggagtctccaccagcttagcaatcaggagatcccggagctccacttgcca

SEQ ID NO: 112204 - DNA, 120 bp, Artificial Sequence
  ENSG00000100226_53 (sequence is synthesized)
ggctctgtgcaggctctgggctctgggggctggactgagcgggaggtgggagcaaggttcaccaatttctctgcaggaatagtagctgcagcagagaacaggatggagcctttctgggct

SEQ ID NO: 112205 - DNA, 120 bp, Artificial Sequence
  ENSG00000100226_54 (sequence is synthesized)
gggcagaggcaggaagtgaggcatgagtccagggccatagcagtcctcagccactgagtggggatgagaatgcctcttcatccccactgcctcctgtcacagccttcctgccatctgcct

SEQ ID NO: 112206 - DNA, 120 bp, Artificial Sequence
  ENSG00000100226_55 (sequence is synthesized)
tgccctgaactggcaagatcaaggaatgaggagtctgtgggagaagggggctgagggtggggggtagccaagccagtgccactgccccgcagctccagcctcagcctctctccatggctc

SEQ ID NO: 112207 - DNA, 120 bp, Artificial Sequence
  ENSG00000100226_56 (sequence is synthesized)
agcaggcaccagaagcttccctcatgctgcccttctggaaggtgccttcccctgtgctgacgtctgcaggatgcgtgttacaccccatttggatatcacatcttgagctgtgggaaagga

SEQ ID NO: 112208 - DNA, 120 bp, Artificial Sequence
  ENSG00000100226_57 (sequence is synthesized)
gagcagggcttccctctctgaaccccatgcctggcagggtaagtgcccagggagcacctgctgcctggatggggagtctgcgccacttctgctagcacagcagcatcccgtacctgaaag

SEQ ID NO: 112209 - DNA, 120 bp, Artificial Sequence
  ENSG00000100226_58 (sequence is synthesized)
tgaaacgtctgaataggctcgccgtcctgatcgtaagtgaacttgccaaggagtgtcccctcctgctgcaggtcttcgtcaaacccctgcaaagagagcggagggaagtggggaggggct

SEQ ID NO: 112210 - DNA, 120 bp, Artificial Sequence
  ENSG00000100226_59 (sequence is synthesized)
tcacaggtccaaggggcaaatagcgaattcccatggaggagaatcactgcactccaagtggacgtggctggtagggtaacttctgccagcctcttcccccagcccccaccaactgcccca

SEQ ID NO: 112211 - DNA, 120 bp, Artificial Sequence
  ENSG00000100226_60 (sequence is synthesized)
ctcagagtagggctggccaggagcttgctaggtcagggcaaagaggtcaagcccttggaggcaggtgagggagaggtggagtcatgaatagtggcatctgctcctcgagccctgttgctg

SEQ ID NO: 112212 - DNA, 120 bp, Artificial Sequence
  ENSG00000100227_0 (sequence is synthesized)
gctttcggcttgctcggcggagcaagatggcggacatctccctggacgaactcatcaggaagcgcggggcggcggcgaaaggacggcttaatgccagaccgggagttggaggtgtccgat

SEQ ID NO: 112213 - DNA, 120 bp, Artificial Sequence
  ENSG00000100227_1 (sequence is synthesized)
ctcgagttgggatccagcaaggccttctcagccagtcaacacgcacagccaccttccagcagagatttgatgcccggcagaagattggcctctcagatgcccggctcaaactgggagtca

SEQ ID NO: 112214 - DNA, 120 bp, Artificial Sequence
  ENSG00000100227_2 (sequence is synthesized)
aggatgcccgggagaagcttttgcagaaagatgcccgatttcgaatcaaagggaaagtgcaggatgccagagagatgttgaactctcgcaagcagcagaccacggtgccccagaagcccc

SEQ ID NO: 112215 - DNA, 120 bp, Artificial Sequence
  ENSG00000100227_3 (sequence is synthesized)
gccaggttgctgatgcccgggagaagatcagcttgaagaggagttcccctgctgccttcataaacccacccattgggacagtgacccctgctctgaagctcaccaaaaccatccaggttc

SEQ ID NO: 112216 - DNA, 120 bp, Artificial Sequence
  ENSG00000100227_4 (sequence is synthesized)
cacagcagaaagccatggcaccacttcatccccatcctgccggaatgagaatcaatgttgtcaataaccaccaggccaaacagaatttatatgacctggatgaagatgatgatggtatag

SEQ ID NO: 112217 - DNA, 120 bp, Artificial Sequence
  ENSG00000100227_5 (sequence is synthesized)
cttccgttcctactaaacagatgaagtttgcagcctcaggcggctttctccaccacatggctgggctaagcagttccaagctttccatgtccaaggccctccctctcaccaaagtggttc

SEQ ID NO: 112218 - DNA, 120 bp, Artificial Sequence
  ENSG00000100227_6 (sequence is synthesized)
agaatgatgcatacacagctcctgctctcccttcctctattcgaacaaaagccttgaccaacatgtcccggacactggtgaacaaggaagaaccccccaaagagctgccagctgctgagc

SEQ ID NO: 112219 - DNA, 120 bp, Artificial Sequence
  ENSG00000100227_7 (sequence is synthesized)
ctgttctcagcccattggaaggcaccaagatgactgtgaataatctgcaccctcgagtcactgaggaggacattgttgagcttttctgtgtgtgtggggccctcaagcgagctcgactgg

SEQ ID NO: 112220 - DNA, 120 bp, Artificial Sequence
  ENSG00000100227_8 (sequence is synthesized)
tccatcctggggtagcggaggtggtgtttgtgaaaaaggacgatgccatcaccgcatataagaagtacaacaaccggtgtctggacgggcagccgatgaagtgcaaccttcacatgaatg

SEQ ID NO: 112221 - DNA, 120 bp, Artificial Sequence
  ENSG00000100227_9 (sequence is synthesized)
ggaatgttatcacctcagaccagcccatcctgctgcggctgagtgacagcccatcaatgaaaaaggagagcgagctgcctcgcagggtgaactctgcctcctcctccaacccccctgccg

SEQ ID NO: 112222 - DNA, 120 bp, Artificial Sequence
  ENSG00000100227_10 (sequence is synthesized)
aagtggaccctgacaccatcctgaaggcactcttcaagtcctcaggggcctctgtgaccacgcagcccacagaattcaaaatcaagctttgagcaggggagtgaggcagccagaagtggg

SEQ ID NO: 112223 - DNA, 120 bp, Artificial Sequence
  ENSG00000100227_11 (sequence is synthesized)
ggcagaggagggtggctctgtttccccaaggcaaagcttatgaccaatgggccatcggactggagacccctgattgtgggaagggttgccagggataaagagcttcctcactggatggga

SEQ ID NO: 112224 - DNA, 120 bp, Artificial Sequence
  ENSG00000100227_12 (sequence is synthesized)
cccgcctttctgtgttgtgttctgccctgtgctcttctctctacgttaacgtttcctgtagtatgtttcttcatctcatcgccaaggtaggcttgtgtttttcagtgtgtgcctccccga

SEQ ID NO: 112225 - DNA, 120 bp, Artificial Sequence
  ENSG00000100227_13 (sequence is synthesized)
gcctcagccccaagctgatttcttatctggaaatggtacactgaattctctgggtggctttcttgtggccccatgggatgcagcgtgggggctgtctgaaggaccctgctttttccaggg

SEQ ID NO: 112226 - DNA, 120 bp, Artificial Sequence
  ENSG00000100227_14 (sequence is synthesized)
cgaggggctgcctttcctttgtgtgtattaagcttttcaaacaatggaggggatggagagccctggtgtcctgacgggagccaggtcggcctgagagctgtgccgctcctctgtcttgtc

SEQ ID NO: 112227 - DNA, 120 bp, Artificial Sequence
  ENSG00000100227_15 (sequence is synthesized)
agtggaggtgcctgggtggggagcaggtctcaggcctcttgtcctctccccagtggctccaggcctcactagtggcaagggcaggatgaggctgcaccgctgggaagagtctatctaagc

SEQ ID NO: 112228 - DNA, 120 bp, Artificial Sequence
  ENSG00000100227_16 (sequence is synthesized)
tcttggcttggagtcccgtgtcgtctccacccagaggaagttctccagagttcacctttcccttttccttgagttgtgctgaatgccccaccccagctctctttcccttctgggtgtctt

SEQ ID NO: 112229 - DNA, 120 bp, Artificial Sequence
  ENSG00000100227_17 (sequence is synthesized)
tgctgggagggggctgtgttgtgagccctcccggttctcacctcgcctggcacttaaccacaccctggttttgtgtagccgccagctctcttctggttgggcctttgaaaggctcagcct

SEQ ID NO: 112230 - DNA, 120 bp, Artificial Sequence
  ENSG00000100227_18 (sequence is synthesized)
cccattgtgcagtgcttgggtttggagcttatttgaatggaagaggtcagtttgttcctggctctccatttctggcctcagttgtctacaggacagtggtcagggatgcctggaggcata

SEQ ID NO: 112231 - DNA, 120 bp, Artificial Sequence
  ENSG00000100227_19 (sequence is synthesized)
tatccagctgccaccaaggggcactgtttgttcccacttatgtgagtgaccccatccatccatgaccagaggattattttcctgccttggcagaggaggaggagtcaagggagcagggca

SEQ ID NO: 112232 - DNA, 120 bp, Artificial Sequence
  ENSG00000100227_20 (sequence is synthesized)
gctctaccaggcaaggtgtttccccagcataggcgcagacagttgggacgaaacttcagagcccaggcagtccctgaatgaccaggccagtgttgtcactgagtggtcccctgctggttg

SEQ ID NO: 112233 - DNA, 120 bp, Artificial Sequence
  ENSG00000100227_21 (sequence is synthesized)
ggagtgaagagaatccaggctggcagagctggagccagttggggagcacggttctgggagctctgcaaaatcagtagcaagtgctggaaaaggcacatgccgaagatactcaagagctcc

SEQ ID NO: 112234 - DNA, 120 bp, Artificial Sequence
  ENSG00000100227_22 (sequence is synthesized)
caagatttgcttgaggctagcccagtgaaaaaaaccagagactcatgtttccaggggtcagtctgtcaggcaggaaggacccaggatttgaacccagcttcagtgtgcaggctctgaggc

SEQ ID NO: 112235 - DNA, 120 bp, Artificial Sequence
  ENSG00000100227_23 (sequence is synthesized)
tgcccaggacgggaaagtccaaggaaggggcctggtggtgctccacttgcagttctttaaagaatgctgctttttattctcctaaccctttcaagtgggtgcagacttctcgttagcagc

SEQ ID NO: 112236 - DNA, 120 bp, Artificial Sequence
  ENSG00000100227_24 (sequence is synthesized)
tggaagacattcctcccacacttttcccttcctggcccaagagagcatccagaaggcagtaggacctggtttttcaggtactgggagccgggggctcactgcttgcactgtgcttagggt

SEQ ID NO: 112237 - DNA, 120 bp, Artificial Sequence
  ENSG00000100227_25 (sequence is synthesized)
agggatggtaaatatcctccctgcatggctttatcctccctctcatcccaaagcaggtatcttctggttgtcacagagtttcattgagtccagctgcagccacgtggccatctggagctg

SEQ ID NO: 112238 - DNA, 120 bp, Artificial Sequence
  ENSG00000100227_26 (sequence is synthesized)
gtgctataggtgaccatctggtacattgaggggacctgtttgcctcctccactctataagcagtcatcttgggagaccgggaggagaaggtggtgggctagtcctgtgtcctcctccact

SEQ ID NO: 112239 - DNA, 120 bp, Artificial Sequence
  ENSG00000100227_27 (sequence is synthesized)
tcccatgcctctatgttacccatctgtgtctcctgtgcagaaggagaggaaggggcattaagagatgaagggtgattatgtattacttatccatttctgaataaacatttgttattccta

SEQ ID NO: 112240 - DNA, 120 bp, Artificial Sequence
  ENSG00000100227_28 (sequence is synthesized)
ggcttgctcggcggagcaagatggcggacatctccctggacgaactcatcaggaagcgcggggcggcggcgaaaggacgcccagtagatggtgtctgccttccttagagacactctttgt

SEQ ID NO: 112241 - DNA, 120 bp, Artificial Sequence
  ENSG00000100228_0 (sequence is synthesized)
ctgccagccccgcccagactccaggcaggttctcgttgctatggtgatcgccggtgcaagctggatgcttggacgcgccgctgccagtccaacgcagaccccgcccacgacgtcgacgat

SEQ ID NO: 112242 - DNA, 120 bp, Artificial Sequence
  ENSG00000100228_1 (sequence is synthesized)
tcgtgtagcccgcaggtcccgcgtggctctcgttgccatggtgatcgccgccgctggctcaggcggaccaggccgcgcggagccccagctttcacagccatcgctggactgtggaagaat

SEQ ID NO: 112243 - DNA, 120 bp, Artificial Sequence
  ENSG00000100228_2 (sequence is synthesized)
gaggtcctccctgacacctttggggccccctgtgagccgcgaccgtgtcatcgccagcttccctaagtggtacacgccggaagcctgtttgcagctcagggagcacttccacgggcaggt

SEQ ID NO: 112244 - DNA, 120 bp, Artificial Sequence
  ENSG00000100228_3 (sequence is synthesized)
cagcgctgcctgccaacgcaggaacacggggactgtcgggctcaaactctccaaggtggtggtggttggcgatctctacgtggggaagaccagcctcatccacaggttttgcaagaatgt

SEQ ID NO: 112245 - DNA, 120 bp, Artificial Sequence
  ENSG00000100228_4 (sequence is synthesized)
ttttgatcgagactacaaggccaccattggggtggactttgaaattgagcgctttgagattgctgggattccctatagcctccagatctgggacacagctgggcaggagaagttcaagtg

SEQ ID NO: 112246 - DNA, 120 bp, Artificial Sequence
  ENSG00000100228_5 (sequence is synthesized)
catcgcatctgcctactaccggggtgcccaggtgatcatcacggcctttgacctcactgacgtgcagaccctggagcataccaggcagtggttggaggatgctctgagggagaacgaggc

SEQ ID NO: 112247 - DNA, 120 bp, Artificial Sequence
  ENSG00000100228_6 (sequence is synthesized)
aggctcctgcttcatcttcctcgtgggaaccaagaaggaccttctgtcaggggccgcatgtgagcaggccgaagcagacgctgtgcacctggccagggagatgcaggccgagtactggtc

SEQ ID NO: 112248 - DNA, 120 bp, Artificial Sequence
  ENSG00000100228_7 (sequence is synthesized)
agtgtcggccaagactggcgagaacgtgaaggcattcttcagccgcgtagccgccctggcattcgagcagtcggtgctgcaggacctggagaggcagagcagtgcccggctccaggtcgg

SEQ ID NO: 112249 - DNA, 120 bp, Artificial Sequence
  ENSG00000100228_8 (sequence is synthesized)
caatggagacctaatccaaatggaagggagtccgcccgagacccaggagagcaagaggccctccagcctgggctgctgctaactggggcctgcgtggaaggcctccgctccctgcacaca

SEQ ID NO: 112250 - DNA, 120 bp, Artificial Sequence
  ENSG00000100228_9 (sequence is synthesized)
cacggacaggaatttccgtgactgtggtgtggagactggagcccaagctctgcagcgtgtcgccctcaagctgtaggcccatgttccagtccctccacccacccaccgggctcagctcca

SEQ ID NO: 112251 - DNA, 120 bp, Artificial Sequence
  ENSG00000100228_10 (sequence is synthesized)
gggcacagtcacttgtccgttgcaggttgggcactagaaaaggcccccactggctgcctgggagccccacaccaccgggccagtgcaggcactgtggtgatcccataaaaggccagtcca

SEQ ID NO: 112252 - DNA, 120 bp, Artificial Sequence
  ENSG00000100228_11 (sequence is synthesized)
tttgcagggtcatcagacagtcacctttggcctcaagaggcctcagaactgcaaactcctgcgtcggtctatactactcggccatggcccacatcagcagtcaaccctgcactctttccc

SEQ ID NO: 112253 - DNA, 120 bp, Artificial Sequence
  ENSG00000100228_12 (sequence is synthesized)
agcgatcttggatgtgtccccaggatccgtcacagtgttccaggcaacctggacttgtcaaagtcagcacctgaaggagaggccacctgccattccccctgggagttttctgttgtcagc

SEQ ID NO: 112254 - DNA, 120 bp, Artificial Sequence
  ENSG00000100228_13 (sequence is synthesized)
aggacttatggttctgggtctcagagcttcaggcctcactgtccttctgccacggatgctcaaggttcctgggcagaccagcacctctggaggacaatggacaaaatgtctcttagacct

SEQ ID NO: 112255 - DNA, 120 bp, Artificial Sequence
  ENSG00000100228_14 (sequence is synthesized)
gttctggctgaagggctatctctggcacctctgagatccctaggtcctgccctcctggtccgtgggccaggatgtgcagaacaaccactcaggcctttctggcccacctggacagtgcat

SEQ ID NO: 112256 - DNA, 120 bp, Artificial Sequence
  ENSG00000100228_15 (sequence is synthesized)
ccactgctgcctctccatccctctctcattggcctatacatctcttaggacctttgtaatggtgtccatgcacctttagaggacttcagaggccctgccaagtctagcatgttcctgtct

SEQ ID NO: 112257 - DNA, 120 bp, Artificial Sequence
  ENSG00000100228_16 (sequence is synthesized)
ccaacaccgcctcctgcacatgcagagcagacagaaataccccacacattccccagcctctctgcccagtatgctcatccacagggttttctcactgctatgaaccagccccacagcccc

SEQ ID NO: 112258 - DNA, 120 bp, Artificial Sequence
  ENSG00000100228_17 (sequence is synthesized)
aggcccctgtcacctggctatgcccactcatcccacccgtctcgtgctgttgcttcccgtagatggcgagcaccttgcaggcagccttctgatcagtactgctctcctagggcctggcac

SEQ ID NO: 112259 - DNA, 120 bp, Artificial Sequence
  ENSG00000100228_18 (sequence is synthesized)
actgcagctgccctgtaaatgttcagctcagcgattgccaaataccagttagggaagaacactggcatctttttctattcattcccccttcaacatattttttgtagttttttatataaa

SEQ ID NO: 112260 - DNA, 120 bp, Artificial Sequence
  ENSG00000100228_19 (sequence is synthesized)
ggcctcccgaagtgctgggattacaagggtgagccaccatgcccggccataaatgattttattcatttttatgttttcttttgggcggcgggatggagtctctgtcacccaggctggcgt

SEQ ID NO: 112261 - DNA, 85 bp, Artificial Sequence
  ENSG00000100228_20 (sequence is synthesized)
gagtagctgggactacaggcacgtgtgaccatgccgggctaattttttatatttttagtagagaatctgacctcgtgatctgccc

SEQ ID NO: 112262 - DNA, 120 bp, Artificial Sequence
  ENSG00000100228_21 (sequence is synthesized)
agccaccgcgtccggcctccataaatgacttttaaaggggttgtatgtttagtgtgaacaaagacagtacaaagcatataaaatacaaggtgaaagccccccccccgccacattagctgc

SEQ ID NO: 112263 - DNA, 120 bp, Artificial Sequence
  ENSG00000100228_22 (sequence is synthesized)
gcccctgaagtgtctccagcagaagagatggatgaatggaaggacacacagatggacagagagcaggaaagactgttagctctgctaacagtcaggactattccttctggactctgtgcc

SEQ ID NO: 112264 - DNA, 120 bp, Artificial Sequence
  ENSG00000100228_23 (sequence is synthesized)
tttgcctgcacagctagtgttgatggcttgtttgttgttttcaccagagtgagctccttctggacatactgcctggcagcctgccttcctagggagctggcgccaaggcctctccctgat

SEQ ID NO: 112265 - DNA, 120 bp, Artificial Sequence
  ENSG00000100228_24 (sequence is synthesized)
ggcacacaaggagcctccttcctgtagcagcgcccagttttcatgtggatggattgtagttcatttgaccctccccatccgcgggccatccggcttgtgtccagcttttagctcttgcca

SEQ ID NO: 112266 - DNA, 120 bp, Artificial Sequence
  ENSG00000100228_25 (sequence is synthesized)
atggtgctgcagtggccattcttgtagttatagctttgcgtactcaggaaggcccttctcccgactgcggcccccagcctggtccactaaatgcagcctgtggtcgggcagacagcattg

SEQ ID NO: 112267 - DNA, 120 bp, Artificial Sequence
  ENSG00000100228_26 (sequence is synthesized)
gggtccattaggaagaccaggtttgctgggcataagcttcacaggacgggagaacctgcccatggtggactgtcgttctccacagctcccttcccttgccccttcgggcctccaggatat

SEQ ID NO: 112268 - DNA, 120 bp, Artificial Sequence
  ENSG00000100228_27 (sequence is synthesized)
gtttgcgggggtgggtgtggtgtccagctgttaccagcttctgagctagagctgtactgcctcacgtacacccccacctctgtaaatggtccttgattaaatcgtcctcatattacctcc

SEQ ID NO: 112269 - DNA, 120 bp, Artificial Sequence
  ENSG00000100228_28 (sequence is synthesized)
agcggggtccctgccgggctccacagtgggaatcccgagttctctgcacaggcaccagttttttgtcctccaagacccactgagaaaacaccaggccactgcttgggaacagggaagctg

SEQ ID NO: 112270 - DNA, 120 bp, Artificial Sequence
  ENSG00000100228_29 (sequence is synthesized)
ccttcatccccaggcactggctgactttggcgatcacaccctttaaggaccctgtggtagtgggtgctggctttaagtctcagccccagtttcagctcataaagatgctcagagatgaaa

SEQ ID NO: 112271 - DNA, 120 bp, Artificial Sequence
  ENSG00000100234_0 (sequence is synthesized)
gcgcagagcgggcagcaggcaggcggcgggcgctcagacggcttctcctcctcctcttgctcctccagctcctgctccttcgccgggaggccgcccgccgagtcctgcgccagcgccgag

SEQ ID NO: 112272 - DNA, 80 bp, Artificial Sequence
  ENSG00000100234_1 (sequence is synthesized)
gcagcctcgctgcgccccatcccgtcccgccgggcactcggagggcagcgcgccggaggccaaggttgccccgcacggcc

SEQ ID NO: 112273 - DNA, 120 bp, Artificial Sequence
  ENSG00000100234_2 (sequence is synthesized)
ggcgcgcacggcaactttggagaggcgagcagcagccccggcagcggcggcagcagcggcaatgaccccttggctcgggctcatcgtgctcctgggcagctggagcctgggggactgggg

SEQ ID NO: 112274 - DNA, 120 bp, Artificial Sequence
  ENSG00000100234_3 (sequence is synthesized)
cgccgaggcgtgcacatgctcgcccagccacccccaggacgccttctgcaactccgacatcgtgatccgggccaaggtggtggggaagaagctggtaaaggaggggcccttcggcacgct

SEQ ID NO: 112275 - DNA, 120 bp, Artificial Sequence
  ENSG00000100234_4 (sequence is synthesized)
ggtctacaccatcaagcagatgaagatgtaccgaggcttcaccaagatgccccatgtgcagtacatccatacggaagcttccgagagtctctgtggccttaagctggaggtcaacaagta

SEQ ID NO: 112276 - DNA, 120 bp, Artificial Sequence
  ENSG00000100234_5 (sequence is synthesized)
ccagtacctgctgacaggtcgcgtctatgatggcaagatgtacacggggctgtgcaacttcgtggagaggtgggaccagctcaccctctcccagcgcaaggggctgaactatcggtatca

SEQ ID NO: 112277 - DNA, 120 bp, Artificial Sequence
  ENSG00000100234_6 (sequence is synthesized)
cctgggttgtaactgcaagatcaagtcctgctactacctgccttgctttgtgacttccaagaacgagtgtctctggaccgacatgctctccaatttcggttaccctggctaccagtccaa

SEQ ID NO: 112278 - DNA, 120 bp, Artificial Sequence
  ENSG00000100234_7 (sequence is synthesized)
acactacgcctgcatccggcagaagggcggctactgcagctggtaccgaggatgggcccccccggataaaagcatcatcaatgccacagacccctgagcgccagaccctgccccacctca

SEQ ID NO: 112279 - DNA, 120 bp, Artificial Sequence
  ENSG00000100234_8 (sequence is synthesized)
cttccctcccttcccgctgagcttcccttggacactaactcttcccagatgatgacaatgaaattagtgcctgttttcttgcaaatttagcacttggaacatttaaagaaaggtctatgc

SEQ ID NO: 112280 - DNA, 120 bp, Artificial Sequence
  ENSG00000100234_9 (sequence is synthesized)
tgtcatatggggtttattgggaactatcctcctggccccaccctgccccttctttttggttttgacatcattcatttccacctgggaatttctggtgccatgccagaaagaatgaggaac

SEQ ID NO: 112281 - DNA, 120 bp, Artificial Sequence
  ENSG00000100234_10 (sequence is synthesized)
ctgtattcctcttcttcgtgataatataatctctatttttttaggaaaacaaaaatgaaaaactactccatttgaggattgtaattcccacccctcttgcttcttccccacctcaccatc

SEQ ID NO: 112282 - DNA, 120 bp, Artificial Sequence
  ENSG00000100234_11 (sequence is synthesized)
tcccagaccctcttccctttgcccttctcctccaatacataaaggacacagacaaggaacttgctgaaaggccaaccatttcaggatcagtcaaaggcagcaagcagatagactcaaggt

SEQ ID NO: 112283 - DNA, 120 bp, Artificial Sequence
  ENSG00000100234_12 (sequence is synthesized)
gtgtgaaagatgttatacaccaggagctgccactgcatgtcccaaccagactgtgtctgtctgtgtctgcatgtaagagtgagggagggaaggaaggaactacaagagagtcggagatga

SEQ ID NO: 112284 - DNA, 120 bp, Artificial Sequence
  ENSG00000100234_13 (sequence is synthesized)
tgcagcacacacacaattccccagcccagtgatgcttgtgttgaccagatgttcctgagtctggagcaagcacccaggccagaataacagagctttcttagttggtgaagacttaaacat

SEQ ID NO: 112285 - DNA, 120 bp, Artificial Sequence
  ENSG00000100234_14 (sequence is synthesized)
ctgcctgaggtcaggaggcaatttgcctgccttgtacaaaagctcaggtgaaagactgagatgaatgtctttcctctccctgcctcccaccagacttcctcctggaaaacgctttggtag

SEQ ID NO: 112286 - DNA, 120 bp, Artificial Sequence
  ENSG00000100234_15 (sequence is synthesized)
atttggccaggagctttcttttatgtaaattggataaatacacacaccatacactatccacagatatagccaagtagatttgggtagaggatactatttccagaatagtgtttagctcac

SEQ ID NO: 112287 - DNA, 120 bp, Artificial Sequence
  ENSG00000100234_16 (sequence is synthesized)
ctagggggatatgtttgtatacacatttgcatatacccacatggggacataagctaatttttttacaggacacagaattctgttcaatgctgttaaatatgccaatagtttaatctcttc

SEQ ID NO: 112288 - DNA, 120 bp, Artificial Sequence
  ENSG00000100234_17 (sequence is synthesized)
tattttgttgtcgttgcttgtttgaagaaaatcatgacattccaagttgacatttttttttcattttaattaaaatttgaaattctgaacaccgtcagcaccctctcttccctatcatgg

SEQ ID NO: 112289 - DNA, 120 bp, Artificial Sequence
  ENSG00000100234_18 (sequence is synthesized)
gtcatctgacccctgtccgtctccttgtccctgcttcatgtttgggggcctttctttaactgccttcctggcttagctcagatggcagatgagagtgtagtcaagggcctgggcacagga

SEQ ID NO: 112290 - DNA, 120 bp, Artificial Sequence
  ENSG00000100234_19 (sequence is synthesized)
cctctcctgggtgtggagacagcttggttccctttccctagctccctggtgggtgaatgccacctcctgagatcctcacctcttggaattaaaattgttggtcactggggaaagcctgag

SEQ ID NO: 112291 - DNA, 120 bp, Artificial Sequence
  ENSG00000100234_20 (sequence is synthesized)
tttgcaaccagttgtagggtttctgttgtgtttttttttttttttttgaaataaaactataatataaattctcctattaaataaaattattttaagttttagtgtcaaaagtgagatgct

SEQ ID NO: 112292 - DNA, 120 bp, Artificial Sequence
  ENSG00000100234_21 (sequence is synthesized)
gagagtaggtgataatgtatattttacagagtgggggttggcaggatggtgacattgaacatgattgctctctgtctcttttttcagcttatgggtatttatcttctattagtatttgta

SEQ ID NO: 112293 - DNA, 120 bp, Artificial Sequence
  ENSG00000100234_22 (sequence is synthesized)
tcttcagttcattccactttaggaaacagagctgccaattgaaacagaagaagaaaaaaaaaaaaagcagcagacaacacactgtagagtcttgcacacacacaagtgcccaggcaaggt

SEQ ID NO: 112294 - DNA, 120 bp, Artificial Sequence
  ENSG00000100234_23 (sequence is synthesized)
gcttggcagaaccgcagagtgggaagagagtaccggcatcgggtttccttgggatcaatttcattaccgtgtacctttcccattgtggtcatgccatttggcagggggagaatgggaggc

SEQ ID NO: 112295 - DNA, 120 bp, Artificial Sequence
  ENSG00000100234_24 (sequence is synthesized)
ttggccttctttgtgaggcagtgtgagcagaagctgatgccagcatgtcactggttttgaagggatgagcccagacttgatgttttgggattgtccttattttaacctcaaggtctcgca

SEQ ID NO: 112296 - DNA, 120 bp, Artificial Sequence
  ENSG00000100234_25 (sequence is synthesized)
tggtggggcccctgaccaacctacacaagttccctcccacaagtggacatcagtgtcttctctgtgaggcatctggccattcgcactccctggtgtggtcagcctctctcacacaaggag

SEQ ID NO: 112297 - DNA, 120 bp, Artificial Sequence
  ENSG00000100234_26 (sequence is synthesized)
gaacttgggtgaaggctgagtgtgaggcacctgaagtttccctgcggagtcgataaattagcagaaccacatccccatctgttaggccttggtgaggaggccctgggcaaagaagggtct

SEQ ID NO: 112298 - DNA, 120 bp, Artificial Sequence
  ENSG00000100234_27 (sequence is synthesized)
ttcgcaaagcgatgtcagagggcggttttgagctttctataagctatagctttgtttatttcacccgttcacttactgtataatttaaaatcatttatgtagctgagacacttctgtatt

SEQ ID NO: 112299 - DNA, 120 bp, Artificial Sequence
  ENSG00000100234_28 (sequence is synthesized)
tcaatcatatcatgaacattttattttgctaaatcttgtgtcatgtgtaggctgtaatatgtgtacattgtgtttaagagaaaaatgaaacccacatgccgccattttcctgaatcaaat

SEQ ID NO: 112300 - DNA, 120 bp, Artificial Sequence
  ENSG00000100234_29 (sequence is synthesized)
tctgcagtggaatggagaggaaaatacttctaggcaagcagctagactggtgaattgggggaaatagaaggaactagtaactgagactcctccagcctcctccctattggaatcccaatg

SEQ ID NO: 112301 - DNA, 120 bp, Artificial Sequence
  ENSG00000100234_30 (sequence is synthesized)
gctcctggagtaggaaaaaagtttaaactacattcatgttcttgttctgtgtcactcggccctgggtagtctaccatttacttcaccccaagtcctgctgcccatccagttgggaagcca

SEQ ID NO: 112302 - DNA, 120 bp, Artificial Sequence
  ENSG00000100234_31 (sequence is synthesized)
tgattttcctaagaatccagggccatgggagatacaattccaagttctcgcttcctcctttgggcatctcttctgcctcccaatcaaggaagctccatgctcaggctctcagctctcggg

SEQ ID NO: 112303 - DNA, 120 bp, Artificial Sequence
  ENSG00000100234_32 (sequence is synthesized)
ccagtgctctgctctgtccagggtaggtaatactgggagactcctgtcttttaccctcccctcgttccagacctgcctcatggtggcaacatggttcttgaacaattaaagaaacaaatg

SEQ ID NO: 112304 - DNA, 120 bp, Artificial Sequence
  ENSG00000100234_33 (sequence is synthesized)
actttttggaatagccctgtctagggcaaactgtggcccccaggagacactacccttccatgccccagacctctgtcttgcatgtgacaattgacaatctggactaccccaagatggcac

SEQ ID NO: 112305 - DNA, 120 bp, Artificial Sequence
  ENSG00000100234_34 (sequence is synthesized)
ccaagtgtttggcttctggctacctaaggttaacatgtcactagagtatttttatgagagacaaacattataaaaatctgatggcaaaagcaaaacaaaatggaaagtaggggaggtgga

SEQ ID NO: 112306 - DNA, 120 bp, Artificial Sequence
  ENSG00000100234_35 (sequence is synthesized)
tgtgacaacaacttccaaattggctctttggaggcgagaggaaggggagaacttggagaatagtttttgctttgggggtagaggcttcttagattctcccagcatccgcctttcccttta

SEQ ID NO: 112307 - DNA, 120 bp, Artificial Sequence
  ENSG00000100234_36 (sequence is synthesized)
gccagtctgctgtcctgaaacccagaagtgatggagagaaaccaacaagagatctcgaaccctgtctagaaggaatgtatttgttgctaaatttcgtagcactgtttacagttttcctcc

SEQ ID NO: 112308 - DNA, 120 bp, Artificial Sequence
  ENSG00000100234_37 (sequence is synthesized)
atgttatttatgaattttatattccgtgaatgtatattgtcttgtaatgttgcataatgttcactttttatagtgtgtcctttattctaaacagtaaagtggttttatttctatcacaca

SEQ ID NO: 112309 - DNA, 120 bp, Artificial Sequence
  ENSG00000100239_0 (sequence is synthesized)
ccattttggagcgatcggagtgccgcccgcggccccgagtcggtctcgagccgccggccggccgtgccggtgtccgtaggcgctgcgccctcggccgggcccatgtgtgtgcggcccgcc

SEQ ID NO: 112310 - DNA, 120 bp, Artificial Sequence
  ENSG00000100239_1 (sequence is synthesized)
cgaggccgcccgggctttgcctccaccagcgccctggcctccgctcgggcctccacacgggcctccgaagagctgccgcgacgcccggcccgcagggcaggtaaagagattataaatctt

SEQ ID NO: 112311 - DNA, 120 bp, Artificial Sequence
  ENSG00000100239_2 (sequence is synthesized)
ccactgaatgaaaaaaattttcttaaagctgcatatactccaagaaaaaaaccacaaatgtttttctgttttgcctgaatacatgatttaaacaagagatttccacagaagctctgcggc

SEQ ID NO: 112312 - DNA, 120 bp, Artificial Sequence
  ENSG00000100239_3 (sequence is synthesized)
cgtcacgatgttctggaagtttgacttgaacaccacgtcccatgttgacaagctgctggacaaggagcatgtgacgctgcaggagttaatggatgaagatgacatcttgcaggagtgtaa

SEQ ID NO: 112313 - DNA, 120 bp, Artificial Sequence
  ENSG00000100239_4 (sequence is synthesized)
ggctcagaaccagaagctgctggacttcctgtgcaggcagcagtgcatggaggagctggtgagcctcatcacacaggatccgcccctggacatggaggagaaggtccgcttcaaatatcc

SEQ ID NO: 112314 - DNA, 120 bp, Artificial Sequence
  ENSG00000100239_5 (sequence is synthesized)
aaacacagcctgtgagcttctgacttgtgatgtgccgcagatcagcgaccgcctcggtggggacgagagcctgctgagcctcctgtacgacttcttggaccatgagccgcctctcaatcc

SEQ ID NO: 112315 - DNA, 120 bp, Artificial Sequence
  ENSG00000100239_6 (sequence is synthesized)
tctgctcgccagttttttcagcaagaccattggcaatctcattgcaagaaaaaccgaacaggtgattacgtttttgaagaagaaggacaagttcatcagcctggtgttgaagcacatcgg

SEQ ID NO: 112316 - DNA, 120 bp, Artificial Sequence
  ENSG00000100239_7 (sequence is synthesized)
cacctcagcgcttatggacctgctgctgcgcctggtcagctgtgtggagccagccgggctccggcaggacgtcctgcactggctgaatgaagagaaggtcatccagaggcttgtggagtt

SEQ ID NO: 112317 - DNA, 120 bp, Artificial Sequence
  ENSG00000100239_8 (sequence is synthesized)
gatccacccgagccaggatgaagataggcagtcaaatgcttctcagactctctgtgacatagttaggctgggcagagaccagggcagtcagctgcaagaggctctggagccagacccgct

SEQ ID NO: 112318 - DNA, 120 bp, Artificial Sequence
  ENSG00000100239_9 (sequence is synthesized)
cctcacagcgctggagtcgcaggactgtgtggagcagcttctgaagaacatgtttgatggagaccggacggagagctgcctcgtcagtgggactcaggtgttactcaccttgctggaaac

SEQ ID NO: 112319 - DNA, 120 bp, Artificial Sequence
  ENSG00000100239_10 (sequence is synthesized)
caggcgggttgggacagagggcttggtggactccttttctcagggactggaaaggtcatacgctgtcagcagcagcgtactacacggcatcgagcctcggctgaaggacttccaccagct

SEQ ID NO: 112320 - DNA, 120 bp, Artificial Sequence
  ENSG00000100239_11 (sequence is synthesized)
cctgctcaacccgcccaagaagaaagcgatcctgaccaccattggtgtgctggaggagcccctggggaatgcccgtctgcatggcgcccgcctcatggcagcactgctgcacacaaacac

SEQ ID NO: 112321 - DNA, 120 bp, Artificial Sequence
  ENSG00000100239_12 (sequence is synthesized)
acccagcatcaaccaggagctctgccggctcaacacgatggacttactgctggacttgttctttaagtacacctggaataactttttgcacttccaagtggaactatgcatagccgctat

SEQ ID NO: 112322 - DNA, 120 bp, Artificial Sequence
  ENSG00000100239_13 (sequence is synthesized)
gggtggagcctccgcatgagaacgggaaccggagcctggagactccccagccggccgccagcctccctgacaacacaatggtgacccacctgttccagaagtgctgcctggtgcagagga

SEQ ID NO: 112323 - DNA, 120 bp, Artificial Sequence
  ENSG00000100239_14 (sequence is synthesized)
tcctggaggcctgggaagccaacgaccacacgcaggcagcgggtggcatgagacgtgggaacatgggccacctcacacggatcgccaacgcggtggtgcagaacctggagcggggccctg

SEQ ID NO: 112324 - DNA, 120 bp, Artificial Sequence
  ENSG00000100239_15 (sequence is synthesized)
tgcagacgcacatcagcgaggtcatccgagggctccctgcggactgccgtggccgctgggagagcttcgtggaggagacgctgacggagacgaaccgcaggaacactgtggacctggcct

SEQ ID NO: 112325 - DNA, 120 bp, Artificial Sequence
  ENSG00000100239_16 (sequence is synthesized)
tctctgactaccagatccagcagatgacagccaacttcgtggatcagtttggcttcaatgatgaggagtttgccgaccaggacgacaacatcaatgccccgtttgacaggatcgcagaga

SEQ ID NO: 112326 - DNA, 120 bp, Artificial Sequence
  ENSG00000100239_17 (sequence is synthesized)
tcaacttcaacatcgacgctgacgaggacagtcccagcgcagctctgtttgaggcctgctgcagtgaccgcatccagccctttgatgatgatgaggacgaggacatctgggaggacagtg

SEQ ID NO: 112327 - DNA, 120 bp, Artificial Sequence
  ENSG00000100239_18 (sequence is synthesized)
acactcgctgtgctgcccgggtgatggccagacccaggtttggagccccccatgcttcagagagttgctcaaagaatggcccagagcgtggaggccaggatgggaaggcgagcttggaag

SEQ ID NO: 112328 - DNA, 120 bp, Artificial Sequence
  ENSG00000100239_19 (sequence is synthesized)
cacacagagatgcacctggggcaggtgccccaccggcccccgggaagaaggaagcgccccctgtggagggtgactcagaaggcgccatgtggacggcagtgtttgatgagccagcgaact

SEQ ID NO: 112329 - DNA, 120 bp, Artificial Sequence
  ENSG00000100239_20 (sequence is synthesized)
caacgcccacagccccaggagtggtgagggacgtgggttccagtgtgtgggcagctggcacctcagctccagaggagaaaggctgggccaagttcactgacttccaacctttctgctgct

SEQ ID NO: 112330 - DNA, 120 bp, Artificial Sequence
  ENSG00000100239_21 (sequence is synthesized)
ccgagtcagggcccaggtgcagctctccggtggacacagaatgcagccatgctgagggcagccggagccaaggccctgagaaagccttcagcccggcttctccatgtgcctggaacgtgt

SEQ ID NO: 112331 - DNA, 120 bp, Artificial Sequence
  ENSG00000100239_22 (sequence is synthesized)
gtgtcaccaggaaggcccccctgctggcctctgacagtagctcctctgggggctcccacagcgaggatggcgaccagaaggcagcgagtgccatggatgcggtgagcaggggtcccggcc

SEQ ID NO: 112332 - DNA, 120 bp, Artificial Sequence
  ENSG00000100239_23 (sequence is synthesized)
gggaggcccccccgctgcccacagtggccaggacagaggaggctgtcggcagggtcgggtgtgctgacagccggctgttaagccctgcctgccccgcgccaaaggaagtgactgctgccc

SEQ ID NO: 112333 - DNA, 120 bp, Artificial Sequence
  ENSG00000100239_24 (sequence is synthesized)
cagccgtggctgtgccccccgaggctactgtggccatcaccacagcactgagcaaggctggccccgccatacccaccccagcagtctcttctgcactggccgtggcggtccccctagggc

SEQ ID NO: 112334 - DNA, 120 bp, Artificial Sequence
  ENSG00000100239_25 (sequence is synthesized)
ccatcatggcagtcacagcagccccagccatggtggccaccctggggacagtgacaaaggacgggaagacagatgccccgccagaaggagctgccttaaatggcccagtgtgatgctgct

SEQ ID NO: 112335 - DNA, 120 bp, Artificial Sequence
  ENSG00000100239_26 (sequence is synthesized)
gccgcccggccacggcccaccctggtcaggctgcctccttaatcgagaaaactacctggtgatgcaatcttttttttttttaatttaatttaattttaaaataaatgctgcattggtaaa

SEQ ID NO: 112336 - DNA, 120 bp, Artificial Sequence
  ENSG00000100239_27 (sequence is synthesized)
atatactccaagaaaaaaaccacaaatgtttttctgttttgcctgaatacatgatttaaacaagagatttccacagaagggcgctttcatggaactatatgatcatatgggcaacattct

SEQ ID NO: 112337 - DNA, 120 bp, Artificial Sequence
  ENSG00000100239_28 (sequence is synthesized)
gttgcagtctaccttctgtctgacggatatgccatcctgaaaaaggaaagaagctgaacttcaagttcctttcatttagccttgggcttccaccttctctgtggctagaaacaggaccgt

SEQ ID NO: 112338 - DNA, 120 bp, Artificial Sequence
  ENSG00000100239_29 (sequence is synthesized)
ccagaagtcacctgtaactgccctatcttgcaagttctgattttggcaaaaaaaaaaaaaaaaagccttgacaaggttggattcacttctttccctggattgtgtgtcatccaactctgc

SEQ ID NO: 112339 - DNA, 120 bp, Artificial Sequence
  ENSG00000100239_30 (sequence is synthesized)
cagagcacagcaataaggtcggcctgcaggagccggggtgggggtgggggtggggggggcaggaccctgagatgccaccaggacctgatgggccaggaagggcgtggacatggaggctgt

SEQ ID NO: 112340 - DNA, 120 bp, Artificial Sequence
  ENSG00000100239_31 (sequence is synthesized)
ttttacagttttttttttgttgttgttttgtttttaaagaatacagaaggagccaagcttttttgcactttgtatccagctgcaagctcagggcagagtcaagggcctgggttggaaaaa

SEQ ID NO: 112341 - DNA, 120 bp, Artificial Sequence
  ENSG00000100239_32 (sequence is synthesized)
cctgactcacaggaatgcataattgacccttgcagctacccaatagcccttggagctggcactgaaccaggctgcaagatttgactgccttaaaaacacaaggccctctaggcctggcag

SEQ ID NO: 112342 - DNA, 120 bp, Artificial Sequence
  ENSG00000100239_33 (sequence is synthesized)
ggatgtccctgtgcccagcacagggtgcctggcagggggagaccacaggtatgcaggtggggggacatggtgtggcactaggggctcgaagactggtttctagcactaccggtcacggcc

SEQ ID NO: 112343 - DNA, 120 bp, Artificial Sequence
  ENSG00000100239_34 (sequence is synthesized)
atgtcgtcctagaagggtccagaagattattttacgttgagtccatttttaatgttctgatcacctgacagggcaccccaaacccccaactcccaataaaagccgtgacgttcggacaaa

SEQ ID NO: 112344 - DNA, 120 bp, Artificial Sequence
  ENSG00000100239_35 (sequence is synthesized)
cccaggagtggtgagggacgtgggttccagtgtgtgggcagctggcacctcagctccagaggagaaaggctgggccaagttcactgacttccaacctttctgctggtaacaaatgcgctg

SEQ ID NO: 112345 - DNA, 120 bp, Artificial Sequence
  ENSG00000100239_36 (sequence is synthesized)
ccgagatcacgccactgcactccggcctgcgcatgagagagactgactgtcggcaaaaacaaaaccaaaacaaacctttacccacttctcctaaacaacccctaaaaaactgctctgaaa

SEQ ID NO: 112346 - DNA, 120 bp, Artificial Sequence
  ENSG00000100239_37 (sequence is synthesized)
ctctgaaaagcagggaatatcattgtgcaaagtaagttgtttttttccacggggctgtctgcgtaaaacttgccacttagagccctgcctgcaccgtcgtcacggcccagcctgcaggtg

SEQ ID NO: 112347 - DNA, 120 bp, Artificial Sequence
  ENSG00000100239_38 (sequence is synthesized)
agcttcctcgcgcccccgcctgacctgagtgcccctccctcagtcagacacagtgtcgtcgccctgcaggaagccagggggcccgtctgctgctcgtggccaggctgggccttggggtgc

SEQ ID NO: 112348 - DNA, 120 bp, Artificial Sequence
  ENSG00000100239_39 (sequence is synthesized)
ccgaccccctccagagcaagccccttagatgcccggcagggtcctctctaccctcccatcccctgggaggtttccccagactgtgtccagtgtgaggctgaagttgagatcatagcacag

SEQ ID NO: 112349 - DNA, 120 bp, Artificial Sequence
  ENSG00000100239_40 (sequence is synthesized)
gaggctctggggtccttgaagaatgaggcgcttgatgatgagcaggatctgagtgctgcctggaggaggtttgaggtcatcaatggacaggcagcttgtcccagtacttggaacttgggg

SEQ ID NO: 112350 - DNA, 120 bp, Artificial Sequence
  ENSG00000100239_41 (sequence is synthesized)
cctagctgggcacaacctgggccaccccacaaagggcaggagtgagaggggccaaagatggtgctcccaggccgcctggacctttttgtccagctggtccttgggcatgaggcggggtgg

SEQ ID NO: 112351 - DNA, 80 bp, Artificial Sequence
  ENSG00000100241_0 (sequence is synthesized)
cgccgcggagcgaaccaggggtgtccggggtgcgcggtccagggccggggccgggccatgagcgcgccgtcctcgagtcc

SEQ ID NO: 112352 - DNA, 120 bp, Artificial Sequence
  ENSG00000100241_1 (sequence is synthesized)
gcccgcgcccctcgggccgccccgcgtccctcgccatggcgcggctcgcggactacttcgtgctggtggcgttcgggccgcacccgcgcgggagtggggaaggccagggccagattctgc

SEQ ID NO: 112353 - DNA, 120 bp, Artificial Sequence
  ENSG00000100241_2 (sequence is synthesized)
cacccgcgcgggagtggggaaggccagggccagattctgcagcgcttcccagagaaggactgggaggacaacccattcccccagggcatcgagctgttttgccagcccagcgggtggcag

SEQ ID NO: 112354 - DNA, 120 bp, Artificial Sequence
  ENSG00000100241_3 (sequence is synthesized)
ctgtgtcccgagaggaatccaccgaccttctttgttgctgtcctcaccgacatcaactccgagcgccactactgcgcctgcttgaccttctgggagccagcggagccttcacaggaaacg

SEQ ID NO: 112355 - DNA, 120 bp, Artificial Sequence
  ENSG00000100241_4 (sequence is synthesized)
acgcgcgtggaggatgccacagagagggaggaagagggggatgagggaggccagacccacctgtctcccacagcacctgccccatctgcccagctgtttgcaccgaagacgctggtactg

SEQ ID NO: 112356 - DNA, 120 bp, Artificial Sequence
  ENSG00000100241_5 (sequence is synthesized)
gtgtcgcgactcgaccacacggaggtgttcaggaacagccttggcctcatctatgccatccacgtggagggcctgaatgtgtgcctggagaacgtgattgggaacctgctgacgtgcact

SEQ ID NO: 112357 - DNA, 120 bp, Artificial Sequence
  ENSG00000100241_6 (sequence is synthesized)
gtgcccctggctgggggctcgcagaggacgatctctttgggggctggtgaccggcaggtcatccagactccactggccgactcgctgcccgtcagccgctgcagcgtggccctgctcttc

SEQ ID NO: 112358 - DNA, 120 bp, Artificial Sequence
  ENSG00000100241_7 (sequence is synthesized)
cgccagctaggcatcaccaacgtgctgtctttgttctgtgccgccctcacggagcacaaggttctcttcctgtcccggagctaccagcggctcgccgatgcctgtaggggcctcctggca

SEQ ID NO: 112359 - DNA, 120 bp, Artificial Sequence
  ENSG00000100241_8 (sequence is synthesized)
ctgctgtttcctctcagatacagcttcacctatgtgcccatcctgccggctcagctgctggaggtcctcagcacacccacgcccttcatcattggggtcaacgcggccttccaggcagag

SEQ ID NO: 112360 - DNA, 120 bp, Artificial Sequence
  ENSG00000100241_9 (sequence is synthesized)
acccaggagctgctcgatgtgattgttgctgatctggatggagggacggtcaccattcctgagtgtgtgcacattccacccttgccagagccactgcagagtcagacgcacagtgtgctg

SEQ ID NO: 112361 - DNA, 120 bp, Artificial Sequence
  ENSG00000100241_10 (sequence is synthesized)
agcatggtcctggacccggagctggagttggctgacctcgccttccctccgcccacgacatccacctcctccctgaagatgcaggacaaggagctgcgcgcggtcttcctgcggctgttc

SEQ ID NO: 112362 - DNA, 120 bp, Artificial Sequence
  ENSG00000100241_11 (sequence is synthesized)
gctcagctgctgcagggctatcgctggtgcctgcacgtcgtgcgcatccacccggagcctgtcatccgcttccataaggcagccttcctgggccagcgtgggctggtagaggacgatttc

SEQ ID NO: 112363 - DNA, 120 bp, Artificial Sequence
  ENSG00000100241_12 (sequence is synthesized)
ctgatgaaggtgctggagggcatggcctttgctggctttgtgtcagagcgtggggtcccataccgccctacggacctgttcgatgagctggtggcccacgaggtggcaaggatgcgggcg

SEQ ID NO: 112364 - DNA, 120 bp, Artificial Sequence
  ENSG00000100241_13 (sequence is synthesized)
gatgagaaccacccccagcgtgtcctgcgtcacgtccaggaactggcagagcagctctacaagaacgagaacccgtacccagccgtggcgatgcacaaggtacagaggcccggtgagagc

SEQ ID NO: 112365 - DNA, 120 bp, Artificial Sequence
  ENSG00000100241_14 (sequence is synthesized)
agccacctgcgacgggtgccccgacccttcccccggctggatgagggcaccgtgcagtggatcgtggaccaggctgcagccaagatgcagggtgcacccccagctgtgaaggccgagagg

SEQ ID NO: 112366 - DNA, 120 bp, Artificial Sequence
  ENSG00000100241_15 (sequence is synthesized)
aggaccaccgtgccctcagggccccccatgactgccatactggagcggtgcagtgggctgcatgtcaacagcgcccggcggctggaggttgtgcgcaactgcatctcctacgtgtttgag

SEQ ID NO: 112367 - DNA, 120 bp, Artificial Sequence
  ENSG00000100241_16 (sequence is synthesized)
gggaaaatgcttgaggccaagaagctgctcccagccgtgttgagggccctgaaggggcgagctgcccgccgctgcctcgcccaggagctgcacctgcatgtgcagcagaaccgtgcggtc

SEQ ID NO: 112368 - DNA, 120 bp, Artificial Sequence
  ENSG00000100241_17 (sequence is synthesized)
ctggaccaccagcagtttgactttgtcgtccgtatgatgaactgctgcctgcaggactgcacttctctggacgagcatggcattgcggcggctctgctgcctctggtcacagccttctgc

SEQ ID NO: 112369 - DNA, 120 bp, Artificial Sequence
  ENSG00000100241_18 (sequence is synthesized)
cggaagctgagcccgggggtgacgcagtttgcatacagctgtgtgcaggagcacgtggtgtggagcacgccacagttctgggaggccatgttctatggggatgtgcagactcacatccgg

SEQ ID NO: 112370 - DNA, 120 bp, Artificial Sequence
  ENSG00000100241_19 (sequence is synthesized)
gccctctacctggagcccacggaggacctggcccccgcccaggaggttggggaggcaccttcccaggaggacgagcgctctgccctagacgtggcttctgagcagcggcgcttgtggcca

SEQ ID NO: 112371 - DNA, 120 bp, Artificial Sequence
  ENSG00000100241_20 (sequence is synthesized)
actctgagtcgtgagaagcagcaggagctggtgcagaaggaggagagcacggtgttcagccaggccatccactatgccaaccgcatgagctacctcctcctgcccctggacagcagcaag

SEQ ID NO: 112372 - DNA, 120 bp, Artificial Sequence
  ENSG00000100241_21 (sequence is synthesized)
agccgcctacttcgggagcgtgccgggctgggcgacctggagagcgccagcaacagcctggtcaccaacagcatggctggcagtgtggccgagagctatgacacggagagcggcttcgag

SEQ ID NO: 112373 - DNA, 120 bp, Artificial Sequence
  ENSG00000100241_22 (sequence is synthesized)
gatgcagagacctgcgacgtagctggggctgtggtccgcttcatcaaccgctttgtggacaaggtctgcacggagagtggggtcaccagcgaccacctcaaggggctgcatgtcatggtg

SEQ ID NO: 112374 - DNA, 120 bp, Artificial Sequence
  ENSG00000100241_23 (sequence is synthesized)
ccagacattgtccagatgcacatcgagaccctggaggccgtgcagcgggagagccggaggctgccgcccatccagaagcccaagctgctgcggccgcgcctgctgccgggtgaggagtgt

SEQ ID NO: 112375 - DNA, 120 bp, Artificial Sequence
  ENSG00000100241_24 (sequence is synthesized)
gtgctggacggcctgcgcgtctacctgctgccggatgggcgtgaggagggcgcggggggcagtgctgggggaccagcattgctcccagctgagggcgccgtcttcctcaccacgtaccgg

SEQ ID NO: 112376 - DNA, 120 bp, Artificial Sequence
  ENSG00000100241_25 (sequence is synthesized)
gtcatcttcacggggatgcccacggaccccctggttggggagcaggtggtggtccgctccttcccggtggctgcgctgaccaaggagaagcgcatcagcgtccagacccctgtggaccag

SEQ ID NO: 112377 - DNA, 120 bp, Artificial Sequence
  ENSG00000100241_26 (sequence is synthesized)
ctcctgcaggacgggctccagctgcgctcctgcacattccagctgctgaaaatggcctttgacgaggaggtggggtctgacagcgccgagctcttccgtaagcagctgcataagctgcgg

SEQ ID NO: 112378 - DNA, 120 bp, Artificial Sequence
  ENSG00000100241_27 (sequence is synthesized)
tacccgccggacatcagggccacctttgcgttcaccttgggctctgcccacacacctggccggccaccgcgagtcaccaaggacaagggtccttccctcagaaccctgtcccggaacctg

SEQ ID NO: 112379 - DNA, 120 bp, Artificial Sequence
  ENSG00000100241_28 (sequence is synthesized)
gtcaagaacgccaagaagaccatcgggcggcagcatgtcactcgcaagaagtacaacccccccagctgggagcaccggggccagccgccccctgaggaccaggaggacgagatctcagtg

SEQ ID NO: 112380 - DNA, 120 bp, Artificial Sequence
  ENSG00000100241_29 (sequence is synthesized)
tcggaggagctggagcccagcacgctgaccccgtcctcagccctgaagccctccgaccgcatgaccatgagcagcctggtggaaagggcttgctgtcgcgactaccagcgcctcggtctg

SEQ ID NO: 112381 - DNA, 120 bp, Artificial Sequence
  ENSG00000100241_30 (sequence is synthesized)
ggcaccctgagcagcagcctgagccgggccaagtctgagcccttccgcatttctccggtcaaccgcatgtatgccatctgccgcagctacccagggctgctgatcgtgccccagagtgtc

SEQ ID NO: 112382 - DNA, 120 bp, Artificial Sequence
  ENSG00000100241_31 (sequence is synthesized)
caggacaacgccctgcagcgcgtgtcccgctgctaccgccagaaccgcttccccgtggtctgctggcgcagcgggcggtccaaggcggtgctgctgcgctctggaggcctgcatggcaaa

SEQ ID NO: 112383 - DNA, 120 bp, Artificial Sequence
  ENSG00000100241_32 (sequence is synthesized)
ggtgtcgtcggcctcttcaaggcccagaacgcaccttctccaggccagtcccaggcggactcgagtagcctggagcaggagaagtacctgcaggctgtggtcagctccatgccccgctac

SEQ ID NO: 112384 - DNA, 120 bp, Artificial Sequence
  ENSG00000100241_33 (sequence is synthesized)
cccatggcggcctcggcctccagacggaccgcaccccgaggtaagtggggcagtgtccggaccagtggacgcagcagtggccttggcaccgatgtgggctcccggctagctggcagagac

SEQ ID NO: 112385 - DNA, 120 bp, Artificial Sequence
  ENSG00000100241_34 (sequence is synthesized)
gcgctggccccaccccaggccaacgggggccctcccgacccgggcttcctgcgtccgcagcgagcagccctctatatccttggggacaaagcccagctcaagggtgtgcggtcagacccc

SEQ ID NO: 112386 - DNA, 120 bp, Artificial Sequence
  ENSG00000100241_35 (sequence is synthesized)
ctgcagcagtgggagctggtgcccattgaggtattcgaggcacggcaggtgaaggctagcttcaagaagctgctgaaagcatgtgtcccaggctgccccgctgctgagcccagcccagcc

SEQ ID NO: 112387 - DNA, 120 bp, Artificial Sequence
  ENSG00000100241_36 (sequence is synthesized)
tccttcctgcgctcactggaggactcagagtggctgatccagatccacaagctgctgcaggtgtctgtgctggtggtggagctcctggattcaggctcctccgtgctggtgggcctggag

SEQ ID NO: 112388 - DNA, 120 bp, Artificial Sequence
  ENSG00000100241_37 (sequence is synthesized)
gatggctgggacatcaccacccaggtggtatccttggtgcagctgctctcagaccccttctaccgcacgctggagggctttcgcctgctggtggagaaggagtggctgtccttcggccat

SEQ ID NO: 112389 - DNA, 120 bp, Artificial Sequence
  ENSG00000100241_38 (sequence is synthesized)
cgcttcagccaccgtggagctcacaccctggccgggcagagcagcggcttcacacccgtcttcctgcagttcctggactgcgtacaccaggtccacctgcagttccccatggagtttgag

SEQ ID NO: 112390 - DNA, 120 bp, Artificial Sequence
  ENSG00000100241_39 (sequence is synthesized)
ttcagccagttctacctcaagttcctcggctaccaccatgtgtcccgccgtttccggaccttcctgctcgactctgactatgagcgcattgagctggggctgctgtatgaggagaagggg

SEQ ID NO: 112391 - DNA, 120 bp, Artificial Sequence
  ENSG00000100241_40 (sequence is synthesized)
gaacgcaggggccaggtgccgtgcaggtctgtgtgggagtatgtggaccggctgagcaagaggacgcctgtgttccacaattacatgtatgcgcccgaggacgcagaggtcctgcggccc

SEQ ID NO: 112392 - DNA, 120 bp, Artificial Sequence
  ENSG00000100241_41 (sequence is synthesized)
tacagcaacgtgtccaacctgaaggtgtgggacttctacactgaggagacgctggccgagggccctccctatgactgggaactggcccaggggccccctgaacccccagaggaagaacgg

SEQ ID NO: 112393 - DNA, 120 bp, Artificial Sequence
  ENSG00000100241_42 (sequence is synthesized)
tctgatggaggcgctccccagagcaggcgccgcgtggtgtggccctgttacgacagctgcccgcgggcccagcctgacgccatctcacgcctgctggaggagctgcagaggctggagaca

SEQ ID NO: 112394 - DNA, 120 bp, Artificial Sequence
  ENSG00000100241_43 (sequence is synthesized)
gagttgggccaacccgctgagcgctggaaggacacctgggaccgggtgaaggctgcacagcgcctcgagggccggccagacggccgtggcacccctagctccctccttgtgtccaccgca

SEQ ID NO: 112395 - DNA, 120 bp, Artificial Sequence
  ENSG00000100241_44 (sequence is synthesized)
ccccaccaccgtcgctcgctgggtgtgtacctgcaggaggggcccgtgggctccaccctgagcctcagcctggacagcgaccagagtagtggctcaaccacatccggctcccgtcaggct

SEQ ID NO: 112396 - DNA, 120 bp, Artificial Sequence
  ENSG00000100241_45 (sequence is synthesized)
gcccgccgcagcaccagcaccctgtacagccagttccagacagcagagagtgagaacaggtcctacgagggcactctgtacaagaagggggccttcatgaagccttggaaggcccgctgg

SEQ ID NO: 112397 - DNA, 120 bp, Artificial Sequence
  ENSG00000100241_46 (sequence is synthesized)
ttcgtgctggacaagaccaagcaccagctgcgctactacgaccaccgtgtggacacagagtgcaagggtgtcatcgacttggcggaggtggaggctgtggcacctggcacgcccactatg

SEQ ID NO: 112398 - DNA, 120 bp, Artificial Sequence
  ENSG00000100241_47 (sequence is synthesized)
ggtgcccctaagactgtggacgagaaggccttctttgacgtgaagacaacgcgtcgcgtttacaacttctgtgcccaggacgtgccctcggcccagcagtgggtggaccggatccagagc

SEQ ID NO: 112399 - DNA, 120 bp, Artificial Sequence
  ENSG00000100241_48 (sequence is synthesized)
tgcctgtcggacgcctgagcctcccagccctgcccggctgctctgcttccggtcgttaccgaccactaggggtgggcagggccgccccggccatgtttacagccccggccctcgacagta

SEQ ID NO: 112400 - DNA, 120 bp, Artificial Sequence
  ENSG00000100241_49 (sequence is synthesized)
ttgaggccccgagcccccagcacttgtgtgtacagcccccgtccccgccccgccccgcccggccggccctaacttattttggcgtcacagctgagcaccgtgccgggaggtggccaaggt

SEQ ID NO: 112401 - DNA, 120 bp, Artificial Sequence
  ENSG00000100241_50 (sequence is synthesized)
acagcccgcaatgggcctgtaaatagtccggccccgtcagcgtgtgctggtccagccagcggctgcaggcgagtttctagaaccagagtctatataaagagagaactaacgccacgctcc

SEQ ID NO: 112402 - DNA, 120 bp, Artificial Sequence
  ENSG00000100241_51 (sequence is synthesized)
tgtgcctgccttccccactccccggctgcctgctctcggcctacccagagggtcccatctgcccctatccaggcccacctggcgggaggttggcatctttctcgtgagcctctcctggtg

SEQ ID NO: 112403 - DNA, 120 bp, Artificial Sequence
  ENSG00000100241_52 (sequence is synthesized)
cctgggtccacccagctcggcctgcatgtccctgggagtgactttgctctgggggcggatcgagcaggaggcttcactggggacttgcttgattccctccacgcctcagggctggtctag

SEQ ID NO: 112404 - DNA, 120 bp, Artificial Sequence
  ENSG00000100241_53 (sequence is synthesized)
gggccggcacggctggagaggaagcccccatccctacccaggggatgcagaagctgacctcacagaggcttgggggtgaaagggtgggtggtcatttgaccccagaaggctgttgcaggt

SEQ ID NO: 112405 - DNA, 120 bp, Artificial Sequence
  ENSG00000100241_54 (sequence is synthesized)
ccagaggacacttgaggtggacgtcagtttctggctagacccgagctgaagggatggaggccggaggcgggggggggggggggacagtgggctcccaggggaatgcaggttgaccacatc

SEQ ID NO: 112406 - DNA, 120 bp, Artificial Sequence
  ENSG00000100241_55 (sequence is synthesized)
tggctcctgccaggcaacgagcagcatctggcagagtaaggggccaacgcccatgggggatggaccctctcagttcttgggaattctgccccaaaagtcctttccctggggtctcagagg

SEQ ID NO: 112407 - DNA, 120 bp, Artificial Sequence
  ENSG00000100241_56 (sequence is synthesized)
gcccccgtccttcccttcttggtgtcactgtggcccctcactgctcttttcctattcaaacctgagtcccaccaggcccagggcttcacctgctgagctgttgtgtccttgcctgtgacg

SEQ ID NO: 112408 - DNA, 120 bp, Artificial Sequence
  ENSG00000100241_57 (sequence is synthesized)
aggcctggccaggggtgcaggagcagaaggtggggagggttatagacgctgcaaaggccaagagaacatctgagagtggcagctggtgacctggccagaggggctggtgaggggcagaga

SEQ ID NO: 112409 - DNA, 120 bp, Artificial Sequence
  ENSG00000100241_58 (sequence is synthesized)
acctggctagaggctgggtccctcaggtggtcctctcaggtgggaggcgagcagcaggtgtgggtgaggggaaggttctgatgacagctgcagaggcagggcccagtgctggcaggtggg

SEQ ID NO: 112410 - DNA, 120 bp, Artificial Sequence
  ENSG00000100241_59 (sequence is synthesized)
gggccaagaccctcccctggtgggacgttgaagccaaggatggccttggaccctgtcaggcccagcatggtcccgccacctcccccaccccacaggtggtgttgggacacctgggcgaga

SEQ ID NO: 112411 - DNA, 120 bp, Artificial Sequence
  ENSG00000100241_60 (sequence is synthesized)
tgtgagggtgggctcacttgagccactgaaaccagccaggtcttccctcaggccggacagatggcgcctgaccgaagttcctggcacctggaaaacccacaggtcagagtaaggggagaa

SEQ ID NO: 112412 - DNA, 120 bp, Artificial Sequence
  ENSG00000100241_61 (sequence is synthesized)
aggaccctgccctccctgttccacgtctgtggggggagaggacaaatgccaggcacagggtaggcggcgagaacaaggcactcaatgtgtagctggggcagagactcggcctctggggag

SEQ ID NO: 112413 - DNA, 120 bp, Artificial Sequence
  ENSG00000100241_62 (sequence is synthesized)
ctgagcgggttccctccacccccaaccgtggtggaaagacaagctcgctggggcggggtgggggtctggtctccacctgcccctcccactcagccactgaggacaaggtggggcccaggc

SEQ ID NO: 112414 - DNA, 120 bp, Artificial Sequence
  ENSG00000100241_63 (sequence is synthesized)
ttctgggagggggagctggcacaaaaggaagtcctggggttgatgtgtttgagcgttaggcgaagtggttccccccatcccccaaacggaaaaatgtcagtatttgctaagctgtagaga

SEQ ID NO: 112415 - DNA, 120 bp, Artificial Sequence
  ENSG00000100241_64 (sequence is synthesized)
cctgatgccgtgatgtggcctgttccgcctccacccattacacggggataacgctggggggtggcgggcccacaaaagaggtgctggaggagactctcccacccctggccgggccggggc

SEQ ID NO: 112416 - DNA, 120 bp, Artificial Sequence
  ENSG00000100241_65 (sequence is synthesized)
tttggggccggaaggttcacagtacgcggtttgtccgaacgtcacggcttttattgggagttgggggtttggggtgccctgtcaggtgatcagaacattaaaaatggactcaacgtaaaa

SEQ ID NO: 112417 - DNA, 120 bp, Artificial Sequence
  ENSG00000100241_66 (sequence is synthesized)
ctggctgggggctcgcaggtgagttttggaggcagctggtatctgcacagccacaggccctcctgctggggccctggtaggtatttggagcccagccagagccacacacagctggaggcc

SEQ ID NO: 112418 - DNA, 120 bp, Artificial Sequence
  ENSG00000100241_67 (sequence is synthesized)
ttggatgctccctcttgcgtcctcgtgccaccattgcccccaacagtcctggcctgcttacctggccctcgcacctgtgctctgggcctgtgtcgttcagcctctctgtccactcctttg

SEQ ID NO: 112419 - DNA, 120 bp, Artificial Sequence
  ENSG00000100241_68 (sequence is synthesized)
atggtgtgtgcctgtctctggatgttgatgtcagcttgtttgtctgctccctgccctgtgcctgggtgtgttggagtgtctaaccgtgtctttctgcccgtctgtcctgtgcagctggac

SEQ ID NO: 112420 - DNA, 120 bp, Artificial Sequence
  ENSG00000100241_69 (sequence is synthesized)
gctgcttgggacaacagaggcagggcatggcgtttccctcttgccatgttgcccatcccagccagtcccacctcgggtctgtcagtacaccagggtctgcctggggacacagagctctgg

SEQ ID NO: 112421 - DNA, 120 bp, Artificial Sequence
  ENSG00000100241_70 (sequence is synthesized)
tcggagcagcctgctgggcccacgtgggctgatgaccacacgggggatgcagtttatggttctgggcccctgctgcattctctcgggggtgggtactgacaggatgctggcttggtaaac

SEQ ID NO: 112422 - DNA, 120 bp, Artificial Sequence
  ENSG00000100241_71 (sequence is synthesized)
actggagggcttgaaggtagggccaccggcatcttgagggacagggacgtccctcagtcctagagggcttggaagggggtgggctgtgaccagcaggctggaggcggtggtcggcacacc

SEQ ID NO: 112423 - DNA, 120 bp, Artificial Sequence
  ENSG00000100241_72 (sequence is synthesized)
cagagcgagctgtgtttgtccagtgctctgcccgcatacagggcttggggggctgtggacagggcctgcctccccgctgcctgtggacatgcgggtctctggcctggtgagtggccaggc

SEQ ID NO: 112424 - DNA, 120 bp, Artificial Sequence
  ENSG00000100241_73 (sequence is synthesized)
ccaccgcatagcccttctgctgccacggagtgctctgcggcctgccctgccctggcagagaggcccacaccaggatggctcttcccactttcctgcgatcagggacttggggctgacccc

SEQ ID NO: 112425 - DNA, 120 bp, Artificial Sequence
  ENSG00000100241_74 (sequence is synthesized)
gtcctacgagggcactctgtacaagaagggggccttcatgaagccttggaaggcccgctggttcgtgctggacaagaccaagcaccaggtgagtgatcaggtggtgggggggactcacgg

SEQ ID NO: 112426 - DNA, 120 bp, Artificial Sequence
  ENSG00000100242_0 (sequence is synthesized)
ggacttcccgggcagcctcccgggaggaggagggcaaaggccgactgccccaacccggccccgggcagcgcctacgggttttgtgccagacaggccgtttccagggacaggcagttccca

SEQ ID NO: 112427 - DNA, 120 bp, Artificial Sequence
  ENSG00000100242_1 (sequence is synthesized)
gcctctgcctgtcagaactcagggcctcagaggaaggcccgttttgttcagttctaaaacaaaacaaaacaaagcaatggggggcgcggtgtgacttagagagccaggaggcgcgccttt

SEQ ID NO: 112428 - DNA, 120 bp, Artificial Sequence
  ENSG00000100242_2 (sequence is synthesized)
ggtgacaatttctgcaggtgtcacctccttcagcaggacagaggctaagaggagtccctgtgtgggcagctggagccttcagattctcttcaggggaagagtccacatcccacctcatca

SEQ ID NO: 112429 - DNA, 120 bp, Artificial Sequence
  ENSG00000100242_3 (sequence is synthesized)
tgtcccgaagaagccagcgcctcacgcgctactcccagggtgacgatgacggcagcagcagcagcggagggagctcggtggctgggagtcagagcaccctgtttaaagacagtcctctca

SEQ ID NO: 112430 - DNA, 120 bp, Artificial Sequence
  ENSG00000100242_4 (sequence is synthesized)
ggaccttgaagaggaaatccagcaacatgaagcgcctgtccccagcgccacagctgggcccgtcctctgatgcacacacctcctactacagtgagtcgctggtccacgagtcctggttcc

SEQ ID NO: 112431 - DNA, 120 bp, Artificial Sequence
  ENSG00000100242_5 (sequence is synthesized)
cacccaggagctccctggaggaactgcatggtgacgccaactggggtgaggacctgcgggtgcggaggaggagaggcacgggtggctcagagagcagcagggccagcgggcttgtggggc

SEQ ID NO: 112432 - DNA, 120 bp, Artificial Sequence
  ENSG00000100242_6 (sequence is synthesized)
gcaaggccaccgaggacttcctgggctcttcctcgggctactcctctgaggacgactacgtgggctactcggatgtggaccagcagagttccagctcgcggctccgaagcgccgtctcac

SEQ ID NO: 112433 - DNA, 120 bp, Artificial Sequence
  ENSG00000100242_7 (sequence is synthesized)
gggcgggctccttactctggatggtggccacttcgccaggccggctcttcagacttctctactggtgggctggcaccacctggtaccgcctgaccacagctgcctccctccttgacgtct

SEQ ID NO: 112434 - DNA, 120 bp, Artificial Sequence
  ENSG00000100242_8 (sequence is synthesized)
tcgttttaaccaggcgcttctcgtccctgaagacgttcctctggttcctgctgccgctgctcttgctgacgtgcctgacgtatggtgcttggtatttctacccctatgggctgcagacat

SEQ ID NO: 112435 - DNA, 120 bp, Artificial Sequence
  ENSG00000100242_9 (sequence is synthesized)
tccaccctgctttggtttcctggtgggcagcgaaggacagcaggaggccggatgagggctgggaagccagagactcatcgccacatttccaggctgagcagcgtgttatgtcccgggtac

SEQ ID NO: 112436 - DNA, 120 bp, Artificial Sequence
  ENSG00000100242_10 (sequence is synthesized)
actctctggagcggcgtctggaagctcttgctgctgaattttcctccaactggcagaaggaggccatgcggctggaacgtctggagctgcggcaaggggctcctggccagggaggtggtg

SEQ ID NO: 112437 - DNA, 120 bp, Artificial Sequence
  ENSG00000100242_11 (sequence is synthesized)
gtggcctgagccacgaggacaccctggcgctgctggaggggctagtgagccgccgtgaagctgccctgaaggaggatttccgcagggaaactgctgctcgcatccaggaagaactgtctg

SEQ ID NO: 112438 - DNA, 120 bp, Artificial Sequence
  ENSG00000100242_12 (sequence is synthesized)
ccctgagagcagagcatcagcaagactcagaagacctcttcaagaagatcgtccgggcctcccaggagtccgaggctcgcatccagcagctgaagtcagagtggcaaagcatgacccagg

SEQ ID NO: 112439 - DNA, 120 bp, Artificial Sequence
  ENSG00000100242_13 (sequence is synthesized)
agtccttccaggagagctctgtgaaggagctgaggcggctggaggaccagctggccggcctgcagcaggagctggcggctctggcactgaagcagagctcggtggcggaagaagtgggcc

SEQ ID NO: 112440 - DNA, 120 bp, Artificial Sequence
  ENSG00000100242_14 (sequence is synthesized)
tgctgccccagcagatccaggccgtgcgggacgacgtggaatctcagttcccggcctggatcagtcagttccttgcccgaggtggagggggccgcgtggggctccttcagagagaggaga

SEQ ID NO: 112441 - DNA, 120 bp, Artificial Sequence
  ENSG00000100242_15 (sequence is synthesized)
tgcaagctcagctgcgagagctggagagcaagatcctcacccatgtggcagagatgcagggcaagtcggccagggaagccgcggcctccctgagcctgacgctgcagaaagaaggtgtga

SEQ ID NO: 112442 - DNA, 120 bp, Artificial Sequence
  ENSG00000100242_16 (sequence is synthesized)
tcaggaggggccagcgtcatcagcacccgatgttctgagacctacgagaccaagacggccctcctcagcctcttcggcatccccctgtggtaccactcccagtcaccccgagtcatcctc

SEQ ID NO: 112443 - DNA, 120 bp, Artificial Sequence
  ENSG00000100242_17 (sequence is synthesized)
cagccagatgtgcacccaggcaactgctgggccttccaggggccacaaggcttcgccgtggtccgcctctctgcccgcatccgccccacagccgttaccttagagcatgtgcccaaggcc

SEQ ID NO: 112444 - DNA, 120 bp, Artificial Sequence
  ENSG00000100242_18 (sequence is synthesized)
ttgtcacccaacagcactatctccagtgcccccaaggacttcgccatctttgggtttgacgaagacctgcagcaggaggggacactccttggcaagttcacttacgatcaggacggcgag

SEQ ID NO: 112445 - DNA, 120 bp, Artificial Sequence
  ENSG00000100242_19 (sequence is synthesized)
cctattcagacgtttcactttcaggcccctacgatggccacgtaccaggtggtggagctgcggatcctgactaactggggccaccccgagtacacctgcatctaccgcttcagagtgcat

SEQ ID NO: 112446 - DNA, 120 bp, Artificial Sequence
  ENSG00000100242_20 (sequence is synthesized)
ggggagcccgcccactagccctgcttactggtgcctgctgccagccatctgggagtgggtgaacagcaccccgccgcttcccccacacgcttgctcggcgctctgacttctaggagcaca

SEQ ID NO: 112447 - DNA, 120 bp, Artificial Sequence
  ENSG00000100242_21 (sequence is synthesized)
agagaggagcctgtggccccatgcagatgaaaaggacgggcagggtctcctgagcagcaggtggctcgaggcggttagcaggctccagcagctcccttcttccttccctctgtgcccgtg

SEQ ID NO: 112448 - DNA, 120 bp, Artificial Sequence
  ENSG00000100242_22 (sequence is synthesized)
gcgtctgcttcccatcctgggagtgtgtatatatgtagcatatcatgggggactgggaagttgggagaggtaggacctgactggtcttggctggggtcaggggctggtgcctgggagctg

SEQ ID NO: 112449 - DNA, 120 bp, Artificial Sequence
  ENSG00000100242_23 (sequence is synthesized)
atgaagcaggtgccagggctgtgggaggggcaagctacggcctgggctaggtgagctgcctctgcccctgggcaaggaagcgaggccctctgggaggagggtgcttagctccagagcagg

SEQ ID NO: 112450 - DNA, 120 bp, Artificial Sequence
  ENSG00000100242_24 (sequence is synthesized)
atgggacttccccaggcaggaagcacttgatggagagctgcccagctctcctacaaggttagtgccctccacctagggaagcatgaaccacagggtccctgagggccttcgacaaaagtg

SEQ ID NO: 112451 - DNA, 120 bp, Artificial Sequence
  ENSG00000100242_25 (sequence is synthesized)
tgtatttgtcccggggagggtagcagtgggccatggggcttcttgtgccctaaaggggactggctgctgtgatcttctaaggggcccagggccaaccctgtaggcttcccctctgctggg

SEQ ID NO: 112452 - DNA, 120 bp, Artificial Sequence
  ENSG00000100242_26 (sequence is synthesized)
gacggtagttgcttttctctctcctgatgctaggttggggcccaccctgctccctgttcctgctagggcctgccagtgcccctgagcttgctttccacattctcccagggtatggagacc

SEQ ID NO: 112453 - DNA, 120 bp, Artificial Sequence
  ENSG00000100242_27 (sequence is synthesized)
tagacctgtctttggggccattagcatctggggttatagcaagaagagtggggagcatggaactcctgggctcttgtggggacgttcagggtatcggggtgcgaggtctgtctgcaccgg

SEQ ID NO: 112454 - DNA, 120 bp, Artificial Sequence
  ENSG00000100242_28 (sequence is synthesized)
cccccacatctaaccaggccctgatgtaggggtcgtccgctcaggctgcccccttgggctcttgcagctcttgttcaggtagtcgcccttctggtttgttctctgtggggcagttggtgg

SEQ ID NO: 112455 - DNA, 120 bp, Artificial Sequence
  ENSG00000100242_29 (sequence is synthesized)
gggctgggggaagaggctggcagaagttaccctggatagggaagggggaggaggggacttttagagccagcaggccccactgtattatgtatatatttttcaaggtctgtttttctaact

SEQ ID NO: 112456 - DNA, 120 bp, Artificial Sequence
  ENSG00000100242_30 (sequence is synthesized)
gaaaagctaagggcttgattcctagccccgttctgtggggcactgggtgatactcagtttcttgttcctggccgtggagaggggcctggggcactggttccggctgtgtctggtggtctg

SEQ ID NO: 112457 - DNA, 120 bp, Artificial Sequence
  ENSG00000100242_31 (sequence is synthesized)
gctgcggggaaggggcaagaaggcgggcaggccttcactgcagcactgagcctcaaatccgctctggagcatgaggctggatgcagtggtggtgaggccgccccgctccatcccgaggca

SEQ ID NO: 112458 - DNA, 120 bp, Artificial Sequence
  ENSG00000100242_32 (sequence is synthesized)
gccagggtttgttttgcgctctcctgtcacaaatgctgcactattggttcttaagttttttatctccagatcctaatttatgcctatgcaaaaaataaatgacgcccaagagctgtggga

SEQ ID NO: 112459 - DNA, 120 bp, Artificial Sequence
  ENSG00000100242_33 (sequence is synthesized)
actcttgtttcgctccttgacaaccctggcgggggttcgctggctgcggccccggctccggcccccgcaggagcagctgcccctagggggagacagactcgcctgctgtgcctgggtcgg

SEQ ID NO: 112460 - DNA, 80 bp, Artificial Sequence
  ENSG00000100242_34 (sequence is synthesized)
ccgcattgtccgcccgcccgccttgtcccgcgtcgccgctcttcgcgtgcccgcgcgccccgggcccggccgctgtgtcg

SEQ ID NO: 112461 - DNA, 120 bp, Artificial Sequence
  ENSG00000100242_35 (sequence is synthesized)
gcccgcgggatccccacgcggaaagggggcgcgccccggcggcggcctggcctcggacgcccccggccgggctagaagccgccgcggcagcagattctcttcaggggaagagtccacatc

SEQ ID NO: 112462 - DNA, 120 bp, Artificial Sequence
  ENSG00000100242_36 (sequence is synthesized)
gattcgcagtagtagatttcagctcccagaggctcacttcttgttttggagaatggggcctcgacctttttcatcttgtgaaacccagactcaatggtaaactgttttgtgatgccagga

SEQ ID NO: 112463 - DNA, 120 bp, Artificial Sequence
  ENSG00000100242_37 (sequence is synthesized)
tgccgcaggaaagactgagaggcatctctgggagttctgggagggcggaggcgggtgctgacagttttcagcactccccgctcaacctccatcagaatatttagttcttcccagcggcag

SEQ ID NO: 112464 - DNA, 120 bp, Artificial Sequence
  ENSG00000100242_38 (sequence is synthesized)
caggtgctccctgggcacttaccctgccaggcatggggttcagagagggaagccctgctctcctttcccacagctcaagatgtgatatccaaatggggtgtaacacgcatcctgcagacg

SEQ ID NO: 112465 - DNA, 120 bp, Artificial Sequence
  ENSG00000100242_39 (sequence is synthesized)
tcagcacaggggaaggcaccttccagaagggcagcatgagggaagcttcctggaaaaggacaccaggaggtgggctttacacaagaggggttgggtggccaggaaaggaaggccgggaga

SEQ ID NO: 112466 - DNA, 120 bp, Artificial Sequence
  ENSG00000100242_40 (sequence is synthesized)
ggcgttcgaggagccgccgccagcacatgccagggcgcgggcattctaccatggccagctggagcctcaggcagtgcatgcggcttaaacttcagtgggcatccgatctcctaagtcagt

SEQ ID NO: 112467 - DNA, 120 bp, Artificial Sequence
  ENSG00000100242_41 (sequence is synthesized)
tgcagtccccgggattccctcctcagagcacctctctgcccagaccccacttttcagaagctcttggaggcccagaagagcccctggttcttccctgcacaggtgaggacctgcgggtgc

SEQ ID NO: 112468 - DNA, 120 bp, Artificial Sequence
  ENSG00000100242_42 (sequence is synthesized)
aaagctcaggatcagcagaaatcacccaacctagtacccatgacaaaggcaagtggcaattcagggaagtcaggacgtaccgagtaccatcctgggccagggagaggctgacctttaaag

SEQ ID NO: 112469 - DNA, 120 bp, Artificial Sequence
  ENSG00000100242_43 (sequence is synthesized)
ctgctctgagcatctcggttagggttaaaggctaggcctggggcatctgccgtccaccttcagcgaggagacagccaatggcctgagcggggccctcctcccgtgcgggagcccaccctg

SEQ ID NO: 112470 - DNA, 120 bp, Artificial Sequence
  ENSG00000100242_44 (sequence is synthesized)
aggcaggactggggagcagagccgcagagcagagagttctgatcatcttgccaagcagatggtagggggaggggttgaaacccagctcaggacccctgcccagggcctgtctttgaggtg

SEQ ID NO: 112471 - DNA, 120 bp, Artificial Sequence
  ENSG00000100242_45 (sequence is synthesized)
ccatggaggttagcaggggggtcctgagggcggggggcaggctgtgtgagaggaccgggattcatttatagacacagcatcctttcttacagcctcacataactgccttctcatgcccca

SEQ ID NO: 112472 - DNA, 120 bp, Artificial Sequence
  ENSG00000100242_46 (sequence is synthesized)
tgaggcagagtacattctggactctgggcttagaaagggagcaggctcagaattagctccttgggacaggcaggggttctgcagccagaacccccaggagaggccttgccccttctcagg

SEQ ID NO: 112473 - DNA, 120 bp, Artificial Sequence
  ENSG00000100242_47 (sequence is synthesized)
ttcacaatgagtgctgggcacccgctctcctgacgggagcccactagggggtcctctttcatctttggtgtggccttacctcccaccaaagagatccgaggcttactcttctctctctgg

SEQ ID NO: 112474 - DNA, 120 bp, Artificial Sequence
  ENSG00000100242_48 (sequence is synthesized)
cctggaggaactgcatggtgacgccaactgggaccccacttttcagaagctcttggaggcccagaagagcccctggttcttccctgcacaggtgaggacctgcgggtgcggaggaggaga

SEQ ID NO: 112475 - DNA, 120 bp, Artificial Sequence
  ENSG00000100243_0 (sequence is synthesized)
ggagtgacgcgggcccgggcgcgacggtctcggcggcggcggcggcggcgacagagcgagcgcggcgcggggccaccatgggggcccagctcagcacgttgggccatatggtgctcttcc

SEQ ID NO: 112476 - DNA, 120 bp, Artificial Sequence
  ENSG00000100243_1 (sequence is synthesized)
cagtctggttcctgtacagtctgctcatgaagctgttccagcgctccacgccagccatcaccctcgagagcccggacatcaagtacccgctgcggctcatcgaccgggagatcatcagcc

SEQ ID NO: 112477 - DNA, 120 bp, Artificial Sequence
  ENSG00000100243_2 (sequence is synthesized)
atgacacccggcgcttccgctttgccctgccgtcaccccagcacatcctgggcctccctgtcggccagcacatctacctctcggctcgaattgatggaaacctggtcgtccggccctata

SEQ ID NO: 112478 - DNA, 120 bp, Artificial Sequence
  ENSG00000100243_3 (sequence is synthesized)
cacccatctccagcgatgatgacaagggcttcgtggacctggtcatcaaggtttacttcaaggacacccatcccaagtttcccgctggagggaagatgtctcagtacctggagagcatgc

SEQ ID NO: 112479 - DNA, 120 bp, Artificial Sequence
  ENSG00000100243_4 (sequence is synthesized)
agattggagacaccattgagttccggggccccagtgggctgctggtctaccagggcaaagggaagttcgccatccgacctgacaaaaagtccaaccctatcatcaggacagtgaagtctg

SEQ ID NO: 112480 - DNA, 120 bp, Artificial Sequence
  ENSG00000100243_5 (sequence is synthesized)
tgggcatgatcgcgggagggacaggcatcaccccgatgctgcaggtgatccgcgccatcatgaaggaccctgatgaccacactgtgtgccacctgctctttgccaaccagaccgagaagg

SEQ ID NO: 112481 - DNA, 120 bp, Artificial Sequence
  ENSG00000100243_6 (sequence is synthesized)
acatcctgctgcgacctgagctggaggaactcaggaacaaacattctgcacgcttcaagctctggtacacgctggacagagcccctgaagcctgggactacggccagggcttcgtgaatg

SEQ ID NO: 112482 - DNA, 120 bp, Artificial Sequence
  ENSG00000100243_7 (sequence is synthesized)
aggagatgatccgggaccaccttccacccccagaggaggagccgctggtgctgatgtgtggccccccacccatgatccagtacgcctgccttcccaacctggaccacgtgggccacccca

SEQ ID NO: 112483 - DNA, 120 bp, Artificial Sequence
  ENSG00000100243_8 (sequence is synthesized)
cggagcgctgcttcgtcttctgagggccgggcacggtcacacggccacccgccccgcgcaccccacgccctgttcacgctcacccagtcacctccccacatcgcacactggggccccggg

SEQ ID NO: 112484 - DNA, 120 bp, Artificial Sequence
  ENSG00000100243_9 (sequence is synthesized)
ttcagcctggcctgcccgtgccctggtgaatcacctggctgagcagttcccctggagccccttcgggagcagggctgtgtcccagatgggccacggctgagccttcagagtacgtcctgc

SEQ ID NO: 112485 - DNA, 120 bp, Artificial Sequence
  ENSG00000100243_10 (sequence is synthesized)
ctggcacttactggtccttaccagagacgcccagccccatccctgtcctcatgacccctcgtccaccccccacacacactataaggctgagggctgccagcagccccgtctgcccaccat

SEQ ID NO: 112486 - DNA, 120 bp, Artificial Sequence
  ENSG00000100243_11 (sequence is synthesized)
tcccggccgtggaccatagtcgggatgtcagcagacacacatgggcagcccaaagctgcaggtgccagggcccaccccagcctcgcctgtcacccccactcccgcctcagggccaggccc

SEQ ID NO: 112487 - DNA, 120 bp, Artificial Sequence
  ENSG00000100243_12 (sequence is synthesized)
ccagaaagccctcttgggggcactgctccctaccccagggccctggccagccgggagcttggctctcctctggctagagtgggaagagggggctggccatggggccctcccagaacctca

SEQ ID NO: 112488 - DNA, 120 bp, Artificial Sequence
  ENSG00000100243_13 (sequence is synthesized)
gcatttccttccagcccatccaaacactgaggcagccttggggaaccccgagctggggggttggcagcccactgcaccgcctcagggttttggggtcctgggctggggccaccatccctg

SEQ ID NO: 112489 - DNA, 120 bp, Artificial Sequence
  ENSG00000100243_14 (sequence is synthesized)
atggcagaactcccacaaccacatgtatttattcctctgtcctaaaccgtcccctccttccctcacccccagcacagggggattctgagcagtgcctcttgtctgagggacatatcagtg

SEQ ID NO: 112490 - DNA, 120 bp, Artificial Sequence
  ENSG00000100243_15 (sequence is synthesized)
acctcgacgttgcctttagactacagttgtgttagcctcttgcgtattggctttttcagagtcatttatgagcagaaaaaaaaaaagtaaaactttgctaatattaacccttctctagct

SEQ ID NO: 112491 - DNA, 120 bp, Artificial Sequence
  ENSG00000100243_16 (sequence is synthesized)
aaaactttgctaatattaacccttctctagctcctcgagggtctgtgacctgcaacacaaggggtggggtcaggaaagggctggggaagacctagcattttttttttctttttttttttt

SEQ ID NO: 112492 - DNA, 120 bp, Artificial Sequence
  ENSG00000100243_17 (sequence is synthesized)
aggcgtgagccactgcgcccggctccagcatttatttctgatgtatctttgtggtagaaaatttggaaagtgcagagaagtatacacaggaagaaaaattcccaacccccagaggcaaac

SEQ ID NO: 112493 - DNA, 120 bp, Artificial Sequence
  ENSG00000100243_18 (sequence is synthesized)
tatacacaggaagaaaaattcccaacccccagaggcaaaccagctgaaaccacgcaaccccagtcaccccaatgcaccgcgaggctgctgcctcctgtcagggtcagatgagcctcgagg

SEQ ID NO: 112494 - DNA, 120 bp, Artificial Sequence
  ENSG00000100243_19 (sequence is synthesized)
ctcaggaaagtcagaggatgccatctgcatggtggtaaattacagaggtgatgaggcaaggtgggtgtggggctgttcttaaaacggggcagcaggaaggccccaaggagatggatttgg

SEQ ID NO: 112495 - DNA, 120 bp, Artificial Sequence
  ENSG00000100243_20 (sequence is synthesized)
gctgggacgggaagagagagctggccatgctggggtgggtgggtgttcaaatggtggaaacagcagacgcaaaggccctgccgttggaaccagcttgtggaataaactttcagaaacaga

SEQ ID NO: 112496 - DNA, 120 bp, Artificial Sequence
  ENSG00000100243_21 (sequence is synthesized)
atgaataggagtttgctggttggatgcatgcagagcaaggacatttggggcagagaggagagcatatgcgaacgcctgaagcaagatgggcttgatgttgaaagagcagagagctgggag

SEQ ID NO: 112497 - DNA, 120 bp, Artificial Sequence
  ENSG00000100243_22 (sequence is synthesized)
aaaacattggagcttggtctgccatcctgaactgtggttcccctgcctcccagcccggctgtgagtgctcagcgaccctgacaggctgacaggtacagtctgccgggctttcctactgtc

SEQ ID NO: 112498 - DNA, 120 bp, Artificial Sequence
  ENSG00000100243_23 (sequence is synthesized)
cctggcagccccatgcttactctgcggcccagatcccagctctgtgtccacctgttccttctcctgggttcccttcccccacagttcccagccaagccagagccccccactgcagaactt

SEQ ID NO: 112499 - DNA, 120 bp, Artificial Sequence
  ENSG00000100243_24 (sequence is synthesized)
gggaagccttcaggaggaggtgacagctgccctgggcctttgagggcgagtctgttggaatgagagtgggaaggcccagagtccctggcagtggcaccagcaggagtgaaggcatggagg

SEQ ID NO: 112500 - DNA, 120 bp, Artificial Sequence
  ENSG00000100243_25 (sequence is synthesized)
caggaagctgggacgtgaggggaatccccgggaggggtgggagggggccgtgggagctgacgccaggccaggctttgaatgccgggtggggtgcaggggagtgggttgacaagacccagg

SEQ ID NO: 112501 - DNA, 120 bp, Artificial Sequence
  ENSG00000100243_26 (sequence is synthesized)
atctaagacatgcaggccccatgggaggcctctcccaacactttgtgggatccaggccaggggttggccctggagtctgccagccacactgggaaaacattggagcttggtctgccatcc

SEQ ID NO: 112502 - DNA, 120 bp, Artificial Sequence
  ENSG00000100243_27 (sequence is synthesized)
tctgccatcctgaactgtggttcccctgcctcccagcccggctgtgagtgctcagcgaccctgacaggctgacaggaccaggagggaggtgccgctcagattctggcaggaccgctggcg

SEQ ID NO: 112503 - DNA, 120 bp, Artificial Sequence
  ENSG00000100243_28 (sequence is synthesized)
atgtgggtatcacgttcatacacgggtgtgtggaggtgcgggtgtgtgcacactcagtttctttttttgataacctggttttgtagccagccatacaacatggatccttttagtatttca

SEQ ID NO: 112504 - DNA, 120 bp, Artificial Sequence
  ENSG00000100243_29 (sequence is synthesized)
tcatagggatgttacacaagggagcatgtggcagatgtcctaggattgcagctttgccccctcattgtgcccatggtggctttgcggggtccgcagcgggcctgctctgggtgctctgtg

SEQ ID NO: 112505 - DNA, 120 bp, Artificial Sequence
  ENSG00000100243_30 (sequence is synthesized)
cctgctctgggtgctctgtgctttgccccaccctgctgccctactagaggttggccagcaccataattgttcatctcttgtcctcatttctattcttttttttgagacagagtttcactc

SEQ ID NO: 112506 - DNA, 90 bp, Artificial Sequence
  ENSG00000100243_31 (sequence is synthesized)
gcatgcgccaccacgcctggctaacattgtagttcagactggtctcgaacttccgacctcagatgattcgcccacctcggcctcccaaag

SEQ ID NO: 112507 - DNA, 120 bp, Artificial Sequence
  ENSG00000100243_32 (sequence is synthesized)
ggccatctcatttctattcttcctccaaatattttctggtacatgggtgtctgaccttgacccttaggaccagttgatagtcctggaatccacttccagaaggccttggggctctgtttg

SEQ ID NO: 112508 - DNA, 120 bp, Artificial Sequence
  ENSG00000100243_33 (sequence is synthesized)
cccctaatgcagaagcttctggtagaggcagctttgaggcctgggctgcctgggagaggttggtgggccccctgcacacctgatcctgagtggcgtttgcaccgtctttcctgcgatttg

SEQ ID NO: 112509 - DNA, 120 bp, Artificial Sequence
  ENSG00000100243_34 (sequence is synthesized)
cctctgctcacacgtgtagggacgggtctctccttgaggcagctgctctgtgctggaacactgctcaggtcggagagttctcgtactgagccgagatgggcatctgtgatgtcctgccct

SEQ ID NO: 112510 - DNA, 120 bp, Artificial Sequence
  ENSG00000100243_35 (sequence is synthesized)
gttggagaggtctgttgtccccctctaagtgatgacaccatccacatgtggactttgccacgtttggatgtaagcgcctctgcagcgccgaccttccgcatggcttcttcacactccctc

SEQ ID NO: 112511 - DNA, 120 bp, Artificial Sequence
  ENSG00000100243_36 (sequence is synthesized)
tcctggccatgctgggtactggggaccccacagggagtgcaccctcaggacgctgggtttggttccagctccgactggaactgattatgtgatcgtccctggcctgagcgtaagacccac

SEQ ID NO: 112512 - DNA, 120 bp, Artificial Sequence
  ENSG00000100243_37 (sequence is synthesized)
ttaacaagacctcaggggttttagtctcagctccttccctggcccaatctggctcttagccagcccccctcctcctctgccactgtcccagccactgaccatgccctgggtgcccaccct

SEQ ID NO: 112513 - DNA, 120 bp, Artificial Sequence
  ENSG00000100243_38 (sequence is synthesized)
gtgcagggtggaagcctggctttgggctcttggagttcctgggcagggaaggctcccactttctgccctgtgaagcccacctcagtcctggctgccccatttcccaaggggctctcaggt

SEQ ID NO: 112514 - DNA, 120 bp, Artificial Sequence
  ENSG00000100243_39 (sequence is synthesized)
gcagtggcttctgcagcccctctcttgggatgcaggcctgggcacgtgcagccttgtctagctctgccccagtttgcccatccagccctcaagttcttcctgccccttcaggccactgct

SEQ ID NO: 112515 - DNA, 120 bp, Artificial Sequence
  ENSG00000100243_40 (sequence is synthesized)
tgagctgatggcagagatggattcctccctccccgtcctgtctggcatcctccctttgggaccctgggttcattccctgttctggccaccttgtttgtggcccctctaggccagcaggac

SEQ ID NO: 112516 - DNA, 120 bp, Artificial Sequence
  ENSG00000100243_41 (sequence is synthesized)
agacacacccagcgtgcgcctggcctcagcacctcacacgcagcgtgcatgtgtgtgcatctgtgcttggcgtcggcgtcacgtcttacaaggacaagcaggcactggggaagggtgggg

SEQ ID NO: 112517 - DNA, 120 bp, Artificial Sequence
  ENSG00000100243_42 (sequence is synthesized)
acacaaaggaggaatgggatgggggctccgaggcctgggagccgccctgggaggcctctgccctggggaccgttcagcagctttgggcctctctccagatcatcagccatgacacccggc

SEQ ID NO: 112518 - DNA, 120 bp, Artificial Sequence
  ENSG00000100246_0 (sequence is synthesized)
actcttgtttcgctccttgacaaccctggcgggggttcgctggctgcggccccggctccggcccccgcaggagcagcaccccccggggaaagacattttctgctcccaccgagttggcag

SEQ ID NO: 112519 - DNA, 120 bp, Artificial Sequence
  ENSG00000100246_1 (sequence is synthesized)
ggcctgcttcctgaatctcctgggtgtgtcttaactgccagtcccagcacctcctgaaagccccactctcctccagtggtcacagtggaaggatcatgggagaaacagaagggaagaaag

SEQ ID NO: 112520 - DNA, 120 bp, Artificial Sequence
  ENSG00000100246_2 (sequence is synthesized)
atgaggctgattataagcgactgcagaccttccctctggtcaggcactcggacatgccagaggagatgcgcgtggagaccatggagctatgtgtcacagcctgtgagaaattctccaaca

SEQ ID NO: 112521 - DNA, 120 bp, Artificial Sequence
  ENSG00000100246_3 (sequence is synthesized)
acaacgagagcgccgccaagatgatcaaagagacaatggacaagaagttcggctcctcctggcacgtggtgatcggcgagggctttgggtttgagatcacccacgaggtgaagaacctcc

SEQ ID NO: 112522 - DNA, 120 bp, Artificial Sequence
  ENSG00000100246_4 (sequence is synthesized)
tctacctgtacttcgggggcaccctggctgtgtgcgtctggaagtgctcctgacactctgtcccctgccccgtcccctgcagggccttttcctgccactcatctggggtggggagcagcc

SEQ ID NO: 112523 - DNA, 120 bp, Artificial Sequence
  ENSG00000100246_5 (sequence is synthesized)
ctaggcaggtcctggtttttccaaggagagttggggtcttttctttttgtctttgtgtaccagtttcctgagccacgcccagtgtgtgaacttgacatctccatccccaggctctcaacc

SEQ ID NO: 112524 - DNA, 120 bp, Artificial Sequence
  ENSG00000100246_6 (sequence is synthesized)
gcgggcatgggtctgtgtgggagacgtggggtggggcggtgtgacagggtagaggaggtgggagatgagatcttccgcacaggaacacgccagtccccctttctccagggctgccttccc

SEQ ID NO: 112525 - DNA, 120 bp, Artificial Sequence
  ENSG00000100246_7 (sequence is synthesized)
cttgcatcctgggagccccactgccctgccatccccagtactgccgggaagtgtcggccgtccttgtcattagtggtcatatgaaaatggccccaagaaggagatgattctttcaaggga

SEQ ID NO: 112526 - DNA, 120 bp, Artificial Sequence
  ENSG00000100246_8 (sequence is synthesized)
cacaggcagcttctctccttgtcctctggggaggtgctgacccctcagaaaccccttcccccaacttgaccccaggctgaacagaccactgcatctcactgggccagcagcccccccagc

SEQ ID NO: 112527 - DNA, 120 bp, Artificial Sequence
  ENSG00000100246_9 (sequence is synthesized)
ccccagccttggtggggaccaagcagcctttcccgtcccctcctcgacccgtacagttgagagccaggggctggtgtgtgggagctgctacctggcagtttctcgaggggtcaccgagcc

SEQ ID NO: 112528 - DNA, 120 bp, Artificial Sequence
  ENSG00000100246_10 (sequence is synthesized)
tctggtgggacacctgggcaggagtgctctcaccacgaggctgcttccgcagggaaccctggcctgcccgcgacttcgcatcagggaccgcatgctgatttgtactgctctctgctgggt

SEQ ID NO: 112529 - DNA, 120 bp, Artificial Sequence
  ENSG00000100246_11 (sequence is synthesized)
tttctatgttcttttcgagtgtgggaaaagggttttagtagaagggtgaatcgtattttacacagcggtcttatttatataaatgtcttggtttttacaattaaaatgaccaaaaactga

SEQ ID NO: 112530 - DNA, 120 bp, Artificial Sequence
  ENSG00000100246_12 (sequence is synthesized)
gacagtactgctaggatgaggccagagccttccttggaagcattcagtctggggaaagtcagtgagtgagaggctggcgctgactccaggcactgacggtcacacccagccctagaggag

SEQ ID NO: 112531 - DNA, 120 bp, Artificial Sequence
  ENSG00000100246_13 (sequence is synthesized)
gctccttgacaaccctggcgggggttcgctggctgcggccccggctccggcccccgcaggagcaggtccccagaagtatgtgtagtggttagaaaaagctctttgtagtcagggccctta

SEQ ID NO: 112532 - DNA, 120 bp, Artificial Sequence
  ENSG00000100246_14 (sequence is synthesized)
gtaaacttggctgaatcatggtgaccaagtcctggctgattaacgctggtagcagagagcactgtgataacagcgcagagagctttaacgtttcaaatcgctcacatacacatacctggg

SEQ ID NO: 112533 - DNA, 120 bp, Artificial Sequence
  ENSG00000100246_15 (sequence is synthesized)
gcttgcaacagcttcctgagaacgcagagataggatttagtatcccgtttcatagagaaggaaaccaaggcttaggtgaaattacttgctgacggctgcaaagaaaggaagtgagcagaa

SEQ ID NO: 112534 - DNA, 120 bp, Artificial Sequence
  ENSG00000100246_16 (sequence is synthesized)
ctccggcttgcggcccacacagttcttagctctgcaagatgctgcacaggtcactctcccactggcttttccccgttgttcctgagaaatgggccttggtcatacctctgaagtcatggg

SEQ ID NO: 112535 - DNA, 120 bp, Artificial Sequence
  ENSG00000100246_17 (sequence is synthesized)
acatctcagcaggattctgcatgttagagcagctgtcacagaccctgacctcctggagggtggcatgtccacaactggctcctggttccctcctggctcctacatgccagcactttttag

SEQ ID NO: 112536 - DNA, 120 bp, Artificial Sequence
  ENSG00000100246_18 (sequence is synthesized)
cctccgggatgaattgaatcaaatggaaacatctcagtggaagatgcctaagaagctgcttccacatttttcattgttcccccttgaaattctcagagataaacaaactgtgtgcccttt

SEQ ID NO: 112537 - DNA, 120 bp, Artificial Sequence
  ENSG00000100249_0 (sequence is synthesized)
tatttcttccccttactaagctagcgaaaataaaatttaaggcaactgaaatatgcacccaatcaatgtgagacgagaccccagcatccctatctatggactccgacagtccatcttatt

SEQ ID NO: 112538 - DNA, 120 bp, Artificial Sequence
  ENSG00000100249_1 (sequence is synthesized)
aaataccaggcttcaggactgctatgtggactcaccggctctcaccaacatctggatggccagaacatgtgcaaagcagaacattaatgccccagcaccagctaccacttcctcttggga

SEQ ID NO: 112539 - DNA, 120 bp, Artificial Sequence
  ENSG00000100249_2 (sequence is synthesized)
agttgtaaggaacccattaattgccagttccttctccctggttaagcttgtactcaggcggcaactgaagaataagtgctgcccaccaccatgcaagtttggagaaggaaaactctcgaa

SEQ ID NO: 112540 - DNA, 120 bp, Artificial Sequence
  ENSG00000100249_3 (sequence is synthesized)
gagattaaagcacaaggacgattcagtgatgaaagccacccagcaggccaggaaaagaaacttcatcagttccaagagcaagcagccagcagggcataggaggcctgcaggaggcatcag

SEQ ID NO: 112541 - DNA, 120 bp, Artificial Sequence
  ENSG00000100249_4 (sequence is synthesized)
cagtccgccaagatcttgaggacagatatgctgaacatgtggctgccacccaagcgctaccccaggacagtgggacagcagcctggaagggccgagtgttgcttcctgaaacccaaaaga

SEQ ID NO: 112542 - DNA, 120 bp, Artificial Sequence
  ENSG00000100249_5 (sequence is synthesized)
gacagcagttgtcggaggacacgctaaccatccatggtctccccacagagggttaccaggctctgtaccacgctgtggtggagccaatgctgtggaatccttcagggacccccaagaggt

SEQ ID NO: 112543 - DNA, 120 bp, Artificial Sequence
  ENSG00000100249_6 (sequence is synthesized)
acagcctggagctgggcaaggccattaaacaaaagctctgggaggctctttgcagtcagggtgccatctctgaaggtgctcagagggaccggttccctggcaggaagcagccaggtgtcc

SEQ ID NO: 112544 - DNA, 120 bp, Artificial Sequence
  ENSG00000100249_7 (sequence is synthesized)
acgaggagcctgtactcaagaaatggcccaagttaaagagcaaaaaataggaacaagaactcatgggattagagtattctctgctagagatctgaaaaataaacacaactttgcaccttc

SEQ ID NO: 112545 - DNA, 120 bp, Artificial Sequence
  ENSG00000100253_0 (sequence is synthesized)
agcctgtgctttgccacctgagcgccgctccctctcaggatgaaggtgacggtgggcccagacccttccctggtctaccgacctgatgtggacccagaggtggccaaagacaaggccagc

SEQ ID NO: 112546 - DNA, 120 bp, Artificial Sequence
  ENSG00000100253_1 (sequence is synthesized)
ttccggaactacacgtcaggtcccctcctggaccgtgtcttcaccacctacaagctcatgcacacgcaccagacagtggacttcgtcaggagcaagcatgcccagtttgggggcttctcc

SEQ ID NO: 112547 - DNA, 120 bp, Artificial Sequence
  ENSG00000100253_2 (sequence is synthesized)
tacaagaaaatgacagtcatggaggccgtggacctgctggatgggctggtggatgagtcggacccggacgtagatttccccaactccttccatgccttccagacagcggagggcatccgg

SEQ ID NO: 112548 - DNA, 120 bp, Artificial Sequence
  ENSG00000100253_3 (sequence is synthesized)
aaggcccacccagacaaggactggttccacctcgtcgggctcctgcacgacctggggaaggtcctggccctgttcggggagccccagtgggctgtcgtcggcgacaccttccccgtcgga

SEQ ID NO: 112549 - DNA, 120 bp, Artificial Sequence
  ENSG00000100253_4 (sequence is synthesized)
tgccgtccgcaggcctccgtggttttctgcgactccaccttccaggacaaccctgacctccaggatcctcgatacagcacagagctcgggatgtatcagccccactgtgggctcgacagg

SEQ ID NO: 112550 - DNA, 120 bp, Artificial Sequence
  ENSG00000100253_5 (sequence is synthesized)
gtcctcatgtcctggggccatgatgagtacatgtaccaggtgatgaagtttaacaagttctcactgccccctgaggctttctacatgatccggttccactccttctacccctggcacacg

SEQ ID NO: 112551 - DNA, 120 bp, Artificial Sequence
  ENSG00000100253_6 (sequence is synthesized)
ggccgcgactaccagcagctgtgcagccagcaggacctggccatgctgccctgggtgcgggagttcaacaagttcgacctctacaccaagtgcccggacctgccggacgtggacaagctg

SEQ ID NO: 112552 - DNA, 120 bp, Artificial Sequence
  ENSG00000100253_7 (sequence is synthesized)
taccaggggctcattgacaagtactgccctggcatcctgagctggtgaccctcctgccacccaagctgctgctggacctaggcctggccctccgcctgcctggagaggcctggccctggg

SEQ ID NO: 112553 - DNA, 120 bp, Artificial Sequence
  ENSG00000100253_8 (sequence is synthesized)
caaacagccgccatcagggttcacctcggtgggggaccccactcacccccttagggtcgccacccctcacggcaacttgtgcctggcgtcaataaagacctggaaggatgttgtgcttct

SEQ ID NO: 112554 - DNA, 120 bp, Artificial Sequence
  ENSG00000100253_9 (sequence is synthesized)
gaagccccactgggtgttactgcagcagggcgtggcccaggccgagggatggtgccagcagggtggaggccaagtcccaggctttcaggtgtgtgtgtcccaccacactggccgtggtaa

SEQ ID NO: 112555 - DNA, 120 bp, Artificial Sequence
  ENSG00000100253_10 (sequence is synthesized)
acatctgcccatcctcccagctcctgtgtcagagcctgggggacgagtcacccagctcacccccacatgctcaaaacagtcaccaagtcctctgggctccgtccccttaaaaaatacccc

SEQ ID NO: 112556 - DNA, 120 bp, Artificial Sequence
  ENSG00000100253_11 (sequence is synthesized)
cctctgggctccgtccccttaaaaaataccccaatagctaaaataatacattcatagaaaacaacaaaaaacaaatgcaggctgggcacagcggctcacacctataatcccagcactttg

SEQ ID NO: 112557 - DNA, 89 bp, Artificial Sequence
  ENSG00000100253_12 (sequence is synthesized)
ggagaatcgcttgaacccgggagacaggggttgccgtgagtatcaagagtgaaattccatctcaaaaaaaataaataaaataaaataaa

SEQ ID NO: 112558 - DNA, 120 bp, Artificial Sequence
  ENSG00000100258_0 (sequence is synthesized)
cctgctctagcgggccgcgtagcggacatggcgggctcccggctcccgcggcagctcttcctccagggcgtggcggccgtcttcatgtttgctttcgcttccctctacacgcaaatccca

SEQ ID NO: 112559 - DNA, 120 bp, Artificial Sequence
  ENSG00000100258_1 (sequence is synthesized)
ggcctgtatggccccgagggcatcctacctgcaaggaggacgctgcggcctcagggcaaggggcgctggcagcagctgtgggagaccccgacgctgctgtgggaagcgccgagactgggg

SEQ ID NO: 112560 - DNA, 120 bp, Artificial Sequence
  ENSG00000100258_2 (sequence is synthesized)
ctggacacggcccagggcctggagctgctgagcctgctgggtgcactagtggccctgggagccctgctgctgagcccactgcgccaccctgtcatctacttgctgctttgggccgcctac

SEQ ID NO: 112561 - DNA, 120 bp, Artificial Sequence
  ENSG00000100258_3 (sequence is synthesized)
ctgtcagcctgccaggtgggccaggtgttcctttatttccagtgggactccctgctgctagagactggcttcctggccgtgctggtggccccgctgaggccagcctcccaccgcaaggag

SEQ ID NO: 112562 - DNA, 120 bp, Artificial Sequence
  ENSG00000100258_4 (sequence is synthesized)
gccccccagggcaggcaggcaggggccctgccccacgaagacctccccttctggctggtgcgatggctgctgttccgcctcatgttcgcctcaggcgtggtcaagctgaccagccgctgc

SEQ ID NO: 112563 - DNA, 120 bp, Artificial Sequence
  ENSG00000100258_5 (sequence is synthesized)
cctgcgtggtgggggctcactgccctcacctaccactacgagacccagtgcctgcccacgcccgccgcctggttcgcacaccacctgccggtctggctgcacaagctcagcgtggtggcc

SEQ ID NO: 112564 - DNA, 120 bp, Artificial Sequence
  ENSG00000100258_6 (sequence is synthesized)
accttcctaattgagatcgctgtgccgcccctgttcttcgcccccattcgacgcctgcgcttggctgctttctactcgcaggtgctgctgcaggtcctgattatcatcaccggcaactac

SEQ ID NO: 112565 - DNA, 120 bp, Artificial Sequence
  ENSG00000100258_7 (sequence is synthesized)
aacttcttcaacctgatgacgctggtgcttaccactgcgctgctggacgaccagcacctggctgctgagcctggccacggcagccgcaagaagacggccacctcctggcccaaggccctg

SEQ ID NO: 112566 - DNA, 120 bp, Artificial Sequence
  ENSG00000100258_8 (sequence is synthesized)
ctggccaccctgtcgctgctgctggaactagccgtctacgggcttctggcctatggcactgtgcactactttggcctggaggttgactggcagcagcgcaccatccactccagaaccact

SEQ ID NO: 112567 - DNA, 120 bp, Artificial Sequence
  ENSG00000100258_9 (sequence is synthesized)
ttcaccttccaccagttttctcagtggctgaagacactgacgctgcccactgtgtggctgggtgtggcctccctggtctgggagctgctgagtgccctgtggaggtggacccaggtgcgg

SEQ ID NO: 112568 - DNA, 120 bp, Artificial Sequence
  ENSG00000100258_10 (sequence is synthesized)
ttagcctggtgccgtactcctacgtggagcccgggacccacgggcgcctctggaccggggcccaccgcctgtttggtgccgtggagcacctacagctggccaactcctacggcctcttcc

SEQ ID NO: 112569 - DNA, 120 bp, Artificial Sequence
  ENSG00000100258_11 (sequence is synthesized)
gccgcatgactgggcttggtggacggcctgaggtggtgctggagggcagttacgacggccaccactggacggagatcgagttcatgtacaagcctgggaacctgagccggccgcccccgg

SEQ ID NO: 112570 - DNA, 120 bp, Artificial Sequence
  ENSG00000100258_12 (sequence is synthesized)
ttgtggtgccccaccagccacgcctggactggcagatgtggtttgcagccctgggcccacacacgcacagcccgtggttcacaagcctggtcttgcgcctgctgcagggcaaggagccag

SEQ ID NO: 112571 - DNA, 120 bp, Artificial Sequence
  ENSG00000100258_13 (sequence is synthesized)
tgatccgccttgtccagagccaagtggccaggtatcccttccacaagcagccgcccacctacgtccgagcccagcgctacaagtactggttctcccagcctggggagcagggccagtggt

SEQ ID NO: 112572 - DNA, 120 bp, Artificial Sequence
  ENSG00000100258_14 (sequence is synthesized)
ggcggcgccagtgggtggaggagttcttcccatccgtgtccctgggggaccccacgctggagacgctgctcaggcagtttggactacaggagaaaagcccacctcgcacccgcagcgcca

SEQ ID NO: 112573 - DNA, 120 bp, Artificial Sequence
  ENSG00000100258_15 (sequence is synthesized)
acagcaccctggcccaggccctccactggactcgctctcagctgtctcccctggaggcccccgccctgctctgggggctcctcatggccgtgggggctgtcagatttgtgcaagccctgc

SEQ ID NO: 112574 - DNA, 120 bp, Artificial Sequence
  ENSG00000100258_16 (sequence is synthesized)
tagcaccctgttctctccggtcctccccgctggcaccagtcagcggggagaagcgcaggccagcctcccagaaagactccggagctgcctccgaacaggccaccgcagcccccaacccct

SEQ ID NO: 112575 - DNA, 120 bp, Artificial Sequence
  ENSG00000100258_17 (sequence is synthesized)
gctccagtagttcgaggaccacccggcgaaagaagtagctgtgttctcccagctgcacgtcctgagagggccaggtcgccgggagtgctctggcctccggcaggacaggacccagccact

SEQ ID NO: 112576 - DNA, 120 bp, Artificial Sequence
  ENSG00000100258_18 (sequence is synthesized)
gtgccttagctgaccctgcagggccaggcacaggttggggggctgcccctggggtttgcagggtgctgcattgagggctccaggccccacccccacgccagccatgcccctccccaggac

SEQ ID NO: 112577 - DNA, 120 bp, Artificial Sequence
  ENSG00000100258_19 (sequence is synthesized)
tcccactattgcctctgtgattggcccaggaggaaaacacgaccaagctcaagacccttcccctgccctgggctgtgggggtctgagtctagagcccccaaccctaggccccgtgccaga

SEQ ID NO: 112578 - DNA, 120 bp, Artificial Sequence
  ENSG00000100258_20 (sequence is synthesized)
ggggaagaggctgactcccaggggaagaggggaagcactgtcatcttccacgtcatcttcacaccagcccatcctgccctttagatctgggcaccaataaaggcgtcttttgtgcttggc

SEQ ID NO: 112579 - DNA, 120 bp, Artificial Sequence
  ENSG00000100258_21 (sequence is synthesized)
gtagcggacatggcgggctcccggctcccgcggcagctcttcctccagggcgtggcggccgtcttcatgtttgctttcgcttccctctacacgcaaatcccaggctgggggatctgcagg

SEQ ID NO: 112580 - DNA, 120 bp, Artificial Sequence
  ENSG00000100258_22 (sequence is synthesized)
ctgactcaggtagttgagcaggcctctagccctgggacggggttttgacaggtcccgacctgggggacgggctctggagggactgcagactctgacctagggatggaggtatccgcatgc

SEQ ID NO: 112581 - DNA, 120 bp, Artificial Sequence
  ENSG00000100258_23 (sequence is synthesized)
ggggccagagggcaggggcggaccagtcctcacacccccctcctccaccagctttcaccttccaccagttttctcagtggctgaagacactgacgctgcccactgtgtggctgggtgtgg

SEQ ID NO: 112582 - DNA, 120 bp, Artificial Sequence
  ENSG00000100258_24 (sequence is synthesized)
cctccctggtctgggagctgctgagtgccctgtggaggtacatggcccaggaagcagggagggggcacaggtgtgcagggccggcctgacgaccttgggtccttgcccacaggtggaccc

SEQ ID NO: 112583 - DNA, 120 bp, Artificial Sequence
  ENSG00000100263_0 (sequence is synthesized)
gcagggagacggagatcggcgggagggctgggggaagggacccggactagaacaactgctgactaatccgcgggccgcggggaatgggtggcgcgccagccggtcggcaggggtcacgcg

SEQ ID NO: 112584 - DNA, 120 bp, Artificial Sequence
  ENSG00000100263_1 (sequence is synthesized)
gccgggtgtgcgcggaatggattcagggttctcgggtcgcgcccgggagctagagtcctgactcccagccggggtccccgaccggcctttcggggttgccgggcgcgctctgcaaagggg

SEQ ID NO: 112585 - DNA, 120 bp, Artificial Sequence
  ENSG00000100263_2 (sequence is synthesized)
aaactgaggcccaaggaaattgagtatctctgcaaagtcaccagctgagttcgaaccagacagatcctgggaccccctactctatccgccaccggaagaatctccgtccttgtctttcca

SEQ ID NO: 112586 - DNA, 120 bp, Artificial Sequence
  ENSG00000100263_3 (sequence is synthesized)
ttctgccctcccggcttcccagtaagcacacagccccaggaccacccttgaccgtcctcaaccaagcgatgcatgccaggggcccccatggccaactgtccccagcactgcctctggcct

SEQ ID NO: 112587 - DNA, 120 bp, Artificial Sequence
  ENSG00000100263_4 (sequence is synthesized)
cctcagtcctgatgctgctgatgagcaccctgtggctggtgggggccggccccggcctggtcctggccccggagctgttgctggacccctggcaggtgcaccggctgctgacccatgccc

SEQ ID NO: 112588 - DNA, 120 bp, Artificial Sequence
  ENSG00000100263_5 (sequence is synthesized)
tgggccacacggccctgccaggcctgctcctgagcctgctgctcctgcccactgtgggctggcagcaggagtgccacctgggcacgctgagattcctgcatgcctcagccctgctcgccc

SEQ ID NO: 112589 - DNA, 120 bp, Artificial Sequence
  ENSG00000100263_6 (sequence is synthesized)
tggcttctgggctgctggcagtgctgctggcaggccttgggctgtccagtgcagccggcagctgtggatacatgcctgtccacctggccatgctggctggggagggacaccgccctagac

SEQ ID NO: 112590 - DNA, 120 bp, Artificial Sequence
  ENSG00000100263_7 (sequence is synthesized)
cggcctccttgccggcctggcctatgcagctggggccttccggtggctggaaccctcagagcgacggctgcaggtgctgcaggagggcgtcttgtgcaggaccttggcggggtgctggcc

SEQ ID NO: 112591 - DNA, 120 bp, Artificial Sequence
  ENSG00000100263_8 (sequence is synthesized)
cctgaggctccttgccaccccgggtagcctggcggagctgcctgtcacccatcctgccggagtgaggcctcccatccctggaccgccttatgtggcctcccctgacctctggtcccactg

SEQ ID NO: 112592 - DNA, 120 bp, Artificial Sequence
  ENSG00000100263_9 (sequence is synthesized)
ggaagactcagccctgcccccaccaagcctgaggcctgtgcagcccacctgggagggctcctcagaggcaggcctggactgggctggggccagcttctccccagggactccgatgtgggc

SEQ ID NO: 112593 - DNA, 120 bp, Artificial Sequence
  ENSG00000100263_10 (sequence is synthesized)
ggccttggatgagcagatgctgcaggagggcatccaggcctcgcttcttgacgggccagcccaggaaccccagagcgcaccatggctgtccaagtcctctgtctcctctctgcggctgca

SEQ ID NO: 112594 - DNA, 120 bp, Artificial Sequence
  ENSG00000100263_11 (sequence is synthesized)
gcagctggagcgcatgggcttccctacggagcaggcggtggtggcactggcagccacaggccgtgtggagggtgccgtgtcactgttggttggaggacaagtgggcactgagaccctggt

SEQ ID NO: 112595 - DNA, 120 bp, Artificial Sequence
  ENSG00000100263_12 (sequence is synthesized)
gacccatggaaagggtgggcctgcccactccgagggtcctgggcctccctagcccaggcagagagtggggcacaggcaggcccttgggtgctaagggctgggctgcatgtgggtagcccg

SEQ ID NO: 112596 - DNA, 120 bp, Artificial Sequence
  ENSG00000100263_13 (sequence is synthesized)
agctcctactctgtctaaagagggccacagtggggagcaggggcacctctggaggcaggagaggccccccagcatgctgccctagtacgtgtttagaataaaaaccagtttgtttttcaa

SEQ ID NO: 112597 - DNA, 120 bp, Artificial Sequence
  ENSG00000100263_14 (sequence is synthesized)
tccaggggtcaaacagggatggggcccagtgtcccgggaaagcatggccttagacaggagcatgcccagcacatccacagccaagaagggaggcagaggactccctagggtgggctggaa

SEQ ID NO: 112598 - DNA, 120 bp, Artificial Sequence
  ENSG00000100263_15 (sequence is synthesized)
ctccctagggtgggctggaacctatgggtaggagtgcttttctcatggtttccctttctagcagcttttccttgaaataagaactaaggccaggtggctgacgcctgtaatcccagcact

SEQ ID NO: 112599 - DNA, 120 bp, Artificial Sequence
  ENSG00000100263_16 (sequence is synthesized)
ggcccgggccagcggggaagggtccccaaggccggtcggctgggtgggaggcctcgaacgccgtgcctggccccgagaccctatccccggtaacggtcgaggtggagcaggccctttaat

SEQ ID NO: 112600 - DNA, 120 bp, Artificial Sequence
  ENSG00000100263_17 (sequence is synthesized)
tcaggagggatgaaccaccgcttactcgttcttcgcgtccgcaactcttgtcccagtcctctctaaagagcgcccgacgtgacactcgggccaaaatagcatctaaggggccagagcggg

SEQ ID NO: 112601 - DNA, 120 bp, Artificial Sequence
  ENSG00000100263_18 (sequence is synthesized)
ttggaagtccttggtcccttccaccaatgattaagtgctggctgtgggaagactggctcctggggaggggaggtgggctcagcaggtggccctggtgtagcgtaaccttcaacctggcac

SEQ ID NO: 112602 - DNA, 120 bp, Artificial Sequence
  ENSG00000100263_19 (sequence is synthesized)
ctcagcctccccaagtgctgggattatacagctgtgagccactgcgtccagccctaagatgattcatacctatcggggaaaacagtgccactggagagaacaggctggcctctgcactct

SEQ ID NO: 112603 - DNA, 120 bp, Artificial Sequence
  ENSG00000100266_0 (sequence is synthesized)
agaagcggccgcaggggtctgggcagggctgggcagtgctgccggagcaaaagcggtagcgggagcccggccggagctgggtctggagacgccgtggcagcctgaacggagtgtgcgacg

SEQ ID NO: 112604 - DNA, 120 bp, Artificial Sequence
  ENSG00000100266_1 (sequence is synthesized)
gattgggaggtttgtctacagattttgagcgttcgaagttgacccctgactaagtatactttgctgctccctcagcctttgaaaaaatgtctgtcacatatgatgattccgttggagtag

SEQ ID NO: 112605 - DNA, 120 bp, Artificial Sequence
  ENSG00000100266_2 (sequence is synthesized)
aagtgtccagcgacagcttctgggaggtcgggaactacaagcggactgtgaagcggatcgacgatggccaccgcctgtgcagcgacctcatgaactgcctgcatgagcgggcgcgcatcg

SEQ ID NO: 112606 - DNA, 120 bp, Artificial Sequence
  ENSG00000100266_3 (sequence is synthesized)
agaaggcgtatgcgcagcagctcactgagtgggcccggcgctggaggcagctcgtggagaaagggccccagtacgggaccgtggagaaggcctggatggccttcatgtccgaggcagaga

SEQ ID NO: 112607 - DNA, 120 bp, Artificial Sequence
  ENSG00000100266_4 (sequence is synthesized)
gggtgagcgagctgcacctcgaggtgaaggcctcactgatgaacgatgacttcgagaagatcaagaactggcagaaggaagcctttcacaagcagatgatgggcggcttcaaggagacca

SEQ ID NO: 112608 - DNA, 120 bp, Artificial Sequence
  ENSG00000100266_5 (sequence is synthesized)
aggaagctgaggacggctttcggaaggcacagaagccctgggccaagaagctgaaagaggtagaagcagcaaagaaagcccaccatgcagcgtgcaaagaggagaagctggctatctcac

SEQ ID NO: 112609 - DNA, 120 bp, Artificial Sequence
  ENSG00000100266_6 (sequence is synthesized)
gagaagccaacagcaaggcagacccatccctcaaccctgaacagctcaagaaattgcaagacaaaatagaaaagtgcaagcaagatgttcttaagaccaaagagaagtatgagaagtccc

SEQ ID NO: 112610 - DNA, 120 bp, Artificial Sequence
  ENSG00000100266_7 (sequence is synthesized)
tgaaggaactcgaccagggcacaccccagtacatggagaacatggagcaggtgtttgagcagtgccagcagttcgaggagaaacgccttcgcttcttccgggaggttctgctggaggttc

SEQ ID NO: 112611 - DNA, 120 bp, Artificial Sequence
  ENSG00000100266_8 (sequence is synthesized)
agaagcacctagacctgtccaatgtggctggctacaaagccatttaccatgacctggagcagagcatcagagcagctgatgcagtggaggacctgaggtggttccgagccaatcacgggc

SEQ ID NO: 112612 - DNA, 120 bp, Artificial Sequence
  ENSG00000100266_9 (sequence is synthesized)
cgggcatggccatgaactggccgcagtttgaggagtggtccgcagacctgaatcgaaccctcagccggagagagaagaagaaggccactgacggcgtcaccctgacgggcatcaaccaga

SEQ ID NO: 112613 - DNA, 120 bp, Artificial Sequence
  ENSG00000100266_10 (sequence is synthesized)
caggcgaccagtctctgccgagtaagcccagcagcacccttaatgtcccgagcaaccccgcccagtctgcgcagtcacagtccagctacaaccccttcgaggatgaggacgacacgggca

SEQ ID NO: 112614 - DNA, 120 bp, Artificial Sequence
  ENSG00000100266_11 (sequence is synthesized)
gcaccgtcagtgagaaggacgacactaaggccaaaaatgtgagcagctacgagaagacccagagctatcccaccgactggtcagacgatgagtctaacaaccccttctcctccacggatg

SEQ ID NO: 112615 - DNA, 120 bp, Artificial Sequence
  ENSG00000100266_12 (sequence is synthesized)
ccaatggggactcgaatccattcgacgacgacgccacctcggggacggaagtgcgagtccgggccctgtatgactatgaggggcaggagcatgatgagctgagcttcaaggctggggatg

SEQ ID NO: 112616 - DNA, 120 bp, Artificial Sequence
  ENSG00000100266_13 (sequence is synthesized)
atggaggacgaggatgagcagggctggtgcaagggacgcttggacaacgggcaagttggcctatacccggcaaattatgtggaggcgatccagtgatgagtcggggacaggccagcgggg

SEQ ID NO: 112617 - DNA, 120 bp, Artificial Sequence
  ENSG00000100266_14 (sequence is synthesized)
ggacggaggcggcgggcccaggagcctcagccagccacgtgggcatccactccttttcctgcaagagatgatggttccattgctcttggcttcatggtgttcctggaaggcagatgagct

SEQ ID NO: 112618 - DNA, 120 bp, Artificial Sequence
  ENSG00000100266_15 (sequence is synthesized)
ggtcatttcgcctgggactcggcacctttccgagtgcagctggagggatctgagcgcaggaagacgcagaacaacagaaatagccgcccctccccgcccactgtgcctgttggcctatca

SEQ ID NO: 112619 - DNA, 120 bp, Artificial Sequence
  ENSG00000100266_16 (sequence is synthesized)
tagatctctatgttcttgactttgtctctcctttccgagtcaatggtgggttacactgatcttgttccactgattactctctctgacgagtccatcacctgcaacttaaatgaacaagct

SEQ ID NO: 112620 - DNA, 120 bp, Artificial Sequence
  ENSG00000100266_17 (sequence is synthesized)
tacatcccattttgagtgaagattttgaggtttttaatttaaaggctgtgtacagttatacttttttatacacctgttcatttctacttaaattatggcacagattgatgcgcaccagtc

SEQ ID NO: 112621 - DNA, 120 bp, Artificial Sequence
  ENSG00000100266_18 (sequence is synthesized)
ttgaggaaacgatctccctattcccttaccctgttactcagccacgccgtgtgtaggcttagcctcaggtggcagatgtttgaggaaaggaattatgccaggaaggtgggaccgggttat

SEQ ID NO: 112622 - DNA, 120 bp, Artificial Sequence
  ENSG00000100266_19 (sequence is synthesized)
ggtcgggtttctattgggaatgctctttgtgcttttgggcatctgaatggaagctttacatagaaccttaggtagaactcccccaaatcgccatatttaaaaattattttcactctattc

SEQ ID NO: 112623 - DNA, 120 bp, Artificial Sequence
  ENSG00000100266_20 (sequence is synthesized)
ttgcttaaaactgtactcttttgcaaattaacaattttatcactgattcagagttaaaaagaagactaacttttcaagcaaatgcatctgtaaagatgctttagattagactgtcatgtc

SEQ ID NO: 112624 - DNA, 120 bp, Artificial Sequence
  ENSG00000100266_21 (sequence is synthesized)
tcagtgtctatctgtatatattatttgatattcagagaatctaaagcactcgtctactgttttaatgagatttaacagcttttaacagtgagtttcgtttgtaaactgcttgaagtctgt

SEQ ID NO: 112625 - DNA, 120 bp, Artificial Sequence
  ENSG00000100266_22 (sequence is synthesized)
ggcattcaggcacacgtctggctggccggctgggtctcctcccgggctcagtgggcctggggcctctctgacgtggtgcctgctggagggaggctcgtcgtcaccagctgactgctggtc

SEQ ID NO: 112626 - DNA, 120 bp, Artificial Sequence
  ENSG00000100266_23 (sequence is synthesized)
cggcttctgaccggcctttgtcctggctccgtagcagaacactgtaaaagtgcccgcgtctttgcagtagttgcagatttcagtcgtcgtgttacttgtgcacaaacagaagctgggtct

SEQ ID NO: 112627 - DNA, 120 bp, Artificial Sequence
  ENSG00000100266_24 (sequence is synthesized)
tacccgcagcacgagtgtctcgggctgcccggagtcgcccgggagcaggtgctgcagccagagttacgcgggggccacgcgggccggcgggggtggggggaacgtgggggaacctgtgtt

SEQ ID NO: 112628 - DNA, 120 bp, Artificial Sequence
  ENSG00000100266_25 (sequence is synthesized)
tcacgtgactcagcagtgcccgccgccgtcaccagctatgcattcactccgtttccagtgagcagatgtcttgcttggaaagtggacctgtgtctgtgtctgtcctgagaacttaccagc

SEQ ID NO: 112629 - DNA, 120 bp, Artificial Sequence
  ENSG00000100266_26 (sequence is synthesized)
agaaatcctcatttctgtgctacggatttaccaaaaattgtcaagtctttttcagtttaacagttcctttacatgtgtagtatttgaggaaaaaaatcaataaacagttgatctcgtgca

SEQ ID NO: 112630 - DNA, 120 bp, Artificial Sequence
  ENSG00000100266_27 (sequence is synthesized)
ggtcagacatgccagcagggttggaaagaggcaggtacggaagctgagctgcagagttagccggcatctgacagaaaaatgtgagtgtgctgtggaaggcttgcatttcctttaaggttt

SEQ ID NO: 112631 - DNA, 120 bp, Artificial Sequence
  ENSG00000100266_28 (sequence is synthesized)
ctgtcccactgggcaggtgcctctgacggagaggaggcgtcgtcgggaagtatgtggccgtggctgctctggcatgatcctgaagactggcacgaaggggaatggagccgcacagagaat

SEQ ID NO: 112632 - DNA, 120 bp, Artificial Sequence
  ENSG00000100266_29 (sequence is synthesized)
actttgatgagcaaggaacgctgttttagaaaatccttactacttgatgattaatccttggagctaatgttccacgttcccaaggttgtgagtgcttatggccacattcctgcatcagct

SEQ ID NO: 112633 - DNA, 120 bp, Artificial Sequence
  ENSG00000100266_30 (sequence is synthesized)
gacggaagtgcgagtccgggccctgtatgactatgaggggcaggagcatgatgagctgagcttcaaggctgagacggggtttcaccatattatccagtctggtcttgaactcctgagctc

SEQ ID NO: 112634 - DNA, 120 bp, Artificial Sequence
  ENSG00000100266_31 (sequence is synthesized)
aaagtgctgggatcacaggcatgagcccctgagactgcaaataaaccatgctttagagaagatctacagagttggattccaactggtcatggtttcagttgcgatgcatgcaagtcggag

SEQ ID NO: 112635 - DNA, 120 bp, Artificial Sequence
  ENSG00000100266_32 (sequence is synthesized)
agttgcgatgcatgcaagtcggaggaaacgctagtgcatcttccttttttcatcaacatgggtgttccaccaatgacaccaatgccaagtacaacagtcgtgctgctcagctctataggg

SEQ ID NO: 112636 - DNA, 120 bp, Artificial Sequence
  ENSG00000100266_33 (sequence is synthesized)
agaattcagctgagagacagaggtcagacatgccagcagggttggaaagaggcaggtacggaagctgagctgcagagttagccggcatctgacagaaaaatgtgagtgtgctgtggaagg

SEQ ID NO: 112637 - DNA, 120 bp, Artificial Sequence
  ENSG00000100266_34 (sequence is synthesized)
cttgcatttcctttaaggtagacctctttgaaagtagaattttcacggaattgttttctttctcactgagtgactgatttaacagaactctcaccttctatgcaagcgcacctagtttta

SEQ ID NO: 112638 - DNA, 120 bp, Artificial Sequence
  ENSG00000100266_35 (sequence is synthesized)
gggtctgggcagggctgggcagtgctgccggagcaaaagcggtagcgggagcccggccggagctgggtctggagacgccgtggcagcctgaacggagtgtgcgacggattgggaggagga

SEQ ID NO: 112639 - DNA, 120 bp, Artificial Sequence
  ENSG00000100266_36 (sequence is synthesized)
actgccaggtcggatgtggagatgaacccggagagtgtccttcggctctggtcggccttcaggggcattcctgccagtctcagaagatgacagtctgcaatcgtgttatcatcaacgtgg

SEQ ID NO: 112640 - DNA, 120 bp, Artificial Sequence
  ENSG00000100271_0 (sequence is synthesized)
agtcggctgcgtactcctgcgagcgccggagaggggctggaggcggggcgagggcgcggctcgaggcatccctgcagggcgctcctccgagtccctcggcgctctgagcccacagggaag

SEQ ID NO: 112641 - DNA, 120 bp, Artificial Sequence
  ENSG00000100271_1 (sequence is synthesized)
aaggaggggccggcgtcagtgacgtcagcgagaccgaggtgagcgtgggcgttgccagtggtgctctgtcagtgcctatggattatggcagggaaagtaaaatgggtcactgatatcgag

SEQ ID NO: 112642 - DNA, 120 bp, Artificial Sequence
  ENSG00000100271_2 (sequence is synthesized)
aagtcagtgctgatcaataactttgaaaagagaggatgggtccaagtgacagaaaacgaggactggaatttttactggatgagtgtgcaaaccatccgaaatgtgttcagcgttgaagct

SEQ ID NO: 112643 - DNA, 120 bp, Artificial Sequence
  ENSG00000100271_3 (sequence is synthesized)
ggatatcggctctcagatgaccaaatagtcaaccattttccaaaccactatgaactgacccggaaggacctgatggtgaagaacatcaaaagatacaggaaggagctggagaaagaaggg

SEQ ID NO: 112644 - DNA, 120 bp, Artificial Sequence
  ENSG00000100271_4 (sequence is synthesized)
agtcctctggcagaaaaagatgaaaatggaaaatacctctatctggactttgttccagtcacctatatgctgcccgctgactacaacctgtttgtagaggagttccggaagagcccgtcc

SEQ ID NO: 112645 - DNA, 120 bp, Artificial Sequence
  ENSG00000100271_5 (sequence is synthesized)
agcacctggatcatgaagccttgtggcaaggcccagggaaagggcatcttccttatcaacaagctctcacagatcaaaaagtggtcccgggacagcaagacatcttcgtttgtgtctcaa

SEQ ID NO: 112646 - DNA, 120 bp, Artificial Sequence
  ENSG00000100271_6 (sequence is synthesized)
tctaataaggaagcctacgtgatctctctctatattaacaacccgttactaattggcgggaggaagttcgacctgcgcttgtacgttctggtgtccacgtaccgtccactgcgctgttac

SEQ ID NO: 112647 - DNA, 120 bp, Artificial Sequence
  ENSG00000100271_7 (sequence is synthesized)
tgagctggacaacatgttcgttcatctcaccaacgtcgccatccagaaacacggggaggactacaaccacatccatgggggcaagtggacagtgagtaacctgcggctctacctggagag

SEQ ID NO: 112648 - DNA, 120 bp, Artificial Sequence
  ENSG00000100271_8 (sequence is synthesized)
cacccgcggcaaggaggtgaccagcaagctgttcgacgagatccactggatcatcgtgcagtccctgaaggctgtggcgccggtgatgaacaatgacaagcactgctttgaatgctatgg

SEQ ID NO: 112649 - DNA, 120 bp, Artificial Sequence
  ENSG00000100271_9 (sequence is synthesized)
ctacgacatcatcatcgacgacaagctgaagccctggctgatcgaggtgaatgcgtccccgtctctcacgtccagcactgccaatgaccgaatcctcaagtacaacctgattaatgacac

SEQ ID NO: 112650 - DNA, 120 bp, Artificial Sequence
  ENSG00000100271_10 (sequence is synthesized)
cctcaacatcgccgtcccgaatggtgaaatcccagactgcaaatggaacaagtcgccacctaaggaagtcctcggcaattacgagattctgtatgatgaagaattggcccagggtgacgg

SEQ ID NO: 112651 - DNA, 120 bp, Artificial Sequence
  ENSG00000100271_11 (sequence is synthesized)
ggctgaccgggagctgagaagccgtcagggtcagtctctggggcccagagcaggccgatcgagagactcggggagagcggtcctcaccacctggaagtgagtcccacctggaccttatca

SEQ ID NO: 112652 - DNA, 120 bp, Artificial Sequence
  ENSG00000100271_12 (sequence is synthesized)
aaactactcactccacctgggcccctgctgaagccctattttgaaatttcccttttgtagagcttttttcctttcctaagccctgtaaataaacgaaggcacttctttggaaggttatgg

SEQ ID NO: 112653 - DNA, 120 bp, Artificial Sequence
  ENSG00000100271_13 (sequence is synthesized)
agtctgtttgactagtgctaaaggaaacaattcatgcggatgtataaaactcgctcttttttttttaatttttaacctaagcagaattttcatattaaaaactcacttttttgacagaaa

SEQ ID NO: 112654 - DNA, 120 bp, Artificial Sequence
  ENSG00000100271_14 (sequence is synthesized)
aaacgaggactggaatttttactggctccttgaccttcctgaatttcggtacagatcctgtttaaatgagtttcctgacttcagagtctgaaaagggatgagtgtgcaaaccatccgaaa

SEQ ID NO: 112655 - DNA, 120 bp, Artificial Sequence
  ENSG00000100276_0 (sequence is synthesized)
gactccaggcgcggaagcgagagaaggatagaggcacagaggctccgggaggcagcgctgccccccgcgccccgcaccgctgcgggacccgcgccgcgagaggggcggacttcggcgcct

SEQ ID NO: 112656 - DNA, 120 bp, Artificial Sequence
  ENSG00000100276_1 (sequence is synthesized)
cgtccgccggcgcctgggttggcgctgcggggcggaggcggtgtctgagcgccgctccggctctgctctctctcgagcttcggcacccgcccgagccgctcgcgcgcccgccacctgtct

SEQ ID NO: 112657 - DNA, 120 bp, Artificial Sequence
  ENSG00000100276_2 (sequence is synthesized)
gtctgcccactcggctgtctgtctgccctcccgccgccagctcctgcctcgggcctgccctctccggtctcggtgctccgaggggcgacgagaagcgcgacggggccgtggcgcaccggg

SEQ ID NO: 112658 - DNA, 120 bp, Artificial Sequence
  ENSG00000100276_3 (sequence is synthesized)
acggtgcggcgccggcccatgaggctttccagcgcggggagcgacagcgccggccggccatggggggtagcctgcgggtggccgttctaggcgccccgggcgtgggcaagacggccatca

SEQ ID NO: 112659 - DNA, 120 bp, Artificial Sequence
  ENSG00000100276_4 (sequence is synthesized)
aggcgccccgggcgtgggcaagacggccatcatccgccagttcctgttcggtgactaccccgagcgccaccggcccacggacgggccgcgcctctaccgacccgcggtgctgctcgacgg

SEQ ID NO: 112660 - DNA, 120 bp, Artificial Sequence
  ENSG00000100276_5 (sequence is synthesized)
cgccttcgtgctcgtctacgacatctgcagcccggacagtttcgactacgtgaaggccctgcggcagcgcatcgcggagaccaggccggcgggcgcgcccgaagcgcccatcctcgtggt

SEQ ID NO: 112661 - DNA, 120 bp, Artificial Sequence
  ENSG00000100276_6 (sequence is synthesized)
aggcaacaagcgggacaggcagcggctgcgcttcggaccgcggcgcgcgctggccgccctagtgcgcaggggctggcgctgcggctacctcgagtgctccgccaagtacaactggcacgt

SEQ ID NO: 112662 - DNA, 120 bp, Artificial Sequence
  ENSG00000100276_7 (sequence is synthesized)
gctgcgtctcttccgcgagctgctgcgctgcgctctggtgcgcgcgcgccctgcacacccggccctgcgcctgcagggggcgctgcatcccgcgcgctgcagcctcatgtgacccgatcg

SEQ ID NO: 112663 - DNA, 120 bp, Artificial Sequence
  ENSG00000100276_8 (sequence is synthesized)
gacagtgccatccatgggccccaccttgtgactgggacaatcagggacctggattggacgggatcgcccaacttcactgggactggacagggaagtctccgccctgattggatgaggaaa

SEQ ID NO: 112664 - DNA, 120 bp, Artificial Sequence
  ENSG00000100276_9 (sequence is synthesized)
gctccaacccagtctcctaagcgactggcccccttttgaacctcattggacccaaccaggtcccaagctccattggagatgaccagtcctttctgggacctcaatgggtcacaatcccat

SEQ ID NO: 112665 - DNA, 120 bp, Artificial Sequence
  ENSG00000100276_10 (sequence is synthesized)
tggatggaaaggacttggctatgaacttgactggaaacacgcagcctgctcctggagcttcactggacatattctttatgccacacctaccacgggataataaaagggaaaataatttga

SEQ ID NO: 112666 - DNA, 120 bp, Artificial Sequence
  ENSG00000100276_11 (sequence is synthesized)
gcccaggctggtctggaactcctgggcccaagcgatcctcccgcctgggcctccccaaggtgctggaattacaggcgtcagccactgcacccagcccaaggtgcagagaatttaagtaac

SEQ ID NO: 112667 - DNA, 120 bp, Artificial Sequence
  ENSG00000100276_12 (sequence is synthesized)
agagaatttaagtaacttgcacagatgacacagccctggaaggaggtttcaaacccaagaaaagaaactttcagaggcttggaagcccagccctgcccagcctccttgtgtcctgatggc

SEQ ID NO: 112668 - DNA, 120 bp, Artificial Sequence
  ENSG00000100276_13 (sequence is synthesized)
agaggccgtggtaagcaccgagagcatctagggaggagagcggcctgagccgagttggggaaagctgaaaagaggaagattcggggagtggccagacgctaaggactggagcttgcagga

SEQ ID NO: 112669 - DNA, 120 bp, Artificial Sequence
  ENSG00000100276_14 (sequence is synthesized)
cgtgggccgggtcttaggccttcgcccgtgggaaggtcttaagctgtatgtgctctttggcccacatgggcctggggtttcgttggggcggcggggggggcggtgtctctggccgtagga

SEQ ID NO: 112670 - DNA, 120 bp, Artificial Sequence
  ENSG00000100276_15 (sequence is synthesized)
agggaatgcgcctgcgtgtgtatacccactgggggaattctccggccgtggggtccccgcgtctctcatctccattcggcccccaggccggcgggcgcgcccgaagcgcccatcctcgtg

SEQ ID NO: 112671 - DNA, 120 bp, Artificial Sequence
  ENSG00000100280_0 (sequence is synthesized)
cccgcgcgcgggcagctcacttccgcccggcaggtgacagccgcggggctccgagccgccggcagcccggacgcaccgggagagcgagaggtggaggccgcggacattttggtgccaagc

SEQ ID NO: 112672 - DNA, 120 bp, Artificial Sequence
  ENSG00000100280_1 (sequence is synthesized)
cgaaccgagccggggcgccgggagctattgggacctgcggaagcctggctacagataagggaccaaaatgactgactcaaaatatttcaccacgaccaagaaaggggagatcttcgagct

SEQ ID NO: 112673 - DNA, 120 bp, Artificial Sequence
  ENSG00000100280_2 (sequence is synthesized)
gaaggcagagctcaacagtgacaagaaggagaagaagaaggaggcagtgaagaaagtgattgcatcgatgaccgtgggcaaagatgtcagtgccctcttccccgatgtggtcaactgcat

SEQ ID NO: 112674 - DNA, 120 bp, Artificial Sequence
  ENSG00000100280_3 (sequence is synthesized)
gcagacggacaacctggagctgaagaagctagtatacctctacttgatgaattacgccaagagtcagcctgacatggccattatggccgtcaacacctttgtgaaggactgtgaggaccc

SEQ ID NO: 112675 - DNA, 120 bp, Artificial Sequence
  ENSG00000100280_4 (sequence is synthesized)
caaccccctcatccgagccctggcagtgcggaccatgggctgcatccgcgttgacaagatcacagagtacctgtgcgagccactccggaagtgcctgaaggacgaggatccatatgtgcg

SEQ ID NO: 112676 - DNA, 120 bp, Artificial Sequence
  ENSG00000100280_5 (sequence is synthesized)
caagacagcagctgtgtgcgtggccaagctccacgacatcaacgcccagctggtggaggaccagggcttcctggacacccttaaagacctcatctccgactctaaccccatggtggtggc

SEQ ID NO: 112677 - DNA, 120 bp, Artificial Sequence
  ENSG00000100280_6 (sequence is synthesized)
caatgcagtggcagcgctctcagaaattgccgagtctcaccccagcagcaacctgctcgatctgaacccacagtccatcaacaagctgctgacagccctcaatgagtgcaccgagtgggg

SEQ ID NO: 112678 - DNA, 120 bp, Artificial Sequence
  ENSG00000100280_7 (sequence is synthesized)
ccagatcttcatcctggactgcctcgccaactatatgcccaaggacgaccgcgaggcccagagcatctgtgagcgggtcacccccaggctctcccatgccaactccgctgtggtgctctc

SEQ ID NO: 112679 - DNA, 120 bp, Artificial Sequence
  ENSG00000100280_8 (sequence is synthesized)
tgctgtgaaggtgctgatgaagttcatggagatgttgtctaaggacttggactactacggcacactgctcaagaagctggccccacccctggtcacactgctgtcagccgagccagagct

SEQ ID NO: 112680 - DNA, 120 bp, Artificial Sequence
  ENSG00000100280_9 (sequence is synthesized)
gcagtatgtggccctgcgcaacatcaatctcatcgtgcagaaaaggcctgagatcctgaagcatgagatgaaggtgttcttcgtgaagtacaacgaccctatctacgtgaagctggagaa

SEQ ID NO: 112681 - DNA, 120 bp, Artificial Sequence
  ENSG00000100280_10 (sequence is synthesized)
gctggacatcatgatccgcctggcctctcaggccaacatcgcccaggtgttggcagagctgaaagagtacgcaacagaagtggatgtggactttgtacggaaggctgtgcgtgctattgg

SEQ ID NO: 112682 - DNA, 120 bp, Artificial Sequence
  ENSG00000100280_11 (sequence is synthesized)
ccgctgcgccatcaaggtggagcaatctgcggagcgctgtgtgagcacgctgctcgacctcatccagaccaaggtcaactatgtggtccaggaggccatcgtggtcatcaaggacatctt

SEQ ID NO: 112683 - DNA, 120 bp, Artificial Sequence
  ENSG00000100280_12 (sequence is synthesized)
ccgcaagtaccccaacaagtatgagagtgtgattgccacactgtgtgagaatctggactccctggatgagcctgaggcccgggctgccatgatctggattgtgggcgagtacgcggaacg

SEQ ID NO: 112684 - DNA, 120 bp, Artificial Sequence
  ENSG00000100280_13 (sequence is synthesized)
gatcgacaacgcagatgagctgctggagagcttcctcgagggcttccatgacgagagcacacaggtccagctgcagctgctgacagccattgtgaaactctttctaaagaagccaacaga

SEQ ID NO: 112685 - DNA, 120 bp, Artificial Sequence
  ENSG00000100280_14 (sequence is synthesized)
gacccaggagctggtgcagcaggtcctcagtttggccactcaggactcagataacccagacctgcgggaccgtggctacatctactggcgcctgctgtccacggacccggtggcagccaa

SEQ ID NO: 112686 - DNA, 120 bp, Artificial Sequence
  ENSG00000100280_15 (sequence is synthesized)
ggaggtggtgttggctgagaagccactcatctctgaagagacggacctcatcgagcccacactgttagacgagcttatctgctacatcggcacgctggcttccgtctaccataagcctcc

SEQ ID NO: 112687 - DNA, 120 bp, Artificial Sequence
  ENSG00000100280_16 (sequence is synthesized)
cagtgcctttgtggaggggggccggggcgtcgtgcacaagagcctgccacctcgcacggcctcgagtgagagcgcagagagccctgagacagcccctactggagcacctcctggggagca

SEQ ID NO: 112688 - DNA, 120 bp, Artificial Sequence
  ENSG00000100280_17 (sequence is synthesized)
ggtgcagatgggagctgtggaccttcttggcggtggccttgacagcctgatgggggatgagcctgaagggattgggggcaccaacttcgtggcacctccaacagcagcagtaccagccaa

SEQ ID NO: 112689 - DNA, 120 bp, Artificial Sequence
  ENSG00000100280_18 (sequence is synthesized)
tcttggagcacccatcggcagtggcctgagtgacctctttgacctgaccagtggcgtgggcaccctgtcaggatcatatgtggcccccaaagcagtctggctcccagccatgaaggctaa

SEQ ID NO: 112690 - DNA, 120 bp, Artificial Sequence
  ENSG00000100280_19 (sequence is synthesized)
ggggctggagatctcaggcaccttcacccgccaggtgggctccatctccatggacctgcagctgaccaacaaggccttgcaggtcatgaccgactttgccatccagttcaaccgcaacag

SEQ ID NO: 112691 - DNA, 120 bp, Artificial Sequence
  ENSG00000100280_20 (sequence is synthesized)
ctttggcctggcccccgccgcccccctccaggtccacgcgccactcagccccaaccagacagtggagatctccctgcctctcagcacggtgggctcggtcatgaagatggagcctctgaa

SEQ ID NO: 112692 - DNA, 120 bp, Artificial Sequence
  ENSG00000100280_21 (sequence is synthesized)
caacctccaggtggccgtgaagaacaacatcgatgtcttctacttcagcaccttgtacccactgcacatcctctttgtggaggacgggaagatggaccggcagatgttcctggccacatg

SEQ ID NO: 112693 - DNA, 120 bp, Artificial Sequence
  ENSG00000100280_22 (sequence is synthesized)
gaaggatattcccaatgagaatgaggcccagttccagatcagagactgccccctcaatgcagaggctgcgagcagcaagctgcagagcagcaacatcttcactgtcgccaagaggaacgt

SEQ ID NO: 112694 - DNA, 120 bp, Artificial Sequence
  ENSG00000100280_23 (sequence is synthesized)
ggagggccaggacatgctctaccagtccctgaagctgaccaacggcatctgggtgctggcggagctgcggatccagccgggcaaccccagctgcacggacttagagctgtccctgaagtg

SEQ ID NO: 112695 - DNA, 120 bp, Artificial Sequence
  ENSG00000100280_24 (sequence is synthesized)
tcgagcaccagaggtgtcccagcacgtgtaccaggcctacgagaccatcctcaagaactgagaccccggccagcgcccaccccagccttctgcccgccccatcgaggaggcccctcgggg

SEQ ID NO: 112696 - DNA, 120 bp, Artificial Sequence
  ENSG00000100280_25 (sequence is synthesized)
gcagcacatcttcctcctcgcaggagggaccaggcggggctccaggccactcagtgggctccctggtcctgatggcagaacccacccgatccctggggtagggcaccaccccctcctggg

SEQ ID NO: 112697 - DNA, 120 bp, Artificial Sequence
  ENSG00000100280_26 (sequence is synthesized)
gtgagagcgcagtgcactcccgtgctctgggacacccctgctcctgtggctgtgatgtggggttaagtgaggtggggaccaaaggaaacagagccagagcagccacagaagctgtgcctg

SEQ ID NO: 112698 - DNA, 120 bp, Artificial Sequence
  ENSG00000100280_27 (sequence is synthesized)
aagggtgagtgtggagcttgcccctccggctcacagccccggcagcccctggctccttggtctctccggttggtgttaaagggccctccactgccacctctcatgggatggaccctgcca

SEQ ID NO: 112699 - DNA, 120 bp, Artificial Sequence
  ENSG00000100280_28 (sequence is synthesized)
acctggcctgggtgtgcagggaggggttccccttggtaccaggagagctgctcacttagggcctggggctcaaggagctgtaggtgccggcagaggggcagagctaggctgggaggagcc

SEQ ID NO: 112700 - DNA, 120 bp, Artificial Sequence
  ENSG00000100280_29 (sequence is synthesized)
cagggcctgcaccacccacttgcaaccaccaggctggtgccctgcagctgtgccagttgggccacagcctcccgagtgctgacccacatggtcaagaccaggcagaagctcccagagccc

SEQ ID NO: 112701 - DNA, 120 bp, Artificial Sequence
  ENSG00000100280_30 (sequence is synthesized)
ctgtctcgggctccccaccgactggcagctgcactatccccaactccccacttctgccccaagggtggtcactgcctgtgatacattcctcagtgtcgcctctgagcccaggcctcctgc

SEQ ID NO: 112702 - DNA, 120 bp, Artificial Sequence
  ENSG00000100280_31 (sequence is synthesized)
cacaaagactgggccgagagatggggctgggtaagcgggtgcgcctcctgtttgggtttcttcggggtttctctgtagtgtctgctgccctcctcctggcctcccaggtttcagttgtgt

SEQ ID NO: 112703 - DNA, 120 bp, Artificial Sequence
  ENSG00000100280_32 (sequence is synthesized)
ctgacagagcattaggttttcctgttactgctgtgtaataataaagaaagattcggcttttggcaatcacggacacttttttcccctccaccgaatgtcaggattgaaagctgcctccga

SEQ ID NO: 112704 - DNA, 120 bp, Artificial Sequence
  ENSG00000100280_33 (sequence is synthesized)
gtggttggggatggttttctgaccctacggtaactagatctaatatatatcatcagaaaatatatattgtatgtttactcttattttcagaaagagaaaatgaataaaaatgatgacatc

SEQ ID NO: 112705 - DNA, 120 bp, Artificial Sequence
  ENSG00000100280_34 (sequence is synthesized)
cacccatctgtcaccagcaggttgcgtcctgggaatttagggccctctgatgttgtattgggcctgcaggggaggggacaggctctgacggctttttcttctggagaggcaagaaattcc

SEQ ID NO: 112706 - DNA, 120 bp, Artificial Sequence
  ENSG00000100280_35 (sequence is synthesized)
gcgtcaagccccagagactgactggggacccccttgtgcctaggtggccgtgaagaacaacatcgatgtcttctacttcagcaccttgtacccactgcacatcctctttgtggaggacgg

SEQ ID NO: 112707 - DNA, 120 bp, Artificial Sequence
  ENSG00000100280_36 (sequence is synthesized)
agcagagacttgggtggtcccagagttttcaaggtagaagcagcttatactccaggcccctggcattagacagagctccttgagggcaggacagggcaaggcctgcctacctgggcccac

SEQ ID NO: 112708 - DNA, 120 bp, Artificial Sequence
  ENSG00000100280_37 (sequence is synthesized)
cagtgcctggcccagaggagaggaacagagctgggcttcaggcctgcagccaggctggggcagagcagagcaattggcctggggctctttctttctgtccagatggccatctgggggagg

SEQ ID NO: 112709 - DNA, 120 bp, Artificial Sequence
  ENSG00000100280_38 (sequence is synthesized)
ggacccacagcccatccttctgtccagggtccagaacatgggaaggctggcacggtgagaggctccctgccaaccacagccccagctcccgagtcggaggagctcacctgtcccgcatca

SEQ ID NO: 112710 - DNA, 120 bp, Artificial Sequence
  ENSG00000100280_39 (sequence is synthesized)
agcctggcttgaactagaatcagtttggtccctgagaaggacctttctagaaagcttccaaatcaaccccgtcaggttacccagataagacaccaattgggtctcggaacagtgagttgg

SEQ ID NO: 112711 - DNA, 120 bp, Artificial Sequence
  ENSG00000100280_40 (sequence is synthesized)
actagaagattgtgtaaaattgggccctgtaaggtggtgcagttggtttggcacccctgactgggaagtgacattgctgggcacaggccctggccctgtcctgtgagtgcctgcatgtcc

SEQ ID NO: 112712 - DNA, 120 bp, Artificial Sequence
  ENSG00000100280_41 (sequence is synthesized)
agctgggaggacagtggttcccaggagcctgaacctcccagcctttgaggtagacctgttagagaatggcttccctggggcacacagttgtcctggaggcctgcaccgctgttccagggc

SEQ ID NO: 112713 - DNA, 120 bp, Artificial Sequence
  ENSG00000100280_42 (sequence is synthesized)
cccggacagccccaaactctgcttctcccccacacccctgagtctctggcaggcatggccctccagacactgcccctcctgggtcctgctggcagtgctggtcggtggggggctgtggcg

SEQ ID NO: 112714 - DNA, 120 bp, Artificial Sequence
  ENSG00000100280_43 (sequence is synthesized)
tggcttcggtggtggtaacttccgtctccctgtgtttggttgctgcatgtcaccttccctgctggttcccgtggtgcaggacttagaggttagcagatcgctttctctttccccgtccgc

SEQ ID NO: 112715 - DNA, 120 bp, Artificial Sequence
  ENSG00000100280_44 (sequence is synthesized)
cctccccagtcttgtctcctgtcatggcccccatgcaccccatgtctcctgtctgcacctcatctcttggcctcacctcacccggggggcttcagccaggtggccctgattgaggtgctg

SEQ ID NO: 112716 - DNA, 120 bp, Artificial Sequence
  ENSG00000100280_45 (sequence is synthesized)
gcggaactccattgttcccacttcctaactgcaccctgcagaaccagtgctttagagtggatgggtgggggctcctctctcctctgcctgtgatctcaagctcaggccccagagcggagg

SEQ ID NO: 112717 - DNA, 120 bp, Artificial Sequence
  ENSG00000100280_46 (sequence is synthesized)
caaagtctctaccgtgcctgcttcctacgcaggaaaccaggaatgagcccagcacccctccaggctccctcccagccctccgcaccccctcgggattttctgtcaggcttcagtcctgag

SEQ ID NO: 112718 - DNA, 120 bp, Artificial Sequence
  ENSG00000100280_47 (sequence is synthesized)
gaccccagaccttcagggactctggggggccgggcagccctcagggtgggggccgggcactccctggcagcctccggctcgtgactcacactgctcgccagcagggctctggtgactggg

SEQ ID NO: 112719 - DNA, 120 bp, Artificial Sequence
  ENSG00000100280_48 (sequence is synthesized)
ctgacagcaggtgtgtgggctgcaagtatatttggtccacacccggctggctgcgacagccgccccctccgctttacctcacatctgtgccaggcgcagctgccgccaggctgtgtgcac

SEQ ID NO: 112720 - DNA, 120 bp, Artificial Sequence
  ENSG00000100280_49 (sequence is synthesized)
ggacatcatgatccgcctggcctctcaggccaacatcgcccaggcacctgccagctctctcccttgggccttctacctggagcaggaggcagaatcccattctcctagggagtctgtgta

SEQ ID NO: 112721 - DNA, 120 bp, Artificial Sequence
  ENSG00000100280_50 (sequence is synthesized)
gccgccggcagcccggacgcaccgggagagcgagaggtggaggccgcggacattttggtgccaagccgaaccgagccggggcgccgggagctattgggacctgcggcctggctacagata

SEQ ID NO: 112722 - DNA, 120 bp, Artificial Sequence
  ENSG00000100280_51 (sequence is synthesized)
tgggtgcttaaggctctgtctcccctcagtctctttggggcggggccctgtggcactggatggagtccagaccttcagactgcccgcgcccgcccagcctgcaggcctcttcctccagca

SEQ ID NO: 112723 - DNA, 120 bp, Artificial Sequence
  ENSG00000100281_0 (sequence is synthesized)
ctctccttctccaagatggcggcgatcggcggcgttgaggcgggatccgggcgagccgagtgaagacctggtcctgtagacgggaaggagcctggacacagtgacacattctcaaaggcc

SEQ ID NO: 112724 - DNA, 120 bp, Artificial Sequence
  ENSG00000100281_1 (sequence is synthesized)
ctgcaggaccaccatggcttatgatgactccgtgaagaaagaagattgttttgatggtgatcatacctttgaggacataggacttgcagctggccgaagccaacgagagaaaaaacgttc

SEQ ID NO: 112725 - DNA, 120 bp, Artificial Sequence
  ENSG00000100281_2 (sequence is synthesized)
ttacaaagattttttaagggaagaggaagaaattgctgctcaggtcaggaattcttccaagaagaagttgaaggatagtgaactttacttcttggggacggacacacacaagaagaagag

SEQ ID NO: 112726 - DNA, 120 bp, Artificial Sequence
  ENSG00000100281_3 (sequence is synthesized)
gaagcactcctctgatgattactactatggagatatttcgtctttggaatcgtcacagaagaaaaagaaaaagtccagcccacagtctactgatacagctatggacctgttgaaagctat

SEQ ID NO: 112727 - DNA, 120 bp, Artificial Sequence
  ENSG00000100281_4 (sequence is synthesized)
cacttccccactggcagcaggctccaagccctccaaaaagactggggagaaatcctctggctcttcaagccattcggagagtaaaaaggagcaccacaggaagaaagtcagtggaagcag

SEQ ID NO: 112728 - DNA, 120 bp, Artificial Sequence
  ENSG00000100281_5 (sequence is synthesized)
tggggaactacccctagaggatggtggctcccacaaatcgaaaaaaatgaaacctctctatgtgaacacagagacactgacccttcgggagcctgatggtttaaaaatgaaacttattct

SEQ ID NO: 112729 - DNA, 120 bp, Artificial Sequence
  ENSG00000100281_6 (sequence is synthesized)
gtcaccaaaggagaagggaagcagctctgttgatgaggagtcttttcaatatccctcccaacaagcgactgtgaaaaaatcctcaaagaaatcagctcgggatgagcagggtgctttact

SEQ ID NO: 112730 - DNA, 120 bp, Artificial Sequence
  ENSG00000100281_7 (sequence is synthesized)
cctaggacatgagttacagagctttctgaaaacagcccggaaaaagcacaagtcatcctcagacgcacattcatctcctggccctgaaggctgtgggtctgacgcctcccagttcgcaga

SEQ ID NO: 112731 - DNA, 120 bp, Artificial Sequence
  ENSG00000100281_8 (sequence is synthesized)
gtcccacagtgctaaccttgatctttcagggcttgaacctattctggtagaatcagactcatcctctggtggggaactagaggctggggagttagtgatagatgattcttaccgagaaat

SEQ ID NO: 112732 - DNA, 120 bp, Artificial Sequence
  ENSG00000100281_9 (sequence is synthesized)
caagaagaaaaagaagtcaaagaagagcaaaaagaagaaagacaaggagaagcataaagagaagcgacactccaagtccaagagaagtttaggactttctgccgtgccagtgggagaggt

SEQ ID NO: 112733 - DNA, 120 bp, Artificial Sequence
  ENSG00000100281_10 (sequence is synthesized)
cacagtgacatctggccctcctcccagcatcccatacgctggagcagcagcacctcccctgccacttcctggcctccacacagatgggcatagtgaaaaaaaaaagaaaaaagaagagaa

SEQ ID NO: 112734 - DNA, 120 bp, Artificial Sequence
  ENSG00000100281_11 (sequence is synthesized)
ggacaaagagagagagagaggagaaaagccaaaaaagaagaacatgtcggcctaccaggtgttctgtaaagagtatcgcgtgaccattgtggctgaccatccaggtatagattttgggga

SEQ ID NO: 112735 - DNA, 120 bp, Artificial Sequence
  ENSG00000100281_12 (sequence is synthesized)
acttagtaaaaaactggctgaggtgtggaagcaattaccagaaaaagacaaactgatttggaagcaaaaagctcagtatctgcagcacaaacagaacaaagcagaagccacaactgtgaa

SEQ ID NO: 112736 - DNA, 120 bp, Artificial Sequence
  ENSG00000100281_13 (sequence is synthesized)
aaggaaagcatccagctcagaaggttccatgaaagtcaaagcctcttctgtaggagtactgtcaccccagaagaagtccccacccaccaccatgctgttaccagcctcaccagccaaagc

SEQ ID NO: 112737 - DNA, 120 bp, Artificial Sequence
  ENSG00000100281_14 (sequence is synthesized)
ccctgagacagagcccattgatgttgctgctcatcttcagctgttgggagagtccctaagcctcattggacaccgtctgcaggaaactgagggtatggtggctgtgtctggcagtttgtc

SEQ ID NO: 112738 - DNA, 120 bp, Artificial Sequence
  ENSG00000100281_15 (sequence is synthesized)
agtgcttctggattccattatctgtgcccttggccccttggcatgtctcaccacacaactacctgaattgaatggctgtcccaaacaggtcttgtcaaacacattagacaacattgctta

SEQ ID NO: 112739 - DNA, 120 bp, Artificial Sequence
  ENSG00000100281_16 (sequence is synthesized)
catcatgccgggactgtgacagcaaagaatcctgggacagaaaccttatcctacaccattgctggtttgtgtatatatgactgttgcagattccttcagtggcctctggctgtaggtttt

SEQ ID NO: 112740 - DNA, 120 bp, Artificial Sequence
  ENSG00000100281_17 (sequence is synthesized)
tacatacatatatacatatatatataatgtacaatatatacatagactgtaactactttgcttttaataattttatgaaatggcaaaggtttagccaagaggaaattttggcatgaatac

SEQ ID NO: 112741 - DNA, 120 bp, Artificial Sequence
  ENSG00000100281_18 (sequence is synthesized)
aggcttgggattcttttttctcctgtggtggataaatctgccttaaaaatcaatgtaacttgggggctgggggcttgttctgggtgccaagcgcatctctttatggacagctaaaatgtg

SEQ ID NO: 112742 - DNA, 120 bp, Artificial Sequence
  ENSG00000100281_19 (sequence is synthesized)
attattttccaagctcagttggacctccagacccatcactgaccatttgccttacctgtcttagtctgaaatgtaataggaaagataacgggaagatgccagttgactgaaaattcaaag

SEQ ID NO: 112743 - DNA, 120 bp, Artificial Sequence
  ENSG00000100281_20 (sequence is synthesized)
cctttcaatttgaagtgacctaggtgggaggtgataaaatttgttccctttatagttatggaagtggcttaggtgaattgagtagagggttcattccaattcctactgtataggtgtctg

SEQ ID NO: 112744 - DNA, 120 bp, Artificial Sequence
  ENSG00000100281_21 (sequence is synthesized)
tgtctcaaaatttattgtaatcattggtaccattggtggcctcaacagaggccaaggagttctgtgagccctggcagcaaaaaacaccttggggggtgaagctgtcaatgccaccagttg

SEQ ID NO: 112745 - DNA, 120 bp, Artificial Sequence
  ENSG00000100281_22 (sequence is synthesized)
gacctccatacattctgagctaacccagaatctttagtcggcagaattaagtgctggtgtctttcactggcagcatgaagttagccaccaagtcctcacaagccgtgctgcttagttgct

SEQ ID NO: 112746 - DNA, 120 bp, Artificial Sequence
  ENSG00000100281_23 (sequence is synthesized)
cggtggttatggataaactttgcccagcatgatttttgggttcatcttatcagttcccctggtgggcagatacacagtgttctgcattccacatgtaagtgaattgcaaaaacaaaacaa

SEQ ID NO: 112747 - DNA, 120 bp, Artificial Sequence
  ENSG00000100281_24 (sequence is synthesized)
aactcactctcttgtaggtttatttatgtgtgtgtgaatgtgtattttaattatgtgtatttaactctttaaaatctcttagattttaatttatcctgtaaatttctgtatatataattt

SEQ ID NO: 112748 - DNA, 120 bp, Artificial Sequence
  ENSG00000100281_25 (sequence is synthesized)
aataacagaagcctccaccagcaacagcatgtggaagatacagatttgtcatttctcccttccgccctcccttctttccttccttccttccctgtttccttccctctttccttccttcct

SEQ ID NO: 112749 - DNA, 120 bp, Artificial Sequence
  ENSG00000100281_26 (sequence is synthesized)
cctggtctgttccaaaaactctgaatcatctacattttaaggtattttacctcaaaaatgaatcattgtgttaggattctaattctttataaagaacttcatgggcttcaataatgtcta

SEQ ID NO: 112750 - DNA, 120 bp, Artificial Sequence
  ENSG00000100281_27 (sequence is synthesized)
gaaagtaaaataaagaggaatgttaccatccccagctgcccttatttccagagaaccagacgtttgtttcccagttggaaagaagacagttgagcacttcaggatggtttttaaatttgg

SEQ ID NO: 112751 - DNA, 120 bp, Artificial Sequence
  ENSG00000100281_28 (sequence is synthesized)
tatgagattctctgccaacaccaagctctgagttaactgtgctttcttctcctggccctgacagagcactacagcatcaaagtaaatctttggggacagtgtagcccatctgcatcctat

SEQ ID NO: 112752 - DNA, 120 bp, Artificial Sequence
  ENSG00000100281_29 (sequence is synthesized)
ttaatttcttcccttctccccaccagtgttgtcacagggctatgttgcttaaaggtagtctggctgctgaatccctttctcagctcagagcagttttaagatttaattgggaatacagag

SEQ ID NO: 112753 - DNA, 120 bp, Artificial Sequence
  ENSG00000100281_30 (sequence is synthesized)
aaacaggattgtttgagaaccaaaatcaagaggaacagaaatcttaacttgatttcatgtgttagaacattgtaccatgcctcttctgtatctgtggaagtttcctgtttgacacagggt

SEQ ID NO: 112754 - DNA, 120 bp, Artificial Sequence
  ENSG00000100281_31 (sequence is synthesized)
atctaggaggggcggggaagacatggatagtataggaagacattaatcctagcattgtcatttatatacattaatgaaatcctgatgaggacctgctttttgtttgttttcctttgaaac

SEQ ID NO: 112755 - DNA, 120 bp, Artificial Sequence
  ENSG00000100281_32 (sequence is synthesized)
ccagccctattgtatttgtatttaaaatttgtacacatttgtataataatctgtaccttgtggtatttggtactattagaggaaaaactttggattcagaccttcttgcagtttttatat

SEQ ID NO: 112756 - DNA, 120 bp, Artificial Sequence
  ENSG00000100281_33 (sequence is synthesized)
ccttcttgcagtttttatatcattgttttattttgttttttaaataaattctagtggtttgatccaaatcccattacagttgtataaagaaataaaattttgtacttatattattaaaaa

SEQ ID NO: 112757 - DNA, 120 bp, Artificial Sequence
  ENSG00000100281_34 (sequence is synthesized)
gctctgggctcgactgaggctccctggccgctcgcgcttttctctccttctccaagatggcggcgatcggcggcgttgaggcgggatccgggcgagccgagtgaagattgttttgatggt

SEQ ID NO: 112758 - DNA, 120 bp, Artificial Sequence
  ENSG00000100281_35 (sequence is synthesized)
gaatcattgagacttatgatatgaaggtcatataggagcaagatgtcatctagatgaacagccattcttcacccagattatccttagtttttgttttccttgttattgttattctgctat

SEQ ID NO: 112759 - DNA, 120 bp, Artificial Sequence
  ENSG00000100281_36 (sequence is synthesized)
tgtgttggtattgccaactagcaggttagtagaaccacatagacattatattgagccagaggtttaatctgtgattttacatttcaacttagagtgatctaaaaatcagtgccgagattt

SEQ ID NO: 112760 - DNA, 120 bp, Artificial Sequence
  ENSG00000100281_37 (sequence is synthesized)
gaccattagcattgaggaatgtttatagtcctttactaagatattaatgtagtcagctgtctgaagtcagttcggtgacccccagcttaaaagttagcattaaccctctgtctgcccgcc

SEQ ID NO: 112761 - DNA, 120 bp, Artificial Sequence
  ENSG00000100281_38 (sequence is synthesized)
ttattcttttcagcctttcgtctgcaagtctgtgtcctcctaccaaatcacaactcagaaaccatatctgaggttgcacatggggcctttgcatagcatggaaacattgtttcttcaggt

SEQ ID NO: 112762 - DNA, 120 bp, Artificial Sequence
  ENSG00000100281_39 (sequence is synthesized)
ttgattcttgtatttgcagctaggtcatcaagaaatattctgttcccctgggtctagccctgtatttcagtggacttgattgaaacattgttttaatttggaaatagaggaactgttgca

SEQ ID NO: 112763 - DNA, 120 bp, Artificial Sequence
  ENSG00000100281_40 (sequence is synthesized)
ttttctctccttctccaagatggcggcgatcggcggcgttgaggcgggatccgggcgagccgagtgaagagctttgttgagctagctgttgccgcaaaactgccgggagaatcccactgg

SEQ ID NO: 112764 - DNA, 120 bp, Artificial Sequence
  ENSG00000100281_41 (sequence is synthesized)
tttgccttggggaccacaaaaatggtggtcctgggggctgtttgtgtaaatcacctggtattttgtgtgtttcttgcgtgcaacccggcttggccgtgccttcgtggtgggcgccttctc

SEQ ID NO: 112765 - DNA, 120 bp, Artificial Sequence
  ENSG00000100281_42 (sequence is synthesized)
gctaagctggtggctgattatatttcctcctaatagaacaaagtaaaaaactgaatcccaaataaagcctgttgattggacaaggcttctcaaaattcgattgctggtcttatggaatgt

SEQ ID NO: 112766 - DNA, 120 bp, Artificial Sequence
  ENSG00000100281_43 (sequence is synthesized)
gtgttgtcagccaatctgtgcggtggtcgtggttccgcttaattgcactgcaatgagaggattcaatccccatccccgactgtcgggatctctgcagcttccagagctggcaggggctgg

SEQ ID NO: 112767 - DNA, 120 bp, Artificial Sequence
  ENSG00000100281_44 (sequence is synthesized)
atgcaatagattttaccgcttcaccaatccagttggtaggattttgtggtcttcaaatgtttgatgtgatctgtcttctctgcatcttgctttacttgtgtatgttgtaaccatgattga

SEQ ID NO: 112768 - DNA, 120 bp, Artificial Sequence
  ENSG00000100281_45 (sequence is synthesized)
acctatccctctaacttaatgttggtttctaccctgtctcagtgttgtcagtcctgttggcattttagaaattctcattaattttgaaaatattttttgtattggaggtattttatatac

SEQ ID NO: 112769 - DNA, 120 bp, Artificial Sequence
  ENSG00000100281_46 (sequence is synthesized)
ttccccaaatgacaactttaattcatgactgaaatctaattaagcctagtatacttcctgcagtatcaaccccactgtatttacaaagagaatgaggaggtgacaagacactttttattt

SEQ ID NO: 112770 - DNA, 120 bp, Artificial Sequence
  ENSG00000100281_47 (sequence is synthesized)
atcactgcgcatttccatctggaaggttgcttctcctcagtgatttcgcattacaggagggttttccttctttgtttctcagacctggtcctgtagacgggaaggagcctggacacagtg

SEQ ID NO: 112771 - DNA, 120 bp, Artificial Sequence
  ENSG00000100284_0 (sequence is synthesized)
gattcccggggttggtggcagcggcggtagcagcaatggactttctcctggggaacccgttcagctctccagtgggacagcgcatcgagaaagccacagatggctccctgcagagcgagg

SEQ ID NO: 112772 - DNA, 120 bp, Artificial Sequence
  ENSG00000100284_1 (sequence is synthesized)
actgggccctcaacatggagatctgcgacatcatcaacgagacggaggaaggtcccaaagatgccctccgagcagtaaagaagagaatcgtggggaataagaacttccacgaggtgatgc

SEQ ID NO: 112773 - DNA, 120 bp, Artificial Sequence
  ENSG00000100284_2 (sequence is synthesized)
tggctctcacagtcttagaaacctgtgtcaagaactgcgggcaccgcttccacgtgctggtggccagccaggacttcgtggagagtgtgctggtgaggaccatcctgcccaagaacaacc

SEQ ID NO: 112774 - DNA, 120 bp, Artificial Sequence
  ENSG00000100284_3 (sequence is synthesized)
cacccaccatcgtgcatgacaaagtgctcaacctcatccagtcctgggctgacgcgttccgcagctcgcccgatctgacaggtgtggtcaccatctatgaggacctgcggaggaaaggcc

SEQ ID NO: 112775 - DNA, 120 bp, Artificial Sequence
  ENSG00000100284_4 (sequence is synthesized)
tggagttccccatgactgacctggacatgctgtcacccatccacacaccccagaggaccgtgttcaactcagagacacaatcaggacaggattctgtgggcactgactccagccagcaag

SEQ ID NO: 112776 - DNA, 120 bp, Artificial Sequence
  ENSG00000100284_5 (sequence is synthesized)
aggactctggccagcatgctgcccctctgcccgccccgcccatactctccggtgacacgcccatagcaccaaccccggaacagattgggaagctgcgcagtgagctggagatggtgagtg

SEQ ID NO: 112777 - DNA, 120 bp, Artificial Sequence
  ENSG00000100284_6 (sequence is synthesized)
ggaacgtgagggtgatgtcggagatgctgacggagctggtgcccacccaggccgagcccgcagacctggagctgctgcaggagctcaaccgcacgtgccgagccatgcagcagcgggtcc

SEQ ID NO: 112778 - DNA, 120 bp, Artificial Sequence
  ENSG00000100284_7 (sequence is synthesized)
tggagctcatccctcagatcgccaatgagcagctgacagaggagctgctcatcgtcaatgacaatctcaacaatgtgttcctgcgccatgaacggtttgaacggttccgaacaggccaga

SEQ ID NO: 112779 - DNA, 120 bp, Artificial Sequence
  ENSG00000100284_8 (sequence is synthesized)
ccaccaaggccccaagtgaggccgagccggcagctgacctgatcgacatgggccctgacccagcagccaccggcaacctctcatcccagctggcaggaatgaacctgggctccagcagtg

SEQ ID NO: 112780 - DNA, 120 bp, Artificial Sequence
  ENSG00000100284_9 (sequence is synthesized)
cccccaagcaacagacggcctggctggagccctggacgcccggcagcagagcactggcgcgatcccagtcacccaggcctgcctcatggaggacatcgagcagtggctgtccactgacgt

SEQ ID NO: 112781 - DNA, 120 bp, Artificial Sequence
  ENSG00000100284_10 (sequence is synthesized)
gggtaatgatgcggaagagcctaagggggtcaccagcgaagaatttgacaaattcctggaagaacgggccaaagccgcggaccgattgcccaacctctccagcccctcagctgaggggcc

SEQ ID NO: 112782 - DNA, 120 bp, Artificial Sequence
  ENSG00000100284_11 (sequence is synthesized)
cccgggtcccccatctggcccagcgccccggaagaagacccaggagaaagatgatgacatgctgtttgccttatgagtgtggggtctggcaccctgcagcccaggtccccactgctctca

SEQ ID NO: 112783 - DNA, 120 bp, Artificial Sequence
  ENSG00000100284_12 (sequence is synthesized)
cacccttaggctgggacctccctccctcctctggtgttaaggctgctttgggggtggcttgttacccccttttcctcctctttgaagacggagctgccccagctgtggctgggggtgtgg

SEQ ID NO: 112784 - DNA, 120 bp, Artificial Sequence
  ENSG00000100284_13 (sequence is synthesized)
aggcagtgggatgaactgggggacaggtctgcgctgcagtgggatctggctgctctgcctcctttcccaccccagctgaccatgagactttgctgagaagtggaggccccaggacaggct

SEQ ID NO: 112785 - DNA, 120 bp, Artificial Sequence
  ENSG00000100284_14 (sequence is synthesized)
ggctggctggctggctgcttgacccagtgtgactctccttcactgagtgataccctgctccgggcccatgccccaaggagcccttcagagcccacactgccagtcgaggcctggctggag

SEQ ID NO: 112786 - DNA, 120 bp, Artificial Sequence
  ENSG00000100284_15 (sequence is synthesized)
gctggccacagtggaaattctgccgagcctcttgtcccttccctgctctgctgcatggggccccatggctttggctggccactgagggtagggtgtggaggtgtggaggccccctgagga

SEQ ID NO: 112787 - DNA, 120 bp, Artificial Sequence
  ENSG00000100284_16 (sequence is synthesized)
gctgcggcggcccaggtacgaagctgcaactctgcgcgcagtgggcgagatctcatcagccccaggctgcaggtgaggcttcaggggatgctggggccccactgcccctccgctgccttg

SEQ ID NO: 112788 - DNA, 120 bp, Artificial Sequence
  ENSG00000100284_17 (sequence is synthesized)
ccctccatccttcctctgttccttctggccgggcaccacagcactggggctcacctcttggttgatcctcttgtactgggagaggtgccttttgtatccccaattaaaggtagaaaacca

SEQ ID NO: 112789 - DNA, 120 bp, Artificial Sequence
  ENSG00000100284_18 (sequence is synthesized)
tgccaactgcgtgctttgctgtggagtgggcagggcagatgtagttaaaaaaaaaaaaaaagcagggaaagaatgtctgttctctgtctgagtgccaggtgggcaggctcacaggtgagc

SEQ ID NO: 112790 - DNA, 120 bp, Artificial Sequence
  ENSG00000100284_19 (sequence is synthesized)
aaggtaagataatttgggctgcgagcagggtgcatcttggagcggggagaccttgacatcaaacaggaagagtcttaccgggacaaggagacaacagcccagagaggctgtcacccagga

SEQ ID NO: 112791 - DNA, 120 bp, Artificial Sequence
  ENSG00000100284_20 (sequence is synthesized)
gctttttgccatcctgggcgctagagggaattgcgctgcaattcattaaattgcctctcagtctcaacagatgacaaaccccttgcccttgcctctgatttaagagaaagccacagatgg

SEQ ID NO: 112792 - DNA, 120 bp, Artificial Sequence
  ENSG00000100284_21 (sequence is synthesized)
cctcatttgagagctggaaaggtctgtaggcaacgcactgtcctgtctacactgcaggcggatgcagaatggcaagaggccatttggaaaggttctccccaatcccccagcatgggaaca

SEQ ID NO: 112793 - DNA, 120 bp, Artificial Sequence
  ENSG00000100284_22 (sequence is synthesized)
gacgcttacatcactccagaaccactggcagggagagcctgggccaaaggacctgtgggtgacattgaagctcagtaaacccaggcctccgcgggggcagggaggccggctgactgagtt

SEQ ID NO: 112794 - DNA, 120 bp, Artificial Sequence
  ENSG00000100284_23 (sequence is synthesized)
gggtgctgctcggcactttggtgctctggcaaatgaatgtaaaataaataccagtggctgagaacagtcttgcccacaccactgaaccagcccagatctcagggcggccagacacacgtg

SEQ ID NO: 112795 - DNA, 120 bp, Artificial Sequence
  ENSG00000100284_24 (sequence is synthesized)
ggcctcctagccgtcagcatgggtttggctggggaagatataaatgctgtcccaccctcctccacaagcagcatttatatccaggtgaattggcttaagcaaaaagcaaaggcaattcct

SEQ ID NO: 112796 - DNA, 120 bp, Artificial Sequence
  ENSG00000100284_25 (sequence is synthesized)
gctgtcagctgattcccggggttggtggcagcggcggtagcagcaatggactttctcctggggaacccgttcagctctccagtgggacagcgcatcgtcccaaagatgccctccgagcag

SEQ ID NO: 112797 - DNA, 120 bp, Artificial Sequence
  ENSG00000100284_26 (sequence is synthesized)
ctctctctcacccagatgggaggcggctgcgggaaaagcctcagtgactggatggtgagacaaggcatggtgagcaggggccaggcccggccacccggaaagctgggggtgctcgcaggg

SEQ ID NO: 112798 - DNA, 120 bp, Artificial Sequence
  ENSG00000100284_27 (sequence is synthesized)
ctcctgccaggcatgggcgtggggcaccgtgctgctctccaagggagtgggacccaggagaaggcccagaggagcaaggaggggcagctgagggtcttgcgggaccccagggctcaggct

SEQ ID NO: 112799 - DNA, 120 bp, Artificial Sequence
  ENSG00000100284_28 (sequence is synthesized)
gtttccgggttggcccggccagcccagcttccgcagctcctctgtgcccggttcctgctcttgagtctcgggcaaggacaaggtagcccgtctggcagctaagaggcgatggggatagcg

SEQ ID NO: 112800 - DNA, 120 bp, Artificial Sequence
  ENSG00000100284_29 (sequence is synthesized)
gagcgggagacggagccggtgtgcacagctgggcacttgctgttgccactgctgctgggaagtcggctcctgccttctctctgggctctgctcctgcctggggggtcctcaggtgctggg

SEQ ID NO: 112801 - DNA, 120 bp, Artificial Sequence
  ENSG00000100284_30 (sequence is synthesized)
tgacagagcttggaaaccaaactggcctggttggggaaagactctgtctgtcttttccaaagtagctcactagtaactagtgctattagtgccattactgattaatagtaaataggaact

SEQ ID NO: 112802 - DNA, 120 bp, Artificial Sequence
  ENSG00000100284_31 (sequence is synthesized)
ggcctattggtttcttgagcatctcctccatgccaggccctgtgctaagcttttgacatcccatttcatcctcacagccacctggacggtaagtactgctgctagcctcaccctaaggac

SEQ ID NO: 112803 - DNA, 120 bp, Artificial Sequence
  ENSG00000100284_32 (sequence is synthesized)
gagggaaatcaggcgcagagaagttaagtaacccactcagagtcacactgtgttaaggggtgagctaggtccagctctttctcactctgaagtctgtgcccatgacctccaactggagtc

SEQ ID NO: 112804 - DNA, 120 bp, Artificial Sequence
  ENSG00000100284_33 (sequence is synthesized)
tgcccctgcagaagccgttagagaggaaagcctccaactcctgcccctgtgtgggagccatcgtggcacagcccatgtctttgtggccgaaagtgaaatgtccccatctgtagcaccgcc

SEQ ID NO: 112805 - DNA, 120 bp, Artificial Sequence
  ENSG00000100284_34 (sequence is synthesized)
cctctgggtctacccacctggccttgtctggttaacttcgcgcctctgctctcaggccctgctatgcccccttctatcatgaaatctgcgtctgcagagacaccaggggatggaacctgg

SEQ ID NO: 112806 - DNA, 120 bp, Artificial Sequence
  ENSG00000100284_35 (sequence is synthesized)
ggacccctggcccactaaccatgtccccatcccagccttcacggctggagaaaatgcctggggtctgaccctgggcttggcgtgtcttttgtcagatgctcctgagcacctgcagcatag

SEQ ID NO: 112807 - DNA, 120 bp, Artificial Sequence
  ENSG00000100284_36 (sequence is synthesized)
tacccgaagggtgtgtcggaactggggttcttctcttcaaggggaaggagctccctctgacccctggccctgctccagctgctgggagcctggtcccctgcttagtctcctggctctgca

SEQ ID NO: 112808 - DNA, 120 bp, Artificial Sequence
  ENSG00000100284_37 (sequence is synthesized)
cctccatcacccacagcctggcacagcgggcccagtggtgggtccgggcagctaggcagctgaggctggggtgggaggctgcccagggccacccagctgcagggtgctgagctggcacgt

SEQ ID NO: 112809 - DNA, 120 bp, Artificial Sequence
  ENSG00000100284_38 (sequence is synthesized)
gtctgacccaacccgcttggctgcagaggccatctgagcccctagtacctgagccccatccaaggtaggaattcacagctggcccctgggggctgccaccccaccccgcctctcttagtg

SEQ ID NO: 112810 - DNA, 120 bp, Artificial Sequence
  ENSG00000100284_39 (sequence is synthesized)
gcagcccagattccacacggatctggaagcccagccttgtgtgcagcatctgcctaggatgaggcaagctggagactcttaatcagaagttgaccccaagcgccatctgcattctgcagg

SEQ ID NO: 112811 - DNA, 120 bp, Artificial Sequence
  ENSG00000100284_40 (sequence is synthesized)
cccaacctcccagggagtccagttgagctggagccagaggggaggaaggaaattccctgatgcccagtcctagctcctggggccctggtgacagatccctgggcaaagcctgcaagccac

SEQ ID NO: 112812 - DNA, 120 bp, Artificial Sequence
  ENSG00000100284_41 (sequence is synthesized)
aggttgtgagtccctgctaagcaatgggctaggaagattctgatgtgatcagaacctggctggatacacaaaacagtcccaaagatgccctccgagcagtaaagaagagaatcgtgggga

SEQ ID NO: 112813 - DNA, 120 bp, Artificial Sequence
  ENSG00000100284_42 (sequence is synthesized)
tcaaactcttggcctcaagcagtcctccctccttggcctccgaaagcattggtattacaggcatgagccaccacacccacctgcccaccttgtatcattctgttcaagagtcacatcccc

SEQ ID NO: 112814 - DNA, 120 bp, Artificial Sequence
  ENSG00000100285_0 (sequence is synthesized)
gcagtgcctcccgccccgtcccggcctcgcgcacctgctcaggccatgatgagcttcggcggcgcggacgcgctgctgggcgccccgttcgcgccgctgcatggcggcggcagcctccac

SEQ ID NO: 112815 - DNA, 120 bp, Artificial Sequence
  ENSG00000100285_1 (sequence is synthesized)
tacgcgctagcccgaaagggtggcgcaggcgggacgcgctccgccgctggctcctccagcggcttccactcgtggacacggacgtccgtgagctccgtgtccgcctcgcccagccgcttc

SEQ ID NO: 112816 - DNA, 120 bp, Artificial Sequence
  ENSG00000100285_2 (sequence is synthesized)
cgtggcgcaggcgccgcctcaagcaccgactcgctggacacgctgagcaacgggccggagggctgcatggtggcggtggccacctcacgcagtgagaaggagcagctgcaggcgctgaac

SEQ ID NO: 112817 - DNA, 120 bp, Artificial Sequence
  ENSG00000100285_3 (sequence is synthesized)
gaccgcttcgccgggtacatcgacaaggtgcggcagctggaggcgcacaaccgcagcctggagggcgaggctgcggcgctgcggcagcagcaggcgggccgctccgctatgggcgagctg

SEQ ID NO: 112818 - DNA, 120 bp, Artificial Sequence
  ENSG00000100285_4 (sequence is synthesized)
tacgagcgcgaggtccgcgagatgcgcggcgcggtgctgcgcctgggcgcggcgcgcggtcagctacgcctggagcaggagcacctgctcgaggacatcgcgcacgtgcgccagcgccta

SEQ ID NO: 112819 - DNA, 120 bp, Artificial Sequence
  ENSG00000100285_5 (sequence is synthesized)
gacgacgaggcccggcagcgagaggaggccgaggcggcggcccgcgcgctggcgcgcttcgcgcaggaggccgaggcggcgcgcgtggacctgcagaagaaggcgcaggcgctgcaggag

SEQ ID NO: 112820 - DNA, 120 bp, Artificial Sequence
  ENSG00000100285_6 (sequence is synthesized)
gagtgcggctacctgcggcgccaccaccaggaagaggtgggcgagctgctcggccagatccagggctccggcgccgcgcaggcgcagatgcaggccgagacgcgcgacgccctgaagtgc

SEQ ID NO: 112821 - DNA, 120 bp, Artificial Sequence
  ENSG00000100285_7 (sequence is synthesized)
gacgtgacgtcggcgctgcgcgagattcgcgcgcagcttgaaggccacgcggtgcagagcacgctgcagtccgaggagtggttccgagtgaggctggaccgactgtcggaggcagccaag

SEQ ID NO: 112822 - DNA, 120 bp, Artificial Sequence
  ENSG00000100285_8 (sequence is synthesized)
gtgaacacagacgctatgcgctcagcgcaggaggagataactgagtaccggcgtcagctgcaggccaggaccacagagctggaggcactgaaaagcaccaaggactcactggagaggcag

SEQ ID NO: 112823 - DNA, 120 bp, Artificial Sequence
  ENSG00000100285_9 (sequence is synthesized)
cgctctgagctggaggaccgtcatcaggccgacattgcctcctaccaggaagccattcagcagctggacgctgagctgaggaacaccaagtgggagatggccgcccagctgcgagaatac

SEQ ID NO: 112824 - DNA, 120 bp, Artificial Sequence
  ENSG00000100285_10 (sequence is synthesized)
caggacctgctcaatgtcaagatggctctggatatagagatagccgcttacagaaaactcctggaaggtgaagagtgtcggattggctttggcccaattcctttctcgcttccagaagga

SEQ ID NO: 112825 - DNA, 120 bp, Artificial Sequence
  ENSG00000100285_11 (sequence is synthesized)
ctccccaaaattccctctgtgtccactcacataaaggtgaaaagcgaagagaagatcaaagtggtggagaagtctgagaaagaaactgtgattgtggaggaacagacagaggagacccaa

SEQ ID NO: 112826 - DNA, 120 bp, Artificial Sequence
  ENSG00000100285_12 (sequence is synthesized)
gtgactgaagaagtgactgaagaagaggagaaagaggccaaagaggaggagggcaaggaggaagaagggggtgaagaagaggaggcagaagggggagaagaagaaacaaagtctccccca

SEQ ID NO: 112827 - DNA, 120 bp, Artificial Sequence
  ENSG00000100285_13 (sequence is synthesized)
gcagaagaggctgcatccccagagaaggaagccaagtcaccagtaaaggaagaggcaaagtcaccggctgaggccaagtccccagagaaggaggaagcaaaatccccagccgaagtcaag

SEQ ID NO: 112828 - DNA, 120 bp, Artificial Sequence
  ENSG00000100285_14 (sequence is synthesized)
tcccctgagaaggccaagtctccagcaaaggaagaggcaaagtcaccgcctgaggccaagtccccagagaaggaggaagcaaaatctccagctgaggtcaagtcccccgagaaggccaag

SEQ ID NO: 112829 - DNA, 120 bp, Artificial Sequence
  ENSG00000100285_15 (sequence is synthesized)
gaagcaaagtcaccggctgaggccaagtccccagtgaaggaagaagcaaaatctccagctgaggtcaagtccccggaaaaggccaagtctccaacgaaggaggaagcaaagtcccctgag

SEQ ID NO: 112830 - DNA, 120 bp, Artificial Sequence
  ENSG00000100285_16 (sequence is synthesized)
aaggccaagtccccagagaaggaagaggccaagtcccctgagaaggccaagtccccagtgaaggcagaagcaaagtcccctgagaaggccaagtccccagtgaaggcagaagcaaagtcc

SEQ ID NO: 112831 - DNA, 120 bp, Artificial Sequence
  ENSG00000100285_17 (sequence is synthesized)
cctgagaaggccaagtccccagtgaaggaagaagcaaagtcccctgagaaggccaagtccccagtgaaggaagaagcaaagtcccctgagaaggccaagtccccagtgaaggaagaagca

SEQ ID NO: 112832 - DNA, 120 bp, Artificial Sequence
  ENSG00000100285_18 (sequence is synthesized)
aagacccccgagaaggccaagtccccagtgaaggaagaagctaagtccccagagaaggccaagtccccagagaaggccaagactcttgatgtgaagtctccagaagccaagactccagcg

SEQ ID NO: 112833 - DNA, 120 bp, Artificial Sequence
  ENSG00000100285_19 (sequence is synthesized)
aaggaggaagcaaggtcccctgcagacaaattccctgaaaaggccaaaagccctgtcaaggaggaggtcaagtccccagagaaggcgaaatctcccctgaaggaggatgccaaggcccct

SEQ ID NO: 112834 - DNA, 120 bp, Artificial Sequence
  ENSG00000100285_20 (sequence is synthesized)
gagaaggagatcccaaaaaaggaagaggtgaagtccccagtgaaggaggaggagaagccccaggaggtgaaagtcaaagagcccccaaagaaggcagaggaagagaaagcccctgccaca

SEQ ID NO: 112835 - DNA, 120 bp, Artificial Sequence
  ENSG00000100285_21 (sequence is synthesized)
ccaaaaacagaggagaagaaggacagcaagaaagaggaggcacccaagaaggaggctccaaagcccaaggtggaggagaagaaggaacctgctgtcgaaaagcccaaagaatccaaagtt

SEQ ID NO: 112836 - DNA, 120 bp, Artificial Sequence
  ENSG00000100285_22 (sequence is synthesized)
gaagccaagaaggaagaggctgaagataagaaaaaagtccccaccccagagaaggaggctcctgccaaggtggaggtgaaggaagacgctaaacccaaagaaaagacagaggtagccaag

SEQ ID NO: 112837 - DNA, 120 bp, Artificial Sequence
  ENSG00000100285_23 (sequence is synthesized)
aaggaaccagatgatgccaaggccaaggaacccagcaaaccagcagagaagaaggaggcagcaccggagaaaaaagacaccaaggaggagaaggccaagaagcctgaggagaaacccaag

SEQ ID NO: 112838 - DNA, 120 bp, Artificial Sequence
  ENSG00000100285_24 (sequence is synthesized)
acagaggccaaagccaaggaagatgacaagaccctctcaaaagagcctagcaagcctaaggcagaaaaggctgaaaaatcctccagcacagaccaaaaagacagcaagcctccagagaag

SEQ ID NO: 112839 - DNA, 120 bp, Artificial Sequence
  ENSG00000100285_25 (sequence is synthesized)
gccacagaagacaaggccgccaaggggaagtaaggcagggagaaaggaacatccggaacagccaaagaaactcagaagagtcccggagctcaaggatcagagtaacacaattttcacttt

SEQ ID NO: 112840 - DNA, 120 bp, Artificial Sequence
  ENSG00000100285_26 (sequence is synthesized)
ttctgtctttatgtaagaagaaactgcttagatgacggggcctccttcttcaaacaggaatttctgttagcaatatgttagcaagagagggcactcccaggcccctgcccccaggccctc

SEQ ID NO: 112841 - DNA, 120 bp, Artificial Sequence
  ENSG00000100285_27 (sequence is synthesized)
cccaggcgatggacaattatgatagcttatgtagctgaatgtgatacatgccgaatgccacacgtaaacacttgactataaaaactgcccccctcctttccaaataagtgcatttattgc

SEQ ID NO: 112842 - DNA, 120 bp, Artificial Sequence
  ENSG00000100285_28 (sequence is synthesized)
ctctatgtgcaactgacagatgaccgcaataatgaatgagcagttagaaatacattatgcttgagatgtcttaacctattcccaaatgccttctgttttccaaaggagtggtcaagccct

SEQ ID NO: 112843 - DNA, 120 bp, Artificial Sequence
  ENSG00000100285_29 (sequence is synthesized)
tgcccagagctctctattctggaagagcggtccaggtggggccggggactggccactgaattatgccagggcgcactttccactggagttcactttcaattgcttctgtgcaataaaacc

SEQ ID NO: 112844 - DNA, 120 bp, Artificial Sequence
  ENSG00000100285_30 (sequence is synthesized)
aagtgcttataaaatgaaaatgttgctgctgttattctctttccctgggaaggctgggggcagggcaggggaggtctggatgtgacaccccagactgcatgggactgagcaagcatcagt

SEQ ID NO: 112845 - DNA, 120 bp, Artificial Sequence
  ENSG00000100288_0 (sequence is synthesized)
agagatctgcggaattcggccttcggaaagagcccccgggccggggcacggagagagccgagcgccgcagccgtgagccgaatagagccggagagacccgagtatgaccggagaagccca

SEQ ID NO: 112846 - DNA, 120 bp, Artificial Sequence
  ENSG00000100288_1 (sequence is synthesized)
ggccggccggaagaggagccgagcgcggccggaaggaaccgagcccgtccgaagggagcggagcgcagcctggcctggggcccggtcgagcccgcgccatggcggccgaggcgacagctg

SEQ ID NO: 112847 - DNA, 120 bp, Artificial Sequence
  ENSG00000100288_2 (sequence is synthesized)
tggccggaagcggggctgttggcggctgcctggccaaagacggcttgcagcagtctaagtgcccggacactaccccaaaacggcggcgcgcctcgtcgctgtcgcgtgacgccgagcgcc

SEQ ID NO: 112848 - DNA, 120 bp, Artificial Sequence
  ENSG00000100288_3 (sequence is synthesized)
gagcctaccaatggtgccgggagtacttgggcggggcctggcgccgagtgcagcccgaggagctgagggtttaccccgtgagcggaggcctcagcaacctgctcttccgctgctcgctcc

SEQ ID NO: 112849 - DNA, 120 bp, Artificial Sequence
  ENSG00000100288_4 (sequence is synthesized)
cggaccacctgcccagcgttggcgaggagccccgggaggtgcttctgcggctgtacggagccatcttgcagggcgtggactccctggtgctagaaagcgtgatgttcgccatacttgcgg

SEQ ID NO: 112850 - DNA, 120 bp, Artificial Sequence
  ENSG00000100288_5 (sequence is synthesized)
agcggtcgctggggccccagctgtacggagtcttcccagagggccggctggaacagtacatcccaagtcggccattgaaaactcaagagcttcgagagccagtgttgtcagcagccattg

SEQ ID NO: 112851 - DNA, 120 bp, Artificial Sequence
  ENSG00000100288_6 (sequence is synthesized)
ggtacctaaaacagatccaggacctgcccccaactggcctccctgagatgaacctgctggagatgtacagcctgaaggatgagatgggcaacctcaggaagttactagagtctaccccat

SEQ ID NO: 112852 - DNA, 120 bp, Artificial Sequence
  ENSG00000100288_7 (sequence is synthesized)
cgccagtcgtcttctgccacaatgacatccaggaagggaacatcttgctgctctcagagccagaaaatgctgacagcctcatgctggtggacttcgagtacagcagttataactataggg

SEQ ID NO: 112853 - DNA, 120 bp, Artificial Sequence
  ENSG00000100288_8 (sequence is synthesized)
gctttgacattgggaaccatttttgtgagtgggtttatgattatactcacgaggaatggcctttctacaaagcaaggcccacagactaccccactcaagaacagcagttgcattttattc

SEQ ID NO: 112854 - DNA, 120 bp, Artificial Sequence
  ENSG00000100288_9 (sequence is synthesized)
gtcattacctggcagaggcaaagaaaggtgagaccctctcccaagaggagcagagaaaactggaagaagatttgctggtagaagtcagtcggtatgctctggcatcccatttcttctggg

SEQ ID NO: 112855 - DNA, 120 bp, Artificial Sequence
  ENSG00000100288_10 (sequence is synthesized)
gtctgtggtccatcctccaggcatccatgtccaccatagaatttggttacttggactatgcccagtctcggttccagttctacttccagcagaaggggcagctgaccagtgtccactcct

SEQ ID NO: 112856 - DNA, 120 bp, Artificial Sequence
  ENSG00000100288_11 (sequence is synthesized)
catcctgactccaccctcccactccttggatttctcctggagcctccagggcaggaccttggagggaggaacaacgagcagaaggccctggcgactgggctgagcccccaagtgaaactg

SEQ ID NO: 112857 - DNA, 120 bp, Artificial Sequence
  ENSG00000100288_12 (sequence is synthesized)
aggttcaggagaccggcctgttcctgagtttgagtaggtccccatggctggcaggccagagccccgtgctgtgtatgtaacacaataaacaagcttcttcttcccaccctgtcctggccc

SEQ ID NO: 112858 - DNA, 120 bp, Artificial Sequence
  ENSG00000100288_13 (sequence is synthesized)
cgggagggggccggggccgcggcaggtagggccggccgcgggctgagcgcgcctggtgtgggtctgcagcggaggcctcagcaacctgctcttccgctgctcgctcccggaccacctgcc

SEQ ID NO: 112859 - DNA, 120 bp, Artificial Sequence
  ENSG00000100288_14 (sequence is synthesized)
aacgcggcagcggcagatggggaggggtcgctcctgctctgggaagagagtctggcctgtttgtctccccctctccggcggagtgaggcctaaacccagaggcccagcgtcctcccaacc

SEQ ID NO: 112860 - DNA, 120 bp, Artificial Sequence
  ENSG00000100288_15 (sequence is synthesized)
ccagtcccttcccgcagggctccgggcttgatttccactctctcccggccgggccctatcggccaggtctggcgtccactgaaagaggccaaggccaccgggacacgccgcgccgggagg

SEQ ID NO: 112861 - DNA, 120 bp, Artificial Sequence
  ENSG00000100288_16 (sequence is synthesized)
gtgtgcccgcatcccgcccgcatcctcccccgcagagggtcggcccagggcctccacccttgacagcggaggcctcagcaacctgctcttccgctgctcgctcccggaccacctgcccag

SEQ ID NO: 112862 - DNA, 88 bp, Artificial Sequence
  ENSG00000100288_17 (sequence is synthesized)
cgaggagccccgggaggtgcttctgcggctgtacggagccatcttgcagagctttgggaggctgaggcgagaggatcacttgagcgcg

SEQ ID NO: 112863 - DNA, 120 bp, Artificial Sequence
  ENSG00000100288_18 (sequence is synthesized)
gccagtcgtcttctgccacaatgacatccaggaaggtaggagaaggcatctgagtctcctaacccaagatggaagagccagagggctctggagtgagcagaacctcaccccattccccca

SEQ ID NO: 112864 - DNA, 120 bp, Artificial Sequence
  ENSG00000100288_19 (sequence is synthesized)
gaggtggagtctggaaggaatggccggaaaggatgttacctgggaaatactccacagtctccccaattcctgactcttggccattgatcgtagttgcattttattcgtcattacctggca

SEQ ID NO: 112865 - DNA, 120 bp, Artificial Sequence
  ENSG00000100288_20 (sequence is synthesized)
ggaggtgcttctgcggctgtacggagccatcttgcaggtgaggggggtgtgagcgccgcagcaccagtggctttagggcctgtcgcttacgcgatgcgggtagtattgttcccgttgcgc

SEQ ID NO: 112866 - DNA, 120 bp, Artificial Sequence
  ENSG00000100288_21 (sequence is synthesized)
agttgaggacaccgaggttcacggtctgagtaacacctcattacaccgaagcctgggcctgtattcccagagctttgggaggctgaggcgagaggatcacttgagcacaggagttcgaga

SEQ ID NO: 112867 - DNA, 120 bp, Artificial Sequence
  ENSG00000100288_22 (sequence is synthesized)
ccagcctggacaacatagtgagacccccatctctaaataaaaatagaccaacgctaaagcctgtgctccagagcctccaggcaattggatcagaagtcgcagctctggtgggaggaaggc

SEQ ID NO: 112868 - DNA, 120 bp, Artificial Sequence
  ENSG00000100288_23 (sequence is synthesized)
gagctgagggtttaccccgtgaggtgggaggtcaggggtcagcctctccggtgcgcggatcggggtcaggggtcagccgcggggccctcaggatgctccatgttttcgcccccctcttgc

SEQ ID NO: 112869 - DNA, 120 bp, Artificial Sequence
  ENSG00000100288_24 (sequence is synthesized)
tcctccccaaggcacctccaccccctaaccctaccccagtgcccaatgtctgcctccacatccctcaccccaagtagggaatttcccccaaaaccctgacttcccctcattgccccagcc

SEQ ID NO: 112870 - DNA, 120 bp, Artificial Sequence
  ENSG00000100290_0 (sequence is synthesized)
agacacgaagcctcccgggtggcttacagacgctgccagcatcgccgccgccagaggagaaatgtctgaagtaagacccctctccagagacatcttgatggagaccctcctgtatgagca

SEQ ID NO: 112871 - DNA, 120 bp, Artificial Sequence
  ENSG00000100290_1 (sequence is synthesized)
gctcctggaacccccgaccatggaggttcttggcatgactgactctgaagaggacctggaccctatggaggacttcgattctttggaatgcatggagggcagtgacgcattggccctgcg

SEQ ID NO: 112872 - DNA, 120 bp, Artificial Sequence
  ENSG00000100290_2 (sequence is synthesized)
gctggcctgcatcggggacgagatggacgtgagcctcagggccccgcgcctggcccagctctccgaggtggccatgcacagcctgggtctggctttcatctacgaccagactgaggacat

SEQ ID NO: 112873 - DNA, 120 bp, Artificial Sequence
  ENSG00000100290_3 (sequence is synthesized)
gctggcgctgctgctgctgctggcgctgctgctgccgctgctcagcgggggcctgcacctgctgctcaagtgaggccccggcggctcagggcggggctggccccacccccatgaccactg

SEQ ID NO: 112874 - DNA, 120 bp, Artificial Sequence
  ENSG00000100290_4 (sequence is synthesized)
ccctggaggtggcggcctgctgctgttatctttttaactgttttctcatgatgcctttttatatttaaaccccgagatagtgctggaacactgctgaggttttatactcaggttttttgt

SEQ ID NO: 112875 - DNA, 120 bp, Artificial Sequence
  ENSG00000100290_5 (sequence is synthesized)
tttttttttattccagttttcgttttttctaaaagatgaattcctatggctctgcaattgtcaccggttaactgtggcctgtgcccaggaagagccattcactcctgcccctgcccacac

SEQ ID NO: 112876 - DNA, 120 bp, Artificial Sequence
  ENSG00000100290_6 (sequence is synthesized)
ggcaggtagcagggggagtgctggtcacacccctgtgtgatatgtgatgccctcggcaaagaatctactggaatagattccgaggagcaggagtgctcaataaaatgttggtttccagca

SEQ ID NO: 112877 - DNA, 120 bp, Artificial Sequence
  ENSG00000100292_0 (sequence is synthesized)
aacgcctgcctcctctcgagcgtcctcagcgcagccgccgcccgcggagccagcacgaacgagcccagcaccggccggatggagcgtccgcaacccgacagcatgccccaggatttgtca

SEQ ID NO: 112878 - DNA, 120 bp, Artificial Sequence
  ENSG00000100292_1 (sequence is synthesized)
gaggccctgaaggaggccaccaaggaggtgcacacccaggcagagaatgctgagttcatgaggaactttcagaagggccaggtgacccgagacggcttcaagctggtgatggcctccctg

SEQ ID NO: 112879 - DNA, 120 bp, Artificial Sequence
  ENSG00000100292_2 (sequence is synthesized)
taccacatctatgtggccctggaggaggagattgagcgcaacaaggagagcccagtcttcgcccctgtctacttcccagaagagctgcaccgcaaggctgccctggagcaggacctggcc

SEQ ID NO: 112880 - DNA, 120 bp, Artificial Sequence
  ENSG00000100292_3 (sequence is synthesized)
ttctggtacgggccccgctggcaggaggtcatcccctacacaccagccatgcagcgctatgtgaagcggctccacgaggtggggcgcacagagcccgagctgctggtggcccacgcctac

SEQ ID NO: 112881 - DNA, 120 bp, Artificial Sequence
  ENSG00000100292_4 (sequence is synthesized)
acccgctacctgggtgacctgtctgggggccaggtgctcaaaaagattgcccagaaagccctggacctgcccagctctggcgagggcctggccttcttcaccttccccaacattgccagt

SEQ ID NO: 112882 - DNA, 120 bp, Artificial Sequence
  ENSG00000100292_5 (sequence is synthesized)
gccaccaagttcaagcagctctaccgctcccgcatgaactccctggagatgactcccgcagtcaggcagagggtgatagaagaggccaagactgcgttcctgctcaacatccagctcttt

SEQ ID NO: 112883 - DNA, 120 bp, Artificial Sequence
  ENSG00000100292_6 (sequence is synthesized)
cccagagggaagcccccactcaacacccgctcccaggctccgcttctccgatgggtccttacactcagctttctggtggcgacagttgctgtagggctttatgccatgtgaatgcaggca

SEQ ID NO: 112884 - DNA, 120 bp, Artificial Sequence
  ENSG00000100292_7 (sequence is synthesized)
tgctggctcccagggccatgaactttgtccggtggaaggccttctttctagagagggaattctcttggctggcttccttaccgtgggcactgaaggctttcagggcctccagccctctca

SEQ ID NO: 112885 - DNA, 120 bp, Artificial Sequence
  ENSG00000100292_8 (sequence is synthesized)
ctgtgtccctctctctggaaaggaggaaggagcctatggcatcttccccaacgaaaagcacatccaggcaatggcctaaacttcagagggggcgaagggatcagccctgcccttcagcat

SEQ ID NO: 112886 - DNA, 120 bp, Artificial Sequence
  ENSG00000100292_9 (sequence is synthesized)
cctcagttcctgcagcagagcctggaagacaccctaatgtggcagctgtctcaaacctccaaaagccctgagtttcaagtatccttgttgacacggccatgaccactttccccgtgggcc

SEQ ID NO: 112887 - DNA, 120 bp, Artificial Sequence
  ENSG00000100292_10 (sequence is synthesized)
atggcaatttttacacaaacctgaaaagatgttgtgtcttgtgtttttgtcttatttttgttggagccactctgttcctggctcagcctcaaatgcagtatttttgttgtgttctgttgt

SEQ ID NO: 112888 - DNA, 120 bp, Artificial Sequence
  ENSG00000100292_11 (sequence is synthesized)
ttttatagcagggttggggtggtttttgagccatgcgtgggtggggagggaggtgtttaacggcactgtggccttggtctaacttttgtgtgaaataataaacaacattgtctgatagta

SEQ ID NO: 112889 - DNA, 120 bp, Artificial Sequence
  ENSG00000100292_12 (sequence is synthesized)
gaatgtttggtggtggtgggtgttgtttcctgctgccccaccccactgcccctgtaaggacaggttctcgctatattgcccaggccagtcttgaacacctgacttcaagcaatcctcttg

SEQ ID NO: 112890 - DNA, 120 bp, Artificial Sequence
  ENSG00000100292_13 (sequence is synthesized)
ccagtcttgaacacctgacttcaagcaatcctcttgcctctgcctccccacatgctgcagttacaggcgcgagccaccatgccagcctgaatgtttgttgttgttgttgtttgagatgga

SEQ ID NO: 112891 - DNA, 120 bp, Artificial Sequence
  ENSG00000100292_14 (sequence is synthesized)
gtcaacgcctgcctcctctcgagcgtcctcagcgcagccgccgcccgcggagccagcacgaacgagcccagcaccggccggatggagcgtccgcaacccgacaggcaagcgcggggcgcg

SEQ ID NO: 112892 - DNA, 120 bp, Artificial Sequence
  ENSG00000100292_15 (sequence is synthesized)
ggacgcgggacgggcgcctttctctcccaaccctgcttgcgtcctagccccaccccgggacactgccacacagcgacagagcccaggagccagaaacttgggctctggagtcaggagcat

SEQ ID NO: 112893 - DNA, 120 bp, Artificial Sequence
  ENSG00000100292_16 (sequence is synthesized)
cggggacttagtctcctccctgggtttggacactggcatcctgctttatgtgtgacaccactgcacccctctgagcctcggtttccccatctgtaaaatagaagcgatctaccctcacag

SEQ ID NO: 112894 - DNA, 120 bp, Artificial Sequence
  ENSG00000100292_17 (sequence is synthesized)
ggtcatatgactgctcctctccaccccacactggcccggggcgggctgggcgcgggcccctgcgggtgttgcaacgcccggccagaaagtgggcatcagctgttccgcctggcccacgtg

SEQ ID NO: 112895 - DNA, 120 bp, Artificial Sequence
  ENSG00000100294_0 (sequence is synthesized)
gcagtcgggcctcggtcgccacggtaacgcgcgcgggcaggtgtccgaccatgagcgtccgggtcgcacgggtagcgtgggtcaggggcttgggcgccagctaccgccgcggcgcctcga

SEQ ID NO: 112896 - DNA, 120 bp, Artificial Sequence
  ENSG00000100294_1 (sequence is synthesized)
gcttcccggtgcctccgccgggcgcccagggtgtagcggagctgctgcgagatgcgaccggggcggaggaggaggcgccctgggcggcgacggagcggcgaatgccgggccagtgctccg

SEQ ID NO: 112897 - DNA, 120 bp, Artificial Sequence
  ENSG00000100294_2 (sequence is synthesized)
tgctgctcttcccgggccagggcagccaggtggtgggcatgggccgcggtctgctcaactacccgcgcgtccgcgaactctacgccgccgcccgccgcgtgctgggctacgacctgctgg

SEQ ID NO: 112898 - DNA, 120 bp, Artificial Sequence
  ENSG00000100294_3 (sequence is synthesized)
aactgagcctgcacgggccgcaggagaccctggaccgcaccgtgcactgtcagcccgcgatcttcgtggcatcgctggccgctgtcgagaaactacatcacctgcagccctcggtgattg

SEQ ID NO: 112899 - DNA, 120 bp, Artificial Sequence
  ENSG00000100294_4 (sequence is synthesized)
agaactgtgttgctgctgctggattcagtgtgggagagtttgcagccctagtgtttgccggagccatggaatttgctgaaggtttgtatgcagtgaaaatccgagctgaggccatgcagg

SEQ ID NO: 112900 - DNA, 120 bp, Artificial Sequence
  ENSG00000100294_5 (sequence is synthesized)
aagcttcagaagctgtccccagtgggatgctgtctgtcctcggccagcctcagtccaagttcaacttcgcctgtttggaagcccgggaacactgcaagtctttaggcatagagaaccccg

SEQ ID NO: 112901 - DNA, 120 bp, Artificial Sequence
  ENSG00000100294_6 (sequence is synthesized)
tatgtgaagtgtccaactacctctttccagattgcagggtgatttcaggacaccaagaggctctacggtttctccagaagaattcctctaagtttcatttcagacgcaccaggatgttgc

SEQ ID NO: 112902 - DNA, 120 bp, Artificial Sequence
  ENSG00000100294_7 (sequence is synthesized)
cggttagtggcgcattccacacccgcctcatggagccagccgtggagcccctgacgcaagctttaaaggcagtcgacattaagaagcctctggtttctgtctactccaacgtccacgcgc

SEQ ID NO: 112903 - DNA, 120 bp, Artificial Sequence
  ENSG00000100294_8 (sequence is synthesized)
gggcacatccacaagctgctggcccagcagctggtctccccagtgaagtgggagcagacgatgcatgccatatacgaaaggaaaaagggcagggggttcccccaaactttcgaagtaggc

SEQ ID NO: 112904 - DNA, 120 bp, Artificial Sequence
  ENSG00000100294_9 (sequence is synthesized)
cctggcaggcagctgggagccatcctgaagagctgtaacatgcaggcctggaagtcctacagcgccgtggatgtgctgcagaccctcgaacatgtggacctggaccctcaggagcccccg

SEQ ID NO: 112905 - DNA, 120 bp, Artificial Sequence
  ENSG00000100294_10 (sequence is synthesized)
agatgactgcagggggctcaaatgcgatgaccccctctgtcctcctgaggagaggctgtaggctgtgcctgtcgccccctaccttcctaatggctcctcctctgaggagtgaaagggatt

SEQ ID NO: 112906 - DNA, 120 bp, Artificial Sequence
  ENSG00000100294_11 (sequence is synthesized)
tgtttgcaacgtgctttgaaggccacataaaaagccctaaaaatgagtatttctttacatgacccagtccatttctcccccttggaaaaacgtttggacgttgggaagaatgatgccaca

SEQ ID NO: 112907 - DNA, 120 bp, Artificial Sequence
  ENSG00000100294_12 (sequence is synthesized)
gggctggtgtgtggggaagctagaatcctggccccgcctctgccagccctgcaccataggcaggtgtgccatctcagcgggaaggggaggactggctgctgcagcctgtcctgctctgtg

SEQ ID NO: 112908 - DNA, 120 bp, Artificial Sequence
  ENSG00000100294_13 (sequence is synthesized)
agtgctgagaacatgctggtgtggcctcaatttcagccagtgccaggggagcccctccaccacccccagcctgccccccagggctcctttgtcacaaatctgaaaggttttagaacccag

SEQ ID NO: 112909 - DNA, 120 bp, Artificial Sequence
  ENSG00000100294_14 (sequence is synthesized)
ttggccttggcagttttgttcacctcctcacttgacagctgggagacagaggcccacatttatggacatacccaagagatatgtattgcctgctgtgtgctagagagtgagtgcgctctg

SEQ ID NO: 112910 - DNA, 120 bp, Artificial Sequence
  ENSG00000100294_15 (sequence is synthesized)
ttctggtagaaaggtccttgagtgaggtgcggggtgtggggagtgccaggtagggagggcgactgaggccctggtcctaggggtggaaccatggaggaacaccctggtcacccactggga

SEQ ID NO: 112911 - DNA, 120 bp, Artificial Sequence
  ENSG00000100294_16 (sequence is synthesized)
ctgcgggtctgcggggcgccagagggagcacagcacatacctgcctcggagctgacccctggctccatgccccgtcctcagagcagctcctgcgccaatattaagtatgagacattccaa

SEQ ID NO: 112912 - DNA, 120 bp, Artificial Sequence
  ENSG00000100294_17 (sequence is synthesized)
gtgatgggaagggagcacatggacaggggtgacattggcacatgaggacagggctttgctgtgattccttttcaagactgaaggattcattagggatttcccttatttttgtaatctcat

SEQ ID NO: 112913 - DNA, 120 bp, Artificial Sequence
  ENSG00000100294_18 (sequence is synthesized)
gaaatctgcttgctgaactgtctaacccgctatcctgtgcactcatacctgcagcacctgcaacacgagagtatgtgttcagtagatattcgttgaattaaagagtaaataaatattgga

SEQ ID NO: 112914 - DNA, 120 bp, Artificial Sequence
  ENSG00000100296_0 (sequence is synthesized)
gggcagtggggctgggagatggggcggggctgggcgctccgggactgaggtgctgatcgcccaaagggcgcccctgggctggggtctgacccggcttctcctccctcactacccgcggtc

SEQ ID NO: 112915 - DNA, 120 bp, Artificial Sequence
  ENSG00000100296_1 (sequence is synthesized)
cccggcctctcggcgctgcgctgttacctcatccgaaaagtgttcgctgcagcatcctcaggcttcacgttggagcctcttgattgtggaggaacaaccatgtcatcagaatcgagcaaa

SEQ ID NO: 112916 - DNA, 120 bp, Artificial Sequence
  ENSG00000100296_2 (sequence is synthesized)
aaacggaagcccaaagtgatccgaagcgatggagccccagctgaaggaaagcggaatcgatctgacaccgagcaggaaggtaaatactacagtgaggaggccgaggtggatctgcgggac

SEQ ID NO: 112917 - DNA, 120 bp, Artificial Sequence
  ENSG00000100296_3 (sequence is synthesized)
cctggcagagactatgagttatacaagtacacctgccaggagctacagaggctgatggctgagatccaagacctgaagagcaggggtggcaaggatgtggcaatagaaatagaagaacgg

SEQ ID NO: 112918 - DNA, 120 bp, Artificial Sequence
  ENSG00000100296_4 (sequence is synthesized)
aggatccagagctgtgtgcatttcatgactctaaagaagcttaaccgattagcccacatcaggttgaagaaaggaagagatcagacccacgaggctaagcagaaagtagatgcctatcat

SEQ ID NO: 112919 - DNA, 120 bp, Artificial Sequence
  ENSG00000100296_5 (sequence is synthesized)
ctgcagctccagaacctgttgtatgaggtgatgcacctacagaaggagatcaccaaatgtttggagtttaagtcaaagcatgaagaaattgatctggtcagtttagaggagttttataag

SEQ ID NO: 112920 - DNA, 120 bp, Artificial Sequence
  ENSG00000100296_6 (sequence is synthesized)
gaggctccaccagatatcagcaaggccgaagtcaccatgggagaccctcaccagcaaacactggcacgtctggactgggagctggagcagcggaaaaggctggcagagaagtaccgagag

SEQ ID NO: 112921 - DNA, 120 bp, Artificial Sequence
  ENSG00000100296_7 (sequence is synthesized)
tgcctatctaacaaggagaagattctcaaggagattgaggtgaagaaggagtacctgagcagcctccagccccgcctcaacagcatcatgcaggcttcccttccggtgcaggagtacctg

SEQ ID NO: 112922 - DNA, 120 bp, Artificial Sequence
  ENSG00000100296_8 (sequence is synthesized)
tttatgccattcgaccaggctcacaagcagtatgagacagccagacacctgccgcctcccctctatgtcctctttgttcaggccactgcgtatgggcaggcctgtgataagacgttatct

SEQ ID NO: 112923 - DNA, 120 bp, Artificial Sequence
  ENSG00000100296_9 (sequence is synthesized)
gtggcaatcgaaggcagtgtggatgaagccaaggctctgttcaaacctccagaggactcccaagatgacgagagtgactcagatgccgaggaggagcagactacgaagcgccggagaccc

SEQ ID NO: 112924 - DNA, 120 bp, Artificial Sequence
  ENSG00000100296_10 (sequence is synthesized)
tgaagaggcacccactgtctgtcatgctcgacctgaagtgcaaagatgacagtgtgcttcacctgactttctactacctcatgaacctcaacatcatgacagtaaaagccaaagtgacaa

SEQ ID NO: 112925 - DNA, 120 bp, Artificial Sequence
  ENSG00000100296_11 (sequence is synthesized)
ctgccatggagctgatcacccccatcagtgcaggtgacttgctgtctcctgactcagtcctgagttgcttgtatcctggggatcatggaaagaaaactccgaatccagccaatcagtatc

SEQ ID NO: 112926 - DNA, 120 bp, Artificial Sequence
  ENSG00000100296_12 (sequence is synthesized)
agtttgataaagttggcatcctgactttgagcgactatgtacttgagctaggtcacccctatttgtgggtgcagaagctgggtggcctccacttccccaaagagcagccccagcaaacag

SEQ ID NO: 112927 - DNA, 120 bp, Artificial Sequence
  ENSG00000100296_13 (sequence is synthesized)
tgattgctgaccactcgctgagcgccagccacatggagaccaccatgaaacttctgaagaccagggtgcagtcccgcctggccctccacaaacagtttgcatccctagaacatggcattg

SEQ ID NO: 112928 - DNA, 120 bp, Artificial Sequence
  ENSG00000100296_14 (sequence is synthesized)
tgccagttaccagtgattgccagtacctcttccctgccaaggttgtctctcgcctggtgaaatgggtgacagttgcccatgaggattacatggagctgcacttcaccaaagacattgtgg

SEQ ID NO: 112929 - DNA, 120 bp, Artificial Sequence
  ENSG00000100296_15 (sequence is synthesized)
atgcgggactggctggggacaccaatctctactacatggcgctcatcgaaaggggcacagccaaactgcaggccgctgtggtgttgaaccctggctactcctccatcccacctgttttcc

SEQ ID NO: 112930 - DNA, 120 bp, Artificial Sequence
  ENSG00000100296_16 (sequence is synthesized)
agctctgtttgaactggaaaggggagaaaaccaacagcaacgatgacaacattcgggccatggagggcgaagtcaatgtgtgctacaaggagctgtgtggcccttggcccagccaccagc

SEQ ID NO: 112931 - DNA, 120 bp, Artificial Sequence
  ENSG00000100296_17 (sequence is synthesized)
tgttgaccaaccagctgcagcggctgtgtgtgctgctggatgtttacctggagaccgagagccatgacgacagtgtggaggggcccaaggaatttccccaggagaagatgtgtctgcggc

SEQ ID NO: 112932 - DNA, 120 bp, Artificial Sequence
  ENSG00000100296_18 (sequence is synthesized)
tcttcaggggtcctagcaggatgaagccatttaaatacaaccatcctcagggattcttcagccatcgctgatctcccgcgcagaccgttgtttcccccaaggcctcaccctgagcactgg

SEQ ID NO: 112933 - DNA, 120 bp, Artificial Sequence
  ENSG00000100296_19 (sequence is synthesized)
gcttctgctttctgctctggcccacatgtgactcttgatattctccaaagacaccagccaattaaaaagcgtcacctgaccagtggcctttgtctgtggttcctggcaaggtggctttgc

SEQ ID NO: 112934 - DNA, 120 bp, Artificial Sequence
  ENSG00000100296_20 (sequence is synthesized)
agtctggaagggcaggtgggagctgtgacacagtgtgaaaaagcatttgtagagagactttttctcagcagccaataaaagcagagtggaaaaagattccaattctgcagagagatgctc

SEQ ID NO: 112935 - DNA, 120 bp, Artificial Sequence
  ENSG00000100296_21 (sequence is synthesized)
cccttccttacttccggttctctatggtgcgcgggcaagctttgctccgcctccggcagtggcttactcccggtgccaggttcttggagctgtgaggtgttcagcattatttaagatcac

SEQ ID NO: 112936 - DNA, 120 bp, Artificial Sequence
  ENSG00000100296_22 (sequence is synthesized)
ctatgcatcatctgaagccacagtcccaggtcatcttcatcaccttccccagtggaatgcctcctgtgttaaagcccacaacaacccctgtggaggaacaaccatgtcatcagaatcgag

SEQ ID NO: 112937 - DNA, 120 bp, Artificial Sequence
  ENSG00000100296_23 (sequence is synthesized)
gcttccggtcggccgccccttccttacttccggttctctatggtgcgcgggcaagctttgctccgcctccggcagtggcttactcccggtgccaggttcttggagctgtgaggaggaaca

SEQ ID NO: 112938 - DNA, 120 bp, Artificial Sequence
  ENSG00000100296_24 (sequence is synthesized)
ctacgcacaccctatttgtgctttgcggggtgaggtcctcatgatcttgtatttattatcccaagttcctgctgttaagaggtggtaggagaagccaaaggcagcagagcacaaaaagca

SEQ ID NO: 112939 - DNA, 120 bp, Artificial Sequence
  ENSG00000100296_25 (sequence is synthesized)
aaactcttccctccccacccgctcttcccattagtcctgtcagggttgccgatggacaaattgtctctgatcgttggatgttataaatgtctgacagtgcagtgcaaacagaagacaaac

SEQ ID NO: 112940 - DNA, 120 bp, Artificial Sequence
  ENSG00000100296_26 (sequence is synthesized)
tcagttgatccttgaacaactcaggggttaggggcaccaacaccccctgccctgcacagttgaaaaatccgtgtataacttttgactccctaaaaacttaactaatagcctgctgttgac

SEQ ID NO: 112941 - DNA, 120 bp, Artificial Sequence
  ENSG00000100296_27 (sequence is synthesized)
cagtagtatgctattagtagttacttactgctaacatagtcagtacatattttcagtatatattttgtatcttatacactgtattcttacaatacagtaaactagagaaaagaaaatgtt

SEQ ID NO: 112942 - DNA, 65 bp, Artificial Sequence
  ENSG00000100296_28 (sequence is synthesized)
gtattcttacaatacagtaaactagagaaaagaaaatgttataaggaaagtcacaagggggcctg

SEQ ID NO: 112943 - DNA, 73 bp, Artificial Sequence
  ENSG00000100296_29 (sequence is synthesized)
ggtgaaaccctgtctctactaaaaacatggaaattagccaagcaattacttgaacccatgaggcagaggttgc

SEQ ID NO: 112944 - DNA, 87 bp, Artificial Sequence
  ENSG00000100296_30 (sequence is synthesized)
gaaagccataaggaagaaaatatatatctactattaagtagaagtggatcaccataaaggtcttcacatactgtctcagggttgaat

SEQ ID NO: 112945 - DNA, 120 bp, Artificial Sequence
  ENSG00000100296_31 (sequence is synthesized)
atcaccataaaggtcttcacatactgtctcagggttgaatagtctaaggaagaggaggggttggtcttggtgtctcagggatggcagaggcagaaaaagtgggggaggtggagggggagg

SEQ ID NO: 112946 - DNA, 120 bp, Artificial Sequence
  ENSG00000100296_32 (sequence is synthesized)
caggcaccactgttatttttattgaacaaaatctgtgcagggactcatgactgtaatcctagtactttggaaagctaaggcgggaggatcccttgaggccaggagttcaggtccagcctg

SEQ ID NO: 112947 - DNA, 120 bp, Artificial Sequence
  ENSG00000100296_33 (sequence is synthesized)
ggcaacgtagtgagagaccctgtatctacaaaaaatttaaaaatcagccaggtgtggtggtatgcaccaatagtcccagttactcagaaggctgaggtgggcggatgactggagtccagg

SEQ ID NO: 112948 - DNA, 120 bp, Artificial Sequence
  ENSG00000100296_34 (sequence is synthesized)
agttcaaggtagcagtgagctattcatcgtgcctgtactgtactccagcctgggaaacaatgcgagtccctatctctaaaaaattttaaaaaaagaaatctgcatataatagacccacag

SEQ ID NO: 112949 - DNA, 120 bp, Artificial Sequence
  ENSG00000100296_35 (sequence is synthesized)
agtccaaactattgttcagagatcaactgtacttcacagagagtaattctaagtcttacaggatttcatggagatggcgagagtggtgttggagaatcaatcacatacagagatacagga

SEQ ID NO: 112950 - DNA, 81 bp, Artificial Sequence
  ENSG00000100296_36 (sequence is synthesized)
gagtggtgttggagaatcaatcacatacagagatacaggacagtgagaccaggtaacatttgaggagaatatttttttttt

SEQ ID NO: 112951 - DNA, 75 bp, Artificial Sequence
  ENSG00000100296_37 (sequence is synthesized)
ttctggctaatttttaaattttttgtagaggcgggatcccactatttttcccaggctggtctcaaactcctgggc

SEQ ID NO: 112952 - DNA, 70 bp, Artificial Sequence
  ENSG00000100296_38 (sequence is synthesized)
agtagagtctttaaggtaatgacaaaagtgcctcaaaatataattatttgattaagagaagtcttgggaa

SEQ ID NO: 112953 - DNA, 120 bp, Artificial Sequence
  ENSG00000100296_39 (sequence is synthesized)
cctcaaaatataattatttgattaagagaagtcttgggaagataggtaacaacctttaaaatgttcataaaattacatcctttgtaatactcctgcaagtcaaagtaaaggatggcatag

SEQ ID NO: 112954 - DNA, 120 bp, Artificial Sequence
  ENSG00000100296_40 (sequence is synthesized)
actattcttggacagttttgtcaaaaagtgtatcttgaccccaccatcagtactccattcttcattttaaaaaataagatgggctgggcacagtggcttacgcctttaatatcagtactt

SEQ ID NO: 112955 - DNA, 74 bp, Artificial Sequence
  ENSG00000100296_41 (sequence is synthesized)
ccgaggcggaggttgcactgagccgagatggtgccactgcaccatctggacaacagagcaagactccgtcttgg

SEQ ID NO: 112956 - DNA, 120 bp, Artificial Sequence
  ENSG00000100296_42 (sequence is synthesized)
aaaaaatcctgggccttgtttgtacagttcatgccaggggtaggaaatacctgaagctttcaaatactgcgttagagttgtgactctgtcctgggcaagtcaggcctaaaatggagaaac

SEQ ID NO: 112957 - DNA, 120 bp, Artificial Sequence
  ENSG00000100296_43 (sequence is synthesized)
tggtgatgcactcctcaaaaagccaagtgtaaaatgaggttaatgccctccctgacttgttgccttcactggcgtggcatattatggtaaaaataataattaagaagtaaggttatgcag

SEQ ID NO: 112958 - DNA, 120 bp, Artificial Sequence
  ENSG00000100296_44 (sequence is synthesized)
gcaaatcctctagcgccgaaatcttccccgccgcgctaccaggttctttcgtgttatcttggacataacacaacattaattcaactactcggtggagcgcccactagctgctggacactc

SEQ ID NO: 112959 - DNA, 120 bp, Artificial Sequence
  ENSG00000100296_45 (sequence is synthesized)
tcttaggccctgggcacagtgaacgagaagcatgtgtctttgtttttacagtctcaccacgccaccacctccctcgggggcctccgcgctgagcttccggcctctacgcctcgcttccgg

SEQ ID NO: 112960 - DNA, 120 bp, Artificial Sequence
  ENSG00000100296_46 (sequence is synthesized)
gctggcagagaagtaccgagagtgcctatctaacaaggagaagattctcaaggagattgaggtgaagaaggagtacctgagcagcctccagccccgcctcaacagcatcatgcagataag

SEQ ID NO: 112961 - DNA, 120 bp, Artificial Sequence
  ENSG00000100296_47 (sequence is synthesized)
accatttcctcttgtgggggcatcaagcagctgcatgcactggggcatgcttgttcgcaggtgccgtcctccctagaagcagaagaggtgtgaaagaaggtgctgctgggaggggagtct

SEQ ID NO: 112962 - DNA, 120 bp, Artificial Sequence
  ENSG00000100296_48 (sequence is synthesized)
gtctagcttgatctgatggcctagcccctggcccagcccctgcagaggcatcagcgctcgggcccatccagggacggaagcctggccagtgtggtcccccacatgcaggaaggtagtgct

SEQ ID NO: 112963 - DNA, 120 bp, Artificial Sequence
  ENSG00000100296_49 (sequence is synthesized)
agcagcagctgtggccgagtgaatcagttggaagcagtacctgctcaggaaatttctcagtcctgcccgaagccctcaggtgacagaagctttcttccctctgcattgcccagcatggct

SEQ ID NO: 112964 - DNA, 120 bp, Artificial Sequence
  ENSG00000100296_50 (sequence is synthesized)
gctctgaccagctggcctaaggctggattaacctgatgggtatttcacaatgggtggctttgagtcattcgtgagcctggctggacagctcttgggtgcagaacccaggcagcctgtctg

SEQ ID NO: 112965 - DNA, 120 bp, Artificial Sequence
  ENSG00000100296_51 (sequence is synthesized)
tctggccttttgctttgccttcaccactgaccaggcgctgccagaagtcatgtcaccctttgggctttgccaggtctattaccctaaattagagtatagtataaggatggccttgtctgc

SEQ ID NO: 112966 - DNA, 120 bp, Artificial Sequence
  ENSG00000100296_52 (sequence is synthesized)
atccctacccagttggtgtgataagcttgtgtctgggaggaagaagtgctggcctcaggaatatatacacacattgacctgggtgttttcatccagaggccttctctgggtaacgtactt

SEQ ID NO: 112967 - DNA, 120 bp, Artificial Sequence
  ENSG00000100296_53 (sequence is synthesized)
atttagtttaccccctgcatggcccccaccggcctcacaatctccaggcatctaaacttgcttcctgtggatgtctgtttgatcccccgaccatgcttcagggtcagactgctcagcaga

SEQ ID NO: 112968 - DNA, 120 bp, Artificial Sequence
  ENSG00000100296_54 (sequence is synthesized)
tcttctcactctgaaaaaaactttactcatgaggaagagtcaacacttcgcctgtaaaacataatgtctttctgtataggtgatccactttttatttgctttgcgaagccagatttggtc

SEQ ID NO: 112969 - DNA, 120 bp, Artificial Sequence
  ENSG00000100296_55 (sequence is synthesized)
taaatccttataattttatgaagcaagatggctaatatgaaagaactttgtaaaaggatcctagagataaatttgcttttcttcttaggatttggcaagatctatatttcctttcttcaa

SEQ ID NO: 112970 - DNA, 120 bp, Artificial Sequence
  ENSG00000100296_56 (sequence is synthesized)
tatttcctttcttcaactgtaagcgtagaaggagagttgttgactgcttgtggtgcctcatgcctgtaatcctagcacttcgggtggctgaggggggaggatcacttgagcccaggagtt

SEQ ID NO: 112971 - DNA, 120 bp, Artificial Sequence
  ENSG00000100296_57 (sequence is synthesized)
gcctgggcaatatcgggagaccccgcctctacaaaaaaaaattaactgggcatggtggcctgtgcctgtcgtcccagctacttggaaggctgaggctggagtgcagtggcgcaatcttgg

SEQ ID NO: 112972 - DNA, 120 bp, Artificial Sequence
  ENSG00000100296_58 (sequence is synthesized)
tttactttatatattgtacaattggtcctcatgcactgtgcagaatctgcaaacttgaaactcaaggcgatctagttcagtctttcccgagtcaagaaaaaaaagaaaaaaaaaaacaga

SEQ ID NO: 112973 - DNA, 120 bp, Artificial Sequence
  ENSG00000100296_59 (sequence is synthesized)
gttgggattcgtcccccagggacaccaggtcaccatccaagggcagtcctggtctttggagaactagctggactagttctgtgtagcaggaagcttgacttgaatgtcttagcaccctgg

SEQ ID NO: 112974 - DNA, 120 bp, Artificial Sequence
  ENSG00000100296_60 (sequence is synthesized)
agtagacaggaaagagagctcacttcccggagtcacaaggtgcggcccgtggatttcagccctgccactcactagctgactgaccccgaggaagatgacgagagtgactcagatgccgag

SEQ ID NO: 112975 - DNA, 120 bp, Artificial Sequence
  ENSG00000100296_61 (sequence is synthesized)
aacagagatgacaaaagaccacttgaagagaggttcctaatactagacagatggagagtggcttggctgtttccccctgcatattggggttgaaaacttaaatgtgtagttccagtcctt

SEQ ID NO: 112976 - DNA, 88 bp, Artificial Sequence
  ENSG00000100296_62 (sequence is synthesized)
cacctctcgactgaaggtaaatactacagtgaggaggccgaggtggatctgcgggaccctggcagagactatgagttatacaagtaca

SEQ ID NO: 112977 - DNA, 120 bp, Artificial Sequence
  ENSG00000100297_0 (sequence is synthesized)
ccgcgaaactcggcggctgagcgtggaggttcttgtctcccctggtttgtgaagtgcggaaaaccagaggcgcagtcatgtcgggattcgacgatcctggcattttctacagcgacagct

SEQ ID NO: 112978 - DNA, 120 bp, Artificial Sequence
  ENSG00000100297_1 (sequence is synthesized)
tcgggggcgacgcccaggccgacgaggggcaggcccgcaaatcgcagctgcagaggcgcttcaaggagttcctgcggcagtaccgagtgggcaccgaccgcacgggcttcaccttcaaat

SEQ ID NO: 112979 - DNA, 120 bp, Artificial Sequence
  ENSG00000100297_2 (sequence is synthesized)
acagggatgaactcaagcggcattacaacctgggggagtactggattgaggtggagatggaggatctggccagctttgatgaggacctggccgactacttgtacaagcagccagccgagc

SEQ ID NO: 112980 - DNA, 120 bp, Artificial Sequence
  ENSG00000100297_3 (sequence is synthesized)
acctgcagctgctggaggaagctgccaaggaggtagctgatgaggtgacccggccccggccttctggggaggaggtgctccaggacatccaggtcatgctcaagtcggacgccagccctt

SEQ ID NO: 112981 - DNA, 120 bp, Artificial Sequence
  ENSG00000100297_4 (sequence is synthesized)
ccagcattcgtagcctgaagtcggacatgatgtcacacctggtgaagatccctggcatcatcatcgcggcctctgcggtccgtgccaaggccacccgcatctctatccagtgccgcagct

SEQ ID NO: 112982 - DNA, 120 bp, Artificial Sequence
  ENSG00000100297_5 (sequence is synthesized)
gccgcaacaccctcaccaacattgccatgcgccctggcctcgagggctatgccctgcccaggaagtgcaacacagatcaggctgggcgccccaaatgcccattggacccgtacttcatca

SEQ ID NO: 112983 - DNA, 120 bp, Artificial Sequence
  ENSG00000100297_6 (sequence is synthesized)
tgcccgacaaatgcaaatgcgtggacttccagaccctgaagctgcaggagctgcctgatgcagtcccccacggggagatgcccagacacatgcagctctactgcgacaggtacctgtgtg

SEQ ID NO: 112984 - DNA, 120 bp, Artificial Sequence
  ENSG00000100297_7 (sequence is synthesized)
acaaggtcgtccctgggaacagggttaccatcatgggcatctactccatcaagaagtttggcctgactaccagcaggggccgtgacagggtgggcgtgggcatccgaagctcctacatcc

SEQ ID NO: 112985 - DNA, 120 bp, Artificial Sequence
  ENSG00000100297_8 (sequence is synthesized)
gtgtcctgggcatccaggtggacacagatggctctggccgcagctttgctggggccgtgagcccccaggaggaggaggagttccgtcgcctggctgccctcccaaatgtctatgaggtca

SEQ ID NO: 112986 - DNA, 120 bp, Artificial Sequence
  ENSG00000100297_9 (sequence is synthesized)
tctccaagagcatcgccccctccatctttgggggcacagacatgaagaaggccattgcctgcctgctctttgggggctcccgaaagaggctccctgatggacttactcgccgaggagaca

SEQ ID NO: 112987 - DNA, 120 bp, Artificial Sequence
  ENSG00000100297_10 (sequence is synthesized)
tcaacctgctgatgctaggggaccctgggacagccaagtcccagcttctgaagtttgtggagaagtgttctcccattggggtatacacgtctgggaaaggcagcagcgcagctggactga

SEQ ID NO: 112988 - DNA, 120 bp, Artificial Sequence
  ENSG00000100297_11 (sequence is synthesized)
cagcctcggtgatgagggacccttcgtcccggaatttcatcatggagggcggagccatggtcctggccgatggtggggtcgtctgtattgacgagtttgacaagatgcgagaagatgacc

SEQ ID NO: 112989 - DNA, 120 bp, Artificial Sequence
  ENSG00000100297_12 (sequence is synthesized)
gtgtggcaatccacgaagccatggagcagcagaccatctctatcgccaaggctgggatcaccaccaccctgaactcccgctgctccgtcctggctgctgccaactcagtgttcggccgct

SEQ ID NO: 112990 - DNA, 120 bp, Artificial Sequence
  ENSG00000100297_13 (sequence is synthesized)
gggatgagacgaagggggaggacaacattgacttcatgcccaccatcttgtcgcgcttcgacatgatcttcatcgtcaaggatgagcacaatgaggagagggatgtgatgctggccaagc

SEQ ID NO: 112991 - DNA, 120 bp, Artificial Sequence
  ENSG00000100297_14 (sequence is synthesized)
gtgaagtgtggcccccggctgtcagcagaggctgcagagaaactgaagaaccgctacatcatcatgcggagcggggcccgtcagcacgagagggacagtgaccgccgctccagcatcccc

SEQ ID NO: 112992 - DNA, 120 bp, Artificial Sequence
  ENSG00000100297_15 (sequence is synthesized)
atcactgtgcggcagctggaggccattgtgcgcatcgcggaagccctcagcaagatgaagctgcagcccttcgccacagaggcagatgtggaggaggccctgcggctcttccaagtgtcc

SEQ ID NO: 112993 - DNA, 120 bp, Artificial Sequence
  ENSG00000100297_16 (sequence is synthesized)
acgttggatgctgccttgtccggtaccctgtcaggggtggagggcttcaccagccaggaggaccaggagatgctgagccgcatcgagaagcagctcaagcgccgctttgccattggctcc

SEQ ID NO: 112994 - DNA, 120 bp, Artificial Sequence
  ENSG00000100297_17 (sequence is synthesized)
caggtgtctgagcacagcatcatcaaggacttcaccaagcagaaatacccggagcacgccatccacaaggtgctgcagctcatgctgcggcgcggcgagatccagcatcgcatgcagcgc

SEQ ID NO: 112995 - DNA, 120 bp, Artificial Sequence
  ENSG00000100297_18 (sequence is synthesized)
aaggttctctaccgcctcaagtgagtcgcgccgcctcactggactcatggactcgcccacgcctcgcccctcctgccgctgcctgccattgacaatgttgctgggacctctgcctcccca

SEQ ID NO: 112996 - DNA, 120 bp, Artificial Sequence
  ENSG00000100297_19 (sequence is synthesized)
ctgcagccctcgaacttcccaggcaccctcctttctgccccagaggaaggagctgtagtgtcctgctgcctctgggcgcccgcctctagcgcggttctgggaagtgtgcttttggcatcc

SEQ ID NO: 112997 - DNA, 120 bp, Artificial Sequence
  ENSG00000100297_20 (sequence is synthesized)
gttaataataaagccacggtgtgttcaggtatctgtgggtttgtgcactcggtgacctgtcacctccatcgtgccctcatggcagggtaagtgtgagggaacagggtctggaggcagact

SEQ ID NO: 112998 - DNA, 120 bp, Artificial Sequence
  ENSG00000100297_21 (sequence is synthesized)
ggccagggtttctgacttggatctgccactcagacttctgggtaagtcacgtgacttgagtgctccggtttcttcatctgtttagcggggctcataaagccactcccttgatgctgggaa

SEQ ID NO: 112999 - DNA, 120 bp, Artificial Sequence
  ENSG00000100297_22 (sequence is synthesized)
tccagtgagaccagggagtggggaagcgcttctcaaagtgtgtgattttgatccgcctcacctgttccccagtaacttattggggggctgcgagccgtggtgcggcggtcagactgcctg

SEQ ID NO: 113000 - DNA, 120 bp, Artificial Sequence
  ENSG00000100297_23 (sequence is synthesized)
gattcatggaccctctccatgccttagtttccttatctgtaagcaggctgatactagaacctgcttcacagggttgtgcttagggtcagtgagcagctgttagtgaggggaatgtagtgg

SEQ ID NO: 113001 - DNA, 120 bp, Artificial Sequence
  ENSG00000100297_24 (sequence is synthesized)
ccaccaggcaggaactaggactccagccagttctttcctggtgggccacgtgtaactgtgtggccttgggcgagacatttcacttttctgtgcctgagtttatcagtaaactggagatgg

SEQ ID NO: 113002 - DNA, 120 bp, Artificial Sequence
  ENSG00000100297_25 (sequence is synthesized)
ggggattcctcaccctgagttgtgaggattgaatgacagaaggcactagtgacagtgatgctggaggaaggagtgttgccaagtgcctcggtcactttgcctaatttcagaaagtcactc

SEQ ID NO: 113003 - DNA, 120 bp, Artificial Sequence
  ENSG00000100297_26 (sequence is synthesized)
tgagttggtatgttttgtgtttttaaaaaagctaggattcataaaattaaatagaaatcagtgaaataaaatatttgatatttaaaatacatttagaaatacaaagtgtcaagcaaaacg

SEQ ID NO: 113004 - DNA, 120 bp, Artificial Sequence
  ENSG00000100297_27 (sequence is synthesized)
tgaatttggaaatctatggaacattagataaggtatttaaaagtaattgccatgtaaaaatgacacgaacttgaagtaagattatttgatttttctaaaaatacaagaaagcttggtgca

SEQ ID NO: 113005 - DNA, 120 bp, Artificial Sequence
  ENSG00000100297_28 (sequence is synthesized)
ggggcttttggagggctctgtgggctggcactaagcctcctaaaccagcgtacaaatgagttagcgagttcagcgagagtcaggccaccacctgcctttctgtttggctgtcactgtggg

SEQ ID NO: 113006 - DNA, 120 bp, Artificial Sequence
  ENSG00000100297_29 (sequence is synthesized)
caacaccatcctccaagcagctgagcatgggctgagtgacgtggggagagaggccgttctctgggctccgtggggctggagccagctcagcatgtggtgcctgtggcaaaaatgctgcag

SEQ ID NO: 113007 - DNA, 120 bp, Artificial Sequence
  ENSG00000100297_30 (sequence is synthesized)
gagcagatgcaggggccatggtctcaattgatctgggttccctggctcggagctctgtgggcagggctctggcctgctgggggcctgcagtgtgtgtcttgcttctctgagtttgctgag

SEQ ID NO: 113008 - DNA, 120 bp, Artificial Sequence
  ENSG00000100297_31 (sequence is synthesized)
cttctctgagtttctttttgccataagacccctctcctcctttctccccaccgctgtttcctccaagatgggaagaagcagcttctctccagacccttgaacacaatcctcttgacccag

SEQ ID NO: 113009 - DNA, 120 bp, Artificial Sequence
  ENSG00000100297_32 (sequence is synthesized)
gtcattgatgataacccttctcactggctaggaacaacagttgatgctctgcttcctagagcttgtcagcattttcagtgcttccagagttatttcttgcattttgccttacagctgccc

SEQ ID NO: 113010 - DNA, 120 bp, Artificial Sequence
  ENSG00000100297_33 (sequence is synthesized)
cctggaagccaggtgagcagtcagtcctgcccatgttagaaatgagacagctgacactcgaaggggcctttccctggtgcccaagatcacagtcgcttggctggaatgcaagtctcctgg

SEQ ID NO: 113011 - DNA, 120 bp, Artificial Sequence
  ENSG00000100297_34 (sequence is synthesized)
cccctaggccagcgttttccacaccataagccatactgtctggtttcggtcagcctttcaacagactgtcccaggcaccgatcatgagccaggctacctacgctggggaaaatctgttcc

SEQ ID NO: 113012 - DNA, 120 bp, Artificial Sequence
  ENSG00000100297_35 (sequence is synthesized)
ttcacccagcagatacttcattagtgttactgtttgccaggcactgttctaggtgctgggagtataagagcaatcaatcacagggtcccggccctcctgggttctcattctcgttctagt

SEQ ID NO: 113013 - DNA, 120 bp, Artificial Sequence
  ENSG00000100297_36 (sequence is synthesized)
gtaggtagtgaaaaaggcagtgagggagatgatggcagggccaggtgtgttggaaaaggaggacgtgctctttcccatggagtgagtgggcatggcctctgcaaggaggtgatgccaagc

SEQ ID NO: 113014 - DNA, 120 bp, Artificial Sequence
  ENSG00000100297_37 (sequence is synthesized)
agggagctgcatgaaggggacagtgtggctccttgggggaagagctgctcaggtggaggcagcgctaagtgtcagtttccccaggagggagcaggtttggtgcatttgaatggggaggca

SEQ ID NO: 113015 - DNA, 120 bp, Artificial Sequence
  ENSG00000100297_38 (sequence is synthesized)
cttgggtgaggaatggggtgggtggggcctgttcctcctgtcccccttggtgaagactcagcctctaccctggagacacttgctgtcacatgagacattgcaggtggaggcctctgggat

SEQ ID NO: 113016 - DNA, 120 bp, Artificial Sequence
  ENSG00000100297_39 (sequence is synthesized)
gctgcaggcacagagggcaggggtgatatggagtggtgataatttgagttgggtcttatgggctatgtaggagtttgcctcacagactcccctctcaatgacttcttgaccatgagccca

SEQ ID NO: 113017 - DNA, 120 bp, Artificial Sequence
  ENSG00000100297_40 (sequence is synthesized)
ccatctccttagctgaaacaccaaggcctctgtggcagtaattggaagtcacgagcctcctggttgccgagggctcctcagggcacctcgtagatgtgtccagggcaggctggcttccct

SEQ ID NO: 113018 - DNA, 120 bp, Artificial Sequence
  ENSG00000100297_41 (sequence is synthesized)
cctgggtcactgatgggccccttccaactctctctctaatctatctgctccagcaacaaaaggagtcctgctgtggcctccaagggcccgcaggacttggtccctagtgacactctggcc

SEQ ID NO: 113019 - DNA, 120 bp, Artificial Sequence
  ENSG00000100297_42 (sequence is synthesized)
atgtctctgctgcgctgggccccgggctgctttttgaatgagacaggtgtgttcctgcctctgtgactttgtgcttggcctggagtgtccccacatgtgccatatcctgtctcctcaatc

SEQ ID NO: 113020 - DNA, 120 bp, Artificial Sequence
  ENSG00000100297_43 (sequence is synthesized)
aggcctgcaccaccctggcacactcggtgcccttttctgacttactcttcggggcctggctcaggctgttcttccttgggctagaggctgtctctgtccaagaactcccattgtcccagc

SEQ ID NO: 113021 - DNA, 120 bp, Artificial Sequence
  ENSG00000100297_44 (sequence is synthesized)
ggtgtctgagcacagcatcatcaaggacttcaccaagcaggtgagcctgccttggagtgggggtgtgagccggcacggggtgcaggtcttctgctggttcccacccactcagcactggca

SEQ ID NO: 113022 - DNA, 120 bp, Artificial Sequence
  ENSG00000100297_45 (sequence is synthesized)
tcttactcagcagacaggccctgaacgggggtaggatggacaactgtccctttctcagaccttttctagccatcattccttccctagggacatcttcatcaggagcagggatgggggtat

SEQ ID NO: 113023 - DNA, 120 bp, Artificial Sequence
  ENSG00000100297_46 (sequence is synthesized)
tttttctgtcccacgaaggggaggggagagcagaggtggttggattctggtgaaaccccatacaagttccccgcagcccttcccgtctgtgcctttccccgttggcgggcgtttcatgga

SEQ ID NO: 113024 - DNA, 120 bp, Artificial Sequence
  ENSG00000100297_47 (sequence is synthesized)
gtgggaaggggcagagccatgagagtgagctttctggctcactgaggagggtactgttggccccatagagagaagatgggatttcccagatgctctggaaaacctgtcacctttaaaatc

SEQ ID NO: 113025 - DNA, 120 bp, Artificial Sequence
  ENSG00000100297_48 (sequence is synthesized)
tcaggattaatcctagtttctggtctccgctccttgtacatcatctcattttgattcagggcagtttaatgggtggtatcgtgtctattctataggtgcgcagactgaggcttagagaaa

SEQ ID NO: 113026 - DNA, 120 bp, Artificial Sequence
  ENSG00000100297_49 (sequence is synthesized)
ggtttagagcttcggttctagagtcagatgggacttaagtcccagctctacctcttaattgctgtgaccttgagcaagtggcttagcctccgtgtgcctcagtgtctggtacacagtggg

SEQ ID NO: 113027 - DNA, 120 bp, Artificial Sequence
  ENSG00000100297_50 (sequence is synthesized)
cactcaggaagtgtgggccctttaggtcaaaggagcctgagtacaaagttccccgtgagcctggggatgtctgggctctgtcggagtcccctcgggcagcacgtgccgttagccagccat

SEQ ID NO: 113028 - DNA, 85 bp, Artificial Sequence
  ENSG00000100297_51 (sequence is synthesized)
gcgaaactcggcggctgagcgtggaggtgggagaatcacttgaccccagaaggttgaggttgcagtgagctgtgattacaccact

SEQ ID NO: 113029 - DNA, 120 bp, Artificial Sequence
  ENSG00000100297_52 (sequence is synthesized)
tcaaaaaggaaaacaaaaaagattctactgagggggagagggtactgagcttgggcccctcatagtaacctgggtggaaggttttgagatctttgattagggttctaacctgggcttgca

SEQ ID NO: 113030 - DNA, 120 bp, Artificial Sequence
  ENSG00000100297_53 (sequence is synthesized)
atgtaggggtcaggctcttgctccctgggcaagttatgtgactttgtcaagcttcagtttcctcatcagtaaaatggggataaggacagtccttaatctctcagagggctgcttgaaaat

SEQ ID NO: 113031 - DNA, 120 bp, Artificial Sequence
  ENSG00000100297_54 (sequence is synthesized)
gcatgtggtgtttagcacaattccttcatgcagattacgtaatcaggatgtatgattttccaagcagttcatgaatcctgaaaacttacgaagtgggtatgggaagaggggagttggagg

SEQ ID NO: 113032 - DNA, 120 bp, Artificial Sequence
  ENSG00000100297_55 (sequence is synthesized)
aagtcagaggagtgagtcgtgaagaccaacagataacttccacggtggtcatttcctccacagaggaagggatgaactcaagcggcattacaacctgggggagtactggattgaggtgga

SEQ ID NO: 113033 - DNA, 120 bp, Artificial Sequence
  ENSG00000100298_0 (sequence is synthesized)
tgcctcagacaagcaggggcaagtctgctaaggaagctgtggccagaagcacagatcagaaacacgatggctctgttaacagccgaaacattccgcttacagtttaacaacaagcgccgc

SEQ ID NO: 113034 - DNA, 120 bp, Artificial Sequence
  ENSG00000100298_1 (sequence is synthesized)
ctcagaaggccttactacccgaggaaggccctcttgtgttaccagctgacgccgcagaatggctccacgcccacgagaggctactttgaaaacaagaaaaagtgccatgcagaaatttgc

SEQ ID NO: 113035 - DNA, 120 bp, Artificial Sequence
  ENSG00000100298_2 (sequence is synthesized)
tttattaacgagatcaagtccatgggactggacgaaacgcagtgctaccaagtcacctgttacctcacgtggagcccctgctcctcctgtgcctgggagctggttgacttcatcaaggct

SEQ ID NO: 113036 - DNA, 120 bp, Artificial Sequence
  ENSG00000100298_3 (sequence is synthesized)
cacgaccatctgaacctgggcatcttcgcctcccgcctgtactaccactggtgcaagccccagcagaaggggctgcggcttctgtgtggatcccaggtcccggtggaggtcatgggcttc

SEQ ID NO: 113037 - DNA, 120 bp, Artificial Sequence
  ENSG00000100298_4 (sequence is synthesized)
ttgtggaccacgagaaaccgctttccttcaacccctataagatgttagaggagctagataaaaacagtcgagccataaagcgacggcttgagaggataaagcagtcctgaagtgtggatg

SEQ ID NO: 113038 - DNA, 120 bp, Artificial Sequence
  ENSG00000100298_5 (sequence is synthesized)
ttttagagaatgacttaagaagtttgcagcttggacccgtatcccactcattatcaagaagcaactcaagatgactttccctggggcatgtcagttgcctcatagcctgctggtcctgta

SEQ ID NO: 113039 - DNA, 120 bp, Artificial Sequence
  ENSG00000100298_6 (sequence is synthesized)
agcaagcactaagctccacagtgccagttccttgccccaacctggccccatccaagtacagaagaccttcctttcctcctttttccatattgctttctgttctaagtgggtgaataattt

SEQ ID NO: 113040 - DNA, 65 bp, Artificial Sequence
  ENSG00000100298_7 (sequence is synthesized)
tctaagtgggtgaataattttataattgaaaaaataaagataaagtctgtaaatcctcggccaat

SEQ ID NO: 113041 - DNA, 120 bp, Artificial Sequence
  ENSG00000100298_8 (sequence is synthesized)
tttgaaaacaaggtgccacacgggctctctgggcacagggccggcaggggctaaccccatctgatgtgtgcagaaaatacatgaaatgcctgcctataaatttctcaatttttgatgtaa

SEQ ID NO: 113042 - DNA, 120 bp, Artificial Sequence
  ENSG00000100299_0 (sequence is synthesized)
gaggcggaagcgcccgcagcccggtaccggctcctcctgggctccctctagcgccttccccccggcccgactccgctggtcagcgccaagtgacttacgcccccgaccctgagcccggac

SEQ ID NO: 113043 - DNA, 120 bp, Artificial Sequence
  ENSG00000100299_1 (sequence is synthesized)
cgctaggcgaggaggatcagatctccgctcgagaatctgaaggtgccctggtcctggaggagttccgtcccagcccgcggtctcccggtactgtcgggccccggccctctggagcttcag

SEQ ID NO: 113044 - DNA, 120 bp, Artificial Sequence
  ENSG00000100299_2 (sequence is synthesized)
gaggcggccgtcagggtcggggagtatttgggtccggggtctcagggaagggcggcgcctgggtctgcggtatcggaaagagcctgctggagccaagtagccctccctctcttgggacag

SEQ ID NO: 113045 - DNA, 120 bp, Artificial Sequence
  ENSG00000100299_3 (sequence is synthesized)
acccctcggtcccatgtccatgggggcaccgcggtccctcctcctggccctggctgctggcctggccgttgcccgtccgcccaacatcgtgctgatctttgccgacgacctcggctatgg

SEQ ID NO: 113046 - DNA, 120 bp, Artificial Sequence
  ENSG00000100299_4 (sequence is synthesized)
ggacctgggctgctatgggcaccccagctctaccactcccaacctggaccagctggcggcgggagggctgcggttcacagacttctacgtgcctgtgtctctgtgcacaccctctagggc

SEQ ID NO: 113047 - DNA, 120 bp, Artificial Sequence
  ENSG00000100299_5 (sequence is synthesized)
cgccctcctgaccggccggctcccggttcggatgggcatgtaccctggcgtcctggtgcccagctcccgggggggcctgcccctggaggaggtgaccgtggccgaagtcctggctgcccg

SEQ ID NO: 113048 - DNA, 120 bp, Artificial Sequence
  ENSG00000100299_6 (sequence is synthesized)
aggctacctcacaggaatggccggcaagtggcaccttggggtggggcctgagggggccttcctgcccccccatcagggcttccatcgatttctaggcatcccgtactcccacgaccaggg

SEQ ID NO: 113049 - DNA, 120 bp, Artificial Sequence
  ENSG00000100299_7 (sequence is synthesized)
cccctgccagaacctgacctgcttcccgccggccactccttgcgacggtggctgtgaccagggcctggtccccatcccactgttggccaacctgtccgtggaggcgcagcccccctggct

SEQ ID NO: 113050 - DNA, 120 bp, Artificial Sequence
  ENSG00000100299_8 (sequence is synthesized)
gcccggactagaggcccgctacatggctttcgcccatgacctcatggccgacgcccagcgccaggatcgccccttcttcctgtactatgcctctcaccacacccactaccctcagttcag

SEQ ID NO: 113051 - DNA, 120 bp, Artificial Sequence
  ENSG00000100299_9 (sequence is synthesized)
tgggcagagctttgcagagcgttcaggccgcgggccatttggggactccctgatggagctggatgcagctgtggggaccctgatgacagccataggggacctggggctgcttgaagagac

SEQ ID NO: 113052 - DNA, 120 bp, Artificial Sequence
  ENSG00000100299_10 (sequence is synthesized)
gctggtcatcttcactgcagacaatggacctgagaccatgcgtatgtcccgaggcggctgctccggtctcttgcggtgtggaaagggaacgacctacgagggcggtgtccgagagcctgc

SEQ ID NO: 113053 - DNA, 120 bp, Artificial Sequence
  ENSG00000100299_11 (sequence is synthesized)
cttggccttctggccaggtcatatcgctcccggcgtgacccacgagctggccagctccctggacctgctgcctaccctggcagccctggctggggccccactgcccaatgtcaccttgga

SEQ ID NO: 113054 - DNA, 120 bp, Artificial Sequence
  ENSG00000100299_12 (sequence is synthesized)
tggctttgacctcagccccctgctgctgggcacaggcaagagccctcggcagtctctcttcttctacccgtcctacccagacgaggtccgtggggtttttgctgtgcggactggaaagta

SEQ ID NO: 113055 - DNA, 120 bp, Artificial Sequence
  ENSG00000100299_13 (sequence is synthesized)
caaggctcacttcttcacccagggctctgcccacagtgataccactgcagaccctgcctgccacgcctccagctctctgactgctcatgagcccccgctgctctatgacctgtccaagga

SEQ ID NO: 113056 - DNA, 120 bp, Artificial Sequence
  ENSG00000100299_14 (sequence is synthesized)
ccctggtgagaactacaacctgctggggggtgtggccggggccaccccagaggtgctgcaagccctgaaacagcttcagctgctcaaggcccagttagacgcagctgtgaccttcggccc

SEQ ID NO: 113057 - DNA, 120 bp, Artificial Sequence
  ENSG00000100299_15 (sequence is synthesized)
cagccaggtggcccggggcgaggaccccgccctgcagatctgctgtcatcctggctgcaccccccgcccagcttgctgccattgcccagatccccatgcctgagggcccctcggctggcc

SEQ ID NO: 113058 - DNA, 120 bp, Artificial Sequence
  ENSG00000100299_16 (sequence is synthesized)
tgggcatgtgatggctcctcactgggagcctgtgggggaggctcaggtgtctggagggggtttgtgcctgataacgtaataacaccagtggagacttgcagatgtgacaattcgtccaat

SEQ ID NO: 113059 - DNA, 120 bp, Artificial Sequence
  ENSG00000100299_17 (sequence is synthesized)
gccagaaagaggttgggctgggatttgaaccctggtgtcgtggctctggaagctgccctggcgccttggtgatctgcgtgggtcagtgcacacaggcacacgtcagcctcaaggacatgg

SEQ ID NO: 113060 - DNA, 120 bp, Artificial Sequence
  ENSG00000100299_18 (sequence is synthesized)
gcacatctgttcacaggagcagcgccacgtgcctttgagtgccaggaacggggtgggagggtgggagggtgtgagggccagaagactcagaagatgcaaagtgcctgagagagacgggat

SEQ ID NO: 113061 - DNA, 120 bp, Artificial Sequence
  ENSG00000100299_19 (sequence is synthesized)
attcccccagaagaagcattcttagagacacaggcactggacctccttggttcttataagaaacctgtctgaagctgggtgatgagttgcacactccaggtggggctaaggggcctggag

SEQ ID NO: 113062 - DNA, 120 bp, Artificial Sequence
  ENSG00000100299_20 (sequence is synthesized)
cccctgctggctcctaggaaggcacagcagcaggccctgagacggctcctctggggcccctccaccctcccaggcctctgcatttcacctgtgcccacacttctgtctcctgccttcacc

SEQ ID NO: 113063 - DNA, 120 bp, Artificial Sequence
  ENSG00000100299_21 (sequence is synthesized)
tcacctgtgcccacacttctgtctcctgccttcaccttttgacccactactaacgattctccacccagcagacaaagtgatctcttaaaaatatctgttggctgggcacggtggctcacg

SEQ ID NO: 113064 - DNA, 120 bp, Artificial Sequence
  ENSG00000100299_22 (sequence is synthesized)
aaaaaatctgttaggctgcacacggcgattcactcctgtattcccagtgctttgggaggctgaggtgagaggatgcctgaggccaggaattcagaccagcctgggcaacatagtgagacc

SEQ ID NO: 113065 - DNA, 74 bp, Artificial Sequence
  ENSG00000100299_23 (sequence is synthesized)
cctcccgggttcctgtgctgccatgcccagctaatttttttttatttaatagagacaagatttcaccatgttgg

SEQ ID NO: 113066 - DNA, 62 bp, Artificial Sequence
  ENSG00000100299_24 (sequence is synthesized)
acaatatttgttttaattagccaggcgtggtagcatttgtcctagcaatttgggaggttgag

SEQ ID NO: 113067 - DNA, 120 bp, Artificial Sequence
  ENSG00000100299_25 (sequence is synthesized)
aggcgtggtagcatttgtcctagcaatttgggaggttgaggtgggagaatcacttcagcccactaggtcgaggctgtagtgagctataattgtaccactgcactccagcctcggggacag

SEQ ID NO: 113068 - DNA, 120 bp, Artificial Sequence
  ENSG00000100299_26 (sequence is synthesized)
agtgagaccctgtctgcaaataaacaaataaaacatcaggctgggcttgagcatctattcctgctcaaaatttcgcaggcttctcagaagaaaatccaaaccccttacagtgacccagtt

SEQ ID NO: 113069 - DNA, 120 bp, Artificial Sequence
  ENSG00000100299_27 (sequence is synthesized)
tgcccttgaggcctccacccacacccccttccccccagtcttagggggtggcctggctgttcccttcaacggcaacgctctgcctccattgttggcctcctctgcagggagggactgtct

SEQ ID NO: 113070 - DNA, 120 bp, Artificial Sequence
  ENSG00000100299_28 (sequence is synthesized)
gagcacctgcccgtgtctgtgcagcatggcacactgacgtcaggcccacgtgcatgcccaggtggccagtcacacgccaggtgctccctcagtgttggccaagtgagaggagcacacctt

SEQ ID NO: 113071 - DNA, 120 bp, Artificial Sequence
  ENSG00000100299_29 (sequence is synthesized)
ccgggcgttcagacacctccccgtggcagacaccgttcgttgctaccaaacagccacctccttcctaatgggctcccatttttcagtgctgggcaaaggtcccttgatcttggagttgca

SEQ ID NO: 113072 - DNA, 120 bp, Artificial Sequence
  ENSG00000100299_30 (sequence is synthesized)
gcctctttctctccaaggagggcggtgaccagcctgagccagtcaatccagtgattggttcaggagtagcctgtgaccaggagtcctggtagtgaacgactggggcagccctgggggtga

SEQ ID NO: 113073 - DNA, 120 bp, Artificial Sequence
  ENSG00000100299_31 (sequence is synthesized)
ggaccttgcgcagccgtcacaggccctgattggacactgggcagctgctaacccagtgtctccagctgcctacctggagagctccaagcgtaagaaaataaaccctgcctgttgaagcca

SEQ ID NO: 113074 - DNA, 120 bp, Artificial Sequence
  ENSG00000100300_0 (sequence is synthesized)
ccctctcctgcccattccgcggatgggcaatcccaggcggaactcccttgagggtctcagaatatctgggagacctcgggctcttgatctccgagacaccccgtttcgtagtggagaaca

SEQ ID NO: 113075 - DNA, 120 bp, Artificial Sequence
  ENSG00000100300_1 (sequence is synthesized)
gtccagatcggggaagtttattttgcccaaagccggttagaggccccctggccctcgattcccagtgcggggctcagagctcccctgaacagcagctgcagcagccatggccccgccctg

SEQ ID NO: 113076 - DNA, 120 bp, Artificial Sequence
  ENSG00000100300_2 (sequence is synthesized)
ggtgcccgccatgggcttcacgctggcgcccagcctggggtgcttcgtgggctcccgctttgtccacggcgagggtctccgctggtacgccggcctgcagaagccctcgtggcacccgcc

SEQ ID NO: 113077 - DNA, 120 bp, Artificial Sequence
  ENSG00000100300_3 (sequence is synthesized)
ctctacactgggcagctggccctgaactgggcatggccccccatcttctttggtgcccgacaaatgggctgggccttggtggatctcctgctggtcagtggggcggcggcagccactacc

SEQ ID NO: 113078 - DNA, 120 bp, Artificial Sequence
  ENSG00000100300_4 (sequence is synthesized)
gtggcctggtaccaggtgagcccgctggccgcccgcctgctctacccctacctggcctggctggccttcacgaccacactcaactactgcgtatggcgggacaaccatggctggcgtggg

SEQ ID NO: 113079 - DNA, 120 bp, Artificial Sequence
  ENSG00000100300_5 (sequence is synthesized)
ggacggcggctgccagagtgagtgcccggcccaccagggactgcagctgcaccagcaggtgccatcacgcttgtgatgtggtggccgtcacgctttcatgaccactgggcctgctagtct

SEQ ID NO: 113080 - DNA, 120 bp, Artificial Sequence
  ENSG00000100300_6 (sequence is synthesized)
gtcagggccttggcccaggggtcagcagagcttcagaggtggccccacctgagcccccacccgggagcagtgtcctgtgctttctgcatgcttagagcatgttcttggaacatggaattt

SEQ ID NO: 113081 - DNA, 120 bp, Artificial Sequence
  ENSG00000100300_7 (sequence is synthesized)
gcactggcctggggataagcctggccctttgcaaggggaggcctggcccaggacagagggtcttctccaggcgggccatggaccatggcatggtttccccagccccatttggcaagccag

SEQ ID NO: 113082 - DNA, 120 bp, Artificial Sequence
  ENSG00000100300_8 (sequence is synthesized)
ggtggggaagctgtgggcctgtcgattgcacaactgaactttctcctcctgggcccctggggggatgggtcagatgctcaccccaccctggcatccccgccatgttcacagctccaggca

SEQ ID NO: 113083 - DNA, 120 bp, Artificial Sequence
  ENSG00000100300_9 (sequence is synthesized)
agcggcctggctaactcctgccaggcagtgcccttcccggagcgtgccctcgccgctggtacggctcctacctggtctggaaagagctgggaggcttcacagagaaggctgtggttcccc

SEQ ID NO: 113084 - DNA, 120 bp, Artificial Sequence
  ENSG00000100302_0 (sequence is synthesized)
agagcgccctgctcctccttcagctgctggcgtcgccgcgcggggagaaagaagccgtccctccggcgctgggagagctgcagagccgcgggcagagaaggaggccgcggccgagcccgg

SEQ ID NO: 113085 - DNA, 120 bp, Artificial Sequence
  ENSG00000100302_1 (sequence is synthesized)
cagcccgataccccccatccgagcgaccccctttggggcaggcggagaaggtggcataggcgaccaggagggttcgcccacctgggacacgcacccacagtcacctccaaaggacccccc

SEQ ID NO: 113086 - DNA, 120 bp, Artificial Sequence
  ENSG00000100302_2 (sequence is synthesized)
ctccccaagtctctaggagctgctccttcatcactggagtcgcccctacctctctgcccccagcccgagagccccaggcggggacccccggatcggacgtccccaagcctccgggcacct

SEQ ID NO: 113087 - DNA, 80 bp, Artificial Sequence
  ENSG00000100302_3 (sequence is synthesized)
tcggacgtccccaagcctccgggcacctggctcagcaggaggcccccggctcggggcagggcagggccggcggcggcgag

SEQ ID NO: 113088 - DNA, 120 bp, Artificial Sequence
  ENSG00000100302_4 (sequence is synthesized)
cgcctccttgcccggccgcgcccagcccggcgtcccgagcagcgcaggggaggatccccgcgcagtgacccgggagccaccacagactctgggaggctcggcggctggagcagcaggcag

SEQ ID NO: 113089 - DNA, 120 bp, Artificial Sequence
  ENSG00000100302_5 (sequence is synthesized)
ctccccgcagctcccggcgcttccaggcagctctctgagccgtgccagaggcccggcccgccattcccagccccgagccatgatgaagactttgtccagcgggaactgcacgctcagtgt

SEQ ID NO: 113090 - DNA, 120 bp, Artificial Sequence
  ENSG00000100302_6 (sequence is synthesized)
gcccgccaaaaactcataccgcatggtggtgctgggtgcctctcgggtgggcaagagctccatcgtgtctcgcttcctcaatggccgctttgaggaccagtacacacccaccatcgagga

SEQ ID NO: 113091 - DNA, 120 bp, Artificial Sequence
  ENSG00000100302_7 (sequence is synthesized)
cttccaccgtaaggtatacaacatccgcggcgacatgtaccagctcgacatcctggatacctctggcaaccaccccttccccgccatgcgcaggctgtccatcctcacaggggatgtctt

SEQ ID NO: 113092 - DNA, 120 bp, Artificial Sequence
  ENSG00000100302_8 (sequence is synthesized)
catcctggtgttcagcctggataaccgggagtccttcgatgaggtcaagcgccttcagaagcagatcctggaggtcaagtcctgcctgaagaacaagaccaaggaggcggcggagctgcc

SEQ ID NO: 113093 - DNA, 120 bp, Artificial Sequence
  ENSG00000100302_9 (sequence is synthesized)
catggtcatctgtggcaacaagaacgaccacggcgagctgtgccgccaggtgcccaccaccgaggccgagctgctggtgtcgggcgacgagaactgcgcctacttcgaggtgtcggccaa

SEQ ID NO: 113094 - DNA, 120 bp, Artificial Sequence
  ENSG00000100302_10 (sequence is synthesized)
gaagaacaccaacgtggacgagatgttctacgtgctcttcagcatggccaagctgccacacgagatgagccccgccctgcatcgcaagatctccgtgcagtacggtgacgccttccaccc

SEQ ID NO: 113095 - DNA, 120 bp, Artificial Sequence
  ENSG00000100302_11 (sequence is synthesized)
caggcccttctgcatgcgccgcgtcaaggagatggacgcctatggcatggtctcgcccttcgcccgccgccccagcgtcaacagtgacctcaagtacatcaaggccaaggtccttcggga

SEQ ID NO: 113096 - DNA, 120 bp, Artificial Sequence
  ENSG00000100302_12 (sequence is synthesized)
aggccaggcccgtgagagggacaagtgcaccatccagtgagcgagggatgctggggcggggcttggccagtgccttcagggaggtggccccagatgcccactgtgcgcatctccccaccg

SEQ ID NO: 113097 - DNA, 120 bp, Artificial Sequence
  ENSG00000100302_13 (sequence is synthesized)
aggccccggcagcagtcttgttcacagaccttaggcaccagactggaggcccccgggcgctggcctccgcacattcgtctgccttctcacagctttcctgagtccgcttgtccacagctc

SEQ ID NO: 113098 - DNA, 120 bp, Artificial Sequence
  ENSG00000100302_14 (sequence is synthesized)
gggttggaagaaatgttgatgccagaggggtgaggattgctgcgtcatatggagcctcctgggacaagcctcaggatgaaaaggacacagaaggccagatgagaaaggtctcctctctcc

SEQ ID NO: 113099 - DNA, 120 bp, Artificial Sequence
  ENSG00000100302_15 (sequence is synthesized)
tggcataacacccagcttggtttgggtggcagctgggagaacttctctcccagccctgcaactcttacgctctggttcagctgcctctgcaccccctcccacccccagcacacacacaag

SEQ ID NO: 113100 - DNA, 120 bp, Artificial Sequence
  ENSG00000100302_16 (sequence is synthesized)
ttggcccccagctgcgcctgacattgagccagtggactctgtgtctgaagggggcgtggccacacctcctagaccacgcccaccacttagaccacgcccacctcctgaccgcgttcctca

SEQ ID NO: 113101 - DNA, 120 bp, Artificial Sequence
  ENSG00000100302_17 (sequence is synthesized)
gcctcctctcctaggtccctccgcccgacagttgtgctttgttgtggttgcagctgttttcgtgtcatgtatagtagtagaaatggaaatcattgtactgtaaaagcctagtgactccct

SEQ ID NO: 113102 - DNA, 120 bp, Artificial Sequence
  ENSG00000100302_18 (sequence is synthesized)
ccttggccaggccctcacccagttcagatccacggcctccacccgggacgccttcctcctctgctcccaaacagggtttccgtggcctgtttgcagctagacattgacctccgccattga

SEQ ID NO: 113103 - DNA, 120 bp, Artificial Sequence
  ENSG00000100302_19 (sequence is synthesized)
gctccacggtttacagacaattgcacaagcgtggggtgggcaggccaggactgcttttttttaatgctcccatttcacagaggataccaccgagactcggaggggacacgatgagcacca

SEQ ID NO: 113104 - DNA, 120 bp, Artificial Sequence
  ENSG00000100302_20 (sequence is synthesized)
ggccccacctttgtcccctagcaaattcagggtacagctccacctagaaccaggctgccctctactgtgctcgttcctcaagcatttattaagcacctactgggtgctgggttcactgtg

SEQ ID NO: 113105 - DNA, 120 bp, Artificial Sequence
  ENSG00000100302_21 (sequence is synthesized)
tcctaggaaaccaagagggtccccagtcctggcctctgcccgcccctgctgccccaccaccttctgcacacacagcggtggggaggcggggaggagcagctgggacccagaactgagcct

SEQ ID NO: 113106 - DNA, 120 bp, Artificial Sequence
  ENSG00000100302_22 (sequence is synthesized)
gggagggatccgacagaaaagctcagggcgggtcttctccttgtgcccgggattgggctatgctgggtaccaccatgtactcaggcatggtgggttttgaacccataaaccaaaggccct

SEQ ID NO: 113107 - DNA, 120 bp, Artificial Sequence
  ENSG00000100302_23 (sequence is synthesized)
tgtcatcagctcttaacaagtatattttgtattttaatctctctaaacatattgaagttttagggccctaaggaaccttagtgatcttctattgggtctttctgaggttcagagagggta

SEQ ID NO: 113108 - DNA, 120 bp, Artificial Sequence
  ENSG00000100302_24 (sequence is synthesized)
agtaacttcctccaggtcacacagcaagtctgtgggtggcagaagcaagctagcgctgggcattcagtacataccacgatgtgctccctctcttgatgcttggcccctggggccttcagg

SEQ ID NO: 113109 - DNA, 120 bp, Artificial Sequence
  ENSG00000100302_25 (sequence is synthesized)
gctttgggacatcttgtcctcaaccctctccctagatcagtctgtgagggtccctgtagatattgtgtacaccatgcccatgtatatacaagtacacacagatgtacacacagatgtaca

SEQ ID NO: 113110 - DNA, 120 bp, Artificial Sequence
  ENSG00000100302_26 (sequence is synthesized)
catgctccagccccagctctgcatacctgcacctgcaccccagccttggcccctgcctgcgtctgtgctcaaagcagcagctccaaccctgcctctgtccccttccccacccactgcctg

SEQ ID NO: 113111 - DNA, 120 bp, Artificial Sequence
  ENSG00000100302_27 (sequence is synthesized)
agccttctgagcagaccaggtaccttggctgcaccggtgtgtggcccgctctcacccaggcacagccccgccaccatggatctccgtgtacactatcaataaaagtgggtttgttacaaa

SEQ ID NO: 113112 - DNA, 80 bp, Artificial Sequence
  ENSG00000100304_0 (sequence is synthesized)
tggagtcggcgcgggtgctggcgccatggaggccgagcggggtcccgagcgccggcctgcggagcgtagcagcccgggcc

SEQ ID NO: 113113 - DNA, 120 bp, Artificial Sequence
  ENSG00000100304_1 (sequence is synthesized)
agacgccggaggagggcgcgcaggccttggccgagttcgcggcgctgcacggcccggcgctgcgcgcttcgggggtccccgaacgttactggggccgcctcctgcacaagctggagcacg

SEQ ID NO: 113114 - DNA, 120 bp, Artificial Sequence
  ENSG00000100304_2 (sequence is synthesized)
aggttttcgacgctggggaagtgtttgggatcatgcaagtggaggaggtagaagaggaggaggacgaggcagcccgggaggtgcggaagcagcagcccaacccggggaacgagctgtgct

SEQ ID NO: 113115 - DNA, 120 bp, Artificial Sequence
  ENSG00000100304_3 (sequence is synthesized)
acaaggtcatcgtgaccagggagagcgggctccaggcagcccaccccaacagcatcttcctcatcgaccacgcctggacgtgccgtgtggagcacgcgcgccagcagctgcagcaggtgc

SEQ ID NO: 113116 - DNA, 120 bp, Artificial Sequence
  ENSG00000100304_4 (sequence is synthesized)
ccgggctgctgcaccgcatggccaacctgatgggcattgagttccacggtgagctgcccagtacagaggctgtggccctggtgctggaggagatgtggaagttcaaccagacctaccagc

SEQ ID NO: 113117 - DNA, 120 bp, Artificial Sequence
  ENSG00000100304_5 (sequence is synthesized)
tggcccatgggacagctgaggagaagatgccggtgtggtatatcatggacgagttcggttcgcggatccagcacgcggacgtgcccagcttcgccacggcacccttcttctacatgccgc

SEQ ID NO: 113118 - DNA, 120 bp, Artificial Sequence
  ENSG00000100304_6 (sequence is synthesized)
agcaggtggcctacacgctgctgtggcccctgagggacctggacactggcgaggaggtgacccgagactttgcctacggagagacggaccccctgatccggaagtgcatgctgctgccct

SEQ ID NO: 113119 - DNA, 120 bp, Artificial Sequence
  ENSG00000100304_7 (sequence is synthesized)
gggcccccaccgacatgctggacctcagctcttgcacacccgagccgcccgccgagcactaccaggccattctggaggaaaacaaggagaagctgccacttgacatcaaccccgtggtgc

SEQ ID NO: 113120 - DNA, 120 bp, Artificial Sequence
  ENSG00000100304_8 (sequence is synthesized)
acccccacggccacatcttcaaggtctacacggacgtgcagcaggtggccagcagcctcacccacccgcgcttcaccctcacccagagtgaggcggacgccgacatcctcttcaacttct

SEQ ID NO: 113121 - DNA, 120 bp, Artificial Sequence
  ENSG00000100304_9 (sequence is synthesized)
cacacttcaaggactacaggaaactcagccaggagaggccaggcgtgctgctgaaccagttcccctgcgagaacctgctgactgtcaaggactgcctggcctccatcgcgcgccgggcag

SEQ ID NO: 113122 - DNA, 120 bp, Artificial Sequence
  ENSG00000100304_10 (sequence is synthesized)
gtggccccgagggcccaccctggctgccccgaaccttcaacctgcgcactgagctgccccagtttgtcagctacttccagcagcgggaaaggtggggcgaggacaaccactggatctgca

SEQ ID NO: 113123 - DNA, 120 bp, Artificial Sequence
  ENSG00000100304_11 (sequence is synthesized)
agccctggaacctggcgcgcagcctggacacccacgtcaccaagagcctgcacagcatcatccggcaccgagagagcacccccaaggttgtgtccaagtacatcgaaagtcccgtgttgt

SEQ ID NO: 113124 - DNA, 120 bp, Artificial Sequence
  ENSG00000100304_12 (sequence is synthesized)
tccttcgagaagacgtgggaaaggtcaagttcgacatccgctacatcgtgctgctgcggtcagtgaggcccctacggttgttcgtgtatgatgtgttctggctgcggttctccaaccggg

SEQ ID NO: 113125 - DNA, 120 bp, Artificial Sequence
  ENSG00000100304_13 (sequence is synthesized)
cctttgcactcaacgacctggatgactacgagaagcacttcacggtcatgaactatgacccggatgtggtgctgaagcaggtgcactgtgaagagttcatccccgagtttgagaagcaat

SEQ ID NO: 113126 - DNA, 120 bp, Artificial Sequence
  ENSG00000100304_14 (sequence is synthesized)
caggctgagatcttccgggccttcacggagctgttccaggtggcctgtgccaagccaccacccctgggcctctgcgactacccctcatcccgggccatgtatgccgtcgacctcatgctg

SEQ ID NO: 113127 - DNA, 120 bp, Artificial Sequence
  ENSG00000100304_15 (sequence is synthesized)
aagtgggacaacggcccagatggaaggcgggtgatgcagccgcagatcctggaggtgaacttcaaccccgactgtgagcgagcctgcaggtaccaccccaccttcttcaacgacgtcttc

SEQ ID NO: 113128 - DNA, 120 bp, Artificial Sequence
  ENSG00000100304_16 (sequence is synthesized)
agcaccttgtttctggaccagcccggtggctgccacgttacctgccttgtctaggcactcgctgtccccaaaacctgtgcttggggcaggattccaacctcagttctctgagctgcttct

SEQ ID NO: 113129 - DNA, 120 bp, Artificial Sequence
  ENSG00000100304_17 (sequence is synthesized)
gcaaaggcccccatgtccctccccacaccggccctgggcatagcctcagccccaggcctctgtcctgccgagccatcctcccggcgccacactccgggagcacagcatcctcctctcacc

SEQ ID NO: 113130 - DNA, 120 bp, Artificial Sequence
  ENSG00000100304_18 (sequence is synthesized)
tgtgggtcagagcaggacagtgatggtgtccccagggctgagcaccaccccacgccctgccctcacccctcaccaccatctgtgcactgatgagtctccagtttagccaagggctttgtt

SEQ ID NO: 113131 - DNA, 120 bp, Artificial Sequence
  ENSG00000100304_19 (sequence is synthesized)
cctggcatggagaatttgttcctggctgctgtgtttccagggggtgctgggggaagggttccgtggagcgagacaaggtgtcctcgggagcagggttccaccgggaagcgtttgggagcc

SEQ ID NO: 113132 - DNA, 120 bp, Artificial Sequence
  ENSG00000100304_20 (sequence is synthesized)
ctgtatcacacggggcaggcgggtttctcttccggggtctctgctcttatgcatcaggacgaccccgggacggctgtggggccccacactgcacccacagggctctatgcgacaggggcc

SEQ ID NO: 113133 - DNA, 120 bp, Artificial Sequence
  ENSG00000100304_21 (sequence is synthesized)
caggaacagcctgaggccaccacccagcaagcccgccttatcacccattccagctcacccagaaccttcaccagcaaacctcctgctgaggtcctggcaggaggccaccgtcttgttacc

SEQ ID NO: 113134 - DNA, 120 bp, Artificial Sequence
  ENSG00000100304_22 (sequence is synthesized)
gtttccttttcgtttgctgagggtcacagaccccaacagggaaatcagtatctgtcttcccagtggttgccctgctcgccgggcactccacggggtcccgcccttgtgtgagatgggcca

SEQ ID NO: 113135 - DNA, 120 bp, Artificial Sequence
  ENSG00000100304_23 (sequence is synthesized)
ggatccttcggcaaggggcgcctggggctggggctgattgtgggcggtggagcgccagacagaaaaggattccaatgagaacttcaggttaaagtcagatgccacctaccagggtctaca

SEQ ID NO: 113136 - DNA, 120 bp, Artificial Sequence
  ENSG00000100304_24 (sequence is synthesized)
gtcaaaatgttggctttttcttattttttaatgtatgggagaaaaatgtaaaattccagttcttttctaattgtgtttctgaaattaggagtcagctgccagcgtttttgtgtggctgca

SEQ ID NO: 113137 - DNA, 120 bp, Artificial Sequence
  ENSG00000100304_25 (sequence is synthesized)
gtgtgcctgggcccagctcacgggcagtgggtggacctaactgcccaggcaggcgagagctacttccagagccttccagtgcatgggagggcagggctaggtgtagcggtgtctcctctt

SEQ ID NO: 113138 - DNA, 120 bp, Artificial Sequence
  ENSG00000100304_26 (sequence is synthesized)
tgaaattaagaactatctttcttgtagcaaagctgcacctgatgatgctgcctctcctctctgtgttgtctgggcccttgtttacaagcacgcgttacccttcctgaggggagccatgct

SEQ ID NO: 113139 - DNA, 120 bp, Artificial Sequence
  ENSG00000100304_27 (sequence is synthesized)
ctagcccctggagggcctgttgcaggggcagggcgggcccgtcgcctttggcagctcctggagagctgtggacatgcagtccccctcagttcgtgctgcaataaaggccatcttctctta

SEQ ID NO: 113140 - DNA, 120 bp, Artificial Sequence
  ENSG00000100304_28 (sequence is synthesized)
acactgcctcctaggaggactggcacacaggccagtcccaggagccgcctcctgagttcctgctatggaaggcgattgttagcgctgccatcatgagccaggctgggttctgtgttgtct

SEQ ID NO: 113141 - DNA, 120 bp, Artificial Sequence
  ENSG00000100304_29 (sequence is synthesized)
aaataaattcatctttgaaagttaaaaataggaataggccatggaaatgctggcagtgagtgggtaaagggccccctgggcagaagcgttggccaccactggtccccatcccacccctgt

SEQ ID NO: 113142 - DNA, 120 bp, Artificial Sequence
  ENSG00000100304_30 (sequence is synthesized)
cctctgggcaccaaggggtcctgttaccaaccttgcatgtcatggggctgctccgcttacctggatacgatgctcatccagtcctggaaaccgacactagccaggcctgtgcatgccagc

SEQ ID NO: 113143 - DNA, 120 bp, Artificial Sequence
  ENSG00000100304_31 (sequence is synthesized)
atgctgggcacccacaacaggcacccgggctgccagtaggggcccctcccaggaggctgcaggtgtggctgttgagttaaggaaagccaggccggcaggtccaggcgggacaccttgcag

SEQ ID NO: 113144 - DNA, 120 bp, Artificial Sequence
  ENSG00000100304_32 (sequence is synthesized)
cagcagggccccaggacattgttggaagtcgccctcaggttctgagcccctcccttctgtactgtgggggtcatcccgggagtcctctcctggagctctgtgcctggggaggtacgtcca

SEQ ID NO: 113145 - DNA, 120 bp, Artificial Sequence
  ENSG00000100304_33 (sequence is synthesized)
gcatggcatggatggcgggcttccataggggcctttcctggcttgttcttttctgggagaaacctgagccgactgccaccttcctcgggtgtgttttgggtaaagtcttgaggccagaaa

SEQ ID NO: 113146 - DNA, 120 bp, Artificial Sequence
  ENSG00000100304_34 (sequence is synthesized)
gatcttgcatccctcaagcactcttgagctggtgctgaaccagggcacaggcaggtcccgcggcggagtcttgagctctgcctccttcgcactgtactgagctgagtgtgaggatggtgc

SEQ ID NO: 113147 - DNA, 120 bp, Artificial Sequence
  ENSG00000100304_35 (sequence is synthesized)
cagcccaggccctgcagtttctggagccctcgatgttcattgtctcgcgtgagcctcacagctgcgtggcaaagtcagtttactgggcagagcacattttcccatttcacagaggaggaa

SEQ ID NO: 113148 - DNA, 120 bp, Artificial Sequence
  ENSG00000100304_36 (sequence is synthesized)
acaggctcagagaagttaatccgttggtccagagtcacacagtaagacctggagcccagactccatctcctgcctcctgtttggaccctgagggttcggggttggctgcctgctcctgga

SEQ ID NO: 113149 - DNA, 120 bp, Artificial Sequence
  ENSG00000100304_37 (sequence is synthesized)
acccccacccagtgtcagaagctcctggtccaggcagtagcaggctgcctgctcccggcccagcggaggcctgtacagagcgtgatgggccctgtgtctgttgcaggtgcactgtgaaga

SEQ ID NO: 113150 - DNA, 120 bp, Artificial Sequence
  ENSG00000100307_0 (sequence is synthesized)
cccctccttgcgcgcgctcgctcgctggcgccgaggaaaacgttgcgcaggttcaaaaatggaacgtcggcggcgtgagggagcgcgagggggtgtgcgcgcgtgcgcgtgcgcgtgcgc

SEQ ID NO: 113151 - DNA, 80 bp, Artificial Sequence
  ENSG00000100307_1 (sequence is synthesized)
gtgtgcgcgcgtgcgcgtgcgcgtgcgcgcccggacgagggtgacggggaccccgccagccccagcatcgcgcgccgcag

SEQ ID NO: 113152 - DNA, 120 bp, Artificial Sequence
  ENSG00000100307_2 (sequence is synthesized)
agctgtcagccatcggcgagcaggtgttcgccgtggagagcatccggaagaagcgcgtgcggaagggtaaagtcgagtatctggtgaagtggaaaggatggcccccaaagtacagcacgt

SEQ ID NO: 113153 - DNA, 120 bp, Artificial Sequence
  ENSG00000100307_3 (sequence is synthesized)
gggagccagaagagcacatcttggacccccgcctcgtcatggcctacgaggagaaggaggagagagaccgagcatcggggtataggaagagaggtccgaaacccaagcggcttctgctgc

SEQ ID NO: 113154 - DNA, 120 bp, Artificial Sequence
  ENSG00000100307_4 (sequence is synthesized)
agcggctgtacagcatggacctgcggagctcccacaaggccaagggcaaggagaagctctgcttctccctgacgtgcccactcggcagcgggagccctgagggggtggtcaaggcggggg

SEQ ID NO: 113155 - DNA, 120 bp, Artificial Sequence
  ENSG00000100307_5 (sequence is synthesized)
cacctgagctggtggacaagggccccttggtgcccaccctgcccttcccgctccgcaagccccgaaaggcccacaagtacctgcggctctcgcgcaagaagttcccgccccgcgggccca

SEQ ID NO: 113156 - DNA, 120 bp, Artificial Sequence
  ENSG00000100307_6 (sequence is synthesized)
acctggagagccacagccatcgacgggagctcttcctgcaggagccaccggccccagacgtcctgcaggcggctggcgagtgggagcctgctgcgcagccccctgaagaggaggcagatg

SEQ ID NO: 113157 - DNA, 120 bp, Artificial Sequence
  ENSG00000100307_7 (sequence is synthesized)
ccgacctggccgaggggccccctccctggacacctgcgctcccctcaagtgaggtgaccgtgaccgacatcaccgccaactccatcaccgtcaccttccgcgaggcccaggcagctgagg

SEQ ID NO: 113158 - DNA, 120 bp, Artificial Sequence
  ENSG00000100307_8 (sequence is synthesized)
gcttcttccgagaccgcagtgggaagttctgaatcaccgtttttactcttcttaaactgttttcttttgggcttggggtgggacttccagagatagggatgggttgggggcggggtaatt

SEQ ID NO: 113159 - DNA, 120 bp, Artificial Sequence
  ENSG00000100307_9 (sequence is synthesized)
attttatttaaaaaaataccgagcagcaaaaggggagaagatcccactactctcccaccacctgccctttctctgagggacgtttaccacgaggcctcaggctggggatggagagagttg

SEQ ID NO: 113160 - DNA, 120 bp, Artificial Sequence
  ENSG00000100307_10 (sequence is synthesized)
ctctgggagttggggtaccacccccagggcaggatggggacaggatcacctgcccgggacaccaccattatcattctcctctagtgacgcagcagctggttctgggagttaaaggagcat

SEQ ID NO: 113161 - DNA, 120 bp, Artificial Sequence
  ENSG00000100307_11 (sequence is synthesized)
tggaaggcccaaaccctctcccttgagtggccaccccagcctggttggctggttttccccttttctcttgtttcaattgggtctttaccttgaactctcctctctggctttgcggtgggc

SEQ ID NO: 113162 - DNA, 120 bp, Artificial Sequence
  ENSG00000100307_12 (sequence is synthesized)
tgtggaggctggttttgaccaaaagtgagtggggcgggaggaaggggcaggaggaagggttgaggttacttggggcgagtcccttccccttcagagaggcttctatccttcccagggagg

SEQ ID NO: 113163 - DNA, 120 bp, Artificial Sequence
  ENSG00000100307_13 (sequence is synthesized)
aggcgccgctgagacccttctgctgagagctctgccctcccctcatcacctggcctgtgcagaaacgctcatgcacacctggctgcacaggtgtgcacgcattacccttcgcgtgtacgt

SEQ ID NO: 113164 - DNA, 120 bp, Artificial Sequence
  ENSG00000100307_14 (sequence is synthesized)
tcccatgtgccccgtgaaagcatgtgtggctgcagacgtgtccacatgggccttgcgaacctgggttagaaaccctggccaggcgaacgtggggtgattcacagcacaaaagacctcacc

SEQ ID NO: 113165 - DNA, 120 bp, Artificial Sequence
  ENSG00000100307_15 (sequence is synthesized)
accacacctgcactcaccccaccttgcatgcaccttgctacctgcttgcggctttcagtggagggcaggggtctggcacaggtgcgatggcaccccatgctccaggcatacagatgtggt

SEQ ID NO: 113166 - DNA, 120 bp, Artificial Sequence
  ENSG00000100307_16 (sequence is synthesized)
ttctcggctgcaccgggccaggctgcgggtgtgcaggcgtctgctaagttgtgtgatgtatcagcacaggctttgagacgtctggaccctgtccttcctcccgtgaggggttcttgttct

SEQ ID NO: 113167 - DNA, 120 bp, Artificial Sequence
  ENSG00000100307_17 (sequence is synthesized)
attcccctctttttctgccctcccctccaactcagccaacccaggtgtgggcagtcagggagggagggagtgtcccaccacgttctcagggcagcccttgactcctaagccccttcctcc

SEQ ID NO: 113168 - DNA, 120 bp, Artificial Sequence
  ENSG00000100307_18 (sequence is synthesized)
ttccattctgcatcccctccccatccaacctaaatgccacagctggggctgagctgtattcctgtggagggacctctgccgtgcctctctgaggtcaggctgtgctgtgtgatgggcagg

SEQ ID NO: 113169 - DNA, 120 bp, Artificial Sequence
  ENSG00000100307_19 (sequence is synthesized)
ctttgccccagcccacccctggcaaggtgcacttgttttctggtttgtacaaggtgtcctgggggcccgtggcttccctgccagtgaggagtgacttctccctctcttccagtcctgtag

SEQ ID NO: 113170 - DNA, 120 bp, Artificial Sequence
  ENSG00000100307_20 (sequence is synthesized)
gggagacaaaaccagattggggggcccaaggggagcatggaaaaggccggctcccctgtctttccttggctgtcagagtcagggtaacacacaccaagagtggagtgcggccagcaagtt

SEQ ID NO: 113171 - DNA, 120 bp, Artificial Sequence
  ENSG00000100307_21 (sequence is synthesized)
tgagacctgcccgccctcctcgcagctctgctctgtgtcctcaggaagtcacagagtctactgaggcaaggagagggtgattctttccccaaatcccttcttccctggttcccaaaccaa

SEQ ID NO: 113172 - DNA, 120 bp, Artificial Sequence
  ENSG00000100307_22 (sequence is synthesized)
agacagcctgcagccctttctgcatggggtgctctgttgacaggcttcccagatccctgagtctctctttccttcctcctcgatctttagttgtccacggtcaattcagtgcttccattg

SEQ ID NO: 113173 - DNA, 120 bp, Artificial Sequence
  ENSG00000100307_23 (sequence is synthesized)
ggggacagtcccctccgggatgacctgattcacctccagcccagggaatggaatctagaggaatacgtggggtgggtctggacaaggagcggcaggaatcaccacccatctccagctgtg

SEQ ID NO: 113174 - DNA, 120 bp, Artificial Sequence
  ENSG00000100307_24 (sequence is synthesized)
gagccctgtggaggggaaggggaagcttggggttcagaggggactcttccaggagaggggtgcccagcggaggtaaagatgatagagggttgtggggggtctctagttgaatgttttggc

SEQ ID NO: 113175 - DNA, 120 bp, Artificial Sequence
  ENSG00000100307_25 (sequence is synthesized)
ccatgactttggaacatggctggcagcttccagcagaagtcacgctccccatcccccaggggacataggacctttttcctgcttcctggtcactttcaaagaactatttgcgcaatctgt

SEQ ID NO: 113176 - DNA, 120 bp, Artificial Sequence
  ENSG00000100307_26 (sequence is synthesized)
gggtctgtggattcacggggctttctgtgtgggtgctgcagttgcttttgtctgcagcagcaggacacatctttcctcttactcagccctttatggcccatggggaactccgtggctcag

SEQ ID NO: 113177 - DNA, 120 bp, Artificial Sequence
  ENSG00000100307_27 (sequence is synthesized)
ggagagctgaactccaggggtgtgacctgggacgggtgggcctgaggtgcccagctcagggcagccaggtggctcatgggctgtagtgagccagctccctgggggaaaaggctgtgggcc

SEQ ID NO: 113178 - DNA, 120 bp, Artificial Sequence
  ENSG00000100307_28 (sequence is synthesized)
gttaggaccatcctccaggacaggtgacctctatgaggtcacctacggctgtggccgtgcaggcctccttccagcccagagtggcccagtagagcaaggcagacagtgacctccaccccc

SEQ ID NO: 113179 - DNA, 120 bp, Artificial Sequence
  ENSG00000100307_29 (sequence is synthesized)
gcagccctcttaaaaggccagtactcttgggggtggggggagggtttagaaagcatttgcccatctgcctttctttcccccagcccccacccgctttgaatgtagagacccgtgggcact

SEQ ID NO: 113180 - DNA, 120 bp, Artificial Sequence
  ENSG00000100307_30 (sequence is synthesized)
tttccttttgtggtggggggtgcggaggaggtacccccacccctggcacagccgcctggaatgcaggactgtcactgctgttcgggtgatgacctcgttgccaagctcctcctgtcccct

SEQ ID NO: 113181 - DNA, 120 bp, Artificial Sequence
  ENSG00000100307_31 (sequence is synthesized)
tgttctgggggcaggcgctgtgcttctgtgaggtggtttagcttttgctttcgaagtggccagctgcggccaccaggtctcagcacaagagcgcttcctttgcacagaatgagcttcgag

SEQ ID NO: 113182 - DNA, 120 bp, Artificial Sequence
  ENSG00000100307_32 (sequence is synthesized)
ctttgttcagactaaatgaatgtatctgggaggggtcgggggcacgagttgattccaagcacatgcctttgctgagtgtgtgtgtgctgggagagtcagagtggatgtagagcgcggttt

SEQ ID NO: 113183 - DNA, 120 bp, Artificial Sequence
  ENSG00000100307_33 (sequence is synthesized)
tatttttgtactgacattggtaagagactgtatagcatctatttatttagatgatttatctggtaaatgaggcaaaaaaattattaaaaatacattaaagatgatttaaaaaaaagaaaa

SEQ ID NO: 113184 - DNA, 120 bp, Artificial Sequence
  ENSG00000100307_34 (sequence is synthesized)
tcggcaccgccgggtggggcttagggccggctcagaggcttcccaggagcctgctgctggcttggcaggggttgttggggcagggcaggggtgtccgatggggcaggccagcccagcctg

SEQ ID NO: 113185 - DNA, 120 bp, Artificial Sequence
  ENSG00000100307_35 (sequence is synthesized)
cagctgggtgaaaatggtgggcactgagtcccagggcagctgaggaccctggggccctttcctgttgttgggtgatctcggtcacttcctttacccacccgggcctcagtctctctgctg

SEQ ID NO: 113186 - DNA, 120 bp, Artificial Sequence
  ENSG00000100307_36 (sequence is synthesized)
ggtaaagtcgagtatctggtgaagtggaaaggatggcccccaaacatcgcactactgatgacaagcaggcaactgcgttggagagggaggtcatcatggctgcaaggaagggaccggacc

SEQ ID NO: 113187 - DNA, 120 bp, Artificial Sequence
  ENSG00000100307_37 (sequence is synthesized)
catctgcgtagaggacaacagtaccatcacctgctttgggctgcacaaaggcgagacccagtgatgccccagctatggaacccattacaagctggtgccccgccagctgacgtactgagc

SEQ ID NO: 113188 - DNA, 120 bp, Artificial Sequence
  ENSG00000100307_38 (sequence is synthesized)
acctgcaccaagttacccaaaatgtgctgcaaagtttcttctttccaataaagagtagccattgcattggctccttctcccattaaaaaaaaaagaagaaagggccgggcgcggtggctc

SEQ ID NO: 113189 - DNA, 120 bp, Artificial Sequence
  ENSG00000100307_39 (sequence is synthesized)
tgtgtgtctgtctgtctgcctaccgacccatgcattcctccacctgccttttgccccctcccctgcctagcttttagctccagctactcttgtaactggacagctgaccttgatttaatc

SEQ ID NO: 113190 - DNA, 120 bp, Artificial Sequence
  ENSG00000100307_40 (sequence is synthesized)
atcatcttctctgggcctcagtttccccctggaccacaggagggtcaaggtgggtctccagcttctcttctcaccctgccctcctgagtgttgagctcctctgctagttggagcttctgc

SEQ ID NO: 113191 - DNA, 120 bp, Artificial Sequence
  ENSG00000100307_41 (sequence is synthesized)
tctccctcctcccctccctgtggcttttcttggcaactgggaggtgaaggcccagcatccgggctactggagatggctgctggacaggaggaggggaccccagctgctttaagcacagtg

SEQ ID NO: 113192 - DNA, 120 bp, Artificial Sequence
  ENSG00000100307_42 (sequence is synthesized)
ctgcatgagtcctcagtgctgtgtggccaggggcagagcctgaatccccctcacctctagacggcactttccagtctatagagcaggttcccatacagctttgtaaggtaggtgtgatca

SEQ ID NO: 113193 - DNA, 120 bp, Artificial Sequence
  ENSG00000100307_43 (sequence is synthesized)
ggcgctctcaaggtgaggaaacaggctcagagagggtaagcagcttgccttaggtcacacagcaagtggaggcagagttgggacttgaactaggccttctccttttcaggtgtctcctct

SEQ ID NO: 113194 - DNA, 120 bp, Artificial Sequence
  ENSG00000100307_44 (sequence is synthesized)
gtgccttcccagcctcccatctcggagttgggaggcagggagctgtatctgagacctcccagcttctccacctctcctgctgaggccccatcaggaacccaccaatgccctccagcaggg

SEQ ID NO: 113195 - DNA, 120 bp, Artificial Sequence
  ENSG00000100307_45 (sequence is synthesized)
agttgttgggagggaatgagctagtcgtggggcctccccattggtctgtgggtgccccaccccctgccccgcctcccggagactgagtcctggaaaccccctctgcccagagctgctgct

SEQ ID NO: 113196 - DNA, 120 bp, Artificial Sequence
  ENSG00000100307_46 (sequence is synthesized)
gtcgggcagggactttttgctgtgctggtgggggctgacctggtatggggtcctgtgggcattctggggtgatggtggggagagacagcagagaggaagacagcccacagtgcctcagct

SEQ ID NO: 113197 - DNA, 120 bp, Artificial Sequence
  ENSG00000100307_47 (sequence is synthesized)
tccctctctgcaaaatgggttcagaaacccaggccctgcactcatctcacaggcttggtggccctatcggatgaaaggcctgggcacatgttctgggtgacctgtggatatcctgatgac

SEQ ID NO: 113198 - DNA, 120 bp, Artificial Sequence
  ENSG00000100307_48 (sequence is synthesized)
ggcaggccgagaatacactccacccctcacaccaacccccacttcagttctcccttcccgaatattctgagggctgaaggagaatccctcccccgccacacccagctgctagaaggtggg

SEQ ID NO: 113199 - DNA, 120 bp, Artificial Sequence
  ENSG00000100307_49 (sequence is synthesized)
cttccagcctgagtgaagggggcagtaaagggagtgacgatgcccagagtgggcagcaggagcaccgcctccctgggcgcgcacacccctgcctctctcgcttcgcaccaggaagctgtg

SEQ ID NO: 113200 - DNA, 120 bp, Artificial Sequence
  ENSG00000100307_50 (sequence is synthesized)
gccaccagctgttagccttcaggacactattggctatttttcctcctctggagactccactctttggaagattctcttctgtaaacagaggccgttatgaatgaaaagttccttccccca

SEQ ID NO: 113201 - DNA, 120 bp, Artificial Sequence
  ENSG00000100307_51 (sequence is synthesized)
ctttgattgatcctggatgtgaatccatctgcccactgcagctcgtcaggagggaaggaacgaggctcccagagcagaggccctcgatgcttctgttgcgctgtgcccctagcctgggga

SEQ ID NO: 113202 - DNA, 120 bp, Artificial Sequence
  ENSG00000100307_52 (sequence is synthesized)
cccatttgtttcttaacatgctgaggccaccagatgggccctcatggctgcctcttctcacccccctccactttggtcctgggttctaggcctggctgcccacccgacaggcatgagccc

SEQ ID NO: 113203 - DNA, 120 bp, Artificial Sequence
  ENSG00000100307_53 (sequence is synthesized)
tgggacagggccccaccatggctgggtctctgcttcctcatcttcgagttgagatggtgaagcctcctttgcaggctactgtgagggtgagagggtggatgtaattgagcgaatgcatgt

SEQ ID NO: 113204 - DNA, 120 bp, Artificial Sequence
  ENSG00000100307_54 (sequence is synthesized)
tcagcccagtccaagtgctttagtaaacatttggttttaagattaagttagatagatagcctagctgttctttttgttttccccagtcaggaaagggacctaagggattccattcttctc

SEQ ID NO: 113205 - DNA, 120 bp, Artificial Sequence
  ENSG00000100307_55 (sequence is synthesized)
aggagtgcaaagtatccttagaaatcatttaggccagtcctctgatttttcagatggggaaactgaggcccagagagggttggtccttaaaaaaatataactgccaaccccatgcactgt

SEQ ID NO: 113206 - DNA, 120 bp, Artificial Sequence
  ENSG00000100307_56 (sequence is synthesized)
ggtgcccacttcatgccatccacagtgccaccacggtctgggagtgaggcaggtatggctgctaaccatccccacctcacttgggggaaacagaggttcactctgggggagaagcagggg

SEQ ID NO: 113207 - DNA, 120 bp, Artificial Sequence
  ENSG00000100307_57 (sequence is synthesized)
agccagctctgtcttcccctcctcgggggccctgcttggagaaaaagctgagaaagagggtggggggtggggagttaggcaggctgtgtcctccaggcctgggagccttggctgggcagt

SEQ ID NO: 113208 - DNA, 120 bp, Artificial Sequence
  ENSG00000100307_58 (sequence is synthesized)
gccggcctgggtggggtagtgattctcctgctcagcatctgccctgtaggtggggagacttacattcttctcagtaacagtaacaggaaccatgatttaaatggacactctaggatgggc

SEQ ID NO: 113209 - DNA, 68 bp, Artificial Sequence
  ENSG00000100307_59 (sequence is synthesized)
taacaggaaccatgatttaaatggacactctaggatgggcatggtggttcatgcccgtaatcccagca

SEQ ID NO: 113210 - DNA, 71 bp, Artificial Sequence
  ENSG00000100307_60 (sequence is synthesized)
cctggccaacatggcaaaaaccccgtctctaccaaaagcataaaaaattagccaggcatggtgagccactg

SEQ ID NO: 113211 - DNA, 120 bp, Artificial Sequence
  ENSG00000100311_0 (sequence is synthesized)
ggcaacttctcctcctgcagccgggagcggcctgcctgcctccctgcgcacccgcagcctcccccgctgcctccctagggctcccctccggccgccagcgcccatttttcattccctaga

SEQ ID NO: 113212 - DNA, 120 bp, Artificial Sequence
  ENSG00000100311_1 (sequence is synthesized)
tagagatactttgcgcgcacacacatacatacgcgcgcaaaaaggaaaaaaaaaaaaaaaagcccaccctccagcctcgctgcaaagagaaaaccggagcagccgcagctcgcagctcgc

SEQ ID NO: 113213 - DNA, 120 bp, Artificial Sequence
  ENSG00000100311_2 (sequence is synthesized)
cagctcgcagctcgcagcccgcagcccgcagaggacgcccagagcggcgagcgggcgggcagacggaccgacggactcgcgccgcgtccacctgtcggccgggcccagccgagcgcgcag

SEQ ID NO: 113214 - DNA, 120 bp, Artificial Sequence
  ENSG00000100311_3 (sequence is synthesized)
tgcccgccgcccgggccccgcgccagggcgcacacgctcccgcccccctacccggcccgggcgggagtttgcacctctccctgcccgggtgctcgagctgccgttgcaaagccaactttg

SEQ ID NO: 113215 - DNA, 120 bp, Artificial Sequence
  ENSG00000100311_4 (sequence is synthesized)
ccgttgcaaagccaactttggaaaaagttttttgggggagacttgggccttgaggtgcccagctccgcgctttccgattttgggggcctttccagaaaatgttgcaaaaaagctaagccg

SEQ ID NO: 113216 - DNA, 120 bp, Artificial Sequence
  ENSG00000100311_5 (sequence is synthesized)
gcgggcagaggaaaacgcctgtagccggcgagtgaagacgaaccatcgactgccgtgttccttttcctcttggaggttggagtcccctgggcgcccccacacggctagacgcctcggctg

SEQ ID NO: 113217 - DNA, 120 bp, Artificial Sequence
  ENSG00000100311_6 (sequence is synthesized)
gttcgcgacgcagccccccggccgtggatgctcactcgggctcgggatccgcccaggtagcggcctcggacccaggtcctgcgcccaggtcctcccctgccccccagcgacggagccggg

SEQ ID NO: 113218 - DNA, 80 bp, Artificial Sequence
  ENSG00000100311_7 (sequence is synthesized)
cggctgcagaggcctgagcgcctgatcgccgcggacccgagccgagcccacccccctccccagccccccaccctggccgc

SEQ ID NO: 113219 - DNA, 120 bp, Artificial Sequence
  ENSG00000100311_8 (sequence is synthesized)
gggggcggcgcgctcgatctacgcgtccggggccccgcggggccgggcccggagtcggcatgaatcgctgctgggcgctcttcctgtctctctgctgctacctgcgtctggtcagcgccg

SEQ ID NO: 113220 - DNA, 120 bp, Artificial Sequence
  ENSG00000100311_9 (sequence is synthesized)
agggggaccccattcccgaggagctttatgagatgctgagtgaccactcgatccgctcctttgatgatctccaacgcctgctgcacggagaccccggagaggaagatggggccgagttgg

SEQ ID NO: 113221 - DNA, 120 bp, Artificial Sequence
  ENSG00000100311_10 (sequence is synthesized)
acctgaacatgacccgctcccactctggaggcgagctggagagcttggctcgtggaagaaggagcctgggttccctgaccattgctgagccggccatgatcgccgagtgcaagacgcgca

SEQ ID NO: 113222 - DNA, 120 bp, Artificial Sequence
  ENSG00000100311_11 (sequence is synthesized)
ccgaggtgttcgagatctcccggcgcctcatagaccgcaccaacgccaacttcctggtgtggccgccctgtgtggaggtgcagcgctgctccggctgctgcaacaaccgcaacgtgcagt

SEQ ID NO: 113223 - DNA, 120 bp, Artificial Sequence
  ENSG00000100311_12 (sequence is synthesized)
gccgccccacccaggtgcagctgcgacctgtccaggtgagaaagatcgagattgtgcggaagaagccaatctttaagaaggccacggtgacgctggaagaccacctggcatgcaagtgtg

SEQ ID NO: 113224 - DNA, 120 bp, Artificial Sequence
  ENSG00000100311_13 (sequence is synthesized)
agacagtggcagctgcacggcctgtgacccgaagcccggggggttcccaggagcagcgagccaaaacgccccaaactcgggtgaccattcggacggtgcgagtccgccggccccccaagg

SEQ ID NO: 113225 - DNA, 120 bp, Artificial Sequence
  ENSG00000100311_14 (sequence is synthesized)
gcaagcaccggaaattcaagcacacgcatgacaagacggcactgaaggagacccttggagcctaggggcatcggcaggagagtgtgtgggcagggttatttaatatggtatttgctgtat

SEQ ID NO: 113226 - DNA, 120 bp, Artificial Sequence
  ENSG00000100311_15 (sequence is synthesized)
tggggtccttggagtgataatattgtttccctcgtccgtctgtctcgatgcctgattcggacggccaatggtgcttcccccacccctccacgtgtccgtccacccttccatcagcgggtc

SEQ ID NO: 113227 - DNA, 120 bp, Artificial Sequence
  ENSG00000100311_16 (sequence is synthesized)
tcctcccagcggcctccggcgtcttgcccagcagctcaagaagaaaaagaaggactgaactccatcgccatcttcttcccttaactccaagaacttgggataagagtgtgagagagactg

SEQ ID NO: 113228 - DNA, 120 bp, Artificial Sequence
  ENSG00000100311_17 (sequence is synthesized)
atggggtcgctctttgggggaaacgggctccttcccctgcacctggcctgggccacacctgagcgctgtggactgtcctgaggagccctgaggacctctcagcatagcctgcctgatccc

SEQ ID NO: 113229 - DNA, 120 bp, Artificial Sequence
  ENSG00000100311_18 (sequence is synthesized)
tgaacccctggccagctctgaggggaggcacctccaggcaggccaggctgcctcggactccatggctaagaccacagacgggcacacagactggagaaaacccctcccacggtgcccaaa

SEQ ID NO: 113230 - DNA, 120 bp, Artificial Sequence
  ENSG00000100311_19 (sequence is synthesized)
caccagtcacctcgtctccctggtgcctctgtgcacagtggcttcttttcgttttcgttttgaagacgtggactcctcttggtgggtgtggccagcacaccaagtggctgggtgccctct

SEQ ID NO: 113231 - DNA, 120 bp, Artificial Sequence
  ENSG00000100311_20 (sequence is synthesized)
caggtgggttagagatggagtttgctgttgaggtggctgtagatggtgacctgggtatcccctgcctcctgccaccccttcctccccacactccactctgattcacctcttcctctggtt

SEQ ID NO: 113232 - DNA, 120 bp, Artificial Sequence
  ENSG00000100311_21 (sequence is synthesized)
cctttcatctctctacctccaccctgcattttcctcttgtcctggcccttcagtctgctccaccaaggggctcttgaaccccttattaaggccccagatgatcccagtcactcctctcta

SEQ ID NO: 113233 - DNA, 120 bp, Artificial Sequence
  ENSG00000100311_22 (sequence is synthesized)
gggcagaagactagaggccagggcagcaagggacctgctcatcatattccaacccagccacgactgccatgtaaggttgtgcagggtgtgtactgcacaaggacattgtatgcagggagc

SEQ ID NO: 113234 - DNA, 120 bp, Artificial Sequence
  ENSG00000100311_23 (sequence is synthesized)
actgttcacatcatagataaagctgatttgtatatttattatgacaatttctggcagatgtaggtaaagaggaaaaggatccttttcctaattcacacaaagactccttgtggactggct

SEQ ID NO: 113235 - DNA, 120 bp, Artificial Sequence
  ENSG00000100311_24 (sequence is synthesized)
gtgcccctgatgcagcctgtggcttggagtggccaaataggagggagactgtggtaggggcagggaggcaacactgctgtccacatgacctccatttcccaaagtcctctgctccagcaa

SEQ ID NO: 113236 - DNA, 120 bp, Artificial Sequence
  ENSG00000100311_25 (sequence is synthesized)
ctgcccttccaggtgggtgtgggacacctgggagaaggtctccaagggagggtgcagccctcttgcccgcacccctccctgcttgcacacttccccatctttgatccttctgagctccac

SEQ ID NO: 113237 - DNA, 120 bp, Artificial Sequence
  ENSG00000100311_26 (sequence is synthesized)
ctctggtggctcctcctaggaaaccagctcgtgggctgggaatgggggagagaagggaaaagatccccaagaccccctggggtgggatctgagctcccacctcccttcccacctactgca

SEQ ID NO: 113238 - DNA, 120 bp, Artificial Sequence
  ENSG00000100311_27 (sequence is synthesized)
ctttcccccttcccgccttccaaaacctgcttccttcagtttgtaaagtcggtgattatatttttgggggctttccttttattttttaaatgtaaaatttatttatattccgtatttaaa

SEQ ID NO: 113239 - DNA, 120 bp, Artificial Sequence
  ENSG00000100311_28 (sequence is synthesized)
gttgtaaaaaaaaataaccacaaaacaaaaccaaatgaatccgccggaggtctgtctgttggcatcgtgcgtgacaattaacctttctgccttggcaggatgtgccgacagcttgcggcg

SEQ ID NO: 113240 - DNA, 120 bp, Artificial Sequence
  ENSG00000100311_29 (sequence is synthesized)
tgttcctctcactctgggagcctcaggcgtgatctcacacactggcgtgcacatacacacacacacacatacatgctcacacatgcgtgcacatacacgcaggcctgcaacttgggggag

SEQ ID NO: 113241 - DNA, 120 bp, Artificial Sequence
  ENSG00000100311_30 (sequence is synthesized)
gcctctgtctggcgggaagaagagacacacaggctactctgttggtcttggtcctggcacagctcctgacacgtggacttgtgcgtgtctctggcagtgacgagagatgggtttctgcag

SEQ ID NO: 113242 - DNA, 120 bp, Artificial Sequence
  ENSG00000100312_0 (sequence is synthesized)
actaggcttgcaggccaggcagtgccaggagtatggttgagatgctaccaactgccattctgctggtcttggcagtgtccgtggttgctaaagataacgccacgtgtgatggcccctgtg

SEQ ID NO: 113243 - DNA, 120 bp, Artificial Sequence
  ENSG00000100312_1 (sequence is synthesized)
ggttacggttcaggcaaaacccacagggtggtgtccgcatcgtcggcgggaaggctgcacagcatggggcctggccctggatggtcagcctccagatcttcacgtacaacagccacaggt

SEQ ID NO: 113244 - DNA, 120 bp, Artificial Sequence
  ENSG00000100312_2 (sequence is synthesized)
accacacatgtggaggcagcttgctgaattcacgatgggtgctcactgctgctcactgcttcgtcggcaaaaataatgtgcatgactggagactggttttcggagcaaaggaaattacat

SEQ ID NO: 113245 - DNA, 120 bp, Artificial Sequence
  ENSG00000100312_3 (sequence is synthesized)
atgggaacaataaaccagtaaaggcgcctctgcaagagagatatgtggagaaaatcatcattcatgaaaaatacaactctgcgacagagggaaatgacattgccctcgtggagatcaccc

SEQ ID NO: 113246 - DNA, 120 bp, Artificial Sequence
  ENSG00000100312_4 (sequence is synthesized)
ctcccatttcgtgtgggcgcttcattgggccgggctgcctgccccactttaaggcaggcctccccagaggctcccagagctgctgggtggccggctggggatatatagaagagaaagccc

SEQ ID NO: 113247 - DNA, 120 bp, Artificial Sequence
  ENSG00000100312_5 (sequence is synthesized)
gggtatcctgtaggcaagatcgacacctgccagggagacagcggcgggcctctcatgtgcaaagacagcaaggaaagcgcctatgtggtcgtgggaatcacaagctggggggtaggctgt

SEQ ID NO: 113248 - DNA, 120 bp, Artificial Sequence
  ENSG00000100312_6 (sequence is synthesized)
gcccgtgccaagcgccccggaatctacacggccacctggccctatctgaactggatcgcctccaagattggttctaacgctttgcgtatgattcaatcggccacccctccacctcccacc

SEQ ID NO: 113249 - DNA, 120 bp, Artificial Sequence
  ENSG00000100312_7 (sequence is synthesized)
actcgaccgcccccgattcgaccccccttctcccaccctatctctgctcaccttccttggtatttccaaccgccccctcgaccacttccaccccgaccaccggcagcccagccccgaccc

SEQ ID NO: 113250 - DNA, 120 bp, Artificial Sequence
  ENSG00000100312_8 (sequence is synthesized)
ccaccttcacccccgcccccacccccacctccagcctcacctttacccccacccccacccccacccccacctacaccctcatctaccacaaaacttccccaaggactttcttttgccaag

SEQ ID NO: 113251 - DNA, 120 bp, Artificial Sequence
  ENSG00000100312_9 (sequence is synthesized)
cgcctacagcagctcatagaggtcttgaaggggaagacctattccgacggaaagaaccattatgacatggagaccacagagctcccagaactgacctcgacctcctgatctgacctggtt

SEQ ID NO: 113252 - DNA, 120 bp, Artificial Sequence
  ENSG00000100312_10 (sequence is synthesized)
ctcaacagacccagtgagcccttcactcctgagaaaaaggaaagatgaaataaataaataaacatatatatatagatatacacacacacatatctgtatgtatacatgcatatacatcaa

SEQ ID NO: 113253 - DNA, 120 bp, Artificial Sequence
  ENSG00000100312_11 (sequence is synthesized)
gcaggtacctctccattcaagacgggtgtagctgtcgctctagagctctgtccataaccaagctgtctctctctcccctggctcccagaagatctcttgcccatccaacactacctgata

SEQ ID NO: 113254 - DNA, 120 bp, Artificial Sequence
  ENSG00000100312_12 (sequence is synthesized)
ggggggacgctgctggccattctcctggtggtctttgaggtgcagcggtcacttgttgacacccagccaggctgctttcatcctcctcacggcgctacacgtagagccatcactgtggcc

SEQ ID NO: 113255 - DNA, 120 bp, Artificial Sequence
  ENSG00000100312_13 (sequence is synthesized)
ttccacagtcccctgtgccaggtcacgtgatgggtgactcgtctggctgtctacgggggggctgacagcaggtgcaggcagagcgcagcgttgcttagaatggggttgaggctgtgtctg

SEQ ID NO: 113256 - DNA, 120 bp, Artificial Sequence
  ENSG00000100312_14 (sequence is synthesized)
tatttggcacctggggcccaagctgctggatcctggaaacaagcagcaaccctgaaacagcctttggagaagagctccagataaggttatgtggccgtatgacagtgccttccactctct

SEQ ID NO: 113257 - DNA, 120 bp, Artificial Sequence
  ENSG00000100312_15 (sequence is synthesized)
gggcgcgttcagccaaccaatgtgtgcgcggggtatcctgtaggcaagatcgacacctgccagcaggagaccatgtcactgtggaaattgtcctcccagagccttccgacccctctgggc

SEQ ID NO: 113258 - DNA, 120 bp, Artificial Sequence
  ENSG00000100314_0 (sequence is synthesized)
acagaacgagcgagcgagcgagcggagaggcggctacagcctgagcgccgggccggtagcggccgcgccggcgagcggactagcgggcggcgagcagcgcggagcgcgcggggcaccgag

SEQ ID NO: 113259 - DNA, 80 bp, Artificial Sequence
  ENSG00000100314_1 (sequence is synthesized)
gcaccgaggagcgggcgcggcgggcaccgcgcgaggcagccggagctctcggaaaggccagagcggcgccgcccccgctg

SEQ ID NO: 113260 - DNA, 120 bp, Artificial Sequence
  ENSG00000100314_2 (sequence is synthesized)
caccggcccatgagccccggcctcaaagtttgcggcgggcgggcgggcgcggagcctccaagatgccgttccacccggtgacggcggcgttgatgtaccggggcatctacaccgtgccca

SEQ ID NO: 113261 - DNA, 120 bp, Artificial Sequence
  ENSG00000100314_3 (sequence is synthesized)
acctgctgtcggagcagcgcccggtggacatcccggaggacgagctggaggagatccgagaggccttcaaggtgtttgaccgtgacggcaatggcttcatctccaagcaggagctgggca

SEQ ID NO: 113262 - DNA, 120 bp, Artificial Sequence
  ENSG00000100314_4 (sequence is synthesized)
cagccatgcgctcactgggttacatgcccaacgaggtggagctggaggtcatcatccagcggctggacatggatggtgatggtcaagtggactttgaggagtttgtgacccttctgggac

SEQ ID NO: 113263 - DNA, 120 bp, Artificial Sequence
  ENSG00000100314_5 (sequence is synthesized)
ccaaactctccacctcagggatcccagagaagttccatggcaccgactttgatactgtcttctggaagtgcgacatgcagaagctgacggtggatgagctgaagcggctgctctacgaca

SEQ ID NO: 113264 - DNA, 120 bp, Artificial Sequence
  ENSG00000100314_6 (sequence is synthesized)
ccttctgcgagcacctgtccatgaaggacatagagaacatcatcatgacggaggaggagagccacctgggcacagccgaggagtgtcccgtggatgtggagacctgctccaaccagcaga

SEQ ID NO: 113265 - DNA, 120 bp, Artificial Sequence
  ENSG00000100314_7 (sequence is synthesized)
tccgccagacttgcgtgcgcaagagtctcatctgcgccttcgccatcgccttcatcatcagtgtcatgctcattgcggccaaccaggtgctgcgcagtggcatgaagtagacgccacctg

SEQ ID NO: 113266 - DNA, 120 bp, Artificial Sequence
  ENSG00000100314_8 (sequence is synthesized)
gatgccccatccaccgcatgcggtgcccgtggcccgccccacaccaccgccgcctgcagacctctcccttggccggctccctgggccgccatctgcgtgtacttcagggcctgggtatcc

SEQ ID NO: 113267 - DNA, 120 bp, Artificial Sequence
  ENSG00000100314_9 (sequence is synthesized)
agcgagccctccccacccacccacggtcctcacctggagctgtggcctggctgtggagggccgggtggtggctctgaggatggtccccagccccaccctgtccccaccctggcctgtaag

SEQ ID NO: 113268 - DNA, 120 bp, Artificial Sequence
  ENSG00000100314_10 (sequence is synthesized)
gagcactcactcttcctaccatccaggggctcctgggaaattaaggagggatttgcacaggaacccccaggacccagtcgctgctgtggtcccttgggcaggagcgggcaccctgtgcct

SEQ ID NO: 113269 - DNA, 120 bp, Artificial Sequence
  ENSG00000100314_11 (sequence is synthesized)
tgagacagcagcctatctggggccacacagccaacccagccctggtccctgaggtctgcccagggcacagggcacaggcagggacagaaagccttctcctgggggagggtgggaagccag

SEQ ID NO: 113270 - DNA, 120 bp, Artificial Sequence
  ENSG00000100314_12 (sequence is synthesized)
acccccttttctccatgtacctgctgggccagcccatttcacaggtgaggaacccgaggctcagggccccgagacttggcctcagttcttccttccacagggattttcaggaaaggcaga

SEQ ID NO: 113271 - DNA, 120 bp, Artificial Sequence
  ENSG00000100314_13 (sequence is synthesized)
agctcgtggaggatgggcatctgaggtggccctgcagccccccaccttctggccctcccaccagaggcccagctaccaaggccacattgtccaccaccccagcctagagcctagaactgt

SEQ ID NO: 113272 - DNA, 120 bp, Artificial Sequence
  ENSG00000100314_14 (sequence is synthesized)
agtccagctgaggaaggaggcagagctggggcctgaaggctctgagcagcctccagccagggggctcctccagggctgaactttgggagggcccctgtactacctcctgggccaagaaac

SEQ ID NO: 113273 - DNA, 120 bp, Artificial Sequence
  ENSG00000100314_15 (sequence is synthesized)
tggcacagccccacactgtcagtgccaagaggctgcgccaggccactctctcagcccagggcctgccctcctgtcctcccacttctctacgccctcaaggttggagaccccgctcccatg

SEQ ID NO: 113274 - DNA, 120 bp, Artificial Sequence
  ENSG00000100314_16 (sequence is synthesized)
ccccagctgtgccatcccaaatacttgggcagcagctcagcatgggcagacatgggggctgtggattcttccagggcggggatggcagatggagcccttgggctccttgggcctagagcc

SEQ ID NO: 113275 - DNA, 120 bp, Artificial Sequence
  ENSG00000100314_17 (sequence is synthesized)
acttcttaccaggcaacgggcacagccaccctggcacaccctctgcctggccgtgctgaacctctgctggtcccaagggagaagggagtgagcgtgggtcacctggggaaaatctcatct

SEQ ID NO: 113276 - DNA, 120 bp, Artificial Sequence
  ENSG00000100314_18 (sequence is synthesized)
gattccctccttgcccgacctctgctaggggctggagaacagagctcagagcacccagtgtagggaaacacagccagaccactgtggtgacagactttctttataaacatttggaagttt

SEQ ID NO: 113277 - DNA, 120 bp, Artificial Sequence
  ENSG00000100314_19 (sequence is synthesized)
tctcccccatcttcttaagaagcaggggggcaggtggaggagagtgaggggagagctgcccggtgcagacccaggacgagggctgcacttggtgtggccgtgtcctgagcctcagtgagg

SEQ ID NO: 113278 - DNA, 120 bp, Artificial Sequence
  ENSG00000100314_20 (sequence is synthesized)
ctgggcagatggtctcggagcctccatggggcgtagcaggaaccgggcttggcttcctattgtgactgatgagaaaagtgaccacgtgggggtcagtcgggggcaaggggctcagcccca

SEQ ID NO: 113279 - DNA, 120 bp, Artificial Sequence
  ENSG00000100314_21 (sequence is synthesized)
ctggactctgggctgcagaggccaccccccaggtgggggtgcccgcagggatggaggcagctcctgaactggtggccagcccacggggtactggaagacagtggttctgatgggttcagc

SEQ ID NO: 113280 - DNA, 120 bp, Artificial Sequence
  ENSG00000100314_22 (sequence is synthesized)
cctagagagagagagagaagcggggagaataagagtgcactacagcccaggcttatgccacccccagcccacctgcctcaccaccctggctgtggggagggtcagctgcctgcatgactt

SEQ ID NO: 113281 - DNA, 120 bp, Artificial Sequence
  ENSG00000100314_23 (sequence is synthesized)
ttctggaaggcagagcctcgaaaataggcagaccgtttgagccagcgacctcacctctaggaactgagcccaaggaaatagcggggttgcaggcagacattgagctgcgagacaatggga

SEQ ID NO: 113282 - DNA, 120 bp, Artificial Sequence
  ENSG00000100314_24 (sequence is synthesized)
ataaccttcgtgtccacctgtgggggactgattcaatacatatgcacgtccacagcagagaatgccatgcggcctgtgtaagaattaaggcagatttatatgcactgatgaggaaagaca

SEQ ID NO: 113283 - DNA, 120 bp, Artificial Sequence
  ENSG00000100314_25 (sequence is synthesized)
tactgtgtgatagggagaaaaagcagcttataaaataatgtatatagcatgatactatttttgtttaaaaatatataaaatatataaatgcataaaaaaatcctggaagacacagcaaaa

SEQ ID NO: 113284 - DNA, 120 bp, Artificial Sequence
  ENSG00000100316_0 (sequence is synthesized)
ctctaccggcgggatttgatggcgtgatgtctcacagaaagttctccgctcccagacatgggtccctcggcttcctgcctcggaagcgcagcagcaggcatcgtgggaaggtgaagagct

SEQ ID NO: 113285 - DNA, 120 bp, Artificial Sequence
  ENSG00000100316_1 (sequence is synthesized)
tccctaaggatgacccgtccaagccggtccacctcacagccttcctgggatacaaggctggcatgactcacatcgtgcgggaagtcgacaggccgggatccaaggtgaacaagaaggagg

SEQ ID NO: 113286 - DNA, 120 bp, Artificial Sequence
  ENSG00000100316_2 (sequence is synthesized)
tggtggaggctgtgaccattgtagagacaccacccatggtggttgtgggcattgtgggctacgtggaaacccctcgaggcctccggaccttcaagactgtctttgctgagcacatcagtg

SEQ ID NO: 113287 - DNA, 120 bp, Artificial Sequence
  ENSG00000100316_3 (sequence is synthesized)
atgaatgcaagaggcgtttctataagaattggcataaatctaagaagaaggcctttaccaagtactgcaagaaatggcaggatgaggatggcaagaagcagctggagaaggacttcagca

SEQ ID NO: 113288 - DNA, 120 bp, Artificial Sequence
  ENSG00000100316_4 (sequence is synthesized)
gcatgaagaagtactgccaagtcatccgtgtcattgcccacacccagatgcgcctgcttcctctgcgccagaagaaggcccacctgatggagatccaggtgaacggaggcactgtggccg

SEQ ID NO: 113289 - DNA, 120 bp, Artificial Sequence
  ENSG00000100316_5 (sequence is synthesized)
agggcaaaggctacaaaggggtcaccagtcgttggcacaccaagaagctgccccgcaagacccaccgaggcctgcgcaaggtggcctgtattggggcatggcatcctgctcgtgtagcct

SEQ ID NO: 113290 - DNA, 120 bp, Artificial Sequence
  ENSG00000100316_6 (sequence is synthesized)
tctctgtggcacgcgctgggcagaaaggctaccatcaccgcactgagatcaacaagaagatttataagattggccagggctaccttatcaaggacggcaagctgatcaagaacaatgcct

SEQ ID NO: 113291 - DNA, 120 bp, Artificial Sequence
  ENSG00000100316_7 (sequence is synthesized)
ccactgactatgacctatctgacaagagcatcaaccctctgggtggctttgtccactatggtgaagtgaccaatgactttgtcatgctgaaaggctgtgtggtgggaaccaagaagcggg

SEQ ID NO: 113292 - DNA, 120 bp, Artificial Sequence
  ENSG00000100316_8 (sequence is synthesized)
tgctcaccctccgcaagtccttgctggtgcagacgaagcggcgggctctggagaagattgaccttaagttcattgacaccacctccaagtttggccatggccgcttccagaccatggagg

SEQ ID NO: 113293 - DNA, 120 bp, Artificial Sequence
  ENSG00000100316_9 (sequence is synthesized)
agaagaaagcattcatgggaccactgaagaaagaccgaattgcaaaggaagaaggagcttaatgccaggaacagattttgcagttggtggggtctcaataaaagttattttccactgaca

SEQ ID NO: 113294 - DNA, 120 bp, Artificial Sequence
  ENSG00000100316_10 (sequence is synthesized)
ggtatgtgttgtaatggcggccgtttcattgtcaccggcgtcggcacggctgaatccgcgacgcatcgccgccatcccgtcttggccggcgccggggtctcacagaaagttctccgctcc

SEQ ID NO: 113295 - DNA, 120 bp, Artificial Sequence
  ENSG00000100316_11 (sequence is synthesized)
atgtgttgtaatggcggccgtttcattgtcaccggcgtcggcacggctgaatccgcgacgcatcgccgccatcccgtcttggccggcgccgggggtttgctttaggggcacgggcgaccc

SEQ ID NO: 113296 - DNA, 120 bp, Artificial Sequence
  ENSG00000100316_12 (sequence is synthesized)
ccagccgccttacagaaaggaacctggagggccagccagctttttgctctgaccttgggatacgctgtgactgggactgaggcctcagctgccttctagcgtgctttgcaggtcagcaca

SEQ ID NO: 113297 - DNA, 120 bp, Artificial Sequence
  ENSG00000100316_13 (sequence is synthesized)
ctggcatgtctgggttatttgtccctaatgccccagccttacacccttcttgttcattcagatttataagattggccagggctaccttatcaaggacggcaagctgatcaagaacaatgc

SEQ ID NO: 113298 - DNA, 120 bp, Artificial Sequence
  ENSG00000100316_14 (sequence is synthesized)
tccatccccacgcggtgccagtgtgccttccgctcacccctcggaggggtgatgaaggcctgcacctggtcccctccccaactctgctctgctcctgaaggcataaatctaagaagaagg

SEQ ID NO: 113299 - DNA, 120 bp, Artificial Sequence
  ENSG00000100316_15 (sequence is synthesized)
ggaaattgtagagatggagtcaagctgttagcagagggcagacttttttttttaagcaggagttacacgttgtcagaactgctgcgacagcagaatgggaatgcttaacttgaaaactaa

SEQ ID NO: 113300 - DNA, 120 bp, Artificial Sequence
  ENSG00000100316_16 (sequence is synthesized)
tattccaaggctacagatggtcagcactgtttgctttaggtgcggtgtggggtattgatttcagagcatagtaaatttgccaggaaccttagcaaagagaagttaacactagtgtggggg

SEQ ID NO: 113301 - DNA, 120 bp, Artificial Sequence
  ENSG00000100316_17 (sequence is synthesized)
agagcgagactccgtctcaaaaaagagatttgtaagggaccagcctggaagcagggaatcggtcaggatccgagtcaccctggagcctaggcagagatcagcgaaagccctcgctgatgc

SEQ ID NO: 113302 - DNA, 120 bp, Artificial Sequence
  ENSG00000100316_18 (sequence is synthesized)
gcctaggcagagatcagcgaaagccctcgctgatgcataggtctggaaggcgtggggctccgggaggctgagcagctggactcggcatgaccagaggtcgtgaggccgttccgcaggctt

SEQ ID NO: 113303 - DNA, 120 bp, Artificial Sequence
  ENSG00000100316_19 (sequence is synthesized)
gggacgctcctgaccctcagaatcaagcgcgggccactgcattagcatgggagaaatggcagagatagggcttgagggagggatgcccgagattaaaggtattaaaggtaaattggtgtc

SEQ ID NO: 113304 - DNA, 120 bp, Artificial Sequence
  ENSG00000100316_20 (sequence is synthesized)
gccgcaaaaccagcgtgggagccaggaaacgagagtttcagtctttcttcgctaattccagagatagctgcatatcacaggaggagaagcgacgcagccatttttcttcgttattatcaa

SEQ ID NO: 113305 - DNA, 120 bp, Artificial Sequence
  ENSG00000100316_21 (sequence is synthesized)
atttggctgctgccggacgccgtagatttgtggctcacccacccttagcccacctctccgcggcttttcactaagtttgaacccgacccctcgccgtagagtgtgtaatttctgtctccg

SEQ ID NO: 113306 - DNA, 120 bp, Artificial Sequence
  ENSG00000100316_22 (sequence is synthesized)
taggctgcttcctaggggctgctagcaggatcgttaactgaagccaacacaacacctagctgtgtcccttgtaagtggcatgttgtcatctgagtccactcgtcggggttggctggtgag

SEQ ID NO: 113307 - DNA, 120 bp, Artificial Sequence
  ENSG00000100316_23 (sequence is synthesized)
atgaaataatcttatcactccctcagatgacccagccatggttggtaattgctgagtagcaggaaggggtcagtgggaggtgctgggcgctgaggtgaagtaatgtgtatccattccagg

SEQ ID NO: 113308 - DNA, 120 bp, Artificial Sequence
  ENSG00000100316_24 (sequence is synthesized)
gtcagggagggcctgaacctggaggggtcatctgcacgacaatcccctcctgggcctgtgctgatccgatgctcgttttccagggtggctttgtccactatggtgaagtgaccaatgact

SEQ ID NO: 113309 - DNA, 120 bp, Artificial Sequence
  ENSG00000100316_25 (sequence is synthesized)
ttgtcatgctgaaaggctgtgtggtgggaaccaagaagcgggtgctcaccctccgcaaggtgaggcaggtcctgacttgtcatgggggggctcttgtagagggaggatccaaggccacag

SEQ ID NO: 113310 - DNA, 120 bp, Artificial Sequence
  ENSG00000100316_26 (sequence is synthesized)
acgctggtggccctgtggtgggagaggaaaggaaggagagggtgttggcagtcctttcacactggctttgaagtcctgagatgaggaaattcccagtctggccttgctgggctgtttgct

SEQ ID NO: 113311 - DNA, 120 bp, Artificial Sequence
  ENSG00000100316_27 (sequence is synthesized)
gctttgagtgtgtcctcatctgccggatggtgggggaggctgaattgatcgtgtggcttcccagatgcaggggcgctgtgaacagtgctgaggaaagcctggctcctcgtaatcctaaat

SEQ ID NO: 113312 - DNA, 120 bp, Artificial Sequence
  ENSG00000100316_28 (sequence is synthesized)
gccggggtaggggtggtcttgatgccttaggcctctcttgtggctgtggagactggcccagagtcttggtctcctctagagtgggcatctgctgtcacctgtcatcttctacctctgacc

SEQ ID NO: 113313 - DNA, 120 bp, Artificial Sequence
  ENSG00000100316_29 (sequence is synthesized)
actgcctctctccccacagggaccactgaagaaagaccgaattgcaaaggaagaaggagcttaatgccaggaacagattttgcagttggtggggtctcaataaaagttattttccactga

SEQ ID NO: 113314 - DNA, 120 bp, Artificial Sequence
  ENSG00000100316_30 (sequence is synthesized)
tgtttgaatgcgtgtaacttaaattaaccttgtggacctctgctcagctccgctcggctctgcccgatgagctccatccaggctccgcttgctggtggaaaaggctccttagaagccggc

SEQ ID NO: 113315 - DNA, 120 bp, Artificial Sequence
  ENSG00000100316_31 (sequence is synthesized)
tggcataagaactgcctcattcatgtttttttcacctgaaagcttgaataatggccacttacctgtgtgtgttctacttagagatgtctaacagcactggttgctgagccatggagacat

SEQ ID NO: 113316 - DNA, 120 bp, Artificial Sequence
  ENSG00000100316_32 (sequence is synthesized)
taatgttaggcagttgatactgactaatctctgagctcagagctattgttagggcactgaattttccagataaatagcaatcttgtctgcctccagaggtttctgtagaagagaattgaa

SEQ ID NO: 113317 - DNA, 120 bp, Artificial Sequence
  ENSG00000100316_33 (sequence is synthesized)
agcagggagcagcgtgtgcatggtttctcagctctgtagcaggcagggagctgctgtcttgggtttagtttgcctctcgaacagaaaaatacctgggatcagacttggccagccatctgg

SEQ ID NO: 113318 - DNA, 120 bp, Artificial Sequence
  ENSG00000100316_34 (sequence is synthesized)
tttcagccggaagctaacaccctcattctgagtccaggctagtgggtggtggctgaggacccagttggttgaggagtccaactagaaaccaggagaggtagcagaataattaaaccccta

SEQ ID NO: 113319 - DNA, 120 bp, Artificial Sequence
  ENSG00000100316_35 (sequence is synthesized)
taggggtggcaagggcctctggccctgggtggaatgtcccatttccttcatcactgagtgggcttccccagggcagaaaggtttgtcccggagcaagaattttgtttgaatgcgtgtaac

SEQ ID NO: 113320 - DNA, 120 bp, Artificial Sequence
  ENSG00000100319_0 (sequence is synthesized)
agtacgcgacgcgaggacgcaggaggaggagcccggagctgcagccaccggggagccaggtaccttccgcgagacgtcgaggggcgagtcctagtctcttttctccgcactggaagactt

SEQ ID NO: 113321 - DNA, 120 bp, Artificial Sequence
  ENSG00000100319_1 (sequence is synthesized)
gaacacttccttctctgcagcaaagcacctgctctgagtggccatggggaagcgatacttctgtgactactgcgaccgctccttccaggacaacctccacaaccgcaagaagcacctgaa

SEQ ID NO: 113322 - DNA, 120 bp, Artificial Sequence
  ENSG00000100319_2 (sequence is synthesized)
cgggctgcagcacctcaaggccaagaaggtctggtacgacatgttccgagatgcagctgccatcttgctggatgagcagaacaagcggccctgcaggaagtttctactgacaggccagtg

SEQ ID NO: 113323 - DNA, 120 bp, Artificial Sequence
  ENSG00000100319_3 (sequence is synthesized)
tgctcctgagctccccgagggccatctggaggactggctggagaagagagccaagcggctgagctcagccccaagtagcagggctgaacccatcagaaccactgtcttccagtaccccgt

SEQ ID NO: 113324 - DNA, 120 bp, Artificial Sequence
  ENSG00000100319_4 (sequence is synthesized)
gggctggccaccagttcaggagctgcctccatccctgcgggcacccccacctggggggtggcctctgcagcccagagtccagtggggctgagccccttgcccccgactgacccccacgtg

SEQ ID NO: 113325 - DNA, 120 bp, Artificial Sequence
  ENSG00000100319_5 (sequence is synthesized)
gtcacttttctcatcagtcacaataggaagccaagcccggttcctgctacgccccatggaggctccgagaccatctgcccagcctcactgaggctcaggacacggccacaccaagtgcag

SEQ ID NO: 113326 - DNA, 120 bp, Artificial Sequence
  ENSG00000100319_6 (sequence is synthesized)
ccctcgtcctgggtctgcaccgggcagctctcccctcactctcctccacctgcccccctgcttcttaagaagatgggggagaaaacttccaaatgtttataaagaaagtctgtcaccaca

SEQ ID NO: 113327 - DNA, 120 bp, Artificial Sequence
  ENSG00000100319_7 (sequence is synthesized)
aggctcctggagccctgctctctgatctttcttatcatcaaagactcctgtgggtcagtgacagtctaggtctgggctctttgaggatcaaaagagagggaggcctgagccactgggccc

SEQ ID NO: 113328 - DNA, 120 bp, Artificial Sequence
  ENSG00000100319_8 (sequence is synthesized)
tcagaggagcaggctggtaggtgagctctttccccaacaacgctgactgaaggctctgtggacaggaggaaggccctagaaggaggtgatgtttgagccaacagctaaaataggggaaag

SEQ ID NO: 113329 - DNA, 120 bp, Artificial Sequence
  ENSG00000100319_9 (sequence is synthesized)
ctagccatgcagttctgggtggagggtgtgaagagaagcaggcagccctgagtccagcaccagggctctcggagcaggagggagagggtgtggctgggcggagcaggccaggggagaatg

SEQ ID NO: 113330 - DNA, 120 bp, Artificial Sequence
  ENSG00000100319_10 (sequence is synthesized)
gtagggctcaagctggctctggggcagggatcttccaagcctgtggaggccatcataagcagggggcggaggtgggggggtccctgttccaagggcagagagcagcctttgaagggcttt

SEQ ID NO: 113331 - DNA, 120 bp, Artificial Sequence
  ENSG00000100319_11 (sequence is synthesized)
agctgccgtggccagacctgccttgacagcgcagactgcttcgtggggagcagttgggtgcggtcagtggcagttgaatgactggctgcaggcacgggtgaataacccagttgcagaagg

SEQ ID NO: 113332 - DNA, 120 bp, Artificial Sequence
  ENSG00000100319_12 (sequence is synthesized)
aaggcaggctcttctgggaaaggcctctcagagcaagaacaattggggtgaatgagctaaggtcggaagtgcctagcacagggcctgtttcccgggaggtgcccagagaggggagttgtg

SEQ ID NO: 113333 - DNA, 120 bp, Artificial Sequence
  ENSG00000100319_13 (sequence is synthesized)
ctgttgcacggctgtcactggacattcacactgaggaacagccagggaggttccagagggtgactggcaggagccaggttgagagatatgggcacttggcggtggggcgagggtgggcca

SEQ ID NO: 113334 - DNA, 120 bp, Artificial Sequence
  ENSG00000100319_14 (sequence is synthesized)
ggagctcctggaatgagccagagtggggccgatgccctgtaggttggtgagcaggattctgggacagggcctccgaagaaggaaccaaatccagcagccaagaagggaggagaggtggag

SEQ ID NO: 113335 - DNA, 120 bp, Artificial Sequence
  ENSG00000100319_15 (sequence is synthesized)
ggtgggaagattgtttgagcccagaagttcaagagcagcctgggcagcattgtgagaccccgcctcaaaaaaggcctgaaactgagagttcacaaacaaggaatgagcatggatcgcatg

SEQ ID NO: 113336 - DNA, 120 bp, Artificial Sequence
  ENSG00000100319_16 (sequence is synthesized)
cctgctacatgctggtgcttttcatagttcgtcatttgcttttctcgacaactctctagggcagtgattctcaactccggctgcaggttaggatcacctggagacctttaggctaaaacc

SEQ ID NO: 113337 - DNA, 120 bp, Artificial Sequence
  ENSG00000100319_17 (sequence is synthesized)
actgattccccaaccccatcccctccccagaggcaggtttggggactaggcatggtgtttctaaaggcttcccagactccgcatttcacttgagggagctgaggctcagaggttcaagtg

SEQ ID NO: 113338 - DNA, 120 bp, Artificial Sequence
  ENSG00000100319_18 (sequence is synthesized)
agggggtggccaggctgctcagcaggccaggcgtggctgtggttgcaaggccacaggaaaattcatgggcagtggggtctcctagctccctaggagactctaaccctggtgttacgctaa

SEQ ID NO: 113339 - DNA, 120 bp, Artificial Sequence
  ENSG00000100319_19 (sequence is synthesized)
ggctccctgctgtgcaaatccagtgtgggctgtgatctagagggagctgggccgagatcacctagtcccagattctcagctgtcaacagctggatgctgggatccagggctgattggcag

SEQ ID NO: 113340 - DNA, 120 bp, Artificial Sequence
  ENSG00000100319_20 (sequence is synthesized)
aggtccctgtgtcacttatagaaaagatgaagcagcaggtgacaggagtgccccagggctcctgtgttctcagtgtcctcacatccccaacacattcagtccttagaacagttctgtaag

SEQ ID NO: 113341 - DNA, 120 bp, Artificial Sequence
  ENSG00000100319_21 (sequence is synthesized)
aacacattcagtccttagaacagttctgtaagaggctgggcaggccaagccaggcattcccagttacaggtggtgacttcaaaatccagagcaggcagggcatggtggctcacacctgta

SEQ ID NO: 113342 - DNA, 120 bp, Artificial Sequence
  ENSG00000100320_0 (sequence is synthesized)
cccttcctccctcggccggcgtgctgtgagggagagtgtgagccagcgcggccggtgggcgagctccgggagtgcgagaggcggggcggcgcggcgggccgggccgggtttcgcgtgtgc

SEQ ID NO: 113343 - DNA, 120 bp, Artificial Sequence
  ENSG00000100320_1 (sequence is synthesized)
cgggtttcgcgtgtgcgtgcgggggcgcgagcgagtgctcatcacgacccgccagtggccccgcgccgacaacccggcgggcgggcgggcggggagcaagcggtcaggcaaggagcggcg

SEQ ID NO: 113344 - DNA, 80 bp, Artificial Sequence
  ENSG00000100320_2 (sequence is synthesized)
ggcgcgcgcccgcctgtcgcgacagtcggggccgaggcccagggggaggtggcctgtcgcgggtcgcccggctcccggag

SEQ ID NO: 113345 - DNA, 80 bp, Artificial Sequence
  ENSG00000100320_3 (sequence is synthesized)
tggcggagggcgcccagccgcatcagccgcctcagctcgggcccggcgccgccgcccggggcatgaagcgggagtcggag

SEQ ID NO: 113346 - DNA, 120 bp, Artificial Sequence
  ENSG00000100320_4 (sequence is synthesized)
ctggagctgccggtgcccggagcgggaggagacggagccgatcccggcctgagcaagcggccgcgcactgaggaggcggcggccgacggtggcggcgggatgcagaacgagcctctgact

SEQ ID NO: 113347 - DNA, 120 bp, Artificial Sequence
  ENSG00000100320_5 (sequence is synthesized)
ccaggttatcatggattcccagcgcgggacagccagggtaaccaggagccgacaacaactcctgacgcaatggttcagccttttactaccatcccatttccaccacctccgcagaatgga

SEQ ID NO: 113348 - DNA, 120 bp, Artificial Sequence
  ENSG00000100320_6 (sequence is synthesized)
attcccacagagtatggggtgccacacactcaagactatgccggccagaccggtgagcataacctgacactctacggaagtacgcaagcccacggggagcagagcagcaactcacccagc

SEQ ID NO: 113349 - DNA, 120 bp, Artificial Sequence
  ENSG00000100320_7 (sequence is synthesized)
acacaaaatggatctcttacgcagacagaaggtggagcacagacagacggccagcagtcacagacacaaagtagtgaaaattcagagagtaaatctaccccgaaacggctgcatgtctct

SEQ ID NO: 113350 - DNA, 120 bp, Artificial Sequence
  ENSG00000100320_8 (sequence is synthesized)
aatattcctttccgcttccgggaccctgacctccggcagatgtttgggcagtttggcaaaatcctagatgtagaaataatctttaatgaacgtggctctaagggattcgggttcgtaact

SEQ ID NO: 113351 - DNA, 120 bp, Artificial Sequence
  ENSG00000100320_9 (sequence is synthesized)
ttcgagaatagtgctgatgcagacagggccagggagaaattacacggcaccgtggtagagggccgtaaaatcgaggtgaataatgctacagcacgtgtaatgaccaataagaagatggtc

SEQ ID NO: 113352 - DNA, 120 bp, Artificial Sequence
  ENSG00000100320_10 (sequence is synthesized)
acaccatatgcaaatggttggaaattaagcccagtagttggagctgtatatggtccggagttatatgcagcatccagctttcaagcagatgtgtccctaggcaatgatgcagcagtgccc

SEQ ID NO: 113353 - DNA, 120 bp, Artificial Sequence
  ENSG00000100320_11 (sequence is synthesized)
ctatcaggaagagggggtatcaacacttacattcctttaatcagtctccctttagttcctggcttcccttaccctactgcagccaccacggcagccgctttcagaggagcccatttgagg

SEQ ID NO: 113354 - DNA, 120 bp, Artificial Sequence
  ENSG00000100320_12 (sequence is synthesized)
ggcagagggcggacagtatatggtgcagtccgagcggtacctccaacagccatccccgcctatccaggtgtggtttaccaggacggattttacggtgctgacctctatggtggatatgca

SEQ ID NO: 113355 - DNA, 120 bp, Artificial Sequence
  ENSG00000100320_13 (sequence is synthesized)
gcctacagatatgcacagcctgctactgcaaccgcagccaccgctgctgcagccgctgcagccgcttacagtgacggttatggcagggtgtacacagccgacccctaccatgcccttgcc

SEQ ID NO: 113356 - DNA, 120 bp, Artificial Sequence
  ENSG00000100320_14 (sequence is synthesized)
cctgccgctagctatggagttggcgctgtggcgagtttataccgaggtggctacagccgatttgccccctactgaagtgacgtgagacccctgcaaatgggacagccccccagttcatga

SEQ ID NO: 113357 - DNA, 120 bp, Artificial Sequence
  ENSG00000100320_15 (sequence is synthesized)
ccctgcaaatgggacagccccccagttcatgaggcctggctattgcaatatttactagtagaggaactctatagcaagatgaagaggaaaaacaaacaaacaaacaaaaaaaaacacaaa

SEQ ID NO: 113358 - DNA, 120 bp, Artificial Sequence
  ENSG00000100320_16 (sequence is synthesized)
gttctttgaatatgtatttttcctttaaatttctgcctttaattcttttgttccaaagattgtgcatttttttctttttttttttaaactgtggtaaaaaaaaaaaaaataatgcatttc

SEQ ID NO: 113359 - DNA, 120 bp, Artificial Sequence
  ENSG00000100320_17 (sequence is synthesized)
catgtctgtatgtccgtgcttagcttattctatcaatcacggaagaggcagtcaaggaggaaggagagacattaggagccgataaatgcatctgatcagaaatcagcagacagaattacc

SEQ ID NO: 113360 - DNA, 120 bp, Artificial Sequence
  ENSG00000100320_18 (sequence is synthesized)
aaagtgtatctggtgctgaatgactgggggacaagcagaagtggaagagatctttctgcaacaggatattcttctagtcttctgagtttctggtctttgacaggcaattctggttggctg

SEQ ID NO: 113361 - DNA, 120 bp, Artificial Sequence
  ENSG00000100320_19 (sequence is synthesized)
tggctggaatccacatgctgatagataggaatttgtgcttacaaagcaggagaattaaaaagacgctttcctctcctcttccctcctgtcttctccgttctttttacaatcatcttacac

SEQ ID NO: 113362 - DNA, 120 bp, Artificial Sequence
  ENSG00000100320_20 (sequence is synthesized)
gcacagcctgagacagctggcatagtttttggaattatagtattgatatttccaaacgtgctctcagacagtggataataaacacctcattaggaaaccgatctcagaatgaactctgga

SEQ ID NO: 113363 - DNA, 120 bp, Artificial Sequence
  ENSG00000100320_21 (sequence is synthesized)
gtatgaaaaagatcatttctttttgttcctgtaacctagcattccttctaggcttcttctcctttaattgaaccacagcttagctcatgtattcttttattaacaccctgctctcatgtc

SEQ ID NO: 113364 - DNA, 120 bp, Artificial Sequence
  ENSG00000100320_22 (sequence is synthesized)
cataagattcaggaatttaggacccagggacagaaaagtgaataagccagtgaccagatttcccccagatgtcttgaggattagaagtacaaattgttgacagccattaaagagggtgag

SEQ ID NO: 113365 - DNA, 120 bp, Artificial Sequence
  ENSG00000100320_23 (sequence is synthesized)
gaagggaaaaggaatattagaagatctggtatttcttacttttttcttgcctcagaaagtacaaagtttaaaaaatagaataaagaatctgctggggaaagatagagtaccaggtcctag

SEQ ID NO: 113366 - DNA, 120 bp, Artificial Sequence
  ENSG00000100320_24 (sequence is synthesized)
gtcagtagtccctggaagttttggtgatgaggacatggaagggcaggcagaggcactttgtacttgctccaaagccataggaattttcatcttccagagcctttatgagtcacttctcta

SEQ ID NO: 113367 - DNA, 120 bp, Artificial Sequence
  ENSG00000100320_25 (sequence is synthesized)
tccacagtcttgagcctgtggctatcccgctgagcttctcactgtcctccaaaaacaccccgctgagcacccggaccactttgtacacattaacactacaggacataaaatgcagaggcc

SEQ ID NO: 113368 - DNA, 120 bp, Artificial Sequence
  ENSG00000100320_26 (sequence is synthesized)
ctgagattgctgccctcccatattggaaggagggtctgcgatggcaagggtcttctatatcaccagaaagagtcgcgcagtgagtcactgccgttgccatctggctgtaattttctatgt

SEQ ID NO: 113369 - DNA, 120 bp, Artificial Sequence
  ENSG00000100320_27 (sequence is synthesized)
tatcaaggtaggagggagtgtttctcttctagctgttagatagaactgataaaagcaagtgtcctacagcatttcccaaatgaaggcattaggaaatagaaaagcacggtctttttggct

SEQ ID NO: 113370 - DNA, 120 bp, Artificial Sequence
  ENSG00000100320_28 (sequence is synthesized)
ccctggtctagtcacattggtactagggtgacctttcacccaagggacagctgctaaagggagtaattcagagacatggagcttctggttatgggtttgttttgggtttgtttttaactc

SEQ ID NO: 113371 - DNA, 120 bp, Artificial Sequence
  ENSG00000100320_29 (sequence is synthesized)
ctgcctccacacatgttcttgactgataactgactcatgtccctgaattaaaatgactgacctatgacagcatcaagcattctttgtaagcagagtgatatatctgagagggcgttgacc

SEQ ID NO: 113372 - DNA, 120 bp, Artificial Sequence
  ENSG00000100320_30 (sequence is synthesized)
cccccttcagaatcctgtctcgcctcgtaactgggagagaggctgtgcctgaaactaggggcgatgtcaaggaagctagaggcctcgatgcaattattactgactctggggaggaagaca

SEQ ID NO: 113373 - DNA, 120 bp, Artificial Sequence
  ENSG00000100320_31 (sequence is synthesized)
gagaataaggggacaccaactgcccagtccactggccatttttaagggtccccccaccccaagccaaagtttggtttgttgctgttaagacaatttttgttgtatgtatataaatatttt

SEQ ID NO: 113374 - DNA, 120 bp, Artificial Sequence
  ENSG00000100320_32 (sequence is synthesized)
agttagaggagcggggaatgggatgcgggctttcacagttctagggaatgggggcagggaggattttgcttttgcttttgctttgagggagaactttagctgactaaaaaaacagaagtt

SEQ ID NO: 113375 - DNA, 120 bp, Artificial Sequence
  ENSG00000100320_33 (sequence is synthesized)
tggggtcatgatcacaaaggggccattcccaaaagatggcaagccacgtattcagtggagactaggccaaattctaaatggttttatccatagcaggggagaataggagaatgagtttaa

SEQ ID NO: 113376 - DNA, 120 bp, Artificial Sequence
  ENSG00000100320_34 (sequence is synthesized)
gagtttttctcttcttttttcctagaaagaggtaaggataatgggaaaggtagagaaggcggctcccacagaccttttaagagaggcagaatcttgagcttgaggcaccttgagtgcatc

SEQ ID NO: 113377 - DNA, 120 bp, Artificial Sequence
  ENSG00000100320_35 (sequence is synthesized)
tcagttcagctggttctggctgaggcctccaaaggcaagctctgtgctttccagtggtttctgctgcatttccagggatggtgtttaacaccgcttcctccagctcccttttctaagaaa

SEQ ID NO: 113378 - DNA, 120 bp, Artificial Sequence
  ENSG00000100320_36 (sequence is synthesized)
gaataaatggagttctgctttttatgaaagggtctttggttttcagtgtcaacactgagaattggggctcttgcaagcatctggatttcacagtatcaacctccccgtcaccttttgaac

SEQ ID NO: 113379 - DNA, 120 bp, Artificial Sequence
  ENSG00000100320_37 (sequence is synthesized)
tttgagactccgtacggtcaacttcaccagaggcaggttgctcgaagcagcactgcttgtctgttcctgactctggttctcactgtattaaaaaagagagtcagaggagtctggcatttc

SEQ ID NO: 113380 - DNA, 120 bp, Artificial Sequence
  ENSG00000100320_38 (sequence is synthesized)
gtgagtttgttagaggatgctggctgataattccagaaaacttactgatgctaaatcacagtacatgcatgattctttttcagctttactatagttcatgacctggactttctgtactct

SEQ ID NO: 113381 - DNA, 120 bp, Artificial Sequence
  ENSG00000100320_39 (sequence is synthesized)
tggaagctgggctccttaaaggaggcctctagtgaacacctttatctccatgtccctcttagagcccagagagctgcccataggcattttccagaattcctcatgtcacctagttcaatt

SEQ ID NO: 113382 - DNA, 120 bp, Artificial Sequence
  ENSG00000100320_40 (sequence is synthesized)
tccattaactcagatcagccattgtgattcaccatttgtcaggctctcaggtttaacaaaacctactatcaccatcatccttcaacagccacagtctgaattgagccaacattttttttt

SEQ ID NO: 113383 - DNA, 120 bp, Artificial Sequence
  ENSG00000100320_41 (sequence is synthesized)
ctttgagaaagaagtggactggggcacaacttttagtctgaggggagctagtggaaatctagacaatagaagtcatcgatagcagcttttcctcaaatgtgtgactcctcaggggctaaa

SEQ ID NO: 113384 - DNA, 120 bp, Artificial Sequence
  ENSG00000100320_42 (sequence is synthesized)
ctgctcttagcttagaattatgctttactagagatctagcagataagtgggttaatcactaccatcctgtaactagttatatagcttccagacatgagggagacatcaaacagggatgga

SEQ ID NO: 113385 - DNA, 120 bp, Artificial Sequence
  ENSG00000100320_43 (sequence is synthesized)
agcaaccccaaggatatgcaagaagggcatgatgaacccccttccctctggcaggagaacaaggccaaccaagggacagactggaaagcacttagatgtttaaggaggagaaaggggaag

SEQ ID NO: 113386 - DNA, 120 bp, Artificial Sequence
  ENSG00000100320_44 (sequence is synthesized)
ctttgaccagtccttgccttttgccaagttcagccagttctccgctgcttgcaacctctagcgcagtaacatttgcagaattgcagattttcccccagatactaggaggaaagggacttt

SEQ ID NO: 113387 - DNA, 120 bp, Artificial Sequence
  ENSG00000100320_45 (sequence is synthesized)
ggggggtggggaaggggtcgtggtgttttaaaagcataagttacctgtttgcactgttttaagataggaaaaaaaaatagtgggcaaggtgaacatcagacgtaaatttgtgtgttttta

SEQ ID NO: 113388 - DNA, 120 bp, Artificial Sequence
  ENSG00000100320_46 (sequence is synthesized)
ttttgtcatgctcttgaaaatgtttgaccatttgtagtatacacagtgaaacttgattctctgttgcataaaacactatatttttttggaaatgttactgtccaaaagcctcttccctcc

SEQ ID NO: 113389 - DNA, 120 bp, Artificial Sequence
  ENSG00000100320_47 (sequence is synthesized)
ctttccttttcctatgtacttccttcatacttgctttactgatcagccaggcaatagccatccaagagctagagcatgaaacagggccctttccaagtaggctctgggtgtcctaagcca

SEQ ID NO: 113390 - DNA, 120 bp, Artificial Sequence
  ENSG00000100320_48 (sequence is synthesized)
gcgtgtgccctctggtttagtgagtgtaatagagtccctggcacctttctttgcaaatgaggctaacagaccagactgcagcaagttatcagattcctcaatcagatgcactaggagtga

SEQ ID NO: 113391 - DNA, 120 bp, Artificial Sequence
  ENSG00000100320_49 (sequence is synthesized)
ggagcccagggatggagggggttcctgaagtattgcagttggctgtagtagctgagttcttttccatgttaccgaaactgtagccagttacagtttactcaggaaaacggtagatcaatt

SEQ ID NO: 113392 - DNA, 120 bp, Artificial Sequence
  ENSG00000100320_50 (sequence is synthesized)
cagccatggtagtgctggttggcagggattggtaacggagagaactgctcatcagccaaaactcaagccttgccttttaggaggccaccagcagagggacttggtcctccttgtctggta

SEQ ID NO: 113393 - DNA, 120 bp, Artificial Sequence
  ENSG00000100320_51 (sequence is synthesized)
cttgtgtacatgccggtgacctgaggactccactcacactggcgagcaaaaagggagcagtgattctcttttctctccccaccccctgccctttgttaccaacaccagtttcccaggggg

SEQ ID NO: 113394 - DNA, 120 bp, Artificial Sequence
  ENSG00000100320_52 (sequence is synthesized)
tacatgagtttctgaatttttaaaaaatgtttttggtttggtttttctggggactgataagtgctttaagcaatgtccataccccgtcaagactcccagcttagtcattttcttgtattt

SEQ ID NO: 113395 - DNA, 120 bp, Artificial Sequence
  ENSG00000100320_53 (sequence is synthesized)
ttctgttcacagtatttgtgtgtgtgcttgttttggcagctcattttggctgtattatatattgagtgatgaattgatcctcttttttccctaagggatatgaattgtttttcttgtgtt

SEQ ID NO: 113396 - DNA, 120 bp, Artificial Sequence
  ENSG00000100320_54 (sequence is synthesized)
atattctgcttgtgaatagctggagcaaacctggggctgacacgcgtaagctagggctgcaaagcgagaagagagccggtggagtgtacttgtccctgacaggctgacctacctgagtct

SEQ ID NO: 113397 - DNA, 120 bp, Artificial Sequence
  ENSG00000100320_55 (sequence is synthesized)
ctgagcttttcagtccaaatctttgcaaggctcaaaatgccacagaacctctcctcttctccccactccccatggcagggaccggaccatccctacatgcaacatgctgttcctccagcc

SEQ ID NO: 113398 - DNA, 120 bp, Artificial Sequence
  ENSG00000100320_56 (sequence is synthesized)
cctcccattgccatggcaaaacaggtacctttggggcatgggggcattacatgggatgcttgtgtaatcgaccacctagccttctctctcccctcccgtcctcccccagaatcacttcct

SEQ ID NO: 113399 - DNA, 120 bp, Artificial Sequence
  ENSG00000100320_57 (sequence is synthesized)
aggacacccgagctgcttgcccagggtcctgtttccctgctaactccagagaagcatcccagggctttgtgacagtctctaattcccttcccttctcgttaagaatcatattgtatagta

SEQ ID NO: 113400 - DNA, 120 bp, Artificial Sequence
  ENSG00000100320_58 (sequence is synthesized)
gctttcagaccatacagtattcattgggttactcctattattatcaagtagctggaattgtgaaggtcggagtagttagatctttagcttttattccttatttttttgtattactctcca

SEQ ID NO: 113401 - DNA, 120 bp, Artificial Sequence
  ENSG00000100320_59 (sequence is synthesized)
tgtgtataaattattgatcatgttgctggcttttataaactctaagcgaaggaggagcactgcctcagcctttgcacatggtaatgaagcactgtttttaaataaaagagagaaacacca

SEQ ID NO: 113402 - DNA, 120 bp, Artificial Sequence
  ENSG00000100320_60 (sequence is synthesized)
agaaagctgtggaggtgtgccccagcacggctgctttgaaaggtttatcatctatccgtttggtttatggagaaaaagaaaatggtaactcagggtaaccaggagccgacaacaactcct

SEQ ID NO: 113403 - DNA, 120 bp, Artificial Sequence
  ENSG00000100320_61 (sequence is synthesized)
ctgccagagaggaagagaaaagaaaggaagaaacattagaaagaaaaaggaaggaaaacggtataaagagagatcaattacccacccttaaatagctagattggggggggaggggggtgg

SEQ ID NO: 113404 - DNA, 120 bp, Artificial Sequence
  ENSG00000100320_62 (sequence is synthesized)
tcacctgagctgctgccagttcgctcttctgttcctgggtggttgggagaagagaagagggagggtattttatgctttaattaaagacagataagagagcagggtaaccaggagccgaca

SEQ ID NO: 113405 - DNA, 120 bp, Artificial Sequence
  ENSG00000100320_63 (sequence is synthesized)
atttcagtgtcaagtgtgcttgatttctttttgagttttatgttattttaaatagcaagtattcagaaaacataagctgttttcaagcctgcataaaagtatcctaattatccaccttgg

SEQ ID NO: 113406 - DNA, 120 bp, Artificial Sequence
  ENSG00000100320_64 (sequence is synthesized)
tttagattatctctaaaaataagctaccacatggccaaactttattctgatacttatatgggggtggaagggtgatgaagtaagaagcagagaaggttgagggaagagtgggacgtaaag

SEQ ID NO: 113407 - DNA, 120 bp, Artificial Sequence
  ENSG00000100320_65 (sequence is synthesized)
aacacaggatgtaggagatgacagtgctttatgagccttaaattcggcctcagctttctccgtttaaaggaaaagtgcaaagactaaataaagtgaaattctatgagaattctattctga

SEQ ID NO: 113408 - DNA, 120 bp, Artificial Sequence
  ENSG00000100320_66 (sequence is synthesized)
atagccctgctgtaactttacactagcaaacaaattctaaactaatggaaccatctctagttataatgaaaaattactagggttcattttagtgttaaaattccaactgtaattaacatt

SEQ ID NO: 113409 - DNA, 120 bp, Artificial Sequence
  ENSG00000100320_67 (sequence is synthesized)
tgctttgtttaacaaatgcttaaaaaaaaaaaaggtaaagaaatactttagttagtttaattatgttgtggccaggatttacagctttgcccagatcctggctagaattccaaggaacca

SEQ ID NO: 113410 - DNA, 120 bp, Artificial Sequence
  ENSG00000100320_68 (sequence is synthesized)
tgttgatcagaaacggcccccaagggtgcttcctgccatgttcccattcattaccatttcattgtcagtgtttggtaatattaattagagtcttcatatatctctggaagaattcgtaat

SEQ ID NO: 113411 - DNA, 120 bp, Artificial Sequence
  ENSG00000100320_69 (sequence is synthesized)
taagaaggaaatgtttactttctaagtcactcatttgaaaaacaaaggaggaataatgtataaccactgaaagccagtcagggatttttttaagtacatttgaaactaccctgacttcaa

SEQ ID NO: 113412 - DNA, 120 bp, Artificial Sequence
  ENSG00000100320_70 (sequence is synthesized)
gcagcataaacttgaagagcaggaataaatttccctcacaatgcagtttcttcatttagagaaagcataaattatataaggaagaagcaaaaggctttagaagctcataagaaattatag

SEQ ID NO: 113413 - DNA, 120 bp, Artificial Sequence
  ENSG00000100320_71 (sequence is synthesized)
gtatttctaaaataaggggtaacaaataaaagaagcaagctaggacttgccatgcaagatggttaagaagaacaggggtccccttagaaaatagttgttctcaatcccaagaaatgatac

SEQ ID NO: 113414 - DNA, 120 bp, Artificial Sequence
  ENSG00000100320_72 (sequence is synthesized)
agaagtaaatttgaaatttcttttgtagatttagaaaaatcgaacatttgaaaaaataggaagtagaaagcacagggcagaaaccttcagatatccatgagaaatgagcacattttatcc

SEQ ID NO: 113415 - DNA, 120 bp, Artificial Sequence
  ENSG00000100320_73 (sequence is synthesized)
acagaaataaaatgtttatgctattgttcactactgaaatgatgttcagttgggccagttgaacatagttgtttttgatagtgaaaggccaataataaaaatttgcatctgaattacgtt

SEQ ID NO: 113416 - DNA, 120 bp, Artificial Sequence
  ENSG00000100320_74 (sequence is synthesized)
taggtaaaatagatgaattctatttcataaataataaaaagtagagtttgccacttttaaaaatatcctgtctcatgtggcaagcatttgttgttgtgattgtctcttgaaatgctttct

SEQ ID NO: 113417 - DNA, 120 bp, Artificial Sequence
  ENSG00000100320_75 (sequence is synthesized)
tggactattggaagaaaagctcagagtctactgtaagattaatatgtaagaatctcaaaaccttttagggaaggaaaatgcagttaagtgctagaagcagggttcctgatctatttgaat

SEQ ID NO: 113418 - DNA, 120 bp, Artificial Sequence
  ENSG00000100320_76 (sequence is synthesized)
ccagccaaagaatcctcagaaatttgtaattgatttgctcaagtatgaaatgtagatctgagttggcaaactttccgtaaagggccaagtggtaaatatttttggctttgtaggacattg

SEQ ID NO: 113419 - DNA, 120 bp, Artificial Sequence
  ENSG00000100320_77 (sequence is synthesized)
gtctctgtcacaagtactttcaaaaacaggtggcaagctgcattggctcacaggccagagtttgctgacccctgatctacattgtttttccttctaaatattacctgattatcttagctt

SEQ ID NO: 113420 - DNA, 120 bp, Artificial Sequence
  ENSG00000100320_78 (sequence is synthesized)
cttggcaaacatgctaggccggatggagcagaggtttctgttacatgctgtagtctcttattaatgaatcaatccaagaacacgttagagaatctgaagtcaacacatacagatttcata

SEQ ID NO: 113421 - DNA, 120 bp, Artificial Sequence
  ENSG00000100320_79 (sequence is synthesized)
tattttaactttataatttatatttcttgtcagagtgctcccaacttgctgtaaatattttcgcttttgaaagttccaacaaagactgtgaagtaagacagattcaaaatcatatcttca

SEQ ID NO: 113422 - DNA, 120 bp, Artificial Sequence
  ENSG00000100320_80 (sequence is synthesized)
ttccttgtatttaacaggtactaccaaactttacttttaatactatcacaaattggaaagcaaatccttgcatatcgtagggcttaattttttattggaggaataataacatgcagactg

SEQ ID NO: 113423 - DNA, 120 bp, Artificial Sequence
  ENSG00000100320_81 (sequence is synthesized)
atgcagtttgaaacattttcttcccatgtgtgtgtctatgtttgtgtcagtccctgtgtctacatgtgtgtacgtctgtgtgtgggcgggtgtgtgtttttctgtacacctggggggaga

SEQ ID NO: 113424 - DNA, 120 bp, Artificial Sequence
  ENSG00000100320_82 (sequence is synthesized)
attctccagcaggcctgcttctggagttgggagatgtcagcctgctgggagggggtggggggaggaggaagaggtggggctctactctgattaattaccttaggcattcaggggtggggc

SEQ ID NO: 113425 - DNA, 120 bp, Artificial Sequence
  ENSG00000100321_0 (sequence is synthesized)
accgcgcgggtgcagccacgatggaagggggtgcgtacggagcgggcaaagccgggggcgccttcgacccctacaccctggtccggcagccgcacaccatcctgcgcgtcgtgtcttggc

SEQ ID NO: 113426 - DNA, 120 bp, Artificial Sequence
  ENSG00000100321_1 (sequence is synthesized)
tgttctccatagtggtgttcggctccatcgtgaacgagggctacctcaacagcgcctccgagggggaggagttctgcatctacaaccgcaaccccaacgcctgcagctatggcgtggccg

SEQ ID NO: 113427 - DNA, 120 bp, Artificial Sequence
  ENSG00000100321_2 (sequence is synthesized)
tgggcgtgctcgccttcctcacctgcctgctgtacctggccctggacgtgtacttcccgcagatcagcagcgtcaaggaccgcaagaaagccgtcctgtccgacatcggtgtctcggcct

SEQ ID NO: 113428 - DNA, 120 bp, Artificial Sequence
  ENSG00000100321_3 (sequence is synthesized)
tctgggctttcctctggttcgtgggattctgctacctggccaaccagtggcaggtctccaagcccaaggacaacccactgaacgaagggacggacgcagcccgggccgccatcgccttct

SEQ ID NO: 113429 - DNA, 120 bp, Artificial Sequence
  ENSG00000100321_4 (sequence is synthesized)
cctttttctccatcttcacctgggcgggccaggctgtgctggccttccagcggtaccagattggcgccgactcggccctcttctcccaggactacatggaccccagccaggactccagca

SEQ ID NO: 113430 - DNA, 120 bp, Artificial Sequence
  ENSG00000100321_5 (sequence is synthesized)
tgccttacgcgccctacgtggagcccactgggccggatcccgccggtatgggcggcacctaccagcagccggccaacaccttcgacaccgagccccagggctaccagtcgcagggctact

SEQ ID NO: 113431 - DNA, 120 bp, Artificial Sequence
  ENSG00000100321_6 (sequence is synthesized)
gagccacagtgaccgcctgcccccgcccctccccatctgtcccctctctccacacccagcccctgctcctgcccaggctgccctgcccagcgcctcatcagcctctgccttgtcccactg

SEQ ID NO: 113432 - DNA, 120 bp, Artificial Sequence
  ENSG00000100321_7 (sequence is synthesized)
aggtccagggtagctcggggcaggggtggggcagtccagtgttggggactgtctacgtatgtgcaagtatatcccagggcatgtgccccgcaggggcctagagggtgggggccaggggta

SEQ ID NO: 113433 - DNA, 120 bp, Artificial Sequence
  ENSG00000100321_8 (sequence is synthesized)
tttgcattcatacattgtgtcatcaagcattccttgagcgcctactgggcatccggcctgtgctgggcatgggtggtgacattggcagaaatggccactggaaaggggagcgatgagctg

SEQ ID NO: 113434 - DNA, 120 bp, Artificial Sequence
  ENSG00000100321_9 (sequence is synthesized)
tggaggaagccctggtggtaccagaggccagaatggtgggaaagacagatccagataatgctgggaagtgtggctacaccgtggcttggtcatagggtgagtgtaaacacccacaggaca

SEQ ID NO: 113435 - DNA, 120 bp, Artificial Sequence
  ENSG00000100321_10 (sequence is synthesized)
ctgggggctgtcaccctgctctggcagtcctgctaagagtgtcagggccgtctccattttatggttgaggaaactgaggtctagagaggtcaagattacttgcccagaatcactcaggca

SEQ ID NO: 113436 - DNA, 120 bp, Artificial Sequence
  ENSG00000100321_11 (sequence is synthesized)
gctagtgatagaggtggggccaagcccaggctgcccgactgcagaccacgtgctcttccctggccacccacctcctaccatccccacgcttggggcttccctgctcagtgttactgtcat

SEQ ID NO: 113437 - DNA, 120 bp, Artificial Sequence
  ENSG00000100321_12 (sequence is synthesized)
tctgggaggccttggggccctcagccccttgagacaccctgattctgctgcatgccaagggcctgttctgccccagctgttcctcctcccctggggacagccccacctccgggtccctcc

SEQ ID NO: 113438 - DNA, 120 bp, Artificial Sequence
  ENSG00000100321_13 (sequence is synthesized)
acccacatccccctggtcctacccctggcccttggcctcctccaagagggctcaccccgggtgctgctctgtgctctgcgtgtcccacagacgcttgttccagggggctccagcaaaccc

SEQ ID NO: 113439 - DNA, 120 bp, Artificial Sequence
  ENSG00000100321_14 (sequence is synthesized)
cttcgtggtctctcaaaggactgatcactgtccttgcctctaggaggggtcactaagcccttacctagggctgggtggacaacaaggcacagatgagggtgtgactggcccgaggtcacg

SEQ ID NO: 113440 - DNA, 120 bp, Artificial Sequence
  ENSG00000100321_15 (sequence is synthesized)
gtgagtgagtggcaaagctggccctgacgcctgggtttcttggccccagctgcccagcaggtgcctcgattccctgcccttgtgacctcccaggaaacagaactgatctgggacactatg

SEQ ID NO: 113441 - DNA, 120 bp, Artificial Sequence
  ENSG00000100321_16 (sequence is synthesized)
tcacctctcctctcatctggggtcagtcagggttcgggggctgcagcagccaagcgcatgagaggtgtttccttggccttccagaaggcccactgtggagccagcctccctatgggaggc

SEQ ID NO: 113442 - DNA, 120 bp, Artificial Sequence
  ENSG00000100321_17 (sequence is synthesized)
agagcggcaaggacagggctttggaatcagccaggtcggctcctgggctgtggccgtggagagacactgcccccaggatgacacaggcaagagcccctgaggcatgggaggcccagggaa

SEQ ID NO: 113443 - DNA, 120 bp, Artificial Sequence
  ENSG00000100321_18 (sequence is synthesized)
tgaggaggtcataatctcttctgagtgggggcaggtcgattcttgcacaaggtgggctcttcactgagccataagggacagggaggtatgggagagcgctgggggcccatccccctgtcc

SEQ ID NO: 113444 - DNA, 120 bp, Artificial Sequence
  ENSG00000100321_19 (sequence is synthesized)
acccagtgtccactggcctgtccttcagggagcagagcagagcaggtggtggacgggcccagtgctgggtgttttcaccaccatccccccatcccccatctaagaatcctaagaggcagg

SEQ ID NO: 113445 - DNA, 120 bp, Artificial Sequence
  ENSG00000100321_20 (sequence is synthesized)
cgatccctcacctgcttactcactcagcagttacccggcccctgtgctggagataccaagggcatgggtggtccctgcttcgatggccccaaagctgggccagagttaagggaaagagga

SEQ ID NO: 113446 - DNA, 120 bp, Artificial Sequence
  ENSG00000100321_21 (sequence is synthesized)
ggaagtcctaagcagagaagtagcaccattatccccatttaacagaagggaaactgaggctcggcaagcataggcgagttggcagtggaacacggatctaaactcaggtgtgtccaagtc

SEQ ID NO: 113447 - DNA, 120 bp, Artificial Sequence
  ENSG00000100321_22 (sequence is synthesized)
ctcccaaaggacagcagtgatggagaggaccccagccagctgtgtgacagctggttgttgctgacttcattttccaatccggagaaggggctctgtccacagtcccccgccgccaggtgg

SEQ ID NO: 113448 - DNA, 120 bp, Artificial Sequence
  ENSG00000100321_23 (sequence is synthesized)
cccacatgggaccagcatgggggcaggttatctgttggcctgaagagtgaaacctgtaccaggccaaaggtgagggcgtgagtgagggcaggagtgtttatggcagagtgaagttctgtg

SEQ ID NO: 113449 - DNA, 120 bp, Artificial Sequence
  ENSG00000100321_24 (sequence is synthesized)
cccaccacaagaggctgtgagatgttctgaccctcacccactgtccaccaaaagcctctcctgctgatgggcactaggagacctcagggtactgcccatctgtttctcctcgggtgccag

SEQ ID NO: 113450 - DNA, 120 bp, Artificial Sequence
  ENSG00000100321_25 (sequence is synthesized)
ccagctgctggtgatcctcagccggagggcagggtaccaggtaagcttaactccatcttgggtgtttgtgacaggccctgcctgccaccctaggcagggaaagctgtcaagactcctgcc

SEQ ID NO: 113451 - DNA, 120 bp, Artificial Sequence
  ENSG00000100321_26 (sequence is synthesized)
aggaatggggggtgctgagtcatctcacgaagaatccctcactcttcccgggttcagcccagaagcccttccaggcatgatcttccccatcaggctgggctctggcagggacctgcccag

SEQ ID NO: 113452 - DNA, 120 bp, Artificial Sequence
  ENSG00000100321_27 (sequence is synthesized)
gatggagatgagagagggtgagagatggagggcgagatttggatgggacccagggctcctgactctgccctggaaggttcatggggaaactcgctccttctgttggcagaggacagcccc

SEQ ID NO: 113453 - DNA, 120 bp, Artificial Sequence
  ENSG00000100321_28 (sequence is synthesized)
tggggaaccccaggcccaactctgtccggtatcccttttcctcccagctgccctcccctacttctcccttgctcccaaagctttccttggagaagggccctcctgcagctggaccctgca

SEQ ID NO: 113454 - DNA, 120 bp, Artificial Sequence
  ENSG00000100321_29 (sequence is synthesized)
gggtggctccctcctccccatcaagcacaagagagggcccaggaaaaaaggtttcacataagtgtagagtcgcaaggacgcttagagtcggcagagtctggggtagggagacagcgactt

SEQ ID NO: 113455 - DNA, 120 bp, Artificial Sequence
  ENSG00000100321_30 (sequence is synthesized)
gtccaaggtcaagcacagagggagaggttcaggagtcaggtcttctgccttctgagttggctcatcctgggcagtcacagactgtcctgcctgcacggctcctatccacctgggggtgtc

SEQ ID NO: 113456 - DNA, 120 bp, Artificial Sequence
  ENSG00000100321_31 (sequence is synthesized)
gcagttgaggggctaattcccaggggactgacgttagttccctactccatccttccctggtgattcttgatcttcaaagcctcggggatcccaggtttccccatgtaactgagacaccct

SEQ ID NO: 113457 - DNA, 120 bp, Artificial Sequence
  ENSG00000100321_32 (sequence is synthesized)
gcctgttagccctgggagacccctaaccttggcccaagacccctttgattctctaaggagcacgaaagggggaatgcccctcccaggagtttatgggagaagggactgggccggctgcct

SEQ ID NO: 113458 - DNA, 120 bp, Artificial Sequence
  ENSG00000100321_33 (sequence is synthesized)
cccagcgatgcacttgacctgacactccccatgtcctggtgcgcacagcccttgtcggtgccccggcccctcccgcagcgttactgcctgtgtatagtataaatatatatattttctata

SEQ ID NO: 113459 - DNA, 120 bp, Artificial Sequence
  ENSG00000100321_34 (sequence is synthesized)
tataagatgtataatataaggctccacaaatatatctgtgtgtgtgtgtgcgtgtgtgtgcggtgaagggcggtccccatcctgggcccccactctagacccccccaccacctggttaag

SEQ ID NO: 113460 - DNA, 120 bp, Artificial Sequence
  ENSG00000100321_35 (sequence is synthesized)
tctcgagtgaatccagtggccccgtggcaccctcctttatgacatccatccatctgtggtgaaccaagtgaaggtggtgacttctggtgacatagtaataaagtgaagactcagaaccca

SEQ ID NO: 113461 - DNA, 120 bp, Artificial Sequence
  ENSG00000100321_36 (sequence is synthesized)
cctgcctcggcacagccgtaggcctccccggcttgcagaggccggcagccctgtatcacccctggcagtgaggtggcaggagcagcctagtgccagaaatgtccaagatgccagggcatg

SEQ ID NO: 113462 - DNA, 120 bp, Artificial Sequence
  ENSG00000100321_37 (sequence is synthesized)
cagggcagtggaaggctggcttgaggaaccaattcaggttctccactgactcattcattccttcaccgcctccttcattgattcttcatgcgttcattcattcagtaaacatttattgag

SEQ ID NO: 113463 - DNA, 120 bp, Artificial Sequence
  ENSG00000100321_38 (sequence is synthesized)
cagctgttttgtgcctagtgatgaattaggtggggtccttggctccaggagcccacaggctggggaggagaaaacaaacacatcaatatctcttccaaatggacagccgtggacagttac

SEQ ID NO: 113464 - DNA, 120 bp, Artificial Sequence
  ENSG00000100321_39 (sequence is synthesized)
caggtaggtagcggccccatacatgggctgcctagaggcgttcatggtccccattgctgagctgtgggtgcagagcaatagcctctcccttcacagcggtgtgaagagtgacctcactgt

SEQ ID NO: 113465 - DNA, 120 bp, Artificial Sequence
  ENSG00000100321_40 (sequence is synthesized)
ccttagggttagcatcctggccgaggatgtcacagggctcctggtctggctctgtcctcatgtgctatgtgaccctgacaaacccgtgcacctctctcagcctcagtccacttacctgaa

SEQ ID NO: 113466 - DNA, 120 bp, Artificial Sequence
  ENSG00000100321_41 (sequence is synthesized)
ctgaggggtgataatggaccaacctctcaaggctgttgtgccaatgaaacaaaggccagcccagggcttagcacaagcatgctcaataaatgtaagctcttttgttcattcattcattca

SEQ ID NO: 113467 - DNA, 120 bp, Artificial Sequence
  ENSG00000100321_42 (sequence is synthesized)
gtaccccctgcacagagtctacagagggctgtcccggccataggaggcggctgccacccttcttcccatgtttcagatgaggaaatgaggtgcaggcgggtgaagggatggactcagggt

SEQ ID NO: 113468 - DNA, 120 bp, Artificial Sequence
  ENSG00000100321_43 (sequence is synthesized)
cacatggctggcagcaggaaggatgggaccaggacagggcctgggaccccaaaataacccatgctgcccacaggcaggggagcgtggatgggattctagttccttctagtctaagggacc

SEQ ID NO: 113469 - DNA, 120 bp, Artificial Sequence
  ENSG00000100321_44 (sequence is synthesized)
catggatggcactgggcatgtgccagcccccatgggttggcccgtgtttcagtggcctcttctgtgccacctccctggggcagcctcatgaggactaagcaaggcggtgactgggtgccc

SEQ ID NO: 113470 - DNA, 120 bp, Artificial Sequence
  ENSG00000100321_45 (sequence is synthesized)
agtgcacagcaggggccctggagcctcagcctccccacgcctcccagccagaccttggcaggaccagggcctggacctgtggagccaacctgacctgctgccctttgcccttcagaagca

SEQ ID NO: 113471 - DNA, 120 bp, Artificial Sequence
  ENSG00000100321_46 (sequence is synthesized)
gcctttggcagaggcaccctgacctctgctccgtgacttccaggaatctgattggtggatgctctcagtcaggggtccgaacccgaggcttcagcctcgctgttctgaggcttgggtccc

SEQ ID NO: 113472 - DNA, 120 bp, Artificial Sequence
  ENSG00000100321_47 (sequence is synthesized)
ttagaaggaactagaactaaatgaatggttctcaaacttccacagagcctcagggttccctggcagtgcctctgggaggtgggctgggccccaggtgggcaccccacctgcttggcagat

SEQ ID NO: 113473 - DNA, 120 bp, Artificial Sequence
  ENSG00000100321_48 (sequence is synthesized)
gcacgccttgtcctgagcaggtctgggcttctctggggagaccttggcactcacaggagattgcgtggctatgaggctcccactgctgacgcccccaggctcggctctcagtgggcccct

SEQ ID NO: 113474 - DNA, 120 bp, Artificial Sequence
  ENSG00000100321_49 (sequence is synthesized)
cgctaaacctggggctctgtggggtcgcagcacgttagaagtcgaagcccagacccacccagccaagctgccatccttgccccagcctcgtcctccttcccatacctcatttgtctggca

SEQ ID NO: 113475 - DNA, 120 bp, Artificial Sequence
  ENSG00000100321_50 (sequence is synthesized)
gcctgagggttggggtcttcctgcctgcagagttgcaggcatcaggggtggaccgggggggcccacgtcagcggtgtggctggacatgggggtttggcagaggctgcagaaatgcggcct

SEQ ID NO: 113476 - DNA, 120 bp, Artificial Sequence
  ENSG00000100321_51 (sequence is synthesized)
gagttgattaccttctttctctgtctctccctccatcctcccctctcactgcccgtggctctcctctgactggccctgaccctgccctgtctgtggcctcctcccccctgcatctggctg

SEQ ID NO: 113477 - DNA, 120 bp, Artificial Sequence
  ENSG00000100321_52 (sequence is synthesized)
gcttccctcttctcgcctgcatcttctcttggctcccctctctcttcccctaccccctttgcctgtccctttgggggtgggggagcatgggagatgcactcttgaatgtccctctgttcc

SEQ ID NO: 113478 - DNA, 120 bp, Artificial Sequence
  ENSG00000100321_53 (sequence is synthesized)
ccagcaggcatgcctccttggtctcatgttgaccttagagtttgggattctggaattcgatccttcatggataggcagctggacacagaggtcgtgggtgagctggaggagcaggcccgg

SEQ ID NO: 113479 - DNA, 120 bp, Artificial Sequence
  ENSG00000100324_0 (sequence is synthesized)
gctcccgcaggggttcctccaagatggcggcgcagaggaggagcttgctgcagagtgagcagcagccaagctggacagatgacctgcctctctgccacctctctggggttggctcagcct

SEQ ID NO: 113480 - DNA, 120 bp, Artificial Sequence
  ENSG00000100324_1 (sequence is synthesized)
ccaaccgcagctactctgctgatggcaagggcactgagagccacccgccagaggacagctggctcaagttcaggagtgagaacaactgcttcctgtatggggtcttcaacggctatgatg

SEQ ID NO: 113481 - DNA, 120 bp, Artificial Sequence
  ENSG00000100324_2 (sequence is synthesized)
gcaaccgagtgaccaacttcgtggcccagcggctgtccgcagagctcctgctgggccagctgaatgccgagcacgccgaggccgatgtgcggcgtgtgctgctgcaggccttcgatgtgg

SEQ ID NO: 113482 - DNA, 120 bp, Artificial Sequence
  ENSG00000100324_3 (sequence is synthesized)
tggagaggagcttcctggagtccattgacgacgccttggctgagaaggcaagcctccagtcgcaattgccagagggagtccctcagcaccagctgcctcctcagtatcagaagatccttg

SEQ ID NO: 113483 - DNA, 120 bp, Artificial Sequence
  ENSG00000100324_4 (sequence is synthesized)
agagactcaagacgttagagagggaaatttcgggaggggccatggccgttgtggcggtccttctcaacaacaagctctacgtcgccaatgtcggtacaaaccgtgcacttttatgcaaat

SEQ ID NO: 113484 - DNA, 120 bp, Artificial Sequence
  ENSG00000100324_5 (sequence is synthesized)
cgacagtggatgggttgcaggtgacacagctgaacgtggaccacaccacagagaacgaggatgagctcttccgtctttcgcagctgggcttggatgctggaaagatcaagcaggtgggga

SEQ ID NO: 113485 - DNA, 120 bp, Artificial Sequence
  ENSG00000100324_6 (sequence is synthesized)
tcatctgtgggcaggagagcacccggcggatcggggattacaaggttaaatatggctacacggacattgaccttctcagcgctgccaagtccaaaccaatcatcgcagagccagaaatcc

SEQ ID NO: 113486 - DNA, 120 bp, Artificial Sequence
  ENSG00000100324_7 (sequence is synthesized)
atggggcacagccgctggatggggtgacgggcttcttggtgctgatgtcggaggggttgtacaaggccctagaggcagcccatgggcctgggcaggccaaccaggagattgctgcgatga

SEQ ID NO: 113487 - DNA, 120 bp, Artificial Sequence
  ENSG00000100324_8 (sequence is synthesized)
ttgacactgagtttgccaagcagacctccctggacgcagtggcccaggccgtcgtggaccgggtgaagcgcatccacagcgacaccttcgccagtggtggggagcgtgccaggttctgcc

SEQ ID NO: 113488 - DNA, 120 bp, Artificial Sequence
  ENSG00000100324_9 (sequence is synthesized)
cccggcacgaggacatgaccctgctagtgaggaactttggctacccgctgggcgaaatgagccagcccacaccgagcccagccccagctgcaggaggacgagtgtaccctgtgtctgtgc

SEQ ID NO: 113489 - DNA, 120 bp, Artificial Sequence
  ENSG00000100324_10 (sequence is synthesized)
catactccagcgcccagagcaccagcaagaccagcgtgaccctctcccttgtcatgccctcccagggccagatggtcaacggggctcacagtgcttccaccctggacgaagccaccccca

SEQ ID NO: 113490 - DNA, 120 bp, Artificial Sequence
  ENSG00000100324_11 (sequence is synthesized)
ccctcaccaaccaaagcccgaccttaaccctgcagtccaccaacacgcacacgcagagcagcagctccagctctgacggaggcctcttccgctcccggcccgcccactcgctcccgcctg

SEQ ID NO: 113491 - DNA, 120 bp, Artificial Sequence
  ENSG00000100324_12 (sequence is synthesized)
gcgaggacggtcgtgttgagccctatgtggactttgctgagttttaccgcctctggagcgtggaccatggcgagcagagcgtggtgacagcaccgtagggcagccggagaatgcagccca

SEQ ID NO: 113492 - DNA, 120 bp, Artificial Sequence
  ENSG00000100324_13 (sequence is synthesized)
ccatcctctgcccacagcagactctgtcccatggctctccgggcagtagagtgtgtgagtgcagactggacctgtggttcataccttgtcaccacccgggaagctgaaggccacttcctc

SEQ ID NO: 113493 - DNA, 120 bp, Artificial Sequence
  ENSG00000100324_14 (sequence is synthesized)
ccagatggcctcagccaggaccatcgccctttctcagagcagagggccaggtatagaaaccgcagtgggcctgcaagccgcccgagcctccccagcagcctcctacagagcaggaagagg

SEQ ID NO: 113494 - DNA, 120 bp, Artificial Sequence
  ENSG00000100324_15 (sequence is synthesized)
cgccctgtgaaccctgagtgttgcaggcccagcagaccctgctgtcccaagcccacccctcctcccaccatcacctccctcacctcgggacagtagccctccacttctccagcctctcag

SEQ ID NO: 113495 - DNA, 120 bp, Artificial Sequence
  ENSG00000100324_16 (sequence is synthesized)
ccctgtgctcctgcatccagagtggaacccaggctggtgtccgcatctgtccctgggccccacccctggacctgccttggttgtgtcatctgttgtaaacgttcaggaggaccagggcag

SEQ ID NO: 113496 - DNA, 120 bp, Artificial Sequence
  ENSG00000100324_17 (sequence is synthesized)
catctggggcctgggatggccacagaaggggcaggccaggtggaaaggagccagggggaagtggtctaagagacctggaactgccagaggatggcggcctgggcttccccagagccaggc

SEQ ID NO: 113497 - DNA, 120 bp, Artificial Sequence
  ENSG00000100324_18 (sequence is synthesized)
gtgcgggagaggtgaggactggccccggtgggctgaggcaggggccgctgtcgtcaggcctgagccagggtgagctggtgcctgccttgcattttccttctggtgctgtgaagaccatag

SEQ ID NO: 113498 - DNA, 120 bp, Artificial Sequence
  ENSG00000100324_19 (sequence is synthesized)
gctggcaggcagctgagatgaactgtctttaccactgatgaggggcctctgccggctgagggtagcaagcaggggttgtgagtcaggctgggggacttgtttgaaagaaagaggagtgga

SEQ ID NO: 113499 - DNA, 120 bp, Artificial Sequence
  ENSG00000100324_20 (sequence is synthesized)
aaatggttccaggagggaagaggttctttgagacacagtaccctgggaggcataggagaagggtcgggccagcccagcccagggcctgagttagactatttcccacatgttctctgcctt

SEQ ID NO: 113500 - DNA, 120 bp, Artificial Sequence
  ENSG00000100324_21 (sequence is synthesized)
cagtggggagggggtgccaccagggctgtcggccaggattgccactcctgtttcagaggaagcaggccgagagacttgcaccttggccaagccacacaatcagtggggcagccagagctc

SEQ ID NO: 113501 - DNA, 120 bp, Artificial Sequence
  ENSG00000100324_22 (sequence is synthesized)
agacctgagccattttgtcagtatccaggaccccccggattctccacgccctccccatctcccagtctccctgccccccatgccccagaccggcccaccagggactagccgctgtcgcac

SEQ ID NO: 113502 - DNA, 120 bp, Artificial Sequence
  ENSG00000100324_23 (sequence is synthesized)
agcctctggggtgcttggtctctgcgaagtcaaaggcctgacagctctgtggcctgggaatccattttcctgcggcagagcagggcctggtgtggaaccagggagctgtgggaagccaca

SEQ ID NO: 113503 - DNA, 120 bp, Artificial Sequence
  ENSG00000100324_24 (sequence is synthesized)
gcagaaatggaagaaaaacaggtctcagcccagggtcctcgctcactccctcactccccactttgaagccatctctgttctgcaggtgagaggatttaaagtcagtcacaaaggcttggg

SEQ ID NO: 113504 - DNA, 120 bp, Artificial Sequence
  ENSG00000100324_25 (sequence is synthesized)
aacaaaaggaattctcttccaagaatgcctctgtggtgctgtttggtctctagaaacagggtcacttttttaatgtagtaaagaagtaataaatggtggcattacacattgtgatattaa

SEQ ID NO: 113505 - DNA, 120 bp, Artificial Sequence
  ENSG00000100324_26 (sequence is synthesized)
ataacggctcactcctggaggtcattgctgcgccttacatttgggaatggtggagtctcagttttcctgggaaacaagtttgtagactagccataaaaacagcaaacccttctgcaggtg

SEQ ID NO: 113506 - DNA, 120 bp, Artificial Sequence
  ENSG00000100324_27 (sequence is synthesized)
tctgttcatacaaacattattgttttccagaaggaagtggaaccctctgtgtagggctgcgggcctgctaggtttttgttgcagaaggaataggtgaagtggggactaccctgcagacgc

SEQ ID NO: 113507 - DNA, 120 bp, Artificial Sequence
  ENSG00000100324_28 (sequence is synthesized)
cattctgggcatagattcctcccctcagcagaatcagcatccacctgcgggctgttccaagcaaagctcttccttccactctctccccatagcgctgccaagtccaaaccaatcatcgca

SEQ ID NO: 113508 - DNA, 120 bp, Artificial Sequence
  ENSG00000100324_29 (sequence is synthesized)
agtgcatctgcttaggaacaaagccactctctgtctggtgtggtcagagggtcccggatgtccccccctccactctgctgggcaggggctgtgcctgcggagcttccttccaggatctgt

SEQ ID NO: 113509 - DNA, 120 bp, Artificial Sequence
  ENSG00000100324_30 (sequence is synthesized)
ccttctcagcttccccagccgagccgccaggggtcctgaggaccaccatggcccctgaacactcctggagctttggtgtcagccctgccacccgagagagagagagagacatgagaccct

SEQ ID NO: 113510 - DNA, 120 bp, Artificial Sequence
  ENSG00000100324_31 (sequence is synthesized)
tccaggcctgcaagcgatttgacagccatccctcagtgccaactaaacctcctgggcagcctgaccccagggtaggaaggaagcgcctacaccaaggggccctctgggagctgagatcat

SEQ ID NO: 113511 - DNA, 120 bp, Artificial Sequence
  ENSG00000100324_32 (sequence is synthesized)
agaccccctccctcatgcatctgtgtccactgaggcttccctcacctagaatggcccatccttcaggacccagctcactctcatcttctttccagggacttatcccccaaggctgtcctc

SEQ ID NO: 113512 - DNA, 120 bp, Artificial Sequence
  ENSG00000100324_33 (sequence is synthesized)
tgttctggtgagctcagggctcttggaacttggtctgcagtgactctggggttcctggttaggacccatgttctctaggtcccagcaccctgcacggggcagtgtttgtgacactgggcc

SEQ ID NO: 113513 - DNA, 120 bp, Artificial Sequence
  ENSG00000100324_34 (sequence is synthesized)
cagctattctgagagaaggactccaaccttccatcaggtgtggcccgagatgtgggtggccctgggcatggggcatggatgcattgtgactttcatgggcctcttctgcaaaaaaaaaat

SEQ ID NO: 113514 - DNA, 120 bp, Artificial Sequence
  ENSG00000100325_0 (sequence is synthesized)
agtttgaccccggaagtgcgggcgctcagggagctgtcaccgtggtcggcggcggcggcggcggcggcggcacagagccggtggtggagccgccgaggagggtcacgcagcacaatgcca

SEQ ID NO: 113515 - DNA, 120 bp, Artificial Sequence
  ENSG00000100325_1 (sequence is synthesized)
gctctgcccctggaccaactccagatcacccacaaggacccgaagacaggaaagctgaggacttcaccagcgctgcaccccgagcagaaggcagaccggtattttgtgttatacaaaccg

SEQ ID NO: 113516 - DNA, 120 bp, Artificial Sequence
  ENSG00000100325_2 (sequence is synthesized)
ccccctaaagacaacattcccgccctagtggaggagtacctggaacgcgccaccttcgtagccaatgacctcgactggctcctggccttgcctcacgataaattctggtgccaggtgatc

SEQ ID NO: 113517 - DNA, 120 bp, Artificial Sequence
  ENSG00000100325_3 (sequence is synthesized)
tttgacgagactctacagaagtgcctggactcctacctgcgctatgtcccccgcaaattcgacgagggggtggcctcagcccctgaggttgttgacatgcagaagcgcctccatcgaagt

SEQ ID NO: 113518 - DNA, 120 bp, Artificial Sequence
  ENSG00000100325_4 (sequence is synthesized)
gtttttctcaccttcctccgcatgtccactcacaaggaatccaaagatcacttcatttccccttctgcgtttggagaaatcctctacaataacttcctctttgacattccaaagatcctg

SEQ ID NO: 113519 - DNA, 120 bp, Artificial Sequence
  ENSG00000100325_5 (sequence is synthesized)
gacctctgcgtgctctttggaaaaggcaactcaccactgctccagaagatgataggaaacatctttacacagcagccaagttactacagtgacctggatgaaaccctgcctaccatcctt

SEQ ID NO: 113520 - DNA, 120 bp, Artificial Sequence
  ENSG00000100325_6 (sequence is synthesized)
caggtcttcagcaatatcctccagcactgtggtttgcaaggggacggggccaataccacaccccagaagcttgaggagaggggccgattgacccccagtgacatgcctctcctggaatta

SEQ ID NO: 113521 - DNA, 120 bp, Artificial Sequence
  ENSG00000100325_7 (sequence is synthesized)
aaggacattgttctctacctttgtgatacctgcaccacactttgggcctttctggatatcttccctttggcttgccagaccttccagaagcacgacttttgttacagactagcttccttc

SEQ ID NO: 113522 - DNA, 120 bp, Artificial Sequence
  ENSG00000100325_8 (sequence is synthesized)
tacgaagcagcaattcccgaaatggagtctgcaattaagaagaggaggcttgaagatagcaagcttcttggtgacctgtggcagaggctctcccattccaggaagaagctaatggagatt

SEQ ID NO: 113523 - DNA, 120 bp, Artificial Sequence
  ENSG00000100325_9 (sequence is synthesized)
ttccacatcatcctgaaccagatctgcctccttcccatcctagaaagcagctgtgacaacattcagggcttcatcgaagagttccttcagatcttcagctccttgctgcaggagaagagg

SEQ ID NO: 113524 - DNA, 120 bp, Artificial Sequence
  ENSG00000100325_10 (sequence is synthesized)
ttcctccgggactatgatgcactcttccccgtggccgaagacatcagcttgctgcagcaggcctcatcagtcttggacgagacgcggactgcctacatcctccaggcagtcgagagtgca

SEQ ID NO: 113525 - DNA, 120 bp, Artificial Sequence
  ENSG00000100325_11 (sequence is synthesized)
gatgctaaagacccatcggtgattgaggagcctaatggggagcctaacggggtcacggtgacagcagaggcagtcagtcaagcatcatcacatccggagaactcggaggaagaggagtgc

SEQ ID NO: 113526 - DNA, 120 bp, Artificial Sequence
  ENSG00000100325_12 (sequence is synthesized)
atgggagcagccgcggctgtgggccctgccatgtgtggggtggaactggactctctcatctcccaagtgaaggacctgctgccagaccttggtgagggcttcatcctggcctgcctggag

SEQ ID NO: 113527 - DNA, 120 bp, Artificial Sequence
  ENSG00000100325_13 (sequence is synthesized)
tactaccactacgacccagagcaggtgatcaacaatatcctggaggagcggctggcccccaccctcagccagctggaccgcaacctagacagagaaatgaaaccagaccctacacccctg

SEQ ID NO: 113528 - DNA, 120 bp, Artificial Sequence
  ENSG00000100325_14 (sequence is synthesized)
ctgacgtctcgccacaacgtcttccagaatgacgagtttgatgtgttcagcagggactcagtagacctgagccgggtgcacaagggcaagagcaccaggaaggaggaaaacacgcggagt

SEQ ID NO: 113529 - DNA, 120 bp, Artificial Sequence
  ENSG00000100325_15 (sequence is synthesized)
ttgctgaacgacaagcgtgcagtggcggcacagcggcagcgctacgagcagtacagcgtggtggtggaggaggtgccactgcagccaggcgagagcctgccctaccacagtgtctactac

SEQ ID NO: 113530 - DNA, 120 bp, Artificial Sequence
  ENSG00000100325_16 (sequence is synthesized)
gaggatgagtacgatgacacatacgatggcaaccaggtgggcgccaatgatgcagactctgatgacgagctcatcagccgcaggccattcaccatccctcaggtgctgagaaccaaagtg

SEQ ID NO: 113531 - DNA, 120 bp, Artificial Sequence
  ENSG00000100325_17 (sequence is synthesized)
cctagagaagggcaggaggaggatgacgacgatgaggaagacgatgctgacgaggaggctcccaagcccgaccattttgttcaggaccctgcagtgctgagagagaaggcagaagccagg

SEQ ID NO: 113532 - DNA, 120 bp, Artificial Sequence
  ENSG00000100325_18 (sequence is synthesized)
cgcatggcctttctcgccaagaaagggtaccggcatgacagctcaacagcagtggccggcagcccccgaggccatgggcagagccgcgagacaacccaggaacgcaggaagaaggaagcc

SEQ ID NO: 113533 - DNA, 120 bp, Artificial Sequence
  ENSG00000100325_19 (sequence is synthesized)
aacaaggcgacaagagccaaccacaaccggagaaccatggccgaccgcaagaggagcaaaggcatgatcccatcctgagacctggtgcagggccagtggggaggcagcggcaccagactc

SEQ ID NO: 113534 - DNA, 120 bp, Artificial Sequence
  ENSG00000100325_20 (sequence is synthesized)
accaggccgtgctcccatcgcctggggcctcctcactaggggccccaagttcaactcaacccctcaacagcctcagctttgcagcccctgagaaggccgcctctcatctaccagccagcc

SEQ ID NO: 113535 - DNA, 120 bp, Artificial Sequence
  ENSG00000100325_21 (sequence is synthesized)
atgagcgccttcctgcagaacacacagtgccttatgccacagccgaagaatccgtggggccggcaagcaggcaccttcccccagctgcgctagcgggaaagagatggggatggagtccca

SEQ ID NO: 113536 - DNA, 120 bp, Artificial Sequence
  ENSG00000100325_22 (sequence is synthesized)
aggcaagcgccccaaacctcgggccacaagacaccacttcccctttaccctggacagcaggaaacctgtatattcaaaaacacaaaaagtcctgctaataaaatttttgaccctttcaaa

SEQ ID NO: 113537 - DNA, 120 bp, Artificial Sequence
  ENSG00000100325_23 (sequence is synthesized)
gcagtttgaccccggaagtgcgggcgctcagggagctgtcaccgtggtcggcggcggcggcggcggcggcggcacagagccggtggtggagccgccgaggccacctcgtgtatgcagaga

SEQ ID NO: 113538 - DNA, 120 bp, Artificial Sequence
  ENSG00000100325_24 (sequence is synthesized)
ccccctgctccaatccaggaagcctgattgcaccaggaaggaggaaaacacgcggagtttgctgaacgacaagcgtgcagtggcggcacagcggcagcgctacgagcagtacagcgtggt

SEQ ID NO: 113539 - DNA, 120 bp, Artificial Sequence
  ENSG00000100325_25 (sequence is synthesized)
gtgtgtctgatctgctgggatcctagagctggaacaggccaagtgatattgtgaaaagaacactggacagcaagacaggagaccttggatctgccactcactgactgtgaggagggtcac

SEQ ID NO: 113540 - DNA, 120 bp, Artificial Sequence
  ENSG00000100325_26 (sequence is synthesized)
gtacagcgtggtggtggaggaggtaggccaccaaggccaggtctctgctgggccagggaaaccaggccagcccctgagccccccagacccatgcttatgccattgcaggtgccactgcag

SEQ ID NO: 113541 - DNA, 120 bp, Artificial Sequence
  ENSG00000100325_27 (sequence is synthesized)
aaaaaaaagaaaaaagacaaagccttgctctgtcactcaggcaagagtgcagtggcgcaatcatatttcactgcagcttcacattcctggagtaaagctatccccccaactcagcctccc

SEQ ID NO: 113542 - DNA, 120 bp, Artificial Sequence
  ENSG00000100325_28 (sequence is synthesized)
atgtgtgtctgatctgctgggatcctagagctggaacaggtgtcaaggactaggcagactggtcctctcttattactccttctagggtggggatcttcacagtctttataacaggccaga

SEQ ID NO: 113543 - DNA, 120 bp, Artificial Sequence
  ENSG00000100325_29 (sequence is synthesized)
ctggccagtctctattatcaagactactcagactctcctctagaagtgctttgactttcactccaccccttcaccccgtctcacccctaagtttaactaaactagacacagtatagtgaa

SEQ ID NO: 113544 - DNA, 120 bp, Artificial Sequence
  ENSG00000100325_30 (sequence is synthesized)
tagttaagaaccagcctgcttcaccacccactaactgtgagaccttgggcaagtttcttattttctgtgagcctctgttttgtcactgataaaatgaggataataatagaactaacctta

SEQ ID NO: 113545 - DNA, 120 bp, Artificial Sequence
  ENSG00000100325_31 (sequence is synthesized)
aaaagaggcagctgcagtttcacttgccagggcaacagggcaatatattccacatgcagtgcatctagttctggaaaggaagaattcccatgagtgagcatgatcaggaagtgcatggga

SEQ ID NO: 113546 - DNA, 120 bp, Artificial Sequence
  ENSG00000100325_32 (sequence is synthesized)
ggagatgggcctggaatgctgcatggaggaggaggagaatgaggagaaagaagagaagagcagtggccagcattagcctgagaggaagccagagggctgtgggagtgctgatctctggaa

SEQ ID NO: 113547 - DNA, 120 bp, Artificial Sequence
  ENSG00000100325_33 (sequence is synthesized)
tatgctcgaacctacgcactcacagcggcagcacttggagaatagtaaacacttggagacaagcttcatcttataggaacaattgcaagaaacatctttacacagcagccaagttactac

SEQ ID NO: 113548 - DNA, 120 bp, Artificial Sequence
  ENSG00000100325_34 (sequence is synthesized)
aattgcaagaaacatctttacacagcagccaagttactacagtgacctggatgaaaccctgcctaccatccttcagggtcctgctctgtcaccgaggctagagtgcagtggcacaatcat

SEQ ID NO: 113549 - DNA, 120 bp, Artificial Sequence
  ENSG00000100325_35 (sequence is synthesized)
ggacccgaagacaggaaagctgaggacttcaccagcgctgatttgtacctgtaactccatgatacaaatttgatttaaatgggagggggtcctgcagacccacatgagaggtggccttga

SEQ ID NO: 113550 - DNA, 120 bp, Artificial Sequence
  ENSG00000100325_36 (sequence is synthesized)
agtttgaccccggaagtgcgggcgctcagggagctgtcaccgtggtcggcggcggcggcggcggcggcggcacagagccggtggtggagccgccgaggttatcatcatctctttctggtc

SEQ ID NO: 113551 - DNA, 120 bp, Artificial Sequence
  ENSG00000100325_37 (sequence is synthesized)
cgtgctctttggaaaaggcaactcaccactgctccagaagatgataggtgtgtaggatgcaggactgggaggatgcaccaagatggcccccacatgccaaactaaaggttgcaaaggcca

SEQ ID NO: 113552 - DNA, 120 bp, Artificial Sequence
  ENSG00000100325_38 (sequence is synthesized)
gcgctttgacagtgcccagggactcagggcgataggggcagggagtcttgggaaattgcttaacagatatatgagtgtcacctcaaaatgactaggtagtgacactacctagggaggtgg

SEQ ID NO: 113553 - DNA, 120 bp, Artificial Sequence
  ENSG00000100325_39 (sequence is synthesized)
gaaatatatcagaagtcatctggggaagtatttcttctacaattgagaactgctttatgcaaaaaaagtcactttggctgggttagtaggtgcatgaaccaggtcctgaaccacaacagg

SEQ ID NO: 113554 - DNA, 120 bp, Artificial Sequence
  ENSG00000100325_40 (sequence is synthesized)
agcctcctaaggcgagaggttgaagcttctcttctgactctgggatcagccccagagcaggccctgcccccaggagtctgtgtgtctgctctcttcttcccatccatattcctttcagga

SEQ ID NO: 113555 - DNA, 120 bp, Artificial Sequence
  ENSG00000100325_41 (sequence is synthesized)
gaaaactatgctctggtttttcttcataacaaataaatcttttgccttttactaaaaaaggaaaatgaaaactgattatattaaacagagagttttgtatcctgctttctcttcccttaa

SEQ ID NO: 113556 - DNA, 120 bp, Artificial Sequence
  ENSG00000100325_42 (sequence is synthesized)
cctttccccgtgtcattaaatccactccgaaaacatggattttaattaccgcctagtgttcgctgaatgcaaccatgccctctttgttagatacacttggttctttatgcttaaaagctc

SEQ ID NO: 113557 - DNA, 120 bp, Artificial Sequence
  ENSG00000100330_0 (sequence is synthesized)
ggctcggcgtcgggagcgcgctctgtgtggccgctgccgccatgttgttgtggttgtgagaaggcggcggcggcggcggagtagcagccggacgagacgtcccagcggctcaggcgctgc

SEQ ID NO: 113558 - DNA, 120 bp, Artificial Sequence
  ENSG00000100330_1 (sequence is synthesized)
ccagcgccggccctggcagggagcctggtggggtggcggagggggagactgtgccgtggagggcctcgccatgtcctgctgcccgacttccttgtgaaacctcctagtagaaaaagttct

SEQ ID NO: 113559 - DNA, 120 bp, Artificial Sequence
  ENSG00000100330_2 (sequence is synthesized)
tgggacaaacttcatttgacttcaccataagggaaagaagagagccttgttggacactgaagaagggacggggatttctcctcctaatctgggcctcttgtcatggatgaagagactcgg

SEQ ID NO: 113560 - DNA, 120 bp, Artificial Sequence
  ENSG00000100330_3 (sequence is synthesized)
cacagccttgagtgcatccaggccaatcagatctttcccaggaagcagctgatccgggaggatgagaatcttcaggttcctttccttgaacttcatggagagagcacagagtttgtgggc

SEQ ID NO: 113561 - DNA, 120 bp, Artificial Sequence
  ENSG00000100330_4 (sequence is synthesized)
cgtgccgaggatgccatcattgccctttccaattacagacttcacatcaagttcaaggagtctcttgttaatgttccattacagcttatagaaagtgttgaatgccgagatatatttcag

SEQ ID NO: 113562 - DNA, 120 bp, Artificial Sequence
  ENSG00000100330_5 (sequence is synthesized)
cttcatttgacttgcaaagactgcaaagttatcaggtgtcagttttcaacctttgagcagtgtcaagagtggctgaagagactgaacaacgcaatccgaccacctgctaaaatagaagat

SEQ ID NO: 113563 - DNA, 120 bp, Artificial Sequence
  ENSG00000100330_6 (sequence is synthesized)
ctcttctcatttgcataccatgcttggtgcatggaggtctatgccagtgaaaaagagcaacatggagacctgtgcagaccaggggagcatgtaacttcaaggtttaaaaacgaggtggag

SEQ ID NO: 113564 - DNA, 120 bp, Artificial Sequence
  ENSG00000100330_7 (sequence is synthesized)
aggatgggttttgatatgaacaacgcctggaggatttccaacatcaatgagaagtacaaattatgtggtagctatcctcaagagctcatagtgcctgcctggatcactgacaaagaactg

SEQ ID NO: 113565 - DNA, 120 bp, Artificial Sequence
  ENSG00000100330_8 (sequence is synthesized)
gaaagtgtatcaagtttcaggtcctggaagcgcatccctgccgtcatctacaggcaccagagcaatggagctgtcattgcccgctgtggacagccagaggttagctggtggggctggcga

SEQ ID NO: 113566 - DNA, 120 bp, Artificial Sequence
  ENSG00000100330_9 (sequence is synthesized)
aatgcagatgatgagcatctggtacagtcagtagccaaagcttgtgcctctgactcccgatcgagtggcagcaagctgtcaactaggaacacttctcgagactttcccaatgggggagac

SEQ ID NO: 113567 - DNA, 120 bp, Artificial Sequence
  ENSG00000100330_10 (sequence is synthesized)
ctttctgacgtggagttcgattcttctctgtcaaatgcttcaggagcagagagtttagccatccaaccgcagaagcttttgatcttggatgcacgctcctatgcagctgctgtggcaaac

SEQ ID NO: 113568 - DNA, 120 bp, Artificial Sequence
  ENSG00000100330_11 (sequence is synthesized)
cgagccaaaggaggaggctgcgaatgcccagagtattacccaaactgtgaagttgtgtttatggggatggcaaacattcattctattcggaggagttttcagtctctgcggttgctgtgc

SEQ ID NO: 113569 - DNA, 120 bp, Artificial Sequence
  ENSG00000100330_12 (sequence is synthesized)
actcagatgccagatccgggaaattggctatcagctcttgaaagcacaaaatggctccatcacttgtctgtgcttctgaaatcagcgcttctggtagtgcatgctgtggatcaggatcag

SEQ ID NO: 113570 - DNA, 120 bp, Artificial Sequence
  ENSG00000100330_13 (sequence is synthesized)
cggccggtgctagtacactgctcagatggctgggaccgcaccccccagattgtggcattggctaagctcttgctggacccttattaccgaaccatagagggtttccaggtcctcgtggaa

SEQ ID NO: 113571 - DNA, 120 bp, Artificial Sequence
  ENSG00000100330_14 (sequence is synthesized)
atggagtggctggattttggccataaatttgctgaccggtgtggtcatggggagaactcggatgatctgaatgaacgttgcccagtgtttctgcagtggcttgactgtgttcatcagctt

SEQ ID NO: 113572 - DNA, 120 bp, Artificial Sequence
  ENSG00000100330_15 (sequence is synthesized)
cagaggcaatttccttgctcttttgagttcaatgaagcattccttgtgaaactggtgcagcatacctattcctgcctgtttggaacattcctgtgcaacaacgccaaggagagaggggaa

SEQ ID NO: 113573 - DNA, 120 bp, Artificial Sequence
  ENSG00000100330_16 (sequence is synthesized)
aagcatactcaggaacggacatgttccgtgtggtcacttcttcgggcaggcaacaaggctttcaaaaacctactgtattcctctcagtcagaagccgtgctgtaccctgtgtgccatgtg

SEQ ID NO: 113574 - DNA, 120 bp, Artificial Sequence
  ENSG00000100330_17 (sequence is synthesized)
cgtaacctgatgctgtggagtgcagtgtacctgccctgcccatccccaaccacccctgtggacgacagctgtgcaccatacccagccccaggcaccagccctgatgatccccccctgagc

SEQ ID NO: 113575 - DNA, 120 bp, Artificial Sequence
  ENSG00000100330_18 (sequence is synthesized)
cggctaccaaagactagatcatacgacaatctgaccacagcctgtgacaacacagtgcctctggccagccggcgctgcagcgaccccagcctgaacgagaagtggcaggagcaccggcgc

SEQ ID NO: 113576 - DNA, 120 bp, Artificial Sequence
  ENSG00000100330_19 (sequence is synthesized)
tcactagagctgagcagcctggctggccctggagaggatcccctttctgccgacagcctagggaagcccaccagagtgccggggggtgccgagctttctgttgcagccggagtagctgag

SEQ ID NO: 113577 - DNA, 120 bp, Artificial Sequence
  ENSG00000100330_20 (sequence is synthesized)
gggcagatggagaacatcttgcaggaggccaccaaagaggagagtggagtagaggaacctgcccacagggcaggcattgagatacaggagggtaaagaggaccctctcttagaaaaggag

SEQ ID NO: 113578 - DNA, 120 bp, Artificial Sequence
  ENSG00000100330_21 (sequence is synthesized)
agcaggaggaagacacctgaggcctcagccattggacttcaccaagacccagaactgggtgatgctgctctgaggagccatctggatatgagctggcctctgttctcacagggcatttct

SEQ ID NO: 113579 - DNA, 120 bp, Artificial Sequence
  ENSG00000100330_22 (sequence is synthesized)
gaacagcagagtgggctcagtgttctcctcagttctctccaggtcccccccaggggagaggattccctggaggtccctgtggagcagtttcgaatagaagagattgcagagggtagggag

SEQ ID NO: 113580 - DNA, 120 bp, Artificial Sequence
  ENSG00000100330_23 (sequence is synthesized)
gaagcagttcttccaatcccagtagatgcaaaagttggctatggtacctcacagtcatgttctctgctaccttcccaagtcccttttgagaccagaggaccaaacgtggacagttctaca

SEQ ID NO: 113581 - DNA, 120 bp, Artificial Sequence
  ENSG00000100330_24 (sequence is synthesized)
gacatgttagtggaagataaggtgaagtcagtaagtgggccccaaggtcatcatagatcttgccttgtaaatagtggcaaggacaggcttcctcagaccatggaacccagcccttcagag

SEQ ID NO: 113582 - DNA, 120 bp, Artificial Sequence
  ENSG00000100330_25 (sequence is synthesized)
ccccaagtggggtctgtggtgcataggacttcccttggcagcactctcagcctgacacgttccccttgtgccttgcctttagccgaatgtaaagaggggcttgtgtgcaatggtgcccca

SEQ ID NO: 113583 - DNA, 120 bp, Artificial Sequence
  ENSG00000100330_26 (sequence is synthesized)
gagactgaaaacagggcctcagagcagcccccaggtcttagcaccctccagatgtaccccacacccaatgggcattgcgccaatggggaggctggtaggagcaaggactcactgagccgt

SEQ ID NO: 113584 - DNA, 120 bp, Artificial Sequence
  ENSG00000100330_27 (sequence is synthesized)
cagctgtctgctatgagctgcagctctgcccacttacactcaaggaacttgcaccacaagtggctgcatagccactcaggaaggccatctgcaaccagcagccccgaccagccttcccgc

SEQ ID NO: 113585 - DNA, 120 bp, Artificial Sequence
  ENSG00000100330_28 (sequence is synthesized)
agccacctggacgatgatggcatgtcagtgtacacagacacgatccaacagcgcctgcgtcagattgagtcaggccaccagcaggaagtagaaactttgaagaaacaagtccaggagctg

SEQ ID NO: 113586 - DNA, 120 bp, Artificial Sequence
  ENSG00000100330_29 (sequence is synthesized)
aagagtcgcctggagagccagtacctgaccagctccctacactttaatggagactttggggatgaggtgacttcaatccccgactcggaaagcaatctggatcagaactgtttgtctcgc

SEQ ID NO: 113587 - DNA, 120 bp, Artificial Sequence
  ENSG00000100330_30 (sequence is synthesized)
tgcagcacagagattttctctgaagccagctgggagcaggtggataaacaggacacagagatgacccgttggcttcctgaccacctggccgcccactgctatgcgtgcgacagtgccttc

SEQ ID NO: 113588 - DNA, 120 bp, Artificial Sequence
  ENSG00000100330_31 (sequence is synthesized)
tggcttgccagcaggaagcaccactgcaggaattgtgggaacgtattctgctccagttgttgtaaccagaaggttccagttcccagccagcagctctttgaacccagtcgagtatgcaag

SEQ ID NO: 113589 - DNA, 120 bp, Artificial Sequence
  ENSG00000100330_32 (sequence is synthesized)
tcttgctatagcagcctacatcccacaagctccagcattgaccttgaactggataagcccattgctgccacttccaactgaagctcagtgacctgggtgggcagtggccaagctgctgtt

SEQ ID NO: 113590 - DNA, 120 bp, Artificial Sequence
  ENSG00000100330_33 (sequence is synthesized)
cctatgacaggcccactcaacctgggcagaccgagaggcccgtgcactttggaatgggagcgtggaaccacctgtacagagtgacagatttgggatgcaccactggattgtagattgatt

SEQ ID NO: 113591 - DNA, 120 bp, Artificial Sequence
  ENSG00000100330_34 (sequence is synthesized)
tttctttcctgtccccctactccctccctaccttttccatcctcctcctctgccttcaaaaaaggaaactttcccttggttgtcttaattttttttttttttgatggaagaccaagggtt

SEQ ID NO: 113592 - DNA, 120 bp, Artificial Sequence
  ENSG00000100330_35 (sequence is synthesized)
gccaggcccactgtaactgccgagctgcctgctgtcacgtgacactgagggatggcttgtttcttccgggtgggaggatggtggtcagagccaggagtatggagatctgagaccgtgagc

SEQ ID NO: 113593 - DNA, 120 bp, Artificial Sequence
  ENSG00000100330_36 (sequence is synthesized)
agggaagaaagccagtgctaacatgcaaccattcctcacgccaccgccacatcagagctggttgggaaccctttgctgctggggaggctggaagcatattccccaagagcactgccctgg

SEQ ID NO: 113594 - DNA, 120 bp, Artificial Sequence
  ENSG00000100330_37 (sequence is synthesized)
gcatcatctccctcctgcgaggagctgagccagtcccctcacagatggataaatgaggctgatgtttggagggagaggcacacggtaaatggcatccccttaggcgcctctttgggaaag

SEQ ID NO: 113595 - DNA, 120 bp, Artificial Sequence
  ENSG00000100330_38 (sequence is synthesized)
gaaagtggatgctcctttgaggcaggcgaggggctgggagtgggtagccgtcatgttgtcccccgtgggatcccatttttaacttgacccagattgtcttgggctccttttactttcagg

SEQ ID NO: 113596 - DNA, 120 bp, Artificial Sequence
  ENSG00000100330_39 (sequence is synthesized)
gggctgctttcctgggccaggctgtgtagcacttcccaccctcaggcatgagtacagactggtcaaaatgtttatgcagtcaaggccaaagcctgccctgagcccagacacacctgggtc

SEQ ID NO: 113597 - DNA, 120 bp, Artificial Sequence
  ENSG00000100330_40 (sequence is synthesized)
cccattctggggcctggtcccctaaacaatctcttcctcagccagcacagggaaatccagactcagggttccagaaatcccccgttcccaaaccaaaccaatcatggatcttccctttaa

SEQ ID NO: 113598 - DNA, 120 bp, Artificial Sequence
  ENSG00000100330_41 (sequence is synthesized)
ggggtagaatcagcctttagagttacaagcccctggaaaagggagcaggtcccatacaatcagcctttctcctcttctcttcttgggacaggaataactgctgagcagtccccctttgcc

SEQ ID NO: 113599 - DNA, 120 bp, Artificial Sequence
  ENSG00000100330_42 (sequence is synthesized)
actcctggctgtctgagtgggcacttgtctggctgctggccagcagtgaagggccacttggtgacttcgtagggttccttagagaagtgacatggccttgaggagattcagggcaccttt

SEQ ID NO: 113600 - DNA, 120 bp, Artificial Sequence
  ENSG00000100330_43 (sequence is synthesized)
cctcagtgagctttgatatggtccaaaaacagccttaaatcaagaatatttgtggaggtaggtgtggggaaggttggagaagagttaggtttgtgctttgtaatcttggcatccatgttt

SEQ ID NO: 113601 - DNA, 120 bp, Artificial Sequence
  ENSG00000100330_44 (sequence is synthesized)
tgtgcctgccctccctcttggggaggccatgcttgactctgctgaaagctgctaactggtgacagggtggatcatggtgaggactaggggtaaggtcagggaatgcttaagctctggccc

SEQ ID NO: 113602 - DNA, 120 bp, Artificial Sequence
  ENSG00000100330_45 (sequence is synthesized)
tgccctgtattcctcttccccttggtagcagttccctgaccaagggcaaggtgtgtctcaggaaggtggttctgtgcatgcctgggtgtggttaaggcgtggcccagaaggcttccctgg

SEQ ID NO: 113603 - DNA, 120 bp, Artificial Sequence
  ENSG00000100330_46 (sequence is synthesized)
tgctctcagtccaggcaaagcccagagcatctgagcacgtctctgacttccagtggcaacacagtttgaacgtggtgaaacagggtgtagttcttttccacattctgtgtcatctagtcg

SEQ ID NO: 113604 - DNA, 120 bp, Artificial Sequence
  ENSG00000100330_47 (sequence is synthesized)
tgcaggtagggaaaaagttggtctaattgaagattgtgcatttcctagtgacaggtgccaagaggttatgatacgggtttcttgggtctgatgtacagtgtgaataaatgcttgcagctc

SEQ ID NO: 113605 - DNA, 120 bp, Artificial Sequence
  ENSG00000100330_48 (sequence is synthesized)
ttagctcttttttgatcgatgaagcacttttttattaatattttcctttgttaaaggaggaaccgtaactctccatagctgtacatataacccttttctcctaaagaggagtcagtcagt

SEQ ID NO: 113606 - DNA, 120 bp, Artificial Sequence
  ENSG00000100330_49 (sequence is synthesized)
gctcctatatttttcattttttgtcaaagcaagaagtaaatactttagaattgttaaatatataaataaagcaaataaagttgagtgttccacatggtagcatttgctaacacttcctaa

SEQ ID NO: 113607 - DNA, 120 bp, Artificial Sequence
  ENSG00000100330_50 (sequence is synthesized)
gccttccgactctagaccttggcaaggagcctcaccatgatgttcaagcactgaacgcatttcctcagtgattttgctcctaaaatctcccaggctaaaagagggcaaagcagtcaggga

SEQ ID NO: 113608 - DNA, 120 bp, Artificial Sequence
  ENSG00000100330_51 (sequence is synthesized)
tctgacctggcagctattcctccttctctgaagagttcccatcagtagtcattacaactacctctcgcctcaaggctccatttttagctgctgctctgatttcagggcagccagtactct

SEQ ID NO: 113609 - DNA, 120 bp, Artificial Sequence
  ENSG00000100330_52 (sequence is synthesized)
ggccccttcagtcggggagtggaaggagatgtggggtgggggtgagaaaatgcttctgcctgttgttcttgaaggatagactatgggtgggcagagagaactgggggcagaaatggaatt

SEQ ID NO: 113610 - DNA, 120 bp, Artificial Sequence
  ENSG00000100330_53 (sequence is synthesized)
agatgtgattgggttatgcagtcaactagaggtctccttcccgccctctctccacacagagaggaacctctgctccttagctcttacagcaggactgtggcatctagtcacttcaatact

SEQ ID NO: 113611 - DNA, 120 bp, Artificial Sequence
  ENSG00000100330_54 (sequence is synthesized)
agttcttgctcttcacagaggtagatttttctttaccctacagcactgttgggcatccctcccatcacatgggtctgtgggtgagatatgttatgctgttcctccctcgggaaggttggt

SEQ ID NO: 113612 - DNA, 120 bp, Artificial Sequence
  ENSG00000100330_55 (sequence is synthesized)
attgaggggtgccttgctccagaggcgccagcccagcatctgtggtgagttggctaagatccagagtgacctgctcagagctccccagaggccttcactctttggggcagtctctctagg

SEQ ID NO: 113613 - DNA, 120 bp, Artificial Sequence
  ENSG00000100330_56 (sequence is synthesized)
gtcactttctgaatgtaccttctacctaaagtatacaaacacaaagagccagctgagctggttctagtgtgaaagccgtaagtgccacccagcaggcgtttgaaaacaagaaatcattct

SEQ ID NO: 113614 - DNA, 120 bp, Artificial Sequence
  ENSG00000100330_57 (sequence is synthesized)
tctgtggaaggagaatgtgccatctcagctaccctcagtccgccaggcagcccagtctgtgtattcatatgaagttgtgaaaaccatgagtgtgtgccatggccatcgtgtctacacaca

SEQ ID NO: 113615 - DNA, 120 bp, Artificial Sequence
  ENSG00000100330_58 (sequence is synthesized)
gccactattgttcctgtgggctagtctccagcaaattaaaacactggcatggcctaggaagggcgttgcgagctcctaaatggaaagcttctctgggggtagggagatgaagagccaaga

SEQ ID NO: 113616 - DNA, 120 bp, Artificial Sequence
  ENSG00000100330_59 (sequence is synthesized)
tgctggtgaagcaggtgcagtgaggatccaaggcaaggaattgccctgagggaggtggctgcatatggagaaaggcagttctctgtgggcaaggccagcttgcttcaggctgtagaggga

SEQ ID NO: 113617 - DNA, 120 bp, Artificial Sequence
  ENSG00000100330_60 (sequence is synthesized)
atttggtctgaagcaacagggcatgaactgtgactttgagctgccaggttgtcttcatctcagaactttcctatcctggcactctcgttacctttcttctataccttggcctctgtaact

SEQ ID NO: 113618 - DNA, 120 bp, Artificial Sequence
  ENSG00000100330_61 (sequence is synthesized)
gcagtccaaaacaagttacagctgccttaatccactgagattctctatgaggatgtacagaaaagttttcctgtaataattttgcttatatgctaactcttttcatgttagcaaagaata

SEQ ID NO: 113619 - DNA, 120 bp, Artificial Sequence
  ENSG00000100330_62 (sequence is synthesized)
ttctatgaattagaatgttactgtggtagatctaaaggagaatgaacagaaggtgctggaggacctgttaaacaatctctggctattaaaaaacatcaagatgagaattaaaggcatatc

SEQ ID NO: 113620 - DNA, 120 bp, Artificial Sequence
  ENSG00000100330_63 (sequence is synthesized)
ctgatatacttgcctgcttgcacatgaggctgggagatcccatgcctgttgaagttaactctagccctgacctctattgatcttttgggaatgagggctgatttgaaggtgctgttgcag

SEQ ID NO: 113621 - DNA, 120 bp, Artificial Sequence
  ENSG00000100330_64 (sequence is synthesized)
gatttcatttagctgctgccagttcaagtgacctgtccccagggctgcagctgtatccacctgattgcagtaggtgagggctaacagcagaatttaaagtggaccctgggctgtggagca

SEQ ID NO: 113622 - DNA, 120 bp, Artificial Sequence
  ENSG00000100330_65 (sequence is synthesized)
aagtgactatccatttggacttttggataatgtggcaggagtcccagctgtttaatttctagtcacattttccagaaagttgttctaagttgagattactgacaagatttctcaagggca

SEQ ID NO: 113623 - DNA, 120 bp, Artificial Sequence
  ENSG00000100330_66 (sequence is synthesized)
ggaccagatatgtgagagacttctagttcagagctgacccctctaagcctctgacacttaaacacgagtcctgctgtccccagcacacaactgcactgaagccttgttcctctcggctgg

SEQ ID NO: 113624 - DNA, 120 bp, Artificial Sequence
  ENSG00000100330_67 (sequence is synthesized)
tgtagagctcatctgcatgttgtgtgcagataccagtagcctccctgcttgaacaggcctctcctaggctaggcaggtgttcagaggcatgaaggtctgggcaggggaagggcgtcttct

SEQ ID NO: 113625 - DNA, 120 bp, Artificial Sequence
  ENSG00000100330_68 (sequence is synthesized)
gaaatgggagttaccaggtttttaaatgctgctattgttttatttaccatttaaggtcttttctattatatctgagtaactagtcagtttttcttacagtgctcatagcagttgtatttg

SEQ ID NO: 113626 - DNA, 120 bp, Artificial Sequence
  ENSG00000100330_69 (sequence is synthesized)
aattgtattttcagtgaaatttgttttacattgccatttaaaattggcctttaacagcttcccaactagcttataagatttttttttttaatgaaaacataacccatgaggctcagatgc

SEQ ID NO: 113627 - DNA, 120 bp, Artificial Sequence
  ENSG00000100330_70 (sequence is synthesized)
tgttgaagaaataaatggtatgttgctgctgacagtagtgcttgcctattgtaacagcattggttctgctgtagcctcggtgaccatttaagttgaataaatctgtcattttcacccaca

SEQ ID NO: 113628 - DNA, 120 bp, Artificial Sequence
  ENSG00000100330_71 (sequence is synthesized)
aacagttgttgagcccctggatttgggttgtcactgtggttctcctgccagtgctataatccagtgtcgtaggtgcagggtatgaatcagctcagcctcttaggagagaggggctctcag

SEQ ID NO: 113629 - DNA, 120 bp, Artificial Sequence
  ENSG00000100330_72 (sequence is synthesized)
cgaggagggggcggggggggggtcactatttatcttccagaggcagggttcatggattcctgatgtttagaggcggaagggaccttaggtcacctacttccacggttttcatactgttct

SEQ ID NO: 113630 - DNA, 120 bp, Artificial Sequence
  ENSG00000100330_73 (sequence is synthesized)
ctggggcctcgtggagagggagcctccaggcccattcaaagctttattagatttaaaagtaagatctggtatgaagaaaggttttgtttgtttcttaaaataaaaagtctgaaaatcact

SEQ ID NO: 113631 - DNA, 120 bp, Artificial Sequence
  ENSG00000100330_74 (sequence is synthesized)
aaaaatattttatattttcatgctctcaagtggctcttaggtgaaaaatgttggctatataaaatgtctagtcctgtattggtcctcttgggatagacctgtatccattggtgctgcttc

SEQ ID NO: 113632 - DNA, 120 bp, Artificial Sequence
  ENSG00000100330_75 (sequence is synthesized)
tttgtggagatcctgtcagccctgttgggtattccagctgggtgcttgctcttgatcctcatttccagacatcctagaagacttattggggcatatttaaacctgtgtcctcccccctcc

SEQ ID NO: 113633 - DNA, 120 bp, Artificial Sequence
  ENSG00000100330_76 (sequence is synthesized)
ccaagattacaccaccgcactacctgtgcactacactaccagtgcaccactgcctgggtgatagtgagattctgtctcaaaaaaagaaaaaaaagtattaagaagctgttagtgcctaat

SEQ ID NO: 113634 - DNA, 120 bp, Artificial Sequence
  ENSG00000100330_77 (sequence is synthesized)
agaaatattctaacctctttgacattttttttgcatcaatgtgttttcagactagatgtaactaatgtattggatagaaaaactttttaagatcaatattgtttccttgagcttttctgc

SEQ ID NO: 113635 - DNA, 120 bp, Artificial Sequence
  ENSG00000100330_78 (sequence is synthesized)
cagtttgccggctttttggactctccctgagttgggccaatccagtggcttacagttagaaacttcattccactgaaatattgagattgtaggaagggatttgtctccttgtggaattcc

SEQ ID NO: 113636 - DNA, 120 bp, Artificial Sequence
  ENSG00000100330_79 (sequence is synthesized)
cttgtactgttgacatcagatctgctgggctggtgccactggagctgatgtggtccttgtgactcttgctgcccccagcatggctctgctggctccagctggatggcccatctcctgtca

SEQ ID NO: 113637 - DNA, 120 bp, Artificial Sequence
  ENSG00000100335_0 (sequence is synthesized)
actcgccctcgtgctcccttcagccccttcgcagctccgtgcgcaaggtcgtgtcccggaagtgaaggggccatgttgatgggtgacccggggagaggtacccggccagaggcgagtcct

SEQ ID NO: 113638 - DNA, 120 bp, Artificial Sequence
  ENSG00000100335_1 (sequence is synthesized)
gcggagtggtagcgcgcacggcctgcggtgtgacacccagcccctgccagtcccccatggccccgtggagccgagaggcggtgctgagtctctatcgggctctgttgcgccagggccgac

SEQ ID NO: 113639 - DNA, 120 bp, Artificial Sequence
  ENSG00000100335_2 (sequence is synthesized)
agcttcgctacactgatcgagacttctactttgcctccatccgccgtgaattccgaaaaaatcagaagctagaggacgctgaggcccgggagaggcagctggagaagggcctggtctttc

SEQ ID NO: 113640 - DNA, 120 bp, Artificial Sequence
  ENSG00000100335_3 (sequence is synthesized)
tcaacggcaaattggggaggatcatttaggatcctccaagggaaagaggacaaaggtgccttctgtagacactcctgctctcttccatccccatcttacagatgtattaagaagcctcag

SEQ ID NO: 113641 - DNA, 120 bp, Artificial Sequence
  ENSG00000100335_4 (sequence is synthesized)
atgagcaatggcaggcgctggtgagcgcaaaggcaagaaggatgacaatggcattggcacggccattgactttgtgctctccaatgcccggctggtgctgggggtgggtggagcggccat

SEQ ID NO: 113642 - DNA, 120 bp, Artificial Sequence
  ENSG00000100335_5 (sequence is synthesized)
gctgggcatcgccacgctggcagttaagcggatgtacgatcgggcgatcagtgcccctaccagccccacccgcctgagccattcggggaaaaggagctgggaagaacccaactggatggg

SEQ ID NO: 113643 - DNA, 120 bp, Artificial Sequence
  ENSG00000100335_6 (sequence is synthesized)
ctccccacgactgctgaacagggacatgaagacgggcctgagccggtccttgcagacccttcccacagactcctccaccttcgacacagatacattctgcccgccccggcccaagccagt

SEQ ID NO: 113644 - DNA, 120 bp, Artificial Sequence
  ENSG00000100335_7 (sequence is synthesized)
ggccaggaagggccaggtagacttgaagaagtcacgactccgcatgtccctgcaggagaaacttcttacttactaccggaaccgggcagccatccctgctggagagcaggctcgggccaa

SEQ ID NO: 113645 - DNA, 120 bp, Artificial Sequence
  ENSG00000100335_8 (sequence is synthesized)
gcaagctgctgtggacatatgtgccgagctccggagcttcctgcgggccaagttgcctgacatgccgcttcgggacatgtacttgagtggcagcctctacgatgacctgcaggtggtgac

SEQ ID NO: 113646 - DNA, 120 bp, Artificial Sequence
  ENSG00000100335_9 (sequence is synthesized)
agctgaccacatccaactcattgtgccccttgtgctggagcagaacctgtggtcatgtattcctggtgaagacaccatcatgaatgtccctggcttcttcctggtgcgtcgtgagaatcc

SEQ ID NO: 113647 - DNA, 120 bp, Artificial Sequence
  ENSG00000100335_10 (sequence is synthesized)
agagtactttcctcgtgggagcagttactgggaccgctgtgtagtagggggctacctctctccaaagacagtcgcagatacatttgagaaggtagtggctggctccatcaattggccagc

SEQ ID NO: 113648 - DNA, 120 bp, Artificial Sequence
  ENSG00000100335_11 (sequence is synthesized)
catagggtccctcttggactatgtgatccgcccggccccacccccagaagccctcacactggaggtgcagtatgagcgtgacaaacatctcttcattgacttcctgccatcagtgaccct

SEQ ID NO: 113649 - DNA, 120 bp, Artificial Sequence
  ENSG00000100335_12 (sequence is synthesized)
cggtgacacagtcttggtggccaaaccacaccggctagcccagtatgacaacctgtggcggctgagcctgcgtcccgcggagacggcacgcctgcgggctctggaccaggctgactcggg

SEQ ID NO: 113650 - DNA, 120 bp, Artificial Sequence
  ENSG00000100335_13 (sequence is synthesized)
ctgccgatctctgtgcctcaagatcctcaaggccatatgcaagtccaccccggctctgggccacctcactgccagccagctaaccaatgtcatcctccacttggcccaggaggaggctga

SEQ ID NO: 113651 - DNA, 120 bp, Artificial Sequence
  ENSG00000100335_14 (sequence is synthesized)
ctggtctccggatatgctggccgaccgtttcctgcaggccttgaggggacttatcagctacttagaggctggagtcctgcccagtgccctaaaccccaaggtgaacttatttgcagagct

SEQ ID NO: 113652 - DNA, 120 bp, Artificial Sequence
  ENSG00000100335_15 (sequence is synthesized)
cacccctgaagaaatagacgaattaggatacactctgtattgctcattgtctgagccagaggtgctgctgcagacgtagggcaggtgaaggccaaagcgggtgttggtggtcaggccctg

SEQ ID NO: 113653 - DNA, 120 bp, Artificial Sequence
  ENSG00000100335_16 (sequence is synthesized)
gattctccgttagatacacttggctacctagttggtgcctcacagggttcctgctgcctggtgtcttgctgatcatcaccctggtcacttcatgctgattagaatgacatctctttcgtc

SEQ ID NO: 113654 - DNA, 120 bp, Artificial Sequence
  ENSG00000100335_17 (sequence is synthesized)
tcctattttgttacccaactcttcctatttttgttaccaatcactgtgctctctgccgccccctggctccaggctaatttttctggaatgaattgagaaggtggcgtgctggcctgagct

SEQ ID NO: 113655 - DNA, 120 bp, Artificial Sequence
  ENSG00000100335_18 (sequence is synthesized)
gatggaccacttggtgttttgcgttttggcccatgtttgctgcctctatctggtctgccttgcccgtttgcctgttcctattcagtgtcttttctattttttcctctctcgttcatgcct

SEQ ID NO: 113656 - DNA, 120 bp, Artificial Sequence
  ENSG00000100335_19 (sequence is synthesized)
tctgttttgctcttgtccctggagcatatctgcctaattaagatgttgccttttagttgaatgccactgaagagctgtgatagcatgtttcaaagctgaactctacagagcgagtgctga

SEQ ID NO: 113657 - DNA, 120 bp, Artificial Sequence
  ENSG00000100335_20 (sequence is synthesized)
gacagtatttagggtttctgggagtgaggctggtagaagagttggcctttgaccacggttcctggagtagaagtccatcctccccccaacctcctgacccattcataaatgctgagaatg

SEQ ID NO: 113658 - DNA, 120 bp, Artificial Sequence
  ENSG00000100335_21 (sequence is synthesized)
tctctcatgggaacactgttaatgacccacacaggataagctgaatgcaaagttatttgcaggttgaatttcttggtggctattagcagaagtgcagagtagggaaccagagctggttaa

SEQ ID NO: 113659 - DNA, 120 bp, Artificial Sequence
  ENSG00000100335_22 (sequence is synthesized)
gggcctagtgaagggtttgtgtgcccagtgtctgctcgtcatctgtggctgcaggggtcagacagacaaggatggggactgccagggcaccacttcatcatgaatgctggttttcacacc

SEQ ID NO: 113660 - DNA, 120 bp, Artificial Sequence
  ENSG00000100335_23 (sequence is synthesized)
ccttagacatcaggtgaggatgatggaggtagacagtcgactgaatgtcagctggaaaatccagtcactagttggggtttggtggccatgttttctacccagacaggccctgcttttcta

SEQ ID NO: 113661 - DNA, 120 bp, Artificial Sequence
  ENSG00000100335_24 (sequence is synthesized)
ggatgtggccttagagcaagaacagacccaacagccagcccttcatcctccagcgtctgccataggaatgtgagaggggtgtttgctgagcgctccgggcacggccagagggcaagtgag

SEQ ID NO: 113662 - DNA, 120 bp, Artificial Sequence
  ENSG00000100335_25 (sequence is synthesized)
catgcacggacctcttccccctgtcctgtttctcacccagcacctggggagatcggtgctaccaaggaagagagcacacagataagacagaggggaggaggtgggcatttcctacattcc

SEQ ID NO: 113663 - DNA, 120 bp, Artificial Sequence
  ENSG00000100335_26 (sequence is synthesized)
tccttgtttgccgctgctgagattgcagtatttattgcaatgtaaatgtatcctgaaggtggggaggaatgtttaatctaccatgtccgtgtgtcatcttggtttgtgtttttccctgtt

SEQ ID NO: 113664 - DNA, 120 bp, Artificial Sequence
  ENSG00000100335_27 (sequence is synthesized)
tgtagcaagactctgatgataattctgtttctcatctgcccattcagtattttgttttccttccgtcaagttgtcttattttttcaatgactacctctccatcattgaggttctggtgaa

SEQ ID NO: 113665 - DNA, 120 bp, Artificial Sequence
  ENSG00000100335_28 (sequence is synthesized)
gctctctgcagctgtctcattccttcccaacgatagtaacaggaaatgactctttagcatcgatacctcaacatcaatttagggtagagattcctgcccctcttttgtcacagattagga

SEQ ID NO: 113666 - DNA, 120 bp, Artificial Sequence
  ENSG00000100335_29 (sequence is synthesized)
aattgagaactagggttaaccttgactatatttagaggtctttttgcctcttttccccttaacaaggatttcttatggtggtttcagtttcatttgcataaaggtattgagagggaacaa

SEQ ID NO: 113667 - DNA, 120 bp, Artificial Sequence
  ENSG00000100335_30 (sequence is synthesized)
aaaacataaagctgagaatcttgagagagctcatctaccctgtctgttggtcagactcaaatgagagttaaaaaaaaaaaaaaaaatctgtatgcctgagtaccatcctggatgaatcta

SEQ ID NO: 113668 - DNA, 120 bp, Artificial Sequence
  ENSG00000100335_31 (sequence is synthesized)
gaaggtatggggtagagcttgacagggttcctgtgtacccactgggtatccgttagaggtaagggagaggagaggattgatagagtgttgcaaaagtatagattattcattgagataaag

SEQ ID NO: 113669 - DNA, 120 bp, Artificial Sequence
  ENSG00000100335_32 (sequence is synthesized)
aaaggatttggtttccctgccatgagtattaaaaaaatttaagttttcccaagcttgcatctctgaccaaatttcacataaaacattggaaggaggctgggtgcggtggctcatgcttgt

SEQ ID NO: 113670 - DNA, 120 bp, Artificial Sequence
  ENSG00000100335_33 (sequence is synthesized)
accctatttcaaaaaaataaaaattggaagaagagcttaaaaaagataagattttaaagagtcccaagttatttaagttgagtgtaattgtcatttaaggaaggcaaatgagtttatcat

SEQ ID NO: 113671 - DNA, 120 bp, Artificial Sequence
  ENSG00000100335_34 (sequence is synthesized)
ccttcttaaagagcatctcttttaactgttggacaaaaccataactttgtcattttacaaggaagaacctcttaagaagtcctcagaaccagaagcaatgtgaactctcagcgctggtcc

SEQ ID NO: 113672 - DNA, 120 bp, Artificial Sequence
  ENSG00000100335_35 (sequence is synthesized)
tggtgggtttgctgaccatgactgggcaagccgttctttttgctgccatcttcctcatcataaagtgtggaacataggcaattgctttgagattcttggatagaagaggacaacattctg

SEQ ID NO: 113673 - DNA, 120 bp, Artificial Sequence
  ENSG00000100335_36 (sequence is synthesized)
cacctgcccccttttttaaatctttggggaaagatgagtaactttccccactactctgccttcctgttcagtaactcttacttttgcctgaagtaacagcatcttctacttctccatcta

SEQ ID NO: 113674 - DNA, 120 bp, Artificial Sequence
  ENSG00000100335_37 (sequence is synthesized)
gagatttttgtgtgtgtgccatcaaggttagcaaactttatacgtagcctaacacttaaaaaatgcactcattatcttaaacctaataaattccagagtttattttggttctcctctgtt

SEQ ID NO: 113675 - DNA, 120 bp, Artificial Sequence
  ENSG00000100335_38 (sequence is synthesized)
gcccttcctaaaaaatgagctgaagatgacagtatttttctttacatgcttggttatgacttttaaagttttatttaaataaatgttgaagctcaagtttaaagaagcgttgcagaggcc

SEQ ID NO: 113676 - DNA, 120 bp, Artificial Sequence
  ENSG00000100335_39 (sequence is synthesized)
cacggtctcctgggtcccggccacctgtccatattccacatttgctgactgtgctccctgcactccactcaagttgagagttcaaatagtcttgaaggggaatcagcttcaggatggaag

SEQ ID NO: 113677 - DNA, 120 bp, Artificial Sequence
  ENSG00000100335_40 (sequence is synthesized)
gacccaggagaggccccgaggtgggagggttctgtaaatacagactactgcgagtgtccagagctctctgccatgatacttccttgggactgacttggctgagaacgtgttctgtcagag

SEQ ID NO: 113678 - DNA, 120 bp, Artificial Sequence
  ENSG00000100335_41 (sequence is synthesized)
gatttgttagaactctgcccttttgtctgaaactcaaggccaaggagaatgataggagacttaggacagagctgacccttgcaccaggctgggaggctgcagcccttttagatgccactt

SEQ ID NO: 113679 - DNA, 120 bp, Artificial Sequence
  ENSG00000100335_42 (sequence is synthesized)
actgtaagtggccagaataccagagaggtgggttccatggtcaaatgcacagtaggtgtttacctttacatttggatcaccttgtagtctttaaattcttggtccctgaggccaagtcca

SEQ ID NO: 113680 - DNA, 120 bp, Artificial Sequence
  ENSG00000100335_43 (sequence is synthesized)
caacttgccttctagtcacttgcctgcccgcagtggtggtggatgtgttagctggtagatttggaatcagtcaccagtctttctgtactgtcttggttagctctatataagtaggggcag

SEQ ID NO: 113681 - DNA, 120 bp, Artificial Sequence
  ENSG00000100335_44 (sequence is synthesized)
cttagccctgaggcccagagacctgctgtcctttttctccttgagggaggaaataaaactgcggaatacaatgtccttccatagcatgggaagaagaaaataaacatctcctttccaaca

SEQ ID NO: 113682 - DNA, 120 bp, Artificial Sequence
  ENSG00000100335_45 (sequence is synthesized)
gtaactcattccagaggcaggcagagttggggtcaggagtgcagccctccccttgacagctgtgggcccgcggatgaggaactgagacagtcacagagaggttaggagacttgcccacgg

SEQ ID NO: 113683 - DNA, 120 bp, Artificial Sequence
  ENSG00000100335_46 (sequence is synthesized)
tcatgcagctcgtaagtgctggtgccaggattcaagtatggctgagtgcttgtcttcaaccctcctagatcaccccctgtggtgaagttctattaccgttcattacgtgcacagttctca

SEQ ID NO: 113684 - DNA, 120 bp, Artificial Sequence
  ENSG00000100335_47 (sequence is synthesized)
tattatagaggagagtggcagcatgctgagtggtattccgatctgaatcacactgtcatcctttatccggctcaggcccagggttctaactccacaggaatgggcttatctggggactgc

SEQ ID NO: 113685 - DNA, 120 bp, Artificial Sequence
  ENSG00000100335_48 (sequence is synthesized)
gagtgtgttagagggaggcgaggaaggggctgggagagatttcccagtgaaggggggcatttgaggtagactttgaaggaagggtaggagtttgccagaagccatggggcctggggagta

SEQ ID NO: 113686 - DNA, 120 bp, Artificial Sequence
  ENSG00000100335_49 (sequence is synthesized)
acagcatggagggatgaaaagaaggcgatctgagaaaatgggttttgaggagctctgaatattagtgttagaattccctcaggtaccccagggccccagccagagatcagcatatacagt

SEQ ID NO: 113687 - DNA, 120 bp, Artificial Sequence
  ENSG00000100335_50 (sequence is synthesized)
acaggaggctggccaggtaccccgacaggctaaggggttgccagcagccccttcgcagctccgtgcgcaaggtcgtgtcccggaagtgaaggggccatgttgatgggtgacccggggaga

SEQ ID NO: 113688 - DNA, 120 bp, Artificial Sequence
  ENSG00000100335_51 (sequence is synthesized)
aaggatcaaagtcatccttttagtcattagaaatcagtgcagagccaggtgcactggtgtgcacctatagtcccaactctgcaggaggctgaggcaggaggatggcttcagcccaggagg

SEQ ID NO: 113689 - DNA, 120 bp, Artificial Sequence
  ENSG00000100335_52 (sequence is synthesized)
aagtaaagataagaccctgaagagcaagtggatctagaggggctgatccgaaggggagacccctccaaatgacctccctctgtccctccctccgaaaaataacattccatagaacaagaa

SEQ ID NO: 113690 - DNA, 120 bp, Artificial Sequence
  ENSG00000100335_53 (sequence is synthesized)
acaaacaaacaaacaaacaaacaaacaccctgcaatatcaatccaagagatcctggaatgcctcttgccctgtgaaacctggcagagccctgaggtttgggtcagtgccccctgccgtgg

SEQ ID NO: 113691 - DNA, 120 bp, Artificial Sequence
  ENSG00000100335_54 (sequence is synthesized)
aattagccacccctcacctcatgcatcaggcctcacatgccctctctgattaatcttcaacagcctgataagctagtcctttctcaccatctccaatacacaggtggagggactaaggct

SEQ ID NO: 113692 - DNA, 120 bp, Artificial Sequence
  ENSG00000100335_55 (sequence is synthesized)
cacgaagcccaacgcacttgccctgcactcaccaccaacccacctttcaaatgagacaggcttgatcaccctgacccaggtgaaatggtccatccctcctgtctttccacaaaacgttca

SEQ ID NO: 113693 - DNA, 120 bp, Artificial Sequence
  ENSG00000100336_0 (sequence is synthesized)
gaggtgctggggagcagcgtgtttgctgtgcttgattgtgagctgctgggaagttgtgactttcattttacctttcgaattcctgggtatatcttgggggctggaggacgtgtctggtta

SEQ ID NO: 113694 - DNA, 120 bp, Artificial Sequence
  ENSG00000100336_1 (sequence is synthesized)
ttatataggtgcacagctggaggtgagatccacacagctcagaccagctggatcttgctcagtctctgtcagaggaagatcccttggaggaggccccgcagcgacatggagggagctgct

SEQ ID NO: 113695 - DNA, 120 bp, Artificial Sequence
  ENSG00000100336_2 (sequence is synthesized)
ttgctgaaaatctttgtcgtctgcatctgggtgcagcaaaaccatccaggctggacagtggctggacagttccaagaaaagaaacgcttcactgaagaagtcattgaatacttccagaag

SEQ ID NO: 113696 - DNA, 120 bp, Artificial Sequence
  ENSG00000100336_3 (sequence is synthesized)
aaagttagcccagtgcatctgaaaatcctgctgactagcgatgaagcctggaagagatttgtgcgtgtggctgaattgcccagggaagaggcagatgctctctatgaagctctgaagaat

SEQ ID NO: 113697 - DNA, 120 bp, Artificial Sequence
  ENSG00000100336_4 (sequence is synthesized)
cttacaccatatgtggctattgaggacaaagacatgcagcaaaaagaacagcagtttagggagtggtttttgaaagagtttcctcaaatcagatggaagattcaggagtccatagaaagg

SEQ ID NO: 113698 - DNA, 120 bp, Artificial Sequence
  ENSG00000100336_5 (sequence is synthesized)
cttcgtgtcattgcaaatgagattgaaaaggtccacagaggctgcgtcatcgccaatgtggtgtctggctccactggcatcctgtctgtcattggcgttatgttggcaccatttacagca

SEQ ID NO: 113699 - DNA, 120 bp, Artificial Sequence
  ENSG00000100336_6 (sequence is synthesized)
gggctgagcctgagcattactgcagctggggtagggctgggaatagcatctgccacggctgggatcgcctccagcatcgtggagaacacatacacaaggtcagcagaactcacagccagc

SEQ ID NO: 113700 - DNA, 120 bp, Artificial Sequence
  ENSG00000100336_7 (sequence is synthesized)
aggctgactgcaaccagcactgaccaattggaggcattaagggacattctgcgtgacatcacacccaatgtgctttcttttgcacttgattttgacgaagccacaaaaatgattgcgaat

SEQ ID NO: 113701 - DNA, 120 bp, Artificial Sequence
  ENSG00000100336_8 (sequence is synthesized)
gatgtccatacactcaggagatctaaagccactgttggacgccctttgattgcttggcgatatgtacctataaatgttgttgagacactgagaacacgtggggcccccacccggatagtg

SEQ ID NO: 113702 - DNA, 120 bp, Artificial Sequence
  ENSG00000100336_9 (sequence is synthesized)
agaaaagtagcccggaacctgggcaaggccacttcaggtgtccttgttgtgctggatgtagtcaaccttgtgcaagactcactggacttgcacaagggggcaaaatccgagtctgctgag

SEQ ID NO: 113703 - DNA, 120 bp, Artificial Sequence
  ENSG00000100336_10 (sequence is synthesized)
tgagtcgctgaggcagtgggctcaggagctggaggagaatctcaatgagctcacccatatccatcagagtctaaaagcaggctaggcccaattgttgcgggaagtcagggaccccaaacg

SEQ ID NO: 113704 - DNA, 70 bp, Artificial Sequence
  ENSG00000100336_11 (sequence is synthesized)
tctataaatggcctccttgggtgtggccatcttctatggtcgagactgtagggatgaaataaaccccagt

SEQ ID NO: 113705 - DNA, 64 bp, Artificial Sequence
  ENSG00000100336_12 (sequence is synthesized)
atgttatcaatgacaatggtgcccgaaacctcattagcaattttaatttctccccggtcctgtg

SEQ ID NO: 113706 - DNA, 89 bp, Artificial Sequence
  ENSG00000100336_13 (sequence is synthesized)
taaaaacttgctggttttgcggcttgtgaggcatcacggaacctaccgatgtgtgatgtctcccctggacacctgcctttatttctcaa

SEQ ID NO: 113707 - DNA, 86 bp, Artificial Sequence
  ENSG00000100336_14 (sequence is synthesized)
catcggggcaggttccccgatacccaatgaccccagagcagtgcagccaccagggaaggtgagccagacacaggccgggacaaaac

SEQ ID NO: 113708 - DNA, 120 bp, Artificial Sequence
  ENSG00000100336_15 (sequence is synthesized)
ccaccagggaaggtgagccagacacaggccgggacaaaacgcagacattttttaggggaataaagagggcgaggtaaagtttatggaactcagtgttaggaactttggcatctgtagctg

SEQ ID NO: 113709 - DNA, 120 bp, Artificial Sequence
  ENSG00000100336_16 (sequence is synthesized)
agcacagcaggggaggggttactcaagatggcaagtgcgccaaggagaaggcagaaatgctggggcctggaataagggaggagaggggactggagagtgtggggaatggaaagaagcagt

SEQ ID NO: 113710 - DNA, 120 bp, Artificial Sequence
  ENSG00000100336_17 (sequence is synthesized)
ttactctagactaaagagtatattgggggaggaagagagggaggcacgtaggaacaagcaatgagaagaccaggaaaagaaagagctgaaaatggagaaagccacagttagaactgttgg

SEQ ID NO: 113711 - DNA, 120 bp, Artificial Sequence
  ENSG00000100336_18 (sequence is synthesized)
atacaggagaagaaacagcggctccactaaagacccgccccccggttggatgtccttccaagaatggaatccttccctggtgatggtctctcaccctgtcttaccagcatccactctccc

SEQ ID NO: 113712 - DNA, 120 bp, Artificial Sequence
  ENSG00000100336_19 (sequence is synthesized)
ttgtcctcccgggggtgtatctgagtcagccagtggcttcttgatgatggtggtggtggttgtagtgtgacaggtcccctttaggttatttaagggtgcatgtcccctgcttgaaccctg

SEQ ID NO: 113713 - DNA, 120 bp, Artificial Sequence
  ENSG00000100336_20 (sequence is synthesized)
aaggccgggtaatgagccatttccatggtgcccagctgaggaccaggtgtctctgagaatccaaacatcctggagagtatctgagaaccaaccaagtaaaagtctcgttgctcatatata

SEQ ID NO: 113714 - DNA, 120 bp, Artificial Sequence
  ENSG00000100336_21 (sequence is synthesized)
gtagacaaagagccagaaaattaactgaaaagcagtttagacattgggggaggctggatctctcgagctgtcttgctgagtgccctgtgtgtaagtcctaataaacttagctactcgcca

SEQ ID NO: 113715 - DNA, 120 bp, Artificial Sequence
  ENSG00000100336_22 (sequence is synthesized)
tggtgagcttggctcagagccctgaggtgggagggagggctccctgtctgggctgcacaattgggcagggcttgggctgggccaggagccatgtgggtttttctaggaaccaaaatcact

SEQ ID NO: 113716 - DNA, 120 bp, Artificial Sequence
  ENSG00000100336_23 (sequence is synthesized)
tcccggaattgaccaactggtagactcgcctagaggggacgcactgtgtcctagttgaggctaacagtcagtatccagcctcaacattcagcagaggccccagatcagcgtctgagccag

SEQ ID NO: 113717 - DNA, 120 bp, Artificial Sequence
  ENSG00000100336_24 (sequence is synthesized)
tggggcaccccggtgatgccacccagatctccccgggctagttttctctggcaggcacacctcctccaggcagccccctctgctgggcttgaggatgtccctctcagcagtgcaggaaga

SEQ ID NO: 113718 - DNA, 120 bp, Artificial Sequence
  ENSG00000100336_25 (sequence is synthesized)
atatttcctccaagtgcttcgctggcagtgagtgacctcaggctgaggggagaagaagcccacaagggcaggggaagaggcagatgctctctatgaagctctgaagaatcttacaccata

SEQ ID NO: 113719 - DNA, 120 bp, Artificial Sequence
  ENSG00000100336_26 (sequence is synthesized)
tcgggtgagtccgaggccccagctctctgccctcctgctcctctgctctctcctggtcctcccagttctactggctcatggtgttgagatggttgccttggcctagggggtcacacagtg

SEQ ID NO: 113720 - DNA, 120 bp, Artificial Sequence
  ENSG00000100336_27 (sequence is synthesized)
tcgggacaagcggacttttccttggtgtgagagtgagggaagagggagctggaatgaggtgcagcaaaaccatccaggctggacagtggctggacagttccaagggtcctctgggcccat

SEQ ID NO: 113721 - DNA, 120 bp, Artificial Sequence
  ENSG00000100336_28 (sequence is synthesized)
cccctccccctgtccctacagctggttacagcagctccttctgtgtccattatgtgaacctgctgcctggagttcttgttctttctgtgacctcccagtatccacatctcagcatggccc

SEQ ID NO: 113722 - DNA, 120 bp, Artificial Sequence
  ENSG00000100336_29 (sequence is synthesized)
tctgtcagctggctgctcatgactggccgaggttaagctgtgtttgtgtctgacagaagcgcccatctgatatgaccccagttcagattcatagcttgcagtttcatggggggttacagc

SEQ ID NO: 113723 - DNA, 120 bp, Artificial Sequence
  ENSG00000100336_30 (sequence is synthesized)
tgttctgaaggtctggttggttttgtttgcccgggaatgtttcaggtctggtttttattttaattttgctttaatattcaccatccccaccccatcaataaaacacaaatttagtgctgg

SEQ ID NO: 113724 - DNA, 120 bp, Artificial Sequence
  ENSG00000100341_0 (sequence is synthesized)
agcaccagccccagcccggctccctccagagcccacatttgggcccagccccgtccaaggctgcatcccggccctatcccgggtcacggagtgacccttcctcgtcccgatcaccccgcc

SEQ ID NO: 113725 - DNA, 120 bp, Artificial Sequence
  ENSG00000100341_1 (sequence is synthesized)
cggtccacccgccatgggcttcttagaggaggagggcagatggaacctgtccttctccggcgccggctacctgggcgcccaccacgtgggcgccaccgaatgcctgcgccagcgagcccc

SEQ ID NO: 113726 - DNA, 120 bp, Artificial Sequence
  ENSG00000100341_2 (sequence is synthesized)
gcgcctcctccagggcgcccgccgcatctacggttcctcgtctggggcgctcaacgcagtcagcatcgtctgcggcaagtcggtcgacttctgctgctcccacctcctgggcatggttgg

SEQ ID NO: 113727 - DNA, 120 bp, Artificial Sequence
  ENSG00000100341_3 (sequence is synthesized)
gcagttggagcggctgagcctaagcatcctgcacccggcctacgcgcccatcgagcacgtcaagcagcagctgcaggatgctctgccccccgacgcccacgtcctggcctcccagcggct

SEQ ID NO: 113728 - DNA, 120 bp, Artificial Sequence
  ENSG00000100341_4 (sequence is synthesized)
gggcatttcgctgacccgctggcctgacggacgcaacttcttggtcactgacttcgccacctgcgatgagctcatccaggccttggtctgcaccttatactttcctttctactgcgggct

SEQ ID NO: 113729 - DNA, 120 bp, Artificial Sequence
  ENSG00000100341_5 (sequence is synthesized)
gatcccccccgagttcagaggggagcgctacatcgatggggctctgagcaacaacttgccctttgcagactgcccctccaccatcacggtgtcgcccttccatgggacagtggacatctg

SEQ ID NO: 113730 - DNA, 120 bp, Artificial Sequence
  ENSG00000100341_6 (sequence is synthesized)
cccccagagcacctcccccaacctgcatgagctgaacgtcttcaacttcagcttccaaatctccactgagaacttcttcctggggctcatatgtctcataccccccagcctcgaggtagt

SEQ ID NO: 113731 - DNA, 120 bp, Artificial Sequence
  ENSG00000100341_7 (sequence is synthesized)
ggccgacaactgcagacaaggctacctggatgccctgaggttcctggagagacgtggactcaccaaggaaccagtgctatggacgctggtgtctaaggaacccccagccccggctgacgg

SEQ ID NO: 113732 - DNA, 120 bp, Artificial Sequence
  ENSG00000100341_8 (sequence is synthesized)
aaactgggatgctggctgtgaccaacgctggaaggggggcctgtctctcaactggaaagtgccccatgtgcaagtcaaggatgtacccaactttgagcagctctcaccagagctggaggc

SEQ ID NO: 113733 - DNA, 120 bp, Artificial Sequence
  ENSG00000100341_9 (sequence is synthesized)
tgcactgaagaaagcatgtacgagggatcccagccggtgggcccgcttctggcactcggggcctggacaggtgctgacgtacctgctgctaccctgcacactgcccttcgagtacatcta

SEQ ID NO: 113734 - DNA, 120 bp, Artificial Sequence
  ENSG00000100341_10 (sequence is synthesized)
gtggtgtggctgcccgatgtgccggcggacttgtggtggatgcagggcctgctgaggaacatggccctcgaggttttctccaggaccaaggcccagctccttgggcccatcagccctccg

SEQ ID NO: 113735 - DNA, 120 bp, Artificial Sequence
  ENSG00000100341_11 (sequence is synthesized)
gccactcgcgtcctggaaacaagccccctccaaccccagatagctcctcatagagaggagctcgggcccacccaccaggcctgagggggccgagcagggccagcccagtgactggtgtcc

SEQ ID NO: 113736 - DNA, 120 bp, Artificial Sequence
  ENSG00000100341_12 (sequence is synthesized)
cttgattcctgctctggcctttgtcctgtgtgcccacatctgccccagcgggaagaggccctgccaatctccgtggagaccctgcagcttggagcccgttccttggggcgcagcctgtca

SEQ ID NO: 113737 - DNA, 120 bp, Artificial Sequence
  ENSG00000100341_13 (sequence is synthesized)
gcatgtccccggtcactgtgtacccaggtcacctgccctccctcttgccccgtctcatcagggagagaaaggaggacagccacagagacacatgtcttactttcagaatttccacggggg

SEQ ID NO: 113738 - DNA, 120 bp, Artificial Sequence
  ENSG00000100341_14 (sequence is synthesized)
gactaggagggcagcattgctggggagaggggctcctgttctgccgtggagctgcccacggagcacctcacagaagattgagaaagtgcctgatgcccgcgtcagagaccagaggagcca

SEQ ID NO: 113739 - DNA, 120 bp, Artificial Sequence
  ENSG00000100341_15 (sequence is synthesized)
actgagatgatggggtgggggtgctccccccagactttctcagtcctgcagcggcccttgggggtgacccccggcatctaccccactcaggaaaccttgacttctgaattcctatcaggt

SEQ ID NO: 113740 - DNA, 120 bp, Artificial Sequence
  ENSG00000100341_16 (sequence is synthesized)
ccagagggtggaaggccctggcaggaagcaggaggaggaggagaggggggtccaggtcttttcaggatcccagctgtgggtgcttctgttgggcccagtggcccctgctatccccacagc

SEQ ID NO: 113741 - DNA, 120 bp, Artificial Sequence
  ENSG00000100341_17 (sequence is synthesized)
ctcattcctgcagaaggtttgtgacgtagctgtgcctgtacctggggcagagaggatgccagggacaccaggcctctggcctctccacgagtcactgctctccccattggcagcacggga

SEQ ID NO: 113742 - DNA, 120 bp, Artificial Sequence
  ENSG00000100341_18 (sequence is synthesized)
cccatgctgtgcccccggccaggccctgaggaaatgctcagcctcagtggagatggggaggttagagagatggaggcgtgagtgagaacgggaagcaaaggaatacacgtgggaactaaa

SEQ ID NO: 113743 - DNA, 120 bp, Artificial Sequence
  ENSG00000100341_19 (sequence is synthesized)
cgggaagcaaaggaatacacgtgggaactaaagagaaaaatgaccagcctgggcagcatagcaagaccctgtctctaaaaaaaataataaaaacttagctgggcatggtggtgcatgcct

SEQ ID NO: 113744 - DNA, 89 bp, Artificial Sequence
  ENSG00000100341_20 (sequence is synthesized)
aggatcatcgtgatcacgccactgcaccccagcccaggcaacaaagtgagcccctgtctctaaataaataaagagacaataagccactc

SEQ ID NO: 113745 - DNA, 120 bp, Artificial Sequence
  ENSG00000100342_0 (sequence is synthesized)
actttccctttcgaattcctcggtatatcttggggactggaggacctgtctggttattatacagacgcataactggaggtgggatccacacagctcagaacagctggatcttgctcagtc

SEQ ID NO: 113746 - DNA, 120 bp, Artificial Sequence
  ENSG00000100342_1 (sequence is synthesized)
tctgccaggggaagattccttgacttctggggtgatggagaagaaacaggctgtgctgtgtccctaatgggaaacgtggctgagacaggggagtgagaagggtgcgttgcagaatggtgc

SEQ ID NO: 113747 - DNA, 120 bp, Artificial Sequence
  ENSG00000100342_2 (sequence is synthesized)
ctgtggcatgatgccagctttgcaatcatgagattcaaaagccacactgtggaattgaggaggccctgcagcgacatggagggagctgctttgctgagagtctctgtcctctgcatctgg

SEQ ID NO: 113748 - DNA, 120 bp, Artificial Sequence
  ENSG00000100342_3 (sequence is synthesized)
atgagtgcacttttccttggtgtgggagtgagggcagaggaagctggagcgagggtgcaacaaaacgttccaagtgggacagatactggagatcctcaaagtaagcccctcggtgactgg

SEQ ID NO: 113749 - DNA, 120 bp, Artificial Sequence
  ENSG00000100342_4 (sequence is synthesized)
gctgctggcaccatggacccagagagcagtatctttattgaggatgccattaagtatttcaaggaaaaagtgagcacacagaatctgctactcctgctgactgataatgaggcctggaac

SEQ ID NO: 113750 - DNA, 120 bp, Artificial Sequence
  ENSG00000100342_5 (sequence is synthesized)
ggattcgtggctgctgctgaactgcccaggaatgaggcagatgagctccgtaaagctctggacaaccttgcaagacaaatgatcatgaaagacaaaaactggcacgataaaggccagcag

SEQ ID NO: 113751 - DNA, 120 bp, Artificial Sequence
  ENSG00000100342_6 (sequence is synthesized)
tacagaaactggtttctgaaagagtttcctcggttgaaaagtgagcttgaggataacataagaaggctccgtgcccttgcagatggggttcagaaggtccacaaaggcaccaccatcgcc

SEQ ID NO: 113752 - DNA, 120 bp, Artificial Sequence
  ENSG00000100342_7 (sequence is synthesized)
aatgtggtgtctggctctctcagcatttcctctggcatcctgaccctcgtcggcatgggtctggcacccttcacagagggaggcagccttgtactcttggaacctgggatggagttggga

SEQ ID NO: 113753 - DNA, 120 bp, Artificial Sequence
  ENSG00000100342_8 (sequence is synthesized)
atcacagccgctttgaccgggattaccagcagtaccatggactacggaaagaagtggtggacacaagcccaagcccacgacctggtcatcaaaagccttgacaaattgaaggaggtgagg

SEQ ID NO: 113754 - DNA, 120 bp, Artificial Sequence
  ENSG00000100342_9 (sequence is synthesized)
gagtttttgggtgagaacatatccaactttctttccttagctggcaatacttaccaactcacacgaggcattgggaaggacatccgtgccctcagacgagccagagccaatcttcagtca

SEQ ID NO: 113755 - DNA, 120 bp, Artificial Sequence
  ENSG00000100342_10 (sequence is synthesized)
gtaccgcatgcctcagcctcacgcccccgggtcactgagccaatctcagctgaaagcggtgaacaggtggagagggttaatgaacccagcatcctggaaatgagcagaggagtcaagctc

SEQ ID NO: 113756 - DNA, 120 bp, Artificial Sequence
  ENSG00000100342_11 (sequence is synthesized)
acggatgtggcccctgtaagcttctttcttgtgctggatgtagtctacctcgtgtacgaatcaaagcacttacatgagggggcaaagtcagagacagctgaggagctgaagaaggtggct

SEQ ID NO: 113757 - DNA, 120 bp, Artificial Sequence
  ENSG00000100342_12 (sequence is synthesized)
caggagctggaggagaagctaaacattctcaacaataattataagattctgcaggcggaccaagaactgtgaccacagggcagggcagccaccaggagagatatgcctggcaggggccag

SEQ ID NO: 113758 - DNA, 82 bp, Artificial Sequence
  ENSG00000100342_13 (sequence is synthesized)
cagggcagccaccaggagagatatgcctggcaggggccaggacaaaatgcaaacaagttggagtgcaatggtgcgatctcag

SEQ ID NO: 113759 - DNA, 120 bp, Artificial Sequence
  ENSG00000100342_14 (sequence is synthesized)
gctgggattacaggcgtgagccatcgcttttgacccaaatgcaaacattttattagggggataaagagggtgaggtaaagtttatggaactgagtgttagggactttggcatttccatag

SEQ ID NO: 113760 - DNA, 120 bp, Artificial Sequence
  ENSG00000100342_15 (sequence is synthesized)
actgagtgttagggactttggcatttccatagctgagcacagcaggggaggggttaatgcagatggcagtgcagcaaggagaaggcaggaacattggagcctgcaataagggaaaaatgg

SEQ ID NO: 113761 - DNA, 120 bp, Artificial Sequence
  ENSG00000100342_16 (sequence is synthesized)
ctgcaataagggaaaaatgggaactggagagtgtggggaatgggaagaagcagtttactttagactaaagaatatattggggggccgggtgtagtggctcatgcctgtaatccgagcact

SEQ ID NO: 113762 - DNA, 62 bp, Artificial Sequence
  ENSG00000100342_17 (sequence is synthesized)
atggtggcgggcgcctgtagttccagctaactgggctcgccactgcactccagcctgggtga

SEQ ID NO: 113763 - DNA, 120 bp, Artificial Sequence
  ENSG00000100342_18 (sequence is synthesized)
gaatatattgacggaagaatagagaggaggcttgaaggaaccagcaatgagaaggccaggaaaagaaagagctgaaaatggagaaagcccaagagttagaacagttggatacaggagaag

SEQ ID NO: 113764 - DNA, 120 bp, Artificial Sequence
  ENSG00000100342_19 (sequence is synthesized)
aaacagcggctccactacagacccagccccaggttcaatgtcctccgaagaatgaagtctttccctggtgatggtcccctgccctgtctttccagcatccactctcccttgtcctcctgg

SEQ ID NO: 113765 - DNA, 120 bp, Artificial Sequence
  ENSG00000100342_20 (sequence is synthesized)
gggcatatctcagtcaggcagcggcttcctgatgatggtcattggggtggttgtcatgtgatgggtcccctccaggttactaaagggtgcatgtcccctgcttgaacactgaagggcagg

SEQ ID NO: 113766 - DNA, 120 bp, Artificial Sequence
  ENSG00000100342_21 (sequence is synthesized)
tggtgggccatggccatggtccccagctgaggagcaggtgtccctgagaacccaaacttcccagagagtatgtgagaaccaaccaatgaaaacagtcccatcgctcttacccggtaagta

SEQ ID NO: 113767 - DNA, 120 bp, Artificial Sequence
  ENSG00000100342_22 (sequence is synthesized)
aacagtcagaaaattagcatgaaagcagtttagcattgggaggaagctcagatctctagagctgtcttgtcgccgcccaggattgacctgtgtgtaagtcccaataaactcacctactca

SEQ ID NO: 113768 - DNA, 120 bp, Artificial Sequence
  ENSG00000100342_23 (sequence is synthesized)
ggagagccgtgtaccctgagaccagcctgcagaggacagaggcaacatggaggtgcctcaaggatcagtgctgagggtcccgcccccatgccccgtcgaagaaccccctccactgcccat

SEQ ID NO: 113769 - DNA, 120 bp, Artificial Sequence
  ENSG00000100342_24 (sequence is synthesized)
ctgagagtgcccaagaccagcaggaggaatctcctttgcatgagagcagtatctttattgaggatgccattaagtatttcaaggaaaaagtgagcacacagaatctgctactcctgctga

SEQ ID NO: 113770 - DNA, 120 bp, Artificial Sequence
  ENSG00000100342_25 (sequence is synthesized)
ctcgcacttagaatggagggtggcacctccacagctgagtgagccccagaagaacccggatggactaggaggccaatgagtctgcccaaagcagcagaagaggtcacgtggagtcccccg

SEQ ID NO: 113771 - DNA, 120 bp, Artificial Sequence
  ENSG00000100342_26 (sequence is synthesized)
ggaggaatctcctttgcatggtagttgtactcaatgctgtggagtttgagacattatttttaaactttaaatagccccacagagagcagtatctttattgaggatgccattaagtatttc

SEQ ID NO: 113772 - DNA, 120 bp, Artificial Sequence
  ENSG00000100344_0 (sequence is synthesized)
agagagcgcttgcgggcgccgggcggagctgctgcggatcaggacccgagccgattcccgatcccgacccagatcctaacccgcgcccccgccccgccgccgccgccatgtacgacgcag

SEQ ID NO: 113773 - DNA, 120 bp, Artificial Sequence
  ENSG00000100344_1 (sequence is synthesized)
agcgcggctggagcttgtccttcgcgggctgcggcttcctgggcttctaccacgtcggggcgacccgctgcctgagcgagcacgccccgcacctcctccgcgacgcgcgcatgttgttcg

SEQ ID NO: 113774 - DNA, 120 bp, Artificial Sequence
  ENSG00000100344_2 (sequence is synthesized)
gcgcttcggccggggcgttgcactgcgtcggcgtcctctccggtatcccgctggagcagactctgcaggtcctctcagatcttgtgcggaaggccaggagtcggaacattggcatcttcc

SEQ ID NO: 113775 - DNA, 120 bp, Artificial Sequence
  ENSG00000100344_3 (sequence is synthesized)
atccatccttcaacttaagcaagttcctccgacagggtctctgcaaatgcctcccggccaatgtccaccagctcatctccggcaaaataggcatctctcttaccagagtgtctgatgggg

SEQ ID NO: 113776 - DNA, 120 bp, Artificial Sequence
  ENSG00000100344_4 (sequence is synthesized)
aaaacgttctggtgtctgactttcggtccaaagacgaagtcgtggatgccttggtatgttcctgcttcatccccttctacagtggccttatccctccttccttcagaggcgtgcgatatg

SEQ ID NO: 113777 - DNA, 120 bp, Artificial Sequence
  ENSG00000100344_5 (sequence is synthesized)
tggatggaggagtgagtgacaacgtacccttcattgatgccaaaacaaccatcaccgtgtcccccttctatggggagtacgacatctgccctaaagtcaagtccacgaactttcttcatg

SEQ ID NO: 113778 - DNA, 120 bp, Artificial Sequence
  ENSG00000100344_6 (sequence is synthesized)
tggacatcaccaagctcagtctacgcctctgcacagggaacctctaccttctctcgagagcttttgtccccccggatctcaaggtgctgggagagatatgccttcgaggatatttggatg

SEQ ID NO: 113779 - DNA, 120 bp, Artificial Sequence
  ENSG00000100344_7 (sequence is synthesized)
cattcaggttcttggaagagaagggcatctgcaacaggccccagccaggcctgaagtcatcctcagaagggatggatcctgaggtcgccatgcccagctgggcaaacatgagtctggatt

SEQ ID NO: 113780 - DNA, 120 bp, Artificial Sequence
  ENSG00000100344_8 (sequence is synthesized)
cttccccggagtcggctgccttggctgtgaggctggagggagatgagctgctagaccacctgcgtctcagcatcctgccctgggatgagagcatcctggacaccctctcgcccaggctcg

SEQ ID NO: 113781 - DNA, 120 bp, Artificial Sequence
  ENSG00000100344_9 (sequence is synthesized)
ctacagcactgagtgaagaaatgaaagacaaaggtggatacatgagcaagatttgcaacttgctacccattaggataatgtcttatgtaatgctgccctgtaccctgcctgtggaatctg

SEQ ID NO: 113782 - DNA, 120 bp, Artificial Sequence
  ENSG00000100344_10 (sequence is synthesized)
ccattgcgattgtccagagactggtgacatggcttccagatatgcccgacgatgtcctgtggttgcagtgggtgacctcacaggtgttcactcgagtgctgatgtgtctgctccccgcct

SEQ ID NO: 113783 - DNA, 120 bp, Artificial Sequence
  ENSG00000100344_11 (sequence is synthesized)
gaggccaccccgcggtccatcctcaggtccagcctgaacttcttcttgggcaataaagtacctgctggtgctgaggggctctccacctttcccagtttttcactagagaagagtctgtga

SEQ ID NO: 113784 - DNA, 120 bp, Artificial Sequence
  ENSG00000100344_12 (sequence is synthesized)
gtcacttgaggaggcgagtctagcagattctttcagaggtgctaaagtttcccatctttgtgcagctacctccgcattgctgtgtagtgacccctgcctgtgacgtggaggatcccagcc

SEQ ID NO: 113785 - DNA, 120 bp, Artificial Sequence
  ENSG00000100344_13 (sequence is synthesized)
tctgagctgagttggttttatgaaaagctaggaagcaacctttcgcctgtgcagcggtccagcacttaactctaatacatcagcatgcgttaattcagctggttgggaaatgacaccagg

SEQ ID NO: 113786 - DNA, 120 bp, Artificial Sequence
  ENSG00000100344_14 (sequence is synthesized)
aagcccagtgcagagggtcccttactgactgtttcgtggccctattaatggtcagactgttccagcatgaggttcttagaatgacaggtgtttggatgggtgggggccttgtgatggggg

SEQ ID NO: 113787 - DNA, 120 bp, Artificial Sequence
  ENSG00000100344_15 (sequence is synthesized)
gtaggctggcccatgtgtgatcttgtggggtggagggaagagaatagcatgatcccacttccccatgctgtgggaaggggtgcagttcgtccccaagaacgacactgcctgtcaggtggt

SEQ ID NO: 113788 - DNA, 120 bp, Artificial Sequence
  ENSG00000100344_16 (sequence is synthesized)
ctgcaaagatgataaccttgactactaaaaacgtctccatggcgggggtaacaagatgataatctacttaattttagaacacctttttcacctaactaaaataatgtttaaagagttttg

SEQ ID NO: 113789 - DNA, 120 bp, Artificial Sequence
  ENSG00000100344_17 (sequence is synthesized)
tataaaaatgtaaggaagcgttgttacctgttgaattttgtattatgtgaatcagtgagatgttagtagaataagccttaaaaaaaaaaaaatcggttgggtgcagtggcacacggctgt

SEQ ID NO: 113790 - DNA, 61 bp, Artificial Sequence
  ENSG00000100344_18 (sequence is synthesized)
tcattccagcctgggcaacatgagtgaaagtctgactcaaaaaaaaaaaatttaaaaaaca

SEQ ID NO: 113791 - DNA, 120 bp, Artificial Sequence
  ENSG00000100344_19 (sequence is synthesized)
gagtgaaagtctgactcaaaaaaaaaaaatttaaaaaacaaaataatctagtgtgcagggcattcacctcagccccccaggcaggagccaagcacagcaggagcttccgcctcctctcca

SEQ ID NO: 113792 - DNA, 120 bp, Artificial Sequence
  ENSG00000100344_20 (sequence is synthesized)
gcctcctctccactggagcacacaacttgaacctggcttattttctgcagggaccagccccacatggtcagtgagtttctccccatgtgtggcgatgagagagtgtagaaataaagacac

SEQ ID NO: 113793 - DNA, 120 bp, Artificial Sequence
  ENSG00000100344_21 (sequence is synthesized)
ctgattttggaggattaggagaagaagctgaatttgttgaagttgagcctgaagctaaacaggaaattcttgaaaacaaagatgtggttgttcaacatgttcattttgatggacttggaa

SEQ ID NO: 113794 - DNA, 120 bp, Artificial Sequence
  ENSG00000100344_22 (sequence is synthesized)
gagtgggtgccccctaggccggggagcgggggatccccaggggtcgcggggccctggaggagcgggcatcggacgcggacacggcggggtgcatcccgagggccccctccgaggcagatg

SEQ ID NO: 113795 - DNA, 120 bp, Artificial Sequence
  ENSG00000100344_23 (sequence is synthesized)
ggccccctccgaggcagatgcttcctgcgggggcgctgttcctgggcccgggaagggggcgttggaaccccgagcggtccgggccgaagcctgggactctcagcagactctgcaggtcct

SEQ ID NO: 113796 - DNA, 120 bp, Artificial Sequence
  ENSG00000100345_0 (sequence is synthesized)
aggctccgccccggagccggctcccggctgggaatggtcccgcggctccgagggcggggcgggaaggcggcgaggagccgagctgggtgcggtgaggcgcgcagatcaccgcggttcctg

SEQ ID NO: 113797 - DNA, 120 bp, Artificial Sequence
  ENSG00000100345_1 (sequence is synthesized)
ggcagggcacggaaggctaagcaaggctgacctgctgcagctcccgcctcgtgcgctcgccccacccggccgccgcccgagcgctcgagaaagtcctctcgggagaagcagcgcctgttc

SEQ ID NO: 113798 - DNA, 120 bp, Artificial Sequence
  ENSG00000100345_2 (sequence is synthesized)
ccggggcagatccaggttcaggtcctggctataagtcaccatggcacagcaagctgccgataagtatctctatgtggataaaaacttcatcaacaatccgctggcccaggccgactgggc

SEQ ID NO: 113799 - DNA, 120 bp, Artificial Sequence
  ENSG00000100345_3 (sequence is synthesized)
tgccaagaagctggtatgggtgccttccgacaagagtggctttgagccagccagcctcaaggaggaggtgggcgaagaggccatcgtggagctggtggagaatgggaagaaggtgaaggt

SEQ ID NO: 113800 - DNA, 120 bp, Artificial Sequence
  ENSG00000100345_4 (sequence is synthesized)
gaacaaggatgacatccagaagatgaacccgcccaagttctccaaggtggaggacatggcagagctcacgtgcctcaacgaagcctcggtgctgcacaacctcaaggagcgttactactc

SEQ ID NO: 113801 - DNA, 120 bp, Artificial Sequence
  ENSG00000100345_5 (sequence is synthesized)
agggctcatctacacctattcaggcctgttctgtgtggtcatcaatccttacaagaacctgcccatctactctgaagagattgtggaaatgtacaagggcaagaagaggcacgagatgcc

SEQ ID NO: 113802 - DNA, 120 bp, Artificial Sequence
  ENSG00000100345_6 (sequence is synthesized)
ccctcacatctatgccatcacagacaccgcctacaggagtatgatgcaagaccgagaagatcaatccatcttgtgcactggtgaatctggagctggcaagacggagaacaccaagaaggt

SEQ ID NO: 113803 - DNA, 120 bp, Artificial Sequence
  ENSG00000100345_7 (sequence is synthesized)
catccagtatctggcgtacgtggcgtcctcgcacaagagcaagaaggaccagggcgagctggagcggcagctgctgcaggccaaccccatcctggaggccttcgggaacgccaagaccgt

SEQ ID NO: 113804 - DNA, 120 bp, Artificial Sequence
  ENSG00000100345_8 (sequence is synthesized)
gaagaatgacaactcctcccgcttcggcaaattcattcgcatcaactttgatgtcaatggctacattgttggagccaacattgagacttatcttttggagaaatctcgtgctatccgcca

SEQ ID NO: 113805 - DNA, 120 bp, Artificial Sequence
  ENSG00000100345_9 (sequence is synthesized)
agccaaggaagaacggaccttccacatcttctattatctcctgtctggggctggagagcacctgaagaccgatctcctgttggagccgtacaacaaataccgcttcctgtccaatggaca

SEQ ID NO: 113806 - DNA, 120 bp, Artificial Sequence
  ENSG00000100345_10 (sequence is synthesized)
cgtcaccatccccgggcagcaggacaaggacatgttccaggagaccatggaggccatgaggattatgggcatcccagaagaggagcaaatgggcctgctgcgggtcatctcaggggttct

SEQ ID NO: 113807 - DNA, 120 bp, Artificial Sequence
  ENSG00000100345_11 (sequence is synthesized)
tcagctcggcaacatcgtcttcaagaaggagcggaacactgaccaggcgtccatgcccgacaacacagctgcccaaaaggtgtcccatctcttgggtatcaatgtgaccgatttcaccag

SEQ ID NO: 113808 - DNA, 120 bp, Artificial Sequence
  ENSG00000100345_12 (sequence is synthesized)
aggaatcctcaccccgcgcatcaaggtgggacgggattacgtccagaaggcgcagactaaagagcaggctgactttgccatcgaggccttggccaaggcgacctatgagcggatgttccg

SEQ ID NO: 113809 - DNA, 120 bp, Artificial Sequence
  ENSG00000100345_13 (sequence is synthesized)
ctggctggtgctgcgcatcaacaaggctctggacaagaccaagaggcagggcgcctccttcatcgggatcctggacattgccggcttcgagatctttgatctgaactcgtttgagcagct

SEQ ID NO: 113810 - DNA, 120 bp, Artificial Sequence
  ENSG00000100345_14 (sequence is synthesized)
gtgcatcaattacaccaatgagaagctgcagcagctcttcaaccacaccatgttcatcctggagcaggaggagtaccagcgcgagggcatcgagtggaacttcatcgactttggcctcga

SEQ ID NO: 113811 - DNA, 120 bp, Artificial Sequence
  ENSG00000100345_15 (sequence is synthesized)
cctgcagccctgcatcgacctcattgagaagccagcaggccccccgggcattctggccctgctggacgaggagtgctggttccccaaagccaccgacaagagcttcgtggagaaggtgat

SEQ ID NO: 113812 - DNA, 120 bp, Artificial Sequence
  ENSG00000100345_16 (sequence is synthesized)
gcaggagcagggcacccaccccaagttccagaagcccaagcagctgaaggacaaagctgatttctgcattatccactatgccggcaaggtggattacaaagctgacgagtggctgatgaa

SEQ ID NO: 113813 - DNA, 120 bp, Artificial Sequence
  ENSG00000100345_17 (sequence is synthesized)
gaacatggatcccctgaatgacaacatcgccacactgctccaccagtcctctgacaagtttgtctcggagctgtggaaggatgtggaccgcatcatcggcctggaccaggtggccggcat

SEQ ID NO: 113814 - DNA, 120 bp, Artificial Sequence
  ENSG00000100345_18 (sequence is synthesized)
gtcggagaccgcactgcccggggccttcaagacgcggaagggcatgttccgcactgtggggcagctttacaaggagcagctggccaagctgatggctacgctgaggaacacgaaccccaa

SEQ ID NO: 113815 - DNA, 120 bp, Artificial Sequence
  ENSG00000100345_19 (sequence is synthesized)
ctttgtccgctgcatcatccccaaccacgagaagaaggccggcaagctggacccgcatctcgtgctggaccagctgcgctgcaacggtgttctcgagggcatccgtatctgccgccaggg

SEQ ID NO: 113816 - DNA, 120 bp, Artificial Sequence
  ENSG00000100345_20 (sequence is synthesized)
cttccccaacagggtggtcttccaggagtttcggcagagatatgagatcctgactccaaactccattcccaagggtttcatggacgggaagcaggcgtgcgtgctcatgataaaagccct

SEQ ID NO: 113817 - DNA, 120 bp, Artificial Sequence
  ENSG00000100345_21 (sequence is synthesized)
ggagctcgacagcaatctgtaccgcattggccagagcaaagtcttcttccgtgccggtgtgctggcccacctggaggaggagcgagacctgaagatcaccgacgtcatcatagggttcca

SEQ ID NO: 113818 - DNA, 120 bp, Artificial Sequence
  ENSG00000100345_22 (sequence is synthesized)
ggcctgctgcaggggctacctggccaggaaagcatttgccaagcggcagcagcagcttaccgccatgaaggtcctccagcggaactgcgctgcctacctgaagctgcggaactggcagtg

SEQ ID NO: 113819 - DNA, 120 bp, Artificial Sequence
  ENSG00000100345_23 (sequence is synthesized)
gtggcggctcttcaccaaggtcaagccgctgctgcaggtgagccggcaggaggaggagatgatggccaaggaggaggagctggtgaaggtcagagagaagcagctggctgcggagaacag

SEQ ID NO: 113820 - DNA, 120 bp, Artificial Sequence
  ENSG00000100345_24 (sequence is synthesized)
gctcacggagatggagacgctgcagtctcagctcatggcagagaaattgcagctgcaggagcagctccaggcagaaaccgagctgtgtgccgaggctgaggagctccgggcccgcctgac

SEQ ID NO: 113821 - DNA, 120 bp, Artificial Sequence
  ENSG00000100345_25 (sequence is synthesized)
cgccaagaagcaggaattagaagagatctgccatgacctagaggccagggtggaggaggaggaggagcgctgccagcacctgcaggcggagaagaagaagatgcagcagaacatccagga

SEQ ID NO: 113822 - DNA, 120 bp, Artificial Sequence
  ENSG00000100345_26 (sequence is synthesized)
gcttgaggagcagctggaggaggaggagagcgcccggcagaagctgcagctggagaaggtgaccaccgaggcgaagctgaaaaagctggaggaggagcagatcatcctggaggaccagaa

SEQ ID NO: 113823 - DNA, 120 bp, Artificial Sequence
  ENSG00000100345_27 (sequence is synthesized)
ctgcaagctggccaaggaaaagaaactgctggaagacagaatagctgagttcaccaccaacctcacagaagaggaggagaaatctaagagcctcgccaagctcaagaacaagcatgaggc

SEQ ID NO: 113824 - DNA, 120 bp, Artificial Sequence
  ENSG00000100345_28 (sequence is synthesized)
aatgatcactgacttggaagagcgcctccgcagggaggagaagcagcgacaggagctggagaagacccgccggaagctggagggagactccacagacctcagcgaccagatcgccgagct

SEQ ID NO: 113825 - DNA, 120 bp, Artificial Sequence
  ENSG00000100345_29 (sequence is synthesized)
ccaggcccagatcgcggagctcaagatgcagctggccaagaaagaggaggagctccaggccgccctggccagagtggaagaggaagctgcccagaagaacatggccctcaagaagatccg

SEQ ID NO: 113826 - DNA, 120 bp, Artificial Sequence
  ENSG00000100345_30 (sequence is synthesized)
ggagctggaatctcagatctctgaactccaggaagacctggagtctgagcgtgcttccaggaataaagctgagaagcagaaacgggaccttggggaagagctagaggctctgaaaacaga

SEQ ID NO: 113827 - DNA, 120 bp, Artificial Sequence
  ENSG00000100345_31 (sequence is synthesized)
ccagatccaggagatgaggcagaagcactcacaggccgtggaggagctggcggagcagctggagcagacgaagcgggtgaaagcaaacctcgagaaggcaaagcagactctggagaacga

SEQ ID NO: 113828 - DNA, 120 bp, Artificial Sequence
  ENSG00000100345_32 (sequence is synthesized)
gcggggggagctggccaacgaggtgaaggtgctgctgcagggcaaaggggactcggagcacaagcgcaagaaagtggaggcgcagctgcaggagctgcaggtcaagttcaacgagggaga

SEQ ID NO: 113829 - DNA, 120 bp, Artificial Sequence
  ENSG00000100345_33 (sequence is synthesized)
gcgcgtgcgcacagagctggccgacaaggtcaccaagctgcaggtggagctggacaacgtgaccgggcttctcagccagtccgacagcaagtccagcaagctcaccaaggacttctccgc

SEQ ID NO: 113830 - DNA, 120 bp, Artificial Sequence
  ENSG00000100345_34 (sequence is synthesized)
gctggagtcccagctgcaggacactcaggagctgctgcaggaggagaaccggcagaagctgagcctgagcaccaagctcaagcaggtggaggacgagaagaattccttccgggagcagct

SEQ ID NO: 113831 - DNA, 120 bp, Artificial Sequence
  ENSG00000100345_35 (sequence is synthesized)
ggaggaggaggaggaggccaagcacaacctggagaagcagatcgccaccctccatgcccaggtggccgacatgaaaaagaagatggaggacagtgtggggtgcctggaaactgctgagga

SEQ ID NO: 113832 - DNA, 120 bp, Artificial Sequence
  ENSG00000100345_36 (sequence is synthesized)
ggtgaagaggaagctccagaaggacctggagggcctgagccagcggcacgaggagaaggtggccgcctacgacaagctggagaagaccaagacgcggctgcagcaggagctggacgacct

SEQ ID NO: 113833 - DNA, 120 bp, Artificial Sequence
  ENSG00000100345_37 (sequence is synthesized)
gctggtggacctggaccaccagcgccagagcgcgtgcaacctggagaagaagcagaagaagtttgaccagctcctggcggaggagaagaccatctctgccaagtatgcagaggagcgcga

SEQ ID NO: 113834 - DNA, 120 bp, Artificial Sequence
  ENSG00000100345_38 (sequence is synthesized)
ccgggctgaggcggaggcccgagagaaggagaccaaggctctgtcgctggcccgggccctggaggaagccatggagcagaaggcggagctggagcggctcaacaagcagttccgcacgga

SEQ ID NO: 113835 - DNA, 120 bp, Artificial Sequence
  ENSG00000100345_39 (sequence is synthesized)
gatggaggaccttatgagctccaaggatgatgtgggcaagagtgtccacgagctggagaagtccaagcgggccctagagcagcaggtggaggagatgaagacgcagctggaagagctgga

SEQ ID NO: 113836 - DNA, 120 bp, Artificial Sequence
  ENSG00000100345_40 (sequence is synthesized)
ggacgagctgcaggccaccgaagatgccaagctgcggttggaggtcaacctgcaggccatgaaggcccagttcgagcgggacctgcagggccgggacgagcagagcgaggagaagaagaa

SEQ ID NO: 113837 - DNA, 120 bp, Artificial Sequence
  ENSG00000100345_41 (sequence is synthesized)
gcagctggtcagacaggtgcgggagatggaggcagagctggaggacgagaggaagcagcgctcgatggcagtggccgcccggaagaagctggagatggacctgaaggacctggaggcgca

SEQ ID NO: 113838 - DNA, 120 bp, Artificial Sequence
  ENSG00000100345_42 (sequence is synthesized)
catcgactcggccaacaagaaccgggacgaagccatcaaacagctgcggaagctgcaggcccagatgaaggactgcatgcgcgagctggatgacacccgcgcctctcgtgaggagatcct

SEQ ID NO: 113839 - DNA, 120 bp, Artificial Sequence
  ENSG00000100345_43 (sequence is synthesized)
ggcccaggccaaagagaacgagaagaagctgaagagcatggaggccgagatgatccagttgcaggaggaactggcagccgcggagcgtgccaagcgccaggcccagcaggagcgggatga

SEQ ID NO: 113840 - DNA, 120 bp, Artificial Sequence
  ENSG00000100345_44 (sequence is synthesized)
gctggctgacgagatcgccaacagcagcggcaaaggagccctggcgttagaggagaagcggcgtctggaggcccgcatcgcccagctggaggaggagctggaggaggagcagggcaacac

SEQ ID NO: 113841 - DNA, 120 bp, Artificial Sequence
  ENSG00000100345_45 (sequence is synthesized)
ggagctgatcaacgaccggctgaagaaggccaacctgcagatcgaccagatcaacaccgacctgaacctggagcgcagccacgcccagaagaacgagaatgctcggcagcagctggaacg

SEQ ID NO: 113842 - DNA, 120 bp, Artificial Sequence
  ENSG00000100345_46 (sequence is synthesized)
ccagaacaaggagcttaaggtcaagctgcaggagatggagggcactgtcaagtccaagtacaaggcctccatcaccgccctcgaggccaagattgcacagctggaggagcagctggacaa

SEQ ID NO: 113843 - DNA, 120 bp, Artificial Sequence
  ENSG00000100345_47 (sequence is synthesized)
cgagaccaaggagcgccaggcagcctgcaaacaggtgcgtcggaccgagaagaagctgaaggatgtgctgctgcaggtggatgacgagcggaggaacgccgagcagtacaaggaccaggc

SEQ ID NO: 113844 - DNA, 120 bp, Artificial Sequence
  ENSG00000100345_48 (sequence is synthesized)
cgacaaggcatctacccgcctgaagcagctcaagcggcagctggaggaggccgaagaggaggcccagcgggccaacgcctcccgccggaaactgcagcgcgagctggaggacgccactga

SEQ ID NO: 113845 - DNA, 120 bp, Artificial Sequence
  ENSG00000100345_49 (sequence is synthesized)
gacggccgatgccatgaaccgcgaagtcagctccctaaagaacaagctcaggcgcggggacctgccgtttgtcgtgccccgccgaatggcccggaaaggcgccggggatggctccgacga

SEQ ID NO: 113846 - DNA, 120 bp, Artificial Sequence
  ENSG00000100345_50 (sequence is synthesized)
agaggtagatggcaaagcggatggggctgaggccaaacctgccgaataagcctcttctcctgcagcctgagatggatggacagacagacaccacagcctccccttcccagaccccgcagc

SEQ ID NO: 113847 - DNA, 120 bp, Artificial Sequence
  ENSG00000100345_51 (sequence is synthesized)
acgcctctccccaccttcttgggactgctgtgaacatgcctcctcctgccctccgccccgtccccccatcccgtttccctccaggtgttgttgagggcatttggcttcctctgctgcatc

SEQ ID NO: 113848 - DNA, 120 bp, Artificial Sequence
  ENSG00000100345_52 (sequence is synthesized)
cccttccagctccctcccctgctcagaatctgataccaaagagacagggcccgggcccaggcagagagcgaccagcaggctcctcagccctctcttgccaaaaagcacaagatgttgagg

SEQ ID NO: 113849 - DNA, 120 bp, Artificial Sequence
  ENSG00000100345_53 (sequence is synthesized)
cgagcagggcaggcccccggggaggggccagagttttctatgaatctatttttcttcagactgaggccttttggtagtcggagcccccgcagtcgtcagcctccctgacgtctgccacca

SEQ ID NO: 113850 - DNA, 120 bp, Artificial Sequence
  ENSG00000100345_54 (sequence is synthesized)
gcgcccccactcctcctcctttctttgctgtttgcaatcacacgtggtgacctcacacacctctgccccttgggcctcccactcccatggctctgggcggtccagaaggagcaggccctg

SEQ ID NO: 113851 - DNA, 120 bp, Artificial Sequence
  ENSG00000100345_55 (sequence is synthesized)
ggcctccacctctgtgcagggcacagaaggctggggtggggggaggagtggattcctccccaccctgtcccaggcagcgccactgtccgctgtctccctcctgattctaaaatgtctcaa

SEQ ID NO: 113852 - DNA, 120 bp, Artificial Sequence
  ENSG00000100345_56 (sequence is synthesized)
gtgcaatgccccctcccctcctttaccgaggacagcctgcctctgccacagcaaggctgtcggggtcaagctggaaaggccagcagccttccagtggcttctcccaacactcttggggac

SEQ ID NO: 113853 - DNA, 120 bp, Artificial Sequence
  ENSG00000100345_57 (sequence is synthesized)
caaatatatttaatggttaagggacttgtcccaagtctgacagccagagcgttagaggggccagcggccctcccaggcgatcttgtgtctactctaggactgggcccgagggtggtttac

SEQ ID NO: 113854 - DNA, 120 bp, Artificial Sequence
  ENSG00000100345_58 (sequence is synthesized)
ctgcaccgttgactcagtatagtttaaaaatctgccacctgcacaggtatttttgaaagcaaaataaggttttcttttttcccctttcttgtaataaatgataaaattccgagtctttct

SEQ ID NO: 113855 - DNA, 120 bp, Artificial Sequence
  ENSG00000100345_59 (sequence is synthesized)
cactgcctttgtttagaagagagtagctcgtcctcactggtctacactggttgccgaatttacttgtattcctaactgttttgtatatgctgcattgagacttacggcaagaaggcattt

SEQ ID NO: 113856 - DNA, 120 bp, Artificial Sequence
  ENSG00000100345_60 (sequence is synthesized)
tttttttttaaaggaaacaaactctcaaatcatgaagtgatataaaagctgcatatgcctacaaagctctgaattcaggtcccagttgctgtcacaaaggagtgagtgaaactcccaccc

SEQ ID NO: 113857 - DNA, 120 bp, Artificial Sequence
  ENSG00000100345_61 (sequence is synthesized)
tacccccttttttatataataaaagtgccttagcatgtgttgcagctgtcaccactacagtaagctggtttacagatgttttccactgagcatcacaataaagagaaccatgtgctacga

SEQ ID NO: 113858 - DNA, 120 bp, Artificial Sequence
  ENSG00000100345_62 (sequence is synthesized)
gtgcccaccggaggtggggcggggggctgtggtctcccccgtgctctctagctccccatgtcaggggcacctctgatctcttgctatcctttcttacttagggcaaattcattcgcatca

SEQ ID NO: 113859 - DNA, 120 bp, Artificial Sequence
  ENSG00000100345_63 (sequence is synthesized)
ctgagtagctgggactacgggtgcacaccaccatacatacctggctaattgtttgtattttttgtagaggtgtggtctcaccatgtcgcccaggttggtcacaaactcttgggctccagc

SEQ ID NO: 113860 - DNA, 120 bp, Artificial Sequence
  ENSG00000100345_64 (sequence is synthesized)
ggggctgggaaggatggtcttgtggggctgtggctgcctttaggtcacactctgggtctttgtggcaggaactggcagccgcggagcgtgccaagcgccaggcccagcaggagcgggatg

SEQ ID NO: 113861 - DNA, 120 bp, Artificial Sequence
  ENSG00000100345_65 (sequence is synthesized)
gtggggctgactggctgcacgcccagagcccctaaccggggccacgggccacacgtccatctccgcaggccgacaaggcatctacccgcctgaagcagctcaagcggcagctggaggagg

SEQ ID NO: 113862 - DNA, 120 bp, Artificial Sequence
  ENSG00000100345_66 (sequence is synthesized)
acgtccatctccgcaggccgacaaggcatctacccgcctgaagcagctcaagcggcagctggaggaggccgaagaggaggcccagcgggccaacgcctcccgccggaaactgcagcgcga

SEQ ID NO: 113863 - DNA, 120 bp, Artificial Sequence
  ENSG00000100345_67 (sequence is synthesized)
aggagggggtgagccctctagggtggctgggcccaccgcacaccgttagacgcagacctggcgcccctgtggccccagggagttggggggtgtccctgcttggcttgtctggcttgagga

SEQ ID NO: 113864 - DNA, 120 bp, Artificial Sequence
  ENSG00000100345_68 (sequence is synthesized)
ggggctggtgttcggggctgccccgagcccagctctgggagcttattttgtcatcacagtggcactgcagcctgtctacctcctggctgcggctcgtcctcagatgccttctgtgaaggc

SEQ ID NO: 113865 - DNA, 120 bp, Artificial Sequence
  ENSG00000100345_69 (sequence is synthesized)
gctcacctcggaagaggcaggcagcctagctggtcggtggctactggtgttgaacggttaaatgtgtctcctgaggccatgcacgtggaaagccaccgagaagatcaatccatcttgtgc

SEQ ID NO: 113866 - DNA, 120 bp, Artificial Sequence
  ENSG00000100345_70 (sequence is synthesized)
ttttagagatacagacatggtacagccttcaagggaaccaagggaattacaaacaccagctttaggagagtacttaattcctggcagggaaggacaaggggtgagttggagagagacatg

SEQ ID NO: 113867 - DNA, 120 bp, Artificial Sequence
  ENSG00000100345_71 (sequence is synthesized)
ccaggggctagcagtttgcagtgatgtcctcttcctgcatccaggagttgggtgcgagtgtctgtgtgtttgtgatgctttaagcctgacacacgtttcataacgagtgctcagtatttt

SEQ ID NO: 113868 - DNA, 120 bp, Artificial Sequence
  ENSG00000100345_72 (sequence is synthesized)
cgtcctcgcacaagagcaagaaggaccaggaggcctattttaaaaacagagctgtgaggttaggagttctctagctgtgcttttccatctctgaatttgcagtaaaatccatttcccaag

SEQ ID NO: 113869 - DNA, 120 bp, Artificial Sequence
  ENSG00000100346_0 (sequence is synthesized)
atggctgagagcgcctccccgccctcctcatctgcagcagccccagccgctgagccaggagtcaccacggagcagcccggaccccggagccccccatcctccccgccaggcctggaggag

SEQ ID NO: 113870 - DNA, 120 bp, Artificial Sequence
  ENSG00000100346_1 (sequence is synthesized)
cctctggatggagctgatcctcatgtcccacacccagacctggcgcctattgccttcttctgcctgcgacagaccaccagcccccggaactggtgcatcaagatggtgtgcaacccgtgg

SEQ ID NO: 113871 - DNA, 120 bp, Artificial Sequence
  ENSG00000100346_2 (sequence is synthesized)
tttgaatgtgtcagcatgctggtgatcctgctgaactgcgtgacacttggcatgtaccagccgtgcgacgacatggactgcctgtccgaccgctgcaagatcctgcaggtctttgatgac

SEQ ID NO: 113872 - DNA, 120 bp, Artificial Sequence
  ENSG00000100346_3 (sequence is synthesized)
ttcatctttatcttctttgccatggagatggtgctcaagatggtggccctggggatttttggcaagaagtgctacctcggggacacatggaaccgcctggatttcttcatcgtcatggca

SEQ ID NO: 113873 - DNA, 120 bp, Artificial Sequence
  ENSG00000100346_4 (sequence is synthesized)
gggatggtcgagtactccctggaccttcagaacatcaacctgtcagccatccgcaccgtgcgcgtcctgaggcccctcaaagccatcaaccgcgtgcccagtatgcggatcctggtgaac

SEQ ID NO: 113874 - DNA, 120 bp, Artificial Sequence
  ENSG00000100346_5 (sequence is synthesized)
ctgctcctggacacactgcccatgctggggaatgtcctgctgctctgcttctttgtcttcttcatctttggcatcataggtgtgcagctctgggcgggcctgctgcgtaaccgctgcttc

SEQ ID NO: 113875 - DNA, 120 bp, Artificial Sequence
  ENSG00000100346_6 (sequence is synthesized)
ctggaggagaacttcaccatacaaggggatgtggccttgcccccatactaccagccggaggaggatgatgagatgcccttcatctgctccctgtcgggcgacaatgggataatgggctgc

SEQ ID NO: 113876 - DNA, 120 bp, Artificial Sequence
  ENSG00000100346_7 (sequence is synthesized)
catgagatccccccgctcaaggagcagggccgtgagtgctgcctgtccaaggacgacgtctacgactttggggcggggcgccaggacctcaatgccagcggcctctgtgtcaactggaac

SEQ ID NO: 113877 - DNA, 120 bp, Artificial Sequence
  ENSG00000100346_8 (sequence is synthesized)
cgttactacaatgtgtgccgcacgggcagcgccaacccccacaagggtgccatcaactttgacaacatcggttatgcttggattgtcatcttccaggtgatcactctggaaggctgggtg

SEQ ID NO: 113878 - DNA, 120 bp, Artificial Sequence
  ENSG00000100346_9 (sequence is synthesized)
gagatcatgtactacgtgatggatgctcactccttctacaacttcatctacttcatcctgcttatcatagtgggctccttcttcatgatcaacctgtgcctcgttgtcatagcgacccag

SEQ ID NO: 113879 - DNA, 120 bp, Artificial Sequence
  ENSG00000100346_10 (sequence is synthesized)
ttctcggagaccaagcaacgggagcaccggctgatgctggagcagcggcagcgctacctgtcctccagcacggtggccagctacgccgagcctggcgactgctacgaggagatcttccag

SEQ ID NO: 113880 - DNA, 120 bp, Artificial Sequence
  ENSG00000100346_11 (sequence is synthesized)
ccagtatgtctgccacatcctgcgcaaggccaagcgccgcgccctgggcctctaccaggccctgcagagccggcgccaggccctgggcccggaggccccggcccccgccaaacctgggcc

SEQ ID NO: 113881 - DNA, 120 bp, Artificial Sequence
  ENSG00000100346_12 (sequence is synthesized)
gccaaggagccccggcactaccatgggaagactaagggtcagggagatgaagggagacatctcggaagccggcattgccagactttgcatgggcctgcctcccctggaaatgatcactcg

SEQ ID NO: 113882 - DNA, 120 bp, Artificial Sequence
  ENSG00000100346_13 (sequence is synthesized)
ggaagagagctgtgcccgcaacatagccccctggatgcgacgccccacaccctggtgcagcccatccccgccacgctggcttccgatcccgccagctgcccttgctgccagcatgaggac

SEQ ID NO: 113883 - DNA, 120 bp, Artificial Sequence
  ENSG00000100346_14 (sequence is synthesized)
gccctcgggcctgggcagcaccgactcgggccaggagggctcgggctccgggagctccgctggtggcgaggacgaggcggatggggacggggcccggagcagcgaggacggagcctcctc

SEQ ID NO: 113884 - DNA, 120 bp, Artificial Sequence
  ENSG00000100346_15 (sequence is synthesized)
gcctcctcagaactggggaaggaggaggaggaggaggagcaggcggatggggcggtctggctgtgcggggatgtgtggcgggagacgcgagccaagctgcgcggcatcgtggacagcaag

SEQ ID NO: 113885 - DNA, 120 bp, Artificial Sequence
  ENSG00000100346_16 (sequence is synthesized)
tacttcaaccggggcatcatgatggccatcctggtcaacaccgtcagcatgggcatcgagcaccacgagcagccggaggagctgaccaacatcctggagatctgcaatgtggtcttcacc

SEQ ID NO: 113886 - DNA, 120 bp, Artificial Sequence
  ENSG00000100346_17 (sequence is synthesized)
agcatgtttgccctggagatgatcctgaagctggctgcatttgggctcttcgactacctgcgtaacccctacaacatcttcgacagcatcattgtcatcatcagcatctgggagattgtg

SEQ ID NO: 113887 - DNA, 120 bp, Artificial Sequence
  ENSG00000100346_18 (sequence is synthesized)
gggcaggcggacggtgggctgtcggtgctgcggaccttccggctgctgcgcgtgctgaaactggtgcgcttcatgcctgccctgcggcgccagctcgtggtgctcatgaagaccatggac

SEQ ID NO: 113888 - DNA, 120 bp, Artificial Sequence
  ENSG00000100346_19 (sequence is synthesized)
aacgtggccaccttctgcatgctgctcatgctcttcatcttcatcttcagcatccttgggatgcatatttttggctgcaagttcagcctccgcacggacactggagacacggtgcccgac

SEQ ID NO: 113889 - DNA, 120 bp, Artificial Sequence
  ENSG00000100346_20 (sequence is synthesized)
aggaagaacttcgactccctgctgtgggccatcgtcactgtgttccagatcctcacccaggaggactggaacgtcgttctctacaatggcatggcctccacttctccctgggcctccctc

SEQ ID NO: 113890 - DNA, 120 bp, Artificial Sequence
  ENSG00000100346_21 (sequence is synthesized)
tactttgtcgccctcatgaccttcggcaactatgtgctcttcaacctgctggtggccatcctggtggagggcttccaggcggagggtgacgccaatcgctcctactcggacgaggaccag

SEQ ID NO: 113891 - DNA, 120 bp, Artificial Sequence
  ENSG00000100346_22 (sequence is synthesized)
agctcatccaacatagaagagtttgataagctccaggaaggcctggacagcagcggagatcccaagctctgcccaatccccatgacccccaatgggcacctggaccccagtctcccactg

SEQ ID NO: 113892 - DNA, 120 bp, Artificial Sequence
  ENSG00000100346_23 (sequence is synthesized)
ggtgggcacctaggtcctgctggggctgcgggacctgccccccgactctcactgcagccggaccccatgctggtggccctgggctcccgaaagagcagtgtcatgtctctagggaggatg

SEQ ID NO: 113893 - DNA, 120 bp, Artificial Sequence
  ENSG00000100346_24 (sequence is synthesized)
agctatgaccagcgctccctgtccagctcccggagctcctactacgggccatggggccgcagcgcggcctgggccagccgtcgctccagctggaacagcctcaagcacaagccgccgtcg

SEQ ID NO: 113894 - DNA, 120 bp, Artificial Sequence
  ENSG00000100346_25 (sequence is synthesized)
gcggagcatgagtccctgctctctgcggagcgcggcggcggcgcccgggtctgcgaggttgccgcggacgaggggccgccgcgggccgcacccctgcacaccccacacgcccaccacatt

SEQ ID NO: 113895 - DNA, 120 bp, Artificial Sequence
  ENSG00000100346_26 (sequence is synthesized)
catcacgggccccatctggcgcaccgccaccgccaccaccgccggacgctgtccctcgacaacagggactcggtggacctggccgagctggtgcccgcggtgggcgcccacccccgggcc

SEQ ID NO: 113896 - DNA, 120 bp, Artificial Sequence
  ENSG00000100346_27 (sequence is synthesized)
gcctggagggcggcaggcccggcccccgggcatgaggactgcaatggcaggatgcccagcatcgccaaagacgtcttcaccaagatgggcgaccgcggggatcgcggggaggatgaggag

SEQ ID NO: 113897 - DNA, 120 bp, Artificial Sequence
  ENSG00000100346_28 (sequence is synthesized)
gaaatcgactacaccctgtgcttccgcgtccgcaagatgatcgacgtctataagcccgactggtgcgaggtccgcgaagactggtctgtctacctcttctctcccgagaacaggttccgg

SEQ ID NO: 113898 - DNA, 120 bp, Artificial Sequence
  ENSG00000100346_29 (sequence is synthesized)
gtcctgtgtcagaccattattgcccacaaactcttcgactacgtcgtcctggccttcatctttctcaactgcatcaccatcgccctggagcggcctcagatcgaggccggcagcaccgaa

SEQ ID NO: 113899 - DNA, 120 bp, Artificial Sequence
  ENSG00000100346_30 (sequence is synthesized)
cgcatctttctcaccgtgtccaactacatcttcacggccatcttcgtgggcgagatgacattgaaggtagtctcgctgggcctgtacttcggcgagcaggcgtacctacgcagcagctgg

SEQ ID NO: 113900 - DNA, 120 bp, Artificial Sequence
  ENSG00000100346_31 (sequence is synthesized)
aacgtgctggatggctttcttgtcttcgtgtccatcatcgacatcgtggtgtccctggcctcagccgggggagccaagatcttgggggtcctccgagtcttgcggctcctgcgcacccta

SEQ ID NO: 113901 - DNA, 120 bp, Artificial Sequence
  ENSG00000100346_32 (sequence is synthesized)
cgccccctgcgtgtcatcagccgggcgccgggcctgaagctggtggtggagacactcatctcctccctcaagcccatcggcaacatcgtgctcatctgctgtgccttcttcatcatcttt

SEQ ID NO: 113902 - DNA, 120 bp, Artificial Sequence
  ENSG00000100346_33 (sequence is synthesized)
ggcatcctgggagtgcagctcttcaagggcaagttctaccactgtctgggcgtggacacccgcaacatcaccaaccgctcggactgcatggccgccaactaccgctgggtccatcacaaa

SEQ ID NO: 113903 - DNA, 120 bp, Artificial Sequence
  ENSG00000100346_34 (sequence is synthesized)
tacaacttcgacaacctgggccaggctctgatgtccctctttgtcctggcatccaaggatggttgggtgaacatcatgtacaatggactggatgctgttgctgtggaccagcagcctgtg

SEQ ID NO: 113904 - DNA, 120 bp, Artificial Sequence
  ENSG00000100346_35 (sequence is synthesized)
accaaccacaacccctggatgctgctgtacttcatctccttcctgctcatcgtcagcttctttgtgctcaacatgtttgtgggtgtcgtggtggagaacttccacaagtgccggcagcac

SEQ ID NO: 113905 - DNA, 120 bp, Artificial Sequence
  ENSG00000100346_36 (sequence is synthesized)
caggaggctgaagaggcacggcggcgtgaggagaagcggctgcggcgcctggagaagaagcgccggaaggcccagcggctgccctactatgccacctattgtcacacccggctgctcatc

SEQ ID NO: 113906 - DNA, 120 bp, Artificial Sequence
  ENSG00000100346_37 (sequence is synthesized)
cactccatgtgcaccagccactacctggacatcttcatcaccttcatcatctgcctcaacgtggtcaccatgtccctggagcactacaatcagcccacgtccctggagacagccctcaag

SEQ ID NO: 113907 - DNA, 120 bp, Artificial Sequence
  ENSG00000100346_38 (sequence is synthesized)
tactgcaactatatgttcaccactgtctttgtgctggaggctgtgctgaagctggtggcatttggtctgaggcgcttcttcaaggaccgatggaaccagctggacctggccattgtgcta

SEQ ID NO: 113908 - DNA, 120 bp, Artificial Sequence
  ENSG00000100346_39 (sequence is synthesized)
ctgtcagtcatgggcatcaccctggaggagatcgagatcaatgcggccctgcccatcaatcccaccatcatccgcatcatgagggttctgcgcattgcccgagtgctgaagctgttgaag

SEQ ID NO: 113909 - DNA, 120 bp, Artificial Sequence
  ENSG00000100346_40 (sequence is synthesized)
atggccacaggaatgcgggccctgctggacacggtggtgcaagctttgccccaggtgggcaacctgggcctcctcttcatgctgctcttcttcatctatgctgctctcggggtggagctc

SEQ ID NO: 113910 - DNA, 120 bp, Artificial Sequence
  ENSG00000100346_41 (sequence is synthesized)
atgagccggcatgccaccttcgagaacttcggcatggccttcctcacactcttccaggtctccacgggtgacaactggaacgggatcatgaaggacacgctgcgggactgcacccacgac

SEQ ID NO: 113911 - DNA, 120 bp, Artificial Sequence
  ENSG00000100346_42 (sequence is synthesized)
gagcgcagctgcctgagcagcctgcagtttgtgtcgccgctgtacttcgtgagcttcgtgctcaccgcgcagttcgtgctcatcaacgtggtggtggctgtgctcatgaagcacctggac

SEQ ID NO: 113912 - DNA, 120 bp, Artificial Sequence
  ENSG00000100346_43 (sequence is synthesized)
gacagcaacaaggaggcgcaggaggacgccgagatggatgccgagctcgagctggagatggcccatggcctgggccctggcccgaggctgcctaccggctccccgggcgcccctggccga

SEQ ID NO: 113913 - DNA, 120 bp, Artificial Sequence
  ENSG00000100346_44 (sequence is synthesized)
gggccgggaggggcgggcggcgggggcgacaccgagggcggcttgtgccggcgctgctactcgcctgcccaggagaacctgtggctggacagcgtctctttaatcatcaaggactccttg

SEQ ID NO: 113914 - DNA, 120 bp, Artificial Sequence
  ENSG00000100346_45 (sequence is synthesized)
gagggggagctgaccatcatcgacaacctgtcgggctccatcttccaccactactcctcgcctgccggctgcaagaagtgtcaccacgacaagcaagaggtgcagctggctgagacggag

SEQ ID NO: 113915 - DNA, 120 bp, Artificial Sequence
  ENSG00000100346_46 (sequence is synthesized)
gccttctccctgaactcagacaggtcctcgtccatcctgctgggtgacgacctgagtctcgaggaccccacagcctgcccacctggccgcaaagacagcaagggtgagctggacccacct

SEQ ID NO: 113916 - DNA, 120 bp, Artificial Sequence
  ENSG00000100346_47 (sequence is synthesized)
gagcccatgcgtgtgggagacctgggcgaatgcttcttccccttgtcctctacggccgtctcgccggatccagagaacttcctgtgtgagatggaggagatcccattcaaccctgtccgg

SEQ ID NO: 113917 - DNA, 120 bp, Artificial Sequence
  ENSG00000100346_48 (sequence is synthesized)
tcctggctgaaacatgacagcagtcaagcacccccaagtcccttctccccggatgcctccagccctctcctgcccatgccagccgagttcttccaccctgcagtgtctgccagccagaaa

SEQ ID NO: 113918 - DNA, 120 bp, Artificial Sequence
  ENSG00000100346_49 (sequence is synthesized)
ggcccagaaaagggcactggcactggaaccctccccaagattgcgctgcagggctcctgggcatctctgcggtcaccaagggtcaactgtaccctcctccggcaggccaccgggagcgac

SEQ ID NO: 113919 - DNA, 120 bp, Artificial Sequence
  ENSG00000100346_50 (sequence is synthesized)
acgtcgctggacgccagccccagcagctccgcgggcagcctgcagaccacgctcgaggacagcctgaccctgagcgacagcccccggcgtgccctggggccgcccgcgcctgctccagga

SEQ ID NO: 113920 - DNA, 120 bp, Artificial Sequence
  ENSG00000100346_51 (sequence is synthesized)
ccgcctgagcctgcgcggccggggcctcttcagcctgcgggggctgcgggcgcatcagcgcagccacagcagcgggggctccaccagcccgggctgcacccaccacgactccatggaccc

SEQ ID NO: 113921 - DNA, 120 bp, Artificial Sequence
  ENSG00000100346_52 (sequence is synthesized)
ccgggctgcacccaccacgactccatggacccctcggacgaggagggccgcggtggcgcgggcggcgggggcgcgggcagcgagcactcggagaccctcagcagcctctcgctcacctcc

SEQ ID NO: 113922 - DNA, 120 bp, Artificial Sequence
  ENSG00000100346_53 (sequence is synthesized)
cggagaccctcagcagcctctcgctcacctccctcttctgcccgccgcccccgccgccagcccccggcctcacgcccgccaggaagttcagcagcaccagcagcctggccgcccccggcc

SEQ ID NO: 113923 - DNA, 120 bp, Artificial Sequence
  ENSG00000100346_54 (sequence is synthesized)
gcagcaaggacccccccggccgggcaccgctgcccatgggcctgggccccttggcgcccccgccgcaaccgctccccggagagctggagccgggagacgccgccagcaagaggaagagat

SEQ ID NO: 113924 - DNA, 120 bp, Artificial Sequence
  ENSG00000100346_55 (sequence is synthesized)
ggagacgccgccagcaagaggaagagatgagggtcgcaggggcccccggccgcccaccgcccgccccgtctcaccttctttacctcaggagccaggagcagacagcaatacttcgtccac

SEQ ID NO: 113925 - DNA, 120 bp, Artificial Sequence
  ENSG00000100346_56 (sequence is synthesized)
acctgggatcgcgcagggcccgcagggcacaggcgcccgacagccgggctgagcggagtctgggttagccaggcctgcgtggcccatggtggcccttccagtgcatatacatacatatat

SEQ ID NO: 113926 - DNA, 120 bp, Artificial Sequence
  ENSG00000100346_57 (sequence is synthesized)
atatatatatatatatatatatgtgtatacacacacacatagacagacatatatatatatatttattttttttactgagagcttatgacttccagaaagtgctaaaggtgggaggtgggc

SEQ ID NO: 113927 - DNA, 120 bp, Artificial Sequence
  ENSG00000100346_58 (sequence is synthesized)
aaggtgggaggtgggccagggcctggacggggcttttgtctgatgctctgggattctggccagacccaccccagggcacatgtcctgcgggggcgtcccagctgtgttttttgatgtctc

SEQ ID NO: 113928 - DNA, 120 bp, Artificial Sequence
  ENSG00000100346_59 (sequence is synthesized)
ctccctggttaagagtagcttggagaggaccctcaggcctctgagggcaccaggccctggagaagaggtgcaattcagggtgtgtgtgtgttttttttcctttaaagaagaaacgctgct

SEQ ID NO: 113929 - DNA, 120 bp, Artificial Sequence
  ENSG00000100346_60 (sequence is synthesized)
aagatcccacgtggctcccacgtgtcggggtgtctgtcctgtcatcctgactgtctcgttattgtgaagtctttcgtagacaccccagagcacacacatccccttagtccaccggttaga

SEQ ID NO: 113930 - DNA, 120 bp, Artificial Sequence
  ENSG00000100346_61 (sequence is synthesized)
tgtctctctttagaaaaatcaggggtgagtagctgtgtttccttaggcctggggtaggggatggagagcagctccaaggctgagctggggctctggccccaggtgaggtccccagctcct

SEQ ID NO: 113931 - DNA, 120 bp, Artificial Sequence
  ENSG00000100346_62 (sequence is synthesized)
gagcacttctgagggggtgggttccacccccaggagggcgggggtgggtggagcaggagtggaggcagcctgcagaggaagggtgcgggagactgagccggcagtggcttgcttggaggg

SEQ ID NO: 113932 - DNA, 120 bp, Artificial Sequence
  ENSG00000100346_63 (sequence is synthesized)
gctagggtacccgcctggtctcggctggctccagctgccctgcaggtgcccctgggctcaggtagttagttgttcagccactaatgccttttatcccccatatgggcgctgagctgtggc

SEQ ID NO: 113933 - DNA, 120 bp, Artificial Sequence
  ENSG00000100346_64 (sequence is synthesized)
tgttcctggacactgtgctgtccccgtcctgagcaactatgcccccgccccagtaggttcaaggcaaagcagctctgaccgaattctaggcaggggtgggggcacctgcctgggccctgg

SEQ ID NO: 113934 - DNA, 120 bp, Artificial Sequence
  ENSG00000100346_65 (sequence is synthesized)
gtccagccgcatccccatgcccagcctttcgcgtcacctggaggccacatcttcccaccccacctgccagcccctgtctctcctccccgctgcccctaactgcagctcagctttcactat

SEQ ID NO: 113935 - DNA, 120 bp, Artificial Sequence
  ENSG00000100346_66 (sequence is synthesized)
agcagtgcttcccaaacgggttctagacttgggtgtttgatttgaagagttacgcatttatttcactatttattgggaaaaaaatgcattgaacccgtgatttcacagacattttgctta

SEQ ID NO: 113936 - DNA, 120 bp, Artificial Sequence
  ENSG00000100346_67 (sequence is synthesized)
ggtcaaggctactttttaaaaagggagtgactttcatgaagtcagtttgaagaaggaggttgggagcatgttggtggcagtgatctggagaggctgcaggggccacgagtttgcagatgc

SEQ ID NO: 113937 - DNA, 120 bp, Artificial Sequence
  ENSG00000100346_68 (sequence is synthesized)
tgtacttcagcaataaccttgcctttgctaagaccccctccgagggcttcaggggggcctgccaagggggggccttgttcttgttcccaaactctgacttggaagaactcagcttgtggc

SEQ ID NO: 113938 - DNA, 120 bp, Artificial Sequence
  ENSG00000100346_69 (sequence is synthesized)
cgggctggtgagggtgtggggtgcgcccttcccttttgggctgagggagagggggccgggaggggttgtcaagcccacccgggaaactgagccctggagaggggaagcagccagcccagg

SEQ ID NO: 113939 - DNA, 120 bp, Artificial Sequence
  ENSG00000100346_70 (sequence is synthesized)
atgcttcagggccctggcagcaaagaagctggggtggtgtggagggccctactccacaccctagagctgtgatgctgagcaaggtgcctgtggcggaaggaactgcccagtcctccctgg

SEQ ID NO: 113940 - DNA, 120 bp, Artificial Sequence
  ENSG00000100346_71 (sequence is synthesized)
gggcaggtagacctgtggggatggctcggtccaagcccaacactgcccgctccagagagcctcagccctgcctccctttccacagaggtggttttatgtggaacgaggtaccttgtctgg

SEQ ID NO: 113941 - DNA, 120 bp, Artificial Sequence
  ENSG00000100346_72 (sequence is synthesized)
ggaagaagtggagctgggcaggcttgactgctcctggctgaccctgagctctcgcagttggagggaagcagacagacttgactttttgcaagtccgcgtgttgctggagggacacgtgta

SEQ ID NO: 113942 - DNA, 120 bp, Artificial Sequence
  ENSG00000100346_73 (sequence is synthesized)
ttggagcccagaagaggggctgtgtggcctgggaataccatgtggaaggttgggcttcaagttaacaggatcagacaccagtcaagcagcctcaggtcatcttgcgactccactgagcag

SEQ ID NO: 113943 - DNA, 120 bp, Artificial Sequence
  ENSG00000100346_74 (sequence is synthesized)
cctttcctgttgtcacatgggttcagagcagctgagcagggaacacgtcctaggcaggtctgacgtgaaacctccccttaccctgaaccgtgtgactctgcaagcagacacctcgaggca

SEQ ID NO: 113944 - DNA, 120 bp, Artificial Sequence
  ENSG00000100346_75 (sequence is synthesized)
ggtgttctaggcaaagggatgggcatgagcgaaggctccagggtccacagagcagggagtgtggagaaggtggaagagctgagctcagaggcagagaagctccttgcagggagcactggg

SEQ ID NO: 113945 - DNA, 120 bp, Artificial Sequence
  ENSG00000100346_76 (sequence is synthesized)
agatggcctggcccgtcccaggctcctggaggccccacctgccgatcccaggcacttgaccttgttcctgtgggtgacagagatgagaaccagggaagctgtgatccactggccaggaca

SEQ ID NO: 113946 - DNA, 120 bp, Artificial Sequence
  ENSG00000100346_77 (sequence is synthesized)
agtcaacatgggtgagggttgggcaaagggcccttccttcctccccaaccctgtggtctggggccatggcctcaggcttgtgtctatcacaaaagcacaaacttgccctaacccacatgg

SEQ ID NO: 113947 - DNA, 120 bp, Artificial Sequence
  ENSG00000100346_78 (sequence is synthesized)
gcctggctgtggggaaagtggggacccaggtccctgagctgtctgctgggctccgtagagcggtggtgggcaggcaccttggcatctgtgcagagacggcccagtctggccaaatcctct

SEQ ID NO: 113948 - DNA, 120 bp, Artificial Sequence
  ENSG00000100346_79 (sequence is synthesized)
tcctctcccctgctctaccttctccggcaccaggcagccccttaaaggaggacaaagtgtgtaaagcccgtctgctgtcttcccccaaatcctcagctcagagccttccgcttccagggc

SEQ ID NO: 113949 - DNA, 120 bp, Artificial Sequence
  ENSG00000100346_80 (sequence is synthesized)
caaccccagccccgtttgctgcgttgtgtaagggcttggggtcttagaagctgctctttagcccagatacacatactcttttttgtctttgtgcaataatcagtgttcctggcagagcct

SEQ ID NO: 113950 - DNA, 120 bp, Artificial Sequence
  ENSG00000100346_81 (sequence is synthesized)
gggccaagctgcagcctactgaggaggcagaggccacctcctccagaaagccctcggcctgggccgccgccgtgactctagcactctcagtcgctgtacagtttctatggtgtgaatgaa

SEQ ID NO: 113951 - DNA, 120 bp, Artificial Sequence
  ENSG00000100346_82 (sequence is synthesized)
cttccctcctagttgctgatggcgctggtacctgctggcccatggcccgggtgtagagaaaccaagcggcagccaccaccagtgttgttttgaataaaagcccagaagcctatttaagaa

SEQ ID NO: 113952 - DNA, 120 bp, Artificial Sequence
  ENSG00000100346_83 (sequence is synthesized)
ccggcaggtaccgacacctcccaggccctagagcactggtctgtgggcaaggggcaggatctaagccaggcctggaagtccaagggactgggaggggaaggacccaaccaaaggccgagg

SEQ ID NO: 113953 - DNA, 120 bp, Artificial Sequence
  ENSG00000100346_84 (sequence is synthesized)
gcaccaccgtgcaagggggtttgggaacgctggggtgacgctgagactggagggggaggtggcactggggcggatggagtgggcggggctgggtcctggggacagcagagtgtggggagg

SEQ ID NO: 113954 - DNA, 120 bp, Artificial Sequence
  ENSG00000100346_85 (sequence is synthesized)
accccaaggcgggtctggaagaggcctgtgatccctagcttgaggggaggggaggagaggaggaggagtactggaggttttgcagggtggcggggtgctggcagtggggaggacaccctg

SEQ ID NO: 113955 - DNA, 120 bp, Artificial Sequence
  ENSG00000100346_86 (sequence is synthesized)
ggtgctctgggtgggtgtgagtgggggcttgattactaggaatggaggtgggagggcgggtctggtggatgagaagcctcgggctgcagggtcccccgtactggattggccagggccaca

SEQ ID NO: 113956 - DNA, 120 bp, Artificial Sequence
  ENSG00000100346_87 (sequence is synthesized)
gccctcctacccacgggcacacagaggtctgaagcactgagggctccgctgtgggggtggggaaatggggccgggccggctcccacagtgagtgcagttgattcactgggtgactgtctg

SEQ ID NO: 113957 - DNA, 120 bp, Artificial Sequence
  ENSG00000100346_88 (sequence is synthesized)
acccgtcacaccaggctgtgtgctctggcgggcaggacacaaactccctgcctgccgggctcactgtttagtgctgagagtgagctgcctgggtgcaggagggatgataaccaaaataaa

SEQ ID NO: 113958 - DNA, 120 bp, Artificial Sequence
  ENSG00000100346_89 (sequence is synthesized)
gctcactccttctacaacttcatctacttcatcctgcttatcatacccctcttgcctgcacccccatatggtcttcccagagtgagctcatccacctcgtcatgcctgactgcagcttca

SEQ ID NO: 113959 - DNA, 120 bp, Artificial Sequence
  ENSG00000100347_0 (sequence is synthesized)
agtgttccgcgtccgggggtttgtgggagttgccttgacctgcagctccgccaccgcggacccgccttctgccctcagcagcagacgctctgtcccgcccgggcagctctgcgaggcagc

SEQ ID NO: 113960 - DNA, 120 bp, Artificial Sequence
  ENSG00000100347_1 (sequence is synthesized)
ggctggagagggaaccatggggactgtgcacgcccggagtttggagcctcttccatcaagtggacctgattttggaggattaggagaagaagctgaatttgttgaagttgagcctgaagc

SEQ ID NO: 113961 - DNA, 120 bp, Artificial Sequence
  ENSG00000100347_2 (sequence is synthesized)
taaacaggaaattcttgaaaacaaagatgtggttgttcaacatgttcattttgatggacttggaaggactaaagatgatatcatcatttgtgaaattggagatgttttcaaggccaaaaa

SEQ ID NO: 113962 - DNA, 120 bp, Artificial Sequence
  ENSG00000100347_3 (sequence is synthesized)
cctaattgaggtaatgcggaaatctcatgaagcccgtgaaaaattgctccgtcttggaatttttagacaagtggatgttttgattgacacatgtcaaggtgatgacgcacttccaaatgg

SEQ ID NO: 113963 - DNA, 120 bp, Artificial Sequence
  ENSG00000100347_4 (sequence is synthesized)
gttagacgttacctttgaagtaactgaattgaggagattaacgggcagttataacaccatggttggaaacaatgaaggcagtatggtacttggcctcaagcttcctaatcttcttggtcg

SEQ ID NO: 113964 - DNA, 120 bp, Artificial Sequence
  ENSG00000100347_5 (sequence is synthesized)
tgcagaaaaggtgacctttcagttttcctatggaacaaaagaaacttcgtatggcctgtccttcttcaaaccacggcccggaaacttcgaaagaaatttctctgtaaacttatataaagt

SEQ ID NO: 113965 - DNA, 120 bp, Artificial Sequence
  ENSG00000100347_6 (sequence is synthesized)
tactggacagttcccttggagctcactgcgggagacggacagaggaatgtcagctgagtacagttttcccatatggaagaccagccacactgtcaagtgggaaggcgtatggcgagaact

SEQ ID NO: 113966 - DNA, 120 bp, Artificial Sequence
  ENSG00000100347_7 (sequence is synthesized)
aaggacggcgtcatttgctgttcgaaaagaaagcggacattcactgaaatcatctctttcgcacgccatggtcatcgattctcggaattcttccatcttaccaaggagaggtgctttgct

SEQ ID NO: 113967 - DNA, 120 bp, Artificial Sequence
  ENSG00000100347_8 (sequence is synthesized)
gaaagttaaccaggaactggcaggctacactggcggggatgtgagcttcatcaaagaagattttgaacttcagttgaacaagcaactcatatttgattcagttttttcagcgtctttctg

SEQ ID NO: 113968 - DNA, 120 bp, Artificial Sequence
  ENSG00000100347_9 (sequence is synthesized)
gggcggaatgttggtacccattggtgataagccgtcaagcattgctgataggttttaccttgggggacccacaagcatccgcggattcagcatgcacagcatcgggccacagagcgaagg

SEQ ID NO: 113969 - DNA, 120 bp, Artificial Sequence
  ENSG00000100347_10 (sequence is synthesized)
agactacctaggtggagaagcgtactgggccggcggcctgcacctctacaccccattacctttccggccaggccagggtggctttggagaacttttccgaacacacttctttctcaacgc

SEQ ID NO: 113970 - DNA, 120 bp, Artificial Sequence
  ENSG00000100347_11 (sequence is synthesized)
aggaaacctctgcaacctcaactatggggagggccccaaagctcatattcgtaagctggctgagtgcatccgctggtcgtacggggccgggattgtcctcaggcttggcaacatcgctcg

SEQ ID NO: 113971 - DNA, 120 bp, Artificial Sequence
  ENSG00000100347_12 (sequence is synthesized)
gttggaacttaattactgcgtccccatgggagtacagacaggcgacaggatatgtgatggcgtccagtttggagctgggataaggttcctgtagccgacacccctacaggagaagctctg

SEQ ID NO: 113972 - DNA, 120 bp, Artificial Sequence
  ENSG00000100347_13 (sequence is synthesized)
ggactggggcagcagcaaggcgcccatgccacacaccgtctctcgaggaaacgcggttcagcgattctttgactgcggaccctgtgggaaaccccgtcaataaatgttaaagacacactc

SEQ ID NO: 113973 - DNA, 120 bp, Artificial Sequence
  ENSG00000100347_14 (sequence is synthesized)
ccttttctagaaattgcccacagcttgcaaaaaggctgtgttccctggccccggctgcggctgtgtaggagtctgaatatcattttccccagaagttgagggtgaggccggcagccaggc

SEQ ID NO: 113974 - DNA, 120 bp, Artificial Sequence
  ENSG00000100347_15 (sequence is synthesized)
gagaggcgcatgctcagtgagtcgtgaagatggcagggctggcggagcggccgccgcatctgatctctcccctttttttaggatatgtgatggcgtccagtttggagctgggataaggtt

SEQ ID NO: 113975 - DNA, 120 bp, Artificial Sequence
  ENSG00000100347_16 (sequence is synthesized)
ggctggagagggaaccatggggactgtgcacgcccggtgaccaccagtgagttaaccaccaagccaagaacttgctcattagcaatagctgacggcacctttttactccctggtccctat

SEQ ID NO: 113976 - DNA, 120 bp, Artificial Sequence
  ENSG00000100347_17 (sequence is synthesized)
ttcatttccttttctccaaattttcttgtctggaagggagcagccctgagacacctttctgctttgaaaccgtcctcggatgccctctggtggggccgtggaggggaaacctgggccaca

SEQ ID NO: 113977 - DNA, 120 bp, Artificial Sequence
  ENSG00000100347_18 (sequence is synthesized)
tgctgctctctccagcctgctgtcctccagcaggtctccaggtgcctgtgtgcacccacagtggtcgggctcccgggagcttagccacccttctccccagtgtcatgcttcatttctttc

SEQ ID NO: 113978 - DNA, 120 bp, Artificial Sequence
  ENSG00000100347_19 (sequence is synthesized)
taagcctttttaaagagcagatttttaggagagtagaaataccttattttttcacaaggaatagcagagatgaaagacaccaaagtgtagactcggccctcgggtgggtgcaggtagagg

SEQ ID NO: 113979 - DNA, 120 bp, Artificial Sequence
  ENSG00000100347_20 (sequence is synthesized)
ggaggaggaaaggggagggcagacaccttgtcgccggcagccctgaagctgagctcctagaggaacggaccagatcatactcagtggtatccttggggcccatgtcaggccttctaagga

SEQ ID NO: 113980 - DNA, 120 bp, Artificial Sequence
  ENSG00000100347_21 (sequence is synthesized)
atgaagaaatgatttaggaagctctacacctcccgtaggaatttgggaaagtgcctgaatcccaggtggccctaagtgtagagatggtggctgtgcaggctgcccctcctgtaccatctc

SEQ ID NO: 113981 - DNA, 120 bp, Artificial Sequence
  ENSG00000100347_22 (sequence is synthesized)
cccagtgcctggcatggtgccctgtgggtgctgaggtgggtgcctctcaccatgaaggcgggatggagtgttctgggcctgctggtgacccacttaccccatggcctggagttcaattgc

SEQ ID NO: 113982 - DNA, 120 bp, Artificial Sequence
  ENSG00000100347_23 (sequence is synthesized)
aagcctgagggctagagagggcccagcatgggacaccccctggggagtatggggtgacgtggcttccttgtgagagttaaatcactgtcctaccacttctcaaagccaccaaacatcgtt

SEQ ID NO: 113983 - DNA, 120 bp, Artificial Sequence
  ENSG00000100347_24 (sequence is synthesized)
cactgttcagaaaacatttctctgagatagaaatctaagatgagctgtcctggcagcaggaaagagagcgtcaggctgggaagcaggtgccacctgcttggaccccagaattcacccggc

SEQ ID NO: 113984 - DNA, 120 bp, Artificial Sequence
  ENSG00000100347_25 (sequence is synthesized)
tcaggcctctgctgcaggaaggatccctcgcctcccacataactctcgtctctgccaccttctctctgggccggtgcaagtcgctgggttgccaggcctggcttcagacagggtcgggtg

SEQ ID NO: 113985 - DNA, 120 bp, Artificial Sequence
  ENSG00000100347_26 (sequence is synthesized)
agctgcctgcagccctcagaccagccctgtccctcacctggggtgcagtcctgctacttagagcagtactgcctttgattcccttcacagctttccccctttcttcctttgtccttcttc

SEQ ID NO: 113986 - DNA, 120 bp, Artificial Sequence
  ENSG00000100347_27 (sequence is synthesized)
cctctggttttctcttccccttcttctcttcttccccttctccctctctctcatcattaaaaaaaattagatatttagttcattgtttcatgatgcttcattccaaaaaatgatttgcaa

SEQ ID NO: 113987 - DNA, 120 bp, Artificial Sequence
  ENSG00000100347_28 (sequence is synthesized)
tttactttaatatgaaattctagatgtgaaatcgccagatcttttagggctttatcgtactttctgggaaggttgtctcatttatactcctagaaccgtctctgacatgcaacatccgtc

SEQ ID NO: 113988 - DNA, 120 bp, Artificial Sequence
  ENSG00000100347_29 (sequence is synthesized)
cgtcagaggtatctccacatgctatggaactttaaaacatcatttaagtggatgcatattattccattattaaacattctcccctgattttcttactttttttttttttgagacggagtc

SEQ ID NO: 113989 - DNA, 120 bp, Artificial Sequence
  ENSG00000100347_30 (sequence is synthesized)
attacaggcgtgagtcactgcacccaggatttcttaaaatcttcagcacctttgttgcttccatttttatgtcattataagcaacaactacactctgcataaatttttgtcgaaagtata

SEQ ID NO: 113990 - DNA, 120 bp, Artificial Sequence
  ENSG00000100347_31 (sequence is synthesized)
gattatttcttttcactcgtatttagagtgcttcattacagtgtaatttttaagaaaagtaacttaagtttttgatggttttatttcatctgtttattataagcaagtgtgatatgccga

SEQ ID NO: 113991 - DNA, 120 bp, Artificial Sequence
  ENSG00000100347_32 (sequence is synthesized)
gtctatgagagctgagcctttacctacctgagaagtaaggcatgctggtgttccactcaccacctccgtgcggttggccagactctgtgggcaagaatgtaaattgctataatttttttg

SEQ ID NO: 113992 - DNA, 120 bp, Artificial Sequence
  ENSG00000100347_33 (sequence is synthesized)
tgaaagtggtttgatgtatcaagagccttaaaatgtgtatgttcaagaattgttaataatactattaatgatagccccaagctggaaactggaaaccgaaatgcccatcaacagtaggaa

SEQ ID NO: 113993 - DNA, 120 bp, Artificial Sequence
  ENSG00000100347_34 (sequence is synthesized)
atggtcagataattatggtatcttctactgtaatgaggaagaacaagttacagccactggctgaatgatggcatgagtaaatctcagaaacatgtcgggaggaaaagctagacccagagg

SEQ ID NO: 113994 - DNA, 120 bp, Artificial Sequence
  ENSG00000100347_35 (sequence is synthesized)
aatgcctcctggaagatcccatttataaagcttggaagcaggtgaagtggcctgtgctgtgagagggtggggcagtggctgcatgtggtatgggcaccaggtggtggttagaagggaagg

SEQ ID NO: 113995 - DNA, 120 bp, Artificial Sequence
  ENSG00000100347_36 (sequence is synthesized)
caaggtctgatgtggggtgtgcttggtttcttggtcctggtgctctctgggcagatgtgtttcagatatagaaattcattgagctgtacacttaggatgtgtatactttcctatgggtat

SEQ ID NO: 113996 - DNA, 120 bp, Artificial Sequence
  ENSG00000100347_37 (sequence is synthesized)
gcacaataaaagcttaaaaaaatacatgtttgtgccaggaaactcatcataggttaatgtccatgataaaggacttagaaaccagtatgacaatagaagagaaatagatcattaaatatt

SEQ ID NO: 113997 - DNA, 120 bp, Artificial Sequence
  ENSG00000100347_38 (sequence is synthesized)
ggtccacctatgttgtttttcaggcataaaaaccccattttcaaggaagataaagcgttaggagaaagtgtttacaatatattaaaactgaaaaaaagtaggactggaaactgtgtatat

SEQ ID NO: 113998 - DNA, 120 bp, Artificial Sequence
  ENSG00000100347_39 (sequence is synthesized)
atacacacacagagagagagagagcaagcaagcaccacattttattggcttgcttatttggttttacatttacattataatccactggaagaaaggacatcaggatgttagctgtttatt

SEQ ID NO: 113999 - DNA, 120 bp, Artificial Sequence
  ENSG00000100347_40 (sequence is synthesized)
tctgaatggtagaaattaaaatattttcatttttttctctttatgttgatcagatgttctacaatgagtatatttaacttttatgttcagaataaaatcagttatttaagaagagagagg

SEQ ID NO: 114000 - DNA, 120 bp, Artificial Sequence
  ENSG00000100347_41 (sequence is synthesized)
aggagtggtttctgggaaacaaaaaacaaggttgttctcctgcaatttgttcattctctgttcccatcagagctctcgtgttgaaagggattaaggagatgttggtgtcttttttttcct

SEQ ID NO: 114001 - DNA, 120 bp, Artificial Sequence
  ENSG00000100347_42 (sequence is synthesized)
tcctctggattgtgaggaactgaagtctttaaatgaatcagcagttcattccttgaagttagtcttgaagacatcagtattttcccatttcatggtctgtcattttgtattagaggagag

SEQ ID NO: 114002 - DNA, 120 bp, Artificial Sequence
  ENSG00000100347_43 (sequence is synthesized)
taagacactgtataaatggtattttgcaacaaagtataaacctttgggttgtatgttttctgttgctttatagtttaaaatggaatggacaggaacgtttttagaaatatgcaaatacat

SEQ ID NO: 114003 - DNA, 120 bp, Artificial Sequence
  ENSG00000100347_44 (sequence is synthesized)
gctctcagtggataggcttacactttggcaaaagtaacctaaatccaagcggtcatgaaccgttgagaattgtctcttctctggagacactgagctggaacctggtctcgctgtgcagtg

SEQ ID NO: 114004 - DNA, 120 bp, Artificial Sequence
  ENSG00000100347_45 (sequence is synthesized)
ggtggcaggcagcctctgccttttgattaatcatgtgcagctgtctccacacactgcagagacgctttctgcattttgtctctattgcgctctcgaaaatttggcaaaataatgcatttc

SEQ ID NO: 114005 - DNA, 120 bp, Artificial Sequence
  ENSG00000100347_46 (sequence is synthesized)
atttgcaggtggaagtgagttggtcatctacatttgtggataaagttattgtcatgagactcatttcttcaaagcatttcacagatacgatgaatgacagagtgcattccttcctcaacg

SEQ ID NO: 114006 - DNA, 120 bp, Artificial Sequence
  ENSG00000100347_47 (sequence is synthesized)
acattggctttgtttgcctcctcagttaaatcaaggtgtgaaacaaaccaggagaaaaagaaagattatttaaaatgaggccatcagtatcaggaatgagaagaacagctgcttgcaaac

SEQ ID NO: 114007 - DNA, 120 bp, Artificial Sequence
  ENSG00000100347_48 (sequence is synthesized)
tccagcactgtgtggcgttgtttacaggacagaaatcttgcttctgtaagttgtggaaagttaacgtgatgttaaccttgtcggaccttgtttttgttctgcacccctcctttgcttagg

SEQ ID NO: 114008 - DNA, 120 bp, Artificial Sequence
  ENSG00000100347_49 (sequence is synthesized)
cgtccccatgggagtacagacaggcgacagatacaaaggcagagttcaaatcagcaattccccattgacaaagtattaagaaactttcatggaataaatgatgagaagtggagttgttac

SEQ ID NO: 114009 - DNA, 120 bp, Artificial Sequence
  ENSG00000100348_0 (sequence is synthesized)
gaggaagtgacgacaggcgtgcccttgacaggcagggagggctaggctgtgcatccctccgctcgcattgcagggagatggctcagcgacttcttctgaggaggttcctggcctctgtca

SEQ ID NO: 114010 - DNA, 120 bp, Artificial Sequence
  ENSG00000100348_1 (sequence is synthesized)
tctccaggaagccctctcagggtcagtggccacccctcacttccagagccctgcagaccccacaatgcagtcctggtggcctgactgtaacacccaacccagcccggacaatatacacca

SEQ ID NO: 114011 - DNA, 120 bp, Artificial Sequence
  ENSG00000100348_2 (sequence is synthesized)
cgaggatctccttgacaacctttaatatccaggatggacctgactttcaagaccgagtggtcaacagtgagacaccagtggttgtggatttccacgcacagtggtgtggaccctgcaaga

SEQ ID NO: 114012 - DNA, 120 bp, Artificial Sequence
  ENSG00000100348_3 (sequence is synthesized)
tcctggggccgaggttagagaagatggtggccaagcagcacgggaaggtggtgatggccaaggtggatattgatgaccacacagacctcgccattgagtatgaggtgtcagcggtgccca

SEQ ID NO: 114013 - DNA, 120 bp, Artificial Sequence
  ENSG00000100348_4 (sequence is synthesized)
ctgtgctggccatgaagaatggggacgtggtggacaagtttgtgggcatcaaggatgaggatcagttggaggccttcctgaagaagctgattggctgacaagcagggatgagtcctggtt

SEQ ID NO: 114014 - DNA, 120 bp, Artificial Sequence
  ENSG00000100348_5 (sequence is synthesized)
accccaatagaactcagcccttccatgccagcccttcctgctgcctccctcctgtctggctcctggggcccatgcttagagcccaggctccagccctgagtgcttccgagctggcggact

SEQ ID NO: 114015 - DNA, 120 bp, Artificial Sequence
  ENSG00000100348_6 (sequence is synthesized)
gcccaggggccatcagaggatggtggtgctgctgctgatccggggaccgctgtcttccctcccatacgcctttcatccctccttctagggcctatggcagttctcccaggatgtgtggcg

SEQ ID NO: 114016 - DNA, 120 bp, Artificial Sequence
  ENSG00000100348_7 (sequence is synthesized)
agagcctgggccagcccacagcgttcctagtcaggcagccacaccttggtcctcatcttggtcccttccaatctgaaacctcgtgcctggctcgtctgccacctacatttctctttccag

SEQ ID NO: 114017 - DNA, 120 bp, Artificial Sequence
  ENSG00000100348_8 (sequence is synthesized)
ctgctgttttgtaaaaagaaaaagaaaaaagaagcccaaactagtgagagtaatatctaattatctcattttttgtaggtctgtgataaagaacttagtcatcccttccacctcctactg

SEQ ID NO: 114018 - DNA, 120 bp, Artificial Sequence
  ENSG00000100348_9 (sequence is synthesized)
tgaagaacagaccctgggtcccacactgaaatcccctctagtcacccattcccaccccccagggagctgcctcccaggcagggggtgcagaaaatgattgatgggctggggaaccctgga

SEQ ID NO: 114019 - DNA, 120 bp, Artificial Sequence
  ENSG00000100348_10 (sequence is synthesized)
gagcctcgactccggaagtctcaaggtgcctcctcctctccttagctggcccgttggttttctgagcagggggctgaactgtgaacaagtcagacaaataaagcaagggtctgcaccatc

SEQ ID NO: 114020 - DNA, 120 bp, Artificial Sequence
  ENSG00000100348_11 (sequence is synthesized)
agttcctccttgaattgttgcgtttcatcttttcagacgaccctgggttccagtgttggctgtcatttaatagcggggttactttgggcatgtcacttaacttacttgagcctcgtattc

SEQ ID NO: 114021 - DNA, 120 bp, Artificial Sequence
  ENSG00000100348_12 (sequence is synthesized)
cttcccttactcgcagtgtgggcagtacaatagcaacttcctggaagttgctgtaggaagaccaataatgtgtgtaagatggctcagcgacttcttctgaggaggttcctggcctctgtc

SEQ ID NO: 114022 - DNA, 78 bp, Artificial Sequence
  ENSG00000100348_13 (sequence is synthesized)
agtggcacaatcacagctcactgaagcctcagttgggagtacaggtgtcagcggtgcccactgtgctggccatgaaga

SEQ ID NO: 114023 - DNA, 120 bp, Artificial Sequence
  ENSG00000100350_0 (sequence is synthesized)
ggagcggctgggaggttcgcgcgtttctcagggttcggtcggaggcggggaggccggagctgcgggcgtagggacctggcggctcctgaagcgcacgcgggcgggcggcaggatgggcct

SEQ ID NO: 114024 - DNA, 120 bp, Artificial Sequence
  ENSG00000100350_1 (sequence is synthesized)
caggatgggcctctccgctgcggccccgttgtggggtcccccggggctgctcctggccatcgccctgcacccagcgctgtcggtgcccccgcgccgggactactgcgtgctgggcgctgg

SEQ ID NO: 114025 - DNA, 120 bp, Artificial Sequence
  ENSG00000100350_2 (sequence is synthesized)
gcagatggcctacttcctgcagcgcgctggacgcgactacgcagtgttcgagcgggccccgcggcccggcagcttcttcacacgctacccgcggcaccgcaagctcatcagcatcaacaa

SEQ ID NO: 114026 - DNA, 120 bp, Artificial Sequence
  ENSG00000100350_3 (sequence is synthesized)
gcggtacacgggcaaggctaacgccgagttcaacctccgccacgactggaactctctgctcagccacgacccccggctgctcttcagacactactcgcgtgcctacttccccgacgcccg

SEQ ID NO: 114027 - DNA, 120 bp, Artificial Sequence
  ENSG00000100350_4 (sequence is synthesized)
cgacatggtgcgctacctgggtgacttcgcggacacgctggggctccgtgtccagtacaacaccaccatcgcccacgtcactctggacaaggaccgacaggcctggaatggccactactt

SEQ ID NO: 114028 - DNA, 120 bp, Artificial Sequence
  ENSG00000100350_5 (sequence is synthesized)
catcctaactgaccagaagggccaggtgcatcagtgcagcgtcctctttgtagccactggtttatcagtccccaaccaggttgacttccctggctccgaatatgcagagggttacgagtc

SEQ ID NO: 114029 - DNA, 120 bp, Artificial Sequence
  ENSG00000100350_6 (sequence is synthesized)
cgtgtccgtggaccctgaggactttgtaggccagaatgtgctgatcctgggtcgtgggaactcggcctttgagacagcagagaacatcttgggtgtcacaaactttatccatatgctcag

SEQ ID NO: 114030 - DNA, 120 bp, Artificial Sequence
  ENSG00000100350_7 (sequence is synthesized)
ccgctcccgggtccgtctgtcctgggccacccactacgttggagacctcagagccatcaacaatggcctgctggatacctaccagctcaagtccctggacgggctgctcgagtctgacct

SEQ ID NO: 114031 - DNA, 120 bp, Artificial Sequence
  ENSG00000100350_8 (sequence is synthesized)
gacggatctggccatcctgaaggacagcaaaggcaagttccatgtcaccccgaaattcttcctggaagaagccaacaccaaccagagtgccgactccatcaccctcccccaggacgacaa

SEQ ID NO: 114032 - DNA, 120 bp, Artificial Sequence
  ENSG00000100350_9 (sequence is synthesized)
tgacaactttgccatgcgcgtgccctatgaccgggtaatccgctgcctgggctggaactttgacttctccattttcaataagtccctcagacttaactcgggaaatgcattcggcaagaa

SEQ ID NO: 114033 - DNA, 120 bp, Artificial Sequence
  ENSG00000100350_10 (sequence is synthesized)
gtacccgctgattcgagctagctacgaatccaaaggaagccggggtctgtttatcctgggtactgccagccactcggtggactaccggaaatctgctgggggcttcatccacggattccg

SEQ ID NO: 114034 - DNA, 120 bp, Artificial Sequence
  ENSG00000100350_11 (sequence is synthesized)
atacacagtgcgtgctgttcaccggctcctggagcaccgccaccacagcgtcacctggcccgccactgagctccccatcacacagctgaccagctccatcgtgcggcgcgtgaatgaggc

SEQ ID NO: 114035 - DNA, 120 bp, Artificial Sequence
  ENSG00000100350_12 (sequence is synthesized)
ttctgggctctaccagatgttcggtgtgctggccgatgtcatcctgttgaaggagaattccacggcctttgagtacctggaggagttccccatacagatgctggcccagctggagacact

SEQ ID NO: 114036 - DNA, 120 bp, Artificial Sequence
  ENSG00000100350_13 (sequence is synthesized)
cacagggaggaaggcaaagcacgggctcttcgtcatcaacatggaatatggcagaaatttctctggccccgacaaggacgtcttctttgatgaccggtctgtggggcacacagaagatgc

SEQ ID NO: 114037 - DNA, 120 bp, Artificial Sequence
  ENSG00000100350_14 (sequence is synthesized)
ctggcagtctaactttcttcatcctgtcatctactactatagatacctccccaccgaacaggaggtgaggttccgccctgcacactggcccctgcctcggcccacggccatccatcacat

SEQ ID NO: 114038 - DNA, 120 bp, Artificial Sequence
  ENSG00000100350_15 (sequence is synthesized)
cgtggaagacttcttaacagactggactgccccgatcgggcacatcctacctctgaggcgcttcctggagaactgtttggacaccgatttgcgaagcttctatgcagagtcctgcttcct

SEQ ID NO: 114039 - DNA, 120 bp, Artificial Sequence
  ENSG00000100350_16 (sequence is synthesized)
cagagtggagagcaggctcctgcgggactatgcccccacaggcaggcgcctggaggacagcagccagcagcttggcgaccaagagccactaggttcccccctggctccagggcctctggc

SEQ ID NO: 114040 - DNA, 120 bp, Artificial Sequence
  ENSG00000100350_17 (sequence is synthesized)
tcagtccgtcgatagcaacaaagaggagctctgactgtcccttcctaagctgtgggcacagtggccaggcctccccacctaggcccatggtcagtccctctttccccgcaacctcacact

SEQ ID NO: 114041 - DNA, 120 bp, Artificial Sequence
  ENSG00000100350_18 (sequence is synthesized)
cccgccaatgcgtgattgccaaagaccactcagatcatggcagtgtctgcagcaaagccaccagatggcacgtgagggctgaaagtcggggatgcggtggtctcctccctcctgtcaggg

SEQ ID NO: 114042 - DNA, 120 bp, Artificial Sequence
  ENSG00000100350_19 (sequence is synthesized)
ggcagaagggcatcctctgccaggtgggagctgccttccccagcccagtttgtctgcaatggagctgtcgctgagccccaggccagcccagttctgccccgtctcaagtgctcctcttcc

SEQ ID NO: 114043 - DNA, 120 bp, Artificial Sequence
  ENSG00000100350_20 (sequence is synthesized)
ttccaagcccctcctcagatgggcctgcatcccgcctgtggagtgcttcacaggggaaacccatccgcatcttaagagtttgtggcaagcgctttaaaacaaaagctctgatatcctcaa

SEQ ID NO: 114044 - DNA, 120 bp, Artificial Sequence
  ENSG00000100350_21 (sequence is synthesized)
caaccacaatgggcaggtgggattgttgccccagatgactgctgaagacaccagctgtgggatgtcaagtaattccagggacccccagctgggagtccccgtctgtgtcacttgccacac

SEQ ID NO: 114045 - DNA, 120 bp, Artificial Sequence
  ENSG00000100350_22 (sequence is synthesized)
actgcctcaacctccccgccccattttcagcagggtttgggcttagctacagagcccaagagggtcagccctgcttatcatcataggcccagcaggctgatctcgagcagcgataggaca

SEQ ID NO: 114046 - DNA, 120 bp, Artificial Sequence
  ENSG00000100350_23 (sequence is synthesized)
gctccctgcaaagccatcttagcaactttctcactgagaagcaggattcagagctgctctccccagttgcaccccctgactcatcttccagctggctcttctctcccatcctactccctt

SEQ ID NO: 114047 - DNA, 120 bp, Artificial Sequence
  ENSG00000100350_24 (sequence is synthesized)
ctgtctccctgccctctgccatcctgaaccatgccttgcttctaacctgcctggtcaagttttgtgaaacttatcctgctgtctcgggctggcacccatatgtgctcaccatgtgtaagg

SEQ ID NO: 114048 - DNA, 120 bp, Artificial Sequence
  ENSG00000100350_25 (sequence is synthesized)
tgacatttccaaatgcctttgtgtgataatgatgatgaatttggttcctagtctcttcttcattgcccttcctcaccagcaatctgcactttcccatcaggcgtcttagtctcatttgta

SEQ ID NO: 114049 - DNA, 120 bp, Artificial Sequence
  ENSG00000100350_26 (sequence is synthesized)
agtgcataagataatcacagtgatttttcaaagcccaggatcataagtgattgctttttcactggttcttactaactcttcatgtatccactcagaattccaaggacaatcccagcactc

SEQ ID NO: 114050 - DNA, 120 bp, Artificial Sequence
  ENSG00000100350_27 (sequence is synthesized)
tgcactccagcctaggtaacaagagggaaactccatctcaaaaaataagttaattaaattaaattaaaataaaacatgcgctgggtacagttgcttacacctgtaatcccagcactttgg

SEQ ID NO: 114051 - DNA, 68 bp, Artificial Sequence
  ENSG00000100350_28 (sequence is synthesized)
ttgggaggccaaagtgggccgatcacctgagccggtaaaaaaaattagctgggcatggtggagcatgc

SEQ ID NO: 114052 - DNA, 82 bp, Artificial Sequence
  ENSG00000100350_29 (sequence is synthesized)
ccgagccactgtactccagcctaggtgacaaagcaagacccacagtaaagcccccacaccccatctcaaaaaaataaaaaat

SEQ ID NO: 114053 - DNA, 87 bp, Artificial Sequence
  ENSG00000100350_30 (sequence is synthesized)
agaacccgggctttctggatccaaagctctttcatggggacgtcctcttcccctcttggcttggtccaatggatttcgctcttgtca

SEQ ID NO: 114054 - DNA, 68 bp, Artificial Sequence
  ENSG00000100350_31 (sequence is synthesized)
tccacctgcagtccagactttttaactacctggccccactgcagacacagttccctctagtccttccc

SEQ ID NO: 114055 - DNA, 120 bp, Artificial Sequence
  ENSG00000100350_32 (sequence is synthesized)
cctggccccactgcagacacagttccctctagtccttcccagagttacaagaagagaactccagtagccttattctgtcagggacgaattgtttaccccatgataatgtaggatatcata

SEQ ID NO: 114056 - DNA, 120 bp, Artificial Sequence
  ENSG00000100350_33 (sequence is synthesized)
aattcttcttcaaaggttttagcctgtaatttgttaagtacattgagttctgagatcctctccaaagaaccaatgtatcagtatgttcagctcacctgttctttgttcttcattttaact

SEQ ID NO: 114057 - DNA, 120 bp, Artificial Sequence
  ENSG00000100350_34 (sequence is synthesized)
tttaatttcctcattctttatgtctccttgcccctagtttcagtaaacaatcccctcctagcctctgtcacctgctctgacctgagtcacctttagtcacctggtccgtaaccatctttc

SEQ ID NO: 114058 - DNA, 120 bp, Artificial Sequence
  ENSG00000100350_35 (sequence is synthesized)
ctgtctaaacttctcaccccaccactctggcttatacccctgctctctttaaaatagccagtcagaattagcttagattgtgcggtccaaccctagcccataggggaacaacacagcagt

SEQ ID NO: 114059 - DNA, 120 bp, Artificial Sequence
  ENSG00000100350_36 (sequence is synthesized)
agggggtacctgcatcagggataagaacccattcccctcccttgttccggtgtgctctcgccattgcaccatccatgagacgcactcttgtatagaagtaaaattgccttgctgagaaaa

SEQ ID NO: 114060 - DNA, 120 bp, Artificial Sequence
  ENSG00000100350_37 (sequence is synthesized)
attagaccacgggttgcagccggagcggctgggagggtggaggttactacaatcataagcggggagccggtgcccctgaggaaggagaccctgagggagataagatggaggggctcggga

SEQ ID NO: 114061 - DNA, 120 bp, Artificial Sequence
  ENSG00000100350_38 (sequence is synthesized)
ttccggggagccccaagtcccagcttgaaacggtggagtccgggcaaatgagctctgaggacggcttctgggcctggccgtgacccagattgcagtgagagttcccgcaggccccgcctc

SEQ ID NO: 114062 - DNA, 120 bp, Artificial Sequence
  ENSG00000100350_39 (sequence is synthesized)
atgacccacaaagcagagaatatggattgtctggccctttccagaaaatacctgctggccctgctctaaaggcagctgccatctcctcccctcatgtgttcaccacctaggcgtttgcgc

SEQ ID NO: 114063 - DNA, 120 bp, Artificial Sequence
  ENSG00000100350_40 (sequence is synthesized)
tgggccatggagaccagtgtgtatggcgttctcaggggtcaatgaggcctgggcatccctcccagtgaccagagataaaatggtaagtgcagcgtgccgttcctccctctggctgttcca

SEQ ID NO: 114064 - DNA, 120 bp, Artificial Sequence
  ENSG00000100351_0 (sequence is synthesized)
agactgcagggctgactagggttagtttggaggagggagtaagaggtggggaggaggaggcacagttaatggatctgtaaacttgcaccctctttcagagtggtacatggaagacagcac

SEQ ID NO: 114065 - DNA, 120 bp, Artificial Sequence
  ENSG00000100351_1 (sequence is synthesized)
aaagtggatccatactctgaaatgcagtaactctgatgcttgaatttgtctcccttcttgccagaaaggattctaataactcggtgtcaaagccaagacataaactcaaccccttctctt

SEQ ID NO: 114066 - DNA, 120 bp, Artificial Sequence
  ENSG00000100351_2 (sequence is synthesized)
ccaaaagcttcacgttacagcatggaagctgttgccaagtttgatttcactgcttcaggtgaggatgaactgagctttcacactggagatgttttgaagattttaagtaaccaagaggag

SEQ ID NO: 114067 - DNA, 120 bp, Artificial Sequence
  ENSG00000100351_3 (sequence is synthesized)
tggtttaaggcggagcttgggagccaggaaggatatgtgcccaagaatttcatagacatccagtttcccaaatggtttcacgaaggcctctctcgacaccaggcagagaacttactcatg

SEQ ID NO: 114068 - DNA, 120 bp, Artificial Sequence
  ENSG00000100351_4 (sequence is synthesized)
ggcaaggaggttggcttcttcatcatccgggccagccagagctccccaggggacttctccatctctgtcaggcatgaggatgacgttcaacacttcaaggtcatgcgagacaacaagggt

SEQ ID NO: 114069 - DNA, 120 bp, Artificial Sequence
  ENSG00000100351_5 (sequence is synthesized)
aattactttctgtggactgagaagtttccatccctaaataagctggtagactactacaggacaaattccatctccagacagaagcagatcttccttagagacagaacccgagaagaccag

SEQ ID NO: 114070 - DNA, 120 bp, Artificial Sequence
  ENSG00000100351_6 (sequence is synthesized)
ggtcaccggggcaacagcctggaccggaggtcccagggaggcccacacctcagtggggctgtgggagaagaaatccgaccttcgatgaaccggaagctgtcggatcaccccccgaccctt

SEQ ID NO: 114071 - DNA, 120 bp, Artificial Sequence
  ENSG00000100351_7 (sequence is synthesized)
cccctgcagcagcaccagcaccagccacagcctccgcaatatgccccagcgccccagcagctgcagcagcccccacagcagcgatatctgcagcaccaccatttccaccaggaacgccga

SEQ ID NO: 114072 - DNA, 120 bp, Artificial Sequence
  ENSG00000100351_8 (sequence is synthesized)
ggaggcagccttgacataaatgatgggcattgtggcaccggcttgggcagtgaaatgaatgcggccctcatgcatcggagacacacagacccagtgcagctccaggcggcagggcgagtg

SEQ ID NO: 114073 - DNA, 120 bp, Artificial Sequence
  ENSG00000100351_9 (sequence is synthesized)
cggtgggcccgggcgctgtatgactttgaggccctggaggatgacgagctggggttccacagcggggaggtggtggaggtcctggatagctccaacccatcctggtggaccggccgcctg

SEQ ID NO: 114074 - DNA, 120 bp, Artificial Sequence
  ENSG00000100351_10 (sequence is synthesized)
cacaacaagctgggcctcttccctgccaactacgtggcacccatgacccgataaactcttcaggggacagaagctttttgtctggagctgcccacaagaaagagggcaaggaaaaaaggc

SEQ ID NO: 114075 - DNA, 120 bp, Artificial Sequence
  ENSG00000100351_11 (sequence is synthesized)
tggactccatgactatatatacatacatctatctacatctgcctgtgtacacacacaactttttatactagtaatttattggcaattgggctggtaattagttgatgcaaaagggaactc

SEQ ID NO: 114076 - DNA, 120 bp, Artificial Sequence
  ENSG00000100351_12 (sequence is synthesized)
aggtggagaataatattgacacttgcttttctgcccccctcaggggtgtgtggaaggcagtgggggagttgggaggggggcagggaaatgaaatggagttttgtcctggccttcagctgt

SEQ ID NO: 114077 - DNA, 120 bp, Artificial Sequence
  ENSG00000100351_13 (sequence is synthesized)
cactgcttcctccttgtcttgggaattttcacggagaacagctaagcagagaccacacctcggcactggacacagaacaacagggtggggttgaacttggtggggcacgttctagctgac

SEQ ID NO: 114078 - DNA, 120 bp, Artificial Sequence
  ENSG00000100351_14 (sequence is synthesized)
ctgcaagccccgctcacctggagggcttgcagagcagctctcctcctgttctccaaggggtgggcactgttgcattaggaattaaggtgcagcccagtgctgcgggcagccaagcgagtc

SEQ ID NO: 114079 - DNA, 120 bp, Artificial Sequence
  ENSG00000100351_15 (sequence is synthesized)
tgagcggggatgtgaaggcaggacggggttggagagaccctgcctgtgcaaggctggcctcctagtcaacacctagctgagacattcatctctgttcaaattaatattccttgggtcttt

SEQ ID NO: 114080 - DNA, 120 bp, Artificial Sequence
  ENSG00000100351_16 (sequence is synthesized)
tccacaatccccaagcagcttactcagtggaacctctgtttccccagctatgaaggaaatagcatcctacattccgtaaagtgcttgaagaagctctagctgagaatgctgaattttaca

SEQ ID NO: 114081 - DNA, 120 bp, Artificial Sequence
  ENSG00000100351_17 (sequence is synthesized)
gtcattgttttatggttacaagggtatgtcttcagggctctgttcattttccctcttgattttctcttttgaagatgccttgcccagtggcatggaaagaagcccacttgatgataggag

SEQ ID NO: 114082 - DNA, 120 bp, Artificial Sequence
  ENSG00000100351_18 (sequence is synthesized)
cctgactatgaattgattgactaaacatgaccccaggtggaagctggctttgacaccagcttcctgttcagtctgaccactgctgtcctcctgctgcccaagagttgcacctggagcaag

SEQ ID NO: 114083 - DNA, 120 bp, Artificial Sequence
  ENSG00000100351_19 (sequence is synthesized)
gaaccccaccatggctgtcgctctccatcccatcacgctagaatcatgtgtccaagggctcactctggaggtgcacagcacaggtcagcctggccaggggcgaaggagacagtagagagg

SEQ ID NO: 114084 - DNA, 120 bp, Artificial Sequence
  ENSG00000100351_20 (sequence is synthesized)
aagctcagggccttaggggaggccgggtgcaaacccgttctgcaccaagtgcactcggagtttgtgggtatgggtgtgtacccctgcaggtgtgcacatgtgtgcttgcacgcacatatt

SEQ ID NO: 114085 - DNA, 120 bp, Artificial Sequence
  ENSG00000100351_21 (sequence is synthesized)
tgtgcactcctgtgtgtatacatgtgtgcttgtgtatgcatatgtgtgcattcctgcatgtgtggacatgtgcgtgcatgcatctgtgtgtctgtgtgtgtgctgagacaggaaaggggg

SEQ ID NO: 114086 - DNA, 120 bp, Artificial Sequence
  ENSG00000100351_22 (sequence is synthesized)
tgaaagtgttggtgagggagcctggaagttttctcttccccaacctctcttgctctaaggagggatggggttgggggcagccgttattgaaggtgatcggagaagaaagattttctgact

SEQ ID NO: 114087 - DNA, 120 bp, Artificial Sequence
  ENSG00000100351_23 (sequence is synthesized)
cagaagtgactgccagtgtagcacaagcagtgtcccttgtgactgtgattctacagttctctgatcctcatgtttcctttagaggaaagaggaaaaaaggaactctgtggtgggtattgg

SEQ ID NO: 114088 - DNA, 120 bp, Artificial Sequence
  ENSG00000100351_24 (sequence is synthesized)
gagggaaaagaaaatagcctggtggaggcaggagggagtcgagtgtgagtaaggagcacctgcagcttttggaagtgaaagcagagagagggaaaggtagctaagacatccaggaggatc

SEQ ID NO: 114089 - DNA, 120 bp, Artificial Sequence
  ENSG00000100351_25 (sequence is synthesized)
aaggggcagcgtgagaggcacagggggaggaaagggagagggtgagtggggccagggaagagaacggtgtggagttggtgggcagatggtgcaggaggagggctgggcagtggggagagg

SEQ ID NO: 114090 - DNA, 120 bp, Artificial Sequence
  ENSG00000100351_26 (sequence is synthesized)
aagaatcagagcagagaaaccgctgctgcggaaggcagggagcaaagaagcataaggaaaagaacaggagaaagaacaaaggcagagaagacctcctcagctattttggtgctaggtaat

SEQ ID NO: 114091 - DNA, 120 bp, Artificial Sequence
  ENSG00000100351_27 (sequence is synthesized)
gtgaaatgctgcagtaaataaaagccataagtaatgtttgattttacagtatttacaaaccatatgctttaaacagcccacaaactccatccagttgtctgatgatgtgggaggaccagc

SEQ ID NO: 114092 - DNA, 120 bp, Artificial Sequence
  ENSG00000100351_28 (sequence is synthesized)
tctagttagacggaggtatgtgattcgattctggtggagactttgtgccttgaaaggcttctcaggaaagcagtaataaaacaaagtgtccttgtttggccaggccgtgtctggtgtctg

SEQ ID NO: 114093 - DNA, 120 bp, Artificial Sequence
  ENSG00000100351_29 (sequence is synthesized)
cgttgcatacccctcaggtagagagtgagaacgagaccagggggtgacaggggtcatcggcctgcaggagctgaccccgtaggcaggcggtatgagcagagctttcagaacccctggagc

SEQ ID NO: 114094 - DNA, 120 bp, Artificial Sequence
  ENSG00000100351_30 (sequence is synthesized)
tcggtgttctgttgtagcaaaagctactgaagagtattttgtactgagatgccaaagcatctttcccttgctcatcagcctccattcagaaggaagcgggaaagtcacccaaaccaccta

SEQ ID NO: 114095 - DNA, 120 bp, Artificial Sequence
  ENSG00000100351_31 (sequence is synthesized)
caaggaatgagggctcttagcggccaggtaaagaggacaagaaccaaactgtccacattatggaggggagggggaaagagagctcaacccccctcagcctctggtgctgccagggggagc

SEQ ID NO: 114096 - DNA, 120 bp, Artificial Sequence
  ENSG00000100351_32 (sequence is synthesized)
gatgatgaaaggagaagggaaaggctgcggatggccttcatttcctgctcctggcatctggggattccgagaatgatcccaggacctagatcctatagattccggcagctcttcctgcaa

SEQ ID NO: 114097 - DNA, 120 bp, Artificial Sequence
  ENSG00000100351_33 (sequence is synthesized)
acacaagcccttgttgtgtgcctgagccttgctctccggcctggagacatccatctgcccactctcctaggaactgctgattaccaggaagcaccatcggctctgctgccctccccctgg

SEQ ID NO: 114098 - DNA, 120 bp, Artificial Sequence
  ENSG00000100351_34 (sequence is synthesized)
tggcccagcctcttgagttctcagagagttcatgatgaagaccctggacccccccaaatggcagaaatagggaaactgttcttggcaaagacatctctatgaattaaatggctcccacct

SEQ ID NO: 114099 - DNA, 120 bp, Artificial Sequence
  ENSG00000100351_35 (sequence is synthesized)
gaacacacacacacacacacacactgtctcacacacacacacacacttaaactcacacacacacacacttcccctgaggacccagtaaacaattgcttcattttcctatcagcacaattc

SEQ ID NO: 114100 - DNA, 120 bp, Artificial Sequence
  ENSG00000100351_36 (sequence is synthesized)
caaatctattcatgccccttagcccatctggctgtcagatccacaagagaaaaaggcttaatacccacaacagagccttgtttattacttatttatctccctccacccttgttcccgatg

SEQ ID NO: 114101 - DNA, 120 bp, Artificial Sequence
  ENSG00000100351_37 (sequence is synthesized)
agcattctatgctggaccggttcgtgttaagtctgagttcctcaatcgctggctctcaggagctgtttggaaaattcgttgccatgcatgagtcgggggattggttttttttccactgga

SEQ ID NO: 114102 - DNA, 120 bp, Artificial Sequence
  ENSG00000100351_38 (sequence is synthesized)
aattgttaatggggactgcattagcggccccttatcgctttgcctgatagagagacagcaggttcgcccaaacaattctggaaccctgatcactgccaattaggggagtattgtctggct

SEQ ID NO: 114103 - DNA, 120 bp, Artificial Sequence
  ENSG00000100351_39 (sequence is synthesized)
cctgcctttgtctcttaagaactgcatgtggttccttttaaaaagagaagttcaccttgattccctttgtgcacccttataccagacaccaaccaggccgggtgatggaaatacagtcgg

SEQ ID NO: 114104 - DNA, 120 bp, Artificial Sequence
  ENSG00000100351_40 (sequence is synthesized)
cataagccaccatccttgtcctgggaggttcgtagtctggagaggggaacacatccacccaaagggctgttacagatgttcttggctaagttctcagggagcacaggtgagggaacaagt

SEQ ID NO: 114105 - DNA, 120 bp, Artificial Sequence
  ENSG00000100351_41 (sequence is synthesized)
gattccatcttgaaagatgggggttgtaggagtgtgtgcaatgtgaacgtcaggaatgcactgaaggtgacttgggcttttagctaaagctcagagatgtgcaagcccatgctgaatgca

SEQ ID NO: 114106 - DNA, 120 bp, Artificial Sequence
  ENSG00000100351_42 (sequence is synthesized)
aggaggagaggttgtgggtggagacagcttgggaaaggcagccacagaggacatggctcaacaaaggccatgcacacctggccactcaggggctttttaaagcttgtcctcatcctgcac

SEQ ID NO: 114107 - DNA, 120 bp, Artificial Sequence
  ENSG00000100351_43 (sequence is synthesized)
ttgagttgtagtggccacttgctgagctgaagtggccttggacttctcccacattcatgcaccatactttcagactctgcatcttagcccttgggtttttgttttgttttgtttgtttgc

SEQ ID NO: 114108 - DNA, 120 bp, Artificial Sequence
  ENSG00000100351_44 (sequence is synthesized)
aaaagagcataagcccttcaaaagggcatttgggagtgtgtggagccagaccccctctgcctgacctcagagcaccctcagatagcctgatccctggtcctcagatagcctgatccctgg

SEQ ID NO: 114109 - DNA, 120 bp, Artificial Sequence
  ENSG00000100351_45 (sequence is synthesized)
tcctcagatagcctgatccctggtcctcagcagtcccaatgagccttctcggacgcccagcaacactgaggccattagtgtctcaccaccgagaattaggtttgttatacaaagaacctt

SEQ ID NO: 114110 - DNA, 120 bp, Artificial Sequence
  ENSG00000100351_46 (sequence is synthesized)
gtcagcatgtgagagggtgacattgaaagtgtctgaggagcacaaaacaccacagaatggcttcttttggaatatgaacatgcccattaggtagccttctaactgctctcaactttcaag

SEQ ID NO: 114111 - DNA, 120 bp, Artificial Sequence
  ENSG00000100351_47 (sequence is synthesized)
atctagtaacatagtggcaaagcataggccttcacaaacttaaaatatgagttgggcctcctgacccaggaaaacctgtctgtcactgctttggggtcttacgaagctcctggagggact

SEQ ID NO: 114112 - DNA, 120 bp, Artificial Sequence
  ENSG00000100351_48 (sequence is synthesized)
tgccaagcagcgagaagttcctgccttctctgtggggcactgtgatcatgtgactgtcatccactggagaccatccttgtaccaacttccaccctcgtcttccattacaaagagaacctg

SEQ ID NO: 114113 - DNA, 120 bp, Artificial Sequence
  ENSG00000100353_0 (sequence is synthesized)
ctcttttcctggtttctcaagagtgctgctgctaacgcggtccccggcacgcaccatctgttgccatcccggccggccgaggccattgcagattttggaagatggcaaagttcatgacac

SEQ ID NO: 114114 - DNA, 120 bp, Artificial Sequence
  ENSG00000100353_1 (sequence is synthesized)
ccgtgatccaggacaacccctcaggctggggtccctgtgcggttcccgagcagtttcgggatatgccctaccagccgttcagcaaaggagatcggctaggaaaggttgcagactggacag

SEQ ID NO: 114115 - DNA, 120 bp, Artificial Sequence
  ENSG00000100353_2 (sequence is synthesized)
gagccacataccaagataagaggtacacaaataagtactcctctcagtttggtggtggaagtcaatatgcttatttccatgaggaggatgaaagtagcttccagctggtggatacagcgc

SEQ ID NO: 114116 - DNA, 120 bp, Artificial Sequence
  ENSG00000100353_3 (sequence is synthesized)
gcacacagaagacggcctaccagcggaatcgaatgagatttgcccagaggaacctccgcagagacaaagatcgtcggaacatgttgcagttcaacctgcagatcctgcctaagagtgcca

SEQ ID NO: 114117 - DNA, 120 bp, Artificial Sequence
  ENSG00000100353_4 (sequence is synthesized)
aacagaaagagagagaacgcattcgactgcagaaaaagttccagaaacaatttggggttaggcagaaatgggatcagaaatcacagaaaccccgagactcttcagttgaagttcgtagtg

SEQ ID NO: 114118 - DNA, 120 bp, Artificial Sequence
  ENSG00000100353_5 (sequence is synthesized)
attgggaagtgaaagaggaaatggattttcctcagttgatgaagatgcgctacttggaagtatcagagccacaggacattgagtgttgtggggccctagaatactacgacaaagcctttg

SEQ ID NO: 114119 - DNA, 120 bp, Artificial Sequence
  ENSG00000100353_6 (sequence is synthesized)
accgcatcaccacgaggagtgagaagccactgcggagcatcaagcgcatcttccacactgtcaccaccacagacgaccctgtcatccgcaagctggcaaaaactcaggggaatgtgtttg

SEQ ID NO: 114120 - DNA, 120 bp, Artificial Sequence
  ENSG00000100353_7 (sequence is synthesized)
tccaaactcttctttgacaagagagacaactctgactttgacctcctgacagtgagtgagactgccaatgagccccctcaagatgaaggtaattccttcaattcaccccgcaacctggcc

SEQ ID NO: 114121 - DNA, 120 bp, Artificial Sequence
  ENSG00000100353_8 (sequence is synthesized)
atggaggcaacctacatcaaccacaatttctcccagcagtgcttgagaatggggaaggaaagatacaacttccccaacccaaacccgtttgtggaggacgacatggataagaatgaaatc

SEQ ID NO: 114122 - DNA, 120 bp, Artificial Sequence
  ENSG00000100353_9 (sequence is synthesized)
gcctctgttgcgtaccgttaccgcaggtggaagcttggagatgatattgaccttattgtccgttgtgagcacgatggcgtcatgactggagccaacggggaagtgtccttcatcaacatc

SEQ ID NO: 114123 - DNA, 120 bp, Artificial Sequence
  ENSG00000100353_10 (sequence is synthesized)
aagacactcaatgagtgggattccaggcactgtaatggcgttgactggcgtcagaagctggactctcagcgaggggctgtcattgccacggagctgaagaacaacagctacaagttggcc

SEQ ID NO: 114124 - DNA, 120 bp, Artificial Sequence
  ENSG00000100353_11 (sequence is synthesized)
cggtggacctgctgtgctttgctggctggatctgagtacctcaagcttggttatgtgtctcggtaccacgtgaaagactcctcacgccacgtcatcctaggcacccagcagttcaagcct

SEQ ID NO: 114125 - DNA, 120 bp, Artificial Sequence
  ENSG00000100353_12 (sequence is synthesized)
aatgagtttgccagccagatcaacctgagcgtggagaatgcctggggcattttacgctgcgtcattgacatctgcatgaagctggaggagggcaaatacctcatcctcaaggaccccaac

SEQ ID NO: 114126 - DNA, 120 bp, Artificial Sequence
  ENSG00000100353_13 (sequence is synthesized)
aagcaggtcatccgtgtctacagcctccctgatggcaccttcagctctgatgaagatgaggaggaagaggaggaggaagaagaggaagaagaagaggaagaaacttaaaccagtgatgtg

SEQ ID NO: 114127 - DNA, 120 bp, Artificial Sequence
  ENSG00000100353_14 (sequence is synthesized)
gagctggagtttgtccttccaccgagactacgagggcctttgatgcttagtggaatgtgtgtctaacttgctctctgacatttagcagatgaaataaaatatatatctgtttagtctttc

SEQ ID NO: 114128 - DNA, 120 bp, Artificial Sequence
  ENSG00000100353_15 (sequence is synthesized)
cgggacacgaccttgtgggtgaggtccttggccctcggccctgctcagtgcccatgagctgggtgaatttgattgtcacttaactcacctgggttaagacggagggattttggaagatgg

SEQ ID NO: 114129 - DNA, 120 bp, Artificial Sequence
  ENSG00000100353_16 (sequence is synthesized)
aggtgagcggcgtgtttcataggttcctgcggccctccggagccggttcggactaggtccagccttcggggggcctcccggaagagacctctcttagtcccttcctgctgttgccgtccc

SEQ ID NO: 114130 - DNA, 120 bp, Artificial Sequence
  ENSG00000100353_17 (sequence is synthesized)
aggaatccactttcgggggccccgcgtcccgcacgctactgaacgcgggacacgaccttgtgggtgaggtccttggccctcggccctgctcagtgcccatgagctgggtgaatttgattg

SEQ ID NO: 114131 - DNA, 120 bp, Artificial Sequence
  ENSG00000100353_18 (sequence is synthesized)
ctcttttcctggtttctcaagagtgctgctgctaacgcggtccccggcacgcaccatctgttgccatcccggccggccgaggccattgcagatggaaaagactaaggtggctggacgtgg

SEQ ID NO: 114132 - DNA, 120 bp, Artificial Sequence
  ENSG00000100353_19 (sequence is synthesized)
gcaacacatagtaaacacttggctctgctgtttatatgacacttctaaagtgtgtgtgtgtgtgtgtgtgtccgtgtgtgtccatccatcattccctgtctaggcgagcttttagaagag

SEQ ID NO: 114133 - DNA, 120 bp, Artificial Sequence
  ENSG00000100353_20 (sequence is synthesized)
aggaattgtaagtcgttgagtgactgctgtgcggcaggctgtgcaagggaagggactatgtctttgtctcttaaatggtaagatttagtgcgtacctacccactttctaagcaagcagac

SEQ ID NO: 114134 - DNA, 120 bp, Artificial Sequence
  ENSG00000100353_21 (sequence is synthesized)
ggcagaaatgggatcagaaatcacaggtaatgtatttataccagaattctgccttggaatttggttctgtttatttggttgtctttattaatagcttagatgagatatacttcacatacc

SEQ ID NO: 114135 - DNA, 120 bp, Artificial Sequence
  ENSG00000100353_22 (sequence is synthesized)
aaactcacgcacagtccagcagaggttcagaaaggaaagtgaacatcatatcacacaacctggctcatttctcttacattttttgtgtctttcagaggaagaaacttaaaccagtgatgt

SEQ ID NO: 114136 - DNA, 120 bp, Artificial Sequence
  ENSG00000100353_23 (sequence is synthesized)
agcaggagtctgaatctttgcagctgtggctgctactctcgagtccctgtttagattttattgtctcaaaatcttaactcctgaatttcttatagggatgccagctgagaaaggttatct

SEQ ID NO: 114137 - DNA, 120 bp, Artificial Sequence
  ENSG00000100353_24 (sequence is synthesized)
ctgggtgtagtcatagaagagctgggcacttacagaggtgttgtgaacaaattctgagactcttccacgctgtcctctcgcgctcagggatttctggttctgcagaaacttgcctggttg

SEQ ID NO: 114138 - DNA, 120 bp, Artificial Sequence
  ENSG00000100353_25 (sequence is synthesized)
acctgtgcattctctgtcttttcttgttcttcgtaggttgcagactggacaggagccacataccaagataagaggtacacaaataagtactcctctcagtttggtggtggaagtcaatat

SEQ ID NO: 114139 - DNA, 120 bp, Artificial Sequence
  ENSG00000100353_26 (sequence is synthesized)
caggcagcgagctcagagccccatcaagggccccaggaacctggccagggctgcaactaagcagaggtgctgggtctgactgattggccttggccttgtcaacaaagttagctctgtctt

SEQ ID NO: 114140 - DNA, 120 bp, Artificial Sequence
  ENSG00000100353_27 (sequence is synthesized)
tgcctgtttacgcaggctaggttgtataaactgtttcttatcccctttcgttacttatagagctacctggatgtttttttttgtcttgtgagttttttcctctgcttagttccttgctga

SEQ ID NO: 114141 - DNA, 120 bp, Artificial Sequence
  ENSG00000100353_28 (sequence is synthesized)
gaaagagcatgactgtgtgtgtagaactatgttaagtgttaagaacttttctgcttattttttacgcaggaaccagttaactcccttcttccagtactttcttcatctctgttccattgt

SEQ ID NO: 114142 - DNA, 120 bp, Artificial Sequence
  ENSG00000100353_29 (sequence is synthesized)
ggcctcctgttgacttctgctccctgagcatctgattttttcctctccttattatctgggttggcagttttcctgtaagtctggccgctcttctttttgacctcttctttcattgactga

SEQ ID NO: 114143 - DNA, 120 bp, Artificial Sequence
  ENSG00000100354_0 (sequence is synthesized)
gagagagcaagagggagagtgtgtgagagagagttagttcaagccaaaatggccgacagagtctctgctggtttctgaatatttaaaatacaaaaaaacagatagacaaaaagaattcat

SEQ ID NO: 114144 - DNA, 120 bp, Artificial Sequence
  ENSG00000100354_1 (sequence is synthesized)
tttttggaccttttttcatttccatttctaccttgtatgcctcaatttgctggatttaagcactgctgcactttatgagagagaaggagcaagaaagggaagaacagttaatggaagaca

SEQ ID NO: 114145 - DNA, 120 bp, Artificial Sequence
  ENSG00000100354_2 (sequence is synthesized)
agaaaaggaagaaagaggataaaaagaaaaaagaagccactcagaaggtcacggaacaaaaaaccaaagtgcccgaagtgacgaaaccaagtttaagccaaccaacggccgccagcccaa

SEQ ID NO: 114146 - DNA, 120 bp, Artificial Sequence
  ENSG00000100354_3 (sequence is synthesized)
ttggcagctctccatcgccaccagtcaatggtggcaacaatgccaaaagggtggcagtgccgaacggacaaccgccaagcgccgcccgctacatgcctcgggaggtgccgccgcgattcc

SEQ ID NO: 114147 - DNA, 120 bp, Artificial Sequence
  ENSG00000100354_4 (sequence is synthesized)
gttgccagcaggaccacaaagtgttactaaaacgtgggcagccccctccaccgtcctgcatgctccttgggggtggggcagggcctcctccctgcacagcacctggagcaaacccaaaca

SEQ ID NO: 114148 - DNA, 120 bp, Artificial Sequence
  ENSG00000100354_5 (sequence is synthesized)
acgcacaagtgacaggagcgctgctgcagagtgagagtgggactgcgccagactcaacccttggaggtgctgctgcttcaaattatgcaaattccacttggggctcgggagcctcctcca

SEQ ID NO: 114149 - DNA, 120 bp, Artificial Sequence
  ENSG00000100354_6 (sequence is synthesized)
acaacggcacctcccccaacccaattcacatctgggacaaggtgattgtagacgggtctgacatggaagagtggccttgtattgccagcaaagacactgaatcttcttccgaaaacacca

SEQ ID NO: 114150 - DNA, 120 bp, Artificial Sequence
  ENSG00000100354_7 (sequence is synthesized)
ccgataacaacagtgcctcgaaccctggctctgagaagagcactctgccaggaagcaccactagtaacaaaggaaaagggagccagtgccagtctgcaagttctgggaacgaatgtaatc

SEQ ID NO: 114151 - DNA, 120 bp, Artificial Sequence
  ENSG00000100354_8 (sequence is synthesized)
ttggggtctggaaatctgaccctaaggctaaatctgttcaatcttccaactctactacagagaacaacaatggactaggaaattggaggaatgtgagtggtcaggatagaattggacctg

SEQ ID NO: 114152 - DNA, 120 bp, Artificial Sequence
  ENSG00000100354_9 (sequence is synthesized)
gctctggcttcagcaactttaacccaaatagcaacccatctgcctggccagcactggtccaagaaggaacttctaggaaaggggcattggaaacagataatagtaattccagtgcacagg

SEQ ID NO: 114153 - DNA, 120 bp, Artificial Sequence
  ENSG00000100354_10 (sequence is synthesized)
ttagcacagtaggtcagacatccagggaacagcagtcaaagatggaaaatgcgggtgttaattttgttgtctctggcagagaacaggctcaaattcataacactgatggaccaaaaaatg

SEQ ID NO: 114154 - DNA, 120 bp, Artificial Sequence
  ENSG00000100354_11 (sequence is synthesized)
gaaacactaactccttgaacttaagttcaccaaaccccatggagaataagggaatgccctttggaatgggcttggggaacacctccaggagcactgatgccccttcacaaagcactggag

SEQ ID NO: 114155 - DNA, 120 bp, Artificial Sequence
  ENSG00000100354_12 (sequence is synthesized)
atcgaaagactgggagtgttggatcttggggtgcagctagggggccttctggaactgacacagtctctggacaaagcaattctggaaacaatgggaacaatggaaaagagagagaggact

SEQ ID NO: 114156 - DNA, 120 bp, Artificial Sequence
  ENSG00000100354_13 (sequence is synthesized)
cctggaaaggagcttctgttcagaaatcaactgggtcaaaaaatgactcttgggacaacaataacaggtctacgggtgggtcctggaactttggcccccaggactctaatgacaacaaat

SEQ ID NO: 114157 - DNA, 120 bp, Artificial Sequence
  ENSG00000100354_14 (sequence is synthesized)
ggggtgaagggaacaaaatgacatctggggtctctcagggagaatggaaacagccgactgggtctgatgagttgaaaattggagaatggagtggtccaaaccaaccaaattctagcactg

SEQ ID NO: 114158 - DNA, 120 bp, Artificial Sequence
  ENSG00000100354_15 (sequence is synthesized)
gagcatgggacaatcaaaagggccaccccctccctgaaaaccaaggcaatgcccaggctccctgttggggaagatcttccagctccacaggaagtgaagttggaggtcaaagcactggaa

SEQ ID NO: 114159 - DNA, 120 bp, Artificial Sequence
  ENSG00000100354_16 (sequence is synthesized)
gcaaccacaaagcaggaagtagtgacagtcataactctggccgtcggtcgtacaggcccacacatcctgattgtcaggctgtcttgcagactcttttgagccgaactgatttggacccca

SEQ ID NO: 114160 - DNA, 120 bp, Artificial Sequence
  ENSG00000100354_17 (sequence is synthesized)
gggtgctctcaaacactggctggggccaaactcaaattaagcaggacacagtgtgggacattgaagaggtgccaaggcctgaggggaaatctgacaaaggaactgaggggtgggagagcg

SEQ ID NO: 114161 - DNA, 120 bp, Artificial Sequence
  ENSG00000100354_18 (sequence is synthesized)
ctgccacacagaccaagaactcagggggctggggagatgcacccagccaaagcaatcaaatgaagtctggatggggggagctctcagcctctacagagtggaaagaccccaagaacacag

SEQ ID NO: 114162 - DNA, 120 bp, Artificial Sequence
  ENSG00000100354_19 (sequence is synthesized)
gaggctggaatgactacaagaacaacaactcttccaactggggaggaggacgacctgatgaaaagacaccttcctcttggaatgagaatcccagcaaggatcaggggtggggaggtggac

SEQ ID NO: 114163 - DNA, 120 bp, Artificial Sequence
  ENSG00000100354_20 (sequence is synthesized)
gccagcccaatcaaggatggtcttctggaaagaatggttggggggaggaagtcgatcagacaaaaaacagcaattgggaaagttctgcaagtaaacctgtgtctgggtggggtgaaggag

SEQ ID NO: 114164 - DNA, 120 bp, Artificial Sequence
  ENSG00000100354_21 (sequence is synthesized)
ggcagaatgaaatcgggacttggggtaatggtggcaatgcaagcctagcttcaaaaggtgggtgggaggattgcaaaagatccccagcatggaatgagacgggccgacagcccaattcct

SEQ ID NO: 114165 - DNA, 120 bp, Artificial Sequence
  ENSG00000100354_22 (sequence is synthesized)
ggaataaacaacaccaacagcagcagcccccacagcagccgccgccaccacaaccagaggcttctggttcgtggggaggcccacccccaccacctccaggcaacgttcgaccttccaatt

SEQ ID NO: 114166 - DNA, 120 bp, Artificial Sequence
  ENSG00000100354_23 (sequence is synthesized)
ccagctggagcagcgggccacagcctgcaacacctaaggatgaggaacccagtggttgggaagagccatccccacagtcaattagtcggaaaatggacattgatgatggcacttcagcat

SEQ ID NO: 114167 - DNA, 120 bp, Artificial Sequence
  ENSG00000100354_24 (sequence is synthesized)
ggggagaccctaacagttataactacaagaatgtgaatctgtgggataagaattcccaagggggcccagcacctcgagaaccaaacctgcccaccccaatgaccagtaaatcggcatcag

SEQ ID NO: 114168 - DNA, 120 bp, Artificial Sequence
  ENSG00000100354_25 (sequence is synthesized)
attccaaatctatgcaagacggctggggggagagtgacgggccagtcacaggagctcgccatcccagctgggaagaggaggaggatggaggagtctggaacaccactggctctcagggca

SEQ ID NO: 114169 - DNA, 120 bp, Artificial Sequence
  ENSG00000100354_26 (sequence is synthesized)
gtgcttcctcccacaactcagcaagctggggacaaggaggaaagaaacaaatgaagtgctcactcaaaggaggaaacaatgattcatggatgaatcctcttgccaaacagttttcaaata

SEQ ID NO: 114170 - DNA, 120 bp, Artificial Sequence
  ENSG00000100354_27 (sequence is synthesized)
tgggattgctgagtcagactgaagataatccaagcagcaaaatggatttgtctgtaggaagcctttcagataaaaaatttgatgtggacaagcgagcgatgaatctcggggattttaatg

SEQ ID NO: 114171 - DNA, 120 bp, Artificial Sequence
  ENSG00000100354_28 (sequence is synthesized)
atatcatgaggaaggatcgatctgggttccgtccacctaattccaaagacatgggaaccacagatagtgggccttattttgagaagggcggtagtcatggtttgtttggaaacagcacag

SEQ ID NO: 114172 - DNA, 120 bp, Artificial Sequence
  ENSG00000100354_29 (sequence is synthesized)
cacaatcgagaggtctgcacacacccgtgcagccactaaattcttctcccagtctccgggcgcaagtgcctccccagtttatttccccccaggtttctgcctcaatgctcaagcagtttc

SEQ ID NO: 114173 - DNA, 120 bp, Artificial Sequence
  ENSG00000100354_30 (sequence is synthesized)
ccaacagtggcctgagtccaggtcttttcaatgtggggccccagttatctcctcaacaaattgccatgctgagccagcttccacaaattccccagtttcagttggcatgtcagcttctct

SEQ ID NO: 114174 - DNA, 120 bp, Artificial Sequence
  ENSG00000100354_31 (sequence is synthesized)
tgcagcagcagcaacagcagcagttgttacagaaccagagaaagatttctcaagctgtacgccaacagcaagagcagcagctggctcgaatggtgagtgcactgcagcagcagcagcagc

SEQ ID NO: 114175 - DNA, 120 bp, Artificial Sequence
  ENSG00000100354_32 (sequence is synthesized)
agcagcagaggcagccaggcatgaagcactcgccctctcatcctgttgggcccaagccgcatctggacaacatggtacccaacgcattgaatgtggggctcccagaccttcaaaccaaag

SEQ ID NO: 114176 - DNA, 120 bp, Artificial Sequence
  ENSG00000100354_33 (sequence is synthesized)
ggccaatacctggatatggttctggcttcagctctggcggcatggactatggcatggttggtgggaaggaggctggaaccgagtctcgctttaaacagtggacctccatgatggaggggc

SEQ ID NO: 114177 - DNA, 120 bp, Artificial Sequence
  ENSG00000100354_34 (sequence is synthesized)
tgccctctgtagccacacaggaagccaatatgcacaaaaatggcgctatagtggcccctggtaaaacccggggagggtcaccgtacaaccagtttgatatcatccctggtgacacactgg

SEQ ID NO: 114178 - DNA, 120 bp, Artificial Sequence
  ENSG00000100354_35 (sequence is synthesized)
gtggccatacgggtcctgctggtgatagctggttacctgccaaatctccaccaacaaataaaatcggaagtaaatccagcaatgccagttggcctccagaattccaaccaggagtgccat

SEQ ID NO: 114179 - DNA, 120 bp, Artificial Sequence
  ENSG00000100354_36 (sequence is synthesized)
ggaaaggtatccaaaacattgaccctgaatctgacccctatgtcaccccaggaagtgtgctggggggtacagccacatctcccattgtagatactgaccaccaactgctgcgggataaca

SEQ ID NO: 114180 - DNA, 120 bp, Artificial Sequence
  ENSG00000100354_37 (sequence is synthesized)
ccacagggtctaattcttccctcaacacctcgctgccttcacctggtgcctggccctacagtgcctctgacaactcctttaccaacgttcatagcacttcagcaaagttccctgattaca

SEQ ID NO: 114181 - DNA, 120 bp, Artificial Sequence
  ENSG00000100354_38 (sequence is synthesized)
aatcaacatggtccccagatcccataggacacaaccccactcatctctccaacaagatgtggaaaaaccatatttcctccaggaacactacaccgctgccccgcccacctcctggtctga

SEQ ID NO: 114182 - DNA, 120 bp, Artificial Sequence
  ENSG00000100354_39 (sequence is synthesized)
ccaaccccaaaccatcatctccctggagcagcacagcaccccgatcagtcagggggtgggggacacaggactcacggctcgcctcggcctctacctggagtgatggtggctcagttcgtc

SEQ ID NO: 114183 - DNA, 120 bp, Artificial Sequence
  ENSG00000100354_40 (sequence is synthesized)
ctagttactggctggttcttcacaatctcaccccacagattgatgggtcaaccttgagaacgatctgcatgcagcatggcccactgctgacattccatctgaatctaacccagggcactg

SEQ ID NO: 114184 - DNA, 120 bp, Artificial Sequence
  ENSG00000100354_41 (sequence is synthesized)
ccctgatccgatacagcaccaaacaggaggcggccaaggcccaaactgcactgcacatgtgtgtgttgggaaacactaccatccttgctgagtttgccactgatgatgaagtcagccgct

SEQ ID NO: 114185 - DNA, 120 bp, Artificial Sequence
  ENSG00000100354_42 (sequence is synthesized)
ttctggcacaagctcagccccctacacctgcagcaaccccaagtgcgccagctgcggggtggcagtcgctggagaccggccagaaccagtcagatcccgtgggacctgctctgaatcttt

SEQ ID NO: 114186 - DNA, 120 bp, Artificial Sequence
  ENSG00000100354_43 (sequence is synthesized)
ttggtgggtccactgggctcgggcagtggagcagcagcgctggtggcagcagcggggccgatcttgctggcgcttcattgtgggggcccccaaactattcttctagcttatggggagtcc

SEQ ID NO: 114187 - DNA, 120 bp, Artificial Sequence
  ENSG00000100354_44 (sequence is synthesized)
caacggtggaagatccccataggatgggcagccctgctcctttactacctggtgaccttctgggaggagggtcggattcaatctgaacttagaactttcaactctgacctcgtgaccttt

SEQ ID NO: 114188 - DNA, 120 bp, Artificial Sequence
  ENSG00000100354_45 (sequence is synthesized)
tttggaacagcagcagcactaacttgaccttttcgttttttttttcaacttgcaataaatacatttttaaaaggaaaaaagaaaacggagagaaaaaaaggtgggtcattgacagactgt

SEQ ID NO: 114189 - DNA, 120 bp, Artificial Sequence
  ENSG00000100354_46 (sequence is synthesized)
ctgagcacatagttgcctcccttataacttcagttttttcgtttggaatatgaatccaaaaagagaacatatcactcttgaaatacttgaatcatgaacgccaacctagaaagacaatgt

SEQ ID NO: 114190 - DNA, 120 bp, Artificial Sequence
  ENSG00000100354_47 (sequence is synthesized)
gaagcaagtacacataccatttaaatttaaacacaaaaaaattaaaaaaattagtttctagtttttcacttttttcatgttatatggaagttgttgctaagaaacatatatactgaaaaa

SEQ ID NO: 114191 - DNA, 120 bp, Artificial Sequence
  ENSG00000100354_48 (sequence is synthesized)
aaatagctttttaactttgtttgcactgggtgtgtttccgtccttaggtctaccatgtttgggagggagggaaattcaaaagaattgttgggggaggggggagggaagacttgacggagc

SEQ ID NO: 114192 - DNA, 120 bp, Artificial Sequence
  ENSG00000100354_49 (sequence is synthesized)
aaaacctaaaaaaaaaaaaaaggaaaaaatttgtgattggctggttgataaataccagtgtgttctggcacatgtaactgcccaggcatgctcgttctggtgtgtgtgtgcacgtgtgtt

SEQ ID NO: 114193 - DNA, 120 bp, Artificial Sequence
  ENSG00000100354_50 (sequence is synthesized)
ctggtgtgtgtgtgcacgtgtgttcatgtgcattcgcgtgcatccttctctgtctctgtgtgtgtgcctgtgttcttcccttctcccctgccccaccctgacttctcagaaagctgcatc

SEQ ID NO: 114194 - DNA, 120 bp, Artificial Sequence
  ENSG00000100354_51 (sequence is synthesized)
gctgacagtctgcaggctggctggccggcccatctgctttttattttatttttttaactatgagaacacacaggcccggagagccactgctactaaagcaactccattgggctgcattaa

SEQ ID NO: 114195 - DNA, 120 bp, Artificial Sequence
  ENSG00000100354_52 (sequence is synthesized)
gatgaacagagtgctttttaatgatgaaagcagggagctcctttccatttgcaacttagcctgaatgtggggtttctctggctgttcttttgacctagcagtagagtggagcactgccaa

SEQ ID NO: 114196 - DNA, 120 bp, Artificial Sequence
  ENSG00000100354_53 (sequence is synthesized)
gtccaaaaaactagagcaggaggtacctcttggagcaacggtgtgtttatttctgtttttttttttttttaagtgaatggccaccaggcacatctgagtatctgttaagtttcatgcagg

SEQ ID NO: 114197 - DNA, 120 bp, Artificial Sequence
  ENSG00000100354_54 (sequence is synthesized)
ccttttcgttagtttgaaatgggaacggaagataacttttgatgatgcgatgtctcaaaaacagagaaactttgttccctctttccttatgatcaggtttgagaaattcttcaaaaaatt

SEQ ID NO: 114198 - DNA, 120 bp, Artificial Sequence
  ENSG00000100354_55 (sequence is synthesized)
aggtgaagttgagttacatatttctgttggttggttctctttttcattttatgaaaacagaaaagaataagtggtgagcagcctcctgaaagcatctgcagctactccctctgctccttt

SEQ ID NO: 114199 - DNA, 120 bp, Artificial Sequence
  ENSG00000100354_56 (sequence is synthesized)
ctcgccgagcgttacctgtgccaggccgtggcgcgttacagcaccaggccatcactgacagaaacgtttacttaacgaatgttcttaaaccagtgtgtacttcaagcgtttccttttgtt

SEQ ID NO: 114200 - DNA, 120 bp, Artificial Sequence
  ENSG00000100354_57 (sequence is synthesized)
tctctgtgttgtgtatttcctgtgtatgtggttttgcttaggcaggtataacttagcgaagacttttaagtattgcacctttttttgatttttgacctcttccccccaccttgtaatttt

SEQ ID NO: 114201 - DNA, 120 bp, Artificial Sequence
  ENSG00000100354_58 (sequence is synthesized)
gcttttttaatttcggtatttaaatacttttttttttttttaagcatcaatgtagtagtactctgggccgaacaggggtcaacgtttaatctacagttatcaccaacatgtatgtactta

SEQ ID NO: 114202 - DNA, 120 bp, Artificial Sequence
  ENSG00000100354_59 (sequence is synthesized)
tgtcggaatcaaaatgtatcaaactgcttattgtgaagagaattatagcagacctgaagggggcgaaaaaccagatagggtggggggatggatgccggtgacgtgctagcacttgtgtgg

SEQ ID NO: 114203 - DNA, 120 bp, Artificial Sequence
  ENSG00000100354_60 (sequence is synthesized)
acatcccagtctgcattatgctgtttaacataaagtgccgacattttgtaccagcaaatacctgcccattccaacccttggtgggagcagacctctactgtcctctgtaacttgctgcta

SEQ ID NO: 114204 - DNA, 120 bp, Artificial Sequence
  ENSG00000100354_61 (sequence is synthesized)
ttgaggacaagggagtttttctttctttagcgtcttcagtgaaggatacaatacaacaatgcctaatgtatttgactttttagcttgtgtctgtgtgtaggtgggtgggtgggtgtgtat

SEQ ID NO: 114205 - DNA, 120 bp, Artificial Sequence
  ENSG00000100354_62 (sequence is synthesized)
aggaaaagcctaaaacaagttatttgcatttcagtggttttgtgagacaaagaatgggaaattctgtagcccttctggcttaccctgttgattataaacctagcctcaaaagagattgac

SEQ ID NO: 114206 - DNA, 120 bp, Artificial Sequence
  ENSG00000100354_63 (sequence is synthesized)
aggcatgactcaagtgagtgttcacatatacaagcctgcatgagccctctgtgggtaggtggtcacacttggcatctgcagcattgacgtggccccgctgggtgccttgagcatgccctc

SEQ ID NO: 114207 - DNA, 120 bp, Artificial Sequence
  ENSG00000100354_64 (sequence is synthesized)
ttcctgctctgcaatttgaatcaccaccgtgccccttccaccactgttccccatgcaaaagctctgcttccagcagcccccactgaccgctctctgtgtggagcaaagtgctgtcgtgcg

SEQ ID NO: 114208 - DNA, 120 bp, Artificial Sequence
  ENSG00000100354_65 (sequence is synthesized)
gtgaccaccaggtgaagagcagcttgtattcagacatctagagaaggttaaatcttagtgtccctgggccaggagcatatcccaaggctcctgcgagccagtggcgaccctgtccactgc

SEQ ID NO: 114209 - DNA, 120 bp, Artificial Sequence
  ENSG00000100354_66 (sequence is synthesized)
cgctcttggttcactgctgtgtcctgccccaccctcctctcctcctgcctgttggttccttgacctgcactatgggttagttgagttccttacgatactacggtgaaagccgggtgctag

SEQ ID NO: 114210 - DNA, 120 bp, Artificial Sequence
  ENSG00000100354_67 (sequence is synthesized)
agcccctcttgtttacaagacataatgagggatttgaaatatgtaaaaataaacatgagaagctaaaatgttcttccatcataagcttaaagggaaaaaaactaaaaactttaaaaaaaa

SEQ ID NO: 114211 - DNA, 120 bp, Artificial Sequence
  ENSG00000100354_68 (sequence is synthesized)
aagaccaaaaagtgcgtatatatatacatataaatatatattttagatgaagactaactctgggagcatttaacagtgttttttgtttctgtttttaacatttgttttcctgctttaaaa

SEQ ID NO: 114212 - DNA, 120 bp, Artificial Sequence
  ENSG00000100354_69 (sequence is synthesized)
tttgcaagcattctcaggaattctagggtaggaagccagttttttgaagatggtttatttaaccatatcttatcctagagagatggctgtttctttcctgttaataaacttttacaagtt

SEQ ID NO: 114213 - DNA, 120 bp, Artificial Sequence
  ENSG00000100354_70 (sequence is synthesized)
cctgaaacttcagaaagtttaaacaatttttacttaaaaaaatgtaaaaagaaaagtctccaaacattattgtcatactggggatcacacattttaaaacacatagaaatattttttaaa

SEQ ID NO: 114214 - DNA, 120 bp, Artificial Sequence
  ENSG00000100354_71 (sequence is synthesized)
aattatcaatttagcagcaacaggtaaattcattatcttaaaaatatgggagaaggattaagctttgtaagagctcgatcatggattcttttgaaattgtgtgtagtttaatgggagagt

SEQ ID NO: 114215 - DNA, 120 bp, Artificial Sequence
  ENSG00000100354_72 (sequence is synthesized)
gtttggtgtatatagatgagaatgccatcactttgttcctttccatttgagactgaactgaaatctcccctagtaatttttatttttttaaaggaacccttctccttgtccccacaaccc

SEQ ID NO: 114216 - DNA, 120 bp, Artificial Sequence
  ENSG00000100354_73 (sequence is synthesized)
cagcaacaaaagaaaggaaggaaggaagaaacaacagcttaaaaaaaaaagtaatctgtaaaatagtacagttggattgctgagaatctatgtaaagagttaggaaatataggttaataa

SEQ ID NO: 114217 - DNA, 120 bp, Artificial Sequence
  ENSG00000100354_74 (sequence is synthesized)
ctgtcctattaatgaagaatgtctgtcttacctccgtttgttttgggaggaggagaaaatatagaagaatctaataaggaacaagtgattttacttttttagctcccagctactgttgtg

SEQ ID NO: 114218 - DNA, 120 bp, Artificial Sequence
  ENSG00000100354_75 (sequence is synthesized)
ctcgttttaattgctgttttgaagatctgctgcttaattatccccatcccttagccggagatgtggagtgtttcctttcagtttttggtgatgttgaattcttttgtattccctcctggg

SEQ ID NO: 114219 - DNA, 120 bp, Artificial Sequence
  ENSG00000100354_76 (sequence is synthesized)
gccaggggtcagaattcccaagcatgaccacagcttcttttaaacattaagcttcccagtgggaaggaaactccagctcgacaggtaaagggagtgggtggggttgctgcctgcaatttc

SEQ ID NO: 114220 - DNA, 120 bp, Artificial Sequence
  ENSG00000100354_77 (sequence is synthesized)
tctaaaaccgctttagtgccttcgtacatacacccagacatcctgagcaagggggacgcacatgtgtgtgtgtgtggtccagtcactccacagatgtaagatactcacccataaaggaaa

SEQ ID NO: 114221 - DNA, 120 bp, Artificial Sequence
  ENSG00000100354_78 (sequence is synthesized)
ttggagtggttctggacaggccccaaaggcagtgggctgaatttaaaataaataaacaaacgtcaagcaagttaatatgcttatgtctcagtaatgtagaatgccaagttccttcctgtg

SEQ ID NO: 114222 - DNA, 120 bp, Artificial Sequence
  ENSG00000100354_79 (sequence is synthesized)
tcgtgtgccctccattactgtgcattgattcctccaggtgtgtaattgtgacaactgcagtgatttggaaagtctctttgtcttgggcaaatagaaggggttcctgttgttctgctcttg

SEQ ID NO: 114223 - DNA, 120 bp, Artificial Sequence
  ENSG00000100354_80 (sequence is synthesized)
tccttcgtctcctccccttttcccccagacctcccccttctttttgtcaacttgctgggagctttgctttattggttggcagtgacctaagaacaggatatggtgaggatgtcatggaag

SEQ ID NO: 114224 - DNA, 120 bp, Artificial Sequence
  ENSG00000100354_81 (sequence is synthesized)
agaagagctctttccgtggtattctttggcaagagccatgtctactaagaggttagatgacttcagtatacttataaaattcagtgagagtgccttcttctcttctaccacactctggca

SEQ ID NO: 114225 - DNA, 120 bp, Artificial Sequence
  ENSG00000100354_82 (sequence is synthesized)
tagatacaggcttgctggtcacctctcattacatagatttattttaaaaacattttgattatgttaatttgagctttcccttttttttttttaactactttttaaaacacttgattacta

SEQ ID NO: 114226 - DNA, 120 bp, Artificial Sequence
  ENSG00000100354_83 (sequence is synthesized)
gtggcttagaggtgtgtacatctcctgaacatcacaaacttggtttctacctaccacacgagtagccaaaagaaaagaagcactaatagagaaaggggtgtctcacaccagacagaggac

SEQ ID NO: 114227 - DNA, 120 bp, Artificial Sequence
  ENSG00000100354_84 (sequence is synthesized)
ctctgctgtcaattagatccagtatcatgacctaactttaagtgtggaaaagagttcagatctctgagacactgtgaagaaatggatggctcatgtaacatctctgatccctcagtcccc

SEQ ID NO: 114228 - DNA, 120 bp, Artificial Sequence
  ENSG00000100354_85 (sequence is synthesized)
aaccctggacgtgtttcatttacaacattcataggagttaacttagcagtgttgcaagttaaggttccaaaccaaattatttaatcagtgtccccccaataaatcacttatccatttatt

SEQ ID NO: 114229 - DNA, 120 bp, Artificial Sequence
  ENSG00000100354_86 (sequence is synthesized)
gctagttagttttatttatagcaacttgatttcctatgagtatggctcctgttgtaagaattttcccacctcttctgacatgaatgtagcataagttagcaatcggttcttccaaactcc

SEQ ID NO: 114230 - DNA, 120 bp, Artificial Sequence
  ENSG00000100354_87 (sequence is synthesized)
tgtgggttgaatatggtatagaaggtatgcaagaggaaaaagaaaggaaaagataaaactcctgcctgagaatttggaagcacctttattaacacatatatctcgcagaaactagaagct

SEQ ID NO: 114231 - DNA, 120 bp, Artificial Sequence
  ENSG00000100354_88 (sequence is synthesized)
cataggctgttaactttttgcaactattcactcatttttaccacttttttttttgggtgagggggtgatttttgtaaggttaacagccagattccattttgacctcagatgctgtgtact

SEQ ID NO: 114232 - DNA, 120 bp, Artificial Sequence
  ENSG00000100354_89 (sequence is synthesized)
ttttaatttcattttttatattctgccatcttgactcttctctaaaacagaatgaaaatgtctgcatgctgagcaaaatgcttacgccaagcctgtttttctctgcagagtaaacaggat

SEQ ID NO: 114233 - DNA, 120 bp, Artificial Sequence
  ENSG00000100354_90 (sequence is synthesized)
gttttcagcagacttggctctaatagccatctctaagattagggaacaattgagtctttatgtagaaaagatccattttttccccatcctcagagttaaaattcaacatttaaagcttta

SEQ ID NO: 114234 - DNA, 120 bp, Artificial Sequence
  ENSG00000100354_91 (sequence is synthesized)
tcggttattgttttagatttgagatttttgtttttaagtatctataagatctttagaagtgagataaatttttcgctggttaaaaaaaatcaaactttcctctgcagtgtttttgccaag

SEQ ID NO: 114235 - DNA, 89 bp, Artificial Sequence
  ENSG00000100354_92 (sequence is synthesized)
taaaaaaaatcaaactttcctctgcagtgtttttgccaagttttgtcacacttcatgtgtatgcattaactatacttcttagtgttact

SEQ ID NO: 114236 - DNA, 120 bp, Artificial Sequence
  ENSG00000100354_93 (sequence is synthesized)
gacaactaaagccgcgtgatgatgcggatgaaaatattctggtctgtgtgtatacaatgaattgtcagtcttcagacctcatggtcgttaagaaaatagggaactcacaaaccctgctgc

SEQ ID NO: 114237 - DNA, 120 bp, Artificial Sequence
  ENSG00000100354_94 (sequence is synthesized)
gcactacatttacttctttatctgcaagtacagggagtccatacagtcaagaaacacacagatacacataatgctattgaggacattgtcattctgtaagaaaacagaatattatctaga

SEQ ID NO: 114238 - DNA, 120 bp, Artificial Sequence
  ENSG00000100354_95 (sequence is synthesized)
tttccagagttagtgcagaccctgtgataacagtctgtgggtttgtggccagcgccaaaggtgtgtgtattttcagaaatggtccctatttgtcagtgatagtgttttttttttcttaag

SEQ ID NO: 114239 - DNA, 120 bp, Artificial Sequence
  ENSG00000100354_96 (sequence is synthesized)
tttgacaaagggggtggtaatatcacattctttagatttgaaataattatcagctccaagaatctgtgaacatagtaataacaataaaaattcaacatcgaccctccctaacctgctcac

SEQ ID NO: 114240 - DNA, 120 bp, Artificial Sequence
  ENSG00000100354_97 (sequence is synthesized)
catacctccccaccccatgcctctgaagaaagaggccatgaacctacgaggtggtaaagggggacacaggtcagggagtggagagctactcctccagcagctcagcacccacactgcccg

SEQ ID NO: 114241 - DNA, 120 bp, Artificial Sequence
  ENSG00000100354_98 (sequence is synthesized)
catgcgtgtggccaccgggaccagatcccgagtgattgtggcatacccctaatatttgagtagtttttaagctgtcagtctcttgtcataacctcctaccgccacccaaaaaagtaacga

SEQ ID NO: 114242 - DNA, 120 bp, Artificial Sequence
  ENSG00000100354_99 (sequence is synthesized)
aagttgcagtaactgccagtgtttgcctcaccaaatttaaatcgttcccttttcagttagctatatacctgaatttgtttttaacaagaaactgtacatggccaggaaaaatggtactac

SEQ ID NO: 114243 - DNA, 120 bp, Artificial Sequence
  ENSG00000100354_100 (sequence is synthesized)
cttggccaaagggtctttgcaaaaagctcagtcttcagttcttcactgtgacaaatgcttatcttgttcatgggaggggaaagatcagataaataggcaagaagtactctgttttaaata

SEQ ID NO: 114244 - DNA, 120 bp, Artificial Sequence
  ENSG00000100354_101 (sequence is synthesized)
aagaataaatagtgtccgtttaaagcactttgtgcctcaacttcatttttaaactgtaaatcattgctttggaaataaattcccaattataattgacccatatctagccaatatcaacaa

SEQ ID NO: 114245 - DNA, 120 bp, Artificial Sequence
  ENSG00000100354_102 (sequence is synthesized)
gttgggatggtttttgtttttttcttttttttcaaaaagggaaattcctctttactgctcacagtaagctgcaaaagaaagttgtcaaggtggcttatgatgctgttgtagcagagctgt

SEQ ID NO: 114246 - DNA, 120 bp, Artificial Sequence
  ENSG00000100354_103 (sequence is synthesized)
gaaaggaagtgctttgctttctctcccgccttccggaatctggcgttccttccccttcggctactgaaaggtgtgtacaactcccagaggggtggctgtaaaagttgactggaggcaaag

SEQ ID NO: 114247 - DNA, 120 bp, Artificial Sequence
  ENSG00000100354_104 (sequence is synthesized)
tggagtggccttattgccaggactagccctacagaagagctttacagagaggaggacagtacatcctatgtgtgttcgccaaaaatgggaaaggtgggtatttaggcaaaacaaaataaa

SEQ ID NO: 114248 - DNA, 120 bp, Artificial Sequence
  ENSG00000100354_105 (sequence is synthesized)
aacctttggaaccctttaagaagttacataccttttaaaggtagtatagtttctcaccaagtgatgcattttagcatgacacttcttgccagaaattttgggataagttggaataaatgt

SEQ ID NO: 114249 - DNA, 120 bp, Artificial Sequence
  ENSG00000100354_106 (sequence is synthesized)
gtttaaaacatcatccaccgccctttttaaattttgtctaaggaattacttaagtatagtatttctgaatgtgcctttgtgagtacagagaccgtccgttctaggaagaagctatccgtt

SEQ ID NO: 114250 - DNA, 120 bp, Artificial Sequence
  ENSG00000100354_107 (sequence is synthesized)
ggatacaaacaaacagacggtcagctttagtcattagggaagtcaaagttcctcctggaagtcccaggagcagctgttgagatttcattagcatcaatattgcacagtgtagagttgagt

SEQ ID NO: 114251 - DNA, 120 bp, Artificial Sequence
  ENSG00000100354_108 (sequence is synthesized)
ggaagagattctgggacttgggagaggagacaggggaaggtacccaggcgacgcagacccacgttagtccaagagcgcaggtttacacatctgcattccctagttttctccgtctgtatg

SEQ ID NO: 114252 - DNA, 120 bp, Artificial Sequence
  ENSG00000100354_109 (sequence is synthesized)
tttgtgctcatgtggctttggctgttttgttttttgtttttctgtaagcactggagaattggaatatggtgatacttgtgacacattcatgcatgtaaacaaggcattttccagcttctg

SEQ ID NO: 114253 - DNA, 120 bp, Artificial Sequence
  ENSG00000100354_110 (sequence is synthesized)
ccgtgtgcagagcgggcagcacgcttttaccctttgagtctgtgtcctgaggcggccattacattcccacatgggcgtcacatcacgttgctgttgatgcaaacagggtattacacacaa

SEQ ID NO: 114254 - DNA, 120 bp, Artificial Sequence
  ENSG00000100354_111 (sequence is synthesized)
ggaaaaggggttttgaagagttaagattgaagtgtttgagaaagaaaagagaaaaatctgaaatcatattttatttcttcagagctattatagttgaacacagaaatctgcagtgtcttt

SEQ ID NO: 114255 - DNA, 120 bp, Artificial Sequence
  ENSG00000100354_112 (sequence is synthesized)
atttgtttttatgttttaaacaatttcacctcttctccccactcctatcttctaaagaaatatcaagcaaatgctaagggccatttccatgattcctcagagctcccccaaagaggagaa

SEQ ID NO: 114256 - DNA, 120 bp, Artificial Sequence
  ENSG00000100354_113 (sequence is synthesized)
cagtccctcccactcgattccttcagcttcattcaggaagacacagggaggagagatgctgcttctgcgctttgctctcattcctctctcatggccttgaaatgtattattatgcaaatg

SEQ ID NO: 114257 - DNA, 120 bp, Artificial Sequence
  ENSG00000100354_114 (sequence is synthesized)
ttttttttttttttttttttttcaaaaaaaaaagtcccacatgtggtcatcgtcgcttctttatgttgtaaggtgaattgtaactatgcattctgcaaagggggtggggaggagagggca

SEQ ID NO: 114258 - DNA, 120 bp, Artificial Sequence
  ENSG00000100354_115 (sequence is synthesized)
taactatgcattctgcaaagggggtggggaggagagggcagaaaggggaagggagtagcgttgcatccttgttcttcagtttctgtgtccatggtgtccccgtgtcctggaggggaaggg

SEQ ID NO: 114259 - DNA, 120 bp, Artificial Sequence
  ENSG00000100354_116 (sequence is synthesized)
gagtgagagacgaatgtggtaaggtcagcacagtgagatagagacctctgagtcctcttgccactgttgctggcaggtctgatggccaggtaaattccagggggcctgcagttcctgtca

SEQ ID NO: 114260 - DNA, 120 bp, Artificial Sequence
  ENSG00000100354_117 (sequence is synthesized)
accaatgtggttcaggattcttgatcctagccgtgcagtgttaatccagtgcagcaatggaactccacaggctccagtgttctctggaaaaagtactcatcctttcctgaattcagagcc

SEQ ID NO: 114261 - DNA, 120 bp, Artificial Sequence
  ENSG00000100354_118 (sequence is synthesized)
cttcaagctcaggaaaccacgcttcactcgtgctgacctgaaagttaatctttaggtcgattttgaaaaactccgcctcctctctcctttttaatatttctttcttcctttttaatcatg

SEQ ID NO: 114262 - DNA, 120 bp, Artificial Sequence
  ENSG00000100354_119 (sequence is synthesized)
tttaagtgaacttactcttagttataaggaactgtcctgctttgtggggaagagggctgttgcttgtcaggcaaaaaagttttctcttcctacccaccatccctctctctgcttcccttg

SEQ ID NO: 114263 - DNA, 120 bp, Artificial Sequence
  ENSG00000100354_120 (sequence is synthesized)
catttggcaggctgtatgaagccaatgagctgcgaggtgttttgacaggggaggtctgcatgcagcctcttctttgtcctaacaattcctttgttgatcttgcctgtgatgaatcatagc

SEQ ID NO: 114264 - DNA, 120 bp, Artificial Sequence
  ENSG00000100354_121 (sequence is synthesized)
gcctgcattgctctggtctaggcattatttgcaacacacagtatcgtaagcgagagattgttctgcctatattcagtgttttccatgcagcaattcttcttgttgacgttcacagtactg

SEQ ID NO: 114265 - DNA, 120 bp, Artificial Sequence
  ENSG00000100354_122 (sequence is synthesized)
taacgagtaacagacttgatcacagtctcctcgtgcctgtgcagggctgcacaggcatgatcttatcagggttccaatctgttagattgcctttaaacaaaaaaaacaacaaaaaaataa

SEQ ID NO: 114266 - DNA, 120 bp, Artificial Sequence
  ENSG00000100354_123 (sequence is synthesized)
aatcctgacgtttcaactgtctcacacaaaataatacctcgaggtacatttccccctgcaatgtaaacccttaactcctctctcctttctgacatcagtggattatcctttttaaaatat

SEQ ID NO: 114267 - DNA, 120 bp, Artificial Sequence
  ENSG00000100354_124 (sequence is synthesized)
gaacatgtaaatagcaggataactttaaaaaacattttctttgctgtgaaagtaaccctaaaatatgttttcttcttttgtatttttttggtttttgtttttaagccatcagaagtttca

SEQ ID NO: 114268 - DNA, 120 bp, Artificial Sequence
  ENSG00000100354_125 (sequence is synthesized)
gatctttactctttcatgtttaagaagaaagagcagaggaggtcgggggagccggtttgcatttgtgttggaggggtgttatctccattgcctcccacacagtgacagcagaccagtatg

SEQ ID NO: 114269 - DNA, 120 bp, Artificial Sequence
  ENSG00000100354_126 (sequence is synthesized)
attgcaccactgcactccagtgtgggcaacagagcaagacttcgactcaaaaacataaaataaacaaaagacacacacacacacaaaaaccctgtcttaaatagctgccatctcttccag

SEQ ID NO: 114270 - DNA, 120 bp, Artificial Sequence
  ENSG00000100354_127 (sequence is synthesized)
caatctagtgccagggtaagaagtgtctgaatttctctcttccagcagatccatcccctgcagggactccagaatgttctccacacaatacctggagctctcaacctttcttggttcaga

SEQ ID NO: 114271 - DNA, 120 bp, Artificial Sequence
  ENSG00000100354_128 (sequence is synthesized)
cacacacatacacaccccttgagtaactcagtatcattttgtagttcacagaaggatgtagtccctggcattttggtttgcactgtagaatccatagccttgtcactttgttatgctctg

SEQ ID NO: 114272 - DNA, 120 bp, Artificial Sequence
  ENSG00000100354_129 (sequence is synthesized)
gaaatgtactgatttcttacttgggaggaaacttgtgtaaggagatgtgcaaaccaccctgaaagccatgtgcatcctcacctcttccattaccccctccatgagctcgaagcgacatta

SEQ ID NO: 114273 - DNA, 120 bp, Artificial Sequence
  ENSG00000100354_130 (sequence is synthesized)
agtagagggaaatgcttttaacaaatgctgctcatgtggatctgtcagctattgcttgcctagatttgggcacccatgaagcagggttggaatggatcattttgaattgcttctttgcag

SEQ ID NO: 114274 - DNA, 120 bp, Artificial Sequence
  ENSG00000100354_131 (sequence is synthesized)
acacccccttcgcccccatctttaagataaaccctttactagtcaagaagcccttttcagttggatctcactgatcttgtatagtgacgacttcctttgaaggaagaagcttgattataa

SEQ ID NO: 114275 - DNA, 120 bp, Artificial Sequence
  ENSG00000100354_132 (sequence is synthesized)
gtgcatgcatattatccacccaccttctgatttgggcactgttcaccttggaattttatttattttgtttatctggaggccctttttctatcagtctctgatccctcatgggttctgcct

SEQ ID NO: 114276 - DNA, 120 bp, Artificial Sequence
  ENSG00000100354_133 (sequence is synthesized)
gcccttgtatctcttgtacaatgctcccaaagggctttgctgatctctgcacttctttcctgggacactccccccaccaccaccctttgcacacaccagtgaccaaagtgtatgcagtga

SEQ ID NO: 114277 - DNA, 120 bp, Artificial Sequence
  ENSG00000100354_134 (sequence is synthesized)
tctcacagaagacatcaaaaatggtgcatgcaccgtgaatgtgctcacagagacacgtgcacaagattctgcacccttggccttaatctcagtatgacttaaggtgcaggaacattttta

SEQ ID NO: 114278 - DNA, 120 bp, Artificial Sequence
  ENSG00000100354_135 (sequence is synthesized)
acaggttttaaaaaaacaaaaaacccttctgggaggaaaaaaataaaaagcagatacaacagctcaactgttcccactcctaactctccactatgtgcttataacttcacattctatgcc

SEQ ID NO: 114279 - DNA, 120 bp, Artificial Sequence
  ENSG00000100354_136 (sequence is synthesized)
ctccccgccacccacctcatccctgttctgcgtaaccaaaaaacagacaacaaaagcaacctgaggagaggtttctggactattttatctgtctccatttagatggagatataaatgctg

SEQ ID NO: 114280 - DNA, 120 bp, Artificial Sequence
  ENSG00000100354_137 (sequence is synthesized)
ctttgggttccataatcctagggggctatgtttacatagtaaaatacatcctaccaaatcaggaaacagtgaataatgggagtcacttcacagagacgcaggaggacctggggggcgtag

SEQ ID NO: 114281 - DNA, 120 bp, Artificial Sequence
  ENSG00000100354_138 (sequence is synthesized)
cagaggaggataggtagagaagtaccattttaattatttgtgacttgtggcttccttcctcctctcctcctccctccacgtctctctttgccccctttagacagaaggtgcagaaaaggg

SEQ ID NO: 114282 - DNA, 120 bp, Artificial Sequence
  ENSG00000100354_139 (sequence is synthesized)
catcaaaaagaggctggattttttaaaaggcagctttccaactttgcacacaaacaggtaacaggaaggtacagcaaaaatcctctcatctgaaacactgtcagcagaaacaaaacctgt

SEQ ID NO: 114283 - DNA, 120 bp, Artificial Sequence
  ENSG00000100354_140 (sequence is synthesized)
aaaaatgactaatcagctgcacatattgatgctctctgcaagttacctttaagtgttttttttttcttatacttgaagttgcttttacgatattattttggtggctttcttttctctctt

SEQ ID NO: 114284 - DNA, 120 bp, Artificial Sequence
  ENSG00000100354_141 (sequence is synthesized)
ttattttggtggctttcttttctctctttgatgggcaatagaggaagtagataatgggatttaaggacgcctgggggagaaaagggaggatgtggcattgtctttttttttttttttttt

SEQ ID NO: 114285 - DNA, 120 bp, Artificial Sequence
  ENSG00000100354_142 (sequence is synthesized)
actcccatatgttgaaattgctcctcatattactggttttacatggacacagaaactaggcactttagaggtgcacttgcatggcaggctgggcccccttttctatattttattttcctt

SEQ ID NO: 114286 - DNA, 120 bp, Artificial Sequence
  ENSG00000100354_143 (sequence is synthesized)
tttagtatagtggtacttaaaatcactggttcacttaaaaaaacaaacaataaaatgttaaactctactaatgtacaaataagctgaaaagttgcattttatgtgtattttttgccatag

SEQ ID NO: 114287 - DNA, 120 bp, Artificial Sequence
  ENSG00000100354_144 (sequence is synthesized)
aaaaaaaaagtatcaaaaacaaaaaaaactaaagggtggtgttttattggattgtgacaggttgagtaataaggaattaagtcgtcgtcatttcattaaaactgagagatgatgtaatgc

SEQ ID NO: 114288 - DNA, 120 bp, Artificial Sequence
  ENSG00000100354_145 (sequence is synthesized)
tcgtcatttcattaaaactgagagatgatgtaatgcatatataagagttttctgaagggttttttttgggcttttaaacagcttatttttgtttttgtttagtttttttattttatttta

SEQ ID NO: 114289 - DNA, 120 bp, Artificial Sequence
  ENSG00000100354_146 (sequence is synthesized)
ttttggaaagatatgattgtattatgtgcaactcagttgcttacattataactacaaaatatttttgggttcctggaaaaaaaagaaaaaagactaataaatgtgtttggctgctaagca

SEQ ID NO: 114290 - DNA, 120 bp, Artificial Sequence
  ENSG00000100354_147 (sequence is synthesized)
ttgtttattttgtttttagtttttggggtccccgtgctgctgcaaggcgaaacgggagggagtgacccctgcgcccctcagtcccccctacgacgtcgcctccatagtctgcggagaagc

SEQ ID NO: 114291 - DNA, 120 bp, Artificial Sequence
  ENSG00000100354_148 (sequence is synthesized)
ggagactgcgcgcctcgcctcacagcgaaacgccgcgcactcggagccggcacggctcggcgggttgtggttttttgcactgaatgtaacctagactcatcttcacgggcttgtgttgcc

SEQ ID NO: 114292 - DNA, 120 bp, Artificial Sequence
  ENSG00000100354_149 (sequence is synthesized)
ccaggtactgtcaaaggcagtatttttgtgtttctgcagagttttgcacaaaatctgttcccatgcaaaccaatgagggagaagtatcggaagaaagcagttccaaggtggaacaggagg

SEQ ID NO: 114293 - DNA, 120 bp, Artificial Sequence
  ENSG00000100354_150 (sequence is synthesized)
tgcagagtgagagtgggactgcgccagtctggagcaaaagcacaccacctgctccagataatggtacttccgcttggggtgagccaaatgaaagcagtcctgggtggggcgagatggatg

SEQ ID NO: 114294 - DNA, 120 bp, Artificial Sequence
  ENSG00000100354_151 (sequence is synthesized)
cggcccgcggaggcgcgtccgcccctggctggcggtggcagagggaggcgtcaggcctcggatcctcgggtccctgcgcagcgtcccggcctgtgtgcaggacctgcgtgacaagggttg

SEQ ID NO: 114295 - DNA, 120 bp, Artificial Sequence
  ENSG00000100354_152 (sequence is synthesized)
tagtgggccttattttgagaagctgactttgcctttctccaatcaagatgggtgccttggggatgaggctccctgctctcccttctccccttctcccagctacaagctgtctccctctgg

SEQ ID NO: 114296 - DNA, 120 bp, Artificial Sequence
  ENSG00000100354_153 (sequence is synthesized)
ggcggccaaggcccaaactgcactgcacatgtgagtattcggtcctacacccacgtagacaaacatgcatgaagatgcacccgtgagtattctggcagctgctgaattaaagatgcacca

SEQ ID NO: 114297 - DNA, 120 bp, Artificial Sequence
  ENSG00000100354_154 (sequence is synthesized)
gaacatatacgaagaatggcaccgtcacacgtgcatctgcaagtctcgagtgtggagagtgtggaggtgccgggtcttttccaccaaagcttggattgtcctgtatatatcagaggccag

SEQ ID NO: 114298 - DNA, 120 bp, Artificial Sequence
  ENSG00000100354_155 (sequence is synthesized)
ggattgtcctgtatatatcagaggccagtcgtcagaattccaaacgtaaataatttgtgaagtagtgagtaaattctaagtaacataaagctagggccgggcacagtggcccatgcctgt

SEQ ID NO: 114299 - DNA, 90 bp, Artificial Sequence
  ENSG00000100354_156 (sequence is synthesized)
acatggtacagccaggcgtgggggcgcatgcctgtagtcccagctactgggaaggttgaggcaggggaatcgcttgaacctgggaagcag

SEQ ID NO: 114300 - DNA, 120 bp, Artificial Sequence
  ENSG00000100354_157 (sequence is synthesized)
atgtatttttccagttacttctggttcagtgtggtgaattttataaaaatgaaaacatagatataactagggcttattaatcatttaaactaacataaaatatcaacataattttagtta

SEQ ID NO: 114301 - DNA, 120 bp, Artificial Sequence
  ENSG00000100354_158 (sequence is synthesized)
gtaggtttaatcagttaagtctgtctttttatctgctaggcatccagcatccagaacaagaaactgtcttggcttgaatatccgatatcttttattttttttcctgagatggagtcttgc

SEQ ID NO: 114302 - DNA, 120 bp, Artificial Sequence
  ENSG00000100354_159 (sequence is synthesized)
tctctaggcctgtggtaggggttgcacctgcattaccctccttttttatgtcagctgtacaaggtaggtaaatattcttatccctggtttacagatgagacatctgaggcttcttgagtt

SEQ ID NO: 114303 - DNA, 120 bp, Artificial Sequence
  ENSG00000100359_0 (sequence is synthesized)
acgcgtgcgcttaggcgccgctgagcgctgactgggtgcgagtggggaagctgctaacccgacccggattggcgctgaggtggcccgtggggcagggcagatgattctggaccagatgaa

SEQ ID NO: 114304 - DNA, 120 bp, Artificial Sequence
  ENSG00000100359_1 (sequence is synthesized)
gcctgaggagccttccagctctaagatagcaggataggagacttctaagattggagctgcagaagacttgccagcccaccagcacaatgtcaggaagccatacacctgcctgtggccctt

SEQ ID NO: 114305 - DNA, 120 bp, Artificial Sequence
  ENSG00000100359_2 (sequence is synthesized)
tctcagccctgactccgagcatatggccccaggagatcttggccaagtacacgcagaaggaagagtcagcagagcaaccagagttctactacgatgagtttggtttccgtgtgtacaagg

SEQ ID NO: 114306 - DNA, 120 bp, Artificial Sequence
  ENSG00000100359_3 (sequence is synthesized)
aagaaggtgatgagcctggctccagtctgctggcgaactcccctctgatggaggatgctccacagaggctgcggtggcaggcccacctggagttcacccataaccacgatgtgggggatc

SEQ ID NO: 114307 - DNA, 120 bp, Artificial Sequence
  ENSG00000100359_4 (sequence is synthesized)
tcacctgggacaagattgccgtctccctaccccgctctgagaagctccgctccctggtgctggccggcatcccacatggcatgaggccacagctgtggatgcggctctctggggccctgc

SEQ ID NO: 114308 - DNA, 120 bp, Artificial Sequence
  ENSG00000100359_5 (sequence is synthesized)
agaagaagaggaactctgagctgtcctaccgcgagattgtgaagaacagctccaacgatgagaccatcgctgccaagcagatcgagaaggacctgctccgcaccatgcccagcaacgcct

SEQ ID NO: 114309 - DNA, 120 bp, Artificial Sequence
  ENSG00000100359_6 (sequence is synthesized)
gcttcgccagcatgggtagcatcggggtgccccgcctgcgcagggtgctccgggccctggcctggctctacccagagatcggctactgccagggcaccggcatggtggccgcctgcctcc

SEQ ID NO: 114310 - DNA, 120 bp, Artificial Sequence
  ENSG00000100359_7 (sequence is synthesized)
tgctgttcctggaggaggaggacgccttctggatgatgtctgccatcatcgaggacctgctccccgcctcctacttcagcaccaccctgctgggtgtccagactgaccagcgggtcctgc

SEQ ID NO: 114311 - DNA, 120 bp, Artificial Sequence
  ENSG00000100359_8 (sequence is synthesized)
gccacctcattgtccagtacctgcctcgcctggacaagctgctccaggagcatgacattgagctgtccctgatcacactgcactggttcctcacggccttcgccagcgtggtggacatca

SEQ ID NO: 114312 - DNA, 120 bp, Artificial Sequence
  ENSG00000100359_9 (sequence is synthesized)
agctgctcctgcgcatctgggacctgtttttctacgagggctcccgggtgctgttccagctcacgctgggcatgctgcacctcaaggaggaagagctgatccagtcagagaactcggcct

SEQ ID NO: 114313 - DNA, 120 bp, Artificial Sequence
  ENSG00000100359_10 (sequence is synthesized)
ccatcttcaacacgctatcggatatcccgtcgcagatggaggacgcggagctgcttctgggggtggccatgcggctggccggctccctcaccgatgtggccgtggagactcagcgccgca

SEQ ID NO: 114314 - DNA, 120 bp, Artificial Sequence
  ENSG00000100359_11 (sequence is synthesized)
agcacctggcctatctcattgcagaccagggccagctcctgggggccggcaccctcaccaacctctctcaggttgttcgccgcaggacccagcggaggaagtccaccatcactgctctgc

SEQ ID NO: 114315 - DNA, 120 bp, Artificial Sequence
  ENSG00000100359_12 (sequence is synthesized)
gtgcacagaccccaaaaactgcagcgtggagctgactccagactatagcatggagagccaccagcgggaccacgagaactacgtggcgtgctcacgcagccaccggcgccgagccaaggc

SEQ ID NO: 114316 - DNA, 120 bp, Artificial Sequence
  ENSG00000100359_13 (sequence is synthesized)
cctgctggactttgagcggcacgacgacgacgagctgggcttccgcaagaacgacatcatcacaatcgtgtctcagaaggacgagcactgctgggtgggggagctcaacggcctgcgagg

SEQ ID NO: 114317 - DNA, 120 bp, Artificial Sequence
  ENSG00000100359_14 (sequence is synthesized)
ctggtttccagccaagttcgtggaagtcctggatgagcgcagcaaagagtactccatcgcgggggatgactcggtgacggagggggtcacagacctcgtgcgagggaccctctgcccggc

SEQ ID NO: 114318 - DNA, 120 bp, Artificial Sequence
  ENSG00000100359_15 (sequence is synthesized)
ccttaaggccctgttcgaacatggactgaagaagccatccctgcttgggggcgcctgccacccctggctgtttatcgaggaggctgcaggccgggaggtcgagagagactttgcctccgt

SEQ ID NO: 114319 - DNA, 120 bp, Artificial Sequence
  ENSG00000100359_16 (sequence is synthesized)
gtattcccgtctggtgctctgtaagaccttcaggttggatgaagatggcaaagtcctgaccccggaggagctgctctaccgggctgtgcagtctgtgaacgtgacccacgatgcagtgca

SEQ ID NO: 114320 - DNA, 120 bp, Artificial Sequence
  ENSG00000100359_17 (sequence is synthesized)
tgcacaaatggatgtgaagctccgctcactgatctgcgtggggctcaatgagcaggtgctgcacctgtggctggaggtgctctgctccagcctgcccaccgtggagaagtggtaccagcc

SEQ ID NO: 114321 - DNA, 120 bp, Artificial Sequence
  ENSG00000100359_18 (sequence is synthesized)
ctggtccttcctgcgcagcccgggctgggtccagatcaagtgtgagctccgagtcctctgctgctttgccttcagcctctcccaggactgggagctccctgcgaagagagaggcgcagca

SEQ ID NO: 114322 - DNA, 120 bp, Artificial Sequence
  ENSG00000100359_19 (sequence is synthesized)
gcccctgaaggagggcgtccgggacatgctggtgaagcaccacctcttcagctgggatgtggacgggtgaccccctcctccccagcccaacctcgggcctgcgtctgaggtggcccagga

SEQ ID NO: 114323 - DNA, 120 bp, Artificial Sequence
  ENSG00000100359_20 (sequence is synthesized)
ccccaagctgcagagcccagggaagagcagctccagagccctggccggggccgcgggatatcaatatcaggctgccccactccacgttccccagcacatcccaggtggtgggagcagagg

SEQ ID NO: 114324 - DNA, 120 bp, Artificial Sequence
  ENSG00000100359_21 (sequence is synthesized)
gtaccctgccccaccagggtccttagggatgctctaggccaaaccacagtttgtaccaaaaaccttgtgaggaggtgggggagccatgtctgtgctcaggaagagggaaggggatggggg

SEQ ID NO: 114325 - DNA, 120 bp, Artificial Sequence
  ENSG00000100359_22 (sequence is synthesized)
tggctagtaggctcctggcctctttggtttataaataaactgtgtctgtctttgagaaagcacctacctgtcttctgtgcagctagggctgcagagctgtattcaggtccaaggttctgc

SEQ ID NO: 114326 - DNA, 120 bp, Artificial Sequence
  ENSG00000100359_23 (sequence is synthesized)
ccttccttgagtggtctagaaggcactgcgtggcccctcagatgctgggacacaacagacccgggacccagctgtgctacccaccccttccatggactgaataagatggactaacaggcc

SEQ ID NO: 114327 - DNA, 120 bp, Artificial Sequence
  ENSG00000100359_24 (sequence is synthesized)
gcgctggactaccaggtcctcaggctgtggcgggttccccagactccctccaccaagccccaccccaacccctttccctgccaagagcttctcttgtgaagatgtaggggtcttggcctg

SEQ ID NO: 114328 - DNA, 120 bp, Artificial Sequence
  ENSG00000100359_25 (sequence is synthesized)
gagtggggggacccagcccagcatcagggggggtccttacagggaaccctaaaggacaaagaacctcaggggctcaggtccttccccaaagagggtggtctgggagctgctgagagacag

SEQ ID NO: 114329 - DNA, 120 bp, Artificial Sequence
  ENSG00000100359_26 (sequence is synthesized)
agggcctgcactgatggagctgcccaaaccgttcgcggggtggctaaggtgggaacccgaagtgctggtgtcagcggttaggaactaccccagccatgcccaaggcctgtgaggtgaggg

SEQ ID NO: 114330 - DNA, 120 bp, Artificial Sequence
  ENSG00000100359_27 (sequence is synthesized)
cctgcgcgtggcacgccacttccagtgcacagaccccaaaaactgcagcgtggtgagtcgccagctccctgggctgctaccaaacacggccctaactcctccaacccccttggtgggcct

SEQ ID NO: 114331 - DNA, 120 bp, Artificial Sequence
  ENSG00000100359_28 (sequence is synthesized)
ggaatctggatatggtgggagagagctggcctagagccatgaagctcagaccctcctgaagacggaggcttggctgcttggagaacacgtagtagagaatgctttttctttcctccttgg

SEQ ID NO: 114332 - DNA, 120 bp, Artificial Sequence
  ENSG00000100359_29 (sequence is synthesized)
cacggggaggaggggtcaccttgaagttcagagcgcgggggctgcggaaaacaaaccagcccttcctgctctgccccccagcctggcccagtcagaccacagctgtggggtgatccaggc

SEQ ID NO: 114333 - DNA, 120 bp, Artificial Sequence
  ENSG00000100359_30 (sequence is synthesized)
ctcctcaggctttgtgcacctcaggttctgatcctggcacggtttgggaggaaggcagacccagctctgattatctgttttcaattcttggagccagcgtcagaggctatttcagatgag

SEQ ID NO: 114334 - DNA, 120 bp, Artificial Sequence
  ENSG00000100359_31 (sequence is synthesized)
acagtataagccaagggctggtgggttctcttcctcccggggccaggaccaccctgacccactcctcttggtgcaggttgttcgccgcaggacccagcggaggaagtccaccatcactgc

SEQ ID NO: 114335 - DNA, 120 bp, Artificial Sequence
  ENSG00000100359_32 (sequence is synthesized)
agaaggacgagcactgctgggtgggggagctcaacggcctgcgaggtggggtccttggtctgctcttgagctgggagagggaggagggggtgggcacagaagacttgggtgaccctggcc

SEQ ID NO: 114336 - DNA, 120 bp, Artificial Sequence
  ENSG00000100359_33 (sequence is synthesized)
gccaccaagctgttctcctctatacacctgcctggcttgaggtccctgaagcagctgagccggcttcccactgcctcagcctgcctgcaggctgtgtctgctctgtcctcggccctcgtg

SEQ ID NO: 114337 - DNA, 120 bp, Artificial Sequence
  ENSG00000100359_34 (sequence is synthesized)
gttgctccttacagggcctgtttttcccacaggctggtttccagccaagttcgtggaagtcctggatgagcgcagcaaagaggtgaggggggtgggcgggctaggcacggctggcaccct

SEQ ID NO: 114338 - DNA, 120 bp, Artificial Sequence
  ENSG00000100359_35 (sequence is synthesized)
tctagccagggcctgcgtgcctagcgagtcctggcctgtagcatggcagagaggacagaggagggtgactggctgcaggcgtcaggcagggctttctcagacccatccctcccatcagta

SEQ ID NO: 114339 - DNA, 120 bp, Artificial Sequence
  ENSG00000100359_36 (sequence is synthesized)
agtcctgaccccggaggagctgctctaccgggtaagggggcctcctctgccagaccctagagacctctctggggttagcctgtgggggagcctgagtgacagctgacggtgccgttccca

SEQ ID NO: 114340 - DNA, 120 bp, Artificial Sequence
  ENSG00000100360_0 (sequence is synthesized)
aatcgagggtcagcgaggaggaggaggaggcggggcaggtgggctatggttgcttggagagtgcatccggcccggtacttgtgatcggaggagagccggatcgtccttccttgaaccctc

SEQ ID NO: 114341 - DNA, 120 bp, Artificial Sequence
  ENSG00000100360_1 (sequence is synthesized)
tgggtagggctgtgctgaggggctgggcggggagcacaggccgtgtccgctcgcttgcaccttttcagactgccgtgtcaggcctcgagccgggcccacctggagccctcccctgcccac

SEQ ID NO: 114342 - DNA, 120 bp, Artificial Sequence
  ENSG00000100360_2 (sequence is synthesized)
ccgcccccagcgcccgatatccgcccccggcccagaagggccgggctcggtcatccccagtcccgtcgcggccactgacccttgagatcagccctcccctccccaccttcccgtcccagg

SEQ ID NO: 114343 - DNA, 120 bp, Artificial Sequence
  ENSG00000100360_3 (sequence is synthesized)
ccagcccagggcccgaagcccacccactcgcgtctctagcagccgctcttgtcctctgggtacggctcgcgggagtgttggttaccatggtgaagctggcagccaaatgcatcctggcag

SEQ ID NO: 114344 - DNA, 120 bp, Artificial Sequence
  ENSG00000100360_4 (sequence is synthesized)
tcttccgcagtgatggagcccatttccagaaaagctacaccctgacaacaggaatggatttggtggtgaagacagtgccagttcctgacacgggagacagtgtggaactcttcatttttg

SEQ ID NO: 114345 - DNA, 120 bp, Artificial Sequence
  ENSG00000100360_5 (sequence is synthesized)
actctgctggcaaggagctgttttcggaaatgctggataaattgtgggagagtcccaatgtcttatgtctcgtctatgatgtgaccaatgaagaatccttcaacaactgcagcaagtggc

SEQ ID NO: 114346 - DNA, 120 bp, Artificial Sequence
  ENSG00000100360_6 (sequence is synthesized)
tggagaaggctcggtcacaggctccaggcatctctctcccaggtgttttagttgggaacaagacagacctggccggcagacgagcagtggactcagctgaggcccgggcatgggcgctgg

SEQ ID NO: 114347 - DNA, 120 bp, Artificial Sequence
  ENSG00000100360_7 (sequence is synthesized)
gccagggcctggaatgttttgaaacatccgtgaaagagatggaaaacttcgaagcccctttccactgccttgccaagcagttccaccagctgtaccgggagaaggtggaggttttccggg

SEQ ID NO: 114348 - DNA, 120 bp, Artificial Sequence
  ENSG00000100360_8 (sequence is synthesized)
ccctggcatgacgagctggagcagatcgtgctgcacaaccggagaagacagaattacctctgctcttttaatatataatgatggctttaaataaaattaggagaaaatgtcgaagcagca

SEQ ID NO: 114349 - DNA, 120 bp, Artificial Sequence
  ENSG00000100360_9 (sequence is synthesized)
agcacttgctattatctgtgcaagttaactagtcccccctgagttgaggctcacagaagcaccgctggcagctcggttaagaaagctgtaattaaaaaggaaatataagcaaacgcagct

SEQ ID NO: 114350 - DNA, 120 bp, Artificial Sequence
  ENSG00000100360_10 (sequence is synthesized)
ggaagaactaagatgcgtgtgatacgttctaacacagcgaacacaaagtgaatgccctttgtgtgccagatgcggggaaatgcctccaggcacagctgctacttgttctggttctggaga

SEQ ID NO: 114351 - DNA, 120 bp, Artificial Sequence
  ENSG00000100360_11 (sequence is synthesized)
agaaagaaaacaacatttgacattgatctgtattttgtttacttttaaaaaaacacttaaatagtacttatatatgccaggcactgtgcatattaactcattaaatcctcataacaattc

SEQ ID NO: 114352 - DNA, 120 bp, Artificial Sequence
  ENSG00000100360_12 (sequence is synthesized)
ctacccaaaggaggtccctacaaacaagtgcaagaacaatccgcgctgatcactgccctcccaggcaagcgaggagtggggaagtaacgtttgatgagggcctactgtgtgctaggtgtt

SEQ ID NO: 114353 - DNA, 120 bp, Artificial Sequence
  ENSG00000100360_13 (sequence is synthesized)
aggtagctgtgggtggagaaggggccctgggcttggactttgatggcctaaggcgtacactggccctgccacttagcagccatgccaacctcggtgagtcaccacacacacctctcccag

SEQ ID NO: 114354 - DNA, 120 bp, Artificial Sequence
  ENSG00000100360_14 (sequence is synthesized)
tctaggaaacgggaatgaggacacgcacctggcagggctgtggggagactcaataacgggagggtgctgtaatatcagttgttaattccagaaagctaaccccagggaagagttcctaat

SEQ ID NO: 114355 - DNA, 120 bp, Artificial Sequence
  ENSG00000100360_15 (sequence is synthesized)
tttctcttgtatatggggtacaagtaaacattcaagcctgttgtcacttctgaatgctttaaatcagtttatttttcgtccctatgtgagatcaacaaattctcctcattatagaccggg

SEQ ID NO: 114356 - DNA, 120 bp, Artificial Sequence
  ENSG00000100360_16 (sequence is synthesized)
gaaagtgatctccagagacaggctcaaaaattagctgcagctgatgcagctgggagctgaactaaattacctctgaatccctgactccgagccgagtccttagattactattaatgacca

SEQ ID NO: 114357 - DNA, 120 bp, Artificial Sequence
  ENSG00000100360_17 (sequence is synthesized)
gtttacagtttgctccgtgtgctcagaattattacaaaggctcacataaatttggccctcgccttcaggcgtttgcagccctttaaggaggcaagggagacagatacacgtgaggtctag

SEQ ID NO: 114358 - DNA, 120 bp, Artificial Sequence
  ENSG00000100360_18 (sequence is synthesized)
aaaaagacctagcagaagttgtgcatgaaaagcgaagcccacctgtctctctgtggcccttggggccatcacgagagacccccggctttccctgtgggggggctcaccacctcgagtcag

SEQ ID NO: 114359 - DNA, 120 bp, Artificial Sequence
  ENSG00000100360_19 (sequence is synthesized)
gcagctctcagaggatgctttacacccctcaaaaatagtgctctcatctcgcccgctgtccttccagagtgtgacagtgaagtgccatattttggttgtttcttctgagtaggtgtttta

SEQ ID NO: 114360 - DNA, 120 bp, Artificial Sequence
  ENSG00000100360_20 (sequence is synthesized)
gttgggaacaagacagacctggccggcagacgagcagtggactcagctgaggcccgggcatgggcgctgggccagggcctggaatgttttgaaacatccgtggtgagtatttccacttgc

SEQ ID NO: 114361 - DNA, 120 bp, Artificial Sequence
  ENSG00000100360_21 (sequence is synthesized)
ctcgtcgccaagtctggagtgggcctctgctggcagcggtcttgcacatgacctcacgtgcagggagctgttattccaccatatgcagagtctcatttggaactgatgtttacattctta

SEQ ID NO: 114362 - DNA, 120 bp, Artificial Sequence
  ENSG00000100360_22 (sequence is synthesized)
cccgagatctcttctcagtatagcagtagctgctcagacataacaggaaagcagatcagccagccaaccctgggaaaaggtgtatctcaactagtaagaaatacaagtgctttgtgtgcg

SEQ ID NO: 114363 - DNA, 120 bp, Artificial Sequence
  ENSG00000100360_23 (sequence is synthesized)
gtgatcatgaccctcgacgtttgcatgcaatattctgggttcagatgttgttggaacattgtttcatgtggctctcacaaccagtcctgtgaaccagaagttggccccacagctcccatt

SEQ ID NO: 114364 - DNA, 120 bp, Artificial Sequence
  ENSG00000100360_24 (sequence is synthesized)
ccagtgttgaggagctcaagtgacttgtccaaggtcccatgattagcgaagggtggagccaggattaggactcatggcctctaattcccatcggtaccacccatcctcaccttgctgcag

SEQ ID NO: 114365 - DNA, 120 bp, Artificial Sequence
  ENSG00000100360_25 (sequence is synthesized)
ccccagggtgactccaggccacaaagtgcctgccagttaaaagagcagaagacctcattacaaaaagcaagtgattttcagcgtcttcagtacacttttcctggcaaaaactgcaattac

SEQ ID NO: 114366 - DNA, 120 bp, Artificial Sequence
  ENSG00000100360_26 (sequence is synthesized)
ttttgcaccaacctaatgtatcatgattttagctgtccagcactgaggaacctgcttcctgtgtttgggagttttaaagtcccatcctccttgaggccaagatgcagccatgtgacccag

SEQ ID NO: 114367 - DNA, 120 bp, Artificial Sequence
  ENSG00000100360_27 (sequence is synthesized)
gctgcaccaatcagacccctcacatgagactccactaggaagggcatgaagtgatgatctgccctctaggaacaggtgtggccctgaacatccatctcagagccagcaggggcccgagtg

SEQ ID NO: 114368 - DNA, 120 bp, Artificial Sequence
  ENSG00000100360_28 (sequence is synthesized)
ttggttgccctgcccctcgccagggttgctagctggggagatcaccaggcctggcacagtcatggtcgtaacttggacctcaccttgtggcctttagacctgattctgtggccctcagaa

SEQ ID NO: 114369 - DNA, 120 bp, Artificial Sequence
  ENSG00000100360_29 (sequence is synthesized)
ttgagtcatgggctggttaatgttctggaggtcatcttctgctccagcttgactttggctctaggcacttctgctattgcatctaggaaccttgaccagtgctgccgtccgagcttataa

SEQ ID NO: 114370 - DNA, 120 bp, Artificial Sequence
  ENSG00000100360_30 (sequence is synthesized)
aactcccccaaagcagcatgcttccttagggaaagtacagcagtaaaggcaggcactctgacctcccatggtgagtggcagaactcgccgtgggaacctggacatgttatttcacctgtt

SEQ ID NO: 114371 - DNA, 120 bp, Artificial Sequence
  ENSG00000100360_31 (sequence is synthesized)
ggtggctcaggcttgtaaagtgaggatcataaaatacatcccttatcgagtaataaatatgagaatcaagtaatatgtcgcatataaaacatggatcacagagtctggcgcctggtaaac

SEQ ID NO: 114372 - DNA, 120 bp, Artificial Sequence
  ENSG00000100360_32 (sequence is synthesized)
ttgcctctggtccaattatcacaaatgctaaattaatgaagcccaaatcagcttttcctgtatagagggtttgccatcttttctgcagcacacctttgtgcaaagcagtaggcggtagtg

SEQ ID NO: 114373 - DNA, 120 bp, Artificial Sequence
  ENSG00000100360_33 (sequence is synthesized)
ccctagcaaacaggatttcagtattctcccttcctccattcatttgtgaaattgtccctgcaccccaatattccatattccctagaacgcttgatagaactcagaaattaaaacccaccc

SEQ ID NO: 114374 - DNA, 120 bp, Artificial Sequence
  ENSG00000100360_34 (sequence is synthesized)
tgtatagatgacagactcagaaaggttgtgtagcttgccctggttgcatagttaaacgagggctagaaacaggactaggagtcaggcctgtccagctggaaaacttgggttttctagaag

SEQ ID NO: 114375 - DNA, 120 bp, Artificial Sequence
  ENSG00000100360_35 (sequence is synthesized)
gggtaccctggcctcctgcggagcctgctgtgggactctgcagaacacaattcaaggccagactgaacactagcctgaacctgccctgagaatccctctaagccgacctactccacagct

SEQ ID NO: 114376 - DNA, 120 bp, Artificial Sequence
  ENSG00000100360_36 (sequence is synthesized)
gtcctgactgtgtaagcgagatgatgattagtgatcagacgaaaggattcctgtcattggtaaccctctcaaagtatttggaaaacagttcaattttcatctatttcagaagcacgccgt

SEQ ID NO: 114377 - DNA, 120 bp, Artificial Sequence
  ENSG00000100360_37 (sequence is synthesized)
ggtgtctattgaggctcacctgcattgaattccttcctttttatgttgcgatctcccaagattgcattgtggagtgttttcgaatccattttgaaatccccgtgcgtgcgctatgcaggc

SEQ ID NO: 114378 - DNA, 120 bp, Artificial Sequence
  ENSG00000100360_38 (sequence is synthesized)
ctcagtctttttccattccattcttaactctactttcgacggaagcagtgttttaccccgacactggcttgcctaggaccttgtgctctgcacaactagcagggcccggcaggatgtact

SEQ ID NO: 114379 - DNA, 120 bp, Artificial Sequence
  ENSG00000100360_39 (sequence is synthesized)
gaattcttgctctcgtgtccagctggacggtgatggctttcaagtccttggctgttgggagcttactataaatgttcgtcttggctacaaactctccactctttcctcggcactctctca

SEQ ID NO: 114380 - DNA, 120 bp, Artificial Sequence
  ENSG00000100360_40 (sequence is synthesized)
gcattgccaccactgtctttcctcttggccaactgttttctttacttaggctttcccttgctagaaagtccaggtaactttctccacgggacctggtttccttcgcacatcccagctggc

SEQ ID NO: 114381 - DNA, 120 bp, Artificial Sequence
  ENSG00000100360_41 (sequence is synthesized)
ctcgaggaaaggtagctcttcccaaatcagagaatctggatgctgggctgggctctgcaccaaccagctgggccgcttcacccgctgggccccaaactactcatctgtgaagcgaaggca

SEQ ID NO: 114382 - DNA, 120 bp, Artificial Sequence
  ENSG00000100360_42 (sequence is synthesized)
ccgcgcttgatgccttctgcaacgttcttcagtttggaaatccttctgtttcgttggggatatttcacggcctcttctcaaggttgcacttttgccagctgccagggatcgtctcaaaac

SEQ ID NO: 114383 - DNA, 120 bp, Artificial Sequence
  ENSG00000100360_43 (sequence is synthesized)
aggttcttagtgcattcatagcttgagctgctgtcttgaaagtagtacattcctttttctgccaacttttttctgagaaagtttttgaatgcacacgtgcacccaacagagtgagagtgg

SEQ ID NO: 114384 - DNA, 120 bp, Artificial Sequence
  ENSG00000100360_44 (sequence is synthesized)
ctgttaagagagagggcgccatttcctttgccctccagcctgtccctgtgcaccctggaggggcccgttttttccaccgcttagataaaatctagggcaagttcctgaacttctcttttc

SEQ ID NO: 114385 - DNA, 120 bp, Artificial Sequence
  ENSG00000100360_45 (sequence is synthesized)
tctctcaggtaacaaaaattcttttgggctcctttagtcacaaagatattcacgatttcaggtattaaagtgcccagccctgggtgattgtcaaaattctgaacttgatttaaagtggca

SEQ ID NO: 114386 - DNA, 120 bp, Artificial Sequence
  ENSG00000100360_46 (sequence is synthesized)
cctcctctcacagtcttcgggagggagagaccggagccaggagtgcagcgtgtttgctggggtctgtcgtggcccactccacacctgctgggtggatccggctggtgccccatgggcgcc

SEQ ID NO: 114387 - DNA, 120 bp, Artificial Sequence
  ENSG00000100360_47 (sequence is synthesized)
tctgagatgcccctccccaccccatcagtggcgctgtctcacctgcaggctgcttctcacaggtggtcccccctcactcctcctgcagccccagttcctggctgttcattcttattggga

SEQ ID NO: 114388 - DNA, 120 bp, Artificial Sequence
  ENSG00000100360_48 (sequence is synthesized)
cccgtcaccctcctggaggcggtcccagccgagcccccttaagacagcaccaggctggctccacttggcccccgctggttcagggaagtgctgctgcagccgtttagtttgacaaaggag

SEQ ID NO: 114389 - DNA, 120 bp, Artificial Sequence
  ENSG00000100360_49 (sequence is synthesized)
gcagcgaggccgtctcattggtagccctctcctggcttgcccagccaccacctcacctcgattcctcccaggcctgggtccagcaccagcctaggaagagggtgccccatgctgtctagc

SEQ ID NO: 114390 - DNA, 120 bp, Artificial Sequence
  ENSG00000100360_50 (sequence is synthesized)
tcttcttcgggatggggggctccaggttccttggtattttgctttggcctttggagcctcagtcaaaactgaggaaaggtgtcattttcacatctcgtcacacgtacagtgactgcaact

SEQ ID NO: 114391 - DNA, 120 bp, Artificial Sequence
  ENSG00000100360_51 (sequence is synthesized)
aaaagcacaggctttgtagaaacagacatgggttcaggccccagctccaccattcacaaggtgtgtggcttcctgcaaggtaccttcatctctgagttacctgactccatctgagtttcc

SEQ ID NO: 114392 - DNA, 120 bp, Artificial Sequence
  ENSG00000100360_52 (sequence is synthesized)
ttcttgtaaaactggcatccatgaaagtggctacctcgaagggcgtgaagatgaaatgaggtggaaagtaggtagcccccgaatgagggaagcattgagtgagagctggccctctgaccc

SEQ ID NO: 114393 - DNA, 120 bp, Artificial Sequence
  ENSG00000100360_53 (sequence is synthesized)
gttacaagaggtgagactccacacagaaagtgctggttggtgcgagaacccgtcgtactgcctctctaagactctggagttcgctcctttccccttcatcttctctcgtgcctgggagaa

SEQ ID NO: 114394 - DNA, 120 bp, Artificial Sequence
  ENSG00000100360_54 (sequence is synthesized)
aagacagagcatgtgtgaagatgtgggtgcctgtatttcacccctaagacaagtccagtgtgagttgagagtgataccagtgactcgtagcttgtggtttttccacgtggagacttttct

SEQ ID NO: 114395 - DNA, 120 bp, Artificial Sequence
  ENSG00000100360_55 (sequence is synthesized)
gaggagagggagataaagccagtaggtgagagatgagcttggaggaggtgactgctattgcagatagaattggtggagaggcccctgggaagaagaatccttgggtcacagacaggtatt

SEQ ID NO: 114396 - DNA, 120 bp, Artificial Sequence
  ENSG00000100360_56 (sequence is synthesized)
ctgcgatggagatggagcatagcatttggaaagagatttcagaatgatgaacacagcctcagacttcttgcttcccacaaatgcagagacccttccaccccccacgccccacacaaaaaa

SEQ ID NO: 114397 - DNA, 120 bp, Artificial Sequence
  ENSG00000100360_57 (sequence is synthesized)
gtattcaggtggaagctgtcaacccaggttgggtcagttggacaggtgactctgcctgtcagtgccagtcacacttctttaccttcaagacttcaaagtaaattccagtttggaagtgac

SEQ ID NO: 114398 - DNA, 120 bp, Artificial Sequence
  ENSG00000100360_58 (sequence is synthesized)
agtgatgcctttacccaggggaactcagggctcccccagctgggcccagggtctctgtggtcacaccatcctccctaggagagatgcagtgcaaggctgtggtctagacttggctgagca

SEQ ID NO: 114399 - DNA, 120 bp, Artificial Sequence
  ENSG00000100360_59 (sequence is synthesized)
tttcggaatagaatcgggaagcattcaagggagggactgaggaggtggaggaggaaggaaggaaggaggactaggagatgggcctggcccttgaggaacttgttctctactatcaaggtt

SEQ ID NO: 114400 - DNA, 120 bp, Artificial Sequence
  ENSG00000100362_0 (sequence is synthesized)
accagcccagcctttcagtgcaggctccagccctccacccccacccgagttgcaggatgtcgatgacagacttgctgaacgctgaggacatcaagaaggcggtgggagcctttagcgcta

SEQ ID NO: 114401 - DNA, 120 bp, Artificial Sequence
  ENSG00000100362_1 (sequence is synthesized)
ccgactccttcgaccacaaaaagttcttccaaatggtcggcctgaagaaaaagagtgcggatgatgtgaagaaggtgtttcacatgctggacaaggacaaaagtggcttcatcgaggagg

SEQ ID NO: 114402 - DNA, 120 bp, Artificial Sequence
  ENSG00000100362_2 (sequence is synthesized)
tgacgaattctccactctggtggctgaaagctaagaagcactgactgcccctggtcttccacctctctgccctgaacacccaatctcggcccctctcgccaccctcctgcatttctgttc

SEQ ID NO: 114403 - DNA, 120 bp, Artificial Sequence
  ENSG00000100362_3 (sequence is synthesized)
agttcgtttatgttattttttactcccccatcccctgtggccctctaatgacaccattcttctggaaaatgctggagaagcaataaaggttgtaccagtcagactctgcttgctcaggaa

SEQ ID NO: 114404 - DNA, 120 bp, Artificial Sequence
  ENSG00000100362_4 (sequence is synthesized)
aggctgaggtaggagtggagagagaaagggagcagggcctaggaggtcctgaggtgcaggctggccgctgaaggttcaggatcttcccccacgcggcaggacatccgccaaggttcccag

SEQ ID NO: 114405 - DNA, 120 bp, Artificial Sequence
  ENSG00000100362_5 (sequence is synthesized)
ggctgctggagacaaagatggggacggcaaaattggggttgacggtgggtagccgtgacctggggtctgggcatattgtggatcttggggtgttggatgcgaaaagtttgaagctatgtc

SEQ ID NO: 114406 - DNA, 120 bp, Artificial Sequence
  ENSG00000100362_6 (sequence is synthesized)
tgtcacaaggaagggatgatatgggggtccctcactcccccagattagaagacaaaaagcagtccattaggtctgagagctctgccacatactccagacaaaggaaaactggtgtatttt

SEQ ID NO: 114407 - DNA, 120 bp, Artificial Sequence
  ENSG00000100364_0 (sequence is synthesized)
ctccccgccgccgccgcccccgagcctgcgggcggcgccgaggccgaggagcgctcgctgcagcacatgctgcgtgccatagcggaggagcgcggccgtcttagcctgcgccgcgaggtc

SEQ ID NO: 114408 - DNA, 120 bp, Artificial Sequence
  ENSG00000100364_1 (sequence is synthesized)
tgcggcctcgggtgcttcaaggatgaccgcatcgtcttctggacttggatgttctccacctacttcatggagaaatgggctccccggcaggacgacatgcttttctatgtgcgccggaag

SEQ ID NO: 114409 - DNA, 120 bp, Artificial Sequence
  ENSG00000100364_2 (sequence is synthesized)
ctggcgtactccggcagcgaaagcggtgcagacgggaggaaggcagctgagcctgaggtggaggtggaggtgtaccggcgggactccaagaagctgccaggcctgggagaccctgacatc

SEQ ID NO: 114410 - DNA, 120 bp, Artificial Sequence
  ENSG00000100364_3 (sequence is synthesized)
gactgggaggagagcgtctgcctgaatctcatcctgcagaagctggactacatggtgacctgtgcggtgtgcacacgtgctgacggcggggacattcacatccataagaagaaatctcag

SEQ ID NO: 114411 - DNA, 120 bp, Artificial Sequence
  ENSG00000100364_4 (sequence is synthesized)
caagtgttcgcgtcccccagtaaacaccccatggacagcaagggggaggagtccaagatcagctaccccaacatcttcttcatgattgacagcttcgaggaggtgttcagcgacatgacc

SEQ ID NO: 114412 - DNA, 120 bp, Artificial Sequence
  ENSG00000100364_5 (sequence is synthesized)
gtaggggaaggagagatggtctgtgtggagctggtggctagtgacaaaaccaacacgttccagggggtcatctttcagggctccatccgctacgaggcgctcaagaaggtgtatgacaac

SEQ ID NO: 114413 - DNA, 120 bp, Artificial Sequence
  ENSG00000100364_6 (sequence is synthesized)
cgggtgagcgtggccgcccgcatggcacagaagatgtcgtttggcttctacaagtacagcaacatggagtttgtgcgcatgaagggcccccagggcaagggccacgccgagatggcggtc

SEQ ID NO: 114414 - DNA, 120 bp, Artificial Sequence
  ENSG00000100364_7 (sequence is synthesized)
agccgagtgtctacaggtgacacatccccctgtgggactgaagaggactccagcccagcttcgcccatgcacgagcgggtgacctccttcagcacaccccccaccccagaacggaacaac

SEQ ID NO: 114415 - DNA, 120 bp, Artificial Sequence
  ENSG00000100364_8 (sequence is synthesized)
cggcctgccttcttctccccatccctcaagaggaaggtgccccggaaccggatcgctgagatgaagaagtcgcactcggccaacgacagcgaggagttcttccgggaggacgacggtgga

SEQ ID NO: 114416 - DNA, 120 bp, Artificial Sequence
  ENSG00000100364_9 (sequence is synthesized)
gccgatctgcacaatgcaaccaacctgcggtctcggtccctgtcgggcacaggacggtccctggtcgggtcctggctgaagctgaacagagcagatggaaacttccttctctatgcacac

SEQ ID NO: 114417 - DNA, 120 bp, Artificial Sequence
  ENSG00000100364_10 (sequence is synthesized)
ttaacctacgtcacgttgccgctgcatcggattttaacagacatcctggaagttcggcagaagcccatcctgatgacctagccgcgtgcggagcctgcgcagagccccggccgggcccag

SEQ ID NO: 114418 - DNA, 120 bp, Artificial Sequence
  ENSG00000100364_11 (sequence is synthesized)
ccctcggagtgctgccaagtgcctacctgtccaccgccaccggggtctgcgatggcacgccagtgctggagccgcagccaggcgaggccactcgactcccggggccggggccgactccac

SEQ ID NO: 114419 - DNA, 120 bp, Artificial Sequence
  ENSG00000100364_12 (sequence is synthesized)
gaacaccagcccaaactgaagtgcctcttccctcccctgctggcgctgctccgccctgtgccccccgcccatcgccccccacccatctctggagagccctctgcacccaaagaggactag

SEQ ID NO: 114420 - DNA, 120 bp, Artificial Sequence
  ENSG00000100364_13 (sequence is synthesized)
agatgccgagcggccatgagagagagcggaaggagcagctgatgcccagagcggggccagagcggcgggtctatgttcacgtccccccagcagcaggcggaaccacccagccagggcact

SEQ ID NO: 114421 - DNA, 120 bp, Artificial Sequence
  ENSG00000100364_14 (sequence is synthesized)
cagtgcattggactgtccacatgttcttgaggaaagccggtggaagattctggaatgccgtgcggatgaacttcagcacccgagtcagtcccagctcatcctccccagtttaccactttg

SEQ ID NO: 114422 - DNA, 120 bp, Artificial Sequence
  ENSG00000100364_15 (sequence is synthesized)
ttctaataggagatgggaacacgagaagtttgatggctttgccctgggctgggaatacctcacccacgcccagttccagaaaggcctccagctgagcagacggccccgatcccgccagaa

SEQ ID NO: 114423 - DNA, 120 bp, Artificial Sequence
  ENSG00000100364_16 (sequence is synthesized)
cggccttttgcttccagccaaagaacaccgccaacacgcacacctccaacctgggacatcccacgctgggcctcgcacggaggaacctgcagaatttggattctgagggtagtcgggagg

SEQ ID NO: 114424 - DNA, 120 bp, Artificial Sequence
  ENSG00000100364_17 (sequence is synthesized)
cctcggtagccaggcagaacaggatatctgccaaagggtgtctgatgtggggtggggctggcatcctcccaggaaggttctaggtgggaccccgtcttctgggggcgggggtgtcttttc

SEQ ID NO: 114425 - DNA, 120 bp, Artificial Sequence
  ENSG00000100364_18 (sequence is synthesized)
atcttccctggtttcctagaactcacttcctttgacggcgtgtgttggtcccatctctcagaccagctcactgaggcagaggagttgctcagaggctcacatgggcacccccattggttc

SEQ ID NO: 114426 - DNA, 120 bp, Artificial Sequence
  ENSG00000100364_19 (sequence is synthesized)
gtgtgagcagctgcccagccccaggcctgccctcggcctggtccagcatgaaggcgtttccatctgcaaggatgcacggtaccctccccgagagcaggcctgtcccctacccaactggga

SEQ ID NO: 114427 - DNA, 120 bp, Artificial Sequence
  ENSG00000100364_20 (sequence is synthesized)
ataaactggaagctgggtctctttgttgctatgtttttttgtttgaagttcccaggaatatttgaggggttccggtgatgtgtttagggatcttctctgtgggggaaaaggaagaggagg

SEQ ID NO: 114428 - DNA, 120 bp, Artificial Sequence
  ENSG00000100364_21 (sequence is synthesized)
gtcttgttctcccatctgtttattctttgggctctgggaacaggggactactttggggctttctccagacttttgtatgttgttattaaaagcgagctattgcatttcattctgcctcag

SEQ ID NO: 114429 - DNA, 120 bp, Artificial Sequence
  ENSG00000100364_22 (sequence is synthesized)
tttgcccacctgtgaaatggggctgataccacctacctcactgaagtcccagggttcaagtgtgtggctgggtcagggcgtggtcacccgtcattctgcataggtcgggttggatgttag

SEQ ID NO: 114430 - DNA, 120 bp, Artificial Sequence
  ENSG00000100364_23 (sequence is synthesized)
actcctgggatgccctcctccccctcgccctttgtaataacctaatctgagaccgtgcttggtggggggatgtgaactttctctctcccccagcagtgtctgctcaggcctgacagctca

SEQ ID NO: 114431 - DNA, 120 bp, Artificial Sequence
  ENSG00000100364_24 (sequence is synthesized)
gctctgcacgatttcatgttcctaaacccatgtcttagggcagcacagagccaggtcatgtcatgccccaaagtgtggggacagagcctcagggagccccgagcatggtccagccccatt

SEQ ID NO: 114432 - DNA, 120 bp, Artificial Sequence
  ENSG00000100364_25 (sequence is synthesized)
tgagtgctctccggggatgccaaatgctgcttccaagtttgagtccatgtggctaaaatacacccatttcttcaggaactcttcccctggttgttctggggatcttgggagaaacacagc

SEQ ID NO: 114433 - DNA, 120 bp, Artificial Sequence
  ENSG00000100364_26 (sequence is synthesized)
cctgacagctcgtccgtgggaagatgaggcagtccaggttgtgaggagcacagcggcccgccctctgttctcagaggtgaggggcgggagaaggttgtctcctctggggccagcatttgg

SEQ ID NO: 114434 - DNA, 120 bp, Artificial Sequence
  ENSG00000100364_27 (sequence is synthesized)
ccaagctcggaggcttggccagcactgctggatggctcagagcaagctgggctccccgtctgtaagatggcaaaaatgctgcccccctcacagggtgaccatgaggaccagtcacagtga

SEQ ID NO: 114435 - DNA, 120 bp, Artificial Sequence
  ENSG00000100364_28 (sequence is synthesized)
tgtgtgaaagggctcgctggtcacagaaacgtgtacaaatcatgctattttagagatcagccctcaatttgtaaggcatgtgaacagggcacgcggtgggctggtggtttcatagccgac

SEQ ID NO: 114436 - DNA, 120 bp, Artificial Sequence
  ENSG00000100364_29 (sequence is synthesized)
acacagcgcctaccatgtgcagctgcctgtccgaccccatcttacagacgagaaaaccagcacacaggcaccaaggaactgtccggaactaacagcaggggccggcgatgggagtcaaac

SEQ ID NO: 114437 - DNA, 120 bp, Artificial Sequence
  ENSG00000100364_30 (sequence is synthesized)
ccaggcacgcggcctggcctgcatgctgagccacatggtgctgtccggacagatggacagacactcggtggagtctgcctttctcaggccctaaatccctctccaaagggtacttgcgat

SEQ ID NO: 114438 - DNA, 120 bp, Artificial Sequence
  ENSG00000100364_31 (sequence is synthesized)
gccggatttaaaacttgctcagagccacttagccacttgagaaccagacagtaaggtgttactcccaggtttgtttttccaaagtaacagatgacatgtggaataaagtaatagagtaac

SEQ ID NO: 114439 - DNA, 120 bp, Artificial Sequence
  ENSG00000100364_32 (sequence is synthesized)
aagtggcagggccagaaccagggtccccaaagtcctggtgttggcacatttgtacttcttgtaagaccatctttaatttttctgggaacacacctgccttttgtgtaatgcggggaagac

SEQ ID NO: 114440 - DNA, 79 bp, Artificial Sequence
  ENSG00000100364_33 (sequence is synthesized)
tgatcccaaaacccctttaagaccttaggtttcctcagcggaaaactgtactttaatcccaaaccccctttaagacata

SEQ ID NO: 114441 - DNA, 120 bp, Artificial Sequence
  ENSG00000100364_34 (sequence is synthesized)
aaaaagatacattggtctttaaacccaaaccccctttaaggcatgttggtctcaaggggatttgggattgaagcacagctttctgttgaggaaacctaggtgtcactttttagaacatta

SEQ ID NO: 114442 - DNA, 120 bp, Artificial Sequence
  ENSG00000100364_35 (sequence is synthesized)
aaaagaaagttgtagggtgggcttttccatttaaaggaatgtgatgatcctaggttctgatgagtgataggtggtctccgtttataccctttcttcttttggcacctgtaagttccggta

SEQ ID NO: 114443 - DNA, 120 bp, Artificial Sequence
  ENSG00000100364_36 (sequence is synthesized)
gtggccatcttacattctcatgtcctgctggaagtgcctagttgcctgcaaagccagctaaggcttattatttcaaaagaagattatttaaaacatgagtgacaggtagtcagaagagaa

SEQ ID NO: 114444 - DNA, 120 bp, Artificial Sequence
  ENSG00000100364_37 (sequence is synthesized)
caaaaggacgcaagatactctatagccaagtcagcttggaggcaggatgggttgctgagtgaagtcgccgctcacttttggattcttatggactgtgagttagtcttccctctacacgga

SEQ ID NO: 114445 - DNA, 120 bp, Artificial Sequence
  ENSG00000100364_38 (sequence is synthesized)
gtcacaggaagggtataaatgcatgttcctgaggtgccctcccccaaagaatgtacctgcactcaaaccaggatctgtttttgctgttttaatcataaatagactagttagtagaagact

SEQ ID NO: 114446 - DNA, 120 bp, Artificial Sequence
  ENSG00000100364_39 (sequence is synthesized)
tttgaagaacaaagtaaaacttttttttttcattaaaagatgtcccagaggaaaggccctgtgcagccagtatattctaatgactgcctggaccatgtcctaatatggtggttttaagtt

SEQ ID NO: 114447 - DNA, 120 bp, Artificial Sequence
  ENSG00000100364_40 (sequence is synthesized)
gttggccaaaatcctttaaagacatacgaaacatctgccaactttttagcgaacttaacaggtttcactgacgttttcctcaatttttgaatttaggtgggatttgctttcatgtcctgt

SEQ ID NO: 114448 - DNA, 120 bp, Artificial Sequence
  ENSG00000100364_41 (sequence is synthesized)
ttcaaaaaccaagtgtctcttgacagcccactggttcttcctgtcctcttgctctagtctgtatcagaaagcagaatgactgtacttttgttttacaaacaaccacctgataggacggac

SEQ ID NO: 114449 - DNA, 120 bp, Artificial Sequence
  ENSG00000100364_42 (sequence is synthesized)
actccacgagataaggaaaggcacgtgcccttgagcttgaatggaagcagcctctggagggggcagccactgcccttcgagggagagcagctcttcagcagtggccagagtgccacgtga

SEQ ID NO: 114450 - DNA, 120 bp, Artificial Sequence
  ENSG00000100364_43 (sequence is synthesized)
ctctgcagatgacccctgggagccgggtgatgggcacctgctggggcttttgttttttctttttcactggctggcttgatcctcagtggcaaaaggacccctgagccccttctccgagcc

SEQ ID NO: 114451 - DNA, 120 bp, Artificial Sequence
  ENSG00000100364_44 (sequence is synthesized)
ctggagcactcctcgggacaccgagtggcctcagggctgggttcagagctcctcccgcagggggagcctcagaagtggaggcagctgctgatgggtgagtttacaacttcttatcctgcc

SEQ ID NO: 114452 - DNA, 120 bp, Artificial Sequence
  ENSG00000100364_45 (sequence is synthesized)
taaggcgagtaggcgtttttattccgtttccagtccttgagctcagcagatcaaaataacagtgaccctgcaaccccacagagcccgcgacacgctcgctttcttccccgccctgcccct

SEQ ID NO: 114453 - DNA, 120 bp, Artificial Sequence
  ENSG00000100364_46 (sequence is synthesized)
ttagtccccgctctggaaggccaggcagtttaggtgtaaataggtatcttttatggtttccaaatgaattatttgtgtgagagtaattaaatctgtaagaaaacctgttgagattcttca

SEQ ID NO: 114454 - DNA, 120 bp, Artificial Sequence
  ENSG00000100364_47 (sequence is synthesized)
ctatgaattatgacttctacaacatgtattttagcaaaaacacgatgctggcctccactggatagctcagtatgctgattgccagtgatagttctgtacgcgttaccaacagcgtcttta

SEQ ID NO: 114455 - DNA, 120 bp, Artificial Sequence
  ENSG00000100364_48 (sequence is synthesized)
ttaaccctcttccacatccagtggaaatcattgctaggcggtatttgttggttggctgttagctttgctttatgatttcatgtttcttttaaaggttgttttgcatgttgaatattaaat

SEQ ID NO: 114456 - DNA, 120 bp, Artificial Sequence
  ENSG00000100364_49 (sequence is synthesized)
tttttttttctgtgtcttcctctaatctttttctgtaatgggaatttcagggtaaatacagatattatagcaaagcaataatttaatgattgaaacttaatttgcccccagtgattcctg

SEQ ID NO: 114457 - DNA, 120 bp, Artificial Sequence
  ENSG00000100364_50 (sequence is synthesized)
aaactttttttggagctttcacacaaactacttttttgaactagagtgtgttggaggcagagaaaaatcaccctgtgtgctggctttgcctgccgtgagccagtgaggagtccgagaaga

SEQ ID NO: 114458 - DNA, 120 bp, Artificial Sequence
  ENSG00000100364_51 (sequence is synthesized)
cgagaagaggtgggcaggtcagtgatgggtttggccagagatgccatatttgcagtattaaatcatttcaagatgcatttcaaggcctggcacggctcacgcctgtaatcccagtgcttt

SEQ ID NO: 114459 - DNA, 120 bp, Artificial Sequence
  ENSG00000100364_52 (sequence is synthesized)
aaaaaaaaaaaaaaaaaaaatgcatttcaagttaagcttttagcctccacaaagtagtgcacaccctttcagttgtactataaaatttcccaggctttttcagagaacctcttaaccctc

SEQ ID NO: 114460 - DNA, 120 bp, Artificial Sequence
  ENSG00000100364_53 (sequence is synthesized)
acagaaatggaaaaaatggaatagaggccaggagccccaagttcaggttttgcaggctccaggtaagctggctgatctaacggaagatgaggtgtttgcagcaggcgtctgtcttgcagc

SEQ ID NO: 114461 - DNA, 120 bp, Artificial Sequence
  ENSG00000100364_54 (sequence is synthesized)
tcagcaggtgaggggacctcgagcaggctctcgcattttccggctgatccttccgagtctgctactgcagggccctcgtaggtgggagcagcctcatcgtcgcctttcacactgtgagct

SEQ ID NO: 114462 - DNA, 120 bp, Artificial Sequence
  ENSG00000100364_55 (sequence is synthesized)
tttcctttccacggtcagatggacttagtgagttaccagcgatggatgttaagacctaagacaccgcagaaagttacagagtggaaaatgaggggcagagaaaagagggtctgagaggaa

SEQ ID NO: 114463 - DNA, 120 bp, Artificial Sequence
  ENSG00000100364_56 (sequence is synthesized)
cgcaagcattccggaatacagtaagggacatcccatcaatgacacttcttgggaacagccactgccttagaaacaccagaccaagagaattttctgaccacaaccccaaaggcagcccat

SEQ ID NO: 114464 - DNA, 120 bp, Artificial Sequence
  ENSG00000100364_57 (sequence is synthesized)
gaagatggaggttaggaaggaggcggtctagcaggtgaagacttccttgccatccaggtcaacccccttcttgttgaacagtgggaagtccttttaaagcagtcacctgaaaaatgttta

SEQ ID NO: 114465 - DNA, 120 bp, Artificial Sequence
  ENSG00000100364_58 (sequence is synthesized)
atagaaatttggggagagtctctatcttggaagctgcctgcgggaacctcattcctattcattgcctcctcttggaaggctaatctgctatttcggttcctttagccttagatgagcttt

SEQ ID NO: 114466 - DNA, 120 bp, Artificial Sequence
  ENSG00000100364_59 (sequence is synthesized)
taggaagtactgtcatgccctagcttagaaggaaaaaaggtaactggaaaggaaaacctttgggaatcttacactgggaggagaggggaatgtaactcaatccatataataacacagttc

SEQ ID NO: 114467 - DNA, 120 bp, Artificial Sequence
  ENSG00000100364_60 (sequence is synthesized)
attgtaaatagacatgttgactgtggtaacatgctgtactttgtgcctgattgttaaaatgctaagaacagctggaaaatttacatgaggaagagaaaatacttgtttctggggataaag

SEQ ID NO: 114468 - DNA, 120 bp, Artificial Sequence
  ENSG00000100364_61 (sequence is synthesized)
aaaggatcatgttgtcttttctttccttacagtgtcactgaattgcccctgacttagcctctccatcagccaacaggttagagagttctttcctctgtgtggactggggtctttcctctt

SEQ ID NO: 114469 - DNA, 120 bp, Artificial Sequence
  ENSG00000100364_62 (sequence is synthesized)
ggaatctgattttaatgaaacaattaggttgctcattttgaaataaccatggcttttagccaaattttatgctactctgaataaacaattttgcttaaaagattttagccacttccagaa

SEQ ID NO: 114470 - DNA, 120 bp, Artificial Sequence
  ENSG00000100364_63 (sequence is synthesized)
catggaggcgggaggaggtggaatgatgactgggcagtggctgggtggcctcaagcccaggcagtggaggaaagggcggggaagctggcagtgctggctcttggctgagatggggcacct

SEQ ID NO: 114471 - DNA, 120 bp, Artificial Sequence
  ENSG00000100364_64 (sequence is synthesized)
aggaagatcccagctctgcctttggggggtgcaggcctgtgcacctgcaagagggcccagcagtgcccagcccctcggagcccgagtcagtgagagcacccaggaccgggaccagaggcc

SEQ ID NO: 114472 - DNA, 72 bp, Artificial Sequence
  ENSG00000100364_65 (sequence is synthesized)
cccgagtcagtgagagcacccaggaccgggaccagaggcccccagtcagcacagctgcttcaaaattgaaag

SEQ ID NO: 114473 - DNA, 120 bp, Artificial Sequence
  ENSG00000100364_66 (sequence is synthesized)
tttcgttcccccgggtcctgtgagcctgggaggtcttgccagtcccgtgggctctcctggccctcacccctggaggctgacaaggctcgctgacccagaccctcaccgatgaagcctcct

SEQ ID NO: 114474 - DNA, 120 bp, Artificial Sequence
  ENSG00000100364_67 (sequence is synthesized)
agcccagacaccagccagccagtggcgttcctggctcctcgggattttccttttcctccgaagctgctgattcatccccaggctggagtcaggctcagctgtggggctgggagcatgggc

SEQ ID NO: 114475 - DNA, 120 bp, Artificial Sequence
  ENSG00000100364_68 (sequence is synthesized)
tctcaggctgctgctgagtggaggaactgggcctcctgggaggtgtcctccagcctctctggatgctccatgggtgggggtcgggagtggtgagggaagggtggcgcatctcagagccct

SEQ ID NO: 114476 - DNA, 120 bp, Artificial Sequence
  ENSG00000100364_69 (sequence is synthesized)
acccgttcctgggactggagcagcccaggaggccctctcctgaggctgagactctgtgtccttccggacggaacctgaggacgctggaccctacagtttaaagaggccgaggaccacagc

SEQ ID NO: 114477 - DNA, 120 bp, Artificial Sequence
  ENSG00000100364_70 (sequence is synthesized)
aagcggtgcagacgggaggaagatgaggaaacggagggctcggagatgaagtgattcgcctaacgtatttcatccactaaatcgcagtgtgggaggagctaataaaatacattttgcatg

SEQ ID NO: 114478 - DNA, 120 bp, Artificial Sequence
  ENSG00000100364_71 (sequence is synthesized)
aagccaggctgagtccacagagccagtgggcagaagagactggctggggacccaggcccggccctggcgcctgcctgggtggacctgctgggtgacctccttcagcacaccccccacccc

SEQ ID NO: 114479 - DNA, 120 bp, Artificial Sequence
  ENSG00000100364_72 (sequence is synthesized)
gcgggcggcgccgaggccgaggagcgctcgctgcagcacatgctgcgtgccatagcggaggagcgcggccgtcttagcctgcgccgcgaggtctgcggcctcggacctcatgcagcgcct

SEQ ID NO: 114480 - DNA, 120 bp, Artificial Sequence
  ENSG00000100364_73 (sequence is synthesized)
ggggcagagcaggcccacagaactggatacgaagcccaaccccacgagcttgccaggtgcccggacttgaaggtctcggtttccttaactgtaaaatggctgttaggtggtcacacatgt

SEQ ID NO: 114481 - DNA, 120 bp, Artificial Sequence
  ENSG00000100364_74 (sequence is synthesized)
agagctctttctgcctccctgagatgccacaaagccaggctgagtccacagagccagtgggcagaagagactggctggggacccaggcccggccctggcgcctgcctgggtggacctgct

SEQ ID NO: 114482 - DNA, 120 bp, Artificial Sequence
  ENSG00000100364_75 (sequence is synthesized)
tccagtctctaggccccacctagcacgggccggctgggcctgggtcctcctgggccagcggcctcttccctgggagctgtgtcaggttgtttgagggtgggataggaggggcgttgggac

SEQ ID NO: 114483 - DNA, 120 bp, Artificial Sequence
  ENSG00000100365_0 (sequence is synthesized)
agactggagagaagcaggcctgagcctccccaaaggcagctcctggggactcccaggaccacaggctgagacgagacgcagggtggctggaggaagtgagaggtgaactcagcctgggac

SEQ ID NO: 114484 - DNA, 120 bp, Artificial Sequence
  ENSG00000100365_1 (sequence is synthesized)
tggctgggcgagactctccacctgctccctgggaccatcgcccaccatggctgtggcccagcagctgcgggccgagagtgactttgaacagcttccggatgatgttgccatctcggccaa

SEQ ID NO: 114485 - DNA, 120 bp, Artificial Sequence
  ENSG00000100365_2 (sequence is synthesized)
cattgctgacatcgaggagaagagaggcttcaccagccactttgttttcgtcatcgaggtgaagacaaaaggaggatccaagtacctcatctaccgccgctaccgccagttccatgcttt

SEQ ID NO: 114486 - DNA, 120 bp, Artificial Sequence
  ENSG00000100365_3 (sequence is synthesized)
gcagagcaagctggaggagcgcttcgggccagacagcaagagcagtgccctggcctgtaccctgcccacactcccagccaaagtctacgtgggtgtgaaacaggagatcgccgagatgcg

SEQ ID NO: 114487 - DNA, 120 bp, Artificial Sequence
  ENSG00000100365_4 (sequence is synthesized)
gatacctgccctcaacgcctacatgaagagcctgctcagcctgccggtctgggtgctgatggatgaggacgtccggatcttcttttaccagtcgccctatgactcagagcaggtgcccca

SEQ ID NO: 114488 - DNA, 120 bp, Artificial Sequence
  ENSG00000100365_5 (sequence is synthesized)
aacagcgttgaccgcatggcagctccgagagcagaggctctatttgacttcactggaaacagcaaactggagctgaatttcaaagctggagatgtgatcttcctcctcagtcggatcaac

SEQ ID NO: 114489 - DNA, 120 bp, Artificial Sequence
  ENSG00000100365_6 (sequence is synthesized)
aaagactggctggagggcactgtccggggagccacgggcatcttccctctctccttcgtgaagatcctcaaagacttccctgaggaggacgaccccaccaactggctgcgttgctactac

SEQ ID NO: 114490 - DNA, 120 bp, Artificial Sequence
  ENSG00000100365_7 (sequence is synthesized)
tacgaagacaccatcagcaccatcaaggacatcgcggtggaggaagatctcagcagcactcccctattgaaagacctgctggagctcacaaggcgggagttccagagagaggacatagct

SEQ ID NO: 114491 - DNA, 120 bp, Artificial Sequence
  ENSG00000100365_8 (sequence is synthesized)
ctgaattaccgggacgctgagggggatctggttcggctgctgtcggatgaggacgtagcgctcatggtgcggcaggctcgtggcctcccctcccagaagcgcctcttcccctggaagctg

SEQ ID NO: 114492 - DNA, 120 bp, Artificial Sequence
  ENSG00000100365_9 (sequence is synthesized)
cacatcacgcagaaggacaactacagggtctacaacacgatgccatgagctgacggtgtccctggagcagtgaggggacaccagcaaaaaccttcagctctcagaggagattgggaccag

SEQ ID NO: 114493 - DNA, 120 bp, Artificial Sequence
  ENSG00000100365_10 (sequence is synthesized)
gaaaacctgggaggatgggcagacttcctgtctttgaggctaatggacccgtggggcttgtaatctgtctctttctactatttacatctgatttaaataaaccattccatctgaaagggg

SEQ ID NO: 114494 - DNA, 120 bp, Artificial Sequence
  ENSG00000100365_11 (sequence is synthesized)
ggttggggcaagggcagcagaagcaaatgcctacaggggagtccacgtggccttcctgagcctcagagcggggtgcaggagctggtgactttgaacagcttccggatgatgttgccatct

SEQ ID NO: 114495 - DNA, 120 bp, Artificial Sequence
  ENSG00000100365_12 (sequence is synthesized)
gagtcagggagacctgggttcaattcccagctcctccactaaaaaatggggtggcctcagagaagtcgcttattctccccaagcctcagtttctacatctgtaaaatgggagactaaagc

SEQ ID NO: 114496 - DNA, 120 bp, Artificial Sequence
  ENSG00000100365_13 (sequence is synthesized)
tcccactccaaagcccccagtggctcccagatgagccacaatgctgtaacaagccatcaacgtccagggtggcctggccagcctcattcccctttcccccaccccacaccccacttccag

SEQ ID NO: 114497 - DNA, 120 bp, Artificial Sequence
  ENSG00000100365_14 (sequence is synthesized)
cccacaggcagccaggccattctcatgctgcccatcaaaaaactctataattgcagacgacggtagtggccgtgtattgagcagtactgagcacctactgtatgccgggctctgttctgg

SEQ ID NO: 114498 - DNA, 120 bp, Artificial Sequence
  ENSG00000100365_15 (sequence is synthesized)
ggggatgacacggagagctgaccagcaggactgtgcactccctcccccactccctgtcccctttcagctgccttagccctcagagggggagggactgcttttcatgaggccttgagccag

SEQ ID NO: 114499 - DNA, 120 bp, Artificial Sequence
  ENSG00000100365_16 (sequence is synthesized)
gtactaggggcatgggggctccctgtacctcgaaggtcttatctgaaagcgagcctggattgttctgcttaaggtcaaagcagagagtacaaggagagggcgcaggttcgcgcagcgggg

SEQ ID NO: 114500 - DNA, 120 bp, Artificial Sequence
  ENSG00000100368_0 (sequence is synthesized)
actctgcctagaggctccagaagaagactggtctctcccaccacacagaggcctggaggaggcagaggccaggagggagaggtcccaagagcctgtgaaatgggtctggcctggctccca

SEQ ID NO: 114501 - DNA, 120 bp, Artificial Sequence
  ENSG00000100368_1 (sequence is synthesized)
gctgggcaggaacacaggacttcaggacactaaggaccctgtcatgcccatggccagcacccaccagtgctggtgcctgcctgtccagagctgaccagggagatggtgctggcccagggg

SEQ ID NO: 114502 - DNA, 120 bp, Artificial Sequence
  ENSG00000100368_2 (sequence is synthesized)
ctgctctccatggccctgctggccctgtgctgggagcgcagcctggcaggggcagaagaaaccatcccgctgcagaccctgcgctgctacaacgactacaccagccacatcacctgcagg

SEQ ID NO: 114503 - DNA, 120 bp, Artificial Sequence
  ENSG00000100368_3 (sequence is synthesized)
tgggcagacacccaggatgcccagcggctcgtcaacgtgaccctcattcgccgggtgaatgaggacctcctggagccagtgtcctgtgacctcagtgatgacatgccctggtcagcctgc

SEQ ID NO: 114504 - DNA, 120 bp, Artificial Sequence
  ENSG00000100368_4 (sequence is synthesized)
ccccatccccgctgcgtgcccaggagatgtgtcattccctgccagagttttgtcgtcactgacgttgactacttctcattccaaccagacaggcctctgggcacccggctcaccgtcact

SEQ ID NO: 114505 - DNA, 120 bp, Artificial Sequence
  ENSG00000100368_5 (sequence is synthesized)
ctgacccagcatgtccagcctcctgagcccagggacctgcagatcagcaccgaccaggaccacttcctgctgacctggagtgtggcccttgggagtccccagagccactggttgtcccca

SEQ ID NO: 114506 - DNA, 120 bp, Artificial Sequence
  ENSG00000100368_6 (sequence is synthesized)
ggggatctggagtttgaggtggtctacaagcggcttcaggactcttgggaggacgcagccatcctcctctccaacacctcccaggccaccctggggccagagcacctcatgcccagcagc

SEQ ID NO: 114507 - DNA, 120 bp, Artificial Sequence
  ENSG00000100368_7 (sequence is synthesized)
acctacgtggcccgagtacggacccgcctggccccaggttctcggctctcaggacgtcccagcaagtggagcccagaggtttgctgggactcccagccaggggatgaggcccagccccag

SEQ ID NO: 114508 - DNA, 120 bp, Artificial Sequence
  ENSG00000100368_8 (sequence is synthesized)
aacctggagtgcttctttgacggggccgccgtgctcagctgctcctgggaggtgaggaaggaggtggccagctcggtctcctttggcctattctacaagcccagcccagatgcaggggag

SEQ ID NO: 114509 - DNA, 120 bp, Artificial Sequence
  ENSG00000100368_9 (sequence is synthesized)
gaagagtgctccccagtgctgagggaggggctcggcagcctccacaccaggcaccactgccagattcccgtgcccgaccccgcgacccacggccaatacatcgtctctgttcagccaagg

SEQ ID NO: 114510 - DNA, 120 bp, Artificial Sequence
  ENSG00000100368_10 (sequence is synthesized)
agggcagagaaacacataaagagctcagtgaacatccagatggcccctccatccctcaacgtgaccaaggatggagacagctacagcctgcgctgggaaacaatgaaaatgcgatacgaa

SEQ ID NO: 114511 - DNA, 120 bp, Artificial Sequence
  ENSG00000100368_11 (sequence is synthesized)
cacatagaccacacatttgagatccagtacaggaaagacacggccacgtggaaggacagcaagaccgagaccctccagaacgcccacagcatggccctgccagccctggagccctccacc

SEQ ID NO: 114512 - DNA, 120 bp, Artificial Sequence
  ENSG00000100368_12 (sequence is synthesized)
aggtactgggccagggtgagggtcaggacctcccgcaccggctacaacgggatctggagcgagtggagtgaggcgcgctcctgggacaccgagtcggtgctgcctatgtgggtgctggcc

SEQ ID NO: 114513 - DNA, 120 bp, Artificial Sequence
  ENSG00000100368_13 (sequence is synthesized)
ctcatcgtgatcttcctcaccatcgctgtgctcctggccctccgcttctgtggcatctacgggtacaggctgcgcagaaagtgggaggagaagatccccaaccccagcaagagccacctg

SEQ ID NO: 114514 - DNA, 120 bp, Artificial Sequence
  ENSG00000100368_14 (sequence is synthesized)
ttccagaacgggagcgcagagctttggcccccaggcagcatgtcggccttcactagcgggagtcccccacaccaggggccgtggggcagccgcttccctgagctggagggggtgttccct

SEQ ID NO: 114515 - DNA, 120 bp, Artificial Sequence
  ENSG00000100368_15 (sequence is synthesized)
gtaggattcggggacagcgaggtgtcacctctcaccatagaggaccccaagcatgtctgtgatccaccatctgggcctgacacgactccagctgcctcagatctacccacagagcagccc

SEQ ID NO: 114516 - DNA, 120 bp, Artificial Sequence
  ENSG00000100368_16 (sequence is synthesized)
cccagcccccagccaggcccgcctgccgcctcccacacacctgagaaacaggcttccagctttgacttcaatgggccctacctggggccgccccacagccgctccctacctgacatcctg

SEQ ID NO: 114517 - DNA, 120 bp, Artificial Sequence
  ENSG00000100368_17 (sequence is synthesized)
ggccagccggagcccccacaggagggtgggagccagaagtccccacctccagggtccctggagtacctgtgtctgcctgctggggggcaggtgcaactggtccctctggcccaggcgatg

SEQ ID NO: 114518 - DNA, 120 bp, Artificial Sequence
  ENSG00000100368_18 (sequence is synthesized)
ggaccaggacaggccgtggaagtggagagaaggccgagccagggggctgcagggagtccctccctggagtccgggggaggccctgcccctcctgctcttgggccaagggtgggaggacag

SEQ ID NO: 114519 - DNA, 120 bp, Artificial Sequence
  ENSG00000100368_19 (sequence is synthesized)
gaccaaaaggacagccctgtggctatacccatgagctctggggacactgaggaccctggagtggcctctggttatgtctcctctgcagacctggtattcaccccaaactcaggggcctcg

SEQ ID NO: 114520 - DNA, 120 bp, Artificial Sequence
  ENSG00000100368_20 (sequence is synthesized)
atgtcctgggctggccagtggaccccctggagccccaggccctgtgaagtcagggtttgagggctatgtggagctccctccaattgagggccggtcccccaggtcaccaaggaacaatcc

SEQ ID NO: 114521 - DNA, 120 bp, Artificial Sequence
  ENSG00000100368_21 (sequence is synthesized)
tgtcccccctgaggccaaaagccctgtcctgaacccaggggaacgcccggcagatgtgtccccaacatccccacagcccgagggcctccttgtcctgcagcaagtgggcgactattgctt

SEQ ID NO: 114522 - DNA, 120 bp, Artificial Sequence
  ENSG00000100368_22 (sequence is synthesized)
cctccccggcctggggcccggccctctctcgctccggagtaaaccttcttccccgggacccggtcctgagatcaagaacctagaccaggcttttcaagtcaagaagcccccaggccaggc

SEQ ID NO: 114523 - DNA, 120 bp, Artificial Sequence
  ENSG00000100368_23 (sequence is synthesized)
tgtgccccaggtgcccgtcattcagctcttcaaagccctgaagcagcaggactacctgtctctgcccccttgggaggtcaacaagcctggggaggtgtgttgagacccccaggcctagac

SEQ ID NO: 114524 - DNA, 120 bp, Artificial Sequence
  ENSG00000100368_24 (sequence is synthesized)
aggcaaggggatggagagggcttgccttccctcccgcctgaccttcctcagtcatttctgcaaagccaaggggcagcctcctgtcaaggtagctagaggcctgggaaaggagatagcctt

SEQ ID NO: 114525 - DNA, 120 bp, Artificial Sequence
  ENSG00000100368_25 (sequence is synthesized)
gctccggcccccttgaccttcagcaaatcacttctctccctgcgctcacacagacacacacacacacacgtacatgcacacatttttcctgtcaggttaacttatttgtaggttctgcat

SEQ ID NO: 114526 - DNA, 120 bp, Artificial Sequence
  ENSG00000100368_26 (sequence is synthesized)
tattagaactttctagatatactcattccatctccccctcatttttttaatcaggtttccttgcttttgccatttttcttccttcttttttcactgatttattatgagagtggggctgag

SEQ ID NO: 114527 - DNA, 120 bp, Artificial Sequence
  ENSG00000100368_27 (sequence is synthesized)
gtctgagctgagccttatcagactgagatgcggctggttgtgttgaggacttgtgtgggctgcctgtccccggcagtcgctgatgcacatgacatgattctcatctgggtgcagaggtgg

SEQ ID NO: 114528 - DNA, 120 bp, Artificial Sequence
  ENSG00000100368_28 (sequence is synthesized)
gaggcaccaggtgggcacccgtgggggttagggcttggaagagtggcacaggactgggcacgctcagtgaggctcagggaattcagactagcctcgattgtcactccgagaaatgggcat

SEQ ID NO: 114529 - DNA, 120 bp, Artificial Sequence
  ENSG00000100368_29 (sequence is synthesized)
ggtattgggggtcgggggggcggtgcaagggacgcacatgagagactgtttgggagcttctggggagccctgctagttgtctcagtgatgtctgtgggacctccagtcccttgagacccc

SEQ ID NO: 114530 - DNA, 120 bp, Artificial Sequence
  ENSG00000100368_30 (sequence is synthesized)
acgtcatgtagagaagttaacggcccaagtggtgggcaggctggcgggacctggggaacatcaggagaggagtccagagcccacgtctactgcggaaaagtcaggggaaactgccaaaca

SEQ ID NO: 114531 - DNA, 120 bp, Artificial Sequence
  ENSG00000100368_31 (sequence is synthesized)
aaggaaaatgccccaaaggcatatatgctttagggcctttggtccaaatggcccgggtggccactcttccagatagaccaggcaactctccctcccaccggccacagatgaggggctgct

SEQ ID NO: 114532 - DNA, 120 bp, Artificial Sequence
  ENSG00000100368_32 (sequence is synthesized)
gatctatgcctgggcctgcaccagggattatggttcttttaaatctttgcctttcagatacaggaaaaataatggcattaaattgctttaatttgcattattttagttatccagtttgca

SEQ ID NO: 114533 - DNA, 120 bp, Artificial Sequence
  ENSG00000100368_33 (sequence is synthesized)
catatttttataggtatcttaggcatcgattggtattttttaactgggccaagcccattaaggtctttcttctgttgggtgctatcattttctgattaagtctttttgactattgacata

SEQ ID NO: 114534 - DNA, 120 bp, Artificial Sequence
  ENSG00000100368_34 (sequence is synthesized)
cagtctttcacagatggtggagtgtttttcccccaaatctgttgtttgtcttataatgttgtatatgaggttttatggtgtatgaatatgaatgcttctgtaatgtcaaacagatcccta

SEQ ID NO: 114535 - DNA, 120 bp, Artificial Sequence
  ENSG00000100368_35 (sequence is synthesized)
gtaaactccttcttcacttttactgtcagatttacaaaggtcctcccattgcaaagcagtgtttgtcctaatttatatattgtttttctagttcattttgtgtttccaacttttcatgta

SEQ ID NO: 114536 - DNA, 120 bp, Artificial Sequence
  ENSG00000100368_36 (sequence is synthesized)
aaattttaattatttttgaatgtgtggatgtgagactgaggtgccttttggtactgaaattctttttccatgtacctgaagtgttacttttgtgatataggaaatccttgtatatatact

SEQ ID NO: 114537 - DNA, 120 bp, Artificial Sequence
  ENSG00000100368_37 (sequence is synthesized)
ttattggtccctaggcttcctattttgttaccttgctttctctatggcatccaccattttgattgttctacttttatgatatgttttcataagtggttaagcaagtattctcgttacttt

SEQ ID NO: 114538 - DNA, 120 bp, Artificial Sequence
  ENSG00000100368_38 (sequence is synthesized)
tgctcttaaatccctattcattacagcaatgttggtggtcaaagaaaatgataaacaacttgaatgttcaatggtcctgaaatacataacaacattttagtacattgtaaagtagaatcc

SEQ ID NO: 114539 - DNA, 120 bp, Artificial Sequence
  ENSG00000100368_39 (sequence is synthesized)
tctgttcataatgaacaagatgaaccaatgtggattagaaagaagtccgagatattaattccaaaatatccagacattgttaaagggaaaaaattgcaataaaatatttgtaacataaaa

SEQ ID NO: 114540 - DNA, 120 bp, Artificial Sequence
  ENSG00000100368_40 (sequence is synthesized)
ggttcccacctccgggactttgctcctgcagggccttggctggggttctctccctgcttcagccgctagcaccctccttgtgcctgaagcccgcactgggatgctcctgggctcttgaga

SEQ ID NO: 114541 - DNA, 120 bp, Artificial Sequence
  ENSG00000100372_0 (sequence is synthesized)
gcgactctcacaccctgagctccggtgctcctttcctaactccactggctgcggcatctgtgggaaaagtgtggctgggtcttcgaggagccgcaccaatggcttccgtgctgtcctacg

SEQ ID NO: 114542 - DNA, 120 bp, Artificial Sequence
  ENSG00000100372_1 (sequence is synthesized)
aaagcctggtccacgccgtggccggagccgtgggaagcgtgacagcaatgacagtgttttttcccctggatacagctagacttcgacttcaggttgatgagaaaagaaaatccaaaacta

SEQ ID NO: 114543 - DNA, 120 bp, Artificial Sequence
  ENSG00000100372_2 (sequence is synthesized)
cacacatggtgctcctggagatcattaaagaagaaggactcctggcaccatatcgagggtggtttccagtgatttccagtctctgctgctccaattttgtctatttctacacttttaata

SEQ ID NO: 114544 - DNA, 120 bp, Artificial Sequence
  ENSG00000100372_3 (sequence is synthesized)
gcctcaaagcactctgggtcaaaggtcaacattctaccactggaaaagatctggtagttgggtttgttgcaggagtggttaatgtgttgctaacaactccactctgggtggtaaacacca

SEQ ID NO: 114545 - DNA, 120 bp, Artificial Sequence
  ENSG00000100372_4 (sequence is synthesized)
gactgaagcttcaaggagcaaaatttaggaatgaagacattgtaccaacaaactacaaaggtatcattgatgcttttcatcagatcattcgcgatgaaggaatctcggctttatggaatg

SEQ ID NO: 114546 - DNA, 120 bp, Artificial Sequence
  ENSG00000100372_5 (sequence is synthesized)
gcacatttccctcattgctgttggtcttcaatcctgccatccagttcatgttttatgaaggtttaaaacggcagcttttaaagaaacggatgaagctttcttccttggatgtgttcatca

SEQ ID NO: 114547 - DNA, 120 bp, Artificial Sequence
  ENSG00000100372_6 (sequence is synthesized)
ttggtgcagtagccaaagcgattgccaccacggtgacctatcccctgcagacggtacagtcaattctgaggtttgggcgtcatagactaaacccagaaaacagaacattgggaagtcttc

SEQ ID NO: 114548 - DNA, 120 bp, Artificial Sequence
  ENSG00000100372_7 (sequence is synthesized)
ggaatattctctatcttcttcaccaacgagtaagacgttttggaataatgggactctacaaaggccttgaagccaaactgctgcagacagtcctcactgctgctctcatgttccttgttt

SEQ ID NO: 114549 - DNA, 120 bp, Artificial Sequence
  ENSG00000100372_8 (sequence is synthesized)
atgagaaactgacagctgccaccttcacagttatggggctgaagcgtgcacaccaacactgagacgccttcccatgaaaaattccgaagatgctcaagagggaggtttcctcctgagtga

SEQ ID NO: 114550 - DNA, 120 bp, Artificial Sequence
  ENSG00000100372_9 (sequence is synthesized)
gcatccaagggtgcacagggagtatggccaactggacctgttgtcaccttaattgtcatgctggctggttggattttggggtggcagttggactaatgtgaaaaaaacattgctgaaaac

SEQ ID NO: 114551 - DNA, 120 bp, Artificial Sequence
  ENSG00000100372_10 (sequence is synthesized)
ctaaaaatgaaagtttgtgagtgtttattggttttcttaagagaaatggactattttgctctcatgtgtaatgttttctatttaaatctttcttaaatataccagctgttctctttccct

SEQ ID NO: 114552 - DNA, 120 bp, Artificial Sequence
  ENSG00000100372_11 (sequence is synthesized)
gaactctcccccaggttctaggacaaatttaataacatgtaattctcctcaaatacttttgtatgtctcagtgttggtgttttcctccctaaaactaacattagggctgtgccacgggca

SEQ ID NO: 114553 - DNA, 120 bp, Artificial Sequence
  ENSG00000100372_12 (sequence is synthesized)
tgactttatttttgttgggcttttttttccctgcttaaggagaggtgtcttttttggatatgagctatttattttgtgaaatgaaaattgttcacccaaatgattctcttataaactatt

SEQ ID NO: 114554 - DNA, 120 bp, Artificial Sequence
  ENSG00000100372_13 (sequence is synthesized)
tgtaaatgtcacttattcattagtgtttgacataatttttagaatatttattttgaatcaatcctttcattacgaaagacttgaagttttgtgtccattcttacaagccctggtcagtca

SEQ ID NO: 114555 - DNA, 120 bp, Artificial Sequence
  ENSG00000100372_14 (sequence is synthesized)
agtcccaataaatggtcagcacaaaaaagatattcttgaaaattgctctttattaaggtattacgttgagtttgcaaccagatgggaaaaatcacaaaaatgagaaggggagcagatatc

SEQ ID NO: 114556 - DNA, 120 bp, Artificial Sequence
  ENSG00000100372_15 (sequence is synthesized)
ttgttgaggtctggatattatctccctttataaacttggtgtaggccgtatattttgaaaataaacatctggttgaggttatttcatttggaaaccttccttagagtcctgttgctcagt

SEQ ID NO: 114557 - DNA, 120 bp, Artificial Sequence
  ENSG00000100372_16 (sequence is synthesized)
gtggtccatcagacggtagtactgccacaagctgagagcttgctgggcacgcaacccagagtttctgaatcctgttccgtattttaacattcccaggtgattcacagccacattaaagtt

SEQ ID NO: 114558 - DNA, 120 bp, Artificial Sequence
  ENSG00000100372_17 (sequence is synthesized)
caggagaccataggacccctgacccatgagaagaagtgattggtttcgattatagacatcaagataaagatttttctcaaaggaaagagattaatgtattaaaacaacctctgaaaaatc

SEQ ID NO: 114559 - DNA, 120 bp, Artificial Sequence
  ENSG00000100372_18 (sequence is synthesized)
tttaacaactgtatgcaactaatgaaaaaattgaatttgaatctcttggctgttttgtcaagtttatccttggttagactgtatttcctatatataatattttgagataccttaaatcaa

SEQ ID NO: 114560 - DNA, 120 bp, Artificial Sequence
  ENSG00000100372_19 (sequence is synthesized)
aactttatttcttcaattatctttaaatggattttagtaaaagacttctcttccttaggattttttctcttggttcttcagatcttgactagagccagacagttggatgtgtgctttttt

SEQ ID NO: 114561 - DNA, 120 bp, Artificial Sequence
  ENSG00000100372_20 (sequence is synthesized)
gttacaattctatctggtatttttttttaatcatttcaggactggtgaggaatattttaatatctcaagatggtgttaaattgggatcatatgttttcaaaaaagaagcacctggctcat

SEQ ID NO: 114562 - DNA, 120 bp, Artificial Sequence
  ENSG00000100372_21 (sequence is synthesized)
acacttacctgatgcttgctgcctgcctatcctaatgctctcagcaaggaggaactcttcagcgagcttctagtctctgttaaggcacttttaaatgtcaccacctttccccctcctgtc

SEQ ID NO: 114563 - DNA, 120 bp, Artificial Sequence
  ENSG00000100372_22 (sequence is synthesized)
actcattgtaccatatccatactcacttcaaaccgtgtgagctacttaagtaagagttgtaaattgtgtgttttatctgatattgtcatggacttagcatgttagctgtaagccactctc

SEQ ID NO: 114564 - DNA, 120 bp, Artificial Sequence
  ENSG00000100372_23 (sequence is synthesized)
atctctaaagctgttacgttaaaattatatttaaagctatatcaaaattgctactttgaatggtatataaattgacaaatagattgcctgttgtacaaatgagggaacttattgctcttc

SEQ ID NO: 114565 - DNA, 120 bp, Artificial Sequence
  ENSG00000100372_24 (sequence is synthesized)
atctggagagctgctgccgccagccattttgctatcagcaaagcttccaaatcgcttctaacagtagtggcttgtgttgtaccctggcacaaagagacaccttaccttaggtctcctaag

SEQ ID NO: 114566 - DNA, 120 bp, Artificial Sequence
  ENSG00000100372_25 (sequence is synthesized)
aggtcagtgacagagatataaatggaatattggtatgtagctttaaagcagcaaagcttaaaagctgacattttgccttccctttttctctccatctttcttgttaaaggagtggttaat

SEQ ID NO: 114567 - DNA, 120 bp, Artificial Sequence
  ENSG00000100372_26 (sequence is synthesized)
agttgggtttgttgcagatgggggtctttctgtgttgcccaggctggtttcaaacccctggcctcaagagattcttctgcctcgaccttccaaagtgctaggattacaggagtggttaat

SEQ ID NO: 114568 - DNA, 120 bp, Artificial Sequence
  ENSG00000100372_27 (sequence is synthesized)
gtccacgccgtggccggagccgtggctaaccattaagaggccgagaaaataagattgcaccagcaaaggagacaaacgaaggatggatcagtactgcaggagggaagctaagaactaaga

SEQ ID NO: 114569 - DNA, 120 bp, Artificial Sequence
  ENSG00000100373_0 (sequence is synthesized)
cgcgcctgctcgctggaccgcccgccccgcgctctggcggctcctcccgggcgatgcctccgctctgggccctgctggccctcggctgcctgcggttcggctcggctgtgaacctgcagc

SEQ ID NO: 114570 - DNA, 120 bp, Artificial Sequence
  ENSG00000100373_1 (sequence is synthesized)
tgaacctgcagccccaactggccagtgtgactttcgccaccaacaaccccacacttaccactgtggccttggaaaagcctctctgcatgtttgacagcaaagaggccctcactggcaccc

SEQ ID NO: 114571 - DNA, 120 bp, Artificial Sequence
  ENSG00000100373_2 (sequence is synthesized)
acgaggtctacctgtatgtcctggtcgactcagccatttccaggaatgcctcagtgcaagacagcaccaacaccccactgggctcaacgttcctacaaacagagggtgggaggacaggtc

SEQ ID NO: 114572 - DNA, 120 bp, Artificial Sequence
  ENSG00000100373_3 (sequence is synthesized)
cctacaaagctgtggcctttgacctgatcccctgcagtgacctgcccagcctggatgccattggggatgtgtccaaggcctcacagatcctgaatgcctacctggtcagggtgggtgcca

SEQ ID NO: 114573 - DNA, 120 bp, Artificial Sequence
  ENSG00000100373_4 (sequence is synthesized)
gacctgcctgtgggatcccaacttccagggcctctgtaacgcacccctgtcggcagccacggagtacaggttcaagtatgtcctggtcaatatgtccacgggcttggtagaggaccagac

SEQ ID NO: 114574 - DNA, 120 bp, Artificial Sequence
  ENSG00000100373_5 (sequence is synthesized)
cctgtggtcagaccccatccgcaccaaccagctcaccccatactcgacgatcgacacgtggccaggccggcggagcggaggcatgatcgtcatcacttccatcctgggctccctgccctt

SEQ ID NO: 114575 - DNA, 120 bp, Artificial Sequence
  ENSG00000100373_6 (sequence is synthesized)
ctttctacttgtgggttttgctggcgccattgccctcagcctcgtggacatggggagttctgatggggaaacgactcacgactcccaaatcactcaggaggctgttcccaagtcgctggg

SEQ ID NO: 114576 - DNA, 120 bp, Artificial Sequence
  ENSG00000100373_7 (sequence is synthesized)
ggcctcggagtcttcctacacgtccgtgaaccgggggccgccactggacagggctgaggtgtattccagcaagctccaagactgagcccagcaccacccctgggcagcagcatcctcctc

SEQ ID NO: 114577 - DNA, 120 bp, Artificial Sequence
  ENSG00000100373_8 (sequence is synthesized)
tctggccttgccccaggccctgcagcggtggttgtcacaccctgacttcagggaaggtgaaacagggcttgtccctccaactgcaggaaaacccttaataaaatcttctgatgagttcta

SEQ ID NO: 114578 - DNA, 120 bp, Artificial Sequence
  ENSG00000100376_0 (sequence is synthesized)
aaaagacttcagtggcagacaaaggaggagtaataagatcgctagggggcccgtgcccagcccacccacgcacaatctcagtcctcgcaatacccacaaggtaggtgctaggatcacacc

SEQ ID NO: 114579 - DNA, 120 bp, Artificial Sequence
  ENSG00000100376_1 (sequence is synthesized)
ctttacggacgcggcacctgcgacagggatgcgcgaggagtcagggggcctcgccggatcgaacctaagctggggaagagtatttcttgtatttttaggagaaattctcagcctcgggga

SEQ ID NO: 114580 - DNA, 120 bp, Artificial Sequence
  ENSG00000100376_2 (sequence is synthesized)
agagtatttcttgatgagggaagagcgcggggaagacactcacgcacgcacaaacatgtgggcggccatggtgtgcccagcgccgtgctggcttctgggaacccccagtggacaagacgg

SEQ ID NO: 114581 - DNA, 120 bp, Artificial Sequence
  ENSG00000100376_3 (sequence is synthesized)
acaaggtaccggctctcaggggaagtgggagccagtcacaagcgtacctaatttcggagagtgacaagtactctgaaaaagaaagaaggtagggctggtgactggccaatttaagcgggc

SEQ ID NO: 114582 - DNA, 120 bp, Artificial Sequence
  ENSG00000100376_4 (sequence is synthesized)
aggagtctgctgggggacggagaccagcctcaggtctgggttggggacagaagctgtgcctaagtgtggtgcaggatgcagttgcaaaggagcgcttccgatcgcacttgatgctcgcca

SEQ ID NO: 114583 - DNA, 120 bp, Artificial Sequence
  ENSG00000100376_5 (sequence is synthesized)
cgtccctgcaaagtgctcccgccccctttctgcaaatgaggaaacgggacgcgcggctcgccgggccagcccgcgtgcctgcgcagtcccctccccgagaaccatccccttgccccgccc

SEQ ID NO: 114584 - DNA, 120 bp, Artificial Sequence
  ENSG00000100376_6 (sequence is synthesized)
agcgtcaggggtgcgcggccgccgagagaccccggaggcgtagccggctgcggaggcgaagaggtggcagcgcgagctgggaccagcgtctcggaggcgccgcagaattcacagatggat

SEQ ID NO: 114585 - DNA, 120 bp, Artificial Sequence
  ENSG00000100376_7 (sequence is synthesized)
tcagtggaaaagacaacaaatagaagtgaacaaaaatccagaaagtttttaaaaagcctcatccggaaacagccccaggaactgctcctggttatcgggactggcgtcagcgcagcagtg

SEQ ID NO: 114586 - DNA, 120 bp, Artificial Sequence
  ENSG00000100376_8 (sequence is synthesized)
gcccccggaatccctgccctttgctcgtggagaagctgcatcgaggccgtcatcgaggctgcagagcagctggaggtgctgcaccccggagacgtcgccgagttccggaggaaagtgaca

SEQ ID NO: 114587 - DNA, 120 bp, Artificial Sequence
  ENSG00000100376_9 (sequence is synthesized)
aaggaccgggacctgttggttgtcgcccatgatctgatccggaagatgtcacctcgcacaggcgatgccaagcccagcttcttccaggactgcctgatggaggtgtttgacgacctggag

SEQ ID NO: 114588 - DNA, 120 bp, Artificial Sequence
  ENSG00000100376_10 (sequence is synthesized)
cagcacatccggagtcctgtggtgctgcagtcgatcctcagcctgatggacaggggcgccatggtcctgaccaccaactatgacaacctgctggaggcctttggccggcggcagaacaag

SEQ ID NO: 114589 - DNA, 120 bp, Artificial Sequence
  ENSG00000100376_11 (sequence is synthesized)
cccatggagtccctggacttgaaggacaagaccaaggtccttgaatgggcaagagggcacatgaagtacggcgtcctccacattcacggcctctacacggacccctgcggggtggtgctg

SEQ ID NO: 114590 - DNA, 120 bp, Artificial Sequence
  ENSG00000100376_12 (sequence is synthesized)
gacccatcggggtataaagacgtcactcaagacgcagaagtcatggaagtcctccagaacttataccgcaccaagtcctttctgtttgtgggctgtggggagacccttcgtgatcagata

SEQ ID NO: 114591 - DNA, 120 bp, Artificial Sequence
  ENSG00000100376_13 (sequence is synthesized)
ttccaggccctctttctttactccgtgccgaataaggtggatttggagcactacatgcttgtgctgaaggagaatgaagaccatttctttaagcatcaggcagatatgcttctgcacgga

SEQ ID NO: 114592 - DNA, 120 bp, Artificial Sequence
  ENSG00000100376_14 (sequence is synthesized)
tcgcgtggacagcaccacattattgggtaatgcatgccaggactgtgcaaagaggaagttagaagagaatggaattgaagtttcaaaaaaacgcacacaatcagatactgatgatgctgg

SEQ ID NO: 114593 - DNA, 120 bp, Artificial Sequence
  ENSG00000100376_15 (sequence is synthesized)
agggtcttgaaatctttacagtaaaacctgcaacttgaaaactagccttctgtaaccacagtgcccaaacgaagaggaatgtatggagaactccacgtggatctctgattgcgaaaccgt

SEQ ID NO: 114594 - DNA, 120 bp, Artificial Sequence
  ENSG00000100376_16 (sequence is synthesized)
cacatacaccaagagagccacatgggcatgtggccctcaaggctgggtgagagggctcccctgtgtgttgaactatgcaggagggtgacgcggacacatttcaggtggactttgcaagga

SEQ ID NO: 114595 - DNA, 120 bp, Artificial Sequence
  ENSG00000100376_17 (sequence is synthesized)
ctgatggatagctacctcagggaccagaatccgtgggaagggatggacctggtgttcccgttcccatctgacaggctctcttttgtcaaggtggtatttttcgtaataaaaggggaagag

SEQ ID NO: 114596 - DNA, 120 bp, Artificial Sequence
  ENSG00000100376_18 (sequence is synthesized)
ttttgtcaaggtggtatttttcgtaataaaaggggaagagtaaagactgtccaagcaacagtagctgccaaagagaaaatacgaaatagacactttttttttttgagtcagagtctcact

SEQ ID NO: 114597 - DNA, 120 bp, Artificial Sequence
  ENSG00000100376_19 (sequence is synthesized)
ttataatttgtatgtggaaacatgttactatagaaagcattttaaaggtacgttttaaaggtccactgttaaatagtaaagaatgaatccgctagcgaaaatgtttttagggagaacagc

SEQ ID NO: 114598 - DNA, 120 bp, Artificial Sequence
  ENSG00000100376_20 (sequence is synthesized)
tggatcaaaagggcttctttggaattaggttgttttagtaacttctgttccaaagaaacacaggtctgatattgctaagaactgaaatcggaggagccagaggcccttttcagtccaggc

SEQ ID NO: 114599 - DNA, 120 bp, Artificial Sequence
  ENSG00000100376_21 (sequence is synthesized)
caacattgtgcacggccactgtgggactgacaaccgggatagctcaagttcgagagaccaggtttcaaacattataagttccaggctttgcaagtctttattctctggggtaatatccag

SEQ ID NO: 114600 - DNA, 120 bp, Artificial Sequence
  ENSG00000100376_22 (sequence is synthesized)
tctttctgttattgtctcttaaaattctcttccatggcccacattaagggagtttgcagagagtgagggaggcaaaacttgaaaagggcctgcaacactttaaaccttctcaggttcacc

SEQ ID NO: 114601 - DNA, 120 bp, Artificial Sequence
  ENSG00000100376_23 (sequence is synthesized)
cacatgaaacggctgtgctgagtgtgctgccggtgcccggggagcttctctgactgtgacccggcagaggcttctgtggcggtgcatgagcggccctacagtggagggttctctttggaa

SEQ ID NO: 114602 - DNA, 120 bp, Artificial Sequence
  ENSG00000100376_24 (sequence is synthesized)
acaaacagccctgcttggtttcagtttgaggccacttatcttcaatgtgacatttcttgccaagccctgtgacactccccattgatgactcccataggtacagataaagttaagaacagg

SEQ ID NO: 114603 - DNA, 120 bp, Artificial Sequence
  ENSG00000100376_25 (sequence is synthesized)
aaacagaagggtaggatgcatagggagggagagaagccctgaaaactttttttttctttttgaagcatggaaaacaaatcttttatgccactccagccataaataaaattttaacttcaa

SEQ ID NO: 114604 - DNA, 120 bp, Artificial Sequence
  ENSG00000100376_26 (sequence is synthesized)
gcggcggcgccgctgccggctaacgcggaggggcgcctggaggcggcgtggcgtccgctctggctccgactccggctctcgctctcgcttctagcccgcgtgcctgcgcagtcccctccc

SEQ ID NO: 114605 - DNA, 120 bp, Artificial Sequence
  ENSG00000100376_27 (sequence is synthesized)
agtgtacacgggggcagggccgcctgaggggagcgggcagggccaaggcacccactcctgccggtagtgccatggagtagacatctgctctctgcgtctgagccacatggtccccactgc

SEQ ID NO: 114606 - DNA, 120 bp, Artificial Sequence
  ENSG00000100376_28 (sequence is synthesized)
tggggcttgctgttggaaacagacagccagttgcataaacagaactgccagctggctcaccgcccagtgatggcagcagggctgttggtgtttgtgtccattccacctgctgctgtgcgg

SEQ ID NO: 114607 - DNA, 120 bp, Artificial Sequence
  ENSG00000100376_29 (sequence is synthesized)
ggtcttgtttaggtaaaagacttcagtggcagacaaaggaggagtaataagatcgctagggggcccgtgcccagcccacccacgcacaatctcagtcctcgcaatacccacaaggagaaa

SEQ ID NO: 114608 - DNA, 120 bp, Artificial Sequence
  ENSG00000100376_30 (sequence is synthesized)
gtgtcatgaaggacatttgtactcgaattcatggagtgccactcctgatgggagaggaggcccatgacagtgacagtcatgctagtgatcgcggacaccacaccatgctgcctttgccag

SEQ ID NO: 114609 - DNA, 120 bp, Artificial Sequence
  ENSG00000100376_31 (sequence is synthesized)
gtccagactatatcagttagcatatatttacagttataaataacactacagggtcctcatacttttatgtcctgttttcaagatgaattcctagaagagttttatggtcaaaaggtatga

SEQ ID NO: 114610 - DNA, 120 bp, Artificial Sequence
  ENSG00000100376_32 (sequence is synthesized)
atggtccttgaatgggcaagagggcacatgaagtacggcgtcctccacattcacggcctctacacggacccctgcggggtggtgctggacccatcggggtataaagacgtcactcaagac

SEQ ID NO: 114611 - DNA, 120 bp, Artificial Sequence
  ENSG00000100376_33 (sequence is synthesized)
ctggacttgaaggacaagaccaaggtatgggctgggggtgcgggaggtctttggccggcggcagaacaagcccatggagtccctggacttgaaggacaagaccaaggtatgggctggggg

SEQ ID NO: 114612 - DNA, 120 bp, Artificial Sequence
  ENSG00000100376_34 (sequence is synthesized)
ggggctgcgggcagcctgcaggtgtggggagttctgtgccctgggagctgctctcactttgtagcagtgaattactaataaagtagccaggcatggtggcgcctgcctgcagtccccgct

SEQ ID NO: 114613 - DNA, 120 bp, Artificial Sequence
  ENSG00000100376_35 (sequence is synthesized)
aatgagctatgatcatgccacttattccagcctgggtgacagagtaagaccctttctcttaaaaaaaaaaaagtaataatggaaagtggcacactggcaacttgggaggctgaggcagga

SEQ ID NO: 114614 - DNA, 78 bp, Artificial Sequence
  ENSG00000100376_36 (sequence is synthesized)
ggaggctgaggcaggagaatagctggaactgggagggagatggttgcagtgagctgagatcactgcaaaagaaaaaaa

SEQ ID NO: 114615 - DNA, 120 bp, Artificial Sequence
  ENSG00000100376_37 (sequence is synthesized)
actgggtaatatataaagaaaagagctgtaattggctcacggttccacagctgtctaggaagcatagcagcatctgcttccggggaggcctcaggaagtttccaatagtggcagaaggca

SEQ ID NO: 114616 - DNA, 120 bp, Artificial Sequence
  ENSG00000100376_38 (sequence is synthesized)
gagtgggagcaggcatgccacatggcaacagagagagtggcaggggggtggtgccacatgcttttaaatgaccagatttctcaagaagtcactgtcacgaagatggcacgaagccatgag

SEQ ID NO: 114617 - DNA, 120 bp, Artificial Sequence
  ENSG00000100376_39 (sequence is synthesized)
ttaccaaattgttttccagaaggagcaccagttacactcccggtagtggctgagtgtgggagtatccatttcctgtatcttgccaacacatggtgttattaagaaacaaaatgaaataca

SEQ ID NO: 114618 - DNA, 120 bp, Artificial Sequence
  ENSG00000100376_40 (sequence is synthesized)
cgcagcccgcgcgggctgacctgcccagaagcctgttcccagtccctgccgttcccagtcactgcctcagggtggccgaggaggacgagctcttggtgtctcggctccactgactgcttt

SEQ ID NO: 114619 - DNA, 120 bp, Artificial Sequence
  ENSG00000100376_41 (sequence is synthesized)
agcttgctgtcctgctgaaacttctaggacctggtgccgagtgcttttgagatcaccttacttggattttggtttaaaaacaagggggagatttagggtaatttctagattattgtgaga

SEQ ID NO: 114620 - DNA, 120 bp, Artificial Sequence
  ENSG00000100376_42 (sequence is synthesized)
tttgactctgatgtttaggctgctgtaaaacaggaaatgagagacaggatcttgctgtattgcccaggccggtcttgaactcctgagttcaagcagtccaccttggcctcccaaaatgct

SEQ ID NO: 114621 - DNA, 120 bp, Artificial Sequence
  ENSG00000100376_43 (sequence is synthesized)
tttatataagagcagtgtcccaagagacagcgaaaaccccagctcggagcccacagagcccatccttcatctgctcctgtgtgtgcgttttccttctgtgctgtcccgtgtagaacagcg

SEQ ID NO: 114622 - DNA, 120 bp, Artificial Sequence
  ENSG00000100376_44 (sequence is synthesized)
agagtccaaccagcctgatgagtctcatgagatgaggaatggtggcttaggaagcattttggataattcacagatggattcagtggaaaagacaacaaatagaagtgaacaaaaatccag

SEQ ID NO: 114623 - DNA, 120 bp, Artificial Sequence
  ENSG00000100376_45 (sequence is synthesized)
cacacaatcagatactggtgtctgtgccatcctcatgctcgcgggagttttggcatgggattctccgttgtgattcccccggactccactgtctgaagaccaggtttcctatgaagaggg

SEQ ID NO: 114624 - DNA, 120 bp, Artificial Sequence
  ENSG00000100376_46 (sequence is synthesized)
agtattaaagtctagaggcccatctgcctattgaggttggactccgtgtggttgtgtttgaaatactgtctgaggagccagcaccagacctgcagttcaggctgagaaagaggttttgag

SEQ ID NO: 114625 - DNA, 120 bp, Artificial Sequence
  ENSG00000100376_47 (sequence is synthesized)
tgaaggtataagtgtaaagtgaagcatctctcgatgattctttccaagataggtttaaaaactatgaatccattttcagtattttcttctctctgtttgaaacagtttgaggatgtgttt

SEQ ID NO: 114626 - DNA, 80 bp, Artificial Sequence
  ENSG00000100379_0 (sequence is synthesized)
ccggcgggggcgggcggccgcgccgcaggcggctggggcaagtgggtgcggctcaacgtggggggcacggtgttcctgac

SEQ ID NO: 114627 - DNA, 120 bp, Artificial Sequence
  ENSG00000100379_1 (sequence is synthesized)
ggtgttcctgaccacccggcagacgctgtgccgcgagcagaagtccttcctcagccgcctgtgccagggggaagagctgcagtcggaccgggatgagaccggggcctacctcattgaccg

SEQ ID NO: 114628 - DNA, 120 bp, Artificial Sequence
  ENSG00000100379_2 (sequence is synthesized)
tgaccccacctacttcgggcccatcctgaacttcctccggcatggcaagctggtgctggacaaggacatggctgaggagggggtcctggaggaagccgagttctacaacatcggcccgct

SEQ ID NO: 114629 - DNA, 120 bp, Artificial Sequence
  ENSG00000100379_3 (sequence is synthesized)
gatccgcatcatcaaagaccggatggaagagaaggactacacggtcacccaggtcccacccaagcacgtgtaccgcgtgctgcagtgccaggaggaggagctcacgcaaatggtctccac

SEQ ID NO: 114630 - DNA, 120 bp, Artificial Sequence
  ENSG00000100379_4 (sequence is synthesized)
catgtctgatggctggcgcttcgagcagctggtgaacatcggctcctcctacaactacggcagcgaggaccaggcagagttcctgtgtgtggtgtccaaggagctccacagcaccccaaa

SEQ ID NO: 114631 - DNA, 120 bp, Artificial Sequence
  ENSG00000100379_5 (sequence is synthesized)
cgggctgagctcagagtccagccgcaaaaccaagagcacggaggagcagctggaggagcagcagcagcaggaggaggaggtggaggaggtggaggtggaacaggtgcaggtggaggcaga

SEQ ID NO: 114632 - DNA, 120 bp, Artificial Sequence
  ENSG00000100379_6 (sequence is synthesized)
tgcacaggagaaaggttcccgtccgcaccctctcagacctgaggctgagcttgcagtgagggcttctcctcggcccctcgcccgcccccagagctgccatccctgctgttacaagccaga

SEQ ID NO: 114633 - DNA, 120 bp, Artificial Sequence
  ENSG00000100379_7 (sequence is synthesized)
gtgaggccccagatcacctccagggacttggggttcccatctgaaatcctttatttttgtaccatggggtgggccccgggcctgagaaggaagaagcaccctctccccggcctcctctgt

SEQ ID NO: 114634 - DNA, 120 bp, Artificial Sequence
  ENSG00000100379_8 (sequence is synthesized)
ctgcacccgtggggctgtgacttactcctgcctccaggggcggggcggggcccccctgggacctcttaaggcccaaggtgggccccaggacctctgggcagagtggactgctcatggcag

SEQ ID NO: 114635 - DNA, 120 bp, Artificial Sequence
  ENSG00000100379_9 (sequence is synthesized)
atgtgtggcaatgtctggctgtgtctctccggcacctgcgtcccctctcccgggctcccctgctgcatggtggatgtgctccttcctggcccggtcacattgcctccttgagccttagtc

SEQ ID NO: 114636 - DNA, 120 bp, Artificial Sequence
  ENSG00000100379_10 (sequence is synthesized)
cagggggtcactcctcccaccccacctacctcacagggttgttgtgagggtgcacagaggagcaaagtccctgaaggccctcaggcagtatataggggccgcccaccttcagctgccctg

SEQ ID NO: 114637 - DNA, 120 bp, Artificial Sequence
  ENSG00000100379_11 (sequence is synthesized)
ggatgggaaggacccagcccgacccctgggcataacactgtgtttgcaaatggagattcaggtattggggatgcaggttgtggggagctggcctggcagagtaggggtagttggcttggc

SEQ ID NO: 114638 - DNA, 120 bp, Artificial Sequence
  ENSG00000100379_12 (sequence is synthesized)
cttctctttggtgatcccacccccagccatttgcattgctggcccagcgcctggcctggggggcggggagaggcagcagaaggggctgggcaggggcggtggaggactcaggaactgccc

SEQ ID NO: 114639 - DNA, 120 bp, Artificial Sequence
  ENSG00000100379_13 (sequence is synthesized)
ggggagagtgggtatggcggctgagccaggggccctcctgtgtttgacttcccgggatgggtccttgcttctcagctgtgtccgaccccaccatgtaataaaacccaaaggaacagccca

SEQ ID NO: 114640 - DNA, 120 bp, Artificial Sequence
  ENSG00000100379_14 (sequence is synthesized)
attagaagctctccagccgccccggatcggggcctctccttctcctttggggctgtggacagggagagacctgggacctttcctccctcccaaaggggactcctgctctggggaaggagt

SEQ ID NO: 114641 - DNA, 120 bp, Artificial Sequence
  ENSG00000100379_15 (sequence is synthesized)
cgacgaggctacttctcccgctctttgggatgtgggtggcggaggggtgcagggagctagctggatggaggagccctggggcgccttctgagcgggctgaatctagaaggagcgttggcc

SEQ ID NO: 114642 - DNA, 120 bp, Artificial Sequence
  ENSG00000100379_16 (sequence is synthesized)
cactgcgctcagcctccttcctcatctgtaacacgaagggctggtctgaagatgacctctaaggtctcctgtcccccatccgtgaccctccgatgctgtggcctttggcaagtcgcctca

SEQ ID NO: 114643 - DNA, 120 bp, Artificial Sequence
  ENSG00000100379_17 (sequence is synthesized)
cctctcaatgtctccgatctctctgatgagaccggggcctacctcattgaccgtgaccccacctacttcgggcccatcctgaacttcctccggcatggcaagctggtgctggacaaggac

SEQ ID NO: 114644 - DNA, 120 bp, Artificial Sequence
  ENSG00000100379_18 (sequence is synthesized)
acttgcctggcgcctcacccgcataaccatcccttctctcactttctctttgcagcccagtcatctcaggatcccgctaaccttttctccctcccaccactgcctcctcctccgcttccc

SEQ ID NO: 114645 - DNA, 120 bp, Artificial Sequence
  ENSG00000100379_19 (sequence is synthesized)
gctggaggtcctgcctcatcttcatccacctcttcttcctcctggatctcatctgcaccctgcctcttccctctctgcccctgtccgggttttctctctgcctgctcacgcctccatccc

SEQ ID NO: 114646 - DNA, 120 bp, Artificial Sequence
  ENSG00000100379_20 (sequence is synthesized)
gggtctgccctggtcccagcctcccgtgccctccacccaggccccctggccctgcatcccagagcgtcctgcctgccgcctcctgcgccccttctggtacctcctgcctcccagcctggg

SEQ ID NO: 114647 - DNA, 120 bp, Artificial Sequence
  ENSG00000100380_0 (sequence is synthesized)
cttgcggcagccgcccccttctgcgcggtcacgccgagccagcgcctgggcctggaaccgggccgtagcccccccagtttcgcccaccacctccctaccatggacccccgcaaagtgaac

SEQ ID NO: 114648 - DNA, 120 bp, Artificial Sequence
  ENSG00000100380_1 (sequence is synthesized)
gagcttcgggcctttgtgaaaatgtgtaagcaggatccgagcgttctgcacaccgaggaaatgcgcttcctgagggagtgggtggagagcatgggtggtaaagtaccacctgctactcag

SEQ ID NO: 114649 - DNA, 120 bp, Artificial Sequence
  ENSG00000100380_2 (sequence is synthesized)
aaagctaaatcagaagaaaataccaaggaagaaaaacctgatagtaagaaggtggaggaagacttaaaggcagacgaaccatcaagtgaggaaagtgatctagaaattgataaagaaggt

SEQ ID NO: 114650 - DNA, 120 bp, Artificial Sequence
  ENSG00000100380_3 (sequence is synthesized)
gtgattgaaccagacactgatgctcctcaagaaatgggagatgaaaatgcggagataacggaggagatgatggatcaggcaaatgataaaaaagtggctgctattgaagccctaaatgat

SEQ ID NO: 114651 - DNA, 120 bp, Artificial Sequence
  ENSG00000100380_4 (sequence is synthesized)
ggtgaactccagaaagccattgacttattcacagatgccatcaagctgaatcctcgcttggccattttgtatgccaagagggccagtgtcttcgtcaaattacagaagccaaatgctgcc

SEQ ID NO: 114652 - DNA, 120 bp, Artificial Sequence
  ENSG00000100380_5 (sequence is synthesized)
gaaataaatcctgattcagctcagccttacaagtggcgggggaaagcacacagacttctaggccactgggaagaagcagcccatgatcttgcccttgcctgtaaattggattatgatgaa

SEQ ID NO: 114653 - DNA, 120 bp, Artificial Sequence
  ENSG00000100380_6 (sequence is synthesized)
gcctgtaaattggattatgatgaagatgctagtgcaatgctgaaagaagttcaacctagggcacagaaaattgcagaacatcggagaaagtatgagcgaaaacgtgaagagcgagagatc

SEQ ID NO: 114654 - DNA, 120 bp, Artificial Sequence
  ENSG00000100380_7 (sequence is synthesized)
aaagaaagaatagaacgagttaagaaggctcgagaagagcatgagagagcccagagggaggaagaagccagacgacagtcaggagctcagtatggctcttttccaggtggctttcctggg

SEQ ID NO: 114655 - DNA, 120 bp, Artificial Sequence
  ENSG00000100380_8 (sequence is synthesized)
ggaatgcctggtaattttcccggaggaatgcctggaatgggagggggcatgcctggaatggctggaatgcctggactcaatgaaattcttagtgatccagaggttcttgcagccatgcag

SEQ ID NO: 114656 - DNA, 120 bp, Artificial Sequence
  ENSG00000100380_9 (sequence is synthesized)
gatccagaagttatggtggctttccaggatgtggctcagaacccagcaaatatgtcaaaataccagagcaacccaaaggttatgaatctcatcagtaaattgtcagccaaatttggaggt

SEQ ID NO: 114657 - DNA, 120 bp, Artificial Sequence
  ENSG00000100380_10 (sequence is synthesized)
caagcgtaatgtccttctgataaataaagcccttgctgaaggaaaagcaacctagatcaccttatggatgtcgcaataatacaaaccagtgtacctctgaccttctcatcaagagagctg

SEQ ID NO: 114658 - DNA, 82 bp, Artificial Sequence
  ENSG00000100380_11 (sequence is synthesized)
gctggggtgctttgaagataatccctacccctctcccccaaatgcagctgaagcattttacagtggtttgccattagggtat

SEQ ID NO: 114659 - DNA, 120 bp, Artificial Sequence
  ENSG00000100380_12 (sequence is synthesized)
acactttttaaatcttcaaaatatttaaaacaaatttaaagggcctgttaattcttatatttttctttactaatcattttggatttttttctttgaattattggcagggaatatacttat

SEQ ID NO: 114660 - DNA, 120 bp, Artificial Sequence
  ENSG00000100380_13 (sequence is synthesized)
ttcctgatgcattttgacttgtctttttaaatgctttatctttttctttaaagatttatttcaataaaactaattgggaccacccgtatttcagtaggacctgggtagggattggaagta

SEQ ID NO: 114661 - DNA, 120 bp, Artificial Sequence
  ENSG00000100380_14 (sequence is synthesized)
cttggcagggcagcagcaatcttgctgtgtttgatataacatgcatccttgggcaggttgcccttaaatcttacactgtggtgaagggatgttttttttgtaatgctgcagtagagttgg

SEQ ID NO: 114662 - DNA, 120 bp, Artificial Sequence
  ENSG00000100380_15 (sequence is synthesized)
agtacttagttctcttgttgtccagtatatctaataagtgtttttcatattatttccacgtaagggaaataaggtagtacttttctttttatatttctatgcttaaaattctctttccta

SEQ ID NO: 114663 - DNA, 120 bp, Artificial Sequence
  ENSG00000100380_16 (sequence is synthesized)
gtcaaaaattgcccaaatctgtgtttgctttctgcttgctacatttgtctcccttacttttcttgagctaaagacaggctttttccaccggcatcatcactgctatcatcattaacagcg

SEQ ID NO: 114664 - DNA, 120 bp, Artificial Sequence
  ENSG00000100380_17 (sequence is synthesized)
taattatacaagcatatttaatgctgagtttaatttaatatgtaatacatatggtaattgtagggtaatacccacaacaactgtagtttcttacttggccaagagaatgcttatttaagt

SEQ ID NO: 114665 - DNA, 120 bp, Artificial Sequence
  ENSG00000100380_18 (sequence is synthesized)
gttagacttccattctggcaaaatcttgccttatcagaagacattggaaagagggattccctttggtgtttggtcttctacttagaaaaacctattgcagttagtttatcttgtagtatt

SEQ ID NO: 114666 - DNA, 120 bp, Artificial Sequence
  ENSG00000100380_19 (sequence is synthesized)
catctttgtattctgaagataaggtttgaattaaattgatacacacagaggggaaccgattttttttatccaatgtgaattataaatgagataatccacagttattcattgtggagttgt

SEQ ID NO: 114667 - DNA, 120 bp, Artificial Sequence
  ENSG00000100380_20 (sequence is synthesized)
tgagactatgaaagactcattgtctttgtattcagctcttaaatagtgtaactatatccccacctctgcttgctttctttccctcccctccaatgataaagaaaatgataaattttctgt

SEQ ID NO: 114668 - DNA, 120 bp, Artificial Sequence
  ENSG00000100380_21 (sequence is synthesized)
tgtgcattcaattcttattttaaataagactaagtataggcattgtacctgacattgctacgtttctaccagtgtttcaatttaaagtgctagtgtttaaaaacattttcaagggataag

SEQ ID NO: 114669 - DNA, 120 bp, Artificial Sequence
  ENSG00000100380_22 (sequence is synthesized)
gccttctgtactttgcttatttgaagaatcagtggtaggagcagtgaagtaaattctatggagtacatttctaaaataccacatttctgaaatcataaataagtttattcaggttctaac

SEQ ID NO: 114670 - DNA, 120 bp, Artificial Sequence
  ENSG00000100380_23 (sequence is synthesized)
cctttgctgtacacaagcagacagaaatgcatctgttacataaatgagaaaaagctattatgctgatggagcatgctttttaaatcctttaaaaacactcaccatataaacttgcatttg

SEQ ID NO: 114671 - DNA, 120 bp, Artificial Sequence
  ENSG00000100380_24 (sequence is synthesized)
agcttgtgtgttcttttgttaatgtgtagagttctcctttctcgaaattgccagtgtgtacttggcttaactcaagaacagtttcttctggattccttatttgatttatttaacctaatt

SEQ ID NO: 114672 - DNA, 120 bp, Artificial Sequence
  ENSG00000100380_25 (sequence is synthesized)
atattctaatattgcaaatattaccataagtgggtaaaagtaaaattcctcttctgaaaatgtgtcctgtgcttttagatttttaaattccataatatacattcttaattttcaactcaa

SEQ ID NO: 114673 - DNA, 120 bp, Artificial Sequence
  ENSG00000100380_26 (sequence is synthesized)
tgatgttttaagatgctttgtttaaacaaaaacacaaaagttcctaatgacttaattttcaaattagtgtgtacttagtatcaagaagtgagatagcttgtagacagctgcttaaaaggt

SEQ ID NO: 114674 - DNA, 120 bp, Artificial Sequence
  ENSG00000100380_27 (sequence is synthesized)
ctagtgcaatgctgaaagaagttcaacctagggtgtgtacaaccactttataaagcaagaagaccttgtggaagttaagaagtttcaggctttccggccaggcgcggtggctcatgcctg

SEQ ID NO: 114675 - DNA, 81 bp, Artificial Sequence
  ENSG00000100380_28 (sequence is synthesized)
cacagaaaattgcagaacatcggagaaagtatgagcgaaaacgtgaagagcgagagatcaaagaaagaatagaacgagtta

SEQ ID NO: 114676 - DNA, 120 bp, Artificial Sequence
  ENSG00000100380_29 (sequence is synthesized)
acttttgtttcactttaggtgaactccagaaagccattgacttattcacagatgccatcaagctgaatcctcgcttggccattttgtatgccaagagggccaggtgagaactctaaacag

SEQ ID NO: 114677 - DNA, 120 bp, Artificial Sequence
  ENSG00000100380_30 (sequence is synthesized)
aaaagcatcccctggcaaataatttctgcacatttgtttaaatagagttgcttctgtgttgatcccaaaacttttactgaaatgaatactttttaataacacacttatttttcagtgtct

SEQ ID NO: 114678 - DNA, 120 bp, Artificial Sequence
  ENSG00000100385_0 (sequence is synthesized)
agagctcagcagggccctggagagatggccacggtcccagcaccggggaggactggagagcgcgcgctgccaccgccccatgtctcagccagggcttccttcctcggctccaccctgtgg

SEQ ID NO: 114679 - DNA, 120 bp, Artificial Sequence
  ENSG00000100385_1 (sequence is synthesized)
atgtaatggcggcccctgctctgtcctggcgtctgcccctcctcatcctcctcctgcccctggctacctcttgggcatctgcagcggtgaatggcacttcccagttcacatgcttctaca

SEQ ID NO: 114680 - DNA, 120 bp, Artificial Sequence
  ENSG00000100385_2 (sequence is synthesized)
actcgagagccaacatctcctgtgtctggagccaagatggggctctgcaggacacttcctgccaagtccatgcctggccggacagacggcggtggaaccaaacctgtgagctgctccccg

SEQ ID NO: 114681 - DNA, 120 bp, Artificial Sequence
  ENSG00000100385_3 (sequence is synthesized)
tgagtcaagcatcctgggcctgcaacctgatcctcggagccccagattctcagaaactgaccacagttgacatcgtcaccctgagggtgctgtgccgtgagggggtgcgatggagggtga

SEQ ID NO: 114682 - DNA, 120 bp, Artificial Sequence
  ENSG00000100385_4 (sequence is synthesized)
tggccatccaggacttcaagccctttgagaaccttcgcctgatggcccccatctccctccaagttgtccacgtggagacccacagatgcaacataagctgggaaatctcccaagcctccc

SEQ ID NO: 114683 - DNA, 120 bp, Artificial Sequence
  ENSG00000100385_5 (sequence is synthesized)
actactttgaaagacacctggagttcgaggcccggacgctgtccccaggccacacctgggaggaggcccccctgctgactctcaagcagaagcaggaatggatctgcctggagacgctca

SEQ ID NO: 114684 - DNA, 120 bp, Artificial Sequence
  ENSG00000100385_6 (sequence is synthesized)
ccccagacacccagtatgagtttcaggtgcgggtcaagcctctgcaaggcgagttcacgacctggagcccctggagccagcccctggccttcaggacaaagcctgcagcccttgggaagg

SEQ ID NO: 114685 - DNA, 120 bp, Artificial Sequence
  ENSG00000100385_7 (sequence is synthesized)
acaccattccgtggctcggccacctcctcgtgggcctcagcggggcttttggcttcatcatcttagtgtacttgctgatcaactgcaggaacaccgggccatggctgaagaaggtcctga

SEQ ID NO: 114686 - DNA, 120 bp, Artificial Sequence
  ENSG00000100385_8 (sequence is synthesized)
agtgtaacaccccagacccctcgaagttcttttcccagctgagctcagagcatggaggagacgtccagaagtggctctcttcgcccttcccctcatcgtccttcagccctggcggcctgg

SEQ ID NO: 114687 - DNA, 120 bp, Artificial Sequence
  ENSG00000100385_9 (sequence is synthesized)
cacctgagatctcgccactagaagtgctggagagggacaaggtgacgcagctgctcctgcagcaggacaaggtgcctgagcccgcatccttaagcagcaaccactcgctgaccagctgct

SEQ ID NO: 114688 - DNA, 120 bp, Artificial Sequence
  ENSG00000100385_10 (sequence is synthesized)
tcaccaaccagggttacttcttcttccacctcccggatgccttggagatagaggcctgccaggtgtactttacttacgacccctactcagaggaagaccctgatgagggtgtggccgggg

SEQ ID NO: 114689 - DNA, 120 bp, Artificial Sequence
  ENSG00000100385_11 (sequence is synthesized)
cacccacagggtcttccccccaacccctgcagcctctgtcaggggaggacgacgcctactgcaccttcccctccagggatgacctgctgctcttctcccccagtctcctcggtggcccca

SEQ ID NO: 114690 - DNA, 120 bp, Artificial Sequence
  ENSG00000100385_12 (sequence is synthesized)
gccccccaagcactgcccctgggggcagtggggccggtgaagagaggatgcccccttctttgcaagaaagagtccccagagactgggacccccagcccctggggcctcccaccccaggag

SEQ ID NO: 114691 - DNA, 120 bp, Artificial Sequence
  ENSG00000100385_13 (sequence is synthesized)
tcccagacctggtggattttcagccaccccctgagctggtgctgcgagaggctggggaggaggtccctgacgctggccccagggagggagtcagtttcccctggtccaggcctcctgggc

SEQ ID NO: 114692 - DNA, 120 bp, Artificial Sequence
  ENSG00000100385_14 (sequence is synthesized)
agggggagttcagggcccttaatgctcgcctgcccctgaacactgatgcctacttgtccctccaagaactccagggtcaggacccaactcacttggtgtagacagatggccagggtggga

SEQ ID NO: 114693 - DNA, 120 bp, Artificial Sequence
  ENSG00000100385_15 (sequence is synthesized)
ggcaggcagctgcctgctctgcgccgagcctcagaaggaccctgttgagggtcctcagtccactgctgaggacactcagtgtccagttgcagctggacttctccacccggatggccccca

SEQ ID NO: 114694 - DNA, 120 bp, Artificial Sequence
  ENSG00000100385_16 (sequence is synthesized)
aactgtgtgtgttgcaggggggcagtaactccccaactccctcgttaatcacaggatcccacgaatttaggctcagaagcatcgctcctctccagccctgcagctattcaccaatatcag

SEQ ID NO: 114695 - DNA, 120 bp, Artificial Sequence
  ENSG00000100385_17 (sequence is synthesized)
tcctcgcggctctccagggctccctgccctgacctcttccctgggttttctgccccagcctcctccttccctcccctccccgtccacagggcagcctgagcgtgctttccaaaacccaaa

SEQ ID NO: 114696 - DNA, 120 bp, Artificial Sequence
  ENSG00000100385_18 (sequence is synthesized)
tatggccacgctccccctcggttcaaaaccttgcacaggtcccactgccctcagccccacttctcagcctggtacttgtacctccggtgtcgtgtggggacatccccttctgcaatcctc

SEQ ID NO: 114697 - DNA, 120 bp, Artificial Sequence
  ENSG00000100385_19 (sequence is synthesized)
cctaccgtcctcctgagccactcagagctccctcacaccccctctgttgcacatgctattccctggggctgctgtgcgctccccctcatctaggtgacaaacttccctgactcttcaagt

SEQ ID NO: 114698 - DNA, 120 bp, Artificial Sequence
  ENSG00000100385_20 (sequence is synthesized)
gccggttttgcttctcctggagggaagcactgcctcccttaatctgccagaaacttctagcgtcagtgctggagggagaagctgtcagggacccagggcgcctggagaaagaggccctgt

SEQ ID NO: 114699 - DNA, 120 bp, Artificial Sequence
  ENSG00000100385_21 (sequence is synthesized)
tactattcctttgggatctctgaggcctcagagtgcttggctgctgtatctttaatgctggggcccaagtaagggcacagatccccccacaaagtggatgcctgctgcatcttcccacag

SEQ ID NO: 114700 - DNA, 120 bp, Artificial Sequence
  ENSG00000100385_22 (sequence is synthesized)
tggcttcacagacccacaagagaagctgatggggagtaaaccctggagtccgaggcccaggcagcagccccgcctagtggtgggccctgatgctgccaggcctgggacctcccactgccc

SEQ ID NO: 114701 - DNA, 120 bp, Artificial Sequence
  ENSG00000100385_23 (sequence is synthesized)
cctccactggaggggtctcctctgcagctcagggactggcacactggcctccagaagggcagctccacagggcagggcctcattatttttcactgccccagacacagtgcccaacacccc

SEQ ID NO: 114702 - DNA, 120 bp, Artificial Sequence
  ENSG00000100385_24 (sequence is synthesized)
gtcgtataccctggatgaacgaattaattacctggcaccacctcgtctgggctccctgcgcctgacattcacacagagaggcagagtcccgtgcccattaggtctggcatgccccctcct

SEQ ID NO: 114703 - DNA, 120 bp, Artificial Sequence
  ENSG00000100385_25 (sequence is synthesized)
gcaaggggctcaaccccctaccccgacccctccacgtatctttcctaggcagatcacgttgcaatggctcaaacaacattccaccccagcaggacagtgaccccagtcccagctaactct

SEQ ID NO: 114704 - DNA, 120 bp, Artificial Sequence
  ENSG00000100385_26 (sequence is synthesized)
gacctgggagccctcaggcacctgcacttacaggccttgctcacagctgattgggcacctgaccacacgcccccacaggctctgaccagcagcctatgagggggtttggcaccaagctct

SEQ ID NO: 114705 - DNA, 120 bp, Artificial Sequence
  ENSG00000100385_27 (sequence is synthesized)
gtccaatcaggtaggctgggcctgaactagccaatcagatcaactctgtcttgggcgtttgaactcagggagggaggcccttgggagcaggtgcttgtggacaaggctccacaagcgttg

SEQ ID NO: 114706 - DNA, 120 bp, Artificial Sequence
  ENSG00000100385_28 (sequence is synthesized)
agccttggaaaggtagacaagcgttgagccactaagcagaggaccttgggttcccaatacaaaaatacctactgctgagagggctgctgaccatttggtcaggattcctgttgcctttat

SEQ ID NO: 114707 - DNA, 120 bp, Artificial Sequence
  ENSG00000100385_29 (sequence is synthesized)
atccaaaataaactcccctttcttgaggttgtctgagtcttgggtctatgccttgaaaaaagctgaattattggacagtctcacctcctgccatagggtcctgaatgtttcagaccacaa

SEQ ID NO: 114708 - DNA, 120 bp, Artificial Sequence
  ENSG00000100385_30 (sequence is synthesized)
ggggctccacacctttgctgtgtgttctggggcaacctactaatcctctctgcaagtcggtctccttatccccccaaatggaaattgtatttgccttctccactttgggaggctcccact

SEQ ID NO: 114709 - DNA, 120 bp, Artificial Sequence
  ENSG00000100385_31 (sequence is synthesized)
tcttgggagggttacattttttaagtcttaatcatttgtgacatatgtatctatacatccgtatcttttaatgatccgtgtgtaccatctttgtgattatttccttaatattttttcttt

SEQ ID NO: 114710 - DNA, 120 bp, Artificial Sequence
  ENSG00000100385_32 (sequence is synthesized)
aagtcagttcattttcgttgaaatacatttatttaaagaaaaatctttgttactctgtaaatgaaaaaacccattttcgctataaataaaaggtaactgtacaaaataagtacaatgcaa

SEQ ID NO: 114711 - DNA, 69 bp, Artificial Sequence
  ENSG00000100385_33 (sequence is synthesized)
ccttccgacccgcaaatcaggcttggagaagcttggagaagcttggagaggcttggagaattgctgcat

SEQ ID NO: 114712 - DNA, 120 bp, Artificial Sequence
  ENSG00000100385_34 (sequence is synthesized)
agcttggagaagcttggagaggcttggagaattgctgcatcctggacacgatgttccgacaccaccctcgccagcctccaggtcttggagttgaggcttctgattggggaagcctaatca

SEQ ID NO: 114713 - DNA, 69 bp, Artificial Sequence
  ENSG00000100385_35 (sequence is synthesized)
ccttccggcttccttcctcggctccaccctgtggatgtaatggcggcccctgctctgtcctggcgtctg

SEQ ID NO: 114714 - DNA, 120 bp, Artificial Sequence
  ENSG00000100385_36 (sequence is synthesized)
acatgcttctacaactcgagagccaacatctcctgtgtctggagccaagatggggctctgcaggacacttcctgccaagtccatgcctggccggacagacgatcactccagctgccgtgg

SEQ ID NO: 114715 - DNA, 120 bp, Artificial Sequence
  ENSG00000100385_37 (sequence is synthesized)
gaccaggctgggatgagggagcaggacaaggtgcccatgagggaggaatgccatggagccagtgggggaggcagtgcccctcacagtggttggcacaggggccccagcctggccttgctg

SEQ ID NO: 114716 - DNA, 120 bp, Artificial Sequence
  ENSG00000100387_0 (sequence is synthesized)
gacagaccgtgtgtttccaaaatggcggcagcgatggatgtggataccccgagcggcaccaacagcggcgcgggcaagaagcgctttgaagtgaaaaagtggaatgcagtagccctctgg

SEQ ID NO: 114717 - DNA, 120 bp, Artificial Sequence
  ENSG00000100387_1 (sequence is synthesized)
gcctgggatattgtggttgataactgtgccatctgcaggaaccacattatggatctttgcatagaatgtcaagctaaccaggcgtccgctacttcagaagagtgtactgtcgcatgggga

SEQ ID NO: 114718 - DNA, 120 bp, Artificial Sequence
  ENSG00000100387_2 (sequence is synthesized)
gtctgtaaccatgcttttcacttccactgcatctctcgctggctcaaaacacgacaggtgtgtccattggacaacagagagtgggaattccaaaagtatgggcactaggaaaagacttct

SEQ ID NO: 114719 - DNA, 120 bp, Artificial Sequence
  ENSG00000100387_3 (sequence is synthesized)
tccatcaagcttaattgttttgttattcatttaatgactttccctgctgttacctaattacaaattggatggaactgtgtttttttctgctttgttttttcagtttgctgtttctgtagc

SEQ ID NO: 114720 - DNA, 120 bp, Artificial Sequence
  ENSG00000100387_4 (sequence is synthesized)
gagtctccccttccaaggctgaaaactcagcttttgaaagtgaaatgtttgttcatcggggccagagcagggttgtcctctgagcgcatcacttagtgacgaggaatccaacagctcaag

SEQ ID NO: 114721 - DNA, 120 bp, Artificial Sequence
  ENSG00000100387_5 (sequence is synthesized)
gcagagtgtggatcaccggctcccgaaaacagcagtcagcccttctttctcctgtgtgacagcagtgggcagctgaaagagggaagaatgtgggattcagtcatcaaacccagttctgag

SEQ ID NO: 114722 - DNA, 120 bp, Artificial Sequence
  ENSG00000100387_6 (sequence is synthesized)
tcctggttccacagcttgggtactgatggcaatcttggccaagttgtctctctactctgaactttcctcctctgtactgtgggcttctgaggactaagtggcatcatgtgggcacagaga

SEQ ID NO: 114723 - DNA, 120 bp, Artificial Sequence
  ENSG00000100387_7 (sequence is synthesized)
gaagctttgtaaaatgtaaaaccgctatacaaatgtgacctttggttgtgtatgacagcagtccccaacctttttgccaccagggattggtttcatggaagacgatttttccatggaccg

SEQ ID NO: 114724 - DNA, 120 bp, Artificial Sequence
  ENSG00000100387_8 (sequence is synthesized)
ggggtggggcgggggtgtgcttggggatggttttggaactgttccacctgagatcatgaggcagtagatggaccgcgcaacctagatccctcacatgcacggttcgccaatagggttgaa

SEQ ID NO: 114725 - DNA, 120 bp, Artificial Sequence
  ENSG00000100387_9 (sequence is synthesized)
ctgctttgctagtcttgaaaataactagggaaaaaaatgactagtccacctttctcccaaaaggtatacaaatagtaaaaaagattttaaatcataatactattcacctgttacagggta

SEQ ID NO: 114726 - DNA, 120 bp, Artificial Sequence
  ENSG00000100387_10 (sequence is synthesized)
aaaattacagttactgcaaagaggcacttatttgtcttaattataaagtggacccaattttgttagcagtattttggggcttcatctatgggaattgccttcaaaacctacatgcaccct

SEQ ID NO: 114727 - DNA, 120 bp, Artificial Sequence
  ENSG00000100387_11 (sequence is synthesized)
aaactgtcaagtactataaatttatcttctgtaaattgtactttgaccgctaaatatatccattaatacatcttagtaaatgttcaggggtgctgtcacctccctgacacctcctttaca

SEQ ID NO: 114728 - DNA, 120 bp, Artificial Sequence
  ENSG00000100387_12 (sequence is synthesized)
gcccccttttccccagcgcgtggtatgctctgacttagttgggctctaccaggacaccgtactgctgcaaagtgctcagtgggtgaggtgggagagggagaagctgtcgaatacccttcg

SEQ ID NO: 114729 - DNA, 120 bp, Artificial Sequence
  ENSG00000100387_13 (sequence is synthesized)
gtgagcccgaccccaacacctgatggttaagaaaaatgtctctgctttctgccttttggaaattttgctctttctctttttcacagtgagttatacaagagtcagctgaaaagggatctt

SEQ ID NO: 114730 - DNA, 120 bp, Artificial Sequence
  ENSG00000100387_14 (sequence is synthesized)
ccaaaaggctgtcactctaagagaatatttgtcctcttgggtatccctagtgtactagctgtggattccactcttagttactgaattatatttttgtctttgtcaaaaaacatttcacaa

SEQ ID NO: 114731 - DNA, 120 bp, Artificial Sequence
  ENSG00000100387_15 (sequence is synthesized)
gataataatccatattatataatcccttaagttccatacatactttgggagacgtaccgaccagatttcagttgttattaaatgaagcttgtaaagcttttgttgttttgttagggtgag

SEQ ID NO: 114732 - DNA, 120 bp, Artificial Sequence
  ENSG00000100387_16 (sequence is synthesized)
taatttctgcccgtgccccaccacagtgcaccaatcacagacgaaatgaaggaagcacttgctgcgtctgtcctaatacgcacatgagcagggggagaagtgctcattgcagaagcattg

SEQ ID NO: 114733 - DNA, 120 bp, Artificial Sequence
  ENSG00000100387_17 (sequence is synthesized)
tgattagcatctgcatgtcatgagcccacgccaaaaaactgcatgcagattgtccttttcccaaatctaagcagacttctagctccctgtcagttaccagtgttcttgatactcttgtct

SEQ ID NO: 114734 - DNA, 120 bp, Artificial Sequence
  ENSG00000100387_18 (sequence is synthesized)
tcataagaatacttccttttaccccaattttcttttatctcattccctaagacaaagtccctcacccattaaaggcacgtgaagtactgagctcttgtaatatcaatatgtctgtgaata

SEQ ID NO: 114735 - DNA, 120 bp, Artificial Sequence
  ENSG00000100387_19 (sequence is synthesized)
aatctagaaataaagtttctttgaccagagctgagctgggtgtggggaggttggggaagtgcccgtctcagttctgggtgggcggcagtgaccatgcacttctctaccaagggctgggga

SEQ ID NO: 114736 - DNA, 120 bp, Artificial Sequence
  ENSG00000100387_20 (sequence is synthesized)
gaaggctctgctcctacaggtcgcattctccaggggcaggagggtgggagggaagctagagacccagaatggggatatttgaaatctgcattgatgaggggcctcctttcccaaagaaag

SEQ ID NO: 114737 - DNA, 120 bp, Artificial Sequence
  ENSG00000100387_21 (sequence is synthesized)
tggaagtatccccttacaggctgaatgggaccaaggagccacattccacgttctcttaaatagaagagagctcagtgctggcacatactcctgtgcttcctgaatgatttcctttagtag

SEQ ID NO: 114738 - DNA, 120 bp, Artificial Sequence
  ENSG00000100387_22 (sequence is synthesized)
taatgacatttctaacaaatgctttgttggaaatacccttgcatctaaccaagatataatcagttgttgaacttttgcctctcgttgtcttcttttcttttcttgcccactatatgtcac

SEQ ID NO: 114739 - DNA, 120 bp, Artificial Sequence
  ENSG00000100393_0 (sequence is synthesized)
gagaaggaggaggacagcgccgaggaggaagaggttgatggcggcggcggagctccgagagacctcggctgggcaggggccggccgtggcgggccggggactgcgcctctagagccgcga

SEQ ID NO: 114740 - DNA, 120 bp, Artificial Sequence
  ENSG00000100393_1 (sequence is synthesized)
gttctcgggaattcgccgcagcggacgcgctcggcgaatttgtgctcttgtgccctcctccgggcttgggcccaggcccggcccctcgcacttgcccttaccttttctatcgagtccgca

SEQ ID NO: 114741 - DNA, 120 bp, Artificial Sequence
  ENSG00000100393_2 (sequence is synthesized)
tccctctccagccactgcgacccggcgaagagaaaaaggaacttcccccaccccctcgggtgccgtcggagccccccagcccacccctgggtgcggcgcggggaccccgggccgaagaag

SEQ ID NO: 114742 - DNA, 120 bp, Artificial Sequence
  ENSG00000100393_3 (sequence is synthesized)
agatttcctgaggattctggttttcctcgcttgtatctccgaaagaattaaaaatggccgagaatgtggtggaaccggggccgccttcagccaagcggcctaaactctcatctccggccc

SEQ ID NO: 114743 - DNA, 120 bp, Artificial Sequence
  ENSG00000100393_4 (sequence is synthesized)
tctcggcgtccgccagcgatggcacagattttggctctctatttgacttggagcacgacttaccagatgaattaatcaactctacagaattgggactaaccaatggtggtgatattaatc

SEQ ID NO: 114744 - DNA, 120 bp, Artificial Sequence
  ENSG00000100393_5 (sequence is synthesized)
agcttcagacaagtcttggcatggtacaagatgcagcttctaaacataaacagctgtcagaattgctgcgatctggtagttcccctaacctcaatatgggagttggtggcccaggtcaag

SEQ ID NO: 114745 - DNA, 120 bp, Artificial Sequence
  ENSG00000100393_6 (sequence is synthesized)
tcatggccagccaggcccaacagagcagtcctggattaggtttgataaatagcatggtcaaaagcccaatgacacaggcaggcttgacttctcccaacatggggatgggcactagtggac

SEQ ID NO: 114746 - DNA, 120 bp, Artificial Sequence
  ENSG00000100393_7 (sequence is synthesized)
caaatcagggtcctacgcagtcaacaggtatgatgaacagtccagtaaatcagcctgccatgggaatgaacacagggatgaatgcgggcatgaatcctggaatgttggctgcaggcaatg

SEQ ID NO: 114747 - DNA, 120 bp, Artificial Sequence
  ENSG00000100393_8 (sequence is synthesized)
gacaagggataatgcctaatcaagtcatgaacggttcaattggagcaggccgagggcgacagaatatgcagtacccaaacccaggcatgggaagtgctggcaacttactgactgagcctc

SEQ ID NO: 114748 - DNA, 120 bp, Artificial Sequence
  ENSG00000100393_9 (sequence is synthesized)
ttcagcagggctctccccagatgggaggacaaacaggattgagaggcccccagcctcttaagatgggaatgatgaacaaccccaatccttatggttcaccatatactcagaatcctggac

SEQ ID NO: 114749 - DNA, 120 bp, Artificial Sequence
  ENSG00000100393_10 (sequence is synthesized)
agcagattggagccagtggccttggtctccagattcagacaaaaactgtactatcaaataacttatctccatttgctatggacaaaaaggcagttcctggtggaggaatgcccaacatgg

SEQ ID NO: 114750 - DNA, 120 bp, Artificial Sequence
  ENSG00000100393_11 (sequence is synthesized)
gtcaacagccagccccgcaggtccagcagccaggcctggtgactccagttgcccaagggatgggttctggagcacatacagctgatccagagaagcgcaagctcatccagcagcagcttg

SEQ ID NO: 114751 - DNA, 120 bp, Artificial Sequence
  ENSG00000100393_12 (sequence is synthesized)
ttctccttttgcatgctcacaagtgccagcgccgggaacaggccaatggggaagtgaggcagtgcaaccttccccactgtcgcacaatgaagaatgtcctaaaccacatgacacactgcc

SEQ ID NO: 114752 - DNA, 120 bp, Artificial Sequence
  ENSG00000100393_13 (sequence is synthesized)
agtcaggcaagtcttgccaagtggcacactgtgcatcttctcgacaaatcatttcacactggaagaattgtacaagacatgattgtcctgtgtgtctccccctcaaaaatgctggtgata

SEQ ID NO: 114753 - DNA, 120 bp, Artificial Sequence
  ENSG00000100393_14 (sequence is synthesized)
agagaaatcaacagccaattttgactggagcacccgttggacttggaaatcctagctctctaggggtgggtcaacagtctgcccccaacctaagcactgttagtcagattgatcccagct

SEQ ID NO: 114754 - DNA, 120 bp, Artificial Sequence
  ENSG00000100393_15 (sequence is synthesized)
ccatagaaagagcctatgcagctcttggactaccctatcaagtaaatcagatgccgacacaaccccaggtgcaagcaaagaaccagcagaatcagcagcctgggcagtctccccaaggca

SEQ ID NO: 114755 - DNA, 120 bp, Artificial Sequence
  ENSG00000100393_16 (sequence is synthesized)
tgcggcccatgagcaacatgagtgctagtcctatgggagtaaatggaggtgtaggagttcaaacgccgagtcttctttctgactcaatgttgcattcagccataaattctcaaaacccaa

SEQ ID NO: 114756 - DNA, 120 bp, Artificial Sequence
  ENSG00000100393_17 (sequence is synthesized)
tgatgagtgaaaatgccagtgtgccctccctgggtcctatgccaacagcagctcaaccatccactactggaattcggaaacagtggcacgaagatattactcaggatcttcgaaatcatc

SEQ ID NO: 114757 - DNA, 120 bp, Artificial Sequence
  ENSG00000100393_18 (sequence is synthesized)
ttgttcacaaactcgtccaagccatatttcctacgccggatcctgctgctttaaaagacagacggatggaaaacctagttgcatatgctcggaaagttgaaggggacatgtatgaatctg

SEQ ID NO: 114758 - DNA, 120 bp, Artificial Sequence
  ENSG00000100393_19 (sequence is synthesized)
caaacaatcgagcggaatactaccaccttctagctgagaaaatctataagatccagaaagaactagaagaaaaacgaaggaccagactacagaagcagaacatgctaccaaatgctgcag

SEQ ID NO: 114759 - DNA, 120 bp, Artificial Sequence
  ENSG00000100393_20 (sequence is synthesized)
gcatggttccagtttccatgaatccagggcctaacatgggacagccgcaaccaggaatgacttctaatggccctctacctgacccaagtatgatccgtggcagtgtgccaaaccagatga

SEQ ID NO: 114760 - DNA, 120 bp, Artificial Sequence
  ENSG00000100393_21 (sequence is synthesized)
tgcctcgaataactccacaatctggtttgaatcaatttggccagatgagcatggcccagccccctattgtaccccggcaaacccctcctcttcagcaccatggacagttggctcaacctg

SEQ ID NO: 114761 - DNA, 120 bp, Artificial Sequence
  ENSG00000100393_22 (sequence is synthesized)
gagctctcaacccgcctatgggctatgggcctcgtatgcaacagccttccaaccagggccagttccttcctcagactcagttcccatcacagggaatgaatgtaacaaatatccctttgg

SEQ ID NO: 114762 - DNA, 120 bp, Artificial Sequence
  ENSG00000100393_23 (sequence is synthesized)
ctccgtccagcggtcaagctccagtgtctcaagcacaaatgtctagttcttcctgcccggtgaactctcctataatgcctccagggtctcaggggagccacattcactgtccccagcttc

SEQ ID NO: 114763 - DNA, 120 bp, Artificial Sequence
  ENSG00000100393_24 (sequence is synthesized)
ctcaaccagctcttcatcagaattcaccctcgcctgtacctagtcgtacccccacccctcaccatactcccccaagcataggggctcagcagccaccagcaacaacaattccagcccctg

SEQ ID NO: 114764 - DNA, 120 bp, Artificial Sequence
  ENSG00000100393_25 (sequence is synthesized)
ttcctacacctcctgccatgccacctgggccacagtcccaggctctacatccccctccaaggcagacacctacaccaccaacaacacaacttccccaacaagtgcagccttcacttcctg

SEQ ID NO: 114765 - DNA, 120 bp, Artificial Sequence
  ENSG00000100393_26 (sequence is synthesized)
ctgcaccttctgctgaccagccccagcagcagcctcgctcacagcagagcacagcagcgtctgttcctaccccaacagcaccgctgcttcctccgcagcctgcaactccactttcccagc

SEQ ID NO: 114766 - DNA, 120 bp, Artificial Sequence
  ENSG00000100393_27 (sequence is synthesized)
cagctgtaagcattgaaggacaggtatcaaatcctccatctactagtagcacagaagtgaattctcaggccattgctgagaagcagccttcccaggaagtgaagatggaggccaaaatgg

SEQ ID NO: 114767 - DNA, 120 bp, Artificial Sequence
  ENSG00000100393_28 (sequence is synthesized)
aagtggatcaaccagaaccagcagatactcagccggaggatatttcagagtctaaagtggaagactgtaaaatggaatctaccgaaacagaagagagaagcactgagttaaaaactgaaa

SEQ ID NO: 114768 - DNA, 120 bp, Artificial Sequence
  ENSG00000100393_29 (sequence is synthesized)
taaaagaggaggaagaccagccaagtacttcagctacccagtcatctccggctccaggacagtcaaagaaaaagattttcaaaccagaagaactacgacaggcactgatgccaactttgg

SEQ ID NO: 114769 - DNA, 120 bp, Artificial Sequence
  ENSG00000100393_30 (sequence is synthesized)
aggcactttaccgtcaggatccagaatcccttccctttcgtcaacctgtggaccctcagcttttaggaatccctgattactttgatattgtgaagagccccatggatctttctaccatta

SEQ ID NO: 114770 - DNA, 120 bp, Artificial Sequence
  ENSG00000100393_31 (sequence is synthesized)
agaggaagttagacactggacagtatcaggagccctggcagtatgtcgatgatatttggcttatgttcaataatgcctggttatataaccggaaaacatcacgggtatacaaatactgct

SEQ ID NO: 114771 - DNA, 120 bp, Artificial Sequence
  ENSG00000100393_32 (sequence is synthesized)
ccaagctctctgaggtctttgaacaagaaattgacccagtgatgcaaagccttggatactgttgtggcagaaagttggagttctctccacagacactgtgttgctacggcaaacagttgt

SEQ ID NO: 114772 - DNA, 120 bp, Artificial Sequence
  ENSG00000100393_33 (sequence is synthesized)
gcacaatacctcgtgatgccacttattacagttaccagaacaggtatcatttctgtgagaagtgtttcaatgagatccaaggggagagcgtttctttgggggatgacccttcccagcctc

SEQ ID NO: 114773 - DNA, 120 bp, Artificial Sequence
  ENSG00000100393_34 (sequence is synthesized)
aaactacaataaataaagaacaattttccaagagaaaaaatgacacactggatcctgaactgtttgttgaatgtacagagtgcggaagaaagatgcatcagatctgtgtccttcaccatg

SEQ ID NO: 114774 - DNA, 120 bp, Artificial Sequence
  ENSG00000100393_35 (sequence is synthesized)
agatcatctggcctgctggattcgtctgtgatggctgtttaaagaaaagtgcacgaactaggaaagaaaataagttttctgctaaaaggttgccatctaccagacttggcacctttctag

SEQ ID NO: 114775 - DNA, 120 bp, Artificial Sequence
  ENSG00000100393_36 (sequence is synthesized)
tctgaggcgacagaatcaccctgagtcaggagaggtcactgttagagtagttcatgcttctgacaaaaccgtggaagtaaaaccaggcatgaaagcaaggtttgtggacagtggagagat

SEQ ID NO: 114776 - DNA, 120 bp, Artificial Sequence
  ENSG00000100393_37 (sequence is synthesized)
ggcagaatcctttccataccgaaccaaagccctctttgcctttgaagaaattgatggtgttgacctgtgcttctttggcatgcatgttcaagagtatggctctgactgccctccacccaa

SEQ ID NO: 114777 - DNA, 120 bp, Artificial Sequence
  ENSG00000100393_38 (sequence is synthesized)
ccagaggagagtatacatatcttacctcgatagtgttcatttcttccgtcctaaatgcttgaggactgcagtctatcatgaaatcctaattggatatttagaatatgtcaagaaattagg

SEQ ID NO: 114778 - DNA, 120 bp, Artificial Sequence
  ENSG00000100393_39 (sequence is synthesized)
ttacacaacagggcatatttgggcatgtccaccaagtgagggagatgattatatcttccattgccatcctcctgaccagaagatacccaagcccaagcgactgcaggaatggtacaaaaa

SEQ ID NO: 114779 - DNA, 120 bp, Artificial Sequence
  ENSG00000100393_40 (sequence is synthesized)
aatgcttgacaaggctgtatcagagcgtattgtccatgactacaaggatatttttaaacaagctactgaagatagattaacaagtgcaaaggaattgccttatttcgagggtgatttctg

SEQ ID NO: 114780 - DNA, 120 bp, Artificial Sequence
  ENSG00000100393_41 (sequence is synthesized)
gcccaatgttctggaagaaagcattaaggaactggaacaggaggaagaagagagaaaacgagaggaaaacaccagcaatgaaagcacagatgtgaccaagggagacagcaaaaatgctaa

SEQ ID NO: 114781 - DNA, 120 bp, Artificial Sequence
  ENSG00000100393_42 (sequence is synthesized)
aaagaagaataataagaaaaccagcaaaaataagagcagcctgagtaggggcaacaagaagaaacccgggatgcccaatgtatctaacgacctctcacagaaactatatgccaccatgga

SEQ ID NO: 114782 - DNA, 120 bp, Artificial Sequence
  ENSG00000100393_43 (sequence is synthesized)
gaagcataaagaggtcttctttgtgatccgcctcattgctggccctgctgccaactccctgcctcccattgttgatcctgatcctctcatcccctgcgatctgatggatggtcgggatgc

SEQ ID NO: 114783 - DNA, 120 bp, Artificial Sequence
  ENSG00000100393_44 (sequence is synthesized)
gtttctcacgctggcaagggacaagcacctggagttctcttcactccgaagagcccagtggtccaccatgtgcatgctggtggagctgcacacgcagagccaggaccgctttgtctacac

SEQ ID NO: 114784 - DNA, 120 bp, Artificial Sequence
  ENSG00000100393_45 (sequence is synthesized)
ctgcaatgaatgcaagcaccatgtggagacacgctggcactgtactgtctgtgaggattatgacttgtgtatcacctgctataacactaaaaaccatgaccacaaaatggagaaactagg

SEQ ID NO: 114785 - DNA, 120 bp, Artificial Sequence
  ENSG00000100393_46 (sequence is synthesized)
ccttggcttagatgatgagagcaacaaccagcaggctgcagccacccagagcccaggcgattctcgccgcctgagtatccagcgctgcatccagtctctggtccatgcttgccagtgtcg

SEQ ID NO: 114786 - DNA, 120 bp, Artificial Sequence
  ENSG00000100393_47 (sequence is synthesized)
gaatgccaattgctcactgccatcctgccagaagatgaagcgggttgtgcagcataccaagggttgcaaacggaaaaccaatggcgggtgccccatctgcaagcagctcattgccctctg

SEQ ID NO: 114787 - DNA, 120 bp, Artificial Sequence
  ENSG00000100393_48 (sequence is synthesized)
ctgctaccatgccaagcactgccaggagaacaaatgcccggtgccgttctgcctaaacatcaagcagaagctccggcagcaacagctgcagcaccgactacagcaggcccaaatgcttcg

SEQ ID NO: 114788 - DNA, 120 bp, Artificial Sequence
  ENSG00000100393_49 (sequence is synthesized)
caggaggatggccagcatgcagcggactggtgtggttgggcagcaacagggcctcccttcccccactcctgccactccaacgacaccaactggccaacagccaaccaccccgcagacgcc

SEQ ID NO: 114789 - DNA, 120 bp, Artificial Sequence
  ENSG00000100393_50 (sequence is synthesized)
ccagcccacttctcagcctcagcctacccctcccaatagcatgccaccctacttgcccaggactcaagctgctggccctgtgtcccagggtaaggcagcaggccaggtgacccctccaac

SEQ ID NO: 114790 - DNA, 120 bp, Artificial Sequence
  ENSG00000100393_51 (sequence is synthesized)
ccctcctcagactgctcagccaccccttccagggcccccacctgcagcagtggaaatggcaatgcagattcagagagcagcggagacgcagcgccagatggcccacgtgcaaatttttca

SEQ ID NO: 114791 - DNA, 120 bp, Artificial Sequence
  ENSG00000100393_52 (sequence is synthesized)
aaggccaatccaacaccagatgcccccgatgactcccatggcccccatgggtatgaacccacctcccatgaccagaggtcccagtgggcatttggagccagggatgggaccgacagggat

SEQ ID NO: 114792 - DNA, 120 bp, Artificial Sequence
  ENSG00000100393_53 (sequence is synthesized)
gcagcaacagccaccctggagccaaggaggattgcctcagccccagcaactacagtctgggatgccaaggccagccatgatgtcagtggcccagcatggtcaacctttgaacatggctcc

SEQ ID NO: 114793 - DNA, 120 bp, Artificial Sequence
  ENSG00000100393_54 (sequence is synthesized)
acaaccaggattgggccaggtaggtatcagcccactcaaaccaggcactgtgtctcaacaagccttacaaaaccttttgcggactctcaggtctcccagctctcccctgcagcagcaaca

SEQ ID NO: 114794 - DNA, 120 bp, Artificial Sequence
  ENSG00000100393_55 (sequence is synthesized)
ggtgcttagtatccttcacgccaacccccagctgttggctgcattcatcaagcagcgggctgccaagtatgccaactctaatccacaacccatccctgggcagcctggcatgccccaggg

SEQ ID NO: 114795 - DNA, 120 bp, Artificial Sequence
  ENSG00000100393_56 (sequence is synthesized)
gcagccagggctacagccacctaccatgccaggtcagcagggggtccactccaatccagccatgcagaacatgaatccaatgcaggcgggcgttcagagggctggcctgccccagcagca

SEQ ID NO: 114796 - DNA, 120 bp, Artificial Sequence
  ENSG00000100393_57 (sequence is synthesized)
accacagcagcaactccagccacccatgggagggatgagcccccaggctcagcagatgaacatgaaccacaacaccatgccttcacaattccgagacatcttgagacgacagcaaatgat

SEQ ID NO: 114797 - DNA, 120 bp, Artificial Sequence
  ENSG00000100393_58 (sequence is synthesized)
gcaacagcagcagcaacagggagcagggccaggaataggccctggaatggccaaccataaccagttccagcaaccccaaggagttggctacccaccacagcagcagcagcggatgcagca

SEQ ID NO: 114798 - DNA, 120 bp, Artificial Sequence
  ENSG00000100393_59 (sequence is synthesized)
tcacatgcaacagatgcaacaaggaaatatgggacagataggccagcttccccaggccttgggagcagaggcaggtgccagtctacaggcctatcagcagcgactccttcagcaacagat

SEQ ID NO: 114799 - DNA, 120 bp, Artificial Sequence
  ENSG00000100393_60 (sequence is synthesized)
ggggtcccctgttcagcccaaccccatgagcccccagcagcatatgctcccaaatcaggcccagtccccacacctacaaggccagcagatccctaattctctctccaatcaagtgcgctc

SEQ ID NO: 114800 - DNA, 120 bp, Artificial Sequence
  ENSG00000100393_61 (sequence is synthesized)
tccccagcctgtcccttctccacggccacagtcccagcccccccactccagtccttccccaaggatgcagcctcagccttctccacaccacgtttccccacagacaagttccccacatcc

SEQ ID NO: 114801 - DNA, 120 bp, Artificial Sequence
  ENSG00000100393_62 (sequence is synthesized)
tggactggtagctgcccaggccaaccccatggaacaagggcattttgccagcccggaccagaattcaatgctttctcagcttgctagcaatccaggcatggcaaacctccatggtgcaag

SEQ ID NO: 114802 - DNA, 120 bp, Artificial Sequence
  ENSG00000100393_63 (sequence is synthesized)
cgccacggacctgggactcagcaccgataactcagacttgaattcaaacctctcacagagtacactagacatacactagagacaccttgtagtattttgggagcaaaaaaattattttct

SEQ ID NO: 114803 - DNA, 120 bp, Artificial Sequence
  ENSG00000100393_64 (sequence is synthesized)
cttaacaagactttttgtactgaaaacaatttttttgaatctttcgtagcctaaaagacaattttccttggaacacataagaactgtgcagtagccgtttgtggtttaaagcaaacatgc

SEQ ID NO: 114804 - DNA, 120 bp, Artificial Sequence
  ENSG00000100393_65 (sequence is synthesized)
aagatgaacctgagggatgatagaatacaaagaatatatttttgttatggctggttaccaccagcctttcttcccctttgtgtgtgtggttcaagtgtgcactgggaggaggctgaggcc

SEQ ID NO: 114805 - DNA, 120 bp, Artificial Sequence
  ENSG00000100393_66 (sequence is synthesized)
tgtgaagccaaacaatatgctcctgccttgcacctccaataggttttattattttttttaaattaatgaacatatgtaatattaatagttattatttactggtgcagatggttgacattt

SEQ ID NO: 114806 - DNA, 120 bp, Artificial Sequence
  ENSG00000100393_67 (sequence is synthesized)
tgacatttttccctattttcctcactttatggaagagttaaaacatttctaaaccagaggacaaaaggggttaatgttactttaaaattacattctatatatatataaatatatataaat

SEQ ID NO: 114807 - DNA, 120 bp, Artificial Sequence
  ENSG00000100393_68 (sequence is synthesized)
aaataccagttttttttctctgggtgcaaagatgttcattcttttaaaaaatgtttaaaaaaaaaaaaaaactgcctttcttcccctcaagtcaacttttgtgctccagaaaattttcta

SEQ ID NO: 114808 - DNA, 120 bp, Artificial Sequence
  ENSG00000100393_69 (sequence is synthesized)
ttctgtaagtctgagcgtaaaacttcaagtattaaaataatttgtacatgtagagagaaaaatgactttttcaaaaatatacaggggcagctgccaaattgatgtattatatattgtggt

SEQ ID NO: 114809 - DNA, 120 bp, Artificial Sequence
  ENSG00000100393_70 (sequence is synthesized)
ttctgtttcttgaaagaatttttttcgttatttttacatctaacaaagtaaaaaaattaaaaagagggtaagaaacgattccggtgggatgattttaacatgcaaaatgtccctgggggt

SEQ ID NO: 114810 - DNA, 78 bp, Artificial Sequence
  ENSG00000100393_71 (sequence is synthesized)
ccggtgggatgattttaacatgcaaaatgtccctgggggtttcttctttgcttgctttcttcctccttaccctacccc

SEQ ID NO: 114811 - DNA, 120 bp, Artificial Sequence
  ENSG00000100393_72 (sequence is synthesized)
actgttgtaaatcatgcaattaaagttgattacttataaatatgaactttggatcactgtatagactgttaaatttgatttcttattacctattgttaaataaactgtgtgagacagaca

SEQ ID NO: 114812 - DNA, 120 bp, Artificial Sequence
  ENSG00000100393_73 (sequence is synthesized)
tcgtgatgccacttattacagttaccagaacaggtaagcttggccaggtgtggaccatggtccatgtgtccacatgtccagggagtgcatgcggatgggccagcacacatacagtcatgg

SEQ ID NO: 114813 - DNA, 120 bp, Artificial Sequence
  ENSG00000100393_74 (sequence is synthesized)
ttcatgtgtatcttgcttgaagacagctgtatagcacaagttctgttttttgccttctgcctttgtttgcagaacaataaaattttctatcagagtagccttgcatcagttacctgggtt

SEQ ID NO: 114814 - DNA, 120 bp, Artificial Sequence
  ENSG00000100393_75 (sequence is synthesized)
cctcccaagagcttgagaagttaagcaactttgtgagttgttggcctagatgggtctatatcccaggccccacttctctttctactgtgtgtttgttgatcaccacagcctgaggcaaaa

SEQ ID NO: 114815 - DNA, 120 bp, Artificial Sequence
  ENSG00000100393_76 (sequence is synthesized)
ctgagaagatttttaaacttttaactgaaactcgctagacagctttttggaaatatttcctttttagatgaggcctatccctaagtagttgttattagaatatatgaaaacaggattctg

SEQ ID NO: 114816 - DNA, 120 bp, Artificial Sequence
  ENSG00000100393_77 (sequence is synthesized)
gagtcttttctttgcctcatattaagcaaattaaaaggaaaacctcacatagctctctgtaccttacttttcccaacccagccttgtatgtgacagaggatgatttgagtctaataaacg

SEQ ID NO: 114817 - DNA, 120 bp, Artificial Sequence
  ENSG00000100393_78 (sequence is synthesized)
aggcacctctgcctaattttctcctgcccaatcaatggctgtaatcacataaatctcattcactaatctatcttaaccacaatttgtctcctgttttcagtgatcagctacaagtatagc

SEQ ID NO: 114818 - DNA, 120 bp, Artificial Sequence
  ENSG00000100393_79 (sequence is synthesized)
ttgcattgggtgtttatttggggctctgatacaataataacaaggctggatgatattaataccctttatttgtttgttaataccaaatccatggtgttggtttttgctgaacttgtgtgt

SEQ ID NO: 114819 - DNA, 120 bp, Artificial Sequence
  ENSG00000100393_80 (sequence is synthesized)
tgcagatgcatttctagctttgaaaagtcacttaaactttttcttttatttacaaaaagttaggcgtgcttctaatgctttgtagacctaatgctttgattttgcagtgagtaaaaatct

SEQ ID NO: 114820 - DNA, 120 bp, Artificial Sequence
  ENSG00000100393_81 (sequence is synthesized)
gggactcaagttgttataagtaccttatgtttaaaaaagcaagtaactggacatgaaacttttctcatgtttactaaaacagtagtctaaagtgtttatctttgcaccaagccatcttta

SEQ ID NO: 114821 - DNA, 120 bp, Artificial Sequence
  ENSG00000100393_82 (sequence is synthesized)
atcaggtacctgcacacatcatttccttttgaaatgtatcacttgatggctgtagtcagtatttaactgcttgtgcaggcttttcaataaacagttttttttctttctttgttgagacag

SEQ ID NO: 114822 - DNA, 65 bp, Artificial Sequence
  ENSG00000100393_83 (sequence is synthesized)
tccaccctctcagccttccaaagtgctaggattataggtatgagccaccacgcctggcaatggtt

SEQ ID NO: 114823 - DNA, 120 bp, Artificial Sequence
  ENSG00000100393_84 (sequence is synthesized)
ctaggattataggtatgagccaccacgcctggcaatggttgttttagattattgttttctgcagttgtatctatagtgggcttttggggtggggggtgggggtctgtggttttttgtttt

SEQ ID NO: 114824 - DNA, 120 bp, Artificial Sequence
  ENSG00000100393_85 (sequence is synthesized)
gtaagtgggaagaggtgtgattcctgtatttaggtaatgagtagcagttcttctctccctggtatatttatccttcttcctccttttgattatttacatcacatagcgttaattgctgaa

SEQ ID NO: 114825 - DNA, 120 bp, Artificial Sequence
  ENSG00000100393_86 (sequence is synthesized)
atgaaaggatatgggtctgtgtaattgaaacatttgcttttatttgcagtaatcatttgctacttgtgatcccatttgagatatttaatgctaatctgtgctttgccttggctttctgct

SEQ ID NO: 114826 - DNA, 120 bp, Artificial Sequence
  ENSG00000100393_87 (sequence is synthesized)
ttgtgttgttctgtcttgcttttatgttttttgttgtcttgcaatccctcatttcttcgtttgttttgtgtttttttttctccctcatgcttgtcgttgtctgcacttggctttgattgc

SEQ ID NO: 114827 - DNA, 120 bp, Artificial Sequence
  ENSG00000100393_88 (sequence is synthesized)
tttttctgtattccagaaataacattttcttcaagcttctgtctagttcagagctttattttgtgattcatactcaattttcaaaggtattattaaaaatattttgtggggtttgtgtgt

SEQ ID NO: 114828 - DNA, 82 bp, Artificial Sequence
  ENSG00000100393_89 (sequence is synthesized)
aaaatgcagaaattagccaggtgtggtggtgtgggcctgtggtctcagctattcaggaggccatggtgggataattgcttga

SEQ ID NO: 114829 - DNA, 120 bp, Artificial Sequence
  ENSG00000100393_90 (sequence is synthesized)
ttcaaactggcattttgacaaaagaattgtgttaaactttcacccttctgttatatatgctgggatttgtacccactaggagcctaaattgatatgtacttgatgatccctgtgaggagg

SEQ ID NO: 114830 - DNA, 120 bp, Artificial Sequence
  ENSG00000100393_91 (sequence is synthesized)
cttgtgcttcctttccatttctctgttttttttgttccatgtggttattgatcagtgagcatgttgatccaaacaggagtaagtgaactgctacaatgaagttttaggggcctgccattc

SEQ ID NO: 114831 - DNA, 120 bp, Artificial Sequence
  ENSG00000100393_92 (sequence is synthesized)
gcctaggtaaactgtgaggctatttctctttatcttggcacaagagtcagttgttctacaactttcttccttctcctcttcagccctcttcacctatactcctgtctttggcttttctct

SEQ ID NO: 114832 - DNA, 120 bp, Artificial Sequence
  ENSG00000100395_0 (sequence is synthesized)
aggccaatatggcttcctgcacctggtgacgcttggcgaaactgaggtctcatggagaagccccggagtattgaggagaccccatcttcagaaccaatggaggaagaggaagatgacgac

SEQ ID NO: 114833 - DNA, 120 bp, Artificial Sequence
  ENSG00000100395_1 (sequence is synthesized)
ttggagctgtttggtggctatgatagtttccggagttataacagcagtgtgggcagtgagagcagctcctatctggaggagtcaagtgaagcagaaaatgaggatcgggaagcaggggaa

SEQ ID NO: 114834 - DNA, 120 bp, Artificial Sequence
  ENSG00000100395_2 (sequence is synthesized)
ctgccgacctccccgctgcatttgctcagccctgggactcctcgctccttggatggcagtggttctgagccagctgtctgtgagatgtgtggtatcgtgggtacaagggaagccttcttc

SEQ ID NO: 114835 - DNA, 120 bp, Artificial Sequence
  ENSG00000100395_3 (sequence is synthesized)
tccaagaccaagaggttctgcagcgtctcctgctccaggagctactcctccaactccaagaaagccagtatcttggctaggttacagggaaaaccaccgaccaaaaaagccaaagtcctg

SEQ ID NO: 114836 - DNA, 120 bp, Artificial Sequence
  ENSG00000100395_4 (sequence is synthesized)
cacaaggctgcctggtctgccaaaattggagccttcctccactctcaagggacaggacagctggcagatgggacaccaacaggacaagacgctctggtcttgggcttcgactgggggaag

SEQ ID NO: 114837 - DNA, 120 bp, Artificial Sequence
  ENSG00000100395_5 (sequence is synthesized)
ttcctgaaggatcacagttacaaggctgctcccgtcagctgtttcaagcacgtcccactctatgaccagtgggaggatgtgatgaaagggatgaaggtggaggtgctcaacagtgatgct

SEQ ID NO: 114838 - DNA, 120 bp, Artificial Sequence
  ENSG00000100395_6 (sequence is synthesized)
gtgctccccagccgggtgtactggatcgcctctgtcatccagacagcagggtatcgggtgctgcttcggtatgaaggctttgaaaatgacgccagccatgacttctggtgcaacctggga

SEQ ID NO: 114839 - DNA, 120 bp, Artificial Sequence
  ENSG00000100395_7 (sequence is synthesized)
acagtggatgtccaccccattggctggtgtgccatcaacagcaagatcctagtgcccccacggaccatccatgccaagttcaccgactggaagggctacctcatgaaacggctggtgggc

SEQ ID NO: 114840 - DNA, 120 bp, Artificial Sequence
  ENSG00000100395_8 (sequence is synthesized)
tccaggacgcttcccgtggatttccacatcaagatggtggagagcatgaagtacccctttaggcagggcatgcggctggaagtggtggacaagtcccaggtgtcacgcactcgcatggct

SEQ ID NO: 114841 - DNA, 120 bp, Artificial Sequence
  ENSG00000100395_9 (sequence is synthesized)
gtggtggacacagtaatcgggggtcgcctacggctcctctacgaggatggtgacagtgacgacgacttctggtgccacatgtggagccccctgatccacccagtgggttggtcacgacgt

SEQ ID NO: 114842 - DNA, 120 bp, Artificial Sequence
  ENSG00000100395_10 (sequence is synthesized)
gtgggccacggcatcaagatgtcagagaggcgaagtgacatggcccatcaccccaccttccggaagatctactgtgatgccgttccttacctcttcaagaaggtacgagcagtctacaca

SEQ ID NO: 114843 - DNA, 120 bp, Artificial Sequence
  ENSG00000100395_11 (sequence is synthesized)
gaaggcggttggtttgaggaagggatgaagctggaggccattgaccccctgaatctgggcaacatctgcgtggcaactgtctgtaaggttctcctggatggatacctgatgatctgtgtg

SEQ ID NO: 114844 - DNA, 120 bp, Artificial Sequence
  ENSG00000100395_12 (sequence is synthesized)
gacggggggccctccacagatggcttggactggttctgctaccatgcctcttcccacgccatcttcccggccaccttctgtcagaagaatgacattgagctcacaccgccaaaaggttat

SEQ ID NO: 114845 - DNA, 120 bp, Artificial Sequence
  ENSG00000100395_13 (sequence is synthesized)
tttaacatggattgcccaaaccatggcttcaaggtgggcatgaagctggaggccgtggacctgatggagccccggctcatctgtgtggccacggtgaaacgagtggtgcatcggctcctc

SEQ ID NO: 114846 - DNA, 120 bp, Artificial Sequence
  ENSG00000100395_14 (sequence is synthesized)
agcatccactttgacggctgggacagcgagtacgaccagtgggtggactgcgagtccccagacatctaccccgtcggctggtgtgagctcaccggctaccagctccagcctcctgtggcc

SEQ ID NO: 114847 - DNA, 120 bp, Artificial Sequence
  ENSG00000100395_15 (sequence is synthesized)
gcagaaccggccacaccgctgaaggccaaagaggccacaaagaagaaaaagaaacagtttgggaagaaaaggaaaagaatcccgcccactaagacgcgacccctcagacaggggtccaag

SEQ ID NO: 114848 - DNA, 120 bp, Artificial Sequence
  ENSG00000100395_16 (sequence is synthesized)
aagcccctgctggaggacgaccctcagggtgccaggaagatctcgtcggagcctgttcctggcgagatcattgctgtgcgtgtgaaggaagagcatctagacgtggcctcgcccgacaag

SEQ ID NO: 114849 - DNA, 120 bp, Artificial Sequence
  ENSG00000100395_17 (sequence is synthesized)
gcttcaagtccagagctgcctgtctccgtcgagaacatcaagcaggaaacagacgactgagccttcctgcctccagcctggcttctagctggaagccagcccagcgtttctctaccacca

SEQ ID NO: 114850 - DNA, 120 bp, Artificial Sequence
  ENSG00000100395_18 (sequence is synthesized)
ccaccatgcctccacctgactttggcttggagactgatcctctctgtgtaaattctgcccggtgctgtgaaggctggacggtggaggacctgctggggtctcctgggacccgcctgttgc

SEQ ID NO: 114851 - DNA, 120 bp, Artificial Sequence
  ENSG00000100395_19 (sequence is synthesized)
ttctgccctcccctgtggaaaggtctatatgacgggccgcctgaggccccagaactcgtctgtgaaccaccttttccagccagagttcccaaagctggaacgctagctgcctgctcttcc

SEQ ID NO: 114852 - DNA, 120 bp, Artificial Sequence
  ENSG00000100395_20 (sequence is synthesized)
ttaagatggcctccccccgacccgccacggccctcagttgccagggatggggccaccactgtcacactgtggaatacaagacagtgaactctgtctgcctgaacgagccatgtaaattaa

SEQ ID NO: 114853 - DNA, 120 bp, Artificial Sequence
  ENSG00000100395_21 (sequence is synthesized)
gttctagagcagctctctgagcaggataaggtcccctgacagtgagttgtgtggtgggggcagcctctgcctcaaaaattcaccaagcagaatgcctctcagcctcatgtgttggtcctc

SEQ ID NO: 114854 - DNA, 120 bp, Artificial Sequence
  ENSG00000100395_22 (sequence is synthesized)
tgctcctcctagctccccagggatgttggggacccagcttgtctcggcagctaagaagcagtgaccaggatgtggattttggcgacctgtgtggtggccttgagctgctttctgtgtttg

SEQ ID NO: 114855 - DNA, 120 bp, Artificial Sequence
  ENSG00000100395_23 (sequence is synthesized)
tgaggactgactcccatttcctaaaggaaatgcccccggggaggacattgggaggaagatggcctgagtgtgcactttggctctgctacctgctcctgaagccccgctaaaaataattca

SEQ ID NO: 114856 - DNA, 120 bp, Artificial Sequence
  ENSG00000100395_24 (sequence is synthesized)
tccaagattcctttgtagttaaagggtccagttctgactggagcctctagagagctgggcttgtatgttcttttggccttttgttcctacctaaatgaagaaaccatgcctggaggggcc

SEQ ID NO: 114857 - DNA, 120 bp, Artificial Sequence
  ENSG00000100395_25 (sequence is synthesized)
gtgaacacagaaccctcaagacaaggatgacagagctggaggacacatctagctgccattgcaacctcactgggctccccagactctgtgtgtgagaaattaaaccccctgcttgcttga

SEQ ID NO: 114858 - DNA, 80 bp, Artificial Sequence
  ENSG00000100395_26 (sequence is synthesized)
gcgacggggcaggccaatatggcttcctgcacctggtgacgcttggcgaaactgaggtctcatggagaagccccggagta

SEQ ID NO: 114859 - DNA, 120 bp, Artificial Sequence
  ENSG00000100395_27 (sequence is synthesized)
acctccgtctcccgggttcaagcaattctgtctccatctcccatgttcctgggattacaggagaccccatcttcagaaccaatggaggaagaggaagatgacgacttggagctgtttggt

SEQ ID NO: 114860 - DNA, 120 bp, Artificial Sequence
  ENSG00000100395_28 (sequence is synthesized)
gatcacagttacaaggctgctcccgtcagctgtttcaagcacgtgagtgccctggagctgagggagggaggccggggagccgggcctggagctgctcctccacctgcttcaccagggcgg

SEQ ID NO: 114861 - DNA, 120 bp, Artificial Sequence
  ENSG00000100395_29 (sequence is synthesized)
cttcaggctggacagtgacagtggggaggtctgggcaggagacggatggcgttaccactcgctccatttcatgtttatgtcaaaaaaatcctcctacaaacacttctatcacctgcttgg

SEQ ID NO: 114862 - DNA, 120 bp, Artificial Sequence
  ENSG00000100395_30 (sequence is synthesized)
cttcactcccggtctgaagcccttcagtttatttacatgatggaacttggtgctagctgatgtcgaagggtctttgcagtctgaaacccttctctcctttctcccccatttgcagcattt

SEQ ID NO: 114863 - DNA, 120 bp, Artificial Sequence
  ENSG00000100395_31 (sequence is synthesized)
tcccatggaaagcagggtgcttctgtagctggcctgggccccgtgggccccgagaggcagatgtggatgctcctggagccacttctgtaaaaggctcctcgatgcggatcatgtaaaagc

SEQ ID NO: 114864 - DNA, 120 bp, Artificial Sequence
  ENSG00000100395_32 (sequence is synthesized)
cagaacgaagggcaaggcccttaggggcggggcttgagcgcaagaaccgaatatccagcagctgtgacgtgtggagcctgcaggccgggagagcagagcccacaacagcactcttgtttt

SEQ ID NO: 114865 - DNA, 120 bp, Artificial Sequence
  ENSG00000100395_33 (sequence is synthesized)
gtcttcacaccacgtccctaagctccgggaaatccaggaggaggcctctttagtcttgaggaagtagggagtcttttacccagagtaagccacttcctctcctcctttcagaactgccac

SEQ ID NO: 114866 - DNA, 120 bp, Artificial Sequence
  ENSG00000100395_34 (sequence is synthesized)
tgaactctggggagtgccctgaacaatgacagctgcttcttgactcagctaactcactcctctcgtctctgaatggctaatgaaggtgcacctccttcctgctggagggggagcctcttt

SEQ ID NO: 114867 - DNA, 120 bp, Artificial Sequence
  ENSG00000100395_35 (sequence is synthesized)
tttgccctgaattctctaatagtttcagcattttcatttccagggagttgcatcatccttgtgtctaacacatataatccaatttgctttgtaaaaagcctgcccctgcgtgcctgggct

SEQ ID NO: 114868 - DNA, 120 bp, Artificial Sequence
  ENSG00000100395_36 (sequence is synthesized)
agcgcaactgtgtccgggttctgtgatgaactaaactcaagtgaccagggagatggaatgggatacctcaactggctgaagccagggctgagaataaaaaaggtgaatttggccaggcgc

SEQ ID NO: 114869 - DNA, 65 bp, Artificial Sequence
  ENSG00000100395_37 (sequence is synthesized)
aaattagctggaccttgaacctgagaggcggaggttgtaatgagctgagattgcgccactgcact

SEQ ID NO: 114870 - DNA, 120 bp, Artificial Sequence
  ENSG00000100395_38 (sequence is synthesized)
ccagcctgggtgacggagcaagactctaaaaaaagtgattctcccaaaggagaatcaaaagtaccattggcaggaaagtgaggattaggtactgggaaggcaactgaaacagtccagtgc

SEQ ID NO: 114871 - DNA, 120 bp, Artificial Sequence
  ENSG00000100395_39 (sequence is synthesized)
aaggcaactgaaacagtccagtgctgtcctggggcactttattttattttatttattttttcgatatgggagtttcactcttgttgcccagagctggagtgcaatggcactatctcagct

SEQ ID NO: 114872 - DNA, 72 bp, Artificial Sequence
  ENSG00000100395_40 (sequence is synthesized)
tggagcatttcagtaggaggggaggtagagagtaaacttgcaggtggatggctgtgtgtaaacaagggggtc

SEQ ID NO: 114873 - DNA, 120 bp, Artificial Sequence
  ENSG00000100395_41 (sequence is synthesized)
taaacttgcaggtggatggctgtgtgtaaacaagggggtcataatgcccacagcccaggtttgtatgatgattgaaggaaagtatatttgtgctaatatcagcgccctgccattgctcgg

SEQ ID NO: 114874 - DNA, 120 bp, Artificial Sequence
  ENSG00000100395_42 (sequence is synthesized)
gctggcacagggacgaagggatcgaggctcaccaaggcatcatgtgcccaaaatgatacagtaagaaaccagtcctataaagattttaggactcggttctgtctgactctgggtctctag

SEQ ID NO: 114875 - DNA, 120 bp, Artificial Sequence
  ENSG00000100395_43 (sequence is synthesized)
ccatcaccctgcatcccaccacctccacctctactcccggcttagctcttcaaggacaggagacctcatctctttatctctagtagctggttctgcacacagtgggtgatgtgaaaagtt

SEQ ID NO: 114876 - DNA, 120 bp, Artificial Sequence
  ENSG00000100395_44 (sequence is synthesized)
gaggtgcaaacgaggacttgactgaggccgtgaggcagtctgtctcccctgctagcacagttagctcactctctcggtacactctcatcgccacacaggtcccactctatgaccagtggg

SEQ ID NO: 114877 - DNA, 120 bp, Artificial Sequence
  ENSG00000100395_45 (sequence is synthesized)
accactttaagtagagagtgagccccgtcacccagcccctgctcctgacttctctgtctccctttccctctggcctgcagagctccttccttcatcttgcccactctgtcatatgttcgt

SEQ ID NO: 114878 - DNA, 120 bp, Artificial Sequence
  ENSG00000100395_46 (sequence is synthesized)
gcccttgtgcacccaggtaaactacccaggtccctctgagcagccctggtaacaagggtgggaagaagggacagctgttctccggcccctcctccagccccgccctctcctcattgccca

SEQ ID NO: 114879 - DNA, 120 bp, Artificial Sequence
  ENSG00000100395_47 (sequence is synthesized)
ggtttggcttcctgtcttggggtgtctcgtgtgggagggtggatggggtctcgggatgcgcctgtgccctgtgtcctcccagggaccctcttctcatctctttcacccttgtctttcaac

SEQ ID NO: 114880 - DNA, 120 bp, Artificial Sequence
  ENSG00000100395_48 (sequence is synthesized)
aggccaatatggcttcctgcacctggtgacgcttggcgaaactgaggtctcatggagaagccccggagtattgagagatggggtgtggctgtgttgccaaggctggtctcaaactcctgg

SEQ ID NO: 114881 - DNA, 120 bp, Artificial Sequence
  ENSG00000100395_49 (sequence is synthesized)
agtgctgggattacagatgtgaaccaccgtacccaggctcttcacacgttttctgttacatgctgggagaccccatcttcagaaccaatggaggaagaggaagatgacgacttggagctg

SEQ ID NO: 114882 - DNA, 120 bp, Artificial Sequence
  ENSG00000100395_50 (sequence is synthesized)
gccctgggactcctcgctccttggatggcagtggttctgagccaggtgccttcagagtgtcccctgaggatggagaggagatagaagattatagaggaagaggggggtggatataggcta

SEQ ID NO: 114883 - DNA, 120 bp, Artificial Sequence
  ENSG00000100399_0 (sequence is synthesized)
agcctgtccctgcgctgcgcctccaggctggaccagcagttccaggcggcatggaggggccccggagctccacccatgtccccttggtgctgccgcttcttgtacttctgctgctggccc

SEQ ID NO: 114884 - DNA, 120 bp, Artificial Sequence
  ENSG00000100399_1 (sequence is synthesized)
cggctaggcaggccgccgcccagcgctgcccacaggcctgcatctgtgacaactccaggcgacacgttgcctgccggtaccagaacctcactgaggtgccagacgccatccctgagctga

SEQ ID NO: 114885 - DNA, 120 bp, Artificial Sequence
  ENSG00000100399_2 (sequence is synthesized)
cccagcggctggacctgcagggcaatttgctgaaggtgatccccgcagccgccttccagggcgtgcctcacctcacacacctggacctgcgccactgcgaggtggagctggtggccgagg

SEQ ID NO: 114886 - DNA, 120 bp, Artificial Sequence
  ENSG00000100399_3 (sequence is synthesized)
gcgccttccgtggcctgggccgcctgctcctgctcaacctggcctccaaccacctgcgtgagctgccccaggaggcgctggacgggctgggctcgttgcggcggctggagctggagggga

SEQ ID NO: 114887 - DNA, 120 bp, Artificial Sequence
  ENSG00000100399_4 (sequence is synthesized)
acgcactggaggagctgcggccggggacgttcggggcactgggtgcgctggccacgctaaacctggcccacaacgccctggtttacctgcccgccatggccttccaggggctactgcgcg

SEQ ID NO: 114888 - DNA, 120 bp, Artificial Sequence
  ENSG00000100399_5 (sequence is synthesized)
tccgctggctgcggctgtcgcacaacgcgctcagcgtgctggcccccgaggccctggctggcctgcccgccctgagacggctcagcctacaccacaacgagctccaggctctgcccgggc

SEQ ID NO: 114889 - DNA, 120 bp, Artificial Sequence
  ENSG00000100399_6 (sequence is synthesized)
ctgtcttgtcccaggcccgcggcctggcccgtctggagctgggccacaacccgctcacctacgcgggcgaggaggacgggctggcgctgcccggcctgcgggagctgctgctggacggcg

SEQ ID NO: 114890 - DNA, 120 bp, Artificial Sequence
  ENSG00000100399_7 (sequence is synthesized)
gggccctgcaggccctgggtcccagggccttcgcacactgtccgcgcctgcacaccctcgacctccgcgggaaccagctagacaccctgcccccgctgcagggcccgggccagctgcgcc

SEQ ID NO: 114891 - DNA, 80 bp, Artificial Sequence
  ENSG00000100399_8 (sequence is synthesized)
ggctgcggctgcaggggaatccgctgtggtgcggctgccaggcgcggcccctactcgagtggctggcgcgggcgcgcgtg

SEQ ID NO: 114892 - DNA, 120 bp, Artificial Sequence
  ENSG00000100399_9 (sequence is synthesized)
gcgtgccaggggccgcggcgcctgcggggcgaggctctggacgccctgcggccctgggacctgcgctgccctggggacgcggcgcaggaagaggaagagctggaagagcgggctgtggcc

SEQ ID NO: 114893 - DNA, 120 bp, Artificial Sequence
  ENSG00000100399_10 (sequence is synthesized)
cggggaggagcgggcagtcgcgccttgccctcgcgcctgcgtgtgcgtccccgagtcccggcacagcagctgcgagggctgcggcctgcaggcggtgccccgcggcttccccagcgacac

SEQ ID NO: 114894 - DNA, 120 bp, Artificial Sequence
  ENSG00000100399_11 (sequence is synthesized)
ccagctcctggacctgaggcggaaccacttcccctcggtgccccgagcggccttccccggcctgggccacctggtgtcgctgcacctgcagcactgcggcatcgcggagctggaagcggg

SEQ ID NO: 114895 - DNA, 120 bp, Artificial Sequence
  ENSG00000100399_12 (sequence is synthesized)
cgccctggccgggctgggccgcctgatctacctgtacctctccgacaaccagctcgcaggcctcagcgctgctgcccttgaaggggctccccgcctcggctacctgtacctagaacgcaa

SEQ ID NO: 114896 - DNA, 120 bp, Artificial Sequence
  ENSG00000100399_13 (sequence is synthesized)
ccgtttcctgcaggtgccaggggctgccctgcgcgccctgcccagcctcttctccctgcacctgcaggacaacgctgtggaccgcctggcacctggggacctggggagaacacgggcctt

SEQ ID NO: 114897 - DNA, 120 bp, Artificial Sequence
  ENSG00000100399_14 (sequence is synthesized)
gcgctgggtctacctgagtggaaaccgcatcaccgaagtgtcccttggggcgctgggcccagctcgggagctggagaagctgcacctggacaggaatcagctgcgagaggtgcccactgg

SEQ ID NO: 114898 - DNA, 120 bp, Artificial Sequence
  ENSG00000100399_15 (sequence is synthesized)
ggccttggaggggctgcctgccctcctggagctgcagctctcgggcaacccactcagggccttgcgtgacggagccttccagcctgtgggcaggtcgctgcagcacctcttcctgaacag

SEQ ID NO: 114899 - DNA, 120 bp, Artificial Sequence
  ENSG00000100399_16 (sequence is synthesized)
cagtggcctggagcagatttgtcctggggccttttcaggcctggggcccgggctccagagcctgcacctgcagaagaaccagcttcgggccctgcctgccctgcccagtctcagccagct

SEQ ID NO: 114900 - DNA, 120 bp, Artificial Sequence
  ENSG00000100399_17 (sequence is synthesized)
ggagctcatcgacctcagcagcaatcccttccactgtgactgccagctgcttccgctgcacaggtggcttactgggctgaacctgcgggtgggggccacctgcgccacccctcccaatgc

SEQ ID NO: 114901 - DNA, 120 bp, Artificial Sequence
  ENSG00000100399_18 (sequence is synthesized)
ccgtggccagagggtgaaggctgcagctgctgtctttgaagactgcccgggctgggctgccagaaaggccaagcggacaccagcctccaggcccagtgccaggagaacccccatcaaagg

SEQ ID NO: 114902 - DNA, 120 bp, Artificial Sequence
  ENSG00000100399_19 (sequence is synthesized)
aagacagtgtggagcagataaggtggggaaggagaagggtcgtctctgagcacggagcaggctggtcctgccttgacccagcccggtggctcttactctcgccaggaacaggctccgacg

SEQ ID NO: 114903 - DNA, 120 bp, Artificial Sequence
  ENSG00000100399_20 (sequence is synthesized)
agatcttcctggcaccctgagggtcgtcctccagcaggggcttcttggacccctgtctgaggggtcgcgtcttagtgggcgggattcttttccctttgaataaaaatggattcaaaccca

SEQ ID NO: 114904 - DNA, 120 bp, Artificial Sequence
  ENSG00000100399_21 (sequence is synthesized)
agttccaggcggcatggaggggtgagtctttgggcccgatggtgcaaggggggattcagagcagctcagtggcctcaggacaacgctgtggaccgcctggcacctggggacctggggaga

SEQ ID NO: 114905 - DNA, 120 bp, Artificial Sequence
  ENSG00000100401_0 (sequence is synthesized)
gaacaaatcaaatcgaagcaaagaaactgccggctttcaaaatcctcctcctccgccatcatccgccgcggtgcggagagcaggtggtgctggaagcgcgtgaggccgggagctcgagag

SEQ ID NO: 114906 - DNA, 120 bp, Artificial Sequence
  ENSG00000100401_1 (sequence is synthesized)
agctaacagactagccggctggacatctggaccgctggatccggaggtggcgaccccggcctgacccggaccctaaatccgtccccgccccagagggcggaggcgcgcgctcgattcccc

SEQ ID NO: 114907 - DNA, 120 bp, Artificial Sequence
  ENSG00000100401_2 (sequence is synthesized)
ccacgcggcggcgccgcctgtttacgtctgcagatctccaggggagcccaccagcctagtcaacatggcctcggaagacattgccaagctggcagagacacttgccaagactcaggtggc

SEQ ID NO: 114908 - DNA, 120 bp, Artificial Sequence
  ENSG00000100401_3 (sequence is synthesized)
cgggggacagctgagtttcaaaggcaagagcctcaaactcaacactgcagaagatgctaaagatgtgattaaagagattgaagactttgacagcttggaggctctgcgtctggaaggcaa

SEQ ID NO: 114909 - DNA, 120 bp, Artificial Sequence
  ENSG00000100401_4 (sequence is synthesized)
cacagtgggcgtggaagcagccagggtcatcgccaaggccttagagaagaagtcggagttgaagcgctgccactggagtgacatgttcacgggaaggctgcggaccgagatcccaccagc

SEQ ID NO: 114910 - DNA, 120 bp, Artificial Sequence
  ENSG00000100401_5 (sequence is synthesized)
cctgatctcactaggggaaggactcatcacagctggggctcagctggtggagctggacttaagcgacaacgcattcgggcccgacggtgtgcaaggcttcgaggccctgctcaagagctc

SEQ ID NO: 114911 - DNA, 120 bp, Artificial Sequence
  ENSG00000100401_6 (sequence is synthesized)
agcctgcttcaccctgcaggaactcaagctcaacaactgtggcatgggcattggcggcggcaagatcctggctgcagctctgaccgaatgtcaccggaaatccagtgcccaaggcaagcc

SEQ ID NO: 114912 - DNA, 120 bp, Artificial Sequence
  ENSG00000100401_7 (sequence is synthesized)
tctggccctgaaggtctttgtggctggcagaaaccgtctggagaatgatggcgccactgccttggcagaagcttttagggtcatcgggaccctggaggaggtccacatgccacagaatgg

SEQ ID NO: 114913 - DNA, 120 bp, Artificial Sequence
  ENSG00000100401_8 (sequence is synthesized)
gatcaaccaccctggcatcactgccctggcccaggctttcgctgtcaaccccctgctgcgggtcatcaacctgaatgacaacaccttcactgagaagggcgccgtggccatggccgagac

SEQ ID NO: 114914 - DNA, 120 bp, Artificial Sequence
  ENSG00000100401_9 (sequence is synthesized)
cttgaagaccttgcggcaggtggaggtgattaattttggggactgcctggtgcgctccaagggtgcagttgccattgcagatgccatccgcggcggcctgcccaagctaaaggagctgaa

SEQ ID NO: 114915 - DNA, 120 bp, Artificial Sequence
  ENSG00000100401_10 (sequence is synthesized)
cttgtcattctgtgaaatcaagagggatgctgccctggctgttgctgaggccatggcagacaaagctgagctggagaagctggacctgaatggcaacaccctgggagaagaaggctgtga

SEQ ID NO: 114916 - DNA, 120 bp, Artificial Sequence
  ENSG00000100401_11 (sequence is synthesized)
acagcttcaggaggtgctggagggcttcaacatggccaaggtgctggcgtccctcagtgatgacgaggacgaggaggaggaggaggaaggagaagaggaagaagaggaagcagaagaaga

SEQ ID NO: 114917 - DNA, 120 bp, Artificial Sequence
  ENSG00000100401_12 (sequence is synthesized)
gcagcgagggcagggagagaagtcagccacgccctcacggaagattctggaccctaacactggggagccagctcccgtgctgtcctccccacctcctgcagacgtctccaccttcctggc

SEQ ID NO: 114918 - DNA, 120 bp, Artificial Sequence
  ENSG00000100401_13 (sequence is synthesized)
ttttccctctccagagaagctgctgcgcctagggcccaagagctccgtgctgatagcccagcagactgacacgtctgaccccgagaaggtggtctctgccttcctaaaggtgtcatctgt

SEQ ID NO: 114919 - DNA, 120 bp, Artificial Sequence
  ENSG00000100401_14 (sequence is synthesized)
gttcaaggacgaagctactgtgaggatggcagtgcaggatgcagtagatgccctgatgcagaaggctttcaactcctcgtccttcaactccaacaccttcctcaccaggctgctcgtgca

SEQ ID NO: 114920 - DNA, 120 bp, Artificial Sequence
  ENSG00000100401_15 (sequence is synthesized)
catgggtctgctcaagagtgaagacaaggtcaaggccattgccaacctgtacggccccctgatggcgctgaaccacatggtgcagcaggactatttccccaaggcccttgcacccctgct

SEQ ID NO: 114921 - DNA, 120 bp, Artificial Sequence
  ENSG00000100401_16 (sequence is synthesized)
gctggcgttcgtgaccaagcccaacagcgccctggaatcctgctccttcgcccgccacagtctgctgcagacgctgtacaaggtctagactcaaagcctctcccatcccttggcctggac

SEQ ID NO: 114922 - DNA, 120 bp, Artificial Sequence
  ENSG00000100401_17 (sequence is synthesized)
cagtgagctggggagggactcggatgaactgaggcgcagcctacgccattgccttggacaggactctggccacaggcagggcgggtctgtgtcccatgtgtcctgtcagtcccctgagta

SEQ ID NO: 114923 - DNA, 120 bp, Artificial Sequence
  ENSG00000100401_18 (sequence is synthesized)
tgtgtgtgggtgtggcgcatgtgcaggtctgtgcctcctgtcgggatttgggttttaacgtcttctgctggcccagccctgctctgttgtggggagttggcccccaggggaaagggctgt

SEQ ID NO: 114924 - DNA, 120 bp, Artificial Sequence
  ENSG00000100401_19 (sequence is synthesized)
gagctgctccgccattaaactcacctccacctgagggcgctctgctgatctccgcctgggccctgatggccgtccccacccacctgccttccggcccggctccctggcggagccagaacc

SEQ ID NO: 114925 - DNA, 120 bp, Artificial Sequence
  ENSG00000100401_20 (sequence is synthesized)
cagggagttgcccgcgtgctgtccttcccctctgtgttgtgattgggttgtttcctgccctgcctggggctgcttctcgtcaccaagccctggtcctgcggcagctgtcacccctaccat

SEQ ID NO: 114926 - DNA, 120 bp, Artificial Sequence
  ENSG00000100401_21 (sequence is synthesized)
ccataccactgtgctgaccgctcagcctgaagagcagagaatgccatgggtgggactgtgggggtcggatcgtggggttgttggcagagggcaaccctgggccccacaccgtgtggacag

SEQ ID NO: 114927 - DNA, 120 bp, Artificial Sequence
  ENSG00000100401_22 (sequence is synthesized)
gcagacaccagattgtccaggagcaggagctgctgggactgcgctggccccggacctagtgggccttctcctggctgctgagatgtcgtctgtgactggcctggctggagggggagtgtt

SEQ ID NO: 114928 - DNA, 120 bp, Artificial Sequence
  ENSG00000100401_23 (sequence is synthesized)
gacaacccaaagctgttctccagtctggggagggagaggcagggtccccaatgtccgagctgcatctggacgctgctcttaaaggacctcctggggcaggggagcggtagggtctggact

SEQ ID NO: 114929 - DNA, 120 bp, Artificial Sequence
  ENSG00000100401_24 (sequence is synthesized)
gggcagatgctgtatgacctccctgagcacccgtgactgccccatgctttcccctttgtgctctgtgtgtgtctgggctgtgcccgggggcttcacaaataaagtcgtgtggcagcttca

SEQ ID NO: 114930 - DNA, 120 bp, Artificial Sequence
  ENSG00000100401_25 (sequence is synthesized)
ctttccccgtcacctgcctggaacaggggtgcggggcgaggagggcgtggcgcccgtgtgcgccttctgcctgccccctcggccttcttcacttagccttcgacggccgagcgccccagg

SEQ ID NO: 114931 - DNA, 120 bp, Artificial Sequence
  ENSG00000100401_26 (sequence is synthesized)
ggtggcggtgggagtggggttgttgagcggcgctggctcctttcacaaatggggaaactgaggcttaaagggcgtctgactcgccagagcagctcagcctgcagctgctagcagtggcgt

SEQ ID NO: 114932 - DNA, 120 bp, Artificial Sequence
  ENSG00000100401_27 (sequence is synthesized)
ctcatattagcattgttgtcaaccggaggcggtgcgagtccgccggggattccagatggggctcctgcgccgcccgcctatcatttgcggcctgtattcgcgcgtcgctcccgcagagcc

SEQ ID NO: 114933 - DNA, 120 bp, Artificial Sequence
  ENSG00000100401_28 (sequence is synthesized)
acctcccagcaggcccacgcccgcgggggccccgggctggcgccgctgtccctggaatcgatagacggtctccttctgtcacccaggctggagtgtagtggaacgatcaccgctgaactg

SEQ ID NO: 114934 - DNA, 120 bp, Artificial Sequence
  ENSG00000100401_29 (sequence is synthesized)
cctgggctcaagcgatcctcccacctcaacctcccaagtcatggggactacagatgccatcacacctggctaatttttaaatttttctgtggagacagggtctcattctgttgcccaggc

SEQ ID NO: 114935 - DNA, 71 bp, Artificial Sequence
  ENSG00000100401_30 (sequence is synthesized)
cactgtctttcatttatttagttacttttagagatagagcctcccgctgttgcccaggctggagtgcagtg

SEQ ID NO: 114936 - DNA, 64 bp, Artificial Sequence
  ENSG00000100401_31 (sequence is synthesized)
tgttgcccaggctggagtgcagtggcagtcatagcttactgcagctgactacaggcacgtgcca

SEQ ID NO: 114937 - DNA, 88 bp, Artificial Sequence
  ENSG00000100401_32 (sequence is synthesized)
tttagatcatggctcactgtagcctctgtctccggggctcaatcaatcctcccacctcagcctccccagtggctgggattactggtgc

SEQ ID NO: 114938 - DNA, 120 bp, Artificial Sequence
  ENSG00000100401_33 (sequence is synthesized)
tctgtctccggggctcaatcaatcctcccacctcagcctccccagtggctgggattactggtgcacaccaccataccctgctaattgtatttatttttagtagagatgggattttgccat

SEQ ID NO: 114939 - DNA, 86 bp, Artificial Sequence
  ENSG00000100401_34 (sequence is synthesized)
agctttacttcttttaccagcactcctgattttataaatagtgaggcttatcaaccccatttctacccaaatcttctggtagactt

SEQ ID NO: 114940 - DNA, 120 bp, Artificial Sequence
  ENSG00000100401_35 (sequence is synthesized)
cttatcaaccccatttctacccaaatcttctggtagacttgagtatagtagggcttcataggtagcagccctgtccctgtcctattatgatggtagctgttgtgatgtggcgatctctga

SEQ ID NO: 114941 - DNA, 120 bp, Artificial Sequence
  ENSG00000100401_36 (sequence is synthesized)
tctagaaacccctgaggggccattgtggcctgcccagtctcccggccacggttgaaaccagacgtgcagtggggctgacccctgtgccccaccccagagtcatgccagcgtgggtggtgg

SEQ ID NO: 114942 - DNA, 120 bp, Artificial Sequence
  ENSG00000100401_37 (sequence is synthesized)
ggcattctctgggatgaatgatctggatcccatagccatctgtgtcctgtttgaggaatgggaccctcaaacagagaacagccaagatgctcaagcaggtgtgtgcttgggccagactct

SEQ ID NO: 114943 - DNA, 120 bp, Artificial Sequence
  ENSG00000100401_38 (sequence is synthesized)
gcagcctttggtttgggacttgactgccattcactgaaggggcccaggaaatgggcagctcacatggtgttgctgggtgtccagctgcggcagtttagcagaggaggacttgtaatgaga

SEQ ID NO: 114944 - DNA, 120 bp, Artificial Sequence
  ENSG00000100401_39 (sequence is synthesized)
tggtagcttcttataggctaagacatgatttttctgttcttttactacctcctgcaccttctagaactgttccttctctgatgctgttttcctttcttccagtgatttatctctagggtc

SEQ ID NO: 114945 - DNA, 120 bp, Artificial Sequence
  ENSG00000100401_40 (sequence is synthesized)
tccatagcaggggaggtagggtcagactcctgagatggctgatgtcctaccctgcccccaaccaggggccccaggagactcctttttcttactgcaactttggcctcctcagtctgcaga

SEQ ID NO: 114946 - DNA, 120 bp, Artificial Sequence
  ENSG00000100401_41 (sequence is synthesized)
ttgctctggcgctgatcctttgctgaccttggacaaatcaatttacgtttctgtgctccagtttcttggtttataaaagacggtctccttctgtcacccaggctggagtgtagtggaacg

SEQ ID NO: 114947 - DNA, 120 bp, Artificial Sequence
  ENSG00000100403_0 (sequence is synthesized)
gagacagtgcctccagcgggtgctgccgcgagcggccagccgaggggctggaaatgaaagtaaagcgctccagagccacatggacggagctgccggggcggcggcgccgggagcaggatg

SEQ ID NO: 114948 - DNA, 120 bp, Artificial Sequence
  ENSG00000100403_1 (sequence is synthesized)
cggccgcccgtaattaaatagcatttactcttattattactaataataataacgtaatcatacctctagtcatagcataccatttatcgggctcggcgcaggcccgcggggagcgcagcc

SEQ ID NO: 114949 - DNA, 120 bp, Artificial Sequence
  ENSG00000100403_2 (sequence is synthesized)
cggcggagagactgatggagaggcagaaacggaaggcggacatcgagaaagggctgcagttcattcagtcgacactacccctaaagcaagaagaatatgaggcctttctgctcaagctgg

SEQ ID NO: 114950 - DNA, 120 bp, Artificial Sequence
  ENSG00000100403_3 (sequence is synthesized)
tgcagaatctgtttgctgagggcaatgatctgttccgggagaaggactataagcaggctctggtgcagtacatggaagggctgaacgtggccgactacgctgcctctgaccaggtggccc

SEQ ID NO: 114951 - DNA, 120 bp, Artificial Sequence
  ENSG00000100403_4 (sequence is synthesized)
tgccccgggagctgctgtgcaagctgcatgtcaatagggccgcctgctacttcaccatgggcctgtatgagaaggcgctggaggacagcgagaaggcgctgggcctggacagtgagagta

SEQ ID NO: 114952 - DNA, 120 bp, Artificial Sequence
  ENSG00000100403_5 (sequence is synthesized)
tccgggcgttgttccgcaaggcacgcgctctcaatgaactgggacgccacaaggaggcctacgagtgcagcagccggtgttccctcgccctgccccacgatgaaagcgtgactcagcttg

SEQ ID NO: 114953 - DNA, 120 bp, Artificial Sequence
  ENSG00000100403_6 (sequence is synthesized)
gtcaggagctggcccagaaactggggctgcgagttcgcaaggcgtataagaggccccaggaattggaaaccttttctctgctcagtaacggcactgcggctggcgtggcagatcagggaa

SEQ ID NO: 114954 - DNA, 120 bp, Artificial Sequence
  ENSG00000100403_7 (sequence is synthesized)
cttctaatggattggggtccatagatgacatcgaaacagactgctacgtggaccctcgaggctccccagcccttctcccctccacgcccacgatgcccctgttccctcacgttctggacc

SEQ ID NO: 114955 - DNA, 120 bp, Artificial Sequence
  ENSG00000100403_8 (sequence is synthesized)
tgctggcccccctggacagcagcaggaccctccccagcaccgacagcctggatgacttctcagacggggatgtctttggcccagagctggacaccctcctggactcgctgtctctggtcc

SEQ ID NO: 114956 - DNA, 120 bp, Artificial Sequence
  ENSG00000100403_9 (sequence is synthesized)
agggtggcctgtctggcagcggcgtgcctagtgagttgccccagctgatacccgtgttccccggcgggaccccactgctaccacctgtggtgggtggctccatccctgtctccagcccac

SEQ ID NO: 114957 - DNA, 120 bp, Artificial Sequence
  ENSG00000100403_10 (sequence is synthesized)
tgccccccgcctccttcggcttggtcatggacccctccaagaagctggccgcctctgtgctggatgccctcgatcccccgggccccacgctggaccccctggacctgctgccgtactcgg

SEQ ID NO: 114958 - DNA, 120 bp, Artificial Sequence
  ENSG00000100403_11 (sequence is synthesized)
agacccggctggatgcactcgacagctttgggtcgacacgaggctccctggacaaacctgactccttcatggaggagaccaactcacaggaccaccgtccccctagcggtgctcagaaac

SEQ ID NO: 114959 - DNA, 120 bp, Artificial Sequence
  ENSG00000100403_12 (sequence is synthesized)
cagccccctcgccagagccctgcatgcccaacactgccttgctcatcaagaaccccttggctgccacccacgagttcaagcaggcctgccagctctgctaccccaagacaggcccccggg

SEQ ID NO: 114960 - DNA, 120 bp, Artificial Sequence
  ENSG00000100403_13 (sequence is synthesized)
ctggcgactacacctaccgtgagggccttgagcacaagtgcaagcgggacatcctgctcggccggctccggagctcggaggaccagacctggaagcggatccggccccggcccactaaga

SEQ ID NO: 114961 - DNA, 120 bp, Artificial Sequence
  ENSG00000100403_14 (sequence is synthesized)
ccagcttcgtgggctcctactacctgtgcaaagacatgattaacaagcaggactgtaagtacggggataactgcaccttcgcctaccatcaggaggagatcgacgtgtggaccgaggagc

SEQ ID NO: 114962 - DNA, 120 bp, Artificial Sequence
  ENSG00000100403_15 (sequence is synthesized)
ggaagggcaccctcaaccgcgacctgctcttcgacccgctggggggtgttaagcgcggcagcctcaccatcgccaagctcctgaaggagcaccagggcatcttcaccttcctctgcgaga

SEQ ID NO: 114963 - DNA, 120 bp, Artificial Sequence
  ENSG00000100403_16 (sequence is synthesized)
tctgctttgacagtaaaccccggatcatcagcaaaggcaccaaggactctccgtctgtctgctccaacctggctgccaagcacagcttctacaacaacaagtgcctggtgcacatcgtcc

SEQ ID NO: 114964 - DNA, 120 bp, Artificial Sequence
  ENSG00000100403_17 (sequence is synthesized)
gctccacctccctcaagtactccaagatccgccagttccaggagcacttccagttcgacgtgtgccgccatgaggtgcgctacggctgcctgcgggaggacagctgccacttcgcccaca

SEQ ID NO: 114965 - DNA, 120 bp, Artificial Sequence
  ENSG00000100403_18 (sequence is synthesized)
gcttcatcgagctcaaggtctggctgctgcagcagtactcaggcatgacccacgaagacatcgttcaggagtctaagaagtactggcagcagatggaggcgcatgcggggaaggccagca

SEQ ID NO: 114966 - DNA, 120 bp, Artificial Sequence
  ENSG00000100403_19 (sequence is synthesized)
gcagcatgggtgctccgaggacacatgggcccagcacctttgacctgcagatgaagtttgtatgtggccagtgctggagaaacgggcaggtggtggagcctgacaaggacctcaagtact

SEQ ID NO: 114967 - DNA, 120 bp, Artificial Sequence
  ENSG00000100403_20 (sequence is synthesized)
gtagtgccaaggcccggcactgctggaccaaggagcggcgggtccttctggtgatgtccaaggccaagaggaaatgggtgtcagtgaggccactgccatccattcgtaacttcccacagc

SEQ ID NO: 114968 - DNA, 120 bp, Artificial Sequence
  ENSG00000100403_21 (sequence is synthesized)
aatacgatctctgcatccatgcacagaacggccgcaagtgccaatatgtggggaactgctccttcgcacacagcccggaggagagggacatgtggaccttcatgaaggagaacaagatcc

SEQ ID NO: 114969 - DNA, 120 bp, Artificial Sequence
  ENSG00000100403_22 (sequence is synthesized)
tggacatgcagcagacctatgacatgtggctgaaaaaacacaacccaggaaagcctggagaagggacccccatcagttctcgggaaggggagaagcagatccagatgcccacggactacg

SEQ ID NO: 114970 - DNA, 120 bp, Artificial Sequence
  ENSG00000100403_23 (sequence is synthesized)
cggacatcatgatgggctaccactgctggctctgcggcaagaacagcaacagcaagaagcagtggcagcagcacatccagtccgagaagcacaaggagaaggtcttcacgtccgacagtg

SEQ ID NO: 114971 - DNA, 120 bp, Artificial Sequence
  ENSG00000100403_24 (sequence is synthesized)
cccatgggcgagttccggctctgcgacaggctccagaagggcaaagcctgcccagatggggacaagtgccgctgcgcccatggacaggaggagctcaacgagtggctggaccggcgcgag

SEQ ID NO: 114972 - DNA, 120 bp, Artificial Sequence
  ENSG00000100403_25 (sequence is synthesized)
gtgctgaagcagaagttggccaaggctcgcaaggacatgctgctgtgcccacgggacgacgactttggcaaatacaacttcctgctgcaagaggacggggaccttgccggtgccacccca

SEQ ID NO: 114973 - DNA, 120 bp, Artificial Sequence
  ENSG00000100403_26 (sequence is synthesized)
gaagcccctgctgctgctgccaccgccaccactggggagtagggccaggtgttggccgtgggtgaagtcctggggtcagggggtggggtggggccagaaggcctgatagaagggtcaggg

SEQ ID NO: 114974 - DNA, 120 bp, Artificial Sequence
  ENSG00000100403_27 (sequence is synthesized)
caggccaggggggtggggggccgccctcatcaggcagcccccagccccctgaggccctgtccatcttctccccaccaccgccccggtgtgcgtacccaggcgcacgtgctgcagcccccg

SEQ ID NO: 114975 - DNA, 120 bp, Artificial Sequence
  ENSG00000100403_28 (sequence is synthesized)
gaggccccgctgaaacctgggctgcccttcccccacccccacggctctcctggttgaggagggaggggcctggctgacccctccagcttcagcctccagctttaacttctgtctgctcct

SEQ ID NO: 114976 - DNA, 120 bp, Artificial Sequence
  ENSG00000100403_29 (sequence is synthesized)
aatgggggcccaaagctcagggctggggagcctggggtccccacttgaatctccagcaggagggtccttctctccctggcccgtcctcctcccaccccctccccctgggggcaaatcagg

SEQ ID NO: 114977 - DNA, 120 bp, Artificial Sequence
  ENSG00000100403_30 (sequence is synthesized)
acacaacagagggcagaggccccattagctttaaaatgtagccccaggttggagctgggaacactgtactggccacttaccctctggggcctcagctttccctccggaaggctgggagga

SEQ ID NO: 114978 - DNA, 120 bp, Artificial Sequence
  ENSG00000100403_31 (sequence is synthesized)
ggtgggctagatgatctttggagcttaaggagtcccagccctttctctgatgccaccacctgaaccctgctccctcgtgggccagtgaaaatagactgtaggtcctcagagccttcagag

SEQ ID NO: 114979 - DNA, 120 bp, Artificial Sequence
  ENSG00000100403_32 (sequence is synthesized)
atgatccagcccaaaccccattttgcagagaggaaaactgaggcctagaagggaggagtggtccacccacggtcccagcacaaggcagagctgggatgaaaacagggctgaaaagactca

SEQ ID NO: 114980 - DNA, 120 bp, Artificial Sequence
  ENSG00000100403_33 (sequence is synthesized)
gggccaattattggctgagcccacggtcccctcagcagggatgcgatggtctctgaatcagtgtgcagctggggtcccaggcagcgctgcctgggggctggggaggggaggcccagagga

SEQ ID NO: 114981 - DNA, 120 bp, Artificial Sequence
  ENSG00000100403_34 (sequence is synthesized)
gggctggccatgtgagcaccccatgaagggaccgccccctcccaaggatggtccctttgggtgcagcagcagaggtcacctcctgacatgcgctctgggaaaggtggcagagggcaggac

SEQ ID NO: 114982 - DNA, 120 bp, Artificial Sequence
  ENSG00000100403_35 (sequence is synthesized)
accatgagctcaggatctgtgtgaggtgtgggaggtgggaagggtgagggtctgggggaatgcggagaaaagggaggcttgaccccgggcaccatgggccactccaggatgggacacggc

SEQ ID NO: 114983 - DNA, 120 bp, Artificial Sequence
  ENSG00000100403_36 (sequence is synthesized)
ccctctttcttggggacccagtatgtcctctcctctagacccagacatacagttataaccgtctgtcctagcccctccctaatccctggccctcccagctgtctgggacttcagtggacc

SEQ ID NO: 114984 - DNA, 120 bp, Artificial Sequence
  ENSG00000100403_37 (sequence is synthesized)
cccagcccctgcccccactcaccaaggcctcgctcgtccctctcgtctgacatgtctgtgtgcacccccctcctctccaccctaccttccatcaaccagggcagatccaccgtgccctgg

SEQ ID NO: 114985 - DNA, 120 bp, Artificial Sequence
  ENSG00000100403_38 (sequence is synthesized)
ttccccagacattccagaatgccccacatcattggcacaggagtggggcagccccggaaggaaccagggattaggctgtaggggggtgagaaggagagaagggaccaccccattcttctc

SEQ ID NO: 114986 - DNA, 120 bp, Artificial Sequence
  ENSG00000100403_39 (sequence is synthesized)
aagcaaggattgccagcgcgcgctgacacagtgatgggctgcccagggctggaggggacgctgttcctcccgccgccactgcccaacctttcctgataatcgtggcatgcgccctttcct

SEQ ID NO: 114987 - DNA, 120 bp, Artificial Sequence
  ENSG00000100403_40 (sequence is synthesized)
cttccctgccccaccccctggccgcagcaggccagcactgcagagtttgggtgctggtggtgtggctgtaggggaggggagaccacacccaaggtgggggctgtggccatgtgtggccgt

SEQ ID NO: 114988 - DNA, 120 bp, Artificial Sequence
  ENSG00000100403_41 (sequence is synthesized)
gatgtcgatgatactcgttttccctgatccgtggtgttgcagtccgttgtcaccagccttgtttctagtgtgtatatatgtcgcccccgtgatgcatatatacacaggtattaaatatat

SEQ ID NO: 114989 - DNA, 120 bp, Artificial Sequence
  ENSG00000100403_42 (sequence is synthesized)
cgctctatataatattatatatgtgtgtggtatccaaggaatcacttttatgagggctaaagataaagaatttggccagaaaatgcagccatccttgtgtgattaggagggtttcagggg

SEQ ID NO: 114990 - DNA, 120 bp, Artificial Sequence
  ENSG00000100403_43 (sequence is synthesized)
ccactggactatttgcaaggtgacagggactggagccatggctcagaggtgattcgggcagccagggacaggagccaccctccccaggcccaactctgctagcttcccagaccaccccca

SEQ ID NO: 114991 - DNA, 120 bp, Artificial Sequence
  ENSG00000100403_44 (sequence is synthesized)
tcgagtgcggagagagtgggagtgctcagggaaagaaggtgatttgtatttgtctccccgctgaaaagaacaggattcaagtccagagttttcatcttcagcctgtgatctgtccaggga

SEQ ID NO: 114992 - DNA, 120 bp, Artificial Sequence
  ENSG00000100403_45 (sequence is synthesized)
cccttgggatctggggcttcctggcctggccagagctggagcccccacagggtaaggaagagagagtgggaggcagagtgtgatggggaggagggacaggaagacccttttaatgatgag

SEQ ID NO: 114993 - DNA, 120 bp, Artificial Sequence
  ENSG00000100403_46 (sequence is synthesized)
ggtaactatttcagttgtgagccttctagggccccaggctgggaggctcagaggactgaatctgggacctgtgttccccccggcaggcagggacaagatggcatggcaagcatgggggcg

SEQ ID NO: 114994 - DNA, 120 bp, Artificial Sequence
  ENSG00000100403_47 (sequence is synthesized)
gggtgggtggggagggatgctgcatttctcagctgggcagtaatcaatttaatggtcctttaaaatgtctgtgtattaaaaatttaagaataccacactttaatattaaatattcataag

SEQ ID NO: 114995 - DNA, 120 bp, Artificial Sequence
  ENSG00000100403_48 (sequence is synthesized)
gtctagtatcttgataataatgtagatgttttaataacaatttttgtccttcttaaaataaaatgaaagaaacttgcttcccttagcctttgttctagaaaataaacttgtgcactttga

SEQ ID NO: 114996 - DNA, 120 bp, Artificial Sequence
  ENSG00000100403_49 (sequence is synthesized)
aatgacctcaggcagtgggtccaggggcctccgcctccctaggaggtacctcccgtgtccacgggggcaggatgtggggacaggccatggctgctgttggcagggagtggtcattgccgg

SEQ ID NO: 114997 - DNA, 120 bp, Artificial Sequence
  ENSG00000100403_50 (sequence is synthesized)
ggagccgccgggggcagcctcactcttgaaccctggccaggacacagtctgggcagcctggtcccacacgccttccttctgcctcctgccccacatttcctgctgtgttgccttttttct

SEQ ID NO: 114998 - DNA, 120 bp, Artificial Sequence
  ENSG00000100403_51 (sequence is synthesized)
caccagcctttctgcaggttcaggcccctgggcctcaaatgtcttcctcttccccaccctgcctttctctgtcttttcgcttttcaaagcccagctcaagggcatgcccctgccgaaacc

SEQ ID NO: 114999 - DNA, 120 bp, Artificial Sequence
  ENSG00000100403_52 (sequence is synthesized)
catcctgctctccctggctcagtgactctgcttgggaggggcagccgagactgaggactctgacaaggaagagcccaactgggccctgcagccttgggcaggtccttcagtttctgcatt

SEQ ID NO: 115000 - DNA, 120 bp, Artificial Sequence
  ENSG00000100403_53 (sequence is synthesized)
ctgaaatgcggaccatccctcaacgggaacaagggaggaaagtgcttgataacctggcacacacgacccagcaggaaatgcagtgggcagtcactgtggatagctgctgtgctgtcctga

SEQ ID NO: 115001 - DNA, 120 bp, Artificial Sequence
  ENSG00000100403_54 (sequence is synthesized)
gttggggactcctcccaagggccaagacacttgtgcaccccagtcaggcctggctcatcccaggggggtgaggcagggcctggcacacgactgagacccctgcccgctgctcaggtagac

SEQ ID NO: 115002 - DNA, 120 bp, Artificial Sequence
  ENSG00000100403_55 (sequence is synthesized)
tttgaggctttctggaaagtgagagatgggctataagagcactgatggagcctggggtcctgccaccttgtacattaagggaaactgaggcacagagtggggaggggacggggccagtgt

SEQ ID NO: 115003 - DNA, 120 bp, Artificial Sequence
  ENSG00000100403_56 (sequence is synthesized)
cacacagcgaggcagcagcaggcctccctcctccagagctttgcagcactttctttcattcattccataaggaggcccacaaaacactctcggccctgggcctgagagagctgcgtcctt

SEQ ID NO: 115004 - DNA, 120 bp, Artificial Sequence
  ENSG00000100403_57 (sequence is synthesized)
gcgtccttgccctcagggacctcccagcctgcaaagtaggcagttgatgatctgcctttgtagcactcatggtttataatcagaaattataggtcaggcatggtggctcatgcctgtaat

SEQ ID NO: 115005 - DNA, 77 bp, Artificial Sequence
  ENSG00000100403_58 (sequence is synthesized)
cttgaacccaggaggcaagagacagaatgagactccatctgaaaaataaaagaaattattaggcctggcacatacca

SEQ ID NO: 115006 - DNA, 120 bp, Artificial Sequence
  ENSG00000100403_59 (sequence is synthesized)
tctgaaaaataaaagaaattattaggcctggcacataccaggtgctccaacgagaaaacattaaatgaatgaaaggtgatttgtctaagtttacccagtatgggccaagcactgagcttg

SEQ ID NO: 115007 - DNA, 120 bp, Artificial Sequence
  ENSG00000100403_60 (sequence is synthesized)
gggttgggtatgtgataaacaaaacaaatctgtttcctgccctcaaagagctcacagtctaggatggacattaggacattaggcagatcatttctggtttcaaactgtgatgagggctgt

SEQ ID NO: 115008 - DNA, 120 bp, Artificial Sequence
  ENSG00000100403_61 (sequence is synthesized)
gaaggcagagtatggggagacctgggccattgagactgggagccctgatttagacaggattcagtgacatttaagctgagaccggaaggttgaagagttaggggcagggtgtgcaggtga

SEQ ID NO: 115009 - DNA, 120 bp, Artificial Sequence
  ENSG00000100403_62 (sequence is synthesized)
aacagcattccagaccaggtggaaggtatgtgcaaaggccctgaggcctggaggagctcagagtgtgggaggaaccaacaccaaggcagagctgggggtcctggaacaggagatagaagc

SEQ ID NO: 115010 - DNA, 120 bp, Artificial Sequence
  ENSG00000100403_63 (sequence is synthesized)
gcactgctttgtacccagtgtcagttcagacactgggaatagagcaccaaggtagcgtctcatcacagcaagtggagctgggctgggcaggcacagcagatgctcaaaaaatatttgttg

SEQ ID NO: 115011 - DNA, 120 bp, Artificial Sequence
  ENSG00000100403_64 (sequence is synthesized)
aatgattgaatgactgcggccagggggccacagcaaatatgggctgaatgcccagctctccagggccaaggccgcaaagccttgcttagtctgcagccagatgaccacagatggtgccat

SEQ ID NO: 115012 - DNA, 120 bp, Artificial Sequence
  ENSG00000100403_65 (sequence is synthesized)
acctggcaccaggccccccccagtccctgccaggctgttcacccatccctgcaatcttgctgggctcctcctgcacattcatagaggtcaggagggcatggttagggagggctctaagaa

SEQ ID NO: 115013 - DNA, 120 bp, Artificial Sequence
  ENSG00000100403_66 (sequence is synthesized)
gcccacagtggagaggaccagttcagaccctgcctcatgaactcagtttgcccaacatggtacagcacacatgtgagcacacacatgtgcacatgcacaaacggagtgccctaggacaca

SEQ ID NO: 115014 - DNA, 120 bp, Artificial Sequence
  ENSG00000100403_67 (sequence is synthesized)
tgagggcagggtggtgtcccagccagagcccctggccttccgtgagttgtgcacagacacaagtaaatgcaggctgcaggggtccctgtaggttctccaccatgagcaccatattcattc

SEQ ID NO: 115015 - DNA, 120 bp, Artificial Sequence
  ENSG00000100403_68 (sequence is synthesized)
agccggctggtcatttcacatgtgcacctggaagtggggatggaccaggctgtgcccacagggagcttcttatgacctaggagccaggcagaggccctgcaagacagtgtctgtgcaaga

SEQ ID NO: 115016 - DNA, 120 bp, Artificial Sequence
  ENSG00000100403_69 (sequence is synthesized)
gctgtccctggcatcgtggggaacaagatgcaaggagggctgtgagttccaggaacagagagcccaaggcagccttggttggaaagggcttcagcgagccagggaagcaagactaagagg

SEQ ID NO: 115017 - DNA, 120 bp, Artificial Sequence
  ENSG00000100403_70 (sequence is synthesized)
aagggagagctggagagggggaaatggcactcatgaccaggagcacagcctgcacaaaggctaagcagcaaaagagacagacaccccagatcacaagaccagttcctcctatggggctcg

SEQ ID NO: 115018 - DNA, 120 bp, Artificial Sequence
  ENSG00000100403_71 (sequence is synthesized)
gaatagcctgggctctgcagtggaacgtgctttggatcagatcctgagcacgctccttatctacgcaggccactccacccctcagagccttggcttccttctcttttgcaggggtccggt

SEQ ID NO: 115019 - DNA, 120 bp, Artificial Sequence
  ENSG00000100403_72 (sequence is synthesized)
acctgccattttgtgggggttatagaattacaatgggtcaatgtgaaagctcccagcagggcgtctgcagaagagatagagctccatagacctttgttgccaaacagatgtcaccagaag

SEQ ID NO: 115020 - DNA, 120 bp, Artificial Sequence
  ENSG00000100403_73 (sequence is synthesized)
gagtgccatgcagaagggcaggaacagtgagcctggcaggctggggtgatggcatgggcaggagggctgagaaggtgactttgtcctgcgtggcctgggagccatgggcaggatctagca

SEQ ID NO: 115021 - DNA, 120 bp, Artificial Sequence
  ENSG00000100403_74 (sequence is synthesized)
gggagaatcaccgctttccctagagatgttcatctggtacctctctttccctcaaagactttatgtacttaccatgaggatagcagctctgtgatccagcgtggcggccttggtttggca

SEQ ID NO: 115022 - DNA, 120 bp, Artificial Sequence
  ENSG00000100403_75 (sequence is synthesized)
gccaatctatggtgggcagacactccggagactgaagtgcacacatttgccatgtgctctatggcaggctcaggtgtgggaaggaggtgcagggtgttggtgcaggtatggatgggggag

SEQ ID NO: 115023 - DNA, 120 bp, Artificial Sequence
  ENSG00000100403_76 (sequence is synthesized)
tgtacagttccaggggacagagtcaggacaggctcttgggtcagacagccctgctctgatctgtgcatagcagctttctgggctgacatttccatgccgtgggatgatacctcgcagggc

SEQ ID NO: 115024 - DNA, 120 bp, Artificial Sequence
  ENSG00000100403_77 (sequence is synthesized)
gcctggaccgagggctaaaccccacagtgggtgtgagatgctggcctgggctggcgtgaggcaggatgctggatgagtctagctgctggtcctgtggctgctggtcctgggaaaggaagg

SEQ ID NO: 115025 - DNA, 120 bp, Artificial Sequence
  ENSG00000100403_78 (sequence is synthesized)
ctagtggtggagtctggtcctccatccggctctccgtggggacacagaaagggtggggccacccagggcctcaccagggaagcaggacttgagctggactgtgaaggactcagagaaaaa

SEQ ID NO: 115026 - DNA, 120 bp, Artificial Sequence
  ENSG00000100403_79 (sequence is synthesized)
ggggagggtgttcaggacagggaaggatgcaccacagcctggaggttggagtgtgggaactgttgaacgaaacagcagctctcccagcccaacttccagaaactgtgcatctaatcaaca

SEQ ID NO: 115027 - DNA, 89 bp, Artificial Sequence
  ENSG00000100403_80 (sequence is synthesized)
tatatatatatattcaaaaattagctgggcatggtggcatgcttctgtaatcccagctactcaggaggccgagattagagaatcacttg

SEQ ID NO: 115028 - DNA, 120 bp, Artificial Sequence
  ENSG00000100403_81 (sequence is synthesized)
atattcaaaaattagctgggcatggtggcatgcttctgtaatcccagctactcaggaggccgagattagagaatcacttgaatgtgggagtcggaggttgtagtgagctgagatcacacc

SEQ ID NO: 115029 - DNA, 120 bp, Artificial Sequence
  ENSG00000100410_0 (sequence is synthesized)
agttcccgaagcttccggtggccggcttagttaggagctatggctaaacatcatcctgatttgatcttttgccgcaagcaggctggtgttgccatcggaagactgtgtgaaaaatgtgat

SEQ ID NO: 115030 - DNA, 120 bp, Artificial Sequence
  ENSG00000100410_1 (sequence is synthesized)
ggcaagtgtgtgatttgtgactcctatgtgcgtccctgcactctggtgcgcatatgtgatgagtgtaactatggatcttaccaggggcgctgtgtgatctgtggaggacctggggtctct

SEQ ID NO: 115031 - DNA, 120 bp, Artificial Sequence
  ENSG00000100410_2 (sequence is synthesized)
gatgcctattattgtaaggagtgcaccatccaggagaaggacagagatggctgcccaaagattgtcaatctggggagctctaagacagacctcttctatgaacgcaaaaaatacggcttc

SEQ ID NO: 115032 - DNA, 120 bp, Artificial Sequence
  ENSG00000100410_3 (sequence is synthesized)
aagaagaggtgattggtgggtggccccttcctccccccaacatcagtctgctgcagctgccagaaaacatgcctactactaccagcagaaagggagcagagcccagagcatcaccaggag

SEQ ID NO: 115033 - DNA, 120 bp, Artificial Sequence
  ENSG00000100410_4 (sequence is synthesized)
ggcacaccatatcggagaaaacttgatagattagttaatggtttttcttgaattcgagaagcaaagatctgttctccatattggtatgttctccctcaaccaagatcttctaaaaagaaa

SEQ ID NO: 115034 - DNA, 120 bp, Artificial Sequence
  ENSG00000100410_5 (sequence is synthesized)
taatattttagtcttctgcttgaggaactgactgtgaagcgacgcccagtgaaaaacatgttcttgcagcagctctggtggcagctgtccttgaggaacctttggtgtgtggtgggaagc

SEQ ID NO: 115035 - DNA, 120 bp, Artificial Sequence
  ENSG00000100410_6 (sequence is synthesized)
tatcagaacaagaaatgtaggcatttcccgttttttttggggggggggtgggggggcagggctctgccctcttgaaaggcatttacttgtttaacacttgtccagctacagtggggtaca

SEQ ID NO: 115036 - DNA, 120 bp, Artificial Sequence
  ENSG00000100410_7 (sequence is synthesized)
gtagctggctattcacaggcatcatcatagcccactagtctcatattattttccttttgagaaattggaaactctttctgttgctattatattaataaagttggtgtttattttctggta

SEQ ID NO: 115037 - DNA, 120 bp, Artificial Sequence
  ENSG00000100410_8 (sequence is synthesized)
tttgccgcaagcaggctggtgttgccatcggaagactgtgtgaaaaatgtgagtggaacacaccgtcccaacaacccacccttcccactcccagttttctgtggaaccagcaaaagtgcc

SEQ ID NO: 115038 - DNA, 120 bp, Artificial Sequence
  ENSG00000100412_0 (sequence is synthesized)
aatgcgacctcatctttgtcagtgcacaaaatggcgccctacagcctactggtgactcggctgcagaaagctctgggtgtgcggcagtaccatgtggcctcagtcctgtgccaacgggcc

SEQ ID NO: 115039 - DNA, 120 bp, Artificial Sequence
  ENSG00000100412_1 (sequence is synthesized)
aaggtggcgatgagccactttgagcccaacgagtacatccattatgacctgctagagaagaacattaacattgttcgcaaacgactgaaccggccgctgacactctcggagaagattgtg

SEQ ID NO: 115040 - DNA, 120 bp, Artificial Sequence
  ENSG00000100412_2 (sequence is synthesized)
tatggacacctggatgaccccgccagccaggaaattgagcgaggcaagtcgtacctgcggctgcggccggaccgtgtggccatgcaggatgcgacggcccagatggccatgctccagttc

SEQ ID NO: 115041 - DNA, 120 bp, Artificial Sequence
  ENSG00000100412_3 (sequence is synthesized)
atcagcagcgggctgtccaaggtggctgtgccatccaccatccactgtgaccatctgattgaagcccaggttgggggcgagaaagacctgcgccgggccaaggacatcaaccaggaagtt

SEQ ID NO: 115042 - DNA, 120 bp, Artificial Sequence
  ENSG00000100412_4 (sequence is synthesized)
tataatttcctggcaactgcaggtgccaaatatggcgtgggcttctggaagcctggatctggaatcattcaccagattattctggaaaactatgcgtaccctggtgttcttctgattggc

SEQ ID NO: 115043 - DNA, 120 bp, Artificial Sequence
  ENSG00000100412_5 (sequence is synthesized)
actgactcccacacccccaatggtggcggccttgggggcatctgcattggagttgggggtgccgatgctgtggatgtcatggctgggatcccctgggagctgaagtgccccaaggtgatt

SEQ ID NO: 115044 - DNA, 120 bp, Artificial Sequence
  ENSG00000100412_6 (sequence is synthesized)
ggcgtgaagctgacgggctctctctccggttggtcctcacccaaagatgtgatcctgaaggtggcaggcatcctcacggtgaaaggtggcacaggtgcaatcgtggaataccacgggcct

SEQ ID NO: 115045 - DNA, 120 bp, Artificial Sequence
  ENSG00000100412_7 (sequence is synthesized)
ggtgtagactccatctcctgcactggcatggcgacaatctgcaacatgggtgcagaaattggggccaccacttccgtgttcccttacaaccacaggatgaagaagtacctgagcaagacc

SEQ ID NO: 115046 - DNA, 120 bp, Artificial Sequence
  ENSG00000100412_8 (sequence is synthesized)
ggccgggaagacattgccaatctagctgatgaattcaaggatcacttggtgcctgaccctggctgccattatgaccaactaattgaaattaacctcagtgagctgaagccacacatcaat

SEQ ID NO: 115047 - DNA, 120 bp, Artificial Sequence
  ENSG00000100412_9 (sequence is synthesized)
gggcccttcacccctgacctggctcaccctgtggcagaagtgggcaaggtggcagagaaggaaggatggcctctggacatccgagtgggtctaattggtagctgcaccaattcaagctat

SEQ ID NO: 115048 - DNA, 120 bp, Artificial Sequence
  ENSG00000100412_10 (sequence is synthesized)
gaagatatggggcgctcagcagctgtggccaagcaggcactggcccatggcctcaagtgcaagtcccagttcaccatcactccaggttccgagcagatccgcgccaccattgagcgggac

SEQ ID NO: 115049 - DNA, 120 bp, Artificial Sequence
  ENSG00000100412_11 (sequence is synthesized)
agggggagaagaacacaatcgtcacctcctacaacaggaacttcacgggccgcaacgacgcaaaccccgagacccatgcctttgtcacgtccccagagattgtcacagccctggccattg

SEQ ID NO: 115050 - DNA, 120 bp, Artificial Sequence
  ENSG00000100412_12 (sequence is synthesized)
cgggaaccctcaagttcaacccagagaccgactacctgacgggcacggatggcaagaagttcaggctggaggctccggatgcagatgagcttcccaaaggggagtttgacccagggcagg

SEQ ID NO: 115051 - DNA, 120 bp, Artificial Sequence
  ENSG00000100412_13 (sequence is synthesized)
acacctaccagcacccacccaaggacagcagcgggcagcatgtggacgtgagccccaccagccagcgcctgcagctcctggagccttttgacaagtgggatggcaaggacctggaggacc

SEQ ID NO: 115052 - DNA, 120 bp, Artificial Sequence
  ENSG00000100412_14 (sequence is synthesized)
tgcagatcctcatcaaggtcaaagggaagtgtaccactgaccacatctcagctgctggcccctggctcaagttccgtgggcacttggataacatctccaacaacctgctcattggtgcca

SEQ ID NO: 115053 - DNA, 120 bp, Artificial Sequence
  ENSG00000100412_15 (sequence is synthesized)
tcaacattgaaaacggcaaggccaactccgtgcgcaatgccgtcactcaggagtttggccccgtccctgacactgcccgctactacaagaaacatggcatcaggtgggtggtgatcggag

SEQ ID NO: 115054 - DNA, 120 bp, Artificial Sequence
  ENSG00000100412_16 (sequence is synthesized)
acgagaactacggcgagggctcgagccgggagcatgcagctctggagcctcgccaccttgggggccgggccatcatcaccaagagctttgccaggatccacgagaccaacctgaagaaac

SEQ ID NO: 115055 - DNA, 120 bp, Artificial Sequence
  ENSG00000100412_17 (sequence is synthesized)
agggcctgctgcctctgaccttcgctgacccggctgactacaacaagattcaccctgtggacaagctgaccattcagggcctgaaggacttcacccctggcaagcccctgaagtgcatca

SEQ ID NO: 115056 - DNA, 120 bp, Artificial Sequence
  ENSG00000100412_18 (sequence is synthesized)
tcaagcaccccaacgggacccaggagaccatcctcctgaaccacaccttcaacgagacgcagattgagtggttccgcgctggcagtgccctcaacagaatgaaggaactgcaacagtgag

SEQ ID NO: 115057 - DNA, 120 bp, Artificial Sequence
  ENSG00000100412_19 (sequence is synthesized)
ggcagtgcctccccgccccgccgctggcgtcaagttcagctccacgtgtgccatcagtggatccgatccgtccagccatggcttcctattccaagatggtgtgaccagacatgcttcctg

SEQ ID NO: 115058 - DNA, 120 bp, Artificial Sequence
  ENSG00000100412_20 (sequence is synthesized)
ctccccgcttagcccacggagtgactgtggttgtggtgggggggttcttaaaataactttttagcccccgtcttcctattttgagtttggttcagatcttaagcagctccatgcaactgt

SEQ ID NO: 115059 - DNA, 120 bp, Artificial Sequence
  ENSG00000100412_21 (sequence is synthesized)
atttatttttgatgacaagactcccatctaaagtttttctcctgcctgatcatttcattggtggctgaaggattctagagaaccttttgttcttgcaaggaaaacaagaatccaaaacca

SEQ ID NO: 115060 - DNA, 120 bp, Artificial Sequence
  ENSG00000100412_22 (sequence is synthesized)
tgtgaagagcatggagcctggagccagatggcctgggcttgaatcctggctctgccacctaacagccactaacagctgagtgaccctgagcaaactacttcactgtctatgtgtgggttc

SEQ ID NO: 115061 - DNA, 120 bp, Artificial Sequence
  ENSG00000100412_23 (sequence is synthesized)
cccatctgtaaaacaggagtcatgatcgtactgacacctttgaaggtggtgttgggcctactgctgctatcaccaatgagaaaaataaataaaaaataaagttgtctggagaagtgacaa

SEQ ID NO: 115062 - DNA, 120 bp, Artificial Sequence
  ENSG00000100412_24 (sequence is synthesized)
gcctactggtgactcggctgcaggtgagcgagctcagggacctctgggttcacgggggcggggtgcctcctactgtgccggcggctgtgggcgaggcagggcgaggcgggcccaacctgg

SEQ ID NO: 115063 - DNA, 120 bp, Artificial Sequence
  ENSG00000100412_25 (sequence is synthesized)
ggccaacttctcgtgtacctgtcccggttgtgggcccggcacccgtgcccgcttctctggtgccctaggtcaaggcgtccccggcacagtcagctttcctggccctgtccctgcctcgca

SEQ ID NO: 115064 - DNA, 120 bp, Artificial Sequence
  ENSG00000100412_26 (sequence is synthesized)
tcacttgagaatctgtctgttccatttggggacttgggatagacagaggtagaaggaaaattggagacagcattagagattgtctagtccacatcctcattaaacagatgaagagattga

SEQ ID NO: 115065 - DNA, 120 bp, Artificial Sequence
  ENSG00000100412_27 (sequence is synthesized)
catggcctcccctcaccggcccaggtttttacccagggcctcaagggatgagtcggcccgctgtcaccacatctctctgagtgggaggagaagcaatgcagctccctggtgtgaagatgc

SEQ ID NO: 115066 - DNA, 120 bp, Artificial Sequence
  ENSG00000100412_28 (sequence is synthesized)
gcgtgggcttctggaagcctggatctggaatcattcaccaggtaaagctgggctcagtctgccgtcccaagggcccaagccagagaagtatgttccaggcctatggggggagggggtttg

SEQ ID NO: 115067 - DNA, 120 bp, Artificial Sequence
  ENSG00000100412_29 (sequence is synthesized)
aggcccaggggggctgaggggaactggatgacatatccatcagctcttatgctcttcctcctttgttttgaaactgattttcattatgtcattatacgtgctcattttctgggtgagaag

SEQ ID NO: 115068 - DNA, 120 bp, Artificial Sequence
  ENSG00000100412_30 (sequence is synthesized)
ttaaaataatacctcctaaccacccaggtaaccagcattttaagtgcgacatgtttctttccacattgtcttctgggtgtgtactcaagcatctctattcccataaactctcatacagaa

SEQ ID NO: 115069 - DNA, 120 bp, Artificial Sequence
  ENSG00000100413_0 (sequence is synthesized)
agtcgcgcaagcgcgagcggctgtgcgcggtgcgtggtgcgtggtgcgtgatacgagcggcggcacgtggcgcgggtgcggggcgtggagtggcgtggcgtggagtggcgtggcgtggcg

SEQ ID NO: 115070 - DNA, 120 bp, Artificial Sequence
  ENSG00000100413_1 (sequence is synthesized)
gggtctcgcggcgcgggcgcgcacccggagctgtggacggagagtgcctccctctggcctcagtttcctcatgttgtagtagcggagcatggcccggaccgggcccccgagaccgccccg

SEQ ID NO: 115071 - DNA, 120 bp, Artificial Sequence
  ENSG00000100413_2 (sequence is synthesized)
tgcaacctcaccgccagcctgggggcctcagcgactgggacgggaccaaggggctcggggattctccctgcccccggccctggtgcgtgactgaccctcctgttcccagagcccccagcg

SEQ ID NO: 115072 - DNA, 120 bp, Artificial Sequence
  ENSG00000100413_3 (sequence is synthesized)
caggccgggatgttcgtcctggtggaaatggtggacaccgtccggatccccccttggcagtttgagaggaagctcaacgactccattgccgaggagctgaacaagaagttggccaacaag

SEQ ID NO: 115073 - DNA, 120 bp, Artificial Sequence
  ENSG00000100413_4 (sequence is synthesized)
gtcgtgtacaacgtgggactctgcatttgtctgtttgatatcaccaaactggaggatgcctatgtattccctggggatggcgcatcacacaccaaagtccattttcgctgcgtggtgttt

SEQ ID NO: 115074 - DNA, 120 bp, Artificial Sequence
  ENSG00000100413_5 (sequence is synthesized)
catccattcctagatgagattctcattgggaagatcaaaggctgcagcccagaaggagtgcacgtctctctaggcttcttcgatgacattctcatccccccagagtcactgcagcagcca

SEQ ID NO: 115075 - DNA, 120 bp, Artificial Sequence
  ENSG00000100413_6 (sequence is synthesized)
gccaagttcgacgaagcggagcaggtgtgggtgtgggagtacgagacggaggaaggagcacacgacctctacatggacaccggcgaggagatccgcttccgggtggtggacgagagcttt

SEQ ID NO: 115076 - DNA, 120 bp, Artificial Sequence
  ENSG00000100413_7 (sequence is synthesized)
gttgacacgtcccccacagggcccagctcagcagatgccaccacttccagtgaggagctgccaaagaaggaggctccgtacacgcttgtgggatccatcagtgagccaggcctgggcctt

SEQ ID NO: 115077 - DNA, 120 bp, Artificial Sequence
  ENSG00000100413_8 (sequence is synthesized)
ctctcctggtggaccagcaactagccctggggctggacagtggaccctaccagcctgcgggaaggtggtatggccggctgtgaagacaacagcagctgaggccgatgctaaggagatagt

SEQ ID NO: 115078 - DNA, 120 bp, Artificial Sequence
  ENSG00000100413_9 (sequence is synthesized)
gtctcgagctggacagtgaggcaaggccaggagtgcccaccagcttgccccgctcctccaccatctaggccctgctcctccttcactgcagtgatggatccatctgtggctgtggctgtt

SEQ ID NO: 115079 - DNA, 120 bp, Artificial Sequence
  ENSG00000100413_10 (sequence is synthesized)
gggcctccactgaccttgactgaaaagacccttcctggaccctggacttgacaacaaacggcacagacaccaatcactcacagaacagtcactggttttggattcttgttttccttgcaa

SEQ ID NO: 115080 - DNA, 120 bp, Artificial Sequence
  ENSG00000100413_11 (sequence is synthesized)
gaacaaaaggttctctagaatccttcagccaccaatgaaatgatcaggcaggagaaaaactttagatgggagtcttgtcatcaaaaataaatacagttgcatggagctgcttaagatctg

SEQ ID NO: 115081 - DNA, 120 bp, Artificial Sequence
  ENSG00000100413_12 (sequence is synthesized)
aaccaaactcaaaataggaagacgggggctaaaaagttattttaagaacccccccaccacaaccacagtcactccgtgggctaagcggggagcaggaagcatgtctggtcacaccatctt

SEQ ID NO: 115082 - DNA, 120 bp, Artificial Sequence
  ENSG00000100413_13 (sequence is synthesized)
ggaataggaagccatggctggacggatcggatccactgatggcacacgtggagctgaacttgacgccagcggcggggcggggaggcactgccctcactgttgcagttccttcattctgtt

SEQ ID NO: 115083 - DNA, 120 bp, Artificial Sequence
  ENSG00000100413_14 (sequence is synthesized)
gagggcactgccagcgcggaaccactcaatctgcgtctcgttgaaggtgtggttcaggaggatggtctcctgggtcccgttggggtgcttgatgatgcacttcaggggctgcaaggagaa

SEQ ID NO: 115084 - DNA, 120 bp, Artificial Sequence
  ENSG00000100413_15 (sequence is synthesized)
ggtgggtgtgggtggaagtggtgggtactgtgtgcccttggccccgcaggggggtcagggagacagggcactgcctggggacctaagaggtcagcaggcaaaccaaatcctaggccagtc

SEQ ID NO: 115085 - DNA, 120 bp, Artificial Sequence
  ENSG00000100413_16 (sequence is synthesized)
tgtgcctgatggcccaggtcagacccaggtggcacctacaggggattcctggggcccagagggtcctgcagtgggtgggctgtcccctgagtgccaggtcctggtgagtaaagggaggtt

SEQ ID NO: 115086 - DNA, 120 bp, Artificial Sequence
  ENSG00000100413_17 (sequence is synthesized)
ggggaggtgtgagggccccgggttgactccaacccccaactctgagaagccactttgctttctctgtggggccacctggagaactgggggcctttccagctggaatgaagcctcctggga

SEQ ID NO: 115087 - DNA, 120 bp, Artificial Sequence
  ENSG00000100413_18 (sequence is synthesized)
ggaaacaaggtggctgcccctcaccccaccacctcagggggacccgggcccctaaccttgccaggggtgaagtccttcaggccctgaatggtcagcttgtccacagggtgaatcttgttg

SEQ ID NO: 115088 - DNA, 120 bp, Artificial Sequence
  ENSG00000100413_19 (sequence is synthesized)
tagtcagccgggtcagcgaaggtcagaggcagcaggccctgtttcttcaggttggtctctggaaagcaggcggcattcggtcatcgggggcctgactagcctggagagcttcattttctg

SEQ ID NO: 115089 - DNA, 120 bp, Artificial Sequence
  ENSG00000100413_20 (sequence is synthesized)
aacccatctggggctctgggagatgcccctaatcctgctgcctgggacaatgcccgggcagtgactatggggccctggtctgctccctttcactaggggtgcccctagcaagtgtgcgct

SEQ ID NO: 115090 - DNA, 120 bp, Artificial Sequence
  ENSG00000100413_21 (sequence is synthesized)
ggtgctgaggtctgcgaggccttcctgctgcacattcatgatcagaaagaaccccctggcacatgtcctagatctcagcggctcagatctacaagcctggaagcagggcctgcgggaagc

SEQ ID NO: 115091 - DNA, 120 bp, Artificial Sequence
  ENSG00000100413_22 (sequence is synthesized)
cgggaagctgagcgtcggatgtgcactgtgtgagcctaagaaggggcaagaggctgacgggcctgtgggctgcagtggacacagcctagaaccaggcccaactcagccacgggcagggag

SEQ ID NO: 115092 - DNA, 120 bp, Artificial Sequence
  ENSG00000100413_23 (sequence is synthesized)
agtgaccttgatcactagggatgggatgaggatggcctgggtacagactccagctcaccgtggatcctggcaaagctcttggtgatgatggcccggcccccaaggtggcgaggctccaga

SEQ ID NO: 115093 - DNA, 120 bp, Artificial Sequence
  ENSG00000100413_24 (sequence is synthesized)
gctgcatgctcccggctcgagccctcgccgtagttctcgtctccgatcaccacccacctgatgccatgtttctgtcaggcaagcgggggtaaggttataaggcagaggagggcaccgtcc

SEQ ID NO: 115094 - DNA, 120 bp, Artificial Sequence
  ENSG00000100413_25 (sequence is synthesized)
tcacctgtctggccctacctgcctggcctcacccacctggcgcctgggcatcctgaggctcccggtaaaggggctggaggggcccttcctcgcctgctgcctaagggcaagtgaagcctg

SEQ ID NO: 115095 - DNA, 120 bp, Artificial Sequence
  ENSG00000100413_26 (sequence is synthesized)
cgtgaatgagacccaaacgaggccccgaggggacagaggcacgtggttgtttgcagtggcaaagaagacagaagccacccattggtgcttggcagaggcaggtgtgtgtggagggaggtt

SEQ ID NO: 115096 - DNA, 120 bp, Artificial Sequence
  ENSG00000100413_27 (sequence is synthesized)
gggtgagacagggacggcctccgggccccacacaagatgcatctgtgaagctcaaggcgcccccttcctgggagcaccctctgccccacccagccaccagggggtgccagagtcctttca

SEQ ID NO: 115097 - DNA, 120 bp, Artificial Sequence
  ENSG00000100413_28 (sequence is synthesized)
cccggctgggccaggacttgggttcagccctggttctgtttgtttctcaaagcagaaaaagtccaatcacctcagaccctctctgcctgctcactgtgaggccccgtgtagccccctctc

SEQ ID NO: 115098 - DNA, 120 bp, Artificial Sequence
  ENSG00000100413_29 (sequence is synthesized)
tgagcttttggcctctgacttcctgagtcggcccccttccttgtctttgtctagggccagatatcctaagatatctctcactaactcctcctggtgcagggacccggctgtaccaccgga

SEQ ID NO: 115099 - DNA, 120 bp, Artificial Sequence
  ENSG00000100413_30 (sequence is synthesized)
cctgggcctcatgccttctcagccacagggaggggctgcaggcctctcctcccttccacagcagtcccctttgggcttggtcggcctccttcccagtttccactcccctaatgtcctccc

SEQ ID NO: 115100 - DNA, 120 bp, Artificial Sequence
  ENSG00000100413_31 (sequence is synthesized)
tgcacctgccttgcaggccccttcaggagtgaccactggcattgcccctatcaactctgacccaccttgtagtagcgggcagtgtcagggacggggccaaactcctgagtgacggcattg

SEQ ID NO: 115101 - DNA, 120 bp, Artificial Sequence
  ENSG00000100413_32 (sequence is synthesized)
cgcacggagttggccttgccgttttcaatgttgatggcaccaatgagcaggttgttggagatgttatccaagtgcccacggaacttgagccaggggccagcagctgagatgtggtcagtg

SEQ ID NO: 115102 - DNA, 120 bp, Artificial Sequence
  ENSG00000100413_33 (sequence is synthesized)
gtacacttccctttgaccttgggtggtaagtagagaggacagaggtcagggcatggccctggaggggtggatgacaagccctccagaggcaggcagcaggccccggggcccaggaggggt

SEQ ID NO: 115103 - DNA, 120 bp, Artificial Sequence
  ENSG00000100413_34 (sequence is synthesized)
gacagaggggtgagaggcaggcaagtcttcagacacgtgttctgtggtcctggtgcttccaccctaaggccacatgggctcaggccaggccttcatcccctcaaaggcctctggctgctc

SEQ ID NO: 115104 - DNA, 120 bp, Artificial Sequence
  ENSG00000100413_35 (sequence is synthesized)
agtctcccttatggggcagaggccgcccaaagttgggacaggtcaatgttcgctcacccttcaggcctcagctgcaagatcagccacagacctcatgctggacacaggagcccaggacat

SEQ ID NO: 115105 - DNA, 120 bp, Artificial Sequence
  ENSG00000100413_36 (sequence is synthesized)
gcctgggtcctggctgatgactgattagtctcttctgtcacaggggtgcctggagaccccttaataagcagcataaataaatatctgacacagattggaggcctctggccacaccaaaaa

SEQ ID NO: 115106 - DNA, 90 bp, Artificial Sequence
  ENSG00000100413_37 (sequence is synthesized)
ttctgtagccaaaggtcaagccaaatccaggttcagtggtgcgtgcctgtaaggctgagggcggaaggatctcttgagccacaagaccct

SEQ ID NO: 115107 - DNA, 120 bp, Artificial Sequence
  ENSG00000100413_38 (sequence is synthesized)
ggctaaagtcaaagagatggccagagggtggtgggagtcctggaggctgggagacgtggggcctcatcctgaatcggccaggaattgacccggtgacagcggcagacttctcttctctgg

SEQ ID NO: 115108 - DNA, 120 bp, Artificial Sequence
  ENSG00000100413_39 (sequence is synthesized)
gcctctgttccctcatctgtgaggcctgggatgtggactagttggttttcaaggcctcttcagctctgacttcatagctctgtgtctgtgcccttttggtctcattgctactgagccctg

SEQ ID NO: 115109 - DNA, 120 bp, Artificial Sequence
  ENSG00000100413_40 (sequence is synthesized)
caccttgtccattcctcgggcttcccgctgcctgtggagagcagacggaagggggatcagcaggctggctgggggtgggggacttggatagtaggacacagtaggtaagagtgtggcctc

SEQ ID NO: 115110 - DNA, 120 bp, Artificial Sequence
  ENSG00000100413_41 (sequence is synthesized)
tagctgtgtgtcctggctgaatatgtcattgctctgtgcctctgcttccttatctgtcagttgcagttcaggatgtcaactgcagtttaggatagattttatattctaagaccattgtga

SEQ ID NO: 115111 - DNA, 120 bp, Artificial Sequence
  ENSG00000100413_42 (sequence is synthesized)
ggattaaggagttaatacatgaaagctcttaggacagagccttggcacctaacgagcactcagtgacttatcagcgtggattgtttctccctattctgtcggtcagttgggtggttttcc

SEQ ID NO: 115112 - DNA, 120 bp, Artificial Sequence
  ENSG00000100413_43 (sequence is synthesized)
tctcatctggctggcctggggctggacaatctaggacggtctcacattctgaaggttggcagactggttggttactgggggcctgggctgggctggcccatctctgccccacatggtctc

SEQ ID NO: 115113 - DNA, 120 bp, Artificial Sequence
  ENSG00000100413_44 (sequence is synthesized)
atctttcagtaggccaggctgggcttggcggttttaaggttccaaagttcagtgcgtaagtacttctcaagcctctgcttccatcccgttggctagggtgaggggatggagaaatagact

SEQ ID NO: 115114 - DNA, 120 bp, Artificial Sequence
  ENSG00000100413_45 (sequence is synthesized)
tcacctctgggtgggagaaactgcagtcacattgcaaaagggtgtgcatccaggaatggaaggtgatcaccagatcctggaaggagggaggagtagagagaggaccaccctgagaggagc

SEQ ID NO: 115115 - DNA, 120 bp, Artificial Sequence
  ENSG00000100413_46 (sequence is synthesized)
caggaccaccagtcaagggaggtgatgagccccaggagaggggcattcttcattctcatgtctggaccaaaccagtgtataggagatggtgagaggcccattgagacggttcaggctccc

SEQ ID NO: 115116 - DNA, 120 bp, Artificial Sequence
  ENSG00000100413_47 (sequence is synthesized)
agagcgcaggcgccaagcctgccatcccttgggcactcagagcgcaattctcagcctgccccaggcctccctccgcctgagtcagaatcttgggggatgggtccaaatactttttttttt

SEQ ID NO: 115117 - DNA, 120 bp, Artificial Sequence
  ENSG00000100413_48 (sequence is synthesized)
gagattctcattgggaagatcaaaggctgcagcccagaaggagtgcacggtaacagtggccctgacgcctcagacaagacttgggaacactgtgggggcaggagtctctctaggcttctt

SEQ ID NO: 115118 - DNA, 120 bp, Artificial Sequence
  ENSG00000100413_49 (sequence is synthesized)
ctgccgtcctggggggcatgttggccgactaaatggttgacggcatcgtggaagcctgtgtttgggattaaacctgtctgaggaaggcaagattcgacccggtggccctgtctgtccatt

SEQ ID NO: 115119 - DNA, 120 bp, Artificial Sequence
  ENSG00000100413_50 (sequence is synthesized)
cgagcgccgcccactggccgcaggcccggcctcggtcatgccaagccctggccgtgggcaagcagcttaatgtctcagaacttttcttcaccgtgaaaggagatattgaaggggatcaaa

SEQ ID NO: 115120 - DNA, 120 bp, Artificial Sequence
  ENSG00000100416_0 (sequence is synthesized)
aaggcgcggaagcggcggtagctgcagctggcgaagttgggcgactggcggatgcaggccttgcggcacgtcgtgtgcgccctgtccggcggcgtggacagcgccgtggccgcgctgctg

SEQ ID NO: 115121 - DNA, 120 bp, Artificial Sequence
  ENSG00000100416_1 (sequence is synthesized)
ctgaggcggagaggttaccaggtgacaggggtgtttatgaagaactgggactcactggatgaacatggggtctgtactgccgacaaagactgtgaagatgcttacagagtttgccagatc

SEQ ID NO: 115122 - DNA, 120 bp, Artificial Sequence
  ENSG00000100416_2 (sequence is synthesized)
ttagacatccctttccatcaagtgtcctacgtaaaggagtattggaatgatgtgttcagtgactttttgaatgagtatgaaaaaggaaggactcccaatcctgacatagtttgcaacaag

SEQ ID NO: 115123 - DNA, 120 bp, Artificial Sequence
  ENSG00000100416_3 (sequence is synthesized)
cacatcaaatttagttgcttttttcattatgctgtggataatcttggggcagatgccattgccacaggtcactatgcaagaacttccctggaagatgaagaagtctttgagcagaagcac

SEQ ID NO: 115124 - DNA, 120 bp, Artificial Sequence
  ENSG00000100416_4 (sequence is synthesized)
gttaagaagcccgaagggcttttcagaaatcggtttgaagttagaaatgcggtaaaactcctccaggcagctgacagctttaaagaccagaccttctttctcagccaggtttcccaggat

SEQ ID NO: 115125 - DNA, 120 bp, Artificial Sequence
  ENSG00000100416_5 (sequence is synthesized)
gccctgaggagaaccatcttccctctggggggattaacgaaagagtttgtaaagaaaatcgctgctgagaatagacttcatcatgtgcttcagaagaaagagagcatgggcatgtgtttc

SEQ ID NO: 115126 - DNA, 120 bp, Artificial Sequence
  ENSG00000100416_6 (sequence is synthesized)
gaacacataaaggttggttcctgtataccttgggccagagagcaaacataggtggcctgagagagccctggtacgtggtggagaaggacagcgtcaagggtgacgtgtttgtggcccccc

SEQ ID NO: 115127 - DNA, 120 bp, Artificial Sequence
  ENSG00000100416_7 (sequence is synthesized)
ggacagaccacccagccctgtacagggacctgctgaggaccagccgcgtgcactggattgcggaggagcctcccgcagcactggtccgggacaagatgatggagtgccacttccgattcc

SEQ ID NO: 115128 - DNA, 120 bp, Artificial Sequence
  ENSG00000100416_8 (sequence is synthesized)
gccaccagatggcactagtgccctgtgtgctgaccctcaatcaagatggcaccgtgtgggtgacagctgtgcaggctgtgcgtgcccttgccacaggacagtttgctgtgttctacaagg

SEQ ID NO: 115129 - DNA, 120 bp, Artificial Sequence
  ENSG00000100416_9 (sequence is synthesized)
gggacgagtgcctgggcagcgggaagatcctgcggctggggccgtctgcctacacgctccagaagggccagcgcagagctgggatggccactgagagccccagtgacagcccagaagatg

SEQ ID NO: 115130 - DNA, 120 bp, Artificial Sequence
  ENSG00000100416_10 (sequence is synthesized)
gtccaggcctgagtcccttgctctgacagagatggatctgctagaaggaacctggagagcaggacccatggctgggcggctggtgagcagtccaggtgcccaagggccagcttgctgctg

SEQ ID NO: 115131 - DNA, 120 bp, Artificial Sequence
  ENSG00000100416_11 (sequence is synthesized)
cccaaagcagaggaagccgggctggctgagggtccgaaaagcctgcaggggcccggcgagccccaggaagagcctcagctccaggctggggctctggctgctggagcatctgctggctgg

SEQ ID NO: 115132 - DNA, 120 bp, Artificial Sequence
  ENSG00000100416_12 (sequence is synthesized)
tggggtggcccgagttccccttcaccgcccccagggagggtttcccacctcagagtacaccgaggggacctgcagagggggctgtcgggacagcgtggaataaacattatttcaaggaca

SEQ ID NO: 115133 - DNA, 120 bp, Artificial Sequence
  ENSG00000100416_13 (sequence is synthesized)
tatcaagtccctgtaaaaagaatgatttccttcctgtgtaaggaaaatgttaaactacacaaaactccactctgattcagggagtaaggtggacgtcccggcatggtgtgaatgattaag

SEQ ID NO: 115134 - DNA, 120 bp, Artificial Sequence
  ENSG00000100416_14 (sequence is synthesized)
gaccacatgcagcgatgggatcaggcgtccgcgctggccagagtgctgctcgctcatgtgcagacccttactgcggtgaggcctgcgtgagcctgtgctgtgcctggtgtcaggggacag

SEQ ID NO: 115135 - DNA, 120 bp, Artificial Sequence
  ENSG00000100416_15 (sequence is synthesized)
gcttcctcacactgtggatccttgcagtggaaggatccggtaaccagccagaccgacgcctgtgctgcagcccagcgctctccctccacggtggtgctgaagactgcaagaggcctcagc

SEQ ID NO: 115136 - DNA, 120 bp, Artificial Sequence
  ENSG00000100416_16 (sequence is synthesized)
caccctcggggctctgtgttagaggcgaggcctggaccccacagcacacccagctctctcactcctgtcattttgccacttgcctgaagtctctttaatgctttcttggaccttgagctg

SEQ ID NO: 115137 - DNA, 120 bp, Artificial Sequence
  ENSG00000100416_17 (sequence is synthesized)
ggctggggggcttagaattttatttttggtttacagcgcagaagaagagcagtgaggccggggcgcgggtggggagggcaaggcggcggctcaaaaaaaaagccagcccctcgcggcccg

SEQ ID NO: 115138 - DNA, 120 bp, Artificial Sequence
  ENSG00000100416_18 (sequence is synthesized)
acagagtctcggcgccccgcgggtcggtggagcctcaggggtgagcgcaggccggagacaggggaacccgccgcgggacaggggaaggccggacggaacgcgggtaagctgccgcagctt

SEQ ID NO: 115139 - DNA, 120 bp, Artificial Sequence
  ENSG00000100416_19 (sequence is synthesized)
aaacctgtccccgtccgtcgtggcgttgtgcacgtctcctccctccctgggccgctggttgcgcgcgggtcggcaggaggataccccgtcctctgactttggttcggaggctcctcgccc

SEQ ID NO: 115140 - DNA, 120 bp, Artificial Sequence
  ENSG00000100416_20 (sequence is synthesized)
cagtttgctgtgagaagaccagaagggttaaccaacggcctcctgtccctggacgggtcttggtgcctgcttagaacccaaagcccttaacttcatgctcctcgtcctgcttcaggggcg

SEQ ID NO: 115141 - DNA, 120 bp, Artificial Sequence
  ENSG00000100416_21 (sequence is synthesized)
gggcttggcacaatcccaggaggtgccaggtctcaatggcccgaggccatgggtgggtgacagggagcaggggcctcagaaccaacctagggtatctggggccccccagaccagggccag

SEQ ID NO: 115142 - DNA, 120 bp, Artificial Sequence
  ENSG00000100416_22 (sequence is synthesized)
tcctggggcacctgtgggaagccagcagctaccagtccctcctttctcctcagccatttggtgtgtggaggaattcctggggtggccttgagagaagagcccgtggtgtggctggcccct

SEQ ID NO: 115143 - DNA, 120 bp, Artificial Sequence
  ENSG00000100416_23 (sequence is synthesized)
gtccctgcgaatagaaaaaccagtcctcgaggggggccgtgctgctgccccacaggtggttgcaggtagagggcctgagtcagacttgaacctgcagcattcactgtcatgggctcggat

SEQ ID NO: 115144 - DNA, 120 bp, Artificial Sequence
  ENSG00000100416_24 (sequence is synthesized)
ctcacccctgcctcttgcccactctgacatggtacttccttcctgggccttagtctcctcatctgtaaaatggggattcaaaggcccggcgggtgatgagatgaatttctgtgggtagaa

SEQ ID NO: 115145 - DNA, 120 bp, Artificial Sequence
  ENSG00000100416_25 (sequence is synthesized)
cacttcgagcggtgccagcaccgttacctgtgtgtgtgtgtgctggtaggacagttgttcccagggaccacactgaggccggccttggggccaggtgcccctcggcgtccccaccttcac

SEQ ID NO: 115146 - DNA, 120 bp, Artificial Sequence
  ENSG00000100416_26 (sequence is synthesized)
gaggacgggccccttgaagctgagcttcctgaggccagatttgggccagggatgggagaccctggggtaggaaagtcccgttgtggagatcatttggagattacctaaagtatttagaac

SEQ ID NO: 115147 - DNA, 120 bp, Artificial Sequence
  ENSG00000100416_27 (sequence is synthesized)
tcccgtgtcctgtgcctgccctgagcgaggcctgggggtgctgggagcagatgcaggcaggccccggcgtgttgggctgaagcaagtgtgtacactgccccgcagtgtcctgctgcgtcc

SEQ ID NO: 115148 - DNA, 120 bp, Artificial Sequence
  ENSG00000100416_28 (sequence is synthesized)
agggcccaggctggtgccctgcccttcccctctaagcaggggtttttgaccccgtgggctggtgctcctttctccctgggggcctgaggtcgaccaggaaaggcctgtgccccctccaag

SEQ ID NO: 115149 - DNA, 120 bp, Artificial Sequence
  ENSG00000100416_29 (sequence is synthesized)
tctggggcacaaggtgccttctttgtggccaccacaccccatgtccagcccaggcctggacaatgatgagatgtgctcaggtgcttggtcagggctggctttggtggttggagaatcgta

SEQ ID NO: 115150 - DNA, 120 bp, Artificial Sequence
  ENSG00000100416_30 (sequence is synthesized)
tcttcctagtgagttacaccattgctgggcctgctctgggctgccctcccagcatctgccttcatgatgaggcgtgacatgtgggctgtaacttgttgcccagcctcatggagaaactgt

SEQ ID NO: 115151 - DNA, 120 bp, Artificial Sequence
  ENSG00000100416_31 (sequence is synthesized)
ccggcctctgagacagcactggggctggttctggcagggccagcagtgcttccagaccagggcttgagaaggcctccagcagccgtggcttcctggaggctgtgactaactctgttcctg

SEQ ID NO: 115152 - DNA, 120 bp, Artificial Sequence
  ENSG00000100416_32 (sequence is synthesized)
tccttggtcccctgcctttcctgggactggccatggtggcaggagagttttaaggtattcattaggctgagttgtatgctggtctcttaatcatccctgaaccccgatacacagatacag

SEQ ID NO: 115153 - DNA, 120 bp, Artificial Sequence
  ENSG00000100416_33 (sequence is synthesized)
tttctccaattttatgaaagaggacagcgacgcccagagcttgggtggctcatccggtggagagggcatggcctcagtgccaaggatggtgcccaccatggtaggatccagtgagttgtt

SEQ ID NO: 115154 - DNA, 120 bp, Artificial Sequence
  ENSG00000100416_34 (sequence is synthesized)
gtcaggcaggtgcagatggccaagccaggatcaaaccaagccttccaccacagtggggaccttaccactgtgaccctggcctcaaagcagggccgctcagtggcggcaagctcaccccac

SEQ ID NO: 115155 - DNA, 120 bp, Artificial Sequence
  ENSG00000100416_35 (sequence is synthesized)
cttcaggggaccttgccagtgtctagaggcatttttggttgtcacagcttgggtggaaaagcaaggacgcgggtgctgctgcatctgtgggtcaggccggggatgctgcttgccgtgttc

SEQ ID NO: 115156 - DNA, 120 bp, Artificial Sequence
  ENSG00000100416_36 (sequence is synthesized)
agcacagcctcttccctgagtgacccggcctccaccttggcgcgtggagctgagaaggcccactctcagcaccctggctgccggctcatgttctggcacgaatgctggggcgccttctct

SEQ ID NO: 115157 - DNA, 120 bp, Artificial Sequence
  ENSG00000100416_37 (sequence is synthesized)
aaggctactatctagactcgaatgctttcatacaagtgattttcaaaaattagtcaataaaaattgatgtcagtgcaggcccaggcccgcccccagatacactagtttctaggtctgggg

SEQ ID NO: 115158 - DNA, 120 bp, Artificial Sequence
  ENSG00000100416_38 (sequence is synthesized)
ccagcctagtaattgttactaggcacacaggtgatgctgactcgatggcctgagacacaccccttgagaagaagctgctctggggagacgagggtatgagtggaaagaggatgggcgagg

SEQ ID NO: 115159 - DNA, 120 bp, Artificial Sequence
  ENSG00000100416_39 (sequence is synthesized)
aggccgggcttacctggacactaaggtgatggacggcgtctgctgggcaggcctcggggaggacccctcagctttgctctcagcaggggcccgacaagctcagtgggcagtggcaggaac

SEQ ID NO: 115160 - DNA, 120 bp, Artificial Sequence
  ENSG00000100416_40 (sequence is synthesized)
tgagtgccactggaaagcccattccctttatttagaaaacgagctccaggaagccgctactttgtgtccatttctcttgaggaaacttaccaccttggttgagcggcttcatggcagaca

SEQ ID NO: 115161 - DNA, 120 bp, Artificial Sequence
  ENSG00000100416_41 (sequence is synthesized)
gcagcgagccagcggccggactctgtatttcggaccccactccagtgctccctgggtcataccaggatctgcctctgtccacaaagatgagggaaaatgatgactgtgctgtgctctcta

SEQ ID NO: 115162 - DNA, 120 bp, Artificial Sequence
  ENSG00000100416_42 (sequence is synthesized)
cttcctgcggttactgcgtgattctaaagctgccactcggaacagcgagtcctctgccgtcgagagcagggaggggtagggtggacaggcgatgccgtggaaagacgtctcggtggaaac

SEQ ID NO: 115163 - DNA, 120 bp, Artificial Sequence
  ENSG00000100416_43 (sequence is synthesized)
agttgctgcgcctgcagacggaagctccccacaggcagagctgcttggatgtgtgagtcatgaagccagagaagccccgctccatgagcagtgactccccaggccctgtgacctccctcc

SEQ ID NO: 115164 - DNA, 120 bp, Artificial Sequence
  ENSG00000100416_44 (sequence is synthesized)
tgtcttgcagctcctcctggcaccagtccccagggctctcctgttggtagttcctgcttttcttcttggaaattcctcgtggacctcgagatctttaccctaaaatagttctgttgaatt

SEQ ID NO: 115165 - DNA, 120 bp, Artificial Sequence
  ENSG00000100416_45 (sequence is synthesized)
tcaccctggcaatgtaaattgatagcttatcttcacagatgccagacaatggacaactcaccatcagtcctctgctcacctgagacaaatgcatgtctgattgcttcctctgccctattg

SEQ ID NO: 115166 - DNA, 120 bp, Artificial Sequence
  ENSG00000100416_46 (sequence is synthesized)
tttatgtgaaaatgcagattcactgagccagactaaggcatcagtgactgttcctctacctgcctctcacatggagattgtgtattcagtgaaaggctgatcaaagacccaaaggaatgc

SEQ ID NO: 115167 - DNA, 120 bp, Artificial Sequence
  ENSG00000100416_47 (sequence is synthesized)
aacagtttatctcttatctacctatgacctgcgagctgcccaccacccccagttgttgcgcctttccagacagaaccagtgtacatcttacacgtattaattgatgtcctgtgtctccct

SEQ ID NO: 115168 - DNA, 120 bp, Artificial Sequence
  ENSG00000100416_48 (sequence is synthesized)
tgtcctgtgtctccctaatatgtatcaaagcaagctgtgcctcgaccaccttgggcacatatcctcaggacatcatcctgaggctgtgtcactggcatgtccttaaccttggcaaaataa

SEQ ID NO: 115169 - DNA, 120 bp, Artificial Sequence
  ENSG00000100416_49 (sequence is synthesized)
tgtcaggggacaggctccgagtcagtcacagtgtgcagtcctgctgtggggacagagtgcagccattgttgggttagtacagtggcggggatgtgcctgccggcgtgatgatcaggcagg

SEQ ID NO: 115170 - DNA, 120 bp, Artificial Sequence
  ENSG00000100416_50 (sequence is synthesized)
tcttgacacagcacagacctgagctgtgggactggccaggagagccaggctgcagctcaggtgtagggcgtcttgcagtgaattgcacttggagatcttccacctcttgtggaggggaga

SEQ ID NO: 115171 - DNA, 120 bp, Artificial Sequence
  ENSG00000100416_51 (sequence is synthesized)
cggcaggcggagccggggctaggcattcctgagacaggtggaggtgacagctttgcttgggacagaactgccagacaggattgcccatgtatctgccagccctggccccagcaggagcca

SEQ ID NO: 115172 - DNA, 120 bp, Artificial Sequence
  ENSG00000100416_52 (sequence is synthesized)
gttggatgactcatggcttccacctgcagttcacttcactgaagaaggctgccggcccaggccacgtggtaaatcccatgaggttctctctgcctgtgtgccccactgcaggggagggag

SEQ ID NO: 115173 - DNA, 120 bp, Artificial Sequence
  ENSG00000100416_53 (sequence is synthesized)
gcagtgagtttgccatctgctgtgtgacattgtgagggtgcgcagagcagctgggggtagccctgatgcagttactgcattagatggacactgtgaagacgtgcagctatgtcatgggct

SEQ ID NO: 115174 - DNA, 120 bp, Artificial Sequence
  ENSG00000100416_54 (sequence is synthesized)
ggttacagaggaaggggctgaggcccaggagtagggtgtgctcgggtcacacagctggtgagggcagagtgccaccagccctgccctgggggctcctcccacagtgacaactgtgagagg

SEQ ID NO: 115175 - DNA, 120 bp, Artificial Sequence
  ENSG00000100416_55 (sequence is synthesized)
atttccactctggtgtcaccaaccagccagttcctgctcgggccctgagaggctcagctgctgcccgggccccagaagcgaggacagaaaatggaaggggcatgaggacagtgctcaaag

SEQ ID NO: 115176 - DNA, 120 bp, Artificial Sequence
  ENSG00000100416_56 (sequence is synthesized)
aggcagagggtcggggcccctgtgggccgagtgtgcaggagctcccagggtgggcgcctggtgggtgtaggcctgaggaatctccaggggcaggtggtgggagggaacctggggtgaggg

SEQ ID NO: 115177 - DNA, 120 bp, Artificial Sequence
  ENSG00000100416_57 (sequence is synthesized)
aagcggaagcatcctctggctgccaccatgctccttcctgtcacagctccacattcccaaggggtgcagagacctgccagtcccttggagtcccaggagaggcccctgtgactgtcccac

SEQ ID NO: 115178 - DNA, 120 bp, Artificial Sequence
  ENSG00000100416_58 (sequence is synthesized)
tcagggagaggtaccctgaagaccctccctagtgaagccactgggtgccccaggcctctcctctcctgttcagcagcagcagcagcagcaaaaccctgctcccctgggagctcagtgcct

SEQ ID NO: 115179 - DNA, 120 bp, Artificial Sequence
  ENSG00000100416_59 (sequence is synthesized)
ggtgctccgagcacaggccaggccccataggggagcactctgcccctgcctgccctcggctggctccctgtggcacccctgatgccagggtctctcccctacagtttgctgtgttctaca

SEQ ID NO: 115180 - DNA, 120 bp, Artificial Sequence
  ENSG00000100416_60 (sequence is synthesized)
taagaagcccgaagggcttttcagaaatcggtttgaagttagaaatgagaggatctcactctgtcaaccgggctggagtacagtggcccgatcttggctcgctgcagcctccacctcctg

SEQ ID NO: 115181 - DNA, 120 bp, Artificial Sequence
  ENSG00000100416_61 (sequence is synthesized)
acggtggagagcgcacgccacccaggctccccagctagggcagatgtgcttgaggaaggcgcctctctcctctgactcccctggagccctcccctaaggccttagcttcaggcctggctt

SEQ ID NO: 115182 - DNA, 120 bp, Artificial Sequence
  ENSG00000100416_62 (sequence is synthesized)
tcctgctacctgccccttctctggtccctgtctctcccccactcctcgcaggacagtggcctgaaggacctgaccgggttctgctttcttccccggggcagctggtgtgagggtctcccg

SEQ ID NO: 115183 - DNA, 120 bp, Artificial Sequence
  ENSG00000100416_63 (sequence is synthesized)
tgggcagccgggcccctaccctggaagcaaagtgtggggtgaggccgggaggccccagggcccgctcaggacgtctgggtacagcttgggccaccgccacttctgctcctctcacggctg

SEQ ID NO: 115184 - DNA, 120 bp, Artificial Sequence
  ENSG00000100416_64 (sequence is synthesized)
ccgtcttctcatttcagagcatgggcatgtgtttcatcgggaagaggaattttgaacatttccttcttcagtatctgcagcctcgacctggtcactttatttccatagaagacaataagg

SEQ ID NO: 115185 - DNA, 120 bp, Artificial Sequence
  ENSG00000100416_65 (sequence is synthesized)
gggtttctcacggatctgcggcgtccacattcacctgtgagaccgtggacactggtgaggggagctgggatcgccgggccgggggcctgacctctgcacacgctgtggccgcccggtggg

SEQ ID NO: 115186 - DNA, 120 bp, Artificial Sequence
  ENSG00000100416_66 (sequence is synthesized)
aggtccttgtcctccccactcagcagactggacaactgccgcgcggcgggtctgcttgttcagcgtctcctgtgttctccgctcgctggaggacaaagttttctccaggagcatttgcat

SEQ ID NO: 115187 - DNA, 120 bp, Artificial Sequence
  ENSG00000100416_67 (sequence is synthesized)
ttcttccggcatctaaacggagccccacgggtgcttagcattcctcgggcccggcgctgaaatgagcacttgtttaacttcacctgtgtggctccccgcgggaggcctcattcacagagt

SEQ ID NO: 115188 - DNA, 120 bp, Artificial Sequence
  ENSG00000100416_68 (sequence is synthesized)
cacgtttgtggagctctgctttgcgccatctttggctcctgaccttgggcaagtgaattaagccgtcccctgtaaaattcggctaacacctgcctcacggggtgactggagggattagat

SEQ ID NO: 115189 - DNA, 120 bp, Artificial Sequence
  ENSG00000100416_69 (sequence is synthesized)
gttctgggaacacataaaggtgaggtgcagactctgccacttgtcatctgaaatgcctagagctgtggcgtttcagctctgggagactagaccagagttcctgtcgtcccttccacttgg

SEQ ID NO: 115190 - DNA, 120 bp, Artificial Sequence
  ENSG00000100416_70 (sequence is synthesized)
ctggagaattgtagaaggctctgtggggcggccgggggcgggcacggcctagggtggaacagttgccttgatggtggctgggtgcacttccagatgtggcctcagctgagatgctggagt

SEQ ID NO: 115191 - DNA, 120 bp, Artificial Sequence
  ENSG00000100417_0 (sequence is synthesized)
cttcgggactccgccccgcgcgcggacctgcagccatggcagtcaccgcccaggcagcccgcaggaaggagcgcgtcctctgcctgtttgacgtggacgggaccctcacgccggctcgcc

SEQ ID NO: 115192 - DNA, 120 bp, Artificial Sequence
  ENSG00000100417_1 (sequence is synthesized)
agaaaattgaccctgaggtggccgccttcctgcagaagctacgaagtagagtgcagatcggtgtggtgggcggctctgactactgtaagatcgctgagcagctgggtgacggggatgaag

SEQ ID NO: 115193 - DNA, 120 bp, Artificial Sequence
  ENSG00000100417_2 (sequence is synthesized)
tcattgagaagtttgattatgtgtttgccgagaacgggacggtgcagtataagcacggacgactgctctccaagcagaccatccagaaccacctgggggaggagctgctgcaggacttga

SEQ ID NO: 115194 - DNA, 120 bp, Artificial Sequence
  ENSG00000100417_3 (sequence is synthesized)
tcaacttctgcctcagctacatggccctgctcaggctgcccaagaagcgtggaaccttcatcgagttccggaatggcatgctgaacatctcgcccatcggccggagctgcaccctggagg

SEQ ID NO: 115195 - DNA, 120 bp, Artificial Sequence
  ENSG00000100417_4 (sequence is synthesized)
agaggatcgagttctccgaactggacaagaaagagaagatccgggagaagttcgtggaagccctgaaaacagagtttgctggcaaagggctgaggttctctcgaggaggcatgatcagct

SEQ ID NO: 115196 - DNA, 120 bp, Artificial Sequence
  ENSG00000100417_5 (sequence is synthesized)
atagcctggaccaggacagcttcgacaccatccacttctttgggaacgagactagccctggtgggaacgactttgagatctttgccgacccccggactgttggccacagcgtggtgtctc

SEQ ID NO: 115197 - DNA, 120 bp, Artificial Sequence
  ENSG00000100417_6 (sequence is synthesized)
ctcaggacacggtgcagcgatgccgggagattttcttcccagagacagctcatgaggcgtgaccggggcccacatctgtgtgtcgtgacttctgaagagtttggcctaggcctaaagaga

SEQ ID NO: 115198 - DNA, 120 bp, Artificial Sequence
  ENSG00000100417_7 (sequence is synthesized)
ggtcctggtgttggatagatgccagggcccctcctctggcccaggacgcctgctgcaagcccacccagatggggccagagtctgtgtggacaaccgtccccagccagtctgctcctagtg

SEQ ID NO: 115199 - DNA, 120 bp, Artificial Sequence
  ENSG00000100417_8 (sequence is synthesized)
gcactggcttcgtcctcccagggcccagagtgttccccatgctccacctggtggcccaggccacagctgctgcttgtatttcggtacagaagaggtttctttctgcaccaggaggaggcg

SEQ ID NO: 115200 - DNA, 120 bp, Artificial Sequence
  ENSG00000100417_9 (sequence is synthesized)
tgctcaagtatcggtacgagatctagcctgccctgcctgcctgccctgggcgatgaggtacggtggggaaggtgcctattttagagaactttgtcacagtattaaagttcccagaacaaa

SEQ ID NO: 115201 - DNA, 120 bp, Artificial Sequence
  ENSG00000100417_10 (sequence is synthesized)
ttttttggggtagttaggattggtcttaggcaaagaacccttcccccccaatacacgtgctgagaagttatcccttcctgtccacccaggttcccagtcccagctctacccatttgcctt

SEQ ID NO: 115202 - DNA, 120 bp, Artificial Sequence
  ENSG00000100417_11 (sequence is synthesized)
gtaacctggaaaagcatctttactaacgtgtgcctcagtttccttatgtgtaaggtgggggtaatagcagttcccatcccatgggctgtcatgagcactggatgaggtggcacatggacc

SEQ ID NO: 115203 - DNA, 120 bp, Artificial Sequence
  ENSG00000100417_12 (sequence is synthesized)
ccacctggcatggagttggggagccacaccctaactccccaccccagagccttctcaagtatttttggctcttgtttgctcccttctggcactggaggagcatgaaccttcctgatctgt

SEQ ID NO: 115204 - DNA, 120 bp, Artificial Sequence
  ENSG00000100417_13 (sequence is synthesized)
gcgccctgccctggcccagagctggtgtaaataaatgcttaacccagctcatcttccagaaccctgaagcggggatgagtacttcccttccttagatgaggacactgaggccagagggtg

SEQ ID NO: 115205 - DNA, 120 bp, Artificial Sequence
  ENSG00000100417_14 (sequence is synthesized)
agtaaccagctcgaggtcacagtgccggtccctgctgaggctggccttgcacatggggctgtctagtgaccagccttgttctccagagaagggaggtgcagccagcctcggccatgtgga

SEQ ID NO: 115206 - DNA, 120 bp, Artificial Sequence
  ENSG00000100417_15 (sequence is synthesized)
aacatttcttcagagcctggggcagtcttagtggtagccctgggcctacagagtggacgctggtggggactctggcctccctggggcccacctacctgctggaaagccaggccaaggctg

SEQ ID NO: 115207 - DNA, 120 bp, Artificial Sequence
  ENSG00000100417_16 (sequence is synthesized)
gcagggggctcacatcccttatctctgcttttccatgagagggaagcaggcaggggtcattcattacttctctgtcctttagtccaggaaataggctcagagaggtcaggtgacttgccc

SEQ ID NO: 115208 - DNA, 120 bp, Artificial Sequence
  ENSG00000100417_17 (sequence is synthesized)
atggtcacacagctgaggagtacagtagccaagcctggctacttgccttcagatctcaggctagggggtgtctggctttatatctgacatcctccctgggccacttctccaagctccatg

SEQ ID NO: 115209 - DNA, 120 bp, Artificial Sequence
  ENSG00000100417_18 (sequence is synthesized)
ctgctgaccactgcctgcctttccgccccagtcctacccggctctgactacagggccataccagccaccccactcctgtgctccagaatcctcagcgcctcttggtcccccaggatgtgg

SEQ ID NO: 115210 - DNA, 120 bp, Artificial Sequence
  ENSG00000100417_19 (sequence is synthesized)
tcagacttcccagcccggtctcgagaccctctgtcagctgaatgtcctgctggctggtttagatgttcagctgcccctcagactgggcatagctgctcccctttgtggccctctgagatg

SEQ ID NO: 115211 - DNA, 120 bp, Artificial Sequence
  ENSG00000100417_20 (sequence is synthesized)
ggggagaatgtccccctgctccacgtttgcggagctgctgccagagttcctgctcagagggacggggccggcctgggcactacctagtccccagcccagccgcgtctttgcatgctgggt

SEQ ID NO: 115212 - DNA, 120 bp, Artificial Sequence
  ENSG00000100417_21 (sequence is synthesized)
gctctgccatgcctggcatcctgctgccctctgtgaatgcccacagccacctcctcacaggtctcctgctctcagctcccatgctcatttctgagtatttgctttgttgagctggttaca

SEQ ID NO: 115213 - DNA, 120 bp, Artificial Sequence
  ENSG00000100417_22 (sequence is synthesized)
gataacaggatcgagccctgccctgaggtggacactgatgtgggatccagattgccccgtctcctcgcccttcctactcgtgtctctcctctgaggtctccttcagaagacccagcccac

SEQ ID NO: 115214 - DNA, 120 bp, Artificial Sequence
  ENSG00000100417_23 (sequence is synthesized)
agccccattggcagccccatcccttctggatttaggccctggctctgccaccagggctaggtgaccttgaccaaggcacaacccctctctgagccttagtttgcgcatctgcacagttgg

SEQ ID NO: 115215 - DNA, 120 bp, Artificial Sequence
  ENSG00000100417_24 (sequence is synthesized)
gggtcctacccacctagaatgctcagcacgctcacgtggactgtgtgcccagccagggcctggcacacagcaggtcctctgagctgccatccgctccctcccctctgcagaaagagaaga

SEQ ID NO: 115216 - DNA, 120 bp, Artificial Sequence
  ENSG00000100417_25 (sequence is synthesized)
accgcccaggcagcccgcaggaaggagcgcgtcctctgcctgtttgacgtggacgggaccctcacgccggctcgccaggctctagtctcaaactcctgggtcaagtgatctttctgcctt

SEQ ID NO: 115217 - DNA, 120 bp, Artificial Sequence
  ENSG00000100417_26 (sequence is synthesized)
gcctgagggaggagaagtgtgggtccctcagagggaacctggagatacttgggcccctgattttttgcggggagtgtggattcttgtcccctttgaagtcctaggaggctggggtcccag

SEQ ID NO: 115218 - DNA, 120 bp, Artificial Sequence
  ENSG00000100417_27 (sequence is synthesized)
ttgatccccacaatcacactttagagtaggcgtgatcatcccatttaacagaggatgactctgaagttatccaggaaatcgactggacctcagagcccctggtctcagcccagtcaaagt

SEQ ID NO: 115219 - DNA, 120 bp, Artificial Sequence
  ENSG00000100417_28 (sequence is synthesized)
gggtgcctccagttcctcaagccagaaacttcctcgaatttttccttttccccacctcttgtttattccatcagcaaaccccaaaatatctccctgtcccctctgtctccatctccacca

SEQ ID NO: 115220 - DNA, 120 bp, Artificial Sequence
  ENSG00000100417_29 (sequence is synthesized)
cgccatcatagtccaggtaaccacgtgccacccagaccccgcaacagcctctgggctgtgctccctgtgcctcccacctcccacccactccaactgcttcgcctggcagtcagagctgaa

SEQ ID NO: 115221 - DNA, 120 bp, Artificial Sequence
  ENSG00000100417_30 (sequence is synthesized)
acctccaactctcccatgcagccagccttgagaacccagtgcgatggcagctatagaacagaagggagcccctctgcagaggggcaggggagcacagagtggaaatgatgccctctgcca

SEQ ID NO: 115222 - DNA, 120 bp, Artificial Sequence
  ENSG00000100417_31 (sequence is synthesized)
gagagtactgcatggcttccagaggaggaagctgaatcttggaggatgagtggcagggaagccagggaagggcggttctgacagaaggacctgcatggatgcctgtgtgcagaggcccac

SEQ ID NO: 115223 - DNA, 120 bp, Artificial Sequence
  ENSG00000100417_32 (sequence is synthesized)
aggtgtgactggcttctttggaagaaaaccaagctgcagagggagaaaggctggagaagcaggttgtagcctcagattgaacaaatggcctttgaatgtgaaaccaagggtgtaggcttc

SEQ ID NO: 115224 - DNA, 120 bp, Artificial Sequence
  ENSG00000100417_33 (sequence is synthesized)
cgccccgcgcgcggacctgcagccatggcagtcaccgcccaggcagcccgcaggaaggagcgcgtcctctgcctgtttgacgtggacgggaccctcacgccggctcgccaggtaggaccc

SEQ ID NO: 115225 - DNA, 120 bp, Artificial Sequence
  ENSG00000100417_34 (sequence is synthesized)
tgaagattggaagctcccaccgggagtgtcacgcggacacccccgaggctgagtgtggggtctgcagcagcgtgaccgtggacacccggggaccgagtgtgggatgcggcggtacccggc

SEQ ID NO: 115226 - DNA, 120 bp, Artificial Sequence
  ENSG00000100417_35 (sequence is synthesized)
cccctgacatccggggccacccaccgggagtgaggggacctggccctcacgtcactgaccccgcagcgtccttgcctgtgttctgcttgggagtgctggggttggatccagtactggagg

SEQ ID NO: 115227 - DNA, 120 bp, Artificial Sequence
  ENSG00000100417_36 (sequence is synthesized)
tccctccctccccggaggctgtcacacgccgctaaggcctggctcacggacgcccccgcctcctgagctggggatcccaccctagttcagccctacgacacaccagtggtcggagctggc

SEQ ID NO: 115228 - DNA, 120 bp, Artificial Sequence
  ENSG00000100417_37 (sequence is synthesized)
ttctgaaccggggttccaggcacacaagcacacagccaagcgtcagtcatcatctggtgggagacagggcgtctcggagtcttcccaccccgacctttgcaggcctgggactgggtctag

SEQ ID NO: 115229 - DNA, 120 bp, Artificial Sequence
  ENSG00000100417_38 (sequence is synthesized)
tttctgaagccccatcacccactttaccttccacccccagtcgtggagcagagagggcttcttttcaaattcgtttatgagctctacccacccggatgtgagaggctccaggcctagcct

SEQ ID NO: 115230 - DNA, 120 bp, Artificial Sequence
  ENSG00000100418_0 (sequence is synthesized)
ctctctgtcacctcacagtagtcgttgccggtagcgggtgtgggggcgcgagcagcgcagggcggcctctcccccacccctcagcccgggcccgggctcggtccccccctctccctccgc

SEQ ID NO: 115231 - DNA, 120 bp, Artificial Sequence
  ENSG00000100418_1 (sequence is synthesized)
ttcgcactcccgtcgggtacgggaaggtccaagccgctgccgggtgcccgagggccgtcgtggccgccgtcgccacgggtcccaatggagccgccgaatctctatccggtgaagctctac

SEQ ID NO: 115232 - DNA, 120 bp, Artificial Sequence
  ENSG00000100418_2 (sequence is synthesized)
gtgtacgacctgtccaaaggcctggcccggcggctcagccccatcatgctggggaaacaactggaaggcatctggcacacatccatagttgtgcacaaggatgagttcttcttcggcagt

SEQ ID NO: 115233 - DNA, 120 bp, Artificial Sequence
  ENSG00000100418_3 (sequence is synthesized)
ggtggtatctccagctgccccccgggagggacattgcttgggcctccagactctgtggttgatgtggggagtacagaagtcacagaagaaatctttctggagtacctctcctccctgggg

SEQ ID NO: 115234 - DNA, 120 bp, Artificial Sequence
  ENSG00000100418_4 (sequence is synthesized)
gagtccctgttccgaggtgaggcctacaacctctttgaacacaattgtaacaccttcagcaacgaagtggcacagttcctgactgggcggaagattccttcttacatcacagacctgccc

SEQ ID NO: 115235 - DNA, 120 bp, Artificial Sequence
  ENSG00000100418_5 (sequence is synthesized)
tctgaagttctctccacgccctttggacaggcacttcggcccctcctggactccattcagatccagcctccaggagggagctccgtgggcagacccaacggccagagctaacaggactgc

SEQ ID NO: 115236 - DNA, 120 bp, Artificial Sequence
  ENSG00000100418_6 (sequence is synthesized)
ctgggaccgccctgcctcaccagggcttttcctttttaaacaaaacaaaccctaccagatttctattttataattttacatcagagctaacaaccaggggacggctttttaaatttccca

SEQ ID NO: 115237 - DNA, 120 bp, Artificial Sequence
  ENSG00000100418_7 (sequence is synthesized)
gggaaggagaccgtcaggccgcatgtagacaatgctgctaagaaacagaacaaaatgccaccccttctaatagtattatactaatttattaaggctgtcttgtctgtgcgttcacttcgg

SEQ ID NO: 115238 - DNA, 120 bp, Artificial Sequence
  ENSG00000100418_8 (sequence is synthesized)
atgctgtttcctaagcgtcctccacactggagaaagggaggggctttgtttaaacagaaagcgagtcacagtttgcgggagccccaacctagaactctttccagagaacactcacgctct

SEQ ID NO: 115239 - DNA, 120 bp, Artificial Sequence
  ENSG00000100418_9 (sequence is synthesized)
acccaagttgccaacacctgtgggacccaggtgagttttagaacatccgtgacccagaaagttactctagtgttaaatgaaccaaaggatttggtgtacatgggaccggtttcaggatga

SEQ ID NO: 115240 - DNA, 120 bp, Artificial Sequence
  ENSG00000100418_10 (sequence is synthesized)
ctaacctaacctaagtgaactctttagccacaaccctcaccttccctcccttaccccaagcaaggccagtgctggagcagccattgcctccggatcaagggagtaacagcaagtatcagg

SEQ ID NO: 115241 - DNA, 120 bp, Artificial Sequence
  ENSG00000100418_11 (sequence is synthesized)
ccggagaaaacaggataaagccattcctccttccacctagatggattgccaatcttctgccatcaattttgggaaacctgcctttgtgcccccgaggctgcctttcctcagcatagctga

SEQ ID NO: 115242 - DNA, 120 bp, Artificial Sequence
  ENSG00000100418_12 (sequence is synthesized)
cttgtcatagtggatgaggtctgggctggagcagtagaagccaaggccttttttctgcaagtaatgatgtaggttatttgcagtctctgtaaccaccatccaggccagtacgcagtattt

SEQ ID NO: 115243 - DNA, 120 bp, Artificial Sequence
  ENSG00000100418_13 (sequence is synthesized)
ctctgtaaccaccatccaggccagtacgcagtatttagctggggaccaagggatgggattccctactctaagaaaatacctttattttaattattattattttttgagacggagtctcgc

SEQ ID NO: 115244 - DNA, 66 bp, Artificial Sequence
  ENSG00000100418_14 (sequence is synthesized)
ctggccagaaaatacctttgatatggaaagaataatgatgtgaggcctggcgcggtggctcacgcc

SEQ ID NO: 115245 - DNA, 120 bp, Artificial Sequence
  ENSG00000100418_15 (sequence is synthesized)
actccatctcaaaaaaataaaataatgaagtggaatcaaggtggcaagaaaatttagaatcgtttctgatagggactttcccttatcctaaatgtgttttgaaggcacacgttatttcca

SEQ ID NO: 115246 - DNA, 120 bp, Artificial Sequence
  ENSG00000100418_16 (sequence is synthesized)
ttgtcattctgactttagaaaggcaggttggggcatgagtgggcattttcctaatgacttgctgctaggaggttataggcagggaacagtctgggagtctctaatccagagagactttca

SEQ ID NO: 115247 - DNA, 120 bp, Artificial Sequence
  ENSG00000100418_17 (sequence is synthesized)
gattccctctcttcacatgaacctccattagttagattttgggaaagtgagcatgaagaagggactcagagctgccaggtacccgagtctcaggtctgacatccttgggccccttctgcc

SEQ ID NO: 115248 - DNA, 120 bp, Artificial Sequence
  ENSG00000100418_18 (sequence is synthesized)
acaacttcttgccacttcacggacttgaattatgttgcttcttcctggaagtctggcctgcagcacaggcctttcctctccaaaaagctgctgctcatttctggccccatctgctgctat

SEQ ID NO: 115249 - DNA, 120 bp, Artificial Sequence
  ENSG00000100418_19 (sequence is synthesized)
ctttgccatcagccatcacagtttggcatcatcagagtctcagctagaggagctgtcattctgccttagtgtttgcctgcgacctgaccaggggcatgaccagctgggatgtcaagtgac

SEQ ID NO: 115250 - DNA, 120 bp, Artificial Sequence
  ENSG00000100418_20 (sequence is synthesized)
atttgggaacttgtagaggccaaatgattgaaagtttaattcttctcaagacccactgatttgccagtgtgcatggaaataatagattagagcagaaactagcagggactgttgtataat

SEQ ID NO: 115251 - DNA, 120 bp, Artificial Sequence
  ENSG00000100418_21 (sequence is synthesized)
cgtgatctactagcagaattgggcccaaagagaaagaatttctgaggctgggtttcttctgggagggtagcaggttggtcttggccagtgctctgtttcccaccagtgttgttccctttt

SEQ ID NO: 115252 - DNA, 120 bp, Artificial Sequence
  ENSG00000100418_22 (sequence is synthesized)
ccagcttgcctggcccggctctgtcttccagggtcctgctccagacccctctgcctggggtctcccctccatccagggggttctgggcatcacagctcctttttttcctttctcctcttc

SEQ ID NO: 115253 - DNA, 120 bp, Artificial Sequence
  ENSG00000100418_23 (sequence is synthesized)
cagatccagtttcagctggtttgcttcttccagcaggcacccttaggcccaggagcagctcccctgagagaatttgagtcactcatttccttgaacagcacccccctttatactagcagc

SEQ ID NO: 115254 - DNA, 120 bp, Artificial Sequence
  ENSG00000100418_24 (sequence is synthesized)
catttgtgccattgcctgtgccctagggtttgtggggagagagcgagggatcactgagcagttttcccagagctccatgggaaggcaagctctccctcccaatgggagccccactgtcac

SEQ ID NO: 115255 - DNA, 120 bp, Artificial Sequence
  ENSG00000100418_25 (sequence is synthesized)
taactgtaaactcaggctcaggcttcaactgcctacccccatcctcatatttctgtctgtcccagcacctcaggagcattctcattgtggccggctaactccgcctggatgtgaacaggc

SEQ ID NO: 115256 - DNA, 120 bp, Artificial Sequence
  ENSG00000100418_26 (sequence is synthesized)
aagcacagtgggaaatgagtcacgtacttgtattgcacagtggacacctctagaggtccattggtttaaagggatagggaaggaggagggatgagaccatcaccccctcccagaagtaaa

SEQ ID NO: 115257 - DNA, 120 bp, Artificial Sequence
  ENSG00000100418_27 (sequence is synthesized)
tctagtatctgagttttctttatgcccttgagtcaaactaataactgtctagtacggaggtgtttgctggttttcttcggtgttttttctaatgcaataaactcatttctgcctgctgca

SEQ ID NO: 115258 - DNA, 120 bp, Artificial Sequence
  ENSG00000100418_28 (sequence is synthesized)
atgtgccccaagccttggaagagccttgcaggccatcatccaggcagtataccccgaaaggacacaacacccccaaagccatctcacctcctccctcttgtcgttgattgcattcaggca

SEQ ID NO: 115259 - DNA, 120 bp, Artificial Sequence
  ENSG00000100418_29 (sequence is synthesized)
tcattccaggaccatgtctatttgcttattctgactcagtttctcctgaactatggccttatttaacagagatcctggcaggtttcgcaggcccagcaaggtgggctgttttttatatct

SEQ ID NO: 115260 - DNA, 120 bp, Artificial Sequence
  ENSG00000100418_30 (sequence is synthesized)
gaggaagcacctcccaggaagagcttgcataggaaacaagactgctgtggcaggctggtgaggagccccagtccgccagccctggccctgccttcctatcattcgatgagtttgcagtcc

SEQ ID NO: 115261 - DNA, 120 bp, Artificial Sequence
  ENSG00000100418_31 (sequence is synthesized)
cacagctctgctgagggatctaggttatggggccctgagcaaactggagtagccagaatgtgcttgctgttattattttatgggtggagttcctggaattgtctgaattaggtttgatat

SEQ ID NO: 115262 - DNA, 120 bp, Artificial Sequence
  ENSG00000100418_32 (sequence is synthesized)
ttctaggtttcatctgtctatactttggagtacttcattcctttaaacttggagatgattttcaaaaatggcagtatccactgaagaaaaagccagtgacttaaaagtttctgggcaacc

SEQ ID NO: 115263 - DNA, 120 bp, Artificial Sequence
  ENSG00000100418_33 (sequence is synthesized)
ttatttatggttgtcgtaatcatggaaaatctccaaactccagtatttgtagttttttttccatctgttactatgagagcaacctaggagccctttagaaaggcattaatggctgggccc

SEQ ID NO: 115264 - DNA, 120 bp, Artificial Sequence
  ENSG00000100418_34 (sequence is synthesized)
aaatccccattcacggtcagtgcccttcctctggcccccatctgccctcccaaccaggtgggcctgccctgatggcagattctaacacagaaggctgccattctctccacccactgatgc

SEQ ID NO: 115265 - DNA, 120 bp, Artificial Sequence
  ENSG00000100418_35 (sequence is synthesized)
gcacctgtattacctccaccttcagagctagaccagctctgccctggcctaagtgcaaccacagaacttagacacccacttgacactggcttcagtacttgcacaaaattctggcgtctg

SEQ ID NO: 115266 - DNA, 80 bp, Artificial Sequence
  ENSG00000100422_0 (sequence is synthesized)
gcgcccccagcctggcggacgagcccggcggcggagatgggggcgacgggggcggcggagccgctgcaatccgtgctgtg

SEQ ID NO: 115267 - DNA, 120 bp, Artificial Sequence
  ENSG00000100422_1 (sequence is synthesized)
ggagatgggggcgacgggggcggcggagccgctgcaatccgtgctgtgggtgaagcagcagcgctgcgccgtgagcctggagcccgcgcgggctctgctgcgctggtggcggagcccggg

SEQ ID NO: 115268 - DNA, 120 bp, Artificial Sequence
  ENSG00000100422_2 (sequence is synthesized)
gcgcggatgcctgctctgtgcctgtatctgagatcatcgccgttgaggaaacagacgttcacgggaaacatcaaggcagtggaaaatggcagaaaatggaaaagccttacgcttttacag

SEQ ID NO: 115269 - DNA, 120 bp, Artificial Sequence
  ENSG00000100422_3 (sequence is synthesized)
ttcactgtgtaaagagagcacgacggcaccgctggaagtgggcgcaggtgactttctggtgtccagaggagcagctgtgtcacttgtggctgcagaccctgcgggagatgctggagaagc

SEQ ID NO: 115270 - DNA, 120 bp, Artificial Sequence
  ENSG00000100422_4 (sequence is synthesized)
tgacgtccagaccaaagcatttactggtatttatcaacccgtttggaggaaaaggacaaggcaagcggatatatgaaagaaaagtggcaccactgttcaccttagcctccatcaccactg

SEQ ID NO: 115271 - DNA, 120 bp, Artificial Sequence
  ENSG00000100422_5 (sequence is synthesized)
acatcatcgttactgaacatgctaatcaggccaaggagactctgtatgagattaacatagacaaatacgacggcatcgtctgtgtcggcggagatggtatgttcagcgaggtgctgcacg

SEQ ID NO: 115272 - DNA, 120 bp, Artificial Sequence
  ENSG00000100422_6 (sequence is synthesized)
gtctgattgggaggacgcagaggagcgccggggtcgaccagaaccacccccgggctgtgctggtccccagtagcctccggattggaatcattcccgcagggtcaacggactgcgtgtgtt

SEQ ID NO: 115273 - DNA, 120 bp, Artificial Sequence
  ENSG00000100422_7 (sequence is synthesized)
actccaccgtgggcaccagcgacgcagaaacctcggcgctgcatatcgttgttggggactcgctggccatggatgtgtcctcagtccaccacaacagcacactccttcgctactccgtgt

SEQ ID NO: 115274 - DNA, 120 bp, Artificial Sequence
  ENSG00000100422_8 (sequence is synthesized)
ccctgctgggctacggcttctacggggacatcatcaaggacagtgagaagaaacggtggttgggtcttgccagatacgacttttcaggtttaaagaccttcctctcccaccactgctatg

SEQ ID NO: 115275 - DNA, 120 bp, Artificial Sequence
  ENSG00000100422_9 (sequence is synthesized)
aagggacagtgtccttcctccctgcacaacacacggtgggatctccaagggataggaagccctgccgggcaggatgctttgtttgcaggcaaagcaagcagcagctggaggaggagcaga

SEQ ID NO: 115276 - DNA, 120 bp, Artificial Sequence
  ENSG00000100422_10 (sequence is synthesized)
agaaagcactgtatggtttggaagctgcggaggacgtggaggagtggcaagtcgtctgtgggaagtttctggccatcaatgccacaaacatgtcctgtgcttgtcgccggagccccaggg

SEQ ID NO: 115277 - DNA, 120 bp, Artificial Sequence
  ENSG00000100422_11 (sequence is synthesized)
gcctctccccggctgcccacttgggagacgggtcttctgacctcatcctcatccggaaatgctccaggttcaattttctgagatttctcatcaggcacaccaaccagcaggaccagtttg

SEQ ID NO: 115278 - DNA, 120 bp, Artificial Sequence
  ENSG00000100422_12 (sequence is synthesized)
acttcacttttgttgaagtttatcgcgtcaagaaattccagtttacgtcgaagcacatggaggatgaggacagcgacctcaaggagggggggaagaagcgctttgggcacatttgcagca

SEQ ID NO: 115279 - DNA, 120 bp, Artificial Sequence
  ENSG00000100422_13 (sequence is synthesized)
gccacccctcctgctgctgcaccgtctccaacagctcctggaactgcgacggggaggtcctgcacagccctgccatcgaggtcagagtccactgccagctggttcgactctttgcacgag

SEQ ID NO: 115280 - DNA, 120 bp, Artificial Sequence
  ENSG00000100422_14 (sequence is synthesized)
gaattgaagagaatccgaagccagactcacacagctgagaagccggcgtcctgctcacaaactgggaaagtgtgaaaactatttaagataattattacagaccaattatgttgatatata

SEQ ID NO: 115281 - DNA, 120 bp, Artificial Sequence
  ENSG00000100422_15 (sequence is synthesized)
catttaaatgtagaaatttatttttgatagttaaatcttgattttagaagaaaacccttttgtcaacaattttgtgtacatatttggcattttcagttctgtacgcatctgcgggttgca

SEQ ID NO: 115282 - DNA, 120 bp, Artificial Sequence
  ENSG00000100422_16 (sequence is synthesized)
gcccacgccgcttactctcagcggatgcagctgctcacttgggggcactggcctcttaggttttaacgatgtcaacagtgtagtttagaaaatggcccgttagtggctctattgcaataa

SEQ ID NO: 115283 - DNA, 120 bp, Artificial Sequence
  ENSG00000100422_17 (sequence is synthesized)
tgttagggacattatatgatttccacgcaggtcacaccatctgggcctgaggtagcagtgggtcactttgatccactttgcaggacttattctgtaacggtttgtggccaagttttggga

SEQ ID NO: 115284 - DNA, 120 bp, Artificial Sequence
  ENSG00000100422_18 (sequence is synthesized)
tggttgattctctttgccttcatttcaccttcctcttcgtttacggttaggacatcgctgcttgatccttacaatactgtgcaactgcaatgcaacgtggccctgcttcaggtgatccgc

SEQ ID NO: 115285 - DNA, 120 bp, Artificial Sequence
  ENSG00000100422_19 (sequence is synthesized)
gggaggggcctccacgccagcgccgggaaggctgctggggcctccacacctgcctcatcacggcggcgaggctacgacaatccggctgggagcatgaccttggcgtctgttctgggagca

SEQ ID NO: 115286 - DNA, 120 bp, Artificial Sequence
  ENSG00000100422_20 (sequence is synthesized)
cggatgataagctctggaagctggcagtgtgtaaagcactggcaagtttgttactgttaaaatgtcaaataccaatgctttatatcgacgcgaagtgcttaacacagccgggcttggggg

SEQ ID NO: 115287 - DNA, 120 bp, Artificial Sequence
  ENSG00000100422_21 (sequence is synthesized)
cagtcaggaggaagctggccatccgtggaggaggggccggtcctggactcccgcaggactcctctgaggcagggcctgaagtctgtacacgtggtccagatttgtccttgtcttttcttc

SEQ ID NO: 115288 - DNA, 120 bp, Artificial Sequence
  ENSG00000100422_22 (sequence is synthesized)
acactgagttctctatatttattgaacatcttgtccttttaagccagagtagtgtaaactgcgtctcggatgtctgtcttttgcctcgaagccacgatggatcgctggtttcctctgcag

SEQ ID NO: 115289 - DNA, 120 bp, Artificial Sequence
  ENSG00000100422_23 (sequence is synthesized)
cgcgagggctccggcgaccagaggattcttcccggaaggcattcctgccgcgctccccggggcacccctcaattgtgtactacgtccttgtttagtgtgtatccgtgcccacgtagatga

SEQ ID NO: 115290 - DNA, 120 bp, Artificial Sequence
  ENSG00000100422_24 (sequence is synthesized)
tgtctgtaacgtagttttgtttgaaatatgagaatatgcggcttaaactttgatctgtaaggagcggggccgtggccgtttggagcacgctgtagacaccgttcctcatgctgccgggtg

SEQ ID NO: 115291 - DNA, 120 bp, Artificial Sequence
  ENSG00000100422_25 (sequence is synthesized)
ggttttgcagaagctcccttagtgatttcatgtttaacaggcagcatccattttcagaatttcctggcattgatttatattttgaagcatacaggaaacttctcgtttcctcgtttagcc

SEQ ID NO: 115292 - DNA, 120 bp, Artificial Sequence
  ENSG00000100422_26 (sequence is synthesized)
ccacccagatcaggtgaaagggcagctttaatggtggtttttatggaccacattatcagagagcactgtgcaagccaaatggttcaataatgaatgaaaattctgggtgtaaagagtaaa

SEQ ID NO: 115293 - DNA, 120 bp, Artificial Sequence
  ENSG00000100422_27 (sequence is synthesized)
tatgccctggctctttctaccaatgtttgctcctggttggaaagaaaccaaagatttaagacgggctgctcttccagactggctgtgcctgcctgtgcccagcaacctgtgcagccggca

SEQ ID NO: 115294 - DNA, 120 bp, Artificial Sequence
  ENSG00000100422_28 (sequence is synthesized)
gtgtgcctggtgtcacgccaggaggctgtggctgctgtgggccctctggaattgtgctcctcacaaagtttccccaaaaggttcttctaagcctttattgtccctggtaaatgtttcccg

SEQ ID NO: 115295 - DNA, 84 bp, Artificial Sequence
  ENSG00000100422_29 (sequence is synthesized)
gtgaaacctcgtctctactaaaaatacacaacttagccagtcttgttggcgcacgcctgtaatctcagctactaaagaggtgga

SEQ ID NO: 115296 - DNA, 120 bp, Artificial Sequence
  ENSG00000100422_30 (sequence is synthesized)
gcgccactgcactccagcctgggcaaacagagggagactccatcgccccccccaacaaaaaaaaaagtttcccatacactggcctgccccaaaacccactaacaattttagcaaaacagt

SEQ ID NO: 115297 - DNA, 120 bp, Artificial Sequence
  ENSG00000100422_31 (sequence is synthesized)
ccaggccaaagaggaagcatttcatgttcaataagaaacccagccattccgcatggctggttcctgagtggctctggtgatactctccagccacctgctgacattcagaatctcagacct

SEQ ID NO: 115298 - DNA, 120 bp, Artificial Sequence
  ENSG00000100422_32 (sequence is synthesized)
cgggactgctgttgcggtaccgtgtgtctgacacctgccagcagccctttgctatctgcgcgcaggatgggggtgactgcccagacattcccgctagataggctctgatttccggggcag

SEQ ID NO: 115299 - DNA, 120 bp, Artificial Sequence
  ENSG00000100422_33 (sequence is synthesized)
cctttcagatgcggcagacatacaacacctgtactttagagttttaagggaaaaaaaatcagaagtgctggttagatagtaaaaacttaggataacttagaaaggctagttttagcttcc

SEQ ID NO: 115300 - DNA, 120 bp, Artificial Sequence
  ENSG00000100422_34 (sequence is synthesized)
tttgtggctccctggtgcaaaacaattagcagttatgcaatggacctgattctagtttattctaattaagaagtgaggccgagtttgacttcgttcctgaatacaatcttgagtaactgg

SEQ ID NO: 115301 - DNA, 120 bp, Artificial Sequence
  ENSG00000100422_35 (sequence is synthesized)
gaaagtctgagtgaaaggatggcctcattctctttctaatcttgctggtttcaagattagaaaatggcattatttgatctgaaatgtttgagaagacacgaataaagttacttgggcaga

SEQ ID NO: 115302 - DNA, 120 bp, Artificial Sequence
  ENSG00000100422_36 (sequence is synthesized)
gctgcgccgtgagcctggagcccgcgcgggctctgctgcgctggtggcggagcccggggcccggagccggcgcccccggcgcggcatcacccctatttcagatgtggacagtaggagtgg

SEQ ID NO: 115303 - DNA, 120 bp, Artificial Sequence
  ENSG00000100422_37 (sequence is synthesized)
tgggtcatcatgctgggacagtgactgactgtacaagagcacagacaaggactagcaatttggatcgctgcagcttcctgggcctgggtgaggtctgcacctgaggaagccgcgacagca

SEQ ID NO: 115304 - DNA, 120 bp, Artificial Sequence
  ENSG00000100422_38 (sequence is synthesized)
agtgccctgggccgccagcctggtgggaagtagggcaggacgaaaacaggaacttgaagtgggtcatgctcgttgaactggaaacactgagttgatatctgggttatttcccctgactgt

SEQ ID NO: 115305 - DNA, 120 bp, Artificial Sequence
  ENSG00000100422_39 (sequence is synthesized)
atttctcccagccaggctatgttagctggagggccaggcagaaaccgtctccaggtggcacctcagcgtcctcatgctgtgcttctcctcatgtccaaaccttttagagaaggacatgtt

SEQ ID NO: 115306 - DNA, 120 bp, Artificial Sequence
  ENSG00000100425_0 (sequence is synthesized)
atccgataggaccaggtagccactgagcatgcctgtctggtgggcatagcctctgtgcctggtggggtccagccctgtatgtggacttcctgggggaccgcctgcatgctgggaaagtcc

SEQ ID NO: 115307 - DNA, 120 bp, Artificial Sequence
  ENSG00000100425_1 (sequence is synthesized)
tgcaactgtgggctctgggccggacccctcctccttggggagcgttgctgtggtctccgcagcctgttggtgtggtctgagaggggactggtgtgtggtggtagggacgcaggtgctcag

SEQ ID NO: 115308 - DNA, 120 bp, Artificial Sequence
  ENSG00000100425_2 (sequence is synthesized)
gagggctcctcaggctgcctctctgcctgttactgctgctccctccctggtcctggggactcgctcaggcctggatgtgtggttttggacaccttggaaagaggttagctgtgagttttg

SEQ ID NO: 115309 - DNA, 120 bp, Artificial Sequence
  ENSG00000100425_3 (sequence is synthesized)
ctttgattgggctttgagctgctgagctagatctgtccaagcatgcttttgtggttttctcgagtctttggtcaccctgcgtagaattacctttacttttgccttcattttaggtaatca

SEQ ID NO: 115310 - DNA, 120 bp, Artificial Sequence
  ENSG00000100425_4 (sequence is synthesized)
ttaccaaatgaggaggaaaggacgatgtcatcgaggctctgcagcgaggcatccttcttccccatgcagtgttaaacactcccctacgcgagaaacgctgacctacgctcaagctcaaag

SEQ ID NO: 115311 - DNA, 120 bp, Artificial Sequence
  ENSG00000100425_5 (sequence is synthesized)
gatggtagagatagaaattgaagggcgcttgcacaggatcagtatttttgatcccctggagatcatattggaagatgacctcactgctcaagagatgagtgagtgcaacagcaacaagga

SEQ ID NO: 115312 - DNA, 120 bp, Artificial Sequence
  ENSG00000100425_6 (sequence is synthesized)
aaacagcgagcggcctcctgtctgcttaagaactaagcgtcacaaaaacaacagagtcaaaaagaaaaacgaggccctccccagcgcccacggcacgccggcctcggccagtgccctccc

SEQ ID NO: 115313 - DNA, 120 bp, Artificial Sequence
  ENSG00000100425_7 (sequence is synthesized)
ggagcccaaggtgcgcatcgtggagtacagccctccgtccgcccccaggaggcctcctgtgtactacaagttcatcgagaagtcggccgaggaactggacaacgaggtggagtatgacat

SEQ ID NO: 115314 - DNA, 120 bp, Artificial Sequence
  ENSG00000100425_8 (sequence is synthesized)
ggacgaggaggactatgcctggctggagatcgtcaatgagaagcgcaagggcgactgcgtccccgccgtgtcgcagagcatgtttgagttcctgatggaccgcttcgagaaggagtcgca

SEQ ID NO: 115315 - DNA, 120 bp, Artificial Sequence
  ENSG00000100425_9 (sequence is synthesized)
ctgcgagaaccagaagcagggcgagcagcagtctctgatcgacgaggacgccgtgtgctgcatctgcatggacggggagtgtcagaacagcaacgtgatcctcttctgcgacatgtgcaa

SEQ ID NO: 115316 - DNA, 120 bp, Artificial Sequence
  ENSG00000100425_10 (sequence is synthesized)
cctggccgtgcaccaggagtgctacggggtgccctacatccccgagggccagtggctctgccgccactgcctgcagtcgcgggcccggcccgccgactgtgtgctgtgccccaacaaggg

SEQ ID NO: 115317 - DNA, 120 bp, Artificial Sequence
  ENSG00000100425_11 (sequence is synthesized)
tggtgccttcaaaaagacagatgacgaccgctggggtcacgtggtgtgtgccctgtggatcccagaggtcggctttgccaacacggtgttcatcgagcccatcgatggggtgaggaacat

SEQ ID NO: 115318 - DNA, 120 bp, Artificial Sequence
  ENSG00000100425_12 (sequence is synthesized)
ccctccagcccggtggaaactgacatgctacctctgtaagcagaagggcgtgggtgcctgcatccagtgccacaaagcaaactgctacacagcattccatgtgacgtgtgcccagaaggc

SEQ ID NO: 115319 - DNA, 120 bp, Artificial Sequence
  ENSG00000100425_13 (sequence is synthesized)
tggcctgtacatgaaaatggagcccgtgaaggaactgactggcggtggcaccaccttctccgtcagaaagaccgcttactgtgatgtccacacgcctccaggctgcacccggaggcctct

SEQ ID NO: 115320 - DNA, 120 bp, Artificial Sequence
  ENSG00000100425_14 (sequence is synthesized)
gaatatttacggggatgtcgaaatgaaaaatggcgtctgtcgaaaagagagctcggttaaaacggtcaggtccacatccaaggtcaggaagaaggcaaaaaaggctaagaaagctctggc

SEQ ID NO: 115321 - DNA, 120 bp, Artificial Sequence
  ENSG00000100425_15 (sequence is synthesized)
tgagccctgcgcggtcctgccgaccgtgtgcgctccttatattcccccgcagaggttaaataggattgcgaatcaggtggccattcagcggaagaagcagtttgtggagcgagcccacag

SEQ ID NO: 115322 - DNA, 120 bp, Artificial Sequence
  ENSG00000100425_16 (sequence is synthesized)
ctactggctgctcaagcggctgtccaggaacggggcccccctgctgcggcggctgcagtccagcctgcagtctcagcgaagctcacagcagagagaaaatgatgaggagatgaaggctgc

SEQ ID NO: 115323 - DNA, 120 bp, Artificial Sequence
  ENSG00000100425_17 (sequence is synthesized)
caaagagaagctgaagtactggcagcggctgcggcacgacctggagcgcgctcgcctgctgatcgagctgctgcgcaagcgggagaagctcaagcgtgagcaggtgaaggtggagcaggt

SEQ ID NO: 115324 - DNA, 120 bp, Artificial Sequence
  ENSG00000100425_18 (sequence is synthesized)
cgccatggagctgcggctgaccccgctgacggtgctgctgcgctcagtgctggaccagctgcaagacaaggaccccgccaggatatttgcgcagcccgtgagtctgaaggaggtaccaga

SEQ ID NO: 115325 - DNA, 120 bp, Artificial Sequence
  ENSG00000100425_19 (sequence is synthesized)
agaagctcaagggtataaaaacctccatgagtttgaggaggattttgatctcattatagataactgcatgaagtacaatgccagggacaccgtgttctatagagccgcggtgaggctgcg

SEQ ID NO: 115326 - DNA, 120 bp, Artificial Sequence
  ENSG00000100425_20 (sequence is synthesized)
cgatcagggaggtgttgttctgaggcaggcccggcgcgaggtggacagcatcggcttggaagaggcctcggggatgcacctgcctgagcggcctgctgcggcaccgcggcggcctttctc

SEQ ID NO: 115327 - DNA, 120 bp, Artificial Sequence
  ENSG00000100425_21 (sequence is synthesized)
ctgggaagacgtggacaggttgctggaccccgccaacagagcccacctgggcctggaggagcagctgagagagctgctggacatgctcgacctcacctgcgctatgaagtccagcggctc

SEQ ID NO: 115328 - DNA, 120 bp, Artificial Sequence
  ENSG00000100425_22 (sequence is synthesized)
ccggagcaagcgggcaaagctgctcaaaaaggaaattgcccttctccgaaacaagctgagccagcagcacagccagcccctgcccacggggccaggcttggaaggcttcgaagaggacgg

SEQ ID NO: 115329 - DNA, 120 bp, Artificial Sequence
  ENSG00000100425_23 (sequence is synthesized)
agctgcgctggggccggaggcgggcgaggaagtccttccgaggttggagactcttctgcagccaaggaaaaggtcgcggagcacatgcggagactccgaggtggaggaggagtccccagg

SEQ ID NO: 115330 - DNA, 120 bp, Artificial Sequence
  ENSG00000100425_24 (sequence is synthesized)
aaagcgcctggacgcaggtctcaccaacggctttgggggtgcgaggagcgagcaggagccgggcggcggcctggggaggaaggccacaccccgacgacgctgtgcctccgagtccagcat

SEQ ID NO: 115331 - DNA, 120 bp, Artificial Sequence
  ENSG00000100425_25 (sequence is synthesized)
ctcctccagcaacagcccgctctgcgactcgagctttaatgcgcccaaatgtgggcggggcaaaccggctcttgtgcgacggcacacgctggaggaccgcagtgagctgatctcctgcat

SEQ ID NO: 115332 - DNA, 120 bp, Artificial Sequence
  ENSG00000100425_26 (sequence is synthesized)
cgagaatgggaactacgccaaggcggccaggatcgcagccgaagtcggccagagcagcatgtggatctccactgatgccgccgcctcggtgctggagcctctgaaggtggtgtgggccaa

SEQ ID NO: 115333 - DNA, 120 bp, Artificial Sequence
  ENSG00000100425_27 (sequence is synthesized)
gtgcagcggctacccctcctacccggcactgatcatcgaccccaagatgccccgtgtgcctggccaccacaacggcgtcaccatcccggccccacccctggacgtgctgaagattgggga

SEQ ID NO: 115334 - DNA, 120 bp, Artificial Sequence
  ENSG00000100425_28 (sequence is synthesized)
gcacatgcagaccaagtctgatgagaagctgttcctcgttctcttttttgataataagagaagttggcagtggcttcctaagtccaaaatggttccccttggtattgacgaaactataga

SEQ ID NO: 115335 - DNA, 120 bp, Artificial Sequence
  ENSG00000100425_29 (sequence is synthesized)
caagttaaagatgatggaagggaggaattccagcatccggaaggccgtgcggatcgcttttgaccgcgccatgaaccacctgagccgcgtccacggggagccgaccagcgacctcagtga

SEQ ID NO: 115336 - DNA, 120 bp, Artificial Sequence
  ENSG00000100425_30 (sequence is synthesized)
cattgactgacggcccggccgccagcgcgggtcttgtccatagtgttgataagctgtacatgtttgtatattgttcaaaacttaacttattctgatttttagttatagctctttaattct

SEQ ID NO: 115337 - DNA, 120 bp, Artificial Sequence
  ENSG00000100425_31 (sequence is synthesized)
ttttccccggggaggggggaggttttatttccaagttttctaggaacccatctccgtctgggcgctgtgagtggggtgggcacgtccgggcagcccagtgcgtctgtcgcacgtccccag

SEQ ID NO: 115338 - DNA, 120 bp, Artificial Sequence
  ENSG00000100425_32 (sequence is synthesized)
gccgtgctgctggcgtcactttctttgatatgtagctttttcttaaagacttttgaatgtttaataattttgtaaatcatgctctttacacagagtaccacttatttaataagacgggat

SEQ ID NO: 115339 - DNA, 120 bp, Artificial Sequence
  ENSG00000100425_33 (sequence is synthesized)
gtaaatttacaatgacaaatgtgtattttaagaaagaaaatgacattattttgaatggtactttgtggaaagaggggagaataaagttatgctgtgtacatcacttgcagatcaccaaaa

SEQ ID NO: 115340 - DNA, 120 bp, Artificial Sequence
  ENSG00000100425_34 (sequence is synthesized)
acactccgctgcccgtgaccgccggtgggtgtgtccccgctcccgtcgtcccgcccacctcaaaccccgcaggtgtgcctcccagcggattatttattgtagaaagtgtattcatttgct

SEQ ID NO: 115341 - DNA, 120 bp, Artificial Sequence
  ENSG00000100425_35 (sequence is synthesized)
ttataatgaaaaatacatttgcaaaggtatattgatatgcatttttatacaggcacataaaaattcaacttggcttgggagcagaatgcattgcattgtataaatgactctggcctgtgt

SEQ ID NO: 115342 - DNA, 120 bp, Artificial Sequence
  ENSG00000100425_36 (sequence is synthesized)
gtactttgattttataacttgtaatcttttgtttacaatgaggggctttctgtaacttgttttaatttagaacactttggtagcaatagaaactttggatacatttttgtatggtacctg

SEQ ID NO: 115343 - DNA, 120 bp, Artificial Sequence
  ENSG00000100425_37 (sequence is synthesized)
tgatgtatatagaattagtactttatttttatttttaagaggtaaagcattatgttggggaaagtagggtgggtttccaaatttgcattttttatattaaaaataaagtcaagatttgga

SEQ ID NO: 115344 - DNA, 120 bp, Artificial Sequence
  ENSG00000100425_38 (sequence is synthesized)
caatctagtttcaacatacaatgaggatttctgtctgatacagagaaagatacccagtgtctggagggtctgtcttaagaagtgctcttgaagtctgctgggatttcctttcgggactca

SEQ ID NO: 115345 - DNA, 120 bp, Artificial Sequence
  ENSG00000100425_39 (sequence is synthesized)
agataaatctccccctaaacttgaaccatcagatgcattacctcttccttcaaactcggagactaattcagaaccaccaaccctcaaaccagtagaactcaacccagagcagagtaaact

SEQ ID NO: 115346 - DNA, 120 bp, Artificial Sequence
  ENSG00000100425_40 (sequence is synthesized)
tttcaaaagagtcacatttgataatgaatcacatagcgcttgcactcagagcgcactggtaagcggacgccctccagagcccacccgcgccagtagtggcgatgtgccggcggcggcggc

SEQ ID NO: 115347 - DNA, 120 bp, Artificial Sequence
  ENSG00000100425_41 (sequence is synthesized)
ctccgcggtggcggagccagcaagcgatgtaaacagacgcacttctgttctcttctgcaaatcgaaaagtgtaagccccccaaagtctgccaagaacactgaaacccagccaacttctcc

SEQ ID NO: 115348 - DNA, 120 bp, Artificial Sequence
  ENSG00000100425_42 (sequence is synthesized)
tctttgtctgctgggccctggcacagctaaagtcggaggtgagtgctccgctgtttgcctggtggagaagggcactgcccagccccctcgccgggactgtgggacgggcactgagcaccg

SEQ ID NO: 115349 - DNA, 120 bp, Artificial Sequence
  ENSG00000100425_43 (sequence is synthesized)
ggtctgtctctgcccgatggcttcctctccctctcgcctgagccccattggtctggactgtctcttccctactccttacccatgtgtccgctccagtgttgggggtccctctgctgtgct

SEQ ID NO: 115350 - DNA, 120 bp, Artificial Sequence
  ENSG00000100425_44 (sequence is synthesized)
gtgttcctggccgcggtctctgcagtctgggtttcccagtctccaggagatgctggtgcttcaggccaccttgccaccagtggaggagctcccagtgcgcctggcctgttggcaccatgg

SEQ ID NO: 115351 - DNA, 120 bp, Artificial Sequence
  ENSG00000100425_45 (sequence is synthesized)
gcagacggcctgtgtcggtttggttcctttgactgcttcagatcttctaggaggagctcctctactacgagagcctggacttcagcctcacggacaagaacctcagataggcaaggcttt

SEQ ID NO: 115352 - DNA, 120 bp, Artificial Sequence
  ENSG00000100426_0 (sequence is synthesized)
ggccgcgggaggggcgcgggggcagacaaagccgcggtaatgaatggagcgtccgcccgcgccgccgtcgtccgcagccggccgggagccgccccagaggccgggccgaggtaatgcaca

SEQ ID NO: 115353 - DNA, 120 bp, Artificial Sequence
  ENSG00000100426_1 (sequence is synthesized)
ggagccgccccagaggccgggccgaggtaatgcacaagggtcacgtgtatgctctcaagatgatcaggcagatcctgtcctcaggaccagaagcacgtctctgctgcacacattgttgtc

SEQ ID NO: 115354 - DNA, 120 bp, Artificial Sequence
  ENSG00000100426_2 (sequence is synthesized)
tacaccatgagtgtttagtagcaggactcttggaaagcagtgatctatgctgtaagaccatgagtcacagattctttttttcagtactatttatgattagccatatttctagaaacatcc

SEQ ID NO: 115355 - DNA, 120 bp, Artificial Sequence
  ENSG00000100426_3 (sequence is synthesized)
tgaaagatggaattatgacgaaaaagtgaagataatctacattcgggggcacaaatgagcacttggatcagtgttttatgaacctaagatacagccggagtagttatggtcagtcatgga

SEQ ID NO: 115356 - DNA, 120 bp, Artificial Sequence
  ENSG00000100426_4 (sequence is synthesized)
gaataacttgaaaacttgtcccaaagaggacggtgatttcgtttctgataaaataaagtttaaaatagaagaggaagatgatgatggaattcctcctgatagtttggaaagaatggactt

SEQ ID NO: 115357 - DNA, 120 bp, Artificial Sequence
  ENSG00000100426_5 (sequence is synthesized)
taaaagcgagcaggaggacatgaagcagacagacagcggtggggagcgagcgggcctcggtgggacgggttgcagctgcaagcccccggggaagtacttgtctgcagagagtgaggatga

SEQ ID NO: 115358 - DNA, 120 bp, Artificial Sequence
  ENSG00000100426_6 (sequence is synthesized)
ctatggcgcgctgttctcccagtacagcagcaccctatacgacgtggccatggaggccgtgacccagagcctcctttccagccggaacatgagctccaggaagaagtctccagcctggaa

SEQ ID NO: 115359 - DNA, 120 bp, Artificial Sequence
  ENSG00000100426_7 (sequence is synthesized)
gcatttttttatctctccccgagacagcactaaagcaatatgcatgtactgtgtgaaggagttcagcagaggcaaaaacgagaaagacttgagtaccagttgtctcatgaggcacgtgag

SEQ ID NO: 115360 - DNA, 120 bp, Artificial Sequence
  ENSG00000100426_8 (sequence is synthesized)
gcgcgcacacccgaccgtgctcattcaggaaaatggcagtgtgtctgccgtgtcctcgttcccctctccctcactcctgcttccaccacagcctgcggacgcgggtgacctcagcaccat

SEQ ID NO: 115361 - DNA, 120 bp, Artificial Sequence
  ENSG00000100426_9 (sequence is synthesized)
cctctcacccatcaaacttgtccagaaagtggcgtctaagatcccgtcccccgatcgaataacagaggagtctgtgtctgtagtttcttctgaagaaatctcctctgacatgtccgtttc

SEQ ID NO: 115362 - DNA, 120 bp, Artificial Sequence
  ENSG00000100426_10 (sequence is synthesized)
ggagaagtgcggcagagaagaagccctggtggggtcgtctccccacctccctgctctccattacgatgaacctgcagagaacttagcggagaagagccttccacttccaaagagcacctc

SEQ ID NO: 115363 - DNA, 120 bp, Artificial Sequence
  ENSG00000100426_11 (sequence is synthesized)
tgggtccaggagaaggtccgctgtctggaagcacttctacctgtcgccactggacaactccaaagctgtctgcattcactgcatgaacgagttcagccgggggaagaatgggaaggacct

SEQ ID NO: 115364 - DNA, 120 bp, Artificial Sequence
  ENSG00000100426_12 (sequence is synthesized)
gggcacgagctgcctcatcaggcacatgtggagggcacaccgcgccatcgtgttgcaggagaacgggggcacgggcatcccgccactgtactccacccctcccactctgctgccttcctt

SEQ ID NO: 115365 - DNA, 120 bp, Artificial Sequence
  ENSG00000100426_13 (sequence is synthesized)
gctgccgccggagggggagctcagctctgtgtcctcgtctccagtaaagccggtcagagagtccccttcggcctcctcctcccctgacaggctgactgaggacttgcagtctcacttgaa

SEQ ID NO: 115366 - DNA, 120 bp, Artificial Sequence
  ENSG00000100426_14 (sequence is synthesized)
ccctggagatgggctgatggaagacgtggcggccttctcatcttccgatgacataggggaggcctcggcgtcctctcctgagaagcagcaggctgatgggctgagtcctagattgtttga

SEQ ID NO: 115367 - DNA, 120 bp, Artificial Sequence
  ENSG00000100426_15 (sequence is synthesized)
atctggcgccatcttccagcagaataaaaaggtcatgaaaagactgaagtcggaggtctggcatcacttctccctggcccccatggacagcctcaaggccgagtgtcggtactgcggctg

SEQ ID NO: 115368 - DNA, 120 bp, Artificial Sequence
  ENSG00000100426_16 (sequence is synthesized)
tgccatcagccgggggaagaagggtgatgtgggcaccagctgcctgatgagacatctctaccggcgccatccagaagttgtcgggagccagaagggcttcctgggtgcaagtctggcaaa

SEQ ID NO: 115369 - DNA, 120 bp, Artificial Sequence
  ENSG00000100426_17 (sequence is synthesized)
ctctccgtatgccactttggcctctgcagaaagttcctcttccaaattgactgacttgccaacagtggtcacaaaaaacaatcaagttatgtttcctgttaatagcaaaaagacctcgaa

SEQ ID NO: 115370 - DNA, 120 bp, Artificial Sequence
  ENSG00000100426_18 (sequence is synthesized)
gctgtggaatcatttttctatttgctccgcagactccacaaaagtcgtgtgcttgcactgtggccggaccatcagccgggggaagaagccgactaacttgggtaccagctgtcttctgag

SEQ ID NO: 115371 - DNA, 120 bp, Artificial Sequence
  ENSG00000100426_19 (sequence is synthesized)
acatttacagcggttccatagcaacgtgctgaaaactgaggtctcggagacggctcggccctcctctccggacacccgggtgccgcggggcacagaattatcaggcgcttcctcttttga

SEQ ID NO: 115372 - DNA, 120 bp, Artificial Sequence
  ENSG00000100426_20 (sequence is synthesized)
tgacaccaatgagaagttttacgattctcacccagttgccaaaaaaatcacaagtctcatagctgaaatgattgcacttgacctccagccatattcttttgtagacaacgttggctttaa

SEQ ID NO: 115373 - DNA, 120 bp, Artificial Sequence
  ENSG00000100426_21 (sequence is synthesized)
caggctgcttgaatacttgaaacctcagtactccctccccgccccttcctacttctccaggacagctatcccaggtatgtatgataatgtgaagcagataattatgtcccaccttaagga

SEQ ID NO: 115374 - DNA, 120 bp, Artificial Sequence
  ENSG00000100426_22 (sequence is synthesized)
agctgagagtggtgtgatccacttcacgtctggaatatggatgagtaaccagacccgtgagtacctgaccctcacggcccactgggtttccttcgagtcgccagcccggccgcgctgtga

SEQ ID NO: 115375 - DNA, 120 bp, Artificial Sequence
  ENSG00000100426_23 (sequence is synthesized)
cgaccaccactgctcggcgctgttggacgtgtcgcaggtggactgcgactacagtggcaacagcattcagaagcagctggagtgctggtgggaagcgtgggtgacctccaccggccttca

SEQ ID NO: 115376 - DNA, 120 bp, Artificial Sequence
  ENSG00000100426_24 (sequence is synthesized)
ggtgggcatcaccgtcaccgacaacgccagcatcgggaagacgctgaacgagggggagcactcgagcgtgcagtgcttcagccatacggtgaacctgatcgtcagcgaggccattaagag

SEQ ID NO: 115377 - DNA, 120 bp, Artificial Sequence
  ENSG00000100426_25 (sequence is synthesized)
ccagcggatggtgcagaacctgctgagcctcgcccggaagatctgcgagcgggtgcaccggtcgcccaaggcgaaggagaaactggccgagctgcagagggagtacgcgctgcctcagca

SEQ ID NO: 115378 - DNA, 120 bp, Artificial Sequence
  ENSG00000100426_26 (sequence is synthesized)
tcacctcatccaggacgtcccgtccaagtggagcacttccttccacatgctcgagcggctcattgagcagaaaagggccattaacgagatgtccgtcgagtgtaacttccgagagctgat

SEQ ID NO: 115379 - DNA, 120 bp, Artificial Sequence
  ENSG00000100426_27 (sequence is synthesized)
cagctgcgaccagtgggaggtcatgcagtccgtgtgccgtgcgctaaagcccttcgaggctgcgagccgggagatgagcacgcagatgtccaccctcagccaggtcatccccatggtaca

SEQ ID NO: 115380 - DNA, 120 bp, Artificial Sequence
  ENSG00000100426_28 (sequence is synthesized)
ccatgctgcgctctctgaaggaggccatggtgagccgcctgtctgccaccctccacgacccgcggtacgtcttcgccacgctgctggatcctcgctacaaggcctccctgtttacggagg

SEQ ID NO: 115381 - DNA, 120 bp, Artificial Sequence
  ENSG00000100426_29 (sequence is synthesized)
aggaggcggagcagtacaaacaggatttaatcagggaactcgaactcatgaattctacctcagaggacgtggctgcctcccacaggtgtgatgctggctccccgtcgaaagactctgccg

SEQ ID NO: 115382 - DNA, 120 bp, Artificial Sequence
  ENSG00000100426_30 (sequence is synthesized)
cagaggagaacctgtggtcacttgtggccaaggtgaagaagaaagacccaagagaaaagctgcctgaagccatggtgcttgcgtatctggaggaggaggtgcttgaacacagctgtgacc

SEQ ID NO: 115383 - DNA, 120 bp, Artificial Sequence
  ENSG00000100426_31 (sequence is synthesized)
cgctcacctactggaacctgaagaaggcgtcctggccggggctgtccgcgctggccgtcagatttttgggctgccccccaagcatcgtcccttcagaaaagctgttcaacacacccactg

SEQ ID NO: 115384 - DNA, 120 bp, Artificial Sequence
  ENSG00000100426_32 (sequence is synthesized)
agaacggtagccttggccaatccaggctcatgatggaacattttgaaaaacttatctttttgaaagtgaatcttcccttaatatactttcagtattgaaactcacgacggcaccactagg

SEQ ID NO: 115385 - DNA, 120 bp, Artificial Sequence
  ENSG00000100426_33 (sequence is synthesized)
ccagaggcgtggctgccccagcgttagcagcctgtaccaggtctatgacccgctctgcccacggctgtgtacgacatcagaccaggcactctcagggccgctctccagctcaccacagtg

SEQ ID NO: 115386 - DNA, 120 bp, Artificial Sequence
  ENSG00000100426_34 (sequence is synthesized)
tctccacgtgccttaccccttctccttcaggccaagtttcgcggggtgttttattaagacgtccactagaaatagcttgtcctgtcaactatgaaatatggtgactagattttaattcat

SEQ ID NO: 115387 - DNA, 120 bp, Artificial Sequence
  ENSG00000100426_35 (sequence is synthesized)
aaccgtaaagttttttaaagttttgggttagtaatttgttttactagaatgacaaagaagatgtaaaccattttattctgtaggctttttactcaattatgtacaaaccacaaatcaggt

SEQ ID NO: 115388 - DNA, 120 bp, Artificial Sequence
  ENSG00000100426_36 (sequence is synthesized)
actgtattttagtgaagcattgctttaattgcaacagaatagcttttgtggctatcaaatgaaatctgtaaataggaggtggagggcaagccatcctgactgagcagtttttaaccgcag

SEQ ID NO: 115389 - DNA, 120 bp, Artificial Sequence
  ENSG00000100426_37 (sequence is synthesized)
gttctaaagtgtcccgcggagtacagataatattctggaaggtaactgtttactacgacagagacgtggcatttggaaacgaaacttagatgtttcatggagcttattttgagaactttc

SEQ ID NO: 115390 - DNA, 120 bp, Artificial Sequence
  ENSG00000100426_38 (sequence is synthesized)
ccatttcaggtttctgcattcaggctttacatggtcagttaactcagagataccccagctgtttatcatcagctcctctgaaatgtgatccctttgtaactgtgctcatcacttcgccag

SEQ ID NO: 115391 - DNA, 120 bp, Artificial Sequence
  ENSG00000100426_39 (sequence is synthesized)
tgcgttcaatgacacgctgatggcaggtggtccctgctgaaacccccacgcctccgcttcagcatctccacgctctgaagctgtctttcaaaatgtgtgcactgacccccttgtttgatc

SEQ ID NO: 115392 - DNA, 120 bp, Artificial Sequence
  ENSG00000100426_40 (sequence is synthesized)
aaatttgtgtaaaatttttttagaagagatggcttattaacagggaagaagcttgttatattccagttgtaagaatagccttagtgtttagatttttttatgatagggaagatgcggcca

SEQ ID NO: 115393 - DNA, 120 bp, Artificial Sequence
  ENSG00000100426_41 (sequence is synthesized)
tcactgggatattttcaaatcccaaggacatcagagtgaagtgtcagttgtcagatgattttaaaagttatgtcttcagagaaaaaaagattcattttctcattttaaaccaattaaata

SEQ ID NO: 115394 - DNA, 120 bp, Artificial Sequence
  ENSG00000100426_42 (sequence is synthesized)
ttctgagtgagactaatcactcatttgcctacgaccttttagaaaagttgttttgttgaaatactgtacgtacgcttaatctaaatttgcattgactatgttttagtgtatttataaatg

SEQ ID NO: 115395 - DNA, 120 bp, Artificial Sequence
  ENSG00000100426_43 (sequence is synthesized)
gtgaactcagtttctgaaattaaacttcttatttgcaattttctagtgctggcagacactggctttttatttttaggataagaaaacaggcatattctttgtggtccattatctagagcc

SEQ ID NO: 115396 - DNA, 120 bp, Artificial Sequence
  ENSG00000100426_44 (sequence is synthesized)
catacttgggcagcatttgaaatttcaccttaaccccagacagggctccagggaagtggagatgtaattcttacaacaacagttctgatcatggccatggtgatgactttccaggtctcg

SEQ ID NO: 115397 - DNA, 120 bp, Artificial Sequence
  ENSG00000100426_45 (sequence is synthesized)
tgttcaagtggtgccagaatgcaggagccggtgggcagccctgaggggttgccttggccgcagcctctgtgcacgctcttcctggtgtcctcttacccggtagctgtgcgcttgttcccg

SEQ ID NO: 115398 - DNA, 120 bp, Artificial Sequence
  ENSG00000100426_46 (sequence is synthesized)
tgagaacagcctgcttccagagtgcccaggagtgctggtcagggacagtgcccgtgaggctgcagaggaggtggggtccatggcccacccatctctccctcgccagcagccctggccagt

SEQ ID NO: 115399 - DNA, 120 bp, Artificial Sequence
  ENSG00000100426_47 (sequence is synthesized)
gtcatcctggtgtagaaagggttgcgcacaggataggagggagccacagttcttgcttagctgtgctcacgaccagcttgcagtcctgtgtttcttaagattgtatttggaatggtaata

SEQ ID NO: 115400 - DNA, 120 bp, Artificial Sequence
  ENSG00000100426_48 (sequence is synthesized)
tccttagaattttgggatattgagcttcatggattttctctccaaaacaagccagcacaactaactgtagcagaattgtatccactcattcattcaactgagatgaagtgccctcccttt

SEQ ID NO: 115401 - DNA, 120 bp, Artificial Sequence
  ENSG00000100426_49 (sequence is synthesized)
tccagggcctgggctagttcctggaatgcaacagagatttccgtggacacagtctctagtctcacagagcatatagtctagtccacgattggcaagctgcaaccacagacccagtccggc

SEQ ID NO: 115402 - DNA, 120 bp, Artificial Sequence
  ENSG00000100426_50 (sequence is synthesized)
actctgcccatttttctaagtgaaattttcttggaatacagtcacagctgtttttttaacatggtgtcttggctactttcaggctgcgacgggagaactgaatagttgtgacagagacca

SEQ ID NO: 115403 - DNA, 120 bp, Artificial Sequence
  ENSG00000100426_51 (sequence is synthesized)
caggcccactgaaagggacaaacagggctgaaaatactcactgtttggccctttccagaatagcaagtttgctggcccttgagctagcctgcctttatggggttttttttgtttgttttt

SEQ ID NO: 115404 - DNA, 120 bp, Artificial Sequence
  ENSG00000100426_52 (sequence is synthesized)
ttaagctttcagcttcatgctgctgtatttttagttgaagtgttctgagtaacagtcagtgtataaaaggggattgcagaaaaaaatgagggcttgctttactcaacagaaaatatggcc

SEQ ID NO: 115405 - DNA, 120 bp, Artificial Sequence
  ENSG00000100426_53 (sequence is synthesized)
cttcctgaatgacactaggagagtcattttatctcatacattcccttcatttcgttggtggacatttgttgaaaccggcactcaatggtcaaaccgtctctgccctccagttgctgacag

SEQ ID NO: 115406 - DNA, 120 bp, Artificial Sequence
  ENSG00000100426_54 (sequence is synthesized)
tcctgcaggaagatggacaagaggcccagtgctgacagtcacacgactctcactacttgaatgaggggactgtgggtgcaactagaaaatatgttgattcttagccattcccaccttgcc

SEQ ID NO: 115407 - DNA, 120 bp, Artificial Sequence
  ENSG00000100426_55 (sequence is synthesized)
tctccgttcagaaccccagctgcgagctgtttgtttccctgcctggaaatgatgttttaggcaggttccttaatttctcaggtctgtctcagataataaaaagctctttgtatgagcctc

SEQ ID NO: 115408 - DNA, 120 bp, Artificial Sequence
  ENSG00000100426_56 (sequence is synthesized)
agaactgtctcttcagtgaatgaaattaccagtcattatacgaagggactttaaaaaatttgtggaaatactgaagtaaaagatgataaaaaaataaaaactttatttcttggctgggca

SEQ ID NO: 115409 - DNA, 120 bp, Artificial Sequence
  ENSG00000100427_0 (sequence is synthesized)
aaagggggcagcaggaccgggcccaccagccatccgggctgcccacgcaaaccacagggccgaatccggagccgcccaaggccacacagctaagccgagtgcgtgaatgcttatgtgacc

SEQ ID NO: 115410 - DNA, 120 bp, Artificial Sequence
  ENSG00000100427_1 (sequence is synthesized)
gtgtgaaggaggttcccaccgtgtggctgtgggggatggaaaaaggctacttggaaagatgtagaagaccttcgagtaaacagttacgtttcagaaacagagcctgctcagaatgtgtac

SEQ ID NO: 115411 - DNA, 120 bp, Artificial Sequence
  ENSG00000100427_2 (sequence is synthesized)
ttggtgggattctattcttagggacgcttctttcttctgagagacccgagctctgtggcgagtggcacaggcagggccccttcctttcctagttgggttctgacagctccgaggcagtgg

SEQ ID NO: 115412 - DNA, 120 bp, Artificial Sequence
  ENSG00000100427_3 (sequence is synthesized)
tttacacaaccaacacgaaacatttctacgatccacccgattcctcccctcattgatattcaggaagcagctctccttcccctgccttcagctcaagtttgctgagcttttgtttcattt

SEQ ID NO: 115413 - DNA, 120 bp, Artificial Sequence
  ENSG00000100427_4 (sequence is synthesized)
gtgaatacttcttgctggaagtccctcacccagagaccagtgctcccaacggcagagcagcgggggagataaagaactggtgacacgtggctgtacattcagcacagctgtggtgtcccc

SEQ ID NO: 115414 - DNA, 120 bp, Artificial Sequence
  ENSG00000100427_5 (sequence is synthesized)
aagtgccatgacccaggagccattcagagaggagctggcctatgaccggatgcccacgctggagcggggccggcaagaccccgccagctatgccccagacgcgaagccgagcgacctgca

SEQ ID NO: 115415 - DNA, 120 bp, Artificial Sequence
  ENSG00000100427_6 (sequence is synthesized)
gctgtcgaagagactgcccccctgcttcagccacaagacgtgggtcttctctgtgctgatggggagctgcctcctggtgacctcggggttttcgctgtacctggggaacgtgttcccggc

SEQ ID NO: 115416 - DNA, 120 bp, Artificial Sequence
  ENSG00000100427_7 (sequence is synthesized)
tgagatggattacttgcgctgtgctgcaggctcttgcatcccctcggcaattgtgagcttcaccgtctccaggaggaacgccaatgtgattcccaactttcagatattgtttgtttccac

SEQ ID NO: 115417 - DNA, 120 bp, Artificial Sequence
  ENSG00000100427_8 (sequence is synthesized)
gtttgctgtgaccactacgtgtttaatttggtttggatgcaaactagtcctgaacccatcagcaataaacatcaacttcaacctcatcctgctgctcctgctggagctgctcatggcggc

SEQ ID NO: 115418 - DNA, 120 bp, Artificial Sequence
  ENSG00000100427_9 (sequence is synthesized)
cacggtgatcatcgctgcacggtccagcgaggaggactgcaagaaaaagaagggctccatgtctgacagcgccaacattctggacgaagtgccatttcctgctcgggtcctgaaatctta

SEQ ID NO: 115419 - DNA, 120 bp, Artificial Sequence
  ENSG00000100427_10 (sequence is synthesized)
ctcagtcgtcgaggtaatcgcaggcatctctgccgtcctcggggggatcattgccctgaacgtggatgactcagtttcaggcccacacctctcagtgacgttcttttggatcctagtggc

SEQ ID NO: 115420 - DNA, 120 bp, Artificial Sequence
  ENSG00000100427_11 (sequence is synthesized)
ctgctttccaagtgccattgccagtcatgtggcagcagagtgtcccagcaagtgtctggtggaggtcctgattgccataagcagcctcacgtctccgctgctgttcacagcctctggata

SEQ ID NO: 115421 - DNA, 120 bp, Artificial Sequence
  ENSG00000100427_12 (sequence is synthesized)
tctgtcattcagcatcatgagaatcgtggagatgtttaaggattacccgccagccataaaaccatcctacgatgtgctgctgctgctgctgctgctagtgctcctgctgcaggccggcct

SEQ ID NO: 115422 - DNA, 120 bp, Artificial Sequence
  ENSG00000100427_13 (sequence is synthesized)
caacacgggcaccgccatccagtgcgtgcgcttcaaggtcagtgcaaggctgcagggtgcatcctgggacacccagaacggcccgcaggagcgcctggctggggaggtggccaggagccc

SEQ ID NO: 115423 - DNA, 120 bp, Artificial Sequence
  ENSG00000100427_14 (sequence is synthesized)
cctgaaggagttcgacaaggagaaagcctggagagccgtcgtggtgcaaatggcccagtgacccccagacgcggaaaccgggtggcagcgcccagcctggccccaagcatggaaacgcac

SEQ ID NO: 115424 - DNA, 120 bp, Artificial Sequence
  ENSG00000100427_15 (sequence is synthesized)
aacccctaatcgccctgagctactgcttctaacacctcttttcccttgtgtgagggcaaaccaggctgcaggtggggttttcacttcctagggtagtttaattttaaaataggccaatgt

SEQ ID NO: 115425 - DNA, 120 bp, Artificial Sequence
  ENSG00000100427_16 (sequence is synthesized)
gggcccccggctcggcctcttgagagccccacccctgaactggccccagctcctcttcctgcctctctcatggcttgggctggagtgggctctctggacctgaccagactgtgggtccct

SEQ ID NO: 115426 - DNA, 120 bp, Artificial Sequence
  ENSG00000100427_17 (sequence is synthesized)
gcgtctcctgcccactctgaccgggcttcctccctccacgcttagggtctgtcccgggtactcagtcagcccagtgggatcttacccacttccctgcaaggtgcacctgccccaggctca

SEQ ID NO: 115427 - DNA, 120 bp, Artificial Sequence
  ENSG00000100427_18 (sequence is synthesized)
ggctgcccagcggctcttcctggacagtgagagcagggctgggcgcctctgtcctggcccgggagccgcaggggcccctcctccagagcctgggcgcaagcgacacaggctgccgctgct

SEQ ID NO: 115428 - DNA, 120 bp, Artificial Sequence
  ENSG00000100427_19 (sequence is synthesized)
ctcccaggtgaaatccacaccagtccacgccgggtcgcctgccctgtctccctacttagacccagtcattctagagggatccaccgccacactggccggcccacgtcctgggtgctgtca

SEQ ID NO: 115429 - DNA, 120 bp, Artificial Sequence
  ENSG00000100427_20 (sequence is synthesized)
tgcccagcttggagtgccacgtggccgctgcccacgtcccgggcactgtcatgcccagcttggagtgccacatggccgctgcccacgtcccgggcactgtcatgcccagcttggagtgcc

SEQ ID NO: 115430 - DNA, 120 bp, Artificial Sequence
  ENSG00000100427_21 (sequence is synthesized)
acgtggccgctgctgtgacaggcagtgttcttgggggtggggctgcatccaaggctttgtaaaccggctggaccacgtctccctggccccagtgaccgggggaagctgagcccctccctc

SEQ ID NO: 115431 - DNA, 120 bp, Artificial Sequence
  ENSG00000100427_22 (sequence is synthesized)
ctgtgtttgctcccattactcaaaatgcaggacagatcaggtcagagcccaggaattctcacaggttcacccagcgccctctacctcctagcaagtactttgtcttgatcctcactgaga

SEQ ID NO: 115432 - DNA, 120 bp, Artificial Sequence
  ENSG00000100427_23 (sequence is synthesized)
aggccccagggcagcggtcttctccatctccgctgttttggggtcttagggtacagcccaggcggtcactgcccacctgccaggctgcagggacagttgggtgtgagaataacactggct

SEQ ID NO: 115433 - DNA, 120 bp, Artificial Sequence
  ENSG00000100427_24 (sequence is synthesized)
ttgggtagtgccatggccaggagtgggtttccctgcgtctcctcgtcccgagggcgcctgggtcctcccagctgacggcagtaaatccacagtgagttggggcgactgtgaaactggaat

SEQ ID NO: 115434 - DNA, 120 bp, Artificial Sequence
  ENSG00000100427_25 (sequence is synthesized)
gctgttactttgataattactttccagcaggtgttttccttcacaatggttttgtttctttccttctgatctgagaagacatgaacgttttctcttcaccgccgtggggtgtattgactg

SEQ ID NO: 115435 - DNA, 120 bp, Artificial Sequence
  ENSG00000100427_26 (sequence is synthesized)
gtcccccatgggctgctggaaaggcccggagatgcatctgtggcctggggccatcaagatcaaagaaccaggaggcctgggagatgcagctggatggggcggcctgcagaccctgccagg

SEQ ID NO: 115436 - DNA, 120 bp, Artificial Sequence
  ENSG00000100427_27 (sequence is synthesized)
gggtttgaggaccctcccaggtttcccactgcggaacaggagtgactctggctgccaagataccttcatggtgttcatgacaagtggaatcattattttcaaccattgaagggggatgca

SEQ ID NO: 115437 - DNA, 120 bp, Artificial Sequence
  ENSG00000100427_28 (sequence is synthesized)
ggcaagacaccttcccagctgctcctagaggggacaagccaggccctctctgcagtcctcggcagctccggaaggacacagtcaggggccgggcaaacactttggccacagccccaaaca

SEQ ID NO: 115438 - DNA, 120 bp, Artificial Sequence
  ENSG00000100427_29 (sequence is synthesized)
agcgccaccgtgggagaggagaggctgctgtcactggtaccggatgcagaccccaccctgtctgcaggccacccccacctccctgcagctttgaggctggcggggtctgctcctgggaat

SEQ ID NO: 115439 - DNA, 120 bp, Artificial Sequence
  ENSG00000100427_30 (sequence is synthesized)
ggggtgggagccacagggacgacccggggcgggctgatgtcttcttgggggcagaccagagagctcaagtttcagagtcagaattaggcacttggagcgtttttgctggcttgcactttc

SEQ ID NO: 115440 - DNA, 120 bp, Artificial Sequence
  ENSG00000100427_31 (sequence is synthesized)
ttattttcttattttagagcgcttaaaaaatccggaaaaatggggtttaaaagaactgtctctttcagtctacatttttgtttaatacgcttgagcaataaacgctgacttgcagacgtg

SEQ ID NO: 115441 - DNA, 120 bp, Artificial Sequence
  ENSG00000100427_32 (sequence is synthesized)
gtaagtgctcagacattaagccgttgagtagaggcatgttttgcaatctctcgtttagctaccaattggagcagtttaacgtgcttgagtccccggcgtgatgtgttcatggacgaagtt

SEQ ID NO: 115442 - DNA, 120 bp, Artificial Sequence
  ENSG00000100427_33 (sequence is synthesized)
gccgatggatgttgtcaggtgttgcacctggagggcccagatggatcaatgaggcatttaaagtgtagaatctcaccctgaacccagactattcagataaagaactggtgacacgtggct

SEQ ID NO: 115443 - DNA, 120 bp, Artificial Sequence
  ENSG00000100429_0 (sequence is synthesized)
aggcgcggggagcctcccccttcgactgcagcctcgctccgtgccttctgcgcgcctgggatcccggagcctgcctaggttctgtgcgctcccgcccaggccggtgcccgccgcccgcct

SEQ ID NO: 115444 - DNA, 120 bp, Artificial Sequence
  ENSG00000100429_1 (sequence is synthesized)
gcgccccaggcaggtcccaggcctccggctgctcccggccgaaggtggggacaggcagtggcaggcaccactagcgagggcgtttgggaacccagggtgaccacggcgcagccatgggga

SEQ ID NO: 115445 - DNA, 120 bp, Artificial Sequence
  ENSG00000100429_2 (sequence is synthesized)
ccgcgcttgtgtaccatgaggacatgacggccacccggctgctctgggacgaccccgagtgcgagatcgagcgtcctgagcgcctgaccgcagccctggatcgcctgcggcagcgcggcc

SEQ ID NO: 115446 - DNA, 120 bp, Artificial Sequence
  ENSG00000100429_3 (sequence is synthesized)
tggaacagaggtgtctgcggttgtcagcccgcgaggcctcggaagaggagctgggcctggtgcacagcccagagtatgtatccctggtcagggagacccaggtcctaggcaaggaggagc

SEQ ID NO: 115447 - DNA, 120 bp, Artificial Sequence
  ENSG00000100429_4 (sequence is synthesized)
tgcaggcgctgtccggacagttcgacgccatctacttccacccgagtacctttcactgcgcgcggctggccgcaggggctggactgcagctggtggacgctgtgctcactggagctgtgc

SEQ ID NO: 115448 - DNA, 120 bp, Artificial Sequence
  ENSG00000100429_5 (sequence is synthesized)
aaaatgggcttgccctggtgaggcctcccgggcaccatggccagagggcggctgccaacgggttctgtgtgttcaacaacgtggccatagcagctgcacatgccaagcagaaacacgggc

SEQ ID NO: 115449 - DNA, 120 bp, Artificial Sequence
  ENSG00000100429_6 (sequence is synthesized)
tacacaggatcctcgtcgtggactgggatgtgcaccatggccaggggatccagtatctctttgaggatgaccccagcgtcctttacttctcctggcaccgctatgagcatgggcgcttct

SEQ ID NO: 115450 - DNA, 120 bp, Artificial Sequence
  ENSG00000100429_7 (sequence is synthesized)
ggcctttcctgcgagagtcagatgcagacgcagtggggcggggacagggcctcggcttcactgtcaacctgccctggaaccaggttgggatgggaaacgctgactacgtggctgccttcc

SEQ ID NO: 115451 - DNA, 120 bp, Artificial Sequence
  ENSG00000100429_8 (sequence is synthesized)
tgcacctgctgctcccactggcctttgagtttgaccctgagctggtgctggtctcggcaggatttgactcagccatcggggaccctgaggggcaaatgcaggccacgccagagtgcttcg

SEQ ID NO: 115452 - DNA, 120 bp, Artificial Sequence
  ENSG00000100429_9 (sequence is synthesized)
cccacctcacacagctgctgcaggtgctggccggcggccgggtctgtgccgtgctggagggcggctaccacctggagtcactggcggagtcagtgtgcatgacagtacagacgctgctgg

SEQ ID NO: 115453 - DNA, 120 bp, Artificial Sequence
  ENSG00000100429_10 (sequence is synthesized)
gccctagagtccatccagagtgcccgtgctgcccaggccccgcactggaagagcctccagcagcaagatgtgaccgctgtgccgatgagccccagcagccactccccagaggggaggcct

SEQ ID NO: 115454 - DNA, 120 bp, Artificial Sequence
  ENSG00000100429_11 (sequence is synthesized)
ccacctctgctgcctgggggtccagtgtgtaaggcagctgcatctgcaccgagctccctcctggaccagccgtgcctctgccccgcaccctctgtccgcaccgctgttgccctgacaacg

SEQ ID NO: 115455 - DNA, 120 bp, Artificial Sequence
  ENSG00000100429_12 (sequence is synthesized)
ccggatatcacattggttctgccccctgacgtcatccaacaggaagcgtcagccctgagggaggagacagaagcctgggccaggccacacgagtccctggcccgggaggaggccctcact

SEQ ID NO: 115456 - DNA, 120 bp, Artificial Sequence
  ENSG00000100429_13 (sequence is synthesized)
gcacttgggaagctcctgtacctcttagatgggatgctggatgggcaggtgaacagtggtatagcagccactccagcctctgctgcagcagccaccctggatgtggctgttcggagaggc

SEQ ID NO: 115457 - DNA, 120 bp, Artificial Sequence
  ENSG00000100429_14 (sequence is synthesized)
ctgtcccacggagcccagaggctgctgtgcgtggccctgggacagctggaccggcctccagacctcgcccatgacgggaggagtctgtggctgaacatcaggggcaaggaggcggctgcc

SEQ ID NO: 115458 - DNA, 120 bp, Artificial Sequence
  ENSG00000100429_15 (sequence is synthesized)
ctatccatgttccatgtctccacgccactgccagtgatgaccggtggtttcctgagctgcatcttgggcttggtgctgcccctggcctatggcttccagcctgacctggtgctggtggcg

SEQ ID NO: 115459 - DNA, 120 bp, Artificial Sequence
  ENSG00000100429_16 (sequence is synthesized)
ctggggcctggccatggcctgcagggcccccacgctgcactcctggctgcaatgcttcgggggctggcagggggccgagtcctggccctcctggaggagaactccacaccccagctagca

SEQ ID NO: 115460 - DNA, 120 bp, Artificial Sequence
  ENSG00000100429_17 (sequence is synthesized)
gggatcctggcccgggtgctgaatggagaggcacctcctagcctaggcccttcctctgtggcctccccagaggacgtccaggccctgatgtacctgagagggcagctggagcctcagtgg

SEQ ID NO: 115461 - DNA, 120 bp, Artificial Sequence
  ENSG00000100429_18 (sequence is synthesized)
aagatgttgcagtgccatcctcacctggtggcttgaaatcggccaaggtgggagcatttacaccgcagaaatgacaccgcacgccagcgccccgcggccgcgatccggaccccaagccca

SEQ ID NO: 115462 - DNA, 120 bp, Artificial Sequence
  ENSG00000100429_19 (sequence is synthesized)
cggctccctcgactctggggcacggaaccccgcccactcccaatccccgcgccccgccctctcccacccgtgcttcccccgctccacccctcacctcacctcgcccccgccccacccatc

SEQ ID NO: 115463 - DNA, 120 bp, Artificial Sequence
  ENSG00000100429_20 (sequence is synthesized)
gcgccccggcccgtcccatcgaggcccatgcaacccacgctcggtcccgttccggcccctgcgccccgctgcgcttcgctccccgcccttgcgccgttagtaaacatcgctcaaacgaaa

SEQ ID NO: 115464 - DNA, 120 bp, Artificial Sequence
  ENSG00000100429_21 (sequence is synthesized)
tgccccacagttcaggatgtagcctgggatgtcctgccaggttgggatgggaaacgctgactacgtggctgccttcctgcacctgctgctcccactggcctttgaggtgactgcacggag

SEQ ID NO: 115465 - DNA, 120 bp, Artificial Sequence
  ENSG00000100429_22 (sequence is synthesized)
ggctcccccagggcagccgggtgggagggggaccttgtgcctggagtgcgccagtgaaggcaggaggagggttatgagctgtcccactcctgtgtggctggggaaggtgctcaggagggg

SEQ ID NO: 115466 - DNA, 120 bp, Artificial Sequence
  ENSG00000100429_23 (sequence is synthesized)
gggccccagggtgacgggtgggtggggcactgtgtggtactgaatggagccttcctcagctggggtgtgggagaagggctgctggaggcaatgccaggtgggtctccagcacagaggctc

SEQ ID NO: 115467 - DNA, 120 bp, Artificial Sequence
  ENSG00000100429_24 (sequence is synthesized)
ctgcccatggccccgtgaatgctcttccacctctgcctctgcggtttgggctcaggagggtgagcagggccttacacttatgcacctgtgtcctggaaggaggagtctgtggctgaacat

SEQ ID NO: 115468 - DNA, 120 bp, Artificial Sequence
  ENSG00000100429_25 (sequence is synthesized)
ggctcggggcgccgaggcttccgcgcccgctggttcctcgctccggggcggagctcgcgatagcgaccgggagcagggcgcggggcgggacccaggtccgaggcgaggaagccggaagcc

SEQ ID NO: 115469 - DNA, 120 bp, Artificial Sequence
  ENSG00000100429_26 (sequence is synthesized)
gggccaggtgggcagggctggcctggggagaaggatggggccgcatctacacctgtgcctgtgtgtgcctgacctgcggtcactccgtgtctgtgtgtccctctggtctgtccaccacag

SEQ ID NO: 115470 - DNA, 120 bp, Artificial Sequence
  ENSG00000100429_27 (sequence is synthesized)
acttgggaagctcctgtacctcttagatgggatgctggatgggcaggtgggagcacctgggaggggttggggatgctgtggacctaggggcagggaccaggacctgccaacgagatgtgg

SEQ ID NO: 115471 - DNA, 120 bp, Artificial Sequence
  ENSG00000100429_28 (sequence is synthesized)
cctgtccagaggagggctgggtggtgcagaaccacatggatgtgaacattgccttgtgccaggaactgttcccagaacagccccaggggtggggatcactagtgtgtctgacctctgacc

SEQ ID NO: 115472 - DNA, 120 bp, Artificial Sequence
  ENSG00000100429_29 (sequence is synthesized)
tcagcttcttcagttaaatgctctttggcagagaggtgaagggggtgatttaaagtatacatttaggcagggtgcagtggctcatgcctgtaataacggcagtttggggggccaaggtgg

SEQ ID NO: 115473 - DNA, 120 bp, Artificial Sequence
  ENSG00000100429_30 (sequence is synthesized)
agcccaggagttcaagaccagcctagagaacatatggagaccctgtcttcacaaaaaataaaaaagtcagccaagcgtggtggtgtgtgcctgtagttacttaggaggctgaggcaggac

SEQ ID NO: 115474 - DNA, 120 bp, Artificial Sequence
  ENSG00000100429_31 (sequence is synthesized)
ctgaggcaggacgatcgcttaagcccaggagtttgaggctgtggtgagctacaattgcgccactgcacgccagcctggctacagaacgagaccctgcctctctaaaaaaaaaaaaaaaaa

SEQ ID NO: 115475 - DNA, 120 bp, Artificial Sequence
  ENSG00000100429_32 (sequence is synthesized)
gctgctctgggacgagtaagtgggacctggccgaggtggggtgcggggagggacctctgaactgagctcctcatctgccccagccccgagtgcgagatcgagcgtcctgagcgcctgacc

SEQ ID NO: 115476 - DNA, 120 bp, Artificial Sequence
  ENSG00000100429_33 (sequence is synthesized)
gcagctggtgtcttgcagcctggcacaagtgtgggtatggcctgcaaagggcagcagggaaggcagggggctcatctgcgcccctgcgcccacagagtacctttcactgcgcgcggctgg

SEQ ID NO: 115477 - DNA, 120 bp, Artificial Sequence
  ENSG00000100429_34 (sequence is synthesized)
ggatgaccccaggtgagcaggggtgcggaaaccacccttccctgcagccccagtttttgggtgcacagcctggcctgggaaaatccaggggtgagatacagacatgtgctcaggggtcag

SEQ ID NO: 115478 - DNA, 120 bp, Artificial Sequence
  ENSG00000100429_35 (sequence is synthesized)
tgacggcaggacctgtgggcacccctatcctggctggccaagcacagagagttctgggaatggactctggacaacatgaacacctgtcctgaggccagctcttcttccaggctgctgtgc

SEQ ID NO: 115479 - DNA, 120 bp, Artificial Sequence
  ENSG00000100429_36 (sequence is synthesized)
ttgagcgttcacagccacggccgccaaccccagccagtgtcccctggtccatacacatgacattgccctgcacacctgcctgctggcactgccagagcctggggctggcctgttctgctc

SEQ ID NO: 115480 - DNA, 120 bp, Artificial Sequence
  ENSG00000100429_37 (sequence is synthesized)
cggggaccctgaggtgagggccttgccttgccagggagggcttctggggtcctggggcccaggtcccccatcacacatggctctggttccaggggcaaatgcaggccacgccagagtgct

SEQ ID NO: 115481 - DNA, 120 bp, Artificial Sequence
  ENSG00000100429_38 (sequence is synthesized)
cgtgctgcccaggccccgcactggaagagcctccagcagcaaggtcagtgtggccgggtgctaggctgcaggatcccacctcgggctcctgtgcagtggctatgactccgaactgtccct

SEQ ID NO: 115482 - DNA, 120 bp, Artificial Sequence
  ENSG00000100433_0 (sequence is synthesized)
gcaaggcatggagcctgcactttactctgaatgttggtggcgccttcagagcattgttagcaagggtccatgtgatcacactgacacctgagagagtgacacaccatgtacatggctggt

SEQ ID NO: 115483 - DNA, 120 bp, Artificial Sequence
  ENSG00000100433_1 (sequence is synthesized)
atatggaggatggatttaagggggacaggactgaaggctgtcgcagtgattcagtggccgttcccgcagcagcaccggtgtgccagcccaagagcgccactaacgggcaacccccggctc

SEQ ID NO: 115484 - DNA, 120 bp, Artificial Sequence
  ENSG00000100433_2 (sequence is synthesized)
cggctccgactccaactccgcgcctgtccatttcctcccgagccacagtggtagccaggatggaaggcacctcccaagggggcttgcagaccgtcatgaagtggaagacggtggttgcca

SEQ ID NO: 115485 - DNA, 120 bp, Artificial Sequence
  ENSG00000100433_3 (sequence is synthesized)
tctttgtggttgtggtggtctaccttgtcactggcggtcttgtcttccgggcattggagcagccctttgagagcagccagaagaataccatcgccttggagaaggcggaattcctgcggg

SEQ ID NO: 115486 - DNA, 120 bp, Artificial Sequence
  ENSG00000100433_4 (sequence is synthesized)
atcatgtctgtgtgagcccccaggagctggagacgttgatccagcatgctcttgatgctgacaatgcgggagtcagtccaataggaaactcttccaacaacagcagccactgggacctcg

SEQ ID NO: 115487 - DNA, 120 bp, Artificial Sequence
  ENSG00000100433_5 (sequence is synthesized)
gcagtgcctttttctttgctggaactgtcattacgaccatagggtatgggaatattgctccgagcactgaaggaggcaaaatcttttgtattttatatgccatctttggaattccactct

SEQ ID NO: 115488 - DNA, 120 bp, Artificial Sequence
  ENSG00000100433_6 (sequence is synthesized)
ttggtttcttattggctggaattggagaccaacttggaaccatctttgggaaaagcattgcaagagtggagaaggtctttcgaaaaaagcaagtgagtcagaccaagatccgggtcatct

SEQ ID NO: 115489 - DNA, 120 bp, Artificial Sequence
  ENSG00000100433_7 (sequence is synthesized)
caaccatcctgttcatcttggccggctgcattgtgtttgtgacgatccctgctgtcatctttaagtacatcgagggctggacggccttggagtccatttactttgtggtggtcactctga

SEQ ID NO: 115490 - DNA, 120 bp, Artificial Sequence
  ENSG00000100433_8 (sequence is synthesized)
ccacggtgggctttggtgattttgtggcagggggaaacgctggcatcaattatcgggagtggtataagcccctagtgtggttttggatccttgttggccttgcctactttgcagctgtcc

SEQ ID NO: 115491 - DNA, 120 bp, Artificial Sequence
  ENSG00000100433_9 (sequence is synthesized)
acacggcgaaggctcagcgtggagatccacgataagctgcagcgggcggccaccatccgcagcatggagcgccggcggctgggcctggaccagcgggcccactcactggacatgctgtcc

SEQ ID NO: 115492 - DNA, 120 bp, Artificial Sequence
  ENSG00000100433_10 (sequence is synthesized)
cccgagaagcgctctgtctttgctgccctggacaccggccgcttcaaggcctcatcccaggagagcatcaacaaccggcccaacaacctgcgcctgaaggggccggagcagctgaacaag

SEQ ID NO: 115493 - DNA, 120 bp, Artificial Sequence
  ENSG00000100433_11 (sequence is synthesized)
catgggcagggtgcgtccgaggacaacatcatcaacaagttcgggtccacctccagactcaccaagaggaaaaacaaggacctcaaaaagaccttgcccgaggacgttcagaaaatctac

SEQ ID NO: 115494 - DNA, 120 bp, Artificial Sequence
  ENSG00000100433_12 (sequence is synthesized)
aagaccttccggaattactccctggacgaggagaagaaagaggaggagacggaaaagatgtgtaactcagacaactccagcacagccatgctgacggactgtatccagcagcacgctgag

SEQ ID NO: 115495 - DNA, 120 bp, Artificial Sequence
  ENSG00000100433_13 (sequence is synthesized)
ttggagaacggaatgatacccacggacaccaaagaccgggagccggagaacaactcattacttgaagacagaaactaaatgtgaaggacattggtcttggactgagcgttgtgtgtgtgt

SEQ ID NO: 115496 - DNA, 120 bp, Artificial Sequence
  ENSG00000100433_14 (sequence is synthesized)
gtgtgtgtgtttttaatattcacactgagacatgtgccttaaacagactttttagtccaaaattacatagcattgaagaatatatttcactgtgccataaacaactgaaagcttgctctg

SEQ ID NO: 115497 - DNA, 120 bp, Artificial Sequence
  ENSG00000100433_15 (sequence is synthesized)
ccaaaaggaatcagagaacaagaacttcatttcagatagcaaacgcaggacacaccaagagtgtccgtgcacgtagccggttctggccgtacatgttaagggcatttcagtggcagtgct

SEQ ID NO: 115498 - DNA, 120 bp, Artificial Sequence
  ENSG00000100433_16 (sequence is synthesized)
gtacccctgggcagtgctacctgggcacacacgtagacaagggcagctattccttagaccagcctcctgaaagaaacaggtgtgtctttttagtggagtcgtagtaatatgtgcacacac

SEQ ID NO: 115499 - DNA, 120 bp, Artificial Sequence
  ENSG00000100433_17 (sequence is synthesized)
agaaggggacctgattgggtgggagctggttatgtgtaactagcgttggagttgacattttggcatgtgctctgagcttgaattttgataccaaccattcagtgcatcatacctagtctt

SEQ ID NO: 115500 - DNA, 120 bp, Artificial Sequence
  ENSG00000100433_18 (sequence is synthesized)
tctatgctccaaatgaatgtctgtggggacctgagagcacctggaatttgttggaagcagatcagagcacacgtacgaaaaggtgcaattgcttttctcatgacaaaagaaaaaaaataa

SEQ ID NO: 115501 - DNA, 120 bp, Artificial Sequence
  ENSG00000100433_19 (sequence is synthesized)
gtgtgcgggtgtgtgtgtgcgggagtgtgtgcgcacacgccttcgggggctggagtgacactgcagtgggcttctccgtagccccagccttcaggctgcgcagcccctaacctgccggca

SEQ ID NO: 115502 - DNA, 120 bp, Artificial Sequence
  ENSG00000100433_20 (sequence is synthesized)
ccgcttttgggaagcagcttggctcttccatctccccaagccttcctctccatcctttcatccacccctcgccgatcttactttttcttttacccacggggccgcggccggccaccccct

SEQ ID NO: 115503 - DNA, 120 bp, Artificial Sequence
  ENSG00000100433_21 (sequence is synthesized)
ggccggtgcaaacacccaagccctctccagttctcccccaagctaatattttcccacctgtctttttctggggttcctccacgagccagtccaaggctcccccatcctcggaaattgttt

SEQ ID NO: 115504 - DNA, 120 bp, Artificial Sequence
  ENSG00000100433_22 (sequence is synthesized)
tgttggactgctaaaccgaggcgtgtaaagcttgaggactttattattatttgggttcttttcatttcttccccttctgggcaacgaagcaatgaaatttccaatcgagacgccaagaaa

SEQ ID NO: 115505 - DNA, 120 bp, Artificial Sequence
  ENSG00000100433_23 (sequence is synthesized)
gcaggcatcgtctcctccggtctcacagctaccccgggctggagcgtggggagggggtaagggagccagccaactcggggaaacttcgttgccagagatgactggggttttcgggctttc

SEQ ID NO: 115506 - DNA, 120 bp, Artificial Sequence
  ENSG00000100433_24 (sequence is synthesized)
ccagccttcccatgccgggccacacggcattcattaaagtggtggggcaactattggtgcgctccagccgggcaggttttgagctgcagagacccgtgcccggtagcagcgctttgccac

SEQ ID NO: 115507 - DNA, 120 bp, Artificial Sequence
  ENSG00000100433_25 (sequence is synthesized)
cgagtgcacccaggacgcagtggccgccagcccgggtctcctgctgggggccggcgagtgcagggagactttgcgccacgatgttttgttttcctgccgcaggaacgctaggcagtctct

SEQ ID NO: 115508 - DNA, 120 bp, Artificial Sequence
  ENSG00000100433_26 (sequence is synthesized)
ttccaccagacttaacccgcctgaagcaatagccatggaagttgcggcggcacagagggagacagaaccgcttggagcggcatctttcttggatgttttttctctacacagacttctttc

SEQ ID NO: 115509 - DNA, 120 bp, Artificial Sequence
  ENSG00000100433_27 (sequence is synthesized)
tgctgagtttggtctttctcacaggggtaggtagtccacatgaactggcgagcagtggtgaaaacatgacatcaactgctgcgtggttaaaggccaatcatgcattttcctcagtgggtg

SEQ ID NO: 115510 - DNA, 120 bp, Artificial Sequence
  ENSG00000100433_28 (sequence is synthesized)
caatggtgacaataaactgatttggaaatgtccatgtactttggttataacttgttttgataagaggggtagaaataccaaaacaattgccttgcatgatgccagtggcttgctgttctg

SEQ ID NO: 115511 - DNA, 120 bp, Artificial Sequence
  ENSG00000100433_29 (sequence is synthesized)
tctagctgatcctacatttttacaaaagtagacatcctgcatttctgagacacactgaggaggaccatggcatctttccatctcagggctttttgtcccttgggtgtcttagggtagaca

SEQ ID NO: 115512 - DNA, 120 bp, Artificial Sequence
  ENSG00000100433_30 (sequence is synthesized)
tagtgataagatccaatctcgctatctccaaacaaaaagaaaatgtaccccttgtacagtaagcttgaaatgtttttattgcttgcagcgtaagtgccattaattccatttaacaatgat

SEQ ID NO: 115513 - DNA, 120 bp, Artificial Sequence
  ENSG00000100433_31 (sequence is synthesized)
acttagaaatatttaaaatatttcattttacttttatgtttgggcattcctttattctgaaaaagtcaccactgctccttgcttgtttctacatctcacatcggttactcactaaaactg

SEQ ID NO: 115514 - DNA, 120 bp, Artificial Sequence
  ENSG00000100433_32 (sequence is synthesized)
gaacaccctagactgattgttcccaggcaaacgataagctaacacatcataattatgattggtctgtgaggctagaacatcccgcagaggaaagtcggggaatggctagtcataggttgc

SEQ ID NO: 115515 - DNA, 120 bp, Artificial Sequence
  ENSG00000100433_33 (sequence is synthesized)
atgatgattttaaatgggtttgtatcagaaaggggaaaatacatactcctgtgtatgcctcagtctttatcataattggctggttcacagctagctctttgggccacacgtgaaagcatt

SEQ ID NO: 115516 - DNA, 120 bp, Artificial Sequence
  ENSG00000100433_34 (sequence is synthesized)
tggacctggcaacaccaggcagttgctggttatgggtgttctaggctcactgctaccttttacagagttcacgggattttacgtaactaacccgcagtgtggatttaccaaaagatcaca

SEQ ID NO: 115517 - DNA, 120 bp, Artificial Sequence
  ENSG00000100433_35 (sequence is synthesized)
cacgacatcctcaaccactggtaccatggaagacctgtccctgcccatttctcaaaaatgcacagctcttccctgcctggagcacatgaagtcccatctccctgtccccagacctttagg

SEQ ID NO: 115518 - DNA, 120 bp, Artificial Sequence
  ENSG00000100433_36 (sequence is synthesized)
ctctgttgaagttctggcattgcttatgagacccttcctgtccaaggaaggtctaagtcaactcctccattggactggagatgaggctcactggtgacatcctgtgtcgactcagtaata

SEQ ID NO: 115519 - DNA, 120 bp, Artificial Sequence
  ENSG00000100433_37 (sequence is synthesized)
aatagtcacttgggaggcgatgtttatgcaggtgtggatgttgagttttactatgggaatcattccagcctgacaaaatgtgttttaaggaataggtagataactgggacttcctctgtt

SEQ ID NO: 115520 - DNA, 120 bp, Artificial Sequence
  ENSG00000100433_38 (sequence is synthesized)
attctaacaagtcgaagcttcctaattaaactgtccatggatctcacttatttggtttccactctgtgttatctggtacgttctttgtagcagtgtgttaaaattccaggccctacggcc

SEQ ID NO: 115521 - DNA, 120 bp, Artificial Sequence
  ENSG00000100433_39 (sequence is synthesized)
aaatctggcagaggcttccctctcatttatccagtgccttctgtgggccaggcacaggattaggcactttatgaacgtcagctcattgaaacttcacgacactatgtgggaagtatttgc

SEQ ID NO: 115522 - DNA, 120 bp, Artificial Sequence
  ENSG00000100433_40 (sequence is synthesized)
aaacccattatatacacaaggacacagaggctcagggaagctatgttatttatccaatggcacacagcaagaaagtggtagagctggtattcaaagtctgaccaaagtctgctttcaact

SEQ ID NO: 115523 - DNA, 120 bp, Artificial Sequence
  ENSG00000100433_41 (sequence is synthesized)
tcactacagtgtctgtgtcatgcatccttgtgattgtgtgtgtttgtgtgtatgtgtgtctttctagcttcatggacacagcttacagatgtggggagcagatatggtggaatctccacc

SEQ ID NO: 115524 - DNA, 120 bp, Artificial Sequence
  ENSG00000100433_42 (sequence is synthesized)
accaagagggcacaaggtctttgtgtaaacatggctcaaagggttgcccctgcagacacctactgtacatttatttggttttggaaattttgtatgtggcaccctttaaaaaatgccctt

SEQ ID NO: 115525 - DNA, 120 bp, Artificial Sequence
  ENSG00000100433_43 (sequence is synthesized)
tgaaagcactcttttgcactttacttgctaactttgtagaaactctgcatacagcaggaataaaatagttcaaagcactaagctgcatactctaccaaatggaacaggtgcatgtgttgg

SEQ ID NO: 115526 - DNA, 120 bp, Artificial Sequence
  ENSG00000100433_44 (sequence is synthesized)
tatgtgcatagatgcttccccaaatgagtcaaatcagtcacacagagggatcaaacataaccttgggctgggggtgggaaaattttctacataacccattccctgagacatttggccaag

SEQ ID NO: 115527 - DNA, 120 bp, Artificial Sequence
  ENSG00000100433_45 (sequence is synthesized)
aatgtgatgaacaaaatcaaagaagatcctctatggtgattgatcgattaaatatgtgtgcaaagtgtttagaaacctatgaaatactctcgcaaagatgctgagagagaataagaggtt

SEQ ID NO: 115528 - DNA, 120 bp, Artificial Sequence
  ENSG00000100433_46 (sequence is synthesized)
ggattcctcttcatataaactaattttggaggaggccagttggtttgaagttacttgaatgttaccttttttagatggggccaaatggcatgtagaatacacgtgataggtcaaagctgc

SEQ ID NO: 115529 - DNA, 120 bp, Artificial Sequence
  ENSG00000100433_47 (sequence is synthesized)
tacacattctatacatgcatcagcacagccccccctttccaatctgcactcccattccagcataaacctaggagaaatgtttcgatttcacacaaagaaagagcacacgtccaccatctt

SEQ ID NO: 115530 - DNA, 120 bp, Artificial Sequence
  ENSG00000100433_48 (sequence is synthesized)
cagtgggggctgtcttttgcttcactggcaagcaggcactgaatttttcttgcatgacaaatctggaggtttactggtgagagagccaatgggcattttttcctggaaagagtacagctc

SEQ ID NO: 115531 - DNA, 120 bp, Artificial Sequence
  ENSG00000100433_49 (sequence is synthesized)
gagagccaatgggcattttttcctggaaagagtacagctccatacccagtcctaacccaacagtgatatttatcactttggggcagggctgtatagagtgtgtgtgtgtgtgtgtgtgtg

SEQ ID NO: 115532 - DNA, 120 bp, Artificial Sequence
  ENSG00000100433_50 (sequence is synthesized)
gttgggccatctctggcctgttactaaggtaactaggactatttgtgttccagcagtcatagcctgtgattgtgggtgcatcagttctctgcctagatctcttgttaccttgtctgcaca

SEQ ID NO: 115533 - DNA, 120 bp, Artificial Sequence
  ENSG00000100433_51 (sequence is synthesized)
tcaagggagggagttgagcacagatacttgtcaagggccattgtagttgtgcagttctctaatgaaacactccctagtccatgagttcacaaaatttattaagattaaattataagttgg

SEQ ID NO: 115534 - DNA, 120 bp, Artificial Sequence
  ENSG00000100433_52 (sequence is synthesized)
atttgtgaataatgactaattaattgtcttgcccattttaggttaaggtgagagcttagtctcttgccctttgggatttgtcttttgggggattaatggagaccagatgtacttgggaga

SEQ ID NO: 115535 - DNA, 120 bp, Artificial Sequence
  ENSG00000100433_53 (sequence is synthesized)
ctggtgtccaaattcggatcatgccctgtgtaggctctctctatcctcccttatagctctttagtgtactgtcaccgggagggctcatgctgtgagggcattttttgcatggtgttaaga

SEQ ID NO: 115536 - DNA, 120 bp, Artificial Sequence
  ENSG00000100433_54 (sequence is synthesized)
aagactagttaaagaaattttaagctgttgttatttgcagtcaattgtagtacttcatgtatcatgaattcaagtactatgatcagacagacatctctctctctctcacacacacacaca

SEQ ID NO: 115537 - DNA, 120 bp, Artificial Sequence
  ENSG00000100433_55 (sequence is synthesized)
cacgcacacatacacacacacacacacacctgaggaaatggctgctttgggttctataaggaccattccatgtttaaagtcctagttgagctgaatgctaagaacctgcccccttgcctc

SEQ ID NO: 115538 - DNA, 120 bp, Artificial Sequence
  ENSG00000100433_56 (sequence is synthesized)
cctccctctgagatgatatcatttcctggcttcgtcaatgctgcctgtctatttgcatgctgggttctgaggactagtgagaaggtgaccagagtttgggtggggctggtttttacccac

SEQ ID NO: 115539 - DNA, 120 bp, Artificial Sequence
  ENSG00000100433_57 (sequence is synthesized)
tggatttggtgagaatatgaagcatccagtgtgtaccagggtttctgaaccacgggaaaggcgtaggaaaacaaacattcagagcccctgtaaaacgagaaaggaaaaaccagccagtgt

SEQ ID NO: 115540 - DNA, 120 bp, Artificial Sequence
  ENSG00000100433_58 (sequence is synthesized)
tgcattccacatctctgcttgttgcattttgctaatatggggttattctttctcactgttaggatgcaattgtgtgcaaagacagtggctgagtgaacagtaagagctggctagtaatgg

SEQ ID NO: 115541 - DNA, 120 bp, Artificial Sequence
  ENSG00000100433_59 (sequence is synthesized)
ccttaaaaagaaaaagggtaactctctgaaacaaagatcactttagtgtggcattgtggatgctgttaattctgcatagggaaactttggaacagcatgctaattacatggctgtaagca

SEQ ID NO: 115542 - DNA, 120 bp, Artificial Sequence
  ENSG00000100433_60 (sequence is synthesized)
aagccctgtcctctgtctctgcaccataccttcattggacttcaccaacccatccatactccatgtaaacctcagttctctcatgcctgccctaagtcagttgacatcagtgcagtggca

SEQ ID NO: 115543 - DNA, 120 bp, Artificial Sequence
  ENSG00000100433_61 (sequence is synthesized)
ttgaggagaaatgagaggtgtctctgattttactgaaagttattatcattttcacaggtgcctgagatttggtatctactttgtgttcttgattcttaggtgaaaaatctgaaatagttc

SEQ ID NO: 115544 - DNA, 120 bp, Artificial Sequence
  ENSG00000100433_62 (sequence is synthesized)
cctgtgcattaaaataaattattttgagaggactcctgctccgtcgattcagcagacctatgctgcagaaggtaactgcggaagctctcttttgctgtcagggctctgagcttgaaggga

SEQ ID NO: 115545 - DNA, 120 bp, Artificial Sequence
  ENSG00000100433_63 (sequence is synthesized)
gaaggtgcagtggtgcctagaagtgatatgcaaaccacctcacatgccagcctctggcctccttcccatcccagagtcacagacaggggacccagtgacaatgatgataaatccatgtgt

SEQ ID NO: 115546 - DNA, 120 bp, Artificial Sequence
  ENSG00000100433_64 (sequence is synthesized)
ggaggtgttttacttatttttctttccgtaggatttcatggtgctttaaaaaaaaaggcattttacagaaaataatgtggggggagggagatttcataatgttcttagggaaagtacaaa

SEQ ID NO: 115547 - DNA, 120 bp, Artificial Sequence
  ENSG00000100433_65 (sequence is synthesized)
acaaatttgcttgtgacatttcaataagctgtgctgctattgtctttatttgatgatgtaatttttttttcaatgatggagaaaaattgcaacaaagaccttctggaagatccaatccaa

SEQ ID NO: 115548 - DNA, 120 bp, Artificial Sequence
  ENSG00000100433_66 (sequence is synthesized)
aaccaagcgtgtctccggctgcaactccagcaagcgcgccgctgccgcctccacgcccgcccgccggccggccgagccatggccgttcccgcagcagcaccggtgtgccagcccaagagc

SEQ ID NO: 115549 - DNA, 120 bp, Artificial Sequence
  ENSG00000100439_0 (sequence is synthesized)
ctcccgggtcagctggtgctggcgtcaggcgctgggcgggctcgccaggacctggcaaggcttgtttactatggccgatgatctggagcagcagtctcaaggctggctgagtagctggct

SEQ ID NO: 115550 - DNA, 120 bp, Artificial Sequence
  ENSG00000100439_1 (sequence is synthesized)
gcccacgtggcgccccacttccatgtctcagctgaagaatgtggaagccaggatcctccagtgtctccagaataagttcctggccagatatgtatccctcccaaaccagaataagatctg

SEQ ID NO: 115551 - DNA, 120 bp, Artificial Sequence
  ENSG00000100439_2 (sequence is synthesized)
gacggtgactgtgagccccgagcaaaacgaccgcacccccttggtgatggtgcatggttttgggggcggcgtgggtctctggatcctcaacatggactcactgagtgcccgccgcacact

SEQ ID NO: 115552 - DNA, 120 bp, Artificial Sequence
  ENSG00000100439_3 (sequence is synthesized)
gcacaccttcgatctgcttggcttcgggcgaagctcaaggccagcattcccaagggacccggagggggctgaggatgagtttgtgacatcgatagagacatggcgggagaccatggggat

SEQ ID NO: 115553 - DNA, 120 bp, Artificial Sequence
  ENSG00000100439_4 (sequence is synthesized)
ccccagcatgatcctcctggggcacagtttgggaggattcctggccacttcttactcaatcaagtaccctgatagagttaaacacctcatcctggtggacccatggggctttcccctccg

SEQ ID NO: 115554 - DNA, 120 bp, Artificial Sequence
  ENSG00000100439_5 (sequence is synthesized)
accaactaaccccagtgagatccgtgcacccccagcctgggtcaaagccgtggcatctgtcctaggacgttccaatccattggctgttcttcgagtagctgggccctgggggcctggtct

SEQ ID NO: 115555 - DNA, 120 bp, Artificial Sequence
  ENSG00000100439_6 (sequence is synthesized)
ggtgcagcgattccggccggacttcaaacgcaagtttgcagacttctttgaagatgataccatatcagagtatatttaccactgcaacgcacagaatcccagtggtgagacagcattcaa

SEQ ID NO: 115556 - DNA, 120 bp, Artificial Sequence
  ENSG00000100439_7 (sequence is synthesized)
agccatgatggagtcctttggctgggcccggcgccctatgctggagcgaattcacttgattcgaaaagatgtgcctatcactatgatctacgggtccgacacctggatagataccagtac

SEQ ID NO: 115557 - DNA, 120 bp, Artificial Sequence
  ENSG00000100439_8 (sequence is synthesized)
gggaaaaaaggtgaagatgcagcggccggattcctatgtccgagacatggagattaagggtgcctcccaccatgtctatgctgaccagccacacatcttcaatgctgtggtggaggagat

SEQ ID NO: 115558 - DNA, 120 bp, Artificial Sequence
  ENSG00000100439_9 (sequence is synthesized)
ctgcgactcagttgattgagctgctctctgaagaggaagaggagaaagccagagagtcactcttacctccctgtctgcttactcacccactctgtcctttcctcaccaactaacatgtgc

SEQ ID NO: 115559 - DNA, 120 bp, Artificial Sequence
  ENSG00000100439_10 (sequence is synthesized)
cagccaggcagagtcttgtgctgttcccagaacaggacgacagtgaaaagaacactcttgaccctacactgaaggctgaaggcagaagccacaagaggccttgagtgccacccccaggga

SEQ ID NO: 115560 - DNA, 120 bp, Artificial Sequence
  ENSG00000100439_11 (sequence is synthesized)
agaacataaagggttgcacaatgccacccatccactccttgccaagtgttacccagatggtggaggatgtgaagggattgcaccaagccacattcactctctctgtggcctttcttcctc

SEQ ID NO: 115561 - DNA, 120 bp, Artificial Sequence
  ENSG00000100439_12 (sequence is synthesized)
tgggcaaagaagggcttccagtggcctttcctcactctgtagtgtttgtggggataggttccatgcaagaacaccttcctcctccatcccccacttcaccccatcccataccagttccat

SEQ ID NO: 115562 - DNA, 120 bp, Artificial Sequence
  ENSG00000100439_13 (sequence is synthesized)
ccagggtctgcttaactgccaagagcaggtcctggagttcccttcacctgcagagtccttttcatgacctaggaggtcttattcaaagccctcattgacagaggaggaaacaggccaagg

SEQ ID NO: 115563 - DNA, 120 bp, Artificial Sequence
  ENSG00000100439_14 (sequence is synthesized)
atggctggaccatggtgatacagctctgtgtgattcaagttctggcagagcttgtaaggctagagcccaggtctgccgacaccctgtgcttgttgcacacttgatttgctaaggctggag

SEQ ID NO: 115564 - DNA, 120 bp, Artificial Sequence
  ENSG00000100439_15 (sequence is synthesized)
acaggcaccattgccatggggctggtcctagtcactggccgaggataagcccgtccctgtcccacattctagccccactatgcgggggtgctgttgtcctgcctgtgtctcatccccggc

SEQ ID NO: 115565 - DNA, 120 bp, Artificial Sequence
  ENSG00000100439_16 (sequence is synthesized)
tgcctaagctagggacactcaagtgcttccttccttgccccatcttcctcccaactggaggcctctgagcctcccctgtgccttgggccctgaagccccatatgtagtatagagcaaagg

SEQ ID NO: 115566 - DNA, 120 bp, Artificial Sequence
  ENSG00000100439_17 (sequence is synthesized)
tggctcctggtgaagagagggtggaaaggcccttcagccccagggccatgtctgggttctccatgcccatcagtctctgcagtttctctacctgcccccagagctgaggccatctgcaag

SEQ ID NO: 115567 - DNA, 120 bp, Artificial Sequence
  ENSG00000100439_18 (sequence is synthesized)
cccctgcccatggcccaatggggagcctccagccacaagttccctgtccttatcagccactgggtggttcccactgcatgaccctctatccctgccatctgtccccatggtttccagctc

SEQ ID NO: 115568 - DNA, 120 bp, Artificial Sequence
  ENSG00000100439_19 (sequence is synthesized)
aatccacccctgacccatctgtcagctttttcccagggagccgtttcaggggttctgggcagtaggctgggcctggcctcagaacctggtggctcctgcctgctccttcacttttgtaaa

SEQ ID NO: 115569 - DNA, 120 bp, Artificial Sequence
  ENSG00000100439_20 (sequence is synthesized)
accatccccttcaccagaatggtattaactcctggtgctttgtactactggtccagctgccctgggctccttttctatattaataaagaaacgagtaaaaattaccggtggggatgatgt

SEQ ID NO: 115570 - DNA, 120 bp, Artificial Sequence
  ENSG00000100439_21 (sequence is synthesized)
ttaaaattgctctgatcactggtggtgctgaattcgcaacagcctgtgtgatgcctgagagaagggagtcctgagggttgcctgcctacccacgactccttctccttttagtgtggcgtt

SEQ ID NO: 115571 - DNA, 120 bp, Artificial Sequence
  ENSG00000100439_22 (sequence is synthesized)
tgcccgctagacccagcccagagtccaggtcagcacaggccctctcagccaaccactcatgacaaatgaggagtcgagatccacagtgtggatggggcaagccccagttcacagtagaga

SEQ ID NO: 115572 - DNA, 120 bp, Artificial Sequence
  ENSG00000100439_23 (sequence is synthesized)
ggtggaacttagtacttcctgctgcccattagacaccctttcttcctaagttcaagggaagcccacacatgtactgctccctgcatcctgctctaacttcctctcatcctctggatctca

SEQ ID NO: 115573 - DNA, 120 bp, Artificial Sequence
  ENSG00000100439_24 (sequence is synthesized)
gctcaaatattccttatgcagagatgccttcccctgattccctaaactagactcggacccctctgttctgcatctctgtggcatatcatctgccccttttgtaaaacttataaacttgtg

SEQ ID NO: 115574 - DNA, 120 bp, Artificial Sequence
  ENSG00000100439_25 (sequence is synthesized)
gttacttgtttagcgtctctttcctccccagaccataagcaacataaagacaaagggtacatctagcacatagttcgtgttcaataaatgtttgttttcatcatgccacgggaagtgaga

SEQ ID NO: 115575 - DNA, 120 bp, Artificial Sequence
  ENSG00000100439_26 (sequence is synthesized)
tataccaagtattcaaaaaagtgttcaaatcattactaacagtgcttgctctgtgctggctgagtccagctgggcccagaattccacggttctaaatggcgcatattccatgtgcatagg

SEQ ID NO: 115576 - DNA, 120 bp, Artificial Sequence
  ENSG00000100439_27 (sequence is synthesized)
ctgattgaaaatgtattaaacctaaattttaaaaaaaaagcacatgatactacacatgtcatgatgaatgaatagacagaactcctcctgaatataattacaaagttctgatccatctca

SEQ ID NO: 115577 - DNA, 120 bp, Artificial Sequence
  ENSG00000100439_28 (sequence is synthesized)
cacattgctggtctcaaggctggctgagtagctggctgcccacgtggcgccccacttccatgtctcagctgaagaatgtggaagccaggatcctccagtgtctccagaataagttcctgg

SEQ ID NO: 115578 - DNA, 120 bp, Artificial Sequence
  ENSG00000100439_29 (sequence is synthesized)
gctccatccctcgtgacctaattcctggccttactgggaactttccagtattcatttccaaacttctctcattcccaggcgatttaaggggctatggcaactaccagagaatataatgtg

SEQ ID NO: 115579 - DNA, 120 bp, Artificial Sequence
  ENSG00000100439_30 (sequence is synthesized)
gtgtctttcccacttattcctaaaaagtggaaattggcctagccttgttatttaaagctgttaatctgaaccagatcactttgttcaaggtttgagaaggttttttgtttttttgttttg

SEQ ID NO: 115580 - DNA, 120 bp, Artificial Sequence
  ENSG00000100439_31 (sequence is synthesized)
ttgtttactatggccgatgatctggagcagcagtgagttaatcctgtccctttctctctttctctctctctctctgggccatgatcctgggactgtctgtggctgaggaacagttgtaga

SEQ ID NO: 115581 - DNA, 120 bp, Artificial Sequence
  ENSG00000100441_0 (sequence is synthesized)
gggagagaaaggagggatgaagccgcctgcccactggacgggagggctgcagccagagcttcagggcagccctgctggatgggacagcactgagggctggacctggggggatggagaaca

SEQ ID NO: 115582 - DNA, 120 bp, Artificial Sequence
  ENSG00000100441_1 (sequence is synthesized)
tgggctgggggcagcagccatgcctacctggggggcccgccccgcgtccccagatcgctttgcggtgtctgcggaggctgagaacaaggttcgggaacagcagccccatgtggagcgcat

SEQ ID NO: 115583 - DNA, 120 bp, Artificial Sequence
  ENSG00000100441_2 (sequence is synthesized)
cttcagcgtgggggtgagcgtccttccgaaggactgtccggacaacccccacatctggctgcagctggagggccccaaggaaaacgccagcagagccaaggagtacctgaagggcctctg

SEQ ID NO: 115584 - DNA, 120 bp, Artificial Sequence
  ENSG00000100441_3 (sequence is synthesized)
cagcccagaactgcaggatgaaatccactacccgcccaaactgcactgcatctttctgggagcccagggcttcttccttgactgcctggcctggagcacgtcagcccatctggtgcccag

SEQ ID NO: 115585 - DNA, 120 bp, Artificial Sequence
  ENSG00000100441_4 (sequence is synthesized)
ggcgccaggctcactgatgatcagtggcctgactgaagcctttgtcatggctcagagccgggtagaagagctggcagagcggctgagctgggacttcacgccaggaccatcttccggagc

SEQ ID NO: 115586 - DNA, 120 bp, Artificial Sequence
  ENSG00000100441_5 (sequence is synthesized)
ctctcagtgtactggagtgctgagagacttctctgccctgctgcagtccccgggggatgcccatagagaggctctgttgcagttgcccctggctgtccaggaggagctgctgagtctggt

SEQ ID NO: 115587 - DNA, 120 bp, Artificial Sequence
  ENSG00000100441_6 (sequence is synthesized)
gcaggaggcgtctagtgggcaggggccaggagcactggcttcttgggaggggcggagctcagccttgctgggtgctcagtgccaaggagtgagagctccccctagtgacggcagggagtc

SEQ ID NO: 115588 - DNA, 120 bp, Artificial Sequence
  ENSG00000100441_7 (sequence is synthesized)
cctggacactggatctatgggacccggagattgcaggggagcaaggggagacacttacgctgtggagaaggagggagggaaacagggtggtcccagggagatggattgggggtggaagga

SEQ ID NO: 115589 - DNA, 120 bp, Artificial Sequence
  ENSG00000100441_8 (sequence is synthesized)
gttgcctggggaagaggcgtgggagagagaagtggccctcaggccacagtcagtgggtggaggggcaagggagtcagcacccctgaaagggaaggccctggggaaggaggagatagctct

SEQ ID NO: 115590 - DNA, 120 bp, Artificial Sequence
  ENSG00000100441_9 (sequence is synthesized)
gggaggaggagggttctgtgtccaccgtgagcctcccggtgcccatggctcctgtcacagggcagctcagtcccgaggagcctccctcctccagcggctccacaatgggaatgcctctcc

SEQ ID NO: 115591 - DNA, 120 bp, Artificial Sequence
  ENSG00000100441_10 (sequence is synthesized)
tccgagggtgcccagccctccacctgcaccggaacccccatggcactgtggagaccggggtgactgcggagaccggggagacgtgggggacaggggagacaagcagcagggcatggcacg

SEQ ID NO: 115592 - DNA, 120 bp, Artificial Sequence
  ENSG00000100441_11 (sequence is synthesized)
gggtcgggggcctcaatggaaacgaggcgcccgagggggcaacttggtgactggcacacagcgtttcaaggaggccctgcaggatcctttcaccctgtgccttgccaatgtgcctggcca

SEQ ID NO: 115593 - DNA, 120 bp, Artificial Sequence
  ENSG00000100441_12 (sequence is synthesized)
gccagacctccgccatattgtcattgacggcagcaacgtggccatggtgcatggcctccagcactacttctccagccggggcattgccattgctgtgcagtacttctgggaccgtggtca

SEQ ID NO: 115594 - DNA, 120 bp, Artificial Sequence
  ENSG00000100441_13 (sequence is synthesized)
ccgtgacataactgtctttgtgcctcagtggcgcttcagtaaggatgccaaagtcagagagagtcacttcctgcaaaagctgtattccctcagcctgctctccctcacaccctcacgagt

SEQ ID NO: 115595 - DNA, 120 bp, Artificial Sequence
  ENSG00000100441_14 (sequence is synthesized)
catggatggcaagaggatctcctcctatgatgacaggttcatggtgaagctggctgaagagacagatgggataattgtctccaatgaccagttccgggacctggcggaggagtctgagaa

SEQ ID NO: 115596 - DNA, 120 bp, Artificial Sequence
  ENSG00000100441_15 (sequence is synthesized)
gtggatggcaatcatcagagaacgcctgctgccctttacctttgtgggaaacctcttcatggtacctgatgacccactggggcgaaacggccccaccctggatgaatttctgaagaagcc

SEQ ID NO: 115597 - DNA, 120 bp, Artificial Sequence
  ENSG00000100441_16 (sequence is synthesized)
agccaggacacaggggtcttctaaggctcagcatccttccaggggctttgcagaacatggtaaacagcagcaggggagagaagaggaaaaaggtagtggtggcattcggaagacccggga

SEQ ID NO: 115598 - DNA, 120 bp, Artificial Sequence
  ENSG00000100441_17 (sequence is synthesized)
aacagagcggctccggcggcagctgctggaggtgttttggggtcaggatcacaaagtggacttcatcctgcagcgggagccatactgccgggacatcaaccaactgtctgaggccctgct

SEQ ID NO: 115599 - DNA, 120 bp, Artificial Sequence
  ENSG00000100441_18 (sequence is synthesized)
cagtcttaacttttgagcctcacctgcttgagtggctgccgccctgtcagctccagccgcctccagctcagccctttctgtgagagtccctctgctgctcactctgatccagaggcaccc

SEQ ID NO: 115600 - DNA, 120 bp, Artificial Sequence
  ENSG00000100441_19 (sequence is synthesized)
tgagttggtgctttggatcagggaagccactttgggacaggtccataaagtgaactgatcttaccgagtcaggacctcagccagctctcaagaggttctgctcagccttaacttctcaac

SEQ ID NO: 115601 - DNA, 120 bp, Artificial Sequence
  ENSG00000100441_20 (sequence is synthesized)
tttgccttagcacagggtttctgtagggagtgggggctgctagaggggattagttccggagactgagactgttggctccacctccaagctgagctagggtggagggcagggtgggcagga

SEQ ID NO: 115602 - DNA, 120 bp, Artificial Sequence
  ENSG00000100441_21 (sequence is synthesized)
agtgacaggaagttaagctgttcctctccctggctgctgctctggatggccagagaacaagatgctcccttgctgagctcctgggagcgtggaaggagatgctaggccctggcacagtgt

SEQ ID NO: 115603 - DNA, 120 bp, Artificial Sequence
  ENSG00000100441_22 (sequence is synthesized)
tatgtggactgggccacgatagggtggagtgagctagtgaagaaggcagagggagacttggcttctggtctcagctatgcctgttttgtgaccttgattgagttgcttgggctttacttc

SEQ ID NO: 115604 - DNA, 120 bp, Artificial Sequence
  ENSG00000100441_23 (sequence is synthesized)
tgcctacaaatcaggggtaaaaatacctgttgggaggagaaatgagaacatagaggaaagcctcttggaggaaaggtgcttggaccaagtctcaggtgtgtctgcctgtggctgcacagg

SEQ ID NO: 115605 - DNA, 120 bp, Artificial Sequence
  ENSG00000100441_24 (sequence is synthesized)
ctctctaaccgaaacctcactttcagagagatgtgggtcctttgtctccaggatccacaccctagattttaacactgcattctcactataacgtgccctataatggctgcatcccttttg

SEQ ID NO: 115606 - DNA, 120 bp, Artificial Sequence
  ENSG00000100441_25 (sequence is synthesized)
agcaacctccaaaatctacatttacacagtaggtaaattagggatgactgcattatcaaaatactctcagggttcctataaatggcagctctcctgttgtattcaggtgttgtttacaga

SEQ ID NO: 115607 - DNA, 120 bp, Artificial Sequence
  ENSG00000100441_26 (sequence is synthesized)
ctaacaaatgtgttggcaaatccctggttagatgcacttcctggtgttgagatgaacacgtcgatttttcaccaatcgatgaagccatgctctgcaatgacaatattaatgtgatccgac

SEQ ID NO: 115608 - DNA, 120 bp, Artificial Sequence
  ENSG00000100441_27 (sequence is synthesized)
cctaacattttctctatggaagacgtatgttgcataaagcaaggcacacttctgctttatgtgtgtgtgtatggggatgggaggacttaacggaagttgaaccagttggttctagatgaa

SEQ ID NO: 115609 - DNA, 120 bp, Artificial Sequence
  ENSG00000100441_28 (sequence is synthesized)
tatctggaaaatgaaagaaccagagttggaaggcacttgactggccaccagaccaactctgctgttactgacatgctttcttcaccctgattcctagaggtcattgccctggatctgctt

SEQ ID NO: 115610 - DNA, 120 bp, Artificial Sequence
  ENSG00000100441_29 (sequence is synthesized)
gaagtcctcctgtgccagggaatttactatctccagggtagcacattccctgtgtagacggtattaatcagtactccttactttagtgcagcctaaagtatgcttttctgttacatccac

SEQ ID NO: 115611 - DNA, 120 bp, Artificial Sequence
  ENSG00000100441_30 (sequence is synthesized)
ctttgaggctggtcatacctccaggaacaatacagagccagtcaacttcctggaatccaagaccagataaagaagtaggacaggtgcccctgggttctgttctgtgtgggcctgtgggga

SEQ ID NO: 115612 - DNA, 120 bp, Artificial Sequence
  ENSG00000100441_31 (sequence is synthesized)
gtctctagacaagatcttttccaggccctgacttctgcctccctctgagtggcacagggagttgaatactgcatggcgagtgtaatgatgatggggagggtccttgtgtcctcacccctt

SEQ ID NO: 115613 - DNA, 120 bp, Artificial Sequence
  ENSG00000100441_32 (sequence is synthesized)
cctttttggtgatttacaccactgtaccatactgacccaggctgggggcaggtgtgttggagacaggctggtcaaagaggtgacaatgattaagagataacccagcggtccctgagaaga

SEQ ID NO: 115614 - DNA, 120 bp, Artificial Sequence
  ENSG00000100441_33 (sequence is synthesized)
gattggttagtatggcctgaactggtggctgggggaactgtgtctggtcaagttatggcagatgtcacagctttaggtaggtaaaaagggtcctagatgaaaaccttggagttttttttt

SEQ ID NO: 115615 - DNA, 120 bp, Artificial Sequence
  ENSG00000100441_34 (sequence is synthesized)
ttcctgatagggttgtttatacttcttgattggtttcttgccattttcactttcagtgatggtgggtgtgcagtagaccaaaagtgtcttctgcccttttgtgctaagggccctggttga

SEQ ID NO: 115616 - DNA, 120 bp, Artificial Sequence
  ENSG00000100441_35 (sequence is synthesized)
ctgagtggccccagtcagatgagaggcaagtcctaagcttcttatagacagggatgttgactttgttctgctgcagcctgataaactgggaccactgtgtggttagtaatgcacttgcca

SEQ ID NO: 115617 - DNA, 120 bp, Artificial Sequence
  ENSG00000100441_36 (sequence is synthesized)
tttggtgacacagactgaaggctatcctacacctgggccttacctcttcctctactggcatcctaatggcactctgacagcatccagggtgactacagggcccattggaaatggatcatc

SEQ ID NO: 115618 - DNA, 120 bp, Artificial Sequence
  ENSG00000100441_37 (sequence is synthesized)
attctctcttctagtgtctatctttatcataacctgatgtcccaaacttgtgacaagttcttttggcaactgaaggaccaagaagggaaacggtgatgagagagactgctcattgtaact

SEQ ID NO: 115619 - DNA, 120 bp, Artificial Sequence
  ENSG00000100441_38 (sequence is synthesized)
ttcaaaaccccgtctttggggaagaatcatctagggtgacattccttgaagtaaatcccaggagaatctaggccaaagagatgagccaaggttagtgagacaatttatttttattgccta

SEQ ID NO: 115620 - DNA, 120 bp, Artificial Sequence
  ENSG00000100441_39 (sequence is synthesized)
aactgcagagcattctctacacagcgtaaaggagaagtggggcagctgcaggacatgtagagaaaccaaactgggaaatcttacaaggagttgaaaagattaatgtcccaacctgatgag

SEQ ID NO: 115621 - DNA, 120 bp, Artificial Sequence
  ENSG00000100441_40 (sequence is synthesized)
attacggccttgagacaataaggtggagcaacagaacaatgggaaagaggactgggagaggaatctaagaaccagatggcttcagctctctagaggagctgagcctattcacagtgccta

SEQ ID NO: 115622 - DNA, 120 bp, Artificial Sequence
  ENSG00000100441_41 (sequence is synthesized)
acctggaagcctgtgaggaacaggcctcaggcccttgccacgacctacttaggctacaatttcctttaaggcagcccctagctctgggaaggaatactggtagccagtggccagtgttcg

SEQ ID NO: 115623 - DNA, 120 bp, Artificial Sequence
  ENSG00000100441_42 (sequence is synthesized)
ctgtgggatcaccttctggccctccagcagcatgatggcacgctgtcgcccaaagacagcttgcaccacagcgctggggagagggatgaaggctcggcggcccagggcagcacccaaggt
